(19) United States
(12) Patent Application Publication
(10) Pub. No.: US 2022/0259616 A1
(43) Pub. Date: Aug. 18, 2022

(54) A Platform for T Lymphocyte Genome Engineering and In Vivo High-Throughput Screening Thereof

(71) Applicant: YALE UNIVERSITY, New Haven, CT (US)

(72) Inventors: Sidi Chen, Milford, CT (US); Matthew Dong, San Francisco, CA (US)

(21) Appl. No.: 16/605,715

(22) PCT Filed: Apr. 17, 2018
(86) PCT No.: PCT/US2018/027967

§ 371 Date: Oct. 16, 2019

Related U.S. Application Data
(60) Provisional application No. 62/602,290, filed on Apr. 18, 2017.

(51) Int. Cl. C12N 15/85; C12N 15/11; C12N 5/0783; G01N 15/14

(52) U.S. Cl. CPC C12N 15/85; C12N 15/111; C12N 5/0638; G01N 15/14; A01K 2227/105; C12N 2740/16043; A01K 2227/101; A01K 2267/03; C12N 2310/20; C12N 2510/00; A01K 2217/15

(57) ABSTRACT

The present invention includes compositions and methods for T cell genome editing and screening in vivo. In certain aspects, the invention includes an sgRNA library for genome-scale mutagenesis.

### CROSS-REFERENCE TO RELATED APPLICATION

[0001] The present application is a 35 U.S.C. § 371 national phase application from, and claims priority to, International Application No. PCT/US2018/027967, filed Apr. 17, 2018, and published under PCT Article 21(2) in English, which is entitled to priority under 35 U.S.C. § 119(e) to U.S. Provisional Patent Application No. 62/602,290 filed Apr. 18, 2017, each of which is incorporated herein by reference in its entirety.

### STATEMENT REGARDING FEDERALLY SPONSORED RESEARCH OR DEVELOPMENT

[0002] This invention was made with government support under CA209992, CA121974, CA196530, and GM007205 awarded by the National Institutes of Health. The government has certain rights in the invention.

### SEQUENCE LISTING

[0003] The instant application contains a Sequence Listing which has been submitted in ASCII format via EFS-Web and is hereby incorporated by reference in its entirety. Said ASCII copy, created on Mar. 20, 2020, is named 047162-7121US1_SequenceListing_ST25.txt and is 29,900 kilobytes in size.

### BACKGROUND OF THE INVENTION

[0004] CD8⁺ T cells play a central role in maintaining the cellular integrity of the body by mounting cell-mediated adaptive immune responses against intracellular pathogens and tumors. Selective activation of pathogen-specific CD8⁺ T cells is mediated by the recognition of cognate antigen on surface major histocompatibility complex (MHC) class I (MHC-I), which results in T cell proliferation, cytokine secretion, and the selective killing of target cells. Defects in this cell population can lead to recurrent infections or cancer, while dysregulated activation of CD8⁺ T cells can cause autoimmunity and severe immunopathology.

[0005] CD8⁺ T cells have become the focus of many new cancer therapeutics due to their specificity for intracellular antigens and their role in cell-mediated immune responses. The most potent drugs recently developed are immune checkpoint inhibitors. This new class of drugs enhances the anti-tumor response of CD8⁺ T cells by neutralizing the activity of CTLA-4 or PD-1. Blocking the activity of CTLA-4 permits the activation of naive CD8⁺ T cells in the absence of sufficient antigen. Inhibiting PD-1 activity reinvigorates exhausted CD8⁺ T cells to proliferate and kill malignant cells. These drugs have been shown to be effective in treating multiple cancer types including melanoma and lung cancer. Ongoing studies are being conducted looking at the efficacy of these drugs used either as monotherapy or in combinations. Further studies have identified 4-1BB, CD27, CD28, ICOS, LAG3, OX-40, TIM3, and VISTA for potential checkpoint modulation. Newer therapeutics have adapted CD8⁺ T cell machinery to activate under the control of a transgenically expressed chimeric antigen receptor (CAR-T). This method has proven to be effective at treating hematopoietic malignancies. Although checkpoint blockade and CAR-T immunotherapies have been shown to be effective when conventional therapies have failed, these modes of therapy are still in early stage of development, as a large fraction of patients do not respond or have undesired side effects. More systematic approaches shall be used to identify new regulators of T cell functions to better enhance the body's anti-tumor response.

[0006] Studies using gene-set specific RNAi/shRNA libraries have been used to identify novel T cell genes that enhance CD8⁺ T cell function and cytokine production. These molecular tools operate by suppressing the translation of targeted mRNA through complementary binding, but the effects of RNAi are limited by the expression levels of the targeted mRNA as well as the introduced small interfering RNA.

[0007] The development and application of CRISPR technologies have dramatically enhanced the ability to perform genome editing. High-throughput genetic screens have been developed and utilized for discovery of novel genes in multiple applications. Application of CRISPR targeting in T cell is a first step to manipulate its genome, which, together with the screening technology, leads to the hypothesis that high-throughput genetic screening will open the door for unbiased discovery of key factors in T cell biology in a massively parallel manner. However large-scale genome editing of T cells have not been reported, possibly due to multiple technological obstacles, the complexity of lymphocyte repertoires, the tissue architecture of lymphoid or non-lymphoid organs, or the tumor microenvironment.

[0008] There is a need in the art for compositions and methods that can be used for large-scale genome editing in T cells. The present invention satisfies this need.

### SUMMARY OF THE INVENTION

[0009] As described herein, the present invention relates to compositions and methods for T cell genome editing and screening in vitro and in vivo.

[0010] One aspect of the invention includes a vector comprising a 5′ long terminal repeat (LTR) sequence, a U6 promoter sequence, a BsmB1 restriction site, an EFS sequence, an sgRNA expression cassette, a Thy1.1 cassette, a 3′ LTR sequence and an ampicillin resistance gene sequence (AmpR).

[0011] Another aspect of the invention includes an sgRNA library comprising a plurality of vectors, wherein each vector comprises an expression cassette for an sgRNA comprising a nucleotide sequence selected from the group consisting of SEQ ID NOs: 1-129,209.

[0012] Yet another aspect of the invention includes an sgRNA library comprising a plurality of vectors, wherein each vector comprises an expression cassette for an sgRNA comprising a nucleotide sequence selected from the group consisting of SEQ ID NOs: 129,222-140,680.

[0013] Another aspect of the invention includes a method of performing genome editing and screening of a T cell in vitro. The method comprises contacting the T cell with Cas9 and an sgRNA library. The sgRNA library comprises a plurality of vectors, wherein each vector comprises an expression cassette for an sgRNA comprising a nucleotide sequence selected from the group consisting of SEQ ID NOs: 1-129,209. The T cell undergoes genome editing and the T cell is screened in vitro.

[0014] Still another aspect of the invention includes a method of performing genome editing and screening of a T cell in vitro. The method comprises contacting the T cell with Cas9 and an sgRNA library. The sgRNA library comprises a plurality of vectors, wherein each vector comprises an expression cassette for an sgRNA comprising a nucleotide sequence selected from the group consisting of SEQ ID NOs: 129,222-140,680. The T cell undergoes genome editing and the T cell is screened in vitro.

[0015] Yet another aspect of the invention includes a method of performing genome editing and screening of a T cell in vivo. The method comprises contacting an isolated T cell with Cas9 and an sgRNA library. The sgRNA library comprises a plurality of vectors, wherein each vector comprises an expression cassette for an sgRNA comprising a nucleotide sequence selected from the group consisting of SEQ ID NOs: 1-129,209. The T cell undergoes genome editing to generate a modified T cell. The modified T cell is administered to an animal and the T cell is screened in vivo.

[0016] Another aspect of the invention includes a method of performing genome editing and screening of a T cell in vivo. The method comprises contacting an isolated T cell with Cas9 and an sgRNA library. The sgRNA library comprises a plurality of vectors, wherein each vector comprises an expression cassette for an sgRNA comprising a nucleotide sequence selected from the group consisting of SEQ ID NOs: 129,222-140,680. The T cell undergoes genome editing to generate a modified T cell. The modified T cell is administered to an animal and the T cell is screened in vivo.

[0017] In some embodiments, Cas9 is encoded in a vector. In some embodiments, Cas9 is a protein.

[0018] Still another aspect of the invention includes a kit comprising an sgRNA library comprising a plurality of vectors, wherein each vector comprises an expression cassette for an sgRNA comprising a nucleotide sequence selected from the group consisting of SEQ ID NOs: 1-129,209, and instructional material for use thereof.

[0019] Yet another aspect of the invention includes a kit comprising an sgRNA library comprising a plurality of vectors, wherein each vector comprises an expression cassette for an sgRNA comprising a nucleotide sequence selected from the group consisting of SEQ ID NOs: 129,222-140,680, and instructional material for use thereof.

[0020] Another aspect of the invention includes a vector comprising a 5′ long terminal repeat (LTR) sequence, a U6 promoter sequence, a BsmB1 restriction site, an EFS sequence, an sgRNA expression cassette, an mCherry sequence, a 2A peptide, a cOVA sequence, a 3′ LTR sequence and an ampicillin resistance gene sequence (AmpR).

[0021] Still another aspect of the invention includes a vector comprising a 5′ inverted terminal repeat (ITR) sequence, a U6 promoter sequence, a BbsI restriction site, an sgRNA expression cassette, an EFS sequence, a SB100x cassette, a 3′ ITR sequence and an ampicillin resistance gene sequence (AmpR).

[0022] Yet another aspect of the invention includes a vector comprising a 5′ inverted terminal repeat (ITR) sequence, a U6 promoter sequence, a BbsI restriction site, an sgRNA expression cassette, an EFS sequence, a SB100x cassette, a Thy1.1 cassette, a 3′ ITR sequence and an ampicillin resistance gene sequence (AmpR).

[0023] Another aspect of the invention includes a vector comprising a 5′ inverted terminal repeat (ITR) sequence, a U6 promoter sequence, a BbsI restriction site, an sgRNA expression cassette, a 3′ ITR sequence and an ampicillin resistance gene sequence (AmpR).

[0024] Still another aspect of the invention includes a vector comprising a 5′ inverted terminal repeat (ITR) sequence, a U6 promoter sequence, a BbsI restriction site, an sgRNA expression cassette, an EFS sequence, a Thy1.1 cassette, a 3′ ITR sequence and an ampicillin resistance gene sequence (AmpR).

[0025] Yet another aspect of the invention includes a vector comprising a 5′ inverted terminal repeat (ITR) sequence, a U6 promoter sequence, a BbsI restriction site, an sgRNA expression cassette, an EFS sequence, a SB100x cassette, a GFP-NLS fusion cassette, a 3′ ITR sequence and an ampicillin resistance gene sequence (AmpR).

[0026] In various embodiments of the above aspects or any other aspect of the invention delineated herein, the vector comprises the nucleic acid sequence selected from the group consisting of SEQ ID NO: 129,213, SEQ ID NO: 129,214, and SEQ ID NO: 129,215.

[0027] In one embodiment, the sgRNA expression cassette expresses an sgRNA comprising a nucleotide sequence selected from the group consisting of SEQ ID NOs: 1-129,209. In another embodiment, the sgRNA expression cassette expresses an sgRNA comprising a nucleotide sequence selected from the group consisting of SEQ ID NOs: 129,222-140,680. In yet another embodiment, the sgRNA expression cassette expresses an sgRNA consisting of a nucleotide sequence selected from the group consisting of SEQ ID NOs: 1-129,209. In still another embodiment, the sgRNA expression cassette expresses an sgRNA consisting of a nucleotide sequence selected from the group consisting of SEQ ID NOs: 129,222-140,680.

[0028] In one embodiment, each vector comprises an expression cassette for an sgRNA consisting of a nucleotide sequence selected from the group consisting of SEQ ID NOs: 1-129,209. In another embodiment, each vector comprises an expression cassette for an sgRNA consisting of a nucleotide sequence selected from the group consisting of SEQ ID NOs: 129,222-140,680.

[0029] In one embodiment, the plurality of vectors comprise a 5′ long terminal repeat (LTR) sequence, a U6 promoter sequence, a BsmB1 restriction site, an EFS sequence, an sgRNA expression cassette, a Thy1.1 cassette, a 3′ LTR sequence and an ampicillin resistance gene sequence (AmpR).

[0030] In one embodiment, the T cell is selected from the group consisting of: a CD8+ cell, a CD4+ cell, or a T regulatory (Treg) cell, a Th1 cell, a Th2 cell, a Th17 cell, a follicular helper T cell (Tfh), a T memory cell, a T effector cell, a T effector memory cell, an engineered T cell, and a CART cell.

[0031] In one embodiment, the method further comprises isolating and/or enriching a modified T cell.

[0032] In one embodiment, the animal is a human. In one embodiment, the condition is cancer.

[0033] In one embodiment, the screening provides information about a gene involved in a condition afflicting the animal. In another embodiment, screening comprises at least one method selected from the group consisting of nucleotide sequencing, sgRNA PCR, and flow cytometry.

[0034] In one embodiment, the kit further comprises Cas9. In some embodiments, Cas9 is encoded in a vector. In some embodiments, Cas9 is a protein.

[0035] In one embodiment, the vector comprises the nucleic acid sequence of SEQ ID NO: 129,216. In another embodiment, the vector comprises the nucleic acid sequence of SEQ ID NO: 129,217. In yet another embodiment, the vector comprises the nucleic acid sequence of SEQ ID NO: 129,218. In still another embodiment, the vector comprises the nucleic acid sequence of SEQ ID NO: 129,219. In one embodiment, the vector comprises the nucleic acid sequence of SEQ ID NO: 129,220. In another embodiment, the vector comprises the nucleic acid sequence of SEQ ID NO: 129,221.

### BRIEF DESCRIPTION OF THE DRAWINGS

[0036] The following detailed description of specific embodiments of the invention will be better understood when read in conjunction with the appended drawings. For the purpose of illustrating the invention, there are shown in the drawings exemplary embodiments. It should be understood, however, that the invention is not limited to the precise arrangements and instrumentalities of the embodiments shown in the drawings.

[0037] FIGS. 1A-1K are a series of plots and images depicting in vivo analysis of genome-scale CRISPR library mutagenized CD8⁺ T cells after adoptive transfer into wildtype mice. FIG. 1A is a schematic of the design of a T cell CRISPR knockout vector, which contains an sgRNA expression cassette and a Thy1.1 expression cassette. FIG. 1B shows the schematics of an experiment described herein involving: library cloning, virus production, naive CD8⁺ T cell isolation and infection, adoptive transfer, and CRISPR-targeted CD8⁺ T_{eff} cell survival analysis in organs by high-throughput sgRNA sequencing. Organs collected include the liver, pancreas, lung, muscle and brain as representative non-lymphoid organs, and the spleen and several types of lymph nodes (LNs) as lymphoid organs. The LNs collected include three groups: LN1—skin draining lymph nodes (sLNs) that are comprised of inguinal, axillary, and brachial lymph nodes; LN2—cervical lymph nodes (cLNs) that entail the 6 superficial lymph nodes; and LN3—abdominal lymph nodes (aLNs) include the mesenteric and the pancreatic lymph nodes. FIG. 1C is a set of FACS plots showing naive Cas9 CD8⁺ T cell infectivity with lentivirus encoding the genome-scale CRISPR library (MKO). Thy1.1 surface staining shows a population of transduced T cells with a significantly elevated Thy1.1 expression compared to untransduced. FIG. 1D is a dot plot of the number of detected sgRNAs for all organ samples, grouped by organ type. Number of samples for each type are: LN (n=20 total, 3 per mouse, 7 mice total. LN3 is not available for m4), spleen, brain, liver, lung, muscle and pancreas (n=7 each, one per mouse, 7 mice total). Data are shown as mean±s.e.m. FIGS. 1E-1F are pie charts of sgRNA compositions in representative organs. SgRNAs that comprised ≥2% of total reads for each sample are shown, with the remaining reads classified as “Other.” For clarity, only the gene names associated with each sgRNA are shown. Monoclonal (one major clones with >=90% of total reads), oligoclonal (3 to 10 major clones each with >=2% of total reads) and polyclonal (more than 10 clones with 2% or more reads) compositions of T cell variants exist in various organs such as LN, spleen, liver, pancreas, lung, brain and muscle. FIG. 1G is a box-dot plot of overall sgRNA library representation in all samples, including plasmid library (blue, n=1), cellular libraries of pre-injection library-infected naive CD8⁺ T cells (green, n=3), and various organs containing CD8⁺ T_{eff} cells from multiple mice 7 days post-injection (orange, n=7 mice, 62 total samples). SgRNA representation is depicted in terms of log₂ reads per million (rpm). Analyzed tissues include the lymph node (LN), spleen, brain, liver, lung, muscle, and pancreas. FIG. 1H shows correlation analysis of sgRNA library representation in all samples from the genome-scale screen for trafficking and survival in CD8⁺ T cells with diverse TCR. Heatmap of pairwise Pearson correlations of sgRNA library representation across all samples in the first WT screen using Cas9 CD8⁺ T cells that have a diverse TCR repertoire. Samples included plasmid library (n=1), cellular libraries of pre-injection library-infected naive CD8⁺ T cells (n=3), and various organs containing CD8+ T_{eff} cells from multiple mice 7 days post-injection (n=7 mice, 62 total samples). Correlations were calculated based on log₂ rpm values. Cell and plasmid samples were highly correlated with each other, while organ samples were mostly correlated with other organ samples. FIG. 1I is a waterfall plot of the top sgRNAs across all organs ranked by number of organs being enriched in (FDR <0.5%). Inset shows all sgRNAs significantly enriched in ≥20% of organ samples. FIG. 1J is a barplot of the number of genes with 0, 1, 2 or 3 independent sgRNAs that were significantly enriched in at least one organ sample (FDR <0.5%). A total of 115 genes were found to have at least 2 independent sgRNAs enriched. Cd247, Bpifb3, and Tsc2 were found to have 3 independent enriched sgRNAs. FIG. 1K is a Venn diagram of the three enrichment criteria to identify the top gene hits (≥2% read abundance in one sample (n=227), significant in ≥20% of samples (considering all associated sgRNAs) (n=118), and ≥2 independent enriched sgRNAs (n=115)). A total of 11 genes satisfied all three criteria (Apc, Cd247, Csnk1a1, Fam103a1, Fam134b, Nf1, Pdcd1, Phf21a, Prkar1a, Rab11b, and Tsc2).

[0038] FIGS. 2A-2G are a series of plots and images illustrating significantly enriched sgRNAs and genes of MKO infected CD8+ T cells in wildtype mice. FIG. 2A is a dot plot of the number of significantly enriched sgRNAs for all organ samples, grouped by organ type. Statistical significance of sgRNA enrichment was determined by comparison to NTCs, with a threshold of FDR <0.2%. The number of significantly enriched sgRNAs varied between samples, ranging from 10 to 392. Data are shown as mean±s.e.m. FIG. 2B is a heatmap of the most highly enriched sgRNAs across all lymph node samples (average log2 rpm>=1); rows correspond to sgRNAs and columns correspond to different organ samples. SgRNA abundances are depicted in terms of log2 rpm. FIG. 2C is a waterfall plot of the top-ranked sgRNAs across all organs (FDR <0.2%). Inset shows 36 sgRNAs significantly enriched in ≥50% of organ samples. FIG. 2D is a bar plot of the number of genes with 0, 1, 2 or 3 independent sgRNAs that were significantly enriched in at least one organ sample (FDR <0.2%). A total of 80 genes were found to have 2 independent sgRNAs enriched. Pdcd1, Slc35c1, and Tsc2 were found to have 3 independent enriched sgRNAs. FIG. 2E is a set of Venn diagrams of the three enrichment criteria to identify the top gene hits (≥2% read abundance in one sample (n=253), significant in ≥25% of samples (n=79), and ≥2 independent enriched sgRNAs (n=83)). A total of 9 genes satisfied all three criteria. These genes included Aim1, Apc, Csnk1a1, Fam103a1, Nf1, Pdcd1, Prkar1a, Spast, and Tsc2. FIG. 2F: Top panel: Venn diagram comparing the significantly enriched sgRNAs (FDR <0.2%) in lymphoid vs. non-lymphoid organs. A total of 1,566 sgRNAs were enriched in at least one lymphoid sample, while 1,332 sgRNAs were enriched in at least one non-lymphoid sample. Of these, 761 sgRNAs were enriched in both lymphoid and non-lymphoid samples (significance of overlap, p≈0 by hypergeometric test); bottom panel: Venn diagram comparing the significantly enriched sgRNAs in lymph node vs. spleen. A total of 1,426 sgRNAs were found to be enriched in at least one lymph node, while 360 sgRNAs were enriched in at least one spleen sample. Of these, 220 sgRNAs were enriched in both lymph node and spleen samples (significance of overlap, p≈0 by hypergeometric test). FIG. 2G is a 5-way Venn diagram of enriched sgRNAs in non-lymphoid tissues (brain, liver, lung, muscle, pancreas). A total of 83 sgRNAs were enriched in all 5 non-lymphoid organs.

[0039] FIGS. 3A-3F are a series of plots and images illustrating flow cytometry analysis of in vivo survival of MKO mutagenized OT-I; Cas9 CD8⁺ T_{eff} cells in Rag1^{-/-} mice with transplanted tumors expressing cOVA antigen. FIG. 3A is a schematic of an experiment described herein involving: crossing an OT-I mouse to a Cas9 mouse, naïve CD8⁺ T cell isolation from OT-I; Cas9 mice, CD8⁺ T cell transduction, adoptive transfer into E0771-mCh-cOVA tumor-bearing Rag1^{-/-} mice, CD8⁺ T_{eff} cell survival and infiltration analysis in draining lymph nodes, non-draining lymph node, spleen, and tumor of E0771-mCh-cOVA tumor-bearing Rag1^{-/-} mice by FACS. FIG. 3B shows titration of SIINFEKL (SEQ ID NO: 129,210) peptide for MHC-I presentation in E0771 cells. E0771 cells were pulsed with different concentrations of SIINFEKL peptide, and the MHC-I—peptide complex (SIINFEKL:H-K2b) was measured by mean fluorescent intensity (MFI) of surface staining using FACS. FIG. 3C shows measurement of antigen presentation in E0771-mCh-cOVA cell lines. E0771 cells were transduced with a lentiviral vector encoding mCherry-2A-cOVA transgene, and multiple clonal lines were generated by single cell cloning. MHC-I—peptide complex (SIINFEKL:H-K2b) was measured by mean fluorescent intensity (MFI) of surface staining using FACS. FIG. 3D is a growth curve of mammary fatpad transplanted E0771-mCh-cOVA tumors in Rag1^{-/-} mice following different treatments. PBS control (n=3), adoptive transfer of OT-I; Cas9 CD8⁺ T_{eff} cells infected with vector (n=3), and adoptive transfer of OT-I; Cas9 CD8⁺ T_{eff} cells infected with MKO (n=8). Arrow indicates the time of adoptive transfer of MKO or vector transduced OT-I; Cas9 CD8⁺ T_{eff} cells. Data are shown as mean±s.e.m. FIG. 3E shows representative FACS plots of adoptively transferred T_{eff} cells in draining and non-draining LNs (dLN and ndLN, respectively), spleen, lung, and tumor (TILs) from E0771-mCh-cOVA tumor-bearing Rag1^{-/-} mice. FIG. 3F shows quantitative analysis of FACS data of adoptively transferred OT-I; Cas9 CD8⁺ T_{eff} cells in dLN, ndLN, spleen, lung, and tumor from E0771-mCh-cOVA tumor-bearing Rag1^{-/-} mice. Data are shown as mean±standard deviation.

[0040] FIGS. 4A-4J are a series of plots and images illustrating sgRNA library sequencing analysis of in vivo survival of MKO mutagenized OT-I; Cas9 CD8⁺ T_{eff} cells in Rag1^{-/-} mice with transplanted tumors expressing cOVA antigen. FIG. 4A is a schematic of an experiment described herein involving: crossing an OT-I mouse to a Cas9 mouse to generate OT-I; Cas9 mice, T cell isolation from spleen and LNs of OT-I; Cas9 mice, T cell transduction with MKO library, adoptive transfer into E0771-mCh-cOVA tumor-bearing Rag1^{-/-} mice, and T cell library representation analysis in organs by sgRNA library sequencing. FIG. 4B is a box-dot plot of overall sgRNA library representation in all samples, including cellular libraries of infected OT-I; Cas9 CD8⁺ T_{eff} cells before infection (n=3), and various tissues from multiple mice (n=5 mice, 25 total samples). SgRNA representation is depicted in terms of log₂ rpm. Analyzed tissues include draining lymph nodes (dLN), non-draining lymph nodes (ndLN), spleen, lung, and tumor. FIG. 4C is a bar plot of number of detected sgRNAs for all in vivo samples, grouped by sample type. Number of samples for each type are: dLN, ndLN, spleen, lung, and tumor (n=5 each, one per mouse, 5 mice total). FIG. 4D shows pie charts of sgRNA compositions in representative organs. SgRNAs that comprised ≥2% of total reads for each sample are shown, with the remaining reads classified as “Other.” FIG. 4E is a heatmap of the most highly enriched sgRNAs across all tissues (average log₂ rpm≥1), where rows correspond to sgRNAs and columns correspond to different organ or tumor samples. The tissue type of each sample is annotated at the top of the heatmap. Each sample was further classified as lymphoid, nonlymphoid, or tumor to facilitate downstream analyses. SgRNA abundances are depicted in terms of log₂ rpm. FIG. 4F is a bar plot of the number of significantly enriched sgRNAs for all in vivo samples, grouped by sample type as in FIG. 4C. Statistical significance of sgRNA enrichment was determined by comparison to NTCs, with a threshold of FDR <0.2%. The number of significantly enriched sgRNAs varied between samples, ranging from 7 to 179. FIG. 4G is a box-dot plot of overall sgRNA library representation in all samples, including cellular libraries of infected OT-I; Cas9 CD8⁺ T_{eff} cells before injection (n=3), and tumors from multiple mice (n=10 mice, 10 total tumors). sgRNA representation is depicted in terms of log₂ rpm. FIG. 4H is a waterfall plot of the top-ranked sgRNAs across all tumors (21 sgRNAs significantly enriched in ≥50% of tumors, FDR <0.5%). Inset, waterfall plot of all sgRNAs that were significantly enriched in ≥20% of tumors. FIG. 4I is a barplot of the number of genes with 0-4 independent sgRNAs that were significantly enriched in at least one organ sample (FDR <0.5%). A total of 26 genes were found to have at least 2 independent sgRNAs enriched. Pdcd1 and Stradb were each found to have 4 independent enriched sgRNAs. FIG. 4J is a Venn diagram of the three enrichment criteria to identify the top gene hits (≥2% read abundance in one sample (n=36), significant in ≥20% of samples (n=220), and ≥2 independent enriched sgRNAs (n=26)). A total of 6 genes satisfied all three criteria (Cd247, Fam103a1, Hacvr2, Pdcd1, Prkar1a, and Stradb).

[0041] FIGS. 5A-5G are a series of plots and images illustrating significantly enriched sgRNAs and genes of MKO mutagenized OT-I; Cas9 CD8⁺ T_{eff} cells in Rag1^{-/-} mice with transplanted tumors expressing cOVA antigen. FIG. 5A is a scatter plot of sgRNA abundance average across all organ samples (n=20) compared to cell samples (n=3). SgRNA abundance is depicted in terms of log₂ rpm. SgRNAs that were found to be statistically significantly (Sig., compared to distribution of NTC, FDR <0.1%) have their target gene names labeled. FIG. 5B is a scatter plot of sgRNA abundance in tumor (average across all tumor samples, n=5) compared to in vitro (average across all cell samples, n=5). SgRNA abundance is depicted in terms of log₂ rpm. SgRNAs that were found to be statistically significantly higher in organ samples compared to cell samples (Benjamini-Hochberg adjusted p-value <0.05, t-test) are colored in pink, with gene names labeled. FIG. 5C is a waterfall plot of the top-ranked sgRNAs across all organs (11 sgRNAs. significantly enriched in ≥50% of samples, FDR <0.2%). FIG. 5D shows DAVID gene ontology analysis of all genes found to be enriched in organ or tumor samples (showing enriched GO terms, the number of enriched genes corresponding to each GO term, and the associated p-value of enrichment). FIG. 5E is a 3-way Venn diagram comparing the significantly enriched sgRNAs (FDR <0.2%) in lymphoid, non-lymphoid, and tumor samples. A total of 392 sgRNAs were found to be enriched in at least one lymphoid sample, 320 sgRNAs were enriched in at least one non-lymphoid sample, and 395 sgRNAs were enriched in at least one tumor sample. The sgRNAs associated with each of the three groups were found to significantly overlap (lymphoid vs. non-lymphoid, p=2.11×10⁻¹⁵⁹; lymphoid vs. tumor, p=3.02×10⁻⁸⁸; non-lymphoid vs. tumor, p=1.97×10⁻¹³⁷, hypergeometric test). FIG. 5F is a 3-way Venn diagram comparing the significantly enriched sgRNAs in draining lymph node (dLN), non-draining lymph node (ndLN), and spleen samples. A total of 90 sgRNAs were found to be enriched in at least one dLN sample, 148 sgRNAs were enriched in at least one ndLN sample, and 278 sgRNAs were enriched in at least one spleen sample. The sgRNAs associated with each of the three groups were found to significantly overlap (dLN vs. ndLN, p=6.07×10⁻³¹⁷; dLN vs. spleen, p=2.58×10×10; ndLN vs. spleen, p=2.01×10⁻²⁶³, hypergeometric test). FIG. 5G is a 2-way Venn diagram comparing the hits from the second screen (OT-I; Cas9 CD8⁺ T_{eff} cells in Rag1^{-/-} host bearing tumors with cOVA antigen) to the first screen (Cas9 CD8⁺ T cells in WT host), showing a highly significant overlap (hypergeometric test, p=1×10⁻²³). Shared genes including multiple immune genes (such as Tim3/Havcr2, Lexm/BC055111, Zap70, Cd247 and PD-1/Pdcd1), a couple tumor suppressor genes (Aim1 and Nf1), as well as many genes with undocumented function in CD8⁺ T cells or completely unknown genes (such as Shisa6, Siah3, Ccdc105, Ccdc81 and 3830406C13Rik).

[0042] FIGS. 6A-6D are a series of plots and images illustrating the validation of a selected set of significantly enriched genes using minipools mutagenized OT-I; Cas9 CD8⁺ T cells intravenously injected into WT mice. FIG. 6A is a schematic of an experiment described herein involving: minipool library cloning, virus production, T cell infection, adoptive transfer, CD8⁺ T_{eff} cell survival analysis in organs by sgRNA library sequencing. FIG. 6B is an overall heatmap of the abundances of each sgRNA represented in the minipool library; rows correspond to sgRNAs and columns correspond to different cell or organ samples. The tissue type of each sample and host mouse genotype is annotated at the top of the heatmap. Each sample was further classified as cells, lymphoid, or non-lymphoid to facilitate downstream analyses. SgRNA abundances are depicted in terms of log₂ rpm. FIG. 6C is a dot plot of all minipool sgRNAs across all cell and organ samples. Cells are denoted in pink, lymphoid samples in green, and non-lymphoid samples in blue. SgRNA abundances are depicted in terms of log₂ rpm. FIG. 6D is a Venn diagram comparing the significantly enriched sgRNAs (compared to NTC, Welch t-test, p<0.05) in lymphoid vs. non-lymphoid organs. A total of 14 sgRNAs were enriched in non-lymphoid samples, all contained within the 17 sgRNAs enriched in lymphoid sample (significance of overlap, p=0.0021 by hypergeometric test).

[0043] FIGS. 7A-7E are a series of plots and images illustrating FACS data for setup experiments of OT-I; Cas9 CD8⁺ T cell survival in WT mice. FIG. 7A shows schematics of an experiment described herein involving: virus production, CD8⁺ T cell isolation and infection with a genome-scale CRISPR library (MKO), Thy1.1 surface staining, and FACS analysis. FIG. 7B shows FACS plots of naive OT-I; Cas9 CD8⁺ T cells infection with multiple dilution of MKO lentivirus (Thy1.1 gating) using two batches of viruses collected at different time points. FIG. 7C shows overlaid histograms of Thy1.1 expression of Cas9 CD8⁺ T cells infected T cells with comparable viral titers from two batches of viruses. Shaded histogram represents uninfected control. Black histogram represents MKO library virus isolated 48 hours post-transfection. Red histogram represents MKO library virus isolated 72 hours post-transfection. FIG. 7D shows quantification of MKO lentivirus from two batches of virus by surface staining of Thy1.1-infected CD8⁺ T cells. Data were shown as geometric mean of MFI. FIG. 7E shows quantification of MKO lentivirus from two batches of virus by surface staining of Thy1.1-infected CD8⁺ T cells. Data were shown as % Thy1.1⁺ CD8⁺ T cells.

[0044] FIGS. 8A-8G are a series of plots and images illustrating overall sgRNA quantification for the analysis of genome-scale CRISPR perturbation of Cas9 CD8⁺ T cell survival in WT mice. FIG. 8A is a heatmap of pairwise Pearson correlations of sgRNA library representation across all samples in the first screen. Correlations were calculated based on log₂ rpm values. Cell and plasmid samples were highly correlated with each other, while organ samples were most correlated with other organ samples. FIG. 8B is a bar plot of the number of detected sgRNAs for all plasmid (red, n=1), cell (orange, n=3), and organ (blue, n=62) samples. The number of detected sgRNAs is depicted on a log₁₀ scale. While the plasmid library and the cell pool had comparable numbers of detected sgRNAs (average log₁₀ sgRNA count=5.04 and 4.93, respectively), organ samples had fewer detected sgRNAs by several orders of magnitude (average log₁₀ sgRNA count=2.44). FIG. 8C is a bar plot of the number of significantly enriched sgRNAs for all organ samples, grouped by organ type. Statistical significance of sgRNA enrichment was determined by comparison to NTCs, with a threshold of FDR <0.2%. The number of significantly enriched sgRNAs varied between samples, ranging from 10 to 392. FIG. 8D is a heatmap of the most highly enriched sgRNAs across all organs (average log₂ rpm≥1), where rows correspond to sgRNAs and columns correspond to different organ samples. The tissue type of each sample is annotated at the top of the heatmap. Each sample was further classified as lymphoid or nonlymphoid to facilitate downstream analyses. SgRNA abundances are depicted in terms of log₂ rpm. FIG. 8E is a scatter plot of sgRNA abundance in vivo (average across all organ samples, n=62) compared to in vitro (average across all cell samples, n=3). SgRNA abundance is depicted in terms of log₂ rpm. SgRNAs that were found to be statistically significantly higher in organ samples compared to cell samples are colored red (Benjamini-Hochberg adjusted p-value <0.05, t-test), with representative genes labeled. NTCs are colored dark gray, while all other gene-targeting sgRNAs (GTSs) are light gray. FIG. 8F is a volcano plot of sgRNA abundance, comparing lymphoid vs non-lymphoid organs. Only sgRNAs with an average log₂ pm abundance ≥1 are shown. The x-axis denotes the average log₂ fold change of lymphoid vs non-lymphoid samples, while the y-axis denotes the −log₁₀ p-value of the comparison (t-test). SgRNAs that were significantly enriched in lymphoid samples relative to non-lymphoid samples are colored red (p<0.05). FIG. 8G shows results from gene ontology analysis of all genes found to be enriched in organs (showing enriched GO terms, the number of enriched genes corresponding to each GO term, and the associated p-value of enrichment). A representative set of terms were shown.

[0045] FIGS. 9A-9I are a series of pie charts showing results from analysis of genome-scale CRISPR screen of naive Cas9 CD8⁺ T_{eff} cell survival in WT mice (in 3 pages). All pie charts of sgRNA compositions in organ samples. SgRNAs that comprised ≥2% of total reads for each sample are shown, with the remaining reads classified as “Other.” FIG. 9A shows LN1 pie charts. FIG. 9B shows LN2 pie charts. FIG. 9C shows LN3 pie charts. FIG. 9D shows spleen pie charts. FIG. 9E shows liver pie charts. FIG. 9F shows pancreas pie charts. FIG. 9G shows lung pie charts. FIG. 9H shows brain pie charts. FIG. 9I shows muscle pie charts.

[0046] FIGS. 10A-10F are a series of plots and images depicting FACS data for setup experiments of MKO mutagenized activated OT-I; Cas9 CD8⁺ T_{eff} cells in Rag1^{-/-} mice with transplanted tumors expressing cOVA antigen. FIG. 10A is a schematic of an experiment described herein involving: CD8⁺ T cell isolation from OT-I; Cas9 mice, CD8⁺ T_{eff} cell, transduction, adoptive transfer into E0771-mCh-cOVA tumor-bearing Rag1^{-/-} mice, CD8⁺ T_{eff} cell survival and infiltration analysis in draining lymph nodes, non-draining lymph node, spleen, and tumor of E0771-mCh-cOVA tumor-bearing Rag1^{-/-} mice by FACS. FIGS. 10B-10E are a series of FACS plots showing data from adoptively transferred T_{eff} cells in draining LNs (dLN) (FIG. 10B), non-draining LNs (ndLN) (FIG. 10C), spleen (FIG. 10D), and tumors (TILs) from E0771-mCh-cOVA tumor-bearing Rag1^{-/-} mice (FIG. 10E). MKO is the genome-scale T cell knockout CRISPR library and the empty vector; numbers indicate percentage of total. Top rows are FACS plots from PBS-treated mice. Middle rows are FACS plots from mice treated with vector-infected OT-I; Cas9 CD8⁺ T cells. Bottom rows are FACS plots from mice treated with MKO-infected OT-I; Cas9 CD8⁺ T cells. FIG. 1OF is a growth curve of subcutaneously transplanted E0771-mCh-cOVA tumors in Rag1^{-/-} mice following different treatments. PBS control (n=1), adoptive transfer of OT-I; Cas9 CD8⁺ T_{eff} cells infected with vector (n=3), and adoptive transfer of OT-I; Cas9 CD8⁺ T_{eff} cells infected with MKO (n=5). Read arrow indicates the time of adoptive transfer of MKO or vector transduced OT-I; Cas9 CD8⁺ T_{eff} cells. Data are shown as mean±s.e.m.

[0047] FIGS. 11A-11D are a series of plots illustrating overall sgRNA quantification for the analysis of MKO mutagenized OT-I; Cas9 CD8⁺ T_{eff} cells in Rag1^{-/-} mice with transplanted tumors expressing cOVA antigen. FIG. 11A is a heatmap of pairwise Pearson correlations of sgRNA library representation across all samples. Correlations were calculated based on log₂ rpm values. Cell and plasmid samples were most correlated with each other, while organ and tumor samples were most correlated with other organ or tumor samples. FIG. 11B is a bar plot of the number of detected sgRNAs for all cell (orange, n=3) and organ/tumor (blue, n=25) samples. The number of detected sgRNAs is depicted on a log₁₀ scale. The number of detected sgRNAs in cell samples was several magnitudes higher than in organ/tumor (average log₁₀ sgRNA count=4.91 and 2.73, respectively). FIG. 11C is a bar plot of number of significantly enriched sgRNAs for all organ samples, grouped by sample type (tumor, dLN, ndLN, spleen or lung). Statistical significance of sgRNA enrichment was determined by comparison to NTCs, with a threshold of FDR <0.2%. FIG. 11D is a bar plot of the number of genes with 0, 1, or 2 independent sgRNAs that were significantly enriched in at least one organ sample (FDR <0.2%). 13 genes were found to have 2 independent enriched sgRNAs (yellow box). No genes in this experiment were found to have 3 enriched sgRNAs.

[0048] FIGS. 12A-12E are a series of pie charts depicting the analysis of MKO mutagenized OT-I; Cas9 CD8⁺ T_{eff} cells in Rag1^{-/-} mice with transplanted tumors expressing cOVA antigen. All pie charts of sgRNA compositions in organ samples are depicted. SgRNAs that comprised ≥2% of total reads for each sample are shown, with the remaining reads classified as “Other.” FIG. 12A shows dLN pie charts. FIG. 12B shows ndLN pie charts. FIG. 12C shows spleen pie charts. FIG. 12D shows tumor pie charts. FIG. 12E shows lung pie charts.

[0049] FIG. 13 is a table showing results from a t-test of GTC vs NTC in OT-I; Cas9 CD8⁺ T_{eff} cell minipool assay for in vivo survival in wildtype mice.

[0050] FIGS. 14A -14E show gene identifiers of vectors used in the present study. 14A shows gene identifiers for vector pSC017_pLKO-U6-sgBsmBI-EFS-Thy11CO-spA (SEQ ID NO:129,213). FIG. 14B shows gene identifiers for vector pSC008_pLKO-U6-BsmBI-chRNA(+85)-EFS-Thy11 (SEQ ID NO: 129,214). FIG. 14C shows gene identifiers for vector pSC021_pLKO-U6-sgBsmBI-PGK-Thy11CO-spA.sbd (SEQ ID NO:129,215). FIGS. 14D-14E show gene identifiers for vector pMD02: lenti-pLKO-U6-sgBsmBI-EFS-mCherry-2A-cOVA (SEQ ID NO:129,216).

[0051] FIGS. 15A-15F are a series of plots and images illustrating generation, QC, and titration of a genome-scale T cell CRISPR library (MKO) for screening. FIG. 15A is a histogram of initial plasmid library sequencing as library QC. The library was sequenced to ensure high coverage. For at least 94.1% of the whole library (121,608/129,209), unique sgRNAs were cloned into the plasmid, covering 98% of all the annotated genes (22,786) designed in the library. The representation showed a tight log-normal distribution, with 97.6% of sgRNAs within 2 orders of magnitude (O.M.), and 99.9% within 3 O.M. FIG. 15B shows the distribution of cloned sgRNA per gene in the MKO plasmid library. Most (17,330) genes were still covered by 6/6 sgRNAs; 20,653 genes have 4 or more sgRNAs; 393 genes have no sgRNAs (loss in cloning, thus not screenable with this plasmid library). FIG. 15C is a schematic of an experiment comprising: virus production, CD8⁺ T cell isolation and infection with a genome-scale CRISPR library (MKO), Thy1.1 surface staining, and FACS analysis. FIG. 15D show FACS plots of naive OT-I; Cas9 CD8⁺ T cell infection with multiple dilutions of MKO lentivirus (Thy1.1 gating) using two batches of viruses collected at different time points. FIG. 15E shows quantification of MKO lentivirus from two batches of virus by surface staining of Thy1.1-infected CD8⁺ T cells. Data were shown as the geometric mean of MFI. FIG. 15F shows quantification of MKO lentivirus from two batches of virus by surface staining of Thy1.1-infected CD8⁺ T cells. Data were shown as % Thy1.1⁺ CD8⁺ T cells.

[0052] FIGS. 16A-16D are a series of plots illustrating additional analysis of genome-scale CRISPR CD8⁺ T cell survival screens. FIG. 16A is a box-dot plot of overall sgRNA library representation in all samples, including plasmid library (n=1), cellular libraries of pre-injection library-infected naive CD8⁺ T cells (n=3), and various organs containing CD8⁺ T_{eff} cells from multiple mice 7 days post-injection (n=7 mice, 62 total samples). SgRNA representation is depicted in terms of log₂ reads per million (rpm). Analyzed tissues include the lymph node (LN), spleen, brain, liver, lung, muscle, and pancreas. FIG. 16B shows correlation analyses between two replicate mice. Average sgRNA representation across all organs for each mouse was plotted against another mouse. Pearson correlation value were noted on the plots. Full correlation plot was in FIG. 1. FIG. 16C shows a correlation analysis between two types of host as recipient mice. Average sgRNA representation across all mice for the B6 recipient group was plotted that of Cas9 host. Pearson correlation value was noted on the plot. FIG. 16D is a Venn diagram showing overlap of sgRNA hits between the CD8⁺ T_{eff} cells survival and trafficking screens using B6 and Cas9 recipients. Hypergeometric test, p<1e-5.

[0053] FIGS. 17A-17C are as series of plots and images illustrating analysis of sgRNA library representation by organ types. FIG. 17A, left panel is a Venn diagram comparing the significantly enriched sgRNAs (FDR <0.2%) in lymphoid vs. non-lymphoid organs. A total of 1,566 sgRNAs were enriched in at least one lymphoid sample, while 1,332 sgRNAs were enriched in at least one non-lymphoid sample. Of these, 761 sgRNAs were enriched in both lymphoid and non-lymphoid samples (significance of overlap, p≈0 by hypergeometric test). Right panel: Venn diagram comparing the significantly enriched sgRNAs in lymph node vs. spleen. A total of 1,426 sgRNAs were found to be enriched in at least one lymph node, while 360 sgRNAs were enriched in at least one spleen sample. Of these, 220 sgRNAs were enriched in both lymph node and spleen samples (significance of overlap, p≈0 by hypergeometric test). FIG. 17B is a 5-way Venn diagram of enriched sgRNAs in non-lymphoid tissues (brain, liver, lung, muscle, pancreas). A total of 83 sgRNAs were enriched in all 5 non-lymphoid organs. FIG. 17C shows minipool validation of highly enriched sgRNAs in T cell survival and trafficking in vivo. SgRNA abundance across all organs were plotted. Statistical comparisons were made against control sgRNA group co-injected in the same minipool. *=p<0.05, two sided t-test.

[0054] FIGS. 18A-18G are a series of plots and images illustrating a genome-scale screen for trafficking and survival with effector CD8+ T cells with transgenic, clonal TCR. FIG. 18A is a schematic of an experiment: cross OT-I mouse to Cas9 mouse, naive CD8⁺ T cell isolation from OT-I; Cas9 mice, CD8⁺ T cell transduction, adoptive transfer into mice, and MKO-transduced OT-I; Cas9 CD8⁺ T_{eff} cell survival analysis in organs by high-throughput sgRNA sequencing. Organs collected include the liver, pancreas, lung, muscle and brain as representative non-lymphoid organs, and the spleen and several types of lymph nodes (sLNs, cLNs and aLNs). FIG. 18B is a waterfall plot of the top sgRNAs across all organs ranked by number of organs being enriched in (FDR <0.5%). A total of 27 sgRNAs were found to be significant in ≥20% of samples. FIG. 18C is a barplot of the number of genes with 0, 1, or 2 independent sgRNAs that were significantly enriched in at least one organ sample (FDR <0.5%). A total of 4 genes were found to have 2 independent sgRNAs enriched. Cd247, Bpifb3, and Tsc2 were found to have 3 independent enriched sgRNAs. FIG. 18D is a Venn diagram of the three enrichment criteria to identify the top gene hits (≥2% read abundance in one sample (n=99), significant in ≥20% of samples (considering all associated sgRNAs) (n=27), and ≥2 independent enriched sgRNAs (n=4)). Noted that the sets of ≥20% of samples and ≥2 independent enriched sgRNAs were contained in the set of ≥2% read abundance in one sample. A total of 3 genes satisfied all three criteria. These genes were Pdcd1, Slc35c1, and Stradb. FIG. 18E is a Venn diagram comparing the hits from the diverse TCR screen and from the clonal TCR screen. 17 genes were found to be significant in ≥2 samples from both datasets. These included 3830406C13Rik, BC055111, Cd247, Gm6927, Hacvr2, Lrp6, Nf1, Olfr1158, Opn3, Pdcd1, Serping1, Slc2a7, Slc35c1, Son, Tsc2, Tspan4, and 4.82. FIG. 18F illustrates donor T cell and recipient host effect analysis. Heatmap of pairwise Pearson correlations of sgRNA library representation in all mice, with all organs averaged, from the genome-scale screen for trafficking and survival in CD8⁺ T cells with either diverse or clonal TCR (Cas9 vs. OT-I; Cas9), and with wildtype (B6) or syngeneic host (Cas9). FIG. 18G shows organ patterns of genome-scale CRISPR T cell screen. Dimensional reduction plot with t-SNE method showing the clustering patterns based on MKO library screening. Each dot is the sgRNA library representation in an organ color coded according to the legend (brain, liver, LN, lung, muscle, pancreas and spleen). There is a large cluster containing virtually all organ types (k0), while there are 8 smaller clusters (k1-k8) that each consist of 4 to 6 organ types, with several organs as outliers.

[0055] FIGS. 19A-19B are a set of plots illustrating analysis of genome-scale CRISPR CD8+ T cell survival screens with OT-I; Cas9 CD8+ T cells. FIG. 19A is a Heatmap of pairwise Pearson correlations of sgRNA library representation across all samples in the second WT screen using OT-I; Cas9 CD8⁺ T cells. Samples were from various organs containing CD8⁺ T_{eff} cells from multiple mice 7 days post-injection (n=10 mice, 70 total samples). Correlations were calculated based on log₂ rpm values. FIG. 19B is a box-dot plot overall sgRNA library representation in all samples from various organs containing CD8⁺ T_{eff} cells from multiple mice 7 days post-injection (n=10 mice, 70 total samples). sgRNA representation is depicted in terms of log₂ reads per million (rpm). Analyzed tissues include various lymph nodes (LN), spleen, liver, pancreas, and lung.

[0056] FIGS. 20A-20C are a series of images illustrating protein domain and conservation analysis of representative hits. FIG. 20A shows domain structure prediction of human DHX37 protein, which contains an HrpA domain that can be subdivided into 4 subdomains (DEXDc, P-loop NTPase, HELICc and HA2). Representative alignments of regions in DEXDc and HELICc domains that are conserved between multiple mammalian species are shown below (SEQ ID NOs: 140,683-140,746). FIG. 20B shows domain structure prediction of human LRP6 protein, which contains 5 predicted domains (NHL, overlapping LDLRb, LY, FXaI and LDLa). Representative alignments of regions in NHL and LY domains that are conserved between multiple mammalian species are shown below (SEQ ID NOs: 140,747-140,826). FIG. 20C shows domain structure prediction of human SLC35C1 protein, which contains 2 predicted domains (TPT, and overlapping EamA). Representative alignments of a region in EamA/TPT domain that is conserved between multiple mammalian species were shown below (SEQ ID NOs: 140,827-140,863).

[0057] FIGS. 21A-21F are a series of plots and images illustrating additional experiments for adoptive transfer tumor infiltration screen. FIG. 21A is a growth curve of subcutaneous tumors from transplanted E0771-mCh-cOVA cells in Rag1^{-/-} mice following different treatments. PBS control (n=1), adoptive transfer of OT-I; Cas9 CD8⁺ T_{eff} cells infected with vector (n=3), and adoptive transfer of OT-I; Cas9 CD8⁺ T_{eff} cells infected with MKO (n=5). Arrow indicates the time of adoptive transfer of MKO or vector transduced OT-I; Cas9 CD8⁺ T_{eff} cells. Error bars for certain data points were invisible because the errors were small. Data are shown as mean±s.e.m. FIG. 21B shows full-slide and high-power histology sections stained by hematoxylin and eosin of tumors derived from E0771 cells expressing cOVA antigen in Rag1^{-/-} mice after different treatment conditions. Top group: tumors in mice that were injected with PBS. Middle group: tumors in mice after adoptive transfer of vector-treated activated OT-I; Cas9 CD8⁺ T_{eff} cells. Bottom group: tumors in mice after adoptive transfer of MKO mutagenized activated OT-I; Cas9 CD8⁺ T_{eff} cells. In PBS group, tumors were devoid of lymphocytes and showed signatures of rapid proliferation and little cell death. In adoptive transfer groups, tumors were infiltrated by lymphocytes and showed signatures of cell death in large areas. Low magnification image scale bar: 1 mm; high magnification image scale bar: 200 μm. FIG. 21C shows representative FACS plots of adoptively transferred T_{eff} cells in draining and non-draining LNs (dLN and ndLN, respectively), spleen, lung, and tumor (TILs) from E0771-mCh-cOVA tumor-bearing Rag1^{-/-} mice. MKO is the genome-scale T cell CRISPR library. Numbers indicate percentage of total cells. Top row: FACS plots from PBS-treated mice. Middle row: FACS plots from mice treated with vector-infected OT-I; Cas9 CD8⁺ T cells. Bottom row: FACS plots from mice treated with MKO-infected OT-I; Cas9 CD8⁺ T cells. FIG. 21D shows correlation analysis of genome-scale CRISPR perturbation of OT-I; Cas9 CD8⁺ tumor-infiltrating lymphocytes into Rag1^{-/-} mice with E0771-cOVA tumors. Heatmap of pairwise Pearson correlations of sgRNA library representation across 3 cell libraries prior to injection, and all samples in the tumor infiltration screen (n=10 mice, 10 tumors). Correlations were calculated based on log₂ rpm values. E0771-cOVA cells were transplanted subcutaneously for mice 1-5, and into the mammary fat pad for mice 6-10. FIG. 21E shows clonal consistency analysis of adoptive transfer screen. A minipool screen is analyzed between two clones expressing different levels of cOVA (E0771-mChOva cl.3 and cl.5). The sgRNA representation for one clone was plotted against another. Pearson correlation value was noted on the plot. FIG. 21F shows clonal consistency analysis of adoptive transfer screen. A minipool screen is analyzed between two cell lines from different cancer types (breast and lung) expressing the same cOVA construct (E0771-mChOva and LCC-mChOva). The sgRNA representation for one clone was plotted against another. Pearson correlation value was noted on the plot.

[0058] FIGS. 22A-22H are a series of plots and images illustrating high-throughput identification of genes modulating effector CD8+ T cell degranulation upon encountering tumor antigen. FIG. 22A is a schematic of an experiment: Naive OT-I; Cas9 CD8⁺ T cells were isolated and transduced with MKO lentiviral library, co-cultured with SIINFEKL peptide pulsed E0771 cells (0 or 1 ng/ml), and stained for CD8 and CD107a for CD8⁺ T_{eff} undergoing active degranulation. Stained cells were analyzed, and the top 5% CD107a⁺ cells were sorted, and subjected to genomic DNA extraction, CRISPR library readout, and screen data analysis. FIG. 22B shows titration of SIINFEKL peptide for MHC-I presentation in E0771 cells. E0771 cells were pulsed with different concentrations of SIINFEKL peptide, and the MHC-I—peptide complex (SIINFEKL:H-K2^{b}) was measured by mean fluorescent intensity (MFI) of surface staining using FACS. FIG. 22C is a histogram showing CD107a⁺ T cells analyzed from the co-culture of OT-I; Cas9 CD8⁺ T cells and E0771 cancer cells. The top 5% CD107a⁺ cells were sorted. A total of three biological replicates were performed. FIG. 22D is a waterfall plot of the top-ranked sgRNAs across all sorted cell samples (17 sgRNAs significantly enriched in ≥66% of samples, FDR <0.5%). FIG. 22E is a Venn diagram comparing the hits from the in vitro kill assay screen and from the in vivo tumor infiltration study. 3 genes were found to be significant in ≥2 samples from both datasets. These included Dhx37, Lyn, and Odc1. FIG. 22F shows growth curves of mammary fatpad E0771-mCh-cOVA tumors in Rag1^{-/-} mice following different treatments. PBS control (n=4), adoptive transfer of OT-I; Cas9 CD8⁺ T_{eff} cells infected with vector (n=4), and adoptive transfer of OT-I; Cas9 CD8⁺ T_{eff} cells infected with sgDhx37 (n=5). Data are shown as mean±s.e.m. PBS and sgDhx37 groups were tested against vector group. PBS group has significantly larger tumors compared to vector indicating the effect of adoptive transfer of OT-I; Cas9 CD8⁺ T_{eff} cells. The sgDhx37 group significantly reduced tumor burden as compared to vector indicating a gene-specific effect. FIG. 22G illustrates testing the anti-tumor effect of OT-I; Cas9 CD8⁺ T_{eff} cells with sgPD-1. Tumor growth curves from individual mice were shown. Similar to above, PBS, vector, and sgPdcd1 mice were shown. Data are shown as individual points/curves. 2/5 sgPdcd1 mice have significantly smaller tumors compared to vector, 1/5 is marginal significant, while the remaining 2/5 are not significant. FIG. 22H illustrates testing the anti-tumor effect of OT-I; Cas9 CD8⁺ T_{eff} cells with sgOdc1. Tumor growth curves from individual mice were shown. Similar to above, PBS, vector, and sgOdc1 mice were shown. Data are shown as individual points/curves. 3/5 sgOdc1 mice have significantly smaller tumors compared to vector, while the remaining 2/5 are not significant. Note: Arrow indicates the time of adoptive transfer of MKO or vector transduced OT-I; Cas9 CD8⁺ T_{eff} cells. Data from FIGS. 22F-22H were collected together, tumor curves PBS and vector groups from the 3 panels are identical, which were plotted in separation for each gene for comparison and visibility. Statistical comparisons were made against vector group. *=p<0.05, **=p<0.01, ***=p<0.001, by paired t-test.

[0059] FIGS. 23A-23G are a series of plots and images illustrating single-cell transcriptomics of sgDhx37 OT-I; Cas9 CD8⁺ TILs in E0771-mCh-cOVA tumors. FIG. 23A is a schematic of an experiment: adoptive transfer of vector or sgDhx37-infected OT-I; Cas9 CD8⁺ T_{eff} cells into Rag1^{-/-} mice bearing E0771-mCh-cOVA tumors, tumor harvesting after 50 days of growth, FACS for CD3⁺ CD8⁺ T cells, microfluidic-based approach of reverse-transcription and multistep barcoding library preparation to produce single-cell barcoded DNA droplets, followed by high-throughput sequencing and computational analysis. FIG. 23B shows t-SNE dimensional reduction and visualization of individual tumor-infiltrating CD8⁺ cells from the mouse TIL scRNAseq. Left panel: visualization by clusters (4 distinct clusters identified); Right panel visualization by experiment groups, i.e. OT-I; Cas9 CD8⁺ T_{eff} cells treated with either sgDhx37 (n=191 cells) or vector (n=361). FIG. 23C shows differentially expressed genes in sgDhx37-treated CD8⁺ tumor infiltrating lymphocytes compared to vector-treated. Heatmap of top differentially expressed genes (absolute log₂ fold change ≥1) in single CD8⁺ tumor infiltrating lymphocytes treated with sgDhx37 or vector control. Values shown are in terms of z-scores (scaled by row/gene). FIG. 23D is a Volcano plot of differentially expressed genes in tumor-infiltrating CD8⁺ cells treated with sgDhx37 compared to vector control. A total of 137 genes were significantly upregulated in sgDhx37 treated cells (Benjamini-Hochberg adjusted p<0.05), while 215 genes were significantly downregulated in sgDhx37 treated cells (adjusted p<0.05). Top upregulated genes included Rgs16, Nr4a2, Tox, Lag3, Rbm3 and Ccl4. Top downregulated genes included Uba52, Hist1h1c, Gm9844, Emp3 and Rps28. FIG. 23E shows gene ontology analysis of significantly upregulated genes in sgDhx37-treated tumor-infiltrating CD8⁺ cells. Several gene ontology categories were significantly enriched (Bonferroni adjusted p<0.05). These included lymphocyte activation, positive regulation of cytokine production, regulation of cell-cell adhesion, regulation of immune effector process, and positive regulation of interferon-gamma production. FIG. 23F shows gene ontology analysis of significantly downregulated genes in sgDhx37-treated tumor-infiltrating CD8⁺ cells. Several gene ontology categories were significantly enriched (Bonferroni adjusted p<0.05). These included ribosomal small subunit assembly, ribosomal large subunit biogenesis, regulation of reactive oxygen species metabolic process, regulation of cell migration, positive regulation of leukocyte migration, and apoptotic signaling pathway. FIG. 23G shows differential expression analysis by cluster (sub-population of T cells). mRNA level in individual cells were plotted for NTC and sgDhx37 groups in each of the 4 major clusters (see top panel of b). Violin plots with individual data points were shown. The top up-regulated (Rgs16) and down-regulated (Uba52) genes were shown as examples. For all comparisons between sgDhx37 and control group, FDR adjusted p value <0.05, in all clusters.

[0060] FIGS. 24A-24E are a series of plots and images illustrating analysis of DHX37 in human cells. FIG. 24A shows Western blot analysis of DHX37 protein in human cells. From left to right, HEK293FT cells with Dhx37 overexpression as a positive control; peripheral blood CD4⁺ T cells from a healthy donor; peripheral blood CD8⁺ T cells from a healthy donor; TILs from a tumor biopsy freshly isolated from an NSCLC patient. FIG. 24B shows FACS analysis of intracellular protein level of DHX37 in peripheral blood CD8⁺ T cells and NSCLC patient TILs. FIG. 24C shows tissue microarray analysis of DHX37 expression across multiple patient samples. Summary level dot plots of DHX37⁺ cell staining. Each dot represents the total number of DHX37⁺ cells in one slice of a core biopsy of a patient sample (0.7 mm in diameter, 0.385 mm² in surface area). Numbers were capped at 1000. Normal brain and glioma samples were on the same array. Breast cancer and melanoma tumor samples were on separate arrays. Normal brain tissues have significantly less DHX37⁺ cells as compared to glioma tissues (***=p<0.001, by unpaired two-tailed t-test). Matched normal tissues are not available for breast cancer and melanoma for these TMAs. FIG. 24D shows representative images of two patient biopsy samples from tissue microarray analysis. DHX37 staining was found primarily in the nucleus (heavy staining on nuclear membrane). Arrowheads point to representative DHX37⁺ TILs in glioma, breast cancer and melanoma biopsies. H&E staining was shown for companion samples. FIG. 24E shows DHX37 in patient prognosis. Top left: Higher DHX37 predicts poorer prognosis in lower grade glioma (LGG). Kaplan-Meier curves of overall survival in High DHX37-high (n=221) vs. DHX37-low (n=223) patients (p=0.0011, hazard ratio=1.899). Bottom left: Higher DHX37 predicts poorer prognosis in hepatocellular carcinoma (LIHC). Kaplan-Meier curves of overall survival in High DHX37-high (n=161) vs. DHX37-low (n=162) patients (p=0.031, hazard ratio=1.522). Top right: Higher DHX37 predicts poorer prognosis in lung adenocarcinoma (LUAD). Kaplan-Meier curves of overall survival in High DHX37-high (n=222) vs. DHX37-low (n=222) patients (p=0.0077, hazard ratio=1.526). Bottom right: Higher DHX37 predicts poorer prognosis in kidney renal cell carcinoma (KIRC). Kaplan-Meier curves of overall survival in High DHX37-high (n=228) vs. DHX37-low (n=228) patients (p=0.047, hazard ratio=1.373).

[0061] FIGS. 25A-25E are a series of plots illustrating gene expression signature of DHX37 in populations of single human T cells. FIG. 25A shows distribution of DHX37 expression in human peripheral blood T cells, tissue-resident T cells, tumor-normal junction T cells, and tumor-infiltrating T cells in CD3⁺/CD4⁺/CD25⁻ helper T cells, CD3⁺/CD8⁺ cytotoxic T cells, and CD3⁺/CD4⁺/CD25⁺ regulatory T cells. The number and total percentage of DHX37⁺ cells is noted on each plot. FIG. 25B is a series of scatter-boxplots of IL12A, ITM2A, RGS16, and STAT1 expression in DHX37⁺ and DHX37⁻ CD3⁺/CD8⁺ T cells. Expression of IL12A (p=7.10*10⁻⁹), ITM2A (p=0.0033), RGS16 (p=1.23*10⁻⁷), and STAT1 (p=0.0033) was significantly lower in DHX37⁺ cells. FIG. 25C is a series of scatter-boxplots of PPA1, CISH, TRAP1, and SLC7A6 expression in DHX37⁺ and DHX37⁻ CD3⁺/CD8⁺ T cells. Expression of PPA1 (p=0.0002), CISH (p=0.0074), TRAP1 (p=9.34*10⁻⁵), and SLC7A6 (p=9.64*10⁻⁵) was significantly higher in DHX37⁺ cells. FIG. 25D is a set of scatter-boxplots of IKBKE and CPT2 expression in DHX37⁺ and DHX37⁻ CD3⁺/CD4⁺/CD25⁻ T cells. Expression of IKBKE (p=0.0062) and CPT2 (p=1.30*10⁻⁵) was significantly lower in DHX37⁺ cells. FIG. 25E is a set of scatter-boxplots of SLC35E2B and NDFIP 1 expression in DHX37⁺ and DHX37⁻ CD3⁺/CD4⁺/CD25⁻ T cells. Expression of SLC35E2B (p=4.75*10⁻⁵) and NDFIP 1 (p=0.0004) was significantly higher in DHX37⁺ cells. Two-sided Welch's t tests were used in B-E to evaluate statistical significance. Tukey boxplots are shown.

[0062] FIGS. 26A-26F are a series of plots and images illustrating development of a new AAV-CRISPR system and integrated interrogation of acute Dhx37 loss in CD8⁺ T_{eff} cells. FIG. 26A is a schematics of the design of an AAV-CRISPR T cell knockout vector, which contains an sgRNA expression cassette and a Thy1.1 expression cassette within the two ITR of AAV base vector. FIG. 26B is a schematic of an experiment: Naive OT-I; Cas9 CD8⁺ T cells were isolated and transduced with AAV-sgRNA-Thy1.1 vector, activated by CD3/CD28, followed by multiple analyses after infection, including indel sequencing, FACS, single cell RNAseq for acute transcriptional regulation, and adoptive transfer for testing anti-tumor activity. FIG. 26C is a plot showing significant downregulation of intracellular Dhx37 level 7 days after AAV-sgDhx37 transduction. Geometric means were shown for each data point. (*, p<0.05, unpaired two sided t test). FIG. 26D shows confirmation of acute knockout of genes by AAV-CRISPR system. Three genes were tested (Mll3, B2m and Dhx37). Representative Illumina targeted amplicon sequencing of the sgRNA target site 5 days after infection with AAV-sgRNA targeting the gene of interest. The top 10 most frequent variants were shown, with the associated variant frequencies in the box to the right (SEQ ID NOs: 140,864-140,896). FIG. 26E shows FACS analysis of Dhx37 knockout. Top, CD107a degranulation assay, where CD8⁺ T_{eff} cells with AAV-sgDhx37 transduction as compared to vector control showed significant upregulation of surface CD107a (p=0.001). Bottom, CD8⁺ T_{eff} cells with AAV-sgDhx37 showed significant downregulation of surface CD62L level. Data are shown as mean±s.e.m. Geometric means were shown for each individual data point. Data are also shown as group mean±s.e.m. FIG. 26F shows anti-tumor activity of AAV-CRISPR mediated Dhx37 knockout in CD8⁺ T_{eff} cells. Growth curves of mammary fatpad E0771-mCh-cOVA tumors in Rag1^{-/-} mice following different treatments. PBS control (n=2), adoptive transfer of OT-I; Cas9 CD8⁺ T_{eff} cells infected with AAV-vector (n=4), and adoptive transfer of OT-I; Cas9 CD8⁺ T_{eff} cells infected with AAV-sgDhx37 (n=5). Data are shown as mean±s.e.m. Purple arrow indicates the time of adoptive transfer of viral transduced OT-I; Cas9 CD8⁺ T_{eff} cells. PBS group mice were not treated and have large tumors early. The AAV-sgDhx37 group significantly reduced tumor burden as compared to AAV-vector indicating a Dhx37 knockout specific effect.

[0063] FIGS. 27A-27F are a series of plots and images illustrating molecular interrogation of gene regulation upon acute Dhx37 loss in CD8⁺ T_{eff} cells. FIG. 27A shows t-SNE dimensional reduction and visualization of single cell transcriptomics of individual OT-I; Cas9 CD8⁺ T_{eff} cells 6 days after transduction with AAV, colored by experiment groups, i.e. AAV-sgDhx37 or AAV-sgNTC. FIG. 27B shows t-SNE dimensional reduction and visualization of single cell transcriptomics of individual OT-I; Cas9 CD8⁺ T_{eff} cells 6 days after transduction with AAV, colored by clusters. A total of 6 major clusters were identified as subpopulation of these T cells. FIG. 27C shows cluster-specific population differences between AAV-sgDhx37 or AAV-sgNTC. AAV-sgDhx37 group has more cells in cluster 2, but fewer cells grouped to clusters 4 and 6. FIG. 27D shows gene expression signature of all cells across all 6 major clusters, showing cluster-specific markers for these individual OT-I; Cas9 CD8⁺ T_{eff} cells. FIG. 27E shows cluster-specific gene regulation between AAV-sgDhx37 or AAV-sgNTC. Top upregulated and downregulated genes upon acute Dhx37 loss by AAV-sgDhx37 transduction were shown for each cluster (k1 to k6). Ccl5 was found to be upregulated across all clusters, while certain genes were found to be differentially upregulated only in specific clusters (e.g. Rgs2 in k1, k2 and k4; Lag3 in k5 and k6, Ifng in k3 only). Rpl35 was found to be downregulated across most clusters (except k4), while certain genes were found to be differentially downregulated only in specific clusters (e.g. Rps29 in k2, k3, k5 and k6; Npm3 in k5 and k6, Ly6c2 in k6 only). FIG. 27F shows violin plots with all data points for mRNA level in individual cells for the most-prevalently differentially up-regulated (Ccl5) and down-regulated (Rpl35) genes upon acute Dhx37 loss by AAV-CRISPR transduction, in each of the 6 major clusters (k1 to k6). For all comparisons between Dhx37 and control group, FDR adjusted p value <0.05, in all clusters for Ccl5, and in all clusters except k4 for Rpl35.

[0064] FIGS. 28A-28C shows additional analysis of gene regulation upon Dhx37 loss in mouse and human CD8⁺ cells. FIG. 28A shows cluster-specific differentially expressed genes upon acute Dhx37 loss by AAV-CRISPR transduction. Violin plots with all data points of representative genes in each of the 6 major clusters (k1 to k6) were shown. For all comparisons between Dhx37 and control group, FDR adjusted p value <0.05, in all clusters. FIG. 28B shows gene ontology analysis of significantly upregulated genes upon acute Dhx37 loss by AAV-sgDhx37 mediated knockout in CD8⁺ T cells. Top biological processes were found to be immune related, including inflammatory response, immune response, negative regulation of apoptosis, endopeptidase, immunoglobulin secretion, response to glucose stimulus and T cell co-stimulation. FIG. 28C is a Venn diagram showing the overlap of differentially regulated genes upon Dhx37 loss by three different kinds of mechanisms, lenti-CRISPR mediated perturbation in mouse TILs, AAV-CRISPR mediated acute loss in culture, and naturally low-expression population in human T cells. A total of 24 genes (shown) were found to be significant across all three mechanisms.

[0065] FIG. 29 is an image illustrating gene editing in human T cells with the vectors of the present invention. Surveyor assay of human DHX37 gene (3 independent sgRNAs) and PDCD1 gene (2 independent sgRNAs). The arrows point to cleavage product bands as a result of on-target gene editing in human T cells.

### DETAILED DESCRIPTION

### Definitions

[0066] Unless defined otherwise, all technical and scientific terms used herein have the same meaning as commonly understood by one of ordinary skill in the art to which the invention pertains. Although any methods and materials similar or equivalent to those described herein can be used in the practice for testing of the present invention, the preferred materials and methods are described herein. In describing and claiming the present invention, the following terminology will be used.

[0067] It is also to be understood that the terminology used herein is for the purpose of describing particular embodiments only, and is not intended to be limiting.

[0068] The articles “a” and “an” are used herein to refer to one or to more than one (i.e., to at least one) of the grammatical object of the article. By way of example, “an element” means one element or more than one element.

[0069] “About” as used herein when referring to a measurable value such as an amount, a temporal duration, and the like, is meant to encompass variations of ±20% or ±10%, more preferably ±5%, even more preferably ±1%, and still more preferably ±0.1% from the specified value, as such variations are appropriate to perform the disclosed methods.

[0070] An “adeno-associated virus” or “AAV” as used herein refers to a small non-enveloped virus which infects humans and other primates but does not cause disease. AAV can infect dividing and quiescent cells and exists in an extrachromosomal state without integrating into the host genome. AAVs can be used as vectors for gene delivery to host cells.

[0071] As used herein the term “amount” refers to the abundance or quantity of a constituent in a mixture.

[0072] As used herein, the term “bp” refers to base pair.

[0073] The term “complementary” refers to the degree of anti-parallel alignment between two nucleic acid strands. Complete complementarity requires that each nucleotide be across from its opposite. No complementarity requires that each nucleotide is not across from its opposite. The degree of complementarity determines the stability of the sequences to be together or anneal/hybridize. Furthermore various DNA repair functions as well as regulatory functions are based on base pair complementarity.

[0074] The term “CRISPR/Cas” or “clustered regularly interspaced short palindromic repeats” or “CRISPR” refers to DNA loci containing short repetitions of base sequences followed by short segments of spacer DNA from previous exposures to a virus or plasmid. Bacteria and archaea have evolved adaptive immune defenses termed CRISPR/CRISPR—associated (Cas) systems that use short RNA to direct degradation of foreign nucleic acids. In bacteria, the CRISPR system provides acquired immunity against invading foreign DNA via. RNA-guided DNA cleavage.

[0075] The “CRISPR/Cas9” system or “CRISPR/Cas9-mediated gene editing” refers to a type II CRISPR/Cas system that has been modified for genome editing/engineering. It is typically comprised of a “guide” RNA (gRNA) and a non-specific CRISPR-associated endonuclease (Cas9). “Guide RNA (gRNA)” is used interchangeably herein with “short guide RNA (sgRNA)” or “single guide RNA” (sgRNA). The sgRNA is a short synthetic RNA composed of a “scaffold” sequence necessary for Cas9-binding and a user-defined ˜20 nucleotide “spacer” or “targeting” sequence which defines the genomic target to be modified. The genomic target of Cas9 can be changed by changing the targeting sequence present in the sgRNA.

[0076] The term “cleavage” refers to the breakage of covalent bonds, such as in the backbone of a nucleic acid molecule or the hydrolysis of peptide bonds. Cleavage can be initiated by a variety of methods, including, but not limited to, enzymatic or chemical hydrolysis of a phosphodiester bond. Both single-stranded cleavage and double-stranded. cleavage are possible. Double-stranded cleavage can occur as a result of two distinct single-stranded cleavage events. DNA cleavage can result in the production of either blunt ends or staggered ends. In certain embodiments, fusion polypeptides can be used for targeting cleaved double-stranded DNA.

[0077] A “disease” is a state of health of an animal wherein the animal cannot maintain homeostasis, and wherein if the disease is not ameliorated then the animal's health continues to deteriorate. In contrast, a “disorder” in an animal is a state of health in which the animal is able to maintain homeostasis, but in which the animal's state of health is less favorable than it would be in the absence of the disorder. Left untreated, a disorder does not necessarily cause a further decrease in the animal's state of health.

[0078] “Effective amount” or “therapeutically effective amount” are used interchangeably herein, and refer to an amount of a compound, formulation, material, or composition, as described herein effective to achieve a particular biological result or provides a therapeutic or prophylactic benefit. Such results may include, but are not limited to, anti-tumor activity as determined by any means suitable in the art.

[0079] “Encoding” refers to the inherent property of specific sequences of nucleotides in a polynucleotide, such as a gene, a cDNA, or an mRNA, to serve as templates for synthesis of other polymers and macromolecules in biological processes having either a defined sequence of nucleotides (i.e., rRNA, tRNA and mRNA) or a defined sequence of amino acids and the biological properties resulting therefrom. Thus, a gene encodes a protein if transcription and translation of mRNA corresponding to that gene produces the protein in a cell or other biological system. Both the coding strand, the nucleotide sequence of which is identical to the mRNA sequence and is usually provided in sequence listings, and the non-coding strand, used as the template for transcription of a gene or cDNA, can be referred to as encoding the protein or other product of that gene or cDNA.

[0080] As used herein “endogenous” refers to any material from or produced inside an organism, cell, tissue or system.

[0081] The term “expression” as used herein is defined as the transcription and/or translation of a particular nucleotide sequence driven by its promoter.

[0082] “Expression vector” refers to a vector comprising a recombinant polynucleotide comprising expression control sequences operatively linked to a nucleotide sequence to be expressed. An expression vector comprises sufficient cis-acting elements for expression; other elements for expression can be supplied by the host cell or in an in vitro expression system. Expression vectors include all those known in the art, such as cosmids, plasmids (e.g., naked or contained in liposomes) and viruses (e.g., Sendai viruses, lentiviruses, retroviruses, adenoviruses, and adeno-associated viruses) that incorporate the recombinant polynucleotide.

[0083] “Homologous” as used herein, refers to the subunit sequence identity between two polymeric molecules, e.g., between two nucleic acid molecules, such as, two DNA molecules or two RNA molecules, or between two polypeptide molecules. When a subunit position in both of the two molecules is occupied by the same monomeric subunit; e.g., if a position in each of two DNA molecules is occupied by adenine, then they are homologous at that position. The homology between two sequences is a direct function of the number of matching or homologous positions; e.g., if half (e.g., five positions in a polymer ten subunits in length) of the positions in two sequences are homologous, the two sequences are 50% homologous; if 90% of the positions (e.g., 9 of 10), are matched or homologous, the two sequences are 90% homologous.

[0084] “Identity” as used herein refers to the subunit sequence identity between two polymeric molecules particularly between two amino acid molecules, such as, between two polypeptide molecules. When two amino acid sequences have the same residues at the same positions; e.g., if a position in each of two polypeptide molecules is occupied by an Arginine, then they are identical at that position. The identity or extent to which two amino acid sequences have the same residues at the same positions in an alignment is often expressed as a percentage. The identity between two amino acid sequences is a direct function of the number of matching or identical positions; e.g., if half (e.g., five positions in a polymer ten amino acids in length) of the positions in two sequences are identical, the two sequences are 50% identical; if 90% of the positions (e.g., 9 of 10), are matched or identical, the two amino acids sequences are 90% identical.

[0085] As used herein, an “instructional material” includes a publication, a recording, a diagram, or any other medium of expression which can be used to communicate the usefulness of the compositions and methods of the invention. The instructional material of the kit of the invention may, for example, be affixed to a container which contains the nucleic acid, peptide, and/or composition of the invention or be shipped together with a container which contains the nucleic acid, peptide, and/or composition. Alternatively, the instructional material may be shipped separately from the container with the intention that the instructional material and the compound be used cooperatively by the recipient. “Isolated” means altered or removed from the natural state. For example, a nucleic acid or a peptide naturally present in a living animal is not “isolated,” but the same nucleic acid or peptide partially or completely separated from the coexisting materials of its natural state is “isolated.” An isolated nucleic acid or protein can exist in substantially purified form, or can exist in a non-native environment such as, for example, a host cell.

[0086] The term “knockdown” as used herein refers to a decrease in gene expression of one or more genes.

[0087] The term “knockout” as used herein refers to the ablation of gene expression of one or more genes.

[0088] A “lentivirus” as used herein refers to a genus of the Retroviridae family. Lentiviruses are unique among the retroviruses in being able to infect non-dividing cells; they can deliver a significant amount of genetic information into the DNA of the host cell, so they are one of the most efficient methods of a gene delivery vector. HIV, SIV, and FIV are all examples of lentiviruses. Vectors derived from lentiviruses offer the means to achieve significant levels of gene transfer in vivo.

[0089] By the term “modified” as used herein, is meant a changed state or structure of a molecule or cell of the invention. Molecules may be modified in many ways, including chemically, structurally, and functionally. Cells may be modified through the introduction of nucleic acids.

[0090] By the term “modulating,” as used herein, is meant mediating a detectable increase or decrease in the level of a response in a subject compared with the level of a response in the subject in the absence of a treatment or compound, and/or compared with the level of a response in an otherwise identical but untreated subject. The term encompasses perturbing and/or affecting a native signal or response thereby mediating a beneficial therapeutic response in a subject, preferably, a human.

[0091] A “mutation” as used herein is a change in a DNA sequence resulting in an alteration from a given reference sequence (which may be, for example, an earlier collected DNA sample from the same subject). The mutation can comprise deletion and/or insertion and/or duplication and/or substitution of at least one deoxyribonucleic acid base such as a purine (adenine and/or thymine) and/or a pyrimidine (guanine and/or cytosine). Mutations may or may not produce discernible changes in the observable characteristics (phenotype) of an organism (subject).

[0092] By “nucleic acid” is meant any nucleic acid, whether composed of deoxyribonucleosides or ribonucleosides, and whether composed of phosphodiester linkages or modified linkages such as phosphotriester, phosphoramidate, siloxane, carbonate, carboxymethylester, acetamidate, carbamate, thioether, bridged phosphoramidate, bridged methylene phosphonate, phosphorothioate, methylphosphonate, phosphorodithioate, bridged phosphorothioate or sulfone linkages, and combinations of such linkages. The term nucleic acid also specifically includes nucleic acids composed of bases other than the five biologically occurring bases (adenine, guanine, thymine, cytosine and uracil).

[0093] In the context of the present invention, the following abbreviations for the commonly occurring nucleic acid bases are used. “A” refers to adenosine, “C” refers to cytosine, “G” refers to guanosine, “T” refers to thymidine, and “U” refers to uridine.

[0094] Unless otherwise specified, a “nucleotide sequence encoding an amino acid sequence” includes all nucleotide sequences that are degenerate versions of each other and that encode the same amino acid sequence. The phrase nucleotide sequence that encodes a protein or an RNA may also include introns to the extent that the nucleotide sequence encoding the protein may in some version contain an intron(s).

[0095] The term “oligonucleotide” typically refers to short polynucleotides, generally no greater than about 60 nucleotides. It will be understood that when a nucleotide sequence is represented by a DNA sequence (i.e., A, T, G, C), this also includes an RNA sequence (i.e., A, U, G, C) in which “U” replaces “T”.

[0096] “Parenteral” administration of an immunogenic composition includes, e.g., subcutaneous (s.c.), intravenous (i.v.), intramuscular (i.m.), or intrasternal injection, or infusion techniques.

[0097] The term “polynucleotide” as used herein is defined as a chain of nucleotides. Furthermore, nucleic acids are polymers of nucleotides. Thus, nucleic acids and polynucleotides as used herein are interchangeable. One skilled in the art has the general knowledge that nucleic acids are polynucleotides, which can be hydrolyzed into the monomeric “nucleotides.” The monomeric nucleotides can be hydrolyzed into nucleosides. As used herein polynucleotides include, but are not limited to, all nucleic acid sequences which are obtained by any means available in the art, including, without limitation, recombinant means, i.e., the cloning of nucleic acid sequences from a recombinant library or a cell genome, using ordinary cloning technology and PCR™, and the like, and by synthetic means. Conventional notation is used herein to describe polynucleotide sequences: the left-hand end of a single-stranded polynucleotide sequence is the 5′-end; the left-hand direction of a double-stranded polynucleotide sequence is referred to as the 5′-direction.

[0098] As used herein, the terms “peptide,” “polypeptide,” and “protein” are used interchangeably, and refer to a compound comprised of amino acid residues covalently linked by peptide bonds. A protein or peptide must contain at least two amino acids, and no limitation is placed on the maximum number of amino acids that can comprise a protein's or peptide's sequence. Polypeptides include any peptide or protein comprising two or more amino acids joined to each other by peptide bonds. As used herein, the term refers to both short chains, which also commonly are referred to in the art as peptides, oligopeptides and oligomers, for example, and to longer chains, which generally are referred to in the art as proteins, of which there are many types. “Polypeptides” include, for example, biologically active fragments, substantially homologous polypeptides, oligopeptides, homodimers, heterodimers, variants of polypeptides, modified polypeptides, derivatives, analogs, fusion proteins, among others. The polypeptides include natural peptides, recombinant peptides, synthetic peptides, or a combination thereof.

[0099] The term “promoter” as used herein is defined as a DNA sequence recognized by the synthetic machinery of the cell, or introduced synthetic machinery, required to initiate the specific transcription of a polynucleotide sequence.

[0100] A “sample” or “biological sample” as used herein means a biological material from a subject, including but is not limited to organ, tissue, exosome, blood, plasma, saliva, urine and other body fluid. A sample can be any source of material obtained from a subject.

[0101] As used herein, the terms “sequencing” or “nucleotide sequencing” refer to determining the order of nucleotides (base sequences) in a nucleic acid sample, e.g. DNA or RNA. Many techniques are available such as Sanger sequencing and high-throughput sequencing technologies (also known as next-generation sequencing technologies) such as Illumina's HiSeq and MiSeq platforms or the GS FLX platform offered by Roche Applied Science.

[0102] The term “subject” is intended to include living organisms in which an immune response can be elicited (e.g., mammals). A “subject” or “patient,” as used therein, may be a human or non-human mammal. Non-human mammals include, for example, livestock and pets, such as ovine, bovine, porcine, canine, feline and murine mammals. Preferably, the subject is human.

[0103] A “target site” or “target sequence” refers to a genomic nucleic acid sequence that defines a portion of a nucleic acid to which a binding molecule may specifically bind under conditions sufficient for binding to occur.

[0104] As used herein, the term “T cell receptor” or “TCR” refers to a complex of membrane proteins that participate in the activation of T cells in response to the presentation of antigen. The TCR is responsible for recognizing antigens bound to major histocompatibility complex molecules. TCR is composed of a heterodimer of an alpha (α) and beta (β) chain, although in some cells the TCR consists of gamma and delta (γ/δ) chains, TCRs may exist in α/β and γ/δ forms, which are structurally similar but have distinct anatomical locations and functions. Each chain is composed of two extracellular domains, a variable and constant domain. In some embodiments, the TCR can be modified on any cell comprising a TCR, including, for example, a helper T cell, a cytotoxic cell, a memory T cell, regulatory cell, natural killer T cell, and/or gamma delta T cell.

[0105] The term “therapeutic” as used herein means a treatment and/or prophylaxis. A therapeutic effect is obtained by suppression, remission, or eradication of a disease state.

[0106] The term “transfected” or “transformed” or “transduced” as used herein refers to a process by which exogenous nucleic acid is transferred or introduced into the host cell. A “transfected” or “transformed” or “transduced” cell is one which has been transfected, transformed or transduced with exogenous nucleic acid. The cell includes the primary subject cell and its progeny.

[0107] To “treat” a disease as the term is used herein, means to reduce the frequency or severity of at least one sign or symptom of a disease or disorder experienced by a subject.

[0108] A “vector” is a composition of matter which comprises an isolated nucleic acid and which can be used to deliver the isolated nucleic acid to the interior of a cell. Numerous vectors are known in the art including, but not limited to, linear polynucleotides, polynucleotides associated with ionic or amphiphilic compounds, plasmids, and viruses. Thus, the term “vector” includes an autonomously replicating plasmid or a virus. The term should also be construed to include non-plasmid and non-viral compounds which facilitate transfer of nucleic acid into cells, such as, for example, polylysine compounds, liposomes, and the like. Examples of viral vectors include, but are not limited to, Sendai viral vectors, adenoviral vectors, adeno-associated virus vectors, retroviral vectors, lentiviral vectors, and the like.

[0109] Ranges: throughout this disclosure, various aspects of the invention can be presented in a range format. It should be understood that the description in range format is merely for convenience and brevity and should not be construed as an inflexible limitation on the scope of the invention. Accordingly, the description of a range should be considered to have specifically disclosed all the possible subranges as well as individual numerical values within that range. For example, description of a range such as from 1 to 6 should be considered to have specifically disclosed subranges such as from 1 to 3, from 1 to 4, from 1 to 5, from 2 to 4, from 2 to 6, from 3 to 6 etc., as well as individual numbers within that range, for example, 1, 2, 2.7, 3, 4, 5, 5.3, and 6. This applies regardless of the breadth of the range.

### Description

[0110] The present invention provides in one aspect compositions and methods for genome-scale editing and screening of T cells. In certain embodiments, the invention provides an sgRNA library for genome-scale mutagenesis of T cells in vitro and/or in vivo. In other embodiments, the invention provides a vector system (comprising a multitude of vectors) enabling multiplexed genome editing in T lymphocytes (T cells), and simultaneously isolate or enrich edited T cells using a surrogate/affinity marker. In yet other embodiments, the invention provides a vector system (comprising a multitude of vectors) enabling expression of model antigens in cancer cells as immunotherapy models. In yet other embodiments, the invention provides a method for high-throughput genetic interrogation of CD8+ T cells in vitro and/or in vivo.

[0111] CD8⁺ T cells are fundamental to the adaptive immune response against intracellular pathogens and tumors. Recent clinical advancements have converged on the theme that CD8⁺ T cells play a central role in the cancer-immune cycle. Identification of genes modulating T cell function, such as the discovery of the PD-1 gene based on differential gene expression, the anti-tumor effect mediated by CTLA-4 inhibition in mouse model, and many subsequent studies, led to the immunotherapeutic paradigm of checkpoint blockade. Immunotherapy has revolutionized cancer treatments, making late-stage metastatic cancer no longer a death sentence for a fraction of patients suffering from certain cancer types, most pronounced in melanoma and lung cancer. Thus, discovering novel genes in T cells is key to the development of new and more effective cancer therapeutics. Classical genetic studies have further identified individual genes such as 4-1BB, CD27, CD28, ICOS, LAG3, OX-40, TIM3, and VISTA as potential targets for checkpoint modulation. However, an unbiased, global view of genes modulating T cell phenotypes in cancer immunity is lacking, partly due to the technological challenges in performing high-throughput screens in T cells in vivo. Therapeutic targets with the potential to enhance CD8⁺ T cell function are actively being pursued in pharmaceutical development and the clinic, leading to a new boom of clinical trials testing new checkpoint blockade antibodies and compounds either as monotherapy or in various combinations. Of note, the first-in-human genome editing clinical trials have debut with CRISPR-edited CD8⁺ T cells infused into cancer patients by adoptive transfer.

[0112] The present study uncovered certain genes for T cell trafficking and survival in vivo after adoptive transfer. These new insights can directly influence the conceptualization of new targets for enhancement of chimeric antigen receptor (CAR-T), checkpoint blockade, or combinatorial immunotherapy.

[0113] In the present study described herein, a T cell CRISPR knockout vector was generated and a genome-scale knockout library was cloned. The system was utilized to perform two high-throughput genetic screens in CD8⁺ cytotoxic T cells isolated from both wildtype and TCR-transgenic mice. By adoptively transferring the mutagenized cells into host mice, these screens yielded a global quantitative measurement of the relative abundance of mutant T cells within several lymphoid and non-lymphoid organs in mice. SgRNA enrichment analysis identified various previously undocumented targets that directly influence CD8⁺ T cell function in vivo upon CRISPR perturbation.

### Compositions

[0114] In one aspect, the invention includes a vector comprising a 5′ long terminal repeat (LTR) sequence, a U6 promoter sequence, a BsmBI restriction site, an EFS sequence or PGK constitutive promoter, an sgRNA expression cassette, a Thy1.1 cassette, a 3′ LTR sequence and an ampicillin resistance gene sequence (AmpR). In one embodiment, the vector comprises SEQ ID NO:129,213 (pSC017pLKO-U6-sgBsmBI-EFS-Thy11CO-spA). In another embodiment, the vector comprises SEQ ID NO:129,214. In yet another embodiment, the vector comprises SEQ ID NO:129,215. In certain embodiments, the vector can comprise additional components, such as but not limited to artificial selection markers, fluorescent proteins or a second U6-sgRNA cassette. In certain embodiments, vectors of the present invention enable robust genome editing in T cells.

[0115] In another aspect, the invention includes a vector comprising a 5′ long terminal repeat (LTR) sequence, a U6 promoter sequence, a BsmB1 restriction site, an EFS sequence, an sgRNA expression cassette, an mCherry sequence, a 2A peptide, a cOVA sequence, a 3′ LTR sequence and an ampicillin resistance gene sequence (AmpR). In certain embodiments, this vector enables expression of a model antigen (cOVA) for TCR recognition with transgenic OT-I (CD8+) and OT-II (CD4+) T cells. In one embodiment, this vector comprises SEQ ID NO: 129,216 (pMD02: lenti-pLKO-U6-sgBsmBI-EFS-mCherry-2A-cOVA).

[0116] In another aspect, the invention includes an sgRNA library. The library comprises a plurality of vectors, wherein each vector comprises an expression cassette for an sgRNA comprising a nucleotide sequence selected from the group consisting of SEQ ID NOs: 1-129,209. In certain embodiments, each of the plurality of vectors in the sgRNA library comprise a 5′ long terminal repeat (LTR) sequence, a U6 promoter sequence, a BsmB1 restriction site, an EFS sequence, an sgRNA expression cassette, a Thy1.1 cassette, a 3′ LTR sequence and an ampicillin resistance gene sequence (AmpR).

[0117] The invention also provides a kit comprising an sgRNA library. The sgRNA library comprises a plurality of vectors, wherein each vector comprises an expression cassette for an sgRNA comprising a nucleotide sequence selected from the group consisting of SEQ ID NOs: 1-129,209. In certain embodiments, the plurality of vectors comprise a 5′ long terminal repeat (LTR) sequence, a U6 promoter sequence, a BsmB1 restriction site, an EFS sequence, an sgRNA expression cassette, a Thy1.1 cassette, a 3′ LTR sequence and an ampicillin resistance gene sequence (AmpR). Included in the kits are instructional materials for use thereof. Instructional material can include directions for using the components of the kit as well as instructions or guidance for interpreting the results.

[0118] The invention also provides a vector comprising a 5′ inverted terminal repeat (ITR) sequence, a U6 promoter sequence, a BbsI restriction site, an sgRNA expression cassette, an EFS sequence, a SB100x cassette, a 3′ ITR sequence and an ampicillin resistance gene sequence (AmpR). In one embodiment, the vector comprises SEQ ID NO: 129,217.

| pLY005SB_pAAV-U6sg(BbsI)-EFS-SB100X | |
|---|---|
| (SEQ ID NO: 129,217) | |
| 1 | cctgcaggca gctgcgcgct cgctcgctca ctgaggccgc ccgggcaaag cccgggcgtc |
| 61 | gggcgacctt tggtcgcccg gcctcagtga gcgagcgagc gcgcagagag ggagtggcca |
| 121 | actccatcac taggggttcc tgcggccgca cgcgttctag actatacagt tgaagtcgga |
| 181 | agtttacata cacttaagtt ggagtcatta aaactcgttt ttcaactact ccacaaattt |
| 241 | cttgttaaca aacaatagtt ttggcaagtc agttaggaca tctactttgt gcatgacaca |
| 301 | agtcattttt ccaacaattg tttacagaca gattatttca cttataattc actgtatcac |
| 361 | aattccagtg ggtcagaagt ttacatacac taagttgact gtgcctttaa acagcttgga |
| 421 | aaattccaga aaatgatgtc atggctttag agaggatccg agggcctatt tcccatgatt |
| 481 | ccttcatatt tgcatatacg atacaaggct gttagagaga taattagaat taatttgact |
| 541 | gtaaacacaa agatattagt acaaaatacg tgacgtagaa agtaataatt tcttgggtag |
| 601 | tttgcagttt taaaattatg ttttaaaatg gactatcata tgcttaccgt aacttgaaag |
| 661 | tatttcgatt tcttggcttt atatatcttg tggaaaggac gaaacaccgg gtcttcgaga |
| 721 | agacctgttt tagagctaga aatagcaagt taaaataagg ctagtccgtt atcaacttga |
| 781 | aaaagtggca ccgagtcggt gcttttttgg ctagctggcc gcgtttaaac gtcgactagg |
| 841 | tcttgaaagg agtgggaatt ggctccggtg cccgtcagtg ggcagagcgc acatcgccca |
| 901 | cagtccccga gaagttgggg ggaggggtcg gcaattgatc cggtgcctag agaaggtggc |
| 961 | gcggggtaaa ctgggaaagt gatgtcgtgt actggctccg cctttttccc gagggtgggg |
| 1021 | gagaaccgta tataagtgca gtagtcgccg tgaacgttct ttttcgcaac gggtttgccg |
| 1081 | ccagaacaca ggctcgagat gggaaaatca aaagaaatca gccaagacct cagaaaaaga |
| 1141 | attgtagacc tccacaagtc tggttcatcc ttgggagcaa tttccaaacg cctggcggta |
| 1201 | ccacgttcat ctgtacaaac aatagtacgc aagtataaac accatgggac cacgcagccg |
| 1261 | tcataccgct caggaaggag acgcgttctg tctcctagag atgaacgtac tttggtgcga |
| 1321 | aaagtgcaaa tcaatcccag aacaacagca aaggaccttg tgaagatgct ggaggaaaca |
| 1381 | ggtacaaaag tatctatatc cacagtaaaa cgagtcctat atcgacataa cctgaaaggc |
| 1441 | cactcagcaa ggaagaagcc actgctccaa aaccgacata agaaagccag actacggttt |
| 1501 | gcaactgcac atggggacaa agatcgtact ttttggagaa atgtcctctg gtctgatgaa |
| 1561 | acaaaaatag aactgtttgg ccataatgac catcgttatg tttggaggaa gaagggggag |
| 1621 | gcttgcaagc cgaagaacac catcccaacc gtgaagcacg ggggtggcag catcatgttg |
| 1681 | tgggggtgct ttgctgcagg agggactggt gcacttcaca aaatagatgg catcatggac |
| 1741 | gcggtgcagt atgtggatat attgaagcaa catctcaaga catcagtcag gaagttaaag |
| 1801 | cttggtcgca aatgggtttt ccaacacgac aatgacccca agcatacttc caaagttgtg |
| 1861 | gcaaaatggc ttaaggacaa caaagtcaag gtattggagt ggccatcaca aagccctgac |
| 1921 | ctcaatccta tagaaaattt gtgggcagaa ctgaaaaagc gtgtgcgagc aaggaggcct |
| 1981 | acaaacctga ctcagttaca ccagctctgt caggaggaat gggccaaaat tcacccaaat |
| 2041 | tattgtggga agcttgtgga aggctacccg aaacgtttga cccaagttaa acaatttaaa |
| 2101 | ggcaatgcta ccaaatacta ggggccctaa ccgcgggaat aaaagatctt tattttcatt |
| 2161 | agatctgtgt gttggttttt tgtgtgaatt cttgagtgta tgtaaacttc tgacccactg |
| 2221 | ggaatgtgat gaaagaaata aaagctgaaa tgaatcattc tctctactat tattctgata |
| 2281 | tttcacattc ttaaaataaa gtggtgatcc taactgacct aagacaggga atttttacta |
| 2341 | ggattaaatg tcaggaattg tgaaaaagtg agtttaaatg tatttggcta aggtgtatgt |
| 2401 | aaacttccga cttcaactgt ataggcatgc ggtaaccacg tgcggaccga gcggccgcag |
| 2461 | gaacccctag tgatggagtt ggccactccc tctctgcgcg ctcgctcgct cactgaggcc |
| 2521 | gggcgaccaa aggtcgcccg acgcccgggc tttgcccggg cggcctcagt gagcgagcga |
| 2581 | gcgcgcagct gcctgcaggg gcgcctgatg cggtattttc tccttacgca tctgtgcggt |
| 2641 | atttcacacc gcatacgtca aagcaaccat agtacgcgcc ctgtagcggc gcattaagcg |
| 2701 | cggcgggtgt ggtggttacg cgcagcgtga ccgctacact tgccagcgcc ctagcgcccg |
| 2761 | ctcctttcgc tttcttccct tcctttctcg ccacgttcgc cggctttccc cgtcaagctc |
| 2821 | taaatcgggg gctcccttta gggttccgat ttagtgcttt acggcacctc gaccccaaaa |
| 2881 | aacttgattt gggtgatggt tcacgtagtg ggccatcgcc ctgatagacg gtttttcgcc |
| 2941 | ctttgacgtt ggagtccacg ttctttaata gtggactctt gttccaaact ggaacaacac |
| 3001 | tcaaccctat ctcgggctat tcttttgatt tataagggat tttgccgatt tcggcctatt |
| 3061 | ggttaaaaaa tgagctgatt taacaaaaat ttaacgcgaa ttttaacaaa atattaacgt |
| 3121 | ttacaatttt atggtgcact ctcagtacaa tctgctctga tgccgcatag ttaagccagc |
| 3181 | cccgacaccc gccaacaccc gctgacgcgc cctgacgggc ttgtctgctc ccggcatccg |
| 3241 | cttacagaca agctgtgacc gtctccggga gctgcatgtg tcagaggttt tcaccgtcat |
| 3301 | caccgaaacg cgcgagacga aagggcctcg tgatacgcct atttttatag gttaatgtca |
| 3361 | tgataataat ggtttcttag acgtcaggtg gcacttttcg gggaaatgtg cgcggaaccc |
| 3421 | ctatttgttt atttttctaa atacattcaa atatgtatcc gctcatgaga caataaccct |
| 3481 | gataaatgct tcaataatat tgaaaaagga agagtatgag tattcaacat ttccgtgtcg |
| 3541 | cccttattcc cttttttgcg gcattttgcc ttcctgtttt tgctcaccca gaaacgctgg |
| 3601 | tgaaagtaaa agatgctgaa gatcagttgg gtgcacgagt gggttacatc gaactggatc |
| 3661 | tcaacagcgg taagatcctt gagagttttc gccccgaaga acgttttcca atgatgagca |
| 3721 | cttttaaagt tctgctatgt ggcgcggtat tatcccgtat tgacgccggg caagagcaac |
| 3781 | tcggtcgccg catacactat tctcagaatg acttggttga gtactcacca gtcacagaaa |
| 3841 | agcatcttac ggatggcatg acagtaagag aattatgcag tgctgccata accatgagtg |
| 3901 | ataacactgc ggccaactta cttctgacaa cgatcggagg accgaaggag ctaaccgctt |
| 3961 | ttttgcacaa catgggggat catgtaactc gccttgatcg ttgggaaccg gagctgaatg |
| 4021 | aagccatacc aaacgacgag cgtgacacca cgatgcctgt agcaatggca acaacgttgc |
| 4081 | gcaaactatt aactggcgaa ctacttactc tagettcccg gcaacaatta atagactgga |
| 4141 | tggaggcgga taaagttgca ggaccacttc tgcgctcggc ccttccggct ggctggttta |
| 4201 | ttgctgataa atctggagcc ggtgagcgtg ggtctcgcgg tatcattgca gcactggggc |
| 4261 | cagatggtaa gccctcccgt atcgtagtta tctacacgac ggggagtcag gcaactatgg |
| 4321 | atgaacgaaa tagacagatc gctgagatag gtgcctcact gattaagcat tggtaactgt |
| 4381 | cagaccaagt ttactcatat atactttaga ttgatttaaa acttcatttt taatttaaaa |
| 4441 | ggatctaggt gaagatcctt tttgataatc tcatgaccaa aatcccttaa cgtgagtttt |
| 4501 | cgttccactg agcgtcagac cccgtagaaa agatcaaagg atcttcttga gatccttttt |
| 4561 | ttctgcgcgt aatctgctgc ttgcaaacaa aaaaaccacc gctaccagcg gtggtttgtt |
| 4621 | tgccggatca agagctacca actctttttc cgaaggtaac tggcttcagc agagcgcaga |
| 4681 | taccaaatac tgtccttcta gtgtagccgt agttaggcca ccacttcaag aactctgtag |
| 4741 | caccgcctac atacctcgct ctgctaatcc tgttaccagt ggctgctgcc agtggcgata |
| 4801 | agtcgtgtct taccgggttg gactcaagac gatagttacc ggataaggcg cagcggtcgg |
| 4861 | gctgaacggg gggttcgtgc acacagccca gcttggagcg aacgacctac accgaactga |
| 4921 | gatacctaca gcgtgagcta tgagaaagcg ccacgcttcc cgaagggaga aaggcggaca |
| 4981 | ggtatccggt aagcggcagg gtcggaacag gagagcgcac gagggagctt ccagggggaa |
| 5041 | acgcctggta tctttatagt cctgtcgggt ttcgccacct ctgacttgag cgtcgatttt |
| 5101 | tgtgatgctc gtcagggggg cggagcctat ggaaaaacgc cagcaacgcg gcctttttac |
| 5161 | ggttcctggc cttttgctgg ccttttgctc acatgt |

[0119] In another aspect, the invention provides a vector comprising a 5′ inverted terminal repeat (ITR) sequence, a U6 promoter sequence, a BbsI restriction site, an sgRNA expression cassette, an EFS sequence, a SB100x cassette, a Thy1.1 cassette, a 3′ ITR sequence and an ampicillin resistance gene sequence (AmpR). In one embodiment, the vector comprises SEQ ID NO: 129,218.

| pLY017SB_pAAV-U6sg(BbsI)-EFS-Thy1 | |
|---|---|
| (SEQ ID NO: 129,218) | |
| 1 | cctgcaggca gctgcgcgct cgctcgctca ctgaggccgc ccgggcaaag cccgggcgtc |
| 61 | gggcgacctt tggtcgcccg gcctcagtga gcgagcgagc gcgcagagag ggagtggcca |
| 121 | actccatcac taggggttcc tgcggccgca cgcgttctag actatacagt tgaagtcgga |
| 181 | agtttacata cacttaagtt ggagtcatta aaactcgttt ttcaactact ccacaaattt |
| 241 | cttgttaaca aacaatagtt ttggcaagtc agttaggaca tctactttgt gcatgacaca |
| 301 | agtcattttt ccaacaattg tttacagaca gattatttca cttataattc actgtatcac |
| 361 | aattccagtg ggtcagaagt ttacatacac taagttgact gtgcctttaa acagcttgga |
| 421 | aaattccaga aaatgatgtc atggctttag agaggatccg agggcctatt tcccatgatt |
| 481 | ccttcatatt tgcatatacg atacaaggct gttagagaga taattagaat taatttgact |
| 541 | gtaaacacaa agatattagt acaaaatacg tgacgtagaa agtaataatt tcttgggtag |
| 601 | tttgcagttt taaaattatg ttttaaaatg gactatcata tgcttaccgt aacttgaaag |
| 661 | tatttcgatt tcttggcttt atatatcttg tggaaaggac gaaacaccgg gtcttcgaga |
| 721 | agacctgttt tagagctaga aatagcaagt taaaataagg ctagtccgtt atcaacttga |
| 781 | aaaagtggca ccgagtcggt gcttttttgg ctagctggcc gcgtttaaac gtcgactagg |
| 841 | tcttgaaagg agtgggaatt ggctccggtg cccgtcagtg ggcagagcgc acatcgccca |
| 901 | cagtccccga gaagttgggg ggaggggtcg gcaattgatc cggtgcctag agaaggtggc |
| 961 | gcggggtaaa ctgggaaagt gatgtcgtgt actggctccg cctttttccc gagggtgggg |
| 1021 | gagaaccgta tataagtgca gtagtcgccg tgaacgttct ttttcgcaac gggtttgccg |
| 1081 | ccagaacaca ggctcgagat gaacccagcc atcagcgtcg ctctcctgct ctcagtcttg |
| 1141 | caggtgtccc gagggcagaa ggtgaccagc ctgacagcct gcctggtgaa ccaaaacctt |
| 1201 | cgcctggact gccgccatga gaataacacc aaggataact ccatccagca tgagttcagc |
| 1261 | ctgacccgag agaagaggaa gcacgtgctc tcaggcaccc ttgggatacc cgagcacacg |
| 1321 | taccgctccc gcgtcaccct ctccaaccag ccctatatca aggtccttac cctagccaac |
| 1381 | ttcaccacca aggatgaggg cgactacttt tgtgagcttc gcgtgtcggg cgcgaatccc |
| 1441 | atgagctcca ataaaagtat cagtgtgtat agagacaagc tggtcaagtg tggcggcata |
| 1501 | agcctgctgg ttcagaacac atcctggatg ctgctgctgc tgctttccct ctccctcctc |
| 1561 | caagccctgg acttcatttc tctgggcagt ggagagggca gaggaagtct gctaacatgc |
| 1621 | ggtgacgtcg aggagaatcc tggcccaatg ggaaaatcaa aagaaatcag ccaagacctc |
| 1681 | agaaaaagaa ttgtagacct ccacaagtct ggttcatcct tgggagcaat ttccaaacgc |
| 1741 | ctggcggtac cacgttcatc tgtacaaaca atagtacgca agtataaaca ccatgggacc |
| 1801 | acgcagccgt cataccgctc aggaaggaga cgcgttctgt ctcctagaga tgaacgtact |
| 1861 | ttggtgcgaa aagtgcaaat caatcccaga acaacagcaa aggaccttgt gaagatgctg |
| 1921 | gaggaaacag gtacaaaagt atctatatcc acagtaaaac gagtcctata tcgacataac |
| 1981 | ctgaaaggcc actcagcaag gaagaagcca ctgctccaaa accgacataa gaaagccaga |
| 2041 | ctacggtttg caactgcaca tggggacaaa gatcgtactt tttggagaaa tgtcctctgg |
| 2101 | tctgatgaaa caaaaataga actgtttggc cataatgacc atcgttatgt ttggaggaag |
| 2161 | aagggggagg cttgcaagcc gaagaacacc atcccaaccg tgaagcacgg gggtggcagc |
| 2221 | atcatgttgt gggggtgctt tgctgcagga gggactggtg cacttcacaa aatagatggc |
| 2281 | atcatggacg cggtgcagta tgtggatata ttgaagcaac atctcaagac atcagtcagg |
| 2341 | aagttaaagc ttggtcgcaa atgggttttc caacacgaca atgaccccaa gcatacttcc |
| 2401 | aaagttgtgg caaaatggct taaggacaac aaagtcaagg tattggagtg gccatcacaa |
| 2461 | agccctgacc tcaatcctat agaaaatttg tgggcagaac tgaaaaagcg tgtgcgagca |
| 2521 | aggaggccta caaacctgac tcagttacac cagctctgtc aggaggaatg ggccaaaatt |
| 2581 | cacccaaatt attgtgggaa gcttgtggaa ggctacccga aacgtttgac ccaagttaaa |
| 2641 | caatttaaag gcaatgctac caaatactag gggccctaac cgcgggaata aaagatcttt |
| 2701 | attttcatta gatctgtgtg ttggtttttt gtgtgaattc ttgagtgtat gtaaacttct |
| 2761 | gacccactgg gaatgtgatg aaagaaataa aagctgaaat gaatcattct ctctactatt |
| 2821 | attctgatat ttcacattct taaaataaag tggtgatcct aactgaccta agacagggaa |
| 2881 | tttttactag gattaaatgt caggaattgt gaaaaagtga gtttaaatgt atttggctaa |
| 2941 | ggtgtatgta aacttccgac ttcaactgta taggcatgcg gtaaccacgt gcggaccgag |
| 3001 | cggccgcagg aacccctagt gatggagttg gccactccct ctctgcgcgc tcgctcgctc |
| 3061 | actgaggccg ggcgaccaaa ggtcgcccga cgcccgggct ttgcccgggc ggcctcagtg |
| 3121 | agcgagcgag cgcgcagctg cctgcagggg cgcctgatgc ggtattttct ccttacgcat |
| 3181 | ctgtgcggta tttcacaccg catacgtcaa agcaaccata gtacgcgccc tgtagcggcg |
| 3241 | cattaagcgc ggcgggtgtg gtggttacgc gcagcgtgac cgctacactt gccagcgccc |
| 3301 | tagcgcccgc tcctttcgct ttcttccctt cctttctcgc cacgttcgcc ggctttcccc |
| 3361 | gtcaagctct aaatcggggg ctccctttag ggttccgatt tagtgcttta cggcacctcg |
| 3421 | accccaaaaa acttgatttg ggtgatggtt cacgtagtgg gccatcgccc tgatagacgg |
| 3481 | tttttcgccc tttgacgttg gagtccacgt tctttaatag tggactcttg ttccaaactg |
| 3541 | gaacaacact caaccctatc tcgggctatt cttttgattt ataagggatt ttgccgattt |
| 3601 | cggcctattg gttaaaaaat gagctgattt aacaaaaatt taacgcgaat tttaacaaaa |
| 3661 | tattaacgtt tacaatttta tggtgcactc tcagtacaat ctgctctgat gccgcatagt |
| 3721 | taagccagcc ccgacacccg ccaacacccg ctgacgcgcc ctgacgggct tgtctgctcc |
| 3781 | cggcatccgc ttacagacaa gctgtgaccg tctccgggag ctgcatgtgt cagaggifit |
| 3841 | caccgtcatc accgaaacgc gcgagacgaa agggcctcgt gatacgccta tttttatagg |
| 3901 | ttaatgtcat gataataatg gtttcttaga cgtcaggtgg cacttttcgg ggaaatgtgc |
| 3961 | gcggaacccc tatttgttta tttttctaaa tacattcaaa tatgtatccg ctcatgagac |
| 4021 | aataaccctg ataaatgctt caataatatt gaaaaaggaa gagtatgagt attcaacatt |
| 4081 | tccgtgtcgc ccttattccc ttttttgcgg cattttgcct tcctgttttt gctcacccag |
| 4141 | aaacgctggt gaaagtaaaa gatgctgaag atcagttggg tgcacgagtg ggttacatcg |
| 4201 | aactggatct caacagcggt aagatccttg agagttttcg ccccgaagaa cgttttccaa |
| 4261 | tgatgagcac ttttaaagtt ctgctatgtg gcgcggtatt atcccgtatt gacgccgggc |
| 4321 | aagagcaact cggtcgccgc atacactatt ctcagaatga cttggttgag tactcaccag |
| 4381 | tcacagaaaa gcatcttacg gatggcatga cagtaagaga attatgcagt gctgccataa |
| 4441 | ccatgagtga taacactgcg gccaacttac ttctgacaac gatcggagga ccgaaggagc |
| 4501 | taaccgcttt tttgcacaac atgggggatc atgtaactcg ccttgatcgt tgggaaccgg |
| 4561 | agctgaatga agccatacca aacgacgagc gtgacaccac gatgcctgta gcaatggcaa |
| 4621 | caacgttgcg caaactatta actggcgaac tacttactct agcttcccgg caacaattaa |
| 4681 | tagactggat ggaggcggat aaagttgcag gaccacttct gcgctcggcc cttccggctg |
| 4741 | gctggtttat tgctgataaa tctggagccg gtgagcgtgg gtctcgcggt atcattgcag |
| 4801 | cactggggcc agatggtaag ccctcccgta tcgtagttat ctacacgacg gggagtcagg |
| 4861 | caactatgga tgaacgaaat agacagatcg ctgagatagg tgcctcactg attaagcatt |
| 4921 | ggtaactgtc agaccaagtt tactcatata tactttagat tgatttaaaa cttcattttt |
| 4981 | aatttaaaag gatctaggtg aagatccttt ttgataatct catgaccaaa atcccttaac |
| 5041 | gtgagttttc gttccactga gcgtcagacc ccgtagaaaa gatcaaagga tcttcttgag |
| 5101 | atcctttttt tctgcgcgta atctgctgct tgcaaacaaa aaaaccaccg ctaccagcgg |
| 5161 | tggtttgttt gccggatcaa gagctaccaa ctctttttcc gaaggtaact ggcttcagca |
| 5221 | gagcgcagat accaaatact gtccttctag tgtagccgta gttaggccac cacttcaaga |
| 5281 | actctgtagc accgcctaca tacctcgctc tgctaatcct gttaccagtg gctgctgcca |
| 5341 | gtggcgataa gtcgtgtctt accgggttgg actcaagacg atagttaccg gataaggcgc |
| 5401 | agcggtcggg ctgaacgggg ggttcgtgca cacagcccag cttggagcga acgacctaca |
| 5461 | ccgaactgag atacctacag cgtgagctat gagaaagcgc cacgcttccc gaagggagaa |
| 5521 | aggcggacag gtatccggta agcggcaggg tcggaacagg agagcgcacg agggagcttc |
| 5581 | cagggggaaa cgcctggtat ctttatagtc ctgtcgggtt tcgccacctc tgacttgagc |
| 5641 | gtcgattttt gtgatgctcg tcaggggggc ggagcctatg gaaaaacgcc agcaacgcgg |
| 5701 | cctttttacg gttcctggcc ttttgctggc cttttgctca catgt |

[0120] In another aspect, the invention provides a vector comprising a 5′ inverted terminal repeat (ITR) sequence, a U6 promoter sequence, a BbsI restriction site, an sgRNA expression cassette, a 3′ ITR sequence and an ampicillin resistance gene sequence (AmpR). In one embodiment, the vector comprises SEQ ID NO: 129,219.

| pSC026b_pAAV-U6sgbbSapI-XD011bb | |
|---|---|
| (SEQ ID NO: 129,219) | |
| 1 | cctgcaggca gctgcgcgct cgctcgctca ctgaggccgc ccgggcaaag cccgggcgtc |
| 61 | gggcgacctt tggtcgcccg gcctcagtga gcgagcgagc gcgcagagag ggagtggcca |
| 121 | actccatcac taggggttcc tgcggccgca cgcgttctag aagagggcct atttcccatg |
| 181 | attccttcat atttgcatat acgatacaag gctgttagag agataattgg aattaatttg |
| 241 | actgtaaaca caaagatatt agtacaaaat acgtgacgta gaaagtaata atttcttggg |
| 301 | tagtttgcag ttttaaaatt atgttttaaa atggactatc atatgcttac cgtaacttga |
| 361 | aagtatttcg atttcttggc tttatatatc ttGTGGAAAG GACGAAACAC Cggaagagcg |
| 421 | agctcttctg ttttagagct aGAAAtagca agttaaaata aggctagtcc gttatcaact |
| 481 | tgaaaaagtg gcaccgagtc ggtgcTTTTT Tggtaccgtg cggaccgagc ggccgcagga |
| 541 | acccctagtg atggagttgg ccactccctc tctgcgcgct cgctcgctca ctgaggccgg |
| 601 | gcgaccaaag gtcgcccgac gcccgggctt tgcccgggcg gcctcagtga gcgagcgagc |
| 661 | gcgcagctgc ctgcaggggc gcctgatgcg gtattttctc cttacgcatc tgtgcggtat |
| 721 | ttcacaccgc atacgtcaaa gcaaccatag tacgcgccct gtagcggcgc attaagcgcg |
| 781 | gcgggtgtgg tggttacgcg cagcgtgacc gctacacttg ccagcgccct agcgcccgct |
| 841 | cctttcgctt tcttcccttc ctttctcgcc acgttcgccg gctttccccg tcaagctcta |
| 901 | aatcgggggc tccctttagg gttccgattt agtgctttac ggcacctcga ccccaaaaaa |
| 961 | cttgatttgg gtgatggttc acgtagtggg ccatcgccct gatagacggt ttttcgccct |
| 1021 | ttgacgttgg agtccacgtt ctttaatagt ggactcttgt tccaaactgg aacaacactc |
| 1081 | aaccctatct cgggctattc ttttgattta taagggattt tgccgatttc ggcctattgg |
| 1141 | ttaaaaaatg agctgattta acaaaaattt aacgcgaatt ttaacaaaat attaacgttt |
| 1201 | acaattttat ggtgcactct cagtacaatc tgctctgatg ccgcatagtt aagccagccc |
| 1261 | cgacacccgc caacacccgc tgacgcgccc tgacgggctt gtctgctccc ggcatccgct |
| 1321 | tacagacaag ctgtgaccgt ctccgggagc tgcatgtgtc agaggttttc accgtcatca |
| 1381 | ccgaaacgcg cgagacgaaa gggcctcgtg atacgcctat ttttataggt taatgtcatg |
| 1441 | ataataatgg tttcttagac gtcaggtggc acttttcggg gaaatgtgcg cggaacccct |
| 1501 | atttgtttat ttttctaaat acattcaaat atgtatccgc tcatgagaca ataaccctga |
| 1561 | taaatgcttc aataatattg aaaaaggaag agtatgagta ttcaacattt ccgtgtcgcc |
| 1621 | cttattccct tttttgcggc attttgcctt cctgtttttg ctcacccaga aacgctggtg |
| 1681 | aaagtaaaag atgctgaaga tcagttgggt gcacgagtgg gttacatcga actggatctc |
| 1741 | aacagcggta agatccttga gagttttcgc cccgaagaac gttttccaat gatgagcact |
| 1801 | tttaaagttc tgctatgtgg cgcggtatta tcccgtattg acgccgggca agagcaactc |
| 1861 | ggtcgccgca tacactattc tcagaatgac ttggttgagt actcaccagt cacagaaaag |
| 1921 | catcttacgg atggcatgac agtaagagaa ttatgcagtg ctgccataac catgagtgat |
| 1981 | aacactgcgg ccaacttact tctgacaacg atcggaggac cgaaggagct aaccgctttt |
| 2041 | ttgcacaaca tgggggatca tgtaactcgc cttgatcgtt gggaaccgga gctgaatgaa |
| 2101 | gccataccaa acgacgagcg tgacaccacg atgcctgtag caatggcaac aacgttgcgc |
| 2161 | aaactattaa ctggcgaact acttactcta gcttcccggc aacaattaat agactggatg |
| 2221 | gaggcggata aagttgcagg accacttctg cgctcggccc ttccggctgg ctggtttatt |
| 2281 | gctgataaat ctggagccgg tgagcgtggg tctcgcggta tcattgcagc actggggcca |
| 2341 | gatggtaagc cctcccgtat cgtagttatc tacacgacgg ggagtcaggc aactatggat |
| 2401 | gaacgaaata gacagatcgc tgagataggt gcctcactga ttaagcattg gtaactgtca |
| 2461 | gaccaagttt actcatatat actttagatt gatttaaaac ttcattttta atttaaaagg |
| 2521 | atctaggtga agatcctttt tgataatctc atgaccaaaa tcccttaacg tgagttttcg |
| 2581 | ttccactgag cgtcagaccc cgtagaaaag atcaaaggat cttcttgaga tectifittt |
| 2641 | ctgcgcgtaa tctgctgctt gcaaacaaaa aaaccaccgc taccagcggt ggtttgtttg |
| 2701 | ccggatcaag agctaccaac tctifitccg aaggtaactg gcttcagcag agcgcagata |
| 2761 | ccaaatactg tccttctagt gtagccgtag ttaggccacc acttcaagaa ctctgtagca |
| 2821 | ccgcctacat acctcgctct gctaatcctg ttaccagtgg ctgctgccag tggcgataag |
| 2881 | tcgtgtctta ccgggttgga ctcaagacga tagttaccgg ataaggcgca gcggtcgggc |
| 2941 | tgaacggggg gttcgtgcac acagcccagc ttggagcgaa cgacctacac cgaactgaga |
| 3001 | tacctacagc gtgagctatg agaaagcgcc acgcttcccg aagggagaaa ggcggacagg |
| 3061 | tatccggtaa gcggcagggt cggaacagga gagcgcacga gggagcttcc agggggaaac |
| 3121 | gcctggtatc tttatagtcc tgtcgggttt cgccacctct gacttgagcg tcgatttttg |
| 3181 | tgatgctcgt caggggggcg gagcctatgg aaaaacgcca gcaacgcggc ctttttacgg |
| 3241 | ttcctggcct tttgctggcc ttttgctcac atgt |

[0121] In another aspect, the invention provides a vector comprising a 5′ inverted terminal repeat (ITR) sequence, a U6 promoter sequence, a BbsI restriction site, an sgRNA expression cassette, an EFS sequence, a Thy1.1 cassette, a 3′ ITR sequence and an ampicillin resistance gene sequence (AmpR). In one embodiment, the vector comprises SEQ ID NO: 129,220.

| pSC025d_pAAV-U6sgbbSapI-EFS-Thy1 | |
|---|---|
| (SEQ ID NO: 129,220) | |
| 1 | cctgcaggca gctgcgcgct cgctcgctca ctgaggccgc ccgggcaaag cccgggcgtc |
| 61 | gggcgacctt tggtcgcccg gcctcagtga gcgagcgagc gcgcagagag ggagtggcca |
| 121 | actccatcac taggggttcc tgcggccgca cgcgttctag aagagggcct atttcccatg |
| 181 | attccttcat atttgcatat acgatacaag gctgttagag agataattgg aattaatttg |
| 241 | actgtaaaca caaagatatt agtacaaaat acgtgacgta gaaagtaata atttcttggg |
| 301 | tagtttgcag ttttaaaatt atgttttaaa atggactatc atatgcttac cgtaacttga |
| 361 | aagtatttcg atttcttggc tttatatatc ttgtggaaag gacgaaacac cggaagagcg |
| 421 | agctcttctg ttttagagct agaaatagca agttaaaata aggctagtcc gttatcaact |
| 481 | tgaaaaagtg gcaccgagtc ggtgcttttt tggtacctag gtcttgaaag gagtgggaat |
| 541 | tggctccggt gcccgtcagt gggcagagcg cacatcgccc acagtccccg agaagttggg |
| 601 | gggaggggtc ggcaattgat ccggtgccta gagaaggtgg cgcggggtaa actgggaaag |
| 661 | tgatgtcgtg tactggctcc gcctttttcc cgagggtggg ggagaaccgt atataagtgc |
| 721 | agtagtcgcc gtgaacgttc tttttcgcaa cgggtttgcc gccagaacac aggcaccggt |
| 781 | tctagacgta cggccaccat gaacccagcc atcagcgtcg ctctcctgct ctcagtcttg |
| 841 | caggtgtccc gagggcagaa ggtgaccagc ctgacagcct gcctggtgaa ccaaaacctt |
| 901 | cgcctggact gccgccatga gaataacacc aaggataact ccatccagca tgagttcagc |
| 961 | ctgacccgag agaagaggaa gcacgtgctc tcaggcaccc ttgggatacc cgagcacacg |
| 1021 | taccgctccc gcgtcaccct ctccaaccag ccctatatca aggtccttac cctagccaac |
| 1081 | ttcaccacca aggatgaggg cgactacttt tgtgagcttc gcgtaagtgg cgcgaatccc |
| 1141 | atgagctcca ataaaagtat cagtgtgtat agagacaagc tggtcaagtg tggcggcata |
| 1201 | agcctgctgg ttcagaacac atcctggatg ctgctgctgc tgetttccct ctccctcctc |
| 1261 | caagccctgg acttcatttc tctgtgaagc gcttaagaat tcgatatcaa gcttaataaa |
| 1321 | agatctttat tttcattaga tctgtgtgtt ggttttttgt gtggtaacca cgtgcggacc |
| 1381 | gagcggccgc aggaacccct agtgatggag ttggccactc cctctctgcg cgctcgctcg |
| 1441 | ctcactgagg ccgggcgacc aaaggtcgcc cgacgcccgg gctttgcccg ggcggcctca |
| 1501 | gtgagcgagc gagcgcgcag ctgcctgcag gggcgcctga tgcggtattt tctccttacg |
| 1561 | catctgtgcg gtatttcaca ccgcatacgt caaagcaacc atagtacgcg ccctgtagcg |
| 1621 | gcgcattaag cgcggcgggt gtggtggtta cgcgcagcgt gaccgctaca cttgccagcg |
| 1681 | ccctagcgcc cgctcctttc gctttcttcc cttcctttct cgccacgttc gccggctttc |
| 1741 | cccgtcaagc tctaaatcgg gggctccctt tagggttccg atttagtgct ttacggcacc |
| 1801 | tcgaccccaa aaaacttgat ttgggtgatg gttcacgtag tgggccatcg ccctgataga |
| 1861 | cggtttttcg ccctttgacg ttggagtcca cgttctttaa tagtggactc ttgttccaaa |
| 1921 | ctggaacaac actcaaccct atctcgggct attcttttga tttataaggg attttgccga |
| 1981 | tttcggccta ttggttaaaa aatgagctga tttaacaaaa atttaacgcg aattttaaca |
| 2041 | aaatattaac gtttacaatt ttatggtgca ctctcagtac aatctgctct gatgccgcat |
| 2101 | agttaagcca gccccgacac ccgccaacac ccgctgacgc gccctgacgg gcttgtctgc |
| 2161 | tcccggcatc cgcttacaga caagctgtga ccgtctccgg gagctgcatg tgtcagaggt |
| 2221 | tttcaccgtc atcaccgaaa cgcgcgagac gaaagggcct cgtgatacgc ctatttttat |
| 2281 | aggttaatgt catgataata atggtttctt agacgtcagg tggcactttt cggggaaatg |
| 2341 | tgcgcggaac ccctatttgt ttattifict aaatacattc aaatatgtat ccgctcatga |
| 2401 | gacaataacc ctgataaatg cttcaataat attgaaaaag gaagagtatg agtattcaac |
| 2461 | atttccgtgt cgcccttatt cccttttttg cggcattttg ccttcctgtt tttgctcacc |
| 2521 | cagaaacgct ggtgaaagta aaagatgctg aagatcagtt gggtgcacga gtgggttaca |
| 2581 | tcgaactgga tctcaacagc ggtaagatcc ttgagagttt tcgccccgaa gaacgttttc |
| 2641 | caatgatgag cacttttaaa gttctgctat gtggcgcggt attatcccgt attgacgccg |
| 2701 | ggcaagagca actcggtcgc cgcatacact attctcagaa tgacttggtt gagtactcac |
| 2761 | cagtcacaga aaagcatctt acggatggca tgacagtaag agaattatgc agtgctgcca |
| 2821 | taaccatgag tgataacact gcggccaact tacttctgac aacgatcgga ggaccgaagg |
| 2881 | agctaaccgc ttttttgcac aacatggggg atcatgtaac tcgccttgat cgttgggaac |
| 2941 | cggagctgaa tgaagccata ccaaacgacg agcgtgacac cacgatgcct gtagcaatgg |
| 3001 | caacaacgtt gcgcaaacta ttaactggcg aactacttac tctagcttcc cggcaacaat |
| 3061 | taatagactg gatggaggcg gataaagttg caggaccact tctgcgctcg gcccttccgg |
| 3121 | ctggctggtt tattgctgat aaatctggag ccggtgagcg tgggtctcgc ggtatcattg |
| 3181 | cagcactggg gccagatggt aagccctccc gtatcgtagt tatctacacg acggggagtc |
| 3241 | aggcaactat ggatgaacga aatagacaga tcgctgagat aggtgcctca ctgattaagc |
| 3301 | attggtaact gtcagaccaa gtttactcat atatacttta gattgattta aaacttcatt |
| 3361 | tttaatttaa aaggatctag gtgaagatcc tttttgataa tctcatgacc aaaatccctt |
| 3421 | aacgtgagtt ttcgttccac tgagcgtcag accccgtaga aaagatcaaa ggatcttctt |
| 3481 | gagatccttt ttttctgcgc gtaatctgct gcttgcaaac aaaaaaacca ccgctaccag |
| 3541 | cggtggtttg tttgccggat caagagctac caactctttt tccgaaggta actggcttca |
| 3601 | gcagagcgca gataccaaat actgtccttc tagtgtagcc gtagttaggc caccacttca |
| 3661 | agaactctgt agcaccgcct acatacctcg ctctgctaat cctgttacca gtggctgctg |
| 3721 | ccagtggcga taagtcgtgt cttaccgggt tggactcaag acgatagtta ccggataagg |
| 3781 | cgcagcggtc gggctgaacg gggggttcgt gcacacagcc cagcttggag cgaacgacct |
| 3841 | acaccgaact gagataccta cagcgtgagc tatgagaaag cgccacgctt cccgaaggga |
| 3901 | gaaaggcgga caggtatccg gtaagcggca gggtcggaac aggagagcgc acgagggagc |
| 3961 | ttccaggggg aaacgcctgg tatctttata gtcctgtcgg gtttcgccac ctctgacttg |
| 4021 | agcgtcgatt tttgtgatgc tcgtcagggg ggcggagcct atggaaaaac gccagcaacg |
| 4081 | cggccttttt acggttcctg gccttttgct ggccttttgc tcacatgt |

[0122] In another aspect, the invention provides a vector comprising a 5′ inverted terminal repeat (ITR) sequence, a U6 promoter sequence, a BbsI restriction site, an sgRNA expression cassette, an EFS sequence, a SB100x cassette, a GFP-NLS fusion cassette, a 3′ ITR sequence and an ampicillin resistance gene sequence (AmpR). In one embodiment, the vector comprises SEQ ID NO: 129,221.

| pSC031_pAAV-U6sgbbSapI-EFS-GFP-NLS | |
|---|---|
| (SEQ ID NO: 129,221) | |
| 1 | cctgcaggca gctgcgcgct cgctcgctca ctgaggccgc ccgggcaaag cccgggcgtc |
| 61 | gggcgacctt tggtcgcccg gcctcagtga gcgagcgagc gcgcagagag ggagtggcca |
| 121 | actccatcac taggggttcc tgcggccgca cgcgttctag aagagggcct atttcccatg |
| 181 | attccttcat atttgcatat acgatacaag gctgttagag agataattgg aattaatttg |
| 241 | actgtaaaca caaagatatt agtacaaaat acgtgacgta gaaagtaata atttcttggg |
| 301 | tagtttgcag ttttaaaatt atgttttaaa atggactatc atatgcttac cgtaacttga |
| 361 | aagtatttcg atttcttggc tttatatatc ttgtggaaag gacgaaacac cggaagagcg |
| 421 | agctcttctg ttttagagct agaaatagca agttaaaata aggctagtcc gttatcaact |
| 481 | tgaaaaagtg gcaccgagtc ggtgcttttt tggtacctag gtcttgaaag gagtgggaat |
| 541 | tggctccggt gcccgtcagt gggcagagcg cacatcgccc acagtccccg agaagttggg |
| 601 | gggaggggtc ggcaattgat ccggtgccta gagaaggtgg cgcggggtaa actgggaaag |
| 661 | tgatgtcgtg tactggctcc gcctttttcc cgagggtggg ggagaaccgt atataagtgc |
| 721 | agtagtcgcc gtgaacgttc tttttcgcaa cgggtttgcc gccagaacac aggaccggtt |
| 781 | ctagacgtac ggccaccatg gtgagcaagg gcgaggagct gttcaccggg gtggtgccca |
| 841 | tcctggtcga gctggacggc gacgtaaacg gccacaagtt cagcgtgtcc ggcgagggcg |
| 901 | agggcgatgc cacctacggc aagctgaccc tgaagttcat ctgcaccacc ggcaagctgc |
| 961 | ccgtgccctg gcccaccctc gtgaccaccc tgacctacgg cgtgcagtgc ttcagccgct |
| 1021 | accccgacca catgaagcag cacgacttct tcaagtccgc catgcccgaa ggctacgtcc |
| 1081 | aggagcgcac catcttcttc aaggacgacg gcaactacaa gacccgcgcc gaggtgaagt |
| 1141 | tcgagggcga caccctggtg aaccgcatcg agctgaaggg catcgacttc aaggaggacg |
| 1201 | gcaacatcct ggggcacaag ctggagtaca actacaacag ccacaacgtc tatatcatgg |
| 1261 | ccgacaagca gaagaacggc atcaaggtga acttcaagat ccgccacaac atcgaggacg |
| 1321 | gcagcgtgca gctcgccgac cactaccagc agaacacccc catcggcgac ggccccgtgc |
| 1381 | tgctgcccga caaccactac ctgagcaccc agtccgccct gagcaaagac cccaacgaga |
| 1441 | agcgcgatca catggtcctg ctggagttcg tgaccgccgc cgggatcact ctcggcatgg |
| 1501 | acgagctgta caagaagcgt cctgctgcta ctaagaaagc tggtcaagct aagaaaaaga |
| 1561 | aataagaatt cgatatcaag cttaataaaa gatctttatt ttcattagat ctgtgtgttg |
| 1621 | gttttttgtg tggtaaccac gtgcggaccg agcggccgca ggaaccccta gtgatggagt |
| 1681 | tggccactcc ctctctgcgc gctcgctcgc tcactgaggc cgggcgacca aaggtcgccc |
| 1741 | gacgcccggg ctttgcccgg gcggcctcag tgagcgagcg agcgcgcagc tgcctgcagg |
| 1801 | ggcgcctgat gcggtatttt ctccttacgc atctgtgcgg tatttcacac cgcatacgtc |
| 1861 | aaagcaacca tagtacgcgc cctgtagcgg cgcattaagc gcggcgggtg tggtggttac |
| 1921 | gcgcagcgtg accgctacac ttgccagcgc cctagcgccc gctcctttcg ctttcttccc |
| 1981 | ttcctttctc gccacgttcg ccggctttcc ccgtcaagct ctaaatcggg ggctcccttt |
| 2041 | agggttccga tttagtgctt tacggcacct cgaccccaaa aaacttgatt tgggtgatgg |
| 2101 | ttcacgtagt gggccatcgc cctgatagac ggtttttcgc cctttgacgt tggagtccac |
| 2161 | gttctttaat agtggactct tgttccaaac tggaacaaca ctcaacccta tctcgggcta |
| 2221 | ttcttttgat ttataaggga ttttgccgat ttcggcctat tggttaaaaa atgagctgat |
| 2281 | ttaacaaaaa tttaacgcga attttaacaa aatattaacg tttacaattt tatggtgcac |
| 2341 | tctcagtaca atctgctctg atgccgcata gttaagccag ccccgacacc cgccaacacc |
| 2401 | cgctgacgcg ccctgacggg cttgtctgct cccggcatcc gcttacagac aagctgtgac |
| 2461 | cgtctccggg agctgcatgt gtcagaggtt ttcaccgtca tcaccgaaac gcgcgagacg |
| 2521 | aaagggcctc gtgatacgcc tatttttata ggttaatgtc atgataataa tggtttctta |
| 2581 | gacgtcaggt ggcacttttc ggggaaatgt gcgcggaacc cctatttgtt tatttttcta |
| 2641 | aatacattca aatatgtatc cgctcatgag acaataaccc tgataaatgc ttcaataata |
| 2701 | ttgaaaaagg aagagtatga gtattcaaca tttccgtgtc gcccttattc ccttttttgc |
| 2761 | ggcattttgc cttcctgttt ttgctcaccc agaaacgctg gtgaaagtaa aagatgctga |
| 2821 | agatcagttg ggtgcacgag tgggttacat cgaactggat ctcaacagcg gtaagatcct |
| 2881 | tgagagtttt cgccccgaag aacgttttcc aatgatgagc acttttaaag ttctgctatg |
| 2941 | tggcgcggta ttatcccgta ttgacgccgg gcaagagcaa ctcggtcgcc gcatacacta |
| 3001 | ttctcagaat gacttggttg agtactcacc agtcacagaa aagcatctta cggatggcat |
| 3061 | gacagtaaga gaattatgca gtgctgccat aaccatgagt gataacactg cggccaactt |
| 3121 | acttctgaca acgatcggag gaccgaagga gctaaccgct tttttgcaca acatggggga |
| 3181 | tcatgtaact cgccttgatc gttgggaacc ggagctgaat gaagccatac caaacgacga |
| 3241 | gcgtgacacc acgatgcctg tagcaatggc aacaacgttg cgcaaactat taactggcga |
| 3301 | actacttact ctagcttccc ggcaacaatt aatagactgg atggaggcgg ataaagttgc |
| 3361 | aggaccactt ctgcgctcgg cccttccggc tggctggttt attgctgata aatctggagc |
| 3421 | cggtgagcgt gggtctcgcg gtatcattgc agcactgggg ccagatggta agccctcccg |
| 3481 | tatcgtagtt atctacacga cggggagtca ggcaactatg gatgaacgaa atagacagat |
| 3541 | cgctgagata ggtgcctcac tgattaagca ttggtaactg tcagaccaag tttactcata |
| 3601 | tatactttag attgatttaa aacttcattt ttaatttaaa aggatctagg tgaagatcct |
| 3661 | ttttgataat ctcatgacca aaatccctta acgtgagttt tcgttccact gagcgtcaga |
| 3721 | ccccgtagaa aagatcaaag gatcttcttg agatcctttt tttctgcgcg taatctgctg |
| 3781 | cttgcaaaca aaaaaaccac cgctaccagc ggtggtttgt ttgccggatc aagagctacc |
| 3841 | aactcttttt ccgaaggtaa ctggcttcag cagagcgcag ataccaaata ctgtccttct |
| 3901 | agtgtagccg tagttaggcc accacttcaa gaactctgta gcaccgccta catacctcgc |
| 3961 | tctgctaatc ctgttaccag tggctgctgc cagtggcgat aagtcgtgtc ttaccgggtt |
| 4021 | ggactcaaga cgatagttac cggataaggc gcagcggtcg ggctgaacgg ggggttcgtg |
| 4081 | cacacagccc agcttggagc gaacgaccta caccgaactg agatacctac agcgtgagct |
| 4141 | atgagaaagc gccacgcttc ccgaagggag aaaggcggac aggtatccgg taagcggcag |
| 4201 | ggtcggaaca ggagagcgca cgagggagct tccaggggga aacgcctggt atctttatag |
| 4261 | tcctgtcggg tttcgccacc tctgacttga gcgtcgattt ttgtgatgct cgtcaggggg |
| 4321 | gcggagccta tggaaaaacg ccagcaacgc ggccttttta cggttcctgg ccttttgctg |
| 4381 | gccttttgct cacatgt |

[0123] In certain embodiments, any of the vectors of the present invention may comprise an sgRNA expression cassette that expresses an sgRNA comprising a nucleotide sequence selected from the group consisting of SEQ ID NOs: 1-129,209. In other embodiments, any one of the vectors may comprise an sgRNA expression cassette the expresses an sgRNA comprising a nucleotide sequence selected from the group consisting of SEQ ID NOs: 129,222-140,680. In certain embodiments, any of the vectors of the present invention may comprise an sgRNA expression cassette that expresses an sgRNA consisting of a nucleotide sequence selected from the group consisting of SEQ ID NOs: 1-129,209. In other embodiments, any one of the vectors may comprise an sgRNA expression cassette that expresses an sgRNA consisting of a nucleotide sequence selected from the group consisting of SEQ ID NOs: 129,222-140,680.

### Methods

[0124] In one aspect, the invention includes a method of genome editing and screening of a T cell in vitro. The method comprises contacting the T cell with Cas9 and an sgRNA library. The sgRNA library comprises a plurality of vectors, wherein each vector comprises an expression cassette for an sgRNA comprising a nucleotide sequence selected from the group consisting of SEQ ID NOs: 1-129,209. The contacting causes the T cell to undergo genome editing. The T cell is then screened in vitro.

[0125] In another aspect, the invention includes a method of genome editing and screening of a T cell in vitro. The method comprises contacting the T cell with Cas9 and an sgRNA library. The sgRNA library comprises a plurality of vectors, wherein each vector comprises an expression cassette for an sgRNA comprising a nucleotide sequence selected from the group consisting of SEQ ID NOs: 129,222-140,680. The contacting causes the T cell to undergo genome editing. The T cell is then screened in vitro.

[0126] Another aspect of the invention includes a method of genome editing and screening of a T cell in vivo. The method comprises contacting an isolated T cell with Cas9 and an sgRNA library. The sgRNA library comprises a plurality of vectors, wherein each vector comprises an expression cassette for an sgRNA comprising a nucleotide sequence selected from the group consisting of SEQ ID NOs: 1-129,209. The contacting causes the T cell to undergo genome editing, thus yielding a modified T cell. The modified T cell is then administered to an animal, and the modified T cell is screened in vivo.

[0127] Yet another aspect of the invention includes a method of genome editing and screening of a T cell in vivo. The method comprises contacting an isolated T cell with Cas9 and an sgRNA library. The sgRNA library comprises a plurality of vectors, wherein each vector comprises an expression cassette for an sgRNA comprising a nucleotide sequence selected from the group consisting of SEQ ID NOs: 1-129,209. The contacting causes the T cell to undergo genome editing, thus yielding a modified T cell. The modified T cell is then administered to an animal, and the modified T cell is screened in vivo.

[0128] The T cell can be any type of T lymphocyte including but not limited to: a CD8+ cell, a CD4+ cell, or a T regulatory (Treg) cell, a Th1 cell, a Th2 cell, a Th17 cell, a follicular helper T cell (Tfh), a T memory cell, a T effector cell, a T effector memory cell, an engineered T cell, and a CAR T cell. The methods of the invention can further comprise isolating and or enriching the T cells.

[0129] In certain embodiments of the invention, the animal has a condition, which can include any condition related to or affected by T cells. Examples of such conditions can include, but are not limited to, (1) Primary immune deficiencies such as Severe Combined Immunodeficiency (SCID), DiGeorge syndrome, Hyperimmunoglobulin E syndrome (also known as Job's Syndrome), Common variable immunodeficiency (CVID) (B-cell levels are normal in circulation but with decreased production of IgG throughout the years, so it is the only primary immune disorder that presents onset in the late teens years), Chronic granulomatous disease (CGD—a deficiency in NADPH oxidase enzyme, which causes failure to generate oxygen radicals. Classical recurrent infection from catalase positive bacteria and fungi), Wiskott-Aldrich syndrome (WAS), Autoimmune lymphoproliferative syndrome (ALPS), Hyper IgM syndrome (X-linked disorder that causes a deficiency in the production of CD40 ligand on activated T-cells. This increases the production and release of IgM into circulation. The B-cell and T-cell numbers are within normal limits. Increased susceptibility to extracellular bacteria and opportunistic infections), Leukocyte adhesion deficiency (LAD), NF-κB Essential Modifier (NEMO) Mutations, Selective immunoglobulin A deficiency (the most common defect of the humoral immunity, characterized by a deficiency of IgA. Produces repeating sino-pulmonary and gastrointestinal infections), X-linked agammaglobulinemia (XLA; also known as Bruton type agammaglobulinemia: characterized by a deficiency in tyrosine kinase enzyme that blocks B-cell maturation in the bone marrow. No B-cells are produced to circulation and thus, there are no immunoglobulin classes, although there tends to be a normal cell-mediated immunity), X-linked lymphoproliferative disease (XLP), Ataxia-telangiectasia; (2) Secondary immune deficiencies such as HIV/AIDS; (3) Other internal immune disorders such as immune-mediated inflammatory diseases, autoimmune disease, transplantation rejection, Graft versus Host Disease (GVHD); (4) Infections such as viral infections, bacterial infections, and parasitic infections; (5) Cancers such leukemia, liver cancer, lung cancer, melanoma, Non-Hodgkin lymphoma, pancreatic cancer, prostate cancer, and thyroid cancer.

[0130] In certain embodiments, screening T cells after the sgRNA library has been administered to the animal provides information about the specific genes involved in a condition the animal has. Screening T cells can comprise any method commonly known to one of ordinary skill in the art including but not limited to methods of nucleotide sequencing, sgRNA PCR, and/or flow cytometry.

[0131] Nucleotide sequencing or “sequencing”, as it is commonly known in the art, can be performed by standard methods commonly known to one of ordinary skill in the art. In certain embodiments of the invention, sequencing is performed by targeted capture sequencing. Targeted captured sequencing can be performed as described herein, or by methods commonly performed by one of ordinary skill in the art. In certain embodiments of the invention sequencing is performed via next-generation sequencing. Next-generation sequencing (NGS), also known as high-throughput sequencing, is used herein to describe a number of different modern sequencing technologies that allow to sequence DNA and RNA much more quickly and cheaply than the previously used Sanger sequencing (Metzker, 2010, Nature Reviews Genetics 11.1: 31-46). It is based on micro- and nanotechnologies to reduce the size of sample, the reagent costs, and to enable massively parallel sequencing reactions. It can be highly multiplexed which allows simultaneous sequencing and analysis of millions of samples. NGS includes first, second, third as well as subsequent Next Generations Sequencing technologies. Data generated from NGS can be analyzed via a broad range of computational tools. The wide variety of analysis can be appreciated and performed by those skilled in the art.

[0132] Genome editing can include introducing mutations throughout the genome of the cell. The mutations introduced can be any combination of insertions or deletions, including but not limited to a single base insertion, a single base deletion, a frameshift, a rearrangement, and an insertion or deletion of 2, 3, 4, 5, 6, 7, 8, 9, 10, 15, 20, 25, 30, 40, 50, 60, 70, 80, 90, 100, 150, 200, 250, 300, any and all numbers in between, bases. The mutation can occur in a gene or in a non-coding region.

[0133] In certain embodiments of the invention, the animal is a mouse. Other animals that can be used include but are not limited to rats, rabbits, dogs, cats, horses, pigs, cows and birds. In certain embodiments, the animal is a human. The sgRNA library can be administered to an animal by any means standard in the art. For example the vectors can be injected into the animal. The injections can be intravenous, subcutaneous, intraperitoneal, or directly into a tissue or organ. In certain embodiments, the sgRNA library is adoptively transferred to the animal.

### CRISPR/Cas9

[0134] The CRISPR/Cas9 system is a facile and efficient system for inducing targeted genetic alterations. Target recognition by the Cas9 protein requires a ‘seed’ sequence within the guide RNA (gRNA) and a conserved di-nucleotide containing protospacer adjacent motif (PAM) sequence upstream of the gRNA-binding region. The CRISPR/Cas9 system can thereby be engineered to cleave virtually any DNA sequence by redesigning the gRNA in cell lines (such as 293T cells), primary cells, and CART cells. The CRISPR/Cas9 system can simultaneously target multiple genomic loci by co-expressing a single Cas9 protein with two or more gRNAs, making this system uniquely suited for multiple gene editing or synergistic activation of target genes.

[0135] The Cas9 protein and guide RNA form a complex that identifies and cleaves target sequences. Cas9 is comprised of six domains: REC I, REC II, Bridge Helix, PAM interacting, HNK and RuvC. The RecI domain binds the guide RNA, while the Bridge helix binds to target DNA. The HNH and RuvC domains are nuclease domains. Guide RNA is engineered to have a 5′ end that is complementary to the target DNA sequence. Upon binding of the guide RNA to the Cas9 protein, a conformational change occurs activating the protein. Once activated, Cas9 searches for target DNA by binding to sequences that match its protospacer adjacent motif (PAM) sequence, A PAM is a two or three nucleotide base sequence within one nucleotide downstream of the region complementary to the guide RNA. In one non-limiting example, the PAM sequence is 5′-NGG-3′. When the Cas9 protein finds its target sequence with the appropriate PAM, it melts the bases upstream of the PAM and pairs them with the complementary region on the guide RNA. Then the RuvC and HNH nuclease domains cut the target DNA after the third nucleotide base upstream of the PAM.

[0136] One non-limiting example of a CRISPR/Cas system used to inhibit gene expression, CRISPRi, is described in U.S. Patent Appl. Publ. No. US20140068797. CRISPRi induces permanent gene disruption that utilizes the RNA-guided Cas9 endonuclease to introduce DNA double stranded breaks which trigger error-prone repair pathways to result in frame shift mutations. When coexpressed with a guide RNA, a DNA recognition complex is generated that specifically interferes with transcriptional elongation, RNA polymerase binding, or transcription factor binding. This CRISPRi system efficiently represses expression of targeted genes.

[0137] CRISPR/Cas gene disruption occurs when a guide nucleic acid sequence specific for a target gene and a Cas endonuclease are introduced into a cell and form a complex that enables the Cas endonuclease to introduce a double strand break at the target gene. In certain embodiments, the CRISPR/Cas system comprises an expression vector, such as, but not limited to, an pAd5F35-CRISPR vector. In other embodiments, the Cas expression vector induces expression of Cas9 endonuclease. Other endonucleases may also be used, including but not limited to, T7, Cas3, Cas8a, Cas8b, Cas10d, Cse1, Csy1, Csn2, Cas4, Cas10, Csm2, Cmr5, Fok1, other nucleases known in the art, and any combinations thereof.

[0138] In certain embodiments, inducing the Cas expression vector comprises exposing the cell to an agent that activates an inducible promoter in the Cas expression vector. In such embodiments, the Cas expression vector includes an inducible promoter, such as one that is inducible by exposure to an antibiotic (e.g., by tetracycline or a derivative of tetracycline, for example doxycycline). However, it should be appreciated that other inducible promoters can be used. The inducing agent can be a selective condition (e.g., exposure to an agent, for example an antibiotic) that results in induction of the inducible promoter. This results in expression of the Cas expression vector.

[0139] In certain embodiments, guide RNA(s) and Cas9 can be delivered to a cell as a ribonucleoprotein (RNP) complex. RNPs are comprised of purified Cas9 protein complexed with gRNA and are well known in the art to be efficiently delivered to multiple types of cells, including but not limited to stem cells and immune cells (Addgene, Cambridge, Mass., Minis Bio LLC, Madison, Wis.).

[0140] The guide RNA is specific for a genomic region of interest and targets that region for Cas endonuclease-induced double strand breaks. The target sequence of the guide RNA sequence may be within a loci of a gene or within a non-coding region of the genome. In certain embodiments, the guide nucleic acid sequence is at least 10, 11, 12, 13, 14, 15, 16, 17, 18, 19, 20, 21, 22, 23, 24, 25, 26, 27, 30, 31, 32, 33, 34, 35, 36, 37, 38, 39, 40 or more nucleotides in length.

[0141] In the context of formation of a CRISPR complex, “target sequence” refers to a sequence to which a guide sequence is designed to have some complementarity, where hybridization between a target sequence and a guide sequence promotes the formation of a CRISPR complex. Full complementarity is not necessarily required, provided there is sufficient complementarity to cause hybridization and promote formation of a CRISPR complex. A target sequence may comprise any polynucleotide, such as a DNA or a RNA polynucleotide. In certain embodiments, a target sequence is located in the nucleus or cytoplasm of a cell. In other embodiments, the target sequence may be within an organelle of a eukaryotic cell, for example, mitochondrion or nucleus. Typically, in the context of an endogenous CRISPR system, formation of a CRISPR complex (comprising a guide sequence hybridized to a target sequence and complexed with one or more Cas proteins) results in cleavage of one or both strands in or near (e.g., within about 1, 2, 3, 4, 5, 6, 7, 8, 9, 10, 20, 50 or more base pairs) the target sequence. As with the target sequence, it is believed that complete complementarity is not needed, provided this is sufficient to be functional.

[0142] In certain embodiments, one or more vectors driving expression of one or more elements of a CRISPR system are introduced into a host cell, such that expression of the elements of the CRISPR system direct formation of a CRISPR complex at one or more target sites. For example, a Cas enzyme, a guide sequence linked to a tracr-mate sequence, and a tracr sequence could each be operably linked to separate regulatory elements on separate vectors. Alternatively, two or more of the elements expressed from the same or different regulatory elements may be combined in a single vector, with one or more additional vectors providing any components of the CRISPR system not included in the first vector. CRISPR system elements that are combined in a single vector may be arranged in any suitable orientation, such as one element located 5′ with respect to (“upstream” of) or 3′ with respect to (“downstream” of) a second element. The coding sequence of one element may be located on the same or opposite strand of the coding sequence of a second element, and oriented in the same or opposite direction. In certain embodiments, a single promoter drives expression of a transcript encoding a CRISPR enzyme and one or more of the guide sequence, tracr mate sequence (optionally operably linked to the guide sequence), and a tracr sequence embedded within one or more intron sequences (e.g., each in a different intron, two or more in at least one intron, or all in a single intron).

[0143] In certain embodiments, the CRISPR enzyme is part of a fusion protein comprising one or more heterologous protein domains (e.g. about or more than about 1, 2, 3, 4, 5, 6, 7, 8, 9, 10, or more domains in addition to the CRISPR enzyme). A CRISPR enzyme fusion protein may comprise any additional protein sequence, and optionally a linker sequence between any two domains. Examples of protein domains that may be fused to a CRISPR enzyme include, without limitation, epitope tags, reporter gene sequences, and protein domains having one or more of the following activities: methylase activity, demethylase activity, transcription activation activity, transcription repression activity, transcription release factor activity, histone modification activity, RNA cleavage activity and nucleic acid binding activity. Additional domains that may form part of a fusion protein comprising a CRISPR enzyme are described in U.S. Patent Appl. Publ. No. US20110059502, incorporated herein by reference. In certain embodiments, a tagged CRISPR enzyme is used to identify the location of a target sequence.

[0144] Conventional viral and non-viral based gene transfer methods can be used to introduce nucleic acids in mammalian and non-mammalian cells or target tissues. Such methods can be used to administer nucleic acids encoding components of a CRISPR system to cells in culture, or in a host organism. Non-viral vector delivery systems include DNA plasmids, RNA (e.g., a transcript of a vector described herein), naked nucleic acid, and nucleic acid complexed with a delivery vehicle, such as a liposome. Viral vector delivery systems include DNA and RNA viruses, which have either episomal or integrated genomes after delivery to the cell (Anderson, 1992, Science 256:808-813; and Yu, et al., 1994, Gene Therapy 1:13-26).

[0145] In certain embodiments, the CRISPR/Cas is derived from a type II CRISPR/Cas system. In other embodiments, the CRISPR/Cas system is derived from a Cas9 protein. The Cas9 protein can be from Streptococcus pyogenes, Streptococcus thermophilus, or other species.

[0146] In general, Cas proteins comprise at least one RNA recognition and/or RNA binding domain. RNA recognition and/or RNA binding domains interact with the guiding RNA. Cas proteins can also comprise nuclease domains (i.e., DNase or RNase domains), DNA binding domains, helicase domains, RNAse domains, protein-protein interaction domains, dimerization domains, as well as other domains. The Cas proteins can be modified to increase nucleic acid binding affinity and/or specificity, alter an enzymatic activity, and/or change another property of the protein. In certain embodiments, the Cas-like protein of the fusion protein can be derived from a wild type Cas9 protein or fragment thereof. In other embodiments, the Cas can be derived from modified Cas9 protein. For example, the amino acid sequence of the Cas9 protein can be modified to alter one or more properties (e.g., nuclease activity, affinity, stability, and so forth) of the protein. Alternatively, domains of the Cas9 protein not involved in RNA-guided cleavage can be eliminated from the protein such that the modified Cas9 protein is smaller than the wild type Cas9 protein. In general, a Cas9 protein comprises at least two nuclease (i.e., DNase) domains. For example, a Cas9 protein can comprise a RuvC-like nuclease domain and a HNH-like nuclease domain. The RuvC and HNH domains work together to cut single strands to make a double-stranded break in DNA. (Jinek, et al., 2012, Science, 337:816-821). In certain embodiments, the Cas9-derived protein can be modified to contain only one functional nuclease domain (either a RuvC-like or a HNH-like nuclease domain). For example, the Cas9-derived protein can be modified such that one of the nuclease domains is deleted or mutated such that it is no longer functional (i.e., the nuclease activity is absent). In some embodiments in which one of the nuclease domains is inactive, the Cas9-derived protein is able to introduce a nick into a double-stranded nucleic acid (such protein is termed a “nickase”), but not cleave the double-stranded DNA. In any of the above-described embodiments, any or all of the nuclease domains can be inactivated by one or more deletion mutations, insertion mutations, and/or substitution mutations using well-known methods, such as site-directed mutagenesis, PCR-mediated mutagenesis, and total gene synthesis, as well as other methods known in the art.

[0147] In one non-limiting embodiment, a vector drives the expression of the CRISPR system. The art is replete with suitable vectors that are useful in the present invention. The vectors to be used are suitable for replication and, optionally, integration in eukaryotic cells. Typical vectors contain transcription and translation terminators, initiation sequences, and promoters useful for regulation of the expression of the desired nucleic acid sequence. The vectors of the present invention may also be used for nucleic acid standard gene delivery protocols. Methods for gene delivery are known in the art (U.S. Pat. Nos. 5,399,346, 5,580,859 and 5,589,466, incorporated by reference herein in their entireties).

[0148] Further, the vector may be provided to a cell in the form of a viral vector. Viral vector technology is well known in the art and is described, for example, in Sambrook et al. (4^{th} Edition, Molecular Cloning: A Laboratory Manual, Cold Spring Harbor Laboratory, New York, 2012), and in other virology and molecular biology manuals. Viruses, which are useful as vectors include, but are not limited to, retroviruses, adenoviruses, adeno-associated viruses, herpes viruses, Sindbis virus, gammaretrovirus and lentiviruses. In general, a suitable vector contains an origin of replication functional in at least one organism, a promoter sequence, convenient restriction endonuclease sites, and one or more selectable markers (e.g., WO 01/96584; WO 01/29058; and U.S. Pat. No. 6,326,193).

### Introduction of Nucleic Acids

[0149] Methods of introducing nucleic acids into a cell include physical, biological and chemical methods. Physical methods for introducing a polynucleotide, such as RNA, into a host cell include calcium phosphate precipitation, lipofection, particle bombardment, microinjection, electroporation, and the like. RNA can be introduced into target cells using commercially available methods which include electroporation (Amaxa Nucleofector-II (Amaxa Biosystems, Cologne, Germany)), (ECM 830 (BTX) (Harvard Instruments, Boston, Mass.) or the Gene Pulser II (BioRad, Denver, Colo.), Multiporator (Eppendort, Hamburg Germany). RNA can also be introduced into cells using cationic liposome mediated transfection using lipofection, using polymer encapsulation, using peptide mediated transfection, or using biolistic particle delivery systems such as “gene guns” (see, for example, Nishikawa, et al. Hum Gene Ther., 12(8):861-70 (2001).

[0150] Biological methods for introducing a polynucleotide of interest into a host cell include the use of DNA and RNA vectors. Viral vectors, and especially retroviral vectors, have become the most widely used method for inserting genes into mammalian, e.g., human cells. Other viral vectors can be derived from lentivirus, poxviruses, herpes simplex virus I, adenoviruses and adeno-associated viruses, and the like. See, for example, U.S. Pat. Nos. 5,350,674 and 5,585,362.

[0151] Chemical means for introducing a polynucleotide into a host cell include colloidal dispersion systems, such as macromolecule complexes, nanocapsules, microspheres, beads, and lipid-based systems including oil-in-water emulsions, micelles, mixed micelles, and liposomes. An exemplary colloidal system for use as a delivery vehicle in vitro and in vivo is a liposome (e.g., an artificial membrane vesicle).

[0152] Regardless of the method used to introduce exogenous nucleic acids into a host cell or otherwise expose a cell to the inhibitor of the present invention, in order to confirm the presence of the nucleic acids in the host cell, a variety of assays may be performed. Such assays include, for example, “molecular biological” assays well known to those of skill in the art, such as Southern and Northern blotting, RT-PCR and PCR; “biochemical” assays, such as detecting the presence or absence of a particular peptide, e.g., by immunological means (ELISAs and Western blots) or by assays described herein to identify agents falling within the scope of the invention.

[0153] It should be understood that the method and compositions that would be useful in the present invention are not limited to the particular formulations set forth in the examples. The following examples are put forth so as to provide those of ordinary skill in the art with a complete disclosure and description, and are not intended to limit the scope of what the inventors regard as their invention.

[0154] The practice of the present invention employs, unless otherwise indicated, conventional techniques of molecular biology (including recombinant techniques), microbiology, cell biology, biochemistry and immunology, which are well within the purview of the skilled artisan. Such techniques are explained fully in the literature, such as, “Molecular Cloning: A Laboratory Manual”, fourth edition (Sambrook et al. (2012) Molecular Cloning, Cold Spring Harbor Laboratory); “Oligonucleotide Synthesis” (Gait, M. J. (1984). Oligonucleotide synthesis. IRL press); “Culture of Animal Cells” (Freshney, R. (2010). Culture of animal cells. Cell Proliferation, 15(2.3), 1); “Methods in Enzymology” “Weir's Handbook of Experimental Immunology” (Wiley-Blackwell; 5 edition (Jan. 15, 1996); “Gene Transfer Vectors for Mammalian Cells” (Miller and Carlos, (1987) Cold Spring Harbor Laboratory, New York); “Short Protocols in Molecular Biology” (Ausubel et al., Current Protocols; 5 edition (Nov. 5, 2002)); “Polymerase Chain Reaction: Principles, Applications and Troubleshooting”, (Babar, M., VDM Verlag Dr. Müller (Aug. 17, 2011)); “Current Protocols in Immunology” (Coligan, John Wiley & Sons, Inc. Nov. 1, 2002).

[0155] Those skilled in the art will recognize, or be able to ascertain using no more than routine experimentation, numerous equivalents to the specific procedures, embodiments, claims, and examples described herein. Such equivalents were considered to be within the scope of this invention and covered by the claims appended hereto. For example, it should be understood, that modifications in reaction conditions, including but not limited to reaction times, reaction size/volume, and experimental reagents, such as solvents, catalysts, pressures, atmospheric conditions, e.g., nitrogen atmosphere, and reducing/oxidizing agents, with art-recognized alternatives and using no more than routine experimentation, are within the scope of the present application.

[0156] It is to be understood that wherever values and ranges are provided herein, all values and ranges encompassed by these values and ranges, are meant to be encompassed within the scope of the present invention. Moreover, all values that fall within these ranges, as well as the upper or lower limits of a range of values, are also contemplated by the present application.

[0157] The following examples further illustrate aspects of the present invention. However, they are in no way a limitation of the teachings or disclosure of the present invention as set forth herein.

### EXPERIMENTAL EXAMPLES

[0158] The invention is now described with reference to the following Examples. These Examples are provided for the purpose of illustration only, and the invention is not limited to these Examples, but rather encompasses all variations that are evident as a result of the teachings provided herein.

[0159] The materials and methods employed in these experiments are now described.

[0160] Mice: Various strains of mice between the ages of 6-12 weeks of age were used for the present study described. OT-I TCR transgenic mice (OT-I mice) were described by Hogquist et al., Cell 76, 17-27 (1994). Constitutive Cas9-2A-EGFP mice (Cas9 mice) were described by Platt et al., Cell 159, 440-455 (2014). OT-I; Cas9 mice were generated by breeding OT-I and Cas9 mice and genotyped according to Jackson Lab protocol. Naive CD8⁺ T cells were isolated from OT-I mice, Cas9 mice, and OT-I; Cas9 mice. All animals were housed in standard individually ventilated, pathogen-free conditions, with 12 h:12 h or 13 h:11 h light cycle, room temperature (21-23° C.) and 40-60% relative humidity. When a cohort of animals were receiving multiple treatments, animals were randomized by 1) randomly assign animals to different groups using littermates, 2) random mixing of females prior to treatment, maximizing the evenness or representation of mice from different cages in each group, and/or 3) random assignment of mice to each group, in order to minimize the effect of gender, litter, small difference in age, cage, housing position, where applicable.

[0161] Generation of a T cell CRISPR vector (sgRNA-Thy1.1 Expression Vector): A lentiviral T cell CRISPR vector, lenti-pLKO-U6-sgRNA(BsmBI)-EFS-Thy1.1CO-spA, was generated by codon-optimizing and subcloning Thy1.1 and sgRNA expression cassette into a lentiviral vector via Gibson Assembly. Three versions of the vector were generated to enable robust genome editing in T cells.

| pSC017_pLKO-U6-sgBsmBI-EFS-Thy11CO-spA (SEQ ID NO: 129,213): | |
|---|---|
| ttaatgtagtcttatgcaatactcttgtagtcttgcaacatggtaacgatgagttagcaacatgccttac | |
| aaggagagaaaaagcaccgtgcatgccgattggtggaagtaaggtggtacgatcgtgccttattaggaag | |
| gcaacagacgggtctgacatggattggacgaaccactgaattgccgcattgcagagatattgtatttaag | |
| tgcctagctcgatacataaacgggtctctctggttagaccagatctgagcctgggagctctctggctaac | |
| tagggaacccactgcttaagcctcaataaagcttgccttgagtgcttcaagtagtgtgtgcccgtctgtt | |
| gtgtgactctggtaactagagatccctcagacccttttagtcagtgtggaaaatctctagcagtggcgcc | |
| cgaacagggacttgaaagcgaaagggaaaccagaggagctctctcgacgcaggactcggcttgctgaagc | |
| gcgcacggcaagaggcgaggggcggcgactggtgagtacgccaaaaattttgactagcggaggctagaag | |
| gagagagatgggtgcgagagcgtcagtattaagcgggggagaattagatcgcgatgggaaaaaattcggt | |
| taaggccagggggaaagaaaaaatataaattaaaacatatagtatgggcaagcagggagctagaacgatt | |
| cgcagttaatcctggcctgttagaaacatcagaaggctgtagacaaatactgggacagctacaaccatcc | |
| cttcagacaggatcagaagaacttagatcattatataatacagtagcaaccctctattgtgtgcatcaaa | |
| ggatagagataaaagacaccaaggaagctttagacaagatagaggaagagcaaaacaaaagtaagaccac | |
| cgcacagcaagcggccgctgatcttcagacctggaggaggagatatgagggacaattggagaagtgaatt | |
| atataaatataaagtagtaaaaattgaaccattaggagtagcacccaccaaggcaaagagaagagtggtg | |
| cagagagaaaaaagagcagtgggaataggagctttgttccttgggttcttgggagcagcaggaagcacta | |
| tgggcgcagcgtcaatgacgctgacggtacaggccagacaattattgtctggtatagtgcagcagcagaa | |
| caatttgctgagggctattgaggcgcaacagcatctgttgcaactcacagtctggggcatcaagcagctc | |
| caggcaagaatcctggctgtggaaagatacctaaaggatcaacagctcctggggatttggggttgctctg | |
| gaaaactcatttgcaccactgctgtgccttggaatgctagttggagtaataaatctctggaacagatttg | |
| gaatcacacgacctggatggagtgggacagagaaattaacaattacacaagcttaatacactccttaatt | |
| gaagaatcgcaaaaccagcaagaaaagaatgaacaagaattattggaattagataaatgggcaagtttgt | |
| ggaattggtttaacataacaaattggctgtggtatataaaattattcataatgatagtaggaggcttggt | |
| aggtttaagaatagtttttgctgtactttctatagtgaatagagttaggcagggatattcaccattatcg | |
| tttcagacccacctcccaaccccgaggggacccagagagggcctatttcccatgattccttcatatttgc | |
| atatacgatacaaggctgttagagagataattagaattaatttgactgtaaacacaaagatattagtaca | |
| aaatacgtgacgtagaaagtaataatttcttgggtagtttgcagttttaaaattatgttttaaaatggac | |
| tatcatatgcttaccgtaacttgaaagtatttcgatttcttggctttatatatcttGTGGAAAGGACGAA | |
| ACACCgGAGACGgaCGTCTCtgttttagagctaGAAAtagcaagttaaaataaggctagtccgttatcaa | |
| cttgaaaaagtggcaccgagtcggtgcTTTTTTaagcttggcgtaactagatcttgagacaaatggcagt | |
| attcatccacaattttaaaagaaaaggggggattggggggtacagtgcaggggaaagaatagtagacata | |
| atagcaacagacatacaaactaaagaattacaaaaacaaattacaaaaattcaaaattttcgggtttatt | |
| acagggacagcagagatccactttggcgccggctcgagggggcccggggaattcgctagctaggtcttga | |
| aaggagtgggaattggctccggtgcccgtcagtgggcagagcgcacatcgcccacagtccccgagaagtt | |
| ggggggaggggtcggcaattgatccggtgcctagagaaggtggcgcggggtaaactgggaaagtgatgtc | |
| gtgtactggctccgcctttttcccgagggtgggggagaaccgtatataagtgcagtagtcgccgtgaacg | |
| ttctttttcgcaacgggtttgccgccagaacacaggaccggttctagacgtacggccaccATGAACCCAG | |
| CCATCAGCGTCGCTCTCCTGCTCTCAGICTTGCAGGTGTCCCGAGGGCAGAAGGTGACCAGCCTGACAGC | |
| CTGCCTGGTGAACCAAAACCTTCGCCTGGACTGCCGCCATGAGAATAACACCAAGGATAACTCCATCCAG | |
| CATGAGTTCAGCCTGACCCGAGAGAAGAGGAAGCACGTGCTCTCAGGCACCCTTGGGATACCCGAGCACA | |
| CGTACCGCTCCCGCGTCACCCTCTCCAACCAGCCCTATATCAAGGTCCTTACCCTAGCCAACTTCACCAC | |
| CAAGGATGAGGGCGACTACTTTTGTGAGCTTCGCGTAAGTGGCGCGAATCCCATGAGCTCCAATAAAAGT | |
| ATCAGTGTGTATAGAGACAAGCTGGTCAAGTGTGGCGGCATAAGCCTGCTGGTTCAGAACACATCCTGGA | |
| TGCTGCTGCTGCTGCTTTCCCTCTCCCTCCTCCAAGCCCTGGACTTCATTTCTCTGTGAagcgctAATAA | |
| AAGATCTTTATTTTCATTAGATCTGTGTGTTGGTTTTTTGTGTGacgtgcggtcgactttaagaccaatg | |
| acttacaaggcagctgtagatcttagccactttttaaaagaaaaggggggactggaagggctaattcact | |
| cccaacgaagacaagatctgctttttgcttgtactgggtctctctggttagaccagatctgagcctggga | |
| gctctctggctaactagggaacccactgcttaagcctcaataaagcttgccttgagtgcttcaagtagtg | |
| tgtgcccgtctgttgtgtgactctggtaactagagatccctcagacccttttagtcagtgtggaaaatct | |
| ctagcagtacgtatagtagttcatgtcatcttattattcagtatttataacttgcaaagaaatgaatatc | |
| agagagtgagaggaacttgtttattgcagcttataatggttacaaataaagcaatagcatcacaaatttc | |
| acaaataaagcatttttttcactgcattctagttgtggtttgtccaaactcatcaatgtatcttatcatg | |
| tctggctctagctatcccgcccctaactccgcccatcccgcccctaactccgcccagttccgcccattct | |
| ccgccccatggctgactaattttttttatttatgcagaggccgaggccgcctcggcctctgagctattcc | |
| agaagtagtgaggaggcttttttggaggcctagggacgtacccaattcgccctatagtgagtcgtattac | |
| gcgcgctcactggccgtcgttttacaacgtcgtgactgggaaaaccctggcgttacccaacttaatcgcc | |
| ttgcagcacatccccctttcgccagctggcgtaatagcgaagaggcccgcaccgatcgcccttcccaaca | |
| gttgcgcagcctgaatggcgaatgggacgcgccctgtagcggcgcattaagcgcggcgggtgtggtggtt | |
| acgcgcagcgtgaccgctacacttgccagcgccctagcgcccgctcctttcgctttcttcccttcctttc | |
| tcgccacgttcgccggctttccccgtcaagctctaaatcgggggctccctttagggttccgatttagtgc | |
| tttacggcacctcgaccccaaaaaacttgattagggtgatggttcacgtagtgggccatcgccctgatag | |
| acggtttttcgccctttgacgttggagtccacgttctttaatagtggactcttgttccaaactggaacaa | |
| cactcaaccctatctcggtctattcttttgatttataagggattttgccgatttcggcctattggttaaa | |
| aaatgagctgatttaacaaaaatttaacgcgaattttaacaaaatattaacgcttacaatttaggtggca | |
| cttttcggggaaatgtgcgcggaacccctatttgtttatttttctaaatacattcaaatatgtatccgct | |
| catgagacaataaccctgataaatgcttcaataatattgaaaaaggaagagtatgagtattcaacatttc | |
| cgtgtcgcccttattcccttttttgcggcattttgccttcctgtttttgctcacccagaaacgctggtga | |
| aagtaaaagatgctgaagatcagttgggtgcacgagtgggttacatcgaactggatctcaacagcggtaa | |
| gatccttgagagttttcgccccgaagaacgttttccaatgatgagcacttttaaagttctgctatgtggc | |
| gcggtattatcccgtattgacgccgggcaagagcaactcggtcgccgcatacactattctcagaatgact | |
| tggttgagtactcaccagtcacagaaaagcatcttacggatggcatgacagtaagagaattatgcagtgc | |
| tgccataaccatgagtgataacactgcggccaacttacttctgacaacgatcggaggaccgaaggagcta | |
| accgcttttttgcacaacatgggggatcatgtaactcgccttgatcgttgggaaccggagctgaatgaag | |
| ccataccaaacgacgagcgtgacaccacgatgcctgtagcaatggcaacaacgttgcgcaaactattaac | |
| tggcgaactacttactctagcttcccggcaacaattaatagactggatggaggcggataaagttgcagga | |
| ccacttctgcgctcggcccttccggctggctggtttattgctgataaatctggagccggtgagcgtgggt | |
| ctcgcggtatcattgcagcactggggccagatggtaagccctcccgtatcgtagttatctacacgacggg | |
| gagtcaggcaactatggatgaacgaaatagacagatcgctgagataggtgcctcactgattaagcattgg | |
| taactgtcagaccaagtttactcatatatactttagattgatttaaaacttcatttttaatttaaaagga | |
| tctaggtgaagatcctttttgataatctcatgaccaaaatcccttaacgtgagttttcgttccactgagc | |
| gtcagaccccgtagaaaagatcaaaggatcttcttgagatcctttttttctgcgcgtaatctgctgcttg | |
| caaacaaaaaaaccaccgctaccagcggtggtttgtttgccggatcaagagctaccaactctttttccga | |
| aggtaactggcttcagcagagcgcagataccaaatactgttcttctagtgtagccgtagttaggccacca | |
| cttcaagaactctgtagcaccgcctacatacctcgctctgctaatcctgttaccagtggctgctgccagt | |
| ggcgataagtcgtgtcttaccgggttggactcaagacgatagttaccggataaggcgcagcggtcgggct | |
| gaacggggggttcgtgcacacagcccagcttggagcgaacgacctacaccgaactgagatacctacagcg | |
| tgagctatgagaaagcgccacgcttcccgaagggagaaaggcggacaggtatccggtaagcggcagggtc | |
| ggaacaggagagcgcacgagggagcttccagggggaaacgcctggtatctttatagtcctgtcgggtttc | |
| gccacctctgacttgagcgtcgatttttgtgatgctcgtcaggggggcggagcctatggaaaaacgccag | |
| caacgcggcctttttacggttcctggccttttgctggccttttgctcacatgttctttcctgcgttatcc | |
| cctgattctgtggataaccgtattaccgcctttgagtgagctgataccgctcgccgcagccgaacgaccg | |
| agcgcagcgagtcagtgagcgaggaagcggaagagcgcccaatacgcaaaccgcctctccccgcgcgttg | |
| gccgattcattaatgcagctggcacgacaggtttcccgactggaaagcgggcagtgagcgcaacgcaatt | |
| aatgtgagttagctcactcattaggcaccccaggctttacactttatgcttccggctcgtatgttgtgtg | |
| gaattgtgagcggataacaatttcacacaggaaacagctatgaccatgattacgccaagcgcgcaattaa | |
| ccctcactaaagggaacaaaagctggagctgcaagc | |
| pSC008_pLKO-U6-BsmBI-chRNA(+85)-EFS-Thy11 (SEQ ID NO: 129,214): | |
| 1 | ttaatgtagt cttatgcaat actcttgtag tcttgcaaca tggtaacgat gagttagcaa |
| 61 | catgccttac aaggagagaa aaagcaccgt gcatgccgat tggtggaagt aaggtggtac |
| 121 | gatcgtgcct tattaggaag gcaacagacg ggtctgacat ggattggacg aaccactgaa |
| 181 | ttgccgcatt gcagagatat tgtatttaag tgcctagctc gatacataaa cgggtctctc |
| 241 | tggttagacc agatctgagc ctgggagctc tctggctaac tagggaaccc actgcttaag |
| 301 | cctcaataaa gcttgccttg agtgcttcaa gtagtgtgtg cccgtctgtt gtgtgactct |
| 361 | ggtaactaga gatccctcag acccttttag tcagtgtgga aaatctctag cagtggcgcc |
| 421 | cgaacaggga cttgaaagcg aaagggaaac cagaggagct ctctcgacgc aggactcggc |
| 481 | ttgctgaagc gcgcacggca agaggcgagg ggcggcgact ggtgagtacg ccaaaaattt |
| 541 | tgactagcgg aggctagaag gagagagatg ggtgcgagag cgtcagtatt aagcggggga |
| 601 | gaattagatc gcgatgggaa aaaattcggt taaggccagg gggaaagaaa aaatataaat |
| 661 | taaaacatat agtatgggca agcagggagc tagaacgatt cgcagttaat cctggcctgt |
| 721 | tagaaacatc agaaggctgt agacaaatac tgggacagct acaaccatcc cttcagacag |
| 781 | gatcagaaga acttagatca ttatataata cagtagcaac cctctattgt gtgcatcaaa |
| 841 | ggatagagat aaaagacacc aaggaagctt tagacaagat agaggaagag caaaacaaaa |
| 901 | gtaagaccac cgcacagcaa gcggccgctg atcttcagac ctggaggagg agatatgagg |
| 961 | gacaattgga gaagtgaatt atataaatat aaagtagtaa aaattgaacc attaggagta |
| 1021 | gcacccacca aggcaaagag aagagtggtg cagagagaaa aaagagcagt gggaatagga |
| 1081 | gctttgttcc ttgggttctt gggagcagca ggaagcacta tgggcgcagc gtcaatgacg |
| 1141 | ctgacggtac aggccagaca attattgtct ggtatagtgc agcagcagaa caatttgctg |
| 1201 | agggctattg aggcgcaaca gcatctgttg caactcacag tctggggcat caagcagctc |
| 1261 | caggcaagaa tcctggctgt ggaaagatac ctaaaggatc aacagctcct ggggatttgg |
| 1321 | ggttgctctg gaaaactcat ttgcaccact gctgtgcctt ggaatgctag ttggagtaat |
| 1381 | aaatctctgg aacagatttg gaatcacacg acctggatgg agtgggacag agaaattaac |
| 1441 | aattacacaa gcttaataca ctccttaatt gaagaatcgc aaaaccagca agaaaagaat |
| 1501 | gaacaagaat tattggaatt agataaatgg gcaagtttgt ggaattggtt taacataaca |
| 1561 | aattggctgt ggtatataaa attattcata atgatagtag gaggcttggt aggtttaaga |
| 1621 | atagtttttg ctgtactttc tatagtgaat agagttaggc agggatattc accattatcg |
| 1681 | tttcagaccc acctcccaac cccgagggga cccagagagg gcctatttcc catgattcct |
| 1741 | tcatatttgc atatacgata caaggctgtt agagagataa ttagaattaa tttgactgta |
| 1801 | aacacaaaga tattagtaca aaatacgtga cgtagaaagt aataatttct tgggtagttt |
| 1861 | gcagttttaa aattatgttt taaaatggac tatcatatgc ttaccgtaac ttgaaagtat |
| 1921 | ttcgatttct tggctttata tatcttGTGG AAAGGACGAA ACACCgGAGA CGgaCGTCTC |
| 1981 | tgttttagag ctaGAAAtag caagttaaaa taaggctagt ccgttatcaa cttgaaaaag |
| 2041 | tggcaccgag tcggtgcTTT TTTaagcttg gcgtaactag atcttgagac aaatggcagt |
| 2101 | attcatccac aattttaaaa gaaaaggggg gattgggggg tacagtgcag gggaaagaat |
| 2161 | agtagacata atagcaacag acatacaaac taaagaatta caaaaacaaa ttacaaaaat |
| 2221 | tcaaaatttt cgggtttatt acagggacag cagagatcca ctttggcgcc ggctcgaggg |
| 2281 | ggcccgggga attcgctagc taggtcttga aaggagtggg aattggctcc ggtgcccgtc |
| 2341 | agtgggcaga gcgcacatcg cccacagtcc ccgagaagtt ggggggaggg gtcggcaatt |
| 2401 | gatccggtgc ctagagaagg tggcgcgggg taaactggga aagtgatgtc gtgtactggc |
| 2461 | tccgcctttt tcccgagggt gggggagaac cgtatataag tgcagtagtc gccgtgaacg |
| 2521 | ttctttttcg caacgggttt gccgccagaa cacaggaccg gttctagacg tacggccacc |
| 2581 | ATGAACCCAG CCATCAGCGT CGCTCTCCTG CTCTCAGTCT TGCAGGTGTC CCGAGGGCAG |
| 2641 | AAGGTGACCA GCCTGACAGC CTGCCTGGTG AACCAAAACC TTCGCCTGGA CTGCCGCCAT |
| 2701 | GAGAATAACA CCAAGGATAA CTCCATCCAG CATGAGTTCA GCCTGACCCG AGAGAAGAGG |
| 2761 | AAGCACGTGC TCTCAGGCAC CCTTGGGATA CCCGAGCACA CGTACCGCTC CCGCGTCACC |
| 2821 | CTCTCCAACC AGCCCTATAT CAAGGTCCTT ACCCTAGCCA ACTTCACCAC CAAGGATGAG |
| 2881 | GGCGACTACT TTTGTGAGCT TCGCGTCTCG GGCGCGAATC CCATGAGCTC CAATAAAAGT |
| 2941 | ATCAGTGTGT ATAGAGACAA GCTGGTCAAG TGTGGCGGCA TAAGCCTGCT GGTTCAGAAC |
| 3001 | ACATCCTGGA TGCTGCTGCT GCTGCTTTCC CTCTCCCTCC TCCAAGCCCT GGACTTCATT |
| 3061 | TCTCTGTGAa gcgctAATAA AAGATCTTTA TTTTCATTAG ATCTGTGTGT TGGTTTTTTG |
| 3121 | TGTggtaaCT CGAGacgtgc ggtcgacttt aagaccaatg acttacaagg cagctgtaga |
| 3181 | tcttagccac tttttaaaag aaaagggggg actggaaggg ctaattcact cccaacgaag |
| 3241 | acaagatctg ctttttgctt gtactgggtc tctctggtta gaccagatct gagcctggga |
| 3301 | gctctctggc taactaggga acccactgct taagcctcaa taaagcttgc cttgagtgct |
| 3361 | tcaagtagtg tgtgcccgtc tgttgtgtga ctctggtaac tagagatccc tcagaccctt |
| 3421 | ttagtcagtg tggaaaatct ctagcagtac gtatagtagt tcatgtcatc ttattattca |
| 3481 | gtatttataa cttgcaaaga aatgaatatc agagagtgag aggaacttgt ttattgcagc |
| 3541 | ttataatggt tacaaataaa gcaatagcat cacaaatttc acaaataaag catttttttc |
| 3601 | actgcattct agttgtggtt tgtccaaact catcaatgta tcttatcatg tctggctcta |
| 3661 | gctatcccgc ccctaactcc gcccatcccg cccctaactc cgcccagttc cgcccattct |
| 3721 | ccgccccatg gctgactaat tttttttatt tatgcagagg ccgaggccgc ctcggcctct |
| 3781 | gagctattcc agaagtagtg aggaggcttt tttggaggcc tagggacgta cccaattcgc |
| 3841 | cctatagtga gtcgtattac gcgcgctcac tggccgtcgt tttacaacgt cgtgactggg |
| 3901 | aaaaccctgg cgttacccaa cttaatcgcc ttgcagcaca tccccctttc gccagctggc |
| 3961 | gtaatagcga agaggcccgc accgatcgcc cttcccaaca gttgcgcagc ctgaatggcg |
| 4021 | aatgggacgc gccctgtagc ggcgcattaa gcgcggcggg tgtggtggtt acgcgcagcg |
| 4081 | tgaccgctac acttgccagc gccctagcgc ccgctccttt cgctttcttc ccttcctttc |
| 4141 | tcgccacgtt cgccggcttt ccccgtcaag ctctaaatcg ggggctccct ttagggttcc |
| 4201 | gatttagtgc tttacggcac ctcgacccca aaaaacttga ttagggtgat ggttcacgta |
| 4261 | gtgggccatc gccctgatag acggtttttc gccctttgac gttggagtcc acgttcttta |
| 4321 | atagtggact cttgttccaa actggaacaa cactcaaccc tatctcggtc tattcttttg |
| 4381 | atttataagg gattttgccg atttcggcct attggttaaa aaatgagctg atttaacaaa |
| 4441 | aatttaacgc gaattttaac aaaatattaa cgcttacaat ttaggtggca cttttcgggg |
| 4501 | aaatgtgcgc ggaaccccta tttgtttatt tttctaaata cattcaaata tgtatccgct |
| 4561 | catgagacaa taaccctgat aaatgcttca ataatattga aaaaggaaga gtatgagtat |
| 4621 | tcaacatttc cgtgtcgccc ttattccctt ttttgcggca ttttgccttc ctgtttttgc |
| 4681 | tcacccagaa acgctggtga aagtaaaaga tgctgaagat cagttgggtg cacgagtggg |
| 4741 | ttacatcgaa ctggatctca acagcggtaa gatccttgag agttttcgcc ccgaagaacg |
| 4801 | ttttccaatg atgagcactt ttaaagttct gctatgtggc gcggtattat cccgtattga |
| 4861 | cgccgggcaa gagcaactcg gtcgccgcat acactattct cagaatgact tggttgagta |
| 4921 | ctcaccagtc acagaaaagc atcttacgga tggcatgaca gtaagagaat tatgcagtgc |
| 4981 | tgccataacc atgagtgata acactgcggc caacttactt ctgacaacga tcggaggacc |
| 5041 | gaaggagcta accgcttttt tgcacaacat gggggatcat gtaactcgcc ttgatcgttg |
| 5101 | ggaaccggag ctgaatgaag ccataccaaa cgacgagcgt gacaccacga tgcctgtagc |
| 5161 | aatggcaaca acgttgcgca aactattaac tggcgaacta cttactctag cttcccggca |
| 5221 | acaattaata gactggatgg aggcggataa agttgcagga ccacttctgc gctcggccct |
| 5281 | tccggctggc tggtttattg ctgataaatc tggagccggt gagcgtgggt ctcgcggtat |
| 5341 | cattgcagca ctggggccag atggtaagcc ctcccgtatc gtagttatct acacgacggg |
| 5401 | gagtcaggca actatggatg aacgaaatag acagatcgct gagataggtg cctcactgat |
| 5461 | taagcattgg taactgtcag accaagttta ctcatatata ctttagattg atttaaaact |
| 5521 | tcatttttaa tttaaaagga tctaggtgaa gatccttttt gataatctca tgaccaaaat |
| 5581 | cccttaacgt gagttttcgt tccactgagc gtcagacccc gtagaaaaga tcaaaggatc |
| 5641 | ttcttgagat cctttttttc tgcgcgtaat ctgctgcttg caaacaaaaa aaccaccgct |
| 5701 | accagcggtg gtttgtttgc cggatcaaga gctaccaact ctttttccga aggtaactgg |
| 5761 | cttcagcaga gcgcagatac caaatactgt tcttctagtg tagccgtagt taggccacca |
| 5821 | cttcaagaac tctgtagcac cgcctacata cctcgctctg ctaatcctgt taccagtggc |
| 5881 | tgctgccagt ggcgataagt cgtgtcttac cgggttggac tcaagacgat agttaccgga |
| 5941 | taaggcgcag cggtcgggct gaacgggggg ttcgtgcaca cagcccagct tggagcgaac |
| 6001 | gacctacacc gaactgagat acctacagcg tgagctatga gaaagcgcca cgcttcccga |
| 6061 | agggagaaag gcggacaggt atccggtaag cggcagggtc ggaacaggag agcgcacgag |
| 6121 | ggagcttcca gggggaaacg cctggtatct ttatagtcct gtcgggtttc gccacctctg |
| 6181 | acttgagcgt cgatttttgt gatgctcgtc aggggggcgg agcctatgga aaaacgccag |
| 6241 | caacgcggcc tttttacggt tcctggcctt ttgctggcct tttgctcaca tgttctttcc |
| 6301 | tgcgttatcc cctgattctg tggataaccg tattaccgcc tttgagtgag ctgataccgc |
| 6361 | tcgccgcagc cgaacgaccg agcgcagcga gtcagtgagc gaggaagcgg aagagcgccc |
| 6421 | aatacgcaaa ccgcctctcc ccgcgcgttg gccgattcat taatgcagct ggcacgacag |
| 6481 | gtttcccgac tggaaagcgg gcagtgagcg caacgcaatt aatgtgagtt agctcactca |
| 6541 | ttaggcaccc caggctttac actttatgct tccggctcgt atgttgtgtg gaattgtgag |
| 6601 | cggataacaa tttcacacag gaaacagcta tgaccatgat tacgccaagc gcgcaattaa |
| 6661 | ccctcactaa agggaacaaa agctggagct gcaagc |
| pSC021_pLKO-U6-sgBsmBI-PGK-Thy11CO-spA.sbd (SEQ ID NO: 129,215): | |
| 1 | ttaatgtagt cttatgcaat actcttgtag tcttgcaaca tggtaacgat gagttagcaa |
| 61 | catgccttac aaggagagaa aaagcaccgt gcatgccgat tggtggaagt aaggtggtac |
| 121 | gatcgtgcct tattaggaag gcaacagacg ggtctgacat ggattggacg aaccactgaa |
| 181 | ttgccgcatt gcagagatat tgtatttaag tgcctagctc gatacataaa cgggtctctc |
| 241 | tggttagacc agatctgagc ctgggagctc tctggctaac tagggaaccc actgcttaag |
| 301 | cctcaataaa gcttgccttg agtgcttcaa gtagtgtgtg cccgtctgtt gtgtgactct |
| 361 | ggtaactaga gatccctcag acccttttag tcagtgtgga aaatctctag cagtggcgcc |
| 421 | cgaacaggga cttgaaagcg aaagggaaac cagaggagct ctctcgacgc aggactcggc |
| 481 | ttgctgaagc gcgcacggca agaggcgagg ggcggcgact ggtgagtacg ccaaaaattt |
| 541 | tgactagcgg aggctagaag gagagagatg ggtgcgagag cgtcagtatt aagcggggga |
| 601 | gaattagatc gcgatgggaa aaaattcggt taaggccagg gggaaagaaa aaatataaat |
| 661 | taaaacatat agtatgggca agcagggagc tagaacgatt cgcagttaat cctggcctgt |
| 721 | tagaaacatc agaaggctgt agacaaatac tgggacagct acaaccatcc cttcagacag |
| 781 | gatcagaaga acttagatca ttatataata cagtagcaac cctctattgt gtgcatcaaa |
| 841 | ggatagagat aaaagacacc aaggaagctt tagacaagat agaggaagag caaaacaaaa |
| 901 | gtaagaccac cgcacagcaa gcggccgctg atcttcagac ctggaggagg agatatgagg |
| 961 | gacaattgga gaagtgaatt atataaatat aaagtagtaa aaattgaacc attaggagta |
| 1021 | gcacccacca aggcaaagag aagagtggtg cagagagaaa aaagagcagt gggaatagga |
| 1081 | gctttgttcc ttgggttctt gggagcagca ggaagcacta tgggcgcagc gtcaatgacg |
| 1141 | ctgacggtac aggccagaca attattgtct ggtatagtgc agcagcagaa caatttgctg |
| 1201 | agggctattg aggcgcaaca gcatctgttg caactcacag tctggggcat caagcagctc |
| 1261 | caggcaagaa tcctggctgt ggaaagatac ctaaaggatc aacagctcct ggggatttgg |
| 1321 | ggttgctctg gaaaactcat ttgcaccact gctgtgcctt ggaatgctag ttggagtaat |
| 1381 | aaatctctgg aacagatttg gaatcacacg acctggatgg agtgggacag agaaattaac |
| 1441 | aattacacaa gcttaataca ctccttaatt gaagaatcgc aaaaccagca agaaaagaat |
| 1501 | gaacaagaat tattggaatt agataaatgg gcaagtttgt ggaattggtt taacataaca |
| 1561 | aattggctgt ggtatataaa attattcata atgatagtag gaggcttggt aggtttaaga |
| 1621 | atagtttttg ctgtactttc tatagtgaat agagttaggc agggatattc accattatcg |
| 1681 | tttcagaccc acctcccaac cccgagggga cccagagagg gcctatttcc catgattcct |
| 1741 | tcatatttgc atatacgata caaggctgtt agagagataa ttagaattaa tttgactgta |
| 1801 | aacacaaaga tattagtaca aaatacgtga cgtagaaagt aataatttct tgggtagttt |
| 1861 | gcagttttaa aattatgttt taaaatggac tatcatatgc ttaccgtaac ttgaaagtat |
| 1921 | ttcgatttct tggctttata tatcttGTGG AAAGGACGAA ACACCgGAGA CGgaCGTCTC |
| 1981 | tgttttagag ctaGAAAtag caagttaaaa taaggctagt ccgttatcaa cttgaaaaag |
| 2041 | tggcaccgag tcggtgcTTT TTTaagcttg gcgtaactag atcttgagac aaatggcagt |
| 2101 | attcatccac aattttaaaa gaaaaggggg gattgggggg tacagtgcag gggaaagaat |
| 2161 | agtagacata atagcaacag acatacaaac taaagaatta caaaaacaaa ttacaaaaat |
| 2221 | tcaaaatttt cgggtttatt acagggacag cagagatcca ctttggcgcc ggctcgaggg |
| 2281 | ggcccgggga attcgctagc gtctgaagag gagtttacgt ccagccaagc ttaggatctc |
| 2341 | gacctcgaaa ttctaccggg taggggaggc gcttttccca aggcagtctg gagcatgcgc |
| 2401 | tttagcagcc ccgctggcac ttggcgctac acaagtggcc tctggcctcg cacacattcc |
| 2461 | acatccaccg gtagcgccaa ccggctccgt tctttggtgg ccccttcgcg ccaccttcta |
| 2521 | ctcctcccct agtcaggaag ttcccccccg ccccgcagct cgcgtcgtgc aggacgtgac |
| 2581 | aaatggaagt agcatgtcac actagtctcg tgcagatgga cagcaccgct gagcaatgga |
| 2641 | agcgggtagg cctttggggc agcggccaat agcagctttg ctccttcgct ttctgggctc |
| 2701 | agcagctggg aagggtgggt ccgggggcgg gctcaggggc gggctcaggg gcggggcggg |
| 2761 | cgcccgaagg tcctccggag gcccggcatt ctgcacgctt caaaagcgca cgtctgccgc |
| 2821 | gctgttctcc tcttcctcat ctccgggcct ttcgacctgc atccatctag atctcgagca |
| 2881 | gctgaagctt aaccggttct agacgtacgg ccaccATGAA CCCAGCCATC AGCGTCGCTC |
| 2941 | TCCTGCTCTC AGTCTTGCAG GTGTCCCGAG GGCAGAAGGT GACCAGCCTG ACAGCCTGCC |
| 3001 | TGGTGAACCA AAACCTTCGC CTGGACTGCC GCCATGAGAA TAACACCAAG GATAACTCCA |
| 3061 | TCCAGCATGA GTTCAGCCTG ACCCGAGAGA AGAGGAAGCA CGTGCTCTCA GGCACCCTTG |
| 3121 | GGATACCCGA GCACACGTAC CGCTCCCGCG TCACCCTCTC CAACCAGCCC TATATCAAGG |
| 3181 | TCCTTACCCT AGCCAACTTC ACCACCAAGG ATGAGGGCGA CTACTTTTGT GAGCTTCGCG |
| 3241 | TAAGTGGCGC GAATCCCATG AGCTCCAATA AAAGTATCAG TGTGTATAGA GACAAGCTGG |
| 3301 | TCAAGTGTGG CGGCATAAGC CTGCTGGTTC AGAACACATC CTGGATGCTG CTGCTGCTGC |
| 3361 | TTTCCCTCTC CCTCCTCCAA GCCCTGGACT TCATTTCTCT GTGAagcgct AATAAAAGAT |
| 3421 | CTTTATTTTC ATTAGATCTG TGTGTTGGTT TTTTGTGTGa cgtgcggtcg actttaagac |
| 3481 | caatgactta caaggcagct gtagatctta gccacttttt aaaagaaaag gggggactgg |
| 3541 | aagggctaat tcactcccaa cgaagacaag atctgctttt tgcttgtact gggtctctct |
| 3601 | ggttagacca gatctgagcc tgggagctct ctggctaact agggaaccca ctgcttaagc |
| 3661 | ctcaataaag cttgccttga gtgcttcaag tagtgtgtgc ccgtctgttg tgtgactctg |
| 3721 | gtaactagag atccctcaga cccttttagt cagtgtggaa aatctctagc agtacgtata |
| 3781 | gtagttcatg tcatcttatt attcagtatt tataacttgc aaagaaatga atatcagaga |
| 3841 | gtgagaggaa cttgtttatt gcagcttata atggttacaa ataaagcaat agcatcacaa |
| 3901 | atttcacaaa taaagcattt ttttcactgc attctagttg tggtttgtcc aaactcatca |
| 3961 | atgtatctta tcatgtctgg ctctagctat cccgccccta actccgccca tcccgcccct |
| 4021 | aactccgccc agttccgccc attctccgcc ccatggctga ctaatttttt ttatttatgc |
| 4081 | agaggccgag gccgcctcgg cctctgagct attccagaag tagtgaggag gcttttttgg |
| 4141 | aggcctaggg acgtacccaa ttcgccctat agtgagtcgt attacgcgcg ctcactggcc |
| 4201 | gtcgttttac aacgtcgtga ctgggaaaac cctggcgtta cccaacttaa tcgccttgca |
| 4261 | gcacatcccc ctttcgccag ctggcgtaat agcgaagagg cccgcaccga tcgcccttcc |
| 4321 | caacagttgc gcagcctgaa tggcgaatgg gacgcgccct gtagcggcgc attaagcgcg |
| 4381 | gcgggtgtgg tggttacgcg cagcgtgacc gctacacttg ccagcgccct agcgcccgct |
| 4441 | cctttcgctt tcttcccttc ctttctcgcc acgttcgccg gctttccccg tcaagctcta |
| 4501 | aatcgggggc tccctttagg gttccgattt agtgctttac ggcacctcga ccccaaaaaa |
| 4561 | cttgattagg gtgatggttc acgtagtggg ccatcgccct gatagacggt ttttcgccct |
| 4621 | ttgacgttgg agtccacgtt ctttaatagt ggactcttgt tccaaactgg aacaacactc |
| 4681 | aaccctatct cggtctattc ttttgattta taagggattt tgccgatttc ggcctattgg |
| 4741 | ttaaaaaatg agctgattta acaaaaattt aacgcgaatt ttaacaaaat attaacgctt |
| 4801 | acaatttagg tggcactttt cggggaaatg tgcgcggaac ccctatttgt ttatttttct |
| 4861 | aaatacattc aaatatgtat ccgctcatga gacaataacc ctgataaatg cttcaataat |
| 4921 | attgaaaaag gaagagtatg agtattcaac atttccgtgt cgcccttatt cccttttttg |
| 4981 | cggcattttg ccttcctgtt tttgctcacc cagaaacgct ggtgaaagta aaagatgctg |
| 5041 | aagatcagtt gggtgcacga gtgggttaca tcgaactgga tctcaacagc ggtaagatcc |
| 5101 | ttgagagttt tcgccccgaa gaacgttttc caatgatgag cacttttaaa gttctgctat |
| 5161 | gtggcgcggt attatcccgt attgacgccg ggcaagagca actcggtcgc cgcatacact |
| 5221 | attctcagaa tgacttggtt gagtactcac cagtcacaga aaagcatctt acggatggca |
| 5281 | tgacagtaag agaattatgc agtgctgcca taaccatgag tgataacact gcggccaact |
| 5341 | tacttctgac aacgatcgga ggaccgaagg agctaaccgc ttttttgcac aacatggggg |
| 5401 | atcatgtaac tcgccttgat cgttgggaac cggagctgaa tgaagccata ccaaacgacg |
| 5461 | agcgtgacac cacgatgcct gtagcaatgg caacaacgtt gcgcaaacta ttaactggcg |
| 5521 | aactacttac tctagcttcc cggcaacaat taatagactg gatggaggcg gataaagttg |
| 5581 | caggaccact tctgcgctcg gcccttccgg ctggctggtt tattgctgat aaatctggag |
| 5641 | ccggtgagcg tgggtctcgc ggtatcattg cagcactggg gccagatggt aagccctccc |
| 5701 | gtatcgtagt tatctacacg acggggagtc aggcaactat ggatgaacga aatagacaga |
| 5761 | tcgctgagat aggtgcctca ctgattaagc attggtaact gtcagaccaa gtttactcat |
| 5821 | atatacttta gattgattta aaacttcatt tttaatttaa aaggatctag gtgaagatcc |
| 5881 | tttttgataa tctcatgacc aaaatccctt aacgtgagtt ttcgttccac tgagcgtcag |
| 5941 | accccgtaga aaagatcaaa ggatcttctt gagatccttt ttttctgcgc gtaatctgct |
| 6001 | gcttgcaaac aaaaaaacca ccgctaccag cggtggtttg tttgccggat caagagctac |
| 6061 | caactctttt tccgaaggta actggcttca gcagagcgca gataccaaat actgttcttc |
| 6121 | tagtgtagcc gtagttaggc caccacttca agaactctgt agcaccgcct acatacctcg |
| 6181 | ctctgctaat cctgttacca gtggctgctg ccagtggcga taagtcgtgt cttaccgggt |
| 6241 | tggactcaag acgatagtta ccggataagg cgcagcggtc gggctgaacg gggggttcgt |
| 6301 | gcacacagcc cagcttggag cgaacgacct acaccgaact gagataccta cagcgtgagc |
| 6361 | tatgagaaag cgccacgctt cccgaaggga gaaaggcgga caggtatccg gtaagcggca |
| 6421 | gggtcggaac aggagagcgc acgagggagc ttccaggggg aaacgcctgg tatctttata |
| 6481 | gtcctgtcgg gtttcgccac ctctgacttg agcgtcgatt tttgtgatgc tcgtcagggg |
| 6541 | ggcggagcct atggaaaaac gccagcaacg cggccttttt acggttcctg gccttttgct |
| 6601 | ggccttttgc tcacatgttc tttcctgcgt tatcccctga ttctgtggat aaccgtatta |
| 6661 | ccgcctttga gtgagctgat accgctcgcc gcagccgaac gaccgagcgc agcgagtcag |
| 6721 | tgagcgagga agcggaagag cgcccaatac gcaaaccgcc tctccccgcg cgttggccga |
| 6781 | ttcattaatg cagctggcac gacaggtttc ccgactggaa agcgggcagt gagcgcaacg |
| 6841 | caattaatgt gagttagctc actcattagg caccccaggc tttacacttt atgcttccgg |
| 6901 | ctcgtatgtt gtgtggaatt gtgagcggat aacaatttca cacaggaaac agctatgacc |
| 6961 | atgattacgc caagcgcgca attaaccctc actaaaggga acaaaagctg gagctgcaag |
| 7021 | c |

[0162] Genome-scale mouse T cell CRISPR library cloning: The original mouse CRISPR knockout library, in two sub-libraries (mGeCKOa and mGeCKOb) was from Sanjana et al., Nat Methods 11, 783-784 (2014). mGeCKOa and mGeCKOb were sub-cloned in equal molar, by Gibson assembly and electroporation, into the T cell CRISPR vector to generate the Genome-scale mouse T cell CRISPR library (MKO), with a total of 129,209 sgRNAs including 1,000 non-targeting controls (NTCs). An estimated library coverage of >50× (˜7×10⁶ total colonies) was achieved in electroporation. The library was subsequently sequence-verified by Illumina sequencing. At least 94.1% (121,608/129,209) of unique sgRNAs the whole library cloned, targeting 98.3% (22,375/22,768) of all protein coding genes and microRNAs in the mouse genome, with a tight log-normal distribution representing the vast majority of all designed sgRNAs (90% within 2 orders of magnitude, 99% within 3 orders of magnitude).

[0163] Viral library production: The MKO library plasmid was transfected into low-passage HEK293FT cells at 80% confluency in 15 cm tissue culture plates. Viral supernatant was collected at 48 h and 72 h post-transfection, filtered via a 0.45 μm filtration unit (Fisher/VWR), and concentrated using AmiconUltra 100 kD ultracentrifugation units (Millipore), aliquoted and stored in −80° C. until use. Virus for empty vector was produced in a similar manner.

[0164] T cell isolation and culture: Spleens and mesenteric lymph nodes (mLNs) were isolated from various indicated mouse strains, and placed in ice-cold 2% FBS [FBS (Sigma)+RPMI-1640 (Lonza)]. Organs were prepared by mashing organs through a 100 μm filter. Lymphocytes were suspended in 2% FBS. RBCs were lysed with 1 ml of ACK Lysis Buffer (Lonza) per spleen, incubated for 2 mins at room temperature, and washed with 2% FBS. Lymphocytes were filtered through a 40 μm filter and resuspended with MACS Buffer (PBS+0.5% BSA+2 μM EDTA). Naive CD8⁺ T cells were isolated using the protocol and kit established by Miltenyi. Naive CD8⁺ T cells were resuspended with cRPMI (RPMI-1640+10% FBS+2mM L-Glutamine+100 U Pen/Strep (Fisher)+49 nM β-mercaptoethanol (Sigma)) to a final concentration of 1×10⁶ cells/ml. Medium for in vivo experiments was supplemented with 2 ng/ml IL-2+2.5 ng/ml IL-7+50 ng/ml IL-15+1 μg/ml anti-CD28. Medium for in vitro experiments was supplemented with 2 ng/ml IL-2+2 ng/ml IL-12p70+1 μg/ml anti-CD28. Cells were cultured on plates pretreated with 5 μg/ml anti-CD3 and incubated at 37° C. Various cytokines and antibodies were purchased from BD, Biolegend and eBiosciences.

[0165] T cell transduction, virus titration: T cells were infected in culture immediately after isolation by directly adding concentrated virus into the media. 3 days after infection, T cells were stained for Thy1.1 expression and analyzed on FACS. Viral titer was determined for each batch by the number of Thy1.1⁺ T cells normalized to total T cells divided by the volume of virus used. At least 3 doses of viruses with experimental duplicates were used for determining viral titer.

[0166] Antibody and Flow Cytometry: Infectivity of CD8⁺ T cells was assessed via surface staining with anti-CD3ε APC, anti-CD8α FITC, and anti-Thy1.1 PE. Biolegend antibodies used in experiments include anti-CD3ε PE/Cy7, anti-CD8α APC, anti-CD16/32, CD62L PE, CD107a PE, anti-GranzymeA PE, anti-SIINFEKL:H-2K^{b} PE , and anti-Thy1.1 PE. Anti-human/mouse DHX37/Dhx37 was purchased from Novus Biologicals. Anti-rabbit IgG AF594 was purchased from cell signaling. For surface stains, cells were stained on ice for 30 mins. Samples were collected on a BD FACSAria cell sorter with 3 lasers, and analyzed using FlowJo software 9.9.4 (Treestar, Ashland, Oreg.) on a MAC® workstation.

[0167] Library-scale viral transduction of T cells: T cells were isolated and cultured as described herein. With the viral titer information, for each infection replicate, a total of >1×10⁸ Cas9 or naive OT-I; Cas9 CD8⁺ T cells were transduced at a MOI of 1 with concentrated lentivirus containing the MKO library described above, to achieve an initial library coverage of >700×. Transduction with the virus containing the empty vector was performed in parallel with a total of >1×10⁷ naive CD8⁺ T cells. Unlike cancer cell screens, pooled screens in primary cells often use relatively high MOI (Chen et al., (2014) Immunity 41, 325-338; Zhou et al., (2014) Nature 506, 52-57), as sufficient infectivity is necessary to reach sufficient on-target efficiency in these cells. Multiple computational strategies were used to generate quantitative ranked list of genes and to distinguish mis-association or false-positives from potential true hits with strong selection, including usage of independent infection replicates, different mice, independent screens, different TCRs, and independent sgRNAs. In each experiment, 3 infection replicates were applied for generation of T cell library unless otherwise noted.

[0168] Adoptive transfer of viral library infected T cells and tissue processing: At day 0 of the culture, naive CD8⁺ T cells were infected with the lentiviral MKO library, and incubated at 37° C. for 3 days. On day 3 of culture, T cells were collected, washed with ice-cold PBS, and resuspended to a final concentration of 5×10⁷ cells/ml. 1×10⁷ cells were injected intravenously into each mouse. C57BL/6 (B6), B6.129, B6.129.Fvb, Cas9, or Rag1^{-/-} mice were used as recipient mice in respective experiments. All adoptive cell transfer experiments in this study were done without lymphodepletion unless otherwise noted. On 7-day post-transfer, mice were sacrificed, and relevant organs were isolated. Skin draining lymph nodes were comprised of inguinal, popliteal, axillary, and brachial lymph nodes. Cervical lymph nodes isolated entailed the 6 superficial cervical lymph nodes. Abdominal lymph nodes included the mesenteric and pancreatic lymph nodes. Other relevant organs isolated were the spleen, liver, pancreas, lung, muscle and brain.

[0169] Generation of a neoantigen expression vector (mCherry-cOVA Expression Vector): A lentiviral mCherry-cOVA (mCh-cOVA) vector, lenti-pLKO-U6-sg(BsmBI)-EF S-mCherry-2A-cOVA, was generated by subcloning cOVA into a mCherry lentiviral vector via Gibson Assembly.

| pMD02: lenti-pLKO-U6-sgBsmBI-EFS-mCherry-2A-cOVA (SEQ ID NO: 129,216): | |
|---|---|
| 1 | ttaatgtagt cttatgcaat actcttgtag tcttgcaaca tggtaacgat gagttagcaa |
| 61 | catgccttac aaggagagaa aaagcaccgt gcatgccgat tggtggaagt aaggtggtac |
| 121 | gatcgtgcct tattaggaag gcaacagacg ggtctgacat ggattggacg aaccactgaa |
| 181 | ttgccgcatt gcagagatat tgtatttaag tgcctagctc gatacataaa cgggtctctc |
| 241 | tggttagacc agatctgagc ctgggagctc tctggctaac tagggaaccc actgcttaag |
| 301 | cctcaataaa gcttgccttg agtgcttcaa gtagtgtgtg cccgtctgtt gtgtgactct |
| 361 | ggtaactaga gatccctcag acccttttag tcagtgtgga aaatctctag cagtggcgcc |
| 421 | cgaacaggga cttgaaagcg aaagggaaac cagaggagct ctctcgacgc aggactcggc |
| 481 | ttgctgaagc gcgcacggca agaggcgagg ggcggcgact ggtgagtacg ccaaaaattt |
| 541 | tgactagcgg aggctagaag gagagagatg ggtgcgagag cgtcagtatt aagcggggga |
| 601 | gaattagatc gcgatgggaa aaaattcggt taaggccagg gggaaagaaa aaatataaat |
| 661 | taaaacatat agtatgggca agcagggagc tagaacgatt cgcagttaat cctggcctgt |
| 721 | tagaaacatc agaaggctgt agacaaatac tgggacagct acaaccatcc cttcagacag |
| 781 | gatcagaaga acttagatca ttatataata cagtagcaac cctctattgt gtgcatcaaa |
| 841 | ggatagagat aaaagacacc aaggaagctt tagacaagat agaggaagag caaaacaaaa |
| 901 | gtaagaccac cgcacagcaa gcggccgctg atcttcagac ctggaggagg agatatgagg |
| 961 | gacaattgga gaagtgaatt atataaatat aaagtagtaa aaattgaacc attaggagta |
| 1021 | gcacccacca aggcaaagag aagagtggtg cagagagaaa aaagagcagt gggaatagga |
| 1081 | gctttgttcc ttgggttctt gggagcagca ggaagcacta tgggcgcagc gtcaatgacg |
| 1141 | ctgacggtac aggccagaca attattgtct ggtatagtgc agcagcagaa caatttgctg |
| 1201 | agggctattg aggcgcaaca gcatctgttg caactcacag tctggggcat caagcagctc |
| 1261 | caggcaagaa tcctggctgt ggaaagatac ctaaaggatc aacagctcct ggggatttgg |
| 1321 | ggttgctctg gaaaactcat ttgcaccact gctgtgcctt ggaatgctag ttggagtaat |
| 1381 | aaatctctgg aacagatttg gaatcacacg acctggatgg agtgggacag agaaattaac |
| 1441 | aattacacaa gcttaataca ctccttaatt gaagaatcgc aaaaccagca agaaaagaat |
| 1501 | gaacaagaat tattggaatt agataaatgg gcaagtttgt ggaattggtt taacataaca |
| 1561 | aattggctgt ggtatataaa attattcata atgatagtag gaggcttggt aggtttaaga |
| 1621 | atagtttttg ctgtactttc tatagtgaat agagttaggc agggatattc accattatcg |
| 1681 | tttcagaccc acctcccaac cccgagggga cccagagagg gcctatttcc catgattcct |
| 1741 | tcatatttgc atatacgata caaggctgtt agagagataa ttagaattaa tttgactgta |
| 1801 | aacacaaaga tattagtaca aaatacgtga cgtagaaagt aataatttct tgggtagttt |
| 1861 | gcagttttaa aattatgttt taaaatggac tatcatatgc ttaccgtaac ttgaaagtat |
| 1921 | ttcgatttct tggctttata tatcttGTGG AAAGGACGAA ACACCgGAGA CGgaCGTCTC |
| 1981 | tgttttagag ctaGAAAtag caagttaaaa taaggctagt ccgttatcaa cttgaaaaag |
| 2041 | tggcaccgag tcggtgcTTT TTTaagcttg gcgtaactag atcttgagac aaatggcagt |
| 2101 | attcatccac aattttaaaa gaaaaggggg gattgggggg tacagtgcag gggaaagaat |
| 2161 | agtagacata atagcaacag acatacaaac taaagaatta caaaaacaaa ttacaaaaat |
| 2221 | tcaaaatttt cgggtttatt acagggacag cagagatcca ctttggcgcc ggctcgaggg |
| 2281 | ggcccgggtg caaagatgga taaagtttta aacagagagg aatctttgca gctaatggac |
| 2341 | cttctaggtc ttgaaaggag tgggaattgg ctccggtgcc cgtcagtggg cagagcgcac |
| 2401 | atcgcccaca gtccccgaga agttgggggg aggggtcggc aattgatccg gtgcctagag |
| 2461 | aaggtggcgc ggggtaaact gggaaagtga tgtcgtgtac tggctccgcc tttttcccga |
| 2521 | gggtggggga gaaccgtata taagtgcagt agtcgccgtg aacgttcttt ttcgcaacgg |
| 2581 | gtttgccgcc agaacacagg taagtgccgt gtgtggttcc cgcgggcctg gcctctttac |
| 2641 | gggttatggc ccttgcgtgc cttgaattac ttccactggc tgcagtacgt gattcttgat |
| 2701 | cccgagcttc gggttggaag tgggtgggag agttcgaggc cttgcgctta aggagcccct |
| 2761 | tcgcctcgtg cttgagttga ggcctggcct gggcgctggg gccgccgcgt gcgaatctgg |
| 2821 | tggcaccttc gcgcctgtct cgctgctttc gataagtctc tagccattta aaatttttga |
| 2881 | tgacctgctg cgacgctttt tttctggcaa gatagtcttg taaatgcggg ccaagatctg |
| 2941 | cacactggta tttcggtttt tggggccgcg ggcggcgacg gggcccgtgc gtcccagcgc |
| 3001 | acatgttcgg cgaggcgggg cctgcgagcg cggccaccga gaatcggacg ggggtagtct |
| 3061 | caagctggcc ggcctgctct ggtgcctggc ctcgcgccgc cgtgtatcgc cccgccctgg |
| 3121 | gcggcaaggc tggcccggtc ggcaccagtt gcgtgagcgg aaagatggcc gcttcccggc |
| 3181 | cctgctgcag ggagctcaaa atggaggacg cggcgctcgg gagagcgggc gggtgagtca |
| 3241 | cccacacaaa ggaaaagggc ctttccgtcc tcagccgtcg cttcatgtga ctccacggag |
| 3301 | taccgggcgc cgtccaggca cctcgattag ttctcgagct tttggagtac gtcgtcttta |
| 3361 | ggttgggggg aggggtttta tgcgatggag tttccccaca ctgagtgggt ggagactgaa |
| 3421 | gttaggccag cttggcactt gatgtaattc tccttggaat ttgccctttt tgagtttgga |
| 3481 | tcttggttca ttctcaagcc tcagacagtg gttcaaagtt tttttcttcc atttcaggtg |
| 3541 | tcgtgacgta cggccaccat gGTGAGCAAG GGCGAGGAGG ATAACATGGC CATCATCAAG |
| 3601 | GAGTTCATGC GCTTCAAGGT GCACATGGAG GGCTCCGTGA ACGGCCACGA GTTCGAGATC |
| 3661 | GAGGGCGAGG GCGAGGGCCG CCCCTACGAG GGCACCCAGA CCGCCAAGCT GAAGGTGACC |
| 3721 | AAGGGTGGCC CCCTGCCCTT CGCCTGGGAC ATCCTGTCCC CTCAGTTCAT GTACGGCTCC |
| 3781 | AAGGCCTACG TGAAGCACCC CGCCGACATC CCCGACTACT TGAAGCTGTC CTTCCCCGAG |
| 3841 | GGCTTCAAGT GGGAGCGCGT GATGAACTTC GAGGACGGCG GCGTGGTGAC CGTGACCCAG |
| 3901 | GACTCCTCCC TGCAGGACGG CGAGTTCATC TACAAGGTGA AGCTGCGCGG CACCAACTTC |
| 3961 | CCCTCCGACG GCCCCGTAAT GCAGAAGAAG ACCATGGGCT GGGAGGCCTC CTCCGAGCGG |
| 4021 | ATGTACCCCG AGGACGGCGC CCTGAAGGGC GAGATCAAGC AGAGGCTGAA GCTGAAGGAC |
| 4081 | GGCGGCCACT ACGACGCTGA GGTCAAGACC ACCTACAAGG CCAAGAAGCC CGTGCAGCTG |
| 4141 | CCCGGCGCCT ACAACGTCAA CATCAAGTTG GACATCACCT CCCACAACGA GGACTACACC |
| 4201 | ATCGTGGAAC AGTACGAACG CGCCGAGGGC CGCCACTCCA CCGGCGGCAT GGACGAGCTG |
| 4261 | TACAAGGGCA GTGGAGAGGG CAGAGGAAGT CTGCTAACAT GCGGTGACGT CGAGGAGAAT |
| 4321 | CCTGGCCCAA TGGGCTCCAT CGGCGCAGCA AGCATGGAAT TTTGTTTTGA TGTATTCAAG |
| 4381 | GAGCTCATCA ATTCCTGGGT AGAAAGTCAG ACAAATGGAA TTATCAGAAA TGTCCTTCAG |
| 4441 | CCAAGCTCCG TGGATTCTCA AACTGCAATG GTTCTGGTTA ATGCCATTGT CTTCAAAGGA |
| 4501 | CTGTGGGAGA AAACATTTAA GGATGAAGAC ACACAAGCAA TGCCTTTCAG AGTGACTGAG |
| 4561 | CAAGAAAGCA AACCTGTGCA GATGATGTAC CAGATTGGTT TATTTAGAGT GGCATCAATG |
| 4621 | GCTTCTGAGA AAATGAAGAT CCTGGAGCTT CCATTTGCCA GTGGGACAAT GAGCATGTTG |
| 4681 | GTGCTGTTGC CTGATGAAGT CTCAGGCCTT GAGCAGCTTG AGAGTATAAT CAACTTTGAA |
| 4741 | AAACTGACTG AATGGACCAG TTCTAATGTT ATGGAAGAGA GGAAGATCAA AGTGTACTTA |
| 4801 | CCTCGCATGA AGATGGAGGA AAAATACAAC CTCACATCTG TCTTAATGGC TATGGGCATT |
| 4861 | ACTGACGTGT TTAGCTCTTC AGCCAATCTG TCTGGCATCT CCTCAGCAGA GAGCCTGAAG |
| 4921 | ATATCTCAAG CTGTCCATGC AGCACATGCA GAAATCAATG AAGCAGGCAG AGAGGTGGTA |
| 4981 | GGGTCAGCAG AGGCTGGAGT GGATGCTGCA AGCGTCTCTG AAGAATTTAG GGCTGACCAT |
| 5041 | CCATTCCTCT TCTGTATCAA GCACATCGCA ACCAACGCCG TTCTCTTCTT TGGCAGATGT |
| 5101 | GTTTCCCCTT AAacgcgtta agtcgacaat caacctctgg attacaaaat ttgtgaaaga |
| 5161 | ttgactggta ttcttaacta tgttgctcct tttacgctat gtggatacgc tgctttaatg |
| 5221 | cctttgtatc atgctattgc ttcccgtatg gctttcattt tctcctcctt gtataaatcc |
| 5281 | tggttgctgt ctctttatga ggagttgtgg cccgttgtca ggcaacgtgg cgtggtgtgc |
| 5341 | actgtgtttg ctgacgcaac ccccactggt tggggcattg ccaccacctg tcagctcctt |
| 5401 | tccgggactt tcgctttccc cctccctatt gccacggcgg aactcatcgc cgcctgcctt |
| 5461 | gcccgctgct ggacaggggc tcggctgttg ggcactgaca attccgtggt gttgtcgggg |
| 5521 | aaatcatcgt cctttccttg gctgctcgcc tgtgttgcca cctggattct gcgcgggacg |
| 5581 | tccttctgct acgtcccttc ggccctcaat ccagcggacc ttccttcccg cggcctgctg |
| 5641 | ccggctctgc ggcctcttcc gcgtcttcgc cttcgccctc agacgagtcg gatctccctt |
| 5701 | tgggccgcct ccccgcgtcg actttaagac caatgactta caaggcagct gtagatctta |
| 5761 | gccacttttt aaaagaaaag gggggactgg aagggctaat tcactcccaa cgaagacaag |
| 5821 | atctgctttt tgcttgtact gggtctctct ggttagacca gatctgagcc tgggagctct |
| 5881 | ctggctaact agggaaccca ctgcttaagc ctcaataaag cttgccttga gtgcttcaag |
| 5941 | tagtgtgtgc ccgtctgttg tgtgactctg gtaactagag atccctcaga cccttttagt |
| 6001 | cagtgtggaa aatctctagc agtacgtata gtagttcatg tcatcttatt attcagtatt |
| 6061 | tataacttgc aaagaaatga atatcagaga gtgagaggaa cttgtttatt gcagcttata |
| 6121 | atggttacaa ataaagcaat agcatcacaa atttcacaaa taaagcattt ttttcactgc |
| 6181 | attctagttg tggtttgtcc aaactcatca atgtatctta tcatgtctgg ctctagctat |
| 6241 | cccgccccta actccgccca tcccgcccct aactccgccc agttccgccc attctccgcc |
| 6301 | ccatggctga ctaatttttt ttatttatgc agaggccgag gccgcctcgg cctctgagct |
| 6361 | attccagaag tagtgaggag gcttttttgg aggcctaggg acgtacccaa ttcgccctat |
| 6421 | agtgagtcgt attacgcgcg ctcactggcc gtcgttttac aacgtcgtga ctgggaaaac |
| 6481 | cctggcgtta cccaacttaa tcgccttgca gcacatcccc ctttcgccag ctggcgtaat |
| 6541 | agcgaagagg cccgcaccga tcgcccttcc caacagttgc gcagcctgaa tggcgaatgg |
| 6601 | gacgcgccct gtagcggcgc attaagcgcg gcgggtgtgg tggttacgcg cagcgtgacc |
| 6661 | gctacacttg ccagcgccct agcgcccgct cctttcgctt tcttcccttc ctttctcgcc |
| 6721 | acgttcgccg gctttccccg tcaagctcta aatcgggggc tccctttagg gttccgattt |
| 6781 | agtgctttac ggcacctcga ccccaaaaaa cttgattagg gtgatggttc acgtagtggg |
| 6841 | ccatcgccct gatagacggt ttttcgccct ttgacgttgg agtccacgtt ctttaatagt |
| 6901 | ggactcttgt tccaaactgg aacaacactc aaccctatct cggtctattc ttttgattta |
| 6961 | taagggattt tgccgatttc ggcctattgg ttaaaaaatg agctgattta acaaaaattt |
| 7021 | aacgcgaatt ttaacaaaat attaacgctt acaatttagg tggcactttt cggggaaatg |
| 7081 | tgcgcggaac ccctatttgt ttatttttct aaatacattc aaatatgtat ccgctcatga |
| 7141 | gacaataacc ctgataaatg cttcaataat attgaaaaag gaagagtatg agtattcaac |
| 7201 | atttccgtgt cgcccttatt cccttttttg cggcattttg ccttcctgtt tttgctcacc |
| 7261 | cagaaacgct ggtgaaagta aaagatgctg aagatcagtt gggtgcacga gtgggttaca |
| 7321 | tcgaactgga tctcaacagc ggtaagatcc ttgagagttt tcgccccgaa gaacgttttc |
| 7381 | caatgatgag cacttttaaa gttctgctat gtggcgcggt attatcccgt attgacgccg |
| 7441 | ggcaagagca actcggtcgc cgcatacact attctcagaa tgacttggtt gagtactcac |
| 7501 | cagtcacaga aaagcatctt acggatggca tgacagtaag agaattatgc agtgctgcca |
| 7561 | taaccatgag tgataacact gcggccaact tacttctgac aacgatcgga ggaccgaagg |
| 7621 | agctaaccgc ttttttgcac aacatggggg atcatgtaac tcgccttgat cgttgggaac |
| 7681 | cggagctgaa tgaagccata ccaaacgacg agcgtgacac cacgatgcct gtagcaatgg |
| 7741 | caacaacgtt gcgcaaacta ttaactggcg aactacttac tctagcttcc cggcaacaat |
| 7801 | taatagactg gatggaggcg gataaagttg caggaccact tctgcgctcg gcccttccgg |
| 7861 | ctggctggtt tattgctgat aaatctggag ccggtgagcg tgggtctcgc ggtatcattg |
| 7921 | cagcactggg gccagatggt aagccctccc gtatcgtagt tatctacacg acggggagtc |
| 7981 | aggcaactat ggatgaacga aatagacaga tcgctgagat aggtgcctca ctgattaagc |
| 8041 | attggtaact gtcagaccaa gtttactcat atatacttta gattgattta aaacttcatt |
| 8101 | tttaatttaa aaggatctag gtgaagatcc tttttgataa tctcatgacc aaaatccctt |
| 8161 | aacgtgagtt ttcgttccac tgagcgtcag accccgtaga aaagatcaaa ggatcttctt |
| 8221 | gagatccttt ttttctgcgc gtaatctgct gcttgcaaac aaaaaaacca ccgctaccag |
| 8281 | cggtggtttg tttgccggat caagagctac caactctttt tccgaaggta actggcttca |
| 8341 | gcagagcgca gataccaaat actgttcttc tagtgtagcc gtagttaggc caccacttca |
| 8401 | agaactctgt agcaccgcct acatacctcg ctctgctaat cctgttacca gtggctgctg |
| 8461 | ccagtggcga taagtcgtgt cttaccgggt tggactcaag acgatagtta ccggataagg |
| 8521 | cgcagcggtc gggctgaacg gggggttcgt gcacacagcc cagcttggag cgaacgacct |
| 8581 | acaccgaact gagataccta cagcgtgagc tatgagaaag cgccacgctt cccgaaggga |
| 8641 | gaaaggcgga caggtatccg gtaagcggca gggtcggaac aggagagcgc acgagggagc |
| 8701 | ttccaggggg aaacgcctgg tatctttata gtcctgtcgg gtttcgccac ctctgacttg |
| 8761 | agcgtcgatt tttgtgatgc tcgtcagggg ggcggagcct atggaaaaac gccagcaacg |
| 8821 | cggccttttt acggttcctg gccttttgct ggccttttgc tcacatgttc tttcctgcgt |
| 8881 | tatcccctga ttctgtggat aaccgtatta ccgcctttga gtgagctgat accgctcgcc |
| 8941 | gcagccgaac gaccgagcgc agcgagtcag tgagcgagga agcggaagag cgcccaatac |
| 9001 | gcaaaccgcc tctccccgcg cgttggccga ttcattaatg cagctggcac gacaggtttc |
| 9061 | ccgactggaa agcgggcagt gagcgcaacg caattaatgt gagttagctc actcattagg |
| 9121 | caccccaggc tttacacttt atgcttccgg ctcgtatgtt gtgtggaatt gtgagcggat |
| 9181 | aacaatttca cacaggaaac agctatgacc atgattacgc caagcgcgca attaaccctc |
| 9241 | actaaaggga acaaaagctg gagctgcaag c |

[0170] Generation of stably transfected mCherry-cOVA expressing cell line: E0771 murine breast cancer cells were transduced with mCh-cOVA-expressing lentivirus. After 3 days post-transduction, transduced E0771 cells were cultured individually in 96-well plates by resuspending cells to 10 cells/ml and culturing 100 μl of cell suspension in each well. Two weeks later, clonal mCh⁺E0771 clones were identified by fluorescence microscopy. mCh⁺E0771 clones were stained with established anti-mouse [H-2K^{b} bound to SIINFEKL] antibody (Porgador et al., Immunity 6, 715-726 (1997)) to determine cOVA expression. Different mCh⁺cOVA⁺ clones were selected based on cOVA expression. E0771 cells were pulsed with varying concentrations of SIINFEKL peptide for 4 hours at 37° C., and subsequently stained with an the established antibody described elsewhere herein. mCh⁺cOVA⁺E0771 clones were compared to SIINFEKL-pulsed cells. Clone 3 was chosen for in vivo experiments because of its low, uniform expression of cOVA to select for genes with stronger phenotypes. In addition, a LCC-mChcOVA cell line was generated by transducing a mouse lung cancer cell line.

[0171] Transplantation of cancer cells into Rag1^{-/-} mice and tissue processing: 5×10⁶ mCh⁺cOVA⁺E0771 cells were injected either subcutaneously or into the intra-mammary fat pad of Rag1^{-/-} mice. Ten days post-transplantation, viral library infected T cells, were intravenously injected in tumor-bearing Rag1^{-/-} mice. After 7 days, draining lymph nodes, non-draining lymph nodes, spleens, lungs, and tumors were isolated. Samples were prepared for DNA extraction or FACS analysis.

[0172] Spleens and lymph nodes were prepared as described elsewhere herein. Tumors were broken down into smaller fragments, about the size of lentils. Tumors were then dissociated with 1 μg/ml Collagenase IV for 30 minutes using GentleMacs Octo dissociator from Miltenyi, and cell suspensions were passed through 100 μm filter twice before staining.

[0173] Degranulation (kill) assay in genome-scale CRISPR screening and validation: Experiments were first optimized by pulsing E0771 cells with varying concentrations of SIINFEKL peptide for 4 hours at 37° C., and subsequently stained with the anti-mouse [SIINFEKL:H-2K^{b}] antibody and analyzed by flow cytometry. The dose of 1 ng/ml was chosen as it represents the maximum concentration tested without being detected by anti-(SIINFEKL:H-2K^{b}). Naive OT-I; Cas9 CD8⁺ T cells were isolated and transduced with MKO lentiviral library described herein. Infected OT-I; Cas9 CD8⁺ T cells were incubated on plates pretreated with 5 μg/ml anti-CD3ε in cRPMI supplemented with 2 ng/ml IL-2+2 ng/ml IL-12p70+1 μg/ml anti-CD28 for 6 days. 12 hours before assay, infected OT-I; Cas9 CD8⁺ T cells were incubated on untreated plates in the presence of 2 ng/ml IL-2+2 ng/ml IL-12p70 to rest the cells. On day 6, 12 hours before the assay, 1×10⁷ E0771 cells were also plated on 10 cm plate in D10 media (DMEM+10% FBS+100 U Pen/Strep). The following day, E0771 cells were incubated with warm D10 media supplemented with either 0 or 1 ng/ml SIINFEKL peptide for 4 hours. Meanwhile, infected OT-I; Cas9 CD8⁺ T cells were resuspended to a final concentration 1×10⁶ cells/ml with cRPMI+2 nM monensin+anti-CD107a PE antibody, and added to E0771 cells at a T cell: seeding cancer cell ratio=1:1. Cells were coincubated at 37° C. for 2 hours. Cells were then stained with anti-CD8 APC for 30 minutes on ice, and cells were sorted via BD FACSAria. A total of 1×10⁷ T cells were analyzed, and the top 5% CD107a⁺ cells were sorted, and subjected to genomic DNA extraction, CRISPR library readout, and screen data analysis. A total of three biological replicates were performed.

[0174] In validation experiments, both T cells and E0771 cells were scaled down accordingly, while maintaining T cell: seeding cancer cell ratio=1:1. Briefly, cells were infected and cultured at 37° C. for 7 days. On day 6, T cells were rested overnight and E0771 cells were plated in 12-well plates at 5×10⁵ cells/ml/well. E0771 cells were then incubated with 10 ng/ml SIINFEKL for 4 hours in D10 media. 5×10⁵ OT-I; Cas9 CD8⁺ T cells were added to the pulsed E0771 cells. During co-culture, IL-2, IL-12, anti-CD107a-PE (1:400), and monensin was added. After 2 hours of incubation, cells were isolated, stained, and run on flow cytometry.

[0175] Genomic DNA extraction from cells and mouse tissues: For gDNA extraction, three methods were used. Method 1: for samples with a total number of less than or equal to 1×10⁵ cells, 100 μl of QuickExtract solution (Epicentre) was directly added to cells and incubated at 65° C. for 30 to 60 minutes until the cell pellets were completely dissolved. Method 2: for cellular samples with a total number of 1×10⁵ to 2×10⁶ cells, or tissue samples from mouse lymph nodes, samples were subjected to QIAamp Fast DNA Tissue Kit (Qiagen) following the manufacturer's protocol. Method 3: for cellular samples with a total number of greater than 2×10⁶ cells, or tissue samples from mouse organs such as spleen, lung, liver, brain, pancreas, colon, or tumor samples, a custom Puregene protocol was used.

[0176] Briefly, 50-200 mg of frozen ground tissue were resuspended in 6 ml of Lysis Buffer (50 mM Tris, 50 mM EDTA, 1% SDS, pH 8) in a 15 ml conical tube, and 30 μl of 20 mg/ml Proteinase K (Qiagen) were added to the tissue/cell sample and incubated at 55° C. overnight. The next day, 30 μl of 10 mg/ml RNAse A (Qiagen) was added to the lysed sample, which was then inverted 25 times and incubated at 37° C. for 30 minutes. Samples were cooled on ice before addition of 2 ml of pre-chilled 7.5M ammonium acetate (Sigma) to precipitate proteins. The samples were vortexed at high speed for 20 seconds and then centrifuged at ≥4,000×g for 10 minutes. Then, a tight pellet was visible in each tube and the supernatant was carefully decanted into a new 15 ml conical tube. Then 6 ml 100% isopropanol was added to the tube, inverted 50 times and centrifuged at ≥4,000×g for 10 minutes. Genomic DNA was visible as a small white pellet in each tube. The supernatant was discarded, 6 ml of freshly prepared 70% ethanol was added, the tube was inverted 10 times, and then centrifuged at ≥4,000×g for 1 minute. The supernatant was discarded by pouring; the tube was briefly spun, and remaining ethanol was removed using a P200 pipette. After air-drying for 10-30 minutes, the DNA changed appearance from a milky white pellet to slightly translucent. Then, 500 μl of ddH₂O was added, the tube was incubated at 65° C. for 1 hour and at room temperature overnight to fully resuspend the DNA. The next day, the gDNA samples were vortexed briefly. The gDNA concentration was measured using a Nanodrop (Thermo Scientific).

[0177] SgRNA library readout by deep sequencing: The sgRNA library readout was performed using a two-steps PCR strategy, where the first PCR includes enough genomic DNA to preserve full library complexity and the second PCR adds appropriate sequencing adapters to the products from the first PCR.

[0178] For PCR #1, a region containing sgRNA cassette was amplified using primers specific to the T cell CRISPR vector:

Forward
(SEQ ID NO: 129,211)
CCCGAGGGGACCCAGAGAG
Reverse
(SEQ ID NO: 129,212)
CAATTCCCACTCCTTTCAAGAC

[0179] PCR was performed using Phusion Flash High Fidelity Master Mix (PF) or DreamTaq Green PCR Master Mix (DT) (ThermoFisher). For reactions using PF, in PCR #1, the thermocycling parameters were: 98° C. for 2min, 18-24 cycles of (98° C. for 1 s, 62° C. for 5 s, 72° C. for 30 s), and 72° C. for 2 minutes. For reactions using DT, the thermocycling parameters were adjusted according to manufacturer's protocol. In each PCR #1 reaction, 3 μg of total gDNA was used. For each sample, the appropriate number of PCR #1 reactions was used to capture the full representation of the screen. For example, at ˜200× coverage of the 129,209 MKO sgRNA library, gDNA from 2.5×10⁷ cells was used. Assuming 6.6 pg of gDNA per cell, ˜160 μg of gDNA was used per sample, in approximately 50 PCR #1 reactions (with ˜3 μg of gDNA per reaction).

[0180] PCR #1 products for each biological sample were pooled and used for amplification with barcoded second PCR primers. For each sample, at least 4 PCR #2 reactions were performed using 2 μl of the pooled PCR #1 product per PCR #2 reaction. Second PCR products were pooled and then normalized for each biological sample before combining uniquely barcoded separate biological samples. The pooled product was then gel purified from a 2% E-gel EX (Life Technologies) using the QiaQuick kit (Qiagen). The purified pooled library was then quantified with a gel-based method using the Low-Range Quantitative Ladder Life Technologies, dsDNA High-Sensitivity Qubit (Life Technologies), BioAnalyzer (Agilent) and/or qPCR. Diluted libraries with 5-20% PhiX were sequenced with MiSeq, HiSeq 2500 or HiSeq 4000 systems (Illumina).

[0181] Demultiplexing and read preprocessing: Raw single-end fastq read files were filtered and demultiplexed using Cutadapt (Martin et al., EMBnet.journal 17, 10-12 (2011)). To remove extra sequences downstream (i.e. 3′ end) of the sgRNA spacer sequences, the following settings were used: cutadapt --discard-untrimmed -a GTTTTAGAGCTAGAAATGGC. As the forward PCR primers used to readout sgRNA representation were designed to have a variety of barcodes to facilitate multiplexed sequencing, these filtered reads were then demultiplexed with the following settings: cutadapt -g filefbcfasta --no-trim, where fbc.fasta contained the 12 possible barcode sequences within the forward primers. Finally, to remove extra sequences upstream (i.e. 5′ end) of the sgRNA spacers, the following settings were used: cutadapt --discard-untrimmed -g GTGGAAAGGACGAAACACCG. Through this procedure, the raw fastq read files could be pared down to the 20 bp sgRNA spacer sequences.

[0182] Mapping of sgRNA spacers and quantitation of sgRNAs: Having extracted the 20 bp sgRNA spacer sequences from each demulitplexed sample, the sgRNA spacers were then mapped to the MKO library from which they originated (mGeCKO). A bowtie index of either sgRNA library was generated using the bowtie-build command in Bowtie 1.1.2 (Langmead et al., Genome Biol 10, R25 (2009). Using these bowtie indexes, the filtered fastq read files were mapped using the following settings: bowtie -v 1 --suppress 4,5,6,7 --chunkmbs 2000 -best. Using the resultant mapping output, the number of reads that had mapped to each sgRNA within the library were quantitated. To generate sgRNA representation barplots, a detection threshold of 1 read was set, and the number of unique sgRNAs present in each sample was counted.

[0183] Normalization and summary-level analysis of sgRNA abundances: The number of reads in each sample was normalized by converting raw sgRNA counts to reads per million (rpm). The rpm values were then subject to log₂ transformation for certain analyses. To generate correlation heatmaps, the NMF R package was used (Gaujoux et al., BMC Bioinformatics 11, 367 (2010)) and the Pearson correlations between individual samples calculated using log₂ rpm counts. To calculate the cumulative distribution function for each sample group, the normalized sgRNA counts were first averaged across all samples within a given group. Then the ecdfplot function in the latticeExtra R package was used to generate empirical cumulative distribution plots.

[0184] Enrichment analysis of sgRNAs: Three criteria were used to identify the top candidate genes: 1) if an sgRNA comprised ≥2% of the total reads in at least one organ sample; 2) if an sgRNA was deemed statistically significantly enriched in ≥25% of all organ samples using a false-discovery rate (FDR) threshold of 2% based on the abundances of all non-targeting controls; or 3) if ≥2 independent sgRNAs targeting the same gene were each found to be statistically significant at FDR <2% in at least one sample. For the first and second criteria, individual sgRNA hits were collapsed to genes to facilitate comparisons with the hits from the third criteria.

[0185] Heatmap of sgRNA library representation: Heatmaps of the top enriched sgRNAs were generated using the aheatmap function with default setting (NMF R package). Only sgRNAs with a log₂ rpm ≥1 were included for visualization in the heatmaps.

[0186] Overlap and significance analysis of enriched sgRNAs: To generate Venn diagrams of enriched sgRNAs, all sgRNAs were considered that were found to be significantly enriched across different statistical calling algorithms, different T cells, or different experiments.

[0187] Additional CRISPR screen T cell survival analysis by organ: Enrichment analysis was first performed for each organ as a sample to call significant sgRNAs passing specific FDR cutoff. Sets of significant sgRNAs were compared against each other. In addition, the whole library representation was used as input for dimensional reduction analysis using t-SNE as in single-cell RNA-seq analysis, to find clusters of organs.

[0188] Minipool screen validation: SgRNA minipools were generated by pooling a selection of genes from the primary screen and cloned into the same T cell CRISPR vector. Viral production, transduction, and adoptive transfer was done similar to the screen with 1e6 T cells per transfer.

[0189] Pathway enrichment analysis of enriched sgRNAs: SgRNAs that were significantly enriched in each tissue type were determined. To convert these sgRNAs to their target genes, the resultant gene sets for DAVID functional annotation analysis were used (Huang da et al., Nucleic Acids Res 37, 1-13 (2009)). A GO category was considered statistically significant if the enrichment p value is less than 0.01, and Benjamini-Hochberg adjusted p-value was less than 0.1.

[0190] Gene ontology and pathway enrichment analysis: Various gene sets were used for gene ontology and pathway enrichment analysis using DAVID functional annotation analysis. For sgRNA set, sgRNAs were converted to their target genes and then the resultant genes were used for analysis.

[0191] Testing anti-tumor function of T cells with sgRNAs targeting individual genes by adoptive transfer: SgRNAs targeting individual genes were cloned into the T cell CRISPR vector. Two independent sgRNAs targeting each gene (e.g. Dhx37) were used. Virus prep and T cell infection were performed as described herein. 5×10⁶ mCh⁺cOVA⁺E0771 cells were injected either subcutaneously or into the intra-mammary fat pad of Rag1^{-/-} mice. 7 days post-transplantation, freshly isolated naive OT-I; Cas9 CD8⁺ T cells were plated on plates pretreated with 5 μg/ml anti-CD3ε in cRPMI supplemented with 2 ng/ml IL-2+2.5 ng/mL IL-7+50 ng/mL IL-15+1 μg/ml anti-CD28, infected with these sgRNA-containing lentiviruses (at MOI of ˜≤1) as described herein, and cultured for 3 days. 10 days post-transplantation, 5×10⁶ virally infected T cells were intravenously injected in tumor-bearing Rag1^{-/-} mice (T cell: initial cancer cell ratio=1:1). PBS and empty vector infected T cells were used as adoptive transfer controls. Tumor sizes were measured by caliper once to twice per week. 6 weeks after adoptive transfer, tumors were dissected, and samples were subjected to molecular, cellular, histology analysis, or single-cell RNA-seq. For statistical comparison of tumor growth curves, multiple t-tests were performed (Benjamini, Krieger and Yekutieli FDR method) on each time point.

[0192] Tumor Infiltration Lymphocyte (TIL) Isolation for single cell RNA-seq: Tumor bearing mice were euthanized at designated time points, and their tumors were collected and kept in ice cold 2% FBS. Tumors were minced into 1-3 mm size pieces using scalpel and then digested in 1 μg/ml Collagenase IV for 30-60 min using Miltenyi GentleMACS Octo Dissociator. Tumor suspensions were filtered twice through 100 μm cell strainer, and again through 40 μm cell strainer to remove large bulk. Subsequently, tumor suspensions were carefully layered onto Ficoll-Paque media (GE Healthcare) and centrifuged at 400 g for 30 min to enrich lymphocytes at the bilayer interface. Cells at the interface were carefully collected, and washed twice with 2% FBS, counted, and stained with indicated antibodies for 30 minutes on ice. CD3⁺ CD8⁺ TILs were then sorted on BD FACSAria. A total of 3×10³ to 2×10⁴ TILs were collected per tumor.

[0193] Mouse TIL single cell RNA-seq (scRNAseq): TILs sorted from freshly isolated tumors were subjected to single-cell RNAseq library preparation, according to manufacturer's protocol (10× Genomics). In brief, Single Cell Master Mix was prepared fresh containing RT reagent mix, RT primer, additive A, and RT enzyme mix. A Single Cell 3′ Chip was placed in a 10×™ Chip Holder. 50% glycerol solution was added to each unused well accordingly, TIL solution at ˜100 cell/ul was added together with the master mix. The Single Cell 3′ Gel Bead Strip was placed into a 10×™ Vortex Adapter and vortex for 30 sec. Then, Single Cell 3′ Gel Bead suspension and Partitioning Oil were dispensed into the bottom of the wells in the specified rows. The fully loaded chip was then inserted into Chromium™ Controller to generate emulsion. The emulsion was then transferred to a 96-well PCR plate for GEM-RT reaction, RT clean up, cDNA amplification, cDNA clean up, quantification and QC, and subjected to Illumina library construction. In library construction, clean input cDNA was then subjected to fragmentation, end repair & A-tailing. After that, double sided size selection was performed using SPRI Select, followed by adaptor ligation, clean up, and sample indexing PCR, pooling and PCR cleanup, resulting a single-cell RNA-seq library. Enzymatic Fragmentation and Size Selection were used to optimize the cDNA amplicon size prior to library construction per manufacturer's protocols. R1 (read 1 primer sequence) are added to the molecules during GEM incubation. P5, P7, a sample index and R2 (read 2 primer sequence) are added during library construction via end repair, A-tailing, adaptor ligation and PCR. The Single Cell 3′ Protocol produces Illumina-ready sequencing libraries contain the P5 and P7 primers used in Illumina bridge amplification. This final library was then QC'ed and quantified using BioAnalyzer, and loaded on a Hiseq 2500 RapidRun for standard Illumina paired-end sequencing, where Barcode and 10 bp randomer (UMI) was encoded in Read 1, while Read 2 was used to sequence the cDNA fragment. Sample index sequences were incorporated as the i7 index read.

[0194] scRNA-seq data processing: TIL scRNA-seq fastq data was pre-processed using established and custom pipelines. Briefly, raw Illumina data files were subjected to Cell Ranger, which used cellranger mkfastq to wrap Illumina's bcl2fastq to correctly demultiplex Chromium-prepared sequencing samples and to convert barcode and read data to FASTQ files. Then, cellranger count was used to take FASTQ files and perform alignments to the mouse genome (mm10), filtering, and UMI counting. Raw sequencing output was first preprocessed by Cell Ranger 1.3 (10× Genomics) (Zheng et al., 2017b) using cellranger mkfastq, count, and aggr (no normalization mode). Cells passed the initial quality control metrics imposed by the Cell Ranger pipeline were further filtered using a variety of criteria (Lun et al., (2016) F1000Res 5, 2122): 1) All cells with a total library count (i.e. # of UMIs) that was ≥4 standard deviations below the mean were excluded; 2) All cells with library diversity (i.e. # of detected genes/features) that was ≥4 standard deviations below the mean were excluded; and 3) All cells in which mitochondrial genes disproportionately comprised the total % of the library (≥4 standard deviations above the mean) were excluded. After applying these 3 filters, a final set of cells was retained for further analysis. The 27,998 genes/features were additionally filtered the using a flat cutoff metric: genes with low variance were excluded. Finally, the data was normalized by library size using the scran R package (Lun et al., (2016) F1000Res 5, 2122).

[0195] scRNA-seq t-SNE dimension reduction and visualization: Using the final normalized and processed dataset (described above), t-SNE dimension reduction was performed using the Rtsne R package with default settings (Maaten, (2014) J Mach Learn Res 15, 3221-3245; Maaten and Hinton, (2008) J Mach Learn Res 9, 2579-2605). Individual data points were colored based on the treatment condition for each cell.

[0196] scRNA-seq differential expression analysis: Using the final normalized and processed dataset (described above), differential expression analysis was performed using the edgeR R package (Robinson et al., (2010) Bioinformatics 26, 139-14). In brief, edgeR first estimates the negative binomial dispersion parameter to model the variance between cells from the same treatment group. A generalized linear model is then fitted to determine differentially expressed genes between treatment conditions. Multiple hypothesis correction was performed by the Benjamini-Hochberg method. Significantly differentially expressed genes were defined as having a Benjamini-Hochberg adjusted p<0.05, with upregulated genes having a positive log fold change and downregulated genes having a negative log fold change. Volcano plots were generated using edgeR output statistics. Gene ontology enrichment analyses on differentially expressed genes were performed using the PANTHER classification system (Mi et al., (2013) Nat Protoc 8, 1551-1566). The statistical overrepresentation test was used to identify enriched GO (biological process) categories among the differentially expressed genes. Bonferroni multiple hypothesis correction was performed.

[0197] scRNA-seq heatmap of differentially expressed genes: To generate an overall view of the top differentially expressed genes, each row of the dataset (i.e. by gene) was scaled to obtain z-scores. Heatmaps were generated using the NMF R package (Gaujoux and Seoighe, (2010) BMC Bioinformatics 11, 367).

[0198] Analysis of human T cell scRNA-seq data: Human T cell scRNA-seq data from liver cancer patients (Zheng et al., (2017) Cell 169, 1342-1356 e1316) were retrieved from GEO (GSE98638). Cells were classified according to the original definitions: peripheral blood, tissue-resident, tumor-normal junction, and tumor-infiltrating T cells; CD3⁺/CD4⁺/CD25⁻ T cells, CD3⁺/CD8⁺ T cells, and CD3⁺/CD4⁺/CD25⁺ T cells. Stratification of subpopulation of cells that express relative higher level of DHX37 (DHX37⁺ T cells) and as compared to those expressing lower or undetectable level (DHX37⁻ T cells) was done by a cutoff of 1 log₂(cpm) normalized expression. Analysis of differentially expressed genes was done by comparing DHX37⁺ and DHX37⁻ groups using two-sided unpaired Welch's t test assuming unequal variance.

[0199] DHX37 overexpression: A Dhx37 cDNA was cloned into a lentiviral vector using standard molecular biology techniques, and was used to transfect or transduce cells to overexpress the protein.

[0200] Analysis of human DHX37 expression by western blot: Human PB CD4⁺, CD8⁺ T cells, as well as patient TILs were analyzed for DHX37 protein expression by western blot with a rabit polyclonal antibody (Novus, NBP2-13922).

[0201] Analysis of human DHX37 expression by FACS: Intracellular DHX37 expression was analyzed for human PB CD8⁺ T cells, as well as patient TILs with a rabit polyclonal antibody (Novus, NBP2-13922).

[0202] Analysis of human DHX37 using tissue microarray (TMA): All work involving human samples was approved by institutional IRB. Human tissue samples were collected with existing IRB protocols in place. TMAs from several cancer types were retrieved from biospecimen bank for the following cancer types: glioma, breast cancer and melanoma, with normal and tumor biopsies for brain origin. IHC for DHX37 was done with a rabit polyclonal antibody (Novus, NBP2-13922). H&E and IHC slides were scanned using Leica slidescanners and scored manually for lymphocytes and DHX37+ cells.

[0203] Generation of an AAV T cell knockout vector: An adeno-associated virus (AAV) knockout vector, pAAV-U6-sgBbsI-EFS-Thy1.1-PolyA, was generated by subcloning Thy1.1 and sgRNA expression cassette into a AAV vector via Gibson Assembly (NEB). For individual gene targeting, the AAV knockout vector was digested with BbsI . Oligonuleotides encoding sgRNAs for MII3, B2m, and mDhx37 were ligated into the digested AAV knockout vector using T4 ligase (NEB).

[0204] AAV virus production: The AAV knockout plasmid vector (AAV-vector), AAV-MII3, AAV-B2m, and AAV-mDhx37 were subjected to AAV9 production and chemical purification. Briefly, HEK293FT cells (ThermoFisher) were transiently transfected with transfer (AAV-plasmids), serotype (AAV9) and packaging (pDF6) plasmids using polyethyleneimine (PEI). Approximately 72 h post-transfection, cells were dislodged and transferred to a conical tube in sterile PBS. 1/10 volume of pure chloroform was added to the mixture and incubated at 37° C. for 1 h. NaCl was added to a final concentration of 1 M. The mixture was subsequently shaken until dissolved and then pelleted at 20,000 gx at 4° C. for 15 min. The chloroform layer was discarded while the aqueous layer was transferred to another tube. PEG8000 was added to 10% (w/v) and shaken until dissolved. The mixture was incubated at 4° C. for 1 h and spun at 20,000 gx at 4° C. for 15 min. After the supernatant was discarded, the pellet was resuspended in DPBS+MgCl₂, treated with benzonase (Sigma), and then incubated at 37° C. for 30 min. Chloroform (1:1 volume) was then added, shaken and spun down at 12,000 g at 4° C. for 15 min. The aqueous layer was isolated and passed through a 100-kDa MWCO (Millipore). The concentrated solution was washed with PBS and the filtration process was repeated. Virus was titered by qPCR using custom Taqman assays (ThermoFisher).

[0205] AAV viral transduction: T cell pellets were directly transduced with indicated AAV-virus. 3 days after infection, T cells were stained for Thy1.1 expression and analyzed on FACS.

[0206] Determining cutting efficiency: DNA from cells was extracted by incubating cells with Epicentre QuickExtract for 65° C. for 30 minutes, and subsequently incubated at 98° C. for 5 minutes. gDNA from samples was amplified by PCR. Purified PCR product was subjected to both T7 endonuclease surveyor (NEB) and Nextera sequencing according to Illumina protocol.

[0207] Acute deletion and gene expression analysis of mouse CD8 T cells: OT-I; Cas9 CD8⁺ T cells were transduced with AAV-sgDhx37 or AAV-sgNTC, activated and cultured in vitro for 6 days, and then subjected to 10× Genomics single-cell RNAseq library prep. The initial scRNAseq data processing was done as above.

[0208] Single cell RNAseq analysis with Seurat: Raw UMI-based 10× count matrices were analyzed using Seurat (Butler and Satija, (2017) bioRxiv) with recommended settings. Counts were normalized by UMIs per cell, and log transformed for downstream analysis. Graph-based clustering was performed to identify subpopulations across the entire dataset. Subsequently, differential expression analysis comparing sgDhx37 and NTC samples was performed by non-parametric Wilcoxon test.

[0209] Nuclear staining: Nuclear staining was performed using FoxP3 staining kit and protocol from eBioscience. Prior to nuclear staining, primary antibodies were pre-adsorbed for at least 30 minutes on ice. Serum used for pre-adsorption varied depending on species of samples stained. 5% human serum was used to pre-adsorb antibodies for human T cell staining. 5% normal mouse and 5% normal rat serum was used to pre-adsorb antibodies for murine T cell staining. Cells were stained with primary stain overnight at 4° C., and subsequently stained with secondary antibody for 1 h at room temperature.

[0210] Endosomal staining: Endosomal staining was performed using BD Cytofix/Cytoperm staining kit and protocol. Prior to endosomal staining, cells were incubated with anti-CD16/32 to neutralize FcγRII/III, and subsequently stained with endosomal stain for 30 minutes on ice.

[0211] Blinding statement: Investigators were blinded for sequencing data analysis, but not blinded for tumor engraftment, adoptive transfer, organ dissection and flow cytometry.

[0212] The results of the experiments are now described.

### Example 1: Design, Construction and Production of T Cell Crispr Vector and Genome-Scale Library

[0213] To enable efficient genome editing and isolation of CD8⁺ T cells, a T cell CRISPR vector was designed and generated. This vector contained an sgRNA expression cassette enabling genome editing in conjunction with Cas9, and a cassette that expresses a congenic variant of Thy1 protein (Thy1.1), enabling the specific identification and single-cell isolation of transduced CD8⁺ T cells (FIG. 1A). To enable large-scale genetic manipulation and thus high-throughput screening, a genome-scale sgRNA library containing a total of 129,209 sgRNAs (SEQ ID NOs: 1-129,209) including 1,000 non-targeting controls (NTCs), was cloned into this vector at an estimated library coverage of >50× (˜7×10⁶ total colonies). The successful cloning of the library was verified by Illumina sequencing: (1) tight log-normal distribution of designed sgRNAs with 97.6% of sgRNAs within 2 orders of magnitude (O.M.), and 99.9% within 3 O. M, (2) covering 98.3% targeted genes (FIGS. 15A-15B).

[0214] High-titer lentivirus was generated from the mouse genome-scale sgRNA library (termed MKO thereafter), and tested for efficient virus transduction of cytotoxic T cells. Naive CD8⁺ T cells were isolated from mice that constitutively express Cas9, enabling genetic perturbations upon delivery of sgRNA, transduced with various concentrations of MKO virus, and analyzed for expression of the Thy1.1 surface marker via flow cytometry three days post-infection (FIG. 1B, FIG. 7A, FIG. 15C). Efficient transduction of CD8⁺ T cells was achieved with various concentrations of MKO virus, starting at a 1:100 dilution of the original virus concentrate (FIG. 1C, FIGS. 7B-7E, FIG. 15D-15F).

### Example 2: Genome-Scale Mutagenesis of CD8⁺ T Cells and Adoptive Transfer

[0215] To map the genetic factors modulating the trafficking and survival of diverse T cell populations in vivo, the MKO library was used to interrogate the survival of adoptively transferred mutant T cells after trafficking to relevant organs (FIG. 1B). First, freshly isolated naive Cas9 CD8⁺ T cells were mutagenized by transducing with the MKO lentiviral sgRNA library to achieve an initial coverage of >700× for each infection replicate (n=3). Three days after transduction, the MKO-infected mutant pool of CD8⁺ T cells (MKO T cell library) was adoptively transferred into wildtype C57BL/6 (B6) recipient mice (n=7) (FIG. 1B), without lymphodepletion or any other immune modulation. After adoptive transfer, T cells in circulation traffick to lymphoid and non-lymphoid organs in which they either survive or undergo apoptosis. In order to systematically examine whether T cells trafficked to these organs and persisted within the in vivo tissue microenvironment, the relative abundance of surviving mutants was assessed seven days after adoptive transfer. The mice were sacrificed and various lymphoid and non-lymphoid organs isolated to investigate the surviving MKO T cells in each organ by sequencing the sgRNA representation. The liver, pancreas, lung, muscle and brain were collected and surveyed as representative non-lymphoid organs, and the spleen and several types of lymph nodes (LNs) as lymphoid organs (FIG. 1C). The LNs collected included three groups: LN1—skin draining lymph nodes (sLNs) comprised of inguinal, popliteal, axillary, and brachial lymph nodes; LN2—cervical lymph nodes (cLNs) that entailed the 6 superficial lymph nodes; and LN3—abdominal lymph nodes (aLNs) that included the mesenteric and the pancreatic lymph nodes (FIG. 1B).

### Example 3: In Vivo Analysis of Genome-Scale T Cell Mutants for Representation in Mouse Organs after CD8⁺ T_{eff} Cell Trafficking

[0216] Illumina sequencing was performed and the sgRNA library representation of the CD8⁺ T cells in all organs, as well as three representative pools of pre-injected MKO-transduced T cells, were successfully readout. As shown in FIGS. 1E-1F, different organs can display highly dynamic compositions of sgRNAs. While an organ can be dominated by one or a few T cell mutants (e.g. a CD8⁺ T cell clone with an sgRNA targeting Program cell death protein 1 (PD-1/Pdcd1) dominated the LN sample in mouse 3) (FIG. 1E), a given organ can also consist of multiple highly abundant, but non-dominating clones (FIGS. 1E-1F, FIGS. 9A-9I). Monoclonal (one major clone), oligoclonal (2 to 10 major clones each with ≥2% of total reads) and polyclonal (more than 10 clones with 2% or more reads) compositions of T cell variants exist in both lymphoid and non-lymphoid organs (FIGS. 1E-1G, FIGS. 9A-9I). The library representation in all three replicates of uninfected T cells closely clustered with each other and the MKO plasmid library, whereas the library representation of all organs clustered together (FIG. 1H, FIG. 8A). On average, a total of 86,277±536 (78.34%±0.49% of plasmid) sgRNAs were detected in the initial T cell population (mean±s.e.m. (standard error of the mean), n=3) (FIG. 8B), whereas only a small fraction of sgRNAs (435±62, or 0.39%±0.06% of plasmid)) were detected in internal organs, indicating a low diversity of T cell mutants in these organs (FIG. 8B). Across all organ types, the LN group had the most detected sgRNAs (578±106 (mean±s.e.m.), n=20) whereas liver had the least (142±25, n=7) (FIG. 1D, FIG. 8B). These data suggest that, after trafficking in vivo for 7 days, only a small fraction of the adoptively transferred CD8⁺ T cell variants survived in the destination organs.

[0217] While the library representation of infected, pre-injected T cells followed a log-normal distribution for both gene-targeting sgRNAs (GTS) and NTCs, the sgRNA representation in organs was characterized by the dominance of a small fraction of sgRNAs (FIGS. 1E-1G, FIGS. 9A-9I, FIG. 16A), a signature of clonal expansion of a subset of targeted T cells. While an organ can be dominated by one or a few T cell mutants (e.g. a CD8⁺ T cell clone with an sgRNA targeting Program cell death protein 1 (PD-1/Pdcd1) dominated LN3 sample in mouse 3) (FIG. 1E), it can also consist of multiple highly abundant, but not dominating clones (FIG. 1E, FIGS. 9A-9I). Monoclonal (one major clone with >=90% of total reads), oligoclonal (3 to 10 major clones each with >=2% of total reads) and polyclonal (more than 10 clones with 2% or more reads) compositions of T cell variants existed in both lymphoid and non-lymphoid organs (FIG. 1E, FIGS. 9A-9I). At the individual mouse level, the sgRNA representation between different mice were correlated with each other (FIG. 16B). All these enriched sgRNAs across all 62 organ samples showed a highly heterogeneous landscape of enrichment pattern, with many sgRNAs shared between multiple organs (FIG. 8D). These data revealed a global landscape of organ survival for mutant CD8⁺ T cells with a diverse TCR repertoire, and showed that a small subset of the variants from the MKO CD8⁺ T cell pool became enriched in vivo after trafficking and survival in a new host for 7 days.

[0218] The library representation within each sample was analyzed to find enriched sgRNAs compared to the 1,000 NTC sgRNAs. To identify genes whose perturbation might result in enhanced ability of CD8⁺ T_{eff} cells to survive in differential organs in vivo, the sgRNAs and genes represented in the MKO library were ranked using multiple statistical metrics. At a false discovery rate (FDR) of 0.5% or lower, a set of significantly enriched sgRNAs were identified in each organ (FIG. 2A, FIG. 8C). In all 62 organs across 7 mice surveyed, an average of 112±9 (mean±s.e.m.) sgRNAs were found as significantly enriched (FIG. 8D). Although the numbers of significant sgRNAs were largely similar between organs, LNs on average (96±9) had the highest number compared to all other organs (two-sided unpaired t-test, p=0.03) (FIG. 2A, FIG. 8D). All these enriched sgRNAs across all 62 organ samples showed a highly heterogeneous landscape of enrichment pattern (FIG. 2B, FIG. 8D). These data revealed a highly dynamic map of mutant CD8⁺ T cell clonal selection within internal organs after adoptive transfer.

### Example 4: Significantly Enriched sgRNAs Targeted Immune Genes and Genes with Diverse Functions

[0219] To identify genes whose perturbation might result in enhanced ability of CD8⁺ T_{eff} cell to survive in differential organs in vivo, the sgRNAs and genes represented in the MKO library were ranked using multiple statistical metrics. By comparing the set of enriched sgRNAs between organs, it was discovered that lymphoid organs significantly overlapped with non-lymphoid organs (hypergeometric test, p≈0) (FIG. 17A), although there are substantial sets of sgRNAs unique to each organ type (FIG. 17A), reflected by the set of significantly differentially enriched sgRNAs in lymphoid compared to non-lymphoid organs. Among lymphoid organs, LNs and spleen also significantly overlapped (p≈0) (FIG. 17A). Within non-lymphoid organs, the set of all significant sgRNAs in each of the five organs (brain, liver, lung, muscle and pancreas) significantly overlapped with each other (p<1×10⁻⁵ for all pairwise comparisons) (FIG. 17B). Ranking sgRNAs by their prevalence (frequency of being enriched in an organ) (FIG. 1I), or by their overall average abundance in organs as compared to cells (FIG. 8E), revealed dominant signatures of three types of genes: (1) immune genes (such as Lexm/BC055111, Socs5, Zap70), consistent with their role in T cells; (2) genes regulating general cell growth and proliferation (e.g. tumor suppressor genes such as Tsc2, Nf1, Aim1, Pten, and Trp53); as well as (3) genes with undocumented functions in CD8⁺ T cells or largely uncharacterized genes (such as Sgk3, Fam103a, Phf21a, and 1110057K04Rik) (FIG. 2C, FIG. 8E, FIG. 1I). Ranking sgRNAs by the number of independent enriched sgRNAs also revealed these three types of genes, with the top three genes representing three different categories (Cd247—immune, Tsc2—growth, and Bpifb3—unknown) (FIG. 1J). In conjunction with a third criteria, in which a given sgRNA must comprise ≥2% of the reads in a single sample, a total of 11 genes are significantly enriched across all three criteria, again representing immune (Pdcd1, Cd247), growth (Apc, Nf1, Tsc2) and unknown (Csnk1a1, Fam103a1, Fam134b, Phf21a, Prkar1a, and Rab11b) genes (FIG. 1K). Pdcd1, also known as PD-1, is a well-established immune checkpoint regulator expressed on T cells, and a major target of checkpoint blockade. The fact that Pdcd1 passed all three criteria and emerged as a robust hit provided strong evidence for the validity of this approach. Many of the significantly enriched genes are membrane proteins involved in the immune system. Minipool validation experiments were performed, and as a result, 10/14 sgRNAs (71.4%), covering all 7/7 genes (100%), were validated in the in vivo minipool survival experiment. Specific gene-targeting sgRNAs were more abundant as compared to NTC in organs, including those targeting 3830406C13Rik, Cd247, Havcr2, PD-1, Shisa6, Siah3 and Tsc2 (FIG. 17C). Together, these data suggest that perturbation of these genes by CRISPR allows CD8⁺ T_{eff} cells to better survive in lymphoid and non-lymphoid organs in vivo.

### Example 5: Genome-Scale Screen for Trafficking and Survival with Effector CD8⁺ T Cells with Transgenic, Clonal TCR

[0220] Due to the diversity of the TCR repertoire in Cas9 mice, certain genetic effects may be masked by the heterogeneity of the TCR pool. To address this issue and thereby provide a parallel picture in an isogenic setting, the genome-scale CRISPR screen was repeated with a homogenous pool of CD8⁺ T_{eff} cells that expressed the transgenic OT-I TCR, which specifically recognizes the SIINFEKL peptide of chicken ovalbumin (cOVA) presented on H-2K^{b}, a haplotype of MHC-I. Through genetic crosses, a mouse strain (OT-I; Cas9 mice) was generated that expresses both Cas9 and the OT-I transgenic TCRs (FIG. 18A). With these mice, the aim was to identify genes whose perturbation might result in enhanced ability of T_{eff} cells to survive in different organs in vivo following trafficking starting from clonal TCRs. Similarly, naive OT-I; Cas9 CD8⁺ T cells were isolated, the MKO lentiviral library introduced with 3 infection replicates, and adoptively transferred into wildtype B6 (n=5) or Cas9 (n=5) recipient mice (n=10 total) (FIG. 18A). Seven days post adoptive transfer, the mice were euthanized and relevant lymphoid and non-lymphoid organs collected. Illumina sequencing was performed to readout the sgRNA library representation. The sgRNA library representation revealed a global landscape of organ survival for mutant T_{eff} cells with clonal TCR in vivo (FIGS. 19A-19B).

[0221] To identify genes modulating trafficking and survival of OT-I; Cas9 CD8⁺ T_{eff} cells, sgRNAs and genes represented in the MKO library were ranked using multiple statistical metrics. Ranking sgRNAs by their prevalence (frequency of being enriched in an organ) (FIG. 2b) again revealed dominant signatures of three types of genes: (1) immune genes (e.g. BC055111, Hacvr2, Lyn and Pdcd1); (2) growth regulators (e.g. Nf1), although fewer compared to the previous screen; as well as (3) genes with undocumented functions in CD8⁺ T cells or largely uncharacterized genes (e.g. Slc35c1, Siah3, Gjb3, Tmem135 and Shisa6) (FIG. 18B). Havcr2, also known as Tim-3, is a well-established immune checkpoint regulator expressed on T cells, and currently an active target for immunomodulation. Ranking sgRNAs by the number of independent enriched sgRNAs revealed 4 genes with multiple enriched sgRNAs (mir-463, Pdcd1, Slc35c1, and Stradb) (FIG. 18C). In conjunction with the sgRNA abundance criteria (≥2% of total reads in a sample) a total of 3 genes are significantly enriched across all three criteria (Pdcd1, Slc35c1, and Stradb) (FIG. 18D). These data together suggest that the CRISPR targeting of these genes allows TCR-clonal OT-I; CD8⁺ T_{eff} cells to better survive in lymphoid and non-lymphoid organs in vivo.

[0222] An integrated analysis was performed using both screens with diverse TCR and clonal TCR settings as a whole. To find which candidate genes can modulate T cell function in both diverse (Cas9 CD8⁺ T cells) and clonal TCR (OT-I; Cas9 CD8⁺ T cells), the gene sets from these two screens were directly compared. A total of 17 genes were identified in both screen as common hits (FIG. 18E), which again included immune genes (BC055111, Cd247, Hacvr2, and Pdcd1), tumor suppressors (Nf1 and Tsc2), and unknown or uncharacterized genes in T cells (e.g. Gm6927, Slc35c1, Slc2a7, Lrp6, and 4.82). Several of these shared hits encode highly conserved surface proteins, which are either well-established immune regulators/immunotherapy targets (Cd247, Hacvr2, Pdcd1), or are potentially directly targetable with monoclonal antibodies (Slc35c1, Slc2a7, Lrp6). These proteins have highly conserved functional domains across multiple mammalian species (FIGS. 20A-20C). Between the two recipient hosts, C57BL/6 or Cas9 syngeneic, the overall sgRNA representations significantly correlated with each other (FIG. 16C), and screens in both share a large set of hits (p<1e5) (FIG. 16D). Thus, in this case, host choice did not affect the result of the in vivo survival screen. Using dimension reduction methods such as t-SNE, clustering patterns of samples were observed purely based on the sgRNA representations in the tissue-infiltrated T cell population (FIG. 18G). There was a large cluster (k0) containing virtually all organ types (including brain, liver, LN, lung, muscle, pancreas and spleen), while there were 8 smaller clusters (k1-k8) that each consisted of 4 to 6 organ types, with several organs as outliers (FIG. 18G). The emergence of multiple immune genes as mutual top hits, in both diverse TCR and clonal TCR settings, further validated the rigor of this approach, gaining higher confidence for the phenotypes of the unknown genes or those previously not associated with T cell function.

### Example 6: In Vivo Genome-Scale Analysis of TCR-Engineered Effector T_{eff} Cells in Mice with Tumors Expressing a Model Antigen

[0223] In order to analyze in vivo CD8⁺ T_{eff} cell trafficking and survival in the context of antigen-recognition, an engineered TCR that specifically recognized a well-characterized model antigen, chicken ovalbumin (cOVA), was utilized. Through genetic crosses, a mouse strain (OT-I; Cas9 mice) was generated that expresses both Cas9 and the OT-I transgenic TCRs specific for an 8 amino acid peptide epitope (SIINFEKL) (SEQ ID NO: 129,210) of cOVA (FIGS. 3A and 10A-10F). Breast cancer cell line E0771 was pulsed with various concentrations of SIINFEKL peptides, and a dose-dependent antigen presentation on cell surface by MHC-I was observed using immunostaining for the peptide-protein complex (FIG. 3B). Clonal cell lines that present cOVA were generated, and it was confirmed that the antigenic SIINFEKL peptide was presented on surface H-2K^{b}, the haplotype of MHC-I recognized by OT-I TCR (FIG. 3C). Clone 3 of E0771-mCherry-cOVA (E0771-mCh-cOVA for short) cell lines presented SIINFEKL on H-2K^{b} at a level similar to pulsing cells with 1×10⁻⁵ g/ml peptide, and was chosen for in vivo study. This clonal cell line was transplanted into Rag1^{-/-} mice with 5×10⁶ cells per mouse, which subsequently grew as tumors within 10 days (FIGS. 3A, 3D, 10A, and 10F).

[0224] A T cell infiltration screen was performed in a mouse model of cancer. E0771 is a commonly used triple-negative breast cancer cell line that originated from C57BL/6 mice. Of note, although parental E0771 cells grew robustly as transplant tumors in a syngeneic C57BL/6 host (100% transplanted cells grew tumors on mice), all E0771-mCherry-cOVA clones tested were rejected by the same host (0% grew tumors), potentially caused by CD4⁺/CD8⁺ T cell mediated immune rejection of the antigenic cOVA. Thus, 5×10⁶ clone 3 cells were transplanted into immunodeficient Rag1^{-/-} mice, and rapid tumor formation was observed in 10 days (FIG. 3D, FIGS. 21A-21B). Naïve CD8⁺ T cells were isolated from OT-I; Cas9 mice, mutagenized with the MKO sgRNA library, adoptively transferred 1×10⁷ into Rag1^{-/-} mice with tumors expressing cOVA antigen, and analyzed for trafficking to different organs and survival in vivo by flow cytometry and sgRNA library sequencing (FIG. 3A, FIG. 10A). Tumor size was measured throughout the experiment and it was discovered that T cell injections (either vector or MKO transduced) mitigated tumor growth, in sharp contrast with PBS (Endpoint tumor size vector vs PBS, unpaired two-sided t-test, p=0.02; MKO vs PBS, p<0.0001) (FIG. 3D). The MKO transduced population had a stronger therapeutic effect compared to vector controls (Endpoint tumor size MKO vs vector, unpaired two-sided t-test, p=0.03) (FIG. 3D). This anti-tumor effect also holds in a subcutaneous transplant model, although to a lesser extent (FIG. 21A). Seven days after adoptive transfer (17 days after cancer cell transplantation), the mice were sacrificed and the tumors, draining lymph nodes (dLNs) near the tumors, non-draining lymph nodes (ndLNs) and the spleens were isolated for analyses of T_{eff} cell trafficking and survival in vivo. The tumors were also analyzed for tumor-infiltrating lymphocytes (TILs). Histological and pathological analysis revealed the existence of lymphocytes in the tumors from mice injected with vector and MKO CD8⁺ T_{eff} cells, but not in tumors of PBS treated mice (FIG. 21B). Flow cytometric analysis (n=3 mice) of single-cell suspensions of organs and tumors detected a large number of CD8⁺ T_{eff} cells in Rag1^{-/-} mice receiving T cell injections but not those receiving PBS (FIGS. 3B-3C, FIGS. 10B-10E), indicating that the CD8⁺ T_{eff} cells present in these samples were adoptively transferred. Representative lymphoid organs (dLNs, ndLNs and spleens), nonlymphoid organs (lungs) and tumors from a parallel cohort of mice were subjected to high-throughput sgRNA library sequencing (FIG. 4A), which revealed the sgRNA representations of MKO mutagenized OT-I; Cas9 CD8⁺ T_{eff} cells before injection as well as in all the in vivo samples (FIG. 4B, FIG. 4G, FIG. 11A, FIG. 21D).

[0225] Similar to the first screen, the sgRNA library representation was characterized by a high level of diversity in the pre-injected CD8⁺ T cell population (FIGS. 4B & 11B). Among the organ samples, the dLN group had the highest number of detected sgRNAs (FIG. 4C). On the contrary, the ndLN group had lowest number of detected sgRNAs, while tumors had the second lowest number of detected sgRNAs (FIG. 4C). Monoclonal, oligoclonal and polyclonal compositions of mutant CD8⁺ T_{eff} cells were observed in lymphoid, non-lymphoid organs and tumors (FIGS. 4D & 12A-12E). Using the same criteria (FDR <0.2%), significantly enriched sgRNAs were identified in each organ or tumor (FIG. 11C). These sgRNAs had a heterogeneous pattern of abundance across organs and tumors (FIG. 4E). Although the tumor group had a relatively low number of detected sgRNAs, it had the highest number of significantly enriched sgRNAs (FIG. 4F & 11C). In contrast, although the dLN group had a relatively high number of detected sgRNAs, it had the lowest number of significantly enriched sgRNAs (FIGS. 4F & 11C) (Tumor significant sgRNA (101±30, n=5) vs. dLN (24±10, n=5) (Mann-Whitney test, two-sided, p=0.048) (FIG. 4F). This might be explained by the fact that the tumors expressed cOVA antigen recognized by the OT-I; Cas9 CD8⁺ T_{eff} cells, which flowed into tumors from adjacent dLNs.

### Example 7: Significantly Enriched sgRNAs and Genes in Lymphoid, Nonlymphoid Organs and cOVA-Expressing Tumors

[0226] Ranking sgRNAs by their overall average abundance in organs (FIG. 5A) or tumors (FIG. 5B) again revealed dominant signatures of immune genes (such as Tim3/Havcr2, Lexm/BC055111, Lyn, Cd247 and PD-1/Pdcd1), tumor suppressor genes (such as Aim1 and Nf1), as well as genes with undocumented function in CD8⁺ T cells or generally uncharacterized genes (such as Shisa6, Siah3, Odc1, Dhx37, and 3830406C13Rik) (FIGS. 5A-5B). Ranking sgRNAs by their prevalence across multiple samples, or by the number of independent enriched sgRNAs, revealed similar signatures (FIGS. 5C & 11D). All significant genes are collectively enriched in functional categories with immune functions (FIG. 5D). These data together suggest the loss-of-function of these genes make CD8⁺ T_{eff} cells consistently better survivors in organs and tumors in vivo.

[0227] By comparing the set of enriched sgRNAs between different sample types, it was discovered that the significantly enriched sgRNAs in each of the three groups (lymphoid organ, non-lymphoid organ and tumor) significantly overlapped with one other (pairwise hypergeometric test, lymphoid vs. non-lymphoid p=2.11×10⁻¹⁵⁹, lymphoid vs. tumor p=3.02×10⁻⁸⁸, and non-lymphoid vs. tumor p=1.97×10⁻¹³⁷) (FIG. 5E). There were enriched sgRNAs unique to each sample type (FIG. 5E). Among lymphoid organs, the three groups (dLN, ndLN and spleen) also significantly overlapped (pairwise hypergeometric test, dLN vs. ndLN p=6.07×10⁻³¹⁷, dLN vs. spleen p=2.58×10⁻²⁰³, and ndLN vs. spleen p=2.01×10⁻²⁶³) (FIG. 5F). By comparing the hits from this screen (OT-I; Cas9 CD8⁺ T_{eff} cells in Rag1^{-/-} host bearing tumors with cOVA antigen) to the first screen (Cas9 CD8⁺ T_{eff} cells in WT host), a highly significant overlap of genes was seen (hypergeometric test, p=1×10⁻²³) (FIG. 5G). The shared genes included multiple immune genes (such as Tim3/Havcr2, Lexm/BC055111, Zap70, Cd247 and PD-1/Pdcd1), a few tumor suppressor genes (Aim1 and Nf1), as well as many genes with undocumented function in CD8⁺ T cells or genes with little information (such as Shisa6, Siah3, Ccdc105, Ccdc81 and 3830406C13Rik) (FIG. 5G). These data suggest that there exist a common set of genes that modulate the trafficking and survival of CD8⁺ T_{eff} cells in organs and tumors, with or without antigen.

[0228] Using the criteria of FDR <0.5%, significantly enriched sgRNAs were identified in each tumor (FIG. 4H). Ranking sgRNAs by their prevalence across tumors again revealed dominant signatures of immune genes (such as Tim3/Havcr2, BC055111, and Lyn), growth genes (e.g. Nf1), as well as genes with undocumented function in CD8⁺ T cells or generally uncharacterized genes (such as Shisa6, Siah3, Odc1, Dhx37, and 3830406C13Rik) (FIG. 4H). Ranking sgRNAs by the number of independent enriched sgRNAs revealed 26 genes with multiple enriched sgRNAs (FIG. 4I). Notably, two genes (Pdcd1 and Stradb) had 4 enriched sgRNAs, representing independent evidence for their phenotypes (FIG. 4I). After considering a third criteria of sgRNA abundance (≥2% of total reads in a single tumor) representing substantial TIL clones, a total of 6 genes are significantly enriched across all three criteria (Cd247, Fam103a1, Hacvr2, Pdcd1, Prkar1a, and Stradb) (FIG. 4J). To test the clonal effect of cOVA antigen expression level, we took the top hits from the screen and performed a minipool screen with two clones expressing different levels of cOVA (cl.3 and cl.5), and found that the sgRNA representation is highly consistent between the two (Pearson correlation=0.981) (FIG. 21E). To test if the results hold across cancer cell types, we performed a minipool screen with two cell lines, E0771-mCh-cOVA (breast cancer) and LCC-mCh-cOVA (lung cancer), and found that the sgRNA representation is highly correlated with each other (Pearson correlation=0.932) (FIG. 21F). These data together suggest that the CRISPR perturbation of these genes make CD8⁺ T_{eff} cells consistently better in terms of tumor infiltration and survival in the tumor microenvironment.

### Example 8: Further Testing of a Selected Set of Significantly Enriched Genes

[0229] To further test the T cell trafficking and survival signature for the genes enriched in the two genome-scale screens described herein, a selected set of genes highly enriched in either or both screens were focused on, and a small pool of sgRNAs targeting these genes were generated (minipools) (FIG. 6A). Lentivirus was generated from these minipools and OT-I; Cas9 CD8⁺ T_{eff} cells were mutagenized, and then intravenously injected into various strains of WT mice (FIG. 6A). Seven days after adoptive transfer, representative lymphoid (sLN, cLN and aLN) and non-lymphoid organs (liver, lung and pancreas) were isolated, and the sgRNA representation sequenced in each sample (FIG. 6A). The representation of relative sgRNA abundance was measured in all samples (FIG. 6B). All sgRNAs were found at approximately even abundance in the transduced, pre-injected cell population (FIG. 6B), whereas the internal organs showed a more dynamic picture of sgRNA abundance, with certain sgRNAs being absent, low abundance, medium abundance, or high abundance (FIGS. 6B-6C). Compared to control sgRNAs, 17/22 (77%) of the gene-targeting sgRNAs were significantly enriched in organs, targeting genes such as Lexm, Shisa6, Siah3, Tim3/Havcr2, PD-1/Pdcd1, Cd247, Tsc2 and Rccl (FIGS. 6B-6C & 13). A total of 17 sgRNAs were enriched in lymphoid organs and 14 were enriched in non-lymphoid organs, all of which were included in those in lymphoid organs (hypergeometric test, p=0.0021) (FIG. 6D). These data suggested that the hits from both screens have strong sgRNA enrichment across multiple organs, with little effect in culture.

### Example 9: High-Throughput Identification of Genes Modulating Effector CD8⁺ T Cell Degranulation Upon Encountering Tumor Antigen

[0230] Having observed an anti-tumor effect in vivo, the next aim was to identify genes that could modulate the ability of CD8⁺ T_{eff} cells to target and kill cancer cells bearing tumor-specific antigen. To do this, a degranulation screen was developed using a co-culture system in which OT-I; Cas9 CD8⁺ T_{eff} cells would degranulate in response to E0771 cancer cells presenting SIINFEKL peptide (FIG. 22A). E0771 cells were pulsed with varying concentrations of SIINFEKL peptide, and found to present SIINFEKL peptide on surface MHC-I in a dose-dependent manner (FIG. 22B). To perform a high-throughput CRISPR degranulation screen, naive OT-I; Cas9 CD8⁺ T cells were isolated and transduced with MKO library. The cells were incubated in cRPMI supplemented with IL-2, IL-12, anti-CD28 and anti-CD3 for stimulation for 6 days, rested for 12 hours prior to the experiment on untreated plates, and then the MKO transduced CD8⁺ T_{eff} cells were co-cultured with SIINFEKL-pulsed E0771 cells at 1:1 (T cell:cancer cell) ratio (Methods). T cells were incubated in media containing anti-CD107a antibody to label the transient deposition of surface CD107a, a marker of T cell granules that is temporarily presented on the cell surface when T cells encounter cognate antigen on MHC. A total of 1×10⁷ T cells were analyzed per replicate with three biological replicates, and the top 5% CD107a⁺ cells were sorted (FIG. 22C), then subjected to genomic DNA extraction, CRISPR library readout, and screen data analysis (FIG. 22A). Using the FDR <0.5% significance cutoff, significantly enriched sgRNAs were identified in sorted CD8⁺CD107a⁺ T cells after exposure to SIINFEKL-pulsed E0771 tumor cells in co-culture (FIG. 22D). Remarkably, three genes were significantly enriched in all three samples (Dhx37, Lyn, and Odc1), and they were also found to be significant in the tumor infiltration screen (FIG. 22E). These data together pinpointed Dhx37, Lyn, and Odc1 as promising targets for potentially augmenting anti-tumor activity in vivo by CD8⁺ T cells.

### Example 10: Enhanced Anti-Tumor Function and Single-Cell Transcriptomic Signatures of OT-I; Cas9 CD8⁺ T_{eff} Cells with Dhx37 Perturbation

[0231] The phenotype of Dhx37 in a model of immunotherapy was examined. Two sgRNAs targeting Dhx37 were cloned into the T cell CRISPR vector, virus preparation and T cell infection were performed as described herein. 5×10⁶ sg-Dhx37 or vector lentivirus transduced OT-I; Cas9 CD8⁺ T cells were adoptively transferred into mice bearing breast tumors, 10 days post mammary fat pad transplantation of 5×10⁶ clone 3 mCh⁺cOVA⁺E0771 cells. Again, a 1:1 (T cell:cancer cell) ratio was adopted at the time of their respective injections (of note, the cancer cells in a day-10 tumor might largely outnumber 5×10⁶ T cells). Despite initially growing for 3-days post adoptive transfer, the tumors regressed in the ensuing 2.5 weeks (FIG. 22F). Both vector and sgDhx37 infected OT-I; Cas9 CD8⁺ T_{eff} cells demonstrated strong anti-tumor effects beginning 7 days after adoptive transfer (Vector or sgDhx37 vs PBS, two-sided t-test, adjusted p<0.001 from d17 onwards (Benjamini, Krieger and Yekutieli method)) (FIG. 22F). As a result, sgDhx37 infected OT-I; Cas9 CD8⁺ T_{eff} cells (n=5 mice) significantly suppressed relapse when compared to mice treated with vector-infected OT-I; Cas9 CD8⁺ T_{eff} T cells (n=4 mice) (two-sided t-test, adjusted p<0.01 from d37 onwards) (FIG. 22F). These data suggest that targeting Dhx37 with CRISPR/Cas9 and sgRNAs enhanced the anti-tumor effects of OT-I; Cas9 CD8⁺ T_{eff} cells against E0771 tumors expressing cognate antigen cOVA.

[0232] To further test other screen hits for their potential to serve as potential immunotherapy targets, additional studies were performed to investigate possible anti-tumor effects. Two additional genes were tested, Pdcd1 and Odc1. Pdcd1 encodes PD-1, a well-established immunotherapy target, although with varying response rates across different patients and different cancer types. Odc1 encodes an ornithine decarboxylase as an rate-limiting enzyme of the polyamine biosynthesis pathway which catalyzes ornithine to putrescine. With the same assay, it was observed that 2/5 (40%) of mice with sgPdcd1 OT-I; Cas9 CD8⁺ T_{eff} cells adoptive transfer had tumors significantly smaller than those in the vector control group, although 3/5 do not (FIG. 22G), with variable response rate reminiscent of PD-1 blockade in patients. Similarly, we observed that 3/5 (60%) of mice with sgOdc1 OT-I; Cas9 CD8⁺ T_{eff} cells adoptive transfer have tumors significantly smaller than those in the vector control group (FIG. 22H). SgRNA perturbation against these two genes showed partial efficacy, although to a lesser extent as compared to Dhx37 (5/5, 100%).

[0233] Dhx37 is a DEAH box RNA helicase reported to regulate escape behavior via glycine receptor expression in zebrafish, but has not been previously associated with T cell function in mammalian species. The putative ATP-Dependent RNA Helicase domain and conservation implies that it might affect gene expression and cellular function. To investigate the effect of gene expression alteration upon Dhx37 perturbation, transcriptome analysis of sgDhx37 OT-I; Cas9 CD8⁺ T cells in the form of TILs was performed. Because TILs are in the heterogeneous tumor microenvironment, which might influence the state of TILs leading to highly variable gene expression, single cell RNA-seq (scRNAseq) was performed to investigate the transcriptomes of sgDhx37 TILs. Tumor-bearing mice were euthanized, single-cell suspensions generated from tumors by physical dissociation and enzymatic digestion, and then TILs collected by staining and sorting the live CD3⁺ CD8⁺ cells with FACS. Because TILs only consisted of a tiny fraction of cells in these tumors, the vast majority of single cell suspensions were sorted from whole tumors, and 3×10³ to 2×10⁴ live CD3⁺ CD8⁺ TILs per tumor were collected (FIG. 23A). These freshly collected TILs were subjected to an emulsion-based microfluidic device to barcode the CD8⁺ TILs from sgDhx37 and vector groups, and scRNAseq library preparation was performed. The library was sequenced with Illumina Hiseq platform for unique molecular identifiers (UMIs), cellular barcodes, and the transcriptome in each cell was quantified.

[0234] After processing, stringent filtering, and normalizing the raw scRNA-seq data, the final dataset was comprised of 552 cells (sgDhx37, n=191 cells; vector, n=361 cells), measuring a total of 8,244 expressed genes in TILs. t-SNE dimensional reduction was first performed to visualize the overall transcriptomic landscape of these cells (FIG. 23B). With this analysis 4 major clusters (k0 to k3) were uncovered as major subpopulations of these T cells based on their transcriptome (FIG. 23B). Differential expression analysis was subsequently performed between sgDhx37 and vector treated TILs, identifying sets of significantly upregulated and downregulated genes. 215 genes were significantly downregulated in sgDhx37 TILs, while 137 genes were significantly upregulated (Benjamini-Hochberg adjusted p<0.05) (FIGS. 23C-23D), with the mostly highly upregulated genes as Rgs16, Tox and Nr4a2 (FIG. 23D). Rgs16 was found as an IL-2-dependent activation gene in human T lymphocytes, and is enriched in activated/effector T cells. Nr4a2 is a nuclear receptor essential for thymic regulatory T cell (T_{reg}) development and homeostasis, and associated with T cell activation, although its specific function in CD8⁺ T cell or TILs is not well characterized. Tox encodes a HMG box protein involved in both CD8⁺ and CD4⁺ T cell development, to some degree without the requirement of MHC-TCR interactions. Other significantly upregulated genes included known immune-related genes such as Eomes, Nr4a3, Lag3, Ccl4, Ifnar1, and Ikzf2, as well as genes with less knowledge in CD8⁺ T cells or TILs (FIG. 23D). Collectively as a gene set, gene ontology analysis revealed multiple immune-related pathways that were significantly upregulated in sgDhx37 TILs (adjusted p<0.05), including lymphocyte activation, positive regulation of cytokine production, regulation of cell-cell adhesion, regulation of immune effector process, and positive regulation of interferon-gamma production (FIG. 23E). Somewhat intriguingly, sgDhx37 upregulated genes also include genes involved in negative regulation of leukocyte activation such as Ctla4 and Pdcd1, albeit to a lesser extent, which mirrors the positive correlation of T cell cytotoxic scores with these markers in TILs from human melanoma patients. Lag3, Ctla4 and Pdcd1 are T cell activation-induced markers, with their blockade improving antitumor activity, but their presence does not inhibit adoptive cell transfer therapy. Lag3 is expressed at a high level together with Rgs16, Nr4a2 and Tox, while Ctla4 and Pdcd1 are expressed at a lower level together with the other immune activating transcripts. On the other hand, downregulated genes in sgDhx37 TILs are enriched in ribosomal small subunit assembly and ribosomal large subunit biogenesis (FIG. 23F), consistent with the hypothesized role of human DHX37 protein in rRNA modification and processing in the nucleus and cytosol (UniProtKB—Q8IY37). The top upregulated gene (Rgs16) and downregulated gene (Uba52) are consistently upregulated or downregulated in each of the 4 clusters (FIG. 23G). Taken together, the scRNAseq data revealed significant changes in the transcriptomes of sgDhx37 TILs in the heterogeneous tumor microenvironment at the single-cell level.

### Example 11: Investigation of DHX37 in Human

[0235] Human DHX37 is expressed in most organs, with highest expression in lymphoid tissues such as the bone marrow, lymph nodes, spleen and appendix. To examine the relevant roles of DHX37 in human T cells, its endogenous expression at the protein level was assayed. A lentiviral overexpression vector was generated as a positive control. The presence of DHX37 protein was detected in human peripheral blood (PB) CD8⁺ and CD4⁺ T cells, as well as TILs from a lung cancer patient (FIG. 24A). This finding was further corroborated using intracellular staining and FACS analysis (FIG. 24B). To analyze DHX37 expression at a spatial level, available tissue microarrays (TMAs) were retrieved for several cancer types including glioma, breast cancer and melanoma. H&E staining as well as immunohistochemistry (IHC) staining was performed for DHX37. A significantly higher level of DHX37⁺ cells in glioma was observed as compared to normal brain tissues (unpaired t-test, two-sided, p<0.001) (FIG. 24C). Breast cancer and melanoma tumor samples also had high numbers of DHX37⁺ cells at a comparable level to glioma, while matched normal tissues were not available for breast cancer and melanoma for these TMAs (FIG. 24C). Various populations of TILs were observed in all three cancer types (FIG. 24D). DHX37 is primarily localized in the nucleus, with strong staining at nuclear membranes (FIG. 24D). Importantly, with available patient survival data from TCGA, that high-DHX37 level was found to be linked to poor survival across multiple cancer types including glioma, liver hepatocellular carcinoma, lung adenocarcinoma and kidney renal cell carcinoma (FIG. 24E). These data together point to DHX37′s expression in human T cells, patient TILs and prognostic relevance.

[0236] To further explore the signature of DHX37 in human T cells, a recent single-cell transcriptomics dataset of human TILs was analyzed. DHX37 expression was detected in a fraction of peripheral blood T cells, tissue-resident T cells and tumor-infiltrating T cells (FIG. 25A). DHX37 was expressed in CD3⁺/CD8⁺ (cytotoxic T cell), CD3⁺/CD4⁺/CD25⁻ (T helper cell), and CD3⁺/CD4⁺/CD25⁺ (Treg) populations (FIG. 25A). In the subpopulation of cells that express relatively higher level of DHX37 (DHX37⁺ T cells), a variety of genes were differentially expressed compared to those expressing lower or undetectable levels (DHX37⁻ T cells). Interestingly, DHX37⁺ cytotoxic T cells downregulate multiple immune genes with documented roles in cytotoxicity, T cell activation, cytokine-mediated cell signaling, regulatory function and anti-cancer immunity, including IL12A, ITM2A, RGS16, and STAT1 (Fig. S9b), again consistent with our mouse TIL scRNA-seq. Genes that were more highly expressed in DHX37⁺ cells included PPA1, CISH, TRAP1, and SLC7A6 (FIG. 25C). In CD3⁺/CD4⁺/CD25⁻ helper T cells, the expression of genes such as IKBKE and CPT2 was significantly lower in DHX37⁺ cells, while SLC35E2B and NDFIP1 are significantly lower (FIG. 25D-25E). Collectively, the analysis of human T cell scRNAseq data revealed signatures of gene expression changes in DHX37⁺ vs. DHX37⁻ T cells. Many of these differentially expressed genes have known roles in T cells, suggesting that natural cell population-wide variation in DHX37 expression may influence the function of human T cells.

### Example 12: Investigation of Acute Dhx37 Loss in CD8⁺ T_{eff} Cells with AAV-CRISPR Mediated T Cell Gene Editing

[0237] The function of Dhx37 was further investigated directly in cultured CD8⁺ T cells. Because mouse primary CD8⁺ T cells are challenging for long-term culture as the majority of cells undergo apoptosis after day 7 in culture, adeno-associated virus (AAV) was adopted as a vehicle for gene editing in primary CD8⁺ T cells. A new AAV CRISPR vector capable of targeting primary T cells was generated (FIG. 26A). OT-I; Cas9 CD8⁺ T_{eff} cells were isolated and infected with AAV-sgRNA-Thy1.1 vectors, then molecular and functional analyses were performed upon acute Dhx37 loss, in addition to gene regulation and anti-tumor activities (FIG. 26B). It was demonstrated that AAV-sgDhx37 as well as AAV-sgMll3 and AAV-sgB2m potently mutagenized the targeted loci 5 days after in vitro culture (FIG. 26D). This observation is corroborated with reduction of intracellular Dhx37 protein level (FIG. 26C). The partial knockdown is likely due to Dhx37 protein stability at this time point, as well as that not all indels lead to effective loss-of-protein. As compared to vector control, AAV-sgDhx37 treated OT-I; Cas9 CD8⁺ T_{eff} cells had significantly increased levels of surface CD107a when co-cultured with cognate SIINFEKL-pulsed E0771 cancer cells (t test, two sided, p=0.001, FIG. 26E), which further validated the kill assay screen. AAV-sgDhx37 treated OT-I; Cas9 CD8⁺ T_{eff} cells also showed decreased levels of CD62L (FIG. 26E). Adoptive transfer of AAV-sgDhx37 treated OT-I; Cas9 CD8⁺ T_{eff} cells significantly enhanced the anti-tumor activity in vivo as compared to AAV-vector (FIG. 26F). These experiments established AAV-CRISPR as an independent system for potent and acute T cell gene editing, further elucidated the cellular phenotypes of acute loss of Dhx37, and validated the anti-tumor effect of Dhx37 blockade in T cells.

[0238] AAV-sgDhx37 generated a mixture of mutants at Dhx37 locus and mouse primary T cells do not grow as single cell clones. Thus, to better understand the transcriptional changes upon acute Dhx37 loss in a heterogeneous T cell population at a more refined resolution, single cell transcriptome profiling was again performed, with a much larger set of cells (establishing knockouts in in vitro culture eliminates the barrier of low availability of CD8⁺ T cells as TILs). A total of 1,883 AAV-sgDhx37 treated OT-I; Cas9 CD8⁺ T_{eff} cells were profiled 6 days post infection, in parallel with 1,735 AAV-sgNTC treated ones (FIG. 27A). Dimension reduction analysis showed 6 major clusters for these cells (FIG. 27B). Each cluster was represented by a distinct gene signature (FIG. 27D), revealing a substantial level of transcriptomic heterogeneity even with T cells of clonal TCR (in both AAV-sgNTC and AAV-sgDhx37). Intriguingly, AAV-sgDhx37 CD8⁺ T cells are enriched in cluster 2 but depleted in clusters 4 and 6 (hypergeometric test, p<0.001) (FIG. 27C). Differential expression analysis was performed in all 6 clusters with sufficient cell numbers to provide statistical power in each one, and a panel of genes deregulated upon acute Dhx37 loss was unveiled (FIG. 27E). There are a small number of genes consistently deregulated across all clusters, with a larger number of cluster-specific differentially regulated genes (FIG. 27E). For example, Ccl5 is significantly upregulated upon acute Dhx37 loss in all 6 clusters, and Rpl35 is significantly downregulated in 5/6 clusters (FIG. 27F). Multiple genes were found to be differentially regulated only in specific clusters (e.g. Rgs2, Lag3, Ifng, Ramp3, Rps29, Nkg7, Smox, Lta, Serpinb6b, Rpl41, Tmsb10, Hmgn2, Npm3 and Ly6c2) (FIG. 27E, FIG. 28A), reflecting sub-population specific dynamic gene regulation across a heterogeneous cell population. The upregulated genes upon acute Dhx37 loss are also highly enriched in the gene set categories involving immune function (FIG. 28B), while the downregulated gene sets are ribosomal components. Although under different experimental settings, the differentially regulated genes upon Dhx37 loss by three different kinds of mechanisms, lenti-CRISPR mediated perturbation in mouse TILs, AAV-CRISPR mediated acute loss in culture, and naturally low-expression population in human T cells, converged on a total of 24 genes (FIG. 28C).

### Example 13: Demonstration of Gene Editing in Human T Cells

[0239] Gene editing was performed in human T cells using the compositions and methods of the present invention (FIG. 29). Results from a Surveyor assay of human DHX37 gene (3 independent sgRNAs) and PDCD1 gene (2 independent sgRNAs) are shown in FIG. 29. The arrows pointed to cleavage product bands as a result of on-target gene editing in human T cells.

### Example 14

[0240] Herein, genome editing was coupled to high-throughput screening approaches and directly applied to systematically study the trafficking and survival of CD8⁺ T cells in vivo, both in physiological and pathological (cancer) settings. Although the data presented herein focused on CD8⁺ T cells, this approach can readily be applied to study CD4⁺ T helper cells and regulatory T cells (T_{reg}). The present cancer immunotherapy model was developed based on orthotopic transplantation of breast cancer cells followed by adoptive transfer of CRISPR-targeted CD8⁺ T_{eff} cells, while a variety of cancer models such as genetically engineered mouse models and genome-editing based cancer models are all possible alternatives. Direct high-throughput genetic manipulation of T cells in vivo without adoptive transfer should render direct mutagenesis of the T cell population feasible.

[0241] CD8⁺ T cells play fundamental roles in the adaptive immune response mounted against intracellular pathogens and tumors, with a central role in the cancer-immune response. Herein, high-throughput in vivo CRISPR screens were performed in CD8⁺ T_{eff} cells in wildtype animals and in a setting of immunotherapy, which generated genome-scale maps of genetic factors modulating the trafficking and survival of in CD8⁺ cytotoxic T cells in the presence and absence of known antigens, and identified enriched genes belonging to various functional categories including multiple that were not documented in literature. This study demonstrates a new approach for high-throughput genetic interrogation of T cells in vivo, which can be broadly applied for diverse studies in immunology and immunotherapy.

### Other Embodiments

[0242] The recitation of a listing of elements in any definition of a variable herein includes definitions of that variable as any single element or combination (or subcombination) of listed elements. The recitation of an embodiment herein includes that embodiment as any single embodiment or in combination with any other embodiments or portions thereof.

[0243] The disclosures of each and every patent, patent application, and publication cited herein are hereby incorporated herein by reference in their entirety. While this invention has been disclosed with reference to specific embodiments, it is apparent that other embodiments and variations of this invention may be devised by others skilled in the art without departing from the true spirit and scope of the invention. The appended claims are intended to be construed to include all such embodiments and equivalent variations.

The application's sequence listing, which the Patent Office published only in electronic form, follows.

SEQUENCE LISTING (140896 sequences)

SEQ ID NO: 1 - DNA, 20 bp, Artificial Sequence
  MKO10000001_A_0610007P14Rik
  gRNA
tcctgaatgtgttacgaagc

SEQ ID NO: 2 - DNA, 20 bp, Artificial Sequence
  MKO10000002_A_0610007P14Rik
  gRNA
ggtcgggctccggtacctag

SEQ ID NO: 3 - DNA, 20 bp, Artificial Sequence
  MKO10000003_A_0610007P14Rik
  gRNA
gccagcttcgtaacacattc

SEQ ID NO: 4 - DNA, 20 bp, Artificial Sequence
  MKO10000004_A_0610009B22Rik
  gRNA
tcatcatgctgcatgacgtg

SEQ ID NO: 5 - DNA, 20 bp, Artificial Sequence
  MKO10000005_A_0610009B22Rik
  gRNA
attcaatgagtggttcgtct

SEQ ID NO: 6 - DNA, 20 bp, Artificial Sequence
  MKO10000006_A_0610009B22Rik
  gRNA
tcgtcacggctgggcacatg

SEQ ID NO: 7 - DNA, 20 bp, Artificial Sequence
  MKO10000007_A_0610009D07Rik
  gRNA
tacactctgatttgacgaat

SEQ ID NO: 8 - DNA, 20 bp, Artificial Sequence
  MKO10000008_A_0610009D07Rik
  gRNA
tacaaaatccgatttacttc

SEQ ID NO: 9 - DNA, 20 bp, Artificial Sequence
  MKO10000009_A_0610009D07Rik
  gRNA
aacagcctatgtggtctatg

SEQ ID NO: 10 - DNA, 20 bp, Artificial Sequence
  MKO10000010_A_0610009O20Rik
  gRNA
atggcgtcccgcagtgtgtt

SEQ ID NO: 11 - DNA, 20 bp, Artificial Sequence
  MKO10000011_A_0610009O20Rik
  gRNA
ctgtgccaagagcgttcagc

SEQ ID NO: 12 - DNA, 20 bp, Artificial Sequence
  MKO10000012_A_0610009O20Rik
  gRNA
tgggtttgggcgttatccca

SEQ ID NO: 13 - DNA, 20 bp, Artificial Sequence
  MKO10000013_A_0610010B08Rik
  gRNA
tatagctgtgagattcttat

SEQ ID NO: 14 - DNA, 20 bp, Artificial Sequence
  MKO10000014_A_0610010B08Rik
  gRNA
cgtgcatgtgaacttcactc

SEQ ID NO: 15 - DNA, 20 bp, Artificial Sequence
  MKO10000015_A_0610010B08Rik
  gRNA
gacttctagaagtttgaaaa

SEQ ID NO: 16 - DNA, 20 bp, Artificial Sequence
  MKO10000016_A_0610010F05Rik
  gRNA
aactgtactgctcgtaatgc

SEQ ID NO: 17 - DNA, 20 bp, Artificial Sequence
  MKO10000017_A_0610010F05Rik
  gRNA
gattgtgagattcccgcttt

SEQ ID NO: 18 - DNA, 20 bp, Artificial Sequence
  MKO10000018_A_0610010F05Rik
  gRNA
gaaactgtatcttgatcaac

SEQ ID NO: 19 - DNA, 20 bp, Artificial Sequence
  MKO10000019_A_0610010K14Rik
  gRNA
ggcgccgccttcacgaagct

SEQ ID NO: 20 - DNA, 20 bp, Artificial Sequence
  MKO10000020_A_0610010K14Rik
  gRNA
caactccccgagcttcgtga

SEQ ID NO: 21 - DNA, 20 bp, Artificial Sequence
  MKO10000021_A_0610010K14Rik
  gRNA
cttggtggacgctgacgtca

SEQ ID NO: 22 - DNA, 20 bp, Artificial Sequence
  MKO10000022_A_0610011F06Rik
  gRNA
gatcttcccattgacggcat

SEQ ID NO: 23 - DNA, 20 bp, Artificial Sequence
  MKO10000023_A_0610011F06Rik
  gRNA
gtacagcggagccttcacat

SEQ ID NO: 24 - DNA, 20 bp, Artificial Sequence
  MKO10000024_A_0610011F06Rik
  gRNA
cggcatcccaccccgatcgc

SEQ ID NO: 25 - DNA, 20 bp, Artificial Sequence
  MKO10000025_A_0610012H03Rik
  gRNA
agcgagccgaagatccccac

SEQ ID NO: 26 - DNA, 20 bp, Artificial Sequence
  MKO10000026_A_0610012H03Rik
  gRNA
agtacacagcgttgttcacg

SEQ ID NO: 27 - DNA, 20 bp, Artificial Sequence
  MKO10000027_A_0610012H03Rik
  gRNA
ctccagtgtgtgttaccgac

SEQ ID NO: 28 - DNA, 20 bp, Artificial Sequence
  MKO10000028_A_0610030E20Rik
  gRNA
tccgtcggaaccagctcgat

SEQ ID NO: 29 - DNA, 20 bp, Artificial Sequence
  MKO10000029_A_0610030E20Rik
  gRNA
cggggcggtaccgatcgagc

SEQ ID NO: 30 - DNA, 20 bp, Artificial Sequence
  MKO10000030_A_0610030E20Rik
  gRNA
cctcctggattcgcgatctg

SEQ ID NO: 31 - DNA, 20 bp, Artificial Sequence
  MKO10000031_A_0610031J06Rik
  gRNA
tgacagcaccaatgcgtccg

SEQ ID NO: 32 - DNA, 20 bp, Artificial Sequence
  MKO10000032_A_0610031J06Rik
  gRNA
ctgtgccccctcggacgcat

SEQ ID NO: 33 - DNA, 20 bp, Artificial Sequence
  MKO10000033_A_0610031J06Rik
  gRNA
ggagttccgttcgttcactg

SEQ ID NO: 34 - DNA, 20 bp, Artificial Sequence
  MKO10000034_A_0610037L13Rik
  gRNA
caggacagcgtggcgctgaa

SEQ ID NO: 35 - DNA, 20 bp, Artificial Sequence
  MKO10000035_A_0610037L13Rik
  gRNA
tgagaagttcaagacgatag

SEQ ID NO: 36 - DNA, 20 bp, Artificial Sequence
  MKO10000036_A_0610037L13Rik
  gRNA
gtgcacatagcttgcacttc

SEQ ID NO: 37 - DNA, 20 bp, Artificial Sequence
  MKO10000037_A_0610040J01Rik
  gRNA
ccagttcaagtgccctcgcc

SEQ ID NO: 38 - DNA, 20 bp, Artificial Sequence
  MKO10000038_A_0610040J01Rik
  gRNA
cccatcgtgcagggcattcc

SEQ ID NO: 39 - DNA, 20 bp, Artificial Sequence
  MKO10000039_A_0610040J01Rik
  gRNA
agataatccagatggggtgc

SEQ ID NO: 40 - DNA, 20 bp, Artificial Sequence
  MKO10000040_A_mmuMarch1
  gRNA
gatcgacttgcagatcgccc

SEQ ID NO: 41 - DNA, 20 bp, Artificial Sequence
  MKO10000041_A_mmuMarch1
  gRNA
atcacaccctgtcgctgcac

SEQ ID NO: 42 - DNA, 20 bp, Artificial Sequence
  MKO10000042_A_mmuMarch1
  gRNA
caggcaagcagcccaacgac

SEQ ID NO: 43 - DNA, 20 bp, Artificial Sequence
  MKO10000043_A_mmuSep1
  gRNA
gttcctcaccaacctctacg

SEQ ID NO: 44 - DNA, 20 bp, Artificial Sequence
  MKO10000044_A_mmuSep1
  gRNA
ctgccgatcctcgtagaggt

SEQ ID NO: 45 - DNA, 20 bp, Artificial Sequence
  MKO10000045_A_mmuSep1
  gRNA
tcctcaatgaagcgaaccac

SEQ ID NO: 46 - DNA, 20 bp, Artificial Sequence
  MKO10000046_A_mmuMarch10
  gRNA
aagcgggtcgtcatgcaaac

SEQ ID NO: 47 - DNA, 20 bp, Artificial Sequence
  MKO10000047_A_mmuMarch10
  gRNA
acacttagccgaagatgttt

SEQ ID NO: 48 - DNA, 20 bp, Artificial Sequence
  MKO10000048_A_mmuMarch10
  gRNA
taggggtgacttaccatatg

SEQ ID NO: 49 - DNA, 20 bp, Artificial Sequence
  MKO10000049_A_mmuSep10
  gRNA
ctctacttcattgctccgac

SEQ ID NO: 50 - DNA, 20 bp, Artificial Sequence
  MKO10000050_A_mmuSep10
  gRNA
ctgtcggagcaatgaagtag

SEQ ID NO: 51 - DNA, 20 bp, Artificial Sequence
  MKO10000051_A_mmuSep10
  gRNA
cattataccacttattgcca

SEQ ID NO: 52 - DNA, 20 bp, Artificial Sequence
  MKO10000052_A_mmuMarch11
  gRNA
gaccctacgatgcgctccag

SEQ ID NO: 53 - DNA, 20 bp, Artificial Sequence
  MKO10000053_A_mmuMarch11
  gRNA
gggcgagccgccggtagaac

SEQ ID NO: 54 - DNA, 20 bp, Artificial Sequence
  MKO10000054_A_mmuMarch11
  gRNA
tcacactcgctattaagaac

SEQ ID NO: 55 - DNA, 20 bp, Artificial Sequence
  MKO10000055_A_mmuSep11
  gRNA
gtgtcggctttcgcgatgat

SEQ ID NO: 56 - DNA, 20 bp, Artificial Sequence
  MKO10000056_A_mmuSep11
  gRNA
ccagctactcacaacgagcc

SEQ ID NO: 57 - DNA, 20 bp, Artificial Sequence
  MKO10000057_A_mmuSep11
  gRNA
tcagccgtacgttgctttcc

SEQ ID NO: 58 - DNA, 20 bp, Artificial Sequence
  MKO10000058_A_1100001G20Rik
  gRNA
gacgtacctaaaagctgcag

SEQ ID NO: 59 - DNA, 20 bp, Artificial Sequence
  MKO10000059_A_1100001G20Rik
  gRNA
acctgtgctgagctctgccg

SEQ ID NO: 60 - DNA, 20 bp, Artificial Sequence
  MKO10000060_A_1100001G20Rik
  gRNA
atactgacacattgttcctc

SEQ ID NO: 61 - DNA, 20 bp, Artificial Sequence
  MKO10000061_A_1110001A16Rik
  gRNA
atgtaggatggctcggatca

SEQ ID NO: 62 - DNA, 20 bp, Artificial Sequence
  MKO10000062_A_1110001A16Rik
  gRNA
ttaaagatcttcctcgccag

SEQ ID NO: 63 - DNA, 20 bp, Artificial Sequence
  MKO10000063_A_1110001A16Rik
  gRNA
aacataccttccaaaatgaa

SEQ ID NO: 64 - DNA, 20 bp, Artificial Sequence
  MKO10000064_A_1110001J03Rik
  gRNA
tgtgtcgcgatatggccgcc

SEQ ID NO: 65 - DNA, 20 bp, Artificial Sequence
  MKO10000065_A_1110001J03Rik
  gRNA
gcggccatatcgcgacacag

SEQ ID NO: 66 - DNA, 20 bp, Artificial Sequence
  MKO10000066_A_1110001J03Rik
  gRNA
gttgccggatgctactcaaa

SEQ ID NO: 67 - DNA, 20 bp, Artificial Sequence
  MKO10000067_A_1110004E09Rik
  gRNA
gatgccttggaccagcttcg

SEQ ID NO: 68 - DNA, 20 bp, Artificial Sequence
  MKO10000068_A_1110004E09Rik
  gRNA
tcatgaccgcacctcgaagc

SEQ ID NO: 69 - DNA, 20 bp, Artificial Sequence
  MKO10000069_A_1110004E09Rik
  gRNA
aatcatcgtcaagatccagc

SEQ ID NO: 70 - DNA, 20 bp, Artificial Sequence
  MKO10000070_A_1110004F10Rik
  gRNA
gcaaactgtcaggacggtac

SEQ ID NO: 71 - DNA, 20 bp, Artificial Sequence
  MKO10000071_A_1110004F10Rik
  gRNA
tcaacatctcacttccgaac

SEQ ID NO: 72 - DNA, 20 bp, Artificial Sequence
  MKO10000072_A_1110004F10Rik
  gRNA
tgcagcttggatctagcaat

SEQ ID NO: 73 - DNA, 20 bp, Artificial Sequence
  MKO10000073_A_1110007C09Rik
  gRNA
ggtcacagagccgtacgcgc

SEQ ID NO: 74 - DNA, 20 bp, Artificial Sequence
  MKO10000074_A_1110007C09Rik
  gRNA
ctgtaccagccggtcacagt

SEQ ID NO: 75 - DNA, 20 bp, Artificial Sequence
  MKO10000075_A_1110007C09Rik
  gRNA
cccccagttccggaacccca

SEQ ID NO: 76 - DNA, 20 bp, Artificial Sequence
  MKO10000076_A_1110008F13Rik
  gRNA
taactacctacaaatcgacg

SEQ ID NO: 77 - DNA, 20 bp, Artificial Sequence
  MKO10000077_A_1110008F13Rik
  gRNA
acagaactcctgcattgatc

SEQ ID NO: 78 - DNA, 20 bp, Artificial Sequence
  MKO10000078_A_1110008F13Rik
  gRNA
caaggtgctgcggagcgacg

SEQ ID NO: 79 - DNA, 20 bp, Artificial Sequence
  MKO10000079_A_1110008J03Rik
  gRNA
cagaattgtaaccgatccag

SEQ ID NO: 80 - DNA, 20 bp, Artificial Sequence
  MKO10000080_A_1110008J03Rik
  gRNA
aaacagtgactcatcgcagt

SEQ ID NO: 81 - DNA, 20 bp, Artificial Sequence
  MKO10000081_A_1110008J03Rik
  gRNA
acagtcgcccctgatgtgtt

SEQ ID NO: 82 - DNA, 20 bp, Artificial Sequence
  MKO10000082_A_1110008L16Rik
  gRNA
gaggtgtcgtcttcttatac

SEQ ID NO: 83 - DNA, 20 bp, Artificial Sequence
  MKO10000083_A_1110008L16Rik
  gRNA
gtataagaagacgacacctc

SEQ ID NO: 84 - DNA, 20 bp, Artificial Sequence
  MKO10000084_A_1110008L16Rik
  gRNA
ccatcaataacgatatcaaa

SEQ ID NO: 85 - DNA, 20 bp, Artificial Sequence
  MKO10000085_A_1110008P14Rik
  gRNA
cccgcaatgtcgggccccaa

SEQ ID NO: 86 - DNA, 20 bp, Artificial Sequence
  MKO10000086_A_1110008P14Rik
  gRNA
gtcgaaccggcagacgcgcc

SEQ ID NO: 87 - DNA, 20 bp, Artificial Sequence
  MKO10000087_A_1110008P14Rik
  gRNA
acctaggggctggcatcgcc

SEQ ID NO: 88 - DNA, 20 bp, Artificial Sequence
  MKO10000088_A_1110012L19Rik
  gRNA
tgcccaggacttattgacat

SEQ ID NO: 89 - DNA, 20 bp, Artificial Sequence
  MKO10000089_A_1110012L19Rik
  gRNA
atttctgaacgctgctcaac

SEQ ID NO: 90 - DNA, 20 bp, Artificial Sequence
  MKO10000090_A_1110012L19Rik
  gRNA
tccagagaccttaactgctg

SEQ ID NO: 91 - DNA, 20 bp, Artificial Sequence
  MKO10000091_A_1110017D15Rik
  gRNA
gccgtttaccgtaggcgttg

SEQ ID NO: 92 - DNA, 20 bp, Artificial Sequence
  MKO10000092_A_1110017D15Rik
  gRNA
cgagtccttgcagcaactac

SEQ ID NO: 93 - DNA, 20 bp, Artificial Sequence
  MKO10000093_A_1110017D15Rik
  gRNA
taaggtaccttggacagtcg

SEQ ID NO: 94 - DNA, 20 bp, Artificial Sequence
  MKO10000094_A_1110025L11Rik
  gRNA
tgtggctatggatgtggttc

SEQ ID NO: 95 - DNA, 20 bp, Artificial Sequence
  MKO10000095_A_1110025L11Rik
  gRNA
agcaccatgtgtggctacta

SEQ ID NO: 96 - DNA, 20 bp, Artificial Sequence
  MKO10000096_A_1110025L11Rik
  gRNA
catagccacagcccagtcca

SEQ ID NO: 97 - DNA, 20 bp, Artificial Sequence
  MKO10000097_A_1110032A03Rik
  gRNA
ctcctattcgaaccgtaccc

SEQ ID NO: 98 - DNA, 20 bp, Artificial Sequence
  MKO10000098_A_1110032A03Rik
  gRNA
ccatccgtactgtaaaaact

SEQ ID NO: 99 - DNA, 20 bp, Artificial Sequence
  MKO10000099_A_1110032A03Rik
  gRNA
tgcatcatatgttgtttcga

SEQ ID NO: 100 - DNA, 20 bp, Artificial Sequence
  MKO10000100_A_1110032F04Rik
  gRNA
cagctcgtgctccgaaacgc

SEQ ID NO: 101 - DNA, 20 bp, Artificial Sequence
  MKO10000101_A_1110032F04Rik
  gRNA
gagtcgtcgtcgtcgtcggg

SEQ ID NO: 102 - DNA, 20 bp, Artificial Sequence
  MKO10000102_A_1110032F04Rik
  gRNA
gaaacggacctggccgccgt

SEQ ID NO: 103 - DNA, 20 bp, Artificial Sequence
  MKO10000103_A_1110034G24Rik
  gRNA
acacaccgcgggtagatcca

SEQ ID NO: 104 - DNA, 20 bp, Artificial Sequence
  MKO10000104_A_1110034G24Rik
  gRNA
ctgtaccttggatctacccg

SEQ ID NO: 105 - DNA, 20 bp, Artificial Sequence
  MKO10000105_A_1110034G24Rik
  gRNA
aactgcggagagcatacctt

SEQ ID NO: 106 - DNA, 20 bp, Artificial Sequence
  MKO10000106_A_1110037F02Rik
  gRNA
gtgataattaccttcgagtt

SEQ ID NO: 107 - DNA, 20 bp, Artificial Sequence
  MKO10000107_A_1110037F02Rik
  gRNA
tgaagtccgagttatacccc

SEQ ID NO: 108 - DNA, 20 bp, Artificial Sequence
  MKO10000108_A_1110037F02Rik
  gRNA
catctttagaccaaactcga

SEQ ID NO: 109 - DNA, 20 bp, Artificial Sequence
  MKO10000109_A_1110038F14Rik
  gRNA
cctgcatgcgactccgccgc

SEQ ID NO: 110 - DNA, 20 bp, Artificial Sequence
  MKO10000110_A_1110038F14Rik
  gRNA
ggaggccctacgggctctaa

SEQ ID NO: 111 - DNA, 20 bp, Artificial Sequence
  MKO10000111_A_1110038F14Rik
  gRNA
ccggcggcggagtcgcatgc

SEQ ID NO: 112 - DNA, 20 bp, Artificial Sequence
  MKO10000112_A_1110051M20Rik
  gRNA
tggagatgcttccgaactgt

SEQ ID NO: 113 - DNA, 20 bp, Artificial Sequence
  MKO10000113_A_1110051M20Rik
  gRNA
gagacatgtcctcacgtaca

SEQ ID NO: 114 - DNA, 20 bp, Artificial Sequence
  MKO10000114_A_1110051M20Rik
  gRNA
attgtgcccagacttcccgc

SEQ ID NO: 115 - DNA, 20 bp, Artificial Sequence
  MKO10000115_A_1110057K04Rik
  gRNA
tcagacattcgttcgatagt

SEQ ID NO: 116 - DNA, 20 bp, Artificial Sequence
  MKO10000116_A_1110057K04Rik
  gRNA
gactcgcttcatcacgtgaa

SEQ ID NO: 117 - DNA, 20 bp, Artificial Sequence
  MKO10000117_A_1110057K04Rik
  gRNA
cgaatgtctgaatcgcccaa

SEQ ID NO: 118 - DNA, 20 bp, Artificial Sequence
  MKO10000118_A_1110058L19Rik
  gRNA
ggcccggagcctacacgata

SEQ ID NO: 119 - DNA, 20 bp, Artificial Sequence
  MKO10000119_A_1110058L19Rik
  gRNA
agtgagtcaaaacgaccgag

SEQ ID NO: 120 - DNA, 20 bp, Artificial Sequence
  MKO10000120_A_1110058L19Rik
  gRNA
gacgaaagtcatccgtgaaa

SEQ ID NO: 121 - DNA, 20 bp, Artificial Sequence
  MKO10000121_A_1110059E24Rik
  gRNA
tccgtccgcagcgtcttcta

SEQ ID NO: 122 - DNA, 20 bp, Artificial Sequence
  MKO10000122_A_1110059E24Rik
  gRNA
tctggccatagaagacgctg

SEQ ID NO: 123 - DNA, 20 bp, Artificial Sequence
  MKO10000123_A_1110059E24Rik
  gRNA
tgataagagtgttcagacca

SEQ ID NO: 124 - DNA, 20 bp, Artificial Sequence
  MKO10000124_A_1110059G10Rik
  gRNA
cacttggttccgcttgctca

SEQ ID NO: 125 - DNA, 20 bp, Artificial Sequence
  MKO10000125_A_1110059G10Rik
  gRNA
ccagaactaccatgagcaag

SEQ ID NO: 126 - DNA, 20 bp, Artificial Sequence
  MKO10000126_A_1110059G10Rik
  gRNA
agatgaacagcctcaagtag

SEQ ID NO: 127 - DNA, 20 bp, Artificial Sequence
  MKO10000127_A_1110059M19Rik
  gRNA
tacactaacacctgctattg

SEQ ID NO: 128 - DNA, 20 bp, Artificial Sequence
  MKO10000128_A_1110059M19Rik
  gRNA
cctccgatcatcagtgccat

SEQ ID NO: 129 - DNA, 20 bp, Artificial Sequence
  MKO10000129_A_1110059M19Rik
  gRNA
tacatggcttgtactgaaaa

SEQ ID NO: 130 - DNA, 20 bp, Artificial Sequence
  MKO10000130_A_1110065P20Rik
  gRNA
cgccggcgcccagaaccggc

SEQ ID NO: 131 - DNA, 20 bp, Artificial Sequence
  MKO10000131_A_1110065P20Rik
  gRNA
ccacctctggccgatacaga

SEQ ID NO: 132 - DNA, 20 bp, Artificial Sequence
  MKO10000132_A_1110065P20Rik
  gRNA
tagaacggttcagccaagtc

SEQ ID NO: 133 - DNA, 20 bp, Artificial Sequence
  MKO10000133_A_1190002N15Rik
  gRNA
accgagttcgcgcgtctcaa

SEQ ID NO: 134 - DNA, 20 bp, Artificial Sequence
  MKO10000134_A_1190002N15Rik
  gRNA
ccgcctggtgcgccgctacg

SEQ ID NO: 135 - DNA, 20 bp, Artificial Sequence
  MKO10000135_A_1190002N15Rik
  gRNA
gaaccggccatagcgtttct

SEQ ID NO: 136 - DNA, 20 bp, Artificial Sequence
  MKO10000136_A_1190003K10Rik
  gRNA
acagacttgttaccgagaac

SEQ ID NO: 137 - DNA, 20 bp, Artificial Sequence
  MKO10000137_A_1190003K10Rik
  gRNA
agacttccctgcgcatgtac

SEQ ID NO: 138 - DNA, 20 bp, Artificial Sequence
  MKO10000138_A_1190003K10Rik
  gRNA
gccagaagcactcagttctc

SEQ ID NO: 139 - DNA, 20 bp, Artificial Sequence
  MKO10000139_A_1190005I06Rik
  gRNA
tcaggacgggggcctcgtcg

SEQ ID NO: 140 - DNA, 20 bp, Artificial Sequence
  MKO10000140_A_1190005I06Rik
  gRNA
aggcgacgcgcttgcagccg

SEQ ID NO: 141 - DNA, 20 bp, Artificial Sequence
  MKO10000141_A_1190005I06Rik
  gRNA
acggctgcaagcgcgtcgcc

SEQ ID NO: 142 - DNA, 20 bp, Artificial Sequence
  MKO10000142_A_1190007I07Rik
  gRNA
agaactcaaaacggagcttt

SEQ ID NO: 143 - DNA, 20 bp, Artificial Sequence
  MKO10000143_A_1190007I07Rik
  gRNA
catgtgcgccggggcccagg

SEQ ID NO: 144 - DNA, 20 bp, Artificial Sequence
  MKO10000144_A_1190007I07Rik
  gRNA
ccccggcgcacatggccagg

SEQ ID NO: 145 - DNA, 20 bp, Artificial Sequence
  MKO10000145_A_42625
  gRNA
ctgtcagcccgggcgatcac

SEQ ID NO: 146 - DNA, 20 bp, Artificial Sequence
  MKO10000146_A_42625
  gRNA
cagtccggcacagccgcctc

SEQ ID NO: 147 - DNA, 20 bp, Artificial Sequence
  MKO10000147_A_42625
  gRNA
gtgtactttgtgccacccac

SEQ ID NO: 148 - DNA, 20 bp, Artificial Sequence
  MKO10000148_A_1200014J11Rik
  gRNA
gatttacttctgctcgaaag

SEQ ID NO: 149 - DNA, 20 bp, Artificial Sequence
  MKO10000149_A_1200014J11Rik
  gRNA
tgggatcgatgtcacctcca

SEQ ID NO: 150 - DNA, 20 bp, Artificial Sequence
  MKO10000150_A_1200014J11Rik
  gRNA
ctccgacgacttgtcttcac

SEQ ID NO: 151 - DNA, 20 bp, Artificial Sequence
  MKO10000151_A_1300002K09Rik
  gRNA
gtctccgatgctctcgtctt

SEQ ID NO: 152 - DNA, 20 bp, Artificial Sequence
  MKO10000152_A_1300002K09Rik
  gRNA
tttagtaaccgatggtccta

SEQ ID NO: 153 - DNA, 20 bp, Artificial Sequence
  MKO10000153_A_1300002K09Rik
  gRNA
gcctccgatgaaaagcacaa

SEQ ID NO: 154 - DNA, 20 bp, Artificial Sequence
  MKO10000154_A_1300017J02Rik
  gRNA
gaacatctttccatccgcac

SEQ ID NO: 155 - DNA, 20 bp, Artificial Sequence
  MKO10000155_A_1300017J02Rik
  gRNA
tgacacaacgcaccatcgta

SEQ ID NO: 156 - DNA, 20 bp, Artificial Sequence
  MKO10000156_A_1300017J02Rik
  gRNA
cacttactttaaggctcccc

SEQ ID NO: 157 - DNA, 20 bp, Artificial Sequence
  MKO10000157_A_42627
  gRNA
cactcgcttcgtcatcgacc

SEQ ID NO: 158 - DNA, 20 bp, Artificial Sequence
  MKO10000158_A_42627
  gRNA
agaatcgtgatagtcagcta

SEQ ID NO: 159 - DNA, 20 bp, Artificial Sequence
  MKO10000159_A_42627
  gRNA
gtcctctcatttctactcga

SEQ ID NO: 160 - DNA, 20 bp, Artificial Sequence
  MKO10000160_A_42628
  gRNA
tcgtccaaaagctttagtac

SEQ ID NO: 161 - DNA, 20 bp, Artificial Sequence
  MKO10000161_A_42628
  gRNA
tgcagctcttgcgatcttct

SEQ ID NO: 162 - DNA, 20 bp, Artificial Sequence
  MKO10000162_A_42628
  gRNA
acagtttaatctgctcccac

SEQ ID NO: 163 - DNA, 20 bp, Artificial Sequence
  MKO10000163_A_1500009L16Rik
  gRNA
tagaacagaagactcgataa

SEQ ID NO: 164 - DNA, 20 bp, Artificial Sequence
  MKO10000164_A_1500009L16Rik
  gRNA
gtgtctttaactgctcctgt

SEQ ID NO: 165 - DNA, 20 bp, Artificial Sequence
  MKO10000165_A_1500012F01Rik
  gRNA
ggtatcatgtgcactattgc

SEQ ID NO: 166 - DNA, 20 bp, Artificial Sequence
  MKO10000166_A_1500012F01Rik
  gRNA
ctacaggcccgagagagccg

SEQ ID NO: 167 - DNA, 20 bp, Artificial Sequence
  MKO10000167_A_1500012F01Rik
  gRNA
cactcaccaatgctcgcctc

SEQ ID NO: 168 - DNA, 20 bp, Artificial Sequence
  MKO10000168_A_1500015O10Rik
  gRNA
ccatgagcacctcgtctgcg

SEQ ID NO: 169 - DNA, 20 bp, Artificial Sequence
  MKO10000169_A_1500015O10Rik
  gRNA
ccgcgcagacgaggtgctca

SEQ ID NO: 170 - DNA, 20 bp, Artificial Sequence
  MKO10000170_A_1500015O10Rik
  gRNA
cgaaacggccatgactacta

SEQ ID NO: 171 - DNA, 20 bp, Artificial Sequence
  MKO10000171_A_1600002H07Rik
  gRNA
tgagcacagactacgatcaa

SEQ ID NO: 172 - DNA, 20 bp, Artificial Sequence
  MKO10000172_A_1600002H07Rik
  gRNA
ccggggtggcagccgtgtat

SEQ ID NO: 173 - DNA, 20 bp, Artificial Sequence
  MKO10000173_A_1600002H07Rik
  gRNA
ccttggactcctgcgccgat

SEQ ID NO: 174 - DNA, 20 bp, Artificial Sequence
  MKO10000174_A_1600002K03Rik
  gRNA
cgcttgttctacgtaatcac

SEQ ID NO: 175 - DNA, 20 bp, Artificial Sequence
  MKO10000175_A_1600002K03Rik
  gRNA
cgctaacgcacctaaaagcc

SEQ ID NO: 176 - DNA, 20 bp, Artificial Sequence
  MKO10000176_A_1600002K03Rik
  gRNA
gactcaagaagtcacagcga

SEQ ID NO: 177 - DNA, 20 bp, Artificial Sequence
  MKO10000177_A_1600012H06Rik
  gRNA
cacacttccagcgaccggtc

SEQ ID NO: 178 - DNA, 20 bp, Artificial Sequence
  MKO10000178_A_1600012H06Rik
  gRNA
gagtgctgtccgacacgtac

SEQ ID NO: 179 - DNA, 20 bp, Artificial Sequence
  MKO10000179_A_1600012H06Rik
  gRNA
gcgcgccctgttgatgatcc

SEQ ID NO: 180 - DNA, 20 bp, Artificial Sequence
  MKO10000180_A_1600014C10Rik
  gRNA
cgcgcgcacctttaccgagc

SEQ ID NO: 181 - DNA, 20 bp, Artificial Sequence
  MKO10000181_A_1600014C10Rik
  gRNA
gctaacgacctatgtcacca

SEQ ID NO: 182 - DNA, 20 bp, Artificial Sequence
  MKO10000182_A_1600014C10Rik
  gRNA
gagtcctcccgatgaccatg

SEQ ID NO: 183 - DNA, 20 bp, Artificial Sequence
  MKO10000183_A_1600014C23Rik
  gRNA
aggaaccctgcctgcgcccc

SEQ ID NO: 184 - DNA, 20 bp, Artificial Sequence
  MKO10000184_A_1600014C23Rik
  gRNA
atttcctcctgagtatgacc

SEQ ID NO: 185 - DNA, 20 bp, Artificial Sequence
  MKO10000185_A_1600014C23Rik
  gRNA
agttcgacccatctacagag

SEQ ID NO: 186 - DNA, 20 bp, Artificial Sequence
  MKO10000186_A_1600014K23Rik
  gRNA
gggcagcgttagactccgac

SEQ ID NO: 187 - DNA, 20 bp, Artificial Sequence
  MKO10000187_A_1600014K23Rik
  gRNA
aattgccaatcaagaccgcc

SEQ ID NO: 188 - DNA, 20 bp, Artificial Sequence
  MKO10000188_A_1600014K23Rik
  gRNA
acgcgcactccatcgccatg

SEQ ID NO: 189 - DNA, 20 bp, Artificial Sequence
  MKO10000189_A_1600015I10Rik
  gRNA
gctactcgccagttagccgc

SEQ ID NO: 190 - DNA, 20 bp, Artificial Sequence
  MKO10000190_A_1600015I10Rik
  gRNA
caatgcggtaatgtactagg

SEQ ID NO: 191 - DNA, 20 bp, Artificial Sequence
  MKO10000191_A_1600015I10Rik
  gRNA
ccatcccgtgggtcgtatgg

SEQ ID NO: 192 - DNA, 20 bp, Artificial Sequence
  MKO10000192_A_1600016N20Rik
  gRNA
gaacagcccaccgaagtgcc

SEQ ID NO: 193 - DNA, 20 bp, Artificial Sequence
  MKO10000193_A_1600016N20Rik
  gRNA
gcttctggacctggttccgc

SEQ ID NO: 194 - DNA, 20 bp, Artificial Sequence
  MKO10000194_A_1600016N20Rik
  gRNA
caaactcacctcgacgctgc

SEQ ID NO: 195 - DNA, 20 bp, Artificial Sequence
  MKO10000195_A_1700001C02Rik
  gRNA
tcattagtgtgcccgcgcta

SEQ ID NO: 196 - DNA, 20 bp, Artificial Sequence
  MKO10000196_A_1700001C02Rik
  gRNA
aggctctgaactcgaagtaa

SEQ ID NO: 197 - DNA, 20 bp, Artificial Sequence
  MKO10000197_A_1700001C02Rik
  gRNA
aagagctatgcgctcctcag

SEQ ID NO: 198 - DNA, 20 bp, Artificial Sequence
  MKO10000198_A_1700001C19Rik
  gRNA
tgcaggccgatctgtccccg

SEQ ID NO: 199 - DNA, 20 bp, Artificial Sequence
  MKO10000199_A_1700001C19Rik
  gRNA
agacgctgcggggttcagtc

SEQ ID NO: 200 - DNA, 20 bp, Artificial Sequence
  MKO10000200_A_1700001C19Rik
  gRNA
ttctgggacaatgccgtcag

SEQ ID NO: 201 - DNA, 20 bp, Artificial Sequence
  MKO10000201_A_1700001F09Rik
  gRNA
gcagcctcttctttacttcc

SEQ ID NO: 202 - DNA, 20 bp, Artificial Sequence
  MKO10000202_A_1700001F09Rik
  gRNA
acctacagggtcatttagga

SEQ ID NO: 203 - DNA, 20 bp, Artificial Sequence
  MKO10000203_A_1700001F09Rik
  gRNA
gtcattcaaatccttgtact

SEQ ID NO: 204 - DNA, 20 bp, Artificial Sequence
  MKO10000204_A_1700001J03Rik
  gRNA
ttcctcagtgtttagcgcga

SEQ ID NO: 205 - DNA, 20 bp, Artificial Sequence
  MKO10000205_A_1700001J03Rik
  gRNA
ggccatcgcgctaaacactg

SEQ ID NO: 206 - DNA, 20 bp, Artificial Sequence
  MKO10000206_A_1700001J03Rik
  gRNA
atcatttgtaccacgtattc

SEQ ID NO: 207 - DNA, 20 bp, Artificial Sequence
  MKO10000207_A_1700001K19Rik
  gRNA
acacgcgcgccatcgccttc

SEQ ID NO: 208 - DNA, 20 bp, Artificial Sequence
  MKO10000208_A_1700001K19Rik
  gRNA
ctgcgatagttggaatgacc

SEQ ID NO: 209 - DNA, 20 bp, Artificial Sequence
  MKO10000209_A_1700001K19Rik
  gRNA
tgggagcgagtcttccacgc

SEQ ID NO: 210 - DNA, 20 bp, Artificial Sequence
  MKO10000210_A_1700001L19Rik
  gRNA
gcgcagctacttcagtcgcg

SEQ ID NO: 211 - DNA, 20 bp, Artificial Sequence
  MKO10000211_A_1700001L19Rik
  gRNA
gtcacctccgaaaccctgcg

SEQ ID NO: 212 - DNA, 20 bp, Artificial Sequence
  MKO10000212_A_1700001L19Rik
  gRNA
acgtgaagaccgacttctac

SEQ ID NO: 213 - DNA, 20 bp, Artificial Sequence
  MKO10000213_A_1700001O22Rik
  gRNA
tactgggaacgcaaccgtgc

SEQ ID NO: 214 - DNA, 20 bp, Artificial Sequence
  MKO10000214_A_1700001O22Rik
  gRNA
tctcgtctgcgaatcgtacc

SEQ ID NO: 215 - DNA, 20 bp, Artificial Sequence
  MKO10000215_A_1700001O22Rik
  gRNA
agagcctcacacgcgggggc

SEQ ID NO: 216 - DNA, 20 bp, Artificial Sequence
  MKO10000216_A_1700001P01Rik
  gRNA
tccggaagtaccgacgactg

SEQ ID NO: 217 - DNA, 20 bp, Artificial Sequence
  MKO10000217_A_1700001P01Rik
  gRNA
accacagtcgtcggtacttc

SEQ ID NO: 218 - DNA, 20 bp, Artificial Sequence
  MKO10000218_A_1700001P01Rik
  gRNA
gccatttaagcccgtagtga

SEQ ID NO: 219 - DNA, 20 bp, Artificial Sequence
  MKO10000219_A_1700003E16Rik
  gRNA
tatatcgcgggcgcccgcgc

SEQ ID NO: 220 - DNA, 20 bp, Artificial Sequence
  MKO10000220_A_1700003E16Rik
  gRNA
cgcccgcgatatatttccaa

SEQ ID NO: 221 - DNA, 20 bp, Artificial Sequence
  MKO10000221_A_1700003E16Rik
  gRNA
tgaccttatgactcgagtta

SEQ ID NO: 222 - DNA, 20 bp, Artificial Sequence
  MKO10000222_A_1700003F12Rik
  gRNA
gacggcgtggacaggcgcga

SEQ ID NO: 223 - DNA, 20 bp, Artificial Sequence
  MKO10000223_A_1700003F12Rik
  gRNA
gcgcctatgctacgtggggc

SEQ ID NO: 224 - DNA, 20 bp, Artificial Sequence
  MKO10000224_A_1700003F12Rik
  gRNA
tgacgggctttgtccatgtc

SEQ ID NO: 225 - DNA, 20 bp, Artificial Sequence
  MKO10000225_A_1700003M02Rik
  gRNA
gagctcaccatgattgttac

SEQ ID NO: 226 - DNA, 20 bp, Artificial Sequence
  MKO10000226_A_1700003M02Rik
  gRNA
gatatgaactatacaagtcg

SEQ ID NO: 227 - DNA, 20 bp, Artificial Sequence
  MKO10000227_A_1700003M02Rik
  gRNA
tctgttaaataagcgaattc

SEQ ID NO: 228 - DNA, 20 bp, Artificial Sequence
  MKO10000228_A_1700006A11Rik
  gRNA
atttgctaatcccgagttgc

SEQ ID NO: 229 - DNA, 20 bp, Artificial Sequence
  MKO10000229_A_1700006A11Rik
  gRNA
cataactcaagtattccaca

SEQ ID NO: 230 - DNA, 20 bp, Artificial Sequence
  MKO10000230_A_1700006A11Rik
  gRNA
ctctccattctcaacgaaaa

SEQ ID NO: 231 - DNA, 20 bp, Artificial Sequence
  MKO10000231_A_1700006E09Rik
  gRNA
gcaaacccaactatgaccgc

SEQ ID NO: 232 - DNA, 20 bp, Artificial Sequence
  MKO10000232_A_1700006E09Rik
  gRNA
aaaattgcgaatgcctatcg

SEQ ID NO: 233 - DNA, 20 bp, Artificial Sequence
  MKO10000233_A_1700006E09Rik
  gRNA
agtccatctccgatgacctg

SEQ ID NO: 234 - DNA, 20 bp, Artificial Sequence
  MKO10000234_A_1700007B14Rik
  gRNA
tgaatccgtgagtaagcaaa

SEQ ID NO: 235 - DNA, 20 bp, Artificial Sequence
  MKO10000235_A_1700007B14Rik
  gRNA
tcaaaagcatcagctatccc

SEQ ID NO: 236 - DNA, 20 bp, Artificial Sequence
  MKO10000236_A_1700007B14Rik
  gRNA
gagcttgcctttgcataatc

SEQ ID NO: 237 - DNA, 20 bp, Artificial Sequence
  MKO10000237_A_1700007G11Rik
  gRNA
ttggtggagctaggctaccg

SEQ ID NO: 238 - DNA, 20 bp, Artificial Sequence
  MKO10000238_A_1700007G11Rik
  gRNA
gctccaccaactggcgagcc

SEQ ID NO: 239 - DNA, 20 bp, Artificial Sequence
  MKO10000239_A_1700007G11Rik
  gRNA
agggaagaggataatcgtgc

SEQ ID NO: 240 - DNA, 20 bp, Artificial Sequence
  MKO10000240_A_1700007K09Rik
  gRNA
accattgctgttgcgagttg

SEQ ID NO: 241 - DNA, 20 bp, Artificial Sequence
  MKO10000241_A_1700007K09Rik
  gRNA
accgcaactcgcaacagcaa

SEQ ID NO: 242 - DNA, 20 bp, Artificial Sequence
  MKO10000242_A_1700007K09Rik
  gRNA
tgatgatcgtgattattgtc

SEQ ID NO: 243 - DNA, 20 bp, Artificial Sequence
  MKO10000243_A_1700007K13Rik
  gRNA
ttagcgagaagctcccagtc

SEQ ID NO: 244 - DNA, 20 bp, Artificial Sequence
  MKO10000244_A_1700007K13Rik
  gRNA
ccgtagccatgaaaccaccc

SEQ ID NO: 245 - DNA, 20 bp, Artificial Sequence
  MKO10000245_A_1700007K13Rik
  gRNA
tactggcatctcatgcaccg

SEQ ID NO: 246 - DNA, 20 bp, Artificial Sequence
  MKO10000246_A_1700008A04Rik
  gRNA
attctggctcgatgcccttc

SEQ ID NO: 247 - DNA, 20 bp, Artificial Sequence
  MKO10000247_A_1700008A04Rik
  gRNA
gaagtcaccactgtgatgac

SEQ ID NO: 248 - DNA, 20 bp, Artificial Sequence
  MKO10000248_A_1700008A04Rik
  gRNA
ctgaaagtggttgcagtcct

SEQ ID NO: 249 - DNA, 20 bp, Artificial Sequence
  MKO10000249_A_1700008F21Rik
  gRNA
acttgtgtaacatagctgtc

SEQ ID NO: 250 - DNA, 20 bp, Artificial Sequence
  MKO10000250_A_1700008F21Rik
  gRNA
tttcttagttcgctctaatt

SEQ ID NO: 251 - DNA, 20 bp, Artificial Sequence
  MKO10000251_A_1700008F21Rik
  gRNA
ttagagcgaactaagaaacc

SEQ ID NO: 252 - DNA, 20 bp, Artificial Sequence
  MKO10000252_A_1700008I05Rik
  gRNA
tgtacattgtctccacgaat

SEQ ID NO: 253 - DNA, 20 bp, Artificial Sequence
  MKO10000253_A_1700008I05Rik
  gRNA
tagtccagaaagccaattcg

SEQ ID NO: 254 - DNA, 20 bp, Artificial Sequence
  MKO10000254_A_1700008I05Rik
  gRNA
gaacattcgaccatatttac

SEQ ID NO: 255 - DNA, 20 bp, Artificial Sequence
  MKO10000255_A_1700008O03Rik
  gRNA
cccccagcagtaaatcgtcg

SEQ ID NO: 256 - DNA, 20 bp, Artificial Sequence
  MKO10000256_A_1700008O03Rik
  gRNA
gttcacgcgcccgctttcca

SEQ ID NO: 257 - DNA, 20 bp, Artificial Sequence
  MKO10000257_A_1700008O03Rik
  gRNA
catctcggaatatgaggcgc

SEQ ID NO: 258 - DNA, 20 bp, Artificial Sequence
  MKO10000258_A_1700008P02Rik
  gRNA
ctggtgacaagcctgaacgt

SEQ ID NO: 259 - DNA, 20 bp, Artificial Sequence
  MKO10000259_A_1700008P02Rik
  gRNA
ttctcagcctgcctacgttc

SEQ ID NO: 260 - DNA, 20 bp, Artificial Sequence
  MKO10000260_A_1700008P02Rik
  gRNA
gaagaagccttacatgccaa

SEQ ID NO: 261 - DNA, 20 bp, Artificial Sequence
  MKO10000261_A_1700009N14Rik
  gRNA
ggatgtaatagccgtctcgc

SEQ ID NO: 262 - DNA, 20 bp, Artificial Sequence
  MKO10000262_A_1700009N14Rik
  gRNA
cagtaccaccatcgcccacg

SEQ ID NO: 263 - DNA, 20 bp, Artificial Sequence
  MKO10000263_A_1700009N14Rik
  gRNA
gcccatcaagtttaacgtct

SEQ ID NO: 264 - DNA, 20 bp, Artificial Sequence
  MKO10000264_A_1700009P17Rik
  gRNA
gatctactcaacgcctgtaa

SEQ ID NO: 265 - DNA, 20 bp, Artificial Sequence
  MKO10000265_A_1700009P17Rik
  gRNA
tgcgagctttgcggttcatc

SEQ ID NO: 266 - DNA, 20 bp, Artificial Sequence
  MKO10000266_A_1700009P17Rik
  gRNA
gttgtctccttggataaccg

SEQ ID NO: 267 - DNA, 20 bp, Artificial Sequence
  MKO10000267_A_1700010B08Rik
  gRNA
ccacaatatagaaataccgc

SEQ ID NO: 268 - DNA, 20 bp, Artificial Sequence
  MKO10000268_A_1700010B08Rik
  gRNA
ctgtaagccctggtttgatg

SEQ ID NO: 269 - DNA, 20 bp, Artificial Sequence
  MKO10000269_A_1700010B08Rik
  gRNA
aggactcacctgtatgattc

SEQ ID NO: 270 - DNA, 20 bp, Artificial Sequence
  MKO10000270_A_1700010D01Rik
  gRNA
agaacaatatagcacctaaa

SEQ ID NO: 271 - DNA, 20 bp, Artificial Sequence
  MKO10000271_A_1700010D01Rik
  gRNA
catgaagaacaagaaaacgc

SEQ ID NO: 272 - DNA, 20 bp, Artificial Sequence
  MKO10000272_A_1700010D01Rik
  gRNA
aggcaaatcttcactatctt

SEQ ID NO: 273 - DNA, 20 bp, Artificial Sequence
  MKO10000273_A_1700010I14Rik
  gRNA
aggcctgtacgcgtgggttc

SEQ ID NO: 274 - DNA, 20 bp, Artificial Sequence
  MKO10000274_A_1700010I14Rik
  gRNA
taacggtacacatccctgcc

SEQ ID NO: 275 - DNA, 20 bp, Artificial Sequence
  MKO10000275_A_1700010I14Rik
  gRNA
tattacctgatactgcgctg

SEQ ID NO: 276 - DNA, 20 bp, Artificial Sequence
  MKO10000276_A_1700011A15Rik
  gRNA
tcggcagctacgtgagtacc

SEQ ID NO: 277 - DNA, 20 bp, Artificial Sequence
  MKO10000277_A_1700011A15Rik
  gRNA
gccatgccggatgcggcctc

SEQ ID NO: 278 - DNA, 20 bp, Artificial Sequence
  MKO10000278_A_1700011A15Rik
  gRNA
gtctccagtgacgtcaccgc

SEQ ID NO: 279 - DNA, 20 bp, Artificial Sequence
  MKO10000279_A_1700011E24Rik
  gRNA
gtacgaggtacttccagcac

SEQ ID NO: 280 - DNA, 20 bp, Artificial Sequence
  MKO10000280_A_1700011E24Rik
  gRNA
ggatcgtttctcagcacaag

SEQ ID NO: 281 - DNA, 20 bp, Artificial Sequence
  MKO10000281_A_1700011E24Rik
  gRNA
atctttgtcaactagtgtgc

SEQ ID NO: 282 - DNA, 20 bp, Artificial Sequence
  MKO10000282_A_1700011H14Rik
  gRNA
atgtcatagccgttgctcct

SEQ ID NO: 283 - DNA, 20 bp, Artificial Sequence
  MKO10000283_A_1700011H14Rik
  gRNA
gactcttcctcaactccatt

SEQ ID NO: 284 - DNA, 20 bp, Artificial Sequence
  MKO10000284_A_1700011H14Rik
  gRNA
cacaagcaattacctctgaa

SEQ ID NO: 285 - DNA, 20 bp, Artificial Sequence
  MKO10000285_A_1700011I03Rik
  gRNA
gtgaaccgaaagaacgttgg

SEQ ID NO: 286 - DNA, 20 bp, Artificial Sequence
  MKO10000286_A_1700011I03Rik
  gRNA
actctccaccaacgttcttt

SEQ ID NO: 287 - DNA, 20 bp, Artificial Sequence
  MKO10000287_A_1700011I03Rik
  gRNA
atgccatccaggtcgatgct

SEQ ID NO: 288 - DNA, 20 bp, Artificial Sequence
  MKO10000288_A_1700011L22Rik
  gRNA
agtttctcacccgtttcagc

SEQ ID NO: 289 - DNA, 20 bp, Artificial Sequence
  MKO10000289_A_1700011L22Rik
  gRNA
gtaacttacagggggacata

SEQ ID NO: 290 - DNA, 20 bp, Artificial Sequence
  MKO10000290_A_1700011L22Rik
  gRNA
ctggaggggcttgctatatc

SEQ ID NO: 291 - DNA, 20 bp, Artificial Sequence
  MKO10000291_A_1700012A03Rik
  gRNA
gacaagtgtagcaccttatc

SEQ ID NO: 292 - DNA, 20 bp, Artificial Sequence
  MKO10000292_A_1700012A03Rik
  gRNA
tcgtctcatgtcagtatcca

SEQ ID NO: 293 - DNA, 20 bp, Artificial Sequence
  MKO10000293_A_1700012A03Rik
  gRNA
gagtagaatgttcaagggtc

SEQ ID NO: 294 - DNA, 20 bp, Artificial Sequence
  MKO10000294_A_1700012B07Rik
  gRNA
aggggctcgcgtcgtatatt

SEQ ID NO: 295 - DNA, 20 bp, Artificial Sequence
  MKO10000295_A_1700012B07Rik
  gRNA
aaggaacgccgtagccgctt

SEQ ID NO: 296 - DNA, 20 bp, Artificial Sequence
  MKO10000296_A_1700012B07Rik
  gRNA
gagccagagcttgacgtcac

SEQ ID NO: 297 - DNA, 20 bp, Artificial Sequence
  MKO10000297_A_1700012B09Rik
  gRNA
ccccggtggcatgaggcggc

SEQ ID NO: 298 - DNA, 20 bp, Artificial Sequence
  MKO10000298_A_1700012B09Rik
  gRNA
cacaagccaagtactactcg

SEQ ID NO: 299 - DNA, 20 bp, Artificial Sequence
  MKO10000299_A_1700012B09Rik
  gRNA
cccttcgcggcccgcctctg

SEQ ID NO: 300 - DNA, 20 bp, Artificial Sequence
  MKO10000300_A_1700012L04Rik
  gRNA
caggaagcgcgtaactccag

SEQ ID NO: 301 - DNA, 20 bp, Artificial Sequence
  MKO10000301_A_1700012L04Rik
  gRNA
agttacgcgcttcctgccag

SEQ ID NO: 302 - DNA, 20 bp, Artificial Sequence
  MKO10000302_A_1700012L04Rik
  gRNA
tcattcactgatgtgccacc

SEQ ID NO: 303 - DNA, 20 bp, Artificial Sequence
  MKO10000303_A_1700012P22Rik
  gRNA
ctgatcagatagcgatgcga

SEQ ID NO: 304 - DNA, 20 bp, Artificial Sequence
  MKO10000304_A_1700012P22Rik
  gRNA
tattcaacgaaagtgctcct

SEQ ID NO: 305 - DNA, 20 bp, Artificial Sequence
  MKO10000305_A_1700012P22Rik
  gRNA
catagcgcacaccggcagcc

SEQ ID NO: 306 - DNA, 20 bp, Artificial Sequence
  MKO10000306_A_1700013D24Rik
  gRNA
tctgcgcaatgtttcctata

SEQ ID NO: 307 - DNA, 20 bp, Artificial Sequence
  MKO10000307_A_1700013D24Rik
  gRNA
tgttcccaagtggcatacct

SEQ ID NO: 308 - DNA, 20 bp, Artificial Sequence
  MKO10000308_A_1700013D24Rik
  gRNA
cttgggaacagactgacccc

SEQ ID NO: 309 - DNA, 20 bp, Artificial Sequence
  MKO10000309_A_1700013F07Rik
  gRNA
tgctgttgcgcaaggtgagc

SEQ ID NO: 310 - DNA, 20 bp, Artificial Sequence
  MKO10000310_A_1700013F07Rik
  gRNA
tcgacttctggacgtggctg

SEQ ID NO: 311 - DNA, 20 bp, Artificial Sequence
  MKO10000311_A_1700013F07Rik
  gRNA
aactgagatattgttacacc

SEQ ID NO: 312 - DNA, 20 bp, Artificial Sequence
  MKO10000312_A_1700013G24Rik
  gRNA
agaagaacccgttgccgaac

SEQ ID NO: 313 - DNA, 20 bp, Artificial Sequence
  MKO10000313_A_1700013G24Rik
  gRNA
acccttgccgttgttcatat

SEQ ID NO: 314 - DNA, 20 bp, Artificial Sequence
  MKO10000314_A_1700013G24Rik
  gRNA
gtgactcgtctctacacact

SEQ ID NO: 315 - DNA, 20 bp, Artificial Sequence
  MKO10000315_A_1700013H16Rik
  gRNA
gtagaactgtttacagatcc

SEQ ID NO: 316 - DNA, 20 bp, Artificial Sequence
  MKO10000316_A_1700013H16Rik
  gRNA
gcttaatgaagagtctgctc

SEQ ID NO: 317 - DNA, 20 bp, Artificial Sequence
  MKO10000317_A_1700013H16Rik
  gRNA
aactccctcaaaagactgtc

SEQ ID NO: 318 - DNA, 20 bp, Artificial Sequence
  MKO10000318_A_1700015E13Rik
  gRNA
gacggaactgcaccatctac

SEQ ID NO: 319 - DNA, 20 bp, Artificial Sequence
  MKO10000319_A_1700015E13Rik
  gRNA
gtgcatacgaagtagctgta

SEQ ID NO: 320 - DNA, 20 bp, Artificial Sequence
  MKO10000320_A_1700015E13Rik
  gRNA
tgagcgtttacctggcaagc

SEQ ID NO: 321 - DNA, 20 bp, Artificial Sequence
  MKO10000321_A_1700015F17Rik
  gRNA
acaagttcccgtctacaact

SEQ ID NO: 322 - DNA, 20 bp, Artificial Sequence
  MKO10000322_A_1700015F17Rik
  gRNA
ctcttatctcgagtacacac

SEQ ID NO: 323 - DNA, 20 bp, Artificial Sequence
  MKO10000323_A_1700015F17Rik
  gRNA
atggccctttatgcaagaca

SEQ ID NO: 324 - DNA, 20 bp, Artificial Sequence
  MKO10000324_A_1700015G11Rik
  gRNA
cctaacccgattccggatac

SEQ ID NO: 325 - DNA, 20 bp, Artificial Sequence
  MKO10000325_A_1700015G11Rik
  gRNA
ctatgtaggaaggaccacga

SEQ ID NO: 326 - DNA, 20 bp, Artificial Sequence
  MKO10000326_A_1700015G11Rik
  gRNA
cagcatgtgccttcgagtta

SEQ ID NO: 327 - DNA, 20 bp, Artificial Sequence
  MKO10000327_A_1700016C15Rik
  gRNA
tgcttcgaatgagcgtttgc

SEQ ID NO: 328 - DNA, 20 bp, Artificial Sequence
  MKO10000328_A_1700016C15Rik
  gRNA
ccaggttgggatcggaaatt

SEQ ID NO: 329 - DNA, 20 bp, Artificial Sequence
  MKO10000329_A_1700016C15Rik
  gRNA
gtcgcccatcgattccacct

SEQ ID NO: 330 - DNA, 20 bp, Artificial Sequence
  MKO10000330_A_1700016D06Rik
  gRNA
ttatatttaccgtcaaagga

SEQ ID NO: 331 - DNA, 20 bp, Artificial Sequence
  MKO10000331_A_1700016D06Rik
  gRNA
gacaagattcgaagagctat

SEQ ID NO: 332 - DNA, 20 bp, Artificial Sequence
  MKO10000332_A_1700016D06Rik
  gRNA
ttcacaacaaaaaacaacga

SEQ ID NO: 333 - DNA, 20 bp, Artificial Sequence
  MKO10000333_A_1700016H13Rik
  gRNA
acacaaacttgacgaacatc

SEQ ID NO: 334 - DNA, 20 bp, Artificial Sequence
  MKO10000334_A_1700016H13Rik
  gRNA
tggcgtatggcttgccaaga

SEQ ID NO: 335 - DNA, 20 bp, Artificial Sequence
  MKO10000335_A_1700016H13Rik
  gRNA
aatacgatttctcccaagaa

SEQ ID NO: 336 - DNA, 20 bp, Artificial Sequence
  MKO10000336_A_1700016K19Rik
  gRNA
cctcaaagtagctatgcgcg

SEQ ID NO: 337 - DNA, 20 bp, Artificial Sequence
  MKO10000337_A_1700016K19Rik
  gRNA
ctcaccatactccgccgcac

SEQ ID NO: 338 - DNA, 20 bp, Artificial Sequence
  MKO10000338_A_1700016K19Rik
  gRNA
tgaggcggtaccgcttcctt

SEQ ID NO: 339 - DNA, 20 bp, Artificial Sequence
  MKO10000339_A_1700017B05Rik
  gRNA
ggcactccaggacgctcgtt

SEQ ID NO: 340 - DNA, 20 bp, Artificial Sequence
  MKO10000340_A_1700017B05Rik
  gRNA
ctggatgggacgttcttgcg

SEQ ID NO: 341 - DNA, 20 bp, Artificial Sequence
  MKO10000341_A_1700017B05Rik
  gRNA
aggcgaagatcgatctgctc

SEQ ID NO: 342 - DNA, 20 bp, Artificial Sequence
  MKO10000342_A_1700017D01Rik
  gRNA
aaacatcataagtatcttcg

SEQ ID NO: 343 - DNA, 20 bp, Artificial Sequence
  MKO10000343_A_1700017D01Rik
  gRNA
cagggtgcacaaataatgct

SEQ ID NO: 344 - DNA, 20 bp, Artificial Sequence
  MKO10000344_A_1700017D01Rik
  gRNA
ttatgaaccagtgcagcact

SEQ ID NO: 345 - DNA, 20 bp, Artificial Sequence
  MKO10000345_A_1700017N19Rik
  gRNA
aaaaagcgtagctccgacag

SEQ ID NO: 346 - DNA, 20 bp, Artificial Sequence
  MKO10000346_A_1700017N19Rik
  gRNA
gggtcttgatacgttctcca

SEQ ID NO: 347 - DNA, 20 bp, Artificial Sequence
  MKO10000347_A_1700017N19Rik
  gRNA
atatactcactgctacttgg

SEQ ID NO: 348 - DNA, 20 bp, Artificial Sequence
  MKO10000348_A_1700018B08Rik
  gRNA
ggagcaccggcaggacttca

SEQ ID NO: 349 - DNA, 20 bp, Artificial Sequence
  MKO10000349_A_1700018B08Rik
  gRNA
ggtaggtctcgaagatgatg

SEQ ID NO: 350 - DNA, 20 bp, Artificial Sequence
  MKO10000350_A_1700018B08Rik
  gRNA
ccccaaacttggtgtagcat

SEQ ID NO: 351 - DNA, 20 bp, Artificial Sequence
  MKO10000351_A_1700018C11Rik
  gRNA
gccctccgaccgtgtctcat

SEQ ID NO: 352 - DNA, 20 bp, Artificial Sequence
  MKO10000352_A_1700018C11Rik
  gRNA
gctaccgcacagtccgtcgt

SEQ ID NO: 353 - DNA, 20 bp, Artificial Sequence
  MKO10000353_A_1700018C11Rik
  gRNA
acctgttattgagagcgcca

SEQ ID NO: 354 - DNA, 20 bp, Artificial Sequence
  MKO10000354_A_1700018F24Rik
  gRNA
cagtgccatattcagctttc

SEQ ID NO: 355 - DNA, 20 bp, Artificial Sequence
  MKO10000355_A_1700018F24Rik
  gRNA
ctatcttacacagtgcagtt

SEQ ID NO: 356 - DNA, 20 bp, Artificial Sequence
  MKO10000356_A_1700018F24Rik
  gRNA
gtaagatagaaataactgcc

SEQ ID NO: 357 - DNA, 20 bp, Artificial Sequence
  MKO10000357_A_1700019A02Rik
  gRNA
agaagaatccgacatgtttg

SEQ ID NO: 358 - DNA, 20 bp, Artificial Sequence
  MKO10000358_A_1700019A02Rik
  gRNA
tcattgatgcaatactcctg

SEQ ID NO: 359 - DNA, 20 bp, Artificial Sequence
  MKO10000359_A_1700019A02Rik
  gRNA
catctcataaagtatccctc

SEQ ID NO: 360 - DNA, 20 bp, Artificial Sequence
  MKO10000360_A_1700019B03Rik
  gRNA
cacatccaccaggtgaacgt

SEQ ID NO: 361 - DNA, 20 bp, Artificial Sequence
  MKO10000361_A_1700019B03Rik
  gRNA
ctccaggaccaacgttcacc

SEQ ID NO: 362 - DNA, 20 bp, Artificial Sequence
  MKO10000362_A_1700019B03Rik
  gRNA
tgtgtaggtctgcttcacga

SEQ ID NO: 363 - DNA, 20 bp, Artificial Sequence
  MKO10000363_A_1700019D03Rik
  gRNA
gagccctcactctcgatgta

SEQ ID NO: 364 - DNA, 20 bp, Artificial Sequence
  MKO10000364_A_1700019D03Rik
  gRNA
ccttgaattcgcagaccgtc

SEQ ID NO: 365 - DNA, 20 bp, Artificial Sequence
  MKO10000365_A_1700019D03Rik
  gRNA
catcccatacatcgagagtg

SEQ ID NO: 366 - DNA, 20 bp, Artificial Sequence
  MKO10000366_A_1700019G17Rik
  gRNA
tcggatgtgataaaaagcca

SEQ ID NO: 367 - DNA, 20 bp, Artificial Sequence
  MKO10000367_A_1700019G17Rik
  gRNA
gctttcttggagaaattacg

SEQ ID NO: 368 - DNA, 20 bp, Artificial Sequence
  MKO10000368_A_1700019G17Rik
  gRNA
ctgataaatgtttactgcct

SEQ ID NO: 369 - DNA, 20 bp, Artificial Sequence
  MKO10000369_A_1700019L03Rik
  gRNA
accccaggtatcagcggaaa

SEQ ID NO: 370 - DNA, 20 bp, Artificial Sequence
  MKO10000370_A_1700019L03Rik
  gRNA
caaggaatacgtgtacaacc

SEQ ID NO: 371 - DNA, 20 bp, Artificial Sequence
  MKO10000371_A_1700019L03Rik
  gRNA
gttcgaggcccaactggccc

SEQ ID NO: 372 - DNA, 20 bp, Artificial Sequence
  MKO10000372_A_1700019N19Rik
  gRNA
tgctacttaccgcagtatcc

SEQ ID NO: 373 - DNA, 20 bp, Artificial Sequence
  MKO10000373_A_1700019N19Rik
  gRNA
tccctgtgtgaaagcgttcc

SEQ ID NO: 374 - DNA, 20 bp, Artificial Sequence
  MKO10000374_A_1700019N19Rik
  gRNA
ttgccaggaaagctccagcg

SEQ ID NO: 375 - DNA, 20 bp, Artificial Sequence
  MKO10000375_A_1700019O17Rik
  gRNA
tcgcgaccactggtatcgga

SEQ ID NO: 376 - DNA, 20 bp, Artificial Sequence
  MKO10000376_A_1700019O17Rik
  gRNA
ctgcccgatgacgtcccacc

SEQ ID NO: 377 - DNA, 20 bp, Artificial Sequence
  MKO10000377_A_1700019O17Rik
  gRNA
ccgttcagctatgcgctacc

SEQ ID NO: 378 - DNA, 20 bp, Artificial Sequence
  MKO10000378_A_1700020A23Rik
  gRNA
agcgagtcatgtgccccccc

SEQ ID NO: 379 - DNA, 20 bp, Artificial Sequence
  MKO10000379_A_1700020A23Rik
  gRNA
gtggcacttacccatagagc

SEQ ID NO: 380 - DNA, 20 bp, Artificial Sequence
  MKO10000380_A_1700020A23Rik
  gRNA
aagtctgtgtcgtggcaggt

SEQ ID NO: 381 - DNA, 20 bp, Artificial Sequence
  MKO10000381_A_1700020D05Rik
  gRNA
cccgtcgccaagctttcgtc

SEQ ID NO: 382 - DNA, 20 bp, Artificial Sequence
  MKO10000382_A_1700020D05Rik
  gRNA
acctgacgaaagcttggcga

SEQ ID NO: 383 - DNA, 20 bp, Artificial Sequence
  MKO10000383_A_1700020D05Rik
  gRNA
gcttgtacccgaacacgtag

SEQ ID NO: 384 - DNA, 20 bp, Artificial Sequence
  MKO10000384_A_1700020L24Rik
  gRNA
ttccaccgacgacgaagacg

SEQ ID NO: 385 - DNA, 20 bp, Artificial Sequence
  MKO10000385_A_1700020L24Rik
  gRNA
gcctggcggccccggcagac

SEQ ID NO: 386 - DNA, 20 bp, Artificial Sequence
  MKO10000386_A_1700020L24Rik
  gRNA
cgccgcgtctccaacacgca

SEQ ID NO: 387 - DNA, 20 bp, Artificial Sequence
  MKO10000387_A_1700020N15Rik
  gRNA
gaaattcaaatataaagtca

SEQ ID NO: 388 - DNA, 20 bp, Artificial Sequence
  MKO10000388_A_1700020N15Rik
  gRNA
tctcattcttcttcacagct

SEQ ID NO: 389 - DNA, 20 bp, Artificial Sequence
  MKO10000389_A_1700020N15Rik
  gRNA
gctgtccagctcatagcttg

SEQ ID NO: 390 - DNA, 20 bp, Artificial Sequence
  MKO10000390_A_1700021F05Rik
  gRNA
tccatcggcgcaacaccacc

SEQ ID NO: 391 - DNA, 20 bp, Artificial Sequence
  MKO10000391_A_1700021F05Rik
  gRNA
tcttcaggatgacgtcgtac

SEQ ID NO: 392 - DNA, 20 bp, Artificial Sequence
  MKO10000392_A_1700021F05Rik
  gRNA
agacgaagaggactccgacg

SEQ ID NO: 393 - DNA, 20 bp, Artificial Sequence
  MKO10000393_A_1700021F07Rik
  gRNA
gcttcatcggatggcgatcc

SEQ ID NO: 394 - DNA, 20 bp, Artificial Sequence
  MKO10000394_A_1700021F07Rik
  gRNA
atcgccatccgatgaagccc

SEQ ID NO: 395 - DNA, 20 bp, Artificial Sequence
  MKO10000395_A_1700021F07Rik
  gRNA
gctgagcggtttctgcgcca

SEQ ID NO: 396 - DNA, 20 bp, Artificial Sequence
  MKO10000396_A_1700021K19Rik
  gRNA
tatagtccggatgcgtccgg

SEQ ID NO: 397 - DNA, 20 bp, Artificial Sequence
  MKO10000397_A_1700021K19Rik
  gRNA
gggtaatttgaagacgactg

SEQ ID NO: 398 - DNA, 20 bp, Artificial Sequence
  MKO10000398_A_1700021K19Rik
  gRNA
ttggcaggtgtgttgccgcc

SEQ ID NO: 399 - DNA, 20 bp, Artificial Sequence
  MKO10000399_A_1700022I11Rik
  gRNA
ccagtgcaactgtacgccta

SEQ ID NO: 400 - DNA, 20 bp, Artificial Sequence
  MKO10000400_A_1700022I11Rik
  gRNA
ttatctgacgttgagcctgc

SEQ ID NO: 401 - DNA, 20 bp, Artificial Sequence
  MKO10000401_A_1700022I11Rik
  gRNA
ggccatactagtcttgttca

SEQ ID NO: 402 - DNA, 20 bp, Artificial Sequence
  MKO10000402_A_1700022P22Rik
  gRNA
gaagcgcgagtcctactgcc

SEQ ID NO: 403 - DNA, 20 bp, Artificial Sequence
  MKO10000403_A_1700022P22Rik
  gRNA
aatctgttcccgaaagtacc

SEQ ID NO: 404 - DNA, 20 bp, Artificial Sequence
  MKO10000404_A_1700022P22Rik
  gRNA
agatatacttcatccaaata

SEQ ID NO: 405 - DNA, 20 bp, Artificial Sequence
  MKO10000405_A_1700023E05Rik
  gRNA
tcgttaacaggaggctgttt

SEQ ID NO: 406 - DNA, 20 bp, Artificial Sequence
  MKO10000406_A_1700023E05Rik
  gRNA
cccgacattatgtccctaac

SEQ ID NO: 407 - DNA, 20 bp, Artificial Sequence
  MKO10000407_A_1700023E05Rik
  gRNA
ggccagcttctggatccgtt

SEQ ID NO: 408 - DNA, 20 bp, Artificial Sequence
  MKO10000408_A_1700023F06Rik
  gRNA
gaaaattgccctgcgcaacg

SEQ ID NO: 409 - DNA, 20 bp, Artificial Sequence
  MKO10000409_A_1700023F06Rik
  gRNA
ccttgaatgcatctcgtgtg

SEQ ID NO: 410 - DNA, 20 bp, Artificial Sequence
  MKO10000410_A_1700023F06Rik
  gRNA
ggccggatgacaggtctcaa

SEQ ID NO: 411 - DNA, 20 bp, Artificial Sequence
  MKO10000411_A_1700024G13Rik
  gRNA
gcaccgcacctaccgactgc

SEQ ID NO: 412 - DNA, 20 bp, Artificial Sequence
  MKO10000412_A_1700024G13Rik
  gRNA
gctgtagggcccatagcgca

SEQ ID NO: 413 - DNA, 20 bp, Artificial Sequence
  MKO10000413_A_1700024G13Rik
  gRNA
ggcatttagcacagcgatcc

SEQ ID NO: 414 - DNA, 20 bp, Artificial Sequence
  MKO10000414_A_1700024P04Rik
  gRNA
acgttgctctagcatcaatt

SEQ ID NO: 415 - DNA, 20 bp, Artificial Sequence
  MKO10000415_A_1700024P04Rik
  gRNA
catcttcgaacgcattgcta

SEQ ID NO: 416 - DNA, 20 bp, Artificial Sequence
  MKO10000416_A_1700024P04Rik
  gRNA
gcaagcgtagccagcttctt

SEQ ID NO: 417 - DNA, 20 bp, Artificial Sequence
  MKO10000417_A_1700024P16Rik
  gRNA
tgctttcgagacacgccagc

SEQ ID NO: 418 - DNA, 20 bp, Artificial Sequence
  MKO10000418_A_1700024P16Rik
  gRNA
atttcgtatctgagacactc

SEQ ID NO: 419 - DNA, 20 bp, Artificial Sequence
  MKO10000419_A_1700024P16Rik
  gRNA
tcttaatcccgccattggta

SEQ ID NO: 420 - DNA, 20 bp, Artificial Sequence
  MKO10000420_A_1700025F22Rik
  gRNA
agcatcttcgcaacactagt

SEQ ID NO: 421 - DNA, 20 bp, Artificial Sequence
  MKO10000421_A_1700025F22Rik
  gRNA
tgcttccagtttagcctatc

SEQ ID NO: 422 - DNA, 20 bp, Artificial Sequence
  MKO10000422_A_1700025F22Rik
  gRNA
ctagtgttgcgaagatgctt

SEQ ID NO: 423 - DNA, 20 bp, Artificial Sequence
  MKO10000423_A_1700025G04Rik
  gRNA
aaagtgccagctcgaacaca

SEQ ID NO: 424 - DNA, 20 bp, Artificial Sequence
  MKO10000424_A_1700025G04Rik
  gRNA
tttaagccttgtgttcgagc

SEQ ID NO: 425 - DNA, 20 bp, Artificial Sequence
  MKO10000425_A_1700025G04Rik
  gRNA
tgagtataggatcaaacccg

SEQ ID NO: 426 - DNA, 20 bp, Artificial Sequence
  MKO10000426_A_1700026D08Rik
  gRNA
cggcgcaaacagctgcgaaa

SEQ ID NO: 427 - DNA, 20 bp, Artificial Sequence
  MKO10000427_A_1700026D08Rik
  gRNA
tgatcactttatcgccatag

SEQ ID NO: 428 - DNA, 20 bp, Artificial Sequence
  MKO10000428_A_1700026D08Rik
  gRNA
tgtgcagaccatcgccccga

SEQ ID NO: 429 - DNA, 20 bp, Artificial Sequence
  MKO10000429_A_1700026L06Rik
  gRNA
aggcatcacctgctcgatac

SEQ ID NO: 430 - DNA, 20 bp, Artificial Sequence
  MKO10000430_A_1700026L06Rik
  gRNA
ctgcaggtatccgcacgaag

SEQ ID NO: 431 - DNA, 20 bp, Artificial Sequence
  MKO10000431_A_1700026L06Rik
  gRNA
ggctgaccacgcctccatag

SEQ ID NO: 432 - DNA, 20 bp, Artificial Sequence
  MKO10000432_A_1700028K03Rik
  gRNA
atggcaatggatgagcgtag

SEQ ID NO: 433 - DNA, 20 bp, Artificial Sequence
  MKO10000433_A_1700028K03Rik
  gRNA
ccttatgtgcactatagcca

SEQ ID NO: 434 - DNA, 20 bp, Artificial Sequence
  MKO10000434_A_1700028K03Rik
  gRNA
tatcagaataccgaaccttg

SEQ ID NO: 435 - DNA, 20 bp, Artificial Sequence
  MKO10000435_A_1700028P14Rik
  gRNA
atgtcaacatacaagcgatt

SEQ ID NO: 436 - DNA, 20 bp, Artificial Sequence
  MKO10000436_A_1700028P14Rik
  gRNA
ggtggtggatattcatactg

SEQ ID NO: 437 - DNA, 20 bp, Artificial Sequence
  MKO10000437_A_1700028P14Rik
  gRNA
agattatgatatagagagtc

SEQ ID NO: 438 - DNA, 20 bp, Artificial Sequence
  MKO10000438_A_1700029F12Rik
  gRNA
gttggccgtccatgtgacat

SEQ ID NO: 439 - DNA, 20 bp, Artificial Sequence
  MKO10000439_A_1700029F12Rik
  gRNA
gtagccactgctatactgcg

SEQ ID NO: 440 - DNA, 20 bp, Artificial Sequence
  MKO10000440_A_1700029F12Rik
  gRNA
acttggtaaacattagcatc

SEQ ID NO: 441 - DNA, 20 bp, Artificial Sequence
  MKO10000441_A_1700029H14Rik
  gRNA
agaaggaccccgccgcgcac

SEQ ID NO: 442 - DNA, 20 bp, Artificial Sequence
  MKO10000442_A_1700029H14Rik
  gRNA
ctccagtcgggtgagcctag

SEQ ID NO: 443 - DNA, 20 bp, Artificial Sequence
  MKO10000443_A_1700029H14Rik
  gRNA
acgatgtatctctgcggctg

SEQ ID NO: 444 - DNA, 20 bp, Artificial Sequence
  MKO10000444_A_1700029I15Rik
  gRNA
cccagcagcgcaagcgggac

SEQ ID NO: 445 - DNA, 20 bp, Artificial Sequence
  MKO10000445_A_1700029I15Rik
  gRNA
acaatggttctcgccatgct

SEQ ID NO: 446 - DNA, 20 bp, Artificial Sequence
  MKO10000446_A_1700029I15Rik
  gRNA
ggagtgcgcctgccaagatg

SEQ ID NO: 447 - DNA, 20 bp, Artificial Sequence
  MKO10000447_A_1700029J07Rik
  gRNA
gtgaccctttgattagtcga

SEQ ID NO: 448 - DNA, 20 bp, Artificial Sequence
  MKO10000448_A_1700029J07Rik
  gRNA
cgcagcgagacagagttata

SEQ ID NO: 449 - DNA, 20 bp, Artificial Sequence
  MKO10000449_A_1700029J07Rik
  gRNA
tttctttggttccccccggt

SEQ ID NO: 450 - DNA, 20 bp, Artificial Sequence
  MKO10000450_A_1700029P11Rik
  gRNA
tcgtcgtaaccatggaagtg

SEQ ID NO: 451 - DNA, 20 bp, Artificial Sequence
  MKO10000451_A_1700029P11Rik
  gRNA
ccggtccgctgcggcccgaa

SEQ ID NO: 452 - DNA, 20 bp, Artificial Sequence
  MKO10000452_A_1700029P11Rik
  gRNA
ttacgacgacgacccgaagg

SEQ ID NO: 453 - DNA, 20 bp, Artificial Sequence
  MKO10000453_A_1700030F18Rik
  gRNA
ccgctgaagtttggtaaatc

SEQ ID NO: 454 - DNA, 20 bp, Artificial Sequence
  MKO10000454_A_1700030F18Rik
  gRNA
atttaccaaacttcagcggc

SEQ ID NO: 455 - DNA, 20 bp, Artificial Sequence
  MKO10000455_A_1700030F18Rik
  gRNA
agacaggtcagcgttccaca

SEQ ID NO: 456 - DNA, 20 bp, Artificial Sequence
  MKO10000456_A_1700030J22Rik
  gRNA
tgcattcccaccgacgtgca

SEQ ID NO: 457 - DNA, 20 bp, Artificial Sequence
  MKO10000457_A_1700030J22Rik
  gRNA
ggcaaggtagtggatgtcgc

SEQ ID NO: 458 - DNA, 20 bp, Artificial Sequence
  MKO10000458_A_1700030J22Rik
  gRNA
ggcaccaactttacattgtc

SEQ ID NO: 459 - DNA, 20 bp, Artificial Sequence
  MKO10000459_A_1700030K09Rik
  gRNA
cccatacagtcgactcgcgt

SEQ ID NO: 460 - DNA, 20 bp, Artificial Sequence
  MKO10000460_A_1700030K09Rik
  gRNA
aacgatatctgtctgaccac

SEQ ID NO: 461 - DNA, 20 bp, Artificial Sequence
  MKO10000461_A_1700030K09Rik
  gRNA
gccaacgcgagtcgactgta

SEQ ID NO: 462 - DNA, 20 bp, Artificial Sequence
  MKO10000462_A_1700031F05Rik
  gRNA
gggcccagtcgtctccaccc

SEQ ID NO: 463 - DNA, 20 bp, Artificial Sequence
  MKO10000463_A_1700031F05Rik
  gRNA
cactgccgcccctgtcaagc

SEQ ID NO: 464 - DNA, 20 bp, Artificial Sequence
  MKO10000464_A_1700031F05Rik
  gRNA
cctggttgaacgtgttattc

SEQ ID NO: 465 - DNA, 20 bp, Artificial Sequence
  MKO10000465_A_1700034E13Rik
  gRNA
ggtccgcccacaaacgttac

SEQ ID NO: 466 - DNA, 20 bp, Artificial Sequence
  MKO10000466_A_1700034E13Rik
  gRNA
acgccttaaacgaagctgct

SEQ ID NO: 467 - DNA, 20 bp, Artificial Sequence
  MKO10000467_A_1700034E13Rik
  gRNA
ctcatgaatgctaatagatt

SEQ ID NO: 468 - DNA, 20 bp, Artificial Sequence
  MKO10000468_A_1700034F02Rik
  gRNA
acactcactttgcttcgagt

SEQ ID NO: 469 - DNA, 20 bp, Artificial Sequence
  MKO10000469_A_1700034F02Rik
  gRNA
aacattcataccgaaactgc

SEQ ID NO: 470 - DNA, 20 bp, Artificial Sequence
  MKO10000470_A_1700034F02Rik
  gRNA
taaactaccgtagatagctt

SEQ ID NO: 471 - DNA, 20 bp, Artificial Sequence
  MKO10000471_A_1700034J05Rik
  gRNA
ggacacaaatcttctcccga

SEQ ID NO: 472 - DNA, 20 bp, Artificial Sequence
  MKO10000472_A_1700034J05Rik
  gRNA
gttactgaaagacgaagttg

SEQ ID NO: 473 - DNA, 20 bp, Artificial Sequence
  MKO10000473_A_1700034J05Rik
  gRNA
agagtccacatcgatatccc

SEQ ID NO: 474 - DNA, 20 bp, Artificial Sequence
  MKO10000474_A_1700034O15Rik
  gRNA
ggtcctggagagttattgcc

SEQ ID NO: 475 - DNA, 20 bp, Artificial Sequence
  MKO10000475_A_1700034O15Rik
  gRNA
gcaagaagacacgatctccc

SEQ ID NO: 476 - DNA, 20 bp, Artificial Sequence
  MKO10000476_A_1700034O15Rik
  gRNA
gaggagacccatgacttctc

SEQ ID NO: 477 - DNA, 20 bp, Artificial Sequence
  MKO10000477_A_1700037C18Rik
  gRNA
acttccgactgcgacacctc

SEQ ID NO: 478 - DNA, 20 bp, Artificial Sequence
  MKO10000478_A_1700037C18Rik
  gRNA
ttgtgcaagagaacccgctc

SEQ ID NO: 479 - DNA, 20 bp, Artificial Sequence
  MKO10000479_A_1700037C18Rik
  gRNA
gtgtcgcagtcggaagttct

SEQ ID NO: 480 - DNA, 20 bp, Artificial Sequence
  MKO10000480_A_1700037H04Rik
  gRNA
gattggctcggcttcgactg

SEQ ID NO: 481 - DNA, 20 bp, Artificial Sequence
  MKO10000481_A_1700037H04Rik
  gRNA
ctgctgcaaagcggatactt

SEQ ID NO: 482 - DNA, 20 bp, Artificial Sequence
  MKO10000482_A_1700037H04Rik
  gRNA
cgaagtatccgctttgcagc

SEQ ID NO: 483 - DNA, 20 bp, Artificial Sequence
  MKO10000483_A_1700039E15Rik
  gRNA
gcaacgtcacgtagctccac

SEQ ID NO: 484 - DNA, 20 bp, Artificial Sequence
  MKO10000484_A_1700039E15Rik
  gRNA
ggaccaggaggtcatcgaac

SEQ ID NO: 485 - DNA, 20 bp, Artificial Sequence
  MKO10000485_A_1700039E15Rik
  gRNA
ataccacgtagctgccaggg

SEQ ID NO: 486 - DNA, 20 bp, Artificial Sequence
  MKO10000486_A_1700040L02Rik
  gRNA
actcgtagagcctgtagtgc

SEQ ID NO: 487 - DNA, 20 bp, Artificial Sequence
  MKO10000487_A_1700040L02Rik
  gRNA
cctgcgtgacgccatcctct

SEQ ID NO: 488 - DNA, 20 bp, Artificial Sequence
  MKO10000488_A_1700040L02Rik
  gRNA
tggcgtcacgcaggcaagtc

SEQ ID NO: 489 - DNA, 20 bp, Artificial Sequence
  MKO10000489_A_1700042B14Rik
  gRNA
tcctcgaatatacaaaggaa

SEQ ID NO: 490 - DNA, 20 bp, Artificial Sequence
  MKO10000490_A_1700042B14Rik
  gRNA
ctatgtttaaatttgaagaa

SEQ ID NO: 491 - DNA, 20 bp, Artificial Sequence
  MKO10000491_A_1700042B14Rik
  gRNA
atgccgttgaaaaagtgcca

SEQ ID NO: 492 - DNA, 20 bp, Artificial Sequence
  MKO10000492_A_1700042G07Rik
  gRNA
gtatgttcaagtgtagccgc

SEQ ID NO: 493 - DNA, 20 bp, Artificial Sequence
  MKO10000493_A_1700042G07Rik
  gRNA
acataccggcagaaaccccg

SEQ ID NO: 494 - DNA, 20 bp, Artificial Sequence
  MKO10000494_A_1700042G07Rik
  gRNA
ctcagatttctctgtcaacc

SEQ ID NO: 495 - DNA, 20 bp, Artificial Sequence
  MKO10000495_A_1700047I17Rik2
  gRNA
caagcataccgggtcgacag

SEQ ID NO: 496 - DNA, 20 bp, Artificial Sequence
  MKO10000496_A_1700047I17Rik2
  gRNA
ctatagataagtaatgaaag

SEQ ID NO: 497 - DNA, 20 bp, Artificial Sequence
  MKO10000497_A_1700047I17Rik2
  gRNA
agtacctgagagggttgatg

SEQ ID NO: 498 - DNA, 20 bp, Artificial Sequence
  MKO10000498_A_1700049G17Rik
  gRNA
aagtagaattcttgatctcg

SEQ ID NO: 499 - DNA, 20 bp, Artificial Sequence
  MKO10000499_A_1700049G17Rik
  gRNA
gctcaagcctattgcaccat

SEQ ID NO: 500 - DNA, 20 bp, Artificial Sequence
  MKO10000500_A_1700049G17Rik
  gRNA
agagccctggatggctgtga

SEQ ID NO: 501 - DNA, 20 bp, Artificial Sequence
  MKO10000501_A_1700052N19Rik
  gRNA
ggagaacttcttcgagtcgc

SEQ ID NO: 502 - DNA, 20 bp, Artificial Sequence
  MKO10000502_A_1700052N19Rik
  gRNA
tgcagttcagcgtataagtc

SEQ ID NO: 503 - DNA, 20 bp, Artificial Sequence
  MKO10000503_A_1700052N19Rik
  gRNA
ctttgcatatcttacgatta

SEQ ID NO: 504 - DNA, 20 bp, Artificial Sequence
  MKO10000504_A_1700054O13Rik
  gRNA
aacgaccgcgaaccctctcg

SEQ ID NO: 505 - DNA, 20 bp, Artificial Sequence
  MKO10000505_A_1700054O13Rik
  gRNA
cgcattcttgaagcctcgag

SEQ ID NO: 506 - DNA, 20 bp, Artificial Sequence
  MKO10000506_A_1700054O13Rik
  gRNA
ttacctcaccgactacatcc

SEQ ID NO: 507 - DNA, 20 bp, Artificial Sequence
  MKO10000507_A_1700055N04Rik
  gRNA
caaacagcttcatgacgccc

SEQ ID NO: 508 - DNA, 20 bp, Artificial Sequence
  MKO10000508_A_1700055N04Rik
  gRNA
agacaaagacggctaagttc

SEQ ID NO: 509 - DNA, 20 bp, Artificial Sequence
  MKO10000509_A_1700055N04Rik
  gRNA
agctgagcacagctttcatc

SEQ ID NO: 510 - DNA, 20 bp, Artificial Sequence
  MKO10000510_A_1700056E22Rik
  gRNA
cccgactccgatcccgaagg

SEQ ID NO: 511 - DNA, 20 bp, Artificial Sequence
  MKO10000511_A_1700056E22Rik
  gRNA
gccgccttcgggatcggagt

SEQ ID NO: 512 - DNA, 20 bp, Artificial Sequence
  MKO10000512_A_1700056E22Rik
  gRNA
tgccctactgctctcccgcg

SEQ ID NO: 513 - DNA, 20 bp, Artificial Sequence
  MKO10000513_A_1700057G04Rik
  gRNA
ccaatctgcgtgtgcaacat

SEQ ID NO: 514 - DNA, 20 bp, Artificial Sequence
  MKO10000514_A_1700057G04Rik
  gRNA
ccgccttcatctttacatcg

SEQ ID NO: 515 - DNA, 20 bp, Artificial Sequence
  MKO10000515_A_1700057G04Rik
  gRNA
caacaacaatcacatcgtag

SEQ ID NO: 516 - DNA, 20 bp, Artificial Sequence
  MKO10000516_A_1700061G19Rik
  gRNA
ggcctcgtagtactcgatgt

SEQ ID NO: 517 - DNA, 20 bp, Artificial Sequence
  MKO10000517_A_1700061G19Rik
  gRNA
tcccgacttgatcatgagcg

SEQ ID NO: 518 - DNA, 20 bp, Artificial Sequence
  MKO10000518_A_1700061G19Rik
  gRNA
gtgggtctggaacgctttca

SEQ ID NO: 519 - DNA, 20 bp, Artificial Sequence
  MKO10000519_A_1700065D16Rik
  gRNA
cgtcgccagcttcgagtcgc

SEQ ID NO: 520 - DNA, 20 bp, Artificial Sequence
  MKO10000520_A_1700065D16Rik
  gRNA
aagccgctctcggttgcggt

SEQ ID NO: 521 - DNA, 20 bp, Artificial Sequence
  MKO10000521_A_1700065D16Rik
  gRNA
cagagaccaaagcgacaggc

SEQ ID NO: 522 - DNA, 20 bp, Artificial Sequence
  MKO10000522_A_1700065I17Rik
  gRNA
gggacgatattcacttgccc

SEQ ID NO: 523 - DNA, 20 bp, Artificial Sequence
  MKO10000523_A_1700065I17Rik
  gRNA
cgacccgttacgtcatgcct

SEQ ID NO: 524 - DNA, 20 bp, Artificial Sequence
  MKO10000524_A_1700065I17Rik
  gRNA
gtcgtcgtcgagtttgggta

SEQ ID NO: 525 - DNA, 20 bp, Artificial Sequence
  MKO10000525_A_1700066B19Rik
  gRNA
cagcccgtcgccacctcgag

SEQ ID NO: 526 - DNA, 20 bp, Artificial Sequence
  MKO10000526_A_1700066B19Rik
  gRNA
gtagactcagtagccgccag

SEQ ID NO: 527 - DNA, 20 bp, Artificial Sequence
  MKO10000527_A_1700066B19Rik
  gRNA
ctcccagatatgccccctcg

SEQ ID NO: 528 - DNA, 20 bp, Artificial Sequence
  MKO10000528_A_1700066M21Rik
  gRNA
cgcgttacctgcacgtcccc

SEQ ID NO: 529 - DNA, 20 bp, Artificial Sequence
  MKO10000529_A_1700066M21Rik
  gRNA
cagacgccgcgaccccagca

SEQ ID NO: 530 - DNA, 20 bp, Artificial Sequence
  MKO10000530_A_1700066M21Rik
  gRNA
tctaatccttctactagtaa

SEQ ID NO: 531 - DNA, 20 bp, Artificial Sequence
  MKO10000531_A_1700067K01Rik
  gRNA
cctgcaggagttggtccgga

SEQ ID NO: 532 - DNA, 20 bp, Artificial Sequence
  MKO10000532_A_1700067K01Rik
  gRNA
taggggcatccatcggccaa

SEQ ID NO: 533 - DNA, 20 bp, Artificial Sequence
  MKO10000533_A_1700067K01Rik
  gRNA
cagaggatgatcttgactcg

SEQ ID NO: 534 - DNA, 20 bp, Artificial Sequence
  MKO10000534_A_1700067P10Rik
  gRNA
acacgctcataggcaccagc

SEQ ID NO: 535 - DNA, 20 bp, Artificial Sequence
  MKO10000535_A_1700067P10Rik
  gRNA
gatcccgccaagataacagc

SEQ ID NO: 536 - DNA, 20 bp, Artificial Sequence
  MKO10000536_A_1700067P10Rik
  gRNA
gatcatgtccttgggaaaga

SEQ ID NO: 537 - DNA, 20 bp, Artificial Sequence
  MKO10000537_A_1700071K01Rik
  gRNA
tcttcacatgaattccccta

SEQ ID NO: 538 - DNA, 20 bp, Artificial Sequence
  MKO10000538_A_1700071K01Rik
  gRNA
gagctctgctttatataacg

SEQ ID NO: 539 - DNA, 20 bp, Artificial Sequence
  MKO10000539_A_1700071K01Rik
  gRNA
atgggctgattggccggaga

SEQ ID NO: 540 - DNA, 20 bp, Artificial Sequence
  MKO10000540_A_1700074P13Rik
  gRNA
gggtgcatggaatattgtcc

SEQ ID NO: 541 - DNA, 20 bp, Artificial Sequence
  MKO10000541_A_1700074P13Rik
  gRNA
cccaagaactaaaatccgac

SEQ ID NO: 542 - DNA, 20 bp, Artificial Sequence
  MKO10000542_A_1700074P13Rik
  gRNA
gactctcattgaccctcagt

SEQ ID NO: 543 - DNA, 20 bp, Artificial Sequence
  MKO10000543_A_1700080E11Rik
  gRNA
atgctgtatgcgcccgatcc

SEQ ID NO: 544 - DNA, 20 bp, Artificial Sequence
  MKO10000544_A_1700080E11Rik
  gRNA
cagtcgcccatcaaagcgca

SEQ ID NO: 545 - DNA, 20 bp, Artificial Sequence
  MKO10000545_A_1700080E11Rik
  gRNA
cgatcgtccacaaaaccacc

SEQ ID NO: 546 - DNA, 20 bp, Artificial Sequence
  MKO10000546_A_1700080O16Rik
  gRNA
tttcgaggcgtaccaaagat

SEQ ID NO: 547 - DNA, 20 bp, Artificial Sequence
  MKO10000547_A_1700080O16Rik
  gRNA
gggatcctgtttaacgatgc

SEQ ID NO: 548 - DNA, 20 bp, Artificial Sequence
  MKO10000548_A_1700080O16Rik
  gRNA
acgccacaactcctgctcgc

SEQ ID NO: 549 - DNA, 20 bp, Artificial Sequence
  MKO10000549_A_1700084C01Rik
  gRNA
atcacgtgaaatcgctagcc

SEQ ID NO: 550 - DNA, 20 bp, Artificial Sequence
  MKO10000550_A_1700084C01Rik
  gRNA
ctagcgatttcacgtgatag

SEQ ID NO: 551 - DNA, 20 bp, Artificial Sequence
  MKO10000551_A_1700084C01Rik
  gRNA
cagtcccggagcctaaaatt

SEQ ID NO: 552 - DNA, 20 bp, Artificial Sequence
  MKO10000552_A_1700088E04Rik
  gRNA
ttcacgactgtacgccccat

SEQ ID NO: 553 - DNA, 20 bp, Artificial Sequence
  MKO10000553_A_1700088E04Rik
  gRNA
ctgggtcttcttgccgcacg

SEQ ID NO: 554 - DNA, 20 bp, Artificial Sequence
  MKO10000554_A_1700088E04Rik
  gRNA
gcagtaccgcagcatcatcc

SEQ ID NO: 555 - DNA, 20 bp, Artificial Sequence
  MKO10000555_A_1700092M07Rik
  gRNA
ggctatccatgttcagccgt

SEQ ID NO: 556 - DNA, 20 bp, Artificial Sequence
  MKO10000556_A_1700092M07Rik
  gRNA
gtcctgcttgcctgaccgcg

SEQ ID NO: 557 - DNA, 20 bp, Artificial Sequence
  MKO10000557_A_1700092M07Rik
  gRNA
cggggccatgggctgctgtc

SEQ ID NO: 558 - DNA, 20 bp, Artificial Sequence
  MKO10000558_A_1700093K21Rik
  gRNA
tgttctcgagcatagcttcg

SEQ ID NO: 559 - DNA, 20 bp, Artificial Sequence
  MKO10000559_A_1700093K21Rik
  gRNA
cgcagccttcgcctgtacag

SEQ ID NO: 560 - DNA, 20 bp, Artificial Sequence
  MKO10000560_A_1700093K21Rik
  gRNA
aagctatgctcgagaacata

SEQ ID NO: 561 - DNA, 20 bp, Artificial Sequence
  MKO10000561_A_1700094D03Rik
  gRNA
cacttaagaagactgtcgac

SEQ ID NO: 562 - DNA, 20 bp, Artificial Sequence
  MKO10000562_A_1700094D03Rik
  gRNA
cagcaaataggtttctccgt

SEQ ID NO: 563 - DNA, 20 bp, Artificial Sequence
  MKO10000563_A_1700094D03Rik
  gRNA
gtctaacaaacagctactag

SEQ ID NO: 564 - DNA, 20 bp, Artificial Sequence
  MKO10000564_A_1700101E01Rik
  gRNA
aactatattgccatgaaccg

SEQ ID NO: 565 - DNA, 20 bp, Artificial Sequence
  MKO10000565_A_1700101E01Rik
  gRNA
tatagttccgggtcagctcg

SEQ ID NO: 566 - DNA, 20 bp, Artificial Sequence
  MKO10000566_A_1700101E01Rik
  gRNA
gtacaagcctccggtgaagc

SEQ ID NO: 567 - DNA, 20 bp, Artificial Sequence
  MKO10000567_A_1700102P08Rik
  gRNA
atatggtgtgtcccgaaggc

SEQ ID NO: 568 - DNA, 20 bp, Artificial Sequence
  MKO10000568_A_1700102P08Rik
  gRNA
tatccgaactattgaagaat

SEQ ID NO: 569 - DNA, 20 bp, Artificial Sequence
  MKO10000569_A_1700102P08Rik
  gRNA
cttcgggacacaccatattc

SEQ ID NO: 570 - DNA, 20 bp, Artificial Sequence
  MKO10000570_A_1700106J16Rik
  gRNA
ccgaggcatcgtccgcaaca

SEQ ID NO: 571 - DNA, 20 bp, Artificial Sequence
  MKO10000571_A_1700106J16Rik
  gRNA
actgaaggccatccgttact

SEQ ID NO: 572 - DNA, 20 bp, Artificial Sequence
  MKO10000572_A_1700106J16Rik
  gRNA
ccaacatgttctccaaccgc

SEQ ID NO: 573 - DNA, 20 bp, Artificial Sequence
  MKO10000573_A_1700109H08Rik
  gRNA
ctggactgcaacacatttcg

SEQ ID NO: 574 - DNA, 20 bp, Artificial Sequence
  MKO10000574_A_1700109H08Rik
  gRNA
tgtaagtccacctttgcatc

SEQ ID NO: 575 - DNA, 20 bp, Artificial Sequence
  MKO10000575_A_1700109H08Rik
  gRNA
tcattccgaatatgttctgc

SEQ ID NO: 576 - DNA, 20 bp, Artificial Sequence
  MKO10000576_A_1700110M21Rik
  gRNA
acccggccatgccccagtcg

SEQ ID NO: 577 - DNA, 20 bp, Artificial Sequence
  MKO10000577_A_1700110M21Rik
  gRNA
tcagtccccttcccgccttc

SEQ ID NO: 578 - DNA, 20 bp, Artificial Sequence
  MKO10000578_A_1700110M21Rik
  gRNA
tttgagtccgaagagaagtg

SEQ ID NO: 579 - DNA, 20 bp, Artificial Sequence
  MKO10000579_A_1700112E06Rik
  gRNA
aatttgcaggtgtcctacgt

SEQ ID NO: 580 - DNA, 20 bp, Artificial Sequence
  MKO10000580_A_1700112E06Rik
  gRNA
gctgcccaagttgaagtttc

SEQ ID NO: 581 - DNA, 20 bp, Artificial Sequence
  MKO10000581_A_1700112E06Rik
  gRNA
cgtggcatgtcccaatgagc

SEQ ID NO: 582 - DNA, 20 bp, Artificial Sequence
  MKO10000582_A_1700113H08Rik
  gRNA
gcggtaaaaggtctcagcgc

SEQ ID NO: 583 - DNA, 20 bp, Artificial Sequence
  MKO10000583_A_1700113H08Rik
  gRNA
tatctctttccccgcccgtg

SEQ ID NO: 584 - DNA, 20 bp, Artificial Sequence
  MKO10000584_A_1700113H08Rik
  gRNA
gtctgattgggtagtcgtct

SEQ ID NO: 585 - DNA, 20 bp, Artificial Sequence
  MKO10000585_A_1700122O11Rik
  gRNA
ggagggttgataataaccgg

SEQ ID NO: 586 - DNA, 20 bp, Artificial Sequence
  MKO10000586_A_1700122O11Rik
  gRNA
ttcaatctggacgctgatag

SEQ ID NO: 587 - DNA, 20 bp, Artificial Sequence
  MKO10000587_A_1700122O11Rik
  gRNA
atcttccaatgatgagatct

SEQ ID NO: 588 - DNA, 20 bp, Artificial Sequence
  MKO10000588_A_1700123I01Rik
  gRNA
ggaagtcatcgtccaggagc

SEQ ID NO: 589 - DNA, 20 bp, Artificial Sequence
  MKO10000589_A_1700123I01Rik
  gRNA
tcccacctgaagtttaaaca

SEQ ID NO: 590 - DNA, 20 bp, Artificial Sequence
  MKO10000590_A_1700123I01Rik
  gRNA
tttccccatgtttaaacttc

SEQ ID NO: 591 - DNA, 20 bp, Artificial Sequence
  MKO10000591_A_1700123K08Rik
  gRNA
ctcgactcttgtagttgaac

SEQ ID NO: 592 - DNA, 20 bp, Artificial Sequence
  MKO10000592_A_1700123K08Rik
  gRNA
ttcctcaagtttaagtgcga

SEQ ID NO: 593 - DNA, 20 bp, Artificial Sequence
  MKO10000593_A_1700123K08Rik
  gRNA
gtcagttcacggagtacgtg

SEQ ID NO: 594 - DNA, 20 bp, Artificial Sequence
  MKO10000594_A_1700123O20Rik
  gRNA
ccggcactgccttagcgacc

SEQ ID NO: 595 - DNA, 20 bp, Artificial Sequence
  MKO10000595_A_1700123O20Rik
  gRNA
cctgtagaaaacgttcccgc

SEQ ID NO: 596 - DNA, 20 bp, Artificial Sequence
  MKO10000596_A_1700123O20Rik
  gRNA
taaaacttcgccacgaaatc

SEQ ID NO: 597 - DNA, 20 bp, Artificial Sequence
  MKO10000597_A_1700125H20Rik
  gRNA
tgcagcattattgccgagcc

SEQ ID NO: 598 - DNA, 20 bp, Artificial Sequence
  MKO10000598_A_1700125H20Rik
  gRNA
acggaccagagcatctcccg

SEQ ID NO: 599 - DNA, 20 bp, Artificial Sequence
  MKO10000599_A_1700125H20Rik
  gRNA
tgggcaggttcaactttcga

SEQ ID NO: 600 - DNA, 20 bp, Artificial Sequence
  MKO10000600_A_1700129C05Rik
  gRNA
ctccatcccgaaatgttatt

SEQ ID NO: 601 - DNA, 20 bp, Artificial Sequence
  MKO10000601_A_1700129C05Rik
  gRNA
ccccacttaccaaggatgtg

SEQ ID NO: 602 - DNA, 20 bp, Artificial Sequence
  MKO10000602_A_1700129C05Rik
  gRNA
ctagacccagagcttaaaat

SEQ ID NO: 603 - DNA, 20 bp, Artificial Sequence
  MKO10000603_A_1810009A15Rik
  gRNA
gtacgtacgcccgcttcttg

SEQ ID NO: 604 - DNA, 20 bp, Artificial Sequence
  MKO10000604_A_1810009A15Rik
  gRNA
tattaagcagggatcggcga

SEQ ID NO: 605 - DNA, 20 bp, Artificial Sequence
  MKO10000605_A_1810009A15Rik
  gRNA
gagtgtagccatggcacctc

SEQ ID NO: 606 - DNA, 20 bp, Artificial Sequence
  MKO10000606_A_1810009J06Rik
  gRNA
gtacccactgatcactgata

SEQ ID NO: 607 - DNA, 20 bp, Artificial Sequence
  MKO10000607_A_1810009J06Rik
  gRNA
atctctccattgcagacgac

SEQ ID NO: 608 - DNA, 20 bp, Artificial Sequence
  MKO10000608_A_1810009J06Rik
  gRNA
gctcccttatcagtgatcag

SEQ ID NO: 609 - DNA, 20 bp, Artificial Sequence
  MKO10000609_A_1810010H24Rik
  gRNA
gcctattgcgccagcgaatt

SEQ ID NO: 610 - DNA, 20 bp, Artificial Sequence
  MKO10000610_A_1810010H24Rik
  gRNA
agcgcgctcaccgaattcgc

SEQ ID NO: 611 - DNA, 20 bp, Artificial Sequence
  MKO10000611_A_1810010H24Rik
  gRNA
cactgtgcgaaagtccctcg

SEQ ID NO: 612 - DNA, 20 bp, Artificial Sequence
  MKO10000612_A_1810011H11Rik
  gRNA
cattatcagacaagtgtctc

SEQ ID NO: 613 - DNA, 20 bp, Artificial Sequence
  MKO10000613_A_1810011H11Rik
  gRNA
ccttgaagatctgcatgatc

SEQ ID NO: 614 - DNA, 20 bp, Artificial Sequence
  MKO10000614_A_1810011H11Rik
  gRNA
ctacctatctcagtctcagc

SEQ ID NO: 615 - DNA, 20 bp, Artificial Sequence
  MKO10000615_A_1810011O10Rik
  gRNA
cgggcttactcgaagagacg

SEQ ID NO: 616 - DNA, 20 bp, Artificial Sequence
  MKO10000616_A_1810011O10Rik
  gRNA
cgagtaagcccgtccatcca

SEQ ID NO: 617 - DNA, 20 bp, Artificial Sequence
  MKO10000617_A_1810011O10Rik
  gRNA
agccgctcgcaagaaagctg

SEQ ID NO: 618 - DNA, 20 bp, Artificial Sequence
  MKO10000618_A_1810013L24Rik
  gRNA
agcgtgcgttcgagtacccc

SEQ ID NO: 619 - DNA, 20 bp, Artificial Sequence
  MKO10000619_A_1810013L24Rik
  gRNA
tggctatcagcgacgcaata

SEQ ID NO: 620 - DNA, 20 bp, Artificial Sequence
  MKO10000620_A_1810013L24Rik
  gRNA
ggagctctagagtttcgtgg

SEQ ID NO: 621 - DNA, 20 bp, Artificial Sequence
  MKO10000621_A_1810019J16Rik
  gRNA
agcgctcatcgttcgtttcc

SEQ ID NO: 622 - DNA, 20 bp, Artificial Sequence
  MKO10000622_A_1810019J16Rik
  gRNA
cgtgcaccagattgacgagc

SEQ ID NO: 623 - DNA, 20 bp, Artificial Sequence
  MKO10000623_A_1810019J16Rik
  gRNA
caaccgcagatgccatcgcc

SEQ ID NO: 624 - DNA, 20 bp, Artificial Sequence
  MKO10000624_A_1810022K09Rik
  gRNA
ctgagcagccgcgtgaactt

SEQ ID NO: 625 - DNA, 20 bp, Artificial Sequence
  MKO10000625_A_1810022K09Rik
  gRNA
agttactactaatcttaaga

SEQ ID NO: 626 - DNA, 20 bp, Artificial Sequence
  MKO10000626_A_1810022K09Rik
  gRNA
gcttctcaccaaagttcacg

SEQ ID NO: 627 - DNA, 20 bp, Artificial Sequence
  MKO10000627_A_1810024B03Rik
  gRNA
ccaagcgacatatggagtct

SEQ ID NO: 628 - DNA, 20 bp, Artificial Sequence
  MKO10000628_A_1810024B03Rik
  gRNA
tgtcattcacggcgcagcca

SEQ ID NO: 629 - DNA, 20 bp, Artificial Sequence
  MKO10000629_A_1810024B03Rik
  gRNA
aagaagtattggcatacccg

SEQ ID NO: 630 - DNA, 20 bp, Artificial Sequence
  MKO10000630_A_1810026J23Rik
  gRNA
ccccggccggatcctcgacg

SEQ ID NO: 631 - DNA, 20 bp, Artificial Sequence
  MKO10000631_A_1810026J23Rik
  gRNA
aggccttgctggacgcatcg

SEQ ID NO: 632 - DNA, 20 bp, Artificial Sequence
  MKO10000632_A_1810026J23Rik
  gRNA
cttaagagattctggtccgg

SEQ ID NO: 633 - DNA, 20 bp, Artificial Sequence
  MKO10000633_A_1810030O07Rik
  gRNA
ctataggccttcatgccccg

SEQ ID NO: 634 - DNA, 20 bp, Artificial Sequence
  MKO10000634_A_1810030O07Rik
  gRNA
gcaattctatttcaatttcg

SEQ ID NO: 635 - DNA, 20 bp, Artificial Sequence
  MKO10000635_A_1810030O07Rik
  gRNA
tctgcgcatacctgacactg

SEQ ID NO: 636 - DNA, 20 bp, Artificial Sequence
  MKO10000636_A_1810033B17Rik
  gRNA
tgactacgagaatataacct

SEQ ID NO: 637 - DNA, 20 bp, Artificial Sequence
  MKO10000637_A_1810033B17Rik
  gRNA
aaggttatattctcgtagtc

SEQ ID NO: 638 - DNA, 20 bp, Artificial Sequence
  MKO10000638_A_1810033B17Rik
  gRNA
cgaccggctgaagactgtgc

SEQ ID NO: 639 - DNA, 20 bp, Artificial Sequence
  MKO10000639_A_1810037I17Rik
  gRNA
aggatactcaccagggcaag

SEQ ID NO: 640 - DNA, 20 bp, Artificial Sequence
  MKO10000640_A_1810037I17Rik
  gRNA
cgtcggtaccagacgccgcc

SEQ ID NO: 641 - DNA, 20 bp, Artificial Sequence
  MKO10000641_A_1810037I17Rik
  gRNA
tcttcgtgtacctcttgccc

SEQ ID NO: 642 - DNA, 20 bp, Artificial Sequence
  MKO10000642_A_1810041L15Rik
  gRNA
agaatactgcgagcacgttc

SEQ ID NO: 643 - DNA, 20 bp, Artificial Sequence
  MKO10000643_A_1810041L15Rik
  gRNA
cttaccaggcggatgagctc

SEQ ID NO: 644 - DNA, 20 bp, Artificial Sequence
  MKO10000644_A_1810041L15Rik
  gRNA
cagcaactacacggcgcttc

SEQ ID NO: 645 - DNA, 20 bp, Artificial Sequence
  MKO10000645_A_1810043G02Rik
  gRNA
agagctgacccgcgcgctga

SEQ ID NO: 646 - DNA, 20 bp, Artificial Sequence
  MKO10000646_A_1810043G02Rik
  gRNA
gcctagaggtaatcacactc

SEQ ID NO: 647 - DNA, 20 bp, Artificial Sequence
  MKO10000647_A_1810043G02Rik
  gRNA
catctccctccatcagcgcg

SEQ ID NO: 648 - DNA, 20 bp, Artificial Sequence
  MKO10000648_A_1810043H04Rik
  gRNA
cggcggcgaagcagctccgc

SEQ ID NO: 649 - DNA, 20 bp, Artificial Sequence
  MKO10000649_A_1810043H04Rik
  gRNA
cctcgaactcgcgaacgcag

SEQ ID NO: 650 - DNA, 20 bp, Artificial Sequence
  MKO10000650_A_1810043H04Rik
  gRNA
ccgagccttccccgagcatc

SEQ ID NO: 651 - DNA, 20 bp, Artificial Sequence
  MKO10000651_A_1810046K07Rik
  gRNA
ttccagtgcatgcagcgagt

SEQ ID NO: 652 - DNA, 20 bp, Artificial Sequence
  MKO10000652_A_1810046K07Rik
  gRNA
acaggatcgccagtgatgtc

SEQ ID NO: 653 - DNA, 20 bp, Artificial Sequence
  MKO10000653_A_1810046K07Rik
  gRNA
tcgaatgacctctacacctc

SEQ ID NO: 654 - DNA, 20 bp, Artificial Sequence
  MKO10000654_A_1810055G02Rik
  gRNA
ctcaggctggtagcacgcgc

SEQ ID NO: 655 - DNA, 20 bp, Artificial Sequence
  MKO10000655_A_1810055G02Rik
  gRNA
tagtccctcaaacgccaccc

SEQ ID NO: 656 - DNA, 20 bp, Artificial Sequence
  MKO10000656_A_1810055G02Rik
  gRNA
gtggctctgcagacatcata

SEQ ID NO: 657 - DNA, 20 bp, Artificial Sequence
  MKO10000657_A_1810062G17Rik
  gRNA
cccgacctcctgcatacgca

SEQ ID NO: 658 - DNA, 20 bp, Artificial Sequence
  MKO10000658_A_1810062G17Rik
  gRNA
ccacaaatgactcatcgtcc

SEQ ID NO: 659 - DNA, 20 bp, Artificial Sequence
  MKO10000659_A_1810062G17Rik
  gRNA
cctggacgatgagtcatttg

SEQ ID NO: 660 - DNA, 20 bp, Artificial Sequence
  MKO10000660_A_1810065E05Rik
  gRNA
actggcattctcggcgacac

SEQ ID NO: 661 - DNA, 20 bp, Artificial Sequence
  MKO10000661_A_1810065E05Rik
  gRNA
tatcagtagtacagcatcgc

SEQ ID NO: 662 - DNA, 20 bp, Artificial Sequence
  MKO10000662_A_1810065E05Rik
  gRNA
agtccaaaacggtcatattc

SEQ ID NO: 663 - DNA, 20 bp, Artificial Sequence
  MKO10000663_A_42431
  gRNA
tccgcgacaggtagcctacc

SEQ ID NO: 664 - DNA, 20 bp, Artificial Sequence
  MKO10000664_A_42431
  gRNA
ccttagtcgatctcaacacc

SEQ ID NO: 665 - DNA, 20 bp, Artificial Sequence
  MKO10000665_A_42431
  gRNA
acctgaagacgcaagcctac

SEQ ID NO: 666 - DNA, 20 bp, Artificial Sequence
  MKO10000666_A_42615
  gRNA
cgactgttgagattgaagag

SEQ ID NO: 667 - DNA, 20 bp, Artificial Sequence
  MKO10000667_A_42615
  gRNA
ggcgtcacatcattgataac

SEQ ID NO: 668 - DNA, 20 bp, Artificial Sequence
  MKO10000668_A_42615
  gRNA
cgctacctacatgatgagag

SEQ ID NO: 669 - DNA, 20 bp, Artificial Sequence
  MKO10000669_A_2010001E11Rik
  gRNA
caatcctccaacgccaccac

SEQ ID NO: 670 - DNA, 20 bp, Artificial Sequence
  MKO10000670_A_2010001E11Rik
  gRNA
taccgcgaacacggagcctg

SEQ ID NO: 671 - DNA, 20 bp, Artificial Sequence
  MKO10000671_A_2010001E11Rik
  gRNA
tggtgcttcaattggtgttg

SEQ ID NO: 672 - DNA, 20 bp, Artificial Sequence
  MKO10000672_A_2010002M12Rik
  gRNA
cgtgatcccatctacagcat

SEQ ID NO: 673 - DNA, 20 bp, Artificial Sequence
  MKO10000673_A_2010002M12Rik
  gRNA
actggctgaaggacgcaagg

SEQ ID NO: 674 - DNA, 20 bp, Artificial Sequence
  MKO10000674_A_2010002M12Rik
  gRNA
ttctgagtcccagcaacatg

SEQ ID NO: 675 - DNA, 20 bp, Artificial Sequence
  MKO10000675_A_2010003K11Rik
  gRNA
ctccagcccttccgtgccat

SEQ ID NO: 676 - DNA, 20 bp, Artificial Sequence
  MKO10000676_A_2010003K11Rik
  gRNA
ccgtgagaagtccaggtcgc

SEQ ID NO: 677 - DNA, 20 bp, Artificial Sequence
  MKO10000677_A_2010003K11Rik
  gRNA
ttagttgttggtgtccaaca

SEQ ID NO: 678 - DNA, 20 bp, Artificial Sequence
  MKO10000678_A_2010005H15Rik
  gRNA
gtaggacagctcatctttcc

SEQ ID NO: 679 - DNA, 20 bp, Artificial Sequence
  MKO10000679_A_2010005H15Rik
  gRNA
ctccacataaaagtcttcac

SEQ ID NO: 680 - DNA, 20 bp, Artificial Sequence
  MKO10000680_A_2010005H15Rik
  gRNA
tcaccttattagcaatctcc

SEQ ID NO: 681 - DNA, 20 bp, Artificial Sequence
  MKO10000681_A_2010012O05Rik
  gRNA
agctcgaaacatggtactac

SEQ ID NO: 682 - DNA, 20 bp, Artificial Sequence
  MKO10000682_A_2010012O05Rik
  gRNA
ggcatactcactggtactga

SEQ ID NO: 683 - DNA, 20 bp, Artificial Sequence
  MKO10000683_A_2010012O05Rik
  gRNA
tacatcttccgagtgtaaga

SEQ ID NO: 684 - DNA, 20 bp, Artificial Sequence
  MKO10000684_A_2010015L04Rik
  gRNA
tcttccgaagatgaaacgcc

SEQ ID NO: 685 - DNA, 20 bp, Artificial Sequence
  MKO10000685_A_2010015L04Rik
  gRNA
agctgcatatctgtcgtcag

SEQ ID NO: 686 - DNA, 20 bp, Artificial Sequence
  MKO10000686_A_2010015L04Rik
  gRNA
tatgtcaagttcagcgaaaa

SEQ ID NO: 687 - DNA, 20 bp, Artificial Sequence
  MKO10000687_A_2010106E10Rik
  gRNA
atagcactggccataatcgt

SEQ ID NO: 688 - DNA, 20 bp, Artificial Sequence
  MKO10000688_A_2010106E10Rik
  gRNA
gattgccacaccaacgatta

SEQ ID NO: 689 - DNA, 20 bp, Artificial Sequence
  MKO10000689_A_2010106E10Rik
  gRNA
catgcacaaacaatagactc

SEQ ID NO: 690 - DNA, 20 bp, Artificial Sequence
  MKO10000690_A_2010107E04Rik
  gRNA
gcctcatcgtatataaaatc

SEQ ID NO: 691 - DNA, 20 bp, Artificial Sequence
  MKO10000691_A_2010107E04Rik
  gRNA
ggagcagttagtgatggcca

SEQ ID NO: 692 - DNA, 20 bp, Artificial Sequence
  MKO10000692_A_2010107E04Rik
  gRNA
aaaggtcctgcacctgccca

SEQ ID NO: 693 - DNA, 20 bp, Artificial Sequence
  MKO10000693_A_2010107G12Rik
  gRNA
cgcgccgaccatttccctcg

SEQ ID NO: 694 - DNA, 20 bp, Artificial Sequence
  MKO10000694_A_2010107G12Rik
  gRNA
ggccatgtatccatatgccg

SEQ ID NO: 695 - DNA, 20 bp, Artificial Sequence
  MKO10000695_A_2010107G12Rik
  gRNA
atggcccgtacagacaccaa

SEQ ID NO: 696 - DNA, 20 bp, Artificial Sequence
  MKO10000696_A_2010107G23Rik
  gRNA
ggtagaccaggcccacaagc

SEQ ID NO: 697 - DNA, 20 bp, Artificial Sequence
  MKO10000697_A_2010107G23Rik
  gRNA
aggatgatgacccacgagtg

SEQ ID NO: 698 - DNA, 20 bp, Artificial Sequence
  MKO10000698_A_2010107G23Rik
  gRNA
gaaccccgagcatcataagc

SEQ ID NO: 699 - DNA, 20 bp, Artificial Sequence
  MKO10000699_A_2010109A12Rik
  gRNA
ccacgataagttatgcagaa

SEQ ID NO: 700 - DNA, 20 bp, Artificial Sequence
  MKO10000700_A_2010109A12Rik
  gRNA
cctttctgcataacttatcg

SEQ ID NO: 701 - DNA, 20 bp, Artificial Sequence
  MKO10000701_A_2010109A12Rik
  gRNA
ggggccatctccaagagacg

SEQ ID NO: 702 - DNA, 20 bp, Artificial Sequence
  MKO10000702_A_2010109I03Rik
  gRNA
attcatgacacttcaacgcc

SEQ ID NO: 703 - DNA, 20 bp, Artificial Sequence
  MKO10000703_A_2010109I03Rik
  gRNA
gcctctactgcttgaccaac

SEQ ID NO: 704 - DNA, 20 bp, Artificial Sequence
  MKO10000704_A_2010109I03Rik
  gRNA
ccagcaatccccaactgacg

SEQ ID NO: 705 - DNA, 20 bp, Artificial Sequence
  MKO10000705_A_2010111I01Rik
  gRNA
aacctcaagtccgcttccga

SEQ ID NO: 706 - DNA, 20 bp, Artificial Sequence
  MKO10000706_A_2010111I01Rik
  gRNA
tagccattggggcccgagac

SEQ ID NO: 707 - DNA, 20 bp, Artificial Sequence
  MKO10000707_A_2010111I01Rik
  gRNA
actggggcaaacactcgata

SEQ ID NO: 708 - DNA, 20 bp, Artificial Sequence
  MKO10000708_A_2010300C02Rik
  gRNA
gatgtccctgctgcacgatg

SEQ ID NO: 709 - DNA, 20 bp, Artificial Sequence
  MKO10000709_A_2010300C02Rik
  gRNA
aacggcaatgacctcgctct

SEQ ID NO: 710 - DNA, 20 bp, Artificial Sequence
  MKO10000710_A_2010300C02Rik
  gRNA
gagcgaggtcattgccgttg

SEQ ID NO: 711 - DNA, 20 bp, Artificial Sequence
  MKO10000711_A_2010315B03Rik
  gRNA
acagcatatcaacctaacca

SEQ ID NO: 712 - DNA, 20 bp, Artificial Sequence
  MKO10000712_A_2010315B03Rik
  gRNA
caagtcattgtcgtcttcaa

SEQ ID NO: 713 - DNA, 20 bp, Artificial Sequence
  MKO10000713_A_2010315B03Rik
  gRNA
actcaagcctgctcagctac

SEQ ID NO: 714 - DNA, 20 bp, Artificial Sequence
  MKO10000714_A_2200002D01Rik
  gRNA
caggcgctgctcacaagccg

SEQ ID NO: 715 - DNA, 20 bp, Artificial Sequence
  MKO10000715_A_2200002D01Rik
  gRNA
gctctccaggagtatgccgc

SEQ ID NO: 716 - DNA, 20 bp, Artificial Sequence
  MKO10000716_A_2200002D01Rik
  gRNA
acactgtcctcttaaagcgc

SEQ ID NO: 717 - DNA, 20 bp, Artificial Sequence
  MKO10000717_A_2200002J24Rik
  gRNA
ccggttgcactgatgcgatc

SEQ ID NO: 718 - DNA, 20 bp, Artificial Sequence
  MKO10000718_A_2200002J24Rik
  gRNA
ccagatcgcatcagtgcaac

SEQ ID NO: 719 - DNA, 20 bp, Artificial Sequence
  MKO10000719_A_2200002J24Rik
  gRNA
agcccagaggaactccacgc

SEQ ID NO: 720 - DNA, 20 bp, Artificial Sequence
  MKO10000720_A_2210010C04Rik
  gRNA
cagccgaattcaggtgcgcc

SEQ ID NO: 721 - DNA, 20 bp, Artificial Sequence
  MKO10000721_A_2210010C04Rik
  gRNA
aggcatttagttggcagcga

SEQ ID NO: 722 - DNA, 20 bp, Artificial Sequence
  MKO10000722_A_2210010C04Rik
  gRNA
gaggaatgctctcccctacc

SEQ ID NO: 723 - DNA, 20 bp, Artificial Sequence
  MKO10000723_A_2210013O21Rik
  gRNA
ccgcggtgggattatcccga

SEQ ID NO: 724 - DNA, 20 bp, Artificial Sequence
  MKO10000724_A_2210013O21Rik
  gRNA
ttgggttcccgcgtatttcc

SEQ ID NO: 725 - DNA, 20 bp, Artificial Sequence
  MKO10000725_A_2210013O21Rik
  gRNA
gtgcaatgacaagcttctgc

SEQ ID NO: 726 - DNA, 20 bp, Artificial Sequence
  MKO10000726_A_2210016F16Rik
  gRNA
acgaacctcgccgactcgcg

SEQ ID NO: 727 - DNA, 20 bp, Artificial Sequence
  MKO10000727_A_2210016F16Rik
  gRNA
gaacagtcgcgacgtgctcg

SEQ ID NO: 728 - DNA, 20 bp, Artificial Sequence
  MKO10000728_A_2210016F16Rik
  gRNA
atatatcccgcacctgctcg

SEQ ID NO: 729 - DNA, 20 bp, Artificial Sequence
  MKO10000729_A_2210016L21Rik
  gRNA
ggaactcaggagtggtccga

SEQ ID NO: 730 - DNA, 20 bp, Artificial Sequence
  MKO10000730_A_2210016L21Rik
  gRNA
gcatgaggtgaaccagcacg

SEQ ID NO: 731 - DNA, 20 bp, Artificial Sequence
  MKO10000731_A_2210016L21Rik
  gRNA
tggcgcttccggcagggtct

SEQ ID NO: 732 - DNA, 20 bp, Artificial Sequence
  MKO10000732_A_2210018M11Rik
  gRNA
taccaatctacgtccttcga

SEQ ID NO: 733 - DNA, 20 bp, Artificial Sequence
  MKO10000733_A_2210018M11Rik
  gRNA
agcgccaccgtgctgaagtt

SEQ ID NO: 734 - DNA, 20 bp, Artificial Sequence
  MKO10000734_A_2210018M11Rik
  gRNA
atcagtgcacttcgggcaca

SEQ ID NO: 735 - DNA, 20 bp, Artificial Sequence
  MKO10000735_A_2210404O07Rik
  gRNA
tttggcgcaccagacacgat

SEQ ID NO: 736 - DNA, 20 bp, Artificial Sequence
  MKO10000736_A_2210404O07Rik
  gRNA
aatcgtgtctggtgcgccaa

SEQ ID NO: 737 - DNA, 20 bp, Artificial Sequence
  MKO10000737_A_2210404O07Rik
  gRNA
actgttcctgacacccgctg

SEQ ID NO: 738 - DNA, 20 bp, Artificial Sequence
  MKO10000738_A_2210404O09Rik
  gRNA
ttgcatgtgtcctaaatttg

SEQ ID NO: 739 - DNA, 20 bp, Artificial Sequence
  MKO10000739_A_2210404O09Rik
  gRNA
tttagaaggtgtactttcag

SEQ ID NO: 740 - DNA, 20 bp, Artificial Sequence
  MKO10000740_A_2210404O09Rik
  gRNA
acagactcagataacattca

SEQ ID NO: 741 - DNA, 20 bp, Artificial Sequence
  MKO10000741_A_2210407C18Rik
  gRNA
acctcgtgcatttcgaccaa

SEQ ID NO: 742 - DNA, 20 bp, Artificial Sequence
  MKO10000742_A_2210407C18Rik
  gRNA
agttgtcgtggagcacgtat

SEQ ID NO: 743 - DNA, 20 bp, Artificial Sequence
  MKO10000743_A_2210407C18Rik
  gRNA
aataactgggagtgatgcag

SEQ ID NO: 744 - DNA, 20 bp, Artificial Sequence
  MKO10000744_A_2210408I21Rik
  gRNA
ttcgacgattcttagtaaac

SEQ ID NO: 745 - DNA, 20 bp, Artificial Sequence
  MKO10000745_A_2210408I21Rik
  gRNA
tttcttctgtaaccgtatcc

SEQ ID NO: 746 - DNA, 20 bp, Artificial Sequence
  MKO10000746_A_2210408I21Rik
  gRNA
gttgtttgtagctgtgcatc

SEQ ID NO: 747 - DNA, 20 bp, Artificial Sequence
  MKO10000747_A_2300002M23Rik
  gRNA
atactggcaattggcccccc

SEQ ID NO: 748 - DNA, 20 bp, Artificial Sequence
  MKO10000748_A_2300002M23Rik
  gRNA
cccaattgtcgatatccagc

SEQ ID NO: 749 - DNA, 20 bp, Artificial Sequence
  MKO10000749_A_2300002M23Rik
  gRNA
agcaagatgcagagccacgc

SEQ ID NO: 750 - DNA, 20 bp, Artificial Sequence
  MKO10000750_A_2300003K06Rik
  gRNA
gctgaccatggtatctgagt

SEQ ID NO: 751 - DNA, 20 bp, Artificial Sequence
  MKO10000751_A_2300003K06Rik
  gRNA
gtgctgtaaacccacctgct

SEQ ID NO: 752 - DNA, 20 bp, Artificial Sequence
  MKO10000752_A_2300003K06Rik
  gRNA
acaggaaggcctgtaacagc

SEQ ID NO: 753 - DNA, 20 bp, Artificial Sequence
  MKO10000753_A_2300005B03Rik
  gRNA
ctcgcccgtctagctgccca

SEQ ID NO: 754 - DNA, 20 bp, Artificial Sequence
  MKO10000754_A_2300005B03Rik
  gRNA
tagcacatcttcgtcaccag

SEQ ID NO: 755 - DNA, 20 bp, Artificial Sequence
  MKO10000755_A_2300005B03Rik
  gRNA
gccagtccaatctctgcaac

SEQ ID NO: 756 - DNA, 20 bp, Artificial Sequence
  MKO10000756_A_2300009A05Rik
  gRNA
gggcccacgaggctacgctg

SEQ ID NO: 757 - DNA, 20 bp, Artificial Sequence
  MKO10000757_A_2300009A05Rik
  gRNA
tcgttgtggaccgcactgta

SEQ ID NO: 758 - DNA, 20 bp, Artificial Sequence
  MKO10000758_A_2300009A05Rik
  gRNA
gagactgttcataccagtta

SEQ ID NO: 759 - DNA, 20 bp, Artificial Sequence
  MKO10000759_A_2310002J15Rik
  gRNA
atgtcatcaccacgccctac

SEQ ID NO: 760 - DNA, 20 bp, Artificial Sequence
  MKO10000760_A_2310002J15Rik
  gRNA
ccagcataagtcagtcccga

SEQ ID NO: 761 - DNA, 20 bp, Artificial Sequence
  MKO10000761_A_2310002J15Rik
  gRNA
ccatcgggactgacttatgc

SEQ ID NO: 762 - DNA, 20 bp, Artificial Sequence
  MKO10000762_A_2310002L09Rik
  gRNA
tgttatacgctagttcagag

SEQ ID NO: 763 - DNA, 20 bp, Artificial Sequence
  MKO10000763_A_2310002L09Rik
  gRNA
aagcacgtaccagcatttcg

SEQ ID NO: 764 - DNA, 20 bp, Artificial Sequence
  MKO10000764_A_2310002L09Rik
  gRNA
ccatcctgaccggccgtatc

SEQ ID NO: 765 - DNA, 20 bp, Artificial Sequence
  MKO10000765_A_2310003H01Rik
  gRNA
ggtgtaccagtttcccgacc

SEQ ID NO: 766 - DNA, 20 bp, Artificial Sequence
  MKO10000766_A_2310003H01Rik
  gRNA
ggggcaacgtcacttcccgc

SEQ ID NO: 767 - DNA, 20 bp, Artificial Sequence
  MKO10000767_A_2310003H01Rik
  gRNA
cacacgcatccgggtccaca

SEQ ID NO: 768 - DNA, 20 bp, Artificial Sequence
  MKO10000768_A_2310005G13Rik
  gRNA
tgtgttgccagttccgcagt

SEQ ID NO: 769 - DNA, 20 bp, Artificial Sequence
  MKO10000769_A_2310005G13Rik
  gRNA
gctgaagttcagtgcgttat

SEQ ID NO: 770 - DNA, 20 bp, Artificial Sequence
  MKO10000770_A_2310005G13Rik
  gRNA
gcaacacatcatcatgtacg

SEQ ID NO: 771 - DNA, 20 bp, Artificial Sequence
  MKO10000771_A_2310007B03Rik
  gRNA
ttacgcggtcgagaatggag

SEQ ID NO: 772 - DNA, 20 bp, Artificial Sequence
  MKO10000772_A_2310007B03Rik
  gRNA
cgtccaccacgcatcgacaa

SEQ ID NO: 773 - DNA, 20 bp, Artificial Sequence
  MKO10000773_A_2310007B03Rik
  gRNA
atggattcgtaaggactctt

SEQ ID NO: 774 - DNA, 20 bp, Artificial Sequence
  MKO10000774_A_2310007L24Rik
  gRNA
ggtccacaccgacagtcacg

SEQ ID NO: 775 - DNA, 20 bp, Artificial Sequence
  MKO10000775_A_2310007L24Rik
  gRNA
accaacagtccccgttgcac

SEQ ID NO: 776 - DNA, 20 bp, Artificial Sequence
  MKO10000776_A_2310007L24Rik
  gRNA
catctgctcctcgtgactgt

SEQ ID NO: 777 - DNA, 20 bp, Artificial Sequence
  MKO10000777_A_2310009B15Rik
  gRNA
acgctggcgagggtatcgct

SEQ ID NO: 778 - DNA, 20 bp, Artificial Sequence
  MKO10000778_A_2310009B15Rik
  gRNA
ccggctatgtggttctcaca

SEQ ID NO: 779 - DNA, 20 bp, Artificial Sequence
  MKO10000779_A_2310009B15Rik
  gRNA
cgccggcgccatggccgccc

SEQ ID NO: 780 - DNA, 20 bp, Artificial Sequence
  MKO10000780_A_2310011J03Rik
  gRNA
taccacgcgtttcttcgcct

SEQ ID NO: 781 - DNA, 20 bp, Artificial Sequence
  MKO10000781_A_2310011J03Rik
  gRNA
gccgctgaccagcttgccga

SEQ ID NO: 782 - DNA, 20 bp, Artificial Sequence
  MKO10000782_A_2310011J03Rik
  gRNA
gtgcccctcgcacgtcctcc

SEQ ID NO: 783 - DNA, 20 bp, Artificial Sequence
  MKO10000783_A_2310014L17Rik
  gRNA
ctgtgcgctttgaccgacgc

SEQ ID NO: 784 - DNA, 20 bp, Artificial Sequence
  MKO10000784_A_2310014L17Rik
  gRNA
atctgcgtgtcacccttcga

SEQ ID NO: 785 - DNA, 20 bp, Artificial Sequence
  MKO10000785_A_2310014L17Rik
  gRNA
ctttgtggggcgtcgtgtcc

SEQ ID NO: 786 - DNA, 20 bp, Artificial Sequence
  MKO10000786_A_2310022A10Rik
  gRNA
actcaccactagaagcgcct

SEQ ID NO: 787 - DNA, 20 bp, Artificial Sequence
  MKO10000787_A_2310022A10Rik
  gRNA
cttcgccgaggcgcttctag

SEQ ID NO: 788 - DNA, 20 bp, Artificial Sequence
  MKO10000788_A_2310022A10Rik
  gRNA
tacctggcggtgtaccacct

SEQ ID NO: 789 - DNA, 20 bp, Artificial Sequence
  MKO10000789_A_2310022B05Rik
  gRNA
cgggccgggtatggcgtcga

SEQ ID NO: 790 - DNA, 20 bp, Artificial Sequence
  MKO10000790_A_2310022B05Rik
  gRNA
ggcgatcgcggcctcgcgtt

SEQ ID NO: 791 - DNA, 20 bp, Artificial Sequence
  MKO10000791_A_2310022B05Rik
  gRNA
agatcaatgccgagcgctct

SEQ ID NO: 792 - DNA, 20 bp, Artificial Sequence
  MKO10000792_A_2310030G06Rik
  gRNA
caagtcactctcctccgacg

SEQ ID NO: 793 - DNA, 20 bp, Artificial Sequence
  MKO10000793_A_2310030G06Rik
  gRNA
gtacaacacttgctcatacg

SEQ ID NO: 794 - DNA, 20 bp, Artificial Sequence
  MKO10000794_A_2310030G06Rik
  gRNA
ccatggcggttgtgtctccc

SEQ ID NO: 795 - DNA, 20 bp, Artificial Sequence
  MKO10000795_A_2310033P09Rik
  gRNA
cttctcgggatagcgccaca

SEQ ID NO: 796 - DNA, 20 bp, Artificial Sequence
  MKO10000796_A_2310033P09Rik
  gRNA
tcgaccttgtcctcagcgcg

SEQ ID NO: 797 - DNA, 20 bp, Artificial Sequence
  MKO10000797_A_2310033P09Rik
  gRNA
acttcgtggagatctgcaaa

SEQ ID NO: 798 - DNA, 20 bp, Artificial Sequence
  MKO10000798_A_2310034C09Rik
  gRNA
ggcttcagacccctcaattg

SEQ ID NO: 799 - DNA, 20 bp, Artificial Sequence
  MKO10000799_A_2310034C09Rik
  gRNA
aaccttgttatagaccaacc

SEQ ID NO: 800 - DNA, 20 bp, Artificial Sequence
  MKO10000800_A_2310034C09Rik
  gRNA
gctatctgtagtgattaatc

SEQ ID NO: 801 - DNA, 20 bp, Artificial Sequence
  MKO10000801_A_2310035C23Rik
  gRNA
cgatggcatcgattgacaat

SEQ ID NO: 802 - DNA, 20 bp, Artificial Sequence
  MKO10000802_A_2310035C23Rik
  gRNA
gagaagtaatcgcgcagtcg

SEQ ID NO: 803 - DNA, 20 bp, Artificial Sequence
  MKO10000803_A_2310035C23Rik
  gRNA
taaatcaagtcctgaaattc

SEQ ID NO: 804 - DNA, 20 bp, Artificial Sequence
  MKO10000804_A_2310036O22Rik
  gRNA
cgaggtgtcgggctcgagtc

SEQ ID NO: 805 - DNA, 20 bp, Artificial Sequence
  MKO10000805_A_2310036O22Rik
  gRNA
attccctgggcccgccgcgg

SEQ ID NO: 806 - DNA, 20 bp, Artificial Sequence
  MKO10000806_A_2310036O22Rik
  gRNA
tgatgataaaactcggcccc

SEQ ID NO: 807 - DNA, 20 bp, Artificial Sequence
  MKO10000807_A_2310039H08Rik
  gRNA
cgaccatcgaggagcgatcc

SEQ ID NO: 808 - DNA, 20 bp, Artificial Sequence
  MKO10000808_A_2310039H08Rik
  gRNA
agtccagccgcccaactcga

SEQ ID NO: 809 - DNA, 20 bp, Artificial Sequence
  MKO10000809_A_2310039H08Rik
  gRNA
cctccgtcgagttgggcggc

SEQ ID NO: 810 - DNA, 20 bp, Artificial Sequence
  MKO10000810_A_2310042D19Rik
  gRNA
gcacgcctcttcttacgacc

SEQ ID NO: 811 - DNA, 20 bp, Artificial Sequence
  MKO10000811_A_2310042D19Rik
  gRNA
cttcaccagttgcgacctag

SEQ ID NO: 812 - DNA, 20 bp, Artificial Sequence
  MKO10000812_A_2310042D19Rik
  gRNA
tatccgctacttccgccgtc

SEQ ID NO: 813 - DNA, 20 bp, Artificial Sequence
  MKO10000813_A_2310042E22Rik
  gRNA
aatttaccaaaagccatgac

SEQ ID NO: 814 - DNA, 20 bp, Artificial Sequence
  MKO10000814_A_2310042E22Rik
  gRNA
atgtgcatgcacactcgaga

SEQ ID NO: 815 - DNA, 20 bp, Artificial Sequence
  MKO10000815_A_2310042E22Rik
  gRNA
agaaaatggttatgaatgcc

SEQ ID NO: 816 - DNA, 20 bp, Artificial Sequence
  MKO10000816_A_2310044G17Rik
  gRNA
ggataatactcggccagtct

SEQ ID NO: 817 - DNA, 20 bp, Artificial Sequence
  MKO10000817_A_2310044G17Rik
  gRNA
gaggcttaccgcgtgtcaga

SEQ ID NO: 818 - DNA, 20 bp, Artificial Sequence
  MKO10000818_A_2310044G17Rik
  gRNA
aagaagctagcgcgaccact

SEQ ID NO: 819 - DNA, 20 bp, Artificial Sequence
  MKO10000819_A_2310045N01Rik
  gRNA
ccagggcgccatatacaccg

SEQ ID NO: 820 - DNA, 20 bp, Artificial Sequence
  MKO10000820_A_2310045N01Rik
  gRNA
cagcgtgtacttccgtagtg

SEQ ID NO: 821 - DNA, 20 bp, Artificial Sequence
  MKO10000821_A_2310045N01Rik
  gRNA
ccttgccaacgagccgtcag

SEQ ID NO: 822 - DNA, 20 bp, Artificial Sequence
  MKO10000822_A_2310047M10Rik
  gRNA
tatccagacctaccgcgacg

SEQ ID NO: 823 - DNA, 20 bp, Artificial Sequence
  MKO10000823_A_2310047M10Rik
  gRNA
ccgagatatccgacgcacgc

SEQ ID NO: 824 - DNA, 20 bp, Artificial Sequence
  MKO10000824_A_2310047M10Rik
  gRNA
caccttacttgcgcgctgcg

SEQ ID NO: 825 - DNA, 20 bp, Artificial Sequence
  MKO10000825_A_2310050C09Rik
  gRNA
gggagttgggcatttcacgt

SEQ ID NO: 826 - DNA, 20 bp, Artificial Sequence
  MKO10000826_A_2310050C09Rik
  gRNA
ggcacttcacataagtagtc

SEQ ID NO: 827 - DNA, 20 bp, Artificial Sequence
  MKO10000827_A_2310050C09Rik
  gRNA
tatctcacgtaagtttgagc

SEQ ID NO: 828 - DNA, 20 bp, Artificial Sequence
  MKO10000828_A_2310057J18Rik
  gRNA
tcctcttcagaacgaagtcc

SEQ ID NO: 829 - DNA, 20 bp, Artificial Sequence
  MKO10000829_A_2310057J18Rik
  gRNA
gactgtcaatctgccgtccc

SEQ ID NO: 830 - DNA, 20 bp, Artificial Sequence
  MKO10000830_A_2310057J18Rik
  gRNA
gggctatgtcagtatcaaca

SEQ ID NO: 831 - DNA, 20 bp, Artificial Sequence
  MKO10000831_A_2310057M21Rik
  gRNA
tccgcgtgggacataatgcc

SEQ ID NO: 832 - DNA, 20 bp, Artificial Sequence
  MKO10000832_A_2310057M21Rik
  gRNA
cattatgtcccacgcggaga

SEQ ID NO: 833 - DNA, 20 bp, Artificial Sequence
  MKO10000833_A_2310057M21Rik
  gRNA
atggggtccaggttatcgcc

SEQ ID NO: 834 - DNA, 20 bp, Artificial Sequence
  MKO10000834_A_2310057N15Rik
  gRNA
cagactgatctataacaaga

SEQ ID NO: 835 - DNA, 20 bp, Artificial Sequence
  MKO10000835_A_2310057N15Rik
  gRNA
attctactacccagtgtatg

SEQ ID NO: 836 - DNA, 20 bp, Artificial Sequence
  MKO10000836_A_2310057N15Rik
  gRNA
ccactggatccacatcccac

SEQ ID NO: 837 - DNA, 20 bp, Artificial Sequence
  MKO10000837_A_2310061I04Rik
  gRNA
tatcacgcctgtagaaacgc

SEQ ID NO: 838 - DNA, 20 bp, Artificial Sequence
  MKO10000838_A_2310061I04Rik
  gRNA
caagcccgctggcgtctaat

SEQ ID NO: 839 - DNA, 20 bp, Artificial Sequence
  MKO10000839_A_2310061I04Rik
  gRNA
ggcaaggcggtccctcaaaa

SEQ ID NO: 840 - DNA, 20 bp, Artificial Sequence
  MKO10000840_A_2310061N02Rik
  gRNA
ttggacggtagcagggacgc

SEQ ID NO: 841 - DNA, 20 bp, Artificial Sequence
  MKO10000841_A_2310061N02Rik
  gRNA
ctctcccagaaaccgccatc

SEQ ID NO: 842 - DNA, 20 bp, Artificial Sequence
  MKO10000842_A_2310061N02Rik
  gRNA
cctgtgagttaccgagtctg

SEQ ID NO: 843 - DNA, 20 bp, Artificial Sequence
  MKO10000843_A_2310067B10Rik
  gRNA
cttgccgcccgatgaggacg

SEQ ID NO: 844 - DNA, 20 bp, Artificial Sequence
  MKO10000844_A_2310067B10Rik
  gRNA
tgagggccttccgggtagac

SEQ ID NO: 845 - DNA, 20 bp, Artificial Sequence
  MKO10000845_A_2310067B10Rik
  gRNA
ggatttggtcgatgatcccc

SEQ ID NO: 846 - DNA, 20 bp, Artificial Sequence
  MKO10000846_A_2310079G19Rik
  gRNA
acgccccgccattccagctt

SEQ ID NO: 847 - DNA, 20 bp, Artificial Sequence
  MKO10000847_A_2310079G19Rik
  gRNA
tccacagctcttcgtcttgt

SEQ ID NO: 848 - DNA, 20 bp, Artificial Sequence
  MKO10000848_A_2310079G19Rik
  gRNA
gtctgctctccgattacttc

SEQ ID NO: 849 - DNA, 20 bp, Artificial Sequence
  MKO10000849_A_2410002F23Rik
  gRNA
aggacttagtcatgacgcac

SEQ ID NO: 850 - DNA, 20 bp, Artificial Sequence
  MKO10000850_A_2410002F23Rik
  gRNA
gacccacgtcagcaatagtc

SEQ ID NO: 851 - DNA, 20 bp, Artificial Sequence
  MKO10000851_A_2410002F23Rik
  gRNA
gatccagactattgctgacg

SEQ ID NO: 852 - DNA, 20 bp, Artificial Sequence
  MKO10000852_A_2410004B18Rik
  gRNA
ggcggcctcggctccgacga

SEQ ID NO: 853 - DNA, 20 bp, Artificial Sequence
  MKO10000853_A_2410004B18Rik
  gRNA
tccttgcgacccgcgtcttc

SEQ ID NO: 854 - DNA, 20 bp, Artificial Sequence
  MKO10000854_A_2410004B18Rik
  gRNA
ctctgggggcggcacgcagt

SEQ ID NO: 855 - DNA, 20 bp, Artificial Sequence
  MKO10000855_A_2410004P03Rik
  gRNA
ttcttggtagcccacgatgt

SEQ ID NO: 856 - DNA, 20 bp, Artificial Sequence
  MKO10000856_A_2410004P03Rik
  gRNA
cccatgggcagccaacatcg

SEQ ID NO: 857 - DNA, 20 bp, Artificial Sequence
  MKO10000857_A_2410004P03Rik
  gRNA
cctgaaagactatgaccctc

SEQ ID NO: 858 - DNA, 20 bp, Artificial Sequence
  MKO10000858_A_2410012M07Rik
  gRNA
cgaatccaggctgtccaaaa

SEQ ID NO: 859 - DNA, 20 bp, Artificial Sequence
  MKO10000859_A_2410012M07Rik
  gRNA
gcagcaggtcgacgccgtcc

SEQ ID NO: 860 - DNA, 20 bp, Artificial Sequence
  MKO10000860_A_2410012M07Rik
  gRNA
tcgcagggcccggaagcgac

SEQ ID NO: 861 - DNA, 20 bp, Artificial Sequence
  MKO10000861_A_2410015M20Rik
  gRNA
caacctcctcggccttccgc

SEQ ID NO: 862 - DNA, 20 bp, Artificial Sequence
  MKO10000862_A_2410015M20Rik
  gRNA
cttggagggggccaccgaca

SEQ ID NO: 863 - DNA, 20 bp, Artificial Sequence
  MKO10000863_A_2410015M20Rik
  gRNA
cgaccacactcgagccacca

SEQ ID NO: 864 - DNA, 20 bp, Artificial Sequence
  MKO10000864_A_2410016O06Rik
  gRNA
gacgccgcgcgctacgtcga

SEQ ID NO: 865 - DNA, 20 bp, Artificial Sequence
  MKO10000865_A_2410016O06Rik
  gRNA
tctggcgcgtctaccgaccg

SEQ ID NO: 866 - DNA, 20 bp, Artificial Sequence
  MKO10000866_A_2410016O06Rik
  gRNA
ccgtccatcgacgtagcgcg

SEQ ID NO: 867 - DNA, 20 bp, Artificial Sequence
  MKO10000867_A_2410018M08Rik
  gRNA
agctctcgccgcgtcgctgt

SEQ ID NO: 868 - DNA, 20 bp, Artificial Sequence
  MKO10000868_A_2410018M08Rik
  gRNA
cgtctgtcgattcatcgagc

SEQ ID NO: 869 - DNA, 20 bp, Artificial Sequence
  MKO10000869_A_2410018M08Rik
  gRNA
cacttcccgcgtgacccttc

SEQ ID NO: 870 - DNA, 20 bp, Artificial Sequence
  MKO10000870_A_2410076I21Rik
  gRNA
gacctgatacaacgatcgtg

SEQ ID NO: 871 - DNA, 20 bp, Artificial Sequence
  MKO10000871_A_2410076I21Rik
  gRNA
gtcctcacgatcgttgtatc

SEQ ID NO: 872 - DNA, 20 bp, Artificial Sequence
  MKO10000872_A_2410076I21Rik
  gRNA
ctcagtgacacatcgagctc

SEQ ID NO: 873 - DNA, 20 bp, Artificial Sequence
  MKO10000873_A_2410089E03Rik
  gRNA
aaccattagtggatgtcgcc

SEQ ID NO: 874 - DNA, 20 bp, Artificial Sequence
  MKO10000874_A_2410089E03Rik
  gRNA
ttcctggcgacatccactaa

SEQ ID NO: 875 - DNA, 20 bp, Artificial Sequence
  MKO10000875_A_2410089E03Rik
  gRNA
aggcaacgaaactgcttctt

SEQ ID NO: 876 - DNA, 20 bp, Artificial Sequence
  MKO10000876_A_2410124H12Rik
  gRNA
gatacaaccgtcgtcgaccc

SEQ ID NO: 877 - DNA, 20 bp, Artificial Sequence
  MKO10000877_A_2410124H12Rik
  gRNA
cgacggttgtatcgcattta

SEQ ID NO: 878 - DNA, 20 bp, Artificial Sequence
  MKO10000878_A_2410124H12Rik
  gRNA
atgctatggatgcgctcatg

SEQ ID NO: 879 - DNA, 20 bp, Artificial Sequence
  MKO10000879_A_2410127L17Rik
  gRNA
cttccaactttgtactcaac

SEQ ID NO: 880 - DNA, 20 bp, Artificial Sequence
  MKO10000880_A_2410127L17Rik
  gRNA
atacctgttgagtacaaagt

SEQ ID NO: 881 - DNA, 20 bp, Artificial Sequence
  MKO10000881_A_2410127L17Rik
  gRNA
aatatttaccatctctcctt

SEQ ID NO: 882 - DNA, 20 bp, Artificial Sequence
  MKO10000882_A_2410131K14Rik
  gRNA
cgcaacagccattcgccagc

SEQ ID NO: 883 - DNA, 20 bp, Artificial Sequence
  MKO10000883_A_2410131K14Rik
  gRNA
gctgttcccggtcttgaacc

SEQ ID NO: 884 - DNA, 20 bp, Artificial Sequence
  MKO10000884_A_2410131K14Rik
  gRNA
cctcacgccgggaagagttc

SEQ ID NO: 885 - DNA, 20 bp, Artificial Sequence
  MKO10000885_A_2410137M14Rik
  gRNA
caccttcaagcgttgaatga

SEQ ID NO: 886 - DNA, 20 bp, Artificial Sequence
  MKO10000886_A_2410137M14Rik
  gRNA
accagcagtgatccccgtga

SEQ ID NO: 887 - DNA, 20 bp, Artificial Sequence
  MKO10000887_A_2410137M14Rik
  gRNA
tctgtctgcaaccatacccc

SEQ ID NO: 888 - DNA, 20 bp, Artificial Sequence
  MKO10000888_A_2410141K09Rik
  gRNA
cagagttctcatcttgaagt

SEQ ID NO: 889 - DNA, 20 bp, Artificial Sequence
  MKO10000889_A_2410141K09Rik
  gRNA
ttacacccgcaggccacatg

SEQ ID NO: 890 - DNA, 20 bp, Artificial Sequence
  MKO10000890_A_2410141K09Rik
  gRNA
agaactctgatcccgagccg

SEQ ID NO: 891 - DNA, 20 bp, Artificial Sequence
  MKO10000891_A_2510002D24Rik
  gRNA
tcggcgcggtagacctcgca

SEQ ID NO: 892 - DNA, 20 bp, Artificial Sequence
  MKO10000892_A_2510002D24Rik
  gRNA
ctacaccactactacgtcca

SEQ ID NO: 893 - DNA, 20 bp, Artificial Sequence
  MKO10000893_A_2510002D24Rik
  gRNA
agagggaggttccagtccgt

SEQ ID NO: 894 - DNA, 20 bp, Artificial Sequence
  MKO10000894_A_2510003E04Rik
  gRNA
gggaagagatcgaaaccgcc

SEQ ID NO: 895 - DNA, 20 bp, Artificial Sequence
  MKO10000895_A_2510003E04Rik
  gRNA
aaatgctcagtcgggtcaag

SEQ ID NO: 896 - DNA, 20 bp, Artificial Sequence
  MKO10000896_A_2510003E04Rik
  gRNA
cgttgatggcccactccatg

SEQ ID NO: 897 - DNA, 20 bp, Artificial Sequence
  MKO10000897_A_2510009E07Rik
  gRNA
acttccagatccgactgcga

SEQ ID NO: 898 - DNA, 20 bp, Artificial Sequence
  MKO10000898_A_2510009E07Rik
  gRNA
actcggggatcaacgccatt

SEQ ID NO: 899 - DNA, 20 bp, Artificial Sequence
  MKO10000899_A_2510009E07Rik
  gRNA
cagatggacagcccgtcgca

SEQ ID NO: 900 - DNA, 20 bp, Artificial Sequence
  MKO10000900_A_2510039O18Rik
  gRNA
acgaagtccggcgtcacggc

SEQ ID NO: 901 - DNA, 20 bp, Artificial Sequence
  MKO10000901_A_2510039O18Rik
  gRNA
gtgtggaccggcccgagtag

SEQ ID NO: 902 - DNA, 20 bp, Artificial Sequence
  MKO10000902_A_2510039O18Rik
  gRNA
cgtcaagatctacgcctgtg

SEQ ID NO: 903 - DNA, 20 bp, Artificial Sequence
  MKO10000903_A_2510049J12Rik
  gRNA
ctaaggaacgtccctcgcgt

SEQ ID NO: 904 - DNA, 20 bp, Artificial Sequence
  MKO10000904_A_2510049J12Rik
  gRNA
ttcctcctcaaaccgacgcg

SEQ ID NO: 905 - DNA, 20 bp, Artificial Sequence
  MKO10000905_A_2510049J12Rik
  gRNA
ttagtacagcctagcatgtt

SEQ ID NO: 906 - DNA, 20 bp, Artificial Sequence
  MKO10000906_A_2610002J02Rik
  gRNA
ggccccctaactgccgccct

SEQ ID NO: 907 - DNA, 20 bp, Artificial Sequence
  MKO10000907_A_2610002J02Rik
  gRNA
gttcgaccagaatttagtgc

SEQ ID NO: 908 - DNA, 20 bp, Artificial Sequence
  MKO10000908_A_2610002J02Rik
  gRNA
ccaatccgcggtcccgctca

SEQ ID NO: 909 - DNA, 20 bp, Artificial Sequence
  MKO10000909_A_2610002M06Rik
  gRNA
agatttaactacacctgcca

SEQ ID NO: 910 - DNA, 20 bp, Artificial Sequence
  MKO10000910_A_2610002M06Rik
  gRNA
ctcttacctgtggtgtcgta

SEQ ID NO: 911 - DNA, 20 bp, Artificial Sequence
  MKO10000911_A_2610002M06Rik
  gRNA
tactacccttacgacaccac

SEQ ID NO: 912 - DNA, 20 bp, Artificial Sequence
  MKO10000912_A_2610008E11Rik
  gRNA
ccaggagtcggtgtcattcg

SEQ ID NO: 913 - DNA, 20 bp, Artificial Sequence
  MKO10000913_A_2610008E11Rik
  gRNA
aacgtgaatttgggccatgg

SEQ ID NO: 914 - DNA, 20 bp, Artificial Sequence
  MKO10000914_A_2610008E11Rik
  gRNA
atggctcagaagcctcgctt

SEQ ID NO: 915 - DNA, 20 bp, Artificial Sequence
  MKO10000915_A_2610015P09Rik
  gRNA
ttggcggcaagcagtagatc

SEQ ID NO: 916 - DNA, 20 bp, Artificial Sequence
  MKO10000916_A_2610015P09Rik
  gRNA
gaaggatcctcgtcttacca

SEQ ID NO: 917 - DNA, 20 bp, Artificial Sequence
  MKO10000917_A_2610015P09Rik
  gRNA
cttaagacgcgagaaacaac

SEQ ID NO: 918 - DNA, 20 bp, Artificial Sequence
  MKO10000918_A_2610018G03Rik
  gRNA
ccaaaacggagtccctacga

SEQ ID NO: 919 - DNA, 20 bp, Artificial Sequence
  MKO10000919_A_2610018G03Rik
  gRNA
tgataaccgtactcagcaag

SEQ ID NO: 920 - DNA, 20 bp, Artificial Sequence
  MKO10000920_A_2610018G03Rik
  gRNA
ttcacaaaattagagcgcat

SEQ ID NO: 921 - DNA, 20 bp, Artificial Sequence
  MKO10000921_A_2610020H08Rik
  gRNA
acagatagcagtcccctctt

SEQ ID NO: 922 - DNA, 20 bp, Artificial Sequence
  MKO10000922_A_2610020H08Rik
  gRNA
tgttatgaaaccagtatact

SEQ ID NO: 923 - DNA, 20 bp, Artificial Sequence
  MKO10000923_A_2610020H08Rik
  gRNA
agaactaacacgcatctcac

SEQ ID NO: 924 - DNA, 20 bp, Artificial Sequence
  MKO10000924_A_2610028H24Rik
  gRNA
tccgaggtcaggaagtatta

SEQ ID NO: 925 - DNA, 20 bp, Artificial Sequence
  MKO10000925_A_2610028H24Rik
  gRNA
accgggtgctggatgatcct

SEQ ID NO: 926 - DNA, 20 bp, Artificial Sequence
  MKO10000926_A_2610028H24Rik
  gRNA
ggcacctctgggttcagggt

SEQ ID NO: 927 - DNA, 20 bp, Artificial Sequence
  MKO10000927_A_2610034B18Rik
  gRNA
gagccggtctgtgtcgccct

SEQ ID NO: 928 - DNA, 20 bp, Artificial Sequence
  MKO10000928_A_2610034B18Rik
  gRNA
ctggagtgcgattaaaaact

SEQ ID NO: 929 - DNA, 20 bp, Artificial Sequence
  MKO10000929_A_2610034B18Rik
  gRNA
gggagctcgtggatgtatct

SEQ ID NO: 930 - DNA, 20 bp, Artificial Sequence
  MKO10000930_A_2610034M16Rik
  gRNA
gaccgtgaaaaatcgttacc

SEQ ID NO: 931 - DNA, 20 bp, Artificial Sequence
  MKO10000931_A_2610034M16Rik
  gRNA
cggactgtgagactattcaa

SEQ ID NO: 932 - DNA, 20 bp, Artificial Sequence
  MKO10000932_A_2610034M16Rik
  gRNA
taacccccgaaagctatccc

SEQ ID NO: 933 - DNA, 20 bp, Artificial Sequence
  MKO10000933_A_2610044O15Rik8
  gRNA
gttgtagttaagattcatag

SEQ ID NO: 934 - DNA, 20 bp, Artificial Sequence
  MKO10000934_A_2610044O15Rik8
  gRNA
gaggacactaagctgaatga

SEQ ID NO: 935 - DNA, 20 bp, Artificial Sequence
  MKO10000935_A_2610044O15Rik8
  gRNA
taccagaatctcactgatat

SEQ ID NO: 936 - DNA, 20 bp, Artificial Sequence
  MKO10000936_A_2610301B20Rik
  gRNA
cacaggctacacaacgcagt

SEQ ID NO: 937 - DNA, 20 bp, Artificial Sequence
  MKO10000937_A_2610301B20Rik
  gRNA
gcgcttccactgagatacac

SEQ ID NO: 938 - DNA, 20 bp, Artificial Sequence
  MKO10000938_A_2610301B20Rik
  gRNA
agtcattgtagctcactatc

SEQ ID NO: 939 - DNA, 20 bp, Artificial Sequence
  MKO10000939_A_2610305D13Rik
  gRNA
gatgaatacgcagactaact

SEQ ID NO: 940 - DNA, 20 bp, Artificial Sequence
  MKO10000940_A_2610305D13Rik
  gRNA
tttacacaaaagttctatct

SEQ ID NO: 941 - DNA, 20 bp, Artificial Sequence
  MKO10000941_A_2610305D13Rik
  gRNA
gtccaaaaacacatccttga

SEQ ID NO: 942 - DNA, 20 bp, Artificial Sequence
  MKO10000942_A_2610318N02Rik
  gRNA
gtctttcatcaacgtcaaag

SEQ ID NO: 943 - DNA, 20 bp, Artificial Sequence
  MKO10000943_A_2610318N02Rik
  gRNA
ctgaccggcttgccagacag

SEQ ID NO: 944 - DNA, 20 bp, Artificial Sequence
  MKO10000944_A_2610318N02Rik
  gRNA
catggttgatctgaccccct

SEQ ID NO: 945 - DNA, 20 bp, Artificial Sequence
  MKO10000945_A_2610507B11Rik
  gRNA
cggaactcaccaccgtctgc

SEQ ID NO: 946 - DNA, 20 bp, Artificial Sequence
  MKO10000946_A_2610507B11Rik
  gRNA
gtggtgtcagcgcaagttgc

SEQ ID NO: 947 - DNA, 20 bp, Artificial Sequence
  MKO10000947_A_2610507B11Rik
  gRNA
agagtactcacggcagatca

SEQ ID NO: 948 - DNA, 20 bp, Artificial Sequence
  MKO10000948_A_2610524H06Rik
  gRNA
ggagcagagccggtcctacg

SEQ ID NO: 949 - DNA, 20 bp, Artificial Sequence
  MKO10000949_A_2610524H06Rik
  gRNA
gctctgctccggcggcaacc

SEQ ID NO: 950 - DNA, 20 bp, Artificial Sequence
  MKO10000950_A_2610524H06Rik
  gRNA
ctctggttcgattaagcttc

SEQ ID NO: 951 - DNA, 20 bp, Artificial Sequence
  MKO10000951_A_2610528A11Rik
  gRNA
cggaggaggccctatatctg

SEQ ID NO: 952 - DNA, 20 bp, Artificial Sequence
  MKO10000952_A_2610528A11Rik
  gRNA
ggcaccacccatgacttgac

SEQ ID NO: 953 - DNA, 20 bp, Artificial Sequence
  MKO10000953_A_2610528A11Rik
  gRNA
acagcagcgcctgagtttca

SEQ ID NO: 954 - DNA, 20 bp, Artificial Sequence
  MKO10000954_A_2610528J11Rik
  gRNA
cagcgggcgatgcctgtaac

SEQ ID NO: 955 - DNA, 20 bp, Artificial Sequence
  MKO10000955_A_2610528J11Rik
  gRNA
ggccatcaatgcatcaaccg

SEQ ID NO: 956 - DNA, 20 bp, Artificial Sequence
  MKO10000956_A_2610528J11Rik
  gRNA
acttgtgtttcctccaatca

SEQ ID NO: 957 - DNA, 20 bp, Artificial Sequence
  MKO10000957_A_2700029M09Rik
  gRNA
ggtccttatgatatccttgc

SEQ ID NO: 958 - DNA, 20 bp, Artificial Sequence
  MKO10000958_A_2700029M09Rik
  gRNA
tcatttgtacccacgtatac

SEQ ID NO: 959 - DNA, 20 bp, Artificial Sequence
  MKO10000959_A_2700029M09Rik
  gRNA
tgatgaacttcctgtatacg

SEQ ID NO: 960 - DNA, 20 bp, Artificial Sequence
  MKO10000960_A_2700049A03Rik
  gRNA
caagacgtttatttgcagcc

SEQ ID NO: 961 - DNA, 20 bp, Artificial Sequence
  MKO10000961_A_2700049A03Rik
  gRNA
agttctaatggaacgttatg

SEQ ID NO: 962 - DNA, 20 bp, Artificial Sequence
  MKO10000962_A_2700049A03Rik
  gRNA
tcttgcagaagttaaatcca

SEQ ID NO: 963 - DNA, 20 bp, Artificial Sequence
  MKO10000963_A_2700050L05Rik
  gRNA
agacgtgcaaacgctgttcg

SEQ ID NO: 964 - DNA, 20 bp, Artificial Sequence
  MKO10000964_A_2700050L05Rik
  gRNA
ttacgagagagtgccaaact

SEQ ID NO: 965 - DNA, 20 bp, Artificial Sequence
  MKO10000965_A_2700050L05Rik
  gRNA
ggtgcacagccatgctcacg

SEQ ID NO: 966 - DNA, 20 bp, Artificial Sequence
  MKO10000966_A_2700060E02Rik
  gRNA
atcggcaagaagcgattgac

SEQ ID NO: 967 - DNA, 20 bp, Artificial Sequence
  MKO10000967_A_2700060E02Rik
  gRNA
aatttagaaactttatcgtt

SEQ ID NO: 968 - DNA, 20 bp, Artificial Sequence
  MKO10000968_A_2700060E02Rik
  gRNA
tcaccatccaagttgatcag

SEQ ID NO: 969 - DNA, 20 bp, Artificial Sequence
  MKO10000969_A_2700062C07Rik
  gRNA
cctaccgtgtgtcgaactgt

SEQ ID NO: 970 - DNA, 20 bp, Artificial Sequence
  MKO10000970_A_2700062C07Rik
  gRNA
tgggcctacagttcgacaca

SEQ ID NO: 971 - DNA, 20 bp, Artificial Sequence
  MKO10000971_A_2700062C07Rik
  gRNA
cgtcttcgggctggccttgt

SEQ ID NO: 972 - DNA, 20 bp, Artificial Sequence
  MKO10000972_A_2700081O15Rik
  gRNA
ggcgcaactaccagccgcgc

SEQ ID NO: 973 - DNA, 20 bp, Artificial Sequence
  MKO10000973_A_2700081O15Rik
  gRNA
agatccgcgccgctgtctcg

SEQ ID NO: 974 - DNA, 20 bp, Artificial Sequence
  MKO10000974_A_2700081O15Rik
  gRNA
gcatcccgaaccggcctcgg

SEQ ID NO: 975 - DNA, 20 bp, Artificial Sequence
  MKO10000975_A_2700089E24Rik
  gRNA
ccccgtccgccctagcgctc

SEQ ID NO: 976 - DNA, 20 bp, Artificial Sequence
  MKO10000976_A_2700089E24Rik
  gRNA
gagcccgcgatgtagaagta

SEQ ID NO: 977 - DNA, 20 bp, Artificial Sequence
  MKO10000977_A_2700089E24Rik
  gRNA
cctgcggccgccaccccgta

SEQ ID NO: 978 - DNA, 20 bp, Artificial Sequence
  MKO10000978_A_2700094K13Rik
  gRNA
taaggcgggggccgcgccta

SEQ ID NO: 979 - DNA, 20 bp, Artificial Sequence
  MKO10000979_A_2700094K13Rik
  gRNA
ggtggacaagcgcgagaaac

SEQ ID NO: 980 - DNA, 20 bp, Artificial Sequence
  MKO10000980_A_2700094K13Rik
  gRNA
agtacgagctgacgcgtgta

SEQ ID NO: 981 - DNA, 20 bp, Artificial Sequence
  MKO10000981_A_2700097O09Rik
  gRNA
gcgtacccaaaggcgctgtt

SEQ ID NO: 982 - DNA, 20 bp, Artificial Sequence
  MKO10000982_A_2700097O09Rik
  gRNA
ctcacaccgaacagcgcctt

SEQ ID NO: 983 - DNA, 20 bp, Artificial Sequence
  MKO10000983_A_2700097O09Rik
  gRNA
cctttattctgtcaccgaac

SEQ ID NO: 984 - DNA, 20 bp, Artificial Sequence
  MKO10000984_A_2810004N23Rik
  gRNA
gcgggagcgagctatcatgc

SEQ ID NO: 985 - DNA, 20 bp, Artificial Sequence
  MKO10000985_A_2810004N23Rik
  gRNA
tgatagctcgctcccgctcc

SEQ ID NO: 986 - DNA, 20 bp, Artificial Sequence
  MKO10000986_A_2810004N23Rik
  gRNA
gtagttcacgtaagtgttct

SEQ ID NO: 987 - DNA, 20 bp, Artificial Sequence
  MKO10000987_A_2810006K23Rik
  gRNA
ctcgaagaacagttcgtgaa

SEQ ID NO: 988 - DNA, 20 bp, Artificial Sequence
  MKO10000988_A_2810006K23Rik
  gRNA
gtgctcaaacacgtgccctc

SEQ ID NO: 989 - DNA, 20 bp, Artificial Sequence
  MKO10000989_A_2810006K23Rik
  gRNA
cgttcacaaagagaagctcg

SEQ ID NO: 990 - DNA, 20 bp, Artificial Sequence
  MKO10000990_A_2810007J24Rik
  gRNA
gctcattggcaattgtagat

SEQ ID NO: 991 - DNA, 20 bp, Artificial Sequence
  MKO10000991_A_2810007J24Rik
  gRNA
ctacttcaatgctctaaaac

SEQ ID NO: 992 - DNA, 20 bp, Artificial Sequence
  MKO10000992_A_2810007J24Rik
  gRNA
ttgccaatgagcgcacacca

SEQ ID NO: 993 - DNA, 20 bp, Artificial Sequence
  MKO10000993_A_2810021J22Rik
  gRNA
ccttcgatgtgcgcactgta

SEQ ID NO: 994 - DNA, 20 bp, Artificial Sequence
  MKO10000994_A_2810021J22Rik
  gRNA
ccatacagtgcgcacatcga

SEQ ID NO: 995 - DNA, 20 bp, Artificial Sequence
  MKO10000995_A_2810021J22Rik
  gRNA
gaggagaatgagcagtattg

SEQ ID NO: 996 - DNA, 20 bp, Artificial Sequence
  MKO10000996_A_2810403A07Rik
  gRNA
ttctcggccgcattctgaga

SEQ ID NO: 997 - DNA, 20 bp, Artificial Sequence
  MKO10000997_A_2810403A07Rik
  gRNA
accaccgccgccgctccttc

SEQ ID NO: 998 - DNA, 20 bp, Artificial Sequence
  MKO10000998_A_2810403A07Rik
  gRNA
gtgtctgtcctcgtgtcagc

SEQ ID NO: 999 - DNA, 20 bp, Artificial Sequence
  MKO10000999_A_2810408A11Rik
  gRNA
accttaggaagtctcagcgc

SEQ ID NO: 1000 - DNA, 20 bp, Artificial Sequence
  MKO10001000_A_2810408A11Rik
  gRNA
agcccagaaccccctaccac

SEQ ID NO: 1001 - DNA, 20 bp, Artificial Sequence
  MKO10001001_A_2810408A11Rik
  gRNA
aaccgttggtgcttaagaca

SEQ ID NO: 1002 - DNA, 20 bp, Artificial Sequence
  MKO10001002_A_2810408M09Rik
  gRNA
aggcatggctggcacgtcct

SEQ ID NO: 1003 - DNA, 20 bp, Artificial Sequence
  MKO10001003_A_2810408M09Rik
  gRNA
gccgaggcgcgcgtcttccg

SEQ ID NO: 1004 - DNA, 20 bp, Artificial Sequence
  MKO10001004_A_2810408M09Rik
  gRNA
cttcaaacacggtctcggtg

SEQ ID NO: 1005 - DNA, 20 bp, Artificial Sequence
  MKO10001005_A_2810417H13Rik
  gRNA
tcttcaagttcgtcgagaaa

SEQ ID NO: 1006 - DNA, 20 bp, Artificial Sequence
  MKO10001006_A_2810417H13Rik
  gRNA
accaaagcaaactacgttcc

SEQ ID NO: 1007 - DNA, 20 bp, Artificial Sequence
  MKO10001007_A_2810417H13Rik
  gRNA
tcctggaacgtagtttgctt

SEQ ID NO: 1008 - DNA, 20 bp, Artificial Sequence
  MKO10001008_A_2810428I15Rik
  gRNA
agacgccccgatcgctacac

SEQ ID NO: 1009 - DNA, 20 bp, Artificial Sequence
  MKO10001009_A_2810428I15Rik
  gRNA
cttcgccgctgcctcgcggg

SEQ ID NO: 1010 - DNA, 20 bp, Artificial Sequence
  MKO10001010_A_2810428I15Rik
  gRNA
cgcacgtggcgggcgagcac

SEQ ID NO: 1011 - DNA, 20 bp, Artificial Sequence
  MKO10001011_A_2810459M11Rik
  gRNA
cttgcaccgggcccccgacc

SEQ ID NO: 1012 - DNA, 20 bp, Artificial Sequence
  MKO10001012_A_2810459M11Rik
  gRNA
cgcgtcatccgcacccgtgt

SEQ ID NO: 1013 - DNA, 20 bp, Artificial Sequence
  MKO10001013_A_2810459M11Rik
  gRNA
caagctcctcttccgagaac

SEQ ID NO: 1014 - DNA, 20 bp, Artificial Sequence
  MKO10001014_A_2810474O19Rik
  gRNA
cgtcaaacacagatccgtgc

SEQ ID NO: 1015 - DNA, 20 bp, Artificial Sequence
  MKO10001015_A_2810474O19Rik
  gRNA
tgactatcaattacctgatt

SEQ ID NO: 1016 - DNA, 20 bp, Artificial Sequence
  MKO10001016_A_2810474O19Rik
  gRNA
acttcctgggactatttaac

SEQ ID NO: 1017 - DNA, 20 bp, Artificial Sequence
  MKO10001017_A_2900011O08Rik
  gRNA
atgccgaggtggaacgctta

SEQ ID NO: 1018 - DNA, 20 bp, Artificial Sequence
  MKO10001018_A_2900011O08Rik
  gRNA
tccgtcgagagtcagaactc

SEQ ID NO: 1019 - DNA, 20 bp, Artificial Sequence
  MKO10001019_A_2900011O08Rik
  gRNA
ccaccttaagcgttccacct

SEQ ID NO: 1020 - DNA, 20 bp, Artificial Sequence
  MKO10001020_A_2900026A02Rik
  gRNA
tgagtaagcgaagccgtcgc

SEQ ID NO: 1021 - DNA, 20 bp, Artificial Sequence
  MKO10001021_A_2900026A02Rik
  gRNA
gtcacgctgctccaccgacg

SEQ ID NO: 1022 - DNA, 20 bp, Artificial Sequence
  MKO10001022_A_2900026A02Rik
  gRNA
acggacgctgcgctgctgtc

SEQ ID NO: 1023 - DNA, 20 bp, Artificial Sequence
  MKO10001023_A_2900092C05Rik
  gRNA
gtatacttactatatcacgt

SEQ ID NO: 1024 - DNA, 20 bp, Artificial Sequence
  MKO10001024_A_2900092C05Rik
  gRNA
cagtcgactggtaaaagttg

SEQ ID NO: 1025 - DNA, 20 bp, Artificial Sequence
  MKO10001025_A_2900092C05Rik
  gRNA
gctgggattattacttctgt

SEQ ID NO: 1026 - DNA, 20 bp, Artificial Sequence
  MKO10001026_A_42432
  gRNA
tgagtccgacggcctccagc

SEQ ID NO: 1027 - DNA, 20 bp, Artificial Sequence
  MKO10001027_A_42432
  gRNA
gcacattggccggtcattga

SEQ ID NO: 1028 - DNA, 20 bp, Artificial Sequence
  MKO10001028_A_42432
  gRNA
cttcttgtttataacgcccc

SEQ ID NO: 1029 - DNA, 20 bp, Artificial Sequence
  MKO10001029_A_42616
  gRNA
ggtacgtacgagtgtcctgt

SEQ ID NO: 1030 - DNA, 20 bp, Artificial Sequence
  MKO10001030_A_42616
  gRNA
gggccccagcttacgaccac

SEQ ID NO: 1031 - DNA, 20 bp, Artificial Sequence
  MKO10001031_A_42616
  gRNA
tgaattccgacttctcctcc

SEQ ID NO: 1032 - DNA, 20 bp, Artificial Sequence
  MKO10001032_A_3010026O09Rik
  gRNA
ctaagcccctcgagtcccgt

SEQ ID NO: 1033 - DNA, 20 bp, Artificial Sequence
  MKO10001033_A_3010026O09Rik
  gRNA
tcctctcaggcttacggtga

SEQ ID NO: 1034 - DNA, 20 bp, Artificial Sequence
  MKO10001034_A_3010026O09Rik
  gRNA
tgtccagatacttcaaccaa

SEQ ID NO: 1035 - DNA, 20 bp, Artificial Sequence
  MKO10001035_A_3110001I22Rik
  gRNA
tgaactaagtgagcgctgtg

SEQ ID NO: 1036 - DNA, 20 bp, Artificial Sequence
  MKO10001036_A_3110001I22Rik
  gRNA
ttcttcactgtgccgtttgt

SEQ ID NO: 1037 - DNA, 20 bp, Artificial Sequence
  MKO10001037_A_3110001I22Rik
  gRNA
ccagtgatgaatctaccctg

SEQ ID NO: 1038 - DNA, 20 bp, Artificial Sequence
  MKO10001038_A_3110002H16Rik
  gRNA
gctacaggagtggtcgttaa

SEQ ID NO: 1039 - DNA, 20 bp, Artificial Sequence
  MKO10001039_A_3110002H16Rik
  gRNA
atcgtcttcataactgacca

SEQ ID NO: 1040 - DNA, 20 bp, Artificial Sequence
  MKO10001040_A_3110002H16Rik
  gRNA
ccagcagaatccgagtatgt

SEQ ID NO: 1041 - DNA, 20 bp, Artificial Sequence
  MKO10001041_A_3110007F17Rik
  gRNA
gcaagagagctgcaagaaat

SEQ ID NO: 1042 - DNA, 20 bp, Artificial Sequence
  MKO10001042_A_3110007F17Rik
  gRNA
ccacatatttgatgccagca

SEQ ID NO: 1043 - DNA, 20 bp, Artificial Sequence
  MKO10001043_A_3110007F17Rik
  gRNA
gaccaacaacatttgcaacc

SEQ ID NO: 1044 - DNA, 20 bp, Artificial Sequence
  MKO10001044_A_3110009E18Rik
  gRNA
ccgctttcaccaggacgaga

SEQ ID NO: 1045 - DNA, 20 bp, Artificial Sequence
  MKO10001045_A_3110009E18Rik
  gRNA
atctctccacatggctgcgg

SEQ ID NO: 1046 - DNA, 20 bp, Artificial Sequence
  MKO10001046_A_3110009E18Rik
  gRNA
tcatccgttcatttgagcat

SEQ ID NO: 1047 - DNA, 20 bp, Artificial Sequence
  MKO10001047_A_3110021N24Rik
  gRNA
ctggaccccacgtcccgcta

SEQ ID NO: 1048 - DNA, 20 bp, Artificial Sequence
  MKO10001048_A_3110021N24Rik
  gRNA
cccgtggcccgcccctgacg

SEQ ID NO: 1049 - DNA, 20 bp, Artificial Sequence
  MKO10001049_A_3110021N24Rik
  gRNA
aactgtaggttcattcacac

SEQ ID NO: 1050 - DNA, 20 bp, Artificial Sequence
  MKO10001050_A_3110035E14Rik
  gRNA
ccgacctgtacccgccacca

SEQ ID NO: 1051 - DNA, 20 bp, Artificial Sequence
  MKO10001051_A_3110035E14Rik
  gRNA
ttcaccgagatcctagccac

SEQ ID NO: 1052 - DNA, 20 bp, Artificial Sequence
  MKO10001052_A_3110035E14Rik
  gRNA
tgcctcaacgctgtgagcgc

SEQ ID NO: 1053 - DNA, 20 bp, Artificial Sequence
  MKO10001053_A_3110040N11Rik
  gRNA
actggccttgcttgtcgcac

SEQ ID NO: 1054 - DNA, 20 bp, Artificial Sequence
  MKO10001054_A_3110040N11Rik
  gRNA
cattgcagcacctccgtccg

SEQ ID NO: 1055 - DNA, 20 bp, Artificial Sequence
  MKO10001055_A_3110040N11Rik
  gRNA
atagccattcatgccaaacc

SEQ ID NO: 1056 - DNA, 20 bp, Artificial Sequence
  MKO10001056_A_3110043O21Rik
  gRNA
agtatcattcccatgcttac

SEQ ID NO: 1057 - DNA, 20 bp, Artificial Sequence
  MKO10001057_A_3110043O21Rik
  gRNA
tgcactgctgccaactacaa

SEQ ID NO: 1058 - DNA, 20 bp, Artificial Sequence
  MKO10001058_A_3110043O21Rik
  gRNA
aatgacttccccagtaagca

SEQ ID NO: 1059 - DNA, 20 bp, Artificial Sequence
  MKO10001059_A_3110047P20Rik
  gRNA
cgcaggtcatagatctgtac

SEQ ID NO: 1060 - DNA, 20 bp, Artificial Sequence
  MKO10001060_A_3110047P20Rik
  gRNA
gccttctgccagtagtgaac

SEQ ID NO: 1061 - DNA, 20 bp, Artificial Sequence
  MKO10001061_A_3110047P20Rik
  gRNA
ggcctcttaggtgaaaaata

SEQ ID NO: 1062 - DNA, 20 bp, Artificial Sequence
  MKO10001062_A_3110052M02Rik
  gRNA
tttgtgacaaatcctataac

SEQ ID NO: 1063 - DNA, 20 bp, Artificial Sequence
  MKO10001063_A_3110052M02Rik
  gRNA
ttgatgaacagtatcacatg

SEQ ID NO: 1064 - DNA, 20 bp, Artificial Sequence
  MKO10001064_A_3110052M02Rik
  gRNA
tgtgtctgtagacttctcac

SEQ ID NO: 1065 - DNA, 20 bp, Artificial Sequence
  MKO10001065_A_3110057O12Rik
  gRNA
ctacccggtacacatcgata

SEQ ID NO: 1066 - DNA, 20 bp, Artificial Sequence
  MKO10001066_A_3110057O12Rik
  gRNA
cataccttatcgatgtgtac

SEQ ID NO: 1067 - DNA, 20 bp, Artificial Sequence
  MKO10001067_A_3110057O12Rik
  gRNA
cttgcaacaacagattcaat

SEQ ID NO: 1068 - DNA, 20 bp, Artificial Sequence
  MKO10001068_A_3110062M04Rik
  gRNA
aagacgcgttgaagtacgtc

SEQ ID NO: 1069 - DNA, 20 bp, Artificial Sequence
  MKO10001069_A_3110062M04Rik
  gRNA
agaggggaggaccctcgttt

SEQ ID NO: 1070 - DNA, 20 bp, Artificial Sequence
  MKO10001070_A_3110062M04Rik
  gRNA
tgctctgcagggccgcaaac

SEQ ID NO: 1071 - DNA, 20 bp, Artificial Sequence
  MKO10001071_A_3110079O15Rik
  gRNA
cagcagggcagcgatcacga

SEQ ID NO: 1072 - DNA, 20 bp, Artificial Sequence
  MKO10001072_A_3110079O15Rik
  gRNA
tccataggatcgcttggacc

SEQ ID NO: 1073 - DNA, 20 bp, Artificial Sequence
  MKO10001073_A_3110079O15Rik
  gRNA
tcaccagagggcaattcaat

SEQ ID NO: 1074 - DNA, 20 bp, Artificial Sequence
  MKO10001074_A_3110082I17Rik
  gRNA
gtcctcggcgtctcctctgc

SEQ ID NO: 1075 - DNA, 20 bp, Artificial Sequence
  MKO10001075_A_3110082I17Rik
  gRNA
gaaggtgcagcgcctccgcc

SEQ ID NO: 1076 - DNA, 20 bp, Artificial Sequence
  MKO10001076_A_3110082I17Rik
  gRNA
cctgatgcagaagctcgatg

SEQ ID NO: 1077 - DNA, 20 bp, Artificial Sequence
  MKO10001077_A_3110082J24Rik
  gRNA
ctccccggggttcgccgtcc

SEQ ID NO: 1078 - DNA, 20 bp, Artificial Sequence
  MKO10001078_A_3110082J24Rik
  gRNA
tggccgtcggggtcccggga

SEQ ID NO: 1079 - DNA, 20 bp, Artificial Sequence
  MKO10001079_A_3110082J24Rik
  gRNA
ccaggcggggagcgccgctt

SEQ ID NO: 1080 - DNA, 20 bp, Artificial Sequence
  MKO10001080_A_3300002I08Rik
  gRNA
gcatgttccgtgtgccgccg

SEQ ID NO: 1081 - DNA, 20 bp, Artificial Sequence
  MKO10001081_A_3300002I08Rik
  gRNA
agctcaggcaagtcccgaca

SEQ ID NO: 1082 - DNA, 20 bp, Artificial Sequence
  MKO10001082_A_3300002I08Rik
  gRNA
gtgctaccttgttgcaactt

SEQ ID NO: 1083 - DNA, 20 bp, Artificial Sequence
  MKO10001083_A_3425401B19Rik
  gRNA
gccctacggggctaactcgg

SEQ ID NO: 1084 - DNA, 20 bp, Artificial Sequence
  MKO10001084_A_3425401B19Rik
  gRNA
tactccgtgccgccaaacaa

SEQ ID NO: 1085 - DNA, 20 bp, Artificial Sequence
  MKO10001085_A_3425401B19Rik
  gRNA
acagcaacccaagtacgttc

SEQ ID NO: 1086 - DNA, 20 bp, Artificial Sequence
  MKO10001086_A_3632451O06Rik
  gRNA
atgcttcctgaacgtatgtc

SEQ ID NO: 1087 - DNA, 20 bp, Artificial Sequence
  MKO10001087_A_3632451O06Rik
  gRNA
gccattggagagcccaatac

SEQ ID NO: 1088 - DNA, 20 bp, Artificial Sequence
  MKO10001088_A_3632451O06Rik
  gRNA
accatcgaagtctttataca

SEQ ID NO: 1089 - DNA, 20 bp, Artificial Sequence
  MKO10001089_A_3830403N18Rik
  gRNA
tcacataaaaagaaaacgca

SEQ ID NO: 1090 - DNA, 20 bp, Artificial Sequence
  MKO10001090_A_3830403N18Rik
  gRNA
gtatctccaactacttcttc

SEQ ID NO: 1091 - DNA, 20 bp, Artificial Sequence
  MKO10001091_A_3830403N18Rik
  gRNA
gcaaatcctgaagaagtagt

SEQ ID NO: 1092 - DNA, 20 bp, Artificial Sequence
  MKO10001092_A_3830406C13Rik
  gRNA
aagaaacctccgactcttga

SEQ ID NO: 1093 - DNA, 20 bp, Artificial Sequence
  MKO10001093_A_3830406C13Rik
  gRNA
acctcaagagaaagcatcga

SEQ ID NO: 1094 - DNA, 20 bp, Artificial Sequence
  MKO10001094_A_3830406C13Rik
  gRNA
gccttcgatgctttctcttg

SEQ ID NO: 1095 - DNA, 20 bp, Artificial Sequence
  MKO10001095_A_3830417A13Rik
  gRNA
tccatgtagcatcccgtcat

SEQ ID NO: 1096 - DNA, 20 bp, Artificial Sequence
  MKO10001096_A_3830417A13Rik
  gRNA
cataagctcgtgcgccccac

SEQ ID NO: 1097 - DNA, 20 bp, Artificial Sequence
  MKO10001097_A_3830417A13Rik
  gRNA
acctatgacgggatgctaca

SEQ ID NO: 1098 - DNA, 20 bp, Artificial Sequence
  MKO10001098_A_42433
  gRNA
tttaaagatgcgatataccg

SEQ ID NO: 1099 - DNA, 20 bp, Artificial Sequence
  MKO10001099_A_42433
  gRNA
gaccctggtggcgcaacatc

SEQ ID NO: 1100 - DNA, 20 bp, Artificial Sequence
  MKO10001100_A_42433
  gRNA
ctaagcccatgccgttgtga

SEQ ID NO: 1101 - DNA, 20 bp, Artificial Sequence
  MKO10001101_A_42617
  gRNA
cggaaactgctgggcgccga

SEQ ID NO: 1102 - DNA, 20 bp, Artificial Sequence
  MKO10001102_A_42617
  gRNA
agagcggatcatgcaaaccg

SEQ ID NO: 1103 - DNA, 20 bp, Artificial Sequence
  MKO10001103_A_42617
  gRNA
ttgtcttggactccgctgag

SEQ ID NO: 1104 - DNA, 20 bp, Artificial Sequence
  MKO10001104_A_4430402I18Rik
  gRNA
cgttctagcatgggaagagt

SEQ ID NO: 1105 - DNA, 20 bp, Artificial Sequence
  MKO10001105_A_4430402I18Rik
  gRNA
ttagtacagctagtgtctcc

SEQ ID NO: 1106 - DNA, 20 bp, Artificial Sequence
  MKO10001106_A_4430402I18Rik
  gRNA
tagctgtactaattcaaacc

SEQ ID NO: 1107 - DNA, 20 bp, Artificial Sequence
  MKO10001107_A_4632428N05Rik
  gRNA
acggtacttacggcggtgag

SEQ ID NO: 1108 - DNA, 20 bp, Artificial Sequence
  MKO10001108_A_4632428N05Rik
  gRNA
ctacgggtccatggagctac

SEQ ID NO: 1109 - DNA, 20 bp, Artificial Sequence
  MKO10001109_A_4632428N05Rik
  gRNA
atgtgaccatctacaagacg

SEQ ID NO: 1110 - DNA, 20 bp, Artificial Sequence
  MKO10001110_A_4632434I11Rik
  gRNA
ttacggccactggtttacac

SEQ ID NO: 1111 - DNA, 20 bp, Artificial Sequence
  MKO10001111_A_4632434I11Rik
  gRNA
gaaggattcgctgtttcttc

SEQ ID NO: 1112 - DNA, 20 bp, Artificial Sequence
  MKO10001112_A_4632434I11Rik
  gRNA
acactgcatctccgtttccg

SEQ ID NO: 1113 - DNA, 20 bp, Artificial Sequence
  MKO10001113_A_4732456N10Rik
  gRNA
ggaaatccacagacgtacag

SEQ ID NO: 1114 - DNA, 20 bp, Artificial Sequence
  MKO10001114_A_4732456N10Rik
  gRNA
tctctgccgctgtacgtctg

SEQ ID NO: 1115 - DNA, 20 bp, Artificial Sequence
  MKO10001115_A_4732456N10Rik
  gRNA
aagcctacatcaccaacctg

SEQ ID NO: 1116 - DNA, 20 bp, Artificial Sequence
  MKO10001116_A_4833403I15Rik
  gRNA
acgattcgtcaaatatcaac

SEQ ID NO: 1117 - DNA, 20 bp, Artificial Sequence
  MKO10001117_A_4833403I15Rik
  gRNA
cttgagcatcatcgcccatg

SEQ ID NO: 1118 - DNA, 20 bp, Artificial Sequence
  MKO10001118_A_4833403I15Rik
  gRNA
gctccatttgagtcgctacc

SEQ ID NO: 1119 - DNA, 20 bp, Artificial Sequence
  MKO10001119_A_4833420G17Rik
  gRNA
ttgaaaaccgatccgtctcc

SEQ ID NO: 1120 - DNA, 20 bp, Artificial Sequence
  MKO10001120_A_4833420G17Rik
  gRNA
aaaggtacgcgtgtccatcc

SEQ ID NO: 1121 - DNA, 20 bp, Artificial Sequence
  MKO10001121_A_4833420G17Rik
  gRNA
ctgaagagtttcgaaaatct

SEQ ID NO: 1122 - DNA, 20 bp, Artificial Sequence
  MKO10001122_A_4833423E24Rik
  gRNA
ctaacgtcttgcgcaattca

SEQ ID NO: 1123 - DNA, 20 bp, Artificial Sequence
  MKO10001123_A_4833423E24Rik
  gRNA
tgaattgcgcaagacgttag

SEQ ID NO: 1124 - DNA, 20 bp, Artificial Sequence
  MKO10001124_A_4833423E24Rik
  gRNA
tgatgtgggcccactctttc

SEQ ID NO: 1125 - DNA, 20 bp, Artificial Sequence
  MKO10001125_A_4833424O15Rik
  gRNA
cgccgaaccgtccgatttct

SEQ ID NO: 1126 - DNA, 20 bp, Artificial Sequence
  MKO10001126_A_4833424O15Rik
  gRNA
cgtaattaccgtcagatacg

SEQ ID NO: 1127 - DNA, 20 bp, Artificial Sequence
  MKO10001127_A_4833424O15Rik
  gRNA
ctacgctgccacgtatctga

SEQ ID NO: 1128 - DNA, 20 bp, Artificial Sequence
  MKO10001128_A_4833427G06Rik
  gRNA
atacttactgtcctgatcaa

SEQ ID NO: 1129 - DNA, 20 bp, Artificial Sequence
  MKO10001129_A_4833427G06Rik
  gRNA
ttcattaccttataaaccta

SEQ ID NO: 1130 - DNA, 20 bp, Artificial Sequence
  MKO10001130_A_4833427G06Rik
  gRNA
gagagcaaagtatctccaaa

SEQ ID NO: 1131 - DNA, 20 bp, Artificial Sequence
  MKO10001131_A_4833439L19Rik
  gRNA
agggcgcttacttgtgatca

SEQ ID NO: 1132 - DNA, 20 bp, Artificial Sequence
  MKO10001132_A_4833439L19Rik
  gRNA
gggatgctgcccatgtccga

SEQ ID NO: 1133 - DNA, 20 bp, Artificial Sequence
  MKO10001133_A_4833439L19Rik
  gRNA
catcatagctgaatgcccga

SEQ ID NO: 1134 - DNA, 20 bp, Artificial Sequence
  MKO10001134_A_4921501E09Rik
  gRNA
cttggggtacgccgagaaac

SEQ ID NO: 1135 - DNA, 20 bp, Artificial Sequence
  MKO10001135_A_4921501E09Rik
  gRNA
agatagttcgtaagctttcc

SEQ ID NO: 1136 - DNA, 20 bp, Artificial Sequence
  MKO10001136_A_4921501E09Rik
  gRNA
ctctcaaagccgcaatcttc

SEQ ID NO: 1137 - DNA, 20 bp, Artificial Sequence
  MKO10001137_A_4921504E06Rik
  gRNA
gattattacatcacttcacg

SEQ ID NO: 1138 - DNA, 20 bp, Artificial Sequence
  MKO10001138_A_4921504E06Rik
  gRNA
gatgccatagctattatcaa

SEQ ID NO: 1139 - DNA, 20 bp, Artificial Sequence
  MKO10001139_A_4921504E06Rik
  gRNA
gaaagatttgactcaatcca

SEQ ID NO: 1140 - DNA, 20 bp, Artificial Sequence
  MKO10001140_A_4921506M07Rik
  gRNA
gccatcgcacgagatcgcgc

SEQ ID NO: 1141 - DNA, 20 bp, Artificial Sequence
  MKO10001141_A_4921506M07Rik
  gRNA
ccattgcgatgtcgtagttc

SEQ ID NO: 1142 - DNA, 20 bp, Artificial Sequence
  MKO10001142_A_4921506M07Rik
  gRNA
aaaggtttaccgtcgtcctc

SEQ ID NO: 1143 - DNA, 20 bp, Artificial Sequence
  MKO10001143_A_4921507P07Rik
  gRNA
aaggtccttaggcgatgtaa

SEQ ID NO: 1144 - DNA, 20 bp, Artificial Sequence
  MKO10001144_A_4921507P07Rik
  gRNA
ccccgccaaatccgtaatgc

SEQ ID NO: 1145 - DNA, 20 bp, Artificial Sequence
  MKO10001145_A_4921507P07Rik
  gRNA
tccgacctttacatcgccta

SEQ ID NO: 1146 - DNA, 20 bp, Artificial Sequence
  MKO10001146_A_4921509C19Rik
  gRNA
ctctgattaaaccgttcctc

SEQ ID NO: 1147 - DNA, 20 bp, Artificial Sequence
  MKO10001147_A_4921509C19Rik
  gRNA
cccctctataatggtgctca

SEQ ID NO: 1148 - DNA, 20 bp, Artificial Sequence
  MKO10001148_A_4921509C19Rik
  gRNA
tctgtttgaagagcatttag

SEQ ID NO: 1149 - DNA, 20 bp, Artificial Sequence
  MKO10001149_A_4921511H03Rik
  gRNA
atcacagtctccgtctatag

SEQ ID NO: 1150 - DNA, 20 bp, Artificial Sequence
  MKO10001150_A_4921511H03Rik
  gRNA
gccacacaatatcggaatcc

SEQ ID NO: 1151 - DNA, 20 bp, Artificial Sequence
  MKO10001151_A_4921511H03Rik
  gRNA
tccccattctagaaacggga

SEQ ID NO: 1152 - DNA, 20 bp, Artificial Sequence
  MKO10001152_A_4921511M17Rik
  gRNA
atcaactcatcgttgatact

SEQ ID NO: 1153 - DNA, 20 bp, Artificial Sequence
  MKO10001153_A_4921511M17Rik
  gRNA
ctacagatttatcaatgaga

SEQ ID NO: 1154 - DNA, 20 bp, Artificial Sequence
  MKO10001154_A_4921511M17Rik
  gRNA
tatcacttcacgcatctaga

SEQ ID NO: 1155 - DNA, 20 bp, Artificial Sequence
  MKO10001155_A_4921517D22Rik
  gRNA
atttcaaggggcttgcgacg

SEQ ID NO: 1156 - DNA, 20 bp, Artificial Sequence
  MKO10001156_A_4921517D22Rik
  gRNA
ccaaatcatcgtactccacc

SEQ ID NO: 1157 - DNA, 20 bp, Artificial Sequence
  MKO10001157_A_4921517D22Rik
  gRNA
aaattcataccaaacatcgg

SEQ ID NO: 1158 - DNA, 20 bp, Artificial Sequence
  MKO10001158_A_4921524J17Rik
  gRNA
gtgccccgagtgcgaccaac

SEQ ID NO: 1159 - DNA, 20 bp, Artificial Sequence
  MKO10001159_A_4921524J17Rik
  gRNA
gagaaatcaccgccgtctac

SEQ ID NO: 1160 - DNA, 20 bp, Artificial Sequence
  MKO10001160_A_4921524J17Rik
  gRNA
gcccacctgttggtcgcact

SEQ ID NO: 1161 - DNA, 20 bp, Artificial Sequence
  MKO10001161_A_4921524L21Rik
  gRNA
ttcaatagtgacgactaagt

SEQ ID NO: 1162 - DNA, 20 bp, Artificial Sequence
  MKO10001162_A_4921524L21Rik
  gRNA
acgtcttcccttgtcgcccc

SEQ ID NO: 1163 - DNA, 20 bp, Artificial Sequence
  MKO10001163_A_4921524L21Rik
  gRNA
ctgccaagaagatgcgctgt

SEQ ID NO: 1164 - DNA, 20 bp, Artificial Sequence
  MKO10001164_A_4921530D09Rik
  gRNA
tctgtccgcgtcgccgaacc

SEQ ID NO: 1165 - DNA, 20 bp, Artificial Sequence
  MKO10001165_A_4921530D09Rik
  gRNA
ctcggcggaggttgctgcgc

SEQ ID NO: 1166 - DNA, 20 bp, Artificial Sequence
  MKO10001166_A_4921530D09Rik
  gRNA
ccaccagattatccgccaac

SEQ ID NO: 1167 - DNA, 20 bp, Artificial Sequence
  MKO10001167_A_4921530L21Rik
  gRNA
tattcttcccccgacagttt

SEQ ID NO: 1168 - DNA, 20 bp, Artificial Sequence
  MKO10001168_A_4921530L21Rik
  gRNA
ttggcaacagaatcgagcca

SEQ ID NO: 1169 - DNA, 20 bp, Artificial Sequence
  MKO10001169_A_4921530L21Rik
  gRNA
gcagagccttagcctcattc

SEQ ID NO: 1170 - DNA, 20 bp, Artificial Sequence
  MKO10001170_A_4921536K21Rik
  gRNA
cgcacagcgtatctgcgaga

SEQ ID NO: 1171 - DNA, 20 bp, Artificial Sequence
  MKO10001171_A_4921536K21Rik
  gRNA
cgcagatacgctgtgcgttg

SEQ ID NO: 1172 - DNA, 20 bp, Artificial Sequence
  MKO10001172_A_4921536K21Rik
  gRNA
accgaagagactaccgcttc

SEQ ID NO: 1173 - DNA, 20 bp, Artificial Sequence
  MKO10001173_A_4921539E11Rik
  gRNA
tatatctcttcgttatctta

SEQ ID NO: 1174 - DNA, 20 bp, Artificial Sequence
  MKO10001174_A_4921539E11Rik
  gRNA
aacgtctctcctccatttac

SEQ ID NO: 1175 - DNA, 20 bp, Artificial Sequence
  MKO10001175_A_4921539E11Rik
  gRNA
tgaatccaatgctagtaaga

SEQ ID NO: 1176 - DNA, 20 bp, Artificial Sequence
  MKO10001176_A_4922501C03Rik
  gRNA
cacaattgaaagctttacat

SEQ ID NO: 1177 - DNA, 20 bp, Artificial Sequence
  MKO10001177_A_4922501C03Rik
  gRNA
cgtcaagcctttctcaagcc

SEQ ID NO: 1178 - DNA, 20 bp, Artificial Sequence
  MKO10001178_A_4922501C03Rik
  gRNA
gaagacatatcagcctgtta

SEQ ID NO: 1179 - DNA, 20 bp, Artificial Sequence
  MKO10001179_A_4922501L14Rik
  gRNA
cgtatttaacagcgttgtcc

SEQ ID NO: 1180 - DNA, 20 bp, Artificial Sequence
  MKO10001180_A_4922501L14Rik
  gRNA
ctacttcgggttcgtgtgtg

SEQ ID NO: 1181 - DNA, 20 bp, Artificial Sequence
  MKO10001181_A_4922501L14Rik
  gRNA
acggtgcttgaactcgcagc

SEQ ID NO: 1182 - DNA, 20 bp, Artificial Sequence
  MKO10001182_A_4922502D21Rik
  gRNA
aaacaagacatgtgacgacg

SEQ ID NO: 1183 - DNA, 20 bp, Artificial Sequence
  MKO10001183_A_4922502D21Rik
  gRNA
cgtagtttgttccagtcttt

SEQ ID NO: 1184 - DNA, 20 bp, Artificial Sequence
  MKO10001184_A_4922502D21Rik
  gRNA
gtgtgccttcgtgcatcaaa

SEQ ID NO: 1185 - DNA, 20 bp, Artificial Sequence
  MKO10001185_A_4922505E12Rik
  gRNA
accgaacagcgctccttgcc

SEQ ID NO: 1186 - DNA, 20 bp, Artificial Sequence
  MKO10001186_A_4922505E12Rik
  gRNA
ggtcgcggttactcctattc

SEQ ID NO: 1187 - DNA, 20 bp, Artificial Sequence
  MKO10001187_A_4922505E12Rik
  gRNA
cgcgggctgggttgatcccg

SEQ ID NO: 1188 - DNA, 20 bp, Artificial Sequence
  MKO10001188_A_4930402F06Rik
  gRNA
actggtccgctccgattgtg

SEQ ID NO: 1189 - DNA, 20 bp, Artificial Sequence
  MKO10001189_A_4930402F06Rik
  gRNA
tagctcagttgcacacgtat

SEQ ID NO: 1190 - DNA, 20 bp, Artificial Sequence
  MKO10001190_A_4930402F06Rik
  gRNA
cgtggcgttaaaccagtctg

SEQ ID NO: 1191 - DNA, 20 bp, Artificial Sequence
  MKO10001191_A_4930402H24Rik
  gRNA
caaaagatagcggtagttga

SEQ ID NO: 1192 - DNA, 20 bp, Artificial Sequence
  MKO10001192_A_4930402H24Rik
  gRNA
tactcaccttgggagctata

SEQ ID NO: 1193 - DNA, 20 bp, Artificial Sequence
  MKO10001193_A_4930402H24Rik
  gRNA
tttctccagtgtgccacgta

SEQ ID NO: 1194 - DNA, 20 bp, Artificial Sequence
  MKO10001194_A_4930402K13Rik
  gRNA
gcaacaccgacactatggta

SEQ ID NO: 1195 - DNA, 20 bp, Artificial Sequence
  MKO10001195_A_4930402K13Rik
  gRNA
tccagcatccggttagatct

SEQ ID NO: 1196 - DNA, 20 bp, Artificial Sequence
  MKO10001196_A_4930402K13Rik
  gRNA
accaagatctaaccggatgc

SEQ ID NO: 1197 - DNA, 20 bp, Artificial Sequence
  MKO10001197_A_4930404A10Rik
  gRNA
ctttacaggaccagccgagc

SEQ ID NO: 1198 - DNA, 20 bp, Artificial Sequence
  MKO10001198_A_4930404A10Rik
  gRNA
ccatcgccagaactgttcag

SEQ ID NO: 1199 - DNA, 20 bp, Artificial Sequence
  MKO10001199_A_4930404A10Rik
  gRNA
tcgagtactgagctagtttc

SEQ ID NO: 1200 - DNA, 20 bp, Artificial Sequence
  MKO10001200_A_4930404N11Rik
  gRNA
tcttgacactccgtaccgcg

SEQ ID NO: 1201 - DNA, 20 bp, Artificial Sequence
  MKO10001201_A_4930404N11Rik
  gRNA
cggcacatagtcggaccgcc

SEQ ID NO: 1202 - DNA, 20 bp, Artificial Sequence
  MKO10001202_A_4930404N11Rik
  gRNA
agcagccgtgccaacgcgtg

SEQ ID NO: 1203 - DNA, 20 bp, Artificial Sequence
  MKO10001203_A_4930407I10Rik
  gRNA
tcccggttcgtgcgtgatcc

SEQ ID NO: 1204 - DNA, 20 bp, Artificial Sequence
  MKO10001204_A_4930407I10Rik
  gRNA
gggcctccctcgacgcatcc

SEQ ID NO: 1205 - DNA, 20 bp, Artificial Sequence
  MKO10001205_A_4930407I10Rik
  gRNA
gaatggacctatcacagcac

SEQ ID NO: 1206 - DNA, 20 bp, Artificial Sequence
  MKO10001206_A_4930412D23Rik
  gRNA
tgcgctaaccgaatgtccaa

SEQ ID NO: 1207 - DNA, 20 bp, Artificial Sequence
  MKO10001207_A_4930412D23Rik
  gRNA
atggcgaatttggtatttcg

SEQ ID NO: 1208 - DNA, 20 bp, Artificial Sequence
  MKO10001208_A_4930412D23Rik
  gRNA
ccatgatgccctcgttcctt

SEQ ID NO: 1209 - DNA, 20 bp, Artificial Sequence
  MKO10001209_A_4930415F15Rik
  gRNA
agtcgaccgcttccgtcacc

SEQ ID NO: 1210 - DNA, 20 bp, Artificial Sequence
  MKO10001210_A_4930415F15Rik
  gRNA
ttcaggtctgcgaatatccc

SEQ ID NO: 1211 - DNA, 20 bp, Artificial Sequence
  MKO10001211_A_4930415F15Rik
  gRNA
ctctcatttcttgtagtaag

SEQ ID NO: 1212 - DNA, 20 bp, Artificial Sequence
  MKO10001212_A_4930415L06Rik
  gRNA
caaaatgacgtggcctagcg

SEQ ID NO: 1213 - DNA, 20 bp, Artificial Sequence
  MKO10001213_A_4930415L06Rik
  gRNA
agtaaaagtctacgtcatga

SEQ ID NO: 1214 - DNA, 20 bp, Artificial Sequence
  MKO10001214_A_4930415L06Rik
  gRNA
cttagtccgagcttatgcaa

SEQ ID NO: 1215 - DNA, 20 bp, Artificial Sequence
  MKO10001215_A_4930415O20Rik
  gRNA
ttgtgggcacttcatccttc

SEQ ID NO: 1216 - DNA, 20 bp, Artificial Sequence
  MKO10001216_A_4930415O20Rik
  gRNA
tcattaaaagcccaatgacc

SEQ ID NO: 1217 - DNA, 20 bp, Artificial Sequence
  MKO10001217_A_4930415O20Rik
  gRNA
cccccgattatctcagaaga

SEQ ID NO: 1218 - DNA, 20 bp, Artificial Sequence
  MKO10001218_A_4930422G04Rik
  gRNA
taccgatgacgagcctaaag

SEQ ID NO: 1219 - DNA, 20 bp, Artificial Sequence
  MKO10001219_A_4930422G04Rik
  gRNA
gtggactcgagaaggttctc

SEQ ID NO: 1220 - DNA, 20 bp, Artificial Sequence
  MKO10001220_A_4930422G04Rik
  gRNA
gcggtatttaatcacagttg

SEQ ID NO: 1221 - DNA, 20 bp, Artificial Sequence
  MKO10001221_A_4930426D05Rik
  gRNA
aagagctcagaggcgaccga

SEQ ID NO: 1222 - DNA, 20 bp, Artificial Sequence
  MKO10001222_A_4930426D05Rik
  gRNA
caaagcggaggcgcttcatg

SEQ ID NO: 1223 - DNA, 20 bp, Artificial Sequence
  MKO10001223_A_4930426D05Rik
  gRNA
cggcgatccagaagccgcgc

SEQ ID NO: 1224 - DNA, 20 bp, Artificial Sequence
  MKO10001224_A_4930427A07Rik
  gRNA
acagatccacctgtacacgc

SEQ ID NO: 1225 - DNA, 20 bp, Artificial Sequence
  MKO10001225_A_4930427A07Rik
  gRNA
tgtggcatccctgcgtgtac

SEQ ID NO: 1226 - DNA, 20 bp, Artificial Sequence
  MKO10001226_A_4930427A07Rik
  gRNA
ctgtcttggctcctcgcccg

SEQ ID NO: 1227 - DNA, 20 bp, Artificial Sequence
  MKO10001227_A_4930428D18Rik
  gRNA
aaaccgttgcaatagccaaa

SEQ ID NO: 1228 - DNA, 20 bp, Artificial Sequence
  MKO10001228_A_4930428D18Rik
  gRNA
tagagaccagtagcaattgt

SEQ ID NO: 1229 - DNA, 20 bp, Artificial Sequence
  MKO10001229_A_4930428D18Rik
  gRNA
aggtatcatggtagttgtat

SEQ ID NO: 1230 - DNA, 20 bp, Artificial Sequence
  MKO10001230_A_4930430A15Rik
  gRNA
cgtatatataccttcatcag

SEQ ID NO: 1231 - DNA, 20 bp, Artificial Sequence
  MKO10001231_A_4930430A15Rik
  gRNA
gctcctaggctgttcaaaac

SEQ ID NO: 1232 - DNA, 20 bp, Artificial Sequence
  MKO10001232_A_4930430A15Rik
  gRNA
agatatggtcaacctacttt

SEQ ID NO: 1233 - DNA, 20 bp, Artificial Sequence
  MKO10001233_A_4930430D24Rik
  gRNA
agatagcagaagcggttgca

SEQ ID NO: 1234 - DNA, 20 bp, Artificial Sequence
  MKO10001234_A_4930430D24Rik
  gRNA
acccctatgaagtgtcctac

SEQ ID NO: 1235 - DNA, 20 bp, Artificial Sequence
  MKO10001235_A_4930430D24Rik
  gRNA
ctgcaagttcctctgcacca

SEQ ID NO: 1236 - DNA, 20 bp, Artificial Sequence
  MKO10001236_A_4930430F08Rik
  gRNA
gcaatattgctggcactcgt

SEQ ID NO: 1237 - DNA, 20 bp, Artificial Sequence
  MKO10001237_A_4930430F08Rik
  gRNA
ttctatctagtcgagcccaa

SEQ ID NO: 1238 - DNA, 20 bp, Artificial Sequence
  MKO10001238_A_4930430F08Rik
  gRNA
ttacgagtttggaattgccc

SEQ ID NO: 1239 - DNA, 20 bp, Artificial Sequence
  MKO10001239_A_4930432K09Rik
  gRNA
ccatctctgaatatcccgtt

SEQ ID NO: 1240 - DNA, 20 bp, Artificial Sequence
  MKO10001240_A_4930432K09Rik
  gRNA
atcaccctcgtccactgaag

SEQ ID NO: 1241 - DNA, 20 bp, Artificial Sequence
  MKO10001241_A_4930432K09Rik
  gRNA
gcaggaactgctacgggctc

SEQ ID NO: 1242 - DNA, 20 bp, Artificial Sequence
  MKO10001242_A_4930432K21Rik
  gRNA
gctctttgggtgatcctgcg

SEQ ID NO: 1243 - DNA, 20 bp, Artificial Sequence
  MKO10001243_A_4930432K21Rik
  gRNA
gctgcaacagagtgctccac

SEQ ID NO: 1244 - DNA, 20 bp, Artificial Sequence
  MKO10001244_A_4930432K21Rik
  gRNA
cggccatatagcccaagaaa

SEQ ID NO: 1245 - DNA, 20 bp, Artificial Sequence
  MKO10001245_A_4930432M17Rik
  gRNA
ataatccgtcattgacaaag

SEQ ID NO: 1246 - DNA, 20 bp, Artificial Sequence
  MKO10001246_A_4930432M17Rik
  gRNA
gaaagcatgacgtgaaatcc

SEQ ID NO: 1247 - DNA, 20 bp, Artificial Sequence
  MKO10001247_A_4930432M17Rik
  gRNA
tgccccctttgatacagtct

SEQ ID NO: 1248 - DNA, 20 bp, Artificial Sequence
  MKO10001248_A_4930433I11Rik
  gRNA
tacattagatcgcatggcac

SEQ ID NO: 1249 - DNA, 20 bp, Artificial Sequence
  MKO10001249_A_4930433I11Rik
  gRNA
ctaaagactccacagttgtc

SEQ ID NO: 1250 - DNA, 20 bp, Artificial Sequence
  MKO10001250_A_4930433I11Rik
  gRNA
atggaaatttcccgatacta

SEQ ID NO: 1251 - DNA, 20 bp, Artificial Sequence
  MKO10001251_A_4930435E12Rik
  gRNA
ttagtgttcggctctcgatg

SEQ ID NO: 1252 - DNA, 20 bp, Artificial Sequence
  MKO10001252_A_4930435E12Rik
  gRNA
tcatgttgcacttcgctatg

SEQ ID NO: 1253 - DNA, 20 bp, Artificial Sequence
  MKO10001253_A_4930435E12Rik
  gRNA
atagcgaagtgcaacatgat

SEQ ID NO: 1254 - DNA, 20 bp, Artificial Sequence
  MKO10001254_A_4930444G20Rik
  gRNA
ctcgggagctcttgatctcg

SEQ ID NO: 1255 - DNA, 20 bp, Artificial Sequence
  MKO10001255_A_4930444G20Rik
  gRNA
caatagcttattccccaata

SEQ ID NO: 1256 - DNA, 20 bp, Artificial Sequence
  MKO10001256_A_4930444G20Rik
  gRNA
aaaaagcctattacagaccg

SEQ ID NO: 1257 - DNA, 20 bp, Artificial Sequence
  MKO10001257_A_4930444P10Rik
  gRNA
ggagtatgacactattcgcc

SEQ ID NO: 1258 - DNA, 20 bp, Artificial Sequence
  MKO10001258_A_4930444P10Rik
  gRNA
ttggaacccgttagcagtct

SEQ ID NO: 1259 - DNA, 20 bp, Artificial Sequence
  MKO10001259_A_4930444P10Rik
  gRNA
tgccatactgcacgactcct

SEQ ID NO: 1260 - DNA, 20 bp, Artificial Sequence
  MKO10001260_A_4930447A16Rik
  gRNA
tcagagacgcaacaatcctg

SEQ ID NO: 1261 - DNA, 20 bp, Artificial Sequence
  MKO10001261_A_4930447A16Rik
  gRNA
tgtgcatcctccccaacgca

SEQ ID NO: 1262 - DNA, 20 bp, Artificial Sequence
  MKO10001262_A_4930447A16Rik
  gRNA
gtaatgtctgcagagtgacc

SEQ ID NO: 1263 - DNA, 20 bp, Artificial Sequence
  MKO10001263_A_4930447C04Rik
  gRNA
tacttatgtcttgctcatac

SEQ ID NO: 1264 - DNA, 20 bp, Artificial Sequence
  MKO10001264_A_4930447C04Rik
  gRNA
agctataaacaaagtagatg

SEQ ID NO: 1265 - DNA, 20 bp, Artificial Sequence
  MKO10001265_A_4930447C04Rik
  gRNA
tttcttggtaagcagtaagc

SEQ ID NO: 1266 - DNA, 20 bp, Artificial Sequence
  MKO10001266_A_4930449I24Rik
  gRNA
gtaagacacgaataattgcc

SEQ ID NO: 1267 - DNA, 20 bp, Artificial Sequence
  MKO10001267_A_4930449I24Rik
  gRNA
ctctgggaggcaggagagtc

SEQ ID NO: 1268 - DNA, 20 bp, Artificial Sequence
  MKO10001268_A_4930449I24Rik
  gRNA
ccactcacgttctcatcagc

SEQ ID NO: 1269 - DNA, 20 bp, Artificial Sequence
  MKO10001269_A_4930451C15Rik
  gRNA
gtgccgaaggttcaattcag

SEQ ID NO: 1270 - DNA, 20 bp, Artificial Sequence
  MKO10001270_A_4930451C15Rik
  gRNA
gttccagggggtccgggcat

SEQ ID NO: 1271 - DNA, 20 bp, Artificial Sequence
  MKO10001271_A_4930451C15Rik
  gRNA
caagggcagtgcagatcgcc

SEQ ID NO: 1272 - DNA, 20 bp, Artificial Sequence
  MKO10001272_A_4930451G09Rik
  gRNA
gctgaccgctgccaagacca

SEQ ID NO: 1273 - DNA, 20 bp, Artificial Sequence
  MKO10001273_A_4930451G09Rik
  gRNA
atcaaaggacttggcccatc

SEQ ID NO: 1274 - DNA, 20 bp, Artificial Sequence
  MKO10001274_A_4930451G09Rik
  gRNA
cctgactcatcgacaccaac

SEQ ID NO: 1275 - DNA, 20 bp, Artificial Sequence
  MKO10001275_A_4930451I11Rik
  gRNA
cctataacgttcgttaagac

SEQ ID NO: 1276 - DNA, 20 bp, Artificial Sequence
  MKO10001276_A_4930451I11Rik
  gRNA
cctgtcttaacgaacgttat

SEQ ID NO: 1277 - DNA, 20 bp, Artificial Sequence
  MKO10001277_A_4930451I11Rik
  gRNA
cgtggggggttatgaagctg

SEQ ID NO: 1278 - DNA, 20 bp, Artificial Sequence
  MKO10001278_A_4930452B06Rik
  gRNA
tgggcagtccgtctgtgatt

SEQ ID NO: 1279 - DNA, 20 bp, Artificial Sequence
  MKO10001279_A_4930452B06Rik
  gRNA
cggatttgcttattctcctt

SEQ ID NO: 1280 - DNA, 20 bp, Artificial Sequence
  MKO10001280_A_4930452B06Rik
  gRNA
caacagaatccagttaccga

SEQ ID NO: 1281 - DNA, 20 bp, Artificial Sequence
  MKO10001281_A_4930453H23Rik
  gRNA
aatagattagaatcacgatc

SEQ ID NO: 1282 - DNA, 20 bp, Artificial Sequence
  MKO10001282_A_4930453H23Rik
  gRNA
ctgtattattatcactcggt

SEQ ID NO: 1283 - DNA, 20 bp, Artificial Sequence
  MKO10001283_A_4930453H23Rik
  gRNA
ggccgattgatacctttcag

SEQ ID NO: 1284 - DNA, 20 bp, Artificial Sequence
  MKO10001284_A_4930453N24Rik
  gRNA
cgcctaccttggcggtccac

SEQ ID NO: 1285 - DNA, 20 bp, Artificial Sequence
  MKO10001285_A_4930453N24Rik
  gRNA
atgtcctccgtctttgtaac

SEQ ID NO: 1286 - DNA, 20 bp, Artificial Sequence
  MKO10001286_A_4930453N24Rik
  gRNA
ggacatccagctctttaagc

SEQ ID NO: 1287 - DNA, 20 bp, Artificial Sequence
  MKO10001287_A_4930467E23Rik
  gRNA
ccaatagctaccttaatcaa

SEQ ID NO: 1288 - DNA, 20 bp, Artificial Sequence
  MKO10001288_A_4930467E23Rik
  gRNA
tgcccacaaccatccagacg

SEQ ID NO: 1289 - DNA, 20 bp, Artificial Sequence
  MKO10001289_A_4930467E23Rik
  gRNA
caatgtctacgttgtgctca

SEQ ID NO: 1290 - DNA, 20 bp, Artificial Sequence
  MKO10001290_A_4930468A15Rik
  gRNA
ttacttatcgatcattcgca

SEQ ID NO: 1291 - DNA, 20 bp, Artificial Sequence
  MKO10001291_A_4930468A15Rik
  gRNA
gcctccctcaatggcgagta

SEQ ID NO: 1292 - DNA, 20 bp, Artificial Sequence
  MKO10001292_A_4930468A15Rik
  gRNA
ttgcgatgagtagcagatgt

SEQ ID NO: 1293 - DNA, 20 bp, Artificial Sequence
  MKO10001293_A_4930469G21Rik
  gRNA
ccacgttgtcccgtcacaaa

SEQ ID NO: 1294 - DNA, 20 bp, Artificial Sequence
  MKO10001294_A_4930469G21Rik
  gRNA
aaaaattctcagacgagctc

SEQ ID NO: 1295 - DNA, 20 bp, Artificial Sequence
  MKO10001295_A_4930469G21Rik
  gRNA
cgaatccactctttctaacg

SEQ ID NO: 1296 - DNA, 20 bp, Artificial Sequence
  MKO10001296_A_4930474N05Rik
  gRNA
aaaatggccacaggcgttga

SEQ ID NO: 1297 - DNA, 20 bp, Artificial Sequence
  MKO10001297_A_4930474N05Rik
  gRNA
actcttgccttcaacgcctg

SEQ ID NO: 1298 - DNA, 20 bp, Artificial Sequence
  MKO10001298_A_4930474N05Rik
  gRNA
tatttacaacgtttaagttc

SEQ ID NO: 1299 - DNA, 20 bp, Artificial Sequence
  MKO10001299_A_4930480E11Rik
  gRNA
accagcttcctcgattaccc

SEQ ID NO: 1300 - DNA, 20 bp, Artificial Sequence
  MKO10001300_A_4930480E11Rik
  gRNA
tctgagaattcgtcataagt

SEQ ID NO: 1301 - DNA, 20 bp, Artificial Sequence
  MKO10001301_A_4930480E11Rik
  gRNA
tagaagaccacaatacaagt

SEQ ID NO: 1302 - DNA, 20 bp, Artificial Sequence
  MKO10001302_A_4930486L24Rik
  gRNA
acgcgaggaagcccttatga

SEQ ID NO: 1303 - DNA, 20 bp, Artificial Sequence
  MKO10001303_A_4930486L24Rik
  gRNA
tagatcccatgcagtccagc

SEQ ID NO: 1304 - DNA, 20 bp, Artificial Sequence
  MKO10001304_A_4930486L24Rik
  gRNA
agggttattgtgcctctagt

SEQ ID NO: 1305 - DNA, 20 bp, Artificial Sequence
  MKO10001305_A_4930502E18Rik
  gRNA
gtgactgcgttcaatccacg

SEQ ID NO: 1306 - DNA, 20 bp, Artificial Sequence
  MKO10001306_A_4930502E18Rik
  gRNA
gaccccagtacaagtattgt

SEQ ID NO: 1307 - DNA, 20 bp, Artificial Sequence
  MKO10001307_A_4930502E18Rik
  gRNA
gccagtctcaacgtcagcac

SEQ ID NO: 1308 - DNA, 20 bp, Artificial Sequence
  MKO10001308_A_4930503B20Rik
  gRNA
tctgaggacgacgcattccg

SEQ ID NO: 1309 - DNA, 20 bp, Artificial Sequence
  MKO10001309_A_4930503B20Rik
  gRNA
tcccgatggaaccgaaacaa

SEQ ID NO: 1310 - DNA, 20 bp, Artificial Sequence
  MKO10001310_A_4930503B20Rik
  gRNA
atttctcgtcatcaagagca

SEQ ID NO: 1311 - DNA, 20 bp, Artificial Sequence
  MKO10001311_A_4930503E14Rik
  gRNA
cacgcagatgttctcttcga

SEQ ID NO: 1312 - DNA, 20 bp, Artificial Sequence
  MKO10001312_A_4930503E14Rik
  gRNA
aggctatttcacagggagaa

SEQ ID NO: 1313 - DNA, 20 bp, Artificial Sequence
  MKO10001313_A_4930503E14Rik
  gRNA
atggcagattccttctgcct

SEQ ID NO: 1314 - DNA, 20 bp, Artificial Sequence
  MKO10001314_A_4930503L19Rik
  gRNA
ctgacgttaagtatccaatt

SEQ ID NO: 1315 - DNA, 20 bp, Artificial Sequence
  MKO10001315_A_4930503L19Rik
  gRNA
caaattggatacttaacgtc

SEQ ID NO: 1316 - DNA, 20 bp, Artificial Sequence
  MKO10001316_A_4930503L19Rik
  gRNA
aacttgaagcagaacgaacg

SEQ ID NO: 1317 - DNA, 20 bp, Artificial Sequence
  MKO10001317_A_4930504O13Rik
  gRNA
aattacgatgaacgagatag

SEQ ID NO: 1318 - DNA, 20 bp, Artificial Sequence
  MKO10001318_A_4930504O13Rik
  gRNA
ctcgttcatcgtaatttccc

SEQ ID NO: 1319 - DNA, 20 bp, Artificial Sequence
  MKO10001319_A_4930504O13Rik
  gRNA
tgcaccctgccaccccgagc

SEQ ID NO: 1320 - DNA, 20 bp, Artificial Sequence
  MKO10001320_A_4930505A04Rik
  gRNA
gtcactccgctggacacttt

SEQ ID NO: 1321 - DNA, 20 bp, Artificial Sequence
  MKO10001321_A_4930505A04Rik
  gRNA
tgcatccggctgtgtttgac

SEQ ID NO: 1322 - DNA, 20 bp, Artificial Sequence
  MKO10001322_A_4930505A04Rik
  gRNA
ggctatgccaatagttccta

SEQ ID NO: 1323 - DNA, 20 bp, Artificial Sequence
  MKO10001323_A_4930506M07Rik
  gRNA
aaggtcttcatattcgccaa

SEQ ID NO: 1324 - DNA, 20 bp, Artificial Sequence
  MKO10001324_A_4930506M07Rik
  gRNA
cctaccttgctccttcaagc

SEQ ID NO: 1325 - DNA, 20 bp, Artificial Sequence
  MKO10001325_A_4930506M07Rik
  gRNA
acccgccaaaatgaacagct

SEQ ID NO: 1326 - DNA, 20 bp, Artificial Sequence
  MKO10001326_A_4930513O06Rik
  gRNA
ttgatcgtcgaatgctgaca

SEQ ID NO: 1327 - DNA, 20 bp, Artificial Sequence
  MKO10001327_A_4930513O06Rik
  gRNA
ttaaccttattctgatctct

SEQ ID NO: 1328 - DNA, 20 bp, Artificial Sequence
  MKO10001328_A_4930513O06Rik
  gRNA
tcccaataaagttgaaagtg

SEQ ID NO: 1329 - DNA, 20 bp, Artificial Sequence
  MKO10001329_A_4930519F16Rik
  gRNA
attcttgaaaagcctatcga

SEQ ID NO: 1330 - DNA, 20 bp, Artificial Sequence
  MKO10001330_A_4930519F16Rik
  gRNA
ggtatttcatccccatcgat

SEQ ID NO: 1331 - DNA, 20 bp, Artificial Sequence
  MKO10001331_A_4930519F16Rik
  gRNA
attacccagcagtcttcccg

SEQ ID NO: 1332 - DNA, 20 bp, Artificial Sequence
  MKO10001332_A_4930519G04Rik
  gRNA
cagaccgtcattgggatctg

SEQ ID NO: 1333 - DNA, 20 bp, Artificial Sequence
  MKO10001333_A_4930519G04Rik
  gRNA
tacctccatgatgaccctgt

SEQ ID NO: 1334 - DNA, 20 bp, Artificial Sequence
  MKO10001334_A_4930519G04Rik
  gRNA
cccgtttgtggccacccagc

SEQ ID NO: 1335 - DNA, 20 bp, Artificial Sequence
  MKO10001335_A_4930522H14Rik
  gRNA
ccgtagaagaagccgaagac

SEQ ID NO: 1336 - DNA, 20 bp, Artificial Sequence
  MKO10001336_A_4930522H14Rik
  gRNA
cccgagtaaaggattcttta

SEQ ID NO: 1337 - DNA, 20 bp, Artificial Sequence
  MKO10001337_A_4930522H14Rik
  gRNA
tagtcacttaacctacttta

SEQ ID NO: 1338 - DNA, 20 bp, Artificial Sequence
  MKO10001338_A_4930523C07Rik
  gRNA
atccggatcagacacgaaag

SEQ ID NO: 1339 - DNA, 20 bp, Artificial Sequence
  MKO10001339_A_4930523C07Rik
  gRNA
gctcactagacaagcagtga

SEQ ID NO: 1340 - DNA, 20 bp, Artificial Sequence
  MKO10001340_A_4930523C07Rik
  gRNA
cgtcttcaacacagtctgcc

SEQ ID NO: 1341 - DNA, 20 bp, Artificial Sequence
  MKO10001341_A_4930524B15Rik
  gRNA
cgggtcacgtagattaagcg

SEQ ID NO: 1342 - DNA, 20 bp, Artificial Sequence
  MKO10001342_A_4930524B15Rik
  gRNA
attccgcccctttccagcgg

SEQ ID NO: 1343 - DNA, 20 bp, Artificial Sequence
  MKO10001343_A_4930524B15Rik
  gRNA
tgaagcctccaagctaatga

SEQ ID NO: 1344 - DNA, 20 bp, Artificial Sequence
  MKO10001344_A_4930524N10Rik
  gRNA
acagccctataaactcgacc

SEQ ID NO: 1345 - DNA, 20 bp, Artificial Sequence
  MKO10001345_A_4930524N10Rik
  gRNA
attgtccaggtcgagtttat

SEQ ID NO: 1346 - DNA, 20 bp, Artificial Sequence
  MKO10001346_A_4930524N10Rik
  gRNA
gctataccctcaacactaaa

SEQ ID NO: 1347 - DNA, 20 bp, Artificial Sequence
  MKO10001347_A_4930525M21Rik
  gRNA
agatagcagaatcagcttta

SEQ ID NO: 1348 - DNA, 20 bp, Artificial Sequence
  MKO10001348_A_4930525M21Rik
  gRNA
ttctaaaaactacaatatga

SEQ ID NO: 1349 - DNA, 20 bp, Artificial Sequence
  MKO10001349_A_4930525M21Rik
  gRNA
atccctatgaagtgtcctac

SEQ ID NO: 1350 - DNA, 20 bp, Artificial Sequence
  MKO10001350_A_4930526D03Rik
  gRNA
ttcgggtgtagcgcaaccgc

SEQ ID NO: 1351 - DNA, 20 bp, Artificial Sequence
  MKO10001351_A_4930526D03Rik
  gRNA
gcgcgggtcaggcatgtcgt

SEQ ID NO: 1352 - DNA, 20 bp, Artificial Sequence
  MKO10001352_A_4930526D03Rik
  gRNA
cgcgcgcgctgccatccgac

SEQ ID NO: 1353 - DNA, 20 bp, Artificial Sequence
  MKO10001353_A_4930529M08Rik
  gRNA
caactggaacgtcgccaagc

SEQ ID NO: 1354 - DNA, 20 bp, Artificial Sequence
  MKO10001354_A_4930529M08Rik
  gRNA
ctgcttggcgacgttccagt

SEQ ID NO: 1355 - DNA, 20 bp, Artificial Sequence
  MKO10001355_A_4930529M08Rik
  gRNA
agctgcatattcgcaaagcc

SEQ ID NO: 1356 - DNA, 20 bp, Artificial Sequence
  MKO10001356_A_4930538K18Rik
  gRNA
gcgtggatgggcctctgaat

SEQ ID NO: 1357 - DNA, 20 bp, Artificial Sequence
  MKO10001357_A_4930538K18Rik
  gRNA
gggtaggcccttgtatccag

SEQ ID NO: 1358 - DNA, 20 bp, Artificial Sequence
  MKO10001358_A_4930538K18Rik
  gRNA
ctagactcacccagtttgtg

SEQ ID NO: 1359 - DNA, 20 bp, Artificial Sequence
  MKO10001359_A_4930539E08Rik
  gRNA
tatctcatggggggcgcttg

SEQ ID NO: 1360 - DNA, 20 bp, Artificial Sequence
  MKO10001360_A_4930539E08Rik
  gRNA
tagcccggtggagaccccga

SEQ ID NO: 1361 - DNA, 20 bp, Artificial Sequence
  MKO10001361_A_4930539E08Rik
  gRNA
ctcgctggctactaacacac

SEQ ID NO: 1362 - DNA, 20 bp, Artificial Sequence
  MKO10001362_A_4930544D05Rik
  gRNA
ggccgcagctcacgaatatc

SEQ ID NO: 1363 - DNA, 20 bp, Artificial Sequence
  MKO10001363_A_4930544D05Rik
  gRNA
caatgtagatctcggccctg

SEQ ID NO: 1364 - DNA, 20 bp, Artificial Sequence
  MKO10001364_A_4930544D05Rik
  gRNA
cgacaagtcgcccacccaga

SEQ ID NO: 1365 - DNA, 20 bp, Artificial Sequence
  MKO10001365_A_4930544G11Rik
  gRNA
caatgctgttcgccaaccct

SEQ ID NO: 1366 - DNA, 20 bp, Artificial Sequence
  MKO10001366_A_4930544G11Rik
  gRNA
cgatacaagagttagccaag

SEQ ID NO: 1367 - DNA, 20 bp, Artificial Sequence
  MKO10001367_A_4930544G11Rik
  gRNA
caagggttggcgaacagcat

SEQ ID NO: 1368 - DNA, 20 bp, Artificial Sequence
  MKO10001368_A_4930547C10Rik
  gRNA
atcagtcggtgcaggctact

SEQ ID NO: 1369 - DNA, 20 bp, Artificial Sequence
  MKO10001369_A_4930547C10Rik
  gRNA
cttcacgtttctcgcttcag

SEQ ID NO: 1370 - DNA, 20 bp, Artificial Sequence
  MKO10001370_A_4930547C10Rik
  gRNA
gtactactaattcactgaat

SEQ ID NO: 1371 - DNA, 20 bp, Artificial Sequence
  MKO10001371_A_4930548H24Rik
  gRNA
gcaaattcagtcgacctgct

SEQ ID NO: 1372 - DNA, 20 bp, Artificial Sequence
  MKO10001372_A_4930548H24Rik
  gRNA
actctagtttgtagtactcc

SEQ ID NO: 1373 - DNA, 20 bp, Artificial Sequence
  MKO10001373_A_4930548H24Rik
  gRNA
ggacctattgaagctaatcc

SEQ ID NO: 1374 - DNA, 20 bp, Artificial Sequence
  MKO10001374_A_4930549C01Rik
  gRNA
ataaaataaatcgccgccgg

SEQ ID NO: 1375 - DNA, 20 bp, Artificial Sequence
  MKO10001375_A_4930549C01Rik
  gRNA
aaaatcaggtgttcgtcata

SEQ ID NO: 1376 - DNA, 20 bp, Artificial Sequence
  MKO10001376_A_4930549C01Rik
  gRNA
aaagcttatcaaccaagcca

SEQ ID NO: 1377 - DNA, 20 bp, Artificial Sequence
  MKO10001377_A_4930550C14Rik
  gRNA
cgtccaagtccgattcaggt

SEQ ID NO: 1378 - DNA, 20 bp, Artificial Sequence
  MKO10001378_A_4930550C14Rik
  gRNA
atgtacctcactatctgacg

SEQ ID NO: 1379 - DNA, 20 bp, Artificial Sequence
  MKO10001379_A_4930550C14Rik
  gRNA
tccaccactccgctttcaag

SEQ ID NO: 1380 - DNA, 20 bp, Artificial Sequence
  MKO10001380_A_4930550L24Rik
  gRNA
ctttgcttgatgcagacgct

SEQ ID NO: 1381 - DNA, 20 bp, Artificial Sequence
  MKO10001381_A_4930550L24Rik
  gRNA
attgctgatccgcccatcat

SEQ ID NO: 1382 - DNA, 20 bp, Artificial Sequence
  MKO10001382_A_4930550L24Rik
  gRNA
ttccttcaccgctttgtata

SEQ ID NO: 1383 - DNA, 20 bp, Artificial Sequence
  MKO10001383_A_4930555G01Rik
  gRNA
tgggttgaagtatttctagc

SEQ ID NO: 1384 - DNA, 20 bp, Artificial Sequence
  MKO10001384_A_4930555G01Rik
  gRNA
cctcatacatgtaaacattc

SEQ ID NO: 1385 - DNA, 20 bp, Artificial Sequence
  MKO10001385_A_4930555G01Rik
  gRNA
gttatcttctatcagttcca

SEQ ID NO: 1386 - DNA, 20 bp, Artificial Sequence
  MKO10001386_A_4930557A04Rik
  gRNA
ctctatgaggcaccaagacc

SEQ ID NO: 1387 - DNA, 20 bp, Artificial Sequence
  MKO10001387_A_4930557A04Rik
  gRNA
cgtagaagagttcaggcatt

SEQ ID NO: 1388 - DNA, 20 bp, Artificial Sequence
  MKO10001388_A_4930557A04Rik
  gRNA
agttcatcgatgttatcagt

SEQ ID NO: 1389 - DNA, 20 bp, Artificial Sequence
  MKO10001389_A_4930558K02Rik
  gRNA
caactgtgcgctacatgtcg

SEQ ID NO: 1390 - DNA, 20 bp, Artificial Sequence
  MKO10001390_A_4930558K02Rik
  gRNA
tgttctgacttcgtacaaga

SEQ ID NO: 1391 - DNA, 20 bp, Artificial Sequence
  MKO10001391_A_4930558K02Rik
  gRNA
caatggtttgtttaccaggc

SEQ ID NO: 1392 - DNA, 20 bp, Artificial Sequence
  MKO10001392_A_4930562C15Rik
  gRNA
ggccccggaaccacgccgta

SEQ ID NO: 1393 - DNA, 20 bp, Artificial Sequence
  MKO10001393_A_4930562C15Rik
  gRNA
ttccaacacacccttcgatg

SEQ ID NO: 1394 - DNA, 20 bp, Artificial Sequence
  MKO10001394_A_4930562C15Rik
  gRNA
agcttaccacttcccgctgc

SEQ ID NO: 1395 - DNA, 20 bp, Artificial Sequence
  MKO10001395_A_4930563D23Rik
  gRNA
ccataaccaacaaggtgcgc

SEQ ID NO: 1396 - DNA, 20 bp, Artificial Sequence
  MKO10001396_A_4930563D23Rik
  gRNA
ctgagatcgctgcaacacaa

SEQ ID NO: 1397 - DNA, 20 bp, Artificial Sequence
  MKO10001397_A_4930563D23Rik
  gRNA
ctacacgctgggggcagtca

SEQ ID NO: 1398 - DNA, 20 bp, Artificial Sequence
  MKO10001398_A_4930563E22Rik
  gRNA
ctgcgcgcgcagatatcgag

SEQ ID NO: 1399 - DNA, 20 bp, Artificial Sequence
  MKO10001399_A_4930563E22Rik
  gRNA
aaacgtcctcccgccacgtc

SEQ ID NO: 1400 - DNA, 20 bp, Artificial Sequence
  MKO10001400_A_4930563E22Rik
  gRNA
tccccgcagaatgggggcgc

SEQ ID NO: 1401 - DNA, 20 bp, Artificial Sequence
  MKO10001401_A_4930564B18Rik
  gRNA
agggactcccatccgtcgac

SEQ ID NO: 1402 - DNA, 20 bp, Artificial Sequence
  MKO10001402_A_4930564B18Rik
  gRNA
cttacccgacttagtcttgt

SEQ ID NO: 1403 - DNA, 20 bp, Artificial Sequence
  MKO10001403_A_4930564B18Rik
  gRNA
gatgccgaggatgagtctat

SEQ ID NO: 1404 - DNA, 20 bp, Artificial Sequence
  MKO10001404_A_4930564C03Rik
  gRNA
caaaaggtaatgcgagtcca

SEQ ID NO: 1405 - DNA, 20 bp, Artificial Sequence
  MKO10001405_A_4930564C03Rik
  gRNA
tcatctctttcttcactcga

SEQ ID NO: 1406 - DNA, 20 bp, Artificial Sequence
  MKO10001406_A_4930564C03Rik
  gRNA
cgtacatgacttctcaaaaa

SEQ ID NO: 1407 - DNA, 20 bp, Artificial Sequence
  MKO10001407_A_4930564D02Rik
  gRNA
ccaagagtcagccgctgctt

SEQ ID NO: 1408 - DNA, 20 bp, Artificial Sequence
  MKO10001408_A_4930564D02Rik
  gRNA
accttagaactgcaagcttg

SEQ ID NO: 1409 - DNA, 20 bp, Artificial Sequence
  MKO10001409_A_4930564D02Rik
  gRNA
aagacaaatggataagaaga

SEQ ID NO: 1410 - DNA, 20 bp, Artificial Sequence
  MKO10001410_A_4930567H17Rik
  gRNA
atgagcgcaccagccactca

SEQ ID NO: 1411 - DNA, 20 bp, Artificial Sequence
  MKO10001411_A_4930567H17Rik
  gRNA
gctttcaggatgtatctgca

SEQ ID NO: 1412 - DNA, 20 bp, Artificial Sequence
  MKO10001412_A_4930567H17Rik
  gRNA
ctgcacaatccagaatagac

SEQ ID NO: 1413 - DNA, 20 bp, Artificial Sequence
  MKO10001413_A_4930568D16Rik
  gRNA
cagactttatgaagcgtctc

SEQ ID NO: 1414 - DNA, 20 bp, Artificial Sequence
  MKO10001414_A_4930568D16Rik
  gRNA
caatctaccatactttgagt

SEQ ID NO: 1415 - DNA, 20 bp, Artificial Sequence
  MKO10001415_A_4930568D16Rik
  gRNA
taagttccttcccataagac

SEQ ID NO: 1416 - DNA, 20 bp, Artificial Sequence
  MKO10001416_A_4930571K23Rik
  gRNA
tcagcccattcaagatccga

SEQ ID NO: 1417 - DNA, 20 bp, Artificial Sequence
  MKO10001417_A_4930571K23Rik
  gRNA
gtccttgctgcactccccgt

SEQ ID NO: 1418 - DNA, 20 bp, Artificial Sequence
  MKO10001418_A_4930571K23Rik
  gRNA
agccgacggggagtgcagca

SEQ ID NO: 1419 - DNA, 20 bp, Artificial Sequence
  MKO10001419_A_4930578C19Rik
  gRNA
cagcatagcgtcgaaccaca

SEQ ID NO: 1420 - DNA, 20 bp, Artificial Sequence
  MKO10001420_A_4930578C19Rik
  gRNA
gtcgatgatgcctagcgcac

SEQ ID NO: 1421 - DNA, 20 bp, Artificial Sequence
  MKO10001421_A_4930578C19Rik
  gRNA
ccgcaggtttgacaactcac

SEQ ID NO: 1422 - DNA, 20 bp, Artificial Sequence
  MKO10001422_A_4930578I06Rik
  gRNA
tgcgcgccagagcatactgc

SEQ ID NO: 1423 - DNA, 20 bp, Artificial Sequence
  MKO10001423_A_4930578I06Rik
  gRNA
acctgcggaggctcctgaac

SEQ ID NO: 1424 - DNA, 20 bp, Artificial Sequence
  MKO10001424_A_4930578I06Rik
  gRNA
tttgctcatgagcgactgtc

SEQ ID NO: 1425 - DNA, 20 bp, Artificial Sequence
  MKO10001425_A_4930579F01Rik
  gRNA
tctgttgctcatcgcgtctg

SEQ ID NO: 1426 - DNA, 20 bp, Artificial Sequence
  MKO10001426_A_4930579F01Rik
  gRNA
accagtttagcccttccgag

SEQ ID NO: 1427 - DNA, 20 bp, Artificial Sequence
  MKO10001427_A_4930579F01Rik
  gRNA
cgtgcacattcccaactacc

SEQ ID NO: 1428 - DNA, 20 bp, Artificial Sequence
  MKO10001428_A_4930579G24Rik
  gRNA
catgctgagggacgacgaag

SEQ ID NO: 1429 - DNA, 20 bp, Artificial Sequence
  MKO10001429_A_4930579G24Rik
  gRNA
ttgagctgataccgcagacg

SEQ ID NO: 1430 - DNA, 20 bp, Artificial Sequence
  MKO10001430_A_4930579G24Rik
  gRNA
cctccctcatctccgtcgtc

SEQ ID NO: 1431 - DNA, 20 bp, Artificial Sequence
  MKO10001431_A_4930590J08Rik
  gRNA
cgcctcagcccgtccgagcc

SEQ ID NO: 1432 - DNA, 20 bp, Artificial Sequence
  MKO10001432_A_4930590J08Rik
  gRNA
gagacatcatccacgggctt

SEQ ID NO: 1433 - DNA, 20 bp, Artificial Sequence
  MKO10001433_A_4930590J08Rik
  gRNA
ttcagcaggtgccaatcctt

SEQ ID NO: 1434 - DNA, 20 bp, Artificial Sequence
  MKO10001434_A_4930591A17Rik
  gRNA
acccgctagggcctcaacgc

SEQ ID NO: 1435 - DNA, 20 bp, Artificial Sequence
  MKO10001435_A_4930591A17Rik
  gRNA
tcactcgccacccgtgttcc

SEQ ID NO: 1436 - DNA, 20 bp, Artificial Sequence
  MKO10001436_A_4930591A17Rik
  gRNA
tcacgagtcacaattcctgc

SEQ ID NO: 1437 - DNA, 20 bp, Artificial Sequence
  MKO10001437_A_4930595M18Rik
  gRNA
tgctcaacccgattgtagct

SEQ ID NO: 1438 - DNA, 20 bp, Artificial Sequence
  MKO10001438_A_4930595M18Rik
  gRNA
gtctttcgcattcgctctga

SEQ ID NO: 1439 - DNA, 20 bp, Artificial Sequence
  MKO10001439_A_4930595M18Rik
  gRNA
attatatgtttgcgacaaat

SEQ ID NO: 1440 - DNA, 20 bp, Artificial Sequence
  MKO10001440_A_4930596D02Rik
  gRNA
cggacattaagatccgaatc

SEQ ID NO: 1441 - DNA, 20 bp, Artificial Sequence
  MKO10001441_A_4930596D02Rik
  gRNA
tatccgccccagaagatcca

SEQ ID NO: 1442 - DNA, 20 bp, Artificial Sequence
  MKO10001442_A_4930596D02Rik
  gRNA
gagcatgaacatgccagatt

SEQ ID NO: 1443 - DNA, 20 bp, Artificial Sequence
  MKO10001443_A_4931406B18Rik
  gRNA
gaggaataaagccgacgcta

SEQ ID NO: 1444 - DNA, 20 bp, Artificial Sequence
  MKO10001444_A_4931406B18Rik
  gRNA
cgaagtctcctaatgatttc

SEQ ID NO: 1445 - DNA, 20 bp, Artificial Sequence
  MKO10001445_A_4931406B18Rik
  gRNA
atggtacagctcaaagtcac

SEQ ID NO: 1446 - DNA, 20 bp, Artificial Sequence
  MKO10001446_A_4931406C07Rik
  gRNA
caggtccatttcagacgctt

SEQ ID NO: 1447 - DNA, 20 bp, Artificial Sequence
  MKO10001447_A_4931406C07Rik
  gRNA
ttgaacccaagcgtctgaaa

SEQ ID NO: 1448 - DNA, 20 bp, Artificial Sequence
  MKO10001448_A_4931406C07Rik
  gRNA
gaacacaaccaacctgtgaa

SEQ ID NO: 1449 - DNA, 20 bp, Artificial Sequence
  MKO10001449_A_4931406P16Rik
  gRNA
aagtgcgatcctatctgcac

SEQ ID NO: 1450 - DNA, 20 bp, Artificial Sequence
  MKO10001450_A_4931406P16Rik
  gRNA
gaagctgtgcgatcctggcg

SEQ ID NO: 1451 - DNA, 20 bp, Artificial Sequence
  MKO10001451_A_4931406P16Rik
  gRNA
gataggatcgcacttcctga

SEQ ID NO: 1452 - DNA, 20 bp, Artificial Sequence
  MKO10001452_A_4931408C20Rik
  gRNA
ttcttcgaggaacttatagc

SEQ ID NO: 1453 - DNA, 20 bp, Artificial Sequence
  MKO10001453_A_4931408C20Rik
  gRNA
gaaattccccgaccagttac

SEQ ID NO: 1454 - DNA, 20 bp, Artificial Sequence
  MKO10001454_A_4931408C20Rik
  gRNA
ctgctccatgtccatagtag

SEQ ID NO: 1455 - DNA, 20 bp, Artificial Sequence
  MKO10001455_A_4931409K22Rik
  gRNA
gcacctcttcgagagtcacg

SEQ ID NO: 1456 - DNA, 20 bp, Artificial Sequence
  MKO10001456_A_4931409K22Rik
  gRNA
cgcagcaaccgacgcttctg

SEQ ID NO: 1457 - DNA, 20 bp, Artificial Sequence
  MKO10001457_A_4931409K22Rik
  gRNA
ccactttcatgcgagaaatc

SEQ ID NO: 1458 - DNA, 20 bp, Artificial Sequence
  MKO10001458_A_4931414P19Rik
  gRNA
aacttcgaagtcgccgatac

SEQ ID NO: 1459 - DNA, 20 bp, Artificial Sequence
  MKO10001459_A_4931414P19Rik
  gRNA
gggttcaatacaacgagtgc

SEQ ID NO: 1460 - DNA, 20 bp, Artificial Sequence
  MKO10001460_A_4931414P19Rik
  gRNA
caccagatctcgcttccgcc

SEQ ID NO: 1461 - DNA, 20 bp, Artificial Sequence
  MKO10001461_A_4931417E11Rik
  gRNA
gcatcagcacccgacatgag

SEQ ID NO: 1462 - DNA, 20 bp, Artificial Sequence
  MKO10001462_A_4931417E11Rik
  gRNA
ccttcgatgattatccgtga

SEQ ID NO: 1463 - DNA, 20 bp, Artificial Sequence
  MKO10001463_A_4931417E11Rik
  gRNA
ttgacacgtataggtgccac

SEQ ID NO: 1464 - DNA, 20 bp, Artificial Sequence
  MKO10001464_A_4931423N10Rik
  gRNA
taacatcacacccctgatga

SEQ ID NO: 1465 - DNA, 20 bp, Artificial Sequence
  MKO10001465_A_4931423N10Rik
  gRNA
ctatggtataccttcatcag

SEQ ID NO: 1466 - DNA, 20 bp, Artificial Sequence
  MKO10001466_A_4931423N10Rik
  gRNA
gctttacgttatgctattga

SEQ ID NO: 1467 - DNA, 20 bp, Artificial Sequence
  MKO10001467_A_4931428F04Rik
  gRNA
tactgcgtccgtgccaagcg

SEQ ID NO: 1468 - DNA, 20 bp, Artificial Sequence
  MKO10001468_A_4931428F04Rik
  gRNA
tgaataattcgcggcaaccg

SEQ ID NO: 1469 - DNA, 20 bp, Artificial Sequence
  MKO10001469_A_4931428F04Rik
  gRNA
ggagaacagccgacccacac

SEQ ID NO: 1470 - DNA, 20 bp, Artificial Sequence
  MKO10001470_A_4931429I11Rik
  gRNA
acctccgatatgatcccaac

SEQ ID NO: 1471 - DNA, 20 bp, Artificial Sequence
  MKO10001471_A_4931429I11Rik
  gRNA
cgcttctaaccccaatttac

SEQ ID NO: 1472 - DNA, 20 bp, Artificial Sequence
  MKO10001472_A_4931429I11Rik
  gRNA
gaagatggcccgtagtaatt

SEQ ID NO: 1473 - DNA, 20 bp, Artificial Sequence
  MKO10001473_A_4931429L15Rik
  gRNA
ctggaccgtgacaaaccctg

SEQ ID NO: 1474 - DNA, 20 bp, Artificial Sequence
  MKO10001474_A_4931429L15Rik
  gRNA
ttgctgaatggcatcccccc

SEQ ID NO: 1475 - DNA, 20 bp, Artificial Sequence
  MKO10001475_A_4931429L15Rik
  gRNA
aggacacccaagtcctagtg

SEQ ID NO: 1476 - DNA, 20 bp, Artificial Sequence
  MKO10001476_A_4931431F19Rik
  gRNA
tcagaagcccgcgcaatcgc

SEQ ID NO: 1477 - DNA, 20 bp, Artificial Sequence
  MKO10001477_A_4931431F19Rik
  gRNA
caccaaccctcgagcgctgc

SEQ ID NO: 1478 - DNA, 20 bp, Artificial Sequence
  MKO10001478_A_4931431F19Rik
  gRNA
tcagtatgtcttgatcccgg

SEQ ID NO: 1479 - DNA, 20 bp, Artificial Sequence
  MKO10001479_A_4931440F15Rik
  gRNA
gggcgtcttcccgtcactgc

SEQ ID NO: 1480 - DNA, 20 bp, Artificial Sequence
  MKO10001480_A_4931440F15Rik
  gRNA
cctggacgtggtgcgctgcc

SEQ ID NO: 1481 - DNA, 20 bp, Artificial Sequence
  MKO10001481_A_4931440F15Rik
  gRNA
gtgaagccgttcttgccacg

SEQ ID NO: 1482 - DNA, 20 bp, Artificial Sequence
  MKO10001482_A_4931440L10Rik
  gRNA
agcccaccttcgagcgaatg

SEQ ID NO: 1483 - DNA, 20 bp, Artificial Sequence
  MKO10001483_A_4931440L10Rik
  gRNA
tgtcaaccacattcgctcga

SEQ ID NO: 1484 - DNA, 20 bp, Artificial Sequence
  MKO10001484_A_4931440L10Rik
  gRNA
tttgcttgtcacgcttctca

SEQ ID NO: 1485 - DNA, 20 bp, Artificial Sequence
  MKO10001485_A_4932411E22Rik
  gRNA
ccctattccgacacactcgc

SEQ ID NO: 1486 - DNA, 20 bp, Artificial Sequence
  MKO10001486_A_4932411E22Rik
  gRNA
cagcgccccagatgtcctac

SEQ ID NO: 1487 - DNA, 20 bp, Artificial Sequence
  MKO10001487_A_4932411E22Rik
  gRNA
cccttcatcatgccgctctc

SEQ ID NO: 1488 - DNA, 20 bp, Artificial Sequence
  MKO10001488_A_4932411N23Rik
  gRNA
caccggtctttgaccgaaga

SEQ ID NO: 1489 - DNA, 20 bp, Artificial Sequence
  MKO10001489_A_4932411N23Rik
  gRNA
ccgatgaaagtgaaattcgc

SEQ ID NO: 1490 - DNA, 20 bp, Artificial Sequence
  MKO10001490_A_4932411N23Rik
  gRNA
ccttacttgtgaaccatgct

SEQ ID NO: 1491 - DNA, 20 bp, Artificial Sequence
  MKO10001491_A_4932414N04Rik
  gRNA
agcggccataccccacatcg

SEQ ID NO: 1492 - DNA, 20 bp, Artificial Sequence
  MKO10001492_A_4932414N04Rik
  gRNA
tatatgaatgaaccgcatcc

SEQ ID NO: 1493 - DNA, 20 bp, Artificial Sequence
  MKO10001493_A_4932414N04Rik
  gRNA
tttacaggctctaaagtacg

SEQ ID NO: 1494 - DNA, 20 bp, Artificial Sequence
  MKO10001494_A_4932416K20Rik
  gRNA
tccatcgccacatcgacctc

SEQ ID NO: 1495 - DNA, 20 bp, Artificial Sequence
  MKO10001495_A_4932416K20Rik
  gRNA
gtggcgatggacgaagcacg

SEQ ID NO: 1496 - DNA, 20 bp, Artificial Sequence
  MKO10001496_A_4932416K20Rik
  gRNA
gtcccctgctatactagctt

SEQ ID NO: 1497 - DNA, 20 bp, Artificial Sequence
  MKO10001497_A_4932418E24Rik
  gRNA
cttccgccatagcatcgtcg

SEQ ID NO: 1498 - DNA, 20 bp, Artificial Sequence
  MKO10001498_A_4932418E24Rik
  gRNA
acaaaacctcgacgatgcta

SEQ ID NO: 1499 - DNA, 20 bp, Artificial Sequence
  MKO10001499_A_4932418E24Rik
  gRNA
ctgacgcatgaagtcacgta

SEQ ID NO: 1500 - DNA, 20 bp, Artificial Sequence
  MKO10001500_A_4932429P05Rik
  gRNA
ctggagccgctcaatgtatt

SEQ ID NO: 1501 - DNA, 20 bp, Artificial Sequence
  MKO10001501_A_4932429P05Rik
  gRNA
cttagtccgagagtatctac

SEQ ID NO: 1502 - DNA, 20 bp, Artificial Sequence
  MKO10001502_A_4932429P05Rik
  gRNA
gtgccctatcacaaacaacg

SEQ ID NO: 1503 - DNA, 20 bp, Artificial Sequence
  MKO10001503_A_4932438A13Rik
  gRNA
ggacgccttcaagaattgtt

SEQ ID NO: 1504 - DNA, 20 bp, Artificial Sequence
  MKO10001504_A_4932438A13Rik
  gRNA
gaacgcagtccaaaattgaa

SEQ ID NO: 1505 - DNA, 20 bp, Artificial Sequence
  MKO10001505_A_4932438A13Rik
  gRNA
atcttacatactacaattct

SEQ ID NO: 1506 - DNA, 20 bp, Artificial Sequence
  MKO10001506_A_4932438H23Rik
  gRNA
gggcaacgatgcctagcgct

SEQ ID NO: 1507 - DNA, 20 bp, Artificial Sequence
  MKO10001507_A_4932438H23Rik
  gRNA
ccagagtgaacttcagcacg

SEQ ID NO: 1508 - DNA, 20 bp, Artificial Sequence
  MKO10001508_A_4932438H23Rik
  gRNA
gaggcttcgcatccatacta

SEQ ID NO: 1509 - DNA, 20 bp, Artificial Sequence
  MKO10001509_A_4932443I19Rik
  gRNA
tgaccaccccgtgggctaat

SEQ ID NO: 1510 - DNA, 20 bp, Artificial Sequence
  MKO10001510_A_4932443I19Rik
  gRNA
tagcccacggggtggtcagc

SEQ ID NO: 1511 - DNA, 20 bp, Artificial Sequence
  MKO10001511_A_4932443I19Rik
  gRNA
tggcctccgccatgaaaacc

SEQ ID NO: 1512 - DNA, 20 bp, Artificial Sequence
  MKO10001512_A_4933402D24Rik
  gRNA
tgccgagtcattctgaccaa

SEQ ID NO: 1513 - DNA, 20 bp, Artificial Sequence
  MKO10001513_A_4933402D24Rik
  gRNA
actgtcagcccgctctcaga

SEQ ID NO: 1514 - DNA, 20 bp, Artificial Sequence
  MKO10001514_A_4933402D24Rik
  gRNA
gtgcgctcaccttctgagag

SEQ ID NO: 1515 - DNA, 20 bp, Artificial Sequence
  MKO10001515_A_4933402E13Rik
  gRNA
cgctcgacaaaccacgcatt

SEQ ID NO: 1516 - DNA, 20 bp, Artificial Sequence
  MKO10001516_A_4933402E13Rik
  gRNA
atacgctgagtgacagcgat

SEQ ID NO: 1517 - DNA, 20 bp, Artificial Sequence
  MKO10001517_A_4933402E13Rik
  gRNA
tcatcgtcatcagtttccgt

SEQ ID NO: 1518 - DNA, 20 bp, Artificial Sequence
  MKO10001518_A_4933402J07Rik
  gRNA
cgtacgtcctgtcaagaaga

SEQ ID NO: 1519 - DNA, 20 bp, Artificial Sequence
  MKO10001519_A_4933402J07Rik
  gRNA
gaaagcgcttacccgactgt

SEQ ID NO: 1520 - DNA, 20 bp, Artificial Sequence
  MKO10001520_A_4933402J07Rik
  gRNA
gatccatgcccttctccata

SEQ ID NO: 1521 - DNA, 20 bp, Artificial Sequence
  MKO10001521_A_4933402N03Rik
  gRNA
gttccaaacgccgcaccgag

SEQ ID NO: 1522 - DNA, 20 bp, Artificial Sequence
  MKO10001522_A_4933402N03Rik
  gRNA
ctcccctttctccccccgat

SEQ ID NO: 1523 - DNA, 20 bp, Artificial Sequence
  MKO10001523_A_4933402N03Rik
  gRNA
gccggagcatgattaaggag

SEQ ID NO: 1524 - DNA, 20 bp, Artificial Sequence
  MKO10001524_A_4933402N22Rik
  gRNA
cctacatagccagctcctga

SEQ ID NO: 1525 - DNA, 20 bp, Artificial Sequence
  MKO10001525_A_4933402N22Rik
  gRNA
aaaagagttccaattacaat

SEQ ID NO: 1526 - DNA, 20 bp, Artificial Sequence
  MKO10001526_A_4933402N22Rik
  gRNA
cagtgcatacctattgtaat

SEQ ID NO: 1527 - DNA, 20 bp, Artificial Sequence
  MKO10001527_A_4933402P03Rik
  gRNA
ccgcttgcctaagcgagtag

SEQ ID NO: 1528 - DNA, 20 bp, Artificial Sequence
  MKO10001528_A_4933402P03Rik
  gRNA
accagcagagacttcgcaac

SEQ ID NO: 1529 - DNA, 20 bp, Artificial Sequence
  MKO10001529_A_4933402P03Rik
  gRNA
ggtattgctcgcagcacctc

SEQ ID NO: 1530 - DNA, 20 bp, Artificial Sequence
  MKO10001530_A_4933403O08Rik
  gRNA
ggcaccgcaatacttgttgc

SEQ ID NO: 1531 - DNA, 20 bp, Artificial Sequence
  MKO10001531_A_4933403O08Rik
  gRNA
gataattctgcacgtcccag

SEQ ID NO: 1532 - DNA, 20 bp, Artificial Sequence
  MKO10001532_A_4933403O08Rik
  gRNA
agcttctactacgttgcctt

SEQ ID NO: 1533 - DNA, 20 bp, Artificial Sequence
  MKO10001533_A_4933405L10Rik
  gRNA
cccgccactcttgcgtttct

SEQ ID NO: 1534 - DNA, 20 bp, Artificial Sequence
  MKO10001534_A_4933405L10Rik
  gRNA
cgcacccgccgccgagacct

SEQ ID NO: 1535 - DNA, 20 bp, Artificial Sequence
  MKO10001535_A_4933405L10Rik
  gRNA
ggtggataagacgacgcaag

SEQ ID NO: 1536 - DNA, 20 bp, Artificial Sequence
  MKO10001536_A_4933405O20Rik
  gRNA
cacctcgacatctaatgaag

SEQ ID NO: 1537 - DNA, 20 bp, Artificial Sequence
  MKO10001537_A_4933405O20Rik
  gRNA
gctgaccagctgtatcatgc

SEQ ID NO: 1538 - DNA, 20 bp, Artificial Sequence
  MKO10001538_A_4933405O20Rik
  gRNA
tattgcccttcagagcgaca

SEQ ID NO: 1539 - DNA, 20 bp, Artificial Sequence
  MKO10001539_A_4933406J08Rik
  gRNA
cctcgcaccctgacacgctg

SEQ ID NO: 1540 - DNA, 20 bp, Artificial Sequence
  MKO10001540_A_4933406J08Rik
  gRNA
gcgaggcatcacagctaaac

SEQ ID NO: 1541 - DNA, 20 bp, Artificial Sequence
  MKO10001541_A_4933406J08Rik
  gRNA
agctattgcagcaagatagt

SEQ ID NO: 1542 - DNA, 20 bp, Artificial Sequence
  MKO10001542_A_4933406M09Rik
  gRNA
catctcatgactaccccgtc

SEQ ID NO: 1543 - DNA, 20 bp, Artificial Sequence
  MKO10001543_A_4933406M09Rik
  gRNA
ctttccggagagcggcatgc

SEQ ID NO: 1544 - DNA, 20 bp, Artificial Sequence
  MKO10001544_A_4933406M09Rik
  gRNA
gtggatgtgcgtccgagtcc

SEQ ID NO: 1545 - DNA, 20 bp, Artificial Sequence
  MKO10001545_A_4933408B17Rik
  gRNA
tggacttaacgaccctgaag

SEQ ID NO: 1546 - DNA, 20 bp, Artificial Sequence
  MKO10001546_A_4933408B17Rik
  gRNA
ccgagttcaggaagctcccc

SEQ ID NO: 1547 - DNA, 20 bp, Artificial Sequence
  MKO10001547_A_4933408B17Rik
  gRNA
gatcctgaataggatcacct

SEQ ID NO: 1548 - DNA, 20 bp, Artificial Sequence
  MKO10001548_A_4933409G03Rik
  gRNA
ccagcctactaccaccgaag

SEQ ID NO: 1549 - DNA, 20 bp, Artificial Sequence
  MKO10001549_A_4933409G03Rik
  gRNA
cgctggacaagcacaacttg

SEQ ID NO: 1550 - DNA, 20 bp, Artificial Sequence
  MKO10001550_A_4933409G03Rik
  gRNA
gaactctcacctgactggga

SEQ ID NO: 1551 - DNA, 20 bp, Artificial Sequence
  MKO10001551_A_4933411G11Rik
  gRNA
tggtcagtggagacgccgtg

SEQ ID NO: 1552 - DNA, 20 bp, Artificial Sequence
  MKO10001552_A_4933411G11Rik
  gRNA
gtgtctcttaccgagcaact

SEQ ID NO: 1553 - DNA, 20 bp, Artificial Sequence
  MKO10001553_A_4933411G11Rik
  gRNA
ttccttcacagaggatcccg

SEQ ID NO: 1554 - DNA, 20 bp, Artificial Sequence
  MKO10001554_A_4933411K16Rik
  gRNA
tccacaactcaccgtcgtaa

SEQ ID NO: 1555 - DNA, 20 bp, Artificial Sequence
  MKO10001555_A_4933411K16Rik
  gRNA
agtcaataccaccctccacg

SEQ ID NO: 1556 - DNA, 20 bp, Artificial Sequence
  MKO10001556_A_4933411K16Rik
  gRNA
gttagccacgcgatgcccct

SEQ ID NO: 1557 - DNA, 20 bp, Artificial Sequence
  MKO10001557_A_4933411K20Rik
  gRNA
ccccgaatgttcgtactgct

SEQ ID NO: 1558 - DNA, 20 bp, Artificial Sequence
  MKO10001558_A_4933411K20Rik
  gRNA
gggatggccgatcgatcttc

SEQ ID NO: 1559 - DNA, 20 bp, Artificial Sequence
  MKO10001559_A_4933411K20Rik
  gRNA
tttggcgtcatggatcggtt

SEQ ID NO: 1560 - DNA, 20 bp, Artificial Sequence
  MKO10001560_A_4933412E24Rik
  gRNA
gagagctccgcaagcttccg

SEQ ID NO: 1561 - DNA, 20 bp, Artificial Sequence
  MKO10001561_A_4933412E24Rik
  gRNA
actacccggggacttacctc

SEQ ID NO: 1562 - DNA, 20 bp, Artificial Sequence
  MKO10001562_A_4933412E24Rik
  gRNA
agcgtcagagaacccatccg

SEQ ID NO: 1563 - DNA, 20 bp, Artificial Sequence
  MKO10001563_A_4933413G19Rik
  gRNA
taccctatgacagtaacgtc

SEQ ID NO: 1564 - DNA, 20 bp, Artificial Sequence
  MKO10001564_A_4933413G19Rik
  gRNA
cgccagacgttactgtcata

SEQ ID NO: 1565 - DNA, 20 bp, Artificial Sequence
  MKO10001565_A_4933413G19Rik
  gRNA
tctttgctcaggggcaccgt

SEQ ID NO: 1566 - DNA, 20 bp, Artificial Sequence
  MKO10001566_A_4933415F23Rik
  gRNA
ccggggccaggggtttcgcc

SEQ ID NO: 1567 - DNA, 20 bp, Artificial Sequence
  MKO10001567_A_4933415F23Rik
  gRNA
gttctaagatccagtcgtcc

SEQ ID NO: 1568 - DNA, 20 bp, Artificial Sequence
  MKO10001568_A_4933415F23Rik
  gRNA
tacttgacgatgatcttatc

SEQ ID NO: 1569 - DNA, 20 bp, Artificial Sequence
  MKO10001569_A_4933416C03Rik
  gRNA
aagcccgccgatatgaagca

SEQ ID NO: 1570 - DNA, 20 bp, Artificial Sequence
  MKO10001570_A_4933416C03Rik
  gRNA
gacgccatctacctgaacga

SEQ ID NO: 1571 - DNA, 20 bp, Artificial Sequence
  MKO10001571_A_4933416C03Rik
  gRNA
ctattgtgcagcgccgatga

SEQ ID NO: 1572 - DNA, 20 bp, Artificial Sequence
  MKO10001572_A_4933416I08Rik
  gRNA
ttgggatacacccctattct

SEQ ID NO: 1573 - DNA, 20 bp, Artificial Sequence
  MKO10001573_A_4933416I08Rik
  gRNA
acttactaatcatcgtcttc

SEQ ID NO: 1574 - DNA, 20 bp, Artificial Sequence
  MKO10001574_A_4933416I08Rik
  gRNA
accttgtctccagcacgcag

SEQ ID NO: 1575 - DNA, 20 bp, Artificial Sequence
  MKO10001575_A_4933417A18Rik
  gRNA
aagcacctatgagccgccca

SEQ ID NO: 1576 - DNA, 20 bp, Artificial Sequence
  MKO10001576_A_4933417A18Rik
  gRNA
acagcactttgtcgtccact

SEQ ID NO: 1577 - DNA, 20 bp, Artificial Sequence
  MKO10001577_A_4933417A18Rik
  gRNA
gctcaatgttccagtgctca

SEQ ID NO: 1578 - DNA, 20 bp, Artificial Sequence
  MKO10001578_A_4933421I07Rik
  gRNA
ctcgactcttgtagtcgaat

SEQ ID NO: 1579 - DNA, 20 bp, Artificial Sequence
  MKO10001579_A_4933421I07Rik
  gRNA
ttcaatgcagtcagtccgga

SEQ ID NO: 1580 - DNA, 20 bp, Artificial Sequence
  MKO10001580_A_4933421I07Rik
  gRNA
tgggtatctccatctccgaa

SEQ ID NO: 1581 - DNA, 20 bp, Artificial Sequence
  MKO10001581_A_4933422H20Rik
  gRNA
gattcagaccatgcgagacg

SEQ ID NO: 1582 - DNA, 20 bp, Artificial Sequence
  MKO10001582_A_4933422H20Rik
  gRNA
cggttcgtgaggtcccacac

SEQ ID NO: 1583 - DNA, 20 bp, Artificial Sequence
  MKO10001583_A_4933422H20Rik
  gRNA
tgcgggcccgttcatcctcc

SEQ ID NO: 1584 - DNA, 20 bp, Artificial Sequence
  MKO10001584_A_4933425L06Rik
  gRNA
ggaggccatgaccacgaata

SEQ ID NO: 1585 - DNA, 20 bp, Artificial Sequence
  MKO10001585_A_4933425L06Rik
  gRNA
tatgacagaatacacccgcc

SEQ ID NO: 1586 - DNA, 20 bp, Artificial Sequence
  MKO10001586_A_4933425L06Rik
  gRNA
gagtgccacatcagcatgcg

SEQ ID NO: 1587 - DNA, 20 bp, Artificial Sequence
  MKO10001587_A_4933426M11Rik
  gRNA
ggtctttacaaggccggggg

SEQ ID NO: 1588 - DNA, 20 bp, Artificial Sequence
  MKO10001588_A_4933426M11Rik
  gRNA
ggtccctgcgctgtccatag

SEQ ID NO: 1589 - DNA, 20 bp, Artificial Sequence
  MKO10001589_A_4933426M11Rik
  gRNA
gaagccactatggacagcgc

SEQ ID NO: 1590 - DNA, 20 bp, Artificial Sequence
  MKO10001590_A_4933427D06Rik
  gRNA
ccctctgagatgcccgatca

SEQ ID NO: 1591 - DNA, 20 bp, Artificial Sequence
  MKO10001591_A_4933427D06Rik
  gRNA
ttgcttatgtacgttcgcag

SEQ ID NO: 1592 - DNA, 20 bp, Artificial Sequence
  MKO10001592_A_4933427D06Rik
  gRNA
gtagacgagcctaaagagtc

SEQ ID NO: 1593 - DNA, 20 bp, Artificial Sequence
  MKO10001593_A_4933427D14Rik
  gRNA
ccggatggctgctcgatgag

SEQ ID NO: 1594 - DNA, 20 bp, Artificial Sequence
  MKO10001594_A_4933427D14Rik
  gRNA
ccgctcatcgagcagccatc

SEQ ID NO: 1595 - DNA, 20 bp, Artificial Sequence
  MKO10001595_A_4933427D14Rik
  gRNA
atacaccttagcgcccgagc

SEQ ID NO: 1596 - DNA, 20 bp, Artificial Sequence
  MKO10001596_A_4933427G17Rik
  gRNA
gcttcaaccatgtccgccac

SEQ ID NO: 1597 - DNA, 20 bp, Artificial Sequence
  MKO10001597_A_4933427G17Rik
  gRNA
gggtgctgtcaaatgcgcac

SEQ ID NO: 1598 - DNA, 20 bp, Artificial Sequence
  MKO10001598_A_4933427G17Rik
  gRNA
cgtcctctccgagagcgaac

SEQ ID NO: 1599 - DNA, 20 bp, Artificial Sequence
  MKO10001599_A_4933428G20Rik
  gRNA
cccagatcgttagccccccc

SEQ ID NO: 1600 - DNA, 20 bp, Artificial Sequence
  MKO10001600_A_4933428G20Rik
  gRNA
cctgggggggctaacgatct

SEQ ID NO: 1601 - DNA, 20 bp, Artificial Sequence
  MKO10001601_A_4933428G20Rik
  gRNA
caccgacgatgactccgagc

SEQ ID NO: 1602 - DNA, 20 bp, Artificial Sequence
  MKO10001602_A_4933430I17Rik
  gRNA
cgacaatgagggacgatctt

SEQ ID NO: 1603 - DNA, 20 bp, Artificial Sequence
  MKO10001603_A_4933430I17Rik
  gRNA
tacaaacggcttcgtcccac

SEQ ID NO: 1604 - DNA, 20 bp, Artificial Sequence
  MKO10001604_A_4933430I17Rik
  gRNA
aattgacctgctctgacgtt

SEQ ID NO: 1605 - DNA, 20 bp, Artificial Sequence
  MKO10001605_A_4933433C11Rik
  gRNA
aaccgggtacttgcgaccga

SEQ ID NO: 1606 - DNA, 20 bp, Artificial Sequence
  MKO10001606_A_4933433C11Rik
  gRNA
agctacaaggacctcgggct

SEQ ID NO: 1607 - DNA, 20 bp, Artificial Sequence
  MKO10001607_A_4933433C11Rik
  gRNA
ctggctcagcggcgtgtact

SEQ ID NO: 1608 - DNA, 20 bp, Artificial Sequence
  MKO10001608_A_4933434E20Rik
  gRNA
taacttaccagaggcacgga

SEQ ID NO: 1609 - DNA, 20 bp, Artificial Sequence
  MKO10001609_A_4933434E20Rik
  gRNA
ctagatgccatccgtgcctc

SEQ ID NO: 1610 - DNA, 20 bp, Artificial Sequence
  MKO10001610_A_4933434E20Rik
  gRNA
gtcacatactttgattcccc

SEQ ID NO: 1611 - DNA, 20 bp, Artificial Sequence
  MKO10001611_A_4933434I20Rik
  gRNA
gcccacacaacaagatcatc

SEQ ID NO: 1612 - DNA, 20 bp, Artificial Sequence
  MKO10001612_A_4933434I20Rik
  gRNA
taactgcagaaaccacgttt

SEQ ID NO: 1613 - DNA, 20 bp, Artificial Sequence
  MKO10001613_A_4933434I20Rik
  gRNA
tttaaaatctgttgttcgca

SEQ ID NO: 1614 - DNA, 20 bp, Artificial Sequence
  MKO10001614_A_4933436I01Rik
  gRNA
ttgccagaacccctagatac

SEQ ID NO: 1615 - DNA, 20 bp, Artificial Sequence
  MKO10001615_A_4933436I01Rik
  gRNA
caactacacgaacaagtagc

SEQ ID NO: 1616 - DNA, 20 bp, Artificial Sequence
  MKO10001616_A_4933436I01Rik
  gRNA
ctatcaagacagacgtgaaa

SEQ ID NO: 1617 - DNA, 20 bp, Artificial Sequence
  MKO10001617_A_42434
  gRNA
tgtcactgctccataagtca

SEQ ID NO: 1618 - DNA, 20 bp, Artificial Sequence
  MKO10001618_A_42434
  gRNA
caggttgtaggccataaaga

SEQ ID NO: 1619 - DNA, 20 bp, Artificial Sequence
  MKO10001619_A_42434
  gRNA
aagatgatagaacagctgag

SEQ ID NO: 1620 - DNA, 20 bp, Artificial Sequence
  MKO10001620_A_42618
  gRNA
gacatcgacaagcagtacgt

SEQ ID NO: 1621 - DNA, 20 bp, Artificial Sequence
  MKO10001621_A_42618
  gRNA
tttcgacttcacgctcatgg

SEQ ID NO: 1622 - DNA, 20 bp, Artificial Sequence
  MKO10001622_A_42618
  gRNA
ctttctgaccgacctgtata

SEQ ID NO: 1623 - DNA, 20 bp, Artificial Sequence
  MKO10001623_A_5031410I06Rik
  gRNA
tcacagacagacaacatccc

SEQ ID NO: 1624 - DNA, 20 bp, Artificial Sequence
  MKO10001624_A_5031410I06Rik
  gRNA
caatgtatacctcttgttca

SEQ ID NO: 1625 - DNA, 20 bp, Artificial Sequence
  MKO10001625_A_5031410I06Rik
  gRNA
ctggggtcaggccctaccac

SEQ ID NO: 1626 - DNA, 20 bp, Artificial Sequence
  MKO10001626_A_5031414D18Rik
  gRNA
tccagtcccacgtaacctgc

SEQ ID NO: 1627 - DNA, 20 bp, Artificial Sequence
  MKO10001627_A_5031414D18Rik
  gRNA
gaagacgccagcaggttacg

SEQ ID NO: 1628 - DNA, 20 bp, Artificial Sequence
  MKO10001628_A_5031414D18Rik
  gRNA
gcagcatgaacgtctctagt

SEQ ID NO: 1629 - DNA, 20 bp, Artificial Sequence
  MKO10001629_A_5031439G07Rik
  gRNA
acatgctcttctacgtgcgc

SEQ ID NO: 1630 - DNA, 20 bp, Artificial Sequence
  MKO10001630_A_5031439G07Rik
  gRNA
gcgagcctacccaggcaacg

SEQ ID NO: 1631 - DNA, 20 bp, Artificial Sequence
  MKO10001631_A_5031439G07Rik
  gRNA
gctgtgtgcacgcgtgccga

SEQ ID NO: 1632 - DNA, 20 bp, Artificial Sequence
  MKO10001632_A_5033411D12Rik
  gRNA
taacattgtagagtactggc

SEQ ID NO: 1633 - DNA, 20 bp, Artificial Sequence
  MKO10001633_A_5033411D12Rik
  gRNA
aagatctcctaaattcatcg

SEQ ID NO: 1634 - DNA, 20 bp, Artificial Sequence
  MKO10001634_A_5033411D12Rik
  gRNA
ctggtgatgacacacgatct

SEQ ID NO: 1635 - DNA, 20 bp, Artificial Sequence
  MKO10001635_A_5330417C22Rik
  gRNA
gttagaaacatcgccataac

SEQ ID NO: 1636 - DNA, 20 bp, Artificial Sequence
  MKO10001636_A_5330417C22Rik
  gRNA
gtctccccggggaacccact

SEQ ID NO: 1637 - DNA, 20 bp, Artificial Sequence
  MKO10001637_A_5330417C22Rik
  gRNA
tgcttggcagcgtatgtgcc

SEQ ID NO: 1638 - DNA, 20 bp, Artificial Sequence
  MKO10001638_A_5430401F13Rik
  gRNA
tcagagcttcgtctactacg

SEQ ID NO: 1639 - DNA, 20 bp, Artificial Sequence
  MKO10001639_A_5430401F13Rik
  gRNA
aagctctgatgatgacaact

SEQ ID NO: 1640 - DNA, 20 bp, Artificial Sequence
  MKO10001640_A_5430401F13Rik
  gRNA
ggaagcgctcttcaagaaga

SEQ ID NO: 1641 - DNA, 20 bp, Artificial Sequence
  MKO10001641_A_5430402E10Rik
  gRNA
tatgctcaaaatacgctctc

SEQ ID NO: 1642 - DNA, 20 bp, Artificial Sequence
  MKO10001642_A_5430402E10Rik
  gRNA
ctatttaggttaatggggac

SEQ ID NO: 1643 - DNA, 20 bp, Artificial Sequence
  MKO10001643_A_5430402E10Rik
  gRNA
gtgtcagacacacactgttg

SEQ ID NO: 1644 - DNA, 20 bp, Artificial Sequence
  MKO10001644_A_5430419D17Rik
  gRNA
gccccgagttcctctgtatc

SEQ ID NO: 1645 - DNA, 20 bp, Artificial Sequence
  MKO10001645_A_5430419D17Rik
  gRNA
gctgctcctcagacacgccc

SEQ ID NO: 1646 - DNA, 20 bp, Artificial Sequence
  MKO10001646_A_5430419D17Rik
  gRNA
gcctaagagaagctccatcc

SEQ ID NO: 1647 - DNA, 20 bp, Artificial Sequence
  MKO10001647_A_5430421N21Rik
  gRNA
cacatctgtcatcgtcaaga

SEQ ID NO: 1648 - DNA, 20 bp, Artificial Sequence
  MKO10001648_A_5430421N21Rik
  gRNA
atgaagaagaagttgcactc

SEQ ID NO: 1649 - DNA, 20 bp, Artificial Sequence
  MKO10001649_A_5430421N21Rik
  gRNA
tgcatggcaggtgcgcttcc

SEQ ID NO: 1650 - DNA, 20 bp, Artificial Sequence
  MKO10001650_A_5430427O19Rik
  gRNA
tccagtaggatgagtaccgc

SEQ ID NO: 1651 - DNA, 20 bp, Artificial Sequence
  MKO10001651_A_5430427O19Rik
  gRNA
tacaacgacttacatattgc

SEQ ID NO: 1652 - DNA, 20 bp, Artificial Sequence
  MKO10001652_A_5430427O19Rik
  gRNA
tatgtgagctgcaaatcctc

SEQ ID NO: 1653 - DNA, 20 bp, Artificial Sequence
  MKO10001653_A_5430435G22Rik
  gRNA
tcaggagcggttccgctcaa

SEQ ID NO: 1654 - DNA, 20 bp, Artificial Sequence
  MKO10001654_A_5430435G22Rik
  gRNA
ccatagggataatctttgcc

SEQ ID NO: 1655 - DNA, 20 bp, Artificial Sequence
  MKO10001655_A_5430435G22Rik
  gRNA
tgacacaactttgaagctgc

SEQ ID NO: 1656 - DNA, 20 bp, Artificial Sequence
  MKO10001656_A_5530400C23Rik
  gRNA
acatcatgattaactactcg

SEQ ID NO: 1657 - DNA, 20 bp, Artificial Sequence
  MKO10001657_A_5530400C23Rik
  gRNA
ttgaacaatgatagtacatc

SEQ ID NO: 1658 - DNA, 20 bp, Artificial Sequence
  MKO10001658_A_5530400C23Rik
  gRNA
cggagcaatttaagaggatg

SEQ ID NO: 1659 - DNA, 20 bp, Artificial Sequence
  MKO10001659_A_5730409E04Rik
  gRNA
ggagaaacaccacgcgcatt

SEQ ID NO: 1660 - DNA, 20 bp, Artificial Sequence
  MKO10001660_A_5730409E04Rik
  gRNA
gatacatcaccaaatgcgcg

SEQ ID NO: 1661 - DNA, 20 bp, Artificial Sequence
  MKO10001661_A_5730409E04Rik
  gRNA
tccagagggctcggacctcg

SEQ ID NO: 1662 - DNA, 20 bp, Artificial Sequence
  MKO10001662_A_5730455P16Rik
  gRNA
gatagtgatgatggacgttc

SEQ ID NO: 1663 - DNA, 20 bp, Artificial Sequence
  MKO10001663_A_5730455P16Rik
  gRNA
agaattccaggttaccgagt

SEQ ID NO: 1664 - DNA, 20 bp, Artificial Sequence
  MKO10001664_A_5730455P16Rik
  gRNA
gcaatgaaactgcgaagttc

SEQ ID NO: 1665 - DNA, 20 bp, Artificial Sequence
  MKO10001665_A_5730507C01Rik
  gRNA
ccagtgccgggcaaccgtgg

SEQ ID NO: 1666 - DNA, 20 bp, Artificial Sequence
  MKO10001666_A_5730507C01Rik
  gRNA
taaacttcccagttgtgcaa

SEQ ID NO: 1667 - DNA, 20 bp, Artificial Sequence
  MKO10001667_A_5730507C01Rik
  gRNA
ccggcactgggccgtgctcg

SEQ ID NO: 1668 - DNA, 20 bp, Artificial Sequence
  MKO10001668_A_5730508B09Rik
  gRNA
cgccggcggggagtgcgacg

SEQ ID NO: 1669 - DNA, 20 bp, Artificial Sequence
  MKO10001669_A_5730508B09Rik
  gRNA
aaagaacggcaacgagtcca

SEQ ID NO: 1670 - DNA, 20 bp, Artificial Sequence
  MKO10001670_A_5730508B09Rik
  gRNA
gcggtgggatgtgctcggcc

SEQ ID NO: 1671 - DNA, 20 bp, Artificial Sequence
  MKO10001671_A_5730559C18Rik
  gRNA
acgctgctccgatcctgcgc

SEQ ID NO: 1672 - DNA, 20 bp, Artificial Sequence
  MKO10001672_A_5730559C18Rik
  gRNA
tgttccgccgccgatcaccc

SEQ ID NO: 1673 - DNA, 20 bp, Artificial Sequence
  MKO10001673_A_5730559C18Rik
  gRNA
gcgggaccttcagcgttgcc

SEQ ID NO: 1674 - DNA, 20 bp, Artificial Sequence
  MKO10001674_A_5830403L16Rik
  gRNA
acttcatgtaccgcaaacag

SEQ ID NO: 1675 - DNA, 20 bp, Artificial Sequence
  MKO10001675_A_5830403L16Rik
  gRNA
atgctgtacaaaccaatctc

SEQ ID NO: 1676 - DNA, 20 bp, Artificial Sequence
  MKO10001676_A_5830403L16Rik
  gRNA
aatatccaccatcccgtcct

SEQ ID NO: 1677 - DNA, 20 bp, Artificial Sequence
  MKO10001677_A_5830411N06Rik
  gRNA
ttcgttgcccatacagcgaa

SEQ ID NO: 1678 - DNA, 20 bp, Artificial Sequence
  MKO10001678_A_5830411N06Rik
  gRNA
cctgatcaatgtgaacgtcc

SEQ ID NO: 1679 - DNA, 20 bp, Artificial Sequence
  MKO10001679_A_5830411N06Rik
  gRNA
gacagaggcctttcgctgta

SEQ ID NO: 1680 - DNA, 20 bp, Artificial Sequence
  MKO10001680_A_5830415F09Rik
  gRNA
tgagtcgtagtcagcaatgt

SEQ ID NO: 1681 - DNA, 20 bp, Artificial Sequence
  MKO10001681_A_5830415F09Rik
  gRNA
tgttggccgtgccatcaacc

SEQ ID NO: 1682 - DNA, 20 bp, Artificial Sequence
  MKO10001682_A_5830415F09Rik
  gRNA
gtaccgccggaagctctgcg

SEQ ID NO: 1683 - DNA, 20 bp, Artificial Sequence
  MKO10001683_A_5830418K08Rik
  gRNA
cgagaaagagcatccaagtc

SEQ ID NO: 1684 - DNA, 20 bp, Artificial Sequence
  MKO10001684_A_5830418K08Rik
  gRNA
aaggcacataaaagctcgaa

SEQ ID NO: 1685 - DNA, 20 bp, Artificial Sequence
  MKO10001685_A_5830418K08Rik
  gRNA
acgaaaactaagattgctgc

SEQ ID NO: 1686 - DNA, 20 bp, Artificial Sequence
  MKO10001686_A_5830473C10Rik
  gRNA
tacacaatacctttgtccgc

SEQ ID NO: 1687 - DNA, 20 bp, Artificial Sequence
  MKO10001687_A_5830473C10Rik
  gRNA
tgaacacgtgactatccacc

SEQ ID NO: 1688 - DNA, 20 bp, Artificial Sequence
  MKO10001688_A_5830473C10Rik
  gRNA
atgatacacccctgattcca

SEQ ID NO: 1689 - DNA, 20 bp, Artificial Sequence
  MKO10001689_A_42435
  gRNA
ggtagccgtgaaggcatatc

SEQ ID NO: 1690 - DNA, 20 bp, Artificial Sequence
  MKO10001690_A_42435
  gRNA
ttggcactgcaatacgatac

SEQ ID NO: 1691 - DNA, 20 bp, Artificial Sequence
  MKO10001691_A_42435
  gRNA
cacgttgacagcatgtctag

SEQ ID NO: 1692 - DNA, 20 bp, Artificial Sequence
  MKO10001692_A_42619
  gRNA
agcggccgatatagctcgcc

SEQ ID NO: 1693 - DNA, 20 bp, Artificial Sequence
  MKO10001693_A_42619
  gRNA
caccacctggcgagctatat

SEQ ID NO: 1694 - DNA, 20 bp, Artificial Sequence
  MKO10001694_A_42619
  gRNA
ttgtatttcattgccccgac

SEQ ID NO: 1695 - DNA, 20 bp, Artificial Sequence
  MKO10001695_A_6030419C18Rik
  gRNA
tccgttgaccacccgacgct

SEQ ID NO: 1696 - DNA, 20 bp, Artificial Sequence
  MKO10001696_A_6030419C18Rik
  gRNA
catccccaacgggccacgag

SEQ ID NO: 1697 - DNA, 20 bp, Artificial Sequence
  MKO10001697_A_6030419C18Rik
  gRNA
gattcgacagcgcatgaaga

SEQ ID NO: 1698 - DNA, 20 bp, Artificial Sequence
  MKO10001698_A_6030458C11Rik
  gRNA
tatgtccagaatcgccccag

SEQ ID NO: 1699 - DNA, 20 bp, Artificial Sequence
  MKO10001699_A_6030458C11Rik
  gRNA
ccgtcctgctcacgttccgg

SEQ ID NO: 1700 - DNA, 20 bp, Artificial Sequence
  MKO10001700_A_6030458C11Rik
  gRNA
acctcaggaaggttactatc

SEQ ID NO: 1701 - DNA, 20 bp, Artificial Sequence
  MKO10001701_A_6030468B19Rik
  gRNA
ctgacttcgtcctacgccat

SEQ ID NO: 1702 - DNA, 20 bp, Artificial Sequence
  MKO10001702_A_6030468B19Rik
  gRNA
caataacggctatggagacg

SEQ ID NO: 1703 - DNA, 20 bp, Artificial Sequence
  MKO10001703_A_6030468B19Rik
  gRNA
tgcgaagctgaaaacgatgt

SEQ ID NO: 1704 - DNA, 20 bp, Artificial Sequence
  MKO10001704_A_6030498E09Rik
  gRNA
tcccgcttctatacatctaa

SEQ ID NO: 1705 - DNA, 20 bp, Artificial Sequence
  MKO10001705_A_6030498E09Rik
  gRNA
ccgtacccagacccagtcca

SEQ ID NO: 1706 - DNA, 20 bp, Artificial Sequence
  MKO10001706_A_6030498E09Rik
  gRNA
gtaaatatgagtgtgacaat

SEQ ID NO: 1707 - DNA, 20 bp, Artificial Sequence
  MKO10001707_A_6330403A02Rik
  gRNA
cggggggcatcgtcgtccag

SEQ ID NO: 1708 - DNA, 20 bp, Artificial Sequence
  MKO10001708_A_6330403A02Rik
  gRNA
tggggcacgcaccgacctcc

SEQ ID NO: 1709 - DNA, 20 bp, Artificial Sequence
  MKO10001709_A_6330403A02Rik
  gRNA
gctcacggccatcgttatgg

SEQ ID NO: 1710 - DNA, 20 bp, Artificial Sequence
  MKO10001710_A_6330403K07Rik
  gRNA
cagcgcgtttccgaaacaaa

SEQ ID NO: 1711 - DNA, 20 bp, Artificial Sequence
  MKO10001711_A_6330403K07Rik
  gRNA
acttaggtgcacgcgcagtg

SEQ ID NO: 1712 - DNA, 20 bp, Artificial Sequence
  MKO10001712_A_6330403K07Rik
  gRNA
taacctgcaaacgcgagttc

SEQ ID NO: 1713 - DNA, 20 bp, Artificial Sequence
  MKO10001713_A_6330408A02Rik
  gRNA
gccgggacgcgccacgcaac

SEQ ID NO: 1714 - DNA, 20 bp, Artificial Sequence
  MKO10001714_A_6330408A02Rik
  gRNA
gcctgttgcgtggcgcgtcc

SEQ ID NO: 1715 - DNA, 20 bp, Artificial Sequence
  MKO10001715_A_6330408A02Rik
  gRNA
accacgagtcgatctcgcaa

SEQ ID NO: 1716 - DNA, 20 bp, Artificial Sequence
  MKO10001716_A_6330409D20Rik
  gRNA
gctagatatgatagagcgct

SEQ ID NO: 1717 - DNA, 20 bp, Artificial Sequence
  MKO10001717_A_6330409D20Rik
  gRNA
cagcctatgcgacatcaagc

SEQ ID NO: 1718 - DNA, 20 bp, Artificial Sequence
  MKO10001718_A_6330409D20Rik
  gRNA
tcacctgcttgatgtcgcat

SEQ ID NO: 1719 - DNA, 20 bp, Artificial Sequence
  MKO10001719_A_6330416G13Rik
  gRNA
gtgcacaggtattgtcgatc

SEQ ID NO: 1720 - DNA, 20 bp, Artificial Sequence
  MKO10001720_A_6330416G13Rik
  gRNA
aggcgtgctgcttgcgaccc

SEQ ID NO: 1721 - DNA, 20 bp, Artificial Sequence
  MKO10001721_A_6330416G13Rik
  gRNA
atgatgtacctcctcacttg

SEQ ID NO: 1722 - DNA, 20 bp, Artificial Sequence
  MKO10001722_A_6430531B16Rik
  gRNA
ttgtgaagcacttccgccct

SEQ ID NO: 1723 - DNA, 20 bp, Artificial Sequence
  MKO10001723_A_6430531B16Rik
  gRNA
accactctgttcccgaaagc

SEQ ID NO: 1724 - DNA, 20 bp, Artificial Sequence
  MKO10001724_A_6430531B16Rik
  gRNA
ctgtgcaagtccaccagccg

SEQ ID NO: 1725 - DNA, 20 bp, Artificial Sequence
  MKO10001725_A_6430548M08Rik
  gRNA
caaagcgtgcgaaccattcc

SEQ ID NO: 1726 - DNA, 20 bp, Artificial Sequence
  MKO10001726_A_6430548M08Rik
  gRNA
cgcacgctttgtgagcgcac

SEQ ID NO: 1727 - DNA, 20 bp, Artificial Sequence
  MKO10001727_A_6430548M08Rik
  gRNA
ctcaaacagcactaccgcga

SEQ ID NO: 1728 - DNA, 20 bp, Artificial Sequence
  MKO10001728_A_6430550D23Rik
  gRNA
gaattgggagtcactccaga

SEQ ID NO: 1729 - DNA, 20 bp, Artificial Sequence
  MKO10001729_A_6430550D23Rik
  gRNA
gttattgcagcttgctgatc

SEQ ID NO: 1730 - DNA, 20 bp, Artificial Sequence
  MKO10001730_A_6430550D23Rik
  gRNA
atgaactcagtgagcgagca

SEQ ID NO: 1731 - DNA, 20 bp, Artificial Sequence
  MKO10001731_A_6430571L13Rik
  gRNA
tccggcctctcacgcatgga

SEQ ID NO: 1732 - DNA, 20 bp, Artificial Sequence
  MKO10001732_A_6430571L13Rik
  gRNA
atcggtaaacaccagcctgc

SEQ ID NO: 1733 - DNA, 20 bp, Artificial Sequence
  MKO10001733_A_6430571L13Rik
  gRNA
ggtagagccttcagcggcgg

SEQ ID NO: 1734 - DNA, 20 bp, Artificial Sequence
  MKO10001734_A_6430573F11Rik
  gRNA
ggttaccaatgtcagcgacg

SEQ ID NO: 1735 - DNA, 20 bp, Artificial Sequence
  MKO10001735_A_6430573F11Rik
  gRNA
ggcagcctcgtcgctgacat

SEQ ID NO: 1736 - DNA, 20 bp, Artificial Sequence
  MKO10001736_A_6430573F11Rik
  gRNA
ctttgaaatagcttcgcagc

SEQ ID NO: 1737 - DNA, 20 bp, Artificial Sequence
  MKO10001737_A_6720489N17Rik
  gRNA
gcattctctccgttgcgagc

SEQ ID NO: 1738 - DNA, 20 bp, Artificial Sequence
  MKO10001738_A_6720489N17Rik
  gRNA
gtcgatcaaagaacactaac

SEQ ID NO: 1739 - DNA, 20 bp, Artificial Sequence
  MKO10001739_A_6720489N17Rik
  gRNA
aagatttctgtgtcgtaaaa

SEQ ID NO: 1740 - DNA, 20 bp, Artificial Sequence
  MKO10001740_A_6820408C15Rik
  gRNA
tagcatttcacgcacgctca

SEQ ID NO: 1741 - DNA, 20 bp, Artificial Sequence
  MKO10001741_A_6820408C15Rik
  gRNA
agtcgatgcttcgaaaccag

SEQ ID NO: 1742 - DNA, 20 bp, Artificial Sequence
  MKO10001742_A_6820408C15Rik
  gRNA
cctttgacttgtcggagggg

SEQ ID NO: 1743 - DNA, 20 bp, Artificial Sequence
  MKO10001743_A_42436
  gRNA
gccagattactgccgagtgc

SEQ ID NO: 1744 - DNA, 20 bp, Artificial Sequence
  MKO10001744_A_42436
  gRNA
cgcctccttctcgagaacaa

SEQ ID NO: 1745 - DNA, 20 bp, Artificial Sequence
  MKO10001745_A_42436
  gRNA
ttgagtcatgatcccgctgc

SEQ ID NO: 1746 - DNA, 20 bp, Artificial Sequence
  MKO10001746_A_42620
  gRNA
tcagcaaccgaagaaccttg

SEQ ID NO: 1747 - DNA, 20 bp, Artificial Sequence
  MKO10001747_A_42620
  gRNA
ctgacaatagttgatactcc

SEQ ID NO: 1748 - DNA, 20 bp, Artificial Sequence
  MKO10001748_A_42620
  gRNA
gaattcactcttatggtagt

SEQ ID NO: 1749 - DNA, 20 bp, Artificial Sequence
  MKO10001749_A_7420426K07Rik
  gRNA
agggctggataggccgttcc

SEQ ID NO: 1750 - DNA, 20 bp, Artificial Sequence
  MKO10001750_A_7420426K07Rik
  gRNA
gaggtcagcgctagtgctgc

SEQ ID NO: 1751 - DNA, 20 bp, Artificial Sequence
  MKO10001751_A_7420426K07Rik
  gRNA
ggcctatccagccctcgtcc

SEQ ID NO: 1752 - DNA, 20 bp, Artificial Sequence
  MKO10001752_A_7420461P10Rik
  gRNA
atggccatttccacacttag

SEQ ID NO: 1753 - DNA, 20 bp, Artificial Sequence
  MKO10001753_A_7420461P10Rik
  gRNA
cctccgaatctcagatctgc

SEQ ID NO: 1754 - DNA, 20 bp, Artificial Sequence
  MKO10001754_A_7420461P10Rik
  gRNA
tctctgagatcaacaagcgt

SEQ ID NO: 1755 - DNA, 20 bp, Artificial Sequence
  MKO10001755_A_7530416G11Rik
  gRNA
gaacgcctcctgattggaaa

SEQ ID NO: 1756 - DNA, 20 bp, Artificial Sequence
  MKO10001756_A_7530416G11Rik
  gRNA
tctattccacggcagacagt

SEQ ID NO: 1757 - DNA, 20 bp, Artificial Sequence
  MKO10001757_A_7530416G11Rik
  gRNA
aatacggggcctacacacaa

SEQ ID NO: 1758 - DNA, 20 bp, Artificial Sequence
  MKO10001758_A_42437
  gRNA
gagcctccatttcgtgcatc

SEQ ID NO: 1759 - DNA, 20 bp, Artificial Sequence
  MKO10001759_A_42437
  gRNA
gacactggagccgtcgtgga

SEQ ID NO: 1760 - DNA, 20 bp, Artificial Sequence
  MKO10001760_A_42437
  gRNA
aagcctgatgcacgaaatgg

SEQ ID NO: 1761 - DNA, 20 bp, Artificial Sequence
  MKO10001761_A_42621
  gRNA
caccgagacgcgttccaagt

SEQ ID NO: 1762 - DNA, 20 bp, Artificial Sequence
  MKO10001762_A_42621
  gRNA
tctttgactatcacgacacg

SEQ ID NO: 1763 - DNA, 20 bp, Artificial Sequence
  MKO10001763_A_42621
  gRNA
ctctacttcatcacgcccac

SEQ ID NO: 1764 - DNA, 20 bp, Artificial Sequence
  MKO10001764_A_8030411F24Rik
  gRNA
ccgcgcttatgtcggcacac

SEQ ID NO: 1765 - DNA, 20 bp, Artificial Sequence
  MKO10001765_A_8030411F24Rik
  gRNA
acatacaagttgctcgaagt

SEQ ID NO: 1766 - DNA, 20 bp, Artificial Sequence
  MKO10001766_A_8030411F24Rik
  gRNA
tccaagtagatgcgagacct

SEQ ID NO: 1767 - DNA, 20 bp, Artificial Sequence
  MKO10001767_A_8030423J24Rik
  gRNA
gacaccgctagaacgccaac

SEQ ID NO: 1768 - DNA, 20 bp, Artificial Sequence
  MKO10001768_A_8030423J24Rik
  gRNA
tctccctgttggcgttctag

SEQ ID NO: 1769 - DNA, 20 bp, Artificial Sequence
  MKO10001769_A_8030423J24Rik
  gRNA
aagtgctcacctcggtactg

SEQ ID NO: 1770 - DNA, 20 bp, Artificial Sequence
  MKO10001770_A_8030462N17Rik
  gRNA
ccgagactttcgtccaacag

SEQ ID NO: 1771 - DNA, 20 bp, Artificial Sequence
  MKO10001771_A_8030462N17Rik
  gRNA
agaggtcgtcgaccttacct

SEQ ID NO: 1772 - DNA, 20 bp, Artificial Sequence
  MKO10001772_A_8030462N17Rik
  gRNA
ctcataaactcggccagttg

SEQ ID NO: 1773 - DNA, 20 bp, Artificial Sequence
  MKO10001773_A_8430408G22Rik
  gRNA
tacacctgacgtagtcatcc

SEQ ID NO: 1774 - DNA, 20 bp, Artificial Sequence
  MKO10001774_A_8430408G22Rik
  gRNA
tctcgccccagcagtatcct

SEQ ID NO: 1775 - DNA, 20 bp, Artificial Sequence
  MKO10001775_A_8430408G22Rik
  gRNA
gccgtcccaacagaccctcc

SEQ ID NO: 1776 - DNA, 20 bp, Artificial Sequence
  MKO10001776_A_8430419L09Rik
  gRNA
agcgcattcaatgcgacgtc

SEQ ID NO: 1777 - DNA, 20 bp, Artificial Sequence
  MKO10001777_A_8430419L09Rik
  gRNA
tgagtacgaccccctcacgc

SEQ ID NO: 1778 - DNA, 20 bp, Artificial Sequence
  MKO10001778_A_8430419L09Rik
  gRNA
tgagggggtcgtactcaccg

SEQ ID NO: 1779 - DNA, 20 bp, Artificial Sequence
  MKO10001779_A_8430427H17Rik
  gRNA
catggaccccgagcggctca

SEQ ID NO: 1780 - DNA, 20 bp, Artificial Sequence
  MKO10001780_A_8430427H17Rik
  gRNA
atcagtgccgcagccgtctg

SEQ ID NO: 1781 - DNA, 20 bp, Artificial Sequence
  MKO10001781_A_8430427H17Rik
  gRNA
ctgcggagccgcgtcaagta

SEQ ID NO: 1782 - DNA, 20 bp, Artificial Sequence
  MKO10001782_A_42438
  gRNA
tttaccgcatcttcaagcgc

SEQ ID NO: 1783 - DNA, 20 bp, Artificial Sequence
  MKO10001783_A_42438
  gRNA
ggcccgcggttccttgtcgc

SEQ ID NO: 1784 - DNA, 20 bp, Artificial Sequence
  MKO10001784_A_42438
  gRNA
gacagagcgtccagcgcgcc

SEQ ID NO: 1785 - DNA, 20 bp, Artificial Sequence
  MKO10001785_A_42622
  gRNA
cgacttgatttcgatcgtct

SEQ ID NO: 1786 - DNA, 20 bp, Artificial Sequence
  MKO10001786_A_42622
  gRNA
ccccgcgtcacggaacgaaa

SEQ ID NO: 1787 - DNA, 20 bp, Artificial Sequence
  MKO10001787_A_42622
  gRNA
ccccacatagccgaactcca

SEQ ID NO: 1788 - DNA, 20 bp, Artificial Sequence
  MKO10001788_A_9030025P20Rik
  gRNA
ctaattcttcatatctcaca

SEQ ID NO: 1789 - DNA, 20 bp, Artificial Sequence
  MKO10001789_A_9030025P20Rik
  gRNA
tttctttgagttcaaaccca

SEQ ID NO: 1790 - DNA, 20 bp, Artificial Sequence
  MKO10001790_A_9030025P20Rik
  gRNA
cctctggataagttgtccac

SEQ ID NO: 1791 - DNA, 20 bp, Artificial Sequence
  MKO10001791_A_9030617O03Rik
  gRNA
tccacataactcccgtagtc

SEQ ID NO: 1792 - DNA, 20 bp, Artificial Sequence
  MKO10001792_A_9030617O03Rik
  gRNA
ttatgtggagtgtcggcccg

SEQ ID NO: 1793 - DNA, 20 bp, Artificial Sequence
  MKO10001793_A_9030617O03Rik
  gRNA
acctgggtcaccgatgtgaa

SEQ ID NO: 1794 - DNA, 20 bp, Artificial Sequence
  MKO10001794_A_9030624G23Rik
  gRNA
tttcacagtcaggtggccag

SEQ ID NO: 1795 - DNA, 20 bp, Artificial Sequence
  MKO10001795_A_9030624G23Rik
  gRNA
cttgctattctgcttgccca

SEQ ID NO: 1796 - DNA, 20 bp, Artificial Sequence
  MKO10001796_A_9030624G23Rik
  gRNA
gccggacccgatctccgtgt

SEQ ID NO: 1797 - DNA, 20 bp, Artificial Sequence
  MKO10001797_A_9030624J02Rik
  gRNA
ctcgaaatcaggtcccacga

SEQ ID NO: 1798 - DNA, 20 bp, Artificial Sequence
  MKO10001798_A_9030624J02Rik
  gRNA
tacgcaggcattcccggaac

SEQ ID NO: 1799 - DNA, 20 bp, Artificial Sequence
  MKO10001799_A_9030624J02Rik
  gRNA
agagcgggtcggtgccatcg

SEQ ID NO: 1800 - DNA, 20 bp, Artificial Sequence
  MKO10001800_A_9130008F23Rik
  gRNA
gtttccgtttggaatcgtag

SEQ ID NO: 1801 - DNA, 20 bp, Artificial Sequence
  MKO10001801_A_9130008F23Rik
  gRNA
gagaaccttcccccgacgat

SEQ ID NO: 1802 - DNA, 20 bp, Artificial Sequence
  MKO10001802_A_9130008F23Rik
  gRNA
tgcggtcacagaacgctcct

SEQ ID NO: 1803 - DNA, 20 bp, Artificial Sequence
  MKO10001803_A_9130011E15Rik
  gRNA
ccgagttgtcaacgccttgc

SEQ ID NO: 1804 - DNA, 20 bp, Artificial Sequence
  MKO10001804_A_9130011E15Rik
  gRNA
cagaagaataaatctacgtc

SEQ ID NO: 1805 - DNA, 20 bp, Artificial Sequence
  MKO10001805_A_9130011E15Rik
  gRNA
aagagttcctcccaaaaccg

SEQ ID NO: 1806 - DNA, 20 bp, Artificial Sequence
  MKO10001806_A_9130019O22Rik
  gRNA
cagtgcaatccgctgcgcca

SEQ ID NO: 1807 - DNA, 20 bp, Artificial Sequence
  MKO10001807_A_9130019O22Rik
  gRNA
gctccattcggtgtatggcc

SEQ ID NO: 1808 - DNA, 20 bp, Artificial Sequence
  MKO10001808_A_9130019O22Rik
  gRNA
gtatggctcggtgcgagctc

SEQ ID NO: 1809 - DNA, 20 bp, Artificial Sequence
  MKO10001809_A_9130023H24Rik
  gRNA
ttgttccggccgcgccagga

SEQ ID NO: 1810 - DNA, 20 bp, Artificial Sequence
  MKO10001810_A_9130023H24Rik
  gRNA
gtagcgcggtctcgcgatcc

SEQ ID NO: 1811 - DNA, 20 bp, Artificial Sequence
  MKO10001811_A_9130023H24Rik
  gRNA
aaacaccgtcgttctcactc

SEQ ID NO: 1812 - DNA, 20 bp, Artificial Sequence
  MKO10001812_A_9130204L05Rik
  gRNA
aactcctttaagtatactat

SEQ ID NO: 1813 - DNA, 20 bp, Artificial Sequence
  MKO10001813_A_9130204L05Rik
  gRNA
aacttcacaaattatgctct

SEQ ID NO: 1814 - DNA, 20 bp, Artificial Sequence
  MKO10001814_A_9130204L05Rik
  gRNA
agacctacctggagaaaatt

SEQ ID NO: 1815 - DNA, 20 bp, Artificial Sequence
  MKO10001815_A_9130401M01Rik
  gRNA
gccagcaggcgtgtcaccgc

SEQ ID NO: 1816 - DNA, 20 bp, Artificial Sequence
  MKO10001816_A_9130401M01Rik
  gRNA
tcagcaaacatcattcgcgt

SEQ ID NO: 1817 - DNA, 20 bp, Artificial Sequence
  MKO10001817_A_9130401M01Rik
  gRNA
agcactaccactcgcttcca

SEQ ID NO: 1818 - DNA, 20 bp, Artificial Sequence
  MKO10001818_A_9130409I23Rik
  gRNA
tgatcgacgtcgggagatat

SEQ ID NO: 1819 - DNA, 20 bp, Artificial Sequence
  MKO10001819_A_9130409I23Rik
  gRNA
atatttgctaacctcccgat

SEQ ID NO: 1820 - DNA, 20 bp, Artificial Sequence
  MKO10001820_A_9130409I23Rik
  gRNA
catgaggaaactcgcatcac

SEQ ID NO: 1821 - DNA, 20 bp, Artificial Sequence
  MKO10001821_A_9230104L09Rik
  gRNA
acaatattactggctctctc

SEQ ID NO: 1822 - DNA, 20 bp, Artificial Sequence
  MKO10001822_A_9230104L09Rik
  gRNA
gagagccagtaatattgtcc

SEQ ID NO: 1823 - DNA, 20 bp, Artificial Sequence
  MKO10001823_A_9230104L09Rik
  gRNA
agcttcacgaagaaagtttg

SEQ ID NO: 1824 - DNA, 20 bp, Artificial Sequence
  MKO10001824_A_9230110C19Rik
  gRNA
gacgttccagccctaccaaa

SEQ ID NO: 1825 - DNA, 20 bp, Artificial Sequence
  MKO10001825_A_9230110C19Rik
  gRNA
gacagctaagctgatctata

SEQ ID NO: 1826 - DNA, 20 bp, Artificial Sequence
  MKO10001826_A_9230110C19Rik
  gRNA
ccctctgctaggtccatgct

SEQ ID NO: 1827 - DNA, 20 bp, Artificial Sequence
  MKO10001827_A_9230110F15Rik
  gRNA
cctacactttctgttgatgc

SEQ ID NO: 1828 - DNA, 20 bp, Artificial Sequence
  MKO10001828_A_9230110F15Rik
  gRNA
tacttcctattctcacacac

SEQ ID NO: 1829 - DNA, 20 bp, Artificial Sequence
  MKO10001829_A_9230110F15Rik
  gRNA
cctgcatcaacagaaagtgt

SEQ ID NO: 1830 - DNA, 20 bp, Artificial Sequence
  MKO10001830_A_9230112D13Rik
  gRNA
actagaacgaaatccgcagc

SEQ ID NO: 1831 - DNA, 20 bp, Artificial Sequence
  MKO10001831_A_9230112D13Rik
  gRNA
gtctttggagacgcggcatg

SEQ ID NO: 1832 - DNA, 20 bp, Artificial Sequence
  MKO10001832_A_9230112D13Rik
  gRNA
cgcccaggaaacgccagacg

SEQ ID NO: 1833 - DNA, 20 bp, Artificial Sequence
  MKO10001833_A_9330159F19Rik
  gRNA
cacaacaccgtaatttgatc

SEQ ID NO: 1834 - DNA, 20 bp, Artificial Sequence
  MKO10001834_A_9330159F19Rik
  gRNA
cgacgatttgctggtctagc

SEQ ID NO: 1835 - DNA, 20 bp, Artificial Sequence
  MKO10001835_A_9330159F19Rik
  gRNA
ctgctagaccagcaaatcgt

SEQ ID NO: 1836 - DNA, 20 bp, Artificial Sequence
  MKO10001836_A_9330182L06Rik
  gRNA
cttctttgagtaccagtacg

SEQ ID NO: 1837 - DNA, 20 bp, Artificial Sequence
  MKO10001837_A_9330182L06Rik
  gRNA
cgccattccgaattctgcag

SEQ ID NO: 1838 - DNA, 20 bp, Artificial Sequence
  MKO10001838_A_9330182L06Rik
  gRNA
gactctatatagttcccacg

SEQ ID NO: 1839 - DNA, 20 bp, Artificial Sequence
  MKO10001839_A_9330182O14Rik
  gRNA
ggagttactttccggttgtt

SEQ ID NO: 1840 - DNA, 20 bp, Artificial Sequence
  MKO10001840_A_9330182O14Rik
  gRNA
ctcaatgcatttgcttcacg

SEQ ID NO: 1841 - DNA, 20 bp, Artificial Sequence
  MKO10001841_A_9330182O14Rik
  gRNA
ttctagaactgttaagacga

SEQ ID NO: 1842 - DNA, 20 bp, Artificial Sequence
  MKO10001842_A_9430007A20Rik
  gRNA
aaggaggcacatcaatcgta

SEQ ID NO: 1843 - DNA, 20 bp, Artificial Sequence
  MKO10001843_A_9430007A20Rik
  gRNA
aaaaagaggatgcctcgtcg

SEQ ID NO: 1844 - DNA, 20 bp, Artificial Sequence
  MKO10001844_A_9430007A20Rik
  gRNA
ttgggacgaaagagtcttac

SEQ ID NO: 1845 - DNA, 20 bp, Artificial Sequence
  MKO10001845_A_9430015G10Rik
  gRNA
gggaccctcccgacatacaa

SEQ ID NO: 1846 - DNA, 20 bp, Artificial Sequence
  MKO10001846_A_9430015G10Rik
  gRNA
atgggagcgctagctgtgtc

SEQ ID NO: 1847 - DNA, 20 bp, Artificial Sequence
  MKO10001847_A_9430015G10Rik
  gRNA
gcgtgcagcttcccatgaac

SEQ ID NO: 1848 - DNA, 20 bp, Artificial Sequence
  MKO10001848_A_9430016H08Rik
  gRNA
atccgcgcaatcgtccaatc

SEQ ID NO: 1849 - DNA, 20 bp, Artificial Sequence
  MKO10001849_A_9430016H08Rik
  gRNA
agcctgattggacgattgcg

SEQ ID NO: 1850 - DNA, 20 bp, Artificial Sequence
  MKO10001850_A_9430016H08Rik
  gRNA
ggctccacttaaagactcac

SEQ ID NO: 1851 - DNA, 20 bp, Artificial Sequence
  MKO10001851_A_9430020K01Rik
  gRNA
gtgagcgagactttagccca

SEQ ID NO: 1852 - DNA, 20 bp, Artificial Sequence
  MKO10001852_A_9430020K01Rik
  gRNA
acgctgcagcatgtatagtg

SEQ ID NO: 1853 - DNA, 20 bp, Artificial Sequence
  MKO10001853_A_9430020K01Rik
  gRNA
ccctacagcatcgccgaatt

SEQ ID NO: 1854 - DNA, 20 bp, Artificial Sequence
  MKO10001854_A_9430023L20Rik
  gRNA
ctatgtgcgcgtctcctcag

SEQ ID NO: 1855 - DNA, 20 bp, Artificial Sequence
  MKO10001855_A_9430023L20Rik
  gRNA
gtggactgtcaaggtgcacg

SEQ ID NO: 1856 - DNA, 20 bp, Artificial Sequence
  MKO10001856_A_9430023L20Rik
  gRNA
gctggaccgtgccttgcgca

SEQ ID NO: 1857 - DNA, 20 bp, Artificial Sequence
  MKO10001857_A_9430038I01Rik
  gRNA
cgtcgggccgctggagacgg

SEQ ID NO: 1858 - DNA, 20 bp, Artificial Sequence
  MKO10001858_A_9430038I01Rik
  gRNA
cttaccgcgtcccctgccgc

SEQ ID NO: 1859 - DNA, 20 bp, Artificial Sequence
  MKO10001859_A_9430038I01Rik
  gRNA
actcccccgagatacacctc

SEQ ID NO: 1860 - DNA, 20 bp, Artificial Sequence
  MKO10001860_A_9430069I07Rik
  gRNA
cacttgcagatgtacgagcc

SEQ ID NO: 1861 - DNA, 20 bp, Artificial Sequence
  MKO10001861_A_9430069I07Rik
  gRNA
cctcgtctggaaagctatcc

SEQ ID NO: 1862 - DNA, 20 bp, Artificial Sequence
  MKO10001862_A_9430069I07Rik
  gRNA
gttccaagacgctgcacatg

SEQ ID NO: 1863 - DNA, 20 bp, Artificial Sequence
  MKO10001863_A_9530002B09Rik
  gRNA
tggtgttacctcgatccctg

SEQ ID NO: 1864 - DNA, 20 bp, Artificial Sequence
  MKO10001864_A_9530002B09Rik
  gRNA
cccgctacaaattgaaattt

SEQ ID NO: 1865 - DNA, 20 bp, Artificial Sequence
  MKO10001865_A_9530002B09Rik
  gRNA
gccaaaatttcaatttgtag

SEQ ID NO: 1866 - DNA, 20 bp, Artificial Sequence
  MKO10001866_A_9530003J23Rik
  gRNA
ggtctacgaccgatgttctt

SEQ ID NO: 1867 - DNA, 20 bp, Artificial Sequence
  MKO10001867_A_9530003J23Rik
  gRNA
atcggtcgtagaccttgccc

SEQ ID NO: 1868 - DNA, 20 bp, Artificial Sequence
  MKO10001868_A_9530003J23Rik
  gRNA
ctgccgtagtttgtgcaaag

SEQ ID NO: 1869 - DNA, 20 bp, Artificial Sequence
  MKO10001869_A_9530053A07Rik
  gRNA
tccgcgtacacttcttgacc

SEQ ID NO: 1870 - DNA, 20 bp, Artificial Sequence
  MKO10001870_A_9530053A07Rik
  gRNA
tggcatacggcagcaatcat

SEQ ID NO: 1871 - DNA, 20 bp, Artificial Sequence
  MKO10001871_A_9530053A07Rik
  gRNA
tatgattgctgccgtatgcc

SEQ ID NO: 1872 - DNA, 20 bp, Artificial Sequence
  MKO10001872_A_9530068E07Rik
  gRNA
acggagagccggactacgac

SEQ ID NO: 1873 - DNA, 20 bp, Artificial Sequence
  MKO10001873_A_9530068E07Rik
  gRNA
ctccgtagtcgccattgtcc

SEQ ID NO: 1874 - DNA, 20 bp, Artificial Sequence
  MKO10001874_A_9530068E07Rik
  gRNA
tttggaccagaacgtgaacg

SEQ ID NO: 1875 - DNA, 20 bp, Artificial Sequence
  MKO10001875_A_9530077C05Rik
  gRNA
tcaaacgacgcaatctgacc

SEQ ID NO: 1876 - DNA, 20 bp, Artificial Sequence
  MKO10001876_A_9530077C05Rik
  gRNA
gcatccgtttactaccgtca

SEQ ID NO: 1877 - DNA, 20 bp, Artificial Sequence
  MKO10001877_A_9530077C05Rik
  gRNA
ttaacaaccttcagcaaccg

SEQ ID NO: 1878 - DNA, 20 bp, Artificial Sequence
  MKO10001878_A_9630033F20Rik
  gRNA
aggcgtagatgcgccccttt

SEQ ID NO: 1879 - DNA, 20 bp, Artificial Sequence
  MKO10001879_A_9630033F20Rik
  gRNA
gttgcagatgtacggagtcg

SEQ ID NO: 1880 - DNA, 20 bp, Artificial Sequence
  MKO10001880_A_9630033F20Rik
  gRNA
gccgaaacccagtctccgaa

SEQ ID NO: 1881 - DNA, 20 bp, Artificial Sequence
  MKO10001881_A_9830001H06Rik
  gRNA
tgtcgtccatctcggctcgc

SEQ ID NO: 1882 - DNA, 20 bp, Artificial Sequence
  MKO10001882_A_9830001H06Rik
  gRNA
ataccgctcggagcacgagc

SEQ ID NO: 1883 - DNA, 20 bp, Artificial Sequence
  MKO10001883_A_9830001H06Rik
  gRNA
agaacgaggggcttcgacag

SEQ ID NO: 1884 - DNA, 20 bp, Artificial Sequence
  MKO10001884_A_9830107B12Rik
  gRNA
agacaacttgtgttacccct

SEQ ID NO: 1885 - DNA, 20 bp, Artificial Sequence
  MKO10001885_A_9830107B12Rik
  gRNA
cccagagttacttcgagtac

SEQ ID NO: 1886 - DNA, 20 bp, Artificial Sequence
  MKO10001886_A_9830107B12Rik
  gRNA
cccagtgctgctgctgctcc

SEQ ID NO: 1887 - DNA, 20 bp, Artificial Sequence
  MKO10001887_A_9830147E19Rik
  gRNA
gtgctaaagcctttactcta

SEQ ID NO: 1888 - DNA, 20 bp, Artificial Sequence
  MKO10001888_A_9830147E19Rik
  gRNA
aagctgactccttagagtaa

SEQ ID NO: 1889 - DNA, 20 bp, Artificial Sequence
  MKO10001889_A_9830147E19Rik
  gRNA
actttaccaagatgtcatgc

SEQ ID NO: 1890 - DNA, 20 bp, Artificial Sequence
  MKO10001890_A_9930012K11Rik
  gRNA
gtcgctccaccgcaaagacg

SEQ ID NO: 1891 - DNA, 20 bp, Artificial Sequence
  MKO10001891_A_9930012K11Rik
  gRNA
cccagcttgtctgcgcagcg

SEQ ID NO: 1892 - DNA, 20 bp, Artificial Sequence
  MKO10001892_A_9930012K11Rik
  gRNA
gtctttgcggtggagcgact

SEQ ID NO: 1893 - DNA, 20 bp, Artificial Sequence
  MKO10001893_A_9930013L23Rik
  gRNA
gccaaccttaccggtcagaa

SEQ ID NO: 1894 - DNA, 20 bp, Artificial Sequence
  MKO10001894_A_9930013L23Rik
  gRNA
agcacattgtgctgcgtacc

SEQ ID NO: 1895 - DNA, 20 bp, Artificial Sequence
  MKO10001895_A_9930013L23Rik
  gRNA
tatttgaatgcagtgcccga

SEQ ID NO: 1896 - DNA, 20 bp, Artificial Sequence
  MKO10001896_A_9930021J03Rik
  gRNA
gttgaccgacgccttgttga

SEQ ID NO: 1897 - DNA, 20 bp, Artificial Sequence
  MKO10001897_A_9930021J03Rik
  gRNA
tcggtcaacacctcgaagtt

SEQ ID NO: 1898 - DNA, 20 bp, Artificial Sequence
  MKO10001898_A_9930021J03Rik
  gRNA
caaagtaggtcttcgatgta

SEQ ID NO: 1899 - DNA, 20 bp, Artificial Sequence
  MKO10001899_A_9930104L06Rik
  gRNA
cacagccgcatgctgctcgt

SEQ ID NO: 1900 - DNA, 20 bp, Artificial Sequence
  MKO10001900_A_9930104L06Rik
  gRNA
gcggttgaggcgcaagcagc

SEQ ID NO: 1901 - DNA, 20 bp, Artificial Sequence
  MKO10001901_A_9930104L06Rik
  gRNA
tcccatgtgctctacgagtc

SEQ ID NO: 1902 - DNA, 20 bp, Artificial Sequence
  MKO10001902_A_9930111J21Rik1
  gRNA
cattgttctttgtgaacaac

SEQ ID NO: 1903 - DNA, 20 bp, Artificial Sequence
  MKO10001903_A_9930111J21Rik1
  gRNA
caaatcccatattgtcacat

SEQ ID NO: 1904 - DNA, 20 bp, Artificial Sequence
  MKO10001904_A_9930111J21Rik1
  gRNA
ttctacaccccctccaaaag

SEQ ID NO: 1905 - DNA, 20 bp, Artificial Sequence
  MKO10001905_A_9930111J21Rik2
  gRNA
ttctacaccccctccaaaag

SEQ ID NO: 1906 - DNA, 20 bp, Artificial Sequence
  MKO10001906_A_9930111J21Rik2
  gRNA
atgtaacagtctcactagag

SEQ ID NO: 1907 - DNA, 20 bp, Artificial Sequence
  MKO10001907_A_9930111J21Rik2
  gRNA
tctgaagaaaatcgagtttg

SEQ ID NO: 1908 - DNA, 20 bp, Artificial Sequence
  MKO10001908_A_A130010J15Rik
  gRNA
tgtttactgcccggatttcg

SEQ ID NO: 1909 - DNA, 20 bp, Artificial Sequence
  MKO10001909_A_A130010J15Rik
  gRNA
tccgggcagtaaacacccgc

SEQ ID NO: 1910 - DNA, 20 bp, Artificial Sequence
  MKO10001910_A_A130010J15Rik
  gRNA
attggcgctccaaagttatc

SEQ ID NO: 1911 - DNA, 20 bp, Artificial Sequence
  MKO10001911_A_A1bg
  gRNA
tcacaccccgcattgcaacc

SEQ ID NO: 1912 - DNA, 20 bp, Artificial Sequence
  MKO10001912_A_A1bg
  gRNA
tgcagttgatttgccgacta

SEQ ID NO: 1913 - DNA, 20 bp, Artificial Sequence
  MKO10001913_A_A1bg
  gRNA
gtcctttcacctgccgctac

SEQ ID NO: 1914 - DNA, 20 bp, Artificial Sequence
  MKO10001914_A_A1cf
  gRNA
gcataaggttccttacgtac

SEQ ID NO: 1915 - DNA, 20 bp, Artificial Sequence
  MKO10001915_A_A1cf
  gRNA
gtttaggactggccgtctct

SEQ ID NO: 1916 - DNA, 20 bp, Artificial Sequence
  MKO10001916_A_A1cf
  gRNA
ggacaattgccgattgtttg

SEQ ID NO: 1917 - DNA, 20 bp, Artificial Sequence
  MKO10001917_A_A230046K03Rik
  gRNA
catcgccaatcaaatcatct

SEQ ID NO: 1918 - DNA, 20 bp, Artificial Sequence
  MKO10001918_A_A230046K03Rik
  gRNA
atgatttgattggcgatgtt

SEQ ID NO: 1919 - DNA, 20 bp, Artificial Sequence
  MKO10001919_A_A230046K03Rik
  gRNA
caaagtcatcactgtttatg

SEQ ID NO: 1920 - DNA, 20 bp, Artificial Sequence
  MKO10001920_A_A230050P20Rik
  gRNA
gtacacggcgccaccataca

SEQ ID NO: 1921 - DNA, 20 bp, Artificial Sequence
  MKO10001921_A_A230050P20Rik
  gRNA
cgcctccgggagaagtttca

SEQ ID NO: 1922 - DNA, 20 bp, Artificial Sequence
  MKO10001922_A_A230050P20Rik
  gRNA
cacgatagagcgcccaactc

SEQ ID NO: 1923 - DNA, 20 bp, Artificial Sequence
  MKO10001923_A_A230065H16Rik
  gRNA
tcagcgactgccctctattg

SEQ ID NO: 1924 - DNA, 20 bp, Artificial Sequence
  MKO10001924_A_A230065H16Rik
  gRNA
gccacacccgcatctgttac

SEQ ID NO: 1925 - DNA, 20 bp, Artificial Sequence
  MKO10001925_A_A230065H16Rik
  gRNA
gagaggtacccctcagatcc

SEQ ID NO: 1926 - DNA, 20 bp, Artificial Sequence
  MKO10001926_A_A2m
  gRNA
tttccacccccttaatgaat

SEQ ID NO: 1927 - DNA, 20 bp, Artificial Sequence
  MKO10001927_A_A2m
  gRNA
cccacagtcttcatccaatg

SEQ ID NO: 1928 - DNA, 20 bp, Artificial Sequence
  MKO10001928_A_A2m
  gRNA
gagatttcgtgttgtctcat

SEQ ID NO: 1929 - DNA, 20 bp, Artificial Sequence
  MKO10001929_A_A330021E22Rik
  gRNA
atctgtgccaaatctcttag

SEQ ID NO: 1930 - DNA, 20 bp, Artificial Sequence
  MKO10001930_A_A330021E22Rik
  gRNA
atgatacgattaaggtccat

SEQ ID NO: 1931 - DNA, 20 bp, Artificial Sequence
  MKO10001931_A_A330021E22Rik
  gRNA
tgctaattcatttgcacttc

SEQ ID NO: 1932 - DNA, 20 bp, Artificial Sequence
  MKO10001932_A_A330050F15Rik
  gRNA
gaagtcatggtgttcgctcc

SEQ ID NO: 1933 - DNA, 20 bp, Artificial Sequence
  MKO10001933_A_A330050F15Rik
  gRNA
agacttgccgcatggcttgc

SEQ ID NO: 1934 - DNA, 20 bp, Artificial Sequence
  MKO10001934_A_A330050F15Rik
  gRNA
attctggacaatctgcttgc

SEQ ID NO: 1935 - DNA, 20 bp, Artificial Sequence
  MKO10001935_A_A330070K13Rik
  gRNA
gcatcattggtccagcctat

SEQ ID NO: 1936 - DNA, 20 bp, Artificial Sequence
  MKO10001936_A_A330070K13Rik
  gRNA
agtagagtgccaaccattga

SEQ ID NO: 1937 - DNA, 20 bp, Artificial Sequence
  MKO10001937_A_A330070K13Rik
  gRNA
aatgatgcagccctagtctg

SEQ ID NO: 1938 - DNA, 20 bp, Artificial Sequence
  MKO10001938_A_A3galt2
  gRNA
cgatcgcttgtccctctcgt

SEQ ID NO: 1939 - DNA, 20 bp, Artificial Sequence
  MKO10001939_A_A3galt2
  gRNA
tgccgccaaacaccgcagcg

SEQ ID NO: 1940 - DNA, 20 bp, Artificial Sequence
  MKO10001940_A_A3galt2
  gRNA
agacggcggaacctcaccat

SEQ ID NO: 1941 - DNA, 20 bp, Artificial Sequence
  MKO10001941_A_A430005L14Rik
  gRNA
ttcccgaagaagcgactcac

SEQ ID NO: 1942 - DNA, 20 bp, Artificial Sequence
  MKO10001942_A_A430005L14Rik
  gRNA
atgcctgtgagtcgcttctt

SEQ ID NO: 1943 - DNA, 20 bp, Artificial Sequence
  MKO10001943_A_A430005L14Rik
  gRNA
cctcagcacgccttcgggcc

SEQ ID NO: 1944 - DNA, 20 bp, Artificial Sequence
  MKO10001944_A_A430033K04Rik
  gRNA
tcaactcccctagatgagcg

SEQ ID NO: 1945 - DNA, 20 bp, Artificial Sequence
  MKO10001945_A_A430033K04Rik
  gRNA
cgcggtgacgctgtaagtgc

SEQ ID NO: 1946 - DNA, 20 bp, Artificial Sequence
  MKO10001946_A_A430033K04Rik
  gRNA
tgataagccgcgctcatcta

SEQ ID NO: 1947 - DNA, 20 bp, Artificial Sequence
  MKO10001947_A_A430078G23Rik
  gRNA
gggcccctaagcctagatcc

SEQ ID NO: 1948 - DNA, 20 bp, Artificial Sequence
  MKO10001948_A_A430078G23Rik
  gRNA
ccctgccacaaagacgcagc

SEQ ID NO: 1949 - DNA, 20 bp, Artificial Sequence
  MKO10001949_A_A430078G23Rik
  gRNA
gttctgcccaccttgcttga

SEQ ID NO: 1950 - DNA, 20 bp, Artificial Sequence
  MKO10001950_A_A430089I19Rik
  gRNA
tcctgacaggggaaaacttc

SEQ ID NO: 1951 - DNA, 20 bp, Artificial Sequence
  MKO10001951_A_A430089I19Rik
  gRNA
tccgtccactctccagaatc

SEQ ID NO: 1952 - DNA, 20 bp, Artificial Sequence
  MKO10001952_A_A430089I19Rik
  gRNA
tccatctagcacagcctgca

SEQ ID NO: 1953 - DNA, 20 bp, Artificial Sequence
  MKO10001953_A_A430105I19Rik
  gRNA
aagccgagtccacaatgcgc

SEQ ID NO: 1954 - DNA, 20 bp, Artificial Sequence
  MKO10001954_A_A430105I19Rik
  gRNA
gcaagggtgcacgccagctc

SEQ ID NO: 1955 - DNA, 20 bp, Artificial Sequence
  MKO10001955_A_A430105I19Rik
  gRNA
tgagacttacaccgggaacc

SEQ ID NO: 1956 - DNA, 20 bp, Artificial Sequence
  MKO10001956_A_A430107P09Rik
  gRNA
agattgcctctcagtgcaac

SEQ ID NO: 1957 - DNA, 20 bp, Artificial Sequence
  MKO10001957_A_A430107P09Rik
  gRNA
aaaaactgcccgtgtttgaa

SEQ ID NO: 1958 - DNA, 20 bp, Artificial Sequence
  MKO10001958_A_A430107P09Rik
  gRNA
aagatgcctcagtgctgtgg

SEQ ID NO: 1959 - DNA, 20 bp, Artificial Sequence
  MKO10001959_A_A4galt
  gRNA
tatgtgtcgtagggcaatag

SEQ ID NO: 1960 - DNA, 20 bp, Artificial Sequence
  MKO10001960_A_A4galt
  gRNA
gtgccgtgcctccgagtacc

SEQ ID NO: 1961 - DNA, 20 bp, Artificial Sequence
  MKO10001961_A_A4galt
  gRNA
gctcaacctgaccaacacgc

SEQ ID NO: 1962 - DNA, 20 bp, Artificial Sequence
  MKO10001962_A_A4gnt
  gRNA
gaacccaaataccccgttac

SEQ ID NO: 1963 - DNA, 20 bp, Artificial Sequence
  MKO10001963_A_A4gnt
  gRNA
gttccacaaatgcagtgcgt

SEQ ID NO: 1964 - DNA, 20 bp, Artificial Sequence
  MKO10001964_A_A4gnt
  gRNA
tgctgtaccagctcaccatg

SEQ ID NO: 1965 - DNA, 20 bp, Artificial Sequence
  MKO10001965_A_A530016L24Rik
  gRNA
tcgccctaatcttgcgcctg

SEQ ID NO: 1966 - DNA, 20 bp, Artificial Sequence
  MKO10001966_A_A530016L24Rik
  gRNA
ttggatggcatgtccgcggg

SEQ ID NO: 1967 - DNA, 20 bp, Artificial Sequence
  MKO10001967_A_A530016L24Rik
  gRNA
ctcgctctaattcccacccg

SEQ ID NO: 1968 - DNA, 20 bp, Artificial Sequence
  MKO10001968_A_A530032D15Rik
  gRNA
gtcccctaggacaatcccag

SEQ ID NO: 1969 - DNA, 20 bp, Artificial Sequence
  MKO10001969_A_A530032D15Rik
  gRNA
tctgctccgagatgaagtct

SEQ ID NO: 1970 - DNA, 20 bp, Artificial Sequence
  MKO10001970_A_A530032D15Rik
  gRNA
tcaagaaacatgtaagaacc

SEQ ID NO: 1971 - DNA, 20 bp, Artificial Sequence
  MKO10001971_A_A530054K11Rik
  gRNA
tctgagatggagttcggtgc

SEQ ID NO: 1972 - DNA, 20 bp, Artificial Sequence
  MKO10001972_A_A530054K11Rik
  gRNA
tgacataccccggagcatag

SEQ ID NO: 1973 - DNA, 20 bp, Artificial Sequence
  MKO10001973_A_A530054K11Rik
  gRNA
tcagacctgaaagaaggcgc

SEQ ID NO: 1974 - DNA, 20 bp, Artificial Sequence
  MKO10001974_A_A530064D06Rik
  gRNA
cttacaccagatcttctcgc

SEQ ID NO: 1975 - DNA, 20 bp, Artificial Sequence
  MKO10001975_A_A530064D06Rik
  gRNA
accactccagcgagaagatc

SEQ ID NO: 1976 - DNA, 20 bp, Artificial Sequence
  MKO10001976_A_A530064D06Rik
  gRNA
agcttagttagccttgtagc

SEQ ID NO: 1977 - DNA, 20 bp, Artificial Sequence
  MKO10001977_A_A530099J19Rik
  gRNA
atcacatccatggttgatcg

SEQ ID NO: 1978 - DNA, 20 bp, Artificial Sequence
  MKO10001978_A_A530099J19Rik
  gRNA
gttacaaaagttccatgccg

SEQ ID NO: 1979 - DNA, 20 bp, Artificial Sequence
  MKO10001979_A_A530099J19Rik
  gRNA
cttctagttgtgatcgatcc

SEQ ID NO: 1980 - DNA, 20 bp, Artificial Sequence
  MKO10001980_A_A630001G21Rik
  gRNA
ttatgaatctctcttaacgc

SEQ ID NO: 1981 - DNA, 20 bp, Artificial Sequence
  MKO10001981_A_A630001G21Rik
  gRNA
ctgaggactcttcccccccg

SEQ ID NO: 1982 - DNA, 20 bp, Artificial Sequence
  MKO10001982_A_A630001G21Rik
  gRNA
tgtcggactcatcgtttcta

SEQ ID NO: 1983 - DNA, 20 bp, Artificial Sequence
  MKO10001983_A_A630007B06Rik
  gRNA
gcagcaactctatgaatcga

SEQ ID NO: 1984 - DNA, 20 bp, Artificial Sequence
  MKO10001984_A_A630007B06Rik
  gRNA
ctgtgcgactagctgatctt

SEQ ID NO: 1985 - DNA, 20 bp, Artificial Sequence
  MKO10001985_A_A630007B06Rik
  gRNA
gaaatacctggtccatccgc

SEQ ID NO: 1986 - DNA, 20 bp, Artificial Sequence
  MKO10001986_A_A630023A22Rik
  gRNA
cagtgcggagcttcagaccg

SEQ ID NO: 1987 - DNA, 20 bp, Artificial Sequence
  MKO10001987_A_A630023A22Rik
  gRNA
agcctccgataccatggtcc

SEQ ID NO: 1988 - DNA, 20 bp, Artificial Sequence
  MKO10001988_A_A630023A22Rik
  gRNA
tggtaattcaggtcagcatc

SEQ ID NO: 1989 - DNA, 20 bp, Artificial Sequence
  MKO10001989_A_A630033H20Rik
  gRNA
gtactttggaaattcgtcag

SEQ ID NO: 1990 - DNA, 20 bp, Artificial Sequence
  MKO10001990_A_A630033H20Rik
  gRNA
gaatcgtgctttgctgattt

SEQ ID NO: 1991 - DNA, 20 bp, Artificial Sequence
  MKO10001991_A_A630033H20Rik
  gRNA
ccagtcatgtttgcattgta

SEQ ID NO: 1992 - DNA, 20 bp, Artificial Sequence
  MKO10001992_A_A630073D07Rik
  gRNA
gatcaccaacagggaatagt

SEQ ID NO: 1993 - DNA, 20 bp, Artificial Sequence
  MKO10001993_A_A630073D07Rik
  gRNA
gatcactcaaatcttcttgc

SEQ ID NO: 1994 - DNA, 20 bp, Artificial Sequence
  MKO10001994_A_A630073D07Rik
  gRNA
cctactcattgcagtcttgc

SEQ ID NO: 1995 - DNA, 20 bp, Artificial Sequence
  MKO10001995_A_A630076J17Rik
  gRNA
gcgccatctcgtggacaatg

SEQ ID NO: 1996 - DNA, 20 bp, Artificial Sequence
  MKO10001996_A_A630076J17Rik
  gRNA
cttccacattgtccacgaga

SEQ ID NO: 1997 - DNA, 20 bp, Artificial Sequence
  MKO10001997_A_A630076J17Rik
  gRNA
gctgagtgatactccgtgct

SEQ ID NO: 1998 - DNA, 20 bp, Artificial Sequence
  MKO10001998_A_A630095E13Rik
  gRNA
gctttacggctactctataa

SEQ ID NO: 1999 - DNA, 20 bp, Artificial Sequence
  MKO10001999_A_A630095E13Rik
  gRNA
tcagatggcaaattccaata

SEQ ID NO: 2000 - DNA, 20 bp, Artificial Sequence
  MKO10002000_A_A630095E13Rik
  gRNA
ttgcgggtgggctttctgca

SEQ ID NO: 2001 - DNA, 20 bp, Artificial Sequence
  MKO10002001_A_A630095N17Rik
  gRNA
aaacggctgcctcggtgtca

SEQ ID NO: 2002 - DNA, 20 bp, Artificial Sequence
  MKO10002002_A_A630095N17Rik
  gRNA
atggccgagaaccccacctt

SEQ ID NO: 2003 - DNA, 20 bp, Artificial Sequence
  MKO10002003_A_A630095N17Rik
  gRNA
catgtgaagccatgacaccg

SEQ ID NO: 2004 - DNA, 20 bp, Artificial Sequence
  MKO10002004_A_A730008H23Rik
  gRNA
gaagtcaccttcgcccgctg

SEQ ID NO: 2005 - DNA, 20 bp, Artificial Sequence
  MKO10002005_A_A730008H23Rik
  gRNA
taaaccgtgagcgagaaaat

SEQ ID NO: 2006 - DNA, 20 bp, Artificial Sequence
  MKO10002006_A_A730008H23Rik
  gRNA
cgtaccctggggcgtctcgt

SEQ ID NO: 2007 - DNA, 20 bp, Artificial Sequence
  MKO10002007_A_A730017C20Rik
  gRNA
ttccacccggaaatctcgcg

SEQ ID NO: 2008 - DNA, 20 bp, Artificial Sequence
  MKO10002008_A_A730017C20Rik
  gRNA
ttgggggatacgtacactcc

SEQ ID NO: 2009 - DNA, 20 bp, Artificial Sequence
  MKO10002009_A_A730017C20Rik
  gRNA
ggctagcctcgcgagatttc

SEQ ID NO: 2010 - DNA, 20 bp, Artificial Sequence
  MKO10002010_A_A830010M20Rik
  gRNA
ccatacgttagtgattcccc

SEQ ID NO: 2011 - DNA, 20 bp, Artificial Sequence
  MKO10002011_A_A830010M20Rik
  gRNA
taccttaggtcttgcccctg

SEQ ID NO: 2012 - DNA, 20 bp, Artificial Sequence
  MKO10002012_A_A830010M20Rik
  gRNA
tttatagctgcacttgacaa

SEQ ID NO: 2013 - DNA, 20 bp, Artificial Sequence
  MKO10002013_A_A830018L16Rik
  gRNA
tccgccagttccacttaaga

SEQ ID NO: 2014 - DNA, 20 bp, Artificial Sequence
  MKO10002014_A_A830018L16Rik
  gRNA
tgggcagaaagtgaatcatc

SEQ ID NO: 2015 - DNA, 20 bp, Artificial Sequence
  MKO10002015_A_A830018L16Rik
  gRNA
ggtcagtagaccatcttaag

SEQ ID NO: 2016 - DNA, 20 bp, Artificial Sequence
  MKO10002016_A_A830080D01Rik
  gRNA
cgatgatacgaattcacacg

SEQ ID NO: 2017 - DNA, 20 bp, Artificial Sequence
  MKO10002017_A_A830080D01Rik
  gRNA
ctcgtgtgaattcgtatcat

SEQ ID NO: 2018 - DNA, 20 bp, Artificial Sequence
  MKO10002018_A_A830080D01Rik
  gRNA
tggagccttgcaatgacaaa

SEQ ID NO: 2019 - DNA, 20 bp, Artificial Sequence
  MKO10002019_A_A930009A15Rik
  gRNA
tgatacatagggaccttgac

SEQ ID NO: 2020 - DNA, 20 bp, Artificial Sequence
  MKO10002020_A_A930009A15Rik
  gRNA
ctgccaagcaagtcgcacaa

SEQ ID NO: 2021 - DNA, 20 bp, Artificial Sequence
  MKO10002021_A_A930009A15Rik
  gRNA
ggaagatgtgacgtcactct

SEQ ID NO: 2022 - DNA, 20 bp, Artificial Sequence
  MKO10002022_A_A930018P22Rik
  gRNA
cgagatggcaacttcggccc

SEQ ID NO: 2023 - DNA, 20 bp, Artificial Sequence
  MKO10002023_A_A930018P22Rik
  gRNA
atgccccggtcgtagagcga

SEQ ID NO: 2024 - DNA, 20 bp, Artificial Sequence
  MKO10002024_A_A930018P22Rik
  gRNA
tttcatctttcagcgccttc

SEQ ID NO: 2025 - DNA, 20 bp, Artificial Sequence
  MKO10002025_A_AA414768
  gRNA
acccatcttcgccgccgata

SEQ ID NO: 2026 - DNA, 20 bp, Artificial Sequence
  MKO10002026_A_AA414768
  gRNA
tcagaaggcgaccatcgaag

SEQ ID NO: 2027 - DNA, 20 bp, Artificial Sequence
  MKO10002027_A_AA414768
  gRNA
cctagcgtccatcttcgacc

SEQ ID NO: 2028 - DNA, 20 bp, Artificial Sequence
  MKO10002028_A_AA415398
  gRNA
accacctctgtcaggacatt

SEQ ID NO: 2029 - DNA, 20 bp, Artificial Sequence
  MKO10002029_A_AA415398
  gRNA
tgatcctaatgtcctgacag

SEQ ID NO: 2030 - DNA, 20 bp, Artificial Sequence
  MKO10002030_A_AA415398
  gRNA
caactgctggacctccccac

SEQ ID NO: 2031 - DNA, 20 bp, Artificial Sequence
  MKO10002031_A_AA467197
  gRNA
tgcgttgaaaaaaaccgacg

SEQ ID NO: 2032 - DNA, 20 bp, Artificial Sequence
  MKO10002032_A_AA467197
  gRNA
tttataagcgtggccgccac

SEQ ID NO: 2033 - DNA, 20 bp, Artificial Sequence
  MKO10002033_A_AA467197
  gRNA
gcaatcatctggttgccctc

SEQ ID NO: 2034 - DNA, 20 bp, Artificial Sequence
  MKO10002034_A_AA792892
  gRNA
tccatctagcagagcttgca

SEQ ID NO: 2035 - DNA, 20 bp, Artificial Sequence
  MKO10002035_A_AA792892
  gRNA
agctttgatcaagtcctctc

SEQ ID NO: 2036 - DNA, 20 bp, Artificial Sequence
  MKO10002036_A_AA792892
  gRNA
tgaaaacaagaacaaagtat

SEQ ID NO: 2037 - DNA, 20 bp, Artificial Sequence
  MKO10002037_A_AA986860
  gRNA
ccagcgcctttcgtaattcc

SEQ ID NO: 2038 - DNA, 20 bp, Artificial Sequence
  MKO10002038_A_AA986860
  gRNA
ggtagggctcggaaactccg

SEQ ID NO: 2039 - DNA, 20 bp, Artificial Sequence
  MKO10002039_A_AA986860
  gRNA
ccggggccgggaattacgaa

SEQ ID NO: 2040 - DNA, 20 bp, Artificial Sequence
  MKO10002040_A_AA987161
  gRNA
tcacttctaagtcaattatc

SEQ ID NO: 2041 - DNA, 20 bp, Artificial Sequence
  MKO10002041_A_AA987161
  gRNA
ctaatagtaatgatgcaatg

SEQ ID NO: 2042 - DNA, 20 bp, Artificial Sequence
  MKO10002042_A_AA987161
  gRNA
ttatgacaatcttgtgttcc

SEQ ID NO: 2043 - DNA, 20 bp, Artificial Sequence
  MKO10002043_A_AB124611
  gRNA
ccacctctccccctcggaac

SEQ ID NO: 2044 - DNA, 20 bp, Artificial Sequence
  MKO10002044_A_AB124611
  gRNA
tacatctcgtgcacagcccc

SEQ ID NO: 2045 - DNA, 20 bp, Artificial Sequence
  MKO10002045_A_AB124611
  gRNA
cagatcaacttcaccaatac

SEQ ID NO: 2046 - DNA, 20 bp, Artificial Sequence
  MKO10002046_A_AF067061
  gRNA
ttgtagctttccacatctcc

SEQ ID NO: 2047 - DNA, 20 bp, Artificial Sequence
  MKO10002047_A_AF067061
  gRNA
tccagccatcctcagagcaa

SEQ ID NO: 2048 - DNA, 20 bp, Artificial Sequence
  MKO10002048_A_AF067061
  gRNA
acatgcagtgcccagtgcac

SEQ ID NO: 2049 - DNA, 20 bp, Artificial Sequence
  MKO10002049_A_AF067063
  gRNA
gtcccagctttcaagtacac

SEQ ID NO: 2050 - DNA, 20 bp, Artificial Sequence
  MKO10002050_A_AF067063
  gRNA
ttccctgtgtacttgaaagc

SEQ ID NO: 2051 - DNA, 20 bp, Artificial Sequence
  MKO10002051_A_AF067063
  gRNA
ccctgagaccacgatattcc

SEQ ID NO: 2052 - DNA, 20 bp, Artificial Sequence
  MKO10002052_A_AF251705
  gRNA
aacagcgcctgtgatagtgc

SEQ ID NO: 2053 - DNA, 20 bp, Artificial Sequence
  MKO10002053_A_AF251705
  gRNA
cagtgtgtcatgtcaatacg

SEQ ID NO: 2054 - DNA, 20 bp, Artificial Sequence
  MKO10002054_A_AF251705
  gRNA
acaggttcgagccttgagag

SEQ ID NO: 2055 - DNA, 20 bp, Artificial Sequence
  MKO10002055_A_AF366264
  gRNA
atgatctgagcccatgtttc

SEQ ID NO: 2056 - DNA, 20 bp, Artificial Sequence
  MKO10002056_A_AF366264
  gRNA
ggcccagaagaagacttctc

SEQ ID NO: 2057 - DNA, 20 bp, Artificial Sequence
  MKO10002057_A_AF366264
  gRNA
aagcccgaagcttcagcaat

SEQ ID NO: 2058 - DNA, 20 bp, Artificial Sequence
  MKO10002058_A_AF529169
  gRNA
gtcggaccggcaagactcaa

SEQ ID NO: 2059 - DNA, 20 bp, Artificial Sequence
  MKO10002059_A_AF529169
  gRNA
gtcaggccaagtacggtgac

SEQ ID NO: 2060 - DNA, 20 bp, Artificial Sequence
  MKO10002060_A_AF529169
  gRNA
gctcggaactccggtgacaa

SEQ ID NO: 2061 - DNA, 20 bp, Artificial Sequence
  MKO10002061_A_AI118078
  gRNA
actcttcgtccaaattcgac

SEQ ID NO: 2062 - DNA, 20 bp, Artificial Sequence
  MKO10002062_A_AI118078
  gRNA
agccaggggcaggtcccgat

SEQ ID NO: 2063 - DNA, 20 bp, Artificial Sequence
  MKO10002063_A_AI118078
  gRNA
tccccagtaccacgatccgt

SEQ ID NO: 2064 - DNA, 20 bp, Artificial Sequence
  MKO10002064_A_AI182371
  gRNA
gctccaactcggaagacaat

SEQ ID NO: 2065 - DNA, 20 bp, Artificial Sequence
  MKO10002065_A_AI182371
  gRNA
accccaattgtcttccgagt

SEQ ID NO: 2066 - DNA, 20 bp, Artificial Sequence
  MKO10002066_A_AI182371
  gRNA
caggccaaacagttatctga

SEQ ID NO: 2067 - DNA, 20 bp, Artificial Sequence
  MKO10002067_A_AI314180
  gRNA
atattatagatcagctcgaa

SEQ ID NO: 2068 - DNA, 20 bp, Artificial Sequence
  MKO10002068_A_AI314180
  gRNA
ccctacgcttcttactgcca

SEQ ID NO: 2069 - DNA, 20 bp, Artificial Sequence
  MKO10002069_A_AI314180
  gRNA
tgaaccaatagtgtttctac

SEQ ID NO: 2070 - DNA, 20 bp, Artificial Sequence
  MKO10002070_A_AI317395
  gRNA
aaagagaaccccgccaatca

SEQ ID NO: 2071 - DNA, 20 bp, Artificial Sequence
  MKO10002071_A_AI317395
  gRNA
cgctgcagttgccaccattg

SEQ ID NO: 2072 - DNA, 20 bp, Artificial Sequence
  MKO10002072_A_AI317395
  gRNA
cgtgccactgggttcttgtc

SEQ ID NO: 2073 - DNA, 20 bp, Artificial Sequence
  MKO10002073_A_AI413582
  gRNA
gacagtgcccaatgcccccc

SEQ ID NO: 2074 - DNA, 20 bp, Artificial Sequence
  MKO10002074_A_AI413582
  gRNA
gcccaccatagagtcgctgt

SEQ ID NO: 2075 - DNA, 20 bp, Artificial Sequence
  MKO10002075_A_AI413582
  gRNA
cctgacaggtggttcatggc

SEQ ID NO: 2076 - DNA, 20 bp, Artificial Sequence
  MKO10002076_A_AI429214
  gRNA
gagtagcacagacgtccgtc

SEQ ID NO: 2077 - DNA, 20 bp, Artificial Sequence
  MKO10002077_A_AI429214
  gRNA
gtacgatccctgatgaactg

SEQ ID NO: 2078 - DNA, 20 bp, Artificial Sequence
  MKO10002078_A_AI429214
  gRNA
ggaaaacacgagagcgactc

SEQ ID NO: 2079 - DNA, 20 bp, Artificial Sequence
  MKO10002079_A_AI462493
  gRNA
gcccgcaggagatgccggaa

SEQ ID NO: 2080 - DNA, 20 bp, Artificial Sequence
  MKO10002080_A_AI462493
  gRNA
ggtagccatcaccagttccg

SEQ ID NO: 2081 - DNA, 20 bp, Artificial Sequence
  MKO10002081_A_AI462493
  gRNA
ggtggctcgtaaagcacttg

SEQ ID NO: 2082 - DNA, 20 bp, Artificial Sequence
  MKO10002082_A_AI464131
  gRNA
cgcgttgccacctatcatat

SEQ ID NO: 2083 - DNA, 20 bp, Artificial Sequence
  MKO10002083_A_AI464131
  gRNA
tattcatctgacgccgcatt

SEQ ID NO: 2084 - DNA, 20 bp, Artificial Sequence
  MKO10002084_A_AI464131
  gRNA
gcctacccccgacatcgacc

SEQ ID NO: 2085 - DNA, 20 bp, Artificial Sequence
  MKO10002085_A_AI467606
  gRNA
agcgtgcccccaccctagtc

SEQ ID NO: 2086 - DNA, 20 bp, Artificial Sequence
  MKO10002086_A_AI467606
  gRNA
gagcgctctgaggattggta

SEQ ID NO: 2087 - DNA, 20 bp, Artificial Sequence
  MKO10002087_A_AI467606
  gRNA
gagggaaggccggaccagcg

SEQ ID NO: 2088 - DNA, 20 bp, Artificial Sequence
  MKO10002088_A_AI593442
  gRNA
ctttccacatccacaagcgt

SEQ ID NO: 2089 - DNA, 20 bp, Artificial Sequence
  MKO10002089_A_AI593442
  gRNA
tatgagcgagatcattgcag

SEQ ID NO: 2090 - DNA, 20 bp, Artificial Sequence
  MKO10002090_A_AI593442
  gRNA
tggtggcacttgcatcacgc

SEQ ID NO: 2091 - DNA, 20 bp, Artificial Sequence
  MKO10002091_A_AI597468
  gRNA
gtcacacgagacaacattcc

SEQ ID NO: 2092 - DNA, 20 bp, Artificial Sequence
  MKO10002092_A_AI597468
  gRNA
gtaaacaaagtgcccttatc

SEQ ID NO: 2093 - DNA, 20 bp, Artificial Sequence
  MKO10002093_A_AI597468
  gRNA
cttctgggggttcatcacta

SEQ ID NO: 2094 - DNA, 20 bp, Artificial Sequence
  MKO10002094_A_AI597479
  gRNA
gctggacgtaaaggtcggta

SEQ ID NO: 2095 - DNA, 20 bp, Artificial Sequence
  MKO10002095_A_AI597479
  gRNA
aggcccctcattgtgttcga

SEQ ID NO: 2096 - DNA, 20 bp, Artificial Sequence
  MKO10002096_A_AI597479
  gRNA
cggtcgcagctgtacggacg

SEQ ID NO: 2097 - DNA, 20 bp, Artificial Sequence
  MKO10002097_A_AI607873
  gRNA
aacaccatccaatagtctcc

SEQ ID NO: 2098 - DNA, 20 bp, Artificial Sequence
  MKO10002098_A_AI607873
  gRNA
ggaaaaggccttcccagtac

SEQ ID NO: 2099 - DNA, 20 bp, Artificial Sequence
  MKO10002099_A_AI607873
  gRNA
ggtgttggtggtgccataag

SEQ ID NO: 2100 - DNA, 20 bp, Artificial Sequence
  MKO10002100_A_AI661453
  gRNA
tcgtggccgggctttcagcg

SEQ ID NO: 2101 - DNA, 20 bp, Artificial Sequence
  MKO10002101_A_AI661453
  gRNA
tggggccccaatccgactcc

SEQ ID NO: 2102 - DNA, 20 bp, Artificial Sequence
  MKO10002102_A_AI661453
  gRNA
gagttgacccgtcgcatctc

SEQ ID NO: 2103 - DNA, 20 bp, Artificial Sequence
  MKO10002103_A_AI747448
  gRNA
ggaattagttctgcaccttc

SEQ ID NO: 2104 - DNA, 20 bp, Artificial Sequence
  MKO10002104_A_AI747448
  gRNA
attcatacccgtgatacctg

SEQ ID NO: 2105 - DNA, 20 bp, Artificial Sequence
  MKO10002105_A_AI747448
  gRNA
gggctcatctctgccctcga

SEQ ID NO: 2106 - DNA, 20 bp, Artificial Sequence
  MKO10002106_A_AI836003
  gRNA
acacgtcgtccgacagaacc

SEQ ID NO: 2107 - DNA, 20 bp, Artificial Sequence
  MKO10002107_A_AI836003
  gRNA
acgacgtgtgcgccaaccag

SEQ ID NO: 2108 - DNA, 20 bp, Artificial Sequence
  MKO10002108_A_AI836003
  gRNA
tggcatgtcgccgccgtcct

SEQ ID NO: 2109 - DNA, 20 bp, Artificial Sequence
  MKO10002109_A_AI837181
  gRNA
gttccgcgccaacccaactt

SEQ ID NO: 2110 - DNA, 20 bp, Artificial Sequence
  MKO10002110_A_AI837181
  gRNA
aacggagccgggcccgaagt

SEQ ID NO: 2111 - DNA, 20 bp, Artificial Sequence
  MKO10002111_A_AI837181
  gRNA
gcatctaccgagccaaccgc

SEQ ID NO: 2112 - DNA, 20 bp, Artificial Sequence
  MKO10002112_A_AI846148
  gRNA
cagtggacgggcgctgtgca

SEQ ID NO: 2113 - DNA, 20 bp, Artificial Sequence
  MKO10002113_A_AI846148
  gRNA
agcgcccgtccactgcctcc

SEQ ID NO: 2114 - DNA, 20 bp, Artificial Sequence
  MKO10002114_A_AI846148
  gRNA
gttacccctgtcatagagca

SEQ ID NO: 2115 - DNA, 20 bp, Artificial Sequence
  MKO10002115_A_AI848285
  gRNA
tgtcgccgctctactcgtgc

SEQ ID NO: 2116 - DNA, 20 bp, Artificial Sequence
  MKO10002116_A_AI848285
  gRNA
tacgtaacccggaggggccc

SEQ ID NO: 2117 - DNA, 20 bp, Artificial Sequence
  MKO10002117_A_AI848285
  gRNA
ccgcgggcccgtctccgtag

SEQ ID NO: 2118 - DNA, 20 bp, Artificial Sequence
  MKO10002118_A_AI987944
  gRNA
ttgaagagaagcccgatgaa

SEQ ID NO: 2119 - DNA, 20 bp, Artificial Sequence
  MKO10002119_A_AI987944
  gRNA
agccatgaaggtattcaaca

SEQ ID NO: 2120 - DNA, 20 bp, Artificial Sequence
  MKO10002120_A_AI987944
  gRNA
gttgaaaatgttcactatta

SEQ ID NO: 2121 - DNA, 20 bp, Artificial Sequence
  MKO10002121_A_AK010878
  gRNA
gcgagtacgtcggttgtgac

SEQ ID NO: 2122 - DNA, 20 bp, Artificial Sequence
  MKO10002122_A_AK010878
  gRNA
gcggctacgagtgtcctgtg

SEQ ID NO: 2123 - DNA, 20 bp, Artificial Sequence
  MKO10002123_A_AK010878
  gRNA
taacactattgttaagatgc

SEQ ID NO: 2124 - DNA, 20 bp, Artificial Sequence
  MKO10002124_A_AK129341
  gRNA
tcgagcacgtaaatatttca

SEQ ID NO: 2125 - DNA, 20 bp, Artificial Sequence
  MKO10002125_A_AK129341
  gRNA
actcaccgccaatttgttgc

SEQ ID NO: 2126 - DNA, 20 bp, Artificial Sequence
  MKO10002126_A_AK129341
  gRNA
gtgtctcctccagtttaagc

SEQ ID NO: 2127 - DNA, 20 bp, Artificial Sequence
  MKO10002127_A_AU015228
  gRNA
tgttatgcatcgcacctcgc

SEQ ID NO: 2128 - DNA, 20 bp, Artificial Sequence
  MKO10002128_A_AU015228
  gRNA
ccgaaaaacgcgctgactta

SEQ ID NO: 2129 - DNA, 20 bp, Artificial Sequence
  MKO10002129_A_AU015228
  gRNA
aaaagatgcccgcgtgcttt

SEQ ID NO: 2130 - DNA, 20 bp, Artificial Sequence
  MKO10002130_A_AU018091
  gRNA
gccgccggcgaaccaacttc

SEQ ID NO: 2131 - DNA, 20 bp, Artificial Sequence
  MKO10002131_A_AU018091
  gRNA
ttcgactgtattgcgagtac

SEQ ID NO: 2132 - DNA, 20 bp, Artificial Sequence
  MKO10002132_A_AU018091
  gRNA
agaccaagcgcaaaaaagtc

SEQ ID NO: 2133 - DNA, 20 bp, Artificial Sequence
  MKO10002133_A_AU018829
  gRNA
accatctagcagagcttgca

SEQ ID NO: 2134 - DNA, 20 bp, Artificial Sequence
  MKO10002134_A_AU018829
  gRNA
ccacactccagaagcgagca

SEQ ID NO: 2135 - DNA, 20 bp, Artificial Sequence
  MKO10002135_A_AU018829
  gRNA
cttaccctaggatctgatgc

SEQ ID NO: 2136 - DNA, 20 bp, Artificial Sequence
  MKO10002136_A_AU019823
  gRNA
atgaatccaatataccagac

SEQ ID NO: 2137 - DNA, 20 bp, Artificial Sequence
  MKO10002137_A_AU019823
  gRNA
ggaaggtggctaccgacgcc

SEQ ID NO: 2138 - DNA, 20 bp, Artificial Sequence
  MKO10002138_A_AU019823
  gRNA
cacaaacctgtctggtatat

SEQ ID NO: 2139 - DNA, 20 bp, Artificial Sequence
  MKO10002139_A_AU021092
  gRNA
ctgttcctagtagttgcacc

SEQ ID NO: 2140 - DNA, 20 bp, Artificial Sequence
  MKO10002140_A_AU021092
  gRNA
gcccttacctcttaggtacg

SEQ ID NO: 2141 - DNA, 20 bp, Artificial Sequence
  MKO10002141_A_AU021092
  gRNA
agtgaccccacgtacctaag

SEQ ID NO: 2142 - DNA, 20 bp, Artificial Sequence
  MKO10002142_A_AU022252
  gRNA
cgagcgccacgaggtctaag

SEQ ID NO: 2143 - DNA, 20 bp, Artificial Sequence
  MKO10002143_A_AU022252
  gRNA
cggggaccccttagacctcg

SEQ ID NO: 2144 - DNA, 20 bp, Artificial Sequence
  MKO10002144_A_AU022252
  gRNA
agctgcaacatgacatgtcg

SEQ ID NO: 2145 - DNA, 20 bp, Artificial Sequence
  MKO10002145_A_AU022751
  gRNA
gcactgctcctacgaccgaa

SEQ ID NO: 2146 - DNA, 20 bp, Artificial Sequence
  MKO10002146_A_AU022751
  gRNA
gcttcggggcgaacctcttc

SEQ ID NO: 2147 - DNA, 20 bp, Artificial Sequence
  MKO10002147_A_AU022751
  gRNA
gacgcaggccgccgccattt

SEQ ID NO: 2148 - DNA, 20 bp, Artificial Sequence
  MKO10002148_A_AU040320
  gRNA
cgcaaaaccattacagttgc

SEQ ID NO: 2149 - DNA, 20 bp, Artificial Sequence
  MKO10002149_A_AU040320
  gRNA
gccgatccctgagtaagctc

SEQ ID NO: 2150 - DNA, 20 bp, Artificial Sequence
  MKO10002150_A_AU040320
  gRNA
cttccagccaccatagagcg

SEQ ID NO: 2151 - DNA, 20 bp, Artificial Sequence
  MKO10002151_A_AU041133
  gRNA
aagactaaagcgacgtgtaa

SEQ ID NO: 2152 - DNA, 20 bp, Artificial Sequence
  MKO10002152_A_AU041133
  gRNA
cgctcaccatggcgcggatt

SEQ ID NO: 2153 - DNA, 20 bp, Artificial Sequence
  MKO10002153_A_AU041133
  gRNA
tacacgtcgctttagtcttc

SEQ ID NO: 2154 - DNA, 20 bp, Artificial Sequence
  MKO10002154_A_AV320801
  gRNA
ttgccctgaactcagctact

SEQ ID NO: 2155 - DNA, 20 bp, Artificial Sequence
  MKO10002155_A_AV320801
  gRNA
cttacctagtagctgagttc

SEQ ID NO: 2156 - DNA, 20 bp, Artificial Sequence
  MKO10002156_A_AV320801
  gRNA
cctacaggagccctaaactg

SEQ ID NO: 2157 - DNA, 20 bp, Artificial Sequence
  MKO10002157_A_AW146154
  gRNA
tgaatgcgatgatgtctttg

SEQ ID NO: 2158 - DNA, 20 bp, Artificial Sequence
  MKO10002158_A_AW146154
  gRNA
tagtgaactaccttgtgaaa

SEQ ID NO: 2159 - DNA, 20 bp, Artificial Sequence
  MKO10002159_A_AW146154
  gRNA
tttcaacgttctagaagata

SEQ ID NO: 2160 - DNA, 20 bp, Artificial Sequence
  MKO10002160_A_AW209491
  gRNA
cgcttcagcctttcgaccga

SEQ ID NO: 2161 - DNA, 20 bp, Artificial Sequence
  MKO10002161_A_AW209491
  gRNA
gcattagtgcgcactatcat

SEQ ID NO: 2162 - DNA, 20 bp, Artificial Sequence
  MKO10002162_A_AW209491
  gRNA
ggagcgggttctacctcaac

SEQ ID NO: 2163 - DNA, 20 bp, Artificial Sequence
  MKO10002163_A_AW549877
  gRNA
aatgacaatacatgtacagc

SEQ ID NO: 2164 - DNA, 20 bp, Artificial Sequence
  MKO10002164_A_AW549877
  gRNA
tttcagctgtgcggtttgct

SEQ ID NO: 2165 - DNA, 20 bp, Artificial Sequence
  MKO10002165_A_AW549877
  gRNA
cctcaaaatatgtcatgtcc

SEQ ID NO: 2166 - DNA, 20 bp, Artificial Sequence
  MKO10002166_A_AW551984
  gRNA
gcacagtccgagcgtagctg

SEQ ID NO: 2167 - DNA, 20 bp, Artificial Sequence
  MKO10002167_A_AW551984
  gRNA
tggctgggagcacataacgc

SEQ ID NO: 2168 - DNA, 20 bp, Artificial Sequence
  MKO10002168_A_AW551984
  gRNA
gcaccttcctatagaaaatc

SEQ ID NO: 2169 - DNA, 20 bp, Artificial Sequence
  MKO10002169_A_AW554918
  gRNA
ctggaacgtaagccaccgac

SEQ ID NO: 2170 - DNA, 20 bp, Artificial Sequence
  MKO10002170_A_AW554918
  gRNA
tggagattcagtagccgaac

SEQ ID NO: 2171 - DNA, 20 bp, Artificial Sequence
  MKO10002171_A_AW554918
  gRNA
ggccagttctttaattaagt

SEQ ID NO: 2172 - DNA, 20 bp, Artificial Sequence
  MKO10002172_A_AY074887
  gRNA
ggagggaagcgtctataccg

SEQ ID NO: 2173 - DNA, 20 bp, Artificial Sequence
  MKO10002173_A_AY074887
  gRNA
ctcgcagtcctgcgcacgcg

SEQ ID NO: 2174 - DNA, 20 bp, Artificial Sequence
  MKO10002174_A_AY074887
  gRNA
ttggctgcggtctgtattag

SEQ ID NO: 2175 - DNA, 20 bp, Artificial Sequence
  MKO10002175_A_AY358078
  gRNA
gatattcattcagtgccttt

SEQ ID NO: 2176 - DNA, 20 bp, Artificial Sequence
  MKO10002176_A_AY358078
  gRNA
agttgttgtaaccaaaacac

SEQ ID NO: 2177 - DNA, 20 bp, Artificial Sequence
  MKO10002177_A_AY358078
  gRNA
ggaagaactttgtcgaatct

SEQ ID NO: 2178 - DNA, 20 bp, Artificial Sequence
  MKO10002178_A_AY761184
  gRNA
acagatgaagagactaaaac

SEQ ID NO: 2179 - DNA, 20 bp, Artificial Sequence
  MKO10002179_A_AY761184
  gRNA
agctgccattgtgcaaagaa

SEQ ID NO: 2180 - DNA, 20 bp, Artificial Sequence
  MKO10002180_A_AY761184
  gRNA
ttcgggcactgggggcatgt

SEQ ID NO: 2181 - DNA, 20 bp, Artificial Sequence
  MKO10002181_A_AY761185
  gRNA
tttgtcatgcaattgcacct

SEQ ID NO: 2182 - DNA, 20 bp, Artificial Sequence
  MKO10002182_A_AY761185
  gRNA
acttgaagaacatagcgttc

SEQ ID NO: 2183 - DNA, 20 bp, Artificial Sequence
  MKO10002183_A_AY761185
  gRNA
cgctatgttcttcaagtttc

SEQ ID NO: 2184 - DNA, 20 bp, Artificial Sequence
  MKO10002184_A_Aaas
  gRNA
ctgaattcgcaatttcattc

SEQ ID NO: 2185 - DNA, 20 bp, Artificial Sequence
  MKO10002185_A_Aaas
  gRNA
gaatgaaattgcgaattcag

SEQ ID NO: 2186 - DNA, 20 bp, Artificial Sequence
  MKO10002186_A_Aaas
  gRNA
gcactcaccagttagttact

SEQ ID NO: 2187 - DNA, 20 bp, Artificial Sequence
  MKO10002187_A_Aacs
  gRNA
cgacagagtcgccctttacg

SEQ ID NO: 2188 - DNA, 20 bp, Artificial Sequence
  MKO10002188_A_Aacs
  gRNA
tccggtcgtatatggacttt

SEQ ID NO: 2189 - DNA, 20 bp, Artificial Sequence
  MKO10002189_A_Aacs
  gRNA
gggactcacgggccacgtaa

SEQ ID NO: 2190 - DNA, 20 bp, Artificial Sequence
  MKO10002190_A_Aadacl2
  gRNA
tcgccacttcacttagatct

SEQ ID NO: 2191 - DNA, 20 bp, Artificial Sequence
  MKO10002191_A_Aadacl2
  gRNA
tcatatatgataaggctccg

SEQ ID NO: 2192 - DNA, 20 bp, Artificial Sequence
  MKO10002192_A_Aadacl2
  gRNA
cctacccgaattgctgtgtc

SEQ ID NO: 2193 - DNA, 20 bp, Artificial Sequence
  MKO10002193_A_Aadacl3
  gRNA
tccataattctcgaggcgca

SEQ ID NO: 2194 - DNA, 20 bp, Artificial Sequence
  MKO10002194_A_Aadacl3
  gRNA
cccttgcgcctcgagaatta

SEQ ID NO: 2195 - DNA, 20 bp, Artificial Sequence
  MKO10002195_A_Aadacl3
  gRNA
gggtggtcggcaaacacttc

SEQ ID NO: 2196 - DNA, 20 bp, Artificial Sequence
  MKO10002196_A_Aadac
  gRNA
atgtgtatcgtagtttacga

SEQ ID NO: 2197 - DNA, 20 bp, Artificial Sequence
  MKO10002197_A_Aadac
  gRNA
ccatctcgatagagtgtcat

SEQ ID NO: 2198 - DNA, 20 bp, Artificial Sequence
  MKO10002198_A_Aadac
  gRNA
gaatactttactacagaccg

SEQ ID NO: 2199 - DNA, 20 bp, Artificial Sequence
  MKO10002199_A_Aadat
  gRNA
acccatagcttggagagtat

SEQ ID NO: 2200 - DNA, 20 bp, Artificial Sequence
  MKO10002200_A_Aadat
  gRNA
ttaataatgttgcagcctag

SEQ ID NO: 2201 - DNA, 20 bp, Artificial Sequence
  MKO10002201_A_Aadat
  gRNA
gtcaactacccacccaatca

SEQ ID NO: 2202 - DNA, 20 bp, Artificial Sequence
  MKO10002202_A_Aaed1
  gRNA
acttactcggaggacgctct

SEQ ID NO: 2203 - DNA, 20 bp, Artificial Sequence
  MKO10002203_A_Aaed1
  gRNA
ggccagtgactgcccgccac

SEQ ID NO: 2204 - DNA, 20 bp, Artificial Sequence
  MKO10002204_A_Aaed1
  gRNA
atgattgtccaatcactatg

SEQ ID NO: 2205 - DNA, 20 bp, Artificial Sequence
  MKO10002205_A_Aagab
  gRNA
gtcttgacagcgtctcctcg

SEQ ID NO: 2206 - DNA, 20 bp, Artificial Sequence
  MKO10002206_A_Aagab
  gRNA
ggaatagtacttgttatcga

SEQ ID NO: 2207 - DNA, 20 bp, Artificial Sequence
  MKO10002207_A_Aagab
  gRNA
acttgcttggcaccacgcac

SEQ ID NO: 2208 - DNA, 20 bp, Artificial Sequence
  MKO10002208_A_Aak1
  gRNA
atcggaagggtcttcggcat

SEQ ID NO: 2209 - DNA, 20 bp, Artificial Sequence
  MKO10002209_A_Aak1
  gRNA
ggttcatcaggtttaccacc

SEQ ID NO: 2210 - DNA, 20 bp, Artificial Sequence
  MKO10002210_A_Aak1
  gRNA
ttccgccaacacctcgtcca

SEQ ID NO: 2211 - DNA, 20 bp, Artificial Sequence
  MKO10002211_A_Aamdc
  gRNA
tcaggtgcctccgtcgactg

SEQ ID NO: 2212 - DNA, 20 bp, Artificial Sequence
  MKO10002212_A_Aamdc
  gRNA
aggctctaccttaacctata

SEQ ID NO: 2213 - DNA, 20 bp, Artificial Sequence
  MKO10002213_A_Aamdc
  gRNA
gcaacttcctttacatctgc

SEQ ID NO: 2214 - DNA, 20 bp, Artificial Sequence
  MKO10002214_A_Aamp
  gRNA
tcgccgcatggagtccgaat

SEQ ID NO: 2215 - DNA, 20 bp, Artificial Sequence
  MKO10002215_A_Aamp
  gRNA
ggccgctccgctctccgatt

SEQ ID NO: 2216 - DNA, 20 bp, Artificial Sequence
  MKO10002216_A_Aamp
  gRNA
cctacctgagtgcaatgcaa

SEQ ID NO: 2217 - DNA, 20 bp, Artificial Sequence
  MKO10002217_A_Aanat
  gRNA
gatgccacgccttcctgcgc

SEQ ID NO: 2218 - DNA, 20 bp, Artificial Sequence
  MKO10002218_A_Aanat
  gRNA
ccgctcaatctcaaacgcac

SEQ ID NO: 2219 - DNA, 20 bp, Artificial Sequence
  MKO10002219_A_Aanat
  gRNA
tgtgcaccgccagtacgtgc

SEQ ID NO: 2220 - DNA, 20 bp, Artificial Sequence
  MKO10002220_A_Aar2
  gRNA
ttaggccgtctcgatgccct

SEQ ID NO: 2221 - DNA, 20 bp, Artificial Sequence
  MKO10002221_A_Aar2
  gRNA
catgttcagaatgaccaccg

SEQ ID NO: 2222 - DNA, 20 bp, Artificial Sequence
  MKO10002222_A_Aar2
  gRNA
tggcagattcagaccgacac

SEQ ID NO: 2223 - DNA, 20 bp, Artificial Sequence
  MKO10002223_A_Aard
  gRNA
gacgcgcatggagtgcgccc

SEQ ID NO: 2224 - DNA, 20 bp, Artificial Sequence
  MKO10002224_A_Aard
  gRNA
gggcgcactccatgcgcgtc

SEQ ID NO: 2225 - DNA, 20 bp, Artificial Sequence
  MKO10002225_A_Aard
  gRNA
aaggagatgaattccgagtg

SEQ ID NO: 2226 - DNA, 20 bp, Artificial Sequence
  MKO10002226_A_Aars2
  gRNA
tggtgtatggcgtcgagcag

SEQ ID NO: 2227 - DNA, 20 bp, Artificial Sequence
  MKO10002227_A_Aars2
  gRNA
tggaggacgccataacgacc

SEQ ID NO: 2228 - DNA, 20 bp, Artificial Sequence
  MKO10002228_A_Aars2
  gRNA
agagaagaggtcggtgtcgt

SEQ ID NO: 2229 - DNA, 20 bp, Artificial Sequence
  MKO10002229_A_Aarsd1
  gRNA
tagtcccgccgagctgcaga

SEQ ID NO: 2230 - DNA, 20 bp, Artificial Sequence
  MKO10002230_A_Aarsd1
  gRNA
actccgtgaagtgatcggcc

SEQ ID NO: 2231 - DNA, 20 bp, Artificial Sequence
  MKO10002231_A_Aarsd1
  gRNA
tcgggctgaagacaacgtca

SEQ ID NO: 2232 - DNA, 20 bp, Artificial Sequence
  MKO10002232_A_Aars
  gRNA
gagatccactatgaccgcat

SEQ ID NO: 2233 - DNA, 20 bp, Artificial Sequence
  MKO10002233_A_Aars
  gRNA
tgccaccaatgcggtcatag

SEQ ID NO: 2234 - DNA, 20 bp, Artificial Sequence
  MKO10002234_A_Aars
  gRNA
ggccggcctagagccagatc

SEQ ID NO: 2235 - DNA, 20 bp, Artificial Sequence
  MKO10002235_A_Aasdhppt
  gRNA
aacgagtctttcgcaagaac

SEQ ID NO: 2236 - DNA, 20 bp, Artificial Sequence
  MKO10002236_A_Aasdhppt
  gRNA
aggctggtcgtttgatgata

SEQ ID NO: 2237 - DNA, 20 bp, Artificial Sequence
  MKO10002237_A_Aasdhppt
  gRNA
gaaagcttcataaaagccat

SEQ ID NO: 2238 - DNA, 20 bp, Artificial Sequence
  MKO10002238_A_Aasdh
  gRNA
tcagagacgtatgcgctgac

SEQ ID NO: 2239 - DNA, 20 bp, Artificial Sequence
  MKO10002239_A_Aasdh
  gRNA
gacaatcttcggtgtccccg

SEQ ID NO: 2240 - DNA, 20 bp, Artificial Sequence
  MKO10002240_A_Aasdh
  gRNA
gaccttcgatccatctgttg

SEQ ID NO: 2241 - DNA, 20 bp, Artificial Sequence
  MKO10002241_A_Aass
  gRNA
tttcggacagtgggcgggtg

SEQ ID NO: 2242 - DNA, 20 bp, Artificial Sequence
  MKO10002242_A_Aass
  gRNA
aaagaaggcgtacgtcttct

SEQ ID NO: 2243 - DNA, 20 bp, Artificial Sequence
  MKO10002243_A_Aass
  gRNA
tcacagagggtctcggatag

SEQ ID NO: 2244 - DNA, 20 bp, Artificial Sequence
  MKO10002244_A_Aatf
  gRNA
ccctcttggacaccgacaaa

SEQ ID NO: 2245 - DNA, 20 bp, Artificial Sequence
  MKO10002245_A_Aatf
  gRNA
agataacgaagcatctgatg

SEQ ID NO: 2246 - DNA, 20 bp, Artificial Sequence
  MKO10002246_A_Aatf
  gRNA
ctagagccagagtgattgac

SEQ ID NO: 2247 - DNA, 20 bp, Artificial Sequence
  MKO10002247_A_Aatk
  gRNA
cgagtatgtggccgacttct

SEQ ID NO: 2248 - DNA, 20 bp, Artificial Sequence
  MKO10002248_A_Aatk
  gRNA
caccactcaccggagcgacc

SEQ ID NO: 2249 - DNA, 20 bp, Artificial Sequence
  MKO10002249_A_Aatk
  gRNA
gcacagcctcctgtacttaa

SEQ ID NO: 2250 - DNA, 20 bp, Artificial Sequence
  MKO10002250_A_Abat
  gRNA
ccgtcgggtaatcaacaaga

SEQ ID NO: 2251 - DNA, 20 bp, Artificial Sequence
  MKO10002251_A_Abat
  gRNA
ccttcttgttgattacccga

SEQ ID NO: 2252 - DNA, 20 bp, Artificial Sequence
  MKO10002252_A_Abat
  gRNA
aactacctagtggacgtgga

SEQ ID NO: 2253 - DNA, 20 bp, Artificial Sequence
  MKO10002253_A_Abca12
  gRNA
ttcctgcggagcagatctcg

SEQ ID NO: 2254 - DNA, 20 bp, Artificial Sequence
  MKO10002254_A_Abca12
  gRNA
aaatgtaaagacacgcccta

SEQ ID NO: 2255 - DNA, 20 bp, Artificial Sequence
  MKO10002255_A_Abca12
  gRNA
aaaagccgtccaacccgaag

SEQ ID NO: 2256 - DNA, 20 bp, Artificial Sequence
  MKO10002256_A_Abca13
  gRNA
atcctgaatctcgtttaaaa

SEQ ID NO: 2257 - DNA, 20 bp, Artificial Sequence
  MKO10002257_A_Abca13
  gRNA
gaccaggttacttgcaagcc

SEQ ID NO: 2258 - DNA, 20 bp, Artificial Sequence
  MKO10002258_A_Abca13
  gRNA
ataccgaaaatgatgatcca

SEQ ID NO: 2259 - DNA, 20 bp, Artificial Sequence
  MKO10002259_A_Abca14
  gRNA
aagtggcaagcgttcattgc

SEQ ID NO: 2260 - DNA, 20 bp, Artificial Sequence
  MKO10002260_A_Abca14
  gRNA
gaatctctccgcataaattg

SEQ ID NO: 2261 - DNA, 20 bp, Artificial Sequence
  MKO10002261_A_Abca14
  gRNA
tttgttgcagagccggaatg

SEQ ID NO: 2262 - DNA, 20 bp, Artificial Sequence
  MKO10002262_A_Abca15
  gRNA
catattatcaaggggacacc

SEQ ID NO: 2263 - DNA, 20 bp, Artificial Sequence
  MKO10002263_A_Abca15
  gRNA
tgtgcaacatgccctagaca

SEQ ID NO: 2264 - DNA, 20 bp, Artificial Sequence
  MKO10002264_A_Abca15
  gRNA
ctagggcatgttgcacagcc

SEQ ID NO: 2265 - DNA, 20 bp, Artificial Sequence
  MKO10002265_A_Abca16
  gRNA
atcatccttctatacgaccc

SEQ ID NO: 2266 - DNA, 20 bp, Artificial Sequence
  MKO10002266_A_Abca16
  gRNA
ggtcgtatagaaggatgatt

SEQ ID NO: 2267 - DNA, 20 bp, Artificial Sequence
  MKO10002267_A_Abca16
  gRNA
ttctaagccccattatgagc

SEQ ID NO: 2268 - DNA, 20 bp, Artificial Sequence
  MKO10002268_A_Abca17
  gRNA
ccgtagacaaagcgattatg

SEQ ID NO: 2269 - DNA, 20 bp, Artificial Sequence
  MKO10002269_A_Abca17
  gRNA
ctaatctaagccaagcgccc

SEQ ID NO: 2270 - DNA, 20 bp, Artificial Sequence
  MKO10002270_A_Abca17
  gRNA
catccgcatatgaaaattcc

SEQ ID NO: 2271 - DNA, 20 bp, Artificial Sequence
  MKO10002271_A_Abca1
  gRNA
cctcgccgggagttggataa

SEQ ID NO: 2272 - DNA, 20 bp, Artificial Sequence
  MKO10002272_A_Abca1
  gRNA
ctcacactcatgttgttcgt

SEQ ID NO: 2273 - DNA, 20 bp, Artificial Sequence
  MKO10002273_A_Abca1
  gRNA
tgatctgccgtaacattctc

SEQ ID NO: 2274 - DNA, 20 bp, Artificial Sequence
  MKO10002274_A_Abca2
  gRNA
aaagcgactgcatgacgggc

SEQ ID NO: 2275 - DNA, 20 bp, Artificial Sequence
  MKO10002275_A_Abca2
  gRNA
acgcctccaccgtgtagtgg

SEQ ID NO: 2276 - DNA, 20 bp, Artificial Sequence
  MKO10002276_A_Abca2
  gRNA
cgaggctctgcgccaacgtc

SEQ ID NO: 2277 - DNA, 20 bp, Artificial Sequence
  MKO10002277_A_Abca3
  gRNA
tgatgaaggttcccgcggtc

SEQ ID NO: 2278 - DNA, 20 bp, Artificial Sequence
  MKO10002278_A_Abca3
  gRNA
ttcgtgtgtaactgaagcgc

SEQ ID NO: 2279 - DNA, 20 bp, Artificial Sequence
  MKO10002279_A_Abca3
  gRNA
cattgggcacattctccgac

SEQ ID NO: 2280 - DNA, 20 bp, Artificial Sequence
  MKO10002280_A_Abca4
  gRNA
ccgcaccttgtcgcagttca

SEQ ID NO: 2281 - DNA, 20 bp, Artificial Sequence
  MKO10002281_A_Abca4
  gRNA
cttcagcaggactgttaccg

SEQ ID NO: 2282 - DNA, 20 bp, Artificial Sequence
  MKO10002282_A_Abca4
  gRNA
ctacctgctccacacgaact

SEQ ID NO: 2283 - DNA, 20 bp, Artificial Sequence
  MKO10002283_A_Abca5
  gRNA
agtgtatccaagaataacgt

SEQ ID NO: 2284 - DNA, 20 bp, Artificial Sequence
  MKO10002284_A_Abca5
  gRNA
gtcgaccaaagctgtgatca

SEQ ID NO: 2285 - DNA, 20 bp, Artificial Sequence
  MKO10002285_A_Abca5
  gRNA
aaccacacctacgaagttgc

SEQ ID NO: 2286 - DNA, 20 bp, Artificial Sequence
  MKO10002286_A_Abca6
  gRNA
ttacaaaccgccattaacgc

SEQ ID NO: 2287 - DNA, 20 bp, Artificial Sequence
  MKO10002287_A_Abca6
  gRNA
tcgtaatccgaaagatctct

SEQ ID NO: 2288 - DNA, 20 bp, Artificial Sequence
  MKO10002288_A_Abca6
  gRNA
aagatgactcctaaagcgtc

SEQ ID NO: 2289 - DNA, 20 bp, Artificial Sequence
  MKO10002289_A_Abca7
  gRNA
gctgatacccgcacagtgct

SEQ ID NO: 2290 - DNA, 20 bp, Artificial Sequence
  MKO10002290_A_Abca7
  gRNA
cagggcaccgtgcccgccga

SEQ ID NO: 2291 - DNA, 20 bp, Artificial Sequence
  MKO10002291_A_Abca7
  gRNA
ggaaactgatccccgtgctc

SEQ ID NO: 2292 - DNA, 20 bp, Artificial Sequence
  MKO10002292_A_Abca8a
  gRNA
atcaagatagattctttcgt

SEQ ID NO: 2293 - DNA, 20 bp, Artificial Sequence
  MKO10002293_A_Abca8a
  gRNA
ttctatgatggcagcgttaa

SEQ ID NO: 2294 - DNA, 20 bp, Artificial Sequence
  MKO10002294_A_Abca8a
  gRNA
taaatgaatcaatgcgtccc

SEQ ID NO: 2295 - DNA, 20 bp, Artificial Sequence
  MKO10002295_A_Abca8b
  gRNA
atcagagaatcccaacgtcg

SEQ ID NO: 2296 - DNA, 20 bp, Artificial Sequence
  MKO10002296_A_Abca8b
  gRNA
tctctgagttccctcgacgt

SEQ ID NO: 2297 - DNA, 20 bp, Artificial Sequence
  MKO10002297_A_Abca8b
  gRNA
atcgactcgtcccagatcct

SEQ ID NO: 2298 - DNA, 20 bp, Artificial Sequence
  MKO10002298_A_Abca9
  gRNA
gatcacaaaccactccgtga

SEQ ID NO: 2299 - DNA, 20 bp, Artificial Sequence
  MKO10002299_A_Abca9
  gRNA
gatgatggggcttcgagagt

SEQ ID NO: 2300 - DNA, 20 bp, Artificial Sequence
  MKO10002300_A_Abca9
  gRNA
taacgattctaattatatga

SEQ ID NO: 2301 - DNA, 20 bp, Artificial Sequence
  MKO10002301_A_Abcb10
  gRNA
ggttaattaattcgcctgtg

SEQ ID NO: 2302 - DNA, 20 bp, Artificial Sequence
  MKO10002302_A_Abcb10
  gRNA
ctatcgccatagccctcgct

SEQ ID NO: 2303 - DNA, 20 bp, Artificial Sequence
  MKO10002303_A_Abcb10
  gRNA
ccccaggagtgcggtatccg

SEQ ID NO: 2304 - DNA, 20 bp, Artificial Sequence
  MKO10002304_A_Abcb11
  gRNA
tcgagttggcttctttgaac

SEQ ID NO: 2305 - DNA, 20 bp, Artificial Sequence
  MKO10002305_A_Abcb11
  gRNA
ttgttccgtttgtcatgttc

SEQ ID NO: 2306 - DNA, 20 bp, Artificial Sequence
  MKO10002306_A_Abcb11
  gRNA
catctacgcaggagttggtg

SEQ ID NO: 2307 - DNA, 20 bp, Artificial Sequence
  MKO10002307_A_Abcb1a
  gRNA
gctggacaggttgtacatgc

SEQ ID NO: 2308 - DNA, 20 bp, Artificial Sequence
  MKO10002308_A_Abcb1a
  gRNA
tctttgcagtttcgttatgc

SEQ ID NO: 2309 - DNA, 20 bp, Artificial Sequence
  MKO10002309_A_Abcb1a
  gRNA
tggtttgatgtgcatgacgt

SEQ ID NO: 2310 - DNA, 20 bp, Artificial Sequence
  MKO10002310_A_Abcb1b
  gRNA
atcccaaatacgccaacagc

SEQ ID NO: 2311 - DNA, 20 bp, Artificial Sequence
  MKO10002311_A_Abcb1b
  gRNA
tctagtttcgctatgcagat

SEQ ID NO: 2312 - DNA, 20 bp, Artificial Sequence
  MKO10002312_A_Abcb1b
  gRNA
tctcctgattcattatagca

SEQ ID NO: 2313 - DNA, 20 bp, Artificial Sequence
  MKO10002313_A_Abcb4
  gRNA
tgccatcctccgacaagaaa

SEQ ID NO: 2314 - DNA, 20 bp, Artificial Sequence
  MKO10002314_A_Abcb4
  gRNA
ttcagttccgatactctgac

SEQ ID NO: 2315 - DNA, 20 bp, Artificial Sequence
  MKO10002315_A_Abcb4
  gRNA
cagatatgcatactactatt

SEQ ID NO: 2316 - DNA, 20 bp, Artificial Sequence
  MKO10002316_A_Abcb5
  gRNA
gaacttaacacccgcatgac

SEQ ID NO: 2317 - DNA, 20 bp, Artificial Sequence
  MKO10002317_A_Abcb5
  gRNA
gttccgctttgctgataatc

SEQ ID NO: 2318 - DNA, 20 bp, Artificial Sequence
  MKO10002318_A_Abcb5
  gRNA
caccgttcctttaatgtccc

SEQ ID NO: 2319 - DNA, 20 bp, Artificial Sequence
  MKO10002319_A_Abcb6
  gRNA
gtgcagcagtttacgtcccg

SEQ ID NO: 2320 - DNA, 20 bp, Artificial Sequence
  MKO10002320_A_Abcb6
  gRNA
cctgggccggcgtaccgggg

SEQ ID NO: 2321 - DNA, 20 bp, Artificial Sequence
  MKO10002321_A_Abcb6
  gRNA
caacagaccgacgatccacc

SEQ ID NO: 2322 - DNA, 20 bp, Artificial Sequence
  MKO10002322_A_Abcb7
  gRNA
tcagcatgtttcccgacatc

SEQ ID NO: 2323 - DNA, 20 bp, Artificial Sequence
  MKO10002323_A_Abcb7
  gRNA
gcaactctggctcgtagatc

SEQ ID NO: 2324 - DNA, 20 bp, Artificial Sequence
  MKO10002324_A_Abcb7
  gRNA
ttgcaccacccaaaaatccc

SEQ ID NO: 2325 - DNA, 20 bp, Artificial Sequence
  MKO10002325_A_Abcb8
  gRNA
atacctgaacaccgtacagt

SEQ ID NO: 2326 - DNA, 20 bp, Artificial Sequence
  MKO10002326_A_Abcb8
  gRNA
attcactagtgccgcaccta

SEQ ID NO: 2327 - DNA, 20 bp, Artificial Sequence
  MKO10002327_A_Abcb8
  gRNA
tgagctgagccggtcatctg

SEQ ID NO: 2328 - DNA, 20 bp, Artificial Sequence
  MKO10002328_A_Abcb9
  gRNA
gtagtacttgccgtagatgt

SEQ ID NO: 2329 - DNA, 20 bp, Artificial Sequence
  MKO10002329_A_Abcb9
  gRNA
ccggaggcgaatgttcagtc

SEQ ID NO: 2330 - DNA, 20 bp, Artificial Sequence
  MKO10002330_A_Abcb9
  gRNA
cacggtcaaagtcacgggcg

SEQ ID NO: 2331 - DNA, 20 bp, Artificial Sequence
  MKO10002331_A_Abcc10
  gRNA
ggctgtagcttggaagatcg

SEQ ID NO: 2332 - DNA, 20 bp, Artificial Sequence
  MKO10002332_A_Abcc10
  gRNA
tactaggcaccgactccgag

SEQ ID NO: 2333 - DNA, 20 bp, Artificial Sequence
  MKO10002333_A_Abcc10
  gRNA
agtgattgccacccgaatca

SEQ ID NO: 2334 - DNA, 20 bp, Artificial Sequence
  MKO10002334_A_Abcc12
  gRNA
ccgcacagcgatccgactga

SEQ ID NO: 2335 - DNA, 20 bp, Artificial Sequence
  MKO10002335_A_Abcc12
  gRNA
gatgccgatcccgatgtgtc

SEQ ID NO: 2336 - DNA, 20 bp, Artificial Sequence
  MKO10002336_A_Abcc12
  gRNA
taggttggcacccaatcctg

SEQ ID NO: 2337 - DNA, 20 bp, Artificial Sequence
  MKO10002337_A_Abcc1
  gRNA
ccgttcaagctgtatcaaaa

SEQ ID NO: 2338 - DNA, 20 bp, Artificial Sequence
  MKO10002338_A_Abcc1
  gRNA
gaaagtaagcataattcccg

SEQ ID NO: 2339 - DNA, 20 bp, Artificial Sequence
  MKO10002339_A_Abcc1
  gRNA
gctccgagccccagtgttac

SEQ ID NO: 2340 - DNA, 20 bp, Artificial Sequence
  MKO10002340_A_Abcc2
  gRNA
tctgatacgagcactcctgc

SEQ ID NO: 2341 - DNA, 20 bp, Artificial Sequence
  MKO10002341_A_Abcc2
  gRNA
taaattctaccttgccaagc

SEQ ID NO: 2342 - DNA, 20 bp, Artificial Sequence
  MKO10002342_A_Abcc2
  gRNA
ctcgtatcagagtctgaaac

SEQ ID NO: 2343 - DNA, 20 bp, Artificial Sequence
  MKO10002343_A_Abcc3
  gRNA
ccccccgaagccgctcgtac

SEQ ID NO: 2344 - DNA, 20 bp, Artificial Sequence
  MKO10002344_A_Abcc3
  gRNA
gtcgctgaccgtcttgagcc

SEQ ID NO: 2345 - DNA, 20 bp, Artificial Sequence
  MKO10002345_A_Abcc3
  gRNA
ggactatgtagccgagctga

SEQ ID NO: 2346 - DNA, 20 bp, Artificial Sequence
  MKO10002346_A_Abcc4
  gRNA
gtcgaatttgttcacgtcgt

SEQ ID NO: 2347 - DNA, 20 bp, Artificial Sequence
  MKO10002347_A_Abcc4
  gRNA
accgttgaagctcctctccg

SEQ ID NO: 2348 - DNA, 20 bp, Artificial Sequence
  MKO10002348_A_Abcc4
  gRNA
ttggcgtcctgcagcgggtt

SEQ ID NO: 2349 - DNA, 20 bp, Artificial Sequence
  MKO10002349_A_Abcc5
  gRNA
gtgcctgatgatcacgcagt

SEQ ID NO: 2350 - DNA, 20 bp, Artificial Sequence
  MKO10002350_A_Abcc5
  gRNA
ggcccgagtggttcacaaga

SEQ ID NO: 2351 - DNA, 20 bp, Artificial Sequence
  MKO10002351_A_Abcc5
  gRNA
cgaaacagcagcccgagttg

SEQ ID NO: 2352 - DNA, 20 bp, Artificial Sequence
  MKO10002352_A_Abcc6
  gRNA
tcccccacagaacttccgtc

SEQ ID NO: 2353 - DNA, 20 bp, Artificial Sequence
  MKO10002353_A_Abcc6
  gRNA
gcctctgtggaggatccacc

SEQ ID NO: 2354 - DNA, 20 bp, Artificial Sequence
  MKO10002354_A_Abcc6
  gRNA
gggacatccggaggtagcac

SEQ ID NO: 2355 - DNA, 20 bp, Artificial Sequence
  MKO10002355_A_Abcc8
  gRNA
cgcgcagagtcgctgatagt

SEQ ID NO: 2356 - DNA, 20 bp, Artificial Sequence
  MKO10002356_A_Abcc8
  gRNA
caactatcagcgactctgcg

SEQ ID NO: 2357 - DNA, 20 bp, Artificial Sequence
  MKO10002357_A_Abcc8
  gRNA
gtccttaccgatcagcagct

SEQ ID NO: 2358 - DNA, 20 bp, Artificial Sequence
  MKO10002358_A_Abcc9
  gRNA
tctctaggcatcgggcgtcc

SEQ ID NO: 2359 - DNA, 20 bp, Artificial Sequence
  MKO10002359_A_Abcc9
  gRNA
gactcaccaatgaacagtat

SEQ ID NO: 2360 - DNA, 20 bp, Artificial Sequence
  MKO10002360_A_Abcc9
  gRNA
tcctcctacaacatctatta

SEQ ID NO: 2361 - DNA, 20 bp, Artificial Sequence
  MKO10002361_A_Abcd1
  gRNA
tcatcctgcttgagcgccta

SEQ ID NO: 2362 - DNA, 20 bp, Artificial Sequence
  MKO10002362_A_Abcd1
  gRNA
gttccagcatgacataccat

SEQ ID NO: 2363 - DNA, 20 bp, Artificial Sequence
  MKO10002363_A_Abcd1
  gRNA
cagggtgtacgagatgttcc

SEQ ID NO: 2364 - DNA, 20 bp, Artificial Sequence
  MKO10002364_A_Abcd2
  gRNA
tcgctaaccatagcctgctt

SEQ ID NO: 2365 - DNA, 20 bp, Artificial Sequence
  MKO10002365_A_Abcd2
  gRNA
agcaggctatggttagcgat

SEQ ID NO: 2366 - DNA, 20 bp, Artificial Sequence
  MKO10002366_A_Abcd2
  gRNA
tgtcgctgaggggtagttcc

SEQ ID NO: 2367 - DNA, 20 bp, Artificial Sequence
  MKO10002367_A_Abcd3
  gRNA
agaatgggacgctcattgag

SEQ ID NO: 2368 - DNA, 20 bp, Artificial Sequence
  MKO10002368_A_Abcd3
  gRNA
ctcgaacatactgtgatgtt

SEQ ID NO: 2369 - DNA, 20 bp, Artificial Sequence
  MKO10002369_A_Abcd3
  gRNA
gtggtttgcagtggcatcat

SEQ ID NO: 2370 - DNA, 20 bp, Artificial Sequence
  MKO10002370_A_Abcd4
  gRNA
gcaacctgctgtacgtgagc

SEQ ID NO: 2371 - DNA, 20 bp, Artificial Sequence
  MKO10002371_A_Abcd4
  gRNA
acacgcgggcccggaagtac

SEQ ID NO: 2372 - DNA, 20 bp, Artificial Sequence
  MKO10002372_A_Abcd4
  gRNA
tcagtgccttaaatccatcc

SEQ ID NO: 2373 - DNA, 20 bp, Artificial Sequence
  MKO10002373_A_Abce1
  gRNA
ttgggattagttggaactaa

SEQ ID NO: 2374 - DNA, 20 bp, Artificial Sequence
  MKO10002374_A_Abce1
  gRNA
aggttgcctatccctcgtcc

SEQ ID NO: 2375 - DNA, 20 bp, Artificial Sequence
  MKO10002375_A_Abce1
  gRNA
taggtcatcttcgagaatct

SEQ ID NO: 2376 - DNA, 20 bp, Artificial Sequence
  MKO10002376_A_Abcf1
  gRNA
aggccgtcggaaaaaggatg

SEQ ID NO: 2377 - DNA, 20 bp, Artificial Sequence
  MKO10002377_A_Abcf1
  gRNA
ccttggccttcttccgtcct

SEQ ID NO: 2378 - DNA, 20 bp, Artificial Sequence
  MKO10002378_A_Abcf1
  gRNA
accctcatcttcctcatcac

SEQ ID NO: 2379 - DNA, 20 bp, Artificial Sequence
  MKO10002379_A_Abcf2
  gRNA
cccaatagccgagagcagca

SEQ ID NO: 2380 - DNA, 20 bp, Artificial Sequence
  MKO10002380_A_Abcf2
  gRNA
ttaaactcaggccggcgcta

SEQ ID NO: 2381 - DNA, 20 bp, Artificial Sequence
  MKO10002381_A_Abcf2
  gRNA
ccatcagagccctctttatt

SEQ ID NO: 2382 - DNA, 20 bp, Artificial Sequence
  MKO10002382_A_Abcf3
  gRNA
cagcgcggatttcgagtctg

SEQ ID NO: 2383 - DNA, 20 bp, Artificial Sequence
  MKO10002383_A_Abcf3
  gRNA
gcaaggatgacgctggcatt

SEQ ID NO: 2384 - DNA, 20 bp, Artificial Sequence
  MKO10002384_A_Abcf3
  gRNA
tttccattatcttcgacaac

SEQ ID NO: 2385 - DNA, 20 bp, Artificial Sequence
  MKO10002385_A_Abcg1
  gRNA
atgttcacggccgccctccg

SEQ ID NO: 2386 - DNA, 20 bp, Artificial Sequence
  MKO10002386_A_Abcg1
  gRNA
cccggggcattccattgata

SEQ ID NO: 2387 - DNA, 20 bp, Artificial Sequence
  MKO10002387_A_Abcg1
  gRNA
cgaggtcgtgtccagcaacg

SEQ ID NO: 2388 - DNA, 20 bp, Artificial Sequence
  MKO10002388_A_Abcg2
  gRNA
gtcggaactcagtttatccg

SEQ ID NO: 2389 - DNA, 20 bp, Artificial Sequence
  MKO10002389_A_Abcg2
  gRNA
cgaagacttgcctccgcctg

SEQ ID NO: 2390 - DNA, 20 bp, Artificial Sequence
  MKO10002390_A_Abcg2
  gRNA
gcttgagtccaaaccagtcg

SEQ ID NO: 2391 - DNA, 20 bp, Artificial Sequence
  MKO10002391_A_Abcg3
  gRNA
atatctcctgataatccacg

SEQ ID NO: 2392 - DNA, 20 bp, Artificial Sequence
  MKO10002392_A_Abcg3
  gRNA
gctaatttcaagtgtacttc

SEQ ID NO: 2393 - DNA, 20 bp, Artificial Sequence
  MKO10002393_A_Abcg3
  gRNA
caatgccattatgggacctc

SEQ ID NO: 2394 - DNA, 20 bp, Artificial Sequence
  MKO10002394_A_Abcg4
  gRNA
cggaaggtcctcagctcgcg

SEQ ID NO: 2395 - DNA, 20 bp, Artificial Sequence
  MKO10002395_A_Abcg4
  gRNA
tgatgtcctgctctcacacg

SEQ ID NO: 2396 - DNA, 20 bp, Artificial Sequence
  MKO10002396_A_Abcg4
  gRNA
agctgtcctcgtgtgagagc

SEQ ID NO: 2397 - DNA, 20 bp, Artificial Sequence
  MKO10002397_A_Abcg5
  gRNA
gcaacgtctcgcgcacagtg

SEQ ID NO: 2398 - DNA, 20 bp, Artificial Sequence
  MKO10002398_A_Abcg5
  gRNA
tgaatggctgcgagctgcgc

SEQ ID NO: 2399 - DNA, 20 bp, Artificial Sequence
  MKO10002399_A_Abcg5
  gRNA
gtctccttgtacatcgagag

SEQ ID NO: 2400 - DNA, 20 bp, Artificial Sequence
  MKO10002400_A_Abcg8
  gRNA
aagacgtaatcgccgagctg

SEQ ID NO: 2401 - DNA, 20 bp, Artificial Sequence
  MKO10002401_A_Abcg8
  gRNA
tgtgatcacgtcgagtagtg

SEQ ID NO: 2402 - DNA, 20 bp, Artificial Sequence
  MKO10002402_A_Abcg8
  gRNA
tcactactcgacgtgatcac

SEQ ID NO: 2403 - DNA, 20 bp, Artificial Sequence
  MKO10002403_A_Abhd10
  gRNA
ctctaggtcacgcctttata

SEQ ID NO: 2404 - DNA, 20 bp, Artificial Sequence
  MKO10002404_A_Abhd10
  gRNA
ttggaagttctgatcggtta

SEQ ID NO: 2405 - DNA, 20 bp, Artificial Sequence
  MKO10002405_A_Abhd10
  gRNA
aagcgtacagggcaggtcac

SEQ ID NO: 2406 - DNA, 20 bp, Artificial Sequence
  MKO10002406_A_Abhd11
  gRNA
tcagcaacgtgaaccctact

SEQ ID NO: 2407 - DNA, 20 bp, Artificial Sequence
  MKO10002407_A_Abhd11
  gRNA
aagagagttggccccgagta

SEQ ID NO: 2408 - DNA, 20 bp, Artificial Sequence
  MKO10002408_A_Abhd11
  gRNA
gcactcccaagcccgaaaac

SEQ ID NO: 2409 - DNA, 20 bp, Artificial Sequence
  MKO10002409_A_Abhd12b
  gRNA
ccaaggggaagtgtcgatgc

SEQ ID NO: 2410 - DNA, 20 bp, Artificial Sequence
  MKO10002410_A_Abhd12b
  gRNA
agttacggctcccattctcg

SEQ ID NO: 2411 - DNA, 20 bp, Artificial Sequence
  MKO10002411_A_Abhd12b
  gRNA
actcgtgaagtttctgtact

SEQ ID NO: 2412 - DNA, 20 bp, Artificial Sequence
  MKO10002412_A_Abhd12
  gRNA
gccatcatactatacctgca

SEQ ID NO: 2413 - DNA, 20 bp, Artificial Sequence
  MKO10002413_A_Abhd12
  gRNA
cagaggaggtgaccaccgtg

SEQ ID NO: 2414 - DNA, 20 bp, Artificial Sequence
  MKO10002414_A_Abhd12
  gRNA
tggtgcctgcattcccatgc

SEQ ID NO: 2415 - DNA, 20 bp, Artificial Sequence
  MKO10002415_A_Abhd13
  gRNA
acccgacctcgataagacca

SEQ ID NO: 2416 - DNA, 20 bp, Artificial Sequence
  MKO10002416_A_Abhd13
  gRNA
gtgtcgttgtgcgtcccatc

SEQ ID NO: 2417 - DNA, 20 bp, Artificial Sequence
  MKO10002417_A_Abhd13
  gRNA
atgccggcaacataggccac

SEQ ID NO: 2418 - DNA, 20 bp, Artificial Sequence
  MKO10002418_A_Abhd14a
  gRNA
ccgagcagacttcgcgactc

SEQ ID NO: 2419 - DNA, 20 bp, Artificial Sequence
  MKO10002419_A_Abhd14a
  gRNA
gtactcgcctggaaggtcga

SEQ ID NO: 2420 - DNA, 20 bp, Artificial Sequence
  MKO10002420_A_Abhd14a
  gRNA
ccagagtcgcgaagtctgct

SEQ ID NO: 2421 - DNA, 20 bp, Artificial Sequence
  MKO10002421_A_Abhd14b
  gRNA
gacccgggggccacgaggaa

SEQ ID NO: 2422 - DNA, 20 bp, Artificial Sequence
  MKO10002422_A_Abhd14b
  gRNA
tgcaggtcttgggcgatcca

SEQ ID NO: 2423 - DNA, 20 bp, Artificial Sequence
  MKO10002423_A_Abhd14b
  gRNA
agccccttatgccactcatc

SEQ ID NO: 2424 - DNA, 20 bp, Artificial Sequence
  MKO10002424_A_Abhd15
  gRNA
ccgcggcgatggaagatgac

SEQ ID NO: 2425 - DNA, 20 bp, Artificial Sequence
  MKO10002425_A_Abhd15
  gRNA
acgcctcactcgcaatgtac

SEQ ID NO: 2426 - DNA, 20 bp, Artificial Sequence
  MKO10002426_A_Abhd15
  gRNA
cctgactgaattcttccgaa

SEQ ID NO: 2427 - DNA, 20 bp, Artificial Sequence
  MKO10002427_A_Abhd16a
  gRNA
aggatacgtattatcagcct

SEQ ID NO: 2428 - DNA, 20 bp, Artificial Sequence
  MKO10002428_A_Abhd16a
  gRNA
tgatgaactgtcggtactgg

SEQ ID NO: 2429 - DNA, 20 bp, Artificial Sequence
  MKO10002429_A_Abhd16a
  gRNA
tctctacctacctcggaggc

SEQ ID NO: 2430 - DNA, 20 bp, Artificial Sequence
  MKO10002430_A_Abhd16b
  gRNA
cgactagtggaccgctaccg

SEQ ID NO: 2431 - DNA, 20 bp, Artificial Sequence
  MKO10002431_A_Abhd16b
  gRNA
agcggtccactagtcgctcc

SEQ ID NO: 2432 - DNA, 20 bp, Artificial Sequence
  MKO10002432_A_Abhd16b
  gRNA
gccgcaccgtggtaacccgc

SEQ ID NO: 2433 - DNA, 20 bp, Artificial Sequence
  MKO10002433_A_Abhd17a
  gRNA
gcggttggcgcgcgcgctct

SEQ ID NO: 2434 - DNA, 20 bp, Artificial Sequence
  MKO10002434_A_Abhd17a
  gRNA
tgcagcttggctaggcgcgt

SEQ ID NO: 2435 - DNA, 20 bp, Artificial Sequence
  MKO10002435_A_Abhd17a
  gRNA
gcgtgacgccagatccactg

SEQ ID NO: 2436 - DNA, 20 bp, Artificial Sequence
  MKO10002436_A_Abhd17b
  gRNA
ggcagcgctcaaacaatgcg

SEQ ID NO: 2437 - DNA, 20 bp, Artificial Sequence
  MKO10002437_A_Abhd17b
  gRNA
gttaaaacagttcgtgtcac

SEQ ID NO: 2438 - DNA, 20 bp, Artificial Sequence
  MKO10002438_A_Abhd17b
  gRNA
cactctcatagcgagcagcc

SEQ ID NO: 2439 - DNA, 20 bp, Artificial Sequence
  MKO10002439_A_Abhd17c
  gRNA
tgcagttgatgcgcgagccc

SEQ ID NO: 2440 - DNA, 20 bp, Artificial Sequence
  MKO10002440_A_Abhd17c
  gRNA
cattcacggtaccgaggatg

SEQ ID NO: 2441 - DNA, 20 bp, Artificial Sequence
  MKO10002441_A_Abhd17c
  gRNA
cgcgcacggcccgcgacaac

SEQ ID NO: 2442 - DNA, 20 bp, Artificial Sequence
  MKO10002442_A_Abhd1
  gRNA
tccgggtagtgagtgctgtt

SEQ ID NO: 2443 - DNA, 20 bp, Artificial Sequence
  MKO10002443_A_Abhd1
  gRNA
gacccttcttacctccggta

SEQ ID NO: 2444 - DNA, 20 bp, Artificial Sequence
  MKO10002444_A_Abhd1
  gRNA
gctgttgtatttaataaccg

SEQ ID NO: 2445 - DNA, 20 bp, Artificial Sequence
  MKO10002445_A_Abhd2
  gRNA
ggtggtttagcactgcgcac

SEQ ID NO: 2446 - DNA, 20 bp, Artificial Sequence
  MKO10002446_A_Abhd2
  gRNA
tttctgggcatagtcaacga

SEQ ID NO: 2447 - DNA, 20 bp, Artificial Sequence
  MKO10002447_A_Abhd2
  gRNA
ccagacccagctggtcgtcg

SEQ ID NO: 2448 - DNA, 20 bp, Artificial Sequence
  MKO10002448_A_Abhd3
  gRNA
gacagaaacctattacccga

SEQ ID NO: 2449 - DNA, 20 bp, Artificial Sequence
  MKO10002449_A_Abhd3
  gRNA
ttcgcacagcagtaagtccg

SEQ ID NO: 2450 - DNA, 20 bp, Artificial Sequence
  MKO10002450_A_Abhd3
  gRNA
tctggcagcaggcgtatcaa

SEQ ID NO: 2451 - DNA, 20 bp, Artificial Sequence
  MKO10002451_A_Abhd4
  gRNA
ggagggatacataacgggcc

SEQ ID NO: 2452 - DNA, 20 bp, Artificial Sequence
  MKO10002452_A_Abhd4
  gRNA
ctcccgccatgtctctattg

SEQ ID NO: 2453 - DNA, 20 bp, Artificial Sequence
  MKO10002453_A_Abhd4
  gRNA
cggaatctctgcaccagccc

SEQ ID NO: 2454 - DNA, 20 bp, Artificial Sequence
  MKO10002454_A_Abhd5
  gRNA
cccatggctctactaaaatg

SEQ ID NO: 2455 - DNA, 20 bp, Artificial Sequence
  MKO10002455_A_Abhd5
  gRNA
taagtctagtgcagcgtttg

SEQ ID NO: 2456 - DNA, 20 bp, Artificial Sequence
  MKO10002456_A_Abhd5
  gRNA
tacttcttccgaagcccaat

SEQ ID NO: 2457 - DNA, 20 bp, Artificial Sequence
  MKO10002457_A_Abhd6
  gRNA
ttgaccctaggtactggcgg

SEQ ID NO: 2458 - DNA, 20 bp, Artificial Sequence
  MKO10002458_A_Abhd6
  gRNA
agttcgctacgcacaccatg

SEQ ID NO: 2459 - DNA, 20 bp, Artificial Sequence
  MKO10002459_A_Abhd6
  gRNA
cacctccatgggtggccacg

SEQ ID NO: 2460 - DNA, 20 bp, Artificial Sequence
  MKO10002460_A_Abhd8
  gRNA
gccgcccacggcgtccgaag

SEQ ID NO: 2461 - DNA, 20 bp, Artificial Sequence
  MKO10002461_A_Abhd8
  gRNA
cacgaatgtgtagccgtcac

SEQ ID NO: 2462 - DNA, 20 bp, Artificial Sequence
  MKO10002462_A_Abhd8
  gRNA
aacagcgtgttgaccgtttc

SEQ ID NO: 2463 - DNA, 20 bp, Artificial Sequence
  MKO10002463_A_Abi1
  gRNA
tccagaactgtatagtcgat

SEQ ID NO: 2464 - DNA, 20 bp, Artificial Sequence
  MKO10002464_A_Abi1
  gRNA
tttcacagtagtccgccacc

SEQ ID NO: 2465 - DNA, 20 bp, Artificial Sequence
  MKO10002465_A_Abi1
  gRNA
acctatcgactatacagttc

SEQ ID NO: 2466 - DNA, 20 bp, Artificial Sequence
  MKO10002466_A_Abi2
  gRNA
acctagcccaacccgtaata

SEQ ID NO: 2467 - DNA, 20 bp, Artificial Sequence
  MKO10002467_A_Abi2
  gRNA
gcactccccctatcgaacac

SEQ ID NO: 2468 - DNA, 20 bp, Artificial Sequence
  MKO10002468_A_Abi2
  gRNA
tgcgtatctgataaacacct

SEQ ID NO: 2469 - DNA, 20 bp, Artificial Sequence
  MKO10002469_A_Abi3bp
  gRNA
cgtacgactatcagatactt

SEQ ID NO: 2470 - DNA, 20 bp, Artificial Sequence
  MKO10002470_A_Abi3bp
  gRNA
tccaaatgcaaacgtaaagc

SEQ ID NO: 2471 - DNA, 20 bp, Artificial Sequence
  MKO10002471_A_Abi3bp
  gRNA
ccctcgcaaacccctccagc

SEQ ID NO: 2472 - DNA, 20 bp, Artificial Sequence
  MKO10002472_A_Abi3
  gRNA
cagcgccttccgcttgtctg

SEQ ID NO: 2473 - DNA, 20 bp, Artificial Sequence
  MKO10002473_A_Abi3
  gRNA
tacacctgtttccgccacgc

SEQ ID NO: 2474 - DNA, 20 bp, Artificial Sequence
  MKO10002474_A_Abi3
  gRNA
cgggcatactcttcgaatgc

SEQ ID NO: 2475 - DNA, 20 bp, Artificial Sequence
  MKO10002475_A_Abl1
  gRNA
cccttcataccgcagcgaga

SEQ ID NO: 2476 - DNA, 20 bp, Artificial Sequence
  MKO10002476_A_Abl1
  gRNA
aagggagggtgtaccactac

SEQ ID NO: 2477 - DNA, 20 bp, Artificial Sequence
  MKO10002477_A_Abl1
  gRNA
cgagagccgcttcaacactc

SEQ ID NO: 2478 - DNA, 20 bp, Artificial Sequence
  MKO10002478_A_Abl2
  gRNA
tctgctgcgctgcgggatac

SEQ ID NO: 2479 - DNA, 20 bp, Artificial Sequence
  MKO10002479_A_Abl2
  gRNA
gccccggagcctccccgacg

SEQ ID NO: 2480 - DNA, 20 bp, Artificial Sequence
  MKO10002480_A_Abl2
  gRNA
cgtctgcggtacgccccgcc

SEQ ID NO: 2481 - DNA, 20 bp, Artificial Sequence
  MKO10002481_A_Ablim1
  gRNA
gtcatagatcgccttgacct

SEQ ID NO: 2482 - DNA, 20 bp, Artificial Sequence
  MKO10002482_A_Ablim1
  gRNA
gaaagtatctattctagacc

SEQ ID NO: 2483 - DNA, 20 bp, Artificial Sequence
  MKO10002483_A_Ablim1
  gRNA
cttacagtcgggatgccaca

SEQ ID NO: 2484 - DNA, 20 bp, Artificial Sequence
  MKO10002484_A_Ablim2
  gRNA
ccgtgtgaccttcaacggga

SEQ ID NO: 2485 - DNA, 20 bp, Artificial Sequence
  MKO10002485_A_Ablim2
  gRNA
catacactccttcccgttga

SEQ ID NO: 2486 - DNA, 20 bp, Artificial Sequence
  MKO10002486_A_Ablim2
  gRNA
attacacaggatcgcagtgc

SEQ ID NO: 2487 - DNA, 20 bp, Artificial Sequence
  MKO10002487_A_Ablim3
  gRNA
agcaagccgatcaagatccg

SEQ ID NO: 2488 - DNA, 20 bp, Artificial Sequence
  MKO10002488_A_Ablim3
  gRNA
aagctgcatacgaagcattt

SEQ ID NO: 2489 - DNA, 20 bp, Artificial Sequence
  MKO10002489_A_Ablim3
  gRNA
gtcatccagtgctaccgctg

SEQ ID NO: 2490 - DNA, 20 bp, Artificial Sequence
  MKO10002490_A_Abo
  gRNA
attcaatatgtcgatgttga

SEQ ID NO: 2491 - DNA, 20 bp, Artificial Sequence
  MKO10002491_A_Abo
  gRNA
ctggcgcccatcatctggga

SEQ ID NO: 2492 - DNA, 20 bp, Artificial Sequence
  MKO10002492_A_Abo
  gRNA
gactaagacaaacactgcga

SEQ ID NO: 2493 - DNA, 20 bp, Artificial Sequence
  MKO10002493_A_Abracl
  gRNA
tgccaatctctttgaagcgt

SEQ ID NO: 2494 - DNA, 20 bp, Artificial Sequence
  MKO10002494_A_Abracl
  gRNA
agtacttacttctggaaccc

SEQ ID NO: 2495 - DNA, 20 bp, Artificial Sequence
  MKO10002495_A_Abracl
  gRNA
taccaacgcttcaaagagat

SEQ ID NO: 2496 - DNA, 20 bp, Artificial Sequence
  MKO10002496_A_Abra
  gRNA
gatgtgctcttccgctcgct

SEQ ID NO: 2497 - DNA, 20 bp, Artificial Sequence
  MKO10002497_A_Abra
  gRNA
ttagtcacgactcgccaaca

SEQ ID NO: 2498 - DNA, 20 bp, Artificial Sequence
  MKO10002498_A_Abra
  gRNA
tgtccctctccgtctcgatc

SEQ ID NO: 2499 - DNA, 20 bp, Artificial Sequence
  MKO10002499_A_Abr
  gRNA
ggataactataaagtcgctc

SEQ ID NO: 2500 - DNA, 20 bp, Artificial Sequence
  MKO10002500_A_Abr
  gRNA
tgactcgtcgatgtacggca

SEQ ID NO: 2501 - DNA, 20 bp, Artificial Sequence
  MKO10002501_A_Abr
  gRNA
cagctcagcgcccgcagcca

SEQ ID NO: 2502 - DNA, 20 bp, Artificial Sequence
  MKO10002502_A_Abt1
  gRNA
aacgcgtcccacctcgccgt

SEQ ID NO: 2503 - DNA, 20 bp, Artificial Sequence
  MKO10002503_A_Abt1
  gRNA
cctttgagcgccaagtacga

SEQ ID NO: 2504 - DNA, 20 bp, Artificial Sequence
  MKO10002504_A_Abt1
  gRNA
cgcaacctgctcagcgccta

SEQ ID NO: 2505 - DNA, 20 bp, Artificial Sequence
  MKO10002505_A_Abtb1
  gRNA
cctgctggagcagcgagacg

SEQ ID NO: 2506 - DNA, 20 bp, Artificial Sequence
  MKO10002506_A_Abtb1
  gRNA
atagtaatcccgcctcctgc

SEQ ID NO: 2507 - DNA, 20 bp, Artificial Sequence
  MKO10002507_A_Abtb1
  gRNA
ccacgtctcgctgctccagc

SEQ ID NO: 2508 - DNA, 20 bp, Artificial Sequence
  MKO10002508_A_Abtb2
  gRNA
tgctactgaacgcttcaacc

SEQ ID NO: 2509 - DNA, 20 bp, Artificial Sequence
  MKO10002509_A_Abtb2
  gRNA
gcgatatccggcaggcagcc

SEQ ID NO: 2510 - DNA, 20 bp, Artificial Sequence
  MKO10002510_A_Abtb2
  gRNA
acaccgtcgcagccccactg

SEQ ID NO: 2511 - DNA, 20 bp, Artificial Sequence
  MKO10002511_A_Acaa1a
  gRNA
cacgcatcgcccaatttctg

SEQ ID NO: 2512 - DNA, 20 bp, Artificial Sequence
  MKO10002512_A_Acaa1a
  gRNA
acaggcaatgttcttgagcc

SEQ ID NO: 2513 - DNA, 20 bp, Artificial Sequence
  MKO10002513_A_Acaa1a
  gRNA
cctcacgtcctggagaaccg

SEQ ID NO: 2514 - DNA, 20 bp, Artificial Sequence
  MKO10002514_A_Acaa1b
  gRNA
cacgcatcgcccagttcctg

SEQ ID NO: 2515 - DNA, 20 bp, Artificial Sequence
  MKO10002515_A_Acaa1b
  gRNA
tgccataatggctccagccc

SEQ ID NO: 2516 - DNA, 20 bp, Artificial Sequence
  MKO10002516_A_Acaa1b
  gRNA
cttcacgtcctggagaaccg

SEQ ID NO: 2517 - DNA, 20 bp, Artificial Sequence
  MKO10002517_A_Acaa2
  gRNA
gcccacgatgacactatcga

SEQ ID NO: 2518 - DNA, 20 bp, Artificial Sequence
  MKO10002518_A_Acaa2
  gRNA
tacctgacatccgctcacga

SEQ ID NO: 2519 - DNA, 20 bp, Artificial Sequence
  MKO10002519_A_Acaa2
  gRNA
gcaaacccacatgcctcgcc

SEQ ID NO: 2520 - DNA, 20 bp, Artificial Sequence
  MKO10002520_A_Acaca
  gRNA
gcagaatttgttactcgttt

SEQ ID NO: 2521 - DNA, 20 bp, Artificial Sequence
  MKO10002521_A_Acaca
  gRNA
aatgcatgcgatctatccgt

SEQ ID NO: 2522 - DNA, 20 bp, Artificial Sequence
  MKO10002522_A_Acaca
  gRNA
acatttcataagaccaccga

SEQ ID NO: 2523 - DNA, 20 bp, Artificial Sequence
  MKO10002523_A_Acacb
  gRNA
cgtggtcatggtgacgcccg

SEQ ID NO: 2524 - DNA, 20 bp, Artificial Sequence
  MKO10002524_A_Acacb
  gRNA
gtatgcgctccatccgccgc

SEQ ID NO: 2525 - DNA, 20 bp, Artificial Sequence
  MKO10002525_A_Acacb
  gRNA
cgacggtgaaatctctgtgc

SEQ ID NO: 2526 - DNA, 20 bp, Artificial Sequence
  MKO10002526_A_Acad10
  gRNA
gataacgaccgagcacttct

SEQ ID NO: 2527 - DNA, 20 bp, Artificial Sequence
  MKO10002527_A_Acad10
  gRNA
accttccctaccggtggagt

SEQ ID NO: 2528 - DNA, 20 bp, Artificial Sequence
  MKO10002528_A_Acad10
  gRNA
gcagttcccggtgatgactc

SEQ ID NO: 2529 - DNA, 20 bp, Artificial Sequence
  MKO10002529_A_Acad11
  gRNA
cttgcggtacctctttgggg

SEQ ID NO: 2530 - DNA, 20 bp, Artificial Sequence
  MKO10002530_A_Acad11
  gRNA
tcgctgaagctggacaaata

SEQ ID NO: 2531 - DNA, 20 bp, Artificial Sequence
  MKO10002531_A_Acad11
  gRNA
ggtccacggagacttcaagc

SEQ ID NO: 2532 - DNA, 20 bp, Artificial Sequence
  MKO10002532_A_Acad12
  gRNA
cttcgccatgactgatcgaa

SEQ ID NO: 2533 - DNA, 20 bp, Artificial Sequence
  MKO10002533_A_Acad12
  gRNA
tggtacctttcgatcagtca

SEQ ID NO: 2534 - DNA, 20 bp, Artificial Sequence
  MKO10002534_A_Acad12
  gRNA
agggctccacctgttggccg

SEQ ID NO: 2535 - DNA, 20 bp, Artificial Sequence
  MKO10002535_A_Acad8
  gRNA
ctgatcccactccgccatat

SEQ ID NO: 2536 - DNA, 20 bp, Artificial Sequence
  MKO10002536_A_Acad8
  gRNA
tggctcccaatatggcggag

SEQ ID NO: 2537 - DNA, 20 bp, Artificial Sequence
  MKO10002537_A_Acad8
  gRNA
gccttccgcatcacatccac

SEQ ID NO: 2538 - DNA, 20 bp, Artificial Sequence
  MKO10002538_A_Acad9
  gRNA
gagccgagcatacatcgtgt

SEQ ID NO: 2539 - DNA, 20 bp, Artificial Sequence
  MKO10002539_A_Acad9
  gRNA
ggactctcgaaaaattgacc

SEQ ID NO: 2540 - DNA, 20 bp, Artificial Sequence
  MKO10002540_A_Acad9
  gRNA
tatctgcccaaactgtcgtc

SEQ ID NO: 2541 - DNA, 20 bp, Artificial Sequence
  MKO10002541_A_Acadl
  gRNA
tgtgccgtaattcgcaatat

SEQ ID NO: 2542 - DNA, 20 bp, Artificial Sequence
  MKO10002542_A_Acadl
  gRNA
agagcgtactccaattgcac

SEQ ID NO: 2543 - DNA, 20 bp, Artificial Sequence
  MKO10002543_A_Acadl
  gRNA
agaacgaacgccaaaagatc

SEQ ID NO: 2544 - DNA, 20 bp, Artificial Sequence
  MKO10002544_A_Acadm
  gRNA
cttgatcaacgcgcacattc

SEQ ID NO: 2545 - DNA, 20 bp, Artificial Sequence
  MKO10002545_A_Acadm
  gRNA
tgcccgcaagtttgccagag

SEQ ID NO: 2546 - DNA, 20 bp, Artificial Sequence
  MKO10002546_A_Acadm
  gRNA
gttgatcaagccgagttccc

SEQ ID NO: 2547 - DNA, 20 bp, Artificial Sequence
  MKO10002547_A_Acadsb
  gRNA
catagcgaaagagtcgctac

SEQ ID NO: 2548 - DNA, 20 bp, Artificial Sequence
  MKO10002548_A_Acadsb
  gRNA
tcctcaatgggtcgaagatg

SEQ ID NO: 2549 - DNA, 20 bp, Artificial Sequence
  MKO10002549_A_Acadsb
  gRNA
ctgctctgtcctagtgatag

SEQ ID NO: 2550 - DNA, 20 bp, Artificial Sequence
  MKO10002550_A_Acads
  gRNA
ggtccccattgcggcccagc

SEQ ID NO: 2551 - DNA, 20 bp, Artificial Sequence
  MKO10002551_A_Acads
  gRNA
gacgctcatgataactcccg

SEQ ID NO: 2552 - DNA, 20 bp, Artificial Sequence
  MKO10002552_A_Acads
  gRNA
atgccgtgactttgccgaga

SEQ ID NO: 2553 - DNA, 20 bp, Artificial Sequence
  MKO10002553_A_Acadvl
  gRNA
ctgcccagcgactttatgcc

SEQ ID NO: 2554 - DNA, 20 bp, Artificial Sequence
  MKO10002554_A_Acadvl
  gRNA
aggccagcttaccattgatc

SEQ ID NO: 2555 - DNA, 20 bp, Artificial Sequence
  MKO10002555_A_Acadvl
  gRNA
accagtggcccggttctttg

SEQ ID NO: 2556 - DNA, 20 bp, Artificial Sequence
  MKO10002556_A_Acan
  gRNA
ggcttccaccagtgcgatgc

SEQ ID NO: 2557 - DNA, 20 bp, Artificial Sequence
  MKO10002557_A_Acan
  gRNA
agatggggtagcgcacgctg

SEQ ID NO: 2558 - DNA, 20 bp, Artificial Sequence
  MKO10002558_A_Acan
  gRNA
tatttccacacgctacaccc

SEQ ID NO: 2559 - DNA, 20 bp, Artificial Sequence
  MKO10002559_A_Acap1
  gRNA
gccaacaacgaaggcacgac

SEQ ID NO: 2560 - DNA, 20 bp, Artificial Sequence
  MKO10002560_A_Acap1
  gRNA
agtttccaccagttcaatcg

SEQ ID NO: 2561 - DNA, 20 bp, Artificial Sequence
  MKO10002561_A_Acap1
  gRNA
tcccagagcctcgattgaac

SEQ ID NO: 2562 - DNA, 20 bp, Artificial Sequence
  MKO10002562_A_Acap2
  gRNA
tgtatcgcgatgattgacac

SEQ ID NO: 2563 - DNA, 20 bp, Artificial Sequence
  MKO10002563_A_Acap2
  gRNA
cagcatcattgctagaatac

SEQ ID NO: 2564 - DNA, 20 bp, Artificial Sequence
  MKO10002564_A_Acap2
  gRNA
ccaaacccagagatcaatta

SEQ ID NO: 2565 - DNA, 20 bp, Artificial Sequence
  MKO10002565_A_Acap3
  gRNA
gctgctgccgcaccgatctc

SEQ ID NO: 2566 - DNA, 20 bp, Artificial Sequence
  MKO10002566_A_Acap3
  gRNA
ccgagatgacggtgtcgccc

SEQ ID NO: 2567 - DNA, 20 bp, Artificial Sequence
  MKO10002567_A_Acap3
  gRNA
ttgcagggcaactattgatg

SEQ ID NO: 2568 - DNA, 20 bp, Artificial Sequence
  MKO10002568_A_Acat1
  gRNA
agtgctataagaactcccat

SEQ ID NO: 2569 - DNA, 20 bp, Artificial Sequence
  MKO10002569_A_Acat1
  gRNA
tggatgcataacttcgttcc

SEQ ID NO: 2570 - DNA, 20 bp, Artificial Sequence
  MKO10002570_A_Acat1
  gRNA
tgcgcccagtgttgcttgcc

SEQ ID NO: 2571 - DNA, 20 bp, Artificial Sequence
  MKO10002571_A_Acat2
  gRNA
caggatgggtgaggtgccac

SEQ ID NO: 2572 - DNA, 20 bp, Artificial Sequence
  MKO10002572_A_Acat2
  gRNA
ccatcctgactcctgttctc

SEQ ID NO: 2573 - DNA, 20 bp, Artificial Sequence
  MKO10002573_A_Acat2
  gRNA
tccattgtaggctccttcaa

SEQ ID NO: 2574 - DNA, 20 bp, Artificial Sequence
  MKO10002574_A_Acat3
  gRNA
cagggtgggtgaggtgccac

SEQ ID NO: 2575 - DNA, 20 bp, Artificial Sequence
  MKO10002575_A_Acat3
  gRNA
ccaccctgactcctgttctc

SEQ ID NO: 2576 - DNA, 20 bp, Artificial Sequence
  MKO10002576_A_Acat3
  gRNA
tccattgtaggctccttcaa

SEQ ID NO: 2577 - DNA, 20 bp, Artificial Sequence
  MKO10002577_A_Acbd3
  gRNA
taacccagacacgtcccctg

SEQ ID NO: 2578 - DNA, 20 bp, Artificial Sequence
  MKO10002578_A_Acbd3
  gRNA
gattctcatccgccagctgc

SEQ ID NO: 2579 - DNA, 20 bp, Artificial Sequence
  MKO10002579_A_Acbd3
  gRNA
accgtgtagaaaggcggagg

SEQ ID NO: 2580 - DNA, 20 bp, Artificial Sequence
  MKO10002580_A_Acbd4
  gRNA
gagcccggcgttccgcagaa

SEQ ID NO: 2581 - DNA, 20 bp, Artificial Sequence
  MKO10002581_A_Acbd4
  gRNA
ccgcaccgcgcgacagcccg

SEQ ID NO: 2582 - DNA, 20 bp, Artificial Sequence
  MKO10002582_A_Acbd4
  gRNA
tcaccacttgtaacgtccaa

SEQ ID NO: 2583 - DNA, 20 bp, Artificial Sequence
  MKO10002583_A_Acbd5
  gRNA
tcttctacaatctcgtaaaa

SEQ ID NO: 2584 - DNA, 20 bp, Artificial Sequence
  MKO10002584_A_Acbd5
  gRNA
cttcacggccgcctcaaatc

SEQ ID NO: 2585 - DNA, 20 bp, Artificial Sequence
  MKO10002585_A_Acbd5
  gRNA
tccaggccgtgaaagtttac

SEQ ID NO: 2586 - DNA, 20 bp, Artificial Sequence
  MKO10002586_A_Acbd6
  gRNA
ccccgagggtaggaacggtg

SEQ ID NO: 2587 - DNA, 20 bp, Artificial Sequence
  MKO10002587_A_Acbd6
  gRNA
gccaccacaggcgacagcgg

SEQ ID NO: 2588 - DNA, 20 bp, Artificial Sequence
  MKO10002588_A_Acbd6
  gRNA
cgatatattcctgcattgct

SEQ ID NO: 2589 - DNA, 20 bp, Artificial Sequence
  MKO10002589_A_Acbd7
  gRNA
tgtctctctagggttgtcga

SEQ ID NO: 2590 - DNA, 20 bp, Artificial Sequence
  MKO10002590_A_Acbd7
  gRNA
ccctttagatctaacattgc

SEQ ID NO: 2591 - DNA, 20 bp, Artificial Sequence
  MKO10002591_A_Acbd7
  gRNA
cccagcaatgttagatctaa

SEQ ID NO: 2592 - DNA, 20 bp, Artificial Sequence
  MKO10002592_A_Accsl
  gRNA
tgcttaccctcgctgttatc

SEQ ID NO: 2593 - DNA, 20 bp, Artificial Sequence
  MKO10002593_A_Accsl
  gRNA
gccttgacctgataacagcg

SEQ ID NO: 2594 - DNA, 20 bp, Artificial Sequence
  MKO10002594_A_Accsl
  gRNA
gcagatgcagtgcgtcccgc

SEQ ID NO: 2595 - DNA, 20 bp, Artificial Sequence
  MKO10002595_A_Accs
  gRNA
tactcacccgccaggacaga

SEQ ID NO: 2596 - DNA, 20 bp, Artificial Sequence
  MKO10002596_A_Accs
  gRNA
acagggtgacatgcttcatg

SEQ ID NO: 2597 - DNA, 20 bp, Artificial Sequence
  MKO10002597_A_Accs
  gRNA
acgtaggtggttgttctgaa

SEQ ID NO: 2598 - DNA, 20 bp, Artificial Sequence
  MKO10002598_A_Acd
  gRNA
acgccatcgacacctccgac

SEQ ID NO: 2599 - DNA, 20 bp, Artificial Sequence
  MKO10002599_A_Acd
  gRNA
ttaccagtcggaggtgtcga

SEQ ID NO: 2600 - DNA, 20 bp, Artificial Sequence
  MKO10002600_A_Acd
  gRNA
gcaggttaaagcgatccacc

SEQ ID NO: 2601 - DNA, 20 bp, Artificial Sequence
  MKO10002601_A_Ace2
  gRNA
tgtagaacgtaccttcgcag

SEQ ID NO: 2602 - DNA, 20 bp, Artificial Sequence
  MKO10002602_A_Ace2
  gRNA
tgtagttgacgcttgatgat

SEQ ID NO: 2603 - DNA, 20 bp, Artificial Sequence
  MKO10002603_A_Ace2
  gRNA
gatcatcaagcgtcaactac

SEQ ID NO: 2604 - DNA, 20 bp, Artificial Sequence
  MKO10002604_A_Ace3
  gRNA
cacctctaggagatcctccg

SEQ ID NO: 2605 - DNA, 20 bp, Artificial Sequence
  MKO10002605_A_Ace3
  gRNA
cgtacgtagtcctcaaagac

SEQ ID NO: 2606 - DNA, 20 bp, Artificial Sequence
  MKO10002606_A_Ace3
  gRNA
taaactcattcaacacgacc

SEQ ID NO: 2607 - DNA, 20 bp, Artificial Sequence
  MKO10002607_A_Acer1
  gRNA
cgtatgcccagaagcgtacc

SEQ ID NO: 2608 - DNA, 20 bp, Artificial Sequence
  MKO10002608_A_Acer1
  gRNA
cctgttccccttgacgaact

SEQ ID NO: 2609 - DNA, 20 bp, Artificial Sequence
  MKO10002609_A_Acer1
  gRNA
actctgtgcgcacaatgtag

SEQ ID NO: 2610 - DNA, 20 bp, Artificial Sequence
  MKO10002610_A_Acer2
  gRNA
tgttgaagcacgttgcgtac

SEQ ID NO: 2611 - DNA, 20 bp, Artificial Sequence
  MKO10002611_A_Acer2
  gRNA
atggacgctcctagttgtag

SEQ ID NO: 2612 - DNA, 20 bp, Artificial Sequence
  MKO10002612_A_Acer2
  gRNA
gtctgcaattacaacgtgct

SEQ ID NO: 2613 - DNA, 20 bp, Artificial Sequence
  MKO10002613_A_Acer3
  gRNA
tatgcagcagctgtaaatca

SEQ ID NO: 2614 - DNA, 20 bp, Artificial Sequence
  MKO10002614_A_Acer3
  gRNA
ccttgaattgcaccaaaaat

SEQ ID NO: 2615 - DNA, 20 bp, Artificial Sequence
  MKO10002615_A_Acer3
  gRNA
gctgcttacttagcactcac

SEQ ID NO: 2616 - DNA, 20 bp, Artificial Sequence
  MKO10002616_A_Ace
  gRNA
cgtactcgttcaacaacact

SEQ ID NO: 2617 - DNA, 20 bp, Artificial Sequence
  MKO10002617_A_Ace
  gRNA
gttgttgaacgagtacgcag

SEQ ID NO: 2618 - DNA, 20 bp, Artificial Sequence
  MKO10002618_A_Ace
  gRNA
cttctttatgatccgcttga

SEQ ID NO: 2619 - DNA, 20 bp, Artificial Sequence
  MKO10002619_A_Ache
  gRNA
gcgcccagacctgcgccttc

SEQ ID NO: 2620 - DNA, 20 bp, Artificial Sequence
  MKO10002620_A_Ache
  gRNA
aaatgtctgctaccagtacg

SEQ ID NO: 2621 - DNA, 20 bp, Artificial Sequence
  MKO10002621_A_Ache
  gRNA
ggacgagggctcctactttc

SEQ ID NO: 2622 - DNA, 20 bp, Artificial Sequence
  MKO10002622_A_Acin1
  gRNA
agcctggccgaaaacgccgt

SEQ ID NO: 2623 - DNA, 20 bp, Artificial Sequence
  MKO10002623_A_Acin1
  gRNA
acagagcgtaatggcgacga

SEQ ID NO: 2624 - DNA, 20 bp, Artificial Sequence
  MKO10002624_A_Acin1
  gRNA
gtttccagcttgcaccccct

SEQ ID NO: 2625 - DNA, 20 bp, Artificial Sequence
  MKO10002625_A_Ackr2
  gRNA
agctccatcgtccgtcttcg

SEQ ID NO: 2626 - DNA, 20 bp, Artificial Sequence
  MKO10002626_A_Ackr2
  gRNA
taagtagtcgtagtcgtaga

SEQ ID NO: 2627 - DNA, 20 bp, Artificial Sequence
  MKO10002627_A_Ackr2
  gRNA
tgaccagaacgcaaccgatg

SEQ ID NO: 2628 - DNA, 20 bp, Artificial Sequence
  MKO10002628_A_Ackr3
  gRNA
gtctcgtgcagcataaccag

SEQ ID NO: 2629 - DNA, 20 bp, Artificial Sequence
  MKO10002629_A_Ackr3
  gRNA
acgccgtgttgtatgcatct

SEQ ID NO: 2630 - DNA, 20 bp, Artificial Sequence
  MKO10002630_A_Ackr3
  gRNA
gcttcatcaaccgcaactac

SEQ ID NO: 2631 - DNA, 20 bp, Artificial Sequence
  MKO10002631_A_Ackr4
  gRNA
ttaaaaagtctcgccccctc

SEQ ID NO: 2632 - DNA, 20 bp, Artificial Sequence
  MKO10002632_A_Ackr4
  gRNA
gcgtttgctcatatcgcagc

SEQ ID NO: 2633 - DNA, 20 bp, Artificial Sequence
  MKO10002633_A_Ackr4
  gRNA
cataatagtattccgctgac

SEQ ID NO: 2634 - DNA, 20 bp, Artificial Sequence
  MKO10002634_A_Acly
  gRNA
agaaccggttcaagtacgcc

SEQ ID NO: 2635 - DNA, 20 bp, Artificial Sequence
  MKO10002635_A_Acly
  gRNA
ttcctcgacgtttgattaac

SEQ ID NO: 2636 - DNA, 20 bp, Artificial Sequence
  MKO10002636_A_Acly
  gRNA
gagagagattgaccccgacg

SEQ ID NO: 2637 - DNA, 20 bp, Artificial Sequence
  MKO10002637_A_Acmsd
  gRNA
ccgttgccagataccctcga

SEQ ID NO: 2638 - DNA, 20 bp, Artificial Sequence
  MKO10002638_A_Acmsd
  gRNA
ggagatggagcgttgtgtta

SEQ ID NO: 2639 - DNA, 20 bp, Artificial Sequence
  MKO10002639_A_Acmsd
  gRNA
acccagtagctaaacatgac

SEQ ID NO: 2640 - DNA, 20 bp, Artificial Sequence
  MKO10002640_A_Acn9
  gRNA
taaattcgtccttcacgtac

SEQ ID NO: 2641 - DNA, 20 bp, Artificial Sequence
  MKO10002641_A_Acn9
  gRNA
agtacgtgaaggacgaattt

SEQ ID NO: 2642 - DNA, 20 bp, Artificial Sequence
  MKO10002642_A_Acn9
  gRNA
agacgtacgcagcagtgctg

SEQ ID NO: 2643 - DNA, 20 bp, Artificial Sequence
  MKO10002643_A_Acnat1
  gRNA
ggttgtgacacccatccaac

SEQ ID NO: 2644 - DNA, 20 bp, Artificial Sequence
  MKO10002644_A_Acnat1
  gRNA
agccgtcccactaagatacc

SEQ ID NO: 2645 - DNA, 20 bp, Artificial Sequence
  MKO10002645_A_Acnat1
  gRNA
tgaatttcgtgccagtcttt

SEQ ID NO: 2646 - DNA, 20 bp, Artificial Sequence
  MKO10002646_A_Acnat2
  gRNA
cggatccaagtccatgattc

SEQ ID NO: 2647 - DNA, 20 bp, Artificial Sequence
  MKO10002647_A_Acnat2
  gRNA
acttggatccgttccagagc

SEQ ID NO: 2648 - DNA, 20 bp, Artificial Sequence
  MKO10002648_A_Acnat2
  gRNA
atcccacggctttgctgtgc

SEQ ID NO: 2649 - DNA, 20 bp, Artificial Sequence
  MKO10002649_A_Aco1
  gRNA
aacatgcggataatccctcc

SEQ ID NO: 2650 - DNA, 20 bp, Artificial Sequence
  MKO10002650_A_Aco1
  gRNA
gattatccgcatgttgcaaa

SEQ ID NO: 2651 - DNA, 20 bp, Artificial Sequence
  MKO10002651_A_Aco1
  gRNA
gcgcgatgctgtgaagaagt

SEQ ID NO: 2652 - DNA, 20 bp, Artificial Sequence
  MKO10002652_A_Aco2
  gRNA
tctttccccgctcgatctcc

SEQ ID NO: 2653 - DNA, 20 bp, Artificial Sequence
  MKO10002653_A_Aco2
  gRNA
ggctcaccttggccctgcgc

SEQ ID NO: 2654 - DNA, 20 bp, Artificial Sequence
  MKO10002654_A_Aco2
  gRNA
acattaacattgtccgtaaa

SEQ ID NO: 2655 - DNA, 20 bp, Artificial Sequence
  MKO10002655_A_Acot10
  gRNA
ttgaatacatttcgttcctg

SEQ ID NO: 2656 - DNA, 20 bp, Artificial Sequence
  MKO10002656_A_Acot10
  gRNA
atgtctcatcatcgtgcagc

SEQ ID NO: 2657 - DNA, 20 bp, Artificial Sequence
  MKO10002657_A_Acot10
  gRNA
tgcacgatgatgagacatat

SEQ ID NO: 2658 - DNA, 20 bp, Artificial Sequence
  MKO10002658_A_Acot11
  gRNA
tctacttcgaccataccatt

SEQ ID NO: 2659 - DNA, 20 bp, Artificial Sequence
  MKO10002659_A_Acot11
  gRNA
tgttctctaatcgcacatcc

SEQ ID NO: 2660 - DNA, 20 bp, Artificial Sequence
  MKO10002660_A_Acot11
  gRNA
tcaatctcccatccggagtc

SEQ ID NO: 2661 - DNA, 20 bp, Artificial Sequence
  MKO10002661_A_Acot12
  gRNA
acgtttgtagctaaaccagt

SEQ ID NO: 2662 - DNA, 20 bp, Artificial Sequence
  MKO10002662_A_Acot12
  gRNA
catccagaagctcctctgcg

SEQ ID NO: 2663 - DNA, 20 bp, Artificial Sequence
  MKO10002663_A_Acot12
  gRNA
ttgaaagccgaaaagcatgc

SEQ ID NO: 2664 - DNA, 20 bp, Artificial Sequence
  MKO10002664_A_Acot13
  gRNA
taaccttcattacttctcgt

SEQ ID NO: 2665 - DNA, 20 bp, Artificial Sequence
  MKO10002665_A_Acot13
  gRNA
cttgttggtcagatccactg

SEQ ID NO: 2666 - DNA, 20 bp, Artificial Sequence
  MKO10002666_A_Acot13
  gRNA
gaacctacgagaagtaatga

SEQ ID NO: 2667 - DNA, 20 bp, Artificial Sequence
  MKO10002667_A_Acot1
  gRNA
cgagcgtcacttcttggctc

SEQ ID NO: 2668 - DNA, 20 bp, Artificial Sequence
  MKO10002668_A_Acot1
  gRNA
cgcttgaccaatcgccaaaa

SEQ ID NO: 2669 - DNA, 20 bp, Artificial Sequence
  MKO10002669_A_Acot1
  gRNA
tgtgactatcctgagaaatc

SEQ ID NO: 2670 - DNA, 20 bp, Artificial Sequence
  MKO10002670_A_Acot2
  gRNA
gcgcgctaccgcgccgacgc

SEQ ID NO: 2671 - DNA, 20 bp, Artificial Sequence
  MKO10002671_A_Acot2
  gRNA
cgcatttgtccgcgcccaag

SEQ ID NO: 2672 - DNA, 20 bp, Artificial Sequence
  MKO10002672_A_Acot2
  gRNA
tcttgctacccaactgtttg

SEQ ID NO: 2673 - DNA, 20 bp, Artificial Sequence
  MKO10002673_A_Acot3
  gRNA
ctgtaagtttccgccgatgt

SEQ ID NO: 2674 - DNA, 20 bp, Artificial Sequence
  MKO10002674_A_Acot3
  gRNA
cggcggaaacttacagtaca

SEQ ID NO: 2675 - DNA, 20 bp, Artificial Sequence
  MKO10002675_A_Acot3
  gRNA
tctggcttataacaactacg

SEQ ID NO: 2676 - DNA, 20 bp, Artificial Sequence
  MKO10002676_A_Acot4
  gRNA
atggcccaacggcggaatca

SEQ ID NO: 2677 - DNA, 20 bp, Artificial Sequence
  MKO10002677_A_Acot4
  gRNA
gcagaccatgattccgccgt

SEQ ID NO: 2678 - DNA, 20 bp, Artificial Sequence
  MKO10002678_A_Acot4
  gRNA
ggcctgttggaataccgagc

SEQ ID NO: 2679 - DNA, 20 bp, Artificial Sequence
  MKO10002679_A_Acot5
  gRNA
tgttgaaataacgttgaccg

SEQ ID NO: 2680 - DNA, 20 bp, Artificial Sequence
  MKO10002680_A_Acot5
  gRNA
aaaagtctggagccgctgcc

SEQ ID NO: 2681 - DNA, 20 bp, Artificial Sequence
  MKO10002681_A_Acot5
  gRNA
ccttcatctggagtactttg

SEQ ID NO: 2682 - DNA, 20 bp, Artificial Sequence
  MKO10002682_A_Acot6
  gRNA
aaatctgagtgacgttcgcc

SEQ ID NO: 2683 - DNA, 20 bp, Artificial Sequence
  MKO10002683_A_Acot6
  gRNA
gaaagtttgaatgcgttgcc

SEQ ID NO: 2684 - DNA, 20 bp, Artificial Sequence
  MKO10002684_A_Acot6
  gRNA
agccactgtacacttcgtgt

SEQ ID NO: 2685 - DNA, 20 bp, Artificial Sequence
  MKO10002685_A_Acot7
  gRNA
cttcccacagtatttacggc

SEQ ID NO: 2686 - DNA, 20 bp, Artificial Sequence
  MKO10002686_A_Acot7
  gRNA
ggatgttctccgacatcacg

SEQ ID NO: 2687 - DNA, 20 bp, Artificial Sequence
  MKO10002687_A_Acot7
  gRNA
agccacctcgccgatgcaca

SEQ ID NO: 2688 - DNA, 20 bp, Artificial Sequence
  MKO10002688_A_Acot8
  gRNA
ccccattccgagccgaccac

SEQ ID NO: 2689 - DNA, 20 bp, Artificial Sequence
  MKO10002689_A_Acot8
  gRNA
ccactcgatacttcttgtga

SEQ ID NO: 2690 - DNA, 20 bp, Artificial Sequence
  MKO10002690_A_Acot8
  gRNA
cagtgctgtaccacgtagag

SEQ ID NO: 2691 - DNA, 20 bp, Artificial Sequence
  MKO10002691_A_Acot9
  gRNA
tagtaggcgtatccacagtc

SEQ ID NO: 2692 - DNA, 20 bp, Artificial Sequence
  MKO10002692_A_Acot9
  gRNA
tagtacctcctaggctgtca

SEQ ID NO: 2693 - DNA, 20 bp, Artificial Sequence
  MKO10002693_A_Acot9
  gRNA
tttcagttcgagacaagctg

SEQ ID NO: 2694 - DNA, 20 bp, Artificial Sequence
  MKO10002694_A_Acox1
  gRNA
cactcgaagccagcgttacg

SEQ ID NO: 2695 - DNA, 20 bp, Artificial Sequence
  MKO10002695_A_Acox1
  gRNA
taacagccacctcgtaacgc

SEQ ID NO: 2696 - DNA, 20 bp, Artificial Sequence
  MKO10002696_A_Acox1
  gRNA
atcactcgaggggagtgcta

SEQ ID NO: 2697 - DNA, 20 bp, Artificial Sequence
  MKO10002697_A_Acox2
  gRNA
ctgaacgcatttatgctgac

SEQ ID NO: 2698 - DNA, 20 bp, Artificial Sequence
  MKO10002698_A_Acox2
  gRNA
gacccgagatgagctatatg

SEQ ID NO: 2699 - DNA, 20 bp, Artificial Sequence
  MKO10002699_A_Acox2
  gRNA
aacctatgatgcaaccaccc

SEQ ID NO: 2700 - DNA, 20 bp, Artificial Sequence
  MKO10002700_A_Acox3
  gRNA
gggcaagacggcaactcatg

SEQ ID NO: 2701 - DNA, 20 bp, Artificial Sequence
  MKO10002701_A_Acox3
  gRNA
catgagttgccgtcttgccc

SEQ ID NO: 2702 - DNA, 20 bp, Artificial Sequence
  MKO10002702_A_Acox3
  gRNA
cctctctttgcccgctcgta

SEQ ID NO: 2703 - DNA, 20 bp, Artificial Sequence
  MKO10002703_A_Acoxl
  gRNA
gattcctcacctgattgtcg

SEQ ID NO: 2704 - DNA, 20 bp, Artificial Sequence
  MKO10002704_A_Acoxl
  gRNA
agcagcgtagttcccatgca

SEQ ID NO: 2705 - DNA, 20 bp, Artificial Sequence
  MKO10002705_A_Acoxl
  gRNA
gccatgggagcaacgtgaga

SEQ ID NO: 2706 - DNA, 20 bp, Artificial Sequence
  MKO10002706_A_Acp1
  gRNA
caccgaaacatggcagaggt

SEQ ID NO: 2707 - DNA, 20 bp, Artificial Sequence
  MKO10002707_A_Acp1
  gRNA
acacacgaacagcactgact

SEQ ID NO: 2708 - DNA, 20 bp, Artificial Sequence
  MKO10002708_A_Acp1
  gRNA
cctgaatactgcttctgcaa

SEQ ID NO: 2709 - DNA, 20 bp, Artificial Sequence
  MKO10002709_A_Acp2
  gRNA
gccctgcggcaacgctacca

SEQ ID NO: 2710 - DNA, 20 bp, Artificial Sequence
  MKO10002710_A_Acp2
  gRNA
tttgctcagctgtatcgaca

SEQ ID NO: 2711 - DNA, 20 bp, Artificial Sequence
  MKO10002711_A_Acp2
  gRNA
gggatttggtcagctaacca

SEQ ID NO: 2712 - DNA, 20 bp, Artificial Sequence
  MKO10002712_A_Acp5
  gRNA
gtgaaaccgcaagtagccgt

SEQ ID NO: 2713 - DNA, 20 bp, Artificial Sequence
  MKO10002713_A_Acp5
  gRNA
cgccagaaccgtgcagacga

SEQ ID NO: 2714 - DNA, 20 bp, Artificial Sequence
  MKO10002714_A_Acp5
  gRNA
ggctacttgcggtttcacta

SEQ ID NO: 2715 - DNA, 20 bp, Artificial Sequence
  MKO10002715_A_Acp6
  gRNA
gtgtaatcaaaccgagtttg

SEQ ID NO: 2716 - DNA, 20 bp, Artificial Sequence
  MKO10002716_A_Acp6
  gRNA
tttcgggcccccagctagat

SEQ ID NO: 2717 - DNA, 20 bp, Artificial Sequence
  MKO10002717_A_Acp6
  gRNA
accagtctacaacccccaag

SEQ ID NO: 2718 - DNA, 20 bp, Artificial Sequence
  MKO10002718_A_Acpl2
  gRNA
tgccccgcatcattataagc

SEQ ID NO: 2719 - DNA, 20 bp, Artificial Sequence
  MKO10002719_A_Acpl2
  gRNA
actagagtgcagtcgatttc

SEQ ID NO: 2720 - DNA, 20 bp, Artificial Sequence
  MKO10002720_A_Acpl2
  gRNA
ctgcaacattccaagcgtag

SEQ ID NO: 2721 - DNA, 20 bp, Artificial Sequence
  MKO10002721_A_Acpp
  gRNA
gtcggtaggaaaggtctcga

SEQ ID NO: 2722 - DNA, 20 bp, Artificial Sequence
  MKO10002722_A_Acpp
  gRNA
accccattacagaatcctcg

SEQ ID NO: 2723 - DNA, 20 bp, Artificial Sequence
  MKO10002723_A_Acpp
  gRNA
cgacacctataagcatgatc

SEQ ID NO: 2724 - DNA, 20 bp, Artificial Sequence
  MKO10002724_A_Acpt
  gRNA
ccctgagtacaagcgagaag

SEQ ID NO: 2725 - DNA, 20 bp, Artificial Sequence
  MKO10002725_A_Acpt
  gRNA
tgtaacgcctcctcagaaat

SEQ ID NO: 2726 - DNA, 20 bp, Artificial Sequence
  MKO10002726_A_Acpt
  gRNA
cgtaacagctcatggtatcg

SEQ ID NO: 2727 - DNA, 20 bp, Artificial Sequence
  MKO10002727_A_Acrbp
  gRNA
ttgatccaactgaacgagag

SEQ ID NO: 2728 - DNA, 20 bp, Artificial Sequence
  MKO10002728_A_Acrbp
  gRNA
gaaccccactctcgttcagt

SEQ ID NO: 2729 - DNA, 20 bp, Artificial Sequence
  MKO10002729_A_Acrbp
  gRNA
agcaacgatactgagcaaac

SEQ ID NO: 2730 - DNA, 20 bp, Artificial Sequence
  MKO10002730_A_Acrv1
  gRNA
gaagtttcgggtgacgaagc

SEQ ID NO: 2731 - DNA, 20 bp, Artificial Sequence
  MKO10002731_A_Acrv1
  gRNA
cgcaaacccttcagatgccg

SEQ ID NO: 2732 - DNA, 20 bp, Artificial Sequence
  MKO10002732_A_Acrv1
  gRNA
atctagaccttgttgcagag

SEQ ID NO: 2733 - DNA, 20 bp, Artificial Sequence
  MKO10002733_A_Acr
  gRNA
tttgggtcgaagacggccga

SEQ ID NO: 2734 - DNA, 20 bp, Artificial Sequence
  MKO10002734_A_Acr
  gRNA
gccgactacccgccatccga

SEQ ID NO: 2735 - DNA, 20 bp, Artificial Sequence
  MKO10002735_A_Acr
  gRNA
tcacgtcccataacagccgc

SEQ ID NO: 2736 - DNA, 20 bp, Artificial Sequence
  MKO10002736_A_Acsbg1
  gRNA
tgcgtgcaatcaggtagtac

SEQ ID NO: 2737 - DNA, 20 bp, Artificial Sequence
  MKO10002737_A_Acsbg1
  gRNA
ctagggcctcgtagaacatc

SEQ ID NO: 2738 - DNA, 20 bp, Artificial Sequence
  MKO10002738_A_Acsbg1
  gRNA
ctgccgagccaatgtcatcg

SEQ ID NO: 2739 - DNA, 20 bp, Artificial Sequence
  MKO10002739_A_Acsbg2
  gRNA
caacgtgagtatcttgatag

SEQ ID NO: 2740 - DNA, 20 bp, Artificial Sequence
  MKO10002740_A_Acsbg2
  gRNA
ttatgccaccaactcggctg

SEQ ID NO: 2741 - DNA, 20 bp, Artificial Sequence
  MKO10002741_A_Acsbg2
  gRNA
tgggctttaactcggtcgag

SEQ ID NO: 2742 - DNA, 20 bp, Artificial Sequence
  MKO10002742_A_Acsf2
  gRNA
gccttgacgccacggcgcag

SEQ ID NO: 2743 - DNA, 20 bp, Artificial Sequence
  MKO10002743_A_Acsf2
  gRNA
acctctgcgccgtggcgtca

SEQ ID NO: 2744 - DNA, 20 bp, Artificial Sequence
  MKO10002744_A_Acsf2
  gRNA
ctcccacaggtaggctgcaa

SEQ ID NO: 2745 - DNA, 20 bp, Artificial Sequence
  MKO10002745_A_Acsf3
  gRNA
gcagcttgttgaccacgccg

SEQ ID NO: 2746 - DNA, 20 bp, Artificial Sequence
  MKO10002746_A_Acsf3
  gRNA
cgccacgggccacacgctgc

SEQ ID NO: 2747 - DNA, 20 bp, Artificial Sequence
  MKO10002747_A_Acsf3
  gRNA
cccacagattaccgtattca

SEQ ID NO: 2748 - DNA, 20 bp, Artificial Sequence
  MKO10002748_A_Acsl1
  gRNA
cagtgggtgatcgtcgagca

SEQ ID NO: 2749 - DNA, 20 bp, Artificial Sequence
  MKO10002749_A_Acsl1
  gRNA
ccgatgaactgctcggagca

SEQ ID NO: 2750 - DNA, 20 bp, Artificial Sequence
  MKO10002750_A_Acsl1
  gRNA
gtcccgctctatgacaccct

SEQ ID NO: 2751 - DNA, 20 bp, Artificial Sequence
  MKO10002751_A_Acsl3
  gRNA
gtaatgatatgccgcagacg

SEQ ID NO: 2752 - DNA, 20 bp, Artificial Sequence
  MKO10002752_A_Acsl3
  gRNA
tgagtggatgatcgctgcac

SEQ ID NO: 2753 - DNA, 20 bp, Artificial Sequence
  MKO10002753_A_Acsl3
  gRNA
cggcatatcattactgttga

SEQ ID NO: 2754 - DNA, 20 bp, Artificial Sequence
  MKO10002754_A_Acsl4
  gRNA
tcacagcatgcaatcagtag

SEQ ID NO: 2755 - DNA, 20 bp, Artificial Sequence
  MKO10002755_A_Acsl4
  gRNA
caatagagcagagtaccctg

SEQ ID NO: 2756 - DNA, 20 bp, Artificial Sequence
  MKO10002756_A_Acsl4
  gRNA
ctcaacactagtaatcagat

SEQ ID NO: 2757 - DNA, 20 bp, Artificial Sequence
  MKO10002757_A_Acsl5
  gRNA
tgtccccctgtatgacacgc

SEQ ID NO: 2758 - DNA, 20 bp, Artificial Sequence
  MKO10002758_A_Acsl5
  gRNA
gtctgatcgagcagagtacc

SEQ ID NO: 2759 - DNA, 20 bp, Artificial Sequence
  MKO10002759_A_Acsl5
  gRNA
tggcgtctgagaagtaataa

SEQ ID NO: 2760 - DNA, 20 bp, Artificial Sequence
  MKO10002760_A_Acsl6
  gRNA
tgcccactttacagtcgtgc

SEQ ID NO: 2761 - DNA, 20 bp, Artificial Sequence
  MKO10002761_A_Acsl6
  gRNA
atgtaccaggtgttccgccg

SEQ ID NO: 2762 - DNA, 20 bp, Artificial Sequence
  MKO10002762_A_Acsl6
  gRNA
ccgatagctcgggcagccgc

SEQ ID NO: 2763 - DNA, 20 bp, Artificial Sequence
  MKO10002763_A_Acsm1
  gRNA
tggggtgcctgatcgagcca

SEQ ID NO: 2764 - DNA, 20 bp, Artificial Sequence
  MKO10002764_A_Acsm1
  gRNA
acggtagccagaatccatcc

SEQ ID NO: 2765 - DNA, 20 bp, Artificial Sequence
  MKO10002765_A_Acsm1
  gRNA
acagtgggctgcatgcgaac

SEQ ID NO: 2766 - DNA, 20 bp, Artificial Sequence
  MKO10002766_A_Acsm2
  gRNA
atcactagcgaagttgaact

SEQ ID NO: 2767 - DNA, 20 bp, Artificial Sequence
  MKO10002767_A_Acsm2
  gRNA
ccacacggtccccacgatgt

SEQ ID NO: 2768 - DNA, 20 bp, Artificial Sequence
  MKO10002768_A_Acsm2
  gRNA
aacctgtccgcatgcagccc

SEQ ID NO: 2769 - DNA, 20 bp, Artificial Sequence
  MKO10002769_A_Acsm3
  gRNA
atacttacctgttcgcagac

SEQ ID NO: 2770 - DNA, 20 bp, Artificial Sequence
  MKO10002770_A_Acsm3
  gRNA
aatgtggcctgtctgcgaac

SEQ ID NO: 2771 - DNA, 20 bp, Artificial Sequence
  MKO10002771_A_Acsm3
  gRNA
tgatagcctccgatgtgatg

SEQ ID NO: 2772 - DNA, 20 bp, Artificial Sequence
  MKO10002772_A_Acsm4
  gRNA
ggcattgggtataccctttg

SEQ ID NO: 2773 - DNA, 20 bp, Artificial Sequence
  MKO10002773_A_Acsm4
  gRNA
actgggttccttgtcccgaa

SEQ ID NO: 2774 - DNA, 20 bp, Artificial Sequence
  MKO10002774_A_Acsm4
  gRNA
ggaagatatcagtgtcgaac

SEQ ID NO: 2775 - DNA, 20 bp, Artificial Sequence
  MKO10002775_A_Acsm5
  gRNA
agcgtggcttgtatgcgaac

SEQ ID NO: 2776 - DNA, 20 bp, Artificial Sequence
  MKO10002776_A_Acsm5
  gRNA
agtctcccagctgacagcga

SEQ ID NO: 2777 - DNA, 20 bp, Artificial Sequence
  MKO10002777_A_Acsm5
  gRNA
tgatgccctagctccgcaag

SEQ ID NO: 2778 - DNA, 20 bp, Artificial Sequence
  MKO10002778_A_Acss1
  gRNA
tctggagaccacatgccgcc

SEQ ID NO: 2779 - DNA, 20 bp, Artificial Sequence
  MKO10002779_A_Acss1
  gRNA
gtatgccgccatgacgcaca

SEQ ID NO: 2780 - DNA, 20 bp, Artificial Sequence
  MKO10002780_A_Acss1
  gRNA
tctggatatcccccttgaac

SEQ ID NO: 2781 - DNA, 20 bp, Artificial Sequence
  MKO10002781_A_Acss2
  gRNA
ggtcacctgtagtgatgagc

SEQ ID NO: 2782 - DNA, 20 bp, Artificial Sequence
  MKO10002782_A_Acss2
  gRNA
gatcacataccgtgaactcc

SEQ ID NO: 2783 - DNA, 20 bp, Artificial Sequence
  MKO10002783_A_Acss2
  gRNA
cagcaatgttctccgtaaac

SEQ ID NO: 2784 - DNA, 20 bp, Artificial Sequence
  MKO10002784_A_Acss3
  gRNA
tacgcgcattgatcatgcga

SEQ ID NO: 2785 - DNA, 20 bp, Artificial Sequence
  MKO10002785_A_Acss3
  gRNA
aatgcgcgtacttaattctt

SEQ ID NO: 2786 - DNA, 20 bp, Artificial Sequence
  MKO10002786_A_Acss3
  gRNA
gatgccgtaacaaccacctt

SEQ ID NO: 2787 - DNA, 20 bp, Artificial Sequence
  MKO10002787_A_Acta1
  gRNA
gcgcttaccggtggtacggc

SEQ ID NO: 2788 - DNA, 20 bp, Artificial Sequence
  MKO10002788_A_Acta1
  gRNA
tgaagtgcgacatcgacatc

SEQ ID NO: 2789 - DNA, 20 bp, Artificial Sequence
  MKO10002789_A_Acta1
  gRNA
ggcggctcaccgataaagga

SEQ ID NO: 2790 - DNA, 20 bp, Artificial Sequence
  MKO10002790_A_Acta2
  gRNA
ctatcggatacttcagcgtc

SEQ ID NO: 2791 - DNA, 20 bp, Artificial Sequence
  MKO10002791_A_Acta2
  gRNA
cctaccagttgtacgtccag

SEQ ID NO: 2792 - DNA, 20 bp, Artificial Sequence
  MKO10002792_A_Acta2
  gRNA
agcctcaccagtagtcacga

SEQ ID NO: 2793 - DNA, 20 bp, Artificial Sequence
  MKO10002793_A_Actbl2
  gRNA
tcgtggacgaccaaccatgg

SEQ ID NO: 2794 - DNA, 20 bp, Artificial Sequence
  MKO10002794_A_Actbl2
  gRNA
gatgactcagataatgttcg

SEQ ID NO: 2795 - DNA, 20 bp, Artificial Sequence
  MKO10002795_A_Actbl2
  gRNA
tgccagatctagtcgtagaa

SEQ ID NO: 2796 - DNA, 20 bp, Artificial Sequence
  MKO10002796_A_Actb
  gRNA
ccttccacagggtgtgatgg

SEQ ID NO: 2797 - DNA, 20 bp, Artificial Sequence
  MKO10002797_A_Actb
  gRNA
caaccgtgaaaagatgaccc

SEQ ID NO: 2798 - DNA, 20 bp, Artificial Sequence
  MKO10002798_A_Actb
  gRNA
tacaacttacccaagaagga

SEQ ID NO: 2799 - DNA, 20 bp, Artificial Sequence
  MKO10002799_A_Actc1
  gRNA
aaaactgtgttacgtcgccc

SEQ ID NO: 2800 - DNA, 20 bp, Artificial Sequence
  MKO10002800_A_Actc1
  gRNA
tattgccgatcgtatgcaaa

SEQ ID NO: 2801 - DNA, 20 bp, Artificial Sequence
  MKO10002801_A_Actc1
  gRNA
tgccatgtatgtcgccatcc

SEQ ID NO: 2802 - DNA, 20 bp, Artificial Sequence
  MKO10002802_A_Actg1
  gRNA
tctctcgcagggcgtcatgg

SEQ ID NO: 2803 - DNA, 20 bp, Artificial Sequence
  MKO10002803_A_Actg1
  gRNA
taacagagagaagatgacgc

SEQ ID NO: 2804 - DNA, 20 bp, Artificial Sequence
  MKO10002804_A_Actg1
  gRNA
acctagcacgatgaagatta

SEQ ID NO: 2805 - DNA, 20 bp, Artificial Sequence
  MKO10002805_A_Actg2
  gRNA
ctactgacctgtggtacggc

SEQ ID NO: 2806 - DNA, 20 bp, Artificial Sequence
  MKO10002806_A_Actg2
  gRNA
gtgctctcactctatgcatc

SEQ ID NO: 2807 - DNA, 20 bp, Artificial Sequence
  MKO10002807_A_Actg2
  gRNA
tctgtccacaggcatcgttc

SEQ ID NO: 2808 - DNA, 20 bp, Artificial Sequence
  MKO10002808_A_Actl10
  gRNA
aatctcgaaagtagcgcgac

SEQ ID NO: 2809 - DNA, 20 bp, Artificial Sequence
  MKO10002809_A_Actl10
  gRNA
ctactttcgagatttgctag

SEQ ID NO: 2810 - DNA, 20 bp, Artificial Sequence
  MKO10002810_A_Actl10
  gRNA
ccatgagtgacccgcgtaga

SEQ ID NO: 2811 - DNA, 20 bp, Artificial Sequence
  MKO10002811_A_Actl11
  gRNA
cgagcgcttctgttgccccg

SEQ ID NO: 2812 - DNA, 20 bp, Artificial Sequence
  MKO10002812_A_Actl11
  gRNA
tccaattgacacctaccggc

SEQ ID NO: 2813 - DNA, 20 bp, Artificial Sequence
  MKO10002813_A_Actl11
  gRNA
cctgctaagcatcaatcggt

SEQ ID NO: 2814 - DNA, 20 bp, Artificial Sequence
  MKO10002814_A_Actl6a
  gRNA
ccaatgccctccgcgtgccc

SEQ ID NO: 2815 - DNA, 20 bp, Artificial Sequence
  MKO10002815_A_Actl6a
  gRNA
cccttctctagtggaacacc

SEQ ID NO: 2816 - DNA, 20 bp, Artificial Sequence
  MKO10002816_A_Actl6a
  gRNA
cttgtatgtatgatccaaaa

SEQ ID NO: 2817 - DNA, 20 bp, Artificial Sequence
  MKO10002817_A_Actl6b
  gRNA
gtcatgtcgcccctcaagaa

SEQ ID NO: 2818 - DNA, 20 bp, Artificial Sequence
  MKO10002818_A_Actl6b
  gRNA
ccaatgccctgcacgtgcct

SEQ ID NO: 2819 - DNA, 20 bp, Artificial Sequence
  MKO10002819_A_Actl6b
  gRNA
tgtaggatacgctgtgagca

SEQ ID NO: 2820 - DNA, 20 bp, Artificial Sequence
  MKO10002820_A_Actl7a
  gRNA
tttgcgattatcccccgtct

SEQ ID NO: 2821 - DNA, 20 bp, Artificial Sequence
  MKO10002821_A_Actl7a
  gRNA
gcccatgttcctcgtactcc

SEQ ID NO: 2822 - DNA, 20 bp, Artificial Sequence
  MKO10002822_A_Actl7a
  gRNA
gtgccccaacgacacccccc

SEQ ID NO: 2823 - DNA, 20 bp, Artificial Sequence
  MKO10002823_A_Actl7b
  gRNA
cggacacggcgtgtcgcatg

SEQ ID NO: 2824 - DNA, 20 bp, Artificial Sequence
  MKO10002824_A_Actl7b
  gRNA
gtttccccgagcgtttccag

SEQ ID NO: 2825 - DNA, 20 bp, Artificial Sequence
  MKO10002825_A_Actl7b
  gRNA
agcgtacttctcccggttgc

SEQ ID NO: 2826 - DNA, 20 bp, Artificial Sequence
  MKO10002826_A_Actl9
  gRNA
aggccgatgggcgacaatcc

SEQ ID NO: 2827 - DNA, 20 bp, Artificial Sequence
  MKO10002827_A_Actl9
  gRNA
cggaatgtgatactatgcgg

SEQ ID NO: 2828 - DNA, 20 bp, Artificial Sequence
  MKO10002828_A_Actl9
  gRNA
gcgtgtcaatggacttgttg

SEQ ID NO: 2829 - DNA, 20 bp, Artificial Sequence
  MKO10002829_A_Actn1
  gRNA
ctcttcatcaggtgaacgct

SEQ ID NO: 2830 - DNA, 20 bp, Artificial Sequence
  MKO10002830_A_Actn1
  gRNA
caactcccacctgcgcaaag

SEQ ID NO: 2831 - DNA, 20 bp, Artificial Sequence
  MKO10002831_A_Actn1
  gRNA
atccaaggccttgttgacgt

SEQ ID NO: 2832 - DNA, 20 bp, Artificial Sequence
  MKO10002832_A_Actn2
  gRNA
tcgcccacagaaatagtcga

SEQ ID NO: 2833 - DNA, 20 bp, Artificial Sequence
  MKO10002833_A_Actn2
  gRNA
cctcctcgatgttctcgatc

SEQ ID NO: 2834 - DNA, 20 bp, Artificial Sequence
  MKO10002834_A_Actn2
  gRNA
cacccagatcgagaacatcg

SEQ ID NO: 2835 - DNA, 20 bp, Artificial Sequence
  MKO10002835_A_Actn3
  gRNA
aactcacatctgcgcaaggc

SEQ ID NO: 2836 - DNA, 20 bp, Artificial Sequence
  MKO10002836_A_Actn3
  gRNA
gtctagggctttattgacat

SEQ ID NO: 2837 - DNA, 20 bp, Artificial Sequence
  MKO10002837_A_Actn3
  gRNA
agttctgtacgttgacattg

SEQ ID NO: 2838 - DNA, 20 bp, Artificial Sequence
  MKO10002838_A_Actn4
  gRNA
actcgcatcttcccccgctc

SEQ ID NO: 2839 - DNA, 20 bp, Artificial Sequence
  MKO10002839_A_Actn4
  gRNA
tcagatcgagaatatcgatg

SEQ ID NO: 2840 - DNA, 20 bp, Artificial Sequence
  MKO10002840_A_Actn4
  gRNA
agcgtttgcctaagccagag

SEQ ID NO: 2841 - DNA, 20 bp, Artificial Sequence
  MKO10002841_A_Actr10
  gRNA
tcccagagaccgccgcgttg

SEQ ID NO: 2842 - DNA, 20 bp, Artificial Sequence
  MKO10002842_A_Actr10
  gRNA
ccgactcgataaccacaacg

SEQ ID NO: 2843 - DNA, 20 bp, Artificial Sequence
  MKO10002843_A_Actr10
  gRNA
ctttgcaggtgtggattcgc

SEQ ID NO: 2844 - DNA, 20 bp, Artificial Sequence
  MKO10002844_A_Actr1a
  gRNA
cggggaattacctccgcttt

SEQ ID NO: 2845 - DNA, 20 bp, Artificial Sequence
  MKO10002845_A_Actr1a
  gRNA
tctacttgcaggagcaccgg

SEQ ID NO: 2846 - DNA, 20 bp, Artificial Sequence
  MKO10002846_A_Actr1a
  gRNA
gctgtcaatccgttacccca

SEQ ID NO: 2847 - DNA, 20 bp, Artificial Sequence
  MKO10002847_A_Actr1b
  gRNA
ccgtaccacaccgtgttcca

SEQ ID NO: 2848 - DNA, 20 bp, Artificial Sequence
  MKO10002848_A_Actr1b
  gRNA
tcggacggccaaagcacatg

SEQ ID NO: 2849 - DNA, 20 bp, Artificial Sequence
  MKO10002849_A_Actr1b
  gRNA
gccataacccgcatgtgctt

SEQ ID NO: 2850 - DNA, 20 bp, Artificial Sequence
  MKO10002850_A_Actr2
  gRNA
atcttgtaggaccttatggt

SEQ ID NO: 2851 - DNA, 20 bp, Artificial Sequence
  MKO10002851_A_Actr2
  gRNA
ccgcacgatgccattctcca

SEQ ID NO: 2852 - DNA, 20 bp, Artificial Sequence
  MKO10002852_A_Actr2
  gRNA
tcttgtgcaggtttactgac

SEQ ID NO: 2853 - DNA, 20 bp, Artificial Sequence
  MKO10002853_A_Actr3b
  gRNA
tcaacgatgccatgtcgtat

SEQ ID NO: 2854 - DNA, 20 bp, Artificial Sequence
  MKO10002854_A_Actr3b
  gRNA
cgccatccgagaatctgcaa

SEQ ID NO: 2855 - DNA, 20 bp, Artificial Sequence
  MKO10002855_A_Actr3b
  gRNA
ctccagtggcctatacgaca

SEQ ID NO: 2856 - DNA, 20 bp, Artificial Sequence
  MKO10002856_A_Actr3
  gRNA
taatagtggccaattcgcca

SEQ ID NO: 2857 - DNA, 20 bp, Artificial Sequence
  MKO10002857_A_Actr3
  gRNA
acatacctttgttgcatatg

SEQ ID NO: 2858 - DNA, 20 bp, Artificial Sequence
  MKO10002858_A_Actr3
  gRNA
tttgaatccttcaatgttcc

SEQ ID NO: 2859 - DNA, 20 bp, Artificial Sequence
  MKO10002859_A_Actr5
  gRNA
tgcaagagctcaacgcccgg

SEQ ID NO: 2860 - DNA, 20 bp, Artificial Sequence
  MKO10002860_A_Actr5
  gRNA
acattgttctcgtagtaatc

SEQ ID NO: 2861 - DNA, 20 bp, Artificial Sequence
  MKO10002861_A_Actr5
  gRNA
gtcacctgccccgtagtcct

SEQ ID NO: 2862 - DNA, 20 bp, Artificial Sequence
  MKO10002862_A_Actr6
  gRNA
gataatcccaaacttgtcgc

SEQ ID NO: 2863 - DNA, 20 bp, Artificial Sequence
  MKO10002863_A_Actr6
  gRNA
tgctgcatcattgtcgacag

SEQ ID NO: 2864 - DNA, 20 bp, Artificial Sequence
  MKO10002864_A_Actr6
  gRNA
tttagggatacttggtgaat

SEQ ID NO: 2865 - DNA, 20 bp, Artificial Sequence
  MKO10002865_A_Actr8
  gRNA
aggtcgcatctgcttgttgt

SEQ ID NO: 2866 - DNA, 20 bp, Artificial Sequence
  MKO10002866_A_Actr8
  gRNA
ggccttgtatgttaaccccc

SEQ ID NO: 2867 - DNA, 20 bp, Artificial Sequence
  MKO10002867_A_Actr8
  gRNA
tgtcttcgtgcaatgacgtg

SEQ ID NO: 2868 - DNA, 20 bp, Artificial Sequence
  MKO10002868_A_Actrt1
  gRNA
gttaccagtccacgctcaat

SEQ ID NO: 2869 - DNA, 20 bp, Artificial Sequence
  MKO10002869_A_Actrt1
  gRNA
tatctttgcaaccacgcagt

SEQ ID NO: 2870 - DNA, 20 bp, Artificial Sequence
  MKO10002870_A_Actrt1
  gRNA
ctacactatcctattgagcg

SEQ ID NO: 2871 - DNA, 20 bp, Artificial Sequence
  MKO10002871_A_Actrt2
  gRNA
tcacagcgccgcccgaccgc

SEQ ID NO: 2872 - DNA, 20 bp, Artificial Sequence
  MKO10002872_A_Actrt2
  gRNA
ggagggttccgtcacgagca

SEQ ID NO: 2873 - DNA, 20 bp, Artificial Sequence
  MKO10002873_A_Actrt2
  gRNA
cgaacgacccgtgctcgtga

SEQ ID NO: 2874 - DNA, 20 bp, Artificial Sequence
  MKO10002874_A_Actrt3
  gRNA
gagccgttgtcgatcaccac

SEQ ID NO: 2875 - DNA, 20 bp, Artificial Sequence
  MKO10002875_A_Actrt3
  gRNA
aagacgttgatcctcccgaa

SEQ ID NO: 2876 - DNA, 20 bp, Artificial Sequence
  MKO10002876_A_Actrt3
  gRNA
tataacctgtacggcagtat

SEQ ID NO: 2877 - DNA, 20 bp, Artificial Sequence
  MKO10002877_A_Acvr1b
  gRNA
gtgtctaccataaccgccag

SEQ ID NO: 2878 - DNA, 20 bp, Artificial Sequence
  MKO10002878_A_Acvr1b
  gRNA
gtctacgacctctccacgtc

SEQ ID NO: 2879 - DNA, 20 bp, Artificial Sequence
  MKO10002879_A_Acvr1b
  gRNA
agggccggttcggggaagta

SEQ ID NO: 2880 - DNA, 20 bp, Artificial Sequence
  MKO10002880_A_Acvr1c
  gRNA
tgtgtcagagtatcacgagc

SEQ ID NO: 2881 - DNA, 20 bp, Artificial Sequence
  MKO10002881_A_Acvr1c
  gRNA
tgtcagctgcgatgaaaccg

SEQ ID NO: 2882 - DNA, 20 bp, Artificial Sequence
  MKO10002882_A_Acvr1c
  gRNA
tctgataaatttccgcctca

SEQ ID NO: 2883 - DNA, 20 bp, Artificial Sequence
  MKO10002883_A_Acvr1
  gRNA
tgtaagaccccgccgtcacc

SEQ ID NO: 2884 - DNA, 20 bp, Artificial Sequence
  MKO10002884_A_Acvr1
  gRNA
acagtggtcctcgttcccgc

SEQ ID NO: 2885 - DNA, 20 bp, Artificial Sequence
  MKO10002885_A_Acvr1
  gRNA
aattaccgacacactccaac

SEQ ID NO: 2886 - DNA, 20 bp, Artificial Sequence
  MKO10002886_A_Acvr2a
  gRNA
ccacatattcattgagcaac

SEQ ID NO: 2887 - DNA, 20 bp, Artificial Sequence
  MKO10002887_A_Acvr2a
  gRNA
acttgagtaggaacaagtac

SEQ ID NO: 2888 - DNA, 20 bp, Artificial Sequence
  MKO10002888_A_Acvr2a
  gRNA
cggtgtaacaggatttgaag

SEQ ID NO: 2889 - DNA, 20 bp, Artificial Sequence
  MKO10002889_A_Acvr2b
  gRNA
gcccgagctgttgcgccacg

SEQ ID NO: 2890 - DNA, 20 bp, Artificial Sequence
  MKO10002890_A_Acvr2b
  gRNA
cgagcgcttcacccacttgc

SEQ ID NO: 2891 - DNA, 20 bp, Artificial Sequence
  MKO10002891_A_Acvr2b
  gRNA
gcatctactacaacgccaac

SEQ ID NO: 2892 - DNA, 20 bp, Artificial Sequence
  MKO10002892_A_Acvrl1
  gRNA
ccgtagtacagtcgctgtcc

SEQ ID NO: 2893 - DNA, 20 bp, Artificial Sequence
  MKO10002893_A_Acvrl1
  gRNA
tcccgcagccccgatagacc

SEQ ID NO: 2894 - DNA, 20 bp, Artificial Sequence
  MKO10002894_A_Acvrl1
  gRNA
ccaggactgctcatctcgtg

SEQ ID NO: 2895 - DNA, 20 bp, Artificial Sequence
  MKO10002895_A_Acy1
  gRNA
gggagtgacgggttggtgcc

SEQ ID NO: 2896 - DNA, 20 bp, Artificial Sequence
  MKO10002896_A_Acy1
  gRNA
gcgagggccaccgattccct

SEQ ID NO: 2897 - DNA, 20 bp, Artificial Sequence
  MKO10002897_A_Acy1
  gRNA
aggaggggccatcaccttcc

SEQ ID NO: 2898 - DNA, 20 bp, Artificial Sequence
  MKO10002898_A_Acy3
  gRNA
tcggcccgcagcacgccctg

SEQ ID NO: 2899 - DNA, 20 bp, Artificial Sequence
  MKO10002899_A_Acy3
  gRNA
gttctcccggatgcgagctc

SEQ ID NO: 2900 - DNA, 20 bp, Artificial Sequence
  MKO10002900_A_Acy3
  gRNA
tagggaccacctgtaggtag

SEQ ID NO: 2901 - DNA, 20 bp, Artificial Sequence
  MKO10002901_A_Acyp1
  gRNA
gctgggttcagaacaccgac

SEQ ID NO: 2902 - DNA, 20 bp, Artificial Sequence
  MKO10002902_A_Acyp1
  gRNA
ctgctgcatgaagcgcacct

SEQ ID NO: 2903 - DNA, 20 bp, Artificial Sequence
  MKO10002903_A_Acyp1
  gRNA
ttcgtaatccactgagacca

SEQ ID NO: 2904 - DNA, 20 bp, Artificial Sequence
  MKO10002904_A_Acyp2
  gRNA
gtcctagttctcgcatcgac

SEQ ID NO: 2905 - DNA, 20 bp, Artificial Sequence
  MKO10002905_A_Acyp2
  gRNA
gaagtgttcgggacagtgca

SEQ ID NO: 2906 - DNA, 20 bp, Artificial Sequence
  MKO10002906_A_Acyp2
  gRNA
atacccagctaatgctgctc

SEQ ID NO: 2907 - DNA, 20 bp, Artificial Sequence
  MKO10002907_A_Adad1
  gRNA
acctgtcacttgcgtaacct

SEQ ID NO: 2908 - DNA, 20 bp, Artificial Sequence
  MKO10002908_A_Adad1
  gRNA
tcttgacgagcttctacaac

SEQ ID NO: 2909 - DNA, 20 bp, Artificial Sequence
  MKO10002909_A_Adad1
  gRNA
aagttgtagtctgtcgaata

SEQ ID NO: 2910 - DNA, 20 bp, Artificial Sequence
  MKO10002910_A_Adad2
  gRNA
atggtctggtcatcgcccgc

SEQ ID NO: 2911 - DNA, 20 bp, Artificial Sequence
  MKO10002911_A_Adad2
  gRNA
gagtgagagctcaccgtacc

SEQ ID NO: 2912 - DNA, 20 bp, Artificial Sequence
  MKO10002912_A_Adad2
  gRNA
tgcagccaccgtccccttac

SEQ ID NO: 2913 - DNA, 20 bp, Artificial Sequence
  MKO10002913_A_Adal
  gRNA
tcagcttactactagtgctg

SEQ ID NO: 2914 - DNA, 20 bp, Artificial Sequence
  MKO10002914_A_Adal
  gRNA
aagccacatcttaacgttca

SEQ ID NO: 2915 - DNA, 20 bp, Artificial Sequence
  MKO10002915_A_Adal
  gRNA
ggtcacaaaagacgtcatta

SEQ ID NO: 2916 - DNA, 20 bp, Artificial Sequence
  MKO10002916_A_Adam10
  gRNA
agttcaacctacgaatgaag

SEQ ID NO: 2917 - DNA, 20 bp, Artificial Sequence
  MKO10002917_A_Adam10
  gRNA
caaacgagcagtctcacatg

SEQ ID NO: 2918 - DNA, 20 bp, Artificial Sequence
  MKO10002918_A_Adam10
  gRNA
ctcatgtgagactgctcgtt

SEQ ID NO: 2919 - DNA, 20 bp, Artificial Sequence
  MKO10002919_A_Adam11
  gRNA
ccgggatgacgaaactcacc

SEQ ID NO: 2920 - DNA, 20 bp, Artificial Sequence
  MKO10002920_A_Adam11
  gRNA
gggtccgccaggatccgccc

SEQ ID NO: 2921 - DNA, 20 bp, Artificial Sequence
  MKO10002921_A_Adam11
  gRNA
ttaccgcttctccccccgcc

SEQ ID NO: 2922 - DNA, 20 bp, Artificial Sequence
  MKO10002922_A_Adam12
  gRNA
ccagagaggaacttacgaag

SEQ ID NO: 2923 - DNA, 20 bp, Artificial Sequence
  MKO10002923_A_Adam12
  gRNA
ccacttcgtaagttcctctc

SEQ ID NO: 2924 - DNA, 20 bp, Artificial Sequence
  MKO10002924_A_Adam12
  gRNA
caggatcattgttactacca

SEQ ID NO: 2925 - DNA, 20 bp, Artificial Sequence
  MKO10002925_A_Adam15
  gRNA
tccccgccgctgccaaatat

SEQ ID NO: 2926 - DNA, 20 bp, Artificial Sequence
  MKO10002926_A_Adam15
  gRNA
gagcctagcagacgtgcttc

SEQ ID NO: 2927 - DNA, 20 bp, Artificial Sequence
  MKO10002927_A_Adam15
  gRNA
tcacctgaagcacgtctgct

SEQ ID NO: 2928 - DNA, 20 bp, Artificial Sequence
  MKO10002928_A_Adam17
  gRNA
aaagcgagtacagcgtgaag

SEQ ID NO: 2929 - DNA, 20 bp, Artificial Sequence
  MKO10002929_A_Adam17
  gRNA
gaacttcttcagtggtcacg

SEQ ID NO: 2930 - DNA, 20 bp, Artificial Sequence
  MKO10002930_A_Adam17
  gRNA
gtgctgctgaatattagcta

SEQ ID NO: 2931 - DNA, 20 bp, Artificial Sequence
  MKO10002931_A_Adam18
  gRNA
tctgcggcactgtgatatgc

SEQ ID NO: 2932 - DNA, 20 bp, Artificial Sequence
  MKO10002932_A_Adam18
  gRNA
acatacgtcattaccattga

SEQ ID NO: 2933 - DNA, 20 bp, Artificial Sequence
  MKO10002933_A_Adam18
  gRNA
tctgcatctccgcccttgcg

SEQ ID NO: 2934 - DNA, 20 bp, Artificial Sequence
  MKO10002934_A_Adam19
  gRNA
ccacgtccctcacagtcccg

SEQ ID NO: 2935 - DNA, 20 bp, Artificial Sequence
  MKO10002935_A_Adam19
  gRNA
attgccacttgcagtgtagc

SEQ ID NO: 2936 - DNA, 20 bp, Artificial Sequence
  MKO10002936_A_Adam19
  gRNA
gggcctcttacctaattccc

SEQ ID NO: 2937 - DNA, 20 bp, Artificial Sequence
  MKO10002937_A_Adam1a
  gRNA
ttcgccaacatgtacgctta

SEQ ID NO: 2938 - DNA, 20 bp, Artificial Sequence
  MKO10002938_A_Adam1a
  gRNA
taatgctgatcgcctacctc

SEQ ID NO: 2939 - DNA, 20 bp, Artificial Sequence
  MKO10002939_A_Adam1a
  gRNA
ccctccttaagcgtacatgt

SEQ ID NO: 2940 - DNA, 20 bp, Artificial Sequence
  MKO10002940_A_Adam1b
  gRNA
taacttaaagctgatcgtcc

SEQ ID NO: 2941 - DNA, 20 bp, Artificial Sequence
  MKO10002941_A_Adam1b
  gRNA
ccagatggagcgactaaagc

SEQ ID NO: 2942 - DNA, 20 bp, Artificial Sequence
  MKO10002942_A_Adam1b
  gRNA
tgcacctcccgactgcaaag

SEQ ID NO: 2943 - DNA, 20 bp, Artificial Sequence
  MKO10002943_A_Adam20
  gRNA
tactaccaattgtttgcgca

SEQ ID NO: 2944 - DNA, 20 bp, Artificial Sequence
  MKO10002944_A_Adam20
  gRNA
tgaaggaaatcttgtgcccg

SEQ ID NO: 2945 - DNA, 20 bp, Artificial Sequence
  MKO10002945_A_Adam20
  gRNA
taatgagtcagaagcgcaac

SEQ ID NO: 2946 - DNA, 20 bp, Artificial Sequence
  MKO10002946_A_Adam21
  gRNA
tccgttaaactacatagcat

SEQ ID NO: 2947 - DNA, 20 bp, Artificial Sequence
  MKO10002947_A_Adam21
  gRNA
gtctacggccaccaaataca

SEQ ID NO: 2948 - DNA, 20 bp, Artificial Sequence
  MKO10002948_A_Adam21
  gRNA
acagcttcttgactcgcata

SEQ ID NO: 2949 - DNA, 20 bp, Artificial Sequence
  MKO10002949_A_Adam22
  gRNA
tgtagcgagttgctgtcgtc

SEQ ID NO: 2950 - DNA, 20 bp, Artificial Sequence
  MKO10002950_A_Adam22
  gRNA
ccactcacctgcggtccgcc

SEQ ID NO: 2951 - DNA, 20 bp, Artificial Sequence
  MKO10002951_A_Adam22
  gRNA
cccgcacccgcgtgtcgagc

SEQ ID NO: 2952 - DNA, 20 bp, Artificial Sequence
  MKO10002952_A_Adam23
  gRNA
ctcccggcggccgaccctga

SEQ ID NO: 2953 - DNA, 20 bp, Artificial Sequence
  MKO10002953_A_Adam23
  gRNA
cgatgagccatgaagccgcc

SEQ ID NO: 2954 - DNA, 20 bp, Artificial Sequence
  MKO10002954_A_Adam23
  gRNA
tggagccgaaagcttcgatc

SEQ ID NO: 2955 - DNA, 20 bp, Artificial Sequence
  MKO10002955_A_Adam24
  gRNA
tacaaggaactcaatactcg

SEQ ID NO: 2956 - DNA, 20 bp, Artificial Sequence
  MKO10002956_A_Adam24
  gRNA
caattacgccccatgagatg

SEQ ID NO: 2957 - DNA, 20 bp, Artificial Sequence
  MKO10002957_A_Adam24
  gRNA
taggggttagcccattcatc

SEQ ID NO: 2958 - DNA, 20 bp, Artificial Sequence
  MKO10002958_A_Adam25
  gRNA
ctatgctacgtacctgcacg

SEQ ID NO: 2959 - DNA, 20 bp, Artificial Sequence
  MKO10002959_A_Adam25
  gRNA
tactgccaagtgtatgcgca

SEQ ID NO: 2960 - DNA, 20 bp, Artificial Sequence
  MKO10002960_A_Adam25
  gRNA
acgtattatagcacatgaga

SEQ ID NO: 2961 - DNA, 20 bp, Artificial Sequence
  MKO10002961_A_Adam26a
  gRNA
ccaccagactgtcaaaaacg

SEQ ID NO: 2962 - DNA, 20 bp, Artificial Sequence
  MKO10002962_A_Adam26a
  gRNA
acacattgtagcacacgaga

SEQ ID NO: 2963 - DNA, 20 bp, Artificial Sequence
  MKO10002963_A_Adam26a
  gRNA
caaattgctgatgtactctg

SEQ ID NO: 2964 - DNA, 20 bp, Artificial Sequence
  MKO10002964_A_Adam26b
  gRNA
gtataaaatatgcgagctcg

SEQ ID NO: 2965 - DNA, 20 bp, Artificial Sequence
  MKO10002965_A_Adam26b
  gRNA
tgcatgtcccaaattctagt

SEQ ID NO: 2966 - DNA, 20 bp, Artificial Sequence
  MKO10002966_A_Adam26b
  gRNA
ctttagttggcataaccaag

SEQ ID NO: 2967 - DNA, 20 bp, Artificial Sequence
  MKO10002967_A_Adam28
  gRNA
gctccttgcgcctgactact

SEQ ID NO: 2968 - DNA, 20 bp, Artificial Sequence
  MKO10002968_A_Adam28
  gRNA
caccacaagcccgcaaatca

SEQ ID NO: 2969 - DNA, 20 bp, Artificial Sequence
  MKO10002969_A_Adam28
  gRNA
gggatcgcagaatgcagcaa

SEQ ID NO: 2970 - DNA, 20 bp, Artificial Sequence
  MKO10002970_A_Adam29
  gRNA
acaactgcacaactacgttt

SEQ ID NO: 2971 - DNA, 20 bp, Artificial Sequence
  MKO10002971_A_Adam29
  gRNA
agtgttcacctactctgatc

SEQ ID NO: 2972 - DNA, 20 bp, Artificial Sequence
  MKO10002972_A_Adam29
  gRNA
actttgaaccttcgtgccat

SEQ ID NO: 2973 - DNA, 20 bp, Artificial Sequence
  MKO10002973_A_Adam2
  gRNA
gtatacagttatgacaacgc

SEQ ID NO: 2974 - DNA, 20 bp, Artificial Sequence
  MKO10002974_A_Adam2
  gRNA
aagcaatggctacgaaacac

SEQ ID NO: 2975 - DNA, 20 bp, Artificial Sequence
  MKO10002975_A_Adam2
  gRNA
acctacaatctcaaaatcga

SEQ ID NO: 2976 - DNA, 20 bp, Artificial Sequence
  MKO10002976_A_Adam30
  gRNA
atacaccacgtgttcgaaac

SEQ ID NO: 2977 - DNA, 20 bp, Artificial Sequence
  MKO10002977_A_Adam30
  gRNA
accagaccagtgtaattacg

SEQ ID NO: 2978 - DNA, 20 bp, Artificial Sequence
  MKO10002978_A_Adam30
  gRNA
acacacccgattacgaccac

SEQ ID NO: 2979 - DNA, 20 bp, Artificial Sequence
  MKO10002979_A_Adam32
  gRNA
ttaaatcttaccggaatgtt

SEQ ID NO: 2980 - DNA, 20 bp, Artificial Sequence
  MKO10002980_A_Adam32
  gRNA
acactgtgcacctccagaaa

SEQ ID NO: 2981 - DNA, 20 bp, Artificial Sequence
  MKO10002981_A_Adam32
  gRNA
tcagtccagagcatgtgctg

SEQ ID NO: 2982 - DNA, 20 bp, Artificial Sequence
  MKO10002982_A_Adam33
  gRNA
ggatacttaccggctcctcc

SEQ ID NO: 2983 - DNA, 20 bp, Artificial Sequence
  MKO10002983_A_Adam33
  gRNA
agcactaccggatgcccatc

SEQ ID NO: 2984 - DNA, 20 bp, Artificial Sequence
  MKO10002984_A_Adam33
  gRNA
tgctgccctcgtgtccgctg

SEQ ID NO: 2985 - DNA, 20 bp, Artificial Sequence
  MKO10002985_A_Adam34
  gRNA
gtgagcgatggcacaacttg

SEQ ID NO: 2986 - DNA, 20 bp, Artificial Sequence
  MKO10002986_A_Adam34
  gRNA
aacctgatgccaaccatgtg

SEQ ID NO: 2987 - DNA, 20 bp, Artificial Sequence
  MKO10002987_A_Adam34
  gRNA
ctgtgaacacataaatagtc

SEQ ID NO: 2988 - DNA, 20 bp, Artificial Sequence
  MKO10002988_A_Adam39
  gRNA
ttatgttacgtccctgcacg

SEQ ID NO: 2989 - DNA, 20 bp, Artificial Sequence
  MKO10002989_A_Adam39
  gRNA
ttcgagataccattatctgc

SEQ ID NO: 2990 - DNA, 20 bp, Artificial Sequence
  MKO10002990_A_Adam39
  gRNA
acctttcatgctgcatgtag

SEQ ID NO: 2991 - DNA, 20 bp, Artificial Sequence
  MKO10002991_A_Adam3
  gRNA
gttgtcacaggtcacttacg

SEQ ID NO: 2992 - DNA, 20 bp, Artificial Sequence
  MKO10002992_A_Adam3
  gRNA
aacatatttgcgtgacaagt

SEQ ID NO: 2993 - DNA, 20 bp, Artificial Sequence
  MKO10002993_A_Adam3
  gRNA
gaaaatcgacaccaacatcc

SEQ ID NO: 2994 - DNA, 20 bp, Artificial Sequence
  MKO10002994_A_Adam4
  gRNA
aaaggtggtagtacaaatag

SEQ ID NO: 2995 - DNA, 20 bp, Artificial Sequence
  MKO10002995_A_Adam4
  gRNA
atgtatgaagttcctcgttg

SEQ ID NO: 2996 - DNA, 20 bp, Artificial Sequence
  MKO10002996_A_Adam4
  gRNA
tgtggcattagaatcatacg

SEQ ID NO: 2997 - DNA, 20 bp, Artificial Sequence
  MKO10002997_A_Adam5
  gRNA
ttctcaacctttgtcagctc

SEQ ID NO: 2998 - DNA, 20 bp, Artificial Sequence
  MKO10002998_A_Adam5
  gRNA
tgagggtcacgatagagttt

SEQ ID NO: 2999 - DNA, 20 bp, Artificial Sequence
  MKO10002999_A_Adam5
  gRNA
gtgaccctcaccgtttgcac

SEQ ID NO: 3000 - DNA, 20 bp, Artificial Sequence
  MKO10003000_A_Adam6a
  gRNA
tctcatgactgtgtataccg

SEQ ID NO: 3001 - DNA, 20 bp, Artificial Sequence
  MKO10003001_A_Adam6a
  gRNA
ttagagccactacagtactc

SEQ ID NO: 3002 - DNA, 20 bp, Artificial Sequence
  MKO10003002_A_Adam6a
  gRNA
ataattaacaagaattcgcc

SEQ ID NO: 3003 - DNA, 20 bp, Artificial Sequence
  MKO10003003_A_Adam6b
  gRNA
taattataagccgaccctcc

SEQ ID NO: 3004 - DNA, 20 bp, Artificial Sequence
  MKO10003004_A_Adam6b
  gRNA
ttgcaagctactttacgttc

SEQ ID NO: 3005 - DNA, 20 bp, Artificial Sequence
  MKO10003005_A_Adam6b
  gRNA
ttagtcccattacagtactc

SEQ ID NO: 3006 - DNA, 20 bp, Artificial Sequence
  MKO10003006_A_Adam7
  gRNA
ataccggtatgtcagagtca

SEQ ID NO: 3007 - DNA, 20 bp, Artificial Sequence
  MKO10003007_A_Adam7
  gRNA
gctagtatcagcacttgcaa

SEQ ID NO: 3008 - DNA, 20 bp, Artificial Sequence
  MKO10003008_A_Adam7
  gRNA
aagatcccgtttgtgtagca

SEQ ID NO: 3009 - DNA, 20 bp, Artificial Sequence
  MKO10003009_A_Adam8
  gRNA
cagggtgaaaacgtgcccgc

SEQ ID NO: 3010 - DNA, 20 bp, Artificial Sequence
  MKO10003010_A_Adam8
  gRNA
cggcttacctgttctttcga

SEQ ID NO: 3011 - DNA, 20 bp, Artificial Sequence
  MKO10003011_A_Adam8
  gRNA
agccctcgtacccttccaca

SEQ ID NO: 3012 - DNA, 20 bp, Artificial Sequence
  MKO10003012_A_Adam9
  gRNA
ggcaggttccgctcaacgcg

SEQ ID NO: 3013 - DNA, 20 bp, Artificial Sequence
  MKO10003013_A_Adam9
  gRNA
gtcctcgaggccgggcgacc

SEQ ID NO: 3014 - DNA, 20 bp, Artificial Sequence
  MKO10003014_A_Adam9
  gRNA
ctctgaccatcccaacgtac

SEQ ID NO: 3015 - DNA, 20 bp, Artificial Sequence
  MKO10003015_A_Adamdec1
  gRNA
ttaggacgaactatttcgtg

SEQ ID NO: 3016 - DNA, 20 bp, Artificial Sequence
  MKO10003016_A_Adamdec1
  gRNA
ccaaaatgcaaggggctctc

SEQ ID NO: 3017 - DNA, 20 bp, Artificial Sequence
  MKO10003017_A_Adamdec1
  gRNA
ccagagagccccttgcattt

SEQ ID NO: 3018 - DNA, 20 bp, Artificial Sequence
  MKO10003018_A_Adamts10
  gRNA
gattgccttcccaactcgag

SEQ ID NO: 3019 - DNA, 20 bp, Artificial Sequence
  MKO10003019_A_Adamts10
  gRNA
cgggcccactgcctatacgc

SEQ ID NO: 3020 - DNA, 20 bp, Artificial Sequence
  MKO10003020_A_Adamts10
  gRNA
tcatcttgtcggctaccacc

SEQ ID NO: 3021 - DNA, 20 bp, Artificial Sequence
  MKO10003021_A_Adamts12
  gRNA
cctaccctcatgtcgtatac

SEQ ID NO: 3022 - DNA, 20 bp, Artificial Sequence
  MKO10003022_A_Adamts12
  gRNA
ctcccgacgttccataagca

SEQ ID NO: 3023 - DNA, 20 bp, Artificial Sequence
  MKO10003023_A_Adamts12
  gRNA
ccaccagcatcgacttggac

SEQ ID NO: 3024 - DNA, 20 bp, Artificial Sequence
  MKO10003024_A_Adamts13
  gRNA
cgatcaacccccacgatgac

SEQ ID NO: 3025 - DNA, 20 bp, Artificial Sequence
  MKO10003025_A_Adamts13
  gRNA
ccactcgcagacgctcatca

SEQ ID NO: 3026 - DNA, 20 bp, Artificial Sequence
  MKO10003026_A_Adamts13
  gRNA
ttagcttcaccaggtgcacc

SEQ ID NO: 3027 - DNA, 20 bp, Artificial Sequence
  MKO10003027_A_Adamts14
  gRNA
cttcccggcggtataccaca

SEQ ID NO: 3028 - DNA, 20 bp, Artificial Sequence
  MKO10003028_A_Adamts14
  gRNA
gatttaccatgacgaatcgc

SEQ ID NO: 3029 - DNA, 20 bp, Artificial Sequence
  MKO10003029_A_Adamts14
  gRNA
aagcggcgacacgccaagcc

SEQ ID NO: 3030 - DNA, 20 bp, Artificial Sequence
  MKO10003030_A_Adamts15
  gRNA
gaaataccgatcttgcaact

SEQ ID NO: 3031 - DNA, 20 bp, Artificial Sequence
  MKO10003031_A_Adamts15
  gRNA
agattgaccgtgccaacccc

SEQ ID NO: 3032 - DNA, 20 bp, Artificial Sequence
  MKO10003032_A_Adamts15
  gRNA
cacaggtggtagccccgcat

SEQ ID NO: 3033 - DNA, 20 bp, Artificial Sequence
  MKO10003033_A_Adamts16
  gRNA
tcaagagcgagcgcttgtgt

SEQ ID NO: 3034 - DNA, 20 bp, Artificial Sequence
  MKO10003034_A_Adamts16
  gRNA
acgaagtcctgatgatcacc

SEQ ID NO: 3035 - DNA, 20 bp, Artificial Sequence
  MKO10003035_A_Adamts16
  gRNA
caagatgtagaggtcatcgt

SEQ ID NO: 3036 - DNA, 20 bp, Artificial Sequence
  MKO10003036_A_Adamts17
  gRNA
tataggtcgcgcccaaaggc

SEQ ID NO: 3037 - DNA, 20 bp, Artificial Sequence
  MKO10003037_A_Adamts17
  gRNA
gccgacatggtgcagtacca

SEQ ID NO: 3038 - DNA, 20 bp, Artificial Sequence
  MKO10003038_A_Adamts17
  gRNA
ttacggggcgttgtctcaga

SEQ ID NO: 3039 - DNA, 20 bp, Artificial Sequence
  MKO10003039_A_Adamts18
  gRNA
ccgcccgagtccacttctac

SEQ ID NO: 3040 - DNA, 20 bp, Artificial Sequence
  MKO10003040_A_Adamts18
  gRNA
atattcgtcaaagcgtagat

SEQ ID NO: 3041 - DNA, 20 bp, Artificial Sequence
  MKO10003041_A_Adamts18
  gRNA
agtgaccaggatatgtccgc

SEQ ID NO: 3042 - DNA, 20 bp, Artificial Sequence
  MKO10003042_A_Adamts19
  gRNA
cggtctcgatgttgtattcc

SEQ ID NO: 3043 - DNA, 20 bp, Artificial Sequence
  MKO10003043_A_Adamts19
  gRNA
ccgtggtaggaaaccattgc

SEQ ID NO: 3044 - DNA, 20 bp, Artificial Sequence
  MKO10003044_A_Adamts19
  gRNA
ccgtggcgttcagcgactcc

SEQ ID NO: 3045 - DNA, 20 bp, Artificial Sequence
  MKO10003045_A_Adamts1
  gRNA
tgtgtccagcccccgttatg

SEQ ID NO: 3046 - DNA, 20 bp, Artificial Sequence
  MKO10003046_A_Adamts1
  gRNA
agccgacttacccaattcat

SEQ ID NO: 3047 - DNA, 20 bp, Artificial Sequence
  MKO10003047_A_Adamts1
  gRNA
ggactggtcagctacgagca

SEQ ID NO: 3048 - DNA, 20 bp, Artificial Sequence
  MKO10003048_A_Adamts20
  gRNA
tccgaactcattgacccgcg

SEQ ID NO: 3049 - DNA, 20 bp, Artificial Sequence
  MKO10003049_A_Adamts20
  gRNA
cgaccttaccctgtcgtggg

SEQ ID NO: 3050 - DNA, 20 bp, Artificial Sequence
  MKO10003050_A_Adamts20
  gRNA
atcgtcatgcgcactcccat

SEQ ID NO: 3051 - DNA, 20 bp, Artificial Sequence
  MKO10003051_A_Adamts2
  gRNA
aatgttgtagtcatcgtccg

SEQ ID NO: 3052 - DNA, 20 bp, Artificial Sequence
  MKO10003052_A_Adamts2
  gRNA
tggcccccggagccacgagc

SEQ ID NO: 3053 - DNA, 20 bp, Artificial Sequence
  MKO10003053_A_Adamts2
  gRNA
ggagttctttatcgaacctc

SEQ ID NO: 3054 - DNA, 20 bp, Artificial Sequence
  MKO10003054_A_Adamts3
  gRNA
ctgaagcacttccgtgtaga

SEQ ID NO: 3055 - DNA, 20 bp, Artificial Sequence
  MKO10003055_A_Adamts3
  gRNA
ccagttagcacgaatctaaa

SEQ ID NO: 3056 - DNA, 20 bp, Artificial Sequence
  MKO10003056_A_Adamts3
  gRNA
ccaggctggtactgacgaaa

SEQ ID NO: 3057 - DNA, 20 bp, Artificial Sequence
  MKO10003057_A_Adamts4
  gRNA
cgcgtcaccaccaagttgac

SEQ ID NO: 3058 - DNA, 20 bp, Artificial Sequence
  MKO10003058_A_Adamts4
  gRNA
ggtgacgcgcctggtgatcc

SEQ ID NO: 3059 - DNA, 20 bp, Artificial Sequence
  MKO10003059_A_Adamts4
  gRNA
gagcctccggtttgtctaag

SEQ ID NO: 3060 - DNA, 20 bp, Artificial Sequence
  MKO10003060_A_Adamts5
  gRNA
ctcccgggcaggatttatgt

SEQ ID NO: 3061 - DNA, 20 bp, Artificial Sequence
  MKO10003061_A_Adamts5
  gRNA
cgttgggaccatatgttctc

SEQ ID NO: 3062 - DNA, 20 bp, Artificial Sequence
  MKO10003062_A_Adamts5
  gRNA
ggtcagtgttctcgctcatg

SEQ ID NO: 3063 - DNA, 20 bp, Artificial Sequence
  MKO10003063_A_Adamts6
  gRNA
gcctctaaagaatactacag

SEQ ID NO: 3064 - DNA, 20 bp, Artificial Sequence
  MKO10003064_A_Adamts6
  gRNA
ttagacaactgtcactacac

SEQ ID NO: 3065 - DNA, 20 bp, Artificial Sequence
  MKO10003065_A_Adamts6
  gRNA
ctttatcgtgactccagtct

SEQ ID NO: 3066 - DNA, 20 bp, Artificial Sequence
  MKO10003066_A_Adamts7
  gRNA
tcgcgcttgcgcagcacccg

SEQ ID NO: 3067 - DNA, 20 bp, Artificial Sequence
  MKO10003067_A_Adamts7
  gRNA
cattgtgcgccttatcatac

SEQ ID NO: 3068 - DNA, 20 bp, Artificial Sequence
  MKO10003068_A_Adamts7
  gRNA
gcagccattagcgcctgcga

SEQ ID NO: 3069 - DNA, 20 bp, Artificial Sequence
  MKO10003069_A_Adamts8
  gRNA
gctcatcactatcccgatga

SEQ ID NO: 3070 - DNA, 20 bp, Artificial Sequence
  MKO10003070_A_Adamts8
  gRNA
cccccgttgtccgacacctc

SEQ ID NO: 3071 - DNA, 20 bp, Artificial Sequence
  MKO10003071_A_Adamts8
  gRNA
ttggggcagtgtcggaaatc

SEQ ID NO: 3072 - DNA, 20 bp, Artificial Sequence
  MKO10003072_A_Adamts9
  gRNA
gtgctgacgcacgtcaatgc

SEQ ID NO: 3073 - DNA, 20 bp, Artificial Sequence
  MKO10003073_A_Adamts9
  gRNA
tctgctgcccagcgtacgct

SEQ ID NO: 3074 - DNA, 20 bp, Artificial Sequence
  MKO10003074_A_Adamts9
  gRNA
caatactgttgtccgaattc

SEQ ID NO: 3075 - DNA, 20 bp, Artificial Sequence
  MKO10003075_A_Adamtsl1
  gRNA
cgcgtaccatctaagacctt

SEQ ID NO: 3076 - DNA, 20 bp, Artificial Sequence
  MKO10003076_A_Adamtsl1
  gRNA
ttgtcggggtcattagatac

SEQ ID NO: 3077 - DNA, 20 bp, Artificial Sequence
  MKO10003077_A_Adamtsl1
  gRNA
acggagatggctcaacgtgc

SEQ ID NO: 3078 - DNA, 20 bp, Artificial Sequence
  MKO10003078_A_Adamtsl2
  gRNA
ccggcaccgtgagctgccgt

SEQ ID NO: 3079 - DNA, 20 bp, Artificial Sequence
  MKO10003079_A_Adamtsl2
  gRNA
ccaacggcagctcacggtgc

SEQ ID NO: 3080 - DNA, 20 bp, Artificial Sequence
  MKO10003080_A_Adamtsl2
  gRNA
ccgtttggacgtgcccacac

SEQ ID NO: 3081 - DNA, 20 bp, Artificial Sequence
  MKO10003081_A_Adamtsl3
  gRNA
gctgacacgaatgatcttta

SEQ ID NO: 3082 - DNA, 20 bp, Artificial Sequence
  MKO10003082_A_Adamtsl3
  gRNA
gagggagactcctatgatat

SEQ ID NO: 3083 - DNA, 20 bp, Artificial Sequence
  MKO10003083_A_Adamtsl3
  gRNA
agtgactgctcccggacctg

SEQ ID NO: 3084 - DNA, 20 bp, Artificial Sequence
  MKO10003084_A_Adamtsl4
  gRNA
agaaaccgcaccttcggtga

SEQ ID NO: 3085 - DNA, 20 bp, Artificial Sequence
  MKO10003085_A_Adamtsl4
  gRNA
gttcgagaccccatcaagcc

SEQ ID NO: 3086 - DNA, 20 bp, Artificial Sequence
  MKO10003086_A_Adamtsl4
  gRNA
agtcaaaggcggcacactgt

SEQ ID NO: 3087 - DNA, 20 bp, Artificial Sequence
  MKO10003087_A_Adamtsl5
  gRNA
tcccgggttaccggacacat

SEQ ID NO: 3088 - DNA, 20 bp, Artificial Sequence
  MKO10003088_A_Adamtsl5
  gRNA
gacgccccgaccacaagagc

SEQ ID NO: 3089 - DNA, 20 bp, Artificial Sequence
  MKO10003089_A_Adamtsl5
  gRNA
aggctactcacccccgtgga

SEQ ID NO: 3090 - DNA, 20 bp, Artificial Sequence
  MKO10003090_A_Adap1
  gRNA
aagtaccgcccttctactac

SEQ ID NO: 3091 - DNA, 20 bp, Artificial Sequence
  MKO10003091_A_Adap1
  gRNA
cacggatccactgctcacgt

SEQ ID NO: 3092 - DNA, 20 bp, Artificial Sequence
  MKO10003092_A_Adap1
  gRNA
caaggtgaagtcagtccgtc

SEQ ID NO: 3093 - DNA, 20 bp, Artificial Sequence
  MKO10003093_A_Adap2
  gRNA
caaagttaaatccgtgagac

SEQ ID NO: 3094 - DNA, 20 bp, Artificial Sequence
  MKO10003094_A_Adap2
  gRNA
ggtggttaaggtaaccgaga

SEQ ID NO: 3095 - DNA, 20 bp, Artificial Sequence
  MKO10003095_A_Adap2
  gRNA
cctcctgaagtactacacca

SEQ ID NO: 3096 - DNA, 20 bp, Artificial Sequence
  MKO10003096_A_Adarb1
  gRNA
cacggacatgacgaagctct

SEQ ID NO: 3097 - DNA, 20 bp, Artificial Sequence
  MKO10003097_A_Adarb1
  gRNA
agtaccgcctgaagaagcga

SEQ ID NO: 3098 - DNA, 20 bp, Artificial Sequence
  MKO10003098_A_Adarb1
  gRNA
agcactttccttcgtgcatg

SEQ ID NO: 3099 - DNA, 20 bp, Artificial Sequence
  MKO10003099_A_Adarb2
  gRNA
gagtagccgtcctcgccgat

SEQ ID NO: 3100 - DNA, 20 bp, Artificial Sequence
  MKO10003100_A_Adarb2
  gRNA
gtactgaatgagttacgctc

SEQ ID NO: 3101 - DNA, 20 bp, Artificial Sequence
  MKO10003101_A_Adarb2
  gRNA
aagttccgtgaactgacagt

SEQ ID NO: 3102 - DNA, 20 bp, Artificial Sequence
  MKO10003102_A_Adar
  gRNA
cttgtccgtcaagtaccaga

SEQ ID NO: 3103 - DNA, 20 bp, Artificial Sequence
  MKO10003103_A_Adar
  gRNA
agccagttcagcggatgacc

SEQ ID NO: 3104 - DNA, 20 bp, Artificial Sequence
  MKO10003104_A_Adar
  gRNA
tactctaacaacccgctgac

SEQ ID NO: 3105 - DNA, 20 bp, Artificial Sequence
  MKO10003105_A_Adat1
  gRNA
cgggaagtgcccgtacagcc

SEQ ID NO: 3106 - DNA, 20 bp, Artificial Sequence
  MKO10003106_A_Adat1
  gRNA
cttaccgctctctcgcatct

SEQ ID NO: 3107 - DNA, 20 bp, Artificial Sequence
  MKO10003107_A_Adat1
  gRNA
ttacacgaagtagccccacc

SEQ ID NO: 3108 - DNA, 20 bp, Artificial Sequence
  MKO10003108_A_Adat2
  gRNA
aaaggatactcataaggcgc

SEQ ID NO: 3109 - DNA, 20 bp, Artificial Sequence
  MKO10003109_A_Adat2
  gRNA
ttctgtactataaatcccgc

SEQ ID NO: 3110 - DNA, 20 bp, Artificial Sequence
  MKO10003110_A_Adat2
  gRNA
caccgtgttgtacgtcactg

SEQ ID NO: 3111 - DNA, 20 bp, Artificial Sequence
  MKO10003111_A_Adat3
  gRNA
agccggtagcgtgcgcaagc

SEQ ID NO: 3112 - DNA, 20 bp, Artificial Sequence
  MKO10003112_A_Adat3
  gRNA
gggacgtctggcgcttgtcc

SEQ ID NO: 3113 - DNA, 20 bp, Artificial Sequence
  MKO10003113_A_Adat3
  gRNA
tgtggccaacacgcggtccg

SEQ ID NO: 3114 - DNA, 20 bp, Artificial Sequence
  MKO10003114_A_Ada
  gRNA
cgtcacccctgatgacgttg

SEQ ID NO: 3115 - DNA, 20 bp, Artificial Sequence
  MKO10003115_A_Ada
  gRNA
ggtagagttacacgtccacc

SEQ ID NO: 3116 - DNA, 20 bp, Artificial Sequence
  MKO10003116_A_Ada
  gRNA
gcgctatagcccacacctgc

SEQ ID NO: 3117 - DNA, 20 bp, Artificial Sequence
  MKO10003117_A_Adck1
  gRNA
gtatttgcagcgtcgatccc

SEQ ID NO: 3118 - DNA, 20 bp, Artificial Sequence
  MKO10003118_A_Adck1
  gRNA
agttaaggtccagcacccga

SEQ ID NO: 3119 - DNA, 20 bp, Artificial Sequence
  MKO10003119_A_Adck1
  gRNA
cgaagctcaggaacaaatcg

SEQ ID NO: 3120 - DNA, 20 bp, Artificial Sequence
  MKO10003120_A_Adck2
  gRNA
ttctggcaggtattacaccc

SEQ ID NO: 3121 - DNA, 20 bp, Artificial Sequence
  MKO10003121_A_Adck2
  gRNA
cactgcgccccctcatcact

SEQ ID NO: 3122 - DNA, 20 bp, Artificial Sequence
  MKO10003122_A_Adck2
  gRNA
gaattcccaccgatctgaag

SEQ ID NO: 3123 - DNA, 20 bp, Artificial Sequence
  MKO10003123_A_Adck3
  gRNA
aaccgcccaatccgggtaac

SEQ ID NO: 3124 - DNA, 20 bp, Artificial Sequence
  MKO10003124_A_Adck3
  gRNA
ggatcttcgctggatgccgt

SEQ ID NO: 3125 - DNA, 20 bp, Artificial Sequence
  MKO10003125_A_Adck3
  gRNA
gcgtggggccgcactgaagc

SEQ ID NO: 3126 - DNA, 20 bp, Artificial Sequence
  MKO10003126_A_Adck4
  gRNA
tgatcgctctcgtgaacgca

SEQ ID NO: 3127 - DNA, 20 bp, Artificial Sequence
  MKO10003127_A_Adck4
  gRNA
ctcaccctagagggcgtctc

SEQ ID NO: 3128 - DNA, 20 bp, Artificial Sequence
  MKO10003128_A_Adck4
  gRNA
cgatcttgagggcagccccc

SEQ ID NO: 3129 - DNA, 20 bp, Artificial Sequence
  MKO10003129_A_Adck5
  gRNA
gtcagccgcacgctggtgac

SEQ ID NO: 3130 - DNA, 20 bp, Artificial Sequence
  MKO10003130_A_Adck5
  gRNA
catccagacgctgcgtgtgc

SEQ ID NO: 3131 - DNA, 20 bp, Artificial Sequence
  MKO10003131_A_Adck5
  gRNA
tgcacaaacgttgtccttcg

SEQ ID NO: 3132 - DNA, 20 bp, Artificial Sequence
  MKO10003132_A_Adcy10
  gRNA
ctatcttaactcgaatgtcc

SEQ ID NO: 3133 - DNA, 20 bp, Artificial Sequence
  MKO10003133_A_Adcy10
  gRNA
gaggatctccacgagctgtt

SEQ ID NO: 3134 - DNA, 20 bp, Artificial Sequence
  MKO10003134_A_Adcy10
  gRNA
ccgaggagccgaacagctcg

SEQ ID NO: 3135 - DNA, 20 bp, Artificial Sequence
  MKO10003135_A_Adcy1
  gRNA
acatgtatggcgtcttcgtg

SEQ ID NO: 3136 - DNA, 20 bp, Artificial Sequence
  MKO10003136_A_Adcy1
  gRNA
tgtcgccgaatcaagatcct

SEQ ID NO: 3137 - DNA, 20 bp, Artificial Sequence
  MKO10003137_A_Adcy1
  gRNA
tcttgacagagcgctcccag

SEQ ID NO: 3138 - DNA, 20 bp, Artificial Sequence
  MKO10003138_A_Adcy2
  gRNA
tcaagcgacacaccaacgtg

SEQ ID NO: 3139 - DNA, 20 bp, Artificial Sequence
  MKO10003139_A_Adcy2
  gRNA
gcaattacatgtgtcccgat

SEQ ID NO: 3140 - DNA, 20 bp, Artificial Sequence
  MKO10003140_A_Adcy2
  gRNA
tggtgtgtcgcttgacatac

SEQ ID NO: 3141 - DNA, 20 bp, Artificial Sequence
  MKO10003141_A_Adcy3
  gRNA
aaggtcagccgcataaagcg

SEQ ID NO: 3142 - DNA, 20 bp, Artificial Sequence
  MKO10003142_A_Adcy3
  gRNA
ggaccgagtgagccgcaaag

SEQ ID NO: 3143 - DNA, 20 bp, Artificial Sequence
  MKO10003143_A_Adcy3
  gRNA
ctacctgtgtgctatcatcg

SEQ ID NO: 3144 - DNA, 20 bp, Artificial Sequence
  MKO10003144_A_Adcy4
  gRNA
gagcattgcgggccacgttc

SEQ ID NO: 3145 - DNA, 20 bp, Artificial Sequence
  MKO10003145_A_Adcy4
  gRNA
cccgcaatgctcgctccatc

SEQ ID NO: 3146 - DNA, 20 bp, Artificial Sequence
  MKO10003146_A_Adcy4
  gRNA
cgtgtacgccatgctgccct

SEQ ID NO: 3147 - DNA, 20 bp, Artificial Sequence
  MKO10003147_A_Adcy5
  gRNA
cgcagtagtaacaatccccg

SEQ ID NO: 3148 - DNA, 20 bp, Artificial Sequence
  MKO10003148_A_Adcy5
  gRNA
agcagacatcaacgccaagc

SEQ ID NO: 3149 - DNA, 20 bp, Artificial Sequence
  MKO10003149_A_Adcy5
  gRNA
cccgggagtgtatccaggct

SEQ ID NO: 3150 - DNA, 20 bp, Artificial Sequence
  MKO10003150_A_Adcy6
  gRNA
ccaacagctcggtgctaacg

SEQ ID NO: 3151 - DNA, 20 bp, Artificial Sequence
  MKO10003151_A_Adcy6
  gRNA
cccgaggttacatccaggcg

SEQ ID NO: 3152 - DNA, 20 bp, Artificial Sequence
  MKO10003152_A_Adcy6
  gRNA
gttgccccagcacgttgcca

SEQ ID NO: 3153 - DNA, 20 bp, Artificial Sequence
  MKO10003153_A_Adcy7
  gRNA
tcaaatgcatccagatccgt

SEQ ID NO: 3154 - DNA, 20 bp, Artificial Sequence
  MKO10003154_A_Adcy7
  gRNA
tctccacacgaagcttccga

SEQ ID NO: 3155 - DNA, 20 bp, Artificial Sequence
  MKO10003155_A_Adcy7
  gRNA
ggaggtcacgcctgccacga

SEQ ID NO: 3156 - DNA, 20 bp, Artificial Sequence
  MKO10003156_A_Adcy8
  gRNA
ttcagaccgtgcccagcgcc

SEQ ID NO: 3157 - DNA, 20 bp, Artificial Sequence
  MKO10003157_A_Adcy8
  gRNA
aactctttgccagattcgac

SEQ ID NO: 3158 - DNA, 20 bp, Artificial Sequence
  MKO10003158_A_Adcy8
  gRNA
acctgacgttctcatagcga

SEQ ID NO: 3159 - DNA, 20 bp, Artificial Sequence
  MKO10003159_A_Adcy9
  gRNA
ttgaggtcattgacgactca

SEQ ID NO: 3160 - DNA, 20 bp, Artificial Sequence
  MKO10003160_A_Adcy9
  gRNA
actaaccttaaggttatcaa

SEQ ID NO: 3161 - DNA, 20 bp, Artificial Sequence
  MKO10003161_A_Adcy9
  gRNA
acgtacctcttcctggtagc

SEQ ID NO: 3162 - DNA, 20 bp, Artificial Sequence
  MKO10003162_A_Adcyap1r1
  gRNA
ccatcaggtcgttggccctc

SEQ ID NO: 3163 - DNA, 20 bp, Artificial Sequence
  MKO10003163_A_Adcyap1r1
  gRNA
cttggtccgggttgaagatc

SEQ ID NO: 3164 - DNA, 20 bp, Artificial Sequence
  MKO10003164_A_Adcyap1r1
  gRNA
cggatcttcaacccggacca

SEQ ID NO: 3165 - DNA, 20 bp, Artificial Sequence
  MKO10003165_A_Adcyap1
  gRNA
ggcgtaagcgtcacgcagcg

SEQ ID NO: 3166 - DNA, 20 bp, Artificial Sequence
  MKO10003166_A_Adcyap1
  gRNA
tggtcgtaagcctcgtcttc

SEQ ID NO: 3167 - DNA, 20 bp, Artificial Sequence
  MKO10003167_A_Adcyap1
  gRNA
ctgtgaagatgccgtccgag

SEQ ID NO: 3168 - DNA, 20 bp, Artificial Sequence
  MKO10003168_A_Adc
  gRNA
ttgcacccgacagcataaaa

SEQ ID NO: 3169 - DNA, 20 bp, Artificial Sequence
  MKO10003169_A_Adc
  gRNA
agccaggaaagccgccgcca

SEQ ID NO: 3170 - DNA, 20 bp, Artificial Sequence
  MKO10003170_A_Adc
  gRNA
acgatgaacatcctggacct

SEQ ID NO: 3171 - DNA, 20 bp, Artificial Sequence
  MKO10003171_A_Add1
  gRNA
catggcaccagaccttcgtc

SEQ ID NO: 3172 - DNA, 20 bp, Artificial Sequence
  MKO10003172_A_Add1
  gRNA
cgatagaatccgaccctcta

SEQ ID NO: 3173 - DNA, 20 bp, Artificial Sequence
  MKO10003173_A_Add1
  gRNA
tcatattgaagtcctgacga

SEQ ID NO: 3174 - DNA, 20 bp, Artificial Sequence
  MKO10003174_A_Add2
  gRNA
gtggatggcacaccgcacgt

SEQ ID NO: 3175 - DNA, 20 bp, Artificial Sequence
  MKO10003175_A_Add2
  gRNA
ccgacagatcgcggacttca

SEQ ID NO: 3176 - DNA, 20 bp, Artificial Sequence
  MKO10003176_A_Add2
  gRNA
tgagctgcgcccagccgtag

SEQ ID NO: 3177 - DNA, 20 bp, Artificial Sequence
  MKO10003177_A_Add3
  gRNA
tgtaacgctaataagccgct

SEQ ID NO: 3178 - DNA, 20 bp, Artificial Sequence
  MKO10003178_A_Add3
  gRNA
cttgtttgggtgggcgcacc

SEQ ID NO: 3179 - DNA, 20 bp, Artificial Sequence
  MKO10003179_A_Add3
  gRNA
ccgagatgtacgtatttgcc

SEQ ID NO: 3180 - DNA, 20 bp, Artificial Sequence
  MKO10003180_A_Adgb
  gRNA
agtatgtcgtcaaactttac

SEQ ID NO: 3181 - DNA, 20 bp, Artificial Sequence
  MKO10003181_A_Adgb
  gRNA
ttcccgtagctgttgaacaa

SEQ ID NO: 3182 - DNA, 20 bp, Artificial Sequence
  MKO10003182_A_Adgb
  gRNA
atgtctgcctcgctccactc

SEQ ID NO: 3183 - DNA, 20 bp, Artificial Sequence
  MKO10003183_A_Adh1
  gRNA
tgcgacttctatgtcctcga

SEQ ID NO: 3184 - DNA, 20 bp, Artificial Sequence
  MKO10003184_A_Adh1
  gRNA
ccttcgcgcaaagtcccccg

SEQ ID NO: 3185 - DNA, 20 bp, Artificial Sequence
  MKO10003185_A_Adh1
  gRNA
tcacaaacccttcaccatcg

SEQ ID NO: 3186 - DNA, 20 bp, Artificial Sequence
  MKO10003186_A_Adh4
  gRNA
atccgaacctcacaagcttt

SEQ ID NO: 3187 - DNA, 20 bp, Artificial Sequence
  MKO10003187_A_Adh4
  gRNA
gtgtaccttggcagtattga

SEQ ID NO: 3188 - DNA, 20 bp, Artificial Sequence
  MKO10003188_A_Adh4
  gRNA
tcttgccagagtcgatgatg

SEQ ID NO: 3189 - DNA, 20 bp, Artificial Sequence
  MKO10003189_A_Adh5
  gRNA
actttatccaaaggggccga

SEQ ID NO: 3190 - DNA, 20 bp, Artificial Sequence
  MKO10003190_A_Adh5
  gRNA
tgttgctaaaatcgatcctt

SEQ ID NO: 3191 - DNA, 20 bp, Artificial Sequence
  MKO10003191_A_Adh5
  gRNA
gatagaagtggcccctccaa

SEQ ID NO: 3192 - DNA, 20 bp, Artificial Sequence
  MKO10003192_A_Adh6a
  gRNA
gacgcctgcttgcaccccaa

SEQ ID NO: 3193 - DNA, 20 bp, Artificial Sequence
  MKO10003193_A_Adh6a
  gRNA
caagttgagccaccgaagtc

SEQ ID NO: 3194 - DNA, 20 bp, Artificial Sequence
  MKO10003194_A_Adh6a
  gRNA
acagcagccccgtagccagt

SEQ ID NO: 3195 - DNA, 20 bp, Artificial Sequence
  MKO10003195_A_Adh7
  gRNA
ggacgaatcctccgtagcga

SEQ ID NO: 3196 - DNA, 20 bp, Artificial Sequence
  MKO10003196_A_Adh7
  gRNA
cgcaccgtcaaccttcgcta

SEQ ID NO: 3197 - DNA, 20 bp, Artificial Sequence
  MKO10003197_A_Adh7
  gRNA
acacggacttccttagcctt

SEQ ID NO: 3198 - DNA, 20 bp, Artificial Sequence
  MKO10003198_A_Adhfe1
  gRNA
aactgatgccattcttcgat

SEQ ID NO: 3199 - DNA, 20 bp, Artificial Sequence
  MKO10003199_A_Adhfe1
  gRNA
aacagcagattacgcctttg

SEQ ID NO: 3200 - DNA, 20 bp, Artificial Sequence
  MKO10003200_A_Adhfe1
  gRNA
gaatccataactatttgtac

SEQ ID NO: 3201 - DNA, 20 bp, Artificial Sequence
  MKO10003201_A_Adi1
  gRNA
acgagtccaccgccgacccg

SEQ ID NO: 3202 - DNA, 20 bp, Artificial Sequence
  MKO10003202_A_Adi1
  gRNA
gtagtgggtacttcgatgtc

SEQ ID NO: 3203 - DNA, 20 bp, Artificial Sequence
  MKO10003203_A_Adi1
  gRNA
gcacgctcggagtgctctat

SEQ ID NO: 3204 - DNA, 20 bp, Artificial Sequence
  MKO10003204_A_Adig
  gRNA
tgctgttcttgacgatcgtc

SEQ ID NO: 3205 - DNA, 20 bp, Artificial Sequence
  MKO10003205_A_Adig
  gRNA
gtatgcgatgaagtaccctc

SEQ ID NO: 3206 - DNA, 20 bp, Artificial Sequence
  MKO10003206_A_Adig
  gRNA
tggagtccgtcctcctcacc

SEQ ID NO: 3207 - DNA, 20 bp, Artificial Sequence
  MKO10003207_A_Adipoq
  gRNA
cttcacctacgaccagtatc

SEQ ID NO: 3208 - DNA, 20 bp, Artificial Sequence
  MKO10003208_A_Adipoq
  gRNA
cgctgagcgatacacataag

SEQ ID NO: 3209 - DNA, 20 bp, Artificial Sequence
  MKO10003209_A_Adipoq
  gRNA
aatggcacaccaggccgtga

SEQ ID NO: 3210 - DNA, 20 bp, Artificial Sequence
  MKO10003210_A_Adipor1
  gRNA
gatggaggagttcgtgtata

SEQ ID NO: 3211 - DNA, 20 bp, Artificial Sequence
  MKO10003211_A_Adipor1
  gRNA
ttatggggagcttcgttccc

SEQ ID NO: 3212 - DNA, 20 bp, Artificial Sequence
  MKO10003212_A_Adipor1
  gRNA
gacaacgactacctgctaca

SEQ ID NO: 3213 - DNA, 20 bp, Artificial Sequence
  MKO10003213_A_Adipor2
  gRNA
cgtgagggatcactcgccat

SEQ ID NO: 3214 - DNA, 20 bp, Artificial Sequence
  MKO10003214_A_Adipor2
  gRNA
gctctgaccccccgatactg

SEQ ID NO: 3215 - DNA, 20 bp, Artificial Sequence
  MKO10003215_A_Adipor2
  gRNA
tgtttgccacccctcagtat

SEQ ID NO: 3216 - DNA, 20 bp, Artificial Sequence
  MKO10003216_A_Adk
  gRNA
acttgtgctgcgtgtatcac

SEQ ID NO: 3217 - DNA, 20 bp, Artificial Sequence
  MKO10003217_A_Adk
  gRNA
cgtcagcagccttacgcttc

SEQ ID NO: 3218 - DNA, 20 bp, Artificial Sequence
  MKO10003218_A_Adk
  gRNA
tacgcagaattcaatgaaag

SEQ ID NO: 3219 - DNA, 20 bp, Artificial Sequence
  MKO10003219_A_Adm2
  gRNA
cgacgagacttccagactac

SEQ ID NO: 3220 - DNA, 20 bp, Artificial Sequence
  MKO10003220_A_Adm2
  gRNA
agaatcttagccatcgcctg

SEQ ID NO: 3221 - DNA, 20 bp, Artificial Sequence
  MKO10003221_A_Adm2
  gRNA
ttaccgtgaccatcagcaac

SEQ ID NO: 3222 - DNA, 20 bp, Artificial Sequence
  MKO10003222_A_Adm
  gRNA
gtctcatcagcgagtcccgt

SEQ ID NO: 3223 - DNA, 20 bp, Artificial Sequence
  MKO10003223_A_Adm
  gRNA
cgaagcggcatccattgctg

SEQ ID NO: 3224 - DNA, 20 bp, Artificial Sequence
  MKO10003224_A_Adm
  gRNA
cacttctttcggaactgcga

SEQ ID NO: 3225 - DNA, 20 bp, Artificial Sequence
  MKO10003225_A_Adnp2
  gRNA
ggaacgcccttcgtacttgc

SEQ ID NO: 3226 - DNA, 20 bp, Artificial Sequence
  MKO10003226_A_Adnp2
  gRNA
gtgaaccaagctgtccgccc

SEQ ID NO: 3227 - DNA, 20 bp, Artificial Sequence
  MKO10003227_A_Adnp2
  gRNA
ttataaaagtacttctctcc

SEQ ID NO: 3228 - DNA, 20 bp, Artificial Sequence
  MKO10003228_A_Adnp
  gRNA
accctctctacgagatcgtc

SEQ ID NO: 3229 - DNA, 20 bp, Artificial Sequence
  MKO10003229_A_Adnp
  gRNA
tgctcatacgtgcgcttcac

SEQ ID NO: 3230 - DNA, 20 bp, Artificial Sequence
  MKO10003230_A_Adnp
  gRNA
cccttctcttacgaaaaatc

SEQ ID NO: 3231 - DNA, 20 bp, Artificial Sequence
  MKO10003231_A_Adora1
  gRNA
gctcaagatcgccaagtcgc

SEQ ID NO: 3232 - DNA, 20 bp, Artificial Sequence
  MKO10003232_A_Adora1
  gRNA
aacactgccgttggctatcc

SEQ ID NO: 3233 - DNA, 20 bp, Artificial Sequence
  MKO10003233_A_Adora1
  gRNA
caccatgccgccgtacatct

SEQ ID NO: 3234 - DNA, 20 bp, Artificial Sequence
  MKO10003234_A_Adora2a
  gRNA
tctggcggcggctgacatcg

SEQ ID NO: 3235 - DNA, 20 bp, Artificial Sequence
  MKO10003235_A_Adora2a
  gRNA
tcgccatccgaattccactc

SEQ ID NO: 3236 - DNA, 20 bp, Artificial Sequence
  MKO10003236_A_Adora2a
  gRNA
agcgagtccgctcccctggt

SEQ ID NO: 3237 - DNA, 20 bp, Artificial Sequence
  MKO10003237_A_Adora2b
  gRNA
gacgcaagacgcgctgtacg

SEQ ID NO: 3238 - DNA, 20 bp, Artificial Sequence
  MKO10003238_A_Adora2b
  gRNA
ggtggctgtcgaccgatatc

SEQ ID NO: 3239 - DNA, 20 bp, Artificial Sequence
  MKO10003239_A_Adora2b
  gRNA
tcactgggacacgagcgaga

SEQ ID NO: 3240 - DNA, 20 bp, Artificial Sequence
  MKO10003240_A_Adora3
  gRNA
ccctaatagcaccaaccgtg

SEQ ID NO: 3241 - DNA, 20 bp, Artificial Sequence
  MKO10003241_A_Adora3
  gRNA
tttgtgccacttccgttccg

SEQ ID NO: 3242 - DNA, 20 bp, Artificial Sequence
  MKO10003242_A_Adora3
  gRNA
accagatgtcgcaatgtgcc

SEQ ID NO: 3243 - DNA, 20 bp, Artificial Sequence
  MKO10003243_A_Ado
  gRNA
cctcaacatcgcgccgcgca

SEQ ID NO: 3244 - DNA, 20 bp, Artificial Sequence
  MKO10003244_A_Ado
  gRNA
aagcatgccccgcgacaaca

SEQ ID NO: 3245 - DNA, 20 bp, Artificial Sequence
  MKO10003245_A_Ado
  gRNA
acgcctggcgagcgatgcgc

SEQ ID NO: 3246 - DNA, 20 bp, Artificial Sequence
  MKO10003246_A_Adpgk
  gRNA
tctacactcgagaagtgatc

SEQ ID NO: 3247 - DNA, 20 bp, Artificial Sequence
  MKO10003247_A_Adpgk
  gRNA
ttctagagtcaacgcctgtg

SEQ ID NO: 3248 - DNA, 20 bp, Artificial Sequence
  MKO10003248_A_Adpgk
  gRNA
ccatcatgtgcaatccagaa

SEQ ID NO: 3249 - DNA, 20 bp, Artificial Sequence
  MKO10003249_A_Adprhl1
  gRNA
cattccgatgcacatcgctt

SEQ ID NO: 3250 - DNA, 20 bp, Artificial Sequence
  MKO10003250_A_Adprhl1
  gRNA
cacgcgaggaggtagttatc

SEQ ID NO: 3251 - DNA, 20 bp, Artificial Sequence
  MKO10003251_A_Adprhl1
  gRNA
cgtagcgctttaccatctct

SEQ ID NO: 3252 - DNA, 20 bp, Artificial Sequence
  MKO10003252_A_Adprhl2
  gRNA
aggaacccttcccgttgaac

SEQ ID NO: 3253 - DNA, 20 bp, Artificial Sequence
  MKO10003253_A_Adprhl2
  gRNA
agccatgtccacctcgtcga

SEQ ID NO: 3254 - DNA, 20 bp, Artificial Sequence
  MKO10003254_A_Adprhl2
  gRNA
ttcaacgggaagggttccta

SEQ ID NO: 3255 - DNA, 20 bp, Artificial Sequence
  MKO10003255_A_Adprh
  gRNA
gtattcgagcttctcgtagt

SEQ ID NO: 3256 - DNA, 20 bp, Artificial Sequence
  MKO10003256_A_Adprh
  gRNA
cgcggccaggagggcatcgt

SEQ ID NO: 3257 - DNA, 20 bp, Artificial Sequence
  MKO10003257_A_Adprh
  gRNA
gccatgcgcgccatgtgcat

SEQ ID NO: 3258 - DNA, 20 bp, Artificial Sequence
  MKO10003258_A_Adprm
  gRNA
ttcccccacgtgtggtgaac

SEQ ID NO: 3259 - DNA, 20 bp, Artificial Sequence
  MKO10003259_A_Adprm
  gRNA
ggaggttatggctgataagc

SEQ ID NO: 3260 - DNA, 20 bp, Artificial Sequence
  MKO10003260_A_Adprm
  gRNA
ttgacatggtgcacgccgaa

SEQ ID NO: 3261 - DNA, 20 bp, Artificial Sequence
  MKO10003261_A_Adra1a
  gRNA
ggccaggattaccatgccga

SEQ ID NO: 3262 - DNA, 20 bp, Artificial Sequence
  MKO10003262_A_Adra1a
  gRNA
tggtaatcctggccgatccc

SEQ ID NO: 3263 - DNA, 20 bp, Artificial Sequence
  MKO10003263_A_Adra1a
  gRNA
cgagtgcagatgccgatgac

SEQ ID NO: 3264 - DNA, 20 bp, Artificial Sequence
  MKO10003264_A_Adra1b
  gRNA
acgcgccttcatgcgtatcc

SEQ ID NO: 3265 - DNA, 20 bp, Artificial Sequence
  MKO10003265_A_Adra1b
  gRNA
gcgcttacacctaccggccg

SEQ ID NO: 3266 - DNA, 20 bp, Artificial Sequence
  MKO10003266_A_Adra1b
  gRNA
gtactgccgagtctacatcg

SEQ ID NO: 3267 - DNA, 20 bp, Artificial Sequence
  MKO10003267_A_Adra1d
  gRNA
gtgaatggctcggcggccgt

SEQ ID NO: 3268 - DNA, 20 bp, Artificial Sequence
  MKO10003268_A_Adra1d
  gRNA
ccggaccttctgcgacgtat

SEQ ID NO: 3269 - DNA, 20 bp, Artificial Sequence
  MKO10003269_A_Adra1d
  gRNA
ggcgcgcttgaactcgcgac

SEQ ID NO: 3270 - DNA, 20 bp, Artificial Sequence
  MKO10003270_A_Adra2a
  gRNA
ggtggtgatcggcgtgttcg

SEQ ID NO: 3271 - DNA, 20 bp, Artificial Sequence
  MKO10003271_A_Adra2a
  gRNA
gccgaccgctatgagcgtgt

SEQ ID NO: 3272 - DNA, 20 bp, Artificial Sequence
  MKO10003272_A_Adra2a
  gRNA
caacgtgctggttattatcg

SEQ ID NO: 3273 - DNA, 20 bp, Artificial Sequence
  MKO10003273_A_Adra2b
  gRNA
taccagcgcattgccgaaaa

SEQ ID NO: 3274 - DNA, 20 bp, Artificial Sequence
  MKO10003274_A_Adra2b
  gRNA
gaactcccccggcggccgga

SEQ ID NO: 3275 - DNA, 20 bp, Artificial Sequence
  MKO10003275_A_Adra2b
  gRNA
acttccgccgtgcctttcga

SEQ ID NO: 3276 - DNA, 20 bp, Artificial Sequence
  MKO10003276_A_Adra2c
  gRNA
ctctcgtctcgttctaccgc

SEQ ID NO: 3277 - DNA, 20 bp, Artificial Sequence
  MKO10003277_A_Adra2c
  gRNA
cgtacgctcagcgagaaacg

SEQ ID NO: 3278 - DNA, 20 bp, Artificial Sequence
  MKO10003278_A_Adra2c
  gRNA
cggacggcgtctcggtcccc

SEQ ID NO: 3279 - DNA, 20 bp, Artificial Sequence
  MKO10003279_A_Adrb1
  gRNA
gaacacccgcaggtacacga

SEQ ID NO: 3280 - DNA, 20 bp, Artificial Sequence
  MKO10003280_A_Adrb1
  gRNA
cgcgggtatgggcctactgc

SEQ ID NO: 3281 - DNA, 20 bp, Artificial Sequence
  MKO10003281_A_Adrb1
  gRNA
gcggcgcgcttcgtcgctct

SEQ ID NO: 3282 - DNA, 20 bp, Artificial Sequence
  MKO10003282_A_Adrb2
  gRNA
gctagagtagccgttcccat

SEQ ID NO: 3283 - DNA, 20 bp, Artificial Sequence
  MKO10003283_A_Adrb2
  gRNA
gccagaccacgacgtcactc

SEQ ID NO: 3284 - DNA, 20 bp, Artificial Sequence
  MKO10003284_A_Adrb2
  gRNA
agctatcgattgttacaccg

SEQ ID NO: 3285 - DNA, 20 bp, Artificial Sequence
  MKO10003285_A_Adrb3
  gRNA
cccggcgcagcaaatgccgt

SEQ ID NO: 3286 - DNA, 20 bp, Artificial Sequence
  MKO10003286_A_Adrb3
  gRNA
accagcgtgccgtaacgcaa

SEQ ID NO: 3287 - DNA, 20 bp, Artificial Sequence
  MKO10003287_A_Adrb3
  gRNA
acggcccttcacgtgggaaa

SEQ ID NO: 3288 - DNA, 20 bp, Artificial Sequence
  MKO10003288_A_Adrbk1
  gRNA
cttggtggagttctacgaag

SEQ ID NO: 3289 - DNA, 20 bp, Artificial Sequence
  MKO10003289_A_Adrbk1
  gRNA
agatttgtcagaacctccga

SEQ ID NO: 3290 - DNA, 20 bp, Artificial Sequence
  MKO10003290_A_Adrbk1
  gRNA
agtcaaagatctctcggctg

SEQ ID NO: 3291 - DNA, 20 bp, Artificial Sequence
  MKO10003291_A_Adrbk2
  gRNA
tgtaggcgtcgtacatctgc

SEQ ID NO: 3292 - DNA, 20 bp, Artificial Sequence
  MKO10003292_A_Adrbk2
  gRNA
acgaagaggataggctacgc

SEQ ID NO: 3293 - DNA, 20 bp, Artificial Sequence
  MKO10003293_A_Adrbk2
  gRNA
tgtagccgtcacctgtttct

SEQ ID NO: 3294 - DNA, 20 bp, Artificial Sequence
  MKO10003294_A_Adrm1
  gRNA
gggcattacccagtcctccc

SEQ ID NO: 3295 - DNA, 20 bp, Artificial Sequence
  MKO10003295_A_Adrm1
  gRNA
tatttctgtaggtggacttg

SEQ ID NO: 3296 - DNA, 20 bp, Artificial Sequence
  MKO10003296_A_Adrm1
  gRNA
cagccagcagctcttcatcc

SEQ ID NO: 3297 - DNA, 20 bp, Artificial Sequence
  MKO10003297_A_Adsl
  gRNA
cgtgctgatctgcccacgtt

SEQ ID NO: 3298 - DNA, 20 bp, Artificial Sequence
  MKO10003298_A_Adsl
  gRNA
gagccatcacgtcgtgccgc

SEQ ID NO: 3299 - DNA, 20 bp, Artificial Sequence
  MKO10003299_A_Adsl
  gRNA
gctgcgcttccgaggagtaa

SEQ ID NO: 3300 - DNA, 20 bp, Artificial Sequence
  MKO10003300_A_Adssl1
  gRNA
cacagtagtggtggacggca

SEQ ID NO: 3301 - DNA, 20 bp, Artificial Sequence
  MKO10003301_A_Adssl1
  gRNA
cttgccgggcttgtttgaag

SEQ ID NO: 3302 - DNA, 20 bp, Artificial Sequence
  MKO10003302_A_Adssl1
  gRNA
tttctaggggggcaacaatg

SEQ ID NO: 3303 - DNA, 20 bp, Artificial Sequence
  MKO10003303_A_Adss
  gRNA
tttcagggagggaataacgc

SEQ ID NO: 3304 - DNA, 20 bp, Artificial Sequence
  MKO10003304_A_Adss
  gRNA
cacagttgtcgtagattctg

SEQ ID NO: 3305 - DNA, 20 bp, Artificial Sequence
  MKO10003305_A_Adss
  gRNA
ctttcctaggtctagatggc

SEQ ID NO: 3306 - DNA, 20 bp, Artificial Sequence
  MKO10003306_A_Adtrp
  gRNA
agcatgggttaaccacgcaa

SEQ ID NO: 3307 - DNA, 20 bp, Artificial Sequence
  MKO10003307_A_Adtrp
  gRNA
attgcgtggttaacccatgc

SEQ ID NO: 3308 - DNA, 20 bp, Artificial Sequence
  MKO10003308_A_Adtrp
  gRNA
gtacttgacactccttaatc

SEQ ID NO: 3309 - DNA, 20 bp, Artificial Sequence
  MKO10003309_A_Aebp1
  gRNA
taaccgatccagcgtttcca

SEQ ID NO: 3310 - DNA, 20 bp, Artificial Sequence
  MKO10003310_A_Aebp1
  gRNA
cccccttggaaacgctggat

SEQ ID NO: 3311 - DNA, 20 bp, Artificial Sequence
  MKO10003311_A_Aebp1
  gRNA
cgtaatcctccttctctatc

SEQ ID NO: 3312 - DNA, 20 bp, Artificial Sequence
  MKO10003312_A_Aebp2
  gRNA
attcgctccatacatgtcga

SEQ ID NO: 3313 - DNA, 20 bp, Artificial Sequence
  MKO10003313_A_Aebp2
  gRNA
acgctgaccatcgacatgta

SEQ ID NO: 3314 - DNA, 20 bp, Artificial Sequence
  MKO10003314_A_Aebp2
  gRNA
ccgctgtagccaactctgac

SEQ ID NO: 3315 - DNA, 20 bp, Artificial Sequence
  MKO10003315_A_Aen
  gRNA
ttgtggactatcgcacccgc

SEQ ID NO: 3316 - DNA, 20 bp, Artificial Sequence
  MKO10003316_A_Aen
  gRNA
gcgggtgcgatagtccacaa

SEQ ID NO: 3317 - DNA, 20 bp, Artificial Sequence
  MKO10003317_A_Aen
  gRNA
ccagctcccttatccgaact

SEQ ID NO: 3318 - DNA, 20 bp, Artificial Sequence
  MKO10003318_A_Aes
  gRNA
catctcgatgttcaatccgt

SEQ ID NO: 3319 - DNA, 20 bp, Artificial Sequence
  MKO10003319_A_Aes
  gRNA
gaagctggagtgcgacaagc

SEQ ID NO: 3320 - DNA, 20 bp, Artificial Sequence
  MKO10003320_A_Aes
  gRNA
tccaggcggaaattgtgaag

SEQ ID NO: 3321 - DNA, 20 bp, Artificial Sequence
  MKO10003321_A_Afap1l1
  gRNA
cttcgggatatgtcggacga

SEQ ID NO: 3322 - DNA, 20 bp, Artificial Sequence
  MKO10003322_A_Afap1l1
  gRNA
catcgtccgacatatcccga

SEQ ID NO: 3323 - DNA, 20 bp, Artificial Sequence
  MKO10003323_A_Afap1l1
  gRNA
gcccaacaagcccccgcccg

SEQ ID NO: 3324 - DNA, 20 bp, Artificial Sequence
  MKO10003324_A_Afap1l2
  gRNA
ggactcgatctttggaacgg

SEQ ID NO: 3325 - DNA, 20 bp, Artificial Sequence
  MKO10003325_A_Afap1l2
  gRNA
ctagccacttcttgcgccac

SEQ ID NO: 3326 - DNA, 20 bp, Artificial Sequence
  MKO10003326_A_Afap1l2
  gRNA
tccaaagatcgagtcccctg

SEQ ID NO: 3327 - DNA, 20 bp, Artificial Sequence
  MKO10003327_A_Afap1
  gRNA
caaagcgtttcttgcgcagc

SEQ ID NO: 3328 - DNA, 20 bp, Artificial Sequence
  MKO10003328_A_Afap1
  gRNA
ctgctgcgcaagaaacgctt

SEQ ID NO: 3329 - DNA, 20 bp, Artificial Sequence
  MKO10003329_A_Afap1
  gRNA
tcagatggagctgccgctgc

SEQ ID NO: 3330 - DNA, 20 bp, Artificial Sequence
  MKO10003330_A_Aff1
  gRNA
tctggacggctcggctgtac

SEQ ID NO: 3331 - DNA, 20 bp, Artificial Sequence
  MKO10003331_A_Aff1
  gRNA
agcctgatcctgaccgtcca

SEQ ID NO: 3332 - DNA, 20 bp, Artificial Sequence
  MKO10003332_A_Aff1
  gRNA
ctgtggctaatgttaccgac

SEQ ID NO: 3333 - DNA, 20 bp, Artificial Sequence
  MKO10003333_A_Aff2
  gRNA
ctagtgttatgactatctcg

SEQ ID NO: 3334 - DNA, 20 bp, Artificial Sequence
  MKO10003334_A_Aff2
  gRNA
gaatttacagtgcaagcacc

SEQ ID NO: 3335 - DNA, 20 bp, Artificial Sequence
  MKO10003335_A_Aff2
  gRNA
accgtagtgcacttaaaaaa

SEQ ID NO: 3336 - DNA, 20 bp, Artificial Sequence
  MKO10003336_A_Aff3
  gRNA
gctgggcacccaccgtccga

SEQ ID NO: 3337 - DNA, 20 bp, Artificial Sequence
  MKO10003337_A_Aff3
  gRNA
aaccggatccagaatacatt

SEQ ID NO: 3338 - DNA, 20 bp, Artificial Sequence
  MKO10003338_A_Aff3
  gRNA
ttcagcttaggagattcgtc

SEQ ID NO: 3339 - DNA, 20 bp, Artificial Sequence
  MKO10003339_A_Aff4
  gRNA
ctgcttaaggcatcggtttc

SEQ ID NO: 3340 - DNA, 20 bp, Artificial Sequence
  MKO10003340_A_Aff4
  gRNA
tgtatgaatagccgttagag

SEQ ID NO: 3341 - DNA, 20 bp, Artificial Sequence
  MKO10003341_A_Aff4
  gRNA
gaaaattccttcccgacctt

SEQ ID NO: 3342 - DNA, 20 bp, Artificial Sequence
  MKO10003342_A_Afg3l1
  gRNA
cgacaaggacttccggagcc

SEQ ID NO: 3343 - DNA, 20 bp, Artificial Sequence
  MKO10003343_A_Afg3l1
  gRNA
cggaagtccttgtcgtccca

SEQ ID NO: 3344 - DNA, 20 bp, Artificial Sequence
  MKO10003344_A_Afg3l1
  gRNA
actgtagaaccaaaaaatgc

SEQ ID NO: 3345 - DNA, 20 bp, Artificial Sequence
  MKO10003345_A_Afg3l2
  gRNA
tacttcgtgttcaagagctc

SEQ ID NO: 3346 - DNA, 20 bp, Artificial Sequence
  MKO10003346_A_Afg3l2
  gRNA
ttctgttctcgacctcccaa

SEQ ID NO: 3347 - DNA, 20 bp, Artificial Sequence
  MKO10003347_A_Afg3l2
  gRNA
atttcaggatgtactttctc

SEQ ID NO: 3348 - DNA, 20 bp, Artificial Sequence
  MKO10003348_A_Afmid
  gRNA
ggacatctactttcccgatg

SEQ ID NO: 3349 - DNA, 20 bp, Artificial Sequence
  MKO10003349_A_Afmid
  gRNA
gcttatgacattgcacccaa

SEQ ID NO: 3350 - DNA, 20 bp, Artificial Sequence
  MKO10003350_A_Afmid
  gRNA
ctcacccttggaatcctcat

SEQ ID NO: 3351 - DNA, 20 bp, Artificial Sequence
  MKO10003351_A_Afm
  gRNA
atactgggaaaacgcgatga

SEQ ID NO: 3352 - DNA, 20 bp, Artificial Sequence
  MKO10003352_A_Afm
  gRNA
tgttcagaatgacgctatcc

SEQ ID NO: 3353 - DNA, 20 bp, Artificial Sequence
  MKO10003353_A_Afm
  gRNA
cgcccccgttcttctagccg

SEQ ID NO: 3354 - DNA, 20 bp, Artificial Sequence
  MKO10003354_A_Afp
  gRNA
tcagtacgacaaggtcgttc

SEQ ID NO: 3355 - DNA, 20 bp, Artificial Sequence
  MKO10003355_A_Afp
  gRNA
cattcttctccgtcacgcac

SEQ ID NO: 3356 - DNA, 20 bp, Artificial Sequence
  MKO10003356_A_Afp
  gRNA
acggaactctctaacaagta

SEQ ID NO: 3357 - DNA, 20 bp, Artificial Sequence
  MKO10003357_A_Aftph
  gRNA
accagattatactcgtccca

SEQ ID NO: 3358 - DNA, 20 bp, Artificial Sequence
  MKO10003358_A_Aftph
  gRNA
tttacaccgctcctttgtaa

SEQ ID NO: 3359 - DNA, 20 bp, Artificial Sequence
  MKO10003359_A_Aftph
  gRNA
gtttcgagtgtctattccca

SEQ ID NO: 3360 - DNA, 20 bp, Artificial Sequence
  MKO10003360_A_Agap1
  gRNA
gacactcagccgatcggtac

SEQ ID NO: 3361 - DNA, 20 bp, Artificial Sequence
  MKO10003361_A_Agap1
  gRNA
cctgcacgtacgtgcctgtc

SEQ ID NO: 3362 - DNA, 20 bp, Artificial Sequence
  MKO10003362_A_Agap1
  gRNA
cctgacaggcacgtacgtgc

SEQ ID NO: 3363 - DNA, 20 bp, Artificial Sequence
  MKO10003363_A_Agap2
  gRNA
atcaattcccgaactgcgcc

SEQ ID NO: 3364 - DNA, 20 bp, Artificial Sequence
  MKO10003364_A_Agap2
  gRNA
gctacctaccaggcgcagtt

SEQ ID NO: 3365 - DNA, 20 bp, Artificial Sequence
  MKO10003365_A_Agap2
  gRNA
atgaacccgtgaggaatcta

SEQ ID NO: 3366 - DNA, 20 bp, Artificial Sequence
  MKO10003366_A_Agap3
  gRNA
ggaagtagttgtacaccgtc

SEQ ID NO: 3367 - DNA, 20 bp, Artificial Sequence
  MKO10003367_A_Agap3
  gRNA
cctagggggtcgatttaaaa

SEQ ID NO: 3368 - DNA, 20 bp, Artificial Sequence
  MKO10003368_A_Agap3
  gRNA
atagtgggcaacctgtctag

SEQ ID NO: 3369 - DNA, 20 bp, Artificial Sequence
  MKO10003369_A_Aga
  gRNA
tgaaggtggcgaaaccaccc

SEQ ID NO: 3370 - DNA, 20 bp, Artificial Sequence
  MKO10003370_A_Aga
  gRNA
ccccactaaaagcgtgtgtg

SEQ ID NO: 3371 - DNA, 20 bp, Artificial Sequence
  MKO10003371_A_Aga
  gRNA
gtgacttaccaatagtatca

SEQ ID NO: 3372 - DNA, 20 bp, Artificial Sequence
  MKO10003372_A_Agbl1
  gRNA
atgctcggtacctgattgtc

SEQ ID NO: 3373 - DNA, 20 bp, Artificial Sequence
  MKO10003373_A_Agbl1
  gRNA
caacagaaagcagatcgccg

SEQ ID NO: 3374 - DNA, 20 bp, Artificial Sequence
  MKO10003374_A_Agbl1
  gRNA
agtaaccacgggagccatgc

SEQ ID NO: 3375 - DNA, 20 bp, Artificial Sequence
  MKO10003375_A_Agbl2
  gRNA
ttgatgacctcacattcgat

SEQ ID NO: 3376 - DNA, 20 bp, Artificial Sequence
  MKO10003376_A_Agbl2
  gRNA
aagatggccaatcgaatgtg

SEQ ID NO: 3377 - DNA, 20 bp, Artificial Sequence
  MKO10003377_A_Agbl2
  gRNA
gagccattcaacatgtaccg

SEQ ID NO: 3378 - DNA, 20 bp, Artificial Sequence
  MKO10003378_A_Agbl3
  gRNA
agatgggtaccacgccttcg

SEQ ID NO: 3379 - DNA, 20 bp, Artificial Sequence
  MKO10003379_A_Agbl3
  gRNA
atgttcggttacccccaact

SEQ ID NO: 3380 - DNA, 20 bp, Artificial Sequence
  MKO10003380_A_Agbl3
  gRNA
tattcatccgtgcacactac

SEQ ID NO: 3381 - DNA, 20 bp, Artificial Sequence
  MKO10003381_A_Agbl4
  gRNA
gtaatccacgcttccgagtc

SEQ ID NO: 3382 - DNA, 20 bp, Artificial Sequence
  MKO10003382_A_Agbl4
  gRNA
accaagagtctttaccgaga

SEQ ID NO: 3383 - DNA, 20 bp, Artificial Sequence
  MKO10003383_A_Agbl4
  gRNA
aatcagagacttgctcaacc

SEQ ID NO: 3384 - DNA, 20 bp, Artificial Sequence
  MKO10003384_A_Agbl5
  gRNA
ctctacgaaacggtgaacaa

SEQ ID NO: 3385 - DNA, 20 bp, Artificial Sequence
  MKO10003385_A_Agbl5
  gRNA
ctgactacgagttcaacgtg

SEQ ID NO: 3386 - DNA, 20 bp, Artificial Sequence
  MKO10003386_A_Agbl5
  gRNA
cacacgttgaactcgtagtc

SEQ ID NO: 3387 - DNA, 20 bp, Artificial Sequence
  MKO10003387_A_Ager
  gRNA
ccttacggtagactcggact

SEQ ID NO: 3388 - DNA, 20 bp, Artificial Sequence
  MKO10003388_A_Ager
  gRNA
tgtcgggcaactaacaggcg

SEQ ID NO: 3389 - DNA, 20 bp, Artificial Sequence
  MKO10003389_A_Ager
  gRNA
gggaaacttctgattcccga

SEQ ID NO: 3390 - DNA, 20 bp, Artificial Sequence
  MKO10003390_A_Agfg1
  gRNA
tcggttcatgcgtctatttc

SEQ ID NO: 3391 - DNA, 20 bp, Artificial Sequence
  MKO10003391_A_Agfg1
  gRNA
tgaaatagacgcatgaaccg

SEQ ID NO: 3392 - DNA, 20 bp, Artificial Sequence
  MKO10003392_A_Agfg1
  gRNA
gagggttaaatccacctcac

SEQ ID NO: 3393 - DNA, 20 bp, Artificial Sequence
  MKO10003393_A_Agfg2
  gRNA
agattgacttgactcgatga

SEQ ID NO: 3394 - DNA, 20 bp, Artificial Sequence
  MKO10003394_A_Agfg2
  gRNA
ttcaggtctgtcggaaaatc

SEQ ID NO: 3395 - DNA, 20 bp, Artificial Sequence
  MKO10003395_A_Agfg2
  gRNA
ctcccccgatatccgccagc

SEQ ID NO: 3396 - DNA, 20 bp, Artificial Sequence
  MKO10003396_A_Aggf1
  gRNA
taagcccgtgctctcgtcgt

SEQ ID NO: 3397 - DNA, 20 bp, Artificial Sequence
  MKO10003397_A_Aggf1
  gRNA
cttcacctacgacgagagca

SEQ ID NO: 3398 - DNA, 20 bp, Artificial Sequence
  MKO10003398_A_Aggf1
  gRNA
tgagtacctgaaatcgccca

SEQ ID NO: 3399 - DNA, 20 bp, Artificial Sequence
  MKO10003399_A_Agk
  gRNA
gatattgcagacggattatg

SEQ ID NO: 3400 - DNA, 20 bp, Artificial Sequence
  MKO10003400_A_Agk
  gRNA
cattacctgagcttcttgac

SEQ ID NO: 3401 - DNA, 20 bp, Artificial Sequence
  MKO10003401_A_Agk
  gRNA
catggatgtgactgttgtca

SEQ ID NO: 3402 - DNA, 20 bp, Artificial Sequence
  MKO10003402_A_Agl
  gRNA
ttagctctaactgatcggca

SEQ ID NO: 3403 - DNA, 20 bp, Artificial Sequence
  MKO10003403_A_Agl
  gRNA
tttgaactacagttccgatt

SEQ ID NO: 3404 - DNA, 20 bp, Artificial Sequence
  MKO10003404_A_Agl
  gRNA
tcgagaaaagttccgttcct

SEQ ID NO: 3405 - DNA, 20 bp, Artificial Sequence
  MKO10003405_A_Agmat
  gRNA
tttccgccgaagtgtggatg

SEQ ID NO: 3406 - DNA, 20 bp, Artificial Sequence
  MKO10003406_A_Agmat
  gRNA
gatttggaccctgtcgcatc

SEQ ID NO: 3407 - DNA, 20 bp, Artificial Sequence
  MKO10003407_A_Agmat
  gRNA
cgcggggctcacccctagtc

SEQ ID NO: 3408 - DNA, 20 bp, Artificial Sequence
  MKO10003408_A_Agmo
  gRNA
ctactactggttccaccgca

SEQ ID NO: 3409 - DNA, 20 bp, Artificial Sequence
  MKO10003409_A_Agmo
  gRNA
gcatcatccaaacgacctga

SEQ ID NO: 3410 - DNA, 20 bp, Artificial Sequence
  MKO10003410_A_Agmo
  gRNA
tcttgcagcagtatagttcc

SEQ ID NO: 3411 - DNA, 20 bp, Artificial Sequence
  MKO10003411_A_Ago1
  gRNA
gattgacgtttaccattacg

SEQ ID NO: 3412 - DNA, 20 bp, Artificial Sequence
  MKO10003412_A_Ago1
  gRNA
tttcaggcaccccgccggcc

SEQ ID NO: 3413 - DNA, 20 bp, Artificial Sequence
  MKO10003413_A_Ago1
  gRNA
gatcgcaagcctgtgtatga

SEQ ID NO: 3414 - DNA, 20 bp, Artificial Sequence
  MKO10003414_A_Ago2
  gRNA
cgtccccttcgagacgatcc

SEQ ID NO: 3415 - DNA, 20 bp, Artificial Sequence
  MKO10003415_A_Ago2
  gRNA
gtgccgaagtccggccgagg

SEQ ID NO: 3416 - DNA, 20 bp, Artificial Sequence
  MKO10003416_A_Ago2
  gRNA
gtgcatcgtgtaacgcctgc

SEQ ID NO: 3417 - DNA, 20 bp, Artificial Sequence
  MKO10003417_A_Ago3
  gRNA
ccccgtccatgccgttgacg

SEQ ID NO: 3418 - DNA, 20 bp, Artificial Sequence
  MKO10003418_A_Ago3
  gRNA
gaccgtagaccagtttatga

SEQ ID NO: 3419 - DNA, 20 bp, Artificial Sequence
  MKO10003419_A_Ago3
  gRNA
gatttagatgttacattacc

SEQ ID NO: 3420 - DNA, 20 bp, Artificial Sequence
  MKO10003420_A_Ago4
  gRNA
aacggcctcgtagagtcaac

SEQ ID NO: 3421 - DNA, 20 bp, Artificial Sequence
  MKO10003421_A_Ago4
  gRNA
gatcggcagcctggctacga

SEQ ID NO: 3422 - DNA, 20 bp, Artificial Sequence
  MKO10003422_A_Ago4
  gRNA
cttaccctatcccgtccgat

SEQ ID NO: 3423 - DNA, 20 bp, Artificial Sequence
  MKO10003423_A_Agpat1
  gRNA
tggaaggcgcctcgtttgaa

SEQ ID NO: 3424 - DNA, 20 bp, Artificial Sequence
  MKO10003424_A_Agpat1
  gRNA
cgccatcagtgtcatgtccg

SEQ ID NO: 3425 - DNA, 20 bp, Artificial Sequence
  MKO10003425_A_Agpat1
  gRNA
agcccatagtagctcacgct

SEQ ID NO: 3426 - DNA, 20 bp, Artificial Sequence
  MKO10003426_A_Agpat2
  gRNA
cgatctgcacacagcgctta

SEQ ID NO: 3427 - DNA, 20 bp, Artificial Sequence
  MKO10003427_A_Agpat2
  gRNA
gtccgctgacctcaaagcga

SEQ ID NO: 3428 - DNA, 20 bp, Artificial Sequence
  MKO10003428_A_Agpat2
  gRNA
gagggtacacgcaacgacaa

SEQ ID NO: 3429 - DNA, 20 bp, Artificial Sequence
  MKO10003429_A_Agpat3
  gRNA
ttcgagatcgacttcctttg

SEQ ID NO: 3430 - DNA, 20 bp, Artificial Sequence
  MKO10003430_A_Agpat3
  gRNA
agcgtgttccttcgcagtac

SEQ ID NO: 3431 - DNA, 20 bp, Artificial Sequence
  MKO10003431_A_Agpat3
  gRNA
gtgcactctcttcaccgacc

SEQ ID NO: 3432 - DNA, 20 bp, Artificial Sequence
  MKO10003432_A_Agpat4
  gRNA
taccatctacaccgacccga

SEQ ID NO: 3433 - DNA, 20 bp, Artificial Sequence
  MKO10003433_A_Agpat4
  gRNA
atcacgctgactgctacgtt

SEQ ID NO: 3434 - DNA, 20 bp, Artificial Sequence
  MKO10003434_A_Agpat4
  gRNA
cacctgctgccgcgcaccaa

SEQ ID NO: 3435 - DNA, 20 bp, Artificial Sequence
  MKO10003435_A_Agpat5
  gRNA
gtacgtagcgcacatgtcct

SEQ ID NO: 3436 - DNA, 20 bp, Artificial Sequence
  MKO10003436_A_Agpat5
  gRNA
ctagcgaatcatcaaagcac

SEQ ID NO: 3437 - DNA, 20 bp, Artificial Sequence
  MKO10003437_A_Agpat5
  gRNA
gcattataccttgttccctc

SEQ ID NO: 3438 - DNA, 20 bp, Artificial Sequence
  MKO10003438_A_Agpat6
  gRNA
taagccgcaggcttatgtat

SEQ ID NO: 3439 - DNA, 20 bp, Artificial Sequence
  MKO10003439_A_Agpat6
  gRNA
atcaaagaaattcgtcgaag

SEQ ID NO: 3440 - DNA, 20 bp, Artificial Sequence
  MKO10003440_A_Agpat6
  gRNA
cctgttgtggtacgtaatga

SEQ ID NO: 3441 - DNA, 20 bp, Artificial Sequence
  MKO10003441_A_Agpat9
  gRNA
gccacattacgaattcagaa

SEQ ID NO: 3442 - DNA, 20 bp, Artificial Sequence
  MKO10003442_A_Agpat9
  gRNA
atctgtgttcggtccctatc

SEQ ID NO: 3443 - DNA, 20 bp, Artificial Sequence
  MKO10003443_A_Agpat9
  gRNA
actttcagtacatcagtcca

SEQ ID NO: 3444 - DNA, 20 bp, Artificial Sequence
  MKO10003444_A_Agps
  gRNA
taccttaggtacccacttag

SEQ ID NO: 3445 - DNA, 20 bp, Artificial Sequence
  MKO10003445_A_Agps
  gRNA
cttggccatacaactatatc

SEQ ID NO: 3446 - DNA, 20 bp, Artificial Sequence
  MKO10003446_A_Agps
  gRNA
aggtgcttcactaggattta

SEQ ID NO: 3447 - DNA, 20 bp, Artificial Sequence
  MKO10003447_A_Agr2
  gRNA
ttacagcaacagacccttga

SEQ ID NO: 3448 - DNA, 20 bp, Artificial Sequence
  MKO10003448_A_Agr2
  gRNA
gttggggcgatcagctcatc

SEQ ID NO: 3449 - DNA, 20 bp, Artificial Sequence
  MKO10003449_A_Agr2
  gRNA
gacgaatgcccacacagtca

SEQ ID NO: 3450 - DNA, 20 bp, Artificial Sequence
  MKO10003450_A_Agr3
  gRNA
cgtaccaacaaacatgatcc

SEQ ID NO: 3451 - DNA, 20 bp, Artificial Sequence
  MKO10003451_A_Agr3
  gRNA
acaagaacttgtcacctgat

SEQ ID NO: 3452 - DNA, 20 bp, Artificial Sequence
  MKO10003452_A_Agr3
  gRNA
gtctctttcatgctcgcaaa

SEQ ID NO: 3453 - DNA, 20 bp, Artificial Sequence
  MKO10003453_A_Agrn
  gRNA
cgcatccgcctactccgcca

SEQ ID NO: 3454 - DNA, 20 bp, Artificial Sequence
  MKO10003454_A_Agrn
  gRNA
tccgcaaagtgatccgcata

SEQ ID NO: 3455 - DNA, 20 bp, Artificial Sequence
  MKO10003455_A_Agrn
  gRNA
gtaggcggatgcgccgttgc

SEQ ID NO: 3456 - DNA, 20 bp, Artificial Sequence
  MKO10003456_A_Agrp
  gRNA
tcgtggccgtacccagcttg

SEQ ID NO: 3457 - DNA, 20 bp, Artificial Sequence
  MKO10003457_A_Agrp
  gRNA
ttggctaggtgcgactacag

SEQ ID NO: 3458 - DNA, 20 bp, Artificial Sequence
  MKO10003458_A_Agrp
  gRNA
gccccaggtctaagtctgaa

SEQ ID NO: 3459 - DNA, 20 bp, Artificial Sequence
  MKO10003459_A_Agtpbp1
  gRNA
atgacaaccaaaggttctac

SEQ ID NO: 3460 - DNA, 20 bp, Artificial Sequence
  MKO10003460_A_Agtpbp1
  gRNA
tcccacaacccgagaactat

SEQ ID NO: 3461 - DNA, 20 bp, Artificial Sequence
  MKO10003461_A_Agtpbp1
  gRNA
ggaagttctgttgtcaacat

SEQ ID NO: 3462 - DNA, 20 bp, Artificial Sequence
  MKO10003462_A_Agtr1a
  gRNA
ctgtaaaattgccgacatcg

SEQ ID NO: 3463 - DNA, 20 bp, Artificial Sequence
  MKO10003463_A_Agtr1a
  gRNA
ataccgctatggaataccgc

SEQ ID NO: 3464 - DNA, 20 bp, Artificial Sequence
  MKO10003464_A_Agtr1a
  gRNA
tcgcctccgccgcacgatgc

SEQ ID NO: 3465 - DNA, 20 bp, Artificial Sequence
  MKO10003465_A_Agtr1b
  gRNA
tggcgaccagcattgtgcgt

SEQ ID NO: 3466 - DNA, 20 bp, Artificial Sequence
  MKO10003466_A_Agtr1b
  gRNA
tgataaccctgcatgcgacc

SEQ ID NO: 3467 - DNA, 20 bp, Artificial Sequence
  MKO10003467_A_Agtr1b
  gRNA
tcgcctccgacgcacaatgc

SEQ ID NO: 3468 - DNA, 20 bp, Artificial Sequence
  MKO10003468_A_Agtr2
  gRNA
gctattaatgatacccatcc

SEQ ID NO: 3469 - DNA, 20 bp, Artificial Sequence
  MKO10003469_A_Agtr2
  gRNA
tttgataatctcaacgcaac

SEQ ID NO: 3470 - DNA, 20 bp, Artificial Sequence
  MKO10003470_A_Agtr2
  gRNA
gtcagaaccattgaatactt

SEQ ID NO: 3471 - DNA, 20 bp, Artificial Sequence
  MKO10003471_A_Agtrap
  gRNA
taccacatgcaccgtgaacg

SEQ ID NO: 3472 - DNA, 20 bp, Artificial Sequence
  MKO10003472_A_Agtrap
  gRNA
ttctactcgagtgttgccac

SEQ ID NO: 3473 - DNA, 20 bp, Artificial Sequence
  MKO10003473_A_Agtrap
  gRNA
ctgatgatgagtcaattgtc

SEQ ID NO: 3474 - DNA, 20 bp, Artificial Sequence
  MKO10003474_A_Agt
  gRNA
tccggaacgacctcctgact

SEQ ID NO: 3475 - DNA, 20 bp, Artificial Sequence
  MKO10003475_A_Agt
  gRNA
cgcaatgatcgccaacttcg

SEQ ID NO: 3476 - DNA, 20 bp, Artificial Sequence
  MKO10003476_A_Agt
  gRNA
acaggctcgaacgttgactc

SEQ ID NO: 3477 - DNA, 20 bp, Artificial Sequence
  MKO10003477_A_Agxt2
  gRNA
catcaccatggccaggtcgt

SEQ ID NO: 3478 - DNA, 20 bp, Artificial Sequence
  MKO10003478_A_Agxt2
  gRNA
tagcaaaggcttccggaaat

SEQ ID NO: 3479 - DNA, 20 bp, Artificial Sequence
  MKO10003479_A_Agxt2
  gRNA
agacagaacttgtatgccac

SEQ ID NO: 3480 - DNA, 20 bp, Artificial Sequence
  MKO10003480_A_Agxt
  gRNA
cgccagtggatgactccccg

SEQ ID NO: 3481 - DNA, 20 bp, Artificial Sequence
  MKO10003481_A_Agxt
  gRNA
gcagagattgctgatcgcat

SEQ ID NO: 3482 - DNA, 20 bp, Artificial Sequence
  MKO10003482_A_Agxt
  gRNA
ccggttagaaaggagtcccc

SEQ ID NO: 3483 - DNA, 20 bp, Artificial Sequence
  MKO10003483_A_Ahctf1
  gRNA
taaatgctgggtactcgcac

SEQ ID NO: 3484 - DNA, 20 bp, Artificial Sequence
  MKO10003484_A_Ahctf1
  gRNA
ctcccaatgggcttactaac

SEQ ID NO: 3485 - DNA, 20 bp, Artificial Sequence
  MKO10003485_A_Ahctf1
  gRNA
gcatactgacctatcttgtg

SEQ ID NO: 3486 - DNA, 20 bp, Artificial Sequence
  MKO10003486_A_Ahcyl1
  gRNA
attgctgctgcccttcgagt

SEQ ID NO: 3487 - DNA, 20 bp, Artificial Sequence
  MKO10003487_A_Ahcyl1
  gRNA
agtgggctgtacgcacatca

SEQ ID NO: 3488 - DNA, 20 bp, Artificial Sequence
  MKO10003488_A_Ahcyl1
  gRNA
ctgagttgaatagatgttgc

SEQ ID NO: 3489 - DNA, 20 bp, Artificial Sequence
  MKO10003489_A_Ahcyl2
  gRNA
caaagagcgacgtccgattt

SEQ ID NO: 3490 - DNA, 20 bp, Artificial Sequence
  MKO10003490_A_Ahcyl2
  gRNA
ctgacgatgagacatccccc

SEQ ID NO: 3491 - DNA, 20 bp, Artificial Sequence
  MKO10003491_A_Ahcyl2
  gRNA
gtgcgtacaacccacaattt

SEQ ID NO: 3492 - DNA, 20 bp, Artificial Sequence
  MKO10003492_A_Ahcy
  gRNA
tcccgcagcggacatcggac

SEQ ID NO: 3493 - DNA, 20 bp, Artificial Sequence
  MKO10003493_A_Ahcy
  gRNA
tgtcaacgattctgtcacca

SEQ ID NO: 3494 - DNA, 20 bp, Artificial Sequence
  MKO10003494_A_Ahcy
  gRNA
tgcgcacctgacagaagctg

SEQ ID NO: 3495 - DNA, 20 bp, Artificial Sequence
  MKO10003495_A_Ahdc1
  gRNA
agtgcgcctcaaggcgtact

SEQ ID NO: 3496 - DNA, 20 bp, Artificial Sequence
  MKO10003496_A_Ahdc1
  gRNA
cgggcaaagcgtgtttgcct

SEQ ID NO: 3497 - DNA, 20 bp, Artificial Sequence
  MKO10003497_A_Ahdc1
  gRNA
gggccgccggggtagtactt

SEQ ID NO: 3498 - DNA, 20 bp, Artificial Sequence
  MKO10003498_A_Ahi1
  gRNA
gatgaactaaccatccatcg

SEQ ID NO: 3499 - DNA, 20 bp, Artificial Sequence
  MKO10003499_A_Ahi1
  gRNA
tggtacggcagcgtaagaaa

SEQ ID NO: 3500 - DNA, 20 bp, Artificial Sequence
  MKO10003500_A_Ahi1
  gRNA
ggggagcgctcctttacctt

SEQ ID NO: 3501 - DNA, 20 bp, Artificial Sequence
  MKO10003501_A_Ahnak
  gRNA
ggccccttgacaccgatatc

SEQ ID NO: 3502 - DNA, 20 bp, Artificial Sequence
  MKO10003502_A_Ahnak
  gRNA
ggtcccactgtcgttgctag

SEQ ID NO: 3503 - DNA, 20 bp, Artificial Sequence
  MKO10003503_A_Ahnak
  gRNA
ttacttaggggaccagattg

SEQ ID NO: 3504 - DNA, 20 bp, Artificial Sequence
  MKO10003504_A_Ahrr
  gRNA
cggtcccggtgccgtttgga

SEQ ID NO: 3505 - DNA, 20 bp, Artificial Sequence
  MKO10003505_A_Ahrr
  gRNA
ggaccgcctcaatacagagc

SEQ ID NO: 3506 - DNA, 20 bp, Artificial Sequence
  MKO10003506_A_Ahrr
  gRNA
gaccctcctcaggtggtgtt

SEQ ID NO: 3507 - DNA, 20 bp, Artificial Sequence
  MKO10003507_A_Ahr
  gRNA
tgagctcatatacgctctga

SEQ ID NO: 3508 - DNA, 20 bp, Artificial Sequence
  MKO10003508_A_Ahr
  gRNA
cggtctctgtgtcgcttaga

SEQ ID NO: 3509 - DNA, 20 bp, Artificial Sequence
  MKO10003509_A_Ahr
  gRNA
ctccactatccaagattacc

SEQ ID NO: 3510 - DNA, 20 bp, Artificial Sequence
  MKO10003510_A_Ahsa1
  gRNA
caccccgtcttccttcatta

SEQ ID NO: 3511 - DNA, 20 bp, Artificial Sequence
  MKO10003511_A_Ahsa1
  gRNA
tttgtctgatgaaaatagcg

SEQ ID NO: 3512 - DNA, 20 bp, Artificial Sequence
  MKO10003512_A_Ahsa1
  gRNA
tgagcctgacacaaatctcg

SEQ ID NO: 3513 - DNA, 20 bp, Artificial Sequence
  MKO10003513_A_Ahsa2
  gRNA
tacccgtcttgagtgccttc

SEQ ID NO: 3514 - DNA, 20 bp, Artificial Sequence
  MKO10003514_A_Ahsa2
  gRNA
aaggatctcatgagaacgac

SEQ ID NO: 3515 - DNA, 20 bp, Artificial Sequence
  MKO10003515_A_Ahsa2
  gRNA
cagagcgggatgccaccatt

SEQ ID NO: 3516 - DNA, 20 bp, Artificial Sequence
  MKO10003516_A_Ahsg
  gRNA
tccgttcaacgataccaacg

SEQ ID NO: 3517 - DNA, 20 bp, Artificial Sequence
  MKO10003517_A_Ahsg
  gRNA
tccacagcggcccttcggag

SEQ ID NO: 3518 - DNA, 20 bp, Artificial Sequence
  MKO10003518_A_Ahsg
  gRNA
acgttcgtaagttgtgccca

SEQ ID NO: 3519 - DNA, 20 bp, Artificial Sequence
  MKO10003519_A_Aicda
  gRNA
caagtcatcgacttcgtaca

SEQ ID NO: 3520 - DNA, 20 bp, Artificial Sequence
  MKO10003520_A_Aicda
  gRNA
gcgagatgcatttcgtatgt

SEQ ID NO: 3521 - DNA, 20 bp, Artificial Sequence
  MKO10003521_A_Aicda
  gRNA
aaggatgcgccgaagttgtc

SEQ ID NO: 3522 - DNA, 20 bp, Artificial Sequence
  MKO10003522_A_Aida
  gRNA
atgttcagcctattccatta

SEQ ID NO: 3523 - DNA, 20 bp, Artificial Sequence
  MKO10003523_A_Aida
  gRNA
tatgaataccttaatggaat

SEQ ID NO: 3524 - DNA, 20 bp, Artificial Sequence
  MKO10003524_A_Aida
  gRNA
tacttggttctagcttcttc

SEQ ID NO: 3525 - DNA, 20 bp, Artificial Sequence
  MKO10003525_A_Aif1l
  gRNA
cccgcaggagggaaggcgtt

SEQ ID NO: 3526 - DNA, 20 bp, Artificial Sequence
  MKO10003526_A_Aif1l
  gRNA
ctgaataatgaaggcgagat

SEQ ID NO: 3527 - DNA, 20 bp, Artificial Sequence
  MKO10003527_A_Aif1l
  gRNA
caatctcgccttcattattc

SEQ ID NO: 3528 - DNA, 20 bp, Artificial Sequence
  MKO10003528_A_Aif1
  gRNA
tatgtccttgaagcgaatgc

SEQ ID NO: 3529 - DNA, 20 bp, Artificial Sequence
  MKO10003529_A_Aif1
  gRNA
agagtagctgaacgtctcct

SEQ ID NO: 3530 - DNA, 20 bp, Artificial Sequence
  MKO10003530_A_Aif1
  gRNA
acccttgaaggcttcaagtt

SEQ ID NO: 3531 - DNA, 20 bp, Artificial Sequence
  MKO10003531_A_Aifm1
  gRNA
atcccgagcccggatggatc

SEQ ID NO: 3532 - DNA, 20 bp, Artificial Sequence
  MKO10003532_A_Aifm1
  gRNA
ggtcgcatgtatggcagttc

SEQ ID NO: 3533 - DNA, 20 bp, Artificial Sequence
  MKO10003533_A_Aifm1
  gRNA
ttgcagcagccagatccatc

SEQ ID NO: 3534 - DNA, 20 bp, Artificial Sequence
  MKO10003534_A_Aifm2
  gRNA
ccagcgctcacaattcatcg

SEQ ID NO: 3535 - DNA, 20 bp, Artificial Sequence
  MKO10003535_A_Aifm2
  gRNA
ggatacaggagccgtgcacg

SEQ ID NO: 3536 - DNA, 20 bp, Artificial Sequence
  MKO10003536_A_Aifm2
  gRNA
gcccacgatcaccacgtgca

SEQ ID NO: 3537 - DNA, 20 bp, Artificial Sequence
  MKO10003537_A_Aifm3
  gRNA
tcctcactatggagcgcccc

SEQ ID NO: 3538 - DNA, 20 bp, Artificial Sequence
  MKO10003538_A_Aifm3
  gRNA
tacctgcttgcttgcccgaa

SEQ ID NO: 3539 - DNA, 20 bp, Artificial Sequence
  MKO10003539_A_Aifm3
  gRNA
aggggcagcgcacacgtccc

SEQ ID NO: 3540 - DNA, 20 bp, Artificial Sequence
  MKO10003540_A_Aig1
  gRNA
agctcatctctctccgggac

SEQ ID NO: 3541 - DNA, 20 bp, Artificial Sequence
  MKO10003541_A_Aig1
  gRNA
cgccatatgcaccttctccg

SEQ ID NO: 3542 - DNA, 20 bp, Artificial Sequence
  MKO10003542_A_Aig1
  gRNA
ctcatactcacaaccccgac

SEQ ID NO: 3543 - DNA, 20 bp, Artificial Sequence
  MKO10003543_A_Aim1l
  gRNA
gcgtccataagggtgatccg

SEQ ID NO: 3544 - DNA, 20 bp, Artificial Sequence
  MKO10003544_A_Aim1l
  gRNA
ccagcctcggatcaccctta

SEQ ID NO: 3545 - DNA, 20 bp, Artificial Sequence
  MKO10003545_A_Aim1l
  gRNA
ggagactccacgcacacgcc

SEQ ID NO: 3546 - DNA, 20 bp, Artificial Sequence
  MKO10003546_A_Aim1
  gRNA
accccgacgtccgtaacaca

SEQ ID NO: 3547 - DNA, 20 bp, Artificial Sequence
  MKO10003547_A_Aim1
  gRNA
gcgtccacgctcccaacatt

SEQ ID NO: 3548 - DNA, 20 bp, Artificial Sequence
  MKO10003548_A_Aim1
  gRNA
ttccatcagacacgtggttc

SEQ ID NO: 3549 - DNA, 20 bp, Artificial Sequence
  MKO10003549_A_Aim2
  gRNA
gctctcttaacaacgttatt

SEQ ID NO: 3550 - DNA, 20 bp, Artificial Sequence
  MKO10003550_A_Aim2
  gRNA
agaagtctgtcctcaagcta

SEQ ID NO: 3551 - DNA, 20 bp, Artificial Sequence
  MKO10003551_A_Aim2
  gRNA
tcactagccaccttagcttg

SEQ ID NO: 3552 - DNA, 20 bp, Artificial Sequence
  MKO10003552_A_Aimp1
  gRNA
tccagacgcgatgcgtcgat

SEQ ID NO: 3553 - DNA, 20 bp, Artificial Sequence
  MKO10003553_A_Aimp1
  gRNA
gcctatcgacgcatcgcgtc

SEQ ID NO: 3554 - DNA, 20 bp, Artificial Sequence
  MKO10003554_A_Aimp1
  gRNA
gcagtacagttcgtctgcag

SEQ ID NO: 3555 - DNA, 20 bp, Artificial Sequence
  MKO10003555_A_Aimp2
  gRNA
gtcccgccacgagtatcagc

SEQ ID NO: 3556 - DNA, 20 bp, Artificial Sequence
  MKO10003556_A_Aimp2
  gRNA
cttaagccaccgctgcacat

SEQ ID NO: 3557 - DNA, 20 bp, Artificial Sequence
  MKO10003557_A_Aimp2
  gRNA
tgaagcccagctgatactcg

SEQ ID NO: 3558 - DNA, 20 bp, Artificial Sequence
  MKO10003558_A_Aipl1
  gRNA
gtggtgtcgtagaatgtcgc

SEQ ID NO: 3559 - DNA, 20 bp, Artificial Sequence
  MKO10003559_A_Aipl1
  gRNA
gaagtgtgatgacgagcgca

SEQ ID NO: 3560 - DNA, 20 bp, Artificial Sequence
  MKO10003560_A_Aipl1
  gRNA
gtctccctctggtactcatt

SEQ ID NO: 3561 - DNA, 20 bp, Artificial Sequence
  MKO10003561_A_Aip
  gRNA
ggcgatggcgtcatagtact

SEQ ID NO: 3562 - DNA, 20 bp, Artificial Sequence
  MKO10003562_A_Aip
  gRNA
atagatgacagccgaacacg

SEQ ID NO: 3563 - DNA, 20 bp, Artificial Sequence
  MKO10003563_A_Aip
  gRNA
gagcctccgcaacatcgccg

SEQ ID NO: 3564 - DNA, 20 bp, Artificial Sequence
  MKO10003564_A_Aire
  gRNA
ggatcccttccacggcccct

SEQ ID NO: 3565 - DNA, 20 bp, Artificial Sequence
  MKO10003565_A_Aire
  gRNA
gcaggagacgctccgtctga

SEQ ID NO: 3566 - DNA, 20 bp, Artificial Sequence
  MKO10003566_A_Aire
  gRNA
ccgggacagtggggccatcc

SEQ ID NO: 3567 - DNA, 20 bp, Artificial Sequence
  MKO10003567_A_Ajap1
  gRNA
ttcaacgatttcgacttccg

SEQ ID NO: 3568 - DNA, 20 bp, Artificial Sequence
  MKO10003568_A_Ajap1
  gRNA
ggtcgagtgcagcgtctcgt

SEQ ID NO: 3569 - DNA, 20 bp, Artificial Sequence
  MKO10003569_A_Ajap1
  gRNA
cccaacgaggctaccgacac

SEQ ID NO: 3570 - DNA, 20 bp, Artificial Sequence
  MKO10003570_A_Ajuba
  gRNA
acttgttacatacgatgcat

SEQ ID NO: 3571 - DNA, 20 bp, Artificial Sequence
  MKO10003571_A_Ajuba
  gRNA
catcgtatgtaacaagtgcc

SEQ ID NO: 3572 - DNA, 20 bp, Artificial Sequence
  MKO10003572_A_Ajuba
  gRNA
tgcttctaggacgaactttg

SEQ ID NO: 3573 - DNA, 20 bp, Artificial Sequence
  MKO10003573_A_Ak1
  gRNA
tctgtacaatcttctcgcac

SEQ ID NO: 3574 - DNA, 20 bp, Artificial Sequence
  MKO10003574_A_Ak1
  gRNA
tggccgcgtggatgacaacg

SEQ ID NO: 3575 - DNA, 20 bp, Artificial Sequence
  MKO10003575_A_Ak1
  gRNA
atctccttctatgacaagcg

SEQ ID NO: 3576 - DNA, 20 bp, Artificial Sequence
  MKO10003576_A_Ak2
  gRNA
gcccttcggaatctccggtt

SEQ ID NO: 3577 - DNA, 20 bp, Artificial Sequence
  MKO10003577_A_Ak2
  gRNA
ttccgaaccggagattccga

SEQ ID NO: 3578 - DNA, 20 bp, Artificial Sequence
  MKO10003578_A_Ak2
  gRNA
ggctccacaggcacccaaac

SEQ ID NO: 3579 - DNA, 20 bp, Artificial Sequence
  MKO10003579_A_Ak3
  gRNA
aacagcgccttactgctcgc

SEQ ID NO: 3580 - DNA, 20 bp, Artificial Sequence
  MKO10003580_A_Ak3
  gRNA
tcatcctcgcgctgaatcag

SEQ ID NO: 3581 - DNA, 20 bp, Artificial Sequence
  MKO10003581_A_Ak3
  gRNA
aatgttgtatactcgaccac

SEQ ID NO: 3582 - DNA, 20 bp, Artificial Sequence
  MKO10003582_A_Ak4
  gRNA
tttaacagaagttggtgacg

SEQ ID NO: 3583 - DNA, 20 bp, Artificial Sequence
  MKO10003583_A_Ak4
  gRNA
attcccgaggacattagtac

SEQ ID NO: 3584 - DNA, 20 bp, Artificial Sequence
  MKO10003584_A_Ak4
  gRNA
ttaaagatcgtctgagccga

SEQ ID NO: 3585 - DNA, 20 bp, Artificial Sequence
  MKO10003585_A_Ak5
  gRNA
agccggtcataccgccgata

SEQ ID NO: 3586 - DNA, 20 bp, Artificial Sequence
  MKO10003586_A_Ak5
  gRNA
tcagctccgccgtctccgac

SEQ ID NO: 3587 - DNA, 20 bp, Artificial Sequence
  MKO10003587_A_Ak5
  gRNA
aagacgttaccgcccctaaa

SEQ ID NO: 3588 - DNA, 20 bp, Artificial Sequence
  MKO10003588_A_Ak6
  gRNA
ctcccacgttaacgtacttc

SEQ ID NO: 3589 - DNA, 20 bp, Artificial Sequence
  MKO10003589_A_Ak6
  gRNA
gtgacttcttccccgaacgc

SEQ ID NO: 3590 - DNA, 20 bp, Artificial Sequence
  MKO10003590_A_Ak6
  gRNA
cttgcagggcagttatacga

SEQ ID NO: 3591 - DNA, 20 bp, Artificial Sequence
  MKO10003591_A_Ak7
  gRNA
tctcccttaggacgacaacg

SEQ ID NO: 3592 - DNA, 20 bp, Artificial Sequence
  MKO10003592_A_Ak7
  gRNA
taagcctccacagcgaagtc

SEQ ID NO: 3593 - DNA, 20 bp, Artificial Sequence
  MKO10003593_A_Ak7
  gRNA
cagaagaggattatcgaaga

SEQ ID NO: 3594 - DNA, 20 bp, Artificial Sequence
  MKO10003594_A_Ak8
  gRNA
cattatcattgttcctgcgc

SEQ ID NO: 3595 - DNA, 20 bp, Artificial Sequence
  MKO10003595_A_Ak8
  gRNA
tcatgatcactcacctgcgc

SEQ ID NO: 3596 - DNA, 20 bp, Artificial Sequence
  MKO10003596_A_Ak8
  gRNA
ggacctaatatcacaacctt

SEQ ID NO: 3597 - DNA, 20 bp, Artificial Sequence
  MKO10003597_A_Akap10
  gRNA
tcagattcccaccgactccc

SEQ ID NO: 3598 - DNA, 20 bp, Artificial Sequence
  MKO10003598_A_Akap10
  gRNA
acttcggagaatggagcacc

SEQ ID NO: 3599 - DNA, 20 bp, Artificial Sequence
  MKO10003599_A_Akap10
  gRNA
accgatgatgtcgtttctca

SEQ ID NO: 3600 - DNA, 20 bp, Artificial Sequence
  MKO10003600_A_Akap11
  gRNA
gcttacattggacgatttac

SEQ ID NO: 3601 - DNA, 20 bp, Artificial Sequence
  MKO10003601_A_Akap11
  gRNA
aagcagtagtcctctaaatc

SEQ ID NO: 3602 - DNA, 20 bp, Artificial Sequence
  MKO10003602_A_Akap11
  gRNA
gcggatgcgcgtgcatgtcc

SEQ ID NO: 3603 - DNA, 20 bp, Artificial Sequence
  MKO10003603_A_Akap12
  gRNA
gagcgacacgccgagcgagc

SEQ ID NO: 3604 - DNA, 20 bp, Artificial Sequence
  MKO10003604_A_Akap12
  gRNA
cgagatcgaaccaagtagag

SEQ ID NO: 3605 - DNA, 20 bp, Artificial Sequence
  MKO10003605_A_Akap12
  gRNA
atcaatgaccgcgacactca

SEQ ID NO: 3606 - DNA, 20 bp, Artificial Sequence
  MKO10003606_A_Akap13
  gRNA
acacggttcctcgatcgatc

SEQ ID NO: 3607 - DNA, 20 bp, Artificial Sequence
  MKO10003607_A_Akap13
  gRNA
ctgcatcatacgcctcatcc

SEQ ID NO: 3608 - DNA, 20 bp, Artificial Sequence
  MKO10003608_A_Akap13
  gRNA
acgtatcagaactgactttc

SEQ ID NO: 3609 - DNA, 20 bp, Artificial Sequence
  MKO10003609_A_Akap14
  gRNA
attggcactgactcgtgcca

SEQ ID NO: 3610 - DNA, 20 bp, Artificial Sequence
  MKO10003610_A_Akap14
  gRNA
aaattcgatttcgagaacag

SEQ ID NO: 3611 - DNA, 20 bp, Artificial Sequence
  MKO10003611_A_Akap14
  gRNA
catgggagtttcaaaaccgc

SEQ ID NO: 3612 - DNA, 20 bp, Artificial Sequence
  MKO10003612_A_Akap17b
  gRNA
tagaatgctctagcccgttt

SEQ ID NO: 3613 - DNA, 20 bp, Artificial Sequence
  MKO10003613_A_Akap17b
  gRNA
tgccatcaatgccgccaaaa

SEQ ID NO: 3614 - DNA, 20 bp, Artificial Sequence
  MKO10003614_A_Akap17b
  gRNA
ggaggagcggaagtacttgc

SEQ ID NO: 3615 - DNA, 20 bp, Artificial Sequence
  MKO10003615_A_Akap1
  gRNA
cagtggtggcgcatagatat

SEQ ID NO: 3616 - DNA, 20 bp, Artificial Sequence
  MKO10003616_A_Akap1
  gRNA
cacttagttggtcgactgat

SEQ ID NO: 3617 - DNA, 20 bp, Artificial Sequence
  MKO10003617_A_Akap1
  gRNA
cgatagcccccagagtgtcc

SEQ ID NO: 3618 - DNA, 20 bp, Artificial Sequence
  MKO10003618_A_Akap2
  gRNA
tccgtccgttgatgacccct

SEQ ID NO: 3619 - DNA, 20 bp, Artificial Sequence
  MKO10003619_A_Akap2
  gRNA
tggtcggtggcttgtccgaa

SEQ ID NO: 3620 - DNA, 20 bp, Artificial Sequence
  MKO10003620_A_Akap2
  gRNA
cttcctccgattaacccgtg

SEQ ID NO: 3621 - DNA, 20 bp, Artificial Sequence
  MKO10003621_A_Akap3
  gRNA
cttggagcgtgccgcaaaac

SEQ ID NO: 3622 - DNA, 20 bp, Artificial Sequence
  MKO10003622_A_Akap3
  gRNA
aatactaccagatggcggat

SEQ ID NO: 3623 - DNA, 20 bp, Artificial Sequence
  MKO10003623_A_Akap3
  gRNA
gcagaacctccccgacgctg

SEQ ID NO: 3624 - DNA, 20 bp, Artificial Sequence
  MKO10003624_A_Akap4
  gRNA
ggaggccatgctaaagcgtc

SEQ ID NO: 3625 - DNA, 20 bp, Artificial Sequence
  MKO10003625_A_Akap4
  gRNA
agtgcacaatacgaaaaatg

SEQ ID NO: 3626 - DNA, 20 bp, Artificial Sequence
  MKO10003626_A_Akap4
  gRNA
agatgtctgacgatattgac

SEQ ID NO: 3627 - DNA, 20 bp, Artificial Sequence
  MKO10003627_A_Akap5
  gRNA
ctctggtcaacggcaaccag

SEQ ID NO: 3628 - DNA, 20 bp, Artificial Sequence
  MKO10003628_A_Akap5
  gRNA
aagaaacatacccccgaagc

SEQ ID NO: 3629 - DNA, 20 bp, Artificial Sequence
  MKO10003629_A_Akap5
  gRNA
gaatgtgatcgccatagaac

SEQ ID NO: 3630 - DNA, 20 bp, Artificial Sequence
  MKO10003630_A_Akap6
  gRNA
tacgatgacattgaccgagt

SEQ ID NO: 3631 - DNA, 20 bp, Artificial Sequence
  MKO10003631_A_Akap6
  gRNA
ctggaggccttcgactgcgc

SEQ ID NO: 3632 - DNA, 20 bp, Artificial Sequence
  MKO10003632_A_Akap6
  gRNA
cccgagctcatccgaagcgt

SEQ ID NO: 3633 - DNA, 20 bp, Artificial Sequence
  MKO10003633_A_Akap7
  gRNA
tgtccaaagcaccgatgctc

SEQ ID NO: 3634 - DNA, 20 bp, Artificial Sequence
  MKO10003634_A_Akap7
  gRNA
tagcggtaccgatgcacttt

SEQ ID NO: 3635 - DNA, 20 bp, Artificial Sequence
  MKO10003635_A_Akap7
  gRNA
agaccatgttagcgcactcc

SEQ ID NO: 3636 - DNA, 20 bp, Artificial Sequence
  MKO10003636_A_Akap8l
  gRNA
cgtgaccagtttcgaatgcg

SEQ ID NO: 3637 - DNA, 20 bp, Artificial Sequence
  MKO10003637_A_Akap8l
  gRNA
atcggcactggcgctacccg

SEQ ID NO: 3638 - DNA, 20 bp, Artificial Sequence
  MKO10003638_A_Akap8l
  gRNA
cttagatatgatgccgcact

SEQ ID NO: 3639 - DNA, 20 bp, Artificial Sequence
  MKO10003639_A_Akap8
  gRNA
cccaatcccgtatccgcgtc

SEQ ID NO: 3640 - DNA, 20 bp, Artificial Sequence
  MKO10003640_A_Akap8
  gRNA
ctggcgtcgtaggactcgta

SEQ ID NO: 3641 - DNA, 20 bp, Artificial Sequence
  MKO10003641_A_Akap8
  gRNA
atagttacggcccagcctca

SEQ ID NO: 3642 - DNA, 20 bp, Artificial Sequence
  MKO10003642_A_Akap9
  gRNA
gatgccgtctcgctgtttaa

SEQ ID NO: 3643 - DNA, 20 bp, Artificial Sequence
  MKO10003643_A_Akap9
  gRNA
gccgccattaaacagcgaga

SEQ ID NO: 3644 - DNA, 20 bp, Artificial Sequence
  MKO10003644_A_Akap9
  gRNA
gcgcacctgcttcagccctt

SEQ ID NO: 3645 - DNA, 20 bp, Artificial Sequence
  MKO10003645_A_Akip1
  gRNA
ctgggtagacttcgatgtag

SEQ ID NO: 3646 - DNA, 20 bp, Artificial Sequence
  MKO10003646_A_Akip1
  gRNA
tgcaaccacgtgcgtcttct

SEQ ID NO: 3647 - DNA, 20 bp, Artificial Sequence
  MKO10003647_A_Akip1
  gRNA
gaattcagccattgctccga

SEQ ID NO: 3648 - DNA, 20 bp, Artificial Sequence
  MKO10003648_A_Akirin1
  gRNA
cctcagcctacctgcgagtt

SEQ ID NO: 3649 - DNA, 20 bp, Artificial Sequence
  MKO10003649_A_Akirin1
  gRNA
atcctcagtaccaaactcgc

SEQ ID NO: 3650 - DNA, 20 bp, Artificial Sequence
  MKO10003650_A_Akirin1
  gRNA
gtctgcttacctggagaacc

SEQ ID NO: 3651 - DNA, 20 bp, Artificial Sequence
  MKO10003651_A_Akirin2
  gRNA
tgtgaatcggaagtacaacc

SEQ ID NO: 3652 - DNA, 20 bp, Artificial Sequence
  MKO10003652_A_Akirin2
  gRNA
gggttattacctggtgatgc

SEQ ID NO: 3653 - DNA, 20 bp, Artificial Sequence
  MKO10003653_A_Akirin2
  gRNA
aacagcccttatttactcta

SEQ ID NO: 3654 - DNA, 20 bp, Artificial Sequence
  MKO10003654_A_Aknad1
  gRNA
ccatttgcaagacataagac

SEQ ID NO: 3655 - DNA, 20 bp, Artificial Sequence
  MKO10003655_A_Aknad1
  gRNA
tactacctgtgagaggttct

SEQ ID NO: 3656 - DNA, 20 bp, Artificial Sequence
  MKO10003656_A_Aknad1
  gRNA
gactgaccaactgaagaata

SEQ ID NO: 3657 - DNA, 20 bp, Artificial Sequence
  MKO10003657_A_Akna
  gRNA
actatcgaccaacttcgcct

SEQ ID NO: 3658 - DNA, 20 bp, Artificial Sequence
  MKO10003658_A_Akna
  gRNA
ttgccccaagccgagtactc

SEQ ID NO: 3659 - DNA, 20 bp, Artificial Sequence
  MKO10003659_A_Akna
  gRNA
agtggccacgccgggggacg

SEQ ID NO: 3660 - DNA, 20 bp, Artificial Sequence
  MKO10003660_A_Akp3
  gRNA
gttgcactggtcgaatctcg

SEQ ID NO: 3661 - DNA, 20 bp, Artificial Sequence
  MKO10003661_A_Akp3
  gRNA
gcaaccttcccgcagcgcag

SEQ ID NO: 3662 - DNA, 20 bp, Artificial Sequence
  MKO10003662_A_Akp3
  gRNA
ccgtcttcaggaaaatccgt

SEQ ID NO: 3663 - DNA, 20 bp, Artificial Sequence
  MKO10003663_A_Akr1a1
  gRNA
atggcgccaagcacggtcag

SEQ ID NO: 3664 - DNA, 20 bp, Artificial Sequence
  MKO10003664_A_Akr1a1
  gRNA
attaaacatgcccttagcgc

SEQ ID NO: 3665 - DNA, 20 bp, Artificial Sequence
  MKO10003665_A_Akr1a1
  gRNA
tggacctctatttgatgcac

SEQ ID NO: 3666 - DNA, 20 bp, Artificial Sequence
  MKO10003666_A_Akr1b10
  gRNA
cagcagtaaatatacgttct

SEQ ID NO: 3667 - DNA, 20 bp, Artificial Sequence
  MKO10003667_A_Akr1b10
  gRNA
gctctcattctgatagacat

SEQ ID NO: 3668 - DNA, 20 bp, Artificial Sequence
  MKO10003668_A_Akr1b10
  gRNA
gtaccttgctgacgatgaag

SEQ ID NO: 3669 - DNA, 20 bp, Artificial Sequence
  MKO10003669_A_Akr1b3
  gRNA
acgcttacctggttcaccgc

SEQ ID NO: 3670 - DNA, 20 bp, Artificial Sequence
  MKO10003670_A_Akr1b3
  gRNA
cccctcaccttgaaccccgt

SEQ ID NO: 3671 - DNA, 20 bp, Artificial Sequence
  MKO10003671_A_Akr1b3
  gRNA
ttaggctatggaacaactag

SEQ ID NO: 3672 - DNA, 20 bp, Artificial Sequence
  MKO10003672_A_Akr1b7
  gRNA
ggactatctggacctgtatc

SEQ ID NO: 3673 - DNA, 20 bp, Artificial Sequence
  MKO10003673_A_Akr1b7
  gRNA
ccttcacggcttccttgact

SEQ ID NO: 3674 - DNA, 20 bp, Artificial Sequence
  MKO10003674_A_Akr1b7
  gRNA
attctcattgtgatacacat

SEQ ID NO: 3675 - DNA, 20 bp, Artificial Sequence
  MKO10003675_A_Akr1b8
  gRNA
cacctcattctcgttgcaat

SEQ ID NO: 3676 - DNA, 20 bp, Artificial Sequence
  MKO10003676_A_Akr1b8
  gRNA
tgcctattgcaacgagaatg

SEQ ID NO: 3677 - DNA, 20 bp, Artificial Sequence
  MKO10003677_A_Akr1b8
  gRNA
caccagtaagacaacattct

SEQ ID NO: 3678 - DNA, 20 bp, Artificial Sequence
  MKO10003678_A_Akr1c12
  gRNA
cggttgctttcgaccagagc

SEQ ID NO: 3679 - DNA, 20 bp, Artificial Sequence
  MKO10003679_A_Akr1c12
  gRNA
aatttcccgttctcatctaa

SEQ ID NO: 3680 - DNA, 20 bp, Artificial Sequence
  MKO10003680_A_Akr1c12
  gRNA
gatcaacataatccagctga

SEQ ID NO: 3681 - DNA, 20 bp, Artificial Sequence
  MKO10003681_A_Akr1c13
  gRNA
tcacgtaccttcattggcac

SEQ ID NO: 3682 - DNA, 20 bp, Artificial Sequence
  MKO10003682_A_Akr1c13
  gRNA
cacttgctttcgaccagagc

SEQ ID NO: 3683 - DNA, 20 bp, Artificial Sequence
  MKO10003683_A_Akr1c13
  gRNA
acttcagtcctggcttattg

SEQ ID NO: 3684 - DNA, 20 bp, Artificial Sequence
  MKO10003684_A_Akr1c14
  gRNA
ctatttccacgagacgaaca

SEQ ID NO: 3685 - DNA, 20 bp, Artificial Sequence
  MKO10003685_A_Akr1c14
  gRNA
gagtgtcgaactttaacttc

SEQ ID NO: 3686 - DNA, 20 bp, Artificial Sequence
  MKO10003686_A_Akr1c14
  gRNA
gttaaagttcgacactccga

SEQ ID NO: 3687 - DNA, 20 bp, Artificial Sequence
  MKO10003687_A_Akr1c18
  gRNA
aagctgggtctgaccaactc

SEQ ID NO: 3688 - DNA, 20 bp, Artificial Sequence
  MKO10003688_A_Akr1c18
  gRNA
aacttcccatcgtccagagt

SEQ ID NO: 3689 - DNA, 20 bp, Artificial Sequence
  MKO10003689_A_Akr1c18
  gRNA
taactttaaccgtagacaac

SEQ ID NO: 3690 - DNA, 20 bp, Artificial Sequence
  MKO10003690_A_Akr1c19
  gRNA
agagctggttcgctctaact

SEQ ID NO: 3691 - DNA, 20 bp, Artificial Sequence
  MKO10003691_A_Akr1c19
  gRNA
aagttagagcgaaccagctc

SEQ ID NO: 3692 - DNA, 20 bp, Artificial Sequence
  MKO10003692_A_Akr1c19
  gRNA
cagctgcctgctattaaagt

SEQ ID NO: 3693 - DNA, 20 bp, Artificial Sequence
  MKO10003693_A_Akr1c20
  gRNA
aacatttcatcgtccagaac

SEQ ID NO: 3694 - DNA, 20 bp, Artificial Sequence
  MKO10003694_A_Akr1c20
  gRNA
acttgagccccggcttactc

SEQ ID NO: 3695 - DNA, 20 bp, Artificial Sequence
  MKO10003695_A_Akr1c20
  gRNA
aagcatacctgcaccagttc

SEQ ID NO: 3696 - DNA, 20 bp, Artificial Sequence
  MKO10003696_A_Akr1c21
  gRNA
aaaacttcagttcgactatg

SEQ ID NO: 3697 - DNA, 20 bp, Artificial Sequence
  MKO10003697_A_Akr1c21
  gRNA
gtgtcccaagagtaaagcta

SEQ ID NO: 3698 - DNA, 20 bp, Artificial Sequence
  MKO10003698_A_Akr1c21
  gRNA
caacatactttcagggccat

SEQ ID NO: 3699 - DNA, 20 bp, Artificial Sequence
  MKO10003699_A_Akr1c6
  gRNA
ttcatcgtccagaactcgta

SEQ ID NO: 3700 - DNA, 20 bp, Artificial Sequence
  MKO10003700_A_Akr1c6
  gRNA
aagcagacccgtacgagttc

SEQ ID NO: 3701 - DNA, 20 bp, Artificial Sequence
  MKO10003701_A_Akr1c6
  gRNA
atccgaagcaagatagcaga

SEQ ID NO: 3702 - DNA, 20 bp, Artificial Sequence
  MKO10003702_A_Akr1cl
  gRNA
agggctggccatccgaagca

SEQ ID NO: 3703 - DNA, 20 bp, Artificial Sequence
  MKO10003703_A_Akr1cl
  gRNA
tgccatcagcaaccttgctt

SEQ ID NO: 3704 - DNA, 20 bp, Artificial Sequence
  MKO10003704_A_Akr1cl
  gRNA
ttgcttaccttcatggacac

SEQ ID NO: 3705 - DNA, 20 bp, Artificial Sequence
  MKO10003705_A_Akr1d1
  gRNA
cataggcgccatcaatgtgc

SEQ ID NO: 3706 - DNA, 20 bp, Artificial Sequence
  MKO10003706_A_Akr1d1
  gRNA
agccctggaaaggacgctaa

SEQ ID NO: 3707 - DNA, 20 bp, Artificial Sequence
  MKO10003707_A_Akr1d1
  gRNA
caccgacttcatgctcattg

SEQ ID NO: 3708 - DNA, 20 bp, Artificial Sequence
  MKO10003708_A_Akr1e1
  gRNA
accttgccattgcgatccaa

SEQ ID NO: 3709 - DNA, 20 bp, Artificial Sequence
  MKO10003709_A_Akr1e1
  gRNA
cttataccacaatgagagcg

SEQ ID NO: 3710 - DNA, 20 bp, Artificial Sequence
  MKO10003710_A_Akr1e1
  gRNA
agccctaaacttggattacc

SEQ ID NO: 3711 - DNA, 20 bp, Artificial Sequence
  MKO10003711_A_Akr7a5
  gRNA
gcttcagagacgtctctaac

SEQ ID NO: 3712 - DNA, 20 bp, Artificial Sequence
  MKO10003712_A_Akr7a5
  gRNA
caacccgtgggccgcttctt

SEQ ID NO: 3713 - DNA, 20 bp, Artificial Sequence
  MKO10003713_A_Akr7a5
  gRNA
gcatgtacaacgccaccacc

SEQ ID NO: 3714 - DNA, 20 bp, Artificial Sequence
  MKO10003714_A_Akt1s1
  gRNA
tattcggtctaggtcgggcg

SEQ ID NO: 3715 - DNA, 20 bp, Artificial Sequence
  MKO10003715_A_Akt1s1
  gRNA
gcccgacctagaccgaatag

SEQ ID NO: 3716 - DNA, 20 bp, Artificial Sequence
  MKO10003716_A_Akt1s1
  gRNA
tgtgcgcctgtgcgatgtcg

SEQ ID NO: 3717 - DNA, 20 bp, Artificial Sequence
  MKO10003717_A_Akt1
  gRNA
cgacgatgacctccttcttg

SEQ ID NO: 3718 - DNA, 20 bp, Artificial Sequence
  MKO10003718_A_Akt1
  gRNA
tacttcctcctcaagaacga

SEQ ID NO: 3719 - DNA, 20 bp, Artificial Sequence
  MKO10003719_A_Akt1
  gRNA
cattgagcgcaccttccatg

SEQ ID NO: 3720 - DNA, 20 bp, Artificial Sequence
  MKO10003720_A_Akt2
  gRNA
caggtgaatacatcaagacc

SEQ ID NO: 3721 - DNA, 20 bp, Artificial Sequence
  MKO10003721_A_Akt2
  gRNA
caccttcggcaaggtcattc

SEQ ID NO: 3722 - DNA, 20 bp, Artificial Sequence
  MKO10003722_A_Akt2
  gRNA
ctgctacagagaaattgttc

SEQ ID NO: 3723 - DNA, 20 bp, Artificial Sequence
  MKO10003723_A_Akt3
  gRNA
ccgtagccgaccgattgcag

SEQ ID NO: 3724 - DNA, 20 bp, Artificial Sequence
  MKO10003724_A_Akt3
  gRNA
tcctatattatcaatctgtg

SEQ ID NO: 3725 - DNA, 20 bp, Artificial Sequence
  MKO10003725_A_Akt3
  gRNA
atgagccatctgtcttcaaa

SEQ ID NO: 3726 - DNA, 20 bp, Artificial Sequence
  MKO10003726_A_Aktip
  gRNA
ccgtttgttgactgcgctgc

SEQ ID NO: 3727 - DNA, 20 bp, Artificial Sequence
  MKO10003727_A_Aktip
  gRNA
cttaccggacagtcgccatc

SEQ ID NO: 3728 - DNA, 20 bp, Artificial Sequence
  MKO10003728_A_Aktip
  gRNA
tgaaaagagcgttcgcaaag

SEQ ID NO: 3729 - DNA, 20 bp, Artificial Sequence
  MKO10003729_A_Alad
  gRNA
ggggcacaagcagacgtcac

SEQ ID NO: 3730 - DNA, 20 bp, Artificial Sequence
  MKO10003730_A_Alad
  gRNA
ccacctctgccaaccgctgt

SEQ ID NO: 3731 - DNA, 20 bp, Artificial Sequence
  MKO10003731_A_Alad
  gRNA
gcgataggctggacatcatc

SEQ ID NO: 3732 - DNA, 20 bp, Artificial Sequence
  MKO10003732_A_Alas1
  gRNA
agagcgccgcatctttgccg

SEQ ID NO: 3733 - DNA, 20 bp, Artificial Sequence
  MKO10003733_A_Alas1
  gRNA
tccgtgtagtcatccgccat

SEQ ID NO: 3734 - DNA, 20 bp, Artificial Sequence
  MKO10003734_A_Alas1
  gRNA
aagttcttcagcagtcggct

SEQ ID NO: 3735 - DNA, 20 bp, Artificial Sequence
  MKO10003735_A_Alas2
  gRNA
ggcagcgtccaatactaaat

SEQ ID NO: 3736 - DNA, 20 bp, Artificial Sequence
  MKO10003736_A_Alas2
  gRNA
tctatggcctgcaagacacg

SEQ ID NO: 3737 - DNA, 20 bp, Artificial Sequence
  MKO10003737_A_Alas2
  gRNA
tgttcaagactgtgaatcgt

SEQ ID NO: 3738 - DNA, 20 bp, Artificial Sequence
  MKO10003738_A_Alb
  gRNA
gctcatcgtatgagcatttc

SEQ ID NO: 3739 - DNA, 20 bp, Artificial Sequence
  MKO10003739_A_Alb
  gRNA
acaagagtgagatcgcccat

SEQ ID NO: 3740 - DNA, 20 bp, Artificial Sequence
  MKO10003740_A_Alb
  gRNA
ctcccaaatcattataccga

SEQ ID NO: 3741 - DNA, 20 bp, Artificial Sequence
  MKO10003741_A_Alcam
  gRNA
tgaggtacatcgagacggca

SEQ ID NO: 3742 - DNA, 20 bp, Artificial Sequence
  MKO10003742_A_Alcam
  gRNA
tgaagcacctaccctagtca

SEQ ID NO: 3743 - DNA, 20 bp, Artificial Sequence
  MKO10003743_A_Alcam
  gRNA
gactttcaggaaaagcccga

SEQ ID NO: 3744 - DNA, 20 bp, Artificial Sequence
  MKO10003744_A_Aldh16a1
  gRNA
gctgttcgagaggttcgaga

SEQ ID NO: 3745 - DNA, 20 bp, Artificial Sequence
  MKO10003745_A_Aldh16a1
  gRNA
ggacacccacaaccgcctct

SEQ ID NO: 3746 - DNA, 20 bp, Artificial Sequence
  MKO10003746_A_Aldh16a1
  gRNA
agtctgccagtgcgtcaccc

SEQ ID NO: 3747 - DNA, 20 bp, Artificial Sequence
  MKO10003747_A_Aldh18a1
  gRNA
gcgcaggcgctgtttgccga

SEQ ID NO: 3748 - DNA, 20 bp, Artificial Sequence
  MKO10003748_A_Aldh18a1
  gRNA
acgaacatgtctaatagctg

SEQ ID NO: 3749 - DNA, 20 bp, Artificial Sequence
  MKO10003749_A_Aldh18a1
  gRNA
gccgcacgctctgagacaga

SEQ ID NO: 3750 - DNA, 20 bp, Artificial Sequence
  MKO10003750_A_Aldh1a1
  gRNA
taaatccgacaagtatgcat

SEQ ID NO: 3751 - DNA, 20 bp, Artificial Sequence
  MKO10003751_A_Aldh1a1
  gRNA
aaagcattaaagtactgtgc

SEQ ID NO: 3752 - DNA, 20 bp, Artificial Sequence
  MKO10003752_A_Aldh1a1
  gRNA
gagaacttacggggatgatt

SEQ ID NO: 3753 - DNA, 20 bp, Artificial Sequence
  MKO10003753_A_Aldh1a2
  gRNA
cacggaatgaccattcctgt

SEQ ID NO: 3754 - DNA, 20 bp, Artificial Sequence
  MKO10003754_A_Aldh1a2
  gRNA
aggatggatgcgtctgaaag

SEQ ID NO: 3755 - DNA, 20 bp, Artificial Sequence
  MKO10003755_A_Aldh1a2
  gRNA
ttcacaagacacgagcccat

SEQ ID NO: 3756 - DNA, 20 bp, Artificial Sequence
  MKO10003756_A_Aldh1a3
  gRNA
tacttacagccaggatcgct

SEQ ID NO: 3757 - DNA, 20 bp, Artificial Sequence
  MKO10003757_A_Aldh1a3
  gRNA
aatggccccacacaccccga

SEQ ID NO: 3758 - DNA, 20 bp, Artificial Sequence
  MKO10003758_A_Aldh1a3
  gRNA
ccacggggatccccgctgga

SEQ ID NO: 3759 - DNA, 20 bp, Artificial Sequence
  MKO10003759_A_Aldh1a7
  gRNA
aaagcattacagtacttcgc

SEQ ID NO: 3760 - DNA, 20 bp, Artificial Sequence
  MKO10003760_A_Aldh1a7
  gRNA
acaatggaatcgatgaatgc

SEQ ID NO: 3761 - DNA, 20 bp, Artificial Sequence
  MKO10003761_A_Aldh1a7
  gRNA
tgtccttaaccctgcaactg

SEQ ID NO: 3762 - DNA, 20 bp, Artificial Sequence
  MKO10003762_A_Aldh1b1
  gRNA
agcccgagaagccttccgcc

SEQ ID NO: 3763 - DNA, 20 bp, Artificial Sequence
  MKO10003763_A_Aldh1b1
  gRNA
cttcacccgacatgagccag

SEQ ID NO: 3764 - DNA, 20 bp, Artificial Sequence
  MKO10003764_A_Aldh1b1
  gRNA
tgtaccgttacttcgctggc

SEQ ID NO: 3765 - DNA, 20 bp, Artificial Sequence
  MKO10003765_A_Aldh1l1
  gRNA
gtcatcaatgccccccggca

SEQ ID NO: 3766 - DNA, 20 bp, Artificial Sequence
  MKO10003766_A_Aldh1l1
  gRNA
tgtcctcgagcccgccaccg

SEQ ID NO: 3767 - DNA, 20 bp, Artificial Sequence
  MKO10003767_A_Aldh1l1
  gRNA
gctgatgacggtctggacac

SEQ ID NO: 3768 - DNA, 20 bp, Artificial Sequence
  MKO10003768_A_Aldh1l2
  gRNA
tgagctcggctcccaccgac

SEQ ID NO: 3769 - DNA, 20 bp, Artificial Sequence
  MKO10003769_A_Aldh1l2
  gRNA
gccgtccaactcatagctga

SEQ ID NO: 3770 - DNA, 20 bp, Artificial Sequence
  MKO10003770_A_Aldh1l2
  gRNA
tatagacttcctgtccgaac

SEQ ID NO: 3771 - DNA, 20 bp, Artificial Sequence
  MKO10003771_A_Aldh2
  gRNA
acgggaccggacctacctag

SEQ ID NO: 3772 - DNA, 20 bp, Artificial Sequence
  MKO10003772_A_Aldh2
  gRNA
gctgaagaagtcgccgtcga

SEQ ID NO: 3773 - DNA, 20 bp, Artificial Sequence
  MKO10003773_A_Aldh2
  gRNA
gccttatgtcatctcgtacc

SEQ ID NO: 3774 - DNA, 20 bp, Artificial Sequence
  MKO10003774_A_Aldh3a1
  gRNA
tgaatggacctcctactacg

SEQ ID NO: 3775 - DNA, 20 bp, Artificial Sequence
  MKO10003775_A_Aldh3a1
  gRNA
cgaaatcgatttcacgatta

SEQ ID NO: 3776 - DNA, 20 bp, Artificial Sequence
  MKO10003776_A_Aldh3a1
  gRNA
gggacaccccctttgatcac

SEQ ID NO: 3777 - DNA, 20 bp, Artificial Sequence
  MKO10003777_A_Aldh3a2
  gRNA
cgccattaacaatcgcatac

SEQ ID NO: 3778 - DNA, 20 bp, Artificial Sequence
  MKO10003778_A_Aldh3a2
  gRNA
cgttcttaccatgcaaccgc

SEQ ID NO: 3779 - DNA, 20 bp, Artificial Sequence
  MKO10003779_A_Aldh3a2
  gRNA
gacctgtatgcgattgttaa

SEQ ID NO: 3780 - DNA, 20 bp, Artificial Sequence
  MKO10003780_A_Aldh3b1
  gRNA
taacctgacactcgtgccgc

SEQ ID NO: 3781 - DNA, 20 bp, Artificial Sequence
  MKO10003781_A_Aldh3b1
  gRNA
ccaccagcggcacgagtgtc

SEQ ID NO: 3782 - DNA, 20 bp, Artificial Sequence
  MKO10003782_A_Aldh3b1
  gRNA
catccttcatccaagaccgc

SEQ ID NO: 3783 - DNA, 20 bp, Artificial Sequence
  MKO10003783_A_Aldh3b2
  gRNA
ggtccacctcattctcgcac

SEQ ID NO: 3784 - DNA, 20 bp, Artificial Sequence
  MKO10003784_A_Aldh3b2
  gRNA
ccttcaatgcagggcggact

SEQ ID NO: 3785 - DNA, 20 bp, Artificial Sequence
  MKO10003785_A_Aldh3b2
  gRNA
tgtgcagtccgaaactcagt

SEQ ID NO: 3786 - DNA, 20 bp, Artificial Sequence
  MKO10003786_A_Aldh4a1
  gRNA
cgacaactggtactgtatat

SEQ ID NO: 3787 - DNA, 20 bp, Artificial Sequence
  MKO10003787_A_Aldh4a1
  gRNA
tggcaaggacttccgccctt

SEQ ID NO: 3788 - DNA, 20 bp, Artificial Sequence
  MKO10003788_A_Aldh4a1
  gRNA
ctcctcgtccccgacaacgc

SEQ ID NO: 3789 - DNA, 20 bp, Artificial Sequence
  MKO10003789_A_Aldh5a1
  gRNA
tttccgggtgatcatcgcac

SEQ ID NO: 3790 - DNA, 20 bp, Artificial Sequence
  MKO10003790_A_Aldh5a1
  gRNA
ggtcctgtgtaccgatccat

SEQ ID NO: 3791 - DNA, 20 bp, Artificial Sequence
  MKO10003791_A_Aldh5a1
  gRNA
ggagcttactactccgtaaa

SEQ ID NO: 3792 - DNA, 20 bp, Artificial Sequence
  MKO10003792_A_Aldh6a1
  gRNA
gcaaacgtgctttccctgcg

SEQ ID NO: 3793 - DNA, 20 bp, Artificial Sequence
  MKO10003793_A_Aldh6a1
  gRNA
tgcgtccatctcagctttgg

SEQ ID NO: 3794 - DNA, 20 bp, Artificial Sequence
  MKO10003794_A_Aldh6a1
  gRNA
ttgttccagtgtgattaacc

SEQ ID NO: 3795 - DNA, 20 bp, Artificial Sequence
  MKO10003795_A_Aldh7a1
  gRNA
ctgactatttctccgcgttt

SEQ ID NO: 3796 - DNA, 20 bp, Artificial Sequence
  MKO10003796_A_Aldh7a1
  gRNA
acacgccctcgttatcctcg

SEQ ID NO: 3797 - DNA, 20 bp, Artificial Sequence
  MKO10003797_A_Aldh7a1
  gRNA
acctgtcggactcttgctat

SEQ ID NO: 3798 - DNA, 20 bp, Artificial Sequence
  MKO10003798_A_Aldh8a1
  gRNA
tctgtgtgcactccgatacg

SEQ ID NO: 3799 - DNA, 20 bp, Artificial Sequence
  MKO10003799_A_Aldh8a1
  gRNA
ctccaacctgcaccacgtat

SEQ ID NO: 3800 - DNA, 20 bp, Artificial Sequence
  MKO10003800_A_Aldh8a1
  gRNA
ttgccgggatacactcctcc

SEQ ID NO: 3801 - DNA, 20 bp, Artificial Sequence
  MKO10003801_A_Aldh9a1
  gRNA
caccaaagcgggtgcgcctc

SEQ ID NO: 3802 - DNA, 20 bp, Artificial Sequence
  MKO10003802_A_Aldh9a1
  gRNA
ttctcctgaacacgcgaaag

SEQ ID NO: 3803 - DNA, 20 bp, Artificial Sequence
  MKO10003803_A_Aldh9a1
  gRNA
tacacccgaagagagccgct

SEQ ID NO: 3804 - DNA, 20 bp, Artificial Sequence
  MKO10003804_A_Aldoart1
  gRNA
gcgattgcccatgcttccaa

SEQ ID NO: 3805 - DNA, 20 bp, Artificial Sequence
  MKO10003805_A_Aldoart1
  gRNA
gtggctccagtcttgccact

SEQ ID NO: 3806 - DNA, 20 bp, Artificial Sequence
  MKO10003806_A_Aldoart1
  gRNA
gtatgggcagggcatagttc

SEQ ID NO: 3807 - DNA, 20 bp, Artificial Sequence
  MKO10003807_A_Aldoart2
  gRNA
cttgccacccctcacgactt

SEQ ID NO: 3808 - DNA, 20 bp, Artificial Sequence
  MKO10003808_A_Aldoart2
  gRNA
taccacacaccaaagtcgtg

SEQ ID NO: 3809 - DNA, 20 bp, Artificial Sequence
  MKO10003809_A_Aldoart2
  gRNA
ccttgaaaattcgaactgtt

SEQ ID NO: 3810 - DNA, 20 bp, Artificial Sequence
  MKO10003810_A_Aldoa
  gRNA
tgacatcgctcaccgcattg

SEQ ID NO: 3811 - DNA, 20 bp, Artificial Sequence
  MKO10003811_A_Aldoa
  gRNA
caatggcgagacaactaccc

SEQ ID NO: 3812 - DNA, 20 bp, Artificial Sequence
  MKO10003812_A_Aldoa
  gRNA
ctggcaggtagataagggtg

SEQ ID NO: 3813 - DNA, 20 bp, Artificial Sequence
  MKO10003813_A_Aldob
  gRNA
ggatcactccgccgatgctc

SEQ ID NO: 3814 - DNA, 20 bp, Artificial Sequence
  MKO10003814_A_Aldob
  gRNA
ggtccctattgttgagccag

SEQ ID NO: 3815 - DNA, 20 bp, Artificial Sequence
  MKO10003815_A_Aldob
  gRNA
ccatgggaaaccgcctgcaa

SEQ ID NO: 3816 - DNA, 20 bp, Artificial Sequence
  MKO10003816_A_Aldoc
  gRNA
aatcagtgatcgcacgccgt

SEQ ID NO: 3817 - DNA, 20 bp, Artificial Sequence
  MKO10003817_A_Aldoc
  gRNA
attggagaatgccaacgtgc

SEQ ID NO: 3818 - DNA, 20 bp, Artificial Sequence
  MKO10003818_A_Aldoc
  gRNA
gaatgggatcgtgcctattg

SEQ ID NO: 3819 - DNA, 20 bp, Artificial Sequence
  MKO10003819_A_Alg10b
  gRNA
gtatctggtgtcggtcggtg

SEQ ID NO: 3820 - DNA, 20 bp, Artificial Sequence
  MKO10003820_A_Alg10b
  gRNA
caccgaccgacaccagatac

SEQ ID NO: 3821 - DNA, 20 bp, Artificial Sequence
  MKO10003821_A_Alg10b
  gRNA
cataggacctcggccttgct

SEQ ID NO: 3822 - DNA, 20 bp, Artificial Sequence
  MKO10003822_A_Alg11
  gRNA
ggtgcgtgtacgccgtgctg

SEQ ID NO: 3823 - DNA, 20 bp, Artificial Sequence
  MKO10003823_A_Alg11
  gRNA
tgttgcgacaccctccaata

SEQ ID NO: 3824 - DNA, 20 bp, Artificial Sequence
  MKO10003824_A_Alg11
  gRNA
gataagatggcggcggacac

SEQ ID NO: 3825 - DNA, 20 bp, Artificial Sequence
  MKO10003825_A_Alg12
  gRNA
caagcggtcatggccgcttc

SEQ ID NO: 3826 - DNA, 20 bp, Artificial Sequence
  MKO10003826_A_Alg12
  gRNA
gttgttcctaggacgttcct

SEQ ID NO: 3827 - DNA, 20 bp, Artificial Sequence
  MKO10003827_A_Alg12
  gRNA
gatggcgtgtcggagcactc

SEQ ID NO: 3828 - DNA, 20 bp, Artificial Sequence
  MKO10003828_A_Alg13
  gRNA
gtttcgacgagctcgtcgca

SEQ ID NO: 3829 - DNA, 20 bp, Artificial Sequence
  MKO10003829_A_Alg13
  gRNA
ggtcgctaacgactgcgttc

SEQ ID NO: 3830 - DNA, 20 bp, Artificial Sequence
  MKO10003830_A_Alg13
  gRNA
ggttgtaacccagactctcg

SEQ ID NO: 3831 - DNA, 20 bp, Artificial Sequence
  MKO10003831_A_Alg14
  gRNA
tttgtcaaacaattcgcccc

SEQ ID NO: 3832 - DNA, 20 bp, Artificial Sequence
  MKO10003832_A_Alg14
  gRNA
ttcaccgaattccgagaagc

SEQ ID NO: 3833 - DNA, 20 bp, Artificial Sequence
  MKO10003833_A_Alg14
  gRNA
ttctcggaattcggtgaagg

SEQ ID NO: 3834 - DNA, 20 bp, Artificial Sequence
  MKO10003834_A_Alg1
  gRNA
gggccccgaattctccagta

SEQ ID NO: 3835 - DNA, 20 bp, Artificial Sequence
  MKO10003835_A_Alg1
  gRNA
ttctgcaagagttcatctcg

SEQ ID NO: 3836 - DNA, 20 bp, Artificial Sequence
  MKO10003836_A_Alg1
  gRNA
atacaaccttgactccatac

SEQ ID NO: 3837 - DNA, 20 bp, Artificial Sequence
  MKO10003837_A_Alg2
  gRNA
gtattcctcgatccagtcga

SEQ ID NO: 3838 - DNA, 20 bp, Artificial Sequence
  MKO10003838_A_Alg2
  gRNA
tctctatcaaccgatacgaa

SEQ ID NO: 3839 - DNA, 20 bp, Artificial Sequence
  MKO10003839_A_Alg2
  gRNA
acctgtaccgagcccgttcc

SEQ ID NO: 3840 - DNA, 20 bp, Artificial Sequence
  MKO10003840_A_Alg3
  gRNA
gaatgtgctgctcttcgccc

SEQ ID NO: 3841 - DNA, 20 bp, Artificial Sequence
  MKO10003841_A_Alg3
  gRNA
ccatagggatatcagtgccc

SEQ ID NO: 3842 - DNA, 20 bp, Artificial Sequence
  MKO10003842_A_Alg3
  gRNA
tcatcttccagctacccagc

SEQ ID NO: 3843 - DNA, 20 bp, Artificial Sequence
  MKO10003843_A_Alg5
  gRNA
tccgcaccagcgttatcacc

SEQ ID NO: 3844 - DNA, 20 bp, Artificial Sequence
  MKO10003844_A_Alg5
  gRNA
caaagtccgggtgataacgc

SEQ ID NO: 3845 - DNA, 20 bp, Artificial Sequence
  MKO10003845_A_Alg5
  gRNA
tgattgtacgttcacgtatg

SEQ ID NO: 3846 - DNA, 20 bp, Artificial Sequence
  MKO10003846_A_Alg6
  gRNA
tttgctcatttacgtacccg

SEQ ID NO: 3847 - DNA, 20 bp, Artificial Sequence
  MKO10003847_A_Alg6
  gRNA
ctatgataggccgtaagagg

SEQ ID NO: 3848 - DNA, 20 bp, Artificial Sequence
  MKO10003848_A_Alg6
  gRNA
gttgctctccacacatcacg

SEQ ID NO: 3849 - DNA, 20 bp, Artificial Sequence
  MKO10003849_A_Alg8
  gRNA
agcacggacagaataaactt

SEQ ID NO: 3850 - DNA, 20 bp, Artificial Sequence
  MKO10003850_A_Alg8
  gRNA
gtacttcaaaatccgtggaa

SEQ ID NO: 3851 - DNA, 20 bp, Artificial Sequence
  MKO10003851_A_Alg8
  gRNA
tacctgaaatagacgtgcaa

SEQ ID NO: 3852 - DNA, 20 bp, Artificial Sequence
  MKO10003852_A_Alg9
  gRNA
gcatgtgagtcgaatgatgc

SEQ ID NO: 3853 - DNA, 20 bp, Artificial Sequence
  MKO10003853_A_Alg9
  gRNA
cttacctgctgctgcacgcc

SEQ ID NO: 3854 - DNA, 20 bp, Artificial Sequence
  MKO10003854_A_Alg9
  gRNA
ggcatgttctgctcatcatc

SEQ ID NO: 3855 - DNA, 20 bp, Artificial Sequence
  MKO10003855_A_Alkbh1
  gRNA
tcactgagcgtgatgccgag

SEQ ID NO: 3856 - DNA, 20 bp, Artificial Sequence
  MKO10003856_A_Alkbh1
  gRNA
agtctaggcgatagtaattc

SEQ ID NO: 3857 - DNA, 20 bp, Artificial Sequence
  MKO10003857_A_Alkbh1
  gRNA
ctatcgcctagactccacac

SEQ ID NO: 3858 - DNA, 20 bp, Artificial Sequence
  MKO10003858_A_Alkbh2
  gRNA
tggcgacaccttcgcgcgga

SEQ ID NO: 3859 - DNA, 20 bp, Artificial Sequence
  MKO10003859_A_Alkbh2
  gRNA
cgaaaagtcaagttgacccg

SEQ ID NO: 3860 - DNA, 20 bp, Artificial Sequence
  MKO10003860_A_Alkbh2
  gRNA
tgtgattacaccgtcctatt

SEQ ID NO: 3861 - DNA, 20 bp, Artificial Sequence
  MKO10003861_A_Alkbh3
  gRNA
agccgtctttcccagaccgc

SEQ ID NO: 3862 - DNA, 20 bp, Artificial Sequence
  MKO10003862_A_Alkbh3
  gRNA
ttaagggtgtgcttatatcc

SEQ ID NO: 3863 - DNA, 20 bp, Artificial Sequence
  MKO10003863_A_Alkbh3
  gRNA
gcttacttactcaatcactc

SEQ ID NO: 3864 - DNA, 20 bp, Artificial Sequence
  MKO10003864_A_Alkbh4
  gRNA
gtcgtccaagtgggggtcga

SEQ ID NO: 3865 - DNA, 20 bp, Artificial Sequence
  MKO10003865_A_Alkbh4
  gRNA
agtaccccgccgctccttgc

SEQ ID NO: 3866 - DNA, 20 bp, Artificial Sequence
  MKO10003866_A_Alkbh4
  gRNA
agctgagatggtgcgtctga

SEQ ID NO: 3867 - DNA, 20 bp, Artificial Sequence
  MKO10003867_A_Alkbh5
  gRNA
ggtggtgtcccgcgccgaga

SEQ ID NO: 3868 - DNA, 20 bp, Artificial Sequence
  MKO10003868_A_Alkbh5
  gRNA
atctcgtcgacgtcgcccgg

SEQ ID NO: 3869 - DNA, 20 bp, Artificial Sequence
  MKO10003869_A_Alkbh5
  gRNA
aagattagatgcaccgcgat

SEQ ID NO: 3870 - DNA, 20 bp, Artificial Sequence
  MKO10003870_A_Alkbh6
  gRNA
cgctcagggaccatcccccg

SEQ ID NO: 3871 - DNA, 20 bp, Artificial Sequence
  MKO10003871_A_Alkbh6
  gRNA
acatcatcgtctggctgtcg

SEQ ID NO: 3872 - DNA, 20 bp, Artificial Sequence
  MKO10003872_A_Alkbh6
  gRNA
agaggaatatttgcttcgac

SEQ ID NO: 3873 - DNA, 20 bp, Artificial Sequence
  MKO10003873_A_Alkbh7
  gRNA
ggacacgctaacacgcgaac

SEQ ID NO: 3874 - DNA, 20 bp, Artificial Sequence
  MKO10003874_A_Alkbh7
  gRNA
ggcgctacgagtacgaccac

SEQ ID NO: 3875 - DNA, 20 bp, Artificial Sequence
  MKO10003875_A_Alkbh7
  gRNA
tcactgagatgcgtcggccc

SEQ ID NO: 3876 - DNA, 20 bp, Artificial Sequence
  MKO10003876_A_Alkbh8
  gRNA
gtctgggtaatggcgtgagt

SEQ ID NO: 3877 - DNA, 20 bp, Artificial Sequence
  MKO10003877_A_Alkbh8
  gRNA
catgtacttacccccaggta

SEQ ID NO: 3878 - DNA, 20 bp, Artificial Sequence
  MKO10003878_A_Alkbh8
  gRNA
gccattacccagaccaccat

SEQ ID NO: 3879 - DNA, 20 bp, Artificial Sequence
  MKO10003879_A_Alk
  gRNA
ctttcccaccgcagtcgata

SEQ ID NO: 3880 - DNA, 20 bp, Artificial Sequence
  MKO10003880_A_Alk
  gRNA
tacacttaccatatcgactg

SEQ ID NO: 3881 - DNA, 20 bp, Artificial Sequence
  MKO10003881_A_Alk
  gRNA
tgggcaacatatctccccga

SEQ ID NO: 3882 - DNA, 20 bp, Artificial Sequence
  MKO10003882_A_Allc
  gRNA
cattattcgtggtatcgacg

SEQ ID NO: 3883 - DNA, 20 bp, Artificial Sequence
  MKO10003883_A_Allc
  gRNA
accagacgtaagcgaattcc

SEQ ID NO: 3884 - DNA, 20 bp, Artificial Sequence
  MKO10003884_A_Allc
  gRNA
acctggaattcgcttacgtc

SEQ ID NO: 3885 - DNA, 20 bp, Artificial Sequence
  MKO10003885_A_Alms1
  gRNA
tcccactgacttgccgtgta

SEQ ID NO: 3886 - DNA, 20 bp, Artificial Sequence
  MKO10003886_A_Alms1
  gRNA
agtaccagacctaccctctc

SEQ ID NO: 3887 - DNA, 20 bp, Artificial Sequence
  MKO10003887_A_Alms1
  gRNA
ctactctgccgatctcagtc

SEQ ID NO: 3888 - DNA, 20 bp, Artificial Sequence
  MKO10003888_A_Alox12b
  gRNA
ttgcggcaccgtcggggagg

SEQ ID NO: 3889 - DNA, 20 bp, Artificial Sequence
  MKO10003889_A_Alox12b
  gRNA
tatcatcatccgtctgcaca

SEQ ID NO: 3890 - DNA, 20 bp, Artificial Sequence
  MKO10003890_A_Alox12b
  gRNA
gccttaatgttgatgagaat

SEQ ID NO: 3891 - DNA, 20 bp, Artificial Sequence
  MKO10003891_A_Alox12e
  gRNA
gtcgacgtccccttgcatct

SEQ ID NO: 3892 - DNA, 20 bp, Artificial Sequence
  MKO10003892_A_Alox12e
  gRNA
gtttgcgcagcttcaccgcc

SEQ ID NO: 3893 - DNA, 20 bp, Artificial Sequence
  MKO10003893_A_Alox12e
  gRNA
gtactgaacgggacctcccc

SEQ ID NO: 3894 - DNA, 20 bp, Artificial Sequence
  MKO10003894_A_Alox12
  gRNA
gtttgacttcgacgttcccg

SEQ ID NO: 3895 - DNA, 20 bp, Artificial Sequence
  MKO10003895_A_Alox12
  gRNA
ggagggtataaacacgtttg

SEQ ID NO: 3896 - DNA, 20 bp, Artificial Sequence
  MKO10003896_A_Alox12
  gRNA
cagtccgctgctattgtctg

SEQ ID NO: 3897 - DNA, 20 bp, Artificial Sequence
  MKO10003897_A_Alox15
  gRNA
acacgttcccctgttaccga

SEQ ID NO: 3898 - DNA, 20 bp, Artificial Sequence
  MKO10003898_A_Alox15
  gRNA
ggaacgtgtactccgatccc

SEQ ID NO: 3899 - DNA, 20 bp, Artificial Sequence
  MKO10003899_A_Alox15
  gRNA
tgtagaccagcgatttcgag

SEQ ID NO: 3900 - DNA, 20 bp, Artificial Sequence
  MKO10003900_A_Alox5ap
  gRNA
atcagtccggcgaaggcggc

SEQ ID NO: 3901 - DNA, 20 bp, Artificial Sequence
  MKO10003901_A_Alox5ap
  gRNA
ggtacgcatctacgcagttc

SEQ ID NO: 3902 - DNA, 20 bp, Artificial Sequence
  MKO10003902_A_Alox5ap
  gRNA
ggcagtgtagacccgctcaa

SEQ ID NO: 3903 - DNA, 20 bp, Artificial Sequence
  MKO10003903_A_Alox5
  gRNA
tcgagttcccatgttaccgc

SEQ ID NO: 3904 - DNA, 20 bp, Artificial Sequence
  MKO10003904_A_Alox5
  gRNA
aaagtcagcaaagtcgtgcc

SEQ ID NO: 3905 - DNA, 20 bp, Artificial Sequence
  MKO10003905_A_Alox5
  gRNA
aggcacggcaaaaacagtat

SEQ ID NO: 3906 - DNA, 20 bp, Artificial Sequence
  MKO10003906_A_Alox8
  gRNA
tcgcagagtacttgatgttg

SEQ ID NO: 3907 - DNA, 20 bp, Artificial Sequence
  MKO10003907_A_Alox8
  gRNA
gcgagtccacaaagcacccc

SEQ ID NO: 3908 - DNA, 20 bp, Artificial Sequence
  MKO10003908_A_Alox8
  gRNA
gccgctggttcgagctggag

SEQ ID NO: 3909 - DNA, 20 bp, Artificial Sequence
  MKO10003909_A_Aloxe3
  gRNA
tacagtagccatcgatccac

SEQ ID NO: 3910 - DNA, 20 bp, Artificial Sequence
  MKO10003910_A_Aloxe3
  gRNA
ggtggctgagtatcgaatgt

SEQ ID NO: 3911 - DNA, 20 bp, Artificial Sequence
  MKO10003911_A_Aloxe3
  gRNA
aagcccgccaagaatgttat

SEQ ID NO: 3912 - DNA, 20 bp, Artificial Sequence
  MKO10003912_A_Alpi
  gRNA
cacacacggtgaaccgtaat

SEQ ID NO: 3913 - DNA, 20 bp, Artificial Sequence
  MKO10003913_A_Alpi
  gRNA
ctaatcgagcagctgcactc

SEQ ID NO: 3914 - DNA, 20 bp, Artificial Sequence
  MKO10003914_A_Alpi
  gRNA
tccagctgaagaggagaacc

SEQ ID NO: 3915 - DNA, 20 bp, Artificial Sequence
  MKO10003915_A_Alpk1
  gRNA
cggagacgtcgagtccatac

SEQ ID NO: 3916 - DNA, 20 bp, Artificial Sequence
  MKO10003916_A_Alpk1
  gRNA
tgcaacgcccatcgccccgc

SEQ ID NO: 3917 - DNA, 20 bp, Artificial Sequence
  MKO10003917_A_Alpk1
  gRNA
gtatgcagaccgactgtacc

SEQ ID NO: 3918 - DNA, 20 bp, Artificial Sequence
  MKO10003918_A_Alpk2
  gRNA
tcatggcccttggagcgaac

SEQ ID NO: 3919 - DNA, 20 bp, Artificial Sequence
  MKO10003919_A_Alpk2
  gRNA
accccaaaagcttgttacgt

SEQ ID NO: 3920 - DNA, 20 bp, Artificial Sequence
  MKO10003920_A_Alpk2
  gRNA
cgcacagacgaaaagtaccc

SEQ ID NO: 3921 - DNA, 20 bp, Artificial Sequence
  MKO10003921_A_Alpk3
  gRNA
gtgccgtgtctccgtcgagc

SEQ ID NO: 3922 - DNA, 20 bp, Artificial Sequence
  MKO10003922_A_Alpk3
  gRNA
cgctttctttggaagcggtc

SEQ ID NO: 3923 - DNA, 20 bp, Artificial Sequence
  MKO10003923_A_Alpk3
  gRNA
tgatgagtgatctcgtattt

SEQ ID NO: 3924 - DNA, 20 bp, Artificial Sequence
  MKO10003924_A_Alpl
  gRNA
gttgcatcgcgtgcgctctg

SEQ ID NO: 3925 - DNA, 20 bp, Artificial Sequence
  MKO10003925_A_Alpl
  gRNA
atccgagtaccagtcccgat

SEQ ID NO: 3926 - DNA, 20 bp, Artificial Sequence
  MKO10003926_A_Alpl
  gRNA
aaccgctgcccgaatcctta

SEQ ID NO: 3927 - DNA, 20 bp, Artificial Sequence
  MKO10003927_A_Alppl2
  gRNA
tacgcgcacactgtgaaccg

SEQ ID NO: 3928 - DNA, 20 bp, Artificial Sequence
  MKO10003928_A_Alppl2
  gRNA
tgtctacagtaaccgctacc

SEQ ID NO: 3929 - DNA, 20 bp, Artificial Sequence
  MKO10003929_A_Alppl2
  gRNA
taccccatgtcgtgttgcac

SEQ ID NO: 3930 - DNA, 20 bp, Artificial Sequence
  MKO10003930_A_Als2cl
  gRNA
cgccaccacgcaatcagtgt

SEQ ID NO: 3931 - DNA, 20 bp, Artificial Sequence
  MKO10003931_A_Als2cl
  gRNA
gcctctgccgcagcgaaagc

SEQ ID NO: 3932 - DNA, 20 bp, Artificial Sequence
  MKO10003932_A_Als2cl
  gRNA
caagtcctacactgattgcg

SEQ ID NO: 3933 - DNA, 20 bp, Artificial Sequence
  MKO10003933_A_Als2cr11
  gRNA
ccgctcatcatcttgacgtc

SEQ ID NO: 3934 - DNA, 20 bp, Artificial Sequence
  MKO10003934_A_Als2cr11
  gRNA
atgtgattctgcaccgccta

SEQ ID NO: 3935 - DNA, 20 bp, Artificial Sequence
  MKO10003935_A_Als2cr11
  gRNA
acaccgaacttgataccatt

SEQ ID NO: 3936 - DNA, 20 bp, Artificial Sequence
  MKO10003936_A_Als2cr12
  gRNA
tgcagggacaaggtccagtc

SEQ ID NO: 3937 - DNA, 20 bp, Artificial Sequence
  MKO10003937_A_Als2cr12
  gRNA
aactcactcctgtcccaacc

SEQ ID NO: 3938 - DNA, 20 bp, Artificial Sequence
  MKO10003938_A_Als2cr12
  gRNA
tttcgaatgagtgtatagcc

SEQ ID NO: 3939 - DNA, 20 bp, Artificial Sequence
  MKO10003939_A_Als2
  gRNA
ttccacccagcagaacgtcg

SEQ ID NO: 3940 - DNA, 20 bp, Artificial Sequence
  MKO10003940_A_Als2
  gRNA
ggaacaccttgctggacgcg

SEQ ID NO: 3941 - DNA, 20 bp, Artificial Sequence
  MKO10003941_A_Als2
  gRNA
ttaccttgcgacaacaaccc

SEQ ID NO: 3942 - DNA, 20 bp, Artificial Sequence
  MKO10003942_A_Alx1
  gRNA
cgcacgtgatgctccgctcg

SEQ ID NO: 3943 - DNA, 20 bp, Artificial Sequence
  MKO10003943_A_Alx1
  gRNA
agccgtcgctttgccgtaaa

SEQ ID NO: 3944 - DNA, 20 bp, Artificial Sequence
  MKO10003944_A_Alx1
  gRNA
gttcgaaaaccccgtataac

SEQ ID NO: 3945 - DNA, 20 bp, Artificial Sequence
  MKO10003945_A_Alx3
  gRNA
agaaaggcgcgcagcgctcg

SEQ ID NO: 3946 - DNA, 20 bp, Artificial Sequence
  MKO10003946_A_Alx3
  gRNA
gcgctgcgcgcctttctccg

SEQ ID NO: 3947 - DNA, 20 bp, Artificial Sequence
  MKO10003947_A_Alx3
  gRNA
aaccttcagcacgttccagc

SEQ ID NO: 3948 - DNA, 20 bp, Artificial Sequence
  MKO10003948_A_Alx4
  gRNA
gttaaaggatccccgcgccc

SEQ ID NO: 3949 - DNA, 20 bp, Artificial Sequence
  MKO10003949_A_Alx4
  gRNA
cggccacaacgcggccttgc

SEQ ID NO: 3950 - DNA, 20 bp, Artificial Sequence
  MKO10003950_A_Alx4
  gRNA
cgttcatctcgtagccattg

SEQ ID NO: 3951 - DNA, 20 bp, Artificial Sequence
  MKO10003951_A_Alyref2
  gRNA
ttcggtctactgtacggtgc

SEQ ID NO: 3952 - DNA, 20 bp, Artificial Sequence
  MKO10003952_A_Alyref2
  gRNA
gttcctgccgccgcgggcga

SEQ ID NO: 3953 - DNA, 20 bp, Artificial Sequence
  MKO10003953_A_Alyref2
  gRNA
agctgaaccgtaaccagcgc

SEQ ID NO: 3954 - DNA, 20 bp, Artificial Sequence
  MKO10003954_A_Alyref
  gRNA
ccccgaagccgctgtcgaag

SEQ ID NO: 3955 - DNA, 20 bp, Artificial Sequence
  MKO10003955_A_Alyref
  gRNA
ggacaccagcagcttcccgc

SEQ ID NO: 3956 - DNA, 20 bp, Artificial Sequence
  MKO10003956_A_Alyref
  gRNA
cacagcgaagacctgcacag

SEQ ID NO: 3957 - DNA, 20 bp, Artificial Sequence
  MKO10003957_A_Amacr
  gRNA
ttgaatcgatgacctgccct

SEQ ID NO: 3958 - DNA, 20 bp, Artificial Sequence
  MKO10003958_A_Amacr
  gRNA
ctctttgaacgcacacgctc

SEQ ID NO: 3959 - DNA, 20 bp, Artificial Sequence
  MKO10003959_A_Amacr
  gRNA
ctgagcggatttggccaatc

SEQ ID NO: 3960 - DNA, 20 bp, Artificial Sequence
  MKO10003960_A_Ambn
  gRNA
atggacttaccggcacggcg

SEQ ID NO: 3961 - DNA, 20 bp, Artificial Sequence
  MKO10003961_A_Ambn
  gRNA
gaaaatgagcctcgccgtgc

SEQ ID NO: 3962 - DNA, 20 bp, Artificial Sequence
  MKO10003962_A_Ambn
  gRNA
aggctcaaactagccatgcc

SEQ ID NO: 3963 - DNA, 20 bp, Artificial Sequence
  MKO10003963_A_Ambp
  gRNA
cactcaccgccatcgagtac

SEQ ID NO: 3964 - DNA, 20 bp, Artificial Sequence
  MKO10003964_A_Ambp
  gRNA
caagatgagcgtgagcacgc

SEQ ID NO: 3965 - DNA, 20 bp, Artificial Sequence
  MKO10003965_A_Ambp
  gRNA
cactggggcgtaccagaaga

SEQ ID NO: 3966 - DNA, 20 bp, Artificial Sequence
  MKO10003966_A_Ambra1
  gRNA
tggcacgagtgccccgttct

SEQ ID NO: 3967 - DNA, 20 bp, Artificial Sequence
  MKO10003967_A_Ambra1
  gRNA
ccggacacgctccatctcac

SEQ ID NO: 3968 - DNA, 20 bp, Artificial Sequence
  MKO10003968_A_Ambra1
  gRNA
tccacgctcgaccttcttac

SEQ ID NO: 3969 - DNA, 20 bp, Artificial Sequence
  MKO10003969_A_Amd1
  gRNA
agatggagcagcatattgta

SEQ ID NO: 3970 - DNA, 20 bp, Artificial Sequence
  MKO10003970_A_Amd1
  gRNA
agcactgcacatccttcaaa

SEQ ID NO: 3971 - DNA, 20 bp, Artificial Sequence
  MKO10003971_A_Amd1
  gRNA
tgtgacaaagactgacaagc

SEQ ID NO: 3972 - DNA, 20 bp, Artificial Sequence
  MKO10003972_A_Amd2
  gRNA
cctcctatgaccacctgatc

SEQ ID NO: 3973 - DNA, 20 bp, Artificial Sequence
  MKO10003973_A_Amd2
  gRNA
ggtcataggaggtctgactt

SEQ ID NO: 3974 - DNA, 20 bp, Artificial Sequence
  MKO10003974_A_Amd2
  gRNA
ttgctgtttcttagcaaaac

SEQ ID NO: 3975 - DNA, 20 bp, Artificial Sequence
  MKO10003975_A_Amdhd1
  gRNA
tgcgcgtaatcgagcgcgcc

SEQ ID NO: 3976 - DNA, 20 bp, Artificial Sequence
  MKO10003976_A_Amdhd1
  gRNA
cacggtggagcacacccgcc

SEQ ID NO: 3977 - DNA, 20 bp, Artificial Sequence
  MKO10003977_A_Amdhd1
  gRNA
ccacccgatgaaggctgccg

SEQ ID NO: 3978 - DNA, 20 bp, Artificial Sequence
  MKO10003978_A_Amdhd2
  gRNA
ctacggaggacgtgggttcg

SEQ ID NO: 3979 - DNA, 20 bp, Artificial Sequence
  MKO10003979_A_Amdhd2
  gRNA
tcatggctccggtctagttc

SEQ ID NO: 3980 - DNA, 20 bp, Artificial Sequence
  MKO10003980_A_Amdhd2
  gRNA
acccacgtcctccgtagcct

SEQ ID NO: 3981 - DNA, 20 bp, Artificial Sequence
  MKO10003981_A_Amelx
  gRNA
ccggctgccttatcatgctc

SEQ ID NO: 3982 - DNA, 20 bp, Artificial Sequence
  MKO10003982_A_Amelx
  gRNA
tagcttaagttgatataacc

SEQ ID NO: 3983 - DNA, 20 bp, Artificial Sequence
  MKO10003983_A_Amelx
  gRNA
gtcgctggccaagcttccag

SEQ ID NO: 3984 - DNA, 20 bp, Artificial Sequence
  MKO10003984_A_Amer1
  gRNA
ttagcagtatccgccgtcac

SEQ ID NO: 3985 - DNA, 20 bp, Artificial Sequence
  MKO10003985_A_Amer1
  gRNA
acttcgccgggagcagcgtg

SEQ ID NO: 3986 - DNA, 20 bp, Artificial Sequence
  MKO10003986_A_Amer1
  gRNA
ggagtcctaagtatcgaggg

SEQ ID NO: 3987 - DNA, 20 bp, Artificial Sequence
  MKO10003987_A_Amer2
  gRNA
gacgcctcgcgacacgcagc

SEQ ID NO: 3988 - DNA, 20 bp, Artificial Sequence
  MKO10003988_A_Amer2
  gRNA
cgacggactagccgaggtgt

SEQ ID NO: 3989 - DNA, 20 bp, Artificial Sequence
  MKO10003989_A_Amer2
  gRNA
gtcccccttgtcgactccga

SEQ ID NO: 3990 - DNA, 20 bp, Artificial Sequence
  MKO10003990_A_Amer3
  gRNA
ccatggttgacgagtcccga

SEQ ID NO: 3991 - DNA, 20 bp, Artificial Sequence
  MKO10003991_A_Amer3
  gRNA
ttgggagctcttctcgccat

SEQ ID NO: 3992 - DNA, 20 bp, Artificial Sequence
  MKO10003992_A_Amer3
  gRNA
gaaatgccgtgacctattcc

SEQ ID NO: 3993 - DNA, 20 bp, Artificial Sequence
  MKO10003993_A_Amfr
  gRNA
tgtctttcactcactcgaag

SEQ ID NO: 3994 - DNA, 20 bp, Artificial Sequence
  MKO10003994_A_Amfr
  gRNA
aagtggtgatgtggtgcctc

SEQ ID NO: 3995 - DNA, 20 bp, Artificial Sequence
  MKO10003995_A_Amfr
  gRNA
agagcagcatagcaatcagc

SEQ ID NO: 3996 - DNA, 20 bp, Artificial Sequence
  MKO10003996_A_Amhr2
  gRNA
ttcagccctgctacaacgaa

SEQ ID NO: 3997 - DNA, 20 bp, Artificial Sequence
  MKO10003997_A_Amhr2
  gRNA
gctgtccaggtgggcccgtc

SEQ ID NO: 3998 - DNA, 20 bp, Artificial Sequence
  MKO10003998_A_Amhr2
  gRNA
gttgctgagtagcatcatct

SEQ ID NO: 3999 - DNA, 20 bp, Artificial Sequence
  MKO10003999_A_Amh
  gRNA
tctgaccgtaatccgcgcta

SEQ ID NO: 4000 - DNA, 20 bp, Artificial Sequence
  MKO10004000_A_Amh
  gRNA
cgcggattacggtcagactg

SEQ ID NO: 4001 - DNA, 20 bp, Artificial Sequence
  MKO10004001_A_Amh
  gRNA
ccacggttagcaccaaatag

SEQ ID NO: 4002 - DNA, 20 bp, Artificial Sequence
  MKO10004002_A_Amica1
  gRNA
ttccaaccttagcgtgccta

SEQ ID NO: 4003 - DNA, 20 bp, Artificial Sequence
  MKO10004003_A_Amica1
  gRNA
agcgccccgtaggcacgcta

SEQ ID NO: 4004 - DNA, 20 bp, Artificial Sequence
  MKO10004004_A_Amica1
  gRNA
agcccctgtaggttatccac

SEQ ID NO: 4005 - DNA, 20 bp, Artificial Sequence
  MKO10004005_A_Amigo1
  gRNA
gagcttgcagtcgcactcca

SEQ ID NO: 4006 - DNA, 20 bp, Artificial Sequence
  MKO10004006_A_Amigo1
  gRNA
tcgtccccgtacccaacctt

SEQ ID NO: 4007 - DNA, 20 bp, Artificial Sequence
  MKO10004007_A_Amigo1
  gRNA
tgtgtatacctgttacgcca

SEQ ID NO: 4008 - DNA, 20 bp, Artificial Sequence
  MKO10004008_A_Amigo2
  gRNA
tgccttccgatcgtcagcag

SEQ ID NO: 4009 - DNA, 20 bp, Artificial Sequence
  MKO10004009_A_Amigo2
  gRNA
atttgcatgggcacggcgtc

SEQ ID NO: 4010 - DNA, 20 bp, Artificial Sequence
  MKO10004010_A_Amigo2
  gRNA
taggcactttagctccgtga

SEQ ID NO: 4011 - DNA, 20 bp, Artificial Sequence
  MKO10004011_A_Amigo3
  gRNA
ttaaccccagaccgtgcaag

SEQ ID NO: 4012 - DNA, 20 bp, Artificial Sequence
  MKO10004012_A_Amigo3
  gRNA
actcgcgttcaaaatcatgc

SEQ ID NO: 4013 - DNA, 20 bp, Artificial Sequence
  MKO10004013_A_Amigo3
  gRNA
ttgtttgcaccaccctgtcg

SEQ ID NO: 4014 - DNA, 20 bp, Artificial Sequence
  MKO10004014_A_Ammecr1l
  gRNA
gggcgagacaagcggcttcg

SEQ ID NO: 4015 - DNA, 20 bp, Artificial Sequence
  MKO10004015_A_Ammecr1l
  gRNA
attccctcccctgacccgag

SEQ ID NO: 4016 - DNA, 20 bp, Artificial Sequence
  MKO10004016_A_Ammecr1l
  gRNA
agctcctctcgggtcagggg

SEQ ID NO: 4017 - DNA, 20 bp, Artificial Sequence
  MKO10004017_A_Ammecr1
  gRNA
acgcaccgccacctacctac

SEQ ID NO: 4018 - DNA, 20 bp, Artificial Sequence
  MKO10004018_A_Ammecr1
  gRNA
ggtcgagacaaaagactgcg

SEQ ID NO: 4019 - DNA, 20 bp, Artificial Sequence
  MKO10004019_A_Ammecr1
  gRNA
gacaccgagcagaaaagcct

SEQ ID NO: 4020 - DNA, 20 bp, Artificial Sequence
  MKO10004020_A_Amn1
  gRNA
tgttgacatttcaactacgc

SEQ ID NO: 4021 - DNA, 20 bp, Artificial Sequence
  MKO10004021_A_Amn1
  gRNA
agatctagtctttgaacttc

SEQ ID NO: 4022 - DNA, 20 bp, Artificial Sequence
  MKO10004022_A_Amn1
  gRNA
cattcttacctcacttatat

SEQ ID NO: 4023 - DNA, 20 bp, Artificial Sequence
  MKO10004023_A_Amn
  gRNA
aagatccatcgcgcgggaag

SEQ ID NO: 4024 - DNA, 20 bp, Artificial Sequence
  MKO10004024_A_Amn
  gRNA
ggtgcacgttcgcagcgtct

SEQ ID NO: 4025 - DNA, 20 bp, Artificial Sequence
  MKO10004025_A_Amn
  gRNA
tgaaccgcatctcccgcgca

SEQ ID NO: 4026 - DNA, 20 bp, Artificial Sequence
  MKO10004026_A_Amotl1
  gRNA
gtcggcccgccaagaaccgc

SEQ ID NO: 4027 - DNA, 20 bp, Artificial Sequence
  MKO10004027_A_Amotl1
  gRNA
accggatgcctttgcgattg

SEQ ID NO: 4028 - DNA, 20 bp, Artificial Sequence
  MKO10004028_A_Amotl1
  gRNA
ctatgctgctgcaccgtaga

SEQ ID NO: 4029 - DNA, 20 bp, Artificial Sequence
  MKO10004029_A_Amotl2
  gRNA
atgcacaaagccgtgccgcc

SEQ ID NO: 4030 - DNA, 20 bp, Artificial Sequence
  MKO10004030_A_Amotl2
  gRNA
gcagttcagcatgtcgccgc

SEQ ID NO: 4031 - DNA, 20 bp, Artificial Sequence
  MKO10004031_A_Amotl2
  gRNA
cggtgagatgagacggttgc

SEQ ID NO: 4032 - DNA, 20 bp, Artificial Sequence
  MKO10004032_A_Amot
  gRNA
ggtcaccttggttcgagacc

SEQ ID NO: 4033 - DNA, 20 bp, Artificial Sequence
  MKO10004033_A_Amot
  gRNA
ggaccactaccgtcacgccc

SEQ ID NO: 4034 - DNA, 20 bp, Artificial Sequence
  MKO10004034_A_Amot
  gRNA
gaaggagtacgaggggtccg

SEQ ID NO: 4035 - DNA, 20 bp, Artificial Sequence
  MKO10004035_A_Ampd1
  gRNA
cgagatctcccccttcgacg

SEQ ID NO: 4036 - DNA, 20 bp, Artificial Sequence
  MKO10004036_A_Ampd1
  gRNA
gcagatctcatccacgtcga

SEQ ID NO: 4037 - DNA, 20 bp, Artificial Sequence
  MKO10004037_A_Ampd1
  gRNA
tcaggcacactctcgtaggt

SEQ ID NO: 4038 - DNA, 20 bp, Artificial Sequence
  MKO10004038_A_Ampd2
  gRNA
ggagttgttcagccgctcac

SEQ ID NO: 4039 - DNA, 20 bp, Artificial Sequence
  MKO10004039_A_Ampd2
  gRNA
gcttgacctgcgcacgtcta

SEQ ID NO: 4040 - DNA, 20 bp, Artificial Sequence
  MKO10004040_A_Ampd2
  gRNA
tgccatccatagacgtgcgc

SEQ ID NO: 4041 - DNA, 20 bp, Artificial Sequence
  MKO10004041_A_Ampd3
  gRNA
tacctggttcgcatgcacgg

SEQ ID NO: 4042 - DNA, 20 bp, Artificial Sequence
  MKO10004042_A_Ampd3
  gRNA
caagccgtgcatacttctcc

SEQ ID NO: 4043 - DNA, 20 bp, Artificial Sequence
  MKO10004043_A_Ampd3
  gRNA
cacctccgtgcatgcgaacc

SEQ ID NO: 4044 - DNA, 20 bp, Artificial Sequence
  MKO10004044_A_Amph
  gRNA
atgaagtctacgagccagac

SEQ ID NO: 4045 - DNA, 20 bp, Artificial Sequence
  MKO10004045_A_Amph
  gRNA
tcttcccgtccataccagtc

SEQ ID NO: 4046 - DNA, 20 bp, Artificial Sequence
  MKO10004046_A_Amph
  gRNA
cctcctgccgtttgaagttc

SEQ ID NO: 4047 - DNA, 20 bp, Artificial Sequence
  MKO10004047_A_Amtn
  gRNA
acgggagagtatgtgcgccg

SEQ ID NO: 4048 - DNA, 20 bp, Artificial Sequence
  MKO10004048_A_Amtn
  gRNA
acatactctcccgttcaccc

SEQ ID NO: 4049 - DNA, 20 bp, Artificial Sequence
  MKO10004049_A_Amtn
  gRNA
tccaagttgtgccacaataa

SEQ ID NO: 4050 - DNA, 20 bp, Artificial Sequence
  MKO10004050_A_Amt
  gRNA
tctttgtttaccaacgaagc

SEQ ID NO: 4051 - DNA, 20 bp, Artificial Sequence
  MKO10004051_A_Amt
  gRNA
taagatgcctccagcttcgt

SEQ ID NO: 4052 - DNA, 20 bp, Artificial Sequence
  MKO10004052_A_Amt
  gRNA
tatgacttccacctagctca

SEQ ID NO: 4053 - DNA, 20 bp, Artificial Sequence
  MKO10004053_A_Amy1
  gRNA
tgggcaaagttatgcgcaag

SEQ ID NO: 4054 - DNA, 20 bp, Artificial Sequence
  MKO10004054_A_Amy1
  gRNA
gaactaccaagatgctgctc

SEQ ID NO: 4055 - DNA, 20 bp, Artificial Sequence
  MKO10004055_A_Amy1
  gRNA
ggaaaatgtagaactgcaag

SEQ ID NO: 4056 - DNA, 20 bp, Artificial Sequence
  MKO10004056_A_Amy2a2
  gRNA
ttcataacccatcaagacct

SEQ ID NO: 4057 - DNA, 20 bp, Artificial Sequence
  MKO10004057_A_Amy2a2
  gRNA
tcagctataaaatctgcaca

SEQ ID NO: 4058 - DNA, 20 bp, Artificial Sequence
  MKO10004058_A_Amy2a2
  gRNA
ttgttaggtccgtatttatg

SEQ ID NO: 4059 - DNA, 20 bp, Artificial Sequence
  MKO10004059_A_Amy2a3
  gRNA
ttcataacccatcaagacct

SEQ ID NO: 4060 - DNA, 20 bp, Artificial Sequence
  MKO10004060_A_Amy2a3
  gRNA
tcagctataaaatctgcaca

SEQ ID NO: 4061 - DNA, 20 bp, Artificial Sequence
  MKO10004061_A_Amy2a3
  gRNA
ttgttaggtccgtatttatg

SEQ ID NO: 4062 - DNA, 20 bp, Artificial Sequence
  MKO10004062_A_Amy2a4
  gRNA
ttcataacccatcaagacct

SEQ ID NO: 4063 - DNA, 20 bp, Artificial Sequence
  MKO10004063_A_Amy2a4
  gRNA
tcagctataaaatctgcaca

SEQ ID NO: 4064 - DNA, 20 bp, Artificial Sequence
  MKO10004064_A_Amy2a4
  gRNA
ttgttaggtccgtatttatg

SEQ ID NO: 4065 - DNA, 20 bp, Artificial Sequence
  MKO10004065_A_Amy2a5
  gRNA
ttcataacccatcaagacct

SEQ ID NO: 4066 - DNA, 20 bp, Artificial Sequence
  MKO10004066_A_Amy2a5
  gRNA
tcagctataaaatctgcaca

SEQ ID NO: 4067 - DNA, 20 bp, Artificial Sequence
  MKO10004067_A_Amy2a5
  gRNA
ttgttaggtccgtatttatg

SEQ ID NO: 4068 - DNA, 20 bp, Artificial Sequence
  MKO10004068_A_Amy2b
  gRNA
ttgtaattcataacccatca

SEQ ID NO: 4069 - DNA, 20 bp, Artificial Sequence
  MKO10004069_A_Amy2b
  gRNA
tcagctacaaaatttgcaca

SEQ ID NO: 4070 - DNA, 20 bp, Artificial Sequence
  MKO10004070_A_Amy2b
  gRNA
cgtgtaacagaattcaagtt

SEQ ID NO: 4071 - DNA, 20 bp, Artificial Sequence
  MKO10004071_A_Amz1
  gRNA
aagcctcggcgcagctccga

SEQ ID NO: 4072 - DNA, 20 bp, Artificial Sequence
  MKO10004072_A_Amz1
  gRNA
ccaccttcggagctgcgccg

SEQ ID NO: 4073 - DNA, 20 bp, Artificial Sequence
  MKO10004073_A_Amz1
  gRNA
gtgcgtgctgggcctcacgc

SEQ ID NO: 4074 - DNA, 20 bp, Artificial Sequence
  MKO10004074_A_Amz2
  gRNA
ttctacacctcgaaatacga

SEQ ID NO: 4075 - DNA, 20 bp, Artificial Sequence
  MKO10004075_A_Amz2
  gRNA
cacattgccttcgtatttcg

SEQ ID NO: 4076 - DNA, 20 bp, Artificial Sequence
  MKO10004076_A_Amz2
  gRNA
gactcgtggaacttcgtctt

SEQ ID NO: 4077 - DNA, 20 bp, Artificial Sequence
  MKO10004077_A_Anapc10
  gRNA
aattggatgttcactaagtg

SEQ ID NO: 4078 - DNA, 20 bp, Artificial Sequence
  MKO10004078_A_Anapc10
  gRNA
tcatgatgtatcgttcaata

SEQ ID NO: 4079 - DNA, 20 bp, Artificial Sequence
  MKO10004079_A_Anapc10
  gRNA
aacatacccggatttcttga

SEQ ID NO: 4080 - DNA, 20 bp, Artificial Sequence
  MKO10004080_A_Anapc11
  gRNA
tgatgactgccccctcgtgt

SEQ ID NO: 4081 - DNA, 20 bp, Artificial Sequence
  MKO10004081_A_Anapc11
  gRNA
gcactgccccatgtgtcgcc

SEQ ID NO: 4082 - DNA, 20 bp, Artificial Sequence
  MKO10004082_A_Anapc11
  gRNA
gatgccgcagttctcatcat

SEQ ID NO: 4083 - DNA, 20 bp, Artificial Sequence
  MKO10004083_A_Anapc13
  gRNA
cacgagaacgtcccacccgc

SEQ ID NO: 4084 - DNA, 20 bp, Artificial Sequence
  MKO10004084_A_Anapc13
  gRNA
tgaggatgtcgccattccac

SEQ ID NO: 4085 - DNA, 20 bp, Artificial Sequence
  MKO10004085_A_Anapc13
  gRNA
agcccggcatcagtttccag

SEQ ID NO: 4086 - DNA, 20 bp, Artificial Sequence
  MKO10004086_A_Anapc15
  gRNA
aattggcaagccggcctcag

SEQ ID NO: 4087 - DNA, 20 bp, Artificial Sequence
  MKO10004087_A_Anapc15
  gRNA
tgtctacctagatcatccac

SEQ ID NO: 4088 - DNA, 20 bp, Artificial Sequence
  MKO10004088_A_Anapc15
  gRNA
ctaccagcactacgatgatg

SEQ ID NO: 4089 - DNA, 20 bp, Artificial Sequence
  MKO10004089_A_Anapc16
  gRNA
gctctgttcacctacccgaa

SEQ ID NO: 4090 - DNA, 20 bp, Artificial Sequence
  MKO10004090_A_Anapc16
  gRNA
atgcttcacctgtttaagcg

SEQ ID NO: 4091 - DNA, 20 bp, Artificial Sequence
  MKO10004091_A_Anapc16
  gRNA
ctctagatcagcaagtcgct

SEQ ID NO: 4092 - DNA, 20 bp, Artificial Sequence
  MKO10004092_A_Anapc1
  gRNA
agtgtacaaagcgttcacag

SEQ ID NO: 4093 - DNA, 20 bp, Artificial Sequence
  MKO10004093_A_Anapc1
  gRNA
gtgtgacttcattatatcac

SEQ ID NO: 4094 - DNA, 20 bp, Artificial Sequence
  MKO10004094_A_Anapc1
  gRNA
attgataggtggcaaatgtt

SEQ ID NO: 4095 - DNA, 20 bp, Artificial Sequence
  MKO10004095_A_Anapc2
  gRNA
atagccggtatgcccgccgc

SEQ ID NO: 4096 - DNA, 20 bp, Artificial Sequence
  MKO10004096_A_Anapc2
  gRNA
ctatgccaccctacgcatcg

SEQ ID NO: 4097 - DNA, 20 bp, Artificial Sequence
  MKO10004097_A_Anapc2
  gRNA
tgaaaagctcctcgatgcgt

SEQ ID NO: 4098 - DNA, 20 bp, Artificial Sequence
  MKO10004098_A_Anapc4
  gRNA
attatcatacgtttgccgtc

SEQ ID NO: 4099 - DNA, 20 bp, Artificial Sequence
  MKO10004099_A_Anapc4
  gRNA
aaactcgatgaaaacttgca

SEQ ID NO: 4100 - DNA, 20 bp, Artificial Sequence
  MKO10004100_A_Anapc4
  gRNA
ctccggtctcttgtatgcat

SEQ ID NO: 4101 - DNA, 20 bp, Artificial Sequence
  MKO10004101_A_Anapc5
  gRNA
aagagctcgacgtgtccgtg

SEQ ID NO: 4102 - DNA, 20 bp, Artificial Sequence
  MKO10004102_A_Anapc5
  gRNA
gttcacaaaacgagtgtagt

SEQ ID NO: 4103 - DNA, 20 bp, Artificial Sequence
  MKO10004103_A_Anapc5
  gRNA
gttcctgcgccacatgatct

SEQ ID NO: 4104 - DNA, 20 bp, Artificial Sequence
  MKO10004104_A_Anapc7
  gRNA
gattgctctcgagttgtcac

SEQ ID NO: 4105 - DNA, 20 bp, Artificial Sequence
  MKO10004105_A_Anapc7
  gRNA
agactctctgtttcacgata

SEQ ID NO: 4106 - DNA, 20 bp, Artificial Sequence
  MKO10004106_A_Anapc7
  gRNA
atgccattgctgtactcgat

SEQ ID NO: 4107 - DNA, 20 bp, Artificial Sequence
  MKO10004107_A_Ang2
  gRNA
attcttaaatttcgtccata

SEQ ID NO: 4108 - DNA, 20 bp, Artificial Sequence
  MKO10004108_A_Ang2
  gRNA
ctcggtacctgcatggaggc

SEQ ID NO: 4109 - DNA, 20 bp, Artificial Sequence
  MKO10004109_A_Ang2
  gRNA
ggatcacaaccagacccaac

SEQ ID NO: 4110 - DNA, 20 bp, Artificial Sequence
  MKO10004110_A_Ang3
  gRNA
tggcatcatagtgttgattc

SEQ ID NO: 4111 - DNA, 20 bp, Artificial Sequence
  MKO10004111_A_Ang3
  gRNA
tgtgcttgcaagttgtgatc

SEQ ID NO: 4112 - DNA, 20 bp, Artificial Sequence
  MKO10004112_A_Ang3
  gRNA
ggagtctagctgtgtgctcc

SEQ ID NO: 4113 - DNA, 20 bp, Artificial Sequence
  MKO10004113_A_Ang4
  gRNA
cgctcctgagtgcgtacaag

SEQ ID NO: 4114 - DNA, 20 bp, Artificial Sequence
  MKO10004114_A_Ang4
  gRNA
atcaccacttgtacgcactc

SEQ ID NO: 4115 - DNA, 20 bp, Artificial Sequence
  MKO10004115_A_Ang4
  gRNA
tggcatcatagtgctgacgt

SEQ ID NO: 4116 - DNA, 20 bp, Artificial Sequence
  MKO10004116_A_Ang5
  gRNA
tggcatcatagtgttgattc

SEQ ID NO: 4117 - DNA, 20 bp, Artificial Sequence
  MKO10004117_A_Ang5
  gRNA
tgtgcttgcaagttgtgatc

SEQ ID NO: 4118 - DNA, 20 bp, Artificial Sequence
  MKO10004118_A_Ang5
  gRNA
attcttaagtttactccata

SEQ ID NO: 4119 - DNA, 20 bp, Artificial Sequence
  MKO10004119_A_Ang6
  gRNA
atcaccacttgcaatcactc

SEQ ID NO: 4120 - DNA, 20 bp, Artificial Sequence
  MKO10004120_A_Ang6
  gRNA
ccctcctgagtgattgcaag

SEQ ID NO: 4121 - DNA, 20 bp, Artificial Sequence
  MKO10004121_A_Ang6
  gRNA
attctaaagtttgctccata

SEQ ID NO: 4122 - DNA, 20 bp, Artificial Sequence
  MKO10004122_A_Angel1
  gRNA
atgtcctgtacaacccgcgt

SEQ ID NO: 4123 - DNA, 20 bp, Artificial Sequence
  MKO10004123_A_Angel1
  gRNA
agcttgacatcaccccgacg

SEQ ID NO: 4124 - DNA, 20 bp, Artificial Sequence
  MKO10004124_A_Angel1
  gRNA
gtgcgatggccgcagaacag

SEQ ID NO: 4125 - DNA, 20 bp, Artificial Sequence
  MKO10004125_A_Angel2
  gRNA
gccgacgtccagtgttacac

SEQ ID NO: 4126 - DNA, 20 bp, Artificial Sequence
  MKO10004126_A_Angel2
  gRNA
ccgccgcgacattcctctgc

SEQ ID NO: 4127 - DNA, 20 bp, Artificial Sequence
  MKO10004127_A_Angel2
  gRNA
gtcttataacatcctctcgc

SEQ ID NO: 4128 - DNA, 20 bp, Artificial Sequence
  MKO10004128_A_Angpt1
  gRNA
taccaccttctttagtgcaa

SEQ ID NO: 4129 - DNA, 20 bp, Artificial Sequence
  MKO10004129_A_Angpt1
  gRNA
tcgtcagacattcatcatcc

SEQ ID NO: 4130 - DNA, 20 bp, Artificial Sequence
  MKO10004130_A_Angpt1
  gRNA
acatctgcacagtctcgaaa

SEQ ID NO: 4131 - DNA, 20 bp, Artificial Sequence
  MKO10004131_A_Angpt2
  gRNA
acggatagcaaccgagctct

SEQ ID NO: 4132 - DNA, 20 bp, Artificial Sequence
  MKO10004132_A_Angpt2
  gRNA
gcagctcgagtcttgtcgtc

SEQ ID NO: 4133 - DNA, 20 bp, Artificial Sequence
  MKO10004133_A_Angpt2
  gRNA
aaggagcgagttgttgaccg

SEQ ID NO: 4134 - DNA, 20 bp, Artificial Sequence
  MKO10004134_A_Angpt4
  gRNA
atagatggtatagacaccgc

SEQ ID NO: 4135 - DNA, 20 bp, Artificial Sequence
  MKO10004135_A_Angpt4
  gRNA
tgtgcagagatcaagcgctc

SEQ ID NO: 4136 - DNA, 20 bp, Artificial Sequence
  MKO10004136_A_Angpt4
  gRNA
gagcgtgcagattgtgcttc

SEQ ID NO: 4137 - DNA, 20 bp, Artificial Sequence
  MKO10004137_A_Angptl1
  gRNA
tgactactacagactgcgcc

SEQ ID NO: 4138 - DNA, 20 bp, Artificial Sequence
  MKO10004138_A_Angptl1
  gRNA
aactgcgcccacttccataa

SEQ ID NO: 4139 - DNA, 20 bp, Artificial Sequence
  MKO10004139_A_Angptl1
  gRNA
agaatacagcagctttcgtc

SEQ ID NO: 4140 - DNA, 20 bp, Artificial Sequence
  MKO10004140_A_Angptl2
  gRNA
tcgaaagcgagacaatgcgc

SEQ ID NO: 4141 - DNA, 20 bp, Artificial Sequence
  MKO10004141_A_Angptl2
  gRNA
gaataccaaccgcctgatgc

SEQ ID NO: 4142 - DNA, 20 bp, Artificial Sequence
  MKO10004142_A_Angptl2
  gRNA
agacggaggcatcgtgagcg

SEQ ID NO: 4143 - DNA, 20 bp, Artificial Sequence
  MKO10004143_A_Angptl3
  gRNA
cacaggacttcaacgaaaca

SEQ ID NO: 4144 - DNA, 20 bp, Artificial Sequence
  MKO10004144_A_Angptl3
  gRNA
gaaaactacgaaaagggctt

SEQ ID NO: 4145 - DNA, 20 bp, Artificial Sequence
  MKO10004145_A_Angptl3
  gRNA
atgttcgcctctgttataaa

SEQ ID NO: 4146 - DNA, 20 bp, Artificial Sequence
  MKO10004146_A_Angptl4
  gRNA
aagagttcctggcagtcccg

SEQ ID NO: 4147 - DNA, 20 bp, Artificial Sequence
  MKO10004147_A_Angptl4
  gRNA
tgaagtccacagagccgttc

SEQ ID NO: 4148 - DNA, 20 bp, Artificial Sequence
  MKO10004148_A_Angptl4
  gRNA
atctccgaagccatccttgt

SEQ ID NO: 4149 - DNA, 20 bp, Artificial Sequence
  MKO10004149_A_Angptl6
  gRNA
gccgtcgtgtagtagccgtg

SEQ ID NO: 4150 - DNA, 20 bp, Artificial Sequence
  MKO10004150_A_Angptl6
  gRNA
ctccggcatcgccgtggtac

SEQ ID NO: 4151 - DNA, 20 bp, Artificial Sequence
  MKO10004151_A_Angptl6
  gRNA
ggccagtaccacggcgatgc

SEQ ID NO: 4152 - DNA, 20 bp, Artificial Sequence
  MKO10004152_A_Angptl7
  gRNA
ggcggtagtacaccccattg

SEQ ID NO: 4153 - DNA, 20 bp, Artificial Sequence
  MKO10004153_A_Angptl7
  gRNA
aagccggcttcgtgtggagc

SEQ ID NO: 4154 - DNA, 20 bp, Artificial Sequence
  MKO10004154_A_Angptl7
  gRNA
caaggccactcttacgtctc

SEQ ID NO: 4155 - DNA, 20 bp, Artificial Sequence
  MKO10004155_A_Ang
  gRNA
aacatgtctgaaccctgcag

SEQ ID NO: 4156 - DNA, 20 bp, Artificial Sequence
  MKO10004156_A_Ang
  gRNA
gttgttcttgatcttcgtgc

SEQ ID NO: 4157 - DNA, 20 bp, Artificial Sequence
  MKO10004157_A_Ang
  gRNA
ctcggtactggcatggaggt

SEQ ID NO: 4158 - DNA, 20 bp, Artificial Sequence
  MKO10004158_A_Ank1
  gRNA
taatgtccactccattgcgc

SEQ ID NO: 4159 - DNA, 20 bp, Artificial Sequence
  MKO10004159_A_Ank1
  gRNA
gcgtgccgcccgcagaaagc

SEQ ID NO: 4160 - DNA, 20 bp, Artificial Sequence
  MKO10004160_A_Ank1
  gRNA
aggctttactcccctgtaca

SEQ ID NO: 4161 - DNA, 20 bp, Artificial Sequence
  MKO10004161_A_Ank2
  gRNA
ccttgtgaaacgccatcgac

SEQ ID NO: 4162 - DNA, 20 bp, Artificial Sequence
  MKO10004162_A_Ank2
  gRNA
tccgacttcaatcaggcggc

SEQ ID NO: 4163 - DNA, 20 bp, Artificial Sequence
  MKO10004163_A_Ank2
  gRNA
cacaaccgtgtcgtcaatca

SEQ ID NO: 4164 - DNA, 20 bp, Artificial Sequence
  MKO10004164_A_Ank3
  gRNA
gtgggggccgtacactttcg

SEQ ID NO: 4165 - DNA, 20 bp, Artificial Sequence
  MKO10004165_A_Ank3
  gRNA
gtaggacctatccgaactga

SEQ ID NO: 4166 - DNA, 20 bp, Artificial Sequence
  MKO10004166_A_Ank3
  gRNA
ttcagcacctgacgttcacg

SEQ ID NO: 4167 - DNA, 20 bp, Artificial Sequence
  MKO10004167_A_Ankar
  gRNA
attcaattcctccgtgaacg

SEQ ID NO: 4168 - DNA, 20 bp, Artificial Sequence
  MKO10004168_A_Ankar
  gRNA
tttccgttcaactccatgac

SEQ ID NO: 4169 - DNA, 20 bp, Artificial Sequence
  MKO10004169_A_Ankar
  gRNA
agtttacccaataccagtca

SEQ ID NO: 4170 - DNA, 20 bp, Artificial Sequence
  MKO10004170_A_Ankdd1b
  gRNA
cgacctgaaccagcccaatg

SEQ ID NO: 4171 - DNA, 20 bp, Artificial Sequence
  MKO10004171_A_Ankdd1b
  gRNA
gcaggtgcaagtcgtgaatg

SEQ ID NO: 4172 - DNA, 20 bp, Artificial Sequence
  MKO10004172_A_Ankdd1b
  gRNA
cacagccctgcactttgccg

SEQ ID NO: 4173 - DNA, 20 bp, Artificial Sequence
  MKO10004173_A_Ankef1
  gRNA
gcatcgatagtgccgcttag

SEQ ID NO: 4174 - DNA, 20 bp, Artificial Sequence
  MKO10004174_A_Ankef1
  gRNA
acgcctttaagttcgtggac

SEQ ID NO: 4175 - DNA, 20 bp, Artificial Sequence
  MKO10004175_A_Ankef1
  gRNA
gccgctaaactcgctaagac

SEQ ID NO: 4176 - DNA, 20 bp, Artificial Sequence
  MKO10004176_A_Ankfn1
  gRNA
ccaacaacgtgcccattgcg

SEQ ID NO: 4177 - DNA, 20 bp, Artificial Sequence
  MKO10004177_A_Ankfn1
  gRNA
agtggaggtaccggctctac

SEQ ID NO: 4178 - DNA, 20 bp, Artificial Sequence
  MKO10004178_A_Ankfn1
  gRNA
ccgcagaagaatcctcgcaa

SEQ ID NO: 4179 - DNA, 20 bp, Artificial Sequence
  MKO10004179_A_Ankfy1
  gRNA
acaatagttcatcagcgtac

SEQ ID NO: 4180 - DNA, 20 bp, Artificial Sequence
  MKO10004180_A_Ankfy1
  gRNA
ctaactagatgcgaatcctg

SEQ ID NO: 4181 - DNA, 20 bp, Artificial Sequence
  MKO10004181_A_Ankfy1
  gRNA
ctcatagagacctgccacta

SEQ ID NO: 4182 - DNA, 20 bp, Artificial Sequence
  MKO10004182_A_Ankhd1
  gRNA
gtcagtctccggagtacttc

SEQ ID NO: 4183 - DNA, 20 bp, Artificial Sequence
  MKO10004183_A_Ankhd1
  gRNA
tctacatacctgttgccgac

SEQ ID NO: 4184 - DNA, 20 bp, Artificial Sequence
  MKO10004184_A_Ankhd1
  gRNA
gttcgtaaattactagatga

SEQ ID NO: 4185 - DNA, 20 bp, Artificial Sequence
  MKO10004185_A_Ankib1
  gRNA
ccgtacctctcgcttgtcta

SEQ ID NO: 4186 - DNA, 20 bp, Artificial Sequence
  MKO10004186_A_Ankib1
  gRNA
ccgctctctcatattcgcct

SEQ ID NO: 4187 - DNA, 20 bp, Artificial Sequence
  MKO10004187_A_Ankib1
  gRNA
ccgtgctaagcgaggatgaa

SEQ ID NO: 4188 - DNA, 20 bp, Artificial Sequence
  MKO10004188_A_Ankk1
  gRNA
tgaacctgatgaagcgctgt

SEQ ID NO: 4189 - DNA, 20 bp, Artificial Sequence
  MKO10004189_A_Ankk1
  gRNA
gcagctttgcaattgtcatc

SEQ ID NO: 4190 - DNA, 20 bp, Artificial Sequence
  MKO10004190_A_Ankk1
  gRNA
accatttgatgtacctcctc

SEQ ID NO: 4191 - DNA, 20 bp, Artificial Sequence
  MKO10004191_A_Ankle1
  gRNA
acactatctacggcggctgc

SEQ ID NO: 4192 - DNA, 20 bp, Artificial Sequence
  MKO10004192_A_Ankle1
  gRNA
ccgccgtagatagtgtcctc

SEQ ID NO: 4193 - DNA, 20 bp, Artificial Sequence
  MKO10004193_A_Ankle1
  gRNA
gcagcactcgtgcgcagttg

SEQ ID NO: 4194 - DNA, 20 bp, Artificial Sequence
  MKO10004194_A_Ankle2
  gRNA
gatacaggtcaacaacgtag

SEQ ID NO: 4195 - DNA, 20 bp, Artificial Sequence
  MKO10004195_A_Ankle2
  gRNA
ttcgacagctttccgcagct

SEQ ID NO: 4196 - DNA, 20 bp, Artificial Sequence
  MKO10004196_A_Ankle2
  gRNA
ccagaaccaattagatatcg

SEQ ID NO: 4197 - DNA, 20 bp, Artificial Sequence
  MKO10004197_A_Ankmy1
  gRNA
tcttcgtcctcaatgaacgg

SEQ ID NO: 4198 - DNA, 20 bp, Artificial Sequence
  MKO10004198_A_Ankmy1
  gRNA
ggtaaactaccccgaattct

SEQ ID NO: 4199 - DNA, 20 bp, Artificial Sequence
  MKO10004199_A_Ankmy1
  gRNA
tgaaggcaccgtgggcgagc

SEQ ID NO: 4200 - DNA, 20 bp, Artificial Sequence
  MKO10004200_A_Ankmy2
  gRNA
taaaggtcagcacgattgcg

SEQ ID NO: 4201 - DNA, 20 bp, Artificial Sequence
  MKO10004201_A_Ankmy2
  gRNA
ctcatgtttgctgcgctttc

SEQ ID NO: 4202 - DNA, 20 bp, Artificial Sequence
  MKO10004202_A_Ankmy2
  gRNA
tcccaccgagttcacaacat

SEQ ID NO: 4203 - DNA, 20 bp, Artificial Sequence
  MKO10004203_A_Ankra2
  gRNA
cttgttcaatacgagtagcc

SEQ ID NO: 4204 - DNA, 20 bp, Artificial Sequence
  MKO10004204_A_Ankra2
  gRNA
ctactttaaccaacaagcac

SEQ ID NO: 4205 - DNA, 20 bp, Artificial Sequence
  MKO10004205_A_Ankra2
  gRNA
aaggatttacccccctgatg

SEQ ID NO: 4206 - DNA, 20 bp, Artificial Sequence
  MKO10004206_A_Ankrd10
  gRNA
gcagcgaacagagcgcgacc

SEQ ID NO: 4207 - DNA, 20 bp, Artificial Sequence
  MKO10004207_A_Ankrd10
  gRNA
actgcccactcacgttagcc

SEQ ID NO: 4208 - DNA, 20 bp, Artificial Sequence
  MKO10004208_A_Ankrd10
  gRNA
tcccgctgcaccgcgcctgc

SEQ ID NO: 4209 - DNA, 20 bp, Artificial Sequence
  MKO10004209_A_Ankrd11
  gRNA
tggcgatgtcgtaatagccc

SEQ ID NO: 4210 - DNA, 20 bp, Artificial Sequence
  MKO10004210_A_Ankrd11
  gRNA
tgatgagttccttgatgcgc

SEQ ID NO: 4211 - DNA, 20 bp, Artificial Sequence
  MKO10004211_A_Ankrd11
  gRNA
ctgcaccgagcagctatccg

SEQ ID NO: 4212 - DNA, 20 bp, Artificial Sequence
  MKO10004212_A_Ankrd12
  gRNA
agagacttatatcttcttac

SEQ ID NO: 4213 - DNA, 20 bp, Artificial Sequence
  MKO10004213_A_Ankrd12
  gRNA
acatacaagtgaaaattggg

SEQ ID NO: 4214 - DNA, 20 bp, Artificial Sequence
  MKO10004214_A_Ankrd12
  gRNA
tcgcgctcctcatttctcga

SEQ ID NO: 4215 - DNA, 20 bp, Artificial Sequence
  MKO10004215_A_Ankrd13a
  gRNA
ccatatgcgacagacatcgt

SEQ ID NO: 4216 - DNA, 20 bp, Artificial Sequence
  MKO10004216_A_Ankrd13a
  gRNA
ccaacgatgtctgtcgcata

SEQ ID NO: 4217 - DNA, 20 bp, Artificial Sequence
  MKO10004217_A_Ankrd13a
  gRNA
tgcagtaatgtccgaccccg

SEQ ID NO: 4218 - DNA, 20 bp, Artificial Sequence
  MKO10004218_A_Ankrd13b
  gRNA
ccagcgggtggtgaagcgac

SEQ ID NO: 4219 - DNA, 20 bp, Artificial Sequence
  MKO10004219_A_Ankrd13b
  gRNA
atggtcaaagcccaaaagcg

SEQ ID NO: 4220 - DNA, 20 bp, Artificial Sequence
  MKO10004220_A_Ankrd13b
  gRNA
gagaatcgcagtggttggac

SEQ ID NO: 4221 - DNA, 20 bp, Artificial Sequence
  MKO10004221_A_Ankrd13c
  gRNA
cttgcggaagccatcagcta

SEQ ID NO: 4222 - DNA, 20 bp, Artificial Sequence
  MKO10004222_A_Ankrd13c
  gRNA
agaatgcgcacatttactgt

SEQ ID NO: 4223 - DNA, 20 bp, Artificial Sequence
  MKO10004223_A_Ankrd13c
  gRNA
ttacatcttgctgtgatgtt

SEQ ID NO: 4224 - DNA, 20 bp, Artificial Sequence
  MKO10004224_A_Ankrd13d
  gRNA
ttaggcccctgatttctacg

SEQ ID NO: 4225 - DNA, 20 bp, Artificial Sequence
  MKO10004225_A_Ankrd13d
  gRNA
cgagcgatgtgtaccgtgtg

SEQ ID NO: 4226 - DNA, 20 bp, Artificial Sequence
  MKO10004226_A_Ankrd13d
  gRNA
ccctctggaagtcccgatac

SEQ ID NO: 4227 - DNA, 20 bp, Artificial Sequence
  MKO10004227_A_Ankrd16
  gRNA
cgatgccaagaccgcatacc

SEQ ID NO: 4228 - DNA, 20 bp, Artificial Sequence
  MKO10004228_A_Ankrd16
  gRNA
ggatgaagccatacggttcc

SEQ ID NO: 4229 - DNA, 20 bp, Artificial Sequence
  MKO10004229_A_Ankrd16
  gRNA
cttgtgcacgccatcatcag

SEQ ID NO: 4230 - DNA, 20 bp, Artificial Sequence
  MKO10004230_A_Ankrd17
  gRNA
gtgcggaaactactcattga

SEQ ID NO: 4231 - DNA, 20 bp, Artificial Sequence
  MKO10004231_A_Ankrd17
  gRNA
cagactcgcaccatcccacg

SEQ ID NO: 4232 - DNA, 20 bp, Artificial Sequence
  MKO10004232_A_Ankrd17
  gRNA
atcgtctgtcagttgtgcgt

SEQ ID NO: 4233 - DNA, 20 bp, Artificial Sequence
  MKO10004233_A_Ankrd1
  gRNA
cagccccgacgtctgcgatg

SEQ ID NO: 4234 - DNA, 20 bp, Artificial Sequence
  MKO10004234_A_Ankrd1
  gRNA
gcttacctcatcgcagacgt

SEQ ID NO: 4235 - DNA, 20 bp, Artificial Sequence
  MKO10004235_A_Ankrd1
  gRNA
ccatatctcggaattcaatc

SEQ ID NO: 4236 - DNA, 20 bp, Artificial Sequence
  MKO10004236_A_Ankrd22
  gRNA
cagcctaccagaacgacttg

SEQ ID NO: 4237 - DNA, 20 bp, Artificial Sequence
  MKO10004237_A_Ankrd22
  gRNA
tctcaggtggccccgcctgc

SEQ ID NO: 4238 - DNA, 20 bp, Artificial Sequence
  MKO10004238_A_Ankrd22
  gRNA
taacttctacgccagcatta

SEQ ID NO: 4239 - DNA, 20 bp, Artificial Sequence
  MKO10004239_A_Ankrd23
  gRNA
aaagcgttggagtttggacg

SEQ ID NO: 4240 - DNA, 20 bp, Artificial Sequence
  MKO10004240_A_Ankrd23
  gRNA
ccgccaggtacttgtcaatc

SEQ ID NO: 4241 - DNA, 20 bp, Artificial Sequence
  MKO10004241_A_Ankrd23
  gRNA
ggaccccaatgcccatgaca

SEQ ID NO: 4242 - DNA, 20 bp, Artificial Sequence
  MKO10004242_A_Ankrd24
  gRNA
gtcctcgatgtccaccacgc

SEQ ID NO: 4243 - DNA, 20 bp, Artificial Sequence
  MKO10004243_A_Ankrd24
  gRNA
cctcgttgatcgcccacaag

SEQ ID NO: 4244 - DNA, 20 bp, Artificial Sequence
  MKO10004244_A_Ankrd24
  gRNA
aggttacaatgcccttcacc

SEQ ID NO: 4245 - DNA, 20 bp, Artificial Sequence
  MKO10004245_A_Ankrd26
  gRNA
tctcactgtagaccgcgtag

SEQ ID NO: 4246 - DNA, 20 bp, Artificial Sequence
  MKO10004246_A_Ankrd26
  gRNA
ctacagtgagaacacgtcca

SEQ ID NO: 4247 - DNA, 20 bp, Artificial Sequence
  MKO10004247_A_Ankrd26
  gRNA
attcacgcagttgatcagct

SEQ ID NO: 4248 - DNA, 20 bp, Artificial Sequence
  MKO10004248_A_Ankrd27
  gRNA
ttccaggctgtcgtcattga

SEQ ID NO: 4249 - DNA, 20 bp, Artificial Sequence
  MKO10004249_A_Ankrd27
  gRNA
gactttctacaacgagaaag

SEQ ID NO: 4250 - DNA, 20 bp, Artificial Sequence
  MKO10004250_A_Ankrd27
  gRNA
ggatactaactatgtggtgg

SEQ ID NO: 4251 - DNA, 20 bp, Artificial Sequence
  MKO10004251_A_Ankrd28
  gRNA
gtgaacgtgtccgaccgagc

SEQ ID NO: 4252 - DNA, 20 bp, Artificial Sequence
  MKO10004252_A_Ankrd28
  gRNA
agcagttgcatcgtgtagtg

SEQ ID NO: 4253 - DNA, 20 bp, Artificial Sequence
  MKO10004253_A_Ankrd28
  gRNA
gatttctgcgtcaccaagat

SEQ ID NO: 4254 - DNA, 20 bp, Artificial Sequence
  MKO10004254_A_Ankrd29
  gRNA
tactttggtccgacattcag

SEQ ID NO: 4255 - DNA, 20 bp, Artificial Sequence
  MKO10004255_A_Ankrd29
  gRNA
gcacggcaccacacttctca

SEQ ID NO: 4256 - DNA, 20 bp, Artificial Sequence
  MKO10004256_A_Ankrd29
  gRNA
catactgactagcagccaac

SEQ ID NO: 4257 - DNA, 20 bp, Artificial Sequence
  MKO10004257_A_Ankrd2
  gRNA
atgtcttgcgcacgcgctct

SEQ ID NO: 4258 - DNA, 20 bp, Artificial Sequence
  MKO10004258_A_Ankrd2
  gRNA
aaacttcgaagatccgctcc

SEQ ID NO: 4259 - DNA, 20 bp, Artificial Sequence
  MKO10004259_A_Ankrd2
  gRNA
ccgctgaacctccgtccgcc

SEQ ID NO: 4260 - DNA, 20 bp, Artificial Sequence
  MKO10004260_A_Ankrd32
  gRNA
atcaagccatctgccacttt

SEQ ID NO: 4261 - DNA, 20 bp, Artificial Sequence
  MKO10004261_A_Ankrd32
  gRNA
tccgcttatctgccctaaca

SEQ ID NO: 4262 - DNA, 20 bp, Artificial Sequence
  MKO10004262_A_Ankrd32
  gRNA
agcactgattcttgcattac

SEQ ID NO: 4263 - DNA, 20 bp, Artificial Sequence
  MKO10004263_A_Ankrd33b
  gRNA
ccgcagcaaccccacgtcgt

SEQ ID NO: 4264 - DNA, 20 bp, Artificial Sequence
  MKO10004264_A_Ankrd33b
  gRNA
aatcgtccgatgcgatgctg

SEQ ID NO: 4265 - DNA, 20 bp, Artificial Sequence
  MKO10004265_A_Ankrd33b
  gRNA
gtccccacgttgacgtcaac

SEQ ID NO: 4266 - DNA, 20 bp, Artificial Sequence
  MKO10004266_A_Ankrd33
  gRNA
acactcggagcgatcttgaa

SEQ ID NO: 4267 - DNA, 20 bp, Artificial Sequence
  MKO10004267_A_Ankrd33
  gRNA
gccactctggctggtaatgc

SEQ ID NO: 4268 - DNA, 20 bp, Artificial Sequence
  MKO10004268_A_Ankrd33
  gRNA
gtcagctcataccgtgcaga

SEQ ID NO: 4269 - DNA, 20 bp, Artificial Sequence
  MKO10004269_A_Ankrd34a
  gRNA
tcagcgcggtacgtcctaaa

SEQ ID NO: 4270 - DNA, 20 bp, Artificial Sequence
  MKO10004270_A_Ankrd34a
  gRNA
gtcgtcgtaacgggccctac

SEQ ID NO: 4271 - DNA, 20 bp, Artificial Sequence
  MKO10004271_A_Ankrd34a
  gRNA
gcgctgatgcatgcttgcgc

SEQ ID NO: 4272 - DNA, 20 bp, Artificial Sequence
  MKO10004272_A_Ankrd34b
  gRNA
ccgcgtgattcctcctgctc

SEQ ID NO: 4273 - DNA, 20 bp, Artificial Sequence
  MKO10004273_A_Ankrd34b
  gRNA
ccaaaaagcgcttatgccga

SEQ ID NO: 4274 - DNA, 20 bp, Artificial Sequence
  MKO10004274_A_Ankrd34b
  gRNA
accacagcgaagtcgccctc

SEQ ID NO: 4275 - DNA, 20 bp, Artificial Sequence
  MKO10004275_A_Ankrd34c
  gRNA
tcgaccgcattgctcacacg

SEQ ID NO: 4276 - DNA, 20 bp, Artificial Sequence
  MKO10004276_A_Ankrd34c
  gRNA
ctcccacctcagttcgccgc

SEQ ID NO: 4277 - DNA, 20 bp, Artificial Sequence
  MKO10004277_A_Ankrd34c
  gRNA
taagctgctttccacgaagc

SEQ ID NO: 4278 - DNA, 20 bp, Artificial Sequence
  MKO10004278_A_Ankrd35
  gRNA
ccagcagcttctgatcacgt

SEQ ID NO: 4279 - DNA, 20 bp, Artificial Sequence
  MKO10004279_A_Ankrd35
  gRNA
ccgacgtgatcagaagctgc

SEQ ID NO: 4280 - DNA, 20 bp, Artificial Sequence
  MKO10004280_A_Ankrd35
  gRNA
ttccatctggcagcctccaa

SEQ ID NO: 4281 - DNA, 20 bp, Artificial Sequence
  MKO10004281_A_Ankrd36
  gRNA
ccttgttgtagaccgtgtag

SEQ ID NO: 4282 - DNA, 20 bp, Artificial Sequence
  MKO10004282_A_Ankrd36
  gRNA
gatacctcttgcagttatcc

SEQ ID NO: 4283 - DNA, 20 bp, Artificial Sequence
  MKO10004283_A_Ankrd36
  gRNA
tcttcacacagatctcgtgc

SEQ ID NO: 4284 - DNA, 20 bp, Artificial Sequence
  MKO10004284_A_Ankrd37
  gRNA
ggatgaccttaagagtttgc

SEQ ID NO: 4285 - DNA, 20 bp, Artificial Sequence
  MKO10004285_A_Ankrd37
  gRNA
ttcagcgtatgcaataagaa

SEQ ID NO: 4286 - DNA, 20 bp, Artificial Sequence
  MKO10004286_A_Ankrd37
  gRNA
agcatcagtgaacgcacctc

SEQ ID NO: 4287 - DNA, 20 bp, Artificial Sequence
  MKO10004287_A_Ankrd39
  gRNA
cagcactacgccagccgcaa

SEQ ID NO: 4288 - DNA, 20 bp, Artificial Sequence
  MKO10004288_A_Ankrd39
  gRNA
ggcggcgccgcacctttgcg

SEQ ID NO: 4289 - DNA, 20 bp, Artificial Sequence
  MKO10004289_A_Ankrd39
  gRNA
ctaggcgtgctttgcgatcc

SEQ ID NO: 4290 - DNA, 20 bp, Artificial Sequence
  MKO10004290_A_Ankrd40
  gRNA
cctgcatacgtcccgttctg

SEQ ID NO: 4291 - DNA, 20 bp, Artificial Sequence
  MKO10004291_A_Ankrd40
  gRNA
ggatgtgaactcgcaaaatg

SEQ ID NO: 4292 - DNA, 20 bp, Artificial Sequence
  MKO10004292_A_Ankrd40
  gRNA
gtgtcctacctgctacaatc

SEQ ID NO: 4293 - DNA, 20 bp, Artificial Sequence
  MKO10004293_A_Ankrd42
  gRNA
atcgaagacgtggactacaa

SEQ ID NO: 4294 - DNA, 20 bp, Artificial Sequence
  MKO10004294_A_Ankrd42
  gRNA
cggctcacatagctgcaatc

SEQ ID NO: 4295 - DNA, 20 bp, Artificial Sequence
  MKO10004295_A_Ankrd42
  gRNA
ctagcaactcaagatgatcg

SEQ ID NO: 4296 - DNA, 20 bp, Artificial Sequence
  MKO10004296_A_Ankrd44
  gRNA
gactgaagacgtaaacgcac

SEQ ID NO: 4297 - DNA, 20 bp, Artificial Sequence
  MKO10004297_A_Ankrd44
  gRNA
gaaacgaaccccgcttcatg

SEQ ID NO: 4298 - DNA, 20 bp, Artificial Sequence
  MKO10004298_A_Ankrd44
  gRNA
ttgcaccacgccgctctgaa

SEQ ID NO: 4299 - DNA, 20 bp, Artificial Sequence
  MKO10004299_A_Ankrd45
  gRNA
aagtgacgtaattaaagcct

SEQ ID NO: 4300 - DNA, 20 bp, Artificial Sequence
  MKO10004300_A_Ankrd45
  gRNA
caaagtttccagacggcccc

SEQ ID NO: 4301 - DNA, 20 bp, Artificial Sequence
  MKO10004301_A_Ankrd45
  gRNA
cgtgccgtctgaaaaacgag

SEQ ID NO: 4302 - DNA, 20 bp, Artificial Sequence
  MKO10004302_A_Ankrd46
  gRNA
aacgggccttcacctcgccg

SEQ ID NO: 4303 - DNA, 20 bp, Artificial Sequence
  MKO10004303_A_Ankrd46
  gRNA
acaggacgccttcgccttgc

SEQ ID NO: 4304 - DNA, 20 bp, Artificial Sequence
  MKO10004304_A_Ankrd46
  gRNA
cagaggcgcgcactcgaagc

SEQ ID NO: 4305 - DNA, 20 bp, Artificial Sequence
  MKO10004305_A_Ankrd49
  gRNA
tgatgtaacgattcatcagg

SEQ ID NO: 4306 - DNA, 20 bp, Artificial Sequence
  MKO10004306_A_Ankrd49
  gRNA
gggtcaaaaggcctttcgtt

SEQ ID NO: 4307 - DNA, 20 bp, Artificial Sequence
  MKO10004307_A_Ankrd49
  gRNA
gcccaaagaagcaatttgct

SEQ ID NO: 4308 - DNA, 20 bp, Artificial Sequence
  MKO10004308_A_Ankrd50
  gRNA
tattcccagcgttgccgacg

SEQ ID NO: 4309 - DNA, 20 bp, Artificial Sequence
  MKO10004309_A_Ankrd50
  gRNA
gccactgcacagtccctcgt

SEQ ID NO: 4310 - DNA, 20 bp, Artificial Sequence
  MKO10004310_A_Ankrd50
  gRNA
cacattgcagccttcgtcca

SEQ ID NO: 4311 - DNA, 20 bp, Artificial Sequence
  MKO10004311_A_Ankrd52
  gRNA
ggtctgtacctcgtttcggg

SEQ ID NO: 4312 - DNA, 20 bp, Artificial Sequence
  MKO10004312_A_Ankrd52
  gRNA
gatggggacatcgcctacgt

SEQ ID NO: 4313 - DNA, 20 bp, Artificial Sequence
  MKO10004313_A_Ankrd52
  gRNA
aggtgctaacgtcaacgcta

SEQ ID NO: 4314 - DNA, 20 bp, Artificial Sequence
  MKO10004314_A_Ankrd53
  gRNA
ggagatcatagtcgacgaca

SEQ ID NO: 4315 - DNA, 20 bp, Artificial Sequence
  MKO10004315_A_Ankrd53
  gRNA
tgaccaagtgcaggggcgtc

SEQ ID NO: 4316 - DNA, 20 bp, Artificial Sequence
  MKO10004316_A_Ankrd53
  gRNA
ccaaagtctgcaatagtcga

SEQ ID NO: 4317 - DNA, 20 bp, Artificial Sequence
  MKO10004317_A_Ankrd54
  gRNA
gcctttatcatccgctgcgc

SEQ ID NO: 4318 - DNA, 20 bp, Artificial Sequence
  MKO10004318_A_Ankrd54
  gRNA
ctcacctgtttctacgtcgt

SEQ ID NO: 4319 - DNA, 20 bp, Artificial Sequence
  MKO10004319_A_Ankrd54
  gRNA
gggcaacacgccattgcacc

SEQ ID NO: 4320 - DNA, 20 bp, Artificial Sequence
  MKO10004320_A_Ankrd55
  gRNA
ggacggatcctcccgaatga

SEQ ID NO: 4321 - DNA, 20 bp, Artificial Sequence
  MKO10004321_A_Ankrd55
  gRNA
cgacctggcaatggtgtatc

SEQ ID NO: 4322 - DNA, 20 bp, Artificial Sequence
  MKO10004322_A_Ankrd55
  gRNA
tcctgaaaccgcgtgcatca

SEQ ID NO: 4323 - DNA, 20 bp, Artificial Sequence
  MKO10004323_A_Ankrd60
  gRNA
gggtcgtccccctgccgttt

SEQ ID NO: 4324 - DNA, 20 bp, Artificial Sequence
  MKO10004324_A_Ankrd60
  gRNA
cgggcgcgcgtccgccgaaa

SEQ ID NO: 4325 - DNA, 20 bp, Artificial Sequence
  MKO10004325_A_Ankrd60
  gRNA
ttacgatggttggacggaac

SEQ ID NO: 4326 - DNA, 20 bp, Artificial Sequence
  MKO10004326_A_Ankrd61
  gRNA
tgcggtactcggcggccaga

SEQ ID NO: 4327 - DNA, 20 bp, Artificial Sequence
  MKO10004327_A_Ankrd61
  gRNA
ataagtgcggtaaagtagtc

SEQ ID NO: 4328 - DNA, 20 bp, Artificial Sequence
  MKO10004328_A_Ankrd61
  gRNA
aggtaacttaccttacttct

SEQ ID NO: 4329 - DNA, 20 bp, Artificial Sequence
  MKO10004329_A_Ankrd63
  gRNA
gcgcggtaaacgacggggac

SEQ ID NO: 4330 - DNA, 20 bp, Artificial Sequence
  MKO10004330_A_Ankrd63
  gRNA
gacgccgcttatggtggccg

SEQ ID NO: 4331 - DNA, 20 bp, Artificial Sequence
  MKO10004331_A_Ankrd63
  gRNA
gcagttcagcggcgatccgg

SEQ ID NO: 4332 - DNA, 20 bp, Artificial Sequence
  MKO10004332_A_Ankrd66
  gRNA
cgtcaagcaacagccctctc

SEQ ID NO: 4333 - DNA, 20 bp, Artificial Sequence
  MKO10004333_A_Ankrd66
  gRNA
gagggctgttgcttgacgag

SEQ ID NO: 4334 - DNA, 20 bp, Artificial Sequence
  MKO10004334_A_Ankrd66
  gRNA
ctgatcgcagcccagtgaag

SEQ ID NO: 4335 - DNA, 20 bp, Artificial Sequence
  MKO10004335_A_Ankrd6
  gRNA
tccggctttaacgagcagct

SEQ ID NO: 4336 - DNA, 20 bp, Artificial Sequence
  MKO10004336_A_Ankrd6
  gRNA
agatcctcacagcgcttatc

SEQ ID NO: 4337 - DNA, 20 bp, Artificial Sequence
  MKO10004337_A_Ankrd6
  gRNA
cttgcacctcgctgccaata

SEQ ID NO: 4338 - DNA, 20 bp, Artificial Sequence
  MKO10004338_A_Ankrd7
  gRNA
tctttaagtgcttatctcga

SEQ ID NO: 4339 - DNA, 20 bp, Artificial Sequence
  MKO10004339_A_Ankrd7
  gRNA
gatatcctccacctatggac

SEQ ID NO: 4340 - DNA, 20 bp, Artificial Sequence
  MKO10004340_A_Ankrd7
  gRNA
atggaacacaccttaatcaa

SEQ ID NO: 4341 - DNA, 20 bp, Artificial Sequence
  MKO10004341_A_Ankrd9
  gRNA
ggcggtgcgctacaaccgcg

SEQ ID NO: 4342 - DNA, 20 bp, Artificial Sequence
  MKO10004342_A_Ankrd9
  gRNA
ggcgagtgcacaccgcggga

SEQ ID NO: 4343 - DNA, 20 bp, Artificial Sequence
  MKO10004343_A_Ankrd9
  gRNA
cgctgcggcctattcgcctt

SEQ ID NO: 4344 - DNA, 20 bp, Artificial Sequence
  MKO10004344_A_Anks1b
  gRNA
agcgatccagctccttccaa

SEQ ID NO: 4345 - DNA, 20 bp, Artificial Sequence
  MKO10004345_A_Anks1b
  gRNA
atggtagccatcatggccga

SEQ ID NO: 4346 - DNA, 20 bp, Artificial Sequence
  MKO10004346_A_Anks1b
  gRNA
atcccacctctgtagccgag

SEQ ID NO: 4347 - DNA, 20 bp, Artificial Sequence
  MKO10004347_A_Anks1
  gRNA
accaacgttgctgactcgaa

SEQ ID NO: 4348 - DNA, 20 bp, Artificial Sequence
  MKO10004348_A_Anks1
  gRNA
tcagcgcgtcgttcctcaga

SEQ ID NO: 4349 - DNA, 20 bp, Artificial Sequence
  MKO10004349_A_Anks1
  gRNA
gagccttcacgacctccgtg

SEQ ID NO: 4350 - DNA, 20 bp, Artificial Sequence
  MKO10004350_A_Anks3
  gRNA
caatcacctcacgttggcat

SEQ ID NO: 4351 - DNA, 20 bp, Artificial Sequence
  MKO10004351_A_Anks3
  gRNA
gtggagccaatgccaacgtg

SEQ ID NO: 4352 - DNA, 20 bp, Artificial Sequence
  MKO10004352_A_Anks3
  gRNA
aggtacctgggctacggtag

SEQ ID NO: 4353 - DNA, 20 bp, Artificial Sequence
  MKO10004353_A_Anks4b
  gRNA
tgagtctattctcaaccgtc

SEQ ID NO: 4354 - DNA, 20 bp, Artificial Sequence
  MKO10004354_A_Anks4b
  gRNA
tgagagattcagatcacgct

SEQ ID NO: 4355 - DNA, 20 bp, Artificial Sequence
  MKO10004355_A_Anks4b
  gRNA
agcctaccacggcaacctcg

SEQ ID NO: 4356 - DNA, 20 bp, Artificial Sequence
  MKO10004356_A_Anks6
  gRNA
cggggcgaccccactgatgc

SEQ ID NO: 4357 - DNA, 20 bp, Artificial Sequence
  MKO10004357_A_Anks6
  gRNA
tcgccccgtccccgttgacc

SEQ ID NO: 4358 - DNA, 20 bp, Artificial Sequence
  MKO10004358_A_Anks6
  gRNA
ttgctctcgaccgcaagtac

SEQ ID NO: 4359 - DNA, 20 bp, Artificial Sequence
  MKO10004359_A_Ankzf1
  gRNA
tagaatccggggggccggtt

SEQ ID NO: 4360 - DNA, 20 bp, Artificial Sequence
  MKO10004360_A_Ankzf1
  gRNA
cccccggattctacccacat

SEQ ID NO: 4361 - DNA, 20 bp, Artificial Sequence
  MKO10004361_A_Ankzf1
  gRNA
catgagcaccacgtagtatc

SEQ ID NO: 4362 - DNA, 20 bp, Artificial Sequence
  MKO10004362_A_Ank
  gRNA
agaatacgccagcccgtagc

SEQ ID NO: 4363 - DNA, 20 bp, Artificial Sequence
  MKO10004363_A_Ank
  gRNA
tccacgacatcatccccgac

SEQ ID NO: 4364 - DNA, 20 bp, Artificial Sequence
  MKO10004364_A_Ank
  gRNA
gagccttacctatcagggtg

SEQ ID NO: 4365 - DNA, 20 bp, Artificial Sequence
  MKO10004365_A_Anln
  gRNA
ttgctgagcagcggcgccat

SEQ ID NO: 4366 - DNA, 20 bp, Artificial Sequence
  MKO10004366_A_Anln
  gRNA
gcagatctcgctactgccgt

SEQ ID NO: 4367 - DNA, 20 bp, Artificial Sequence
  MKO10004367_A_Anln
  gRNA
agtcgcttaccttcgccccc

SEQ ID NO: 4368 - DNA, 20 bp, Artificial Sequence
  MKO10004368_A_Ano10
  gRNA
aatgtacggacgctgccatg

SEQ ID NO: 4369 - DNA, 20 bp, Artificial Sequence
  MKO10004369_A_Ano10
  gRNA
gtctcttgtagctcgagtag

SEQ ID NO: 4370 - DNA, 20 bp, Artificial Sequence
  MKO10004370_A_Ano10
  gRNA
gtgccaacatgacctatcgc

SEQ ID NO: 4371 - DNA, 20 bp, Artificial Sequence
  MKO10004371_A_Ano1
  gRNA
cgagaagtactcgacgctcc

SEQ ID NO: 4372 - DNA, 20 bp, Artificial Sequence
  MKO10004372_A_Ano1
  gRNA
gaactcaccgtgccctcgga

SEQ ID NO: 4373 - DNA, 20 bp, Artificial Sequence
  MKO10004373_A_Ano1
  gRNA
cccgacgccgaatgcaagta

SEQ ID NO: 4374 - DNA, 20 bp, Artificial Sequence
  MKO10004374_A_Ano2
  gRNA
ttgtccggatccacgcccca

SEQ ID NO: 4375 - DNA, 20 bp, Artificial Sequence
  MKO10004375_A_Ano2
  gRNA
tgcactttcacgacaaccag

SEQ ID NO: 4376 - DNA, 20 bp, Artificial Sequence
  MKO10004376_A_Ano2
  gRNA
gtccgagaactcagccgacg

SEQ ID NO: 4377 - DNA, 20 bp, Artificial Sequence
  MKO10004377_A_Ano3
  gRNA
aaagcgaattgattacatcc

SEQ ID NO: 4378 - DNA, 20 bp, Artificial Sequence
  MKO10004378_A_Ano3
  gRNA
tggcatgttcagattcatcc

SEQ ID NO: 4379 - DNA, 20 bp, Artificial Sequence
  MKO10004379_A_Ano3
  gRNA
atgagttacatagcatctag

SEQ ID NO: 4380 - DNA, 20 bp, Artificial Sequence
  MKO10004380_A_Ano4
  gRNA
ggcgacgacgtgaccctggg

SEQ ID NO: 4381 - DNA, 20 bp, Artificial Sequence
  MKO10004381_A_Ano4
  gRNA
ttgccacacttcgccgttga

SEQ ID NO: 4382 - DNA, 20 bp, Artificial Sequence
  MKO10004382_A_Ano4
  gRNA
aaatctgacgagcacttcgg

SEQ ID NO: 4383 - DNA, 20 bp, Artificial Sequence
  MKO10004383_A_Ano5
  gRNA
acaggacaaagtcgatctgc

SEQ ID NO: 4384 - DNA, 20 bp, Artificial Sequence
  MKO10004384_A_Ano5
  gRNA
cgactttgtcctgtcctacg

SEQ ID NO: 4385 - DNA, 20 bp, Artificial Sequence
  MKO10004385_A_Ano5
  gRNA
ttcgacttacctcattctgt

SEQ ID NO: 4386 - DNA, 20 bp, Artificial Sequence
  MKO10004386_A_Ano6
  gRNA
tcgtaaaagtgcacgcgccc

SEQ ID NO: 4387 - DNA, 20 bp, Artificial Sequence
  MKO10004387_A_Ano6
  gRNA
tggacgtacaatgcggcttc

SEQ ID NO: 4388 - DNA, 20 bp, Artificial Sequence
  MKO10004388_A_Ano6
  gRNA
gtcgattcgcctctggccat

SEQ ID NO: 4389 - DNA, 20 bp, Artificial Sequence
  MKO10004389_A_Ano7
  gRNA
taatactcggggggcgtgtc

SEQ ID NO: 4390 - DNA, 20 bp, Artificial Sequence
  MKO10004390_A_Ano7
  gRNA
acatcctcctccgcgcaccc

SEQ ID NO: 4391 - DNA, 20 bp, Artificial Sequence
  MKO10004391_A_Ano7
  gRNA
gcgcctgaagctgcctctac

SEQ ID NO: 4392 - DNA, 20 bp, Artificial Sequence
  MKO10004392_A_Ano8
  gRNA
gctacgcttcttcacatcgc

SEQ ID NO: 4393 - DNA, 20 bp, Artificial Sequence
  MKO10004393_A_Ano8
  gRNA
ttgtcaccgccacatacgag

SEQ ID NO: 4394 - DNA, 20 bp, Artificial Sequence
  MKO10004394_A_Ano8
  gRNA
tctgcacaacgtgcgcttct

SEQ ID NO: 4395 - DNA, 20 bp, Artificial Sequence
  MKO10004395_A_Ano9
  gRNA
gtgacgtcattgacaagtac

SEQ ID NO: 4396 - DNA, 20 bp, Artificial Sequence
  MKO10004396_A_Ano9
  gRNA
gttgaagctctgctcgtctc

SEQ ID NO: 4397 - DNA, 20 bp, Artificial Sequence
  MKO10004397_A_Ano9
  gRNA
agtggaagccattgctctcg

SEQ ID NO: 4398 - DNA, 20 bp, Artificial Sequence
  MKO10004398_A_Anp32a
  gRNA
tctcagcacaatagagccgc

SEQ ID NO: 4399 - DNA, 20 bp, Artificial Sequence
  MKO10004399_A_Anp32a
  gRNA
ggcccccgactccgatgttg

SEQ ID NO: 4400 - DNA, 20 bp, Artificial Sequence
  MKO10004400_A_Anp32a
  gRNA
tgtacctcgatggctatgac

SEQ ID NO: 4401 - DNA, 20 bp, Artificial Sequence
  MKO10004401_A_Anp32b
  gRNA
gaggaagcccccgactcaga

SEQ ID NO: 4402 - DNA, 20 bp, Artificial Sequence
  MKO10004402_A_Anp32b
  gRNA
accactcaccaacggctcca

SEQ ID NO: 4403 - DNA, 20 bp, Artificial Sequence
  MKO10004403_A_Anp32b
  gRNA
acaggttcgagaacttgtct

SEQ ID NO: 4404 - DNA, 20 bp, Artificial Sequence
  MKO10004404_A_Anp32e
  gRNA
cctcctggtcgaatccgtcc

SEQ ID NO: 4405 - DNA, 20 bp, Artificial Sequence
  MKO10004405_A_Anp32e
  gRNA
ggacaacgaagctcccgact

SEQ ID NO: 4406 - DNA, 20 bp, Artificial Sequence
  MKO10004406_A_Anp32e
  gRNA
cccaccggaaggctatgaag

SEQ ID NO: 4407 - DNA, 20 bp, Artificial Sequence
  MKO10004407_A_Anpep
  gRNA
tttgaactcgctcacgatgt

SEQ ID NO: 4408 - DNA, 20 bp, Artificial Sequence
  MKO10004408_A_Anpep
  gRNA
gattacgcactgaacgttac

SEQ ID NO: 4409 - DNA, 20 bp, Artificial Sequence
  MKO10004409_A_Anpep
  gRNA
tcggcccagtgccattgatg

SEQ ID NO: 4410 - DNA, 20 bp, Artificial Sequence
  MKO10004410_A_Antxr1
  gRNA
ggagacacttacatgcacga

SEQ ID NO: 4411 - DNA, 20 bp, Artificial Sequence
  MKO10004411_A_Antxr1
  gRNA
ctactacttcgtggagcagt

SEQ ID NO: 4412 - DNA, 20 bp, Artificial Sequence
  MKO10004412_A_Antxr1
  gRNA
ttcagggaacagatccgaca

SEQ ID NO: 4413 - DNA, 20 bp, Artificial Sequence
  MKO10004413_A_Antxr2
  gRNA
acctcgttctctgcataaga

SEQ ID NO: 4414 - DNA, 20 bp, Artificial Sequence
  MKO10004414_A_Antxr2
  gRNA
accatcttatgcagagaacg

SEQ ID NO: 4415 - DNA, 20 bp, Artificial Sequence
  MKO10004415_A_Antxr2
  gRNA
actaacctgtctccagttaa

SEQ ID NO: 4416 - DNA, 20 bp, Artificial Sequence
  MKO10004416_A_Antxrl
  gRNA
atgatggagatccgcaggtt

SEQ ID NO: 4417 - DNA, 20 bp, Artificial Sequence
  MKO10004417_A_Antxrl
  gRNA
ctatgttcttaagcacgaga

SEQ ID NO: 4418 - DNA, 20 bp, Artificial Sequence
  MKO10004418_A_Antxrl
  gRNA
acagatccgaaaatctacct

SEQ ID NO: 4419 - DNA, 20 bp, Artificial Sequence
  MKO10004419_A_Anxa10
  gRNA
ccggccatacatgctctgat

SEQ ID NO: 4420 - DNA, 20 bp, Artificial Sequence
  MKO10004420_A_Anxa10
  gRNA
ggagtgctccgcctagcatt

SEQ ID NO: 4421 - DNA, 20 bp, Artificial Sequence
  MKO10004421_A_Anxa10
  gRNA
tccatcatgggattgaaatt

SEQ ID NO: 4422 - DNA, 20 bp, Artificial Sequence
  MKO10004422_A_Anxa11
  gRNA
ctacgttatccagcccgata

SEQ ID NO: 4423 - DNA, 20 bp, Artificial Sequence
  MKO10004423_A_Anxa11
  gRNA
gtactagatcccgagtatcc

SEQ ID NO: 4424 - DNA, 20 bp, Artificial Sequence
  MKO10004424_A_Anxa11
  gRNA
cttgccataggccgtcttga

SEQ ID NO: 4425 - DNA, 20 bp, Artificial Sequence
  MKO10004425_A_Anxa13
  gRNA
ggcccaatgagtacgccgca

SEQ ID NO: 4426 - DNA, 20 bp, Artificial Sequence
  MKO10004426_A_Anxa13
  gRNA
actcattgggccgatccaga

SEQ ID NO: 4427 - DNA, 20 bp, Artificial Sequence
  MKO10004427_A_Anxa13
  gRNA
tcattgaagtcttatccagc

SEQ ID NO: 4428 - DNA, 20 bp, Artificial Sequence
  MKO10004428_A_Anxa1
  gRNA
tttgatgcagatgaactccg

SEQ ID NO: 4429 - DNA, 20 bp, Artificial Sequence
  MKO10004429_A_Anxa1
  gRNA
tccattctcctgtaagtacg

SEQ ID NO: 4430 - DNA, 20 bp, Artificial Sequence
  MKO10004430_A_Anxa1
  gRNA
gatctgctggcgctgagcat

SEQ ID NO: 4431 - DNA, 20 bp, Artificial Sequence
  MKO10004431_A_Anxa2
  gRNA
ggcccaaaatcaccgtctcc

SEQ ID NO: 4432 - DNA, 20 bp, Artificial Sequence
  MKO10004432_A_Anxa2
  gRNA
gtagggtttgactgacccgt

SEQ ID NO: 4433 - DNA, 20 bp, Artificial Sequence
  MKO10004433_A_Anxa2
  gRNA
tctacacccccaagtgccta

SEQ ID NO: 4434 - DNA, 20 bp, Artificial Sequence
  MKO10004434_A_Anxa3
  gRNA
gctatccggaaagcgatcag

SEQ ID NO: 4435 - DNA, 20 bp, Artificial Sequence
  MKO10004435_A_Anxa3
  gRNA
ccaccatgacgtgctcgaag

SEQ ID NO: 4436 - DNA, 20 bp, Artificial Sequence
  MKO10004436_A_Anxa3
  gRNA
tggccacttcgagcacgtca

SEQ ID NO: 4437 - DNA, 20 bp, Artificial Sequence
  MKO10004437_A_Anxa4
  gRNA
acttacgctgctggtatgtc

SEQ ID NO: 4438 - DNA, 20 bp, Artificial Sequence
  MKO10004438_A_Anxa4
  gRNA
gtaggctaagattccgataa

SEQ ID NO: 4439 - DNA, 20 bp, Artificial Sequence
  MKO10004439_A_Anxa4
  gRNA
ttgattcgacggatctcctc

SEQ ID NO: 4440 - DNA, 20 bp, Artificial Sequence
  MKO10004440_A_Anxa5
  gRNA
cattgcttcgggatgtcaac

SEQ ID NO: 4441 - DNA, 20 bp, Artificial Sequence
  MKO10004441_A_Anxa5
  gRNA
atcaatttcaggtaccgatg

SEQ ID NO: 4442 - DNA, 20 bp, Artificial Sequence
  MKO10004442_A_Anxa5
  gRNA
tgaccgagattattgcttca

SEQ ID NO: 4443 - DNA, 20 bp, Artificial Sequence
  MKO10004443_A_Anxa6
  gRNA
catacttcaagtcttcgatg

SEQ ID NO: 4444 - DNA, 20 bp, Artificial Sequence
  MKO10004444_A_Anxa6
  gRNA
ccacagggtgccatgtaccg

SEQ ID NO: 4445 - DNA, 20 bp, Artificial Sequence
  MKO10004445_A_Anxa6
  gRNA
ggctgatagtgaacctgatg

SEQ ID NO: 4446 - DNA, 20 bp, Artificial Sequence
  MKO10004446_A_Anxa7
  gRNA
gtacgggtactgacccgcag

SEQ ID NO: 4447 - DNA, 20 bp, Artificial Sequence
  MKO10004447_A_Anxa7
  gRNA
tcagcccgcttcgatgactc

SEQ ID NO: 4448 - DNA, 20 bp, Artificial Sequence
  MKO10004448_A_Anxa7
  gRNA
ggtcagtacccgtaccctag

SEQ ID NO: 4449 - DNA, 20 bp, Artificial Sequence
  MKO10004449_A_Anxa8
  gRNA
gtacccgccatacagctacg

SEQ ID NO: 4450 - DNA, 20 bp, Artificial Sequence
  MKO10004450_A_Anxa8
  gRNA
caaatttgagagactcatcg

SEQ ID NO: 4451 - DNA, 20 bp, Artificial Sequence
  MKO10004451_A_Anxa8
  gRNA
taactcaccaatccccttca

SEQ ID NO: 4452 - DNA, 20 bp, Artificial Sequence
  MKO10004452_A_Anxa9
  gRNA
ctttcaagagcgcaccaaac

SEQ ID NO: 4453 - DNA, 20 bp, Artificial Sequence
  MKO10004453_A_Anxa9
  gRNA
ctgtttggtgcgctcttgaa

SEQ ID NO: 4454 - DNA, 20 bp, Artificial Sequence
  MKO10004454_A_Anxa9
  gRNA
tggcaatctggagaaaatcg

SEQ ID NO: 4455 - DNA, 20 bp, Artificial Sequence
  MKO10004455_A_Aoah
  gRNA
agagtctctccatcgccacc

SEQ ID NO: 4456 - DNA, 20 bp, Artificial Sequence
  MKO10004456_A_Aoah
  gRNA
agaaggcgagacaagtcctc

SEQ ID NO: 4457 - DNA, 20 bp, Artificial Sequence
  MKO10004457_A_Aoah
  gRNA
agttcacaactcttcagtcc

SEQ ID NO: 4458 - DNA, 20 bp, Artificial Sequence
  MKO10004458_A_Aoc1
  gRNA
tttacggatgtagcgccgcg

SEQ ID NO: 4459 - DNA, 20 bp, Artificial Sequence
  MKO10004459_A_Aoc1
  gRNA
cgcctaaggggtacccctgt

SEQ ID NO: 4460 - DNA, 20 bp, Artificial Sequence
  MKO10004460_A_Aoc1
  gRNA
gtctcaaccatgttcagcgc

SEQ ID NO: 4461 - DNA, 20 bp, Artificial Sequence
  MKO10004461_A_Aoc2
  gRNA
tctggattcggtaccctcgc

SEQ ID NO: 4462 - DNA, 20 bp, Artificial Sequence
  MKO10004462_A_Aoc2
  gRNA
aggtagctcgatcgcctgca

SEQ ID NO: 4463 - DNA, 20 bp, Artificial Sequence
  MKO10004463_A_Aoc2
  gRNA
cgtgtactttgagagggacc

SEQ ID NO: 4464 - DNA, 20 bp, Artificial Sequence
  MKO10004464_A_Aoc3
  gRNA
aaagctaccgtccacgtagc

SEQ ID NO: 4465 - DNA, 20 bp, Artificial Sequence
  MKO10004465_A_Aoc3
  gRNA
tcttcaaccagaacgacccg

SEQ ID NO: 4466 - DNA, 20 bp, Artificial Sequence
  MKO10004466_A_Aoc3
  gRNA
tgctcaattacgactacata

SEQ ID NO: 4467 - DNA, 20 bp, Artificial Sequence
  MKO10004467_A_Aox1
  gRNA
atcagttaactgatctagag

SEQ ID NO: 4468 - DNA, 20 bp, Artificial Sequence
  MKO10004468_A_Aox1
  gRNA
gttgcctaagccttctaccg

SEQ ID NO: 4469 - DNA, 20 bp, Artificial Sequence
  MKO10004469_A_Aox1
  gRNA
gttcctgagcagtgcgtaca

SEQ ID NO: 4470 - DNA, 20 bp, Artificial Sequence
  MKO10004470_A_Aox2
  gRNA
gagaggatcgccaagagcca

SEQ ID NO: 4471 - DNA, 20 bp, Artificial Sequence
  MKO10004471_A_Aox2
  gRNA
gtgtgcttacctgcacgggg

SEQ ID NO: 4472 - DNA, 20 bp, Artificial Sequence
  MKO10004472_A_Aox2
  gRNA
acaaagacacttctccgtca

SEQ ID NO: 4473 - DNA, 20 bp, Artificial Sequence
  MKO10004473_A_Aox3
  gRNA
aaccaggatacaccctgtcc

SEQ ID NO: 4474 - DNA, 20 bp, Artificial Sequence
  MKO10004474_A_Aox3
  gRNA
cctctctccaggtcaccgag

SEQ ID NO: 4475 - DNA, 20 bp, Artificial Sequence
  MKO10004475_A_Aox3
  gRNA
gggcaggtacctgatccttt

SEQ ID NO: 4476 - DNA, 20 bp, Artificial Sequence
  MKO10004476_A_Aox4
  gRNA
ttaaaggatacgaactttcc

SEQ ID NO: 4477 - DNA, 20 bp, Artificial Sequence
  MKO10004477_A_Aox4
  gRNA
gaacgacttgccaagtgtca

SEQ ID NO: 4478 - DNA, 20 bp, Artificial Sequence
  MKO10004478_A_Aox4
  gRNA
gtgtggggagcatcaaaaag

SEQ ID NO: 4479 - DNA, 20 bp, Artificial Sequence
  MKO10004479_A_Ap1ar
  gRNA
gcgatttcgtcttcagtgag

SEQ ID NO: 4480 - DNA, 20 bp, Artificial Sequence
  MKO10004480_A_Ap1ar
  gRNA
agacgaaatcgctgacttac

SEQ ID NO: 4481 - DNA, 20 bp, Artificial Sequence
  MKO10004481_A_Ap1ar
  gRNA
ttacctcatcactctccacg

SEQ ID NO: 4482 - DNA, 20 bp, Artificial Sequence
  MKO10004482_A_Ap1b1
  gRNA
gccgctgtcttgcgcacata

SEQ ID NO: 4483 - DNA, 20 bp, Artificial Sequence
  MKO10004483_A_Ap1b1
  gRNA
caagtcaagcaggttgctac

SEQ ID NO: 4484 - DNA, 20 bp, Artificial Sequence
  MKO10004484_A_Ap1b1
  gRNA
agtacttgtgtgaaccactc

SEQ ID NO: 4485 - DNA, 20 bp, Artificial Sequence
  MKO10004485_A_Ap1g1
  gRNA
tcatagcacgcagtttgtgc

SEQ ID NO: 4486 - DNA, 20 bp, Artificial Sequence
  MKO10004486_A_Ap1g1
  gRNA
tgtgtgctgttcacgtcatc

SEQ ID NO: 4487 - DNA, 20 bp, Artificial Sequence
  MKO10004487_A_Ap1g1
  gRNA
actttgtaccctcggctgca

SEQ ID NO: 4488 - DNA, 20 bp, Artificial Sequence
  MKO10004488_A_Ap1g2
  gRNA
ctgcttcgtgagcgtcatca

SEQ ID NO: 4489 - DNA, 20 bp, Artificial Sequence
  MKO10004489_A_Ap1g2
  gRNA
ccaccttgcgaaagtgcctg

SEQ ID NO: 4490 - DNA, 20 bp, Artificial Sequence
  MKO10004490_A_Ap1g2
  gRNA
tctcaccttcttccgcacat

SEQ ID NO: 4491 - DNA, 20 bp, Artificial Sequence
  MKO10004491_A_Ap1m1
  gRNA
atggtggcgttcgtttcatg

SEQ ID NO: 4492 - DNA, 20 bp, Artificial Sequence
  MKO10004492_A_Ap1m1
  gRNA
acatgaaacgaacgccacca

SEQ ID NO: 4493 - DNA, 20 bp, Artificial Sequence
  MKO10004493_A_Ap1m1
  gRNA
cttgatgccttctgaacgcc

SEQ ID NO: 4494 - DNA, 20 bp, Artificial Sequence
  MKO10004494_A_Ap1m2
  gRNA
acacgatgacgaagttgtcc

SEQ ID NO: 4495 - DNA, 20 bp, Artificial Sequence
  MKO10004495_A_Ap1m2
  gRNA
cgtcatcgtgtacgagctgc

SEQ ID NO: 4496 - DNA, 20 bp, Artificial Sequence
  MKO10004496_A_Ap1m2
  gRNA
gaagaacgctaatgcctctc

SEQ ID NO: 4497 - DNA, 20 bp, Artificial Sequence
  MKO10004497_A_Ap1s1
  gRNA
tgagtcgccgcgcagtgtcc

SEQ ID NO: 4498 - DNA, 20 bp, Artificial Sequence
  MKO10004498_A_Ap1s1
  gRNA
tatttctgctgcgccatcga

SEQ ID NO: 4499 - DNA, 20 bp, Artificial Sequence
  MKO10004499_A_Ap1s1
  gRNA
cacccatcagaaactcgtcc

SEQ ID NO: 4500 - DNA, 20 bp, Artificial Sequence
  MKO10004500_A_Ap1s2
  gRNA
caagtaattccacgtaacga

SEQ ID NO: 4501 - DNA, 20 bp, Artificial Sequence
  MKO10004501_A_Ap1s2
  gRNA
cttgggtttccgtgctaaaa

SEQ ID NO: 4502 - DNA, 20 bp, Artificial Sequence
  MKO10004502_A_Ap1s2
  gRNA
tctgcagtcgaagctttccc

SEQ ID NO: 4503 - DNA, 20 bp, Artificial Sequence
  MKO10004503_A_Ap1s3
  gRNA
agactctgatatgttacaag

SEQ ID NO: 4504 - DNA, 20 bp, Artificial Sequence
  MKO10004504_A_Ap1s3
  gRNA
ttcttaccaggtctgtgagc

SEQ ID NO: 4505 - DNA, 20 bp, Artificial Sequence
  MKO10004505_A_Ap1s3
  gRNA
gtacaccacactccctgaca

SEQ ID NO: 4506 - DNA, 20 bp, Artificial Sequence
  MKO10004506_A_Ap2a1
  gRNA
cttgcactgtatcgctaacg

SEQ ID NO: 4507 - DNA, 20 bp, Artificial Sequence
  MKO10004507_A_Ap2a1
  gRNA
tgcagacattccccgaatcc

SEQ ID NO: 4508 - DNA, 20 bp, Artificial Sequence
  MKO10004508_A_Ap2a1
  gRNA
cccacgcatgccatcgcctt

SEQ ID NO: 4509 - DNA, 20 bp, Artificial Sequence
  MKO10004509_A_Ap2a2
  gRNA
agggcgagacccataaacgt

SEQ ID NO: 4510 - DNA, 20 bp, Artificial Sequence
  MKO10004510_A_Ap2a2
  gRNA
cttggggatctctccggcga

SEQ ID NO: 4511 - DNA, 20 bp, Artificial Sequence
  MKO10004511_A_Ap2a2
  gRNA
acgagatgtccagtcgccca

SEQ ID NO: 4512 - DNA, 20 bp, Artificial Sequence
  MKO10004512_A_Ap2b1
  gRNA
agacccctatgttcggaaaa

SEQ ID NO: 4513 - DNA, 20 bp, Artificial Sequence
  MKO10004513_A_Ap2b1
  gRNA
acccctccgcaagtgcttga

SEQ ID NO: 4514 - DNA, 20 bp, Artificial Sequence
  MKO10004514_A_Ap2b1
  gRNA
cccctactcacccttcttat

SEQ ID NO: 4515 - DNA, 20 bp, Artificial Sequence
  MKO10004515_A_Ap2m1
  gRNA
ttcccttaggaggaatgctg

SEQ ID NO: 4516 - DNA, 20 bp, Artificial Sequence
  MKO10004516_A_Ap2m1
  gRNA
taccctgtggggacataagc

SEQ ID NO: 4517 - DNA, 20 bp, Artificial Sequence
  MKO10004517_A_Ap2m1
  gRNA
tttacagagattctggactt

SEQ ID NO: 4518 - DNA, 20 bp, Artificial Sequence
  MKO10004518_A_Ap2s1
  gRNA
gactcacttctacgaagttg

SEQ ID NO: 4519 - DNA, 20 bp, Artificial Sequence
  MKO10004519_A_Ap2s1
  gRNA
tgcacgccgtggtcaccgtc

SEQ ID NO: 4520 - DNA, 20 bp, Artificial Sequence
  MKO10004520_A_Ap2s1
  gRNA
gcaagacgcgcctggccaag

SEQ ID NO: 4521 - DNA, 20 bp, Artificial Sequence
  MKO10004521_A_Ap3b1
  gRNA
gatttaccttcaaagctcgc

SEQ ID NO: 4522 - DNA, 20 bp, Artificial Sequence
  MKO10004522_A_Ap3b1
  gRNA
gatgctatgaagcgaattgt

SEQ ID NO: 4523 - DNA, 20 bp, Artificial Sequence
  MKO10004523_A_Ap3b1
  gRNA
tcgcttcatagcatctagct

SEQ ID NO: 4524 - DNA, 20 bp, Artificial Sequence
  MKO10004524_A_Ap3b2
  gRNA
tgatccgtgccagtgcgctc

SEQ ID NO: 4525 - DNA, 20 bp, Artificial Sequence
  MKO10004525_A_Ap3b2
  gRNA
cggacatgtcaccctacgtt

SEQ ID NO: 4526 - DNA, 20 bp, Artificial Sequence
  MKO10004526_A_Ap3b2
  gRNA
gaagcttgtctacgtgtatc

SEQ ID NO: 4527 - DNA, 20 bp, Artificial Sequence
  MKO10004527_A_Ap3d1
  gRNA
cagggcctacctttcggatc

SEQ ID NO: 4528 - DNA, 20 bp, Artificial Sequence
  MKO10004528_A_Ap3d1
  gRNA
gtgccactccagtgtcgtac

SEQ ID NO: 4529 - DNA, 20 bp, Artificial Sequence
  MKO10004529_A_Ap3d1
  gRNA
gtgcattgacgagatcaagc

SEQ ID NO: 4530 - DNA, 20 bp, Artificial Sequence
  MKO10004530_A_Ap3m1
  gRNA
gttagacaatggattcccac

SEQ ID NO: 4531 - DNA, 20 bp, Artificial Sequence
  MKO10004531_A_Ap3m1
  gRNA
ctgacgtcatctagtagcct

SEQ ID NO: 4532 - DNA, 20 bp, Artificial Sequence
  MKO10004532_A_Ap3m1
  gRNA
tttctaggcagtagtaatgt

SEQ ID NO: 4533 - DNA, 20 bp, Artificial Sequence
  MKO10004533_A_Ap3m2
  gRNA
agcaggcggaagttgccgtc

SEQ ID NO: 4534 - DNA, 20 bp, Artificial Sequence
  MKO10004534_A_Ap3m2
  gRNA
caacgaggcctatttcgatg

SEQ ID NO: 4535 - DNA, 20 bp, Artificial Sequence
  MKO10004535_A_Ap3m2
  gRNA
ttcacccctgtccgtcgcca

SEQ ID NO: 4536 - DNA, 20 bp, Artificial Sequence
  MKO10004536_A_Ap3s1
  gRNA
aaaacagtaccttgtctaca

SEQ ID NO: 4537 - DNA, 20 bp, Artificial Sequence
  MKO10004537_A_Ap3s1
  gRNA
ttgtcatttagattaattgg

SEQ ID NO: 4538 - DNA, 20 bp, Artificial Sequence
  MKO10004538_A_Ap3s1
  gRNA
gtacttacaatcctccttct

SEQ ID NO: 4539 - DNA, 20 bp, Artificial Sequence
  MKO10004539_A_Ap3s2
  gRNA
gaggacctaccttatccata

SEQ ID NO: 4540 - DNA, 20 bp, Artificial Sequence
  MKO10004540_A_Ap3s2
  gRNA
agatgttgtcatctcgcttg

SEQ ID NO: 4541 - DNA, 20 bp, Artificial Sequence
  MKO10004541_A_Ap3s2
  gRNA
ctaggtgcactacatcctgc

SEQ ID NO: 4542 - DNA, 20 bp, Artificial Sequence
  MKO10004542_A_Ap4b1
  gRNA
ggtgatacctaataactcgc

SEQ ID NO: 4543 - DNA, 20 bp, Artificial Sequence
  MKO10004543_A_Ap4b1
  gRNA
tcacgcagaccgttaacaac

SEQ ID NO: 4544 - DNA, 20 bp, Artificial Sequence
  MKO10004544_A_Ap4b1
  gRNA
agtgccagtcctcgaaccat

SEQ ID NO: 4545 - DNA, 20 bp, Artificial Sequence
  MKO10004545_A_Ap4e1
  gRNA
acacgtaccagtgtcgtggt

SEQ ID NO: 4546 - DNA, 20 bp, Artificial Sequence
  MKO10004546_A_Ap4e1
  gRNA
ttctgctccgaccacgacac

SEQ ID NO: 4547 - DNA, 20 bp, Artificial Sequence
  MKO10004547_A_Ap4e1
  gRNA
acggctggaatcatttctcg

SEQ ID NO: 4548 - DNA, 20 bp, Artificial Sequence
  MKO10004548_A_Ap4m1
  gRNA
aagcgccacattgcgtgaga

SEQ ID NO: 4549 - DNA, 20 bp, Artificial Sequence
  MKO10004549_A_Ap4m1
  gRNA
ggcgcttgtctacgaactcc

SEQ ID NO: 4550 - DNA, 20 bp, Artificial Sequence
  MKO10004550_A_Ap4m1
  gRNA
tggctagtccgcggggacag

SEQ ID NO: 4551 - DNA, 20 bp, Artificial Sequence
  MKO10004551_A_Ap4s1
  gRNA
agatgggtacttcagccgag

SEQ ID NO: 4552 - DNA, 20 bp, Artificial Sequence
  MKO10004552_A_Ap4s1
  gRNA
caaagagagctgcatattgc

SEQ ID NO: 4553 - DNA, 20 bp, Artificial Sequence
  MKO10004553_A_Ap4s1
  gRNA
gctgattcttgacaagctgt

SEQ ID NO: 4554 - DNA, 20 bp, Artificial Sequence
  MKO10004554_A_Ap5b1
  gRNA
tgcgtttcttcgatgagctc

SEQ ID NO: 4555 - DNA, 20 bp, Artificial Sequence
  MKO10004555_A_Ap5b1
  gRNA
aggttgtcccggacgcaagc

SEQ ID NO: 4556 - DNA, 20 bp, Artificial Sequence
  MKO10004556_A_Ap5b1
  gRNA
gcgacctgttgagtgaccta

SEQ ID NO: 4557 - DNA, 20 bp, Artificial Sequence
  MKO10004557_A_Ap5m1
  gRNA
caccttgcaagcgactgttc

SEQ ID NO: 4558 - DNA, 20 bp, Artificial Sequence
  MKO10004558_A_Ap5m1
  gRNA
aagaggtccaattacccatt

SEQ ID NO: 4559 - DNA, 20 bp, Artificial Sequence
  MKO10004559_A_Ap5m1
  gRNA
ggttcctgtcccaccaatac

SEQ ID NO: 4560 - DNA, 20 bp, Artificial Sequence
  MKO10004560_A_Ap5s1
  gRNA
tgagcgcacgctccggctct

SEQ ID NO: 4561 - DNA, 20 bp, Artificial Sequence
  MKO10004561_A_Ap5s1
  gRNA
caatccgtatgtcctgagcg

SEQ ID NO: 4562 - DNA, 20 bp, Artificial Sequence
  MKO10004562_A_Ap5s1
  gRNA
ctttctgcaccatgtgaccg

SEQ ID NO: 4563 - DNA, 20 bp, Artificial Sequence
  MKO10004563_A_Ap5z1
  gRNA
cagccaccaagtacccccgt

SEQ ID NO: 4564 - DNA, 20 bp, Artificial Sequence
  MKO10004564_A_Ap5z1
  gRNA
cctcaggctgccggttctcg

SEQ ID NO: 4565 - DNA, 20 bp, Artificial Sequence
  MKO10004565_A_Ap5z1
  gRNA
tcgctacgccagcatccagc

SEQ ID NO: 4566 - DNA, 20 bp, Artificial Sequence
  MKO10004566_A_Apaf1
  gRNA
ctacaacgctctgctacacg

SEQ ID NO: 4567 - DNA, 20 bp, Artificial Sequence
  MKO10004567_A_Apaf1
  gRNA
cgagatcactccctcttaga

SEQ ID NO: 4568 - DNA, 20 bp, Artificial Sequence
  MKO10004568_A_Apaf1
  gRNA
gtttgcgcagcatcagaaca

SEQ ID NO: 4569 - DNA, 20 bp, Artificial Sequence
  MKO10004569_A_Apba1
  gRNA
tcattcccaacctacgttga

SEQ ID NO: 4570 - DNA, 20 bp, Artificial Sequence
  MKO10004570_A_Apba1
  gRNA
ggaagcagtaagccggatca

SEQ ID NO: 4571 - DNA, 20 bp, Artificial Sequence
  MKO10004571_A_Apba1
  gRNA
gaccctgaagacttgatcga

SEQ ID NO: 4572 - DNA, 20 bp, Artificial Sequence
  MKO10004572_A_Apba2
  gRNA
caaagatgattccatcgatg

SEQ ID NO: 4573 - DNA, 20 bp, Artificial Sequence
  MKO10004573_A_Apba2
  gRNA
caaaaacatccgaatgatgc

SEQ ID NO: 4574 - DNA, 20 bp, Artificial Sequence
  MKO10004574_A_Apba2
  gRNA
cacttaccagccacaaagct

SEQ ID NO: 4575 - DNA, 20 bp, Artificial Sequence
  MKO10004575_A_Apba3
  gRNA
gcatcttgtagagtcgccgc

SEQ ID NO: 4576 - DNA, 20 bp, Artificial Sequence
  MKO10004576_A_Apba3
  gRNA
ggaggccatggaccgcgtca

SEQ ID NO: 4577 - DNA, 20 bp, Artificial Sequence
  MKO10004577_A_Apba3
  gRNA
ctcgtgccctgccgtcaccg

SEQ ID NO: 4578 - DNA, 20 bp, Artificial Sequence
  MKO10004578_A_Apbb1ip
  gRNA
gtagcttaccttcttaacct

SEQ ID NO: 4579 - DNA, 20 bp, Artificial Sequence
  MKO10004579_A_Apbb1ip
  gRNA
agccgaacagagaaccatcc

SEQ ID NO: 4580 - DNA, 20 bp, Artificial Sequence
  MKO10004580_A_Apbb1ip
  gRNA
ttggtcttccagtgcattta

SEQ ID NO: 4581 - DNA, 20 bp, Artificial Sequence
  MKO10004581_A_Apbb1
  gRNA
cgagacggattccgatctac

SEQ ID NO: 4582 - DNA, 20 bp, Artificial Sequence
  MKO10004582_A_Apbb1
  gRNA
ggaatccgtctcgaaagcgt

SEQ ID NO: 4583 - DNA, 20 bp, Artificial Sequence
  MKO10004583_A_Apbb1
  gRNA
gaaggacaatgtcgcctcct

SEQ ID NO: 4584 - DNA, 20 bp, Artificial Sequence
  MKO10004584_A_Apbb2
  gRNA
gacagatcccgatttgccgc

SEQ ID NO: 4585 - DNA, 20 bp, Artificial Sequence
  MKO10004585_A_Apbb2
  gRNA
gatgtgccagtaataggtcc

SEQ ID NO: 4586 - DNA, 20 bp, Artificial Sequence
  MKO10004586_A_Apbb2
  gRNA
gaacctggcaccaagtgacg

SEQ ID NO: 4587 - DNA, 20 bp, Artificial Sequence
  MKO10004587_A_Apbb3
  gRNA
ctggctccggtttcgggtct

SEQ ID NO: 4588 - DNA, 20 bp, Artificial Sequence
  MKO10004588_A_Apbb3
  gRNA
ttgggaactgcgacccccca

SEQ ID NO: 4589 - DNA, 20 bp, Artificial Sequence
  MKO10004589_A_Apbb3
  gRNA
ccaatcactaccttagctcc

SEQ ID NO: 4590 - DNA, 20 bp, Artificial Sequence
  MKO10004590_A_Apc2
  gRNA
cttggatgagctgccgcacg

SEQ ID NO: 4591 - DNA, 20 bp, Artificial Sequence
  MKO10004591_A_Apc2
  gRNA
cttcggtacctccgacgaga

SEQ ID NO: 4592 - DNA, 20 bp, Artificial Sequence
  MKO10004592_A_Apc2
  gRNA
gagctcaccgtgtccacgtg

SEQ ID NO: 4593 - DNA, 20 bp, Artificial Sequence
  MKO10004593_A_Apcdd1
  gRNA
gtagcggcctcgagcgtaga

SEQ ID NO: 4594 - DNA, 20 bp, Artificial Sequence
  MKO10004594_A_Apcdd1
  gRNA
tgacttggacgccgtgaagc

SEQ ID NO: 4595 - DNA, 20 bp, Artificial Sequence
  MKO10004595_A_Apcdd1
  gRNA
acattcaccatctacgctcg

SEQ ID NO: 4596 - DNA, 20 bp, Artificial Sequence
  MKO10004596_A_Apcs
  gRNA
caggagcaggataactacgg

SEQ ID NO: 4597 - DNA, 20 bp, Artificial Sequence
  MKO10004597_A_Apcs
  gRNA
tagtcatcaggccccgtgtc

SEQ ID NO: 4598 - DNA, 20 bp, Artificial Sequence
  MKO10004598_A_Apcs
  gRNA
gcatggacaagctactgctt

SEQ ID NO: 4599 - DNA, 20 bp, Artificial Sequence
  MKO10004599_A_Apc
  gRNA
ggatctgtatccagccgttc

SEQ ID NO: 4600 - DNA, 20 bp, Artificial Sequence
  MKO10004600_A_Apc
  gRNA
gacttactagagcgtcttaa

SEQ ID NO: 4601 - DNA, 20 bp, Artificial Sequence
  MKO10004601_A_Apc
  gRNA
agatccttcccgacttccgt

SEQ ID NO: 4602 - DNA, 20 bp, Artificial Sequence
  MKO10004602_A_Apeh
  gRNA
ccggaggtcaccacgcagta

SEQ ID NO: 4603 - DNA, 20 bp, Artificial Sequence
  MKO10004603_A_Apeh
  gRNA
gtttccacactgttgcccgc

SEQ ID NO: 4604 - DNA, 20 bp, Artificial Sequence
  MKO10004604_A_Apeh
  gRNA
ttcgctgagcgccgcctgcc

SEQ ID NO: 4605 - DNA, 20 bp, Artificial Sequence
  MKO10004605_A_Apex1
  gRNA
aagaaagcggcggccgacga

SEQ ID NO: 4606 - DNA, 20 bp, Artificial Sequence
  MKO10004606_A_Apex1
  gRNA
gactggaataccgacagcgt

SEQ ID NO: 4607 - DNA, 20 bp, Artificial Sequence
  MKO10004607_A_Apex1
  gRNA
cttgggttcttccccgtcgt

SEQ ID NO: 4608 - DNA, 20 bp, Artificial Sequence
  MKO10004608_A_Apex2
  gRNA
ccactgcgatgcaagtagtc

SEQ ID NO: 4609 - DNA, 20 bp, Artificial Sequence
  MKO10004609_A_Apex2
  gRNA
caatgtgtactgccctcacg

SEQ ID NO: 4610 - DNA, 20 bp, Artificial Sequence
  MKO10004610_A_Apex2
  gRNA
ccagactacttgcatcgcag

SEQ ID NO: 4611 - DNA, 20 bp, Artificial Sequence
  MKO10004611_A_Aph1a
  gRNA
tcgacactcaccccgccacc

SEQ ID NO: 4612 - DNA, 20 bp, Artificial Sequence
  MKO10004612_A_Aph1a
  gRNA
gctcaccataggccatctgt

SEQ ID NO: 4613 - DNA, 20 bp, Artificial Sequence
  MKO10004613_A_Aph1a
  gRNA
acctgaagtcaggaagtaat

SEQ ID NO: 4614 - DNA, 20 bp, Artificial Sequence
  MKO10004614_A_Aph1b
  gRNA
gcaacactccgaagatgagc

SEQ ID NO: 4615 - DNA, 20 bp, Artificial Sequence
  MKO10004615_A_Aph1b
  gRNA
accaaaaaacggatgacagc

SEQ ID NO: 4616 - DNA, 20 bp, Artificial Sequence
  MKO10004616_A_Aph1b
  gRNA
ataggccaacagtcgcatcg

SEQ ID NO: 4617 - DNA, 20 bp, Artificial Sequence
  MKO10004617_A_Aph1c
  gRNA
accaaaacatggacgaaagc

SEQ ID NO: 4618 - DNA, 20 bp, Artificial Sequence
  MKO10004618_A_Aph1c
  gRNA
tcctgctttcgtccatgttt

SEQ ID NO: 4619 - DNA, 20 bp, Artificial Sequence
  MKO10004619_A_Aph1c
  gRNA
tttgaaaagcataaacccgg

SEQ ID NO: 4620 - DNA, 20 bp, Artificial Sequence
  MKO10004620_A_Api5
  gRNA
tgtgtcacaggaacgttagg

SEQ ID NO: 4621 - DNA, 20 bp, Artificial Sequence
  MKO10004621_A_Api5
  gRNA
ctgacccagcttctgcagac

SEQ ID NO: 4622 - DNA, 20 bp, Artificial Sequence
  MKO10004622_A_Api5
  gRNA
tctcacctgtctgcagaagc

SEQ ID NO: 4623 - DNA, 20 bp, Artificial Sequence
  MKO10004623_A_Apip
  gRNA
cgtgcaaaaggaacgcattc

SEQ ID NO: 4624 - DNA, 20 bp, Artificial Sequence
  MKO10004624_A_Apip
  gRNA
gaaatctacattgctccctc

SEQ ID NO: 4625 - DNA, 20 bp, Artificial Sequence
  MKO10004625_A_Apip
  gRNA
atgaatgcttataccatgag

SEQ ID NO: 4626 - DNA, 20 bp, Artificial Sequence
  MKO10004626_A_Apitd1
  gRNA
caccagtgaattatttcgcc

SEQ ID NO: 4627 - DNA, 20 bp, Artificial Sequence
  MKO10004627_A_Apitd1
  gRNA
gcactgtcgaaaagtcacct

SEQ ID NO: 4628 - DNA, 20 bp, Artificial Sequence
  MKO10004628_A_Apitd1
  gRNA
cttcagcaaacagaccatcg

SEQ ID NO: 4629 - DNA, 20 bp, Artificial Sequence
  MKO10004629_A_Aplf
  gRNA
aagcgtacttgtcaagtaac

SEQ ID NO: 4630 - DNA, 20 bp, Artificial Sequence
  MKO10004630_A_Aplf
  gRNA
agctatccccgggatgcaac

SEQ ID NO: 4631 - DNA, 20 bp, Artificial Sequence
  MKO10004631_A_Aplf
  gRNA
ctttccgccaacatccaagc

SEQ ID NO: 4632 - DNA, 20 bp, Artificial Sequence
  MKO10004632_A_Aplnr
  gRNA
ccggctgctcagcattatcg

SEQ ID NO: 4633 - DNA, 20 bp, Artificial Sequence
  MKO10004633_A_Aplnr
  gRNA
tcgcagccttagccgagcat

SEQ ID NO: 4634 - DNA, 20 bp, Artificial Sequence
  MKO10004634_A_Aplnr
  gRNA
ctgcgtagtcgcattcagac

SEQ ID NO: 4635 - DNA, 20 bp, Artificial Sequence
  MKO10004635_A_Apln
  gRNA
aatttcgcagacagcgcccc

SEQ ID NO: 4636 - DNA, 20 bp, Artificial Sequence
  MKO10004636_A_Apln
  gRNA
tggtccagtcctcgaagttc

SEQ ID NO: 4637 - DNA, 20 bp, Artificial Sequence
  MKO10004637_A_Apln
  gRNA
cgagttgcagcatgaatctg

SEQ ID NO: 4638 - DNA, 20 bp, Artificial Sequence
  MKO10004638_A_Aplp1
  gRNA
gcgatcacgacgctgtcttc

SEQ ID NO: 4639 - DNA, 20 bp, Artificial Sequence
  MKO10004639_A_Aplp1
  gRNA
cgagctgcacatagcacgcg

SEQ ID NO: 4640 - DNA, 20 bp, Artificial Sequence
  MKO10004640_A_Aplp1
  gRNA
agacagcgtcgtgatcgctg

SEQ ID NO: 4641 - DNA, 20 bp, Artificial Sequence
  MKO10004641_A_Aplp2
  gRNA
aagcttgccggtggccgcag

SEQ ID NO: 4642 - DNA, 20 bp, Artificial Sequence
  MKO10004642_A_Aplp2
  gRNA
tgactaacgtgtgccagcgc

SEQ ID NO: 4643 - DNA, 20 bp, Artificial Sequence
  MKO10004643_A_Aplp2
  gRNA
caccaactatcaatattgac

SEQ ID NO: 4644 - DNA, 20 bp, Artificial Sequence
  MKO10004644_A_Apmap
  gRNA
gcctgaaccgaaccgagcga

SEQ ID NO: 4645 - DNA, 20 bp, Artificial Sequence
  MKO10004645_A_Apmap
  gRNA
gcttgccgcaacttcgtatt

SEQ ID NO: 4646 - DNA, 20 bp, Artificial Sequence
  MKO10004646_A_Apmap
  gRNA
atagagaccatcgctcggtt

SEQ ID NO: 4647 - DNA, 20 bp, Artificial Sequence
  MKO10004647_A_Apoa1bp
  gRNA
gggaatgtcgatgctagcaa

SEQ ID NO: 4648 - DNA, 20 bp, Artificial Sequence
  MKO10004648_A_Apoa1bp
  gRNA
atctgtggccccggaaataa

SEQ ID NO: 4649 - DNA, 20 bp, Artificial Sequence
  MKO10004649_A_Apoa1bp
  gRNA
taacgagtatcagttcagcg

SEQ ID NO: 4650 - DNA, 20 bp, Artificial Sequence
  MKO10004650_A_Apoa1
  gRNA
cgaacagatgcgcgagagcc

SEQ ID NO: 4651 - DNA, 20 bp, Artificial Sequence
  MKO10004651_A_Apoa1
  gRNA
tctcgcgcatctgttcgctg

SEQ ID NO: 4652 - DNA, 20 bp, Artificial Sequence
  MKO10004652_A_Apoa1
  gRNA
gctgccatacgtgccaagcc

SEQ ID NO: 4653 - DNA, 20 bp, Artificial Sequence
  MKO10004653_A_Apoa2
  gRNA
catcatgaagctgctcgcaa

SEQ ID NO: 4654 - DNA, 20 bp, Artificial Sequence
  MKO10004654_A_Apoa2
  gRNA
agcagctgacaccccttgtc

SEQ ID NO: 4655 - DNA, 20 bp, Artificial Sequence
  MKO10004655_A_Apoa2
  gRNA
tagttcctgctgacctgaca

SEQ ID NO: 4656 - DNA, 20 bp, Artificial Sequence
  MKO10004656_A_Apoa4
  gRNA
gcatgttctccccgaacgtc

SEQ ID NO: 4657 - DNA, 20 bp, Artificial Sequence
  MKO10004657_A_Apoa4
  gRNA
gtccacattctccttgatcg

SEQ ID NO: 4658 - DNA, 20 bp, Artificial Sequence
  MKO10004658_A_Apoa4
  gRNA
actcaccggtgatggccacc

SEQ ID NO: 4659 - DNA, 20 bp, Artificial Sequence
  MKO10004659_A_Apoa5
  gRNA
cacgcagcgactgagtcgcg

SEQ ID NO: 4660 - DNA, 20 bp, Artificial Sequence
  MKO10004660_A_Apoa5
  gRNA
gtcaccaagcgttctgcgta

SEQ ID NO: 4661 - DNA, 20 bp, Artificial Sequence
  MKO10004661_A_Apoa5
  gRNA
tgcagtgttcgcaagcactc

SEQ ID NO: 4662 - DNA, 20 bp, Artificial Sequence
  MKO10004662_A_Apobec1
  gRNA
acggatcagcgaaaccgcca

SEQ ID NO: 4663 - DNA, 20 bp, Artificial Sequence
  MKO10004663_A_Apobec1
  gRNA
ggcggtttcgctgatccgtg

SEQ ID NO: 4664 - DNA, 20 bp, Artificial Sequence
  MKO10004664_A_Apobec1
  gRNA
ccccttcaaacgaagcttat

SEQ ID NO: 4665 - DNA, 20 bp, Artificial Sequence
  MKO10004665_A_Apobec2
  gRNA
cggaactgtattccacgttc

SEQ ID NO: 4666 - DNA, 20 bp, Artificial Sequence
  MKO10004666_A_Apobec2
  gRNA
tcaccagaatgagcagacga

SEQ ID NO: 4667 - DNA, 20 bp, Artificial Sequence
  MKO10004667_A_Apobec2
  gRNA
ttacccagtgacaatctcga

SEQ ID NO: 4668 - DNA, 20 bp, Artificial Sequence
  MKO10004668_A_Apobec3
  gRNA
ctcccgcctctacaacgtac

SEQ ID NO: 4669 - DNA, 20 bp, Artificial Sequence
  MKO10004669_A_Apobec3
  gRNA
ctgggtcctgtacgttgtag

SEQ ID NO: 4670 - DNA, 20 bp, Artificial Sequence
  MKO10004670_A_Apobec3
  gRNA
gcaaatgctattcaccgatc

SEQ ID NO: 4671 - DNA, 20 bp, Artificial Sequence
  MKO10004671_A_Apobec4
  gRNA
cttcctcgcctgtccgaatg

SEQ ID NO: 4672 - DNA, 20 bp, Artificial Sequence
  MKO10004672_A_Apobec4
  gRNA
caatagtcaaaccttactac

SEQ ID NO: 4673 - DNA, 20 bp, Artificial Sequence
  MKO10004673_A_Apobec4
  gRNA
caacaactccccttgtaacg

SEQ ID NO: 4674 - DNA, 20 bp, Artificial Sequence
  MKO10004674_A_Apobr
  gRNA
gcctacgctagtcctagaca

SEQ ID NO: 4675 - DNA, 20 bp, Artificial Sequence
  MKO10004675_A_Apobr
  gRNA
ttcaagcttagcacccgctc

SEQ ID NO: 4676 - DNA, 20 bp, Artificial Sequence
  MKO10004676_A_Apobr
  gRNA
cagggaccggccgctccgcc

SEQ ID NO: 4677 - DNA, 20 bp, Artificial Sequence
  MKO10004677_A_Apob
  gRNA
catagttgtacacgtacttt

SEQ ID NO: 4678 - DNA, 20 bp, Artificial Sequence
  MKO10004678_A_Apob
  gRNA
tatttaggttcatccttgtc

SEQ ID NO: 4679 - DNA, 20 bp, Artificial Sequence
  MKO10004679_A_Apob
  gRNA
tgatgcccctcttgatgttc

SEQ ID NO: 4680 - DNA, 20 bp, Artificial Sequence
  MKO10004680_A_Apoc1
  gRNA
cccggatttgtccggaacat

SEQ ID NO: 4681 - DNA, 20 bp, Artificial Sequence
  MKO10004681_A_Apoc1
  gRNA
tccaatgttccggacaaatc

SEQ ID NO: 4682 - DNA, 20 bp, Artificial Sequence
  MKO10004682_A_Apoc1
  gRNA
gccaaatgcctctgagaacc

SEQ ID NO: 4683 - DNA, 20 bp, Artificial Sequence
  MKO10004683_A_Apoc2
  gRNA
agggctccctcttaagttac

SEQ ID NO: 4684 - DNA, 20 bp, Artificial Sequence
  MKO10004684_A_Apoc2
  gRNA
gaagacatacccgatcagca

SEQ ID NO: 4685 - DNA, 20 bp, Artificial Sequence
  MKO10004685_A_Apoc2
  gRNA
aatgcctgcgtaagtgctca

SEQ ID NO: 4686 - DNA, 20 bp, Artificial Sequence
  MKO10004686_A_Apoc3
  gRNA
ggatgcgctaagtagcgtgc

SEQ ID NO: 4687 - DNA, 20 bp, Artificial Sequence
  MKO10004687_A_Apoc3
  gRNA
gcacgctacttagcgcatcc

SEQ ID NO: 4688 - DNA, 20 bp, Artificial Sequence
  MKO10004688_A_Apoc3
  gRNA
aagtctcacgactcaatagc

SEQ ID NO: 4689 - DNA, 20 bp, Artificial Sequence
  MKO10004689_A_Apoc4
  gRNA
tggcactttaaccctgagtc

SEQ ID NO: 4690 - DNA, 20 bp, Artificial Sequence
  MKO10004690_A_Apoc4
  gRNA
tttcaggtgatcttcatagt

SEQ ID NO: 4691 - DNA, 20 bp, Artificial Sequence
  MKO10004691_A_Apoc4
  gRNA
ccccagaaatgtccctgctg

SEQ ID NO: 4692 - DNA, 20 bp, Artificial Sequence
  MKO10004692_A_Apod
  gRNA
ggtgaagagacccgccagcg

SEQ ID NO: 4693 - DNA, 20 bp, Artificial Sequence
  MKO10004693_A_Apod
  gRNA
tgtcgatgccattagaagta

SEQ ID NO: 4694 - DNA, 20 bp, Artificial Sequence
  MKO10004694_A_Apod
  gRNA
tcaagccaactactcgctga

SEQ ID NO: 4695 - DNA, 20 bp, Artificial Sequence
  MKO10004695_A_Apoe
  gRNA
gcctctgcgcgatcgcgccc

SEQ ID NO: 4696 - DNA, 20 bp, Artificial Sequence
  MKO10004696_A_Apoe
  gRNA
ccgactcggagccgacatgg

SEQ ID NO: 4697 - DNA, 20 bp, Artificial Sequence
  MKO10004697_A_Apoe
  gRNA
ctacacaggatgcctagccg

SEQ ID NO: 4698 - DNA, 20 bp, Artificial Sequence
  MKO10004698_A_Apof
  gRNA
gccccctgacgcgcctacca

SEQ ID NO: 4699 - DNA, 20 bp, Artificial Sequence
  MKO10004699_A_Apof
  gRNA
ttctcaatggccggactgta

SEQ ID NO: 4700 - DNA, 20 bp, Artificial Sequence
  MKO10004700_A_Apof
  gRNA
gccgtgatcaccgcaccagc

SEQ ID NO: 4701 - DNA, 20 bp, Artificial Sequence
  MKO10004701_A_Apoh
  gRNA
gacccgattgccagaatgcc

SEQ ID NO: 4702 - DNA, 20 bp, Artificial Sequence
  MKO10004702_A_Apoh
  gRNA
gtgttcagtctgtccgaagc

SEQ ID NO: 4703 - DNA, 20 bp, Artificial Sequence
  MKO10004703_A_Apoh
  gRNA
ttaaagacatcctacgaccc

SEQ ID NO: 4704 - DNA, 20 bp, Artificial Sequence
  MKO10004704_A_Apol10a
  gRNA
ggaccttgcgcaacaattcg

SEQ ID NO: 4705 - DNA, 20 bp, Artificial Sequence
  MKO10004705_A_Apol10a
  gRNA
aaacctcgaattgttgcgca

SEQ ID NO: 4706 - DNA, 20 bp, Artificial Sequence
  MKO10004706_A_Apol10a
  gRNA
tgtttccaaaaatccattcc

SEQ ID NO: 4707 - DNA, 20 bp, Artificial Sequence
  MKO10004707_A_Apol10b
  gRNA
ggagtagctcgaagtgttga

SEQ ID NO: 4708 - DNA, 20 bp, Artificial Sequence
  MKO10004708_A_Apol10b
  gRNA
agtcatacacatcccacgca

SEQ ID NO: 4709 - DNA, 20 bp, Artificial Sequence
  MKO10004709_A_Apol10b
  gRNA
ttacaagtttgttccttgcg

SEQ ID NO: 4710 - DNA, 20 bp, Artificial Sequence
  MKO10004710_A_Apol11a
  gRNA
tagctttacgaccaccgctg

SEQ ID NO: 4711 - DNA, 20 bp, Artificial Sequence
  MKO10004711_A_Apol11a
  gRNA
tgaccttgtgaaccaatcaa

SEQ ID NO: 4712 - DNA, 20 bp, Artificial Sequence
  MKO10004712_A_Apol11a
  gRNA
aaaagccattgataacttca

SEQ ID NO: 4713 - DNA, 20 bp, Artificial Sequence
  MKO10004713_A_Apol11b
  gRNA
catcatgcagatccgttgct

SEQ ID NO: 4714 - DNA, 20 bp, Artificial Sequence
  MKO10004714_A_Apol11b
  gRNA
aaaagtcattgataacgcca

SEQ ID NO: 4715 - DNA, 20 bp, Artificial Sequence
  MKO10004715_A_Apol11b
  gRNA
atctgttattaaatcttccg

SEQ ID NO: 4716 - DNA, 20 bp, Artificial Sequence
  MKO10004716_A_Apol6
  gRNA
acgtatcagctcgaagtggc

SEQ ID NO: 4717 - DNA, 20 bp, Artificial Sequence
  MKO10004717_A_Apol6
  gRNA
tgccacttcgagctgatacg

SEQ ID NO: 4718 - DNA, 20 bp, Artificial Sequence
  MKO10004718_A_Apol6
  gRNA
aaccccgagccatcagacag

SEQ ID NO: 4719 - DNA, 20 bp, Artificial Sequence
  MKO10004719_A_Apol7a
  gRNA
atctgcccgaaacactaaac

SEQ ID NO: 4720 - DNA, 20 bp, Artificial Sequence
  MKO10004720_A_Apol7a
  gRNA
atgcattaatgccattccgc

SEQ ID NO: 4721 - DNA, 20 bp, Artificial Sequence
  MKO10004721_A_Apol7a
  gRNA
ccgcttacctggggtgtcca

SEQ ID NO: 4722 - DNA, 20 bp, Artificial Sequence
  MKO10004722_A_Apol7b
  gRNA
ggcgcttagcattagttaca

SEQ ID NO: 4723 - DNA, 20 bp, Artificial Sequence
  MKO10004723_A_Apol7b
  gRNA
ccttgtcaaccttatctgcc

SEQ ID NO: 4724 - DNA, 20 bp, Artificial Sequence
  MKO10004724_A_Apol7b
  gRNA
ctgcttacctggagtgccca

SEQ ID NO: 4725 - DNA, 20 bp, Artificial Sequence
  MKO10004725_A_Apol7c
  gRNA
agtcctgaccatccttggtc

SEQ ID NO: 4726 - DNA, 20 bp, Artificial Sequence
  MKO10004726_A_Apol7c
  gRNA
ctcagcaagagactctcgca

SEQ ID NO: 4727 - DNA, 20 bp, Artificial Sequence
  MKO10004727_A_Apol7c
  gRNA
tctgcacctgtttagtggtt

SEQ ID NO: 4728 - DNA, 20 bp, Artificial Sequence
  MKO10004728_A_Apol7e
  gRNA
ggcgcttagcattagttact

SEQ ID NO: 4729 - DNA, 20 bp, Artificial Sequence
  MKO10004729_A_Apol7e
  gRNA
ctgcttacctggggtgccca

SEQ ID NO: 4730 - DNA, 20 bp, Artificial Sequence
  MKO10004730_A_Apol7e
  gRNA
caaagctaactatatccagc

SEQ ID NO: 4731 - DNA, 20 bp, Artificial Sequence
  MKO10004731_A_Apol8
  gRNA
catggacccttcagactgcg

SEQ ID NO: 4732 - DNA, 20 bp, Artificial Sequence
  MKO10004732_A_Apol8
  gRNA
tgtgtagtccacgatcccag

SEQ ID NO: 4733 - DNA, 20 bp, Artificial Sequence
  MKO10004733_A_Apol8
  gRNA
agaattgctgccgtgtccta

SEQ ID NO: 4734 - DNA, 20 bp, Artificial Sequence
  MKO10004734_A_Apol9a
  gRNA
atccaacgtgccaccgccgc

SEQ ID NO: 4735 - DNA, 20 bp, Artificial Sequence
  MKO10004735_A_Apol9a
  gRNA
cacctgcggcggtggcacgt

SEQ ID NO: 4736 - DNA, 20 bp, Artificial Sequence
  MKO10004736_A_Apol9a
  gRNA
tagcactgacctggacaact

SEQ ID NO: 4737 - DNA, 20 bp, Artificial Sequence
  MKO10004737_A_Apol9b
  gRNA
atccaacgtgccgccaccgc

SEQ ID NO: 4738 - DNA, 20 bp, Artificial Sequence
  MKO10004738_A_Apol9b
  gRNA
cttggatacaaacgcctgcc

SEQ ID NO: 4739 - DNA, 20 bp, Artificial Sequence
  MKO10004739_A_Apol9b
  gRNA
cacctgcggtggcggcacgt

SEQ ID NO: 4740 - DNA, 20 bp, Artificial Sequence
  MKO10004740_A_Apold1
  gRNA
cgcagcgcatcggcgccctg

SEQ ID NO: 4741 - DNA, 20 bp, Artificial Sequence
  MKO10004741_A_Apold1
  gRNA
cgcagggcgccgatgcgctg

SEQ ID NO: 4742 - DNA, 20 bp, Artificial Sequence
  MKO10004742_A_Apold1
  gRNA
agctcagaagctcgcgcatc

SEQ ID NO: 4743 - DNA, 20 bp, Artificial Sequence
  MKO10004743_A_Apom
  gRNA
tggacataccgattgactga

SEQ ID NO: 4744 - DNA, 20 bp, Artificial Sequence
  MKO10004744_A_Apom
  gRNA
ctcccgcaataaagtaccac

SEQ ID NO: 4745 - DNA, 20 bp, Artificial Sequence
  MKO10004745_A_Apom
  gRNA
aaaagttgccaactcttccg

SEQ ID NO: 4746 - DNA, 20 bp, Artificial Sequence
  MKO10004746_A_Apon
  gRNA
ccccggtgaccgcctttccg

SEQ ID NO: 4747 - DNA, 20 bp, Artificial Sequence
  MKO10004747_A_Apon
  gRNA
cggggagcaccgtgtacaag

SEQ ID NO: 4748 - DNA, 20 bp, Artificial Sequence
  MKO10004748_A_Apon
  gRNA
tcgatcttcaacgggaatct

SEQ ID NO: 4749 - DNA, 20 bp, Artificial Sequence
  MKO10004749_A_Apool
  gRNA
agtgattacagcttcgggac

SEQ ID NO: 4750 - DNA, 20 bp, Artificial Sequence
  MKO10004750_A_Apool
  gRNA
gatgcatatatcagacctgc

SEQ ID NO: 4751 - DNA, 20 bp, Artificial Sequence
  MKO10004751_A_Apool
  gRNA
actacaaccgtgtattatat

SEQ ID NO: 4752 - DNA, 20 bp, Artificial Sequence
  MKO10004752_A_Apoo
  gRNA
tgcacctacctctagcaaaa

SEQ ID NO: 4753 - DNA, 20 bp, Artificial Sequence
  MKO10004753_A_Apoo
  gRNA
tcaacttacctactccccac

SEQ ID NO: 4754 - DNA, 20 bp, Artificial Sequence
  MKO10004754_A_Apoo
  gRNA
cactttgtccagtggggagt

SEQ ID NO: 4755 - DNA, 20 bp, Artificial Sequence
  MKO10004755_A_Apopt1
  gRNA
tccgggccgcaaagccgcca

SEQ ID NO: 4756 - DNA, 20 bp, Artificial Sequence
  MKO10004756_A_Apopt1
  gRNA
gttggcccgtgagcgcccta

SEQ ID NO: 4757 - DNA, 20 bp, Artificial Sequence
  MKO10004757_A_Apopt1
  gRNA
cgaaggtttgagcatttgtc

SEQ ID NO: 4758 - DNA, 20 bp, Artificial Sequence
  MKO10004758_A_Appbp2
  gRNA
cggaagctaccttaacgcca

SEQ ID NO: 4759 - DNA, 20 bp, Artificial Sequence
  MKO10004759_A_Appbp2
  gRNA
tctgatggaccatggcgtta

SEQ ID NO: 4760 - DNA, 20 bp, Artificial Sequence
  MKO10004760_A_Appbp2
  gRNA
aggttgcttcatgtgcgaaa

SEQ ID NO: 4761 - DNA, 20 bp, Artificial Sequence
  MKO10004761_A_Appl1
  gRNA
aattgtatcaagctatgcat

SEQ ID NO: 4762 - DNA, 20 bp, Artificial Sequence
  MKO10004762_A_Appl1
  gRNA
gatgcatagcttgatacaat

SEQ ID NO: 4763 - DNA, 20 bp, Artificial Sequence
  MKO10004763_A_Appl1
  gRNA
ctttcaaaagtttcgaagtc

SEQ ID NO: 4764 - DNA, 20 bp, Artificial Sequence
  MKO10004764_A_Appl2
  gRNA
gcagcgtgtctatggcgcac

SEQ ID NO: 4765 - DNA, 20 bp, Artificial Sequence
  MKO10004765_A_Appl2
  gRNA
tgttatacagtttcgagaga

SEQ ID NO: 4766 - DNA, 20 bp, Artificial Sequence
  MKO10004766_A_Appl2
  gRNA
tgcgccatagacacgctgca

SEQ ID NO: 4767 - DNA, 20 bp, Artificial Sequence
  MKO10004767_A_App
  gRNA
agagtttgtatgctgcccgt

SEQ ID NO: 4768 - DNA, 20 bp, Artificial Sequence
  MKO10004768_A_App
  gRNA
agcactaacttgcacgacta

SEQ ID NO: 4769 - DNA, 20 bp, Artificial Sequence
  MKO10004769_A_App
  gRNA
ggctcacctaggcaacggta

SEQ ID NO: 4770 - DNA, 20 bp, Artificial Sequence
  MKO10004770_A_Aprt
  gRNA
gtcgatcttgccgctgtgcg

SEQ ID NO: 4771 - DNA, 20 bp, Artificial Sequence
  MKO10004771_A_Aprt
  gRNA
ccgagcttccatccgcctct

SEQ ID NO: 4772 - DNA, 20 bp, Artificial Sequence
  MKO10004772_A_Aprt
  gRNA
ccctaacaggtctagactcc

SEQ ID NO: 4773 - DNA, 20 bp, Artificial Sequence
  MKO10004773_A_Aptx
  gRNA
gatgacgcccgagtcaatgc

SEQ ID NO: 4774 - DNA, 20 bp, Artificial Sequence
  MKO10004774_A_Aptx
  gRNA
gagctaagatgcgagtgtgc

SEQ ID NO: 4775 - DNA, 20 bp, Artificial Sequence
  MKO10004775_A_Aptx
  gRNA
tcctcaaactctacgatgta

SEQ ID NO: 4776 - DNA, 20 bp, Artificial Sequence
  MKO10004776_A_Aqp11
  gRNA
gggagccatgtccgcgctac

SEQ ID NO: 4777 - DNA, 20 bp, Artificial Sequence
  MKO10004777_A_Aqp11
  gRNA
ctaagatcctttcgtcgtaa

SEQ ID NO: 4778 - DNA, 20 bp, Artificial Sequence
  MKO10004778_A_Aqp11
  gRNA
agcattgtttaacccagcgc

SEQ ID NO: 4779 - DNA, 20 bp, Artificial Sequence
  MKO10004779_A_Aqp12
  gRNA
gttggcagaggccccatcga

SEQ ID NO: 4780 - DNA, 20 bp, Artificial Sequence
  MKO10004780_A_Aqp12
  gRNA
cctgcgtacatccgtgctgc

SEQ ID NO: 4781 - DNA, 20 bp, Artificial Sequence
  MKO10004781_A_Aqp12
  gRNA
aaagcaaataccgaactccc

SEQ ID NO: 4782 - DNA, 20 bp, Artificial Sequence
  MKO10004782_A_Aqp1
  gRNA
gcgacaccttcacgttgtcc

SEQ ID NO: 4783 - DNA, 20 bp, Artificial Sequence
  MKO10004783_A_Aqp1
  gRNA
cgacttcacagaccgcatga

SEQ ID NO: 4784 - DNA, 20 bp, Artificial Sequence
  MKO10004784_A_Aqp1
  gRNA
cgctactctggcccaaagtg

SEQ ID NO: 4785 - DNA, 20 bp, Artificial Sequence
  MKO10004785_A_Aqp2
  gRNA
aaccgatgacggcgcccacc

SEQ ID NO: 4786 - DNA, 20 bp, Artificial Sequence
  MKO10004786_A_Aqp2
  gRNA
agcgttctcccgagcggtgc

SEQ ID NO: 4787 - DNA, 20 bp, Artificial Sequence
  MKO10004787_A_Aqp2
  gRNA
cccctggtgggcgccgtcat

SEQ ID NO: 4788 - DNA, 20 bp, Artificial Sequence
  MKO10004788_A_Aqp3
  gRNA
gttgttataagggtcaacga

SEQ ID NO: 4789 - DNA, 20 bp, Artificial Sequence
  MKO10004789_A_Aqp3
  gRNA
acctcgcctcttcaccgccc

SEQ ID NO: 4790 - DNA, 20 bp, Artificial Sequence
  MKO10004790_A_Aqp3
  gRNA
aaagattccagctgtgccgt

SEQ ID NO: 4791 - DNA, 20 bp, Artificial Sequence
  MKO10004791_A_Aqp4
  gRNA
catgtgattgacattgaccg

SEQ ID NO: 4792 - DNA, 20 bp, Artificial Sequence
  MKO10004792_A_Aqp4
  gRNA
cgacgtttgagctccacatc

SEQ ID NO: 4793 - DNA, 20 bp, Artificial Sequence
  MKO10004793_A_Aqp4
  gRNA
gttcatggaaacctcaccgc

SEQ ID NO: 4794 - DNA, 20 bp, Artificial Sequence
  MKO10004794_A_Aqp5
  gRNA
accgatcgtgggggccgtcc

SEQ ID NO: 4795 - DNA, 20 bp, Artificial Sequence
  MKO10004795_A_Aqp5
  gRNA
aaccgattcatgaccaccgc

SEQ ID NO: 4796 - DNA, 20 bp, Artificial Sequence
  MKO10004796_A_Aqp5
  gRNA
gctgagcctccacgaccgtg

SEQ ID NO: 4797 - DNA, 20 bp, Artificial Sequence
  MKO10004797_A_Aqp6
  gRNA
ccacaaggatggccaatcgc

SEQ ID NO: 4798 - DNA, 20 bp, Artificial Sequence
  MKO10004798_A_Aqp6
  gRNA
caagactgtagcccagcgat

SEQ ID NO: 4799 - DNA, 20 bp, Artificial Sequence
  MKO10004799_A_Aqp6
  gRNA
atgaacccagcccgctcctt

SEQ ID NO: 4800 - DNA, 20 bp, Artificial Sequence
  MKO10004800_A_Aqp7
  gRNA
actccccaggcattcgtgac

SEQ ID NO: 4801 - DNA, 20 bp, Artificial Sequence
  MKO10004801_A_Aqp7
  gRNA
ggcatccttgttaccgtcct

SEQ ID NO: 4802 - DNA, 20 bp, Artificial Sequence
  MKO10004802_A_Aqp7
  gRNA
cattcggcctagtgcacaat

SEQ ID NO: 4803 - DNA, 20 bp, Artificial Sequence
  MKO10004803_A_Aqp8
  gRNA
attgagaatagtccgaatac

SEQ ID NO: 4804 - DNA, 20 bp, Artificial Sequence
  MKO10004804_A_Aqp8
  gRNA
agatccgagccagagctacc

SEQ ID NO: 4805 - DNA, 20 bp, Artificial Sequence
  MKO10004805_A_Aqp8
  gRNA
gcagacaccaatgtgtagta

SEQ ID NO: 4806 - DNA, 20 bp, Artificial Sequence
  MKO10004806_A_Aqp9
  gRNA
gacagttgcagccccgacaa

SEQ ID NO: 4807 - DNA, 20 bp, Artificial Sequence
  MKO10004807_A_Aqp9
  gRNA
gggatcatcactatcaatat

SEQ ID NO: 4808 - DNA, 20 bp, Artificial Sequence
  MKO10004808_A_Aqp9
  gRNA
atttgcaacggcagttgtga

SEQ ID NO: 4809 - DNA, 20 bp, Artificial Sequence
  MKO10004809_A_Aqr
  gRNA
ttctccggaagtttccagca

SEQ ID NO: 4810 - DNA, 20 bp, Artificial Sequence
  MKO10004810_A_Aqr
  gRNA
tgcagctagcatgtaaatac

SEQ ID NO: 4811 - DNA, 20 bp, Artificial Sequence
  MKO10004811_A_Aqr
  gRNA
ctcattcaccatacagcaga

SEQ ID NO: 4812 - DNA, 20 bp, Artificial Sequence
  MKO10004812_A_Araf
  gRNA
actcatgtcaacgcagacgg

SEQ ID NO: 4813 - DNA, 20 bp, Artificial Sequence
  MKO10004813_A_Araf
  gRNA
gcctaacaagcaacgcacag

SEQ ID NO: 4814 - DNA, 20 bp, Artificial Sequence
  MKO10004814_A_Araf
  gRNA
ctgggctcactgtcggcggt

SEQ ID NO: 4815 - DNA, 20 bp, Artificial Sequence
  MKO10004815_A_Arap1
  gRNA
gcttcactgagtccaaccga

SEQ ID NO: 4816 - DNA, 20 bp, Artificial Sequence
  MKO10004816_A_Arap1
  gRNA
ctctgcaggaccgccgtgcc

SEQ ID NO: 4817 - DNA, 20 bp, Artificial Sequence
  MKO10004817_A_Arap1
  gRNA
ccacagagttcagccggcgc

SEQ ID NO: 4818 - DNA, 20 bp, Artificial Sequence
  MKO10004818_A_Arap2
  gRNA
cagcgtaccttgactgggtt

SEQ ID NO: 4819 - DNA, 20 bp, Artificial Sequence
  MKO10004819_A_Arap2
  gRNA
actctatcctaacccagtca

SEQ ID NO: 4820 - DNA, 20 bp, Artificial Sequence
  MKO10004820_A_Arap2
  gRNA
cggttcagtatttccactcg

SEQ ID NO: 4821 - DNA, 20 bp, Artificial Sequence
  MKO10004821_A_Arap3
  gRNA
agctggcatagggcgaaatg

SEQ ID NO: 4822 - DNA, 20 bp, Artificial Sequence
  MKO10004822_A_Arap3
  gRNA
tgaactgcacaaaacgtctc

SEQ ID NO: 4823 - DNA, 20 bp, Artificial Sequence
  MKO10004823_A_Arap3
  gRNA
cacgggacgatctgctgtgg

SEQ ID NO: 4824 - DNA, 20 bp, Artificial Sequence
  MKO10004824_A_Arcn1
  gRNA
tccatagactcaagaacgtg

SEQ ID NO: 4825 - DNA, 20 bp, Artificial Sequence
  MKO10004825_A_Arcn1
  gRNA
agcagcagtctgcacgaaag

SEQ ID NO: 4826 - DNA, 20 bp, Artificial Sequence
  MKO10004826_A_Arcn1
  gRNA
gcatgctccacctattaata

SEQ ID NO: 4827 - DNA, 20 bp, Artificial Sequence
  MKO10004827_A_Arc
  gRNA
ccaccggcgactcacagcgc

SEQ ID NO: 4828 - DNA, 20 bp, Artificial Sequence
  MKO10004828_A_Arc
  gRNA
acaggtcccgcttgcgccag

SEQ ID NO: 4829 - DNA, 20 bp, Artificial Sequence
  MKO10004829_A_Arc
  gRNA
aggtcttctaccgtctggag

SEQ ID NO: 4830 - DNA, 20 bp, Artificial Sequence
  MKO10004830_A_Areg
  gRNA
gccagaaggcatttcgctta

SEQ ID NO: 4831 - DNA, 20 bp, Artificial Sequence
  MKO10004831_A_Areg
  gRNA
aggggactacgactactcag

SEQ ID NO: 4832 - DNA, 20 bp, Artificial Sequence
  MKO10004832_A_Areg
  gRNA
tgccgatgccaatagctgcg

SEQ ID NO: 4833 - DNA, 20 bp, Artificial Sequence
  MKO10004833_A_Arel1
  gRNA
tttccctgcacatcggcccg

SEQ ID NO: 4834 - DNA, 20 bp, Artificial Sequence
  MKO10004834_A_Arel1
  gRNA
gccgaattctaacgtggtga

SEQ ID NO: 4835 - DNA, 20 bp, Artificial Sequence
  MKO10004835_A_Arel1
  gRNA
aatgaagaccgtgagcgccg

SEQ ID NO: 4836 - DNA, 20 bp, Artificial Sequence
  MKO10004836_A_Arf1
  gRNA
ttcaggcttgatcttcgtag

SEQ ID NO: 4837 - DNA, 20 bp, Artificial Sequence
  MKO10004837_A_Arf1
  gRNA
ctgccccccaggtttcaatg

SEQ ID NO: 4838 - DNA, 20 bp, Artificial Sequence
  MKO10004838_A_Arf1
  gRNA
cttctcaccaatggtgggaa

SEQ ID NO: 4839 - DNA, 20 bp, Artificial Sequence
  MKO10004839_A_Arf2
  gRNA
gggcctcattgacccgctct

SEQ ID NO: 4840 - DNA, 20 bp, Artificial Sequence
  MKO10004840_A_Arf2
  gRNA
ttgacagtaatgaccgagag

SEQ ID NO: 4841 - DNA, 20 bp, Artificial Sequence
  MKO10004841_A_Arf2
  gRNA
ggatatacctatggtaggga

SEQ ID NO: 4842 - DNA, 20 bp, Artificial Sequence
  MKO10004842_A_Arf3
  gRNA
tgatcgggagcgagtgaacg

SEQ ID NO: 4843 - DNA, 20 bp, Artificial Sequence
  MKO10004843_A_Arf3
  gRNA
gcccttaccaatggtcggga

SEQ ID NO: 4844 - DNA, 20 bp, Artificial Sequence
  MKO10004844_A_Arf3
  gRNA
actccctgcgtcaccgcaat

SEQ ID NO: 4845 - DNA, 20 bp, Artificial Sequence
  MKO10004845_A_Arf4
  gRNA
ctagttggattggatgctgc

SEQ ID NO: 4846 - DNA, 20 bp, Artificial Sequence
  MKO10004846_A_Arf4
  gRNA
caatgatcgtgaaagaatcc

SEQ ID NO: 4847 - DNA, 20 bp, Artificial Sequence
  MKO10004847_A_Arf4
  gRNA
catttctcacctgggtattc

SEQ ID NO: 4848 - DNA, 20 bp, Artificial Sequence
  MKO10004848_A_Arf5
  gRNA
gccttaccgtgcggctacgc

SEQ ID NO: 4849 - DNA, 20 bp, Artificial Sequence
  MKO10004849_A_Arf5
  gRNA
tcagcacctgcgtagccgca

SEQ ID NO: 4850 - DNA, 20 bp, Artificial Sequence
  MKO10004850_A_Arf5
  gRNA
tagacagcaacgaccgggag

SEQ ID NO: 4851 - DNA, 20 bp, Artificial Sequence
  MKO10004851_A_Arf6
  gRNA
gggcctcgtcgatgcggtcg

SEQ ID NO: 4852 - DNA, 20 bp, Artificial Sequence
  MKO10004852_A_Arf6
  gRNA
accagttcctgtcccgaatc

SEQ ID NO: 4853 - DNA, 20 bp, Artificial Sequence
  MKO10004853_A_Arf6
  gRNA
cgaccgcgaccgcatcgacg

SEQ ID NO: 4854 - DNA, 20 bp, Artificial Sequence
  MKO10004854_A_Arfgap1
  gRNA
cttatccctgaagagcgccg

SEQ ID NO: 4855 - DNA, 20 bp, Artificial Sequence
  MKO10004855_A_Arfgap1
  gRNA
agtcatcgcctgcacagaac

SEQ ID NO: 4856 - DNA, 20 bp, Artificial Sequence
  MKO10004856_A_Arfgap1
  gRNA
tgctaagttccgagagttcc

SEQ ID NO: 4857 - DNA, 20 bp, Artificial Sequence
  MKO10004857_A_Arfgap2
  gRNA
ggtcggcgggaatgccaatg

SEQ ID NO: 4858 - DNA, 20 bp, Artificial Sequence
  MKO10004858_A_Arfgap2
  gRNA
acttaggcctgtttcgattg

SEQ ID NO: 4859 - DNA, 20 bp, Artificial Sequence
  MKO10004859_A_Arfgap2
  gRNA
cgctcaagcaccttgttggt

SEQ ID NO: 4860 - DNA, 20 bp, Artificial Sequence
  MKO10004860_A_Arfgap3
  gRNA
tcaagtgaaccccgagcgac

SEQ ID NO: 4861 - DNA, 20 bp, Artificial Sequence
  MKO10004861_A_Arfgap3
  gRNA
cagcttcgatgcatgcaagt

SEQ ID NO: 4862 - DNA, 20 bp, Artificial Sequence
  MKO10004862_A_Arfgap3
  gRNA
caacttgcatgcatcgaagc

SEQ ID NO: 4863 - DNA, 20 bp, Artificial Sequence
  MKO10004863_A_Arfgef1
  gRNA
gctccagatagtacgacacc

SEQ ID NO: 4864 - DNA, 20 bp, Artificial Sequence
  MKO10004864_A_Arfgef1
  gRNA
gaacgttatctttgcacgca

SEQ ID NO: 4865 - DNA, 20 bp, Artificial Sequence
  MKO10004865_A_Arfgef1
  gRNA
ctagagatgtactaactatg

SEQ ID NO: 4866 - DNA, 20 bp, Artificial Sequence
  MKO10004866_A_Arfgef2
  gRNA
tggcggtggtttgattgatg

SEQ ID NO: 4867 - DNA, 20 bp, Artificial Sequence
  MKO10004867_A_Arfgef2
  gRNA
catcaatcaaaccaccgcca

SEQ ID NO: 4868 - DNA, 20 bp, Artificial Sequence
  MKO10004868_A_Arfgef2
  gRNA
ctgtcgatcagccgcttccc

SEQ ID NO: 4869 - DNA, 20 bp, Artificial Sequence
  MKO10004869_A_Arfip1
  gRNA
ctggaaaagctgcgtcgaca

SEQ ID NO: 4870 - DNA, 20 bp, Artificial Sequence
  MKO10004870_A_Arfip1
  gRNA
cttactagctgccaccctgc

SEQ ID NO: 4871 - DNA, 20 bp, Artificial Sequence
  MKO10004871_A_Arfip1
  gRNA
ttgaagcattcattaccatc

SEQ ID NO: 4872 - DNA, 20 bp, Artificial Sequence
  MKO10004872_A_Arfip2
  gRNA
tctcacagcacgtcaccctc

SEQ ID NO: 4873 - DNA, 20 bp, Artificial Sequence
  MKO10004873_A_Arfip2
  gRNA
tgacctataggacctccagc

SEQ ID NO: 4874 - DNA, 20 bp, Artificial Sequence
  MKO10004874_A_Arfip2
  gRNA
aatgaaactagcattgtgtc

SEQ ID NO: 4875 - DNA, 20 bp, Artificial Sequence
  MKO10004875_A_Arfrp1
  gRNA
ggtggtttcgagtgaagcac

SEQ ID NO: 4876 - DNA, 20 bp, Artificial Sequence
  MKO10004876_A_Arfrp1
  gRNA
atccaaaatcaccactaccg

SEQ ID NO: 4877 - DNA, 20 bp, Artificial Sequence
  MKO10004877_A_Arfrp1
  gRNA
ccccttactgtttagaccca

SEQ ID NO: 4878 - DNA, 20 bp, Artificial Sequence
  MKO10004878_A_Arg1
  gRNA
cttgcgagacgtagaccctg

SEQ ID NO: 4879 - DNA, 20 bp, Artificial Sequence
  MKO10004879_A_Arg1
  gRNA
aagcatctctggccacgcca

SEQ ID NO: 4880 - DNA, 20 bp, Artificial Sequence
  MKO10004880_A_Arg1
  gRNA
gccaatgtacacgatgtctt

SEQ ID NO: 4881 - DNA, 20 bp, Artificial Sequence
  MKO10004881_A_Arg2
  gRNA
gtgccgggcgtgaccgataa

SEQ ID NO: 4882 - DNA, 20 bp, Artificial Sequence
  MKO10004882_A_Arg2
  gRNA
cccccaaatattgtgtacat

SEQ ID NO: 4883 - DNA, 20 bp, Artificial Sequence
  MKO10004883_A_Arg2
  gRNA
ttcagtgggccttgccaacc

SEQ ID NO: 4884 - DNA, 20 bp, Artificial Sequence
  MKO10004884_A_Arglu1
  gRNA
cccgaccgcatcgacatctt

SEQ ID NO: 4885 - DNA, 20 bp, Artificial Sequence
  MKO10004885_A_Arglu1
  gRNA
ttgagcgagaagttctccga

SEQ ID NO: 4886 - DNA, 20 bp, Artificial Sequence
  MKO10004886_A_Arglu1
  gRNA
gcgcgaggatgggccggtcg

SEQ ID NO: 4887 - DNA, 20 bp, Artificial Sequence
  MKO10004887_A_Arhgap10
  gRNA
aaagttagaaaattcccgta

SEQ ID NO: 4888 - DNA, 20 bp, Artificial Sequence
  MKO10004888_A_Arhgap10
  gRNA
gcgagtgagcgaacttcctc

SEQ ID NO: 4889 - DNA, 20 bp, Artificial Sequence
  MKO10004889_A_Arhgap10
  gRNA
agcacttgacgctgtctgcc

SEQ ID NO: 4890 - DNA, 20 bp, Artificial Sequence
  MKO10004890_A_Arhgap11a
  gRNA
ggggtctgttgttcgtctaa

SEQ ID NO: 4891 - DNA, 20 bp, Artificial Sequence
  MKO10004891_A_Arhgap11a
  gRNA
agagaagaagctacgtctgc

SEQ ID NO: 4892 - DNA, 20 bp, Artificial Sequence
  MKO10004892_A_Arhgap11a
  gRNA
gcacttccgtgtgatgttgc

SEQ ID NO: 4893 - DNA, 20 bp, Artificial Sequence
  MKO10004893_A_Arhgap12
  gRNA
ctcacatctcgagcccatcg

SEQ ID NO: 4894 - DNA, 20 bp, Artificial Sequence
  MKO10004894_A_Arhgap12
  gRNA
tgcaggacaagcgtatattg

SEQ ID NO: 4895 - DNA, 20 bp, Artificial Sequence
  MKO10004895_A_Arhgap12
  gRNA
gttccttgaacagatgacga

SEQ ID NO: 4896 - DNA, 20 bp, Artificial Sequence
  MKO10004896_A_Arhgap15
  gRNA
tccatgatcctcaccgatgc

SEQ ID NO: 4897 - DNA, 20 bp, Artificial Sequence
  MKO10004897_A_Arhgap15
  gRNA
tcgaccagaaagaacaatcc

SEQ ID NO: 4898 - DNA, 20 bp, Artificial Sequence
  MKO10004898_A_Arhgap15
  gRNA
ggaaaaactggtctacttcc

SEQ ID NO: 4899 - DNA, 20 bp, Artificial Sequence
  MKO10004899_A_Arhgap17
  gRNA
ttggcagattgaacgtcgcc

SEQ ID NO: 4900 - DNA, 20 bp, Artificial Sequence
  MKO10004900_A_Arhgap17
  gRNA
tcgcctgccgacagtctgat

SEQ ID NO: 4901 - DNA, 20 bp, Artificial Sequence
  MKO10004901_A_Arhgap17
  gRNA
agcatggcactgatgccgag

SEQ ID NO: 4902 - DNA, 20 bp, Artificial Sequence
  MKO10004902_A_Arhgap18
  gRNA
agagtctattgatgacccgc

SEQ ID NO: 4903 - DNA, 20 bp, Artificial Sequence
  MKO10004903_A_Arhgap18
  gRNA
tgagaactcgatcgatcaaa

SEQ ID NO: 4904 - DNA, 20 bp, Artificial Sequence
  MKO10004904_A_Arhgap18
  gRNA
atttgatcgatcgagttctc

SEQ ID NO: 4905 - DNA, 20 bp, Artificial Sequence
  MKO10004905_A_Arhgap19
  gRNA
atttggatctccgttgacgg

SEQ ID NO: 4906 - DNA, 20 bp, Artificial Sequence
  MKO10004906_A_Arhgap19
  gRNA
agataataggctgacctcga

SEQ ID NO: 4907 - DNA, 20 bp, Artificial Sequence
  MKO10004907_A_Arhgap19
  gRNA
ctccggccagagtcgcagac

SEQ ID NO: 4908 - DNA, 20 bp, Artificial Sequence
  MKO10004908_A_Arhgap1
  gRNA
cactcaggtgatgataagta

SEQ ID NO: 4909 - DNA, 20 bp, Artificial Sequence
  MKO10004909_A_Arhgap1
  gRNA
taccggctacttccacaatc

SEQ ID NO: 4910 - DNA, 20 bp, Artificial Sequence
  MKO10004910_A_Arhgap1
  gRNA
cccacttgcggtcaaactct

SEQ ID NO: 4911 - DNA, 20 bp, Artificial Sequence
  MKO10004911_A_Arhgap20
  gRNA
aagcgccccgtccctcatcc

SEQ ID NO: 4912 - DNA, 20 bp, Artificial Sequence
  MKO10004912_A_Arhgap20
  gRNA
ggtgctcggccgcttctgta

SEQ ID NO: 4913 - DNA, 20 bp, Artificial Sequence
  MKO10004913_A_Arhgap20
  gRNA
agacaaacagatcgttgaat

SEQ ID NO: 4914 - DNA, 20 bp, Artificial Sequence
  MKO10004914_A_Arhgap21
  gRNA
ggagggccggccttcgaggc

SEQ ID NO: 4915 - DNA, 20 bp, Artificial Sequence
  MKO10004915_A_Arhgap21
  gRNA
tgtgcataagccagcctcga

SEQ ID NO: 4916 - DNA, 20 bp, Artificial Sequence
  MKO10004916_A_Arhgap21
  gRNA
atgaaatgatggccacacat

SEQ ID NO: 4917 - DNA, 20 bp, Artificial Sequence
  MKO10004917_A_Arhgap22
  gRNA
tccagctcgctcgaagagcc

SEQ ID NO: 4918 - DNA, 20 bp, Artificial Sequence
  MKO10004918_A_Arhgap22
  gRNA
ggcccagatgacacggcgga

SEQ ID NO: 4919 - DNA, 20 bp, Artificial Sequence
  MKO10004919_A_Arhgap22
  gRNA
cacctgtttgagattacgcc

SEQ ID NO: 4920 - DNA, 20 bp, Artificial Sequence
  MKO10004920_A_Arhgap23
  gRNA
cttggagcgctccgtggtga

SEQ ID NO: 4921 - DNA, 20 bp, Artificial Sequence
  MKO10004921_A_Arhgap23
  gRNA
catgggcttaccggagcact

SEQ ID NO: 4922 - DNA, 20 bp, Artificial Sequence
  MKO10004922_A_Arhgap23
  gRNA
agaagctccgcagcactcgt

SEQ ID NO: 4923 - DNA, 20 bp, Artificial Sequence
  MKO10004923_A_Arhgap24
  gRNA
tccccatatgactcggcgga

SEQ ID NO: 4924 - DNA, 20 bp, Artificial Sequence
  MKO10004924_A_Arhgap24
  gRNA
tccaacatacctgtcgaagg

SEQ ID NO: 4925 - DNA, 20 bp, Artificial Sequence
  MKO10004925_A_Arhgap24
  gRNA
gtgtggacttcatccgacag

SEQ ID NO: 4926 - DNA, 20 bp, Artificial Sequence
  MKO10004926_A_Arhgap25
  gRNA
cgtaggagtcttgtccaatg

SEQ ID NO: 4927 - DNA, 20 bp, Artificial Sequence
  MKO10004927_A_Arhgap25
  gRNA
tcaagtgaccagaaccgcat

SEQ ID NO: 4928 - DNA, 20 bp, Artificial Sequence
  MKO10004928_A_Arhgap25
  gRNA
agcggtgtttggccagcgtc

SEQ ID NO: 4929 - DNA, 20 bp, Artificial Sequence
  MKO10004929_A_Arhgap26
  gRNA
tgaagacgagcggagtcgaa

SEQ ID NO: 4930 - DNA, 20 bp, Artificial Sequence
  MKO10004930_A_Arhgap26
  gRNA
acccttggagaagtttcgaa

SEQ ID NO: 4931 - DNA, 20 bp, Artificial Sequence
  MKO10004931_A_Arhgap26
  gRNA
tcagatcgagaatgccagcg

SEQ ID NO: 4932 - DNA, 20 bp, Artificial Sequence
  MKO10004932_A_Arhgap27
  gRNA
cccgcaggtggacgaccccc

SEQ ID NO: 4933 - DNA, 20 bp, Artificial Sequence
  MKO10004933_A_Arhgap27
  gRNA
aacagactaccccgaattac

SEQ ID NO: 4934 - DNA, 20 bp, Artificial Sequence
  MKO10004934_A_Arhgap27
  gRNA
ccgaggttgcctctctacat

SEQ ID NO: 4935 - DNA, 20 bp, Artificial Sequence
  MKO10004935_A_Arhgap28
  gRNA
ctcgctgccgacgaatcaac

SEQ ID NO: 4936 - DNA, 20 bp, Artificial Sequence
  MKO10004936_A_Arhgap28
  gRNA
agtagtaccaccctatccaa

SEQ ID NO: 4937 - DNA, 20 bp, Artificial Sequence
  MKO10004937_A_Arhgap28
  gRNA
agagcatcctgttgattcgt

SEQ ID NO: 4938 - DNA, 20 bp, Artificial Sequence
  MKO10004938_A_Arhgap29
  gRNA
agaagtcattcatatccgtc

SEQ ID NO: 4939 - DNA, 20 bp, Artificial Sequence
  MKO10004939_A_Arhgap29
  gRNA
accttactttctcgagaaat

SEQ ID NO: 4940 - DNA, 20 bp, Artificial Sequence
  MKO10004940_A_Arhgap29
  gRNA
tgcagcgctctgaagatcta

SEQ ID NO: 4941 - DNA, 20 bp, Artificial Sequence
  MKO10004941_A_Arhgap30
  gRNA
ggaattccttatgcgccact

SEQ ID NO: 4942 - DNA, 20 bp, Artificial Sequence
  MKO10004942_A_Arhgap30
  gRNA
taaacatcccggcgcaggtc

SEQ ID NO: 4943 - DNA, 20 bp, Artificial Sequence
  MKO10004943_A_Arhgap30
  gRNA
agtggcgcataaggaattcc

SEQ ID NO: 4944 - DNA, 20 bp, Artificial Sequence
  MKO10004944_A_Arhgap31
  gRNA
ggaatacctgattcgacacc

SEQ ID NO: 4945 - DNA, 20 bp, Artificial Sequence
  MKO10004945_A_Arhgap31
  gRNA
ggatggaatctatcgcctct

SEQ ID NO: 4946 - DNA, 20 bp, Artificial Sequence
  MKO10004946_A_Arhgap31
  gRNA
atttagcttacctcagccgc

SEQ ID NO: 4947 - DNA, 20 bp, Artificial Sequence
  MKO10004947_A_Arhgap32
  gRNA
gctgcacagcgttcatcgag

SEQ ID NO: 4948 - DNA, 20 bp, Artificial Sequence
  MKO10004948_A_Arhgap32
  gRNA
cagagaacttctcgtatagc

SEQ ID NO: 4949 - DNA, 20 bp, Artificial Sequence
  MKO10004949_A_Arhgap32
  gRNA
gatgggatatatcgtctctc

SEQ ID NO: 4950 - DNA, 20 bp, Artificial Sequence
  MKO10004950_A_Arhgap33
  gRNA
gtgcagcccgtacccactac

SEQ ID NO: 4951 - DNA, 20 bp, Artificial Sequence
  MKO10004951_A_Arhgap33
  gRNA
tccaccggtgcatatttgac

SEQ ID NO: 4952 - DNA, 20 bp, Artificial Sequence
  MKO10004952_A_Arhgap33
  gRNA
ctatgacgatttccgttctc

SEQ ID NO: 4953 - DNA, 20 bp, Artificial Sequence
  MKO10004953_A_Arhgap36
  gRNA
tcagttcacgctgcttgcga

SEQ ID NO: 4954 - DNA, 20 bp, Artificial Sequence
  MKO10004954_A_Arhgap36
  gRNA
cctagagagttcactcgccg

SEQ ID NO: 4955 - DNA, 20 bp, Artificial Sequence
  MKO10004955_A_Arhgap36
  gRNA
aatgtctggccacgagttcg

SEQ ID NO: 4956 - DNA, 20 bp, Artificial Sequence
  MKO10004956_A_Arhgap39
  gRNA
gcgcatcaagcgcaccagcg

SEQ ID NO: 4957 - DNA, 20 bp, Artificial Sequence
  MKO10004957_A_Arhgap39
  gRNA
gctcctgctcatcgacatga

SEQ ID NO: 4958 - DNA, 20 bp, Artificial Sequence
  MKO10004958_A_Arhgap39
  gRNA
cgaacgtatgtatgccaacc

SEQ ID NO: 4959 - DNA, 20 bp, Artificial Sequence
  MKO10004959_A_Arhgap40
  gRNA
ctcagcccgaagacgacaaa

SEQ ID NO: 4960 - DNA, 20 bp, Artificial Sequence
  MKO10004960_A_Arhgap40
  gRNA
tttgtcgtcttcgggctgag

SEQ ID NO: 4961 - DNA, 20 bp, Artificial Sequence
  MKO10004961_A_Arhgap40
  gRNA
cggcaggggtcccttgcccc

SEQ ID NO: 4962 - DNA, 20 bp, Artificial Sequence
  MKO10004962_A_Arhgap42
  gRNA
agtcactgaaagaattcgca

SEQ ID NO: 4963 - DNA, 20 bp, Artificial Sequence
  MKO10004963_A_Arhgap42
  gRNA
gacttccagtttgagtgtat

SEQ ID NO: 4964 - DNA, 20 bp, Artificial Sequence
  MKO10004964_A_Arhgap42
  gRNA
catctccaatacactcaaac

SEQ ID NO: 4965 - DNA, 20 bp, Artificial Sequence
  MKO10004965_A_Arhgap44
  gRNA
ggtggaggggtccgcgatcc

SEQ ID NO: 4966 - DNA, 20 bp, Artificial Sequence
  MKO10004966_A_Arhgap44
  gRNA
caagaagcgtgtcatcgccc

SEQ ID NO: 4967 - DNA, 20 bp, Artificial Sequence
  MKO10004967_A_Arhgap44
  gRNA
ggtacttactgatcgcttgt

SEQ ID NO: 4968 - DNA, 20 bp, Artificial Sequence
  MKO10004968_A_Arhgap4
  gRNA
caacttcccgtgcgccgcca

SEQ ID NO: 4969 - DNA, 20 bp, Artificial Sequence
  MKO10004969_A_Arhgap4
  gRNA
ccttgggccatggcggcgca

SEQ ID NO: 4970 - DNA, 20 bp, Artificial Sequence
  MKO10004970_A_Arhgap4
  gRNA
gaacgctttaccagccgcag

SEQ ID NO: 4971 - DNA, 20 bp, Artificial Sequence
  MKO10004971_A_Arhgap5
  gRNA
ttcttaggattatgtactga

SEQ ID NO: 4972 - DNA, 20 bp, Artificial Sequence
  MKO10004972_A_Arhgap5
  gRNA
tctcagctgtaaccagatcc

SEQ ID NO: 4973 - DNA, 20 bp, Artificial Sequence
  MKO10004973_A_Arhgap5
  gRNA
tggagtgaatatggaatcaa

SEQ ID NO: 4974 - DNA, 20 bp, Artificial Sequence
  MKO10004974_A_Arhgap6
  gRNA
ctggtcgtagcgtgcgcctg

SEQ ID NO: 4975 - DNA, 20 bp, Artificial Sequence
  MKO10004975_A_Arhgap6
  gRNA
cttccagggcgccatgtccg

SEQ ID NO: 4976 - DNA, 20 bp, Artificial Sequence
  MKO10004976_A_Arhgap6
  gRNA
ttcggtgatgtagactcatt

SEQ ID NO: 4977 - DNA, 20 bp, Artificial Sequence
  MKO10004977_A_Arhgap8
  gRNA
ggccctcaccgcactacttc

SEQ ID NO: 4978 - DNA, 20 bp, Artificial Sequence
  MKO10004978_A_Arhgap8
  gRNA
tcctccaggggatgaccgcc

SEQ ID NO: 4979 - DNA, 20 bp, Artificial Sequence
  MKO10004979_A_Arhgap8
  gRNA
tatagtcgttctccacatgc

SEQ ID NO: 4980 - DNA, 20 bp, Artificial Sequence
  MKO10004980_A_Arhgap9
  gRNA
cactcacgtgcaggacgttc

SEQ ID NO: 4981 - DNA, 20 bp, Artificial Sequence
  MKO10004981_A_Arhgap9
  gRNA
cgcaggtccacgctactctc

SEQ ID NO: 4982 - DNA, 20 bp, Artificial Sequence
  MKO10004982_A_Arhgap9
  gRNA
cagactgcggtggccgctct

SEQ ID NO: 4983 - DNA, 20 bp, Artificial Sequence
  MKO10004983_A_Arhgdia
  gRNA
cattgtgactcgactgacct

SEQ ID NO: 4984 - DNA, 20 bp, Artificial Sequence
  MKO10004984_A_Arhgdia
  gRNA
aactcatactcctcggccct

SEQ ID NO: 4985 - DNA, 20 bp, Artificial Sequence
  MKO10004985_A_Arhgdia
  gRNA
gagctatgggccgagggccg

SEQ ID NO: 4986 - DNA, 20 bp, Artificial Sequence
  MKO10004986_A_Arhgdib
  gRNA
ctcttctacaggcgatctcg

SEQ ID NO: 4987 - DNA, 20 bp, Artificial Sequence
  MKO10004987_A_Arhgdib
  gRNA
cagctatgggccccgaccag

SEQ ID NO: 4988 - DNA, 20 bp, Artificial Sequence
  MKO10004988_A_Arhgdib
  gRNA
aagccgggtaacagtcacgt

SEQ ID NO: 4989 - DNA, 20 bp, Artificial Sequence
  MKO10004989_A_Arhgdig
  gRNA
accacgcagtccccgacgat

SEQ ID NO: 4990 - DNA, 20 bp, Artificial Sequence
  MKO10004990_A_Arhgdig
  gRNA
gtctgcatcacacctatcgt

SEQ ID NO: 4991 - DNA, 20 bp, Artificial Sequence
  MKO10004991_A_Arhgdig
  gRNA
cttgaccaagctcacgtccc

SEQ ID NO: 4992 - DNA, 20 bp, Artificial Sequence
  MKO10004992_A_Arhgef10l
  gRNA
gcggtgggcgcagcgatctc

SEQ ID NO: 4993 - DNA, 20 bp, Artificial Sequence
  MKO10004993_A_Arhgef10l
  gRNA
tccctggcctcgcccctgag

SEQ ID NO: 4994 - DNA, 20 bp, Artificial Sequence
  MKO10004994_A_Arhgef10l
  gRNA
tccggcgctccagctggaag

SEQ ID NO: 4995 - DNA, 20 bp, Artificial Sequence
  MKO10004995_A_Arhgef10
  gRNA
cgggacttgccgatccgctt

SEQ ID NO: 4996 - DNA, 20 bp, Artificial Sequence
  MKO10004996_A_Arhgef10
  gRNA
aagtcccgtctgccgacgat

SEQ ID NO: 4997 - DNA, 20 bp, Artificial Sequence
  MKO10004997_A_Arhgef10
  gRNA
catccgagccgagtctgtag

SEQ ID NO: 4998 - DNA, 20 bp, Artificial Sequence
  MKO10004998_A_Arhgef11
  gRNA
gcgctgtgtcatcatccaaa

SEQ ID NO: 4999 - DNA, 20 bp, Artificial Sequence
  MKO10004999_A_Arhgef11
  gRNA
ccaacaggtaaacggcacca

SEQ ID NO: 5000 - DNA, 20 bp, Artificial Sequence
  MKO10005000_A_Arhgef11
  gRNA
gtttactcactttgatgatc

SEQ ID NO: 5001 - DNA, 20 bp, Artificial Sequence
  MKO10005001_A_Arhgef12
  gRNA
cgaagccattgtcgtctttc

SEQ ID NO: 5002 - DNA, 20 bp, Artificial Sequence
  MKO10005002_A_Arhgef12
  gRNA
ttgacagattgtacgaagac

SEQ ID NO: 5003 - DNA, 20 bp, Artificial Sequence
  MKO10005003_A_Arhgef12
  gRNA
catcagcttaccatagatct

SEQ ID NO: 5004 - DNA, 20 bp, Artificial Sequence
  MKO10005004_A_Arhgef15
  gRNA
gcgctcggcagtggagcgat

SEQ ID NO: 5005 - DNA, 20 bp, Artificial Sequence
  MKO10005005_A_Arhgef15
  gRNA
taaagacctaccgtcctgca

SEQ ID NO: 5006 - DNA, 20 bp, Artificial Sequence
  MKO10005006_A_Arhgef15
  gRNA
cctcctgcatgcgccgctcc

SEQ ID NO: 5007 - DNA, 20 bp, Artificial Sequence
  MKO10005007_A_Arhgef16
  gRNA
cttccgttgacagcgtgtcc

SEQ ID NO: 5008 - DNA, 20 bp, Artificial Sequence
  MKO10005008_A_Arhgef16
  gRNA
tgtcctggacacgctgtcaa

SEQ ID NO: 5009 - DNA, 20 bp, Artificial Sequence
  MKO10005009_A_Arhgef16
  gRNA
tggtgttcaaaccccgctct

SEQ ID NO: 5010 - DNA, 20 bp, Artificial Sequence
  MKO10005010_A_Arhgef17
  gRNA
cttgctgtgcgacccgtctc

SEQ ID NO: 5011 - DNA, 20 bp, Artificial Sequence
  MKO10005011_A_Arhgef17
  gRNA
tgcggcactgcgtgcaaacg

SEQ ID NO: 5012 - DNA, 20 bp, Artificial Sequence
  MKO10005012_A_Arhgef17
  gRNA
gatgttcaccaagacgtctt

SEQ ID NO: 5013 - DNA, 20 bp, Artificial Sequence
  MKO10005013_A_Arhgef18
  gRNA
tccgtgcgctgatgacttac

SEQ ID NO: 5014 - DNA, 20 bp, Artificial Sequence
  MKO10005014_A_Arhgef18
  gRNA
actcctgccggcgctcctta

SEQ ID NO: 5015 - DNA, 20 bp, Artificial Sequence
  MKO10005015_A_Arhgef18
  gRNA
aagagacaggacgtcctata

SEQ ID NO: 5016 - DNA, 20 bp, Artificial Sequence
  MKO10005016_A_Arhgef19
  gRNA
tcgtttagatcgacgggtcc

SEQ ID NO: 5017 - DNA, 20 bp, Artificial Sequence
  MKO10005017_A_Arhgef19
  gRNA
tccgcgcgcaacgctcgacg

SEQ ID NO: 5018 - DNA, 20 bp, Artificial Sequence
  MKO10005018_A_Arhgef19
  gRNA
atccccgacgtgcgcggcag

SEQ ID NO: 5019 - DNA, 20 bp, Artificial Sequence
  MKO10005019_A_Arhgef1
  gRNA
atcctccgccccgatgatga

SEQ ID NO: 5020 - DNA, 20 bp, Artificial Sequence
  MKO10005020_A_Arhgef1
  gRNA
gtggccctgcagttcgagcc

SEQ ID NO: 5021 - DNA, 20 bp, Artificial Sequence
  MKO10005021_A_Arhgef1
  gRNA
gcttcacttgctctaggctc

SEQ ID NO: 5022 - DNA, 20 bp, Artificial Sequence
  MKO10005022_A_Arhgef25
  gRNA
ccgtgttctccgattccccc

SEQ ID NO: 5023 - DNA, 20 bp, Artificial Sequence
  MKO10005023_A_Arhgef25
  gRNA
gaccttactgactacattgc

SEQ ID NO: 5024 - DNA, 20 bp, Artificial Sequence
  MKO10005024_A_Arhgef25
  gRNA
cccccggagagagatccctt

SEQ ID NO: 5025 - DNA, 20 bp, Artificial Sequence
  MKO10005025_A_Arhgef26
  gRNA
cctcatcagagtcgatatca

SEQ ID NO: 5026 - DNA, 20 bp, Artificial Sequence
  MKO10005026_A_Arhgef26
  gRNA
aaacactcaccgcggagagc

SEQ ID NO: 5027 - DNA, 20 bp, Artificial Sequence
  MKO10005027_A_Arhgef26
  gRNA
tctccaacattaccgatgtc

SEQ ID NO: 5028 - DNA, 20 bp, Artificial Sequence
  MKO10005028_A_Arhgef28
  gRNA
ccgactgcgtcttaacgaag

SEQ ID NO: 5029 - DNA, 20 bp, Artificial Sequence
  MKO10005029_A_Arhgef28
  gRNA
cctcttcgttaagacgcagt

SEQ ID NO: 5030 - DNA, 20 bp, Artificial Sequence
  MKO10005030_A_Arhgef28
  gRNA
ggtgattgctgaccgtgtcc

SEQ ID NO: 5031 - DNA, 20 bp, Artificial Sequence
  MKO10005031_A_Arhgef2
  gRNA
gcacatggtcatgccggaga

SEQ ID NO: 5032 - DNA, 20 bp, Artificial Sequence
  MKO10005032_A_Arhgef2
  gRNA
ggcagacgttggccgctctc

SEQ ID NO: 5033 - DNA, 20 bp, Artificial Sequence
  MKO10005033_A_Arhgef2
  gRNA
caaccgctgtaaagacaccc

SEQ ID NO: 5034 - DNA, 20 bp, Artificial Sequence
  MKO10005034_A_Arhgef33
  gRNA
catgttggtgaagtcgtcac

SEQ ID NO: 5035 - DNA, 20 bp, Artificial Sequence
  MKO10005035_A_Arhgef33
  gRNA
aagaacatggcgcgcaggcc

SEQ ID NO: 5036 - DNA, 20 bp, Artificial Sequence
  MKO10005036_A_Arhgef33
  gRNA
ccaacatggagaatacgctt

SEQ ID NO: 5037 - DNA, 20 bp, Artificial Sequence
  MKO10005037_A_Arhgef37
  gRNA
aacaggatgtccagatcgcc

SEQ ID NO: 5038 - DNA, 20 bp, Artificial Sequence
  MKO10005038_A_Arhgef37
  gRNA
caacgaatacaagatgcgca

SEQ ID NO: 5039 - DNA, 20 bp, Artificial Sequence
  MKO10005039_A_Arhgef37
  gRNA
gctggtcaaggcgtaccaga

SEQ ID NO: 5040 - DNA, 20 bp, Artificial Sequence
  MKO10005040_A_Arhgef38
  gRNA
aaacataccgattacttgca

SEQ ID NO: 5041 - DNA, 20 bp, Artificial Sequence
  MKO10005041_A_Arhgef38
  gRNA
caaagcgggccaagatcatc

SEQ ID NO: 5042 - DNA, 20 bp, Artificial Sequence
  MKO10005042_A_Arhgef38
  gRNA
gcaacaagtgggacggatga

SEQ ID NO: 5043 - DNA, 20 bp, Artificial Sequence
  MKO10005043_A_Arhgef39
  gRNA
caaattgggcgtagagctcc

SEQ ID NO: 5044 - DNA, 20 bp, Artificial Sequence
  MKO10005044_A_Arhgef39
  gRNA
agaacctacgtgtgagctgc

SEQ ID NO: 5045 - DNA, 20 bp, Artificial Sequence
  MKO10005045_A_Arhgef39
  gRNA
agctgaagacccctaaattc

SEQ ID NO: 5046 - DNA, 20 bp, Artificial Sequence
  MKO10005046_A_Arhgef3
  gRNA
tgtcggggcggctctcgctg

SEQ ID NO: 5047 - DNA, 20 bp, Artificial Sequence
  MKO10005047_A_Arhgef3
  gRNA
ctgattgacacacacatcga

SEQ ID NO: 5048 - DNA, 20 bp, Artificial Sequence
  MKO10005048_A_Arhgef3
  gRNA
gcgcttcagccagaccttgc

SEQ ID NO: 5049 - DNA, 20 bp, Artificial Sequence
  MKO10005049_A_Arhgef40
  gRNA
gtacccgcccgtaagagcac

SEQ ID NO: 5050 - DNA, 20 bp, Artificial Sequence
  MKO10005050_A_Arhgef40
  gRNA
agggccggcaccggagacac

SEQ ID NO: 5051 - DNA, 20 bp, Artificial Sequence
  MKO10005051_A_Arhgef40
  gRNA
cgtaccaggaggatgcgctg

SEQ ID NO: 5052 - DNA, 20 bp, Artificial Sequence
  MKO10005052_A_Arhgef4
  gRNA
gcaccttcgcgacatctgcg

SEQ ID NO: 5053 - DNA, 20 bp, Artificial Sequence
  MKO10005053_A_Arhgef4
  gRNA
tcacctcgcagatgtcgcga

SEQ ID NO: 5054 - DNA, 20 bp, Artificial Sequence
  MKO10005054_A_Arhgef4
  gRNA
atgtccgccagtgccgcaaa

SEQ ID NO: 5055 - DNA, 20 bp, Artificial Sequence
  MKO10005055_A_Arhgef5
  gRNA
agtgcctttcgacgatgccg

SEQ ID NO: 5056 - DNA, 20 bp, Artificial Sequence
  MKO10005056_A_Arhgef5
  gRNA
ttccccacggcatcgtcgaa

SEQ ID NO: 5057 - DNA, 20 bp, Artificial Sequence
  MKO10005057_A_Arhgef5
  gRNA
cagctatgtttagactgcgc

SEQ ID NO: 5058 - DNA, 20 bp, Artificial Sequence
  MKO10005058_A_Arhgef6
  gRNA
agaaattggcccccgaatag

SEQ ID NO: 5059 - DNA, 20 bp, Artificial Sequence
  MKO10005059_A_Arhgef6
  gRNA
cagctctcagacaaacccgc

SEQ ID NO: 5060 - DNA, 20 bp, Artificial Sequence
  MKO10005060_A_Arhgef6
  gRNA
atcttgcctttactatcaac

SEQ ID NO: 5061 - DNA, 20 bp, Artificial Sequence
  MKO10005061_A_Arhgef7
  gRNA
gatctctcgaacgtagttgc

SEQ ID NO: 5062 - DNA, 20 bp, Artificial Sequence
  MKO10005062_A_Arhgef7
  gRNA
acttggctcgtactaccagt

SEQ ID NO: 5063 - DNA, 20 bp, Artificial Sequence
  MKO10005063_A_Arhgef7
  gRNA
gtcgtatcgaaccctttggg

SEQ ID NO: 5064 - DNA, 20 bp, Artificial Sequence
  MKO10005064_A_Arhgef9
  gRNA
atccctcctcatcgtcgatc

SEQ ID NO: 5065 - DNA, 20 bp, Artificial Sequence
  MKO10005065_A_Arhgef9
  gRNA
taggagctcggccaattgta

SEQ ID NO: 5066 - DNA, 20 bp, Artificial Sequence
  MKO10005066_A_Arhgef9
  gRNA
atgatcgacattgctattga

SEQ ID NO: 5067 - DNA, 20 bp, Artificial Sequence
  MKO10005067_A_Arid1a
  gRNA
gccctgctggccatacgcac

SEQ ID NO: 5068 - DNA, 20 bp, Artificial Sequence
  MKO10005068_A_Arid1a
  gRNA
ggtccctgttgttgcgagta

SEQ ID NO: 5069 - DNA, 20 bp, Artificial Sequence
  MKO10005069_A_Arid1a
  gRNA
taacccatactcgcaacaac

SEQ ID NO: 5070 - DNA, 20 bp, Artificial Sequence
  MKO10005070_A_Arid1b
  gRNA
ctgtgcacctgggggaccgt

SEQ ID NO: 5071 - DNA, 20 bp, Artificial Sequence
  MKO10005071_A_Arid1b
  gRNA
acagtacctgcagccggcgg

SEQ ID NO: 5072 - DNA, 20 bp, Artificial Sequence
  MKO10005072_A_Arid1b
  gRNA
agatcggaccagacctcgat

SEQ ID NO: 5073 - DNA, 20 bp, Artificial Sequence
  MKO10005073_A_Arid2
  gRNA
taccagcaacacagcgtgtc

SEQ ID NO: 5074 - DNA, 20 bp, Artificial Sequence
  MKO10005074_A_Arid2
  gRNA
atagcgaagtccacttcatt

SEQ ID NO: 5075 - DNA, 20 bp, Artificial Sequence
  MKO10005075_A_Arid2
  gRNA
cactttactgctcgctaatg

SEQ ID NO: 5076 - DNA, 20 bp, Artificial Sequence
  MKO10005076_A_Arid3a
  gRNA
ccgccatagacagcaatcgc

SEQ ID NO: 5077 - DNA, 20 bp, Artificial Sequence
  MKO10005077_A_Arid3a
  gRNA
gagcagccccaacgagctcc

SEQ ID NO: 5078 - DNA, 20 bp, Artificial Sequence
  MKO10005078_A_Arid3a
  gRNA
tgcaggcctgttcacccgca

SEQ ID NO: 5079 - DNA, 20 bp, Artificial Sequence
  MKO10005079_A_Arid3b
  gRNA
cagccatcgatggcaaccgt

SEQ ID NO: 5080 - DNA, 20 bp, Artificial Sequence
  MKO10005080_A_Arid3b
  gRNA
tacccccggcatctactctc

SEQ ID NO: 5081 - DNA, 20 bp, Artificial Sequence
  MKO10005081_A_Arid3b
  gRNA
ctgcagctgtatgaactaga

SEQ ID NO: 5082 - DNA, 20 bp, Artificial Sequence
  MKO10005082_A_Arid3c
  gRNA
gcccgtgtctcgcactcgta

SEQ ID NO: 5083 - DNA, 20 bp, Artificial Sequence
  MKO10005083_A_Arid3c
  gRNA
gaccgcgaccccgaactgcc

SEQ ID NO: 5084 - DNA, 20 bp, Artificial Sequence
  MKO10005084_A_Arid3c
  gRNA
ggttgtggaagcggtaagcg

SEQ ID NO: 5085 - DNA, 20 bp, Artificial Sequence
  MKO10005085_A_Arid4a
  gRNA
gatgtcagtgccaagtaccg

SEQ ID NO: 5086 - DNA, 20 bp, Artificial Sequence
  MKO10005086_A_Arid4a
  gRNA
ctcttaaagggccctttact

SEQ ID NO: 5087 - DNA, 20 bp, Artificial Sequence
  MKO10005087_A_Arid4a
  gRNA
ggtgcaagatgaccaagtaa

SEQ ID NO: 5088 - DNA, 20 bp, Artificial Sequence
  MKO10005088_A_Arid4b
  gRNA
gaatcttgatggtgcctatc

SEQ ID NO: 5089 - DNA, 20 bp, Artificial Sequence
  MKO10005089_A_Arid4b
  gRNA
ccttcagtgggccctttatg

SEQ ID NO: 5090 - DNA, 20 bp, Artificial Sequence
  MKO10005090_A_Arid4b
  gRNA
attgataaccgcttcctgat

SEQ ID NO: 5091 - DNA, 20 bp, Artificial Sequence
  MKO10005091_A_Arid5a
  gRNA
cccttcagatgccgcacata

SEQ ID NO: 5092 - DNA, 20 bp, Artificial Sequence
  MKO10005092_A_Arid5a
  gRNA
gcacacgccgccactatgag

SEQ ID NO: 5093 - DNA, 20 bp, Artificial Sequence
  MKO10005093_A_Arid5a
  gRNA
gccggctgtacctctcatag

SEQ ID NO: 5094 - DNA, 20 bp, Artificial Sequence
  MKO10005094_A_Arid5b
  gRNA
gtccatgcttaaacggatcc

SEQ ID NO: 5095 - DNA, 20 bp, Artificial Sequence
  MKO10005095_A_Arid5b
  gRNA
ctaatgcgaactggtccgtg

SEQ ID NO: 5096 - DNA, 20 bp, Artificial Sequence
  MKO10005096_A_Arid5b
  gRNA
gctatgcaaatcggatcctt

SEQ ID NO: 5097 - DNA, 20 bp, Artificial Sequence
  MKO10005097_A_Arih1
  gRNA
agtattctcgtgatagttgc

SEQ ID NO: 5098 - DNA, 20 bp, Artificial Sequence
  MKO10005098_A_Arih1
  gRNA
ccgatgaccttgtattcatc

SEQ ID NO: 5099 - DNA, 20 bp, Artificial Sequence
  MKO10005099_A_Arih1
  gRNA
gaactcgccagatgaataca

SEQ ID NO: 5100 - DNA, 20 bp, Artificial Sequence
  MKO10005100_A_Arih2
  gRNA
gagacactcacatgtttgga

SEQ ID NO: 5101 - DNA, 20 bp, Artificial Sequence
  MKO10005101_A_Arih2
  gRNA
cctccacatagtccctaaag

SEQ ID NO: 5102 - DNA, 20 bp, Artificial Sequence
  MKO10005102_A_Arih2
  gRNA
ttcaacaggaatctcatgta

SEQ ID NO: 5103 - DNA, 20 bp, Artificial Sequence
  MKO10005103_A_Arl10
  gRNA
tgtcaacgaggtggacgtgc

SEQ ID NO: 5104 - DNA, 20 bp, Artificial Sequence
  MKO10005104_A_Arl10
  gRNA
aagcttacttcggccgcggc

SEQ ID NO: 5105 - DNA, 20 bp, Artificial Sequence
  MKO10005105_A_Arl10
  gRNA
aagcacgttcttgcgcatgc

SEQ ID NO: 5106 - DNA, 20 bp, Artificial Sequence
  MKO10005106_A_Arl11
  gRNA
atgatgggcctcgactctgc

SEQ ID NO: 5107 - DNA, 20 bp, Artificial Sequence
  MKO10005107_A_Arl11
  gRNA
cgacctccttgtgtacgtgc

SEQ ID NO: 5108 - DNA, 20 bp, Artificial Sequence
  MKO10005108_A_Arl11
  gRNA
cgaggcccatcattaccacc

SEQ ID NO: 5109 - DNA, 20 bp, Artificial Sequence
  MKO10005109_A_Arl13a
  gRNA
catcgcagccctacaactat

SEQ ID NO: 5110 - DNA, 20 bp, Artificial Sequence
  MKO10005110_A_Arl13a
  gRNA
tggcaaaagtcgtctcatag

SEQ ID NO: 5111 - DNA, 20 bp, Artificial Sequence
  MKO10005111_A_Arl13a
  gRNA
tagtgacatagcacgcatcc

SEQ ID NO: 5112 - DNA, 20 bp, Artificial Sequence
  MKO10005112_A_Arl13b
  gRNA
taagccttacgatctgacac

SEQ ID NO: 5113 - DNA, 20 bp, Artificial Sequence
  MKO10005113_A_Arl13b
  gRNA
gtgagagggctgaacgagtc

SEQ ID NO: 5114 - DNA, 20 bp, Artificial Sequence
  MKO10005114_A_Arl13b
  gRNA
gaagacgtagctcccactgt

SEQ ID NO: 5115 - DNA, 20 bp, Artificial Sequence
  MKO10005115_A_Arl14epl
  gRNA
caggctgatctgtaacgacg

SEQ ID NO: 5116 - DNA, 20 bp, Artificial Sequence
  MKO10005116_A_Arl14epl
  gRNA
ggcacgggtagaagcatccc

SEQ ID NO: 5117 - DNA, 20 bp, Artificial Sequence
  MKO10005117_A_Arl14epl
  gRNA
gttagtgagctcctgttgag

SEQ ID NO: 5118 - DNA, 20 bp, Artificial Sequence
  MKO10005118_A_Arl14ep
  gRNA
atcccaagcagtcctcgtcc

SEQ ID NO: 5119 - DNA, 20 bp, Artificial Sequence
  MKO10005119_A_Arl14ep
  gRNA
agtcgtgtgtggtacgaagc

SEQ ID NO: 5120 - DNA, 20 bp, Artificial Sequence
  MKO10005120_A_Arl14ep
  gRNA
catctaagtcaatgacgtgc

SEQ ID NO: 5121 - DNA, 20 bp, Artificial Sequence
  MKO10005121_A_Arl14
  gRNA
catttccacgttgaagccga

SEQ ID NO: 5122 - DNA, 20 bp, Artificial Sequence
  MKO10005122_A_Arl14
  gRNA
tacgtggtggactgttccga

SEQ ID NO: 5123 - DNA, 20 bp, Artificial Sequence
  MKO10005123_A_Arl14
  gRNA
tgagcgccgaagacatcacc

SEQ ID NO: 5124 - DNA, 20 bp, Artificial Sequence
  MKO10005124_A_Arl15
  gRNA
gtggtcgacacaacgttctc

SEQ ID NO: 5125 - DNA, 20 bp, Artificial Sequence
  MKO10005125_A_Arl15
  gRNA
tgcgcgccctgaatatgact

SEQ ID NO: 5126 - DNA, 20 bp, Artificial Sequence
  MKO10005126_A_Arl15
  gRNA
tactggagccgctactacca

SEQ ID NO: 5127 - DNA, 20 bp, Artificial Sequence
  MKO10005127_A_Arl16
  gRNA
acacctaccgtgggccgcgt

SEQ ID NO: 5128 - DNA, 20 bp, Artificial Sequence
  MKO10005128_A_Arl16
  gRNA
tgggagagcccccaccgacg

SEQ ID NO: 5129 - DNA, 20 bp, Artificial Sequence
  MKO10005129_A_Arl16
  gRNA
aagatcaccatccgagagct

SEQ ID NO: 5130 - DNA, 20 bp, Artificial Sequence
  MKO10005130_A_Arl1
  gRNA
agttgtgaccgagatcgaat

SEQ ID NO: 5131 - DNA, 20 bp, Artificial Sequence
  MKO10005131_A_Arl1
  gRNA
gtcctcctaagtcccaaact

SEQ ID NO: 5132 - DNA, 20 bp, Artificial Sequence
  MKO10005132_A_Arl1
  gRNA
ttcagctattggatttaatg

SEQ ID NO: 5133 - DNA, 20 bp, Artificial Sequence
  MKO10005133_A_Arl2bp
  gRNA
gcgtatcccaggcttcaaca

SEQ ID NO: 5134 - DNA, 20 bp, Artificial Sequence
  MKO10005134_A_Arl2bp
  gRNA
cgccagccacctcatctttg

SEQ ID NO: 5135 - DNA, 20 bp, Artificial Sequence
  MKO10005135_A_Arl2bp
  gRNA
cttcaatgtacttctctacc

SEQ ID NO: 5136 - DNA, 20 bp, Artificial Sequence
  MKO10005136_A_Arl2
  gRNA
cgccgaccgccagcgcatgc

SEQ ID NO: 5137 - DNA, 20 bp, Artificial Sequence
  MKO10005137_A_Arl2
  gRNA
agaagtctctgcgctcctac

SEQ ID NO: 5138 - DNA, 20 bp, Artificial Sequence
  MKO10005138_A_Arl2
  gRNA
ggacaccatctccccgacac

SEQ ID NO: 5139 - DNA, 20 bp, Artificial Sequence
  MKO10005139_A_Arl3
  gRNA
ccagcctccgagatcgcaga

SEQ ID NO: 5140 - DNA, 20 bp, Artificial Sequence
  MKO10005140_A_Arl3
  gRNA
tgcccgcgttgtccaagccc

SEQ ID NO: 5141 - DNA, 20 bp, Artificial Sequence
  MKO10005141_A_Arl3
  gRNA
ccaggaactaacggaattac

SEQ ID NO: 5142 - DNA, 20 bp, Artificial Sequence
  MKO10005142_A_Arl4a
  gRNA
gtaaataccgtacctaccaa

SEQ ID NO: 5143 - DNA, 20 bp, Artificial Sequence
  MKO10005143_A_Arl4a
  gRNA
aactgagctcatcgactcct

SEQ ID NO: 5144 - DNA, 20 bp, Artificial Sequence
  MKO10005144_A_Arl4a
  gRNA
acacaataccatctgtgcat

SEQ ID NO: 5145 - DNA, 20 bp, Artificial Sequence
  MKO10005145_A_Arl4c
  gRNA
tcgccgatgatggcgcacgc

SEQ ID NO: 5146 - DNA, 20 bp, Artificial Sequence
  MKO10005146_A_Arl4c
  gRNA
ggatctgcctaagtcgctgc

SEQ ID NO: 5147 - DNA, 20 bp, Artificial Sequence
  MKO10005147_A_Arl4c
  gRNA
ggactcggccggcaagacta

SEQ ID NO: 5148 - DNA, 20 bp, Artificial Sequence
  MKO10005148_A_Arl4d
  gRNA
ccctgcatgtcgtcgtcatt

SEQ ID NO: 5149 - DNA, 20 bp, Artificial Sequence
  MKO10005149_A_Arl4d
  gRNA
cgtctcttcttgctcgaccg

SEQ ID NO: 5150 - DNA, 20 bp, Artificial Sequence
  MKO10005150_A_Arl4d
  gRNA
acccaatgacgacgacatgc

SEQ ID NO: 5151 - DNA, 20 bp, Artificial Sequence
  MKO10005151_A_Arl5a
  gRNA
caagcatgttgcgctcttac

SEQ ID NO: 5152 - DNA, 20 bp, Artificial Sequence
  MKO10005152_A_Arl5a
  gRNA
ataatacccgtttcctgatg

SEQ ID NO: 5153 - DNA, 20 bp, Artificial Sequence
  MKO10005153_A_Arl5a
  gRNA
aagaatcacttcgtccttcc

SEQ ID NO: 5154 - DNA, 20 bp, Artificial Sequence
  MKO10005154_A_Arl5b
  gRNA
cagtcgtgctgtgcgctcac

SEQ ID NO: 5155 - DNA, 20 bp, Artificial Sequence
  MKO10005155_A_Arl5b
  gRNA
attcttctttcgtaatagcc

SEQ ID NO: 5156 - DNA, 20 bp, Artificial Sequence
  MKO10005156_A_Arl5b
  gRNA
ctgtgagcgcacagcacgac

SEQ ID NO: 5157 - DNA, 20 bp, Artificial Sequence
  MKO10005157_A_Arl5c
  gRNA
attagagtagtaagtgtccc

SEQ ID NO: 5158 - DNA, 20 bp, Artificial Sequence
  MKO10005158_A_Arl5c
  gRNA
tcggctgctcaccacccggg

SEQ ID NO: 5159 - DNA, 20 bp, Artificial Sequence
  MKO10005159_A_Arl5c
  gRNA
gtgccatcaaagaccacccg

SEQ ID NO: 5160 - DNA, 20 bp, Artificial Sequence
  MKO10005160_A_Arl6ip1
  gRNA
caacgacttaccaatcaggt

SEQ ID NO: 5161 - DNA, 20 bp, Artificial Sequence
  MKO10005161_A_Arl6ip1
  gRNA
ctcgatccatctgtgctgtc

SEQ ID NO: 5162 - DNA, 20 bp, Artificial Sequence
  MKO10005162_A_Arl6ip1
  gRNA
accaggctctttcccatcga

SEQ ID NO: 5163 - DNA, 20 bp, Artificial Sequence
  MKO10005163_A_Arl6ip4
  gRNA
aactggatcgcgatgtcctc

SEQ ID NO: 5164 - DNA, 20 bp, Artificial Sequence
  MKO10005164_A_Arl6ip4
  gRNA
cctttcgaataacgctctgt

SEQ ID NO: 5165 - DNA, 20 bp, Artificial Sequence
  MKO10005165_A_Arl6ip4
  gRNA
ccgacagagcgttattcgaa

SEQ ID NO: 5166 - DNA, 20 bp, Artificial Sequence
  MKO10005166_A_Arl6ip5
  gRNA
cgggctctgatcgtttcgcc

SEQ ID NO: 5167 - DNA, 20 bp, Artificial Sequence
  MKO10005167_A_Arl6ip5
  gRNA
cgggcgaaacgatcagagcc

SEQ ID NO: 5168 - DNA, 20 bp, Artificial Sequence
  MKO10005168_A_Arl6ip5
  gRNA
gtacccaacggccttcgtga

SEQ ID NO: 5169 - DNA, 20 bp, Artificial Sequence
  MKO10005169_A_Arl6ip6
  gRNA
aatacccgggccgagtcgca

SEQ ID NO: 5170 - DNA, 20 bp, Artificial Sequence
  MKO10005170_A_Arl6ip6
  gRNA
ctttcccgccatgtcgttcg

SEQ ID NO: 5171 - DNA, 20 bp, Artificial Sequence
  MKO10005171_A_Arl6ip6
  gRNA
ctgataatatctctaactgc

SEQ ID NO: 5172 - DNA, 20 bp, Artificial Sequence
  MKO10005172_A_Arl6
  gRNA
gatacccttctgaatcaccc

SEQ ID NO: 5173 - DNA, 20 bp, Artificial Sequence
  MKO10005173_A_Arl6
  gRNA
tagtagtgataagttaagaa

SEQ ID NO: 5174 - DNA, 20 bp, Artificial Sequence
  MKO10005174_A_Arl6
  gRNA
tttacagtgtttgacatgtc

SEQ ID NO: 5175 - DNA, 20 bp, Artificial Sequence
  MKO10005175_A_Arl8a
  gRNA
cgccggagcgctagatgaga

SEQ ID NO: 5176 - DNA, 20 bp, Artificial Sequence
  MKO10005176_A_Arl8a
  gRNA
cctgtataggtcttagtcct

SEQ ID NO: 5177 - DNA, 20 bp, Artificial Sequence
  MKO10005177_A_Arl8a
  gRNA
tcgcatgttgaaacccacag

SEQ ID NO: 5178 - DNA, 20 bp, Artificial Sequence
  MKO10005178_A_Arl8b
  gRNA
agccccggttccggagcatg

SEQ ID NO: 5179 - DNA, 20 bp, Artificial Sequence
  MKO10005179_A_Arl8b
  gRNA
attatgcagttcatttcgag

SEQ ID NO: 5180 - DNA, 20 bp, Artificial Sequence
  MKO10005180_A_Arl8b
  gRNA
agtaccgctcccacatgctc

SEQ ID NO: 5181 - DNA, 20 bp, Artificial Sequence
  MKO10005181_A_Arl9
  gRNA
gtgagccattccgctcctac

SEQ ID NO: 5182 - DNA, 20 bp, Artificial Sequence
  MKO10005182_A_Arl9
  gRNA
ttgttggcaaacacaacgag

SEQ ID NO: 5183 - DNA, 20 bp, Artificial Sequence
  MKO10005183_A_Arl9
  gRNA
cgagtcctacccaggctacc

SEQ ID NO: 5184 - DNA, 20 bp, Artificial Sequence
  MKO10005184_A_Armc10
  gRNA
ttcagtaatgacaggatcgt

SEQ ID NO: 5185 - DNA, 20 bp, Artificial Sequence
  MKO10005185_A_Armc10
  gRNA
tatgcagaagacctaaccga

SEQ ID NO: 5186 - DNA, 20 bp, Artificial Sequence
  MKO10005186_A_Armc10
  gRNA
ttaggccattattcgtgagt

SEQ ID NO: 5187 - DNA, 20 bp, Artificial Sequence
  MKO10005187_A_Armc12
  gRNA
cccgtggcgctctctctcga

SEQ ID NO: 5188 - DNA, 20 bp, Artificial Sequence
  MKO10005188_A_Armc12
  gRNA
ggcatcacccgccgcagctg

SEQ ID NO: 5189 - DNA, 20 bp, Artificial Sequence
  MKO10005189_A_Armc12
  gRNA
cacccgctgcgtgtacttgc

SEQ ID NO: 5190 - DNA, 20 bp, Artificial Sequence
  MKO10005190_A_Armc1
  gRNA
tttgcaggcgctacgctact

SEQ ID NO: 5191 - DNA, 20 bp, Artificial Sequence
  MKO10005191_A_Armc1
  gRNA
atgaaatgaattcgcgtaga

SEQ ID NO: 5192 - DNA, 20 bp, Artificial Sequence
  MKO10005192_A_Armc1
  gRNA
tcgacgaaatctatgtgaag

SEQ ID NO: 5193 - DNA, 20 bp, Artificial Sequence
  MKO10005193_A_Armc2
  gRNA
cacggggtgtaaatggtctt

SEQ ID NO: 5194 - DNA, 20 bp, Artificial Sequence
  MKO10005194_A_Armc2
  gRNA
atccagcaaacccgttagcg

SEQ ID NO: 5195 - DNA, 20 bp, Artificial Sequence
  MKO10005195_A_Armc2
  gRNA
cgggccttacagtgggcggc

SEQ ID NO: 5196 - DNA, 20 bp, Artificial Sequence
  MKO10005196_A_Armc3
  gRNA
tattgagtgcatctacaact

SEQ ID NO: 5197 - DNA, 20 bp, Artificial Sequence
  MKO10005197_A_Armc3
  gRNA
atagaattcttcttcacgtc

SEQ ID NO: 5198 - DNA, 20 bp, Artificial Sequence
  MKO10005198_A_Armc3
  gRNA
tttcagagcaaacttataga

SEQ ID NO: 5199 - DNA, 20 bp, Artificial Sequence
  MKO10005199_A_Armc4
  gRNA
atcgagaagagtcaagcgag

SEQ ID NO: 5200 - DNA, 20 bp, Artificial Sequence
  MKO10005200_A_Armc4
  gRNA
aaaaggggaacagacggtgc

SEQ ID NO: 5201 - DNA, 20 bp, Artificial Sequence
  MKO10005201_A_Armc4
  gRNA
gagttgctcaaacgtttctc

SEQ ID NO: 5202 - DNA, 20 bp, Artificial Sequence
  MKO10005202_A_Armc5
  gRNA
ccatcaaccgggctcggctt

SEQ ID NO: 5203 - DNA, 20 bp, Artificial Sequence
  MKO10005203_A_Armc5
  gRNA
ccgaagccgagcccggttga

SEQ ID NO: 5204 - DNA, 20 bp, Artificial Sequence
  MKO10005204_A_Armc5
  gRNA
cccacgcgcacttcgtatct

SEQ ID NO: 5205 - DNA, 20 bp, Artificial Sequence
  MKO10005205_A_Armc6
  gRNA
cgcaggcaacgacgacgtaa

SEQ ID NO: 5206 - DNA, 20 bp, Artificial Sequence
  MKO10005206_A_Armc6
  gRNA
cgtaccacctgcccggacaa

SEQ ID NO: 5207 - DNA, 20 bp, Artificial Sequence
  MKO10005207_A_Armc6
  gRNA
gcatggccagcacgccgatg

SEQ ID NO: 5208 - DNA, 20 bp, Artificial Sequence
  MKO10005208_A_Armc7
  gRNA
agtagcctagccgcccgacg

SEQ ID NO: 5209 - DNA, 20 bp, Artificial Sequence
  MKO10005209_A_Armc7
  gRNA
gcccgggtcataagcgaagt

SEQ ID NO: 5210 - DNA, 20 bp, Artificial Sequence
  MKO10005210_A_Armc7
  gRNA
ccaggacttgtagttgccgt

SEQ ID NO: 5211 - DNA, 20 bp, Artificial Sequence
  MKO10005211_A_Armc8
  gRNA
gaaccgctcctagaacgatg

SEQ ID NO: 5212 - DNA, 20 bp, Artificial Sequence
  MKO10005212_A_Armc8
  gRNA
gcagtcgccactatgttgac

SEQ ID NO: 5213 - DNA, 20 bp, Artificial Sequence
  MKO10005213_A_Armc8
  gRNA
aaagccaacctcatcgttct

SEQ ID NO: 5214 - DNA, 20 bp, Artificial Sequence
  MKO10005214_A_Armc9
  gRNA
ccccttcgtgcccaatccga

SEQ ID NO: 5215 - DNA, 20 bp, Artificial Sequence
  MKO10005215_A_Armc9
  gRNA
tacctggattacgagcgact

SEQ ID NO: 5216 - DNA, 20 bp, Artificial Sequence
  MKO10005216_A_Armc9
  gRNA
gaccatcggattgggcacga

SEQ ID NO: 5217 - DNA, 20 bp, Artificial Sequence
  MKO10005217_A_Armcx1
  gRNA
gctgtacgatgggtcgcacc

SEQ ID NO: 5218 - DNA, 20 bp, Artificial Sequence
  MKO10005218_A_Armcx1
  gRNA
ctgaacttgcccttgcgtac

SEQ ID NO: 5219 - DNA, 20 bp, Artificial Sequence
  MKO10005219_A_Armcx1
  gRNA
tcaaaacgccatccgtgagc

SEQ ID NO: 5220 - DNA, 20 bp, Artificial Sequence
  MKO10005220_A_Armcx2
  gRNA
aactaaatgatgacggcacc

SEQ ID NO: 5221 - DNA, 20 bp, Artificial Sequence
  MKO10005221_A_Armcx2
  gRNA
aggggaggtatcaccgtccc

SEQ ID NO: 5222 - DNA, 20 bp, Artificial Sequence
  MKO10005222_A_Armcx2
  gRNA
gctggattcacaattgacct

SEQ ID NO: 5223 - DNA, 20 bp, Artificial Sequence
  MKO10005223_A_Armcx3
  gRNA
cagggaccagagccagagcc

SEQ ID NO: 5224 - DNA, 20 bp, Artificial Sequence
  MKO10005224_A_Armcx3
  gRNA
cctggctcttgccctggctc

SEQ ID NO: 5225 - DNA, 20 bp, Artificial Sequence
  MKO10005225_A_Armcx3
  gRNA
ccaagttattcctgactctt

SEQ ID NO: 5226 - DNA, 20 bp, Artificial Sequence
  MKO10005226_A_Armcx4
  gRNA
gactggggcggctaatgaca

SEQ ID NO: 5227 - DNA, 20 bp, Artificial Sequence
  MKO10005227_A_Armcx4
  gRNA
atttagtacagccactagtc

SEQ ID NO: 5228 - DNA, 20 bp, Artificial Sequence
  MKO10005228_A_Armcx4
  gRNA
cacagtctccgtctcgattc

SEQ ID NO: 5229 - DNA, 20 bp, Artificial Sequence
  MKO10005229_A_Armcx5
  gRNA
tcagaccactaaagccgtta

SEQ ID NO: 5230 - DNA, 20 bp, Artificial Sequence
  MKO10005230_A_Armcx5
  gRNA
caagatattgttcacgatgt

SEQ ID NO: 5231 - DNA, 20 bp, Artificial Sequence
  MKO10005231_A_Armcx5
  gRNA
atctctcaagggcgctgcca

SEQ ID NO: 5232 - DNA, 20 bp, Artificial Sequence
  MKO10005232_A_Armcx6
  gRNA
ctataatcatgggtcgggcc

SEQ ID NO: 5233 - DNA, 20 bp, Artificial Sequence
  MKO10005233_A_Armcx6
  gRNA
accagctccaatcatgagtc

SEQ ID NO: 5234 - DNA, 20 bp, Artificial Sequence
  MKO10005234_A_Armcx6
  gRNA
ggccagatgtttactgatat

SEQ ID NO: 5235 - DNA, 20 bp, Artificial Sequence
  MKO10005235_A_Arnt2
  gRNA
cggatcgacgctttcctcct

SEQ ID NO: 5236 - DNA, 20 bp, Artificial Sequence
  MKO10005236_A_Arnt2
  gRNA
atggacttcgatgacgaaga

SEQ ID NO: 5237 - DNA, 20 bp, Artificial Sequence
  MKO10005237_A_Arnt2
  gRNA
tgggagcacgctttatgagc

SEQ ID NO: 5238 - DNA, 20 bp, Artificial Sequence
  MKO10005238_A_Arntl2
  gRNA
caaaacactgcgttatgatc

SEQ ID NO: 5239 - DNA, 20 bp, Artificial Sequence
  MKO10005239_A_Arntl2
  gRNA
ctgatcataacgcagtgttt

SEQ ID NO: 5240 - DNA, 20 bp, Artificial Sequence
  MKO10005240_A_Arntl2
  gRNA
tggacaagctcagcgtcttg

SEQ ID NO: 5241 - DNA, 20 bp, Artificial Sequence
  MKO10005241_A_Arntl
  gRNA
tagataaactcaccgtgcta

SEQ ID NO: 5242 - DNA, 20 bp, Artificial Sequence
  MKO10005242_A_Arntl
  gRNA
ctgcacgtaccctgagaatt

SEQ ID NO: 5243 - DNA, 20 bp, Artificial Sequence
  MKO10005243_A_Arntl
  gRNA
ttactaggtaccttccatga

SEQ ID NO: 5244 - DNA, 20 bp, Artificial Sequence
  MKO10005244_A_Arnt
  gRNA
gttagctgtagtcgccgcca

SEQ ID NO: 5245 - DNA, 20 bp, Artificial Sequence
  MKO10005245_A_Arnt
  gRNA
gcggcgactacagctaaccc

SEQ ID NO: 5246 - DNA, 20 bp, Artificial Sequence
  MKO10005246_A_Arnt
  gRNA
gacatcagatgtaccatcgc

SEQ ID NO: 5247 - DNA, 20 bp, Artificial Sequence
  MKO10005247_A_Arpc1a
  gRNA
gacgaaagcgcacgagctga

SEQ ID NO: 5248 - DNA, 20 bp, Artificial Sequence
  MKO10005248_A_Arpc1a
  gRNA
cagaccgcaacgcctatgtc

SEQ ID NO: 5249 - DNA, 20 bp, Artificial Sequence
  MKO10005249_A_Arpc1a
  gRNA
gaccccatgcacccagccgc

SEQ ID NO: 5250 - DNA, 20 bp, Artificial Sequence
  MKO10005250_A_Arpc1b
  gRNA
tgaccctgcaggcatcgact

SEQ ID NO: 5251 - DNA, 20 bp, Artificial Sequence
  MKO10005251_A_Arpc1b
  gRNA
caatgagaacaagttcgccg

SEQ ID NO: 5252 - DNA, 20 bp, Artificial Sequence
  MKO10005252_A_Arpc1b
  gRNA
cacgagctgaaggagcacaa

SEQ ID NO: 5253 - DNA, 20 bp, Artificial Sequence
  MKO10005253_A_Arpc2
  gRNA
cagttgttaaagagagtgta

SEQ ID NO: 5254 - DNA, 20 bp, Artificial Sequence
  MKO10005254_A_Arpc2
  gRNA
ctgatgcacaatagaatcct

SEQ ID NO: 5255 - DNA, 20 bp, Artificial Sequence
  MKO10005255_A_Arpc2
  gRNA
ttcttggtaaatccagaacc

SEQ ID NO: 5256 - DNA, 20 bp, Artificial Sequence
  MKO10005256_A_Arpc3
  gRNA
cagagacttactctcgcgag

SEQ ID NO: 5257 - DNA, 20 bp, Artificial Sequence
  MKO10005257_A_Arpc3
  gRNA
ttggcataaatggcgttgag

SEQ ID NO: 5258 - DNA, 20 bp, Artificial Sequence
  MKO10005258_A_Arpc3
  gRNA
caccaagctcatcggtaaca

SEQ ID NO: 5259 - DNA, 20 bp, Artificial Sequence
  MKO10005259_A_Arpc4
  gRNA
ccgggctcgtatcgtagctg

SEQ ID NO: 5260 - DNA, 20 bp, Artificial Sequence
  MKO10005260_A_Arpc4
  gRNA
gtttgtacatctgctccgtg

SEQ ID NO: 5261 - DNA, 20 bp, Artificial Sequence
  MKO10005261_A_Arpc4
  gRNA
cctccacaggtttccttcga

SEQ ID NO: 5262 - DNA, 20 bp, Artificial Sequence
  MKO10005262_A_Arpc5l
  gRNA
attcgtagacgagcacgaag

SEQ ID NO: 5263 - DNA, 20 bp, Artificial Sequence
  MKO10005263_A_Arpc5l
  gRNA
gtcctcacgcttccgccgcg

SEQ ID NO: 5264 - DNA, 20 bp, Artificial Sequence
  MKO10005264_A_Arpc5l
  gRNA
gcctagtcctcctacagcta

SEQ ID NO: 5265 - DNA, 20 bp, Artificial Sequence
  MKO10005265_A_Arpc5
  gRNA
tgcagtcaaaactcgaacaa

SEQ ID NO: 5266 - DNA, 20 bp, Artificial Sequence
  MKO10005266_A_Arpc5
  gRNA
tgaaactcaccttcactgcc

SEQ ID NO: 5267 - DNA, 20 bp, Artificial Sequence
  MKO10005267_A_Arpc5
  gRNA
tcaagacgatgctgcctgca

SEQ ID NO: 5268 - DNA, 20 bp, Artificial Sequence
  MKO10005268_A_Arpp19
  gRNA
aggaagtgctcgggcgtcgc

SEQ ID NO: 5269 - DNA, 20 bp, Artificial Sequence
  MKO10005269_A_Arpp19
  gRNA
ggcgcgagccgcaacctttg

SEQ ID NO: 5270 - DNA, 20 bp, Artificial Sequence
  MKO10005270_A_Arpp19
  gRNA
catgtccgcggaagtccccg

SEQ ID NO: 5271 - DNA, 20 bp, Artificial Sequence
  MKO10005271_A_Arpp21
  gRNA
taccatgcagcggcgactgg

SEQ ID NO: 5272 - DNA, 20 bp, Artificial Sequence
  MKO10005272_A_Arpp21
  gRNA
aggactgactccgaccatac

SEQ ID NO: 5273 - DNA, 20 bp, Artificial Sequence
  MKO10005273_A_Arpp21
  gRNA
gaagagtcttcagctagatc

SEQ ID NO: 5274 - DNA, 20 bp, Artificial Sequence
  MKO10005274_A_Arr3
  gRNA
ccacgaagtctcgtttcccc

SEQ ID NO: 5275 - DNA, 20 bp, Artificial Sequence
  MKO10005275_A_Arr3
  gRNA
acgagacttcgtggatgatg

SEQ ID NO: 5276 - DNA, 20 bp, Artificial Sequence
  MKO10005276_A_Arr3
  gRNA
gttgaccccgagtacttaga

SEQ ID NO: 5277 - DNA, 20 bp, Artificial Sequence
  MKO10005277_A_Arrb1
  gRNA
actcacccacggggtccacg

SEQ ID NO: 5278 - DNA, 20 bp, Artificial Sequence
  MKO10005278_A_Arrb1
  gRNA
ccgcggaccatgggcgacaa

SEQ ID NO: 5279 - DNA, 20 bp, Artificial Sequence
  MKO10005279_A_Arrb1
  gRNA
ccgtgtccctttgtcgccca

SEQ ID NO: 5280 - DNA, 20 bp, Artificial Sequence
  MKO10005280_A_Arrb2
  gRNA
gaagtcgagccctaactgca

SEQ ID NO: 5281 - DNA, 20 bp, Artificial Sequence
  MKO10005281_A_Arrb2
  gRNA
gtcgcgcttgcccaagtaca

SEQ ID NO: 5282 - DNA, 20 bp, Artificial Sequence
  MKO10005282_A_Arrb2
  gRNA
tctgttcatcgccacctacc

SEQ ID NO: 5283 - DNA, 20 bp, Artificial Sequence
  MKO10005283_A_Arrdc1
  gRNA
ccccaggaccgtagacgacg

SEQ ID NO: 5284 - DNA, 20 bp, Artificial Sequence
  MKO10005284_A_Arrdc1
  gRNA
gccgcgtcgtctacggtcct

SEQ ID NO: 5285 - DNA, 20 bp, Artificial Sequence
  MKO10005285_A_Arrdc1
  gRNA
tgtcgatggacgccctcacc

SEQ ID NO: 5286 - DNA, 20 bp, Artificial Sequence
  MKO10005286_A_Arrdc2
  gRNA
gcccgaatcgccgtgcgctg

SEQ ID NO: 5287 - DNA, 20 bp, Artificial Sequence
  MKO10005287_A_Arrdc2
  gRNA
tcgtgcgctgcgtatccccc

SEQ ID NO: 5288 - DNA, 20 bp, Artificial Sequence
  MKO10005288_A_Arrdc2
  gRNA
gatatcgccacgcttcccgc

SEQ ID NO: 5289 - DNA, 20 bp, Artificial Sequence
  MKO10005289_A_Arrdc3
  gRNA
ggcggccatttaccagacgc

SEQ ID NO: 5290 - DNA, 20 bp, Artificial Sequence
  MKO10005290_A_Arrdc3
  gRNA
cgactgtagtataatccgag

SEQ ID NO: 5291 - DNA, 20 bp, Artificial Sequence
  MKO10005291_A_Arrdc3
  gRNA
ccacttgctacctcattcga

SEQ ID NO: 5292 - DNA, 20 bp, Artificial Sequence
  MKO10005292_A_Arrdc4
  gRNA
ctactcaagcggcgagacag

SEQ ID NO: 5293 - DNA, 20 bp, Artificial Sequence
  MKO10005293_A_Arrdc4
  gRNA
cgcagtccgcgcagggccac

SEQ ID NO: 5294 - DNA, 20 bp, Artificial Sequence
  MKO10005294_A_Arrdc4
  gRNA
tgtcaacacaccgcccttat

SEQ ID NO: 5295 - DNA, 20 bp, Artificial Sequence
  MKO10005295_A_Arrdc5
  gRNA
cggctctatcatagacgggc

SEQ ID NO: 5296 - DNA, 20 bp, Artificial Sequence
  MKO10005296_A_Arrdc5
  gRNA
gcttcacgccaagtgccgag

SEQ ID NO: 5297 - DNA, 20 bp, Artificial Sequence
  MKO10005297_A_Arrdc5
  gRNA
gccccaagatgcggtctacc

SEQ ID NO: 5298 - DNA, 20 bp, Artificial Sequence
  MKO10005298_A_Arsa
  gRNA
agaacggtcggccctggcgc

SEQ ID NO: 5299 - DNA, 20 bp, Artificial Sequence
  MKO10005299_A_Arsa
  gRNA
gttcgatcaggcatgtaccc

SEQ ID NO: 5300 - DNA, 20 bp, Artificial Sequence
  MKO10005300_A_Arsa
  gRNA
ttggacatgcgcatcaactc

SEQ ID NO: 5301 - DNA, 20 bp, Artificial Sequence
  MKO10005301_A_Arsb
  gRNA
gaatgtctgccgacacgccg

SEQ ID NO: 5302 - DNA, 20 bp, Artificial Sequence
  MKO10005302_A_Arsb
  gRNA
cccacactcgtagatctggc

SEQ ID NO: 5303 - DNA, 20 bp, Artificial Sequence
  MKO10005303_A_Arsb
  gRNA
catccgaggaacgggcttcg

SEQ ID NO: 5304 - DNA, 20 bp, Artificial Sequence
  MKO10005304_A_Arsg
  gRNA
caatgagccctcagaccggt

SEQ ID NO: 5305 - DNA, 20 bp, Artificial Sequence
  MKO10005305_A_Arsg
  gRNA
tcactagcaccgccttgtta

SEQ ID NO: 5306 - DNA, 20 bp, Artificial Sequence
  MKO10005306_A_Arsg
  gRNA
catcccgtccatcaaatttc

SEQ ID NO: 5307 - DNA, 20 bp, Artificial Sequence
  MKO10005307_A_Arsi
  gRNA
cctataccgctaccgcacga

SEQ ID NO: 5308 - DNA, 20 bp, Artificial Sequence
  MKO10005308_A_Arsi
  gRNA
aagtacccttgcgtcctcga

SEQ ID NO: 5309 - DNA, 20 bp, Artificial Sequence
  MKO10005309_A_Arsi
  gRNA
ggatatcgagaccccaacgc

SEQ ID NO: 5310 - DNA, 20 bp, Artificial Sequence
  MKO10005310_A_Arsj
  gRNA
agcctatttgcacaccgtcc

SEQ ID NO: 5311 - DNA, 20 bp, Artificial Sequence
  MKO10005311_A_Arsj
  gRNA
tcacggctgatccgtatgag

SEQ ID NO: 5312 - DNA, 20 bp, Artificial Sequence
  MKO10005312_A_Arsj
  gRNA
ggtcggctattcaacccata

SEQ ID NO: 5313 - DNA, 20 bp, Artificial Sequence
  MKO10005313_A_Arsk
  gRNA
gcattcttgctccgacaaga

SEQ ID NO: 5314 - DNA, 20 bp, Artificial Sequence
  MKO10005314_A_Arsk
  gRNA
ggaagactaacatttcaacc

SEQ ID NO: 5315 - DNA, 20 bp, Artificial Sequence
  MKO10005315_A_Arsk
  gRNA
acattcatacctgcacgtga

SEQ ID NO: 5316 - DNA, 20 bp, Artificial Sequence
  MKO10005316_A_Art1
  gRNA
acgcatctacctccgcgctc

SEQ ID NO: 5317 - DNA, 20 bp, Artificial Sequence
  MKO10005317_A_Art1
  gRNA
ctccggagccaccgatctcg

SEQ ID NO: 5318 - DNA, 20 bp, Artificial Sequence
  MKO10005318_A_Art1
  gRNA
gtcaacatcgggtaagttgc

SEQ ID NO: 5319 - DNA, 20 bp, Artificial Sequence
  MKO10005319_A_Art2a-ps
  gRNA
tttaccgaggtactaatgtc

SEQ ID NO: 5320 - DNA, 20 bp, Artificial Sequence
  MKO10005320_A_Art2a-ps
  gRNA
cttacctaagctgctaacgt

SEQ ID NO: 5321 - DNA, 20 bp, Artificial Sequence
  MKO10005321_A_Art2a-ps
  gRNA
atttcaagttcttcctaact

SEQ ID NO: 5322 - DNA, 20 bp, Artificial Sequence
  MKO10005322_A_Art2b
  gRNA
caaaaacagtacgagttatc

SEQ ID NO: 5323 - DNA, 20 bp, Artificial Sequence
  MKO10005323_A_Art2b
  gRNA
attaacacctcctcttcacg

SEQ ID NO: 5324 - DNA, 20 bp, Artificial Sequence
  MKO10005324_A_Art2b
  gRNA
gctgggttagccaccaagtt

SEQ ID NO: 5325 - DNA, 20 bp, Artificial Sequence
  MKO10005325_A_Art3
  gRNA
gaaaattgtatcgcgaacgc

SEQ ID NO: 5326 - DNA, 20 bp, Artificial Sequence
  MKO10005326_A_Art3
  gRNA
ctcttgagcctcattcacgt

SEQ ID NO: 5327 - DNA, 20 bp, Artificial Sequence
  MKO10005327_A_Art3
  gRNA
tactacgagtgcgcattcct

SEQ ID NO: 5328 - DNA, 20 bp, Artificial Sequence
  MKO10005328_A_Art4
  gRNA
aagtccacgtcgaccttaag

SEQ ID NO: 5329 - DNA, 20 bp, Artificial Sequence
  MKO10005329_A_Art4
  gRNA
gaggaactggccgaatcgaa

SEQ ID NO: 5330 - DNA, 20 bp, Artificial Sequence
  MKO10005330_A_Art4
  gRNA
cgtccaaaagcagagcgcaa

SEQ ID NO: 5331 - DNA, 20 bp, Artificial Sequence
  MKO10005331_A_Art5
  gRNA
ccagcacggagtagcgatta

SEQ ID NO: 5332 - DNA, 20 bp, Artificial Sequence
  MKO10005332_A_Art5
  gRNA
ctgaaccaggccgtacggac

SEQ ID NO: 5333 - DNA, 20 bp, Artificial Sequence
  MKO10005333_A_Art5
  gRNA
gcctcagcttgcacgccctc

SEQ ID NO: 5334 - DNA, 20 bp, Artificial Sequence
  MKO10005334_A_Artn
  gRNA
cggtgagggaccgtcgcgag

SEQ ID NO: 5335 - DNA, 20 bp, Artificial Sequence
  MKO10005335_A_Artn
  gRNA
gcggcagccgcgcgcatctg

SEQ ID NO: 5336 - DNA, 20 bp, Artificial Sequence
  MKO10005336_A_Artn
  gRNA
accggtcttggcgcccccca

SEQ ID NO: 5337 - DNA, 20 bp, Artificial Sequence
  MKO10005337_A_Arv1
  gRNA
tgctaatcccggccgtcatc

SEQ ID NO: 5338 - DNA, 20 bp, Artificial Sequence
  MKO10005338_A_Arv1
  gRNA
cgtaccggatcacgtcatcg

SEQ ID NO: 5339 - DNA, 20 bp, Artificial Sequence
  MKO10005339_A_Arv1
  gRNA
agccacttagcacgaccaac

SEQ ID NO: 5340 - DNA, 20 bp, Artificial Sequence
  MKO10005340_A_Arvcf
  gRNA
tgtcacgggccgcccgcagt

SEQ ID NO: 5341 - DNA, 20 bp, Artificial Sequence
  MKO10005341_A_Arvcf
  gRNA
cggggcttcgagtcttcgtt

SEQ ID NO: 5342 - DNA, 20 bp, Artificial Sequence
  MKO10005342_A_Arvcf
  gRNA
tcatcgtgccccattccggc

SEQ ID NO: 5343 - DNA, 20 bp, Artificial Sequence
  MKO10005343_A_Arxes1
  gRNA
gagaattcttcaaaaagtcg

SEQ ID NO: 5344 - DNA, 20 bp, Artificial Sequence
  MKO10005344_A_Arxes1
  gRNA
agatgaactccctgctgtcc

SEQ ID NO: 5345 - DNA, 20 bp, Artificial Sequence
  MKO10005345_A_Arxes1
  gRNA
gcccaggtcgctcttctttc

SEQ ID NO: 5346 - DNA, 20 bp, Artificial Sequence
  MKO10005346_A_Arxes2
  gRNA
gagaattcttcaaaaagtcg

SEQ ID NO: 5347 - DNA, 20 bp, Artificial Sequence
  MKO10005347_A_Arxes2
  gRNA
agatgaactccctgctgtcc

SEQ ID NO: 5348 - DNA, 20 bp, Artificial Sequence
  MKO10005348_A_Arxes2
  gRNA
gcccaggtcgctcttctttc

SEQ ID NO: 5349 - DNA, 20 bp, Artificial Sequence
  MKO10005349_A_Arx
  gRNA
agcaagtcgtaccgcgagaa

SEQ ID NO: 5350 - DNA, 20 bp, Artificial Sequence
  MKO10005350_A_Arx
  gRNA
tgacgcgcgtctgtctgccg

SEQ ID NO: 5351 - DNA, 20 bp, Artificial Sequence
  MKO10005351_A_Arx
  gRNA
cgaagggcgccccgttctcg

SEQ ID NO: 5352 - DNA, 20 bp, Artificial Sequence
  MKO10005352_A_Ar
  gRNA
aatactgaatgaccgccatc

SEQ ID NO: 5353 - DNA, 20 bp, Artificial Sequence
  MKO10005353_A_Ar
  gRNA
gcctatctttcttaacgtcc

SEQ ID NO: 5354 - DNA, 20 bp, Artificial Sequence
  MKO10005354_A_Ar
  gRNA
aggcttccgcaacttgcatg

SEQ ID NO: 5355 - DNA, 20 bp, Artificial Sequence
  MKO10005355_A_As3mt
  gRNA
tacacgaagacgttagttcg

SEQ ID NO: 5356 - DNA, 20 bp, Artificial Sequence
  MKO10005356_A_As3mt
  gRNA
ccctcacctgaacgtccttg

SEQ ID NO: 5357 - DNA, 20 bp, Artificial Sequence
  MKO10005357_A_As3mt
  gRNA
gcgtgacacaagcattagtc

SEQ ID NO: 5358 - DNA, 20 bp, Artificial Sequence
  MKO10005358_A_Asah1
  gRNA
tgtattcactaaactcgtta

SEQ ID NO: 5359 - DNA, 20 bp, Artificial Sequence
  MKO10005359_A_Asah1
  gRNA
ctcactcacgttggtccaga

SEQ ID NO: 5360 - DNA, 20 bp, Artificial Sequence
  MKO10005360_A_Asah1
  gRNA
aaatcaacgtatcctccttc

SEQ ID NO: 5361 - DNA, 20 bp, Artificial Sequence
  MKO10005361_A_Asah2
  gRNA
ccggttgctgaatccctcgc

SEQ ID NO: 5362 - DNA, 20 bp, Artificial Sequence
  MKO10005362_A_Asah2
  gRNA
actctatatactcgccagcg

SEQ ID NO: 5363 - DNA, 20 bp, Artificial Sequence
  MKO10005363_A_Asah2
  gRNA
gccattcgatttgacccatc

SEQ ID NO: 5364 - DNA, 20 bp, Artificial Sequence
  MKO10005364_A_Asap1
  gRNA
gttcatcgccgagaccaccg

SEQ ID NO: 5365 - DNA, 20 bp, Artificial Sequence
  MKO10005365_A_Asap1
  gRNA
ctcggcgatgaactcggaca

SEQ ID NO: 5366 - DNA, 20 bp, Artificial Sequence
  MKO10005366_A_Asap1
  gRNA
gtccacgctgctgaaaaatc

SEQ ID NO: 5367 - DNA, 20 bp, Artificial Sequence
  MKO10005367_A_Asap2
  gRNA
gacggcactcttcaaaaacc

SEQ ID NO: 5368 - DNA, 20 bp, Artificial Sequence
  MKO10005368_A_Asap2
  gRNA
agaaacgcgcttcctaagtc

SEQ ID NO: 5369 - DNA, 20 bp, Artificial Sequence
  MKO10005369_A_Asap2
  gRNA
caacatcatctcgttccctt

SEQ ID NO: 5370 - DNA, 20 bp, Artificial Sequence
  MKO10005370_A_Asap3
  gRNA
gttcgagctatccacagctc

SEQ ID NO: 5371 - DNA, 20 bp, Artificial Sequence
  MKO10005371_A_Asap3
  gRNA
caacatcgtctccttcccgc

SEQ ID NO: 5372 - DNA, 20 bp, Artificial Sequence
  MKO10005372_A_Asap3
  gRNA
gtctgatgaaggggcatcta

SEQ ID NO: 5373 - DNA, 20 bp, Artificial Sequence
  MKO10005373_A_Asb10
  gRNA
atcactcactcgaggatacc

SEQ ID NO: 5374 - DNA, 20 bp, Artificial Sequence
  MKO10005374_A_Asb10
  gRNA
cgtgtgtcccccgtagtcca

SEQ ID NO: 5375 - DNA, 20 bp, Artificial Sequence
  MKO10005375_A_Asb10
  gRNA
aacgctaatgccatggacta

SEQ ID NO: 5376 - DNA, 20 bp, Artificial Sequence
  MKO10005376_A_Asb11
  gRNA
taagagccagtaagcgtccc

SEQ ID NO: 5377 - DNA, 20 bp, Artificial Sequence
  MKO10005377_A_Asb11
  gRNA
tgatcgatccccactccatg

SEQ ID NO: 5378 - DNA, 20 bp, Artificial Sequence
  MKO10005378_A_Asb11
  gRNA
tacctcgcttcactgcttcg

SEQ ID NO: 5379 - DNA, 20 bp, Artificial Sequence
  MKO10005379_A_Asb12
  gRNA
acctggaacacccttgcgtt

SEQ ID NO: 5380 - DNA, 20 bp, Artificial Sequence
  MKO10005380_A_Asb12
  gRNA
gctatatttgacgcccagac

SEQ ID NO: 5381 - DNA, 20 bp, Artificial Sequence
  MKO10005381_A_Asb12
  gRNA
gggatctgcggataactaaa

SEQ ID NO: 5382 - DNA, 20 bp, Artificial Sequence
  MKO10005382_A_Asb13
  gRNA
agggttgactttcgccccat

SEQ ID NO: 5383 - DNA, 20 bp, Artificial Sequence
  MKO10005383_A_Asb13
  gRNA
cacagcatccccgctacacg

SEQ ID NO: 5384 - DNA, 20 bp, Artificial Sequence
  MKO10005384_A_Asb13
  gRNA
gctgctccacgtgtagtccg

SEQ ID NO: 5385 - DNA, 20 bp, Artificial Sequence
  MKO10005385_A_Asb14
  gRNA
agacattacctcgccgcttc

SEQ ID NO: 5386 - DNA, 20 bp, Artificial Sequence
  MKO10005386_A_Asb14
  gRNA
gatccatacgaagcttggat

SEQ ID NO: 5387 - DNA, 20 bp, Artificial Sequence
  MKO10005387_A_Asb14
  gRNA
agagtacttaactgtctcga

SEQ ID NO: 5388 - DNA, 20 bp, Artificial Sequence
  MKO10005388_A_Asb15
  gRNA
ctccgaatccgtctctcaag

SEQ ID NO: 5389 - DNA, 20 bp, Artificial Sequence
  MKO10005389_A_Asb15
  gRNA
gtcaagacgttgctagacaa

SEQ ID NO: 5390 - DNA, 20 bp, Artificial Sequence
  MKO10005390_A_Asb15
  gRNA
gtccacttgagagacggatt

SEQ ID NO: 5391 - DNA, 20 bp, Artificial Sequence
  MKO10005391_A_Asb16
  gRNA
gcgctaaacgctgcgtgcgc

SEQ ID NO: 5392 - DNA, 20 bp, Artificial Sequence
  MKO10005392_A_Asb16
  gRNA
gctgagcttgacgcccgaat

SEQ ID NO: 5393 - DNA, 20 bp, Artificial Sequence
  MKO10005393_A_Asb16
  gRNA
gcttgcagcgcgcagtccat

SEQ ID NO: 5394 - DNA, 20 bp, Artificial Sequence
  MKO10005394_A_Asb17
  gRNA
cccttcgagagtgagaataa

SEQ ID NO: 5395 - DNA, 20 bp, Artificial Sequence
  MKO10005395_A_Asb17
  gRNA
cgtccaagtcaacatacctc

SEQ ID NO: 5396 - DNA, 20 bp, Artificial Sequence
  MKO10005396_A_Asb17
  gRNA
gtctgagccacgtagagtag

SEQ ID NO: 5397 - DNA, 20 bp, Artificial Sequence
  MKO10005397_A_Asb18
  gRNA
gacgcgggcgcgctcgacta

SEQ ID NO: 5398 - DNA, 20 bp, Artificial Sequence
  MKO10005398_A_Asb18
  gRNA
atcacggatcccgctccgtg

SEQ ID NO: 5399 - DNA, 20 bp, Artificial Sequence
  MKO10005399_A_Asb18
  gRNA
cgcgtcttacccaagcgagg

SEQ ID NO: 5400 - DNA, 20 bp, Artificial Sequence
  MKO10005400_A_Asb1
  gRNA
ttcacggcggctaacctcct

SEQ ID NO: 5401 - DNA, 20 bp, Artificial Sequence
  MKO10005401_A_Asb1
  gRNA
gtcgtccctacccacacgag

SEQ ID NO: 5402 - DNA, 20 bp, Artificial Sequence
  MKO10005402_A_Asb1
  gRNA
gaggttagccgccgtgaaaa

SEQ ID NO: 5403 - DNA, 20 bp, Artificial Sequence
  MKO10005403_A_Asb2
  gRNA
acgccaaccaccgctgtaac

SEQ ID NO: 5404 - DNA, 20 bp, Artificial Sequence
  MKO10005404_A_Asb2
  gRNA
ctccgcgttcttgcgctcac

SEQ ID NO: 5405 - DNA, 20 bp, Artificial Sequence
  MKO10005405_A_Asb2
  gRNA
gatcacttacgccatctggg

SEQ ID NO: 5406 - DNA, 20 bp, Artificial Sequence
  MKO10005406_A_Asb3
  gRNA
aatggatcccattctatgag

SEQ ID NO: 5407 - DNA, 20 bp, Artificial Sequence
  MKO10005407_A_Asb3
  gRNA
aattccatccactcatagaa

SEQ ID NO: 5408 - DNA, 20 bp, Artificial Sequence
  MKO10005408_A_Asb3
  gRNA
ataagattgcttcttaaaca

SEQ ID NO: 5409 - DNA, 20 bp, Artificial Sequence
  MKO10005409_A_Asb4
  gRNA
cccgttgggacgacagttga

SEQ ID NO: 5410 - DNA, 20 bp, Artificial Sequence
  MKO10005410_A_Asb4
  gRNA
ggcgttcatgctatccacga

SEQ ID NO: 5411 - DNA, 20 bp, Artificial Sequence
  MKO10005411_A_Asb4
  gRNA
cgctatccagtacgtgctga

SEQ ID NO: 5412 - DNA, 20 bp, Artificial Sequence
  MKO10005412_A_Asb5
  gRNA
aagttgtgcagaactccttt

SEQ ID NO: 5413 - DNA, 20 bp, Artificial Sequence
  MKO10005413_A_Asb5
  gRNA
ttgtgagcatgcgttgaaca

SEQ ID NO: 5414 - DNA, 20 bp, Artificial Sequence
  MKO10005414_A_Asb5
  gRNA
ctgcatgaagctgcaagtca

SEQ ID NO: 5415 - DNA, 20 bp, Artificial Sequence
  MKO10005415_A_Asb6
  gRNA
gacagctttacttcacgccc

SEQ ID NO: 5416 - DNA, 20 bp, Artificial Sequence
  MKO10005416_A_Asb6
  gRNA
acgcattgctcacgccttcc

SEQ ID NO: 5417 - DNA, 20 bp, Artificial Sequence
  MKO10005417_A_Asb6
  gRNA
tcctgttgatgtcagccccg

SEQ ID NO: 5418 - DNA, 20 bp, Artificial Sequence
  MKO10005418_A_Asb7
  gRNA
tccgattaaatccttaaccg

SEQ ID NO: 5419 - DNA, 20 bp, Artificial Sequence
  MKO10005419_A_Asb7
  gRNA
gtgatgacgtgctctgcgca

SEQ ID NO: 5420 - DNA, 20 bp, Artificial Sequence
  MKO10005420_A_Asb7
  gRNA
tcacacagtacgaaagatgt

SEQ ID NO: 5421 - DNA, 20 bp, Artificial Sequence
  MKO10005421_A_Asb8
  gRNA
gagctctacgcagtcggcgt

SEQ ID NO: 5422 - DNA, 20 bp, Artificial Sequence
  MKO10005422_A_Asb8
  gRNA
ggctacggcgcacagcatag

SEQ ID NO: 5423 - DNA, 20 bp, Artificial Sequence
  MKO10005423_A_Asb8
  gRNA
acaacgatacgccgctcagc

SEQ ID NO: 5424 - DNA, 20 bp, Artificial Sequence
  MKO10005424_A_Asb9
  gRNA
atgcagatgtagtgtctgac

SEQ ID NO: 5425 - DNA, 20 bp, Artificial Sequence
  MKO10005425_A_Asb9
  gRNA
ctagagctacctggctgata

SEQ ID NO: 5426 - DNA, 20 bp, Artificial Sequence
  MKO10005426_A_Asb9
  gRNA
ctccatgaagcatgcctcag

SEQ ID NO: 5427 - DNA, 20 bp, Artificial Sequence
  MKO10005427_A_Ascc1
  gRNA
taggggcactgacggtggcc

SEQ ID NO: 5428 - DNA, 20 bp, Artificial Sequence
  MKO10005428_A_Ascc1
  gRNA
aacacggatcgacgtgctcc

SEQ ID NO: 5429 - DNA, 20 bp, Artificial Sequence
  MKO10005429_A_Ascc1
  gRNA
gcctcctcctgaacgtgtcc

SEQ ID NO: 5430 - DNA, 20 bp, Artificial Sequence
  MKO10005430_A_Ascc2
  gRNA
tcgtagctaatgacctcgac

SEQ ID NO: 5431 - DNA, 20 bp, Artificial Sequence
  MKO10005431_A_Ascc2
  gRNA
gaggtcattagctacgaagt

SEQ ID NO: 5432 - DNA, 20 bp, Artificial Sequence
  MKO10005432_A_Ascc2
  gRNA
cctccgaatgtccacgcaca

SEQ ID NO: 5433 - DNA, 20 bp, Artificial Sequence
  MKO10005433_A_Ascc3
  gRNA
ttgaaacttatgatcgctcg

SEQ ID NO: 5434 - DNA, 20 bp, Artificial Sequence
  MKO10005434_A_Ascc3
  gRNA
gtacttaaacgcaacgttaa

SEQ ID NO: 5435 - DNA, 20 bp, Artificial Sequence
  MKO10005435_A_Ascc3
  gRNA
aaaaccactctatcgttaca

SEQ ID NO: 5436 - DNA, 20 bp, Artificial Sequence
  MKO10005436_A_Ascl1
  gRNA
aactgatgcgctgcaaacgc

SEQ ID NO: 5437 - DNA, 20 bp, Artificial Sequence
  MKO10005437_A_Ascl1
  gRNA
gcaacgagcgcgagcgcaac

SEQ ID NO: 5438 - DNA, 20 bp, Artificial Sequence
  MKO10005438_A_Ascl1
  gRNA
agggtcgtaggatccctcgt

SEQ ID NO: 5439 - DNA, 20 bp, Artificial Sequence
  MKO10005439_A_Ascl2
  gRNA
cgcctctacgtctccgtccc

SEQ ID NO: 5440 - DNA, 20 bp, Artificial Sequence
  MKO10005440_A_Ascl2
  gRNA
ctccctagggcacgcgtcgc

SEQ ID NO: 5441 - DNA, 20 bp, Artificial Sequence
  MKO10005441_A_Ascl2
  gRNA
cgagcgcaaccgcgtaaagc

SEQ ID NO: 5442 - DNA, 20 bp, Artificial Sequence
  MKO10005442_A_Ascl3
  gRNA
cgagtcaagtgtgtgaacga

SEQ ID NO: 5443 - DNA, 20 bp, Artificial Sequence
  MKO10005443_A_Ascl3
  gRNA
ccggggtctcggggcatagg

SEQ ID NO: 5444 - DNA, 20 bp, Artificial Sequence
  MKO10005444_A_Ascl3
  gRNA
ctgtgactacacctacgggc

SEQ ID NO: 5445 - DNA, 20 bp, Artificial Sequence
  MKO10005445_A_Ascl4
  gRNA
cgcgctacgtacagcgccgc

SEQ ID NO: 5446 - DNA, 20 bp, Artificial Sequence
  MKO10005446_A_Ascl4
  gRNA
gccaacgcaacgagcgcgag

SEQ ID NO: 5447 - DNA, 20 bp, Artificial Sequence
  MKO10005447_A_Ascl4
  gRNA
ccgtctccgcgcgcagtccg

SEQ ID NO: 5448 - DNA, 20 bp, Artificial Sequence
  MKO10005448_A_Ascl5
  gRNA
cgggtagtcgtaaaccccga

SEQ ID NO: 5449 - DNA, 20 bp, Artificial Sequence
  MKO10005449_A_Ascl5
  gRNA
tacgttgctcaagggttcgg

SEQ ID NO: 5450 - DNA, 20 bp, Artificial Sequence
  MKO10005450_A_Ascl5
  gRNA
cgactccaaaaaaggcgacg

SEQ ID NO: 5451 - DNA, 20 bp, Artificial Sequence
  MKO10005451_A_Asf1a
  gRNA
ctgattacttgcacctaccg

SEQ ID NO: 5452 - DNA, 20 bp, Artificial Sequence
  MKO10005452_A_Asf1a
  gRNA
gatcaccttcgagtgcatcg

SEQ ID NO: 5453 - DNA, 20 bp, Artificial Sequence
  MKO10005453_A_Asf1a
  gRNA
caggtcctcgatgcactcga

SEQ ID NO: 5454 - DNA, 20 bp, Artificial Sequence
  MKO10005454_A_Asf1b
  gRNA
cgcggtgatggccaaggtgt

SEQ ID NO: 5455 - DNA, 20 bp, Artificial Sequence
  MKO10005455_A_Asf1b
  gRNA
cacattcagcaccgacacct

SEQ ID NO: 5456 - DNA, 20 bp, Artificial Sequence
  MKO10005456_A_Asf1b
  gRNA
ggtgggttctctcgaagctc

SEQ ID NO: 5457 - DNA, 20 bp, Artificial Sequence
  MKO10005457_A_Asgr1
  gRNA
cttcacgtgcagtagcaaac

SEQ ID NO: 5458 - DNA, 20 bp, Artificial Sequence
  MKO10005458_A_Asgr1
  gRNA
gcgaagcttgagctgccaga

SEQ ID NO: 5459 - DNA, 20 bp, Artificial Sequence
  MKO10005459_A_Asgr1
  gRNA
gaagttagtggagtcgaagc

SEQ ID NO: 5460 - DNA, 20 bp, Artificial Sequence
  MKO10005460_A_Asgr2
  gRNA
tcagggttcgcagatccatt

SEQ ID NO: 5461 - DNA, 20 bp, Artificial Sequence
  MKO10005461_A_Asgr2
  gRNA
gcgaaccctgacctgtcagc

SEQ ID NO: 5462 - DNA, 20 bp, Artificial Sequence
  MKO10005462_A_Asgr2
  gRNA
cttcaacatcctcctgttgg

SEQ ID NO: 5463 - DNA, 20 bp, Artificial Sequence
  MKO10005463_A_Ash1l
  gRNA
gggcatttccgaggtcgacc

SEQ ID NO: 5464 - DNA, 20 bp, Artificial Sequence
  MKO10005464_A_Ash1l
  gRNA
agccctgttagtagtgacgc

SEQ ID NO: 5465 - DNA, 20 bp, Artificial Sequence
  MKO10005465_A_Ash1l
  gRNA
ttaggacttggcaccgtagt

SEQ ID NO: 5466 - DNA, 20 bp, Artificial Sequence
  MKO10005466_A_Ash2l
  gRNA
tggttcaccgctgacacctt

SEQ ID NO: 5467 - DNA, 20 bp, Artificial Sequence
  MKO10005467_A_Ash2l
  gRNA
ctgccacgtcaaattcgcca

SEQ ID NO: 5468 - DNA, 20 bp, Artificial Sequence
  MKO10005468_A_Ash2l
  gRNA
gacgtggcagtctcgaacac

SEQ ID NO: 5469 - DNA, 20 bp, Artificial Sequence
  MKO10005469_A_Asic1
  gRNA
gatgagacatcgttcgaagc

SEQ ID NO: 5470 - DNA, 20 bp, Artificial Sequence
  MKO10005470_A_Asic1
  gRNA
gtagaactcacgcatgttga

SEQ ID NO: 5471 - DNA, 20 bp, Artificial Sequence
  MKO10005471_A_Asic1
  gRNA
gcctcctttcatcgaccagc

SEQ ID NO: 5472 - DNA, 20 bp, Artificial Sequence
  MKO10005472_A_Asic2
  gRNA
tcacatatctgcccccgccg

SEQ ID NO: 5473 - DNA, 20 bp, Artificial Sequence
  MKO10005473_A_Asic2
  gRNA
accggcactccccccacggc

SEQ ID NO: 5474 - DNA, 20 bp, Artificial Sequence
  MKO10005474_A_Asic2
  gRNA
gcccgtcccccccttgaccg

SEQ ID NO: 5475 - DNA, 20 bp, Artificial Sequence
  MKO10005475_A_Asic3
  gRNA
caatggactggagattatgc

SEQ ID NO: 5476 - DNA, 20 bp, Artificial Sequence
  MKO10005476_A_Asic3
  gRNA
tgactgcaataccgcatctg

SEQ ID NO: 5477 - DNA, 20 bp, Artificial Sequence
  MKO10005477_A_Asic3
  gRNA
cgacaccctattaagctata

SEQ ID NO: 5478 - DNA, 20 bp, Artificial Sequence
  MKO10005478_A_Asic4
  gRNA
tgcagacgagacgtcattcg

SEQ ID NO: 5479 - DNA, 20 bp, Artificial Sequence
  MKO10005479_A_Asic4
  gRNA
ctccaggtctatactcgcta

SEQ ID NO: 5480 - DNA, 20 bp, Artificial Sequence
  MKO10005480_A_Asic4
  gRNA
ccctgagctcgctttccgcc

SEQ ID NO: 5481 - DNA, 20 bp, Artificial Sequence
  MKO10005481_A_Asic5
  gRNA
gctgctcctcgacgtccatc

SEQ ID NO: 5482 - DNA, 20 bp, Artificial Sequence
  MKO10005482_A_Asic5
  gRNA
ggtgaccatccgccaactga

SEQ ID NO: 5483 - DNA, 20 bp, Artificial Sequence
  MKO10005483_A_Asic5
  gRNA
tcacctttcgaactttgttc

SEQ ID NO: 5484 - DNA, 20 bp, Artificial Sequence
  MKO10005484_A_Asl
  gRNA
tcattggaaccatggtcgac

SEQ ID NO: 5485 - DNA, 20 bp, Artificial Sequence
  MKO10005485_A_Asl
  gRNA
aggacgaagtcgcaacgacc

SEQ ID NO: 5486 - DNA, 20 bp, Artificial Sequence
  MKO10005486_A_Asl
  gRNA
taccttcaggcgccgctcgt

SEQ ID NO: 5487 - DNA, 20 bp, Artificial Sequence
  MKO10005487_A_Asmt
  gRNA
gtcgtccgcgtcgacgccca

SEQ ID NO: 5488 - DNA, 20 bp, Artificial Sequence
  MKO10005488_A_Asmt
  gRNA
gctccgcgtgttcgacgccg

SEQ ID NO: 5489 - DNA, 20 bp, Artificial Sequence
  MKO10005489_A_Asmt
  gRNA
ggcacctggcggacggcgtg

SEQ ID NO: 5490 - DNA, 20 bp, Artificial Sequence
  MKO10005490_A_Asna1
  gRNA
gctccccgacgagttcttcg

SEQ ID NO: 5491 - DNA, 20 bp, Artificial Sequence
  MKO10005491_A_Asna1
  gRNA
tctcacgtcccttcgacagc

SEQ ID NO: 5492 - DNA, 20 bp, Artificial Sequence
  MKO10005492_A_Asna1
  gRNA
tgaactgttcgctaacagat

SEQ ID NO: 5493 - DNA, 20 bp, Artificial Sequence
  MKO10005493_A_Asnsd1
  gRNA
ttggtcggcgtagcttgctt

SEQ ID NO: 5494 - DNA, 20 bp, Artificial Sequence
  MKO10005494_A_Asnsd1
  gRNA
ctgtcaacccttctcgaact

SEQ ID NO: 5495 - DNA, 20 bp, Artificial Sequence
  MKO10005495_A_Asnsd1
  gRNA
ccaaaacgagccatacaatt

SEQ ID NO: 5496 - DNA, 20 bp, Artificial Sequence
  MKO10005496_A_Asns
  gRNA
gctgtacctttctagcggcc

SEQ ID NO: 5497 - DNA, 20 bp, Artificial Sequence
  MKO10005497_A_Asns
  gRNA
gcatgccatctatgacagcg

SEQ ID NO: 5498 - DNA, 20 bp, Artificial Sequence
  MKO10005498_A_Asns
  gRNA
tcttgatagcgttgtcaaaa

SEQ ID NO: 5499 - DNA, 20 bp, Artificial Sequence
  MKO10005499_A_Aspa
  gRNA
agtgcaacccatgttagaag

SEQ ID NO: 5500 - DNA, 20 bp, Artificial Sequence
  MKO10005500_A_Aspa
  gRNA
tgacttaccaacaggatact

SEQ ID NO: 5501 - DNA, 20 bp, Artificial Sequence
  MKO10005501_A_Aspa
  gRNA
tttatagacgtcaatagaac

SEQ ID NO: 5502 - DNA, 20 bp, Artificial Sequence
  MKO10005502_A_Aspdh
  gRNA
cgtgaccctggacggatggc

SEQ ID NO: 5503 - DNA, 20 bp, Artificial Sequence
  MKO10005503_A_Aspdh
  gRNA
gtcccttgtgtcccgccttc

SEQ ID NO: 5504 - DNA, 20 bp, Artificial Sequence
  MKO10005504_A_Aspdh
  gRNA
gccctcatagagcactgtgc

SEQ ID NO: 5505 - DNA, 20 bp, Artificial Sequence
  MKO10005505_A_Aspg
  gRNA
ggccgtcactccacagtgcg

SEQ ID NO: 5506 - DNA, 20 bp, Artificial Sequence
  MKO10005506_A_Aspg
  gRNA
atgttacctgggcacccgtg

SEQ ID NO: 5507 - DNA, 20 bp, Artificial Sequence
  MKO10005507_A_Aspg
  gRNA
tggccaatacgtcatccctg

SEQ ID NO: 5508 - DNA, 20 bp, Artificial Sequence
  MKO10005508_A_Asphd1
  gRNA
tgctcgggttagatgccatc

SEQ ID NO: 5509 - DNA, 20 bp, Artificial Sequence
  MKO10005509_A_Asphd1
  gRNA
atggcatctaacccgagcat

SEQ ID NO: 5510 - DNA, 20 bp, Artificial Sequence
  MKO10005510_A_Asphd1
  gRNA
cgttctgccccagccacatt

SEQ ID NO: 5511 - DNA, 20 bp, Artificial Sequence
  MKO10005511_A_Asphd2
  gRNA
gcgcgctgcacacaccacga

SEQ ID NO: 5512 - DNA, 20 bp, Artificial Sequence
  MKO10005512_A_Asphd2
  gRNA
catcgcagtcccgcactgac

SEQ ID NO: 5513 - DNA, 20 bp, Artificial Sequence
  MKO10005513_A_Asphd2
  gRNA
atctttgctccgggacgatg

SEQ ID NO: 5514 - DNA, 20 bp, Artificial Sequence
  MKO10005514_A_Asph
  gRNA
cttccgttataacttatcag

SEQ ID NO: 5515 - DNA, 20 bp, Artificial Sequence
  MKO10005515_A_Asph
  gRNA
ggacatctgtggctgtcgtg

SEQ ID NO: 5516 - DNA, 20 bp, Artificial Sequence
  MKO10005516_A_Asph
  gRNA
gtcgattatgaagaagttct

SEQ ID NO: 5517 - DNA, 20 bp, Artificial Sequence
  MKO10005517_A_Aspm
  gRNA
gtggactcgcgtaaaaacag

SEQ ID NO: 5518 - DNA, 20 bp, Artificial Sequence
  MKO10005518_A_Aspm
  gRNA
aacttaccatttccgttacc

SEQ ID NO: 5519 - DNA, 20 bp, Artificial Sequence
  MKO10005519_A_Aspm
  gRNA
acatgttctatgacgaacgc

SEQ ID NO: 5520 - DNA, 20 bp, Artificial Sequence
  MKO10005520_A_Aspn
  gRNA
tcaaccattcgagtatcaaa

SEQ ID NO: 5521 - DNA, 20 bp, Artificial Sequence
  MKO10005521_A_Aspn
  gRNA
aggcctaccaccaactttgc

SEQ ID NO: 5522 - DNA, 20 bp, Artificial Sequence
  MKO10005522_A_Aspn
  gRNA
cattccatttgatactcgaa

SEQ ID NO: 5523 - DNA, 20 bp, Artificial Sequence
  MKO10005523_A_Asprv1
  gRNA
ttcgtcccagaacctttcac

SEQ ID NO: 5524 - DNA, 20 bp, Artificial Sequence
  MKO10005524_A_Asprv1
  gRNA
cgcaatcacgctggagagcg

SEQ ID NO: 5525 - DNA, 20 bp, Artificial Sequence
  MKO10005525_A_Asprv1
  gRNA
ggccaacgccagcgcagaag

SEQ ID NO: 5526 - DNA, 20 bp, Artificial Sequence
  MKO10005526_A_Aspscr1
  gRNA
ccctcgcggctacgggacac

SEQ ID NO: 5527 - DNA, 20 bp, Artificial Sequence
  MKO10005527_A_Aspscr1
  gRNA
gcctgtgtcccgtagccgcg

SEQ ID NO: 5528 - DNA, 20 bp, Artificial Sequence
  MKO10005528_A_Aspscr1
  gRNA
ggttcgcatcgcgttccagc

SEQ ID NO: 5529 - DNA, 20 bp, Artificial Sequence
  MKO10005529_A_Asrgl1
  gRNA
caatatcaccgtttacattc

SEQ ID NO: 5530 - DNA, 20 bp, Artificial Sequence
  MKO10005530_A_Asrgl1
  gRNA
caccacgagactcacatcga

SEQ ID NO: 5531 - DNA, 20 bp, Artificial Sequence
  MKO10005531_A_Asrgl1
  gRNA
ttggcttacgcaacctctac

SEQ ID NO: 5532 - DNA, 20 bp, Artificial Sequence
  MKO10005532_A_Ass1
  gRNA
gtctgcaggtcatcgctccc

SEQ ID NO: 5533 - DNA, 20 bp, Artificial Sequence
  MKO10005533_A_Ass1
  gRNA
ctccctttaggtgttcattg

SEQ ID NO: 5534 - DNA, 20 bp, Artificial Sequence
  MKO10005534_A_Ass1
  gRNA
tgagctcacctgctattcac

SEQ ID NO: 5535 - DNA, 20 bp, Artificial Sequence
  MKO10005535_A_Aste1
  gRNA
cggatctgggtctaccagag

SEQ ID NO: 5536 - DNA, 20 bp, Artificial Sequence
  MKO10005536_A_Aste1
  gRNA
gaggagatatcaccgagtcc

SEQ ID NO: 5537 - DNA, 20 bp, Artificial Sequence
  MKO10005537_A_Aste1
  gRNA
ccactgaacaggttgtacaa

SEQ ID NO: 5538 - DNA, 20 bp, Artificial Sequence
  MKO10005538_A_Astl
  gRNA
ttgaacgtttcacatgcatc

SEQ ID NO: 5539 - DNA, 20 bp, Artificial Sequence
  MKO10005539_A_Astl
  gRNA
cacaaagccaccaacgccct

SEQ ID NO: 5540 - DNA, 20 bp, Artificial Sequence
  MKO10005540_A_Astl
  gRNA
catgagctcatgcacgtact

SEQ ID NO: 5541 - DNA, 20 bp, Artificial Sequence
  MKO10005541_A_Astn1
  gRNA
tgatgatcctgtacactcgc

SEQ ID NO: 5542 - DNA, 20 bp, Artificial Sequence
  MKO10005542_A_Astn1
  gRNA
ccgtacctcgactgcgcctc

SEQ ID NO: 5543 - DNA, 20 bp, Artificial Sequence
  MKO10005543_A_Astn1
  gRNA
cttgcgcaatgcccgtgtgc

SEQ ID NO: 5544 - DNA, 20 bp, Artificial Sequence
  MKO10005544_A_Astn2
  gRNA
atacggtgacggtcttgagc

SEQ ID NO: 5545 - DNA, 20 bp, Artificial Sequence
  MKO10005545_A_Astn2
  gRNA
ctgttcctcaacgatctccg

SEQ ID NO: 5546 - DNA, 20 bp, Artificial Sequence
  MKO10005546_A_Astn2
  gRNA
atcttgtaccgcgatgcgcc

SEQ ID NO: 5547 - DNA, 20 bp, Artificial Sequence
  MKO10005547_A_Asun
  gRNA
gattaccgaataccagcatg

SEQ ID NO: 5548 - DNA, 20 bp, Artificial Sequence
  MKO10005548_A_Asun
  gRNA
aatgctcgaagattgtgtcc

SEQ ID NO: 5549 - DNA, 20 bp, Artificial Sequence
  MKO10005549_A_Asun
  gRNA
gtaaagtgcgagcctcatgc

SEQ ID NO: 5550 - DNA, 20 bp, Artificial Sequence
  MKO10005550_A_Asxl1
  gRNA
gccagaggactccgctgatg

SEQ ID NO: 5551 - DNA, 20 bp, Artificial Sequence
  MKO10005551_A_Asxl1
  gRNA
atggcattgaggcacgcaag

SEQ ID NO: 5552 - DNA, 20 bp, Artificial Sequence
  MKO10005552_A_Asxl1
  gRNA
tgagtgtgaaaagactaatg

SEQ ID NO: 5553 - DNA, 20 bp, Artificial Sequence
  MKO10005553_A_Asxl2
  gRNA
gtatacacgcccattctacc

SEQ ID NO: 5554 - DNA, 20 bp, Artificial Sequence
  MKO10005554_A_Asxl2
  gRNA
aatgggcgtgtatactttga

SEQ ID NO: 5555 - DNA, 20 bp, Artificial Sequence
  MKO10005555_A_Asxl2
  gRNA
gacagctctttcactccatc

SEQ ID NO: 5556 - DNA, 20 bp, Artificial Sequence
  MKO10005556_A_Asxl3
  gRNA
gagcagtcggattcgccttc

SEQ ID NO: 5557 - DNA, 20 bp, Artificial Sequence
  MKO10005557_A_Asxl3
  gRNA
tttgcactgccgtgttcgta

SEQ ID NO: 5558 - DNA, 20 bp, Artificial Sequence
  MKO10005558_A_Asxl3
  gRNA
agattgcagccttacgaaca

SEQ ID NO: 5559 - DNA, 20 bp, Artificial Sequence
  MKO10005559_A_Asz1
  gRNA
tcttatgtatgccgctagtg

SEQ ID NO: 5560 - DNA, 20 bp, Artificial Sequence
  MKO10005560_A_Asz1
  gRNA
cggagccgaagttaacgccc

SEQ ID NO: 5561 - DNA, 20 bp, Artificial Sequence
  MKO10005561_A_Asz1
  gRNA
caacctgagtatgaccgtct

SEQ ID NO: 5562 - DNA, 20 bp, Artificial Sequence
  MKO10005562_A_Atad1
  gRNA
cagaactggaacgatttcgt

SEQ ID NO: 5563 - DNA, 20 bp, Artificial Sequence
  MKO10005563_A_Atad1
  gRNA
cacttatcagtcagtgtcga

SEQ ID NO: 5564 - DNA, 20 bp, Artificial Sequence
  MKO10005564_A_Atad1
  gRNA
gaaccgacagcctgcttctt

SEQ ID NO: 5565 - DNA, 20 bp, Artificial Sequence
  MKO10005565_A_Atad2b
  gRNA
atccgacgaaaccgtcgatc

SEQ ID NO: 5566 - DNA, 20 bp, Artificial Sequence
  MKO10005566_A_Atad2b
  gRNA
tctctacttcgcctgatcga

SEQ ID NO: 5567 - DNA, 20 bp, Artificial Sequence
  MKO10005567_A_Atad2b
  gRNA
cacaagctactatgtccgtt

SEQ ID NO: 5568 - DNA, 20 bp, Artificial Sequence
  MKO10005568_A_Atad2
  gRNA
accacaacacgcgctcttta

SEQ ID NO: 5569 - DNA, 20 bp, Artificial Sequence
  MKO10005569_A_Atad2
  gRNA
taggcaatttgctcgacagc

SEQ ID NO: 5570 - DNA, 20 bp, Artificial Sequence
  MKO10005570_A_Atad2
  gRNA
ttcctcaatgagcgaataac

SEQ ID NO: 5571 - DNA, 20 bp, Artificial Sequence
  MKO10005571_A_Atad3a
  gRNA
cgatgtcctacctcgccgta

SEQ ID NO: 5572 - DNA, 20 bp, Artificial Sequence
  MKO10005572_A_Atad3a
  gRNA
gctcgctcgacagcgctatg

SEQ ID NO: 5573 - DNA, 20 bp, Artificial Sequence
  MKO10005573_A_Atad3a
  gRNA
gctgtcgagcgagcttatcc

SEQ ID NO: 5574 - DNA, 20 bp, Artificial Sequence
  MKO10005574_A_Atad5
  gRNA
ttgtacgcctttgtcgattg

SEQ ID NO: 5575 - DNA, 20 bp, Artificial Sequence
  MKO10005575_A_Atad5
  gRNA
gactaaaccttccctagctg

SEQ ID NO: 5576 - DNA, 20 bp, Artificial Sequence
  MKO10005576_A_Atad5
  gRNA
cagtctttgatccgccaatt

SEQ ID NO: 5577 - DNA, 20 bp, Artificial Sequence
  MKO10005577_A_Atat1
  gRNA
atgtcaccgggccggcgttg

SEQ ID NO: 5578 - DNA, 20 bp, Artificial Sequence
  MKO10005578_A_Atat1
  gRNA
catggagttcccgttcgatg

SEQ ID NO: 5579 - DNA, 20 bp, Artificial Sequence
  MKO10005579_A_Atat1
  gRNA
tcagtatgtaaataacgtgc

SEQ ID NO: 5580 - DNA, 20 bp, Artificial Sequence
  MKO10005580_A_Atcay
  gRNA
gtgcggccaacggtcgtctg

SEQ ID NO: 5581 - DNA, 20 bp, Artificial Sequence
  MKO10005581_A_Atcay
  gRNA
agttcgccacagacgaccgt

SEQ ID NO: 5582 - DNA, 20 bp, Artificial Sequence
  MKO10005582_A_Atcay
  gRNA
aggtgtgtcgaggaagtcgt

SEQ ID NO: 5583 - DNA, 20 bp, Artificial Sequence
  MKO10005583_A_Ate1
  gRNA
gatctcgaaaggcaattgtg

SEQ ID NO: 5584 - DNA, 20 bp, Artificial Sequence
  MKO10005584_A_Ate1
  gRNA
tatcaggatcttatagaccg

SEQ ID NO: 5585 - DNA, 20 bp, Artificial Sequence
  MKO10005585_A_Ate1
  gRNA
cattcatccacaatctatag

SEQ ID NO: 5586 - DNA, 20 bp, Artificial Sequence
  MKO10005586_A_Atf1
  gRNA
cacgtctctcccgcagaccg

SEQ ID NO: 5587 - DNA, 20 bp, Artificial Sequence
  MKO10005587_A_Atf1
  gRNA
gagagacgtggcagacggcg

SEQ ID NO: 5588 - DNA, 20 bp, Artificial Sequence
  MKO10005588_A_Atf1
  gRNA
gatactcgtcccgagcaacc

SEQ ID NO: 5589 - DNA, 20 bp, Artificial Sequence
  MKO10005589_A_Atf2
  gRNA
gtcgactcggggtgaggtaa

SEQ ID NO: 5590 - DNA, 20 bp, Artificial Sequence
  MKO10005590_A_Atf2
  gRNA
tggacgaacgatagctgatg

SEQ ID NO: 5591 - DNA, 20 bp, Artificial Sequence
  MKO10005591_A_Atf2
  gRNA
gtcgactaccagtgatgaaa

SEQ ID NO: 5592 - DNA, 20 bp, Artificial Sequence
  MKO10005592_A_Atf3
  gRNA
attctgagcccggacgatgc

SEQ ID NO: 5593 - DNA, 20 bp, Artificial Sequence
  MKO10005593_A_Atf3
  gRNA
taccgtcaacaacagacccc

SEQ ID NO: 5594 - DNA, 20 bp, Artificial Sequence
  MKO10005594_A_Atf3
  gRNA
tgcatcgtccgggctcagaa

SEQ ID NO: 5595 - DNA, 20 bp, Artificial Sequence
  MKO10005595_A_Atf4
  gRNA
ccgccaacacttcgctgttc

SEQ ID NO: 5596 - DNA, 20 bp, Artificial Sequence
  MKO10005596_A_Atf4
  gRNA
gatgtcccccttcgaccagt

SEQ ID NO: 5597 - DNA, 20 bp, Artificial Sequence
  MKO10005597_A_Atf4
  gRNA
agatgagctcttgaccacgt

SEQ ID NO: 5598 - DNA, 20 bp, Artificial Sequence
  MKO10005598_A_Atf5
  gRNA
cttgcggtcccctcgtgtgc

SEQ ID NO: 5599 - DNA, 20 bp, Artificial Sequence
  MKO10005599_A_Atf5
  gRNA
ccttatacacctcaattagc

SEQ ID NO: 5600 - DNA, 20 bp, Artificial Sequence
  MKO10005600_A_Atf5
  gRNA
agccagcccagcccgctagc

SEQ ID NO: 5601 - DNA, 20 bp, Artificial Sequence
  MKO10005601_A_Atf6b
  gRNA
gttgttccgttgcgtggagc

SEQ ID NO: 5602 - DNA, 20 bp, Artificial Sequence
  MKO10005602_A_Atf6b
  gRNA
agtgatctggaccgtttcaa

SEQ ID NO: 5603 - DNA, 20 bp, Artificial Sequence
  MKO10005603_A_Atf6b
  gRNA
ggacatcctgctccacgcaa

SEQ ID NO: 5604 - DNA, 20 bp, Artificial Sequence
  MKO10005604_A_Atf6
  gRNA
attacagctgtcgccatata

SEQ ID NO: 5605 - DNA, 20 bp, Artificial Sequence
  MKO10005605_A_Atf6
  gRNA
tcgacgttgtttgctgaact

SEQ ID NO: 5606 - DNA, 20 bp, Artificial Sequence
  MKO10005606_A_Atf6
  gRNA
agttgaagaacacgagtctg

SEQ ID NO: 5607 - DNA, 20 bp, Artificial Sequence
  MKO10005607_A_Atf7ip2
  gRNA
ttaaattctaggttaaacat

SEQ ID NO: 5608 - DNA, 20 bp, Artificial Sequence
  MKO10005608_A_Atf7ip2
  gRNA
caaattaatgaaaatgcttg

SEQ ID NO: 5609 - DNA, 20 bp, Artificial Sequence
  MKO10005609_A_Atf7ip2
  gRNA
tccagacagaaaaagacaga

SEQ ID NO: 5610 - DNA, 20 bp, Artificial Sequence
  MKO10005610_A_Atf7ip
  gRNA
ccgtacgtacttctcacagg

SEQ ID NO: 5611 - DNA, 20 bp, Artificial Sequence
  MKO10005611_A_Atf7ip
  gRNA
tccaaaacgtttggttaacc

SEQ ID NO: 5612 - DNA, 20 bp, Artificial Sequence
  MKO10005612_A_Atf7ip
  gRNA
ggcagtgctcaccgagctgc

SEQ ID NO: 5613 - DNA, 20 bp, Artificial Sequence
  MKO10005613_A_Atf7
  gRNA
acacctaccattgtacgtcc

SEQ ID NO: 5614 - DNA, 20 bp, Artificial Sequence
  MKO10005614_A_Atf7
  gRNA
ggcgatgagtctacttccac

SEQ ID NO: 5615 - DNA, 20 bp, Artificial Sequence
  MKO10005615_A_Atf7
  gRNA
gagccaggacgtacaatggt

SEQ ID NO: 5616 - DNA, 20 bp, Artificial Sequence
  MKO10005616_A_Atg10
  gRNA
ttcatgagtgctataagccg

SEQ ID NO: 5617 - DNA, 20 bp, Artificial Sequence
  MKO10005617_A_Atg10
  gRNA
agatgggagaccgttagctc

SEQ ID NO: 5618 - DNA, 20 bp, Artificial Sequence
  MKO10005618_A_Atg10
  gRNA
ggagaatttagagctaccaa

SEQ ID NO: 5619 - DNA, 20 bp, Artificial Sequence
  MKO10005619_A_Atg12
  gRNA
tgcagtttcgcccggaacgg

SEQ ID NO: 5620 - DNA, 20 bp, Artificial Sequence
  MKO10005620_A_Atg12
  gRNA
ctctggaaggctctcgccgc

SEQ ID NO: 5621 - DNA, 20 bp, Artificial Sequence
  MKO10005621_A_Atg12
  gRNA
gagcgaacccggaccatcca

SEQ ID NO: 5622 - DNA, 20 bp, Artificial Sequence
  MKO10005622_A_Atg13
  gRNA
tttacccaatctgaacccgt

SEQ ID NO: 5623 - DNA, 20 bp, Artificial Sequence
  MKO10005623_A_Atg13
  gRNA
caccagcctatcgactctcc

SEQ ID NO: 5624 - DNA, 20 bp, Artificial Sequence
  MKO10005624_A_Atg13
  gRNA
ccgctcatcatcttccccga

SEQ ID NO: 5625 - DNA, 20 bp, Artificial Sequence
  MKO10005625_A_Atg14
  gRNA
gaagtcttcacttcgtcgat

SEQ ID NO: 5626 - DNA, 20 bp, Artificial Sequence
  MKO10005626_A_Atg14
  gRNA
atcgacgaagtgaagacttc

SEQ ID NO: 5627 - DNA, 20 bp, Artificial Sequence
  MKO10005627_A_Atg14
  gRNA
aaagcggcttacagatcagt

SEQ ID NO: 5628 - DNA, 20 bp, Artificial Sequence
  MKO10005628_A_Atg16l1
  gRNA
ccgcgatgtgacgcttccag

SEQ ID NO: 5629 - DNA, 20 bp, Artificial Sequence
  MKO10005629_A_Atg16l1
  gRNA
gtcacatcgcggaggaactg

SEQ ID NO: 5630 - DNA, 20 bp, Artificial Sequence
  MKO10005630_A_Atg16l1
  gRNA
ttccacgcaccatcatgtcc

SEQ ID NO: 5631 - DNA, 20 bp, Artificial Sequence
  MKO10005631_A_Atg16l2
  gRNA
attacgtagattgcgctcag

SEQ ID NO: 5632 - DNA, 20 bp, Artificial Sequence
  MKO10005632_A_Atg16l2
  gRNA
gcaagtcgcgtgcctcttcc

SEQ ID NO: 5633 - DNA, 20 bp, Artificial Sequence
  MKO10005633_A_Atg16l2
  gRNA
aaagttgaagtccgaaccaa

SEQ ID NO: 5634 - DNA, 20 bp, Artificial Sequence
  MKO10005634_A_Atg2a
  gRNA
gtgcagctgccgatttgcag

SEQ ID NO: 5635 - DNA, 20 bp, Artificial Sequence
  MKO10005635_A_Atg2a
  gRNA
ctcaagagtgccttcgggaa

SEQ ID NO: 5636 - DNA, 20 bp, Artificial Sequence
  MKO10005636_A_Atg2a
  gRNA
aggctttgtgagctccatcg

SEQ ID NO: 5637 - DNA, 20 bp, Artificial Sequence
  MKO10005637_A_Atg2b
  gRNA
cacctacctactcgaggtcg

SEQ ID NO: 5638 - DNA, 20 bp, Artificial Sequence
  MKO10005638_A_Atg2b
  gRNA
gaaacagccgacgagtcctc

SEQ ID NO: 5639 - DNA, 20 bp, Artificial Sequence
  MKO10005639_A_Atg2b
  gRNA
agaggcatcccaacctttcg

SEQ ID NO: 5640 - DNA, 20 bp, Artificial Sequence
  MKO10005640_A_Atg3
  gRNA
tgtttacaccgcttgtagca

SEQ ID NO: 5641 - DNA, 20 bp, Artificial Sequence
  MKO10005641_A_Atg3
  gRNA
gatggagtattcggatgaat

SEQ ID NO: 5642 - DNA, 20 bp, Artificial Sequence
  MKO10005642_A_Atg3
  gRNA
gggtgtaatcaccccagaag

SEQ ID NO: 5643 - DNA, 20 bp, Artificial Sequence
  MKO10005643_A_Atg4a
  gRNA
gctgctggtagtcaagttgc

SEQ ID NO: 5644 - DNA, 20 bp, Artificial Sequence
  MKO10005644_A_Atg4a
  gRNA
tttggtttatgcccaagcga

SEQ ID NO: 5645 - DNA, 20 bp, Artificial Sequence
  MKO10005645_A_Atg4a
  gRNA
tccttctgtatgtaaaccat

SEQ ID NO: 5646 - DNA, 20 bp, Artificial Sequence
  MKO10005646_A_Atg4b
  gRNA
tggggttgcatgcttcggtg

SEQ ID NO: 5647 - DNA, 20 bp, Artificial Sequence
  MKO10005647_A_Atg4b
  gRNA
cctgtatgtaaaccaaagtc

SEQ ID NO: 5648 - DNA, 20 bp, Artificial Sequence
  MKO10005648_A_Atg4b
  gRNA
aggacattaaagtagctgtc

SEQ ID NO: 5649 - DNA, 20 bp, Artificial Sequence
  MKO10005649_A_Atg4c
  gRNA
cgattggtatggaccagcgg

SEQ ID NO: 5650 - DNA, 20 bp, Artificial Sequence
  MKO10005650_A_Atg4c
  gRNA
tggggctgcacgctgcggac

SEQ ID NO: 5651 - DNA, 20 bp, Artificial Sequence
  MKO10005651_A_Atg4c
  gRNA
gattcccccgtggccgtctt

SEQ ID NO: 5652 - DNA, 20 bp, Artificial Sequence
  MKO10005652_A_Atg4d
  gRNA
ccgtggatgatcagcgaacc

SEQ ID NO: 5653 - DNA, 20 bp, Artificial Sequence
  MKO10005653_A_Atg4d
  gRNA
gatcatccacgggccccctt

SEQ ID NO: 5654 - DNA, 20 bp, Artificial Sequence
  MKO10005654_A_Atg4d
  gRNA
tcgcccgcagaggtgaacag

SEQ ID NO: 5655 - DNA, 20 bp, Artificial Sequence
  MKO10005655_A_Atg5
  gRNA
ttccatgagtttccggttga

SEQ ID NO: 5656 - DNA, 20 bp, Artificial Sequence
  MKO10005656_A_Atg5
  gRNA
tatcccctttagaatatatc

SEQ ID NO: 5657 - DNA, 20 bp, Artificial Sequence
  MKO10005657_A_Atg5
  gRNA
aagagtcagctatttgacgt

SEQ ID NO: 5658 - DNA, 20 bp, Artificial Sequence
  MKO10005658_A_Atg7
  gRNA
gaagttgaacgagtaccgcc

SEQ ID NO: 5659 - DNA, 20 bp, Artificial Sequence
  MKO10005659_A_Atg7
  gRNA
atttacttaccgcgaaggtc

SEQ ID NO: 5660 - DNA, 20 bp, Artificial Sequence
  MKO10005660_A_Atg7
  gRNA
aaagggggcgaactgcaact

SEQ ID NO: 5661 - DNA, 20 bp, Artificial Sequence
  MKO10005661_A_Atg9a
  gRNA
catagtccacacagctaacc

SEQ ID NO: 5662 - DNA, 20 bp, Artificial Sequence
  MKO10005662_A_Atg9a
  gRNA
ttgggatccgaagagcatgt

SEQ ID NO: 5663 - DNA, 20 bp, Artificial Sequence
  MKO10005663_A_Atg9a
  gRNA
ctgcccaagtctgtagtgcc

SEQ ID NO: 5664 - DNA, 20 bp, Artificial Sequence
  MKO10005664_A_Atg9b
  gRNA
cattgtaatccacgcagcga

SEQ ID NO: 5665 - DNA, 20 bp, Artificial Sequence
  MKO10005665_A_Atg9b
  gRNA
aaccttcctccttcgctgcg

SEQ ID NO: 5666 - DNA, 20 bp, Artificial Sequence
  MKO10005666_A_Atg9b
  gRNA
gatccacgacagtcccctgt

SEQ ID NO: 5667 - DNA, 20 bp, Artificial Sequence
  MKO10005667_A_Athl1
  gRNA
agaataccgagtccgtacgc

SEQ ID NO: 5668 - DNA, 20 bp, Artificial Sequence
  MKO10005668_A_Athl1
  gRNA
gctgctcagggttaagtacg

SEQ ID NO: 5669 - DNA, 20 bp, Artificial Sequence
  MKO10005669_A_Athl1
  gRNA
gtgattcttaccggagtccc

SEQ ID NO: 5670 - DNA, 20 bp, Artificial Sequence
  MKO10005670_A_Atic
  gRNA
cacttaccagcatggaccgc

SEQ ID NO: 5671 - DNA, 20 bp, Artificial Sequence
  MKO10005671_A_Atic
  gRNA
gccagaagtctcgcgtctct

SEQ ID NO: 5672 - DNA, 20 bp, Artificial Sequence
  MKO10005672_A_Atic
  gRNA
acgcgtccccctaacatttc

SEQ ID NO: 5673 - DNA, 20 bp, Artificial Sequence
  MKO10005673_A_Atl1
  gRNA
gttgcggtacatgtacaacc

SEQ ID NO: 5674 - DNA, 20 bp, Artificial Sequence
  MKO10005674_A_Atl1
  gRNA
cgcagcctcgtctaactcaa

SEQ ID NO: 5675 - DNA, 20 bp, Artificial Sequence
  MKO10005675_A_Atl1
  gRNA
gattacaatgaaccattgac

SEQ ID NO: 5676 - DNA, 20 bp, Artificial Sequence
  MKO10005676_A_Atl2
  gRNA
tgtgctgctaatggataccc

SEQ ID NO: 5677 - DNA, 20 bp, Artificial Sequence
  MKO10005677_A_Atl2
  gRNA
tatccttatgagcactcata

SEQ ID NO: 5678 - DNA, 20 bp, Artificial Sequence
  MKO10005678_A_Atl2
  gRNA
aagccatatgagtgctcata

SEQ ID NO: 5679 - DNA, 20 bp, Artificial Sequence
  MKO10005679_A_Atl3
  gRNA
cgccatgaaaatcctgtcag

SEQ ID NO: 5680 - DNA, 20 bp, Artificial Sequence
  MKO10005680_A_Atl3
  gRNA
ccatatccgagatcttgatg

SEQ ID NO: 5681 - DNA, 20 bp, Artificial Sequence
  MKO10005681_A_Atl3
  gRNA
aatgggcataggtgatgcca

SEQ ID NO: 5682 - DNA, 20 bp, Artificial Sequence
  MKO10005682_A_Atmin
  gRNA
gctgccttgcagtcgcgact

SEQ ID NO: 5683 - DNA, 20 bp, Artificial Sequence
  MKO10005683_A_Atmin
  gRNA
cgtcaagagccaccgactgc

SEQ ID NO: 5684 - DNA, 20 bp, Artificial Sequence
  MKO10005684_A_Atmin
  gRNA
agagcgtcgcgacgcctccc

SEQ ID NO: 5685 - DNA, 20 bp, Artificial Sequence
  MKO10005685_A_Atm
  gRNA
taaatttaagcgcctgattc

SEQ ID NO: 5686 - DNA, 20 bp, Artificial Sequence
  MKO10005686_A_Atm
  gRNA
cctggcatactgaatagcct

SEQ ID NO: 5687 - DNA, 20 bp, Artificial Sequence
  MKO10005687_A_Atm
  gRNA
agacctcttgaattatgtca

SEQ ID NO: 5688 - DNA, 20 bp, Artificial Sequence
  MKO10005688_A_Atn1
  gRNA
gcgcgcacgagttgaagccg

SEQ ID NO: 5689 - DNA, 20 bp, Artificial Sequence
  MKO10005689_A_Atn1
  gRNA
cctccagcggcacgaagtac

SEQ ID NO: 5690 - DNA, 20 bp, Artificial Sequence
  MKO10005690_A_Atn1
  gRNA
tgaggatacgctccgggtgg

SEQ ID NO: 5691 - DNA, 20 bp, Artificial Sequence
  MKO10005691_A_Atoh1
  gRNA
acgggataacgttgcgcagc

SEQ ID NO: 5692 - DNA, 20 bp, Artificial Sequence
  MKO10005692_A_Atoh1
  gRNA
atagcaccgacccacgcgcc

SEQ ID NO: 5693 - DNA, 20 bp, Artificial Sequence
  MKO10005693_A_Atoh1
  gRNA
gcgggcgcctctgcggtagc

SEQ ID NO: 5694 - DNA, 20 bp, Artificial Sequence
  MKO10005694_A_Atoh7
  gRNA
gttcgaccggctgcgcaggg

SEQ ID NO: 5695 - DNA, 20 bp, Artificial Sequence
  MKO10005695_A_Atoh7
  gRNA
cgagcgcgcggtctcgtgcg

SEQ ID NO: 5696 - DNA, 20 bp, Artificial Sequence
  MKO10005696_A_Atoh7
  gRNA
cgcgcacgagaccgcgcgct

SEQ ID NO: 5697 - DNA, 20 bp, Artificial Sequence
  MKO10005697_A_Atoh8
  gRNA
cgaagcgaccgccgcctcaa

SEQ ID NO: 5698 - DNA, 20 bp, Artificial Sequence
  MKO10005698_A_Atoh8
  gRNA
gagccggtgcggcgcgcgaa

SEQ ID NO: 5699 - DNA, 20 bp, Artificial Sequence
  MKO10005699_A_Atoh8
  gRNA
caggtgccgtgctactccta

SEQ ID NO: 5700 - DNA, 20 bp, Artificial Sequence
  MKO10005700_A_Atox1
  gRNA
gcagaagcacgagttctccg

SEQ ID NO: 5701 - DNA, 20 bp, Artificial Sequence
  MKO10005701_A_Atox1
  gRNA
gtcgatgcagaccttcttgt

SEQ ID NO: 5702 - DNA, 20 bp, Artificial Sequence
  MKO10005702_A_Atox1
  gRNA
cattgacctgcccaacaaga

SEQ ID NO: 5703 - DNA, 20 bp, Artificial Sequence
  MKO10005703_A_Atp10a
  gRNA
cacttggcgccgcttcaggt

SEQ ID NO: 5704 - DNA, 20 bp, Artificial Sequence
  MKO10005704_A_Atp10a
  gRNA
ccacatcgagactgctaacc

SEQ ID NO: 5705 - DNA, 20 bp, Artificial Sequence
  MKO10005705_A_Atp10a
  gRNA
ggggcccactattgttcagc

SEQ ID NO: 5706 - DNA, 20 bp, Artificial Sequence
  MKO10005706_A_Atp10b
  gRNA
tcacgacacgcctctgcttg

SEQ ID NO: 5707 - DNA, 20 bp, Artificial Sequence
  MKO10005707_A_Atp10b
  gRNA
ctgcaccatccgaaacaccg

SEQ ID NO: 5708 - DNA, 20 bp, Artificial Sequence
  MKO10005708_A_Atp10b
  gRNA
aacgctacatgctgaagcgc

SEQ ID NO: 5709 - DNA, 20 bp, Artificial Sequence
  MKO10005709_A_Atp10d
  gRNA
acgacgcggtgctttcctgc

SEQ ID NO: 5710 - DNA, 20 bp, Artificial Sequence
  MKO10005710_A_Atp10d
  gRNA
ccgtatccggttattcacgt

SEQ ID NO: 5711 - DNA, 20 bp, Artificial Sequence
  MKO10005711_A_Atp10d
  gRNA
aatgacctcagccgattccg

SEQ ID NO: 5712 - DNA, 20 bp, Artificial Sequence
  MKO10005712_A_Atp11a
  gRNA
ggacagtcggaccatctacg

SEQ ID NO: 5713 - DNA, 20 bp, Artificial Sequence
  MKO10005713_A_Atp11a
  gRNA
acactggttcatggcgttgt

SEQ ID NO: 5714 - DNA, 20 bp, Artificial Sequence
  MKO10005714_A_Atp11a
  gRNA
ggaggagacgattctattgt

SEQ ID NO: 5715 - DNA, 20 bp, Artificial Sequence
  MKO10005715_A_Atp11b
  gRNA
aagtccactggtaattggac

SEQ ID NO: 5716 - DNA, 20 bp, Artificial Sequence
  MKO10005716_A_Atp11b
  gRNA
gaactatttacatagccaac

SEQ ID NO: 5717 - DNA, 20 bp, Artificial Sequence
  MKO10005717_A_Atp11b
  gRNA
aaactcgatccaaaaacatt

SEQ ID NO: 5718 - DNA, 20 bp, Artificial Sequence
  MKO10005718_A_Atp11c
  gRNA
cctcggacgcgatgttccgc

SEQ ID NO: 5719 - DNA, 20 bp, Artificial Sequence
  MKO10005719_A_Atp11c
  gRNA
gtgtactcaccaaacggttg

SEQ ID NO: 5720 - DNA, 20 bp, Artificial Sequence
  MKO10005720_A_Atp11c
  gRNA
caaaatctttgcgcaatata

SEQ ID NO: 5721 - DNA, 20 bp, Artificial Sequence
  MKO10005721_A_Atp12a
  gRNA
tccccgttaaaataacgacc

SEQ ID NO: 5722 - DNA, 20 bp, Artificial Sequence
  MKO10005722_A_Atp12a
  gRNA
ctttagtaagatgatccccc

SEQ ID NO: 5723 - DNA, 20 bp, Artificial Sequence
  MKO10005723_A_Atp12a
  gRNA
cgttgggcccatcccgagcc

SEQ ID NO: 5724 - DNA, 20 bp, Artificial Sequence
  MKO10005724_A_Atp13a1
  gRNA
tctggtgcctggacgagtat

SEQ ID NO: 5725 - DNA, 20 bp, Artificial Sequence
  MKO10005725_A_Atp13a1
  gRNA
tgtagtaccaatactcgtcc

SEQ ID NO: 5726 - DNA, 20 bp, Artificial Sequence
  MKO10005726_A_Atp13a1
  gRNA
ttcctaccttgtcacggtgc

SEQ ID NO: 5727 - DNA, 20 bp, Artificial Sequence
  MKO10005727_A_Atp13a2
  gRNA
cgattgacgtccctgtcgtc

SEQ ID NO: 5728 - DNA, 20 bp, Artificial Sequence
  MKO10005728_A_Atp13a2
  gRNA
ggccatcggctatcacgccg

SEQ ID NO: 5729 - DNA, 20 bp, Artificial Sequence
  MKO10005729_A_Atp13a2
  gRNA
cgcaggcgcacgccccacaa

SEQ ID NO: 5730 - DNA, 20 bp, Artificial Sequence
  MKO10005730_A_Atp13a3
  gRNA
atggctataacttatgccgc

SEQ ID NO: 5731 - DNA, 20 bp, Artificial Sequence
  MKO10005731_A_Atp13a3
  gRNA
gccactcaggcagccagtag

SEQ ID NO: 5732 - DNA, 20 bp, Artificial Sequence
  MKO10005732_A_Atp13a3
  gRNA
accatagcataagatatttc

SEQ ID NO: 5733 - DNA, 20 bp, Artificial Sequence
  MKO10005733_A_Atp13a4
  gRNA
tatccctcgtctgtaatgag

SEQ ID NO: 5734 - DNA, 20 bp, Artificial Sequence
  MKO10005734_A_Atp13a4
  gRNA
agttcgcttacctttagatc

SEQ ID NO: 5735 - DNA, 20 bp, Artificial Sequence
  MKO10005735_A_Atp13a4
  gRNA
tttgcccatacacgccaagc

SEQ ID NO: 5736 - DNA, 20 bp, Artificial Sequence
  MKO10005736_A_Atp13a5
  gRNA
tttgacatccaccatacgtt

SEQ ID NO: 5737 - DNA, 20 bp, Artificial Sequence
  MKO10005737_A_Atp13a5
  gRNA
tcagacccaatccaaacgta

SEQ ID NO: 5738 - DNA, 20 bp, Artificial Sequence
  MKO10005738_A_Atp13a5
  gRNA
acagtgctctccgtaaattc

SEQ ID NO: 5739 - DNA, 20 bp, Artificial Sequence
  MKO10005739_A_Atp1a1
  gRNA
gtatgagcctgccgctgtat

SEQ ID NO: 5740 - DNA, 20 bp, Artificial Sequence
  MKO10005740_A_Atp1a1
  gRNA
gtcaccatgctccgatacag

SEQ ID NO: 5741 - DNA, 20 bp, Artificial Sequence
  MKO10005741_A_Atp1a1
  gRNA
aatctgttccgtatttacga

SEQ ID NO: 5742 - DNA, 20 bp, Artificial Sequence
  MKO10005742_A_Atp1a2
  gRNA
atatctaggtatcgtgctag

SEQ ID NO: 5743 - DNA, 20 bp, Artificial Sequence
  MKO10005743_A_Atp1a2
  gRNA
catagcggccaggataccat

SEQ ID NO: 5744 - DNA, 20 bp, Artificial Sequence
  MKO10005744_A_Atp1a2
  gRNA
tggctcacattatcgttgga

SEQ ID NO: 5745 - DNA, 20 bp, Artificial Sequence
  MKO10005745_A_Atp1a3
  gRNA
atccaggtcccggcgctctt

SEQ ID NO: 5746 - DNA, 20 bp, Artificial Sequence
  MKO10005746_A_Atp1a3
  gRNA
atacaatactgactgcgtgc

SEQ ID NO: 5747 - DNA, 20 bp, Artificial Sequence
  MKO10005747_A_Atp1a3
  gRNA
catcccgggctaggatctcc

SEQ ID NO: 5748 - DNA, 20 bp, Artificial Sequence
  MKO10005748_A_Atp1a4
  gRNA
tatctcggcgcaaggatgca

SEQ ID NO: 5749 - DNA, 20 bp, Artificial Sequence
  MKO10005749_A_Atp1a4
  gRNA
ggatgatcacaagctaacgt

SEQ ID NO: 5750 - DNA, 20 bp, Artificial Sequence
  MKO10005750_A_Atp1a4
  gRNA
gagataaccctgatatcagc

SEQ ID NO: 5751 - DNA, 20 bp, Artificial Sequence
  MKO10005751_A_Atp1b1
  gRNA
ggcgacatcaatcacgaacg

SEQ ID NO: 5752 - DNA, 20 bp, Artificial Sequence
  MKO10005752_A_Atp1b1
  gRNA
attgatgtcgccccgttcct

SEQ ID NO: 5753 - DNA, 20 bp, Artificial Sequence
  MKO10005753_A_Atp1b1
  gRNA
cgaaaatcatgtcgtccttc

SEQ ID NO: 5754 - DNA, 20 bp, Artificial Sequence
  MKO10005754_A_Atp1b2
  gRNA
ctggtgtggccagtcgatcc

SEQ ID NO: 5755 - DNA, 20 bp, Artificial Sequence
  MKO10005755_A_Atp1b2
  gRNA
ttgaactggcaggcacgttt

SEQ ID NO: 5756 - DNA, 20 bp, Artificial Sequence
  MKO10005756_A_Atp1b2
  gRNA
aacgtgcctgccagttcaac

SEQ ID NO: 5757 - DNA, 20 bp, Artificial Sequence
  MKO10005757_A_Atp1b3
  gRNA
gccacagacttacaaaaagt

SEQ ID NO: 5758 - DNA, 20 bp, Artificial Sequence
  MKO10005758_A_Atp1b3
  gRNA
aattacctggactaggaatc

SEQ ID NO: 5759 - DNA, 20 bp, Artificial Sequence
  MKO10005759_A_Atp1b3
  gRNA
tacgctttaggaaactctcc

SEQ ID NO: 5760 - DNA, 20 bp, Artificial Sequence
  MKO10005760_A_Atp1b4
  gRNA
catgccgaccttcaccgagc

SEQ ID NO: 5761 - DNA, 20 bp, Artificial Sequence
  MKO10005761_A_Atp1b4
  gRNA
cgttacgtgattagcctaaa

SEQ ID NO: 5762 - DNA, 20 bp, Artificial Sequence
  MKO10005762_A_Atp1b4
  gRNA
gatctgcaatttccgccacc

SEQ ID NO: 5763 - DNA, 20 bp, Artificial Sequence
  MKO10005763_A_Atp2a1
  gRNA
cctcattgccaacgccattg

SEQ ID NO: 5764 - DNA, 20 bp, Artificial Sequence
  MKO10005764_A_Atp2a1
  gRNA
aaggctcgggacatcgttcc

SEQ ID NO: 5765 - DNA, 20 bp, Artificial Sequence
  MKO10005765_A_Atp2a1
  gRNA
ctgaccgaaagtcagtgcaa

SEQ ID NO: 5766 - DNA, 20 bp, Artificial Sequence
  MKO10005766_A_Atp2a2
  gRNA
tgctctcgttgaccccgaag

SEQ ID NO: 5767 - DNA, 20 bp, Artificial Sequence
  MKO10005767_A_Atp2a2
  gRNA
gaacgctcacacaaagaccg

SEQ ID NO: 5768 - DNA, 20 bp, Artificial Sequence
  MKO10005768_A_Atp2a2
  gRNA
ctagaattgccggctgaaga

SEQ ID NO: 5769 - DNA, 20 bp, Artificial Sequence
  MKO10005769_A_Atp2a3
  gRNA
accgacgcgcgggagcgtta

SEQ ID NO: 5770 - DNA, 20 bp, Artificial Sequence
  MKO10005770_A_Atp2a3
  gRNA
tcctgcagagctcccgaccg

SEQ ID NO: 5771 - DNA, 20 bp, Artificial Sequence
  MKO10005771_A_Atp2a3
  gRNA
gccgtaacgctcccgcgcgt

SEQ ID NO: 5772 - DNA, 20 bp, Artificial Sequence
  MKO10005772_A_Atp2b1
  gRNA
ttacgtgcattatccccttc

SEQ ID NO: 5773 - DNA, 20 bp, Artificial Sequence
  MKO10005773_A_Atp2b1
  gRNA
aattgcagccatagtatcat

SEQ ID NO: 5774 - DNA, 20 bp, Artificial Sequence
  MKO10005774_A_Atp2b1
  gRNA
cctgctcaattcgactctgc

SEQ ID NO: 5775 - DNA, 20 bp, Artificial Sequence
  MKO10005775_A_Atp2b2
  gRNA
ggacgtgacacttatcatcc

SEQ ID NO: 5776 - DNA, 20 bp, Artificial Sequence
  MKO10005776_A_Atp2b2
  gRNA
agatgatggccgcgatctcc

SEQ ID NO: 5777 - DNA, 20 bp, Artificial Sequence
  MKO10005777_A_Atp2b2
  gRNA
attgatgaaagctcactcac

SEQ ID NO: 5778 - DNA, 20 bp, Artificial Sequence
  MKO10005778_A_Atp2b3
  gRNA
gggagctctcatcgatcttg

SEQ ID NO: 5779 - DNA, 20 bp, Artificial Sequence
  MKO10005779_A_Atp2b3
  gRNA
tcttcaaagccgtattgagc

SEQ ID NO: 5780 - DNA, 20 bp, Artificial Sequence
  MKO10005780_A_Atp2b3
  gRNA
ggtggctgctatcgtctccc

SEQ ID NO: 5781 - DNA, 20 bp, Artificial Sequence
  MKO10005781_A_Atp2b4
  gRNA
tctcgcctcggtgatcattg

SEQ ID NO: 5782 - DNA, 20 bp, Artificial Sequence
  MKO10005782_A_Atp2b4
  gRNA
gctgcagagtcgcatcgaac

SEQ ID NO: 5783 - DNA, 20 bp, Artificial Sequence
  MKO10005783_A_Atp2b4
  gRNA
tttcctgtacccctccgtag

SEQ ID NO: 5784 - DNA, 20 bp, Artificial Sequence
  MKO10005784_A_Atp2c1
  gRNA
tgctgatgaccgcagacgcc

SEQ ID NO: 5785 - DNA, 20 bp, Artificial Sequence
  MKO10005785_A_Atp2c1
  gRNA
aatagtaattgtcgtcactg

SEQ ID NO: 5786 - DNA, 20 bp, Artificial Sequence
  MKO10005786_A_Atp2c1
  gRNA
gctctctttgacgtcagtac

SEQ ID NO: 5787 - DNA, 20 bp, Artificial Sequence
  MKO10005787_A_Atp2c2
  gRNA
accgtcgctgctctgccgcc

SEQ ID NO: 5788 - DNA, 20 bp, Artificial Sequence
  MKO10005788_A_Atp2c2
  gRNA
cgtcctcaccaaagaatatg

SEQ ID NO: 5789 - DNA, 20 bp, Artificial Sequence
  MKO10005789_A_Atp2c2
  gRNA
cagataacgctgagcccgtg

SEQ ID NO: 5790 - DNA, 20 bp, Artificial Sequence
  MKO10005790_A_Atp4a
  gRNA
acatactcgggagtgccccg

SEQ ID NO: 5791 - DNA, 20 bp, Artificial Sequence
  MKO10005791_A_Atp4a
  gRNA
ccaatgcgctccggccacct

SEQ ID NO: 5792 - DNA, 20 bp, Artificial Sequence
  MKO10005792_A_Atp4a
  gRNA
gtatcagaccagcgccacca

SEQ ID NO: 5793 - DNA, 20 bp, Artificial Sequence
  MKO10005793_A_Atp4b
  gRNA
ggaccccagcttcggcttcg

SEQ ID NO: 5794 - DNA, 20 bp, Artificial Sequence
  MKO10005794_A_Atp4b
  gRNA
tggatcagcctgtactacgc

SEQ ID NO: 5795 - DNA, 20 bp, Artificial Sequence
  MKO10005795_A_Atp4b
  gRNA
cctctttccccatacacgtc

SEQ ID NO: 5796 - DNA, 20 bp, Artificial Sequence
  MKO10005796_A_Atp5a1
  gRNA
ttccaagacccgcagacgag

SEQ ID NO: 5797 - DNA, 20 bp, Artificial Sequence
  MKO10005797_A_Atp5a1
  gRNA
gatggtattgcgcgagtgca

SEQ ID NO: 5798 - DNA, 20 bp, Artificial Sequence
  MKO10005798_A_Atp5a1
  gRNA
gccctcggtaatgctattga

SEQ ID NO: 5799 - DNA, 20 bp, Artificial Sequence
  MKO10005799_A_Atp5b
  gRNA
cactgccaccgggcgaatcg

SEQ ID NO: 5800 - DNA, 20 bp, Artificial Sequence
  MKO10005800_A_Atp5b
  gRNA
gatgactgccacgattcgcc

SEQ ID NO: 5801 - DNA, 20 bp, Artificial Sequence
  MKO10005801_A_Atp5b
  gRNA
tctgctggccccatacgcca

SEQ ID NO: 5802 - DNA, 20 bp, Artificial Sequence
  MKO10005802_A_Atp5c1
  gRNA
ctgaagcctgcccgagtgta

SEQ ID NO: 5803 - DNA, 20 bp, Artificial Sequence
  MKO10005803_A_Atp5c1
  gRNA
gggaaagaagttatgattgt

SEQ ID NO: 5804 - DNA, 20 bp, Artificial Sequence
  MKO10005804_A_Atp5c1
  gRNA
atccagaatttaacaactca

SEQ ID NO: 5805 - DNA, 20 bp, Artificial Sequence
  MKO10005805_A_Atp5d
  gRNA
agttcgtacctgcgtcgggg

SEQ ID NO: 5806 - DNA, 20 bp, Artificial Sequence
  MKO10005806_A_Atp5d
  gRNA
atgtacgcgcctgaagcatc

SEQ ID NO: 5807 - DNA, 20 bp, Artificial Sequence
  MKO10005807_A_Atp5d
  gRNA
cattggcctcaatacggatc

SEQ ID NO: 5808 - DNA, 20 bp, Artificial Sequence
  MKO10005808_A_Atp5e
  gRNA
ctgtcgccagtacgccacca

SEQ ID NO: 5809 - DNA, 20 bp, Artificial Sequence
  MKO10005809_A_Atp5e
  gRNA
gagacaccatggtggcgtac

SEQ ID NO: 5810 - DNA, 20 bp, Artificial Sequence
  MKO10005810_A_Atp5e
  gRNA
aattgtgaaagtctcgaaga

SEQ ID NO: 5811 - DNA, 20 bp, Artificial Sequence
  MKO10005811_A_Atp5f1
  gRNA
gcggccgcgttcttcagaca

SEQ ID NO: 5812 - DNA, 20 bp, Artificial Sequence
  MKO10005812_A_Atp5f1
  gRNA
ctaccctctgcacatcgaag

SEQ ID NO: 5813 - DNA, 20 bp, Artificial Sequence
  MKO10005813_A_Atp5f1
  gRNA
cagttcctttaccctaagac

SEQ ID NO: 5814 - DNA, 20 bp, Artificial Sequence
  MKO10005814_A_Atp5g1
  gRNA
tacagattcgctcctgtacc

SEQ ID NO: 5815 - DNA, 20 bp, Artificial Sequence
  MKO10005815_A_Atp5g1
  gRNA
gacttccttacctgcttaga

SEQ ID NO: 5816 - DNA, 20 bp, Artificial Sequence
  MKO10005816_A_Atp5g1
  gRNA
actgctcatttctccagctc

SEQ ID NO: 5817 - DNA, 20 bp, Artificial Sequence
  MKO10005817_A_Atp5g2
  gRNA
gttcgtctctacccgctccc

SEQ ID NO: 5818 - DNA, 20 bp, Artificial Sequence
  MKO10005818_A_Atp5g2
  gRNA
aaggtacctacctcatctgt

SEQ ID NO: 5819 - DNA, 20 bp, Artificial Sequence
  MKO10005819_A_Atp5g2
  gRNA
gtcacagagcctcagcagct

SEQ ID NO: 5820 - DNA, 20 bp, Artificial Sequence
  MKO10005820_A_Atp5g3
  gRNA
gtgtgtgtcagctgatccga

SEQ ID NO: 5821 - DNA, 20 bp, Artificial Sequence
  MKO10005821_A_Atp5g3
  gRNA
gctgttctcatatgctatcc

SEQ ID NO: 5822 - DNA, 20 bp, Artificial Sequence
  MKO10005822_A_Atp5g3
  gRNA
agcacctgcaccaatgaatt

SEQ ID NO: 5823 - DNA, 20 bp, Artificial Sequence
  MKO10005823_A_Atp5h
  gRNA
gatccaggagtatgagaagc

SEQ ID NO: 5824 - DNA, 20 bp, Artificial Sequence
  MKO10005824_A_Atp5h
  gRNA
tcacctgcttctcatactcc

SEQ ID NO: 5825 - DNA, 20 bp, Artificial Sequence
  MKO10005825_A_Atp5h
  gRNA
ctttgtagctggagaaaatg

SEQ ID NO: 5826 - DNA, 20 bp, Artificial Sequence
  MKO10005826_A_Atp5j2
  gRNA
tagacaccgacctctccgaa

SEQ ID NO: 5827 - DNA, 20 bp, Artificial Sequence
  MKO10005827_A_Atp5j2
  gRNA
gacttcaagatggcgtcact

SEQ ID NO: 5828 - DNA, 20 bp, Artificial Sequence
  MKO10005828_A_Atp5j2
  gRNA
acaacaagtacatcaacgtt

SEQ ID NO: 5829 - DNA, 20 bp, Artificial Sequence
  MKO10005829_A_Atp5j
  gRNA
tcctgtacagaaactcttcg

SEQ ID NO: 5830 - DNA, 20 bp, Artificial Sequence
  MKO10005830_A_Atp5j
  gRNA
tccagatcttgctgatactc

SEQ ID NO: 5831 - DNA, 20 bp, Artificial Sequence
  MKO10005831_A_Atp5j
  gRNA
gcacagagactgctgaccga

SEQ ID NO: 5832 - DNA, 20 bp, Artificial Sequence
  MKO10005832_A_Atp5k
  gRNA
ccccaggttacctaaaaccc

SEQ ID NO: 5833 - DNA, 20 bp, Artificial Sequence
  MKO10005833_A_Atp5k
  gRNA
cccaaactcactgtagcgct

SEQ ID NO: 5834 - DNA, 20 bp, Artificial Sequence
  MKO10005834_A_Atp5k
  gRNA
attgagagagaactggcgga

SEQ ID NO: 5835 - DNA, 20 bp, Artificial Sequence
  MKO10005835_A_Atp5l
  gRNA
cgctcaccggctaccatcga

SEQ ID NO: 5836 - DNA, 20 bp, Artificial Sequence
  MKO10005836_A_Atp5l
  gRNA
aaggcaccgtcgatggtagc

SEQ ID NO: 5837 - DNA, 20 bp, Artificial Sequence
  MKO10005837_A_Atp5l
  gRNA
acgtagttaccttaactgta

SEQ ID NO: 5838 - DNA, 20 bp, Artificial Sequence
  MKO10005838_A_Atp5o
  gRNA
tcgatgccgtagacctgaac

SEQ ID NO: 5839 - DNA, 20 bp, Artificial Sequence
  MKO10005839_A_Atp5o
  gRNA
gcctaaatgacatcacgaaa

SEQ ID NO: 5840 - DNA, 20 bp, Artificial Sequence
  MKO10005840_A_Atp5o
  gRNA
ctgacatacccttacaagct

SEQ ID NO: 5841 - DNA, 20 bp, Artificial Sequence
  MKO10005841_A_Atp5sl
  gRNA
aaatatggcccgtatgttgc

SEQ ID NO: 5842 - DNA, 20 bp, Artificial Sequence
  MKO10005842_A_Atp5sl
  gRNA
ggctgaggcaccagtcgtcc

SEQ ID NO: 5843 - DNA, 20 bp, Artificial Sequence
  MKO10005843_A_Atp5sl
  gRNA
tctgaatctcggcgaggaaa

SEQ ID NO: 5844 - DNA, 20 bp, Artificial Sequence
  MKO10005844_A_Atp5s
  gRNA
ggagccaaagtacgctactg

SEQ ID NO: 5845 - DNA, 20 bp, Artificial Sequence
  MKO10005845_A_Atp5s
  gRNA
tgccaccgattcttgtatca

SEQ ID NO: 5846 - DNA, 20 bp, Artificial Sequence
  MKO10005846_A_Atp5s
  gRNA
tcattgctctgcgacatttc

SEQ ID NO: 5847 - DNA, 20 bp, Artificial Sequence
  MKO10005847_A_Atp6ap1l
  gRNA
ctaccgtatgtcaatatcct

SEQ ID NO: 5848 - DNA, 20 bp, Artificial Sequence
  MKO10005848_A_Atp6ap1l
  gRNA
ccgtacaaccacttctttac

SEQ ID NO: 5849 - DNA, 20 bp, Artificial Sequence
  MKO10005849_A_Atp6ap1l
  gRNA
gtgatggctgaacgtactcc

SEQ ID NO: 5850 - DNA, 20 bp, Artificial Sequence
  MKO10005850_A_Atp6ap1
  gRNA
acagcatacggtggtgtgtt

SEQ ID NO: 5851 - DNA, 20 bp, Artificial Sequence
  MKO10005851_A_Atp6ap1
  gRNA
ggtagaaagctgcatatcgc

SEQ ID NO: 5852 - DNA, 20 bp, Artificial Sequence
  MKO10005852_A_Atp6ap1
  gRNA
cacactcaccgttacctgtg

SEQ ID NO: 5853 - DNA, 20 bp, Artificial Sequence
  MKO10005853_A_Atp6ap2
  gRNA
acgtctgggattcgatctcc

SEQ ID NO: 5854 - DNA, 20 bp, Artificial Sequence
  MKO10005854_A_Atp6ap2
  gRNA
tagcccgtggccggtggaat

SEQ ID NO: 5855 - DNA, 20 bp, Artificial Sequence
  MKO10005855_A_Atp6ap2
  gRNA
tttagcatattaagatcgcc

SEQ ID NO: 5856 - DNA, 20 bp, Artificial Sequence
  MKO10005856_A_Atp6v0a1
  gRNA
tctaagtcgatcatgtcccg

SEQ ID NO: 5857 - DNA, 20 bp, Artificial Sequence
  MKO10005857_A_Atp6v0a1
  gRNA
agcttgggaaggtccaattt

SEQ ID NO: 5858 - DNA, 20 bp, Artificial Sequence
  MKO10005858_A_Atp6v0a1
  gRNA
tttcacttacatcccgaaat

SEQ ID NO: 5859 - DNA, 20 bp, Artificial Sequence
  MKO10005859_A_Atp6v0a2
  gRNA
tgaagagctcgaacgaatac

SEQ ID NO: 5860 - DNA, 20 bp, Artificial Sequence
  MKO10005860_A_Atp6v0a2
  gRNA
caacagagagtcgttctcta

SEQ ID NO: 5861 - DNA, 20 bp, Artificial Sequence
  MKO10005861_A_Atp6v0a2
  gRNA
ctacagctgcatgcagcggc

SEQ ID NO: 5862 - DNA, 20 bp, Artificial Sequence
  MKO10005862_A_Atp6v0a4
  gRNA
tccagggtgatcatttcccg

SEQ ID NO: 5863 - DNA, 20 bp, Artificial Sequence
  MKO10005863_A_Atp6v0a4
  gRNA
agtttgtgaatgaagtccga

SEQ ID NO: 5864 - DNA, 20 bp, Artificial Sequence
  MKO10005864_A_Atp6v0a4
  gRNA
gcagacgactctagagaagt

SEQ ID NO: 5865 - DNA, 20 bp, Artificial Sequence
  MKO10005865_A_Atp6v0b
  gRNA
cggaaacttcccccttcatg

SEQ ID NO: 5866 - DNA, 20 bp, Artificial Sequence
  MKO10005866_A_Atp6v0b
  gRNA
gcccagattcgaccacatga

SEQ ID NO: 5867 - DNA, 20 bp, Artificial Sequence
  MKO10005867_A_Atp6v0b
  gRNA
accaggggaatctatataac

SEQ ID NO: 5868 - DNA, 20 bp, Artificial Sequence
  MKO10005868_A_Atp6v0c
  gRNA
atgctcaccgctgaagacca

SEQ ID NO: 5869 - DNA, 20 bp, Artificial Sequence
  MKO10005869_A_Atp6v0c
  gRNA
tgcgatgccagtgccactct

SEQ ID NO: 5870 - DNA, 20 bp, Artificial Sequence
  MKO10005870_A_Atp6v0c
  gRNA
acagccatgggagccgccta

SEQ ID NO: 5871 - DNA, 20 bp, Artificial Sequence
  MKO10005871_A_Atp6v0d1
  gRNA
tggcgagcggctcataagca

SEQ ID NO: 5872 - DNA, 20 bp, Artificial Sequence
  MKO10005872_A_Atp6v0d1
  gRNA
tcgatgactgacaccgtcag

SEQ ID NO: 5873 - DNA, 20 bp, Artificial Sequence
  MKO10005873_A_Atp6v0d1
  gRNA
caagttcagctattgaacgc

SEQ ID NO: 5874 - DNA, 20 bp, Artificial Sequence
  MKO10005874_A_Atp6v0d2
  gRNA
cgttatgtgtcccattcttg

SEQ ID NO: 5875 - DNA, 20 bp, Artificial Sequence
  MKO10005875_A_Atp6v0d2
  gRNA
gtgctggttgaaacaccatt

SEQ ID NO: 5876 - DNA, 20 bp, Artificial Sequence
  MKO10005876_A_Atp6v0d2
  gRNA
cctcatctccgtgtcaattt

SEQ ID NO: 5877 - DNA, 20 bp, Artificial Sequence
  MKO10005877_A_Atp6v0e2
  gRNA
ttacccgcggttgggtcctt

SEQ ID NO: 5878 - DNA, 20 bp, Artificial Sequence
  MKO10005878_A_Atp6v0e2
  gRNA
agggcccagcgatgccgatg

SEQ ID NO: 5879 - DNA, 20 bp, Artificial Sequence
  MKO10005879_A_Atp6v0e2
  gRNA
cccaactgaaccccctgttt

SEQ ID NO: 5880 - DNA, 20 bp, Artificial Sequence
  MKO10005880_A_Atp6v0e
  gRNA
aacacgctcatcacgatcaa

SEQ ID NO: 5881 - DNA, 20 bp, Artificial Sequence
  MKO10005881_A_Atp6v0e
  gRNA
ttacccccggttaggaccct

SEQ ID NO: 5882 - DNA, 20 bp, Artificial Sequence
  MKO10005882_A_Atp6v0e
  gRNA
tagttggctgattgcaattc

SEQ ID NO: 5883 - DNA, 20 bp, Artificial Sequence
  MKO10005883_A_Atp6v1a
  gRNA
gtgacttacatcgcgccgcc

SEQ ID NO: 5884 - DNA, 20 bp, Artificial Sequence
  MKO10005884_A_Atp6v1a
  gRNA
ccgcactggtaaacctctct

SEQ ID NO: 5885 - DNA, 20 bp, Artificial Sequence
  MKO10005885_A_Atp6v1a
  gRNA
ggacccagctcgaccgagag

SEQ ID NO: 5886 - DNA, 20 bp, Artificial Sequence
  MKO10005886_A_Atp6v1b1
  gRNA
gtcaactttaccctccctga

SEQ ID NO: 5887 - DNA, 20 bp, Artificial Sequence
  MKO10005887_A_Atp6v1b1
  gRNA
ctaactcacaggtgtttgaa

SEQ ID NO: 5888 - DNA, 20 bp, Artificial Sequence
  MKO10005888_A_Atp6v1b1
  gRNA
aggacagtgtgcagcgtcaa

SEQ ID NO: 5889 - DNA, 20 bp, Artificial Sequence
  MKO10005889_A_Atp6v1b2
  gRNA
tcaggaaaacccattgaccg

SEQ ID NO: 5890 - DNA, 20 bp, Artificial Sequence
  MKO10005890_A_Atp6v1b2
  gRNA
gtggacaatctcagcgtatc

SEQ ID NO: 5891 - DNA, 20 bp, Artificial Sequence
  MKO10005891_A_Atp6v1b2
  gRNA
ccgttaccttcacatgatct

SEQ ID NO: 5892 - DNA, 20 bp, Artificial Sequence
  MKO10005892_A_Atp6v1c1
  gRNA
tcgataatgacctaaagtct

SEQ ID NO: 5893 - DNA, 20 bp, Artificial Sequence
  MKO10005893_A_Atp6v1c1
  gRNA
tcccttgtaggttggcacgt

SEQ ID NO: 5894 - DNA, 20 bp, Artificial Sequence
  MKO10005894_A_Atp6v1c1
  gRNA
ggttggcttgtcggatgaac

SEQ ID NO: 5895 - DNA, 20 bp, Artificial Sequence
  MKO10005895_A_Atp6v1c2
  gRNA
tatttcggcccctggcgata

SEQ ID NO: 5896 - DNA, 20 bp, Artificial Sequence
  MKO10005896_A_Atp6v1c2
  gRNA
tggacctacctccgttagcc

SEQ ID NO: 5897 - DNA, 20 bp, Artificial Sequence
  MKO10005897_A_Atp6v1c2
  gRNA
atatcccgccaagcagccac

SEQ ID NO: 5898 - DNA, 20 bp, Artificial Sequence
  MKO10005898_A_Atp6v1d
  gRNA
gtgtttgaacattaccacga

SEQ ID NO: 5899 - DNA, 20 bp, Artificial Sequence
  MKO10005899_A_Atp6v1d
  gRNA
ctgtcgaaatcgaagagtta

SEQ ID NO: 5900 - DNA, 20 bp, Artificial Sequence
  MKO10005900_A_Atp6v1d
  gRNA
acttactgtcagttccttcg

SEQ ID NO: 5901 - DNA, 20 bp, Artificial Sequence
  MKO10005901_A_Atp6v1e1
  gRNA
gacccgttaccaagtgctgc

SEQ ID NO: 5902 - DNA, 20 bp, Artificial Sequence
  MKO10005902_A_Atp6v1e1
  gRNA
ccttgcttgattcatcaagt

SEQ ID NO: 5903 - DNA, 20 bp, Artificial Sequence
  MKO10005903_A_Atp6v1e1
  gRNA
ccaacttgatgaatcaagca

SEQ ID NO: 5904 - DNA, 20 bp, Artificial Sequence
  MKO10005904_A_Atp6v1e2
  gRNA
aatccatgatcttcagccgc

SEQ ID NO: 5905 - DNA, 20 bp, Artificial Sequence
  MKO10005905_A_Atp6v1e2
  gRNA
ggagcacgagcttatccagc

SEQ ID NO: 5906 - DNA, 20 bp, Artificial Sequence
  MKO10005906_A_Atp6v1e2
  gRNA
cgagattcagccgactttcc

SEQ ID NO: 5907 - DNA, 20 bp, Artificial Sequence
  MKO10005907_A_Atp6v1f
  gRNA
aatcgcggtgattggagacg

SEQ ID NO: 5908 - DNA, 20 bp, Artificial Sequence
  MKO10005908_A_Atp6v1f
  gRNA
ggagtctttggctgcatcgt

SEQ ID NO: 5909 - DNA, 20 bp, Artificial Sequence
  MKO10005909_A_Atp6v1f
  gRNA
gcggacaggatggcgggcag

SEQ ID NO: 5910 - DNA, 20 bp, Artificial Sequence
  MKO10005910_A_Atp6v1g1
  gRNA
gagctcacgcttgcgggcct

SEQ ID NO: 5911 - DNA, 20 bp, Artificial Sequence
  MKO10005911_A_Atp6v1g1
  gRNA
ttgaaacaggaaagaaccgg

SEQ ID NO: 5912 - DNA, 20 bp, Artificial Sequence
  MKO10005912_A_Atp6v1g1
  gRNA
gaggcccaccgcagcttcct

SEQ ID NO: 5913 - DNA, 20 bp, Artificial Sequence
  MKO10005913_A_Atp6v1g2
  gRNA
ctagacagtaacccgatagt

SEQ ID NO: 5914 - DNA, 20 bp, Artificial Sequence
  MKO10005914_A_Atp6v1g2
  gRNA
cgcgctcccgattcctctgc

SEQ ID NO: 5915 - DNA, 20 bp, Artificial Sequence
  MKO10005915_A_Atp6v1g2
  gRNA
ccttcgcctgcttcagtcgc

SEQ ID NO: 5916 - DNA, 20 bp, Artificial Sequence
  MKO10005916_A_Atp6v1g3
  gRNA
gctcttctatttcatccgag

SEQ ID NO: 5917 - DNA, 20 bp, Artificial Sequence
  MKO10005917_A_Atp6v1g3
  gRNA
gaaggacttccgcctgaagc

SEQ ID NO: 5918 - DNA, 20 bp, Artificial Sequence
  MKO10005918_A_Atp6v1g3
  gRNA
gattaagcagctattgagca

SEQ ID NO: 5919 - DNA, 20 bp, Artificial Sequence
  MKO10005919_A_Atp6v1h
  gRNA
cctgccaatgttgaatcgcc

SEQ ID NO: 5920 - DNA, 20 bp, Artificial Sequence
  MKO10005920_A_Atp6v1h
  gRNA
ttatcgccaagttagctgct

SEQ ID NO: 5921 - DNA, 20 bp, Artificial Sequence
  MKO10005921_A_Atp6v1h
  gRNA
cctggcgattcaacattggc

SEQ ID NO: 5922 - DNA, 20 bp, Artificial Sequence
  MKO10005922_A_Atp7a
  gRNA
aacacggtattggttaagac

SEQ ID NO: 5923 - DNA, 20 bp, Artificial Sequence
  MKO10005923_A_Atp7a
  gRNA
caaggtgttcagcgcattaa

SEQ ID NO: 5924 - DNA, 20 bp, Artificial Sequence
  MKO10005924_A_Atp7a
  gRNA
gcagccgaagtacctcaaat

SEQ ID NO: 5925 - DNA, 20 bp, Artificial Sequence
  MKO10005925_A_Atp7b
  gRNA
ttcgtagccaacattgtcga

SEQ ID NO: 5926 - DNA, 20 bp, Artificial Sequence
  MKO10005926_A_Atp7b
  gRNA
tcattcaacccgaagacctc

SEQ ID NO: 5927 - DNA, 20 bp, Artificial Sequence
  MKO10005927_A_Atp7b
  gRNA
tgactgacgcttcgaagccc

SEQ ID NO: 5928 - DNA, 20 bp, Artificial Sequence
  MKO10005928_A_Atp8a1
  gRNA
actcaccttccgcgcgcgag

SEQ ID NO: 5929 - DNA, 20 bp, Artificial Sequence
  MKO10005929_A_Atp8a1
  gRNA
gtcggagatccgctcgcgcg

SEQ ID NO: 5930 - DNA, 20 bp, Artificial Sequence
  MKO10005930_A_Atp8a1
  gRNA
aaccagtgttgtgtaacgac

SEQ ID NO: 5931 - DNA, 20 bp, Artificial Sequence
  MKO10005931_A_Atp8a2
  gRNA
agggtggtgtaccgtcctgt

SEQ ID NO: 5932 - DNA, 20 bp, Artificial Sequence
  MKO10005932_A_Atp8a2
  gRNA
atcccagacgtctcaccaac

SEQ ID NO: 5933 - DNA, 20 bp, Artificial Sequence
  MKO10005933_A_Atp8a2
  gRNA
aaatgtcaacacgctgtact

SEQ ID NO: 5934 - DNA, 20 bp, Artificial Sequence
  MKO10005934_A_Atp8b1
  gRNA
ggcaaattacctgcaggatc

SEQ ID NO: 5935 - DNA, 20 bp, Artificial Sequence
  MKO10005935_A_Atp8b1
  gRNA
tccaaaggctcgtcataaaa

SEQ ID NO: 5936 - DNA, 20 bp, Artificial Sequence
  MKO10005936_A_Atp8b1
  gRNA
taggacgtgtgaagtcatta

SEQ ID NO: 5937 - DNA, 20 bp, Artificial Sequence
  MKO10005937_A_Atp8b2
  gRNA
ccgccacaagagtgataacc

SEQ ID NO: 5938 - DNA, 20 bp, Artificial Sequence
  MKO10005938_A_Atp8b2
  gRNA
acaactcacatagtcatcgg

SEQ ID NO: 5939 - DNA, 20 bp, Artificial Sequence
  MKO10005939_A_Atp8b2
  gRNA
tcacctggttatcactcttg

SEQ ID NO: 5940 - DNA, 20 bp, Artificial Sequence
  MKO10005940_A_Atp8b3
  gRNA
tctccccgcagagttcacct

SEQ ID NO: 5941 - DNA, 20 bp, Artificial Sequence
  MKO10005941_A_Atp8b3
  gRNA
tgttggtccagggtcgacac

SEQ ID NO: 5942 - DNA, 20 bp, Artificial Sequence
  MKO10005942_A_Atp8b3
  gRNA
agtagagattggacattcga

SEQ ID NO: 5943 - DNA, 20 bp, Artificial Sequence
  MKO10005943_A_Atp8b4
  gRNA
cagccgtcatcgagatcacc

SEQ ID NO: 5944 - DNA, 20 bp, Artificial Sequence
  MKO10005944_A_Atp8b4
  gRNA
aatactcacatagtcgtcgg

SEQ ID NO: 5945 - DNA, 20 bp, Artificial Sequence
  MKO10005945_A_Atp8b4
  gRNA
aaatgtgagaacgttgtact

SEQ ID NO: 5946 - DNA, 20 bp, Artificial Sequence
  MKO10005946_A_Atp8b5
  gRNA
gaaagacgccatcgatgacg

SEQ ID NO: 5947 - DNA, 20 bp, Artificial Sequence
  MKO10005947_A_Atp8b5
  gRNA
gaccgtgatacccctgattg

SEQ ID NO: 5948 - DNA, 20 bp, Artificial Sequence
  MKO10005948_A_Atp8b5
  gRNA
agagttgaaccttctattgt

SEQ ID NO: 5949 - DNA, 20 bp, Artificial Sequence
  MKO10005949_A_Atp9a
  gRNA
gctcacctcgtgacgtgagc

SEQ ID NO: 5950 - DNA, 20 bp, Artificial Sequence
  MKO10005950_A_Atp9a
  gRNA
ccttgtcacgcacataacat

SEQ ID NO: 5951 - DNA, 20 bp, Artificial Sequence
  MKO10005951_A_Atp9a
  gRNA
cgcagttcgtcccagagatg

SEQ ID NO: 5952 - DNA, 20 bp, Artificial Sequence
  MKO10005952_A_Atp9b
  gRNA
cgcttcacgtgcaatcgtaa

SEQ ID NO: 5953 - DNA, 20 bp, Artificial Sequence
  MKO10005953_A_Atp9b
  gRNA
agctaaaagctcgaacagta

SEQ ID NO: 5954 - DNA, 20 bp, Artificial Sequence
  MKO10005954_A_Atp9b
  gRNA
accacacattacctcgagct

SEQ ID NO: 5955 - DNA, 20 bp, Artificial Sequence
  MKO10005955_A_Atpaf1
  gRNA
aactgcggaggaaataaaac

SEQ ID NO: 5956 - DNA, 20 bp, Artificial Sequence
  MKO10005956_A_Atpaf1
  gRNA
tgtatttcagacagatgcct

SEQ ID NO: 5957 - DNA, 20 bp, Artificial Sequence
  MKO10005957_A_Atpaf1
  gRNA
cttgataaaatcactttgtt

SEQ ID NO: 5958 - DNA, 20 bp, Artificial Sequence
  MKO10005958_A_Atpaf2
  gRNA
tgcgatggccagggcttcgc

SEQ ID NO: 5959 - DNA, 20 bp, Artificial Sequence
  MKO10005959_A_Atpaf2
  gRNA
aatgggatcccgtcatagag

SEQ ID NO: 5960 - DNA, 20 bp, Artificial Sequence
  MKO10005960_A_Atpaf2
  gRNA
tcagctggtctttacttcgc

SEQ ID NO: 5961 - DNA, 20 bp, Artificial Sequence
  MKO10005961_A_Atpif1
  gRNA
ctgaagaggatcggtacttc

SEQ ID NO: 5962 - DNA, 20 bp, Artificial Sequence
  MKO10005962_A_Atpif1
  gRNA
ttggcagttcgggctcggtt

SEQ ID NO: 5963 - DNA, 20 bp, Artificial Sequence
  MKO10005963_A_Atpif1
  gRNA
ctctttgcagtcggatagca

SEQ ID NO: 5964 - DNA, 20 bp, Artificial Sequence
  MKO10005964_A_Atraid
  gRNA
tgtgcatacctcccggacac

SEQ ID NO: 5965 - DNA, 20 bp, Artificial Sequence
  MKO10005965_A_Atraid
  gRNA
ggatacatcgaagctaatgc

SEQ ID NO: 5966 - DNA, 20 bp, Artificial Sequence
  MKO10005966_A_Atraid
  gRNA
gatttggccaacaccttccg

SEQ ID NO: 5967 - DNA, 20 bp, Artificial Sequence
  MKO10005967_A_Atrip
  gRNA
ggttaccaaatagtcctata

SEQ ID NO: 5968 - DNA, 20 bp, Artificial Sequence
  MKO10005968_A_Atrip
  gRNA
tatttggtaacccatctaat

SEQ ID NO: 5969 - DNA, 20 bp, Artificial Sequence
  MKO10005969_A_Atrip
  gRNA
tccttacctgacgtgggaga

SEQ ID NO: 5970 - DNA, 20 bp, Artificial Sequence
  MKO10005970_A_Atrnl1
  gRNA
ccagacgtcgtgaccacctc

SEQ ID NO: 5971 - DNA, 20 bp, Artificial Sequence
  MKO10005971_A_Atrnl1
  gRNA
tctgtgtctgcaacgatagt

SEQ ID NO: 5972 - DNA, 20 bp, Artificial Sequence
  MKO10005972_A_Atrnl1
  gRNA
gtctcgttacccctcacttc

SEQ ID NO: 5973 - DNA, 20 bp, Artificial Sequence
  MKO10005973_A_Atrn
  gRNA
tgtaatgcaagcgataccag

SEQ ID NO: 5974 - DNA, 20 bp, Artificial Sequence
  MKO10005974_A_Atrn
  gRNA
cgaagtctcattattctatt

SEQ ID NO: 5975 - DNA, 20 bp, Artificial Sequence
  MKO10005975_A_Atrn
  gRNA
atgtgtccgaataattgctc

SEQ ID NO: 5976 - DNA, 20 bp, Artificial Sequence
  MKO10005976_A_Atrx
  gRNA
ctttggttcatgacaagtcg

SEQ ID NO: 5977 - DNA, 20 bp, Artificial Sequence
  MKO10005977_A_Atrx
  gRNA
ttcatttacattctcatccg

SEQ ID NO: 5978 - DNA, 20 bp, Artificial Sequence
  MKO10005978_A_Atrx
  gRNA
tggaaacaagttgagtacat

SEQ ID NO: 5979 - DNA, 20 bp, Artificial Sequence
  MKO10005979_A_Atr
  gRNA
ttgaagatcgcgtgcttatg

SEQ ID NO: 5980 - DNA, 20 bp, Artificial Sequence
  MKO10005980_A_Atr
  gRNA
aaagccgattcatacccagc

SEQ ID NO: 5981 - DNA, 20 bp, Artificial Sequence
  MKO10005981_A_Atr
  gRNA
gaggccaaagacagttgtat

SEQ ID NO: 5982 - DNA, 20 bp, Artificial Sequence
  MKO10005982_A_Atxn10
  gRNA
cgcaggaacctggatacgat

SEQ ID NO: 5983 - DNA, 20 bp, Artificial Sequence
  MKO10005983_A_Atxn10
  gRNA
actctctggaagatcgttct

SEQ ID NO: 5984 - DNA, 20 bp, Artificial Sequence
  MKO10005984_A_Atxn10
  gRNA
actcacggccactctgacgc

SEQ ID NO: 5985 - DNA, 20 bp, Artificial Sequence
  MKO10005985_A_Atxn1l
  gRNA
ctaaagcgccaactacccgc

SEQ ID NO: 5986 - DNA, 20 bp, Artificial Sequence
  MKO10005986_A_Atxn1l
  gRNA
tcactcgaatactcaaccac

SEQ ID NO: 5987 - DNA, 20 bp, Artificial Sequence
  MKO10005987_A_Atxn1l
  gRNA
tggcggcgccagcacatcga

SEQ ID NO: 5988 - DNA, 20 bp, Artificial Sequence
  MKO10005988_A_Atxn1
  gRNA
catcgaaggccgatctaacg

SEQ ID NO: 5989 - DNA, 20 bp, Artificial Sequence
  MKO10005989_A_Atxn1
  gRNA
ggcgccggagacccgtaaac

SEQ ID NO: 5990 - DNA, 20 bp, Artificial Sequence
  MKO10005990_A_Atxn1
  gRNA
tgggggagatgtcgcccgcc

SEQ ID NO: 5991 - DNA, 20 bp, Artificial Sequence
  MKO10005991_A_Atxn2l
  gRNA
gggttctacttgtgacgtaa

SEQ ID NO: 5992 - DNA, 20 bp, Artificial Sequence
  MKO10005992_A_Atxn2l
  gRNA
tggacaagcagaacgtcgct

SEQ ID NO: 5993 - DNA, 20 bp, Artificial Sequence
  MKO10005993_A_Atxn2l
  gRNA
gcctcgccgggaagacattg

SEQ ID NO: 5994 - DNA, 20 bp, Artificial Sequence
  MKO10005994_A_Atxn2
  gRNA
aagttactcaccgtaggctg

SEQ ID NO: 5995 - DNA, 20 bp, Artificial Sequence
  MKO10005995_A_Atxn2
  gRNA
cctacctctccgtgcataac

SEQ ID NO: 5996 - DNA, 20 bp, Artificial Sequence
  MKO10005996_A_Atxn2
  gRNA
caaatgctcagacttcgttg

SEQ ID NO: 5997 - DNA, 20 bp, Artificial Sequence
  MKO10005997_A_Atxn3
  gRNA
gcaattgaggatagctccac

SEQ ID NO: 5998 - DNA, 20 bp, Artificial Sequence
  MKO10005998_A_Atxn3
  gRNA
tcaacagtccagagtaccag

SEQ ID NO: 5999 - DNA, 20 bp, Artificial Sequence
  MKO10005999_A_Atxn3
  gRNA
tgcctgaataacctattgca

SEQ ID NO: 6000 - DNA, 20 bp, Artificial Sequence
  MKO10006000_A_Atxn7l1
  gRNA
gggcttgacgacctgattgc

SEQ ID NO: 6001 - DNA, 20 bp, Artificial Sequence
  MKO10006001_A_Atxn7l1
  gRNA
cgtgtgcagtgcctgcaatc

SEQ ID NO: 6002 - DNA, 20 bp, Artificial Sequence
  MKO10006002_A_Atxn7l1
  gRNA
ccaagccctagaacagcgtc

SEQ ID NO: 6003 - DNA, 20 bp, Artificial Sequence
  MKO10006003_A_Atxn7l2
  gRNA
ggctccagtcaccgcgccga

SEQ ID NO: 6004 - DNA, 20 bp, Artificial Sequence
  MKO10006004_A_Atxn7l2
  gRNA
tgaccccgcactgcctgttg

SEQ ID NO: 6005 - DNA, 20 bp, Artificial Sequence
  MKO10006005_A_Atxn7l2
  gRNA
cccgggcataaagcttgctg

SEQ ID NO: 6006 - DNA, 20 bp, Artificial Sequence
  MKO10006006_A_Atxn7l3b
  gRNA
gtgaacgctgcagctccgtc

SEQ ID NO: 6007 - DNA, 20 bp, Artificial Sequence
  MKO10006007_A_Atxn7l3b
  gRNA
gatctatgtagacctgatag

SEQ ID NO: 6008 - DNA, 20 bp, Artificial Sequence
  MKO10006008_A_Atxn7l3b
  gRNA
tcccggggacgggccccaga

SEQ ID NO: 6009 - DNA, 20 bp, Artificial Sequence
  MKO10006009_A_Atxn7l3
  gRNA
ctcaccgacggttggcgatt

SEQ ID NO: 6010 - DNA, 20 bp, Artificial Sequence
  MKO10006010_A_Atxn7l3
  gRNA
gcagccgaatcgccaaccgt

SEQ ID NO: 6011 - DNA, 20 bp, Artificial Sequence
  MKO10006011_A_Atxn7l3
  gRNA
ccaaacaagaatcctcgacc

SEQ ID NO: 6012 - DNA, 20 bp, Artificial Sequence
  MKO10006012_A_Atxn7
  gRNA
gccatacttacactcgtccg

SEQ ID NO: 6013 - DNA, 20 bp, Artificial Sequence
  MKO10006013_A_Atxn7
  gRNA
atatctcctagggaccgaat

SEQ ID NO: 6014 - DNA, 20 bp, Artificial Sequence
  MKO10006014_A_Atxn7
  gRNA
gttgcagatatgccgatctt

SEQ ID NO: 6015 - DNA, 20 bp, Artificial Sequence
  MKO10006015_A_Auh
  gRNA
aaggccgtctatggctgcga

SEQ ID NO: 6016 - DNA, 20 bp, Artificial Sequence
  MKO10006016_A_Auh
  gRNA
gcgtgtgacattcgagtagc

SEQ ID NO: 6017 - DNA, 20 bp, Artificial Sequence
  MKO10006017_A_Auh
  gRNA
caatgtcattgatcaccgat

SEQ ID NO: 6018 - DNA, 20 bp, Artificial Sequence
  MKO10006018_A_Aup1
  gRNA
cgcgctactgctctacgcgc

SEQ ID NO: 6019 - DNA, 20 bp, Artificial Sequence
  MKO10006019_A_Aup1
  gRNA
gactccgcgatcaccgcgtc

SEQ ID NO: 6020 - DNA, 20 bp, Artificial Sequence
  MKO10006020_A_Aup1
  gRNA
tgcccgacagcgtcctccgc

SEQ ID NO: 6021 - DNA, 20 bp, Artificial Sequence
  MKO10006021_A_Aurkaip1
  gRNA
gacccggtttctacgtcgca

SEQ ID NO: 6022 - DNA, 20 bp, Artificial Sequence
  MKO10006022_A_Aurkaip1
  gRNA
ccaccacaagtaccgtaaac

SEQ ID NO: 6023 - DNA, 20 bp, Artificial Sequence
  MKO10006023_A_Aurkaip1
  gRNA
gccgtgaagtcaggcgcgcc

SEQ ID NO: 6024 - DNA, 20 bp, Artificial Sequence
  MKO10006024_A_Aurka
  gRNA
tcagtcaccaagacgcgttt

SEQ ID NO: 6025 - DNA, 20 bp, Artificial Sequence
  MKO10006025_A_Aurka
  gRNA
ccactcaccgcaggtgcgac

SEQ ID NO: 6026 - DNA, 20 bp, Artificial Sequence
  MKO10006026_A_Aurka
  gRNA
gaccacttaccggaggctgc

SEQ ID NO: 6027 - DNA, 20 bp, Artificial Sequence
  MKO10006027_A_Aurkb
  gRNA
tccttgtagagttccccgcg

SEQ ID NO: 6028 - DNA, 20 bp, Artificial Sequence
  MKO10006028_A_Aurkb
  gRNA
tttcgatctctcggcgaagc

SEQ ID NO: 6029 - DNA, 20 bp, Artificial Sequence
  MKO10006029_A_Aurkb
  gRNA
cgatgagcagcggactgcca

SEQ ID NO: 6030 - DNA, 20 bp, Artificial Sequence
  MKO10006030_A_Aurkc
  gRNA
tcaccgtggctgtacgctgc

SEQ ID NO: 6031 - DNA, 20 bp, Artificial Sequence
  MKO10006031_A_Aurkc
  gRNA
cactcacctggttgaggtgc

SEQ ID NO: 6032 - DNA, 20 bp, Artificial Sequence
  MKO10006032_A_Aurkc
  gRNA
ttccttagctactggccaga

SEQ ID NO: 6033 - DNA, 20 bp, Artificial Sequence
  MKO10006033_A_Auts2
  gRNA
agtgacagcgaaagcgctag

SEQ ID NO: 6034 - DNA, 20 bp, Artificial Sequence
  MKO10006034_A_Auts2
  gRNA
cgtttctccgcacgttcctg

SEQ ID NO: 6035 - DNA, 20 bp, Artificial Sequence
  MKO10006035_A_Auts2
  gRNA
agatgtagcagttaagccgc

SEQ ID NO: 6036 - DNA, 20 bp, Artificial Sequence
  MKO10006036_A_Aven
  gRNA
cacatcgaagaatgtcaccg

SEQ ID NO: 6037 - DNA, 20 bp, Artificial Sequence
  MKO10006037_A_Aven
  gRNA
ctagaattcagcactctacg

SEQ ID NO: 6038 - DNA, 20 bp, Artificial Sequence
  MKO10006038_A_Aven
  gRNA
tggtcccgagatgtctggtc

SEQ ID NO: 6039 - DNA, 20 bp, Artificial Sequence
  MKO10006039_A_Avil
  gRNA
cacgagtccgacaccttccg

SEQ ID NO: 6040 - DNA, 20 bp, Artificial Sequence
  MKO10006040_A_Avil
  gRNA
aggtgtcggactcgtggtac

SEQ ID NO: 6041 - DNA, 20 bp, Artificial Sequence
  MKO10006041_A_Avil
  gRNA
tgagactcacctccgtggct

SEQ ID NO: 6042 - DNA, 20 bp, Artificial Sequence
  MKO10006042_A_Avl9
  gRNA
tgatagttatgtgcaccatc

SEQ ID NO: 6043 - DNA, 20 bp, Artificial Sequence
  MKO10006043_A_Avl9
  gRNA
ggcaagtacttccattcttc

SEQ ID NO: 6044 - DNA, 20 bp, Artificial Sequence
  MKO10006044_A_Avl9
  gRNA
ttatcgacaaattgaagcca

SEQ ID NO: 6045 - DNA, 20 bp, Artificial Sequence
  MKO10006045_A_Avpi1
  gRNA
aagagcgggcccagataatc

SEQ ID NO: 6046 - DNA, 20 bp, Artificial Sequence
  MKO10006046_A_Avpi1
  gRNA
tcgtgagcgagccacccctg

SEQ ID NO: 6047 - DNA, 20 bp, Artificial Sequence
  MKO10006047_A_Avpi1
  gRNA
ttctacagcgtctgaccccc

SEQ ID NO: 6048 - DNA, 20 bp, Artificial Sequence
  MKO10006048_A_Avpr1a
  gRNA
cataccggtccaaacgaaat

SEQ ID NO: 6049 - DNA, 20 bp, Artificial Sequence
  MKO10006049_A_Avpr1a
  gRNA
gggtaccacgaagaccccgc

SEQ ID NO: 6050 - DNA, 20 bp, Artificial Sequence
  MKO10006050_A_Avpr1a
  gRNA
agccagtaacgccgtgatcg

SEQ ID NO: 6051 - DNA, 20 bp, Artificial Sequence
  MKO10006051_A_Avpr1b
  gRNA
ggacatcacctatcgcttcc

SEQ ID NO: 6052 - DNA, 20 bp, Artificial Sequence
  MKO10006052_A_Avpr1b
  gRNA
catgacgctggaccggtacc

SEQ ID NO: 6053 - DNA, 20 bp, Artificial Sequence
  MKO10006053_A_Avpr1b
  gRNA
aaatccttcagcgagcccgc

SEQ ID NO: 6054 - DNA, 20 bp, Artificial Sequence
  MKO10006054_A_Avpr2
  gRNA
ctaatacgacggggtcggcg

SEQ ID NO: 6055 - DNA, 20 bp, Artificial Sequence
  MKO10006055_A_Avpr2
  gRNA
cacgccgaccccgtcgtatt

SEQ ID NO: 6056 - DNA, 20 bp, Artificial Sequence
  MKO10006056_A_Avpr2
  gRNA
taccagacgtggtagacacc

SEQ ID NO: 6057 - DNA, 20 bp, Artificial Sequence
  MKO10006057_A_Avp
  gRNA
tgaggcggaaaaaaccgtcg

SEQ ID NO: 6058 - DNA, 20 bp, Artificial Sequence
  MKO10006058_A_Avp
  gRNA
agtgcccacctatgctcgcc

SEQ ID NO: 6059 - DNA, 20 bp, Artificial Sequence
  MKO10006059_A_Avp
  gRNA
cttagcagcagcgcccgagc

SEQ ID NO: 6060 - DNA, 20 bp, Artificial Sequence
  MKO10006060_A_Awat1
  gRNA
aaacctcgtgggcattgtcg

SEQ ID NO: 6061 - DNA, 20 bp, Artificial Sequence
  MKO10006061_A_Awat1
  gRNA
gggccacctacccatgttgg

SEQ ID NO: 6062 - DNA, 20 bp, Artificial Sequence
  MKO10006062_A_Awat1
  gRNA
caggtggcaggcgttcagac

SEQ ID NO: 6063 - DNA, 20 bp, Artificial Sequence
  MKO10006063_A_Awat2
  gRNA
tgggcccttacctcgctcag

SEQ ID NO: 6064 - DNA, 20 bp, Artificial Sequence
  MKO10006064_A_Awat2
  gRNA
ctcatggcccattcatgttt

SEQ ID NO: 6065 - DNA, 20 bp, Artificial Sequence
  MKO10006065_A_Awat2
  gRNA
tagcgactacttcccactca

SEQ ID NO: 6066 - DNA, 20 bp, Artificial Sequence
  MKO10006066_A_Axin1
  gRNA
gtttcaccgaagatgccccc

SEQ ID NO: 6067 - DNA, 20 bp, Artificial Sequence
  MKO10006067_A_Axin1
  gRNA
catctaccgaaagtacatcc

SEQ ID NO: 6068 - DNA, 20 bp, Artificial Sequence
  MKO10006068_A_Axin1
  gRNA
agagcttattcaccgtctag

SEQ ID NO: 6069 - DNA, 20 bp, Artificial Sequence
  MKO10006069_A_Axin2
  gRNA
taactcgctgtcgttggcgc

SEQ ID NO: 6070 - DNA, 20 bp, Artificial Sequence
  MKO10006070_A_Axin2
  gRNA
aacgtgcttcgtcgtctgtt

SEQ ID NO: 6071 - DNA, 20 bp, Artificial Sequence
  MKO10006071_A_Axin2
  gRNA
atcgtcggtcagtgcgtcgc

SEQ ID NO: 6072 - DNA, 20 bp, Artificial Sequence
  MKO10006072_A_Axl
  gRNA
cggaacccgtgaccctactc

SEQ ID NO: 6073 - DNA, 20 bp, Artificial Sequence
  MKO10006073_A_Axl
  gRNA
aagtgtccccgtgagtcctc

SEQ ID NO: 6074 - DNA, 20 bp, Artificial Sequence
  MKO10006074_A_Axl
  gRNA
gaggatgggcagggtcccgc

SEQ ID NO: 6075 - DNA, 20 bp, Artificial Sequence
  MKO10006075_A_Aym1
  gRNA
gagcacagcaacaagctcag

SEQ ID NO: 6076 - DNA, 20 bp, Artificial Sequence
  MKO10006076_A_Aym1
  gRNA
tgctctcacagaactttctg

SEQ ID NO: 6077 - DNA, 20 bp, Artificial Sequence
  MKO10006077_A_Aym1
  gRNA
ctcctctctctaagagataa

SEQ ID NO: 6078 - DNA, 20 bp, Artificial Sequence
  MKO10006078_A_Azgp1
  gRNA
gatgaaatcctctccgtcgt

SEQ ID NO: 6079 - DNA, 20 bp, Artificial Sequence
  MKO10006079_A_Azgp1
  gRNA
agtgtgtacctattcggtcc

SEQ ID NO: 6080 - DNA, 20 bp, Artificial Sequence
  MKO10006080_A_Azgp1
  gRNA
aaacctcggaaaacctttgc

SEQ ID NO: 6081 - DNA, 20 bp, Artificial Sequence
  MKO10006081_A_Azi1
  gRNA
ccttaccaggacgttccacg

SEQ ID NO: 6082 - DNA, 20 bp, Artificial Sequence
  MKO10006082_A_Azi1
  gRNA
ccagcttcaccgctaacaac

SEQ ID NO: 6083 - DNA, 20 bp, Artificial Sequence
  MKO10006083_A_Azi1
  gRNA
tgggggagcccgtccatgac

SEQ ID NO: 6084 - DNA, 20 bp, Artificial Sequence
  MKO10006084_A_Azi2
  gRNA
ggcctatcatgcatatcgtg

SEQ ID NO: 6085 - DNA, 20 bp, Artificial Sequence
  MKO10006085_A_Azi2
  gRNA
actccactctcagcgtaccc

SEQ ID NO: 6086 - DNA, 20 bp, Artificial Sequence
  MKO10006086_A_Azi2
  gRNA
aacctcacgatatgcatgat

SEQ ID NO: 6087 - DNA, 20 bp, Artificial Sequence
  MKO10006087_A_Azin1
  gRNA
acacacatcgagcatcagac

SEQ ID NO: 6088 - DNA, 20 bp, Artificial Sequence
  MKO10006088_A_Azin1
  gRNA
tccagccgtgcttgagatct

SEQ ID NO: 6089 - DNA, 20 bp, Artificial Sequence
  MKO10006089_A_Azin1
  gRNA
ttgcacttcaccgtgtaaaa

SEQ ID NO: 6090 - DNA, 20 bp, Artificial Sequence
  MKO10006090_A_B020004C17Rik
  gRNA
tgacctcggcagctgaaggt

SEQ ID NO: 6091 - DNA, 20 bp, Artificial Sequence
  MKO10006091_A_B020004C17Rik
  gRNA
tttgatcctatatgacatct

SEQ ID NO: 6092 - DNA, 20 bp, Artificial Sequence
  MKO10006092_A_B020004C17Rik
  gRNA
atcatcagcgatgggttccc

SEQ ID NO: 6093 - DNA, 20 bp, Artificial Sequence
  MKO10006093_A_B020004J07Rik
  gRNA
tttccagccgacctatattg

SEQ ID NO: 6094 - DNA, 20 bp, Artificial Sequence
  MKO10006094_A_B020004J07Rik
  gRNA
aagacctcgctgataacctc

SEQ ID NO: 6095 - DNA, 20 bp, Artificial Sequence
  MKO10006095_A_B020004J07Rik
  gRNA
gctaacctaagcaagttgac

SEQ ID NO: 6096 - DNA, 20 bp, Artificial Sequence
  MKO10006096_A_B020031M17Rik
  gRNA
ccttgtactctgggcggcca

SEQ ID NO: 6097 - DNA, 20 bp, Artificial Sequence
  MKO10006097_A_B020031M17Rik
  gRNA
actgcccagtgcacaagcct

SEQ ID NO: 6098 - DNA, 20 bp, Artificial Sequence
  MKO10006098_A_B020031M17Rik
  gRNA
catgggtaaagccaagaaga

SEQ ID NO: 6099 - DNA, 20 bp, Artificial Sequence
  MKO10006099_A_B230118H07Rik
  gRNA
tgatatgacccgggctggaa

SEQ ID NO: 6100 - DNA, 20 bp, Artificial Sequence
  MKO10006100_A_B230118H07Rik
  gRNA
agcacatacccttgttcatc

SEQ ID NO: 6101 - DNA, 20 bp, Artificial Sequence
  MKO10006101_A_B230118H07Rik
  gRNA
atatcctgttccacctcacc

SEQ ID NO: 6102 - DNA, 20 bp, Artificial Sequence
  MKO10006102_A_B230216G23Rik
  gRNA
cttgcagaccggccgcctcc

SEQ ID NO: 6103 - DNA, 20 bp, Artificial Sequence
  MKO10006103_A_B230216G23Rik
  gRNA
tcctctccgaccagagccgt

SEQ ID NO: 6104 - DNA, 20 bp, Artificial Sequence
  MKO10006104_A_B230216G23Rik
  gRNA
cttgtaggggcccagcgtcc

SEQ ID NO: 6105 - DNA, 20 bp, Artificial Sequence
  MKO10006105_A_B230217C12Rik
  gRNA
ggtcggtcagcgcggagaaa

SEQ ID NO: 6106 - DNA, 20 bp, Artificial Sequence
  MKO10006106_A_B230217C12Rik
  gRNA
cctcttgctggacccgacac

SEQ ID NO: 6107 - DNA, 20 bp, Artificial Sequence
  MKO10006107_A_B230217C12Rik
  gRNA
catcctgcttgctgacgcac

SEQ ID NO: 6108 - DNA, 20 bp, Artificial Sequence
  MKO10006108_A_B230219D22Rik
  gRNA
ctcgcttaccagatcgattg

SEQ ID NO: 6109 - DNA, 20 bp, Artificial Sequence
  MKO10006109_A_B230219D22Rik
  gRNA
acagaacgctggattactgc

SEQ ID NO: 6110 - DNA, 20 bp, Artificial Sequence
  MKO10006110_A_B230219D22Rik
  gRNA
gctgacttggtagttcccga

SEQ ID NO: 6111 - DNA, 20 bp, Artificial Sequence
  MKO10006111_A_B2m
  gRNA
agtatactcacgccacccac

SEQ ID NO: 6112 - DNA, 20 bp, Artificial Sequence
  MKO10006112_A_B2m
  gRNA
agtcgtcagcatggctcgct

SEQ ID NO: 6113 - DNA, 20 bp, Artificial Sequence
  MKO10006113_A_B2m
  gRNA
ccgagcccaagaccgtctac

SEQ ID NO: 6114 - DNA, 20 bp, Artificial Sequence
  MKO10006114_A_B3galnt1
  gRNA
agacgcgtgattgcagccca

SEQ ID NO: 6115 - DNA, 20 bp, Artificial Sequence
  MKO10006115_A_B3galnt1
  gRNA
atgtgatcgagcgcgtcaac

SEQ ID NO: 6116 - DNA, 20 bp, Artificial Sequence
  MKO10006116_A_B3galnt1
  gRNA
ctacattatgtccggcgacc

SEQ ID NO: 6117 - DNA, 20 bp, Artificial Sequence
  MKO10006117_A_B3galnt2
  gRNA
ttatcacatttcgaagttcg

SEQ ID NO: 6118 - DNA, 20 bp, Artificial Sequence
  MKO10006118_A_B3galnt2
  gRNA
acgaacttcgaaatgtgata

SEQ ID NO: 6119 - DNA, 20 bp, Artificial Sequence
  MKO10006119_A_B3galnt2
  gRNA
gactgaatcgggcgatgaaa

SEQ ID NO: 6120 - DNA, 20 bp, Artificial Sequence
  MKO10006120_A_B3galt1
  gRNA
ttgatgcccgccaggcaatc

SEQ ID NO: 6121 - DNA, 20 bp, Artificial Sequence
  MKO10006121_A_B3galt1
  gRNA
acacaacggtcaatacatag

SEQ ID NO: 6122 - DNA, 20 bp, Artificial Sequence
  MKO10006122_A_B3galt1
  gRNA
ttactgcggacatccctgat

SEQ ID NO: 6123 - DNA, 20 bp, Artificial Sequence
  MKO10006123_A_B3galt2
  gRNA
aggtatccgtcgtttgcact

SEQ ID NO: 6124 - DNA, 20 bp, Artificial Sequence
  MKO10006124_A_B3galt2
  gRNA
taacaccgagctatcaccac

SEQ ID NO: 6125 - DNA, 20 bp, Artificial Sequence
  MKO10006125_A_B3galt2
  gRNA
atgagttcgtgttcaatcac

SEQ ID NO: 6126 - DNA, 20 bp, Artificial Sequence
  MKO10006126_A_B3galt4
  gRNA
ggggtgccatccgcgaagcc

SEQ ID NO: 6127 - DNA, 20 bp, Artificial Sequence
  MKO10006127_A_B3galt4
  gRNA
cccgtaacagcaccgatcca

SEQ ID NO: 6128 - DNA, 20 bp, Artificial Sequence
  MKO10006128_A_B3galt4
  gRNA
acacgtcatcatccgtcttg

SEQ ID NO: 6129 - DNA, 20 bp, Artificial Sequence
  MKO10006129_A_B3galt5
  gRNA
acggaaaagcgtaaaccgcc

SEQ ID NO: 6130 - DNA, 20 bp, Artificial Sequence
  MKO10006130_A_B3galt5
  gRNA
caagctaaagatccggccgg

SEQ ID NO: 6131 - DNA, 20 bp, Artificial Sequence
  MKO10006131_A_B3galt5
  gRNA
tgagtaagttcgaatatccc

SEQ ID NO: 6132 - DNA, 20 bp, Artificial Sequence
  MKO10006132_A_B3galt6
  gRNA
cgacgcctacgagaacctca

SEQ ID NO: 6133 - DNA, 20 bp, Artificial Sequence
  MKO10006133_A_B3galt6
  gRNA
ctcgtaggcgtcgcgcaggg

SEQ ID NO: 6134 - DNA, 20 bp, Artificial Sequence
  MKO10006134_A_B3galt6
  gRNA
gcacgacccacgcttcgaca

SEQ ID NO: 6135 - DNA, 20 bp, Artificial Sequence
  MKO10006135_A_B3galtl
  gRNA
aggtacctactgcggtaaca

SEQ ID NO: 6136 - DNA, 20 bp, Artificial Sequence
  MKO10006136_A_B3galtl
  gRNA
tttgaggcagagtagtctac

SEQ ID NO: 6137 - DNA, 20 bp, Artificial Sequence
  MKO10006137_A_B3galtl
  gRNA
ttacctatgtcatgtctccc

SEQ ID NO: 6138 - DNA, 20 bp, Artificial Sequence
  MKO10006138_A_B3gat1
  gRNA
tccgcgaagtacactacgcc

SEQ ID NO: 6139 - DNA, 20 bp, Artificial Sequence
  MKO10006139_A_B3gat1
  gRNA
gcgcgcttgctgcgcgacac

SEQ ID NO: 6140 - DNA, 20 bp, Artificial Sequence
  MKO10006140_A_B3gat1
  gRNA
ataccgaaggccaccaacaa

SEQ ID NO: 6141 - DNA, 20 bp, Artificial Sequence
  MKO10006141_A_B3gat2
  gRNA
cgccaccgaacagcgcaacg

SEQ ID NO: 6142 - DNA, 20 bp, Artificial Sequence
  MKO10006142_A_B3gat2
  gRNA
cacggtcgcttgtagcgccg

SEQ ID NO: 6143 - DNA, 20 bp, Artificial Sequence
  MKO10006143_A_B3gat2
  gRNA
cggcgcttaaatacagcttt

SEQ ID NO: 6144 - DNA, 20 bp, Artificial Sequence
  MKO10006144_A_B3gat3
  gRNA
agagccgtacctggcgtagg

SEQ ID NO: 6145 - DNA, 20 bp, Artificial Sequence
  MKO10006145_A_B3gat3
  gRNA
cgcaaatcccgccatgtcca

SEQ ID NO: 6146 - DNA, 20 bp, Artificial Sequence
  MKO10006146_A_B3gat3
  gRNA
cgctgagagccctaccccgc

SEQ ID NO: 6147 - DNA, 20 bp, Artificial Sequence
  MKO10006147_A_B3gnt1
  gRNA
gtagacgcgataatcgccgc

SEQ ID NO: 6148 - DNA, 20 bp, Artificial Sequence
  MKO10006148_A_B3gnt1
  gRNA
tctacggatcgcggagacgg

SEQ ID NO: 6149 - DNA, 20 bp, Artificial Sequence
  MKO10006149_A_B3gnt1
  gRNA
ggtaaaggatcttattgcgc

SEQ ID NO: 6150 - DNA, 20 bp, Artificial Sequence
  MKO10006150_A_B3gnt2
  gRNA
cgtctacccaccgtatgccg

SEQ ID NO: 6151 - DNA, 20 bp, Artificial Sequence
  MKO10006151_A_B3gnt2
  gRNA
acgccggtgtagaagacttc

SEQ ID NO: 6152 - DNA, 20 bp, Artificial Sequence
  MKO10006152_A_B3gnt2
  gRNA
gctgtcatgaccgtcgagtc

SEQ ID NO: 6153 - DNA, 20 bp, Artificial Sequence
  MKO10006153_A_B3gnt3
  gRNA
caagaagtcgcgcacgtgta

SEQ ID NO: 6154 - DNA, 20 bp, Artificial Sequence
  MKO10006154_A_B3gnt3
  gRNA
cccacgtcgtgcgcagcatc

SEQ ID NO: 6155 - DNA, 20 bp, Artificial Sequence
  MKO10006155_A_B3gnt3
  gRNA
ccacggtaaaacgcgacagc

SEQ ID NO: 6156 - DNA, 20 bp, Artificial Sequence
  MKO10006156_A_B3gnt4
  gRNA
gaacgctgttcaatatgagc

SEQ ID NO: 6157 - DNA, 20 bp, Artificial Sequence
  MKO10006157_A_B3gnt4
  gRNA
ctggtatgcgctccttcaga

SEQ ID NO: 6158 - DNA, 20 bp, Artificial Sequence
  MKO10006158_A_B3gnt4
  gRNA
gtgtccctggcacactccga

SEQ ID NO: 6159 - DNA, 20 bp, Artificial Sequence
  MKO10006159_A_B3gnt5
  gRNA
attggtcacgttcatcgagg

SEQ ID NO: 6160 - DNA, 20 bp, Artificial Sequence
  MKO10006160_A_B3gnt5
  gRNA
ttgatcaagtatgggtagtg

SEQ ID NO: 6161 - DNA, 20 bp, Artificial Sequence
  MKO10006161_A_B3gnt5
  gRNA
caaagccatagctatttacg

SEQ ID NO: 6162 - DNA, 20 bp, Artificial Sequence
  MKO10006162_A_B3gnt6
  gRNA
cgtcgcctgcgcactacgag

SEQ ID NO: 6163 - DNA, 20 bp, Artificial Sequence
  MKO10006163_A_B3gnt6
  gRNA
tcgcgccgctcgtagtgcgc

SEQ ID NO: 6164 - DNA, 20 bp, Artificial Sequence
  MKO10006164_A_B3gnt6
  gRNA
gccgccgctttccgcaactg

SEQ ID NO: 6165 - DNA, 20 bp, Artificial Sequence
  MKO10006165_A_B3gnt7
  gRNA
ggccccggcgtgggcggtaa

SEQ ID NO: 6166 - DNA, 20 bp, Artificial Sequence
  MKO10006166_A_B3gnt7
  gRNA
cacacagcatgaccgccgag

SEQ ID NO: 6167 - DNA, 20 bp, Artificial Sequence
  MKO10006167_A_B3gnt7
  gRNA
accgggccgccatgtctctg

SEQ ID NO: 6168 - DNA, 20 bp, Artificial Sequence
  MKO10006168_A_B3gnt8
  gRNA
aaaccgctccgcaagcccgg

SEQ ID NO: 6169 - DNA, 20 bp, Artificial Sequence
  MKO10006169_A_B3gnt8
  gRNA
gactatccagcctatgcgag

SEQ ID NO: 6170 - DNA, 20 bp, Artificial Sequence
  MKO10006170_A_B3gnt8
  gRNA
ccagtacggactgtcagact

SEQ ID NO: 6171 - DNA, 20 bp, Artificial Sequence
  MKO10006171_A_B3gnt9
  gRNA
cgcgcctttgcccagacgcg

SEQ ID NO: 6172 - DNA, 20 bp, Artificial Sequence
  MKO10006172_A_B3gnt9
  gRNA
gctctacgcgcagcgcgacg

SEQ ID NO: 6173 - DNA, 20 bp, Artificial Sequence
  MKO10006173_A_B3gnt9
  gRNA
catccagcgtttcgcacctt

SEQ ID NO: 6174 - DNA, 20 bp, Artificial Sequence
  MKO10006174_A_B3gntl1
  gRNA
cacactcgtcgggtgctgac

SEQ ID NO: 6175 - DNA, 20 bp, Artificial Sequence
  MKO10006175_A_B3gntl1
  gRNA
caagccgtcgcacagagcac

SEQ ID NO: 6176 - DNA, 20 bp, Artificial Sequence
  MKO10006176_A_B3gntl1
  gRNA
ccactgctcagcgttgtgca

SEQ ID NO: 6177 - DNA, 20 bp, Artificial Sequence
  MKO10006177_A_B430306N03Rik
  gRNA
cccacagccccgtcactaac

SEQ ID NO: 6178 - DNA, 20 bp, Artificial Sequence
  MKO10006178_A_B430306N03Rik
  gRNA
gctttccagatagcccgatg

SEQ ID NO: 6179 - DNA, 20 bp, Artificial Sequence
  MKO10006179_A_B430306N03Rik
  gRNA
cacgaccaccccagcaacga

SEQ ID NO: 6180 - DNA, 20 bp, Artificial Sequence
  MKO10006180_A_B4galnt1
  gRNA
acactacaggagccggtccc

SEQ ID NO: 6181 - DNA, 20 bp, Artificial Sequence
  MKO10006181_A_B4galnt1
  gRNA
gtgtggaggttcagcccctc

SEQ ID NO: 6182 - DNA, 20 bp, Artificial Sequence
  MKO10006182_A_B4galnt1
  gRNA
actcaaccggcagctgcaac

SEQ ID NO: 6183 - DNA, 20 bp, Artificial Sequence
  MKO10006183_A_B4galnt2
  gRNA
acttgccactgttgcgttta

SEQ ID NO: 6184 - DNA, 20 bp, Artificial Sequence
  MKO10006184_A_B4galnt2
  gRNA
gggactcttacctcatagac

SEQ ID NO: 6185 - DNA, 20 bp, Artificial Sequence
  MKO10006185_A_B4galnt2
  gRNA
cccttcggatacccagtcca

SEQ ID NO: 6186 - DNA, 20 bp, Artificial Sequence
  MKO10006186_A_B4galnt3
  gRNA
gcagatagccaaatatgcgg

SEQ ID NO: 6187 - DNA, 20 bp, Artificial Sequence
  MKO10006187_A_B4galnt3
  gRNA
aactatggcctccgcatatt

SEQ ID NO: 6188 - DNA, 20 bp, Artificial Sequence
  MKO10006188_A_B4galnt3
  gRNA
tccaattctaccgtccccag

SEQ ID NO: 6189 - DNA, 20 bp, Artificial Sequence
  MKO10006189_A_B4galnt4
  gRNA
caaccggcagactcgtacta

SEQ ID NO: 6190 - DNA, 20 bp, Artificial Sequence
  MKO10006190_A_B4galnt4
  gRNA
acgatggcactcggactccg

SEQ ID NO: 6191 - DNA, 20 bp, Artificial Sequence
  MKO10006191_A_B4galnt4
  gRNA
catgtttgggccccgcccct

SEQ ID NO: 6192 - DNA, 20 bp, Artificial Sequence
  MKO10006192_A_B4galt1
  gRNA
cagcttagctcgattgaaca

SEQ ID NO: 6193 - DNA, 20 bp, Artificial Sequence
  MKO10006193_A_B4galt1
  gRNA
tcatcatcccattccgtaac

SEQ ID NO: 6194 - DNA, 20 bp, Artificial Sequence
  MKO10006194_A_B4galt1
  gRNA
cagcgccagcaactcgacta

SEQ ID NO: 6195 - DNA, 20 bp, Artificial Sequence
  MKO10006195_A_B4galt2
  gRNA
gaccgcaatctgtaccgttg

SEQ ID NO: 6196 - DNA, 20 bp, Artificial Sequence
  MKO10006196_A_B4galt2
  gRNA
accgcatgatcaagcacgac

SEQ ID NO: 6197 - DNA, 20 bp, Artificial Sequence
  MKO10006197_A_B4galt2
  gRNA
cccggtcgtgcttgatcatg

SEQ ID NO: 6198 - DNA, 20 bp, Artificial Sequence
  MKO10006198_A_B4galt3
  gRNA
tggtgctcccgggcacgatg

SEQ ID NO: 6199 - DNA, 20 bp, Artificial Sequence
  MKO10006199_A_B4galt3
  gRNA
attatggctgttcgggagcg

SEQ ID NO: 6200 - DNA, 20 bp, Artificial Sequence
  MKO10006200_A_B4galt3
  gRNA
ctgcttgttcttacacgacg

SEQ ID NO: 6201 - DNA, 20 bp, Artificial Sequence
  MKO10006201_A_B4galt4
  gRNA
ctgcttcgtattccacgacg

SEQ ID NO: 6202 - DNA, 20 bp, Artificial Sequence
  MKO10006202_A_B4galt4
  gRNA
gccggaacagcacgggctac

SEQ ID NO: 6203 - DNA, 20 bp, Artificial Sequence
  MKO10006203_A_B4galt4
  gRNA
catggtgtatttgcccacgt

SEQ ID NO: 6204 - DNA, 20 bp, Artificial Sequence
  MKO10006204_A_B4galt5
  gRNA
gtgctcatggcggttccgga

SEQ ID NO: 6205 - DNA, 20 bp, Artificial Sequence
  MKO10006205_A_B4galt5
  gRNA
ctcgtacacctgggcaccga

SEQ ID NO: 6206 - DNA, 20 bp, Artificial Sequence
  MKO10006206_A_B4galt5
  gRNA
cacttgctcgatcacataga

SEQ ID NO: 6207 - DNA, 20 bp, Artificial Sequence
  MKO10006207_A_B4galt6
  gRNA
atgttcatggcggttacgga

SEQ ID NO: 6208 - DNA, 20 bp, Artificial Sequence
  MKO10006208_A_B4galt6
  gRNA
cacctgttcgatgacataaa

SEQ ID NO: 6209 - DNA, 20 bp, Artificial Sequence
  MKO10006209_A_B4galt6
  gRNA
agccaacacgtacctcttta

SEQ ID NO: 6210 - DNA, 20 bp, Artificial Sequence
  MKO10006210_A_B4galt7
  gRNA
ctacatcgccatgcacgatg

SEQ ID NO: 6211 - DNA, 20 bp, Artificial Sequence
  MKO10006211_A_B4galt7
  gRNA
acggaatgtccaaccgcttt

SEQ ID NO: 6212 - DNA, 20 bp, Artificial Sequence
  MKO10006212_A_B4galt7
  gRNA
ggccagctcctttgatgcgc

SEQ ID NO: 6213 - DNA, 20 bp, Artificial Sequence
  MKO10006213_A_B630005N14Rik
  gRNA
agaagactcgtgcacgttta

SEQ ID NO: 6214 - DNA, 20 bp, Artificial Sequence
  MKO10006214_A_B630005N14Rik
  gRNA
acttgaagcgcttaaaaccc

SEQ ID NO: 6215 - DNA, 20 bp, Artificial Sequence
  MKO10006215_A_B630005N14Rik
  gRNA
ttccatcaccctaccagcga

SEQ ID NO: 6216 - DNA, 20 bp, Artificial Sequence
  MKO10006216_A_B930041F14Rik
  gRNA
tcttcgcgctaaactgctcg

SEQ ID NO: 6217 - DNA, 20 bp, Artificial Sequence
  MKO10006217_A_B930041F14Rik
  gRNA
cccttgcgatcgcgtgcttt

SEQ ID NO: 6218 - DNA, 20 bp, Artificial Sequence
  MKO10006218_A_B930041F14Rik
  gRNA
acgtttcgcagcccggcgtc

SEQ ID NO: 6219 - DNA, 20 bp, Artificial Sequence
  MKO10006219_A_B9d1
  gRNA
tttgggaatgatgtcgtccg

SEQ ID NO: 6220 - DNA, 20 bp, Artificial Sequence
  MKO10006220_A_B9d1
  gRNA
ccagtgcttgccgtacatct

SEQ ID NO: 6221 - DNA, 20 bp, Artificial Sequence
  MKO10006221_A_B9d1
  gRNA
ccgctgttggggcccagtcc

SEQ ID NO: 6222 - DNA, 20 bp, Artificial Sequence
  MKO10006222_A_B9d2
  gRNA
ctgcgccacttcgatcgcta

SEQ ID NO: 6223 - DNA, 20 bp, Artificial Sequence
  MKO10006223_A_B9d2
  gRNA
ccactccatagcgatcgaag

SEQ ID NO: 6224 - DNA, 20 bp, Artificial Sequence
  MKO10006224_A_B9d2
  gRNA
gacctgcacttcgctactaa

SEQ ID NO: 6225 - DNA, 20 bp, Artificial Sequence
  MKO10006225_A_BB287469
  gRNA
tgtgtccatttcattgattt

SEQ ID NO: 6226 - DNA, 20 bp, Artificial Sequence
  MKO10006226_A_BB287469
  gRNA
tccatcatgccaaagaataa

SEQ ID NO: 6227 - DNA, 20 bp, Artificial Sequence
  MKO10006227_A_BB287469
  gRNA
agatgaagcaagaagtctga

SEQ ID NO: 6228 - DNA, 20 bp, Artificial Sequence
  MKO10006228_A_BC003331
  gRNA
tctttcaagcatcaacctcc

SEQ ID NO: 6229 - DNA, 20 bp, Artificial Sequence
  MKO10006229_A_BC003331
  gRNA
cactagaacaccacccaaag

SEQ ID NO: 6230 - DNA, 20 bp, Artificial Sequence
  MKO10006230_A_BC003331
  gRNA
ggttgatgcttgaaagatac

SEQ ID NO: 6231 - DNA, 20 bp, Artificial Sequence
  MKO10006231_A_BC003965
  gRNA
gttacgttctagccccgtag

SEQ ID NO: 6232 - DNA, 20 bp, Artificial Sequence
  MKO10006232_A_BC003965
  gRNA
gcaaagccaccccgatccgc

SEQ ID NO: 6233 - DNA, 20 bp, Artificial Sequence
  MKO10006233_A_BC003965
  gRNA
accccgcagcccgtgagcac

SEQ ID NO: 6234 - DNA, 20 bp, Artificial Sequence
  MKO10006234_A_BC004004
  gRNA
tgcccagatattacccctca

SEQ ID NO: 6235 - DNA, 20 bp, Artificial Sequence
  MKO10006235_A_BC004004
  gRNA
agaggaacgcccttattctc

SEQ ID NO: 6236 - DNA, 20 bp, Artificial Sequence
  MKO10006236_A_BC004004
  gRNA
cttctggcagcgttaccttg

SEQ ID NO: 6237 - DNA, 20 bp, Artificial Sequence
  MKO10006237_A_BC005537
  gRNA
ttcgctagagcttctacaga

SEQ ID NO: 6238 - DNA, 20 bp, Artificial Sequence
  MKO10006238_A_BC005537
  gRNA
ggatgtaatcggctgtactc

SEQ ID NO: 6239 - DNA, 20 bp, Artificial Sequence
  MKO10006239_A_BC005537
  gRNA
tctgcatgtactgagccgca

SEQ ID NO: 6240 - DNA, 20 bp, Artificial Sequence
  MKO10006240_A_BC005561
  gRNA
aaaggagtccggacatgata

SEQ ID NO: 6241 - DNA, 20 bp, Artificial Sequence
  MKO10006241_A_BC005561
  gRNA
cttactatattacgagcaac

SEQ ID NO: 6242 - DNA, 20 bp, Artificial Sequence
  MKO10006242_A_BC005561
  gRNA
catcatgaagcgcctaacaa

SEQ ID NO: 6243 - DNA, 20 bp, Artificial Sequence
  MKO10006243_A_BC005624
  gRNA
ggtacccacctcaccccatt

SEQ ID NO: 6244 - DNA, 20 bp, Artificial Sequence
  MKO10006244_A_BC005624
  gRNA
tccgcaagttctgcacctct

SEQ ID NO: 6245 - DNA, 20 bp, Artificial Sequence
  MKO10006245_A_BC005624
  gRNA
gctcagtgcggctgccctgc

SEQ ID NO: 6246 - DNA, 20 bp, Artificial Sequence
  MKO10006246_A_BC005764
  gRNA
ggtgcagatcatggtcggcg

SEQ ID NO: 6247 - DNA, 20 bp, Artificial Sequence
  MKO10006247_A_BC005764
  gRNA
gaccccccagctacccatcg

SEQ ID NO: 6248 - DNA, 20 bp, Artificial Sequence
  MKO10006248_A_BC005764
  gRNA
atccaacgcaccttgctgac

SEQ ID NO: 6249 - DNA, 20 bp, Artificial Sequence
  MKO10006249_A_BC016423
  gRNA
caagtaactccgtcttctaa

SEQ ID NO: 6250 - DNA, 20 bp, Artificial Sequence
  MKO10006250_A_BC016423
  gRNA
tgctgtgtgatataactctt

SEQ ID NO: 6251 - DNA, 20 bp, Artificial Sequence
  MKO10006251_A_BC016423
  gRNA
ataataaactgccctttcca

SEQ ID NO: 6252 - DNA, 20 bp, Artificial Sequence
  MKO10006252_A_BC016579
  gRNA
ccctgcaacaagagcgtggt

SEQ ID NO: 6253 - DNA, 20 bp, Artificial Sequence
  MKO10006253_A_BC016579
  gRNA
gttataagcctatgccttgt

SEQ ID NO: 6254 - DNA, 20 bp, Artificial Sequence
  MKO10006254_A_BC016579
  gRNA
gtcaagcccgagactctcac

SEQ ID NO: 6255 - DNA, 20 bp, Artificial Sequence
  MKO10006255_A_BC017158
  gRNA
ggctaccttggctaggttgc

SEQ ID NO: 6256 - DNA, 20 bp, Artificial Sequence
  MKO10006256_A_BC017158
  gRNA
gccgtatcatctttgcctgg

SEQ ID NO: 6257 - DNA, 20 bp, Artificial Sequence
  MKO10006257_A_BC017158
  gRNA
cagctcacctttcacgagcc

SEQ ID NO: 6258 - DNA, 20 bp, Artificial Sequence
  MKO10006258_A_BC017643
  gRNA
gagtcagcagcttcttgtag

SEQ ID NO: 6259 - DNA, 20 bp, Artificial Sequence
  MKO10006259_A_BC017643
  gRNA
tgcttgcagatagtctgggc

SEQ ID NO: 6260 - DNA, 20 bp, Artificial Sequence
  MKO10006260_A_BC017643
  gRNA
gggagaagcctgttgcaaac

SEQ ID NO: 6261 - DNA, 20 bp, Artificial Sequence
  MKO10006261_A_BC018242
  gRNA
ggtccttcttgcgtaccgcc

SEQ ID NO: 6262 - DNA, 20 bp, Artificial Sequence
  MKO10006262_A_BC018242
  gRNA
agttggggcgacacaccgac

SEQ ID NO: 6263 - DNA, 20 bp, Artificial Sequence
  MKO10006263_A_BC018242
  gRNA
tgatagagaaactccgcttc

SEQ ID NO: 6264 - DNA, 20 bp, Artificial Sequence
  MKO10006264_A_BC018507
  gRNA
tcttctgatattccgtcagc

SEQ ID NO: 6265 - DNA, 20 bp, Artificial Sequence
  MKO10006265_A_BC018507
  gRNA
tctggagcatctgctccact

SEQ ID NO: 6266 - DNA, 20 bp, Artificial Sequence
  MKO10006266_A_BC018507
  gRNA
tacagctgcagtttgcaaga

SEQ ID NO: 6267 - DNA, 20 bp, Artificial Sequence
  MKO10006267_A_BC021614
  gRNA
gccgtaggatagtattggat

SEQ ID NO: 6268 - DNA, 20 bp, Artificial Sequence
  MKO10006268_A_BC021614
  gRNA
acctattcagacgcattgcc

SEQ ID NO: 6269 - DNA, 20 bp, Artificial Sequence
  MKO10006269_A_BC021614
  gRNA
ccaggatatggcgatactgc

SEQ ID NO: 6270 - DNA, 20 bp, Artificial Sequence
  MKO10006270_A_BC021785
  gRNA
gagtcggaaatggggtcccg

SEQ ID NO: 6271 - DNA, 20 bp, Artificial Sequence
  MKO10006271_A_BC021785
  gRNA
agtgaggtaaagaccggcta

SEQ ID NO: 6272 - DNA, 20 bp, Artificial Sequence
  MKO10006272_A_BC021785
  gRNA
atggcaactcctgcactatc

SEQ ID NO: 6273 - DNA, 20 bp, Artificial Sequence
  MKO10006273_A_BC021891
  gRNA
actggtgaggtcccgtaccg

SEQ ID NO: 6274 - DNA, 20 bp, Artificial Sequence
  MKO10006274_A_BC021891
  gRNA
caaacgaggggcggatatga

SEQ ID NO: 6275 - DNA, 20 bp, Artificial Sequence
  MKO10006275_A_BC021891
  gRNA
gctccgcgagctgctgctcg

SEQ ID NO: 6276 - DNA, 20 bp, Artificial Sequence
  MKO10006276_A_BC022687
  gRNA
tgatgtagcgcccgttccct

SEQ ID NO: 6277 - DNA, 20 bp, Artificial Sequence
  MKO10006277_A_BC022687
  gRNA
ccgacactgcgtctgcttcg

SEQ ID NO: 6278 - DNA, 20 bp, Artificial Sequence
  MKO10006278_A_BC022687
  gRNA
tgcgtttcaagaagtcgccg

SEQ ID NO: 6279 - DNA, 20 bp, Artificial Sequence
  MKO10006279_A_BC023829
  gRNA
ccgaccaaacgatgtaatag

SEQ ID NO: 6280 - DNA, 20 bp, Artificial Sequence
  MKO10006280_A_BC023829
  gRNA
caatcacatccatagagcgc

SEQ ID NO: 6281 - DNA, 20 bp, Artificial Sequence
  MKO10006281_A_BC023829
  gRNA
tcgacatgacaggtcactag

SEQ ID NO: 6282 - DNA, 20 bp, Artificial Sequence
  MKO10006282_A_BC024139
  gRNA
ggagtcgttgccgtacctcc

SEQ ID NO: 6283 - DNA, 20 bp, Artificial Sequence
  MKO10006283_A_BC024139
  gRNA
ctcccggcctctcgtaatct

SEQ ID NO: 6284 - DNA, 20 bp, Artificial Sequence
  MKO10006284_A_BC024139
  gRNA
gctcccttagcagccgcaag

SEQ ID NO: 6285 - DNA, 20 bp, Artificial Sequence
  MKO10006285_A_BC024978
  gRNA
ggtttcgaagtgacctgcag

SEQ ID NO: 6286 - DNA, 20 bp, Artificial Sequence
  MKO10006286_A_BC024978
  gRNA
cacgagccgtgtcaaaagaa

SEQ ID NO: 6287 - DNA, 20 bp, Artificial Sequence
  MKO10006287_A_BC024978
  gRNA
aacacctgacagcgtctctc

SEQ ID NO: 6288 - DNA, 20 bp, Artificial Sequence
  MKO10006288_A_BC026585
  gRNA
cccgtactcacccggtgtaa

SEQ ID NO: 6289 - DNA, 20 bp, Artificial Sequence
  MKO10006289_A_BC026585
  gRNA
ttcctgatactgaccacgac

SEQ ID NO: 6290 - DNA, 20 bp, Artificial Sequence
  MKO10006290_A_BC026585
  gRNA
tccccgccccgtcgggccac

SEQ ID NO: 6291 - DNA, 20 bp, Artificial Sequence
  MKO10006291_A_BC026590
  gRNA
ttgcttaccggttggagtgc

SEQ ID NO: 6292 - DNA, 20 bp, Artificial Sequence
  MKO10006292_A_BC026590
  gRNA
gcaattgttactgatctgat

SEQ ID NO: 6293 - DNA, 20 bp, Artificial Sequence
  MKO10006293_A_BC026590
  gRNA
gtatactccagcactccaac

SEQ ID NO: 6294 - DNA, 20 bp, Artificial Sequence
  MKO10006294_A_BC027072
  gRNA
aagaggctttcccgcgtgtc

SEQ ID NO: 6295 - DNA, 20 bp, Artificial Sequence
  MKO10006295_A_BC027072
  gRNA
ccagaagcccgaatgaaccg

SEQ ID NO: 6296 - DNA, 20 bp, Artificial Sequence
  MKO10006296_A_BC027072
  gRNA
agcgcgagcacttccggcgc

SEQ ID NO: 6297 - DNA, 20 bp, Artificial Sequence
  MKO10006297_A_BC027231
  gRNA
caagttgttactgcgcttgc

SEQ ID NO: 6298 - DNA, 20 bp, Artificial Sequence
  MKO10006298_A_BC027231
  gRNA
gggccaccacaagccccatt

SEQ ID NO: 6299 - DNA, 20 bp, Artificial Sequence
  MKO10006299_A_BC027231
  gRNA
cacatctacttccgcatcca

SEQ ID NO: 6300 - DNA, 20 bp, Artificial Sequence
  MKO10006300_A_BC028528
  gRNA
tacacagtgacccctaatta

SEQ ID NO: 6301 - DNA, 20 bp, Artificial Sequence
  MKO10006301_A_BC028528
  gRNA
agagggtgattactatcaag

SEQ ID NO: 6302 - DNA, 20 bp, Artificial Sequence
  MKO10006302_A_BC028528
  gRNA
taaaatgtacccctccttga

SEQ ID NO: 6303 - DNA, 20 bp, Artificial Sequence
  MKO10006303_A_BC029214
  gRNA
tgacggacgccgccgagctc

SEQ ID NO: 6304 - DNA, 20 bp, Artificial Sequence
  MKO10006304_A_BC029214
  gRNA
tgttactcacgagcctcgcc

SEQ ID NO: 6305 - DNA, 20 bp, Artificial Sequence
  MKO10006305_A_BC029214
  gRNA
gaactcacctgaaccgggaa

SEQ ID NO: 6306 - DNA, 20 bp, Artificial Sequence
  MKO10006306_A_BC030307
  gRNA
gccgagtgaaatgagcgacg

SEQ ID NO: 6307 - DNA, 20 bp, Artificial Sequence
  MKO10006307_A_BC030307
  gRNA
cacgtactgcccacaaagta

SEQ ID NO: 6308 - DNA, 20 bp, Artificial Sequence
  MKO10006308_A_BC030307
  gRNA
ctatccattcactacgatca

SEQ ID NO: 6309 - DNA, 20 bp, Artificial Sequence
  MKO10006309_A_BC030336
  gRNA
ccagtccgggttggcgatgc

SEQ ID NO: 6310 - DNA, 20 bp, Artificial Sequence
  MKO10006310_A_BC030336
  gRNA
tgcaggtccggtctcgtcca

SEQ ID NO: 6311 - DNA, 20 bp, Artificial Sequence
  MKO10006311_A_BC030336
  gRNA
catcgccagcatcgccaacc

SEQ ID NO: 6312 - DNA, 20 bp, Artificial Sequence
  MKO10006312_A_BC030476
  gRNA
tgctgtcgcccgctttgttg

SEQ ID NO: 6313 - DNA, 20 bp, Artificial Sequence
  MKO10006313_A_BC030476
  gRNA
agggtacagccagccgaaac

SEQ ID NO: 6314 - DNA, 20 bp, Artificial Sequence
  MKO10006314_A_BC030476
  gRNA
cactccccgccttgcactag

SEQ ID NO: 6315 - DNA, 20 bp, Artificial Sequence
  MKO10006315_A_BC030499
  gRNA
ttctaccagagtttcccgtg

SEQ ID NO: 6316 - DNA, 20 bp, Artificial Sequence
  MKO10006316_A_BC030499
  gRNA
caaacgaacctttagccaca

SEQ ID NO: 6317 - DNA, 20 bp, Artificial Sequence
  MKO10006317_A_BC030499
  gRNA
ccaaagtaaaagttctacag

SEQ ID NO: 6318 - DNA, 20 bp, Artificial Sequence
  MKO10006318_A_BC030500
  gRNA
ctccttccacgctacgtacc

SEQ ID NO: 6319 - DNA, 20 bp, Artificial Sequence
  MKO10006319_A_BC030500
  gRNA
ggagtacaagtcgccctgag

SEQ ID NO: 6320 - DNA, 20 bp, Artificial Sequence
  MKO10006320_A_BC030500
  gRNA
cggcgaatgtcaagtgtgac

SEQ ID NO: 6321 - DNA, 20 bp, Artificial Sequence
  MKO10006321_A_BC030867
  gRNA
tttgccacttgaccacgctc

SEQ ID NO: 6322 - DNA, 20 bp, Artificial Sequence
  MKO10006322_A_BC030867
  gRNA
gctaaaacccgccgctttcc

SEQ ID NO: 6323 - DNA, 20 bp, Artificial Sequence
  MKO10006323_A_BC030867
  gRNA
acaccccagactccgactca

SEQ ID NO: 6324 - DNA, 20 bp, Artificial Sequence
  MKO10006324_A_BC031181
  gRNA
ggccatatgcgactgaccac

SEQ ID NO: 6325 - DNA, 20 bp, Artificial Sequence
  MKO10006325_A_BC031181
  gRNA
ggagccatacatataccctg

SEQ ID NO: 6326 - DNA, 20 bp, Artificial Sequence
  MKO10006326_A_BC031181
  gRNA
tttcagggtgcaggtactaa

SEQ ID NO: 6327 - DNA, 20 bp, Artificial Sequence
  MKO10006327_A_BC035044
  gRNA
taggttgcctagatattcca

SEQ ID NO: 6328 - DNA, 20 bp, Artificial Sequence
  MKO10006328_A_BC035044
  gRNA
acagcagactagagtgttgt

SEQ ID NO: 6329 - DNA, 20 bp, Artificial Sequence
  MKO10006329_A_BC035044
  gRNA
cttgtccgtgatctgcttca

SEQ ID NO: 6330 - DNA, 20 bp, Artificial Sequence
  MKO10006330_A_BC037034
  gRNA
cctagattgtagtgaccgtg

SEQ ID NO: 6331 - DNA, 20 bp, Artificial Sequence
  MKO10006331_A_BC037034
  gRNA
gaggattcggatatcccaga

SEQ ID NO: 6332 - DNA, 20 bp, Artificial Sequence
  MKO10006332_A_BC037034
  gRNA
atcgagtctgtagcaagcgc

SEQ ID NO: 6333 - DNA, 20 bp, Artificial Sequence
  MKO10006333_A_BC048403
  gRNA
tctgtcggctcagcgcctcg

SEQ ID NO: 6334 - DNA, 20 bp, Artificial Sequence
  MKO10006334_A_BC048403
  gRNA
gtgatagaccttctcagccg

SEQ ID NO: 6335 - DNA, 20 bp, Artificial Sequence
  MKO10006335_A_BC048403
  gRNA
cgcaggcgcagatctcggag

SEQ ID NO: 6336 - DNA, 20 bp, Artificial Sequence
  MKO10006336_A_BC048502
  gRNA
tgactcgagagacctacaag

SEQ ID NO: 6337 - DNA, 20 bp, Artificial Sequence
  MKO10006337_A_BC048502
  gRNA
tcacccacgttccagacatc

SEQ ID NO: 6338 - DNA, 20 bp, Artificial Sequence
  MKO10006338_A_BC048502
  gRNA
aatttcctgaccctgatgtc

SEQ ID NO: 6339 - DNA, 20 bp, Artificial Sequence
  MKO10006339_A_BC048507
  gRNA
ccgcggtaaccatgtgcgat

SEQ ID NO: 6340 - DNA, 20 bp, Artificial Sequence
  MKO10006340_A_BC048507
  gRNA
cactgccttccgatcgcaca

SEQ ID NO: 6341 - DNA, 20 bp, Artificial Sequence
  MKO10006341_A_BC048507
  gRNA
tcacgtaactaccgaagttc

SEQ ID NO: 6342 - DNA, 20 bp, Artificial Sequence
  MKO10006342_A_BC048546
  gRNA
gtatcccttgatcaccgttc

SEQ ID NO: 6343 - DNA, 20 bp, Artificial Sequence
  MKO10006343_A_BC048546
  gRNA
atattctagggtgacgctca

SEQ ID NO: 6344 - DNA, 20 bp, Artificial Sequence
  MKO10006344_A_BC048546
  gRNA
gtagaagttcccctcgtcca

SEQ ID NO: 6345 - DNA, 20 bp, Artificial Sequence
  MKO10006345_A_BC048562
  gRNA
attgagccaacagccgcctc

SEQ ID NO: 6346 - DNA, 20 bp, Artificial Sequence
  MKO10006346_A_BC048562
  gRNA
tggtcattgtggtagcgcca

SEQ ID NO: 6347 - DNA, 20 bp, Artificial Sequence
  MKO10006347_A_BC048562
  gRNA
tctcactcttgacttgacct

SEQ ID NO: 6348 - DNA, 20 bp, Artificial Sequence
  MKO10006348_A_BC048609
  gRNA
ccacatgagcttccgttaca

SEQ ID NO: 6349 - DNA, 20 bp, Artificial Sequence
  MKO10006349_A_BC048609
  gRNA
ctatcagtacaaccgtgtaa

SEQ ID NO: 6350 - DNA, 20 bp, Artificial Sequence
  MKO10006350_A_BC048609
  gRNA
cccagccgatgctgatcacc

SEQ ID NO: 6351 - DNA, 20 bp, Artificial Sequence
  MKO10006351_A_BC048644
  gRNA
taacgcggcgtgactactga

SEQ ID NO: 6352 - DNA, 20 bp, Artificial Sequence
  MKO10006352_A_BC048644
  gRNA
caagatccgaatgttgtacg

SEQ ID NO: 6353 - DNA, 20 bp, Artificial Sequence
  MKO10006353_A_BC048644
  gRNA
accatacgtcacgtatgaag

SEQ ID NO: 6354 - DNA, 20 bp, Artificial Sequence
  MKO10006354_A_BC048671
  gRNA
tcggcgctccgcaagtcgca

SEQ ID NO: 6355 - DNA, 20 bp, Artificial Sequence
  MKO10006355_A_BC048671
  gRNA
gccctgccggcataagaaga

SEQ ID NO: 6356 - DNA, 20 bp, Artificial Sequence
  MKO10006356_A_BC048671
  gRNA
ctgaatggccatgcgacttg

SEQ ID NO: 6357 - DNA, 20 bp, Artificial Sequence
  MKO10006357_A_BC048679
  gRNA
tgtccatagcttctcgcacg

SEQ ID NO: 6358 - DNA, 20 bp, Artificial Sequence
  MKO10006358_A_BC048679
  gRNA
gagccgcgtgcgagaagcta

SEQ ID NO: 6359 - DNA, 20 bp, Artificial Sequence
  MKO10006359_A_BC048679
  gRNA
acagtggtgcggggcccacg

SEQ ID NO: 6360 - DNA, 20 bp, Artificial Sequence
  MKO10006360_A_BC048943
  gRNA
tacaaacaaacacgctacgc

SEQ ID NO: 6361 - DNA, 20 bp, Artificial Sequence
  MKO10006361_A_BC048943
  gRNA
gtctacatagcttgaaatcg

SEQ ID NO: 6362 - DNA, 20 bp, Artificial Sequence
  MKO10006362_A_BC048943
  gRNA
agctaccgaacaaagacaac

SEQ ID NO: 6363 - DNA, 20 bp, Artificial Sequence
  MKO10006363_A_BC049352
  gRNA
catcccagcagtacccgcgc

SEQ ID NO: 6364 - DNA, 20 bp, Artificial Sequence
  MKO10006364_A_BC049352
  gRNA
ttggccaagtggtaccagcg

SEQ ID NO: 6365 - DNA, 20 bp, Artificial Sequence
  MKO10006365_A_BC049352
  gRNA
cacatgagcagcccggatgg

SEQ ID NO: 6366 - DNA, 20 bp, Artificial Sequence
  MKO10006366_A_BC049635
  gRNA
cctagtgatagaacgctaag

SEQ ID NO: 6367 - DNA, 20 bp, Artificial Sequence
  MKO10006367_A_BC049635
  gRNA
tcaagggtcaaatgcgttcc

SEQ ID NO: 6368 - DNA, 20 bp, Artificial Sequence
  MKO10006368_A_BC049635
  gRNA
atgacagaccgcttacatcc

SEQ ID NO: 6369 - DNA, 20 bp, Artificial Sequence
  MKO10006369_A_BC049715
  gRNA
ctcaacgaaccgatttatga

SEQ ID NO: 6370 - DNA, 20 bp, Artificial Sequence
  MKO10006370_A_BC049715
  gRNA
ggatctgagtcttcatcgtg

SEQ ID NO: 6371 - DNA, 20 bp, Artificial Sequence
  MKO10006371_A_BC049715
  gRNA
gagtatggagataacgttac

SEQ ID NO: 6372 - DNA, 20 bp, Artificial Sequence
  MKO10006372_A_BC049730
  gRNA
tggatcgtaaatcagacagt

SEQ ID NO: 6373 - DNA, 20 bp, Artificial Sequence
  MKO10006373_A_BC049730
  gRNA
tcccgagcatcttactgacc

SEQ ID NO: 6374 - DNA, 20 bp, Artificial Sequence
  MKO10006374_A_BC049730
  gRNA
caaccataccttgtgcccta

SEQ ID NO: 6375 - DNA, 20 bp, Artificial Sequence
  MKO10006375_A_BC049762
  gRNA
atcagggtgttattccgcgg

SEQ ID NO: 6376 - DNA, 20 bp, Artificial Sequence
  MKO10006376_A_BC049762
  gRNA
gccacggttgctggaagcta

SEQ ID NO: 6377 - DNA, 20 bp, Artificial Sequence
  MKO10006377_A_BC049762
  gRNA
gagtcctgtgcagatctcgc

SEQ ID NO: 6378 - DNA, 20 bp, Artificial Sequence
  MKO10006378_A_BC051019
  gRNA
cgtcaggtgggtgcccccca

SEQ ID NO: 6379 - DNA, 20 bp, Artificial Sequence
  MKO10006379_A_BC051019
  gRNA
aatgggcctgaaccaccgcc

SEQ ID NO: 6380 - DNA, 20 bp, Artificial Sequence
  MKO10006380_A_BC051019
  gRNA
atggccggggctccgctggc

SEQ ID NO: 6381 - DNA, 20 bp, Artificial Sequence
  MKO10006381_A_BC051142
  gRNA
actctgttctgaagcgaatc

SEQ ID NO: 6382 - DNA, 20 bp, Artificial Sequence
  MKO10006382_A_BC051142
  gRNA
tgactattctgatagcaaga

SEQ ID NO: 6383 - DNA, 20 bp, Artificial Sequence
  MKO10006383_A_BC051142
  gRNA
aaccggaagatggcagatct

SEQ ID NO: 6384 - DNA, 20 bp, Artificial Sequence
  MKO10006384_A_BC051628
  gRNA
agtcagtggcgcatcaggac

SEQ ID NO: 6385 - DNA, 20 bp, Artificial Sequence
  MKO10006385_A_BC051628
  gRNA
agatgccagttatgttcgac

SEQ ID NO: 6386 - DNA, 20 bp, Artificial Sequence
  MKO10006386_A_BC051628
  gRNA
ctcttgttctagagtccagc

SEQ ID NO: 6387 - DNA, 20 bp, Artificial Sequence
  MKO10006387_A_BC051665
  gRNA
tacccaggcttcatatgcgt

SEQ ID NO: 6388 - DNA, 20 bp, Artificial Sequence
  MKO10006388_A_BC051665
  gRNA
tcctggtcctatggcaacgt

SEQ ID NO: 6389 - DNA, 20 bp, Artificial Sequence
  MKO10006389_A_BC051665
  gRNA
tcagatagtcctcgttgtgc

SEQ ID NO: 6390 - DNA, 20 bp, Artificial Sequence
  MKO10006390_A_BC052040
  gRNA
tagtgtctgtaccgcccact

SEQ ID NO: 6391 - DNA, 20 bp, Artificial Sequence
  MKO10006391_A_BC052040
  gRNA
tagtaactttcaatcgcttc

SEQ ID NO: 6392 - DNA, 20 bp, Artificial Sequence
  MKO10006392_A_BC052040
  gRNA
tgtctacctaggtacctgaa

SEQ ID NO: 6393 - DNA, 20 bp, Artificial Sequence
  MKO10006393_A_BC053393
  gRNA
taagagcatggaagcgtcac

SEQ ID NO: 6394 - DNA, 20 bp, Artificial Sequence
  MKO10006394_A_BC053393
  gRNA
tcgacttaccttggagattc

SEQ ID NO: 6395 - DNA, 20 bp, Artificial Sequence
  MKO10006395_A_BC053393
  gRNA
tatcagaagcgcattcgcct

SEQ ID NO: 6396 - DNA, 20 bp, Artificial Sequence
  MKO10006396_A_BC053749
  gRNA
ctcgttgtcaattaagttgc

SEQ ID NO: 6397 - DNA, 20 bp, Artificial Sequence
  MKO10006397_A_BC053749
  gRNA
ctgcaacttaattgacaacg

SEQ ID NO: 6398 - DNA, 20 bp, Artificial Sequence
  MKO10006398_A_BC053749
  gRNA
ctggcggtcctctctgctcg

SEQ ID NO: 6399 - DNA, 20 bp, Artificial Sequence
  MKO10006399_A_BC055111
  gRNA
gccgagtggcttcgtgggcc

SEQ ID NO: 6400 - DNA, 20 bp, Artificial Sequence
  MKO10006400_A_BC055111
  gRNA
gtcagaatgtgagcggttcc

SEQ ID NO: 6401 - DNA, 20 bp, Artificial Sequence
  MKO10006401_A_BC055111
  gRNA
tctggggagacacgtttccg

SEQ ID NO: 6402 - DNA, 20 bp, Artificial Sequence
  MKO10006402_A_BC055324
  gRNA
aagtgcatttgtgcactgta

SEQ ID NO: 6403 - DNA, 20 bp, Artificial Sequence
  MKO10006403_A_BC055324
  gRNA
tcatatgaaccacctgacac

SEQ ID NO: 6404 - DNA, 20 bp, Artificial Sequence
  MKO10006404_A_BC055324
  gRNA
actgtacctttggtaaaact

SEQ ID NO: 6405 - DNA, 20 bp, Artificial Sequence
  MKO10006405_A_BC056474
  gRNA
caggctctctatctccgccg

SEQ ID NO: 6406 - DNA, 20 bp, Artificial Sequence
  MKO10006406_A_BC056474
  gRNA
tgatataaaactttccgctc

SEQ ID NO: 6407 - DNA, 20 bp, Artificial Sequence
  MKO10006407_A_BC056474
  gRNA
tgctcacctcagcactttgt

SEQ ID NO: 6408 - DNA, 20 bp, Artificial Sequence
  MKO10006408_A_BC061194
  gRNA
tgctaagtcatcgttgtagt

SEQ ID NO: 6409 - DNA, 20 bp, Artificial Sequence
  MKO10006409_A_BC061194
  gRNA
cacagaactgtcgcaagctg

SEQ ID NO: 6410 - DNA, 20 bp, Artificial Sequence
  MKO10006410_A_BC061194
  gRNA
agctgcgtttgtgctgcgag

SEQ ID NO: 6411 - DNA, 20 bp, Artificial Sequence
  MKO10006411_A_BC061212
  gRNA
tctccagaatctgacattga

SEQ ID NO: 6412 - DNA, 20 bp, Artificial Sequence
  MKO10006412_A_BC061212
  gRNA
tccatctagcacagcctgca

SEQ ID NO: 6413 - DNA, 20 bp, Artificial Sequence
  MKO10006413_A_BC061212
  gRNA
tcccgacaggggaaaacttc

SEQ ID NO: 6414 - DNA, 20 bp, Artificial Sequence
  MKO10006414_A_BC061237
  gRNA
gcagcctccgccttacttcc

SEQ ID NO: 6415 - DNA, 20 bp, Artificial Sequence
  MKO10006415_A_BC061237
  gRNA
agatcaaagacaaatatagc

SEQ ID NO: 6416 - DNA, 20 bp, Artificial Sequence
  MKO10006416_A_BC061237
  gRNA
ccacagaaaatcagttctac

SEQ ID NO: 6417 - DNA, 20 bp, Artificial Sequence
  MKO10006417_A_BC068157
  gRNA
agcccgtccagtacgctgag

SEQ ID NO: 6418 - DNA, 20 bp, Artificial Sequence
  MKO10006418_A_BC068157
  gRNA
agctccgcggctacgatagt

SEQ ID NO: 6419 - DNA, 20 bp, Artificial Sequence
  MKO10006419_A_BC068157
  gRNA
tccgcttagcgatgctgaat

SEQ ID NO: 6420 - DNA, 20 bp, Artificial Sequence
  MKO10006420_A_BC068281
  gRNA
ccccgcatatccaccctcgc

SEQ ID NO: 6421 - DNA, 20 bp, Artificial Sequence
  MKO10006421_A_BC068281
  gRNA
ggtccacccaacggtgacga

SEQ ID NO: 6422 - DNA, 20 bp, Artificial Sequence
  MKO10006422_A_BC068281
  gRNA
agtaccgttcaacagatgtt

SEQ ID NO: 6423 - DNA, 20 bp, Artificial Sequence
  MKO10006423_A_BC080695
  gRNA
cctcgtgtgtctgtcaatga

SEQ ID NO: 6424 - DNA, 20 bp, Artificial Sequence
  MKO10006424_A_BC080695
  gRNA
ccttcattgacagacacacg

SEQ ID NO: 6425 - DNA, 20 bp, Artificial Sequence
  MKO10006425_A_BC080695
  gRNA
agttggaattgcatataggc

SEQ ID NO: 6426 - DNA, 20 bp, Artificial Sequence
  MKO10006426_A_BC089491
  gRNA
gtccggtctgaagaaacttg

SEQ ID NO: 6427 - DNA, 20 bp, Artificial Sequence
  MKO10006427_A_BC089491
  gRNA
cccgaaggccatagcttcag

SEQ ID NO: 6428 - DNA, 20 bp, Artificial Sequence
  MKO10006428_A_BC089491
  gRNA
ctcagtacattatactgaaa

SEQ ID NO: 6429 - DNA, 20 bp, Artificial Sequence
  MKO10006429_A_BC089597
  gRNA
gcctctctctaaaaaagcgc

SEQ ID NO: 6430 - DNA, 20 bp, Artificial Sequence
  MKO10006430_A_BC089597
  gRNA
aggagggagctccgctactt

SEQ ID NO: 6431 - DNA, 20 bp, Artificial Sequence
  MKO10006431_A_BC089597
  gRNA
ccagctgagtatctcgtgcg

SEQ ID NO: 6432 - DNA, 20 bp, Artificial Sequence
  MKO10006432_A_BC094916
  gRNA
atgatcttgttggagtttcg

SEQ ID NO: 6433 - DNA, 20 bp, Artificial Sequence
  MKO10006433_A_BC094916
  gRNA
aacagcatatagcagtgccc

SEQ ID NO: 6434 - DNA, 20 bp, Artificial Sequence
  MKO10006434_A_BC094916
  gRNA
tttgcatcagctaaaaggaa

SEQ ID NO: 6435 - DNA, 20 bp, Artificial Sequence
  MKO10006435_A_BC100451
  gRNA
aagaacgccgggcgcgtaga

SEQ ID NO: 6436 - DNA, 20 bp, Artificial Sequence
  MKO10006436_A_BC100451
  gRNA
agcgcatccgtctacgcgcc

SEQ ID NO: 6437 - DNA, 20 bp, Artificial Sequence
  MKO10006437_A_BC100451
  gRNA
ccggctgcagcaggtccgac

SEQ ID NO: 6438 - DNA, 20 bp, Artificial Sequence
  MKO10006438_A_BC100530
  gRNA
ctcatcaagatgagtctcgg

SEQ ID NO: 6439 - DNA, 20 bp, Artificial Sequence
  MKO10006439_A_BC100530
  gRNA
tcaccttgtcagcaatcttc

SEQ ID NO: 6440 - DNA, 20 bp, Artificial Sequence
  MKO10006440_A_BC100530
  gRNA
tataaaactcaagccgtcgc

SEQ ID NO: 6441 - DNA, 20 bp, Artificial Sequence
  MKO10006441_A_BC107364
  gRNA
aaacagaacccgacgtgtca

SEQ ID NO: 6442 - DNA, 20 bp, Artificial Sequence
  MKO10006442_A_BC107364
  gRNA
gccagcacgtctatattccc

SEQ ID NO: 6443 - DNA, 20 bp, Artificial Sequence
  MKO10006443_A_BC107364
  gRNA
accagggaatatagacgtgc

SEQ ID NO: 6444 - DNA, 20 bp, Artificial Sequence
  MKO10006444_A_BC117090
  gRNA
gtaggtcaactcgtcatcct

SEQ ID NO: 6445 - DNA, 20 bp, Artificial Sequence
  MKO10006445_A_BC117090
  gRNA
tatgtacggaggtgtttcag

SEQ ID NO: 6446 - DNA, 20 bp, Artificial Sequence
  MKO10006446_A_BC117090
  gRNA
ttaccagactgacaaagcca

SEQ ID NO: 6447 - DNA, 20 bp, Artificial Sequence
  MKO10006447_A_BC147527
  gRNA
taaatttgtggtaggaatcc

SEQ ID NO: 6448 - DNA, 20 bp, Artificial Sequence
  MKO10006448_A_BC147527
  gRNA
atcctgcatcttacagtgcc

SEQ ID NO: 6449 - DNA, 20 bp, Artificial Sequence
  MKO10006449_A_BC147527
  gRNA
tgcctggcactgtaagatgc

SEQ ID NO: 6450 - DNA, 20 bp, Artificial Sequence
  MKO10006450_A_Baalc
  gRNA
tagttgaaacagatatcgag

SEQ ID NO: 6451 - DNA, 20 bp, Artificial Sequence
  MKO10006451_A_Baalc
  gRNA
ttccgatttgttgctccgtt

SEQ ID NO: 6452 - DNA, 20 bp, Artificial Sequence
  MKO10006452_A_Baalc
  gRNA
gctattccacccggggctgc

SEQ ID NO: 6453 - DNA, 20 bp, Artificial Sequence
  MKO10006453_A_Baat
  gRNA
tgatgacctgccttctcgac

SEQ ID NO: 6454 - DNA, 20 bp, Artificial Sequence
  MKO10006454_A_Baat
  gRNA
aggtaaaggaaagccgcatc

SEQ ID NO: 6455 - DNA, 20 bp, Artificial Sequence
  MKO10006455_A_Baat
  gRNA
tctaccttctccagtcgaga

SEQ ID NO: 6456 - DNA, 20 bp, Artificial Sequence
  MKO10006456_A_Babam1
  gRNA
tagtgaatgacgactccgcc

SEQ ID NO: 6457 - DNA, 20 bp, Artificial Sequence
  MKO10006457_A_Babam1
  gRNA
acgccgtctccaggtcatac

SEQ ID NO: 6458 - DNA, 20 bp, Artificial Sequence
  MKO10006458_A_Babam1
  gRNA
caagagccacgaatttgcac

SEQ ID NO: 6459 - DNA, 20 bp, Artificial Sequence
  MKO10006459_A_Bace1
  gRNA
cacatatcgagacctccgaa

SEQ ID NO: 6460 - DNA, 20 bp, Artificial Sequence
  MKO10006460_A_Bace1
  gRNA
atccggctgccccttcgcag

SEQ ID NO: 6461 - DNA, 20 bp, Artificial Sequence
  MKO10006461_A_Bace1
  gRNA
gccacagcccgacgactctt

SEQ ID NO: 6462 - DNA, 20 bp, Artificial Sequence
  MKO10006462_A_Bace2
  gRNA
ctggtataccccaattaaag

SEQ ID NO: 6463 - DNA, 20 bp, Artificial Sequence
  MKO10006463_A_Bace2
  gRNA
acccacaagactacctccgt

SEQ ID NO: 6464 - DNA, 20 bp, Artificial Sequence
  MKO10006464_A_Bace2
  gRNA
tggaagcagtaacttcgctg

SEQ ID NO: 6465 - DNA, 20 bp, Artificial Sequence
  MKO10006465_A_Bach1
  gRNA
cctcttgcgacagcgttgcg

SEQ ID NO: 6466 - DNA, 20 bp, Artificial Sequence
  MKO10006466_A_Bach1
  gRNA
gcggttccgagcccaccgct

SEQ ID NO: 6467 - DNA, 20 bp, Artificial Sequence
  MKO10006467_A_Bach1
  gRNA
tctggcctacgattctcgag

SEQ ID NO: 6468 - DNA, 20 bp, Artificial Sequence
  MKO10006468_A_Bach2
  gRNA
gtgttgggccgtatccttcc

SEQ ID NO: 6469 - DNA, 20 bp, Artificial Sequence
  MKO10006469_A_Bach2
  gRNA
cggttggtcacacgcgcttg

SEQ ID NO: 6470 - DNA, 20 bp, Artificial Sequence
  MKO10006470_A_Bach2
  gRNA
ctgtgacgtgacgctgatcg

SEQ ID NO: 6471 - DNA, 20 bp, Artificial Sequence
  MKO10006471_A_Bad
  gRNA
gaacgcgagcgtcctcgaaa

SEQ ID NO: 6472 - DNA, 20 bp, Artificial Sequence
  MKO10006472_A_Bad
  gRNA
cgatcccggaatccggagcc

SEQ ID NO: 6473 - DNA, 20 bp, Artificial Sequence
  MKO10006473_A_Bad
  gRNA
gctacggccgtgagctccga

SEQ ID NO: 6474 - DNA, 20 bp, Artificial Sequence
  MKO10006474_A_Bag1
  gRNA
ggtgacgatcacgctgagtc

SEQ ID NO: 6475 - DNA, 20 bp, Artificial Sequence
  MKO10006475_A_Bag1
  gRNA
caacaagctgagccaagtct

SEQ ID NO: 6476 - DNA, 20 bp, Artificial Sequence
  MKO10006476_A_Bag1
  gRNA
gctctttattcaattcttgc

SEQ ID NO: 6477 - DNA, 20 bp, Artificial Sequence
  MKO10006477_A_Bag2
  gRNA
cacctcgtctataatcctcg

SEQ ID NO: 6478 - DNA, 20 bp, Artificial Sequence
  MKO10006478_A_Bag2
  gRNA
aggcggcacctccgatgagc

SEQ ID NO: 6479 - DNA, 20 bp, Artificial Sequence
  MKO10006479_A_Bag2
  gRNA
ggtcggccatggaagacgag

SEQ ID NO: 6480 - DNA, 20 bp, Artificial Sequence
  MKO10006480_A_Bag3
  gRNA
tctgtcatgccgccacgtaa

SEQ ID NO: 6481 - DNA, 20 bp, Artificial Sequence
  MKO10006481_A_Bag3
  gRNA
atcaaaatcgacccgcagac

SEQ ID NO: 6482 - DNA, 20 bp, Artificial Sequence
  MKO10006482_A_Bag3
  gRNA
ggtgcagcgatttcgtaccg

SEQ ID NO: 6483 - DNA, 20 bp, Artificial Sequence
  MKO10006483_A_Bag4
  gRNA
cggctcaggccttgacccga

SEQ ID NO: 6484 - DNA, 20 bp, Artificial Sequence
  MKO10006484_A_Bag4
  gRNA
tgacggaaagtgcttcaccg

SEQ ID NO: 6485 - DNA, 20 bp, Artificial Sequence
  MKO10006485_A_Bag4
  gRNA
gacgaccacaagacgatgcc

SEQ ID NO: 6486 - DNA, 20 bp, Artificial Sequence
  MKO10006486_A_Bag5
  gRNA
ctgacgcacgtgaagaccgg

SEQ ID NO: 6487 - DNA, 20 bp, Artificial Sequence
  MKO10006487_A_Bag5
  gRNA
tgataagaactacatccgtc

SEQ ID NO: 6488 - DNA, 20 bp, Artificial Sequence
  MKO10006488_A_Bag5
  gRNA
tcaggtccaggtacgtgatc

SEQ ID NO: 6489 - DNA, 20 bp, Artificial Sequence
  MKO10006489_A_Bag6
  gRNA
tgatagtgccagtaccgcta

SEQ ID NO: 6490 - DNA, 20 bp, Artificial Sequence
  MKO10006490_A_Bag6
  gRNA
gcggtactggcactatcact

SEQ ID NO: 6491 - DNA, 20 bp, Artificial Sequence
  MKO10006491_A_Bag6
  gRNA
cacctccatccgggacagta

SEQ ID NO: 6492 - DNA, 20 bp, Artificial Sequence
  MKO10006492_A_Bahcc1
  gRNA
cgagacgaaacgcaagtccg

SEQ ID NO: 6493 - DNA, 20 bp, Artificial Sequence
  MKO10006493_A_Bahcc1
  gRNA
accgaccatggtgcacccta

SEQ ID NO: 6494 - DNA, 20 bp, Artificial Sequence
  MKO10006494_A_Bahcc1
  gRNA
tgtaacagcagctcacgtcc

SEQ ID NO: 6495 - DNA, 20 bp, Artificial Sequence
  MKO10006495_A_Bahd1
  gRNA
ccgagatgggcgtctgaaga

SEQ ID NO: 6496 - DNA, 20 bp, Artificial Sequence
  MKO10006496_A_Bahd1
  gRNA
tgccatccgaaagagttacc

SEQ ID NO: 6497 - DNA, 20 bp, Artificial Sequence
  MKO10006497_A_Bahd1
  gRNA
ttacaggcctgagcacttac

SEQ ID NO: 6498 - DNA, 20 bp, Artificial Sequence
  MKO10006498_A_Bai1
  gRNA
atgtagagcgtgtaacgacg

SEQ ID NO: 6499 - DNA, 20 bp, Artificial Sequence
  MKO10006499_A_Bai1
  gRNA
aagtgcgggttcgagtttgc

SEQ ID NO: 6500 - DNA, 20 bp, Artificial Sequence
  MKO10006500_A_Bai1
  gRNA
ccgcgtacattcgccccaca

SEQ ID NO: 6501 - DNA, 20 bp, Artificial Sequence
  MKO10006501_A_Bai2
  gRNA
ggccccgtagagcacgcccg

SEQ ID NO: 6502 - DNA, 20 bp, Artificial Sequence
  MKO10006502_A_Bai2
  gRNA
gtgcagcaatctcgattgcc

SEQ ID NO: 6503 - DNA, 20 bp, Artificial Sequence
  MKO10006503_A_Bai2
  gRNA
tccttgcagtgcacggcgtg

SEQ ID NO: 6504 - DNA, 20 bp, Artificial Sequence
  MKO10006504_A_Bai3
  gRNA
ccgctgcagtgtgtcccgta

SEQ ID NO: 6505 - DNA, 20 bp, Artificial Sequence
  MKO10006505_A_Bai3
  gRNA
ctttggtagttgacggacag

SEQ ID NO: 6506 - DNA, 20 bp, Artificial Sequence
  MKO10006506_A_Bai3
  gRNA
gcggcccattaagagaatca

SEQ ID NO: 6507 - DNA, 20 bp, Artificial Sequence
  MKO10006507_A_Baiap2l1
  gRNA
aaaagcctactacgacggcg

SEQ ID NO: 6508 - DNA, 20 bp, Artificial Sequence
  MKO10006508_A_Baiap2l1
  gRNA
tttattaagttccgtagtcc

SEQ ID NO: 6509 - DNA, 20 bp, Artificial Sequence
  MKO10006509_A_Baiap2l1
  gRNA
tcacctagctctgttgacac

SEQ ID NO: 6510 - DNA, 20 bp, Artificial Sequence
  MKO10006510_A_Baiap2l2
  gRNA
ggagcagtttaatcccgccc

SEQ ID NO: 6511 - DNA, 20 bp, Artificial Sequence
  MKO10006511_A_Baiap2l2
  gRNA
gagctccacatcgcagattc

SEQ ID NO: 6512 - DNA, 20 bp, Artificial Sequence
  MKO10006512_A_Baiap2l2
  gRNA
acctgggcaacaactacctc

SEQ ID NO: 6513 - DNA, 20 bp, Artificial Sequence
  MKO10006513_A_Baiap2
  gRNA
ctccgagcgtgaaagcgaca

SEQ ID NO: 6514 - DNA, 20 bp, Artificial Sequence
  MKO10006514_A_Baiap2
  gRNA
gaccatgtcgctttcacgct

SEQ ID NO: 6515 - DNA, 20 bp, Artificial Sequence
  MKO10006515_A_Baiap2
  gRNA
gccggtgcacctcagccatc

SEQ ID NO: 6516 - DNA, 20 bp, Artificial Sequence
  MKO10006516_A_Baiap3
  gRNA
aggccacgattgggatccac

SEQ ID NO: 6517 - DNA, 20 bp, Artificial Sequence
  MKO10006517_A_Baiap3
  gRNA
agacctcctcgtcatctacc

SEQ ID NO: 6518 - DNA, 20 bp, Artificial Sequence
  MKO10006518_A_Baiap3
  gRNA
ggattccttacctcaggaca

SEQ ID NO: 6519 - DNA, 20 bp, Artificial Sequence
  MKO10006519_A_Bak1
  gRNA
tgcatcattacatcgccaga

SEQ ID NO: 6520 - DNA, 20 bp, Artificial Sequence
  MKO10006520_A_Bak1
  gRNA
caagttgtccatctcggggt

SEQ ID NO: 6521 - DNA, 20 bp, Artificial Sequence
  MKO10006521_A_Bak1
  gRNA
gcctctctgtgcgatccatc

SEQ ID NO: 6522 - DNA, 20 bp, Artificial Sequence
  MKO10006522_A_Bambi
  gRNA
gaaccgctatcacagctgcg

SEQ ID NO: 6523 - DNA, 20 bp, Artificial Sequence
  MKO10006523_A_Bambi
  gRNA
ctcacttcgaagcattcgca

SEQ ID NO: 6524 - DNA, 20 bp, Artificial Sequence
  MKO10006524_A_Bambi
  gRNA
gaagacatgtgcaattatcg

SEQ ID NO: 6525 - DNA, 20 bp, Artificial Sequence
  MKO10006525_A_Banf1
  gRNA
atgaagacctcttccgagaa

SEQ ID NO: 6526 - DNA, 20 bp, Artificial Sequence
  MKO10006526_A_Banf1
  gRNA
atcccggccaggctccccac

SEQ ID NO: 6527 - DNA, 20 bp, Artificial Sequence
  MKO10006527_A_Banf1
  gRNA
ttggtgacgtcctgagcaag

SEQ ID NO: 6528 - DNA, 20 bp, Artificial Sequence
  MKO10006528_A_Banf2
  gRNA
agatggacgacatgtcgccc

SEQ ID NO: 6529 - DNA, 20 bp, Artificial Sequence
  MKO10006529_A_Banf2
  gRNA
ccgtgaacttgccatcaatt

SEQ ID NO: 6530 - DNA, 20 bp, Artificial Sequence
  MKO10006530_A_Banf2
  gRNA
agcagcagatgatccacctc

SEQ ID NO: 6531 - DNA, 20 bp, Artificial Sequence
  MKO10006531_A_Bank1
  gRNA
acactcttattccaacgtgc

SEQ ID NO: 6532 - DNA, 20 bp, Artificial Sequence
  MKO10006532_A_Bank1
  gRNA
ccgtgctctgaggcgcttgt

SEQ ID NO: 6533 - DNA, 20 bp, Artificial Sequence
  MKO10006533_A_Bank1
  gRNA
acctcacatggaatttcccc

SEQ ID NO: 6534 - DNA, 20 bp, Artificial Sequence
  MKO10006534_A_Banp
  gRNA
ggaacgcaccttcggagttc

SEQ ID NO: 6535 - DNA, 20 bp, Artificial Sequence
  MKO10006535_A_Banp
  gRNA
ccaaccgcaaacatatcgtc

SEQ ID NO: 6536 - DNA, 20 bp, Artificial Sequence
  MKO10006536_A_Banp
  gRNA
gcgtcggcagaacaccatcg

SEQ ID NO: 6537 - DNA, 20 bp, Artificial Sequence
  MKO10006537_A_Bap1
  gRNA
tcaaatggatcgaagagcgc

SEQ ID NO: 6538 - DNA, 20 bp, Artificial Sequence
  MKO10006538_A_Bap1
  gRNA
ccgccgcaaggtttctacgt

SEQ ID NO: 6539 - DNA, 20 bp, Artificial Sequence
  MKO10006539_A_Bap1
  gRNA
gcccacgctgagccgaatga

SEQ ID NO: 6540 - DNA, 20 bp, Artificial Sequence
  MKO10006540_A_Bard1
  gRNA
tgtgtaaaagatcttcgttc

SEQ ID NO: 6541 - DNA, 20 bp, Artificial Sequence
  MKO10006541_A_Bard1
  gRNA
cctcaagataaaccgacaat

SEQ ID NO: 6542 - DNA, 20 bp, Artificial Sequence
  MKO10006542_A_Bard1
  gRNA
gcttgcagaaaacgtagtgt

SEQ ID NO: 6543 - DNA, 20 bp, Artificial Sequence
  MKO10006543_A_Barhl1
  gRNA
gccgcactctatctgtaccg

SEQ ID NO: 6544 - DNA, 20 bp, Artificial Sequence
  MKO10006544_A_Barhl1
  gRNA
ttggccgcaaggcggccccc

SEQ ID NO: 6545 - DNA, 20 bp, Artificial Sequence
  MKO10006545_A_Barhl1
  gRNA
cctgagcgtgcaagaccgca

SEQ ID NO: 6546 - DNA, 20 bp, Artificial Sequence
  MKO10006546_A_Barhl2
  gRNA
tccgatcgctcggtgaagcg

SEQ ID NO: 6547 - DNA, 20 bp, Artificial Sequence
  MKO10006547_A_Barhl2
  gRNA
tattccaaaactcgacccgc

SEQ ID NO: 6548 - DNA, 20 bp, Artificial Sequence
  MKO10006548_A_Barhl2
  gRNA
gtgcggccgccaggtccatt

SEQ ID NO: 6549 - DNA, 20 bp, Artificial Sequence
  MKO10006549_A_Barx1
  gRNA
gcccagcgaccgaaattgcg

SEQ ID NO: 6550 - DNA, 20 bp, Artificial Sequence
  MKO10006550_A_Barx1
  gRNA
acgctcagtcctcgcaattt

SEQ ID NO: 6551 - DNA, 20 bp, Artificial Sequence
  MKO10006551_A_Barx1
  gRNA
gaacttgagcagctcgcccg

SEQ ID NO: 6552 - DNA, 20 bp, Artificial Sequence
  MKO10006552_A_Barx2
  gRNA
gaaagtcttgtagcgccgcc

SEQ ID NO: 6553 - DNA, 20 bp, Artificial Sequence
  MKO10006553_A_Barx2
  gRNA
ctactctgtgtgcccgtcgc

SEQ ID NO: 6554 - DNA, 20 bp, Artificial Sequence
  MKO10006554_A_Barx2
  gRNA
ttcttcttagggcgcccctt

SEQ ID NO: 6555 - DNA, 20 bp, Artificial Sequence
  MKO10006555_A_Basp1
  gRNA
gctctcggcgctcgcttcgc

SEQ ID NO: 6556 - DNA, 20 bp, Artificial Sequence
  MKO10006556_A_Basp1
  gRNA
ctcctcggtgcccgcgcctt

SEQ ID NO: 6557 - DNA, 20 bp, Artificial Sequence
  MKO10006557_A_Basp1
  gRNA
gaaaagcgacgcggccccgg

SEQ ID NO: 6558 - DNA, 20 bp, Artificial Sequence
  MKO10006558_A_Batf2
  gRNA
gtgcagagcgtccgccttac

SEQ ID NO: 6559 - DNA, 20 bp, Artificial Sequence
  MKO10006559_A_Batf2
  gRNA
ggatctccttccgaagggcg

SEQ ID NO: 6560 - DNA, 20 bp, Artificial Sequence
  MKO10006560_A_Batf2
  gRNA
tgtgcttctgccggctgcgc

SEQ ID NO: 6561 - DNA, 20 bp, Artificial Sequence
  MKO10006561_A_Batf3
  gRNA
gagcgcgcggcatgtcgcaa

SEQ ID NO: 6562 - DNA, 20 bp, Artificial Sequence
  MKO10006562_A_Batf3
  gRNA
agagccccaaggacgatgac

SEQ ID NO: 6563 - DNA, 20 bp, Artificial Sequence
  MKO10006563_A_Batf3
  gRNA
gctccttcagcacctcgctc

SEQ ID NO: 6564 - DNA, 20 bp, Artificial Sequence
  MKO10006564_A_Batf
  gRNA
gaaagccgacacccttcacc

SEQ ID NO: 6565 - DNA, 20 bp, Artificial Sequence
  MKO10006565_A_Batf
  gRNA
atgggcactgtataccacct

SEQ ID NO: 6566 - DNA, 20 bp, Artificial Sequence
  MKO10006566_A_Batf
  gRNA
actcaccaggtgaagggtgt

SEQ ID NO: 6567 - DNA, 20 bp, Artificial Sequence
  MKO10006567_A_Bax
  gRNA
caacttcaactggggccgcg

SEQ ID NO: 6568 - DNA, 20 bp, Artificial Sequence
  MKO10006568_A_Bax
  gRNA
ccagttcatctccaattcgc

SEQ ID NO: 6569 - DNA, 20 bp, Artificial Sequence
  MKO10006569_A_Bax
  gRNA
agtttcatccaggatcgagc

SEQ ID NO: 6570 - DNA, 20 bp, Artificial Sequence
  MKO10006570_A_Baz1a
  gRNA
tgtgccgtgacgggtagacc

SEQ ID NO: 6571 - DNA, 20 bp, Artificial Sequence
  MKO10006571_A_Baz1a
  gRNA
gcaagcgtgaacgacgagta

SEQ ID NO: 6572 - DNA, 20 bp, Artificial Sequence
  MKO10006572_A_Baz1a
  gRNA
catcagcgacagtgacgact

SEQ ID NO: 6573 - DNA, 20 bp, Artificial Sequence
  MKO10006573_A_Baz1b
  gRNA
gactagatgacagagcgcgt

SEQ ID NO: 6574 - DNA, 20 bp, Artificial Sequence
  MKO10006574_A_Baz1b
  gRNA
gatcatgaccaaatatgccg

SEQ ID NO: 6575 - DNA, 20 bp, Artificial Sequence
  MKO10006575_A_Baz1b
  gRNA
agagtcgacaagcttctcta

SEQ ID NO: 6576 - DNA, 20 bp, Artificial Sequence
  MKO10006576_A_Baz2a
  gRNA
tctcgatcagcacgcgcttt

SEQ ID NO: 6577 - DNA, 20 bp, Artificial Sequence
  MKO10006577_A_Baz2a
  gRNA
ggggcttaacttcgattcac

SEQ ID NO: 6578 - DNA, 20 bp, Artificial Sequence
  MKO10006578_A_Baz2a
  gRNA
aaggttgtcggttgccccca

SEQ ID NO: 6579 - DNA, 20 bp, Artificial Sequence
  MKO10006579_A_Baz2b
  gRNA
acgattcgtcattccattcg

SEQ ID NO: 6580 - DNA, 20 bp, Artificial Sequence
  MKO10006580_A_Baz2b
  gRNA
tcgtcagacacctcgagtga

SEQ ID NO: 6581 - DNA, 20 bp, Artificial Sequence
  MKO10006581_A_Baz2b
  gRNA
gacgaatcgtgattctgggc

SEQ ID NO: 6582 - DNA, 20 bp, Artificial Sequence
  MKO10006582_A_Bbc3
  gRNA
gggcactcaccgtccgggcg

SEQ ID NO: 6583 - DNA, 20 bp, Artificial Sequence
  MKO10006583_A_Bbc3
  gRNA
gccgctcgtactgcgcgttg

SEQ ID NO: 6584 - DNA, 20 bp, Artificial Sequence
  MKO10006584_A_Bbc3
  gRNA
gtcgcgggctagaccctcta

SEQ ID NO: 6585 - DNA, 20 bp, Artificial Sequence
  MKO10006585_A_Bbip1
  gRNA
gcccttaaaatctctgacgc

SEQ ID NO: 6586 - DNA, 20 bp, Artificial Sequence
  MKO10006586_A_Bbip1
  gRNA
cgagaagtccttccaaaaca

SEQ ID NO: 6587 - DNA, 20 bp, Artificial Sequence
  MKO10006587_A_Bbip1
  gRNA
gggtttacacagcaccattg

SEQ ID NO: 6588 - DNA, 20 bp, Artificial Sequence
  MKO10006588_A_Bbox1
  gRNA
tattctctcctcgacctttg

SEQ ID NO: 6589 - DNA, 20 bp, Artificial Sequence
  MKO10006589_A_Bbox1
  gRNA
taacgtgtgccaaaagctca

SEQ ID NO: 6590 - DNA, 20 bp, Artificial Sequence
  MKO10006590_A_Bbox1
  gRNA
accggagcagctgacaaacg

SEQ ID NO: 6591 - DNA, 20 bp, Artificial Sequence
  MKO10006591_A_Bbs10
  gRNA
gtgttgtgtacgaagcccac

SEQ ID NO: 6592 - DNA, 20 bp, Artificial Sequence
  MKO10006592_A_Bbs10
  gRNA
gcactcgctagagttgctcc

SEQ ID NO: 6593 - DNA, 20 bp, Artificial Sequence
  MKO10006593_A_Bbs10
  gRNA
gagcatcgcgaaccgctgcg

SEQ ID NO: 6594 - DNA, 20 bp, Artificial Sequence
  MKO10006594_A_Bbs12
  gRNA
agagcactacatccaatgct

SEQ ID NO: 6595 - DNA, 20 bp, Artificial Sequence
  MKO10006595_A_Bbs12
  gRNA
cacagagagttaccgacacc

SEQ ID NO: 6596 - DNA, 20 bp, Artificial Sequence
  MKO10006596_A_Bbs12
  gRNA
caccctcaatgagaatcact

SEQ ID NO: 6597 - DNA, 20 bp, Artificial Sequence
  MKO10006597_A_Bbs1
  gRNA
ggacgcacactacgacccca

SEQ ID NO: 6598 - DNA, 20 bp, Artificial Sequence
  MKO10006598_A_Bbs1
  gRNA
tcatggaccaacacgagccc

SEQ ID NO: 6599 - DNA, 20 bp, Artificial Sequence
  MKO10006599_A_Bbs1
  gRNA
cgtttggaaccaagccaaag

SEQ ID NO: 6600 - DNA, 20 bp, Artificial Sequence
  MKO10006600_A_Bbs2
  gRNA
ctgcagggtttcgatcacga

SEQ ID NO: 6601 - DNA, 20 bp, Artificial Sequence
  MKO10006601_A_Bbs2
  gRNA
aacccaggcagctgaccgtc

SEQ ID NO: 6602 - DNA, 20 bp, Artificial Sequence
  MKO10006602_A_Bbs2
  gRNA
tcattcataaccctcacacg

SEQ ID NO: 6603 - DNA, 20 bp, Artificial Sequence
  MKO10006603_A_Bbs4
  gRNA
tgatccatctccactatatc

SEQ ID NO: 6604 - DNA, 20 bp, Artificial Sequence
  MKO10006604_A_Bbs4
  gRNA
tgcaagcttcataatccttc

SEQ ID NO: 6605 - DNA, 20 bp, Artificial Sequence
  MKO10006605_A_Bbs4
  gRNA
gaatatgctatctatgtcca

SEQ ID NO: 6606 - DNA, 20 bp, Artificial Sequence
  MKO10006606_A_Bbs5
  gRNA
cttctgtgatcgcagtgcac

SEQ ID NO: 6607 - DNA, 20 bp, Artificial Sequence
  MKO10006607_A_Bbs5
  gRNA
gatcacagaagtaaaaagtc

SEQ ID NO: 6608 - DNA, 20 bp, Artificial Sequence
  MKO10006608_A_Bbs5
  gRNA
atacttacaaagattgactc

SEQ ID NO: 6609 - DNA, 20 bp, Artificial Sequence
  MKO10006609_A_Bbs7
  gRNA
aggggccgtcaacacgcctc

SEQ ID NO: 6610 - DNA, 20 bp, Artificial Sequence
  MKO10006610_A_Bbs7
  gRNA
atatgcttcggcgtgaagaa

SEQ ID NO: 6611 - DNA, 20 bp, Artificial Sequence
  MKO10006611_A_Bbs7
  gRNA
aaagttatctcgcgtgacac

SEQ ID NO: 6612 - DNA, 20 bp, Artificial Sequence
  MKO10006612_A_Bbs9
  gRNA
acggcctgcaatatgacgta

SEQ ID NO: 6613 - DNA, 20 bp, Artificial Sequence
  MKO10006613_A_Bbs9
  gRNA
ccgacttccacttgcagcac

SEQ ID NO: 6614 - DNA, 20 bp, Artificial Sequence
  MKO10006614_A_Bbs9
  gRNA
gggcaccgagatgcttcatc

SEQ ID NO: 6615 - DNA, 20 bp, Artificial Sequence
  MKO10006615_A_Bbx
  gRNA
ccaccgctcccttgtccgac

SEQ ID NO: 6616 - DNA, 20 bp, Artificial Sequence
  MKO10006616_A_Bbx
  gRNA
ctaccaagatactagctgat

SEQ ID NO: 6617 - DNA, 20 bp, Artificial Sequence
  MKO10006617_A_Bbx
  gRNA
agacttgccaacccccaaga

SEQ ID NO: 6618 - DNA, 20 bp, Artificial Sequence
  MKO10006618_A_Bcam
  gRNA
gggccgcgtacccccatacg

SEQ ID NO: 6619 - DNA, 20 bp, Artificial Sequence
  MKO10006619_A_Bcam
  gRNA
gcgaggcgagcaagtcgccc

SEQ ID NO: 6620 - DNA, 20 bp, Artificial Sequence
  MKO10006620_A_Bcam
  gRNA
ggactacgtgtgcgtagtga

SEQ ID NO: 6621 - DNA, 20 bp, Artificial Sequence
  MKO10006621_A_Bcan
  gRNA
gcgatagaccccggaatcat

SEQ ID NO: 6622 - DNA, 20 bp, Artificial Sequence
  MKO10006622_A_Bcan
  gRNA
cgaagcctaccggttccgcg

SEQ ID NO: 6623 - DNA, 20 bp, Artificial Sequence
  MKO10006623_A_Bcan
  gRNA
cacactgctcatagccgccg

SEQ ID NO: 6624 - DNA, 20 bp, Artificial Sequence
  MKO10006624_A_Bcap29
  gRNA
atcggaagccttcttcagct

SEQ ID NO: 6625 - DNA, 20 bp, Artificial Sequence
  MKO10006625_A_Bcap29
  gRNA
gttcttctctacaacattcg

SEQ ID NO: 6626 - DNA, 20 bp, Artificial Sequence
  MKO10006626_A_Bcap29
  gRNA
caatgctgaagaacaccttt

SEQ ID NO: 6627 - DNA, 20 bp, Artificial Sequence
  MKO10006627_A_Bcap31
  gRNA
ctgtcacatcatcgtatttc

SEQ ID NO: 6628 - DNA, 20 bp, Artificial Sequence
  MKO10006628_A_Bcap31
  gRNA
tggcagcctgcttagacgcc

SEQ ID NO: 6629 - DNA, 20 bp, Artificial Sequence
  MKO10006629_A_Bcap31
  gRNA
ctttccctagggagctgccg

SEQ ID NO: 6630 - DNA, 20 bp, Artificial Sequence
  MKO10006630_A_Bcar1
  gRNA
gcgcgtgctgcccgtgctag

SEQ ID NO: 6631 - DNA, 20 bp, Artificial Sequence
  MKO10006631_A_Bcar1
  gRNA
ggtatatgacacgcccccta

SEQ ID NO: 6632 - DNA, 20 bp, Artificial Sequence
  MKO10006632_A_Bcar1
  gRNA
ggtggtggttcctacgcgag

SEQ ID NO: 6633 - DNA, 20 bp, Artificial Sequence
  MKO10006633_A_Bcar3
  gRNA
ccacggccggatcccccgac

SEQ ID NO: 6634 - DNA, 20 bp, Artificial Sequence
  MKO10006634_A_Bcar3
  gRNA
cgcgactccctgtcgagccc

SEQ ID NO: 6635 - DNA, 20 bp, Artificial Sequence
  MKO10006635_A_Bcar3
  gRNA
tgtgcagtaccaattcgaga

SEQ ID NO: 6636 - DNA, 20 bp, Artificial Sequence
  MKO10006636_A_Bcas1
  gRNA
tccccgggacgtcctggtac

SEQ ID NO: 6637 - DNA, 20 bp, Artificial Sequence
  MKO10006637_A_Bcas1
  gRNA
accagatgagcgtcccacta

SEQ ID NO: 6638 - DNA, 20 bp, Artificial Sequence
  MKO10006638_A_Bcas1
  gRNA
cagccgatgaatccgtgcct

SEQ ID NO: 6639 - DNA, 20 bp, Artificial Sequence
  MKO10006639_A_Bcas2
  gRNA
tcgttcttaggcggcggccc

SEQ ID NO: 6640 - DNA, 20 bp, Artificial Sequence
  MKO10006640_A_Bcas2
  gRNA
agttggagcaccaggcggtc

SEQ ID NO: 6641 - DNA, 20 bp, Artificial Sequence
  MKO10006641_A_Bcas2
  gRNA
tcagctccagattctcgatc

SEQ ID NO: 6642 - DNA, 20 bp, Artificial Sequence
  MKO10006642_A_Bcas3
  gRNA
gactccgccagtacaacgac

SEQ ID NO: 6643 - DNA, 20 bp, Artificial Sequence
  MKO10006643_A_Bcas3
  gRNA
cggagacccagtcgttgtac

SEQ ID NO: 6644 - DNA, 20 bp, Artificial Sequence
  MKO10006644_A_Bcas3
  gRNA
agtcacgacgctctccatgt

SEQ ID NO: 6645 - DNA, 20 bp, Artificial Sequence
  MKO10006645_A_Bcat1
  gRNA
gctccaaagaccagcgaatc

SEQ ID NO: 6646 - DNA, 20 bp, Artificial Sequence
  MKO10006646_A_Bcat1
  gRNA
cacagcgtagtgcaaaacag

SEQ ID NO: 6647 - DNA, 20 bp, Artificial Sequence
  MKO10006647_A_Bcat1
  gRNA
tacatccgccccacatttat

SEQ ID NO: 6648 - DNA, 20 bp, Artificial Sequence
  MKO10006648_A_Bcat2
  gRNA
gtcaccgactccgcctatcc

SEQ ID NO: 6649 - DNA, 20 bp, Artificial Sequence
  MKO10006649_A_Bcat2
  gRNA
acggaacgagcctctacgtg

SEQ ID NO: 6650 - DNA, 20 bp, Artificial Sequence
  MKO10006650_A_Bcat2
  gRNA
accagcaggtacgcctcttc

SEQ ID NO: 6651 - DNA, 20 bp, Artificial Sequence
  MKO10006651_A_Bccip
  gRNA
tccatctcagataacgatta

SEQ ID NO: 6652 - DNA, 20 bp, Artificial Sequence
  MKO10006652_A_Bccip
  gRNA
gccataatcgttatctgaga

SEQ ID NO: 6653 - DNA, 20 bp, Artificial Sequence
  MKO10006653_A_Bccip
  gRNA
catcaggagattcgtcagct

SEQ ID NO: 6654 - DNA, 20 bp, Artificial Sequence
  MKO10006654_A_Bcdin3d
  gRNA
atttccgaacggggcggccc

SEQ ID NO: 6655 - DNA, 20 bp, Artificial Sequence
  MKO10006655_A_Bcdin3d
  gRNA
tacaccccacgtcgagccct

SEQ ID NO: 6656 - DNA, 20 bp, Artificial Sequence
  MKO10006656_A_Bcdin3d
  gRNA
agcacgctaactccatcccg

SEQ ID NO: 6657 - DNA, 20 bp, Artificial Sequence
  MKO10006657_A_Bche
  gRNA
agaagtctaccgtgacgctt

SEQ ID NO: 6658 - DNA, 20 bp, Artificial Sequence
  MKO10006658_A_Bche
  gRNA
atcgatcttccaaactacct

SEQ ID NO: 6659 - DNA, 20 bp, Artificial Sequence
  MKO10006659_A_Bche
  gRNA
ggaaggcaggatttcatcgc

SEQ ID NO: 6660 - DNA, 20 bp, Artificial Sequence
  MKO10006660_A_Bckdha
  gRNA
cattcacgttgccgtagcac

SEQ ID NO: 6661 - DNA, 20 bp, Artificial Sequence
  MKO10006661_A_Bckdha
  gRNA
tccttgcagccgtagtgaac

SEQ ID NO: 6662 - DNA, 20 bp, Artificial Sequence
  MKO10006662_A_Bckdha
  gRNA
ggaactggggcttgtcgtcc

SEQ ID NO: 6663 - DNA, 20 bp, Artificial Sequence
  MKO10006663_A_Bckdhb
  gRNA
gccaagtatcgctaccgctc

SEQ ID NO: 6664 - DNA, 20 bp, Artificial Sequence
  MKO10006664_A_Bckdhb
  gRNA
ctcgtaaaccaacagtgcat

SEQ ID NO: 6665 - DNA, 20 bp, Artificial Sequence
  MKO10006665_A_Bckdhb
  gRNA
ccacacaaccccacggggcc

SEQ ID NO: 6666 - DNA, 20 bp, Artificial Sequence
  MKO10006666_A_Bckdk
  gRNA
ggctacggaagcccttgatg

SEQ ID NO: 6667 - DNA, 20 bp, Artificial Sequence
  MKO10006667_A_Bckdk
  gRNA
ccgccttaccacatgcagta

SEQ ID NO: 6668 - DNA, 20 bp, Artificial Sequence
  MKO10006668_A_Bckdk
  gRNA
tacagcacgagctatacatc

SEQ ID NO: 6669 - DNA, 20 bp, Artificial Sequence
  MKO10006669_A_Bcl10
  gRNA
gccgaacttcaagtagaaaa

SEQ ID NO: 6670 - DNA, 20 bp, Artificial Sequence
  MKO10006670_A_Bcl10
  gRNA
ttcccccctcttccaaccga

SEQ ID NO: 6671 - DNA, 20 bp, Artificial Sequence
  MKO10006671_A_Bcl10
  gRNA
ggctcccgcaccgtccctca

SEQ ID NO: 6672 - DNA, 20 bp, Artificial Sequence
  MKO10006672_A_Bcl11a
  gRNA
ggataccaacccgcggggtc

SEQ ID NO: 6673 - DNA, 20 bp, Artificial Sequence
  MKO10006673_A_Bcl11a
  gRNA
gtccttcacacacccccgtt

SEQ ID NO: 6674 - DNA, 20 bp, Artificial Sequence
  MKO10006674_A_Bcl11a
  gRNA
cgccgaacgggggtgtgtga

SEQ ID NO: 6675 - DNA, 20 bp, Artificial Sequence
  MKO10006675_A_Bcl11b
  gRNA
ctgagtcccgtcgcccgaga

SEQ ID NO: 6676 - DNA, 20 bp, Artificial Sequence
  MKO10006676_A_Bcl11b
  gRNA
agtcgccatcggccgctttc

SEQ ID NO: 6677 - DNA, 20 bp, Artificial Sequence
  MKO10006677_A_Bcl11b
  gRNA
ccgcgcccgttcactgcacc

SEQ ID NO: 6678 - DNA, 20 bp, Artificial Sequence
  MKO10006678_A_Bcl2a1a
  gRNA
gaatggatacggcagaatgg

SEQ ID NO: 6679 - DNA, 20 bp, Artificial Sequence
  MKO10006679_A_Bcl2a1a
  gRNA
gtttgtaagcacatacatcc

SEQ ID NO: 6680 - DNA, 20 bp, Artificial Sequence
  MKO10006680_A_Bcl2a1a
  gRNA
aaaagtcagccagccagatt

SEQ ID NO: 6681 - DNA, 20 bp, Artificial Sequence
  MKO10006681_A_Bcl2a1b
  gRNA
agcactctgcatgctttgct

SEQ ID NO: 6682 - DNA, 20 bp, Artificial Sequence
  MKO10006682_A_Bcl2a1b
  gRNA
gaattcataatcaataacac

SEQ ID NO: 6683 - DNA, 20 bp, Artificial Sequence
  MKO10006683_A_Bcl2a1b
  gRNA
aaaagtcagccagccagatt

SEQ ID NO: 6684 - DNA, 20 bp, Artificial Sequence
  MKO10006684_A_Bcl2a1c
  gRNA
agtcatccaagtatgacttt

SEQ ID NO: 6685 - DNA, 20 bp, Artificial Sequence
  MKO10006685_A_Bcl2a1c
  gRNA
gatgaattctgccccaaaac

SEQ ID NO: 6686 - DNA, 20 bp, Artificial Sequence
  MKO10006686_A_Bcl2a1c
  gRNA
tacaaacaagtttccagttt

SEQ ID NO: 6687 - DNA, 20 bp, Artificial Sequence
  MKO10006687_A_Bcl2a1d
  gRNA
gttcatgtatatccactccc

SEQ ID NO: 6688 - DNA, 20 bp, Artificial Sequence
  MKO10006688_A_Bcl2a1d
  gRNA
tatgaattctgccacaaaac

SEQ ID NO: 6689 - DNA, 20 bp, Artificial Sequence
  MKO10006689_A_Bcl2a1d
  gRNA
aagaagtttgaacccaaatc

SEQ ID NO: 6690 - DNA, 20 bp, Artificial Sequence
  MKO10006690_A_Bcl2l10
  gRNA
attcataagcgtccccgcga

SEQ ID NO: 6691 - DNA, 20 bp, Artificial Sequence
  MKO10006691_A_Bcl2l10
  gRNA
cgtctagtgcgttcatgcag

SEQ ID NO: 6692 - DNA, 20 bp, Artificial Sequence
  MKO10006692_A_Bcl2l10
  gRNA
ttcaagaatcctttaccgct

SEQ ID NO: 6693 - DNA, 20 bp, Artificial Sequence
  MKO10006693_A_Bcl2l11
  gRNA
gtttgcaaatgattaccgcg

SEQ ID NO: 6694 - DNA, 20 bp, Artificial Sequence
  MKO10006694_A_Bcl2l11
  gRNA
gttacgctttatcttccgtc

SEQ ID NO: 6695 - DNA, 20 bp, Artificial Sequence
  MKO10006695_A_Bcl2l11
  gRNA
ggaacctgaagatctgcgcc

SEQ ID NO: 6696 - DNA, 20 bp, Artificial Sequence
  MKO10006696_A_Bcl2l12
  gRNA
gacaagggaggcatcttcgg

SEQ ID NO: 6697 - DNA, 20 bp, Artificial Sequence
  MKO10006697_A_Bcl2l12
  gRNA
gcaccaattgttccagccgc

SEQ ID NO: 6698 - DNA, 20 bp, Artificial Sequence
  MKO10006698_A_Bcl2l12
  gRNA
cagcccgtctctgccgtgcc

SEQ ID NO: 6699 - DNA, 20 bp, Artificial Sequence
  MKO10006699_A_Bcl2l13
  gRNA
ccaggtacatcacaccgaac

SEQ ID NO: 6700 - DNA, 20 bp, Artificial Sequence
  MKO10006700_A_Bcl2l13
  gRNA
aggtgttgtagcaaaactag

SEQ ID NO: 6701 - DNA, 20 bp, Artificial Sequence
  MKO10006701_A_Bcl2l13
  gRNA
gagtaccttattccatccgc

SEQ ID NO: 6702 - DNA, 20 bp, Artificial Sequence
  MKO10006702_A_Bcl2l14
  gRNA
gatggtcttgaacgttgagt

SEQ ID NO: 6703 - DNA, 20 bp, Artificial Sequence
  MKO10006703_A_Bcl2l14
  gRNA
agacgccatcgccaagctca

SEQ ID NO: 6704 - DNA, 20 bp, Artificial Sequence
  MKO10006704_A_Bcl2l14
  gRNA
tggctgaaattgtttactcc

SEQ ID NO: 6705 - DNA, 20 bp, Artificial Sequence
  MKO10006705_A_Bcl2l15
  gRNA
tgttggccgccttcgaatac

SEQ ID NO: 6706 - DNA, 20 bp, Artificial Sequence
  MKO10006706_A_Bcl2l15
  gRNA
atggttcatctgcacccgat

SEQ ID NO: 6707 - DNA, 20 bp, Artificial Sequence
  MKO10006707_A_Bcl2l15
  gRNA
tacgtgacgggcatgatcaa

SEQ ID NO: 6708 - DNA, 20 bp, Artificial Sequence
  MKO10006708_A_Bcl2l1
  gRNA
agtaaactggggtcgcatcg

SEQ ID NO: 6709 - DNA, 20 bp, Artificial Sequence
  MKO10006709_A_Bcl2l1
  gRNA
accagcggttgaagcgctcc

SEQ ID NO: 6710 - DNA, 20 bp, Artificial Sequence
  MKO10006710_A_Bcl2l1
  gRNA
cacgcacagtgccccgccaa

SEQ ID NO: 6711 - DNA, 20 bp, Artificial Sequence
  MKO10006711_A_Bcl2l2
  gRNA
ccctaactggggccgtcttg

SEQ ID NO: 6712 - DNA, 20 bp, Artificial Sequence
  MKO10006712_A_Bcl2l2
  gRNA
gcccccttggaaaagttcgt

SEQ ID NO: 6713 - DNA, 20 bp, Artificial Sequence
  MKO10006713_A_Bcl2l2
  gRNA
gctgacgggggccgtggcac

SEQ ID NO: 6714 - DNA, 20 bp, Artificial Sequence
  MKO10006714_A_Bcl2
  gRNA
catctgaccctccgccgggc

SEQ ID NO: 6715 - DNA, 20 bp, Artificial Sequence
  MKO10006715_A_Bcl2
  gRNA
aaagcgtcccctcgcggtga

SEQ ID NO: 6716 - DNA, 20 bp, Artificial Sequence
  MKO10006716_A_Bcl2
  gRNA
ggtcggggcctgcatcactc

SEQ ID NO: 6717 - DNA, 20 bp, Artificial Sequence
  MKO10006717_A_Bcl3
  gRNA
aaagtggggggccatcgtcg

SEQ ID NO: 6718 - DNA, 20 bp, Artificial Sequence
  MKO10006718_A_Bcl3
  gRNA
catttactctaccccgacga

SEQ ID NO: 6719 - DNA, 20 bp, Artificial Sequence
  MKO10006719_A_Bcl3
  gRNA
ccgtgacgatccagggccat

SEQ ID NO: 6720 - DNA, 20 bp, Artificial Sequence
  MKO10006720_A_Bcl6b
  gRNA
tccacacttgaatcgtgcag

SEQ ID NO: 6721 - DNA, 20 bp, Artificial Sequence
  MKO10006721_A_Bcl6b
  gRNA
ccgatctgccttccgttata

SEQ ID NO: 6722 - DNA, 20 bp, Artificial Sequence
  MKO10006722_A_Bcl6b
  gRNA
caacttggctagtcaccgca

SEQ ID NO: 6723 - DNA, 20 bp, Artificial Sequence
  MKO10006723_A_Bcl6
  gRNA
ctaccgaggtcgtgaggtcg

SEQ ID NO: 6724 - DNA, 20 bp, Artificial Sequence
  MKO10006724_A_Bcl6
  gRNA
tctccacgacctcacgacct

SEQ ID NO: 6725 - DNA, 20 bp, Artificial Sequence
  MKO10006725_A_Bcl6
  gRNA
agcatgttgtcgacacatgc

SEQ ID NO: 6726 - DNA, 20 bp, Artificial Sequence
  MKO10006726_A_Bcl7a
  gRNA
aacccacccgtgcccagcga

SEQ ID NO: 6727 - DNA, 20 bp, Artificial Sequence
  MKO10006727_A_Bcl7a
  gRNA
ctcggtgaacagctccgaga

SEQ ID NO: 6728 - DNA, 20 bp, Artificial Sequence
  MKO10006728_A_Bcl7a
  gRNA
ttcggtgccatcgctgggca

SEQ ID NO: 6729 - DNA, 20 bp, Artificial Sequence
  MKO10006729_A_Bcl7b
  gRNA
ggaattggctgaggcgtcag

SEQ ID NO: 6730 - DNA, 20 bp, Artificial Sequence
  MKO10006730_A_Bcl7b
  gRNA
acctccttgctatctgtcac

SEQ ID NO: 6731 - DNA, 20 bp, Artificial Sequence
  MKO10006731_A_Bcl7b
  gRNA
aatcgaataatacagcagcc

SEQ ID NO: 6732 - DNA, 20 bp, Artificial Sequence
  MKO10006732_A_Bcl7c
  gRNA
cctcccacagggagaagcgc

SEQ ID NO: 6733 - DNA, 20 bp, Artificial Sequence
  MKO10006733_A_Bcl7c
  gRNA
cttcccttcgaatcttcaag

SEQ ID NO: 6734 - DNA, 20 bp, Artificial Sequence
  MKO10006734_A_Bcl7c
  gRNA
ctgggctggggcgtcccccc

SEQ ID NO: 6735 - DNA, 20 bp, Artificial Sequence
  MKO10006735_A_Bcl9l
  gRNA
gactccatccctcgattcag

SEQ ID NO: 6736 - DNA, 20 bp, Artificial Sequence
  MKO10006736_A_Bcl9l
  gRNA
cgtctggccgaaggcctggc

SEQ ID NO: 6737 - DNA, 20 bp, Artificial Sequence
  MKO10006737_A_Bcl9l
  gRNA
gcacacacctccgtttactc

SEQ ID NO: 6738 - DNA, 20 bp, Artificial Sequence
  MKO10006738_A_Bcl9
  gRNA
gatgccgggttgggcacgtt

SEQ ID NO: 6739 - DNA, 20 bp, Artificial Sequence
  MKO10006739_A_Bcl9
  gRNA
tcacttcctgccccgtcgcc

SEQ ID NO: 6740 - DNA, 20 bp, Artificial Sequence
  MKO10006740_A_Bcl9
  gRNA
tcatggagtgtggcgtgtgc

SEQ ID NO: 6741 - DNA, 20 bp, Artificial Sequence
  MKO10006741_A_Bclaf1
  gRNA
gagattatcgtcgagattac

SEQ ID NO: 6742 - DNA, 20 bp, Artificial Sequence
  MKO10006742_A_Bclaf1
  gRNA
tacctgttggaatcgtcaag

SEQ ID NO: 6743 - DNA, 20 bp, Artificial Sequence
  MKO10006743_A_Bclaf1
  gRNA
agactgcatacatagtcgaa

SEQ ID NO: 6744 - DNA, 20 bp, Artificial Sequence
  MKO10006744_A_Bcmo1
  gRNA
caggggaccctgctccgaaa

SEQ ID NO: 6745 - DNA, 20 bp, Artificial Sequence
  MKO10006745_A_Bcmo1
  gRNA
cgatgtaggtgtcactctgc

SEQ ID NO: 6746 - DNA, 20 bp, Artificial Sequence
  MKO10006746_A_Bcmo1
  gRNA
cacctacatcgccaacattg

SEQ ID NO: 6747 - DNA, 20 bp, Artificial Sequence
  MKO10006747_A_Bco2
  gRNA
ggagacgattcacggagcac

SEQ ID NO: 6748 - DNA, 20 bp, Artificial Sequence
  MKO10006748_A_Bco2
  gRNA
gtactgcacaaagttgacgt

SEQ ID NO: 6749 - DNA, 20 bp, Artificial Sequence
  MKO10006749_A_Bco2
  gRNA
gttgcttcaccagttccgaa

SEQ ID NO: 6750 - DNA, 20 bp, Artificial Sequence
  MKO10006750_A_Bcorl1
  gRNA
gctgaagctcgggctaacgc

SEQ ID NO: 6751 - DNA, 20 bp, Artificial Sequence
  MKO10006751_A_Bcorl1
  gRNA
tacatcccacctccgagttg

SEQ ID NO: 6752 - DNA, 20 bp, Artificial Sequence
  MKO10006752_A_Bcorl1
  gRNA
gtccgagtgctcagaaccac

SEQ ID NO: 6753 - DNA, 20 bp, Artificial Sequence
  MKO10006753_A_Bcor
  gRNA
gatgaggccgaatccaacga

SEQ ID NO: 6754 - DNA, 20 bp, Artificial Sequence
  MKO10006754_A_Bcor
  gRNA
cttacgggctgcatacgagc

SEQ ID NO: 6755 - DNA, 20 bp, Artificial Sequence
  MKO10006755_A_Bcor
  gRNA
cgacgcttcaaaagccaggc

SEQ ID NO: 6756 - DNA, 20 bp, Artificial Sequence
  MKO10006756_A_Bcr
  gRNA
ggtacgtctcctcgctggcc

SEQ ID NO: 6757 - DNA, 20 bp, Artificial Sequence
  MKO10006757_A_Bcr
  gRNA
atatggctgtgccgcagacc

SEQ ID NO: 6758 - DNA, 20 bp, Artificial Sequence
  MKO10006758_A_Bcr
  gRNA
cactccgtagttatccacaa

SEQ ID NO: 6759 - DNA, 20 bp, Artificial Sequence
  MKO10006759_A_Bcs1l
  gRNA
ttggttatccgcgccgacgt

SEQ ID NO: 6760 - DNA, 20 bp, Artificial Sequence
  MKO10006760_A_Bcs1l
  gRNA
acgtcggcgcggataaccaa

SEQ ID NO: 6761 - DNA, 20 bp, Artificial Sequence
  MKO10006761_A_Bcs1l
  gRNA
taccttctttatgggccccc

SEQ ID NO: 6762 - DNA, 20 bp, Artificial Sequence
  MKO10006762_A_Bdh1
  gRNA
cgtaggtccgacgggtgtca

SEQ ID NO: 6763 - DNA, 20 bp, Artificial Sequence
  MKO10006763_A_Bdh1
  gRNA
aacgcaggcatctcaacgtt

SEQ ID NO: 6764 - DNA, 20 bp, Artificial Sequence
  MKO10006764_A_Bdh1
  gRNA
gcggtggagacgatccgctc

SEQ ID NO: 6765 - DNA, 20 bp, Artificial Sequence
  MKO10006765_A_Bdh2
  gRNA
aggatccactatgggccgac

SEQ ID NO: 6766 - DNA, 20 bp, Artificial Sequence
  MKO10006766_A_Bdh2
  gRNA
tgcccgtccaatcccttgag

SEQ ID NO: 6767 - DNA, 20 bp, Artificial Sequence
  MKO10006767_A_Bdh2
  gRNA
tttggactcgttgatatctg

SEQ ID NO: 6768 - DNA, 20 bp, Artificial Sequence
  MKO10006768_A_Bdkrb1
  gRNA
cttgggcttgccgtcgccgc

SEQ ID NO: 6769 - DNA, 20 bp, Artificial Sequence
  MKO10006769_A_Bdkrb1
  gRNA
acgttgggaaccgtttcaac

SEQ ID NO: 6770 - DNA, 20 bp, Artificial Sequence
  MKO10006770_A_Bdkrb1
  gRNA
cgactttgacggaacgcaga

SEQ ID NO: 6771 - DNA, 20 bp, Artificial Sequence
  MKO10006771_A_Bdkrb2
  gRNA
tcttaacgggaccctttcga

SEQ ID NO: 6772 - DNA, 20 bp, Artificial Sequence
  MKO10006772_A_Bdkrb2
  gRNA
ggcccagaaaggtaacccgc

SEQ ID NO: 6773 - DNA, 20 bp, Artificial Sequence
  MKO10006773_A_Bdkrb2
  gRNA
gacttacccaaaggaggccg

SEQ ID NO: 6774 - DNA, 20 bp, Artificial Sequence
  MKO10006774_A_Bdnf
  gRNA
tgtacaagtccgcgtcctta

SEQ ID NO: 6775 - DNA, 20 bp, Artificial Sequence
  MKO10006775_A_Bdnf
  gRNA
acgcggacttgtacacttcc

SEQ ID NO: 6776 - DNA, 20 bp, Artificial Sequence
  MKO10006776_A_Bdnf
  gRNA
gaactacccaatcgtatgtt

SEQ ID NO: 6777 - DNA, 20 bp, Artificial Sequence
  MKO10006777_A_Bdp1
  gRNA
tacgtcattggattgttatc

SEQ ID NO: 6778 - DNA, 20 bp, Artificial Sequence
  MKO10006778_A_Bdp1
  gRNA
aagatgctcactctctcgtt

SEQ ID NO: 6779 - DNA, 20 bp, Artificial Sequence
  MKO10006779_A_Bdp1
  gRNA
agacagataccgaatctata

SEQ ID NO: 6780 - DNA, 20 bp, Artificial Sequence
  MKO10006780_A_Bean1
  gRNA
ctggtggcgagcgctgtcat

SEQ ID NO: 6781 - DNA, 20 bp, Artificial Sequence
  MKO10006781_A_Bean1
  gRNA
gctcaccgtattctcggtgt

SEQ ID NO: 6782 - DNA, 20 bp, Artificial Sequence
  MKO10006782_A_Bean1
  gRNA
gcccttggacgtcagctccg

SEQ ID NO: 6783 - DNA, 20 bp, Artificial Sequence
  MKO10006783_A_Becn1
  gRNA
gccatttattgaaactcgcc

SEQ ID NO: 6784 - DNA, 20 bp, Artificial Sequence
  MKO10006784_A_Becn1
  gRNA
atcttcgagagacaccatcc

SEQ ID NO: 6785 - DNA, 20 bp, Artificial Sequence
  MKO10006785_A_Becn1
  gRNA
ggcccgacatgatgtcaaac

SEQ ID NO: 6786 - DNA, 20 bp, Artificial Sequence
  MKO10006786_A_Begain
  gRNA
tgttgagggcgacaatctca

SEQ ID NO: 6787 - DNA, 20 bp, Artificial Sequence
  MKO10006787_A_Begain
  gRNA
tgactccacgcgccactacc

SEQ ID NO: 6788 - DNA, 20 bp, Artificial Sequence
  MKO10006788_A_Begain
  gRNA
ctcctacaccacgcataagc

SEQ ID NO: 6789 - DNA, 20 bp, Artificial Sequence
  MKO10006789_A_Bend3
  gRNA
ccgcgaagttgcccaccgac

SEQ ID NO: 6790 - DNA, 20 bp, Artificial Sequence
  MKO10006790_A_Bend3
  gRNA
gttacgcaatcaaccccgag

SEQ ID NO: 6791 - DNA, 20 bp, Artificial Sequence
  MKO10006791_A_Bend3
  gRNA
agagggcagcgacgctacct

SEQ ID NO: 6792 - DNA, 20 bp, Artificial Sequence
  MKO10006792_A_Bend4
  gRNA
cccatcctcctctacgctgc

SEQ ID NO: 6793 - DNA, 20 bp, Artificial Sequence
  MKO10006793_A_Bend4
  gRNA
catgatttcttgcgtcaagc

SEQ ID NO: 6794 - DNA, 20 bp, Artificial Sequence
  MKO10006794_A_Bend4
  gRNA
aggtcccgaaagacgccctc

SEQ ID NO: 6795 - DNA, 20 bp, Artificial Sequence
  MKO10006795_A_Bend5
  gRNA
agcggctcacaagagtatcg

SEQ ID NO: 6796 - DNA, 20 bp, Artificial Sequence
  MKO10006796_A_Bend5
  gRNA
actcaccgctgccaagccgc

SEQ ID NO: 6797 - DNA, 20 bp, Artificial Sequence
  MKO10006797_A_Bend5
  gRNA
ctgaaagtgctccgtaactc

SEQ ID NO: 6798 - DNA, 20 bp, Artificial Sequence
  MKO10006798_A_Bend6
  gRNA
gattgagacgtcatccgcac

SEQ ID NO: 6799 - DNA, 20 bp, Artificial Sequence
  MKO10006799_A_Bend6
  gRNA
cagccggcttcgacagtctt

SEQ ID NO: 6800 - DNA, 20 bp, Artificial Sequence
  MKO10006800_A_Bend6
  gRNA
tcttacaggagtaacgaagc

SEQ ID NO: 6801 - DNA, 20 bp, Artificial Sequence
  MKO10006801_A_Bend7
  gRNA
cggttcgctgggagcacata

SEQ ID NO: 6802 - DNA, 20 bp, Artificial Sequence
  MKO10006802_A_Bend7
  gRNA
gcctccactctaattcacgt

SEQ ID NO: 6803 - DNA, 20 bp, Artificial Sequence
  MKO10006803_A_Bend7
  gRNA
ccgactattgaattcacccc

SEQ ID NO: 6804 - DNA, 20 bp, Artificial Sequence
  MKO10006804_A_Best1
  gRNA
gccagtacgagaacttgccg

SEQ ID NO: 6805 - DNA, 20 bp, Artificial Sequence
  MKO10006805_A_Best1
  gRNA
atcatgaggcggtcgggcca

SEQ ID NO: 6806 - DNA, 20 bp, Artificial Sequence
  MKO10006806_A_Best1
  gRNA
cctatcttggaggtcgaatc

SEQ ID NO: 6807 - DNA, 20 bp, Artificial Sequence
  MKO10006807_A_Best2
  gRNA
cgcacgctcatgcgctacgc

SEQ ID NO: 6808 - DNA, 20 bp, Artificial Sequence
  MKO10006808_A_Best2
  gRNA
gtgcatgggcgagacgatcg

SEQ ID NO: 6809 - DNA, 20 bp, Artificial Sequence
  MKO10006809_A_Best2
  gRNA
ctgcgtatggttctcgagcc

SEQ ID NO: 6810 - DNA, 20 bp, Artificial Sequence
  MKO10006810_A_Best3
  gRNA
cgactgggttggcattccgc

SEQ ID NO: 6811 - DNA, 20 bp, Artificial Sequence
  MKO10006811_A_Best3
  gRNA
ccgtacctgcttcgaccacg

SEQ ID NO: 6812 - DNA, 20 bp, Artificial Sequence
  MKO10006812_A_Best3
  gRNA
gggaaacctcttgtacaccg

SEQ ID NO: 6813 - DNA, 20 bp, Artificial Sequence
  MKO10006813_A_Bet1l
  gRNA
agctggctttggacatcgac

SEQ ID NO: 6814 - DNA, 20 bp, Artificial Sequence
  MKO10006814_A_Bet1l
  gRNA
gcttcacactccccgtgagt

SEQ ID NO: 6815 - DNA, 20 bp, Artificial Sequence
  MKO10006815_A_Bet1l
  gRNA
tcgcccagaccgtgccatcg

SEQ ID NO: 6816 - DNA, 20 bp, Artificial Sequence
  MKO10006816_A_Bet1
  gRNA
acaagcattataaccagtat

SEQ ID NO: 6817 - DNA, 20 bp, Artificial Sequence
  MKO10006817_A_Bet1
  gRNA
tcacaatttgattctacaac

SEQ ID NO: 6818 - DNA, 20 bp, Artificial Sequence
  MKO10006818_A_Bet1
  gRNA
cctggcaggatgaggcgtgc

SEQ ID NO: 6819 - DNA, 20 bp, Artificial Sequence
  MKO10006819_A_Bex1
  gRNA
tcccatctatagtgagcgat

SEQ ID NO: 6820 - DNA, 20 bp, Artificial Sequence
  MKO10006820_A_Bex1
  gRNA
ggcaaaaactgtgcacctag

SEQ ID NO: 6821 - DNA, 20 bp, Artificial Sequence
  MKO10006821_A_Bex1
  gRNA
agcccatcgctcactataga

SEQ ID NO: 6822 - DNA, 20 bp, Artificial Sequence
  MKO10006822_A_Bex2
  gRNA
gactactacgtgcctagagg

SEQ ID NO: 6823 - DNA, 20 bp, Artificial Sequence
  MKO10006823_A_Bex2
  gRNA
tcccatctgtagtgcacgat

SEQ ID NO: 6824 - DNA, 20 bp, Artificial Sequence
  MKO10006824_A_Bex2
  gRNA
gtggccctgcctttcgaagc

SEQ ID NO: 6825 - DNA, 20 bp, Artificial Sequence
  MKO10006825_A_Bex4
  gRNA
ggggttcggaaacgcctgta

SEQ ID NO: 6826 - DNA, 20 bp, Artificial Sequence
  MKO10006826_A_Bex4
  gRNA
atcttagatttcaaggtatg

SEQ ID NO: 6827 - DNA, 20 bp, Artificial Sequence
  MKO10006827_A_Bex4
  gRNA
caaatttaaacaagtcatac

SEQ ID NO: 6828 - DNA, 20 bp, Artificial Sequence
  MKO10006828_A_Bex6
  gRNA
gacttgtgtgtaactttaga

SEQ ID NO: 6829 - DNA, 20 bp, Artificial Sequence
  MKO10006829_A_Bex6
  gRNA
ttgtaatgactgtcagattc

SEQ ID NO: 6830 - DNA, 20 bp, Artificial Sequence
  MKO10006830_A_Bex6
  gRNA
tctgacagtcattacaactt

SEQ ID NO: 6831 - DNA, 20 bp, Artificial Sequence
  MKO10006831_A_Bfar
  gRNA
aggcaaactccgcgatcagc

SEQ ID NO: 6832 - DNA, 20 bp, Artificial Sequence
  MKO10006832_A_Bfar
  gRNA
tcttccgtaccagctgatcg

SEQ ID NO: 6833 - DNA, 20 bp, Artificial Sequence
  MKO10006833_A_Bfar
  gRNA
ccactgctgctacgacaccc

SEQ ID NO: 6834 - DNA, 20 bp, Artificial Sequence
  MKO10006834_A_Bfsp1
  gRNA
gcgtaacctgcaccttcagt

SEQ ID NO: 6835 - DNA, 20 bp, Artificial Sequence
  MKO10006835_A_Bfsp1
  gRNA
cagtctgtacgatctgctgc

SEQ ID NO: 6836 - DNA, 20 bp, Artificial Sequence
  MKO10006836_A_Bfsp1
  gRNA
gttacgcaataaggcttcat

SEQ ID NO: 6837 - DNA, 20 bp, Artificial Sequence
  MKO10006837_A_Bfsp2
  gRNA
gacggaatctttacgggctc

SEQ ID NO: 6838 - DNA, 20 bp, Artificial Sequence
  MKO10006838_A_Bfsp2
  gRNA
ttgagacgatccgagttcag

SEQ ID NO: 6839 - DNA, 20 bp, Artificial Sequence
  MKO10006839_A_Bfsp2
  gRNA
ctctttaaagtcatccgcac

SEQ ID NO: 6840 - DNA, 20 bp, Artificial Sequence
  MKO10006840_A_Bglap2
  gRNA
gataccgtagatgcgtttgt

SEQ ID NO: 6841 - DNA, 20 bp, Artificial Sequence
  MKO10006841_A_Bglap2
  gRNA
ctagtacctttgtcagactc

SEQ ID NO: 6842 - DNA, 20 bp, Artificial Sequence
  MKO10006842_A_Bglap2
  gRNA
cctctctctgctcactctgc

SEQ ID NO: 6843 - DNA, 20 bp, Artificial Sequence
  MKO10006843_A_Bglap3
  gRNA
tttacagatgccacgcccac

SEQ ID NO: 6844 - DNA, 20 bp, Artificial Sequence
  MKO10006844_A_Bglap3
  gRNA
gataccgtagatgcgtctgt

SEQ ID NO: 6845 - DNA, 20 bp, Artificial Sequence
  MKO10006845_A_Bglap3
  gRNA
gacgagctatcaaaccagta

SEQ ID NO: 6846 - DNA, 20 bp, Artificial Sequence
  MKO10006846_A_Bglap
  gRNA
gataccatagatgcgtttgt

SEQ ID NO: 6847 - DNA, 20 bp, Artificial Sequence
  MKO10006847_A_Bglap
  gRNA
tctgctcactctgctgaccc

SEQ ID NO: 6848 - DNA, 20 bp, Artificial Sequence
  MKO10006848_A_Bglap
  gRNA
cagcagagtgagcagaaaga

SEQ ID NO: 6849 - DNA, 20 bp, Artificial Sequence
  MKO10006849_A_Bgn
  gRNA
agcccgctgaacacgccctt

SEQ ID NO: 6850 - DNA, 20 bp, Artificial Sequence
  MKO10006850_A_Bgn
  gRNA
ctttgcggatacggttgtca

SEQ ID NO: 6851 - DNA, 20 bp, Artificial Sequence
  MKO10006851_A_Bgn
  gRNA
ttcgatactccaagctgtac

SEQ ID NO: 6852 - DNA, 20 bp, Artificial Sequence
  MKO10006852_A_Bhlha15
  gRNA
gcgaggtcatcccgcacgtg

SEQ ID NO: 6853 - DNA, 20 bp, Artificial Sequence
  MKO10006853_A_Bhlha15
  gRNA
gacctcgcgcagtgcctgga

SEQ ID NO: 6854 - DNA, 20 bp, Artificial Sequence
  MKO10006854_A_Bhlha15
  gRNA
caccagacccctgtcgccgg

SEQ ID NO: 6855 - DNA, 20 bp, Artificial Sequence
  MKO10006855_A_Bhlha9
  gRNA
ccaagatcgctacgctgcgc

SEQ ID NO: 6856 - DNA, 20 bp, Artificial Sequence
  MKO10006856_A_Bhlha9
  gRNA
tagcgcctagcctaacgcgc

SEQ ID NO: 6857 - DNA, 20 bp, Artificial Sequence
  MKO10006857_A_Bhlha9
  gRNA
cctgcgcagcgtagcgatct

SEQ ID NO: 6858 - DNA, 20 bp, Artificial Sequence
  MKO10006858_A_Bhlhb9
  gRNA
agccatattccgtgaagtta

SEQ ID NO: 6859 - DNA, 20 bp, Artificial Sequence
  MKO10006859_A_Bhlhb9
  gRNA
gtgctgaggagcccgcacct

SEQ ID NO: 6860 - DNA, 20 bp, Artificial Sequence
  MKO10006860_A_Bhlhb9
  gRNA
tgaacgagtattcttagtac

SEQ ID NO: 6861 - DNA, 20 bp, Artificial Sequence
  MKO10006861_A_Bhlhe22
  gRNA
cggcgctctcgccgtacttg

SEQ ID NO: 6862 - DNA, 20 bp, Artificial Sequence
  MKO10006862_A_Bhlhe22
  gRNA
gacgccgggcgttcgcgagt

SEQ ID NO: 6863 - DNA, 20 bp, Artificial Sequence
  MKO10006863_A_Bhlhe22
  gRNA
gaagaggtcgtcttcgctcg

SEQ ID NO: 6864 - DNA, 20 bp, Artificial Sequence
  MKO10006864_A_Bhlhe23
  gRNA
tcagcatcaacgcgcgcgaa

SEQ ID NO: 6865 - DNA, 20 bp, Artificial Sequence
  MKO10006865_A_Bhlhe23
  gRNA
ttctcgtgtccccgccgcga

SEQ ID NO: 6866 - DNA, 20 bp, Artificial Sequence
  MKO10006866_A_Bhlhe23
  gRNA
ggcagcgatttacccgttct

SEQ ID NO: 6867 - DNA, 20 bp, Artificial Sequence
  MKO10006867_A_Bhlhe40
  gRNA
gggcaatgcactcgttaatc

SEQ ID NO: 6868 - DNA, 20 bp, Artificial Sequence
  MKO10006868_A_Bhlhe40
  gRNA
gagtgttctcatgcttcgcc

SEQ ID NO: 6869 - DNA, 20 bp, Artificial Sequence
  MKO10006869_A_Bhlhe40
  gRNA
cagcttgtaaaccgctctgc

SEQ ID NO: 6870 - DNA, 20 bp, Artificial Sequence
  MKO10006870_A_Bhlhe41
  gRNA
cggggtacagatacttgtcc

SEQ ID NO: 6871 - DNA, 20 bp, Artificial Sequence
  MKO10006871_A_Bhlhe41
  gRNA
acctcgcgcgctttgagagc

SEQ ID NO: 6872 - DNA, 20 bp, Artificial Sequence
  MKO10006872_A_Bhlhe41
  gRNA
cttgaagcgagacgatacca

SEQ ID NO: 6873 - DNA, 20 bp, Artificial Sequence
  MKO10006873_A_Bhmt2
  gRNA
gcggtgaagctggcgcgtgc

SEQ ID NO: 6874 - DNA, 20 bp, Artificial Sequence
  MKO10006874_A_Bhmt2
  gRNA
gacatgcacgacgtgacacc

SEQ ID NO: 6875 - DNA, 20 bp, Artificial Sequence
  MKO10006875_A_Bhmt2
  gRNA
tgtggacttcttgattgcag

SEQ ID NO: 6876 - DNA, 20 bp, Artificial Sequence
  MKO10006876_A_Bhmt
  gRNA
cgtggacttcctcattgcag

SEQ ID NO: 6877 - DNA, 20 bp, Artificial Sequence
  MKO10006877_A_Bhmt
  gRNA
agctgccgtggagcatcctg

SEQ ID NO: 6878 - DNA, 20 bp, Artificial Sequence
  MKO10006878_A_Bhmt
  gRNA
acctgcctcaggatgctcca

SEQ ID NO: 6879 - DNA, 20 bp, Artificial Sequence
  MKO10006879_A_Bicc1
  gRNA
taccacccttgccgatgacg

SEQ ID NO: 6880 - DNA, 20 bp, Artificial Sequence
  MKO10006880_A_Bicc1
  gRNA
tttagccccgatcttcagtt

SEQ ID NO: 6881 - DNA, 20 bp, Artificial Sequence
  MKO10006881_A_Bicc1
  gRNA
acggagcactcccacgtcat

SEQ ID NO: 6882 - DNA, 20 bp, Artificial Sequence
  MKO10006882_A_Bicd1
  gRNA
ctaatttaggttgaatacga

SEQ ID NO: 6883 - DNA, 20 bp, Artificial Sequence
  MKO10006883_A_Bicd1
  gRNA
caagcaacagtatgacgagc

SEQ ID NO: 6884 - DNA, 20 bp, Artificial Sequence
  MKO10006884_A_Bicd1
  gRNA
ccaccccgctatggccgcag

SEQ ID NO: 6885 - DNA, 20 bp, Artificial Sequence
  MKO10006885_A_Bicd2
  gRNA
agtgcgacaactccttgcgc

SEQ ID NO: 6886 - DNA, 20 bp, Artificial Sequence
  MKO10006886_A_Bicd2
  gRNA
caacaatgacgccgaagccc

SEQ ID NO: 6887 - DNA, 20 bp, Artificial Sequence
  MKO10006887_A_Bicd2
  gRNA
ccgcacgtagtactgctcct

SEQ ID NO: 6888 - DNA, 20 bp, Artificial Sequence
  MKO10006888_A_Bid
  gRNA
ggtccatctcatcgcctatt

SEQ ID NO: 6889 - DNA, 20 bp, Artificial Sequence
  MKO10006889_A_Bid
  gRNA
gccagacatctcgcccaaat

SEQ ID NO: 6890 - DNA, 20 bp, Artificial Sequence
  MKO10006890_A_Bid
  gRNA
ccttaggtcagcaacggttc

SEQ ID NO: 6891 - DNA, 20 bp, Artificial Sequence
  MKO10006891_A_Bik
  gRNA
ggcctgcatcggcgatgaga

SEQ ID NO: 6892 - DNA, 20 bp, Artificial Sequence
  MKO10006892_A_Bik
  gRNA
aacagtcttgatgacgtctc

SEQ ID NO: 6893 - DNA, 20 bp, Artificial Sequence
  MKO10006893_A_Bik
  gRNA
gtgtctgcggagcccccgtc

SEQ ID NO: 6894 - DNA, 20 bp, Artificial Sequence
  MKO10006894_A_Bin1
  gRNA
gaaggatcttcggacctatc

SEQ ID NO: 6895 - DNA, 20 bp, Artificial Sequence
  MKO10006895_A_Bin1
  gRNA
gaagaagctgacccgagcgc

SEQ ID NO: 6896 - DNA, 20 bp, Artificial Sequence
  MKO10006896_A_Bin1
  gRNA
ccagctgcttattgaagttc

SEQ ID NO: 6897 - DNA, 20 bp, Artificial Sequence
  MKO10006897_A_Bin2
  gRNA
gtcgcagttcagcgagatta

SEQ ID NO: 6898 - DNA, 20 bp, Artificial Sequence
  MKO10006898_A_Bin2
  gRNA
ttgttcaaatcgctcgtctt

SEQ ID NO: 6899 - DNA, 20 bp, Artificial Sequence
  MKO10006899_A_Bin2
  gRNA
cagcaacttctaccaacagc

SEQ ID NO: 6900 - DNA, 20 bp, Artificial Sequence
  MKO10006900_A_Bin3
  gRNA
gaaaagcaccgatgccgacc

SEQ ID NO: 6901 - DNA, 20 bp, Artificial Sequence
  MKO10006901_A_Bin3
  gRNA
ccactcacccaggtcggcat

SEQ ID NO: 6902 - DNA, 20 bp, Artificial Sequence
  MKO10006902_A_Bin3
  gRNA
gtccaacccactgtgtgagc

SEQ ID NO: 6903 - DNA, 20 bp, Artificial Sequence
  MKO10006903_A_Birc2
  gRNA
ttaggtgtgagttcttgata

SEQ ID NO: 6904 - DNA, 20 bp, Artificial Sequence
  MKO10006904_A_Birc2
  gRNA
ggccagtgtaattacaaaac

SEQ ID NO: 6905 - DNA, 20 bp, Artificial Sequence
  MKO10006905_A_Birc2
  gRNA
agcatttcccttgactaaaa

SEQ ID NO: 6906 - DNA, 20 bp, Artificial Sequence
  MKO10006906_A_Birc3
  gRNA
gtccatatagtcgtgcattt

SEQ ID NO: 6907 - DNA, 20 bp, Artificial Sequence
  MKO10006907_A_Birc3
  gRNA
ctatcctcatctacttgagc

SEQ ID NO: 6908 - DNA, 20 bp, Artificial Sequence
  MKO10006908_A_Birc3
  gRNA
ccgttaccttggaaaccact

SEQ ID NO: 6909 - DNA, 20 bp, Artificial Sequence
  MKO10006909_A_Birc5
  gRNA
taccgagaacgagcctgatt

SEQ ID NO: 6910 - DNA, 20 bp, Artificial Sequence
  MKO10006910_A_Birc5
  gRNA
aaatcaggctcgttctcggt

SEQ ID NO: 6911 - DNA, 20 bp, Artificial Sequence
  MKO10006911_A_Birc5
  gRNA
tggcgatgcggtagttcttg

SEQ ID NO: 6912 - DNA, 20 bp, Artificial Sequence
  MKO10006912_A_Birc6
  gRNA
atttgtggatgattacgccg

SEQ ID NO: 6913 - DNA, 20 bp, Artificial Sequence
  MKO10006913_A_Birc6
  gRNA
gcccacctatagccaacatg

SEQ ID NO: 6914 - DNA, 20 bp, Artificial Sequence
  MKO10006914_A_Birc6
  gRNA
cccagtgcacgtccagaact

SEQ ID NO: 6915 - DNA, 20 bp, Artificial Sequence
  MKO10006915_A_Birc7
  gRNA
ccagacctacacccctttgc

SEQ ID NO: 6916 - DNA, 20 bp, Artificial Sequence
  MKO10006916_A_Birc7
  gRNA
cctggacagagcatgcccga

SEQ ID NO: 6917 - DNA, 20 bp, Artificial Sequence
  MKO10006917_A_Birc7
  gRNA
ccaggtgtcagttcctgcta

SEQ ID NO: 6918 - DNA, 20 bp, Artificial Sequence
  MKO10006918_A_Bivm
  gRNA
tggccacataccatcgccta

SEQ ID NO: 6919 - DNA, 20 bp, Artificial Sequence
  MKO10006919_A_Bivm
  gRNA
ataaaaaagggcggcatcag

SEQ ID NO: 6920 - DNA, 20 bp, Artificial Sequence
  MKO10006920_A_Bivm
  gRNA
ccacagtacaagacttcatg

SEQ ID NO: 6921 - DNA, 20 bp, Artificial Sequence
  MKO10006921_A_Blcap
  gRNA
agcccatgaccccggtgttg

SEQ ID NO: 6922 - DNA, 20 bp, Artificial Sequence
  MKO10006922_A_Blcap
  gRNA
tcatgggctgattccggaag

SEQ ID NO: 6923 - DNA, 20 bp, Artificial Sequence
  MKO10006923_A_Blcap
  gRNA
agatcatgtattgcctccag

SEQ ID NO: 6924 - DNA, 20 bp, Artificial Sequence
  MKO10006924_A_Blk
  gRNA
ttggccaggtcactcgtcac

SEQ ID NO: 6925 - DNA, 20 bp, Artificial Sequence
  MKO10006925_A_Blk
  gRNA
actatgccgctgtgaatgac

SEQ ID NO: 6926 - DNA, 20 bp, Artificial Sequence
  MKO10006926_A_Blk
  gRNA
gttgctggctccgatgaaca

SEQ ID NO: 6927 - DNA, 20 bp, Artificial Sequence
  MKO10006927_A_Blmh
  gRNA
tcccgaatcgcatacgacag

SEQ ID NO: 6928 - DNA, 20 bp, Artificial Sequence
  MKO10006928_A_Blmh
  gRNA
agcctctgtcgtatgcgatt

SEQ ID NO: 6929 - DNA, 20 bp, Artificial Sequence
  MKO10006929_A_Blmh
  gRNA
gacatatgtccagcagatcg

SEQ ID NO: 6930 - DNA, 20 bp, Artificial Sequence
  MKO10006930_A_Blm
  gRNA
acatctttatcacttaacgc

SEQ ID NO: 6931 - DNA, 20 bp, Artificial Sequence
  MKO10006931_A_Blm
  gRNA
gtcctgagcagtctgtaccg

SEQ ID NO: 6932 - DNA, 20 bp, Artificial Sequence
  MKO10006932_A_Blm
  gRNA
ttacctggaacatttcaacg

SEQ ID NO: 6933 - DNA, 20 bp, Artificial Sequence
  MKO10006933_A_Blnk
  gRNA
cctaatgcgtagtcccttcg

SEQ ID NO: 6934 - DNA, 20 bp, Artificial Sequence
  MKO10006934_A_Blnk
  gRNA
tcggagtccgaatgttcatc

SEQ ID NO: 6935 - DNA, 20 bp, Artificial Sequence
  MKO10006935_A_Blnk
  gRNA
ccctccaagtgttcctcgaa

SEQ ID NO: 6936 - DNA, 20 bp, Artificial Sequence
  MKO10006936_A_Bloc1s1
  gRNA
gaggttcataccccacgttg

SEQ ID NO: 6937 - DNA, 20 bp, Artificial Sequence
  MKO10006937_A_Bloc1s1
  gRNA
tgaggcccaccttaagtgcc

SEQ ID NO: 6938 - DNA, 20 bp, Artificial Sequence
  MKO10006938_A_Bloc1s1
  gRNA
ccatgaggtgaagactctac

SEQ ID NO: 6939 - DNA, 20 bp, Artificial Sequence
  MKO10006939_A_Bloc1s2
  gRNA
caccttgccagatgatgctg

SEQ ID NO: 6940 - DNA, 20 bp, Artificial Sequence
  MKO10006940_A_Bloc1s2
  gRNA
agaagccaagtacaagaagt

SEQ ID NO: 6941 - DNA, 20 bp, Artificial Sequence
  MKO10006941_A_Bloc1s2
  gRNA
cagttccccagtcaaatatg

SEQ ID NO: 6942 - DNA, 20 bp, Artificial Sequence
  MKO10006942_A_Bloc1s3
  gRNA
agcgcgatccggcggagact

SEQ ID NO: 6943 - DNA, 20 bp, Artificial Sequence
  MKO10006943_A_Bloc1s3
  gRNA
ccctacgcgcggccgtccca

SEQ ID NO: 6944 - DNA, 20 bp, Artificial Sequence
  MKO10006944_A_Bloc1s3
  gRNA
cggccacatcgcgacccgca

SEQ ID NO: 6945 - DNA, 20 bp, Artificial Sequence
  MKO10006945_A_Bloc1s4
  gRNA
gctcccgatcatccgcacga

SEQ ID NO: 6946 - DNA, 20 bp, Artificial Sequence
  MKO10006946_A_Bloc1s4
  gRNA
cggctcgtacgccgcgcgct

SEQ ID NO: 6947 - DNA, 20 bp, Artificial Sequence
  MKO10006947_A_Bloc1s4
  gRNA
cggtagagacctctcgagac

SEQ ID NO: 6948 - DNA, 20 bp, Artificial Sequence
  MKO10006948_A_Bloc1s5
  gRNA
taagaacgcgcaattctcga

SEQ ID NO: 6949 - DNA, 20 bp, Artificial Sequence
  MKO10006949_A_Bloc1s5
  gRNA
agctagtgagaagcgtcgtc

SEQ ID NO: 6950 - DNA, 20 bp, Artificial Sequence
  MKO10006950_A_Bloc1s5
  gRNA
attgcgcgttcttaagaact

SEQ ID NO: 6951 - DNA, 20 bp, Artificial Sequence
  MKO10006951_A_Bloc1s6
  gRNA
gagggagcagcaacgcgaaa

SEQ ID NO: 6952 - DNA, 20 bp, Artificial Sequence
  MKO10006952_A_Bloc1s6
  gRNA
tctacagctctatcgtccac

SEQ ID NO: 6953 - DNA, 20 bp, Artificial Sequence
  MKO10006953_A_Bloc1s6
  gRNA
gaagcactatcacgccaagc

SEQ ID NO: 6954 - DNA, 20 bp, Artificial Sequence
  MKO10006954_A_Blvra
  gRNA
attgtcatttgcggcagcgc

SEQ ID NO: 6955 - DNA, 20 bp, Artificial Sequence
  MKO10006955_A_Blvra
  gRNA
gttcgatgtgctcctcatgc

SEQ ID NO: 6956 - DNA, 20 bp, Artificial Sequence
  MKO10006956_A_Blvra
  gRNA
tgccgcaaatgacaatgcca

SEQ ID NO: 6957 - DNA, 20 bp, Artificial Sequence
  MKO10006957_A_Blvrb
  gRNA
acgtgaccgatgaccacatc

SEQ ID NO: 6958 - DNA, 20 bp, Artificial Sequence
  MKO10006958_A_Blvrb
  gRNA
atgcttggatatgaccctcg

SEQ ID NO: 6959 - DNA, 20 bp, Artificial Sequence
  MKO10006959_A_Blvrb
  gRNA
ccttggtcgggtcccatagt

SEQ ID NO: 6960 - DNA, 20 bp, Artificial Sequence
  MKO10006960_A_Blzf1
  gRNA
ttccccagctgaagaacgcc

SEQ ID NO: 6961 - DNA, 20 bp, Artificial Sequence
  MKO10006961_A_Blzf1
  gRNA
tgaacgagagcagtttcgtc

SEQ ID NO: 6962 - DNA, 20 bp, Artificial Sequence
  MKO10006962_A_Blzf1
  gRNA
agacgttcaaagtgatactg

SEQ ID NO: 6963 - DNA, 20 bp, Artificial Sequence
  MKO10006963_A_Bmf
  gRNA
cggactccggcccataagcc

SEQ ID NO: 6964 - DNA, 20 bp, Artificial Sequence
  MKO10006964_A_Bmf
  gRNA
agcagaaccgagaccgtgcg

SEQ ID NO: 6965 - DNA, 20 bp, Artificial Sequence
  MKO10006965_A_Bmf
  gRNA
cttgttgcgtatgaagccga

SEQ ID NO: 6966 - DNA, 20 bp, Artificial Sequence
  MKO10006966_A_Bmi1
  gRNA
gcagctcacccgtcagctga

SEQ ID NO: 6967 - DNA, 20 bp, Artificial Sequence
  MKO10006967_A_Bmi1
  gRNA
aacatgtattgtacgttact

SEQ ID NO: 6968 - DNA, 20 bp, Artificial Sequence
  MKO10006968_A_Bmi1
  gRNA
gcacttcctaccttatgttc

SEQ ID NO: 6969 - DNA, 20 bp, Artificial Sequence
  MKO10006969_A_Bmp10
  gRNA
tgattgatgattcgtccgct

SEQ ID NO: 6970 - DNA, 20 bp, Artificial Sequence
  MKO10006970_A_Bmp10
  gRNA
agagagtgcagacggtagcg

SEQ ID NO: 6971 - DNA, 20 bp, Artificial Sequence
  MKO10006971_A_Bmp10
  gRNA
acaacaaattcgccacagac

SEQ ID NO: 6972 - DNA, 20 bp, Artificial Sequence
  MKO10006972_A_Bmp15
  gRNA
cttgtacaagatactcccgt

SEQ ID NO: 6973 - DNA, 20 bp, Artificial Sequence
  MKO10006973_A_Bmp15
  gRNA
ccgcacgattggagcgaaaa

SEQ ID NO: 6974 - DNA, 20 bp, Artificial Sequence
  MKO10006974_A_Bmp15
  gRNA
gctcaagttataccatcgtt

SEQ ID NO: 6975 - DNA, 20 bp, Artificial Sequence
  MKO10006975_A_Bmp1
  gRNA
acgagcacacgcggcccgac

SEQ ID NO: 6976 - DNA, 20 bp, Artificial Sequence
  MKO10006976_A_Bmp1
  gRNA
gcgggcagcgacgtccagac

SEQ ID NO: 6977 - DNA, 20 bp, Artificial Sequence
  MKO10006977_A_Bmp1
  gRNA
gtattcacctaccgaccctg

SEQ ID NO: 6978 - DNA, 20 bp, Artificial Sequence
  MKO10006978_A_Bmp2k
  gRNA
caatcgtgcgacagcttcgc

SEQ ID NO: 6979 - DNA, 20 bp, Artificial Sequence
  MKO10006979_A_Bmp2k
  gRNA
tcccactgtgagtccgcacc

SEQ ID NO: 6980 - DNA, 20 bp, Artificial Sequence
  MKO10006980_A_Bmp2k
  gRNA
caaaaatattgtcggttatt

SEQ ID NO: 6981 - DNA, 20 bp, Artificial Sequence
  MKO10006981_A_Bmp2
  gRNA
atgccgcggcgaacttcttg

SEQ ID NO: 6982 - DNA, 20 bp, Artificial Sequence
  MKO10006982_A_Bmp2
  gRNA
atatgctagatctgtaccgc

SEQ ID NO: 6983 - DNA, 20 bp, Artificial Sequence
  MKO10006983_A_Bmp2
  gRNA
gatcaaactagaagccgtgg

SEQ ID NO: 6984 - DNA, 20 bp, Artificial Sequence
  MKO10006984_A_Bmp3
  gRNA
ttcgctatggccggggcgcg

SEQ ID NO: 6985 - DNA, 20 bp, Artificial Sequence
  MKO10006985_A_Bmp3
  gRNA
gagccaagcgaccgcgcgac

SEQ ID NO: 6986 - DNA, 20 bp, Artificial Sequence
  MKO10006986_A_Bmp3
  gRNA
gtgtgtaaccccttcgtttg

SEQ ID NO: 6987 - DNA, 20 bp, Artificial Sequence
  MKO10006987_A_Bmp4
  gRNA
ccgtcgccattcactatacg

SEQ ID NO: 6988 - DNA, 20 bp, Artificial Sequence
  MKO10006988_A_Bmp4
  gRNA
cacgcgggaggacgccgctc

SEQ ID NO: 6989 - DNA, 20 bp, Artificial Sequence
  MKO10006989_A_Bmp4
  gRNA
tagcaagagcgccgtcattc

SEQ ID NO: 6990 - DNA, 20 bp, Artificial Sequence
  MKO10006990_A_Bmp5
  gRNA
ctatgtgagtttccgagatc

SEQ ID NO: 6991 - DNA, 20 bp, Artificial Sequence
  MKO10006991_A_Bmp5
  gRNA
ggccttcttcaaggcaagcg

SEQ ID NO: 6992 - DNA, 20 bp, Artificial Sequence
  MKO10006992_A_Bmp5
  gRNA
atagagttcgtgcttcttgc

SEQ ID NO: 6993 - DNA, 20 bp, Artificial Sequence
  MKO10006993_A_Bmp6
  gRNA
cccgggacacgtcctgcgac

SEQ ID NO: 6994 - DNA, 20 bp, Artificial Sequence
  MKO10006994_A_Bmp6
  gRNA
cccgggtgtccaacaaaaat

SEQ ID NO: 6995 - DNA, 20 bp, Artificial Sequence
  MKO10006995_A_Bmp6
  gRNA
ccgccgcacgggggttgacg

SEQ ID NO: 6996 - DNA, 20 bp, Artificial Sequence
  MKO10006996_A_Bmp7
  gRNA
aactcccgatggtggtatcg

SEQ ID NO: 6997 - DNA, 20 bp, Artificial Sequence
  MKO10006997_A_Bmp7
  gRNA
tgcggtcaccgcttcgccct

SEQ ID NO: 6998 - DNA, 20 bp, Artificial Sequence
  MKO10006998_A_Bmp7
  gRNA
actacggagatggacttccg

SEQ ID NO: 6999 - DNA, 20 bp, Artificial Sequence
  MKO10006999_A_Bmp8a
  gRNA
tggcccgccgtcgtcgtcat

SEQ ID NO: 7000 - DNA, 20 bp, Artificial Sequence
  MKO10007000_A_Bmp8a
  gRNA
cggtgctcgggctaccggga

SEQ ID NO: 7001 - DNA, 20 bp, Artificial Sequence
  MKO10007001_A_Bmp8a
  gRNA
ttcagtggtctcgctgcccg

SEQ ID NO: 7002 - DNA, 20 bp, Artificial Sequence
  MKO10007002_A_Bmp8b
  gRNA
gctgttcgaggggcccgcac

SEQ ID NO: 7003 - DNA, 20 bp, Artificial Sequence
  MKO10007003_A_Bmp8b
  gRNA
gtttgttggagtgcggcagc

SEQ ID NO: 7004 - DNA, 20 bp, Artificial Sequence
  MKO10007004_A_Bmp8b
  gRNA
acggcagagaagtttgccgc

SEQ ID NO: 7005 - DNA, 20 bp, Artificial Sequence
  MKO10007005_A_Bmper
  gRNA
acctttgcatcgttcacagc

SEQ ID NO: 7006 - DNA, 20 bp, Artificial Sequence
  MKO10007006_A_Bmper
  gRNA
gcctgctgtgaacgatgcaa

SEQ ID NO: 7007 - DNA, 20 bp, Artificial Sequence
  MKO10007007_A_Bmper
  gRNA
agccggggtttgccacttga

SEQ ID NO: 7008 - DNA, 20 bp, Artificial Sequence
  MKO10007008_A_Bmpr1a
  gRNA
caccgaaagcccagctacgc

SEQ ID NO: 7009 - DNA, 20 bp, Artificial Sequence
  MKO10007009_A_Bmpr1a
  gRNA
attctattgtcctgcgtagc

SEQ ID NO: 7010 - DNA, 20 bp, Artificial Sequence
  MKO10007010_A_Bmpr1a
  gRNA
tcctcaggtccgttctttga

SEQ ID NO: 7011 - DNA, 20 bp, Artificial Sequence
  MKO10007011_A_Bmpr1b
  gRNA
gacgagacatacattcctcc

SEQ ID NO: 7012 - DNA, 20 bp, Artificial Sequence
  MKO10007012_A_Bmpr1b
  gRNA
aaagacaagaagcccgacct

SEQ ID NO: 7013 - DNA, 20 bp, Artificial Sequence
  MKO10007013_A_Bmpr1b
  gRNA
gactgtctgtagtttactct

SEQ ID NO: 7014 - DNA, 20 bp, Artificial Sequence
  MKO10007014_A_Bmpr2
  gRNA
accataacacgtgctccctt

SEQ ID NO: 7015 - DNA, 20 bp, Artificial Sequence
  MKO10007015_A_Bmpr2
  gRNA
ttgatagtcgccttatgttt

SEQ ID NO: 7016 - DNA, 20 bp, Artificial Sequence
  MKO10007016_A_Bmpr2
  gRNA
tcctctaggagaccggaaac

SEQ ID NO: 7017 - DNA, 20 bp, Artificial Sequence
  MKO10007017_A_Bms1
  gRNA
actggagcccccaccaatag

SEQ ID NO: 7018 - DNA, 20 bp, Artificial Sequence
  MKO10007018_A_Bms1
  gRNA
ctttgatacgatgcctgatt

SEQ ID NO: 7019 - DNA, 20 bp, Artificial Sequence
  MKO10007019_A_Bms1
  gRNA
tctagctaaagtagcagatc

SEQ ID NO: 7020 - DNA, 20 bp, Artificial Sequence
  MKO10007020_A_Bmx
  gRNA
ctgttgatcaagtatcacag

SEQ ID NO: 7021 - DNA, 20 bp, Artificial Sequence
  MKO10007021_A_Bmx
  gRNA
cactgtgatacttgatcaac

SEQ ID NO: 7022 - DNA, 20 bp, Artificial Sequence
  MKO10007022_A_Bmx
  gRNA
atgaagagagccgatgtcag

SEQ ID NO: 7023 - DNA, 20 bp, Artificial Sequence
  MKO10007023_A_Bmyc
  gRNA
agacacggcgaccgcttcgc

SEQ ID NO: 7024 - DNA, 20 bp, Artificial Sequence
  MKO10007024_A_Bmyc
  gRNA
ccgcgacctggactatgact

SEQ ID NO: 7025 - DNA, 20 bp, Artificial Sequence
  MKO10007025_A_Bmyc
  gRNA
ctccacgtgagcctcgctaa

SEQ ID NO: 7026 - DNA, 20 bp, Artificial Sequence
  MKO10007026_A_Bnc1
  gRNA
cgcacgccgtgcagaacacc

SEQ ID NO: 7027 - DNA, 20 bp, Artificial Sequence
  MKO10007027_A_Bnc1
  gRNA
aagcacaagtgcacgatcga

SEQ ID NO: 7028 - DNA, 20 bp, Artificial Sequence
  MKO10007028_A_Bnc1
  gRNA
gctaatatcgaacaccacat

SEQ ID NO: 7029 - DNA, 20 bp, Artificial Sequence
  MKO10007029_A_Bnc2
  gRNA
ggcgtctgatcactcttata

SEQ ID NO: 7030 - DNA, 20 bp, Artificial Sequence
  MKO10007030_A_Bnc2
  gRNA
gaagacgacgatcctaatga

SEQ ID NO: 7031 - DNA, 20 bp, Artificial Sequence
  MKO10007031_A_Bnc2
  gRNA
tacactgatcacacgtccgc

SEQ ID NO: 7032 - DNA, 20 bp, Artificial Sequence
  MKO10007032_A_Bnip1
  gRNA
caagcttgccatcgacaacc

SEQ ID NO: 7033 - DNA, 20 bp, Artificial Sequence
  MKO10007033_A_Bnip1
  gRNA
cagatgatacctttgccgta

SEQ ID NO: 7034 - DNA, 20 bp, Artificial Sequence
  MKO10007034_A_Bnip1
  gRNA
caggatattcgagattgttc

SEQ ID NO: 7035 - DNA, 20 bp, Artificial Sequence
  MKO10007035_A_Bnip2
  gRNA
gacgccgctggcgcatgttc

SEQ ID NO: 7036 - DNA, 20 bp, Artificial Sequence
  MKO10007036_A_Bnip2
  gRNA
caatcctgaacatgcgccag

SEQ ID NO: 7037 - DNA, 20 bp, Artificial Sequence
  MKO10007037_A_Bnip2
  gRNA
tcaggctccttagaagttaa

SEQ ID NO: 7038 - DNA, 20 bp, Artificial Sequence
  MKO10007038_A_Bnip3l
  gRNA
gggtacttacccgagcccca

SEQ ID NO: 7039 - DNA, 20 bp, Artificial Sequence
  MKO10007039_A_Bnip3l
  gRNA
tcgtccaacaggttcctggg

SEQ ID NO: 7040 - DNA, 20 bp, Artificial Sequence
  MKO10007040_A_Bnip3l
  gRNA
acacacctacctgagagctg

SEQ ID NO: 7041 - DNA, 20 bp, Artificial Sequence
  MKO10007041_A_Bnip3
  gRNA
ccaagagttctcactgtgac

SEQ ID NO: 7042 - DNA, 20 bp, Artificial Sequence
  MKO10007042_A_Bnip3
  gRNA
catcacttaccccaagccaa

SEQ ID NO: 7043 - DNA, 20 bp, Artificial Sequence
  MKO10007043_A_Bnip3
  gRNA
cctgtcacagtgagaactct

SEQ ID NO: 7044 - DNA, 20 bp, Artificial Sequence
  MKO10007044_A_Bnipl
  gRNA
ccggggatgcgtgtgcgatg

SEQ ID NO: 7045 - DNA, 20 bp, Artificial Sequence
  MKO10007045_A_Bnipl
  gRNA
gcggaaagacgcttccgcat

SEQ ID NO: 7046 - DNA, 20 bp, Artificial Sequence
  MKO10007046_A_Bnipl
  gRNA
ccacatcgcacacgcatccc

SEQ ID NO: 7047 - DNA, 20 bp, Artificial Sequence
  MKO10007047_A_Boc
  gRNA
caagtgtgccgcctacaacc

SEQ ID NO: 7048 - DNA, 20 bp, Artificial Sequence
  MKO10007048_A_Boc
  gRNA
gcttattgacaccaccagcg

SEQ ID NO: 7049 - DNA, 20 bp, Artificial Sequence
  MKO10007049_A_Boc
  gRNA
tccttggcccatgtgactcg

SEQ ID NO: 7050 - DNA, 20 bp, Artificial Sequence
  MKO10007050_A_Bod1l
  gRNA
cagtgatgccatgtcaatct

SEQ ID NO: 7051 - DNA, 20 bp, Artificial Sequence
  MKO10007051_A_Bod1l
  gRNA
aaaagctgtgcacgagttcc

SEQ ID NO: 7052 - DNA, 20 bp, Artificial Sequence
  MKO10007052_A_Bod1l
  gRNA
cagtgatctcccttgtccag

SEQ ID NO: 7053 - DNA, 20 bp, Artificial Sequence
  MKO10007053_A_Bod1
  gRNA
gaccgtccgggggctcgagt

SEQ ID NO: 7054 - DNA, 20 bp, Artificial Sequence
  MKO10007054_A_Bod1
  gRNA
taatttcgtgtcaacacatc

SEQ ID NO: 7055 - DNA, 20 bp, Artificial Sequence
  MKO10007055_A_Bod1
  gRNA
cctggccgacgtggacacta

SEQ ID NO: 7056 - DNA, 20 bp, Artificial Sequence
  MKO10007056_A_Bok
  gRNA
gccacgttccggtatacgct

SEQ ID NO: 7057 - DNA, 20 bp, Artificial Sequence
  MKO10007057_A_Bok
  gRNA
acagtccaccgctagccccg

SEQ ID NO: 7058 - DNA, 20 bp, Artificial Sequence
  MKO10007058_A_Bok
  gRNA
agatccgtcccagcgtatac

SEQ ID NO: 7059 - DNA, 20 bp, Artificial Sequence
  MKO10007059_A_Bola1
  gRNA
ccacgcgctcgtgtgtatcg

SEQ ID NO: 7060 - DNA, 20 bp, Artificial Sequence
  MKO10007060_A_Bola1
  gRNA
agccgctattcgcgccaaat

SEQ ID NO: 7061 - DNA, 20 bp, Artificial Sequence
  MKO10007061_A_Bola1
  gRNA
accaaccggtgccgttgcaa

SEQ ID NO: 7062 - DNA, 20 bp, Artificial Sequence
  MKO10007062_A_Bola2
  gRNA
cgaacttagccgacaccacc

SEQ ID NO: 7063 - DNA, 20 bp, Artificial Sequence
  MKO10007063_A_Bola2
  gRNA
cctgccgcagcttctcgcgg

SEQ ID NO: 7064 - DNA, 20 bp, Artificial Sequence
  MKO10007064_A_Bola2
  gRNA
acccgacagcggcgtgaatg

SEQ ID NO: 7065 - DNA, 20 bp, Artificial Sequence
  MKO10007065_A_Bola3
  gRNA
ccgcggctcccgcgcagcag

SEQ ID NO: 7066 - DNA, 20 bp, Artificial Sequence
  MKO10007066_A_Bola3
  gRNA
cactgacctgattgaccatc

SEQ ID NO: 7067 - DNA, 20 bp, Artificial Sequence
  MKO10007067_A_Bola3
  gRNA
gagttccccctccgtctgag

SEQ ID NO: 7068 - DNA, 20 bp, Artificial Sequence
  MKO10007068_A_Boll
  gRNA
ccgtcttgcgcaatttctac

SEQ ID NO: 7069 - DNA, 20 bp, Artificial Sequence
  MKO10007069_A_Boll
  gRNA
ccagtagaaattgcgcaaga

SEQ ID NO: 7070 - DNA, 20 bp, Artificial Sequence
  MKO10007070_A_Boll
  gRNA
tctagtctcatgccagcggc

SEQ ID NO: 7071 - DNA, 20 bp, Artificial Sequence
  MKO10007071_A_Bop1
  gRNA
cgagctcatctcgtgtccgc

SEQ ID NO: 7072 - DNA, 20 bp, Artificial Sequence
  MKO10007072_A_Bop1
  gRNA
ggaattcatcgtaccatgcc

SEQ ID NO: 7073 - DNA, 20 bp, Artificial Sequence
  MKO10007073_A_Bop1
  gRNA
atggttgtcttcgtcaccgc

SEQ ID NO: 7074 - DNA, 20 bp, Artificial Sequence
  MKO10007074_A_Bora
  gRNA
ccctgtagagatcgatccag

SEQ ID NO: 7075 - DNA, 20 bp, Artificial Sequence
  MKO10007075_A_Bora
  gRNA
cctaccgttgcacttctgtg

SEQ ID NO: 7076 - DNA, 20 bp, Artificial Sequence
  MKO10007076_A_Bora
  gRNA
atcggcaggcttcctaccta

SEQ ID NO: 7077 - DNA, 20 bp, Artificial Sequence
  MKO10007077_A_Bpgm
  gRNA
atgagaacctgcgtgccgtt

SEQ ID NO: 7078 - DNA, 20 bp, Artificial Sequence
  MKO10007078_A_Bpgm
  gRNA
gattgctccggaaatcttaa

SEQ ID NO: 7079 - DNA, 20 bp, Artificial Sequence
  MKO10007079_A_Bpgm
  gRNA
ggtgaggcccaacggcacgc

SEQ ID NO: 7080 - DNA, 20 bp, Artificial Sequence
  MKO10007080_A_Bphl
  gRNA
tcacctgcattaccagcgcg

SEQ ID NO: 7081 - DNA, 20 bp, Artificial Sequence
  MKO10007081_A_Bphl
  gRNA
cccatcttatatccgcaaga

SEQ ID NO: 7082 - DNA, 20 bp, Artificial Sequence
  MKO10007082_A_Bphl
  gRNA
gtatccgagatgtttctaaa

SEQ ID NO: 7083 - DNA, 20 bp, Artificial Sequence
  MKO10007083_A_Bpifa1
  gRNA
acatagagacgatggccatc

SEQ ID NO: 7084 - DNA, 20 bp, Artificial Sequence
  MKO10007084_A_Bpifa1
  gRNA
cttagccgtgaaagacaatc

SEQ ID NO: 7085 - DNA, 20 bp, Artificial Sequence
  MKO10007085_A_Bpifa1
  gRNA
ctcactcgaggatgttgttc

SEQ ID NO: 7086 - DNA, 20 bp, Artificial Sequence
  MKO10007086_A_Bpifa2
  gRNA
cattgatctgacggtgccct

SEQ ID NO: 7087 - DNA, 20 bp, Artificial Sequence
  MKO10007087_A_Bpifa2
  gRNA
tcgaccgtcttgccaatgaa

SEQ ID NO: 7088 - DNA, 20 bp, Artificial Sequence
  MKO10007088_A_Bpifa2
  gRNA
cagatcaatgccattgccgt

SEQ ID NO: 7089 - DNA, 20 bp, Artificial Sequence
  MKO10007089_A_Bpifa3
  gRNA
tttgatgatattcgaattga

SEQ ID NO: 7090 - DNA, 20 bp, Artificial Sequence
  MKO10007090_A_Bpifa3
  gRNA
tccaattccagttattgcac

SEQ ID NO: 7091 - DNA, 20 bp, Artificial Sequence
  MKO10007091_A_Bpifa3
  gRNA
ctcctgaagctcaatgcaga

SEQ ID NO: 7092 - DNA, 20 bp, Artificial Sequence
  MKO10007092_A_Bpifa5
  gRNA
ggtgactgtatataccctcc

SEQ ID NO: 7093 - DNA, 20 bp, Artificial Sequence
  MKO10007093_A_Bpifa5
  gRNA
ttggccttacctattaagca

SEQ ID NO: 7094 - DNA, 20 bp, Artificial Sequence
  MKO10007094_A_Bpifa5
  gRNA
agtcactaatccccagctac

SEQ ID NO: 7095 - DNA, 20 bp, Artificial Sequence
  MKO10007095_A_Bpifa6
  gRNA
tcgacattgtccagctgtca

SEQ ID NO: 7096 - DNA, 20 bp, Artificial Sequence
  MKO10007096_A_Bpifa6
  gRNA
caggttgattaagctcaccc

SEQ ID NO: 7097 - DNA, 20 bp, Artificial Sequence
  MKO10007097_A_Bpifa6
  gRNA
aaagctacaaacgctactcc

SEQ ID NO: 7098 - DNA, 20 bp, Artificial Sequence
  MKO10007098_A_Bpifb1
  gRNA
gtgcacgaagctgtccagta

SEQ ID NO: 7099 - DNA, 20 bp, Artificial Sequence
  MKO10007099_A_Bpifb1
  gRNA
ccgttctgagatacatcata

SEQ ID NO: 7100 - DNA, 20 bp, Artificial Sequence
  MKO10007100_A_Bpifb1
  gRNA
cttggacctcggtgctcatt

SEQ ID NO: 7101 - DNA, 20 bp, Artificial Sequence
  MKO10007101_A_Bpifb2
  gRNA
gaccccacagtgtcggacat

SEQ ID NO: 7102 - DNA, 20 bp, Artificial Sequence
  MKO10007102_A_Bpifb2
  gRNA
cctcccaggagctgctcgac

SEQ ID NO: 7103 - DNA, 20 bp, Artificial Sequence
  MKO10007103_A_Bpifb2
  gRNA
caagggtcccaatagagtcc

SEQ ID NO: 7104 - DNA, 20 bp, Artificial Sequence
  MKO10007104_A_Bpifb3
  gRNA
tgctgcagcgcttaaggaca

SEQ ID NO: 7105 - DNA, 20 bp, Artificial Sequence
  MKO10007105_A_Bpifb3
  gRNA
taagcgctgcagcacgctcc

SEQ ID NO: 7106 - DNA, 20 bp, Artificial Sequence
  MKO10007106_A_Bpifb3
  gRNA
ctgctgcccacgccaatctt

SEQ ID NO: 7107 - DNA, 20 bp, Artificial Sequence
  MKO10007107_A_Bpifb4
  gRNA
ggctctaccggcgcgaactg

SEQ ID NO: 7108 - DNA, 20 bp, Artificial Sequence
  MKO10007108_A_Bpifb4
  gRNA
cggctgaccatggaccgcac

SEQ ID NO: 7109 - DNA, 20 bp, Artificial Sequence
  MKO10007109_A_Bpifb4
  gRNA
ggcatcctaagcaccgtaca

SEQ ID NO: 7110 - DNA, 20 bp, Artificial Sequence
  MKO10007110_A_Bpifb5
  gRNA
aacgagctcctctctgacga

SEQ ID NO: 7111 - DNA, 20 bp, Artificial Sequence
  MKO10007111_A_Bpifb5
  gRNA
gccatcaagaacatacgaat

SEQ ID NO: 7112 - DNA, 20 bp, Artificial Sequence
  MKO10007112_A_Bpifb5
  gRNA
tccaattcgtatgttcttga

SEQ ID NO: 7113 - DNA, 20 bp, Artificial Sequence
  MKO10007113_A_Bpifb6
  gRNA
gaggctagcaatccgcagcc

SEQ ID NO: 7114 - DNA, 20 bp, Artificial Sequence
  MKO10007114_A_Bpifb6
  gRNA
accctgcgcaaagtcctccc

SEQ ID NO: 7115 - DNA, 20 bp, Artificial Sequence
  MKO10007115_A_Bpifb6
  gRNA
ggacaccttacttgttaggc

SEQ ID NO: 7116 - DNA, 20 bp, Artificial Sequence
  MKO10007116_A_Bpifb9a
  gRNA
cggtataaaagatgccattc

SEQ ID NO: 7117 - DNA, 20 bp, Artificial Sequence
  MKO10007117_A_Bpifb9a
  gRNA
ttcattcactttctcctgaa

SEQ ID NO: 7118 - DNA, 20 bp, Artificial Sequence
  MKO10007118_A_Bpifb9a
  gRNA
tctgcctgtgcctctgccct

SEQ ID NO: 7119 - DNA, 20 bp, Artificial Sequence
  MKO10007119_A_Bpifb9b
  gRNA
cggtataaaagatgcgattc

SEQ ID NO: 7120 - DNA, 20 bp, Artificial Sequence
  MKO10007120_A_Bpifb9b
  gRNA
gctgcctgtgcctctgccct

SEQ ID NO: 7121 - DNA, 20 bp, Artificial Sequence
  MKO10007121_A_Bpifb9b
  gRNA
atcttgagcacatcgttaag

SEQ ID NO: 7122 - DNA, 20 bp, Artificial Sequence
  MKO10007122_A_Bpifc
  gRNA
tctccgagcagccgagactc

SEQ ID NO: 7123 - DNA, 20 bp, Artificial Sequence
  MKO10007123_A_Bpifc
  gRNA
gcctttacccgtaatgactt

SEQ ID NO: 7124 - DNA, 20 bp, Artificial Sequence
  MKO10007124_A_Bpifc
  gRNA
gactcagaaccgttcaaatc

SEQ ID NO: 7125 - DNA, 20 bp, Artificial Sequence
  MKO10007125_A_Bpi
  gRNA
gcctcacctgtagaattcgt

SEQ ID NO: 7126 - DNA, 20 bp, Artificial Sequence
  MKO10007126_A_Bpi
  gRNA
agggttcctacgaattctac

SEQ ID NO: 7127 - DNA, 20 bp, Artificial Sequence
  MKO10007127_A_Bpi
  gRNA
catctccaccgacctgattc

SEQ ID NO: 7128 - DNA, 20 bp, Artificial Sequence
  MKO10007128_A_Bpnt1
  gRNA
ccagccgtattacaactacc

SEQ ID NO: 7129 - DNA, 20 bp, Artificial Sequence
  MKO10007129_A_Bpnt1
  gRNA
gcttcgggaacttccgggcc

SEQ ID NO: 7130 - DNA, 20 bp, Artificial Sequence
  MKO10007130_A_Bpnt1
  gRNA
agtacctggtagttgtaata

SEQ ID NO: 7131 - DNA, 20 bp, Artificial Sequence
  MKO10007131_A_Bptf
  gRNA
tacgttcgacacgaacctat

SEQ ID NO: 7132 - DNA, 20 bp, Artificial Sequence
  MKO10007132_A_Bptf
  gRNA
aataggttcgtgtcgaacgt

SEQ ID NO: 7133 - DNA, 20 bp, Artificial Sequence
  MKO10007133_A_Bptf
  gRNA
gacctgaccaacaaggctcg

SEQ ID NO: 7134 - DNA, 20 bp, Artificial Sequence
  MKO10007134_A_Braf
  gRNA
tcataggtacccgcaagatg

SEQ ID NO: 7135 - DNA, 20 bp, Artificial Sequence
  MKO10007135_A_Braf
  gRNA
gaggccctattggacaaatt

SEQ ID NO: 7136 - DNA, 20 bp, Artificial Sequence
  MKO10007136_A_Braf
  gRNA
gttgttccgtgatgcatctg

SEQ ID NO: 7137 - DNA, 20 bp, Artificial Sequence
  MKO10007137_A_Brap
  gRNA
tcacatccgtcatttcccga

SEQ ID NO: 7138 - DNA, 20 bp, Artificial Sequence
  MKO10007138_A_Brap
  gRNA
cccttctagacaggcgacag

SEQ ID NO: 7139 - DNA, 20 bp, Artificial Sequence
  MKO10007139_A_Brap
  gRNA
ctctactccgaatcagtaca

SEQ ID NO: 7140 - DNA, 20 bp, Artificial Sequence
  MKO10007140_A_Brat1
  gRNA
ggggttatggcagcgcccga

SEQ ID NO: 7141 - DNA, 20 bp, Artificial Sequence
  MKO10007141_A_Brat1
  gRNA
tccatgagcgcgtgcacggc

SEQ ID NO: 7142 - DNA, 20 bp, Artificial Sequence
  MKO10007142_A_Brat1
  gRNA
accctagggctcacgtcctg

SEQ ID NO: 7143 - DNA, 20 bp, Artificial Sequence
  MKO10007143_A_Brca1
  gRNA
ggcgtcgatcatccagagcg

SEQ ID NO: 7144 - DNA, 20 bp, Artificial Sequence
  MKO10007144_A_Brca1
  gRNA
gctaccggaaccgtgtcaga

SEQ ID NO: 7145 - DNA, 20 bp, Artificial Sequence
  MKO10007145_A_Brca1
  gRNA
gttatctcattcttacacaa

SEQ ID NO: 7146 - DNA, 20 bp, Artificial Sequence
  MKO10007146_A_Brca2
  gRNA
taggaccgataagcctcaat

SEQ ID NO: 7147 - DNA, 20 bp, Artificial Sequence
  MKO10007147_A_Brca2
  gRNA
aaagctcctcaaaccaattg

SEQ ID NO: 7148 - DNA, 20 bp, Artificial Sequence
  MKO10007148_A_Brca2
  gRNA
ggactagcaacatctaccac

SEQ ID NO: 7149 - DNA, 20 bp, Artificial Sequence
  MKO10007149_A_Brcc3
  gRNA
aatgcgcacagtccaagaaa

SEQ ID NO: 7150 - DNA, 20 bp, Artificial Sequence
  MKO10007150_A_Brcc3
  gRNA
tccattctgtcatcatcttg

SEQ ID NO: 7151 - DNA, 20 bp, Artificial Sequence
  MKO10007151_A_Brcc3
  gRNA
tctagttgaatgatgacata

SEQ ID NO: 7152 - DNA, 20 bp, Artificial Sequence
  MKO10007152_A_Brd1
  gRNA
attaaataggattgcgaatc

SEQ ID NO: 7153 - DNA, 20 bp, Artificial Sequence
  MKO10007153_A_Brd1
  gRNA
tgcgcagcagctcaattagc

SEQ ID NO: 7154 - DNA, 20 bp, Artificial Sequence
  MKO10007154_A_Brd1
  gRNA
taattgagctgctgcgcaag

SEQ ID NO: 7155 - DNA, 20 bp, Artificial Sequence
  MKO10007155_A_Brd2
  gRNA
agttggtttgttacccgtcc

SEQ ID NO: 7156 - DNA, 20 bp, Artificial Sequence
  MKO10007156_A_Brd2
  gRNA
gggcactggtaatactgccc

SEQ ID NO: 7157 - DNA, 20 bp, Artificial Sequence
  MKO10007157_A_Brd2
  gRNA
cagtattaccagtgcccatc

SEQ ID NO: 7158 - DNA, 20 bp, Artificial Sequence
  MKO10007158_A_Brd3
  gRNA
cacggggatcccggcagtcc

SEQ ID NO: 7159 - DNA, 20 bp, Artificial Sequence
  MKO10007159_A_Brd3
  gRNA
agtctttcgcccgggcttgc

SEQ ID NO: 7160 - DNA, 20 bp, Artificial Sequence
  MKO10007160_A_Brd3
  gRNA
tcccacaccgcctgtagtca

SEQ ID NO: 7161 - DNA, 20 bp, Artificial Sequence
  MKO10007161_A_Brd4
  gRNA
gggcctgcgttgtagacatt

SEQ ID NO: 7162 - DNA, 20 bp, Artificial Sequence
  MKO10007162_A_Brd4
  gRNA
gctggaaaggccacgcaaac

SEQ ID NO: 7163 - DNA, 20 bp, Artificial Sequence
  MKO10007163_A_Brd4
  gRNA
ggggtggtcgcaatgatggg

SEQ ID NO: 7164 - DNA, 20 bp, Artificial Sequence
  MKO10007164_A_Brd7
  gRNA
ggcgcaataaaatccgtcac

SEQ ID NO: 7165 - DNA, 20 bp, Artificial Sequence
  MKO10007165_A_Brd7
  gRNA
cctcgctccccccgactttg

SEQ ID NO: 7166 - DNA, 20 bp, Artificial Sequence
  MKO10007166_A_Brd7
  gRNA
cctcaaagtcggggggagcg

SEQ ID NO: 7167 - DNA, 20 bp, Artificial Sequence
  MKO10007167_A_Brd8
  gRNA
atcaagccctttgcagaacc

SEQ ID NO: 7168 - DNA, 20 bp, Artificial Sequence
  MKO10007168_A_Brd8
  gRNA
gagcacaagctgctgagtac

SEQ ID NO: 7169 - DNA, 20 bp, Artificial Sequence
  MKO10007169_A_Brd8
  gRNA
atgctaaacacaacttctct

SEQ ID NO: 7170 - DNA, 20 bp, Artificial Sequence
  MKO10007170_A_Brd9
  gRNA
tgagcgatcgtcgtagtagc

SEQ ID NO: 7171 - DNA, 20 bp, Artificial Sequence
  MKO10007171_A_Brd9
  gRNA
acgatcgctcagaccacgaa

SEQ ID NO: 7172 - DNA, 20 bp, Artificial Sequence
  MKO10007172_A_Brd9
  gRNA
gaggctgatgctttcgaccc

SEQ ID NO: 7173 - DNA, 20 bp, Artificial Sequence
  MKO10007173_A_Brdt
  gRNA
aaagacattctctgccgctt

SEQ ID NO: 7174 - DNA, 20 bp, Artificial Sequence
  MKO10007174_A_Brdt
  gRNA
gatctgtgactcgcagtctc

SEQ ID NO: 7175 - DNA, 20 bp, Artificial Sequence
  MKO10007175_A_Brdt
  gRNA
acaatagctgtttgtcgact

SEQ ID NO: 7176 - DNA, 20 bp, Artificial Sequence
  MKO10007176_A_Bre
  gRNA
gtttgagtaccagacgctcc

SEQ ID NO: 7177 - DNA, 20 bp, Artificial Sequence
  MKO10007177_A_Bre
  gRNA
tgtcctttcagtgcactcgg

SEQ ID NO: 7178 - DNA, 20 bp, Artificial Sequence
  MKO10007178_A_Bre
  gRNA
ctgacacttactgctcaatt

SEQ ID NO: 7179 - DNA, 20 bp, Artificial Sequence
  MKO10007179_A_Brf1
  gRNA
tgcatcaacgcaccagctat

SEQ ID NO: 7180 - DNA, 20 bp, Artificial Sequence
  MKO10007180_A_Brf1
  gRNA
agacgttcctgctcttggcg

SEQ ID NO: 7181 - DNA, 20 bp, Artificial Sequence
  MKO10007181_A_Brf1
  gRNA
aggtggctttcacgtgaact

SEQ ID NO: 7182 - DNA, 20 bp, Artificial Sequence
  MKO10007182_A_Brf2
  gRNA
ttccatctcgaaaagccgtt

SEQ ID NO: 7183 - DNA, 20 bp, Artificial Sequence
  MKO10007183_A_Brf2
  gRNA
gggccagttatgttgccgac

SEQ ID NO: 7184 - DNA, 20 bp, Artificial Sequence
  MKO10007184_A_Brf2
  gRNA
gaagttgccctcgtcgctaa

SEQ ID NO: 7185 - DNA, 20 bp, Artificial Sequence
  MKO10007185_A_Bri3bp
  gRNA
cgagaaccttgaccgctcca

SEQ ID NO: 7186 - DNA, 20 bp, Artificial Sequence
  MKO10007186_A_Bri3bp
  gRNA
agtgctaccgctctgcgtcg

SEQ ID NO: 7187 - DNA, 20 bp, Artificial Sequence
  MKO10007187_A_Bri3bp
  gRNA
agaagctgctcgtcgcgcgc

SEQ ID NO: 7188 - DNA, 20 bp, Artificial Sequence
  MKO10007188_A_Bri3
  gRNA
ccccgtaagacgcccagaag

SEQ ID NO: 7189 - DNA, 20 bp, Artificial Sequence
  MKO10007189_A_Bri3
  gRNA
accgggtgaccgttcgactg

SEQ ID NO: 7190 - DNA, 20 bp, Artificial Sequence
  MKO10007190_A_Bri3
  gRNA
tccgaccacgacgatggagt

SEQ ID NO: 7191 - DNA, 20 bp, Artificial Sequence
  MKO10007191_A_Bricd5
  gRNA
gcccaaccaaactactctag

SEQ ID NO: 7192 - DNA, 20 bp, Artificial Sequence
  MKO10007192_A_Bricd5
  gRNA
gcatagtgggtatcccggcc

SEQ ID NO: 7193 - DNA, 20 bp, Artificial Sequence
  MKO10007193_A_Bricd5
  gRNA
ccagaacatggcaaccatcg

SEQ ID NO: 7194 - DNA, 20 bp, Artificial Sequence
  MKO10007194_A_Brinp1
  gRNA
taggtcacagaaacacgcac

SEQ ID NO: 7195 - DNA, 20 bp, Artificial Sequence
  MKO10007195_A_Brinp1
  gRNA
ccagcgtaaactccatgatc

SEQ ID NO: 7196 - DNA, 20 bp, Artificial Sequence
  MKO10007196_A_Brinp1
  gRNA
tcctactttgtcgaccgtga

SEQ ID NO: 7197 - DNA, 20 bp, Artificial Sequence
  MKO10007197_A_Brinp2
  gRNA
ttccaaggaggcggatattg

SEQ ID NO: 7198 - DNA, 20 bp, Artificial Sequence
  MKO10007198_A_Brinp2
  gRNA
cagccacgaaccgctcacgc

SEQ ID NO: 7199 - DNA, 20 bp, Artificial Sequence
  MKO10007199_A_Brinp2
  gRNA
gtccgcaatatccgcctcct

SEQ ID NO: 7200 - DNA, 20 bp, Artificial Sequence
  MKO10007200_A_Brinp3
  gRNA
ggatatggtgaagtctgcga

SEQ ID NO: 7201 - DNA, 20 bp, Artificial Sequence
  MKO10007201_A_Brinp3
  gRNA
caatagttcgtctgttaccc

SEQ ID NO: 7202 - DNA, 20 bp, Artificial Sequence
  MKO10007202_A_Brinp3
  gRNA
cctgtacaaaacgttcctga

SEQ ID NO: 7203 - DNA, 20 bp, Artificial Sequence
  MKO10007203_A_Brip1
  gRNA
gtaaagcctgagtctccgat

SEQ ID NO: 7204 - DNA, 20 bp, Artificial Sequence
  MKO10007204_A_Brip1
  gRNA
gactttcctatcggagactc

SEQ ID NO: 7205 - DNA, 20 bp, Artificial Sequence
  MKO10007205_A_Brip1
  gRNA
gtccaggtttgtgtcgctgt

SEQ ID NO: 7206 - DNA, 20 bp, Artificial Sequence
  MKO10007206_A_Brix1
  gRNA
cagaacaagacacttaatgc

SEQ ID NO: 7207 - DNA, 20 bp, Artificial Sequence
  MKO10007207_A_Brix1
  gRNA
ttgatgcctcattctaaagc

SEQ ID NO: 7208 - DNA, 20 bp, Artificial Sequence
  MKO10007208_A_Brix1
  gRNA
aggctttcaaattcacctca

SEQ ID NO: 7209 - DNA, 20 bp, Artificial Sequence
  MKO10007209_A_Brk1
  gRNA
ggccgccatggcgggacaag

SEQ ID NO: 7210 - DNA, 20 bp, Artificial Sequence
  MKO10007210_A_Brk1
  gRNA
tgtactctattctccgttca

SEQ ID NO: 7211 - DNA, 20 bp, Artificial Sequence
  MKO10007211_A_Brk1
  gRNA
gaatagagtacattgaagcg

SEQ ID NO: 7212 - DNA, 20 bp, Artificial Sequence
  MKO10007212_A_Brms1l
  gRNA
cacagcatcgacattacctc

SEQ ID NO: 7213 - DNA, 20 bp, Artificial Sequence
  MKO10007213_A_Brms1l
  gRNA
aaacatgcagattcgcacaa

SEQ ID NO: 7214 - DNA, 20 bp, Artificial Sequence
  MKO10007214_A_Brms1l
  gRNA
cacaatgctgtcgagaagcc

SEQ ID NO: 7215 - DNA, 20 bp, Artificial Sequence
  MKO10007215_A_Brms1
  gRNA
cctccagtcgtaaacgtagc

SEQ ID NO: 7216 - DNA, 20 bp, Artificial Sequence
  MKO10007216_A_Brms1
  gRNA
cagccagctacgtttacgac

SEQ ID NO: 7217 - DNA, 20 bp, Artificial Sequence
  MKO10007217_A_Brms1
  gRNA
gctcacctccaggtgttgtt

SEQ ID NO: 7218 - DNA, 20 bp, Artificial Sequence
  MKO10007218_A_Brox
  gRNA
cattgcaaggacacgttccg

SEQ ID NO: 7219 - DNA, 20 bp, Artificial Sequence
  MKO10007219_A_Brox
  gRNA
taagtgacttgaggtccgcc

SEQ ID NO: 7220 - DNA, 20 bp, Artificial Sequence
  MKO10007220_A_Brox
  gRNA
tataggtttcataaattcag

SEQ ID NO: 7221 - DNA, 20 bp, Artificial Sequence
  MKO10007221_A_Brpf1
  gRNA
tgtcttgcggacgctaaagg

SEQ ID NO: 7222 - DNA, 20 bp, Artificial Sequence
  MKO10007222_A_Brpf1
  gRNA
ccaaccgcctgaccatccag

SEQ ID NO: 7223 - DNA, 20 bp, Artificial Sequence
  MKO10007223_A_Brpf1
  gRNA
ctgaaacgacaatcacggaa

SEQ ID NO: 7224 - DNA, 20 bp, Artificial Sequence
  MKO10007224_A_Brpf3
  gRNA
tgatcgagctcatccgcaaa

SEQ ID NO: 7225 - DNA, 20 bp, Artificial Sequence
  MKO10007225_A_Brpf3
  gRNA
ggaacggtgtccccctcatc

SEQ ID NO: 7226 - DNA, 20 bp, Artificial Sequence
  MKO10007226_A_Brpf3
  gRNA
gtcctcaacaggaccgtaaa

SEQ ID NO: 7227 - DNA, 20 bp, Artificial Sequence
  MKO10007227_A_Brs3
  gRNA
tcctttatgtgtagtatcgt

SEQ ID NO: 7228 - DNA, 20 bp, Artificial Sequence
  MKO10007228_A_Brs3
  gRNA
gttcctcagtcggtatgttc

SEQ ID NO: 7229 - DNA, 20 bp, Artificial Sequence
  MKO10007229_A_Brs3
  gRNA
acaaagccatgcccgaaagc

SEQ ID NO: 7230 - DNA, 20 bp, Artificial Sequence
  MKO10007230_A_Brsk1
  gRNA
tcttgttctcgtagacgtcg

SEQ ID NO: 7231 - DNA, 20 bp, Artificial Sequence
  MKO10007231_A_Brsk1
  gRNA
tatggcgtccctgcaagtgg

SEQ ID NO: 7232 - DNA, 20 bp, Artificial Sequence
  MKO10007232_A_Brsk1
  gRNA
ccataccaaagtctgcgatg

SEQ ID NO: 7233 - DNA, 20 bp, Artificial Sequence
  MKO10007233_A_Brsk2
  gRNA
cccgggagcgatgacatcga

SEQ ID NO: 7234 - DNA, 20 bp, Artificial Sequence
  MKO10007234_A_Brsk2
  gRNA
ggcgcagcacgcgcagtatg

SEQ ID NO: 7235 - DNA, 20 bp, Artificial Sequence
  MKO10007235_A_Brsk2
  gRNA
ctggctcgcaccatatggag

SEQ ID NO: 7236 - DNA, 20 bp, Artificial Sequence
  MKO10007236_A_Brwd1
  gRNA
accggacgtcgggccggcga

SEQ ID NO: 7237 - DNA, 20 bp, Artificial Sequence
  MKO10007237_A_Brwd1
  gRNA
cgccatggcggagccttcgc

SEQ ID NO: 7238 - DNA, 20 bp, Artificial Sequence
  MKO10007238_A_Brwd1
  gRNA
cggcactcacctgcgccgct

SEQ ID NO: 7239 - DNA, 20 bp, Artificial Sequence
  MKO10007239_A_Brwd3
  gRNA
agctgtattacctgatcgca

SEQ ID NO: 7240 - DNA, 20 bp, Artificial Sequence
  MKO10007240_A_Brwd3
  gRNA
tgattccgcgccgcttagac

SEQ ID NO: 7241 - DNA, 20 bp, Artificial Sequence
  MKO10007241_A_Brwd3
  gRNA
cacctgagcggatttgttac

SEQ ID NO: 7242 - DNA, 20 bp, Artificial Sequence
  MKO10007242_A_Bscl2
  gRNA
ctactactcctacatgccga

SEQ ID NO: 7243 - DNA, 20 bp, Artificial Sequence
  MKO10007243_A_Bscl2
  gRNA
acagcagcgtgtcgagcacc

SEQ ID NO: 7244 - DNA, 20 bp, Artificial Sequence
  MKO10007244_A_Bscl2
  gRNA
gtggctgaccgtcggcatgt

SEQ ID NO: 7245 - DNA, 20 bp, Artificial Sequence
  MKO10007245_A_Bsdc1
  gRNA
aataccttggtgccgtcata

SEQ ID NO: 7246 - DNA, 20 bp, Artificial Sequence
  MKO10007246_A_Bsdc1
  gRNA
atcaggttcgttgcagtacg

SEQ ID NO: 7247 - DNA, 20 bp, Artificial Sequence
  MKO10007247_A_Bsdc1
  gRNA
acgtactgcaacgaacctga

SEQ ID NO: 7248 - DNA, 20 bp, Artificial Sequence
  MKO10007248_A_Bsg
  gRNA
ttgacatcgttggccaccgc

SEQ ID NO: 7249 - DNA, 20 bp, Artificial Sequence
  MKO10007249_A_Bsg
  gRNA
ttggccgctcaagagcgtga

SEQ ID NO: 7250 - DNA, 20 bp, Artificial Sequence
  MKO10007250_A_Bsg
  gRNA
gtggacgcagatgaccgctc

SEQ ID NO: 7251 - DNA, 20 bp, Artificial Sequence
  MKO10007251_A_Bsnd
  gRNA
tatgagccacgatcgacccc

SEQ ID NO: 7252 - DNA, 20 bp, Artificial Sequence
  MKO10007252_A_Bsnd
  gRNA
gctccggtggtcgtccatag

SEQ ID NO: 7253 - DNA, 20 bp, Artificial Sequence
  MKO10007253_A_Bsnd
  gRNA
aggcgagcctcgtactgctc

SEQ ID NO: 7254 - DNA, 20 bp, Artificial Sequence
  MKO10007254_A_Bsn
  gRNA
tgtggaggccggcaacgtag

SEQ ID NO: 7255 - DNA, 20 bp, Artificial Sequence
  MKO10007255_A_Bsn
  gRNA
acggccccttaagagtgcgg

SEQ ID NO: 7256 - DNA, 20 bp, Artificial Sequence
  MKO10007256_A_Bsn
  gRNA
aagtccccgcaggacgctgc

SEQ ID NO: 7257 - DNA, 20 bp, Artificial Sequence
  MKO10007257_A_Bsph1
  gRNA
gattattatgcaccaactat

SEQ ID NO: 7258 - DNA, 20 bp, Artificial Sequence
  MKO10007258_A_Bsph1
  gRNA
gatcatatgtctgtaccaga

SEQ ID NO: 7259 - DNA, 20 bp, Artificial Sequence
  MKO10007259_A_Bsph1
  gRNA
tctttgaacaagacttacca

SEQ ID NO: 7260 - DNA, 20 bp, Artificial Sequence
  MKO10007260_A_Bsph2
  gRNA
gctcattaagaagtgcacca

SEQ ID NO: 7261 - DNA, 20 bp, Artificial Sequence
  MKO10007261_A_Bsph2
  gRNA
tacagtaccgccaccttcct

SEQ ID NO: 7262 - DNA, 20 bp, Artificial Sequence
  MKO10007262_A_Bsph2
  gRNA
attcaaaatatagccctcct

SEQ ID NO: 7263 - DNA, 20 bp, Artificial Sequence
  MKO10007263_A_Bspry
  gRNA
agcttaatttctccgaatcc

SEQ ID NO: 7264 - DNA, 20 bp, Artificial Sequence
  MKO10007264_A_Bspry
  gRNA
aggtcatggctagtgcagcg

SEQ ID NO: 7265 - DNA, 20 bp, Artificial Sequence
  MKO10007265_A_Bspry
  gRNA
catctccaagtatatggccg

SEQ ID NO: 7266 - DNA, 20 bp, Artificial Sequence
  MKO10007266_A_Bst1
  gRNA
ggagaacacccgccgcctcg

SEQ ID NO: 7267 - DNA, 20 bp, Artificial Sequence
  MKO10007267_A_Bst1
  gRNA
ccccatagctcataacgagc

SEQ ID NO: 7268 - DNA, 20 bp, Artificial Sequence
  MKO10007268_A_Bst1
  gRNA
agactgtgaaaacaacgccg

SEQ ID NO: 7269 - DNA, 20 bp, Artificial Sequence
  MKO10007269_A_Bst2
  gRNA
cgctcgcaacccgtctctac

SEQ ID NO: 7270 - DNA, 20 bp, Artificial Sequence
  MKO10007270_A_Bst2
  gRNA
tagagacgggttgcgagcgc

SEQ ID NO: 7271 - DNA, 20 bp, Artificial Sequence
  MKO10007271_A_Bst2
  gRNA
gtgacactttgagcaccagt

SEQ ID NO: 7272 - DNA, 20 bp, Artificial Sequence
  MKO10007272_A_Bsx
  gRNA
tccggcccgtctgccgcttt

SEQ ID NO: 7273 - DNA, 20 bp, Artificial Sequence
  MKO10007273_A_Bsx
  gRNA
cctgtcgacgccagagcgtg

SEQ ID NO: 7274 - DNA, 20 bp, Artificial Sequence
  MKO10007274_A_Bsx
  gRNA
tgcgggaacagcgccgggac

SEQ ID NO: 7275 - DNA, 20 bp, Artificial Sequence
  MKO10007275_A_Btaf1
  gRNA
tgggatacccggattgcagc

SEQ ID NO: 7276 - DNA, 20 bp, Artificial Sequence
  MKO10007276_A_Btaf1
  gRNA
atatgcagattgttacagca

SEQ ID NO: 7277 - DNA, 20 bp, Artificial Sequence
  MKO10007277_A_Btaf1
  gRNA
tagtgaaaaacgtgcctgag

SEQ ID NO: 7278 - DNA, 20 bp, Artificial Sequence
  MKO10007278_A_Btbd10
  gRNA
agctaccatctgagcttgac

SEQ ID NO: 7279 - DNA, 20 bp, Artificial Sequence
  MKO10007279_A_Btbd10
  gRNA
tttcacacgtcccaatgaga

SEQ ID NO: 7280 - DNA, 20 bp, Artificial Sequence
  MKO10007280_A_Btbd10
  gRNA
ctccaggattactataagac

SEQ ID NO: 7281 - DNA, 20 bp, Artificial Sequence
  MKO10007281_A_Btbd11
  gRNA
ttgatgtacgcctgcgtccg

SEQ ID NO: 7282 - DNA, 20 bp, Artificial Sequence
  MKO10007282_A_Btbd11
  gRNA
aatcaacaccatgagcgaac

SEQ ID NO: 7283 - DNA, 20 bp, Artificial Sequence
  MKO10007283_A_Btbd11
  gRNA
acgatgtccgccaagccgcc

SEQ ID NO: 7284 - DNA, 20 bp, Artificial Sequence
  MKO10007284_A_Btbd16
  gRNA
ttggggaaaacgccatcggt

SEQ ID NO: 7285 - DNA, 20 bp, Artificial Sequence
  MKO10007285_A_Btbd16
  gRNA
ttgttggtgcaaccaaccga

SEQ ID NO: 7286 - DNA, 20 bp, Artificial Sequence
  MKO10007286_A_Btbd16
  gRNA
gacgtgatccttgaatgcct

SEQ ID NO: 7287 - DNA, 20 bp, Artificial Sequence
  MKO10007287_A_Btbd17
  gRNA
cagcttgcggccggtctacg

SEQ ID NO: 7288 - DNA, 20 bp, Artificial Sequence
  MKO10007288_A_Btbd17
  gRNA
gtggtcatgacgcgggtcgc

SEQ ID NO: 7289 - DNA, 20 bp, Artificial Sequence
  MKO10007289_A_Btbd17
  gRNA
gtggaaggctcggacctcgt

SEQ ID NO: 7290 - DNA, 20 bp, Artificial Sequence
  MKO10007290_A_Btbd1
  gRNA
gggtttactgatattgacat

SEQ ID NO: 7291 - DNA, 20 bp, Artificial Sequence
  MKO10007291_A_Btbd1
  gRNA
tacctgagtaagcaacataa

SEQ ID NO: 7292 - DNA, 20 bp, Artificial Sequence
  MKO10007292_A_Btbd1
  gRNA
tttccaggtcctgctcaatc

SEQ ID NO: 7293 - DNA, 20 bp, Artificial Sequence
  MKO10007293_A_Btbd2
  gRNA
tcttcaatgcagtcgtgcgc

SEQ ID NO: 7294 - DNA, 20 bp, Artificial Sequence
  MKO10007294_A_Btbd2
  gRNA
gccgaacctcacgaatgccc

SEQ ID NO: 7295 - DNA, 20 bp, Artificial Sequence
  MKO10007295_A_Btbd2
  gRNA
cagctcaatctcggtggacg

SEQ ID NO: 7296 - DNA, 20 bp, Artificial Sequence
  MKO10007296_A_Btbd3
  gRNA
ccacagtacgtcctcgctgt

SEQ ID NO: 7297 - DNA, 20 bp, Artificial Sequence
  MKO10007297_A_Btbd3
  gRNA
attgccgtccagcactacac

SEQ ID NO: 7298 - DNA, 20 bp, Artificial Sequence
  MKO10007298_A_Btbd3
  gRNA
gggcgcttacctttctcgga

SEQ ID NO: 7299 - DNA, 20 bp, Artificial Sequence
  MKO10007299_A_Btbd6
  gRNA
tccatcctacgctgcgcgag

SEQ ID NO: 7300 - DNA, 20 bp, Artificial Sequence
  MKO10007300_A_Btbd6
  gRNA
aggcgcagccgagagcacga

SEQ ID NO: 7301 - DNA, 20 bp, Artificial Sequence
  MKO10007301_A_Btbd6
  gRNA
gtacagcgatgagatcgacc

SEQ ID NO: 7302 - DNA, 20 bp, Artificial Sequence
  MKO10007302_A_Btbd7
  gRNA
acgccgaaaatctaatagat

SEQ ID NO: 7303 - DNA, 20 bp, Artificial Sequence
  MKO10007303_A_Btbd7
  gRNA
atgtgttcaatccgcacaaa

SEQ ID NO: 7304 - DNA, 20 bp, Artificial Sequence
  MKO10007304_A_Btbd7
  gRNA
cagatgcgagaactcctctc

SEQ ID NO: 7305 - DNA, 20 bp, Artificial Sequence
  MKO10007305_A_Btbd8
  gRNA
tcagacgaagttctataccg

SEQ ID NO: 7306 - DNA, 20 bp, Artificial Sequence
  MKO10007306_A_Btbd8
  gRNA
cctccaccagtaatatcctc

SEQ ID NO: 7307 - DNA, 20 bp, Artificial Sequence
  MKO10007307_A_Btbd8
  gRNA
tgcagcaaaataactcgacc

SEQ ID NO: 7308 - DNA, 20 bp, Artificial Sequence
  MKO10007308_A_Btbd9
  gRNA
attgatgatgactgccgctc

SEQ ID NO: 7309 - DNA, 20 bp, Artificial Sequence
  MKO10007309_A_Btbd9
  gRNA
catcgtgaaagcctcggccg

SEQ ID NO: 7310 - DNA, 20 bp, Artificial Sequence
  MKO10007310_A_Btbd9
  gRNA
gccccgtgtagatatatctg

SEQ ID NO: 7311 - DNA, 20 bp, Artificial Sequence
  MKO10007311_A_Btc
  gRNA
tttgctcgtccaccacgaag

SEQ ID NO: 7312 - DNA, 20 bp, Artificial Sequence
  MKO10007312_A_Btc
  gRNA
cacttaccgttaagcaatat

SEQ ID NO: 7313 - DNA, 20 bp, Artificial Sequence
  MKO10007313_A_Btc
  gRNA
tggggctcggtgtgagcgag

SEQ ID NO: 7314 - DNA, 20 bp, Artificial Sequence
  MKO10007314_A_Btd
  gRNA
gtgatgaggtccacgttagc

SEQ ID NO: 7315 - DNA, 20 bp, Artificial Sequence
  MKO10007315_A_Btd
  gRNA
gcttgcgttgggcgtcagct

SEQ ID NO: 7316 - DNA, 20 bp, Artificial Sequence
  MKO10007316_A_Btd
  gRNA
ctccgtgtcattgaaccgaa

SEQ ID NO: 7317 - DNA, 20 bp, Artificial Sequence
  MKO10007317_A_Btf3l4
  gRNA
tcagagttcactaaagaaac

SEQ ID NO: 7318 - DNA, 20 bp, Artificial Sequence
  MKO10007318_A_Btf3l4
  gRNA
caatatagctggtattgaag

SEQ ID NO: 7319 - DNA, 20 bp, Artificial Sequence
  MKO10007319_A_Btf3l4
  gRNA
gtgaatatgattaaagacga

SEQ ID NO: 7320 - DNA, 20 bp, Artificial Sequence
  MKO10007320_A_Btf3
  gRNA
tcccatagggaactgctcgt

SEQ ID NO: 7321 - DNA, 20 bp, Artificial Sequence
  MKO10007321_A_Btf3
  gRNA
gatgatgatgatgaagttcc

SEQ ID NO: 7322 - DNA, 20 bp, Artificial Sequence
  MKO10007322_A_Btf3
  gRNA
tgtctgcaccaagctggttg

SEQ ID NO: 7323 - DNA, 20 bp, Artificial Sequence
  MKO10007323_A_Btg1
  gRNA
gataggcgagatcgccgccg

SEQ ID NO: 7324 - DNA, 20 bp, Artificial Sequence
  MKO10007324_A_Btg1
  gRNA
ggcggcgatctcgcctatca

SEQ ID NO: 7325 - DNA, 20 bp, Artificial Sequence
  MKO10007325_A_Btg1
  gRNA
ttcccagaaaagccgtgcaa

SEQ ID NO: 7326 - DNA, 20 bp, Artificial Sequence
  MKO10007326_A_Btg2
  gRNA
ccatcacatagttcttcgag

SEQ ID NO: 7327 - DNA, 20 bp, Artificial Sequence
  MKO10007327_A_Btg2
  gRNA
cccggagatcgccgccgccg

SEQ ID NO: 7328 - DNA, 20 bp, Artificial Sequence
  MKO10007328_A_Btg2
  gRNA
tatgaagtgtcttaccgcat

SEQ ID NO: 7329 - DNA, 20 bp, Artificial Sequence
  MKO10007329_A_Btg3
  gRNA
gcgggtcttacctggtacac

SEQ ID NO: 7330 - DNA, 20 bp, Artificial Sequence
  MKO10007330_A_Btg3
  gRNA
aacaccaagccccgtgtacc

SEQ ID NO: 7331 - DNA, 20 bp, Artificial Sequence
  MKO10007331_A_Btg3
  gRNA
ttacctgtaggcctgacctt

SEQ ID NO: 7332 - DNA, 20 bp, Artificial Sequence
  MKO10007332_A_Btg4
  gRNA
ctgtccaccctgcgcgaagc

SEQ ID NO: 7333 - DNA, 20 bp, Artificial Sequence
  MKO10007333_A_Btg4
  gRNA
ccggccagcttcgcgcaggg

SEQ ID NO: 7334 - DNA, 20 bp, Artificial Sequence
  MKO10007334_A_Btg4
  gRNA
caacccaaagagcgtctacc

SEQ ID NO: 7335 - DNA, 20 bp, Artificial Sequence
  MKO10007335_A_Btk
  gRNA
aatccggtacaatagtgacc

SEQ ID NO: 7336 - DNA, 20 bp, Artificial Sequence
  MKO10007336_A_Btk
  gRNA
gtaccaggtcactattgtac

SEQ ID NO: 7337 - DNA, 20 bp, Artificial Sequence
  MKO10007337_A_Btk
  gRNA
ctctaggttgtatatgatga

SEQ ID NO: 7338 - DNA, 20 bp, Artificial Sequence
  MKO10007338_A_Btla
  gRNA
cagtgcaacttactattacg

SEQ ID NO: 7339 - DNA, 20 bp, Artificial Sequence
  MKO10007339_A_Btla
  gRNA
ctcgtaatagtaagttgcac

SEQ ID NO: 7340 - DNA, 20 bp, Artificial Sequence
  MKO10007340_A_Btla
  gRNA
aagaattccctaaataaccg

SEQ ID NO: 7341 - DNA, 20 bp, Artificial Sequence
  MKO10007341_A_Btn1a1
  gRNA
cgacagcggtacttctatac

SEQ ID NO: 7342 - DNA, 20 bp, Artificial Sequence
  MKO10007342_A_Btn1a1
  gRNA
atgtattctgagctcgcgtt

SEQ ID NO: 7343 - DNA, 20 bp, Artificial Sequence
  MKO10007343_A_Btn1a1
  gRNA
aaattccttcttccgcagac

SEQ ID NO: 7344 - DNA, 20 bp, Artificial Sequence
  MKO10007344_A_Btn2a2
  gRNA
gccttgtcaagaaacaccgc

SEQ ID NO: 7345 - DNA, 20 bp, Artificial Sequence
  MKO10007345_A_Btn2a2
  gRNA
gcaggtacaacttcatcata

SEQ ID NO: 7346 - DNA, 20 bp, Artificial Sequence
  MKO10007346_A_Btn2a2
  gRNA
tgatgaagttgtacctgccc

SEQ ID NO: 7347 - DNA, 20 bp, Artificial Sequence
  MKO10007347_A_Btnl10
  gRNA
gtacacatgcacgactgacg

SEQ ID NO: 7348 - DNA, 20 bp, Artificial Sequence
  MKO10007348_A_Btnl10
  gRNA
ggatgtgtatgacgagcaga

SEQ ID NO: 7349 - DNA, 20 bp, Artificial Sequence
  MKO10007349_A_Btnl10
  gRNA
aaggtccagccactccacct

SEQ ID NO: 7350 - DNA, 20 bp, Artificial Sequence
  MKO10007350_A_Btnl1
  gRNA
aggtgcagatgccggaatac

SEQ ID NO: 7351 - DNA, 20 bp, Artificial Sequence
  MKO10007351_A_Btnl1
  gRNA
cgagtgttgtgctcctcaag

SEQ ID NO: 7352 - DNA, 20 bp, Artificial Sequence
  MKO10007352_A_Btnl1
  gRNA
cagctcgcatgcacatccga

SEQ ID NO: 7353 - DNA, 20 bp, Artificial Sequence
  MKO10007353_A_Btnl2
  gRNA
acagcttccgttagcgtaat

SEQ ID NO: 7354 - DNA, 20 bp, Artificial Sequence
  MKO10007354_A_Btnl2
  gRNA
ggaatgtccgattacgctaa

SEQ ID NO: 7355 - DNA, 20 bp, Artificial Sequence
  MKO10007355_A_Btnl2
  gRNA
gacaagcgtgctactccaag

SEQ ID NO: 7356 - DNA, 20 bp, Artificial Sequence
  MKO10007356_A_Btnl4
  gRNA
gttcagcacagagaccttgc

SEQ ID NO: 7357 - DNA, 20 bp, Artificial Sequence
  MKO10007357_A_Btnl4
  gRNA
catcatagaacactccttgc

SEQ ID NO: 7358 - DNA, 20 bp, Artificial Sequence
  MKO10007358_A_Btnl4
  gRNA
gtattcacagcgcaccttgc

SEQ ID NO: 7359 - DNA, 20 bp, Artificial Sequence
  MKO10007359_A_Btnl6
  gRNA
aacggggaatcttcaacgtg

SEQ ID NO: 7360 - DNA, 20 bp, Artificial Sequence
  MKO10007360_A_Btnl6
  gRNA
ttctgcaaggctgatcgtgc

SEQ ID NO: 7361 - DNA, 20 bp, Artificial Sequence
  MKO10007361_A_Btnl6
  gRNA
cagatgtatatcccactatc

SEQ ID NO: 7362 - DNA, 20 bp, Artificial Sequence
  MKO10007362_A_Btnl9
  gRNA
gagacatccgtgattgtccg

SEQ ID NO: 7363 - DNA, 20 bp, Artificial Sequence
  MKO10007363_A_Btnl9
  gRNA
gaattcgtgatccagattgc

SEQ ID NO: 7364 - DNA, 20 bp, Artificial Sequence
  MKO10007364_A_Btnl9
  gRNA
cccatatcggccctcgtcgg

SEQ ID NO: 7365 - DNA, 20 bp, Artificial Sequence
  MKO10007365_A_Btrc
  gRNA
ggcgattatggacccggcag

SEQ ID NO: 7366 - DNA, 20 bp, Artificial Sequence
  MKO10007366_A_Btrc
  gRNA
ggagaaagcgcttaagttta

SEQ ID NO: 7367 - DNA, 20 bp, Artificial Sequence
  MKO10007367_A_Btrc
  gRNA
tgctgagagtttccgctgct

SEQ ID NO: 7368 - DNA, 20 bp, Artificial Sequence
  MKO10007368_A_Bub1b
  gRNA
catgacccgcccgtgccgta

SEQ ID NO: 7369 - DNA, 20 bp, Artificial Sequence
  MKO10007369_A_Bub1b
  gRNA
tataatagcgcgtctctcct

SEQ ID NO: 7370 - DNA, 20 bp, Artificial Sequence
  MKO10007370_A_Bub1b
  gRNA
gcgggtcatgtccacacttc

SEQ ID NO: 7371 - DNA, 20 bp, Artificial Sequence
  MKO10007371_A_Bub1
  gRNA
ctattccaagcacgccttac

SEQ ID NO: 7372 - DNA, 20 bp, Artificial Sequence
  MKO10007372_A_Bub1
  gRNA
tacccgtgtagctttgcata

SEQ ID NO: 7373 - DNA, 20 bp, Artificial Sequence
  MKO10007373_A_Bub1
  gRNA
atcaagtattctttattgtc

SEQ ID NO: 7374 - DNA, 20 bp, Artificial Sequence
  MKO10007374_A_Bub3
  gRNA
gttaccatcacgttcacttc

SEQ ID NO: 7375 - DNA, 20 bp, Artificial Sequence
  MKO10007375_A_Bub3
  gRNA
gactttctcccagccggaaa

SEQ ID NO: 7376 - DNA, 20 bp, Artificial Sequence
  MKO10007376_A_Bub3
  gRNA
cacgatttgaacactgatca

SEQ ID NO: 7377 - DNA, 20 bp, Artificial Sequence
  MKO10007377_A_Bud13
  gRNA
tgtttaggccacggtgaaga

SEQ ID NO: 7378 - DNA, 20 bp, Artificial Sequence
  MKO10007378_A_Bud13
  gRNA
gtcgtgctcgtacttgctgt

SEQ ID NO: 7379 - DNA, 20 bp, Artificial Sequence
  MKO10007379_A_Bud13
  gRNA
gcggattgttgatgatgatg

SEQ ID NO: 7380 - DNA, 20 bp, Artificial Sequence
  MKO10007380_A_Bud31
  gRNA
ggagttgattgaaccaacgt

SEQ ID NO: 7381 - DNA, 20 bp, Artificial Sequence
  MKO10007381_A_Bud31
  gRNA
cccgagtctgaatgcagcgt

SEQ ID NO: 7382 - DNA, 20 bp, Artificial Sequence
  MKO10007382_A_Bud31
  gRNA
tgatctagttcatccaacgt

SEQ ID NO: 7383 - DNA, 20 bp, Artificial Sequence
  MKO10007383_A_Bves
  gRNA
aaccttctaaacaaatccgg

SEQ ID NO: 7384 - DNA, 20 bp, Artificial Sequence
  MKO10007384_A_Bves
  gRNA
tgaaccactccgagtccctc

SEQ ID NO: 7385 - DNA, 20 bp, Artificial Sequence
  MKO10007385_A_Bves
  gRNA
gagtggcccagaccacataa

SEQ ID NO: 7386 - DNA, 20 bp, Artificial Sequence
  MKO10007386_A_Bysl
  gRNA
gactgtcatgtcagaggtat

SEQ ID NO: 7387 - DNA, 20 bp, Artificial Sequence
  MKO10007387_A_Bysl
  gRNA
tgtagggccgggattgccac

SEQ ID NO: 7388 - DNA, 20 bp, Artificial Sequence
  MKO10007388_A_Bysl
  gRNA
ccgccatgtatcaagccacc

SEQ ID NO: 7389 - DNA, 20 bp, Artificial Sequence
  MKO10007389_A_Bzrap1
  gRNA
tgcatatgcgggacttcgac

SEQ ID NO: 7390 - DNA, 20 bp, Artificial Sequence
  MKO10007390_A_Bzrap1
  gRNA
caggccggagcggctcccgc

SEQ ID NO: 7391 - DNA, 20 bp, Artificial Sequence
  MKO10007391_A_Bzrap1
  gRNA
ggcagtcattgccaagcgcc

SEQ ID NO: 7392 - DNA, 20 bp, Artificial Sequence
  MKO10007392_A_Bzw1
  gRNA
tttagccccgggtggtacac

SEQ ID NO: 7393 - DNA, 20 bp, Artificial Sequence
  MKO10007393_A_Bzw1
  gRNA
cgctacaaatacctggagaa

SEQ ID NO: 7394 - DNA, 20 bp, Artificial Sequence
  MKO10007394_A_Bzw1
  gRNA
ccgactctgaaaaccccttt

SEQ ID NO: 7395 - DNA, 20 bp, Artificial Sequence
  MKO10007395_A_Bzw2
  gRNA
ggaggaacacgcatagacga

SEQ ID NO: 7396 - DNA, 20 bp, Artificial Sequence
  MKO10007396_A_Bzw2
  gRNA
aaccatccgaaactatgctc

SEQ ID NO: 7397 - DNA, 20 bp, Artificial Sequence
  MKO10007397_A_Bzw2
  gRNA
caccagcttcattaagcccc

SEQ ID NO: 7398 - DNA, 20 bp, Artificial Sequence
  MKO10007398_A_C030006K11Rik
  gRNA
cgggtggtacaggcgcccat

SEQ ID NO: 7399 - DNA, 20 bp, Artificial Sequence
  MKO10007399_A_C030006K11Rik
  gRNA
aagcctcgtagcgcccgctg

SEQ ID NO: 7400 - DNA, 20 bp, Artificial Sequence
  MKO10007400_A_C030006K11Rik
  gRNA
gcgtaacttggctctagtct

SEQ ID NO: 7401 - DNA, 20 bp, Artificial Sequence
  MKO10007401_A_C030039L03Rik
  gRNA
aaaatttgatcgtcgacgaa

SEQ ID NO: 7402 - DNA, 20 bp, Artificial Sequence
  MKO10007402_A_C030039L03Rik
  gRNA
ggacaatcctatgttcagca

SEQ ID NO: 7403 - DNA, 20 bp, Artificial Sequence
  MKO10007403_A_C030039L03Rik
  gRNA
gttatacaggaacataatgt

SEQ ID NO: 7404 - DNA, 20 bp, Artificial Sequence
  MKO10007404_A_C030046E11Rik
  gRNA
gctaaatcatctactcagtt

SEQ ID NO: 7405 - DNA, 20 bp, Artificial Sequence
  MKO10007405_A_C030046E11Rik
  gRNA
atttgcaagcacccattatg

SEQ ID NO: 7406 - DNA, 20 bp, Artificial Sequence
  MKO10007406_A_C030046E11Rik
  gRNA
taaacttacttgggatacac

SEQ ID NO: 7407 - DNA, 20 bp, Artificial Sequence
  MKO10007407_A_C130026I21Rik
  gRNA
gcaacaatgaactcagcagc

SEQ ID NO: 7408 - DNA, 20 bp, Artificial Sequence
  MKO10007408_A_C130026I21Rik
  gRNA
gtcccctaggacaatcccag

SEQ ID NO: 7409 - DNA, 20 bp, Artificial Sequence
  MKO10007409_A_C130026I21Rik
  gRNA
tctgctccgagatgaagtct

SEQ ID NO: 7410 - DNA, 20 bp, Artificial Sequence
  MKO10007410_A_C130050O18Rik
  gRNA
ctacatgtccacgacaaacc

SEQ ID NO: 7411 - DNA, 20 bp, Artificial Sequence
  MKO10007411_A_C130050O18Rik
  gRNA
tgttcatcttagaccgtact

SEQ ID NO: 7412 - DNA, 20 bp, Artificial Sequence
  MKO10007412_A_C130050O18Rik
  gRNA
agtgctgacagagcgttgtg

SEQ ID NO: 7413 - DNA, 20 bp, Artificial Sequence
  MKO10007413_A_C130060K24Rik
  gRNA
caatcatcatgtgaacgatg

SEQ ID NO: 7414 - DNA, 20 bp, Artificial Sequence
  MKO10007414_A_C130060K24Rik
  gRNA
tcagtgctccgaactattca

SEQ ID NO: 7415 - DNA, 20 bp, Artificial Sequence
  MKO10007415_A_C130060K24Rik
  gRNA
tgtagatcttctggtgcacg

SEQ ID NO: 7416 - DNA, 20 bp, Artificial Sequence
  MKO10007416_A_C130074G19Rik
  gRNA
tccagggagtcgtagcgctc

SEQ ID NO: 7417 - DNA, 20 bp, Artificial Sequence
  MKO10007417_A_C130074G19Rik
  gRNA
gcctgagcgctacgactccc

SEQ ID NO: 7418 - DNA, 20 bp, Artificial Sequence
  MKO10007418_A_C130074G19Rik
  gRNA
acgctggtggccactccaaa

SEQ ID NO: 7419 - DNA, 20 bp, Artificial Sequence
  MKO10007419_A_C130079G13Rik
  gRNA
gaccatgttgatactcttga

SEQ ID NO: 7420 - DNA, 20 bp, Artificial Sequence
  MKO10007420_A_C130079G13Rik
  gRNA
gcaaggtatcaagtgattgt

SEQ ID NO: 7421 - DNA, 20 bp, Artificial Sequence
  MKO10007421_A_C130079G13Rik
  gRNA
tcccacacgcatctgtatta

SEQ ID NO: 7422 - DNA, 20 bp, Artificial Sequence
  MKO10007422_A_C1d
  gRNA
gatttgtcaagaacgcactc

SEQ ID NO: 7423 - DNA, 20 bp, Artificial Sequence
  MKO10007423_A_C1d
  gRNA
gtgttactagttggacccat

SEQ ID NO: 7424 - DNA, 20 bp, Artificial Sequence
  MKO10007424_A_C1d
  gRNA
tagaaacgagttgttgcaga

SEQ ID NO: 7425 - DNA, 20 bp, Artificial Sequence
  MKO10007425_A_C1galt1c1
  gRNA
cgatatctcgaaaatttcag

SEQ ID NO: 7426 - DNA, 20 bp, Artificial Sequence
  MKO10007426_A_C1galt1c1
  gRNA
gaaaatgccgaagatgccga

SEQ ID NO: 7427 - DNA, 20 bp, Artificial Sequence
  MKO10007427_A_C1galt1c1
  gRNA
gtgtttaataccaaatccgt

SEQ ID NO: 7428 - DNA, 20 bp, Artificial Sequence
  MKO10007428_A_C1galt1
  gRNA
tgacgacacatacgtcattg

SEQ ID NO: 7429 - DNA, 20 bp, Artificial Sequence
  MKO10007429_A_C1galt1
  gRNA
tctagacttacctctatggg

SEQ ID NO: 7430 - DNA, 20 bp, Artificial Sequence
  MKO10007430_A_C1galt1
  gRNA
gtttatcatcttcgtccata

SEQ ID NO: 7431 - DNA, 20 bp, Artificial Sequence
  MKO10007431_A_C1qa
  gRNA
cacagatgaagcgacccgtg

SEQ ID NO: 7432 - DNA, 20 bp, Artificial Sequence
  MKO10007432_A_C1qa
  gRNA
cggcagaacccaatgacgct

SEQ ID NO: 7433 - DNA, 20 bp, Artificial Sequence
  MKO10007433_A_C1qa
  gRNA
gatgtctgccgagcacccaa

SEQ ID NO: 7434 - DNA, 20 bp, Artificial Sequence
  MKO10007434_A_C1qbp
  gRNA
gacatcaactcccaactttg

SEQ ID NO: 7435 - DNA, 20 bp, Artificial Sequence
  MKO10007435_A_C1qbp
  gRNA
atcagtcaagaattcaacga

SEQ ID NO: 7436 - DNA, 20 bp, Artificial Sequence
  MKO10007436_A_C1qbp
  gRNA
tggcaagaagacccttgtac

SEQ ID NO: 7437 - DNA, 20 bp, Artificial Sequence
  MKO10007437_A_C1qb
  gRNA
ctcatagttctcgttcgcgt

SEQ ID NO: 7438 - DNA, 20 bp, Artificial Sequence
  MKO10007438_A_C1qb
  gRNA
cgtgattacgcatccatgtc

SEQ ID NO: 7439 - DNA, 20 bp, Artificial Sequence
  MKO10007439_A_C1qb
  gRNA
ggggcccggtgcagctgctt

SEQ ID NO: 7440 - DNA, 20 bp, Artificial Sequence
  MKO10007440_A_C1qc
  gRNA
cgtctactacacatcgcata

SEQ ID NO: 7441 - DNA, 20 bp, Artificial Sequence
  MKO10007441_A_C1qc
  gRNA
ttgtatcggccctccacacc

SEQ ID NO: 7442 - DNA, 20 bp, Artificial Sequence
  MKO10007442_A_C1qc
  gRNA
gatcccatagcagccagcgc

SEQ ID NO: 7443 - DNA, 20 bp, Artificial Sequence
  MKO10007443_A_C1ql1
  gRNA
tgtgcgacccctatcccgcg

SEQ ID NO: 7444 - DNA, 20 bp, Artificial Sequence
  MKO10007444_A_C1ql1
  gRNA
aacaactacgatgcggccag

SEQ ID NO: 7445 - DNA, 20 bp, Artificial Sequence
  MKO10007445_A_C1ql1
  gRNA
caacagcgtgatcctgcatc

SEQ ID NO: 7446 - DNA, 20 bp, Artificial Sequence
  MKO10007446_A_C1ql2
  gRNA
ccatacagcgtcgctcccgc

SEQ ID NO: 7447 - DNA, 20 bp, Artificial Sequence
  MKO10007447_A_C1ql2
  gRNA
tgagcacctcgtagccttcg

SEQ ID NO: 7448 - DNA, 20 bp, Artificial Sequence
  MKO10007448_A_C1ql2
  gRNA
taggcccctaatccggatac

SEQ ID NO: 7449 - DNA, 20 bp, Artificial Sequence
  MKO10007449_A_C1ql3
  gRNA
ctcgtagtgagccgacgtgc

SEQ ID NO: 7450 - DNA, 20 bp, Artificial Sequence
  MKO10007450_A_C1ql3
  gRNA
agccttcgtgctgccgtttg

SEQ ID NO: 7451 - DNA, 20 bp, Artificial Sequence
  MKO10007451_A_C1ql3
  gRNA
cgactatgccagtaacagtg

SEQ ID NO: 7452 - DNA, 20 bp, Artificial Sequence
  MKO10007452_A_C1ql4
  gRNA
ccgccttagacccgcgtaga

SEQ ID NO: 7453 - DNA, 20 bp, Artificial Sequence
  MKO10007453_A_C1ql4
  gRNA
attcggggtacatagccggc

SEQ ID NO: 7454 - DNA, 20 bp, Artificial Sequence
  MKO10007454_A_C1ql4
  gRNA
cgtcattctgcacctagacg

SEQ ID NO: 7455 - DNA, 20 bp, Artificial Sequence
  MKO10007455_A_C1qtnf1
  gRNA
aaactccgtgtcgaagacca

SEQ ID NO: 7456 - DNA, 20 bp, Artificial Sequence
  MKO10007456_A_C1qtnf1
  gRNA
ttaggcgagaaaggtgaccg

SEQ ID NO: 7457 - DNA, 20 bp, Artificial Sequence
  MKO10007457_A_C1qtnf1
  gRNA
agagaagtatagccctcgcc

SEQ ID NO: 7458 - DNA, 20 bp, Artificial Sequence
  MKO10007458_A_C1qtnf2
  gRNA
cgccacggaaaaggccgact

SEQ ID NO: 7459 - DNA, 20 bp, Artificial Sequence
  MKO10007459_A_C1qtnf2
  gRNA
tcgctcgcgtgggtagctct

SEQ ID NO: 7460 - DNA, 20 bp, Artificial Sequence
  MKO10007460_A_C1qtnf2
  gRNA
ctggaagtccctgcgagcaa

SEQ ID NO: 7461 - DNA, 20 bp, Artificial Sequence
  MKO10007461_A_C1qtnf3
  gRNA
tttgccgagccatgctcggg

SEQ ID NO: 7462 - DNA, 20 bp, Artificial Sequence
  MKO10007462_A_C1qtnf3
  gRNA
agatttggggcccccgtatc

SEQ ID NO: 7463 - DNA, 20 bp, Artificial Sequence
  MKO10007463_A_C1qtnf3
  gRNA
ttgcatctcacctgatacgg

SEQ ID NO: 7464 - DNA, 20 bp, Artificial Sequence
  MKO10007464_A_C1qtnf4
  gRNA
agcgccgtcgtcgtaaatca

SEQ ID NO: 7465 - DNA, 20 bp, Artificial Sequence
  MKO10007465_A_C1qtnf4
  gRNA
ttcaccgacagcgtcttgcg

SEQ ID NO: 7466 - DNA, 20 bp, Artificial Sequence
  MKO10007466_A_C1qtnf4
  gRNA
gctgatgaagaaccgcgacg

SEQ ID NO: 7467 - DNA, 20 bp, Artificial Sequence
  MKO10007467_A_C1qtnf5
  gRNA
gtgcaccgtcgcggccatca

SEQ ID NO: 7468 - DNA, 20 bp, Artificial Sequence
  MKO10007468_A_C1qtnf5
  gRNA
catcgcaccccctgagagcg

SEQ ID NO: 7469 - DNA, 20 bp, Artificial Sequence
  MKO10007469_A_C1qtnf5
  gRNA
gacggccgtgatggccgcga

SEQ ID NO: 7470 - DNA, 20 bp, Artificial Sequence
  MKO10007470_A_C1qtnf6
  gRNA
ctgcatgatgctgcgttcgc

SEQ ID NO: 7471 - DNA, 20 bp, Artificial Sequence
  MKO10007471_A_C1qtnf6
  gRNA
tcgacgatgctgtgaccccg

SEQ ID NO: 7472 - DNA, 20 bp, Artificial Sequence
  MKO10007472_A_C1qtnf6
  gRNA
acagcatcgtcgacagcctt

SEQ ID NO: 7473 - DNA, 20 bp, Artificial Sequence
  MKO10007473_A_C1qtnf7
  gRNA
ctatgtcgatacagattacc

SEQ ID NO: 7474 - DNA, 20 bp, Artificial Sequence
  MKO10007474_A_C1qtnf7
  gRNA
caagactcgtcacgtagagc

SEQ ID NO: 7475 - DNA, 20 bp, Artificial Sequence
  MKO10007475_A_C1qtnf7
  gRNA
caaatgaacttccccgttgc

SEQ ID NO: 7476 - DNA, 20 bp, Artificial Sequence
  MKO10007476_A_C1qtnf9
  gRNA
tccccgtcgctacattgtag

SEQ ID NO: 7477 - DNA, 20 bp, Artificial Sequence
  MKO10007477_A_C1qtnf9
  gRNA
ggtttgccgatggggcccat

SEQ ID NO: 7478 - DNA, 20 bp, Artificial Sequence
  MKO10007478_A_C1qtnf9
  gRNA
cacgagaagtgtattctccc

SEQ ID NO: 7479 - DNA, 20 bp, Artificial Sequence
  MKO10007479_A_C1ra
  gRNA
ctgcttctatgactatgtta

SEQ ID NO: 7480 - DNA, 20 bp, Artificial Sequence
  MKO10007480_A_C1ra
  gRNA
tcatagaagcagccttcaga

SEQ ID NO: 7481 - DNA, 20 bp, Artificial Sequence
  MKO10007481_A_C1ra
  gRNA
ctcacctacagcctggtagt

SEQ ID NO: 7482 - DNA, 20 bp, Artificial Sequence
  MKO10007482_A_C1rb
  gRNA
ctgcctctatgactatgtta

SEQ ID NO: 7483 - DNA, 20 bp, Artificial Sequence
  MKO10007483_A_C1rb
  gRNA
ctaccttaacatagtcatag

SEQ ID NO: 7484 - DNA, 20 bp, Artificial Sequence
  MKO10007484_A_C1rb
  gRNA
gggagcactcacctacagcc

SEQ ID NO: 7485 - DNA, 20 bp, Artificial Sequence
  MKO10007485_A_C1rl
  gRNA
tactcacctggcacgcattc

SEQ ID NO: 7486 - DNA, 20 bp, Artificial Sequence
  MKO10007486_A_C1rl
  gRNA
gaggttcctgaatgcgtgcc

SEQ ID NO: 7487 - DNA, 20 bp, Artificial Sequence
  MKO10007487_A_C1rl
  gRNA
ctgccaagatccttattata

SEQ ID NO: 7488 - DNA, 20 bp, Artificial Sequence
  MKO10007488_A_C1s
  gRNA
gcccgtaaaccgttcttcgt

SEQ ID NO: 7489 - DNA, 20 bp, Artificial Sequence
  MKO10007489_A_C1s
  gRNA
cagacttctccaacgaagaa

SEQ ID NO: 7490 - DNA, 20 bp, Artificial Sequence
  MKO10007490_A_C1s
  gRNA
ggtacgcctggggataatta

SEQ ID NO: 7491 - DNA, 20 bp, Artificial Sequence
  MKO10007491_A_C230052I12Rik
  gRNA
tggaccggaccggtcccatc

SEQ ID NO: 7492 - DNA, 20 bp, Artificial Sequence
  MKO10007492_A_C230052I12Rik
  gRNA
ggtccggtccacgtgccact

SEQ ID NO: 7493 - DNA, 20 bp, Artificial Sequence
  MKO10007493_A_C230052I12Rik
  gRNA
caacgcttccgtccaagaac

SEQ ID NO: 7494 - DNA, 20 bp, Artificial Sequence
  MKO10007494_A_C2cd2l
  gRNA
ttaccatggtgcgctctgat

SEQ ID NO: 7495 - DNA, 20 bp, Artificial Sequence
  MKO10007495_A_C2cd2l
  gRNA
tctccatggagacggcagcg

SEQ ID NO: 7496 - DNA, 20 bp, Artificial Sequence
  MKO10007496_A_C2cd2l
  gRNA
gtcccccgctgccgtctcca

SEQ ID NO: 7497 - DNA, 20 bp, Artificial Sequence
  MKO10007497_A_C2cd2
  gRNA
ctgggttgacttgactacac

SEQ ID NO: 7498 - DNA, 20 bp, Artificial Sequence
  MKO10007498_A_C2cd2
  gRNA
tctgagcaccaaacccacgc

SEQ ID NO: 7499 - DNA, 20 bp, Artificial Sequence
  MKO10007499_A_C2cd2
  gRNA
cagtgtagtcaagtcaaccc

SEQ ID NO: 7500 - DNA, 20 bp, Artificial Sequence
  MKO10007500_A_C2cd3
  gRNA
gtgagaacaactacccgtta

SEQ ID NO: 7501 - DNA, 20 bp, Artificial Sequence
  MKO10007501_A_C2cd3
  gRNA
cccagtctatgatcccgtca

SEQ ID NO: 7502 - DNA, 20 bp, Artificial Sequence
  MKO10007502_A_C2cd3
  gRNA
cagtttacctcgtatctgac

SEQ ID NO: 7503 - DNA, 20 bp, Artificial Sequence
  MKO10007503_A_C2cd4a
  gRNA
acttcgagcccctcgacgtc

SEQ ID NO: 7504 - DNA, 20 bp, Artificial Sequence
  MKO10007504_A_C2cd4a
  gRNA
acgccgcctcctacgctccc

SEQ ID NO: 7505 - DNA, 20 bp, Artificial Sequence
  MKO10007505_A_C2cd4a
  gRNA
cgggcgacccagacgctgcc

SEQ ID NO: 7506 - DNA, 20 bp, Artificial Sequence
  MKO10007506_A_C2cd4b
  gRNA
ggttcggccgcgcagcgcca

SEQ ID NO: 7507 - DNA, 20 bp, Artificial Sequence
  MKO10007507_A_C2cd4b
  gRNA
aagcggtgattcgagagcgc

SEQ ID NO: 7508 - DNA, 20 bp, Artificial Sequence
  MKO10007508_A_C2cd4b
  gRNA
tctgttgagccgcgcgctgc

SEQ ID NO: 7509 - DNA, 20 bp, Artificial Sequence
  MKO10007509_A_C2cd4c
  gRNA
tccgtcgccgcttgtcccgc

SEQ ID NO: 7510 - DNA, 20 bp, Artificial Sequence
  MKO10007510_A_C2cd4c
  gRNA
ccggagcatcaattgctgcg

SEQ ID NO: 7511 - DNA, 20 bp, Artificial Sequence
  MKO10007511_A_C2cd4c
  gRNA
cggccgagggcctgtatgac

SEQ ID NO: 7512 - DNA, 20 bp, Artificial Sequence
  MKO10007512_A_C2cd4d
  gRNA
cggactagtgtccgccgagc

SEQ ID NO: 7513 - DNA, 20 bp, Artificial Sequence
  MKO10007513_A_C2cd4d
  gRNA
accgggaggttccggccgcc

SEQ ID NO: 7514 - DNA, 20 bp, Artificial Sequence
  MKO10007514_A_C2cd4d
  gRNA
cgccgcgagtccttgttcca

SEQ ID NO: 7515 - DNA, 20 bp, Artificial Sequence
  MKO10007515_A_C2cd5
  gRNA
cctccacgaaggcatccgtc

SEQ ID NO: 7516 - DNA, 20 bp, Artificial Sequence
  MKO10007516_A_C2cd5
  gRNA
ccgcggagaaatcaatgttg

SEQ ID NO: 7517 - DNA, 20 bp, Artificial Sequence
  MKO10007517_A_C2cd5
  gRNA
cgtttgcactgtaagtatcg

SEQ ID NO: 7518 - DNA, 20 bp, Artificial Sequence
  MKO10007518_A_C2
  gRNA
ttggggcgacagtaccgcac

SEQ ID NO: 7519 - DNA, 20 bp, Artificial Sequence
  MKO10007519_A_C2
  gRNA
aagatactcacgtcggcaaa

SEQ ID NO: 7520 - DNA, 20 bp, Artificial Sequence
  MKO10007520_A_C2
  gRNA
gtgcggtactgtcgccccaa

SEQ ID NO: 7521 - DNA, 20 bp, Artificial Sequence
  MKO10007521_A_C330006A16Rik
  gRNA
cgcacgctagtgcgcgtcct

SEQ ID NO: 7522 - DNA, 20 bp, Artificial Sequence
  MKO10007522_A_C330006A16Rik
  gRNA
cccctccgcccgcgacgaca

SEQ ID NO: 7523 - DNA, 20 bp, Artificial Sequence
  MKO10007523_A_C330006A16Rik
  gRNA
ttgtagccagctgtcgtcgt

SEQ ID NO: 7524 - DNA, 20 bp, Artificial Sequence
  MKO10007524_A_C330007P06Rik
  gRNA
atgataattaccttcttagg

SEQ ID NO: 7525 - DNA, 20 bp, Artificial Sequence
  MKO10007525_A_C330007P06Rik
  gRNA
tctaggttatgatgaccaaa

SEQ ID NO: 7526 - DNA, 20 bp, Artificial Sequence
  MKO10007526_A_C330007P06Rik
  gRNA
agttagagaaattgcccatg

SEQ ID NO: 7527 - DNA, 20 bp, Artificial Sequence
  MKO10007527_A_C330018D20Rik
  gRNA
ttctccagccgtataaagac

SEQ ID NO: 7528 - DNA, 20 bp, Artificial Sequence
  MKO10007528_A_C330018D20Rik
  gRNA
atccccgtcttccatttgaa

SEQ ID NO: 7529 - DNA, 20 bp, Artificial Sequence
  MKO10007529_A_C330018D20Rik
  gRNA
ctcgatgcatcatcagaaat

SEQ ID NO: 7530 - DNA, 20 bp, Artificial Sequence
  MKO10007530_A_C330021F23Rik
  gRNA
atatagttattaggggcccg

SEQ ID NO: 7531 - DNA, 20 bp, Artificial Sequence
  MKO10007531_A_C330021F23Rik
  gRNA
cgtcgaaaaggtcatgctgt

SEQ ID NO: 7532 - DNA, 20 bp, Artificial Sequence
  MKO10007532_A_C330021F23Rik
  gRNA
tagagccaacagagaaacat

SEQ ID NO: 7533 - DNA, 20 bp, Artificial Sequence
  MKO10007533_A_C330027C09Rik
  gRNA
aatctgaatagtgtgctgtc

SEQ ID NO: 7534 - DNA, 20 bp, Artificial Sequence
  MKO10007534_A_C330027C09Rik
  gRNA
gagctaacaatgccttgtct

SEQ ID NO: 7535 - DNA, 20 bp, Artificial Sequence
  MKO10007535_A_C330027C09Rik
  gRNA
tttgccaatagtcctagaca

SEQ ID NO: 7536 - DNA, 20 bp, Artificial Sequence
  MKO10007536_A_C3ar1
  gRNA
gtgcgtgagctcttcgctga

SEQ ID NO: 7537 - DNA, 20 bp, Artificial Sequence
  MKO10007537_A_C3ar1
  gRNA
catgattgtcatacgtgaat

SEQ ID NO: 7538 - DNA, 20 bp, Artificial Sequence
  MKO10007538_A_C3ar1
  gRNA
agaaccgccttcgccatctg

SEQ ID NO: 7539 - DNA, 20 bp, Artificial Sequence
  MKO10007539_A_C3
  gRNA
gatgacgactgtcttgccca

SEQ ID NO: 7540 - DNA, 20 bp, Artificial Sequence
  MKO10007540_A_C3
  gRNA
acaaaggcaagatgccgtgt

SEQ ID NO: 7541 - DNA, 20 bp, Artificial Sequence
  MKO10007541_A_C3
  gRNA
gagcgaagagaccatcgtac

SEQ ID NO: 7542 - DNA, 20 bp, Artificial Sequence
  MKO10007542_A_C4a
  gRNA
ggtgaaggtatcttgtaaga

SEQ ID NO: 7543 - DNA, 20 bp, Artificial Sequence
  MKO10007543_A_C4a
  gRNA
tttggggactcccctgtcag

SEQ ID NO: 7544 - DNA, 20 bp, Artificial Sequence
  MKO10007544_A_C4a
  gRNA
ggagctgtacccccactgac

SEQ ID NO: 7545 - DNA, 20 bp, Artificial Sequence
  MKO10007545_A_C4bp
  gRNA
gtccgattcacgtcacttgc

SEQ ID NO: 7546 - DNA, 20 bp, Artificial Sequence
  MKO10007546_A_C4bp
  gRNA
gaaatctcccattctcccga

SEQ ID NO: 7547 - DNA, 20 bp, Artificial Sequence
  MKO10007547_A_C4bp
  gRNA
gaaaaacattgccgtaatcc

SEQ ID NO: 7548 - DNA, 20 bp, Artificial Sequence
  MKO10007548_A_C4b
  gRNA
taatttggggacccccctgt

SEQ ID NO: 7549 - DNA, 20 bp, Artificial Sequence
  MKO10007549_A_C4b
  gRNA
ggagctgtacccccaccgac

SEQ ID NO: 7550 - DNA, 20 bp, Artificial Sequence
  MKO10007550_A_C4b
  gRNA
ttgctcttctcttcccgacg

SEQ ID NO: 7551 - DNA, 20 bp, Artificial Sequence
  MKO10007551_A_C530008M17Rik
  gRNA
agccgacgatcccgcccgcc

SEQ ID NO: 7552 - DNA, 20 bp, Artificial Sequence
  MKO10007552_A_C530008M17Rik
  gRNA
acccgctaaggacgcgagct

SEQ ID NO: 7553 - DNA, 20 bp, Artificial Sequence
  MKO10007553_A_C530008M17Rik
  gRNA
atcgaggttgacactttcga

SEQ ID NO: 7554 - DNA, 20 bp, Artificial Sequence
  MKO10007554_A_C5ar1
  gRNA
gagagcgtttcgtatgatgc

SEQ ID NO: 7555 - DNA, 20 bp, Artificial Sequence
  MKO10007555_A_C5ar1
  gRNA
gacgggccgtcaacgccatc

SEQ ID NO: 7556 - DNA, 20 bp, Artificial Sequence
  MKO10007556_A_C5ar1
  gRNA
gcgcgtggccttgcgactcc

SEQ ID NO: 7557 - DNA, 20 bp, Artificial Sequence
  MKO10007557_A_C5ar2
  gRNA
ccgctgcaatgattacccgc

SEQ ID NO: 7558 - DNA, 20 bp, Artificial Sequence
  MKO10007558_A_C5ar2
  gRNA
ggcggcgggccatctgccgt

SEQ ID NO: 7559 - DNA, 20 bp, Artificial Sequence
  MKO10007559_A_C5ar2
  gRNA
gaggcagagaacagcgcagc

SEQ ID NO: 7560 - DNA, 20 bp, Artificial Sequence
  MKO10007560_A_C6
  gRNA
tagtagtgaacgattactat

SEQ ID NO: 7561 - DNA, 20 bp, Artificial Sequence
  MKO10007561_A_C6
  gRNA
cgataagctttgtatcaagc

SEQ ID NO: 7562 - DNA, 20 bp, Artificial Sequence
  MKO10007562_A_C6
  gRNA
tgaaacacggtatggattac

SEQ ID NO: 7563 - DNA, 20 bp, Artificial Sequence
  MKO10007563_A_C77080
  gRNA
ggagagcgcatcctccgcgg

SEQ ID NO: 7564 - DNA, 20 bp, Artificial Sequence
  MKO10007564_A_C77080
  gRNA
tgcgctgaatcatctccgag

SEQ ID NO: 7565 - DNA, 20 bp, Artificial Sequence
  MKO10007565_A_C77080
  gRNA
agtgacaaccgtcagggcgc

SEQ ID NO: 7566 - DNA, 20 bp, Artificial Sequence
  MKO10007566_A_C77370
  gRNA
cccaggatcgttgagcaccg

SEQ ID NO: 7567 - DNA, 20 bp, Artificial Sequence
  MKO10007567_A_C77370
  gRNA
atatgatgttgactcgctag

SEQ ID NO: 7568 - DNA, 20 bp, Artificial Sequence
  MKO10007568_A_C77370
  gRNA
cagcaataactttatcttgt

SEQ ID NO: 7569 - DNA, 20 bp, Artificial Sequence
  MKO10007569_A_C78339
  gRNA
tcacaactcgaagccctagc

SEQ ID NO: 7570 - DNA, 20 bp, Artificial Sequence
  MKO10007570_A_C78339
  gRNA
attcttgatcaaagctcgta

SEQ ID NO: 7571 - DNA, 20 bp, Artificial Sequence
  MKO10007571_A_C78339
  gRNA
ggaattactaaaacccgact

SEQ ID NO: 7572 - DNA, 20 bp, Artificial Sequence
  MKO10007572_A_C7
  gRNA
ataaccggtaagttctatgt

SEQ ID NO: 7573 - DNA, 20 bp, Artificial Sequence
  MKO10007573_A_C7
  gRNA
ggtgacaagcttattaattt

SEQ ID NO: 7574 - DNA, 20 bp, Artificial Sequence
  MKO10007574_A_C7
  gRNA
acagcctcgttcaggtttgc

SEQ ID NO: 7575 - DNA, 20 bp, Artificial Sequence
  MKO10007575_A_C86695
  gRNA
cacggccagcggatgccctg

SEQ ID NO: 7576 - DNA, 20 bp, Artificial Sequence
  MKO10007576_A_C86695
  gRNA
gaccctgtatagagttccac

SEQ ID NO: 7577 - DNA, 20 bp, Artificial Sequence
  MKO10007577_A_C86695
  gRNA
atttccaatgaagccgcaaa

SEQ ID NO: 7578 - DNA, 20 bp, Artificial Sequence
  MKO10007578_A_C87414
  gRNA
ttcttcatcaatggccccac

SEQ ID NO: 7579 - DNA, 20 bp, Artificial Sequence
  MKO10007579_A_C87414
  gRNA
attggtgtgtctgccagcaa

SEQ ID NO: 7580 - DNA, 20 bp, Artificial Sequence
  MKO10007580_A_C87414
  gRNA
tctgcagtgctatagtgagt

SEQ ID NO: 7581 - DNA, 20 bp, Artificial Sequence
  MKO10007581_A_C87436
  gRNA
tcgggcaccatagcgaaata

SEQ ID NO: 7582 - DNA, 20 bp, Artificial Sequence
  MKO10007582_A_C87436
  gRNA
ccccgactaccgatgcttcg

SEQ ID NO: 7583 - DNA, 20 bp, Artificial Sequence
  MKO10007583_A_C87436
  gRNA
ttcaatgatgacgtaaccac

SEQ ID NO: 7584 - DNA, 20 bp, Artificial Sequence
  MKO10007584_A_C87499
  gRNA
tcccgttgcattaaatgtcg

SEQ ID NO: 7585 - DNA, 20 bp, Artificial Sequence
  MKO10007585_A_C87499
  gRNA
gcctacctggagcgaacctt

SEQ ID NO: 7586 - DNA, 20 bp, Artificial Sequence
  MKO10007586_A_C87499
  gRNA
gctgataaagaaccccaacc

SEQ ID NO: 7587 - DNA, 20 bp, Artificial Sequence
  MKO10007587_A_C87977
  gRNA
ctaatattactcccacaaaa

SEQ ID NO: 7588 - DNA, 20 bp, Artificial Sequence
  MKO10007588_A_C87977
  gRNA
tgggttatacatttatgata

SEQ ID NO: 7589 - DNA, 20 bp, Artificial Sequence
  MKO10007589_A_C87977
  gRNA
tgcttctctgtcgtgaactc

SEQ ID NO: 7590 - DNA, 20 bp, Artificial Sequence
  MKO10007590_A_C8a
  gRNA
cgttatctccgttacacacc

SEQ ID NO: 7591 - DNA, 20 bp, Artificial Sequence
  MKO10007591_A_C8a
  gRNA
tcgctgcctgaaacgccacc

SEQ ID NO: 7592 - DNA, 20 bp, Artificial Sequence
  MKO10007592_A_C8a
  gRNA
tctcatcctccccatagtag

SEQ ID NO: 7593 - DNA, 20 bp, Artificial Sequence
  MKO10007593_A_C8b
  gRNA
ctcgatcaccggtattatgc

SEQ ID NO: 7594 - DNA, 20 bp, Artificial Sequence
  MKO10007594_A_C8b
  gRNA
gcttccgccacactccgtac

SEQ ID NO: 7595 - DNA, 20 bp, Artificial Sequence
  MKO10007595_A_C8b
  gRNA
gtgtagctttctacgttgta

SEQ ID NO: 7596 - DNA, 20 bp, Artificial Sequence
  MKO10007596_A_C8g
  gRNA
atgtgtttgagcggcgagtc

SEQ ID NO: 7597 - DNA, 20 bp, Artificial Sequence
  MKO10007597_A_C8g
  gRNA
gccgcagtctcacgggcccg

SEQ ID NO: 7598 - DNA, 20 bp, Artificial Sequence
  MKO10007598_A_C8g
  gRNA
ctcgccgctcaaacacatcc

SEQ ID NO: 7599 - DNA, 20 bp, Artificial Sequence
  MKO10007599_A_C920025E04Rik
  gRNA
atttccacaccgtcgtatcc

SEQ ID NO: 7600 - DNA, 20 bp, Artificial Sequence
  MKO10007600_A_C920025E04Rik
  gRNA
tggtcgcggtccaggagcgc

SEQ ID NO: 7601 - DNA, 20 bp, Artificial Sequence
  MKO10007601_A_C920025E04Rik
  gRNA
gaggccgggccgggatacga

SEQ ID NO: 7602 - DNA, 20 bp, Artificial Sequence
  MKO10007602_A_C9
  gRNA
cattctgcagtctatcggta

SEQ ID NO: 7603 - DNA, 20 bp, Artificial Sequence
  MKO10007603_A_C9
  gRNA
cccatgccgtgaccgagtag

SEQ ID NO: 7604 - DNA, 20 bp, Artificial Sequence
  MKO10007604_A_C9
  gRNA
tttcccattaaactgtccga

SEQ ID NO: 7605 - DNA, 20 bp, Artificial Sequence
  MKO10007605_A_CK137956
  gRNA
gcagacagcgccgagtatgc

SEQ ID NO: 7606 - DNA, 20 bp, Artificial Sequence
  MKO10007606_A_CK137956
  gRNA
aatctcgtcaccagccatta

SEQ ID NO: 7607 - DNA, 20 bp, Artificial Sequence
  MKO10007607_A_CK137956
  gRNA
ctctaccttcccgcagtatc

SEQ ID NO: 7608 - DNA, 20 bp, Artificial Sequence
  MKO10007608_A_Caap1
  gRNA
gatgctccctgatgtactga

SEQ ID NO: 7609 - DNA, 20 bp, Artificial Sequence
  MKO10007609_A_Caap1
  gRNA
tttataaggtgacaatggtt

SEQ ID NO: 7610 - DNA, 20 bp, Artificial Sequence
  MKO10007610_A_Caap1
  gRNA
ggatgaagtagaatctacac

SEQ ID NO: 7611 - DNA, 20 bp, Artificial Sequence
  MKO10007611_A_Cab39l
  gRNA
ccacagattgccttacgctg

SEQ ID NO: 7612 - DNA, 20 bp, Artificial Sequence
  MKO10007612_A_Cab39l
  gRNA
tagcataatcccacagcgta

SEQ ID NO: 7613 - DNA, 20 bp, Artificial Sequence
  MKO10007613_A_Cab39l
  gRNA
tctgtgtggaacgaacgaca

SEQ ID NO: 7614 - DNA, 20 bp, Artificial Sequence
  MKO10007614_A_Cab39
  gRNA
ctaatagggcaaaaaagacg

SEQ ID NO: 7615 - DNA, 20 bp, Artificial Sequence
  MKO10007615_A_Cab39
  gRNA
gccgtacagaatttctttca

SEQ ID NO: 7616 - DNA, 20 bp, Artificial Sequence
  MKO10007616_A_Cab39
  gRNA
tgagctgtaagtcagctacc

SEQ ID NO: 7617 - DNA, 20 bp, Artificial Sequence
  MKO10007617_A_Cabin1
  gRNA
aaattggacacgtcgccctg

SEQ ID NO: 7618 - DNA, 20 bp, Artificial Sequence
  MKO10007618_A_Cabin1
  gRNA
attccacagacgtcaacctt

SEQ ID NO: 7619 - DNA, 20 bp, Artificial Sequence
  MKO10007619_A_Cabin1
  gRNA
ccagctggcggcccagcgag

SEQ ID NO: 7620 - DNA, 20 bp, Artificial Sequence
  MKO10007620_A_Cables1
  gRNA
acgaagaggttccggcggcg

SEQ ID NO: 7621 - DNA, 20 bp, Artificial Sequence
  MKO10007621_A_Cables1
  gRNA
ccgactgccgctcgtactcc

SEQ ID NO: 7622 - DNA, 20 bp, Artificial Sequence
  MKO10007622_A_Cables1
  gRNA
ttcagatgtcgaacactctc

SEQ ID NO: 7623 - DNA, 20 bp, Artificial Sequence
  MKO10007623_A_Cables2
  gRNA
gggtatatacctctgcaccg

SEQ ID NO: 7624 - DNA, 20 bp, Artificial Sequence
  MKO10007624_A_Cables2
  gRNA
agaagaaacagaaacgccgc

SEQ ID NO: 7625 - DNA, 20 bp, Artificial Sequence
  MKO10007625_A_Cables2
  gRNA
cagtttcttacctgatccgt

SEQ ID NO: 7626 - DNA, 20 bp, Artificial Sequence
  MKO10007626_A_Cabp1
  gRNA
ggacagatcgttacgaccag

SEQ ID NO: 7627 - DNA, 20 bp, Artificial Sequence
  MKO10007627_A_Cabp1
  gRNA
tcatatctgccgtctccgcc

SEQ ID NO: 7628 - DNA, 20 bp, Artificial Sequence
  MKO10007628_A_Cabp1
  gRNA
catggcggtgcagacaagcg

SEQ ID NO: 7629 - DNA, 20 bp, Artificial Sequence
  MKO10007629_A_Cabp2
  gRNA
cgagaccgggacggctacat

SEQ ID NO: 7630 - DNA, 20 bp, Artificial Sequence
  MKO10007630_A_Cabp2
  gRNA
tgatggctgcatcagcgtag

SEQ ID NO: 7631 - DNA, 20 bp, Artificial Sequence
  MKO10007631_A_Cabp2
  gRNA
gtagcccagtgtccgcatgc

SEQ ID NO: 7632 - DNA, 20 bp, Artificial Sequence
  MKO10007632_A_Cabp4
  gRNA
gctacgcatcgccttccgag

SEQ ID NO: 7633 - DNA, 20 bp, Artificial Sequence
  MKO10007633_A_Cabp4
  gRNA
tcctatacaggatcgtgaac

SEQ ID NO: 7634 - DNA, 20 bp, Artificial Sequence
  MKO10007634_A_Cabp4
  gRNA
gcatgcagtcacctagctcg

SEQ ID NO: 7635 - DNA, 20 bp, Artificial Sequence
  MKO10007635_A_Cabp5
  gRNA
cacggttcattcggatttgc

SEQ ID NO: 7636 - DNA, 20 bp, Artificial Sequence
  MKO10007636_A_Cabp5
  gRNA
gggcaatctcatgagaacga

SEQ ID NO: 7637 - DNA, 20 bp, Artificial Sequence
  MKO10007637_A_Cabp5
  gRNA
tgaaggcatctcgcatctcc

SEQ ID NO: 7638 - DNA, 20 bp, Artificial Sequence
  MKO10007638_A_Cabp7
  gRNA
ttcaaggtattcgaccggga

SEQ ID NO: 7639 - DNA, 20 bp, Artificial Sequence
  MKO10007639_A_Cabp7
  gRNA
caccatccatgtctagccgc

SEQ ID NO: 7640 - DNA, 20 bp, Artificial Sequence
  MKO10007640_A_Cabp7
  gRNA
cactctaggtgacggccaag

SEQ ID NO: 7641 - DNA, 20 bp, Artificial Sequence
  MKO10007641_A_Cabs1
  gRNA
ctcagaaactgacaacgtca

SEQ ID NO: 7642 - DNA, 20 bp, Artificial Sequence
  MKO10007642_A_Cabs1
  gRNA
ctctatagtagataccctta

SEQ ID NO: 7643 - DNA, 20 bp, Artificial Sequence
  MKO10007643_A_Cabs1
  gRNA
aatgatgaggaatcgactga

SEQ ID NO: 7644 - DNA, 20 bp, Artificial Sequence
  MKO10007644_A_Cabyr
  gRNA
taagcgtactcggcagagac

SEQ ID NO: 7645 - DNA, 20 bp, Artificial Sequence
  MKO10007645_A_Cabyr
  gRNA
tagtcggtcttaggagtagt

SEQ ID NO: 7646 - DNA, 20 bp, Artificial Sequence
  MKO10007646_A_Cabyr
  gRNA
ggtgacaaacgtactccctt

SEQ ID NO: 7647 - DNA, 20 bp, Artificial Sequence
  MKO10007647_A_Cacfd1
  gRNA
agcgtttagcatgagcggct

SEQ ID NO: 7648 - DNA, 20 bp, Artificial Sequence
  MKO10007648_A_Cacfd1
  gRNA
agggagcctcgcacaacaac

SEQ ID NO: 7649 - DNA, 20 bp, Artificial Sequence
  MKO10007649_A_Cacfd1
  gRNA
ccgctcctagcactcccgcc

SEQ ID NO: 7650 - DNA, 20 bp, Artificial Sequence
  MKO10007650_A_Cachd1
  gRNA
cccgaatttaagtctcgtcc

SEQ ID NO: 7651 - DNA, 20 bp, Artificial Sequence
  MKO10007651_A_Cachd1
  gRNA
gcagctacgagcaccgcagt

SEQ ID NO: 7652 - DNA, 20 bp, Artificial Sequence
  MKO10007652_A_Cachd1
  gRNA
gttcaaccgctacctggatg

SEQ ID NO: 7653 - DNA, 20 bp, Artificial Sequence
  MKO10007653_A_Cacna1a
  gRNA
gacgagatgccgggccgcta

SEQ ID NO: 7654 - DNA, 20 bp, Artificial Sequence
  MKO10007654_A_Cacna1a
  gRNA
gaaccgccctcagtgtccgt

SEQ ID NO: 7655 - DNA, 20 bp, Artificial Sequence
  MKO10007655_A_Cacna1a
  gRNA
ctttgcagaatggcccgctt

SEQ ID NO: 7656 - DNA, 20 bp, Artificial Sequence
  MKO10007656_A_Cacna1b
  gRNA
tgacattccagccgttccga

SEQ ID NO: 7657 - DNA, 20 bp, Artificial Sequence
  MKO10007657_A_Cacna1b
  gRNA
agtccgtgcgcgctgcgcaa

SEQ ID NO: 7658 - DNA, 20 bp, Artificial Sequence
  MKO10007658_A_Cacna1b
  gRNA
acgctaagcgcatcaccgaa

SEQ ID NO: 7659 - DNA, 20 bp, Artificial Sequence
  MKO10007659_A_Cacna1c
  gRNA
caaccgccacacggccgccc

SEQ ID NO: 7660 - DNA, 20 bp, Artificial Sequence
  MKO10007660_A_Cacna1c
  gRNA
ctcctcgcaggttccaacta

SEQ ID NO: 7661 - DNA, 20 bp, Artificial Sequence
  MKO10007661_A_Cacna1c
  gRNA
gttggagtcgtcttccggaa

SEQ ID NO: 7662 - DNA, 20 bp, Artificial Sequence
  MKO10007662_A_Cacna1d
  gRNA
actcctgatacaagtcgaag

SEQ ID NO: 7663 - DNA, 20 bp, Artificial Sequence
  MKO10007663_A_Cacna1d
  gRNA
tgcaatcgatgctgctagac

SEQ ID NO: 7664 - DNA, 20 bp, Artificial Sequence
  MKO10007664_A_Cacna1d
  gRNA
agaccacttcgacttgtatc

SEQ ID NO: 7665 - DNA, 20 bp, Artificial Sequence
  MKO10007665_A_Cacna1e
  gRNA
gttcatacctccgtaatggc

SEQ ID NO: 7666 - DNA, 20 bp, Artificial Sequence
  MKO10007666_A_Cacna1e
  gRNA
gaccccaatgtctcgaagac

SEQ ID NO: 7667 - DNA, 20 bp, Artificial Sequence
  MKO10007667_A_Cacna1e
  gRNA
aacccacttcaacacccacg

SEQ ID NO: 7668 - DNA, 20 bp, Artificial Sequence
  MKO10007668_A_Cacna1f
  gRNA
accgacgaatgggattagta

SEQ ID NO: 7669 - DNA, 20 bp, Artificial Sequence
  MKO10007669_A_Cacna1f
  gRNA
gctcgacttcatcatcgtcg

SEQ ID NO: 7670 - DNA, 20 bp, Artificial Sequence
  MKO10007670_A_Cacna1f
  gRNA
cccagcgcctatattcgcaa

SEQ ID NO: 7671 - DNA, 20 bp, Artificial Sequence
  MKO10007671_A_Cacna1g
  gRNA
tccgtgtgctgcgaccgctc

SEQ ID NO: 7672 - DNA, 20 bp, Artificial Sequence
  MKO10007672_A_Cacna1g
  gRNA
ctcactgggcacccggttaa

SEQ ID NO: 7673 - DNA, 20 bp, Artificial Sequence
  MKO10007673_A_Cacna1g
  gRNA
gcggagctggtgtctccgca

SEQ ID NO: 7674 - DNA, 20 bp, Artificial Sequence
  MKO10007674_A_Cacna1h
  gRNA
acctgacgaaggcgctgtcc

SEQ ID NO: 7675 - DNA, 20 bp, Artificial Sequence
  MKO10007675_A_Cacna1h
  gRNA
cccctcaggcatgcgaatcc

SEQ ID NO: 7676 - DNA, 20 bp, Artificial Sequence
  MKO10007676_A_Cacna1h
  gRNA
gttcgagcacattagcatgc

SEQ ID NO: 7677 - DNA, 20 bp, Artificial Sequence
  MKO10007677_A_Cacna1i
  gRNA
aggcactccatatcgtcaca

SEQ ID NO: 7678 - DNA, 20 bp, Artificial Sequence
  MKO10007678_A_Cacna1i
  gRNA
catcatcggcgtgcagctct

SEQ ID NO: 7679 - DNA, 20 bp, Artificial Sequence
  MKO10007679_A_Cacna1i
  gRNA
gtaccagccatgtgacgata

SEQ ID NO: 7680 - DNA, 20 bp, Artificial Sequence
  MKO10007680_A_Cacna1s
  gRNA
aacaaggcccgcgggggcct

SEQ ID NO: 7681 - DNA, 20 bp, Artificial Sequence
  MKO10007681_A_Cacna1s
  gRNA
gatcttcatggcggcttcaa

SEQ ID NO: 7682 - DNA, 20 bp, Artificial Sequence
  MKO10007682_A_Cacna1s
  gRNA
tgagcacgcggaatgctcga

SEQ ID NO: 7683 - DNA, 20 bp, Artificial Sequence
  MKO10007683_A_Cacna2d1
  gRNA
ccgacttacgtgacgggcga

SEQ ID NO: 7684 - DNA, 20 bp, Artificial Sequence
  MKO10007684_A_Cacna2d1
  gRNA
gctgatcggcccctcgagcg

SEQ ID NO: 7685 - DNA, 20 bp, Artificial Sequence
  MKO10007685_A_Cacna2d1
  gRNA
gcccaacaatgcacgccaac

SEQ ID NO: 7686 - DNA, 20 bp, Artificial Sequence
  MKO10007686_A_Cacna2d2
  gRNA
cggtgcggaccgctcgcccc

SEQ ID NO: 7687 - DNA, 20 bp, Artificial Sequence
  MKO10007687_A_Cacna2d2
  gRNA
ctcggacctgcggcgcttct

SEQ ID NO: 7688 - DNA, 20 bp, Artificial Sequence
  MKO10007688_A_Cacna2d2
  gRNA
tgatgttgtcctgccagcga

SEQ ID NO: 7689 - DNA, 20 bp, Artificial Sequence
  MKO10007689_A_Cacna2d3
  gRNA
gcccgagtacttggcagcga

SEQ ID NO: 7690 - DNA, 20 bp, Artificial Sequence
  MKO10007690_A_Cacna2d3
  gRNA
gatgttccacaagaagtccg

SEQ ID NO: 7691 - DNA, 20 bp, Artificial Sequence
  MKO10007691_A_Cacna2d3
  gRNA
cctttgttgtacatgttcgt

SEQ ID NO: 7692 - DNA, 20 bp, Artificial Sequence
  MKO10007692_A_Cacna2d4
  gRNA
gttgtacagattcctgccga

SEQ ID NO: 7693 - DNA, 20 bp, Artificial Sequence
  MKO10007693_A_Cacna2d4
  gRNA
caggttgctgaagtgcgcgt

SEQ ID NO: 7694 - DNA, 20 bp, Artificial Sequence
  MKO10007694_A_Cacna2d4
  gRNA
ccagtttaactactacaact

SEQ ID NO: 7695 - DNA, 20 bp, Artificial Sequence
  MKO10007695_A_Cacnb1
  gRNA
ctgtccagtttgaccgggct

SEQ ID NO: 7696 - DNA, 20 bp, Artificial Sequence
  MKO10007696_A_Cacnb1
  gRNA
tcaccttggctttctcgagc

SEQ ID NO: 7697 - DNA, 20 bp, Artificial Sequence
  MKO10007697_A_Cacnb1
  gRNA
gtccgaacagcaaaagccac

SEQ ID NO: 7698 - DNA, 20 bp, Artificial Sequence
  MKO10007698_A_Cacnb2
  gRNA
caccggaacgtcatcctcct

SEQ ID NO: 7699 - DNA, 20 bp, Artificial Sequence
  MKO10007699_A_Cacnb2
  gRNA
ctggcggacaaaactgtttg

SEQ ID NO: 7700 - DNA, 20 bp, Artificial Sequence
  MKO10007700_A_Cacnb2
  gRNA
tgacgttccggtgcctggca

SEQ ID NO: 7701 - DNA, 20 bp, Artificial Sequence
  MKO10007701_A_Cacnb3
  gRNA
gtcggttgccaatgtcaccc

SEQ ID NO: 7702 - DNA, 20 bp, Artificial Sequence
  MKO10007702_A_Cacnb3
  gRNA
ggagagtgcccggcgagaag

SEQ ID NO: 7703 - DNA, 20 bp, Artificial Sequence
  MKO10007703_A_Cacnb3
  gRNA
gatcgggaggctagtgaaag

SEQ ID NO: 7704 - DNA, 20 bp, Artificial Sequence
  MKO10007704_A_Cacnb4
  gRNA
gaacgggcacatcttcgtcc

SEQ ID NO: 7705 - DNA, 20 bp, Artificial Sequence
  MKO10007705_A_Cacnb4
  gRNA
gtccgatggcctgcttgtat

SEQ ID NO: 7706 - DNA, 20 bp, Artificial Sequence
  MKO10007706_A_Cacnb4
  gRNA
atcggactccgatgtctcct

SEQ ID NO: 7707 - DNA, 20 bp, Artificial Sequence
  MKO10007707_A_Cacng1
  gRNA
cacacgaaccttcgctgttt

SEQ ID NO: 7708 - DNA, 20 bp, Artificial Sequence
  MKO10007708_A_Cacng1
  gRNA
gaagcgtatgattgacagcg

SEQ ID NO: 7709 - DNA, 20 bp, Artificial Sequence
  MKO10007709_A_Cacng1
  gRNA
gcaccacaatgaaacgtgcg

SEQ ID NO: 7710 - DNA, 20 bp, Artificial Sequence
  MKO10007710_A_Cacng2
  gRNA
gtccttcatcatcgccgaga

SEQ ID NO: 7711 - DNA, 20 bp, Artificial Sequence
  MKO10007711_A_Cacng2
  gRNA
gcttcgtagtccgcgtcttc

SEQ ID NO: 7712 - DNA, 20 bp, Artificial Sequence
  MKO10007712_A_Cacng2
  gRNA
ttatgacccattccggatta

SEQ ID NO: 7713 - DNA, 20 bp, Artificial Sequence
  MKO10007713_A_Cacng3
  gRNA
ttgcgcgcctgccgccctac

SEQ ID NO: 7714 - DNA, 20 bp, Artificial Sequence
  MKO10007714_A_Cacng3
  gRNA
agagtcattgcataacaatc

SEQ ID NO: 7715 - DNA, 20 bp, Artificial Sequence
  MKO10007715_A_Cacng3
  gRNA
cattaaactaaaagctgcga

SEQ ID NO: 7716 - DNA, 20 bp, Artificial Sequence
  MKO10007716_A_Cacng4
  gRNA
accatggtgcgatgcgaccg

SEQ ID NO: 7717 - DNA, 20 bp, Artificial Sequence
  MKO10007717_A_Cacng4
  gRNA
cgtcgccggtacctgtagct

SEQ ID NO: 7718 - DNA, 20 bp, Artificial Sequence
  MKO10007718_A_Cacng4
  gRNA
gtcacacgggagtcgtccgc

SEQ ID NO: 7719 - DNA, 20 bp, Artificial Sequence
  MKO10007719_A_Cacng5
  gRNA
tcgggcacatccgtccgcac

SEQ ID NO: 7720 - DNA, 20 bp, Artificial Sequence
  MKO10007720_A_Cacng5
  gRNA
agcaactgctccgattactc

SEQ ID NO: 7721 - DNA, 20 bp, Artificial Sequence
  MKO10007721_A_Cacng5
  gRNA
ggatgtgcccgatgttgctc

SEQ ID NO: 7722 - DNA, 20 bp, Artificial Sequence
  MKO10007722_A_Cacng6
  gRNA
ggcaatcgtgggtgctacgc

SEQ ID NO: 7723 - DNA, 20 bp, Artificial Sequence
  MKO10007723_A_Cacng6
  gRNA
agaccgacgccggacagctg

SEQ ID NO: 7724 - DNA, 20 bp, Artificial Sequence
  MKO10007724_A_Cacng6
  gRNA
cgctggtctaatcctgctgc

SEQ ID NO: 7725 - DNA, 20 bp, Artificial Sequence
  MKO10007725_A_Cacng7
  gRNA
accattcttgcgttcgtttc

SEQ ID NO: 7726 - DNA, 20 bp, Artificial Sequence
  MKO10007726_A_Cacng7
  gRNA
agagatgtatcgcccgcacc

SEQ ID NO: 7727 - DNA, 20 bp, Artificial Sequence
  MKO10007727_A_Cacng7
  gRNA
acgtcgctagagatgtcgga

SEQ ID NO: 7728 - DNA, 20 bp, Artificial Sequence
  MKO10007728_A_Cacng8
  gRNA
acgccgcggcctctttggac

SEQ ID NO: 7729 - DNA, 20 bp, Artificial Sequence
  MKO10007729_A_Cacng8
  gRNA
cgcacgcccctacacgggcg

SEQ ID NO: 7730 - DNA, 20 bp, Artificial Sequence
  MKO10007730_A_Cacng8
  gRNA
ggactacgaccacgacagcg

SEQ ID NO: 7731 - DNA, 20 bp, Artificial Sequence
  MKO10007731_A_Cactin
  gRNA
gtaagggtcacaggcgctcg

SEQ ID NO: 7732 - DNA, 20 bp, Artificial Sequence
  MKO10007732_A_Cactin
  gRNA
agctaagcccatcgacctcc

SEQ ID NO: 7733 - DNA, 20 bp, Artificial Sequence
  MKO10007733_A_Cactin
  gRNA
acgagcgcctgtgaccctta

SEQ ID NO: 7734 - DNA, 20 bp, Artificial Sequence
  MKO10007734_A_Cacul1
  gRNA
aggctggcggaaactgtccg

SEQ ID NO: 7735 - DNA, 20 bp, Artificial Sequence
  MKO10007735_A_Cacul1
  gRNA
ttctcggcctggatccggga

SEQ ID NO: 7736 - DNA, 20 bp, Artificial Sequence
  MKO10007736_A_Cacul1
  gRNA
gtatatagtcaccaggactc

SEQ ID NO: 7737 - DNA, 20 bp, Artificial Sequence
  MKO10007737_A_Cacybp
  gRNA
cacctgatggacgccagtca

SEQ ID NO: 7738 - DNA, 20 bp, Artificial Sequence
  MKO10007738_A_Cacybp
  gRNA
ggtgcccactgagaacgtgc

SEQ ID NO: 7739 - DNA, 20 bp, Artificial Sequence
  MKO10007739_A_Cacybp
  gRNA
ttataggtcatttgatcttc

SEQ ID NO: 7740 - DNA, 20 bp, Artificial Sequence
  MKO10007740_A_Cadm1
  gRNA
atatcgatcatcaagttacg

SEQ ID NO: 7741 - DNA, 20 bp, Artificial Sequence
  MKO10007741_A_Cadm1
  gRNA
gcaagccagcgacgaccatc

SEQ ID NO: 7742 - DNA, 20 bp, Artificial Sequence
  MKO10007742_A_Cadm1
  gRNA
actgacgaatgtctcaatct

SEQ ID NO: 7743 - DNA, 20 bp, Artificial Sequence
  MKO10007743_A_Cadm2
  gRNA
tcgagctggttcgcgcttct

SEQ ID NO: 7744 - DNA, 20 bp, Artificial Sequence
  MKO10007744_A_Cadm2
  gRNA
agcctgcggctgatataaga

SEQ ID NO: 7745 - DNA, 20 bp, Artificial Sequence
  MKO10007745_A_Cadm2
  gRNA
aaccatcttatatcagccgc

SEQ ID NO: 7746 - DNA, 20 bp, Artificial Sequence
  MKO10007746_A_Cadm3
  gRNA
gctgaatccgattatctcga

SEQ ID NO: 7747 - DNA, 20 bp, Artificial Sequence
  MKO10007747_A_Cadm3
  gRNA
gctcagcagaccctatactt

SEQ ID NO: 7748 - DNA, 20 bp, Artificial Sequence
  MKO10007748_A_Cadm3
  gRNA
ccccagcccttcgagataat

SEQ ID NO: 7749 - DNA, 20 bp, Artificial Sequence
  MKO10007749_A_Cadm4
  gRNA
gcgctggtatcgggatcgca

SEQ ID NO: 7750 - DNA, 20 bp, Artificial Sequence
  MKO10007750_A_Cadm4
  gRNA
accgctgcggggcgcgaccg

SEQ ID NO: 7751 - DNA, 20 bp, Artificial Sequence
  MKO10007751_A_Cadm4
  gRNA
cgtcgtccttgcgatccaca

SEQ ID NO: 7752 - DNA, 20 bp, Artificial Sequence
  MKO10007752_A_Cadps2
  gRNA
tcgcccctcgctgagtaccg

SEQ ID NO: 7753 - DNA, 20 bp, Artificial Sequence
  MKO10007753_A_Cadps2
  gRNA
gctcgacccgtcttccagcg

SEQ ID NO: 7754 - DNA, 20 bp, Artificial Sequence
  MKO10007754_A_Cadps2
  gRNA
ccaaatatgacgccatttac

SEQ ID NO: 7755 - DNA, 20 bp, Artificial Sequence
  MKO10007755_A_Cadps
  gRNA
agacaggcgcgctccagacg

SEQ ID NO: 7756 - DNA, 20 bp, Artificial Sequence
  MKO10007756_A_Cadps
  gRNA
tccttctcgctcaccaccga

SEQ ID NO: 7757 - DNA, 20 bp, Artificial Sequence
  MKO10007757_A_Cadps
  gRNA
aagtttgatgccatctaccg

SEQ ID NO: 7758 - DNA, 20 bp, Artificial Sequence
  MKO10007758_A_Cad
  gRNA
atgccgtagttgccgatgag

SEQ ID NO: 7759 - DNA, 20 bp, Artificial Sequence
  MKO10007759_A_Cad
  gRNA
actccacgggtattcaatgc

SEQ ID NO: 7760 - DNA, 20 bp, Artificial Sequence
  MKO10007760_A_Cad
  gRNA
ccccctgcattgaatacccg

SEQ ID NO: 7761 - DNA, 20 bp, Artificial Sequence
  MKO10007761_A_Cage1
  gRNA
ggtccattacgtgcgcttac

SEQ ID NO: 7762 - DNA, 20 bp, Artificial Sequence
  MKO10007762_A_Cage1
  gRNA
tttcctgtaagcgcacgtaa

SEQ ID NO: 7763 - DNA, 20 bp, Artificial Sequence
  MKO10007763_A_Cage1
  gRNA
agaagtgccgtcgtagatgt

SEQ ID NO: 7764 - DNA, 20 bp, Artificial Sequence
  MKO10007764_A_Calb1
  gRNA
gcttctgcaggcgcgaaaga

SEQ ID NO: 7765 - DNA, 20 bp, Artificial Sequence
  MKO10007765_A_Calb1
  gRNA
catcgaaaccgaggaactta

SEQ ID NO: 7766 - DNA, 20 bp, Artificial Sequence
  MKO10007766_A_Calb1
  gRNA
ctcgctcaccttaagttcct

SEQ ID NO: 7767 - DNA, 20 bp, Artificial Sequence
  MKO10007767_A_Calb2
  gRNA
ctctccaaaattgtcgctct

SEQ ID NO: 7768 - DNA, 20 bp, Artificial Sequence
  MKO10007768_A_Calb2
  gRNA
atgtccaagagcgacaattt

SEQ ID NO: 7769 - DNA, 20 bp, Artificial Sequence
  MKO10007769_A_Calb2
  gRNA
cacctccataaactcagcgc

SEQ ID NO: 7770 - DNA, 20 bp, Artificial Sequence
  MKO10007770_A_Calca
  gRNA
attcccacaccgcttagatc

SEQ ID NO: 7771 - DNA, 20 bp, Artificial Sequence
  MKO10007771_A_Calca
  gRNA
tgaagaagaagttcgcctgc

SEQ ID NO: 7772 - DNA, 20 bp, Artificial Sequence
  MKO10007772_A_Calca
  gRNA
cttcaaccccaattgaagtt

SEQ ID NO: 7773 - DNA, 20 bp, Artificial Sequence
  MKO10007773_A_Calcb
  gRNA
tttacctgaaaggggcagcc

SEQ ID NO: 7774 - DNA, 20 bp, Artificial Sequence
  MKO10007774_A_Calcb
  gRNA
cgccgagggtgcccaggtct

SEQ ID NO: 7775 - DNA, 20 bp, Artificial Sequence
  MKO10007775_A_Calcb
  gRNA
tttggagagcagcctagacc

SEQ ID NO: 7776 - DNA, 20 bp, Artificial Sequence
  MKO10007776_A_Calcoco1
  gRNA
cgtgtgataatctcgaacgc

SEQ ID NO: 7777 - DNA, 20 bp, Artificial Sequence
  MKO10007777_A_Calcoco1
  gRNA
ggcggttcacataccggaac

SEQ ID NO: 7778 - DNA, 20 bp, Artificial Sequence
  MKO10007778_A_Calcoco1
  gRNA
gagattatcacacgttcgtg

SEQ ID NO: 7779 - DNA, 20 bp, Artificial Sequence
  MKO10007779_A_Calcoco2
  gRNA
gtgcagatcattccaccaat

SEQ ID NO: 7780 - DNA, 20 bp, Artificial Sequence
  MKO10007780_A_Calcoco2
  gRNA
cagcaggaaatccaattcaa

SEQ ID NO: 7781 - DNA, 20 bp, Artificial Sequence
  MKO10007781_A_Calcoco2
  gRNA
taagaccttagaacacaaag

SEQ ID NO: 7782 - DNA, 20 bp, Artificial Sequence
  MKO10007782_A_Calcrl
  gRNA
ccagcatagccatccgtccc

SEQ ID NO: 7783 - DNA, 20 bp, Artificial Sequence
  MKO10007783_A_Calcrl
  gRNA
gccgaaaccagtgtccatct

SEQ ID NO: 7784 - DNA, 20 bp, Artificial Sequence
  MKO10007784_A_Calcrl
  gRNA
atccggatagtaatagaaca

SEQ ID NO: 7785 - DNA, 20 bp, Artificial Sequence
  MKO10007785_A_Calcr
  gRNA
atctccgcaaaccgaagatg

SEQ ID NO: 7786 - DNA, 20 bp, Artificial Sequence
  MKO10007786_A_Calcr
  gRNA
gggtgaacctgttcacgaga

SEQ ID NO: 7787 - DNA, 20 bp, Artificial Sequence
  MKO10007787_A_Calcr
  gRNA
gtctgtactgcaaccgcacc

SEQ ID NO: 7788 - DNA, 20 bp, Artificial Sequence
  MKO10007788_A_Cald1
  gRNA
gagacgtcaaaaacgccttc

SEQ ID NO: 7789 - DNA, 20 bp, Artificial Sequence
  MKO10007789_A_Cald1
  gRNA
ctgccagggaacggcgccgc

SEQ ID NO: 7790 - DNA, 20 bp, Artificial Sequence
  MKO10007790_A_Cald1
  gRNA
gaggagctgcgccgacgccg

SEQ ID NO: 7791 - DNA, 20 bp, Artificial Sequence
  MKO10007791_A_Calhm1
  gRNA
gaccacattactagcgttcg

SEQ ID NO: 7792 - DNA, 20 bp, Artificial Sequence
  MKO10007792_A_Calhm1
  gRNA
taccacgaacgctagtaatg

SEQ ID NO: 7793 - DNA, 20 bp, Artificial Sequence
  MKO10007793_A_Calhm1
  gRNA
gtccttggcccggcgacctg

SEQ ID NO: 7794 - DNA, 20 bp, Artificial Sequence
  MKO10007794_A_Calhm2
  gRNA
tagtcgccgagtgccagtac

SEQ ID NO: 7795 - DNA, 20 bp, Artificial Sequence
  MKO10007795_A_Calhm2
  gRNA
caacctatcgagcttccgag

SEQ ID NO: 7796 - DNA, 20 bp, Artificial Sequence
  MKO10007796_A_Calhm2
  gRNA
ggctcagtaccgtaccaacg

SEQ ID NO: 7797 - DNA, 20 bp, Artificial Sequence
  MKO10007797_A_Calm1
  gRNA
cgtcaccatctttatcgaat

SEQ ID NO: 7798 - DNA, 20 bp, Artificial Sequence
  MKO10007798_A_Calm1
  gRNA
gacggacaagtcaactatga

SEQ ID NO: 7799 - DNA, 20 bp, Artificial Sequence
  MKO10007799_A_Calm1
  gRNA
ggggaccgtcatgcggtcac

SEQ ID NO: 7800 - DNA, 20 bp, Artificial Sequence
  MKO10007800_A_Calm2
  gRNA
gacggtcaggtaaactacga

SEQ ID NO: 7801 - DNA, 20 bp, Artificial Sequence
  MKO10007801_A_Calm2
  gRNA
gccttaccttatcaaacaca

SEQ ID NO: 7802 - DNA, 20 bp, Artificial Sequence
  MKO10007802_A_Calm2
  gRNA
catctgttaacttctcgcca

SEQ ID NO: 7803 - DNA, 20 bp, Artificial Sequence
  MKO10007803_A_Calm3
  gRNA
gatggccaggtcaattatga

SEQ ID NO: 7804 - DNA, 20 bp, Artificial Sequence
  MKO10007804_A_Calm3
  gRNA
actcaccttcataattgacc

SEQ ID NO: 7805 - DNA, 20 bp, Artificial Sequence
  MKO10007805_A_Calm3
  gRNA
catctccatccttgtcgaag

SEQ ID NO: 7806 - DNA, 20 bp, Artificial Sequence
  MKO10007806_A_Calm4
  gRNA
caagttcctcgacgctgata

SEQ ID NO: 7807 - DNA, 20 bp, Artificial Sequence
  MKO10007807_A_Calm4
  gRNA
gttaggcgagtccctttccc

SEQ ID NO: 7808 - DNA, 20 bp, Artificial Sequence
  MKO10007808_A_Calm4
  gRNA
gctggaggacatgatccgtg

SEQ ID NO: 7809 - DNA, 20 bp, Artificial Sequence
  MKO10007809_A_Calm5
  gRNA
ggatggccatatcaacgtcc

SEQ ID NO: 7810 - DNA, 20 bp, Artificial Sequence
  MKO10007810_A_Calm5
  gRNA
gatgggagagccgctttccc

SEQ ID NO: 7811 - DNA, 20 bp, Artificial Sequence
  MKO10007811_A_Calm5
  gRNA
aaggtacagagatgtctcac

SEQ ID NO: 7812 - DNA, 20 bp, Artificial Sequence
  MKO10007812_A_Calml3
  gRNA
tgccatccttgtcgaacact

SEQ ID NO: 7813 - DNA, 20 bp, Artificial Sequence
  MKO10007813_A_Calml3
  gRNA
gcaaatcgccgagttcaaag

SEQ ID NO: 7814 - DNA, 20 bp, Artificial Sequence
  MKO10007814_A_Calml3
  gRNA
agtggacgaaatgatacagg

SEQ ID NO: 7815 - DNA, 20 bp, Artificial Sequence
  MKO10007815_A_Calml4
  gRNA
ctcccttagtagtctcgcac

SEQ ID NO: 7816 - DNA, 20 bp, Artificial Sequence
  MKO10007816_A_Calml4
  gRNA
attcctgtgcgagactacta

SEQ ID NO: 7817 - DNA, 20 bp, Artificial Sequence
  MKO10007817_A_Calml4
  gRNA
acctaccattaatttggtcc

SEQ ID NO: 7818 - DNA, 20 bp, Artificial Sequence
  MKO10007818_A_Caln1
  gRNA
atagccagctccacttcgct

SEQ ID NO: 7819 - DNA, 20 bp, Artificial Sequence
  MKO10007819_A_Caln1
  gRNA
cgacatgcagagagtcacgc

SEQ ID NO: 7820 - DNA, 20 bp, Artificial Sequence
  MKO10007820_A_Caln1
  gRNA
gcagttggctaatatctccg

SEQ ID NO: 7821 - DNA, 20 bp, Artificial Sequence
  MKO10007821_A_Calr3
  gRNA
tactgcgtcaggtagccagc

SEQ ID NO: 7822 - DNA, 20 bp, Artificial Sequence
  MKO10007822_A_Calr3
  gRNA
aagaccagatctttcttacg

SEQ ID NO: 7823 - DNA, 20 bp, Artificial Sequence
  MKO10007823_A_Calr3
  gRNA
gtgccagcaagccgagtgac

SEQ ID NO: 7824 - DNA, 20 bp, Artificial Sequence
  MKO10007824_A_Calr4
  gRNA
aaataaaagacccctacgcc

SEQ ID NO: 7825 - DNA, 20 bp, Artificial Sequence
  MKO10007825_A_Calr4
  gRNA
agttctacgccctttccacc

SEQ ID NO: 7826 - DNA, 20 bp, Artificial Sequence
  MKO10007826_A_Calr4
  gRNA
atcgcctcattccagtcatc

SEQ ID NO: 7827 - DNA, 20 bp, Artificial Sequence
  MKO10007827_A_Calr
  gRNA
tacgtgaagctgtttccgag

SEQ ID NO: 7828 - DNA, 20 bp, Artificial Sequence
  MKO10007828_A_Calr
  gRNA
tacataggtccggacatctg

SEQ ID NO: 7829 - DNA, 20 bp, Artificial Sequence
  MKO10007829_A_Calr
  gRNA
cagatgcctggaccaaccgc

SEQ ID NO: 7830 - DNA, 20 bp, Artificial Sequence
  MKO10007830_A_Calu
  gRNA
catgaaagacatagtcgtgc

SEQ ID NO: 7831 - DNA, 20 bp, Artificial Sequence
  MKO10007831_A_Calu
  gRNA
tttcgagataagaaccggga

SEQ ID NO: 7832 - DNA, 20 bp, Artificial Sequence
  MKO10007832_A_Calu
  gRNA
gacagagcgagaacagttcg

SEQ ID NO: 7833 - DNA, 20 bp, Artificial Sequence
  MKO10007833_A_Caly
  gRNA
aaacaactaccggaccgcca

SEQ ID NO: 7834 - DNA, 20 bp, Artificial Sequence
  MKO10007834_A_Caly
  gRNA
cgaacgccaccgcagcatcc

SEQ ID NO: 7835 - DNA, 20 bp, Artificial Sequence
  MKO10007835_A_Caly
  gRNA
tcagccgtcattctcagacc

SEQ ID NO: 7836 - DNA, 20 bp, Artificial Sequence
  MKO10007836_A_Camk1d
  gRNA
agaactcttcgatcggatag

SEQ ID NO: 7837 - DNA, 20 bp, Artificial Sequence
  MKO10007837_A_Camk1d
  gRNA
cttatactacagtcaagacg

SEQ ID NO: 7838 - DNA, 20 bp, Artificial Sequence
  MKO10007838_A_Camk1d
  gRNA
gatgtgatgtccacggcctg

SEQ ID NO: 7839 - DNA, 20 bp, Artificial Sequence
  MKO10007839_A_Camk1g
  gRNA
ctggactcacccacgtagcc

SEQ ID NO: 7840 - DNA, 20 bp, Artificial Sequence
  MKO10007840_A_Camk1g
  gRNA
gagcaccacccactactacc

SEQ ID NO: 7841 - DNA, 20 bp, Artificial Sequence
  MKO10007841_A_Camk1g
  gRNA
tttgaccggatcctagagcg

SEQ ID NO: 7842 - DNA, 20 bp, Artificial Sequence
  MKO10007842_A_Camk1
  gRNA
agagctgtttgaccgaattg

SEQ ID NO: 7843 - DNA, 20 bp, Artificial Sequence
  MKO10007843_A_Camk1
  gRNA
tgtcaagtacctgcacgacc

SEQ ID NO: 7844 - DNA, 20 bp, Artificial Sequence
  MKO10007844_A_Camk1
  gRNA
catccagactgtagtacagc

SEQ ID NO: 7845 - DNA, 20 bp, Artificial Sequence
  MKO10007845_A_Camk2a
  gRNA
ctaccttacagtgcgcaaac

SEQ ID NO: 7846 - DNA, 20 bp, Artificial Sequence
  MKO10007846_A_Camk2a
  gRNA
aatagaatcgatgaaagtcc

SEQ ID NO: 7847 - DNA, 20 bp, Artificial Sequence
  MKO10007847_A_Camk2a
  gRNA
cacaggaagatgtgcgaccc

SEQ ID NO: 7848 - DNA, 20 bp, Artificial Sequence
  MKO10007848_A_Camk2b
  gRNA
tgccaatatcctcgtatagc

SEQ ID NO: 7849 - DNA, 20 bp, Artificial Sequence
  MKO10007849_A_Camk2b
  gRNA
cgacgagtaccagctatacg

SEQ ID NO: 7850 - DNA, 20 bp, Artificial Sequence
  MKO10007850_A_Camk2b
  gRNA
gcacttacagatcgaagacc

SEQ ID NO: 7851 - DNA, 20 bp, Artificial Sequence
  MKO10007851_A_Camk2d
  gRNA
ctcaaagagctgatactcgt

SEQ ID NO: 7852 - DNA, 20 bp, Artificial Sequence
  MKO10007852_A_Camk2d
  gRNA
cgacgagtatcagctctttg

SEQ ID NO: 7853 - DNA, 20 bp, Artificial Sequence
  MKO10007853_A_Camk2d
  gRNA
gagacttcacgacagtatat

SEQ ID NO: 7854 - DNA, 20 bp, Artificial Sequence
  MKO10007854_A_Camk2g
  gRNA
accaagaagttgtccgcccg

SEQ ID NO: 7855 - DNA, 20 bp, Artificial Sequence
  MKO10007855_A_Camk2g
  gRNA
tgccgagctcctcgaaaagc

SEQ ID NO: 7856 - DNA, 20 bp, Artificial Sequence
  MKO10007856_A_Camk2g
  gRNA
acctcgggcggacaacttct

SEQ ID NO: 7857 - DNA, 20 bp, Artificial Sequence
  MKO10007857_A_Camk2n1
  gRNA
gatcttctcgtgccgcctgc

SEQ ID NO: 7858 - DNA, 20 bp, Artificial Sequence
  MKO10007858_A_Camk2n1
  gRNA
gctcagcttctcgtcgccgt

SEQ ID NO: 7859 - DNA, 20 bp, Artificial Sequence
  MKO10007859_A_Camk2n1
  gRNA
gctgaaaaccatgaccgaca

SEQ ID NO: 7860 - DNA, 20 bp, Artificial Sequence
  MKO10007860_A_Camk2n2
  gRNA
cggcgcgtctacactccgga

SEQ ID NO: 7861 - DNA, 20 bp, Artificial Sequence
  MKO10007861_A_Camk2n2
  gRNA
ccggatagacgacgtgctga

SEQ ID NO: 7862 - DNA, 20 bp, Artificial Sequence
  MKO10007862_A_Camk2n2
  gRNA
gccgcgtacctctcttggct

SEQ ID NO: 7863 - DNA, 20 bp, Artificial Sequence
  MKO10007863_A_Camk4
  gRNA
atactacagtgagcgcgatg

SEQ ID NO: 7864 - DNA, 20 bp, Artificial Sequence
  MKO10007864_A_Camk4
  gRNA
tgacgcggtgaagcagatcc

SEQ ID NO: 7865 - DNA, 20 bp, Artificial Sequence
  MKO10007865_A_Camk4
  gRNA
tgttcgggtgtgagagacgc

SEQ ID NO: 7866 - DNA, 20 bp, Artificial Sequence
  MKO10007866_A_Camkk1
  gRNA
acaggccgtcctccccccag

SEQ ID NO: 7867 - DNA, 20 bp, Artificial Sequence
  MKO10007867_A_Camkk1
  gRNA
tctcctgatacacacgctcc

SEQ ID NO: 7868 - DNA, 20 bp, Artificial Sequence
  MKO10007868_A_Camkk1
  gRNA
tctgtcttcactttcgttgt

SEQ ID NO: 7869 - DNA, 20 bp, Artificial Sequence
  MKO10007869_A_Camkk2
  gRNA
ccccatcgagcaagtgtacc

SEQ ID NO: 7870 - DNA, 20 bp, Artificial Sequence
  MKO10007870_A_Camkk2
  gRNA
tcatcccaacgtggtgaagc

SEQ ID NO: 7871 - DNA, 20 bp, Artificial Sequence
  MKO10007871_A_Camkk2
  gRNA
caaaaagaagctgatccgac

SEQ ID NO: 7872 - DNA, 20 bp, Artificial Sequence
  MKO10007872_A_Camkmt
  gRNA
ccaaatacagcatctccgta

SEQ ID NO: 7873 - DNA, 20 bp, Artificial Sequence
  MKO10007873_A_Camkmt
  gRNA
tctaggcatctggccatccg

SEQ ID NO: 7874 - DNA, 20 bp, Artificial Sequence
  MKO10007874_A_Camkmt
  gRNA
ccttacggagatgctgtatt

SEQ ID NO: 7875 - DNA, 20 bp, Artificial Sequence
  MKO10007875_A_Camkv
  gRNA
ccttgcggccatcacgcttc

SEQ ID NO: 7876 - DNA, 20 bp, Artificial Sequence
  MKO10007876_A_Camkv
  gRNA
ctcgctccgagtagtagccc

SEQ ID NO: 7877 - DNA, 20 bp, Artificial Sequence
  MKO10007877_A_Camkv
  gRNA
actcgctcaagattgtgcac

SEQ ID NO: 7878 - DNA, 20 bp, Artificial Sequence
  MKO10007878_A_Caml
  gRNA
actccgagcaacgcatcaac

SEQ ID NO: 7879 - DNA, 20 bp, Artificial Sequence
  MKO10007879_A_Caml
  gRNA
ggaaagacccgcgacgccgt

SEQ ID NO: 7880 - DNA, 20 bp, Artificial Sequence
  MKO10007880_A_Caml
  gRNA
gggtgcgctctgctcgctct

SEQ ID NO: 7881 - DNA, 20 bp, Artificial Sequence
  MKO10007881_A_Camp
  gRNA
caccaatctctaccgtctcc

SEQ ID NO: 7882 - DNA, 20 bp, Artificial Sequence
  MKO10007882_A_Camp
  gRNA
taaggtggtgaagcagtgta

SEQ ID NO: 7883 - DNA, 20 bp, Artificial Sequence
  MKO10007883_A_Camp
  gRNA
agcctggtgcacagcccttt

SEQ ID NO: 7884 - DNA, 20 bp, Artificial Sequence
  MKO10007884_A_Camsap1
  gRNA
cgatgtaaaacgggtctcgg

SEQ ID NO: 7885 - DNA, 20 bp, Artificial Sequence
  MKO10007885_A_Camsap1
  gRNA
gggcatccaccatcgccatg

SEQ ID NO: 7886 - DNA, 20 bp, Artificial Sequence
  MKO10007886_A_Camsap1
  gRNA
gtcaccctacttcccgttgt

SEQ ID NO: 7887 - DNA, 20 bp, Artificial Sequence
  MKO10007887_A_Camsap2
  gRNA
tccagcgcgacagtacagct

SEQ ID NO: 7888 - DNA, 20 bp, Artificial Sequence
  MKO10007888_A_Camsap2
  gRNA
ctttatagaaaatgtgcccg

SEQ ID NO: 7889 - DNA, 20 bp, Artificial Sequence
  MKO10007889_A_Camsap2
  gRNA
agatctgccctatgatattg

SEQ ID NO: 7890 - DNA, 20 bp, Artificial Sequence
  MKO10007890_A_Camsap3
  gRNA
gttacctgctcccccgaatg

SEQ ID NO: 7891 - DNA, 20 bp, Artificial Sequence
  MKO10007891_A_Camsap3
  gRNA
ctacaccgatcagtacgcac

SEQ ID NO: 7892 - DNA, 20 bp, Artificial Sequence
  MKO10007892_A_Camsap3
  gRNA
gtacgatttctctcgagcca

SEQ ID NO: 7893 - DNA, 20 bp, Artificial Sequence
  MKO10007893_A_Camta1
  gRNA
tagttccgcagaatacactt

SEQ ID NO: 7894 - DNA, 20 bp, Artificial Sequence
  MKO10007894_A_Camta1
  gRNA
aacaccgtgccacctataga

SEQ ID NO: 7895 - DNA, 20 bp, Artificial Sequence
  MKO10007895_A_Camta1
  gRNA
ctacctcattagtgttccag

SEQ ID NO: 7896 - DNA, 20 bp, Artificial Sequence
  MKO10007896_A_Camta2
  gRNA
tcaccttcttacgattgtag

SEQ ID NO: 7897 - DNA, 20 bp, Artificial Sequence
  MKO10007897_A_Camta2
  gRNA
ggatgggaagactacccgag

SEQ ID NO: 7898 - DNA, 20 bp, Artificial Sequence
  MKO10007898_A_Camta2
  gRNA
ccactcatcgtgtttctcaa

SEQ ID NO: 7899 - DNA, 20 bp, Artificial Sequence
  MKO10007899_A_Cand1
  gRNA
tgtccacgatcgtctccact

SEQ ID NO: 7900 - DNA, 20 bp, Artificial Sequence
  MKO10007900_A_Cand1
  gRNA
tatttccgcagctcataact

SEQ ID NO: 7901 - DNA, 20 bp, Artificial Sequence
  MKO10007901_A_Cand1
  gRNA
ctgcgagacatttccagcat

SEQ ID NO: 7902 - DNA, 20 bp, Artificial Sequence
  MKO10007902_A_Cand2
  gRNA
aagcgcactgttgtcgcact

SEQ ID NO: 7903 - DNA, 20 bp, Artificial Sequence
  MKO10007903_A_Cand2
  gRNA
ggtcagcaagctccacgaag

SEQ ID NO: 7904 - DNA, 20 bp, Artificial Sequence
  MKO10007904_A_Cand2
  gRNA
ctccttgtctgaccgcatgt

SEQ ID NO: 7905 - DNA, 20 bp, Artificial Sequence
  MKO10007905_A_Cant1
  gRNA
ccacgaacgctacagcgaga

SEQ ID NO: 7906 - DNA, 20 bp, Artificial Sequence
  MKO10007906_A_Cant1
  gRNA
ccttctcgctgtagcgttcg

SEQ ID NO: 7907 - DNA, 20 bp, Artificial Sequence
  MKO10007907_A_Cant1
  gRNA
cttacctggtggtcggatcc

SEQ ID NO: 7908 - DNA, 20 bp, Artificial Sequence
  MKO10007908_A_Canx
  gRNA
ggaactctcaccatcatatt

SEQ ID NO: 7909 - DNA, 20 bp, Artificial Sequence
  MKO10007909_A_Canx
  gRNA
caggctgagctctgccgtct

SEQ ID NO: 7910 - DNA, 20 bp, Artificial Sequence
  MKO10007910_A_Canx
  gRNA
acaaagcttccaggggataa

SEQ ID NO: 7911 - DNA, 20 bp, Artificial Sequence
  MKO10007911_A_Cap1
  gRNA
ttacacaaatcgtgtcctca

SEQ ID NO: 7912 - DNA, 20 bp, Artificial Sequence
  MKO10007912_A_Cap1
  gRNA
cctctacaggctgcgaaacc

SEQ ID NO: 7913 - DNA, 20 bp, Artificial Sequence
  MKO10007913_A_Cap1
  gRNA
caggcggagatggtccacac

SEQ ID NO: 7914 - DNA, 20 bp, Artificial Sequence
  MKO10007914_A_Cap2
  gRNA
cagtgaaagcatcgccgccc

SEQ ID NO: 7915 - DNA, 20 bp, Artificial Sequence
  MKO10007915_A_Cap2
  gRNA
cacaggtgtggcaccgtccg

SEQ ID NO: 7916 - DNA, 20 bp, Artificial Sequence
  MKO10007916_A_Cap2
  gRNA
ttcttgaatcttctccgata

SEQ ID NO: 7917 - DNA, 20 bp, Artificial Sequence
  MKO10007917_A_Capg
  gRNA
tgcgtctcacccggtacttg

SEQ ID NO: 7918 - DNA, 20 bp, Artificial Sequence
  MKO10007918_A_Capg
  gRNA
agaacatccgtgcgaccgag

SEQ ID NO: 7919 - DNA, 20 bp, Artificial Sequence
  MKO10007919_A_Capg
  gRNA
caacatccttgagcgcaaca

SEQ ID NO: 7920 - DNA, 20 bp, Artificial Sequence
  MKO10007920_A_Capn10
  gRNA
tgctgcggattcacaacccc

SEQ ID NO: 7921 - DNA, 20 bp, Artificial Sequence
  MKO10007921_A_Capn10
  gRNA
tcggcagctactccacctga

SEQ ID NO: 7922 - DNA, 20 bp, Artificial Sequence
  MKO10007922_A_Capn10
  gRNA
tccaaactgccaaatccgac

SEQ ID NO: 7923 - DNA, 20 bp, Artificial Sequence
  MKO10007923_A_Capn11
  gRNA
gcactggttgaacgtggtcg

SEQ ID NO: 7924 - DNA, 20 bp, Artificial Sequence
  MKO10007924_A_Capn11
  gRNA
cgtgcacgcctcccatcgcc

SEQ ID NO: 7925 - DNA, 20 bp, Artificial Sequence
  MKO10007925_A_Capn11
  gRNA
gttcttgacaccgatagacc

SEQ ID NO: 7926 - DNA, 20 bp, Artificial Sequence
  MKO10007926_A_Capn12
  gRNA
acctcctcgcattacctcgt

SEQ ID NO: 7927 - DNA, 20 bp, Artificial Sequence
  MKO10007927_A_Capn12
  gRNA
ccttggccaatgcgtggcga

SEQ ID NO: 7928 - DNA, 20 bp, Artificial Sequence
  MKO10007928_A_Capn12
  gRNA
cttgtccaggggggaccacc

SEQ ID NO: 7929 - DNA, 20 bp, Artificial Sequence
  MKO10007929_A_Capn13
  gRNA
gcgaatagctttggtccatc

SEQ ID NO: 7930 - DNA, 20 bp, Artificial Sequence
  MKO10007930_A_Capn13
  gRNA
cggtcttcactgtcgtcagt

SEQ ID NO: 7931 - DNA, 20 bp, Artificial Sequence
  MKO10007931_A_Capn13
  gRNA
agctattcgcaccagtatgc

SEQ ID NO: 7932 - DNA, 20 bp, Artificial Sequence
  MKO10007932_A_Capn15
  gRNA
ggctgaacgtcccgacctcg

SEQ ID NO: 7933 - DNA, 20 bp, Artificial Sequence
  MKO10007933_A_Capn15
  gRNA
cttcatgttacctcccccgc

SEQ ID NO: 7934 - DNA, 20 bp, Artificial Sequence
  MKO10007934_A_Capn15
  gRNA
cagctccactaacccccgag

SEQ ID NO: 7935 - DNA, 20 bp, Artificial Sequence
  MKO10007935_A_Capn1
  gRNA
cgctccagaattcgttgccc

SEQ ID NO: 7936 - DNA, 20 bp, Artificial Sequence
  MKO10007936_A_Capn1
  gRNA
ccttcgaggactttaccggt

SEQ ID NO: 7937 - DNA, 20 bp, Artificial Sequence
  MKO10007937_A_Capn1
  gRNA
gaacaccagcttcccgtcct

SEQ ID NO: 7938 - DNA, 20 bp, Artificial Sequence
  MKO10007938_A_Capn2
  gRNA
gctgacccccagttcattat

SEQ ID NO: 7939 - DNA, 20 bp, Artificial Sequence
  MKO10007939_A_Capn2
  gRNA
gagcagctccccgtccttag

SEQ ID NO: 7940 - DNA, 20 bp, Artificial Sequence
  MKO10007940_A_Capn2
  gRNA
gaagtcttcaaagccttccg

SEQ ID NO: 7941 - DNA, 20 bp, Artificial Sequence
  MKO10007941_A_Capn3
  gRNA
agtttcactgaaaactacgc

SEQ ID NO: 7942 - DNA, 20 bp, Artificial Sequence
  MKO10007942_A_Capn3
  gRNA
ttcttgcagttctggcgcta

SEQ ID NO: 7943 - DNA, 20 bp, Artificial Sequence
  MKO10007943_A_Capn3
  gRNA
ttatcattggtggagccaac

SEQ ID NO: 7944 - DNA, 20 bp, Artificial Sequence
  MKO10007944_A_Capn5
  gRNA
tggacgtaatcgtcgatgac

SEQ ID NO: 7945 - DNA, 20 bp, Artificial Sequence
  MKO10007945_A_Capn5
  gRNA
cgtccactcccgctcgcccc

SEQ ID NO: 7946 - DNA, 20 bp, Artificial Sequence
  MKO10007946_A_Capn5
  gRNA
caggcgcaccttgcgcacat

SEQ ID NO: 7947 - DNA, 20 bp, Artificial Sequence
  MKO10007947_A_Capn6
  gRNA
ctgtacaaaacgttcaccaa

SEQ ID NO: 7948 - DNA, 20 bp, Artificial Sequence
  MKO10007948_A_Capn6
  gRNA
gatattcgcaagctccgtct

SEQ ID NO: 7949 - DNA, 20 bp, Artificial Sequence
  MKO10007949_A_Capn6
  gRNA
gcagcaaattagacctcctt

SEQ ID NO: 7950 - DNA, 20 bp, Artificial Sequence
  MKO10007950_A_Capn7
  gRNA
ccttgcgcatcacatgactg

SEQ ID NO: 7951 - DNA, 20 bp, Artificial Sequence
  MKO10007951_A_Capn7
  gRNA
gctgacttgagtttgcaaaa

SEQ ID NO: 7952 - DNA, 20 bp, Artificial Sequence
  MKO10007952_A_Capn7
  gRNA
agagaagatcaatgagtatc

SEQ ID NO: 7953 - DNA, 20 bp, Artificial Sequence
  MKO10007953_A_Capn8
  gRNA
tccaaccctcagtttatcgt

SEQ ID NO: 7954 - DNA, 20 bp, Artificial Sequence
  MKO10007954_A_Capn8
  gRNA
gtccgtcagctttgggctac

SEQ ID NO: 7955 - DNA, 20 bp, Artificial Sequence
  MKO10007955_A_Capn8
  gRNA
catcatatggaagcgaccca

SEQ ID NO: 7956 - DNA, 20 bp, Artificial Sequence
  MKO10007956_A_Capn9
  gRNA
taggcttaacgggagttatg

SEQ ID NO: 7957 - DNA, 20 bp, Artificial Sequence
  MKO10007957_A_Capn9
  gRNA
tgagaacttccaaatccgag

SEQ ID NO: 7958 - DNA, 20 bp, Artificial Sequence
  MKO10007958_A_Capn9
  gRNA
gcccctccaagaatgaattc

SEQ ID NO: 7959 - DNA, 20 bp, Artificial Sequence
  MKO10007959_A_Capns1
  gRNA
gtgaagaagtccgtcagttc

SEQ ID NO: 7960 - DNA, 20 bp, Artificial Sequence
  MKO10007960_A_Capns1
  gRNA
cattgacacttgtcggagca

SEQ ID NO: 7961 - DNA, 20 bp, Artificial Sequence
  MKO10007961_A_Capns1
  gRNA
ggtctgcttaccggaggctc

SEQ ID NO: 7962 - DNA, 20 bp, Artificial Sequence
  MKO10007962_A_Capns2
  gRNA
gaatcaggccatccctatct

SEQ ID NO: 7963 - DNA, 20 bp, Artificial Sequence
  MKO10007963_A_Capns2
  gRNA
catcttcgtcagcataccga

SEQ ID NO: 7964 - DNA, 20 bp, Artificial Sequence
  MKO10007964_A_Capns2
  gRNA
aagctcgaaacatagcatcc

SEQ ID NO: 7965 - DNA, 20 bp, Artificial Sequence
  MKO10007965_A_Caprin1
  gRNA
gggtaaacttgatgattacc

SEQ ID NO: 7966 - DNA, 20 bp, Artificial Sequence
  MKO10007966_A_Caprin1
  gRNA
ctgagcgtgacatgagttta

SEQ ID NO: 7967 - DNA, 20 bp, Artificial Sequence
  MKO10007967_A_Caprin1
  gRNA
ggatgccgtatctaagtacc

SEQ ID NO: 7968 - DNA, 20 bp, Artificial Sequence
  MKO10007968_A_Caprin2
  gRNA
caactacttaccaactggtc

SEQ ID NO: 7969 - DNA, 20 bp, Artificial Sequence
  MKO10007969_A_Caprin2
  gRNA
tataaagatcgccttaaaaa

SEQ ID NO: 7970 - DNA, 20 bp, Artificial Sequence
  MKO10007970_A_Caprin2
  gRNA
acaaggatgactgctccatc

SEQ ID NO: 7971 - DNA, 20 bp, Artificial Sequence
  MKO10007971_A_Caps2
  gRNA
tcatttcacttgcgtactgc

SEQ ID NO: 7972 - DNA, 20 bp, Artificial Sequence
  MKO10007972_A_Caps2
  gRNA
cagcgccaacaggcaaatac

SEQ ID NO: 7973 - DNA, 20 bp, Artificial Sequence
  MKO10007973_A_Caps2
  gRNA
tgtagtcgatgctgactgtt

SEQ ID NO: 7974 - DNA, 20 bp, Artificial Sequence
  MKO10007974_A_Capsl
  gRNA
tgccgtctctatcgaatctc

SEQ ID NO: 7975 - DNA, 20 bp, Artificial Sequence
  MKO10007975_A_Capsl
  gRNA
ggattgccatctcccggtca

SEQ ID NO: 7976 - DNA, 20 bp, Artificial Sequence
  MKO10007976_A_Capsl
  gRNA
tccactacaggtgacccccg

SEQ ID NO: 7977 - DNA, 20 bp, Artificial Sequence
  MKO10007977_A_Capza1
  gRNA
cttaacagtacagaagccgt

SEQ ID NO: 7978 - DNA, 20 bp, Artificial Sequence
  MKO10007978_A_Capza1
  gRNA
gagtttaatgaagtattcaa

SEQ ID NO: 7979 - DNA, 20 bp, Artificial Sequence
  MKO10007979_A_Capza1
  gRNA
aaggtcttaattacagagca

SEQ ID NO: 7980 - DNA, 20 bp, Artificial Sequence
  MKO10007980_A_Capza2
  gRNA
gtaaaagagcattatccgaa

SEQ ID NO: 7981 - DNA, 20 bp, Artificial Sequence
  MKO10007981_A_Capza2
  gRNA
ttcatcattcacgcccctcc

SEQ ID NO: 7982 - DNA, 20 bp, Artificial Sequence
  MKO10007982_A_Capza2
  gRNA
ctcacagtgcagaccccatt

SEQ ID NO: 7983 - DNA, 20 bp, Artificial Sequence
  MKO10007983_A_Capza3
  gRNA
tccgaatgattccgtgactt

SEQ ID NO: 7984 - DNA, 20 bp, Artificial Sequence
  MKO10007984_A_Capza3
  gRNA
tgacacgcactttgattgac

SEQ ID NO: 7985 - DNA, 20 bp, Artificial Sequence
  MKO10007985_A_Capza3
  gRNA
gggttgccgtcgatgcagag

SEQ ID NO: 7986 - DNA, 20 bp, Artificial Sequence
  MKO10007986_A_Capzb
  gRNA
cctcagcgatctgatcgacc

SEQ ID NO: 7987 - DNA, 20 bp, Artificial Sequence
  MKO10007987_A_Capzb
  gRNA
ccaggtcgatcagatcgctg

SEQ ID NO: 7988 - DNA, 20 bp, Artificial Sequence
  MKO10007988_A_Capzb
  gRNA
tcactcacaggtctcggtat

SEQ ID NO: 7989 - DNA, 20 bp, Artificial Sequence
  MKO10007989_A_Car10
  gRNA
tgacatttgtgtatagctcg

SEQ ID NO: 7990 - DNA, 20 bp, Artificial Sequence
  MKO10007990_A_Car10
  gRNA
cccccagtgttgatgcgaag

SEQ ID NO: 7991 - DNA, 20 bp, Artificial Sequence
  MKO10007991_A_Car10
  gRNA
catgacatacagtcaccgcc

SEQ ID NO: 7992 - DNA, 20 bp, Artificial Sequence
  MKO10007992_A_Car11
  gRNA
cggacctgcacctgatcccg

SEQ ID NO: 7993 - DNA, 20 bp, Artificial Sequence
  MKO10007993_A_Car11
  gRNA
agtgaactgcgcctgctatt

SEQ ID NO: 7994 - DNA, 20 bp, Artificial Sequence
  MKO10007994_A_Car11
  gRNA
cttgtagctccaccagtcct

SEQ ID NO: 7995 - DNA, 20 bp, Artificial Sequence
  MKO10007995_A_Car12
  gRNA
cttaccaacataggtccact

SEQ ID NO: 7996 - DNA, 20 bp, Artificial Sequence
  MKO10007996_A_Car12
  gRNA
tccaagaagtacccatcgtg

SEQ ID NO: 7997 - DNA, 20 bp, Artificial Sequence
  MKO10007997_A_Car12
  gRNA
accgccagtgacaagtccga

SEQ ID NO: 7998 - DNA, 20 bp, Artificial Sequence
  MKO10007998_A_Car13
  gRNA
agctcatgagtccgatgggc

SEQ ID NO: 7999 - DNA, 20 bp, Artificial Sequence
  MKO10007999_A_Car13
  gRNA
ttggatttagttctgcgtgg

SEQ ID NO: 8000 - DNA, 20 bp, Artificial Sequence
  MKO10008000_A_Car13
  gRNA
caacgttgactttgacgaca

SEQ ID NO: 8001 - DNA, 20 bp, Artificial Sequence
  MKO10008001_A_Car14
  gRNA
ggccaatggtcctgaccgtg

SEQ ID NO: 8002 - DNA, 20 bp, Artificial Sequence
  MKO10008002_A_Car14
  gRNA
ggtcagagaggatccctcga

SEQ ID NO: 8003 - DNA, 20 bp, Artificial Sequence
  MKO10008003_A_Car14
  gRNA
ccccggtacctccgcagccg

SEQ ID NO: 8004 - DNA, 20 bp, Artificial Sequence
  MKO10008004_A_Car15
  gRNA
gcttaagagtgtagtcccgc

SEQ ID NO: 8005 - DNA, 20 bp, Artificial Sequence
  MKO10008005_A_Car15
  gRNA
gccagtatagcaaacccatc

SEQ ID NO: 8006 - DNA, 20 bp, Artificial Sequence
  MKO10008006_A_Car15
  gRNA
ctggagaacgatggccacac

SEQ ID NO: 8007 - DNA, 20 bp, Artificial Sequence
  MKO10008007_A_Car1
  gRNA
gagcatcaagtactttctgc

SEQ ID NO: 8008 - DNA, 20 bp, Artificial Sequence
  MKO10008008_A_Car1
  gRNA
tgccaaagaaattgttaacg

SEQ ID NO: 8009 - DNA, 20 bp, Artificial Sequence
  MKO10008009_A_Car1
  gRNA
gatgacagtagcaaccaatc

SEQ ID NO: 8010 - DNA, 20 bp, Artificial Sequence
  MKO10008010_A_Car2
  gRNA
gtcatcaaactcaacgttaa

SEQ ID NO: 8011 - DNA, 20 bp, Artificial Sequence
  MKO10008011_A_Car2
  gRNA
aaagctgtgcagcaaccgga

SEQ ID NO: 8012 - DNA, 20 bp, Artificial Sequence
  MKO10008012_A_Car2
  gRNA
cccaaaacagccaatccatc

SEQ ID NO: 8013 - DNA, 20 bp, Artificial Sequence
  MKO10008013_A_Car3
  gRNA
cggagtaaaatacgctgctg

SEQ ID NO: 8014 - DNA, 20 bp, Artificial Sequence
  MKO10008014_A_Car3
  gRNA
ccaaccacagcgatgccatc

SEQ ID NO: 8015 - DNA, 20 bp, Artificial Sequence
  MKO10008015_A_Car3
  gRNA
taaagttcatgccagtgatc

SEQ ID NO: 8016 - DNA, 20 bp, Artificial Sequence
  MKO10008016_A_Car4
  gRNA
agacctgcccgcccggtacg

SEQ ID NO: 8017 - DNA, 20 bp, Artificial Sequence
  MKO10008017_A_Car4
  gRNA
gcaactgtacagcctcgtac

SEQ ID NO: 8018 - DNA, 20 bp, Artificial Sequence
  MKO10008018_A_Car4
  gRNA
ctgacacccttcatcctcgt

SEQ ID NO: 8019 - DNA, 20 bp, Artificial Sequence
  MKO10008019_A_Car5a
  gRNA
cagtgtgtatgacccgcagc

SEQ ID NO: 8020 - DNA, 20 bp, Artificial Sequence
  MKO10008020_A_Car5a
  gRNA
tctgcaggacgcggcatcat

SEQ ID NO: 8021 - DNA, 20 bp, Artificial Sequence
  MKO10008021_A_Car5a
  gRNA
ttgcttgcagggatcagcgg

SEQ ID NO: 8022 - DNA, 20 bp, Artificial Sequence
  MKO10008022_A_Car5b
  gRNA
ggtgattgtcgatcacccgc

SEQ ID NO: 8023 - DNA, 20 bp, Artificial Sequence
  MKO10008023_A_Car5b
  gRNA
aatcacccatcaacatccga

SEQ ID NO: 8024 - DNA, 20 bp, Artificial Sequence
  MKO10008024_A_Car5b
  gRNA
tttgccatcaattaagcaca

SEQ ID NO: 8025 - DNA, 20 bp, Artificial Sequence
  MKO10008025_A_Car6
  gRNA
ctcctccgtcttcacgtcga

SEQ ID NO: 8026 - DNA, 20 bp, Artificial Sequence
  MKO10008026_A_Car6
  gRNA
cgactgcctttccccgccgc

SEQ ID NO: 8027 - DNA, 20 bp, Artificial Sequence
  MKO10008027_A_Car6
  gRNA
cgggacctatgagaatgcca

SEQ ID NO: 8028 - DNA, 20 bp, Artificial Sequence
  MKO10008028_A_Car7
  gRNA
cctgacagacgccctctaca

SEQ ID NO: 8029 - DNA, 20 bp, Artificial Sequence
  MKO10008029_A_Car7
  gRNA
tgtcgcgcttcttgccccag

SEQ ID NO: 8030 - DNA, 20 bp, Artificial Sequence
  MKO10008030_A_Car7
  gRNA
catcaatatcatatccagcc

SEQ ID NO: 8031 - DNA, 20 bp, Artificial Sequence
  MKO10008031_A_Car8
  gRNA
tcccggcacaccacataatt

SEQ ID NO: 8032 - DNA, 20 bp, Artificial Sequence
  MKO10008032_A_Car8
  gRNA
ttgaatggtgtgtccatcgt

SEQ ID NO: 8033 - DNA, 20 bp, Artificial Sequence
  MKO10008033_A_Car8
  gRNA
actgtttggcagcatcgatg

SEQ ID NO: 8034 - DNA, 20 bp, Artificial Sequence
  MKO10008034_A_Car9
  gRNA
ttgcagagtgcggcagaatg

SEQ ID NO: 8035 - DNA, 20 bp, Artificial Sequence
  MKO10008035_A_Car9
  gRNA
gtccccggtagacatccgcc

SEQ ID NO: 8036 - DNA, 20 bp, Artificial Sequence
  MKO10008036_A_Car9
  gRNA
cagtactgaggtgcaccacg

SEQ ID NO: 8037 - DNA, 20 bp, Artificial Sequence
  MKO10008037_A_Card10
  gRNA
gctcaccggtacggttagcg

SEQ ID NO: 8038 - DNA, 20 bp, Artificial Sequence
  MKO10008038_A_Card10
  gRNA
ccgtgccgcgctaaccgtac

SEQ ID NO: 8039 - DNA, 20 bp, Artificial Sequence
  MKO10008039_A_Card10
  gRNA
ctacatgatcgccatgcgcc

SEQ ID NO: 8040 - DNA, 20 bp, Artificial Sequence
  MKO10008040_A_Card11
  gRNA
tcatcttgtagtatcgctcc

SEQ ID NO: 8041 - DNA, 20 bp, Artificial Sequence
  MKO10008041_A_Card11
  gRNA
ctacaatgacgagctcgtca

SEQ ID NO: 8042 - DNA, 20 bp, Artificial Sequence
  MKO10008042_A_Card11
  gRNA
ccgtccaagatcaaccgtgc

SEQ ID NO: 8043 - DNA, 20 bp, Artificial Sequence
  MKO10008043_A_Card14
  gRNA
tgctgacctcacgtttcatg

SEQ ID NO: 8044 - DNA, 20 bp, Artificial Sequence
  MKO10008044_A_Card14
  gRNA
ccgctccatgaccttcagcc

SEQ ID NO: 8045 - DNA, 20 bp, Artificial Sequence
  MKO10008045_A_Card14
  gRNA
gggcccgtacctcttcctga

SEQ ID NO: 8046 - DNA, 20 bp, Artificial Sequence
  MKO10008046_A_Card6
  gRNA
agctttctagatcgccacga

SEQ ID NO: 8047 - DNA, 20 bp, Artificial Sequence
  MKO10008047_A_Card6
  gRNA
aagacagtctcgacatcttc

SEQ ID NO: 8048 - DNA, 20 bp, Artificial Sequence
  MKO10008048_A_Card6
  gRNA
ccattcgggtgatactgctg

SEQ ID NO: 8049 - DNA, 20 bp, Artificial Sequence
  MKO10008049_A_Card9
  gRNA
cctggcggaggtccttccgt

SEQ ID NO: 8050 - DNA, 20 bp, Artificial Sequence
  MKO10008050_A_Card9
  gRNA
acccacaggtggaccggctc

SEQ ID NO: 8051 - DNA, 20 bp, Artificial Sequence
  MKO10008051_A_Card9
  gRNA
cgcgtcttctccatgatcat

SEQ ID NO: 8052 - DNA, 20 bp, Artificial Sequence
  MKO10008052_A_Carf
  gRNA
tcaaaagcatcggacctgta

SEQ ID NO: 8053 - DNA, 20 bp, Artificial Sequence
  MKO10008053_A_Carf
  gRNA
atccctcgtgctacccaaaa

SEQ ID NO: 8054 - DNA, 20 bp, Artificial Sequence
  MKO10008054_A_Carf
  gRNA
atatgattcactcacatcac

SEQ ID NO: 8055 - DNA, 20 bp, Artificial Sequence
  MKO10008055_A_Carhsp1
  gRNA
caggacagtgcgggcttcgc

SEQ ID NO: 8056 - DNA, 20 bp, Artificial Sequence
  MKO10008056_A_Carhsp1
  gRNA
tattggatacccctcgcacc

SEQ ID NO: 8057 - DNA, 20 bp, Artificial Sequence
  MKO10008057_A_Carhsp1
  gRNA
taactcactcagagatgtgc

SEQ ID NO: 8058 - DNA, 20 bp, Artificial Sequence
  MKO10008058_A_Carkd
  gRNA
atcgatcttacctcccccgc

SEQ ID NO: 8059 - DNA, 20 bp, Artificial Sequence
  MKO10008059_A_Carkd
  gRNA
ccatacagcacatgcgacaa

SEQ ID NO: 8060 - DNA, 20 bp, Artificial Sequence
  MKO10008060_A_Carkd
  gRNA
cgccatgggagtccgctgtg

SEQ ID NO: 8061 - DNA, 20 bp, Artificial Sequence
  MKO10008061_A_Carm1
  gRNA
cgttcgcgtcgccgatagtg

SEQ ID NO: 8062 - DNA, 20 bp, Artificial Sequence
  MKO10008062_A_Carm1
  gRNA
ctcactatcggcgacgcgaa

SEQ ID NO: 8063 - DNA, 20 bp, Artificial Sequence
  MKO10008063_A_Carm1
  gRNA
ctgcaggatcgcacgctggt

SEQ ID NO: 8064 - DNA, 20 bp, Artificial Sequence
  MKO10008064_A_Carns1
  gRNA
accgtagtagtacacagtcc

SEQ ID NO: 8065 - DNA, 20 bp, Artificial Sequence
  MKO10008065_A_Carns1
  gRNA
ctggcgccaggatatcagcc

SEQ ID NO: 8066 - DNA, 20 bp, Artificial Sequence
  MKO10008066_A_Carns1
  gRNA
cagctgggacagctccgatg

SEQ ID NO: 8067 - DNA, 20 bp, Artificial Sequence
  MKO10008067_A_Cars2
  gRNA
ggcgatgagcattaccgacg

SEQ ID NO: 8068 - DNA, 20 bp, Artificial Sequence
  MKO10008068_A_Cars2
  gRNA
ctgtagctgtcgagtatgca

SEQ ID NO: 8069 - DNA, 20 bp, Artificial Sequence
  MKO10008069_A_Cars2
  gRNA
catgcatactcgacagctac

SEQ ID NO: 8070 - DNA, 20 bp, Artificial Sequence
  MKO10008070_A_Cars
  gRNA
ttcttaccttgttccgggtg

SEQ ID NO: 8071 - DNA, 20 bp, Artificial Sequence
  MKO10008071_A_Cars
  gRNA
tgtctatgatgcgtctcaca

SEQ ID NO: 8072 - DNA, 20 bp, Artificial Sequence
  MKO10008072_A_Cars
  gRNA
acatctccttcgatatcctg

SEQ ID NO: 8073 - DNA, 20 bp, Artificial Sequence
  MKO10008073_A_Cartpt
  gRNA
ttcgatctgcaacatagcgc

SEQ ID NO: 8074 - DNA, 20 bp, Artificial Sequence
  MKO10008074_A_Cartpt
  gRNA
ccgtacttcttctcgtagat

SEQ ID NO: 8075 - DNA, 20 bp, Artificial Sequence
  MKO10008075_A_Cartpt
  gRNA
ggatgatgcgtcccacgaga

SEQ ID NO: 8076 - DNA, 20 bp, Artificial Sequence
  MKO10008076_A_Casc1
  gRNA
tgaccaaagccgagcgactg

SEQ ID NO: 8077 - DNA, 20 bp, Artificial Sequence
  MKO10008077_A_Casc1
  gRNA
ctgcatcagccgcagtcgct

SEQ ID NO: 8078 - DNA, 20 bp, Artificial Sequence
  MKO10008078_A_Casc1
  gRNA
ttaggctcccaaatcaaaaa

SEQ ID NO: 8079 - DNA, 20 bp, Artificial Sequence
  MKO10008079_A_Casc3
  gRNA
ttctttgagcacgatcttcg

SEQ ID NO: 8080 - DNA, 20 bp, Artificial Sequence
  MKO10008080_A_Casc3
  gRNA
tcatcgtcatccaagtgctt

SEQ ID NO: 8081 - DNA, 20 bp, Artificial Sequence
  MKO10008081_A_Casc3
  gRNA
gtcaccgtgcctttagactc

SEQ ID NO: 8082 - DNA, 20 bp, Artificial Sequence
  MKO10008082_A_Casc4
  gRNA
gcgcttggagaagcgcaatt

SEQ ID NO: 8083 - DNA, 20 bp, Artificial Sequence
  MKO10008083_A_Casc4
  gRNA
attacggtcgcctcagcagc

SEQ ID NO: 8084 - DNA, 20 bp, Artificial Sequence
  MKO10008084_A_Casc4
  gRNA
cgtattctagccgcttgaca

SEQ ID NO: 8085 - DNA, 20 bp, Artificial Sequence
  MKO10008085_A_Casc5
  gRNA
cctcttcaggacctcaaatg

SEQ ID NO: 8086 - DNA, 20 bp, Artificial Sequence
  MKO10008086_A_Casc5
  gRNA
gaggaatgctgtcttctaac

SEQ ID NO: 8087 - DNA, 20 bp, Artificial Sequence
  MKO10008087_A_Casc5
  gRNA
tcctgaagaggactccttgg

SEQ ID NO: 8088 - DNA, 20 bp, Artificial Sequence
  MKO10008088_A_Casd1
  gRNA
tgtgaataccttctctcgag

SEQ ID NO: 8089 - DNA, 20 bp, Artificial Sequence
  MKO10008089_A_Casd1
  gRNA
gataaacacattgcgtttat

SEQ ID NO: 8090 - DNA, 20 bp, Artificial Sequence
  MKO10008090_A_Casd1
  gRNA
gaaatctgccgctcgagaga

SEQ ID NO: 8091 - DNA, 20 bp, Artificial Sequence
  MKO10008091_A_Caskin1
  gRNA
ggccgttgcactacgccgcc

SEQ ID NO: 8092 - DNA, 20 bp, Artificial Sequence
  MKO10008092_A_Caskin1
  gRNA
ccctacgcggccgaactcac

SEQ ID NO: 8093 - DNA, 20 bp, Artificial Sequence
  MKO10008093_A_Caskin1
  gRNA
gcctgtgagttcggccgcgt

SEQ ID NO: 8094 - DNA, 20 bp, Artificial Sequence
  MKO10008094_A_Caskin2
  gRNA
aatgcccgtactgcgcagcc

SEQ ID NO: 8095 - DNA, 20 bp, Artificial Sequence
  MKO10008095_A_Caskin2
  gRNA
cttgagccgcccaaattcac

SEQ ID NO: 8096 - DNA, 20 bp, Artificial Sequence
  MKO10008096_A_Caskin2
  gRNA
cgctgtcaacgctgcctcgc

SEQ ID NO: 8097 - DNA, 20 bp, Artificial Sequence
  MKO10008097_A_Cask
  gRNA
atcgtaaagcgagctgatgc

SEQ ID NO: 8098 - DNA, 20 bp, Artificial Sequence
  MKO10008098_A_Cask
  gRNA
ctcagatgggatgctttaca

SEQ ID NO: 8099 - DNA, 20 bp, Artificial Sequence
  MKO10008099_A_Cask
  gRNA
tatacagtgaagctgtagcc

SEQ ID NO: 8100 - DNA, 20 bp, Artificial Sequence
  MKO10008100_A_Casp12
  gRNA
gatccaatctacaagatcaa

SEQ ID NO: 8101 - DNA, 20 bp, Artificial Sequence
  MKO10008101_A_Casp12
  gRNA
gaatcacatctaatgctgac

SEQ ID NO: 8102 - DNA, 20 bp, Artificial Sequence
  MKO10008102_A_Casp12
  gRNA
tggccacattgccaattccc

SEQ ID NO: 8103 - DNA, 20 bp, Artificial Sequence
  MKO10008103_A_Casp14
  gRNA
gatgtggagggtatccgtat

SEQ ID NO: 8104 - DNA, 20 bp, Artificial Sequence
  MKO10008104_A_Casp14
  gRNA
gggttccgaggtagacatgg

SEQ ID NO: 8105 - DNA, 20 bp, Artificial Sequence
  MKO10008105_A_Casp14
  gRNA
tcctatagacatgacgagaa

SEQ ID NO: 8106 - DNA, 20 bp, Artificial Sequence
  MKO10008106_A_Casp1
  gRNA
cgagtggttgtattcattat

SEQ ID NO: 8107 - DNA, 20 bp, Artificial Sequence
  MKO10008107_A_Casp1
  gRNA
ggaattctggagcttcaatc

SEQ ID NO: 8108 - DNA, 20 bp, Artificial Sequence
  MKO10008108_A_Casp1
  gRNA
acttgcaaacattactgcta

SEQ ID NO: 8109 - DNA, 20 bp, Artificial Sequence
  MKO10008109_A_Casp2
  gRNA
aagcagctccgcctatccac

SEQ ID NO: 8110 - DNA, 20 bp, Artificial Sequence
  MKO10008110_A_Casp2
  gRNA
tattcagcacgtactcccac

SEQ ID NO: 8111 - DNA, 20 bp, Artificial Sequence
  MKO10008111_A_Casp2
  gRNA
tcaccagctggtagtgtgcc

SEQ ID NO: 8112 - DNA, 20 bp, Artificial Sequence
  MKO10008112_A_Casp3
  gRNA
caaggaatgtcatctcgctc

SEQ ID NO: 8113 - DNA, 20 bp, Artificial Sequence
  MKO10008113_A_Casp3
  gRNA
cacagtccagctccgtaccc

SEQ ID NO: 8114 - DNA, 20 bp, Artificial Sequence
  MKO10008114_A_Casp3
  gRNA
cacccaggcctgccggggta

SEQ ID NO: 8115 - DNA, 20 bp, Artificial Sequence
  MKO10008115_A_Casp4
  gRNA
ggccaatggccgtacacgaa

SEQ ID NO: 8116 - DNA, 20 bp, Artificial Sequence
  MKO10008116_A_Casp4
  gRNA
ctgaacgcagtgacaagcgt

SEQ ID NO: 8117 - DNA, 20 bp, Artificial Sequence
  MKO10008117_A_Casp4
  gRNA
ttgggtttgtctcgtagacc

SEQ ID NO: 8118 - DNA, 20 bp, Artificial Sequence
  MKO10008118_A_Casp6
  gRNA
tagccagcatgacgtacccg

SEQ ID NO: 8119 - DNA, 20 bp, Artificial Sequence
  MKO10008119_A_Casp6
  gRNA
gccagagttacctgcgagtc

SEQ ID NO: 8120 - DNA, 20 bp, Artificial Sequence
  MKO10008120_A_Casp6
  gRNA
gtcatgctggctaccccgac

SEQ ID NO: 8121 - DNA, 20 bp, Artificial Sequence
  MKO10008121_A_Casp7
  gRNA
cgccatctttcccgtaaatc

SEQ ID NO: 8122 - DNA, 20 bp, Artificial Sequence
  MKO10008122_A_Casp7
  gRNA
attagcgtcaatgtcgttga

SEQ ID NO: 8123 - DNA, 20 bp, Artificial Sequence
  MKO10008123_A_Casp7
  gRNA
atatgctttaggcatgccga

SEQ ID NO: 8124 - DNA, 20 bp, Artificial Sequence
  MKO10008124_A_Casp8ap2
  gRNA
attggacatatatgctgggt

SEQ ID NO: 8125 - DNA, 20 bp, Artificial Sequence
  MKO10008125_A_Casp8ap2
  gRNA
acttatcaaaactgccagag

SEQ ID NO: 8126 - DNA, 20 bp, Artificial Sequence
  MKO10008126_A_Casp8ap2
  gRNA
tttcagttgcagatagaata

SEQ ID NO: 8127 - DNA, 20 bp, Artificial Sequence
  MKO10008127_A_Casp8
  gRNA
tgagatccccaaatgtaagc

SEQ ID NO: 8128 - DNA, 20 bp, Artificial Sequence
  MKO10008128_A_Casp8
  gRNA
aatcctcgatcttccccagc

SEQ ID NO: 8129 - DNA, 20 bp, Artificial Sequence
  MKO10008129_A_Casp8
  gRNA
ctcagaagaagtgagcgagt

SEQ ID NO: 8130 - DNA, 20 bp, Artificial Sequence
  MKO10008130_A_Casp9
  gRNA
aacttgagcaccgattccgc

SEQ ID NO: 8131 - DNA, 20 bp, Artificial Sequence
  MKO10008131_A_Casp9
  gRNA
tgttaaacccctagaccacc

SEQ ID NO: 8132 - DNA, 20 bp, Artificial Sequence
  MKO10008132_A_Casp9
  gRNA
cacacgcacgggctccaact

SEQ ID NO: 8133 - DNA, 20 bp, Artificial Sequence
  MKO10008133_A_Casq1
  gRNA
ctcagattacaaagcctacg

SEQ ID NO: 8134 - DNA, 20 bp, Artificial Sequence
  MKO10008134_A_Casq1
  gRNA
ctcttcagctgcgtcctcgt

SEQ ID NO: 8135 - DNA, 20 bp, Artificial Sequence
  MKO10008135_A_Casq1
  gRNA
gacagcgtttatgtgttcaa

SEQ ID NO: 8136 - DNA, 20 bp, Artificial Sequence
  MKO10008136_A_Casq2
  gRNA
gaccgcacgattgagtttga

SEQ ID NO: 8137 - DNA, 20 bp, Artificial Sequence
  MKO10008137_A_Casq2
  gRNA
ccccgtcaaactcaatcgtg

SEQ ID NO: 8138 - DNA, 20 bp, Artificial Sequence
  MKO10008138_A_Casq2
  gRNA
ggtacttaccgccttgtcaa

SEQ ID NO: 8139 - DNA, 20 bp, Artificial Sequence
  MKO10008139_A_Casr
  gRNA
gacggctaagtacacgttgt

SEQ ID NO: 8140 - DNA, 20 bp, Artificial Sequence
  MKO10008140_A_Casr
  gRNA
caggtcaccgcactcatcga

SEQ ID NO: 8141 - DNA, 20 bp, Artificial Sequence
  MKO10008141_A_Casr
  gRNA
tgtcctgacggcgagtacag

SEQ ID NO: 8142 - DNA, 20 bp, Artificial Sequence
  MKO10008142_A_Cass4
  gRNA
acagataatcggtccgagtc

SEQ ID NO: 8143 - DNA, 20 bp, Artificial Sequence
  MKO10008143_A_Cass4
  gRNA
gtcggcaacgaggccctcgt

SEQ ID NO: 8144 - DNA, 20 bp, Artificial Sequence
  MKO10008144_A_Cass4
  gRNA
gtaaacctcttgacgtcttc

SEQ ID NO: 8145 - DNA, 20 bp, Artificial Sequence
  MKO10008145_A_Cast
  gRNA
ctacttacctcacttgattg

SEQ ID NO: 8146 - DNA, 20 bp, Artificial Sequence
  MKO10008146_A_Cast
  gRNA
actcatgctgggggacttgc

SEQ ID NO: 8147 - DNA, 20 bp, Artificial Sequence
  MKO10008147_A_Cast
  gRNA
cagccttccagaccacatgt

SEQ ID NO: 8148 - DNA, 20 bp, Artificial Sequence
  MKO10008148_A_Casz1
  gRNA
cgggcaatacgccccaacac

SEQ ID NO: 8149 - DNA, 20 bp, Artificial Sequence
  MKO10008149_A_Casz1
  gRNA
gccccgaacgtcgtacttag

SEQ ID NO: 8150 - DNA, 20 bp, Artificial Sequence
  MKO10008150_A_Casz1
  gRNA
gcccctctaagtacgacgtt

SEQ ID NO: 8151 - DNA, 20 bp, Artificial Sequence
  MKO10008151_A_Catsper1
  gRNA
atgagagcgagtttatctga

SEQ ID NO: 8152 - DNA, 20 bp, Artificial Sequence
  MKO10008152_A_Catsper1
  gRNA
agtcctcaagctaattgccc

SEQ ID NO: 8153 - DNA, 20 bp, Artificial Sequence
  MKO10008153_A_Catsper1
  gRNA
ttcactgagctagagatccg

SEQ ID NO: 8154 - DNA, 20 bp, Artificial Sequence
  MKO10008154_A_Catsper2
  gRNA
gtgatgtgccccattcgccg

SEQ ID NO: 8155 - DNA, 20 bp, Artificial Sequence
  MKO10008155_A_Catsper2
  gRNA
tgctgagcaggcttcgcgtg

SEQ ID NO: 8156 - DNA, 20 bp, Artificial Sequence
  MKO10008156_A_Catsper2
  gRNA
ttgtagagatacttctaatg

SEQ ID NO: 8157 - DNA, 20 bp, Artificial Sequence
  MKO10008157_A_Catsper3
  gRNA
gagcccgacttgactcgtac

SEQ ID NO: 8158 - DNA, 20 bp, Artificial Sequence
  MKO10008158_A_Catsper3
  gRNA
ctctgtccgtcacgccaaat

SEQ ID NO: 8159 - DNA, 20 bp, Artificial Sequence
  MKO10008159_A_Catsper3
  gRNA
catgtttgtgttcgcgatcc

SEQ ID NO: 8160 - DNA, 20 bp, Artificial Sequence
  MKO10008160_A_Catsper4
  gRNA
gttgacgatccttatctgcg

SEQ ID NO: 8161 - DNA, 20 bp, Artificial Sequence
  MKO10008161_A_Catsper4
  gRNA
cttcgcaccaactcttatct

SEQ ID NO: 8162 - DNA, 20 bp, Artificial Sequence
  MKO10008162_A_Catsper4
  gRNA
ttggttggcttaacggcttc

SEQ ID NO: 8163 - DNA, 20 bp, Artificial Sequence
  MKO10008163_A_Catsperb
  gRNA
acctcgaacaagatccaata

SEQ ID NO: 8164 - DNA, 20 bp, Artificial Sequence
  MKO10008164_A_Catsperb
  gRNA
accttattggatcttgttcg

SEQ ID NO: 8165 - DNA, 20 bp, Artificial Sequence
  MKO10008165_A_Catsperb
  gRNA
agttcagtaatcgtcttgag

SEQ ID NO: 8166 - DNA, 20 bp, Artificial Sequence
  MKO10008166_A_Catsperd
  gRNA
cacaccttccaatttacgcc

SEQ ID NO: 8167 - DNA, 20 bp, Artificial Sequence
  MKO10008167_A_Catsperd
  gRNA
aagtgggcgcttgtgattga

SEQ ID NO: 8168 - DNA, 20 bp, Artificial Sequence
  MKO10008168_A_Catsperd
  gRNA
taccccttgaagttgtatat

SEQ ID NO: 8169 - DNA, 20 bp, Artificial Sequence
  MKO10008169_A_Catsperg1
  gRNA
ggcccttcatacccaagaaa

SEQ ID NO: 8170 - DNA, 20 bp, Artificial Sequence
  MKO10008170_A_Catsperg1
  gRNA
aagttgatttgcaagtagta

SEQ ID NO: 8171 - DNA, 20 bp, Artificial Sequence
  MKO10008171_A_Catsperg1
  gRNA
ccttcagaatagtgaggagc

SEQ ID NO: 8172 - DNA, 20 bp, Artificial Sequence
  MKO10008172_A_Catsperg2
  gRNA
ccttcagaatatcgaggagc

SEQ ID NO: 8173 - DNA, 20 bp, Artificial Sequence
  MKO10008173_A_Catsperg2
  gRNA
ggcccttcgtatccaagaaa

SEQ ID NO: 8174 - DNA, 20 bp, Artificial Sequence
  MKO10008174_A_Catsperg2
  gRNA
aggccatgtgcgtcctgaac

SEQ ID NO: 8175 - DNA, 20 bp, Artificial Sequence
  MKO10008175_A_Cat
  gRNA
aatttcactgcaaacccccg

SEQ ID NO: 8176 - DNA, 20 bp, Artificial Sequence
  MKO10008176_A_Cat
  gRNA
actgactgtggagaatcgaa

SEQ ID NO: 8177 - DNA, 20 bp, Artificial Sequence
  MKO10008177_A_Cat
  gRNA
taaacttaatatcatgaccg

SEQ ID NO: 8178 - DNA, 20 bp, Artificial Sequence
  MKO10008178_A_Cav1
  gRNA
cacgtcgtcgttgagatgct

SEQ ID NO: 8179 - DNA, 20 bp, Artificial Sequence
  MKO10008179_A_Cav1
  gRNA
caagcatctcaacgacgacg

SEQ ID NO: 8180 - DNA, 20 bp, Artificial Sequence
  MKO10008180_A_Cav1
  gRNA
cacacagtttcgacggcatc

SEQ ID NO: 8181 - DNA, 20 bp, Artificial Sequence
  MKO10008181_A_Cav2
  gRNA
atgttgactcgagtcacgac

SEQ ID NO: 8182 - DNA, 20 bp, Artificial Sequence
  MKO10008182_A_Cav2
  gRNA
agtgtgacagacgttgtcat

SEQ ID NO: 8183 - DNA, 20 bp, Artificial Sequence
  MKO10008183_A_Cav2
  gRNA
ctcgagtcaacatacttctc

SEQ ID NO: 8184 - DNA, 20 bp, Artificial Sequence
  MKO10008184_A_Cav3
  gRNA
caacccgctcttcgctgcgt

SEQ ID NO: 8185 - DNA, 20 bp, Artificial Sequence
  MKO10008185_A_Cav3
  gRNA
ccatacaccgtcgaagctgt

SEQ ID NO: 8186 - DNA, 20 bp, Artificial Sequence
  MKO10008186_A_Cav3
  gRNA
tctggaagctcggatcatca

SEQ ID NO: 8187 - DNA, 20 bp, Artificial Sequence
  MKO10008187_A_Cbfa2t2
  gRNA
gccccacttacgttggaagg

SEQ ID NO: 8188 - DNA, 20 bp, Artificial Sequence
  MKO10008188_A_Cbfa2t2
  gRNA
ctcacatgctgtaggagtaa

SEQ ID NO: 8189 - DNA, 20 bp, Artificial Sequence
  MKO10008189_A_Cbfa2t2
  gRNA
actaacgaatcaacagctgc

SEQ ID NO: 8190 - DNA, 20 bp, Artificial Sequence
  MKO10008190_A_Cbfa2t3
  gRNA
gcgcgtgcgcacactggtgc

SEQ ID NO: 8191 - DNA, 20 bp, Artificial Sequence
  MKO10008191_A_Cbfa2t3
  gRNA
agctgccgtgccccgcacgc

SEQ ID NO: 8192 - DNA, 20 bp, Artificial Sequence
  MKO10008192_A_Cbfa2t3
  gRNA
aagtcaacgagaacggcaaa

SEQ ID NO: 8193 - DNA, 20 bp, Artificial Sequence
  MKO10008193_A_Cbfb
  gRNA
cgatctccgagcgaccgtcg

SEQ ID NO: 8194 - DNA, 20 bp, Artificial Sequence
  MKO10008194_A_Cbfb
  gRNA
accgcctcacctcgcactcg

SEQ ID NO: 8195 - DNA, 20 bp, Artificial Sequence
  MKO10008195_A_Cbfb
  gRNA
gaagatgccgcgcgtcgtcc

SEQ ID NO: 8196 - DNA, 20 bp, Artificial Sequence
  MKO10008196_A_Cblb
  gRNA
agaagtcgaagcgagcgatc

SEQ ID NO: 8197 - DNA, 20 bp, Artificial Sequence
  MKO10008197_A_Cblb
  gRNA
ctcaagtgctgatacgtatc

SEQ ID NO: 8198 - DNA, 20 bp, Artificial Sequence
  MKO10008198_A_Cblb
  gRNA
attccgtaaaatagagcccc

SEQ ID NO: 8199 - DNA, 20 bp, Artificial Sequence
  MKO10008199_A_Cblc
  gRNA
gcgagccacgcgcgcttagc

SEQ ID NO: 8200 - DNA, 20 bp, Artificial Sequence
  MKO10008200_A_Cblc
  gRNA
ggccttcctcacctacgatg

SEQ ID NO: 8201 - DNA, 20 bp, Artificial Sequence
  MKO10008201_A_Cblc
  gRNA
gcgtgtttggacctcatcgt

SEQ ID NO: 8202 - DNA, 20 bp, Artificial Sequence
  MKO10008202_A_Cbll1
  gRNA
agccgaatcatggatcacac

SEQ ID NO: 8203 - DNA, 20 bp, Artificial Sequence
  MKO10008203_A_Cbll1
  gRNA
atgcccgcaaaggccccgca

SEQ ID NO: 8204 - DNA, 20 bp, Artificial Sequence
  MKO10008204_A_Cbll1
  gRNA
atcaccttgcggggcctttg

SEQ ID NO: 8205 - DNA, 20 bp, Artificial Sequence
  MKO10008205_A_Cbln1
  gRNA
cggcctcgcgtgtcacgtct

SEQ ID NO: 8206 - DNA, 20 bp, Artificial Sequence
  MKO10008206_A_Cbln1
  gRNA
actttcatcgccccgcgcaa

SEQ ID NO: 8207 - DNA, 20 bp, Artificial Sequence
  MKO10008207_A_Cbln1
  gRNA
tgaccaagacgtgacacgcg

SEQ ID NO: 8208 - DNA, 20 bp, Artificial Sequence
  MKO10008208_A_Cbln2
  gRNA
gtgacggcgccatcccccga

SEQ ID NO: 8209 - DNA, 20 bp, Artificial Sequence
  MKO10008209_A_Cbln2
  gRNA
cgtgtcgttctgagccctta

SEQ ID NO: 8210 - DNA, 20 bp, Artificial Sequence
  MKO10008210_A_Cbln2
  gRNA
gttcatctcaaactagagag

SEQ ID NO: 8211 - DNA, 20 bp, Artificial Sequence
  MKO10008211_A_Cbln3
  gRNA
ccagaagattcccccgacgc

SEQ ID NO: 8212 - DNA, 20 bp, Artificial Sequence
  MKO10008212_A_Cbln3
  gRNA
cgcagggacacacggtcccc

SEQ ID NO: 8213 - DNA, 20 bp, Artificial Sequence
  MKO10008213_A_Cbln3
  gRNA
cgagggctttgatcggacct

SEQ ID NO: 8214 - DNA, 20 bp, Artificial Sequence
  MKO10008214_A_Cbln4
  gRNA
tcaccatgggctccgcgcgc

SEQ ID NO: 8215 - DNA, 20 bp, Artificial Sequence
  MKO10008215_A_Cbln4
  gRNA
tgacacggaaccgatcgttc

SEQ ID NO: 8216 - DNA, 20 bp, Artificial Sequence
  MKO10008216_A_Cbln4
  gRNA
aaaaattacccacgttaacc

SEQ ID NO: 8217 - DNA, 20 bp, Artificial Sequence
  MKO10008217_A_Cbl
  gRNA
ctcccaggacgatagtcccg

SEQ ID NO: 8218 - DNA, 20 bp, Artificial Sequence
  MKO10008218_A_Cbl
  gRNA
aagctgatgctgccgaattt

SEQ ID NO: 8219 - DNA, 20 bp, Artificial Sequence
  MKO10008219_A_Cbl
  gRNA
tctccttggaagagtccgct

SEQ ID NO: 8220 - DNA, 20 bp, Artificial Sequence
  MKO10008220_A_Cbr1
  gRNA
taggccaaccttcttccgca

SEQ ID NO: 8221 - DNA, 20 bp, Artificial Sequence
  MKO10008221_A_Cbr1
  gRNA
ggttggcctaatagtgcata

SEQ ID NO: 8222 - DNA, 20 bp, Artificial Sequence
  MKO10008222_A_Cbr1
  gRNA
atacggaggcctggacgtgc

SEQ ID NO: 8223 - DNA, 20 bp, Artificial Sequence
  MKO10008223_A_Cbr2
  gRNA
atgattaaccgtggcgtgcc

SEQ ID NO: 8224 - DNA, 20 bp, Artificial Sequence
  MKO10008224_A_Cbr2
  gRNA
cggaatagagcccgtgtgtg

SEQ ID NO: 8225 - DNA, 20 bp, Artificial Sequence
  MKO10008225_A_Cbr2
  gRNA
caatggaccctggcacgcca

SEQ ID NO: 8226 - DNA, 20 bp, Artificial Sequence
  MKO10008226_A_Cbr3
  gRNA
gtacgggggacttaacgtgc

SEQ ID NO: 8227 - DNA, 20 bp, Artificial Sequence
  MKO10008227_A_Cbr3
  gRNA
ccgatgtgacacacttaccg

SEQ ID NO: 8228 - DNA, 20 bp, Artificial Sequence
  MKO10008228_A_Cbr3
  gRNA
gacaccccgtaagccgagtc

SEQ ID NO: 8229 - DNA, 20 bp, Artificial Sequence
  MKO10008229_A_Cbr4
  gRNA
ttcacgctcgcttgctaaag

SEQ ID NO: 8230 - DNA, 20 bp, Artificial Sequence
  MKO10008230_A_Cbr4
  gRNA
aaacccaacgagtcctcctt

SEQ ID NO: 8231 - DNA, 20 bp, Artificial Sequence
  MKO10008231_A_Cbr4
  gRNA
taaatgcagccggtatcaac

SEQ ID NO: 8232 - DNA, 20 bp, Artificial Sequence
  MKO10008232_A_Cbs
  gRNA
cagcatcttcgatcatccga

SEQ ID NO: 8233 - DNA, 20 bp, Artificial Sequence
  MKO10008233_A_Cbs
  gRNA
tcgctgcattatcgtgatgc

SEQ ID NO: 8234 - DNA, 20 bp, Artificial Sequence
  MKO10008234_A_Cbs
  gRNA
tgacccttcagggatcgggc

SEQ ID NO: 8235 - DNA, 20 bp, Artificial Sequence
  MKO10008235_A_Cbwd1
  gRNA
tcagattctctatagctcta

SEQ ID NO: 8236 - DNA, 20 bp, Artificial Sequence
  MKO10008236_A_Cbwd1
  gRNA
accaggatctgctagcccag

SEQ ID NO: 8237 - DNA, 20 bp, Artificial Sequence
  MKO10008237_A_Cbwd1
  gRNA
gtgcagtggcttctatgttt

SEQ ID NO: 8238 - DNA, 20 bp, Artificial Sequence
  MKO10008238_A_Cbx1
  gRNA
gtagctccaataatccgctc

SEQ ID NO: 8239 - DNA, 20 bp, Artificial Sequence
  MKO10008239_A_Cbx1
  gRNA
ttacagtcagaaaagccacg

SEQ ID NO: 8240 - DNA, 20 bp, Artificial Sequence
  MKO10008240_A_Cbx1
  gRNA
aacctgtgggcacttgacat

SEQ ID NO: 8241 - DNA, 20 bp, Artificial Sequence
  MKO10008241_A_Cbx2
  gRNA
gcggttcatgtagtgtacga

SEQ ID NO: 8242 - DNA, 20 bp, Artificial Sequence
  MKO10008242_A_Cbx2
  gRNA
tttaacggtgtcccgcttga

SEQ ID NO: 8243 - DNA, 20 bp, Artificial Sequence
  MKO10008243_A_Cbx2
  gRNA
accagccgcgccacttgacc

SEQ ID NO: 8244 - DNA, 20 bp, Artificial Sequence
  MKO10008244_A_Cbx3
  gRNA
aacacagtgctgataatact

SEQ ID NO: 8245 - DNA, 20 bp, Artificial Sequence
  MKO10008245_A_Cbx3
  gRNA
gtatacaggctgacaaacca

SEQ ID NO: 8246 - DNA, 20 bp, Artificial Sequence
  MKO10008246_A_Cbx3
  gRNA
caacaggaaggactcggacg

SEQ ID NO: 8247 - DNA, 20 bp, Artificial Sequence
  MKO10008247_A_Cbx4
  gRNA
cgacgctccaatgttctgac

SEQ ID NO: 8248 - DNA, 20 bp, Artificial Sequence
  MKO10008248_A_Cbx4
  gRNA
cacggccccgaggtagcctt

SEQ ID NO: 8249 - DNA, 20 bp, Artificial Sequence
  MKO10008249_A_Cbx4
  gRNA
agggcccaagcccaaaccgc

SEQ ID NO: 8250 - DNA, 20 bp, Artificial Sequence
  MKO10008250_A_Cbx5
  gRNA
taagaacattaagtcaccgc

SEQ ID NO: 8251 - DNA, 20 bp, Artificial Sequence
  MKO10008251_A_Cbx5
  gRNA
gttggacaggcgcatggtta

SEQ ID NO: 8252 - DNA, 20 bp, Artificial Sequence
  MKO10008252_A_Cbx5
  gRNA
tttaatatcatcagcgctgt

SEQ ID NO: 8253 - DNA, 20 bp, Artificial Sequence
  MKO10008253_A_Cbx6
  gRNA
cgtgcgcatcatcaaccgta

SEQ ID NO: 8254 - DNA, 20 bp, Artificial Sequence
  MKO10008254_A_Cbx6
  gRNA
cccgcccgaaagtcccctcg

SEQ ID NO: 8255 - DNA, 20 bp, Artificial Sequence
  MKO10008255_A_Cbx6
  gRNA
tcagggacgcatcgagtacc

SEQ ID NO: 8256 - DNA, 20 bp, Artificial Sequence
  MKO10008256_A_Cbx7
  gRNA
acctctcttcctataccccg

SEQ ID NO: 8257 - DNA, 20 bp, Artificial Sequence
  MKO10008257_A_Cbx7
  gRNA
gcctatggagcaagcccccg

SEQ ID NO: 8258 - DNA, 20 bp, Artificial Sequence
  MKO10008258_A_Cbx7
  gRNA
cttggaccctcgccttgtca

SEQ ID NO: 8259 - DNA, 20 bp, Artificial Sequence
  MKO10008259_A_Cbx8
  gRNA
gcgcccccatgtcccgatac

SEQ ID NO: 8260 - DNA, 20 bp, Artificial Sequence
  MKO10008260_A_Cbx8
  gRNA
ctctatggccccaaaaagcg

SEQ ID NO: 8261 - DNA, 20 bp, Artificial Sequence
  MKO10008261_A_Cbx8
  gRNA
gcctgaactatgtcgaaccc

SEQ ID NO: 8262 - DNA, 20 bp, Artificial Sequence
  MKO10008262_A_Cby1
  gRNA
cacagttagatcggtcaacg

SEQ ID NO: 8263 - DNA, 20 bp, Artificial Sequence
  MKO10008263_A_Cby1
  gRNA
cctctagactccgtgattag

SEQ ID NO: 8264 - DNA, 20 bp, Artificial Sequence
  MKO10008264_A_Cby1
  gRNA
gaatgtccactttcagccgc

SEQ ID NO: 8265 - DNA, 20 bp, Artificial Sequence
  MKO10008265_A_Cc2d1a
  gRNA
ccaagatgcgacgctatgac

SEQ ID NO: 8266 - DNA, 20 bp, Artificial Sequence
  MKO10008266_A_Cc2d1a
  gRNA
agacggcctgatgatccccg

SEQ ID NO: 8267 - DNA, 20 bp, Artificial Sequence
  MKO10008267_A_Cc2d1a
  gRNA
gctcccgtagcttggtctgc

SEQ ID NO: 8268 - DNA, 20 bp, Artificial Sequence
  MKO10008268_A_Cc2d1b
  gRNA
ttaggcctcgctcacagcgc

SEQ ID NO: 8269 - DNA, 20 bp, Artificial Sequence
  MKO10008269_A_Cc2d1b
  gRNA
ctgcggcctcccggtagtta

SEQ ID NO: 8270 - DNA, 20 bp, Artificial Sequence
  MKO10008270_A_Cc2d1b
  gRNA
agcagactgtatgcgagatg

SEQ ID NO: 8271 - DNA, 20 bp, Artificial Sequence
  MKO10008271_A_Cc2d2a
  gRNA
actcactccggggcccccgc

SEQ ID NO: 8272 - DNA, 20 bp, Artificial Sequence
  MKO10008272_A_Cc2d2a
  gRNA
aggcagaaagcgcattgttg

SEQ ID NO: 8273 - DNA, 20 bp, Artificial Sequence
  MKO10008273_A_Cc2d2a
  gRNA
caacaatgcgctttctgcct

SEQ ID NO: 8274 - DNA, 20 bp, Artificial Sequence
  MKO10008274_A_Ccar1
  gRNA
ccgccgccaatgcagtctgc

SEQ ID NO: 8275 - DNA, 20 bp, Artificial Sequence
  MKO10008275_A_Ccar1
  gRNA
agtcgacaggctaaggcttg

SEQ ID NO: 8276 - DNA, 20 bp, Artificial Sequence
  MKO10008276_A_Ccar1
  gRNA
cttgtatagtgtgcagcagc

SEQ ID NO: 8277 - DNA, 20 bp, Artificial Sequence
  MKO10008277_A_Ccar2
  gRNA
agcgcctccccttctgcacg

SEQ ID NO: 8278 - DNA, 20 bp, Artificial Sequence
  MKO10008278_A_Ccar2
  gRNA
gtgaaggccgcatacaaccc

SEQ ID NO: 8279 - DNA, 20 bp, Artificial Sequence
  MKO10008279_A_Ccar2
  gRNA
aggcgctggagacttcagta

SEQ ID NO: 8280 - DNA, 20 bp, Artificial Sequence
  MKO10008280_A_Ccbe1
  gRNA
tcgcccgaagacttcagaca

SEQ ID NO: 8281 - DNA, 20 bp, Artificial Sequence
  MKO10008281_A_Ccbe1
  gRNA
tcctacgcacccagacagta

SEQ ID NO: 8282 - DNA, 20 bp, Artificial Sequence
  MKO10008282_A_Ccbe1
  gRNA
gcgagctcaccacgtgcttc

SEQ ID NO: 8283 - DNA, 20 bp, Artificial Sequence
  MKO10008283_A_Ccbl1
  gRNA
gttcacgacatcatactcct

SEQ ID NO: 8284 - DNA, 20 bp, Artificial Sequence
  MKO10008284_A_Ccbl1
  gRNA
cacacctcgcaccaagatcc

SEQ ID NO: 8285 - DNA, 20 bp, Artificial Sequence
  MKO10008285_A_Ccbl1
  gRNA
cccgcagagtcctgctccta

SEQ ID NO: 8286 - DNA, 20 bp, Artificial Sequence
  MKO10008286_A_Ccbl2
  gRNA
ggctcgctcaccttgccgag

SEQ ID NO: 8287 - DNA, 20 bp, Artificial Sequence
  MKO10008287_A_Ccbl2
  gRNA
ttacgactgttatgagccca

SEQ ID NO: 8288 - DNA, 20 bp, Artificial Sequence
  MKO10008288_A_Ccbl2
  gRNA
ggctcataacagtcgtaaaa

SEQ ID NO: 8289 - DNA, 20 bp, Artificial Sequence
  MKO10008289_A_Ccdc101
  gRNA
cccacagcggccaagatcgc

SEQ ID NO: 8290 - DNA, 20 bp, Artificial Sequence
  MKO10008290_A_Ccdc101
  gRNA
caccaggtttcccgatccag

SEQ ID NO: 8291 - DNA, 20 bp, Artificial Sequence
  MKO10008291_A_Ccdc101
  gRNA
ctatcttatccagcgctttg

SEQ ID NO: 8292 - DNA, 20 bp, Artificial Sequence
  MKO10008292_A_Ccdc102a
  gRNA
tggcattctgccgccgtctg

SEQ ID NO: 8293 - DNA, 20 bp, Artificial Sequence
  MKO10008293_A_Ccdc102a
  gRNA
tctgggactcatctagccgt

SEQ ID NO: 8294 - DNA, 20 bp, Artificial Sequence
  MKO10008294_A_Ccdc102a
  gRNA
gctgggcgcacgctctagca

SEQ ID NO: 8295 - DNA, 20 bp, Artificial Sequence
  MKO10008295_A_Ccdc103
  gRNA
tggcattggctgagcacgcg

SEQ ID NO: 8296 - DNA, 20 bp, Artificial Sequence
  MKO10008296_A_Ccdc103
  gRNA
ttgctcaactgcccgtaact

SEQ ID NO: 8297 - DNA, 20 bp, Artificial Sequence
  MKO10008297_A_Ccdc103
  gRNA
aagtgggccagagcgctacc

SEQ ID NO: 8298 - DNA, 20 bp, Artificial Sequence
  MKO10008298_A_Ccdc104
  gRNA
gatgtgcgcgtcttcgccag

SEQ ID NO: 8299 - DNA, 20 bp, Artificial Sequence
  MKO10008299_A_Ccdc104
  gRNA
tcaagccatccgaataatcc

SEQ ID NO: 8300 - DNA, 20 bp, Artificial Sequence
  MKO10008300_A_Ccdc104
  gRNA
agaagcgtgcacgtcccctc

SEQ ID NO: 8301 - DNA, 20 bp, Artificial Sequence
  MKO10008301_A_Ccdc105
  gRNA
gggtgatgtctacccacgag

SEQ ID NO: 8302 - DNA, 20 bp, Artificial Sequence
  MKO10008302_A_Ccdc105
  gRNA
atcaagagatgtacgtcacg

SEQ ID NO: 8303 - DNA, 20 bp, Artificial Sequence
  MKO10008303_A_Ccdc105
  gRNA
acccccaactcctcgaactc

SEQ ID NO: 8304 - DNA, 20 bp, Artificial Sequence
  MKO10008304_A_Ccdc106
  gRNA
agcggcgggaatactctagc

SEQ ID NO: 8305 - DNA, 20 bp, Artificial Sequence
  MKO10008305_A_Ccdc106
  gRNA
agtactagccggaagcgatt

SEQ ID NO: 8306 - DNA, 20 bp, Artificial Sequence
  MKO10008306_A_Ccdc106
  gRNA
tataccgtctgagtccgtct

SEQ ID NO: 8307 - DNA, 20 bp, Artificial Sequence
  MKO10008307_A_Ccdc107
  gRNA
tttgggcgctctgtacaccg

SEQ ID NO: 8308 - DNA, 20 bp, Artificial Sequence
  MKO10008308_A_Ccdc107
  gRNA
ggctcgctcgcgctgatcct

SEQ ID NO: 8309 - DNA, 20 bp, Artificial Sequence
  MKO10008309_A_Ccdc107
  gRNA
aagaagaaatcctcgcagtc

SEQ ID NO: 8310 - DNA, 20 bp, Artificial Sequence
  MKO10008310_A_Ccdc108
  gRNA
tggctccagtaaccccgtag

SEQ ID NO: 8311 - DNA, 20 bp, Artificial Sequence
  MKO10008311_A_Ccdc108
  gRNA
gctgaccttaccgcttctag

SEQ ID NO: 8312 - DNA, 20 bp, Artificial Sequence
  MKO10008312_A_Ccdc108
  gRNA
ggaagtgtgagcgttatgcc

SEQ ID NO: 8313 - DNA, 20 bp, Artificial Sequence
  MKO10008313_A_Ccdc109b
  gRNA
aagccgatgttgtcgacagt

SEQ ID NO: 8314 - DNA, 20 bp, Artificial Sequence
  MKO10008314_A_Ccdc109b
  gRNA
atacacacctgccgtgatga

SEQ ID NO: 8315 - DNA, 20 bp, Artificial Sequence
  MKO10008315_A_Ccdc109b
  gRNA
gagacgagagcgccatctga

SEQ ID NO: 8316 - DNA, 20 bp, Artificial Sequence
  MKO10008316_A_Ccdc110
  gRNA
gactctacagaacgtcagca

SEQ ID NO: 8317 - DNA, 20 bp, Artificial Sequence
  MKO10008317_A_Ccdc110
  gRNA
caacttcatcttcttccgcg

SEQ ID NO: 8318 - DNA, 20 bp, Artificial Sequence
  MKO10008318_A_Ccdc110
  gRNA
gaaagcgggggcaatgaacc

SEQ ID NO: 8319 - DNA, 20 bp, Artificial Sequence
  MKO10008319_A_Ccdc112
  gRNA
gatggcggctgtagtgcttc

SEQ ID NO: 8320 - DNA, 20 bp, Artificial Sequence
  MKO10008320_A_Ccdc112
  gRNA
cagttctgaagtcgcctctt

SEQ ID NO: 8321 - DNA, 20 bp, Artificial Sequence
  MKO10008321_A_Ccdc112
  gRNA
gctctgcttacaatcaggtg

SEQ ID NO: 8322 - DNA, 20 bp, Artificial Sequence
  MKO10008322_A_Ccdc113
  gRNA
gccgacgcaggctatcatcg

SEQ ID NO: 8323 - DNA, 20 bp, Artificial Sequence
  MKO10008323_A_Ccdc113
  gRNA
ttgggttacagttacgatcc

SEQ ID NO: 8324 - DNA, 20 bp, Artificial Sequence
  MKO10008324_A_Ccdc113
  gRNA
acatgcgggctaatgcggaa

SEQ ID NO: 8325 - DNA, 20 bp, Artificial Sequence
  MKO10008325_A_Ccdc114
  gRNA
gcgctacgttaatctgcgtc

SEQ ID NO: 8326 - DNA, 20 bp, Artificial Sequence
  MKO10008326_A_Ccdc114
  gRNA
tggagctgctgcgcatcgag

SEQ ID NO: 8327 - DNA, 20 bp, Artificial Sequence
  MKO10008327_A_Ccdc114
  gRNA
gattaacgtagcgcagagcc

SEQ ID NO: 8328 - DNA, 20 bp, Artificial Sequence
  MKO10008328_A_Ccdc115
  gRNA
ggagacttacatgcttcgct

SEQ ID NO: 8329 - DNA, 20 bp, Artificial Sequence
  MKO10008329_A_Ccdc115
  gRNA
agctgacgcccagacccccg

SEQ ID NO: 8330 - DNA, 20 bp, Artificial Sequence
  MKO10008330_A_Ccdc115
  gRNA
ttcagctctgcgcaggcgca

SEQ ID NO: 8331 - DNA, 20 bp, Artificial Sequence
  MKO10008331_A_Ccdc116
  gRNA
cgagatcgatgcctactact

SEQ ID NO: 8332 - DNA, 20 bp, Artificial Sequence
  MKO10008332_A_Ccdc116
  gRNA
gcgaggtgccgccaccactc

SEQ ID NO: 8333 - DNA, 20 bp, Artificial Sequence
  MKO10008333_A_Ccdc116
  gRNA
ggtggatattcaagaccccg

SEQ ID NO: 8334 - DNA, 20 bp, Artificial Sequence
  MKO10008334_A_Ccdc117
  gRNA
cgcgccgctttaccgtagtc

SEQ ID NO: 8335 - DNA, 20 bp, Artificial Sequence
  MKO10008335_A_Ccdc117
  gRNA
cacagtgtgaagtcgcccga

SEQ ID NO: 8336 - DNA, 20 bp, Artificial Sequence
  MKO10008336_A_Ccdc117
  gRNA
agcggcgcgtctgcgcactg

SEQ ID NO: 8337 - DNA, 20 bp, Artificial Sequence
  MKO10008337_A_Ccdc11
  gRNA
agcacctgtttgcgaggctt

SEQ ID NO: 8338 - DNA, 20 bp, Artificial Sequence
  MKO10008338_A_Ccdc11
  gRNA
ccctttcagggaacgctgtg

SEQ ID NO: 8339 - DNA, 20 bp, Artificial Sequence
  MKO10008339_A_Ccdc11
  gRNA
ccttcaagacttacaagatg

SEQ ID NO: 8340 - DNA, 20 bp, Artificial Sequence
  MKO10008340_A_Ccdc120
  gRNA
ggcctccggcggaccaactg

SEQ ID NO: 8341 - DNA, 20 bp, Artificial Sequence
  MKO10008341_A_Ccdc120
  gRNA
ccgccagcgagccttgcaag

SEQ ID NO: 8342 - DNA, 20 bp, Artificial Sequence
  MKO10008342_A_Ccdc120
  gRNA
tacaggttgatgcacttcga

SEQ ID NO: 8343 - DNA, 20 bp, Artificial Sequence
  MKO10008343_A_Ccdc121
  gRNA
gaacgcgagcgccatcatcg

SEQ ID NO: 8344 - DNA, 20 bp, Artificial Sequence
  MKO10008344_A_Ccdc121
  gRNA
gtacttcctcgtaagccccg

SEQ ID NO: 8345 - DNA, 20 bp, Artificial Sequence
  MKO10008345_A_Ccdc121
  gRNA
catccaacctgccgtactcc

SEQ ID NO: 8346 - DNA, 20 bp, Artificial Sequence
  MKO10008346_A_Ccdc122
  gRNA
aggcctgctctgtatttcac

SEQ ID NO: 8347 - DNA, 20 bp, Artificial Sequence
  MKO10008347_A_Ccdc122
  gRNA
ctgcagctgagttaaaaaag

SEQ ID NO: 8348 - DNA, 20 bp, Artificial Sequence
  MKO10008348_A_Ccdc122
  gRNA
aaaacctccaagattcacaa

SEQ ID NO: 8349 - DNA, 20 bp, Artificial Sequence
  MKO10008349_A_Ccdc124
  gRNA
gccgctcgcatccggcgctc

SEQ ID NO: 8350 - DNA, 20 bp, Artificial Sequence
  MKO10008350_A_Ccdc124
  gRNA
gaaccttaaccggcgcctgc

SEQ ID NO: 8351 - DNA, 20 bp, Artificial Sequence
  MKO10008351_A_Ccdc124
  gRNA
cccacgtgtggcgcccgcca

SEQ ID NO: 8352 - DNA, 20 bp, Artificial Sequence
  MKO10008352_A_Ccdc125
  gRNA
acgtcttcatgaagccttag

SEQ ID NO: 8353 - DNA, 20 bp, Artificial Sequence
  MKO10008353_A_Ccdc125
  gRNA
ggctaatgagcaaagtgccg

SEQ ID NO: 8354 - DNA, 20 bp, Artificial Sequence
  MKO10008354_A_Ccdc125
  gRNA
gttcgattacatctaagaaa

SEQ ID NO: 8355 - DNA, 20 bp, Artificial Sequence
  MKO10008355_A_Ccdc126
  gRNA
acatgttccgtacaatctca

SEQ ID NO: 8356 - DNA, 20 bp, Artificial Sequence
  MKO10008356_A_Ccdc126
  gRNA
ttgacgctgctctgccgccg

SEQ ID NO: 8357 - DNA, 20 bp, Artificial Sequence
  MKO10008357_A_Ccdc126
  gRNA
taccggcaccaaattcccat

SEQ ID NO: 8358 - DNA, 20 bp, Artificial Sequence
  MKO10008358_A_Ccdc127
  gRNA
acttacgcccctgcgagatg

SEQ ID NO: 8359 - DNA, 20 bp, Artificial Sequence
  MKO10008359_A_Ccdc127
  gRNA
tcgagaagccctcatctcgc

SEQ ID NO: 8360 - DNA, 20 bp, Artificial Sequence
  MKO10008360_A_Ccdc127
  gRNA
acttaaacgaccccccaaat

SEQ ID NO: 8361 - DNA, 20 bp, Artificial Sequence
  MKO10008361_A_Ccdc129
  gRNA
gcagcttctttgcacgaaca

SEQ ID NO: 8362 - DNA, 20 bp, Artificial Sequence
  MKO10008362_A_Ccdc129
  gRNA
cagcaaaccatcaaccatac

SEQ ID NO: 8363 - DNA, 20 bp, Artificial Sequence
  MKO10008363_A_Ccdc129
  gRNA
cgagttgaaactagtccctc

SEQ ID NO: 8364 - DNA, 20 bp, Artificial Sequence
  MKO10008364_A_Ccdc12
  gRNA
tcatgtacctgccactggtt

SEQ ID NO: 8365 - DNA, 20 bp, Artificial Sequence
  MKO10008365_A_Ccdc12
  gRNA
tccctaggacctggccaacc

SEQ ID NO: 8366 - DNA, 20 bp, Artificial Sequence
  MKO10008366_A_Ccdc12
  gRNA
ctcaccacttcctcaatgac

SEQ ID NO: 8367 - DNA, 20 bp, Artificial Sequence
  MKO10008367_A_Ccdc130
  gRNA
ttccgagcccgttctcgaag

SEQ ID NO: 8368 - DNA, 20 bp, Artificial Sequence
  MKO10008368_A_Ccdc130
  gRNA
tagtttcttaccggataaca

SEQ ID NO: 8369 - DNA, 20 bp, Artificial Sequence
  MKO10008369_A_Ccdc130
  gRNA
cacgctcacccatgccgatg

SEQ ID NO: 8370 - DNA, 20 bp, Artificial Sequence
  MKO10008370_A_Ccdc132
  gRNA
atacctttccagggacccga

SEQ ID NO: 8371 - DNA, 20 bp, Artificial Sequence
  MKO10008371_A_Ccdc132
  gRNA
aactcttgcagattgagaac

SEQ ID NO: 8372 - DNA, 20 bp, Artificial Sequence
  MKO10008372_A_Ccdc132
  gRNA
atcaactcttgctcagcttg

SEQ ID NO: 8373 - DNA, 20 bp, Artificial Sequence
  MKO10008373_A_Ccdc134
  gRNA
ctcgccagctttctcgcacg

SEQ ID NO: 8374 - DNA, 20 bp, Artificial Sequence
  MKO10008374_A_Ccdc134
  gRNA
cagcacgacgtcaccaaaaa

SEQ ID NO: 8375 - DNA, 20 bp, Artificial Sequence
  MKO10008375_A_Ccdc134
  gRNA
cggcccgtctggaagcacat

SEQ ID NO: 8376 - DNA, 20 bp, Artificial Sequence
  MKO10008376_A_Ccdc135
  gRNA
tatgatgcctactgcgtcaa

SEQ ID NO: 8377 - DNA, 20 bp, Artificial Sequence
  MKO10008377_A_Ccdc135
  gRNA
ggtcgaggaatataagtgcg

SEQ ID NO: 8378 - DNA, 20 bp, Artificial Sequence
  MKO10008378_A_Ccdc135
  gRNA
caggtcccggggcggcttga

SEQ ID NO: 8379 - DNA, 20 bp, Artificial Sequence
  MKO10008379_A_Ccdc136
  gRNA
agttgtagcgctcccgaaga

SEQ ID NO: 8380 - DNA, 20 bp, Artificial Sequence
  MKO10008380_A_Ccdc136
  gRNA
tgcctcgctccgggcagaaa

SEQ ID NO: 8381 - DNA, 20 bp, Artificial Sequence
  MKO10008381_A_Ccdc136
  gRNA
gagtgacatagcgtccttgc

SEQ ID NO: 8382 - DNA, 20 bp, Artificial Sequence
  MKO10008382_A_Ccdc137
  gRNA
tgtggcctacgtccagcgca

SEQ ID NO: 8383 - DNA, 20 bp, Artificial Sequence
  MKO10008383_A_Ccdc137
  gRNA
caggttccagaagcgacgac

SEQ ID NO: 8384 - DNA, 20 bp, Artificial Sequence
  MKO10008384_A_Ccdc137
  gRNA
ataatttctcggagccgaaa

SEQ ID NO: 8385 - DNA, 20 bp, Artificial Sequence
  MKO10008385_A_Ccdc138
  gRNA
tcaccaagatattactctga

SEQ ID NO: 8386 - DNA, 20 bp, Artificial Sequence
  MKO10008386_A_Ccdc138
  gRNA
ggtttagatacttacagctc

SEQ ID NO: 8387 - DNA, 20 bp, Artificial Sequence
  MKO10008387_A_Ccdc138
  gRNA
ttaaagcctagatgatgaac

SEQ ID NO: 8388 - DNA, 20 bp, Artificial Sequence
  MKO10008388_A_Ccdc13
  gRNA
gcgactatataagctgctga

SEQ ID NO: 8389 - DNA, 20 bp, Artificial Sequence
  MKO10008389_A_Ccdc13
  gRNA
ggccgagtcagagagcgcaa

SEQ ID NO: 8390 - DNA, 20 bp, Artificial Sequence
  MKO10008390_A_Ccdc13
  gRNA
gcagctgaccaatcgcatcc

SEQ ID NO: 8391 - DNA, 20 bp, Artificial Sequence
  MKO10008391_A_Ccdc141
  gRNA
cagcccaatctcctcgaaat

SEQ ID NO: 8392 - DNA, 20 bp, Artificial Sequence
  MKO10008392_A_Ccdc141
  gRNA
cttgactgctcccaatttcg

SEQ ID NO: 8393 - DNA, 20 bp, Artificial Sequence
  MKO10008393_A_Ccdc141
  gRNA
tgacgccatggcccagacgc

SEQ ID NO: 8394 - DNA, 20 bp, Artificial Sequence
  MKO10008394_A_Ccdc142
  gRNA
aggtcctacgcctgtcgctc

SEQ ID NO: 8395 - DNA, 20 bp, Artificial Sequence
  MKO10008395_A_Ccdc142
  gRNA
cttaggctgtgtccgcctgc

SEQ ID NO: 8396 - DNA, 20 bp, Artificial Sequence
  MKO10008396_A_Ccdc142
  gRNA
tggatagccttcgacagccc

SEQ ID NO: 8397 - DNA, 20 bp, Artificial Sequence
  MKO10008397_A_Ccdc144b
  gRNA
cccgcatcttctccgtgcac

SEQ ID NO: 8398 - DNA, 20 bp, Artificial Sequence
  MKO10008398_A_Ccdc144b
  gRNA
gcacgtgaacaactccaaca

SEQ ID NO: 8399 - DNA, 20 bp, Artificial Sequence
  MKO10008399_A_Ccdc144b
  gRNA
aaaaacttgaaattcgtgtt

SEQ ID NO: 8400 - DNA, 20 bp, Artificial Sequence
  MKO10008400_A_Ccdc146
  gRNA
gcgctgccgtgtattcattt

SEQ ID NO: 8401 - DNA, 20 bp, Artificial Sequence
  MKO10008401_A_Ccdc146
  gRNA
ggagaacgccaagcgcttca

SEQ ID NO: 8402 - DNA, 20 bp, Artificial Sequence
  MKO10008402_A_Ccdc146
  gRNA
caccttgctacacgatacag

SEQ ID NO: 8403 - DNA, 20 bp, Artificial Sequence
  MKO10008403_A_Ccdc147
  gRNA
gcctgccgtccatgtccgtc

SEQ ID NO: 8404 - DNA, 20 bp, Artificial Sequence
  MKO10008404_A_Ccdc147
  gRNA
gaccttcttaagggatgcga

SEQ ID NO: 8405 - DNA, 20 bp, Artificial Sequence
  MKO10008405_A_Ccdc147
  gRNA
cgagaatgagaagcgtctca

SEQ ID NO: 8406 - DNA, 20 bp, Artificial Sequence
  MKO10008406_A_Ccdc148
  gRNA
tgcaattagaagacatacgc

SEQ ID NO: 8407 - DNA, 20 bp, Artificial Sequence
  MKO10008407_A_Ccdc148
  gRNA
gacgatttcagatctgggta

SEQ ID NO: 8408 - DNA, 20 bp, Artificial Sequence
  MKO10008408_A_Ccdc148
  gRNA
cagttgcgtctgagccctca

SEQ ID NO: 8409 - DNA, 20 bp, Artificial Sequence
  MKO10008409_A_Ccdc149
  gRNA
caaccaagtcttcccgctcg

SEQ ID NO: 8410 - DNA, 20 bp, Artificial Sequence
  MKO10008410_A_Ccdc149
  gRNA
ggatgacgattgccaaacaa

SEQ ID NO: 8411 - DNA, 20 bp, Artificial Sequence
  MKO10008411_A_Ccdc149
  gRNA
acagtaccttattgtcaccc

SEQ ID NO: 8412 - DNA, 20 bp, Artificial Sequence
  MKO10008412_A_Ccdc14
  gRNA
ctttctgaatcagattgaac

SEQ ID NO: 8413 - DNA, 20 bp, Artificial Sequence
  MKO10008413_A_Ccdc14
  gRNA
aagcacaaccgtcaagtccc

SEQ ID NO: 8414 - DNA, 20 bp, Artificial Sequence
  MKO10008414_A_Ccdc14
  gRNA
cctggagctaagttaccaaa

SEQ ID NO: 8415 - DNA, 20 bp, Artificial Sequence
  MKO10008415_A_Ccdc150
  gRNA
caccgtatcctagcattatt

SEQ ID NO: 8416 - DNA, 20 bp, Artificial Sequence
  MKO10008416_A_Ccdc150
  gRNA
accacgaacctttgtctccg

SEQ ID NO: 8417 - DNA, 20 bp, Artificial Sequence
  MKO10008417_A_Ccdc150
  gRNA
ccttgacaactttcaattgc

SEQ ID NO: 8418 - DNA, 20 bp, Artificial Sequence
  MKO10008418_A_Ccdc151
  gRNA
gctgaatgccttgcgacacc

SEQ ID NO: 8419 - DNA, 20 bp, Artificial Sequence
  MKO10008419_A_Ccdc151
  gRNA
gtttctgccgcagtattacc

SEQ ID NO: 8420 - DNA, 20 bp, Artificial Sequence
  MKO10008420_A_Ccdc151
  gRNA
tgccgcagagggtgaccgga

SEQ ID NO: 8421 - DNA, 20 bp, Artificial Sequence
  MKO10008421_A_Ccdc152
  gRNA
gaactgaccttctttcatcg

SEQ ID NO: 8422 - DNA, 20 bp, Artificial Sequence
  MKO10008422_A_Ccdc152
  gRNA
caaccttctggatattcagc

SEQ ID NO: 8423 - DNA, 20 bp, Artificial Sequence
  MKO10008423_A_Ccdc152
  gRNA
caatatcaacacaatttgaa

SEQ ID NO: 8424 - DNA, 20 bp, Artificial Sequence
  MKO10008424_A_Ccdc153
  gRNA
cctcctttagggcctgccgc

SEQ ID NO: 8425 - DNA, 20 bp, Artificial Sequence
  MKO10008425_A_Ccdc153
  gRNA
cctcagagatgagccgccag

SEQ ID NO: 8426 - DNA, 20 bp, Artificial Sequence
  MKO10008426_A_Ccdc153
  gRNA
caggctggtgctgctcgaga

SEQ ID NO: 8427 - DNA, 20 bp, Artificial Sequence
  MKO10008427_A_Ccdc154
  gRNA
aggctctacaggactcggag

SEQ ID NO: 8428 - DNA, 20 bp, Artificial Sequence
  MKO10008428_A_Ccdc154
  gRNA
cctgagcactgtcacactcg

SEQ ID NO: 8429 - DNA, 20 bp, Artificial Sequence
  MKO10008429_A_Ccdc154
  gRNA
aagtagtacaacaggcagcc

SEQ ID NO: 8430 - DNA, 20 bp, Artificial Sequence
  MKO10008430_A_Ccdc155
  gRNA
gcagaggagaccgcctacga

SEQ ID NO: 8431 - DNA, 20 bp, Artificial Sequence
  MKO10008431_A_Ccdc155
  gRNA
gtcccgcatgaccaccagaa

SEQ ID NO: 8432 - DNA, 20 bp, Artificial Sequence
  MKO10008432_A_Ccdc155
  gRNA
agcccgaggaagcgagttca

SEQ ID NO: 8433 - DNA, 20 bp, Artificial Sequence
  MKO10008433_A_Ccdc157
  gRNA
ccaaggctgtctcgacggtc

SEQ ID NO: 8434 - DNA, 20 bp, Artificial Sequence
  MKO10008434_A_Ccdc157
  gRNA
gacttacagtacggcgcttc

SEQ ID NO: 8435 - DNA, 20 bp, Artificial Sequence
  MKO10008435_A_Ccdc157
  gRNA
gcgccgtactgtaagtccca

SEQ ID NO: 8436 - DNA, 20 bp, Artificial Sequence
  MKO10008436_A_Ccdc158
  gRNA
taccatgcacttccgcagcc

SEQ ID NO: 8437 - DNA, 20 bp, Artificial Sequence
  MKO10008437_A_Ccdc158
  gRNA
gctgatttcgtgactcctcc

SEQ ID NO: 8438 - DNA, 20 bp, Artificial Sequence
  MKO10008438_A_Ccdc158
  gRNA
tacttcaacaacatcaagat

SEQ ID NO: 8439 - DNA, 20 bp, Artificial Sequence
  MKO10008439_A_Ccdc159
  gRNA
gaagcagtgttcacgatctc

SEQ ID NO: 8440 - DNA, 20 bp, Artificial Sequence
  MKO10008440_A_Ccdc159
  gRNA
cgttactcgccatcacatct

SEQ ID NO: 8441 - DNA, 20 bp, Artificial Sequence
  MKO10008441_A_Ccdc159
  gRNA
cctagggccctcctcagaca

SEQ ID NO: 8442 - DNA, 20 bp, Artificial Sequence
  MKO10008442_A_Ccdc15
  gRNA
gctggaattcccgaccaatt

SEQ ID NO: 8443 - DNA, 20 bp, Artificial Sequence
  MKO10008443_A_Ccdc15
  gRNA
tcaatcagcgggttaagctg

SEQ ID NO: 8444 - DNA, 20 bp, Artificial Sequence
  MKO10008444_A_Ccdc15
  gRNA
gcttagtcaaactatgaaac

SEQ ID NO: 8445 - DNA, 20 bp, Artificial Sequence
  MKO10008445_A_Ccdc160
  gRNA
gagtgtctaacttctccgtt

SEQ ID NO: 8446 - DNA, 20 bp, Artificial Sequence
  MKO10008446_A_Ccdc160
  gRNA
tcatttggatgatgcaacga

SEQ ID NO: 8447 - DNA, 20 bp, Artificial Sequence
  MKO10008447_A_Ccdc160
  gRNA
gaagggagagcgcctccgcg

SEQ ID NO: 8448 - DNA, 20 bp, Artificial Sequence
  MKO10008448_A_Ccdc162
  gRNA
tccgggacgctgcttataac

SEQ ID NO: 8449 - DNA, 20 bp, Artificial Sequence
  MKO10008449_A_Ccdc162
  gRNA
taccgaatggcaagctgcac

SEQ ID NO: 8450 - DNA, 20 bp, Artificial Sequence
  MKO10008450_A_Ccdc162
  gRNA
cctgccctcgaagcttgaat

SEQ ID NO: 8451 - DNA, 20 bp, Artificial Sequence
  MKO10008451_A_Ccdc163
  gRNA
gctcttgaacctgactccga

SEQ ID NO: 8452 - DNA, 20 bp, Artificial Sequence
  MKO10008452_A_Ccdc163
  gRNA
actgcagggccttcggagtc

SEQ ID NO: 8453 - DNA, 20 bp, Artificial Sequence
  MKO10008453_A_Ccdc163
  gRNA
ttctgtacagagcctgttga

SEQ ID NO: 8454 - DNA, 20 bp, Artificial Sequence
  MKO10008454_A_Ccdc166
  gRNA
ttcgacgcgcacgacggcgt

SEQ ID NO: 8455 - DNA, 20 bp, Artificial Sequence
  MKO10008455_A_Ccdc166
  gRNA
gcaacgcgtactcgcgctgt

SEQ ID NO: 8456 - DNA, 20 bp, Artificial Sequence
  MKO10008456_A_Ccdc166
  gRNA
gctggcgcgaatccggaccc

SEQ ID NO: 8457 - DNA, 20 bp, Artificial Sequence
  MKO10008457_A_Ccdc167
  gRNA
gaatcttggtgtcgctcagg

SEQ ID NO: 8458 - DNA, 20 bp, Artificial Sequence
  MKO10008458_A_Ccdc167
  gRNA
atttcagattgacgggctag

SEQ ID NO: 8459 - DNA, 20 bp, Artificial Sequence
  MKO10008459_A_Ccdc167
  gRNA
aaagctgtcccggtgtcgga

SEQ ID NO: 8460 - DNA, 20 bp, Artificial Sequence
  MKO10008460_A_Ccdc169
  gRNA
cttgtgccgtatctcaagtg

SEQ ID NO: 8461 - DNA, 20 bp, Artificial Sequence
  MKO10008461_A_Ccdc169
  gRNA
tacctgcaaggtcaccgttg

SEQ ID NO: 8462 - DNA, 20 bp, Artificial Sequence
  MKO10008462_A_Ccdc169
  gRNA
gaaagaatatgcgtttagac

SEQ ID NO: 8463 - DNA, 20 bp, Artificial Sequence
  MKO10008463_A_Ccdc170
  gRNA
cccgaaattcctcgtgcctc

SEQ ID NO: 8464 - DNA, 20 bp, Artificial Sequence
  MKO10008464_A_Ccdc170
  gRNA
cttcatcatggcgtgaacag

SEQ ID NO: 8465 - DNA, 20 bp, Artificial Sequence
  MKO10008465_A_Ccdc170
  gRNA
gagtagcgagctgtcctttc

SEQ ID NO: 8466 - DNA, 20 bp, Artificial Sequence
  MKO10008466_A_Ccdc171
  gRNA
taatctaaattcgcccaatg

SEQ ID NO: 8467 - DNA, 20 bp, Artificial Sequence
  MKO10008467_A_Ccdc171
  gRNA
agaagcgctgcgacagcgtc

SEQ ID NO: 8468 - DNA, 20 bp, Artificial Sequence
  MKO10008468_A_Ccdc171
  gRNA
ctcttgaatccgctgcgcct

SEQ ID NO: 8469 - DNA, 20 bp, Artificial Sequence
  MKO10008469_A_Ccdc172
  gRNA
aacgtaaccgtggacagtta

SEQ ID NO: 8470 - DNA, 20 bp, Artificial Sequence
  MKO10008470_A_Ccdc172
  gRNA
aatggctgacttagacagcc

SEQ ID NO: 8471 - DNA, 20 bp, Artificial Sequence
  MKO10008471_A_Ccdc172
  gRNA
tcagtgagattatcagcgag

SEQ ID NO: 8472 - DNA, 20 bp, Artificial Sequence
  MKO10008472_A_Ccdc173
  gRNA
ggatccgggatagcctcaac

SEQ ID NO: 8473 - DNA, 20 bp, Artificial Sequence
  MKO10008473_A_Ccdc173
  gRNA
ccataatcccacacgctgag

SEQ ID NO: 8474 - DNA, 20 bp, Artificial Sequence
  MKO10008474_A_Ccdc173
  gRNA
agcgcttcactcgctccgtc

SEQ ID NO: 8475 - DNA, 20 bp, Artificial Sequence
  MKO10008475_A_Ccdc174
  gRNA
cacgagagagtcccaaatcg

SEQ ID NO: 8476 - DNA, 20 bp, Artificial Sequence
  MKO10008476_A_Ccdc174
  gRNA
attctagttggtagatctta

SEQ ID NO: 8477 - DNA, 20 bp, Artificial Sequence
  MKO10008477_A_Ccdc174
  gRNA
cattacccaccattcctcac

SEQ ID NO: 8478 - DNA, 20 bp, Artificial Sequence
  MKO10008478_A_Ccdc175
  gRNA
gagccgactttactttctgc

SEQ ID NO: 8479 - DNA, 20 bp, Artificial Sequence
  MKO10008479_A_Ccdc175
  gRNA
tactgtagctgttaaaaaac

SEQ ID NO: 8480 - DNA, 20 bp, Artificial Sequence
  MKO10008480_A_Ccdc175
  gRNA
cctgctgctgaaccaaacct

SEQ ID NO: 8481 - DNA, 20 bp, Artificial Sequence
  MKO10008481_A_Ccdc176
  gRNA
ctgaatcatgccgatttcct

SEQ ID NO: 8482 - DNA, 20 bp, Artificial Sequence
  MKO10008482_A_Ccdc176
  gRNA
tcgtgatacttcccgaagac

SEQ ID NO: 8483 - DNA, 20 bp, Artificial Sequence
  MKO10008483_A_Ccdc176
  gRNA
attaagctacttgaagaagc

SEQ ID NO: 8484 - DNA, 20 bp, Artificial Sequence
  MKO10008484_A_Ccdc177
  gRNA
ggcgatcttgcggtcgcgct

SEQ ID NO: 8485 - DNA, 20 bp, Artificial Sequence
  MKO10008485_A_Ccdc177
  gRNA
gcgcatgatgcgctcgcgct

SEQ ID NO: 8486 - DNA, 20 bp, Artificial Sequence
  MKO10008486_A_Ccdc177
  gRNA
ccgcctcgtaggcctcgtac

SEQ ID NO: 8487 - DNA, 20 bp, Artificial Sequence
  MKO10008487_A_Ccdc178
  gRNA
gtacaactatgtcgccgact

SEQ ID NO: 8488 - DNA, 20 bp, Artificial Sequence
  MKO10008488_A_Ccdc178
  gRNA
gaaagggcattaatgcttgc

SEQ ID NO: 8489 - DNA, 20 bp, Artificial Sequence
  MKO10008489_A_Ccdc178
  gRNA
tctacttcagctacccaagt

SEQ ID NO: 8490 - DNA, 20 bp, Artificial Sequence
  MKO10008490_A_Ccdc17
  gRNA
agctcgcgctccaagtcgaa

SEQ ID NO: 8491 - DNA, 20 bp, Artificial Sequence
  MKO10008491_A_Ccdc17
  gRNA
aaaacggcgcctccacagcg

SEQ ID NO: 8492 - DNA, 20 bp, Artificial Sequence
  MKO10008492_A_Ccdc17
  gRNA
cgccgcgacgctccagcgcc

SEQ ID NO: 8493 - DNA, 20 bp, Artificial Sequence
  MKO10008493_A_Ccdc181
  gRNA
gttctcgtgtcagttaccga

SEQ ID NO: 8494 - DNA, 20 bp, Artificial Sequence
  MKO10008494_A_Ccdc181
  gRNA
gatccaacggctgaatactt

SEQ ID NO: 8495 - DNA, 20 bp, Artificial Sequence
  MKO10008495_A_Ccdc181
  gRNA
actgtcgaaaggctctctcg

SEQ ID NO: 8496 - DNA, 20 bp, Artificial Sequence
  MKO10008496_A_Ccdc18
  gRNA
ggtaaatcaaacgtcccagg

SEQ ID NO: 8497 - DNA, 20 bp, Artificial Sequence
  MKO10008497_A_Ccdc18
  gRNA
ataagcctttcagatcttga

SEQ ID NO: 8498 - DNA, 20 bp, Artificial Sequence
  MKO10008498_A_Ccdc18
  gRNA
gtttatgaagtttctctcga

SEQ ID NO: 8499 - DNA, 20 bp, Artificial Sequence
  MKO10008499_A_Ccdc19
  gRNA
agcgagtcctagtccgtgac

SEQ ID NO: 8500 - DNA, 20 bp, Artificial Sequence
  MKO10008500_A_Ccdc19
  gRNA
gagagccgacaagctccgta

SEQ ID NO: 8501 - DNA, 20 bp, Artificial Sequence
  MKO10008501_A_Ccdc19
  gRNA
tccatgataaacacgctatc

SEQ ID NO: 8502 - DNA, 20 bp, Artificial Sequence
  MKO10008502_A_Ccdc22
  gRNA
gagccaaatccgggaccagc

SEQ ID NO: 8503 - DNA, 20 bp, Artificial Sequence
  MKO10008503_A_Ccdc22
  gRNA
gggccagctggtcccggatt

SEQ ID NO: 8504 - DNA, 20 bp, Artificial Sequence
  MKO10008504_A_Ccdc22
  gRNA
cctccgctggaattcaactc

SEQ ID NO: 8505 - DNA, 20 bp, Artificial Sequence
  MKO10008505_A_Ccdc23
  gRNA
agaagtgaggagactcgact

SEQ ID NO: 8506 - DNA, 20 bp, Artificial Sequence
  MKO10008506_A_Ccdc23
  gRNA
agtctcagtttcctgcacaa

SEQ ID NO: 8507 - DNA, 20 bp, Artificial Sequence
  MKO10008507_A_Ccdc23
  gRNA
aaaccatggatccacctgcc

SEQ ID NO: 8508 - DNA, 20 bp, Artificial Sequence
  MKO10008508_A_Ccdc24
  gRNA
caatattagacacattcagt

SEQ ID NO: 8509 - DNA, 20 bp, Artificial Sequence
  MKO10008509_A_Ccdc24
  gRNA
tatcctctaaggcaaagcga

SEQ ID NO: 8510 - DNA, 20 bp, Artificial Sequence
  MKO10008510_A_Ccdc24
  gRNA
gactatactgggcccacatc

SEQ ID NO: 8511 - DNA, 20 bp, Artificial Sequence
  MKO10008511_A_Ccdc25
  gRNA
caactgaccttgaatgctat

SEQ ID NO: 8512 - DNA, 20 bp, Artificial Sequence
  MKO10008512_A_Ccdc25
  gRNA
tgtgtacctacgattacaaa

SEQ ID NO: 8513 - DNA, 20 bp, Artificial Sequence
  MKO10008513_A_Ccdc25
  gRNA
ggactgtgcccaccttgtga

SEQ ID NO: 8514 - DNA, 20 bp, Artificial Sequence
  MKO10008514_A_Ccdc27
  gRNA
ccggtgggactcgggtctga

SEQ ID NO: 8515 - DNA, 20 bp, Artificial Sequence
  MKO10008515_A_Ccdc27
  gRNA
tctccatctcggagaaacgc

SEQ ID NO: 8516 - DNA, 20 bp, Artificial Sequence
  MKO10008516_A_Ccdc27
  gRNA
gctccagcgtttctccgaga

SEQ ID NO: 8517 - DNA, 20 bp, Artificial Sequence
  MKO10008517_A_Ccdc28a
  gRNA
ctcctggacatccgagacgt

SEQ ID NO: 8518 - DNA, 20 bp, Artificial Sequence
  MKO10008518_A_Ccdc28a
  gRNA
ctccttcctcaccgacgtct

SEQ ID NO: 8519 - DNA, 20 bp, Artificial Sequence
  MKO10008519_A_Ccdc28a
  gRNA
cgtccgacagaagcctgtcc

SEQ ID NO: 8520 - DNA, 20 bp, Artificial Sequence
  MKO10008520_A_Ccdc28b
  gRNA
ttaggcgacacctacgcagc

SEQ ID NO: 8521 - DNA, 20 bp, Artificial Sequence
  MKO10008521_A_Ccdc28b
  gRNA
gacaatggctgaccgcaacc

SEQ ID NO: 8522 - DNA, 20 bp, Artificial Sequence
  MKO10008522_A_Ccdc28b
  gRNA
cggacttaccaaaggcctgc

SEQ ID NO: 8523 - DNA, 20 bp, Artificial Sequence
  MKO10008523_A_Ccdc30
  gRNA
ccgagtcaagtgatcgaacc

SEQ ID NO: 8524 - DNA, 20 bp, Artificial Sequence
  MKO10008524_A_Ccdc30
  gRNA
tgcacttgagaatgcccgac

SEQ ID NO: 8525 - DNA, 20 bp, Artificial Sequence
  MKO10008525_A_Ccdc30
  gRNA
gaatttcctcgtccagcctc

SEQ ID NO: 8526 - DNA, 20 bp, Artificial Sequence
  MKO10008526_A_Ccdc32
  gRNA
atggactcgattccgatgag

SEQ ID NO: 8527 - DNA, 20 bp, Artificial Sequence
  MKO10008527_A_Ccdc32
  gRNA
caaagtctggccgggatctc

SEQ ID NO: 8528 - DNA, 20 bp, Artificial Sequence
  MKO10008528_A_Ccdc32
  gRNA
gtgctgggatcgattcctcc

SEQ ID NO: 8529 - DNA, 20 bp, Artificial Sequence
  MKO10008529_A_Ccdc33
  gRNA
ctctgaaccgtggccctacg

SEQ ID NO: 8530 - DNA, 20 bp, Artificial Sequence
  MKO10008530_A_Ccdc33
  gRNA
atatcctgccgccaactacc

SEQ ID NO: 8531 - DNA, 20 bp, Artificial Sequence
  MKO10008531_A_Ccdc33
  gRNA
aacccaccagagcccccgtc

SEQ ID NO: 8532 - DNA, 20 bp, Artificial Sequence
  MKO10008532_A_Ccdc34
  gRNA
ccggctacaacagaaatttc

SEQ ID NO: 8533 - DNA, 20 bp, Artificial Sequence
  MKO10008533_A_Ccdc34
  gRNA
tgcaaaaaataaacctcgtc

SEQ ID NO: 8534 - DNA, 20 bp, Artificial Sequence
  MKO10008534_A_Ccdc34
  gRNA
agcacggcagtctgacgcca

SEQ ID NO: 8535 - DNA, 20 bp, Artificial Sequence
  MKO10008535_A_Ccdc36
  gRNA
ttgtatcgcctccaagcaac

SEQ ID NO: 8536 - DNA, 20 bp, Artificial Sequence
  MKO10008536_A_Ccdc36
  gRNA
gggcaacggaccaatctgac

SEQ ID NO: 8537 - DNA, 20 bp, Artificial Sequence
  MKO10008537_A_Ccdc36
  gRNA
ggatcactaaaccatctaac

SEQ ID NO: 8538 - DNA, 20 bp, Artificial Sequence
  MKO10008538_A_Ccdc37
  gRNA
gggtgctgtaccgcgggtca

SEQ ID NO: 8539 - DNA, 20 bp, Artificial Sequence
  MKO10008539_A_Ccdc37
  gRNA
agtgtgcttggccgatacct

SEQ ID NO: 8540 - DNA, 20 bp, Artificial Sequence
  MKO10008540_A_Ccdc37
  gRNA
gtaaccctttccacatatca

SEQ ID NO: 8541 - DNA, 20 bp, Artificial Sequence
  MKO10008541_A_Ccdc38
  gRNA
atctagccccagacgttcat

SEQ ID NO: 8542 - DNA, 20 bp, Artificial Sequence
  MKO10008542_A_Ccdc38
  gRNA
cgtcagcgaaaaaagctagc

SEQ ID NO: 8543 - DNA, 20 bp, Artificial Sequence
  MKO10008543_A_Ccdc38
  gRNA
ttctcgtaggaattcttcaa

SEQ ID NO: 8544 - DNA, 20 bp, Artificial Sequence
  MKO10008544_A_Ccdc39
  gRNA
gacagagacgctaagtgcgc

SEQ ID NO: 8545 - DNA, 20 bp, Artificial Sequence
  MKO10008545_A_Ccdc39
  gRNA
agaaggagatggcgatcatc

SEQ ID NO: 8546 - DNA, 20 bp, Artificial Sequence
  MKO10008546_A_Ccdc39
  gRNA
gtgagccgattcttccagcc

SEQ ID NO: 8547 - DNA, 20 bp, Artificial Sequence
  MKO10008547_A_Ccdc3
  gRNA
tgacgactttctcgagtgac

SEQ ID NO: 8548 - DNA, 20 bp, Artificial Sequence
  MKO10008548_A_Ccdc3
  gRNA
cacgatggtctcggctagct

SEQ ID NO: 8549 - DNA, 20 bp, Artificial Sequence
  MKO10008549_A_Ccdc3
  gRNA
ctcaagggtctccactccga

SEQ ID NO: 8550 - DNA, 20 bp, Artificial Sequence
  MKO10008550_A_Ccdc40
  gRNA
cttcagttgctctatcgagc

SEQ ID NO: 8551 - DNA, 20 bp, Artificial Sequence
  MKO10008551_A_Ccdc40
  gRNA
gagccatgaccggcactctc

SEQ ID NO: 8552 - DNA, 20 bp, Artificial Sequence
  MKO10008552_A_Ccdc40
  gRNA
actgtatccgggtttcttca

SEQ ID NO: 8553 - DNA, 20 bp, Artificial Sequence
  MKO10008553_A_Ccdc41
  gRNA
gtccgaaaacgttctcgcat

SEQ ID NO: 8554 - DNA, 20 bp, Artificial Sequence
  MKO10008554_A_Ccdc41
  gRNA
caattattaggttgcacgac

SEQ ID NO: 8555 - DNA, 20 bp, Artificial Sequence
  MKO10008555_A_Ccdc41
  gRNA
cattcgtttgctgtctctcg

SEQ ID NO: 8556 - DNA, 20 bp, Artificial Sequence
  MKO10008556_A_Ccdc42b
  gRNA
tcgcttcagtattcgcgcgc

SEQ ID NO: 8557 - DNA, 20 bp, Artificial Sequence
  MKO10008557_A_Ccdc42b
  gRNA
gcggaagataacgggcaacc

SEQ ID NO: 8558 - DNA, 20 bp, Artificial Sequence
  MKO10008558_A_Ccdc42b
  gRNA
ccaccagttgcgtccgttgc

SEQ ID NO: 8559 - DNA, 20 bp, Artificial Sequence
  MKO10008559_A_Ccdc42
  gRNA
ttagggctcggatccgtttc

SEQ ID NO: 8560 - DNA, 20 bp, Artificial Sequence
  MKO10008560_A_Ccdc42
  gRNA
tggaaacgctgaacttgcgc

SEQ ID NO: 8561 - DNA, 20 bp, Artificial Sequence
  MKO10008561_A_Ccdc42
  gRNA
tcagcgtttccattctccgt

SEQ ID NO: 8562 - DNA, 20 bp, Artificial Sequence
  MKO10008562_A_Ccdc43
  gRNA
cttgttccgaaacaccaatg

SEQ ID NO: 8563 - DNA, 20 bp, Artificial Sequence
  MKO10008563_A_Ccdc43
  gRNA
tgttctcaatgctcggaaat

SEQ ID NO: 8564 - DNA, 20 bp, Artificial Sequence
  MKO10008564_A_Ccdc43
  gRNA
tgccgacgtgacagacgaag

SEQ ID NO: 8565 - DNA, 20 bp, Artificial Sequence
  MKO10008565_A_Ccdc47
  gRNA
acaagacttacttaatgtcc

SEQ ID NO: 8566 - DNA, 20 bp, Artificial Sequence
  MKO10008566_A_Ccdc47
  gRNA
cttacatcaacaattgttat

SEQ ID NO: 8567 - DNA, 20 bp, Artificial Sequence
  MKO10008567_A_Ccdc47
  gRNA
taaaaacagccgacttgctc

SEQ ID NO: 8568 - DNA, 20 bp, Artificial Sequence
  MKO10008568_A_Ccdc50
  gRNA
gacctaccttccttcacgcc

SEQ ID NO: 8569 - DNA, 20 bp, Artificial Sequence
  MKO10008569_A_Ccdc50
  gRNA
acagggctttgtagcgcttc

SEQ ID NO: 8570 - DNA, 20 bp, Artificial Sequence
  MKO10008570_A_Ccdc50
  gRNA
tgtagatcagtccaagttgc

SEQ ID NO: 8571 - DNA, 20 bp, Artificial Sequence
  MKO10008571_A_Ccdc51
  gRNA
cacgtgctgcattgcgaaca

SEQ ID NO: 8572 - DNA, 20 bp, Artificial Sequence
  MKO10008572_A_Ccdc51
  gRNA
ccacctatgttaaccgcgtc

SEQ ID NO: 8573 - DNA, 20 bp, Artificial Sequence
  MKO10008573_A_Ccdc51
  gRNA
atggcctcctggagactcgc

SEQ ID NO: 8574 - DNA, 20 bp, Artificial Sequence
  MKO10008574_A_Ccdc53
  gRNA
tacctgcgtttgctccgaag

SEQ ID NO: 8575 - DNA, 20 bp, Artificial Sequence
  MKO10008575_A_Ccdc53
  gRNA
cttcaactgtgacgtcctct

SEQ ID NO: 8576 - DNA, 20 bp, Artificial Sequence
  MKO10008576_A_Ccdc53
  gRNA
tctatgcctgaccccatgag

SEQ ID NO: 8577 - DNA, 20 bp, Artificial Sequence
  MKO10008577_A_Ccdc54
  gRNA
caaccgtaagaagcccttgt

SEQ ID NO: 8578 - DNA, 20 bp, Artificial Sequence
  MKO10008578_A_Ccdc54
  gRNA
cagagagactacgccttcac

SEQ ID NO: 8579 - DNA, 20 bp, Artificial Sequence
  MKO10008579_A_Ccdc54
  gRNA
aactgacaatgttcgtcatt

SEQ ID NO: 8580 - DNA, 20 bp, Artificial Sequence
  MKO10008580_A_Ccdc55
  gRNA
tactaaaagcagtcgagatc

SEQ ID NO: 8581 - DNA, 20 bp, Artificial Sequence
  MKO10008581_A_Ccdc55
  gRNA
ttctgtaaaactcggtgcaa

SEQ ID NO: 8582 - DNA, 20 bp, Artificial Sequence
  MKO10008582_A_Ccdc55
  gRNA
gagtgattctgatgacgatg

SEQ ID NO: 8583 - DNA, 20 bp, Artificial Sequence
  MKO10008583_A_Ccdc57
  gRNA
tacgcaccgagcgtccttca

SEQ ID NO: 8584 - DNA, 20 bp, Artificial Sequence
  MKO10008584_A_Ccdc57
  gRNA
gaagctttactcggcacagc

SEQ ID NO: 8585 - DNA, 20 bp, Artificial Sequence
  MKO10008585_A_Ccdc57
  gRNA
tggaggccgtgaaggacgct

SEQ ID NO: 8586 - DNA, 20 bp, Artificial Sequence
  MKO10008586_A_Ccdc58
  gRNA
agaactaaatgtcgaagaag

SEQ ID NO: 8587 - DNA, 20 bp, Artificial Sequence
  MKO10008587_A_Ccdc58
  gRNA
tgatggcagctcatgtcagt

SEQ ID NO: 8588 - DNA, 20 bp, Artificial Sequence
  MKO10008588_A_Ccdc58
  gRNA
ctctctctctactcattctt

SEQ ID NO: 8589 - DNA, 20 bp, Artificial Sequence
  MKO10008589_A_Ccdc59
  gRNA
cacttggaagacggccgcga

SEQ ID NO: 8590 - DNA, 20 bp, Artificial Sequence
  MKO10008590_A_Ccdc59
  gRNA
tgaccggcctttgcctgaag

SEQ ID NO: 8591 - DNA, 20 bp, Artificial Sequence
  MKO10008591_A_Ccdc59
  gRNA
tacccttgcgcacgctcccc

SEQ ID NO: 8592 - DNA, 20 bp, Artificial Sequence
  MKO10008592_A_Ccdc60
  gRNA
gaacgggcggatgatgatcc

SEQ ID NO: 8593 - DNA, 20 bp, Artificial Sequence
  MKO10008593_A_Ccdc60
  gRNA
ttcgcataagatccttctta

SEQ ID NO: 8594 - DNA, 20 bp, Artificial Sequence
  MKO10008594_A_Ccdc60
  gRNA
agaaggatcttatgcgaagc

SEQ ID NO: 8595 - DNA, 20 bp, Artificial Sequence
  MKO10008595_A_Ccdc61
  gRNA
ggccgagtcgttgcgtgggc

SEQ ID NO: 8596 - DNA, 20 bp, Artificial Sequence
  MKO10008596_A_Ccdc61
  gRNA
cagccaggatagtcgccgac

SEQ ID NO: 8597 - DNA, 20 bp, Artificial Sequence
  MKO10008597_A_Ccdc61
  gRNA
ggagttgagctgggccgacc

SEQ ID NO: 8598 - DNA, 20 bp, Artificial Sequence
  MKO10008598_A_Ccdc62
  gRNA
ggagctgaaagaccgcgata

SEQ ID NO: 8599 - DNA, 20 bp, Artificial Sequence
  MKO10008599_A_Ccdc62
  gRNA
gagcgctgcagcaagctcga

SEQ ID NO: 8600 - DNA, 20 bp, Artificial Sequence
  MKO10008600_A_Ccdc62
  gRNA
cacacacgtctccgccatct

SEQ ID NO: 8601 - DNA, 20 bp, Artificial Sequence
  MKO10008601_A_Ccdc63
  gRNA
attggccggcgatcatacgc

SEQ ID NO: 8602 - DNA, 20 bp, Artificial Sequence
  MKO10008602_A_Ccdc63
  gRNA
cgccaccagcgtatgatcgc

SEQ ID NO: 8603 - DNA, 20 bp, Artificial Sequence
  MKO10008603_A_Ccdc63
  gRNA
ggttcttcggagacttcacg

SEQ ID NO: 8604 - DNA, 20 bp, Artificial Sequence
  MKO10008604_A_Ccdc64b
  gRNA
cgcccgatatctcggtgtct

SEQ ID NO: 8605 - DNA, 20 bp, Artificial Sequence
  MKO10008605_A_Ccdc64b
  gRNA
gctggaacgcgcccgcttcg

SEQ ID NO: 8606 - DNA, 20 bp, Artificial Sequence
  MKO10008606_A_Ccdc64b
  gRNA
gagtctgacaccgctcccga

SEQ ID NO: 8607 - DNA, 20 bp, Artificial Sequence
  MKO10008607_A_Ccdc64
  gRNA
agatgctgtcagatcgaaaa

SEQ ID NO: 8608 - DNA, 20 bp, Artificial Sequence
  MKO10008608_A_Ccdc64
  gRNA
tttctcggtctgcttcccga

SEQ ID NO: 8609 - DNA, 20 bp, Artificial Sequence
  MKO10008609_A_Ccdc64
  gRNA
aggaggtgcggctgtcctac

SEQ ID NO: 8610 - DNA, 20 bp, Artificial Sequence
  MKO10008610_A_Ccdc65
  gRNA
ggccgagccggcgtcgttgc

SEQ ID NO: 8611 - DNA, 20 bp, Artificial Sequence
  MKO10008611_A_Ccdc65
  gRNA
cagccagacctttgaacgcg

SEQ ID NO: 8612 - DNA, 20 bp, Artificial Sequence
  MKO10008612_A_Ccdc65
  gRNA
gcactttcttcgcctacaac

SEQ ID NO: 8613 - DNA, 20 bp, Artificial Sequence
  MKO10008613_A_Ccdc66
  gRNA
tgaatactgcttatccgtac

SEQ ID NO: 8614 - DNA, 20 bp, Artificial Sequence
  MKO10008614_A_Ccdc66
  gRNA
cactaccggtacttgtccag

SEQ ID NO: 8615 - DNA, 20 bp, Artificial Sequence
  MKO10008615_A_Ccdc66
  gRNA
tgctcatgttcactcgtgac

SEQ ID NO: 8616 - DNA, 20 bp, Artificial Sequence
  MKO10008616_A_Ccdc67
  gRNA
tggccaactcttgatcccga

SEQ ID NO: 8617 - DNA, 20 bp, Artificial Sequence
  MKO10008617_A_Ccdc67
  gRNA
gtgcactcacctctagtttc

SEQ ID NO: 8618 - DNA, 20 bp, Artificial Sequence
  MKO10008618_A_Ccdc67
  gRNA
cccactccctcgactttgct

SEQ ID NO: 8619 - DNA, 20 bp, Artificial Sequence
  MKO10008619_A_Ccdc68
  gRNA
gatccgaaatcacatgttta

SEQ ID NO: 8620 - DNA, 20 bp, Artificial Sequence
  MKO10008620_A_Ccdc68
  gRNA
gaaaaacatgggcaaatcgt

SEQ ID NO: 8621 - DNA, 20 bp, Artificial Sequence
  MKO10008621_A_Ccdc68
  gRNA
cttccagatgcgaactacac

SEQ ID NO: 8622 - DNA, 20 bp, Artificial Sequence
  MKO10008622_A_Ccdc69
  gRNA
cccgcagacatcgaatgcac

SEQ ID NO: 8623 - DNA, 20 bp, Artificial Sequence
  MKO10008623_A_Ccdc69
  gRNA
tctcacctgcaacgaggctt

SEQ ID NO: 8624 - DNA, 20 bp, Artificial Sequence
  MKO10008624_A_Ccdc69
  gRNA
tggtgagacatgacttgcac

SEQ ID NO: 8625 - DNA, 20 bp, Artificial Sequence
  MKO10008625_A_Ccdc6
  gRNA
cctcgccgtgaattacgaga

SEQ ID NO: 8626 - DNA, 20 bp, Artificial Sequence
  MKO10008626_A_Ccdc6
  gRNA
agaccacgtacgttgtaact

SEQ ID NO: 8627 - DNA, 20 bp, Artificial Sequence
  MKO10008627_A_Ccdc6
  gRNA
aggcgctggtgaatcggctg

SEQ ID NO: 8628 - DNA, 20 bp, Artificial Sequence
  MKO10008628_A_Ccdc70
  gRNA
ttgtccactaagcacggccc

SEQ ID NO: 8629 - DNA, 20 bp, Artificial Sequence
  MKO10008629_A_Ccdc70
  gRNA
ggctttccggggccagatcc

SEQ ID NO: 8630 - DNA, 20 bp, Artificial Sequence
  MKO10008630_A_Ccdc70
  gRNA
gcgagggcagcaccagtgac

SEQ ID NO: 8631 - DNA, 20 bp, Artificial Sequence
  MKO10008631_A_Ccdc71l
  gRNA
tgatgcgacgcggcgtgaag

SEQ ID NO: 8632 - DNA, 20 bp, Artificial Sequence
  MKO10008632_A_Ccdc71l
  gRNA
tctacggctactcctcgtgc

SEQ ID NO: 8633 - DNA, 20 bp, Artificial Sequence
  MKO10008633_A_Ccdc71l
  gRNA
agcttcccgaccatccgcgt

SEQ ID NO: 8634 - DNA, 20 bp, Artificial Sequence
  MKO10008634_A_Ccdc71
  gRNA
tttgggttccagcgcctcgt

SEQ ID NO: 8635 - DNA, 20 bp, Artificial Sequence
  MKO10008635_A_Ccdc71
  gRNA
cccgtgcttaacgtccaagc

SEQ ID NO: 8636 - DNA, 20 bp, Artificial Sequence
  MKO10008636_A_Ccdc71
  gRNA
caaccgaccattcttcgaag

SEQ ID NO: 8637 - DNA, 20 bp, Artificial Sequence
  MKO10008637_A_Ccdc73
  gRNA
gcagattgctaaaattattc

SEQ ID NO: 8638 - DNA, 20 bp, Artificial Sequence
  MKO10008638_A_Ccdc73
  gRNA
gcagatgaagatgtatgcct

SEQ ID NO: 8639 - DNA, 20 bp, Artificial Sequence
  MKO10008639_A_Ccdc73
  gRNA
ggaaacattaaaaacattgc

SEQ ID NO: 8640 - DNA, 20 bp, Artificial Sequence
  MKO10008640_A_Ccdc74a
  gRNA
ccctggctcaccggacatcg

SEQ ID NO: 8641 - DNA, 20 bp, Artificial Sequence
  MKO10008641_A_Ccdc74a
  gRNA
atggctgccccccaccaacg

SEQ ID NO: 8642 - DNA, 20 bp, Artificial Sequence
  MKO10008642_A_Ccdc74a
  gRNA
gcctccaattccacgatgtc

SEQ ID NO: 8643 - DNA, 20 bp, Artificial Sequence
  MKO10008643_A_Ccdc77
  gRNA
atatcgtttgcctctaaacg

SEQ ID NO: 8644 - DNA, 20 bp, Artificial Sequence
  MKO10008644_A_Ccdc77
  gRNA
gccagtacctgattcttagt

SEQ ID NO: 8645 - DNA, 20 bp, Artificial Sequence
  MKO10008645_A_Ccdc77
  gRNA
aaaatgaccgactaagaatc

SEQ ID NO: 8646 - DNA, 20 bp, Artificial Sequence
  MKO10008646_A_Ccdc78
  gRNA
cagcttcatgctgttcgcgc

SEQ ID NO: 8647 - DNA, 20 bp, Artificial Sequence
  MKO10008647_A_Ccdc78
  gRNA
tctccactcacctctaatgg

SEQ ID NO: 8648 - DNA, 20 bp, Artificial Sequence
  MKO10008648_A_Ccdc78
  gRNA
atctccacagattcttcgac

SEQ ID NO: 8649 - DNA, 20 bp, Artificial Sequence
  MKO10008649_A_Ccdc79
  gRNA
atcatcattagttaagagcc

SEQ ID NO: 8650 - DNA, 20 bp, Artificial Sequence
  MKO10008650_A_Ccdc79
  gRNA
gaagcagccttatacacatt

SEQ ID NO: 8651 - DNA, 20 bp, Artificial Sequence
  MKO10008651_A_Ccdc79
  gRNA
gggcaaccctttgtcacaaa

SEQ ID NO: 8652 - DNA, 20 bp, Artificial Sequence
  MKO10008652_A_Ccdc7
  gRNA
gcgtacaattgactctcctg

SEQ ID NO: 8653 - DNA, 20 bp, Artificial Sequence
  MKO10008653_A_Ccdc7
  gRNA
aataccattgagtaaaacga

SEQ ID NO: 8654 - DNA, 20 bp, Artificial Sequence
  MKO10008654_A_Ccdc7
  gRNA
attatcatagcaagctccat

SEQ ID NO: 8655 - DNA, 20 bp, Artificial Sequence
  MKO10008655_A_Ccdc80
  gRNA
aattgcatgcctgaccgttg

SEQ ID NO: 8656 - DNA, 20 bp, Artificial Sequence
  MKO10008656_A_Ccdc80
  gRNA
atcatcatccaccacacgca

SEQ ID NO: 8657 - DNA, 20 bp, Artificial Sequence
  MKO10008657_A_Ccdc80
  gRNA
acctggataggaagttctcc

SEQ ID NO: 8658 - DNA, 20 bp, Artificial Sequence
  MKO10008658_A_Ccdc81
  gRNA
acgacagctaactatgcaca

SEQ ID NO: 8659 - DNA, 20 bp, Artificial Sequence
  MKO10008659_A_Ccdc81
  gRNA
gctagacagcaccgagtcca

SEQ ID NO: 8660 - DNA, 20 bp, Artificial Sequence
  MKO10008660_A_Ccdc81
  gRNA
cacttccatccatcgaacag

SEQ ID NO: 8661 - DNA, 20 bp, Artificial Sequence
  MKO10008661_A_Ccdc82
  gRNA
tgtcaacatatctttcgcgt

SEQ ID NO: 8662 - DNA, 20 bp, Artificial Sequence
  MKO10008662_A_Ccdc82
  gRNA
gtttagtctctagaagtcga

SEQ ID NO: 8663 - DNA, 20 bp, Artificial Sequence
  MKO10008663_A_Ccdc82
  gRNA
gttatacaacatcaggacga

SEQ ID NO: 8664 - DNA, 20 bp, Artificial Sequence
  MKO10008664_A_Ccdc83
  gRNA
acaggcagcttcgagtcttt

SEQ ID NO: 8665 - DNA, 20 bp, Artificial Sequence
  MKO10008665_A_Ccdc83
  gRNA
ggcaccaatagtaacaagag

SEQ ID NO: 8666 - DNA, 20 bp, Artificial Sequence
  MKO10008666_A_Ccdc83
  gRNA
atggcagaatagacgcttga

SEQ ID NO: 8667 - DNA, 20 bp, Artificial Sequence
  MKO10008667_A_Ccdc84
  gRNA
ccaacagcaccgatcgtgct

SEQ ID NO: 8668 - DNA, 20 bp, Artificial Sequence
  MKO10008668_A_Ccdc84
  gRNA
gctatgtccccgagcacgat

SEQ ID NO: 8669 - DNA, 20 bp, Artificial Sequence
  MKO10008669_A_Ccdc84
  gRNA
taactcaccgtgcataatcc

SEQ ID NO: 8670 - DNA, 20 bp, Artificial Sequence
  MKO10008670_A_Ccdc85a
  gRNA
tgcgtcgacacccacgggcg

SEQ ID NO: 8671 - DNA, 20 bp, Artificial Sequence
  MKO10008671_A_Ccdc85a
  gRNA
agatagatcatccacgcccg

SEQ ID NO: 8672 - DNA, 20 bp, Artificial Sequence
  MKO10008672_A_Ccdc85a
  gRNA
cctccggcggcctgctcaag

SEQ ID NO: 8673 - DNA, 20 bp, Artificial Sequence
  MKO10008673_A_Ccdc85b
  gRNA
actcggagcgccaacgagga

SEQ ID NO: 8674 - DNA, 20 bp, Artificial Sequence
  MKO10008674_A_Ccdc85b
  gRNA
cgcgctgcactagcgctgcc

SEQ ID NO: 8675 - DNA, 20 bp, Artificial Sequence
  MKO10008675_A_Ccdc85b
  gRNA
gaagagtggggcccccgcgg

SEQ ID NO: 8676 - DNA, 20 bp, Artificial Sequence
  MKO10008676_A_Ccdc85c
  gRNA
cccgtccaccgtctacagtt

SEQ ID NO: 8677 - DNA, 20 bp, Artificial Sequence
  MKO10008677_A_Ccdc85c
  gRNA
catggcgtgcacgacagcct

SEQ ID NO: 8678 - DNA, 20 bp, Artificial Sequence
  MKO10008678_A_Ccdc85c
  gRNA
cggtgacaagctccccccac

SEQ ID NO: 8679 - DNA, 20 bp, Artificial Sequence
  MKO10008679_A_Ccdc86
  gRNA
taaggacttcgcccgacacc

SEQ ID NO: 8680 - DNA, 20 bp, Artificial Sequence
  MKO10008680_A_Ccdc86
  gRNA
ccgtttcgcccgagagactt

SEQ ID NO: 8681 - DNA, 20 bp, Artificial Sequence
  MKO10008681_A_Ccdc86
  gRNA
tgaggcggcccacgctaaag

SEQ ID NO: 8682 - DNA, 20 bp, Artificial Sequence
  MKO10008682_A_Ccdc87
  gRNA
ggcggcacgagtaactgcca

SEQ ID NO: 8683 - DNA, 20 bp, Artificial Sequence
  MKO10008683_A_Ccdc87
  gRNA
taacctcagtgagacgaagt

SEQ ID NO: 8684 - DNA, 20 bp, Artificial Sequence
  MKO10008684_A_Ccdc87
  gRNA
cccgctgcttgctagccgct

SEQ ID NO: 8685 - DNA, 20 bp, Artificial Sequence
  MKO10008685_A_Ccdc88a
  gRNA
actcgttgactctccgactt

SEQ ID NO: 8686 - DNA, 20 bp, Artificial Sequence
  MKO10008686_A_Ccdc88a
  gRNA
ctgttctaggttaaaacgtt

SEQ ID NO: 8687 - DNA, 20 bp, Artificial Sequence
  MKO10008687_A_Ccdc88a
  gRNA
cttacatttggagcatgacc

SEQ ID NO: 8688 - DNA, 20 bp, Artificial Sequence
  MKO10008688_A_Ccdc88b
  gRNA
gtcgcccccatagatgacag

SEQ ID NO: 8689 - DNA, 20 bp, Artificial Sequence
  MKO10008689_A_Ccdc88b
  gRNA
aggctccatcgatcagccgc

SEQ ID NO: 8690 - DNA, 20 bp, Artificial Sequence
  MKO10008690_A_Ccdc88b
  gRNA
tcgatggagccttactcctt

SEQ ID NO: 8691 - DNA, 20 bp, Artificial Sequence
  MKO10008691_A_Ccdc88c
  gRNA
atcgtttggaagcggccacc

SEQ ID NO: 8692 - DNA, 20 bp, Artificial Sequence
  MKO10008692_A_Ccdc88c
  gRNA
cttgttgatgcgctgattgc

SEQ ID NO: 8693 - DNA, 20 bp, Artificial Sequence
  MKO10008693_A_Ccdc88c
  gRNA
tccccgcaggtgaaaacttt

SEQ ID NO: 8694 - DNA, 20 bp, Artificial Sequence
  MKO10008694_A_Ccdc89
  gRNA
gagttcgcgagcttcagcgc

SEQ ID NO: 8695 - DNA, 20 bp, Artificial Sequence
  MKO10008695_A_Ccdc89
  gRNA
gagcgcgtctatgccgcagg

SEQ ID NO: 8696 - DNA, 20 bp, Artificial Sequence
  MKO10008696_A_Ccdc89
  gRNA
cctcgtcggatctgcgtttc

SEQ ID NO: 8697 - DNA, 20 bp, Artificial Sequence
  MKO10008697_A_Ccdc8
  gRNA
tggaggccttcctccgccgt

SEQ ID NO: 8698 - DNA, 20 bp, Artificial Sequence
  MKO10008698_A_Ccdc8
  gRNA
tatcatcgtccgagctggct

SEQ ID NO: 8699 - DNA, 20 bp, Artificial Sequence
  MKO10008699_A_Ccdc8
  gRNA
cctacaaccagccgaagtgg

SEQ ID NO: 8700 - DNA, 20 bp, Artificial Sequence
  MKO10008700_A_Ccdc90b
  gRNA
ctgtcacccgccctgcggag

SEQ ID NO: 8701 - DNA, 20 bp, Artificial Sequence
  MKO10008701_A_Ccdc90b
  gRNA
tacgctatcaaacgtcagcc

SEQ ID NO: 8702 - DNA, 20 bp, Artificial Sequence
  MKO10008702_A_Ccdc90b
  gRNA
ccgagactatgaggagccgc

SEQ ID NO: 8703 - DNA, 20 bp, Artificial Sequence
  MKO10008703_A_Ccdc91
  gRNA
ttaacggatgagccgagcca

SEQ ID NO: 8704 - DNA, 20 bp, Artificial Sequence
  MKO10008704_A_Ccdc91
  gRNA
ggctcatccgttaaaccaag

SEQ ID NO: 8705 - DNA, 20 bp, Artificial Sequence
  MKO10008705_A_Ccdc91
  gRNA
tgcatgcgtatcatctgctg

SEQ ID NO: 8706 - DNA, 20 bp, Artificial Sequence
  MKO10008706_A_Ccdc92
  gRNA
gcctcagatcgtagcgccac

SEQ ID NO: 8707 - DNA, 20 bp, Artificial Sequence
  MKO10008707_A_Ccdc92
  gRNA
accccaacatgcgtcttgtg

SEQ ID NO: 8708 - DNA, 20 bp, Artificial Sequence
  MKO10008708_A_Ccdc92
  gRNA
ctcaaaagtttcgaactgac

SEQ ID NO: 8709 - DNA, 20 bp, Artificial Sequence
  MKO10008709_A_Ccdc93
  gRNA
ctggatcatggggttaccca

SEQ ID NO: 8710 - DNA, 20 bp, Artificial Sequence
  MKO10008710_A_Ccdc93
  gRNA
ccacatattccctgtcgtgc

SEQ ID NO: 8711 - DNA, 20 bp, Artificial Sequence
  MKO10008711_A_Ccdc93
  gRNA
ctttctcttaccttgtcgaa

SEQ ID NO: 8712 - DNA, 20 bp, Artificial Sequence
  MKO10008712_A_Ccdc94
  gRNA
agtccagaacgaggcttacc

SEQ ID NO: 8713 - DNA, 20 bp, Artificial Sequence
  MKO10008713_A_Ccdc94
  gRNA
agtccacatgcgcctgccgc

SEQ ID NO: 8714 - DNA, 20 bp, Artificial Sequence
  MKO10008714_A_Ccdc94
  gRNA
ggcccaggtaagcctcgttc

SEQ ID NO: 8715 - DNA, 20 bp, Artificial Sequence
  MKO10008715_A_Ccdc96
  gRNA
cctggcgcccaccacgcgtg

SEQ ID NO: 8716 - DNA, 20 bp, Artificial Sequence
  MKO10008716_A_Ccdc96
  gRNA
cttgatctcgagcgactgcc

SEQ ID NO: 8717 - DNA, 20 bp, Artificial Sequence
  MKO10008717_A_Ccdc96
  gRNA
gcaagcatacttgcgctatc

SEQ ID NO: 8718 - DNA, 20 bp, Artificial Sequence
  MKO10008718_A_Ccdc97
  gRNA
cagcataacgccggttacgc

SEQ ID NO: 8719 - DNA, 20 bp, Artificial Sequence
  MKO10008719_A_Ccdc97
  gRNA
tgcgcacccgcctgcgtaac

SEQ ID NO: 8720 - DNA, 20 bp, Artificial Sequence
  MKO10008720_A_Ccdc97
  gRNA
agagaggctgatccttcgcg

SEQ ID NO: 8721 - DNA, 20 bp, Artificial Sequence
  MKO10008721_A_Ccdc9
  gRNA
gctagggcacctggtagcgc

SEQ ID NO: 8722 - DNA, 20 bp, Artificial Sequence
  MKO10008722_A_Ccdc9
  gRNA
taccttagactttcgatcag

SEQ ID NO: 8723 - DNA, 20 bp, Artificial Sequence
  MKO10008723_A_Ccdc9
  gRNA
atgcccggcctacgcctgcc

SEQ ID NO: 8724 - DNA, 20 bp, Artificial Sequence
  MKO10008724_A_Ccer1
  gRNA
aatcttcttcgacgccgctg

SEQ ID NO: 8725 - DNA, 20 bp, Artificial Sequence
  MKO10008725_A_Ccer1
  gRNA
tccaagcggcgataccgtga

SEQ ID NO: 8726 - DNA, 20 bp, Artificial Sequence
  MKO10008726_A_Ccer1
  gRNA
cctccctttcgttgaccgtc

SEQ ID NO: 8727 - DNA, 20 bp, Artificial Sequence
  MKO10008727_A_Cchcr1
  gRNA
cgagggcctgcgcaccgcct

SEQ ID NO: 8728 - DNA, 20 bp, Artificial Sequence
  MKO10008728_A_Cchcr1
  gRNA
ctggccggagattggaccaa

SEQ ID NO: 8729 - DNA, 20 bp, Artificial Sequence
  MKO10008729_A_Cchcr1
  gRNA
cacggcagctccaagagttg

SEQ ID NO: 8730 - DNA, 20 bp, Artificial Sequence
  MKO10008730_A_Ccin
  gRNA
gggccggtggttgaattcga

SEQ ID NO: 8731 - DNA, 20 bp, Artificial Sequence
  MKO10008731_A_Ccin
  gRNA
cgcggcgaatagacttaata

SEQ ID NO: 8732 - DNA, 20 bp, Artificial Sequence
  MKO10008732_A_Ccin
  gRNA
cgttacatctacatatccgg

SEQ ID NO: 8733 - DNA, 20 bp, Artificial Sequence
  MKO10008733_A_Cckar
  gRNA
agcggcacatgttcgccgtc

SEQ ID NO: 8734 - DNA, 20 bp, Artificial Sequence
  MKO10008734_A_Cckar
  gRNA
tttgccagacgcgggattgt

SEQ ID NO: 8735 - DNA, 20 bp, Artificial Sequence
  MKO10008735_A_Cckar
  gRNA
tcacgcgcttcttggcgatc

SEQ ID NO: 8736 - DNA, 20 bp, Artificial Sequence
  MKO10008736_A_Cckbr
  gRNA
catgcaccgccgattccgcc

SEQ ID NO: 8737 - DNA, 20 bp, Artificial Sequence
  MKO10008737_A_Cckbr
  gRNA
atcgaaggcacgccacgtgt

SEQ ID NO: 8738 - DNA, 20 bp, Artificial Sequence
  MKO10008738_A_Cckbr
  gRNA
gatggccgcgagatttagag

SEQ ID NO: 8739 - DNA, 20 bp, Artificial Sequence
  MKO10008739_A_Cck
  gRNA
atcgcgctagcagtgcgccc

SEQ ID NO: 8740 - DNA, 20 bp, Artificial Sequence
  MKO10008740_A_Cck
  gRNA
ccttacctttgcggacctgc

SEQ ID NO: 8741 - DNA, 20 bp, Artificial Sequence
  MKO10008741_A_Cck
  gRNA
cgatgggtattcgtagtcct

SEQ ID NO: 8742 - DNA, 20 bp, Artificial Sequence
  MKO10008742_A_Ccl11
  gRNA
acagatctctttgcccaacc

SEQ ID NO: 8743 - DNA, 20 bp, Artificial Sequence
  MKO10008743_A_Ccl11
  gRNA
gtagctcttcagtagtgtgt

SEQ ID NO: 8744 - DNA, 20 bp, Artificial Sequence
  MKO10008744_A_Ccl11
  gRNA
ctactcacactatggctttc

SEQ ID NO: 8745 - DNA, 20 bp, Artificial Sequence
  MKO10008745_A_Ccl12
  gRNA
ttaagcagaagattcacgtc

SEQ ID NO: 8746 - DNA, 20 bp, Artificial Sequence
  MKO10008746_A_Ccl12
  gRNA
tttgagacgtcttatccaag

SEQ ID NO: 8747 - DNA, 20 bp, Artificial Sequence
  MKO10008747_A_Ccl12
  gRNA
acagatctccttatccagta

SEQ ID NO: 8748 - DNA, 20 bp, Artificial Sequence
  MKO10008748_A_Ccl17
  gRNA
gcactctcggcctacattgg

SEQ ID NO: 8749 - DNA, 20 bp, Artificial Sequence
  MKO10008749_A_Ccl17
  gRNA
tggcccctttgaagtaatcc

SEQ ID NO: 8750 - DNA, 20 bp, Artificial Sequence
  MKO10008750_A_Ccl17
  gRNA
gtcacttcagatgctgctcc

SEQ ID NO: 8751 - DNA, 20 bp, Artificial Sequence
  MKO10008751_A_Ccl19
  gRNA
cccccgtgtgaccccactcc

SEQ ID NO: 8752 - DNA, 20 bp, Artificial Sequence
  MKO10008752_A_Ccl19
  gRNA
ggaaggtccagagaaccagc

SEQ ID NO: 8753 - DNA, 20 bp, Artificial Sequence
  MKO10008753_A_Ccl19
  gRNA
tcctatctcagccccaactc

SEQ ID NO: 8754 - DNA, 20 bp, Artificial Sequence
  MKO10008754_A_Ccl1
  gRNA
gcgcctcaactaacaaaacg

SEQ ID NO: 8755 - DNA, 20 bp, Artificial Sequence
  MKO10008755_A_Ccl1
  gRNA
agcaggggttcaccttcttc

SEQ ID NO: 8756 - DNA, 20 bp, Artificial Sequence
  MKO10008756_A_Ccl1
  gRNA
caccatgaaacccactgcca

SEQ ID NO: 8757 - DNA, 20 bp, Artificial Sequence
  MKO10008757_A_Ccl20
  gRNA
gaggcgtctgtatgtacgag

SEQ ID NO: 8758 - DNA, 20 bp, Artificial Sequence
  MKO10008758_A_Ccl20
  gRNA
gagcagacgcttgccaccgc

SEQ ID NO: 8759 - DNA, 20 bp, Artificial Sequence
  MKO10008759_A_Ccl20
  gRNA
gcgctgatccaaagcagaac

SEQ ID NO: 8760 - DNA, 20 bp, Artificial Sequence
  MKO10008760_A_Ccl21a
  gRNA
gactctgagcctccttagcc

SEQ ID NO: 8761 - DNA, 20 bp, Artificial Sequence
  MKO10008761_A_Ccl21a
  gRNA
ctccttggtaccttgggtcc

SEQ ID NO: 8762 - DNA, 20 bp, Artificial Sequence
  MKO10008762_A_Ccl21a
  gRNA
taccttgcaggcagtgatgg

SEQ ID NO: 8763 - DNA, 20 bp, Artificial Sequence
  MKO10008763_A_Ccl21b
  gRNA
ctccttggtaccttgggtcc

SEQ ID NO: 8764 - DNA, 20 bp, Artificial Sequence
  MKO10008764_A_Ccl21b
  gRNA
gactctgagcctccttagcc

SEQ ID NO: 8765 - DNA, 20 bp, Artificial Sequence
  MKO10008765_A_Ccl21b
  gRNA
agcgcactcacaggattgcc

SEQ ID NO: 8766 - DNA, 20 bp, Artificial Sequence
  MKO10008766_A_Ccl22
  gRNA
gagatatctgtgccgatccc

SEQ ID NO: 8767 - DNA, 20 bp, Artificial Sequence
  MKO10008767_A_Ccl22
  gRNA
taccctgcgtgtcccactcc

SEQ ID NO: 8768 - DNA, 20 bp, Artificial Sequence
  MKO10008768_A_Ccl22
  gRNA
gagggtgacggatgtagtcc

SEQ ID NO: 8769 - DNA, 20 bp, Artificial Sequence
  MKO10008769_A_Ccl24
  gRNA
ggctctgctacgatcgttgc

SEQ ID NO: 8770 - DNA, 20 bp, Artificial Sequence
  MKO10008770_A_Ccl24
  gRNA
ggggaagatgcaacacgcgc

SEQ ID NO: 8771 - DNA, 20 bp, Artificial Sequence
  MKO10008771_A_Ccl24
  gRNA
agatgctgccgttggccaac

SEQ ID NO: 8772 - DNA, 20 bp, Artificial Sequence
  MKO10008772_A_Ccl25
  gRNA
accccaacagtacaagcgtg

SEQ ID NO: 8773 - DNA, 20 bp, Artificial Sequence
  MKO10008773_A_Ccl25
  gRNA
gtccactggaagagcgcctc

SEQ ID NO: 8774 - DNA, 20 bp, Artificial Sequence
  MKO10008774_A_Ccl25
  gRNA
gctgcaacctacgtgctgtg

SEQ ID NO: 8775 - DNA, 20 bp, Artificial Sequence
  MKO10008775_A_Ccl26
  gRNA
tacatgtggcaacaccaagc

SEQ ID NO: 8776 - DNA, 20 bp, Artificial Sequence
  MKO10008776_A_Ccl26
  gRNA
gcagggtcacaaatggttcc

SEQ ID NO: 8777 - DNA, 20 bp, Artificial Sequence
  MKO10008777_A_Ccl26
  gRNA
cactcacatcacaccgtcac

SEQ ID NO: 8778 - DNA, 20 bp, Artificial Sequence
  MKO10008778_A_Ccl27a
  gRNA
tgtctttgcaggatctactg

SEQ ID NO: 8779 - DNA, 20 bp, Artificial Sequence
  MKO10008779_A_Ccl27a
  gRNA
ctgcgccacattcgcagcca

SEQ ID NO: 8780 - DNA, 20 bp, Artificial Sequence
  MKO10008780_A_Ccl27a
  gRNA
cctacagctcggcgcacccc

SEQ ID NO: 8781 - DNA, 20 bp, Artificial Sequence
  MKO10008781_A_Ccl27b
  gRNA
aacttacctgcttcaggagc

SEQ ID NO: 8782 - DNA, 20 bp, Artificial Sequence
  MKO10008782_A_Ccl27b
  gRNA
gctgagtgagcatgatggag

SEQ ID NO: 8783 - DNA, 20 bp, Artificial Sequence
  MKO10008783_A_Ccl27b
  gRNA
gcagagctcacacgacagcc

SEQ ID NO: 8784 - DNA, 20 bp, Artificial Sequence
  MKO10008784_A_Ccl28
  gRNA
tgcttcaaagtacgattgtg

SEQ ID NO: 8785 - DNA, 20 bp, Artificial Sequence
  MKO10008785_A_Ccl28
  gRNA
acaatcgtactttgaagcag

SEQ ID NO: 8786 - DNA, 20 bp, Artificial Sequence
  MKO10008786_A_Ccl28
  gRNA
tcttgtagccatacttccca

SEQ ID NO: 8787 - DNA, 20 bp, Artificial Sequence
  MKO10008787_A_Ccl2
  gRNA
atctcatttggttccgatcc

SEQ ID NO: 8788 - DNA, 20 bp, Artificial Sequence
  MKO10008788_A_Ccl2
  gRNA
tgctgttcacagttgccggc

SEQ ID NO: 8789 - DNA, 20 bp, Artificial Sequence
  MKO10008789_A_Ccl2
  gRNA
agccggcaactgtgaacagc

SEQ ID NO: 8790 - DNA, 20 bp, Artificial Sequence
  MKO10008790_A_Ccl3
  gRNA
caaaatagtcaacgatgaat

SEQ ID NO: 8791 - DNA, 20 bp, Artificial Sequence
  MKO10008791_A_Ccl3
  gRNA
gaacttacatgacacctggc

SEQ ID NO: 8792 - DNA, 20 bp, Artificial Sequence
  MKO10008792_A_Ccl3
  gRNA
gcgctgactccaaagagacc

SEQ ID NO: 8793 - DNA, 20 bp, Artificial Sequence
  MKO10008793_A_Ccl4
  gRNA
gtgctaaccccagtgagccc

SEQ ID NO: 8794 - DNA, 20 bp, Artificial Sequence
  MKO10008794_A_Ccl4
  gRNA
gctgtttctcttacacctcc

SEQ ID NO: 8795 - DNA, 20 bp, Artificial Sequence
  MKO10008795_A_Ccl4
  gRNA
tacagattcctgaccaaaag

SEQ ID NO: 8796 - DNA, 20 bp, Artificial Sequence
  MKO10008796_A_Ccl5
  gRNA
gactcacacgactgcaagat

SEQ ID NO: 8797 - DNA, 20 bp, Artificial Sequence
  MKO10008797_A_Ccl5
  gRNA
tgtagaaatactccttgacg

SEQ ID NO: 8798 - DNA, 20 bp, Artificial Sequence
  MKO10008798_A_Ccl5
  gRNA
cctgcaggtttgtcactcga

SEQ ID NO: 8799 - DNA, 20 bp, Artificial Sequence
  MKO10008799_A_Ccl6
  gRNA
tctgtgccgaccccagcgat

SEQ ID NO: 8800 - DNA, 20 bp, Artificial Sequence
  MKO10008800_A_Ccl6
  gRNA
cctctgaactctccgatcgc

SEQ ID NO: 8801 - DNA, 20 bp, Artificial Sequence
  MKO10008801_A_Ccl6
  gRNA
cggcttgatgcacccaccac

SEQ ID NO: 8802 - DNA, 20 bp, Artificial Sequence
  MKO10008802_A_Ccl7
  gRNA
gcgctgaagcccatcagaag

SEQ ID NO: 8803 - DNA, 20 bp, Artificial Sequence
  MKO10008803_A_Ccl7
  gRNA
cacctggttgggcccacact

SEQ ID NO: 8804 - DNA, 20 bp, Artificial Sequence
  MKO10008804_A_Ccl7
  gRNA
gtagctcttgagattcctct

SEQ ID NO: 8805 - DNA, 20 bp, Artificial Sequence
  MKO10008805_A_Ccl8
  gRNA
taaagctgaagatccccctt

SEQ ID NO: 8806 - DNA, 20 bp, Artificial Sequence
  MKO10008806_A_Ccl8
  gRNA
caacaatatccagtgcccca

SEQ ID NO: 8807 - DNA, 20 bp, Artificial Sequence
  MKO10008807_A_Ccl8
  gRNA
gtcagcccagagaagctgac

SEQ ID NO: 8808 - DNA, 20 bp, Artificial Sequence
  MKO10008808_A_Ccl9
  gRNA
cacttacatgatgcccggcc

SEQ ID NO: 8809 - DNA, 20 bp, Artificial Sequence
  MKO10008809_A_Ccl9
  gRNA
ccaccagtggtgggtgtacc

SEQ ID NO: 8810 - DNA, 20 bp, Artificial Sequence
  MKO10008810_A_Ccl9
  gRNA
aggactcaccatgtgtgatc

SEQ ID NO: 8811 - DNA, 20 bp, Artificial Sequence
  MKO10008811_A_Ccm2l
  gRNA
ggatcgcgacccgaacctcc

SEQ ID NO: 8812 - DNA, 20 bp, Artificial Sequence
  MKO10008812_A_Ccm2l
  gRNA
ggaggttcgggtcgcgatcc

SEQ ID NO: 8813 - DNA, 20 bp, Artificial Sequence
  MKO10008813_A_Ccm2l
  gRNA
gcagcagcaatctcgtgcgt

SEQ ID NO: 8814 - DNA, 20 bp, Artificial Sequence
  MKO10008814_A_Ccm2
  gRNA
ccgtcctactggaagggttc

SEQ ID NO: 8815 - DNA, 20 bp, Artificial Sequence
  MKO10008815_A_Ccm2
  gRNA
ggagtccaccatcgactttc

SEQ ID NO: 8816 - DNA, 20 bp, Artificial Sequence
  MKO10008816_A_Ccm2
  gRNA
ggtcagttaacatccattcc

SEQ ID NO: 8817 - DNA, 20 bp, Artificial Sequence
  MKO10008817_A_Ccna1
  gRNA
agagatatatccgcccgacg

SEQ ID NO: 8818 - DNA, 20 bp, Artificial Sequence
  MKO10008818_A_Ccna1
  gRNA
tcgctttgtgtacgtatcgt

SEQ ID NO: 8819 - DNA, 20 bp, Artificial Sequence
  MKO10008819_A_Ccna1
  gRNA
cgcatgccctccgtgatgtc

SEQ ID NO: 8820 - DNA, 20 bp, Artificial Sequence
  MKO10008820_A_Ccna2
  gRNA
aagacattcacacgtacctt

SEQ ID NO: 8821 - DNA, 20 bp, Artificial Sequence
  MKO10008821_A_Ccna2
  gRNA
gtgacatgctcatcgtttat

SEQ ID NO: 8822 - DNA, 20 bp, Artificial Sequence
  MKO10008822_A_Ccna2
  gRNA
gacacctcttgactatccaa

SEQ ID NO: 8823 - DNA, 20 bp, Artificial Sequence
  MKO10008823_A_Ccnb1ip1
  gRNA
gctcccgggcattggccttc

SEQ ID NO: 8824 - DNA, 20 bp, Artificial Sequence
  MKO10008824_A_Ccnb1ip1
  gRNA
actcttgatagagacgctcc

SEQ ID NO: 8825 - DNA, 20 bp, Artificial Sequence
  MKO10008825_A_Ccnb1ip1
  gRNA
ccaggtatgatcccgcagtc

SEQ ID NO: 8826 - DNA, 20 bp, Artificial Sequence
  MKO10008826_A_Ccnb1
  gRNA
aagtttaccaaaataggttc

SEQ ID NO: 8827 - DNA, 20 bp, Artificial Sequence
  MKO10008827_A_Ccnb1
  gRNA
caatactgacctccagttgt

SEQ ID NO: 8828 - DNA, 20 bp, Artificial Sequence
  MKO10008828_A_Ccnb1
  gRNA
ccacaggaagcaaaaacgct

SEQ ID NO: 8829 - DNA, 20 bp, Artificial Sequence
  MKO10008829_A_Ccnb2
  gRNA
tggacgtatgcgtgccatcc

SEQ ID NO: 8830 - DNA, 20 bp, Artificial Sequence
  MKO10008830_A_Ccnb2
  gRNA
ggatcgtcctcccgcccctg

SEQ ID NO: 8831 - DNA, 20 bp, Artificial Sequence
  MKO10008831_A_Ccnb2
  gRNA
gctagcgcctccatctgcac

SEQ ID NO: 8832 - DNA, 20 bp, Artificial Sequence
  MKO10008832_A_Ccnb3
  gRNA
tgacaagaacttcttctcgc

SEQ ID NO: 8833 - DNA, 20 bp, Artificial Sequence
  MKO10008833_A_Ccnb3
  gRNA
ccaaagaagcatatcagtcc

SEQ ID NO: 8834 - DNA, 20 bp, Artificial Sequence
  MKO10008834_A_Ccnb3
  gRNA
ggagaagccactaaccttgc

SEQ ID NO: 8835 - DNA, 20 bp, Artificial Sequence
  MKO10008835_A_Ccnc
  gRNA
tctgttgaaagagcgccaaa

SEQ ID NO: 8836 - DNA, 20 bp, Artificial Sequence
  MKO10008836_A_Ccnc
  gRNA
aagtatagatcctgtattaa

SEQ ID NO: 8837 - DNA, 20 bp, Artificial Sequence
  MKO10008837_A_Ccnc
  gRNA
atttcaagagattctatgct

SEQ ID NO: 8838 - DNA, 20 bp, Artificial Sequence
  MKO10008838_A_Ccnd1
  gRNA
ccttggggtcgacgttctgc

SEQ ID NO: 8839 - DNA, 20 bp, Artificial Sequence
  MKO10008839_A_Ccnd1
  gRNA
gcccaccgacgtgcgagatg

SEQ ID NO: 8840 - DNA, 20 bp, Artificial Sequence
  MKO10008840_A_Ccnd1
  gRNA
aaagtgcgttgtgcggtagc

SEQ ID NO: 8841 - DNA, 20 bp, Artificial Sequence
  MKO10008841_A_Ccnd2
  gRNA
ccgccgtcgatgattgcaac

SEQ ID NO: 8842 - DNA, 20 bp, Artificial Sequence
  MKO10008842_A_Ccnd2
  gRNA
ttcatcgctctgtgcgctac

SEQ ID NO: 8843 - DNA, 20 bp, Artificial Sequence
  MKO10008843_A_Ccnd2
  gRNA
cgtcaagagcagcataacgc

SEQ ID NO: 8844 - DNA, 20 bp, Artificial Sequence
  MKO10008844_A_Ccnd3
  gRNA
aggtaccgtctgcctgttgc

SEQ ID NO: 8845 - DNA, 20 bp, Artificial Sequence
  MKO10008845_A_Ccnd3
  gRNA
gcacgcacccgcaactgcca

SEQ ID NO: 8846 - DNA, 20 bp, Artificial Sequence
  MKO10008846_A_Ccnd3
  gRNA
agcattggggcagccgtgct

SEQ ID NO: 8847 - DNA, 20 bp, Artificial Sequence
  MKO10008847_A_Ccndbp1
  gRNA
gcaagtccgtattgccatcg

SEQ ID NO: 8848 - DNA, 20 bp, Artificial Sequence
  MKO10008848_A_Ccndbp1
  gRNA
tcctcaagtcggcgaagccc

SEQ ID NO: 8849 - DNA, 20 bp, Artificial Sequence
  MKO10008849_A_Ccndbp1
  gRNA
cattccgtaccagctttctc

SEQ ID NO: 8850 - DNA, 20 bp, Artificial Sequence
  MKO10008850_A_Ccne1
  gRNA
ggatgataattcagcatgcg

SEQ ID NO: 8851 - DNA, 20 bp, Artificial Sequence
  MKO10008851_A_Ccne1
  gRNA
acaatgagcttgaatacccc

SEQ ID NO: 8852 - DNA, 20 bp, Artificial Sequence
  MKO10008852_A_Ccne1
  gRNA
tttcacagtcttgtcaatct

SEQ ID NO: 8853 - DNA, 20 bp, Artificial Sequence
  MKO10008853_A_Ccne2
  gRNA
tgaagagaatgtcaagacgc

SEQ ID NO: 8854 - DNA, 20 bp, Artificial Sequence
  MKO10008854_A_Ccne2
  gRNA
ctgattcctccagacagtac

SEQ ID NO: 8855 - DNA, 20 bp, Artificial Sequence
  MKO10008855_A_Ccne2
  gRNA
cctcacctctgccagattta

SEQ ID NO: 8856 - DNA, 20 bp, Artificial Sequence
  MKO10008856_A_Ccnf
  gRNA
ggctcttcatccgcccaccg

SEQ ID NO: 8857 - DNA, 20 bp, Artificial Sequence
  MKO10008857_A_Ccnf
  gRNA
cgcagaagtgaacggcttga

SEQ ID NO: 8858 - DNA, 20 bp, Artificial Sequence
  MKO10008858_A_Ccnf
  gRNA
acttacggccttcattgtag

SEQ ID NO: 8859 - DNA, 20 bp, Artificial Sequence
  MKO10008859_A_Ccng1
  gRNA
actctacgtatttcagtgct

SEQ ID NO: 8860 - DNA, 20 bp, Artificial Sequence
  MKO10008860_A_Ccng1
  gRNA
tgatccgaataagtcagtat

SEQ ID NO: 8861 - DNA, 20 bp, Artificial Sequence
  MKO10008861_A_Ccng1
  gRNA
gtggccgagatttgaccttc

SEQ ID NO: 8862 - DNA, 20 bp, Artificial Sequence
  MKO10008862_A_Ccng2
  gRNA
tgtgacaaaatacaatcgcg

SEQ ID NO: 8863 - DNA, 20 bp, Artificial Sequence
  MKO10008863_A_Ccng2
  gRNA
agcgtctgacattaaacgca

SEQ ID NO: 8864 - DNA, 20 bp, Artificial Sequence
  MKO10008864_A_Ccng2
  gRNA
gctgcgcttcgagtttatcg

SEQ ID NO: 8865 - DNA, 20 bp, Artificial Sequence
  MKO10008865_A_Ccnh
  gRNA
catactcacattattatccg

SEQ ID NO: 8866 - DNA, 20 bp, Artificial Sequence
  MKO10008866_A_Ccnh
  gRNA
ggtttacctttatatcgatg

SEQ ID NO: 8867 - DNA, 20 bp, Artificial Sequence
  MKO10008867_A_Ccnh
  gRNA
tcacttaccacaacagaccg

SEQ ID NO: 8868 - DNA, 20 bp, Artificial Sequence
  MKO10008868_A_Ccni
  gRNA
tagctgacaccgcaatggca

SEQ ID NO: 8869 - DNA, 20 bp, Artificial Sequence
  MKO10008869_A_Ccni
  gRNA
tcttcacacggctacaccat

SEQ ID NO: 8870 - DNA, 20 bp, Artificial Sequence
  MKO10008870_A_Ccni
  gRNA
caagcagctgcttcactgta

SEQ ID NO: 8871 - DNA, 20 bp, Artificial Sequence
  MKO10008871_A_Ccnjl
  gRNA
cacgtgtatcgaaatcctgc

SEQ ID NO: 8872 - DNA, 20 bp, Artificial Sequence
  MKO10008872_A_Ccnjl
  gRNA
ggcatatcgggactcgttgc

SEQ ID NO: 8873 - DNA, 20 bp, Artificial Sequence
  MKO10008873_A_Ccnjl
  gRNA
cgttcagggggcctgctctc

SEQ ID NO: 8874 - DNA, 20 bp, Artificial Sequence
  MKO10008874_A_Ccnj
  gRNA
agtctgtagcgtgtaagacg

SEQ ID NO: 8875 - DNA, 20 bp, Artificial Sequence
  MKO10008875_A_Ccnj
  gRNA
caaggccctgaacgctcgtt

SEQ ID NO: 8876 - DNA, 20 bp, Artificial Sequence
  MKO10008876_A_Ccnj
  gRNA
tcttggtgcagtgtatcgaa

SEQ ID NO: 8877 - DNA, 20 bp, Artificial Sequence
  MKO10008877_A_Ccnk
  gRNA
cgacagacactatgacaccc

SEQ ID NO: 8878 - DNA, 20 bp, Artificial Sequence
  MKO10008878_A_Ccnk
  gRNA
aataaatgattccagttgcc

SEQ ID NO: 8879 - DNA, 20 bp, Artificial Sequence
  MKO10008879_A_Ccnk
  gRNA
cctttgggtcatctccaaac

SEQ ID NO: 8880 - DNA, 20 bp, Artificial Sequence
  MKO10008880_A_Ccnl1
  gRNA
actgtgtttgacgaacgact

SEQ ID NO: 8881 - DNA, 20 bp, Artificial Sequence
  MKO10008881_A_Ccnl1
  gRNA
caccacctccgccagttaag

SEQ ID NO: 8882 - DNA, 20 bp, Artificial Sequence
  MKO10008882_A_Ccnl1
  gRNA
gttcgtcaaacacagtttcg

SEQ ID NO: 8883 - DNA, 20 bp, Artificial Sequence
  MKO10008883_A_Ccnl2
  gRNA
ctccatggaatgtttcacga

SEQ ID NO: 8884 - DNA, 20 bp, Artificial Sequence
  MKO10008884_A_Ccnl2
  gRNA
atgtgagcgtaatcaacacc

SEQ ID NO: 8885 - DNA, 20 bp, Artificial Sequence
  MKO10008885_A_Ccnl2
  gRNA
tcaatgtattccatcgcctt

SEQ ID NO: 8886 - DNA, 20 bp, Artificial Sequence
  MKO10008886_A_Ccno
  gRNA
gctgaacgcgtgttcgctcc

SEQ ID NO: 8887 - DNA, 20 bp, Artificial Sequence
  MKO10008887_A_Ccno
  gRNA
tagtgaacgcgtaatccgtt

SEQ ID NO: 8888 - DNA, 20 bp, Artificial Sequence
  MKO10008888_A_Ccno
  gRNA
gggagaacgcaccgccgcac

SEQ ID NO: 8889 - DNA, 20 bp, Artificial Sequence
  MKO10008889_A_Ccnt1
  gRNA
aagtgcacccagcttgttcg

SEQ ID NO: 8890 - DNA, 20 bp, Artificial Sequence
  MKO10008890_A_Ccnt1
  gRNA
gttacttacctcgaacaagc

SEQ ID NO: 8891 - DNA, 20 bp, Artificial Sequence
  MKO10008891_A_Ccnt1
  gRNA
ccagatcttgaacttgttgt

SEQ ID NO: 8892 - DNA, 20 bp, Artificial Sequence
  MKO10008892_A_Ccnt2
  gRNA
accactcacctcttactaac

SEQ ID NO: 8893 - DNA, 20 bp, Artificial Sequence
  MKO10008893_A_Ccnt2
  gRNA
ctgcgattgtttatatgcac

SEQ ID NO: 8894 - DNA, 20 bp, Artificial Sequence
  MKO10008894_A_Ccnt2
  gRNA
aaatgcacccagttagtaag

SEQ ID NO: 8895 - DNA, 20 bp, Artificial Sequence
  MKO10008895_A_Ccnyl1
  gRNA
tattcttagtgcgtgaaaag

SEQ ID NO: 8896 - DNA, 20 bp, Artificial Sequence
  MKO10008896_A_Ccnyl1
  gRNA
atgctcacctgttctttatg

SEQ ID NO: 8897 - DNA, 20 bp, Artificial Sequence
  MKO10008897_A_Ccnyl1
  gRNA
tatattaccacataaagaac

SEQ ID NO: 8898 - DNA, 20 bp, Artificial Sequence
  MKO10008898_A_Ccny
  gRNA
atattgtgctggcccgagga

SEQ ID NO: 8899 - DNA, 20 bp, Artificial Sequence
  MKO10008899_A_Ccny
  gRNA
tcaatccttcagaccatcct

SEQ ID NO: 8900 - DNA, 20 bp, Artificial Sequence
  MKO10008900_A_Ccny
  gRNA
acctcaagtacaccatcaaa

SEQ ID NO: 8901 - DNA, 20 bp, Artificial Sequence
  MKO10008901_A_Ccp110
  gRNA
gaatgcctccgatgcatcgt

SEQ ID NO: 8902 - DNA, 20 bp, Artificial Sequence
  MKO10008902_A_Ccp110
  gRNA
gtatgagtcctacgatgcat

SEQ ID NO: 8903 - DNA, 20 bp, Artificial Sequence
  MKO10008903_A_Ccp110
  gRNA
agccttactgactcgtgtcc

SEQ ID NO: 8904 - DNA, 20 bp, Artificial Sequence
  MKO10008904_A_Ccpg1os
  gRNA
tcgccagacttctcgctatc

SEQ ID NO: 8905 - DNA, 20 bp, Artificial Sequence
  MKO10008905_A_Ccpg1os
  gRNA
gtcccgtaaactacaatttc

SEQ ID NO: 8906 - DNA, 20 bp, Artificial Sequence
  MKO10008906_A_Ccpg1os
  gRNA
acttagaaacttataccccc

SEQ ID NO: 8907 - DNA, 20 bp, Artificial Sequence
  MKO10008907_A_Ccpg1
  gRNA
cgcaaacaacacatcgtcag

SEQ ID NO: 8908 - DNA, 20 bp, Artificial Sequence
  MKO10008908_A_Ccpg1
  gRNA
acaagatgagtcgctgtcgc

SEQ ID NO: 8909 - DNA, 20 bp, Artificial Sequence
  MKO10008909_A_Ccpg1
  gRNA
gctccataccgggttctggc

SEQ ID NO: 8910 - DNA, 20 bp, Artificial Sequence
  MKO10008910_A_Ccr10
  gRNA
aaatgagccgacagcgtcgt

SEQ ID NO: 8911 - DNA, 20 bp, Artificial Sequence
  MKO10008911_A_Ccr10
  gRNA
aacgcctagccgagcgcact

SEQ ID NO: 8912 - DNA, 20 bp, Artificial Sequence
  MKO10008912_A_Ccr10
  gRNA
ggggaccaagcccacagagc

SEQ ID NO: 8913 - DNA, 20 bp, Artificial Sequence
  MKO10008913_A_Ccr1l1
  gRNA
ggtatctatcaatcgtaagc

SEQ ID NO: 8914 - DNA, 20 bp, Artificial Sequence
  MKO10008914_A_Ccr1l1
  gRNA
tctgaattataagtcggcag

SEQ ID NO: 8915 - DNA, 20 bp, Artificial Sequence
  MKO10008915_A_Ccr1l1
  gRNA
aacggttccggaagtacctc

SEQ ID NO: 8916 - DNA, 20 bp, Artificial Sequence
  MKO10008916_A_Ccr1
  gRNA
actacaagttgaaagacgac

SEQ ID NO: 8917 - DNA, 20 bp, Artificial Sequence
  MKO10008917_A_Ccr1
  gRNA
ggtatctgtcaatcgtcaac

SEQ ID NO: 8918 - DNA, 20 bp, Artificial Sequence
  MKO10008918_A_Ccr1
  gRNA
tacggtgagtgaactcccac

SEQ ID NO: 8919 - DNA, 20 bp, Artificial Sequence
  MKO10008919_A_Ccr2
  gRNA
gagatgttgatagtatgccg

SEQ ID NO: 8920 - DNA, 20 bp, Artificial Sequence
  MKO10008920_A_Ccr2
  gRNA
acaccgtatgactacgatga

SEQ ID NO: 8921 - DNA, 20 bp, Artificial Sequence
  MKO10008921_A_Ccr2
  gRNA
tcaccatcatcgtagtcata

SEQ ID NO: 8922 - DNA, 20 bp, Artificial Sequence
  MKO10008922_A_Ccr3
  gRNA
ccagtaatctacgcctttgt

SEQ ID NO: 8923 - DNA, 20 bp, Artificial Sequence
  MKO10008923_A_Ccr3
  gRNA
tggtgcccactcatattcat

SEQ ID NO: 8924 - DNA, 20 bp, Artificial Sequence
  MKO10008924_A_Ccr3
  gRNA
ccacaccctatgaatatgag

SEQ ID NO: 8925 - DNA, 20 bp, Artificial Sequence
  MKO10008925_A_Ccr4
  gRNA
tgtacggcgtccagaagccg

SEQ ID NO: 8926 - DNA, 20 bp, Artificial Sequence
  MKO10008926_A_Ccr4
  gRNA
tcgtcgagttgaccgagtac

SEQ ID NO: 8927 - DNA, 20 bp, Artificial Sequence
  MKO10008927_A_Ccr4
  gRNA
agtgcgcatgatcttcgccg

SEQ ID NO: 8928 - DNA, 20 bp, Artificial Sequence
  MKO10008928_A_Ccr5
  gRNA
tcagtctatacccgatccac

SEQ ID NO: 8929 - DNA, 20 bp, Artificial Sequence
  MKO10008929_A_Ccr5
  gRNA
tatagctatgacatcgatta

SEQ ID NO: 8930 - DNA, 20 bp, Artificial Sequence
  MKO10008930_A_Ccr5
  gRNA
tagactgagcttgcacgatc

SEQ ID NO: 8931 - DNA, 20 bp, Artificial Sequence
  MKO10008931_A_Ccr6
  gRNA
tctgagacagacctgtaccg

SEQ ID NO: 8932 - DNA, 20 bp, Artificial Sequence
  MKO10008932_A_Ccr6
  gRNA
agaaagtcctcgcctacacc

SEQ ID NO: 8933 - DNA, 20 bp, Artificial Sequence
  MKO10008933_A_Ccr6
  gRNA
aatccgagtcgtgatcgctg

SEQ ID NO: 8934 - DNA, 20 bp, Artificial Sequence
  MKO10008934_A_Ccr7
  gRNA
ccgacgcgttccgtacatgc

SEQ ID NO: 8935 - DNA, 20 bp, Artificial Sequence
  MKO10008935_A_Ccr7
  gRNA
gcggaacttgacgccgatga

SEQ ID NO: 8936 - DNA, 20 bp, Artificial Sequence
  MKO10008936_A_Ccr7
  gRNA
gaaacccaggaaaaacgtgc

SEQ ID NO: 8937 - DNA, 20 bp, Artificial Sequence
  MKO10008937_A_Ccr8
  gRNA
tcctatgaacgcgtagatga

SEQ ID NO: 8938 - DNA, 20 bp, Artificial Sequence
  MKO10008938_A_Ccr8
  gRNA
cccgtcatctacgcgttcat

SEQ ID NO: 8939 - DNA, 20 bp, Artificial Sequence
  MKO10008939_A_Ccr8
  gRNA
tgcctcgatggattacacga

SEQ ID NO: 8940 - DNA, 20 bp, Artificial Sequence
  MKO10008940_A_Ccr9
  gRNA
atgcaatagtctgagtaacc

SEQ ID NO: 8941 - DNA, 20 bp, Artificial Sequence
  MKO10008941_A_Ccr9
  gRNA
cgagagattccgaagggatc

SEQ ID NO: 8942 - DNA, 20 bp, Artificial Sequence
  MKO10008942_A_Ccr9
  gRNA
tatactcactgtgagttctg

SEQ ID NO: 8943 - DNA, 20 bp, Artificial Sequence
  MKO10008943_A_Ccrl2
  gRNA
gctatcagcaagcgcctcca

SEQ ID NO: 8944 - DNA, 20 bp, Artificial Sequence
  MKO10008944_A_Ccrl2
  gRNA
tgccaatcgaagcgccgctc

SEQ ID NO: 8945 - DNA, 20 bp, Artificial Sequence
  MKO10008945_A_Ccrl2
  gRNA
gagtccgacaagaactttac

SEQ ID NO: 8946 - DNA, 20 bp, Artificial Sequence
  MKO10008946_A_Ccrn4l
  gRNA
gcgccgaacgctcgccccgc

SEQ ID NO: 8947 - DNA, 20 bp, Artificial Sequence
  MKO10008947_A_Ccrn4l
  gRNA
gttccactgcatgacgcgaa

SEQ ID NO: 8948 - DNA, 20 bp, Artificial Sequence
  MKO10008948_A_Ccrn4l
  gRNA
tgaagtccccgcagacgatc

SEQ ID NO: 8949 - DNA, 20 bp, Artificial Sequence
  MKO10008949_A_Ccsap
  gRNA
ggcgcgtattcgtcccagcg

SEQ ID NO: 8950 - DNA, 20 bp, Artificial Sequence
  MKO10008950_A_Ccsap
  gRNA
gggcgcgttaggggagccct

SEQ ID NO: 8951 - DNA, 20 bp, Artificial Sequence
  MKO10008951_A_Ccsap
  gRNA
gcgggctcactcggtggacg

SEQ ID NO: 8952 - DNA, 20 bp, Artificial Sequence
  MKO10008952_A_Ccser1
  gRNA
gatatatagagcggcggctg

SEQ ID NO: 8953 - DNA, 20 bp, Artificial Sequence
  MKO10008953_A_Ccser1
  gRNA
cagaatggtcttaaagccga

SEQ ID NO: 8954 - DNA, 20 bp, Artificial Sequence
  MKO10008954_A_Ccser1
  gRNA
gccattcagactgatgctcc

SEQ ID NO: 8955 - DNA, 20 bp, Artificial Sequence
  MKO10008955_A_Ccser2
  gRNA
cagaaatgtacgacagtcgc

SEQ ID NO: 8956 - DNA, 20 bp, Artificial Sequence
  MKO10008956_A_Ccser2
  gRNA
tgagatgaccctccggcaca

SEQ ID NO: 8957 - DNA, 20 bp, Artificial Sequence
  MKO10008957_A_Ccser2
  gRNA
gccggagggtcatctcatcc

SEQ ID NO: 8958 - DNA, 20 bp, Artificial Sequence
  MKO10008958_A_Ccs
  gRNA
acctattgcagtccctcgta

SEQ ID NO: 8959 - DNA, 20 bp, Artificial Sequence
  MKO10008959_A_Ccs
  gRNA
accatcgacggcctagagcc

SEQ ID NO: 8960 - DNA, 20 bp, Artificial Sequence
  MKO10008960_A_Ccs
  gRNA
cttacccgatcagtgtcctg

SEQ ID NO: 8961 - DNA, 20 bp, Artificial Sequence
  MKO10008961_A_Cct2
  gRNA
tgtggacaaccccgcagcaa

SEQ ID NO: 8962 - DNA, 20 bp, Artificial Sequence
  MKO10008962_A_Cct2
  gRNA
taatttaagtcgtcgtttat

SEQ ID NO: 8963 - DNA, 20 bp, Artificial Sequence
  MKO10008963_A_Cct2
  gRNA
gctctgatggtgaccaacga

SEQ ID NO: 8964 - DNA, 20 bp, Artificial Sequence
  MKO10008964_A_Cct3
  gRNA
caaacacacctctcgaagaa

SEQ ID NO: 8965 - DNA, 20 bp, Artificial Sequence
  MKO10008965_A_Cct3
  gRNA
cagaacacaaagcgtgaatc

SEQ ID NO: 8966 - DNA, 20 bp, Artificial Sequence
  MKO10008966_A_Cct3
  gRNA
gggacctaaatctatgatga

SEQ ID NO: 8967 - DNA, 20 bp, Artificial Sequence
  MKO10008967_A_Cct4
  gRNA
agcaatgatgacaaccgacg

SEQ ID NO: 8968 - DNA, 20 bp, Artificial Sequence
  MKO10008968_A_Cct4
  gRNA
acgtcggttgtcatcattgc

SEQ ID NO: 8969 - DNA, 20 bp, Artificial Sequence
  MKO10008969_A_Cct4
  gRNA
gatgctattagaacaagcct

SEQ ID NO: 8970 - DNA, 20 bp, Artificial Sequence
  MKO10008970_A_Cct5
  gRNA
cgccgtgaatgccgtcctca

SEQ ID NO: 8971 - DNA, 20 bp, Artificial Sequence
  MKO10008971_A_Cct5
  gRNA
ccgaattgcaatacaacacc

SEQ ID NO: 8972 - DNA, 20 bp, Artificial Sequence
  MKO10008972_A_Cct5
  gRNA
aggcaaagtaggtgggcggc

SEQ ID NO: 8973 - DNA, 20 bp, Artificial Sequence
  MKO10008973_A_Cct6a
  gRNA
ccatttggcaggcttgtatc

SEQ ID NO: 8974 - DNA, 20 bp, Artificial Sequence
  MKO10008974_A_Cct6a
  gRNA
ggctgtagtggactccatct

SEQ ID NO: 8975 - DNA, 20 bp, Artificial Sequence
  MKO10008975_A_Cct6a
  gRNA
tgagcagctccccgatgatg

SEQ ID NO: 8976 - DNA, 20 bp, Artificial Sequence
  MKO10008976_A_Cct6b
  gRNA
cagcatgaactttcgtctgc

SEQ ID NO: 8977 - DNA, 20 bp, Artificial Sequence
  MKO10008977_A_Cct6b
  gRNA
aagcagtacattgccgtctt

SEQ ID NO: 8978 - DNA, 20 bp, Artificial Sequence
  MKO10008978_A_Cct6b
  gRNA
gacgaaagttcatgctgaac

SEQ ID NO: 8979 - DNA, 20 bp, Artificial Sequence
  MKO10008979_A_Cct7
  gRNA
tttccgcacagccacccaat

SEQ ID NO: 8980 - DNA, 20 bp, Artificial Sequence
  MKO10008980_A_Cct7
  gRNA
agaaccaccctgggtccccg

SEQ ID NO: 8981 - DNA, 20 bp, Artificial Sequence
  MKO10008981_A_Cct7
  gRNA
gtgtaaaccttcttccacgt

SEQ ID NO: 8982 - DNA, 20 bp, Artificial Sequence
  MKO10008982_A_Cct8l1
  gRNA
gattcaagccaagtcccgaa

SEQ ID NO: 8983 - DNA, 20 bp, Artificial Sequence
  MKO10008983_A_Cct8l1
  gRNA
ggaagtgccacaaggtttac

SEQ ID NO: 8984 - DNA, 20 bp, Artificial Sequence
  MKO10008984_A_Cct8l1
  gRNA
gacaatctcctttcgggact

SEQ ID NO: 8985 - DNA, 20 bp, Artificial Sequence
  MKO10008985_A_Cct8
  gRNA
cagactactcgcacagcgta

SEQ ID NO: 8986 - DNA, 20 bp, Artificial Sequence
  MKO10008986_A_Cct8
  gRNA
gcatttctcgggattagaag

SEQ ID NO: 8987 - DNA, 20 bp, Artificial Sequence
  MKO10008987_A_Cct8
  gRNA
tcatggtttaggtaatatcg

SEQ ID NO: 8988 - DNA, 20 bp, Artificial Sequence
  MKO10008988_A_Ccz1
  gRNA
ttactttgcttctcgatgat

SEQ ID NO: 8989 - DNA, 20 bp, Artificial Sequence
  MKO10008989_A_Ccz1
  gRNA
ggcggtagtggagtaccaag

SEQ ID NO: 8990 - DNA, 20 bp, Artificial Sequence
  MKO10008990_A_Ccz1
  gRNA
gcagtgctacagcatgtaca

SEQ ID NO: 8991 - DNA, 20 bp, Artificial Sequence
  MKO10008991_A_Cd101
  gRNA
tgtggccggtgatgtacggc

SEQ ID NO: 8992 - DNA, 20 bp, Artificial Sequence
  MKO10008992_A_Cd101
  gRNA
cttgtccagccgtacatcac

SEQ ID NO: 8993 - DNA, 20 bp, Artificial Sequence
  MKO10008993_A_Cd101
  gRNA
ctgccgagcagcgtactgtg

SEQ ID NO: 8994 - DNA, 20 bp, Artificial Sequence
  MKO10008994_A_Cd109
  gRNA
actctttaggtcccgctttc

SEQ ID NO: 8995 - DNA, 20 bp, Artificial Sequence
  MKO10008995_A_Cd109
  gRNA
atgagatcgtattctccaac

SEQ ID NO: 8996 - DNA, 20 bp, Artificial Sequence
  MKO10008996_A_Cd109
  gRNA
tttcaagactctcgttcttc

SEQ ID NO: 8997 - DNA, 20 bp, Artificial Sequence
  MKO10008997_A_Cd14
  gRNA
cgttacgcagcgctaaaact

SEQ ID NO: 8998 - DNA, 20 bp, Artificial Sequence
  MKO10008998_A_Cd14
  gRNA
gggccgcgcggattcctagt

SEQ ID NO: 8999 - DNA, 20 bp, Artificial Sequence
  MKO10008999_A_Cd14
  gRNA
gaagacgcggacctgttcgc

SEQ ID NO: 9000 - DNA, 20 bp, Artificial Sequence
  MKO10009000_A_Cd151
  gRNA
ccccactgaccaagcgtaac

SEQ ID NO: 9001 - DNA, 20 bp, Artificial Sequence
  MKO10009001_A_Cd151
  gRNA
gcgacggaacctgttacgct

SEQ ID NO: 9002 - DNA, 20 bp, Artificial Sequence
  MKO10009002_A_Cd151
  gRNA
ggcctatgtctattatcagc

SEQ ID NO: 9003 - DNA, 20 bp, Artificial Sequence
  MKO10009003_A_Cd160
  gRNA
ttcaggcttcctgcaagtaa

SEQ ID NO: 9004 - DNA, 20 bp, Artificial Sequence
  MKO10009004_A_Cd160
  gRNA
aaccctaagctgttctaagt

SEQ ID NO: 9005 - DNA, 20 bp, Artificial Sequence
  MKO10009005_A_Cd160
  gRNA
aactgagagtgccgttgata

SEQ ID NO: 9006 - DNA, 20 bp, Artificial Sequence
  MKO10009006_A_Cd163l1
  gRNA
gtggtgctggttcgacacca

SEQ ID NO: 9007 - DNA, 20 bp, Artificial Sequence
  MKO10009007_A_Cd163l1
  gRNA
ccaggccccccgtcaagatg

SEQ ID NO: 9008 - DNA, 20 bp, Artificial Sequence
  MKO10009008_A_Cd163l1
  gRNA
ggctgcacaatgtatcctgt

SEQ ID NO: 9009 - DNA, 20 bp, Artificial Sequence
  MKO10009009_A_Cd163
  gRNA
accaatctggctcgatgacc

SEQ ID NO: 9010 - DNA, 20 bp, Artificial Sequence
  MKO10009010_A_Cd163
  gRNA
gcacagtgtgcagtaacggc

SEQ ID NO: 9011 - DNA, 20 bp, Artificial Sequence
  MKO10009011_A_Cd163
  gRNA
cgctggagttagcccatcca

SEQ ID NO: 9012 - DNA, 20 bp, Artificial Sequence
  MKO10009012_A_Cd164l2
  gRNA
ccctgctccgcctgaacgtt

SEQ ID NO: 9013 - DNA, 20 bp, Artificial Sequence
  MKO10009013_A_Cd164l2
  gRNA
ccaaacgttcaggcggagca

SEQ ID NO: 9014 - DNA, 20 bp, Artificial Sequence
  MKO10009014_A_Cd164l2
  gRNA
aagctagctccatcaaaacc

SEQ ID NO: 9015 - DNA, 20 bp, Artificial Sequence
  MKO10009015_A_Cd164
  gRNA
ccagtgccaaccaattctac

SEQ ID NO: 9016 - DNA, 20 bp, Artificial Sequence
  MKO10009016_A_Cd164
  gRNA
ttccagctaagcccacaact

SEQ ID NO: 9017 - DNA, 20 bp, Artificial Sequence
  MKO10009017_A_Cd164
  gRNA
actccctcagttgtcacatc

SEQ ID NO: 9018 - DNA, 20 bp, Artificial Sequence
  MKO10009018_A_Cd177
  gRNA
atggcgacacacacgggtgt

SEQ ID NO: 9019 - DNA, 20 bp, Artificial Sequence
  MKO10009019_A_Cd177
  gRNA
tcgcctgggtgccattaagc

SEQ ID NO: 9020 - DNA, 20 bp, Artificial Sequence
  MKO10009020_A_Cd177
  gRNA
ggaagcacacactgctacga

SEQ ID NO: 9021 - DNA, 20 bp, Artificial Sequence
  MKO10009021_A_Cd180
  gRNA
atgtagacctgagtcacaac

SEQ ID NO: 9022 - DNA, 20 bp, Artificial Sequence
  MKO10009022_A_Cd180
  gRNA
tgtcacgctatcctgtagta

SEQ ID NO: 9023 - DNA, 20 bp, Artificial Sequence
  MKO10009023_A_Cd180
  gRNA
gagattgataagtctgctga

SEQ ID NO: 9024 - DNA, 20 bp, Artificial Sequence
  MKO10009024_A_Cd19
  gRNA
gaccttcacgtgcctctcga

SEQ ID NO: 9025 - DNA, 20 bp, Artificial Sequence
  MKO10009025_A_Cd19
  gRNA
tgattcaaactgctcccccg

SEQ ID NO: 9026 - DNA, 20 bp, Artificial Sequence
  MKO10009026_A_Cd19
  gRNA
acaggtagaagccccccata

SEQ ID NO: 9027 - DNA, 20 bp, Artificial Sequence
  MKO10009027_A_Cd1d1
  gRNA
acctgccccctatttgtccg

SEQ ID NO: 9028 - DNA, 20 bp, Artificial Sequence
  MKO10009028_A_Cd1d1
  gRNA
cccgcacagacagcgtggtc

SEQ ID NO: 9029 - DNA, 20 bp, Artificial Sequence
  MKO10009029_A_Cd1d1
  gRNA
gggatctgcagactcaccgt

SEQ ID NO: 9030 - DNA, 20 bp, Artificial Sequence
  MKO10009030_A_Cd1d2
  gRNA
tttcacagccggtagacaac

SEQ ID NO: 9031 - DNA, 20 bp, Artificial Sequence
  MKO10009031_A_Cd1d2
  gRNA
ggaccagcttatgttagcaa

SEQ ID NO: 9032 - DNA, 20 bp, Artificial Sequence
  MKO10009032_A_Cd1d2
  gRNA
aaaatatgccgtgagattcc

SEQ ID NO: 9033 - DNA, 20 bp, Artificial Sequence
  MKO10009033_A_Cd200r1
  gRNA
gaatatatggtcgtaatgat

SEQ ID NO: 9034 - DNA, 20 bp, Artificial Sequence
  MKO10009034_A_Cd200r1
  gRNA
tactttgtatgctattgtgc

SEQ ID NO: 9035 - DNA, 20 bp, Artificial Sequence
  MKO10009035_A_Cd200r1
  gRNA
agaatattaccttgtgtcag

SEQ ID NO: 9036 - DNA, 20 bp, Artificial Sequence
  MKO10009036_A_Cd200r2
  gRNA
aggccagccttcctgcataa

SEQ ID NO: 9037 - DNA, 20 bp, Artificial Sequence
  MKO10009037_A_Cd200r2
  gRNA
gaccattctctacgtgaaaa

SEQ ID NO: 9038 - DNA, 20 bp, Artificial Sequence
  MKO10009038_A_Cd200r2
  gRNA
actttatggaaattcccttc

SEQ ID NO: 9039 - DNA, 20 bp, Artificial Sequence
  MKO10009039_A_Cd200r3
  gRNA
agtaatgcccatcatgcttg

SEQ ID NO: 9040 - DNA, 20 bp, Artificial Sequence
  MKO10009040_A_Cd200r3
  gRNA
agacatagcatccaagtgcc

SEQ ID NO: 9041 - DNA, 20 bp, Artificial Sequence
  MKO10009041_A_Cd200r3
  gRNA
agactcactctcaatctcca

SEQ ID NO: 9042 - DNA, 20 bp, Artificial Sequence
  MKO10009042_A_Cd200r4
  gRNA
tgcttagtctctcattcgac

SEQ ID NO: 9043 - DNA, 20 bp, Artificial Sequence
  MKO10009043_A_Cd200r4
  gRNA
gtgattattcttcttaacgt

SEQ ID NO: 9044 - DNA, 20 bp, Artificial Sequence
  MKO10009044_A_Cd200r4
  gRNA
agtcgaatgagagactaagc

SEQ ID NO: 9045 - DNA, 20 bp, Artificial Sequence
  MKO10009045_A_Cd200
  gRNA
attcaccccgctcctgattt

SEQ ID NO: 9046 - DNA, 20 bp, Artificial Sequence
  MKO10009046_A_Cd200
  gRNA
tgtagtcaatcacattcccc

SEQ ID NO: 9047 - DNA, 20 bp, Artificial Sequence
  MKO10009047_A_Cd200
  gRNA
atgtgtctcttcaacacgtt

SEQ ID NO: 9048 - DNA, 20 bp, Artificial Sequence
  MKO10009048_A_Cd207
  gRNA
actcacttgttccgattctg

SEQ ID NO: 9049 - DNA, 20 bp, Artificial Sequence
  MKO10009049_A_Cd207
  gRNA
tttcacgcaccccaaagacc

SEQ ID NO: 9050 - DNA, 20 bp, Artificial Sequence
  MKO10009050_A_Cd207
  gRNA
tctgagaacgcaccctcttg

SEQ ID NO: 9051 - DNA, 20 bp, Artificial Sequence
  MKO10009051_A_Cd209a
  gRNA
cacctacgccagccttcaac

SEQ ID NO: 9052 - DNA, 20 bp, Artificial Sequence
  MKO10009052_A_Cd209a
  gRNA
caagttgagcccccacattg

SEQ ID NO: 9053 - DNA, 20 bp, Artificial Sequence
  MKO10009053_A_Cd209a
  gRNA
ggtccacagtcaagtcccct

SEQ ID NO: 9054 - DNA, 20 bp, Artificial Sequence
  MKO10009054_A_Cd209b
  gRNA
tccagactacgaccaaattc

SEQ ID NO: 9055 - DNA, 20 bp, Artificial Sequence
  MKO10009055_A_Cd209b
  gRNA
ccaaaaccccaaataccgag

SEQ ID NO: 9056 - DNA, 20 bp, Artificial Sequence
  MKO10009056_A_Cd209b
  gRNA
ctcagtgatcttcgcctgca

SEQ ID NO: 9057 - DNA, 20 bp, Artificial Sequence
  MKO10009057_A_Cd209c
  gRNA
tctaatgttgcctactccca

SEQ ID NO: 9058 - DNA, 20 bp, Artificial Sequence
  MKO10009058_A_Cd209c
  gRNA
cacttatttgagacttcagc

SEQ ID NO: 9059 - DNA, 20 bp, Artificial Sequence
  MKO10009059_A_Cd209c
  gRNA
agggagagcccaacaatgaa

SEQ ID NO: 9060 - DNA, 20 bp, Artificial Sequence
  MKO10009060_A_Cd209d
  gRNA
gaagcagagccgcaacccct

SEQ ID NO: 9061 - DNA, 20 bp, Artificial Sequence
  MKO10009061_A_Cd209d
  gRNA
tggagttgtgccaatttctt

SEQ ID NO: 9062 - DNA, 20 bp, Artificial Sequence
  MKO10009062_A_Cd209d
  gRNA
cagtctctatgatgaccagt

SEQ ID NO: 9063 - DNA, 20 bp, Artificial Sequence
  MKO10009063_A_Cd209e
  gRNA
atgccaatcccgttgtgact

SEQ ID NO: 9064 - DNA, 20 bp, Artificial Sequence
  MKO10009064_A_Cd209e
  gRNA
ttgaagaacgtccaatccca

SEQ ID NO: 9065 - DNA, 20 bp, Artificial Sequence
  MKO10009065_A_Cd209e
  gRNA
tgggactacctgtctgacag

SEQ ID NO: 9066 - DNA, 20 bp, Artificial Sequence
  MKO10009066_A_Cd209f
  gRNA
agctgcaaatgagaccctcg

SEQ ID NO: 9067 - DNA, 20 bp, Artificial Sequence
  MKO10009067_A_Cd209f
  gRNA
tcagaggaggaggtcacatc

SEQ ID NO: 9068 - DNA, 20 bp, Artificial Sequence
  MKO10009068_A_Cd209f
  gRNA
ggcatctgacccaagtcccc

SEQ ID NO: 9069 - DNA, 20 bp, Artificial Sequence
  MKO10009069_A_Cd209g
  gRNA
ttcagcaattcctcaaatac

SEQ ID NO: 9070 - DNA, 20 bp, Artificial Sequence
  MKO10009070_A_Cd209g
  gRNA
ggtgtcatctacccactgcc

SEQ ID NO: 9071 - DNA, 20 bp, Artificial Sequence
  MKO10009071_A_Cd209g
  gRNA
ccagttacccttgtccaagc

SEQ ID NO: 9072 - DNA, 20 bp, Artificial Sequence
  MKO10009072_A_Cd226
  gRNA
tcccatatgacttgttgcac

SEQ ID NO: 9073 - DNA, 20 bp, Artificial Sequence
  MKO10009073_A_Cd226
  gRNA
ggccagtgcaacaagtcata

SEQ ID NO: 9074 - DNA, 20 bp, Artificial Sequence
  MKO10009074_A_Cd226
  gRNA
gaattccacttaaagagccc

SEQ ID NO: 9075 - DNA, 20 bp, Artificial Sequence
  MKO10009075_A_Cd22
  gRNA
ccgatacgtgccaatgacag

SEQ ID NO: 9076 - DNA, 20 bp, Artificial Sequence
  MKO10009076_A_Cd22
  gRNA
gcccattcacctcaatgtct

SEQ ID NO: 9077 - DNA, 20 bp, Artificial Sequence
  MKO10009077_A_Cd22
  gRNA
cgtggcggtgtcttggttca

SEQ ID NO: 9078 - DNA, 20 bp, Artificial Sequence
  MKO10009078_A_Cd244
  gRNA
aatcacgatgatcaccccaa

SEQ ID NO: 9079 - DNA, 20 bp, Artificial Sequence
  MKO10009079_A_Cd244
  gRNA
gaccatcattataccaattc

SEQ ID NO: 9080 - DNA, 20 bp, Artificial Sequence
  MKO10009080_A_Cd244
  gRNA
ttgacaagtcccattagtcc

SEQ ID NO: 9081 - DNA, 20 bp, Artificial Sequence
  MKO10009081_A_Cd247
  gRNA
gcgggctcgggatccagaga

SEQ ID NO: 9082 - DNA, 20 bp, Artificial Sequence
  MKO10009082_A_Cd247
  gRNA
aagagaggaatatgacgtct

SEQ ID NO: 9083 - DNA, 20 bp, Artificial Sequence
  MKO10009083_A_Cd247
  gRNA
tcgcctgcatcctccacgtg

SEQ ID NO: 9084 - DNA, 20 bp, Artificial Sequence
  MKO10009084_A_Cd248
  gRNA
gtccatatgaagccccgcag

SEQ ID NO: 9085 - DNA, 20 bp, Artificial Sequence
  MKO10009085_A_Cd248
  gRNA
cgcacccaacaagcggatca

SEQ ID NO: 9086 - DNA, 20 bp, Artificial Sequence
  MKO10009086_A_Cd248
  gRNA
gcagtccgtgatccgcttgt

SEQ ID NO: 9087 - DNA, 20 bp, Artificial Sequence
  MKO10009087_A_Cd24a
  gRNA
agggtctcacctgcgtgggt

SEQ ID NO: 9088 - DNA, 20 bp, Artificial Sequence
  MKO10009088_A_Cd24a
  gRNA
acatctgttgcaccgtttcc

SEQ ID NO: 9089 - DNA, 20 bp, Artificial Sequence
  MKO10009089_A_Cd24a
  gRNA
gaaacggtgcaacagatgtt

SEQ ID NO: 9090 - DNA, 20 bp, Artificial Sequence
  MKO10009090_A_Cd274
  gRNA
gtatggcagcaacgtcacga

SEQ ID NO: 9091 - DNA, 20 bp, Artificial Sequence
  MKO10009091_A_Cd274
  gRNA
ctggatccacggaaattctc

SEQ ID NO: 9092 - DNA, 20 bp, Artificial Sequence
  MKO10009092_A_Cd274
  gRNA
tccaaaggacttgtacgtgg

SEQ ID NO: 9093 - DNA, 20 bp, Artificial Sequence
  MKO10009093_A_Cd276
  gRNA
gcgcgtccgagtaaccgacg

SEQ ID NO: 9094 - DNA, 20 bp, Artificial Sequence
  MKO10009094_A_Cd276
  gRNA
atcgaacaagccccgctcgt

SEQ ID NO: 9095 - DNA, 20 bp, Artificial Sequence
  MKO10009095_A_Cd276
  gRNA
cccaacaaggacctacgtcc

SEQ ID NO: 9096 - DNA, 20 bp, Artificial Sequence
  MKO10009096_A_Cd27
  gRNA
ctggctatagacagtcgagt

SEQ ID NO: 9097 - DNA, 20 bp, Artificial Sequence
  MKO10009097_A_Cd27
  gRNA
cgggtttccggtagtcctcc

SEQ ID NO: 9098 - DNA, 20 bp, Artificial Sequence
  MKO10009098_A_Cd27
  gRNA
actcgactgtctatagccag

SEQ ID NO: 9099 - DNA, 20 bp, Artificial Sequence
  MKO10009099_A_Cd28
  gRNA
cgccttacctagacaacgag

SEQ ID NO: 9100 - DNA, 20 bp, Artificial Sequence
  MKO10009100_A_Cd28
  gRNA
cccggaattcctttgcgaga

SEQ ID NO: 9101 - DNA, 20 bp, Artificial Sequence
  MKO10009101_A_Cd28
  gRNA
gcggtacgctgcaaagtctc

SEQ ID NO: 9102 - DNA, 20 bp, Artificial Sequence
  MKO10009102_A_Cd2ap
  gRNA
gtacagcgaatcagcactta

SEQ ID NO: 9103 - DNA, 20 bp, Artificial Sequence
  MKO10009103_A_Cd2ap
  gRNA
catactcttcttaatagctt

SEQ ID NO: 9104 - DNA, 20 bp, Artificial Sequence
  MKO10009104_A_Cd2ap
  gRNA
cttaccttaacaaaattgtc

SEQ ID NO: 9105 - DNA, 20 bp, Artificial Sequence
  MKO10009105_A_Cd2bp2
  gRNA
aatgagcgcccaagcactcc

SEQ ID NO: 9106 - DNA, 20 bp, Artificial Sequence
  MKO10009106_A_Cd2bp2
  gRNA
atgcgcagatccgagacagc

SEQ ID NO: 9107 - DNA, 20 bp, Artificial Sequence
  MKO10009107_A_Cd2bp2
  gRNA
acggccccctgataagcacc

SEQ ID NO: 9108 - DNA, 20 bp, Artificial Sequence
  MKO10009108_A_Cd2
  gRNA
tgtcccttgcaagaccgcac

SEQ ID NO: 9109 - DNA, 20 bp, Artificial Sequence
  MKO10009109_A_Cd2
  gRNA
ccgatgatgagaaacgacag

SEQ ID NO: 9110 - DNA, 20 bp, Artificial Sequence
  MKO10009110_A_Cd2
  gRNA
ctggggttgagtgcggcttg

SEQ ID NO: 9111 - DNA, 20 bp, Artificial Sequence
  MKO10009111_A_Cd300a
  gRNA
gctaacacagacaacagcgc

SEQ ID NO: 9112 - DNA, 20 bp, Artificial Sequence
  MKO10009112_A_Cd300a
  gRNA
cctagggcgggacccttggt

SEQ ID NO: 9113 - DNA, 20 bp, Artificial Sequence
  MKO10009113_A_Cd300a
  gRNA
gagtgtgtcatgtcgatatg

SEQ ID NO: 9114 - DNA, 20 bp, Artificial Sequence
  MKO10009114_A_Cd300c
  gRNA
ccagtcaaaggttcacgccc

SEQ ID NO: 9115 - DNA, 20 bp, Artificial Sequence
  MKO10009115_A_Cd300c
  gRNA
agaatgttgataccgttccc

SEQ ID NO: 9116 - DNA, 20 bp, Artificial Sequence
  MKO10009116_A_Cd300c
  gRNA
cacgaacacctcaaccttga

SEQ ID NO: 9117 - DNA, 20 bp, Artificial Sequence
  MKO10009117_A_Cd300e
  gRNA
ttcgtggtcacgtgatccat

SEQ ID NO: 9118 - DNA, 20 bp, Artificial Sequence
  MKO10009118_A_Cd300e
  gRNA
ttcacccttacactgaccga

SEQ ID NO: 9119 - DNA, 20 bp, Artificial Sequence
  MKO10009119_A_Cd300e
  gRNA
tcacattagtactaatcctc

SEQ ID NO: 9120 - DNA, 20 bp, Artificial Sequence
  MKO10009120_A_Cd300lb
  gRNA
gtagacgttcactttaactc

SEQ ID NO: 9121 - DNA, 20 bp, Artificial Sequence
  MKO10009121_A_Cd300lb
  gRNA
aatgtcgctatagctcaaga

SEQ ID NO: 9122 - DNA, 20 bp, Artificial Sequence
  MKO10009122_A_Cd300lb
  gRNA
cgacttctaatcaacttccc

SEQ ID NO: 9123 - DNA, 20 bp, Artificial Sequence
  MKO10009123_A_Cd300ld
  gRNA
agtgcagatattcctcatac

SEQ ID NO: 9124 - DNA, 20 bp, Artificial Sequence
  MKO10009124_A_Cd300ld
  gRNA
ttctctctatcctaggcaac

SEQ ID NO: 9125 - DNA, 20 bp, Artificial Sequence
  MKO10009125_A_Cd300ld
  gRNA
cttgtaacccttccagtatg

SEQ ID NO: 9126 - DNA, 20 bp, Artificial Sequence
  MKO10009126_A_Cd300lf
  gRNA
gtgcagtgccgatatacctc

SEQ ID NO: 9127 - DNA, 20 bp, Artificial Sequence
  MKO10009127_A_Cd300lf
  gRNA
gagtagtagctagtcagcgt

SEQ ID NO: 9128 - DNA, 20 bp, Artificial Sequence
  MKO10009128_A_Cd300lf
  gRNA
tgcccttccaggcatggcgg

SEQ ID NO: 9129 - DNA, 20 bp, Artificial Sequence
  MKO10009129_A_Cd300lg
  gRNA
tcacggtcatcgagagctct

SEQ ID NO: 9130 - DNA, 20 bp, Artificial Sequence
  MKO10009130_A_Cd300lg
  gRNA
ggagctcccgtccagtcgtc

SEQ ID NO: 9131 - DNA, 20 bp, Artificial Sequence
  MKO10009131_A_Cd300lg
  gRNA
gtccctgcggtgtacctacg

SEQ ID NO: 9132 - DNA, 20 bp, Artificial Sequence
  MKO10009132_A_Cd300lh
  gRNA
gctacttacctgggaggaaa

SEQ ID NO: 9133 - DNA, 20 bp, Artificial Sequence
  MKO10009133_A_Cd300lh
  gRNA
cagagctgggaactgccaca

SEQ ID NO: 9134 - DNA, 20 bp, Artificial Sequence
  MKO10009134_A_Cd300lh
  gRNA
gttcacgttaactttaaaca

SEQ ID NO: 9135 - DNA, 20 bp, Artificial Sequence
  MKO10009135_A_Cd302
  gRNA
agcgcgcgtttcttctatag

SEQ ID NO: 9136 - DNA, 20 bp, Artificial Sequence
  MKO10009136_A_Cd302
  gRNA
tatagaagaaacgcgcgctc

SEQ ID NO: 9137 - DNA, 20 bp, Artificial Sequence
  MKO10009137_A_Cd302
  gRNA
caaatatgacattcgacaag

SEQ ID NO: 9138 - DNA, 20 bp, Artificial Sequence
  MKO10009138_A_Cd320
  gRNA
ctcatattgctacgcctccg

SEQ ID NO: 9139 - DNA, 20 bp, Artificial Sequence
  MKO10009139_A_Cd320
  gRNA
ccatcacagcgccacgtgtg

SEQ ID NO: 9140 - DNA, 20 bp, Artificial Sequence
  MKO10009140_A_Cd320
  gRNA
gcgtagcaatatgagaaggg

SEQ ID NO: 9141 - DNA, 20 bp, Artificial Sequence
  MKO10009141_A_Cd33
  gRNA
actgacccctttccggagcc

SEQ ID NO: 9142 - DNA, 20 bp, Artificial Sequence
  MKO10009142_A_Cd33
  gRNA
gcccgagtcagtgacagtcg

SEQ ID NO: 9143 - DNA, 20 bp, Artificial Sequence
  MKO10009143_A_Cd33
  gRNA
gactcctgacattataatcc

SEQ ID NO: 9144 - DNA, 20 bp, Artificial Sequence
  MKO10009144_A_Cd34
  gRNA
cagccactacttgatctatc

SEQ ID NO: 9145 - DNA, 20 bp, Artificial Sequence
  MKO10009145_A_Cd34
  gRNA
gccccgcgcgcgtgtccctg

SEQ ID NO: 9146 - DNA, 20 bp, Artificial Sequence
  MKO10009146_A_Cd34
  gRNA
tccttgtgtagaagtctccg

SEQ ID NO: 9147 - DNA, 20 bp, Artificial Sequence
  MKO10009147_A_Cd36
  gRNA
cagagttcgttatctagcca

SEQ ID NO: 9148 - DNA, 20 bp, Artificial Sequence
  MKO10009148_A_Cd36
  gRNA
tatcctataagtaccacagt

SEQ ID NO: 9149 - DNA, 20 bp, Artificial Sequence
  MKO10009149_A_Cd36
  gRNA
gccataattgagtcctataa

SEQ ID NO: 9150 - DNA, 20 bp, Artificial Sequence
  MKO10009150_A_Cd37
  gRNA
ccagagctaccgcacgaatc

SEQ ID NO: 9151 - DNA, 20 bp, Artificial Sequence
  MKO10009151_A_Cd37
  gRNA
ctgtctcatccggattcgtg

SEQ ID NO: 9152 - DNA, 20 bp, Artificial Sequence
  MKO10009152_A_Cd37
  gRNA
actcacccggacccgctgag

SEQ ID NO: 9153 - DNA, 20 bp, Artificial Sequence
  MKO10009153_A_Cd38
  gRNA
acctggcccatcaatatact

SEQ ID NO: 9154 - DNA, 20 bp, Artificial Sequence
  MKO10009154_A_Cd38
  gRNA
gtggtccaagtgatgctcaa

SEQ ID NO: 9155 - DNA, 20 bp, Artificial Sequence
  MKO10009155_A_Cd38
  gRNA
gggacccattgagcatcact

SEQ ID NO: 9156 - DNA, 20 bp, Artificial Sequence
  MKO10009156_A_Cd3d
  gRNA
gtatcttcacgatctcgaag

SEQ ID NO: 9157 - DNA, 20 bp, Artificial Sequence
  MKO10009157_A_Cd3d
  gRNA
ttgggcgtctactgctttgc

SEQ ID NO: 9158 - DNA, 20 bp, Artificial Sequence
  MKO10009158_A_Cd3d
  gRNA
tccatctagatgcatgacgc

SEQ ID NO: 9159 - DNA, 20 bp, Artificial Sequence
  MKO10009159_A_Cd3eap
  gRNA
atggcaagaagcaccgatac

SEQ ID NO: 9160 - DNA, 20 bp, Artificial Sequence
  MKO10009160_A_Cd3eap
  gRNA
gacgggagggctgccgccaa

SEQ ID NO: 9161 - DNA, 20 bp, Artificial Sequence
  MKO10009161_A_Cd3eap
  gRNA
cattgtggggcgaagtctgc

SEQ ID NO: 9162 - DNA, 20 bp, Artificial Sequence
  MKO10009162_A_Cd3e
  gRNA
ccgagttacctcgagctttc

SEQ ID NO: 9163 - DNA, 20 bp, Artificial Sequence
  MKO10009163_A_Cd3e
  gRNA
cctcgacttccgagaaatcc

SEQ ID NO: 9164 - DNA, 20 bp, Artificial Sequence
  MKO10009164_A_Cd3e
  gRNA
aaggccaagcctgtgacccg

SEQ ID NO: 9165 - DNA, 20 bp, Artificial Sequence
  MKO10009165_A_Cd3g
  gRNA
atccggctttatcttcgctg

SEQ ID NO: 9166 - DNA, 20 bp, Artificial Sequence
  MKO10009166_A_Cd3g
  gRNA
tgtatatctcattgcgggac

SEQ ID NO: 9167 - DNA, 20 bp, Artificial Sequence
  MKO10009167_A_Cd3g
  gRNA
tgactgacaagactatcaag

SEQ ID NO: 9168 - DNA, 20 bp, Artificial Sequence
  MKO10009168_A_Cd40lg
  gRNA
agtcaacgcccattcatcgt

SEQ ID NO: 9169 - DNA, 20 bp, Artificial Sequence
  MKO10009169_A_Cd40lg
  gRNA
agccagaggccgacgatgaa

SEQ ID NO: 9170 - DNA, 20 bp, Artificial Sequence
  MKO10009170_A_Cd40lg
  gRNA
gccaacagtaatgcagcatc

SEQ ID NO: 9171 - DNA, 20 bp, Artificial Sequence
  MKO10009171_A_Cd40
  gRNA
acatgcctcgcaatccttgc

SEQ ID NO: 9172 - DNA, 20 bp, Artificial Sequence
  MKO10009172_A_Cd40
  gRNA
ccccatagcgcgcacagccg

SEQ ID NO: 9173 - DNA, 20 bp, Artificial Sequence
  MKO10009173_A_Cd40
  gRNA
acgtaacacactgccctaga

SEQ ID NO: 9174 - DNA, 20 bp, Artificial Sequence
  MKO10009174_A_Cd44
  gRNA
aatgtaacctgccgctacgc

SEQ ID NO: 9175 - DNA, 20 bp, Artificial Sequence
  MKO10009175_A_Cd44
  gRNA
cgaggatatatactcctgtg

SEQ ID NO: 9176 - DNA, 20 bp, Artificial Sequence
  MKO10009176_A_Cd44
  gRNA
gacctacccaattccttcga

SEQ ID NO: 9177 - DNA, 20 bp, Artificial Sequence
  MKO10009177_A_Cd46
  gRNA
tcgagctaaatttacttgta

SEQ ID NO: 9178 - DNA, 20 bp, Artificial Sequence
  MKO10009178_A_Cd46
  gRNA
ctatctagttattacgtagt

SEQ ID NO: 9179 - DNA, 20 bp, Artificial Sequence
  MKO10009179_A_Cd46
  gRNA
atatggttacctttacactc

SEQ ID NO: 9180 - DNA, 20 bp, Artificial Sequence
  MKO10009180_A_Cd47
  gRNA
cccttgcatcgtccgtaatg

SEQ ID NO: 9181 - DNA, 20 bp, Artificial Sequence
  MKO10009181_A_Cd47
  gRNA
aatggataagcgcgatgcca

SEQ ID NO: 9182 - DNA, 20 bp, Artificial Sequence
  MKO10009182_A_Cd47
  gRNA
atcattctgctgctcgttgc

SEQ ID NO: 9183 - DNA, 20 bp, Artificial Sequence
  MKO10009183_A_Cd48
  gRNA
gaccatataaacgtatcacc

SEQ ID NO: 9184 - DNA, 20 bp, Artificial Sequence
  MKO10009184_A_Cd48
  gRNA
acgcagcactctcatgtagt

SEQ ID NO: 9185 - DNA, 20 bp, Artificial Sequence
  MKO10009185_A_Cd48
  gRNA
ttacctcacacgatagcctc

SEQ ID NO: 9186 - DNA, 20 bp, Artificial Sequence
  MKO10009186_A_Cd4
  gRNA
cagcaaactgaagcgagacc

SEQ ID NO: 9187 - DNA, 20 bp, Artificial Sequence
  MKO10009187_A_Cd4
  gRNA
ctggaactgcaccgtgaccc

SEQ ID NO: 9188 - DNA, 20 bp, Artificial Sequence
  MKO10009188_A_Cd4
  gRNA
gaccttagagttgctatcca

SEQ ID NO: 9189 - DNA, 20 bp, Artificial Sequence
  MKO10009189_A_Cd52
  gRNA
gcaggcacccgcatcgatga

SEQ ID NO: 9190 - DNA, 20 bp, Artificial Sequence
  MKO10009190_A_Cd52
  gRNA
caagccactacggccgcttc

SEQ ID NO: 9191 - DNA, 20 bp, Artificial Sequence
  MKO10009191_A_Cd52
  gRNA
caaccagaagaatgatagtg

SEQ ID NO: 9192 - DNA, 20 bp, Artificial Sequence
  MKO10009192_A_Cd53
  gRNA
gttacggaagagtactccat

SEQ ID NO: 9193 - DNA, 20 bp, Artificial Sequence
  MKO10009193_A_Cd53
  gRNA
gccacagctcaacactttag

SEQ ID NO: 9194 - DNA, 20 bp, Artificial Sequence
  MKO10009194_A_Cd53
  gRNA
aatgactcaccgacataagc

SEQ ID NO: 9195 - DNA, 20 bp, Artificial Sequence
  MKO10009195_A_Cd55
  gRNA
cgaaaacaacctccactccc

SEQ ID NO: 9196 - DNA, 20 bp, Artificial Sequence
  MKO10009196_A_Cd55
  gRNA
tctactttctgttctgtcac

SEQ ID NO: 9197 - DNA, 20 bp, Artificial Sequence
  MKO10009197_A_Cd55
  gRNA
ggagacatacctgtgcacac

SEQ ID NO: 9198 - DNA, 20 bp, Artificial Sequence
  MKO10009198_A_Cd59a
  gRNA
atgctaccactgtttccaac

SEQ ID NO: 9199 - DNA, 20 bp, Artificial Sequence
  MKO10009199_A_Cd59a
  gRNA
cttggggaagacaccattgc

SEQ ID NO: 9200 - DNA, 20 bp, Artificial Sequence
  MKO10009200_A_Cd59a
  gRNA
ggaaacagtggtagcatgtg

SEQ ID NO: 9201 - DNA, 20 bp, Artificial Sequence
  MKO10009201_A_Cd59b
  gRNA
tattatgagccgattagacg

SEQ ID NO: 9202 - DNA, 20 bp, Artificial Sequence
  MKO10009202_A_Cd59b
  gRNA
gtatgcctgccacgtctaat

SEQ ID NO: 9203 - DNA, 20 bp, Artificial Sequence
  MKO10009203_A_Cd59b
  gRNA
cactacttgctctcctaacc

SEQ ID NO: 9204 - DNA, 20 bp, Artificial Sequence
  MKO10009204_A_Cd5l
  gRNA
tctactagacgcacatcctc

SEQ ID NO: 9205 - DNA, 20 bp, Artificial Sequence
  MKO10009205_A_Cd5l
  gRNA
gaacaactgtacccatggcg

SEQ ID NO: 9206 - DNA, 20 bp, Artificial Sequence
  MKO10009206_A_Cd5l
  gRNA
gcagtcatccaaaccccgcg

SEQ ID NO: 9207 - DNA, 20 bp, Artificial Sequence
  MKO10009207_A_Cd5
  gRNA
ggcctcccatcgaattggca

SEQ ID NO: 9208 - DNA, 20 bp, Artificial Sequence
  MKO10009208_A_Cd5
  gRNA
gatatccaggtgatgctaag

SEQ ID NO: 9209 - DNA, 20 bp, Artificial Sequence
  MKO10009209_A_Cd5
  gRNA
atatagaccacggagatcct

SEQ ID NO: 9210 - DNA, 20 bp, Artificial Sequence
  MKO10009210_A_Cd63
  gRNA
ccctacctgggtatggatag

SEQ ID NO: 9211 - DNA, 20 bp, Artificial Sequence
  MKO10009211_A_Cd63
  gRNA
aaacatccccggcatggcca

SEQ ID NO: 9212 - DNA, 20 bp, Artificial Sequence
  MKO10009212_A_Cd63
  gRNA
attacccatgagactactgc

SEQ ID NO: 9213 - DNA, 20 bp, Artificial Sequence
  MKO10009213_A_Cd68
  gRNA
ggcccgaagtgtcccttgtc

SEQ ID NO: 9214 - DNA, 20 bp, Artificial Sequence
  MKO10009214_A_Cd68
  gRNA
gggtaccgtcacaacctccc

SEQ ID NO: 9215 - DNA, 20 bp, Artificial Sequence
  MKO10009215_A_Cd68
  gRNA
gggctcttgggaactacacg

SEQ ID NO: 9216 - DNA, 20 bp, Artificial Sequence
  MKO10009216_A_Cd69
  gRNA
acgtttctgaagcgatattc

SEQ ID NO: 9217 - DNA, 20 bp, Artificial Sequence
  MKO10009217_A_Cd69
  gRNA
gtgggcaagtacaattgccc

SEQ ID NO: 9218 - DNA, 20 bp, Artificial Sequence
  MKO10009218_A_Cd69
  gRNA
ccacaaaaatgttaccgctg

SEQ ID NO: 9219 - DNA, 20 bp, Artificial Sequence
  MKO10009219_A_Cd6
  gRNA
gtaccgtgtgcgacgacacg

SEQ ID NO: 9220 - DNA, 20 bp, Artificial Sequence
  MKO10009220_A_Cd6
  gRNA
gccgtcccgggcagtcccac

SEQ ID NO: 9221 - DNA, 20 bp, Artificial Sequence
  MKO10009221_A_Cd6
  gRNA
ccgcgcccacgtcgtattcc

SEQ ID NO: 9222 - DNA, 20 bp, Artificial Sequence
  MKO10009222_A_Cd70
  gRNA
ggaccgcgttccagcgccaa

SEQ ID NO: 9223 - DNA, 20 bp, Artificial Sequence
  MKO10009223_A_Cd70
  gRNA
gcgttgcgggacggcagcag

SEQ ID NO: 9224 - DNA, 20 bp, Artificial Sequence
  MKO10009224_A_Cd70
  gRNA
caagctgatgccgtgcgcag

SEQ ID NO: 9225 - DNA, 20 bp, Artificial Sequence
  MKO10009225_A_Cd72
  gRNA
aatccatccgcatggacagc

SEQ ID NO: 9226 - DNA, 20 bp, Artificial Sequence
  MKO10009226_A_Cd72
  gRNA
cccgcgtgcttgtcaacctc

SEQ ID NO: 9227 - DNA, 20 bp, Artificial Sequence
  MKO10009227_A_Cd72
  gRNA
ttcatcgaatgctgccagtt

SEQ ID NO: 9228 - DNA, 20 bp, Artificial Sequence
  MKO10009228_A_Cd74
  gRNA
gctgatgcgtccaatgtcca

SEQ ID NO: 9229 - DNA, 20 bp, Artificial Sequence
  MKO10009229_A_Cd74
  gRNA
atttcggaagcttcatgcga

SEQ ID NO: 9230 - DNA, 20 bp, Artificial Sequence
  MKO10009230_A_Cd74
  gRNA
gaggtcgcgttggtcatcca

SEQ ID NO: 9231 - DNA, 20 bp, Artificial Sequence
  MKO10009231_A_Cd79a
  gRNA
gtggacccccttctacccgc

SEQ ID NO: 9232 - DNA, 20 bp, Artificial Sequence
  MKO10009232_A_Cd79a
  gRNA
aacatattaaaacgctcctg

SEQ ID NO: 9233 - DNA, 20 bp, Artificial Sequence
  MKO10009233_A_Cd79a
  gRNA
tgatgactgttctatgtatg

SEQ ID NO: 9234 - DNA, 20 bp, Artificial Sequence
  MKO10009234_A_Cd79b
  gRNA
gtgtgttccgccgcttcagt

SEQ ID NO: 9235 - DNA, 20 bp, Artificial Sequence
  MKO10009235_A_Cd79b
  gRNA
agataccattatcctcgtac

SEQ ID NO: 9236 - DNA, 20 bp, Artificial Sequence
  MKO10009236_A_Cd79b
  gRNA
ctgacctggttccgaaagcg

SEQ ID NO: 9237 - DNA, 20 bp, Artificial Sequence
  MKO10009237_A_Cd7
  gRNA
caatcgtgagtcggggggac

SEQ ID NO: 9238 - DNA, 20 bp, Artificial Sequence
  MKO10009238_A_Cd7
  gRNA
ccgactcacgattgcctctg

SEQ ID NO: 9239 - DNA, 20 bp, Artificial Sequence
  MKO10009239_A_Cd7
  gRNA
tttgggcgtcatgactcagc

SEQ ID NO: 9240 - DNA, 20 bp, Artificial Sequence
  MKO10009240_A_Cd80
  gRNA
gagtcgtattgaaatctagt

SEQ ID NO: 9241 - DNA, 20 bp, Artificial Sequence
  MKO10009241_A_Cd80
  gRNA
agtctgaagaccgaatctac

SEQ ID NO: 9242 - DNA, 20 bp, Artificial Sequence
  MKO10009242_A_Cd80
  gRNA
catcaatacgacaatttccc

SEQ ID NO: 9243 - DNA, 20 bp, Artificial Sequence
  MKO10009243_A_Cd81
  gRNA
ttggtactcacccacgtaga

SEQ ID NO: 9244 - DNA, 20 bp, Artificial Sequence
  MKO10009244_A_Cd81
  gRNA
ggcacccaacaccttctacg

SEQ ID NO: 9245 - DNA, 20 bp, Artificial Sequence
  MKO10009245_A_Cd81
  gRNA
gggcttcgtaaacaaagacc

SEQ ID NO: 9246 - DNA, 20 bp, Artificial Sequence
  MKO10009246_A_Cd82
  gRNA
ctacggtcacctgtgcgatg

SEQ ID NO: 9247 - DNA, 20 bp, Artificial Sequence
  MKO10009247_A_Cd82
  gRNA
caatgccaccagtagccgcg

SEQ ID NO: 9248 - DNA, 20 bp, Artificial Sequence
  MKO10009248_A_Cd82
  gRNA
tctgctgatcctcatcgcac

SEQ ID NO: 9249 - DNA, 20 bp, Artificial Sequence
  MKO10009249_A_Cd83
  gRNA
agaaaagcttgttccgtacc

SEQ ID NO: 9250 - DNA, 20 bp, Artificial Sequence
  MKO10009250_A_Cd83
  gRNA
acccgcgatggcgatgcggg

SEQ ID NO: 9251 - DNA, 20 bp, Artificial Sequence
  MKO10009251_A_Cd83
  gRNA
cacctcccgcatcgccatcg

SEQ ID NO: 9252 - DNA, 20 bp, Artificial Sequence
  MKO10009252_A_Cd84
  gRNA
accagatccacagatggcgc

SEQ ID NO: 9253 - DNA, 20 bp, Artificial Sequence
  MKO10009253_A_Cd84
  gRNA
gcttattctcattccgatgt

SEQ ID NO: 9254 - DNA, 20 bp, Artificial Sequence
  MKO10009254_A_Cd84
  gRNA
gcatgtcagtgtgatattac

SEQ ID NO: 9255 - DNA, 20 bp, Artificial Sequence
  MKO10009255_A_Cd86
  gRNA
gtgaccttgcttagacgtgc

SEQ ID NO: 9256 - DNA, 20 bp, Artificial Sequence
  MKO10009256_A_Cd86
  gRNA
ttgacctgcacgtctaagca

SEQ ID NO: 9257 - DNA, 20 bp, Artificial Sequence
  MKO10009257_A_Cd86
  gRNA
ttccatctcctcaaacgtat

SEQ ID NO: 9258 - DNA, 20 bp, Artificial Sequence
  MKO10009258_A_Cd8a
  gRNA
cgtcccacgttatcttgttg

SEQ ID NO: 9259 - DNA, 20 bp, Artificial Sequence
  MKO10009259_A_Cd8a
  gRNA
gcccaccttcgttgtctata

SEQ ID NO: 9260 - DNA, 20 bp, Artificial Sequence
  MKO10009260_A_Cd8a
  gRNA
acccttggccggaatctgcg

SEQ ID NO: 9261 - DNA, 20 bp, Artificial Sequence
  MKO10009261_A_Cd8b1
  gRNA
tgacttctacttctgcgcga

SEQ ID NO: 9262 - DNA, 20 bp, Artificial Sequence
  MKO10009262_A_Cd8b1
  gRNA
tcagaccccttcgtccctgc

SEQ ID NO: 9263 - DNA, 20 bp, Artificial Sequence
  MKO10009263_A_Cd8b1
  gRNA
ttcttggttggggcagttgt

SEQ ID NO: 9264 - DNA, 20 bp, Artificial Sequence
  MKO10009264_A_Cd93
  gRNA
ccggcctggatttcgactgc

SEQ ID NO: 9265 - DNA, 20 bp, Artificial Sequence
  MKO10009265_A_Cd93
  gRNA
tagatgagtgttcggacgca

SEQ ID NO: 9266 - DNA, 20 bp, Artificial Sequence
  MKO10009266_A_Cd93
  gRNA
agtcttcagcagtctgtccc

SEQ ID NO: 9267 - DNA, 20 bp, Artificial Sequence
  MKO10009267_A_Cd96
  gRNA
agaatgtcctgccatcgtct

SEQ ID NO: 9268 - DNA, 20 bp, Artificial Sequence
  MKO10009268_A_Cd96
  gRNA
gatgacgtgtatgctctacc

SEQ ID NO: 9269 - DNA, 20 bp, Artificial Sequence
  MKO10009269_A_Cd96
  gRNA
ctgagaagggtgtaacaaat

SEQ ID NO: 9270 - DNA, 20 bp, Artificial Sequence
  MKO10009270_A_Cd97
  gRNA
atcaacgagtgtttactacc

SEQ ID NO: 9271 - DNA, 20 bp, Artificial Sequence
  MKO10009271_A_Cd97
  gRNA
atatcccaggttacagacgc

SEQ ID NO: 9272 - DNA, 20 bp, Artificial Sequence
  MKO10009272_A_Cd97
  gRNA
ttccttctccgagctgaagc

SEQ ID NO: 9273 - DNA, 20 bp, Artificial Sequence
  MKO10009273_A_Cd99l2
  gRNA
gcttgactcacgctttactg

SEQ ID NO: 9274 - DNA, 20 bp, Artificial Sequence
  MKO10009274_A_Cd99l2
  gRNA
gatgatcgaaatgatctaga

SEQ ID NO: 9275 - DNA, 20 bp, Artificial Sequence
  MKO10009275_A_Cd99l2
  gRNA
tggccttctagttgtagtag

SEQ ID NO: 9276 - DNA, 20 bp, Artificial Sequence
  MKO10009276_A_Cd9
  gRNA
ttgagatagccgccgccgtc

SEQ ID NO: 9277 - DNA, 20 bp, Artificial Sequence
  MKO10009277_A_Cd9
  gRNA
gtgacctaccgccatatgga

SEQ ID NO: 9278 - DNA, 20 bp, Artificial Sequence
  MKO10009278_A_Cd9
  gRNA
gacggcggcggctatctcaa

SEQ ID NO: 9279 - DNA, 20 bp, Artificial Sequence
  MKO10009279_A_Cdadc1
  gRNA
gaggtcagtcggcacgcaga

SEQ ID NO: 9280 - DNA, 20 bp, Artificial Sequence
  MKO10009280_A_Cdadc1
  gRNA
ctgcgtgccgactgacctct

SEQ ID NO: 9281 - DNA, 20 bp, Artificial Sequence
  MKO10009281_A_Cdadc1
  gRNA
tccagtgaagacttacatac

SEQ ID NO: 9282 - DNA, 20 bp, Artificial Sequence
  MKO10009282_A_Cdan1
  gRNA
tggcccgccgtgcgggccgc

SEQ ID NO: 9283 - DNA, 20 bp, Artificial Sequence
  MKO10009283_A_Cdan1
  gRNA
agccccgaccgcctcgttcg

SEQ ID NO: 9284 - DNA, 20 bp, Artificial Sequence
  MKO10009284_A_Cdan1
  gRNA
gaaccggagaccccgattct

SEQ ID NO: 9285 - DNA, 20 bp, Artificial Sequence
  MKO10009285_A_Cda
  gRNA
attcgtagtcaggacggtcc

SEQ ID NO: 9286 - DNA, 20 bp, Artificial Sequence
  MKO10009286_A_Cda
  gRNA
cgagcggactgccatccaga

SEQ ID NO: 9287 - DNA, 20 bp, Artificial Sequence
  MKO10009287_A_Cda
  gRNA
tcttccagtttggcaccgac

SEQ ID NO: 9288 - DNA, 20 bp, Artificial Sequence
  MKO10009288_A_Cdc123
  gRNA
ccaagaagctatcaattcgc

SEQ ID NO: 9289 - DNA, 20 bp, Artificial Sequence
  MKO10009289_A_Cdc123
  gRNA
ggggcactccagttaagctt

SEQ ID NO: 9290 - DNA, 20 bp, Artificial Sequence
  MKO10009290_A_Cdc123
  gRNA
cttcgttaccactgtctgac

SEQ ID NO: 9291 - DNA, 20 bp, Artificial Sequence
  MKO10009291_A_Cdc14a
  gRNA
ccactatttctccatcgacg

SEQ ID NO: 9292 - DNA, 20 bp, Artificial Sequence
  MKO10009292_A_Cdc14a
  gRNA
actacacctctttcgaccag

SEQ ID NO: 9293 - DNA, 20 bp, Artificial Sequence
  MKO10009293_A_Cdc14a
  gRNA
atagaccagctcctcgtcga

SEQ ID NO: 9294 - DNA, 20 bp, Artificial Sequence
  MKO10009294_A_Cdc14b
  gRNA
aatgttctatacgcgtcttc

SEQ ID NO: 9295 - DNA, 20 bp, Artificial Sequence
  MKO10009295_A_Cdc14b
  gRNA
gcgaatgccgccttccttgt

SEQ ID NO: 9296 - DNA, 20 bp, Artificial Sequence
  MKO10009296_A_Cdc14b
  gRNA
taaagcttctatgcggattt

SEQ ID NO: 9297 - DNA, 20 bp, Artificial Sequence
  MKO10009297_A_Cdc16
  gRNA
ctcggtggtactgcgctgtg

SEQ ID NO: 9298 - DNA, 20 bp, Artificial Sequence
  MKO10009298_A_Cdc16
  gRNA
ctttgtccagcttgcgtgac

SEQ ID NO: 9299 - DNA, 20 bp, Artificial Sequence
  MKO10009299_A_Cdc16
  gRNA
ttacgtggcatctagctgca

SEQ ID NO: 9300 - DNA, 20 bp, Artificial Sequence
  MKO10009300_A_Cdc20b
  gRNA
tcgctgctgcttcatgccgt

SEQ ID NO: 9301 - DNA, 20 bp, Artificial Sequence
  MKO10009301_A_Cdc20b
  gRNA
actgagctcacgtagagtta

SEQ ID NO: 9302 - DNA, 20 bp, Artificial Sequence
  MKO10009302_A_Cdc20b
  gRNA
tcaagagcaacttcgtgaag

SEQ ID NO: 9303 - DNA, 20 bp, Artificial Sequence
  MKO10009303_A_Cdc20
  gRNA
cagacctgaatcttgtagat

SEQ ID NO: 9304 - DNA, 20 bp, Artificial Sequence
  MKO10009304_A_Cdc20
  gRNA
ggggcatcaaggatcctgtc

SEQ ID NO: 9305 - DNA, 20 bp, Artificial Sequence
  MKO10009305_A_Cdc20
  gRNA
tgcactcacagtagtcattc

SEQ ID NO: 9306 - DNA, 20 bp, Artificial Sequence
  MKO10009306_A_Cdc23
  gRNA
ttccttgtaggaggacgcgc

SEQ ID NO: 9307 - DNA, 20 bp, Artificial Sequence
  MKO10009307_A_Cdc23
  gRNA
tcttgctattgcagccgtga

SEQ ID NO: 9308 - DNA, 20 bp, Artificial Sequence
  MKO10009308_A_Cdc23
  gRNA
ggcggctgcagctccgacaa

SEQ ID NO: 9309 - DNA, 20 bp, Artificial Sequence
  MKO10009309_A_Cdc25a
  gRNA
tcctcagaatcgaccgattc

SEQ ID NO: 9310 - DNA, 20 bp, Artificial Sequence
  MKO10009310_A_Cdc25a
  gRNA
acctgaatcggtcgattctg

SEQ ID NO: 9311 - DNA, 20 bp, Artificial Sequence
  MKO10009311_A_Cdc25a
  gRNA
gtagggaatttattctcgtc

SEQ ID NO: 9312 - DNA, 20 bp, Artificial Sequence
  MKO10009312_A_Cdc25b
  gRNA
cagaccatgcacaacctcgc

SEQ ID NO: 9313 - DNA, 20 bp, Artificial Sequence
  MKO10009313_A_Cdc25b
  gRNA
cacgtgcgctctgccatctg

SEQ ID NO: 9314 - DNA, 20 bp, Artificial Sequence
  MKO10009314_A_Cdc25b
  gRNA
tctcagtcctgcccgcgtgc

SEQ ID NO: 9315 - DNA, 20 bp, Artificial Sequence
  MKO10009315_A_Cdc25c
  gRNA
ttactgggatacctttcata

SEQ ID NO: 9316 - DNA, 20 bp, Artificial Sequence
  MKO10009316_A_Cdc25c
  gRNA
ccagttaactgtctatccag

SEQ ID NO: 9317 - DNA, 20 bp, Artificial Sequence
  MKO10009317_A_Cdc25c
  gRNA
cctctggatagacagttaac

SEQ ID NO: 9318 - DNA, 20 bp, Artificial Sequence
  MKO10009318_A_Cdc26
  gRNA
cgtcgagcttgagctctaag

SEQ ID NO: 9319 - DNA, 20 bp, Artificial Sequence
  MKO10009319_A_Cdc26
  gRNA
gtgacttcactatgctgcga

SEQ ID NO: 9320 - DNA, 20 bp, Artificial Sequence
  MKO10009320_A_Cdc26
  gRNA
ctaggcccgtaagaagcaga

SEQ ID NO: 9321 - DNA, 20 bp, Artificial Sequence
  MKO10009321_A_Cdc27
  gRNA
ctgcatatagtcgttctgcg

SEQ ID NO: 9322 - DNA, 20 bp, Artificial Sequence
  MKO10009322_A_Cdc27
  gRNA
ctgcatctcggtaagcatag

SEQ ID NO: 9323 - DNA, 20 bp, Artificial Sequence
  MKO10009323_A_Cdc27
  gRNA
gacgaccttgtcactgagtt

SEQ ID NO: 9324 - DNA, 20 bp, Artificial Sequence
  MKO10009324_A_Cdc34
  gRNA
tccgagccctcgtcgggcgc

SEQ ID NO: 9325 - DNA, 20 bp, Artificial Sequence
  MKO10009325_A_Cdc34
  gRNA
catagtagtcgtcgtagaag

SEQ ID NO: 9326 - DNA, 20 bp, Artificial Sequence
  MKO10009326_A_Cdc34
  gRNA
gtccacgttggcaggcgaga

SEQ ID NO: 9327 - DNA, 20 bp, Artificial Sequence
  MKO10009327_A_Cdc37l1
  gRNA
ttacaggtatgttgagtcgc

SEQ ID NO: 9328 - DNA, 20 bp, Artificial Sequence
  MKO10009328_A_Cdc37l1
  gRNA
tagcagtctcttcacatacg

SEQ ID NO: 9329 - DNA, 20 bp, Artificial Sequence
  MKO10009329_A_Cdc37l1
  gRNA
tttggcgtgttcctgatcca

SEQ ID NO: 9330 - DNA, 20 bp, Artificial Sequence
  MKO10009330_A_Cdc37
  gRNA
cgttgtccgacaggtatttc

SEQ ID NO: 9331 - DNA, 20 bp, Artificial Sequence
  MKO10009331_A_Cdc37
  gRNA
gcaggcccgggtggaacgca

SEQ ID NO: 9332 - DNA, 20 bp, Artificial Sequence
  MKO10009332_A_Cdc37
  gRNA
cggccaactacctggttatc

SEQ ID NO: 9333 - DNA, 20 bp, Artificial Sequence
  MKO10009333_A_Cdc40
  gRNA
acctgatgattatctaacga

SEQ ID NO: 9334 - DNA, 20 bp, Artificial Sequence
  MKO10009334_A_Cdc40
  gRNA
cccttcgttagataatcatc

SEQ ID NO: 9335 - DNA, 20 bp, Artificial Sequence
  MKO10009335_A_Cdc40
  gRNA
tgagaccatgttcgctcctg

SEQ ID NO: 9336 - DNA, 20 bp, Artificial Sequence
  MKO10009336_A_Cdc42bpa
  gRNA
cagcgtgctttcgtgaagag

SEQ ID NO: 9337 - DNA, 20 bp, Artificial Sequence
  MKO10009337_A_Cdc42bpa
  gRNA
caacataataatccataacc

SEQ ID NO: 9338 - DNA, 20 bp, Artificial Sequence
  MKO10009338_A_Cdc42bpa
  gRNA
gtgttcacagtacctggtta

SEQ ID NO: 9339 - DNA, 20 bp, Artificial Sequence
  MKO10009339_A_Cdc42bpb
  gRNA
tcgagaagagcgtgacgtgc

SEQ ID NO: 9340 - DNA, 20 bp, Artificial Sequence
  MKO10009340_A_Cdc42bpb
  gRNA
cggcgactgccagtggatca

SEQ ID NO: 9341 - DNA, 20 bp, Artificial Sequence
  MKO10009341_A_Cdc42bpb
  gRNA
gacatggcgaggttctacat

SEQ ID NO: 9342 - DNA, 20 bp, Artificial Sequence
  MKO10009342_A_Cdc42bpg
  gRNA
cccctcaggttgccgtggtg

SEQ ID NO: 9343 - DNA, 20 bp, Artificial Sequence
  MKO10009343_A_Cdc42bpg
  gRNA
tgctctgcactacgccttcc

SEQ ID NO: 9344 - DNA, 20 bp, Artificial Sequence
  MKO10009344_A_Cdc42bpg
  gRNA
ctagaacatctcgctcctcc

SEQ ID NO: 9345 - DNA, 20 bp, Artificial Sequence
  MKO10009345_A_Cdc42ep1
  gRNA
catctcacgcctgccacgcg

SEQ ID NO: 9346 - DNA, 20 bp, Artificial Sequence
  MKO10009346_A_Cdc42ep1
  gRNA
ctccaacaggttcgcagagt

SEQ ID NO: 9347 - DNA, 20 bp, Artificial Sequence
  MKO10009347_A_Cdc42ep1
  gRNA
gccggggaagccatccttcg

SEQ ID NO: 9348 - DNA, 20 bp, Artificial Sequence
  MKO10009348_A_Cdc42ep2
  gRNA
actcgcactacaaccgtgtg

SEQ ID NO: 9349 - DNA, 20 bp, Artificial Sequence
  MKO10009349_A_Cdc42ep2
  gRNA
gcctgggggccaccaattac

SEQ ID NO: 9350 - DNA, 20 bp, Artificial Sequence
  MKO10009350_A_Cdc42ep2
  gRNA
gattcaaggtgcaagcgagg

SEQ ID NO: 9351 - DNA, 20 bp, Artificial Sequence
  MKO10009351_A_Cdc42ep3
  gRNA
cggggcataacgacttcttc

SEQ ID NO: 9352 - DNA, 20 bp, Artificial Sequence
  MKO10009352_A_Cdc42ep3
  gRNA
tagtgtgacgaaagtccccc

SEQ ID NO: 9353 - DNA, 20 bp, Artificial Sequence
  MKO10009353_A_Cdc42ep3
  gRNA
cggaagaagtcgttatgccc

SEQ ID NO: 9354 - DNA, 20 bp, Artificial Sequence
  MKO10009354_A_Cdc42ep4
  gRNA
agctggcgggtaccgtgaca

SEQ ID NO: 9355 - DNA, 20 bp, Artificial Sequence
  MKO10009355_A_Cdc42ep4
  gRNA
tgacccactccttgacgagc

SEQ ID NO: 9356 - DNA, 20 bp, Artificial Sequence
  MKO10009356_A_Cdc42ep4
  gRNA
cgttcacagtccgtgaccag

SEQ ID NO: 9357 - DNA, 20 bp, Artificial Sequence
  MKO10009357_A_Cdc42ep5
  gRNA
gaccgatgacgtcgtccagc

SEQ ID NO: 9358 - DNA, 20 bp, Artificial Sequence
  MKO10009358_A_Cdc42ep5
  gRNA
taacaccgcgtccagcatag

SEQ ID NO: 9359 - DNA, 20 bp, Artificial Sequence
  MKO10009359_A_Cdc42ep5
  gRNA
tccgcgatccagccgcttct

SEQ ID NO: 9360 - DNA, 20 bp, Artificial Sequence
  MKO10009360_A_Cdc42se1
  gRNA
gaaaccaccgtgacagaccg

SEQ ID NO: 9361 - DNA, 20 bp, Artificial Sequence
  MKO10009361_A_Cdc42se1
  gRNA
ttggctccccaatcatagtg

SEQ ID NO: 9362 - DNA, 20 bp, Artificial Sequence
  MKO10009362_A_Cdc42se1
  gRNA
cgtggtcgagaagccccagc

SEQ ID NO: 9363 - DNA, 20 bp, Artificial Sequence
  MKO10009363_A_Cdc42se2
  gRNA
cacgagctgcatctgcacgt

SEQ ID NO: 9364 - DNA, 20 bp, Artificial Sequence
  MKO10009364_A_Cdc42se2
  gRNA
ttggctctccgatcatactt

SEQ ID NO: 9365 - DNA, 20 bp, Artificial Sequence
  MKO10009365_A_Cdc42se2
  gRNA
caacgtgcagatgcagctcg

SEQ ID NO: 9366 - DNA, 20 bp, Artificial Sequence
  MKO10009366_A_Cdc42
  gRNA
acagttggtacatattccga

SEQ ID NO: 9367 - DNA, 20 bp, Artificial Sequence
  MKO10009367_A_Cdc42
  gRNA
caagtttctcaatagtagag

SEQ ID NO: 9368 - DNA, 20 bp, Artificial Sequence
  MKO10009368_A_Cdc42
  gRNA
acaattaagtgtgttgttgt

SEQ ID NO: 9369 - DNA, 20 bp, Artificial Sequence
  MKO10009369_A_Cdc45
  gRNA
gttcgtgaccgatttccgca

SEQ ID NO: 9370 - DNA, 20 bp, Artificial Sequence
  MKO10009370_A_Cdc45
  gRNA
ctacgagacggtccacaacc

SEQ ID NO: 9371 - DNA, 20 bp, Artificial Sequence
  MKO10009371_A_Cdc45
  gRNA
tgaccacgtccagtatacgc

SEQ ID NO: 9372 - DNA, 20 bp, Artificial Sequence
  MKO10009372_A_Cdc5l
  gRNA
ctttaataggtacgaatggc

SEQ ID NO: 9373 - DNA, 20 bp, Artificial Sequence
  MKO10009373_A_Cdc5l
  gRNA
caagggacaaaactgcccaa

SEQ ID NO: 9374 - DNA, 20 bp, Artificial Sequence
  MKO10009374_A_Cdc5l
  gRNA
actcatagtgttccaagcac

SEQ ID NO: 9375 - DNA, 20 bp, Artificial Sequence
  MKO10009375_A_Cdc6
  gRNA
tctcagtccccgaaaacgtc

SEQ ID NO: 9376 - DNA, 20 bp, Artificial Sequence
  MKO10009376_A_Cdc6
  gRNA
tgtacccaccactccgtgtg

SEQ ID NO: 9377 - DNA, 20 bp, Artificial Sequence
  MKO10009377_A_Cdc6
  gRNA
gagcggaggaggaacgtatc

SEQ ID NO: 9378 - DNA, 20 bp, Artificial Sequence
  MKO10009378_A_Cdc73
  gRNA
cccgaccgaaaagatctact

SEQ ID NO: 9379 - DNA, 20 bp, Artificial Sequence
  MKO10009379_A_Cdc73
  gRNA
agttctattacctcaatccg

SEQ ID NO: 9380 - DNA, 20 bp, Artificial Sequence
  MKO10009380_A_Cdc73
  gRNA
ttctacttacagctgcacgc

SEQ ID NO: 9381 - DNA, 20 bp, Artificial Sequence
  MKO10009381_A_Cdc7
  gRNA
acatatattcccgaacttct

SEQ ID NO: 9382 - DNA, 20 bp, Artificial Sequence
  MKO10009382_A_Cdc7
  gRNA
tagggggcaagacaatgtca

SEQ ID NO: 9383 - DNA, 20 bp, Artificial Sequence
  MKO10009383_A_Cdc7
  gRNA
ttcccacaagtcatcctatg

SEQ ID NO: 9384 - DNA, 20 bp, Artificial Sequence
  MKO10009384_A_Cdca2
  gRNA
cttgctgacgaagcgtgtgc

SEQ ID NO: 9385 - DNA, 20 bp, Artificial Sequence
  MKO10009385_A_Cdca2
  gRNA
ggcacgagagccccacttcg

SEQ ID NO: 9386 - DNA, 20 bp, Artificial Sequence
  MKO10009386_A_Cdca2
  gRNA
cagcacacgcttcgtcagca

SEQ ID NO: 9387 - DNA, 20 bp, Artificial Sequence
  MKO10009387_A_Cdca3
  gRNA
tgggaccttgacactacgac

SEQ ID NO: 9388 - DNA, 20 bp, Artificial Sequence
  MKO10009388_A_Cdca3
  gRNA
tgccctcagtgagaacgtta

SEQ ID NO: 9389 - DNA, 20 bp, Artificial Sequence
  MKO10009389_A_Cdca3
  gRNA
tcccaaacaggtgtttacca

SEQ ID NO: 9390 - DNA, 20 bp, Artificial Sequence
  MKO10009390_A_Cdca4
  gRNA
ctcccctcactgtacgacac

SEQ ID NO: 9391 - DNA, 20 bp, Artificial Sequence
  MKO10009391_A_Cdca4
  gRNA
ccctggtgctgagccaacga

SEQ ID NO: 9392 - DNA, 20 bp, Artificial Sequence
  MKO10009392_A_Cdca4
  gRNA
gtggacaccaggcgttcaac

SEQ ID NO: 9393 - DNA, 20 bp, Artificial Sequence
  MKO10009393_A_Cdca5
  gRNA
taggacttcttcgaaccgtg

SEQ ID NO: 9394 - DNA, 20 bp, Artificial Sequence
  MKO10009394_A_Cdca5
  gRNA
tacgatcttcttcaagacga

SEQ ID NO: 9395 - DNA, 20 bp, Artificial Sequence
  MKO10009395_A_Cdca5
  gRNA
cgaactcgttctctgaaatc

SEQ ID NO: 9396 - DNA, 20 bp, Artificial Sequence
  MKO10009396_A_Cdca7l
  gRNA
tagtttggactcacgggagt

SEQ ID NO: 9397 - DNA, 20 bp, Artificial Sequence
  MKO10009397_A_Cdca7l
  gRNA
cacaaactcttcatcgtcac

SEQ ID NO: 9398 - DNA, 20 bp, Artificial Sequence
  MKO10009398_A_Cdca7l
  gRNA
aagtgtgagctatctttatc

SEQ ID NO: 9399 - DNA, 20 bp, Artificial Sequence
  MKO10009399_A_Cdca7
  gRNA
actagagactgcagttgaac

SEQ ID NO: 9400 - DNA, 20 bp, Artificial Sequence
  MKO10009400_A_Cdca7
  gRNA
cctgggaatgtgcgtcgtct

SEQ ID NO: 9401 - DNA, 20 bp, Artificial Sequence
  MKO10009401_A_Cdca7
  gRNA
cacgttcatgtagctgtcca

SEQ ID NO: 9402 - DNA, 20 bp, Artificial Sequence
  MKO10009402_A_Cdca8
  gRNA
tctgtcggactcaatttgct

SEQ ID NO: 9403 - DNA, 20 bp, Artificial Sequence
  MKO10009403_A_Cdca8
  gRNA
tatagagcgaaaggtaatcg

SEQ ID NO: 9404 - DNA, 20 bp, Artificial Sequence
  MKO10009404_A_Cdca8
  gRNA
tgtacaacatcgagatcctt

SEQ ID NO: 9405 - DNA, 20 bp, Artificial Sequence
  MKO10009405_A_Cdcp1
  gRNA
agttcgcaacccctcgactg

SEQ ID NO: 9406 - DNA, 20 bp, Artificial Sequence
  MKO10009406_A_Cdcp1
  gRNA
tccaatctgcctcagtcgag

SEQ ID NO: 9407 - DNA, 20 bp, Artificial Sequence
  MKO10009407_A_Cdcp1
  gRNA
gcgatgacttgacacgcctg

SEQ ID NO: 9408 - DNA, 20 bp, Artificial Sequence
  MKO10009408_A_Cdcp2
  gRNA
tgtcacctcgagtcgcaacc

SEQ ID NO: 9409 - DNA, 20 bp, Artificial Sequence
  MKO10009409_A_Cdcp2
  gRNA
gacgacagacatgacgtgcc

SEQ ID NO: 9410 - DNA, 20 bp, Artificial Sequence
  MKO10009410_A_Cdcp2
  gRNA
caggacctggttgcgactcg

SEQ ID NO: 9411 - DNA, 20 bp, Artificial Sequence
  MKO10009411_A_Cdh10
  gRNA
gtggattaccgcattattga

SEQ ID NO: 9412 - DNA, 20 bp, Artificial Sequence
  MKO10009412_A_Cdh10
  gRNA
gatgccgatgacccttccta

SEQ ID NO: 9413 - DNA, 20 bp, Artificial Sequence
  MKO10009413_A_Cdh10
  gRNA
ttccagacaaaccccccatc

SEQ ID NO: 9414 - DNA, 20 bp, Artificial Sequence
  MKO10009414_A_Cdh11
  gRNA
ttgggcctccaccgagaaat

SEQ ID NO: 9415 - DNA, 20 bp, Artificial Sequence
  MKO10009415_A_Cdh11
  gRNA
tacaacagactatgaaacac

SEQ ID NO: 9416 - DNA, 20 bp, Artificial Sequence
  MKO10009416_A_Cdh11
  gRNA
tgtatcagaagcagctgtcc

SEQ ID NO: 9417 - DNA, 20 bp, Artificial Sequence
  MKO10009417_A_Cdh12
  gRNA
ccatgtctttcgcttgaatg

SEQ ID NO: 9418 - DNA, 20 bp, Artificial Sequence
  MKO10009418_A_Cdh12
  gRNA
ttctcagctgcattcggact

SEQ ID NO: 9419 - DNA, 20 bp, Artificial Sequence
  MKO10009419_A_Cdh12
  gRNA
actgttaaatacacgctctc

SEQ ID NO: 9420 - DNA, 20 bp, Artificial Sequence
  MKO10009420_A_Cdh13
  gRNA
gtcgatagcgacagacccga

SEQ ID NO: 9421 - DNA, 20 bp, Artificial Sequence
  MKO10009421_A_Cdh13
  gRNA
caagttccggctcaccggga

SEQ ID NO: 9422 - DNA, 20 bp, Artificial Sequence
  MKO10009422_A_Cdh13
  gRNA
atggcagaactcgtgattgt

SEQ ID NO: 9423 - DNA, 20 bp, Artificial Sequence
  MKO10009423_A_Cdh15
  gRNA
ggtgtacctcaatgccacgc

SEQ ID NO: 9424 - DNA, 20 bp, Artificial Sequence
  MKO10009424_A_Cdh15
  gRNA
tggggctgatgcccggcgcc

SEQ ID NO: 9425 - DNA, 20 bp, Artificial Sequence
  MKO10009425_A_Cdh15
  gRNA
tgaagcggtccgtcttctcg

SEQ ID NO: 9426 - DNA, 20 bp, Artificial Sequence
  MKO10009426_A_Cdh16
  gRNA
gaaggccacattgtcctatc

SEQ ID NO: 9427 - DNA, 20 bp, Artificial Sequence
  MKO10009427_A_Cdh16
  gRNA
gaaagcagaataccaactac

SEQ ID NO: 9428 - DNA, 20 bp, Artificial Sequence
  MKO10009428_A_Cdh16
  gRNA
gtggggactggctcagaatg

SEQ ID NO: 9429 - DNA, 20 bp, Artificial Sequence
  MKO10009429_A_Cdh17
  gRNA
gttagctcgaaagtcacagc

SEQ ID NO: 9430 - DNA, 20 bp, Artificial Sequence
  MKO10009430_A_Cdh17
  gRNA
gtgaggcagaactctcgccc

SEQ ID NO: 9431 - DNA, 20 bp, Artificial Sequence
  MKO10009431_A_Cdh17
  gRNA
agtacataacatcgttgatt

SEQ ID NO: 9432 - DNA, 20 bp, Artificial Sequence
  MKO10009432_A_Cdh18
  gRNA
ttgtccgtctgtcaatagcc

SEQ ID NO: 9433 - DNA, 20 bp, Artificial Sequence
  MKO10009433_A_Cdh18
  gRNA
aatcccgtctccattagtga

SEQ ID NO: 9434 - DNA, 20 bp, Artificial Sequence
  MKO10009434_A_Cdh18
  gRNA
tcgaacagctttacacaaca

SEQ ID NO: 9435 - DNA, 20 bp, Artificial Sequence
  MKO10009435_A_Cdh19
  gRNA
atcctatacaacttagaacg

SEQ ID NO: 9436 - DNA, 20 bp, Artificial Sequence
  MKO10009436_A_Cdh19
  gRNA
gacgcagatgatccttcaac

SEQ ID NO: 9437 - DNA, 20 bp, Artificial Sequence
  MKO10009437_A_Cdh19
  gRNA
tggcctcatatggttcatct

SEQ ID NO: 9438 - DNA, 20 bp, Artificial Sequence
  MKO10009438_A_Cdh1
  gRNA
cgtctgtcgccactttgaat

SEQ ID NO: 9439 - DNA, 20 bp, Artificial Sequence
  MKO10009439_A_Cdh1
  gRNA
tacgtacgcggtggtggtgc

SEQ ID NO: 9440 - DNA, 20 bp, Artificial Sequence
  MKO10009440_A_Cdh1
  gRNA
ggagctgacaaaccccccgt

SEQ ID NO: 9441 - DNA, 20 bp, Artificial Sequence
  MKO10009441_A_Cdh20
  gRNA
ggtagtgtacagcattctcc

SEQ ID NO: 9442 - DNA, 20 bp, Artificial Sequence
  MKO10009442_A_Cdh20
  gRNA
aagttgccctcccatatctt

SEQ ID NO: 9443 - DNA, 20 bp, Artificial Sequence
  MKO10009443_A_Cdh20
  gRNA
tggcgatgtaaggtccatcc

SEQ ID NO: 9444 - DNA, 20 bp, Artificial Sequence
  MKO10009444_A_Cdh22
  gRNA
cccaggcacgtccgtgatgc

SEQ ID NO: 9445 - DNA, 20 bp, Artificial Sequence
  MKO10009445_A_Cdh22
  gRNA
atccactcggattctgacga

SEQ ID NO: 9446 - DNA, 20 bp, Artificial Sequence
  MKO10009446_A_Cdh22
  gRNA
gcggcccacagccgtaccga

SEQ ID NO: 9447 - DNA, 20 bp, Artificial Sequence
  MKO10009447_A_Cdh23
  gRNA
ggcctcccgattctttgccg

SEQ ID NO: 9448 - DNA, 20 bp, Artificial Sequence
  MKO10009448_A_Cdh23
  gRNA
ctccacggcaaagaatcggg

SEQ ID NO: 9449 - DNA, 20 bp, Artificial Sequence
  MKO10009449_A_Cdh23
  gRNA
ctcagggatgcgcacgctgt

SEQ ID NO: 9450 - DNA, 20 bp, Artificial Sequence
  MKO10009450_A_Cdh24
  gRNA
gggttccaggggccggttag

SEQ ID NO: 9451 - DNA, 20 bp, Artificial Sequence
  MKO10009451_A_Cdh24
  gRNA
cggtggcatggtagggcccg

SEQ ID NO: 9452 - DNA, 20 bp, Artificial Sequence
  MKO10009452_A_Cdh24
  gRNA
agctaaccttgcggacagta

SEQ ID NO: 9453 - DNA, 20 bp, Artificial Sequence
  MKO10009453_A_Cdh26
  gRNA
tcacttctcgatcgacaggg

SEQ ID NO: 9454 - DNA, 20 bp, Artificial Sequence
  MKO10009454_A_Cdh26
  gRNA
gatgccgtagatcgatccac

SEQ ID NO: 9455 - DNA, 20 bp, Artificial Sequence
  MKO10009455_A_Cdh26
  gRNA
ctcgggatgcttacattatg

SEQ ID NO: 9456 - DNA, 20 bp, Artificial Sequence
  MKO10009456_A_Cdh2
  gRNA
ttacagcgcagtcttaccga

SEQ ID NO: 9457 - DNA, 20 bp, Artificial Sequence
  MKO10009457_A_Cdh2
  gRNA
tcgtccaccttgaaatctgc

SEQ ID NO: 9458 - DNA, 20 bp, Artificial Sequence
  MKO10009458_A_Cdh2
  gRNA
ttgataatgaagatgcccgt

SEQ ID NO: 9459 - DNA, 20 bp, Artificial Sequence
  MKO10009459_A_Cdh3
  gRNA
ccctaccgagcgggcttcat

SEQ ID NO: 9460 - DNA, 20 bp, Artificial Sequence
  MKO10009460_A_Cdh3
  gRNA
ggtttgctggctacgcagcg

SEQ ID NO: 9461 - DNA, 20 bp, Artificial Sequence
  MKO10009461_A_Cdh3
  gRNA
ggagaagattgtcaagtacg

SEQ ID NO: 9462 - DNA, 20 bp, Artificial Sequence
  MKO10009462_A_Cdh4
  gRNA
acttcaaagtcggggcggat

SEQ ID NO: 9463 - DNA, 20 bp, Artificial Sequence
  MKO10009463_A_Cdh4
  gRNA
aacgttcccgagaactcccg

SEQ ID NO: 9464 - DNA, 20 bp, Artificial Sequence
  MKO10009464_A_Cdh4
  gRNA
gttgatctccccgaatgtcc

SEQ ID NO: 9465 - DNA, 20 bp, Artificial Sequence
  MKO10009465_A_Cdh5
  gRNA
gtcttgtaccaaatcgtgaa

SEQ ID NO: 9466 - DNA, 20 bp, Artificial Sequence
  MKO10009466_A_Cdh5
  gRNA
gatgataccctcgttacgtt

SEQ ID NO: 9467 - DNA, 20 bp, Artificial Sequence
  MKO10009467_A_Cdh5
  gRNA
gacagaccccaaacgtaacg

SEQ ID NO: 9468 - DNA, 20 bp, Artificial Sequence
  MKO10009468_A_Cdh6
  gRNA
agtcgtctatagcatcctgc

SEQ ID NO: 9469 - DNA, 20 bp, Artificial Sequence
  MKO10009469_A_Cdh6
  gRNA
gatgctgacgacccaacata

SEQ ID NO: 9470 - DNA, 20 bp, Artificial Sequence
  MKO10009470_A_Cdh6
  gRNA
gtttgatgtcatcaccgacc

SEQ ID NO: 9471 - DNA, 20 bp, Artificial Sequence
  MKO10009471_A_Cdh7
  gRNA
gatgccgatgatcctacata

SEQ ID NO: 9472 - DNA, 20 bp, Artificial Sequence
  MKO10009472_A_Cdh7
  gRNA
gcctgacaagatgtacttga

SEQ ID NO: 9473 - DNA, 20 bp, Artificial Sequence
  MKO10009473_A_Cdh7
  gRNA
aacttacttcgtggaaatcg

SEQ ID NO: 9474 - DNA, 20 bp, Artificial Sequence
  MKO10009474_A_Cdh8
  gRNA
ggacctgaaccgattctcgt

SEQ ID NO: 9475 - DNA, 20 bp, Artificial Sequence
  MKO10009475_A_Cdh8
  gRNA
cttacccggccaacgagaat

SEQ ID NO: 9476 - DNA, 20 bp, Artificial Sequence
  MKO10009476_A_Cdh8
  gRNA
tgccagctccatcacccgat

SEQ ID NO: 9477 - DNA, 20 bp, Artificial Sequence
  MKO10009477_A_Cdh9
  gRNA
gcacctcttggaactcatct

SEQ ID NO: 9478 - DNA, 20 bp, Artificial Sequence
  MKO10009478_A_Cdh9
  gRNA
tacaggtctttcgtgaattt

SEQ ID NO: 9479 - DNA, 20 bp, Artificial Sequence
  MKO10009479_A_Cdh9
  gRNA
tctgtacattcttcgtgcca

SEQ ID NO: 9480 - DNA, 20 bp, Artificial Sequence
  MKO10009480_A_Cdhr1
  gRNA
gaacagggccatgttcccgt

SEQ ID NO: 9481 - DNA, 20 bp, Artificial Sequence
  MKO10009481_A_Cdhr1
  gRNA
ggcagagaaagtcgtgatac

SEQ ID NO: 9482 - DNA, 20 bp, Artificial Sequence
  MKO10009482_A_Cdhr1
  gRNA
tccaggagccttacatcatc

SEQ ID NO: 9483 - DNA, 20 bp, Artificial Sequence
  MKO10009483_A_Cdhr2
  gRNA
ttctccgtcaacgcgaacac

SEQ ID NO: 9484 - DNA, 20 bp, Artificial Sequence
  MKO10009484_A_Cdhr2
  gRNA
cggagatacctcattgatgc

SEQ ID NO: 9485 - DNA, 20 bp, Artificial Sequence
  MKO10009485_A_Cdhr2
  gRNA
ttccccagtgttcgcgttga

SEQ ID NO: 9486 - DNA, 20 bp, Artificial Sequence
  MKO10009486_A_Cdhr3
  gRNA
cgatttgcagatttacgtta

SEQ ID NO: 9487 - DNA, 20 bp, Artificial Sequence
  MKO10009487_A_Cdhr3
  gRNA
ttaccccgaggggtatgctc

SEQ ID NO: 9488 - DNA, 20 bp, Artificial Sequence
  MKO10009488_A_Cdhr3
  gRNA
gttctctgccacgttgctag

SEQ ID NO: 9489 - DNA, 20 bp, Artificial Sequence
  MKO10009489_A_Cdhr5
  gRNA
agacggcctgcacgtgacct

SEQ ID NO: 9490 - DNA, 20 bp, Artificial Sequence
  MKO10009490_A_Cdhr5
  gRNA
tttgctgcaggtggtacgcc

SEQ ID NO: 9491 - DNA, 20 bp, Artificial Sequence
  MKO10009491_A_Cdhr5
  gRNA
ccagaccatatttagagtcg

SEQ ID NO: 9492 - DNA, 20 bp, Artificial Sequence
  MKO10009492_A_Cdip1
  gRNA
accaagatctcctacgagat

SEQ ID NO: 9493 - DNA, 20 bp, Artificial Sequence
  MKO10009493_A_Cdip1
  gRNA
ccctgatgggaccaatactg

SEQ ID NO: 9494 - DNA, 20 bp, Artificial Sequence
  MKO10009494_A_Cdip1
  gRNA
aggtcctacagccccactac

SEQ ID NO: 9495 - DNA, 20 bp, Artificial Sequence
  MKO10009495_A_Cdipt
  gRNA
gtatagtagatccgaagcac

SEQ ID NO: 9496 - DNA, 20 bp, Artificial Sequence
  MKO10009496_A_Cdipt
  gRNA
cgtgtccatcgaaagcgtct

SEQ ID NO: 9497 - DNA, 20 bp, Artificial Sequence
  MKO10009497_A_Cdipt
  gRNA
ttcggatctactatacctct

SEQ ID NO: 9498 - DNA, 20 bp, Artificial Sequence
  MKO10009498_A_Cdk10
  gRNA
tcctgtttcagatcgggcca

SEQ ID NO: 9499 - DNA, 20 bp, Artificial Sequence
  MKO10009499_A_Cdk10
  gRNA
tcacacctgggcctccgaga

SEQ ID NO: 9500 - DNA, 20 bp, Artificial Sequence
  MKO10009500_A_Cdk10
  gRNA
ccactcacacacgatgccat

SEQ ID NO: 9501 - DNA, 20 bp, Artificial Sequence
  MKO10009501_A_Cdk11b
  gRNA
ctgatgaccgcgattccaaa

SEQ ID NO: 9502 - DNA, 20 bp, Artificial Sequence
  MKO10009502_A_Cdk11b
  gRNA
acatcgtagccattcagcag

SEQ ID NO: 9503 - DNA, 20 bp, Artificial Sequence
  MKO10009503_A_Cdk11b
  gRNA
tcctgattgtgatctccatt

SEQ ID NO: 9504 - DNA, 20 bp, Artificial Sequence
  MKO10009504_A_Cdk12
  gRNA
ggaatgacgactgcgtgacc

SEQ ID NO: 9505 - DNA, 20 bp, Artificial Sequence
  MKO10009505_A_Cdk12
  gRNA
cagttccaaacggtccgtgg

SEQ ID NO: 9506 - DNA, 20 bp, Artificial Sequence
  MKO10009506_A_Cdk12
  gRNA
ggtacccaaagatgccgctt

SEQ ID NO: 9507 - DNA, 20 bp, Artificial Sequence
  MKO10009507_A_Cdk13
  gRNA
atccagacgtactttcttta

SEQ ID NO: 9508 - DNA, 20 bp, Artificial Sequence
  MKO10009508_A_Cdk13
  gRNA
agccttaaagaaagtacgtc

SEQ ID NO: 9509 - DNA, 20 bp, Artificial Sequence
  MKO10009509_A_Cdk13
  gRNA
agaatatgtgggcctcgcta

SEQ ID NO: 9510 - DNA, 20 bp, Artificial Sequence
  MKO10009510_A_Cdk14
  gRNA
tctaaaggtgatccggctgc

SEQ ID NO: 9511 - DNA, 20 bp, Artificial Sequence
  MKO10009511_A_Cdk14
  gRNA
aagagtcacctaaagttcgg

SEQ ID NO: 9512 - DNA, 20 bp, Artificial Sequence
  MKO10009512_A_Cdk14
  gRNA
caaacttaccgagctggggc

SEQ ID NO: 9513 - DNA, 20 bp, Artificial Sequence
  MKO10009513_A_Cdk15
  gRNA
cctgtccttaccttcccgga

SEQ ID NO: 9514 - DNA, 20 bp, Artificial Sequence
  MKO10009514_A_Cdk15
  gRNA
gtgaaatgaagccgtggaac

SEQ ID NO: 9515 - DNA, 20 bp, Artificial Sequence
  MKO10009515_A_Cdk15
  gRNA
gctgatgcccttgtaaactt

SEQ ID NO: 9516 - DNA, 20 bp, Artificial Sequence
  MKO10009516_A_Cdk16
  gRNA
accttcccggatagcagtac

SEQ ID NO: 9517 - DNA, 20 bp, Artificial Sequence
  MKO10009517_A_Cdk16
  gRNA
caccccagagattgtgcacg

SEQ ID NO: 9518 - DNA, 20 bp, Artificial Sequence
  MKO10009518_A_Cdk16
  gRNA
tcaggcagccgtatgtcagc

SEQ ID NO: 9519 - DNA, 20 bp, Artificial Sequence
  MKO10009519_A_Cdk17
  gRNA
ccgcaacgggggcttcttga

SEQ ID NO: 9520 - DNA, 20 bp, Artificial Sequence
  MKO10009520_A_Cdk17
  gRNA
ccttcaagaagcccccgttg

SEQ ID NO: 9521 - DNA, 20 bp, Artificial Sequence
  MKO10009521_A_Cdk17
  gRNA
gcggctcatgggctggtcaa

SEQ ID NO: 9522 - DNA, 20 bp, Artificial Sequence
  MKO10009522_A_Cdk18
  gRNA
gccctgcactgctattcgag

SEQ ID NO: 9523 - DNA, 20 bp, Artificial Sequence
  MKO10009523_A_Cdk18
  gRNA
gaaccagcgccgattctcca

SEQ ID NO: 9524 - DNA, 20 bp, Artificial Sequence
  MKO10009524_A_Cdk18
  gRNA
tcccagtcagatatcggctt

SEQ ID NO: 9525 - DNA, 20 bp, Artificial Sequence
  MKO10009525_A_Cdk19
  gRNA
aaagtgggacgcggcaccta

SEQ ID NO: 9526 - DNA, 20 bp, Artificial Sequence
  MKO10009526_A_Cdk19
  gRNA
tccattacctccacgcaaac

SEQ ID NO: 9527 - DNA, 20 bp, Artificial Sequence
  MKO10009527_A_Cdk19
  gRNA
cccagtttgcgtggaggtaa

SEQ ID NO: 9528 - DNA, 20 bp, Artificial Sequence
  MKO10009528_A_Cdk1
  gRNA
catggattcttcactcgtta

SEQ ID NO: 9529 - DNA, 20 bp, Artificial Sequence
  MKO10009529_A_Cdk1
  gRNA
tctttcaggtacttacggtg

SEQ ID NO: 9530 - DNA, 20 bp, Artificial Sequence
  MKO10009530_A_Cdk1
  gRNA
tcgtgtgtgtacactcgtat

SEQ ID NO: 9531 - DNA, 20 bp, Artificial Sequence
  MKO10009531_A_Cdk20
  gRNA
cgaatttatgctgtcggacc

SEQ ID NO: 9532 - DNA, 20 bp, Artificial Sequence
  MKO10009532_A_Cdk20
  gRNA
catactgccgagcgccatac

SEQ ID NO: 9533 - DNA, 20 bp, Artificial Sequence
  MKO10009533_A_Cdk20
  gRNA
cgagatcgttgccctcaaga

SEQ ID NO: 9534 - DNA, 20 bp, Artificial Sequence
  MKO10009534_A_Cdk2ap1
  gRNA
ctctcactcaccggcgttga

SEQ ID NO: 9535 - DNA, 20 bp, Artificial Sequence
  MKO10009535_A_Cdk2ap1
  gRNA
ttgcaggcatcattcatgcc

SEQ ID NO: 9536 - DNA, 20 bp, Artificial Sequence
  MKO10009536_A_Cdk2ap1
  gRNA
acctgggtgtagcctagcga

SEQ ID NO: 9537 - DNA, 20 bp, Artificial Sequence
  MKO10009537_A_Cdk2ap2
  gRNA
agaccgctgtttaacgactt

SEQ ID NO: 9538 - DNA, 20 bp, Artificial Sequence
  MKO10009538_A_Cdk2ap2
  gRNA
cgggagtgtcccatcgccat

SEQ ID NO: 9539 - DNA, 20 bp, Artificial Sequence
  MKO10009539_A_Cdk2ap2
  gRNA
gagatccggcccacctatgc

SEQ ID NO: 9540 - DNA, 20 bp, Artificial Sequence
  MKO10009540_A_Cdk2
  gRNA
aggccactcacgtgtcgagc

SEQ ID NO: 9541 - DNA, 20 bp, Artificial Sequence
  MKO10009541_A_Cdk2
  gRNA
cagacttacttgacgatatt

SEQ ID NO: 9542 - DNA, 20 bp, Artificial Sequence
  MKO10009542_A_Cdk2
  gRNA
ggggcttaaggtctcggtga

SEQ ID NO: 9543 - DNA, 20 bp, Artificial Sequence
  MKO10009543_A_Cdk4
  gRNA
gtctacatacgcaacacccg

SEQ ID NO: 9544 - DNA, 20 bp, Artificial Sequence
  MKO10009544_A_Cdk4
  gRNA
ctcaccttaatggtctcaac

SEQ ID NO: 9545 - DNA, 20 bp, Artificial Sequence
  MKO10009545_A_Cdk4
  gRNA
ctcttcaggtggttacgctc

SEQ ID NO: 9546 - DNA, 20 bp, Artificial Sequence
  MKO10009546_A_Cdk5r1
  gRNA
acccaaacgggtcatcgtcc

SEQ ID NO: 9547 - DNA, 20 bp, Artificial Sequence
  MKO10009547_A_Cdk5r1
  gRNA
ccttccgatagctgggggat

SEQ ID NO: 9548 - DNA, 20 bp, Artificial Sequence
  MKO10009548_A_Cdk5r1
  gRNA
cgcgccatcctcaaacagtg

SEQ ID NO: 9549 - DNA, 20 bp, Artificial Sequence
  MKO10009549_A_Cdk5r2
  gRNA
gcctgcacgatgacccgccg

SEQ ID NO: 9550 - DNA, 20 bp, Artificial Sequence
  MKO10009550_A_Cdk5r2
  gRNA
gtcgcttcgtggggacgagc

SEQ ID NO: 9551 - DNA, 20 bp, Artificial Sequence
  MKO10009551_A_Cdk5r2
  gRNA
ccgacgctgctaccgcctca

SEQ ID NO: 9552 - DNA, 20 bp, Artificial Sequence
  MKO10009552_A_Cdk5rap1
  gRNA
agcgtggccgctttgtcttc

SEQ ID NO: 9553 - DNA, 20 bp, Artificial Sequence
  MKO10009553_A_Cdk5rap1
  gRNA
cacgctctcgagtacctctg

SEQ ID NO: 9554 - DNA, 20 bp, Artificial Sequence
  MKO10009554_A_Cdk5rap1
  gRNA
gactggcatgatatctgcgt

SEQ ID NO: 9555 - DNA, 20 bp, Artificial Sequence
  MKO10009555_A_Cdk5rap2
  gRNA
aagtctgaagcgcgagctcc

SEQ ID NO: 9556 - DNA, 20 bp, Artificial Sequence
  MKO10009556_A_Cdk5rap2
  gRNA
caccgtcttgtagatgtgct

SEQ ID NO: 9557 - DNA, 20 bp, Artificial Sequence
  MKO10009557_A_Cdk5rap2
  gRNA
cgagcaactgatctttctcc

SEQ ID NO: 9558 - DNA, 20 bp, Artificial Sequence
  MKO10009558_A_Cdk5rap3
  gRNA
tctcctaccgagcagcttgc

SEQ ID NO: 9559 - DNA, 20 bp, Artificial Sequence
  MKO10009559_A_Cdk5rap3
  gRNA
gatcgtaagcctgtatgaga

SEQ ID NO: 9560 - DNA, 20 bp, Artificial Sequence
  MKO10009560_A_Cdk5rap3
  gRNA
tgtcgatgggcacgtgctga

SEQ ID NO: 9561 - DNA, 20 bp, Artificial Sequence
  MKO10009561_A_Cdk5
  gRNA
caggctggatgatgacgatg

SEQ ID NO: 9562 - DNA, 20 bp, Artificial Sequence
  MKO10009562_A_Cdk5
  gRNA
gtgtgccaagttcagccctc

SEQ ID NO: 9563 - DNA, 20 bp, Artificial Sequence
  MKO10009563_A_Cdk5
  gRNA
tcagcttcttgtcactatgc

SEQ ID NO: 9564 - DNA, 20 bp, Artificial Sequence
  MKO10009564_A_Cdk6
  gRNA
tgttgcaggtcgtcacgctg

SEQ ID NO: 9565 - DNA, 20 bp, Artificial Sequence
  MKO10009565_A_Cdk6
  gRNA
tctgaacttccacgaaaaag

SEQ ID NO: 9566 - DNA, 20 bp, Artificial Sequence
  MKO10009566_A_Cdk6
  gRNA
ctcaaacactagtgtaagct

SEQ ID NO: 9567 - DNA, 20 bp, Artificial Sequence
  MKO10009567_A_Cdk7
  gRNA
ctagtttgcgacggtctata

SEQ ID NO: 9568 - DNA, 20 bp, Artificial Sequence
  MKO10009568_A_Cdk7
  gRNA
ctttcttaatggcgacgatt

SEQ ID NO: 9569 - DNA, 20 bp, Artificial Sequence
  MKO10009569_A_Cdk7
  gRNA
cccagatcaaacttggacac

SEQ ID NO: 9570 - DNA, 20 bp, Artificial Sequence
  MKO10009570_A_Cdk8
  gRNA
ttcactatcttcatgccaac

SEQ ID NO: 9571 - DNA, 20 bp, Artificial Sequence
  MKO10009571_A_Cdk8
  gRNA
atccctgtgcaacacccagt

SEQ ID NO: 9572 - DNA, 20 bp, Artificial Sequence
  MKO10009572_A_Cdk8
  gRNA
gagcgaggaagagtaaaaat

SEQ ID NO: 9573 - DNA, 20 bp, Artificial Sequence
  MKO10009573_A_Cdk9
  gRNA
gacattgtggtaccggcctc

SEQ ID NO: 9574 - DNA, 20 bp, Artificial Sequence
  MKO10009574_A_Cdk9
  gRNA
ctcaccgtataaccgctgca

SEQ ID NO: 9575 - DNA, 20 bp, Artificial Sequence
  MKO10009575_A_Cdk9
  gRNA
tgggctggctattcttagct

SEQ ID NO: 9576 - DNA, 20 bp, Artificial Sequence
  MKO10009576_A_Cdkal1
  gRNA
tgctcacataataattcgga

SEQ ID NO: 9577 - DNA, 20 bp, Artificial Sequence
  MKO10009577_A_Cdkal1
  gRNA
ttacttaacagcactattcc

SEQ ID NO: 9578 - DNA, 20 bp, Artificial Sequence
  MKO10009578_A_Cdkal1
  gRNA
aataagaaagttgtcctcgc

SEQ ID NO: 9579 - DNA, 20 bp, Artificial Sequence
  MKO10009579_A_Cdkl1
  gRNA
acgagctggatcggtatcag

SEQ ID NO: 9580 - DNA, 20 bp, Artificial Sequence
  MKO10009580_A_Cdkl1
  gRNA
tagtccgtgtagtagtcacc

SEQ ID NO: 9581 - DNA, 20 bp, Artificial Sequence
  MKO10009581_A_Cdkl1
  gRNA
gttcgagtactgcgaccaca

SEQ ID NO: 9582 - DNA, 20 bp, Artificial Sequence
  MKO10009582_A_Cdkl2
  gRNA
tcaagtcatcaagaatcgtg

SEQ ID NO: 9583 - DNA, 20 bp, Artificial Sequence
  MKO10009583_A_Cdkl2
  gRNA
acgtcaccgaccagcagttc

SEQ ID NO: 9584 - DNA, 20 bp, Artificial Sequence
  MKO10009584_A_Cdkl2
  gRNA
ggaggtttacactgactatg

SEQ ID NO: 9585 - DNA, 20 bp, Artificial Sequence
  MKO10009585_A_Cdkl3
  gRNA
actcaatggcgcgaaggatc

SEQ ID NO: 9586 - DNA, 20 bp, Artificial Sequence
  MKO10009586_A_Cdkl3
  gRNA
agacgtttacacagactacg

SEQ ID NO: 9587 - DNA, 20 bp, Artificial Sequence
  MKO10009587_A_Cdkl3
  gRNA
gtatacatactttccgtagg

SEQ ID NO: 9588 - DNA, 20 bp, Artificial Sequence
  MKO10009588_A_Cdkl4
  gRNA
ctggccgggaaaatccgacg

SEQ ID NO: 9589 - DNA, 20 bp, Artificial Sequence
  MKO10009589_A_Cdkl4
  gRNA
tcacacactgttaaacgagc

SEQ ID NO: 9590 - DNA, 20 bp, Artificial Sequence
  MKO10009590_A_Cdkl4
  gRNA
ccgagcccccgaacttctcg

SEQ ID NO: 9591 - DNA, 20 bp, Artificial Sequence
  MKO10009591_A_Cdkl5
  gRNA
tgtggacgatgtcgttcttg

SEQ ID NO: 9592 - DNA, 20 bp, Artificial Sequence
  MKO10009592_A_Cdkl5
  gRNA
agtggatagctttgattagt

SEQ ID NO: 9593 - DNA, 20 bp, Artificial Sequence
  MKO10009593_A_Cdkl5
  gRNA
aatgcttcgcactctcaagc

SEQ ID NO: 9594 - DNA, 20 bp, Artificial Sequence
  MKO10009594_A_Cdkn1a
  gRNA
acttcgtctgggagcgcgtt

SEQ ID NO: 9595 - DNA, 20 bp, Artificial Sequence
  MKO10009595_A_Cdkn1a
  gRNA
ccatgagcgcatcgcaatca

SEQ ID NO: 9596 - DNA, 20 bp, Artificial Sequence
  MKO10009596_A_Cdkn1a
  gRNA
ctatcactccaagcgcagat

SEQ ID NO: 9597 - DNA, 20 bp, Artificial Sequence
  MKO10009597_A_Cdkn1b
  gRNA
ctgtttacgtctggcgtcga

SEQ ID NO: 9598 - DNA, 20 bp, Artificial Sequence
  MKO10009598_A_Cdkn1b
  gRNA
tgtctgacgagtcaggcatt

SEQ ID NO: 9599 - DNA, 20 bp, Artificial Sequence
  MKO10009599_A_Cdkn1b
  gRNA
cgccaggcggtgcctttaat

SEQ ID NO: 9600 - DNA, 20 bp, Artificial Sequence
  MKO10009600_A_Cdkn1c
  gRNA
gcgctgctacgcgctatcac

SEQ ID NO: 9601 - DNA, 20 bp, Artificial Sequence
  MKO10009601_A_Cdkn1c
  gRNA
gcgtcgaacgacgtccctcc

SEQ ID NO: 9602 - DNA, 20 bp, Artificial Sequence
  MKO10009602_A_Cdkn1c
  gRNA
cttgatcgcaccgttcgcat

SEQ ID NO: 9603 - DNA, 20 bp, Artificial Sequence
  MKO10009603_A_Cdkn2aipnl
  gRNA
acgaaactgctcggcgaagt

SEQ ID NO: 9604 - DNA, 20 bp, Artificial Sequence
  MKO10009604_A_Cdkn2aipnl
  gRNA
cgccgccgtcgggtgggtct

SEQ ID NO: 9605 - DNA, 20 bp, Artificial Sequence
  MKO10009605_A_Cdkn2aipnl
  gRNA
ctttctcattagttcgcttc

SEQ ID NO: 9606 - DNA, 20 bp, Artificial Sequence
  MKO10009606_A_Cdkn2aip
  gRNA
ccataccacacgagacgaac

SEQ ID NO: 9607 - DNA, 20 bp, Artificial Sequence
  MKO10009607_A_Cdkn2aip
  gRNA
gacgctgaaccacgtttatg

SEQ ID NO: 9608 - DNA, 20 bp, Artificial Sequence
  MKO10009608_A_Cdkn2aip
  gRNA
gctgctgaacgcggctattg

SEQ ID NO: 9609 - DNA, 20 bp, Artificial Sequence
  MKO10009609_A_Cdkn2a
  gRNA
gtgcgatatttgcgttccgc

SEQ ID NO: 9610 - DNA, 20 bp, Artificial Sequence
  MKO10009610_A_Cdkn2a
  gRNA
cccaacgccccgaactcttt

SEQ ID NO: 9611 - DNA, 20 bp, Artificial Sequence
  MKO10009611_A_Cdkn2a
  gRNA
ggggtacgaccgaaagagtt

SEQ ID NO: 9612 - DNA, 20 bp, Artificial Sequence
  MKO10009612_A_Cdkn2b
  gRNA
ggattgggcgcctcccgaag

SEQ ID NO: 9613 - DNA, 20 bp, Artificial Sequence
  MKO10009613_A_Cdkn2b
  gRNA
gacctgtgcacgacgcagct

SEQ ID NO: 9614 - DNA, 20 bp, Artificial Sequence
  MKO10009614_A_Cdkn2b
  gRNA
cagggcgttgggatctgcgc

SEQ ID NO: 9615 - DNA, 20 bp, Artificial Sequence
  MKO10009615_A_Cdkn2c
  gRNA
gtaaacgtcaacgctcaaaa

SEQ ID NO: 9616 - DNA, 20 bp, Artificial Sequence
  MKO10009616_A_Cdkn2c
  gRNA
gggggacaccgccttcgact

SEQ ID NO: 9617 - DNA, 20 bp, Artificial Sequence
  MKO10009617_A_Cdkn2c
  gRNA
gacgccaactcgttccccca

SEQ ID NO: 9618 - DNA, 20 bp, Artificial Sequence
  MKO10009618_A_Cdkn2d
  gRNA
ggacctcttgcacgtcgcca

SEQ ID NO: 9619 - DNA, 20 bp, Artificial Sequence
  MKO10009619_A_Cdkn2d
  gRNA
tgagaccggaagcgtccctg

SEQ ID NO: 9620 - DNA, 20 bp, Artificial Sequence
  MKO10009620_A_Cdkn2d
  gRNA
accggaggcatcttggacat

SEQ ID NO: 9621 - DNA, 20 bp, Artificial Sequence
  MKO10009621_A_Cdkn3
  gRNA
gaacaattcactcgcgacag

SEQ ID NO: 9622 - DNA, 20 bp, Artificial Sequence
  MKO10009622_A_Cdkn3
  gRNA
gagcacataaaccgagaaac

SEQ ID NO: 9623 - DNA, 20 bp, Artificial Sequence
  MKO10009623_A_Cdkn3
  gRNA
catctgggatcggatgatga

SEQ ID NO: 9624 - DNA, 20 bp, Artificial Sequence
  MKO10009624_A_Cdnf
  gRNA
gatacaaaacccggcgcaaa

SEQ ID NO: 9625 - DNA, 20 bp, Artificial Sequence
  MKO10009625_A_Cdnf
  gRNA
acttggcgtcggtggacctg

SEQ ID NO: 9626 - DNA, 20 bp, Artificial Sequence
  MKO10009626_A_Cdnf
  gRNA
ttgtatctcgaaccctgtgc

SEQ ID NO: 9627 - DNA, 20 bp, Artificial Sequence
  MKO10009627_A_Cdo1
  gRNA
aaaggcgtggcatgtatcga

SEQ ID NO: 9628 - DNA, 20 bp, Artificial Sequence
  MKO10009628_A_Cdo1
  gRNA
tgtggctgacgttctctact

SEQ ID NO: 9629 - DNA, 20 bp, Artificial Sequence
  MKO10009629_A_Cdo1
  gRNA
taggtatactcgaaatcttg

SEQ ID NO: 9630 - DNA, 20 bp, Artificial Sequence
  MKO10009630_A_Cdon
  gRNA
gaatagttccccgaatccgc

SEQ ID NO: 9631 - DNA, 20 bp, Artificial Sequence
  MKO10009631_A_Cdon
  gRNA
tcctcacagccccgttacct

SEQ ID NO: 9632 - DNA, 20 bp, Artificial Sequence
  MKO10009632_A_Cdon
  gRNA
ctgttactgcccgaatctca

SEQ ID NO: 9633 - DNA, 20 bp, Artificial Sequence
  MKO10009633_A_Cdpf1
  gRNA
acacactgcaccgagagccg

SEQ ID NO: 9634 - DNA, 20 bp, Artificial Sequence
  MKO10009634_A_Cdpf1
  gRNA
gcagcctgttctactccaag

SEQ ID NO: 9635 - DNA, 20 bp, Artificial Sequence
  MKO10009635_A_Cdpf1
  gRNA
ttctgccccacatagctgta

SEQ ID NO: 9636 - DNA, 20 bp, Artificial Sequence
  MKO10009636_A_Cdr1
  gRNA
tcccgaaaatccacgtcttc

SEQ ID NO: 9637 - DNA, 20 bp, Artificial Sequence
  MKO10009637_A_Cdr1
  gRNA
tcctgaaaatctaagtcttc

SEQ ID NO: 9638 - DNA, 20 bp, Artificial Sequence
  MKO10009638_A_Cdr1
  gRNA
gacttggattatttggaaga

SEQ ID NO: 9639 - DNA, 20 bp, Artificial Sequence
  MKO10009639_A_Cdr2l
  gRNA
cggtgccggagtgcggcacg

SEQ ID NO: 9640 - DNA, 20 bp, Artificial Sequence
  MKO10009640_A_Cdr2l
  gRNA
ttgcacctagccgccgagct

SEQ ID NO: 9641 - DNA, 20 bp, Artificial Sequence
  MKO10009641_A_Cdr2l
  gRNA
tgcatgccaacagtgtgcgc

SEQ ID NO: 9642 - DNA, 20 bp, Artificial Sequence
  MKO10009642_A_Cdr2
  gRNA
tgatcttctcagcgaacacg

SEQ ID NO: 9643 - DNA, 20 bp, Artificial Sequence
  MKO10009643_A_Cdr2
  gRNA
ccgggctcggtaggcatctg

SEQ ID NO: 9644 - DNA, 20 bp, Artificial Sequence
  MKO10009644_A_Cdr2
  gRNA
ggtgatcaatgttggtttgc

SEQ ID NO: 9645 - DNA, 20 bp, Artificial Sequence
  MKO10009645_A_Cdrt4
  gRNA
cggggagatgtaagcgacgt

SEQ ID NO: 9646 - DNA, 20 bp, Artificial Sequence
  MKO10009646_A_Cdrt4
  gRNA
gtaacccgaatcaccgaaaa

SEQ ID NO: 9647 - DNA, 20 bp, Artificial Sequence
  MKO10009647_A_Cdrt4
  gRNA
aatggtacctgaataattcc

SEQ ID NO: 9648 - DNA, 20 bp, Artificial Sequence
  MKO10009648_A_Cds1
  gRNA
aggcacgtcggaatcgcctc

SEQ ID NO: 9649 - DNA, 20 bp, Artificial Sequence
  MKO10009649_A_Cds1
  gRNA
tgaacctgtggtagcgaatg

SEQ ID NO: 9650 - DNA, 20 bp, Artificial Sequence
  MKO10009650_A_Cds1
  gRNA
catatccttcgccctctacc

SEQ ID NO: 9651 - DNA, 20 bp, Artificial Sequence
  MKO10009651_A_Cds2
  gRNA
gacggactacttcttcactc

SEQ ID NO: 9652 - DNA, 20 bp, Artificial Sequence
  MKO10009652_A_Cds2
  gRNA
aatgaagaaaaacgcgatca

SEQ ID NO: 9653 - DNA, 20 bp, Artificial Sequence
  MKO10009653_A_Cds2
  gRNA
gtctgacagcgagagccgag

SEQ ID NO: 9654 - DNA, 20 bp, Artificial Sequence
  MKO10009654_A_Cdsn
  gRNA
tgaattctcgtacccgagca

SEQ ID NO: 9655 - DNA, 20 bp, Artificial Sequence
  MKO10009655_A_Cdsn
  gRNA
attcggggaggtgatcctcg

SEQ ID NO: 9656 - DNA, 20 bp, Artificial Sequence
  MKO10009656_A_Cdsn
  gRNA
gcaccccggatggggagtgt

SEQ ID NO: 9657 - DNA, 20 bp, Artificial Sequence
  MKO10009657_A_Cdt1
  gRNA
cacgtcgtatcgcttccgcc

SEQ ID NO: 9658 - DNA, 20 bp, Artificial Sequence
  MKO10009658_A_Cdt1
  gRNA
gcgatacgacgtgggataca

SEQ ID NO: 9659 - DNA, 20 bp, Artificial Sequence
  MKO10009659_A_Cdt1
  gRNA
agttgagatgttccgcagca

SEQ ID NO: 9660 - DNA, 20 bp, Artificial Sequence
  MKO10009660_A_Cdv3
  gRNA
gcgcctcctgctccagtaac

SEQ ID NO: 9661 - DNA, 20 bp, Artificial Sequence
  MKO10009661_A_Cdv3
  gRNA
gagttcaggcaatgcaaata

SEQ ID NO: 9662 - DNA, 20 bp, Artificial Sequence
  MKO10009662_A_Cdv3
  gRNA
tctattagttacagaaaccc

SEQ ID NO: 9663 - DNA, 20 bp, Artificial Sequence
  MKO10009663_A_Cdx1
  gRNA
gctgcgccgcatccattcgt

SEQ ID NO: 9664 - DNA, 20 bp, Artificial Sequence
  MKO10009664_A_Cdx1
  gRNA
tatccggcgcaagtccgagc

SEQ ID NO: 9665 - DNA, 20 bp, Artificial Sequence
  MKO10009665_A_Cdx1
  gRNA
cagccagctcggacttgcgc

SEQ ID NO: 9666 - DNA, 20 bp, Artificial Sequence
  MKO10009666_A_Cdx2
  gRNA
agcggcgaaacctgtgcgag

SEQ ID NO: 9667 - DNA, 20 bp, Artificial Sequence
  MKO10009667_A_Cdx2
  gRNA
ggcggctgctacggcgaact

SEQ ID NO: 9668 - DNA, 20 bp, Artificial Sequence
  MKO10009668_A_Cdx2
  gRNA
ttagtcgatacatcaccatc

SEQ ID NO: 9669 - DNA, 20 bp, Artificial Sequence
  MKO10009669_A_Cdx4
  gRNA
accgccgttgcttgcaccgc

SEQ ID NO: 9670 - DNA, 20 bp, Artificial Sequence
  MKO10009670_A_Cdx4
  gRNA
tgagggtaacccacgtagtg

SEQ ID NO: 9671 - DNA, 20 bp, Artificial Sequence
  MKO10009671_A_Cdx4
  gRNA
atgacctgctgtatctcgat

SEQ ID NO: 9672 - DNA, 20 bp, Artificial Sequence
  MKO10009672_A_Cdyl2
  gRNA
agtttatcgacgagttcaac

SEQ ID NO: 9673 - DNA, 20 bp, Artificial Sequence
  MKO10009673_A_Cdyl2
  gRNA
cgggtcccatcagccggatc

SEQ ID NO: 9674 - DNA, 20 bp, Artificial Sequence
  MKO10009674_A_Cdyl2
  gRNA
cgctggacagccggccgatc

SEQ ID NO: 9675 - DNA, 20 bp, Artificial Sequence
  MKO10009675_A_Cdyl
  gRNA
cgtgcctaagagccccgtta

SEQ ID NO: 9676 - DNA, 20 bp, Artificial Sequence
  MKO10009676_A_Cdyl
  gRNA
aaacgcaaccgcttgtcaaa

SEQ ID NO: 9677 - DNA, 20 bp, Artificial Sequence
  MKO10009677_A_Cdyl
  gRNA
cagaaccagcttgctgtcgt

SEQ ID NO: 9678 - DNA, 20 bp, Artificial Sequence
  MKO10009678_A_Ceacam10
  gRNA
aaatagcatatctagtgcgt

SEQ ID NO: 9679 - DNA, 20 bp, Artificial Sequence
  MKO10009679_A_Ceacam10
  gRNA
tccgagcaatttactggtac

SEQ ID NO: 9680 - DNA, 20 bp, Artificial Sequence
  MKO10009680_A_Ceacam10
  gRNA
attgttgtctgcagtaacgt

SEQ ID NO: 9681 - DNA, 20 bp, Artificial Sequence
  MKO10009681_A_Ceacam11
  gRNA
ctcgaagagtcgaagacgag

SEQ ID NO: 9682 - DNA, 20 bp, Artificial Sequence
  MKO10009682_A_Ceacam11
  gRNA
cgactcttcgagaaagtcca

SEQ ID NO: 9683 - DNA, 20 bp, Artificial Sequence
  MKO10009683_A_Ceacam11
  gRNA
caccttccgaaccatatctg

SEQ ID NO: 9684 - DNA, 20 bp, Artificial Sequence
  MKO10009684_A_Ceacam12
  gRNA
cagcctacgaaccatacctg

SEQ ID NO: 9685 - DNA, 20 bp, Artificial Sequence
  MKO10009685_A_Ceacam12
  gRNA
ttcgacatcctttgttgatg

SEQ ID NO: 9686 - DNA, 20 bp, Artificial Sequence
  MKO10009686_A_Ceacam12
  gRNA
acgcattatttcacgtcttg

SEQ ID NO: 9687 - DNA, 20 bp, Artificial Sequence
  MKO10009687_A_Ceacam13
  gRNA
cctgtaaagactgcacctct

SEQ ID NO: 9688 - DNA, 20 bp, Artificial Sequence
  MKO10009688_A_Ceacam13
  gRNA
agagtgaaagtacgcaatga

SEQ ID NO: 9689 - DNA, 20 bp, Artificial Sequence
  MKO10009689_A_Ceacam13
  gRNA
ttccatctaggcccactatt

SEQ ID NO: 9690 - DNA, 20 bp, Artificial Sequence
  MKO10009690_A_Ceacam14
  gRNA
agattgacagtacgcaacga

SEQ ID NO: 9691 - DNA, 20 bp, Artificial Sequence
  MKO10009691_A_Ceacam14
  gRNA
ttctcaactcaaaattgcgt

SEQ ID NO: 9692 - DNA, 20 bp, Artificial Sequence
  MKO10009692_A_Ceacam14
  gRNA
agactttaacattcttcggc

SEQ ID NO: 9693 - DNA, 20 bp, Artificial Sequence
  MKO10009693_A_Ceacam15
  gRNA
tccaagttgaagcgaatcgc

SEQ ID NO: 9694 - DNA, 20 bp, Artificial Sequence
  MKO10009694_A_Ceacam15
  gRNA
tccagcgattcgcttcaact

SEQ ID NO: 9695 - DNA, 20 bp, Artificial Sequence
  MKO10009695_A_Ceacam15
  gRNA
cgacacgcaggtgagaattg

SEQ ID NO: 9696 - DNA, 20 bp, Artificial Sequence
  MKO10009696_A_Ceacam16
  gRNA
atcgctggcccggcgcacac

SEQ ID NO: 9697 - DNA, 20 bp, Artificial Sequence
  MKO10009697_A_Ceacam16
  gRNA
tgaaggatagctactcgttc

SEQ ID NO: 9698 - DNA, 20 bp, Artificial Sequence
  MKO10009698_A_Ceacam16
  gRNA
tctgccagttgccgtccgct

SEQ ID NO: 9699 - DNA, 20 bp, Artificial Sequence
  MKO10009699_A_Ceacam18
  gRNA
taaccgcatgacgatttccc

SEQ ID NO: 9700 - DNA, 20 bp, Artificial Sequence
  MKO10009700_A_Ceacam18
  gRNA
tgcttaggaaggagccgtta

SEQ ID NO: 9701 - DNA, 20 bp, Artificial Sequence
  MKO10009701_A_Ceacam18
  gRNA
cacataccaactgatgttcg

SEQ ID NO: 9702 - DNA, 20 bp, Artificial Sequence
  MKO10009702_A_Ceacam19
  gRNA
atcactcctaggtgcacgcg

SEQ ID NO: 9703 - DNA, 20 bp, Artificial Sequence
  MKO10009703_A_Ceacam19
  gRNA
atgtcctggtcactcgaagc

SEQ ID NO: 9704 - DNA, 20 bp, Artificial Sequence
  MKO10009704_A_Ceacam19
  gRNA
agctacatggacgttaatct

SEQ ID NO: 9705 - DNA, 20 bp, Artificial Sequence
  MKO10009705_A_Ceacam1
  gRNA
tccaatgtcattcgacaagc

SEQ ID NO: 9706 - DNA, 20 bp, Artificial Sequence
  MKO10009706_A_Ceacam1
  gRNA
tgaaaactatcgtcgtactc

SEQ ID NO: 9707 - DNA, 20 bp, Artificial Sequence
  MKO10009707_A_Ceacam1
  gRNA
atcgtgattggagttgtggc

SEQ ID NO: 9708 - DNA, 20 bp, Artificial Sequence
  MKO10009708_A_Ceacam20
  gRNA
gtcaccaacttgtcccgcct

SEQ ID NO: 9709 - DNA, 20 bp, Artificial Sequence
  MKO10009709_A_Ceacam20
  gRNA
tgttgctaagcaggtcggca

SEQ ID NO: 9710 - DNA, 20 bp, Artificial Sequence
  MKO10009710_A_Ceacam20
  gRNA
ctcacagttcaccgtcagcg

SEQ ID NO: 9711 - DNA, 20 bp, Artificial Sequence
  MKO10009711_A_Ceacam2
  gRNA
cagatcaaaactatcgtcgt

SEQ ID NO: 9712 - DNA, 20 bp, Artificial Sequence
  MKO10009712_A_Ceacam2
  gRNA
ttgacggtctttcgacaagc

SEQ ID NO: 9713 - DNA, 20 bp, Artificial Sequence
  MKO10009713_A_Ceacam2
  gRNA
gccggggtgattctaatagc

SEQ ID NO: 9714 - DNA, 20 bp, Artificial Sequence
  MKO10009714_A_Ceacam3
  gRNA
gtaaggattcgatgtcgact

SEQ ID NO: 9715 - DNA, 20 bp, Artificial Sequence
  MKO10009715_A_Ceacam3
  gRNA
gattgtgttcaagaatctcg

SEQ ID NO: 9716 - DNA, 20 bp, Artificial Sequence
  MKO10009716_A_Ceacam3
  gRNA
aactggatcgatcgtgagtg

SEQ ID NO: 9717 - DNA, 20 bp, Artificial Sequence
  MKO10009717_A_Ceacam5
  gRNA
catgtttatttatgattcgt

SEQ ID NO: 9718 - DNA, 20 bp, Artificial Sequence
  MKO10009718_A_Ceacam5
  gRNA
acccagcacagtaactttag

SEQ ID NO: 9719 - DNA, 20 bp, Artificial Sequence
  MKO10009719_A_Ceacam5
  gRNA
gtgataacaagtcaaaagat

SEQ ID NO: 9720 - DNA, 20 bp, Artificial Sequence
  MKO10009720_A_Ceacam9
  gRNA
gtttccgccttcggcaacca

SEQ ID NO: 9721 - DNA, 20 bp, Artificial Sequence
  MKO10009721_A_Ceacam9
  gRNA
cgaagagctacgaagtcgca

SEQ ID NO: 9722 - DNA, 20 bp, Artificial Sequence
  MKO10009722_A_Ceacam9
  gRNA
catcttagagctgtagccgt

SEQ ID NO: 9723 - DNA, 20 bp, Artificial Sequence
  MKO10009723_A_Cebpa
  gRNA
ggagtcggccgacttctacg

SEQ ID NO: 9724 - DNA, 20 bp, Artificial Sequence
  MKO10009724_A_Cebpa
  gRNA
gcacgcgtctcccgcgcacc

SEQ ID NO: 9725 - DNA, 20 bp, Artificial Sequence
  MKO10009725_A_Cebpa
  gRNA
gcgccccgacgcgctcgtac

SEQ ID NO: 9726 - DNA, 20 bp, Artificial Sequence
  MKO10009726_A_Cebpb
  gRNA
cgcgttcatgcaccgcctgc

SEQ ID NO: 9727 - DNA, 20 bp, Artificial Sequence
  MKO10009727_A_Cebpb
  gRNA
gcgcagggcgaacgggaaac

SEQ ID NO: 9728 - DNA, 20 bp, Artificial Sequence
  MKO10009728_A_Cebpb
  gRNA
cggcttggcgccgtagtcgt

SEQ ID NO: 9729 - DNA, 20 bp, Artificial Sequence
  MKO10009729_A_Cebpd
  gRNA
cgctcaagcgcgaacccgac

SEQ ID NO: 9730 - DNA, 20 bp, Artificial Sequence
  MKO10009730_A_Cebpd
  gRNA
cgagaagctgcatcagcgcg

SEQ ID NO: 9731 - DNA, 20 bp, Artificial Sequence
  MKO10009731_A_Cebpd
  gRNA
cgccgactgccggtaacgcg

SEQ ID NO: 9732 - DNA, 20 bp, Artificial Sequence
  MKO10009732_A_Cebpe
  gRNA
tgttacgttcacgtcgcagt

SEQ ID NO: 9733 - DNA, 20 bp, Artificial Sequence
  MKO10009733_A_Cebpe
  gRNA
gcgaatggccgagggtcagc

SEQ ID NO: 9734 - DNA, 20 bp, Artificial Sequence
  MKO10009734_A_Cebpe
  gRNA
ctctccgcctacatcgagtc

SEQ ID NO: 9735 - DNA, 20 bp, Artificial Sequence
  MKO10009735_A_Cebpg
  gRNA
ttcgtcactattccgatcca

SEQ ID NO: 9736 - DNA, 20 bp, Artificial Sequence
  MKO10009736_A_Cebpg
  gRNA
tattgttccgctctctgcgc

SEQ ID NO: 9737 - DNA, 20 bp, Artificial Sequence
  MKO10009737_A_Cebpg
  gRNA
cgctgtagtttccgtgctga

SEQ ID NO: 9738 - DNA, 20 bp, Artificial Sequence
  MKO10009738_A_Cebpz
  gRNA
cgaagaaaacttcgttgacg

SEQ ID NO: 9739 - DNA, 20 bp, Artificial Sequence
  MKO10009739_A_Cebpz
  gRNA
ttgtacttggacacgacatc

SEQ ID NO: 9740 - DNA, 20 bp, Artificial Sequence
  MKO10009740_A_Cebpz
  gRNA
accattgacgaccttcaaca

SEQ ID NO: 9741 - DNA, 20 bp, Artificial Sequence
  MKO10009741_A_Cecr2
  gRNA
atctctactcgagtacgcag

SEQ ID NO: 9742 - DNA, 20 bp, Artificial Sequence
  MKO10009742_A_Cecr2
  gRNA
aagatatcattaactaccgt

SEQ ID NO: 9743 - DNA, 20 bp, Artificial Sequence
  MKO10009743_A_Cecr2
  gRNA
tccaaagcgaaaaaagctac

SEQ ID NO: 9744 - DNA, 20 bp, Artificial Sequence
  MKO10009744_A_Cecr5
  gRNA
acatggtggaccttcagcgg

SEQ ID NO: 9745 - DNA, 20 bp, Artificial Sequence
  MKO10009745_A_Cecr5
  gRNA
tcgtagcgttctcccacctt

SEQ ID NO: 9746 - DNA, 20 bp, Artificial Sequence
  MKO10009746_A_Cecr5
  gRNA
acgctctggcgttctccacc

SEQ ID NO: 9747 - DNA, 20 bp, Artificial Sequence
  MKO10009747_A_Cecr6
  gRNA
ttggatcgccaccgacctcg

SEQ ID NO: 9748 - DNA, 20 bp, Artificial Sequence
  MKO10009748_A_Cecr6
  gRNA
gggcgcgcccgcctcgctaa

SEQ ID NO: 9749 - DNA, 20 bp, Artificial Sequence
  MKO10009749_A_Cecr6
  gRNA
cctagtgcgtgccattagcg

SEQ ID NO: 9750 - DNA, 20 bp, Artificial Sequence
  MKO10009750_A_Cela1
  gRNA
tccggaaactgacgcccgcg

SEQ ID NO: 9751 - DNA, 20 bp, Artificial Sequence
  MKO10009751_A_Cela1
  gRNA
gacaaccactcgataagtca

SEQ ID NO: 9752 - DNA, 20 bp, Artificial Sequence
  MKO10009752_A_Cela1
  gRNA
gcaccctcatccgaagcaac

SEQ ID NO: 9753 - DNA, 20 bp, Artificial Sequence
  MKO10009753_A_Cela2a
  gRNA
catacccattgccgacgttt

SEQ ID NO: 9754 - DNA, 20 bp, Artificial Sequence
  MKO10009754_A_Cela2a
  gRNA
aggtggaactcccaaaacgt

SEQ ID NO: 9755 - DNA, 20 bp, Artificial Sequence
  MKO10009755_A_Cela2a
  gRNA
gtaccccacttatgaggtgg

SEQ ID NO: 9756 - DNA, 20 bp, Artificial Sequence
  MKO10009756_A_Cela3b
  gRNA
caggacttctcgcacctacc

SEQ ID NO: 9757 - DNA, 20 bp, Artificial Sequence
  MKO10009757_A_Cela3b
  gRNA
gtggaactcacgagatgcag

SEQ ID NO: 9758 - DNA, 20 bp, Artificial Sequence
  MKO10009758_A_Cela3b
  gRNA
ccccagcaatgacatcgccc

SEQ ID NO: 9759 - DNA, 20 bp, Artificial Sequence
  MKO10009759_A_Celf1
  gRNA
ttgaagagtgccggatattg

SEQ ID NO: 9760 - DNA, 20 bp, Artificial Sequence
  MKO10009760_A_Celf1
  gRNA
ccacctctgctcaagccatc

SEQ ID NO: 9761 - DNA, 20 bp, Artificial Sequence
  MKO10009761_A_Celf1
  gRNA
cagggaggaccttcatgtta

SEQ ID NO: 9762 - DNA, 20 bp, Artificial Sequence
  MKO10009762_A_Celf2
  gRNA
cattcttctatctgaccgaa

SEQ ID NO: 9763 - DNA, 20 bp, Artificial Sequence
  MKO10009763_A_Celf2
  gRNA
tagaagaatgccggattctc

SEQ ID NO: 9764 - DNA, 20 bp, Artificial Sequence
  MKO10009764_A_Celf2
  gRNA
tctaccagatcaacgtcctc

SEQ ID NO: 9765 - DNA, 20 bp, Artificial Sequence
  MKO10009765_A_Celf3
  gRNA
aatcgcgagcacagtacgtc

SEQ ID NO: 9766 - DNA, 20 bp, Artificial Sequence
  MKO10009766_A_Celf3
  gRNA
tggggctcaccggtagggtc

SEQ ID NO: 9767 - DNA, 20 bp, Artificial Sequence
  MKO10009767_A_Celf3
  gRNA
ggagagtcttctgttcgtgc

SEQ ID NO: 9768 - DNA, 20 bp, Artificial Sequence
  MKO10009768_A_Celf4
  gRNA
cgacgtgcgccgcctcttcg

SEQ ID NO: 9769 - DNA, 20 bp, Artificial Sequence
  MKO10009769_A_Celf4
  gRNA
agcctgtccgtttgctaacg

SEQ ID NO: 9770 - DNA, 20 bp, Artificial Sequence
  MKO10009770_A_Celf4
  gRNA
gcacccttgctgttgccgtc

SEQ ID NO: 9771 - DNA, 20 bp, Artificial Sequence
  MKO10009771_A_Celf5
  gRNA
gcactcgtctatgacgccaa

SEQ ID NO: 9772 - DNA, 20 bp, Artificial Sequence
  MKO10009772_A_Celf5
  gRNA
acagatggcgcggccgatcc

SEQ ID NO: 9773 - DNA, 20 bp, Artificial Sequence
  MKO10009773_A_Celf5
  gRNA
ccggcagacagtgaaagccg

SEQ ID NO: 9774 - DNA, 20 bp, Artificial Sequence
  MKO10009774_A_Celf6
  gRNA
acacggtagccggacaatga

SEQ ID NO: 9775 - DNA, 20 bp, Artificial Sequence
  MKO10009775_A_Celf6
  gRNA
ggacagtgcactcctcgata

SEQ ID NO: 9776 - DNA, 20 bp, Artificial Sequence
  MKO10009776_A_Celf6
  gRNA
agtccggacggtaccagtaa

SEQ ID NO: 9777 - DNA, 20 bp, Artificial Sequence
  MKO10009777_A_Celsr1
  gRNA
ggcctgagcgaacgttcacc

SEQ ID NO: 9778 - DNA, 20 bp, Artificial Sequence
  MKO10009778_A_Celsr1
  gRNA
ctttgctactccaatccgtg

SEQ ID NO: 9779 - DNA, 20 bp, Artificial Sequence
  MKO10009779_A_Celsr1
  gRNA
tgaagtggaagcgttgccgc

SEQ ID NO: 9780 - DNA, 20 bp, Artificial Sequence
  MKO10009780_A_Celsr2
  gRNA
gagcacgcgctgcgccgaga

SEQ ID NO: 9781 - DNA, 20 bp, Artificial Sequence
  MKO10009781_A_Celsr2
  gRNA
cagtagcccgttacgctcct

SEQ ID NO: 9782 - DNA, 20 bp, Artificial Sequence
  MKO10009782_A_Celsr2
  gRNA
acatcgcatgtaattctcgc

SEQ ID NO: 9783 - DNA, 20 bp, Artificial Sequence
  MKO10009783_A_Celsr3
  gRNA
cccgacttaccggtgaagcg

SEQ ID NO: 9784 - DNA, 20 bp, Artificial Sequence
  MKO10009784_A_Celsr3
  gRNA
cacgcgccgccattgcgaca

SEQ ID NO: 9785 - DNA, 20 bp, Artificial Sequence
  MKO10009785_A_Celsr3
  gRNA
ggaagcgctgtcgaaggccg

SEQ ID NO: 9786 - DNA, 20 bp, Artificial Sequence
  MKO10009786_A_Cel
  gRNA
cacaatgacgttgccccgag

SEQ ID NO: 9787 - DNA, 20 bp, Artificial Sequence
  MKO10009787_A_Cel
  gRNA
cgatctcctccccgtcatac

SEQ ID NO: 9788 - DNA, 20 bp, Artificial Sequence
  MKO10009788_A_Cel
  gRNA
gttatcagggtcccccccaa

SEQ ID NO: 9789 - DNA, 20 bp, Artificial Sequence
  MKO10009789_A_Cend1
  gRNA
ggtgtcttcttcgtagcggc

SEQ ID NO: 9790 - DNA, 20 bp, Artificial Sequence
  MKO10009790_A_Cend1
  gRNA
gctgggggctgccggcactg

SEQ ID NO: 9791 - DNA, 20 bp, Artificial Sequence
  MKO10009791_A_Cend1
  gRNA
aaaaccatcatggaatcccg

SEQ ID NO: 9792 - DNA, 20 bp, Artificial Sequence
  MKO10009792_A_Cenpa
  gRNA
cggtttgcgacgcgggccca

SEQ ID NO: 9793 - DNA, 20 bp, Artificial Sequence
  MKO10009793_A_Cenpa
  gRNA
cgtgacccgaccagcatgta

SEQ ID NO: 9794 - DNA, 20 bp, Artificial Sequence
  MKO10009794_A_Cenpa
  gRNA
tacactggagctctgtcgcg

SEQ ID NO: 9795 - DNA, 20 bp, Artificial Sequence
  MKO10009795_A_Cenpb
  gRNA
cgtacttgcgctccgacgcc

SEQ ID NO: 9796 - DNA, 20 bp, Artificial Sequence
  MKO10009796_A_Cenpb
  gRNA
gcgcgatctcgcccttgcgt

SEQ ID NO: 9797 - DNA, 20 bp, Artificial Sequence
  MKO10009797_A_Cenpb
  gRNA
gtcggagcgcaagtacggag

SEQ ID NO: 9798 - DNA, 20 bp, Artificial Sequence
  MKO10009798_A_Cenpc1
  gRNA
gcagagcccagtgaagccgc

SEQ ID NO: 9799 - DNA, 20 bp, Artificial Sequence
  MKO10009799_A_Cenpc1
  gRNA
ataccaacctgatccaccag

SEQ ID NO: 9800 - DNA, 20 bp, Artificial Sequence
  MKO10009800_A_Cenpc1
  gRNA
actaccacagaagatattgc

SEQ ID NO: 9801 - DNA, 20 bp, Artificial Sequence
  MKO10009801_A_Cenpe
  gRNA
gtgtcttcccgaattatcaa

SEQ ID NO: 9802 - DNA, 20 bp, Artificial Sequence
  MKO10009802_A_Cenpe
  gRNA
atcatcagctccgccataca

SEQ ID NO: 9803 - DNA, 20 bp, Artificial Sequence
  MKO10009803_A_Cenpe
  gRNA
acaggtactatatttgccta

SEQ ID NO: 9804 - DNA, 20 bp, Artificial Sequence
  MKO10009804_A_Cenpf
  gRNA
gatggagatatgcgaacatt

SEQ ID NO: 9805 - DNA, 20 bp, Artificial Sequence
  MKO10009805_A_Cenpf
  gRNA
caatactgactcggtgtgag

SEQ ID NO: 9806 - DNA, 20 bp, Artificial Sequence
  MKO10009806_A_Cenpf
  gRNA
ctgccgattgtgcaacttgt

SEQ ID NO: 9807 - DNA, 20 bp, Artificial Sequence
  MKO10009807_A_Cenph
  gRNA
tgacttacttgtgtcgatca

SEQ ID NO: 9808 - DNA, 20 bp, Artificial Sequence
  MKO10009808_A_Cenph
  gRNA
tgaaaagtcttgcactgagc

SEQ ID NO: 9809 - DNA, 20 bp, Artificial Sequence
  MKO10009809_A_Cenph
  gRNA
tgaaactttcagttgcactt

SEQ ID NO: 9810 - DNA, 20 bp, Artificial Sequence
  MKO10009810_A_Cenpi
  gRNA
ccgtgcttaaagcagtatcc

SEQ ID NO: 9811 - DNA, 20 bp, Artificial Sequence
  MKO10009811_A_Cenpi
  gRNA
tataacaaatggcaaacgta

SEQ ID NO: 9812 - DNA, 20 bp, Artificial Sequence
  MKO10009812_A_Cenpi
  gRNA
ttacttagtgaagctttctt

SEQ ID NO: 9813 - DNA, 20 bp, Artificial Sequence
  MKO10009813_A_Cenpj
  gRNA
tctgcacagcacgcgtttcc

SEQ ID NO: 9814 - DNA, 20 bp, Artificial Sequence
  MKO10009814_A_Cenpj
  gRNA
ctccgggagagcgatgcttc

SEQ ID NO: 9815 - DNA, 20 bp, Artificial Sequence
  MKO10009815_A_Cenpj
  gRNA
gggaaggtgctttgccacgt

SEQ ID NO: 9816 - DNA, 20 bp, Artificial Sequence
  MKO10009816_A_Cenpk
  gRNA
actcacgaatgcagatgctc

SEQ ID NO: 9817 - DNA, 20 bp, Artificial Sequence
  MKO10009817_A_Cenpk
  gRNA
cagaataaattatcacttat

SEQ ID NO: 9818 - DNA, 20 bp, Artificial Sequence
  MKO10009818_A_Cenpk
  gRNA
aaatgtttgactgctgaact

SEQ ID NO: 9819 - DNA, 20 bp, Artificial Sequence
  MKO10009819_A_Cenpl
  gRNA
tgagacacgaaccaatcttg

SEQ ID NO: 9820 - DNA, 20 bp, Artificial Sequence
  MKO10009820_A_Cenpl
  gRNA
agtcagtcctcgaaaatcac

SEQ ID NO: 9821 - DNA, 20 bp, Artificial Sequence
  MKO10009821_A_Cenpl
  gRNA
attcagtagtagccatataa

SEQ ID NO: 9822 - DNA, 20 bp, Artificial Sequence
  MKO10009822_A_Cenpm
  gRNA
atgactgtgcgtccgagctg

SEQ ID NO: 9823 - DNA, 20 bp, Artificial Sequence
  MKO10009823_A_Cenpm
  gRNA
acaagctgcccgacctgaac

SEQ ID NO: 9824 - DNA, 20 bp, Artificial Sequence
  MKO10009824_A_Cenpm
  gRNA
ccgctgagatgtcggtgctg

SEQ ID NO: 9825 - DNA, 20 bp, Artificial Sequence
  MKO10009825_A_Cenpn
  gRNA
ggataatacaccacgaacgt

SEQ ID NO: 9826 - DNA, 20 bp, Artificial Sequence
  MKO10009826_A_Cenpn
  gRNA
ccagtacaagcccacgttcg

SEQ ID NO: 9827 - DNA, 20 bp, Artificial Sequence
  MKO10009827_A_Cenpn
  gRNA
gcgtgcaagtcttgatgacg

SEQ ID NO: 9828 - DNA, 20 bp, Artificial Sequence
  MKO10009828_A_Cenpo
  gRNA
ttgccgcagttctcgaatct

SEQ ID NO: 9829 - DNA, 20 bp, Artificial Sequence
  MKO10009829_A_Cenpo
  gRNA
tctggaggcatatcgcttta

SEQ ID NO: 9830 - DNA, 20 bp, Artificial Sequence
  MKO10009830_A_Cenpo
  gRNA
gaatacctaaatgcctacgc

SEQ ID NO: 9831 - DNA, 20 bp, Artificial Sequence
  MKO10009831_A_Cenpp
  gRNA
cccactcctcagaatctgat

SEQ ID NO: 9832 - DNA, 20 bp, Artificial Sequence
  MKO10009832_A_Cenpp
  gRNA
ctacagaaacacagattatc

SEQ ID NO: 9833 - DNA, 20 bp, Artificial Sequence
  MKO10009833_A_Cenpp
  gRNA
gtttacaatgtcttccatct

SEQ ID NO: 9834 - DNA, 20 bp, Artificial Sequence
  MKO10009834_A_Cenpq
  gRNA
caacgtatgttcatctaaaa

SEQ ID NO: 9835 - DNA, 20 bp, Artificial Sequence
  MKO10009835_A_Cenpq
  gRNA
ggcatacctgcagtgaagcc

SEQ ID NO: 9836 - DNA, 20 bp, Artificial Sequence
  MKO10009836_A_Cenpq
  gRNA
gcaaagcatctgtcctctaa

SEQ ID NO: 9837 - DNA, 20 bp, Artificial Sequence
  MKO10009837_A_Cenpt
  gRNA
ggcagatcgactcgtgttca

SEQ ID NO: 9838 - DNA, 20 bp, Artificial Sequence
  MKO10009838_A_Cenpt
  gRNA
ctcaaacgccatactctaac

SEQ ID NO: 9839 - DNA, 20 bp, Artificial Sequence
  MKO10009839_A_Cenpt
  gRNA
gccacttctggtacttgtgc

SEQ ID NO: 9840 - DNA, 20 bp, Artificial Sequence
  MKO10009840_A_Cenpu
  gRNA
tagatagccgtactgtgcag

SEQ ID NO: 9841 - DNA, 20 bp, Artificial Sequence
  MKO10009841_A_Cenpu
  gRNA
gaggagacttacgaaacctt

SEQ ID NO: 9842 - DNA, 20 bp, Artificial Sequence
  MKO10009842_A_Cenpu
  gRNA
ttctgatgcctcaagcatac

SEQ ID NO: 9843 - DNA, 20 bp, Artificial Sequence
  MKO10009843_A_Cenpv
  gRNA
agcgcggagtatagaagctc

SEQ ID NO: 9844 - DNA, 20 bp, Artificial Sequence
  MKO10009844_A_Cenpv
  gRNA
tatactccgcgctccaaccc

SEQ ID NO: 9845 - DNA, 20 bp, Artificial Sequence
  MKO10009845_A_Cenpv
  gRNA
aggagtttgaaccgagaagc

SEQ ID NO: 9846 - DNA, 20 bp, Artificial Sequence
  MKO10009846_A_Cenpw
  gRNA
ctttacccgcctagtgactg

SEQ ID NO: 9847 - DNA, 20 bp, Artificial Sequence
  MKO10009847_A_Cenpw
  gRNA
tcatgtactggctgcaggaa

SEQ ID NO: 9848 - DNA, 20 bp, Artificial Sequence
  MKO10009848_A_Cenpw
  gRNA
ggggaggtgctgcgacctcc

SEQ ID NO: 9849 - DNA, 20 bp, Artificial Sequence
  MKO10009849_A_Cep104
  gRNA
ctttgctagagatcatgtac

SEQ ID NO: 9850 - DNA, 20 bp, Artificial Sequence
  MKO10009850_A_Cep104
  gRNA
gtcgatcagcttctccctag

SEQ ID NO: 9851 - DNA, 20 bp, Artificial Sequence
  MKO10009851_A_Cep104
  gRNA
gccctagatggaactttctc

SEQ ID NO: 9852 - DNA, 20 bp, Artificial Sequence
  MKO10009852_A_Cep110
  gRNA
cagctcgtgtagacgagcta

SEQ ID NO: 9853 - DNA, 20 bp, Artificial Sequence
  MKO10009853_A_Cep110
  gRNA
aaaactcctaaggcgtactc

SEQ ID NO: 9854 - DNA, 20 bp, Artificial Sequence
  MKO10009854_A_Cep110
  gRNA
gagcttcgtttgctgctatc

SEQ ID NO: 9855 - DNA, 20 bp, Artificial Sequence
  MKO10009855_A_Cep112
  gRNA
actagaaacccgctctcatc

SEQ ID NO: 9856 - DNA, 20 bp, Artificial Sequence
  MKO10009856_A_Cep112
  gRNA
agttcttgtcttagagacgc

SEQ ID NO: 9857 - DNA, 20 bp, Artificial Sequence
  MKO10009857_A_Cep112
  gRNA
catatcctccctaaagtcac

SEQ ID NO: 9858 - DNA, 20 bp, Artificial Sequence
  MKO10009858_A_Cep120
  gRNA
acgtccaaagcatctgctcg

SEQ ID NO: 9859 - DNA, 20 bp, Artificial Sequence
  MKO10009859_A_Cep120
  gRNA
gctccgctggtccaatctga

SEQ ID NO: 9860 - DNA, 20 bp, Artificial Sequence
  MKO10009860_A_Cep120
  gRNA
ttgtcgtgcaggctcccaaa

SEQ ID NO: 9861 - DNA, 20 bp, Artificial Sequence
  MKO10009861_A_Cep128
  gRNA
cacatgtcgcagattccgag

SEQ ID NO: 9862 - DNA, 20 bp, Artificial Sequence
  MKO10009862_A_Cep128
  gRNA
cgctatcgcgaatacagcac

SEQ ID NO: 9863 - DNA, 20 bp, Artificial Sequence
  MKO10009863_A_Cep128
  gRNA
ccgcgacctcagcagtgaac

SEQ ID NO: 9864 - DNA, 20 bp, Artificial Sequence
  MKO10009864_A_Cep135
  gRNA
ggctttctgtcgtatgaacg

SEQ ID NO: 9865 - DNA, 20 bp, Artificial Sequence
  MKO10009865_A_Cep135
  gRNA
gttcatcgatttgcatccgc

SEQ ID NO: 9866 - DNA, 20 bp, Artificial Sequence
  MKO10009866_A_Cep135
  gRNA
ctcagaagtcagcgcatacc

SEQ ID NO: 9867 - DNA, 20 bp, Artificial Sequence
  MKO10009867_A_Cep152
  gRNA
tgcttcgaaccgccggtgta

SEQ ID NO: 9868 - DNA, 20 bp, Artificial Sequence
  MKO10009868_A_Cep152
  gRNA
atacaccggcggttcgaagc

SEQ ID NO: 9869 - DNA, 20 bp, Artificial Sequence
  MKO10009869_A_Cep152
  gRNA
tcatcgtccagcatgtcgtg

SEQ ID NO: 9870 - DNA, 20 bp, Artificial Sequence
  MKO10009870_A_Cep164
  gRNA
tttcgatagtgctcgtcaca

SEQ ID NO: 9871 - DNA, 20 bp, Artificial Sequence
  MKO10009871_A_Cep164
  gRNA
ctgcgacccacgaagagcag

SEQ ID NO: 9872 - DNA, 20 bp, Artificial Sequence
  MKO10009872_A_Cep164
  gRNA
tgacgagcactatcgaaagt

SEQ ID NO: 9873 - DNA, 20 bp, Artificial Sequence
  MKO10009873_A_Cep170b
  gRNA
ttccctccagtcccgtagtg

SEQ ID NO: 9874 - DNA, 20 bp, Artificial Sequence
  MKO10009874_A_Cep170b
  gRNA
ctcaatgacgtcatccgctt

SEQ ID NO: 9875 - DNA, 20 bp, Artificial Sequence
  MKO10009875_A_Cep170b
  gRNA
tcaaggtctctgcgcccaag

SEQ ID NO: 9876 - DNA, 20 bp, Artificial Sequence
  MKO10009876_A_Cep170
  gRNA
aaagtgatgtacgtctgctc

SEQ ID NO: 9877 - DNA, 20 bp, Artificial Sequence
  MKO10009877_A_Cep170
  gRNA
aatctcttcactgtagtacg

SEQ ID NO: 9878 - DNA, 20 bp, Artificial Sequence
  MKO10009878_A_Cep170
  gRNA
aatcaattatgatgcatcta

SEQ ID NO: 9879 - DNA, 20 bp, Artificial Sequence
  MKO10009879_A_Cep192
  gRNA
agctaacgctgcgtctgttc

SEQ ID NO: 9880 - DNA, 20 bp, Artificial Sequence
  MKO10009880_A_Cep192
  gRNA
tcgaaatgcttcttaggatc

SEQ ID NO: 9881 - DNA, 20 bp, Artificial Sequence
  MKO10009881_A_Cep192
  gRNA
cttcaattaagtatgattcc

SEQ ID NO: 9882 - DNA, 20 bp, Artificial Sequence
  MKO10009882_A_Cep19
  gRNA
ggaaacgaccatcgatcccg

SEQ ID NO: 9883 - DNA, 20 bp, Artificial Sequence
  MKO10009883_A_Cep19
  gRNA
ctcgacgtcgtacacaaaag

SEQ ID NO: 9884 - DNA, 20 bp, Artificial Sequence
  MKO10009884_A_Cep19
  gRNA
gaacctaactccacatttct

SEQ ID NO: 9885 - DNA, 20 bp, Artificial Sequence
  MKO10009885_A_Cep250
  gRNA
agagacaagcaaccctcgtg

SEQ ID NO: 9886 - DNA, 20 bp, Artificial Sequence
  MKO10009886_A_Cep250
  gRNA
aggggctgatccctcagcgc

SEQ ID NO: 9887 - DNA, 20 bp, Artificial Sequence
  MKO10009887_A_Cep250
  gRNA
acagttgctgatccgattgg

SEQ ID NO: 9888 - DNA, 20 bp, Artificial Sequence
  MKO10009888_A_Cep290
  gRNA
cgctttggaagaagttgaaa

SEQ ID NO: 9889 - DNA, 20 bp, Artificial Sequence
  MKO10009889_A_Cep290
  gRNA
tacaaaccttcattagagac

SEQ ID NO: 9890 - DNA, 20 bp, Artificial Sequence
  MKO10009890_A_Cep290
  gRNA
taatgttcagatgaaagccc

SEQ ID NO: 9891 - DNA, 20 bp, Artificial Sequence
  MKO10009891_A_Cep350
  gRNA
actcggtgacaacgaaagtc

SEQ ID NO: 9892 - DNA, 20 bp, Artificial Sequence
  MKO10009892_A_Cep350
  gRNA
agaaatcccgtagtcctctc

SEQ ID NO: 9893 - DNA, 20 bp, Artificial Sequence
  MKO10009893_A_Cep350
  gRNA
gtgctacccgaaaaataagt

SEQ ID NO: 9894 - DNA, 20 bp, Artificial Sequence
  MKO10009894_A_Cep41
  gRNA
tcccattaccttcgagcctt

SEQ ID NO: 9895 - DNA, 20 bp, Artificial Sequence
  MKO10009895_A_Cep41
  gRNA
gacttgacatgttgatacct

SEQ ID NO: 9896 - DNA, 20 bp, Artificial Sequence
  MKO10009896_A_Cep41
  gRNA
acttaccagctgggcaaaag

SEQ ID NO: 9897 - DNA, 20 bp, Artificial Sequence
  MKO10009897_A_Cep44
  gRNA
ttacgtagccgaactcctaa

SEQ ID NO: 9898 - DNA, 20 bp, Artificial Sequence
  MKO10009898_A_Cep44
  gRNA
caaccttctcgtcagtgtac

SEQ ID NO: 9899 - DNA, 20 bp, Artificial Sequence
  MKO10009899_A_Cep44
  gRNA
attaggagttcggctacgta

SEQ ID NO: 9900 - DNA, 20 bp, Artificial Sequence
  MKO10009900_A_Cep55
  gRNA
tttagcaaagatcttcgagc

SEQ ID NO: 9901 - DNA, 20 bp, Artificial Sequence
  MKO10009901_A_Cep55
  gRNA
tgctaaaagccctttaacgt

SEQ ID NO: 9902 - DNA, 20 bp, Artificial Sequence
  MKO10009902_A_Cep55
  gRNA
ttcttcattgttcgagcagc

SEQ ID NO: 9903 - DNA, 20 bp, Artificial Sequence
  MKO10009903_A_Cep57l1
  gRNA
aaagattcgtcgtctcgagc

SEQ ID NO: 9904 - DNA, 20 bp, Artificial Sequence
  MKO10009904_A_Cep57l1
  gRNA
ctagaagaatacaacgagac

SEQ ID NO: 9905 - DNA, 20 bp, Artificial Sequence
  MKO10009905_A_Cep57l1
  gRNA
ttcagcattaaaaactctcc

SEQ ID NO: 9906 - DNA, 20 bp, Artificial Sequence
  MKO10009906_A_Cep57
  gRNA
tcaagataagattcgacgcc

SEQ ID NO: 9907 - DNA, 20 bp, Artificial Sequence
  MKO10009907_A_Cep57
  gRNA
gcgtcctagctgaaccatca

SEQ ID NO: 9908 - DNA, 20 bp, Artificial Sequence
  MKO10009908_A_Cep57
  gRNA
tcaggtggatacaatacata

SEQ ID NO: 9909 - DNA, 20 bp, Artificial Sequence
  MKO10009909_A_Cep63
  gRNA
gagccttcagctcccgatca

SEQ ID NO: 9910 - DNA, 20 bp, Artificial Sequence
  MKO10009910_A_Cep63
  gRNA
catccgtgatcgggagctga

SEQ ID NO: 9911 - DNA, 20 bp, Artificial Sequence
  MKO10009911_A_Cep63
  gRNA
atacaaaatcgggggcatag

SEQ ID NO: 9912 - DNA, 20 bp, Artificial Sequence
  MKO10009912_A_Cep68
  gRNA
gagagtcatgtcttaagcgc

SEQ ID NO: 9913 - DNA, 20 bp, Artificial Sequence
  MKO10009913_A_Cep68
  gRNA
ctctaggggttgatgcaagc

SEQ ID NO: 9914 - DNA, 20 bp, Artificial Sequence
  MKO10009914_A_Cep68
  gRNA
gtccctgacagagagcgtct

SEQ ID NO: 9915 - DNA, 20 bp, Artificial Sequence
  MKO10009915_A_Cep70
  gRNA
tcagctagaacagaaccgag

SEQ ID NO: 9916 - DNA, 20 bp, Artificial Sequence
  MKO10009916_A_Cep70
  gRNA
tccagtagcctctaaagccc

SEQ ID NO: 9917 - DNA, 20 bp, Artificial Sequence
  MKO10009917_A_Cep70
  gRNA
tcatgagtctgtttgataaa

SEQ ID NO: 9918 - DNA, 20 bp, Artificial Sequence
  MKO10009918_A_Cep72
  gRNA
ggtgcgcaccttgggcataa

SEQ ID NO: 9919 - DNA, 20 bp, Artificial Sequence
  MKO10009919_A_Cep72
  gRNA
ttctcaaccactttaaccgt

SEQ ID NO: 9920 - DNA, 20 bp, Artificial Sequence
  MKO10009920_A_Cep72
  gRNA
ccacctagctgtcggagctt

SEQ ID NO: 9921 - DNA, 20 bp, Artificial Sequence
  MKO10009921_A_Cep76
  gRNA
caggtttggagcgaaatcgt

SEQ ID NO: 9922 - DNA, 20 bp, Artificial Sequence
  MKO10009922_A_Cep76
  gRNA
atcaaagctctaagacgtcg

SEQ ID NO: 9923 - DNA, 20 bp, Artificial Sequence
  MKO10009923_A_Cep76
  gRNA
cttcaagcaaaaagccgtca

SEQ ID NO: 9924 - DNA, 20 bp, Artificial Sequence
  MKO10009924_A_Cep78
  gRNA
gggcggagagcctccgctac

SEQ ID NO: 9925 - DNA, 20 bp, Artificial Sequence
  MKO10009925_A_Cep78
  gRNA
gtagcggaggctctccgccc

SEQ ID NO: 9926 - DNA, 20 bp, Artificial Sequence
  MKO10009926_A_Cep78
  gRNA
ctcaagaccgtcaactttac

SEQ ID NO: 9927 - DNA, 20 bp, Artificial Sequence
  MKO10009927_A_Cep85l
  gRNA
ctcgtacgtgagtaatttac

SEQ ID NO: 9928 - DNA, 20 bp, Artificial Sequence
  MKO10009928_A_Cep85l
  gRNA
ttgcatacccgcaagagctg

SEQ ID NO: 9929 - DNA, 20 bp, Artificial Sequence
  MKO10009929_A_Cep85l
  gRNA
gctcagattattcgtcagca

SEQ ID NO: 9930 - DNA, 20 bp, Artificial Sequence
  MKO10009930_A_Cep85
  gRNA
tgagtataacgtctctagca

SEQ ID NO: 9931 - DNA, 20 bp, Artificial Sequence
  MKO10009931_A_Cep85
  gRNA
cagtacttgtcgacagcagt

SEQ ID NO: 9932 - DNA, 20 bp, Artificial Sequence
  MKO10009932_A_Cep85
  gRNA
ggagatgctcgttactgttc

SEQ ID NO: 9933 - DNA, 20 bp, Artificial Sequence
  MKO10009933_A_Cep89
  gRNA
cccgtagcctaacatctcaa

SEQ ID NO: 9934 - DNA, 20 bp, Artificial Sequence
  MKO10009934_A_Cep89
  gRNA
cactctcagaccgagatctc

SEQ ID NO: 9935 - DNA, 20 bp, Artificial Sequence
  MKO10009935_A_Cep89
  gRNA
atgatgctcctcaaccagac

SEQ ID NO: 9936 - DNA, 20 bp, Artificial Sequence
  MKO10009936_A_Cep95
  gRNA
cgagtgaatcaattaccgct

SEQ ID NO: 9937 - DNA, 20 bp, Artificial Sequence
  MKO10009937_A_Cep95
  gRNA
actcgctttggattaccttc

SEQ ID NO: 9938 - DNA, 20 bp, Artificial Sequence
  MKO10009938_A_Cep95
  gRNA
cttgaagttcgtgtatcctc

SEQ ID NO: 9939 - DNA, 20 bp, Artificial Sequence
  MKO10009939_A_Cep97
  gRNA
atggcggtggcgcgagtcga

SEQ ID NO: 9940 - DNA, 20 bp, Artificial Sequence
  MKO10009940_A_Cep97
  gRNA
atttcgacacatcacctatc

SEQ ID NO: 9941 - DNA, 20 bp, Artificial Sequence
  MKO10009941_A_Cep97
  gRNA
gtcagtggctaacaatcgct

SEQ ID NO: 9942 - DNA, 20 bp, Artificial Sequence
  MKO10009942_A_Cept1
  gRNA
ggctgtgactcactatcgac

SEQ ID NO: 9943 - DNA, 20 bp, Artificial Sequence
  MKO10009943_A_Cept1
  gRNA
caccacctgtgaagattaca

SEQ ID NO: 9944 - DNA, 20 bp, Artificial Sequence
  MKO10009944_A_Cept1
  gRNA
gtttctggaacattgcgatt

SEQ ID NO: 9945 - DNA, 20 bp, Artificial Sequence
  MKO10009945_A_Cer1
  gRNA
ggcacggccacaaacagatc

SEQ ID NO: 9946 - DNA, 20 bp, Artificial Sequence
  MKO10009946_A_Cer1
  gRNA
cagaaagggcccggcgttcc

SEQ ID NO: 9947 - DNA, 20 bp, Artificial Sequence
  MKO10009947_A_Cer1
  gRNA
ttgcatcaccatcttgacca

SEQ ID NO: 9948 - DNA, 20 bp, Artificial Sequence
  MKO10009948_A_Cercam
  gRNA
ccagggctactatcgccgca

SEQ ID NO: 9949 - DNA, 20 bp, Artificial Sequence
  MKO10009949_A_Cercam
  gRNA
tactaagaaccgccagcgcc

SEQ ID NO: 9950 - DNA, 20 bp, Artificial Sequence
  MKO10009950_A_Cercam
  gRNA
gccggtggtggccccgatgc

SEQ ID NO: 9951 - DNA, 20 bp, Artificial Sequence
  MKO10009951_A_Cerkl
  gRNA
gactgcatcccgactctcgt

SEQ ID NO: 9952 - DNA, 20 bp, Artificial Sequence
  MKO10009952_A_Cerkl
  gRNA
cttgacgaatgtgaactccg

SEQ ID NO: 9953 - DNA, 20 bp, Artificial Sequence
  MKO10009953_A_Cerkl
  gRNA
ccaccttctcgtaatagacg

SEQ ID NO: 9954 - DNA, 20 bp, Artificial Sequence
  MKO10009954_A_Cerk
  gRNA
gtcggagatcatcgctgttg

SEQ ID NO: 9955 - DNA, 20 bp, Artificial Sequence
  MKO10009955_A_Cerk
  gRNA
agcgagtacgacatcaccgc

SEQ ID NO: 9956 - DNA, 20 bp, Artificial Sequence
  MKO10009956_A_Cerk
  gRNA
gatgtcgtactcgcttcaca

SEQ ID NO: 9957 - DNA, 20 bp, Artificial Sequence
  MKO10009957_A_Cers1
  gRNA
gcagacgacaccgcttggcc

SEQ ID NO: 9958 - DNA, 20 bp, Artificial Sequence
  MKO10009958_A_Cers1
  gRNA
gtggcgtacagaaccttgag

SEQ ID NO: 9959 - DNA, 20 bp, Artificial Sequence
  MKO10009959_A_Cers1
  gRNA
ggttctggttccgcctctac

SEQ ID NO: 9960 - DNA, 20 bp, Artificial Sequence
  MKO10009960_A_Cers2
  gRNA
ggcggaaccagcgttctacc

SEQ ID NO: 9961 - DNA, 20 bp, Artificial Sequence
  MKO10009961_A_Cers2
  gRNA
cattgggaggtgcccgcagt

SEQ ID NO: 9962 - DNA, 20 bp, Artificial Sequence
  MKO10009962_A_Cers2
  gRNA
gcccactctgccgtgacaaa

SEQ ID NO: 9963 - DNA, 20 bp, Artificial Sequence
  MKO10009963_A_Cers3
  gRNA
gtgtaacttgacagagcgcc

SEQ ID NO: 9964 - DNA, 20 bp, Artificial Sequence
  MKO10009964_A_Cers3
  gRNA
gccctgcttaccaagactcc

SEQ ID NO: 9965 - DNA, 20 bp, Artificial Sequence
  MKO10009965_A_Cers3
  gRNA
tctgacgaccattaaaagaa

SEQ ID NO: 9966 - DNA, 20 bp, Artificial Sequence
  MKO10009966_A_Cers4
  gRNA
gttgagtctgccgaagcgtg

SEQ ID NO: 9967 - DNA, 20 bp, Artificial Sequence
  MKO10009967_A_Cers4
  gRNA
gataaagcccaacccggtgc

SEQ ID NO: 9968 - DNA, 20 bp, Artificial Sequence
  MKO10009968_A_Cers4
  gRNA
aacgctggttcaggagacgt

SEQ ID NO: 9969 - DNA, 20 bp, Artificial Sequence
  MKO10009969_A_Cers5
  gRNA
tcacagaatttcgtgagcgt

SEQ ID NO: 9970 - DNA, 20 bp, Artificial Sequence
  MKO10009970_A_Cers5
  gRNA
ctggtacaactatccgtatc

SEQ ID NO: 9971 - DNA, 20 bp, Artificial Sequence
  MKO10009971_A_Cers5
  gRNA
gcttgtcctgattcctccga

SEQ ID NO: 9972 - DNA, 20 bp, Artificial Sequence
  MKO10009972_A_Cers6
  gRNA
ctggtataactacccttacc

SEQ ID NO: 9973 - DNA, 20 bp, Artificial Sequence
  MKO10009973_A_Cers6
  gRNA
atgttcggagcattcaacgc

SEQ ID NO: 9974 - DNA, 20 bp, Artificial Sequence
  MKO10009974_A_Cers6
  gRNA
ctccgtagctaaatacatag

SEQ ID NO: 9975 - DNA, 20 bp, Artificial Sequence
  MKO10009975_A_Ces1a
  gRNA
cccaggtgctcgcaaattac

SEQ ID NO: 9976 - DNA, 20 bp, Artificial Sequence
  MKO10009976_A_Ces1a
  gRNA
agtagtcattcaataccgtc

SEQ ID NO: 9977 - DNA, 20 bp, Artificial Sequence
  MKO10009977_A_Ces1a
  gRNA
ctcctgctgactcgccaaag

SEQ ID NO: 9978 - DNA, 20 bp, Artificial Sequence
  MKO10009978_A_Ces1b
  gRNA
ggtgtccactaccggtgatg

SEQ ID NO: 9979 - DNA, 20 bp, Artificial Sequence
  MKO10009979_A_Ces1b
  gRNA
ccagattcagtgaccgtctt

SEQ ID NO: 9980 - DNA, 20 bp, Artificial Sequence
  MKO10009980_A_Ces1b
  gRNA
gtgttcaaatccttctaagc

SEQ ID NO: 9981 - DNA, 20 bp, Artificial Sequence
  MKO10009981_A_Ces1c
  gRNA
agatatgttcagcaccgaaa

SEQ ID NO: 9982 - DNA, 20 bp, Artificial Sequence
  MKO10009982_A_Ces1c
  gRNA
ccggattccgtgaccatctt

SEQ ID NO: 9983 - DNA, 20 bp, Artificial Sequence
  MKO10009983_A_Ces1c
  gRNA
acactcactcttaccacctg

SEQ ID NO: 9984 - DNA, 20 bp, Artificial Sequence
  MKO10009984_A_Ces1d
  gRNA
agcatccacctatgatggac

SEQ ID NO: 9985 - DNA, 20 bp, Artificial Sequence
  MKO10009985_A_Ces1d
  gRNA
cctttaacagtgttcaccac

SEQ ID NO: 9986 - DNA, 20 bp, Artificial Sequence
  MKO10009986_A_Ces1d
  gRNA
aggggcttacataggcgggt

SEQ ID NO: 9987 - DNA, 20 bp, Artificial Sequence
  MKO10009987_A_Ces1e
  gRNA
ggtggtcatccaataccgtt

SEQ ID NO: 9988 - DNA, 20 bp, Artificial Sequence
  MKO10009988_A_Ces1e
  gRNA
gtctacgcatgaaaatgtcg

SEQ ID NO: 9989 - DNA, 20 bp, Artificial Sequence
  MKO10009989_A_Ces1e
  gRNA
gccttgcacggtgtccacca

SEQ ID NO: 9990 - DNA, 20 bp, Artificial Sequence
  MKO10009990_A_Ces1f
  gRNA
ctacgttcacgtgtttcccc

SEQ ID NO: 9991 - DNA, 20 bp, Artificial Sequence
  MKO10009991_A_Ces1f
  gRNA
tgctcccaagatgcagctag

SEQ ID NO: 9992 - DNA, 20 bp, Artificial Sequence
  MKO10009992_A_Ces1f
  gRNA
gcctgggtccccgccaaagt

SEQ ID NO: 9993 - DNA, 20 bp, Artificial Sequence
  MKO10009993_A_Ces1g
  gRNA
agtggtcattcagtatcgcc

SEQ ID NO: 9994 - DNA, 20 bp, Artificial Sequence
  MKO10009994_A_Ces1g
  gRNA
agcgaggggcactccatcat

SEQ ID NO: 9995 - DNA, 20 bp, Artificial Sequence
  MKO10009995_A_Ces1g
  gRNA
acacccatccttaccgcctg

SEQ ID NO: 9996 - DNA, 20 bp, Artificial Sequence
  MKO10009996_A_Ces2a
  gRNA
tagtcttaccatgcacatgc

SEQ ID NO: 9997 - DNA, 20 bp, Artificial Sequence
  MKO10009997_A_Ces2a
  gRNA
catgaatgatgtatctaaac

SEQ ID NO: 9998 - DNA, 20 bp, Artificial Sequence
  MKO10009998_A_Ces2a
  gRNA
tcctctaaattcattatatc

SEQ ID NO: 9999 - DNA, 20 bp, Artificial Sequence
  MKO10009999_A_Ces2b
  gRNA
catgtacgatggatctctat

SEQ ID NO: 10000 - DNA, 20 bp, Artificial Sequence
  MKO10010000_A_Ces2b
  gRNA
caatagagatccatcgtaca

SEQ ID NO: 10001 - DNA, 20 bp, Artificial Sequence
  MKO10010001_A_Ces2b
  gRNA
catcaggtgtctgcaaaatc

SEQ ID NO: 10002 - DNA, 20 bp, Artificial Sequence
  MKO10010002_A_Ces2c
  gRNA
cttgacatgctgaatgaagc

SEQ ID NO: 10003 - DNA, 20 bp, Artificial Sequence
  MKO10010003_A_Ces2c
  gRNA
cagcagaacatcgctcactt

SEQ ID NO: 10004 - DNA, 20 bp, Artificial Sequence
  MKO10010004_A_Ces2c
  gRNA
aggcagccttatccacgtga

SEQ ID NO: 10005 - DNA, 20 bp, Artificial Sequence
  MKO10010005_A_Ces2e
  gRNA
cgatgtcagtgtccttcacg

SEQ ID NO: 10006 - DNA, 20 bp, Artificial Sequence
  MKO10010006_A_Ces2e
  gRNA
catcgctgttcataccttcc

SEQ ID NO: 10007 - DNA, 20 bp, Artificial Sequence
  MKO10010007_A_Ces2e
  gRNA
cagcaaaacattgtccactt

SEQ ID NO: 10008 - DNA, 20 bp, Artificial Sequence
  MKO10010008_A_Ces2f
  gRNA
tcagtaccgcctgggaatcc

SEQ ID NO: 10009 - DNA, 20 bp, Artificial Sequence
  MKO10010009_A_Ces2f
  gRNA
aacaggtcttgactcatcag

SEQ ID NO: 10010 - DNA, 20 bp, Artificial Sequence
  MKO10010010_A_Ces2f
  gRNA
cttactgtgaagatcatctc

SEQ ID NO: 10011 - DNA, 20 bp, Artificial Sequence
  MKO10010011_A_Ces2g
  gRNA
aggcaggctcattcacgtga

SEQ ID NO: 10012 - DNA, 20 bp, Artificial Sequence
  MKO10010012_A_Ces2g
  gRNA
agtggagtagctctgttgcc

SEQ ID NO: 10013 - DNA, 20 bp, Artificial Sequence
  MKO10010013_A_Ces2g
  gRNA
acaaaatgttacgatgaata

SEQ ID NO: 10014 - DNA, 20 bp, Artificial Sequence
  MKO10010014_A_Ces2h
  gRNA
actggagatgagcgcgccag

SEQ ID NO: 10015 - DNA, 20 bp, Artificial Sequence
  MKO10010015_A_Ces2h
  gRNA
gaccactactacattctcca

SEQ ID NO: 10016 - DNA, 20 bp, Artificial Sequence
  MKO10010016_A_Ces2h
  gRNA
gccagcgtagggcggccact

SEQ ID NO: 10017 - DNA, 20 bp, Artificial Sequence
  MKO10010017_A_Ces3a
  gRNA
gacaactaccacatccccat

SEQ ID NO: 10018 - DNA, 20 bp, Artificial Sequence
  MKO10010018_A_Ces3a
  gRNA
ctgggtccagtgtccgagtc

SEQ ID NO: 10019 - DNA, 20 bp, Artificial Sequence
  MKO10010019_A_Ces3a
  gRNA
gtatgtcttaccaatgacag

SEQ ID NO: 10020 - DNA, 20 bp, Artificial Sequence
  MKO10010020_A_Ces3b
  gRNA
aactaccacatccccgtacg

SEQ ID NO: 10021 - DNA, 20 bp, Artificial Sequence
  MKO10010021_A_Ces3b
  gRNA
agtccgttatgacaaatatg

SEQ ID NO: 10022 - DNA, 20 bp, Artificial Sequence
  MKO10010022_A_Ces3b
  gRNA
actaggacactggacccagc

SEQ ID NO: 10023 - DNA, 20 bp, Artificial Sequence
  MKO10010023_A_Ces4a
  gRNA
tatgccccagtactcgcccc

SEQ ID NO: 10024 - DNA, 20 bp, Artificial Sequence
  MKO10010024_A_Ces4a
  gRNA
gcccaccggaggtttagaga

SEQ ID NO: 10025 - DNA, 20 bp, Artificial Sequence
  MKO10010025_A_Ces4a
  gRNA
ggcatctctgatgccgttcc

SEQ ID NO: 10026 - DNA, 20 bp, Artificial Sequence
  MKO10010026_A_Ces5a
  gRNA
cgggagactggagccgttat

SEQ ID NO: 10027 - DNA, 20 bp, Artificial Sequence
  MKO10010027_A_Ces5a
  gRNA
ggcttctcgcaaattatccc

SEQ ID NO: 10028 - DNA, 20 bp, Artificial Sequence
  MKO10010028_A_Ces5a
  gRNA
aacccgtgaacgtgtttctt

SEQ ID NO: 10029 - DNA, 20 bp, Artificial Sequence
  MKO10010029_A_Cetn1
  gRNA
gagcgggaccatcgatgtga

SEQ ID NO: 10030 - DNA, 20 bp, Artificial Sequence
  MKO10010030_A_Cetn1
  gRNA
cgctcccatcagaatcgaag

SEQ ID NO: 10031 - DNA, 20 bp, Artificial Sequence
  MKO10010031_A_Cetn1
  gRNA
ttgtttgatgacgacgaaac

SEQ ID NO: 10032 - DNA, 20 bp, Artificial Sequence
  MKO10010032_A_Cetn2
  gRNA
attcaagaatcttaagcgcg

SEQ ID NO: 10033 - DNA, 20 bp, Artificial Sequence
  MKO10010033_A_Cetn2
  gRNA
cgaacaacttgaaagctttc

SEQ ID NO: 10034 - DNA, 20 bp, Artificial Sequence
  MKO10010034_A_Cetn2
  gRNA
ggttgtcttcttaaaattag

SEQ ID NO: 10035 - DNA, 20 bp, Artificial Sequence
  MKO10010035_A_Cetn3
  gRNA
ctatttgacgatgacgattc

SEQ ID NO: 10036 - DNA, 20 bp, Artificial Sequence
  MKO10010036_A_Cetn3
  gRNA
catagattatcatgaattaa

SEQ ID NO: 10037 - DNA, 20 bp, Artificial Sequence
  MKO10010037_A_Cetn3
  gRNA
ctttaattcatgataatcta

SEQ ID NO: 10038 - DNA, 20 bp, Artificial Sequence
  MKO10010038_A_Cetn4
  gRNA
tgccatcatgagcgtaaaaa

SEQ ID NO: 10039 - DNA, 20 bp, Artificial Sequence
  MKO10010039_A_Cetn4
  gRNA
tcctattgcagattgcaatg

SEQ ID NO: 10040 - DNA, 20 bp, Artificial Sequence
  MKO10010040_A_Cetn4
  gRNA
attgacctgtaattcatctt

SEQ ID NO: 10041 - DNA, 20 bp, Artificial Sequence
  MKO10010041_A_Cfb
  gRNA
ttcgagtctgcacggggtat

SEQ ID NO: 10042 - DNA, 20 bp, Artificial Sequence
  MKO10010042_A_Cfb
  gRNA
aatacgctgcccacgaccgc

SEQ ID NO: 10043 - DNA, 20 bp, Artificial Sequence
  MKO10010043_A_Cfb
  gRNA
gctggatactgtcccaatcc

SEQ ID NO: 10044 - DNA, 20 bp, Artificial Sequence
  MKO10010044_A_Cfc1
  gRNA
gctattgcgagcacgaccag

SEQ ID NO: 10045 - DNA, 20 bp, Artificial Sequence
  MKO10010045_A_Cfc1
  gRNA
gtatcccgctgttgccacaa

SEQ ID NO: 10046 - DNA, 20 bp, Artificial Sequence
  MKO10010046_A_Cfc1
  gRNA
taccacagtggctgaacgtt

SEQ ID NO: 10047 - DNA, 20 bp, Artificial Sequence
  MKO10010047_A_Cfdp1
  gRNA
gattagttcgaataaaccgt

SEQ ID NO: 10048 - DNA, 20 bp, Artificial Sequence
  MKO10010048_A_Cfdp1
  gRNA
ggaagtagatgctgcgtcta

SEQ ID NO: 10049 - DNA, 20 bp, Artificial Sequence
  MKO10010049_A_Cfdp1
  gRNA
accaaggtgtttgacttcgc

SEQ ID NO: 10050 - DNA, 20 bp, Artificial Sequence
  MKO10010050_A_Cfd
  gRNA
acccggcacgctctgcgacg

SEQ ID NO: 10051 - DNA, 20 bp, Artificial Sequence
  MKO10010051_A_Cfd
  gRNA
tctcacgtggggacccaacg

SEQ ID NO: 10052 - DNA, 20 bp, Artificial Sequence
  MKO10010052_A_Cfd
  gRNA
cagtcgaaggtgtggttacg

SEQ ID NO: 10053 - DNA, 20 bp, Artificial Sequence
  MKO10010053_A_Cfhr1
  gRNA
cgtactggtggaaatgcatt

SEQ ID NO: 10054 - DNA, 20 bp, Artificial Sequence
  MKO10010054_A_Cfhr1
  gRNA
gcaagtgatgcgagtccaga

SEQ ID NO: 10055 - DNA, 20 bp, Artificial Sequence
  MKO10010055_A_Cfhr1
  gRNA
cgcatcacttgcacagaatc

SEQ ID NO: 10056 - DNA, 20 bp, Artificial Sequence
  MKO10010056_A_Cfhr2
  gRNA
aggtacttacgtaagcacat

SEQ ID NO: 10057 - DNA, 20 bp, Artificial Sequence
  MKO10010057_A_Cfhr2
  gRNA
agaatggagactctacatac

SEQ ID NO: 10058 - DNA, 20 bp, Artificial Sequence
  MKO10010058_A_Cfhr2
  gRNA
ttattgtcttatttccctta

SEQ ID NO: 10059 - DNA, 20 bp, Artificial Sequence
  MKO10010059_A_Cfh
  gRNA
gtacttactccgacatatcc

SEQ ID NO: 10060 - DNA, 20 bp, Artificial Sequence
  MKO10010060_A_Cfh
  gRNA
gaaattgattaccgtgaatg

SEQ ID NO: 10061 - DNA, 20 bp, Artificial Sequence
  MKO10010061_A_Cfh
  gRNA
gggtggcgtctaacccatcc

SEQ ID NO: 10062 - DNA, 20 bp, Artificial Sequence
  MKO10010062_A_Cfi
  gRNA
aacgtggcctgcgtcgacct

SEQ ID NO: 10063 - DNA, 20 bp, Artificial Sequence
  MKO10010063_A_Cfi
  gRNA
cacgcatcgctcctgtaaca

SEQ ID NO: 10064 - DNA, 20 bp, Artificial Sequence
  MKO10010064_A_Cfi
  gRNA
acagtcattgacaccgttgc

SEQ ID NO: 10065 - DNA, 20 bp, Artificial Sequence
  MKO10010065_A_Cfl1
  gRNA
ggccgcgttcagtcggatcc

SEQ ID NO: 10066 - DNA, 20 bp, Artificial Sequence
  MKO10010066_A_Cfl1
  gRNA
cgactgaacgcggcctctcc

SEQ ID NO: 10067 - DNA, 20 bp, Artificial Sequence
  MKO10010067_A_Cfl1
  gRNA
ctcaccagaagatgaacacc

SEQ ID NO: 10068 - DNA, 20 bp, Artificial Sequence
  MKO10010068_A_Cfl2
  gRNA
gtttctctcccagcgtcgag

SEQ ID NO: 10069 - DNA, 20 bp, Artificial Sequence
  MKO10010069_A_Cfl2
  gRNA
aaatggcttggacgatatta

SEQ ID NO: 10070 - DNA, 20 bp, Artificial Sequence
  MKO10010070_A_Cfl2
  gRNA
gcatatcggcaatcattcag

SEQ ID NO: 10071 - DNA, 20 bp, Artificial Sequence
  MKO10010071_A_Cflar
  gRNA
ggtttacagggtcctgctga

SEQ ID NO: 10072 - DNA, 20 bp, Artificial Sequence
  MKO10010072_A_Cflar
  gRNA
tactggactgggtgtacttc

SEQ ID NO: 10073 - DNA, 20 bp, Artificial Sequence
  MKO10010073_A_Cflar
  gRNA
cttacctataatcagaaacc

SEQ ID NO: 10074 - DNA, 20 bp, Artificial Sequence
  MKO10010074_A_Cfp
  gRNA
gattatcacatactcgttga

SEQ ID NO: 10075 - DNA, 20 bp, Artificial Sequence
  MKO10010075_A_Cfp
  gRNA
cacagcgcctgtgtcgcagc

SEQ ID NO: 10076 - DNA, 20 bp, Artificial Sequence
  MKO10010076_A_Cfp
  gRNA
aggaccagcctatgagcata

SEQ ID NO: 10077 - DNA, 20 bp, Artificial Sequence
  MKO10010077_A_Cftr
  gRNA
tccagaaaaagcatcgccga

SEQ ID NO: 10078 - DNA, 20 bp, Artificial Sequence
  MKO10010078_A_Cftr
  gRNA
cccagcttatccacgccctt

SEQ ID NO: 10079 - DNA, 20 bp, Artificial Sequence
  MKO10010079_A_Cftr
  gRNA
tctgcattccaatgcgatga

SEQ ID NO: 10080 - DNA, 20 bp, Artificial Sequence
  MKO10010080_A_Cga
  gRNA
cgctcagaagctacgacttg

SEQ ID NO: 10081 - DNA, 20 bp, Artificial Sequence
  MKO10010081_A_Cga
  gRNA
ggcgggagtgggatatgccc

SEQ ID NO: 10082 - DNA, 20 bp, Artificial Sequence
  MKO10010082_A_Cga
  gRNA
gggcatatcccactcccgcc

SEQ ID NO: 10083 - DNA, 20 bp, Artificial Sequence
  MKO10010083_A_Cggbp1
  gRNA
gtcttagaacgatttcgagc

SEQ ID NO: 10084 - DNA, 20 bp, Artificial Sequence
  MKO10010084_A_Cggbp1
  gRNA
gacaggaacgctcgcactgc

SEQ ID NO: 10085 - DNA, 20 bp, Artificial Sequence
  MKO10010085_A_Cggbp1
  gRNA
cagtgcgagcgttcctgtcc

SEQ ID NO: 10086 - DNA, 20 bp, Artificial Sequence
  MKO10010086_A_Cgnl1
  gRNA
gctcacacaacaaacgaacg

SEQ ID NO: 10087 - DNA, 20 bp, Artificial Sequence
  MKO10010087_A_Cgnl1
  gRNA
atttagaagagctgcgagtc

SEQ ID NO: 10088 - DNA, 20 bp, Artificial Sequence
  MKO10010088_A_Cgnl1
  gRNA
ggccacaccagatctcttaa

SEQ ID NO: 10089 - DNA, 20 bp, Artificial Sequence
  MKO10010089_A_Cgn
  gRNA
ggctgagcttacccgaaaaa

SEQ ID NO: 10090 - DNA, 20 bp, Artificial Sequence
  MKO10010090_A_Cgn
  gRNA
tgaagagtgccaccgactgc

SEQ ID NO: 10091 - DNA, 20 bp, Artificial Sequence
  MKO10010091_A_Cgn
  gRNA
catgtgaaggccaccatcta

SEQ ID NO: 10092 - DNA, 20 bp, Artificial Sequence
  MKO10010092_A_Cgref1
  gRNA
ggagcgcttaccgggttgat

SEQ ID NO: 10093 - DNA, 20 bp, Artificial Sequence
  MKO10010093_A_Cgref1
  gRNA
ggccgtccagctgtccattc

SEQ ID NO: 10094 - DNA, 20 bp, Artificial Sequence
  MKO10010094_A_Cgref1
  gRNA
tcaacgcttgcatcagccac

SEQ ID NO: 10095 - DNA, 20 bp, Artificial Sequence
  MKO10010095_A_Cgrrf1
  gRNA
atagtcgtctgacgtgctac

SEQ ID NO: 10096 - DNA, 20 bp, Artificial Sequence
  MKO10010096_A_Cgrrf1
  gRNA
acgtcagacgactatcctcc

SEQ ID NO: 10097 - DNA, 20 bp, Artificial Sequence
  MKO10010097_A_Cgrrf1
  gRNA
taccaaaggatagcgagatc

SEQ ID NO: 10098 - DNA, 20 bp, Artificial Sequence
  MKO10010098_A_Ch25h
  gRNA
tcgacaccgagatcttcgcg

SEQ ID NO: 10099 - DNA, 20 bp, Artificial Sequence
  MKO10010099_A_Ch25h
  gRNA
cttcgacgtgctgaacgtcg

SEQ ID NO: 10100 - DNA, 20 bp, Artificial Sequence
  MKO10010100_A_Ch25h
  gRNA
ggtggatcttgtagcgtcgc

SEQ ID NO: 10101 - DNA, 20 bp, Artificial Sequence
  MKO10010101_A_Chac1
  gRNA
tcgttcgtggctatagccga

SEQ ID NO: 10102 - DNA, 20 bp, Artificial Sequence
  MKO10010102_A_Chac1
  gRNA
agccgtacccgaaaatccac

SEQ ID NO: 10103 - DNA, 20 bp, Artificial Sequence
  MKO10010103_A_Chac1
  gRNA
ccttgagtacttattgcgtt

SEQ ID NO: 10104 - DNA, 20 bp, Artificial Sequence
  MKO10010104_A_Chac2
  gRNA
caaggtagcacggaccaccg

SEQ ID NO: 10105 - DNA, 20 bp, Artificial Sequence
  MKO10010105_A_Chac2
  gRNA
ttagtaaaggaacgcttaga

SEQ ID NO: 10106 - DNA, 20 bp, Artificial Sequence
  MKO10010106_A_Chac2
  gRNA
ttaccttgcctgggaccccg

SEQ ID NO: 10107 - DNA, 20 bp, Artificial Sequence
  MKO10010107_A_Chadl
  gRNA
cggcgctcaggcccgagagc

SEQ ID NO: 10108 - DNA, 20 bp, Artificial Sequence
  MKO10010108_A_Chadl
  gRNA
tgcgctcggatggcgcgtgc

SEQ ID NO: 10109 - DNA, 20 bp, Artificial Sequence
  MKO10010109_A_Chadl
  gRNA
tcgctgggcagctacgtgcc

SEQ ID NO: 10110 - DNA, 20 bp, Artificial Sequence
  MKO10010110_A_Chad
  gRNA
ccagactgaataagagcgcg

SEQ ID NO: 10111 - DNA, 20 bp, Artificial Sequence
  MKO10010111_A_Chad
  gRNA
gcagttccgacactttgttg

SEQ ID NO: 10112 - DNA, 20 bp, Artificial Sequence
  MKO10010112_A_Chad
  gRNA
tcaggcggttgttgtccaga

SEQ ID NO: 10113 - DNA, 20 bp, Artificial Sequence
  MKO10010113_A_Chaf1a
  gRNA
ggaagagatacgacgagcca

SEQ ID NO: 10114 - DNA, 20 bp, Artificial Sequence
  MKO10010114_A_Chaf1a
  gRNA
ggaaaaacgcaaggagcggc

SEQ ID NO: 10115 - DNA, 20 bp, Artificial Sequence
  MKO10010115_A_Chaf1a
  gRNA
ataatgaccacactcggtac

SEQ ID NO: 10116 - DNA, 20 bp, Artificial Sequence
  MKO10010116_A_Chaf1b
  gRNA
atcatatgggatgtcagtaa

SEQ ID NO: 10117 - DNA, 20 bp, Artificial Sequence
  MKO10010117_A_Chaf1b
  gRNA
gtcgcaatatattgacccaa

SEQ ID NO: 10118 - DNA, 20 bp, Artificial Sequence
  MKO10010118_A_Chaf1b
  gRNA
gcgtacaacattgacagctt

SEQ ID NO: 10119 - DNA, 20 bp, Artificial Sequence
  MKO10010119_A_Champ1
  gRNA
ccgagcaaagacaccgagtc

SEQ ID NO: 10120 - DNA, 20 bp, Artificial Sequence
  MKO10010120_A_Champ1
  gRNA
cagggtgggtctacacgctc

SEQ ID NO: 10121 - DNA, 20 bp, Artificial Sequence
  MKO10010121_A_Champ1
  gRNA
atcgcaaagtacatgaagcg

SEQ ID NO: 10122 - DNA, 20 bp, Artificial Sequence
  MKO10010122_A_Chat
  gRNA
ggccccaaaccgcttcacaa

SEQ ID NO: 10123 - DNA, 20 bp, Artificial Sequence
  MKO10010123_A_Chat
  gRNA
tgccgagcaaagatcacagc

SEQ ID NO: 10124 - DNA, 20 bp, Artificial Sequence
  MKO10010124_A_Chat
  gRNA
gcctcaccttagctggtcat

SEQ ID NO: 10125 - DNA, 20 bp, Artificial Sequence
  MKO10010125_A_Chchd10
  gRNA
gcctcggggaagccgcagtg

SEQ ID NO: 10126 - DNA, 20 bp, Artificial Sequence
  MKO10010126_A_Chchd10
  gRNA
gccgcactgcggcttccccg

SEQ ID NO: 10127 - DNA, 20 bp, Artificial Sequence
  MKO10010127_A_Chchd10
  gRNA
caccgccgcaggcgtagccg

SEQ ID NO: 10128 - DNA, 20 bp, Artificial Sequence
  MKO10010128_A_Chchd1
  gRNA
gcagaatgaattccgcgacg

SEQ ID NO: 10129 - DNA, 20 bp, Artificial Sequence
  MKO10010129_A_Chchd1
  gRNA
cctggcgcggtttgcgaacc

SEQ ID NO: 10130 - DNA, 20 bp, Artificial Sequence
  MKO10010130_A_Chchd1
  gRNA
cgccaggcggccgcgtagac

SEQ ID NO: 10131 - DNA, 20 bp, Artificial Sequence
  MKO10010131_A_Chchd2
  gRNA
acctggccggaggagtcacc

SEQ ID NO: 10132 - DNA, 20 bp, Artificial Sequence
  MKO10010132_A_Chchd2
  gRNA
gaagccgaagccgcacttcc

SEQ ID NO: 10133 - DNA, 20 bp, Artificial Sequence
  MKO10010133_A_Chchd2
  gRNA
ccagccgggcccctcagatg

SEQ ID NO: 10134 - DNA, 20 bp, Artificial Sequence
  MKO10010134_A_Chchd3
  gRNA
cagcgatattccagcgttta

SEQ ID NO: 10135 - DNA, 20 bp, Artificial Sequence
  MKO10010135_A_Chchd3
  gRNA
cttcatgcgctcctcttcac

SEQ ID NO: 10136 - DNA, 20 bp, Artificial Sequence
  MKO10010136_A_Chchd3
  gRNA
acctgaagcaccataaacgc

SEQ ID NO: 10137 - DNA, 20 bp, Artificial Sequence
  MKO10010137_A_Chchd4
  gRNA
gaacaaccatgtcctactgc

SEQ ID NO: 10138 - DNA, 20 bp, Artificial Sequence
  MKO10010138_A_Chchd4
  gRNA
ttccagttaatatctccgtt

SEQ ID NO: 10139 - DNA, 20 bp, Artificial Sequence
  MKO10010139_A_Chchd4
  gRNA
tgaccccaatgatccctatg

SEQ ID NO: 10140 - DNA, 20 bp, Artificial Sequence
  MKO10010140_A_Chchd5
  gRNA
gatcatccgccagatccgcc

SEQ ID NO: 10141 - DNA, 20 bp, Artificial Sequence
  MKO10010141_A_Chchd5
  gRNA
tcgatactgcagccgagagc

SEQ ID NO: 10142 - DNA, 20 bp, Artificial Sequence
  MKO10010142_A_Chchd5
  gRNA
agtatcgagcagtgacttcc

SEQ ID NO: 10143 - DNA, 20 bp, Artificial Sequence
  MKO10010143_A_Chchd6
  gRNA
ccttcgggcctcggcgctct

SEQ ID NO: 10144 - DNA, 20 bp, Artificial Sequence
  MKO10010144_A_Chchd6
  gRNA
ccgaagggtgtccttcgaga

SEQ ID NO: 10145 - DNA, 20 bp, Artificial Sequence
  MKO10010145_A_Chchd6
  gRNA
gctccttcatcctctgtacg

SEQ ID NO: 10146 - DNA, 20 bp, Artificial Sequence
  MKO10010146_A_Chchd7
  gRNA
tctcagccgccgagtgacca

SEQ ID NO: 10147 - DNA, 20 bp, Artificial Sequence
  MKO10010147_A_Chchd7
  gRNA
aagcaccctaccgacaagca

SEQ ID NO: 10148 - DNA, 20 bp, Artificial Sequence
  MKO10010148_A_Chchd7
  gRNA
ttgggcttacccagaatcgc

SEQ ID NO: 10149 - DNA, 20 bp, Artificial Sequence
  MKO10010149_A_Chd1l
  gRNA
cgtgctgctgacgacatacg

SEQ ID NO: 10150 - DNA, 20 bp, Artificial Sequence
  MKO10010150_A_Chd1l
  gRNA
gtctccccaccaagtaaatg

SEQ ID NO: 10151 - DNA, 20 bp, Artificial Sequence
  MKO10010151_A_Chd1l
  gRNA
tcgtctacgttcttaccaac

SEQ ID NO: 10152 - DNA, 20 bp, Artificial Sequence
  MKO10010152_A_Chd1
  gRNA
gactccgacgactcgtccag

SEQ ID NO: 10153 - DNA, 20 bp, Artificial Sequence
  MKO10010153_A_Chd1
  gRNA
acctcggctccgtcgacttt

SEQ ID NO: 10154 - DNA, 20 bp, Artificial Sequence
  MKO10010154_A_Chd1
  gRNA
cgcccagcttcatctaatag

SEQ ID NO: 10155 - DNA, 20 bp, Artificial Sequence
  MKO10010155_A_Chd2
  gRNA
accatcacgatttaatgtta

SEQ ID NO: 10156 - DNA, 20 bp, Artificial Sequence
  MKO10010156_A_Chd2
  gRNA
tccttaacattaaatcgtga

SEQ ID NO: 10157 - DNA, 20 bp, Artificial Sequence
  MKO10010157_A_Chd2
  gRNA
cagcgagtccaatagcagtt

SEQ ID NO: 10158 - DNA, 20 bp, Artificial Sequence
  MKO10010158_A_Chd3
  gRNA
ggtgtgaagaagcgaaaacg

SEQ ID NO: 10159 - DNA, 20 bp, Artificial Sequence
  MKO10010159_A_Chd3
  gRNA
tgtggaacacgtgttctccg

SEQ ID NO: 10160 - DNA, 20 bp, Artificial Sequence
  MKO10010160_A_Chd3
  gRNA
cagctgccgaccctttgaag

SEQ ID NO: 10161 - DNA, 20 bp, Artificial Sequence
  MKO10010161_A_Chd4
  gRNA
gcttcggataaatcctcgtc

SEQ ID NO: 10162 - DNA, 20 bp, Artificial Sequence
  MKO10010162_A_Chd4
  gRNA
tcggaccctcaccaactaca

SEQ ID NO: 10163 - DNA, 20 bp, Artificial Sequence
  MKO10010163_A_Chd4
  gRNA
tcctgacttacctaacaaat

SEQ ID NO: 10164 - DNA, 20 bp, Artificial Sequence
  MKO10010164_A_Chd5
  gRNA
atctcctccgcgaacagccg

SEQ ID NO: 10165 - DNA, 20 bp, Artificial Sequence
  MKO10010165_A_Chd5
  gRNA
ctccgccatgagttgtcccg

SEQ ID NO: 10166 - DNA, 20 bp, Artificial Sequence
  MKO10010166_A_Chd5
  gRNA
gacaactcatggcggagtgg

SEQ ID NO: 10167 - DNA, 20 bp, Artificial Sequence
  MKO10010167_A_Chd6
  gRNA
gttctgcagaaacggcgctc

SEQ ID NO: 10168 - DNA, 20 bp, Artificial Sequence
  MKO10010168_A_Chd6
  gRNA
cttatggggcagacaatgat

SEQ ID NO: 10169 - DNA, 20 bp, Artificial Sequence
  MKO10010169_A_Chd6
  gRNA
cggaggcctcccggtgcttc

SEQ ID NO: 10170 - DNA, 20 bp, Artificial Sequence
  MKO10010170_A_Chd7
  gRNA
gagcgttctgtgcgctgacc

SEQ ID NO: 10171 - DNA, 20 bp, Artificial Sequence
  MKO10010171_A_Chd7
  gRNA
gaaggtcaaaaaagatccga

SEQ ID NO: 10172 - DNA, 20 bp, Artificial Sequence
  MKO10010172_A_Chd7
  gRNA
accgtcccccgctcctgaag

SEQ ID NO: 10173 - DNA, 20 bp, Artificial Sequence
  MKO10010173_A_Chd8
  gRNA
atcgtctgacaactctgacg

SEQ ID NO: 10174 - DNA, 20 bp, Artificial Sequence
  MKO10010174_A_Chd8
  gRNA
tgaatcgaaacgcatcactt

SEQ ID NO: 10175 - DNA, 20 bp, Artificial Sequence
  MKO10010175_A_Chd8
  gRNA
ggacatcggcatgttgtgtt

SEQ ID NO: 10176 - DNA, 20 bp, Artificial Sequence
  MKO10010176_A_Chd9
  gRNA
agctgtccgatgccgagcag

SEQ ID NO: 10177 - DNA, 20 bp, Artificial Sequence
  MKO10010177_A_Chd9
  gRNA
ctcggcatcggacagctcat

SEQ ID NO: 10178 - DNA, 20 bp, Artificial Sequence
  MKO10010178_A_Chd9
  gRNA
ttctcagggctcattactcg

SEQ ID NO: 10179 - DNA, 20 bp, Artificial Sequence
  MKO10010179_A_Chdh
  gRNA
caccgggtgcaagtaggcgc

SEQ ID NO: 10180 - DNA, 20 bp, Artificial Sequence
  MKO10010180_A_Chdh
  gRNA
ccatggtcaatcacttgcga

SEQ ID NO: 10181 - DNA, 20 bp, Artificial Sequence
  MKO10010181_A_Chdh
  gRNA
agttgatggctcccccgctc

SEQ ID NO: 10182 - DNA, 20 bp, Artificial Sequence
  MKO10010182_A_Chek1
  gRNA
atgcagaaccagttgatgtt

SEQ ID NO: 10183 - DNA, 20 bp, Artificial Sequence
  MKO10010183_A_Chek1
  gRNA
tgcagtaagtactattccac

SEQ ID NO: 10184 - DNA, 20 bp, Artificial Sequence
  MKO10010184_A_Chek1
  gRNA
ttcttccaccaactcatggc

SEQ ID NO: 10185 - DNA, 20 bp, Artificial Sequence
  MKO10010185_A_Chek2
  gRNA
actgtgttaacgacaactac

SEQ ID NO: 10186 - DNA, 20 bp, Artificial Sequence
  MKO10010186_A_Chek2
  gRNA
ccgcttgctaatgatcttta

SEQ ID NO: 10187 - DNA, 20 bp, Artificial Sequence
  MKO10010187_A_Chek2
  gRNA
ttgttacatcgtatacatag

SEQ ID NO: 10188 - DNA, 20 bp, Artificial Sequence
  MKO10010188_A_Cherp
  gRNA
tcaatgacgtgctgcaccac

SEQ ID NO: 10189 - DNA, 20 bp, Artificial Sequence
  MKO10010189_A_Cherp
  gRNA
cgcaaccgcatcactgctga

SEQ ID NO: 10190 - DNA, 20 bp, Artificial Sequence
  MKO10010190_A_Cherp
  gRNA
cgataagctcgctcagtttg

SEQ ID NO: 10191 - DNA, 20 bp, Artificial Sequence
  MKO10010191_A_Chfr
  gRNA
atgatatccccgctctgtaa

SEQ ID NO: 10192 - DNA, 20 bp, Artificial Sequence
  MKO10010192_A_Chfr
  gRNA
aggtctgatgtcgatgttga

SEQ ID NO: 10193 - DNA, 20 bp, Artificial Sequence
  MKO10010193_A_Chfr
  gRNA
catgtgaccaaagattgctc

SEQ ID NO: 10194 - DNA, 20 bp, Artificial Sequence
  MKO10010194_A_Chga
  gRNA
gcgacaccagaatctgctga

SEQ ID NO: 10195 - DNA, 20 bp, Artificial Sequence
  MKO10010195_A_Chga
  gRNA
ccaggtgatgaagtgcgtcc

SEQ ID NO: 10196 - DNA, 20 bp, Artificial Sequence
  MKO10010196_A_Chga
  gRNA
gctgggtttggacagcgagt

SEQ ID NO: 10197 - DNA, 20 bp, Artificial Sequence
  MKO10010197_A_Chgb
  gRNA
ccccttcctcgccatagttg

SEQ ID NO: 10198 - DNA, 20 bp, Artificial Sequence
  MKO10010198_A_Chgb
  gRNA
ctcctccgagtcgtagaaat

SEQ ID NO: 10199 - DNA, 20 bp, Artificial Sequence
  MKO10010199_A_Chgb
  gRNA
gaacttggctgcgatggatc

SEQ ID NO: 10200 - DNA, 20 bp, Artificial Sequence
  MKO10010200_A_Chia1
  gRNA
ctcacgtgggagccctcctc

SEQ ID NO: 10201 - DNA, 20 bp, Artificial Sequence
  MKO10010201_A_Chia1
  gRNA
gcccagtatcggccaggtct

SEQ ID NO: 10202 - DNA, 20 bp, Artificial Sequence
  MKO10010202_A_Chia1
  gRNA
tgatatgctatttcaccaac

SEQ ID NO: 10203 - DNA, 20 bp, Artificial Sequence
  MKO10010203_A_Chic1
  gRNA
taacttctgaatcgatcttc

SEQ ID NO: 10204 - DNA, 20 bp, Artificial Sequence
  MKO10010204_A_Chic1
  gRNA
gaatttccgtcagttctgac

SEQ ID NO: 10205 - DNA, 20 bp, Artificial Sequence
  MKO10010205_A_Chic1
  gRNA
agcagccatttcacattgac

SEQ ID NO: 10206 - DNA, 20 bp, Artificial Sequence
  MKO10010206_A_Chic2
  gRNA
agcaaccaccgcacattaac

SEQ ID NO: 10207 - DNA, 20 bp, Artificial Sequence
  MKO10010207_A_Chic2
  gRNA
gaattcccttcttcattaac

SEQ ID NO: 10208 - DNA, 20 bp, Artificial Sequence
  MKO10010208_A_Chic2
  gRNA
atgtctagctgtgcttgcac

SEQ ID NO: 10209 - DNA, 20 bp, Artificial Sequence
  MKO10010209_A_Chid1
  gRNA
atcgtagctactgctcatca

SEQ ID NO: 10210 - DNA, 20 bp, Artificial Sequence
  MKO10010210_A_Chid1
  gRNA
tcaccaccagaccccgatct

SEQ ID NO: 10211 - DNA, 20 bp, Artificial Sequence
  MKO10010211_A_Chid1
  gRNA
ctcacctatgcgcacacctt

SEQ ID NO: 10212 - DNA, 20 bp, Artificial Sequence
  MKO10010212_A_Chil1
  gRNA
agagacgcactgctttcgtc

SEQ ID NO: 10213 - DNA, 20 bp, Artificial Sequence
  MKO10010213_A_Chil1
  gRNA
tactgcttgtctcttaagcg

SEQ ID NO: 10214 - DNA, 20 bp, Artificial Sequence
  MKO10010214_A_Chil1
  gRNA
ggtggaaatttggcgaaaaa

SEQ ID NO: 10215 - DNA, 20 bp, Artificial Sequence
  MKO10010215_A_Chil3
  gRNA
cgtgactatgaagcattgaa

SEQ ID NO: 10216 - DNA, 20 bp, Artificial Sequence
  MKO10010216_A_Chil3
  gRNA
ggtttgaaactcccttctat

SEQ ID NO: 10217 - DNA, 20 bp, Artificial Sequence
  MKO10010217_A_Chil3
  gRNA
aattcttctgaacgtacagc

SEQ ID NO: 10218 - DNA, 20 bp, Artificial Sequence
  MKO10010218_A_Chil4
  gRNA
cgtgactatgaagcattaaa

SEQ ID NO: 10219 - DNA, 20 bp, Artificial Sequence
  MKO10010219_A_Chil4
  gRNA
gctaaggacaggccaacaga

SEQ ID NO: 10220 - DNA, 20 bp, Artificial Sequence
  MKO10010220_A_Chil4
  gRNA
ctgacttaatgaatgtctga

SEQ ID NO: 10221 - DNA, 20 bp, Artificial Sequence
  MKO10010221_A_Chil6
  gRNA
catcaaatccatacttccgc

SEQ ID NO: 10222 - DNA, 20 bp, Artificial Sequence
  MKO10010222_A_Chil6
  gRNA
agttccagcaaccaatagac

SEQ ID NO: 10223 - DNA, 20 bp, Artificial Sequence
  MKO10010223_A_Chil6
  gRNA
tggatttgatggacttaatt

SEQ ID NO: 10224 - DNA, 20 bp, Artificial Sequence
  MKO10010224_A_Chit1
  gRNA
agaaccgaactgcctccgtc

SEQ ID NO: 10225 - DNA, 20 bp, Artificial Sequence
  MKO10010225_A_Chit1
  gRNA
gagattcacagccctgatac

SEQ ID NO: 10226 - DNA, 20 bp, Artificial Sequence
  MKO10010226_A_Chit1
  gRNA
ctcaagaccctgttagccgt

SEQ ID NO: 10227 - DNA, 20 bp, Artificial Sequence
  MKO10010227_A_Chka
  gRNA
ctcatcgccaacgctggcta

SEQ ID NO: 10228 - DNA, 20 bp, Artificial Sequence
  MKO10010228_A_Chka
  gRNA
tcacttgggccaaaactctt

SEQ ID NO: 10229 - DNA, 20 bp, Artificial Sequence
  MKO10010229_A_Chka
  gRNA
ccgggataaactgctccagt

SEQ ID NO: 10230 - DNA, 20 bp, Artificial Sequence
  MKO10010230_A_Chkb
  gRNA
accgaaccacgtacccagtg

SEQ ID NO: 10231 - DNA, 20 bp, Artificial Sequence
  MKO10010231_A_Chkb
  gRNA
acgggccatcctcgttgcaa

SEQ ID NO: 10232 - DNA, 20 bp, Artificial Sequence
  MKO10010232_A_Chkb
  gRNA
tagagaccgctctgcgagaa

SEQ ID NO: 10233 - DNA, 20 bp, Artificial Sequence
  MKO10010233_A_Chl1
  gRNA
ttgttagccgcaattatccg

SEQ ID NO: 10234 - DNA, 20 bp, Artificial Sequence
  MKO10010234_A_Chl1
  gRNA
tgtttcgcatccaatagact

SEQ ID NO: 10235 - DNA, 20 bp, Artificial Sequence
  MKO10010235_A_Chl1
  gRNA
tgtaaagcagtcatacgtgc

SEQ ID NO: 10236 - DNA, 20 bp, Artificial Sequence
  MKO10010236_A_Chml
  gRNA
atttctccgtggccgtataa

SEQ ID NO: 10237 - DNA, 20 bp, Artificial Sequence
  MKO10010237_A_Chml
  gRNA
agccatctctcttcgcaaga

SEQ ID NO: 10238 - DNA, 20 bp, Artificial Sequence
  MKO10010238_A_Chml
  gRNA
gctggtccgaatctgtcttc

SEQ ID NO: 10239 - DNA, 20 bp, Artificial Sequence
  MKO10010239_A_Chmp1a
  gRNA
gctccgaatggcctcccgtg

SEQ ID NO: 10240 - DNA, 20 bp, Artificial Sequence
  MKO10010240_A_Chmp1a
  gRNA
attacgcaccttcttcactt

SEQ ID NO: 10241 - DNA, 20 bp, Artificial Sequence
  MKO10010241_A_Chmp1a
  gRNA
tacaaaccttcaactggaac

SEQ ID NO: 10242 - DNA, 20 bp, Artificial Sequence
  MKO10010242_A_Chmp1b
  gRNA
gccgtcagacttgatcccga

SEQ ID NO: 10243 - DNA, 20 bp, Artificial Sequence
  MKO10010243_A_Chmp1b
  gRNA
acatcgtcgtgcggcttcgg

SEQ ID NO: 10244 - DNA, 20 bp, Artificial Sequence
  MKO10010244_A_Chmp1b
  gRNA
gttctttggccgcgaatttc

SEQ ID NO: 10245 - DNA, 20 bp, Artificial Sequence
  MKO10010245_A_Chmp2a
  gRNA
caaacttgcgtacatatctc

SEQ ID NO: 10246 - DNA, 20 bp, Artificial Sequence
  MKO10010246_A_Chmp2a
  gRNA
gcaggatgctgttcgaatca

SEQ ID NO: 10247 - DNA, 20 bp, Artificial Sequence
  MKO10010247_A_Chmp2a
  gRNA
tctgcagaccttccctccac

SEQ ID NO: 10248 - DNA, 20 bp, Artificial Sequence
  MKO10010248_A_Chmp2b
  gRNA
gaacttgattcacgatgtcc

SEQ ID NO: 10249 - DNA, 20 bp, Artificial Sequence
  MKO10010249_A_Chmp2b
  gRNA
attcatcactttcgtttgtg

SEQ ID NO: 10250 - DNA, 20 bp, Artificial Sequence
  MKO10010250_A_Chmp2b
  gRNA
ttggtaataaggaagcgtgc

SEQ ID NO: 10251 - DNA, 20 bp, Artificial Sequence
  MKO10010251_A_Chmp3
  gRNA
tcagcggtcctgcgagtagc

SEQ ID NO: 10252 - DNA, 20 bp, Artificial Sequence
  MKO10010252_A_Chmp3
  gRNA
aatttccccaggttaatgaa

SEQ ID NO: 10253 - DNA, 20 bp, Artificial Sequence
  MKO10010253_A_Chmp3
  gRNA
tattcaggctggaatcatag

SEQ ID NO: 10254 - DNA, 20 bp, Artificial Sequence
  MKO10010254_A_Chmp4b
  gRNA
ctttggagaagagttcgacg

SEQ ID NO: 10255 - DNA, 20 bp, Artificial Sequence
  MKO10010255_A_Chmp4b
  gRNA
gcatactcaccgggtttgga

SEQ ID NO: 10256 - DNA, 20 bp, Artificial Sequence
  MKO10010256_A_Chmp4b
  gRNA
cttccctctagccgccctgc

SEQ ID NO: 10257 - DNA, 20 bp, Artificial Sequence
  MKO10010257_A_Chmp4c
  gRNA
gttccgtaagacctccgtgt

SEQ ID NO: 10258 - DNA, 20 bp, Artificial Sequence
  MKO10010258_A_Chmp4c
  gRNA
acctacctcatcgaagccat

SEQ ID NO: 10259 - DNA, 20 bp, Artificial Sequence
  MKO10010259_A_Chmp4c
  gRNA
agttctccagcgcttctcgc

SEQ ID NO: 10260 - DNA, 20 bp, Artificial Sequence
  MKO10010260_A_Chmp5
  gRNA
tgagcaacagcgagacaacc

SEQ ID NO: 10261 - DNA, 20 bp, Artificial Sequence
  MKO10010261_A_Chmp5
  gRNA
tcactagttcagcatccagc

SEQ ID NO: 10262 - DNA, 20 bp, Artificial Sequence
  MKO10010262_A_Chmp5
  gRNA
tgctgaactagtgaaatata

SEQ ID NO: 10263 - DNA, 20 bp, Artificial Sequence
  MKO10010263_A_Chmp6
  gRNA
accgggagcaactgctcgat

SEQ ID NO: 10264 - DNA, 20 bp, Artificial Sequence
  MKO10010264_A_Chmp6
  gRNA
tcctatcgagcagttgctcc

SEQ ID NO: 10265 - DNA, 20 bp, Artificial Sequence
  MKO10010265_A_Chmp6
  gRNA
tcatcaggtgatgtccatag

SEQ ID NO: 10266 - DNA, 20 bp, Artificial Sequence
  MKO10010266_A_Chmp7
  gRNA
ggtatctcctgtgaacgacg

SEQ ID NO: 10267 - DNA, 20 bp, Artificial Sequence
  MKO10010267_A_Chmp7
  gRNA
gaaggtcctctcatccgggc

SEQ ID NO: 10268 - DNA, 20 bp, Artificial Sequence
  MKO10010268_A_Chmp7
  gRNA
gtataggcgatacacctcct

SEQ ID NO: 10269 - DNA, 20 bp, Artificial Sequence
  MKO10010269_A_Chm
  gRNA
tgcttcagtgatgtccgcac

SEQ ID NO: 10270 - DNA, 20 bp, Artificial Sequence
  MKO10010270_A_Chm
  gRNA
ttcacagctcctcgtgctta

SEQ ID NO: 10271 - DNA, 20 bp, Artificial Sequence
  MKO10010271_A_Chm
  gRNA
gtcctggctaaaggaatacc

SEQ ID NO: 10272 - DNA, 20 bp, Artificial Sequence
  MKO10010272_A_Chn1
  gRNA
cgacatacgctatcagagac

SEQ ID NO: 10273 - DNA, 20 bp, Artificial Sequence
  MKO10010273_A_Chn1
  gRNA
gcgatctcagtgcttcgtga

SEQ ID NO: 10274 - DNA, 20 bp, Artificial Sequence
  MKO10010274_A_Chn1
  gRNA
tatggaccctgacgagcaat

SEQ ID NO: 10275 - DNA, 20 bp, Artificial Sequence
  MKO10010275_A_Chn2
  gRNA
gcagtcattggggacgtgct

SEQ ID NO: 10276 - DNA, 20 bp, Artificial Sequence
  MKO10010276_A_Chn2
  gRNA
gttgtgagctttgacaagcg

SEQ ID NO: 10277 - DNA, 20 bp, Artificial Sequence
  MKO10010277_A_Chn2
  gRNA
tacctgaacaccggactccc

SEQ ID NO: 10278 - DNA, 20 bp, Artificial Sequence
  MKO10010278_A_Chodl
  gRNA
tcacccggctagacagttca

SEQ ID NO: 10279 - DNA, 20 bp, Artificial Sequence
  MKO10010279_A_Chodl
  gRNA
tccgctgctcttactgatac

SEQ ID NO: 10280 - DNA, 20 bp, Artificial Sequence
  MKO10010280_A_Chodl
  gRNA
gaggtccctacctttaccag

SEQ ID NO: 10281 - DNA, 20 bp, Artificial Sequence
  MKO10010281_A_Chordc1
  gRNA
tagtgagaagccacctgaac

SEQ ID NO: 10282 - DNA, 20 bp, Artificial Sequence
  MKO10010282_A_Chordc1
  gRNA
tgtctttcatgatgccctaa

SEQ ID NO: 10283 - DNA, 20 bp, Artificial Sequence
  MKO10010283_A_Chordc1
  gRNA
tactaacagggctgtacaaa

SEQ ID NO: 10284 - DNA, 20 bp, Artificial Sequence
  MKO10010284_A_Chp1
  gRNA
aaggggagaacgggactctc

SEQ ID NO: 10285 - DNA, 20 bp, Artificial Sequence
  MKO10010285_A_Chp1
  gRNA
gtacagccgcttcaccagcc

SEQ ID NO: 10286 - DNA, 20 bp, Artificial Sequence
  MKO10010286_A_Chp1
  gRNA
tacagtgcagcttgttgctc

SEQ ID NO: 10287 - DNA, 20 bp, Artificial Sequence
  MKO10010287_A_Chp2
  gRNA
gcctgctccgcctctaccac

SEQ ID NO: 10288 - DNA, 20 bp, Artificial Sequence
  MKO10010288_A_Chp2
  gRNA
agtcagagactgtatttcgc

SEQ ID NO: 10289 - DNA, 20 bp, Artificial Sequence
  MKO10010289_A_Chp2
  gRNA
tgcatttcagctctatgatc

SEQ ID NO: 10290 - DNA, 20 bp, Artificial Sequence
  MKO10010290_A_Chpf2
  gRNA
tactgtacggttaaccgcga

SEQ ID NO: 10291 - DNA, 20 bp, Artificial Sequence
  MKO10010291_A_Chpf2
  gRNA
gatgtggccgcaagcgcaat

SEQ ID NO: 10292 - DNA, 20 bp, Artificial Sequence
  MKO10010292_A_Chpf2
  gRNA
ctctttcgagccgtagagcc

SEQ ID NO: 10293 - DNA, 20 bp, Artificial Sequence
  MKO10010293_A_Chpf
  gRNA
gagcactgacgatgtcgttg

SEQ ID NO: 10294 - DNA, 20 bp, Artificial Sequence
  MKO10010294_A_Chpf
  gRNA
tacgcgttctcctgcgccga

SEQ ID NO: 10295 - DNA, 20 bp, Artificial Sequence
  MKO10010295_A_Chpf
  gRNA
gccgcgttggtgttgccgcg

SEQ ID NO: 10296 - DNA, 20 bp, Artificial Sequence
  MKO10010296_A_Chpt1
  gRNA
tgttcctaggcgaacagcaa

SEQ ID NO: 10297 - DNA, 20 bp, Artificial Sequence
  MKO10010297_A_Chpt1
  gRNA
gaacagcgactctcccaccg

SEQ ID NO: 10298 - DNA, 20 bp, Artificial Sequence
  MKO10010298_A_Chpt1
  gRNA
ggaggagcaccgctacaccg

SEQ ID NO: 10299 - DNA, 20 bp, Artificial Sequence
  MKO10010299_A_Chrac1
  gRNA
ggggcaatgacacgagccgc

SEQ ID NO: 10300 - DNA, 20 bp, Artificial Sequence
  MKO10010300_A_Chrac1
  gRNA
gacgcggaagatggcggacg

SEQ ID NO: 10301 - DNA, 20 bp, Artificial Sequence
  MKO10010301_A_Chrac1
  gRNA
gagacacttcagtttctcgc

SEQ ID NO: 10302 - DNA, 20 bp, Artificial Sequence
  MKO10010302_A_Chrdl1
  gRNA
agcaagtcatgcgaatacaa

SEQ ID NO: 10303 - DNA, 20 bp, Artificial Sequence
  MKO10010303_A_Chrdl1
  gRNA
attgtattcgcatgacttgc

SEQ ID NO: 10304 - DNA, 20 bp, Artificial Sequence
  MKO10010304_A_Chrdl1
  gRNA
acacagtaaaccagtccata

SEQ ID NO: 10305 - DNA, 20 bp, Artificial Sequence
  MKO10010305_A_Chrdl2
  gRNA
acgcagtatatcgtgccttg

SEQ ID NO: 10306 - DNA, 20 bp, Artificial Sequence
  MKO10010306_A_Chrdl2
  gRNA
tatatacccccggccagagc

SEQ ID NO: 10307 - DNA, 20 bp, Artificial Sequence
  MKO10010307_A_Chrdl2
  gRNA
cactggttggacaggcgggc

SEQ ID NO: 10308 - DNA, 20 bp, Artificial Sequence
  MKO10010308_A_Chrd
  gRNA
catcgcagttacagtgatcg

SEQ ID NO: 10309 - DNA, 20 bp, Artificial Sequence
  MKO10010309_A_Chrd
  gRNA
cgagctaccgcctgcgacct

SEQ ID NO: 10310 - DNA, 20 bp, Artificial Sequence
  MKO10010310_A_Chrd
  gRNA
cgggtgccacgtctcgtcca

SEQ ID NO: 10311 - DNA, 20 bp, Artificial Sequence
  MKO10010311_A_Chrm1
  gRNA
ctctgatgattggcctcgcg

SEQ ID NO: 10312 - DNA, 20 bp, Artificial Sequence
  MKO10010312_A_Chrm1
  gRNA
cgaaggaaaccaaccacgcg

SEQ ID NO: 10313 - DNA, 20 bp, Artificial Sequence
  MKO10010313_A_Chrm1
  gRNA
gagccaagcgcactccccgc

SEQ ID NO: 10314 - DNA, 20 bp, Artificial Sequence
  MKO10010314_A_Chrm2
  gRNA
tccaacgctgccgtcacctt

SEQ ID NO: 10315 - DNA, 20 bp, Artificial Sequence
  MKO10010315_A_Chrm2
  gRNA
cgatcccactagttctactg

SEQ ID NO: 10316 - DNA, 20 bp, Artificial Sequence
  MKO10010316_A_Chrm2
  gRNA
agccaaaggtcgcacactac

SEQ ID NO: 10317 - DNA, 20 bp, Artificial Sequence
  MKO10010317_A_Chrm3
  gRNA
cccgatgatcagatctgcgc

SEQ ID NO: 10318 - DNA, 20 bp, Artificial Sequence
  MKO10010318_A_Chrm3
  gRNA
ggcagcgatcgccgtgccga

SEQ ID NO: 10319 - DNA, 20 bp, Artificial Sequence
  MKO10010319_A_Chrm3
  gRNA
cctacatcattatgaaccgc

SEQ ID NO: 10320 - DNA, 20 bp, Artificial Sequence
  MKO10010320_A_Chrm4
  gRNA
ctgtgccgatgttccgatac

SEQ ID NO: 10321 - DNA, 20 bp, Artificial Sequence
  MKO10010321_A_Chrm4
  gRNA
cgtggcaggtacgatctcga

SEQ ID NO: 10322 - DNA, 20 bp, Artificial Sequence
  MKO10010322_A_Chrm4
  gRNA
tgccagcatcgctcgtaacc

SEQ ID NO: 10323 - DNA, 20 bp, Artificial Sequence
  MKO10010323_A_Chrm5
  gRNA
cgcttggctcggtatgtcag

SEQ ID NO: 10324 - DNA, 20 bp, Artificial Sequence
  MKO10010324_A_Chrm5
  gRNA
tgttgcctataagttccgat

SEQ ID NO: 10325 - DNA, 20 bp, Artificial Sequence
  MKO10010325_A_Chrm5
  gRNA
gcatcatgatcggcttggca

SEQ ID NO: 10326 - DNA, 20 bp, Artificial Sequence
  MKO10010326_A_Chrna10
  gRNA
gccgtgcgtccatgagccga

SEQ ID NO: 10327 - DNA, 20 bp, Artificial Sequence
  MKO10010327_A_Chrna10
  gRNA
tccaatcttcatggcggcgc

SEQ ID NO: 10328 - DNA, 20 bp, Artificial Sequence
  MKO10010328_A_Chrna10
  gRNA
acggcacgagctgcgtgtga

SEQ ID NO: 10329 - DNA, 20 bp, Artificial Sequence
  MKO10010329_A_Chrna1
  gRNA
ctccgaacatgagacgcgtc

SEQ ID NO: 10330 - DNA, 20 bp, Artificial Sequence
  MKO10010330_A_Chrna1
  gRNA
caccagacgcgtctcatgtt

SEQ ID NO: 10331 - DNA, 20 bp, Artificial Sequence
  MKO10010331_A_Chrna1
  gRNA
ttgttatagagaacgacgtc

SEQ ID NO: 10332 - DNA, 20 bp, Artificial Sequence
  MKO10010332_A_Chrna2
  gRNA
cctactacttcgttatccgc

SEQ ID NO: 10333 - DNA, 20 bp, Artificial Sequence
  MKO10010333_A_Chrna2
  gRNA
caagaagtacgactgctgcg

SEQ ID NO: 10334 - DNA, 20 bp, Artificial Sequence
  MKO10010334_A_Chrna2
  gRNA
aaagcgcacgatgaccacat

SEQ ID NO: 10335 - DNA, 20 bp, Artificial Sequence
  MKO10010335_A_Chrna3
  gRNA
ggatggtctcggtgatcacg

SEQ ID NO: 10336 - DNA, 20 bp, Artificial Sequence
  MKO10010336_A_Chrna3
  gRNA
atagcgagtacgtgatgtct

SEQ ID NO: 10337 - DNA, 20 bp, Artificial Sequence
  MKO10010337_A_Chrna3
  gRNA
ggatgggacacgttagccac

SEQ ID NO: 10338 - DNA, 20 bp, Artificial Sequence
  MKO10010338_A_Chrna4
  gRNA
gaccttctcgccgcactccg

SEQ ID NO: 10339 - DNA, 20 bp, Artificial Sequence
  MKO10010339_A_Chrna4
  gRNA
cgccttctactgcccgtgtc

SEQ ID NO: 10340 - DNA, 20 bp, Artificial Sequence
  MKO10010340_A_Chrna4
  gRNA
gccgctcctccgcatgggcc

SEQ ID NO: 10341 - DNA, 20 bp, Artificial Sequence
  MKO10010341_A_Chrna5
  gRNA
gaaagagaacgacgtccgcg

SEQ ID NO: 10342 - DNA, 20 bp, Artificial Sequence
  MKO10010342_A_Chrna5
  gRNA
cagaaacgagagcccgatgc

SEQ ID NO: 10343 - DNA, 20 bp, Artificial Sequence
  MKO10010343_A_Chrna5
  gRNA
cacctgcttcaaccagacgt

SEQ ID NO: 10344 - DNA, 20 bp, Artificial Sequence
  MKO10010344_A_Chrna6
  gRNA
gaatgtctccgatcccgtca

SEQ ID NO: 10345 - DNA, 20 bp, Artificial Sequence
  MKO10010345_A_Chrna6
  gRNA
tcgatgccatcatactccgt

SEQ ID NO: 10346 - DNA, 20 bp, Artificial Sequence
  MKO10010346_A_Chrna6
  gRNA
tgggaaattgtcgacgcctc

SEQ ID NO: 10347 - DNA, 20 bp, Artificial Sequence
  MKO10010347_A_Chrna7
  gRNA
cacattccacaccaacgtct

SEQ ID NO: 10348 - DNA, 20 bp, Artificial Sequence
  MKO10010348_A_Chrna7
  gRNA
ggtcaagaactacaacccgc

SEQ ID NO: 10349 - DNA, 20 bp, Artificial Sequence
  MKO10010349_A_Chrna7
  gRNA
ggcgggcttacctgttatag

SEQ ID NO: 10350 - DNA, 20 bp, Artificial Sequence
  MKO10010350_A_Chrna9
  gRNA
tggagtccagcccgtcatac

SEQ ID NO: 10351 - DNA, 20 bp, Artificial Sequence
  MKO10010351_A_Chrna9
  gRNA
ggtacgcatcgtgccaagtt

SEQ ID NO: 10352 - DNA, 20 bp, Artificial Sequence
  MKO10010352_A_Chrna9
  gRNA
accgcgtccgtatcttctac

SEQ ID NO: 10353 - DNA, 20 bp, Artificial Sequence
  MKO10010353_A_Chrnb1
  gRNA
cggaaatttcgacgttgccc

SEQ ID NO: 10354 - DNA, 20 bp, Artificial Sequence
  MKO10010354_A_Chrnb1
  gRNA
ttcgtcaggcgcccgcgggt

SEQ ID NO: 10355 - DNA, 20 bp, Artificial Sequence
  MKO10010355_A_Chrnb1
  gRNA
cttaggagtggaccgactac

SEQ ID NO: 10356 - DNA, 20 bp, Artificial Sequence
  MKO10010356_A_Chrnb2
  gRNA
cacctccctcgacgtaccgc

SEQ ID NO: 10357 - DNA, 20 bp, Artificial Sequence
  MKO10010357_A_Chrnb2
  gRNA
gcccatcgagcgccccagac

SEQ ID NO: 10358 - DNA, 20 bp, Artificial Sequence
  MKO10010358_A_Chrnb2
  gRNA
acggatcagcttgttatagc

SEQ ID NO: 10359 - DNA, 20 bp, Artificial Sequence
  MKO10010359_A_Chrnb3
  gRNA
ttctacctaccctccgacga

SEQ ID NO: 10360 - DNA, 20 bp, Artificial Sequence
  MKO10010360_A_Chrnb3
  gRNA
tggtggaattaattcgataa

SEQ ID NO: 10361 - DNA, 20 bp, Artificial Sequence
  MKO10010361_A_Chrnb3
  gRNA
ggccatgggatggtacgttg

SEQ ID NO: 10362 - DNA, 20 bp, Artificial Sequence
  MKO10010362_A_Chrnb4
  gRNA
aacgtgatcgtgcgttccaa

SEQ ID NO: 10363 - DNA, 20 bp, Artificial Sequence
  MKO10010363_A_Chrnb4
  gRNA
ggaatggactgactaccgcc

SEQ ID NO: 10364 - DNA, 20 bp, Artificial Sequence
  MKO10010364_A_Chrnb4
  gRNA
ttgtggccctcccgggtcga

SEQ ID NO: 10365 - DNA, 20 bp, Artificial Sequence
  MKO10010365_A_Chrnd
  gRNA
cgtagcccttctcattgaat

SEQ ID NO: 10366 - DNA, 20 bp, Artificial Sequence
  MKO10010366_A_Chrnd
  gRNA
gtggctaccagagattgtac

SEQ ID NO: 10367 - DNA, 20 bp, Artificial Sequence
  MKO10010367_A_Chrnd
  gRNA
agtgatgttcccgaagtcgt

SEQ ID NO: 10368 - DNA, 20 bp, Artificial Sequence
  MKO10010368_A_Chrne
  gRNA
cttaggactggcacgactat

SEQ ID NO: 10369 - DNA, 20 bp, Artificial Sequence
  MKO10010369_A_Chrne
  gRNA
gggtcccttcagaacatgta

SEQ ID NO: 10370 - DNA, 20 bp, Artificial Sequence
  MKO10010370_A_Chrne
  gRNA
gactagaacattgctgtcgt

SEQ ID NO: 10371 - DNA, 20 bp, Artificial Sequence
  MKO10010371_A_Chrng
  gRNA
ctggcggccagatatcgtcc

SEQ ID NO: 10372 - DNA, 20 bp, Artificial Sequence
  MKO10010372_A_Chrng
  gRNA
aggccctcacaactaacgtc

SEQ ID NO: 10373 - DNA, 20 bp, Artificial Sequence
  MKO10010373_A_Chrng
  gRNA
gggggtcgtagtttcgcatc

SEQ ID NO: 10374 - DNA, 20 bp, Artificial Sequence
  MKO10010374_A_Chst10
  gRNA
gtgctcaccttcgggacttc

SEQ ID NO: 10375 - DNA, 20 bp, Artificial Sequence
  MKO10010375_A_Chst10
  gRNA
cctaccatccggatccttaa

SEQ ID NO: 10376 - DNA, 20 bp, Artificial Sequence
  MKO10010376_A_Chst10
  gRNA
gcggaacctctcacacaccg

SEQ ID NO: 10377 - DNA, 20 bp, Artificial Sequence
  MKO10010377_A_Chst11
  gRNA
tgtcaagttcgaggagttcg

SEQ ID NO: 10378 - DNA, 20 bp, Artificial Sequence
  MKO10010378_A_Chst11
  gRNA
ccacatccactacgacctcg

SEQ ID NO: 10379 - DNA, 20 bp, Artificial Sequence
  MKO10010379_A_Chst11
  gRNA
gtcatgcggaggaacccctt

SEQ ID NO: 10380 - DNA, 20 bp, Artificial Sequence
  MKO10010380_A_Chst12
  gRNA
ccgtcctgttccgataactg

SEQ ID NO: 10381 - DNA, 20 bp, Artificial Sequence
  MKO10010381_A_Chst12
  gRNA
tgtcgccagtgctcgttgaa

SEQ ID NO: 10382 - DNA, 20 bp, Artificial Sequence
  MKO10010382_A_Chst12
  gRNA
gtcgcgcacgaacaggaact

SEQ ID NO: 10383 - DNA, 20 bp, Artificial Sequence
  MKO10010383_A_Chst13
  gRNA
cgaagcgcacgtcgtggccg

SEQ ID NO: 10384 - DNA, 20 bp, Artificial Sequence
  MKO10010384_A_Chst13
  gRNA
gcagggtccacgctccgcga

SEQ ID NO: 10385 - DNA, 20 bp, Artificial Sequence
  MKO10010385_A_Chst13
  gRNA
cgcgcactcaccgggacgca

SEQ ID NO: 10386 - DNA, 20 bp, Artificial Sequence
  MKO10010386_A_Chst14
  gRNA
cccgaaaagcgcggagaccc

SEQ ID NO: 10387 - DNA, 20 bp, Artificial Sequence
  MKO10010387_A_Chst14
  gRNA
cggcccaatggggcccgcct

SEQ ID NO: 10388 - DNA, 20 bp, Artificial Sequence
  MKO10010388_A_Chst14
  gRNA
ttgtccgcacacggccctca

SEQ ID NO: 10389 - DNA, 20 bp, Artificial Sequence
  MKO10010389_A_Chst15
  gRNA
actacgagaccgctaccctg

SEQ ID NO: 10390 - DNA, 20 bp, Artificial Sequence
  MKO10010390_A_Chst15
  gRNA
ccgcttggagtagagcacgt

SEQ ID NO: 10391 - DNA, 20 bp, Artificial Sequence
  MKO10010391_A_Chst15
  gRNA
tggtggacccggaagcgctt

SEQ ID NO: 10392 - DNA, 20 bp, Artificial Sequence
  MKO10010392_A_Chst1
  gRNA
ggtcgcccctcgtattgttc

SEQ ID NO: 10393 - DNA, 20 bp, Artificial Sequence
  MKO10010393_A_Chst1
  gRNA
ttgtcgtgagcgcagtcatg

SEQ ID NO: 10394 - DNA, 20 bp, Artificial Sequence
  MKO10010394_A_Chst1
  gRNA
gtacatgctggtacgttatg

SEQ ID NO: 10395 - DNA, 20 bp, Artificial Sequence
  MKO10010395_A_Chst2
  gRNA
cgcgggctatgcactgctac

SEQ ID NO: 10396 - DNA, 20 bp, Artificial Sequence
  MKO10010396_A_Chst2
  gRNA
gtgtcgcaagtaccgcacgc

SEQ ID NO: 10397 - DNA, 20 bp, Artificial Sequence
  MKO10010397_A_Chst2
  gRNA
tcccgcatccgctcgcgtca

SEQ ID NO: 10398 - DNA, 20 bp, Artificial Sequence
  MKO10010398_A_Chst3
  gRNA
cgttgagtggcccgcagcga

SEQ ID NO: 10399 - DNA, 20 bp, Artificial Sequence
  MKO10010399_A_Chst3
  gRNA
ccgcacgggttcctcgttcg

SEQ ID NO: 10400 - DNA, 20 bp, Artificial Sequence
  MKO10010400_A_Chst3
  gRNA
cgtatctgcctcgaatcttt

SEQ ID NO: 10401 - DNA, 20 bp, Artificial Sequence
  MKO10010401_A_Chst4
  gRNA
ggaccaggtgcacgacgtgc

SEQ ID NO: 10402 - DNA, 20 bp, Artificial Sequence
  MKO10010402_A_Chst4
  gRNA
ttacaatgtcacccgcggca

SEQ ID NO: 10403 - DNA, 20 bp, Artificial Sequence
  MKO10010403_A_Chst4
  gRNA
ttggtccttaccttacgaaa

SEQ ID NO: 10404 - DNA, 20 bp, Artificial Sequence
  MKO10010404_A_Chst5
  gRNA
tgcacctagtgcgcgacccg

SEQ ID NO: 10405 - DNA, 20 bp, Artificial Sequence
  MKO10010405_A_Chst5
  gRNA
cgtctgggatacgttgtcgc

SEQ ID NO: 10406 - DNA, 20 bp, Artificial Sequence
  MKO10010406_A_Chst5
  gRNA
gcactaggtgcacgatgcgc

SEQ ID NO: 10407 - DNA, 20 bp, Artificial Sequence
  MKO10010407_A_Chst7
  gRNA
cgcgagttgtgcacggcccg

SEQ ID NO: 10408 - DNA, 20 bp, Artificial Sequence
  MKO10010408_A_Chst7
  gRNA
gtcccacgtccgcgcgtgcc

SEQ ID NO: 10409 - DNA, 20 bp, Artificial Sequence
  MKO10010409_A_Chst7
  gRNA
ccgcgtcatattgaatgcga

SEQ ID NO: 10410 - DNA, 20 bp, Artificial Sequence
  MKO10010410_A_Chst8
  gRNA
agccgcatcgttccgagtcg

SEQ ID NO: 10411 - DNA, 20 bp, Artificial Sequence
  MKO10010411_A_Chst8
  gRNA
ggtaccgcgccaacgcctcg

SEQ ID NO: 10412 - DNA, 20 bp, Artificial Sequence
  MKO10010412_A_Chst8
  gRNA
cgagttcgtccagtacctgt

SEQ ID NO: 10413 - DNA, 20 bp, Artificial Sequence
  MKO10010413_A_Chst9
  gRNA
aaagattagtctccgcattt

SEQ ID NO: 10414 - DNA, 20 bp, Artificial Sequence
  MKO10010414_A_Chst9
  gRNA
tcccatagtgcacagtatca

SEQ ID NO: 10415 - DNA, 20 bp, Artificial Sequence
  MKO10010415_A_Chst9
  gRNA
cctgattcgtgatctgtttc

SEQ ID NO: 10416 - DNA, 20 bp, Artificial Sequence
  MKO10010416_A_Chsy1
  gRNA
tcgcatcagctcgacctgtt

SEQ ID NO: 10417 - DNA, 20 bp, Artificial Sequence
  MKO10010417_A_Chsy1
  gRNA
aacattctgatcccgttgtc

SEQ ID NO: 10418 - DNA, 20 bp, Artificial Sequence
  MKO10010418_A_Chsy1
  gRNA
actgcacgcctgcgaatctc

SEQ ID NO: 10419 - DNA, 20 bp, Artificial Sequence
  MKO10010419_A_Chsy3
  gRNA
cgactgctctagccgcggcc

SEQ ID NO: 10420 - DNA, 20 bp, Artificial Sequence
  MKO10010420_A_Chsy3
  gRNA
ggtagccgagcggccgtagt

SEQ ID NO: 10421 - DNA, 20 bp, Artificial Sequence
  MKO10010421_A_Chsy3
  gRNA
cacactgcgtcccgccgaaa

SEQ ID NO: 10422 - DNA, 20 bp, Artificial Sequence
  MKO10010422_A_Chtf18
  gRNA
tcaggacaggattgcgattt

SEQ ID NO: 10423 - DNA, 20 bp, Artificial Sequence
  MKO10010423_A_Chtf18
  gRNA
gccccatggtcaaacgaccc

SEQ ID NO: 10424 - DNA, 20 bp, Artificial Sequence
  MKO10010424_A_Chtf18
  gRNA
aagacctctggactcggtgg

SEQ ID NO: 10425 - DNA, 20 bp, Artificial Sequence
  MKO10010425_A_Chtf8
  gRNA
gacgttggtgataataggct

SEQ ID NO: 10426 - DNA, 20 bp, Artificial Sequence
  MKO10010426_A_Chtf8
  gRNA
atcgaggctcgctacagcac

SEQ ID NO: 10427 - DNA, 20 bp, Artificial Sequence
  MKO10010427_A_Chtf8
  gRNA
actttcagtacgggggctga

SEQ ID NO: 10428 - DNA, 20 bp, Artificial Sequence
  MKO10010428_A_Chtop
  gRNA
gagctacggctcgtccacct

SEQ ID NO: 10429 - DNA, 20 bp, Artificial Sequence
  MKO10010429_A_Chtop
  gRNA
tggccaggtcggggtatgat

SEQ ID NO: 10430 - DNA, 20 bp, Artificial Sequence
  MKO10010430_A_Chtop
  gRNA
acgagccgtagctccccgaa

SEQ ID NO: 10431 - DNA, 20 bp, Artificial Sequence
  MKO10010431_A_Chuk
  gRNA
actgacgttcccgaaaccgc

SEQ ID NO: 10432 - DNA, 20 bp, Artificial Sequence
  MKO10010432_A_Chuk
  gRNA
aagccgttcccgcatctccc

SEQ ID NO: 10433 - DNA, 20 bp, Artificial Sequence
  MKO10010433_A_Chuk
  gRNA
ggaccatgcgaatgttgtaa

SEQ ID NO: 10434 - DNA, 20 bp, Artificial Sequence
  MKO10010434_A_Churc1
  gRNA
tcgttcttactgaacttcgc

SEQ ID NO: 10435 - DNA, 20 bp, Artificial Sequence
  MKO10010435_A_Churc1
  gRNA
gctgaatgtatactcgtgtc

SEQ ID NO: 10436 - DNA, 20 bp, Artificial Sequence
  MKO10010436_A_Churc1
  gRNA
gaacgatccattctccagac

SEQ ID NO: 10437 - DNA, 20 bp, Artificial Sequence
  MKO10010437_A_Ciao1
  gRNA
ggcgccagatgcgtacagtt

SEQ ID NO: 10438 - DNA, 20 bp, Artificial Sequence
  MKO10010438_A_Ciao1
  gRNA
atgaccgaactgtacgcatc

SEQ ID NO: 10439 - DNA, 20 bp, Artificial Sequence
  MKO10010439_A_Ciao1
  gRNA
cgtggtttggcacccgagcc

SEQ ID NO: 10440 - DNA, 20 bp, Artificial Sequence
  MKO10010440_A_Ciapin1
  gRNA
cgacagaatgacatcgaagc

SEQ ID NO: 10441 - DNA, 20 bp, Artificial Sequence
  MKO10010441_A_Ciapin1
  gRNA
tgaggaggtacagtccgtgc

SEQ ID NO: 10442 - DNA, 20 bp, Artificial Sequence
  MKO10010442_A_Ciapin1
  gRNA
ctgcgctcagtccgtgtcac

SEQ ID NO: 10443 - DNA, 20 bp, Artificial Sequence
  MKO10010443_A_Cib1
  gRNA
tgcctagactttgatgacga

SEQ ID NO: 10444 - DNA, 20 bp, Artificial Sequence
  MKO10010444_A_Cib1
  gRNA
ggatctgctcaaacgatact

SEQ ID NO: 10445 - DNA, 20 bp, Artificial Sequence
  MKO10010445_A_Cib1
  gRNA
gtgcttaccaaagatgcgga

SEQ ID NO: 10446 - DNA, 20 bp, Artificial Sequence
  MKO10010446_A_Cib2
  gRNA
ggctcccaacctcgtcccga

SEQ ID NO: 10447 - DNA, 20 bp, Artificial Sequence
  MKO10010447_A_Cib2
  gRNA
tgctctgcgaatcagcgcct

SEQ ID NO: 10448 - DNA, 20 bp, Artificial Sequence
  MKO10010448_A_Cib2
  gRNA
tagtttgccttgagctcccg

SEQ ID NO: 10449 - DNA, 20 bp, Artificial Sequence
  MKO10010449_A_Cib3
  gRNA
tttccgccagagaattgcgc

SEQ ID NO: 10450 - DNA, 20 bp, Artificial Sequence
  MKO10010450_A_Cib3
  gRNA
caggctgttctatcgatacc

SEQ ID NO: 10451 - DNA, 20 bp, Artificial Sequence
  MKO10010451_A_Cib3
  gRNA
agaagacctgcgcaattctc

SEQ ID NO: 10452 - DNA, 20 bp, Artificial Sequence
  MKO10010452_A_Cib4
  gRNA
gtacctaccatagatacgaa

SEQ ID NO: 10453 - DNA, 20 bp, Artificial Sequence
  MKO10010453_A_Cib4
  gRNA
gaaaagtgacgacgcgtctg

SEQ ID NO: 10454 - DNA, 20 bp, Artificial Sequence
  MKO10010454_A_Cib4
  gRNA
ctccttatagtgcttgcccg

SEQ ID NO: 10455 - DNA, 20 bp, Artificial Sequence
  MKO10010455_A_Cic
  gRNA
acgagaggccgcgccagacg

SEQ ID NO: 10456 - DNA, 20 bp, Artificial Sequence
  MKO10010456_A_Cic
  gRNA
cctgatacccgcgtctggcg

SEQ ID NO: 10457 - DNA, 20 bp, Artificial Sequence
  MKO10010457_A_Cic
  gRNA
actgctccagggggccgtcc

SEQ ID NO: 10458 - DNA, 20 bp, Artificial Sequence
  MKO10010458_A_Cidea
  gRNA
cgagtacatctcgtacatcg

SEQ ID NO: 10459 - DNA, 20 bp, Artificial Sequence
  MKO10010459_A_Cidea
  gRNA
caaaccatgaccgaagtagc

SEQ ID NO: 10460 - DNA, 20 bp, Artificial Sequence
  MKO10010460_A_Cidea
  gRNA
catccgatgcacaagcttca

SEQ ID NO: 10461 - DNA, 20 bp, Artificial Sequence
  MKO10010461_A_Cideb
  gRNA
ggaggacgacacgtgcttga

SEQ ID NO: 10462 - DNA, 20 bp, Artificial Sequence
  MKO10010462_A_Cideb
  gRNA
agaatgtagctttcacgttg

SEQ ID NO: 10463 - DNA, 20 bp, Artificial Sequence
  MKO10010463_A_Cideb
  gRNA
ttggccctaaaagagtactc

SEQ ID NO: 10464 - DNA, 20 bp, Artificial Sequence
  MKO10010464_A_Cidec
  gRNA
tttgcgaaccttccgatctg

SEQ ID NO: 10465 - DNA, 20 bp, Artificial Sequence
  MKO10010465_A_Cidec
  gRNA
cactcacttcacgatgcgct

SEQ ID NO: 10466 - DNA, 20 bp, Artificial Sequence
  MKO10010466_A_Cidec
  gRNA
gccaactaagaagatcgatg

SEQ ID NO: 10467 - DNA, 20 bp, Artificial Sequence
  MKO10010467_A_Ciita
  gRNA
actggatcagtacgtgttcc

SEQ ID NO: 10468 - DNA, 20 bp, Artificial Sequence
  MKO10010468_A_Ciita
  gRNA
gaggagatcgaactcagctc

SEQ ID NO: 10469 - DNA, 20 bp, Artificial Sequence
  MKO10010469_A_Ciita
  gRNA
cctgcaacagcttgctgaac

SEQ ID NO: 10470 - DNA, 20 bp, Artificial Sequence
  MKO10010470_A_Cilp2
  gRNA
acgacctagcccgcaactct

SEQ ID NO: 10471 - DNA, 20 bp, Artificial Sequence
  MKO10010471_A_Cilp2
  gRNA
cacgtgtcccgggagccccc

SEQ ID NO: 10472 - DNA, 20 bp, Artificial Sequence
  MKO10010472_A_Cilp2
  gRNA
tcgaagtcgccatctcctcc

SEQ ID NO: 10473 - DNA, 20 bp, Artificial Sequence
  MKO10010473_A_Cilp
  gRNA
tggtttaacatcgaccaccc

SEQ ID NO: 10474 - DNA, 20 bp, Artificial Sequence
  MKO10010474_A_Cilp
  gRNA
gacccgtacccgcacctgct

SEQ ID NO: 10475 - DNA, 20 bp, Artificial Sequence
  MKO10010475_A_Cilp
  gRNA
catcctgtagggtccttgcg

SEQ ID NO: 10476 - DNA, 20 bp, Artificial Sequence
  MKO10010476_A_Cinp
  gRNA
cgccaatggtgtgcttcaaa

SEQ ID NO: 10477 - DNA, 20 bp, Artificial Sequence
  MKO10010477_A_Cinp
  gRNA
ggccccctctatttcacacg

SEQ ID NO: 10478 - DNA, 20 bp, Artificial Sequence
  MKO10010478_A_Cinp
  gRNA
ctgcagatgaggtctcccgc

SEQ ID NO: 10479 - DNA, 20 bp, Artificial Sequence
  MKO10010479_A_Cir1
  gRNA
cgggtacctttcttaactcc

SEQ ID NO: 10480 - DNA, 20 bp, Artificial Sequence
  MKO10010480_A_Cir1
  gRNA
atttcattcagattgcttat

SEQ ID NO: 10481 - DNA, 20 bp, Artificial Sequence
  MKO10010481_A_Cir1
  gRNA
actgttgtagaaagaagaaa

SEQ ID NO: 10482 - DNA, 20 bp, Artificial Sequence
  MKO10010482_A_Cirbp
  gRNA
tcttctgacaaccggtcccg

SEQ ID NO: 10483 - DNA, 20 bp, Artificial Sequence
  MKO10010483_A_Cirbp
  gRNA
tgaaaatatcgatgacgcta

SEQ ID NO: 10484 - DNA, 20 bp, Artificial Sequence
  MKO10010484_A_Cirbp
  gRNA
cagctatggttatcggagct

SEQ ID NO: 10485 - DNA, 20 bp, Artificial Sequence
  MKO10010485_A_Cirh1a
  gRNA
gcgggtacccacgtcgcagc

SEQ ID NO: 10486 - DNA, 20 bp, Artificial Sequence
  MKO10010486_A_Cirh1a
  gRNA
gctgcgacgtgggtacccgc

SEQ ID NO: 10487 - DNA, 20 bp, Artificial Sequence
  MKO10010487_A_Cirh1a
  gRNA
ggacagcggctctttagtgc

SEQ ID NO: 10488 - DNA, 20 bp, Artificial Sequence
  MKO10010488_A_Cisd1
  gRNA
tcttgcagttgagtggatcg

SEQ ID NO: 10489 - DNA, 20 bp, Artificial Sequence
  MKO10010489_A_Cisd1
  gRNA
gggcggctcacctcgcacag

SEQ ID NO: 10490 - DNA, 20 bp, Artificial Sequence
  MKO10010490_A_Cisd1
  gRNA
agctccaactccgctgtgcg

SEQ ID NO: 10491 - DNA, 20 bp, Artificial Sequence
  MKO10010491_A_Cisd2
  gRNA
cgaacccggtgatgctgtcg

SEQ ID NO: 10492 - DNA, 20 bp, Artificial Sequence
  MKO10010492_A_Cisd2
  gRNA
ccagaagcgcaagtaccccg

SEQ ID NO: 10493 - DNA, 20 bp, Artificial Sequence
  MKO10010493_A_Cisd2
  gRNA
gcagctgcaccttcacgatg

SEQ ID NO: 10494 - DNA, 20 bp, Artificial Sequence
  MKO10010494_A_Cisd3
  gRNA
atgtggccgaagcaagaatc

SEQ ID NO: 10495 - DNA, 20 bp, Artificial Sequence
  MKO10010495_A_Cisd3
  gRNA
tggttgccgggaaaacctac

SEQ ID NO: 10496 - DNA, 20 bp, Artificial Sequence
  MKO10010496_A_Cisd3
  gRNA
acagtaagggggccgctgag

SEQ ID NO: 10497 - DNA, 20 bp, Artificial Sequence
  MKO10010497_A_Cish
  gRNA
ggaggtagtcggccatacgc

SEQ ID NO: 10498 - DNA, 20 bp, Artificial Sequence
  MKO10010498_A_Cish
  gRNA
ggcgtactcgatccgcacgt

SEQ ID NO: 10499 - DNA, 20 bp, Artificial Sequence
  MKO10010499_A_Cish
  gRNA
gagcttacccctgtacgcaa

SEQ ID NO: 10500 - DNA, 20 bp, Artificial Sequence
  MKO10010500_A_Cited1
  gRNA
ctgaaatgccaactatgtcg

SEQ ID NO: 10501 - DNA, 20 bp, Artificial Sequence
  MKO10010501_A_Cited1
  gRNA
aagcttaatagccagtacca

SEQ ID NO: 10502 - DNA, 20 bp, Artificial Sequence
  MKO10010502_A_Cited1
  gRNA
tctggatcgacatctccaat

SEQ ID NO: 10503 - DNA, 20 bp, Artificial Sequence
  MKO10010503_A_Cited2
  gRNA
tgccgtcggggaagcgcccg

SEQ ID NO: 10504 - DNA, 20 bp, Artificial Sequence
  MKO10010504_A_Cited2
  gRNA
cgcggggacgtgagccaccg

SEQ ID NO: 10505 - DNA, 20 bp, Artificial Sequence
  MKO10010505_A_Cited2
  gRNA
ggcgtgcctgatgccgctcg

SEQ ID NO: 10506 - DNA, 20 bp, Artificial Sequence
  MKO10010506_A_Cited4
  gRNA
cgcctcttcgtcgatgagct

SEQ ID NO: 10507 - DNA, 20 bp, Artificial Sequence
  MKO10010507_A_Cited4
  gRNA
gctccggcagctcgcgtacg

SEQ ID NO: 10508 - DNA, 20 bp, Artificial Sequence
  MKO10010508_A_Cited4
  gRNA
agaagcaatcgaactcgctc

SEQ ID NO: 10509 - DNA, 20 bp, Artificial Sequence
  MKO10010509_A_Cit
  gRNA
acttcgaagtctctcgccga

SEQ ID NO: 10510 - DNA, 20 bp, Artificial Sequence
  MKO10010510_A_Cit
  gRNA
ccgacaccatagccgagttg

SEQ ID NO: 10511 - DNA, 20 bp, Artificial Sequence
  MKO10010511_A_Cit
  gRNA
gtcgcttctgaacagatacg

SEQ ID NO: 10512 - DNA, 20 bp, Artificial Sequence
  MKO10010512_A_Ciz1
  gRNA
gcactactcaccttgcgatt

SEQ ID NO: 10513 - DNA, 20 bp, Artificial Sequence
  MKO10010513_A_Ciz1
  gRNA
gaggctggcaccgtcatacg

SEQ ID NO: 10514 - DNA, 20 bp, Artificial Sequence
  MKO10010514_A_Ciz1
  gRNA
ggagtacccagtgttgccgt

SEQ ID NO: 10515 - DNA, 20 bp, Artificial Sequence
  MKO10010515_A_Ckap2l
  gRNA
ggtaaactcacttggcgttg

SEQ ID NO: 10516 - DNA, 20 bp, Artificial Sequence
  MKO10010516_A_Ckap2l
  gRNA
ccagtacagcagccgcaagt

SEQ ID NO: 10517 - DNA, 20 bp, Artificial Sequence
  MKO10010517_A_Ckap2l
  gRNA
cgtgtagaatctgcaactgt

SEQ ID NO: 10518 - DNA, 20 bp, Artificial Sequence
  MKO10010518_A_Ckap2
  gRNA
acctgtgagcactgcgtcga

SEQ ID NO: 10519 - DNA, 20 bp, Artificial Sequence
  MKO10010519_A_Ckap2
  gRNA
ggccctgtttcgcagctccg

SEQ ID NO: 10520 - DNA, 20 bp, Artificial Sequence
  MKO10010520_A_Ckap2
  gRNA
atgcctgaaccttattaatg

SEQ ID NO: 10521 - DNA, 20 bp, Artificial Sequence
  MKO10010521_A_Ckap4
  gRNA
acgtcatccgcgccgcccga

SEQ ID NO: 10522 - DNA, 20 bp, Artificial Sequence
  MKO10010522_A_Ckap4
  gRNA
ggatgacctgcggaacgacc

SEQ ID NO: 10523 - DNA, 20 bp, Artificial Sequence
  MKO10010523_A_Ckap4
  gRNA
aagggcgcccacccgtcggg

SEQ ID NO: 10524 - DNA, 20 bp, Artificial Sequence
  MKO10010524_A_Ckap5
  gRNA
tgtcactgattccaatgcag

SEQ ID NO: 10525 - DNA, 20 bp, Artificial Sequence
  MKO10010525_A_Ckap5
  gRNA
actatttgaatctcgagaca

SEQ ID NO: 10526 - DNA, 20 bp, Artificial Sequence
  MKO10010526_A_Ckap5
  gRNA
tgtttacagaacaacgggag

SEQ ID NO: 10527 - DNA, 20 bp, Artificial Sequence
  MKO10010527_A_Ckb
  gRNA
ttcccagggtggcgatgacc

SEQ ID NO: 10528 - DNA, 20 bp, Artificial Sequence
  MKO10010528_A_Ckb
  gRNA
ccccgcacctgcaggttgtc

SEQ ID NO: 10529 - DNA, 20 bp, Artificial Sequence
  MKO10010529_A_Ckb
  gRNA
tcgcgagctcagcacgtagt

SEQ ID NO: 10530 - DNA, 20 bp, Artificial Sequence
  MKO10010530_A_Cklf
  gRNA
cgacggcttacgaccggccg

SEQ ID NO: 10531 - DNA, 20 bp, Artificial Sequence
  MKO10010531_A_Cklf
  gRNA
gtccacacgtgtataagact

SEQ ID NO: 10532 - DNA, 20 bp, Artificial Sequence
  MKO10010532_A_Cklf
  gRNA
ttcctagtcttatacacgtg

SEQ ID NO: 10533 - DNA, 20 bp, Artificial Sequence
  MKO10010533_A_Ckmt1
  gRNA
catatccattatgccgctct

SEQ ID NO: 10534 - DNA, 20 bp, Artificial Sequence
  MKO10010534_A_Ckmt1
  gRNA
gcctatagtaccgtccagcc

SEQ ID NO: 10535 - DNA, 20 bp, Artificial Sequence
  MKO10010535_A_Ckmt1
  gRNA
acctggctggacggtactat

SEQ ID NO: 10536 - DNA, 20 bp, Artificial Sequence
  MKO10010536_A_Ckmt2
  gRNA
tcggccagtgcgtacccgag

SEQ ID NO: 10537 - DNA, 20 bp, Artificial Sequence
  MKO10010537_A_Ckmt2
  gRNA
ccacccggcagattactcac

SEQ ID NO: 10538 - DNA, 20 bp, Artificial Sequence
  MKO10010538_A_Ckmt2
  gRNA
ctggtccagggtatagccac

SEQ ID NO: 10539 - DNA, 20 bp, Artificial Sequence
  MKO10010539_A_Ckm
  gRNA
ccacctccgcgtgatctcca

SEQ ID NO: 10540 - DNA, 20 bp, Artificial Sequence
  MKO10010540_A_Ckm
  gRNA
tgcccttgaactcgcccgtc

SEQ ID NO: 10541 - DNA, 20 bp, Artificial Sequence
  MKO10010541_A_Ckm
  gRNA
gggctgtgtggccggcgatg

SEQ ID NO: 10542 - DNA, 20 bp, Artificial Sequence
  MKO10010542_A_Cks1b
  gRNA
cctgactctgctgaacgccg

SEQ ID NO: 10543 - DNA, 20 bp, Artificial Sequence
  MKO10010543_A_Cks1b
  gRNA
cactatatgatccatgaacc

SEQ ID NO: 10544 - DNA, 20 bp, Artificial Sequence
  MKO10010544_A_Cks1b
  gRNA
ctcacatcttactgttccga

SEQ ID NO: 10545 - DNA, 20 bp, Artificial Sequence
  MKO10010545_A_Cks2
  gRNA
cattacatgattcatgagcc

SEQ ID NO: 10546 - DNA, 20 bp, Artificial Sequence
  MKO10010546_A_Cks2
  gRNA
ctgagtagtagatctgcttg

SEQ ID NO: 10547 - DNA, 20 bp, Artificial Sequence
  MKO10010547_A_Cks2
  gRNA
tcgatgagcactacgagtac

SEQ ID NO: 10548 - DNA, 20 bp, Artificial Sequence
  MKO10010548_A_Clasp1
  gRNA
tgccgatttgcgccttgaac

SEQ ID NO: 10549 - DNA, 20 bp, Artificial Sequence
  MKO10010549_A_Clasp1
  gRNA
tctatggtaacgcccagcgc

SEQ ID NO: 10550 - DNA, 20 bp, Artificial Sequence
  MKO10010550_A_Clasp1
  gRNA
cgctgggcgttaccatagag

SEQ ID NO: 10551 - DNA, 20 bp, Artificial Sequence
  MKO10010551_A_Clasp2
  gRNA
aacttaccgcattggcacgc

SEQ ID NO: 10552 - DNA, 20 bp, Artificial Sequence
  MKO10010552_A_Clasp2
  gRNA
tcagcaggtggccctaaggt

SEQ ID NO: 10553 - DNA, 20 bp, Artificial Sequence
  MKO10010553_A_Clasp2
  gRNA
tgaggcggctgatttgcaaa

SEQ ID NO: 10554 - DNA, 20 bp, Artificial Sequence
  MKO10010554_A_Clasrp
  gRNA
ctggtgcagaacgacttcgc

SEQ ID NO: 10555 - DNA, 20 bp, Artificial Sequence
  MKO10010555_A_Clasrp
  gRNA
ccgagcctgcaaggttcacc

SEQ ID NO: 10556 - DNA, 20 bp, Artificial Sequence
  MKO10010556_A_Clasrp
  gRNA
cgctcgtctgactcctgttc

SEQ ID NO: 10557 - DNA, 20 bp, Artificial Sequence
  MKO10010557_A_Clca1
  gRNA
tttgtcataggtgttccacc

SEQ ID NO: 10558 - DNA, 20 bp, Artificial Sequence
  MKO10010558_A_Clca1
  gRNA
actgtgtcacaagggcgtgc

SEQ ID NO: 10559 - DNA, 20 bp, Artificial Sequence
  MKO10010559_A_Clca1
  gRNA
ttgtcatacgattctcgttt

SEQ ID NO: 10560 - DNA, 20 bp, Artificial Sequence
  MKO10010560_A_Clca2
  gRNA
aggtgctccgccagcatcac

SEQ ID NO: 10561 - DNA, 20 bp, Artificial Sequence
  MKO10010561_A_Clca2
  gRNA
gctgtgtgacaagggcgtgc

SEQ ID NO: 10562 - DNA, 20 bp, Artificial Sequence
  MKO10010562_A_Clca2
  gRNA
ttgtcgtacgattctcgttt

SEQ ID NO: 10563 - DNA, 20 bp, Artificial Sequence
  MKO10010563_A_Clca3
  gRNA
aaatcaagttcgtcggtgcc

SEQ ID NO: 10564 - DNA, 20 bp, Artificial Sequence
  MKO10010564_A_Clca3
  gRNA
gagccctacaccgaacatat

SEQ ID NO: 10565 - DNA, 20 bp, Artificial Sequence
  MKO10010565_A_Clca3
  gRNA
tgatggaagccttctcgttt

SEQ ID NO: 10566 - DNA, 20 bp, Artificial Sequence
  MKO10010566_A_Clca4
  gRNA
tgtcgtcgagatgcaaagac

SEQ ID NO: 10567 - DNA, 20 bp, Artificial Sequence
  MKO10010567_A_Clca4
  gRNA
aggtgttccaccgacatcac

SEQ ID NO: 10568 - DNA, 20 bp, Artificial Sequence
  MKO10010568_A_Clca4
  gRNA
ccccacactgtccgtactga

SEQ ID NO: 10569 - DNA, 20 bp, Artificial Sequence
  MKO10010569_A_Clca5
  gRNA
gtaattatgatccgtccaag

SEQ ID NO: 10570 - DNA, 20 bp, Artificial Sequence
  MKO10010570_A_Clca5
  gRNA
ctcaacgatgagttagccgc

SEQ ID NO: 10571 - DNA, 20 bp, Artificial Sequence
  MKO10010571_A_Clca5
  gRNA
ttccgtccattcacgtagaa

SEQ ID NO: 10572 - DNA, 20 bp, Artificial Sequence
  MKO10010572_A_Clca6
  gRNA
tcatcgcacagctgccccct

SEQ ID NO: 10573 - DNA, 20 bp, Artificial Sequence
  MKO10010573_A_Clca6
  gRNA
attcgtccccgtgatacctg

SEQ ID NO: 10574 - DNA, 20 bp, Artificial Sequence
  MKO10010574_A_Clca6
  gRNA
aagacagtccccagtacagg

SEQ ID NO: 10575 - DNA, 20 bp, Artificial Sequence
  MKO10010575_A_Clcc1
  gRNA
tgtcacttagtgcgtcgtcc

SEQ ID NO: 10576 - DNA, 20 bp, Artificial Sequence
  MKO10010576_A_Clcc1
  gRNA
ccctgactcgtcagaagccg

SEQ ID NO: 10577 - DNA, 20 bp, Artificial Sequence
  MKO10010577_A_Clcc1
  gRNA
gttatgctcatgatgacgac

SEQ ID NO: 10578 - DNA, 20 bp, Artificial Sequence
  MKO10010578_A_Clcf1
  gRNA
tctcctgtgcgattaagagc

SEQ ID NO: 10579 - DNA, 20 bp, Artificial Sequence
  MKO10010579_A_Clcf1
  gRNA
tgacttcaatcctcctcgac

SEQ ID NO: 10580 - DNA, 20 bp, Artificial Sequence
  MKO10010580_A_Clcf1
  gRNA
cttggctgaacgccatagcc

SEQ ID NO: 10581 - DNA, 20 bp, Artificial Sequence
  MKO10010581_A_Clcn1
  gRNA
gaacctaccctgaaggctct

SEQ ID NO: 10582 - DNA, 20 bp, Artificial Sequence
  MKO10010582_A_Clcn1
  gRNA
gctaggcttcatctgggcat

SEQ ID NO: 10583 - DNA, 20 bp, Artificial Sequence
  MKO10010583_A_Clcn1
  gRNA
aaggtggtagctttgacagc

SEQ ID NO: 10584 - DNA, 20 bp, Artificial Sequence
  MKO10010584_A_Clcn2
  gRNA
gctgctcgtattcgcctggg

SEQ ID NO: 10585 - DNA, 20 bp, Artificial Sequence
  MKO10010585_A_Clcn2
  gRNA
gatccagtcttcaccgaccc

SEQ ID NO: 10586 - DNA, 20 bp, Artificial Sequence
  MKO10010586_A_Clcn2
  gRNA
cccaatgaccttagctacaa

SEQ ID NO: 10587 - DNA, 20 bp, Artificial Sequence
  MKO10010587_A_Clcn3
  gRNA
ctcgcacccagtcaatagta

SEQ ID NO: 10588 - DNA, 20 bp, Artificial Sequence
  MKO10010588_A_Clcn3
  gRNA
attcttacaggggcactagc

SEQ ID NO: 10589 - DNA, 20 bp, Artificial Sequence
  MKO10010589_A_Clcn3
  gRNA
tcatcgtaggtaccgacacc

SEQ ID NO: 10590 - DNA, 20 bp, Artificial Sequence
  MKO10010590_A_Clcn4-2
  gRNA
ctcgtgctcgtcgtatcctc

SEQ ID NO: 10591 - DNA, 20 bp, Artificial Sequence
  MKO10010591_A_Clcn4-2
  gRNA
atcccgaccacgcgtccagc

SEQ ID NO: 10592 - DNA, 20 bp, Artificial Sequence
  MKO10010592_A_Clcn4-2
  gRNA
acggtgcgaacacacgtacc

SEQ ID NO: 10593 - DNA, 20 bp, Artificial Sequence
  MKO10010593_A_Clcn5
  gRNA
attacttcatgtacgtcctc

SEQ ID NO: 10594 - DNA, 20 bp, Artificial Sequence
  MKO10010594_A_Clcn5
  gRNA
ttacctctcggtgcctatct

SEQ ID NO: 10595 - DNA, 20 bp, Artificial Sequence
  MKO10010595_A_Clcn5
  gRNA
aggagccaatccctggtgta

SEQ ID NO: 10596 - DNA, 20 bp, Artificial Sequence
  MKO10010596_A_Clcn6
  gRNA
cagccccgtacagacgccaa

SEQ ID NO: 10597 - DNA, 20 bp, Artificial Sequence
  MKO10010597_A_Clcn6
  gRNA
tggatggtggtgttcgccat

SEQ ID NO: 10598 - DNA, 20 bp, Artificial Sequence
  MKO10010598_A_Clcn6
  gRNA
gaaccactccgaacttcagt

SEQ ID NO: 10599 - DNA, 20 bp, Artificial Sequence
  MKO10010599_A_Clcn7
  gRNA
cgttgttcatctgtccgatt

SEQ ID NO: 10600 - DNA, 20 bp, Artificial Sequence
  MKO10010600_A_Clcn7
  gRNA
cctcaagtaccgcgtcatca

SEQ ID NO: 10601 - DNA, 20 bp, Artificial Sequence
  MKO10010601_A_Clcn7
  gRNA
tatctaggctttccggacag

SEQ ID NO: 10602 - DNA, 20 bp, Artificial Sequence
  MKO10010602_A_Clcnka
  gRNA
cgcgtgcgcgccaaagccgt

SEQ ID NO: 10603 - DNA, 20 bp, Artificial Sequence
  MKO10010603_A_Clcnka
  gRNA
agtaccagtcctcacgcgca

SEQ ID NO: 10604 - DNA, 20 bp, Artificial Sequence
  MKO10010604_A_Clcnka
  gRNA
gcggctgttccgtgcgcgtg

SEQ ID NO: 10605 - DNA, 20 bp, Artificial Sequence
  MKO10010605_A_Clcnkb
  gRNA
cgcgtgcgcaccaagaccgt

SEQ ID NO: 10606 - DNA, 20 bp, Artificial Sequence
  MKO10010606_A_Clcnkb
  gRNA
cgtgatgatcgctgcttacc

SEQ ID NO: 10607 - DNA, 20 bp, Artificial Sequence
  MKO10010607_A_Clcnkb
  gRNA
caggaccactccggtcaaga

SEQ ID NO: 10608 - DNA, 20 bp, Artificial Sequence
  MKO10010608_A_Cldn10
  gRNA
tacgaaggcgacgatttcca

SEQ ID NO: 10609 - DNA, 20 bp, Artificial Sequence
  MKO10010609_A_Cldn10
  gRNA
atctgcgttaccgattccac

SEQ ID NO: 10610 - DNA, 20 bp, Artificial Sequence
  MKO10010610_A_Cldn10
  gRNA
tagaggactaatgatcgctg

SEQ ID NO: 10611 - DNA, 20 bp, Artificial Sequence
  MKO10010611_A_Cldn11
  gRNA
tcgctgtacgcaggttggat

SEQ ID NO: 10612 - DNA, 20 bp, Artificial Sequence
  MKO10010612_A_Cldn11
  gRNA
gggtttcgtcacgagcttcg

SEQ ID NO: 10613 - DNA, 20 bp, Artificial Sequence
  MKO10010613_A_Cldn11
  gRNA
gagatcaccatcgtgagctt

SEQ ID NO: 10614 - DNA, 20 bp, Artificial Sequence
  MKO10010614_A_Cldn12
  gRNA
gcctgatgtacgaccgtacg

SEQ ID NO: 10615 - DNA, 20 bp, Artificial Sequence
  MKO10010615_A_Cldn12
  gRNA
caaccgacaggtaccacgta

SEQ ID NO: 10616 - DNA, 20 bp, Artificial Sequence
  MKO10010616_A_Cldn12
  gRNA
cggtggctgcgtggacatct

SEQ ID NO: 10617 - DNA, 20 bp, Artificial Sequence
  MKO10010617_A_Cldn13
  gRNA
cttacctaaggtatcgttgt

SEQ ID NO: 10618 - DNA, 20 bp, Artificial Sequence
  MKO10010618_A_Cldn13
  gRNA
ctcttgtttgctgacgacca

SEQ ID NO: 10619 - DNA, 20 bp, Artificial Sequence
  MKO10010619_A_Cldn13
  gRNA
cggggaaagtctctgcatac

SEQ ID NO: 10620 - DNA, 20 bp, Artificial Sequence
  MKO10010620_A_Cldn14
  gRNA
tgggccgtcctccgccagtg

SEQ ID NO: 10621 - DNA, 20 bp, Artificial Sequence
  MKO10010621_A_Cldn14
  gRNA
tgacctcagccgcgcacagt

SEQ ID NO: 10622 - DNA, 20 bp, Artificial Sequence
  MKO10010622_A_Cldn14
  gRNA
cgcaggccatgcccgacaac

SEQ ID NO: 10623 - DNA, 20 bp, Artificial Sequence
  MKO10010623_A_Cldn15
  gRNA
gggactccgctgcaccaacg

SEQ ID NO: 10624 - DNA, 20 bp, Artificial Sequence
  MKO10010624_A_Cldn15
  gRNA
gacatcagcttcggtaaata

SEQ ID NO: 10625 - DNA, 20 bp, Artificial Sequence
  MKO10010625_A_Cldn15
  gRNA
cggggtatcacaaccgtaga

SEQ ID NO: 10626 - DNA, 20 bp, Artificial Sequence
  MKO10010626_A_Cldn16
  gRNA
gcataagggtagttcctctc

SEQ ID NO: 10627 - DNA, 20 bp, Artificial Sequence
  MKO10010627_A_Cldn16
  gRNA
cacacagaaccgatgattcc

SEQ ID NO: 10628 - DNA, 20 bp, Artificial Sequence
  MKO10010628_A_Cldn16
  gRNA
aggaagccctattcaactgc

SEQ ID NO: 10629 - DNA, 20 bp, Artificial Sequence
  MKO10010629_A_Cldn17
  gRNA
gcacgcgctgcttccagtac

SEQ ID NO: 10630 - DNA, 20 bp, Artificial Sequence
  MKO10010630_A_Cldn17
  gRNA
aactagtccagcgatctgta

SEQ ID NO: 10631 - DNA, 20 bp, Artificial Sequence
  MKO10010631_A_Cldn17
  gRNA
gtaggctttgaccctctcgc

SEQ ID NO: 10632 - DNA, 20 bp, Artificial Sequence
  MKO10010632_A_Cldn18
  gRNA
taccaatgcgaatgcacttc

SEQ ID NO: 10633 - DNA, 20 bp, Artificial Sequence
  MKO10010633_A_Cldn18
  gRNA
accgccgtgttccagtatga

SEQ ID NO: 10634 - DNA, 20 bp, Artificial Sequence
  MKO10010634_A_Cldn18
  gRNA
gaacaatgcccacgatcatc

SEQ ID NO: 10635 - DNA, 20 bp, Artificial Sequence
  MKO10010635_A_Cldn19
  gRNA
acatccacagcccttcgtag

SEQ ID NO: 10636 - DNA, 20 bp, Artificial Sequence
  MKO10010636_A_Cldn19
  gRNA
gcccagccgacgaacagagc

SEQ ID NO: 10637 - DNA, 20 bp, Artificial Sequence
  MKO10010637_A_Cldn19
  gRNA
cccagctctgttcgtcggct

SEQ ID NO: 10638 - DNA, 20 bp, Artificial Sequence
  MKO10010638_A_Cldn1
  gRNA
tcctgcgtttcgcaaagcac

SEQ ID NO: 10639 - DNA, 20 bp, Artificial Sequence
  MKO10010639_A_Cldn1
  gRNA
tgtaggtctggcgacattag

SEQ ID NO: 10640 - DNA, 20 bp, Artificial Sequence
  MKO10010640_A_Cldn1
  gRNA
gttggcttgggataaggccg

SEQ ID NO: 10641 - DNA, 20 bp, Artificial Sequence
  MKO10010641_A_Cldn20
  gRNA
gggatttgtacttcgatagc

SEQ ID NO: 10642 - DNA, 20 bp, Artificial Sequence
  MKO10010642_A_Cldn20
  gRNA
aaagttcgctatgatctcct

SEQ ID NO: 10643 - DNA, 20 bp, Artificial Sequence
  MKO10010643_A_Cldn20
  gRNA
caggcgagcacataacttga

SEQ ID NO: 10644 - DNA, 20 bp, Artificial Sequence
  MKO10010644_A_Cldn22
  gRNA
cagccgcctgcgttgccgtt

SEQ ID NO: 10645 - DNA, 20 bp, Artificial Sequence
  MKO10010645_A_Cldn22
  gRNA
tgagcccgggcttagatttc

SEQ ID NO: 10646 - DNA, 20 bp, Artificial Sequence
  MKO10010646_A_Cldn22
  gRNA
aatgggcttagtcttccgaa

SEQ ID NO: 10647 - DNA, 20 bp, Artificial Sequence
  MKO10010647_A_Cldn23
  gRNA
agtagttccactcgtcgggc

SEQ ID NO: 10648 - DNA, 20 bp, Artificial Sequence
  MKO10010648_A_Cldn23
  gRNA
cgccccgagctcgccggtca

SEQ ID NO: 10649 - DNA, 20 bp, Artificial Sequence
  MKO10010649_A_Cldn23
  gRNA
cagcatcagcaccgtctacg

SEQ ID NO: 10650 - DNA, 20 bp, Artificial Sequence
  MKO10010650_A_Cldn24
  gRNA
gcagcctcgagtcactatgc

SEQ ID NO: 10651 - DNA, 20 bp, Artificial Sequence
  MKO10010651_A_Cldn24
  gRNA
aggtatgaaccatgatctcg

SEQ ID NO: 10652 - DNA, 20 bp, Artificial Sequence
  MKO10010652_A_Cldn24
  gRNA
agaaagccctactgattgca

SEQ ID NO: 10653 - DNA, 20 bp, Artificial Sequence
  MKO10010653_A_Cldn25
  gRNA
tggcggccgctctcttcatc

SEQ ID NO: 10654 - DNA, 20 bp, Artificial Sequence
  MKO10010654_A_Cldn25
  gRNA
gaccccggcaaccacaatag

SEQ ID NO: 10655 - DNA, 20 bp, Artificial Sequence
  MKO10010655_A_Cldn25
  gRNA
gtgactcgaataaaatcgcc

SEQ ID NO: 10656 - DNA, 20 bp, Artificial Sequence
  MKO10010656_A_Cldn26
  gRNA
cgccgttgatgaaccctttc

SEQ ID NO: 10657 - DNA, 20 bp, Artificial Sequence
  MKO10010657_A_Cldn26
  gRNA
gatcaggtggatatacgctt

SEQ ID NO: 10658 - DNA, 20 bp, Artificial Sequence
  MKO10010658_A_Cldn26
  gRNA
atacaaagctaatccagccg

SEQ ID NO: 10659 - DNA, 20 bp, Artificial Sequence
  MKO10010659_A_Cldn2
  gRNA
ataggaactcgttcgccagt

SEQ ID NO: 10660 - DNA, 20 bp, Artificial Sequence
  MKO10010660_A_Cldn2
  gRNA
gcggcgagtagaagtcccga

SEQ ID NO: 10661 - DNA, 20 bp, Artificial Sequence
  MKO10010661_A_Cldn2
  gRNA
gccaaccgccgtcacaatgc

SEQ ID NO: 10662 - DNA, 20 bp, Artificial Sequence
  MKO10010662_A_Cldn3
  gRNA
tattctgcgccgcgatccac

SEQ ID NO: 10663 - DNA, 20 bp, Artificial Sequence
  MKO10010663_A_Cldn3
  gRNA
tggatcgcggcgcagaatag

SEQ ID NO: 10664 - DNA, 20 bp, Artificial Sequence
  MKO10010664_A_Cldn3
  gRNA
gtgggtgcatacttgtcgcg

SEQ ID NO: 10665 - DNA, 20 bp, Artificial Sequence
  MKO10010665_A_Cldn4
  gRNA
gggcctcgctttacgtcggc

SEQ ID NO: 10666 - DNA, 20 bp, Artificial Sequence
  MKO10010666_A_Cldn4
  gRNA
gcaggccgcccgagccctta

SEQ ID NO: 10667 - DNA, 20 bp, Artificial Sequence
  MKO10010667_A_Cldn4
  gRNA
cgcccagccgacgtaaagcg

SEQ ID NO: 10668 - DNA, 20 bp, Artificial Sequence
  MKO10010668_A_Cldn5
  gRNA
ccgtcggatcatagaactcg

SEQ ID NO: 10669 - DNA, 20 bp, Artificial Sequence
  MKO10010669_A_Cldn5
  gRNA
tcaagtactctgcgccgcgg

SEQ ID NO: 10670 - DNA, 20 bp, Artificial Sequence
  MKO10010670_A_Cldn5
  gRNA
cccaggcgccgcaacacacg

SEQ ID NO: 10671 - DNA, 20 bp, Artificial Sequence
  MKO10010671_A_Cldn6
  gRNA
gatgagcaccagacgagact

SEQ ID NO: 10672 - DNA, 20 bp, Artificial Sequence
  MKO10010672_A_Cldn6
  gRNA
atagcaggccatgtaatgtc

SEQ ID NO: 10673 - DNA, 20 bp, Artificial Sequence
  MKO10010673_A_Cldn6
  gRNA
ctccagccaggtacacgagc

SEQ ID NO: 10674 - DNA, 20 bp, Artificial Sequence
  MKO10010674_A_Cldn7
  gRNA
gcatgaagtgcacacgctgt

SEQ ID NO: 10675 - DNA, 20 bp, Artificial Sequence
  MKO10010675_A_Cldn7
  gRNA
tctccctacaggtacgagtt

SEQ ID NO: 10676 - DNA, 20 bp, Artificial Sequence
  MKO10010676_A_Cldn7
  gRNA
gatgatgttgtcgcccgcat

SEQ ID NO: 10677 - DNA, 20 bp, Artificial Sequence
  MKO10010677_A_Cldn8
  gRNA
tgtggccctaaagcgcgagc

SEQ ID NO: 10678 - DNA, 20 bp, Artificial Sequence
  MKO10010678_A_Cldn8
  gRNA
gatgtgtgctgcgtccgtct

SEQ ID NO: 10679 - DNA, 20 bp, Artificial Sequence
  MKO10010679_A_Cldn8
  gRNA
acagcgctggtgctgatcgc

SEQ ID NO: 10680 - DNA, 20 bp, Artificial Sequence
  MKO10010680_A_Cldn9
  gRNA
gcccgtatcgtactcaccgc

SEQ ID NO: 10681 - DNA, 20 bp, Artificial Sequence
  MKO10010681_A_Cldn9
  gRNA
cccctgcggtgagtacgata

SEQ ID NO: 10682 - DNA, 20 bp, Artificial Sequence
  MKO10010682_A_Cldn9
  gRNA
cgcccagtgcaccacgtgtg

SEQ ID NO: 10683 - DNA, 20 bp, Artificial Sequence
  MKO10010683_A_Cldnd2
  gRNA
ctttgaagtgtatacggcca

SEQ ID NO: 10684 - DNA, 20 bp, Artificial Sequence
  MKO10010684_A_Cldnd2
  gRNA
agccaaccatccgaaaaagt

SEQ ID NO: 10685 - DNA, 20 bp, Artificial Sequence
  MKO10010685_A_Cldnd2
  gRNA
ggccgcattcataggcatac

SEQ ID NO: 10686 - DNA, 20 bp, Artificial Sequence
  MKO10010686_A_Clec10a
  gRNA
tctcctcgatccttgagttc

SEQ ID NO: 10687 - DNA, 20 bp, Artificial Sequence
  MKO10010687_A_Clec10a
  gRNA
agacgaccaccaacagcagg

SEQ ID NO: 10688 - DNA, 20 bp, Artificial Sequence
  MKO10010688_A_Clec10a
  gRNA
tgttgtctaaagtggctctc

SEQ ID NO: 10689 - DNA, 20 bp, Artificial Sequence
  MKO10010689_A_Clec11a
  gRNA
tcagcccaatggcggcgtcc

SEQ ID NO: 10690 - DNA, 20 bp, Artificial Sequence
  MKO10010690_A_Clec11a
  gRNA
attggtgtaggcctgcatcg

SEQ ID NO: 10691 - DNA, 20 bp, Artificial Sequence
  MKO10010691_A_Clec11a
  gRNA
ccaccaagaaccgtcgtctg

SEQ ID NO: 10692 - DNA, 20 bp, Artificial Sequence
  MKO10010692_A_Clec12a
  gRNA
gagctgtatagcaaagaacc

SEQ ID NO: 10693 - DNA, 20 bp, Artificial Sequence
  MKO10010693_A_Clec12a
  gRNA
caaatgtaaaccatgtccaa

SEQ ID NO: 10694 - DNA, 20 bp, Artificial Sequence
  MKO10010694_A_Clec12a
  gRNA
taaaatcgaatcaattgcaa

SEQ ID NO: 10695 - DNA, 20 bp, Artificial Sequence
  MKO10010695_A_Clec12b
  gRNA
ggcagcgcctcgccaaagtg

SEQ ID NO: 10696 - DNA, 20 bp, Artificial Sequence
  MKO10010696_A_Clec12b
  gRNA
aattaccagaagcgtggatg

SEQ ID NO: 10697 - DNA, 20 bp, Artificial Sequence
  MKO10010697_A_Clec12b
  gRNA
gagtttgatgaccctctgtt

SEQ ID NO: 10698 - DNA, 20 bp, Artificial Sequence
  MKO10010698_A_Clec14a
  gRNA
acaagctgcgcgatcggccg

SEQ ID NO: 10699 - DNA, 20 bp, Artificial Sequence
  MKO10010699_A_Clec14a
  gRNA
tcgcgcagcttgttcggcct

SEQ ID NO: 10700 - DNA, 20 bp, Artificial Sequence
  MKO10010700_A_Clec14a
  gRNA
ggcttgtcatagacctgacc

SEQ ID NO: 10701 - DNA, 20 bp, Artificial Sequence
  MKO10010701_A_Clec16a
  gRNA
aacggatggtctccacgagc

SEQ ID NO: 10702 - DNA, 20 bp, Artificial Sequence
  MKO10010702_A_Clec16a
  gRNA
cggacatgtttggacgctca

SEQ ID NO: 10703 - DNA, 20 bp, Artificial Sequence
  MKO10010703_A_Clec16a
  gRNA
ccttacagagcgatgtctcg

SEQ ID NO: 10704 - DNA, 20 bp, Artificial Sequence
  MKO10010704_A_Clec18a
  gRNA
acagtcgccccttacaagaa

SEQ ID NO: 10705 - DNA, 20 bp, Artificial Sequence
  MKO10010705_A_Clec18a
  gRNA
ggtggacccggctgcgcagt

SEQ ID NO: 10706 - DNA, 20 bp, Artificial Sequence
  MKO10010706_A_Clec18a
  gRNA
gagcccccctgcgtgatccc

SEQ ID NO: 10707 - DNA, 20 bp, Artificial Sequence
  MKO10010707_A_Clec1a
  gRNA
actcattgaaactctacagc

SEQ ID NO: 10708 - DNA, 20 bp, Artificial Sequence
  MKO10010708_A_Clec1a
  gRNA
gagttgtgaatacttctgcc

SEQ ID NO: 10709 - DNA, 20 bp, Artificial Sequence
  MKO10010709_A_Clec1a
  gRNA
gggctctcccgcaatggcag

SEQ ID NO: 10710 - DNA, 20 bp, Artificial Sequence
  MKO10010710_A_Clec1b
  gRNA
ctcagcgactctgcaacaat

SEQ ID NO: 10711 - DNA, 20 bp, Artificial Sequence
  MKO10010711_A_Clec1b
  gRNA
attacttcagtccgttggat

SEQ ID NO: 10712 - DNA, 20 bp, Artificial Sequence
  MKO10010712_A_Clec1b
  gRNA
catcacacgccaccaagaag

SEQ ID NO: 10713 - DNA, 20 bp, Artificial Sequence
  MKO10010713_A_Clec2d
  gRNA
tgctgatcccgttgttgttc

SEQ ID NO: 10714 - DNA, 20 bp, Artificial Sequence
  MKO10010714_A_Clec2d
  gRNA
catccgaagtgaatagatcc

SEQ ID NO: 10715 - DNA, 20 bp, Artificial Sequence
  MKO10010715_A_Clec2d
  gRNA
tgggcgaatgtccagttact

SEQ ID NO: 10716 - DNA, 20 bp, Artificial Sequence
  MKO10010716_A_Clec2e
  gRNA
tgctttagggttctcacccg

SEQ ID NO: 10717 - DNA, 20 bp, Artificial Sequence
  MKO10010717_A_Clec2e
  gRNA
gcgctgtaaggtgtagttgt

SEQ ID NO: 10718 - DNA, 20 bp, Artificial Sequence
  MKO10010718_A_Clec2e
  gRNA
agctgtcaaatagagctaga

SEQ ID NO: 10719 - DNA, 20 bp, Artificial Sequence
  MKO10010719_A_Clec2f
  gRNA
gaaacgccgacaatgagact

SEQ ID NO: 10720 - DNA, 20 bp, Artificial Sequence
  MKO10010720_A_Clec2f
  gRNA
gcactgtaacatatagttgc

SEQ ID NO: 10721 - DNA, 20 bp, Artificial Sequence
  MKO10010721_A_Clec2f
  gRNA
gtagcagggactacatacct

SEQ ID NO: 10722 - DNA, 20 bp, Artificial Sequence
  MKO10010722_A_Clec2g
  gRNA
gaaagctcccccggaactgg

SEQ ID NO: 10723 - DNA, 20 bp, Artificial Sequence
  MKO10010723_A_Clec2g
  gRNA
ctctctgtgcagtccaatcc

SEQ ID NO: 10724 - DNA, 20 bp, Artificial Sequence
  MKO10010724_A_Clec2g
  gRNA
cagcataggtcttgttgatt

SEQ ID NO: 10725 - DNA, 20 bp, Artificial Sequence
  MKO10010725_A_Clec2h
  gRNA
tgctacaccgcatgcccaag

SEQ ID NO: 10726 - DNA, 20 bp, Artificial Sequence
  MKO10010726_A_Clec2h
  gRNA
atgggaatttgatgctacgc

SEQ ID NO: 10727 - DNA, 20 bp, Artificial Sequence
  MKO10010727_A_Clec2h
  gRNA
tgatttagggttctcacgag

SEQ ID NO: 10728 - DNA, 20 bp, Artificial Sequence
  MKO10010728_A_Clec2i
  gRNA
aatcccccttgaatctcttt

SEQ ID NO: 10729 - DNA, 20 bp, Artificial Sequence
  MKO10010729_A_Clec2i
  gRNA
acgtaactggacatttgccc

SEQ ID NO: 10730 - DNA, 20 bp, Artificial Sequence
  MKO10010730_A_Clec2i
  gRNA
atgctgcttgctcaaaaaac

SEQ ID NO: 10731 - DNA, 20 bp, Artificial Sequence
  MKO10010731_A_Clec2l
  gRNA
tggatcggcctgcgcagagt

SEQ ID NO: 10732 - DNA, 20 bp, Artificial Sequence
  MKO10010732_A_Clec2l
  gRNA
ccagcgccgcctcgtgtgta

SEQ ID NO: 10733 - DNA, 20 bp, Artificial Sequence
  MKO10010733_A_Clec2l
  gRNA
agtcgtccccaactctgcgc

SEQ ID NO: 10734 - DNA, 20 bp, Artificial Sequence
  MKO10010734_A_Clec3a
  gRNA
cattcgagatgggtagccgt

SEQ ID NO: 10735 - DNA, 20 bp, Artificial Sequence
  MKO10010735_A_Clec3a
  gRNA
gtatcgcttgctactgcgac

SEQ ID NO: 10736 - DNA, 20 bp, Artificial Sequence
  MKO10010736_A_Clec3a
  gRNA
acccatctcgaatgaaagcc

SEQ ID NO: 10737 - DNA, 20 bp, Artificial Sequence
  MKO10010737_A_Clec3b
  gRNA
cgagtacgcgcgccacagcg

SEQ ID NO: 10738 - DNA, 20 bp, Artificial Sequence
  MKO10010738_A_Clec3b
  gRNA
gagaactgcgccgccctgtc

SEQ ID NO: 10739 - DNA, 20 bp, Artificial Sequence
  MKO10010739_A_Clec3b
  gRNA
ggtgagctcaaagatgttcg

SEQ ID NO: 10740 - DNA, 20 bp, Artificial Sequence
  MKO10010740_A_Clec4a1
  gRNA
ccctcgtgctgcttattatg

SEQ ID NO: 10741 - DNA, 20 bp, Artificial Sequence
  MKO10010741_A_Clec4a1
  gRNA
cccacataataagcagcacg

SEQ ID NO: 10742 - DNA, 20 bp, Artificial Sequence
  MKO10010742_A_Clec4a1
  gRNA
aaaaaccactcgtctgtaga

SEQ ID NO: 10743 - DNA, 20 bp, Artificial Sequence
  MKO10010743_A_Clec4a2
  gRNA
cacaaaaagtgtttcaccca

SEQ ID NO: 10744 - DNA, 20 bp, Artificial Sequence
  MKO10010744_A_Clec4a2
  gRNA
cggcatatacctgctcttcc

SEQ ID NO: 10745 - DNA, 20 bp, Artificial Sequence
  MKO10010745_A_Clec4a2
  gRNA
acctgcaggagattctgagt

SEQ ID NO: 10746 - DNA, 20 bp, Artificial Sequence
  MKO10010746_A_Clec4a3
  gRNA
cacgtggtattatcatcgta

SEQ ID NO: 10747 - DNA, 20 bp, Artificial Sequence
  MKO10010747_A_Clec4a3
  gRNA
caaatccaggtgatcaacaa

SEQ ID NO: 10748 - DNA, 20 bp, Artificial Sequence
  MKO10010748_A_Clec4a3
  gRNA
tacaaaatgggcttcactct

SEQ ID NO: 10749 - DNA, 20 bp, Artificial Sequence
  MKO10010749_A_Clec4a4
  gRNA
cacgtagcactcttattgta

SEQ ID NO: 10750 - DNA, 20 bp, Artificial Sequence
  MKO10010750_A_Clec4a4
  gRNA
aataaccagcacttgtgttc

SEQ ID NO: 10751 - DNA, 20 bp, Artificial Sequence
  MKO10010751_A_Clec4a4
  gRNA
cataaaaaatggttcactca

SEQ ID NO: 10752 - DNA, 20 bp, Artificial Sequence
  MKO10010752_A_Clec4b1
  gRNA
tctagtggtgatccatagcc

SEQ ID NO: 10753 - DNA, 20 bp, Artificial Sequence
  MKO10010753_A_Clec4b1
  gRNA
cagtatgtacctgctcctcc

SEQ ID NO: 10754 - DNA, 20 bp, Artificial Sequence
  MKO10010754_A_Clec4b1
  gRNA
tgacagggaaggcagtctcc

SEQ ID NO: 10755 - DNA, 20 bp, Artificial Sequence
  MKO10010755_A_Clec4b2
  gRNA
agcagcagtgtctagcattc

SEQ ID NO: 10756 - DNA, 20 bp, Artificial Sequence
  MKO10010756_A_Clec4b2
  gRNA
cacgtggctctatcattgta

SEQ ID NO: 10757 - DNA, 20 bp, Artificial Sequence
  MKO10010757_A_Clec4b2
  gRNA
gagttcagatagtcttctat

SEQ ID NO: 10758 - DNA, 20 bp, Artificial Sequence
  MKO10010758_A_Clec4d
  gRNA
ggatgcacgttactctcgtg

SEQ ID NO: 10759 - DNA, 20 bp, Artificial Sequence
  MKO10010759_A_Clec4d
  gRNA
aatatactcacaccgtgtgt

SEQ ID NO: 10760 - DNA, 20 bp, Artificial Sequence
  MKO10010760_A_Clec4d
  gRNA
gagagtaacgtgcatccgag

SEQ ID NO: 10761 - DNA, 20 bp, Artificial Sequence
  MKO10010761_A_Clec4e
  gRNA
cctggtggttatcgacacac

SEQ ID NO: 10762 - DNA, 20 bp, Artificial Sequence
  MKO10010762_A_Clec4e
  gRNA
ggaggccccggctatcgtcc

SEQ ID NO: 10763 - DNA, 20 bp, Artificial Sequence
  MKO10010763_A_Clec4e
  gRNA
cctgtgtgtcgataaccacc

SEQ ID NO: 10764 - DNA, 20 bp, Artificial Sequence
  MKO10010764_A_Clec4f
  gRNA
tccagttctgcgcgatcagc

SEQ ID NO: 10765 - DNA, 20 bp, Artificial Sequence
  MKO10010765_A_Clec4f
  gRNA
caggaccctgcggcacgtcc

SEQ ID NO: 10766 - DNA, 20 bp, Artificial Sequence
  MKO10010766_A_Clec4f
  gRNA
tgagaagttctgtacgtccc

SEQ ID NO: 10767 - DNA, 20 bp, Artificial Sequence
  MKO10010767_A_Clec4g
  gRNA
tactagggcaattgggacgt

SEQ ID NO: 10768 - DNA, 20 bp, Artificial Sequence
  MKO10010768_A_Clec4g
  gRNA
gtccttaaactccgccagtg

SEQ ID NO: 10769 - DNA, 20 bp, Artificial Sequence
  MKO10010769_A_Clec4g
  gRNA
acgcaccatttgtcctcagc

SEQ ID NO: 10770 - DNA, 20 bp, Artificial Sequence
  MKO10010770_A_Clec4n
  gRNA
tcattccagccccatttcga

SEQ ID NO: 10771 - DNA, 20 bp, Artificial Sequence
  MKO10010771_A_Clec4n
  gRNA
ggtggtgatcaatactgaag

SEQ ID NO: 10772 - DNA, 20 bp, Artificial Sequence
  MKO10010772_A_Clec4n
  gRNA
tttactggaatccttcgaaa

SEQ ID NO: 10773 - DNA, 20 bp, Artificial Sequence
  MKO10010773_A_Clec5a
  gRNA
gtagtagtgatcaaagttgt

SEQ ID NO: 10774 - DNA, 20 bp, Artificial Sequence
  MKO10010774_A_Clec5a
  gRNA
tctccttctccgaatcacct

SEQ ID NO: 10775 - DNA, 20 bp, Artificial Sequence
  MKO10010775_A_Clec5a
  gRNA
acgaaagtaccatgcctaca

SEQ ID NO: 10776 - DNA, 20 bp, Artificial Sequence
  MKO10010776_A_Clec7a
  gRNA
attcctaaacccactgcaat

SEQ ID NO: 10777 - DNA, 20 bp, Artificial Sequence
  MKO10010777_A_Clec7a
  gRNA
ctcaccgtattaatgcattt

SEQ ID NO: 10778 - DNA, 20 bp, Artificial Sequence
  MKO10010778_A_Clec7a
  gRNA
cttcactctgattgcgggaa

SEQ ID NO: 10779 - DNA, 20 bp, Artificial Sequence
  MKO10010779_A_Clec9a
  gRNA
gttactatgtctttgaacgc

SEQ ID NO: 10780 - DNA, 20 bp, Artificial Sequence
  MKO10010780_A_Clec9a
  gRNA
cattggtgaaccttacacag

SEQ ID NO: 10781 - DNA, 20 bp, Artificial Sequence
  MKO10010781_A_Clec9a
  gRNA
gcagcccttgtccacacaac

SEQ ID NO: 10782 - DNA, 20 bp, Artificial Sequence
  MKO10010782_A_Clgn
  gRNA
agcggctattgcgtggtgct

SEQ ID NO: 10783 - DNA, 20 bp, Artificial Sequence
  MKO10010783_A_Clgn
  gRNA
tataagacacctcaacctat

SEQ ID NO: 10784 - DNA, 20 bp, Artificial Sequence
  MKO10010784_A_Clgn
  gRNA
attaaactgctagcagacac

SEQ ID NO: 10785 - DNA, 20 bp, Artificial Sequence
  MKO10010785_A_Clhc1
  gRNA
cccgattaccctcagagtcc

SEQ ID NO: 10786 - DNA, 20 bp, Artificial Sequence
  MKO10010786_A_Clhc1
  gRNA
ctgagggtaatcgggttatc

SEQ ID NO: 10787 - DNA, 20 bp, Artificial Sequence
  MKO10010787_A_Clhc1
  gRNA
tggacgcggcggcgctgaag

SEQ ID NO: 10788 - DNA, 20 bp, Artificial Sequence
  MKO10010788_A_Clic1
  gRNA
tgcaaatatgtccagtcccg

SEQ ID NO: 10789 - DNA, 20 bp, Artificial Sequence
  MKO10010789_A_Clic1
  gRNA
caggaattcctcgatcttgt

SEQ ID NO: 10790 - DNA, 20 bp, Artificial Sequence
  MKO10010790_A_Clic1
  gRNA
gaaccctgagtccaacacct

SEQ ID NO: 10791 - DNA, 20 bp, Artificial Sequence
  MKO10010791_A_Clic3
  gRNA
tacgctctcgccatcctcac

SEQ ID NO: 10792 - DNA, 20 bp, Artificial Sequence
  MKO10010792_A_Clic3
  gRNA
caccatcgagaaagcggcgg

SEQ ID NO: 10793 - DNA, 20 bp, Artificial Sequence
  MKO10010793_A_Clic3
  gRNA
tcccaccgccgctttctcga

SEQ ID NO: 10794 - DNA, 20 bp, Artificial Sequence
  MKO10010794_A_Clic4
  gRNA
gccgtccagaaaccgacgtg

SEQ ID NO: 10795 - DNA, 20 bp, Artificial Sequence
  MKO10010795_A_Clic4
  gRNA
cgtcttgacttcgctgttga

SEQ ID NO: 10796 - DNA, 20 bp, Artificial Sequence
  MKO10010796_A_Clic4
  gRNA
tcacaaccgttgacctgaaa

SEQ ID NO: 10797 - DNA, 20 bp, Artificial Sequence
  MKO10010797_A_Clic5
  gRNA
acaccgggaatctaacaccg

SEQ ID NO: 10798 - DNA, 20 bp, Artificial Sequence
  MKO10010798_A_Clic5
  gRNA
gccagccgatctacacaacc

SEQ ID NO: 10799 - DNA, 20 bp, Artificial Sequence
  MKO10010799_A_Clic5
  gRNA
gccaggttgtgtagatcggc

SEQ ID NO: 10800 - DNA, 20 bp, Artificial Sequence
  MKO10010800_A_Clic6
  gRNA
aggagaagttagttcccccg

SEQ ID NO: 10801 - DNA, 20 bp, Artificial Sequence
  MKO10010801_A_Clic6
  gRNA
aacatcatttcccgctgagt

SEQ ID NO: 10802 - DNA, 20 bp, Artificial Sequence
  MKO10010802_A_Clic6
  gRNA
ctcttcaaggtaccctaagc

SEQ ID NO: 10803 - DNA, 20 bp, Artificial Sequence
  MKO10010803_A_Clint1
  gRNA
catttatgatttgcgatccc

SEQ ID NO: 10804 - DNA, 20 bp, Artificial Sequence
  MKO10010804_A_Clint1
  gRNA
gtctcttcagacagcgttgg

SEQ ID NO: 10805 - DNA, 20 bp, Artificial Sequence
  MKO10010805_A_Clint1
  gRNA
agtttgcacaggatgatgac

SEQ ID NO: 10806 - DNA, 20 bp, Artificial Sequence
  MKO10010806_A_Clip1
  gRNA
ccgctacgcccgcaagatct

SEQ ID NO: 10807 - DNA, 20 bp, Artificial Sequence
  MKO10010807_A_Clip1
  gRNA
ggggaaactcagttcgcacc

SEQ ID NO: 10808 - DNA, 20 bp, Artificial Sequence
  MKO10010808_A_Clip1
  gRNA
agtcggtctcgccaagaaag

SEQ ID NO: 10809 - DNA, 20 bp, Artificial Sequence
  MKO10010809_A_Clip2
  gRNA
ctcgggcagtgatacgcact

SEQ ID NO: 10810 - DNA, 20 bp, Artificial Sequence
  MKO10010810_A_Clip2
  gRNA
ccgccccgtcgttcttcccg

SEQ ID NO: 10811 - DNA, 20 bp, Artificial Sequence
  MKO10010811_A_Clip2
  gRNA
ccagtgggccggcgtggtct

SEQ ID NO: 10812 - DNA, 20 bp, Artificial Sequence
  MKO10010812_A_Clip3
  gRNA
tgccacgtgaatgatcgtga

SEQ ID NO: 10813 - DNA, 20 bp, Artificial Sequence
  MKO10010813_A_Clip3
  gRNA
tgttggtccagcggctgcgc

SEQ ID NO: 10814 - DNA, 20 bp, Artificial Sequence
  MKO10010814_A_Clip3
  gRNA
gcccatcacgatcattcacg

SEQ ID NO: 10815 - DNA, 20 bp, Artificial Sequence
  MKO10010815_A_Clip4
  gRNA
acgcgagtttgcggagtcgc

SEQ ID NO: 10816 - DNA, 20 bp, Artificial Sequence
  MKO10010816_A_Clip4
  gRNA
ctacattacacttgcaagtc

SEQ ID NO: 10817 - DNA, 20 bp, Artificial Sequence
  MKO10010817_A_Clip4
  gRNA
ttgatgtcccagagcttatc

SEQ ID NO: 10818 - DNA, 20 bp, Artificial Sequence
  MKO10010818_A_Clk1
  gRNA
gactacatgggctacgagcc

SEQ ID NO: 10819 - DNA, 20 bp, Artificial Sequence
  MKO10010819_A_Clk1
  gRNA
tgaaggtgctttcggaaaag

SEQ ID NO: 10820 - DNA, 20 bp, Artificial Sequence
  MKO10010820_A_Clk1
  gRNA
gcactcataccccgtgtgaa

SEQ ID NO: 10821 - DNA, 20 bp, Artificial Sequence
  MKO10010821_A_Clk2
  gRNA
ctgtacgatcggcggtactg

SEQ ID NO: 10822 - DNA, 20 bp, Artificial Sequence
  MKO10010822_A_Clk2
  gRNA
ccgatcgtacagccgccgat

SEQ ID NO: 10823 - DNA, 20 bp, Artificial Sequence
  MKO10010823_A_Clk2
  gRNA
cttgtagccagtccccgacg

SEQ ID NO: 10824 - DNA, 20 bp, Artificial Sequence
  MKO10010824_A_Clk3
  gRNA
tggtgtgccggatcggcgat

SEQ ID NO: 10825 - DNA, 20 bp, Artificial Sequence
  MKO10010825_A_Clk3
  gRNA
gactacgatacccatcccga

SEQ ID NO: 10826 - DNA, 20 bp, Artificial Sequence
  MKO10010826_A_Clk3
  gRNA
gcatgcttgcgggtacggta

SEQ ID NO: 10827 - DNA, 20 bp, Artificial Sequence
  MKO10010827_A_Clk4
  gRNA
ccttactttagatgaaatcg

SEQ ID NO: 10828 - DNA, 20 bp, Artificial Sequence
  MKO10010828_A_Clk4
  gRNA
atgcgactgatgacttgcac

SEQ ID NO: 10829 - DNA, 20 bp, Artificial Sequence
  MKO10010829_A_Clk4
  gRNA
cgttccagaagagccaccga

SEQ ID NO: 10830 - DNA, 20 bp, Artificial Sequence
  MKO10010830_A_Clmn
  gRNA
gcccgatgagctcctcgcgc

SEQ ID NO: 10831 - DNA, 20 bp, Artificial Sequence
  MKO10010831_A_Clmn
  gRNA
gtgggactggttccagcgcg

SEQ ID NO: 10832 - DNA, 20 bp, Artificial Sequence
  MKO10010832_A_Clmn
  gRNA
ataccagatttcgcccagag

SEQ ID NO: 10833 - DNA, 20 bp, Artificial Sequence
  MKO10010833_A_Clmp
  gRNA
tggctgctcaccgataatga

SEQ ID NO: 10834 - DNA, 20 bp, Artificial Sequence
  MKO10010834_A_Clmp
  gRNA
tgacttaccaattctggatt

SEQ ID NO: 10835 - DNA, 20 bp, Artificial Sequence
  MKO10010835_A_Clmp
  gRNA
ctagcactttcaagatgaca

SEQ ID NO: 10836 - DNA, 20 bp, Artificial Sequence
  MKO10010836_A_Cln3
  gRNA
acactccgactatccaaccg

SEQ ID NO: 10837 - DNA, 20 bp, Artificial Sequence
  MKO10010837_A_Cln3
  gRNA
gcgccaggagtttgatgaca

SEQ ID NO: 10838 - DNA, 20 bp, Artificial Sequence
  MKO10010838_A_Cln3
  gRNA
tggatagtcggagtgtcctt

SEQ ID NO: 10839 - DNA, 20 bp, Artificial Sequence
  MKO10010839_A_Cln5
  gRNA
atgtggagcgcactggcgcc

SEQ ID NO: 10840 - DNA, 20 bp, Artificial Sequence
  MKO10010840_A_Cln5
  gRNA
gagcgctcttgtcaggccgg

SEQ ID NO: 10841 - DNA, 20 bp, Artificial Sequence
  MKO10010841_A_Cln5
  gRNA
gggagccgcggatgctgcgc

SEQ ID NO: 10842 - DNA, 20 bp, Artificial Sequence
  MKO10010842_A_Cln6
  gRNA
gtactactatgacgagtacc

SEQ ID NO: 10843 - DNA, 20 bp, Artificial Sequence
  MKO10010843_A_Cln6
  gRNA
ctgacatagactatagaccg

SEQ ID NO: 10844 - DNA, 20 bp, Artificial Sequence
  MKO10010844_A_Cln6
  gRNA
ctttggccgccccattgcca

SEQ ID NO: 10845 - DNA, 20 bp, Artificial Sequence
  MKO10010845_A_Cln8
  gRNA
actacgcttcgtggaagatt

SEQ ID NO: 10846 - DNA, 20 bp, Artificial Sequence
  MKO10010846_A_Cln8
  gRNA
gcggcgacgcgtgctgtctt

SEQ ID NO: 10847 - DNA, 20 bp, Artificial Sequence
  MKO10010847_A_Cln8
  gRNA
gttaatgacggccgtgagca

SEQ ID NO: 10848 - DNA, 20 bp, Artificial Sequence
  MKO10010848_A_Clnk
  gRNA
acacttacgtgatccggaag

SEQ ID NO: 10849 - DNA, 20 bp, Artificial Sequence
  MKO10010849_A_Clnk
  gRNA
tacctgcgtattccgattcc

SEQ ID NO: 10850 - DNA, 20 bp, Artificial Sequence
  MKO10010850_A_Clnk
  gRNA
tcttgcagggcggtgtcgag

SEQ ID NO: 10851 - DNA, 20 bp, Artificial Sequence
  MKO10010851_A_Clns1a
  gRNA
ttcgggattaggattctcac

SEQ ID NO: 10852 - DNA, 20 bp, Artificial Sequence
  MKO10010852_A_Clns1a
  gRNA
ccccaccattagtttacatg

SEQ ID NO: 10853 - DNA, 20 bp, Artificial Sequence
  MKO10010853_A_Clns1a
  gRNA
tcgtccgagtcttcatcctc

SEQ ID NO: 10854 - DNA, 20 bp, Artificial Sequence
  MKO10010854_A_Clock
  gRNA
agatgctagtgagattcgac

SEQ ID NO: 10855 - DNA, 20 bp, Artificial Sequence
  MKO10010855_A_Clock
  gRNA
tcctggtaacgcgagaaaga

SEQ ID NO: 10856 - DNA, 20 bp, Artificial Sequence
  MKO10010856_A_Clock
  gRNA
tccatctttctcgcgttacc

SEQ ID NO: 10857 - DNA, 20 bp, Artificial Sequence
  MKO10010857_A_Clp1
  gRNA
acatctaactccacgtaagt

SEQ ID NO: 10858 - DNA, 20 bp, Artificial Sequence
  MKO10010858_A_Clp1
  gRNA
ggcctctcaatcggttcagt

SEQ ID NO: 10859 - DNA, 20 bp, Artificial Sequence
  MKO10010859_A_Clp1
  gRNA
gcacgcagcgtcggcctttg

SEQ ID NO: 10860 - DNA, 20 bp, Artificial Sequence
  MKO10010860_A_Clpb
  gRNA
cttgacgatgctgtagtcat

SEQ ID NO: 10861 - DNA, 20 bp, Artificial Sequence
  MKO10010861_A_Clpb
  gRNA
gcgagtcttacctctcattg

SEQ ID NO: 10862 - DNA, 20 bp, Artificial Sequence
  MKO10010862_A_Clpb
  gRNA
cactgctgaactcatcccca

SEQ ID NO: 10863 - DNA, 20 bp, Artificial Sequence
  MKO10010863_A_Clpp
  gRNA
gcagtgaatggcgcatgccc

SEQ ID NO: 10864 - DNA, 20 bp, Artificial Sequence
  MKO10010864_A_Clpp
  gRNA
ggaacgcatcgtgtgcgtca

SEQ ID NO: 10865 - DNA, 20 bp, Artificial Sequence
  MKO10010865_A_Clpp
  gRNA
gcgcttatgacatatactcg

SEQ ID NO: 10866 - DNA, 20 bp, Artificial Sequence
  MKO10010866_A_Clpsl2
  gRNA
atcatgtgtccctgtcgatc

SEQ ID NO: 10867 - DNA, 20 bp, Artificial Sequence
  MKO10010867_A_Clpsl2
  gRNA
acaattcaagccagatcgac

SEQ ID NO: 10868 - DNA, 20 bp, Artificial Sequence
  MKO10010868_A_Clpsl2
  gRNA
tgcacccccaagtcccgcat

SEQ ID NO: 10869 - DNA, 20 bp, Artificial Sequence
  MKO10010869_A_Clps
  gRNA
actaccggtgtccctgtgag

SEQ ID NO: 10870 - DNA, 20 bp, Artificial Sequence
  MKO10010870_A_Clps
  gRNA
gtgtgcaacgggcaatgccc

SEQ ID NO: 10871 - DNA, 20 bp, Artificial Sequence
  MKO10010871_A_Clps
  gRNA
atctcactgcttggagcgcc

SEQ ID NO: 10872 - DNA, 20 bp, Artificial Sequence
  MKO10010872_A_Clptm1l
  gRNA
ccgtctctcactggcgacca

SEQ ID NO: 10873 - DNA, 20 bp, Artificial Sequence
  MKO10010873_A_Clptm1l
  gRNA
atgtaccgatgcacatctgc

SEQ ID NO: 10874 - DNA, 20 bp, Artificial Sequence
  MKO10010874_A_Clptm1l
  gRNA
tcattgaccagctgagcaac

SEQ ID NO: 10875 - DNA, 20 bp, Artificial Sequence
  MKO10010875_A_Clptm1
  gRNA
aggtttcggctggcgacacg

SEQ ID NO: 10876 - DNA, 20 bp, Artificial Sequence
  MKO10010876_A_Clptm1
  gRNA
atcagcagctggttccgccg

SEQ ID NO: 10877 - DNA, 20 bp, Artificial Sequence
  MKO10010877_A_Clptm1
  gRNA
cagtggcaagccggcggtac

SEQ ID NO: 10878 - DNA, 20 bp, Artificial Sequence
  MKO10010878_A_Clpx
  gRNA
tacttcgttacctctctgcg

SEQ ID NO: 10879 - DNA, 20 bp, Artificial Sequence
  MKO10010879_A_Clpx
  gRNA
ggggacgaccttggacgctc

SEQ ID NO: 10880 - DNA, 20 bp, Artificial Sequence
  MKO10010880_A_Clpx
  gRNA
ttcacacttaacaaaacgcg

SEQ ID NO: 10881 - DNA, 20 bp, Artificial Sequence
  MKO10010881_A_Clrn1
  gRNA
gctctgcttgtcaacgcgtc

SEQ ID NO: 10882 - DNA, 20 bp, Artificial Sequence
  MKO10010882_A_Clrn1
  gRNA
gaaatccagcaagtcgtatc

SEQ ID NO: 10883 - DNA, 20 bp, Artificial Sequence
  MKO10010883_A_Clrn1
  gRNA
attgccttacgccttctccg

SEQ ID NO: 10884 - DNA, 20 bp, Artificial Sequence
  MKO10010884_A_Clrn2
  gRNA
acaaagcgacgatgatcaga

SEQ ID NO: 10885 - DNA, 20 bp, Artificial Sequence
  MKO10010885_A_Clrn2
  gRNA
tgcctttggaatgtcctcgc

SEQ ID NO: 10886 - DNA, 20 bp, Artificial Sequence
  MKO10010886_A_Clrn2
  gRNA
agttggcgatcctttctgtc

SEQ ID NO: 10887 - DNA, 20 bp, Artificial Sequence
  MKO10010887_A_Clrn3
  gRNA
aaaacgagtatccgtaagtg

SEQ ID NO: 10888 - DNA, 20 bp, Artificial Sequence
  MKO10010888_A_Clrn3
  gRNA
ccatgcctgagtcgcaagaa

SEQ ID NO: 10889 - DNA, 20 bp, Artificial Sequence
  MKO10010889_A_Clrn3
  gRNA
actcttgagcactcgtacca

SEQ ID NO: 10890 - DNA, 20 bp, Artificial Sequence
  MKO10010890_A_Clspn
  gRNA
cacctacgacgacagcgcag

SEQ ID NO: 10891 - DNA, 20 bp, Artificial Sequence
  MKO10010891_A_Clspn
  gRNA
gtcctctgcgctgtcgtcgt

SEQ ID NO: 10892 - DNA, 20 bp, Artificial Sequence
  MKO10010892_A_Clspn
  gRNA
aagagtcgttagagtcaata

SEQ ID NO: 10893 - DNA, 20 bp, Artificial Sequence
  MKO10010893_A_Clstn1
  gRNA
cgagtacgcccccgtgttca

SEQ ID NO: 10894 - DNA, 20 bp, Artificial Sequence
  MKO10010894_A_Clstn1
  gRNA
gaagtcgtacaaggcggccg

SEQ ID NO: 10895 - DNA, 20 bp, Artificial Sequence
  MKO10010895_A_Clstn1
  gRNA
ggggcccttcccgcagtcgt

SEQ ID NO: 10896 - DNA, 20 bp, Artificial Sequence
  MKO10010896_A_Clstn2
  gRNA
gatcttgccctccgtgacga

SEQ ID NO: 10897 - DNA, 20 bp, Artificial Sequence
  MKO10010897_A_Clstn2
  gRNA
tgatacgatgtctcgatcca

SEQ ID NO: 10898 - DNA, 20 bp, Artificial Sequence
  MKO10010898_A_Clstn2
  gRNA
tggacagaaacccgccgctc

SEQ ID NO: 10899 - DNA, 20 bp, Artificial Sequence
  MKO10010899_A_Clstn3
  gRNA
gtatgatcggatcttacgtg

SEQ ID NO: 10900 - DNA, 20 bp, Artificial Sequence
  MKO10010900_A_Clstn3
  gRNA
cagttacctgcatagcgcag

SEQ ID NO: 10901 - DNA, 20 bp, Artificial Sequence
  MKO10010901_A_Clstn3
  gRNA
gcagggcaaccgtgcatgtt

SEQ ID NO: 10902 - DNA, 20 bp, Artificial Sequence
  MKO10010902_A_Clta
  gRNA
tggccccgctctaggaaacg

SEQ ID NO: 10903 - DNA, 20 bp, Artificial Sequence
  MKO10010903_A_Clta
  gRNA
cgcggccgggtcttcttcgc

SEQ ID NO: 10904 - DNA, 20 bp, Artificial Sequence
  MKO10010904_A_Clta
  gRNA
agcctgaaagtatccgtaag

SEQ ID NO: 10905 - DNA, 20 bp, Artificial Sequence
  MKO10010905_A_Cltb
  gRNA
atcgcagcgtagccatcggc

SEQ ID NO: 10906 - DNA, 20 bp, Artificial Sequence
  MKO10010906_A_Cltb
  gRNA
agatgtgtcccgcctgcgct

SEQ ID NO: 10907 - DNA, 20 bp, Artificial Sequence
  MKO10010907_A_Cltb
  gRNA
tggctacgctgcgattgccc

SEQ ID NO: 10908 - DNA, 20 bp, Artificial Sequence
  MKO10010908_A_Cltc
  gRNA
gatcgtcattctagcctcgc

SEQ ID NO: 10909 - DNA, 20 bp, Artificial Sequence
  MKO10010909_A_Cltc
  gRNA
tcatatcaatgattaccacc

SEQ ID NO: 10910 - DNA, 20 bp, Artificial Sequence
  MKO10010910_A_Cltc
  gRNA
tgatgatctggcatcctgcg

SEQ ID NO: 10911 - DNA, 20 bp, Artificial Sequence
  MKO10010911_A_Cluap1
  gRNA
gtacccacgccatatttcta

SEQ ID NO: 10912 - DNA, 20 bp, Artificial Sequence
  MKO10010912_A_Cluap1
  gRNA
aatttccgcacacccaactt

SEQ ID NO: 10913 - DNA, 20 bp, Artificial Sequence
  MKO10010913_A_Cluap1
  gRNA
aagaagctctatcaagctga

SEQ ID NO: 10914 - DNA, 20 bp, Artificial Sequence
  MKO10010914_A_Cluh
  gRNA
cgggcctcacgcaccgtgta

SEQ ID NO: 10915 - DNA, 20 bp, Artificial Sequence
  MKO10010915_A_Cluh
  gRNA
gggctcggtgctccgagttg

SEQ ID NO: 10916 - DNA, 20 bp, Artificial Sequence
  MKO10010916_A_Cluh
  gRNA
ctccccggcaggatatactc

SEQ ID NO: 10917 - DNA, 20 bp, Artificial Sequence
  MKO10010917_A_Clu
  gRNA
ggagattcagaacgccgtcc

SEQ ID NO: 10918 - DNA, 20 bp, Artificial Sequence
  MKO10010918_A_Clu
  gRNA
ctgcggaccaagcgggactt

SEQ ID NO: 10919 - DNA, 20 bp, Artificial Sequence
  MKO10010919_A_Clu
  gRNA
cctcttaagaaatccacgtc

SEQ ID NO: 10920 - DNA, 20 bp, Artificial Sequence
  MKO10010920_A_Clvs1
  gRNA
ggaactcggggtgtattagc

SEQ ID NO: 10921 - DNA, 20 bp, Artificial Sequence
  MKO10010921_A_Clvs1
  gRNA
ggcacggaggatgtccgtga

SEQ ID NO: 10922 - DNA, 20 bp, Artificial Sequence
  MKO10010922_A_Clvs1
  gRNA
gcccaagtccccatgtcgta

SEQ ID NO: 10923 - DNA, 20 bp, Artificial Sequence
  MKO10010923_A_Clvs2
  gRNA
attgcaagtcgcagcatgtt

SEQ ID NO: 10924 - DNA, 20 bp, Artificial Sequence
  MKO10010924_A_Clvs2
  gRNA
ccctacagcactgaaacgaa

SEQ ID NO: 10925 - DNA, 20 bp, Artificial Sequence
  MKO10010925_A_Clvs2
  gRNA
atgctgcgacttgcaattga

SEQ ID NO: 10926 - DNA, 20 bp, Artificial Sequence
  MKO10010926_A_Clybl
  gRNA
tggtctggctgaagtcgacc

SEQ ID NO: 10927 - DNA, 20 bp, Artificial Sequence
  MKO10010927_A_Clybl
  gRNA
gaaagtagattgtgccgtgc

SEQ ID NO: 10928 - DNA, 20 bp, Artificial Sequence
  MKO10010928_A_Clybl
  gRNA
cttacccatcggatttcttc

SEQ ID NO: 10929 - DNA, 20 bp, Artificial Sequence
  MKO10010929_A_Cma1
  gRNA
ctttgcattccgatgtacat

SEQ ID NO: 10930 - DNA, 20 bp, Artificial Sequence
  MKO10010930_A_Cma1
  gRNA
ccacgacatcatgctactga

SEQ ID NO: 10931 - DNA, 20 bp, Artificial Sequence
  MKO10010931_A_Cma1
  gRNA
aggtctataacagtcctcct

SEQ ID NO: 10932 - DNA, 20 bp, Artificial Sequence
  MKO10010932_A_Cma2
  gRNA
cctatgtgaataccttcaga

SEQ ID NO: 10933 - DNA, 20 bp, Artificial Sequence
  MKO10010933_A_Cma2
  gRNA
tatctcacgtaccctgagag

SEQ ID NO: 10934 - DNA, 20 bp, Artificial Sequence
  MKO10010934_A_Cma2
  gRNA
cacataacctttccttctga

SEQ ID NO: 10935 - DNA, 20 bp, Artificial Sequence
  MKO10010935_A_Cmah
  gRNA
cctcgatgtctttcatgaac

SEQ ID NO: 10936 - DNA, 20 bp, Artificial Sequence
  MKO10010936_A_Cmah
  gRNA
tacatgagcctccatctgac

SEQ ID NO: 10937 - DNA, 20 bp, Artificial Sequence
  MKO10010937_A_Cmah
  gRNA
tcgtcttgacagaagctccc

SEQ ID NO: 10938 - DNA, 20 bp, Artificial Sequence
  MKO10010938_A_Cmas
  gRNA
ccatcccagtcttgtcgacg

SEQ ID NO: 10939 - DNA, 20 bp, Artificial Sequence
  MKO10010939_A_Cmas
  gRNA
atatcgacgtggacatcgat

SEQ ID NO: 10940 - DNA, 20 bp, Artificial Sequence
  MKO10010940_A_Cmas
  gRNA
ttctacaatggcgtctagtg

SEQ ID NO: 10941 - DNA, 20 bp, Artificial Sequence
  MKO10010941_A_Cmbl
  gRNA
tgctgacaagccctacatcg

SEQ ID NO: 10942 - DNA, 20 bp, Artificial Sequence
  MKO10010942_A_Cmbl
  gRNA
gacacccccgccctgatgtc

SEQ ID NO: 10943 - DNA, 20 bp, Artificial Sequence
  MKO10010943_A_Cmbl
  gRNA
actggtccaccttccccgcg

SEQ ID NO: 10944 - DNA, 20 bp, Artificial Sequence
  MKO10010944_A_Cmc1
  gRNA
gagatggcgctggaccccgc

SEQ ID NO: 10945 - DNA, 20 bp, Artificial Sequence
  MKO10010945_A_Cmc1
  gRNA
aggtgctccgaacaagttga

SEQ ID NO: 10946 - DNA, 20 bp, Artificial Sequence
  MKO10010946_A_Cmc1
  gRNA
cccagagtccttgcaacatc

SEQ ID NO: 10947 - DNA, 20 bp, Artificial Sequence
  MKO10010947_A_Cmc2
  gRNA
ccattgcaacgacctcgacc

SEQ ID NO: 10948 - DNA, 20 bp, Artificial Sequence
  MKO10010948_A_Cmc2
  gRNA
gtcagaaagcctccgtcgca

SEQ ID NO: 10949 - DNA, 20 bp, Artificial Sequence
  MKO10010949_A_Cmc2
  gRNA
cgtcctgattaacctgctaa

SEQ ID NO: 10950 - DNA, 20 bp, Artificial Sequence
  MKO10010950_A_Cmip
  gRNA
cagcggctgaacgtcttcaa

SEQ ID NO: 10951 - DNA, 20 bp, Artificial Sequence
  MKO10010951_A_Cmip
  gRNA
tgtttacagctcacgatccc

SEQ ID NO: 10952 - DNA, 20 bp, Artificial Sequence
  MKO10010952_A_Cmip
  gRNA
ttctatcaaccaggctccgc

SEQ ID NO: 10953 - DNA, 20 bp, Artificial Sequence
  MKO10010953_A_Cmklr1
  gRNA
tacgacgcttacaacgactc

SEQ ID NO: 10954 - DNA, 20 bp, Artificial Sequence
  MKO10010954_A_Cmklr1
  gRNA
gccgatgcacatcacctacg

SEQ ID NO: 10955 - DNA, 20 bp, Artificial Sequence
  MKO10010955_A_Cmklr1
  gRNA
acatgacctgctcggccgtc

SEQ ID NO: 10956 - DNA, 20 bp, Artificial Sequence
  MKO10010956_A_Cml1
  gRNA
cagcataagcatgtgccgaa

SEQ ID NO: 10957 - DNA, 20 bp, Artificial Sequence
  MKO10010957_A_Cml1
  gRNA
agtacttcatgagtatattc

SEQ ID NO: 10958 - DNA, 20 bp, Artificial Sequence
  MKO10010958_A_Cml1
  gRNA
aatgtactcctccatgccct

SEQ ID NO: 10959 - DNA, 20 bp, Artificial Sequence
  MKO10010959_A_Cml2
  gRNA
ggaggcagacatcaatacta

SEQ ID NO: 10960 - DNA, 20 bp, Artificial Sequence
  MKO10010960_A_Cml2
  gRNA
aaccctggtcccgagcaaac

SEQ ID NO: 10961 - DNA, 20 bp, Artificial Sequence
  MKO10010961_A_Cml2
  gRNA
aataagctccttcatgccgc

SEQ ID NO: 10962 - DNA, 20 bp, Artificial Sequence
  MKO10010962_A_Cml3
  gRNA
ttatcatatccgaaaatacc

SEQ ID NO: 10963 - DNA, 20 bp, Artificial Sequence
  MKO10010963_A_Cml3
  gRNA
gatcacaggtccccttccca

SEQ ID NO: 10964 - DNA, 20 bp, Artificial Sequence
  MKO10010964_A_Cml3
  gRNA
ggtggctgctcggccagtga

SEQ ID NO: 10965 - DNA, 20 bp, Artificial Sequence
  MKO10010965_A_Cml5
  gRNA
cttccagtttgcacgagacc

SEQ ID NO: 10966 - DNA, 20 bp, Artificial Sequence
  MKO10010966_A_Cml5
  gRNA
aagtgctataaccctctatg

SEQ ID NO: 10967 - DNA, 20 bp, Artificial Sequence
  MKO10010967_A_Cml5
  gRNA
ccttgccggacagcccttca

SEQ ID NO: 10968 - DNA, 20 bp, Artificial Sequence
  MKO10010968_A_Cmpk1
  gRNA
gtattgaacgatgtcttgaa

SEQ ID NO: 10969 - DNA, 20 bp, Artificial Sequence
  MKO10010969_A_Cmpk1
  gRNA
agttcaccatactgtgagtc

SEQ ID NO: 10970 - DNA, 20 bp, Artificial Sequence
  MKO10010970_A_Cmpk1
  gRNA
aagaatccagactcacagta

SEQ ID NO: 10971 - DNA, 20 bp, Artificial Sequence
  MKO10010971_A_Cmpk2
  gRNA
ggaaatgacgtaccagcgta

SEQ ID NO: 10972 - DNA, 20 bp, Artificial Sequence
  MKO10010972_A_Cmpk2
  gRNA
tcaagtactgcccgggcttc

SEQ ID NO: 10973 - DNA, 20 bp, Artificial Sequence
  MKO10010973_A_Cmpk2
  gRNA
cacccccctgtatcagccag

SEQ ID NO: 10974 - DNA, 20 bp, Artificial Sequence
  MKO10010974_A_Cmss1
  gRNA
cccctttcagagcaatcagg

SEQ ID NO: 10975 - DNA, 20 bp, Artificial Sequence
  MKO10010975_A_Cmss1
  gRNA
ttagaagaactgcacctacc

SEQ ID NO: 10976 - DNA, 20 bp, Artificial Sequence
  MKO10010976_A_Cmss1
  gRNA
gagactgtgagtcaaatcat

SEQ ID NO: 10977 - DNA, 20 bp, Artificial Sequence
  MKO10010977_A_Cmtm1
  gRNA
tgacgtgtactaaaggtcgc

SEQ ID NO: 10978 - DNA, 20 bp, Artificial Sequence
  MKO10010978_A_Cmtm1
  gRNA
ttatacgtgctataccatcc

SEQ ID NO: 10979 - DNA, 20 bp, Artificial Sequence
  MKO10010979_A_Cmtm1
  gRNA
acaaaggatctatgctacgc

SEQ ID NO: 10980 - DNA, 20 bp, Artificial Sequence
  MKO10010980_A_Cmtm2a
  gRNA
agatcgcagcagcgcccatg

SEQ ID NO: 10981 - DNA, 20 bp, Artificial Sequence
  MKO10010981_A_Cmtm2a
  gRNA
aaagccctacttaactgcta

SEQ ID NO: 10982 - DNA, 20 bp, Artificial Sequence
  MKO10010982_A_Cmtm2a
  gRNA
tgaaacaatgctcccacatc

SEQ ID NO: 10983 - DNA, 20 bp, Artificial Sequence
  MKO10010983_A_Cmtm2b
  gRNA
ttgccagtgccctacttaac

SEQ ID NO: 10984 - DNA, 20 bp, Artificial Sequence
  MKO10010984_A_Cmtm2b
  gRNA
tcgcggcgcgggcgctgcca

SEQ ID NO: 10985 - DNA, 20 bp, Artificial Sequence
  MKO10010985_A_Cmtm2b
  gRNA
ctagatcctcatgggtgtta

SEQ ID NO: 10986 - DNA, 20 bp, Artificial Sequence
  MKO10010986_A_Cmtm3
  gRNA
gctgtcgccaaatactcaga

SEQ ID NO: 10987 - DNA, 20 bp, Artificial Sequence
  MKO10010987_A_Cmtm3
  gRNA
gtcaattgcgaacacaattg

SEQ ID NO: 10988 - DNA, 20 bp, Artificial Sequence
  MKO10010988_A_Cmtm3
  gRNA
ggacaccacgtagcagatga

SEQ ID NO: 10989 - DNA, 20 bp, Artificial Sequence
  MKO10010989_A_Cmtm4
  gRNA
ctttatcgcctcaatcgtgt

SEQ ID NO: 10990 - DNA, 20 bp, Artificial Sequence
  MKO10010990_A_Cmtm4
  gRNA
agcgcgccgcgcaggtagtc

SEQ ID NO: 10991 - DNA, 20 bp, Artificial Sequence
  MKO10010991_A_Cmtm4
  gRNA
tgcgacccggactacctgcg

SEQ ID NO: 10992 - DNA, 20 bp, Artificial Sequence
  MKO10010992_A_Cmtm5
  gRNA
agttgagcctatcgaagcgc

SEQ ID NO: 10993 - DNA, 20 bp, Artificial Sequence
  MKO10010993_A_Cmtm5
  gRNA
agtactaccagcgcttcgat

SEQ ID NO: 10994 - DNA, 20 bp, Artificial Sequence
  MKO10010994_A_Cmtm5
  gRNA
gtagatcttgaatgcatcat

SEQ ID NO: 10995 - DNA, 20 bp, Artificial Sequence
  MKO10010995_A_Cmtm6
  gRNA
cctggccgcctacttcgtcc

SEQ ID NO: 10996 - DNA, 20 bp, Artificial Sequence
  MKO10010996_A_Cmtm6
  gRNA
aaagcccgagaacaacgcaa

SEQ ID NO: 10997 - DNA, 20 bp, Artificial Sequence
  MKO10010997_A_Cmtm6
  gRNA
actggcaggggtgcgcgcag

SEQ ID NO: 10998 - DNA, 20 bp, Artificial Sequence
  MKO10010998_A_Cmtm7
  gRNA
cgggtgtacccgctcaccca

SEQ ID NO: 10999 - DNA, 20 bp, Artificial Sequence
  MKO10010999_A_Cmtm7
  gRNA
tcgcgcgatgtctcatggat

SEQ ID NO: 11000 - DNA, 20 bp, Artificial Sequence
  MKO10011000_A_Cmtm7
  gRNA
agctccgttccgatcgacta

SEQ ID NO: 11001 - DNA, 20 bp, Artificial Sequence
  MKO10011001_A_Cmtm8
  gRNA
ttacgatctcggctacgatc

SEQ ID NO: 11002 - DNA, 20 bp, Artificial Sequence
  MKO10011002_A_Cmtm8
  gRNA
agagttcctccgtaccccgc

SEQ ID NO: 11003 - DNA, 20 bp, Artificial Sequence
  MKO10011003_A_Cmtm8
  gRNA
gacagaagatgcgtccacta

SEQ ID NO: 11004 - DNA, 20 bp, Artificial Sequence
  MKO10011004_A_Cmtr1
  gRNA
accacgtcgacctttctgat

SEQ ID NO: 11005 - DNA, 20 bp, Artificial Sequence
  MKO10011005_A_Cmtr1
  gRNA
atgagtgactggatggtcgt

SEQ ID NO: 11006 - DNA, 20 bp, Artificial Sequence
  MKO10011006_A_Cmtr1
  gRNA
tggtttgggtctgacgctgc

SEQ ID NO: 11007 - DNA, 20 bp, Artificial Sequence
  MKO10011007_A_Cmtr2
  gRNA
aacactcttcgtgtcgctca

SEQ ID NO: 11008 - DNA, 20 bp, Artificial Sequence
  MKO10011008_A_Cmtr2
  gRNA
tctccagatgcccgcgccac

SEQ ID NO: 11009 - DNA, 20 bp, Artificial Sequence
  MKO10011009_A_Cmtr2
  gRNA
cttctaagacttgccacgac

SEQ ID NO: 11010 - DNA, 20 bp, Artificial Sequence
  MKO10011010_A_Cmya5
  gRNA
agccagacgaattactacct

SEQ ID NO: 11011 - DNA, 20 bp, Artificial Sequence
  MKO10011011_A_Cmya5
  gRNA
tgaacgtatcactttgtccg

SEQ ID NO: 11012 - DNA, 20 bp, Artificial Sequence
  MKO10011012_A_Cmya5
  gRNA
cctagagactattgtgagag

SEQ ID NO: 11013 - DNA, 20 bp, Artificial Sequence
  MKO10011013_A_Cnbd2
  gRNA
gtgtgtaagatgttccgtca

SEQ ID NO: 11014 - DNA, 20 bp, Artificial Sequence
  MKO10011014_A_Cnbd2
  gRNA
tgatgatgtctatgacgagc

SEQ ID NO: 11015 - DNA, 20 bp, Artificial Sequence
  MKO10011015_A_Cnbd2
  gRNA
cctttcaaagcgtatgacct

SEQ ID NO: 11016 - DNA, 20 bp, Artificial Sequence
  MKO10011016_A_Cnbp
  gRNA
agcacttctgctcatccgcg

SEQ ID NO: 11017 - DNA, 20 bp, Artificial Sequence
  MKO10011017_A_Cnbp
  gRNA
gacaaaaatacctctatccg

SEQ ID NO: 11018 - DNA, 20 bp, Artificial Sequence
  MKO10011018_A_Cnbp
  gRNA
tattcaaaaagactgcacca

SEQ ID NO: 11019 - DNA, 20 bp, Artificial Sequence
  MKO10011019_A_Cndp1
  gRNA
agaagccggttccatcgccc

SEQ ID NO: 11020 - DNA, 20 bp, Artificial Sequence
  MKO10011020_A_Cndp1
  gRNA
cacccgtcgtccttctgagc

SEQ ID NO: 11021 - DNA, 20 bp, Artificial Sequence
  MKO10011021_A_Cndp1
  gRNA
ccgggggaactgctacttca

SEQ ID NO: 11022 - DNA, 20 bp, Artificial Sequence
  MKO10011022_A_Cndp2
  gRNA
cactggccccttatcgtccg

SEQ ID NO: 11023 - DNA, 20 bp, Artificial Sequence
  MKO10011023_A_Cndp2
  gRNA
gagaggctccacggacgata

SEQ ID NO: 11024 - DNA, 20 bp, Artificial Sequence
  MKO10011024_A_Cndp2
  gRNA
aataagccgtgtatcacgta

SEQ ID NO: 11025 - DNA, 20 bp, Artificial Sequence
  MKO10011025_A_Cnep1r1
  gRNA
tatagctgctcgatgtcgaa

SEQ ID NO: 11026 - DNA, 20 bp, Artificial Sequence
  MKO10011026_A_Cnep1r1
  gRNA
attagctgtataactctaat

SEQ ID NO: 11027 - DNA, 20 bp, Artificial Sequence
  MKO10011027_A_Cnep1r1
  gRNA
cttacttctccaacgtccag

SEQ ID NO: 11028 - DNA, 20 bp, Artificial Sequence
  MKO10011028_A_Cnfn
  gRNA
cactttcgccccgctgtgcc

SEQ ID NO: 11029 - DNA, 20 bp, Artificial Sequence
  MKO10011029_A_Cnfn
  gRNA
gttcccgcgccatctgacag

SEQ ID NO: 11030 - DNA, 20 bp, Artificial Sequence
  MKO10011030_A_Cnfn
  gRNA
gccctgcgccctctgtcaga

SEQ ID NO: 11031 - DNA, 20 bp, Artificial Sequence
  MKO10011031_A_Cnga1
  gRNA
ttagaagcaactcgtacaaa

SEQ ID NO: 11032 - DNA, 20 bp, Artificial Sequence
  MKO10011032_A_Cnga1
  gRNA
gccattgtcatcgtcagaaa

SEQ ID NO: 11033 - DNA, 20 bp, Artificial Sequence
  MKO10011033_A_Cnga1
  gRNA
ttgaaaagagccatagtacc

SEQ ID NO: 11034 - DNA, 20 bp, Artificial Sequence
  MKO10011034_A_Cnga2
  gRNA
ctggagactggtattaccgt

SEQ ID NO: 11035 - DNA, 20 bp, Artificial Sequence
  MKO10011035_A_Cnga2
  gRNA
tccttcctagagcgtttccg

SEQ ID NO: 11036 - DNA, 20 bp, Artificial Sequence
  MKO10011036_A_Cnga2
  gRNA
ctgtgcgcagccgaatgatg

SEQ ID NO: 11037 - DNA, 20 bp, Artificial Sequence
  MKO10011037_A_Cnga3
  gRNA
gagtcgtgcatactccggct

SEQ ID NO: 11038 - DNA, 20 bp, Artificial Sequence
  MKO10011038_A_Cnga3
  gRNA
tcatcatctcgattcgtgcg

SEQ ID NO: 11039 - DNA, 20 bp, Artificial Sequence
  MKO10011039_A_Cnga3
  gRNA
tatctaccctggccgcgact

SEQ ID NO: 11040 - DNA, 20 bp, Artificial Sequence
  MKO10011040_A_Cnga4
  gRNA
ttgcggcatacgtattcgcc

SEQ ID NO: 11041 - DNA, 20 bp, Artificial Sequence
  MKO10011041_A_Cnga4
  gRNA
ccagtcgctatgtacgcacc

SEQ ID NO: 11042 - DNA, 20 bp, Artificial Sequence
  MKO10011042_A_Cnga4
  gRNA
tggagcggcgcgttattgac

SEQ ID NO: 11043 - DNA, 20 bp, Artificial Sequence
  MKO10011043_A_Cngb1
  gRNA
cggagagcgagacccagatc

SEQ ID NO: 11044 - DNA, 20 bp, Artificial Sequence
  MKO10011044_A_Cngb1
  gRNA
ccagaaccagctcaacatcc

SEQ ID NO: 11045 - DNA, 20 bp, Artificial Sequence
  MKO10011045_A_Cngb1
  gRNA
gatgtggtacctgttcacct

SEQ ID NO: 11046 - DNA, 20 bp, Artificial Sequence
  MKO10011046_A_Cngb3
  gRNA
tgagttctgctcgacattca

SEQ ID NO: 11047 - DNA, 20 bp, Artificial Sequence
  MKO10011047_A_Cngb3
  gRNA
tgcccacctacacaacctag

SEQ ID NO: 11048 - DNA, 20 bp, Artificial Sequence
  MKO10011048_A_Cngb3
  gRNA
tttcacgcattctttccact

SEQ ID NO: 11049 - DNA, 20 bp, Artificial Sequence
  MKO10011049_A_Cnih1
  gRNA
acatgacacagaagaacgcg

SEQ ID NO: 11050 - DNA, 20 bp, Artificial Sequence
  MKO10011050_A_Cnih1
  gRNA
tcgtcgggtcatagaggcca

SEQ ID NO: 11051 - DNA, 20 bp, Artificial Sequence
  MKO10011051_A_Cnih1
  gRNA
ggtagtaaaaaaacgctaga

SEQ ID NO: 11052 - DNA, 20 bp, Artificial Sequence
  MKO10011052_A_Cnih2
  gRNA
gtatcacttactgcccgcgc

SEQ ID NO: 11053 - DNA, 20 bp, Artificial Sequence
  MKO10011053_A_Cnih2
  gRNA
cttcaagaaccccatcgacc

SEQ ID NO: 11054 - DNA, 20 bp, Artificial Sequence
  MKO10011054_A_Cnih2
  gRNA
gtagaaggcgagtttgcacc

SEQ ID NO: 11055 - DNA, 20 bp, Artificial Sequence
  MKO10011055_A_Cnih3
  gRNA
ctgccacttaccgcatgaac

SEQ ID NO: 11056 - DNA, 20 bp, Artificial Sequence
  MKO10011056_A_Cnih3
  gRNA
atccgttcttagctcgtcaa

SEQ ID NO: 11057 - DNA, 20 bp, Artificial Sequence
  MKO10011057_A_Cnih3
  gRNA
tgagccactcctgagcgcac

SEQ ID NO: 11058 - DNA, 20 bp, Artificial Sequence
  MKO10011058_A_Cnih4
  gRNA
tcaacttacctgtcgccacg

SEQ ID NO: 11059 - DNA, 20 bp, Artificial Sequence
  MKO10011059_A_Cnih4
  gRNA
ttacctatatatattccacg

SEQ ID NO: 11060 - DNA, 20 bp, Artificial Sequence
  MKO10011060_A_Cnih4
  gRNA
aatactcccatgttgccact

SEQ ID NO: 11061 - DNA, 20 bp, Artificial Sequence
  MKO10011061_A_Cnksr1
  gRNA
agtacccgttgagccaagag

SEQ ID NO: 11062 - DNA, 20 bp, Artificial Sequence
  MKO10011062_A_Cnksr1
  gRNA
gacaccggctgacgtcctca

SEQ ID NO: 11063 - DNA, 20 bp, Artificial Sequence
  MKO10011063_A_Cnksr1
  gRNA
aggccttgatgatgccctac

SEQ ID NO: 11064 - DNA, 20 bp, Artificial Sequence
  MKO10011064_A_Cnksr2
  gRNA
gatgtgtaatgcgtagcagc

SEQ ID NO: 11065 - DNA, 20 bp, Artificial Sequence
  MKO10011065_A_Cnksr2
  gRNA
gctgctacgcattacacatc

SEQ ID NO: 11066 - DNA, 20 bp, Artificial Sequence
  MKO10011066_A_Cnksr2
  gRNA
attaacaacaattgtgcaac

SEQ ID NO: 11067 - DNA, 20 bp, Artificial Sequence
  MKO10011067_A_Cnksr3
  gRNA
acgggacgtattcccatcgt

SEQ ID NO: 11068 - DNA, 20 bp, Artificial Sequence
  MKO10011068_A_Cnksr3
  gRNA
agaattacatcagtagccgc

SEQ ID NO: 11069 - DNA, 20 bp, Artificial Sequence
  MKO10011069_A_Cnksr3
  gRNA
accgaccttctggactgctg

SEQ ID NO: 11070 - DNA, 20 bp, Artificial Sequence
  MKO10011070_A_Cnn1
  gRNA
cccagaaatacgaccatcag

SEQ ID NO: 11071 - DNA, 20 bp, Artificial Sequence
  MKO10011071_A_Cnn1
  gRNA
tgaagttgttcccgatgcgc

SEQ ID NO: 11072 - DNA, 20 bp, Artificial Sequence
  MKO10011072_A_Cnn1
  gRNA
tccattcaggccaagacaaa

SEQ ID NO: 11073 - DNA, 20 bp, Artificial Sequence
  MKO10011073_A_Cnn2
  gRNA
ccagtgcgtcatcgggctgc

SEQ ID NO: 11074 - DNA, 20 bp, Artificial Sequence
  MKO10011074_A_Cnn2
  gRNA
tcatgttcccgctctcgaac

SEQ ID NO: 11075 - DNA, 20 bp, Artificial Sequence
  MKO10011075_A_Cnn2
  gRNA
agaactccgaagctggatag

SEQ ID NO: 11076 - DNA, 20 bp, Artificial Sequence
  MKO10011076_A_Cnn3
  gRNA
ccgaggaagatctgcgcaac

SEQ ID NO: 11077 - DNA, 20 bp, Artificial Sequence
  MKO10011077_A_Cnn3
  gRNA
tctgtctaggcgaaaacaaa

SEQ ID NO: 11078 - DNA, 20 bp, Artificial Sequence
  MKO10011078_A_Cnn3
  gRNA
tacctggggccaatttagtg

SEQ ID NO: 11079 - DNA, 20 bp, Artificial Sequence
  MKO10011079_A_Cnnm1
  gRNA
cctctaccagcgcaaccgcc

SEQ ID NO: 11080 - DNA, 20 bp, Artificial Sequence
  MKO10011080_A_Cnnm1
  gRNA
tgtagaggtcagtttcgtcg

SEQ ID NO: 11081 - DNA, 20 bp, Artificial Sequence
  MKO10011081_A_Cnnm1
  gRNA
tagaatacctgagcaagcgc

SEQ ID NO: 11082 - DNA, 20 bp, Artificial Sequence
  MKO10011082_A_Cnnm2
  gRNA
cccctataacgacctcgtta

SEQ ID NO: 11083 - DNA, 20 bp, Artificial Sequence
  MKO10011083_A_Cnnm2
  gRNA
tacgaacgacgtgtcgttca

SEQ ID NO: 11084 - DNA, 20 bp, Artificial Sequence
  MKO10011084_A_Cnnm2
  gRNA
agtctacgggcttgttccgc

SEQ ID NO: 11085 - DNA, 20 bp, Artificial Sequence
  MKO10011085_A_Cnnm3
  gRNA
agtgctgcgctcccggaccg

SEQ ID NO: 11086 - DNA, 20 bp, Artificial Sequence
  MKO10011086_A_Cnnm3
  gRNA
cggctgaggcccaacgcgcg

SEQ ID NO: 11087 - DNA, 20 bp, Artificial Sequence
  MKO10011087_A_Cnnm3
  gRNA
agctcctctcaagcgaaagg

SEQ ID NO: 11088 - DNA, 20 bp, Artificial Sequence
  MKO10011088_A_Cnnm4
  gRNA
agcaatcggccggcttgttc

SEQ ID NO: 11089 - DNA, 20 bp, Artificial Sequence
  MKO10011089_A_Cnnm4
  gRNA
caagtaccccgacgtcattc

SEQ ID NO: 11090 - DNA, 20 bp, Artificial Sequence
  MKO10011090_A_Cnnm4
  gRNA
ttacagctgataatcggacc

SEQ ID NO: 11091 - DNA, 20 bp, Artificial Sequence
  MKO10011091_A_Cnot10
  gRNA
gagcttctcgccgacagata

SEQ ID NO: 11092 - DNA, 20 bp, Artificial Sequence
  MKO10011092_A_Cnot10
  gRNA
ccatctcttcaacagccgag

SEQ ID NO: 11093 - DNA, 20 bp, Artificial Sequence
  MKO10011093_A_Cnot10
  gRNA
cgagcaaaaagcacaccgct

SEQ ID NO: 11094 - DNA, 20 bp, Artificial Sequence
  MKO10011094_A_Cnot11
  gRNA
acctcgccagattgccttga

SEQ ID NO: 11095 - DNA, 20 bp, Artificial Sequence
  MKO10011095_A_Cnot11
  gRNA
agcatttctatagcgactaa

SEQ ID NO: 11096 - DNA, 20 bp, Artificial Sequence
  MKO10011096_A_Cnot11
  gRNA
actagatctggaagtttcgc

SEQ ID NO: 11097 - DNA, 20 bp, Artificial Sequence
  MKO10011097_A_Cnot1
  gRNA
gcttgagaactttactcagc

SEQ ID NO: 11098 - DNA, 20 bp, Artificial Sequence
  MKO10011098_A_Cnot1
  gRNA
ctaaccttctggtagtgcaa

SEQ ID NO: 11099 - DNA, 20 bp, Artificial Sequence
  MKO10011099_A_Cnot1
  gRNA
tctcaagctaagtaaagtac

SEQ ID NO: 11100 - DNA, 20 bp, Artificial Sequence
  MKO10011100_A_Cnot2
  gRNA
ctggcatcgccatctacgtc

SEQ ID NO: 11101 - DNA, 20 bp, Artificial Sequence
  MKO10011101_A_Cnot2
  gRNA
acatctttctctgaccgatg

SEQ ID NO: 11102 - DNA, 20 bp, Artificial Sequence
  MKO10011102_A_Cnot2
  gRNA
caatttggggcaagtttata

SEQ ID NO: 11103 - DNA, 20 bp, Artificial Sequence
  MKO10011103_A_Cnot3
  gRNA
accctccttgctatacgctt

SEQ ID NO: 11104 - DNA, 20 bp, Artificial Sequence
  MKO10011104_A_Cnot3
  gRNA
gattgatcgctgcctcaaga

SEQ ID NO: 11105 - DNA, 20 bp, Artificial Sequence
  MKO10011105_A_Cnot3
  gRNA
taaccgtctcaatgagcttg

SEQ ID NO: 11106 - DNA, 20 bp, Artificial Sequence
  MKO10011106_A_Cnot4
  gRNA
gtgcttatgtaacgtatatc

SEQ ID NO: 11107 - DNA, 20 bp, Artificial Sequence
  MKO10011107_A_Cnot4
  gRNA
cgaattcgcactgatgagaa

SEQ ID NO: 11108 - DNA, 20 bp, Artificial Sequence
  MKO10011108_A_Cnot4
  gRNA
gtctcgcagtcctgatgcaa

SEQ ID NO: 11109 - DNA, 20 bp, Artificial Sequence
  MKO10011109_A_Cnot6l
  gRNA
ttacaccatcatgtccgcag

SEQ ID NO: 11110 - DNA, 20 bp, Artificial Sequence
  MKO10011110_A_Cnot6l
  gRNA
ggagcttaagtacatcactc

SEQ ID NO: 11111 - DNA, 20 bp, Artificial Sequence
  MKO10011111_A_Cnot6l
  gRNA
ttcatgcttgacaatcttgc

SEQ ID NO: 11112 - DNA, 20 bp, Artificial Sequence
  MKO10011112_A_Cnot6
  gRNA
tacttgctcgataatttgtc

SEQ ID NO: 11113 - DNA, 20 bp, Artificial Sequence
  MKO10011113_A_Cnot6
  gRNA
gacagaggttcaatatatcc

SEQ ID NO: 11114 - DNA, 20 bp, Artificial Sequence
  MKO10011114_A_Cnot6
  gRNA
tgtaacatgatccaagatct

SEQ ID NO: 11115 - DNA, 20 bp, Artificial Sequence
  MKO10011115_A_Cnot7
  gRNA
ctacattacaccgcaacagt

SEQ ID NO: 11116 - DNA, 20 bp, Artificial Sequence
  MKO10011116_A_Cnot7
  gRNA
accctccaggaacgtcaact

SEQ ID NO: 11117 - DNA, 20 bp, Artificial Sequence
  MKO10011117_A_Cnot7
  gRNA
ttctttgtgaaggggtcaaa

SEQ ID NO: 11118 - DNA, 20 bp, Artificial Sequence
  MKO10011118_A_Cnot8
  gRNA
gctaacagactctcgcctgc

SEQ ID NO: 11119 - DNA, 20 bp, Artificial Sequence
  MKO10011119_A_Cnot8
  gRNA
agactctctgctgacgggga

SEQ ID NO: 11120 - DNA, 20 bp, Artificial Sequence
  MKO10011120_A_Cnot8
  gRNA
tgtcccttagggaggccttc

SEQ ID NO: 11121 - DNA, 20 bp, Artificial Sequence
  MKO10011121_A_Cnppd1
  gRNA
gacacgtgctgcagataatc

SEQ ID NO: 11122 - DNA, 20 bp, Artificial Sequence
  MKO10011122_A_Cnppd1
  gRNA
aggaggtcttcaatgacgaa

SEQ ID NO: 11123 - DNA, 20 bp, Artificial Sequence
  MKO10011123_A_Cnppd1
  gRNA
ggcagctgggggagtcgccg

SEQ ID NO: 11124 - DNA, 20 bp, Artificial Sequence
  MKO10011124_A_Cnpy1
  gRNA
gggcttaccgcgaatttcaa

SEQ ID NO: 11125 - DNA, 20 bp, Artificial Sequence
  MKO10011125_A_Cnpy1
  gRNA
gcgaatgaacgattaccagc

SEQ ID NO: 11126 - DNA, 20 bp, Artificial Sequence
  MKO10011126_A_Cnpy1
  gRNA
gatattcgaacttattgccc

SEQ ID NO: 11127 - DNA, 20 bp, Artificial Sequence
  MKO10011127_A_Cnpy2
  gRNA
cgacgcgtacgtagttcttg

SEQ ID NO: 11128 - DNA, 20 bp, Artificial Sequence
  MKO10011128_A_Cnpy2
  gRNA
actacgtacgcgtcgtgagc

SEQ ID NO: 11129 - DNA, 20 bp, Artificial Sequence
  MKO10011129_A_Cnpy2
  gRNA
agagtgggaaattgcccgcg

SEQ ID NO: 11130 - DNA, 20 bp, Artificial Sequence
  MKO10011130_A_Cnpy3
  gRNA
tggatatcccctatgagctg

SEQ ID NO: 11131 - DNA, 20 bp, Artificial Sequence
  MKO10011131_A_Cnpy3
  gRNA
taggttgtgcagcgtctcaa

SEQ ID NO: 11132 - DNA, 20 bp, Artificial Sequence
  MKO10011132_A_Cnpy3
  gRNA
ctgtgccaaccacgtgctga

SEQ ID NO: 11133 - DNA, 20 bp, Artificial Sequence
  MKO10011133_A_Cnpy4
  gRNA
cagttcgactcaacgcttcc

SEQ ID NO: 11134 - DNA, 20 bp, Artificial Sequence
  MKO10011134_A_Cnpy4
  gRNA
caggaagcgttgagtcgaac

SEQ ID NO: 11135 - DNA, 20 bp, Artificial Sequence
  MKO10011135_A_Cnpy4
  gRNA
ctttggagaatttgtgcgag

SEQ ID NO: 11136 - DNA, 20 bp, Artificial Sequence
  MKO10011136_A_Cnp
  gRNA
tgccgtcgtggtacttctcc

SEQ ID NO: 11137 - DNA, 20 bp, Artificial Sequence
  MKO10011137_A_Cnp
  gRNA
tgaatagcgtcttgcactcg

SEQ ID NO: 11138 - DNA, 20 bp, Artificial Sequence
  MKO10011138_A_Cnp
  gRNA
cccatagtaccccgtgaaga

SEQ ID NO: 11139 - DNA, 20 bp, Artificial Sequence
  MKO10011139_A_Cnr1
  gRNA
cctataagaggatcgtcacc

SEQ ID NO: 11140 - DNA, 20 bp, Artificial Sequence
  MKO10011140_A_Cnr1
  gRNA
gttatgaagtcgatcttaga

SEQ ID NO: 11141 - DNA, 20 bp, Artificial Sequence
  MKO10011141_A_Cnr1
  gRNA
tatctttgcggtggaacacg

SEQ ID NO: 11142 - DNA, 20 bp, Artificial Sequence
  MKO10011142_A_Cnr2
  gRNA
tagcgttggagtcgaccccg

SEQ ID NO: 11143 - DNA, 20 bp, Artificial Sequence
  MKO10011143_A_Cnr2
  gRNA
gatccctaacgactacctac

SEQ ID NO: 11144 - DNA, 20 bp, Artificial Sequence
  MKO10011144_A_Cnr2
  gRNA
gatttcttacctgccgctca

SEQ ID NO: 11145 - DNA, 20 bp, Artificial Sequence
  MKO10011145_A_Cnrip1
  gRNA
aaaggcgcacgagtccgggt

SEQ ID NO: 11146 - DNA, 20 bp, Artificial Sequence
  MKO10011146_A_Cnrip1
  gRNA
ctgcgcatccagcccaacga

SEQ ID NO: 11147 - DNA, 20 bp, Artificial Sequence
  MKO10011147_A_Cnrip1
  gRNA
actggcaatggtctcgcttg

SEQ ID NO: 11148 - DNA, 20 bp, Artificial Sequence
  MKO10011148_A_Cnst
  gRNA
gacgcagaatgcaacgtcgc

SEQ ID NO: 11149 - DNA, 20 bp, Artificial Sequence
  MKO10011149_A_Cnst
  gRNA
ccactcttctcgctgatccg

SEQ ID NO: 11150 - DNA, 20 bp, Artificial Sequence
  MKO10011150_A_Cnst
  gRNA
tgcaaatctttctgccattc

SEQ ID NO: 11151 - DNA, 20 bp, Artificial Sequence
  MKO10011151_A_Cntd1
  gRNA
caacaagttcatcctccgat

SEQ ID NO: 11152 - DNA, 20 bp, Artificial Sequence
  MKO10011152_A_Cntd1
  gRNA
gctgaacacacgacaccaat

SEQ ID NO: 11153 - DNA, 20 bp, Artificial Sequence
  MKO10011153_A_Cntd1
  gRNA
ttgtctgaccctcctcgacc

SEQ ID NO: 11154 - DNA, 20 bp, Artificial Sequence
  MKO10011154_A_Cntfr
  gRNA
acccccctcagtgccgccgc

SEQ ID NO: 11155 - DNA, 20 bp, Artificial Sequence
  MKO10011155_A_Cntfr
  gRNA
ccgctccaacacttacccca

SEQ ID NO: 11156 - DNA, 20 bp, Artificial Sequence
  MKO10011156_A_Cntfr
  gRNA
ccagacgctcatactgcacg

SEQ ID NO: 11157 - DNA, 20 bp, Artificial Sequence
  MKO10011157_A_Cntf
  gRNA
gtgcatttcaccccgactga

SEQ ID NO: 11158 - DNA, 20 bp, Artificial Sequence
  MKO10011158_A_Cntf
  gRNA
tcggggtgaaatgcactctc

SEQ ID NO: 11159 - DNA, 20 bp, Artificial Sequence
  MKO10011159_A_Cntf
  gRNA
acctctgtagccgctctatc

SEQ ID NO: 11160 - DNA, 20 bp, Artificial Sequence
  MKO10011160_A_Cntln
  gRNA
agccggcggtccctgcgcgt

SEQ ID NO: 11161 - DNA, 20 bp, Artificial Sequence
  MKO10011161_A_Cntln
  gRNA
tcctgtcgccagcgcgcccg

SEQ ID NO: 11162 - DNA, 20 bp, Artificial Sequence
  MKO10011162_A_Cntln
  gRNA
gactgaatctgtactaaaac

SEQ ID NO: 11163 - DNA, 20 bp, Artificial Sequence
  MKO10011163_A_Cntn1
  gRNA
tactgtaccgatcgtttgtc

SEQ ID NO: 11164 - DNA, 20 bp, Artificial Sequence
  MKO10011164_A_Cntn1
  gRNA
acgtggacctgacaaacgat

SEQ ID NO: 11165 - DNA, 20 bp, Artificial Sequence
  MKO10011165_A_Cntn1
  gRNA
gcgtccggaagtgaaggtga

SEQ ID NO: 11166 - DNA, 20 bp, Artificial Sequence
  MKO10011166_A_Cntn2
  gRNA
caaattcgcgcagctcaacc

SEQ ID NO: 11167 - DNA, 20 bp, Artificial Sequence
  MKO10011167_A_Cntn2
  gRNA
cattggtgcgggcgatgtac

SEQ ID NO: 11168 - DNA, 20 bp, Artificial Sequence
  MKO10011168_A_Cntn2
  gRNA
agaccccgtgaaaacccacg

SEQ ID NO: 11169 - DNA, 20 bp, Artificial Sequence
  MKO10011169_A_Cntn3
  gRNA
agcactgtgtcggtccgtga

SEQ ID NO: 11170 - DNA, 20 bp, Artificial Sequence
  MKO10011170_A_Cntn3
  gRNA
ccatcagagcgtagcaccaa

SEQ ID NO: 11171 - DNA, 20 bp, Artificial Sequence
  MKO10011171_A_Cntn3
  gRNA
ggttggggagcccaatactc

SEQ ID NO: 11172 - DNA, 20 bp, Artificial Sequence
  MKO10011172_A_Cntn4
  gRNA
agcactgtgtcagtccgtcg

SEQ ID NO: 11173 - DNA, 20 bp, Artificial Sequence
  MKO10011173_A_Cntn4
  gRNA
ggaccattccctgacctcga

SEQ ID NO: 11174 - DNA, 20 bp, Artificial Sequence
  MKO10011174_A_Cntn4
  gRNA
tgccgtcaacaacactgtag

SEQ ID NO: 11175 - DNA, 20 bp, Artificial Sequence
  MKO10011175_A_Cntn5
  gRNA
ccactcacgctgcgaaatga

SEQ ID NO: 11176 - DNA, 20 bp, Artificial Sequence
  MKO10011176_A_Cntn5
  gRNA
gcccggttccaacaattact

SEQ ID NO: 11177 - DNA, 20 bp, Artificial Sequence
  MKO10011177_A_Cntn5
  gRNA
tctcttgggatatgaaccgc

SEQ ID NO: 11178 - DNA, 20 bp, Artificial Sequence
  MKO10011178_A_Cntn6
  gRNA
tcggcatgacttatcactat

SEQ ID NO: 11179 - DNA, 20 bp, Artificial Sequence
  MKO10011179_A_Cntn6
  gRNA
agcacagtatctgtccgaga

SEQ ID NO: 11180 - DNA, 20 bp, Artificial Sequence
  MKO10011180_A_Cntn6
  gRNA
ccatcagtgcgcagcactaa

SEQ ID NO: 11181 - DNA, 20 bp, Artificial Sequence
  MKO10011181_A_Cntnap1
  gRNA
tggaacccacgcggcaagat

SEQ ID NO: 11182 - DNA, 20 bp, Artificial Sequence
  MKO10011182_A_Cntnap1
  gRNA
catcgtcgccgtcaaaatac

SEQ ID NO: 11183 - DNA, 20 bp, Artificial Sequence
  MKO10011183_A_Cntnap1
  gRNA
ggatgtagcgagccgtaaag

SEQ ID NO: 11184 - DNA, 20 bp, Artificial Sequence
  MKO10011184_A_Cntnap2
  gRNA
ccggtacatgttccgtcaca

SEQ ID NO: 11185 - DNA, 20 bp, Artificial Sequence
  MKO10011185_A_Cntnap2
  gRNA
gaccattgacgagagcaaaa

SEQ ID NO: 11186 - DNA, 20 bp, Artificial Sequence
  MKO10011186_A_Cntnap2
  gRNA
cacctagatcacttggattc

SEQ ID NO: 11187 - DNA, 20 bp, Artificial Sequence
  MKO10011187_A_Cntnap3
  gRNA
agacaattgtgatgctccgt

SEQ ID NO: 11188 - DNA, 20 bp, Artificial Sequence
  MKO10011188_A_Cntnap3
  gRNA
cagaactcccgtatccaccc

SEQ ID NO: 11189 - DNA, 20 bp, Artificial Sequence
  MKO10011189_A_Cntnap3
  gRNA
gattgaccttggagaacgaa

SEQ ID NO: 11190 - DNA, 20 bp, Artificial Sequence
  MKO10011190_A_Cntnap4
  gRNA
cgattcagccttgcgaatcc

SEQ ID NO: 11191 - DNA, 20 bp, Artificial Sequence
  MKO10011191_A_Cntnap4
  gRNA
gcgcatcccgattctgccct

SEQ ID NO: 11192 - DNA, 20 bp, Artificial Sequence
  MKO10011192_A_Cntnap4
  gRNA
cagaatcgggatgcgcattg

SEQ ID NO: 11193 - DNA, 20 bp, Artificial Sequence
  MKO10011193_A_Cntnap5a
  gRNA
cttactataggagcatccat

SEQ ID NO: 11194 - DNA, 20 bp, Artificial Sequence
  MKO10011194_A_Cntnap5a
  gRNA
acgtggagaccacatcactc

SEQ ID NO: 11195 - DNA, 20 bp, Artificial Sequence
  MKO10011195_A_Cntnap5a
  gRNA
gattacagctgtagccacac

SEQ ID NO: 11196 - DNA, 20 bp, Artificial Sequence
  MKO10011196_A_Cntnap5b
  gRNA
tgcctgatattcagcgacac

SEQ ID NO: 11197 - DNA, 20 bp, Artificial Sequence
  MKO10011197_A_Cntnap5b
  gRNA
cccattcagttgagctgagc

SEQ ID NO: 11198 - DNA, 20 bp, Artificial Sequence
  MKO10011198_A_Cntnap5b
  gRNA
gccctgtgtcgctgaatatc

SEQ ID NO: 11199 - DNA, 20 bp, Artificial Sequence
  MKO10011199_A_Cntnap5c
  gRNA
caactggcaacagtacacgc

SEQ ID NO: 11200 - DNA, 20 bp, Artificial Sequence
  MKO10011200_A_Cntnap5c
  gRNA
gattacagctgtggctaccc

SEQ ID NO: 11201 - DNA, 20 bp, Artificial Sequence
  MKO10011201_A_Cntnap5c
  gRNA
ttaagttcaagagcatacaa

SEQ ID NO: 11202 - DNA, 20 bp, Artificial Sequence
  MKO10011202_A_Cntrob
  gRNA
acttacgataggcagtatca

SEQ ID NO: 11203 - DNA, 20 bp, Artificial Sequence
  MKO10011203_A_Cntrob
  gRNA
tgcagagcttacacgcagaa

SEQ ID NO: 11204 - DNA, 20 bp, Artificial Sequence
  MKO10011204_A_Cntrob
  gRNA
ttccccgctacactagcctt

SEQ ID NO: 11205 - DNA, 20 bp, Artificial Sequence
  MKO10011205_A_Coa3
  gRNA
ctcagcgcatcgacccgtcg

SEQ ID NO: 11206 - DNA, 20 bp, Artificial Sequence
  MKO10011206_A_Coa3
  gRNA
cgcataaactgcaactgcgc

SEQ ID NO: 11207 - DNA, 20 bp, Artificial Sequence
  MKO10011207_A_Coa3
  gRNA
ctcttgggccaccgagtaga

SEQ ID NO: 11208 - DNA, 20 bp, Artificial Sequence
  MKO10011208_A_Coa4
  gRNA
ctggactcgcccggtgaaga

SEQ ID NO: 11209 - DNA, 20 bp, Artificial Sequence
  MKO10011209_A_Coa4
  gRNA
cgagtccagttatggccttg

SEQ ID NO: 11210 - DNA, 20 bp, Artificial Sequence
  MKO10011210_A_Coa4
  gRNA
ccagtgccagccgcaagtgc

SEQ ID NO: 11211 - DNA, 20 bp, Artificial Sequence
  MKO10011211_A_Coa5
  gRNA
gtcctcataataccggggca

SEQ ID NO: 11212 - DNA, 20 bp, Artificial Sequence
  MKO10011212_A_Coa5
  gRNA
atccgctacctggagcacac

SEQ ID NO: 11213 - DNA, 20 bp, Artificial Sequence
  MKO10011213_A_Coa5
  gRNA
cacaggaaggaaaatcccca

SEQ ID NO: 11214 - DNA, 20 bp, Artificial Sequence
  MKO10011214_A_Coa6
  gRNA
ctgcctggacgacaacgcgg

SEQ ID NO: 11215 - DNA, 20 bp, Artificial Sequence
  MKO10011215_A_Coa6
  gRNA
ggggtgcgcgcgacctgtac

SEQ ID NO: 11216 - DNA, 20 bp, Artificial Sequence
  MKO10011216_A_Coa6
  gRNA
acagtcgactgaaaattcct

SEQ ID NO: 11217 - DNA, 20 bp, Artificial Sequence
  MKO10011217_A_Coasy
  gRNA
catcatcgacagcgaccatc

SEQ ID NO: 11218 - DNA, 20 bp, Artificial Sequence
  MKO10011218_A_Coasy
  gRNA
gtcagcgaggagacctaccg

SEQ ID NO: 11219 - DNA, 20 bp, Artificial Sequence
  MKO10011219_A_Coasy
  gRNA
ccagccgtatgcagagcgcg

SEQ ID NO: 11220 - DNA, 20 bp, Artificial Sequence
  MKO10011220_A_Cobll1
  gRNA
tcttcctccggccgagacga

SEQ ID NO: 11221 - DNA, 20 bp, Artificial Sequence
  MKO10011221_A_Cobll1
  gRNA
tacttaccctgcggagcccg

SEQ ID NO: 11222 - DNA, 20 bp, Artificial Sequence
  MKO10011222_A_Cobll1
  gRNA
cgcgatggaccgcagcgtcc

SEQ ID NO: 11223 - DNA, 20 bp, Artificial Sequence
  MKO10011223_A_Cobl
  gRNA
cttgcagaaatctgtacgac

SEQ ID NO: 11224 - DNA, 20 bp, Artificial Sequence
  MKO10011224_A_Cobl
  gRNA
tttaagccaaatacgttgat

SEQ ID NO: 11225 - DNA, 20 bp, Artificial Sequence
  MKO10011225_A_Cobl
  gRNA
ctcaccacgtcctagagatc

SEQ ID NO: 11226 - DNA, 20 bp, Artificial Sequence
  MKO10011226_A_Coch
  gRNA
ttcgcgcgcgccgagggagc

SEQ ID NO: 11227 - DNA, 20 bp, Artificial Sequence
  MKO10011227_A_Coch
  gRNA
gaggagtagttctctcgacc

SEQ ID NO: 11228 - DNA, 20 bp, Artificial Sequence
  MKO10011228_A_Coch
  gRNA
acctaactcacccgctccct

SEQ ID NO: 11229 - DNA, 20 bp, Artificial Sequence
  MKO10011229_A_Cog1
  gRNA
cgtctgaatagtcgcctttc

SEQ ID NO: 11230 - DNA, 20 bp, Artificial Sequence
  MKO10011230_A_Cog1
  gRNA
atttccaatcctcatccgcc

SEQ ID NO: 11231 - DNA, 20 bp, Artificial Sequence
  MKO10011231_A_Cog1
  gRNA
tgtgggctggaactcgataa

SEQ ID NO: 11232 - DNA, 20 bp, Artificial Sequence
  MKO10011232_A_Cog2
  gRNA
acttatacaagttattcgat

SEQ ID NO: 11233 - DNA, 20 bp, Artificial Sequence
  MKO10011233_A_Cog2
  gRNA
acagttacgagaagaggttc

SEQ ID NO: 11234 - DNA, 20 bp, Artificial Sequence
  MKO10011234_A_Cog2
  gRNA
tgtcaacctctcaacaaacc

SEQ ID NO: 11235 - DNA, 20 bp, Artificial Sequence
  MKO10011235_A_Cog3
  gRNA
cagatgagggattacttgtc

SEQ ID NO: 11236 - DNA, 20 bp, Artificial Sequence
  MKO10011236_A_Cog3
  gRNA
aagctgcatacatcttcaat

SEQ ID NO: 11237 - DNA, 20 bp, Artificial Sequence
  MKO10011237_A_Cog3
  gRNA
atgaagagttcctgtcttat

SEQ ID NO: 11238 - DNA, 20 bp, Artificial Sequence
  MKO10011238_A_Cog4
  gRNA
cttgtagaaccgcctctatc

SEQ ID NO: 11239 - DNA, 20 bp, Artificial Sequence
  MKO10011239_A_Cog4
  gRNA
tttgctatcgctaccaaaga

SEQ ID NO: 11240 - DNA, 20 bp, Artificial Sequence
  MKO10011240_A_Cog4
  gRNA
gtcattgagctcagccgaca

SEQ ID NO: 11241 - DNA, 20 bp, Artificial Sequence
  MKO10011241_A_Cog5
  gRNA
agtagcccgtactgcacaac

SEQ ID NO: 11242 - DNA, 20 bp, Artificial Sequence
  MKO10011242_A_Cog5
  gRNA
cagatgatgcagacgagaat

SEQ ID NO: 11243 - DNA, 20 bp, Artificial Sequence
  MKO10011243_A_Cog5
  gRNA
caactagcaaaacttgccca

SEQ ID NO: 11244 - DNA, 20 bp, Artificial Sequence
  MKO10011244_A_Cog6
  gRNA
ggatatgacaagtcgcttac

SEQ ID NO: 11245 - DNA, 20 bp, Artificial Sequence
  MKO10011245_A_Cog6
  gRNA
agtctcctccgcggtacaag

SEQ ID NO: 11246 - DNA, 20 bp, Artificial Sequence
  MKO10011246_A_Cog6
  gRNA
tcatttcatccgaagtcagc

SEQ ID NO: 11247 - DNA, 20 bp, Artificial Sequence
  MKO10011247_A_Cog7
  gRNA
tgaacgatgctacgatctgg

SEQ ID NO: 11248 - DNA, 20 bp, Artificial Sequence
  MKO10011248_A_Cog7
  gRNA
cgcggcagaaacaagtctcc

SEQ ID NO: 11249 - DNA, 20 bp, Artificial Sequence
  MKO10011249_A_Cog7
  gRNA
gcccaaagtgctccgtgatg

SEQ ID NO: 11250 - DNA, 20 bp, Artificial Sequence
  MKO10011250_A_Cog8
  gRNA
cctttccagtcgccgtacat

SEQ ID NO: 11251 - DNA, 20 bp, Artificial Sequence
  MKO10011251_A_Cog8
  gRNA
gccgaagatagcctatgaca

SEQ ID NO: 11252 - DNA, 20 bp, Artificial Sequence
  MKO10011252_A_Cog8
  gRNA
ggctgatttccgcggccagt

SEQ ID NO: 11253 - DNA, 20 bp, Artificial Sequence
  MKO10011253_A_Coil
  gRNA
tttgtccgccccgtctcatc

SEQ ID NO: 11254 - DNA, 20 bp, Artificial Sequence
  MKO10011254_A_Coil
  gRNA
gaagcctcggtaaagcccga

SEQ ID NO: 11255 - DNA, 20 bp, Artificial Sequence
  MKO10011255_A_Coil
  gRNA
agaggtcctctcctcgctac

SEQ ID NO: 11256 - DNA, 20 bp, Artificial Sequence
  MKO10011256_A_Col10a1
  gRNA
tcatcatacgtgtacatcgt

SEQ ID NO: 11257 - DNA, 20 bp, Artificial Sequence
  MKO10011257_A_Col10a1
  gRNA
cctatctcacctttagcgcc

SEQ ID NO: 11258 - DNA, 20 bp, Artificial Sequence
  MKO10011258_A_Col10a1
  gRNA
aagtgggccctttatgcctg

SEQ ID NO: 11259 - DNA, 20 bp, Artificial Sequence
  MKO10011259_A_Col11a1
  gRNA
tcgatctctcacttctatcg

SEQ ID NO: 11260 - DNA, 20 bp, Artificial Sequence
  MKO10011260_A_Col11a1
  gRNA
gcaccgggtcgcaatcagtg

SEQ ID NO: 11261 - DNA, 20 bp, Artificial Sequence
  MKO10011261_A_Col11a1
  gRNA
acagtagtcgtatgctgcct

SEQ ID NO: 11262 - DNA, 20 bp, Artificial Sequence
  MKO10011262_A_Col11a2
  gRNA
cttcaaagacttcatcgtcg

SEQ ID NO: 11263 - DNA, 20 bp, Artificial Sequence
  MKO10011263_A_Col11a2
  gRNA
cacgattagatggcaccacg

SEQ ID NO: 11264 - DNA, 20 bp, Artificial Sequence
  MKO10011264_A_Col11a2
  gRNA
cttgactctatacagcgccc

SEQ ID NO: 11265 - DNA, 20 bp, Artificial Sequence
  MKO10011265_A_Col12a1
  gRNA
gagaccagttgatccaattg

SEQ ID NO: 11266 - DNA, 20 bp, Artificial Sequence
  MKO10011266_A_Col12a1
  gRNA
cttgttagttgacctattac

SEQ ID NO: 11267 - DNA, 20 bp, Artificial Sequence
  MKO10011267_A_Col12a1
  gRNA
tccccgagcgctggccgccc

SEQ ID NO: 11268 - DNA, 20 bp, Artificial Sequence
  MKO10011268_A_Col13a1
  gRNA
aatggaagttctactcgcgt

SEQ ID NO: 11269 - DNA, 20 bp, Artificial Sequence
  MKO10011269_A_Col13a1
  gRNA
agccaactcaccacacgtcc

SEQ ID NO: 11270 - DNA, 20 bp, Artificial Sequence
  MKO10011270_A_Col13a1
  gRNA
gaagccccgaagatgtctcc

SEQ ID NO: 11271 - DNA, 20 bp, Artificial Sequence
  MKO10011271_A_Col14a1
  gRNA
ccacgttgaacgctgtgacc

SEQ ID NO: 11272 - DNA, 20 bp, Artificial Sequence
  MKO10011272_A_Col14a1
  gRNA
tactccacgacccatccacc

SEQ ID NO: 11273 - DNA, 20 bp, Artificial Sequence
  MKO10011273_A_Col14a1
  gRNA
atctgaccttctggtgaagt

SEQ ID NO: 11274 - DNA, 20 bp, Artificial Sequence
  MKO10011274_A_Col15a1
  gRNA
tccgtttccagcgatcgtcc

SEQ ID NO: 11275 - DNA, 20 bp, Artificial Sequence
  MKO10011275_A_Col15a1
  gRNA
gtgaagcccaatagcgccca

SEQ ID NO: 11276 - DNA, 20 bp, Artificial Sequence
  MKO10011276_A_Col15a1
  gRNA
ctgcagacccgcgctgcgac

SEQ ID NO: 11277 - DNA, 20 bp, Artificial Sequence
  MKO10011277_A_Col16a1
  gRNA
gacccatcaaccaacgtgac

SEQ ID NO: 11278 - DNA, 20 bp, Artificial Sequence
  MKO10011278_A_Col16a1
  gRNA
gccaacgcagatcgaagagc

SEQ ID NO: 11279 - DNA, 20 bp, Artificial Sequence
  MKO10011279_A_Col16a1
  gRNA
gagtcctttaccgagttggt

SEQ ID NO: 11280 - DNA, 20 bp, Artificial Sequence
  MKO10011280_A_Col17a1
  gRNA
gagccacttacttggcggta

SEQ ID NO: 11281 - DNA, 20 bp, Artificial Sequence
  MKO10011281_A_Col17a1
  gRNA
aaagctcacatgacccgcca

SEQ ID NO: 11282 - DNA, 20 bp, Artificial Sequence
  MKO10011282_A_Col17a1
  gRNA
tgagtgcgttctcctgtaac

SEQ ID NO: 11283 - DNA, 20 bp, Artificial Sequence
  MKO10011283_A_Col18a1
  gRNA
gacgccgcggtagattctat

SEQ ID NO: 11284 - DNA, 20 bp, Artificial Sequence
  MKO10011284_A_Col18a1
  gRNA
atgtaggccggcccgacgtg

SEQ ID NO: 11285 - DNA, 20 bp, Artificial Sequence
  MKO10011285_A_Col18a1
  gRNA
cacttcgcgctcagcgtcga

SEQ ID NO: 11286 - DNA, 20 bp, Artificial Sequence
  MKO10011286_A_Col19a1
  gRNA
gtggtagaatttatgttccg

SEQ ID NO: 11287 - DNA, 20 bp, Artificial Sequence
  MKO10011287_A_Col19a1
  gRNA
gtccactctttgatcgtcaa

SEQ ID NO: 11288 - DNA, 20 bp, Artificial Sequence
  MKO10011288_A_Col19a1
  gRNA
cacacttcccaacttgaaac

SEQ ID NO: 11289 - DNA, 20 bp, Artificial Sequence
  MKO10011289_A_Col1a1
  gRNA
agaaccgtaccgtattcttc

SEQ ID NO: 11290 - DNA, 20 bp, Artificial Sequence
  MKO10011290_A_Col1a1
  gRNA
agcactcgccctcccgtctt

SEQ ID NO: 11291 - DNA, 20 bp, Artificial Sequence
  MKO10011291_A_Col1a1
  gRNA
atctcgtccaggggggccaa

SEQ ID NO: 11292 - DNA, 20 bp, Artificial Sequence
  MKO10011292_A_Col1a2
  gRNA
ttcctagggatcagtacgaa

SEQ ID NO: 11293 - DNA, 20 bp, Artificial Sequence
  MKO10011293_A_Col1a2
  gRNA
agatggtgttgatggtccca

SEQ ID NO: 11294 - DNA, 20 bp, Artificial Sequence
  MKO10011294_A_Col1a2
  gRNA
tcacataccctttgtccacg

SEQ ID NO: 11295 - DNA, 20 bp, Artificial Sequence
  MKO10011295_A_Col20a1
  gRNA
ttacagtaagtagccgcctg

SEQ ID NO: 11296 - DNA, 20 bp, Artificial Sequence
  MKO10011296_A_Col20a1
  gRNA
ggcctatcctgctggcacga

SEQ ID NO: 11297 - DNA, 20 bp, Artificial Sequence
  MKO10011297_A_Col20a1
  gRNA
caaactcccttcgtgccagc

SEQ ID NO: 11298 - DNA, 20 bp, Artificial Sequence
  MKO10011298_A_Col22a1
  gRNA
ccgtgttcgtgttaccgcca

SEQ ID NO: 11299 - DNA, 20 bp, Artificial Sequence
  MKO10011299_A_Col22a1
  gRNA
gcgcggcgcatcacctacca

SEQ ID NO: 11300 - DNA, 20 bp, Artificial Sequence
  MKO10011300_A_Col22a1
  gRNA
taaaccgatctccttctacc

SEQ ID NO: 11301 - DNA, 20 bp, Artificial Sequence
  MKO10011301_A_Col23a1
  gRNA
tggatggagtcgccaagctc

SEQ ID NO: 11302 - DNA, 20 bp, Artificial Sequence
  MKO10011302_A_Col23a1
  gRNA
ccagggtcgcctcttcgtcc

SEQ ID NO: 11303 - DNA, 20 bp, Artificial Sequence
  MKO10011303_A_Col23a1
  gRNA
cgtggcaagcctggacgaag

SEQ ID NO: 11304 - DNA, 20 bp, Artificial Sequence
  MKO10011304_A_Col24a1
  gRNA
ccatcagcgaacgtctcccg

SEQ ID NO: 11305 - DNA, 20 bp, Artificial Sequence
  MKO10011305_A_Col24a1
  gRNA
ccacgggagacgttcgctga

SEQ ID NO: 11306 - DNA, 20 bp, Artificial Sequence
  MKO10011306_A_Col24a1
  gRNA
taagggtccccctggtccga

SEQ ID NO: 11307 - DNA, 20 bp, Artificial Sequence
  MKO10011307_A_Col25a1
  gRNA
ccatccgctgtctgacaccg

SEQ ID NO: 11308 - DNA, 20 bp, Artificial Sequence
  MKO10011308_A_Col25a1
  gRNA
cggcaccatgccctcgtgca

SEQ ID NO: 11309 - DNA, 20 bp, Artificial Sequence
  MKO10011309_A_Col25a1
  gRNA
taaaataagaacggccaggg

SEQ ID NO: 11310 - DNA, 20 bp, Artificial Sequence
  MKO10011310_A_Col26a1
  gRNA
gagtgaacggctgaccacgc

SEQ ID NO: 11311 - DNA, 20 bp, Artificial Sequence
  MKO10011311_A_Col26a1
  gRNA
ctaccgcacggtgactgcgc

SEQ ID NO: 11312 - DNA, 20 bp, Artificial Sequence
  MKO10011312_A_Col26a1
  gRNA
gcagaatggctccgagacgg

SEQ ID NO: 11313 - DNA, 20 bp, Artificial Sequence
  MKO10011313_A_Col27a1
  gRNA
ttgtgagcgacctgcgccac

SEQ ID NO: 11314 - DNA, 20 bp, Artificial Sequence
  MKO10011314_A_Col27a1
  gRNA
ggatgatcgtcctgccgggg

SEQ ID NO: 11315 - DNA, 20 bp, Artificial Sequence
  MKO10011315_A_Col27a1
  gRNA
acccgaggacctcgtgcgcc

SEQ ID NO: 11316 - DNA, 20 bp, Artificial Sequence
  MKO10011316_A_Col28a1
  gRNA
tgacccgctgcttaaatgtc

SEQ ID NO: 11317 - DNA, 20 bp, Artificial Sequence
  MKO10011317_A_Col28a1
  gRNA
cccagatatcaaacgaagtt

SEQ ID NO: 11318 - DNA, 20 bp, Artificial Sequence
  MKO10011318_A_Col28a1
  gRNA
taatttaccgggtttccttt

SEQ ID NO: 11319 - DNA, 20 bp, Artificial Sequence
  MKO10011319_A_Col2a1
  gRNA
gctgacgctgctcatcgccg

SEQ ID NO: 11320 - DNA, 20 bp, Artificial Sequence
  MKO10011320_A_Col2a1
  gRNA
cggtgagccatgatccgcct

SEQ ID NO: 11321 - DNA, 20 bp, Artificial Sequence
  MKO10011321_A_Col2a1
  gRNA
tgcaggaaaattagggccaa

SEQ ID NO: 11322 - DNA, 20 bp, Artificial Sequence
  MKO10011322_A_Col3a1
  gRNA
gttacttaccggatctccct

SEQ ID NO: 11323 - DNA, 20 bp, Artificial Sequence
  MKO10011323_A_Col3a1
  gRNA
atctgtgaatcatgtccaac

SEQ ID NO: 11324 - DNA, 20 bp, Artificial Sequence
  MKO10011324_A_Col3a1
  gRNA
tgacatcatatgagtcgaat

SEQ ID NO: 11325 - DNA, 20 bp, Artificial Sequence
  MKO10011325_A_Col4a1
  gRNA
ttctttcagggcgattgtgg

SEQ ID NO: 11326 - DNA, 20 bp, Artificial Sequence
  MKO10011326_A_Col4a1
  gRNA
ccaatgacaccttgcaaccc

SEQ ID NO: 11327 - DNA, 20 bp, Artificial Sequence
  MKO10011327_A_Col4a1
  gRNA
cccctcaggtccttgcatcc

SEQ ID NO: 11328 - DNA, 20 bp, Artificial Sequence
  MKO10011328_A_Col4a2
  gRNA
tgccagtgctacccggagaa

SEQ ID NO: 11329 - DNA, 20 bp, Artificial Sequence
  MKO10011329_A_Col4a2
  gRNA
actcctggctcagagcgtct

SEQ ID NO: 11330 - DNA, 20 bp, Artificial Sequence
  MKO10011330_A_Col4a2
  gRNA
gtgggcccccaggggtacaa

SEQ ID NO: 11331 - DNA, 20 bp, Artificial Sequence
  MKO10011331_A_Col4a3bp
  gRNA
gagtccagcttgcgtagaca

SEQ ID NO: 11332 - DNA, 20 bp, Artificial Sequence
  MKO10011332_A_Col4a3bp
  gRNA
tgagccatgtctacgcaagc

SEQ ID NO: 11333 - DNA, 20 bp, Artificial Sequence
  MKO10011333_A_Col4a3bp
  gRNA
gacggagtccgggccgcctg

SEQ ID NO: 11334 - DNA, 20 bp, Artificial Sequence
  MKO10011334_A_Col4a3
  gRNA
caaaggacaatgcctctgcg

SEQ ID NO: 11335 - DNA, 20 bp, Artificial Sequence
  MKO10011335_A_Col4a3
  gRNA
ccagtgagtcccggaagtcc

SEQ ID NO: 11336 - DNA, 20 bp, Artificial Sequence
  MKO10011336_A_Col4a3
  gRNA
tagggaataactggattacc

SEQ ID NO: 11337 - DNA, 20 bp, Artificial Sequence
  MKO10011337_A_Col4a4
  gRNA
agagcagtttcttcctccgc

SEQ ID NO: 11338 - DNA, 20 bp, Artificial Sequence
  MKO10011338_A_Col4a4
  gRNA
acagggaccaatagggccct

SEQ ID NO: 11339 - DNA, 20 bp, Artificial Sequence
  MKO10011339_A_Col4a4
  gRNA
tagggtccaactggtgtccc

SEQ ID NO: 11340 - DNA, 20 bp, Artificial Sequence
  MKO10011340_A_Col4a5
  gRNA
cctggatgaccttctaaacc

SEQ ID NO: 11341 - DNA, 20 bp, Artificial Sequence
  MKO10011341_A_Col4a5
  gRNA
atttcctataggcctgccat

SEQ ID NO: 11342 - DNA, 20 bp, Artificial Sequence
  MKO10011342_A_Col4a5
  gRNA
tttaattgcagggagaacgg

SEQ ID NO: 11343 - DNA, 20 bp, Artificial Sequence
  MKO10011343_A_Col4a6
  gRNA
accagtaaacccttccggac

SEQ ID NO: 11344 - DNA, 20 bp, Artificial Sequence
  MKO10011344_A_Col4a6
  gRNA
taggggcaccctggaccaat

SEQ ID NO: 11345 - DNA, 20 bp, Artificial Sequence
  MKO10011345_A_Col4a6
  gRNA
tgtgggagccgagattgcca

SEQ ID NO: 11346 - DNA, 20 bp, Artificial Sequence
  MKO10011346_A_Col5a1
  gRNA
ccatcggacaagttgatgcc

SEQ ID NO: 11347 - DNA, 20 bp, Artificial Sequence
  MKO10011347_A_Col5a1
  gRNA
catgtttggctcccggattc

SEQ ID NO: 11348 - DNA, 20 bp, Artificial Sequence
  MKO10011348_A_Col5a1
  gRNA
aagcggatactcttcaggcc

SEQ ID NO: 11349 - DNA, 20 bp, Artificial Sequence
  MKO10011349_A_Col5a2
  gRNA
tgtccggtgtgcccacaaac

SEQ ID NO: 11350 - DNA, 20 bp, Artificial Sequence
  MKO10011350_A_Col5a2
  gRNA
aaaatacttactgcaggtcc

SEQ ID NO: 11351 - DNA, 20 bp, Artificial Sequence
  MKO10011351_A_Col5a2
  gRNA
gtttaggtaacaggtatacg

SEQ ID NO: 11352 - DNA, 20 bp, Artificial Sequence
  MKO10011352_A_Col5a3
  gRNA
accctcgattccacaaccac

SEQ ID NO: 11353 - DNA, 20 bp, Artificial Sequence
  MKO10011353_A_Col5a3
  gRNA
cctcggtttataagtacagc

SEQ ID NO: 11354 - DNA, 20 bp, Artificial Sequence
  MKO10011354_A_Col5a3
  gRNA
ccagctgtacttataaaccg

SEQ ID NO: 11355 - DNA, 20 bp, Artificial Sequence
  MKO10011355_A_Col6a1
  gRNA
attcttcgtgctcgacacct

SEQ ID NO: 11356 - DNA, 20 bp, Artificial Sequence
  MKO10011356_A_Col6a1
  gRNA
caccgactgcgccattaaga

SEQ ID NO: 11357 - DNA, 20 bp, Artificial Sequence
  MKO10011357_A_Col6a1
  gRNA
agcacgaagaatagatccac

SEQ ID NO: 11358 - DNA, 20 bp, Artificial Sequence
  MKO10011358_A_Col6a2
  gRNA
agtcaacgtgtatttcgtgt

SEQ ID NO: 11359 - DNA, 20 bp, Artificial Sequence
  MKO10011359_A_Col6a2
  gRNA
gggggtggtcaacttcgccg

SEQ ID NO: 11360 - DNA, 20 bp, Artificial Sequence
  MKO10011360_A_Col6a2
  gRNA
tggttcacccatgttgccct

SEQ ID NO: 11361 - DNA, 20 bp, Artificial Sequence
  MKO10011361_A_Col6a3
  gRNA
ggataacgtgcagcagttcc

SEQ ID NO: 11362 - DNA, 20 bp, Artificial Sequence
  MKO10011362_A_Col6a3
  gRNA
gaaccccctcagcggcccta

SEQ ID NO: 11363 - DNA, 20 bp, Artificial Sequence
  MKO10011363_A_Col6a3
  gRNA
gctgcacgttatcctcgatg

SEQ ID NO: 11364 - DNA, 20 bp, Artificial Sequence
  MKO10011364_A_Col6a4
  gRNA
ggaccacattcgcgaacctg

SEQ ID NO: 11365 - DNA, 20 bp, Artificial Sequence
  MKO10011365_A_Col6a4
  gRNA
ctatctgctgtacgccccga

SEQ ID NO: 11366 - DNA, 20 bp, Artificial Sequence
  MKO10011366_A_Col6a4
  gRNA
cacaagtaccggaagcgccc

SEQ ID NO: 11367 - DNA, 20 bp, Artificial Sequence
  MKO10011367_A_Col6a5
  gRNA
ccatccgtgtagcgagagac

SEQ ID NO: 11368 - DNA, 20 bp, Artificial Sequence
  MKO10011368_A_Col6a5
  gRNA
gtttgcctcgccaatcccga

SEQ ID NO: 11369 - DNA, 20 bp, Artificial Sequence
  MKO10011369_A_Col6a5
  gRNA
gccaaccacgttgataagac

SEQ ID NO: 11370 - DNA, 20 bp, Artificial Sequence
  MKO10011370_A_Col6a6
  gRNA
agctgtcaacctccggcggg

SEQ ID NO: 11371 - DNA, 20 bp, Artificial Sequence
  MKO10011371_A_Col6a6
  gRNA
ccgtgcagtacgccgacacc

SEQ ID NO: 11372 - DNA, 20 bp, Artificial Sequence
  MKO10011372_A_Col6a6
  gRNA
gcgatcttctccagctcgtc

SEQ ID NO: 11373 - DNA, 20 bp, Artificial Sequence
  MKO10011373_A_Col7a1
  gRNA
agcaactttcgagaagtgcg

SEQ ID NO: 11374 - DNA, 20 bp, Artificial Sequence
  MKO10011374_A_Col7a1
  gRNA
gacatcgtgttcttactcga

SEQ ID NO: 11375 - DNA, 20 bp, Artificial Sequence
  MKO10011375_A_Col7a1
  gRNA
aatcaagaatgccgaccctg

SEQ ID NO: 11376 - DNA, 20 bp, Artificial Sequence
  MKO10011376_A_Col8a1
  gRNA
ccactaggtcctacgatccc

SEQ ID NO: 11377 - DNA, 20 bp, Artificial Sequence
  MKO10011377_A_Col8a1
  gRNA
ataccgggctttccaattcc

SEQ ID NO: 11378 - DNA, 20 bp, Artificial Sequence
  MKO10011378_A_Col8a1
  gRNA
acacctaccccaatatatga

SEQ ID NO: 11379 - DNA, 20 bp, Artificial Sequence
  MKO10011379_A_Col8a2
  gRNA
cttgtattcgtcgtacgtgt

SEQ ID NO: 11380 - DNA, 20 bp, Artificial Sequence
  MKO10011380_A_Col8a2
  gRNA
cgtgggaccgcctttccgag

SEQ ID NO: 11381 - DNA, 20 bp, Artificial Sequence
  MKO10011381_A_Col8a2
  gRNA
catggaccccctggaccgac

SEQ ID NO: 11382 - DNA, 20 bp, Artificial Sequence
  MKO10011382_A_Col9a1
  gRNA
gcataagctcatgattggcg

SEQ ID NO: 11383 - DNA, 20 bp, Artificial Sequence
  MKO10011383_A_Col9a1
  gRNA
tgcacgacgcttaagagttg

SEQ ID NO: 11384 - DNA, 20 bp, Artificial Sequence
  MKO10011384_A_Col9a1
  gRNA
catctcgaaggactatccag

SEQ ID NO: 11385 - DNA, 20 bp, Artificial Sequence
  MKO10011385_A_Col9a2
  gRNA
acgtcgatgccatctgaacc

SEQ ID NO: 11386 - DNA, 20 bp, Artificial Sequence
  MKO10011386_A_Col9a2
  gRNA
accggaggaccaactttacc

SEQ ID NO: 11387 - DNA, 20 bp, Artificial Sequence
  MKO10011387_A_Col9a2
  gRNA
tccaggtaaagttggtcctc

SEQ ID NO: 11388 - DNA, 20 bp, Artificial Sequence
  MKO10011388_A_Col9a3
  gRNA
tttcagaaagtgggaccccg

SEQ ID NO: 11389 - DNA, 20 bp, Artificial Sequence
  MKO10011389_A_Col9a3
  gRNA
tagacacttacccgttctcc

SEQ ID NO: 11390 - DNA, 20 bp, Artificial Sequence
  MKO10011390_A_Col9a3
  gRNA
gggacacttactggaaggcc

SEQ ID NO: 11391 - DNA, 20 bp, Artificial Sequence
  MKO10011391_A_Colec10
  gRNA
ccagttgtccaaccactttc

SEQ ID NO: 11392 - DNA, 20 bp, Artificial Sequence
  MKO10011392_A_Colec10
  gRNA
atgggagcccagggtaatat

SEQ ID NO: 11393 - DNA, 20 bp, Artificial Sequence
  MKO10011393_A_Colec10
  gRNA
gtctggccctattggcaaga

SEQ ID NO: 11394 - DNA, 20 bp, Artificial Sequence
  MKO10011394_A_Colec11
  gRNA
ccaggaagagtcggccctac

SEQ ID NO: 11395 - DNA, 20 bp, Artificial Sequence
  MKO10011395_A_Colec11
  gRNA
ccgactcttcctggccgtcc

SEQ ID NO: 11396 - DNA, 20 bp, Artificial Sequence
  MKO10011396_A_Colec11
  gRNA
atcggaccccctggccccag

SEQ ID NO: 11397 - DNA, 20 bp, Artificial Sequence
  MKO10011397_A_Colec12
  gRNA
atcattcttaattcgctgga

SEQ ID NO: 11398 - DNA, 20 bp, Artificial Sequence
  MKO10011398_A_Colec12
  gRNA
cacactagtcaacatccgct

SEQ ID NO: 11399 - DNA, 20 bp, Artificial Sequence
  MKO10011399_A_Colec12
  gRNA
accaaacctcttgtaaccga

SEQ ID NO: 11400 - DNA, 20 bp, Artificial Sequence
  MKO10011400_A_Colgalt2
  gRNA
ctccagcatgggcgccacga

SEQ ID NO: 11401 - DNA, 20 bp, Artificial Sequence
  MKO10011401_A_Colgalt2
  gRNA
gcagcgtttgtatcactatg

SEQ ID NO: 11402 - DNA, 20 bp, Artificial Sequence
  MKO10011402_A_Colgalt2
  gRNA
ggggtctatactctaacttc

SEQ ID NO: 11403 - DNA, 20 bp, Artificial Sequence
  MKO10011403_A_Colq
  gRNA
ttcccaccgccgttcttcag

SEQ ID NO: 11404 - DNA, 20 bp, Artificial Sequence
  MKO10011404_A_Colq
  gRNA
gtgacgcctcaagttccaga

SEQ ID NO: 11405 - DNA, 20 bp, Artificial Sequence
  MKO10011405_A_Colq
  gRNA
gccgagcgagccttgaatgc

SEQ ID NO: 11406 - DNA, 20 bp, Artificial Sequence
  MKO10011406_A_Commd10
  gRNA
acccatagccgaccaagcac

SEQ ID NO: 11407 - DNA, 20 bp, Artificial Sequence
  MKO10011407_A_Commd10
  gRNA
atggcagcttaacctgcaaa

SEQ ID NO: 11408 - DNA, 20 bp, Artificial Sequence
  MKO10011408_A_Commd10
  gRNA
cctgtaccttgtgagggccc

SEQ ID NO: 11409 - DNA, 20 bp, Artificial Sequence
  MKO10011409_A_Commd1
  gRNA
cttagccatggcgggcgatc

SEQ ID NO: 11410 - DNA, 20 bp, Artificial Sequence
  MKO10011410_A_Commd1
  gRNA
accctccagatcgcccgcca

SEQ ID NO: 11411 - DNA, 20 bp, Artificial Sequence
  MKO10011411_A_Commd1
  gRNA
cccgaaggccgttgtcccag

SEQ ID NO: 11412 - DNA, 20 bp, Artificial Sequence
  MKO10011412_A_Commd2
  gRNA
gcggcgccttcgtagatctt

SEQ ID NO: 11413 - DNA, 20 bp, Artificial Sequence
  MKO10011413_A_Commd2
  gRNA
gttgcagtggtcgccgagtt

SEQ ID NO: 11414 - DNA, 20 bp, Artificial Sequence
  MKO10011414_A_Commd2
  gRNA
ctgatcgaggtgcagcttta

SEQ ID NO: 11415 - DNA, 20 bp, Artificial Sequence
  MKO10011415_A_Commd3
  gRNA
aaaacagttctattcgctct

SEQ ID NO: 11416 - DNA, 20 bp, Artificial Sequence
  MKO10011416_A_Commd3
  gRNA
cttgaaacagatcgacccag

SEQ ID NO: 11417 - DNA, 20 bp, Artificial Sequence
  MKO10011417_A_Commd3
  gRNA
gaattctctagaaaccctac

SEQ ID NO: 11418 - DNA, 20 bp, Artificial Sequence
  MKO10011418_A_Commd4
  gRNA
gaaactcagcaccgcgaccg

SEQ ID NO: 11419 - DNA, 20 bp, Artificial Sequence
  MKO10011419_A_Commd4
  gRNA
cgatctggactgtcccgact

SEQ ID NO: 11420 - DNA, 20 bp, Artificial Sequence
  MKO10011420_A_Commd4
  gRNA
atcactgtcgacactatgct

SEQ ID NO: 11421 - DNA, 20 bp, Artificial Sequence
  MKO10011421_A_Commd5
  gRNA
gctgcgctacagcgtggcgt

SEQ ID NO: 11422 - DNA, 20 bp, Artificial Sequence
  MKO10011422_A_Commd5
  gRNA
attcgacacacgaggcagcg

SEQ ID NO: 11423 - DNA, 20 bp, Artificial Sequence
  MKO10011423_A_Commd5
  gRNA
tgcctcgtgtgtcgaatttc

SEQ ID NO: 11424 - DNA, 20 bp, Artificial Sequence
  MKO10011424_A_Commd6
  gRNA
tccgttccaggtcacgggcc

SEQ ID NO: 11425 - DNA, 20 bp, Artificial Sequence
  MKO10011425_A_Commd6
  gRNA
gcccgtgctggatgccaagt

SEQ ID NO: 11426 - DNA, 20 bp, Artificial Sequence
  MKO10011426_A_Commd6
  gRNA
gatgacaattccacaatttc

SEQ ID NO: 11427 - DNA, 20 bp, Artificial Sequence
  MKO10011427_A_Commd7
  gRNA
cggactgatctccagacgct

SEQ ID NO: 11428 - DNA, 20 bp, Artificial Sequence
  MKO10011428_A_Commd7
  gRNA
acgcctcgacccttgcacag

SEQ ID NO: 11429 - DNA, 20 bp, Artificial Sequence
  MKO10011429_A_Commd7
  gRNA
ttctcttacaggtcttagcg

SEQ ID NO: 11430 - DNA, 20 bp, Artificial Sequence
  MKO10011430_A_Commd8
  gRNA
taccttattagcggcctcca

SEQ ID NO: 11431 - DNA, 20 bp, Artificial Sequence
  MKO10011431_A_Commd8
  gRNA
ccgagcttatcctgcccacc

SEQ ID NO: 11432 - DNA, 20 bp, Artificial Sequence
  MKO10011432_A_Commd8
  gRNA
tatttcttgtgcgcagctgc

SEQ ID NO: 11433 - DNA, 20 bp, Artificial Sequence
  MKO10011433_A_Commd9
  gRNA
agctggagcacgtcttatct

SEQ ID NO: 11434 - DNA, 20 bp, Artificial Sequence
  MKO10011434_A_Commd9
  gRNA
ttctgagtcaaggcatgaac

SEQ ID NO: 11435 - DNA, 20 bp, Artificial Sequence
  MKO10011435_A_Commd9
  gRNA
catgcggctgatgttgtcag

SEQ ID NO: 11436 - DNA, 20 bp, Artificial Sequence
  MKO10011436_A_Comp
  gRNA
cccgcgcacctcattaacgt

SEQ ID NO: 11437 - DNA, 20 bp, Artificial Sequence
  MKO10011437_A_Comp
  gRNA
gttcagcggacccacccacg

SEQ ID NO: 11438 - DNA, 20 bp, Artificial Sequence
  MKO10011438_A_Comp
  gRNA
tattgatgcaccgcacccgc

SEQ ID NO: 11439 - DNA, 20 bp, Artificial Sequence
  MKO10011439_A_Comtd1
  gRNA
gggctctgcgtcaacctcgc

SEQ ID NO: 11440 - DNA, 20 bp, Artificial Sequence
  MKO10011440_A_Comtd1
  gRNA
gcttccggaggctggccgcg

SEQ ID NO: 11441 - DNA, 20 bp, Artificial Sequence
  MKO10011441_A_Comtd1
  gRNA
cttaatgagccgcgccaggt

SEQ ID NO: 11442 - DNA, 20 bp, Artificial Sequence
  MKO10011442_A_Comt
  gRNA
atgaacgtgggtgacgcaaa

SEQ ID NO: 11443 - DNA, 20 bp, Artificial Sequence
  MKO10011443_A_Comt
  gRNA
gcaccgtccccttgcgcagc

SEQ ID NO: 11444 - DNA, 20 bp, Artificial Sequence
  MKO10011444_A_Comt
  gRNA
tgctccccctcacatacgcc

SEQ ID NO: 11445 - DNA, 20 bp, Artificial Sequence
  MKO10011445_A_Copa
  gRNA
acatccgatagtcccataac

SEQ ID NO: 11446 - DNA, 20 bp, Artificial Sequence
  MKO10011446_A_Copa
  gRNA
catgatggaaaaacgttgta

SEQ ID NO: 11447 - DNA, 20 bp, Artificial Sequence
  MKO10011447_A_Copa
  gRNA
cctcagatgatcagaccatt

SEQ ID NO: 11448 - DNA, 20 bp, Artificial Sequence
  MKO10011448_A_Copb1
  gRNA
caccccaatgagtttattcg

SEQ ID NO: 11449 - DNA, 20 bp, Artificial Sequence
  MKO10011449_A_Copb1
  gRNA
gatgctaattcacgcagatc

SEQ ID NO: 11450 - DNA, 20 bp, Artificial Sequence
  MKO10011450_A_Copb1
  gRNA
gacgatgttccaagcacgca

SEQ ID NO: 11451 - DNA, 20 bp, Artificial Sequence
  MKO10011451_A_Copb2
  gRNA
ttgccagtgcatctctcgac

SEQ ID NO: 11452 - DNA, 20 bp, Artificial Sequence
  MKO10011452_A_Copb2
  gRNA
gcaaatccacgctcttaact

SEQ ID NO: 11453 - DNA, 20 bp, Artificial Sequence
  MKO10011453_A_Copb2
  gRNA
ctcttgatgtcaagtcgaag

SEQ ID NO: 11454 - DNA, 20 bp, Artificial Sequence
  MKO10011454_A_Cope
  gRNA
accactcaaggccgtcgccc

SEQ ID NO: 11455 - DNA, 20 bp, Artificial Sequence
  MKO10011455_A_Cope
  gRNA
accgtagaggaagtatggcg

SEQ ID NO: 11456 - DNA, 20 bp, Artificial Sequence
  MKO10011456_A_Cope
  gRNA
atacagagcatacctcgcac

SEQ ID NO: 11457 - DNA, 20 bp, Artificial Sequence
  MKO10011457_A_Copg1
  gRNA
gaagagtgccgtactccaag

SEQ ID NO: 11458 - DNA, 20 bp, Artificial Sequence
  MKO10011458_A_Copg1
  gRNA
cttgtcgaatttcttcaaca

SEQ ID NO: 11459 - DNA, 20 bp, Artificial Sequence
  MKO10011459_A_Copg1
  gRNA
ggcacttgcctcttggagta

SEQ ID NO: 11460 - DNA, 20 bp, Artificial Sequence
  MKO10011460_A_Copg2
  gRNA
gtaacttgcagcaaacgctg

SEQ ID NO: 11461 - DNA, 20 bp, Artificial Sequence
  MKO10011461_A_Copg2
  gRNA
caatcgagtcattgcaaaga

SEQ ID NO: 11462 - DNA, 20 bp, Artificial Sequence
  MKO10011462_A_Copg2
  gRNA
gattctttacttactcaacc

SEQ ID NO: 11463 - DNA, 20 bp, Artificial Sequence
  MKO10011463_A_Coprs
  gRNA
gtcgcgctcacctccgcgct

SEQ ID NO: 11464 - DNA, 20 bp, Artificial Sequence
  MKO10011464_A_Coprs
  gRNA
acatgatatacgaccccagt

SEQ ID NO: 11465 - DNA, 20 bp, Artificial Sequence
  MKO10011465_A_Coprs
  gRNA
ttcgcaggaggcccccagcg

SEQ ID NO: 11466 - DNA, 20 bp, Artificial Sequence
  MKO10011466_A_Cops2
  gRNA
ggtgactgcactccgaatat

SEQ ID NO: 11467 - DNA, 20 bp, Artificial Sequence
  MKO10011467_A_Cops2
  gRNA
agcaactattgacctatatt

SEQ ID NO: 11468 - DNA, 20 bp, Artificial Sequence
  MKO10011468_A_Cops2
  gRNA
agcattaagcagcttccaaa

SEQ ID NO: 11469 - DNA, 20 bp, Artificial Sequence
  MKO10011469_A_Cops3
  gRNA
gagaatagtgtttcgaagtc

SEQ ID NO: 11470 - DNA, 20 bp, Artificial Sequence
  MKO10011470_A_Cops3
  gRNA
tgcgaagaacttgtcccatc

SEQ ID NO: 11471 - DNA, 20 bp, Artificial Sequence
  MKO10011471_A_Cops3
  gRNA
taaggatgccaattcctcga

SEQ ID NO: 11472 - DNA, 20 bp, Artificial Sequence
  MKO10011472_A_Cops4
  gRNA
gtacaacgtagattataagc

SEQ ID NO: 11473 - DNA, 20 bp, Artificial Sequence
  MKO10011473_A_Cops4
  gRNA
gcagttgccgtgagatcacg

SEQ ID NO: 11474 - DNA, 20 bp, Artificial Sequence
  MKO10011474_A_Cops4
  gRNA
ggaggatgacgatcccgtcc

SEQ ID NO: 11475 - DNA, 20 bp, Artificial Sequence
  MKO10011475_A_Cops5
  gRNA
aagtgaatcttggcgccttt

SEQ ID NO: 11476 - DNA, 20 bp, Artificial Sequence
  MKO10011476_A_Cops5
  gRNA
ttgatgctcgggaaagtcga

SEQ ID NO: 11477 - DNA, 20 bp, Artificial Sequence
  MKO10011477_A_Cops5
  gRNA
ggccgccttgagaatgcaat

SEQ ID NO: 11478 - DNA, 20 bp, Artificial Sequence
  MKO10011478_A_Cops6
  gRNA
tctatacctgcttatggacg

SEQ ID NO: 11479 - DNA, 20 bp, Artificial Sequence
  MKO10011479_A_Cops6
  gRNA
atccgcatgcgctcccagga

SEQ ID NO: 11480 - DNA, 20 bp, Artificial Sequence
  MKO10011480_A_Cops6
  gRNA
tttaacagtccccagcgtga

SEQ ID NO: 11481 - DNA, 20 bp, Artificial Sequence
  MKO10011481_A_Cops7a
  gRNA
ccttcgaaacgtgcgccagc

SEQ ID NO: 11482 - DNA, 20 bp, Artificial Sequence
  MKO10011482_A_Cops7a
  gRNA
cctctagccgctgattgcgc

SEQ ID NO: 11483 - DNA, 20 bp, Artificial Sequence
  MKO10011483_A_Cops7a
  gRNA
gcccctggtgtctacgtgtt

SEQ ID NO: 11484 - DNA, 20 bp, Artificial Sequence
  MKO10011484_A_Cops7b
  gRNA
gcatcttaccatcgtgagct

SEQ ID NO: 11485 - DNA, 20 bp, Artificial Sequence
  MKO10011485_A_Cops7b
  gRNA
ttgtcaagaccttgcatgag

SEQ ID NO: 11486 - DNA, 20 bp, Artificial Sequence
  MKO10011486_A_Cops7b
  gRNA
tcttgatgccaagctcacga

SEQ ID NO: 11487 - DNA, 20 bp, Artificial Sequence
  MKO10011487_A_Cops8
  gRNA
gtgctacttacatgtcgttc

SEQ ID NO: 11488 - DNA, 20 bp, Artificial Sequence
  MKO10011488_A_Cops8
  gRNA
gctagaagctgaccgtacac

SEQ ID NO: 11489 - DNA, 20 bp, Artificial Sequence
  MKO10011489_A_Cops8
  gRNA
ggtcagttggacagcgaatc

SEQ ID NO: 11490 - DNA, 20 bp, Artificial Sequence
  MKO10011490_A_Copz1
  gRNA
atgacctactatccgtccga

SEQ ID NO: 11491 - DNA, 20 bp, Artificial Sequence
  MKO10011491_A_Copz1
  gRNA
atctcaccttggcgaagagt

SEQ ID NO: 11492 - DNA, 20 bp, Artificial Sequence
  MKO10011492_A_Copz1
  gRNA
cccaggtgaaatcgctctgt

SEQ ID NO: 11493 - DNA, 20 bp, Artificial Sequence
  MKO10011493_A_Copz2
  gRNA
ggccttactttcggtgcggc

SEQ ID NO: 11494 - DNA, 20 bp, Artificial Sequence
  MKO10011494_A_Copz2
  gRNA
gggatcttcctccgagaatg

SEQ ID NO: 11495 - DNA, 20 bp, Artificial Sequence
  MKO10011495_A_Copz2
  gRNA
gtctcacttaccttaagatg

SEQ ID NO: 11496 - DNA, 20 bp, Artificial Sequence
  MKO10011496_A_Coq10a
  gRNA
agtaccgagagttcgtgccg

SEQ ID NO: 11497 - DNA, 20 bp, Artificial Sequence
  MKO10011497_A_Coq10a
  gRNA
cgagtaagcctttcgcttgt

SEQ ID NO: 11498 - DNA, 20 bp, Artificial Sequence
  MKO10011498_A_Coq10a
  gRNA
ttactcggagcgtaggatca

SEQ ID NO: 11499 - DNA, 20 bp, Artificial Sequence
  MKO10011499_A_Coq10b
  gRNA
gggggtctgcgcgcgacgtc

SEQ ID NO: 11500 - DNA, 20 bp, Artificial Sequence
  MKO10011500_A_Coq10b
  gRNA
ttctaggcatcttgtactga

SEQ ID NO: 11501 - DNA, 20 bp, Artificial Sequence
  MKO10011501_A_Coq10b
  gRNA
tcgcgcgcagacccccgcgc

SEQ ID NO: 11502 - DNA, 20 bp, Artificial Sequence
  MKO10011502_A_Coq2
  gRNA
gcaaaccgcccaatcgctgc

SEQ ID NO: 11503 - DNA, 20 bp, Artificial Sequence
  MKO10011503_A_Coq2
  gRNA
agtgataacatgtaccagtc

SEQ ID NO: 11504 - DNA, 20 bp, Artificial Sequence
  MKO10011504_A_Coq2
  gRNA
tcctgtgtttaaactactac

SEQ ID NO: 11505 - DNA, 20 bp, Artificial Sequence
  MKO10011505_A_Coq3
  gRNA
gggatgaagattcttgacgt

SEQ ID NO: 11506 - DNA, 20 bp, Artificial Sequence
  MKO10011506_A_Coq3
  gRNA
ccgtgttcaccgagttccca

SEQ ID NO: 11507 - DNA, 20 bp, Artificial Sequence
  MKO10011507_A_Coq3
  gRNA
acctaatgaatggcacccgt

SEQ ID NO: 11508 - DNA, 20 bp, Artificial Sequence
  MKO10011508_A_Coq4
  gRNA
aaccgtcttaccgtggcgat

SEQ ID NO: 11509 - DNA, 20 bp, Artificial Sequence
  MKO10011509_A_Coq4
  gRNA
cgtgcacttcacggtacctc

SEQ ID NO: 11510 - DNA, 20 bp, Artificial Sequence
  MKO10011510_A_Coq4
  gRNA
tcatcgtccacaaagcgtgt

SEQ ID NO: 11511 - DNA, 20 bp, Artificial Sequence
  MKO10011511_A_Coq5
  gRNA
acgttcaggcacaacatcag

SEQ ID NO: 11512 - DNA, 20 bp, Artificial Sequence
  MKO10011512_A_Coq5
  gRNA
gttgtgcctgaacgtaacta

SEQ ID NO: 11513 - DNA, 20 bp, Artificial Sequence
  MKO10011513_A_Coq5
  gRNA
ctccagccatgtcgagcagc

SEQ ID NO: 11514 - DNA, 20 bp, Artificial Sequence
  MKO10011514_A_Coq6
  gRNA
gtccctgtcgaacattatca

SEQ ID NO: 11515 - DNA, 20 bp, Artificial Sequence
  MKO10011515_A_Coq6
  gRNA
ttctcctgcagatcgagtga

SEQ ID NO: 11516 - DNA, 20 bp, Artificial Sequence
  MKO10011516_A_Coq6
  gRNA
tgccatcacctagggtaata

SEQ ID NO: 11517 - DNA, 20 bp, Artificial Sequence
  MKO10011517_A_Coq7
  gRNA
cacccgaattattcgatcca

SEQ ID NO: 11518 - DNA, 20 bp, Artificial Sequence
  MKO10011518_A_Coq7
  gRNA
catcaagcagtttcgcgatg

SEQ ID NO: 11519 - DNA, 20 bp, Artificial Sequence
  MKO10011519_A_Coq7
  gRNA
aacactggtccgaccgagca

SEQ ID NO: 11520 - DNA, 20 bp, Artificial Sequence
  MKO10011520_A_Coq9
  gRNA
gtgcaatgctcgcctcaacc

SEQ ID NO: 11521 - DNA, 20 bp, Artificial Sequence
  MKO10011521_A_Coq9
  gRNA
caccagagctggtcggcagc

SEQ ID NO: 11522 - DNA, 20 bp, Artificial Sequence
  MKO10011522_A_Coq9
  gRNA
gccatcgctcccaaacatgc

SEQ ID NO: 11523 - DNA, 20 bp, Artificial Sequence
  MKO10011523_A_Corin
  gRNA
cacgatgagggcgcagatgc

SEQ ID NO: 11524 - DNA, 20 bp, Artificial Sequence
  MKO10011524_A_Corin
  gRNA
cgaggctacagccgaagagc

SEQ ID NO: 11525 - DNA, 20 bp, Artificial Sequence
  MKO10011525_A_Corin
  gRNA
ttccctgagtgcgttgttga

SEQ ID NO: 11526 - DNA, 20 bp, Artificial Sequence
  MKO10011526_A_Coro1a
  gRNA
tgacacgaactcgcttgtca

SEQ ID NO: 11527 - DNA, 20 bp, Artificial Sequence
  MKO10011527_A_Coro1a
  gRNA
cgtgtcatcgagcctcgcaa

SEQ ID NO: 11528 - DNA, 20 bp, Artificial Sequence
  MKO10011528_A_Coro1a
  gRNA
agtagacaagaacgtgcccc

SEQ ID NO: 11529 - DNA, 20 bp, Artificial Sequence
  MKO10011529_A_Coro1b
  gRNA
gcgtccgaatcatcgatcct

SEQ ID NO: 11530 - DNA, 20 bp, Artificial Sequence
  MKO10011530_A_Coro1b
  gRNA
cgaggggcataccaagcgcg

SEQ ID NO: 11531 - DNA, 20 bp, Artificial Sequence
  MKO10011531_A_Coro1b
  gRNA
ggtgataatgcccacgcgct

SEQ ID NO: 11532 - DNA, 20 bp, Artificial Sequence
  MKO10011532_A_Coro1c
  gRNA
ccaacaggtttggcagatcc

SEQ ID NO: 11533 - DNA, 20 bp, Artificial Sequence
  MKO10011533_A_Coro1c
  gRNA
ccccacgttccagatgataa

SEQ ID NO: 11534 - DNA, 20 bp, Artificial Sequence
  MKO10011534_A_Coro1c
  gRNA
cgccacaatctcctgtttcc

SEQ ID NO: 11535 - DNA, 20 bp, Artificial Sequence
  MKO10011535_A_Coro2a
  gRNA
cggattgttgacccccgact

SEQ ID NO: 11536 - DNA, 20 bp, Artificial Sequence
  MKO10011536_A_Coro2a
  gRNA
gtacctcccgctggaacaac

SEQ ID NO: 11537 - DNA, 20 bp, Artificial Sequence
  MKO10011537_A_Coro2a
  gRNA
ggtcaacaatccgaatcttg

SEQ ID NO: 11538 - DNA, 20 bp, Artificial Sequence
  MKO10011538_A_Coro2b
  gRNA
cgtgtgattgaaccccgatc

SEQ ID NO: 11539 - DNA, 20 bp, Artificial Sequence
  MKO10011539_A_Coro2b
  gRNA
cggtcatcagggcaacgtgc

SEQ ID NO: 11540 - DNA, 20 bp, Artificial Sequence
  MKO10011540_A_Coro2b
  gRNA
agtaccgcagttccaagttt

SEQ ID NO: 11541 - DNA, 20 bp, Artificial Sequence
  MKO10011541_A_Coro6
  gRNA
acgtcatccacagcgtgtgt

SEQ ID NO: 11542 - DNA, 20 bp, Artificial Sequence
  MKO10011542_A_Coro6
  gRNA
ccatgagccggcgtgttgtt

SEQ ID NO: 11543 - DNA, 20 bp, Artificial Sequence
  MKO10011543_A_Coro6
  gRNA
cgtcagggtgtatgtcgtcc

SEQ ID NO: 11544 - DNA, 20 bp, Artificial Sequence
  MKO10011544_A_Coro7
  gRNA
agcacgaatatcactgatcc

SEQ ID NO: 11545 - DNA, 20 bp, Artificial Sequence
  MKO10011545_A_Coro7
  gRNA
gctttcaactctgaccgccc

SEQ ID NO: 11546 - DNA, 20 bp, Artificial Sequence
  MKO10011546_A_Coro7
  gRNA
caccagaacaccgtctacag

SEQ ID NO: 11547 - DNA, 20 bp, Artificial Sequence
  MKO10011547_A_Cort
  gRNA
cccgggggtaccccctccga

SEQ ID NO: 11548 - DNA, 20 bp, Artificial Sequence
  MKO10011548_A_Cort
  gRNA
agggtggggttacttgcacg

SEQ ID NO: 11549 - DNA, 20 bp, Artificial Sequence
  MKO10011549_A_Cort
  gRNA
ccgaggatgatgggtggccg

SEQ ID NO: 11550 - DNA, 20 bp, Artificial Sequence
  MKO10011550_A_Cotl1
  gRNA
acgacggctcggcggtcatc

SEQ ID NO: 11551 - DNA, 20 bp, Artificial Sequence
  MKO10011551_A_Cotl1
  gRNA
ctctgactgagcgtcgtagt

SEQ ID NO: 11552 - DNA, 20 bp, Artificial Sequence
  MKO10011552_A_Cotl1
  gRNA
gcgcggcgtacaacttagtg

SEQ ID NO: 11553 - DNA, 20 bp, Artificial Sequence
  MKO10011553_A_Cox10
  gRNA
tggctccaggccctttcgac

SEQ ID NO: 11554 - DNA, 20 bp, Artificial Sequence
  MKO10011554_A_Cox10
  gRNA
gtcgagggaatggtccacta

SEQ ID NO: 11555 - DNA, 20 bp, Artificial Sequence
  MKO10011555_A_Cox10
  gRNA
aggatgcgaggccggttcca

SEQ ID NO: 11556 - DNA, 20 bp, Artificial Sequence
  MKO10011556_A_Cox11
  gRNA
actcgtcctcctgcgcgcgc

SEQ ID NO: 11557 - DNA, 20 bp, Artificial Sequence
  MKO10011557_A_Cox11
  gRNA
gacatggaagcgcccgtgcg

SEQ ID NO: 11558 - DNA, 20 bp, Artificial Sequence
  MKO10011558_A_Cox11
  gRNA
caggcaccatgttctcgatc

SEQ ID NO: 11559 - DNA, 20 bp, Artificial Sequence
  MKO10011559_A_Cox14
  gRNA
gaaggtcttgtagccgatat

SEQ ID NO: 11560 - DNA, 20 bp, Artificial Sequence
  MKO10011560_A_Cox14
  gRNA
gccaagcagctagccgatat

SEQ ID NO: 11561 - DNA, 20 bp, Artificial Sequence
  MKO10011561_A_Cox14
  gRNA
gcctggcactgcgcagctgg

SEQ ID NO: 11562 - DNA, 20 bp, Artificial Sequence
  MKO10011562_A_Cox15
  gRNA
attccgccagcgtcatgtca

SEQ ID NO: 11563 - DNA, 20 bp, Artificial Sequence
  MKO10011563_A_Cox15
  gRNA
ggacgtgttctcgccctctg

SEQ ID NO: 11564 - DNA, 20 bp, Artificial Sequence
  MKO10011564_A_Cox15
  gRNA
ccgagcgggcggtgggccga

SEQ ID NO: 11565 - DNA, 20 bp, Artificial Sequence
  MKO10011565_A_Cox16
  gRNA
atattcgaggtccgaggcct

SEQ ID NO: 11566 - DNA, 20 bp, Artificial Sequence
  MKO10011566_A_Cox16
  gRNA
acgcagagctcgcaacacag

SEQ ID NO: 11567 - DNA, 20 bp, Artificial Sequence
  MKO10011567_A_Cox16
  gRNA
aagaacaagactctacgcta

SEQ ID NO: 11568 - DNA, 20 bp, Artificial Sequence
  MKO10011568_A_Cox17
  gRNA
gggctagcggccgccagtcc

SEQ ID NO: 11569 - DNA, 20 bp, Artificial Sequence
  MKO10011569_A_Cox17
  gRNA
ccacgcatcacgcgccttct

SEQ ID NO: 11570 - DNA, 20 bp, Artificial Sequence
  MKO10011570_A_Cox17
  gRNA
gtgccctcatgcactccttg

SEQ ID NO: 11571 - DNA, 20 bp, Artificial Sequence
  MKO10011571_A_Cox18
  gRNA
accgaagcggctgcccatac

SEQ ID NO: 11572 - DNA, 20 bp, Artificial Sequence
  MKO10011572_A_Cox18
  gRNA
cgcctatcagcactacatcc

SEQ ID NO: 11573 - DNA, 20 bp, Artificial Sequence
  MKO10011573_A_Cox18
  gRNA
tcaccgcagtggattccacc

SEQ ID NO: 11574 - DNA, 20 bp, Artificial Sequence
  MKO10011574_A_Cox19
  gRNA
gctcggctttagagacctaa

SEQ ID NO: 11575 - DNA, 20 bp, Artificial Sequence
  MKO10011575_A_Cox19
  gRNA
atgtcgaccgcaatgaactt

SEQ ID NO: 11576 - DNA, 20 bp, Artificial Sequence
  MKO10011576_A_Cox19
  gRNA
tttggtcccgaagttcattg

SEQ ID NO: 11577 - DNA, 20 bp, Artificial Sequence
  MKO10011577_A_Cox20
  gRNA
gctcgagaatctatactcta

SEQ ID NO: 11578 - DNA, 20 bp, Artificial Sequence
  MKO10011578_A_Cox20
  gRNA
gccccacgagacggagaaaa

SEQ ID NO: 11579 - DNA, 20 bp, Artificial Sequence
  MKO10011579_A_Cox20
  gRNA
agtatagattctcgagcaca

SEQ ID NO: 11580 - DNA, 20 bp, Artificial Sequence
  MKO10011580_A_Cox4i1
  gRNA
gtcacgccgatcagcgtaag

SEQ ID NO: 11581 - DNA, 20 bp, Artificial Sequence
  MKO10011581_A_Cox4i1
  gRNA
cggcgaagctctcgttaaac

SEQ ID NO: 11582 - DNA, 20 bp, Artificial Sequence
  MKO10011582_A_Cox4i1
  gRNA
tcactgcgctcgttctgatt

SEQ ID NO: 11583 - DNA, 20 bp, Artificial Sequence
  MKO10011583_A_Cox4i2
  gRNA
gcgatggttcatctctgcga

SEQ ID NO: 11584 - DNA, 20 bp, Artificial Sequence
  MKO10011584_A_Cox4i2
  gRNA
gggctttccgttcttccgtc

SEQ ID NO: 11585 - DNA, 20 bp, Artificial Sequence
  MKO10011585_A_Cox4i2
  gRNA
cgtagggggtcatcctcctc

SEQ ID NO: 11586 - DNA, 20 bp, Artificial Sequence
  MKO10011586_A_Cox5a
  gRNA
ccgtcgctgtaccgcagccg

SEQ ID NO: 11587 - DNA, 20 bp, Artificial Sequence
  MKO10011587_A_Cox5a
  gRNA
gaccttaccggcggcggggc

SEQ ID NO: 11588 - DNA, 20 bp, Artificial Sequence
  MKO10011588_A_Cox5a
  gRNA
attacctttacgcaattccc

SEQ ID NO: 11589 - DNA, 20 bp, Artificial Sequence
  MKO10011589_A_Cox5b
  gRNA
aggtggtgtccccactgatg

SEQ ID NO: 11590 - DNA, 20 bp, Artificial Sequence
  MKO10011590_A_Cox5b
  gRNA
tcacgtacctccagaagcca

SEQ ID NO: 11591 - DNA, 20 bp, Artificial Sequence
  MKO10011591_A_Cox5b
  gRNA
tctcgggcgagatggcttca

SEQ ID NO: 11592 - DNA, 20 bp, Artificial Sequence
  MKO10011592_A_Cox6a1
  gRNA
ctaccttggtcctgatgcgc

SEQ ID NO: 11593 - DNA, 20 bp, Artificial Sequence
  MKO10011593_A_Cox6a1
  gRNA
tgagggtaggcaacgaacgg

SEQ ID NO: 11594 - DNA, 20 bp, Artificial Sequence
  MKO10011594_A_Cox6a1
  gRNA
catgtgaacccacttccgac

SEQ ID NO: 11595 - DNA, 20 bp, Artificial Sequence
  MKO10011595_A_Cox6a2
  gRNA
ggcgtaccttggttcggatg

SEQ ID NO: 11596 - DNA, 20 bp, Artificial Sequence
  MKO10011596_A_Cox6a2
  gRNA
cgtgtggttgccgtcccccc

SEQ ID NO: 11597 - DNA, 20 bp, Artificial Sequence
  MKO10011597_A_Cox6a2
  gRNA
ccacctccgcatccgaacca

SEQ ID NO: 11598 - DNA, 20 bp, Artificial Sequence
  MKO10011598_A_Cox6b1
  gRNA
ttcagctatgcggtcatccc

SEQ ID NO: 11599 - DNA, 20 bp, Artificial Sequence
  MKO10011599_A_Cox6b1
  gRNA
agtccctctgtcccgtgtca

SEQ ID NO: 11600 - DNA, 20 bp, Artificial Sequence
  MKO10011600_A_Cox6b1
  gRNA
agagggacttgtacacacgc

SEQ ID NO: 11601 - DNA, 20 bp, Artificial Sequence
  MKO10011601_A_Cox6b2
  gRNA
gtgaagaccatgaatcgccg

SEQ ID NO: 11602 - DNA, 20 bp, Artificial Sequence
  MKO10011602_A_Cox6b2
  gRNA
tacacggaaatagtactcgc

SEQ ID NO: 11603 - DNA, 20 bp, Artificial Sequence
  MKO10011603_A_Cox6b2
  gRNA
ttagggaagcgcggatcaaa

SEQ ID NO: 11604 - DNA, 20 bp, Artificial Sequence
  MKO10011604_A_Cox6c
  gRNA
gggagttgccgctgcctata

SEQ ID NO: 11605 - DNA, 20 bp, Artificial Sequence
  MKO10011605_A_Cox6c
  gRNA
caacagcgcaccggaactca

SEQ ID NO: 11606 - DNA, 20 bp, Artificial Sequence
  MKO10011606_A_Cox6c
  gRNA
cgtggctgagccaagaaaga

SEQ ID NO: 11607 - DNA, 20 bp, Artificial Sequence
  MKO10011607_A_Cox7a1
  gRNA
cccccgcctttcaagtgtac

SEQ ID NO: 11608 - DNA, 20 bp, Artificial Sequence
  MKO10011608_A_Cox7a1
  gRNA
gacctcccagtacacttgaa

SEQ ID NO: 11609 - DNA, 20 bp, Artificial Sequence
  MKO10011609_A_Cox7a1
  gRNA
tgcctactgcttatactgct

SEQ ID NO: 11610 - DNA, 20 bp, Artificial Sequence
  MKO10011610_A_Cox7a2l
  gRNA
taataatggaacctttgtac

SEQ ID NO: 11611 - DNA, 20 bp, Artificial Sequence
  MKO10011611_A_Cox7a2l
  gRNA
aggccatgtagagggcgatc

SEQ ID NO: 11612 - DNA, 20 bp, Artificial Sequence
  MKO10011612_A_Cox7a2l
  gRNA
gatggtttccacctgaaacg

SEQ ID NO: 11613 - DNA, 20 bp, Artificial Sequence
  MKO10011613_A_Cox7a2
  gRNA
gccccgcctttcagatgaac

SEQ ID NO: 11614 - DNA, 20 bp, Artificial Sequence
  MKO10011614_A_Cox7a2
  gRNA
caagatgttgcggaatctgc

SEQ ID NO: 11615 - DNA, 20 bp, Artificial Sequence
  MKO10011615_A_Cox7a2
  gRNA
accaagcgtcagagccattg

SEQ ID NO: 11616 - DNA, 20 bp, Artificial Sequence
  MKO10011616_A_Cox7b2
  gRNA
gagatagtttagtgcatatc

SEQ ID NO: 11617 - DNA, 20 bp, Artificial Sequence
  MKO10011617_A_Cox7b2
  gRNA
taactctgccaataggagac

SEQ ID NO: 11618 - DNA, 20 bp, Artificial Sequence
  MKO10011618_A_Cox7b2
  gRNA
gagtggaacctgtctcctat

SEQ ID NO: 11619 - DNA, 20 bp, Artificial Sequence
  MKO10011619_A_Cox7b
  gRNA
aacgcactaagccgtctcca

SEQ ID NO: 11620 - DNA, 20 bp, Artificial Sequence
  MKO10011620_A_Cox7b
  gRNA
caaggcagagccaccagaag

SEQ ID NO: 11621 - DNA, 20 bp, Artificial Sequence
  MKO10011621_A_Cox7b
  gRNA
ttacagacagccacacaaat

SEQ ID NO: 11622 - DNA, 20 bp, Artificial Sequence
  MKO10011622_A_Cox7c
  gRNA
acatgttgggccagagtatc

SEQ ID NO: 11623 - DNA, 20 bp, Artificial Sequence
  MKO10011623_A_Cox7c
  gRNA
tccccggaccctcctcatag

SEQ ID NO: 11624 - DNA, 20 bp, Artificial Sequence
  MKO10011624_A_Cox7c
  gRNA
gctatgatgaccgtgtactt

SEQ ID NO: 11625 - DNA, 20 bp, Artificial Sequence
  MKO10011625_A_Cox8a
  gRNA
gcctgaccggctcggcccgg

SEQ ID NO: 11626 - DNA, 20 bp, Artificial Sequence
  MKO10011626_A_Cox8a
  gRNA
catgagccgccgggccgagc

SEQ ID NO: 11627 - DNA, 20 bp, Artificial Sequence
  MKO10011627_A_Cox8a
  gRNA
cagaagacaacacacgaagc

SEQ ID NO: 11628 - DNA, 20 bp, Artificial Sequence
  MKO10011628_A_Cox8b
  gRNA
caaaactcccacttccgccg

SEQ ID NO: 11629 - DNA, 20 bp, Artificial Sequence
  MKO10011629_A_Cox8b
  gRNA
ggaaccactgtgaacttcgc

SEQ ID NO: 11630 - DNA, 20 bp, Artificial Sequence
  MKO10011630_A_Cox8b
  gRNA
aggatgggtcttagcccact

SEQ ID NO: 11631 - DNA, 20 bp, Artificial Sequence
  MKO10011631_A_Cox8c
  gRNA
tctacctcaccgtgggcgac

SEQ ID NO: 11632 - DNA, 20 bp, Artificial Sequence
  MKO10011632_A_Cox8c
  gRNA
tcgagaacaggactgcacgg

SEQ ID NO: 11633 - DNA, 20 bp, Artificial Sequence
  MKO10011633_A_Cox8c
  gRNA
ctgcttagcacatatgcagc

SEQ ID NO: 11634 - DNA, 20 bp, Artificial Sequence
  MKO10011634_A_Cpa1
  gRNA
gaagggcactcgaacatcga

SEQ ID NO: 11635 - DNA, 20 bp, Artificial Sequence
  MKO10011635_A_Cpa1
  gRNA
gcagcagatgtccgccttcc

SEQ ID NO: 11636 - DNA, 20 bp, Artificial Sequence
  MKO10011636_A_Cpa1
  gRNA
ctctgccaccgacgaagccc

SEQ ID NO: 11637 - DNA, 20 bp, Artificial Sequence
  MKO10011637_A_Cpa2
  gRNA
tagtgccacgctctctttgc

SEQ ID NO: 11638 - DNA, 20 bp, Artificial Sequence
  MKO10011638_A_Cpa2
  gRNA
ccacgaggttatccatttct

SEQ ID NO: 11639 - DNA, 20 bp, Artificial Sequence
  MKO10011639_A_Cpa2
  gRNA
tcggcccatgaatgtgctca

SEQ ID NO: 11640 - DNA, 20 bp, Artificial Sequence
  MKO10011640_A_Cpa3
  gRNA
ttgtcttgtagctcgacttc

SEQ ID NO: 11641 - DNA, 20 bp, Artificial Sequence
  MKO10011641_A_Cpa3
  gRNA
gatgtgaaagatgaaatcgc

SEQ ID NO: 11642 - DNA, 20 bp, Artificial Sequence
  MKO10011642_A_Cpa3
  gRNA
gaacttgacccaaagcattg

SEQ ID NO: 11643 - DNA, 20 bp, Artificial Sequence
  MKO10011643_A_Cpa4
  gRNA
atccacgggccgatcaaaag

SEQ ID NO: 11644 - DNA, 20 bp, Artificial Sequence
  MKO10011644_A_Cpa4
  gRNA
agactactccgtgacaattg

SEQ ID NO: 11645 - DNA, 20 bp, Artificial Sequence
  MKO10011645_A_Cpa4
  gRNA
tggcaatactgtccatctcg

SEQ ID NO: 11646 - DNA, 20 bp, Artificial Sequence
  MKO10011646_A_Cpa5
  gRNA
ctattcctcttatcacaccc

SEQ ID NO: 11647 - DNA, 20 bp, Artificial Sequence
  MKO10011647_A_Cpa5
  gRNA
agaccaggttcttcgagtcc

SEQ ID NO: 11648 - DNA, 20 bp, Artificial Sequence
  MKO10011648_A_Cpa5
  gRNA
ctcgtccagggtgtgataag

SEQ ID NO: 11649 - DNA, 20 bp, Artificial Sequence
  MKO10011649_A_Cpa6
  gRNA
ctcgttcgagtgttctctat

SEQ ID NO: 11650 - DNA, 20 bp, Artificial Sequence
  MKO10011650_A_Cpa6
  gRNA
actcatccccaaatccgaag

SEQ ID NO: 11651 - DNA, 20 bp, Artificial Sequence
  MKO10011651_A_Cpa6
  gRNA
caatagagaacactcgaacg

SEQ ID NO: 11652 - DNA, 20 bp, Artificial Sequence
  MKO10011652_A_Cpb1
  gRNA
catgttacgtccttcaaatg

SEQ ID NO: 11653 - DNA, 20 bp, Artificial Sequence
  MKO10011653_A_Cpb1
  gRNA
gctacaccaagtacaacaac

SEQ ID NO: 11654 - DNA, 20 bp, Artificial Sequence
  MKO10011654_A_Cpb1
  gRNA
gacagccacacccgtgcaag

SEQ ID NO: 11655 - DNA, 20 bp, Artificial Sequence
  MKO10011655_A_Cpb2
  gRNA
gaatcttactacaacgtatg

SEQ ID NO: 11656 - DNA, 20 bp, Artificial Sequence
  MKO10011656_A_Cpb2
  gRNA
cagcgttctgatgaacaacg

SEQ ID NO: 11657 - DNA, 20 bp, Artificial Sequence
  MKO10011657_A_Cpb2
  gRNA
ggaaactgtaggtcgttctc

SEQ ID NO: 11658 - DNA, 20 bp, Artificial Sequence
  MKO10011658_A_Cpd
  gRNA
tggcgcgcactggtatgacg

SEQ ID NO: 11659 - DNA, 20 bp, Artificial Sequence
  MKO10011659_A_Cpd
  gRNA
aatcttacggcgctttcaac

SEQ ID NO: 11660 - DNA, 20 bp, Artificial Sequence
  MKO10011660_A_Cpd
  gRNA
tttgttaaagattccgtaac

SEQ ID NO: 11661 - DNA, 20 bp, Artificial Sequence
  MKO10011661_A_Cpeb1
  gRNA
gcaatgccaatatctttcga

SEQ ID NO: 11662 - DNA, 20 bp, Artificial Sequence
  MKO10011662_A_Cpeb1
  gRNA
caggcgagatcctctaactg

SEQ ID NO: 11663 - DNA, 20 bp, Artificial Sequence
  MKO10011663_A_Cpeb1
  gRNA
acggggagattcttgcgcag

SEQ ID NO: 11664 - DNA, 20 bp, Artificial Sequence
  MKO10011664_A_Cpeb2
  gRNA
gctataacattacccgagaa

SEQ ID NO: 11665 - DNA, 20 bp, Artificial Sequence
  MKO10011665_A_Cpeb2
  gRNA
cgtctgagctatccacatcc

SEQ ID NO: 11666 - DNA, 20 bp, Artificial Sequence
  MKO10011666_A_Cpeb2
  gRNA
tgcacggcagagatcaccgc

SEQ ID NO: 11667 - DNA, 20 bp, Artificial Sequence
  MKO10011667_A_Cpeb3
  gRNA
gtggtaccttcatcgatgtc

SEQ ID NO: 11668 - DNA, 20 bp, Artificial Sequence
  MKO10011668_A_Cpeb3
  gRNA
tcgtctccgcccatagctcc

SEQ ID NO: 11669 - DNA, 20 bp, Artificial Sequence
  MKO10011669_A_Cpeb3
  gRNA
tgagtttcgctgatataatg

SEQ ID NO: 11670 - DNA, 20 bp, Artificial Sequence
  MKO10011670_A_Cpeb4
  gRNA
tgagtgcatgtcaaacgtcc

SEQ ID NO: 11671 - DNA, 20 bp, Artificial Sequence
  MKO10011671_A_Cpeb4
  gRNA
atactctcgcaaagtgtttg

SEQ ID NO: 11672 - DNA, 20 bp, Artificial Sequence
  MKO10011672_A_Cpeb4
  gRNA
cgtctaaactattcataccc

SEQ ID NO: 11673 - DNA, 20 bp, Artificial Sequence
  MKO10011673_A_Cped1
  gRNA
tagtcgacacatgtgctccc

SEQ ID NO: 11674 - DNA, 20 bp, Artificial Sequence
  MKO10011674_A_Cped1
  gRNA
tggtctaggtccggagctgc

SEQ ID NO: 11675 - DNA, 20 bp, Artificial Sequence
  MKO10011675_A_Cped1
  gRNA
gtcgactaagcctacatcaa

SEQ ID NO: 11676 - DNA, 20 bp, Artificial Sequence
  MKO10011676_A_Cpe
  gRNA
tacggttcagatctattccc

SEQ ID NO: 11677 - DNA, 20 bp, Artificial Sequence
  MKO10011677_A_Cpe
  gRNA
cctttagcccggcgagctga

SEQ ID NO: 11678 - DNA, 20 bp, Artificial Sequence
  MKO10011678_A_Cpe
  gRNA
gtcatcgtcattcttgcgac

SEQ ID NO: 11679 - DNA, 20 bp, Artificial Sequence
  MKO10011679_A_Cphx1
  gRNA
caatcacgctcacttcacac

SEQ ID NO: 11680 - DNA, 20 bp, Artificial Sequence
  MKO10011680_A_Cphx1
  gRNA
agcaaagcaagaaagcgata

SEQ ID NO: 11681 - DNA, 20 bp, Artificial Sequence
  MKO10011681_A_Cphx1
  gRNA
aagcttgtacctgggtatcc

SEQ ID NO: 11682 - DNA, 20 bp, Artificial Sequence
  MKO10011682_A_Cphx2
  gRNA
caatcacgctcacttcacac

SEQ ID NO: 11683 - DNA, 20 bp, Artificial Sequence
  MKO10011683_A_Cphx2
  gRNA
agcaaagcaagaaagcgata

SEQ ID NO: 11684 - DNA, 20 bp, Artificial Sequence
  MKO10011684_A_Cphx2
  gRNA
aagcttgtacctgggtatcc

SEQ ID NO: 11685 - DNA, 20 bp, Artificial Sequence
  MKO10011685_A_Cplx1
  gRNA
gttcgtgatgaaacaagccc

SEQ ID NO: 11686 - DNA, 20 bp, Artificial Sequence
  MKO10011686_A_Cplx1
  gRNA
gcccggtgggatagccttct

SEQ ID NO: 11687 - DNA, 20 bp, Artificial Sequence
  MKO10011687_A_Cplx1
  gRNA
ggaccccgatgctgctaaga

SEQ ID NO: 11688 - DNA, 20 bp, Artificial Sequence
  MKO10011688_A_Cplx2
  gRNA
caaggcgaaacacgcccgca

SEQ ID NO: 11689 - DNA, 20 bp, Artificial Sequence
  MKO10011689_A_Cplx2
  gRNA
tctcgcgctcggcttccatg

SEQ ID NO: 11690 - DNA, 20 bp, Artificial Sequence
  MKO10011690_A_Cplx2
  gRNA
ttcgtcatgaagcaagccct

SEQ ID NO: 11691 - DNA, 20 bp, Artificial Sequence
  MKO10011691_A_Cplx3
  gRNA
cgtatcctcctcgatcatct

SEQ ID NO: 11692 - DNA, 20 bp, Artificial Sequence
  MKO10011692_A_Cplx3
  gRNA
catgagccgagaagagtacg

SEQ ID NO: 11693 - DNA, 20 bp, Artificial Sequence
  MKO10011693_A_Cplx3
  gRNA
gatactcctcgtactcttct

SEQ ID NO: 11694 - DNA, 20 bp, Artificial Sequence
  MKO10011694_A_Cplx4
  gRNA
accagaagatctccgaaaga

SEQ ID NO: 11695 - DNA, 20 bp, Artificial Sequence
  MKO10011695_A_Cplx4
  gRNA
cgtgcctacgagtccacctc

SEQ ID NO: 11696 - DNA, 20 bp, Artificial Sequence
  MKO10011696_A_Cplx4
  gRNA
tgccgcatttacgcagaaaa

SEQ ID NO: 11697 - DNA, 20 bp, Artificial Sequence
  MKO10011697_A_Cpm
  gRNA
gctccacctgatcgactatc

SEQ ID NO: 11698 - DNA, 20 bp, Artificial Sequence
  MKO10011698_A_Cpm
  gRNA
gttgtcccgaagcttaaccc

SEQ ID NO: 11699 - DNA, 20 bp, Artificial Sequence
  MKO10011699_A_Cpm
  gRNA
ctggacggcttcgaatccat

SEQ ID NO: 11700 - DNA, 20 bp, Artificial Sequence
  MKO10011700_A_Cpn1
  gRNA
ggatacgctggtttcggttc

SEQ ID NO: 11701 - DNA, 20 bp, Artificial Sequence
  MKO10011701_A_Cpn1
  gRNA
atgggcgtaggagtagacct

SEQ ID NO: 11702 - DNA, 20 bp, Artificial Sequence
  MKO10011702_A_Cpn1
  gRNA
gcagccacctcgtagccgtc

SEQ ID NO: 11703 - DNA, 20 bp, Artificial Sequence
  MKO10011703_A_Cpn2
  gRNA
taacttgacggccctgcacc

SEQ ID NO: 11704 - DNA, 20 bp, Artificial Sequence
  MKO10011704_A_Cpn2
  gRNA
cgcatacctcaagggccagt

SEQ ID NO: 11705 - DNA, 20 bp, Artificial Sequence
  MKO10011705_A_Cpn2
  gRNA
tatgcttgccagactccccg

SEQ ID NO: 11706 - DNA, 20 bp, Artificial Sequence
  MKO10011706_A_Cpne1
  gRNA
gtgatggttccccgccctgc

SEQ ID NO: 11707 - DNA, 20 bp, Artificial Sequence
  MKO10011707_A_Cpne1
  gRNA
gccacttcccatcgccttgc

SEQ ID NO: 11708 - DNA, 20 bp, Artificial Sequence
  MKO10011708_A_Cpne1
  gRNA
agttgcgaacacgttcagtc

SEQ ID NO: 11709 - DNA, 20 bp, Artificial Sequence
  MKO10011709_A_Cpne2
  gRNA
caagttcgccctgtttgacc

SEQ ID NO: 11710 - DNA, 20 bp, Artificial Sequence
  MKO10011710_A_Cpne2
  gRNA
gtgattacgcccttccccgc

SEQ ID NO: 11711 - DNA, 20 bp, Artificial Sequence
  MKO10011711_A_Cpne2
  gRNA
tggacttgtcctggtcaaac

SEQ ID NO: 11712 - DNA, 20 bp, Artificial Sequence
  MKO10011712_A_Cpne3
  gRNA
taagaagctaactcgaccac

SEQ ID NO: 11713 - DNA, 20 bp, Artificial Sequence
  MKO10011713_A_Cpne3
  gRNA
gctgatggttcaccgaacag

SEQ ID NO: 11714 - DNA, 20 bp, Artificial Sequence
  MKO10011714_A_Cpne3
  gRNA
tataggttgaacggacagaa

SEQ ID NO: 11715 - DNA, 20 bp, Artificial Sequence
  MKO10011715_A_Cpne4
  gRNA
acagcttgtgcatcgaacag

SEQ ID NO: 11716 - DNA, 20 bp, Artificial Sequence
  MKO10011716_A_Cpne4
  gRNA
ttgagcttgcattcaatgca

SEQ ID NO: 11717 - DNA, 20 bp, Artificial Sequence
  MKO10011717_A_Cpne4
  gRNA
ttgaagaggtccaacgtctc

SEQ ID NO: 11718 - DNA, 20 bp, Artificial Sequence
  MKO10011718_A_Cpne5
  gRNA
ctcgcagttcggacgcaccg

SEQ ID NO: 11719 - DNA, 20 bp, Artificial Sequence
  MKO10011719_A_Cpne5
  gRNA
cttcgtgcgcaagttcattg

SEQ ID NO: 11720 - DNA, 20 bp, Artificial Sequence
  MKO10011720_A_Cpne5
  gRNA
ggacttacgtgggtcagact

SEQ ID NO: 11721 - DNA, 20 bp, Artificial Sequence
  MKO10011721_A_Cpne6
  gRNA
gttccacgtgttcgatgccg

SEQ ID NO: 11722 - DNA, 20 bp, Artificial Sequence
  MKO10011722_A_Cpne6
  gRNA
ggtaagttgcacatagtcgt

SEQ ID NO: 11723 - DNA, 20 bp, Artificial Sequence
  MKO10011723_A_Cpne6
  gRNA
gcggctttgtgagcgtgtct

SEQ ID NO: 11724 - DNA, 20 bp, Artificial Sequence
  MKO10011724_A_Cpne7
  gRNA
cattgctgttgcgattcggc

SEQ ID NO: 11725 - DNA, 20 bp, Artificial Sequence
  MKO10011725_A_Cpne7
  gRNA
cactgtcgactactacttcg

SEQ ID NO: 11726 - DNA, 20 bp, Artificial Sequence
  MKO10011726_A_Cpne7
  gRNA
ctgccgaatcgcaacagcaa

SEQ ID NO: 11727 - DNA, 20 bp, Artificial Sequence
  MKO10011727_A_Cpne8
  gRNA
cggctgtccatctcgagctg

SEQ ID NO: 11728 - DNA, 20 bp, Artificial Sequence
  MKO10011728_A_Cpne8
  gRNA
ctccgttcctcagctcgaga

SEQ ID NO: 11729 - DNA, 20 bp, Artificial Sequence
  MKO10011729_A_Cpne8
  gRNA
ctgttctcccaacgatgtaa

SEQ ID NO: 11730 - DNA, 20 bp, Artificial Sequence
  MKO10011730_A_Cpne9
  gRNA
tgcccagttcggacgaaccg

SEQ ID NO: 11731 - DNA, 20 bp, Artificial Sequence
  MKO10011731_A_Cpne9
  gRNA
aggagcctcacacatcgaag

SEQ ID NO: 11732 - DNA, 20 bp, Artificial Sequence
  MKO10011732_A_Cpne9
  gRNA
ctgcttactggggtccgact

SEQ ID NO: 11733 - DNA, 20 bp, Artificial Sequence
  MKO10011733_A_Cpox
  gRNA
gcgatgactcctacaccccc

SEQ ID NO: 11734 - DNA, 20 bp, Artificial Sequence
  MKO10011734_A_Cpox
  gRNA
cagcacacgtcttcacgaag

SEQ ID NO: 11735 - DNA, 20 bp, Artificial Sequence
  MKO10011735_A_Cpox
  gRNA
gtgagcatttccgtcgttca

SEQ ID NO: 11736 - DNA, 20 bp, Artificial Sequence
  MKO10011736_A_Cpped1
  gRNA
agtactgaaagccgtcgacc

SEQ ID NO: 11737 - DNA, 20 bp, Artificial Sequence
  MKO10011737_A_Cpped1
  gRNA
gtcgctcgccatgtccgcta

SEQ ID NO: 11738 - DNA, 20 bp, Artificial Sequence
  MKO10011738_A_Cpped1
  gRNA
ggtccattctacttcgtcca

SEQ ID NO: 11739 - DNA, 20 bp, Artificial Sequence
  MKO10011739_A_Cpq
  gRNA
gtttataaccagccttacac

SEQ ID NO: 11740 - DNA, 20 bp, Artificial Sequence
  MKO10011740_A_Cpq
  gRNA
tgcagaaatgatgtctcgaa

SEQ ID NO: 11741 - DNA, 20 bp, Artificial Sequence
  MKO10011741_A_Cpq
  gRNA
tcccagggctgcgtccaaag

SEQ ID NO: 11742 - DNA, 20 bp, Artificial Sequence
  MKO10011742_A_Cps1
  gRNA
acttactgatcccgcctaca

SEQ ID NO: 11743 - DNA, 20 bp, Artificial Sequence
  MKO10011743_A_Cps1
  gRNA
gtatccactccataaattgc

SEQ ID NO: 11744 - DNA, 20 bp, Artificial Sequence
  MKO10011744_A_Cps1
  gRNA
caccactgcccgagacgaac

SEQ ID NO: 11745 - DNA, 20 bp, Artificial Sequence
  MKO10011745_A_Cpsf1
  gRNA
acgtgcatacgcctcgtgtg

SEQ ID NO: 11746 - DNA, 20 bp, Artificial Sequence
  MKO10011746_A_Cpsf1
  gRNA
attgctgcacagcgcccgtc

SEQ ID NO: 11747 - DNA, 20 bp, Artificial Sequence
  MKO10011747_A_Cpsf1
  gRNA
tgctggcttacccgaagttc

SEQ ID NO: 11748 - DNA, 20 bp, Artificial Sequence
  MKO10011748_A_Cpsf2
  gRNA
ctacttacgtgcagcctaga

SEQ ID NO: 11749 - DNA, 20 bp, Artificial Sequence
  MKO10011749_A_Cpsf2
  gRNA
cccattcgccgtggggaagc

SEQ ID NO: 11750 - DNA, 20 bp, Artificial Sequence
  MKO10011750_A_Cpsf2
  gRNA
gttcatgtacgacctctatc

SEQ ID NO: 11751 - DNA, 20 bp, Artificial Sequence
  MKO10011751_A_Cpsf3l
  gRNA
agactaccgcaagattgcag

SEQ ID NO: 11752 - DNA, 20 bp, Artificial Sequence
  MKO10011752_A_Cpsf3l
  gRNA
atactatgcaggccacgtgc

SEQ ID NO: 11753 - DNA, 20 bp, Artificial Sequence
  MKO10011753_A_Cpsf3l
  gRNA
tgtaggccgaagctgcatct

SEQ ID NO: 11754 - DNA, 20 bp, Artificial Sequence
  MKO10011754_A_Cpsf3
  gRNA
ttaccatgccggccacgtcc

SEQ ID NO: 11755 - DNA, 20 bp, Artificial Sequence
  MKO10011755_A_Cpsf3
  gRNA
cgatctcagctgggtcgata

SEQ ID NO: 11756 - DNA, 20 bp, Artificial Sequence
  MKO10011756_A_Cpsf3
  gRNA
atgtttatgatagagatcgc

SEQ ID NO: 11757 - DNA, 20 bp, Artificial Sequence
  MKO10011757_A_Cpsf4l
  gRNA
gcatcttgctgacgtcatac

SEQ ID NO: 11758 - DNA, 20 bp, Artificial Sequence
  MKO10011758_A_Cpsf4l
  gRNA
actgcccgtggtataaccaa

SEQ ID NO: 11759 - DNA, 20 bp, Artificial Sequence
  MKO10011759_A_Cpsf4l
  gRNA
ccttcacctacctaaggtgc

SEQ ID NO: 11760 - DNA, 20 bp, Artificial Sequence
  MKO10011760_A_Cpsf4
  gRNA
cccatgggcagttcaaatcg

SEQ ID NO: 11761 - DNA, 20 bp, Artificial Sequence
  MKO10011761_A_Cpsf4
  gRNA
tgtccattccgccacatcag

SEQ ID NO: 11762 - DNA, 20 bp, Artificial Sequence
  MKO10011762_A_Cpsf4
  gRNA
ccctcgatttgaactgccca

SEQ ID NO: 11763 - DNA, 20 bp, Artificial Sequence
  MKO10011763_A_Cpsf6
  gRNA
tccatgtagtcgcgatcttc

SEQ ID NO: 11764 - DNA, 20 bp, Artificial Sequence
  MKO10011764_A_Cpsf6
  gRNA
gtgtaagtgtacacaacgtt

SEQ ID NO: 11765 - DNA, 20 bp, Artificial Sequence
  MKO10011765_A_Cpsf6
  gRNA
gctgcgcgtgaaccgcctcc

SEQ ID NO: 11766 - DNA, 20 bp, Artificial Sequence
  MKO10011766_A_Cpsf7
  gRNA
cagctgctcgccgactccgc

SEQ ID NO: 11767 - DNA, 20 bp, Artificial Sequence
  MKO10011767_A_Cpsf7
  gRNA
gagtgcgtccgagtcccaag

SEQ ID NO: 11768 - DNA, 20 bp, Artificial Sequence
  MKO10011768_A_Cpsf7
  gRNA
cggcgagcagctgtctatgt

SEQ ID NO: 11769 - DNA, 20 bp, Artificial Sequence
  MKO10011769_A_Cpt1a
  gRNA
gactatgcgctactcgctga

SEQ ID NO: 11770 - DNA, 20 bp, Artificial Sequence
  MKO10011770_A_Cpt1a
  gRNA
cactcacgatgttcttcgtc

SEQ ID NO: 11771 - DNA, 20 bp, Artificial Sequence
  MKO10011771_A_Cpt1a
  gRNA
gggttactcacgtggtgtct

SEQ ID NO: 11772 - DNA, 20 bp, Artificial Sequence
  MKO10011772_A_Cpt1b
  gRNA
tgatgaagcatattaccgca

SEQ ID NO: 11773 - DNA, 20 bp, Artificial Sequence
  MKO10011773_A_Cpt1b
  gRNA
gcatctcgaacatccacccg

SEQ ID NO: 11774 - DNA, 20 bp, Artificial Sequence
  MKO10011774_A_Cpt1b
  gRNA
tcatcttctccaccggagtc

SEQ ID NO: 11775 - DNA, 20 bp, Artificial Sequence
  MKO10011775_A_Cpt1c
  gRNA
tttcgaccgcgctacagcgc

SEQ ID NO: 11776 - DNA, 20 bp, Artificial Sequence
  MKO10011776_A_Cpt1c
  gRNA
aaagcgtcgtctccgagcac

SEQ ID NO: 11777 - DNA, 20 bp, Artificial Sequence
  MKO10011777_A_Cpt1c
  gRNA
gcgcacggtctcctgcgccg

SEQ ID NO: 11778 - DNA, 20 bp, Artificial Sequence
  MKO10011778_A_Cpt2
  gRNA
tccggattgaatgccatgaa

SEQ ID NO: 11779 - DNA, 20 bp, Artificial Sequence
  MKO10011779_A_Cpt2
  gRNA
cgtgccgtcaccgtgcagca

SEQ ID NO: 11780 - DNA, 20 bp, Artificial Sequence
  MKO10011780_A_Cpt2
  gRNA
gacatgttcgatgccctcga

SEQ ID NO: 11781 - DNA, 20 bp, Artificial Sequence
  MKO10011781_A_Cpvl
  gRNA
ctggttcaccgtgatgtagc

SEQ ID NO: 11782 - DNA, 20 bp, Artificial Sequence
  MKO10011782_A_Cpvl
  gRNA
cctcgctggtggcgtatccc

SEQ ID NO: 11783 - DNA, 20 bp, Artificial Sequence
  MKO10011783_A_Cpvl
  gRNA
cagcttcaccgatcatttcc

SEQ ID NO: 11784 - DNA, 20 bp, Artificial Sequence
  MKO10011784_A_Cpxcr1
  gRNA
ggaaactaatctatccggca

SEQ ID NO: 11785 - DNA, 20 bp, Artificial Sequence
  MKO10011785_A_Cpxcr1
  gRNA
ttactactaatgagataagt

SEQ ID NO: 11786 - DNA, 20 bp, Artificial Sequence
  MKO10011786_A_Cpxcr1
  gRNA
gactcgccacctaagaaaac

SEQ ID NO: 11787 - DNA, 20 bp, Artificial Sequence
  MKO10011787_A_Cpxm1
  gRNA
cgcaccaagcgccatcatac

SEQ ID NO: 11788 - DNA, 20 bp, Artificial Sequence
  MKO10011788_A_Cpxm1
  gRNA
aagaatcccgtccgcttcgc

SEQ ID NO: 11789 - DNA, 20 bp, Artificial Sequence
  MKO10011789_A_Cpxm1
  gRNA
accccaggatgtccccctct

SEQ ID NO: 11790 - DNA, 20 bp, Artificial Sequence
  MKO10011790_A_Cpxm2
  gRNA
gtaggaacgacttgcatcag

SEQ ID NO: 11791 - DNA, 20 bp, Artificial Sequence
  MKO10011791_A_Cpxm2
  gRNA
gcctccacatcgaagcgtta

SEQ ID NO: 11792 - DNA, 20 bp, Artificial Sequence
  MKO10011792_A_Cpxm2
  gRNA
caggccataacgcttcgatg

SEQ ID NO: 11793 - DNA, 20 bp, Artificial Sequence
  MKO10011793_A_Cpz
  gRNA
ggcctttgacgccatcgaca

SEQ ID NO: 11794 - DNA, 20 bp, Artificial Sequence
  MKO10011794_A_Cpz
  gRNA
gcggtgtggggaacgatgta

SEQ ID NO: 11795 - DNA, 20 bp, Artificial Sequence
  MKO10011795_A_Cpz
  gRNA
tcgagaactcgatgaccacc

SEQ ID NO: 11796 - DNA, 20 bp, Artificial Sequence
  MKO10011796_A_Cp
  gRNA
atcagcccgttgaaaatcag

SEQ ID NO: 11797 - DNA, 20 bp, Artificial Sequence
  MKO10011797_A_Cp
  gRNA
agtcctgatgcaatatcttt

SEQ ID NO: 11798 - DNA, 20 bp, Artificial Sequence
  MKO10011798_A_Cp
  gRNA
gcacttaccctcatactcct

SEQ ID NO: 11799 - DNA, 20 bp, Artificial Sequence
  MKO10011799_A_Cr1l
  gRNA
gtgtgtagataccgcctcat

SEQ ID NO: 11800 - DNA, 20 bp, Artificial Sequence
  MKO10011800_A_Cr1l
  gRNA
gacttacccttgaagcagct

SEQ ID NO: 11801 - DNA, 20 bp, Artificial Sequence
  MKO10011801_A_Cr1l
  gRNA
ataaggagggctcacccacc

SEQ ID NO: 11802 - DNA, 20 bp, Artificial Sequence
  MKO10011802_A_Cr2
  gRNA
cctttattcatgaatccccc

SEQ ID NO: 11803 - DNA, 20 bp, Artificial Sequence
  MKO10011803_A_Cr2
  gRNA
tggtgtccattatgaatcgt

SEQ ID NO: 11804 - DNA, 20 bp, Artificial Sequence
  MKO10011804_A_Cr2
  gRNA
cagacaaccccgcaacaaac

SEQ ID NO: 11805 - DNA, 20 bp, Artificial Sequence
  MKO10011805_A_Crabp1
  gRNA
cggcttagacgcagccgcca

SEQ ID NO: 11806 - DNA, 20 bp, Artificial Sequence
  MKO10011806_A_Crabp1
  gRNA
tgtagaactgatccccgtct

SEQ ID NO: 11807 - DNA, 20 bp, Artificial Sequence
  MKO10011807_A_Crabp1
  gRNA
ggccaacgatgagctaatcc

SEQ ID NO: 11808 - DNA, 20 bp, Artificial Sequence
  MKO10011808_A_Crabp2
  gRNA
tcactctcggacgtagaccc

SEQ ID NO: 11809 - DNA, 20 bp, Artificial Sequence
  MKO10011809_A_Crabp2
  gRNA
caactggaagatcatccgat

SEQ ID NO: 11810 - DNA, 20 bp, Artificial Sequence
  MKO10011810_A_Crabp2
  gRNA
gattaacttcaagatcgggg

SEQ ID NO: 11811 - DNA, 20 bp, Artificial Sequence
  MKO10011811_A_Cradd
  gRNA
gaccgacatctaccgctgca

SEQ ID NO: 11812 - DNA, 20 bp, Artificial Sequence
  MKO10011812_A_Cradd
  gRNA
tccccacaacgtgcattcgc

SEQ ID NO: 11813 - DNA, 20 bp, Artificial Sequence
  MKO10011813_A_Cradd
  gRNA
ccggaagacaatgctgttgc

SEQ ID NO: 11814 - DNA, 20 bp, Artificial Sequence
  MKO10011814_A_Cramp1l
  gRNA
ggcgagctacgcaagaagat

SEQ ID NO: 11815 - DNA, 20 bp, Artificial Sequence
  MKO10011815_A_Cramp1l
  gRNA
aggtgcggtagtaaaaatgc

SEQ ID NO: 11816 - DNA, 20 bp, Artificial Sequence
  MKO10011816_A_Cramp1l
  gRNA
ctcatacagtccctcgaaga

SEQ ID NO: 11817 - DNA, 20 bp, Artificial Sequence
  MKO10011817_A_Crat
  gRNA
cgtaggggaacgcctacaga

SEQ ID NO: 11818 - DNA, 20 bp, Artificial Sequence
  MKO10011818_A_Crat
  gRNA
accacccacgcatataaccg

SEQ ID NO: 11819 - DNA, 20 bp, Artificial Sequence
  MKO10011819_A_Crat
  gRNA
gacgctgccagttgagttcc

SEQ ID NO: 11820 - DNA, 20 bp, Artificial Sequence
  MKO10011820_A_Crb1
  gRNA
cgtcctgacatgtggcaccg

SEQ ID NO: 11821 - DNA, 20 bp, Artificial Sequence
  MKO10011821_A_Crb1
  gRNA
catgtcgcgtcgttgtgaca

SEQ ID NO: 11822 - DNA, 20 bp, Artificial Sequence
  MKO10011822_A_Crb1
  gRNA
gccacttgtgtgaaaatccc

SEQ ID NO: 11823 - DNA, 20 bp, Artificial Sequence
  MKO10011823_A_Crb2
  gRNA
caggacgcgttgtgcgcgca

SEQ ID NO: 11824 - DNA, 20 bp, Artificial Sequence
  MKO10011824_A_Crb2
  gRNA
cagagccagccgtgcgcgca

SEQ ID NO: 11825 - DNA, 20 bp, Artificial Sequence
  MKO10011825_A_Crb2
  gRNA
cagtttccggtgcgactgcg

SEQ ID NO: 11826 - DNA, 20 bp, Artificial Sequence
  MKO10011826_A_Crb3
  gRNA
tgatgagtccaacgggggcc

SEQ ID NO: 11827 - DNA, 20 bp, Artificial Sequence
  MKO10011827_A_Crb3
  gRNA
cctaaactcatggcgacccc

SEQ ID NO: 11828 - DNA, 20 bp, Artificial Sequence
  MKO10011828_A_Crb3
  gRNA
ttctgctcatgcgaaaactt

SEQ ID NO: 11829 - DNA, 20 bp, Artificial Sequence
  MKO10011829_A_Crbn
  gRNA
ctgactgtgttcgaagttcg

SEQ ID NO: 11830 - DNA, 20 bp, Artificial Sequence
  MKO10011830_A_Crbn
  gRNA
cgtcatgcaaagttctcccg

SEQ ID NO: 11831 - DNA, 20 bp, Artificial Sequence
  MKO10011831_A_Crbn
  gRNA
gcaggacgctgcgcacaaca

SEQ ID NO: 11832 - DNA, 20 bp, Artificial Sequence
  MKO10011832_A_Crcp
  gRNA
ctttgagatccgttagtaac

SEQ ID NO: 11833 - DNA, 20 bp, Artificial Sequence
  MKO10011833_A_Crcp
  gRNA
tggatctccaccgcagtcat

SEQ ID NO: 11834 - DNA, 20 bp, Artificial Sequence
  MKO10011834_A_Crcp
  gRNA
agcactgctcagcaactatg

SEQ ID NO: 11835 - DNA, 20 bp, Artificial Sequence
  MKO10011835_A_Crct1
  gRNA
agacgccgccgacagcgctc

SEQ ID NO: 11836 - DNA, 20 bp, Artificial Sequence
  MKO10011836_A_Crct1
  gRNA
cgcagccgccagagcgctgt

SEQ ID NO: 11837 - DNA, 20 bp, Artificial Sequence
  MKO10011837_A_Crct1
  gRNA
aaacgccgagatgtctcaac

SEQ ID NO: 11838 - DNA, 20 bp, Artificial Sequence
  MKO10011838_A_Creb1
  gRNA
tgtactgcccactgctagtt

SEQ ID NO: 11839 - DNA, 20 bp, Artificial Sequence
  MKO10011839_A_Creb1
  gRNA
cccatttaccaaactagcag

SEQ ID NO: 11840 - DNA, 20 bp, Artificial Sequence
  MKO10011840_A_Creb1
  gRNA
tactgtagaatggtagtacc

SEQ ID NO: 11841 - DNA, 20 bp, Artificial Sequence
  MKO10011841_A_Creb3l1
  gRNA
gagcgggccatgggccggac

SEQ ID NO: 11842 - DNA, 20 bp, Artificial Sequence
  MKO10011842_A_Creb3l1
  gRNA
gtgttggaggcatctgtacg

SEQ ID NO: 11843 - DNA, 20 bp, Artificial Sequence
  MKO10011843_A_Creb3l1
  gRNA
ccagcacttcccggagcacc

SEQ ID NO: 11844 - DNA, 20 bp, Artificial Sequence
  MKO10011844_A_Creb3l2
  gRNA
gcttattcctaagattaagc

SEQ ID NO: 11845 - DNA, 20 bp, Artificial Sequence
  MKO10011845_A_Creb3l2
  gRNA
gatgagctcaccttctttcg

SEQ ID NO: 11846 - DNA, 20 bp, Artificial Sequence
  MKO10011846_A_Creb3l2
  gRNA
accgtcattgaagctgtcgc

SEQ ID NO: 11847 - DNA, 20 bp, Artificial Sequence
  MKO10011847_A_Creb3l3
  gRNA
tgccgtcctgccgatcaaac

SEQ ID NO: 11848 - DNA, 20 bp, Artificial Sequence
  MKO10011848_A_Creb3l3
  gRNA
cggccagctccacgtttctc

SEQ ID NO: 11849 - DNA, 20 bp, Artificial Sequence
  MKO10011849_A_Creb3l3
  gRNA
gtgacacctggctaccgtgt

SEQ ID NO: 11850 - DNA, 20 bp, Artificial Sequence
  MKO10011850_A_Creb3l4
  gRNA
agtattctttcttccgccgc

SEQ ID NO: 11851 - DNA, 20 bp, Artificial Sequence
  MKO10011851_A_Creb3l4
  gRNA
caggatatgtctatgcgaat

SEQ ID NO: 11852 - DNA, 20 bp, Artificial Sequence
  MKO10011852_A_Creb3l4
  gRNA
ctgaatagagatgagtccga

SEQ ID NO: 11853 - DNA, 20 bp, Artificial Sequence
  MKO10011853_A_Creb3
  gRNA
gagaacatcccgcgatactg

SEQ ID NO: 11854 - DNA, 20 bp, Artificial Sequence
  MKO10011854_A_Creb3
  gRNA
tgctcagtccctcagtatcg

SEQ ID NO: 11855 - DNA, 20 bp, Artificial Sequence
  MKO10011855_A_Creb3
  gRNA
aggagccttaccttagtgag

SEQ ID NO: 11856 - DNA, 20 bp, Artificial Sequence
  MKO10011856_A_Creb5
  gRNA
catcctgccgccatgtcgaa

SEQ ID NO: 11857 - DNA, 20 bp, Artificial Sequence
  MKO10011857_A_Creb5
  gRNA
atacaaccgccccagcccac

SEQ ID NO: 11858 - DNA, 20 bp, Artificial Sequence
  MKO10011858_A_Creb5
  gRNA
cctcatccaccactcttcgc

SEQ ID NO: 11859 - DNA, 20 bp, Artificial Sequence
  MKO10011859_A_Crebbp
  gRNA
taactgggggttcactccag

SEQ ID NO: 11860 - DNA, 20 bp, Artificial Sequence
  MKO10011860_A_Crebbp
  gRNA
ggacaaccctttagtcaaac

SEQ ID NO: 11861 - DNA, 20 bp, Artificial Sequence
  MKO10011861_A_Crebbp
  gRNA
ttgttggtttcgcttgtcac

SEQ ID NO: 11862 - DNA, 20 bp, Artificial Sequence
  MKO10011862_A_Crebl2
  gRNA
agctatatgtgcactccgag

SEQ ID NO: 11863 - DNA, 20 bp, Artificial Sequence
  MKO10011863_A_Crebl2
  gRNA
ggcttccgtcctcgcttacc

SEQ ID NO: 11864 - DNA, 20 bp, Artificial Sequence
  MKO10011864_A_Crebl2
  gRNA
tctgctcctcgccagtgagt

SEQ ID NO: 11865 - DNA, 20 bp, Artificial Sequence
  MKO10011865_A_Crebrf
  gRNA
cgggtccattccgcttacgc

SEQ ID NO: 11866 - DNA, 20 bp, Artificial Sequence
  MKO10011866_A_Crebrf
  gRNA
ttgttgtagcccagcgtaag

SEQ ID NO: 11867 - DNA, 20 bp, Artificial Sequence
  MKO10011867_A_Crebrf
  gRNA
ccaggactatcctgcgtcag

SEQ ID NO: 11868 - DNA, 20 bp, Artificial Sequence
  MKO10011868_A_Crebzf
  gRNA
cagggcgtagtcgtggtcgc

SEQ ID NO: 11869 - DNA, 20 bp, Artificial Sequence
  MKO10011869_A_Crebzf
  gRNA
cggccgctgcccgtcttaat

SEQ ID NO: 11870 - DNA, 20 bp, Artificial Sequence
  MKO10011870_A_Crebzf
  gRNA
cccctgtcctcgtccggcgg

SEQ ID NO: 11871 - DNA, 20 bp, Artificial Sequence
  MKO10011871_A_Creg1
  gRNA
ctcaatcagtgacggtcctc

SEQ ID NO: 11872 - DNA, 20 bp, Artificial Sequence
  MKO10011872_A_Creg1
  gRNA
ccgctgccaccccgcgaaga

SEQ ID NO: 11873 - DNA, 20 bp, Artificial Sequence
  MKO10011873_A_Creg1
  gRNA
gacatagtcagcgtagcctc

SEQ ID NO: 11874 - DNA, 20 bp, Artificial Sequence
  MKO10011874_A_Creg2
  gRNA
tgagcgttaaccgggcacat

SEQ ID NO: 11875 - DNA, 20 bp, Artificial Sequence
  MKO10011875_A_Creg2
  gRNA
agtggccccgacagtatgaa

SEQ ID NO: 11876 - DNA, 20 bp, Artificial Sequence
  MKO10011876_A_Creg2
  gRNA
cgtgtcctccttgtgcgccg

SEQ ID NO: 11877 - DNA, 20 bp, Artificial Sequence
  MKO10011877_A_Creld1
  gRNA
acaggcctcgcccccatagc

SEQ ID NO: 11878 - DNA, 20 bp, Artificial Sequence
  MKO10011878_A_Creld1
  gRNA
tgtactcagtgagacccgcc

SEQ ID NO: 11879 - DNA, 20 bp, Artificial Sequence
  MKO10011879_A_Creld1
  gRNA
gctccgcctcaaagtagcca

SEQ ID NO: 11880 - DNA, 20 bp, Artificial Sequence
  MKO10011880_A_Creld2
  gRNA
gaatttcggtggcggcaaca

SEQ ID NO: 11881 - DNA, 20 bp, Artificial Sequence
  MKO10011881_A_Creld2
  gRNA
cgctgtctaagtacgaattc

SEQ ID NO: 11882 - DNA, 20 bp, Artificial Sequence
  MKO10011882_A_Creld2
  gRNA
caatagccgtttccgctgca

SEQ ID NO: 11883 - DNA, 20 bp, Artificial Sequence
  MKO10011883_A_Crem
  gRNA
tcgaagtgtaacacgttctg

SEQ ID NO: 11884 - DNA, 20 bp, Artificial Sequence
  MKO10011884_A_Crem
  gRNA
ctagtctgatatatgctagt

SEQ ID NO: 11885 - DNA, 20 bp, Artificial Sequence
  MKO10011885_A_Crem
  gRNA
tttcacgaagaccctcatat

SEQ ID NO: 11886 - DNA, 20 bp, Artificial Sequence
  MKO10011886_A_Crhbp
  gRNA
caggagagggtcgtagaccg

SEQ ID NO: 11887 - DNA, 20 bp, Artificial Sequence
  MKO10011887_A_Crhbp
  gRNA
ctcgggttcgccgatgaaga

SEQ ID NO: 11888 - DNA, 20 bp, Artificial Sequence
  MKO10011888_A_Crhbp
  gRNA
cagaggagcagccgtaccga

SEQ ID NO: 11889 - DNA, 20 bp, Artificial Sequence
  MKO10011889_A_Crhr1
  gRNA
tgccgtcatcatcaactacc

SEQ ID NO: 11890 - DNA, 20 bp, Artificial Sequence
  MKO10011890_A_Crhr1
  gRNA
cgaaccaccaactgccctgc

SEQ ID NO: 11891 - DNA, 20 bp, Artificial Sequence
  MKO10011891_A_Crhr1
  gRNA
cctgcagtgcaatgcctccg

SEQ ID NO: 11892 - DNA, 20 bp, Artificial Sequence
  MKO10011892_A_Crhr2
  gRNA
cgccctcattgtcaactacc

SEQ ID NO: 11893 - DNA, 20 bp, Artificial Sequence
  MKO10011893_A_Crhr2
  gRNA
ccgtgccccgagtacttcaa

SEQ ID NO: 11894 - DNA, 20 bp, Artificial Sequence
  MKO10011894_A_Crhr2
  gRNA
gtgtgagtagttgacccttg

SEQ ID NO: 11895 - DNA, 20 bp, Artificial Sequence
  MKO10011895_A_Crh
  gRNA
gcgcccctaacatgcggctg

SEQ ID NO: 11896 - DNA, 20 bp, Artificial Sequence
  MKO10011896_A_Crh
  gRNA
agccgcagcctggtcgtgcg

SEQ ID NO: 11897 - DNA, 20 bp, Artificial Sequence
  MKO10011897_A_Crh
  gRNA
gcgctcgctcgacagccgcg

SEQ ID NO: 11898 - DNA, 20 bp, Artificial Sequence
  MKO10011898_A_Crim1
  gRNA
cccattgattatgttgcagc

SEQ ID NO: 11899 - DNA, 20 bp, Artificial Sequence
  MKO10011899_A_Crim1
  gRNA
actccccgaatagtctctcg

SEQ ID NO: 11900 - DNA, 20 bp, Artificial Sequence
  MKO10011900_A_Crim1
  gRNA
gccgaaccaaccttgctggc

SEQ ID NO: 11901 - DNA, 20 bp, Artificial Sequence
  MKO10011901_A_Crip1
  gRNA
gaagtgccccaagtgcgaca

SEQ ID NO: 11902 - DNA, 20 bp, Artificial Sequence
  MKO10011902_A_Crip1
  gRNA
atacacctccttgtcgcact

SEQ ID NO: 11903 - DNA, 20 bp, Artificial Sequence
  MKO10011903_A_Crip1
  gRNA
ccctgctactccgccatgtt

SEQ ID NO: 11904 - DNA, 20 bp, Artificial Sequence
  MKO10011904_A_Crip2
  gRNA
ccctgctatgccacgctgtt

SEQ ID NO: 11905 - DNA, 20 bp, Artificial Sequence
  MKO10011905_A_Crip2
  gRNA
tcatctacaggcgtgaacat

SEQ ID NO: 11906 - DNA, 20 bp, Artificial Sequence
  MKO10011906_A_Crip2
  gRNA
ctacgagaagcctcagaccg

SEQ ID NO: 11907 - DNA, 20 bp, Artificial Sequence
  MKO10011907_A_Crip3
  gRNA
ccagcaactttagccccccc

SEQ ID NO: 11908 - DNA, 20 bp, Artificial Sequence
  MKO10011908_A_Crip3
  gRNA
acgcggacaagtccagctca

SEQ ID NO: 11909 - DNA, 20 bp, Artificial Sequence
  MKO10011909_A_Crip3
  gRNA
tgtcagcaacccgtttactt

SEQ ID NO: 11910 - DNA, 20 bp, Artificial Sequence
  MKO10011910_A_Cript
  gRNA
tcaggcatctgtgcgatgtg

SEQ ID NO: 11911 - DNA, 20 bp, Artificial Sequence
  MKO10011911_A_Cript
  gRNA
caaggctgcgcctacaaaaa

SEQ ID NO: 11912 - DNA, 20 bp, Artificial Sequence
  MKO10011912_A_Cript
  gRNA
gatggtgcccggaacaccac

SEQ ID NO: 11913 - DNA, 20 bp, Artificial Sequence
  MKO10011913_A_Crisp1
  gRNA
taatgtccaaccacactatc

SEQ ID NO: 11914 - DNA, 20 bp, Artificial Sequence
  MKO10011914_A_Crisp1
  gRNA
cccaaagcaacctgatagtg

SEQ ID NO: 11915 - DNA, 20 bp, Artificial Sequence
  MKO10011915_A_Crisp1
  gRNA
tggcagtgacttactaaaaa

SEQ ID NO: 11916 - DNA, 20 bp, Artificial Sequence
  MKO10011916_A_Crisp2
  gRNA
gtaatgtccgacagctgaat

SEQ ID NO: 11917 - DNA, 20 bp, Artificial Sequence
  MKO10011917_A_Crisp2
  gRNA
tttagtatgtcgctgccagt

SEQ ID NO: 11918 - DNA, 20 bp, Artificial Sequence
  MKO10011918_A_Crisp2
  gRNA
tggcagcgacatactaaaaa

SEQ ID NO: 11919 - DNA, 20 bp, Artificial Sequence
  MKO10011919_A_Crisp3
  gRNA
cacaccaaatataagacctt

SEQ ID NO: 11920 - DNA, 20 bp, Artificial Sequence
  MKO10011920_A_Crisp3
  gRNA
tgtcatcttaccttgtacca

SEQ ID NO: 11921 - DNA, 20 bp, Artificial Sequence
  MKO10011921_A_Crisp3
  gRNA
tggcagtgacttactaaata

SEQ ID NO: 11922 - DNA, 20 bp, Artificial Sequence
  MKO10011922_A_Crisp4
  gRNA
tcaatacccataacgccttc

SEQ ID NO: 11923 - DNA, 20 bp, Artificial Sequence
  MKO10011923_A_Crisp4
  gRNA
cgaaactgatcactacactc

SEQ ID NO: 11924 - DNA, 20 bp, Artificial Sequence
  MKO10011924_A_Crisp4
  gRNA
gaaaagtgtccccgccagcc

SEQ ID NO: 11925 - DNA, 20 bp, Artificial Sequence
  MKO10011925_A_Crispld1
  gRNA
tgggctactagtagcagaat

SEQ ID NO: 11926 - DNA, 20 bp, Artificial Sequence
  MKO10011926_A_Crispld1
  gRNA
atggcccaaggcagtctact

SEQ ID NO: 11927 - DNA, 20 bp, Artificial Sequence
  MKO10011927_A_Crispld1
  gRNA
ggccacgcaccttacaaaca

SEQ ID NO: 11928 - DNA, 20 bp, Artificial Sequence
  MKO10011928_A_Crispld2
  gRNA
tgtgcagtcatggtacgacg

SEQ ID NO: 11929 - DNA, 20 bp, Artificial Sequence
  MKO10011929_A_Crispld2
  gRNA
ccagacgttcatgttccgac

SEQ ID NO: 11930 - DNA, 20 bp, Artificial Sequence
  MKO10011930_A_Crispld2
  gRNA
cctgtcggaacatgaacgtc

SEQ ID NO: 11931 - DNA, 20 bp, Artificial Sequence
  MKO10011931_A_Crkl
  gRNA
cctgggcgccggttcgatta

SEQ ID NO: 11932 - DNA, 20 bp, Artificial Sequence
  MKO10011932_A_Crkl
  gRNA
cccgatcttaaagcggcggt

SEQ ID NO: 11933 - DNA, 20 bp, Artificial Sequence
  MKO10011933_A_Crkl
  gRNA
ggttgagcatacgcatgagc

SEQ ID NO: 11934 - DNA, 20 bp, Artificial Sequence
  MKO10011934_A_Crk
  gRNA
catggcgggcaacttcgact

SEQ ID NO: 11935 - DNA, 20 bp, Artificial Sequence
  MKO10011935_A_Crk
  gRNA
cgagtcgaagttgcccgcca

SEQ ID NO: 11936 - DNA, 20 bp, Artificial Sequence
  MKO10011936_A_Crk
  gRNA
ggtctatacttctccacgta

SEQ ID NO: 11937 - DNA, 20 bp, Artificial Sequence
  MKO10011937_A_Crlf1
  gRNA
aacgcggctcacgtgcacgt

SEQ ID NO: 11938 - DNA, 20 bp, Artificial Sequence
  MKO10011938_A_Crlf1
  gRNA
tgaaggatctcacgtgccgc

SEQ ID NO: 11939 - DNA, 20 bp, Artificial Sequence
  MKO10011939_A_Crlf1
  gRNA
agcggatctggtacttggct

SEQ ID NO: 11940 - DNA, 20 bp, Artificial Sequence
  MKO10011940_A_Crlf2
  gRNA
tcgccccgggccgcgcacta

SEQ ID NO: 11941 - DNA, 20 bp, Artificial Sequence
  MKO10011941_A_Crlf2
  gRNA
ctaggcagcgcgcgtccgcc

SEQ ID NO: 11942 - DNA, 20 bp, Artificial Sequence
  MKO10011942_A_Crlf2
  gRNA
gcaatgacgatgaggacgcc

SEQ ID NO: 11943 - DNA, 20 bp, Artificial Sequence
  MKO10011943_A_Crlf3
  gRNA
tcgtcccaccttctcggacc

SEQ ID NO: 11944 - DNA, 20 bp, Artificial Sequence
  MKO10011944_A_Crlf3
  gRNA
catcatagtgcgatggtgta

SEQ ID NO: 11945 - DNA, 20 bp, Artificial Sequence
  MKO10011945_A_Crlf3
  gRNA
gaagctattggatgagcgat

SEQ ID NO: 11946 - DNA, 20 bp, Artificial Sequence
  MKO10011946_A_Crls1
  gRNA
acttaccaaatccgttagcc

SEQ ID NO: 11947 - DNA, 20 bp, Artificial Sequence
  MKO10011947_A_Crls1
  gRNA
atggatttattgctcgaaac

SEQ ID NO: 11948 - DNA, 20 bp, Artificial Sequence
  MKO10011948_A_Crls1
  gRNA
aacctagccgtggcatagca

SEQ ID NO: 11949 - DNA, 20 bp, Artificial Sequence
  MKO10011949_A_Crmp1
  gRNA
cattcggccattcgcctcga

SEQ ID NO: 11950 - DNA, 20 bp, Artificial Sequence
  MKO10011950_A_Crmp1
  gRNA
agacatcggcgtagaaggac

SEQ ID NO: 11951 - DNA, 20 bp, Artificial Sequence
  MKO10011951_A_Crmp1
  gRNA
accagcttgtgatgtccacg

SEQ ID NO: 11952 - DNA, 20 bp, Artificial Sequence
  MKO10011952_A_Crnkl1
  gRNA
gccggccgaagtgcagataa

SEQ ID NO: 11953 - DNA, 20 bp, Artificial Sequence
  MKO10011953_A_Crnkl1
  gRNA
aaggatatagcgttcataga

SEQ ID NO: 11954 - DNA, 20 bp, Artificial Sequence
  MKO10011954_A_Crnkl1
  gRNA
ccatccagcgctcaaacacc

SEQ ID NO: 11955 - DNA, 20 bp, Artificial Sequence
  MKO10011955_A_Crnn
  gRNA
cgaaggcttcgatgatcccg

SEQ ID NO: 11956 - DNA, 20 bp, Artificial Sequence
  MKO10011956_A_Crnn
  gRNA
aagccttcgggtgctatgcc

SEQ ID NO: 11957 - DNA, 20 bp, Artificial Sequence
  MKO10011957_A_Crnn
  gRNA
tcagatatgcaagcaccctt

SEQ ID NO: 11958 - DNA, 20 bp, Artificial Sequence
  MKO10011958_A_Crocc
  gRNA
gtcccgcgtggaggacctgc

SEQ ID NO: 11959 - DNA, 20 bp, Artificial Sequence
  MKO10011959_A_Crocc
  gRNA
cgtgcccatcttcacctcgc

SEQ ID NO: 11960 - DNA, 20 bp, Artificial Sequence
  MKO10011960_A_Crocc
  gRNA
cagcgctcttctgcgcctag

SEQ ID NO: 11961 - DNA, 20 bp, Artificial Sequence
  MKO10011961_A_Crot
  gRNA
tactcgtcttcatttgcgaa

SEQ ID NO: 11962 - DNA, 20 bp, Artificial Sequence
  MKO10011962_A_Crot
  gRNA
atcgaatctctagtaattcc

SEQ ID NO: 11963 - DNA, 20 bp, Artificial Sequence
  MKO10011963_A_Crot
  gRNA
cgctctgcctcgacacagca

SEQ ID NO: 11964 - DNA, 20 bp, Artificial Sequence
  MKO10011964_A_Crp
  gRNA
tgtttattaagccgcagctg

SEQ ID NO: 11965 - DNA, 20 bp, Artificial Sequence
  MKO10011965_A_Crp
  gRNA
caggagcaggactcgtatgg

SEQ ID NO: 11966 - DNA, 20 bp, Artificial Sequence
  MKO10011966_A_Crp
  gRNA
tagccatggagaagctactc

SEQ ID NO: 11967 - DNA, 20 bp, Artificial Sequence
  MKO10011967_A_Crtac1
  gRNA
gaccgtcaggggaacgccat

SEQ ID NO: 11968 - DNA, 20 bp, Artificial Sequence
  MKO10011968_A_Crtac1
  gRNA
caatattcaccagccgattc

SEQ ID NO: 11969 - DNA, 20 bp, Artificial Sequence
  MKO10011969_A_Crtac1
  gRNA
cctgagtgatgacgtcaatg

SEQ ID NO: 11970 - DNA, 20 bp, Artificial Sequence
  MKO10011970_A_Crtam
  gRNA
cacacgttagagtgagcgtt

SEQ ID NO: 11971 - DNA, 20 bp, Artificial Sequence
  MKO10011971_A_Crtam
  gRNA
gtccaatgtaactctccgag

SEQ ID NO: 11972 - DNA, 20 bp, Artificial Sequence
  MKO10011972_A_Crtam
  gRNA
gactcctttccagccaaccg

SEQ ID NO: 11973 - DNA, 20 bp, Artificial Sequence
  MKO10011973_A_Crtap
  gRNA
cttggaaaccaagtcgtacg

SEQ ID NO: 11974 - DNA, 20 bp, Artificial Sequence
  MKO10011974_A_Crtap
  gRNA
cccgcaccgcacggacaaac

SEQ ID NO: 11975 - DNA, 20 bp, Artificial Sequence
  MKO10011975_A_Crtap
  gRNA
gtggtgtacctcgtacgact

SEQ ID NO: 11976 - DNA, 20 bp, Artificial Sequence
  MKO10011976_A_Crtc1
  gRNA
ccgactcgtgtccaggcctg

SEQ ID NO: 11977 - DNA, 20 bp, Artificial Sequence
  MKO10011977_A_Crtc1
  gRNA
gacagagtatatcgtgagcg

SEQ ID NO: 11978 - DNA, 20 bp, Artificial Sequence
  MKO10011978_A_Crtc1
  gRNA
ctctcttctggtgcgcatcc

SEQ ID NO: 11979 - DNA, 20 bp, Artificial Sequence
  MKO10011979_A_Crtc2
  gRNA
tctcggagcactcggcacca

SEQ ID NO: 11980 - DNA, 20 bp, Artificial Sequence
  MKO10011980_A_Crtc2
  gRNA
gtacccgttccaccaaccca

SEQ ID NO: 11981 - DNA, 20 bp, Artificial Sequence
  MKO10011981_A_Crtc2
  gRNA
tatacaaggagctcccatta

SEQ ID NO: 11982 - DNA, 20 bp, Artificial Sequence
  MKO10011982_A_Crtc3
  gRNA
catcaagccgataatgttcg

SEQ ID NO: 11983 - DNA, 20 bp, Artificial Sequence
  MKO10011983_A_Crtc3
  gRNA
gtaaggatcccccgtggtac

SEQ ID NO: 11984 - DNA, 20 bp, Artificial Sequence
  MKO10011984_A_Crtc3
  gRNA
gttccgcagctggctcacgt

SEQ ID NO: 11985 - DNA, 20 bp, Artificial Sequence
  MKO10011985_A_Crxos
  gRNA
tggccatgatctttcgatcc

SEQ ID NO: 11986 - DNA, 20 bp, Artificial Sequence
  MKO10011986_A_Crxos
  gRNA
tgtcttagcctcctgtaccc

SEQ ID NO: 11987 - DNA, 20 bp, Artificial Sequence
  MKO10011987_A_Crxos
  gRNA
cccacaaagccctgtgctgc

SEQ ID NO: 11988 - DNA, 20 bp, Artificial Sequence
  MKO10011988_A_Crx
  gRNA
ccaaggctcgtcctgcgaag

SEQ ID NO: 11989 - DNA, 20 bp, Artificial Sequence
  MKO10011989_A_Crx
  gRNA
gggagcggaccacattcacc

SEQ ID NO: 11990 - DNA, 20 bp, Artificial Sequence
  MKO10011990_A_Crx
  gRNA
ggatccctacctttcgccca

SEQ ID NO: 11991 - DNA, 20 bp, Artificial Sequence
  MKO10011991_A_Cry1
  gRNA
gaacgccatatttctcatca

SEQ ID NO: 11992 - DNA, 20 bp, Artificial Sequence
  MKO10011992_A_Cry1
  gRNA
aactgaggcacttacacgtt

SEQ ID NO: 11993 - DNA, 20 bp, Artificial Sequence
  MKO10011993_A_Cry1
  gRNA
tccttaggctttgatacaga

SEQ ID NO: 11994 - DNA, 20 bp, Artificial Sequence
  MKO10011994_A_Cry2
  gRNA
gcacgccataggtgtcgtca

SEQ ID NO: 11995 - DNA, 20 bp, Artificial Sequence
  MKO10011995_A_Cry2
  gRNA
acaccctctatgacctagac

SEQ ID NO: 11996 - DNA, 20 bp, Artificial Sequence
  MKO10011996_A_Cry2
  gRNA
cctgaaagcgcttgtaggta

SEQ ID NO: 11997 - DNA, 20 bp, Artificial Sequence
  MKO10011997_A_Cryaa
  gRNA
ggtttcaggtccgatctgac

SEQ ID NO: 11998 - DNA, 20 bp, Artificial Sequence
  MKO10011998_A_Cryaa
  gRNA
cgaagaactggtcgaacagt

SEQ ID NO: 11999 - DNA, 20 bp, Artificial Sequence
  MKO10011999_A_Cryaa
  gRNA
ccccaagaacaaccccgtca

SEQ ID NO: 12000 - DNA, 20 bp, Artificial Sequence
  MKO10012000_A_Cryab
  gRNA
ggcgttcttcgtgcttgccg

SEQ ID NO: 12001 - DNA, 20 bp, Artificial Sequence
  MKO10012001_A_Cryab
  gRNA
cggcaagcacgaagaacgcc

SEQ ID NO: 12002 - DNA, 20 bp, Artificial Sequence
  MKO10012002_A_Cryab
  gRNA
caatccagctgggtgcccgc

SEQ ID NO: 12003 - DNA, 20 bp, Artificial Sequence
  MKO10012003_A_Cryba1
  gRNA
ccgctccaggcatcccatcg

SEQ ID NO: 12004 - DNA, 20 bp, Artificial Sequence
  MKO10012004_A_Cryba1
  gRNA
catgagacgctcaatatgat

SEQ ID NO: 12005 - DNA, 20 bp, Artificial Sequence
  MKO10012005_A_Cryba1
  gRNA
cgccccacattgtatcttca

SEQ ID NO: 12006 - DNA, 20 bp, Artificial Sequence
  MKO10012006_A_Cryba2
  gRNA
ttcgaaactccccgctgtgc

SEQ ID NO: 12007 - DNA, 20 bp, Artificial Sequence
  MKO10012007_A_Cryba2
  gRNA
cttcgagtaccccgacttcc

SEQ ID NO: 12008 - DNA, 20 bp, Artificial Sequence
  MKO10012008_A_Cryba2
  gRNA
catgagcagcgcccccgcgc

SEQ ID NO: 12009 - DNA, 20 bp, Artificial Sequence
  MKO10012009_A_Cryba4
  gRNA
agaggggcgattacccgggc

SEQ ID NO: 12010 - DNA, 20 bp, Artificial Sequence
  MKO10012010_A_Cryba4
  gRNA
tgtagaaccaccgcgactca

SEQ ID NO: 12011 - DNA, 20 bp, Artificial Sequence
  MKO10012011_A_Cryba4
  gRNA
aaggaggtgagcctctccgc

SEQ ID NO: 12012 - DNA, 20 bp, Artificial Sequence
  MKO10012012_A_Crybb1
  gRNA
acggtcccgagacgacgatc

SEQ ID NO: 12013 - DNA, 20 bp, Artificial Sequence
  MKO10012013_A_Crybb1
  gRNA
acagctgatcgtcttcgagc

SEQ ID NO: 12014 - DNA, 20 bp, Artificial Sequence
  MKO10012014_A_Crybb1
  gRNA
cataagatctgcctgttcga

SEQ ID NO: 12015 - DNA, 20 bp, Artificial Sequence
  MKO10012015_A_Crybb2
  gRNA
cagctgggtgggctacgagc

SEQ ID NO: 12016 - DNA, 20 bp, Artificial Sequence
  MKO10012016_A_Crybb2
  gRNA
cgtgccgctctgcacacgca

SEQ ID NO: 12017 - DNA, 20 bp, Artificial Sequence
  MKO10012017_A_Crybb2
  gRNA
ggagaaggcgggctccgtcc

SEQ ID NO: 12018 - DNA, 20 bp, Artificial Sequence
  MKO10012018_A_Crybb3
  gRNA
cgccccgctcgaacacgtac

SEQ ID NO: 12019 - DNA, 20 bp, Artificial Sequence
  MKO10012019_A_Crybb3
  gRNA
ggtggctggcgttcgagcgc

SEQ ID NO: 12020 - DNA, 20 bp, Artificial Sequence
  MKO10012020_A_Crybb3
  gRNA
agaagggggactaccctcgc

SEQ ID NO: 12021 - DNA, 20 bp, Artificial Sequence
  MKO10012021_A_Crybg3
  gRNA
aaagagtgttagaccgggac

SEQ ID NO: 12022 - DNA, 20 bp, Artificial Sequence
  MKO10012022_A_Crybg3
  gRNA
acaccgatctgtccccaatg

SEQ ID NO: 12023 - DNA, 20 bp, Artificial Sequence
  MKO10012023_A_Crybg3
  gRNA
agacacgtttgatagagccc

SEQ ID NO: 12024 - DNA, 20 bp, Artificial Sequence
  MKO10012024_A_Cryga
  gRNA
gatctactccatgcacgtgc

SEQ ID NO: 12025 - DNA, 20 bp, Artificial Sequence
  MKO10012025_A_Cryga
  gRNA
catggaggcggaagcgatcg

SEQ ID NO: 12026 - DNA, 20 bp, Artificial Sequence
  MKO10012026_A_Cryga
  gRNA
ccgctgcaactccatccgtg

SEQ ID NO: 12027 - DNA, 20 bp, Artificial Sequence
  MKO10012027_A_Crygb
  gRNA
tcgcctaaaagagccaactt

SEQ ID NO: 12028 - DNA, 20 bp, Artificial Sequence
  MKO10012028_A_Crygb
  gRNA
agacgattgtctctctcttc

SEQ ID NO: 12029 - DNA, 20 bp, Artificial Sequence
  MKO10012029_A_Crygb
  gRNA
ccaaactcacttgggggatg

SEQ ID NO: 12030 - DNA, 20 bp, Artificial Sequence
  MKO10012030_A_Crygc
  gRNA
cgctcgctgcaagtgctgga

SEQ ID NO: 12031 - DNA, 20 bp, Artificial Sequence
  MKO10012031_A_Crygc
  gRNA
ggatcgcttccacctcagtg

SEQ ID NO: 12032 - DNA, 20 bp, Artificial Sequence
  MKO10012032_A_Crygc
  gRNA
tttacagatcaccttcttcg

SEQ ID NO: 12033 - DNA, 20 bp, Artificial Sequence
  MKO10012033_A_Crygd
  gRNA
gtactggcagcccgtgaagt

SEQ ID NO: 12034 - DNA, 20 bp, Artificial Sequence
  MKO10012034_A_Crygd
  gRNA
ccagatgatagagttcacgg

SEQ ID NO: 12035 - DNA, 20 bp, Artificial Sequence
  MKO10012035_A_Crygd
  gRNA
cctccgtgaactctatcatc

SEQ ID NO: 12036 - DNA, 20 bp, Artificial Sequence
  MKO10012036_A_Cryge
  gRNA
cgtctgtgatctccaccatt

SEQ ID NO: 12037 - DNA, 20 bp, Artificial Sequence
  MKO10012037_A_Cryge
  gRNA
gatcttgatcctgtgagaac

SEQ ID NO: 12038 - DNA, 20 bp, Artificial Sequence
  MKO10012038_A_Cryge
  gRNA
aaagactcacgtgggggatg

SEQ ID NO: 12039 - DNA, 20 bp, Artificial Sequence
  MKO10012039_A_Crygf
  gRNA
agtataggcgctaccacgat

SEQ ID NO: 12040 - DNA, 20 bp, Artificial Sequence
  MKO10012040_A_Crygf
  gRNA
ccgctgcaactctgtgcgag

SEQ ID NO: 12041 - DNA, 20 bp, Artificial Sequence
  MKO10012041_A_Crygf
  gRNA
acactcagtccacttctcac

SEQ ID NO: 12042 - DNA, 20 bp, Artificial Sequence
  MKO10012042_A_Crygn
  gRNA
cacgcgtgcagtcgctccgc

SEQ ID NO: 12043 - DNA, 20 bp, Artificial Sequence
  MKO10012043_A_Crygn
  gRNA
ccgggtgaattccatccgtg

SEQ ID NO: 12044 - DNA, 20 bp, Artificial Sequence
  MKO10012044_A_Crygn
  gRNA
ccgcggccgcatgtacgtgt

SEQ ID NO: 12045 - DNA, 20 bp, Artificial Sequence
  MKO10012045_A_Crygs
  gRNA
agtaccggaagcccgtcgat

SEQ ID NO: 12046 - DNA, 20 bp, Artificial Sequence
  MKO10012046_A_Crygs
  gRNA
ccagtcgttccgccgcattg

SEQ ID NO: 12047 - DNA, 20 bp, Artificial Sequence
  MKO10012047_A_Crygs
  gRNA
taatggagttgcagcgactt

SEQ ID NO: 12048 - DNA, 20 bp, Artificial Sequence
  MKO10012048_A_Cryl1
  gRNA
cactgatgacggcgtactgc

SEQ ID NO: 12049 - DNA, 20 bp, Artificial Sequence
  MKO10012049_A_Cryl1
  gRNA
taacccggtcatccacaatg

SEQ ID NO: 12050 - DNA, 20 bp, Artificial Sequence
  MKO10012050_A_Cryl1
  gRNA
cgaagccgtcaatctccttc

SEQ ID NO: 12051 - DNA, 20 bp, Artificial Sequence
  MKO10012051_A_Crym
  gRNA
tctcatagtgactgtacgcc

SEQ ID NO: 12052 - DNA, 20 bp, Artificial Sequence
  MKO10012052_A_Crym
  gRNA
cggtcttacctttgtggcaa

SEQ ID NO: 12053 - DNA, 20 bp, Artificial Sequence
  MKO10012053_A_Crym
  gRNA
cacagcggtcccctcccatc

SEQ ID NO: 12054 - DNA, 20 bp, Artificial Sequence
  MKO10012054_A_Cryzl1
  gRNA
tcgagtacatgagcattacc

SEQ ID NO: 12055 - DNA, 20 bp, Artificial Sequence
  MKO10012055_A_Cryzl1
  gRNA
cgaagaccccgggctctgtg

SEQ ID NO: 12056 - DNA, 20 bp, Artificial Sequence
  MKO10012056_A_Cryzl1
  gRNA
acaaagttatcctctgtgac

SEQ ID NO: 12057 - DNA, 20 bp, Artificial Sequence
  MKO10012057_A_Cryz
  gRNA
ttccgcgtagccaccagaga

SEQ ID NO: 12058 - DNA, 20 bp, Artificial Sequence
  MKO10012058_A_Cryz
  gRNA
cgctttcgccagctcgagca

SEQ ID NO: 12059 - DNA, 20 bp, Artificial Sequence
  MKO10012059_A_Cryz
  gRNA
gtagagacatacattcgctc

SEQ ID NO: 12060 - DNA, 20 bp, Artificial Sequence
  MKO10012060_A_Csad
  gRNA
gctgaagaaactccgtgccc

SEQ ID NO: 12061 - DNA, 20 bp, Artificial Sequence
  MKO10012061_A_Csad
  gRNA
tctcctcctaggtctgcgaa

SEQ ID NO: 12062 - DNA, 20 bp, Artificial Sequence
  MKO10012062_A_Csad
  gRNA
ttagatccccatgctctggc

SEQ ID NO: 12063 - DNA, 20 bp, Artificial Sequence
  MKO10012063_A_Csdc2
  gRNA
cgagggggagtacgtgcctg

SEQ ID NO: 12064 - DNA, 20 bp, Artificial Sequence
  MKO10012064_A_Csdc2
  gRNA
agagtctacattaccgccag

SEQ ID NO: 12065 - DNA, 20 bp, Artificial Sequence
  MKO10012065_A_Csdc2
  gRNA
gactcacgctgagtatgtcc

SEQ ID NO: 12066 - DNA, 20 bp, Artificial Sequence
  MKO10012066_A_Csde1
  gRNA
agtgtatgctacgaacgtaa

SEQ ID NO: 12067 - DNA, 20 bp, Artificial Sequence
  MKO10012067_A_Csde1
  gRNA
gatttactctctaagttgtg

SEQ ID NO: 12068 - DNA, 20 bp, Artificial Sequence
  MKO10012068_A_Csde1
  gRNA
tatgctgttgaaaaagaagc

SEQ ID NO: 12069 - DNA, 20 bp, Artificial Sequence
  MKO10012069_A_Cse1l
  gRNA
aagtttctcgaatccgtaga

SEQ ID NO: 12070 - DNA, 20 bp, Artificial Sequence
  MKO10012070_A_Cse1l
  gRNA
atagtgagtgcgctgtacga

SEQ ID NO: 12071 - DNA, 20 bp, Artificial Sequence
  MKO10012071_A_Cse1l
  gRNA
atggtgaatcgctttcagag

SEQ ID NO: 12072 - DNA, 20 bp, Artificial Sequence
  MKO10012072_A_Csf1r
  gRNA
gaatcccacttcggcgttag

SEQ ID NO: 12073 - DNA, 20 bp, Artificial Sequence
  MKO10012073_A_Csf1r
  gRNA
cggataatgaaccctcgcca

SEQ ID NO: 12074 - DNA, 20 bp, Artificial Sequence
  MKO10012074_A_Csf1r
  gRNA
ttcaagctcggtacaacggt

SEQ ID NO: 12075 - DNA, 20 bp, Artificial Sequence
  MKO10012075_A_Csf1
  gRNA
cagctgcccgtatgaccgcg

SEQ ID NO: 12076 - DNA, 20 bp, Artificial Sequence
  MKO10012076_A_Csf1
  gRNA
cgaagaagggcagcgccccg

SEQ ID NO: 12077 - DNA, 20 bp, Artificial Sequence
  MKO10012077_A_Csf1
  gRNA
ccaatgctaacgccaccgag

SEQ ID NO: 12078 - DNA, 20 bp, Artificial Sequence
  MKO10012078_A_Csf2ra
  gRNA
ccccacgtaccgagactcgc

SEQ ID NO: 12079 - DNA, 20 bp, Artificial Sequence
  MKO10012079_A_Csf2ra
  gRNA
cagcgagtaccggacgtccg

SEQ ID NO: 12080 - DNA, 20 bp, Artificial Sequence
  MKO10012080_A_Csf2ra
  gRNA
aggctgagcttcgtcaacga

SEQ ID NO: 12081 - DNA, 20 bp, Artificial Sequence
  MKO10012081_A_Csf2rb2
  gRNA
cttccagccagatcgtgacc

SEQ ID NO: 12082 - DNA, 20 bp, Artificial Sequence
  MKO10012082_A_Csf2rb2
  gRNA
tggatgcccaggtcacgatc

SEQ ID NO: 12083 - DNA, 20 bp, Artificial Sequence
  MKO10012083_A_Csf2rb2
  gRNA
gtggcactcacttgtctagc

SEQ ID NO: 12084 - DNA, 20 bp, Artificial Sequence
  MKO10012084_A_Csf2rb
  gRNA
acgaagactactactccttc

SEQ ID NO: 12085 - DNA, 20 bp, Artificial Sequence
  MKO10012085_A_Csf2rb
  gRNA
gtagtagtcttcgtttgtga

SEQ ID NO: 12086 - DNA, 20 bp, Artificial Sequence
  MKO10012086_A_Csf2rb
  gRNA
gtggcactcacttctctagc

SEQ ID NO: 12087 - DNA, 20 bp, Artificial Sequence
  MKO10012087_A_Csf2
  gRNA
ccgcctgaagatattcgagc

SEQ ID NO: 12088 - DNA, 20 bp, Artificial Sequence
  MKO10012088_A_Csf2
  gRNA
gctgtctatgaaatccgcat

SEQ ID NO: 12089 - DNA, 20 bp, Artificial Sequence
  MKO10012089_A_Csf2
  gRNA
gttcaaggcgcccttgagtt

SEQ ID NO: 12090 - DNA, 20 bp, Artificial Sequence
  MKO10012090_A_Csf3r
  gRNA
ttcaccccctgttgtccgcc

SEQ ID NO: 12091 - DNA, 20 bp, Artificial Sequence
  MKO10012091_A_Csf3r
  gRNA
aaagctgtgcctcgacccca

SEQ ID NO: 12092 - DNA, 20 bp, Artificial Sequence
  MKO10012092_A_Csf3r
  gRNA
ctcctgttccatgtactcac

SEQ ID NO: 12093 - DNA, 20 bp, Artificial Sequence
  MKO10012093_A_Csf3
  gRNA
ctacaagctgtgtcaccccg

SEQ ID NO: 12094 - DNA, 20 bp, Artificial Sequence
  MKO10012094_A_Csf3
  gRNA
gagcaaggcgagccgtctcc

SEQ ID NO: 12095 - DNA, 20 bp, Artificial Sequence
  MKO10012095_A_Csf3
  gRNA
acctcctgcccggcgctgga

SEQ ID NO: 12096 - DNA, 20 bp, Artificial Sequence
  MKO10012096_A_Csgalnact1
  gRNA
gtgatggccgtagattacgc

SEQ ID NO: 12097 - DNA, 20 bp, Artificial Sequence
  MKO10012097_A_Csgalnact1
  gRNA
cagggatttaccgaaccgaa

SEQ ID NO: 12098 - DNA, 20 bp, Artificial Sequence
  MKO10012098_A_Csgalnact1
  gRNA
cacgatgcagtccctccgct

SEQ ID NO: 12099 - DNA, 20 bp, Artificial Sequence
  MKO10012099_A_Csgalnact2
  gRNA
ttggacgaagaatttaatcg

SEQ ID NO: 12100 - DNA, 20 bp, Artificial Sequence
  MKO10012100_A_Csgalnact2
  gRNA
gtgaccctcttccgcccttt

SEQ ID NO: 12101 - DNA, 20 bp, Artificial Sequence
  MKO10012101_A_Csgalnact2
  gRNA
ttcttcgtccaacgagacca

SEQ ID NO: 12102 - DNA, 20 bp, Artificial Sequence
  MKO10012102_A_Csk
  gRNA
agttggtgctttcccgcacg

SEQ ID NO: 12103 - DNA, 20 bp, Artificial Sequence
  MKO10012103_A_Csk
  gRNA
gctcccgtgtgatcttgccg

SEQ ID NO: 12104 - DNA, 20 bp, Artificial Sequence
  MKO10012104_A_Csk
  gRNA
ggagggcaccgtggcggccc

SEQ ID NO: 12105 - DNA, 20 bp, Artificial Sequence
  MKO10012105_A_Csl
  gRNA
tctccctcatgccgtagtac

SEQ ID NO: 12106 - DNA, 20 bp, Artificial Sequence
  MKO10012106_A_Csl
  gRNA
tgctccagtactacggcatg

SEQ ID NO: 12107 - DNA, 20 bp, Artificial Sequence
  MKO10012107_A_Csl
  gRNA
cgaacttgaaagacgtgctg

SEQ ID NO: 12108 - DNA, 20 bp, Artificial Sequence
  MKO10012108_A_Csmd1
  gRNA
ctatgttgaacctcgttccg

SEQ ID NO: 12109 - DNA, 20 bp, Artificial Sequence
  MKO10012109_A_Csmd1
  gRNA
ttattactggggagcgcaac

SEQ ID NO: 12110 - DNA, 20 bp, Artificial Sequence
  MKO10012110_A_Csmd1
  gRNA
cacggaacgaggttcaacat

SEQ ID NO: 12111 - DNA, 20 bp, Artificial Sequence
  MKO10012111_A_Csmd2os
  gRNA
tgtcaagtgtaagcgctttc

SEQ ID NO: 12112 - DNA, 20 bp, Artificial Sequence
  MKO10012112_A_Csmd2os
  gRNA
cctcccgtcgctatgtaccc

SEQ ID NO: 12113 - DNA, 20 bp, Artificial Sequence
  MKO10012113_A_Csmd2os
  gRNA
cgaccttaccttgactccca

SEQ ID NO: 12114 - DNA, 20 bp, Artificial Sequence
  MKO10012114_A_Csmd2
  gRNA
cgtagttcgggtagccgtaa

SEQ ID NO: 12115 - DNA, 20 bp, Artificial Sequence
  MKO10012115_A_Csmd2
  gRNA
gagaatggtaccttgttcga

SEQ ID NO: 12116 - DNA, 20 bp, Artificial Sequence
  MKO10012116_A_Csmd2
  gRNA
tgactgcatagtcgctgatg

SEQ ID NO: 12117 - DNA, 20 bp, Artificial Sequence
  MKO10012117_A_Csmd3
  gRNA
atcctcatccgacgaacttt

SEQ ID NO: 12118 - DNA, 20 bp, Artificial Sequence
  MKO10012118_A_Csmd3
  gRNA
aaccttgtcctaaagttcgt

SEQ ID NO: 12119 - DNA, 20 bp, Artificial Sequence
  MKO10012119_A_Csmd3
  gRNA
ggaagctgtattaaccgaat

SEQ ID NO: 12120 - DNA, 20 bp, Artificial Sequence
  MKO10012120_A_Csn1s1
  gRNA
tgatttaggttgagatactt

SEQ ID NO: 12121 - DNA, 20 bp, Artificial Sequence
  MKO10012121_A_Csn1s1
  gRNA
aaagtatctcaacctaaatc

SEQ ID NO: 12122 - DNA, 20 bp, Artificial Sequence
  MKO10012122_A_Csn1s2a
  gRNA
tgctagcagttcatccagtg

SEQ ID NO: 12123 - DNA, 20 bp, Artificial Sequence
  MKO10012123_A_Csn1s2a
  gRNA
cgtgttcttccaaacaacta

SEQ ID NO: 12124 - DNA, 20 bp, Artificial Sequence
  MKO10012124_A_Csn1s2a
  gRNA
aaaggataagtcctccagtg

SEQ ID NO: 12125 - DNA, 20 bp, Artificial Sequence
  MKO10012125_A_Csn1s2b
  gRNA
tacttcttgagagttatcca

SEQ ID NO: 12126 - DNA, 20 bp, Artificial Sequence
  MKO10012126_A_Csn1s2b
  gRNA
ggagcaatacatctccagtg

SEQ ID NO: 12127 - DNA, 20 bp, Artificial Sequence
  MKO10012127_A_Csn2
  gRNA
atctgttgaacatatcaatg

SEQ ID NO: 12128 - DNA, 20 bp, Artificial Sequence
  MKO10012128_A_Csn2
  gRNA
gactgatagtatttccagtg

SEQ ID NO: 12129 - DNA, 20 bp, Artificial Sequence
  MKO10012129_A_Csn2
  gRNA
tttctagcagaaacttcaga

SEQ ID NO: 12130 - DNA, 20 bp, Artificial Sequence
  MKO10012130_A_Csn3
  gRNA
aacctaattactaccactac

SEQ ID NO: 12131 - DNA, 20 bp, Artificial Sequence
  MKO10012131_A_Csn3
  gRNA
tatcaacttacgtttgaatc

SEQ ID NO: 12132 - DNA, 20 bp, Artificial Sequence
  MKO10012132_A_Csn3
  gRNA
actgggactgtagtagtctc

SEQ ID NO: 12133 - DNA, 20 bp, Artificial Sequence
  MKO10012133_A_Csnk1a1
  gRNA
aaggtgcttaccgtatgtga

SEQ ID NO: 12134 - DNA, 20 bp, Artificial Sequence
  MKO10012134_A_Csnk1a1
  gRNA
cgtatcgggcagtgccagtg

SEQ ID NO: 12135 - DNA, 20 bp, Artificial Sequence
  MKO10012135_A_Csnk1a1
  gRNA
cgtacttatgttagctgacc

SEQ ID NO: 12136 - DNA, 20 bp, Artificial Sequence
  MKO10012136_A_Csnk1d
  gRNA
gtcgggaacaggtaccgact

SEQ ID NO: 12137 - DNA, 20 bp, Artificial Sequence
  MKO10012137_A_Csnk1d
  gRNA
tgccgatcttgcggcccagt

SEQ ID NO: 12138 - DNA, 20 bp, Artificial Sequence
  MKO10012138_A_Csnk1d
  gRNA
aatgccaaggtgcgtgttga

SEQ ID NO: 12139 - DNA, 20 bp, Artificial Sequence
  MKO10012139_A_Csnk1e
  gRNA
gaagatgtcaacgccaatcg

SEQ ID NO: 12140 - DNA, 20 bp, Artificial Sequence
  MKO10012140_A_Csnk1e
  gRNA
ccgctcgtacttctgacgct

SEQ ID NO: 12141 - DNA, 20 bp, Artificial Sequence
  MKO10012141_A_Csnk1e
  gRNA
cctcaagacggtgctgttgc

SEQ ID NO: 12142 - DNA, 20 bp, Artificial Sequence
  MKO10012142_A_Csnk1g1
  gRNA
gttaatgatagccatccagt

SEQ ID NO: 12143 - DNA, 20 bp, Artificial Sequence
  MKO10012143_A_Csnk1g1
  gRNA
ccgtcttcaaagtaaacgtt

SEQ ID NO: 12144 - DNA, 20 bp, Artificial Sequence
  MKO10012144_A_Csnk1g1
  gRNA
ttcaggatcaacatattcct

SEQ ID NO: 12145 - DNA, 20 bp, Artificial Sequence
  MKO10012145_A_Csnk1g2
  gRNA
gctccgactcgtgccggttt

SEQ ID NO: 12146 - DNA, 20 bp, Artificial Sequence
  MKO10012146_A_Csnk1g2
  gRNA
tccccgaactgcggacgccg

SEQ ID NO: 12147 - DNA, 20 bp, Artificial Sequence
  MKO10012147_A_Csnk1g2
  gRNA
tcactcgcagatcacgcgca

SEQ ID NO: 12148 - DNA, 20 bp, Artificial Sequence
  MKO10012148_A_Csnk1g3
  gRNA
tcccactaagatttctcgta

SEQ ID NO: 12149 - DNA, 20 bp, Artificial Sequence
  MKO10012149_A_Csnk1g3
  gRNA
tctcatgatagctatacagc

SEQ ID NO: 12150 - DNA, 20 bp, Artificial Sequence
  MKO10012150_A_Csnk1g3
  gRNA
ttgtggtaaatacaacgcga

SEQ ID NO: 12151 - DNA, 20 bp, Artificial Sequence
  MKO10012151_A_Csnk2a1
  gRNA
agacattgtaaaagaccctg

SEQ ID NO: 12152 - DNA, 20 bp, Artificial Sequence
  MKO10012152_A_Csnk2a1
  gRNA
agttgttgttaaaattctca

SEQ ID NO: 12153 - DNA, 20 bp, Artificial Sequence
  MKO10012153_A_Csnk2a1
  gRNA
ttagtcacgaacccctgcct

SEQ ID NO: 12154 - DNA, 20 bp, Artificial Sequence
  MKO10012154_A_Csnk2a2
  gRNA
tgatatttgttccaccacga

SEQ ID NO: 12155 - DNA, 20 bp, Artificial Sequence
  MKO10012155_A_Csnk2a2
  gRNA
aagattctggagaaccttcg

SEQ ID NO: 12156 - DNA, 20 bp, Artificial Sequence
  MKO10012156_A_Csnk2a2
  gRNA
tcctgactgactttgatatc

SEQ ID NO: 12157 - DNA, 20 bp, Artificial Sequence
  MKO10012157_A_Csnk2b
  gRNA
ccagagcgacttgatcgaac

SEQ ID NO: 12158 - DNA, 20 bp, Artificial Sequence
  MKO10012158_A_Csnk2b
  gRNA
cgaagtatgcgccgtccgtg

SEQ ID NO: 12159 - DNA, 20 bp, Artificial Sequence
  MKO10012159_A_Csnk2b
  gRNA
ggtcgcttgggccggtactc

SEQ ID NO: 12160 - DNA, 20 bp, Artificial Sequence
  MKO10012160_A_Csnka2ip
  gRNA
cccactccggttccggtttc

SEQ ID NO: 12161 - DNA, 20 bp, Artificial Sequence
  MKO10012161_A_Csnka2ip
  gRNA
atacgtccagattgtcatcg

SEQ ID NO: 12162 - DNA, 20 bp, Artificial Sequence
  MKO10012162_A_Csnka2ip
  gRNA
cggggaccaggacgagggtt

SEQ ID NO: 12163 - DNA, 20 bp, Artificial Sequence
  MKO10012163_A_Cspg4
  gRNA
gaaccggtagatgggcctcg

SEQ ID NO: 12164 - DNA, 20 bp, Artificial Sequence
  MKO10012164_A_Cspg4
  gRNA
cctacgcgtactttcaaccg

SEQ ID NO: 12165 - DNA, 20 bp, Artificial Sequence
  MKO10012165_A_Cspg4
  gRNA
ctgatccgctacgtgcatga

SEQ ID NO: 12166 - DNA, 20 bp, Artificial Sequence
  MKO10012166_A_Cspg5
  gRNA
agtcgcgtgccaatgacacg

SEQ ID NO: 12167 - DNA, 20 bp, Artificial Sequence
  MKO10012167_A_Cspg5
  gRNA
ccgccgttgtgacagtaact

SEQ ID NO: 12168 - DNA, 20 bp, Artificial Sequence
  MKO10012168_A_Cspg5
  gRNA
ttacttggtcctccgcagct

SEQ ID NO: 12169 - DNA, 20 bp, Artificial Sequence
  MKO10012169_A_Cspp1
  gRNA
ggcagataaccgctcatcaa

SEQ ID NO: 12170 - DNA, 20 bp, Artificial Sequence
  MKO10012170_A_Cspp1
  gRNA
ttatagacgatatcttactc

SEQ ID NO: 12171 - DNA, 20 bp, Artificial Sequence
  MKO10012171_A_Cspp1
  gRNA
taccatacctaagggtccct

SEQ ID NO: 12172 - DNA, 20 bp, Artificial Sequence
  MKO10012172_A_Csprs
  gRNA
aacattcttgagtatgactg

SEQ ID NO: 12173 - DNA, 20 bp, Artificial Sequence
  MKO10012173_A_Csprs
  gRNA
ccaaacatcacgtgtctcca

SEQ ID NO: 12174 - DNA, 20 bp, Artificial Sequence
  MKO10012174_A_Csprs
  gRNA
tcctgctctaatgcagagag

SEQ ID NO: 12175 - DNA, 20 bp, Artificial Sequence
  MKO10012175_A_Csrnp1
  gRNA
gaagctccgccgccgtttaa

SEQ ID NO: 12176 - DNA, 20 bp, Artificial Sequence
  MKO10012176_A_Csrnp1
  gRNA
cgttcgaaggattgaccgag

SEQ ID NO: 12177 - DNA, 20 bp, Artificial Sequence
  MKO10012177_A_Csrnp1
  gRNA
ccgggctgcccgacaccctt

SEQ ID NO: 12178 - DNA, 20 bp, Artificial Sequence
  MKO10012178_A_Csrnp2
  gRNA
atcatcgagtgtcaagccgt

SEQ ID NO: 12179 - DNA, 20 bp, Artificial Sequence
  MKO10012179_A_Csrnp2
  gRNA
agtttaacccgatccgagtg

SEQ ID NO: 12180 - DNA, 20 bp, Artificial Sequence
  MKO10012180_A_Csrnp2
  gRNA
cccgccgccgtttggtgggc

SEQ ID NO: 12181 - DNA, 20 bp, Artificial Sequence
  MKO10012181_A_Csrnp3
  gRNA
gctctcgcgcaaactcgccc

SEQ ID NO: 12182 - DNA, 20 bp, Artificial Sequence
  MKO10012182_A_Csrnp3
  gRNA
gcgcacgctgttgtgacgac

SEQ ID NO: 12183 - DNA, 20 bp, Artificial Sequence
  MKO10012183_A_Csrnp3
  gRNA
catgggcgcttatctccccg

SEQ ID NO: 12184 - DNA, 20 bp, Artificial Sequence
  MKO10012184_A_Csrp1
  gRNA
tctccgcagcatagaccgcc

SEQ ID NO: 12185 - DNA, 20 bp, Artificial Sequence
  MKO10012185_A_Csrp1
  gRNA
aggccttgagtcgaccaccc

SEQ ID NO: 12186 - DNA, 20 bp, Artificial Sequence
  MKO10012186_A_Csrp1
  gRNA
tgcccgtagccgtagccttt

SEQ ID NO: 12187 - DNA, 20 bp, Artificial Sequence
  MKO10012187_A_Csrp2bp
  gRNA
ttaggaaaaagacgtcgacg

SEQ ID NO: 12188 - DNA, 20 bp, Artificial Sequence
  MKO10012188_A_Csrp2bp
  gRNA
agagaagcggtcgcgaacac

SEQ ID NO: 12189 - DNA, 20 bp, Artificial Sequence
  MKO10012189_A_Csrp2bp
  gRNA
cccgtcaagttcataagccg

SEQ ID NO: 12190 - DNA, 20 bp, Artificial Sequence
  MKO10012190_A_Csrp2
  gRNA
gggcgctggcacgctcaaca

SEQ ID NO: 12191 - DNA, 20 bp, Artificial Sequence
  MKO10012191_A_Csrp2
  gRNA
gatcttctccgcagcataca

SEQ ID NO: 12192 - DNA, 20 bp, Artificial Sequence
  MKO10012192_A_Csrp2
  gRNA
tgttgagcgtgccagcgccc

SEQ ID NO: 12193 - DNA, 20 bp, Artificial Sequence
  MKO10012193_A_Csrp3
  gRNA
atcgggttcggacaaggcgc

SEQ ID NO: 12194 - DNA, 20 bp, Artificial Sequence
  MKO10012194_A_Csrp3
  gRNA
ttgtccgaacccgatcccct

SEQ ID NO: 12195 - DNA, 20 bp, Artificial Sequence
  MKO10012195_A_Csrp3
  gRNA
tataccgactttccacatcg

SEQ ID NO: 12196 - DNA, 20 bp, Artificial Sequence
  MKO10012196_A_Cst10
  gRNA
gccaaggtgcaacgttgatc

SEQ ID NO: 12197 - DNA, 20 bp, Artificial Sequence
  MKO10012197_A_Cst10
  gRNA
ctggcgctcatcagtcgtat

SEQ ID NO: 12198 - DNA, 20 bp, Artificial Sequence
  MKO10012198_A_Cst10
  gRNA
tccagatcaacgttgcacct

SEQ ID NO: 12199 - DNA, 20 bp, Artificial Sequence
  MKO10012199_A_Cst11
  gRNA
gaaagatggcggccggatct

SEQ ID NO: 12200 - DNA, 20 bp, Artificial Sequence
  MKO10012200_A_Cst11
  gRNA
ccgtgttgccttccaagatc

SEQ ID NO: 12201 - DNA, 20 bp, Artificial Sequence
  MKO10012201_A_Cst11
  gRNA
ccactgtgatgtgatactcc

SEQ ID NO: 12202 - DNA, 20 bp, Artificial Sequence
  MKO10012202_A_Cst12
  gRNA
catatttcccgcaaagcgta

SEQ ID NO: 12203 - DNA, 20 bp, Artificial Sequence
  MKO10012203_A_Cst12
  gRNA
agatgggccgtacgctttgc

SEQ ID NO: 12204 - DNA, 20 bp, Artificial Sequence
  MKO10012204_A_Cst12
  gRNA
caggaccgacttccacaaca

SEQ ID NO: 12205 - DNA, 20 bp, Artificial Sequence
  MKO10012205_A_Cst13
  gRNA
tatctagaagagtcgaagcc

SEQ ID NO: 12206 - DNA, 20 bp, Artificial Sequence
  MKO10012206_A_Cst13
  gRNA
tcgaatggcctcacaatctg

SEQ ID NO: 12207 - DNA, 20 bp, Artificial Sequence
  MKO10012207_A_Cst13
  gRNA
caatcttcttgcacattgtt

SEQ ID NO: 12208 - DNA, 20 bp, Artificial Sequence
  MKO10012208_A_Cst3
  gRNA
gtaccacagccgcgccatac

SEQ ID NO: 12209 - DNA, 20 bp, Artificial Sequence
  MKO10012209_A_Cst3
  gRNA
tccagatctacagcgtgccc

SEQ ID NO: 12210 - DNA, 20 bp, Artificial Sequence
  MKO10012210_A_Cst3
  gRNA
aaaacaaggcccgcgaatgt

SEQ ID NO: 12211 - DNA, 20 bp, Artificial Sequence
  MKO10012211_A_Cst6
  gRNA
acttgtcacccaccgacccg

SEQ ID NO: 12212 - DNA, 20 bp, Artificial Sequence
  MKO10012212_A_Cst6
  gRNA
ctgacgcccgcgccgagctg

SEQ ID NO: 12213 - DNA, 20 bp, Artificial Sequence
  MKO10012213_A_Cst6
  gRNA
catcaagtactacctgactt

SEQ ID NO: 12214 - DNA, 20 bp, Artificial Sequence
  MKO10012214_A_Cst7
  gRNA
aaatcggccgaactacatgc

SEQ ID NO: 12215 - DNA, 20 bp, Artificial Sequence
  MKO10012215_A_Cst7
  gRNA
tacctggggggcgtgcccca

SEQ ID NO: 12216 - DNA, 20 bp, Artificial Sequence
  MKO10012216_A_Cst7
  gRNA
gaacaggcacctcaaaactg

SEQ ID NO: 12217 - DNA, 20 bp, Artificial Sequence
  MKO10012217_A_Cst8
  gRNA
ggaccatggcaaaacccttg

SEQ ID NO: 12218 - DNA, 20 bp, Artificial Sequence
  MKO10012218_A_Cst8
  gRNA
gatactccatgccaaacttc

SEQ ID NO: 12219 - DNA, 20 bp, Artificial Sequence
  MKO10012219_A_Cst8
  gRNA
ttgacagatcacagaccgaa

SEQ ID NO: 12220 - DNA, 20 bp, Artificial Sequence
  MKO10012220_A_Cst9
  gRNA
gataggtaccgacagtaaac

SEQ ID NO: 12221 - DNA, 20 bp, Artificial Sequence
  MKO10012221_A_Cst9
  gRNA
ttccaaccgtgtattccatg

SEQ ID NO: 12222 - DNA, 20 bp, Artificial Sequence
  MKO10012222_A_Cst9
  gRNA
gttcacggcaaattccactg

SEQ ID NO: 12223 - DNA, 20 bp, Artificial Sequence
  MKO10012223_A_Cstad
  gRNA
ctggctgtaccaactcatga

SEQ ID NO: 12224 - DNA, 20 bp, Artificial Sequence
  MKO10012224_A_Cstad
  gRNA
ttccttgtgagcctccgtta

SEQ ID NO: 12225 - DNA, 20 bp, Artificial Sequence
  MKO10012225_A_Cstad
  gRNA
cactgagagccatcatgagt

SEQ ID NO: 12226 - DNA, 20 bp, Artificial Sequence
  MKO10012226_A_Csta
  gRNA
ggtcaaagcacagctcgaag

SEQ ID NO: 12227 - DNA, 20 bp, Artificial Sequence
  MKO10012227_A_Csta
  gRNA
tcacccggtcagcaatctcc

SEQ ID NO: 12228 - DNA, 20 bp, Artificial Sequence
  MKO10012228_A_Csta
  gRNA
tctggcctccgtcaagcctc

SEQ ID NO: 12229 - DNA, 20 bp, Artificial Sequence
  MKO10012229_A_Cstb
  gRNA
gacgcaggaggtcgccgacc

SEQ ID NO: 12230 - DNA, 20 bp, Artificial Sequence
  MKO10012230_A_Cstb
  gRNA
gtcggcgacctcctgcgtct

SEQ ID NO: 12231 - DNA, 20 bp, Artificial Sequence
  MKO10012231_A_Cstb
  gRNA
agataaatgcgtgcacttga

SEQ ID NO: 12232 - DNA, 20 bp, Artificial Sequence
  MKO10012232_A_Cstf1
  gRNA
gatttccacagggcggacgc

SEQ ID NO: 12233 - DNA, 20 bp, Artificial Sequence
  MKO10012233_A_Cstf1
  gRNA
ccgaactctttacgaccacg

SEQ ID NO: 12234 - DNA, 20 bp, Artificial Sequence
  MKO10012234_A_Cstf1
  gRNA
acggcaagtgcaccggacac

SEQ ID NO: 12235 - DNA, 20 bp, Artificial Sequence
  MKO10012235_A_Cstf2t
  gRNA
cgaacgcagcgatcgatcca

SEQ ID NO: 12236 - DNA, 20 bp, Artificial Sequence
  MKO10012236_A_Cstf2t
  gRNA
gagtcaatgatgggggccgc

SEQ ID NO: 12237 - DNA, 20 bp, Artificial Sequence
  MKO10012237_A_Cstf2t
  gRNA
catggatcgatcgctgcgtt

SEQ ID NO: 12238 - DNA, 20 bp, Artificial Sequence
  MKO10012238_A_Cstf2
  gRNA
gcactcaccagcgcaatctc

SEQ ID NO: 12239 - DNA, 20 bp, Artificial Sequence
  MKO10012239_A_Cstf2
  gRNA
tctgcagattggtatacgat

SEQ ID NO: 12240 - DNA, 20 bp, Artificial Sequence
  MKO10012240_A_Cstf2
  gRNA
tgtggatcctgagattgcgc

SEQ ID NO: 12241 - DNA, 20 bp, Artificial Sequence
  MKO10012241_A_Cstf3
  gRNA
gtagctgggcagtttaccct

SEQ ID NO: 12242 - DNA, 20 bp, Artificial Sequence
  MKO10012242_A_Cstf3
  gRNA
ttcatacgtcagagaaacca

SEQ ID NO: 12243 - DNA, 20 bp, Artificial Sequence
  MKO10012243_A_Cstf3
  gRNA
atcaacctatagacaaagca

SEQ ID NO: 12244 - DNA, 20 bp, Artificial Sequence
  MKO10012244_A_Cstl1
  gRNA
tgcttgcgttgttgtaagag

SEQ ID NO: 12245 - DNA, 20 bp, Artificial Sequence
  MKO10012245_A_Cstl1
  gRNA
gactgtggtcgtaatggcta

SEQ ID NO: 12246 - DNA, 20 bp, Artificial Sequence
  MKO10012246_A_Cstl1
  gRNA
gagctggtagtagttcatcc

SEQ ID NO: 12247 - DNA, 20 bp, Artificial Sequence
  MKO10012247_A_Cs
  gRNA
ctcaagggcatccgtttccg

SEQ ID NO: 12248 - DNA, 20 bp, Artificial Sequence
  MKO10012248_A_Cs
  gRNA
catgccgggcagcaaggacg

SEQ ID NO: 12249 - DNA, 20 bp, Artificial Sequence
  MKO10012249_A_Cs
  gRNA
actgagcaatctgataccta

SEQ ID NO: 12250 - DNA, 20 bp, Artificial Sequence
  MKO10012250_A_Ctag2
  gRNA
gcaagctcacatcgtactga

SEQ ID NO: 12251 - DNA, 20 bp, Artificial Sequence
  MKO10012251_A_Ctag2
  gRNA
tgagcaggcaccaattatcc

SEQ ID NO: 12252 - DNA, 20 bp, Artificial Sequence
  MKO10012252_A_Ctag2
  gRNA
catcccacgcccagtgttta

SEQ ID NO: 12253 - DNA, 20 bp, Artificial Sequence
  MKO10012253_A_Ctage5
  gRNA
acattctgaacaagacgagc

SEQ ID NO: 12254 - DNA, 20 bp, Artificial Sequence
  MKO10012254_A_Ctage5
  gRNA
agatgaaatactactcctag

SEQ ID NO: 12255 - DNA, 20 bp, Artificial Sequence
  MKO10012255_A_Ctage5
  gRNA
gcagtatgtgtgctttccgt

SEQ ID NO: 12256 - DNA, 20 bp, Artificial Sequence
  MKO10012256_A_Ctbp1
  gRNA
ttgcccgaagtgccaccgcc

SEQ ID NO: 12257 - DNA, 20 bp, Artificial Sequence
  MKO10012257_A_Ctbp1
  gRNA
acctgtaccgacgaaccacc

SEQ ID NO: 12258 - DNA, 20 bp, Artificial Sequence
  MKO10012258_A_Ctbp1
  gRNA
cccgctcgattccatcagat

SEQ ID NO: 12259 - DNA, 20 bp, Artificial Sequence
  MKO10012259_A_Ctbp2
  gRNA
cgattcgcacgatcactctc

SEQ ID NO: 12260 - DNA, 20 bp, Artificial Sequence
  MKO10012260_A_Ctbp2
  gRNA
ctgagagtgatcgtgcgaat

SEQ ID NO: 12261 - DNA, 20 bp, Artificial Sequence
  MKO10012261_A_Ctbp2
  gRNA
aacgatctctgggcgtgcaa

SEQ ID NO: 12262 - DNA, 20 bp, Artificial Sequence
  MKO10012262_A_Ctbs
  gRNA
gagtttccaacgtgagatcg

SEQ ID NO: 12263 - DNA, 20 bp, Artificial Sequence
  MKO10012263_A_Ctbs
  gRNA
atcctaccttcagagcatcg

SEQ ID NO: 12264 - DNA, 20 bp, Artificial Sequence
  MKO10012264_A_Ctbs
  gRNA
aggtaacctttgatgtagct

SEQ ID NO: 12265 - DNA, 20 bp, Artificial Sequence
  MKO10012265_A_Ctc1
  gRNA
cgtcccacctgctcagatac

SEQ ID NO: 12266 - DNA, 20 bp, Artificial Sequence
  MKO10012266_A_Ctc1
  gRNA
cttgttccgaatctcccaat

SEQ ID NO: 12267 - DNA, 20 bp, Artificial Sequence
  MKO10012267_A_Ctc1
  gRNA
cagtgttatccctcacatac

SEQ ID NO: 12268 - DNA, 20 bp, Artificial Sequence
  MKO10012268_A_Ctcfl
  gRNA
ttggtctgcctccgccgttt

SEQ ID NO: 12269 - DNA, 20 bp, Artificial Sequence
  MKO10012269_A_Ctcfl
  gRNA
gccagtgtgcttacgccagc

SEQ ID NO: 12270 - DNA, 20 bp, Artificial Sequence
  MKO10012270_A_Ctcfl
  gRNA
cgacgctggcgtacttgcac

SEQ ID NO: 12271 - DNA, 20 bp, Artificial Sequence
  MKO10012271_A_Ctcf
  gRNA
catagcccgaaaaagtgatt

SEQ ID NO: 12272 - DNA, 20 bp, Artificial Sequence
  MKO10012272_A_Ctcf
  gRNA
caagtgcccagactgcgata

SEQ ID NO: 12273 - DNA, 20 bp, Artificial Sequence
  MKO10012273_A_Ctcf
  gRNA
atgccgcaccaattctccac

SEQ ID NO: 12274 - DNA, 20 bp, Artificial Sequence
  MKO10012274_A_Ctdnep1
  gRNA
catactcacctaggcgattc

SEQ ID NO: 12275 - DNA, 20 bp, Artificial Sequence
  MKO10012275_A_Ctdnep1
  gRNA
gtggttcagcccaggtgaag

SEQ ID NO: 12276 - DNA, 20 bp, Artificial Sequence
  MKO10012276_A_Ctdnep1
  gRNA
tttcgtccagatccagcacc

SEQ ID NO: 12277 - DNA, 20 bp, Artificial Sequence
  MKO10012277_A_Ctdp1
  gRNA
caccatggaaaccgtcgctg

SEQ ID NO: 12278 - DNA, 20 bp, Artificial Sequence
  MKO10012278_A_Ctdp1
  gRNA
gctgctcagtcgtatgaatc

SEQ ID NO: 12279 - DNA, 20 bp, Artificial Sequence
  MKO10012279_A_Ctdp1
  gRNA
ggtccccctttccacagcga

SEQ ID NO: 12280 - DNA, 20 bp, Artificial Sequence
  MKO10012280_A_Ctdsp1
  gRNA
atggctcaccttggcaaggc

SEQ ID NO: 12281 - DNA, 20 bp, Artificial Sequence
  MKO10012281_A_Ctdsp1
  gRNA
cctggtgcacagctccttca

SEQ ID NO: 12282 - DNA, 20 bp, Artificial Sequence
  MKO10012282_A_Ctdsp1
  gRNA
gttcactgccagccttgcca

SEQ ID NO: 12283 - DNA, 20 bp, Artificial Sequence
  MKO10012283_A_Ctdsp2
  gRNA
tgctaccttggcgatggtgt

SEQ ID NO: 12284 - DNA, 20 bp, Artificial Sequence
  MKO10012284_A_Ctdsp2
  gRNA
tcctcgcctaagaaaccccg

SEQ ID NO: 12285 - DNA, 20 bp, Artificial Sequence
  MKO10012285_A_Ctdsp2
  gRNA
gtcaggtaccttggccaagc

SEQ ID NO: 12286 - DNA, 20 bp, Artificial Sequence
  MKO10012286_A_Ctdspl2
  gRNA
tcaattctactccgcttcga

SEQ ID NO: 12287 - DNA, 20 bp, Artificial Sequence
  MKO10012287_A_Ctdspl2
  gRNA
gtactcgtcagcccatgcag

SEQ ID NO: 12288 - DNA, 20 bp, Artificial Sequence
  MKO10012288_A_Ctdspl2
  gRNA
gctgacgagtacccactctc

SEQ ID NO: 12289 - DNA, 20 bp, Artificial Sequence
  MKO10012289_A_Ctdspl
  gRNA
tagtcgagcaccgtcacctc

SEQ ID NO: 12290 - DNA, 20 bp, Artificial Sequence
  MKO10012290_A_Ctdspl
  gRNA
atggttccgtcgatttcaac

SEQ ID NO: 12291 - DNA, 20 bp, Artificial Sequence
  MKO10012291_A_Ctdspl
  gRNA
cattgatctagacgaaaccc

SEQ ID NO: 12292 - DNA, 20 bp, Artificial Sequence
  MKO10012292_A_Ctf1
  gRNA
cgccatagaggccgcacacg

SEQ ID NO: 12293 - DNA, 20 bp, Artificial Sequence
  MKO10012293_A_Ctf1
  gRNA
ttccacgtgtgcggcctcta

SEQ ID NO: 12294 - DNA, 20 bp, Artificial Sequence
  MKO10012294_A_Ctf1
  gRNA
cggatcttggcctccaaatg

SEQ ID NO: 12295 - DNA, 20 bp, Artificial Sequence
  MKO10012295_A_Ctf2
  gRNA
tacatagtgacccgagaata

SEQ ID NO: 12296 - DNA, 20 bp, Artificial Sequence
  MKO10012296_A_Ctf2
  gRNA
tagccgttctgcatcttcca

SEQ ID NO: 12297 - DNA, 20 bp, Artificial Sequence
  MKO10012297_A_Ctf2
  gRNA
agatgggggccgcaggactg

SEQ ID NO: 12298 - DNA, 20 bp, Artificial Sequence
  MKO10012298_A_Ctgf
  gRNA
tatgatgcgagccaactgcc

SEQ ID NO: 12299 - DNA, 20 bp, Artificial Sequence
  MKO10012299_A_Ctgf
  gRNA
tcccccgccaaccgcaagat

SEQ ID NO: 12300 - DNA, 20 bp, Artificial Sequence
  MKO10012300_A_Ctgf
  gRNA
gacattgcgcgctgcagtcc

SEQ ID NO: 12301 - DNA, 20 bp, Artificial Sequence
  MKO10012301_A_Cthrc1
  gRNA
gcaggagttcccggtcgtga

SEQ ID NO: 12302 - DNA, 20 bp, Artificial Sequence
  MKO10012302_A_Cthrc1
  gRNA
ctcagaggcgctgatcggtg

SEQ ID NO: 12303 - DNA, 20 bp, Artificial Sequence
  MKO10012303_A_Cthrc1
  gRNA
ggaatgcatgctgtcagcgc

SEQ ID NO: 12304 - DNA, 20 bp, Artificial Sequence
  MKO10012304_A_Cth
  gRNA
aatcgctgcctctagcaatt

SEQ ID NO: 12305 - DNA, 20 bp, Artificial Sequence
  MKO10012305_A_Cth
  gRNA
caccctcctgaagtacctgt

SEQ ID NO: 12306 - DNA, 20 bp, Artificial Sequence
  MKO10012306_A_Cth
  gRNA
gcacaaattgtccacaaacg

SEQ ID NO: 12307 - DNA, 20 bp, Artificial Sequence
  MKO10012307_A_Ctif
  gRNA
cgccctctagtggtgccacc

SEQ ID NO: 12308 - DNA, 20 bp, Artificial Sequence
  MKO10012308_A_Ctif
  gRNA
tacccttctctgtcgatgtg

SEQ ID NO: 12309 - DNA, 20 bp, Artificial Sequence
  MKO10012309_A_Ctif
  gRNA
ggaccttctcaatgtcattc

SEQ ID NO: 12310 - DNA, 20 bp, Artificial Sequence
  MKO10012310_A_Ctla2a
  gRNA
atttgcaaaagcctacaatc

SEQ ID NO: 12311 - DNA, 20 bp, Artificial Sequence
  MKO10012311_A_Ctla2a
  gRNA
aaagacacagaagactcgtg

SEQ ID NO: 12312 - DNA, 20 bp, Artificial Sequence
  MKO10012312_A_Ctla2a
  gRNA
gaattcaagacaaattgcta

SEQ ID NO: 12313 - DNA, 20 bp, Artificial Sequence
  MKO10012313_A_Ctla2b
  gRNA
atttgcaaaagcctacagtc

SEQ ID NO: 12314 - DNA, 20 bp, Artificial Sequence
  MKO10012314_A_Ctla2b
  gRNA
tgtggaagctcaatgtgtag

SEQ ID NO: 12315 - DNA, 20 bp, Artificial Sequence
  MKO10012315_A_Ctla2b
  gRNA
tccatcccctgatccaagtt

SEQ ID NO: 12316 - DNA, 20 bp, Artificial Sequence
  MKO10012316_A_Ctla4
  gRNA
gatccttgtcgcagttagct

SEQ ID NO: 12317 - DNA, 20 bp, Artificial Sequence
  MKO10012317_A_Ctla4
  gRNA
taaacggcctttcagttgat

SEQ ID NO: 12318 - DNA, 20 bp, Artificial Sequence
  MKO10012318_A_Ctla4
  gRNA
gtacccaccgccatactttg

SEQ ID NO: 12319 - DNA, 20 bp, Artificial Sequence
  MKO10012319_A_Ctnna1
  gRNA
gccttataggctgcaacatc

SEQ ID NO: 12320 - DNA, 20 bp, Artificial Sequence
  MKO10012320_A_Ctnna1
  gRNA
gatttgatgaagagcgctgc

SEQ ID NO: 12321 - DNA, 20 bp, Artificial Sequence
  MKO10012321_A_Ctnna1
  gRNA
ccctgatgttgcagcctata

SEQ ID NO: 12322 - DNA, 20 bp, Artificial Sequence
  MKO10012322_A_Ctnna2
  gRNA
agcccgtgctgcacgcacca

SEQ ID NO: 12323 - DNA, 20 bp, Artificial Sequence
  MKO10012323_A_Ctnna2
  gRNA
caccatggtgcgtgcagcac

SEQ ID NO: 12324 - DNA, 20 bp, Artificial Sequence
  MKO10012324_A_Ctnna2
  gRNA
ccccttacctgtgtcacaag

SEQ ID NO: 12325 - DNA, 20 bp, Artificial Sequence
  MKO10012325_A_Ctnna3
  gRNA
tcaagccgcccgcgccctgt

SEQ ID NO: 12326 - DNA, 20 bp, Artificial Sequence
  MKO10012326_A_Ctnna3
  gRNA
cagggggcgctggcgcattc

SEQ ID NO: 12327 - DNA, 20 bp, Artificial Sequence
  MKO10012327_A_Ctnna3
  gRNA
ttcacagacggtgtccttac

SEQ ID NO: 12328 - DNA, 20 bp, Artificial Sequence
  MKO10012328_A_Ctnnal1
  gRNA
ccacacgctgaatcgcttgc

SEQ ID NO: 12329 - DNA, 20 bp, Artificial Sequence
  MKO10012329_A_Ctnnal1
  gRNA
cctgcaagcgattcagcgtg

SEQ ID NO: 12330 - DNA, 20 bp, Artificial Sequence
  MKO10012330_A_Ctnnal1
  gRNA
ccaccatttcgtttccaaac

SEQ ID NO: 12331 - DNA, 20 bp, Artificial Sequence
  MKO10012331_A_Ctnnb1
  gRNA
atgagcagcgtcaaactgcg

SEQ ID NO: 12332 - DNA, 20 bp, Artificial Sequence
  MKO10012332_A_Ctnnb1
  gRNA
agctacttgctcttgcgtga

SEQ ID NO: 12333 - DNA, 20 bp, Artificial Sequence
  MKO10012333_A_Ctnnb1
  gRNA
aaaatggcagtgcgcctagc

SEQ ID NO: 12334 - DNA, 20 bp, Artificial Sequence
  MKO10012334_A_Ctnnbip1
  gRNA
ccgtggctcaccctggtcga

SEQ ID NO: 12335 - DNA, 20 bp, Artificial Sequence
  MKO10012335_A_Ctnnbip1
  gRNA
tcttcccgggtgctccctcg

SEQ ID NO: 12336 - DNA, 20 bp, Artificial Sequence
  MKO10012336_A_Ctnnbip1
  gRNA
agcacccgggaagagtccgg

SEQ ID NO: 12337 - DNA, 20 bp, Artificial Sequence
  MKO10012337_A_Ctnnbl1
  gRNA
acgcggccgctatcgcgaag

SEQ ID NO: 12338 - DNA, 20 bp, Artificial Sequence
  MKO10012338_A_Ctnnbl1
  gRNA
tggcctcctcttcgcgatag

SEQ ID NO: 12339 - DNA, 20 bp, Artificial Sequence
  MKO10012339_A_Ctnnbl1
  gRNA
agaagttctcatcgacgccc

SEQ ID NO: 12340 - DNA, 20 bp, Artificial Sequence
  MKO10012340_A_Ctnnd1
  gRNA
tctggtccgattgctccgaa

SEQ ID NO: 12341 - DNA, 20 bp, Artificial Sequence
  MKO10012341_A_Ctnnd1
  gRNA
tgtggtctccgtgcgtctag

SEQ ID NO: 12342 - DNA, 20 bp, Artificial Sequence
  MKO10012342_A_Ctnnd1
  gRNA
tgatgggaccactagacgca

SEQ ID NO: 12343 - DNA, 20 bp, Artificial Sequence
  MKO10012343_A_Ctnnd2
  gRNA
tgcaagcttggctcggagac

SEQ ID NO: 12344 - DNA, 20 bp, Artificial Sequence
  MKO10012344_A_Ctnnd2
  gRNA
ttaaacacctccaatggtga

SEQ ID NO: 12345 - DNA, 20 bp, Artificial Sequence
  MKO10012345_A_Ctnnd2
  gRNA
tatcgaagatgaacttacaa

SEQ ID NO: 12346 - DNA, 20 bp, Artificial Sequence
  MKO10012346_A_Ctns
  gRNA
taacaggttatagtgcctcg

SEQ ID NO: 12347 - DNA, 20 bp, Artificial Sequence
  MKO10012347_A_Ctns
  gRNA
cccaagggtgatgtcgacgt

SEQ ID NO: 12348 - DNA, 20 bp, Artificial Sequence
  MKO10012348_A_Ctns
  gRNA
accaacgtcgacatcaccct

SEQ ID NO: 12349 - DNA, 20 bp, Artificial Sequence
  MKO10012349_A_Ctps2
  gRNA
cccgccaatgaagtatatcc

SEQ ID NO: 12350 - DNA, 20 bp, Artificial Sequence
  MKO10012350_A_Ctps2
  gRNA
ttgcctcaataacacatatc

SEQ ID NO: 12351 - DNA, 20 bp, Artificial Sequence
  MKO10012351_A_Ctps2
  gRNA
gagaatagtcccaatgctgc

SEQ ID NO: 12352 - DNA, 20 bp, Artificial Sequence
  MKO10012352_A_Ctps
  gRNA
ttaatacccgtagacgaaga

SEQ ID NO: 12353 - DNA, 20 bp, Artificial Sequence
  MKO10012353_A_Ctps
  gRNA
ccttgatatccgtctcacca

SEQ ID NO: 12354 - DNA, 20 bp, Artificial Sequence
  MKO10012354_A_Ctps
  gRNA
acctcaagtgtgtgttattg

SEQ ID NO: 12355 - DNA, 20 bp, Artificial Sequence
  MKO10012355_A_Ctr9
  gRNA
acaaagttgcctgcgtaata

SEQ ID NO: 12356 - DNA, 20 bp, Artificial Sequence
  MKO10012356_A_Ctr9
  gRNA
acttgacttcgatcagttac

SEQ ID NO: 12357 - DNA, 20 bp, Artificial Sequence
  MKO10012357_A_Ctr9
  gRNA
agtgaaactgtgcgtcagct

SEQ ID NO: 12358 - DNA, 20 bp, Artificial Sequence
  MKO10012358_A_Ctrb1
  gRNA
gctccctcatcagcgaaaac

SEQ ID NO: 12359 - DNA, 20 bp, Artificial Sequence
  MKO10012359_A_Ctrb1
  gRNA
aatgcctaggacaaccgatg

SEQ ID NO: 12360 - DNA, 20 bp, Artificial Sequence
  MKO10012360_A_Ctrb1
  gRNA
atcctctccgttgacgatcc

SEQ ID NO: 12361 - DNA, 20 bp, Artificial Sequence
  MKO10012361_A_Ctrc
  gRNA
cacaaacttgacctaccgcg

SEQ ID NO: 12362 - DNA, 20 bp, Artificial Sequence
  MKO10012362_A_Ctrc
  gRNA
tgaggaaggctccgtgtacg

SEQ ID NO: 12363 - DNA, 20 bp, Artificial Sequence
  MKO10012363_A_Ctrc
  gRNA
cgacatcgccatcatcaagt

SEQ ID NO: 12364 - DNA, 20 bp, Artificial Sequence
  MKO10012364_A_Ctrl
  gRNA
tacttacccttgcgatcgag

SEQ ID NO: 12365 - DNA, 20 bp, Artificial Sequence
  MKO10012365_A_Ctrl
  gRNA
tggacgccactttgtcgttt

SEQ ID NO: 12366 - DNA, 20 bp, Artificial Sequence
  MKO10012366_A_Ctrl
  gRNA
gttctctcatcagtccgaac

SEQ ID NO: 12367 - DNA, 20 bp, Artificial Sequence
  MKO10012367_A_Cts3
  gRNA
gacggaagtggctgtcatgc

SEQ ID NO: 12368 - DNA, 20 bp, Artificial Sequence
  MKO10012368_A_Cts3
  gRNA
ttccgtcaacacagtccact

SEQ ID NO: 12369 - DNA, 20 bp, Artificial Sequence
  MKO10012369_A_Cts3
  gRNA
gacttgccacagcactcatt

SEQ ID NO: 12370 - DNA, 20 bp, Artificial Sequence
  MKO10012370_A_Cts6
  gRNA
aaggctatgtgactcgagta

SEQ ID NO: 12371 - DNA, 20 bp, Artificial Sequence
  MKO10012371_A_Cts6
  gRNA
caatgtatggatcaccccat

SEQ ID NO: 12372 - DNA, 20 bp, Artificial Sequence
  MKO10012372_A_Cts6
  gRNA
attagaatatcttcgctttc

SEQ ID NO: 12373 - DNA, 20 bp, Artificial Sequence
  MKO10012373_A_Cts7
  gRNA
acctccccgatatgaatgaa

SEQ ID NO: 12374 - DNA, 20 bp, Artificial Sequence
  MKO10012374_A_Cts7
  gRNA
tgttatacctgtcttcgcac

SEQ ID NO: 12375 - DNA, 20 bp, Artificial Sequence
  MKO10012375_A_Cts7
  gRNA
ctcagtatcttatggcacca

SEQ ID NO: 12376 - DNA, 20 bp, Artificial Sequence
  MKO10012376_A_Cts8
  gRNA
agtatccaccaacctattgc

SEQ ID NO: 12377 - DNA, 20 bp, Artificial Sequence
  MKO10012377_A_Cts8
  gRNA
ctacttaccgttcctttgta

SEQ ID NO: 12378 - DNA, 20 bp, Artificial Sequence
  MKO10012378_A_Cts8
  gRNA
tgaagactggtgaggaatac

SEQ ID NO: 12379 - DNA, 20 bp, Artificial Sequence
  MKO10012379_A_Ctsa
  gRNA
tgcttcgttccgggacgccc

SEQ ID NO: 12380 - DNA, 20 bp, Artificial Sequence
  MKO10012380_A_Ctsa
  gRNA
gatgaaatcgattgtctccc

SEQ ID NO: 12381 - DNA, 20 bp, Artificial Sequence
  MKO10012381_A_Ctsa
  gRNA
gtacatcttgtcatccgagt

SEQ ID NO: 12382 - DNA, 20 bp, Artificial Sequence
  MKO10012382_A_Ctsb
  gRNA
tggtccaactgcccgaccat

SEQ ID NO: 12383 - DNA, 20 bp, Artificial Sequence
  MKO10012383_A_Ctsb
  gRNA
ccattgttcccgtgcatcaa

SEQ ID NO: 12384 - DNA, 20 bp, Artificial Sequence
  MKO10012384_A_Ctsb
  gRNA
cagacacctccacgttgact

SEQ ID NO: 12385 - DNA, 20 bp, Artificial Sequence
  MKO10012385_A_Ctsc
  gRNA
tacgacgagctgggcaattc

SEQ ID NO: 12386 - DNA, 20 bp, Artificial Sequence
  MKO10012386_A_Ctsc
  gRNA
tgagcctgcgagatctgata

SEQ ID NO: 12387 - DNA, 20 bp, Artificial Sequence
  MKO10012387_A_Ctsc
  gRNA
ttctccttatcagatctcgc

SEQ ID NO: 12388 - DNA, 20 bp, Artificial Sequence
  MKO10012388_A_Ctsd
  gRNA
atagatgtgaacttgcgcag

SEQ ID NO: 12389 - DNA, 20 bp, Artificial Sequence
  MKO10012389_A_Ctsd
  gRNA
gcaagttcacatctatccgt

SEQ ID NO: 12390 - DNA, 20 bp, Artificial Sequence
  MKO10012390_A_Ctsd
  gRNA
ctctgttaacaacgtgcttc

SEQ ID NO: 12391 - DNA, 20 bp, Artificial Sequence
  MKO10012391_A_Ctse
  gRNA
atcgcagtccgacacataca

SEQ ID NO: 12392 - DNA, 20 bp, Artificial Sequence
  MKO10012392_A_Ctse
  gRNA
cagctccaatgattcctgtc

SEQ ID NO: 12393 - DNA, 20 bp, Artificial Sequence
  MKO10012393_A_Ctse
  gRNA
tgaacccctcatcaactacc

SEQ ID NO: 12394 - DNA, 20 bp, Artificial Sequence
  MKO10012394_A_Ctsf
  gRNA
gccaccttgcaatgatcccc

SEQ ID NO: 12395 - DNA, 20 bp, Artificial Sequence
  MKO10012395_A_Ctsf
  gRNA
ctgtagcccagtgaatgcca

SEQ ID NO: 12396 - DNA, 20 bp, Artificial Sequence
  MKO10012396_A_Ctsf
  gRNA
cacaccaggggatcattgca

SEQ ID NO: 12397 - DNA, 20 bp, Artificial Sequence
  MKO10012397_A_Ctsg
  gRNA
acaacatccaaatgcgagaa

SEQ ID NO: 12398 - DNA, 20 bp, Artificial Sequence
  MKO10012398_A_Ctsg
  gRNA
gggccacattgctacatacc

SEQ ID NO: 12399 - DNA, 20 bp, Artificial Sequence
  MKO10012399_A_Ctsg
  gRNA
attacaatccgcagaacatc

SEQ ID NO: 12400 - DNA, 20 bp, Artificial Sequence
  MKO10012400_A_Ctsh
  gRNA
accaaaagtaactacctccg

SEQ ID NO: 12401 - DNA, 20 bp, Artificial Sequence
  MKO10012401_A_Ctsh
  gRNA
aagggtaggggcctgtacct

SEQ ID NO: 12402 - DNA, 20 bp, Artificial Sequence
  MKO10012402_A_Ctsh
  gRNA
taacctgaggctctgaccaa

SEQ ID NO: 12403 - DNA, 20 bp, Artificial Sequence
  MKO10012403_A_Ctsj
  gRNA
tagcactagcgttctcacta

SEQ ID NO: 12404 - DNA, 20 bp, Artificial Sequence
  MKO10012404_A_Ctsj
  gRNA
tcaaaacatactcgaatgct

SEQ ID NO: 12405 - DNA, 20 bp, Artificial Sequence
  MKO10012405_A_Ctsj
  gRNA
tagatgctacagcaacccat

SEQ ID NO: 12406 - DNA, 20 bp, Artificial Sequence
  MKO10012406_A_Ctsk
  gRNA
tcctttctttcgatagtcga

SEQ ID NO: 12407 - DNA, 20 bp, Artificial Sequence
  MKO10012407_A_Ctsk
  gRNA
tccatcgactatcgaaagaa

SEQ ID NO: 12408 - DNA, 20 bp, Artificial Sequence
  MKO10012408_A_Ctsk
  gRNA
ctccgttctgctgcacgtat

SEQ ID NO: 12409 - DNA, 20 bp, Artificial Sequence
  MKO10012409_A_Ctsll3
  gRNA
tagtgcagttggttcactag

SEQ ID NO: 12410 - DNA, 20 bp, Artificial Sequence
  MKO10012410_A_Ctsll3
  gRNA
caagtcgttccagttctaca

SEQ ID NO: 12411 - DNA, 20 bp, Artificial Sequence
  MKO10012411_A_Ctsll3
  gRNA
gcaagccaccatcgcagcct

SEQ ID NO: 12412 - DNA, 20 bp, Artificial Sequence
  MKO10012412_A_Ctsl
  gRNA
gtcttacccctatgaagcga

SEQ ID NO: 12413 - DNA, 20 bp, Artificial Sequence
  MKO10012413_A_Ctsl
  gRNA
accaattaccttcgcttcat

SEQ ID NO: 12414 - DNA, 20 bp, Artificial Sequence
  MKO10012414_A_Ctsl
  gRNA
atacagagccgagttcgctg

SEQ ID NO: 12415 - DNA, 20 bp, Artificial Sequence
  MKO10012415_A_Ctsm
  gRNA
taacagccccagttgccttg

SEQ ID NO: 12416 - DNA, 20 bp, Artificial Sequence
  MKO10012416_A_Ctsm
  gRNA
ccttgcattgcactatgtga

SEQ ID NO: 12417 - DNA, 20 bp, Artificial Sequence
  MKO10012417_A_Ctsm
  gRNA
aattctactgctaatataac

SEQ ID NO: 12418 - DNA, 20 bp, Artificial Sequence
  MKO10012418_A_Ctso
  gRNA
cgatgacctgctgcacgctc

SEQ ID NO: 12419 - DNA, 20 bp, Artificial Sequence
  MKO10012419_A_Ctso
  gRNA
ggattacctgagcgtgcagc

SEQ ID NO: 12420 - DNA, 20 bp, Artificial Sequence
  MKO10012420_A_Ctso
  gRNA
aaactgatttactccataga

SEQ ID NO: 12421 - DNA, 20 bp, Artificial Sequence
  MKO10012421_A_Ctsq
  gRNA
cgttggggtaatacatacaa

SEQ ID NO: 12422 - DNA, 20 bp, Artificial Sequence
  MKO10012422_A_Ctsq
  gRNA
ctttgcccaaatttgttgat

SEQ ID NO: 12423 - DNA, 20 bp, Artificial Sequence
  MKO10012423_A_Ctsq
  gRNA
actaaaggccccattgctac

SEQ ID NO: 12424 - DNA, 20 bp, Artificial Sequence
  MKO10012424_A_Ctsr
  gRNA
cttcatacctgtctccgtac

SEQ ID NO: 12425 - DNA, 20 bp, Artificial Sequence
  MKO10012425_A_Ctsr
  gRNA
ctttcgccaatcgacaaatt

SEQ ID NO: 12426 - DNA, 20 bp, Artificial Sequence
  MKO10012426_A_Ctsr
  gRNA
gactggtgccatagaagcac

SEQ ID NO: 12427 - DNA, 20 bp, Artificial Sequence
  MKO10012427_A_Ctss
  gRNA
ccatatcgttcatgcccact

SEQ ID NO: 12428 - DNA, 20 bp, Artificial Sequence
  MKO10012428_A_Ctss
  gRNA
ccaagtgggcatgaacgata

SEQ ID NO: 12429 - DNA, 20 bp, Artificial Sequence
  MKO10012429_A_Ctss
  gRNA
cacatgaagcatccacaatg

SEQ ID NO: 12430 - DNA, 20 bp, Artificial Sequence
  MKO10012430_A_Ctsw
  gRNA
ctttgctttacgccagtcac

SEQ ID NO: 12431 - DNA, 20 bp, Artificial Sequence
  MKO10012431_A_Ctsw
  gRNA
agcaaagaacatcatctcgt

SEQ ID NO: 12432 - DNA, 20 bp, Artificial Sequence
  MKO10012432_A_Ctsw
  gRNA
ggcagctgccgacaacatcc

SEQ ID NO: 12433 - DNA, 20 bp, Artificial Sequence
  MKO10012433_A_Ctsz
  gRNA
gcaacgatggcatcgagtac

SEQ ID NO: 12434 - DNA, 20 bp, Artificial Sequence
  MKO10012434_A_Ctsz
  gRNA
gtgctggttcctggtgacgc

SEQ ID NO: 12435 - DNA, 20 bp, Artificial Sequence
  MKO10012435_A_Ctsz
  gRNA
atggccgagatctatgccaa

SEQ ID NO: 12436 - DNA, 20 bp, Artificial Sequence
  MKO10012436_A_Cttnbp2nl
  gRNA
gaaccggacccgtgccctga

SEQ ID NO: 12437 - DNA, 20 bp, Artificial Sequence
  MKO10012437_A_Cttnbp2nl
  gRNA
agcgctggttgatcccgact

SEQ ID NO: 12438 - DNA, 20 bp, Artificial Sequence
  MKO10012438_A_Cttnbp2nl
  gRNA
actttcattgaagaacgcta

SEQ ID NO: 12439 - DNA, 20 bp, Artificial Sequence
  MKO10012439_A_Cttnbp2
  gRNA
tttaaaccggttcgaccaac

SEQ ID NO: 12440 - DNA, 20 bp, Artificial Sequence
  MKO10012440_A_Cttnbp2
  gRNA
actaggttgtcacgactcgt

SEQ ID NO: 12441 - DNA, 20 bp, Artificial Sequence
  MKO10012441_A_Cttnbp2
  gRNA
tttgttgtaggctcgcagga

SEQ ID NO: 12442 - DNA, 20 bp, Artificial Sequence
  MKO10012442_A_Cttn
  gRNA
atggggtgctaaaaccgtgc

SEQ ID NO: 12443 - DNA, 20 bp, Artificial Sequence
  MKO10012443_A_Cttn
  gRNA
cgaacttcccgccatagccg

SEQ ID NO: 12444 - DNA, 20 bp, Artificial Sequence
  MKO10012444_A_Cttn
  gRNA
tcctccatcatcctgcgtga

SEQ ID NO: 12445 - DNA, 20 bp, Artificial Sequence
  MKO10012445_A_Ctu1
  gRNA
cggtcccctccattgccgca

SEQ ID NO: 12446 - DNA, 20 bp, Artificial Sequence
  MKO10012446_A_Ctu1
  gRNA
gccctccgtcgcccacgttc

SEQ ID NO: 12447 - DNA, 20 bp, Artificial Sequence
  MKO10012447_A_Ctu1
  gRNA
ggcgctctgccgagtgcacg

SEQ ID NO: 12448 - DNA, 20 bp, Artificial Sequence
  MKO10012448_A_Ctu2
  gRNA
aaacggctgcgctttgtgcc

SEQ ID NO: 12449 - DNA, 20 bp, Artificial Sequence
  MKO10012449_A_Ctu2
  gRNA
cccgctcgtatcaccaccac

SEQ ID NO: 12450 - DNA, 20 bp, Artificial Sequence
  MKO10012450_A_Ctu2
  gRNA
ggacgaagggcccccagacc

SEQ ID NO: 12451 - DNA, 20 bp, Artificial Sequence
  MKO10012451_A_Ctxn1
  gRNA
ccgtgcgttgctcgacgtcc

SEQ ID NO: 12452 - DNA, 20 bp, Artificial Sequence
  MKO10012452_A_Ctxn1
  gRNA
tgtgagctatgagttcggcg

SEQ ID NO: 12453 - DNA, 20 bp, Artificial Sequence
  MKO10012453_A_Ctxn1
  gRNA
cacaaggaggcgctcgaacg

SEQ ID NO: 12454 - DNA, 20 bp, Artificial Sequence
  MKO10012454_A_Ctxn2
  gRNA
tcaggcaagtgcatactcaa

SEQ ID NO: 12455 - DNA, 20 bp, Artificial Sequence
  MKO10012455_A_Ctxn2
  gRNA
atgatgagtagcacctactg

SEQ ID NO: 12456 - DNA, 20 bp, Artificial Sequence
  MKO10012456_A_Ctxn2
  gRNA
gtagcatgccctcttctaca

SEQ ID NO: 12457 - DNA, 20 bp, Artificial Sequence
  MKO10012457_A_Ctxn3
  gRNA
tataatctgatccgttccca

SEQ ID NO: 12458 - DNA, 20 bp, Artificial Sequence
  MKO10012458_A_Ctxn3
  gRNA
gtccccactaagcaagggca

SEQ ID NO: 12459 - DNA, 20 bp, Artificial Sequence
  MKO10012459_A_Ctxn3
  gRNA
aagcccatcagcccatgttg

SEQ ID NO: 12460 - DNA, 20 bp, Artificial Sequence
  MKO10012460_A_Cubn
  gRNA
cctggtgtaaacattcgcca

SEQ ID NO: 12461 - DNA, 20 bp, Artificial Sequence
  MKO10012461_A_Cubn
  gRNA
agtccaccaacttaactcga

SEQ ID NO: 12462 - DNA, 20 bp, Artificial Sequence
  MKO10012462_A_Cubn
  gRNA
accttaccttcgagttaagt

SEQ ID NO: 12463 - DNA, 20 bp, Artificial Sequence
  MKO10012463_A_Cuedc1
  gRNA
atttccaaccgccgcattgt

SEQ ID NO: 12464 - DNA, 20 bp, Artificial Sequence
  MKO10012464_A_Cuedc1
  gRNA
tggacgctcaccggggaggt

SEQ ID NO: 12465 - DNA, 20 bp, Artificial Sequence
  MKO10012465_A_Cuedc1
  gRNA
accacatgcacgtgttcgac

SEQ ID NO: 12466 - DNA, 20 bp, Artificial Sequence
  MKO10012466_A_Cuedc2
  gRNA
tcccgggaacaccctagatg

SEQ ID NO: 12467 - DNA, 20 bp, Artificial Sequence
  MKO10012467_A_Cuedc2
  gRNA
tccaggagcacatcgactcc

SEQ ID NO: 12468 - DNA, 20 bp, Artificial Sequence
  MKO10012468_A_Cuedc2
  gRNA
ctccaagtccccccgagctt

SEQ ID NO: 12469 - DNA, 20 bp, Artificial Sequence
  MKO10012469_A_Cul1
  gRNA
gttcgccgtgaatgtgatga

SEQ ID NO: 12470 - DNA, 20 bp, Artificial Sequence
  MKO10012470_A_Cul1
  gRNA
ttcgtccttcatcacattca

SEQ ID NO: 12471 - DNA, 20 bp, Artificial Sequence
  MKO10012471_A_Cul1
  gRNA
ccaacaaactgagctccccc

SEQ ID NO: 12472 - DNA, 20 bp, Artificial Sequence
  MKO10012472_A_Cul2
  gRNA
taatttctcgaagcagcatc

SEQ ID NO: 12473 - DNA, 20 bp, Artificial Sequence
  MKO10012473_A_Cul2
  gRNA
cccttcagaacatcctcatc

SEQ ID NO: 12474 - DNA, 20 bp, Artificial Sequence
  MKO10012474_A_Cul2
  gRNA
atataagcagtccatatagt

SEQ ID NO: 12475 - DNA, 20 bp, Artificial Sequence
  MKO10012475_A_Cul3
  gRNA
gaccactgttattcttacgc

SEQ ID NO: 12476 - DNA, 20 bp, Artificial Sequence
  MKO10012476_A_Cul3
  gRNA
atccagcgtaagaataacag

SEQ ID NO: 12477 - DNA, 20 bp, Artificial Sequence
  MKO10012477_A_Cul3
  gRNA
aacttctcctttccgctctc

SEQ ID NO: 12478 - DNA, 20 bp, Artificial Sequence
  MKO10012478_A_Cul4a
  gRNA
cgtaggttcgatccagaaac

SEQ ID NO: 12479 - DNA, 20 bp, Artificial Sequence
  MKO10012479_A_Cul4a
  gRNA
cgcagctgcttgtagagcgt

SEQ ID NO: 12480 - DNA, 20 bp, Artificial Sequence
  MKO10012480_A_Cul4a
  gRNA
gtggcggaagcttcacgaag

SEQ ID NO: 12481 - DNA, 20 bp, Artificial Sequence
  MKO10012481_A_Cul4b
  gRNA
agtgcaccatgcaaacggcc

SEQ ID NO: 12482 - DNA, 20 bp, Artificial Sequence
  MKO10012482_A_Cul4b
  gRNA
tgaaggggacgccgaatctc

SEQ ID NO: 12483 - DNA, 20 bp, Artificial Sequence
  MKO10012483_A_Cul4b
  gRNA
tcgctcttaccggaagtgcc

SEQ ID NO: 12484 - DNA, 20 bp, Artificial Sequence
  MKO10012484_A_Cul5
  gRNA
cgtcagcgccgagctcgtcc

SEQ ID NO: 12485 - DNA, 20 bp, Artificial Sequence
  MKO10012485_A_Cul5
  gRNA
acgtcgccatgttctcaact

SEQ ID NO: 12486 - DNA, 20 bp, Artificial Sequence
  MKO10012486_A_Cul5
  gRNA
agtcccacttgtcttcaaac

SEQ ID NO: 12487 - DNA, 20 bp, Artificial Sequence
  MKO10012487_A_Cul7
  gRNA
catcgccgttcagccgatcc

SEQ ID NO: 12488 - DNA, 20 bp, Artificial Sequence
  MKO10012488_A_Cul7
  gRNA
atcggctgaacggcgatgca

SEQ ID NO: 12489 - DNA, 20 bp, Artificial Sequence
  MKO10012489_A_Cul7
  gRNA
ggaacacccgatgtctttcg

SEQ ID NO: 12490 - DNA, 20 bp, Artificial Sequence
  MKO10012490_A_Cul9
  gRNA
cggcatgcgggttcgcatcc

SEQ ID NO: 12491 - DNA, 20 bp, Artificial Sequence
  MKO10012491_A_Cul9
  gRNA
cgtattcaccataaccgctg

SEQ ID NO: 12492 - DNA, 20 bp, Artificial Sequence
  MKO10012492_A_Cul9
  gRNA
caggtcttctggcagtcgac

SEQ ID NO: 12493 - DNA, 20 bp, Artificial Sequence
  MKO10012493_A_Cutal
  gRNA
aaattgccagagacatcgcc

SEQ ID NO: 12494 - DNA, 20 bp, Artificial Sequence
  MKO10012494_A_Cutal
  gRNA
actatacctggcgatgtctc

SEQ ID NO: 12495 - DNA, 20 bp, Artificial Sequence
  MKO10012495_A_Cutal
  gRNA
cccggctgtttgcctatatg

SEQ ID NO: 12496 - DNA, 20 bp, Artificial Sequence
  MKO10012496_A_Cuta
  gRNA
tcgggctccggctacgttcc

SEQ ID NO: 12497 - DNA, 20 bp, Artificial Sequence
  MKO10012497_A_Cuta
  gRNA
gactgatcctggaacgtagc

SEQ ID NO: 12498 - DNA, 20 bp, Artificial Sequence
  MKO10012498_A_Cuta
  gRNA
ggcagtggtagagaagcgtc

SEQ ID NO: 12499 - DNA, 20 bp, Artificial Sequence
  MKO10012499_A_Cutc
  gRNA
atactccgaccgtgaagttg

SEQ ID NO: 12500 - DNA, 20 bp, Artificial Sequence
  MKO10012500_A_Cutc
  gRNA
tataagaagtcgcctccgcg

SEQ ID NO: 12501 - DNA, 20 bp, Artificial Sequence
  MKO10012501_A_Cutc
  gRNA
cttgcgagcggaaacaggcg

SEQ ID NO: 12502 - DNA, 20 bp, Artificial Sequence
  MKO10012502_A_Cux1
  gRNA
cacccaggatttacgcaagc

SEQ ID NO: 12503 - DNA, 20 bp, Artificial Sequence
  MKO10012503_A_Cux1
  gRNA
ctgctcaatgagccgctttc

SEQ ID NO: 12504 - DNA, 20 bp, Artificial Sequence
  MKO10012504_A_Cux1
  gRNA
ttgaaacatcgatcccacat

SEQ ID NO: 12505 - DNA, 20 bp, Artificial Sequence
  MKO10012505_A_Cux2
  gRNA
tacaagacgtgcacatcgcg

SEQ ID NO: 12506 - DNA, 20 bp, Artificial Sequence
  MKO10012506_A_Cux2
  gRNA
gtccgcgccacctcaaatga

SEQ ID NO: 12507 - DNA, 20 bp, Artificial Sequence
  MKO10012507_A_Cux2
  gRNA
acggggcacacgccagccaa

SEQ ID NO: 12508 - DNA, 20 bp, Artificial Sequence
  MKO10012508_A_Cuzd1
  gRNA
ggacaacttaccggtagcag

SEQ ID NO: 12509 - DNA, 20 bp, Artificial Sequence
  MKO10012509_A_Cuzd1
  gRNA
ggccgcagagttgtttgagc

SEQ ID NO: 12510 - DNA, 20 bp, Artificial Sequence
  MKO10012510_A_Cuzd1
  gRNA
gatttcatcgcagtctacga

SEQ ID NO: 12511 - DNA, 20 bp, Artificial Sequence
  MKO10012511_A_Cwc15
  gRNA
tacgggtacctcgagttggg

SEQ ID NO: 12512 - DNA, 20 bp, Artificial Sequence
  MKO10012512_A_Cwc15
  gRNA
aacagggaccgcccaactcg

SEQ ID NO: 12513 - DNA, 20 bp, Artificial Sequence
  MKO10012513_A_Cwc15
  gRNA
aaaacacatacgtctgtgag

SEQ ID NO: 12514 - DNA, 20 bp, Artificial Sequence
  MKO10012514_A_Cwc22
  gRNA
gagaactctgccctccgcct

SEQ ID NO: 12515 - DNA, 20 bp, Artificial Sequence
  MKO10012515_A_Cwc22
  gRNA
aggacaggtacctgtcttct

SEQ ID NO: 12516 - DNA, 20 bp, Artificial Sequence
  MKO10012516_A_Cwc22
  gRNA
agcagatcacagataaaagc

SEQ ID NO: 12517 - DNA, 20 bp, Artificial Sequence
  MKO10012517_A_Cwc25
  gRNA
aggctcaatctttgccccgt

SEQ ID NO: 12518 - DNA, 20 bp, Artificial Sequence
  MKO10012518_A_Cwc25
  gRNA
cccgcagacccttcgcaatg

SEQ ID NO: 12519 - DNA, 20 bp, Artificial Sequence
  MKO10012519_A_Cwc25
  gRNA
ggagatgcagcgctacgctg

SEQ ID NO: 12520 - DNA, 20 bp, Artificial Sequence
  MKO10012520_A_Cwc27
  gRNA
actggtggagaatctatcta

SEQ ID NO: 12521 - DNA, 20 bp, Artificial Sequence
  MKO10012521_A_Cwc27
  gRNA
gtccaaggtggagatcccac

SEQ ID NO: 12522 - DNA, 20 bp, Artificial Sequence
  MKO10012522_A_Cwc27
  gRNA
catcaatatctacttctgtc

SEQ ID NO: 12523 - DNA, 20 bp, Artificial Sequence
  MKO10012523_A_Cwf19l1
  gRNA
atatcttactcacgtccccg

SEQ ID NO: 12524 - DNA, 20 bp, Artificial Sequence
  MKO10012524_A_Cwf19l1
  gRNA
cccaaagctccccacgtact

SEQ ID NO: 12525 - DNA, 20 bp, Artificial Sequence
  MKO10012525_A_Cwf19l1
  gRNA
gtttgctgtctcctcgttat

SEQ ID NO: 12526 - DNA, 20 bp, Artificial Sequence
  MKO10012526_A_Cwf19l2
  gRNA
tcaattcgctcatgcacatc

SEQ ID NO: 12527 - DNA, 20 bp, Artificial Sequence
  MKO10012527_A_Cwf19l2
  gRNA
gtgaagaacgtaagcgactt

SEQ ID NO: 12528 - DNA, 20 bp, Artificial Sequence
  MKO10012528_A_Cwf19l2
  gRNA
atgtgacagccacgatattc

SEQ ID NO: 12529 - DNA, 20 bp, Artificial Sequence
  MKO10012529_A_Cwh43
  gRNA
aaatgctaagcttcgactga

SEQ ID NO: 12530 - DNA, 20 bp, Artificial Sequence
  MKO10012530_A_Cwh43
  gRNA
atcagtcgaagcttagcatt

SEQ ID NO: 12531 - DNA, 20 bp, Artificial Sequence
  MKO10012531_A_Cwh43
  gRNA
gtagctgtgcttgaccgaat

SEQ ID NO: 12532 - DNA, 20 bp, Artificial Sequence
  MKO10012532_A_Cx3cl1
  gRNA
cacaatggcacgcttgccgc

SEQ ID NO: 12533 - DNA, 20 bp, Artificial Sequence
  MKO10012533_A_Cx3cl1
  gRNA
tggctccctcgccgctcgcg

SEQ ID NO: 12534 - DNA, 20 bp, Artificial Sequence
  MKO10012534_A_Cx3cl1
  gRNA
tttcgcatttcgtcatgccg

SEQ ID NO: 12535 - DNA, 20 bp, Artificial Sequence
  MKO10012535_A_Cx3cr1
  gRNA
tacgccctcgtcttcacgtt

SEQ ID NO: 12536 - DNA, 20 bp, Artificial Sequence
  MKO10012536_A_Cx3cr1
  gRNA
ccagaccgaacgtgaagacg

SEQ ID NO: 12537 - DNA, 20 bp, Artificial Sequence
  MKO10012537_A_Cx3cr1
  gRNA
gatgaccgcacaggacggcc

SEQ ID NO: 12538 - DNA, 20 bp, Artificial Sequence
  MKO10012538_A_Cxadr
  gRNA
tagatacgcagtttcccctt

SEQ ID NO: 12539 - DNA, 20 bp, Artificial Sequence
  MKO10012539_A_Cxadr
  gRNA
aaattcctgctgaccgttct

SEQ ID NO: 12540 - DNA, 20 bp, Artificial Sequence
  MKO10012540_A_Cxadr
  gRNA
tactctcagtcccgaagacc

SEQ ID NO: 12541 - DNA, 20 bp, Artificial Sequence
  MKO10012541_A_Cxcl10
  gRNA
cagcggaccgtccttgcgag

SEQ ID NO: 12542 - DNA, 20 bp, Artificial Sequence
  MKO10012542_A_Cxcl10
  gRNA
tcactggcccgtcatcgata

SEQ ID NO: 12543 - DNA, 20 bp, Artificial Sequence
  MKO10012543_A_Cxcl10
  gRNA
tgaaagcgtttagccaaaaa

SEQ ID NO: 12544 - DNA, 20 bp, Artificial Sequence
  MKO10012544_A_Cxcl11
  gRNA
actttgtcgcagccgttact

SEQ ID NO: 12545 - DNA, 20 bp, Artificial Sequence
  MKO10012545_A_Cxcl11
  gRNA
ttcgtgtgcctcgtgatatt

SEQ ID NO: 12546 - DNA, 20 bp, Artificial Sequence
  MKO10012546_A_Cxcl11
  gRNA
gctcacagtcagacgttccc

SEQ ID NO: 12547 - DNA, 20 bp, Artificial Sequence
  MKO10012547_A_Cxcl12
  gRNA
cgatgtggctctcgaagaac

SEQ ID NO: 12548 - DNA, 20 bp, Artificial Sequence
  MKO10012548_A_Cxcl12
  gRNA
cgcccacgccatggacgcca

SEQ ID NO: 12549 - DNA, 20 bp, Artificial Sequence
  MKO10012549_A_Cxcl12
  gRNA
catcggtagctcaggctgac

SEQ ID NO: 12550 - DNA, 20 bp, Artificial Sequence
  MKO10012550_A_Cxcl13
  gRNA
cggattcaagttacgccccc

SEQ ID NO: 12551 - DNA, 20 bp, Artificial Sequence
  MKO10012551_A_Cxcl13
  gRNA
gtgtgaatcctcgtgccaaa

SEQ ID NO: 12552 - DNA, 20 bp, Artificial Sequence
  MKO10012552_A_Cxcl13
  gRNA
tctcaccgtggcctggagag

SEQ ID NO: 12553 - DNA, 20 bp, Artificial Sequence
  MKO10012553_A_Cxcl14
  gRNA
ctgtgcgcctcgcgcgtgga

SEQ ID NO: 12554 - DNA, 20 bp, Artificial Sequence
  MKO10012554_A_Cxcl14
  gRNA
gcactcaccgtccacgcgcg

SEQ ID NO: 12555 - DNA, 20 bp, Artificial Sequence
  MKO10012555_A_Cxcl14
  gRNA
gcttcttcacgtcgctgtag

SEQ ID NO: 12556 - DNA, 20 bp, Artificial Sequence
  MKO10012556_A_Cxcl15
  gRNA
ctgttggcccaattactaac

SEQ ID NO: 12557 - DNA, 20 bp, Artificial Sequence
  MKO10012557_A_Cxcl15
  gRNA
tcgtagctcttgagtgtcac

SEQ ID NO: 12558 - DNA, 20 bp, Artificial Sequence
  MKO10012558_A_Cxcl15
  gRNA
gctacgatgtctgtgtattc

SEQ ID NO: 12559 - DNA, 20 bp, Artificial Sequence
  MKO10012559_A_Cxcl16
  gRNA
ttgcagtccaaaagcgtgtg

SEQ ID NO: 12560 - DNA, 20 bp, Artificial Sequence
  MKO10012560_A_Cxcl16
  gRNA
ccagataccgcagggtactt

SEQ ID NO: 12561 - DNA, 20 bp, Artificial Sequence
  MKO10012561_A_Cxcl16
  gRNA
ccagtgggtccgtgaactag

SEQ ID NO: 12562 - DNA, 20 bp, Artificial Sequence
  MKO10012562_A_Cxcl17
  gRNA
gtgtccctgtgatcacgtca

SEQ ID NO: 12563 - DNA, 20 bp, Artificial Sequence
  MKO10012563_A_Cxcl17
  gRNA
gtgttggtccccgtggcttc

SEQ ID NO: 12564 - DNA, 20 bp, Artificial Sequence
  MKO10012564_A_Cxcl17
  gRNA
cctgcccttgacgtgatcac

SEQ ID NO: 12565 - DNA, 20 bp, Artificial Sequence
  MKO10012565_A_Cxcl1
  gRNA
ctcgcgaccattcttgagtg

SEQ ID NO: 12566 - DNA, 20 bp, Artificial Sequence
  MKO10012566_A_Cxcl1
  gRNA
atactcacatgacttcggtt

SEQ ID NO: 12567 - DNA, 20 bp, Artificial Sequence
  MKO10012567_A_Cxcl1
  gRNA
gcgctgcacagagaagcgag

SEQ ID NO: 12568 - DNA, 20 bp, Artificial Sequence
  MKO10012568_A_Cxcl2
  gRNA
ggggcgtcacactcaagctc

SEQ ID NO: 12569 - DNA, 20 bp, Artificial Sequence
  MKO10012569_A_Cxcl2
  gRNA
gcattgacagcgcagttcac

SEQ ID NO: 12570 - DNA, 20 bp, Artificial Sequence
  MKO10012570_A_Cxcl2
  gRNA
ccttgaccctgaagcccccc

SEQ ID NO: 12571 - DNA, 20 bp, Artificial Sequence
  MKO10012571_A_Cxcl3
  gRNA
ggggcgtcaccgtcaagctc

SEQ ID NO: 12572 - DNA, 20 bp, Artificial Sequence
  MKO10012572_A_Cxcl3
  gRNA
gaagtttgcctcaaccccca

SEQ ID NO: 12573 - DNA, 20 bp, Artificial Sequence
  MKO10012573_A_Cxcl3
  gRNA
agtgcctgaacaccctacca

SEQ ID NO: 12574 - DNA, 20 bp, Artificial Sequence
  MKO10012574_A_Cxcl5
  gRNA
catctcgccattcatgcgga

SEQ ID NO: 12575 - DNA, 20 bp, Artificial Sequence
  MKO10012575_A_Cxcl5
  gRNA
catccgcatgaatggcgaga

SEQ ID NO: 12576 - DNA, 20 bp, Artificial Sequence
  MKO10012576_A_Cxcl5
  gRNA
ttcctcagtcatagccgcaa

SEQ ID NO: 12577 - DNA, 20 bp, Artificial Sequence
  MKO10012577_A_Cxcl9
  gRNA
cccaaagtcgtcgtcgttca

SEQ ID NO: 12578 - DNA, 20 bp, Artificial Sequence
  MKO10012578_A_Cxcl9
  gRNA
tccttgaacgacgacgactt

SEQ ID NO: 12579 - DNA, 20 bp, Artificial Sequence
  MKO10012579_A_Cxcl9
  gRNA
atcgtgcattccttatcact

SEQ ID NO: 12580 - DNA, 20 bp, Artificial Sequence
  MKO10012580_A_Cxcr1
  gRNA
cgtccatgccacccgtacgc

SEQ ID NO: 12581 - DNA, 20 bp, Artificial Sequence
  MKO10012581_A_Cxcr1
  gRNA
cgtacgggtggcatggacga

SEQ ID NO: 12582 - DNA, 20 bp, Artificial Sequence
  MKO10012582_A_Cxcr1
  gRNA
cttggttaaattcgtgtgcg

SEQ ID NO: 12583 - DNA, 20 bp, Artificial Sequence
  MKO10012583_A_Cxcr2
  gRNA
aatgtcatcgcggcgctcac

SEQ ID NO: 12584 - DNA, 20 bp, Artificial Sequence
  MKO10012584_A_Cxcr2
  gRNA
tacgcagtacgaccctcaaa

SEQ ID NO: 12585 - DNA, 20 bp, Artificial Sequence
  MKO10012585_A_Cxcr2
  gRNA
tgtggttgtaatatacgtcc

SEQ ID NO: 12586 - DNA, 20 bp, Artificial Sequence
  MKO10012586_A_Cxcr3
  gRNA
attgaggcgctgatcgtagt

SEQ ID NO: 12587 - DNA, 20 bp, Artificial Sequence
  MKO10012587_A_Cxcr3
  gRNA
agcacctctccctacgatta

SEQ ID NO: 12588 - DNA, 20 bp, Artificial Sequence
  MKO10012588_A_Cxcr3
  gRNA
cagccaagccatgtaccttg

SEQ ID NO: 12589 - DNA, 20 bp, Artificial Sequence
  MKO10012589_A_Cxcr4
  gRNA
cgagacccaccattatatgc

SEQ ID NO: 12590 - DNA, 20 bp, Artificial Sequence
  MKO10012590_A_Cxcr4
  gRNA
tcgagagcatcgtgcacaag

SEQ ID NO: 12591 - DNA, 20 bp, Artificial Sequence
  MKO10012591_A_Cxcr4
  gRNA
ggacttacactcacactgat

SEQ ID NO: 12592 - DNA, 20 bp, Artificial Sequence
  MKO10012592_A_Cxcr5
  gRNA
gttacgtgggcgtggtccac

SEQ ID NO: 12593 - DNA, 20 bp, Artificial Sequence
  MKO10012593_A_Cxcr5
  gRNA
gcggaactttacgccagcga

SEQ ID NO: 12594 - DNA, 20 bp, Artificial Sequence
  MKO10012594_A_Cxcr5
  gRNA
gggctccatcacatacaata

SEQ ID NO: 12595 - DNA, 20 bp, Artificial Sequence
  MKO10012595_A_Cxcr6
  gRNA
taccaaggccttcaaccggc

SEQ ID NO: 12596 - DNA, 20 bp, Artificial Sequence
  MKO10012596_A_Cxcr6
  gRNA
taaagttccggaagaacgtc

SEQ ID NO: 12597 - DNA, 20 bp, Artificial Sequence
  MKO10012597_A_Cxcr6
  gRNA
tatagcctctgtcactacga

SEQ ID NO: 12598 - DNA, 20 bp, Artificial Sequence
  MKO10012598_A_Cxx1a
  gRNA
cgcagcgtcatggaaggcca

SEQ ID NO: 12599 - DNA, 20 bp, Artificial Sequence
  MKO10012599_A_Cxx1a
  gRNA
acacccgcttcatctcattc

SEQ ID NO: 12600 - DNA, 20 bp, Artificial Sequence
  MKO10012600_A_Cxx1a
  gRNA
cttcctgaatgagatgaagc

SEQ ID NO: 12601 - DNA, 20 bp, Artificial Sequence
  MKO10012601_A_Cxx1b
  gRNA
cgcagcgtcatggaaggcca

SEQ ID NO: 12602 - DNA, 20 bp, Artificial Sequence
  MKO10012602_A_Cxx1b
  gRNA
acacccgcttcatctcattc

SEQ ID NO: 12603 - DNA, 20 bp, Artificial Sequence
  MKO10012603_A_Cxx1b
  gRNA
cttcctgaatgagatgaagc

SEQ ID NO: 12604 - DNA, 20 bp, Artificial Sequence
  MKO10012604_A_Cxx1c
  gRNA
cttcgacaccgacaaacgca

SEQ ID NO: 12605 - DNA, 20 bp, Artificial Sequence
  MKO10012605_A_Cxx1c
  gRNA
acctcgccgccatggaccgc

SEQ ID NO: 12606 - DNA, 20 bp, Artificial Sequence
  MKO10012606_A_Cxx1c
  gRNA
ccataatcaacttaatccgg

SEQ ID NO: 12607 - DNA, 20 bp, Artificial Sequence
  MKO10012607_A_Cxxc1
  gRNA
cgaggcctgccgacgcactg

SEQ ID NO: 12608 - DNA, 20 bp, Artificial Sequence
  MKO10012608_A_Cxxc1
  gRNA
gttaccgccacaaaaagtgc

SEQ ID NO: 12609 - DNA, 20 bp, Artificial Sequence
  MKO10012609_A_Cxxc1
  gRNA
cggtaacgaatctccagctt

SEQ ID NO: 12610 - DNA, 20 bp, Artificial Sequence
  MKO10012610_A_Cxxc4
  gRNA
cgcgcatcggcatgtccccg

SEQ ID NO: 12611 - DNA, 20 bp, Artificial Sequence
  MKO10012611_A_Cxxc4
  gRNA
gccgcgttgtcgcagttcca

SEQ ID NO: 12612 - DNA, 20 bp, Artificial Sequence
  MKO10012612_A_Cxxc4
  gRNA
ccagcgctgaagcgttccga

SEQ ID NO: 12613 - DNA, 20 bp, Artificial Sequence
  MKO10012613_A_Cxxc5
  gRNA
gctcacagttgatgcgccgc

SEQ ID NO: 12614 - DNA, 20 bp, Artificial Sequence
  MKO10012614_A_Cxxc5
  gRNA
gccggcgccgaagccctcaa

SEQ ID NO: 12615 - DNA, 20 bp, Artificial Sequence
  MKO10012615_A_Cxxc5
  gRNA
ccagaaggtgatgcttccgt

SEQ ID NO: 12616 - DNA, 20 bp, Artificial Sequence
  MKO10012616_A_Cyb561a3
  gRNA
tgtaccgcctgccttcatcg

SEQ ID NO: 12617 - DNA, 20 bp, Artificial Sequence
  MKO10012617_A_Cyb561a3
  gRNA
agaggtgtgcgattctcgag

SEQ ID NO: 12618 - DNA, 20 bp, Artificial Sequence
  MKO10012618_A_Cyb561a3
  gRNA
tcaggaggcttcgcagccac

SEQ ID NO: 12619 - DNA, 20 bp, Artificial Sequence
  MKO10012619_A_Cyb561d1
  gRNA
gtctggttcccgctccagcg

SEQ ID NO: 12620 - DNA, 20 bp, Artificial Sequence
  MKO10012620_A_Cyb561d1
  gRNA
ggcgagccacccttgagacc

SEQ ID NO: 12621 - DNA, 20 bp, Artificial Sequence
  MKO10012621_A_Cyb561d1
  gRNA
ctgggtacaatggtagtccc

SEQ ID NO: 12622 - DNA, 20 bp, Artificial Sequence
  MKO10012622_A_Cyb561d2
  gRNA
gcagcccacctcgtggcgtt

SEQ ID NO: 12623 - DNA, 20 bp, Artificial Sequence
  MKO10012623_A_Cyb561d2
  gRNA
gtgcgcggaccttccgagag

SEQ ID NO: 12624 - DNA, 20 bp, Artificial Sequence
  MKO10012624_A_Cyb561d2
  gRNA
atgcctacctgtaccgcaag

SEQ ID NO: 12625 - DNA, 20 bp, Artificial Sequence
  MKO10012625_A_Cyb561
  gRNA
cgcacgaccaagatcttgca

SEQ ID NO: 12626 - DNA, 20 bp, Artificial Sequence
  MKO10012626_A_Cyb561
  gRNA
gttcgactaccacaagaaga

SEQ ID NO: 12627 - DNA, 20 bp, Artificial Sequence
  MKO10012627_A_Cyb561
  gRNA
gtacagcacgtttgaacctg

SEQ ID NO: 12628 - DNA, 20 bp, Artificial Sequence
  MKO10012628_A_Cyb5b
  gRNA
tataagaatagcgcccacga

SEQ ID NO: 12629 - DNA, 20 bp, Artificial Sequence
  MKO10012629_A_Cyb5b
  gRNA
cttaccttgtcatcgccttt

SEQ ID NO: 12630 - DNA, 20 bp, Artificial Sequence
  MKO10012630_A_Cyb5b
  gRNA
tttccagttcctgggcgtat

SEQ ID NO: 12631 - DNA, 20 bp, Artificial Sequence
  MKO10012631_A_Cyb5d1
  gRNA
gaacttacgtctctagtctg

SEQ ID NO: 12632 - DNA, 20 bp, Artificial Sequence
  MKO10012632_A_Cyb5d1
  gRNA
gcggcgggatatgtacgaag

SEQ ID NO: 12633 - DNA, 20 bp, Artificial Sequence
  MKO10012633_A_Cyb5d1
  gRNA
gcatgagataccgtaccccg

SEQ ID NO: 12634 - DNA, 20 bp, Artificial Sequence
  MKO10012634_A_Cyb5d2
  gRNA
aagccgctatagtgcgcccc

SEQ ID NO: 12635 - DNA, 20 bp, Artificial Sequence
  MKO10012635_A_Cyb5d2
  gRNA
cccctgggccgccgcgatag

SEQ ID NO: 12636 - DNA, 20 bp, Artificial Sequence
  MKO10012636_A_Cyb5d2
  gRNA
ctattctgaagccggtcttg

SEQ ID NO: 12637 - DNA, 20 bp, Artificial Sequence
  MKO10012637_A_Cyb5r1
  gRNA
tcgaagatcccgccggccgc

SEQ ID NO: 12638 - DNA, 20 bp, Artificial Sequence
  MKO10012638_A_Cyb5r1
  gRNA
gcataactgagcaacccgct

SEQ ID NO: 12639 - DNA, 20 bp, Artificial Sequence
  MKO10012639_A_Cyb5r1
  gRNA
tcttgtctagcaatcgcagc

SEQ ID NO: 12640 - DNA, 20 bp, Artificial Sequence
  MKO10012640_A_Cyb5r2
  gRNA
gccctgttggcccccgaaaa

SEQ ID NO: 12641 - DNA, 20 bp, Artificial Sequence
  MKO10012641_A_Cyb5r2
  gRNA
aaagccttgatcatcgtcac

SEQ ID NO: 12642 - DNA, 20 bp, Artificial Sequence
  MKO10012642_A_Cyb5r2
  gRNA
caccacctggggatgattgc

SEQ ID NO: 12643 - DNA, 20 bp, Artificial Sequence
  MKO10012643_A_Cyb5r3
  gRNA
ttgtcatcatcgctcgacac

SEQ ID NO: 12644 - DNA, 20 bp, Artificial Sequence
  MKO10012644_A_Cyb5r3
  gRNA
tgccatcgatcctagtcgag

SEQ ID NO: 12645 - DNA, 20 bp, Artificial Sequence
  MKO10012645_A_Cyb5r3
  gRNA
gtcgttgcagttgagccacg

SEQ ID NO: 12646 - DNA, 20 bp, Artificial Sequence
  MKO10012646_A_Cyb5r4
  gRNA
tcccatgctaggttcatcgt

SEQ ID NO: 12647 - DNA, 20 bp, Artificial Sequence
  MKO10012647_A_Cyb5r4
  gRNA
ttacaacgtcagcccttata

SEQ ID NO: 12648 - DNA, 20 bp, Artificial Sequence
  MKO10012648_A_Cyb5r4
  gRNA
ctctaggtacctttaaaaca

SEQ ID NO: 12649 - DNA, 20 bp, Artificial Sequence
  MKO10012649_A_Cyb5rl
  gRNA
cggcgagctcctcatgctag

SEQ ID NO: 12650 - DNA, 20 bp, Artificial Sequence
  MKO10012650_A_Cyb5rl
  gRNA
tgcctcaagtgctaccggac

SEQ ID NO: 12651 - DNA, 20 bp, Artificial Sequence
  MKO10012651_A_Cyb5rl
  gRNA
caggccgagccgactgttcc

SEQ ID NO: 12652 - DNA, 20 bp, Artificial Sequence
  MKO10012652_A_Cyb5
  gRNA
tctgatgtatcgcctctaca

SEQ ID NO: 12653 - DNA, 20 bp, Artificial Sequence
  MKO10012653_A_Cyb5
  gRNA
cccgacgtcctcaaaattct

SEQ ID NO: 12654 - DNA, 20 bp, Artificial Sequence
  MKO10012654_A_Cyb5
  gRNA
ggatactcttatcactactg

SEQ ID NO: 12655 - DNA, 20 bp, Artificial Sequence
  MKO10012655_A_Cyba
  gRNA
agcccggacgtagtaattcc

SEQ ID NO: 12656 - DNA, 20 bp, Artificial Sequence
  MKO10012656_A_Cyba
  gRNA
tcaaggttgtcggtgcctgc

SEQ ID NO: 12657 - DNA, 20 bp, Artificial Sequence
  MKO10012657_A_Cyba
  gRNA
aatgacttaccatcgctcca

SEQ ID NO: 12658 - DNA, 20 bp, Artificial Sequence
  MKO10012658_A_Cybb
  gRNA
atccaaagtgttgctcgaca

SEQ ID NO: 12659 - DNA, 20 bp, Artificial Sequence
  MKO10012659_A_Cybb
  gRNA
cacatctcttcaacgttgag

SEQ ID NO: 12660 - DNA, 20 bp, Artificial Sequence
  MKO10012660_A_Cybb
  gRNA
gatttcgacacactggcagc

SEQ ID NO: 12661 - DNA, 20 bp, Artificial Sequence
  MKO10012661_A_Cybrd1
  gRNA
tcgcaatcactgttccgaag

SEQ ID NO: 12662 - DNA, 20 bp, Artificial Sequence
  MKO10012662_A_Cybrd1
  gRNA
tgagcacgaagatcaccgac

SEQ ID NO: 12663 - DNA, 20 bp, Artificial Sequence
  MKO10012663_A_Cybrd1
  gRNA
catgacgattgcccggagag

SEQ ID NO: 12664 - DNA, 20 bp, Artificial Sequence
  MKO10012664_A_Cyc1
  gRNA
ttatgtggcgtaccgccacc

SEQ ID NO: 12665 - DNA, 20 bp, Artificial Sequence
  MKO10012665_A_Cyc1
  gRNA
tcagctacatcgttcgagct

SEQ ID NO: 12666 - DNA, 20 bp, Artificial Sequence
  MKO10012666_A_Cyc1
  gRNA
tagctcgaacgatgtagctg

SEQ ID NO: 12667 - DNA, 20 bp, Artificial Sequence
  MKO10012667_A_Cycs
  gRNA
tttctgtttaggcatcacct

SEQ ID NO: 12668 - DNA, 20 bp, Artificial Sequence
  MKO10012668_A_Cycs
  gRNA
cccgttacctttgttcttgt

SEQ ID NO: 12669 - DNA, 20 bp, Artificial Sequence
  MKO10012669_A_Cycs
  gRNA
aaaatgggtgatgttgaaaa

SEQ ID NO: 12670 - DNA, 20 bp, Artificial Sequence
  MKO10012670_A_Cyct
  gRNA
gtcctgtctttcgaccaaag

SEQ ID NO: 12671 - DNA, 20 bp, Artificial Sequence
  MKO10012671_A_Cyct
  gRNA
aacccgaagaaatatatccc

SEQ ID NO: 12672 - DNA, 20 bp, Artificial Sequence
  MKO10012672_A_Cyct
  gRNA
cgaaagacaggacaagcacc

SEQ ID NO: 12673 - DNA, 20 bp, Artificial Sequence
  MKO10012673_A_Cyfip1
  gRNA
acctacctgatagagcagcg

SEQ ID NO: 12674 - DNA, 20 bp, Artificial Sequence
  MKO10012674_A_Cyfip1
  gRNA
accgtcctcgctgctctatc

SEQ ID NO: 12675 - DNA, 20 bp, Artificial Sequence
  MKO10012675_A_Cyfip1
  gRNA
tttgcagaacgagatgctag

SEQ ID NO: 12676 - DNA, 20 bp, Artificial Sequence
  MKO10012676_A_Cyfip2
  gRNA
cgagatctacgagaagacgg

SEQ ID NO: 12677 - DNA, 20 bp, Artificial Sequence
  MKO10012677_A_Cyfip2
  gRNA
ctcgtagatctcgacccgat

SEQ ID NO: 12678 - DNA, 20 bp, Artificial Sequence
  MKO10012678_A_Cyfip2
  gRNA
taactttgacacgaacttcg

SEQ ID NO: 12679 - DNA, 20 bp, Artificial Sequence
  MKO10012679_A_Cygb
  gRNA
ggggtcttacggccctgaag

SEQ ID NO: 12680 - DNA, 20 bp, Artificial Sequence
  MKO10012680_A_Cygb
  gRNA
agctgcggaagcacgcctgc

SEQ ID NO: 12681 - DNA, 20 bp, Artificial Sequence
  MKO10012681_A_Cygb
  gRNA
ctgaagtactgcttggccga

SEQ ID NO: 12682 - DNA, 20 bp, Artificial Sequence
  MKO10012682_A_Cyhr1
  gRNA
aacggtcacttgatgtgcgc

SEQ ID NO: 12683 - DNA, 20 bp, Artificial Sequence
  MKO10012683_A_Cyhr1
  gRNA
cagtgcaagtacaagcgtat

SEQ ID NO: 12684 - DNA, 20 bp, Artificial Sequence
  MKO10012684_A_Cyhr1
  gRNA
ggatgtctgtcgttgggccc

SEQ ID NO: 12685 - DNA, 20 bp, Artificial Sequence
  MKO10012685_A_Cylc1
  gRNA
tccgaatctgaagattcgtc

SEQ ID NO: 12686 - DNA, 20 bp, Artificial Sequence
  MKO10012686_A_Cylc1
  gRNA
gactctactggtagtggatc

SEQ ID NO: 12687 - DNA, 20 bp, Artificial Sequence
  MKO10012687_A_Cylc1
  gRNA
aatgtaatcatcatatgttg

SEQ ID NO: 12688 - DNA, 20 bp, Artificial Sequence
  MKO10012688_A_Cylc2
  gRNA
caagggagagtcgaaaagcg

SEQ ID NO: 12689 - DNA, 20 bp, Artificial Sequence
  MKO10012689_A_Cylc2
  gRNA
catccgtttatttagctgcc

SEQ ID NO: 12690 - DNA, 20 bp, Artificial Sequence
  MKO10012690_A_Cylc2
  gRNA
gcatacgataattacattcc

SEQ ID NO: 12691 - DNA, 20 bp, Artificial Sequence
  MKO10012691_A_Cyld
  gRNA
tgtttcagatagcgtgacac

SEQ ID NO: 12692 - DNA, 20 bp, Artificial Sequence
  MKO10012692_A_Cyld
  gRNA
cctctgaagcgtacaactcc

SEQ ID NO: 12693 - DNA, 20 bp, Artificial Sequence
  MKO10012693_A_Cyld
  gRNA
accgtcctctccgctaataa

SEQ ID NO: 12694 - DNA, 20 bp, Artificial Sequence
  MKO10012694_A_Cym
  gRNA
agtgagaagaactcccgcat

SEQ ID NO: 12695 - DNA, 20 bp, Artificial Sequence
  MKO10012695_A_Cym
  gRNA
tgttctccgtttacatgagc

SEQ ID NO: 12696 - DNA, 20 bp, Artificial Sequence
  MKO10012696_A_Cym
  gRNA
ctacattgggacaccaccgc

SEQ ID NO: 12697 - DNA, 20 bp, Artificial Sequence
  MKO10012697_A_Cyp11a1
  gRNA
ccgaatcgtcctaaaccaag

SEQ ID NO: 12698 - DNA, 20 bp, Artificial Sequence
  MKO10012698_A_Cyp11a1
  gRNA
gaagagtatcgacgcatcct

SEQ ID NO: 12699 - DNA, 20 bp, Artificial Sequence
  MKO10012699_A_Cyp11a1
  gRNA
cctcttggtttaggacgatt

SEQ ID NO: 12700 - DNA, 20 bp, Artificial Sequence
  MKO10012700_A_Cyp11b1
  gRNA
gattgtgtttgtgacgttgc

SEQ ID NO: 12701 - DNA, 20 bp, Artificial Sequence
  MKO10012701_A_Cyp11b1
  gRNA
attccaagggcatgcggcaa

SEQ ID NO: 12702 - DNA, 20 bp, Artificial Sequence
  MKO10012702_A_Cyp11b1
  gRNA
tgacccgatggacaagcacc

SEQ ID NO: 12703 - DNA, 20 bp, Artificial Sequence
  MKO10012703_A_Cyp11b2
  gRNA
gctccaggtgcatccgacgg

SEQ ID NO: 12704 - DNA, 20 bp, Artificial Sequence
  MKO10012704_A_Cyp11b2
  gRNA
tggagagtatgctcccccgt

SEQ ID NO: 12705 - DNA, 20 bp, Artificial Sequence
  MKO10012705_A_Cyp11b2
  gRNA
tacccaagagcttgactcgc

SEQ ID NO: 12706 - DNA, 20 bp, Artificial Sequence
  MKO10012706_A_Cyp17a1
  gRNA
ggacatattcccgtggttga

SEQ ID NO: 12707 - DNA, 20 bp, Artificial Sequence
  MKO10012707_A_Cyp17a1
  gRNA
ggagctactactatccgcaa

SEQ ID NO: 12708 - DNA, 20 bp, Artificial Sequence
  MKO10012708_A_Cyp17a1
  gRNA
agatgtctcccaccgtgaca

SEQ ID NO: 12709 - DNA, 20 bp, Artificial Sequence
  MKO10012709_A_Cyp19a1
  gRNA
gcccacgcttgctgccgaat

SEQ ID NO: 12710 - DNA, 20 bp, Artificial Sequence
  MKO10012710_A_Cyp19a1
  gRNA
tccaccattcgaacaagacc

SEQ ID NO: 12711 - DNA, 20 bp, Artificial Sequence
  MKO10012711_A_Cyp19a1
  gRNA
agtcactacatctcccgatt

SEQ ID NO: 12712 - DNA, 20 bp, Artificial Sequence
  MKO10012712_A_Cyp1a1
  gRNA
tacacgtaccagctccaaag

SEQ ID NO: 12713 - DNA, 20 bp, Artificial Sequence
  MKO10012713_A_Cyp1a1
  gRNA
cagtcacaactgctatctcg

SEQ ID NO: 12714 - DNA, 20 bp, Artificial Sequence
  MKO10012714_A_Cyp1a1
  gRNA
tgtcctgacaatgctcaatg

SEQ ID NO: 12715 - DNA, 20 bp, Artificial Sequence
  MKO10012715_A_Cyp1a2
  gRNA
tatgtagatacagcgctcct

SEQ ID NO: 12716 - DNA, 20 bp, Artificial Sequence
  MKO10012716_A_Cyp1a2
  gRNA
tggggacggtcagaaagccg

SEQ ID NO: 12717 - DNA, 20 bp, Artificial Sequence
  MKO10012717_A_Cyp1a2
  gRNA
tgctttacagacacggtggt

SEQ ID NO: 12718 - DNA, 20 bp, Artificial Sequence
  MKO10012718_A_Cyp1b1
  gRNA
gccgccgcgtttccgatcag

SEQ ID NO: 12719 - DNA, 20 bp, Artificial Sequence
  MKO10012719_A_Cyp1b1
  gRNA
atcggaaacgcggcggctgt

SEQ ID NO: 12720 - DNA, 20 bp, Artificial Sequence
  MKO10012720_A_Cyp1b1
  gRNA
tctaaacgacttgggcttaa

SEQ ID NO: 12721 - DNA, 20 bp, Artificial Sequence
  MKO10012721_A_Cyp20a1
  gRNA
caggcgtcttgtggttagct

SEQ ID NO: 12722 - DNA, 20 bp, Artificial Sequence
  MKO10012722_A_Cyp20a1
  gRNA
atccgattccaaaagattca

SEQ ID NO: 12723 - DNA, 20 bp, Artificial Sequence
  MKO10012723_A_Cyp20a1
  gRNA
catacagtttcctcctcacg

SEQ ID NO: 12724 - DNA, 20 bp, Artificial Sequence
  MKO10012724_A_Cyp21a1
  gRNA
ggccgaccccatatgctaaa

SEQ ID NO: 12725 - DNA, 20 bp, Artificial Sequence
  MKO10012725_A_Cyp21a1
  gRNA
aacccttaccatttagcata

SEQ ID NO: 12726 - DNA, 20 bp, Artificial Sequence
  MKO10012726_A_Cyp21a1
  gRNA
aggagatgatactacaagtg

SEQ ID NO: 12727 - DNA, 20 bp, Artificial Sequence
  MKO10012727_A_Cyp24a1
  gRNA
ttcgttgcgatggtcccgat

SEQ ID NO: 12728 - DNA, 20 bp, Artificial Sequence
  MKO10012728_A_Cyp24a1
  gRNA
gcccagatgcaccgagtcga

SEQ ID NO: 12729 - DNA, 20 bp, Artificial Sequence
  MKO10012729_A_Cyp24a1
  gRNA
aaagaaactcatgaagcccg

SEQ ID NO: 12730 - DNA, 20 bp, Artificial Sequence
  MKO10012730_A_Cyp26a1
  gRNA
cgcgtcggtgcgcaccatcc

SEQ ID NO: 12731 - DNA, 20 bp, Artificial Sequence
  MKO10012731_A_Cyp26a1
  gRNA
tacccggtacaggccgctaa

SEQ ID NO: 12732 - DNA, 20 bp, Artificial Sequence
  MKO10012732_A_Cyp26a1
  gRNA
cctcgatgcgcgcgtgtata

SEQ ID NO: 12733 - DNA, 20 bp, Artificial Sequence
  MKO10012733_A_Cyp26b1
  gRNA
ccattcggaaggtaagtcgc

SEQ ID NO: 12734 - DNA, 20 bp, Artificial Sequence
  MKO10012734_A_Cyp26b1
  gRNA
agtgcggtagccgcctgaga

SEQ ID NO: 12735 - DNA, 20 bp, Artificial Sequence
  MKO10012735_A_Cyp26b1
  gRNA
catccaccgcaacaagcgca

SEQ ID NO: 12736 - DNA, 20 bp, Artificial Sequence
  MKO10012736_A_Cyp26c1
  gRNA
agttcccgccgcgagcgcta

SEQ ID NO: 12737 - DNA, 20 bp, Artificial Sequence
  MKO10012737_A_Cyp26c1
  gRNA
ggtaaacagccaccggtcgt

SEQ ID NO: 12738 - DNA, 20 bp, Artificial Sequence
  MKO10012738_A_Cyp26c1
  gRNA
cgcagtcgacgtagcgcaaa

SEQ ID NO: 12739 - DNA, 20 bp, Artificial Sequence
  MKO10012739_A_Cyp27a1
  gRNA
tgacgaggccgcgctctaca

SEQ ID NO: 12740 - DNA, 20 bp, Artificial Sequence
  MKO10012740_A_Cyp27a1
  gRNA
gtgtagagcgcggcctcgtc

SEQ ID NO: 12741 - DNA, 20 bp, Artificial Sequence
  MKO10012741_A_Cyp27a1
  gRNA
tcacgcgatgaagatcccat

SEQ ID NO: 12742 - DNA, 20 bp, Artificial Sequence
  MKO10012742_A_Cyp27b1
  gRNA
gggcccgcctctgccgagac

SEQ ID NO: 12743 - DNA, 20 bp, Artificial Sequence
  MKO10012743_A_Cyp27b1
  gRNA
ctcctggccaggtataggcg

SEQ ID NO: 12744 - DNA, 20 bp, Artificial Sequence
  MKO10012744_A_Cyp27b1
  gRNA
gtgaccttgtgcgacgacta

SEQ ID NO: 12745 - DNA, 20 bp, Artificial Sequence
  MKO10012745_A_Cyp2a12
  gRNA
gtccactgaactcctcagcg

SEQ ID NO: 12746 - DNA, 20 bp, Artificial Sequence
  MKO10012746_A_Cyp2a12
  gRNA
cgccgggttgtggtgcttta

SEQ ID NO: 12747 - DNA, 20 bp, Artificial Sequence
  MKO10012747_A_Cyp2a12
  gRNA
catgccgaaatctctcagtg

SEQ ID NO: 12748 - DNA, 20 bp, Artificial Sequence
  MKO10012748_A_Cyp2a22
  gRNA
cgccgggttgtggtgctata

SEQ ID NO: 12749 - DNA, 20 bp, Artificial Sequence
  MKO10012749_A_Cyp2a22
  gRNA
caagccgaaatccttcagtg

SEQ ID NO: 12750 - DNA, 20 bp, Artificial Sequence
  MKO10012750_A_Cyp2a22
  gRNA
cggcttgggcaagcgaggta

SEQ ID NO: 12751 - DNA, 20 bp, Artificial Sequence
  MKO10012751_A_Cyp2a4
  gRNA
gtcattagctcaatcgtctt

SEQ ID NO: 12752 - DNA, 20 bp, Artificial Sequence
  MKO10012752_A_Cyp2a4
  gRNA
gcatcattctaagaagtgac

SEQ ID NO: 12753 - DNA, 20 bp, Artificial Sequence
  MKO10012753_A_Cyp2a4
  gRNA
cccagatagatggtgaatac

SEQ ID NO: 12754 - DNA, 20 bp, Artificial Sequence
  MKO10012754_A_Cyp2a5
  gRNA
tcctgtattcaccatctacc

SEQ ID NO: 12755 - DNA, 20 bp, Artificial Sequence
  MKO10012755_A_Cyp2a5
  gRNA
gcttctccatcgccacgctg

SEQ ID NO: 12756 - DNA, 20 bp, Artificial Sequence
  MKO10012756_A_Cyp2a5
  gRNA
cccaggtagatggtgaatac

SEQ ID NO: 12757 - DNA, 20 bp, Artificial Sequence
  MKO10012757_A_Cyp2ab1
  gRNA
agtggtgatcgacctgtttc

SEQ ID NO: 12758 - DNA, 20 bp, Artificial Sequence
  MKO10012758_A_Cyp2ab1
  gRNA
ccacagctacaacgctgcta

SEQ ID NO: 12759 - DNA, 20 bp, Artificial Sequence
  MKO10012759_A_Cyp2ab1
  gRNA
ccttagcagcgttgtagctg

SEQ ID NO: 12760 - DNA, 20 bp, Artificial Sequence
  MKO10012760_A_Cyp2b10
  gRNA
ccgtcagttcttgcgcctgc

SEQ ID NO: 12761 - DNA, 20 bp, Artificial Sequence
  MKO10012761_A_Cyp2b10
  gRNA
tggccagagagaatctacga

SEQ ID NO: 12762 - DNA, 20 bp, Artificial Sequence
  MKO10012762_A_Cyp2b10
  gRNA
tgatatttaccttctgcgca

SEQ ID NO: 12763 - DNA, 20 bp, Artificial Sequence
  MKO10012763_A_Cyp2b13
  gRNA
caacttcattacccatcgtg

SEQ ID NO: 12764 - DNA, 20 bp, Artificial Sequence
  MKO10012764_A_Cyp2b13
  gRNA
acatcagattcagcaaacgc

SEQ ID NO: 12765 - DNA, 20 bp, Artificial Sequence
  MKO10012765_A_Cyp2b13
  gRNA
tgatattggctgtaacacac

SEQ ID NO: 12766 - DNA, 20 bp, Artificial Sequence
  MKO10012766_A_Cyp2b19
  gRNA
tgatatttgctacgatgcac

SEQ ID NO: 12767 - DNA, 20 bp, Artificial Sequence
  MKO10012767_A_Cyp2b19
  gRNA
tgtcccgcacaacatgacca

SEQ ID NO: 12768 - DNA, 20 bp, Artificial Sequence
  MKO10012768_A_Cyp2b19
  gRNA
aggcccgtggtcatgttgtg

SEQ ID NO: 12769 - DNA, 20 bp, Artificial Sequence
  MKO10012769_A_Cyp2b23
  gRNA
agtgattcagccaattgtac

SEQ ID NO: 12770 - DNA, 20 bp, Artificial Sequence
  MKO10012770_A_Cyp2b23
  gRNA
ttgcagcttcgtgacaaaca

SEQ ID NO: 12771 - DNA, 20 bp, Artificial Sequence
  MKO10012771_A_Cyp2b23
  gRNA
tctgatagaacagatcaagc

SEQ ID NO: 12772 - DNA, 20 bp, Artificial Sequence
  MKO10012772_A_Cyp2b9
  gRNA
tcatcctctaggagtgcccc

SEQ ID NO: 12773 - DNA, 20 bp, Artificial Sequence
  MKO10012773_A_Cyp2b9
  gRNA
ggccagaaaaagcctcagcg

SEQ ID NO: 12774 - DNA, 20 bp, Artificial Sequence
  MKO10012774_A_Cyp2b9
  gRNA
cgactacattgcccatagtg

SEQ ID NO: 12775 - DNA, 20 bp, Artificial Sequence
  MKO10012775_A_Cyp2c29
  gRNA
tacccatgcaatatgacagt

SEQ ID NO: 12776 - DNA, 20 bp, Artificial Sequence
  MKO10012776_A_Cyp2c29
  gRNA
aagcctactgtcatattgca

SEQ ID NO: 12777 - DNA, 20 bp, Artificial Sequence
  MKO10012777_A_Cyp2c29
  gRNA
taaggaatttcttatcctca

SEQ ID NO: 12778 - DNA, 20 bp, Artificial Sequence
  MKO10012778_A_Cyp2c37
  gRNA
ttaggccttgcatttagtaa

SEQ ID NO: 12779 - DNA, 20 bp, Artificial Sequence
  MKO10012779_A_Cyp2c37
  gRNA
gtttctcactcatgacgctg

SEQ ID NO: 12780 - DNA, 20 bp, Artificial Sequence
  MKO10012780_A_Cyp2c37
  gRNA
caaagattctgagcagccct

SEQ ID NO: 12781 - DNA, 20 bp, Artificial Sequence
  MKO10012781_A_Cyp2c38
  gRNA
cggcccattgttgtattgca

SEQ ID NO: 12782 - DNA, 20 bp, Artificial Sequence
  MKO10012782_A_Cyp2c38
  gRNA
gtttcacactcatgacccta

SEQ ID NO: 12783 - DNA, 20 bp, Artificial Sequence
  MKO10012783_A_Cyp2c38
  gRNA
atacccatgcaatacaacaa

SEQ ID NO: 12784 - DNA, 20 bp, Artificial Sequence
  MKO10012784_A_Cyp2c39
  gRNA
gaaaagattaataacggcct

SEQ ID NO: 12785 - DNA, 20 bp, Artificial Sequence
  MKO10012785_A_Cyp2c39
  gRNA
ttcccattcccaaatttcgc

SEQ ID NO: 12786 - DNA, 20 bp, Artificial Sequence
  MKO10012786_A_Cyp2c39
  gRNA
cggcccactgttgtattaca

SEQ ID NO: 12787 - DNA, 20 bp, Artificial Sequence
  MKO10012787_A_Cyp2c40
  gRNA
gtagaaaccttgtcaaaaac

SEQ ID NO: 12788 - DNA, 20 bp, Artificial Sequence
  MKO10012788_A_Cyp2c40
  gRNA
aaaagtttattatgacttcc

SEQ ID NO: 12789 - DNA, 20 bp, Artificial Sequence
  MKO10012789_A_Cyp2c40
  gRNA
cctgtgttcactctgtattt

SEQ ID NO: 12790 - DNA, 20 bp, Artificial Sequence
  MKO10012790_A_Cyp2c44
  gRNA
acttcatgatcgtcggccat

SEQ ID NO: 12791 - DNA, 20 bp, Artificial Sequence
  MKO10012791_A_Cyp2c44
  gRNA
tggcctaccgtggtcctaca

SEQ ID NO: 12792 - DNA, 20 bp, Artificial Sequence
  MKO10012792_A_Cyp2c44
  gRNA
aaacagtcgatgtaatcccg

SEQ ID NO: 12793 - DNA, 20 bp, Artificial Sequence
  MKO10012793_A_Cyp2c50
  gRNA
ccaagataatgagcacccct

SEQ ID NO: 12794 - DNA, 20 bp, Artificial Sequence
  MKO10012794_A_Cyp2c50
  gRNA
gcttctcactcacgactctg

SEQ ID NO: 12795 - DNA, 20 bp, Artificial Sequence
  MKO10012795_A_Cyp2c50
  gRNA
tatccttcagatcaatgtga

SEQ ID NO: 12796 - DNA, 20 bp, Artificial Sequence
  MKO10012796_A_Cyp2c54
  gRNA
gaccatggggatgtctttgc

SEQ ID NO: 12797 - DNA, 20 bp, Artificial Sequence
  MKO10012797_A_Cyp2c54
  gRNA
tctaaacttgttggaaaaac

SEQ ID NO: 12798 - DNA, 20 bp, Artificial Sequence
  MKO10012798_A_Cyp2c54
  gRNA
ttacctgggctcctttaatt

SEQ ID NO: 12799 - DNA, 20 bp, Artificial Sequence
  MKO10012799_A_Cyp2c55
  gRNA
accctcatcaattatctccc

SEQ ID NO: 12800 - DNA, 20 bp, Artificial Sequence
  MKO10012800_A_Cyp2c55
  gRNA
ttaaaatcttgaactcccca

SEQ ID NO: 12801 - DNA, 20 bp, Artificial Sequence
  MKO10012801_A_Cyp2c55
  gRNA
attactttgttatgactccc

SEQ ID NO: 12802 - DNA, 20 bp, Artificial Sequence
  MKO10012802_A_Cyp2c65
  gRNA
ctcatgactctgcgaaactt

SEQ ID NO: 12803 - DNA, 20 bp, Artificial Sequence
  MKO10012803_A_Cyp2c65
  gRNA
agcgagcctcctcttgaatt

SEQ ID NO: 12804 - DNA, 20 bp, Artificial Sequence
  MKO10012804_A_Cyp2c65
  gRNA
ctcctccccatgatcagtaa

SEQ ID NO: 12805 - DNA, 20 bp, Artificial Sequence
  MKO10012805_A_Cyp2c66
  gRNA
ctgataaacttgtcagccac

SEQ ID NO: 12806 - DNA, 20 bp, Artificial Sequence
  MKO10012806_A_Cyp2c66
  gRNA
agcgagcctcctcttgaact

SEQ ID NO: 12807 - DNA, 20 bp, Artificial Sequence
  MKO10012807_A_Cyp2c66
  gRNA
gacaagtttatcagaagatg

SEQ ID NO: 12808 - DNA, 20 bp, Artificial Sequence
  MKO10012808_A_Cyp2c67
  gRNA
cagcctattgtagtgttaca

SEQ ID NO: 12809 - DNA, 20 bp, Artificial Sequence
  MKO10012809_A_Cyp2c67
  gRNA
taaccatgtaacactacaat

SEQ ID NO: 12810 - DNA, 20 bp, Artificial Sequence
  MKO10012810_A_Cyp2c67
  gRNA
tcttcacaatcaataccttg

SEQ ID NO: 12811 - DNA, 20 bp, Artificial Sequence
  MKO10012811_A_Cyp2c68
  gRNA
taaccatgtaatatcacaat

SEQ ID NO: 12812 - DNA, 20 bp, Artificial Sequence
  MKO10012812_A_Cyp2c68
  gRNA
ctgtgcttcctcttgcactt

SEQ ID NO: 12813 - DNA, 20 bp, Artificial Sequence
  MKO10012813_A_Cyp2c68
  gRNA
cagcctattgtgatattaca

SEQ ID NO: 12814 - DNA, 20 bp, Artificial Sequence
  MKO10012814_A_Cyp2c69
  gRNA
aagtaatcgatgaagtcccg

SEQ ID NO: 12815 - DNA, 20 bp, Artificial Sequence
  MKO10012815_A_Cyp2c69
  gRNA
ttccagagaacacttctcca

SEQ ID NO: 12816 - DNA, 20 bp, Artificial Sequence
  MKO10012816_A_Cyp2c69
  gRNA
tcccatggccaagttcctca

SEQ ID NO: 12817 - DNA, 20 bp, Artificial Sequence
  MKO10012817_A_Cyp2c70
  gRNA
cattgtagtcaaatcgatgc

SEQ ID NO: 12818 - DNA, 20 bp, Artificial Sequence
  MKO10012818_A_Cyp2c70
  gRNA
aacccggcgtttctccctca

SEQ ID NO: 12819 - DNA, 20 bp, Artificial Sequence
  MKO10012819_A_Cyp2c70
  gRNA
agacgtacctaagccttggc

SEQ ID NO: 12820 - DNA, 20 bp, Artificial Sequence
  MKO10012820_A_Cyp2d10
  gRNA
gaagtccttactggccatag

SEQ ID NO: 12821 - DNA, 20 bp, Artificial Sequence
  MKO10012821_A_Cyp2d10
  gRNA
aagaccttcccaggcagtcc

SEQ ID NO: 12822 - DNA, 20 bp, Artificial Sequence
  MKO10012822_A_Cyp2d10
  gRNA
gatagtttgacagaaatctc

SEQ ID NO: 12823 - DNA, 20 bp, Artificial Sequence
  MKO10012823_A_Cyp2d11
  gRNA
ccaatattcctgcgcatccc

SEQ ID NO: 12824 - DNA, 20 bp, Artificial Sequence
  MKO10012824_A_Cyp2d11
  gRNA
tcgcctctgctcttgccact

SEQ ID NO: 12825 - DNA, 20 bp, Artificial Sequence
  MKO10012825_A_Cyp2d11
  gRNA
gaatgtttcacagaaatctc

SEQ ID NO: 12826 - DNA, 20 bp, Artificial Sequence
  MKO10012826_A_Cyp2d12
  gRNA
ttgtcttctctgcgcaattt

SEQ ID NO: 12827 - DNA, 20 bp, Artificial Sequence
  MKO10012827_A_Cyp2d12
  gRNA
cccaccagcctgagtagtga

SEQ ID NO: 12828 - DNA, 20 bp, Artificial Sequence
  MKO10012828_A_Cyp2d12
  gRNA
gtgcccatctttgagcatct

SEQ ID NO: 12829 - DNA, 20 bp, Artificial Sequence
  MKO10012829_A_Cyp2d22
  gRNA
ctacagctgcggggtcgcta

SEQ ID NO: 12830 - DNA, 20 bp, Artificial Sequence
  MKO10012830_A_Cyp2d22
  gRNA
cctaccagtatggtcagcga

SEQ ID NO: 12831 - DNA, 20 bp, Artificial Sequence
  MKO10012831_A_Cyp2d22
  gRNA
gccgccttcgctgaccatac

SEQ ID NO: 12832 - DNA, 20 bp, Artificial Sequence
  MKO10012832_A_Cyp2d26
  gRNA
taattgagcacgactcgacc

SEQ ID NO: 12833 - DNA, 20 bp, Artificial Sequence
  MKO10012833_A_Cyp2d26
  gRNA
agacactggcttcgtcggag

SEQ ID NO: 12834 - DNA, 20 bp, Artificial Sequence
  MKO10012834_A_Cyp2d26
  gRNA
caaatcgacgagcataaatg

SEQ ID NO: 12835 - DNA, 20 bp, Artificial Sequence
  MKO10012835_A_Cyp2d34
  gRNA
tgaccagccaccccgaaatt

SEQ ID NO: 12836 - DNA, 20 bp, Artificial Sequence
  MKO10012836_A_Cyp2d34
  gRNA
ccaatactcctgcgaatccc

SEQ ID NO: 12837 - DNA, 20 bp, Artificial Sequence
  MKO10012837_A_Cyp2d34
  gRNA
gtatccaccctgcgaaactt

SEQ ID NO: 12838 - DNA, 20 bp, Artificial Sequence
  MKO10012838_A_Cyp2d40
  gRNA
ccacttcagctactctgacc

SEQ ID NO: 12839 - DNA, 20 bp, Artificial Sequence
  MKO10012839_A_Cyp2d40
  gRNA
atgcagaatcatgagtagca

SEQ ID NO: 12840 - DNA, 20 bp, Artificial Sequence
  MKO10012840_A_Cyp2d40
  gRNA
acaagcctaccttagggata

SEQ ID NO: 12841 - DNA, 20 bp, Artificial Sequence
  MKO10012841_A_Cyp2d9
  gRNA
cgatactcttgcgtatccca

SEQ ID NO: 12842 - DNA, 20 bp, Artificial Sequence
  MKO10012842_A_Cyp2d9
  gRNA
ctggctgacaaggccctcca

SEQ ID NO: 12843 - DNA, 20 bp, Artificial Sequence
  MKO10012843_A_Cyp2d9
  gRNA
caaagtttgacagaagtctc

SEQ ID NO: 12844 - DNA, 20 bp, Artificial Sequence
  MKO10012844_A_Cyp2e1
  gRNA
ccacatggaaggacgtgcgg

SEQ ID NO: 12845 - DNA, 20 bp, Artificial Sequence
  MKO10012845_A_Cyp2e1
  gRNA
ccacgatgcgcctctgaccc

SEQ ID NO: 12846 - DNA, 20 bp, Artificial Sequence
  MKO10012846_A_Cyp2e1
  gRNA
ccctaagtatcctccgtgac

SEQ ID NO: 12847 - DNA, 20 bp, Artificial Sequence
  MKO10012847_A_Cyp2f2
  gRNA
ccgcagcgtccgcgaacacc

SEQ ID NO: 12848 - DNA, 20 bp, Artificial Sequence
  MKO10012848_A_Cyp2f2
  gRNA
aaaagacggggtatgcgcct

SEQ ID NO: 12849 - DNA, 20 bp, Artificial Sequence
  MKO10012849_A_Cyp2f2
  gRNA
cgagtgcttacctcgcccca

SEQ ID NO: 12850 - DNA, 20 bp, Artificial Sequence
  MKO10012850_A_Cyp2g1
  gRNA
cggaaaacgcttcgactatc

SEQ ID NO: 12851 - DNA, 20 bp, Artificial Sequence
  MKO10012851_A_Cyp2g1
  gRNA
gtccaacgtcatctgttccg

SEQ ID NO: 12852 - DNA, 20 bp, Artificial Sequence
  MKO10012852_A_Cyp2g1
  gRNA
ctgaccgtccttcgaaactt

SEQ ID NO: 12853 - DNA, 20 bp, Artificial Sequence
  MKO10012853_A_Cyp2j11
  gRNA
attgtttgtttcccgtatga

SEQ ID NO: 12854 - DNA, 20 bp, Artificial Sequence
  MKO10012854_A_Cyp2j11
  gRNA
aacgtaattagcgtgaattt

SEQ ID NO: 12855 - DNA, 20 bp, Artificial Sequence
  MKO10012855_A_Cyp2j11
  gRNA
atgttgccttgcagctaaac

SEQ ID NO: 12856 - DNA, 20 bp, Artificial Sequence
  MKO10012856_A_Cyp2j12
  gRNA
attagatgaagccacgtgtt

SEQ ID NO: 12857 - DNA, 20 bp, Artificial Sequence
  MKO10012857_A_Cyp2j12
  gRNA
cttggagcagcgcatacaga

SEQ ID NO: 12858 - DNA, 20 bp, Artificial Sequence
  MKO10012858_A_Cyp2j12
  gRNA
aacctaactagcctggactt

SEQ ID NO: 12859 - DNA, 20 bp, Artificial Sequence
  MKO10012859_A_Cyp2j13
  gRNA
gagcttagagcatcgaattc

SEQ ID NO: 12860 - DNA, 20 bp, Artificial Sequence
  MKO10012860_A_Cyp2j13
  gRNA
gaatgcttacatggaccatt

SEQ ID NO: 12861 - DNA, 20 bp, Artificial Sequence
  MKO10012861_A_Cyp2j13
  gRNA
agctctacaacatcttccca

SEQ ID NO: 12862 - DNA, 20 bp, Artificial Sequence
  MKO10012862_A_Cyp2j5
  gRNA
tgtgaatcgctttatgacac

SEQ ID NO: 12863 - DNA, 20 bp, Artificial Sequence
  MKO10012863_A_Cyp2j5
  gRNA
gtaggattagtcgtatctaa

SEQ ID NO: 12864 - DNA, 20 bp, Artificial Sequence
  MKO10012864_A_Cyp2j5
  gRNA
tcaggaggagacccatcacc

SEQ ID NO: 12865 - DNA, 20 bp, Artificial Sequence
  MKO10012865_A_Cyp2j6
  gRNA
ggagacaacaatgattagtc

SEQ ID NO: 12866 - DNA, 20 bp, Artificial Sequence
  MKO10012866_A_Cyp2j6
  gRNA
cgttcttgcataacacttag

SEQ ID NO: 12867 - DNA, 20 bp, Artificial Sequence
  MKO10012867_A_Cyp2j6
  gRNA
gatgctgaggttactggacg

SEQ ID NO: 12868 - DNA, 20 bp, Artificial Sequence
  MKO10012868_A_Cyp2j8
  gRNA
atgttgccttgccgctaaaa

SEQ ID NO: 12869 - DNA, 20 bp, Artificial Sequence
  MKO10012869_A_Cyp2j8
  gRNA
aaaacgttccccaatagtga

SEQ ID NO: 12870 - DNA, 20 bp, Artificial Sequence
  MKO10012870_A_Cyp2j8
  gRNA
aagcttagaacaacgcatac

SEQ ID NO: 12871 - DNA, 20 bp, Artificial Sequence
  MKO10012871_A_Cyp2j9
  gRNA
agaggaggctcactaccttg

SEQ ID NO: 12872 - DNA, 20 bp, Artificial Sequence
  MKO10012872_A_Cyp2j9
  gRNA
ggtaatagagcaaattatgt

SEQ ID NO: 12873 - DNA, 20 bp, Artificial Sequence
  MKO10012873_A_Cyp2j9
  gRNA
ccgatattgttaacaatcac

SEQ ID NO: 12874 - DNA, 20 bp, Artificial Sequence
  MKO10012874_A_Cyp2r1
  gRNA
ctacaaccaatgtgctccgc

SEQ ID NO: 12875 - DNA, 20 bp, Artificial Sequence
  MKO10012875_A_Cyp2r1
  gRNA
gttctatcctgagcgatttc

SEQ ID NO: 12876 - DNA, 20 bp, Artificial Sequence
  MKO10012876_A_Cyp2r1
  gRNA
ctgcatcttccgaagttgca

SEQ ID NO: 12877 - DNA, 20 bp, Artificial Sequence
  MKO10012877_A_Cyp2s1
  gRNA
gcgtcaacgacatcacgtgc

SEQ ID NO: 12878 - DNA, 20 bp, Artificial Sequence
  MKO10012878_A_Cyp2s1
  gRNA
gcgtggaacattggcaacgc

SEQ ID NO: 12879 - DNA, 20 bp, Artificial Sequence
  MKO10012879_A_Cyp2s1
  gRNA
ctggcgccgcgtggtggtcc

SEQ ID NO: 12880 - DNA, 20 bp, Artificial Sequence
  MKO10012880_A_Cyp2t4
  gRNA
taccattgaggatcgcatcc

SEQ ID NO: 12881 - DNA, 20 bp, Artificial Sequence
  MKO10012881_A_Cyp2t4
  gRNA
ttgcgaagcgagtgccaacg

SEQ ID NO: 12882 - DNA, 20 bp, Artificial Sequence
  MKO10012882_A_Cyp2t4
  gRNA
gtcttcgatcgcttcacctg

SEQ ID NO: 12883 - DNA, 20 bp, Artificial Sequence
  MKO10012883_A_Cyp2u1
  gRNA
cactcgacgcttcgtcattt

SEQ ID NO: 12884 - DNA, 20 bp, Artificial Sequence
  MKO10012884_A_Cyp2u1
  gRNA
cgaaatgacgaagcgtcgag

SEQ ID NO: 12885 - DNA, 20 bp, Artificial Sequence
  MKO10012885_A_Cyp2u1
  gRNA
ggaaccctcaggtaacgcaa

SEQ ID NO: 12886 - DNA, 20 bp, Artificial Sequence
  MKO10012886_A_Cyp2w1
  gRNA
gcagtgtgcgcaccgtgaat

SEQ ID NO: 12887 - DNA, 20 bp, Artificial Sequence
  MKO10012887_A_Cyp2w1
  gRNA
ccggtcggctagctcatgcc

SEQ ID NO: 12888 - DNA, 20 bp, Artificial Sequence
  MKO10012888_A_Cyp2w1
  gRNA
ccgggcatgagctagccgac

SEQ ID NO: 12889 - DNA, 20 bp, Artificial Sequence
  MKO10012889_A_Cyp39a1
  gRNA
gcgctgtttgagaaaaatat

SEQ ID NO: 12890 - DNA, 20 bp, Artificial Sequence
  MKO10012890_A_Cyp39a1
  gRNA
ataaaagctcacggatctgc

SEQ ID NO: 12891 - DNA, 20 bp, Artificial Sequence
  MKO10012891_A_Cyp39a1
  gRNA
gcagtttaaaacctatgatg

SEQ ID NO: 12892 - DNA, 20 bp, Artificial Sequence
  MKO10012892_A_Cyp3a11
  gRNA
gggtttatggaaattcgaca

SEQ ID NO: 12893 - DNA, 20 bp, Artificial Sequence
  MKO10012893_A_Cyp3a11
  gRNA
ataaaaagtatggaaaaaca

SEQ ID NO: 12894 - DNA, 20 bp, Artificial Sequence
  MKO10012894_A_Cyp3a11
  gRNA
ttcagcacagtgcctaaaaa

SEQ ID NO: 12895 - DNA, 20 bp, Artificial Sequence
  MKO10012895_A_Cyp3a13
  gRNA
gcctacccgccggtttgtga

SEQ ID NO: 12896 - DNA, 20 bp, Artificial Sequence
  MKO10012896_A_Cyp3a13
  gRNA
gacgattcttgcttaccaga

SEQ ID NO: 12897 - DNA, 20 bp, Artificial Sequence
  MKO10012897_A_Cyp3a13
  gRNA
attctagcgctttggtccag

SEQ ID NO: 12898 - DNA, 20 bp, Artificial Sequence
  MKO10012898_A_Cyp3a16
  gRNA
cactcaccttgtaataattc

SEQ ID NO: 12899 - DNA, 20 bp, Artificial Sequence
  MKO10012899_A_Cyp3a16
  gRNA
catctctctagctaaagatg

SEQ ID NO: 12900 - DNA, 20 bp, Artificial Sequence
  MKO10012900_A_Cyp3a16
  gRNA
cacctccttgagatttccac

SEQ ID NO: 12901 - DNA, 20 bp, Artificial Sequence
  MKO10012901_A_Cyp3a25
  gRNA
ccaaaacctctaccgttact

SEQ ID NO: 12902 - DNA, 20 bp, Artificial Sequence
  MKO10012902_A_Cyp3a25
  gRNA
ccaagtaacggtagaggttt

SEQ ID NO: 12903 - DNA, 20 bp, Artificial Sequence
  MKO10012903_A_Cyp3a25
  gRNA
aaaggccattaccatatctg

SEQ ID NO: 12904 - DNA, 20 bp, Artificial Sequence
  MKO10012904_A_Cyp3a41a
  gRNA
agatatgggacccgtacaca

SEQ ID NO: 12905 - DNA, 20 bp, Artificial Sequence
  MKO10012905_A_Cyp3a41a
  gRNA
ttcagcacagtgcctaaaaa

SEQ ID NO: 12906 - DNA, 20 bp, Artificial Sequence
  MKO10012906_A_Cyp3a41a
  gRNA
gggtttatggaaatttgaca

SEQ ID NO: 12907 - DNA, 20 bp, Artificial Sequence
  MKO10012907_A_Cyp3a41b
  gRNA
gctttactcattatacccac

SEQ ID NO: 12908 - DNA, 20 bp, Artificial Sequence
  MKO10012908_A_Cyp3a41b
  gRNA
agatatgggacccgtacaca

SEQ ID NO: 12909 - DNA, 20 bp, Artificial Sequence
  MKO10012909_A_Cyp3a41b
  gRNA
ttcagcacagtgcctaaaaa

SEQ ID NO: 12910 - DNA, 20 bp, Artificial Sequence
  MKO10012910_A_Cyp3a44
  gRNA
aacacctctccttgtcatca

SEQ ID NO: 12911 - DNA, 20 bp, Artificial Sequence
  MKO10012911_A_Cyp3a44
  gRNA
gggtatatggaaatttgaca

SEQ ID NO: 12912 - DNA, 20 bp, Artificial Sequence
  MKO10012912_A_Cyp3a44
  gRNA
gtttatctgtcttcacaaac

SEQ ID NO: 12913 - DNA, 20 bp, Artificial Sequence
  MKO10012913_A_Cyp3a57
  gRNA
cacctccttgagtttgctac

SEQ ID NO: 12914 - DNA, 20 bp, Artificial Sequence
  MKO10012914_A_Cyp3a57
  gRNA
cttaaagagaccatgagaat

SEQ ID NO: 12915 - DNA, 20 bp, Artificial Sequence
  MKO10012915_A_Cyp3a57
  gRNA
agagatcatcaaaattgtgc

SEQ ID NO: 12916 - DNA, 20 bp, Artificial Sequence
  MKO10012916_A_Cyp3a59
  gRNA
accctagactcttgggccag

SEQ ID NO: 12917 - DNA, 20 bp, Artificial Sequence
  MKO10012917_A_Cyp3a59
  gRNA
ccaaaacctctacctttatt

SEQ ID NO: 12918 - DNA, 20 bp, Artificial Sequence
  MKO10012918_A_Cyp3a59
  gRNA
atgatagccaatataggctt

SEQ ID NO: 12919 - DNA, 20 bp, Artificial Sequence
  MKO10012919_A_Cyp46a1
  gRNA
caaacacagtctgaagcgcg

SEQ ID NO: 12920 - DNA, 20 bp, Artificial Sequence
  MKO10012920_A_Cyp46a1
  gRNA
acacgctcacctgcggctga

SEQ ID NO: 12921 - DNA, 20 bp, Artificial Sequence
  MKO10012921_A_Cyp46a1
  gRNA
cgcgcgcttcagactgtgtt

SEQ ID NO: 12922 - DNA, 20 bp, Artificial Sequence
  MKO10012922_A_Cyp4a10
  gRNA
tcccaagtgcctttcctaga

SEQ ID NO: 12923 - DNA, 20 bp, Artificial Sequence
  MKO10012923_A_Cyp4a10
  gRNA
gggttagcatcctcctgtgc

SEQ ID NO: 12924 - DNA, 20 bp, Artificial Sequence
  MKO10012924_A_Cyp4a10
  gRNA
ttgcttccccagaaccatct

SEQ ID NO: 12925 - DNA, 20 bp, Artificial Sequence
  MKO10012925_A_Cyp4a12a
  gRNA
agactctgttcgtgtaatgc

SEQ ID NO: 12926 - DNA, 20 bp, Artificial Sequence
  MKO10012926_A_Cyp4a12a
  gRNA
tgatgtgtcgaaagatctcc

SEQ ID NO: 12927 - DNA, 20 bp, Artificial Sequence
  MKO10012927_A_Cyp4a12a
  gRNA
tctgccatgatttccgtata

SEQ ID NO: 12928 - DNA, 20 bp, Artificial Sequence
  MKO10012928_A_Cyp4a12b
  gRNA
tctgccatgatttccgtgta

SEQ ID NO: 12929 - DNA, 20 bp, Artificial Sequence
  MKO10012929_A_Cyp4a12b
  gRNA
aggtcatcaaggtgatgtgt

SEQ ID NO: 12930 - DNA, 20 bp, Artificial Sequence
  MKO10012930_A_Cyp4a12b
  gRNA
agggcgtggtttgcttctgc

SEQ ID NO: 12931 - DNA, 20 bp, Artificial Sequence
  MKO10012931_A_Cyp4a14
  gRNA
agaaccaccttcacatagtc

SEQ ID NO: 12932 - DNA, 20 bp, Artificial Sequence
  MKO10012932_A_Cyp4a14
  gRNA
ccccgagagacactgtaagc

SEQ ID NO: 12933 - DNA, 20 bp, Artificial Sequence
  MKO10012933_A_Cyp4a14
  gRNA
gagtcaacatccgccgatgc

SEQ ID NO: 12934 - DNA, 20 bp, Artificial Sequence
  MKO10012934_A_Cyp4a29-ps
  gRNA
aatcggtagaggctagcctt

SEQ ID NO: 12935 - DNA, 20 bp, Artificial Sequence
  MKO10012935_A_Cyp4a29-ps
  gRNA
tgacatcctcaaaccctatg

SEQ ID NO: 12936 - DNA, 20 bp, Artificial Sequence
  MKO10012936_A_Cyp4a29-ps
  gRNA
catgacttccccatatccag

SEQ ID NO: 12937 - DNA, 20 bp, Artificial Sequence
  MKO10012937_A_Cyp4a30b-ps
  gRNA
catagatcacgacacgtgca

SEQ ID NO: 12938 - DNA, 20 bp, Artificial Sequence
  MKO10012938_A_Cyp4a30b-ps
  gRNA
gagttaacattcgccgatgc

SEQ ID NO: 12939 - DNA, 20 bp, Artificial Sequence
  MKO10012939_A_Cyp4a30b-ps
  gRNA
cccccagagccaccgtacat

SEQ ID NO: 12940 - DNA, 20 bp, Artificial Sequence
  MKO10012940_A_Cyp4a31
  gRNA
ctaagcctgacccgatttgc

SEQ ID NO: 12941 - DNA, 20 bp, Artificial Sequence
  MKO10012941_A_Cyp4a31
  gRNA
accatgactgtccgtttaac

SEQ ID NO: 12942 - DNA, 20 bp, Artificial Sequence
  MKO10012942_A_Cyp4a31
  gRNA
tcccatcaccgccctttcac

SEQ ID NO: 12943 - DNA, 20 bp, Artificial Sequence
  MKO10012943_A_Cyp4a32
  gRNA
caaaggcgaacaagaactaa

SEQ ID NO: 12944 - DNA, 20 bp, Artificial Sequence
  MKO10012944_A_Cyp4a32
  gRNA
ctgtagataccattagcctt

SEQ ID NO: 12945 - DNA, 20 bp, Artificial Sequence
  MKO10012945_A_Cyp4a32
  gRNA
agccatggttccagcaccgg

SEQ ID NO: 12946 - DNA, 20 bp, Artificial Sequence
  MKO10012946_A_Cyp4b1
  gRNA
accctcatgaagtgcacctt

SEQ ID NO: 12947 - DNA, 20 bp, Artificial Sequence
  MKO10012947_A_Cyp4b1
  gRNA
gcctggacaaggtggtaact

SEQ ID NO: 12948 - DNA, 20 bp, Artificial Sequence
  MKO10012948_A_Cyp4b1
  gRNA
gagacagcggcctaagccac

SEQ ID NO: 12949 - DNA, 20 bp, Artificial Sequence
  MKO10012949_A_Cyp4f13
  gRNA
agttcgggtggacgagtcgc

SEQ ID NO: 12950 - DNA, 20 bp, Artificial Sequence
  MKO10012950_A_Cyp4f13
  gRNA
ctccaagggcacttcccgtc

SEQ ID NO: 12951 - DNA, 20 bp, Artificial Sequence
  MKO10012951_A_Cyp4f13
  gRNA
gtcagctgctgttgcaccca

SEQ ID NO: 12952 - DNA, 20 bp, Artificial Sequence
  MKO10012952_A_Cyp4f14
  gRNA
tagatcggacgatgtcagaa

SEQ ID NO: 12953 - DNA, 20 bp, Artificial Sequence
  MKO10012953_A_Cyp4f14
  gRNA
cttgaaggaattgactcgtt

SEQ ID NO: 12954 - DNA, 20 bp, Artificial Sequence
  MKO10012954_A_Cyp4f14
  gRNA
tgaaatcaaccgttgccact

SEQ ID NO: 12955 - DNA, 20 bp, Artificial Sequence
  MKO10012955_A_Cyp4f15
  gRNA
gtcagcttcggtagccctaa

SEQ ID NO: 12956 - DNA, 20 bp, Artificial Sequence
  MKO10012956_A_Cyp4f15
  gRNA
agaacagatcgaatgatgtc

SEQ ID NO: 12957 - DNA, 20 bp, Artificial Sequence
  MKO10012957_A_Cyp4f15
  gRNA
tctgaaggaggtgactaacc

SEQ ID NO: 12958 - DNA, 20 bp, Artificial Sequence
  MKO10012958_A_Cyp4f16
  gRNA
catgcagctggttaccgaaa

SEQ ID NO: 12959 - DNA, 20 bp, Artificial Sequence
  MKO10012959_A_Cyp4f16
  gRNA
caggtgtcagcagtcgacga

SEQ ID NO: 12960 - DNA, 20 bp, Artificial Sequence
  MKO10012960_A_Cyp4f16
  gRNA
tccaagatgtccatctcttt

SEQ ID NO: 12961 - DNA, 20 bp, Artificial Sequence
  MKO10012961_A_Cyp4f17
  gRNA
gacagctgcggtggccccta

SEQ ID NO: 12962 - DNA, 20 bp, Artificial Sequence
  MKO10012962_A_Cyp4f17
  gRNA
agaagggcccaatccaacag

SEQ ID NO: 12963 - DNA, 20 bp, Artificial Sequence
  MKO10012963_A_Cyp4f17
  gRNA
acttggggtggataagcctc

SEQ ID NO: 12964 - DNA, 20 bp, Artificial Sequence
  MKO10012964_A_Cyp4f18
  gRNA
tctaccgtttcctgaagccg

SEQ ID NO: 12965 - DNA, 20 bp, Artificial Sequence
  MKO10012965_A_Cyp4f18
  gRNA
gatggcctcttgatgagtac

SEQ ID NO: 12966 - DNA, 20 bp, Artificial Sequence
  MKO10012966_A_Cyp4f18
  gRNA
cagctttgacagcaattgcc

SEQ ID NO: 12967 - DNA, 20 bp, Artificial Sequence
  MKO10012967_A_Cyp4f37
  gRNA
tatggaaagtcgtgtccttt

SEQ ID NO: 12968 - DNA, 20 bp, Artificial Sequence
  MKO10012968_A_Cyp4f37
  gRNA
accgagatgtccatctctgt

SEQ ID NO: 12969 - DNA, 20 bp, Artificial Sequence
  MKO10012969_A_Cyp4f37
  gRNA
tccatacctttgtgaagccc

SEQ ID NO: 12970 - DNA, 20 bp, Artificial Sequence
  MKO10012970_A_Cyp4f39
  gRNA
cgtgcatgatgttcgtgcac

SEQ ID NO: 12971 - DNA, 20 bp, Artificial Sequence
  MKO10012971_A_Cyp4f39
  gRNA
gatgtgctcgaacatgtcaa

SEQ ID NO: 12972 - DNA, 20 bp, Artificial Sequence
  MKO10012972_A_Cyp4f39
  gRNA
tgattacatcaagcctgtgt

SEQ ID NO: 12973 - DNA, 20 bp, Artificial Sequence
  MKO10012973_A_Cyp4f40
  gRNA
cagatcggatgatatcaggg

SEQ ID NO: 12974 - DNA, 20 bp, Artificial Sequence
  MKO10012974_A_Cyp4f40
  gRNA
gtcagctgcggttgccccaa

SEQ ID NO: 12975 - DNA, 20 bp, Artificial Sequence
  MKO10012975_A_Cyp4f40
  gRNA
aaaggccaagtggctgcgcc

SEQ ID NO: 12976 - DNA, 20 bp, Artificial Sequence
  MKO10012976_A_Cyp4v3
  gRNA
acctgccgatcattaaactt

SEQ ID NO: 12977 - DNA, 20 bp, Artificial Sequence
  MKO10012977_A_Cyp4v3
  gRNA
agtatgtccgtacagtgtat

SEQ ID NO: 12978 - DNA, 20 bp, Artificial Sequence
  MKO10012978_A_Cyp4v3
  gRNA
cttgcagtacggggagcaaa

SEQ ID NO: 12979 - DNA, 20 bp, Artificial Sequence
  MKO10012979_A_Cyp4x1
  gRNA
tcatcactgacccgtttatc

SEQ ID NO: 12980 - DNA, 20 bp, Artificial Sequence
  MKO10012980_A_Cyp4x1
  gRNA
cactcaggaaacaaccatcg

SEQ ID NO: 12981 - DNA, 20 bp, Artificial Sequence
  MKO10012981_A_Cyp4x1
  gRNA
agaaatatcttcgcatagtc

SEQ ID NO: 12982 - DNA, 20 bp, Artificial Sequence
  MKO10012982_A_Cyp51
  gRNA
gcttaaagtgggctatgtta

SEQ ID NO: 12983 - DNA, 20 bp, Artificial Sequence
  MKO10012983_A_Cyp51
  gRNA
cggctgacaacacctgtgtt

SEQ ID NO: 12984 - DNA, 20 bp, Artificial Sequence
  MKO10012984_A_Cyp51
  gRNA
ggctcagctgtacgcagacc

SEQ ID NO: 12985 - DNA, 20 bp, Artificial Sequence
  MKO10012985_A_Cyp7a1
  gRNA
cgttgagaaacatgcgtaga

SEQ ID NO: 12986 - DNA, 20 bp, Artificial Sequence
  MKO10012986_A_Cyp7a1
  gRNA
ccactagtgccggaaatact

SEQ ID NO: 12987 - DNA, 20 bp, Artificial Sequence
  MKO10012987_A_Cyp7a1
  gRNA
caacgggttgattccatacc

SEQ ID NO: 12988 - DNA, 20 bp, Artificial Sequence
  MKO10012988_A_Cyp7b1
  gRNA
aactgtcaatttcgtcacgc

SEQ ID NO: 12989 - DNA, 20 bp, Artificial Sequence
  MKO10012989_A_Cyp7b1
  gRNA
atcacatttgcgactctata

SEQ ID NO: 12990 - DNA, 20 bp, Artificial Sequence
  MKO10012990_A_Cyp7b1
  gRNA
cgtgaaccacccttgataaa

SEQ ID NO: 12991 - DNA, 20 bp, Artificial Sequence
  MKO10012991_A_Cyp8b1
  gRNA
agggcctaaaggttcgagtc

SEQ ID NO: 12992 - DNA, 20 bp, Artificial Sequence
  MKO10012992_A_Cyp8b1
  gRNA
caagagtaccagatccgtcg

SEQ ID NO: 12993 - DNA, 20 bp, Artificial Sequence
  MKO10012993_A_Cyp8b1
  gRNA
tatgtacttcgacttcaagc

SEQ ID NO: 12994 - DNA, 20 bp, Artificial Sequence
  MKO10012994_A_Cypt10
  gRNA
accatacctcgacagagacc

SEQ ID NO: 12995 - DNA, 20 bp, Artificial Sequence
  MKO10012995_A_Cypt10
  gRNA
tccaaaggttcagtcggttc

SEQ ID NO: 12996 - DNA, 20 bp, Artificial Sequence
  MKO10012996_A_Cypt10
  gRNA
tcgattgatgcgaagtcaaa

SEQ ID NO: 12997 - DNA, 20 bp, Artificial Sequence
  MKO10012997_A_Cypt12
  gRNA
gggcgtcaacaggcatcgaa

SEQ ID NO: 12998 - DNA, 20 bp, Artificial Sequence
  MKO10012998_A_Cypt12
  gRNA
gttcttgcaccttcgaccat

SEQ ID NO: 12999 - DNA, 20 bp, Artificial Sequence
  MKO10012999_A_Cypt12
  gRNA
agctctacgattccgctgct

SEQ ID NO: 13000 - DNA, 20 bp, Artificial Sequence
  MKO10013000_A_Cypt14
  gRNA
gctttatgctgcaaaagttg

SEQ ID NO: 13001 - DNA, 20 bp, Artificial Sequence
  MKO10013001_A_Cypt14
  gRNA
atccaagccaaagaaatgta

SEQ ID NO: 13002 - DNA, 20 bp, Artificial Sequence
  MKO10013002_A_Cypt14
  gRNA
tcaactggcatcaaaagtga

SEQ ID NO: 13003 - DNA, 20 bp, Artificial Sequence
  MKO10013003_A_Cypt15
  gRNA
ctaagcctactgcctatgca

SEQ ID NO: 13004 - DNA, 20 bp, Artificial Sequence
  MKO10013004_A_Cypt15
  gRNA
atgctacaaatgttgtgatg

SEQ ID NO: 13005 - DNA, 20 bp, Artificial Sequence
  MKO10013005_A_Cypt15
  gRNA
tcgactggcatcaaaagtga

SEQ ID NO: 13006 - DNA, 20 bp, Artificial Sequence
  MKO10013006_A_Cypt1
  gRNA
acaattgacgcggagccaac

SEQ ID NO: 13007 - DNA, 20 bp, Artificial Sequence
  MKO10013007_A_Cypt1
  gRNA
cactggtctagcgcagcagc

SEQ ID NO: 13008 - DNA, 20 bp, Artificial Sequence
  MKO10013008_A_Cypt1
  gRNA
gacagtgacccatttccgaa

SEQ ID NO: 13009 - DNA, 20 bp, Artificial Sequence
  MKO10013009_A_Cypt2
  gRNA
ccaactaaagctcatcgaac

SEQ ID NO: 13010 - DNA, 20 bp, Artificial Sequence
  MKO10013010_A_Cypt2
  gRNA
ccagttcgatgagctttagt

SEQ ID NO: 13011 - DNA, 20 bp, Artificial Sequence
  MKO10013011_A_Cypt2
  gRNA
gagctccgctatggctcggg

SEQ ID NO: 13012 - DNA, 20 bp, Artificial Sequence
  MKO10013012_A_Cypt3
  gRNA
ctgccgcagctctagacccg

SEQ ID NO: 13013 - DNA, 20 bp, Artificial Sequence
  MKO10013013_A_Cypt3
  gRNA
accatgcattgacagtgacc

SEQ ID NO: 13014 - DNA, 20 bp, Artificial Sequence
  MKO10013014_A_Cypt3
  gRNA
aatgtaattctgctacgaga

SEQ ID NO: 13015 - DNA, 20 bp, Artificial Sequence
  MKO10013015_A_Cypt4
  gRNA
accatacctcgacagagacc

SEQ ID NO: 13016 - DNA, 20 bp, Artificial Sequence
  MKO10013016_A_Cypt4
  gRNA
tccaaaggttcagtcggttc

SEQ ID NO: 13017 - DNA, 20 bp, Artificial Sequence
  MKO10013017_A_Cypt4
  gRNA
tcgattgatgcgaagtcaaa

SEQ ID NO: 13018 - DNA, 20 bp, Artificial Sequence
  MKO10013018_A_Cypt7
  gRNA
tttggacccgttcggggtct

SEQ ID NO: 13019 - DNA, 20 bp, Artificial Sequence
  MKO10013019_A_Cypt7
  gRNA
acaattgacgcggagccaac

SEQ ID NO: 13020 - DNA, 20 bp, Artificial Sequence
  MKO10013020_A_Cypt7
  gRNA
cttctcaagcttcgaaattt

SEQ ID NO: 13021 - DNA, 20 bp, Artificial Sequence
  MKO10013021_A_Cypt8
  gRNA
tttggacccgttcggggtct

SEQ ID NO: 13022 - DNA, 20 bp, Artificial Sequence
  MKO10013022_A_Cypt8
  gRNA
acaattgacgcggagccaac

SEQ ID NO: 13023 - DNA, 20 bp, Artificial Sequence
  MKO10013023_A_Cypt8
  gRNA
cttctcaagcttcgaaattt

SEQ ID NO: 13024 - DNA, 20 bp, Artificial Sequence
  MKO10013024_A_Cypt9
  gRNA
accatacctcgacagagacc

SEQ ID NO: 13025 - DNA, 20 bp, Artificial Sequence
  MKO10013025_A_Cypt9
  gRNA
tccaaaggttcagtcggttc

SEQ ID NO: 13026 - DNA, 20 bp, Artificial Sequence
  MKO10013026_A_Cypt9
  gRNA
tcgattgatgcgaagtcaaa

SEQ ID NO: 13027 - DNA, 20 bp, Artificial Sequence
  MKO10013027_A_Cyr61
  gRNA
tactgcggctcctgcgtaga

SEQ ID NO: 13028 - DNA, 20 bp, Artificial Sequence
  MKO10013028_A_Cyr61
  gRNA
cccgactcccggggcgcact

SEQ ID NO: 13029 - DNA, 20 bp, Artificial Sequence
  MKO10013029_A_Cyr61
  gRNA
gcagcaccggccatctacgc

SEQ ID NO: 13030 - DNA, 20 bp, Artificial Sequence
  MKO10013030_A_Cys1
  gRNA
tactcaccgcgggtgcgagc

SEQ ID NO: 13031 - DNA, 20 bp, Artificial Sequence
  MKO10013031_A_Cys1
  gRNA
tgcgtcgccgcctcgggatc

SEQ ID NO: 13032 - DNA, 20 bp, Artificial Sequence
  MKO10013032_A_Cys1
  gRNA
agctcatggcgagcattgag

SEQ ID NO: 13033 - DNA, 20 bp, Artificial Sequence
  MKO10013033_A_Cysltr1
  gRNA
atagttcgttgaatatgata

SEQ ID NO: 13034 - DNA, 20 bp, Artificial Sequence
  MKO10013034_A_Cysltr1
  gRNA
tccagtccagaacattaatt

SEQ ID NO: 13035 - DNA, 20 bp, Artificial Sequence
  MKO10013035_A_Cysltr1
  gRNA
attgcagaaatgtacctcca

SEQ ID NO: 13036 - DNA, 20 bp, Artificial Sequence
  MKO10013036_A_Cysltr2
  gRNA
agcctaccgctactgcaatg

SEQ ID NO: 13037 - DNA, 20 bp, Artificial Sequence
  MKO10013037_A_Cysltr2
  gRNA
agggtccgcagtgcatggta

SEQ ID NO: 13038 - DNA, 20 bp, Artificial Sequence
  MKO10013038_A_Cysltr2
  gRNA
catgaaccacattgcagtag

SEQ ID NO: 13039 - DNA, 20 bp, Artificial Sequence
  MKO10013039_A_Cystm1
  gRNA
agagaaccctccaccgtatc

SEQ ID NO: 13040 - DNA, 20 bp, Artificial Sequence
  MKO10013040_A_Cystm1
  gRNA
ccttgataggggtacccctg

SEQ ID NO: 13041 - DNA, 20 bp, Artificial Sequence
  MKO10013041_A_Cystm1
  gRNA
tgccgggtgtcaggcagtcc

SEQ ID NO: 13042 - DNA, 20 bp, Artificial Sequence
  MKO10013042_A_Cyth1
  gRNA
gaacatccggcggaggaagc

SEQ ID NO: 13043 - DNA, 20 bp, Artificial Sequence
  MKO10013043_A_Cyth1
  gRNA
atccagttcttaatcgagaa

SEQ ID NO: 13044 - DNA, 20 bp, Artificial Sequence
  MKO10013044_A_Cyth1
  gRNA
tgagcccctcccctttatac

SEQ ID NO: 13045 - DNA, 20 bp, Artificial Sequence
  MKO10013045_A_Cyth2
  gRNA
gctaagtgaagctatgagcg

SEQ ID NO: 13046 - DNA, 20 bp, Artificial Sequence
  MKO10013046_A_Cyth2
  gRNA
aattgcccgcttcctgtaca

SEQ ID NO: 13047 - DNA, 20 bp, Artificial Sequence
  MKO10013047_A_Cyth2
  gRNA
tccaactccatgcgctcctc

SEQ ID NO: 13048 - DNA, 20 bp, Artificial Sequence
  MKO10013048_A_Cyth3
  gRNA
ctccgatgacggtcttgttc

SEQ ID NO: 13049 - DNA, 20 bp, Artificial Sequence
  MKO10013049_A_Cyth3
  gRNA
ggcctgaacaagaccgtcat

SEQ ID NO: 13050 - DNA, 20 bp, Artificial Sequence
  MKO10013050_A_Cyth3
  gRNA
caagcactcaccttaaggcc

SEQ ID NO: 13051 - DNA, 20 bp, Artificial Sequence
  MKO10013051_A_Cyth4
  gRNA
tgagaccgtcacccttgtac

SEQ ID NO: 13052 - DNA, 20 bp, Artificial Sequence
  MKO10013052_A_Cyth4
  gRNA
cgactgctttgaaagcaccg

SEQ ID NO: 13053 - DNA, 20 bp, Artificial Sequence
  MKO10013053_A_Cyth4
  gRNA
tgctttcaaagcagtcgatt

SEQ ID NO: 13054 - DNA, 20 bp, Artificial Sequence
  MKO10013054_A_Cytip
  gRNA
gacagccccgctcactgtgc

SEQ ID NO: 13055 - DNA, 20 bp, Artificial Sequence
  MKO10013055_A_Cytip
  gRNA
gttggccagatcaagctctt

SEQ ID NO: 13056 - DNA, 20 bp, Artificial Sequence
  MKO10013056_A_Cytip
  gRNA
atcacccaaagagcttgatc

SEQ ID NO: 13057 - DNA, 20 bp, Artificial Sequence
  MKO10013057_A_Cytl1
  gRNA
cttagaagacccaattcccg

SEQ ID NO: 13058 - DNA, 20 bp, Artificial Sequence
  MKO10013058_A_Cytl1
  gRNA
ggacccgtggcctcgggaat

SEQ ID NO: 13059 - DNA, 20 bp, Artificial Sequence
  MKO10013059_A_Cytl1
  gRNA
ggcgcggactgtactgccag

SEQ ID NO: 13060 - DNA, 20 bp, Artificial Sequence
  MKO10013060_A_Cyyr1
  gRNA
ctgctctgatgacccccacg

SEQ ID NO: 13061 - DNA, 20 bp, Artificial Sequence
  MKO10013061_A_Cyyr1
  gRNA
ctgtgcgatattccatctcg

SEQ ID NO: 13062 - DNA, 20 bp, Artificial Sequence
  MKO10013062_A_Cyyr1
  gRNA
ctcaggggcacggcgattgc

SEQ ID NO: 13063 - DNA, 20 bp, Artificial Sequence
  MKO10013063_A_D030056L22Rik
  gRNA
tctgcgccccgcaagcgacg

SEQ ID NO: 13064 - DNA, 20 bp, Artificial Sequence
  MKO10013064_A_D030056L22Rik
  gRNA
cggcgacagagtagaaagcg

SEQ ID NO: 13065 - DNA, 20 bp, Artificial Sequence
  MKO10013065_A_D030056L22Rik
  gRNA
tcaagagctgccagatcaag

SEQ ID NO: 13066 - DNA, 20 bp, Artificial Sequence
  MKO10013066_A_D10Bwg1379e
  gRNA
accccgacatttgacatgaa

SEQ ID NO: 13067 - DNA, 20 bp, Artificial Sequence
  MKO10013067_A_D10Bwg1379e
  gRNA
tgccgttctgaagatcgcag

SEQ ID NO: 13068 - DNA, 20 bp, Artificial Sequence
  MKO10013068_A_D10Bwg1379e
  gRNA
agtgacaccgtcactcaatg

SEQ ID NO: 13069 - DNA, 20 bp, Artificial Sequence
  MKO10013069_A_D10Jhu81e
  gRNA
tgacggaaccgagatccatg

SEQ ID NO: 13070 - DNA, 20 bp, Artificial Sequence
  MKO10013070_A_D10Jhu81e
  gRNA
cggcaggagcacattcgccg

SEQ ID NO: 13071 - DNA, 20 bp, Artificial Sequence
  MKO10013071_A_D10Jhu81e
  gRNA
gcacgtgattgaccacacca

SEQ ID NO: 13072 - DNA, 20 bp, Artificial Sequence
  MKO10013072_A_D10Wsu102e
  gRNA
gaaaacatcgacgagacgtc

SEQ ID NO: 13073 - DNA, 20 bp, Artificial Sequence
  MKO10013073_A_D10Wsu102e
  gRNA
attaagcttccgaatgcaga

SEQ ID NO: 13074 - DNA, 20 bp, Artificial Sequence
  MKO10013074_A_D10Wsu102e
  gRNA
gttctcgatggtgacttcag

SEQ ID NO: 13075 - DNA, 20 bp, Artificial Sequence
  MKO10013075_A_D11Wsu47e
  gRNA
gacgaagttcggctgatagc

SEQ ID NO: 13076 - DNA, 20 bp, Artificial Sequence
  MKO10013076_A_D11Wsu47e
  gRNA
aacgtgttcatgccggagtc

SEQ ID NO: 13077 - DNA, 20 bp, Artificial Sequence
  MKO10013077_A_D11Wsu47e
  gRNA
ggctggaagttgtaagcgtc

SEQ ID NO: 13078 - DNA, 20 bp, Artificial Sequence
  MKO10013078_A_D130040H23Rik
  gRNA
tatgaattatgtaagcaata

SEQ ID NO: 13079 - DNA, 20 bp, Artificial Sequence
  MKO10013079_A_D130040H23Rik
  gRNA
atattctacagaatataatc

SEQ ID NO: 13080 - DNA, 20 bp, Artificial Sequence
  MKO10013080_A_D130040H23Rik
  gRNA
aaaattctagaatacataga

SEQ ID NO: 13081 - DNA, 20 bp, Artificial Sequence
  MKO10013081_A_D130043K22Rik
  gRNA
gggaccaagtcgactcattc

SEQ ID NO: 13082 - DNA, 20 bp, Artificial Sequence
  MKO10013082_A_D130043K22Rik
  gRNA
gctcggagaattgcgagccc

SEQ ID NO: 13083 - DNA, 20 bp, Artificial Sequence
  MKO10013083_A_D130043K22Rik
  gRNA
taacctagtactaaccttac

SEQ ID NO: 13084 - DNA, 20 bp, Artificial Sequence
  MKO10013084_A_D14Abb1e
  gRNA
tcttcaaattctcgagaccc

SEQ ID NO: 13085 - DNA, 20 bp, Artificial Sequence
  MKO10013085_A_D14Abb1e
  gRNA
tctcttacaggctaatcctt

SEQ ID NO: 13086 - DNA, 20 bp, Artificial Sequence
  MKO10013086_A_D14Abb1e
  gRNA
actgccaagaactgttattt

SEQ ID NO: 13087 - DNA, 20 bp, Artificial Sequence
  MKO10013087_A_D15Ertd621e
  gRNA
ctttcaggtctgcgacttct

SEQ ID NO: 13088 - DNA, 20 bp, Artificial Sequence
  MKO10013088_A_D15Ertd621e
  gRNA
ttaccacttatccgacatca

SEQ ID NO: 13089 - DNA, 20 bp, Artificial Sequence
  MKO10013089_A_D15Ertd621e
  gRNA
accccattctcatactatgc

SEQ ID NO: 13090 - DNA, 20 bp, Artificial Sequence
  MKO10013090_A_D16Ertd472e
  gRNA
ctttaccttggattcgctgt

SEQ ID NO: 13091 - DNA, 20 bp, Artificial Sequence
  MKO10013091_A_D16Ertd472e
  gRNA
agagctccatgtccgtcacg

SEQ ID NO: 13092 - DNA, 20 bp, Artificial Sequence
  MKO10013092_A_D16Ertd472e
  gRNA
gttgctcgatagccacgtga

SEQ ID NO: 13093 - DNA, 20 bp, Artificial Sequence
  MKO10013093_A_D17H6S53E
  gRNA
gccagccaccaagccgtcga

SEQ ID NO: 13094 - DNA, 20 bp, Artificial Sequence
  MKO10013094_A_D17H6S53E
  gRNA
aggcagtcttgtcccgcttg

SEQ ID NO: 13095 - DNA, 20 bp, Artificial Sequence
  MKO10013095_A_D17H6S53E
  gRNA
gggccattcccaaactagac

SEQ ID NO: 13096 - DNA, 20 bp, Artificial Sequence
  MKO10013096_A_D17Wsu104e
  gRNA
ttacctcgttggtccctcct

SEQ ID NO: 13097 - DNA, 20 bp, Artificial Sequence
  MKO10013097_A_D17Wsu104e
  gRNA
acattcacctacgcttccca

SEQ ID NO: 13098 - DNA, 20 bp, Artificial Sequence
  MKO10013098_A_D17Wsu104e
  gRNA
agctcacctccagatggtac

SEQ ID NO: 13099 - DNA, 20 bp, Artificial Sequence
  MKO10013099_A_D17Wsu92e
  gRNA
cgcagccggccgggttgagc

SEQ ID NO: 13100 - DNA, 20 bp, Artificial Sequence
  MKO10013100_A_D17Wsu92e
  gRNA
gccgagtagccgctggaact

SEQ ID NO: 13101 - DNA, 20 bp, Artificial Sequence
  MKO10013101_A_D17Wsu92e
  gRNA
tgggctctcgaagtcataat

SEQ ID NO: 13102 - DNA, 20 bp, Artificial Sequence
  MKO10013102_A_D19Bwg1357e
  gRNA
gcgcgtcgagtcatgtgcaa

SEQ ID NO: 13103 - DNA, 20 bp, Artificial Sequence
  MKO10013103_A_D19Bwg1357e
  gRNA
tcgaaccacgatgtcatagt

SEQ ID NO: 13104 - DNA, 20 bp, Artificial Sequence
  MKO10013104_A_D19Bwg1357e
  gRNA
taacaataccttgcaactct

SEQ ID NO: 13105 - DNA, 20 bp, Artificial Sequence
  MKO10013105_A_D19Ertd737e
  gRNA
ttacctctcgagtagccagc

SEQ ID NO: 13106 - DNA, 20 bp, Artificial Sequence
  MKO10013106_A_D19Ertd737e
  gRNA
tgtagtcaggccttgagaag

SEQ ID NO: 13107 - DNA, 20 bp, Artificial Sequence
  MKO10013107_A_D19Ertd737e
  gRNA
actgagtaagctcttcccac

SEQ ID NO: 13108 - DNA, 20 bp, Artificial Sequence
  MKO10013108_A_D1Ertd622e
  gRNA
gtccagctgtttagcgcgca

SEQ ID NO: 13109 - DNA, 20 bp, Artificial Sequence
  MKO10013109_A_D1Ertd622e
  gRNA
cgccttgcgcgctaaacagc

SEQ ID NO: 13110 - DNA, 20 bp, Artificial Sequence
  MKO10013110_A_D1Ertd622e
  gRNA
ccaagtagttagagtccatg

SEQ ID NO: 13111 - DNA, 20 bp, Artificial Sequence
  MKO10013111_A_D1Pas1
  gRNA
acttggctctcgtgtcgctg

SEQ ID NO: 13112 - DNA, 20 bp, Artificial Sequence
  MKO10013112_A_D1Pas1
  gRNA
tttgtcgtagaacgccttcg

SEQ ID NO: 13113 - DNA, 20 bp, Artificial Sequence
  MKO10013113_A_D1Pas1
  gRNA
tcctgttccaagcgttcgct

SEQ ID NO: 13114 - DNA, 20 bp, Artificial Sequence
  MKO10013114_A_D230025D16Rik
  gRNA
tcgcatcatcagaaacgtcc

SEQ ID NO: 13115 - DNA, 20 bp, Artificial Sequence
  MKO10013115_A_D230025D16Rik
  gRNA
gtgtgatcccgtcctgagtc

SEQ ID NO: 13116 - DNA, 20 bp, Artificial Sequence
  MKO10013116_A_D230025D16Rik
  gRNA
cctcatccttaacctgactc

SEQ ID NO: 13117 - DNA, 20 bp, Artificial Sequence
  MKO10013117_A_D2Wsu81e
  gRNA
ggcccgcatcctacagtacc

SEQ ID NO: 13118 - DNA, 20 bp, Artificial Sequence
  MKO10013118_A_D2Wsu81e
  gRNA
acctgagctccgcacctacc

SEQ ID NO: 13119 - DNA, 20 bp, Artificial Sequence
  MKO10013119_A_D2Wsu81e
  gRNA
tgagattgtggtgttcgatg

SEQ ID NO: 13120 - DNA, 20 bp, Artificial Sequence
  MKO10013120_A_D2hgdh
  gRNA
tcttgccaggtactcgctga

SEQ ID NO: 13121 - DNA, 20 bp, Artificial Sequence
  MKO10013121_A_D2hgdh
  gRNA
acccaatgaacatctgcttc

SEQ ID NO: 13122 - DNA, 20 bp, Artificial Sequence
  MKO10013122_A_D2hgdh
  gRNA
atcagctttcatgatgtatc

SEQ ID NO: 13123 - DNA, 20 bp, Artificial Sequence
  MKO10013123_A_D330045A20Rik
  gRNA
aaatcaaaactgcgatacta

SEQ ID NO: 13124 - DNA, 20 bp, Artificial Sequence
  MKO10013124_A_D330045A20Rik
  gRNA
taattaaccgattcatcaca

SEQ ID NO: 13125 - DNA, 20 bp, Artificial Sequence
  MKO10013125_A_D330045A20Rik
  gRNA
ccgttgcaccctccctacaa

SEQ ID NO: 13126 - DNA, 20 bp, Artificial Sequence
  MKO10013126_A_D3Bwg0562e
  gRNA
tcacccgcagttgcctatat

SEQ ID NO: 13127 - DNA, 20 bp, Artificial Sequence
  MKO10013127_A_D3Bwg0562e
  gRNA
caaagaaaactcctacatcg

SEQ ID NO: 13128 - DNA, 20 bp, Artificial Sequence
  MKO10013128_A_D3Bwg0562e
  gRNA
ttggagcctaacatcaacgc

SEQ ID NO: 13129 - DNA, 20 bp, Artificial Sequence
  MKO10013129_A_D3Ertd254e
  gRNA
attccccgtatatagcttac

SEQ ID NO: 13130 - DNA, 20 bp, Artificial Sequence
  MKO10013130_A_D3Ertd254e
  gRNA
gaacaccagtgcacctcatt

SEQ ID NO: 13131 - DNA, 20 bp, Artificial Sequence
  MKO10013131_A_D3Ertd254e
  gRNA
tccgcgtagtcaagccacaa

SEQ ID NO: 13132 - DNA, 20 bp, Artificial Sequence
  MKO10013132_A_D3Ertd751e
  gRNA
ttattagattaccacaggtc

SEQ ID NO: 13133 - DNA, 20 bp, Artificial Sequence
  MKO10013133_A_D3Ertd751e
  gRNA
ctttcctggttctccgagag

SEQ ID NO: 13134 - DNA, 20 bp, Artificial Sequence
  MKO10013134_A_D3Ertd751e
  gRNA
ggcagccagaaccagacctg

SEQ ID NO: 13135 - DNA, 20 bp, Artificial Sequence
  MKO10013135_A_D430019H16Rik
  gRNA
cgtggccgttggacgtcgag

SEQ ID NO: 13136 - DNA, 20 bp, Artificial Sequence
  MKO10013136_A_D430019H16Rik
  gRNA
aatgtccactcgacgtccaa

SEQ ID NO: 13137 - DNA, 20 bp, Artificial Sequence
  MKO10013137_A_D430019H16Rik
  gRNA
ggccataaaagacagatcca

SEQ ID NO: 13138 - DNA, 20 bp, Artificial Sequence
  MKO10013138_A_D430041D05Rik
  gRNA
cgtgagcggagacgtcgttc

SEQ ID NO: 13139 - DNA, 20 bp, Artificial Sequence
  MKO10013139_A_D430041D05Rik
  gRNA
ggcctttactgatgccgtca

SEQ ID NO: 13140 - DNA, 20 bp, Artificial Sequence
  MKO10013140_A_D430041D05Rik
  gRNA
aagtggacatagcgcctccc

SEQ ID NO: 13141 - DNA, 20 bp, Artificial Sequence
  MKO10013141_A_D430042O09Rik
  gRNA
ccaggaaaagtccagcgccg

SEQ ID NO: 13142 - DNA, 20 bp, Artificial Sequence
  MKO10013142_A_D430042O09Rik
  gRNA
tgatgtcttcagctccgagt

SEQ ID NO: 13143 - DNA, 20 bp, Artificial Sequence
  MKO10013143_A_D430042O09Rik
  gRNA
aagtcttaagacgcagctcc

SEQ ID NO: 13144 - DNA, 20 bp, Artificial Sequence
  MKO10013144_A_D4Wsu53e
  gRNA
tcgtactacgcgatcactag

SEQ ID NO: 13145 - DNA, 20 bp, Artificial Sequence
  MKO10013145_A_D4Wsu53e
  gRNA
ggcgctactacggcttcggc

SEQ ID NO: 13146 - DNA, 20 bp, Artificial Sequence
  MKO10013146_A_D4Wsu53e
  gRNA
acaggtatccacagtccgta

SEQ ID NO: 13147 - DNA, 20 bp, Artificial Sequence
  MKO10013147_A_D5Ertd577e
  gRNA
tccatctagcagagcttgca

SEQ ID NO: 13148 - DNA, 20 bp, Artificial Sequence
  MKO10013148_A_D5Ertd577e
  gRNA
ccacactccagaagctagca

SEQ ID NO: 13149 - DNA, 20 bp, Artificial Sequence
  MKO10013149_A_D5Ertd577e
  gRNA
cttaccctagtatctgatgc

SEQ ID NO: 13150 - DNA, 20 bp, Artificial Sequence
  MKO10013150_A_D5Ertd579e
  gRNA
gaagtgttctgatctaacgc

SEQ ID NO: 13151 - DNA, 20 bp, Artificial Sequence
  MKO10013151_A_D5Ertd579e
  gRNA
gctcaccttgctcgctctgt

SEQ ID NO: 13152 - DNA, 20 bp, Artificial Sequence
  MKO10013152_A_D5Ertd579e
  gRNA
aaagacctacagagcgagca

SEQ ID NO: 13153 - DNA, 20 bp, Artificial Sequence
  MKO10013153_A_D630003M21Rik
  gRNA
caatccactcctgctacgtc

SEQ ID NO: 13154 - DNA, 20 bp, Artificial Sequence
  MKO10013154_A_D630003M21Rik
  gRNA
ggaaggaggcgttcttattg

SEQ ID NO: 13155 - DNA, 20 bp, Artificial Sequence
  MKO10013155_A_D630003M21Rik
  gRNA
cagtccatctccccggaagt

SEQ ID NO: 13156 - DNA, 20 bp, Artificial Sequence
  MKO10013156_A_D630023F18Rik
  gRNA
ggaatcgcaccagcgtgact

SEQ ID NO: 13157 - DNA, 20 bp, Artificial Sequence
  MKO10013157_A_D630023F18Rik
  gRNA
atgatcttatcatcatacgc

SEQ ID NO: 13158 - DNA, 20 bp, Artificial Sequence
  MKO10013158_A_D630023F18Rik
  gRNA
tacgcaggtctgacatgaag

SEQ ID NO: 13159 - DNA, 20 bp, Artificial Sequence
  MKO10013159_A_D630033O11Rik
  gRNA
acttggaccaacattcaacc

SEQ ID NO: 13160 - DNA, 20 bp, Artificial Sequence
  MKO10013160_A_D630033O11Rik
  gRNA
cctcattcgcatgactggaa

SEQ ID NO: 13161 - DNA, 20 bp, Artificial Sequence
  MKO10013161_A_D630033O11Rik
  gRNA
aagaggtgacaccgatgccg

SEQ ID NO: 13162 - DNA, 20 bp, Artificial Sequence
  MKO10013162_A_D630039A03Rik
  gRNA
cgattcagccggagtaggca

SEQ ID NO: 13163 - DNA, 20 bp, Artificial Sequence
  MKO10013163_A_D630039A03Rik
  gRNA
ttctcccggatgcggatgaa

SEQ ID NO: 13164 - DNA, 20 bp, Artificial Sequence
  MKO10013164_A_D630039A03Rik
  gRNA
atacttagagctgcatcgct

SEQ ID NO: 13165 - DNA, 20 bp, Artificial Sequence
  MKO10013165_A_D630045J12Rik
  gRNA
tcgactctgacaccttccga

SEQ ID NO: 13166 - DNA, 20 bp, Artificial Sequence
  MKO10013166_A_D630045J12Rik
  gRNA
ctcggtgtgatataccgcat

SEQ ID NO: 13167 - DNA, 20 bp, Artificial Sequence
  MKO10013167_A_D630045J12Rik
  gRNA
gtgcctccgagtgtcgatac

SEQ ID NO: 13168 - DNA, 20 bp, Artificial Sequence
  MKO10013168_A_D6Ertd527e
  gRNA
ggccccagacccagtaaaac

SEQ ID NO: 13169 - DNA, 20 bp, Artificial Sequence
  MKO10013169_A_D6Ertd527e
  gRNA
gttgctgatgttgccactag

SEQ ID NO: 13170 - DNA, 20 bp, Artificial Sequence
  MKO10013170_A_D6Ertd527e
  gRNA
gcagccacagtcgcacacca

SEQ ID NO: 13171 - DNA, 20 bp, Artificial Sequence
  MKO10013171_A_D6Wsu163e
  gRNA
gcaaagtcttcgtcccagtc

SEQ ID NO: 13172 - DNA, 20 bp, Artificial Sequence
  MKO10013172_A_D6Wsu163e
  gRNA
tcttacctcagcgtaagctt

SEQ ID NO: 13173 - DNA, 20 bp, Artificial Sequence
  MKO10013173_A_D6Wsu163e
  gRNA
agctgaaaaagttacgagag

SEQ ID NO: 13174 - DNA, 20 bp, Artificial Sequence
  MKO10013174_A_D730048I06Rik
  gRNA
cggatcatacacgtttcacc

SEQ ID NO: 13175 - DNA, 20 bp, Artificial Sequence
  MKO10013175_A_D730048I06Rik
  gRNA
cgtgtatgatccgcagaacc

SEQ ID NO: 13176 - DNA, 20 bp, Artificial Sequence
  MKO10013176_A_D730048I06Rik
  gRNA
attatgctaagtcatcacga

SEQ ID NO: 13177 - DNA, 20 bp, Artificial Sequence
  MKO10013177_A_D7Ertd443e
  gRNA
catgctcactccatcgcgcc

SEQ ID NO: 13178 - DNA, 20 bp, Artificial Sequence
  MKO10013178_A_D7Ertd443e
  gRNA
caccattactgcccgacgtg

SEQ ID NO: 13179 - DNA, 20 bp, Artificial Sequence
  MKO10013179_A_D7Ertd443e
  gRNA
agattacacgtgctgtgact

SEQ ID NO: 13180 - DNA, 20 bp, Artificial Sequence
  MKO10013180_A_D830030K20Rik
  gRNA
cctcatatatgtaaagttcc

SEQ ID NO: 13181 - DNA, 20 bp, Artificial Sequence
  MKO10013181_A_D830030K20Rik
  gRNA
gaggaagatcagcaatgaca

SEQ ID NO: 13182 - DNA, 20 bp, Artificial Sequence
  MKO10013182_A_D830030K20Rik
  gRNA
gttatcttctatcagttcct

SEQ ID NO: 13183 - DNA, 20 bp, Artificial Sequence
  MKO10013183_A_D830031N03Rik
  gRNA
gtatcgtatatagaccgctg

SEQ ID NO: 13184 - DNA, 20 bp, Artificial Sequence
  MKO10013184_A_D830031N03Rik
  gRNA
ttgtcatgcagcccacgacg

SEQ ID NO: 13185 - DNA, 20 bp, Artificial Sequence
  MKO10013185_A_D830031N03Rik
  gRNA
ccgcaaaacaaggcgagtgg

SEQ ID NO: 13186 - DNA, 20 bp, Artificial Sequence
  MKO10013186_A_D8Ertd738e
  gRNA
ctgaacaacgcgcgccttct

SEQ ID NO: 13187 - DNA, 20 bp, Artificial Sequence
  MKO10013187_A_D8Ertd738e
  gRNA
tcgagtcatcgctcccaaga

SEQ ID NO: 13188 - DNA, 20 bp, Artificial Sequence
  MKO10013188_A_D8Ertd738e
  gRNA
cattccttaccgcctttccg

SEQ ID NO: 13189 - DNA, 20 bp, Artificial Sequence
  MKO10013189_A_D8Ertd82e
  gRNA
cccatcaagcgcatccgcat

SEQ ID NO: 13190 - DNA, 20 bp, Artificial Sequence
  MKO10013190_A_D8Ertd82e
  gRNA
agcctgaggtttacgagcgc

SEQ ID NO: 13191 - DNA, 20 bp, Artificial Sequence
  MKO10013191_A_D8Ertd82e
  gRNA
gccacgtgggccttcgaacc

SEQ ID NO: 13192 - DNA, 20 bp, Artificial Sequence
  MKO10013192_A_D930015E06Rik
  gRNA
gcatagagaagcttcgccgc

SEQ ID NO: 13193 - DNA, 20 bp, Artificial Sequence
  MKO10013193_A_D930015E06Rik
  gRNA
gtttgagcccttgccgaacg

SEQ ID NO: 13194 - DNA, 20 bp, Artificial Sequence
  MKO10013194_A_D930015E06Rik
  gRNA
tgccacagctccaccacgtt

SEQ ID NO: 13195 - DNA, 20 bp, Artificial Sequence
  MKO10013195_A_D930020B18Rik
  gRNA
aatagacaatccgaatgtgc

SEQ ID NO: 13196 - DNA, 20 bp, Artificial Sequence
  MKO10013196_A_D930020B18Rik
  gRNA
cgcggaaaatcgaaaggggt

SEQ ID NO: 13197 - DNA, 20 bp, Artificial Sequence
  MKO10013197_A_D930020B18Rik
  gRNA
agttgttccacgagctcttt

SEQ ID NO: 13198 - DNA, 20 bp, Artificial Sequence
  MKO10013198_A_DXBay18
  gRNA
agccaggcacatccaagctc

SEQ ID NO: 13199 - DNA, 20 bp, Artificial Sequence
  MKO10013199_A_DXBay18
  gRNA
gaccccaaagccagactcaa

SEQ ID NO: 13200 - DNA, 20 bp, Artificial Sequence
  MKO10013200_A_DXBay18
  gRNA
ttggggtccccgggccagga

SEQ ID NO: 13201 - DNA, 20 bp, Artificial Sequence
  MKO10013201_A_Daam1
  gRNA
ctggaagcgggttctctcgc

SEQ ID NO: 13202 - DNA, 20 bp, Artificial Sequence
  MKO10013202_A_Daam1
  gRNA
ggtgtgtatccgagactcag

SEQ ID NO: 13203 - DNA, 20 bp, Artificial Sequence
  MKO10013203_A_Daam1
  gRNA
cattgatcagctcaattcca

SEQ ID NO: 13204 - DNA, 20 bp, Artificial Sequence
  MKO10013204_A_Daam2
  gRNA
tgtgacccgcttcatcgatc

SEQ ID NO: 13205 - DNA, 20 bp, Artificial Sequence
  MKO10013205_A_Daam2
  gRNA
atacgcctgatagtgtagca

SEQ ID NO: 13206 - DNA, 20 bp, Artificial Sequence
  MKO10013206_A_Daam2
  gRNA
atacgatcaatgtagtactc

SEQ ID NO: 13207 - DNA, 20 bp, Artificial Sequence
  MKO10013207_A_Dab1
  gRNA
taacttgtctccccgagctg

SEQ ID NO: 13208 - DNA, 20 bp, Artificial Sequence
  MKO10013208_A_Dab1
  gRNA
tgaaatttcctacattgcga

SEQ ID NO: 13209 - DNA, 20 bp, Artificial Sequence
  MKO10013209_A_Dab1
  gRNA
cggtacaaagccaagctgat

SEQ ID NO: 13210 - DNA, 20 bp, Artificial Sequence
  MKO10013210_A_Dab2ip
  gRNA
tgggcccatgatccgaatca

SEQ ID NO: 13211 - DNA, 20 bp, Artificial Sequence
  MKO10013211_A_Dab2ip
  gRNA
cagccgctgagcgcgataag

SEQ ID NO: 13212 - DNA, 20 bp, Artificial Sequence
  MKO10013212_A_Dab2ip
  gRNA
cactacctagtgcgtcctgc

SEQ ID NO: 13213 - DNA, 20 bp, Artificial Sequence
  MKO10013213_A_Dab2
  gRNA
ttcggggcagcctgttggtc

SEQ ID NO: 13214 - DNA, 20 bp, Artificial Sequence
  MKO10013214_A_Dab2
  gRNA
cccgaaagcgccatcaaaga

SEQ ID NO: 13215 - DNA, 20 bp, Artificial Sequence
  MKO10013215_A_Dab2
  gRNA
atcatcaataccgattagct

SEQ ID NO: 13216 - DNA, 20 bp, Artificial Sequence
  MKO10013216_A_Dach1
  gRNA
agacgacgccgggggtccga

SEQ ID NO: 13217 - DNA, 20 bp, Artificial Sequence
  MKO10013217_A_Dach1
  gRNA
agccggagacgaggtcgccg

SEQ ID NO: 13218 - DNA, 20 bp, Artificial Sequence
  MKO10013218_A_Dach1
  gRNA
tgccgccgccatatttgcaa

SEQ ID NO: 13219 - DNA, 20 bp, Artificial Sequence
  MKO10013219_A_Dach2
  gRNA
tatacgtacgattgcttagc

SEQ ID NO: 13220 - DNA, 20 bp, Artificial Sequence
  MKO10013220_A_Dach2
  gRNA
cgtcccggggggtttattcc

SEQ ID NO: 13221 - DNA, 20 bp, Artificial Sequence
  MKO10013221_A_Dach2
  gRNA
gatgaccttaattctacgac

SEQ ID NO: 13222 - DNA, 20 bp, Artificial Sequence
  MKO10013222_A_Dact1
  gRNA
gcggccatcgggcgggtagc

SEQ ID NO: 13223 - DNA, 20 bp, Artificial Sequence
  MKO10013223_A_Dact1
  gRNA
gggaccgtcgcgccgcgctc

SEQ ID NO: 13224 - DNA, 20 bp, Artificial Sequence
  MKO10013224_A_Dact1
  gRNA
ggggccgtgaccgtttgaat

SEQ ID NO: 13225 - DNA, 20 bp, Artificial Sequence
  MKO10013225_A_Dact2
  gRNA
aggcggcgctgaccgcgcta

SEQ ID NO: 13226 - DNA, 20 bp, Artificial Sequence
  MKO10013226_A_Dact2
  gRNA
gtagtcgcgcgcccaccctg

SEQ ID NO: 13227 - DNA, 20 bp, Artificial Sequence
  MKO10013227_A_Dact2
  gRNA
ccccacgtaccagcgtgacc

SEQ ID NO: 13228 - DNA, 20 bp, Artificial Sequence
  MKO10013228_A_Dact3
  gRNA
ctgcgcaaccgtacaacagc

SEQ ID NO: 13229 - DNA, 20 bp, Artificial Sequence
  MKO10013229_A_Dact3
  gRNA
acactgcgacctcgcgtaag

SEQ ID NO: 13230 - DNA, 20 bp, Artificial Sequence
  MKO10013230_A_Dact3
  gRNA
cgagggacccaggcgtccat

SEQ ID NO: 13231 - DNA, 20 bp, Artificial Sequence
  MKO10013231_A_Dad1
  gRNA
gttcgtcatgtcggcgtctg

SEQ ID NO: 13232 - DNA, 20 bp, Artificial Sequence
  MKO10013232_A_Dad1
  gRNA
cttgtcgtcatgaacttcgt

SEQ ID NO: 13233 - DNA, 20 bp, Artificial Sequence
  MKO10013233_A_Dad1
  gRNA
gtagccgaactgcagcgccc

SEQ ID NO: 13234 - DNA, 20 bp, Artificial Sequence
  MKO10013234_A_Daf2
  gRNA
cgaaaacaaccttcactctc

SEQ ID NO: 13235 - DNA, 20 bp, Artificial Sequence
  MKO10013235_A_Daf2
  gRNA
tataatagtacataaaatag

SEQ ID NO: 13236 - DNA, 20 bp, Artificial Sequence
  MKO10013236_A_Daf2
  gRNA
ggaaacatacctgtgcacac

SEQ ID NO: 13237 - DNA, 20 bp, Artificial Sequence
  MKO10013237_A_Dag1
  gRNA
acggtcaccattcggacgcg

SEQ ID NO: 13238 - DNA, 20 bp, Artificial Sequence
  MKO10013238_A_Dag1
  gRNA
cgaatccgtactaccaccag

SEQ ID NO: 13239 - DNA, 20 bp, Artificial Sequence
  MKO10013239_A_Dag1
  gRNA
ccgacaacagccgtaccgtc

SEQ ID NO: 13240 - DNA, 20 bp, Artificial Sequence
  MKO10013240_A_Dagla
  gRNA
tgagttcatctacgctatcg

SEQ ID NO: 13241 - DNA, 20 bp, Artificial Sequence
  MKO10013241_A_Dagla
  gRNA
gtacgtgctctacgtgcgcc

SEQ ID NO: 13242 - DNA, 20 bp, Artificial Sequence
  MKO10013242_A_Dagla
  gRNA
cacgtagagcacgtactgca

SEQ ID NO: 13243 - DNA, 20 bp, Artificial Sequence
  MKO10013243_A_Daglb
  gRNA
agacggctgcgaagagcgtg

SEQ ID NO: 13244 - DNA, 20 bp, Artificial Sequence
  MKO10013244_A_Daglb
  gRNA
cgttgtatctcacgcacaga

SEQ ID NO: 13245 - DNA, 20 bp, Artificial Sequence
  MKO10013245_A_Daglb
  gRNA
cgctcttcgcagccgtcttc

SEQ ID NO: 13246 - DNA, 20 bp, Artificial Sequence
  MKO10013246_A_Dak
  gRNA
ggccgggtagcacttctgtc

SEQ ID NO: 13247 - DNA, 20 bp, Artificial Sequence
  MKO10013247_A_Dak
  gRNA
agatactcaccggcatgggc

SEQ ID NO: 13248 - DNA, 20 bp, Artificial Sequence
  MKO10013248_A_Dak
  gRNA
atgctaacaggtgtcatcgc

SEQ ID NO: 13249 - DNA, 20 bp, Artificial Sequence
  MKO10013249_A_Dalrd3
  gRNA
gtcggcgcgcagcgcagtac

SEQ ID NO: 13250 - DNA, 20 bp, Artificial Sequence
  MKO10013250_A_Dalrd3
  gRNA
tgtaggacaactcgcgggcc

SEQ ID NO: 13251 - DNA, 20 bp, Artificial Sequence
  MKO10013251_A_Dalrd3
  gRNA
tcgcttccttagaaccatta

SEQ ID NO: 13252 - DNA, 20 bp, Artificial Sequence
  MKO10013252_A_Dand5
  gRNA
aatcctcacccgccgagggg

SEQ ID NO: 13253 - DNA, 20 bp, Artificial Sequence
  MKO10013253_A_Dand5
  gRNA
gatgtccagcgctttcgagc

SEQ ID NO: 13254 - DNA, 20 bp, Artificial Sequence
  MKO10013254_A_Dand5
  gRNA
tagccagttcaccacgctgc

SEQ ID NO: 13255 - DNA, 20 bp, Artificial Sequence
  MKO10013255_A_Dao
  gRNA
agtgaagcttatccatcgga

SEQ ID NO: 13256 - DNA, 20 bp, Artificial Sequence
  MKO10013256_A_Dao
  gRNA
acctgccatggctaactgag

SEQ ID NO: 13257 - DNA, 20 bp, Artificial Sequence
  MKO10013257_A_Dao
  gRNA
ggtagctcttcccctctaga

SEQ ID NO: 13258 - DNA, 20 bp, Artificial Sequence
  MKO10013258_A_Dap3
  gRNA
agtacctgcatcatgtaccg

SEQ ID NO: 13259 - DNA, 20 bp, Artificial Sequence
  MKO10013259_A_Dap3
  gRNA
tcaagcgactcagaacagtc

SEQ ID NO: 13260 - DNA, 20 bp, Artificial Sequence
  MKO10013260_A_Dap3
  gRNA
gcctcctcggtacatgatgc

SEQ ID NO: 13261 - DNA, 20 bp, Artificial Sequence
  MKO10013261_A_Dapk1
  gRNA
cacgccccgccggctggact

SEQ ID NO: 13262 - DNA, 20 bp, Artificial Sequence
  MKO10013262_A_Dapk1
  gRNA
aggaccaagtccagccggcg

SEQ ID NO: 13263 - DNA, 20 bp, Artificial Sequence
  MKO10013263_A_Dapk1
  gRNA
aagtctatgatcttgatccg

SEQ ID NO: 13264 - DNA, 20 bp, Artificial Sequence
  MKO10013264_A_Dapk2
  gRNA
ctatgagaaccgcaccgacg

SEQ ID NO: 13265 - DNA, 20 bp, Artificial Sequence
  MKO10013265_A_Dapk2
  gRNA
ctcaaggatgagcaccacgt

SEQ ID NO: 13266 - DNA, 20 bp, Artificial Sequence
  MKO10013266_A_Dapk2
  gRNA
cctcacttaacgactccttc

SEQ ID NO: 13267 - DNA, 20 bp, Artificial Sequence
  MKO10013267_A_Dapk3
  gRNA
atcgcgcacaggatcgaggc

SEQ ID NO: 13268 - DNA, 20 bp, Artificial Sequence
  MKO10013268_A_Dapk3
  gRNA
cgcattaagctcatcgactt

SEQ ID NO: 13269 - DNA, 20 bp, Artificial Sequence
  MKO10013269_A_Dapk3
  gRNA
gtcaaagtgtgcgatgcgct

SEQ ID NO: 13270 - DNA, 20 bp, Artificial Sequence
  MKO10013270_A_Dapl1
  gRNA
gttctgccgtccccgctgaa

SEQ ID NO: 13271 - DNA, 20 bp, Artificial Sequence
  MKO10013271_A_Dapl1
  gRNA
tgtgccgtgtgaactgtcgc

SEQ ID NO: 13272 - DNA, 20 bp, Artificial Sequence
  MKO10013272_A_Dapl1
  gRNA
agccttctccagagcgggtg

SEQ ID NO: 13273 - DNA, 20 bp, Artificial Sequence
  MKO10013273_A_Dapp1
  gRNA
cttgcatttacgaatcagtc

SEQ ID NO: 13274 - DNA, 20 bp, Artificial Sequence
  MKO10013274_A_Dapp1
  gRNA
gctcattgctgtcccgcagc

SEQ ID NO: 13275 - DNA, 20 bp, Artificial Sequence
  MKO10013275_A_Dapp1
  gRNA
cttcggcagcatggcgggtg

SEQ ID NO: 13276 - DNA, 20 bp, Artificial Sequence
  MKO10013276_A_Dap
  gRNA
ctgcacaatccgcatcccgc

SEQ ID NO: 13277 - DNA, 20 bp, Artificial Sequence
  MKO10013277_A_Dap
  gRNA
aaagctggacacccgcccgc

SEQ ID NO: 13278 - DNA, 20 bp, Artificial Sequence
  MKO10013278_A_Dap
  gRNA
ctgggcgccggtcacttgcg

SEQ ID NO: 13279 - DNA, 20 bp, Artificial Sequence
  MKO10013279_A_Darc
  gRNA
aaggtctgagaatcgcgaag

SEQ ID NO: 13280 - DNA, 20 bp, Artificial Sequence
  MKO10013280_A_Darc
  gRNA
ctcagtttactttcgacagc

SEQ ID NO: 13281 - DNA, 20 bp, Artificial Sequence
  MKO10013281_A_Darc
  gRNA
catggggaactgtctgtatc

SEQ ID NO: 13282 - DNA, 20 bp, Artificial Sequence
  MKO10013282_A_Dars2
  gRNA
gagttgcgttcgtcccactt

SEQ ID NO: 13283 - DNA, 20 bp, Artificial Sequence
  MKO10013283_A_Dars2
  gRNA
ttgatttcaatctcacccgt

SEQ ID NO: 13284 - DNA, 20 bp, Artificial Sequence
  MKO10013284_A_Dars2
  gRNA
tgagaatctgaacaaggccg

SEQ ID NO: 13285 - DNA, 20 bp, Artificial Sequence
  MKO10013285_A_Dars
  gRNA
gccgcgtccacgatctcccg

SEQ ID NO: 13286 - DNA, 20 bp, Artificial Sequence
  MKO10013286_A_Dars
  gRNA
cagcaccaacgccagccgta

SEQ ID NO: 13287 - DNA, 20 bp, Artificial Sequence
  MKO10013287_A_Dars
  gRNA
tgcttgtatgaactcttgca

SEQ ID NO: 13288 - DNA, 20 bp, Artificial Sequence
  MKO10013288_A_Daw1
  gRNA
gtccgggacgctgtgatcag

SEQ ID NO: 13289 - DNA, 20 bp, Artificial Sequence
  MKO10013289_A_Daw1
  gRNA
catattgccattgaccaacg

SEQ ID NO: 13290 - DNA, 20 bp, Artificial Sequence
  MKO10013290_A_Daw1
  gRNA
gtgggacacggcgtctggag

SEQ ID NO: 13291 - DNA, 20 bp, Artificial Sequence
  MKO10013291_A_Daxx
  gRNA
gagcagcgaattccgtaccg

SEQ ID NO: 13292 - DNA, 20 bp, Artificial Sequence
  MKO10013292_A_Daxx
  gRNA
actcacacaaccgcccgaag

SEQ ID NO: 13293 - DNA, 20 bp, Artificial Sequence
  MKO10013293_A_Daxx
  gRNA
gacctcatccagccggttca

SEQ ID NO: 13294 - DNA, 20 bp, Artificial Sequence
  MKO10013294_A_Dazap1
  gRNA
acagcctcacccgatttcgt

SEQ ID NO: 13295 - DNA, 20 bp, Artificial Sequence
  MKO10013295_A_Dazap1
  gRNA
acggggcgccatgaacagcg

SEQ ID NO: 13296 - DNA, 20 bp, Artificial Sequence
  MKO10013296_A_Dazap1
  gRNA
ggatgcagccagagcgaaca

SEQ ID NO: 13297 - DNA, 20 bp, Artificial Sequence
  MKO10013297_A_Dazap2
  gRNA
tgcagtacctctgaatatgc

SEQ ID NO: 13298 - DNA, 20 bp, Artificial Sequence
  MKO10013298_A_Dazap2
  gRNA
cccatggcttattatccagt

SEQ ID NO: 13299 - DNA, 20 bp, Artificial Sequence
  MKO10013299_A_Dazap2
  gRNA
gactgcgagctgagcagcgt

SEQ ID NO: 13300 - DNA, 20 bp, Artificial Sequence
  MKO10013300_A_Dazl
  gRNA
aagataatcactgatcgaac

SEQ ID NO: 13301 - DNA, 20 bp, Artificial Sequence
  MKO10013301_A_Dazl
  gRNA
tgaaactgggccctgcaatc

SEQ ID NO: 13302 - DNA, 20 bp, Artificial Sequence
  MKO10013302_A_Dazl
  gRNA
tcagtctgccacaacttctg

SEQ ID NO: 13303 - DNA, 20 bp, Artificial Sequence
  MKO10013303_A_Dbf4
  gRNA
ttacaggtatgtttgagccg

SEQ ID NO: 13304 - DNA, 20 bp, Artificial Sequence
  MKO10013304_A_Dbf4
  gRNA
cctcatggtctcgaggttca

SEQ ID NO: 13305 - DNA, 20 bp, Artificial Sequence
  MKO10013305_A_Dbf4
  gRNA
ccatgaacctcgagaccatg

SEQ ID NO: 13306 - DNA, 20 bp, Artificial Sequence
  MKO10013306_A_Dbh
  gRNA
agtcacagggtccgttgaac

SEQ ID NO: 13307 - DNA, 20 bp, Artificial Sequence
  MKO10013307_A_Dbh
  gRNA
ccgacaatgagaccacgtac

SEQ ID NO: 13308 - DNA, 20 bp, Artificial Sequence
  MKO10013308_A_Dbh
  gRNA
ccccgtttaccatgatgatg

SEQ ID NO: 13309 - DNA, 20 bp, Artificial Sequence
  MKO10013309_A_Dbil5
  gRNA
cagggatgttacagtcgccc

SEQ ID NO: 13310 - DNA, 20 bp, Artificial Sequence
  MKO10013310_A_Dbil5
  gRNA
tggtataccaatgagccaag

SEQ ID NO: 13311 - DNA, 20 bp, Artificial Sequence
  MKO10013311_A_Dbil5
  gRNA
agtttctcctgatcactcac

SEQ ID NO: 13312 - DNA, 20 bp, Artificial Sequence
  MKO10013312_A_Dbi
  gRNA
tgcagatcggccggggctct

SEQ ID NO: 13313 - DNA, 20 bp, Artificial Sequence
  MKO10013313_A_Dbi
  gRNA
cagatatcccgcagctcttc

SEQ ID NO: 13314 - DNA, 20 bp, Artificial Sequence
  MKO10013314_A_Dbi
  gRNA
tgtaaaactgccacccacgc

SEQ ID NO: 13315 - DNA, 20 bp, Artificial Sequence
  MKO10013315_A_Dbn1
  gRNA
cgtacgccgccagcagctcc

SEQ ID NO: 13316 - DNA, 20 bp, Artificial Sequence
  MKO10013316_A_Dbn1
  gRNA
gacctcaagcttgcagcgtc

SEQ ID NO: 13317 - DNA, 20 bp, Artificial Sequence
  MKO10013317_A_Dbn1
  gRNA
gtggccgctgaagctgacgc

SEQ ID NO: 13318 - DNA, 20 bp, Artificial Sequence
  MKO10013318_A_Dbndd1
  gRNA
gatgcgctgtgcccgaagcc

SEQ ID NO: 13319 - DNA, 20 bp, Artificial Sequence
  MKO10013319_A_Dbndd1
  gRNA
acaattgtcccttgccgctc

SEQ ID NO: 13320 - DNA, 20 bp, Artificial Sequence
  MKO10013320_A_Dbndd1
  gRNA
atcgaagtggacctccagag

SEQ ID NO: 13321 - DNA, 20 bp, Artificial Sequence
  MKO10013321_A_Dbndd2
  gRNA
cataggtagcatctcgtcta

SEQ ID NO: 13322 - DNA, 20 bp, Artificial Sequence
  MKO10013322_A_Dbndd2
  gRNA
gtttattgatcttgcggatc

SEQ ID NO: 13323 - DNA, 20 bp, Artificial Sequence
  MKO10013323_A_Dbndd2
  gRNA
gatgtggtcctgtcagacgt

SEQ ID NO: 13324 - DNA, 20 bp, Artificial Sequence
  MKO10013324_A_Dbnl
  gRNA
ccgagaaatccccgaccgac

SEQ ID NO: 13325 - DNA, 20 bp, Artificial Sequence
  MKO10013325_A_Dbnl
  gRNA
ttgctgcctaccagtcggtc

SEQ ID NO: 13326 - DNA, 20 bp, Artificial Sequence
  MKO10013326_A_Dbnl
  gRNA
aaacttgggcaggccggagt

SEQ ID NO: 13327 - DNA, 20 bp, Artificial Sequence
  MKO10013327_A_Dbpht2
  gRNA
cccgcctgtcaccactcccc

SEQ ID NO: 13328 - DNA, 20 bp, Artificial Sequence
  MKO10013328_A_Dbpht2
  gRNA
tctgtgtgttcttcattgcc

SEQ ID NO: 13329 - DNA, 20 bp, Artificial Sequence
  MKO10013329_A_Dbpht2
  gRNA
atgaagaacacacagacact

SEQ ID NO: 13330 - DNA, 20 bp, Artificial Sequence
  MKO10013330_A_Dbp
  gRNA
acgtattccacgtccccgaa

SEQ ID NO: 13331 - DNA, 20 bp, Artificial Sequence
  MKO10013331_A_Dbp
  gRNA
gccgtttccaggccgggtcc

SEQ ID NO: 13332 - DNA, 20 bp, Artificial Sequence
  MKO10013332_A_Dbp
  gRNA
tggcgcggcctctgagcgac

SEQ ID NO: 13333 - DNA, 20 bp, Artificial Sequence
  MKO10013333_A_Dbr1
  gRNA
catttgcaagagttacccta

SEQ ID NO: 13334 - DNA, 20 bp, Artificial Sequence
  MKO10013334_A_Dbr1
  gRNA
catagggtaactcttgcaaa

SEQ ID NO: 13335 - DNA, 20 bp, Artificial Sequence
  MKO10013335_A_Dbr1
  gRNA
agcacctacagcctgcgtac

SEQ ID NO: 13336 - DNA, 20 bp, Artificial Sequence
  MKO10013336_A_Dbt
  gRNA
accatcaccagccgttacga

SEQ ID NO: 13337 - DNA, 20 bp, Artificial Sequence
  MKO10013337_A_Dbt
  gRNA
cagttcaaactctccgacat

SEQ ID NO: 13338 - DNA, 20 bp, Artificial Sequence
  MKO10013338_A_Dbt
  gRNA
tctagatgatatcgcttatg

SEQ ID NO: 13339 - DNA, 20 bp, Artificial Sequence
  MKO10013339_A_Dbx1
  gRNA
cgcagacccgcgacatttgc

SEQ ID NO: 13340 - DNA, 20 bp, Artificial Sequence
  MKO10013340_A_Dbx1
  gRNA
ctcggcagcccccgctagac

SEQ ID NO: 13341 - DNA, 20 bp, Artificial Sequence
  MKO10013341_A_Dbx1
  gRNA
ctgaggtccccgagtcggcg

SEQ ID NO: 13342 - DNA, 20 bp, Artificial Sequence
  MKO10013342_A_Dbx2
  gRNA
cgcgcagcaagttctcgatc

SEQ ID NO: 13343 - DNA, 20 bp, Artificial Sequence
  MKO10013343_A_Dbx2
  gRNA
atcgagaacttgctgcgcgc

SEQ ID NO: 13344 - DNA, 20 bp, Artificial Sequence
  MKO10013344_A_Dbx2
  gRNA
ctccgcagtgcccgtcaata

SEQ ID NO: 13345 - DNA, 20 bp, Artificial Sequence
  MKO10013345_A_Dcaf10
  gRNA
tctcgagcctctcaacgaga

SEQ ID NO: 13346 - DNA, 20 bp, Artificial Sequence
  MKO10013346_A_Dcaf10
  gRNA
taacctaccttctcgttgag

SEQ ID NO: 13347 - DNA, 20 bp, Artificial Sequence
  MKO10013347_A_Dcaf10
  gRNA
atgttgatctcaacatcctc

SEQ ID NO: 13348 - DNA, 20 bp, Artificial Sequence
  MKO10013348_A_Dcaf11
  gRNA
gtgggttatatcgatctcca

SEQ ID NO: 13349 - DNA, 20 bp, Artificial Sequence
  MKO10013349_A_Dcaf11
  gRNA
ggagatcgatataacccacc

SEQ ID NO: 13350 - DNA, 20 bp, Artificial Sequence
  MKO10013350_A_Dcaf11
  gRNA
tggatgcgacccccgacacc

SEQ ID NO: 13351 - DNA, 20 bp, Artificial Sequence
  MKO10013351_A_Dcaf12l1
  gRNA
catggtgggcggcgagcggt

SEQ ID NO: 13352 - DNA, 20 bp, Artificial Sequence
  MKO10013352_A_Dcaf12l1
  gRNA
ctacctgaagggccgagcgc

SEQ ID NO: 13353 - DNA, 20 bp, Artificial Sequence
  MKO10013353_A_Dcaf12l1
  gRNA
gaaagccgccgaggtcgatc

SEQ ID NO: 13354 - DNA, 20 bp, Artificial Sequence
  MKO10013354_A_Dcaf12l2
  gRNA
ggacgaatgtgtgaataccg

SEQ ID NO: 13355 - DNA, 20 bp, Artificial Sequence
  MKO10013355_A_Dcaf12l2
  gRNA
tgcgagtgatccggccagtc

SEQ ID NO: 13356 - DNA, 20 bp, Artificial Sequence
  MKO10013356_A_Dcaf12l2
  gRNA
gcagcaatggcccatccgct

SEQ ID NO: 13357 - DNA, 20 bp, Artificial Sequence
  MKO10013357_A_Dcaf12
  gRNA
acctgaagaaccgcgaagtc

SEQ ID NO: 13358 - DNA, 20 bp, Artificial Sequence
  MKO10013358_A_Dcaf12
  gRNA
gcctgacttcgcggttcttc

SEQ ID NO: 13359 - DNA, 20 bp, Artificial Sequence
  MKO10013359_A_Dcaf12
  gRNA
gcccgcaccttgcagttgtc

SEQ ID NO: 13360 - DNA, 20 bp, Artificial Sequence
  MKO10013360_A_Dcaf13
  gRNA
ccgtgatggagtcaattgcc

SEQ ID NO: 13361 - DNA, 20 bp, Artificial Sequence
  MKO10013361_A_Dcaf13
  gRNA
aaagctctcacatattctcg

SEQ ID NO: 13362 - DNA, 20 bp, Artificial Sequence
  MKO10013362_A_Dcaf13
  gRNA
gagccgttgtacacagtatt

SEQ ID NO: 13363 - DNA, 20 bp, Artificial Sequence
  MKO10013363_A_Dcaf15
  gRNA
ccgcttaggtccggcaggtg

SEQ ID NO: 13364 - DNA, 20 bp, Artificial Sequence
  MKO10013364_A_Dcaf15
  gRNA
ctcacctgggtgggcacgac

SEQ ID NO: 13365 - DNA, 20 bp, Artificial Sequence
  MKO10013365_A_Dcaf15
  gRNA
cctagcacccgctcggccaa

SEQ ID NO: 13366 - DNA, 20 bp, Artificial Sequence
  MKO10013366_A_Dcaf17
  gRNA
cttcgtatatccgcaactac

SEQ ID NO: 13367 - DNA, 20 bp, Artificial Sequence
  MKO10013367_A_Dcaf17
  gRNA
ggcttctatgcacgcgacgc

SEQ ID NO: 13368 - DNA, 20 bp, Artificial Sequence
  MKO10013368_A_Dcaf17
  gRNA
tagtctccatgggccggacc

SEQ ID NO: 13369 - DNA, 20 bp, Artificial Sequence
  MKO10013369_A_Dcaf4
  gRNA
gatgtcttaccggcaataac

SEQ ID NO: 13370 - DNA, 20 bp, Artificial Sequence
  MKO10013370_A_Dcaf4
  gRNA
catcctacgaaaaaaccagc

SEQ ID NO: 13371 - DNA, 20 bp, Artificial Sequence
  MKO10013371_A_Dcaf4
  gRNA
ccgatacttccgtttgctcc

SEQ ID NO: 13372 - DNA, 20 bp, Artificial Sequence
  MKO10013372_A_Dcaf5
  gRNA
cagcgtcatgtttaaccccg

SEQ ID NO: 13373 - DNA, 20 bp, Artificial Sequence
  MKO10013373_A_Dcaf5
  gRNA
acgaccgccgagttctgcta

SEQ ID NO: 13374 - DNA, 20 bp, Artificial Sequence
  MKO10013374_A_Dcaf5
  gRNA
ggccaatagccggggctcca

SEQ ID NO: 13375 - DNA, 20 bp, Artificial Sequence
  MKO10013375_A_Dcaf6
  gRNA
tgccaatttacgtgccatta

SEQ ID NO: 13376 - DNA, 20 bp, Artificial Sequence
  MKO10013376_A_Dcaf6
  gRNA
tatttgctcgatgccctgaa

SEQ ID NO: 13377 - DNA, 20 bp, Artificial Sequence
  MKO10013377_A_Dcaf6
  gRNA
agaaaggtgtaagggtcgtt

SEQ ID NO: 13378 - DNA, 20 bp, Artificial Sequence
  MKO10013378_A_Dcaf7
  gRNA
gacatcgccttcagccgcgc

SEQ ID NO: 13379 - DNA, 20 bp, Artificial Sequence
  MKO10013379_A_Dcaf7
  gRNA
gtggtgactatctccgtgtg

SEQ ID NO: 13380 - DNA, 20 bp, Artificial Sequence
  MKO10013380_A_Dcaf7
  gRNA
caagcaggaccctaactacc

SEQ ID NO: 13381 - DNA, 20 bp, Artificial Sequence
  MKO10013381_A_Dcaf8
  gRNA
gaggaacaacctcggcaccg

SEQ ID NO: 13382 - DNA, 20 bp, Artificial Sequence
  MKO10013382_A_Dcaf8
  gRNA
cagccttaccccgacctcgc

SEQ ID NO: 13383 - DNA, 20 bp, Artificial Sequence
  MKO10013383_A_Dcaf8
  gRNA
accagctgacaggaacgtgc

SEQ ID NO: 13384 - DNA, 20 bp, Artificial Sequence
  MKO10013384_A_Dcakd
  gRNA
tcgacgtggacgtcattgcg

SEQ ID NO: 13385 - DNA, 20 bp, Artificial Sequence
  MKO10013385_A_Dcakd
  gRNA
tctactatacgccggtgggc

SEQ ID NO: 13386 - DNA, 20 bp, Artificial Sequence
  MKO10013386_A_Dcakd
  gRNA
ctgacgggaggcatcgcctc

SEQ ID NO: 13387 - DNA, 20 bp, Artificial Sequence
  MKO10013387_A_Dcbld1
  gRNA
acgaggcagccattatttcg

SEQ ID NO: 13388 - DNA, 20 bp, Artificial Sequence
  MKO10013388_A_Dcbld1
  gRNA
tacgccagcagtgaccatcc

SEQ ID NO: 13389 - DNA, 20 bp, Artificial Sequence
  MKO10013389_A_Dcbld1
  gRNA
agcagtgcaacagatcagta

SEQ ID NO: 13390 - DNA, 20 bp, Artificial Sequence
  MKO10013390_A_Dcbld2
  gRNA
ttcgagtcaggacgggagaa

SEQ ID NO: 13391 - DNA, 20 bp, Artificial Sequence
  MKO10013391_A_Dcbld2
  gRNA
ggagtcagcagaacggaaat

SEQ ID NO: 13392 - DNA, 20 bp, Artificial Sequence
  MKO10013392_A_Dcbld2
  gRNA
aatcagtcaattgagtccaa

SEQ ID NO: 13393 - DNA, 20 bp, Artificial Sequence
  MKO10013393_A_Dcc
  gRNA
gacctcctcgcctcgtaacc

SEQ ID NO: 13394 - DNA, 20 bp, Artificial Sequence
  MKO10013394_A_Dcc
  gRNA
gcgaggaggtcatccaactc

SEQ ID NO: 13395 - DNA, 20 bp, Artificial Sequence
  MKO10013395_A_Dcc
  gRNA
tgaaggactttaccaatgcg

SEQ ID NO: 13396 - DNA, 20 bp, Artificial Sequence
  MKO10013396_A_Dcdc2a
  gRNA
gtgaatgacgacacgccgcc

SEQ ID NO: 13397 - DNA, 20 bp, Artificial Sequence
  MKO10013397_A_Dcdc2a
  gRNA
tcaacgtgtccgcccgcttc

SEQ ID NO: 13398 - DNA, 20 bp, Artificial Sequence
  MKO10013398_A_Dcdc2a
  gRNA
cggatgcggtggcccgtcct

SEQ ID NO: 13399 - DNA, 20 bp, Artificial Sequence
  MKO10013399_A_Dcdc2b
  gRNA
ctccaacagccacgtagtaa

SEQ ID NO: 13400 - DNA, 20 bp, Artificial Sequence
  MKO10013400_A_Dcdc2b
  gRNA
ggccattactacgtggctgt

SEQ ID NO: 13401 - DNA, 20 bp, Artificial Sequence
  MKO10013401_A_Dcdc2b
  gRNA
tcaacaccgtgtcccagtcc

SEQ ID NO: 13402 - DNA, 20 bp, Artificial Sequence
  MKO10013402_A_Dcdc2c
  gRNA
gcacgctattccaatctgac

SEQ ID NO: 13403 - DNA, 20 bp, Artificial Sequence
  MKO10013403_A_Dcdc2c
  gRNA
tactttcgaactcctcctag

SEQ ID NO: 13404 - DNA, 20 bp, Artificial Sequence
  MKO10013404_A_Dcdc2c
  gRNA
acccatgaggacttccagta

SEQ ID NO: 13405 - DNA, 20 bp, Artificial Sequence
  MKO10013405_A_Dchs1
  gRNA
taggtagggctatcaaatcg

SEQ ID NO: 13406 - DNA, 20 bp, Artificial Sequence
  MKO10013406_A_Dchs1
  gRNA
tgtgtgtaccacccggaccc

SEQ ID NO: 13407 - DNA, 20 bp, Artificial Sequence
  MKO10013407_A_Dchs1
  gRNA
tagagcgcgcagtgtataga

SEQ ID NO: 13408 - DNA, 20 bp, Artificial Sequence
  MKO10013408_A_Dck
  gRNA
tatatcaagactggcacgac

SEQ ID NO: 13409 - DNA, 20 bp, Artificial Sequence
  MKO10013409_A_Dck
  gRNA
gtcgtgccagtcttgatata

SEQ ID NO: 13410 - DNA, 20 bp, Artificial Sequence
  MKO10013410_A_Dck
  gRNA
cttacttcagagtccgatga

SEQ ID NO: 13411 - DNA, 20 bp, Artificial Sequence
  MKO10013411_A_Dclk1
  gRNA
cattaccgacgctatcaagc

SEQ ID NO: 13412 - DNA, 20 bp, Artificial Sequence
  MKO10013412_A_Dclk1
  gRNA
ctcccgcgcagtgtcttctt

SEQ ID NO: 13413 - DNA, 20 bp, Artificial Sequence
  MKO10013413_A_Dclk1
  gRNA
accagagaagttccgttacc

SEQ ID NO: 13414 - DNA, 20 bp, Artificial Sequence
  MKO10013414_A_Dclk2
  gRNA
ccaaaaacgttaatccgaac

SEQ ID NO: 13415 - DNA, 20 bp, Artificial Sequence
  MKO10013415_A_Dclk2
  gRNA
ctcgagagtaggacgatttc

SEQ ID NO: 13416 - DNA, 20 bp, Artificial Sequence
  MKO10013416_A_Dclk2
  gRNA
gggcggaaccacccgcaccc

SEQ ID NO: 13417 - DNA, 20 bp, Artificial Sequence
  MKO10013417_A_Dclk3
  gRNA
agcggcatgacggcaccacg

SEQ ID NO: 13418 - DNA, 20 bp, Artificial Sequence
  MKO10013418_A_Dclk3
  gRNA
ttccggccactgggtcgttc

SEQ ID NO: 13419 - DNA, 20 bp, Artificial Sequence
  MKO10013419_A_Dclk3
  gRNA
tcggccgtgtaccgcttctt

SEQ ID NO: 13420 - DNA, 20 bp, Artificial Sequence
  MKO10013420_A_Dclre1a
  gRNA
aggtgtagtgcaccgagtga

SEQ ID NO: 13421 - DNA, 20 bp, Artificial Sequence
  MKO10013421_A_Dclre1a
  gRNA
tatctcgactttgagcgagc

SEQ ID NO: 13422 - DNA, 20 bp, Artificial Sequence
  MKO10013422_A_Dclre1a
  gRNA
atacatccgtcagttgccga

SEQ ID NO: 13423 - DNA, 20 bp, Artificial Sequence
  MKO10013423_A_Dclre1b
  gRNA
ggggattacgaccccgttca

SEQ ID NO: 13424 - DNA, 20 bp, Artificial Sequence
  MKO10013424_A_Dclre1b
  gRNA
gaagaagagccgcgccgaac

SEQ ID NO: 13425 - DNA, 20 bp, Artificial Sequence
  MKO10013425_A_Dclre1b
  gRNA
gctgcgcactttccggcttg

SEQ ID NO: 13426 - DNA, 20 bp, Artificial Sequence
  MKO10013426_A_Dclre1c
  gRNA
tctccattgaccgcttcgac

SEQ ID NO: 13427 - DNA, 20 bp, Artificial Sequence
  MKO10013427_A_Dclre1c
  gRNA
tcaactaaagatatctgcgt

SEQ ID NO: 13428 - DNA, 20 bp, Artificial Sequence
  MKO10013428_A_Dclre1c
  gRNA
tcaggttctccctgtcgaag

SEQ ID NO: 13429 - DNA, 20 bp, Artificial Sequence
  MKO10013429_A_Dcn
  gRNA
tctagcaaggttgtgtcggg

SEQ ID NO: 13430 - DNA, 20 bp, Artificial Sequence
  MKO10013430_A_Dcn
  gRNA
aacataactgcgatccctca

SEQ ID NO: 13431 - DNA, 20 bp, Artificial Sequence
  MKO10013431_A_Dcn
  gRNA
agcctttccaacttcacgag

SEQ ID NO: 13432 - DNA, 20 bp, Artificial Sequence
  MKO10013432_A_Dcp1a
  gRNA
gtttatctcgagcagcctgc

SEQ ID NO: 13433 - DNA, 20 bp, Artificial Sequence
  MKO10013433_A_Dcp1a
  gRNA
taccctctcatactcatcct

SEQ ID NO: 13434 - DNA, 20 bp, Artificial Sequence
  MKO10013434_A_Dcp1a
  gRNA
aagtgtcaatatacagtatc

SEQ ID NO: 13435 - DNA, 20 bp, Artificial Sequence
  MKO10013435_A_Dcp1b
  gRNA
ggaggatccggctccatgac

SEQ ID NO: 13436 - DNA, 20 bp, Artificial Sequence
  MKO10013436_A_Dcp1b
  gRNA
gaaccttgtttgtttatacg

SEQ ID NO: 13437 - DNA, 20 bp, Artificial Sequence
  MKO10013437_A_Dcp1b
  gRNA
ttacctcgtataaacaaaca

SEQ ID NO: 13438 - DNA, 20 bp, Artificial Sequence
  MKO10013438_A_Dcp2
  gRNA
tctctcgccgcacagtcatg

SEQ ID NO: 13439 - DNA, 20 bp, Artificial Sequence
  MKO10013439_A_Dcp2
  gRNA
agaataattgcaccgtaagt

SEQ ID NO: 13440 - DNA, 20 bp, Artificial Sequence
  MKO10013440_A_Dcp2
  gRNA
tcatgactgtgcggcgagag

SEQ ID NO: 13441 - DNA, 20 bp, Artificial Sequence
  MKO10013441_A_Dcpp1
  gRNA
cataataccccaccattagc

SEQ ID NO: 13442 - DNA, 20 bp, Artificial Sequence
  MKO10013442_A_Dcpp1
  gRNA
cttaagggtagattgattgt

SEQ ID NO: 13443 - DNA, 20 bp, Artificial Sequence
  MKO10013443_A_Dcpp1
  gRNA
agagcacatcattgcagccc

SEQ ID NO: 13444 - DNA, 20 bp, Artificial Sequence
  MKO10013444_A_Dcpp2
  gRNA
cactcagccgcgcctgctaa

SEQ ID NO: 13445 - DNA, 20 bp, Artificial Sequence
  MKO10013445_A_Dcpp2
  gRNA
gctcaactataatgacaacg

SEQ ID NO: 13446 - DNA, 20 bp, Artificial Sequence
  MKO10013446_A_Dcpp2
  gRNA
cttaccttgtgtcaaaaccg

SEQ ID NO: 13447 - DNA, 20 bp, Artificial Sequence
  MKO10013447_A_Dcpp3
  gRNA
cttcaggctagatcgattgt

SEQ ID NO: 13448 - DNA, 20 bp, Artificial Sequence
  MKO10013448_A_Dcpp3
  gRNA
tcagttcaactatgatgaca

SEQ ID NO: 13449 - DNA, 20 bp, Artificial Sequence
  MKO10013449_A_Dcpp3
  gRNA
gagcacatcactggggtcga

SEQ ID NO: 13450 - DNA, 20 bp, Artificial Sequence
  MKO10013450_A_Dcps
  gRNA
ggcagatggcgatcaaatac

SEQ ID NO: 13451 - DNA, 20 bp, Artificial Sequence
  MKO10013451_A_Dcps
  gRNA
tgatcgccatctgccatcgc

SEQ ID NO: 13452 - DNA, 20 bp, Artificial Sequence
  MKO10013452_A_Dcps
  gRNA
ctccgcctgatccgagagac

SEQ ID NO: 13453 - DNA, 20 bp, Artificial Sequence
  MKO10013453_A_Dcst1
  gRNA
tagggccggcggccaatcta

SEQ ID NO: 13454 - DNA, 20 bp, Artificial Sequence
  MKO10013454_A_Dcst1
  gRNA
tcaacaacacccgatccgcc

SEQ ID NO: 13455 - DNA, 20 bp, Artificial Sequence
  MKO10013455_A_Dcst1
  gRNA
ggtggtggcgttatactgct

SEQ ID NO: 13456 - DNA, 20 bp, Artificial Sequence
  MKO10013456_A_Dcstamp
  gRNA
tgtcattcatatgagcctcc

SEQ ID NO: 13457 - DNA, 20 bp, Artificial Sequence
  MKO10013457_A_Dcstamp
  gRNA
aatgaagcatcgtgcgcgct

SEQ ID NO: 13458 - DNA, 20 bp, Artificial Sequence
  MKO10013458_A_Dcstamp
  gRNA
tctcaaggagcttcgcatgc

SEQ ID NO: 13459 - DNA, 20 bp, Artificial Sequence
  MKO10013459_A_Dctd
  gRNA
ctgtcgtctcctcgctgtcg

SEQ ID NO: 13460 - DNA, 20 bp, Artificial Sequence
  MKO10013460_A_Dctd
  gRNA
ggataaataccacgacagcg

SEQ ID NO: 13461 - DNA, 20 bp, Artificial Sequence
  MKO10013461_A_Dctd
  gRNA
atgtgctaaactcatcatcc

SEQ ID NO: 13462 - DNA, 20 bp, Artificial Sequence
  MKO10013462_A_Dctn1
  gRNA
actggcgtacaaagatgccg

SEQ ID NO: 13463 - DNA, 20 bp, Artificial Sequence
  MKO10013463_A_Dctn1
  gRNA
tggcagcaggatgagtacgg

SEQ ID NO: 13464 - DNA, 20 bp, Artificial Sequence
  MKO10013464_A_Dctn1
  gRNA
caccccagctcagactccgc

SEQ ID NO: 13465 - DNA, 20 bp, Artificial Sequence
  MKO10013465_A_Dctn2
  gRNA
tcgctggtttcataaacgtc

SEQ ID NO: 13466 - DNA, 20 bp, Artificial Sequence
  MKO10013466_A_Dctn2
  gRNA
tgaaaccagcgacctacctg

SEQ ID NO: 13467 - DNA, 20 bp, Artificial Sequence
  MKO10013467_A_Dctn2
  gRNA
cgctgcctacgacaagttca

SEQ ID NO: 13468 - DNA, 20 bp, Artificial Sequence
  MKO10013468_A_Dctn3
  gRNA
tgatcgcattgccatacctg

SEQ ID NO: 13469 - DNA, 20 bp, Artificial Sequence
  MKO10013469_A_Dctn3
  gRNA
cctggaacaagtgaacgccc

SEQ ID NO: 13470 - DNA, 20 bp, Artificial Sequence
  MKO10013470_A_Dctn3
  gRNA
ctggacagcgcttctatcaa

SEQ ID NO: 13471 - DNA, 20 bp, Artificial Sequence
  MKO10013471_A_Dctn4
  gRNA
cgaacgagatcgcaagaagc

SEQ ID NO: 13472 - DNA, 20 bp, Artificial Sequence
  MKO10013472_A_Dctn4
  gRNA
tgcttgttgcacgggtagaa

SEQ ID NO: 13473 - DNA, 20 bp, Artificial Sequence
  MKO10013473_A_Dctn4
  gRNA
tgtccatcgacaaaatccac

SEQ ID NO: 13474 - DNA, 20 bp, Artificial Sequence
  MKO10013474_A_Dctn5
  gRNA
ccgttcaaaaaattcagcaa

SEQ ID NO: 13475 - DNA, 20 bp, Artificial Sequence
  MKO10013475_A_Dctn5
  gRNA
gtccaactcttacatttgcc

SEQ ID NO: 13476 - DNA, 20 bp, Artificial Sequence
  MKO10013476_A_Dctn5
  gRNA
agccagaacatcgtcctcaa

SEQ ID NO: 13477 - DNA, 20 bp, Artificial Sequence
  MKO10013477_A_Dctn6
  gRNA
ccctaaagcacgaattatcg

SEQ ID NO: 13478 - DNA, 20 bp, Artificial Sequence
  MKO10013478_A_Dctn6
  gRNA
tccgcgataattcgtgcttt

SEQ ID NO: 13479 - DNA, 20 bp, Artificial Sequence
  MKO10013479_A_Dctn6
  gRNA
gcccacttcaaatacgttgt

SEQ ID NO: 13480 - DNA, 20 bp, Artificial Sequence
  MKO10013480_A_Dctpp1
  gRNA
ccgcccgttcagattcagtc

SEQ ID NO: 13481 - DNA, 20 bp, Artificial Sequence
  MKO10013481_A_Dctpp1
  gRNA
tgacggtgagcgcggtactg

SEQ ID NO: 13482 - DNA, 20 bp, Artificial Sequence
  MKO10013482_A_Dctpp1
  gRNA
acaggtggactgggtaacgt

SEQ ID NO: 13483 - DNA, 20 bp, Artificial Sequence
  MKO10013483_A_Dct
  gRNA
ggaccggccccgactgtaat

SEQ ID NO: 13484 - DNA, 20 bp, Artificial Sequence
  MKO10013484_A_Dct
  gRNA
acgtgatcaccacgcaacac

SEQ ID NO: 13485 - DNA, 20 bp, Artificial Sequence
  MKO10013485_A_Dct
  gRNA
gagttccgactaatcagcgt

SEQ ID NO: 13486 - DNA, 20 bp, Artificial Sequence
  MKO10013486_A_Dcun1d1
  gRNA
caactgtacactagatacaa

SEQ ID NO: 13487 - DNA, 20 bp, Artificial Sequence
  MKO10013487_A_Dcun1d1
  gRNA
acagtgcgagttctccaaac

SEQ ID NO: 13488 - DNA, 20 bp, Artificial Sequence
  MKO10013488_A_Dcun1d1
  gRNA
taatattacagatctagaaa

SEQ ID NO: 13489 - DNA, 20 bp, Artificial Sequence
  MKO10013489_A_Dcun1d2
  gRNA
gcaggtgtgatagcaccgag

SEQ ID NO: 13490 - DNA, 20 bp, Artificial Sequence
  MKO10013490_A_Dcun1d2
  gRNA
taaaggtccttgaacttggc

SEQ ID NO: 13491 - DNA, 20 bp, Artificial Sequence
  MKO10013491_A_Dcun1d2
  gRNA
tgtggatggcatgacggagc

SEQ ID NO: 13492 - DNA, 20 bp, Artificial Sequence
  MKO10013492_A_Dcun1d3
  gRNA
gagatgcccttgattcccga

SEQ ID NO: 13493 - DNA, 20 bp, Artificial Sequence
  MKO10013493_A_Dcun1d3
  gRNA
ccaccttgtggcaaaccagc

SEQ ID NO: 13494 - DNA, 20 bp, Artificial Sequence
  MKO10013494_A_Dcun1d3
  gRNA
ttgacaagaatatccccagc

SEQ ID NO: 13495 - DNA, 20 bp, Artificial Sequence
  MKO10013495_A_Dcun1d4
  gRNA
ccgaagaactgcaagagcgc

SEQ ID NO: 13496 - DNA, 20 bp, Artificial Sequence
  MKO10013496_A_Dcun1d4
  gRNA
tttctccagtaagcggtgcc

SEQ ID NO: 13497 - DNA, 20 bp, Artificial Sequence
  MKO10013497_A_Dcun1d4
  gRNA
tacctgtttggtgatcgtct

SEQ ID NO: 13498 - DNA, 20 bp, Artificial Sequence
  MKO10013498_A_Dcun1d5
  gRNA
cctcctgctagactcatcag

SEQ ID NO: 13499 - DNA, 20 bp, Artificial Sequence
  MKO10013499_A_Dcun1d5
  gRNA
tctccactgatgagtctagc

SEQ ID NO: 13500 - DNA, 20 bp, Artificial Sequence
  MKO10013500_A_Dcun1d5
  gRNA
actcacccttgcaaaatcaa

SEQ ID NO: 13501 - DNA, 20 bp, Artificial Sequence
  MKO10013501_A_Dcxr
  gRNA
cctggacgacctggtccgcg

SEQ ID NO: 13502 - DNA, 20 bp, Artificial Sequence
  MKO10013502_A_Dcxr
  gRNA
ggcggtgagtcggacgcgag

SEQ ID NO: 13503 - DNA, 20 bp, Artificial Sequence
  MKO10013503_A_Dcxr
  gRNA
ccacgggtcccacattgctt

SEQ ID NO: 13504 - DNA, 20 bp, Artificial Sequence
  MKO10013504_A_Dcx
  gRNA
cttcaccccgctgcgaatga

SEQ ID NO: 13505 - DNA, 20 bp, Artificial Sequence
  MKO10013505_A_Dcx
  gRNA
ttgctgcggcgcattgggcc

SEQ ID NO: 13506 - DNA, 20 bp, Artificial Sequence
  MKO10013506_A_Dcx
  gRNA
cttgtgaccatcattcgcag

SEQ ID NO: 13507 - DNA, 20 bp, Artificial Sequence
  MKO10013507_A_Dda1
  gRNA
ccttgcacacagagtccgcg

SEQ ID NO: 13508 - DNA, 20 bp, Artificial Sequence
  MKO10013508_A_Dda1
  gRNA
tcgggtcggcaggtatactg

SEQ ID NO: 13509 - DNA, 20 bp, Artificial Sequence
  MKO10013509_A_Dda1
  gRNA
gagctcagcgccacctcgca

SEQ ID NO: 13510 - DNA, 20 bp, Artificial Sequence
  MKO10013510_A_Ddah1
  gRNA
gctcactgtacccgacgaca

SEQ ID NO: 13511 - DNA, 20 bp, Artificial Sequence
  MKO10013511_A_Ddah1
  gRNA
ggtggggacgtcctattcac

SEQ ID NO: 13512 - DNA, 20 bp, Artificial Sequence
  MKO10013512_A_Ddah1
  gRNA
cagtgagcttgtcataacga

SEQ ID NO: 13513 - DNA, 20 bp, Artificial Sequence
  MKO10013513_A_Ddah2
  gRNA
catggggggacctcgcaccg

SEQ ID NO: 13514 - DNA, 20 bp, Artificial Sequence
  MKO10013514_A_Ddah2
  gRNA
tccaagtggaccaatcatcg

SEQ ID NO: 13515 - DNA, 20 bp, Artificial Sequence
  MKO10013515_A_Ddah2
  gRNA
gatctcagctcctcgatgat

SEQ ID NO: 13516 - DNA, 20 bp, Artificial Sequence
  MKO10013516_A_Ddb1
  gRNA
ggaccgcattggtcgcccct

SEQ ID NO: 13517 - DNA, 20 bp, Artificial Sequence
  MKO10013517_A_Ddb1
  gRNA
gaccctgagtgccgtatgat

SEQ ID NO: 13518 - DNA, 20 bp, Artificial Sequence
  MKO10013518_A_Ddb1
  gRNA
cacaagattagagatctatg

SEQ ID NO: 13519 - DNA, 20 bp, Artificial Sequence
  MKO10013519_A_Ddb2
  gRNA
ggatctttaccagcataagt

SEQ ID NO: 13520 - DNA, 20 bp, Artificial Sequence
  MKO10013520_A_Ddb2
  gRNA
cacctggtcatcactacagc

SEQ ID NO: 13521 - DNA, 20 bp, Artificial Sequence
  MKO10013521_A_Ddb2
  gRNA
cttacccctttaaggaagat

SEQ ID NO: 13522 - DNA, 20 bp, Artificial Sequence
  MKO10013522_A_Ddc
  gRNA
taaagttatccgccagctgc

SEQ ID NO: 13523 - DNA, 20 bp, Artificial Sequence
  MKO10013523_A_Ddc
  gRNA
cagctgccttgtcccgctcc

SEQ ID NO: 13524 - DNA, 20 bp, Artificial Sequence
  MKO10013524_A_Ddc
  gRNA
gaccgtgatgatggactggc

SEQ ID NO: 13525 - DNA, 20 bp, Artificial Sequence
  MKO10013525_A_Ddhd1
  gRNA
cgccggcggcatgaactacc

SEQ ID NO: 13526 - DNA, 20 bp, Artificial Sequence
  MKO10013526_A_Ddhd1
  gRNA
gtagtagcgcaacgacgagc

SEQ ID NO: 13527 - DNA, 20 bp, Artificial Sequence
  MKO10013527_A_Ddhd1
  gRNA
gataaaataccagtaatgcg

SEQ ID NO: 13528 - DNA, 20 bp, Artificial Sequence
  MKO10013528_A_Ddhd2
  gRNA
caataagtatgtcccctact

SEQ ID NO: 13529 - DNA, 20 bp, Artificial Sequence
  MKO10013529_A_Ddhd2
  gRNA
cgaaaacgaagatcgcaagc

SEQ ID NO: 13530 - DNA, 20 bp, Artificial Sequence
  MKO10013530_A_Ddhd2
  gRNA
gtacatgcttgcagtaactc

SEQ ID NO: 13531 - DNA, 20 bp, Artificial Sequence
  MKO10013531_A_Ddi1
  gRNA
gctgttccatgtaaacgatc

SEQ ID NO: 13532 - DNA, 20 bp, Artificial Sequence
  MKO10013532_A_Ddi1
  gRNA
gacccagtgaaatctgctcg

SEQ ID NO: 13533 - DNA, 20 bp, Artificial Sequence
  MKO10013533_A_Ddi1
  gRNA
ggaggcccagatcgtttaca

SEQ ID NO: 13534 - DNA, 20 bp, Artificial Sequence
  MKO10013534_A_Ddi2
  gRNA
gtgaaagcctttgtcgactc

SEQ ID NO: 13535 - DNA, 20 bp, Artificial Sequence
  MKO10013535_A_Ddi2
  gRNA
gaacatgacgatagctatgg

SEQ ID NO: 13536 - DNA, 20 bp, Artificial Sequence
  MKO10013536_A_Ddi2
  gRNA
tgttgtgattctacgacaga

SEQ ID NO: 13537 - DNA, 20 bp, Artificial Sequence
  MKO10013537_A_Ddit3
  gRNA
gcgggctctgatcgaccgca

SEQ ID NO: 13538 - DNA, 20 bp, Artificial Sequence
  MKO10013538_A_Ddit3
  gRNA
aggaaatcgagcgcctgacc

SEQ ID NO: 13539 - DNA, 20 bp, Artificial Sequence
  MKO10013539_A_Ddit3
  gRNA
ggcacctatatctcatcccc

SEQ ID NO: 13540 - DNA, 20 bp, Artificial Sequence
  MKO10013540_A_Ddit4l
  gRNA
gatcgtgtgtgatgctagcg

SEQ ID NO: 13541 - DNA, 20 bp, Artificial Sequence
  MKO10013541_A_Ddit4l
  gRNA
cgtgcataacacaaccccga

SEQ ID NO: 13542 - DNA, 20 bp, Artificial Sequence
  MKO10013542_A_Ddit4l
  gRNA
gccgttgaccatggttgcaa

SEQ ID NO: 13543 - DNA, 20 bp, Artificial Sequence
  MKO10013543_A_Ddit4
  gRNA
agcggccggagttcgagacg

SEQ ID NO: 13544 - DNA, 20 bp, Artificial Sequence
  MKO10013544_A_Ddit4
  gRNA
ctcggcatgagcaaacgcgc

SEQ ID NO: 13545 - DNA, 20 bp, Artificial Sequence
  MKO10013545_A_Ddit4
  gRNA
gagcctgtcccaggcgcgat

SEQ ID NO: 13546 - DNA, 20 bp, Artificial Sequence
  MKO10013546_A_Ddn
  gRNA
agcgcgacgactataatgac

SEQ ID NO: 13547 - DNA, 20 bp, Artificial Sequence
  MKO10013547_A_Ddn
  gRNA
cgcgggttcacttctccgac

SEQ ID NO: 13548 - DNA, 20 bp, Artificial Sequence
  MKO10013548_A_Ddn
  gRNA
cacggcttctcgcaacgccc

SEQ ID NO: 13549 - DNA, 20 bp, Artificial Sequence
  MKO10013549_A_Ddost
  gRNA
gcgcccttaccttccaccga

SEQ ID NO: 13550 - DNA, 20 bp, Artificial Sequence
  MKO10013550_A_Ddost
  gRNA
gtacttaatgagggacaagc

SEQ ID NO: 13551 - DNA, 20 bp, Artificial Sequence
  MKO10013551_A_Ddost
  gRNA
gctgccgccaccatcaatga

SEQ ID NO: 13552 - DNA, 20 bp, Artificial Sequence
  MKO10013552_A_Ddo
  gRNA
ctacaagtcgccggcttccc

SEQ ID NO: 13553 - DNA, 20 bp, Artificial Sequence
  MKO10013553_A_Ddo
  gRNA
tcgttggagctggcgtgata

SEQ ID NO: 13554 - DNA, 20 bp, Artificial Sequence
  MKO10013554_A_Ddo
  gRNA
catcccagccgctacattac

SEQ ID NO: 13555 - DNA, 20 bp, Artificial Sequence
  MKO10013555_A_Ddr1
  gRNA
acaggtgatttcgggtaacg

SEQ ID NO: 13556 - DNA, 20 bp, Artificial Sequence
  MKO10013556_A_Ddr1
  gRNA
agtaacgcaaccgatagctt

SEQ ID NO: 13557 - DNA, 20 bp, Artificial Sequence
  MKO10013557_A_Ddr1
  gRNA
aagagttctcccgaagctat

SEQ ID NO: 13558 - DNA, 20 bp, Artificial Sequence
  MKO10013558_A_Ddr2
  gRNA
cgaacaaatctggcgacgat

SEQ ID NO: 13559 - DNA, 20 bp, Artificial Sequence
  MKO10013559_A_Ddr2
  gRNA
ggacccaggggcgccatgca

SEQ ID NO: 13560 - DNA, 20 bp, Artificial Sequence
  MKO10013560_A_Ddr2
  gRNA
agtgcaacccgatgacctga

SEQ ID NO: 13561 - DNA, 20 bp, Artificial Sequence
  MKO10013561_A_Ddrgk1
  gRNA
ccactcgctgggctcgacgc

SEQ ID NO: 13562 - DNA, 20 bp, Artificial Sequence
  MKO10013562_A_Ddrgk1
  gRNA
tgcccaagtccctccgacgc

SEQ ID NO: 13563 - DNA, 20 bp, Artificial Sequence
  MKO10013563_A_Ddrgk1
  gRNA
ggtactcctcgtgctcccgc

SEQ ID NO: 13564 - DNA, 20 bp, Artificial Sequence
  MKO10013564_A_Ddt
  gRNA
gtgagcgttacgatacgacc

SEQ ID NO: 13565 - DNA, 20 bp, Artificial Sequence
  MKO10013565_A_Ddt
  gRNA
tctccagccccgcgggtatg

SEQ ID NO: 13566 - DNA, 20 bp, Artificial Sequence
  MKO10013566_A_Ddt
  gRNA
gccggctagccgcatacccg

SEQ ID NO: 13567 - DNA, 20 bp, Artificial Sequence
  MKO10013567_A_Ddx10
  gRNA
tttgaggttctacgcaaagt

SEQ ID NO: 13568 - DNA, 20 bp, Artificial Sequence
  MKO10013568_A_Ddx10
  gRNA
aatatcacctactcgagaac

SEQ ID NO: 13569 - DNA, 20 bp, Artificial Sequence
  MKO10013569_A_Ddx10
  gRNA
cccacctaacatctgaagat

SEQ ID NO: 13570 - DNA, 20 bp, Artificial Sequence
  MKO10013570_A_Ddx11
  gRNA
tcggggtgtccgtaggttct

SEQ ID NO: 13571 - DNA, 20 bp, Artificial Sequence
  MKO10013571_A_Ddx11
  gRNA
agcgagttcttctcactact

SEQ ID NO: 13572 - DNA, 20 bp, Artificial Sequence
  MKO10013572_A_Ddx11
  gRNA
tctcatattctgccagaacc

SEQ ID NO: 13573 - DNA, 20 bp, Artificial Sequence
  MKO10013573_A_Ddx17
  gRNA
tggtttatatgaacaatcgc

SEQ ID NO: 13574 - DNA, 20 bp, Artificial Sequence
  MKO10013574_A_Ddx17
  gRNA
gggcttccccctaagaagtt

SEQ ID NO: 13575 - DNA, 20 bp, Artificial Sequence
  MKO10013575_A_Ddx17
  gRNA
agtatgaggttgatgagcta

SEQ ID NO: 13576 - DNA, 20 bp, Artificial Sequence
  MKO10013576_A_Ddx18
  gRNA
atggcaaatgatgccgggcc

SEQ ID NO: 13577 - DNA, 20 bp, Artificial Sequence
  MKO10013577_A_Ddx18
  gRNA
aatgggcttcaagcgcatga

SEQ ID NO: 13578 - DNA, 20 bp, Artificial Sequence
  MKO10013578_A_Ddx18
  gRNA
ggccatcacctgtcagtcct

SEQ ID NO: 13579 - DNA, 20 bp, Artificial Sequence
  MKO10013579_A_Ddx19a
  gRNA
gatgagcagtttgcagatca

SEQ ID NO: 13580 - DNA, 20 bp, Artificial Sequence
  MKO10013580_A_Ddx19a
  gRNA
cagagcattctcctggatct

SEQ ID NO: 13581 - DNA, 20 bp, Artificial Sequence
  MKO10013581_A_Ddx19a
  gRNA
caccactgcagaaaagacag

SEQ ID NO: 13582 - DNA, 20 bp, Artificial Sequence
  MKO10013582_A_Ddx19b
  gRNA
caaccgcccttccaaaatac

SEQ ID NO: 13583 - DNA, 20 bp, Artificial Sequence
  MKO10013583_A_Ddx19b
  gRNA
aacccatagcatagactccc

SEQ ID NO: 13584 - DNA, 20 bp, Artificial Sequence
  MKO10013584_A_Ddx19b
  gRNA
agctactcaccattggcatc

SEQ ID NO: 13585 - DNA, 20 bp, Artificial Sequence
  MKO10013585_A_Ddx1
  gRNA
tccagaaatgggtgttatgc

SEQ ID NO: 13586 - DNA, 20 bp, Artificial Sequence
  MKO10013586_A_Ddx1
  gRNA
tcagagtttcatacactatc

SEQ ID NO: 13587 - DNA, 20 bp, Artificial Sequence
  MKO10013587_A_Ddx1
  gRNA
tagtctaccaactgatatcc

SEQ ID NO: 13588 - DNA, 20 bp, Artificial Sequence
  MKO10013588_A_Ddx20
  gRNA
ttccagtgcccgacttagct

SEQ ID NO: 13589 - DNA, 20 bp, Artificial Sequence
  MKO10013589_A_Ddx20
  gRNA
cccagcgatccaagtctcat

SEQ ID NO: 13590 - DNA, 20 bp, Artificial Sequence
  MKO10013590_A_Ddx20
  gRNA
tcttgaaaactatagtactc

SEQ ID NO: 13591 - DNA, 20 bp, Artificial Sequence
  MKO10013591_A_Ddx21
  gRNA
gcacttactctgaccaccgt

SEQ ID NO: 13592 - DNA, 20 bp, Artificial Sequence
  MKO10013592_A_Ddx21
  gRNA
tcgctactactttcctcacc

SEQ ID NO: 13593 - DNA, 20 bp, Artificial Sequence
  MKO10013593_A_Ddx21
  gRNA
atgtggatccccctaaatcc

SEQ ID NO: 13594 - DNA, 20 bp, Artificial Sequence
  MKO10013594_A_Ddx23
  gRNA
acatggagacaagcgaccta

SEQ ID NO: 13595 - DNA, 20 bp, Artificial Sequence
  MKO10013595_A_Ddx23
  gRNA
gcgccagaagatgctcgaag

SEQ ID NO: 13596 - DNA, 20 bp, Artificial Sequence
  MKO10013596_A_Ddx23
  gRNA
cctcccgctctgctttagag

SEQ ID NO: 13597 - DNA, 20 bp, Artificial Sequence
  MKO10013597_A_Ddx24
  gRNA
agtcaaagcgtccgagccag

SEQ ID NO: 13598 - DNA, 20 bp, Artificial Sequence
  MKO10013598_A_Ddx24
  gRNA
actaactcccagagccgacc

SEQ ID NO: 13599 - DNA, 20 bp, Artificial Sequence
  MKO10013599_A_Ddx24
  gRNA
catagatgaagctgatcgca

SEQ ID NO: 13600 - DNA, 20 bp, Artificial Sequence
  MKO10013600_A_Ddx25
  gRNA
catagacggctctcttaaca

SEQ ID NO: 13601 - DNA, 20 bp, Artificial Sequence
  MKO10013601_A_Ddx25
  gRNA
tttcaaatctcgtccatccc

SEQ ID NO: 13602 - DNA, 20 bp, Artificial Sequence
  MKO10013602_A_Ddx25
  gRNA
aataccacgaaggttcttcc

SEQ ID NO: 13603 - DNA, 20 bp, Artificial Sequence
  MKO10013603_A_Ddx26b
  gRNA
gccctggtgttgcgtttgcc

SEQ ID NO: 13604 - DNA, 20 bp, Artificial Sequence
  MKO10013604_A_Ddx26b
  gRNA
ctccaggcaaacgcaacacc

SEQ ID NO: 13605 - DNA, 20 bp, Artificial Sequence
  MKO10013605_A_Ddx26b
  gRNA
acccagccagccgcggagac

SEQ ID NO: 13606 - DNA, 20 bp, Artificial Sequence
  MKO10013606_A_Ddx27
  gRNA
ccggattctcctgccccttc

SEQ ID NO: 13607 - DNA, 20 bp, Artificial Sequence
  MKO10013607_A_Ddx27
  gRNA
tttgtagggacccattgtgc

SEQ ID NO: 13608 - DNA, 20 bp, Artificial Sequence
  MKO10013608_A_Ddx27
  gRNA
agggcatgtatgatggcagc

SEQ ID NO: 13609 - DNA, 20 bp, Artificial Sequence
  MKO10013609_A_Ddx28
  gRNA
ttcccgagaactagccgaac

SEQ ID NO: 13610 - DNA, 20 bp, Artificial Sequence
  MKO10013610_A_Ddx28
  gRNA
gctaacgccagcagccgcga

SEQ ID NO: 13611 - DNA, 20 bp, Artificial Sequence
  MKO10013611_A_Ddx28
  gRNA
cgcaccactaggttccgtcg

SEQ ID NO: 13612 - DNA, 20 bp, Artificial Sequence
  MKO10013612_A_Ddx31
  gRNA
gctactgacctgagcccgtc

SEQ ID NO: 13613 - DNA, 20 bp, Artificial Sequence
  MKO10013613_A_Ddx31
  gRNA
agcgatgaagtcttgatgca

SEQ ID NO: 13614 - DNA, 20 bp, Artificial Sequence
  MKO10013614_A_Ddx31
  gRNA
aacctcttacctggtcatac

SEQ ID NO: 13615 - DNA, 20 bp, Artificial Sequence
  MKO10013615_A_Ddx39b
  gRNA
ccagcatgagtgcatcccgc

SEQ ID NO: 13616 - DNA, 20 bp, Artificial Sequence
  MKO10013616_A_Ddx39b
  gRNA
ggagtccccacgacgatgtg

SEQ ID NO: 13617 - DNA, 20 bp, Artificial Sequence
  MKO10013617_A_Ddx39b
  gRNA
gaactgcccacacatcgtcg

SEQ ID NO: 13618 - DNA, 20 bp, Artificial Sequence
  MKO10013618_A_Ddx39
  gRNA
atcccatccagacatgcgcc

SEQ ID NO: 13619 - DNA, 20 bp, Artificial Sequence
  MKO10013619_A_Ddx39
  gRNA
ggggacaccaggccggatcc

SEQ ID NO: 13620 - DNA, 20 bp, Artificial Sequence
  MKO10013620_A_Ddx39
  gRNA
tcctgctccgcacaagtgcc

SEQ ID NO: 13621 - DNA, 20 bp, Artificial Sequence
  MKO10013621_A_Ddx3x
  gRNA
gttatatcccacctcattta

SEQ ID NO: 13622 - DNA, 20 bp, Artificial Sequence
  MKO10013622_A_Ddx3x
  gRNA
tactgttccaatcgttcact

SEQ ID NO: 13623 - DNA, 20 bp, Artificial Sequence
  MKO10013623_A_Ddx3x
  gRNA
atactcaggtttgatgatcg

SEQ ID NO: 13624 - DNA, 20 bp, Artificial Sequence
  MKO10013624_A_Ddx3y
  gRNA
aacggagtggtcatagtcgt

SEQ ID NO: 13625 - DNA, 20 bp, Artificial Sequence
  MKO10013625_A_Ddx3y
  gRNA
ggtcgtgaccgaactggatt

SEQ ID NO: 13626 - DNA, 20 bp, Artificial Sequence
  MKO10013626_A_Ddx3y
  gRNA
cccaattatttcagtgatcg

SEQ ID NO: 13627 - DNA, 20 bp, Artificial Sequence
  MKO10013627_A_Ddx41
  gRNA
cgctgccgcaacggcacata

SEQ ID NO: 13628 - DNA, 20 bp, Artificial Sequence
  MKO10013628_A_Ddx41
  gRNA
acgtaccctatgtgccgttg

SEQ ID NO: 13629 - DNA, 20 bp, Artificial Sequence
  MKO10013629_A_Ddx41
  gRNA
atcgtcataggtgatgcctt

SEQ ID NO: 13630 - DNA, 20 bp, Artificial Sequence
  MKO10013630_A_Ddx42
  gRNA
taatacctccgaatgatcaa

SEQ ID NO: 13631 - DNA, 20 bp, Artificial Sequence
  MKO10013631_A_Ddx42
  gRNA
tattcgagatgacattgaag

SEQ ID NO: 13632 - DNA, 20 bp, Artificial Sequence
  MKO10013632_A_Ddx42
  gRNA
tcctgaaccaccccagcagt

SEQ ID NO: 13633 - DNA, 20 bp, Artificial Sequence
  MKO10013633_A_Ddx43
  gRNA
tatctgctccaacggtaggt

SEQ ID NO: 13634 - DNA, 20 bp, Artificial Sequence
  MKO10013634_A_Ddx43
  gRNA
attgcattccaacctaccgt

SEQ ID NO: 13635 - DNA, 20 bp, Artificial Sequence
  MKO10013635_A_Ddx43
  gRNA
tacttaccaactctttgtcc

SEQ ID NO: 13636 - DNA, 20 bp, Artificial Sequence
  MKO10013636_A_Ddx46
  gRNA
tccgagatcttctccgctct

SEQ ID NO: 13637 - DNA, 20 bp, Artificial Sequence
  MKO10013637_A_Ddx46
  gRNA
cgctcaaggagtcgaagccg

SEQ ID NO: 13638 - DNA, 20 bp, Artificial Sequence
  MKO10013638_A_Ddx46
  gRNA
cgaaaacgctcagcatctcg

SEQ ID NO: 13639 - DNA, 20 bp, Artificial Sequence
  MKO10013639_A_Ddx47
  gRNA
cctcacccctactcgagagt

SEQ ID NO: 13640 - DNA, 20 bp, Artificial Sequence
  MKO10013640_A_Ddx47
  gRNA
accagggcgaacagtcgctg

SEQ ID NO: 13641 - DNA, 20 bp, Artificial Sequence
  MKO10013641_A_Ddx47
  gRNA
gactcacctattactatatg

SEQ ID NO: 13642 - DNA, 20 bp, Artificial Sequence
  MKO10013642_A_Ddx49
  gRNA
agcagcgtttgccttcgtgc

SEQ ID NO: 13643 - DNA, 20 bp, Artificial Sequence
  MKO10013643_A_Ddx49
  gRNA
ccaccaacgagcccttcttt

SEQ ID NO: 13644 - DNA, 20 bp, Artificial Sequence
  MKO10013644_A_Ddx49
  gRNA
cccggaactgctcagcgatc

SEQ ID NO: 13645 - DNA, 20 bp, Artificial Sequence
  MKO10013645_A_Ddx4
  gRNA
aaagagaacacatctacaac

SEQ ID NO: 13646 - DNA, 20 bp, Artificial Sequence
  MKO10013646_A_Ddx4
  gRNA
ctatcatgggagatgaagat

SEQ ID NO: 13647 - DNA, 20 bp, Artificial Sequence
  MKO10013647_A_Ddx4
  gRNA
tgtattaccttctcaaatac

SEQ ID NO: 13648 - DNA, 20 bp, Artificial Sequence
  MKO10013648_A_Ddx50
  gRNA
tcttgctcaggtactcgttt

SEQ ID NO: 13649 - DNA, 20 bp, Artificial Sequence
  MKO10013649_A_Ddx50
  gRNA
taaccgttacctttggtgag

SEQ ID NO: 13650 - DNA, 20 bp, Artificial Sequence
  MKO10013650_A_Ddx50
  gRNA
gactctaacacgtgaacaaa

SEQ ID NO: 13651 - DNA, 20 bp, Artificial Sequence
  MKO10013651_A_Ddx51
  gRNA
gcaggccctgttgcatcgag

SEQ ID NO: 13652 - DNA, 20 bp, Artificial Sequence
  MKO10013652_A_Ddx51
  gRNA
ggacccgggtgcgaaccctc

SEQ ID NO: 13653 - DNA, 20 bp, Artificial Sequence
  MKO10013653_A_Ddx51
  gRNA
cgaagatctcactcccattg

SEQ ID NO: 13654 - DNA, 20 bp, Artificial Sequence
  MKO10013654_A_Ddx52
  gRNA
cttctgctccaaccggatct

SEQ ID NO: 13655 - DNA, 20 bp, Artificial Sequence
  MKO10013655_A_Ddx52
  gRNA
cgaagaagtctagtcccttc

SEQ ID NO: 13656 - DNA, 20 bp, Artificial Sequence
  MKO10013656_A_Ddx52
  gRNA
aagtccgtctcagatgaatg

SEQ ID NO: 13657 - DNA, 20 bp, Artificial Sequence
  MKO10013657_A_Ddx54
  gRNA
tcctcctcccgatgtttgag

SEQ ID NO: 13658 - DNA, 20 bp, Artificial Sequence
  MKO10013658_A_Ddx54
  gRNA
gccgacgcccatccagagga

SEQ ID NO: 13659 - DNA, 20 bp, Artificial Sequence
  MKO10013659_A_Ddx54
  gRNA
acagaccatccccgtgatct

SEQ ID NO: 13660 - DNA, 20 bp, Artificial Sequence
  MKO10013660_A_Ddx55
  gRNA
catcaccccgactcgcgagc

SEQ ID NO: 13661 - DNA, 20 bp, Artificial Sequence
  MKO10013661_A_Ddx55
  gRNA
cgcagtgcaccgagcacccg

SEQ ID NO: 13662 - DNA, 20 bp, Artificial Sequence
  MKO10013662_A_Ddx55
  gRNA
gggcttcccgcacatgacgc

SEQ ID NO: 13663 - DNA, 20 bp, Artificial Sequence
  MKO10013663_A_Ddx56
  gRNA
gtcgcgacctacgttgatcc

SEQ ID NO: 13664 - DNA, 20 bp, Artificial Sequence
  MKO10013664_A_Ddx56
  gRNA
ttcttaggctgtcaccgatt

SEQ ID NO: 13665 - DNA, 20 bp, Artificial Sequence
  MKO10013665_A_Ddx56
  gRNA
ccagttgctggatcatggcc

SEQ ID NO: 13666 - DNA, 20 bp, Artificial Sequence
  MKO10013666_A_Ddx58
  gRNA
atgtcttatcagatccgaca

SEQ ID NO: 13667 - DNA, 20 bp, Artificial Sequence
  MKO10013667_A_Ddx58
  gRNA
atccgaatgtttgattaatc

SEQ ID NO: 13668 - DNA, 20 bp, Artificial Sequence
  MKO10013668_A_Ddx58
  gRNA
tttgtgaagccatcgaaagt

SEQ ID NO: 13669 - DNA, 20 bp, Artificial Sequence
  MKO10013669_A_Ddx59
  gRNA
ccccacagctctatcgctta

SEQ ID NO: 13670 - DNA, 20 bp, Artificial Sequence
  MKO10013670_A_Ddx59
  gRNA
gcctccagtgttagtattcg

SEQ ID NO: 13671 - DNA, 20 bp, Artificial Sequence
  MKO10013671_A_Ddx59
  gRNA
caggatgatctgccgcacac

SEQ ID NO: 13672 - DNA, 20 bp, Artificial Sequence
  MKO10013672_A_Ddx5
  gRNA
gttggttgcagcgaatgtca

SEQ ID NO: 13673 - DNA, 20 bp, Artificial Sequence
  MKO10013673_A_Ddx5
  gRNA
aggtttggtgcacctcgatt

SEQ ID NO: 13674 - DNA, 20 bp, Artificial Sequence
  MKO10013674_A_Ddx5
  gRNA
gcttcataaaaattcagaac

SEQ ID NO: 13675 - DNA, 20 bp, Artificial Sequence
  MKO10013675_A_Ddx60
  gRNA
taaagtatgcataaagacga

SEQ ID NO: 13676 - DNA, 20 bp, Artificial Sequence
  MKO10013676_A_Ddx60
  gRNA
cttagtccaaacttcaacag

SEQ ID NO: 13677 - DNA, 20 bp, Artificial Sequence
  MKO10013677_A_Ddx60
  gRNA
tcatcacgtgtgcgtgtgag

SEQ ID NO: 13678 - DNA, 20 bp, Artificial Sequence
  MKO10013678_A_Ddx6
  gRNA
tctctagacctggtgatgac

SEQ ID NO: 13679 - DNA, 20 bp, Artificial Sequence
  MKO10013679_A_Ddx6
  gRNA
cattatgtcatctcgtaaat

SEQ ID NO: 13680 - DNA, 20 bp, Artificial Sequence
  MKO10013680_A_Ddx6
  gRNA
atttacgagatgacataatg

SEQ ID NO: 13681 - DNA, 20 bp, Artificial Sequence
  MKO10013681_A_Deaf1
  gRNA
aactcgctgtcatacaccga

SEQ ID NO: 13682 - DNA, 20 bp, Artificial Sequence
  MKO10013682_A_Deaf1
  gRNA
ctgatgttccgacagcgcac

SEQ ID NO: 13683 - DNA, 20 bp, Artificial Sequence
  MKO10013683_A_Deaf1
  gRNA
tcaggctgtcaccgatctgc

SEQ ID NO: 13684 - DNA, 20 bp, Artificial Sequence
  MKO10013684_A_Dear1
  gRNA
ggctgtcaaccgcatcccgc

SEQ ID NO: 13685 - DNA, 20 bp, Artificial Sequence
  MKO10013685_A_Dear1
  gRNA
ccgctccagctctaccaaag

SEQ ID NO: 13686 - DNA, 20 bp, Artificial Sequence
  MKO10013686_A_Dear1
  gRNA
gaagccactgaagcgactgc

SEQ ID NO: 13687 - DNA, 20 bp, Artificial Sequence
  MKO10013687_A_Deb1
  gRNA
ccagctgatccgctgtatcg

SEQ ID NO: 13688 - DNA, 20 bp, Artificial Sequence
  MKO10013688_A_Deb1
  gRNA
actggacgcactcgttcgct

SEQ ID NO: 13689 - DNA, 20 bp, Artificial Sequence
  MKO10013689_A_Deb1
  gRNA
ctgtcatcttcgctcctgac

SEQ ID NO: 13690 - DNA, 20 bp, Artificial Sequence
  MKO10013690_A_Decr1
  gRNA
tcaggtggtgataaacaacg

SEQ ID NO: 13691 - DNA, 20 bp, Artificial Sequence
  MKO10013691_A_Decr1
  gRNA
tgatgttcgagatcctgata

SEQ ID NO: 13692 - DNA, 20 bp, Artificial Sequence
  MKO10013692_A_Decr1
  gRNA
gcctatgtgacactagaaat

SEQ ID NO: 13693 - DNA, 20 bp, Artificial Sequence
  MKO10013693_A_Decr2
  gRNA
tcctgccgacgatgacagtg

SEQ ID NO: 13694 - DNA, 20 bp, Artificial Sequence
  MKO10013694_A_Decr2
  gRNA
ggctgccacactgtcatcgt

SEQ ID NO: 13695 - DNA, 20 bp, Artificial Sequence
  MKO10013695_A_Decr2
  gRNA
tttcaatgcctttaagaccg

SEQ ID NO: 13696 - DNA, 20 bp, Artificial Sequence
  MKO10013696_A_Dedd2
  gRNA
cgcagtactctgcccgaacc

SEQ ID NO: 13697 - DNA, 20 bp, Artificial Sequence
  MKO10013697_A_Dedd2
  gRNA
cgtgacgggctagcacgcgc

SEQ ID NO: 13698 - DNA, 20 bp, Artificial Sequence
  MKO10013698_A_Dedd2
  gRNA
gtcgcttcaccgtatgttcg

SEQ ID NO: 13699 - DNA, 20 bp, Artificial Sequence
  MKO10013699_A_Dedd
  gRNA
tgacgagagtaactttcgcc

SEQ ID NO: 13700 - DNA, 20 bp, Artificial Sequence
  MKO10013700_A_Dedd
  gRNA
ccaccgcatgttcgacatcg

SEQ ID NO: 13701 - DNA, 20 bp, Artificial Sequence
  MKO10013701_A_Dedd
  gRNA
tcacctacctcgacgcattc

SEQ ID NO: 13702 - DNA, 20 bp, Artificial Sequence
  MKO10013702_A_Def6
  gRNA
ggggcgcgactccctcagca

SEQ ID NO: 13703 - DNA, 20 bp, Artificial Sequence
  MKO10013703_A_Def6
  gRNA
gctgatcatggttcccgatg

SEQ ID NO: 13704 - DNA, 20 bp, Artificial Sequence
  MKO10013704_A_Def6
  gRNA
catccaagacgtcctgaagc

SEQ ID NO: 13705 - DNA, 20 bp, Artificial Sequence
  MKO10013705_A_Def8
  gRNA
ccatcatgcgctccgagtag

SEQ ID NO: 13706 - DNA, 20 bp, Artificial Sequence
  MKO10013706_A_Def8
  gRNA
cacctgtttgcattcttcga

SEQ ID NO: 13707 - DNA, 20 bp, Artificial Sequence
  MKO10013707_A_Def8
  gRNA
gatggatctcggcctgtctg

SEQ ID NO: 13708 - DNA, 20 bp, Artificial Sequence
  MKO10013708_A_Defa-rs1
  gRNA
cctctctgccctcgttctgc

SEQ ID NO: 13709 - DNA, 20 bp, Artificial Sequence
  MKO10013709_A_Defa-rs1
  gRNA
ccagcagaacgagggcagag

SEQ ID NO: 13710 - DNA, 20 bp, Artificial Sequence
  MKO10013710_A_Defa-rs1
  gRNA
cagcccaaagaaggtttccg

SEQ ID NO: 13711 - DNA, 20 bp, Artificial Sequence
  MKO10013711_A_Defa-rs7
  gRNA
tcttgaagagaagagccttc

SEQ ID NO: 13712 - DNA, 20 bp, Artificial Sequence
  MKO10013712_A_Defa-rs7
  gRNA
cctctctgccctcatcctgc

SEQ ID NO: 13713 - DNA, 20 bp, Artificial Sequence
  MKO10013713_A_Defa-rs7
  gRNA
tattaaatgaccctttctgc

SEQ ID NO: 13714 - DNA, 20 bp, Artificial Sequence
  MKO10013714_A_Defa17
  gRNA
tcttgaagagaagagccttc

SEQ ID NO: 13715 - DNA, 20 bp, Artificial Sequence
  MKO10013715_A_Defa17
  gRNA
cctctctgccctcgtcctgc

SEQ ID NO: 13716 - DNA, 20 bp, Artificial Sequence
  MKO10013716_A_Defa17
  gRNA
cattaaatgaccctttctgc

SEQ ID NO: 13717 - DNA, 20 bp, Artificial Sequence
  MKO10013717_A_Defa20
  gRNA
tcatgaagagcagatccttc

SEQ ID NO: 13718 - DNA, 20 bp, Artificial Sequence
  MKO10013718_A_Defa20
  gRNA
cctctctgccctcgtcctgc

SEQ ID NO: 13719 - DNA, 20 bp, Artificial Sequence
  MKO10013719_A_Defa20
  gRNA
atctgcatgttcagtggcgg

SEQ ID NO: 13720 - DNA, 20 bp, Artificial Sequence
  MKO10013720_A_Defa21
  gRNA
tgcagcgacgatttctacaa

SEQ ID NO: 13721 - DNA, 20 bp, Artificial Sequence
  MKO10013721_A_Defa21
  gRNA
agaaatcgtcgctgcaatag

SEQ ID NO: 13722 - DNA, 20 bp, Artificial Sequence
  MKO10013722_A_Defa21
  gRNA
gcagccaggggaagatgacc

SEQ ID NO: 13723 - DNA, 20 bp, Artificial Sequence
  MKO10013723_A_Defa22
  gRNA
agaaaacgtcgctgcaatag

SEQ ID NO: 13724 - DNA, 20 bp, Artificial Sequence
  MKO10013724_A_Defa22
  gRNA
catgaagagcagatccttct

SEQ ID NO: 13725 - DNA, 20 bp, Artificial Sequence
  MKO10013725_A_Defa22
  gRNA
cctctctgccctcatcctgc

SEQ ID NO: 13726 - DNA, 20 bp, Artificial Sequence
  MKO10013726_A_Defa23
  gRNA
tcttgaagagaagagccttc

SEQ ID NO: 13727 - DNA, 20 bp, Artificial Sequence
  MKO10013727_A_Defa23
  gRNA
cctctctgccctcatcctgc

SEQ ID NO: 13728 - DNA, 20 bp, Artificial Sequence
  MKO10013728_A_Defa23
  gRNA
tattaaatgaccctttctgc

SEQ ID NO: 13729 - DNA, 20 bp, Artificial Sequence
  MKO10013729_A_Defa24
  gRNA
tcttgaagagaagcgccttc

SEQ ID NO: 13730 - DNA, 20 bp, Artificial Sequence
  MKO10013730_A_Defa24
  gRNA
caataaatgacccttactgc

SEQ ID NO: 13731 - DNA, 20 bp, Artificial Sequence
  MKO10013731_A_Defa24
  gRNA
gtctccagcattgagagatc

SEQ ID NO: 13732 - DNA, 20 bp, Artificial Sequence
  MKO10013732_A_Defa25
  gRNA
gtcatttaatgtacatgctc

SEQ ID NO: 13733 - DNA, 20 bp, Artificial Sequence
  MKO10013733_A_Defa25
  gRNA
tcttgaagagaagagccttc

SEQ ID NO: 13734 - DNA, 20 bp, Artificial Sequence
  MKO10013734_A_Defa25
  gRNA
cctctctgcccttgccctgc

SEQ ID NO: 13735 - DNA, 20 bp, Artificial Sequence
  MKO10013735_A_Defa26
  gRNA
gcagccacaggaagaggacc

SEQ ID NO: 13736 - DNA, 20 bp, Artificial Sequence
  MKO10013736_A_Defa26
  gRNA
tcttgaagatcagagccttc

SEQ ID NO: 13737 - DNA, 20 bp, Artificial Sequence
  MKO10013737_A_Defa26
  gRNA
cattaaatgaccctttctgc

SEQ ID NO: 13738 - DNA, 20 bp, Artificial Sequence
  MKO10013738_A_Defa2
  gRNA
tcatgaagagcagatccttc

SEQ ID NO: 13739 - DNA, 20 bp, Artificial Sequence
  MKO10013739_A_Defa2
  gRNA
cctctctgccctcgtcctgc

SEQ ID NO: 13740 - DNA, 20 bp, Artificial Sequence
  MKO10013740_A_Defa2
  gRNA
atctgcatgttcagtggcgg

SEQ ID NO: 13741 - DNA, 20 bp, Artificial Sequence
  MKO10013741_A_Defa3
  gRNA
tcttgaagagaagagccttc

SEQ ID NO: 13742 - DNA, 20 bp, Artificial Sequence
  MKO10013742_A_Defa3
  gRNA
cctctctgccctcgtcctgc

SEQ ID NO: 13743 - DNA, 20 bp, Artificial Sequence
  MKO10013743_A_Defa3
  gRNA
cattaaatgaccctttctgc

SEQ ID NO: 13744 - DNA, 20 bp, Artificial Sequence
  MKO10013744_A_Defa4
  gRNA
catgaagagcagacccttct

SEQ ID NO: 13745 - DNA, 20 bp, Artificial Sequence
  MKO10013745_A_Defa4
  gRNA
cctctctgcccttgtcctgc

SEQ ID NO: 13746 - DNA, 20 bp, Artificial Sequence
  MKO10013746_A_Defa4
  gRNA
caaaagagatagacacagcc

SEQ ID NO: 13747 - DNA, 20 bp, Artificial Sequence
  MKO10013747_A_Defa5
  gRNA
catgaagagcagacccttct

SEQ ID NO: 13748 - DNA, 20 bp, Artificial Sequence
  MKO10013748_A_Defa5
  gRNA
cctctctgcccttgtcctgc

SEQ ID NO: 13749 - DNA, 20 bp, Artificial Sequence
  MKO10013749_A_Defa5
  gRNA
agttaaaaaaagatttctgc

SEQ ID NO: 13750 - DNA, 20 bp, Artificial Sequence
  MKO10013750_A_Defa6
  gRNA
tcttgaagagaagcgccttc

SEQ ID NO: 13751 - DNA, 20 bp, Artificial Sequence
  MKO10013751_A_Defa6
  gRNA
caataaatgacccttactgc

SEQ ID NO: 13752 - DNA, 20 bp, Artificial Sequence
  MKO10013752_A_Defa6
  gRNA
gtctccagcattgagagatc

SEQ ID NO: 13753 - DNA, 20 bp, Artificial Sequence
  MKO10013753_A_Defb10
  gRNA
ctcataaacctgctattacc

SEQ ID NO: 13754 - DNA, 20 bp, Artificial Sequence
  MKO10013754_A_Defb10
  gRNA
tactcaaagcacaacttaca

SEQ ID NO: 13755 - DNA, 20 bp, Artificial Sequence
  MKO10013755_A_Defb10
  gRNA
ctggggtggtatatgagaaa

SEQ ID NO: 13756 - DNA, 20 bp, Artificial Sequence
  MKO10013756_A_Defb11
  gRNA
cctcctcataccaagtttat

SEQ ID NO: 13757 - DNA, 20 bp, Artificial Sequence
  MKO10013757_A_Defb11
  gRNA
gtgacagttacctataaact

SEQ ID NO: 13758 - DNA, 20 bp, Artificial Sequence
  MKO10013758_A_Defb11
  gRNA
ctggagtggtatatgagaaa

SEQ ID NO: 13759 - DNA, 20 bp, Artificial Sequence
  MKO10013759_A_Defb12
  gRNA
attgtagttgaactgccatc

SEQ ID NO: 13760 - DNA, 20 bp, Artificial Sequence
  MKO10013760_A_Defb12
  gRNA
gaagaatctcccctcaaaca

SEQ ID NO: 13761 - DNA, 20 bp, Artificial Sequence
  MKO10013761_A_Defb12
  gRNA
ttaaatttagggtcctgggc

SEQ ID NO: 13762 - DNA, 20 bp, Artificial Sequence
  MKO10013762_A_Defb13
  gRNA
tttaccttcgagcaaaagat

SEQ ID NO: 13763 - DNA, 20 bp, Artificial Sequence
  MKO10013763_A_Defb13
  gRNA
ccttctgtacaatgtgcccc

SEQ ID NO: 13764 - DNA, 20 bp, Artificial Sequence
  MKO10013764_A_Defb13
  gRNA
cttctcattcaactttaccc

SEQ ID NO: 13765 - DNA, 20 bp, Artificial Sequence
  MKO10013765_A_Defb14
  gRNA
ataggtcgatgttctaatag

SEQ ID NO: 13766 - DNA, 20 bp, Artificial Sequence
  MKO10013766_A_Defb14
  gRNA
tgtgctgtacttaactgcct

SEQ ID NO: 13767 - DNA, 20 bp, Artificial Sequence
  MKO10013767_A_Defb14
  gRNA
tgtattcctcatcttgttct

SEQ ID NO: 13768 - DNA, 20 bp, Artificial Sequence
  MKO10013768_A_Defb15
  gRNA
ctcaggccacatggggactt

SEQ ID NO: 13769 - DNA, 20 bp, Artificial Sequence
  MKO10013769_A_Defb15
  gRNA
ttcatccccaagtccccatg

SEQ ID NO: 13770 - DNA, 20 bp, Artificial Sequence
  MKO10013770_A_Defb15
  gRNA
ctttgctgttctcttctttc

SEQ ID NO: 13771 - DNA, 20 bp, Artificial Sequence
  MKO10013771_A_Defb18
  gRNA
gtattctcgcaccacacagc

SEQ ID NO: 13772 - DNA, 20 bp, Artificial Sequence
  MKO10013772_A_Defb18
  gRNA
gcaagtctgaatgtaacagt

SEQ ID NO: 13773 - DNA, 20 bp, Artificial Sequence
  MKO10013773_A_Defb18
  gRNA
aacattaccagaaggaccac

SEQ ID NO: 13774 - DNA, 20 bp, Artificial Sequence
  MKO10013774_A_Defb19
  gRNA
tgatcctcacgtaggactgg

SEQ ID NO: 13775 - DNA, 20 bp, Artificial Sequence
  MKO10013775_A_Defb19
  gRNA
gcaggctgtcacggtattct

SEQ ID NO: 13776 - DNA, 20 bp, Artificial Sequence
  MKO10013776_A_Defb19
  gRNA
cagttccgttgccacaagta

SEQ ID NO: 13777 - DNA, 20 bp, Artificial Sequence
  MKO10013777_A_Defb1
  gRNA
cccatctaataccaaactac

SEQ ID NO: 13778 - DNA, 20 bp, Artificial Sequence
  MKO10013778_A_Defb1
  gRNA
caatacaaatgccttcaaca

SEQ ID NO: 13779 - DNA, 20 bp, Artificial Sequence
  MKO10013779_A_Defb1
  gRNA
gaaaactcattactttctcc

SEQ ID NO: 13780 - DNA, 20 bp, Artificial Sequence
  MKO10013780_A_Defb20
  gRNA
agactatatgatcctgccca

SEQ ID NO: 13781 - DNA, 20 bp, Artificial Sequence
  MKO10013781_A_Defb20
  gRNA
tacgttgctaaaacatcttt

SEQ ID NO: 13782 - DNA, 20 bp, Artificial Sequence
  MKO10013782_A_Defb20
  gRNA
gtgccacaaacagcaaaaca

SEQ ID NO: 13783 - DNA, 20 bp, Artificial Sequence
  MKO10013783_A_Defb21
  gRNA
cttctaccccaagtgacacc

SEQ ID NO: 13784 - DNA, 20 bp, Artificial Sequence
  MKO10013784_A_Defb21
  gRNA
cagatcatactctgatgtag

SEQ ID NO: 13785 - DNA, 20 bp, Artificial Sequence
  MKO10013785_A_Defb21
  gRNA
ggtaatatttgcatgatcca

SEQ ID NO: 13786 - DNA, 20 bp, Artificial Sequence
  MKO10013786_A_Defb22
  gRNA
gcaacgagcaaatgtcccat

SEQ ID NO: 13787 - DNA, 20 bp, Artificial Sequence
  MKO10013787_A_Defb22
  gRNA
ggacgaagggagcagcgcaa

SEQ ID NO: 13788 - DNA, 20 bp, Artificial Sequence
  MKO10013788_A_Defb22
  gRNA
tgcatttacctgtgaccaaa

SEQ ID NO: 13789 - DNA, 20 bp, Artificial Sequence
  MKO10013789_A_Defb23
  gRNA
tgtggggtatttcttgtcgc

SEQ ID NO: 13790 - DNA, 20 bp, Artificial Sequence
  MKO10013790_A_Defb23
  gRNA
tggaagcagtagcgcccatg

SEQ ID NO: 13791 - DNA, 20 bp, Artificial Sequence
  MKO10013791_A_Defb23
  gRNA
ctgagactgaagcatgagac

SEQ ID NO: 13792 - DNA, 20 bp, Artificial Sequence
  MKO10013792_A_Defb25
  gRNA
ggaacggccaaggagcctgc

SEQ ID NO: 13793 - DNA, 20 bp, Artificial Sequence
  MKO10013793_A_Defb25
  gRNA
gcgtgaaggcttgaaagaat

SEQ ID NO: 13794 - DNA, 20 bp, Artificial Sequence
  MKO10013794_A_Defb25
  gRNA
tacctggtggtacatgactc

SEQ ID NO: 13795 - DNA, 20 bp, Artificial Sequence
  MKO10013795_A_Defb26
  gRNA
cgacccgacttactgataac

SEQ ID NO: 13796 - DNA, 20 bp, Artificial Sequence
  MKO10013796_A_Defb26
  gRNA
cagagtccgatgtcaagaag

SEQ ID NO: 13797 - DNA, 20 bp, Artificial Sequence
  MKO10013797_A_Defb26
  gRNA
tcccctgagttagcaaccca

SEQ ID NO: 13798 - DNA, 20 bp, Artificial Sequence
  MKO10013798_A_Defb28
  gRNA
agagcttattgtgtcccgag

SEQ ID NO: 13799 - DNA, 20 bp, Artificial Sequence
  MKO10013799_A_Defb28
  gRNA
ggaaatgcaggcgcatatgc

SEQ ID NO: 13800 - DNA, 20 bp, Artificial Sequence
  MKO10013800_A_Defb28
  gRNA
gactcgctcctccaccctct

SEQ ID NO: 13801 - DNA, 20 bp, Artificial Sequence
  MKO10013801_A_Defb29
  gRNA
tgctactgcggaatccgaac

SEQ ID NO: 13802 - DNA, 20 bp, Artificial Sequence
  MKO10013802_A_Defb29
  gRNA
tacctgtggtctcgtcaacc

SEQ ID NO: 13803 - DNA, 20 bp, Artificial Sequence
  MKO10013803_A_Defb29
  gRNA
tctttgggcaacttaagtac

SEQ ID NO: 13804 - DNA, 20 bp, Artificial Sequence
  MKO10013804_A_Defb2
  gRNA
tcatttcatgtacttgcaac

SEQ ID NO: 13805 - DNA, 20 bp, Artificial Sequence
  MKO10013805_A_Defb2
  gRNA
cttgaccactgccacaccaa

SEQ ID NO: 13806 - DNA, 20 bp, Artificial Sequence
  MKO10013806_A_Defb2
  gRNA
ctggagtggtatatgagaaa

SEQ ID NO: 13807 - DNA, 20 bp, Artificial Sequence
  MKO10013807_A_Defb30
  gRNA
aacggatttacgacacatgc

SEQ ID NO: 13808 - DNA, 20 bp, Artificial Sequence
  MKO10013808_A_Defb30
  gRNA
ttgctctcctatgttccacc

SEQ ID NO: 13809 - DNA, 20 bp, Artificial Sequence
  MKO10013809_A_Defb30
  gRNA
cagctacttcacgaagagaa

SEQ ID NO: 13810 - DNA, 20 bp, Artificial Sequence
  MKO10013810_A_Defb33
  gRNA
gtttcgtccgtgtgagaaaa

SEQ ID NO: 13811 - DNA, 20 bp, Artificial Sequence
  MKO10013811_A_Defb33
  gRNA
gtcgatacaaacactgctgt

SEQ ID NO: 13812 - DNA, 20 bp, Artificial Sequence
  MKO10013812_A_Defb33
  gRNA
tgtcttgctcagactacatc

SEQ ID NO: 13813 - DNA, 20 bp, Artificial Sequence
  MKO10013813_A_Defb34
  gRNA
ctcgggccacatgggcactc

SEQ ID NO: 13814 - DNA, 20 bp, Artificial Sequence
  MKO10013814_A_Defb34
  gRNA
ttcatccccgagtgcccatg

SEQ ID NO: 13815 - DNA, 20 bp, Artificial Sequence
  MKO10013815_A_Defb34
  gRNA
tctttgctgttctcttcttt

SEQ ID NO: 13816 - DNA, 20 bp, Artificial Sequence
  MKO10013816_A_Defb35
  gRNA
caaaaaacaaaaaacgtctg

SEQ ID NO: 13817 - DNA, 20 bp, Artificial Sequence
  MKO10013817_A_Defb35
  gRNA
ccatctcagcagctctttcc

SEQ ID NO: 13818 - DNA, 20 bp, Artificial Sequence
  MKO10013818_A_Defb35
  gRNA
acagcaatctcccctgtgcc

SEQ ID NO: 13819 - DNA, 20 bp, Artificial Sequence
  MKO10013819_A_Defb36
  gRNA
agtgccgccaccgatgctcc

SEQ ID NO: 13820 - DNA, 20 bp, Artificial Sequence
  MKO10013820_A_Defb36
  gRNA
atcggtggcggcacttgccg

SEQ ID NO: 13821 - DNA, 20 bp, Artificial Sequence
  MKO10013821_A_Defb36
  gRNA
gcgcagccaaagtcagcagc

SEQ ID NO: 13822 - DNA, 20 bp, Artificial Sequence
  MKO10013822_A_Defb37
  gRNA
ccacgccttcataatgtagt

SEQ ID NO: 13823 - DNA, 20 bp, Artificial Sequence
  MKO10013823_A_Defb37
  gRNA
gatacttacctgggttgttc

SEQ ID NO: 13824 - DNA, 20 bp, Artificial Sequence
  MKO10013824_A_Defb37
  gRNA
ccaactacattatgaaggcg

SEQ ID NO: 13825 - DNA, 20 bp, Artificial Sequence
  MKO10013825_A_Defb38
  gRNA
gtcactactttgaatgccca

SEQ ID NO: 13826 - DNA, 20 bp, Artificial Sequence
  MKO10013826_A_Defb38
  gRNA
tctgttggcacctgttataa

SEQ ID NO: 13827 - DNA, 20 bp, Artificial Sequence
  MKO10013827_A_Defb38
  gRNA
ggtacttaccttggttgatc

SEQ ID NO: 13828 - DNA, 20 bp, Artificial Sequence
  MKO10013828_A_Defb39
  gRNA
ccgatctcatcttgaaaata

SEQ ID NO: 13829 - DNA, 20 bp, Artificial Sequence
  MKO10013829_A_Defb39
  gRNA
ggtacttacctgggttgatc

SEQ ID NO: 13830 - DNA, 20 bp, Artificial Sequence
  MKO10013830_A_Defb39
  gRNA
ggttacaccttcttcttcct

SEQ ID NO: 13831 - DNA, 20 bp, Artificial Sequence
  MKO10013831_A_Defb3
  gRNA
attggcaacactcgtcagat

SEQ ID NO: 13832 - DNA, 20 bp, Artificial Sequence
  MKO10013832_A_Defb3
  gRNA
cctttcctcaaacaacttac

SEQ ID NO: 13833 - DNA, 20 bp, Artificial Sequence
  MKO10013833_A_Defb3
  gRNA
caggtggagacagcagcacc

SEQ ID NO: 13834 - DNA, 20 bp, Artificial Sequence
  MKO10013834_A_Defb40
  gRNA
gatgttgccaaaaacgccgt

SEQ ID NO: 13835 - DNA, 20 bp, Artificial Sequence
  MKO10013835_A_Defb40
  gRNA
caagttagcacctgttataa

SEQ ID NO: 13836 - DNA, 20 bp, Artificial Sequence
  MKO10013836_A_Defb40
  gRNA
gaagatcatcagtagaaagc

SEQ ID NO: 13837 - DNA, 20 bp, Artificial Sequence
  MKO10013837_A_Defb41
  gRNA
tggcagtttaaatgcagcac

SEQ ID NO: 13838 - DNA, 20 bp, Artificial Sequence
  MKO10013838_A_Defb41
  gRNA
gagagatgtgaaaaagtgcg

SEQ ID NO: 13839 - DNA, 20 bp, Artificial Sequence
  MKO10013839_A_Defb41
  gRNA
catattacctgttaatattg

SEQ ID NO: 13840 - DNA, 20 bp, Artificial Sequence
  MKO10013840_A_Defb42
  gRNA
gagacgtgcaccgcaatcga

SEQ ID NO: 13841 - DNA, 20 bp, Artificial Sequence
  MKO10013841_A_Defb42
  gRNA
gaaacacaagccttcgattg

SEQ ID NO: 13842 - DNA, 20 bp, Artificial Sequence
  MKO10013842_A_Defb42
  gRNA
acagtaagcatgaaagacgc

SEQ ID NO: 13843 - DNA, 20 bp, Artificial Sequence
  MKO10013843_A_Defb43
  gRNA
atacgccgtcagatactgcg

SEQ ID NO: 13844 - DNA, 20 bp, Artificial Sequence
  MKO10013844_A_Defb43
  gRNA
gttcaaagcaccgccactgc

SEQ ID NO: 13845 - DNA, 20 bp, Artificial Sequence
  MKO10013845_A_Defb43
  gRNA
cttgttatccatagttcctc

SEQ ID NO: 13846 - DNA, 20 bp, Artificial Sequence
  MKO10013846_A_Defb45
  gRNA
ctaggttacctggaatgacc

SEQ ID NO: 13847 - DNA, 20 bp, Artificial Sequence
  MKO10013847_A_Defb45
  gRNA
tagggacccctgaaagatgc

SEQ ID NO: 13848 - DNA, 20 bp, Artificial Sequence
  MKO10013848_A_Defb45
  gRNA
agcccaagaatgtgcccctg

SEQ ID NO: 13849 - DNA, 20 bp, Artificial Sequence
  MKO10013849_A_Defb46
  gRNA
tgcagcatttcatactacga

SEQ ID NO: 13850 - DNA, 20 bp, Artificial Sequence
  MKO10013850_A_Defb46
  gRNA
tgctggggtcagtgtgtttc

SEQ ID NO: 13851 - DNA, 20 bp, Artificial Sequence
  MKO10013851_A_Defb46
  gRNA
cacatggagagagcagcacc

SEQ ID NO: 13852 - DNA, 20 bp, Artificial Sequence
  MKO10013852_A_Defb47
  gRNA
tacgccaatagtatcgtctg

SEQ ID NO: 13853 - DNA, 20 bp, Artificial Sequence
  MKO10013853_A_Defb47
  gRNA
acgacgtgaagaagtgttgt

SEQ ID NO: 13854 - DNA, 20 bp, Artificial Sequence
  MKO10013854_A_Defb47
  gRNA
tcagcatcatcatcacaaag

SEQ ID NO: 13855 - DNA, 20 bp, Artificial Sequence
  MKO10013855_A_Defb48
  gRNA
ggtcttacttcaccttagac

SEQ ID NO: 13856 - DNA, 20 bp, Artificial Sequence
  MKO10013856_A_Defb48
  gRNA
tcaagaacccctccagtcta

SEQ ID NO: 13857 - DNA, 20 bp, Artificial Sequence
  MKO10013857_A_Defb48
  gRNA
ccaacttaccttggggtaaa

SEQ ID NO: 13858 - DNA, 20 bp, Artificial Sequence
  MKO10013858_A_Defb4
  gRNA
attgccaatctgtcgaaaag

SEQ ID NO: 13859 - DNA, 20 bp, Artificial Sequence
  MKO10013859_A_Defb4
  gRNA
agggcacggaccccagcata

SEQ ID NO: 13860 - DNA, 20 bp, Artificial Sequence
  MKO10013860_A_Defb4
  gRNA
caagtggagacagcagcacc

SEQ ID NO: 13861 - DNA, 20 bp, Artificial Sequence
  MKO10013861_A_Defb50
  gRNA
atcctgacgtgaaatgtacc

SEQ ID NO: 13862 - DNA, 20 bp, Artificial Sequence
  MKO10013862_A_Defb50
  gRNA
tacgaaatctgtatgctgca

SEQ ID NO: 13863 - DNA, 20 bp, Artificial Sequence
  MKO10013863_A_Defb50
  gRNA
ctcctctacctgatggtcaa

SEQ ID NO: 13864 - DNA, 20 bp, Artificial Sequence
  MKO10013864_A_Defb5
  gRNA
ccaatcatacagcaacttac

SEQ ID NO: 13865 - DNA, 20 bp, Artificial Sequence
  MKO10013865_A_Defb5
  gRNA
ccagtaagttgctgtatgat

SEQ ID NO: 13866 - DNA, 20 bp, Artificial Sequence
  MKO10013866_A_Defb5
  gRNA
tcccctgacacacctgcaag

SEQ ID NO: 13867 - DNA, 20 bp, Artificial Sequence
  MKO10013867_A_Defb6
  gRNA
aacctccattgcatgaacgc

SEQ ID NO: 13868 - DNA, 20 bp, Artificial Sequence
  MKO10013868_A_Defb6
  gRNA
tttcgactgggtggccattg

SEQ ID NO: 13869 - DNA, 20 bp, Artificial Sequence
  MKO10013869_A_Defb6
  gRNA
cctgctctttgcctttatcc

SEQ ID NO: 13870 - DNA, 20 bp, Artificial Sequence
  MKO10013870_A_Defb7
  gRNA
acagtaaacgagcttgctat

SEQ ID NO: 13871 - DNA, 20 bp, Artificial Sequence
  MKO10013871_A_Defb7
  gRNA
aaggaggcgaatgcctgcaa

SEQ ID NO: 13872 - DNA, 20 bp, Artificial Sequence
  MKO10013872_A_Defb7
  gRNA
gaaatgcgaacagaacataa

SEQ ID NO: 13873 - DNA, 20 bp, Artificial Sequence
  MKO10013873_A_Defb8
  gRNA
ccgtttcgaatgtaagttac

SEQ ID NO: 13874 - DNA, 20 bp, Artificial Sequence
  MKO10013874_A_Defb8
  gRNA
ccagtaacttacattcgaaa

SEQ ID NO: 13875 - DNA, 20 bp, Artificial Sequence
  MKO10013875_A_Defb8
  gRNA
ccttctcttcacatttctcc

SEQ ID NO: 13876 - DNA, 20 bp, Artificial Sequence
  MKO10013876_A_Defb9
  gRNA
tgatacaccgattatagagt

SEQ ID NO: 13877 - DNA, 20 bp, Artificial Sequence
  MKO10013877_A_Defb9
  gRNA
gcagctgccaactctataat

SEQ ID NO: 13878 - DNA, 20 bp, Artificial Sequence
  MKO10013878_A_Defb9
  gRNA
ctggggtggtatatgagaaa

SEQ ID NO: 13879 - DNA, 20 bp, Artificial Sequence
  MKO10013879_A_Degs1
  gRNA
catcaatcttatccgctccg

SEQ ID NO: 13880 - DNA, 20 bp, Artificial Sequence
  MKO10013880_A_Degs1
  gRNA
tcaccaccggtacctcggag

SEQ ID NO: 13881 - DNA, 20 bp, Artificial Sequence
  MKO10013881_A_Degs1
  gRNA
tccgaaagggaacgagattc

SEQ ID NO: 13882 - DNA, 20 bp, Artificial Sequence
  MKO10013882_A_Degs2
  gRNA
ggatattcctacgaacttcg

SEQ ID NO: 13883 - DNA, 20 bp, Artificial Sequence
  MKO10013883_A_Degs2
  gRNA
gttgtgtctcccgaaaccgc

SEQ ID NO: 13884 - DNA, 20 bp, Artificial Sequence
  MKO10013884_A_Degs2
  gRNA
cgagcatctccttgcgcctc

SEQ ID NO: 13885 - DNA, 20 bp, Artificial Sequence
  MKO10013885_A_Dek
  gRNA
agtggctttccattcgaaaa

SEQ ID NO: 13886 - DNA, 20 bp, Artificial Sequence
  MKO10013886_A_Dek
  gRNA
tgaacagcgaactcgtgaag

SEQ ID NO: 13887 - DNA, 20 bp, Artificial Sequence
  MKO10013887_A_Dek
  gRNA
acccacgttcttcttcaacg

SEQ ID NO: 13888 - DNA, 20 bp, Artificial Sequence
  MKO10013888_A_Dennd1a
  gRNA
agcctcacagttagccaagt

SEQ ID NO: 13889 - DNA, 20 bp, Artificial Sequence
  MKO10013889_A_Dennd1a
  gRNA
cccagaggactacagtgacc

SEQ ID NO: 13890 - DNA, 20 bp, Artificial Sequence
  MKO10013890_A_Dennd1a
  gRNA
acactacctgtccacataga

SEQ ID NO: 13891 - DNA, 20 bp, Artificial Sequence
  MKO10013891_A_Dennd1b
  gRNA
cttacactctccggtatcgt

SEQ ID NO: 13892 - DNA, 20 bp, Artificial Sequence
  MKO10013892_A_Dennd1b
  gRNA
atggaaagtaagcagcgatt

SEQ ID NO: 13893 - DNA, 20 bp, Artificial Sequence
  MKO10013893_A_Dennd1b
  gRNA
cttcttacagttacttgcca

SEQ ID NO: 13894 - DNA, 20 bp, Artificial Sequence
  MKO10013894_A_Dennd1c
  gRNA
caaatctacggttgcccacc

SEQ ID NO: 13895 - DNA, 20 bp, Artificial Sequence
  MKO10013895_A_Dennd1c
  gRNA
aactccgtgcaccagctcgc

SEQ ID NO: 13896 - DNA, 20 bp, Artificial Sequence
  MKO10013896_A_Dennd1c
  gRNA
tccatacctttctatgtcga

SEQ ID NO: 13897 - DNA, 20 bp, Artificial Sequence
  MKO10013897_A_Dennd2a
  gRNA
aggttaaagaacgtgtcgtc

SEQ ID NO: 13898 - DNA, 20 bp, Artificial Sequence
  MKO10013898_A_Dennd2a
  gRNA
actcacacgcactttatcgg

SEQ ID NO: 13899 - DNA, 20 bp, Artificial Sequence
  MKO10013899_A_Dennd2a
  gRNA
tagtaagtcctcgaactcat

SEQ ID NO: 13900 - DNA, 20 bp, Artificial Sequence
  MKO10013900_A_Dennd2c
  gRNA
ttccattccgttagggtgac

SEQ ID NO: 13901 - DNA, 20 bp, Artificial Sequence
  MKO10013901_A_Dennd2c
  gRNA
ttcgtgagttccgaaagtgc

SEQ ID NO: 13902 - DNA, 20 bp, Artificial Sequence
  MKO10013902_A_Dennd2c
  gRNA
gagcgccttccgaacaccca

SEQ ID NO: 13903 - DNA, 20 bp, Artificial Sequence
  MKO10013903_A_Dennd2d
  gRNA
cagcttccccaggattgttc

SEQ ID NO: 13904 - DNA, 20 bp, Artificial Sequence
  MKO10013904_A_Dennd2d
  gRNA
gcaggaagatcggatactgc

SEQ ID NO: 13905 - DNA, 20 bp, Artificial Sequence
  MKO10013905_A_Dennd2d
  gRNA
agttgaggaccaggaccggc

SEQ ID NO: 13906 - DNA, 20 bp, Artificial Sequence
  MKO10013906_A_Dennd3
  gRNA
gcacctagctgagatcacgc

SEQ ID NO: 13907 - DNA, 20 bp, Artificial Sequence
  MKO10013907_A_Dennd3
  gRNA
aggcggtggactaggtatta

SEQ ID NO: 13908 - DNA, 20 bp, Artificial Sequence
  MKO10013908_A_Dennd3
  gRNA
cgctcttcactcctcgtttc

SEQ ID NO: 13909 - DNA, 20 bp, Artificial Sequence
  MKO10013909_A_Dennd4a
  gRNA
gtttaacgtctctggtagat

SEQ ID NO: 13910 - DNA, 20 bp, Artificial Sequence
  MKO10013910_A_Dennd4a
  gRNA
aatattggcaggtcgtccat

SEQ ID NO: 13911 - DNA, 20 bp, Artificial Sequence
  MKO10013911_A_Dennd4a
  gRNA
ctgtatcgttattccatctc

SEQ ID NO: 13912 - DNA, 20 bp, Artificial Sequence
  MKO10013912_A_Dennd4b
  gRNA
gtacgtaccccagctcaacg

SEQ ID NO: 13913 - DNA, 20 bp, Artificial Sequence
  MKO10013913_A_Dennd4b
  gRNA
ctgctgcccgccgatacatg

SEQ ID NO: 13914 - DNA, 20 bp, Artificial Sequence
  MKO10013914_A_Dennd4b
  gRNA
catcgctagggcactgggcg

SEQ ID NO: 13915 - DNA, 20 bp, Artificial Sequence
  MKO10013915_A_Dennd4c
  gRNA
agcggccgtacggcgtggct

SEQ ID NO: 13916 - DNA, 20 bp, Artificial Sequence
  MKO10013916_A_Dennd4c
  gRNA
gtgatccaagccacgccgta

SEQ ID NO: 13917 - DNA, 20 bp, Artificial Sequence
  MKO10013917_A_Dennd4c
  gRNA
gttagacgttcttgagagta

SEQ ID NO: 13918 - DNA, 20 bp, Artificial Sequence
  MKO10013918_A_Dennd5a
  gRNA
cctggatgaccgctccaagt

SEQ ID NO: 13919 - DNA, 20 bp, Artificial Sequence
  MKO10013919_A_Dennd5a
  gRNA
tcagtcgtacttgaaatgaa

SEQ ID NO: 13920 - DNA, 20 bp, Artificial Sequence
  MKO10013920_A_Dennd5a
  gRNA
atcgaatagaggaagctcat

SEQ ID NO: 13921 - DNA, 20 bp, Artificial Sequence
  MKO10013921_A_Dennd5b
  gRNA
atacacgctgacgctgttgt

SEQ ID NO: 13922 - DNA, 20 bp, Artificial Sequence
  MKO10013922_A_Dennd5b
  gRNA
ttctgactaccctcttcgag

SEQ ID NO: 13923 - DNA, 20 bp, Artificial Sequence
  MKO10013923_A_Dennd5b
  gRNA
gcacctcgtagagaatattg

SEQ ID NO: 13924 - DNA, 20 bp, Artificial Sequence
  MKO10013924_A_Dennd6a
  gRNA
tttagattccgacagtcttc

SEQ ID NO: 13925 - DNA, 20 bp, Artificial Sequence
  MKO10013925_A_Dennd6a
  gRNA
tttcccacctttaagtaaac

SEQ ID NO: 13926 - DNA, 20 bp, Artificial Sequence
  MKO10013926_A_Dennd6a
  gRNA
aagttacctgaatttgagtc

SEQ ID NO: 13927 - DNA, 20 bp, Artificial Sequence
  MKO10013927_A_Dennd6b
  gRNA
tgatcggtcgtataacaaca

SEQ ID NO: 13928 - DNA, 20 bp, Artificial Sequence
  MKO10013928_A_Dennd6b
  gRNA
agtttccgtatgcgtcagtg

SEQ ID NO: 13929 - DNA, 20 bp, Artificial Sequence
  MKO10013929_A_Dennd6b
  gRNA
acatagcccagatagtgtgc

SEQ ID NO: 13930 - DNA, 20 bp, Artificial Sequence
  MKO10013930_A_Denr
  gRNA
aaatacgtgacgagagtgtg

SEQ ID NO: 13931 - DNA, 20 bp, Artificial Sequence
  MKO10013931_A_Denr
  gRNA
tcaactcaccaaaagttgca

SEQ ID NO: 13932 - DNA, 20 bp, Artificial Sequence
  MKO10013932_A_Denr
  gRNA
agtctgttcattaccaacag

SEQ ID NO: 13933 - DNA, 20 bp, Artificial Sequence
  MKO10013933_A_Depdc1a
  gRNA
atgacaacaatcaactattc

SEQ ID NO: 13934 - DNA, 20 bp, Artificial Sequence
  MKO10013934_A_Depdc1a
  gRNA
ttcttaccagcttggtggcc

SEQ ID NO: 13935 - DNA, 20 bp, Artificial Sequence
  MKO10013935_A_Depdc1a
  gRNA
caatgatagcatggagcgtc

SEQ ID NO: 13936 - DNA, 20 bp, Artificial Sequence
  MKO10013936_A_Depdc1b
  gRNA
tccagtgaggccgattgtga

SEQ ID NO: 13937 - DNA, 20 bp, Artificial Sequence
  MKO10013937_A_Depdc1b
  gRNA
tgctgacactgtacacgtta

SEQ ID NO: 13938 - DNA, 20 bp, Artificial Sequence
  MKO10013938_A_Depdc1b
  gRNA
acttactcgacttgtcgtcc

SEQ ID NO: 13939 - DNA, 20 bp, Artificial Sequence
  MKO10013939_A_Depdc5
  gRNA
ctcaccccaatgatgagtac

SEQ ID NO: 13940 - DNA, 20 bp, Artificial Sequence
  MKO10013940_A_Depdc5
  gRNA
tttgcaagtcaagtcgctta

SEQ ID NO: 13941 - DNA, 20 bp, Artificial Sequence
  MKO10013941_A_Depdc5
  gRNA
tgctcacctgtactcatcat

SEQ ID NO: 13942 - DNA, 20 bp, Artificial Sequence
  MKO10013942_A_Depdc7
  gRNA
caacgactgcttcgtcggct

SEQ ID NO: 13943 - DNA, 20 bp, Artificial Sequence
  MKO10013943_A_Depdc7
  gRNA
cgatattcctcgggccaaag

SEQ ID NO: 13944 - DNA, 20 bp, Artificial Sequence
  MKO10013944_A_Depdc7
  gRNA
tcctcgatccagatagttgc

SEQ ID NO: 13945 - DNA, 20 bp, Artificial Sequence
  MKO10013945_A_Deptor
  gRNA
cttcatggcatccgaattcc

SEQ ID NO: 13946 - DNA, 20 bp, Artificial Sequence
  MKO10013946_A_Deptor
  gRNA
tcatgcagaaattagccgac

SEQ ID NO: 13947 - DNA, 20 bp, Artificial Sequence
  MKO10013947_A_Deptor
  gRNA
ttgcaaaagagctgattgac

SEQ ID NO: 13948 - DNA, 20 bp, Artificial Sequence
  MKO10013948_A_Dera
  gRNA
cgacgctgtgaaggcgctga

SEQ ID NO: 13949 - DNA, 20 bp, Artificial Sequence
  MKO10013949_A_Dera
  gRNA
ataacagagtcgttgaacgt

SEQ ID NO: 13950 - DNA, 20 bp, Artificial Sequence
  MKO10013950_A_Dera
  gRNA
atagatcttaccacgctttc

SEQ ID NO: 13951 - DNA, 20 bp, Artificial Sequence
  MKO10013951_A_Derl1
  gRNA
tcatgtcagtgctctacgtc

SEQ ID NO: 13952 - DNA, 20 bp, Artificial Sequence
  MKO10013952_A_Derl1
  gRNA
caagattactggcttagcaa

SEQ ID NO: 13953 - DNA, 20 bp, Artificial Sequence
  MKO10013953_A_Derl1
  gRNA
tcttatatcagtattctact

SEQ ID NO: 13954 - DNA, 20 bp, Artificial Sequence
  MKO10013954_A_Derl2
  gRNA
caaagtctgctgtccgacct

SEQ ID NO: 13955 - DNA, 20 bp, Artificial Sequence
  MKO10013955_A_Derl2
  gRNA
cttctagcattcgacaataa

SEQ ID NO: 13956 - DNA, 20 bp, Artificial Sequence
  MKO10013956_A_Derl2
  gRNA
gtagaccagcattattgtaa

SEQ ID NO: 13957 - DNA, 20 bp, Artificial Sequence
  MKO10013957_A_Derl3
  gRNA
gccgtcgcagccctcacgtg

SEQ ID NO: 13958 - DNA, 20 bp, Artificial Sequence
  MKO10013958_A_Derl3
  gRNA
aagaagttgaccctcacgtg

SEQ ID NO: 13959 - DNA, 20 bp, Artificial Sequence
  MKO10013959_A_Derl3
  gRNA
ggtgcgggttgaagtagagc

SEQ ID NO: 13960 - DNA, 20 bp, Artificial Sequence
  MKO10013960_A_Desi1
  gRNA
gccactcaccggggtacagc

SEQ ID NO: 13961 - DNA, 20 bp, Artificial Sequence
  MKO10013961_A_Desi1
  gRNA
gcaggtcggtgatgtaagaa

SEQ ID NO: 13962 - DNA, 20 bp, Artificial Sequence
  MKO10013962_A_Desi1
  gRNA
ctgcgccacttcattgctaa

SEQ ID NO: 13963 - DNA, 20 bp, Artificial Sequence
  MKO10013963_A_Desi2
  gRNA
agattcctcgctggatcaac

SEQ ID NO: 13964 - DNA, 20 bp, Artificial Sequence
  MKO10013964_A_Desi2
  gRNA
tgcagccgcatccagtgcca

SEQ ID NO: 13965 - DNA, 20 bp, Artificial Sequence
  MKO10013965_A_Desi2
  gRNA
cattctggaattgaagtata

SEQ ID NO: 13966 - DNA, 20 bp, Artificial Sequence
  MKO10013966_A_Des
  gRNA
cagaatcgaatccctcaacg

SEQ ID NO: 13967 - DNA, 20 bp, Artificial Sequence
  MKO10013967_A_Des
  gRNA
agagatgttcttagccgcga

SEQ ID NO: 13968 - DNA, 20 bp, Artificial Sequence
  MKO10013968_A_Des
  gRNA
cactctagctcgtattgacc

SEQ ID NO: 13969 - DNA, 20 bp, Artificial Sequence
  MKO10013969_A_Det1
  gRNA
gcaataaagtagcgcccgtc

SEQ ID NO: 13970 - DNA, 20 bp, Artificial Sequence
  MKO10013970_A_Det1
  gRNA
gatggttcgaacgtcgataa

SEQ ID NO: 13971 - DNA, 20 bp, Artificial Sequence
  MKO10013971_A_Det1
  gRNA
ccacacagtgcgacgcctcg

SEQ ID NO: 13972 - DNA, 20 bp, Artificial Sequence
  MKO10013972_A_Dexi
  gRNA
tcagagcttgacgtcttcga

SEQ ID NO: 13973 - DNA, 20 bp, Artificial Sequence
  MKO10013973_A_Dexi
  gRNA
gaccaggcgctggtggacct

SEQ ID NO: 13974 - DNA, 20 bp, Artificial Sequence
  MKO10013974_A_Dexi
  gRNA
agtcctcgggcaggaagacg

SEQ ID NO: 13975 - DNA, 20 bp, Artificial Sequence
  MKO10013975_A_Dffa
  gRNA
caacgccacaaacttcgtat

SEQ ID NO: 13976 - DNA, 20 bp, Artificial Sequence
  MKO10013976_A_Dffa
  gRNA
ctgccacgccgtgctgatcg

SEQ ID NO: 13977 - DNA, 20 bp, Artificial Sequence
  MKO10013977_A_Dffa
  gRNA
ccccagacccggacgatgtc

SEQ ID NO: 13978 - DNA, 20 bp, Artificial Sequence
  MKO10013978_A_Dffb
  gRNA
tctcgccagcggtgagcaat

SEQ ID NO: 13979 - DNA, 20 bp, Artificial Sequence
  MKO10013979_A_Dffb
  gRNA
caggtttggagtcgagattc

SEQ ID NO: 13980 - DNA, 20 bp, Artificial Sequence
  MKO10013980_A_Dffb
  gRNA
gagctcctattgctcaccgc

SEQ ID NO: 13981 - DNA, 20 bp, Artificial Sequence
  MKO10013981_A_Dfna5
  gRNA
tcccaatagccccgctctta

SEQ ID NO: 13982 - DNA, 20 bp, Artificial Sequence
  MKO10013982_A_Dfna5
  gRNA
cacggacaccaatgtagtgc

SEQ ID NO: 13983 - DNA, 20 bp, Artificial Sequence
  MKO10013983_A_Dfna5
  gRNA
cttacctcttgacggcatcc

SEQ ID NO: 13984 - DNA, 20 bp, Artificial Sequence
  MKO10013984_A_Dfnb59
  gRNA
actcaccgaaggcaccgtcc

SEQ ID NO: 13985 - DNA, 20 bp, Artificial Sequence
  MKO10013985_A_Dfnb59
  gRNA
caaccatattgtgaatgacg

SEQ ID NO: 13986 - DNA, 20 bp, Artificial Sequence
  MKO10013986_A_Dfnb59
  gRNA
aaatgaagctttgactgcga

SEQ ID NO: 13987 - DNA, 20 bp, Artificial Sequence
  MKO10013987_A_Dgat1
  gRNA
atttcagattgagaagcgcc

SEQ ID NO: 13988 - DNA, 20 bp, Artificial Sequence
  MKO10013988_A_Dgat1
  gRNA
cctgccccatgcgtgattat

SEQ ID NO: 13989 - DNA, 20 bp, Artificial Sequence
  MKO10013989_A_Dgat1
  gRNA
gcatcaccacacaccaattc

SEQ ID NO: 13990 - DNA, 20 bp, Artificial Sequence
  MKO10013990_A_Dgat2l6
  gRNA
gaatcgctcttgagccgccc

SEQ ID NO: 13991 - DNA, 20 bp, Artificial Sequence
  MKO10013991_A_Dgat2l6
  gRNA
gcgagactatctgatgtcct

SEQ ID NO: 13992 - DNA, 20 bp, Artificial Sequence
  MKO10013992_A_Dgat2l6
  gRNA
atcagatagtctcgcacaaa

SEQ ID NO: 13993 - DNA, 20 bp, Artificial Sequence
  MKO10013993_A_Dgat2
  gRNA
cttcgcgagtacctgatgtc

SEQ ID NO: 13994 - DNA, 20 bp, Artificial Sequence
  MKO10013994_A_Dgat2
  gRNA
aaggtggcaggagatcgcag

SEQ ID NO: 13995 - DNA, 20 bp, Artificial Sequence
  MKO10013995_A_Dgat2
  gRNA
aaggccctatttggctacgt

SEQ ID NO: 13996 - DNA, 20 bp, Artificial Sequence
  MKO10013996_A_Dgcr14
  gRNA
agagccacgcgtgccgtgca

SEQ ID NO: 13997 - DNA, 20 bp, Artificial Sequence
  MKO10013997_A_Dgcr14
  gRNA
cgcgtggctctaccaggctg

SEQ ID NO: 13998 - DNA, 20 bp, Artificial Sequence
  MKO10013998_A_Dgcr14
  gRNA
ggccgaggaaaacggagatt

SEQ ID NO: 13999 - DNA, 20 bp, Artificial Sequence
  MKO10013999_A_Dgcr2
  gRNA
aacttactgctgaagcgtac

SEQ ID NO: 14000 - DNA, 20 bp, Artificial Sequence
  MKO10014000_A_Dgcr2
  gRNA
gaccagccagagcggagctt

SEQ ID NO: 14001 - DNA, 20 bp, Artificial Sequence
  MKO10014001_A_Dgcr2
  gRNA
ctaggacgaagcgcagctcc

SEQ ID NO: 14002 - DNA, 20 bp, Artificial Sequence
  MKO10014002_A_Dgcr6
  gRNA
caagtcgctgagcgtggtgt

SEQ ID NO: 14003 - DNA, 20 bp, Artificial Sequence
  MKO10014003_A_Dgcr6
  gRNA
cctggcgctgctcgacggaa

SEQ ID NO: 14004 - DNA, 20 bp, Artificial Sequence
  MKO10014004_A_Dgcr6
  gRNA
ctacgtgaccaccaatcctc

SEQ ID NO: 14005 - DNA, 20 bp, Artificial Sequence
  MKO10014005_A_Dgcr8
  gRNA
agttcaaccgtgagatgaag

SEQ ID NO: 14006 - DNA, 20 bp, Artificial Sequence
  MKO10014006_A_Dgcr8
  gRNA
cctgcacagagagtctcgag

SEQ ID NO: 14007 - DNA, 20 bp, Artificial Sequence
  MKO10014007_A_Dgcr8
  gRNA
caactctgcagaccgaccca

SEQ ID NO: 14008 - DNA, 20 bp, Artificial Sequence
  MKO10014008_A_Dgka
  gRNA
cagccgcaacttgactagta

SEQ ID NO: 14009 - DNA, 20 bp, Artificial Sequence
  MKO10014009_A_Dgka
  gRNA
cagtacatcgctgacccttt

SEQ ID NO: 14010 - DNA, 20 bp, Artificial Sequence
  MKO10014010_A_Dgka
  gRNA
cttccatactagtcaagttg

SEQ ID NO: 14011 - DNA, 20 bp, Artificial Sequence
  MKO10014011_A_Dgkb
  gRNA
tttcgcctttatgacaccga

SEQ ID NO: 14012 - DNA, 20 bp, Artificial Sequence
  MKO10014012_A_Dgkb
  gRNA
cgtacactcgagcttatcct

SEQ ID NO: 14013 - DNA, 20 bp, Artificial Sequence
  MKO10014013_A_Dgkb
  gRNA
cattcccatcggtgtcataa

SEQ ID NO: 14014 - DNA, 20 bp, Artificial Sequence
  MKO10014014_A_Dgkd
  gRNA
actcgttccagcgatccaag

SEQ ID NO: 14015 - DNA, 20 bp, Artificial Sequence
  MKO10014015_A_Dgkd
  gRNA
ttcacgacacacattgcaat

SEQ ID NO: 14016 - DNA, 20 bp, Artificial Sequence
  MKO10014016_A_Dgkd
  gRNA
aagcttaaagtacctcctct

SEQ ID NO: 14017 - DNA, 20 bp, Artificial Sequence
  MKO10014017_A_Dgke
  gRNA
gttagttccactacgagagt

SEQ ID NO: 14018 - DNA, 20 bp, Artificial Sequence
  MKO10014018_A_Dgke
  gRNA
gtccacgacgagtgcatgcg

SEQ ID NO: 14019 - DNA, 20 bp, Artificial Sequence
  MKO10014019_A_Dgke
  gRNA
atcctagccaactctcgtag

SEQ ID NO: 14020 - DNA, 20 bp, Artificial Sequence
  MKO10014020_A_Dgkg
  gRNA
tgctcccgtagtgtacctga

SEQ ID NO: 14021 - DNA, 20 bp, Artificial Sequence
  MKO10014021_A_Dgkg
  gRNA
agtaacacacgacatccttc

SEQ ID NO: 14022 - DNA, 20 bp, Artificial Sequence
  MKO10014022_A_Dgkg
  gRNA
ctactgctggccccctcctt

SEQ ID NO: 14023 - DNA, 20 bp, Artificial Sequence
  MKO10014023_A_Dgkh
  gRNA
acctaccgtaaagctgttgt

SEQ ID NO: 14024 - DNA, 20 bp, Artificial Sequence
  MKO10014024_A_Dgkh
  gRNA
ctttcgcataataaagtgtg

SEQ ID NO: 14025 - DNA, 20 bp, Artificial Sequence
  MKO10014025_A_Dgkh
  gRNA
tgtgcttgcttccgcaacac

SEQ ID NO: 14026 - DNA, 20 bp, Artificial Sequence
  MKO10014026_A_Dgki
  gRNA
tgtggctaacggtccagcga

SEQ ID NO: 14027 - DNA, 20 bp, Artificial Sequence
  MKO10014027_A_Dgki
  gRNA
gtgtgccgtctgcaaaatcg

SEQ ID NO: 14028 - DNA, 20 bp, Artificial Sequence
  MKO10014028_A_Dgki
  gRNA
tgttgtagaaatccgctctc

SEQ ID NO: 14029 - DNA, 20 bp, Artificial Sequence
  MKO10014029_A_Dgkk
  gRNA
ggtattccagtagtaatccc

SEQ ID NO: 14030 - DNA, 20 bp, Artificial Sequence
  MKO10014030_A_Dgkk
  gRNA
cgagatgccgtcacctgtga

SEQ ID NO: 14031 - DNA, 20 bp, Artificial Sequence
  MKO10014031_A_Dgkk
  gRNA
cctgacggatttctccttgt

SEQ ID NO: 14032 - DNA, 20 bp, Artificial Sequence
  MKO10014032_A_Dgkq
  gRNA
gcactgacgacagtcgctgc

SEQ ID NO: 14033 - DNA, 20 bp, Artificial Sequence
  MKO10014033_A_Dgkq
  gRNA
gtacccgcattccgctgtga

SEQ ID NO: 14034 - DNA, 20 bp, Artificial Sequence
  MKO10014034_A_Dgkq
  gRNA
cgactgtcgtcagtgccacc

SEQ ID NO: 14035 - DNA, 20 bp, Artificial Sequence
  MKO10014035_A_Dgkz
  gRNA
aagccgtccttccgcgaatc

SEQ ID NO: 14036 - DNA, 20 bp, Artificial Sequence
  MKO10014036_A_Dgkz
  gRNA
acttacctcacggacattcc

SEQ ID NO: 14037 - DNA, 20 bp, Artificial Sequence
  MKO10014037_A_Dgkz
  gRNA
tggtttgagaccaacgtgtc

SEQ ID NO: 14038 - DNA, 20 bp, Artificial Sequence
  MKO10014038_A_Dguok
  gRNA
tccacgagcgcgttccgcag

SEQ ID NO: 14039 - DNA, 20 bp, Artificial Sequence
  MKO10014039_A_Dguok
  gRNA
acgctcggagacgacgcaga

SEQ ID NO: 14040 - DNA, 20 bp, Artificial Sequence
  MKO10014040_A_Dguok
  gRNA
catcgagtggcacatctatc

SEQ ID NO: 14041 - DNA, 20 bp, Artificial Sequence
  MKO10014041_A_Dhcr24
  gRNA
ctgtctacagattgttcgag

SEQ ID NO: 14042 - DNA, 20 bp, Artificial Sequence
  MKO10014042_A_Dhcr24
  gRNA
acctgttctatgccgtgccc

SEQ ID NO: 14043 - DNA, 20 bp, Artificial Sequence
  MKO10014043_A_Dhcr24
  gRNA
tgccgagatccggatcatcc

SEQ ID NO: 14044 - DNA, 20 bp, Artificial Sequence
  MKO10014044_A_Dhcr7
  gRNA
gtccacgttcgcaatgatca

SEQ ID NO: 14045 - DNA, 20 bp, Artificial Sequence
  MKO10014045_A_Dhcr7
  gRNA
gcccttgatcattgcgaacg

SEQ ID NO: 14046 - DNA, 20 bp, Artificial Sequence
  MKO10014046_A_Dhcr7
  gRNA
agtcaaaccacttcccgatg

SEQ ID NO: 14047 - DNA, 20 bp, Artificial Sequence
  MKO10014047_A_Dhdds
  gRNA
cattatgaacgcgatatgtt

SEQ ID NO: 14048 - DNA, 20 bp, Artificial Sequence
  MKO10014048_A_Dhdds
  gRNA
gaagattgcgcatgccatcc

SEQ ID NO: 14049 - DNA, 20 bp, Artificial Sequence
  MKO10014049_A_Dhdds
  gRNA
cagaccttgttccacgcccc

SEQ ID NO: 14050 - DNA, 20 bp, Artificial Sequence
  MKO10014050_A_Dhdh
  gRNA
aactatcggagacctacgag

SEQ ID NO: 14051 - DNA, 20 bp, Artificial Sequence
  MKO10014051_A_Dhdh
  gRNA
cccaacacagcgtatgtgag

SEQ ID NO: 14052 - DNA, 20 bp, Artificial Sequence
  MKO10014052_A_Dhdh
  gRNA
accactcacatacgctgtgt

SEQ ID NO: 14053 - DNA, 20 bp, Artificial Sequence
  MKO10014053_A_Dhfr
  gRNA
cggaggcagttctgtttacc

SEQ ID NO: 14054 - DNA, 20 bp, Artificial Sequence
  MKO10014054_A_Dhfr
  gRNA
tctactttacttgccaattc

SEQ ID NO: 14055 - DNA, 20 bp, Artificial Sequence
  MKO10014055_A_Dhfr
  gRNA
tgagaagaatcgacctttaa

SEQ ID NO: 14056 - DNA, 20 bp, Artificial Sequence
  MKO10014056_A_Dhh
  gRNA
gcttgcgcacataacgccgc

SEQ ID NO: 14057 - DNA, 20 bp, Artificial Sequence
  MKO10014057_A_Dhh
  gRNA
taccagctttgaccgatacg

SEQ ID NO: 14058 - DNA, 20 bp, Artificial Sequence
  MKO10014058_A_Dhh
  gRNA
ttcgcgcgccgcttacgtgc

SEQ ID NO: 14059 - DNA, 20 bp, Artificial Sequence
  MKO10014059_A_Dhodh
  gRNA
tcaggtactcggcgtagaaa

SEQ ID NO: 14060 - DNA, 20 bp, Artificial Sequence
  MKO10014060_A_Dhodh
  gRNA
ccttcctcgagctacgtttc

SEQ ID NO: 14061 - DNA, 20 bp, Artificial Sequence
  MKO10014061_A_Dhodh
  gRNA
tgtggacggactctataagc

SEQ ID NO: 14062 - DNA, 20 bp, Artificial Sequence
  MKO10014062_A_Dhps
  gRNA
ccaccatgttgtgctgcacg

SEQ ID NO: 14063 - DNA, 20 bp, Artificial Sequence
  MKO10014063_A_Dhps
  gRNA
atacctcgtgcagcacaaca

SEQ ID NO: 14064 - DNA, 20 bp, Artificial Sequence
  MKO10014064_A_Dhps
  gRNA
ccgaccacaggtggatgtat

SEQ ID NO: 14065 - DNA, 20 bp, Artificial Sequence
  MKO10014065_A_Dhrs11
  gRNA
gaacatgtccttccatccgc

SEQ ID NO: 14066 - DNA, 20 bp, Artificial Sequence
  MKO10014066_A_Dhrs11
  gRNA
ccagacccatatccgggcca

SEQ ID NO: 14067 - DNA, 20 bp, Artificial Sequence
  MKO10014067_A_Dhrs11
  gRNA
gcctcaccgtggcccggata

SEQ ID NO: 14068 - DNA, 20 bp, Artificial Sequence
  MKO10014068_A_Dhrs13
  gRNA
tcgtctcgacttcacacgtc

SEQ ID NO: 14069 - DNA, 20 bp, Artificial Sequence
  MKO10014069_A_Dhrs13
  gRNA
cacctgacggaggtcgaaag

SEQ ID NO: 14070 - DNA, 20 bp, Artificial Sequence
  MKO10014070_A_Dhrs13
  gRNA
catctttccgatgccgctat

SEQ ID NO: 14071 - DNA, 20 bp, Artificial Sequence
  MKO10014071_A_Dhrs1
  gRNA
ctccgtgacgccgtagctca

SEQ ID NO: 14072 - DNA, 20 bp, Artificial Sequence
  MKO10014072_A_Dhrs1
  gRNA
cccgatctacttgctcgaac

SEQ ID NO: 14073 - DNA, 20 bp, Artificial Sequence
  MKO10014073_A_Dhrs1
  gRNA
gcacggctgatggtgccagc

SEQ ID NO: 14074 - DNA, 20 bp, Artificial Sequence
  MKO10014074_A_Dhrs2
  gRNA
aaggggaggcagcgttgttc

SEQ ID NO: 14075 - DNA, 20 bp, Artificial Sequence
  MKO10014075_A_Dhrs2
  gRNA
caatgcccccagaatgcttc

SEQ ID NO: 14076 - DNA, 20 bp, Artificial Sequence
  MKO10014076_A_Dhrs2
  gRNA
tgaagctgtgaccatattga

SEQ ID NO: 14077 - DNA, 20 bp, Artificial Sequence
  MKO10014077_A_Dhrs3
  gRNA
gcatcggacgccacctcgct

SEQ ID NO: 14078 - DNA, 20 bp, Artificial Sequence
  MKO10014078_A_Dhrs3
  gRNA
gctctgcgaactcccgagcg

SEQ ID NO: 14079 - DNA, 20 bp, Artificial Sequence
  MKO10014079_A_Dhrs3
  gRNA
ggcacacaatatggccgttc

SEQ ID NO: 14080 - DNA, 20 bp, Artificial Sequence
  MKO10014080_A_Dhrs4
  gRNA
ctaggctctgaagcgtcacc

SEQ ID NO: 14081 - DNA, 20 bp, Artificial Sequence
  MKO10014081_A_Dhrs4
  gRNA
ggctgaagatggggcccacg

SEQ ID NO: 14082 - DNA, 20 bp, Artificial Sequence
  MKO10014082_A_Dhrs4
  gRNA
gactggcatcgtgtgccacg

SEQ ID NO: 14083 - DNA, 20 bp, Artificial Sequence
  MKO10014083_A_Dhrs7b
  gRNA
acctttgacctcgcggatcc

SEQ ID NO: 14084 - DNA, 20 bp, Artificial Sequence
  MKO10014084_A_Dhrs7b
  gRNA
gctgcagaggatccgctcaa

SEQ ID NO: 14085 - DNA, 20 bp, Artificial Sequence
  MKO10014085_A_Dhrs7b
  gRNA
tcctcacatgccgatcggaa

SEQ ID NO: 14086 - DNA, 20 bp, Artificial Sequence
  MKO10014086_A_Dhrs7c
  gRNA
gacttacaagctgtgcggaa

SEQ ID NO: 14087 - DNA, 20 bp, Artificial Sequence
  MKO10014087_A_Dhrs7c
  gRNA
aggccccttcactttcacgc

SEQ ID NO: 14088 - DNA, 20 bp, Artificial Sequence
  MKO10014088_A_Dhrs7c
  gRNA
ctttgactgcctccgagccg

SEQ ID NO: 14089 - DNA, 20 bp, Artificial Sequence
  MKO10014089_A_Dhrs7
  gRNA
attggccgagctcactatgg

SEQ ID NO: 14090 - DNA, 20 bp, Artificial Sequence
  MKO10014090_A_Dhrs7
  gRNA
agccaccaaagccgttctgc

SEQ ID NO: 14091 - DNA, 20 bp, Artificial Sequence
  MKO10014091_A_Dhrs7
  gRNA
gaccgatacaagttcccatg

SEQ ID NO: 14092 - DNA, 20 bp, Artificial Sequence
  MKO10014092_A_Dhrs9
  gRNA
cccattgaagttaacctgtt

SEQ ID NO: 14093 - DNA, 20 bp, Artificial Sequence
  MKO10014093_A_Dhrs9
  gRNA
gaaaccctccactgcgtatt

SEQ ID NO: 14094 - DNA, 20 bp, Artificial Sequence
  MKO10014094_A_Dhrs9
  gRNA
gagactccacaccgtgcttc

SEQ ID NO: 14095 - DNA, 20 bp, Artificial Sequence
  MKO10014095_A_Dhrsx
  gRNA
gcatcgggcgtagcaccgcg

SEQ ID NO: 14096 - DNA, 20 bp, Artificial Sequence
  MKO10014096_A_Dhrsx
  gRNA
ctccccgccttgcgcgcgtc

SEQ ID NO: 14097 - DNA, 20 bp, Artificial Sequence
  MKO10014097_A_Dhrsx
  gRNA
catacactcaccgcccgtga

SEQ ID NO: 14098 - DNA, 20 bp, Artificial Sequence
  MKO10014098_A_Dhtkd1
  gRNA
gatgtcggttataccgccat

SEQ ID NO: 14099 - DNA, 20 bp, Artificial Sequence
  MKO10014099_A_Dhtkd1
  gRNA
ctgatgttccgtaaaatgcg

SEQ ID NO: 14100 - DNA, 20 bp, Artificial Sequence
  MKO10014100_A_Dhtkd1
  gRNA
accgccgtatctcttcaccg

SEQ ID NO: 14101 - DNA, 20 bp, Artificial Sequence
  MKO10014101_A_Dhx15
  gRNA
gagtatatgcgatccttgcc

SEQ ID NO: 14102 - DNA, 20 bp, Artificial Sequence
  MKO10014102_A_Dhx15
  gRNA
cgtgaccgagaacgtgatag

SEQ ID NO: 14103 - DNA, 20 bp, Artificial Sequence
  MKO10014103_A_Dhx15
  gRNA
ggaaagaccgggaacgagat

SEQ ID NO: 14104 - DNA, 20 bp, Artificial Sequence
  MKO10014104_A_Dhx16
  gRNA
agctccgtaagaagtctcgt

SEQ ID NO: 14105 - DNA, 20 bp, Artificial Sequence
  MKO10014105_A_Dhx16
  gRNA
tcaagtacaagcgacgtgtg

SEQ ID NO: 14106 - DNA, 20 bp, Artificial Sequence
  MKO10014106_A_Dhx16
  gRNA
ttgccgaacccgctctgcaa

SEQ ID NO: 14107 - DNA, 20 bp, Artificial Sequence
  MKO10014107_A_Dhx29
  gRNA
ctctgcttaaatctttccga

SEQ ID NO: 14108 - DNA, 20 bp, Artificial Sequence
  MKO10014108_A_Dhx29
  gRNA
agcgatctctggaagactgt

SEQ ID NO: 14109 - DNA, 20 bp, Artificial Sequence
  MKO10014109_A_Dhx29
  gRNA
acctccatgcaagagtgtat

SEQ ID NO: 14110 - DNA, 20 bp, Artificial Sequence
  MKO10014110_A_Dhx30
  gRNA
gcaggactatcccgatcctt

SEQ ID NO: 14111 - DNA, 20 bp, Artificial Sequence
  MKO10014111_A_Dhx30
  gRNA
cgagtgctagctgatcgttt

SEQ ID NO: 14112 - DNA, 20 bp, Artificial Sequence
  MKO10014112_A_Dhx30
  gRNA
aaccttctcaacagcgtgat

SEQ ID NO: 14113 - DNA, 20 bp, Artificial Sequence
  MKO10014113_A_Dhx32
  gRNA
cgagcagcacgtcagtcgcc

SEQ ID NO: 14114 - DNA, 20 bp, Artificial Sequence
  MKO10014114_A_Dhx32
  gRNA
tgcatatcacgcccccgtgc

SEQ ID NO: 14115 - DNA, 20 bp, Artificial Sequence
  MKO10014115_A_Dhx32
  gRNA
aaggcgtatgacagactcga

SEQ ID NO: 14116 - DNA, 20 bp, Artificial Sequence
  MKO10014116_A_Dhx33
  gRNA
ctgtgtgaatagtccgctca

SEQ ID NO: 14117 - DNA, 20 bp, Artificial Sequence
  MKO10014117_A_Dhx33
  gRNA
gactcgaagctgctgcgaat

SEQ ID NO: 14118 - DNA, 20 bp, Artificial Sequence
  MKO10014118_A_Dhx33
  gRNA
tgtgacccagccccgtcgag

SEQ ID NO: 14119 - DNA, 20 bp, Artificial Sequence
  MKO10014119_A_Dhx34
  gRNA
cttgccccaggtgttcgatg

SEQ ID NO: 14120 - DNA, 20 bp, Artificial Sequence
  MKO10014120_A_Dhx34
  gRNA
cgacaataagtatccccccg

SEQ ID NO: 14121 - DNA, 20 bp, Artificial Sequence
  MKO10014121_A_Dhx34
  gRNA
gagacctcagtcacgatcga

SEQ ID NO: 14122 - DNA, 20 bp, Artificial Sequence
  MKO10014122_A_Dhx35
  gRNA
cgatgactgcaccgacccac

SEQ ID NO: 14123 - DNA, 20 bp, Artificial Sequence
  MKO10014123_A_Dhx35
  gRNA
tatcagaccgtggtgattgt

SEQ ID NO: 14124 - DNA, 20 bp, Artificial Sequence
  MKO10014124_A_Dhx35
  gRNA
ggtcggtgcagtcatcgaag

SEQ ID NO: 14125 - DNA, 20 bp, Artificial Sequence
  MKO10014125_A_Dhx36
  gRNA
acctgcatctctatatatcg

SEQ ID NO: 14126 - DNA, 20 bp, Artificial Sequence
  MKO10014126_A_Dhx36
  gRNA
ccctcgatatatagagatgc

SEQ ID NO: 14127 - DNA, 20 bp, Artificial Sequence
  MKO10014127_A_Dhx36
  gRNA
attcagaagcgcagatatcc

SEQ ID NO: 14128 - DNA, 20 bp, Artificial Sequence
  MKO10014128_A_Dhx37
  gRNA
caagctcccgatcctcgccg

SEQ ID NO: 14129 - DNA, 20 bp, Artificial Sequence
  MKO10014129_A_Dhx37
  gRNA
cttgctcctcggcgaggatc

SEQ ID NO: 14130 - DNA, 20 bp, Artificial Sequence
  MKO10014130_A_Dhx37
  gRNA
tcatctcggcctccgatact

SEQ ID NO: 14131 - DNA, 20 bp, Artificial Sequence
  MKO10014131_A_Dhx38
  gRNA
acctcgctcagagtcccgat

SEQ ID NO: 14132 - DNA, 20 bp, Artificial Sequence
  MKO10014132_A_Dhx38
  gRNA
tcacctgtctcgatcccgag

SEQ ID NO: 14133 - DNA, 20 bp, Artificial Sequence
  MKO10014133_A_Dhx38
  gRNA
atacctttgggccgatgtcg

SEQ ID NO: 14134 - DNA, 20 bp, Artificial Sequence
  MKO10014134_A_Dhx40
  gRNA
aactcgttcctcatcgttac

SEQ ID NO: 14135 - DNA, 20 bp, Artificial Sequence
  MKO10014135_A_Dhx40
  gRNA
tgccccatatttgatatacc

SEQ ID NO: 14136 - DNA, 20 bp, Artificial Sequence
  MKO10014136_A_Dhx40
  gRNA
aaccctctgagcaactgata

SEQ ID NO: 14137 - DNA, 20 bp, Artificial Sequence
  MKO10014137_A_Dhx57
  gRNA
ttctccacgataattgatgc

SEQ ID NO: 14138 - DNA, 20 bp, Artificial Sequence
  MKO10014138_A_Dhx57
  gRNA
ttgtgtcgtcatcagcgtca

SEQ ID NO: 14139 - DNA, 20 bp, Artificial Sequence
  MKO10014139_A_Dhx57
  gRNA
taatgacctggacgggcgct

SEQ ID NO: 14140 - DNA, 20 bp, Artificial Sequence
  MKO10014140_A_Dhx58
  gRNA
cctctagctttgtgcgaatt

SEQ ID NO: 14141 - DNA, 20 bp, Artificial Sequence
  MKO10014141_A_Dhx58
  gRNA
cctggtgagccagcacgccg

SEQ ID NO: 14142 - DNA, 20 bp, Artificial Sequence
  MKO10014142_A_Dhx58
  gRNA
cccagaattctcgctgattg

SEQ ID NO: 14143 - DNA, 20 bp, Artificial Sequence
  MKO10014143_A_Dhx8
  gRNA
ggcccccgtacccgagctga

SEQ ID NO: 14144 - DNA, 20 bp, Artificial Sequence
  MKO10014144_A_Dhx8
  gRNA
gctttaatgcccagcgcagc

SEQ ID NO: 14145 - DNA, 20 bp, Artificial Sequence
  MKO10014145_A_Dhx8
  gRNA
tttctcttggcctgctgcgc

SEQ ID NO: 14146 - DNA, 20 bp, Artificial Sequence
  MKO10014146_A_Dhx9
  gRNA
agtggtcctcccattggtgc

SEQ ID NO: 14147 - DNA, 20 bp, Artificial Sequence
  MKO10014147_A_Dhx9
  gRNA
atcttaaaggttcgagtaga

SEQ ID NO: 14148 - DNA, 20 bp, Artificial Sequence
  MKO10014148_A_Dhx9
  gRNA
cagagactttgttaactatt

SEQ ID NO: 14149 - DNA, 20 bp, Artificial Sequence
  MKO10014149_A_Diablo
  gRNA
gattgcttcaatcagcgcgt

SEQ ID NO: 14150 - DNA, 20 bp, Artificial Sequence
  MKO10014150_A_Diablo
  gRNA
gagacctaccttagtatact

SEQ ID NO: 14151 - DNA, 20 bp, Artificial Sequence
  MKO10014151_A_Diablo
  gRNA
caagtaaacttgtatattgt

SEQ ID NO: 14152 - DNA, 20 bp, Artificial Sequence
  MKO10014152_A_Diap1
  gRNA
agaaactcctctgcatcgta

SEQ ID NO: 14153 - DNA, 20 bp, Artificial Sequence
  MKO10014153_A_Diap1
  gRNA
gtcatctccgtacgatgcag

SEQ ID NO: 14154 - DNA, 20 bp, Artificial Sequence
  MKO10014154_A_Diap1
  gRNA
gcagcagcctttgcgagaga

SEQ ID NO: 14155 - DNA, 20 bp, Artificial Sequence
  MKO10014155_A_Diap2
  gRNA
ctaaaatccttctttcgcaa

SEQ ID NO: 14156 - DNA, 20 bp, Artificial Sequence
  MKO10014156_A_Diap2
  gRNA
gaaagctcctttgcgaaaga

SEQ ID NO: 14157 - DNA, 20 bp, Artificial Sequence
  MKO10014157_A_Diap2
  gRNA
tatgttcatgaattacgatc

SEQ ID NO: 14158 - DNA, 20 bp, Artificial Sequence
  MKO10014158_A_Diap3
  gRNA
ccattgcgggaaaaagactt

SEQ ID NO: 14159 - DNA, 20 bp, Artificial Sequence
  MKO10014159_A_Diap3
  gRNA
ccccacctgaagactgtgtc

SEQ ID NO: 14160 - DNA, 20 bp, Artificial Sequence
  MKO10014160_A_Diap3
  gRNA
aagttacctcacaggatgac

SEQ ID NO: 14161 - DNA, 20 bp, Artificial Sequence
  MKO10014161_A_Dicer1
  gRNA
cgctgagacggcgactgact

SEQ ID NO: 14162 - DNA, 20 bp, Artificial Sequence
  MKO10014162_A_Dicer1
  gRNA
ctcagggaagacgttcatcg

SEQ ID NO: 14163 - DNA, 20 bp, Artificial Sequence
  MKO10014163_A_Dicer1
  gRNA
cccctatcgtgaaattatga

SEQ ID NO: 14164 - DNA, 20 bp, Artificial Sequence
  MKO10014164_A_Dido1
  gRNA
cggtagcgccaccgatgagc

SEQ ID NO: 14165 - DNA, 20 bp, Artificial Sequence
  MKO10014165_A_Dido1
  gRNA
ttgccgtccactgcggcgca

SEQ ID NO: 14166 - DNA, 20 bp, Artificial Sequence
  MKO10014166_A_Dido1
  gRNA
tctaccctctcagtacgttt

SEQ ID NO: 14167 - DNA, 20 bp, Artificial Sequence
  MKO10014167_A_Diexf
  gRNA
tagtacgtactttcagttgc

SEQ ID NO: 14168 - DNA, 20 bp, Artificial Sequence
  MKO10014168_A_Diexf
  gRNA
agtgaacaagagcacgtttc

SEQ ID NO: 14169 - DNA, 20 bp, Artificial Sequence
  MKO10014169_A_Diexf
  gRNA
caagccgcagatttgtcagc

SEQ ID NO: 14170 - DNA, 20 bp, Artificial Sequence
  MKO10014170_A_Dimt1
  gRNA
tcaggactcatgttcaacac

SEQ ID NO: 14171 - DNA, 20 bp, Artificial Sequence
  MKO10014171_A_Dimt1
  gRNA
atgatgctgttaacaattag

SEQ ID NO: 14172 - DNA, 20 bp, Artificial Sequence
  MKO10014172_A_Dimt1
  gRNA
acagtcatattgccagtccc

SEQ ID NO: 14173 - DNA, 20 bp, Artificial Sequence
  MKO10014173_A_Dio1
  gRNA
gcggcttgtgatattcctgc

SEQ ID NO: 14174 - DNA, 20 bp, Artificial Sequence
  MKO10014174_A_Dio1
  gRNA
tgagaggctctacgtgatac

SEQ ID NO: 14175 - DNA, 20 bp, Artificial Sequence
  MKO10014175_A_Dio1
  gRNA
ctgcccgcacgcgctcctgg

SEQ ID NO: 14176 - DNA, 20 bp, Artificial Sequence
  MKO10014176_A_Dio2
  gRNA
gcgcctccactctccgcgag

SEQ ID NO: 14177 - DNA, 20 bp, Artificial Sequence
  MKO10014177_A_Dio2
  gRNA
agccgctccaagtccactcg

SEQ ID NO: 14178 - DNA, 20 bp, Artificial Sequence
  MKO10014178_A_Dio2
  gRNA
acctacaagaagtccgaagt

SEQ ID NO: 14179 - DNA, 20 bp, Artificial Sequence
  MKO10014179_A_Dio3
  gRNA
gggtcccttgtgcgtagtcg

SEQ ID NO: 14180 - DNA, 20 bp, Artificial Sequence
  MKO10014180_A_Dio3
  gRNA
tcgaggttggtggtcggaga

SEQ ID NO: 14181 - DNA, 20 bp, Artificial Sequence
  MKO10014181_A_Dio3
  gRNA
cgcatcctcgactacgcaca

SEQ ID NO: 14182 - DNA, 20 bp, Artificial Sequence
  MKO10014182_A_Dip2a
  gRNA
agcggtagctgccgtcagca

SEQ ID NO: 14183 - DNA, 20 bp, Artificial Sequence
  MKO10014183_A_Dip2a
  gRNA
atcaatacctggaggcgtgt

SEQ ID NO: 14184 - DNA, 20 bp, Artificial Sequence
  MKO10014184_A_Dip2a
  gRNA
agtgcctccactgcgctcgc

SEQ ID NO: 14185 - DNA, 20 bp, Artificial Sequence
  MKO10014185_A_Dip2b
  gRNA
gccagttacagatgacgccc

SEQ ID NO: 14186 - DNA, 20 bp, Artificial Sequence
  MKO10014186_A_Dip2b
  gRNA
ccgtatgtgagagtgtagac

SEQ ID NO: 14187 - DNA, 20 bp, Artificial Sequence
  MKO10014187_A_Dip2b
  gRNA
acccaaaagaccccccttaa

SEQ ID NO: 14188 - DNA, 20 bp, Artificial Sequence
  MKO10014188_A_Dip2c
  gRNA
ggtctcgagatgaacgttat

SEQ ID NO: 14189 - DNA, 20 bp, Artificial Sequence
  MKO10014189_A_Dip2c
  gRNA
acaggcgcccgtcgctcttg

SEQ ID NO: 14190 - DNA, 20 bp, Artificial Sequence
  MKO10014190_A_Dip2c
  gRNA
gccttccaaacgaagatccc

SEQ ID NO: 14191 - DNA, 20 bp, Artificial Sequence
  MKO10014191_A_Diras1
  gRNA
tgctgacgctcgagacgcgc

SEQ ID NO: 14192 - DNA, 20 bp, Artificial Sequence
  MKO10014192_A_Diras1
  gRNA
ctgcgccgaacacgaccaca

SEQ ID NO: 14193 - DNA, 20 bp, Artificial Sequence
  MKO10014193_A_Diras1
  gRNA
ggtgcacacgcgcgaggcgc

SEQ ID NO: 14194 - DNA, 20 bp, Artificial Sequence
  MKO10014194_A_Diras2
  gRNA
cggaacagagcaacgactac

SEQ ID NO: 14195 - DNA, 20 bp, Artificial Sequence
  MKO10014195_A_Diras2
  gRNA
tgatgagagccccaaccgtg

SEQ ID NO: 14196 - DNA, 20 bp, Artificial Sequence
  MKO10014196_A_Diras2
  gRNA
tgctcttcttgccgtcgatc

SEQ ID NO: 14197 - DNA, 20 bp, Artificial Sequence
  MKO10014197_A_Dirc2
  gRNA
ggcgccgcattcatgacagt

SEQ ID NO: 14198 - DNA, 20 bp, Artificial Sequence
  MKO10014198_A_Dirc2
  gRNA
ggagcgtgtgcgtttctcgt

SEQ ID NO: 14199 - DNA, 20 bp, Artificial Sequence
  MKO10014199_A_Dirc2
  gRNA
gtaacctacaaaagctccgc

SEQ ID NO: 14200 - DNA, 20 bp, Artificial Sequence
  MKO10014200_A_Dis3l2
  gRNA
cgaaggttcagcttgtagtc

SEQ ID NO: 14201 - DNA, 20 bp, Artificial Sequence
  MKO10014201_A_Dis3l2
  gRNA
gctcgtaatagagccttaaa

SEQ ID NO: 14202 - DNA, 20 bp, Artificial Sequence
  MKO10014202_A_Dis3l2
  gRNA
agtgctgttggtgcttcgcc

SEQ ID NO: 14203 - DNA, 20 bp, Artificial Sequence
  MKO10014203_A_Dis3l
  gRNA
caaatctggacgctacatcc

SEQ ID NO: 14204 - DNA, 20 bp, Artificial Sequence
  MKO10014204_A_Dis3l
  gRNA
aatctggccagaagttgtcc

SEQ ID NO: 14205 - DNA, 20 bp, Artificial Sequence
  MKO10014205_A_Dis3l
  gRNA
atcttctgtcaccataacga

SEQ ID NO: 14206 - DNA, 20 bp, Artificial Sequence
  MKO10014206_A_Dis3
  gRNA
tgtaccacttcgctgcgact

SEQ ID NO: 14207 - DNA, 20 bp, Artificial Sequence
  MKO10014207_A_Dis3
  gRNA
tgcttacttgtccgatgaaa

SEQ ID NO: 14208 - DNA, 20 bp, Artificial Sequence
  MKO10014208_A_Dis3
  gRNA
aacctacatcgagcaagagc

SEQ ID NO: 14209 - DNA, 20 bp, Artificial Sequence
  MKO10014209_A_Disc1
  gRNA
ccggccgcacgatgcagggc

SEQ ID NO: 14210 - DNA, 20 bp, Artificial Sequence
  MKO10014210_A_Disc1
  gRNA
gaggatggcgattacgatac

SEQ ID NO: 14211 - DNA, 20 bp, Artificial Sequence
  MKO10014211_A_Disc1
  gRNA
ttcaacgccggtgatgccag

SEQ ID NO: 14212 - DNA, 20 bp, Artificial Sequence
  MKO10014212_A_Disp1
  gRNA
ccgtagttacgcagccctgc

SEQ ID NO: 14213 - DNA, 20 bp, Artificial Sequence
  MKO10014213_A_Disp1
  gRNA
cagcagcgggtccgagaagt

SEQ ID NO: 14214 - DNA, 20 bp, Artificial Sequence
  MKO10014214_A_Disp1
  gRNA
cgtctgaccatcggtcatcc

SEQ ID NO: 14215 - DNA, 20 bp, Artificial Sequence
  MKO10014215_A_Disp2
  gRNA
ggccctacctcttcggcatc

SEQ ID NO: 14216 - DNA, 20 bp, Artificial Sequence
  MKO10014216_A_Disp2
  gRNA
ggctgtgatcgtggggtgtc

SEQ ID NO: 14217 - DNA, 20 bp, Artificial Sequence
  MKO10014217_A_Disp2
  gRNA
caccccacgatcacagccac

SEQ ID NO: 14218 - DNA, 20 bp, Artificial Sequence
  MKO10014218_A_Dixdc1
  gRNA
catctcggagatcctgtcgc

SEQ ID NO: 14219 - DNA, 20 bp, Artificial Sequence
  MKO10014219_A_Dixdc1
  gRNA
accaacaatctcgatgagat

SEQ ID NO: 14220 - DNA, 20 bp, Artificial Sequence
  MKO10014220_A_Dixdc1
  gRNA
cgcctgtaggaacgccagcg

SEQ ID NO: 14221 - DNA, 20 bp, Artificial Sequence
  MKO10014221_A_Dkc1
  gRNA
cattgaacgagccactcgtt

SEQ ID NO: 14222 - DNA, 20 bp, Artificial Sequence
  MKO10014222_A_Dkc1
  gRNA
tctctacccgaagtattcgt

SEQ ID NO: 14223 - DNA, 20 bp, Artificial Sequence
  MKO10014223_A_Dkc1
  gRNA
gcaacatcatcttcttgtaa

SEQ ID NO: 14224 - DNA, 20 bp, Artificial Sequence
  MKO10014224_A_Dkk1
  gRNA
taatgaccacaacgccgccg

SEQ ID NO: 14225 - DNA, 20 bp, Artificial Sequence
  MKO10014225_A_Dkk1
  gRNA
gatctgtacacctccgacgc

SEQ ID NO: 14226 - DNA, 20 bp, Artificial Sequence
  MKO10014226_A_Dkk1
  gRNA
gggcaggttcttgatcgcgt

SEQ ID NO: 14227 - DNA, 20 bp, Artificial Sequence
  MKO10014227_A_Dkk2
  gRNA
cgaacccttcttgcgttgtt

SEQ ID NO: 14228 - DNA, 20 bp, Artificial Sequence
  MKO10014228_A_Dkk2
  gRNA
tgccgccgaaagccagtcct

SEQ ID NO: 14229 - DNA, 20 bp, Artificial Sequence
  MKO10014229_A_Dkk2
  gRNA
atccttgacccgcatcagcg

SEQ ID NO: 14230 - DNA, 20 bp, Artificial Sequence
  MKO10014230_A_Dkk3
  gRNA
gatggtcccattgccacctt

SEQ ID NO: 14231 - DNA, 20 bp, Artificial Sequence
  MKO10014231_A_Dkk3
  gRNA
ggaccatctgtgacaaccag

SEQ ID NO: 14232 - DNA, 20 bp, Artificial Sequence
  MKO10014232_A_Dkk3
  gRNA
aaaagaccacctgtccactc

SEQ ID NO: 14233 - DNA, 20 bp, Artificial Sequence
  MKO10014233_A_Dkk4
  gRNA
tgacttcggcacgttagtcc

SEQ ID NO: 14234 - DNA, 20 bp, Artificial Sequence
  MKO10014234_A_Dkk4
  gRNA
ccacgtgccgtagagttcgc

SEQ ID NO: 14235 - DNA, 20 bp, Artificial Sequence
  MKO10014235_A_Dkk4
  gRNA
ttgcaagccagttctacgag

SEQ ID NO: 14236 - DNA, 20 bp, Artificial Sequence
  MKO10014236_A_Dkkl1
  gRNA
gaatgacctgctacgagacc

SEQ ID NO: 14237 - DNA, 20 bp, Artificial Sequence
  MKO10014237_A_Dkkl1
  gRNA
cacctgcaatgtgtcgactg

SEQ ID NO: 14238 - DNA, 20 bp, Artificial Sequence
  MKO10014238_A_Dkkl1
  gRNA
agaaaagcgacatcgcatgc

SEQ ID NO: 14239 - DNA, 20 bp, Artificial Sequence
  MKO10014239_A_Dlat
  gRNA
ctaccgggagcgcttgcaga

SEQ ID NO: 14240 - DNA, 20 bp, Artificial Sequence
  MKO10014240_A_Dlat
  gRNA
agtcttacctgcatatgagt

SEQ ID NO: 14241 - DNA, 20 bp, Artificial Sequence
  MKO10014241_A_Dlat
  gRNA
gagaccgacaaggccaccat

SEQ ID NO: 14242 - DNA, 20 bp, Artificial Sequence
  MKO10014242_A_Dlc1
  gRNA
gatgagccttgcgccataag

SEQ ID NO: 14243 - DNA, 20 bp, Artificial Sequence
  MKO10014243_A_Dlc1
  gRNA
tgcagcggatagtcaaccag

SEQ ID NO: 14244 - DNA, 20 bp, Artificial Sequence
  MKO10014244_A_Dlc1
  gRNA
ttgaccagcgcaatatcaat

SEQ ID NO: 14245 - DNA, 20 bp, Artificial Sequence
  MKO10014245_A_Dld
  gRNA
accttaccttaaagcctaac

SEQ ID NO: 14246 - DNA, 20 bp, Artificial Sequence
  MKO10014246_A_Dld
  gRNA
catgagatatccgattgaaa

SEQ ID NO: 14247 - DNA, 20 bp, Artificial Sequence
  MKO10014247_A_Dld
  gRNA
tgatctgcataagttcttaa

SEQ ID NO: 14248 - DNA, 20 bp, Artificial Sequence
  MKO10014248_A_Dlec1
  gRNA
tttctgcaatatcccgtgca

SEQ ID NO: 14249 - DNA, 20 bp, Artificial Sequence
  MKO10014249_A_Dlec1
  gRNA
tgacgactttgagtacaccg

SEQ ID NO: 14250 - DNA, 20 bp, Artificial Sequence
  MKO10014250_A_Dlec1
  gRNA
gtgttaggcgggaaaaaccg

SEQ ID NO: 14251 - DNA, 20 bp, Artificial Sequence
  MKO10014251_A_Dleu7
  gRNA
cgatgcgcagcgctctggct

SEQ ID NO: 14252 - DNA, 20 bp, Artificial Sequence
  MKO10014252_A_Dleu7
  gRNA
gcgcatcgccatccgcgcca

SEQ ID NO: 14253 - DNA, 20 bp, Artificial Sequence
  MKO10014253_A_Dleu7
  gRNA
ctggatcaacttcttcacta

SEQ ID NO: 14254 - DNA, 20 bp, Artificial Sequence
  MKO10014254_A_Dlg1
  gRNA
cgctccgcctgtgataattt

SEQ ID NO: 14255 - DNA, 20 bp, Artificial Sequence
  MKO10014255_A_Dlg1
  gRNA
cgtaccgcaatcttccatcc

SEQ ID NO: 14256 - DNA, 20 bp, Artificial Sequence
  MKO10014256_A_Dlg1
  gRNA
aagctcattaaaggtcctaa

SEQ ID NO: 14257 - DNA, 20 bp, Artificial Sequence
  MKO10014257_A_Dlg2
  gRNA
cccagattacgctcgatttg

SEQ ID NO: 14258 - DNA, 20 bp, Artificial Sequence
  MKO10014258_A_Dlg2
  gRNA
gtgaatggaatcgatcttcg

SEQ ID NO: 14259 - DNA, 20 bp, Artificial Sequence
  MKO10014259_A_Dlg2
  gRNA
gcacccttacctccgcttgc

SEQ ID NO: 14260 - DNA, 20 bp, Artificial Sequence
  MKO10014260_A_Dlg3
  gRNA
gggccctgtttgattatgat

SEQ ID NO: 14261 - DNA, 20 bp, Artificial Sequence
  MKO10014261_A_Dlg3
  gRNA
tttgtctcaccgataagatc

SEQ ID NO: 14262 - DNA, 20 bp, Artificial Sequence
  MKO10014262_A_Dlg3
  gRNA
aaggggagaccggatcttat

SEQ ID NO: 14263 - DNA, 20 bp, Artificial Sequence
  MKO10014263_A_Dlg4
  gRNA
gtgtccgtgttgacaatcac

SEQ ID NO: 14264 - DNA, 20 bp, Artificial Sequence
  MKO10014264_A_Dlg4
  gRNA
gttgcaggtgaacggaacag

SEQ ID NO: 14265 - DNA, 20 bp, Artificial Sequence
  MKO10014265_A_Dlg4
  gRNA
tccccctgtgattgtcaaca

SEQ ID NO: 14266 - DNA, 20 bp, Artificial Sequence
  MKO10014266_A_Dlg5
  gRNA
cgggccgccgcagtctacag

SEQ ID NO: 14267 - DNA, 20 bp, Artificial Sequence
  MKO10014267_A_Dlg5
  gRNA
gaatgagctacgcaagcgcc

SEQ ID NO: 14268 - DNA, 20 bp, Artificial Sequence
  MKO10014268_A_Dlg5
  gRNA
ccaccatggagccgcagcgc

SEQ ID NO: 14269 - DNA, 20 bp, Artificial Sequence
  MKO10014269_A_Dlgap1
  gRNA
atctcgtcgtctttcccgcg

SEQ ID NO: 14270 - DNA, 20 bp, Artificial Sequence
  MKO10014270_A_Dlgap1
  gRNA
acgacgaatgcgtgtcgctg

SEQ ID NO: 14271 - DNA, 20 bp, Artificial Sequence
  MKO10014271_A_Dlgap1
  gRNA
aagacgacgagatcccgtgc

SEQ ID NO: 14272 - DNA, 20 bp, Artificial Sequence
  MKO10014272_A_Dlgap2
  gRNA
ggagctacgtttcatgtacc

SEQ ID NO: 14273 - DNA, 20 bp, Artificial Sequence
  MKO10014273_A_Dlgap2
  gRNA
tgcggtaggcctccttagcc

SEQ ID NO: 14274 - DNA, 20 bp, Artificial Sequence
  MKO10014274_A_Dlgap2
  gRNA
attgctgcatcttaccagac

SEQ ID NO: 14275 - DNA, 20 bp, Artificial Sequence
  MKO10014275_A_Dlgap3
  gRNA
cggaagtggcggccgtccat

SEQ ID NO: 14276 - DNA, 20 bp, Artificial Sequence
  MKO10014276_A_Dlgap3
  gRNA
atggggagatcccctgccgc

SEQ ID NO: 14277 - DNA, 20 bp, Artificial Sequence
  MKO10014277_A_Dlgap3
  gRNA
acgcaccctcgagttggcac

SEQ ID NO: 14278 - DNA, 20 bp, Artificial Sequence
  MKO10014278_A_Dlgap4
  gRNA
catcgagatttatgtccccg

SEQ ID NO: 14279 - DNA, 20 bp, Artificial Sequence
  MKO10014279_A_Dlgap4
  gRNA
ctgcttgtcccccgcgtctg

SEQ ID NO: 14280 - DNA, 20 bp, Artificial Sequence
  MKO10014280_A_Dlgap4
  gRNA
ggggcagcgaagacgcctcc

SEQ ID NO: 14281 - DNA, 20 bp, Artificial Sequence
  MKO10014281_A_Dlgap5
  gRNA
ctctatagacccgctgcgcc

SEQ ID NO: 14282 - DNA, 20 bp, Artificial Sequence
  MKO10014282_A_Dlgap5
  gRNA
ccccttagggtcagtaaaaa

SEQ ID NO: 14283 - DNA, 20 bp, Artificial Sequence
  MKO10014283_A_Dlgap5
  gRNA
cagcctgtgctgttcacgtc

SEQ ID NO: 14284 - DNA, 20 bp, Artificial Sequence
  MKO10014284_A_Dlk1
  gRNA
cgccccgagatgatcgcgac

SEQ ID NO: 14285 - DNA, 20 bp, Artificial Sequence
  MKO10014285_A_Dlk1
  gRNA
gcaagttccattgttggcgc

SEQ ID NO: 14286 - DNA, 20 bp, Artificial Sequence
  MKO10014286_A_Dlk1
  gRNA
tatttacccattgatcacgc

SEQ ID NO: 14287 - DNA, 20 bp, Artificial Sequence
  MKO10014287_A_Dlk2
  gRNA
atttaggcagcggcagccgc

SEQ ID NO: 14288 - DNA, 20 bp, Artificial Sequence
  MKO10014288_A_Dlk2
  gRNA
cccacaggtgtctacacgtc

SEQ ID NO: 14289 - DNA, 20 bp, Artificial Sequence
  MKO10014289_A_Dlk2
  gRNA
aggccagtgtgtgtatgacg

SEQ ID NO: 14290 - DNA, 20 bp, Artificial Sequence
  MKO10014290_A_Dll1
  gRNA
gggtcgatgcctgcgccatc

SEQ ID NO: 14291 - DNA, 20 bp, Artificial Sequence
  MKO10014291_A_Dll1
  gRNA
ggaaccgcaactgctgccgc

SEQ ID NO: 14292 - DNA, 20 bp, Artificial Sequence
  MKO10014292_A_Dll1
  gRNA
tctcccgatgacctcgcaac

SEQ ID NO: 14293 - DNA, 20 bp, Artificial Sequence
  MKO10014293_A_Dll3
  gRNA
tgcacttctcctaccgcgcg

SEQ ID NO: 14294 - DNA, 20 bp, Artificial Sequence
  MKO10014294_A_Dll3
  gRNA
ggccgtagacgcctggcggc

SEQ ID NO: 14295 - DNA, 20 bp, Artificial Sequence
  MKO10014295_A_Dll3
  gRNA
gtgtgcccttccgcgatgct

SEQ ID NO: 14296 - DNA, 20 bp, Artificial Sequence
  MKO10014296_A_Dll4
  gRNA
ggcactcataatgtccgaag

SEQ ID NO: 14297 - DNA, 20 bp, Artificial Sequence
  MKO10014297_A_Dll4
  gRNA
gttggtgcccaataccggcg

SEQ ID NO: 14298 - DNA, 20 bp, Artificial Sequence
  MKO10014298_A_Dll4
  gRNA
aagaagcgcgatgaccactt

SEQ ID NO: 14299 - DNA, 20 bp, Artificial Sequence
  MKO10014299_A_Dlst
  gRNA
gtaacctggtccccgacata

SEQ ID NO: 14300 - DNA, 20 bp, Artificial Sequence
  MKO10014300_A_Dlst
  gRNA
caacaggggaactgccctct

SEQ ID NO: 14301 - DNA, 20 bp, Artificial Sequence
  MKO10014301_A_Dlst
  gRNA
gtgacagactctgcaaacgc

SEQ ID NO: 14302 - DNA, 20 bp, Artificial Sequence
  MKO10014302_A_Dlx1
  gRNA
ggccgaactgtaggcaccgt

SEQ ID NO: 14303 - DNA, 20 bp, Artificial Sequence
  MKO10014303_A_Dlx1
  gRNA
gctgctgaccgagttgacgt

SEQ ID NO: 14304 - DNA, 20 bp, Artificial Sequence
  MKO10014304_A_Dlx1
  gRNA
ggaaaaagatccgtaaaccc

SEQ ID NO: 14305 - DNA, 20 bp, Artificial Sequence
  MKO10014305_A_Dlx2
  gRNA
actggtgccgtagggcgcgt

SEQ ID NO: 14306 - DNA, 20 bp, Artificial Sequence
  MKO10014306_A_Dlx2
  gRNA
gtcgttgaagggccgccagc

SEQ ID NO: 14307 - DNA, 20 bp, Artificial Sequence
  MKO10014307_A_Dlx2
  gRNA
aaaatcgtccccgcgctcac

SEQ ID NO: 14308 - DNA, 20 bp, Artificial Sequence
  MKO10014308_A_Dlx3
  gRNA
agtagatcgttcgcggcttt

SEQ ID NO: 14309 - DNA, 20 bp, Artificial Sequence
  MKO10014309_A_Dlx3
  gRNA
cccgtaggtatattccgact

SEQ ID NO: 14310 - DNA, 20 bp, Artificial Sequence
  MKO10014310_A_Dlx3
  gRNA
gccgttcaccatgcgaacct

SEQ ID NO: 14311 - DNA, 20 bp, Artificial Sequence
  MKO10014311_A_Dlx4
  gRNA
ttcccggggatagtccgagc

SEQ ID NO: 14312 - DNA, 20 bp, Artificial Sequence
  MKO10014312_A_Dlx4
  gRNA
accgggggtggccgtaggac

SEQ ID NO: 14313 - DNA, 20 bp, Artificial Sequence
  MKO10014313_A_Dlx4
  gRNA
tttccagcacacccaatacc

SEQ ID NO: 14314 - DNA, 20 bp, Artificial Sequence
  MKO10014314_A_Dlx5
  gRNA
aagtcgccggatcggatgct

SEQ ID NO: 14315 - DNA, 20 bp, Artificial Sequence
  MKO10014315_A_Dlx5
  gRNA
gttacacgccatagggtcgc

SEQ ID NO: 14316 - DNA, 20 bp, Artificial Sequence
  MKO10014316_A_Dlx5
  gRNA
cgccatgcaccacccgtctc

SEQ ID NO: 14317 - DNA, 20 bp, Artificial Sequence
  MKO10014317_A_Dlx6
  gRNA
gttgcctccgctcgacgcgt

SEQ ID NO: 14318 - DNA, 20 bp, Artificial Sequence
  MKO10014318_A_Dlx6
  gRNA
tcgccctacgcgtcgagcgg

SEQ ID NO: 14319 - DNA, 20 bp, Artificial Sequence
  MKO10014319_A_Dlx6
  gRNA
acacgagagtgaccccctcc

SEQ ID NO: 14320 - DNA, 20 bp, Artificial Sequence
  MKO10014320_A_Dmap1
  gRNA
atagcgccgtcctttcgagc

SEQ ID NO: 14321 - DNA, 20 bp, Artificial Sequence
  MKO10014321_A_Dmap1
  gRNA
gcttcgtagttattcacgat

SEQ ID NO: 14322 - DNA, 20 bp, Artificial Sequence
  MKO10014322_A_Dmap1
  gRNA
cctccgccgctcgtcgccag

SEQ ID NO: 14323 - DNA, 20 bp, Artificial Sequence
  MKO10014323_A_Dmbt1
  gRNA
ttaccgttatttgtccctcc

SEQ ID NO: 14324 - DNA, 20 bp, Artificial Sequence
  MKO10014324_A_Dmbt1
  gRNA
tattaaggctggtggaatcc

SEQ ID NO: 14325 - DNA, 20 bp, Artificial Sequence
  MKO10014325_A_Dmbt1
  gRNA
caaacagctgttcccacaga

SEQ ID NO: 14326 - DNA, 20 bp, Artificial Sequence
  MKO10014326_A_Dmbx1
  gRNA
tgcgactccgacgttgttta

SEQ ID NO: 14327 - DNA, 20 bp, Artificial Sequence
  MKO10014327_A_Dmbx1
  gRNA
cccagcacgcccccgactac

SEQ ID NO: 14328 - DNA, 20 bp, Artificial Sequence
  MKO10014328_A_Dmbx1
  gRNA
cccagcaccgtaaacaacgt

SEQ ID NO: 14329 - DNA, 20 bp, Artificial Sequence
  MKO10014329_A_Dmc1
  gRNA
caatcccatgcttctgcaac

SEQ ID NO: 14330 - DNA, 20 bp, Artificial Sequence
  MKO10014330_A_Dmc1
  gRNA
ttggcttacaataagcttgt

SEQ ID NO: 14331 - DNA, 20 bp, Artificial Sequence
  MKO10014331_A_Dmc1
  gRNA
atggcaattacagaagcttt

SEQ ID NO: 14332 - DNA, 20 bp, Artificial Sequence
  MKO10014332_A_Dmd
  gRNA
aaaacgcctcctagacctct

SEQ ID NO: 14333 - DNA, 20 bp, Artificial Sequence
  MKO10014333_A_Dmd
  gRNA
gtgccttgttgacattgttc

SEQ ID NO: 14334 - DNA, 20 bp, Artificial Sequence
  MKO10014334_A_Dmd
  gRNA
caggttgatttagtgaatat

SEQ ID NO: 14335 - DNA, 20 bp, Artificial Sequence
  MKO10014335_A_Dmgdh
  gRNA
ttaaattcgtccacccttac

SEQ ID NO: 14336 - DNA, 20 bp, Artificial Sequence
  MKO10014336_A_Dmgdh
  gRNA
tgatccttattctctgacga

SEQ ID NO: 14337 - DNA, 20 bp, Artificial Sequence
  MKO10014337_A_Dmgdh
  gRNA
gtagcaagcctgatactacc

SEQ ID NO: 14338 - DNA, 20 bp, Artificial Sequence
  MKO10014338_A_Dmkn
  gRNA
tagtattgccagttgtaagt

SEQ ID NO: 14339 - DNA, 20 bp, Artificial Sequence
  MKO10014339_A_Dmkn
  gRNA
attcaccttggcagtggtct

SEQ ID NO: 14340 - DNA, 20 bp, Artificial Sequence
  MKO10014340_A_Dmkn
  gRNA
gtactcaccgaggaagatga

SEQ ID NO: 14341 - DNA, 20 bp, Artificial Sequence
  MKO10014341_A_Dmp1
  gRNA
gttgtcacccctggactcgc

SEQ ID NO: 14342 - DNA, 20 bp, Artificial Sequence
  MKO10014342_A_Dmp1
  gRNA
aatgatctagggcccgaaga

SEQ ID NO: 14343 - DNA, 20 bp, Artificial Sequence
  MKO10014343_A_Dmp1
  gRNA
gtgatacttaccgtgggtgg

SEQ ID NO: 14344 - DNA, 20 bp, Artificial Sequence
  MKO10014344_A_Dmpk
  gRNA
cctcacaggtgtcgtgcttc

SEQ ID NO: 14345 - DNA, 20 bp, Artificial Sequence
  MKO10014345_A_Dmpk
  gRNA
ccaacatgtcagccgaagtg

SEQ ID NO: 14346 - DNA, 20 bp, Artificial Sequence
  MKO10014346_A_Dmpk
  gRNA
cgcccaggagaaggtcgagc

SEQ ID NO: 14347 - DNA, 20 bp, Artificial Sequence
  MKO10014347_A_Dmrt1
  gRNA
tagcagctacgccgtcaacc

SEQ ID NO: 14348 - DNA, 20 bp, Artificial Sequence
  MKO10014348_A_Dmrt1
  gRNA
gcccgtagtatgagtgcatc

SEQ ID NO: 14349 - DNA, 20 bp, Artificial Sequence
  MKO10014349_A_Dmrt1
  gRNA
tcttcacgggggatcccccg

SEQ ID NO: 14350 - DNA, 20 bp, Artificial Sequence
  MKO10014350_A_Dmrt2
  gRNA
atttgtcgctgagcgtctgc

SEQ ID NO: 14351 - DNA, 20 bp, Artificial Sequence
  MKO10014351_A_Dmrt2
  gRNA
cttattcctgcccaaccgta

SEQ ID NO: 14352 - DNA, 20 bp, Artificial Sequence
  MKO10014352_A_Dmrt2
  gRNA
gccgccgcaggaacccagtc

SEQ ID NO: 14353 - DNA, 20 bp, Artificial Sequence
  MKO10014353_A_Dmrt3
  gRNA
gtgcgctgcaagggcgcccg

SEQ ID NO: 14354 - DNA, 20 bp, Artificial Sequence
  MKO10014354_A_Dmrt3
  gRNA
acgattggacaaccgtcgtc

SEQ ID NO: 14355 - DNA, 20 bp, Artificial Sequence
  MKO10014355_A_Dmrt3
  gRNA
gagccccgagatcgtgtccg

SEQ ID NO: 14356 - DNA, 20 bp, Artificial Sequence
  MKO10014356_A_Dmrta1
  gRNA
ttgcggtcgatcgcagaaaa

SEQ ID NO: 14357 - DNA, 20 bp, Artificial Sequence
  MKO10014357_A_Dmrta1
  gRNA
ccgcgcggtcggtgtcgtcg

SEQ ID NO: 14358 - DNA, 20 bp, Artificial Sequence
  MKO10014358_A_Dmrta1
  gRNA
agaattccgagagggtctcg

SEQ ID NO: 14359 - DNA, 20 bp, Artificial Sequence
  MKO10014359_A_Dmrta2
  gRNA
cgcgagttgcaattgctgta

SEQ ID NO: 14360 - DNA, 20 bp, Artificial Sequence
  MKO10014360_A_Dmrta2
  gRNA
cgacctcatgcgcgaccgct

SEQ ID NO: 14361 - DNA, 20 bp, Artificial Sequence
  MKO10014361_A_Dmrta2
  gRNA
cggccgagcggtcgcgcatg

SEQ ID NO: 14362 - DNA, 20 bp, Artificial Sequence
  MKO10014362_A_Dmrtb1
  gRNA
ggcttaccgtagtcggcgaa

SEQ ID NO: 14363 - DNA, 20 bp, Artificial Sequence
  MKO10014363_A_Dmrtb1
  gRNA
acgcctcccggaaccgccct

SEQ ID NO: 14364 - DNA, 20 bp, Artificial Sequence
  MKO10014364_A_Dmrtb1
  gRNA
aacttaccaagccgcttcta

SEQ ID NO: 14365 - DNA, 20 bp, Artificial Sequence
  MKO10014365_A_Dmrtc1a
  gRNA
cctgggttgctgtgtcaacc

SEQ ID NO: 14366 - DNA, 20 bp, Artificial Sequence
  MKO10014366_A_Dmrtc1a
  gRNA
ccctatgctactgcaaccac

SEQ ID NO: 14367 - DNA, 20 bp, Artificial Sequence
  MKO10014367_A_Dmrtc1a
  gRNA
ccaggttgacacagcaaccc

SEQ ID NO: 14368 - DNA, 20 bp, Artificial Sequence
  MKO10014368_A_Dmrtc1b
  gRNA
tgcagtgagtgccccaaaaa

SEQ ID NO: 14369 - DNA, 20 bp, Artificial Sequence
  MKO10014369_A_Dmrtc1b
  gRNA
tctttatcactccttgatcc

SEQ ID NO: 14370 - DNA, 20 bp, Artificial Sequence
  MKO10014370_A_Dmrtc1b
  gRNA
tcctcttctactgcagccac

SEQ ID NO: 14371 - DNA, 20 bp, Artificial Sequence
  MKO10014371_A_Dmrtc1c1
  gRNA
tttccaacctgacttgggtc

SEQ ID NO: 14372 - DNA, 20 bp, Artificial Sequence
  MKO10014372_A_Dmrtc1c1
  gRNA
tgctctcagcctaagaacca

SEQ ID NO: 14373 - DNA, 20 bp, Artificial Sequence
  MKO10014373_A_Dmrtc1c1
  gRNA
ctcacggcgacctcttcctt

SEQ ID NO: 14374 - DNA, 20 bp, Artificial Sequence
  MKO10014374_A_Dmrtc1c2
  gRNA
tgctctcagcctaagaacca

SEQ ID NO: 14375 - DNA, 20 bp, Artificial Sequence
  MKO10014375_A_Dmrtc1c2
  gRNA
tttccaacctgacttgggtc

SEQ ID NO: 14376 - DNA, 20 bp, Artificial Sequence
  MKO10014376_A_Dmrtc1c2
  gRNA
ctattgaagggaccacggcg

SEQ ID NO: 14377 - DNA, 20 bp, Artificial Sequence
  MKO10014377_A_Dmrtc2
  gRNA
gtcagtactgagcgagatcc

SEQ ID NO: 14378 - DNA, 20 bp, Artificial Sequence
  MKO10014378_A_Dmrtc2
  gRNA
cctctcttagggaacgtcgg

SEQ ID NO: 14379 - DNA, 20 bp, Artificial Sequence
  MKO10014379_A_Dmrtc2
  gRNA
tacccttgcaggagaactat

SEQ ID NO: 14380 - DNA, 20 bp, Artificial Sequence
  MKO10014380_A_Dmtf1
  gRNA
tacgccatgcatatcagtcg

SEQ ID NO: 14381 - DNA, 20 bp, Artificial Sequence
  MKO10014381_A_Dmtf1
  gRNA
ctttagttgtaaaccacgct

SEQ ID NO: 14382 - DNA, 20 bp, Artificial Sequence
  MKO10014382_A_Dmtf1
  gRNA
gaactctgtgacgtttactc

SEQ ID NO: 14383 - DNA, 20 bp, Artificial Sequence
  MKO10014383_A_Dmtn
  gRNA
agtactcaccacgatgctgg

SEQ ID NO: 14384 - DNA, 20 bp, Artificial Sequence
  MKO10014384_A_Dmtn
  gRNA
aggtcgctcaatgtccagga

SEQ ID NO: 14385 - DNA, 20 bp, Artificial Sequence
  MKO10014385_A_Dmtn
  gRNA
ggagctgacgctccccgggg

SEQ ID NO: 14386 - DNA, 20 bp, Artificial Sequence
  MKO10014386_A_Dmwd
  gRNA
tccctacaccactcgcgcag

SEQ ID NO: 14387 - DNA, 20 bp, Artificial Sequence
  MKO10014387_A_Dmwd
  gRNA
cttgtagatccgcttgtcga

SEQ ID NO: 14388 - DNA, 20 bp, Artificial Sequence
  MKO10014388_A_Dmwd
  gRNA
ggctccatcacgtaccgctt

SEQ ID NO: 14389 - DNA, 20 bp, Artificial Sequence
  MKO10014389_A_Dmxl1
  gRNA
cagtcagtttgccgaaaaaa

SEQ ID NO: 14390 - DNA, 20 bp, Artificial Sequence
  MKO10014390_A_Dmxl1
  gRNA
ttccttacctgcgggatccc

SEQ ID NO: 14391 - DNA, 20 bp, Artificial Sequence
  MKO10014391_A_Dmxl1
  gRNA
gtagactgttcaatgcaaca

SEQ ID NO: 14392 - DNA, 20 bp, Artificial Sequence
  MKO10014392_A_Dmxl2
  gRNA
tcttctagaatatcaccgcc

SEQ ID NO: 14393 - DNA, 20 bp, Artificial Sequence
  MKO10014393_A_Dmxl2
  gRNA
ggtcacttactctcccatgc

SEQ ID NO: 14394 - DNA, 20 bp, Artificial Sequence
  MKO10014394_A_Dmxl2
  gRNA
ccgtgacatacaacttagca

SEQ ID NO: 14395 - DNA, 20 bp, Artificial Sequence
  MKO10014395_A_Dna2
  gRNA
tcgatttagacttcggaaga

SEQ ID NO: 14396 - DNA, 20 bp, Artificial Sequence
  MKO10014396_A_Dna2
  gRNA
gaattgtaccgatcagcatc

SEQ ID NO: 14397 - DNA, 20 bp, Artificial Sequence
  MKO10014397_A_Dna2
  gRNA
caagcgtcgctagcagcatt

SEQ ID NO: 14398 - DNA, 20 bp, Artificial Sequence
  MKO10014398_A_Dnaaf1
  gRNA
tctgacccgttgtcgccact

SEQ ID NO: 14399 - DNA, 20 bp, Artificial Sequence
  MKO10014399_A_Dnaaf1
  gRNA
gttgcacaagatcgagaacc

SEQ ID NO: 14400 - DNA, 20 bp, Artificial Sequence
  MKO10014400_A_Dnaaf1
  gRNA
agaggcagcgcagttcgctc

SEQ ID NO: 14401 - DNA, 20 bp, Artificial Sequence
  MKO10014401_A_Dnaaf2
  gRNA
ttaccgctgctcgcgcgacg

SEQ ID NO: 14402 - DNA, 20 bp, Artificial Sequence
  MKO10014402_A_Dnaaf2
  gRNA
cgcgacaccggaagagcccg

SEQ ID NO: 14403 - DNA, 20 bp, Artificial Sequence
  MKO10014403_A_Dnaaf2
  gRNA
tctggccccaccgctgattg

SEQ ID NO: 14404 - DNA, 20 bp, Artificial Sequence
  MKO10014404_A_Dnaaf3
  gRNA
tcccgctacgatgcccggcg

SEQ ID NO: 14405 - DNA, 20 bp, Artificial Sequence
  MKO10014405_A_Dnaaf3
  gRNA
cgagtcccaaaggcgactca

SEQ ID NO: 14406 - DNA, 20 bp, Artificial Sequence
  MKO10014406_A_Dnaaf3
  gRNA
gaacgcgctgctgcgaccct

SEQ ID NO: 14407 - DNA, 20 bp, Artificial Sequence
  MKO10014407_A_Dnah10
  gRNA
cctggcagatgacgtccttt

SEQ ID NO: 14408 - DNA, 20 bp, Artificial Sequence
  MKO10014408_A_Dnah10
  gRNA
cctaaaggacgtcatctgcc

SEQ ID NO: 14409 - DNA, 20 bp, Artificial Sequence
  MKO10014409_A_Dnah10
  gRNA
gaccccctctctatttgata

SEQ ID NO: 14410 - DNA, 20 bp, Artificial Sequence
  MKO10014410_A_Dnah11
  gRNA
ataagaacaaccatacgtcc

SEQ ID NO: 14411 - DNA, 20 bp, Artificial Sequence
  MKO10014411_A_Dnah11
  gRNA
atcagcattacttggtgacc

SEQ ID NO: 14412 - DNA, 20 bp, Artificial Sequence
  MKO10014412_A_Dnah11
  gRNA
tcagtatcttaaccatcttg

SEQ ID NO: 14413 - DNA, 20 bp, Artificial Sequence
  MKO10014413_A_Dnah17
  gRNA
atgggaccagtcgatgatga

SEQ ID NO: 14414 - DNA, 20 bp, Artificial Sequence
  MKO10014414_A_Dnah17
  gRNA
tcgagaccatcatcatcgac

SEQ ID NO: 14415 - DNA, 20 bp, Artificial Sequence
  MKO10014415_A_Dnah17
  gRNA
tggagtccagcgtgccgtcc

SEQ ID NO: 14416 - DNA, 20 bp, Artificial Sequence
  MKO10014416_A_Dnah1
  gRNA
tggatcacggccctgttcga

SEQ ID NO: 14417 - DNA, 20 bp, Artificial Sequence
  MKO10014417_A_Dnah1
  gRNA
gttagagtcgatgccctcgc

SEQ ID NO: 14418 - DNA, 20 bp, Artificial Sequence
  MKO10014418_A_Dnah1
  gRNA
tcttcccacagacgacgatc

SEQ ID NO: 14419 - DNA, 20 bp, Artificial Sequence
  MKO10014419_A_Dnah2
  gRNA
gtcgtgctcccccgtccacg

SEQ ID NO: 14420 - DNA, 20 bp, Artificial Sequence
  MKO10014420_A_Dnah2
  gRNA
cggtcaacatcgttcgtgag

SEQ ID NO: 14421 - DNA, 20 bp, Artificial Sequence
  MKO10014421_A_Dnah2
  gRNA
cttagatactcgctacaagc

SEQ ID NO: 14422 - DNA, 20 bp, Artificial Sequence
  MKO10014422_A_Dnah5
  gRNA
gacgcctcacgctgttcaac

SEQ ID NO: 14423 - DNA, 20 bp, Artificial Sequence
  MKO10014423_A_Dnah5
  gRNA
ggggcctgttgaacagcgtg

SEQ ID NO: 14424 - DNA, 20 bp, Artificial Sequence
  MKO10014424_A_Dnah5
  gRNA
tttacccggtggatgttctc

SEQ ID NO: 14425 - DNA, 20 bp, Artificial Sequence
  MKO10014425_A_Dnah6
  gRNA
agtacatcgagattgagcga

SEQ ID NO: 14426 - DNA, 20 bp, Artificial Sequence
  MKO10014426_A_Dnah6
  gRNA
aaactgccccgcacaagtat

SEQ ID NO: 14427 - DNA, 20 bp, Artificial Sequence
  MKO10014427_A_Dnah6
  gRNA
tgcacaaatagtgcgactgc

SEQ ID NO: 14428 - DNA, 20 bp, Artificial Sequence
  MKO10014428_A_Dnah7a
  gRNA
agtcttaccacagttatctt

SEQ ID NO: 14429 - DNA, 20 bp, Artificial Sequence
  MKO10014429_A_Dnah7a
  gRNA
atggcgcagtctgctgccac

SEQ ID NO: 14430 - DNA, 20 bp, Artificial Sequence
  MKO10014430_A_Dnah7a
  gRNA
accatcaacttcaagatcaa

SEQ ID NO: 14431 - DNA, 20 bp, Artificial Sequence
  MKO10014431_A_Dnah7b
  gRNA
gactcccgcagcaacgatcc

SEQ ID NO: 14432 - DNA, 20 bp, Artificial Sequence
  MKO10014432_A_Dnah7b
  gRNA
taaactatcgagcagagaaa

SEQ ID NO: 14433 - DNA, 20 bp, Artificial Sequence
  MKO10014433_A_Dnah7b
  gRNA
caggataagctatctactaa

SEQ ID NO: 14434 - DNA, 20 bp, Artificial Sequence
  MKO10014434_A_Dnah8
  gRNA
agaatgtggtcgaacgatta

SEQ ID NO: 14435 - DNA, 20 bp, Artificial Sequence
  MKO10014435_A_Dnah8
  gRNA
tggcaacatcattacgacaa

SEQ ID NO: 14436 - DNA, 20 bp, Artificial Sequence
  MKO10014436_A_Dnah8
  gRNA
aaccgggcacttctccttcc

SEQ ID NO: 14437 - DNA, 20 bp, Artificial Sequence
  MKO10014437_A_Dnah9
  gRNA
attccttccagccctgaccg

SEQ ID NO: 14438 - DNA, 20 bp, Artificial Sequence
  MKO10014438_A_Dnah9
  gRNA
gtacttacactggctcactg

SEQ ID NO: 14439 - DNA, 20 bp, Artificial Sequence
  MKO10014439_A_Dnah9
  gRNA
caagtcaactctctatgctg

SEQ ID NO: 14440 - DNA, 20 bp, Artificial Sequence
  MKO10014440_A_Dnaic1
  gRNA
ggctgaagtgaaccgccatt

SEQ ID NO: 14441 - DNA, 20 bp, Artificial Sequence
  MKO10014441_A_Dnaic1
  gRNA
ccgcatcggtcagctccagc

SEQ ID NO: 14442 - DNA, 20 bp, Artificial Sequence
  MKO10014442_A_Dnaic1
  gRNA
tagagcatcagtgtaaccag

SEQ ID NO: 14443 - DNA, 20 bp, Artificial Sequence
  MKO10014443_A_Dnaic2
  gRNA
tcatgctcatgggtgcgcgc

SEQ ID NO: 14444 - DNA, 20 bp, Artificial Sequence
  MKO10014444_A_Dnaic2
  gRNA
tgaactacgactcctacatc

SEQ ID NO: 14445 - DNA, 20 bp, Artificial Sequence
  MKO10014445_A_Dnaic2
  gRNA
catcaacgccgtcatgcagc

SEQ ID NO: 14446 - DNA, 20 bp, Artificial Sequence
  MKO10014446_A_Dnaja1
  gRNA
ctgtgtttaggcatgaaaga

SEQ ID NO: 14447 - DNA, 20 bp, Artificial Sequence
  MKO10014447_A_Dnaja1
  gRNA
ctaggccgaggtggtaagaa

SEQ ID NO: 14448 - DNA, 20 bp, Artificial Sequence
  MKO10014448_A_Dnaja1
  gRNA
tttaccttgtaaaaacagca

SEQ ID NO: 14449 - DNA, 20 bp, Artificial Sequence
  MKO10014449_A_Dnaja2
  gRNA
gcgcattatgatcagacagc

SEQ ID NO: 14450 - DNA, 20 bp, Artificial Sequence
  MKO10014450_A_Dnaja2
  gRNA
tccgtgtgctccgactgtaa

SEQ ID NO: 14451 - DNA, 20 bp, Artificial Sequence
  MKO10014451_A_Dnaja2
  gRNA
cgagagctgtatgacagata

SEQ ID NO: 14452 - DNA, 20 bp, Artificial Sequence
  MKO10014452_A_Dnaja3
  gRNA
atgttgccactacgcccccc

SEQ ID NO: 14453 - DNA, 20 bp, Artificial Sequence
  MKO10014453_A_Dnaja3
  gRNA
agacgcacagcttgcgacac

SEQ ID NO: 14454 - DNA, 20 bp, Artificial Sequence
  MKO10014454_A_Dnaja3
  gRNA
tggcatttcggggcactccc

SEQ ID NO: 14455 - DNA, 20 bp, Artificial Sequence
  MKO10014455_A_Dnaja4
  gRNA
ccatgcccggcccaatctgc

SEQ ID NO: 14456 - DNA, 20 bp, Artificial Sequence
  MKO10014456_A_Dnaja4
  gRNA
gggcgagcgcatcaacccca

SEQ ID NO: 14457 - DNA, 20 bp, Artificial Sequence
  MKO10014457_A_Dnaja4
  gRNA
agcacaattatcacatcgcc

SEQ ID NO: 14458 - DNA, 20 bp, Artificial Sequence
  MKO10014458_A_Dnajb11
  gRNA
atattcctgtcctgctgacg

SEQ ID NO: 14459 - DNA, 20 bp, Artificial Sequence
  MKO10014459_A_Dnajb11
  gRNA
cgaaaacagtacgatactta

SEQ ID NO: 14460 - DNA, 20 bp, Artificial Sequence
  MKO10014460_A_Dnajb11
  gRNA
gcctcgaagtgcctccataa

SEQ ID NO: 14461 - DNA, 20 bp, Artificial Sequence
  MKO10014461_A_Dnajb12
  gRNA
gctggtaggtgtaccgcatt

SEQ ID NO: 14462 - DNA, 20 bp, Artificial Sequence
  MKO10014462_A_Dnajb12
  gRNA
aaagaaggcctaccgcaagc

SEQ ID NO: 14463 - DNA, 20 bp, Artificial Sequence
  MKO10014463_A_Dnajb12
  gRNA
tacggcatacgctgtgccaa

SEQ ID NO: 14464 - DNA, 20 bp, Artificial Sequence
  MKO10014464_A_Dnajb13
  gRNA
cagatagaggtctcgttcaa

SEQ ID NO: 14465 - DNA, 20 bp, Artificial Sequence
  MKO10014465_A_Dnajb13
  gRNA
tgtctcccccaaaaaactcg

SEQ ID NO: 14466 - DNA, 20 bp, Artificial Sequence
  MKO10014466_A_Dnajb13
  gRNA
acggtcgctcagcacgtcgt

SEQ ID NO: 14467 - DNA, 20 bp, Artificial Sequence
  MKO10014467_A_Dnajb14
  gRNA
gcaatgcgtgctacttccag

SEQ ID NO: 14468 - DNA, 20 bp, Artificial Sequence
  MKO10014468_A_Dnajb14
  gRNA
aaggacggcacttctggtgc

SEQ ID NO: 14469 - DNA, 20 bp, Artificial Sequence
  MKO10014469_A_Dnajb14
  gRNA
aattgaacctgccgttgttc

SEQ ID NO: 14470 - DNA, 20 bp, Artificial Sequence
  MKO10014470_A_Dnajb1
  gRNA
tcgaaaatctcgcgcttgcg

SEQ ID NO: 14471 - DNA, 20 bp, Artificial Sequence
  MKO10014471_A_Dnajb1
  gRNA
tctcgtcgtcggacgcgccg

SEQ ID NO: 14472 - DNA, 20 bp, Artificial Sequence
  MKO10014472_A_Dnajb1
  gRNA
tacctcccgaaggctaatcc

SEQ ID NO: 14473 - DNA, 20 bp, Artificial Sequence
  MKO10014473_A_Dnajb2
  gRNA
acgagattctagacgtaccg

SEQ ID NO: 14474 - DNA, 20 bp, Artificial Sequence
  MKO10014474_A_Dnajb2
  gRNA
tacgtctagaatctcgtagt

SEQ ID NO: 14475 - DNA, 20 bp, Artificial Sequence
  MKO10014475_A_Dnajb2
  gRNA
attcaccttccgtagccccg

SEQ ID NO: 14476 - DNA, 20 bp, Artificial Sequence
  MKO10014476_A_Dnajb3
  gRNA
gacgtccgataagacctcgt

SEQ ID NO: 14477 - DNA, 20 bp, Artificial Sequence
  MKO10014477_A_Dnajb3
  gRNA
cgcgaggtgtacgaccgctg

SEQ ID NO: 14478 - DNA, 20 bp, Artificial Sequence
  MKO10014478_A_Dnajb3
  gRNA
cctcgcccacttcgccgcag

SEQ ID NO: 14479 - DNA, 20 bp, Artificial Sequence
  MKO10014479_A_Dnajb4
  gRNA
tcgagaaatcttcatccgtt

SEQ ID NO: 14480 - DNA, 20 bp, Artificial Sequence
  MKO10014480_A_Dnajb4
  gRNA
gtcactgatattgtgaaacc

SEQ ID NO: 14481 - DNA, 20 bp, Artificial Sequence
  MKO10014481_A_Dnajb4
  gRNA
agggtcttgtttgagacggg

SEQ ID NO: 14482 - DNA, 20 bp, Artificial Sequence
  MKO10014482_A_Dnajb5
  gRNA
ggggtcctgtaccttgcgcc

SEQ ID NO: 14483 - DNA, 20 bp, Artificial Sequence
  MKO10014483_A_Dnajb5
  gRNA
gaacaaagagcccaacgccg

SEQ ID NO: 14484 - DNA, 20 bp, Artificial Sequence
  MKO10014484_A_Dnajb5
  gRNA
catgcacacttccgccgaga

SEQ ID NO: 14485 - DNA, 20 bp, Artificial Sequence
  MKO10014485_A_Dnajb6
  gRNA
tctttcaaggtatcgaaaac

SEQ ID NO: 14486 - DNA, 20 bp, Artificial Sequence
  MKO10014486_A_Dnajb6
  gRNA
cacatttaaagctaaaaagc

SEQ ID NO: 14487 - DNA, 20 bp, Artificial Sequence
  MKO10014487_A_Dnajb6
  gRNA
ccaaagaagtcaaatgaaaa

SEQ ID NO: 14488 - DNA, 20 bp, Artificial Sequence
  MKO10014488_A_Dnajb7
  gRNA
actcacgctcatcgtcgaga

SEQ ID NO: 14489 - DNA, 20 bp, Artificial Sequence
  MKO10014489_A_Dnajb7
  gRNA
gtgagtaccgcttcacattc

SEQ ID NO: 14490 - DNA, 20 bp, Artificial Sequence
  MKO10014490_A_Dnajb7
  gRNA
aaaattcaaagaagtcgccg

SEQ ID NO: 14491 - DNA, 20 bp, Artificial Sequence
  MKO10014491_A_Dnajb8
  gRNA
agaagcgttctgtgtacgac

SEQ ID NO: 14492 - DNA, 20 bp, Artificial Sequence
  MKO10014492_A_Dnajb8
  gRNA
acgcaaagccagctttcgat

SEQ ID NO: 14493 - DNA, 20 bp, Artificial Sequence
  MKO10014493_A_Dnajb8
  gRNA
gacactccgttcagcggccg

SEQ ID NO: 14494 - DNA, 20 bp, Artificial Sequence
  MKO10014494_A_Dnajb9
  gRNA
agtctgtactgtgtgtcgat

SEQ ID NO: 14495 - DNA, 20 bp, Artificial Sequence
  MKO10014495_A_Dnajb9
  gRNA
gtcatactctttccgactat

SEQ ID NO: 14496 - DNA, 20 bp, Artificial Sequence
  MKO10014496_A_Dnajb9
  gRNA
taagatatcatagtagcttt

SEQ ID NO: 14497 - DNA, 20 bp, Artificial Sequence
  MKO10014497_A_Dnajc10
  gRNA
agctactaccgttacgattt

SEQ ID NO: 14498 - DNA, 20 bp, Artificial Sequence
  MKO10014498_A_Dnajc10
  gRNA
cgaatcggagctgtcaactg

SEQ ID NO: 14499 - DNA, 20 bp, Artificial Sequence
  MKO10014499_A_Dnajc10
  gRNA
gtacagtgggggctaaatca

SEQ ID NO: 14500 - DNA, 20 bp, Artificial Sequence
  MKO10014500_A_Dnajc11
  gRNA
ggttaaacagccgctccgcc

SEQ ID NO: 14501 - DNA, 20 bp, Artificial Sequence
  MKO10014501_A_Dnajc11
  gRNA
cgcatctactccaacgctga

SEQ ID NO: 14502 - DNA, 20 bp, Artificial Sequence
  MKO10014502_A_Dnajc11
  gRNA
ccccagggaaccatcagcgt

SEQ ID NO: 14503 - DNA, 20 bp, Artificial Sequence
  MKO10014503_A_Dnajc12
  gRNA
gtcgagcccgctatgaccat

SEQ ID NO: 14504 - DNA, 20 bp, Artificial Sequence
  MKO10014504_A_Dnajc12
  gRNA
tgtcaatgccgttcgagcag

SEQ ID NO: 14505 - DNA, 20 bp, Artificial Sequence
  MKO10014505_A_Dnajc12
  gRNA
catagtttctgaacttccgc

SEQ ID NO: 14506 - DNA, 20 bp, Artificial Sequence
  MKO10014506_A_Dnajc13
  gRNA
cgtagatctctctgattatc

SEQ ID NO: 14507 - DNA, 20 bp, Artificial Sequence
  MKO10014507_A_Dnajc13
  gRNA
ataactgctacaagcatcac

SEQ ID NO: 14508 - DNA, 20 bp, Artificial Sequence
  MKO10014508_A_Dnajc13
  gRNA
cactgcctttacgaaatgtg

SEQ ID NO: 14509 - DNA, 20 bp, Artificial Sequence
  MKO10014509_A_Dnajc14
  gRNA
gatcacttactttgcgctga

SEQ ID NO: 14510 - DNA, 20 bp, Artificial Sequence
  MKO10014510_A_Dnajc14
  gRNA
gcgcaaagtaagtgatcttg

SEQ ID NO: 14511 - DNA, 20 bp, Artificial Sequence
  MKO10014511_A_Dnajc14
  gRNA
tctcgggtacccggcaccag

SEQ ID NO: 14512 - DNA, 20 bp, Artificial Sequence
  MKO10014512_A_Dnajc15
  gRNA
gccgtgattacttgttctag

SEQ ID NO: 14513 - DNA, 20 bp, Artificial Sequence
  MKO10014513_A_Dnajc15
  gRNA
ctcgaatcctcctttatagt

SEQ ID NO: 14514 - DNA, 20 bp, Artificial Sequence
  MKO10014514_A_Dnajc15
  gRNA
gtcgctatgcatttcagatc

SEQ ID NO: 14515 - DNA, 20 bp, Artificial Sequence
  MKO10014515_A_Dnajc16
  gRNA
gactctccacgaactgccgt

SEQ ID NO: 14516 - DNA, 20 bp, Artificial Sequence
  MKO10014516_A_Dnajc16
  gRNA
tcatcaagatcacgtcagac

SEQ ID NO: 14517 - DNA, 20 bp, Artificial Sequence
  MKO10014517_A_Dnajc16
  gRNA
gcatccatatcgagcctgtc

SEQ ID NO: 14518 - DNA, 20 bp, Artificial Sequence
  MKO10014518_A_Dnajc17
  gRNA
cccagagacttgacgagaac

SEQ ID NO: 14519 - DNA, 20 bp, Artificial Sequence
  MKO10014519_A_Dnajc17
  gRNA
tctaggtgaagaaggcgtac

SEQ ID NO: 14520 - DNA, 20 bp, Artificial Sequence
  MKO10014520_A_Dnajc17
  gRNA
tggtcaggctgcatatgaca

SEQ ID NO: 14521 - DNA, 20 bp, Artificial Sequence
  MKO10014521_A_Dnajc18
  gRNA
acgacagtcagtattatcgc

SEQ ID NO: 14522 - DNA, 20 bp, Artificial Sequence
  MKO10014522_A_Dnajc18
  gRNA
cccgacaagaactgcgctcc

SEQ ID NO: 14523 - DNA, 20 bp, Artificial Sequence
  MKO10014523_A_Dnajc18
  gRNA
atgcagttacagcagccgca

SEQ ID NO: 14524 - DNA, 20 bp, Artificial Sequence
  MKO10014524_A_Dnajc19
  gRNA
ttctttcaggcattcggtgg

SEQ ID NO: 14525 - DNA, 20 bp, Artificial Sequence
  MKO10014525_A_Dnajc19
  gRNA
cagcattaatattaggtgta

SEQ ID NO: 14526 - DNA, 20 bp, Artificial Sequence
  MKO10014526_A_Dnajc19
  gRNA
cccgactgctaccactgtgc

SEQ ID NO: 14527 - DNA, 20 bp, Artificial Sequence
  MKO10014527_A_Dnajc1
  gRNA
agtgtggacgcagcaaaact

SEQ ID NO: 14528 - DNA, 20 bp, Artificial Sequence
  MKO10014528_A_Dnajc1
  gRNA
gacagcctgtattctactac

SEQ ID NO: 14529 - DNA, 20 bp, Artificial Sequence
  MKO10014529_A_Dnajc1
  gRNA
actcgcctgtagtagaatac

SEQ ID NO: 14530 - DNA, 20 bp, Artificial Sequence
  MKO10014530_A_Dnajc21
  gRNA
cttatctcgtttacgaatga

SEQ ID NO: 14531 - DNA, 20 bp, Artificial Sequence
  MKO10014531_A_Dnajc21
  gRNA
taggtacgataaccaccgag

SEQ ID NO: 14532 - DNA, 20 bp, Artificial Sequence
  MKO10014532_A_Dnajc21
  gRNA
tcaccgtgtcatagtcgctc

SEQ ID NO: 14533 - DNA, 20 bp, Artificial Sequence
  MKO10014533_A_Dnajc22
  gRNA
ctatatagtgggcctcccac

SEQ ID NO: 14534 - DNA, 20 bp, Artificial Sequence
  MKO10014534_A_Dnajc22
  gRNA
atctggtggctactggtcgg

SEQ ID NO: 14535 - DNA, 20 bp, Artificial Sequence
  MKO10014535_A_Dnajc22
  gRNA
accgggacctggtgaaagtc

SEQ ID NO: 14536 - DNA, 20 bp, Artificial Sequence
  MKO10014536_A_Dnajc24
  gRNA
agtacctaccatgccgctgc

SEQ ID NO: 14537 - DNA, 20 bp, Artificial Sequence
  MKO10014537_A_Dnajc24
  gRNA
aatcagcgagcacgcgtcac

SEQ ID NO: 14538 - DNA, 20 bp, Artificial Sequence
  MKO10014538_A_Dnajc24
  gRNA
tgacgcgtgctcgctgattg

SEQ ID NO: 14539 - DNA, 20 bp, Artificial Sequence
  MKO10014539_A_Dnajc25
  gRNA
ggctcgggccggtagcgatc

SEQ ID NO: 14540 - DNA, 20 bp, Artificial Sequence
  MKO10014540_A_Dnajc25
  gRNA
ccgcgcgatctccgccttgc

SEQ ID NO: 14541 - DNA, 20 bp, Artificial Sequence
  MKO10014541_A_Dnajc25
  gRNA
ctcggtggaagcgctaccgc

SEQ ID NO: 14542 - DNA, 20 bp, Artificial Sequence
  MKO10014542_A_Dnajc27
  gRNA
gtgatactagtctatgatgt

SEQ ID NO: 14543 - DNA, 20 bp, Artificial Sequence
  MKO10014543_A_Dnajc27
  gRNA
tctctgccagccacgaatca

SEQ ID NO: 14544 - DNA, 20 bp, Artificial Sequence
  MKO10014544_A_Dnajc27
  gRNA
gggaatcaacgagatgttcc

SEQ ID NO: 14545 - DNA, 20 bp, Artificial Sequence
  MKO10014545_A_Dnajc28
  gRNA
gttcagggcggatcgcgcga

SEQ ID NO: 14546 - DNA, 20 bp, Artificial Sequence
  MKO10014546_A_Dnajc28
  gRNA
gatgctctgtagacgacgtc

SEQ ID NO: 14547 - DNA, 20 bp, Artificial Sequence
  MKO10014547_A_Dnajc28
  gRNA
aaaacgcaccttacattcaa

SEQ ID NO: 14548 - DNA, 20 bp, Artificial Sequence
  MKO10014548_A_Dnajc2
  gRNA
ccagccgctttccgtttgtc

SEQ ID NO: 14549 - DNA, 20 bp, Artificial Sequence
  MKO10014549_A_Dnajc2
  gRNA
agtctgtcaagttgaacctg

SEQ ID NO: 14550 - DNA, 20 bp, Artificial Sequence
  MKO10014550_A_Dnajc2
  gRNA
tacttcacttgcataactaa

SEQ ID NO: 14551 - DNA, 20 bp, Artificial Sequence
  MKO10014551_A_Dnajc30
  gRNA
caagccctctaagacgcccg

SEQ ID NO: 14552 - DNA, 20 bp, Artificial Sequence
  MKO10014552_A_Dnajc30
  gRNA
ggtggaccctgtcaccgcta

SEQ ID NO: 14553 - DNA, 20 bp, Artificial Sequence
  MKO10014553_A_Dnajc30
  gRNA
gtctcgtgtatcgtcccagc

SEQ ID NO: 14554 - DNA, 20 bp, Artificial Sequence
  MKO10014554_A_Dnajc3
  gRNA
cgtcaaaggcgtcgagcgct

SEQ ID NO: 14555 - DNA, 20 bp, Artificial Sequence
  MKO10014555_A_Dnajc3
  gRNA
caagcgctcgacgcctttga

SEQ ID NO: 14556 - DNA, 20 bp, Artificial Sequence
  MKO10014556_A_Dnajc3
  gRNA
tgcagcgtgaaactgtgata

SEQ ID NO: 14557 - DNA, 20 bp, Artificial Sequence
  MKO10014557_A_Dnajc4
  gRNA
aaccccccaacgctcaatac

SEQ ID NO: 14558 - DNA, 20 bp, Artificial Sequence
  MKO10014558_A_Dnajc4
  gRNA
gcccagtattgagcgttggg

SEQ ID NO: 14559 - DNA, 20 bp, Artificial Sequence
  MKO10014559_A_Dnajc4
  gRNA
ggcccgagtgtcattgtaga

SEQ ID NO: 14560 - DNA, 20 bp, Artificial Sequence
  MKO10014560_A_Dnajc5b
  gRNA
caaatcatcgacaccagaag

SEQ ID NO: 14561 - DNA, 20 bp, Artificial Sequence
  MKO10014561_A_Dnajc5b
  gRNA
aaaaatagcagccggtcaag

SEQ ID NO: 14562 - DNA, 20 bp, Artificial Sequence
  MKO10014562_A_Dnajc5b
  gRNA
ttgacaaagtccgctgtctt

SEQ ID NO: 14563 - DNA, 20 bp, Artificial Sequence
  MKO10014563_A_Dnajc5g
  gRNA
tcccagttctagatagtcgc

SEQ ID NO: 14564 - DNA, 20 bp, Artificial Sequence
  MKO10014564_A_Dnajc5g
  gRNA
ataatcctagtgagccgtgc

SEQ ID NO: 14565 - DNA, 20 bp, Artificial Sequence
  MKO10014565_A_Dnajc5g
  gRNA
tagacttaatccatcagccg

SEQ ID NO: 14566 - DNA, 20 bp, Artificial Sequence
  MKO10014566_A_Dnajc5
  gRNA
aacctaacatggccgaccag

SEQ ID NO: 14567 - DNA, 20 bp, Artificial Sequence
  MKO10014567_A_Dnajc5
  gRNA
cctacttcgtactctccagc

SEQ ID NO: 14568 - DNA, 20 bp, Artificial Sequence
  MKO10014568_A_Dnajc5
  gRNA
ctacgtatcccctgaagact

SEQ ID NO: 14569 - DNA, 20 bp, Artificial Sequence
  MKO10014569_A_Dnajc6
  gRNA
gagaaccttaccgataatcc

SEQ ID NO: 14570 - DNA, 20 bp, Artificial Sequence
  MKO10014570_A_Dnajc6
  gRNA
cgcctttcaccatgtcaaaa

SEQ ID NO: 14571 - DNA, 20 bp, Artificial Sequence
  MKO10014571_A_Dnajc6
  gRNA
aggtgacgtaagtaaagtct

SEQ ID NO: 14572 - DNA, 20 bp, Artificial Sequence
  MKO10014572_A_Dnajc7
  gRNA
cgctcgattaccgtaatagc

SEQ ID NO: 14573 - DNA, 20 bp, Artificial Sequence
  MKO10014573_A_Dnajc7
  gRNA
ttctagggacacctccgaga

SEQ ID NO: 14574 - DNA, 20 bp, Artificial Sequence
  MKO10014574_A_Dnajc7
  gRNA
caagaacgccaatgccgtca

SEQ ID NO: 14575 - DNA, 20 bp, Artificial Sequence
  MKO10014575_A_Dnajc8
  gRNA
ttccctgcagttgtccatcc

SEQ ID NO: 14576 - DNA, 20 bp, Artificial Sequence
  MKO10014576_A_Dnajc8
  gRNA
tttgtcaggatgcaccagga

SEQ ID NO: 14577 - DNA, 20 bp, Artificial Sequence
  MKO10014577_A_Dnajc8
  gRNA
attgaaagattgactcgtcc

SEQ ID NO: 14578 - DNA, 20 bp, Artificial Sequence
  MKO10014578_A_Dnajc9
  gRNA
ttgttattagatatcgctag

SEQ ID NO: 14579 - DNA, 20 bp, Artificial Sequence
  MKO10014579_A_Dnajc9
  gRNA
ttgtttagactctttgacga

SEQ ID NO: 14580 - DNA, 20 bp, Artificial Sequence
  MKO10014580_A_Dnajc9
  gRNA
cctcaaccaagaccgggact

SEQ ID NO: 14581 - DNA, 20 bp, Artificial Sequence
  MKO10014581_A_Dnal1
  gRNA
cataacctaccagtccattt

SEQ ID NO: 14582 - DNA, 20 bp, Artificial Sequence
  MKO10014582_A_Dnal1
  gRNA
ttactcgcagttaccaagtg

SEQ ID NO: 14583 - DNA, 20 bp, Artificial Sequence
  MKO10014583_A_Dnal1
  gRNA
gtctactcacccatctggac

SEQ ID NO: 14584 - DNA, 20 bp, Artificial Sequence
  MKO10014584_A_Dnal4
  gRNA
ctcgccgatcaccacatgcc

SEQ ID NO: 14585 - DNA, 20 bp, Artificial Sequence
  MKO10014585_A_Dnal4
  gRNA
acaagaagttcggctcctcc

SEQ ID NO: 14586 - DNA, 20 bp, Artificial Sequence
  MKO10014586_A_Dnal4
  gRNA
tgccaatacctcattgttgt

SEQ ID NO: 14587 - DNA, 20 bp, Artificial Sequence
  MKO10014587_A_Dnali1
  gRNA
tggtcatgtggatctcgtcc

SEQ ID NO: 14588 - DNA, 20 bp, Artificial Sequence
  MKO10014588_A_Dnali1
  gRNA
tgttggaagacgaactgatc

SEQ ID NO: 14589 - DNA, 20 bp, Artificial Sequence
  MKO10014589_A_Dnali1
  gRNA
agtagagttccctgcgcaca

SEQ ID NO: 14590 - DNA, 20 bp, Artificial Sequence
  MKO10014590_A_Dnase1l1
  gRNA
cctagcccgatgtgatatca

SEQ ID NO: 14591 - DNA, 20 bp, Artificial Sequence
  MKO10014591_A_Dnase1l1
  gRNA
tatcatctgtgtcgttgtat

SEQ ID NO: 14592 - DNA, 20 bp, Artificial Sequence
  MKO10014592_A_Dnase1l1
  gRNA
ctaccagcgctggcagaatg

SEQ ID NO: 14593 - DNA, 20 bp, Artificial Sequence
  MKO10014593_A_Dnase1l2
  gRNA
ttgtactggtcacgtccgag

SEQ ID NO: 14594 - DNA, 20 bp, Artificial Sequence
  MKO10014594_A_Dnase1l2
  gRNA
ggccggctatgatatcgccc

SEQ ID NO: 14595 - DNA, 20 bp, Artificial Sequence
  MKO10014595_A_Dnase1l2
  gRNA
tcccggctgaaagcgtcctc

SEQ ID NO: 14596 - DNA, 20 bp, Artificial Sequence
  MKO10014596_A_Dnase1l3
  gRNA
ctgtgaccttatactgttga

SEQ ID NO: 14597 - DNA, 20 bp, Artificial Sequence
  MKO10014597_A_Dnase1l3
  gRNA
tatgtgattagttctcgact

SEQ ID NO: 14598 - DNA, 20 bp, Artificial Sequence
  MKO10014598_A_Dnase1l3
  gRNA
tcacactcacttgtagacga

SEQ ID NO: 14599 - DNA, 20 bp, Artificial Sequence
  MKO10014599_A_Dnase1
  gRNA
cagcgatgtcatagcgactc

SEQ ID NO: 14600 - DNA, 20 bp, Artificial Sequence
  MKO10014600_A_Dnase1
  gRNA
cccaccgattgagttcatcc

SEQ ID NO: 14601 - DNA, 20 bp, Artificial Sequence
  MKO10014601_A_Dnase1
  gRNA
gcggctcactgactacatag

SEQ ID NO: 14602 - DNA, 20 bp, Artificial Sequence
  MKO10014602_A_Dnase2a
  gRNA
tacaccgtcttgccaaccgt

SEQ ID NO: 14603 - DNA, 20 bp, Artificial Sequence
  MKO10014603_A_Dnase2a
  gRNA
tctcacccttcgtatgccca

SEQ ID NO: 14604 - DNA, 20 bp, Artificial Sequence
  MKO10014604_A_Dnase2a
  gRNA
taccggccatgggcatacga

SEQ ID NO: 14605 - DNA, 20 bp, Artificial Sequence
  MKO10014605_A_Dnase2b
  gRNA
atgagtacccaacctcgggg

SEQ ID NO: 14606 - DNA, 20 bp, Artificial Sequence
  MKO10014606_A_Dnase2b
  gRNA
accatcgttgtatattagat

SEQ ID NO: 14607 - DNA, 20 bp, Artificial Sequence
  MKO10014607_A_Dnase2b
  gRNA
gcctatctaatatacaacga

SEQ ID NO: 14608 - DNA, 20 bp, Artificial Sequence
  MKO10014608_A_Dnd1
  gRNA
acttacctcgcactcccgtt

SEQ ID NO: 14609 - DNA, 20 bp, Artificial Sequence
  MKO10014609_A_Dnd1
  gRNA
ggcagggaccgaacggttgc

SEQ ID NO: 14610 - DNA, 20 bp, Artificial Sequence
  MKO10014610_A_Dnd1
  gRNA
ctgctcgccctgcaaccgtt

SEQ ID NO: 14611 - DNA, 20 bp, Artificial Sequence
  MKO10014611_A_Dner
  gRNA
ttgggacccaaccacttcat

SEQ ID NO: 14612 - DNA, 20 bp, Artificial Sequence
  MKO10014612_A_Dner
  gRNA
gcggccacccgcagagttgt

SEQ ID NO: 14613 - DNA, 20 bp, Artificial Sequence
  MKO10014613_A_Dner
  gRNA
tcgaagtgtgacacccctcc

SEQ ID NO: 14614 - DNA, 20 bp, Artificial Sequence
  MKO10014614_A_Dnlz
  gRNA
cccgggattccggaccgcgg

SEQ ID NO: 14615 - DNA, 20 bp, Artificial Sequence
  MKO10014615_A_Dnlz
  gRNA
cgcacactacgaagtagtgt

SEQ ID NO: 14616 - DNA, 20 bp, Artificial Sequence
  MKO10014616_A_Dnlz
  gRNA
aagtcacgatgaccacgccc

SEQ ID NO: 14617 - DNA, 20 bp, Artificial Sequence
  MKO10014617_A_Dnm1l
  gRNA
ggtcatggaggcgctgatcc

SEQ ID NO: 14618 - DNA, 20 bp, Artificial Sequence
  MKO10014618_A_Dnm1l
  gRNA
gctgcctcagatcgtcgtag

SEQ ID NO: 14619 - DNA, 20 bp, Artificial Sequence
  MKO10014619_A_Dnm1l
  gRNA
ggtgaccacaccagttcctc

SEQ ID NO: 14620 - DNA, 20 bp, Artificial Sequence
  MKO10014620_A_Dnm1
  gRNA
ttcccaggtcagcgcaccat

SEQ ID NO: 14621 - DNA, 20 bp, Artificial Sequence
  MKO10014621_A_Dnm1
  gRNA
gcttatgcagttcgtcacta

SEQ ID NO: 14622 - DNA, 20 bp, Artificial Sequence
  MKO10014622_A_Dnm1
  gRNA
catggggcgagtagacccgc

SEQ ID NO: 14623 - DNA, 20 bp, Artificial Sequence
  MKO10014623_A_Dnm2
  gRNA
cgtgtggtgagtagacccga

SEQ ID NO: 14624 - DNA, 20 bp, Artificial Sequence
  MKO10014624_A_Dnm2
  gRNA
ccagagcgccggcaaaagtt

SEQ ID NO: 14625 - DNA, 20 bp, Artificial Sequence
  MKO10014625_A_Dnm2
  gRNA
tcctgcagcttgttaaccag

SEQ ID NO: 14626 - DNA, 20 bp, Artificial Sequence
  MKO10014626_A_Dnm3
  gRNA
gcagaaacagaccgcgtaac

SEQ ID NO: 14627 - DNA, 20 bp, Artificial Sequence
  MKO10014627_A_Dnm3
  gRNA
acgggcactttcgttattcc

SEQ ID NO: 14628 - DNA, 20 bp, Artificial Sequence
  MKO10014628_A_Dnm3
  gRNA
tgcatccgagttcgcaagat

SEQ ID NO: 14629 - DNA, 20 bp, Artificial Sequence
  MKO10014629_A_Dnmbp
  gRNA
cgctgtcgtcgagaatcacc

SEQ ID NO: 14630 - DNA, 20 bp, Artificial Sequence
  MKO10014630_A_Dnmbp
  gRNA
gaaccccgataatggtgatc

SEQ ID NO: 14631 - DNA, 20 bp, Artificial Sequence
  MKO10014631_A_Dnmbp
  gRNA
tatgagctcatgcgattgtt

SEQ ID NO: 14632 - DNA, 20 bp, Artificial Sequence
  MKO10014632_A_Dnmt1
  gRNA
tgaaacttcacctagttccg

SEQ ID NO: 14633 - DNA, 20 bp, Artificial Sequence
  MKO10014633_A_Dnmt1
  gRNA
cttcgtgaagtgagccgtga

SEQ ID NO: 14634 - DNA, 20 bp, Artificial Sequence
  MKO10014634_A_Dnmt1
  gRNA
acccaaggaagagtcggaag

SEQ ID NO: 14635 - DNA, 20 bp, Artificial Sequence
  MKO10014635_A_Dnmt3a
  gRNA
cgacgatgagcctgagtatg

SEQ ID NO: 14636 - DNA, 20 bp, Artificial Sequence
  MKO10014636_A_Dnmt3a
  gRNA
tccgtgggctgctgcacagc

SEQ ID NO: 14637 - DNA, 20 bp, Artificial Sequence
  MKO10014637_A_Dnmt3a
  gRNA
ggccaggccgaattgtgtct

SEQ ID NO: 14638 - DNA, 20 bp, Artificial Sequence
  MKO10014638_A_Dnmt3b
  gRNA
cgggctttcagagcgcgtcc

SEQ ID NO: 14639 - DNA, 20 bp, Artificial Sequence
  MKO10014639_A_Dnmt3b
  gRNA
gaggagtgcattatcgttaa

SEQ ID NO: 14640 - DNA, 20 bp, Artificial Sequence
  MKO10014640_A_Dnmt3b
  gRNA
ctgccgacctcgggtgattc

SEQ ID NO: 14641 - DNA, 20 bp, Artificial Sequence
  MKO10014641_A_Dnmt3l
  gRNA
acgaagtcaaagtgaaccga

SEQ ID NO: 14642 - DNA, 20 bp, Artificial Sequence
  MKO10014642_A_Dnmt3l
  gRNA
gtgagagccccgactgtacc

SEQ ID NO: 14643 - DNA, 20 bp, Artificial Sequence
  MKO10014643_A_Dnmt3l
  gRNA
ccccgctcaggataagttcc

SEQ ID NO: 14644 - DNA, 20 bp, Artificial Sequence
  MKO10014644_A_Dnpep
  gRNA
acgcaaatcgcgccgaagcc

SEQ ID NO: 14645 - DNA, 20 bp, Artificial Sequence
  MKO10014645_A_Dnpep
  gRNA
caggtcggtgttgagaccta

SEQ ID NO: 14646 - DNA, 20 bp, Artificial Sequence
  MKO10014646_A_Dnpep
  gRNA
agaggctcgtccatatagaa

SEQ ID NO: 14647 - DNA, 20 bp, Artificial Sequence
  MKO10014647_A_Dnph1
  gRNA
cgatccgcgaatacagagct

SEQ ID NO: 14648 - DNA, 20 bp, Artificial Sequence
  MKO10014648_A_Dnph1
  gRNA
gtatcccggctgcggcgcta

SEQ ID NO: 14649 - DNA, 20 bp, Artificial Sequence
  MKO10014649_A_Dnph1
  gRNA
ccaattcgtagccaacaccc

SEQ ID NO: 14650 - DNA, 20 bp, Artificial Sequence
  MKO10014650_A_Dnttip1
  gRNA
ttgattctcaccttgatccc

SEQ ID NO: 14651 - DNA, 20 bp, Artificial Sequence
  MKO10014651_A_Dnttip1
  gRNA
gccgatctcagatgaccaca

SEQ ID NO: 14652 - DNA, 20 bp, Artificial Sequence
  MKO10014652_A_Dnttip1
  gRNA
accttgtggtcatctgagat

SEQ ID NO: 14653 - DNA, 20 bp, Artificial Sequence
  MKO10014653_A_Dnttip2
  gRNA
ataagcacaatgatctccgc

SEQ ID NO: 14654 - DNA, 20 bp, Artificial Sequence
  MKO10014654_A_Dnttip2
  gRNA
agatgtgtcccaattctccg

SEQ ID NO: 14655 - DNA, 20 bp, Artificial Sequence
  MKO10014655_A_Dnttip2
  gRNA
atcgacttcagaagcagcgc

SEQ ID NO: 14656 - DNA, 20 bp, Artificial Sequence
  MKO10014656_A_Dntt
  gRNA
cagctccgagctcgaactct

SEQ ID NO: 14657 - DNA, 20 bp, Artificial Sequence
  MKO10014657_A_Dntt
  gRNA
tgacatccgatttcgagact

SEQ ID NO: 14658 - DNA, 20 bp, Artificial Sequence
  MKO10014658_A_Dntt
  gRNA
acctcgttaccgtgaatagt

SEQ ID NO: 14659 - DNA, 20 bp, Artificial Sequence
  MKO10014659_A_Doc2a
  gRNA
gctgacgtacagcgggatca

SEQ ID NO: 14660 - DNA, 20 bp, Artificial Sequence
  MKO10014660_A_Doc2a
  gRNA
ggaccgggacctggcgctca

SEQ ID NO: 14661 - DNA, 20 bp, Artificial Sequence
  MKO10014661_A_Doc2a
  gRNA
acatcacccacaaggtgctc

SEQ ID NO: 14662 - DNA, 20 bp, Artificial Sequence
  MKO10014662_A_Doc2b
  gRNA
cagcaggtgtagtttgacgt

SEQ ID NO: 14663 - DNA, 20 bp, Artificial Sequence
  MKO10014663_A_Doc2b
  gRNA
ccgtgattccgtaataagtg

SEQ ID NO: 14664 - DNA, 20 bp, Artificial Sequence
  MKO10014664_A_Doc2b
  gRNA
cacagccgccctgggtacgc

SEQ ID NO: 14665 - DNA, 20 bp, Artificial Sequence
  MKO10014665_A_Doc2g
  gRNA
gaacagtgcgtgtccgaagc

SEQ ID NO: 14666 - DNA, 20 bp, Artificial Sequence
  MKO10014666_A_Doc2g
  gRNA
ctgcacagcccatcgtgcaa

SEQ ID NO: 14667 - DNA, 20 bp, Artificial Sequence
  MKO10014667_A_Doc2g
  gRNA
agctggtgccaaaccgagcc

SEQ ID NO: 14668 - DNA, 20 bp, Artificial Sequence
  MKO10014668_A_Dock10
  gRNA
tatccgaacactctattcga

SEQ ID NO: 14669 - DNA, 20 bp, Artificial Sequence
  MKO10014669_A_Dock10
  gRNA
tcggatatcccaagaaaccg

SEQ ID NO: 14670 - DNA, 20 bp, Artificial Sequence
  MKO10014670_A_Dock10
  gRNA
tgtagtttaccacgtaccac

SEQ ID NO: 14671 - DNA, 20 bp, Artificial Sequence
  MKO10014671_A_Dock11
  gRNA
ggccaagttagttgaacccc

SEQ ID NO: 14672 - DNA, 20 bp, Artificial Sequence
  MKO10014672_A_Dock11
  gRNA
agtgcagtctactgtaccag

SEQ ID NO: 14673 - DNA, 20 bp, Artificial Sequence
  MKO10014673_A_Dock11
  gRNA
gggactttcggatgttgcca

SEQ ID NO: 14674 - DNA, 20 bp, Artificial Sequence
  MKO10014674_A_Dock1
  gRNA
tcaccacaacgcttcgagag

SEQ ID NO: 14675 - DNA, 20 bp, Artificial Sequence
  MKO10014675_A_Dock1
  gRNA
gcacggtgtctccaatttga

SEQ ID NO: 14676 - DNA, 20 bp, Artificial Sequence
  MKO10014676_A_Dock1
  gRNA
agaccactctcgaagcgttg

SEQ ID NO: 14677 - DNA, 20 bp, Artificial Sequence
  MKO10014677_A_Dock2
  gRNA
aagaagtgacaaccacgctc

SEQ ID NO: 14678 - DNA, 20 bp, Artificial Sequence
  MKO10014678_A_Dock2
  gRNA
cagcatctcacgctacagat

SEQ ID NO: 14679 - DNA, 20 bp, Artificial Sequence
  MKO10014679_A_Dock2
  gRNA
gtgacagtttatgctttatg

SEQ ID NO: 14680 - DNA, 20 bp, Artificial Sequence
  MKO10014680_A_Dock3
  gRNA
ttagtgatatgcagctttcg

SEQ ID NO: 14681 - DNA, 20 bp, Artificial Sequence
  MKO10014681_A_Dock3
  gRNA
ttacaacaactctacaagag

SEQ ID NO: 14682 - DNA, 20 bp, Artificial Sequence
  MKO10014682_A_Dock3
  gRNA
atatagttgtttccacagac

SEQ ID NO: 14683 - DNA, 20 bp, Artificial Sequence
  MKO10014683_A_Dock4
  gRNA
cgggacggtgcctcgaaagc

SEQ ID NO: 14684 - DNA, 20 bp, Artificial Sequence
  MKO10014684_A_Dock4
  gRNA
cgtcccgtacggcctgtcat

SEQ ID NO: 14685 - DNA, 20 bp, Artificial Sequence
  MKO10014685_A_Dock4
  gRNA
ccgagatgacatcaacttta

SEQ ID NO: 14686 - DNA, 20 bp, Artificial Sequence
  MKO10014686_A_Dock5
  gRNA
gacggtgtcgccgatctgca

SEQ ID NO: 14687 - DNA, 20 bp, Artificial Sequence
  MKO10014687_A_Dock5
  gRNA
catctggcgcaagctctatg

SEQ ID NO: 14688 - DNA, 20 bp, Artificial Sequence
  MKO10014688_A_Dock5
  gRNA
tcacaaacacgctacgagaa

SEQ ID NO: 14689 - DNA, 20 bp, Artificial Sequence
  MKO10014689_A_Dock6
  gRNA
ggttcgatgacctccgtcag

SEQ ID NO: 14690 - DNA, 20 bp, Artificial Sequence
  MKO10014690_A_Dock6
  gRNA
ccgtcgctccagtagttccc

SEQ ID NO: 14691 - DNA, 20 bp, Artificial Sequence
  MKO10014691_A_Dock6
  gRNA
actgggtcattgtacgcaga

SEQ ID NO: 14692 - DNA, 20 bp, Artificial Sequence
  MKO10014692_A_Dock7
  gRNA
ctcgtcactcacccgttgtc

SEQ ID NO: 14693 - DNA, 20 bp, Artificial Sequence
  MKO10014693_A_Dock7
  gRNA
cagacaacgggtgagtgacg

SEQ ID NO: 14694 - DNA, 20 bp, Artificial Sequence
  MKO10014694_A_Dock7
  gRNA
gaatctgatgaagctcccga

SEQ ID NO: 14695 - DNA, 20 bp, Artificial Sequence
  MKO10014695_A_Dock8
  gRNA
atgtactgatactgtgccga

SEQ ID NO: 14696 - DNA, 20 bp, Artificial Sequence
  MKO10014696_A_Dock8
  gRNA
gtgcagtgaaccggacactc

SEQ ID NO: 14697 - DNA, 20 bp, Artificial Sequence
  MKO10014697_A_Dock8
  gRNA
ttcagacctatattcgagag

SEQ ID NO: 14698 - DNA, 20 bp, Artificial Sequence
  MKO10014698_A_Dock9
  gRNA
ggggcggtacttacgctcca

SEQ ID NO: 14699 - DNA, 20 bp, Artificial Sequence
  MKO10014699_A_Dock9
  gRNA
agtaccgcccctgccgcctc

SEQ ID NO: 14700 - DNA, 20 bp, Artificial Sequence
  MKO10014700_A_Dock9
  gRNA
accggaagtttatccagctt

SEQ ID NO: 14701 - DNA, 20 bp, Artificial Sequence
  MKO10014701_A_Dohh
  gRNA
gaaacgtgccagctcgccgt

SEQ ID NO: 14702 - DNA, 20 bp, Artificial Sequence
  MKO10014702_A_Dohh
  gRNA
ccgggttaccaatcgccccc

SEQ ID NO: 14703 - DNA, 20 bp, Artificial Sequence
  MKO10014703_A_Dohh
  gRNA
tagccactctagacgaccaa

SEQ ID NO: 14704 - DNA, 20 bp, Artificial Sequence
  MKO10014704_A_Dok1
  gRNA
tccagccgcgccacgccgtg

SEQ ID NO: 14705 - DNA, 20 bp, Artificial Sequence
  MKO10014705_A_Dok1
  gRNA
cccgaatcgggtaccactcg

SEQ ID NO: 14706 - DNA, 20 bp, Artificial Sequence
  MKO10014706_A_Dok1
  gRNA
atacggcgtccgccgccagc

SEQ ID NO: 14707 - DNA, 20 bp, Artificial Sequence
  MKO10014707_A_Dok2
  gRNA
tacggcatactccccctcag

SEQ ID NO: 14708 - DNA, 20 bp, Artificial Sequence
  MKO10014708_A_Dok2
  gRNA
caccccggtccggagagtat

SEQ ID NO: 14709 - DNA, 20 bp, Artificial Sequence
  MKO10014709_A_Dok2
  gRNA
ccagtcactgcgctctgccg

SEQ ID NO: 14710 - DNA, 20 bp, Artificial Sequence
  MKO10014710_A_Dok3
  gRNA
tctagccgagctacccctga

SEQ ID NO: 14711 - DNA, 20 bp, Artificial Sequence
  MKO10014711_A_Dok3
  gRNA
gagttggccgggctcggccc

SEQ ID NO: 14712 - DNA, 20 bp, Artificial Sequence
  MKO10014712_A_Dok3
  gRNA
ctgccgccattgcccgccag

SEQ ID NO: 14713 - DNA, 20 bp, Artificial Sequence
  MKO10014713_A_Dok4
  gRNA
cccgcgtgaagctcgtctcg

SEQ ID NO: 14714 - DNA, 20 bp, Artificial Sequence
  MKO10014714_A_Dok4
  gRNA
gcgtagcatctcggccataa

SEQ ID NO: 14715 - DNA, 20 bp, Artificial Sequence
  MKO10014715_A_Dok4
  gRNA
ttgacccacagatttaccgg

SEQ ID NO: 14716 - DNA, 20 bp, Artificial Sequence
  MKO10014716_A_Dok5
  gRNA
tgtctcgtccataacgccgc

SEQ ID NO: 14717 - DNA, 20 bp, Artificial Sequence
  MKO10014717_A_Dok5
  gRNA
ctaagtgccctgcggcgtta

SEQ ID NO: 14718 - DNA, 20 bp, Artificial Sequence
  MKO10014718_A_Dok5
  gRNA
gttcaagaaagcttcgagca

SEQ ID NO: 14719 - DNA, 20 bp, Artificial Sequence
  MKO10014719_A_Dok6
  gRNA
ctagcttgaccttcgcattg

SEQ ID NO: 14720 - DNA, 20 bp, Artificial Sequence
  MKO10014720_A_Dok6
  gRNA
tcttatgcctacacccaacc

SEQ ID NO: 14721 - DNA, 20 bp, Artificial Sequence
  MKO10014721_A_Dok6
  gRNA
gtggtgcaagcacctttgca

SEQ ID NO: 14722 - DNA, 20 bp, Artificial Sequence
  MKO10014722_A_Dok7
  gRNA
ctgtttgactgcatcgtccg

SEQ ID NO: 14723 - DNA, 20 bp, Artificial Sequence
  MKO10014723_A_Dok7
  gRNA
tcatcttcgaaggcgggacc

SEQ ID NO: 14724 - DNA, 20 bp, Artificial Sequence
  MKO10014724_A_Dok7
  gRNA
gggagctcgccgacggggac

SEQ ID NO: 14725 - DNA, 20 bp, Artificial Sequence
  MKO10014725_A_Dolk
  gRNA
atgccgaagcgctcgaagta

SEQ ID NO: 14726 - DNA, 20 bp, Artificial Sequence
  MKO10014726_A_Dolk
  gRNA
cgtagaaggcctgcaccgcg

SEQ ID NO: 14727 - DNA, 20 bp, Artificial Sequence
  MKO10014727_A_Dolk
  gRNA
cgcgaacagcggcttactgc

SEQ ID NO: 14728 - DNA, 20 bp, Artificial Sequence
  MKO10014728_A_Dolpp1
  gRNA
cactgaatcagggcgtcaac

SEQ ID NO: 14729 - DNA, 20 bp, Artificial Sequence
  MKO10014729_A_Dolpp1
  gRNA
tgcaccaaacaaataacgcc

SEQ ID NO: 14730 - DNA, 20 bp, Artificial Sequence
  MKO10014730_A_Dolpp1
  gRNA
gtccccacaggtgatctgtc

SEQ ID NO: 14731 - DNA, 20 bp, Artificial Sequence
  MKO10014731_A_Donson
  gRNA
acgtgtatcgttgtctgaat

SEQ ID NO: 14732 - DNA, 20 bp, Artificial Sequence
  MKO10014732_A_Donson
  gRNA
ctcatatcccctacgacaag

SEQ ID NO: 14733 - DNA, 20 bp, Artificial Sequence
  MKO10014733_A_Donson
  gRNA
gcgcagcgcagtggacagtt

SEQ ID NO: 14734 - DNA, 20 bp, Artificial Sequence
  MKO10014734_A_Dopey1
  gRNA
agtcctgctgtgcgcttacc

SEQ ID NO: 14735 - DNA, 20 bp, Artificial Sequence
  MKO10014735_A_Dopey1
  gRNA
aagggtcggagtattatgag

SEQ ID NO: 14736 - DNA, 20 bp, Artificial Sequence
  MKO10014736_A_Dopey1
  gRNA
atgttctggcccatctgaac

SEQ ID NO: 14737 - DNA, 20 bp, Artificial Sequence
  MKO10014737_A_Dopey2
  gRNA
cctatgccgccatgtcggtc

SEQ ID NO: 14738 - DNA, 20 bp, Artificial Sequence
  MKO10014738_A_Dopey2
  gRNA
ccggaccgacatggcggcat

SEQ ID NO: 14739 - DNA, 20 bp, Artificial Sequence
  MKO10014739_A_Dopey2
  gRNA
ttgtcagaacgctgccccac

SEQ ID NO: 14740 - DNA, 20 bp, Artificial Sequence
  MKO10014740_A_Dos
  gRNA
ccgccgcgtgtccttcaacg

SEQ ID NO: 14741 - DNA, 20 bp, Artificial Sequence
  MKO10014741_A_Dos
  gRNA
aggtgcaccagcgcttcaac

SEQ ID NO: 14742 - DNA, 20 bp, Artificial Sequence
  MKO10014742_A_Dos
  gRNA
gctgttcgttggaggcacgc

SEQ ID NO: 14743 - DNA, 20 bp, Artificial Sequence
  MKO10014743_A_Dot1l
  gRNA
tgatcgactacgacaccaaa

SEQ ID NO: 14744 - DNA, 20 bp, Artificial Sequence
  MKO10014744_A_Dot1l
  gRNA
cactgcccaggtcgacaaac

SEQ ID NO: 14745 - DNA, 20 bp, Artificial Sequence
  MKO10014745_A_Dot1l
  gRNA
agtggttatatacctgctgc

SEQ ID NO: 14746 - DNA, 20 bp, Artificial Sequence
  MKO10014746_A_Doxl2
  gRNA
gcctacgaagttcctagacg

SEQ ID NO: 14747 - DNA, 20 bp, Artificial Sequence
  MKO10014747_A_Doxl2
  gRNA
accaccatctatacccgtga

SEQ ID NO: 14748 - DNA, 20 bp, Artificial Sequence
  MKO10014748_A_Doxl2
  gRNA
ggcgctgcgaatttcccacc

SEQ ID NO: 14749 - DNA, 20 bp, Artificial Sequence
  MKO10014749_A_Dpagt1
  gRNA
gccccatgtagacgtagtac

SEQ ID NO: 14750 - DNA, 20 bp, Artificial Sequence
  MKO10014750_A_Dpagt1
  gRNA
atgatgtcctcaatctccgc

SEQ ID NO: 14751 - DNA, 20 bp, Artificial Sequence
  MKO10014751_A_Dpagt1
  gRNA
ctaggccattaatgcccgcc

SEQ ID NO: 14752 - DNA, 20 bp, Artificial Sequence
  MKO10014752_A_Dpcd
  gRNA
ggagatttcgaatccgccac

SEQ ID NO: 14753 - DNA, 20 bp, Artificial Sequence
  MKO10014753_A_Dpcd
  gRNA
tcgaaatctcccctacccga

SEQ ID NO: 14754 - DNA, 20 bp, Artificial Sequence
  MKO10014754_A_Dpcd
  gRNA
ctcaacgcagaatcctctag

SEQ ID NO: 14755 - DNA, 20 bp, Artificial Sequence
  MKO10014755_A_Dpcr1
  gRNA
acctgatttcgtcgttaagc

SEQ ID NO: 14756 - DNA, 20 bp, Artificial Sequence
  MKO10014756_A_Dpcr1
  gRNA
accagcttaacgacgaaatc

SEQ ID NO: 14757 - DNA, 20 bp, Artificial Sequence
  MKO10014757_A_Dpcr1
  gRNA
atggcgtgctcgtgatgcac

SEQ ID NO: 14758 - DNA, 20 bp, Artificial Sequence
  MKO10014758_A_Dpep1
  gRNA
gccttccacgccgatcagac

SEQ ID NO: 14759 - DNA, 20 bp, Artificial Sequence
  MKO10014759_A_Dpep1
  gRNA
accagggcgtgttgcaattg

SEQ ID NO: 14760 - DNA, 20 bp, Artificial Sequence
  MKO10014760_A_Dpep1
  gRNA
ctctcttcagggccgacaac

SEQ ID NO: 14761 - DNA, 20 bp, Artificial Sequence
  MKO10014761_A_Dpep2
  gRNA
ttacgtaccatgccagacgc

SEQ ID NO: 14762 - DNA, 20 bp, Artificial Sequence
  MKO10014762_A_Dpep2
  gRNA
gagctcttgcgcgatctcgc

SEQ ID NO: 14763 - DNA, 20 bp, Artificial Sequence
  MKO10014763_A_Dpep2
  gRNA
ggagcaagccggcacggatg

SEQ ID NO: 14764 - DNA, 20 bp, Artificial Sequence
  MKO10014764_A_Dpep3
  gRNA
ggcgtacggcatcccggtcc

SEQ ID NO: 14765 - DNA, 20 bp, Artificial Sequence
  MKO10014765_A_Dpep3
  gRNA
aatctgcgcaatttcacccg

SEQ ID NO: 14766 - DNA, 20 bp, Artificial Sequence
  MKO10014766_A_Dpep3
  gRNA
agaccaacctggataggctc

SEQ ID NO: 14767 - DNA, 20 bp, Artificial Sequence
  MKO10014767_A_Dpf1
  gRNA
cccaccgatcttgtactcgc

SEQ ID NO: 14768 - DNA, 20 bp, Artificial Sequence
  MKO10014768_A_Dpf1
  gRNA
cggccctgcgagtacaagat

SEQ ID NO: 14769 - DNA, 20 bp, Artificial Sequence
  MKO10014769_A_Dpf1
  gRNA
cccggtagaagtcctcgcca

SEQ ID NO: 14770 - DNA, 20 bp, Artificial Sequence
  MKO10014770_A_Dpf2
  gRNA
ccgagttgacgatgacagcc

SEQ ID NO: 14771 - DNA, 20 bp, Artificial Sequence
  MKO10014771_A_Dpf2
  gRNA
cctctacctggtttaatcga

SEQ ID NO: 14772 - DNA, 20 bp, Artificial Sequence
  MKO10014772_A_Dpf2
  gRNA
ctgttagcaacagtcgagca

SEQ ID NO: 14773 - DNA, 20 bp, Artificial Sequence
  MKO10014773_A_Dpf3
  gRNA
gcgacgattgcacccaccag

SEQ ID NO: 14774 - DNA, 20 bp, Artificial Sequence
  MKO10014774_A_Dpf3
  gRNA
actgccggagctacaactcg

SEQ ID NO: 14775 - DNA, 20 bp, Artificial Sequence
  MKO10014775_A_Dpf3
  gRNA
tactccctcgccgcgaagca

SEQ ID NO: 14776 - DNA, 20 bp, Artificial Sequence
  MKO10014776_A_Dph1
  gRNA
ccgagtcttgtatgtcttcg

SEQ ID NO: 14777 - DNA, 20 bp, Artificial Sequence
  MKO10014777_A_Dph1
  gRNA
gtcttgaacggaggtgtcca

SEQ ID NO: 14778 - DNA, 20 bp, Artificial Sequence
  MKO10014778_A_Dph1
  gRNA
agctgtgaccatagtgcacc

SEQ ID NO: 14779 - DNA, 20 bp, Artificial Sequence
  MKO10014779_A_Dph2
  gRNA
acgtagctatgtgttagccg

SEQ ID NO: 14780 - DNA, 20 bp, Artificial Sequence
  MKO10014780_A_Dph2
  gRNA
ttgagaagcccctacataga

SEQ ID NO: 14781 - DNA, 20 bp, Artificial Sequence
  MKO10014781_A_Dph2
  gRNA
ctcccgcatctcctagtaac

SEQ ID NO: 14782 - DNA, 20 bp, Artificial Sequence
  MKO10014782_A_Dph3
  gRNA
catggcggtgtttcacgacg

SEQ ID NO: 14783 - DNA, 20 bp, Artificial Sequence
  MKO10014783_A_Dph3
  gRNA
ctcgtcgtgaaacaccgcca

SEQ ID NO: 14784 - DNA, 20 bp, Artificial Sequence
  MKO10014784_A_Dph3
  gRNA
tcttaggatcagttcatgtg

SEQ ID NO: 14785 - DNA, 20 bp, Artificial Sequence
  MKO10014785_A_Dph5
  gRNA
gcctccataatgaacgctgt

SEQ ID NO: 14786 - DNA, 20 bp, Artificial Sequence
  MKO10014786_A_Dph5
  gRNA
gcagcctacagcgttcatta

SEQ ID NO: 14787 - DNA, 20 bp, Artificial Sequence
  MKO10014787_A_Dph5
  gRNA
gcacagcgtgtgcatgccat

SEQ ID NO: 14788 - DNA, 20 bp, Artificial Sequence
  MKO10014788_A_Dph6
  gRNA
atactctctgactatcaacg

SEQ ID NO: 14789 - DNA, 20 bp, Artificial Sequence
  MKO10014789_A_Dph6
  gRNA
agagtttatacgcaatgtga

SEQ ID NO: 14790 - DNA, 20 bp, Artificial Sequence
  MKO10014790_A_Dph6
  gRNA
ctgtatcgcagagccatcag

SEQ ID NO: 14791 - DNA, 20 bp, Artificial Sequence
  MKO10014791_A_Dph7
  gRNA
agacgacctaaacgaacttg

SEQ ID NO: 14792 - DNA, 20 bp, Artificial Sequence
  MKO10014792_A_Dph7
  gRNA
agtgagcctcaagttcgttt

SEQ ID NO: 14793 - DNA, 20 bp, Artificial Sequence
  MKO10014793_A_Dph7
  gRNA
gatcattagcagtgattcta

SEQ ID NO: 14794 - DNA, 20 bp, Artificial Sequence
  MKO10014794_A_Dpm1
  gRNA
gcaacttctcttgtcccgtc

SEQ ID NO: 14795 - DNA, 20 bp, Artificial Sequence
  MKO10014795_A_Dpm1
  gRNA
gatgatcacatagttccccg

SEQ ID NO: 14796 - DNA, 20 bp, Artificial Sequence
  MKO10014796_A_Dpm1
  gRNA
tgtacctacctgataaattc

SEQ ID NO: 14797 - DNA, 20 bp, Artificial Sequence
  MKO10014797_A_Dpm2
  gRNA
ggcctgcggccaacgggagg

SEQ ID NO: 14798 - DNA, 20 bp, Artificial Sequence
  MKO10014798_A_Dpm2
  gRNA
ctacgccgtcctcctcccgt

SEQ ID NO: 14799 - DNA, 20 bp, Artificial Sequence
  MKO10014799_A_Dpm2
  gRNA
tcttcacctactacaccact

SEQ ID NO: 14800 - DNA, 20 bp, Artificial Sequence
  MKO10014800_A_Dpm3
  gRNA
cgcgatagcccaccgtgccc

SEQ ID NO: 14801 - DNA, 20 bp, Artificial Sequence
  MKO10014801_A_Dpm3
  gRNA
agctacatttcacgactgcg

SEQ ID NO: 14802 - DNA, 20 bp, Artificial Sequence
  MKO10014802_A_Dpm3
  gRNA
cccgagctgatttagcacgc

SEQ ID NO: 14803 - DNA, 20 bp, Artificial Sequence
  MKO10014803_A_Dpp10
  gRNA
cctgcttaacgtcgtatgcc

SEQ ID NO: 14804 - DNA, 20 bp, Artificial Sequence
  MKO10014804_A_Dpp10
  gRNA
atggattacctggtgttaac

SEQ ID NO: 14805 - DNA, 20 bp, Artificial Sequence
  MKO10014805_A_Dpp10
  gRNA
gggaatcgccattgccctgc

SEQ ID NO: 14806 - DNA, 20 bp, Artificial Sequence
  MKO10014806_A_Dpp3
  gRNA
aaccgaggcttcgacatctt

SEQ ID NO: 14807 - DNA, 20 bp, Artificial Sequence
  MKO10014807_A_Dpp3
  gRNA
ttcaaggtcgttggccagga

SEQ ID NO: 14808 - DNA, 20 bp, Artificial Sequence
  MKO10014808_A_Dpp3
  gRNA
agacccctgcagcgtagacc

SEQ ID NO: 14809 - DNA, 20 bp, Artificial Sequence
  MKO10014809_A_Dpp4
  gRNA
cagctagtgaatacgttctg

SEQ ID NO: 14810 - DNA, 20 bp, Artificial Sequence
  MKO10014810_A_Dpp4
  gRNA
ctgcttgcagacaccgtgga

SEQ ID NO: 14811 - DNA, 20 bp, Artificial Sequence
  MKO10014811_A_Dpp4
  gRNA
tgaccgactgtttgttctct

SEQ ID NO: 14812 - DNA, 20 bp, Artificial Sequence
  MKO10014812_A_Dpp6
  gRNA
tttgccttctattaacaccg

SEQ ID NO: 14813 - DNA, 20 bp, Artificial Sequence
  MKO10014813_A_Dpp6
  gRNA
actcaccggctccacattat

SEQ ID NO: 14814 - DNA, 20 bp, Artificial Sequence
  MKO10014814_A_Dpp6
  gRNA
catccatacctggggtcaac

SEQ ID NO: 14815 - DNA, 20 bp, Artificial Sequence
  MKO10014815_A_Dpp7
  gRNA
cacctgacactaggaaccgc

SEQ ID NO: 14816 - DNA, 20 bp, Artificial Sequence
  MKO10014816_A_Dpp7
  gRNA
gctttctgcagcggtactat

SEQ ID NO: 14817 - DNA, 20 bp, Artificial Sequence
  MKO10014817_A_Dpp7
  gRNA
gatgcccccaccatagcctt

SEQ ID NO: 14818 - DNA, 20 bp, Artificial Sequence
  MKO10014818_A_Dpp8
  gRNA
atcacaggaccgacccaaac

SEQ ID NO: 14819 - DNA, 20 bp, Artificial Sequence
  MKO10014819_A_Dpp8
  gRNA
gaataccgttcgacataaaa

SEQ ID NO: 14820 - DNA, 20 bp, Artificial Sequence
  MKO10014820_A_Dpp8
  gRNA
atcataagctgcgatcccca

SEQ ID NO: 14821 - DNA, 20 bp, Artificial Sequence
  MKO10014821_A_Dpp9
  gRNA
gaggagttcgaccgcttcac

SEQ ID NO: 14822 - DNA, 20 bp, Artificial Sequence
  MKO10014822_A_Dpp9
  gRNA
ggtgtccccgatgaagccac

SEQ ID NO: 14823 - DNA, 20 bp, Artificial Sequence
  MKO10014823_A_Dpp9
  gRNA
ccgagatccccaagaaagtg

SEQ ID NO: 14824 - DNA, 20 bp, Artificial Sequence
  MKO10014824_A_Dppa1
  gRNA
atggcccctcaaatggcaac

SEQ ID NO: 14825 - DNA, 20 bp, Artificial Sequence
  MKO10014825_A_Dppa1
  gRNA
gtcactcacttatgatagtc

SEQ ID NO: 14826 - DNA, 20 bp, Artificial Sequence
  MKO10014826_A_Dppa1
  gRNA
gtcgacagtgtctacagctt

SEQ ID NO: 14827 - DNA, 20 bp, Artificial Sequence
  MKO10014827_A_Dppa2
  gRNA
tgcgtagcgtagtctgtgtt

SEQ ID NO: 14828 - DNA, 20 bp, Artificial Sequence
  MKO10014828_A_Dppa2
  gRNA
ccttatctcagcccgttctc

SEQ ID NO: 14829 - DNA, 20 bp, Artificial Sequence
  MKO10014829_A_Dppa2
  gRNA
accttagaccacacaccacc

SEQ ID NO: 14830 - DNA, 20 bp, Artificial Sequence
  MKO10014830_A_Dppa3
  gRNA
tgcggttccgtagactgcgc

SEQ ID NO: 14831 - DNA, 20 bp, Artificial Sequence
  MKO10014831_A_Dppa3
  gRNA
ccgcacgccggcgcagtcta

SEQ ID NO: 14832 - DNA, 20 bp, Artificial Sequence
  MKO10014832_A_Dppa3
  gRNA
agattgagcagagacaaaaa

SEQ ID NO: 14833 - DNA, 20 bp, Artificial Sequence
  MKO10014833_A_Dppa4
  gRNA
taataccctagctggagttg

SEQ ID NO: 14834 - DNA, 20 bp, Artificial Sequence
  MKO10014834_A_Dppa4
  gRNA
cccctcaggttgtaaaccaa

SEQ ID NO: 14835 - DNA, 20 bp, Artificial Sequence
  MKO10014835_A_Dppa4
  gRNA
ctaacctttgacttctgatg

SEQ ID NO: 14836 - DNA, 20 bp, Artificial Sequence
  MKO10014836_A_Dppa5a
  gRNA
cccgtaaagatatccccccg

SEQ ID NO: 14837 - DNA, 20 bp, Artificial Sequence
  MKO10014837_A_Dppa5a
  gRNA
gatatttcagcaccagcgac

SEQ ID NO: 14838 - DNA, 20 bp, Artificial Sequence
  MKO10014838_A_Dppa5a
  gRNA
tcgaatgtctcacatcgagc

SEQ ID NO: 14839 - DNA, 20 bp, Artificial Sequence
  MKO10014839_A_Dpt
  gRNA
ccgctacttcgaatcagtgc

SEQ ID NO: 14840 - DNA, 20 bp, Artificial Sequence
  MKO10014840_A_Dpt
  gRNA
atccatcatcaccgtagtcc

SEQ ID NO: 14841 - DNA, 20 bp, Artificial Sequence
  MKO10014841_A_Dpt
  gRNA
cgcagtcgtagtcagtcatc

SEQ ID NO: 14842 - DNA, 20 bp, Artificial Sequence
  MKO10014842_A_Dpy19l1
  gRNA
gatggctttccgcactgaaa

SEQ ID NO: 14843 - DNA, 20 bp, Artificial Sequence
  MKO10014843_A_Dpy19l1
  gRNA
cgcacctctttgaaaacgat

SEQ ID NO: 14844 - DNA, 20 bp, Artificial Sequence
  MKO10014844_A_Dpy19l1
  gRNA
ccggatttataccaaaataa

SEQ ID NO: 14845 - DNA, 20 bp, Artificial Sequence
  MKO10014845_A_Dpy19l2
  gRNA
tatcgaagcaccttcgtttc

SEQ ID NO: 14846 - DNA, 20 bp, Artificial Sequence
  MKO10014846_A_Dpy19l2
  gRNA
tatgattgtgcgataccagt

SEQ ID NO: 14847 - DNA, 20 bp, Artificial Sequence
  MKO10014847_A_Dpy19l2
  gRNA
tataggtagtcatagcctac

SEQ ID NO: 14848 - DNA, 20 bp, Artificial Sequence
  MKO10014848_A_Dpy19l3
  gRNA
acttcttacatccgtttacc

SEQ ID NO: 14849 - DNA, 20 bp, Artificial Sequence
  MKO10014849_A_Dpy19l3
  gRNA
gccgggattaccttgcagga

SEQ ID NO: 14850 - DNA, 20 bp, Artificial Sequence
  MKO10014850_A_Dpy19l3
  gRNA
ccctgcatgagaacgatttg

SEQ ID NO: 14851 - DNA, 20 bp, Artificial Sequence
  MKO10014851_A_Dpy19l4
  gRNA
tgtctcgcagccgttattag

SEQ ID NO: 14852 - DNA, 20 bp, Artificial Sequence
  MKO10014852_A_Dpy19l4
  gRNA
gccatacctctctcgaatga

SEQ ID NO: 14853 - DNA, 20 bp, Artificial Sequence
  MKO10014853_A_Dpy19l4
  gRNA
cgagcgagagatcaccttcc

SEQ ID NO: 14854 - DNA, 20 bp, Artificial Sequence
  MKO10014854_A_Dpy30
  gRNA
gcaagtccctgtaataagat

SEQ ID NO: 14855 - DNA, 20 bp, Artificial Sequence
  MKO10014855_A_Dpy30
  gRNA
agttgtgcctatcttattac

SEQ ID NO: 14856 - DNA, 20 bp, Artificial Sequence
  MKO10014856_A_Dpy30
  gRNA
gtgagcccgtactcagagtg

SEQ ID NO: 14857 - DNA, 20 bp, Artificial Sequence
  MKO10014857_A_Dpyd
  gRNA
gacatcaagcacacgactct

SEQ ID NO: 14858 - DNA, 20 bp, Artificial Sequence
  MKO10014858_A_Dpyd
  gRNA
tatcacaagtatcgccaaca

SEQ ID NO: 14859 - DNA, 20 bp, Artificial Sequence
  MKO10014859_A_Dpyd
  gRNA
attccacaagtaagaccaag

SEQ ID NO: 14860 - DNA, 20 bp, Artificial Sequence
  MKO10014860_A_Dpysl2
  gRNA
agtatgcacgtcaatccctc

SEQ ID NO: 14861 - DNA, 20 bp, Artificial Sequence
  MKO10014861_A_Dpysl2
  gRNA
tcacccctcctggtacaatc

SEQ ID NO: 14862 - DNA, 20 bp, Artificial Sequence
  MKO10014862_A_Dpysl2
  gRNA
ctgtgactattcgctgcacg

SEQ ID NO: 14863 - DNA, 20 bp, Artificial Sequence
  MKO10014863_A_Dpysl3
  gRNA
ggcaggcgttaactccttca

SEQ ID NO: 14864 - DNA, 20 bp, Artificial Sequence
  MKO10014864_A_Dpysl3
  gRNA
cctatgaaaagtggcgtgag

SEQ ID NO: 14865 - DNA, 20 bp, Artificial Sequence
  MKO10014865_A_Dpysl3
  gRNA
ctggaatgacagcgtcaagc

SEQ ID NO: 14866 - DNA, 20 bp, Artificial Sequence
  MKO10014866_A_Dpysl4
  gRNA
ggagaaaatctcatcgtccc

SEQ ID NO: 14867 - DNA, 20 bp, Artificial Sequence
  MKO10014867_A_Dpysl4
  gRNA
agcgaccgccttctcatcaa

SEQ ID NO: 14868 - DNA, 20 bp, Artificial Sequence
  MKO10014868_A_Dpysl4
  gRNA
ttggtgctctcgtgccagcg

SEQ ID NO: 14869 - DNA, 20 bp, Artificial Sequence
  MKO10014869_A_Dpysl5
  gRNA
caggacgtgaccgatgatca

SEQ ID NO: 14870 - DNA, 20 bp, Artificial Sequence
  MKO10014870_A_Dpysl5
  gRNA
gatcgccccgatgtccctgc

SEQ ID NO: 14871 - DNA, 20 bp, Artificial Sequence
  MKO10014871_A_Dpysl5
  gRNA
ttccttcaggcggccctcgt

SEQ ID NO: 14872 - DNA, 20 bp, Artificial Sequence
  MKO10014872_A_Dpys
  gRNA
atcacatgcacgacgtataa

SEQ ID NO: 14873 - DNA, 20 bp, Artificial Sequence
  MKO10014873_A_Dpys
  gRNA
aaaacccttgcccgagataa

SEQ ID NO: 14874 - DNA, 20 bp, Artificial Sequence
  MKO10014874_A_Dpys
  gRNA
ccagttgcgccaagtctcaa

SEQ ID NO: 14875 - DNA, 20 bp, Artificial Sequence
  MKO10014875_A_Dqx1
  gRNA
ggcaagactgcttcgggcaa

SEQ ID NO: 14876 - DNA, 20 bp, Artificial Sequence
  MKO10014876_A_Dqx1
  gRNA
gattggatacagcatccctc

SEQ ID NO: 14877 - DNA, 20 bp, Artificial Sequence
  MKO10014877_A_Dqx1
  gRNA
gcagcttccaccaggtcggt

SEQ ID NO: 14878 - DNA, 20 bp, Artificial Sequence
  MKO10014878_A_Dr1
  gRNA
gatacgatggcttcctcgtc

SEQ ID NO: 14879 - DNA, 20 bp, Artificial Sequence
  MKO10014879_A_Dr1
  gRNA
atcatcgtcgttgccagacg

SEQ ID NO: 14880 - DNA, 20 bp, Artificial Sequence
  MKO10014880_A_Dr1
  gRNA
gccagcgcgtccactcaagc

SEQ ID NO: 14881 - DNA, 20 bp, Artificial Sequence
  MKO10014881_A_Dram1
  gRNA
ccatgatggcggtgcgcttc

SEQ ID NO: 14882 - DNA, 20 bp, Artificial Sequence
  MKO10014882_A_Dram1
  gRNA
tgtaggagatgatcgattgc

SEQ ID NO: 14883 - DNA, 20 bp, Artificial Sequence
  MKO10014883_A_Dram1
  gRNA
tcccaccaatccaagcgcca

SEQ ID NO: 14884 - DNA, 20 bp, Artificial Sequence
  MKO10014884_A_Dram2
  gRNA
ttccgtcggcccttgtaatt

SEQ ID NO: 14885 - DNA, 20 bp, Artificial Sequence
  MKO10014885_A_Dram2
  gRNA
attctgctgccgtagtaacc

SEQ ID NO: 14886 - DNA, 20 bp, Artificial Sequence
  MKO10014886_A_Dram2
  gRNA
accctgcattgccttatatc

SEQ ID NO: 14887 - DNA, 20 bp, Artificial Sequence
  MKO10014887_A_Drap1
  gRNA
ttcccgaaggggccggaaac

SEQ ID NO: 14888 - DNA, 20 bp, Artificial Sequence
  MKO10014888_A_Drap1
  gRNA
gacccttgtccccatccacg

SEQ ID NO: 14889 - DNA, 20 bp, Artificial Sequence
  MKO10014889_A_Drap1
  gRNA
cctgttgaagaaggcttgcc

SEQ ID NO: 14890 - DNA, 20 bp, Artificial Sequence
  MKO10014890_A_Draxin
  gRNA
cgaggtctcgttaccatcac

SEQ ID NO: 14891 - DNA, 20 bp, Artificial Sequence
  MKO10014891_A_Draxin
  gRNA
taacgagacctcgccagctg

SEQ ID NO: 14892 - DNA, 20 bp, Artificial Sequence
  MKO10014892_A_Draxin
  gRNA
tttcgacgactgcatgtgca

SEQ ID NO: 14893 - DNA, 20 bp, Artificial Sequence
  MKO10014893_A_Drc1
  gRNA
ttgatgaaatcacggcgaag

SEQ ID NO: 14894 - DNA, 20 bp, Artificial Sequence
  MKO10014894_A_Drc1
  gRNA
cgagttggtgacaaatattc

SEQ ID NO: 14895 - DNA, 20 bp, Artificial Sequence
  MKO10014895_A_Drc1
  gRNA
ttcttgccgttctgactcaa

SEQ ID NO: 14896 - DNA, 20 bp, Artificial Sequence
  MKO10014896_A_Drd1a
  gRNA
tcatcctgattagcgtagca

SEQ ID NO: 14897 - DNA, 20 bp, Artificial Sequence
  MKO10014897_A_Drd1a
  gRNA
aagtccatgctacgctaatc

SEQ ID NO: 14898 - DNA, 20 bp, Artificial Sequence
  MKO10014898_A_Drd1a
  gRNA
atagtccaatatgaccgata

SEQ ID NO: 14899 - DNA, 20 bp, Artificial Sequence
  MKO10014899_A_Drd2
  gRNA
acatcgttctccgcaagcgt

SEQ ID NO: 14900 - DNA, 20 bp, Artificial Sequence
  MKO10014900_A_Drd2
  gRNA
tgacccgcttccgacgcttg

SEQ ID NO: 14901 - DNA, 20 bp, Artificial Sequence
  MKO10014901_A_Drd2
  gRNA
catgacagtaactcggcgct

SEQ ID NO: 14902 - DNA, 20 bp, Artificial Sequence
  MKO10014902_A_Drd3
  gRNA
catgagcgccacacgtcgac

SEQ ID NO: 14903 - DNA, 20 bp, Artificial Sequence
  MKO10014903_A_Drd3
  gRNA
gcagagctcctgtcgacgtg

SEQ ID NO: 14904 - DNA, 20 bp, Artificial Sequence
  MKO10014904_A_Drd3
  gRNA
cccacttaccatttgtcccg

SEQ ID NO: 14905 - DNA, 20 bp, Artificial Sequence
  MKO10014905_A_Drd4
  gRNA
tcgaaactccgcgttgaaga

SEQ ID NO: 14906 - DNA, 20 bp, Artificial Sequence
  MKO10014906_A_Drd4
  gRNA
ctcgctcgtgtgcgtgagcg

SEQ ID NO: 14907 - DNA, 20 bp, Artificial Sequence
  MKO10014907_A_Drd4
  gRNA
cgcggccgggcacatcattg

SEQ ID NO: 14908 - DNA, 20 bp, Artificial Sequence
  MKO10014908_A_Drd5
  gRNA
gcgcaatggcaccgcacatc

SEQ ID NO: 14909 - DNA, 20 bp, Artificial Sequence
  MKO10014909_A_Drd5
  gRNA
cccgcgcaggtggtcaccgc

SEQ ID NO: 14910 - DNA, 20 bp, Artificial Sequence
  MKO10014910_A_Drd5
  gRNA
gggtcatcttgcgctcgtag

SEQ ID NO: 14911 - DNA, 20 bp, Artificial Sequence
  MKO10014911_A_Drg1
  gRNA
aagacaggtgatgctcgaat

SEQ ID NO: 14912 - DNA, 20 bp, Artificial Sequence
  MKO10014912_A_Drg1
  gRNA
gttctcttcgaagtttagca

SEQ ID NO: 14913 - DNA, 20 bp, Artificial Sequence
  MKO10014913_A_Drg1
  gRNA
agaggtcgtcaagtcattgc

SEQ ID NO: 14914 - DNA, 20 bp, Artificial Sequence
  MKO10014914_A_Drg2
  gRNA
gacatcagctgtgcgtgcta

SEQ ID NO: 14915 - DNA, 20 bp, Artificial Sequence
  MKO10014915_A_Drg2
  gRNA
tccagccaccgagtaccacc

SEQ ID NO: 14916 - DNA, 20 bp, Artificial Sequence
  MKO10014916_A_Drg2
  gRNA
tcacctgccggccacggcct

SEQ ID NO: 14917 - DNA, 20 bp, Artificial Sequence
  MKO10014917_A_Drosha
  gRNA
tcaagcactacgacgaccac

SEQ ID NO: 14918 - DNA, 20 bp, Artificial Sequence
  MKO10014918_A_Drosha
  gRNA
catagaatgtcgtaccaccc

SEQ ID NO: 14919 - DNA, 20 bp, Artificial Sequence
  MKO10014919_A_Drosha
  gRNA
gcagatcaccgtctctagaa

SEQ ID NO: 14920 - DNA, 20 bp, Artificial Sequence
  MKO10014920_A_Drp2
  gRNA
tacgtgcagcgctcgcctag

SEQ ID NO: 14921 - DNA, 20 bp, Artificial Sequence
  MKO10014921_A_Drp2
  gRNA
gcttccatacaaagcgacta

SEQ ID NO: 14922 - DNA, 20 bp, Artificial Sequence
  MKO10014922_A_Drp2
  gRNA
cgctccgagagattattgac

SEQ ID NO: 14923 - DNA, 20 bp, Artificial Sequence
  MKO10014923_A_Dsc1
  gRNA
agatgctcacctttgcctac

SEQ ID NO: 14924 - DNA, 20 bp, Artificial Sequence
  MKO10014924_A_Dsc1
  gRNA
tcgggtacaatagatgtccc

SEQ ID NO: 14925 - DNA, 20 bp, Artificial Sequence
  MKO10014925_A_Dsc1
  gRNA
tcacgttccctctcatctta

SEQ ID NO: 14926 - DNA, 20 bp, Artificial Sequence
  MKO10014926_A_Dsc2
  gRNA
ctgtaaagaagtcgtcctcc

SEQ ID NO: 14927 - DNA, 20 bp, Artificial Sequence
  MKO10014927_A_Dsc2
  gRNA
ctacacgaccagtgcaatac

SEQ ID NO: 14928 - DNA, 20 bp, Artificial Sequence
  MKO10014928_A_Dsc2
  gRNA
agtaaagcttctttgccccg

SEQ ID NO: 14929 - DNA, 20 bp, Artificial Sequence
  MKO10014929_A_Dsc3
  gRNA
tctatattgtactcggcctg

SEQ ID NO: 14930 - DNA, 20 bp, Artificial Sequence
  MKO10014930_A_Dsc3
  gRNA
tcatattcctcacgatccac

SEQ ID NO: 14931 - DNA, 20 bp, Artificial Sequence
  MKO10014931_A_Dsc3
  gRNA
tcatgtaccttcaacactag

SEQ ID NO: 14932 - DNA, 20 bp, Artificial Sequence
  MKO10014932_A_Dscaml1
  gRNA
aatacgttagcgtcgtgtct

SEQ ID NO: 14933 - DNA, 20 bp, Artificial Sequence
  MKO10014933_A_Dscaml1
  gRNA
atcgtagatgtcgtcccccg

SEQ ID NO: 14934 - DNA, 20 bp, Artificial Sequence
  MKO10014934_A_Dscaml1
  gRNA
ctcgtcagagcaacggagct

SEQ ID NO: 14935 - DNA, 20 bp, Artificial Sequence
  MKO10014935_A_Dscam
  gRNA
tgcggtggtcaaacccgtcc

SEQ ID NO: 14936 - DNA, 20 bp, Artificial Sequence
  MKO10014936_A_Dscam
  gRNA
ccaacttacgtttcacgtac

SEQ ID NO: 14937 - DNA, 20 bp, Artificial Sequence
  MKO10014937_A_Dscam
  gRNA
agatctcctcgcccgttgct

SEQ ID NO: 14938 - DNA, 20 bp, Artificial Sequence
  MKO10014938_A_Dscc1
  gRNA
gtctgctatcttcaggtcgt

SEQ ID NO: 14939 - DNA, 20 bp, Artificial Sequence
  MKO10014939_A_Dscc1
  gRNA
cggtacctccgtgtgaacga

SEQ ID NO: 14940 - DNA, 20 bp, Artificial Sequence
  MKO10014940_A_Dscc1
  gRNA
tacactacctccaatctcac

SEQ ID NO: 14941 - DNA, 20 bp, Artificial Sequence
  MKO10014941_A_Dscr3
  gRNA
aaccttgcagaacgtcaaag

SEQ ID NO: 14942 - DNA, 20 bp, Artificial Sequence
  MKO10014942_A_Dscr3
  gRNA
tgttgacttcacgatcactc

SEQ ID NO: 14943 - DNA, 20 bp, Artificial Sequence
  MKO10014943_A_Dscr3
  gRNA
tcctggcttcagcacgtcta

SEQ ID NO: 14944 - DNA, 20 bp, Artificial Sequence
  MKO10014944_A_Dsel
  gRNA
tttgccccatgatcgaatct

SEQ ID NO: 14945 - DNA, 20 bp, Artificial Sequence
  MKO10014945_A_Dsel
  gRNA
aattagaaagcatcgaccta

SEQ ID NO: 14946 - DNA, 20 bp, Artificial Sequence
  MKO10014946_A_Dsel
  gRNA
caaacaccaatacgttgtta

SEQ ID NO: 14947 - DNA, 20 bp, Artificial Sequence
  MKO10014947_A_Dse
  gRNA
tatagagaccgtctcgctgc

SEQ ID NO: 14948 - DNA, 20 bp, Artificial Sequence
  MKO10014948_A_Dse
  gRNA
tgtaatgcttacccgccttt

SEQ ID NO: 14949 - DNA, 20 bp, Artificial Sequence
  MKO10014949_A_Dse
  gRNA
cgctacacaccgaatttctc

SEQ ID NO: 14950 - DNA, 20 bp, Artificial Sequence
  MKO10014950_A_Dsg1a
  gRNA
ttcattattaatcaaaaaac

SEQ ID NO: 14951 - DNA, 20 bp, Artificial Sequence
  MKO10014951_A_Dsg1a
  gRNA
taacagtgaatttcaaatcc

SEQ ID NO: 14952 - DNA, 20 bp, Artificial Sequence
  MKO10014952_A_Dsg1a
  gRNA
ttctcacttactttggcaat

SEQ ID NO: 14953 - DNA, 20 bp, Artificial Sequence
  MKO10014953_A_Dsg1b
  gRNA
tcaagtggcactccatcaga

SEQ ID NO: 14954 - DNA, 20 bp, Artificial Sequence
  MKO10014954_A_Dsg1b
  gRNA
accagtaacataccgcatct

SEQ ID NO: 14955 - DNA, 20 bp, Artificial Sequence
  MKO10014955_A_Dsg1b
  gRNA
actctgactctaagctccag

SEQ ID NO: 14956 - DNA, 20 bp, Artificial Sequence
  MKO10014956_A_Dsg1c
  gRNA
taacagtgaatttcaaatcc

SEQ ID NO: 14957 - DNA, 20 bp, Artificial Sequence
  MKO10014957_A_Dsg1c
  gRNA
ttctcacttactttggcaat

SEQ ID NO: 14958 - DNA, 20 bp, Artificial Sequence
  MKO10014958_A_Dsg1c
  gRNA
agagatcataacgccaaaaa

SEQ ID NO: 14959 - DNA, 20 bp, Artificial Sequence
  MKO10014959_A_Dsg2
  gRNA
ggaattacagaaccgccttt

SEQ ID NO: 14960 - DNA, 20 bp, Artificial Sequence
  MKO10014960_A_Dsg2
  gRNA
tcaaagacgaatatgccgaa

SEQ ID NO: 14961 - DNA, 20 bp, Artificial Sequence
  MKO10014961_A_Dsg2
  gRNA
aactttgatgcgtagttcca

SEQ ID NO: 14962 - DNA, 20 bp, Artificial Sequence
  MKO10014962_A_Dsg3
  gRNA
aaaattacctaccgcatttc

SEQ ID NO: 14963 - DNA, 20 bp, Artificial Sequence
  MKO10014963_A_Dsg3
  gRNA
ggtttcctcacgatcaacta

SEQ ID NO: 14964 - DNA, 20 bp, Artificial Sequence
  MKO10014964_A_Dsg3
  gRNA
atatggctcaccttggcaat

SEQ ID NO: 14965 - DNA, 20 bp, Artificial Sequence
  MKO10014965_A_Dsg4
  gRNA
ttgatggtgaacactccgta

SEQ ID NO: 14966 - DNA, 20 bp, Artificial Sequence
  MKO10014966_A_Dsg4
  gRNA
ccccgctccagagattcgat

SEQ ID NO: 14967 - DNA, 20 bp, Artificial Sequence
  MKO10014967_A_Dsg4
  gRNA
gttgtcctcgccctcccgac

SEQ ID NO: 14968 - DNA, 20 bp, Artificial Sequence
  MKO10014968_A_Dsn1
  gRNA
cgccttgcgtcatcatttcc

SEQ ID NO: 14969 - DNA, 20 bp, Artificial Sequence
  MKO10014969_A_Dsn1
  gRNA
gatgacgcaaggcgtttcag

SEQ ID NO: 14970 - DNA, 20 bp, Artificial Sequence
  MKO10014970_A_Dsn1
  gRNA
gggcgcccagccgttggctc

SEQ ID NO: 14971 - DNA, 20 bp, Artificial Sequence
  MKO10014971_A_Dspp
  gRNA
gttagattcgtcgctgctct

SEQ ID NO: 14972 - DNA, 20 bp, Artificial Sequence
  MKO10014972_A_Dspp
  gRNA
tgcacttaccggaatggccc

SEQ ID NO: 14973 - DNA, 20 bp, Artificial Sequence
  MKO10014973_A_Dspp
  gRNA
aagagcagcgacgaatctaa

SEQ ID NO: 14974 - DNA, 20 bp, Artificial Sequence
  MKO10014974_A_Dsp
  gRNA
acaccattggggactaccgc

SEQ ID NO: 14975 - DNA, 20 bp, Artificial Sequence
  MKO10014975_A_Dsp
  gRNA
tttggtgaactcgtcccagc

SEQ ID NO: 14976 - DNA, 20 bp, Artificial Sequence
  MKO10014976_A_Dsp
  gRNA
cgagttcaccaaacgcctca

SEQ ID NO: 14977 - DNA, 20 bp, Artificial Sequence
  MKO10014977_A_Dstn
  gRNA
aatgatctatgcaagctcga

SEQ ID NO: 14978 - DNA, 20 bp, Artificial Sequence
  MKO10014978_A_Dstn
  gRNA
attccgacaaaatgcttgaa

SEQ ID NO: 14979 - DNA, 20 bp, Artificial Sequence
  MKO10014979_A_Dstn
  gRNA
ctacacaggggatccttcaa

SEQ ID NO: 14980 - DNA, 20 bp, Artificial Sequence
  MKO10014980_A_Dstyk
  gRNA
gctgctacagaaccgcctag

SEQ ID NO: 14981 - DNA, 20 bp, Artificial Sequence
  MKO10014981_A_Dstyk
  gRNA
cgtcgcctccgcttcaccta

SEQ ID NO: 14982 - DNA, 20 bp, Artificial Sequence
  MKO10014982_A_Dstyk
  gRNA
tggcaccgtgcccgagccac

SEQ ID NO: 14983 - DNA, 20 bp, Artificial Sequence
  MKO10014983_A_Dst
  gRNA
gcacgtgaacgatctctacg

SEQ ID NO: 14984 - DNA, 20 bp, Artificial Sequence
  MKO10014984_A_Dst
  gRNA
cgactatttgaaaagacgcc

SEQ ID NO: 14985 - DNA, 20 bp, Artificial Sequence
  MKO10014985_A_Dst
  gRNA
ctgtccttagccccgggaga

SEQ ID NO: 14986 - DNA, 20 bp, Artificial Sequence
  MKO10014986_A_Dtd1
  gRNA
agtcgggcttgttccccttg

SEQ ID NO: 14987 - DNA, 20 bp, Artificial Sequence
  MKO10014987_A_Dtd1
  gRNA
ggagagcagataagcgccat

SEQ ID NO: 14988 - DNA, 20 bp, Artificial Sequence
  MKO10014988_A_Dtd1
  gRNA
gaacaagcccgacttccacc

SEQ ID NO: 14989 - DNA, 20 bp, Artificial Sequence
  MKO10014989_A_Dtd2
  gRNA
catcggccgggcgcacttgc

SEQ ID NO: 14990 - DNA, 20 bp, Artificial Sequence
  MKO10014990_A_Dtd2
  gRNA
gcggtggcgcacggcacgta

SEQ ID NO: 14991 - DNA, 20 bp, Artificial Sequence
  MKO10014991_A_Dtd2
  gRNA
cacacgaccaccgtccgcca

SEQ ID NO: 14992 - DNA, 20 bp, Artificial Sequence
  MKO10014992_A_Dtl
  gRNA
aacgatgaacacacgtctta

SEQ ID NO: 14993 - DNA, 20 bp, Artificial Sequence
  MKO10014993_A_Dtl
  gRNA
tgctaatatatgctccatac

SEQ ID NO: 14994 - DNA, 20 bp, Artificial Sequence
  MKO10014994_A_Dtl
  gRNA
cctctacaatcccttctaag

SEQ ID NO: 14995 - DNA, 20 bp, Artificial Sequence
  MKO10014995_A_Dtna
  gRNA
cgaaaacgctttgaataacc

SEQ ID NO: 14996 - DNA, 20 bp, Artificial Sequence
  MKO10014996_A_Dtna
  gRNA
ttccgttgtagtgcacctgg

SEQ ID NO: 14997 - DNA, 20 bp, Artificial Sequence
  MKO10014997_A_Dtna
  gRNA
ctcagtatttgctgtcaaaa

SEQ ID NO: 14998 - DNA, 20 bp, Artificial Sequence
  MKO10014998_A_Dtnbp1
  gRNA
cgcttaccgaagtactctgc

SEQ ID NO: 14999 - DNA, 20 bp, Artificial Sequence
  MKO10014999_A_Dtnbp1
  gRNA
tctagtccagcagagtactt

SEQ ID NO: 15000 - DNA, 20 bp, Artificial Sequence
  MKO10015000_A_Dtnbp1
  gRNA
gctgcccctgcagctcgttc

SEQ ID NO: 15001 - DNA, 20 bp, Artificial Sequence
  MKO10015001_A_Dtnb
  gRNA
aggtacgagcctgtcgtagg

SEQ ID NO: 15002 - DNA, 20 bp, Artificial Sequence
  MKO10015002_A_Dtnb
  gRNA
ttctactcaccagatcagcg

SEQ ID NO: 15003 - DNA, 20 bp, Artificial Sequence
  MKO10015003_A_Dtnb
  gRNA
gctatgttagcaaccatgtg

SEQ ID NO: 15004 - DNA, 20 bp, Artificial Sequence
  MKO10015004_A_Dtwd1
  gRNA
actcaagaggactacggacg

SEQ ID NO: 15005 - DNA, 20 bp, Artificial Sequence
  MKO10015005_A_Dtwd1
  gRNA
accagatcgcctctgatgag

SEQ ID NO: 15006 - DNA, 20 bp, Artificial Sequence
  MKO10015006_A_Dtwd1
  gRNA
gtacgaagggaaggatcacg

SEQ ID NO: 15007 - DNA, 20 bp, Artificial Sequence
  MKO10015007_A_Dtwd2
  gRNA
cgctcctcttcgtccggcgt

SEQ ID NO: 15008 - DNA, 20 bp, Artificial Sequence
  MKO10015008_A_Dtwd2
  gRNA
cgccttggcgtcaccgacgc

SEQ ID NO: 15009 - DNA, 20 bp, Artificial Sequence
  MKO10015009_A_Dtwd2
  gRNA
cgctcagattcgcctcagca

SEQ ID NO: 15010 - DNA, 20 bp, Artificial Sequence
  MKO10015010_A_Dtx1
  gRNA
tcgtagaagttgcgtcgcac

SEQ ID NO: 15011 - DNA, 20 bp, Artificial Sequence
  MKO10015011_A_Dtx1
  gRNA
caacttctacgatccatcgt

SEQ ID NO: 15012 - DNA, 20 bp, Artificial Sequence
  MKO10015012_A_Dtx1
  gRNA
ctccccgtgaagaacttgaa

SEQ ID NO: 15013 - DNA, 20 bp, Artificial Sequence
  MKO10015013_A_Dtx2
  gRNA
tggcggtagcggcccgacac

SEQ ID NO: 15014 - DNA, 20 bp, Artificial Sequence
  MKO10015014_A_Dtx2
  gRNA
cccaagctcgtctctgccgc

SEQ ID NO: 15015 - DNA, 20 bp, Artificial Sequence
  MKO10015015_A_Dtx2
  gRNA
ccacttggcgtcgcacactc

SEQ ID NO: 15016 - DNA, 20 bp, Artificial Sequence
  MKO10015016_A_Dtx3l
  gRNA
gcccgtcgtgtacccagatg

SEQ ID NO: 15017 - DNA, 20 bp, Artificial Sequence
  MKO10015017_A_Dtx3l
  gRNA
agttagaaacgagcccgtcc

SEQ ID NO: 15018 - DNA, 20 bp, Artificial Sequence
  MKO10015018_A_Dtx3l
  gRNA
ggctcccgctccacatcggg

SEQ ID NO: 15019 - DNA, 20 bp, Artificial Sequence
  MKO10015019_A_Dtx3
  gRNA
agaccagcatccgtccgttc

SEQ ID NO: 15020 - DNA, 20 bp, Artificial Sequence
  MKO10015020_A_Dtx3
  gRNA
ccgattctacgggcagcttg

SEQ ID NO: 15021 - DNA, 20 bp, Artificial Sequence
  MKO10015021_A_Dtx3
  gRNA
cgggaggtaggccacccgtg

SEQ ID NO: 15022 - DNA, 20 bp, Artificial Sequence
  MKO10015022_A_Dtx4
  gRNA
tcatagtagtttcgtcgaac

SEQ ID NO: 15023 - DNA, 20 bp, Artificial Sequence
  MKO10015023_A_Dtx4
  gRNA
cggctcgtgttcgagacccc

SEQ ID NO: 15024 - DNA, 20 bp, Artificial Sequence
  MKO10015024_A_Dtx4
  gRNA
gccatgttctttcgtactgc

SEQ ID NO: 15025 - DNA, 20 bp, Artificial Sequence
  MKO10015025_A_Dtymk
  gRNA
tgcgggcgatggcgtcgcgt

SEQ ID NO: 15026 - DNA, 20 bp, Artificial Sequence
  MKO10015026_A_Dtymk
  gRNA
tcccggtctcatatcgctca

SEQ ID NO: 15027 - DNA, 20 bp, Artificial Sequence
  MKO10015027_A_Dtymk
  gRNA
gcggagctgctgcgtttccc

SEQ ID NO: 15028 - DNA, 20 bp, Artificial Sequence
  MKO10015028_A_Duox1
  gRNA
actgtacggttccgaagaga

SEQ ID NO: 15029 - DNA, 20 bp, Artificial Sequence
  MKO10015029_A_Duox1
  gRNA
acccccgacaccttagtaac

SEQ ID NO: 15030 - DNA, 20 bp, Artificial Sequence
  MKO10015030_A_Duox1
  gRNA
gtctcaccatacaccccccg

SEQ ID NO: 15031 - DNA, 20 bp, Artificial Sequence
  MKO10015031_A_Duox2
  gRNA
aagtgcagcgctacgacggc

SEQ ID NO: 15032 - DNA, 20 bp, Artificial Sequence
  MKO10015032_A_Duox2
  gRNA
gcggctgcgtcgcctaatac

SEQ ID NO: 15033 - DNA, 20 bp, Artificial Sequence
  MKO10015033_A_Duox2
  gRNA
aatctgaagtaccaccagcg

SEQ ID NO: 15034 - DNA, 20 bp, Artificial Sequence
  MKO10015034_A_Duoxa1
  gRNA
acagggcgatatgagtgacg

SEQ ID NO: 15035 - DNA, 20 bp, Artificial Sequence
  MKO10015035_A_Duoxa1
  gRNA
atcgccctgtcccctgcgct

SEQ ID NO: 15036 - DNA, 20 bp, Artificial Sequence
  MKO10015036_A_Duoxa1
  gRNA
ggcgtcaacatcaccctcac

SEQ ID NO: 15037 - DNA, 20 bp, Artificial Sequence
  MKO10015037_A_Duoxa2
  gRNA
ggcgttaacattacactccg

SEQ ID NO: 15038 - DNA, 20 bp, Artificial Sequence
  MKO10015038_A_Duoxa2
  gRNA
actacaatgagcgtttcact

SEQ ID NO: 15039 - DNA, 20 bp, Artificial Sequence
  MKO10015039_A_Duoxa2
  gRNA
gagcggcacgctggaaatcg

SEQ ID NO: 15040 - DNA, 20 bp, Artificial Sequence
  MKO10015040_A_Dupd1
  gRNA
tttcacgcacgtgctgaacg

SEQ ID NO: 15041 - DNA, 20 bp, Artificial Sequence
  MKO10015041_A_Dupd1
  gRNA
catcgagtaccacggcgtcg

SEQ ID NO: 15042 - DNA, 20 bp, Artificial Sequence
  MKO10015042_A_Dupd1
  gRNA
ccagtatacacacgtcaatg

SEQ ID NO: 15043 - DNA, 20 bp, Artificial Sequence
  MKO10015043_A_Dus1l
  gRNA
gccgcctggacaaacacctc

SEQ ID NO: 15044 - DNA, 20 bp, Artificial Sequence
  MKO10015044_A_Dus1l
  gRNA
aacggccttgatgtgttccc

SEQ ID NO: 15045 - DNA, 20 bp, Artificial Sequence
  MKO10015045_A_Dus1l
  gRNA
catcacagtaatcttgtgct

SEQ ID NO: 15046 - DNA, 20 bp, Artificial Sequence
  MKO10015046_A_Dus2
  gRNA
cgtttacaactcgcttgcac

SEQ ID NO: 15047 - DNA, 20 bp, Artificial Sequence
  MKO10015047_A_Dus2
  gRNA
accttagtggaatactcttt

SEQ ID NO: 15048 - DNA, 20 bp, Artificial Sequence
  MKO10015048_A_Dus2
  gRNA
cagtgcaagcgagttgtaaa

SEQ ID NO: 15049 - DNA, 20 bp, Artificial Sequence
  MKO10015049_A_Dus3l
  gRNA
tttcgaagagcacgcagcgg

SEQ ID NO: 15050 - DNA, 20 bp, Artificial Sequence
  MKO10015050_A_Dus3l
  gRNA
catgcccagctagataccgt

SEQ ID NO: 15051 - DNA, 20 bp, Artificial Sequence
  MKO10015051_A_Dus3l
  gRNA
cgccgcatttgcaagcgctt

SEQ ID NO: 15052 - DNA, 20 bp, Artificial Sequence
  MKO10015052_A_Dus4l
  gRNA
ttataggatccacgatgacc

SEQ ID NO: 15053 - DNA, 20 bp, Artificial Sequence
  MKO10015053_A_Dus4l
  gRNA
gccagagcttgttcacgata

SEQ ID NO: 15054 - DNA, 20 bp, Artificial Sequence
  MKO10015054_A_Dus4l
  gRNA
tatgtctccattagcaacta

SEQ ID NO: 15055 - DNA, 20 bp, Artificial Sequence
  MKO10015055_A_Dusp10
  gRNA
ttggcgtcacgccgttgttt

SEQ ID NO: 15056 - DNA, 20 bp, Artificial Sequence
  MKO10015056_A_Dusp10
  gRNA
gtcccgtcatcatcgattgc

SEQ ID NO: 15057 - DNA, 20 bp, Artificial Sequence
  MKO10015057_A_Dusp10
  gRNA
gacgcttacaaattcgtcaa

SEQ ID NO: 15058 - DNA, 20 bp, Artificial Sequence
  MKO10015058_A_Dusp11
  gRNA
aaagcaatgaaacgagtccc

SEQ ID NO: 15059 - DNA, 20 bp, Artificial Sequence
  MKO10015059_A_Dusp11
  gRNA
actgcacccatggcttaaat

SEQ ID NO: 15060 - DNA, 20 bp, Artificial Sequence
  MKO10015060_A_Dusp11
  gRNA
tcagcgctattataaagtag

SEQ ID NO: 15061 - DNA, 20 bp, Artificial Sequence
  MKO10015061_A_Dusp12
  gRNA
atctactctgttgggcgtta

SEQ ID NO: 15062 - DNA, 20 bp, Artificial Sequence
  MKO10015062_A_Dusp12
  gRNA
cgccgttctcttgtgagcaa

SEQ ID NO: 15063 - DNA, 20 bp, Artificial Sequence
  MKO10015063_A_Dusp12
  gRNA
tagcctctggcttgaccgtc

SEQ ID NO: 15064 - DNA, 20 bp, Artificial Sequence
  MKO10015064_A_Dusp13
  gRNA
caaataaccgatttgagctg

SEQ ID NO: 15065 - DNA, 20 bp, Artificial Sequence
  MKO10015065_A_Dusp13
  gRNA
gacctgcaccccgaagttgc

SEQ ID NO: 15066 - DNA, 20 bp, Artificial Sequence
  MKO10015066_A_Dusp13
  gRNA
catgtgctgaatgccgccca

SEQ ID NO: 15067 - DNA, 20 bp, Artificial Sequence
  MKO10015067_A_Dusp14
  gRNA
cccgacacttgatgccttat

SEQ ID NO: 15068 - DNA, 20 bp, Artificial Sequence
  MKO10015068_A_Dusp14
  gRNA
gactacgagagccagctctt

SEQ ID NO: 15069 - DNA, 20 bp, Artificial Sequence
  MKO10015069_A_Dusp14
  gRNA
caatacagagggtggccgag

SEQ ID NO: 15070 - DNA, 20 bp, Artificial Sequence
  MKO10015070_A_Dusp15
  gRNA
ggaacttacatgggtacctc

SEQ ID NO: 15071 - DNA, 20 bp, Artificial Sequence
  MKO10015071_A_Dusp15
  gRNA
tatcagacactgagattcga

SEQ ID NO: 15072 - DNA, 20 bp, Artificial Sequence
  MKO10015072_A_Dusp15
  gRNA
gtttggagtacctgcaacag

SEQ ID NO: 15073 - DNA, 20 bp, Artificial Sequence
  MKO10015073_A_Dusp16
  gRNA
tgcttacctgttgcgaacat

SEQ ID NO: 15074 - DNA, 20 bp, Artificial Sequence
  MKO10015074_A_Dusp16
  gRNA
ccttgttgaggacatctcgc

SEQ ID NO: 15075 - DNA, 20 bp, Artificial Sequence
  MKO10015075_A_Dusp16
  gRNA
gtgcttatccactgcttagc

SEQ ID NO: 15076 - DNA, 20 bp, Artificial Sequence
  MKO10015076_A_Dusp18
  gRNA
gcgacgggcgcatcgaccac

SEQ ID NO: 15077 - DNA, 20 bp, Artificial Sequence
  MKO10015077_A_Dusp18
  gRNA
cgttgccgaccgtatccatt

SEQ ID NO: 15078 - DNA, 20 bp, Artificial Sequence
  MKO10015078_A_Dusp18
  gRNA
tgcgagaggcctctgatcga

SEQ ID NO: 15079 - DNA, 20 bp, Artificial Sequence
  MKO10015079_A_Dusp19
  gRNA
ccatccatatgtccgaatcc

SEQ ID NO: 15080 - DNA, 20 bp, Artificial Sequence
  MKO10015080_A_Dusp19
  gRNA
tcgcctctttcaccaacgac

SEQ ID NO: 15081 - DNA, 20 bp, Artificial Sequence
  MKO10015081_A_Dusp19
  gRNA
aagttggcgttattaagccc

SEQ ID NO: 15082 - DNA, 20 bp, Artificial Sequence
  MKO10015082_A_Dusp1
  gRNA
cggccacgcagttcagcgtt

SEQ ID NO: 15083 - DNA, 20 bp, Artificial Sequence
  MKO10015083_A_Dusp1
  gRNA
ggccagggtgccgtcgcgct

SEQ ID NO: 15084 - DNA, 20 bp, Artificial Sequence
  MKO10015084_A_Dusp1
  gRNA
ctactaacctgatcgtagag

SEQ ID NO: 15085 - DNA, 20 bp, Artificial Sequence
  MKO10015085_A_Dusp21
  gRNA
cgcatgatctactctcctat

SEQ ID NO: 15086 - DNA, 20 bp, Artificial Sequence
  MKO10015086_A_Dusp21
  gRNA
gaattaggagcatcgctcac

SEQ ID NO: 15087 - DNA, 20 bp, Artificial Sequence
  MKO10015087_A_Dusp21
  gRNA
acgagttcaagctgtttagt

SEQ ID NO: 15088 - DNA, 20 bp, Artificial Sequence
  MKO10015088_A_Dusp22
  gRNA
tttctgtgcacgatactgcc

SEQ ID NO: 15089 - DNA, 20 bp, Artificial Sequence
  MKO10015089_A_Dusp22
  gRNA
tgtctgccgctggaatacac

SEQ ID NO: 15090 - DNA, 20 bp, Artificial Sequence
  MKO10015090_A_Dusp22
  gRNA
atcctgccgggcctgtacat

SEQ ID NO: 15091 - DNA, 20 bp, Artificial Sequence
  MKO10015091_A_Dusp23
  gRNA
atccattgagacgtatgaac

SEQ ID NO: 15092 - DNA, 20 bp, Artificial Sequence
  MKO10015092_A_Dusp23
  gRNA
gagatccggcgcctgcgacc

SEQ ID NO: 15093 - DNA, 20 bp, Artificial Sequence
  MKO10015093_A_Dusp23
  gRNA
aaaagtcagggatgcgcatt

SEQ ID NO: 15094 - DNA, 20 bp, Artificial Sequence
  MKO10015094_A_Dusp26
  gRNA
ccgaagctcacggcggttgt

SEQ ID NO: 15095 - DNA, 20 bp, Artificial Sequence
  MKO10015095_A_Dusp26
  gRNA
tgaaaatgtgccccggtaac

SEQ ID NO: 15096 - DNA, 20 bp, Artificial Sequence
  MKO10015096_A_Dusp26
  gRNA
gtaaccatgctgacgaagtc

SEQ ID NO: 15097 - DNA, 20 bp, Artificial Sequence
  MKO10015097_A_Dusp27
  gRNA
ccccttctgtcagtgcggat

SEQ ID NO: 15098 - DNA, 20 bp, Artificial Sequence
  MKO10015098_A_Dusp27
  gRNA
cggaagataccgctctgact

SEQ ID NO: 15099 - DNA, 20 bp, Artificial Sequence
  MKO10015099_A_Dusp27
  gRNA
cacattctgaatgccgcaca

SEQ ID NO: 15100 - DNA, 20 bp, Artificial Sequence
  MKO10015100_A_Dusp28
  gRNA
tacgcgtagttccgccactc

SEQ ID NO: 15101 - DNA, 20 bp, Artificial Sequence
  MKO10015101_A_Dusp28
  gRNA
gtcgcgcaccgcggcttcca

SEQ ID NO: 15102 - DNA, 20 bp, Artificial Sequence
  MKO10015102_A_Dusp28
  gRNA
gatggtgaagagcgcccgcc

SEQ ID NO: 15103 - DNA, 20 bp, Artificial Sequence
  MKO10015103_A_Dusp2
  gRNA
acgaccgtgtgcttcttgcg

SEQ ID NO: 15104 - DNA, 20 bp, Artificial Sequence
  MKO10015104_A_Dusp2
  gRNA
tgttgcccgaccgcgcactc

SEQ ID NO: 15105 - DNA, 20 bp, Artificial Sequence
  MKO10015105_A_Dusp2
  gRNA
cctcgtccagccgtacccgg

SEQ ID NO: 15106 - DNA, 20 bp, Artificial Sequence
  MKO10015106_A_Dusp3
  gRNA
cgtgagatcggccccaacga

SEQ ID NO: 15107 - DNA, 20 bp, Artificial Sequence
  MKO10015107_A_Dusp3
  gRNA
gtccagctcgttcgaactct

SEQ ID NO: 15108 - DNA, 20 bp, Artificial Sequence
  MKO10015108_A_Dusp3
  gRNA
cgcggcaatggacaagcacc

SEQ ID NO: 15109 - DNA, 20 bp, Artificial Sequence
  MKO10015109_A_Dusp4
  gRNA
cagcctaccgatgtactcga

SEQ ID NO: 15110 - DNA, 20 bp, Artificial Sequence
  MKO10015110_A_Dusp4
  gRNA
agcgcacgttcaccgagcct

SEQ ID NO: 15111 - DNA, 20 bp, Artificial Sequence
  MKO10015111_A_Dusp4
  gRNA
cacggtgtcgctggtcgtgc

SEQ ID NO: 15112 - DNA, 20 bp, Artificial Sequence
  MKO10015112_A_Dusp5
  gRNA
ttcgccgcgtcgagcgtgcg

SEQ ID NO: 15113 - DNA, 20 bp, Artificial Sequence
  MKO10015113_A_Dusp5
  gRNA
cgagccgcgcacgctcgacg

SEQ ID NO: 15114 - DNA, 20 bp, Artificial Sequence
  MKO10015114_A_Dusp5
  gRNA
ccctgctgaatgtttcccgc

SEQ ID NO: 15115 - DNA, 20 bp, Artificial Sequence
  MKO10015115_A_Dusp6
  gRNA
acgacgagaatagcagcgac

SEQ ID NO: 15116 - DNA, 20 bp, Artificial Sequence
  MKO10015116_A_Dusp6
  gRNA
attctcgtcgtacagcacca

SEQ ID NO: 15117 - DNA, 20 bp, Artificial Sequence
  MKO10015117_A_Dusp6
  gRNA
aatgtcgtaagcatcgttca

SEQ ID NO: 15118 - DNA, 20 bp, Artificial Sequence
  MKO10015118_A_Dusp7
  gRNA
cgaatcgtcgcacattgaga

SEQ ID NO: 15119 - DNA, 20 bp, Artificial Sequence
  MKO10015119_A_Dusp7
  gRNA
catcggagcgggagcgacga

SEQ ID NO: 15120 - DNA, 20 bp, Artificial Sequence
  MKO10015120_A_Dusp7
  gRNA
aacacgctcgagtccacgtg

SEQ ID NO: 15121 - DNA, 20 bp, Artificial Sequence
  MKO10015121_A_Dusp8
  gRNA
tgtcttctgacgacgcatac

SEQ ID NO: 15122 - DNA, 20 bp, Artificial Sequence
  MKO10015122_A_Dusp8
  gRNA
cccctcaccaataaactcga

SEQ ID NO: 15123 - DNA, 20 bp, Artificial Sequence
  MKO10015123_A_Dusp8
  gRNA
cacacgagatgccagcgtgc

SEQ ID NO: 15124 - DNA, 20 bp, Artificial Sequence
  MKO10015124_A_Dusp9
  gRNA
ccgacatgctccccctccgc

SEQ ID NO: 15125 - DNA, 20 bp, Artificial Sequence
  MKO10015125_A_Dusp9
  gRNA
actcaacgatgcctacgact

SEQ ID NO: 15126 - DNA, 20 bp, Artificial Sequence
  MKO10015126_A_Dusp9
  gRNA
cttccgcttgaccaagtcgt

SEQ ID NO: 15127 - DNA, 20 bp, Artificial Sequence
  MKO10015127_A_Dut
  gRNA
tcacctgaataggtcgtagc

SEQ ID NO: 15128 - DNA, 20 bp, Artificial Sequence
  MKO10015128_A_Dut
  gRNA
gcgcttctctgcgcttcgtg

SEQ ID NO: 15129 - DNA, 20 bp, Artificial Sequence
  MKO10015129_A_Dut
  gRNA
ggggtcgtgctgtttaactt

SEQ ID NO: 15130 - DNA, 20 bp, Artificial Sequence
  MKO10015130_A_Duxbl1
  gRNA
ttccttagccagatgtcctc

SEQ ID NO: 15131 - DNA, 20 bp, Artificial Sequence
  MKO10015131_A_Duxbl1
  gRNA
gcctactggaaaaagaagcc

SEQ ID NO: 15132 - DNA, 20 bp, Artificial Sequence
  MKO10015132_A_Duxbl1
  gRNA
gtttatcctgctcctgctct

SEQ ID NO: 15133 - DNA, 20 bp, Artificial Sequence
  MKO10015133_A_Duxbl2
  gRNA
ttccttagccagatgtcctc

SEQ ID NO: 15134 - DNA, 20 bp, Artificial Sequence
  MKO10015134_A_Duxbl2
  gRNA
gcctactggaaaaagaagcc

SEQ ID NO: 15135 - DNA, 20 bp, Artificial Sequence
  MKO10015135_A_Duxbl2
  gRNA
gtttatcctgctcctgctct

SEQ ID NO: 15136 - DNA, 20 bp, Artificial Sequence
  MKO10015136_A_Duxbl3
  gRNA
ttccttagccagatgtcctc

SEQ ID NO: 15137 - DNA, 20 bp, Artificial Sequence
  MKO10015137_A_Duxbl3
  gRNA
gcctactggaaaaagaagcc

SEQ ID NO: 15138 - DNA, 20 bp, Artificial Sequence
  MKO10015138_A_Duxbl3
  gRNA
gtttatcctgctcctgctct

SEQ ID NO: 15139 - DNA, 20 bp, Artificial Sequence
  MKO10015139_A_Dux
  gRNA
atctgagacccccattcgct

SEQ ID NO: 15140 - DNA, 20 bp, Artificial Sequence
  MKO10015140_A_Dux
  gRNA
gccttctgccagatgagcgc

SEQ ID NO: 15141 - DNA, 20 bp, Artificial Sequence
  MKO10015141_A_Dux
  gRNA
gaaggagctggccaagcgaa

SEQ ID NO: 15142 - DNA, 20 bp, Artificial Sequence
  MKO10015142_A_Dvl1
  gRNA
ccgacgtcgaaaccgcgatg

SEQ ID NO: 15143 - DNA, 20 bp, Artificial Sequence
  MKO10015143_A_Dvl1
  gRNA
cctcatcgcggtttcgacgt

SEQ ID NO: 15144 - DNA, 20 bp, Artificial Sequence
  MKO10015144_A_Dvl1
  gRNA
acccgagaggggatcggcgg

SEQ ID NO: 15145 - DNA, 20 bp, Artificial Sequence
  MKO10015145_A_Dvl2
  gRNA
ccgaatctgtcgtatcactg

SEQ ID NO: 15146 - DNA, 20 bp, Artificial Sequence
  MKO10015146_A_Dvl2
  gRNA
ctcgaggctggagcgccacc

SEQ ID NO: 15147 - DNA, 20 bp, Artificial Sequence
  MKO10015147_A_Dvl2
  gRNA
gcccgcctaccttgcttcaa

SEQ ID NO: 15148 - DNA, 20 bp, Artificial Sequence
  MKO10015148_A_Dvl3
  gRNA
gatgaactgtcatagccgcc

SEQ ID NO: 15149 - DNA, 20 bp, Artificial Sequence
  MKO10015149_A_Dvl3
  gRNA
ccacaaagggtgagcggcga

SEQ ID NO: 15150 - DNA, 20 bp, Artificial Sequence
  MKO10015150_A_Dvl3
  gRNA
gctccgggccatccctccgt

SEQ ID NO: 15151 - DNA, 20 bp, Artificial Sequence
  MKO10015151_A_Dxo
  gRNA
tgctgaccacgccgtatgag

SEQ ID NO: 15152 - DNA, 20 bp, Artificial Sequence
  MKO10015152_A_Dxo
  gRNA
ggccttacctgggatcgtcc

SEQ ID NO: 15153 - DNA, 20 bp, Artificial Sequence
  MKO10015153_A_Dxo
  gRNA
tggggaagttaacaccaacg

SEQ ID NO: 15154 - DNA, 20 bp, Artificial Sequence
  MKO10015154_A_Dydc1
  gRNA
accgatcgctgatctccgct

SEQ ID NO: 15155 - DNA, 20 bp, Artificial Sequence
  MKO10015155_A_Dydc1
  gRNA
acggggcgcctaacttgagc

SEQ ID NO: 15156 - DNA, 20 bp, Artificial Sequence
  MKO10015156_A_Dydc1
  gRNA
aagtcagaagatttcgagac

SEQ ID NO: 15157 - DNA, 20 bp, Artificial Sequence
  MKO10015157_A_Dydc2
  gRNA
catctcagaaatcacacgcg

SEQ ID NO: 15158 - DNA, 20 bp, Artificial Sequence
  MKO10015158_A_Dydc2
  gRNA
cagtgacccaatagagtacc

SEQ ID NO: 15159 - DNA, 20 bp, Artificial Sequence
  MKO10015159_A_Dydc2
  gRNA
agcacgtgacagaagcgctg

SEQ ID NO: 15160 - DNA, 20 bp, Artificial Sequence
  MKO10015160_A_Dym
  gRNA
gttgaaaacaaccctcgaac

SEQ ID NO: 15161 - DNA, 20 bp, Artificial Sequence
  MKO10015161_A_Dym
  gRNA
aaatcttgctgcgctaacta

SEQ ID NO: 15162 - DNA, 20 bp, Artificial Sequence
  MKO10015162_A_Dym
  gRNA
gttcatccgtgagctgtctg

SEQ ID NO: 15163 - DNA, 20 bp, Artificial Sequence
  MKO10015163_A_Dynap
  gRNA
ggtattgttggaattgccaa

SEQ ID NO: 15164 - DNA, 20 bp, Artificial Sequence
  MKO10015164_A_Dynap
  gRNA
gttccttccgttgaacagta

SEQ ID NO: 15165 - DNA, 20 bp, Artificial Sequence
  MKO10015165_A_Dynap
  gRNA
gtggtgtcaggtctaggtga

SEQ ID NO: 15166 - DNA, 20 bp, Artificial Sequence
  MKO10015166_A_Dync1h1
  gRNA
cttcgcaacgttcgtgatga

SEQ ID NO: 15167 - DNA, 20 bp, Artificial Sequence
  MKO10015167_A_Dync1h1
  gRNA
gcgaagcagtgctatgagcg

SEQ ID NO: 15168 - DNA, 20 bp, Artificial Sequence
  MKO10015168_A_Dync1h1
  gRNA
ggaaacgtttgccgtgcttc

SEQ ID NO: 15169 - DNA, 20 bp, Artificial Sequence
  MKO10015169_A_Dync1i1
  gRNA
cgttcaagatgactccgatc

SEQ ID NO: 15170 - DNA, 20 bp, Artificial Sequence
  MKO10015170_A_Dync1i1
  gRNA
ccgtcgtttgcgatccagat

SEQ ID NO: 15171 - DNA, 20 bp, Artificial Sequence
  MKO10015171_A_Dync1i1
  gRNA
aagccaagactcgggcgatc

SEQ ID NO: 15172 - DNA, 20 bp, Artificial Sequence
  MKO10015172_A_Dync1i2
  gRNA
gtgtatgtgacgatttctcg

SEQ ID NO: 15173 - DNA, 20 bp, Artificial Sequence
  MKO10015173_A_Dync1i2
  gRNA
gagatggcgccgtgggatct

SEQ ID NO: 15174 - DNA, 20 bp, Artificial Sequence
  MKO10015174_A_Dync1i2
  gRNA
tctttgggttgagctgtaac

SEQ ID NO: 15175 - DNA, 20 bp, Artificial Sequence
  MKO10015175_A_Dync1li1
  gRNA
ttcgtacagactacgagcac

SEQ ID NO: 15176 - DNA, 20 bp, Artificial Sequence
  MKO10015176_A_Dync1li1
  gRNA
agtgctcgtagtctgtacga

SEQ ID NO: 15177 - DNA, 20 bp, Artificial Sequence
  MKO10015177_A_Dync1li1
  gRNA
tcgcgctccaagctcccgac

SEQ ID NO: 15178 - DNA, 20 bp, Artificial Sequence
  MKO10015178_A_Dync1li2
  gRNA
gccgtccggcaaaaacattc

SEQ ID NO: 15179 - DNA, 20 bp, Artificial Sequence
  MKO10015179_A_Dync1li2
  gRNA
ttgccgacatgtctcgacct

SEQ ID NO: 15180 - DNA, 20 bp, Artificial Sequence
  MKO10015180_A_Dync1li2
  gRNA
agagactccattatcgtcca

SEQ ID NO: 15181 - DNA, 20 bp, Artificial Sequence
  MKO10015181_A_Dync2h1
  gRNA
cctttaccaagcagtacgac

SEQ ID NO: 15182 - DNA, 20 bp, Artificial Sequence
  MKO10015182_A_Dync2h1
  gRNA
gtcacgtatgctgcatctcc

SEQ ID NO: 15183 - DNA, 20 bp, Artificial Sequence
  MKO10015183_A_Dync2h1
  gRNA
gagcttgttctatccaaaac

SEQ ID NO: 15184 - DNA, 20 bp, Artificial Sequence
  MKO10015184_A_Dync2li1
  gRNA
gtacgtgtactccaacgcta

SEQ ID NO: 15185 - DNA, 20 bp, Artificial Sequence
  MKO10015185_A_Dync2li1
  gRNA
agcaaagccgaccttagcgt

SEQ ID NO: 15186 - DNA, 20 bp, Artificial Sequence
  MKO10015186_A_Dync2li1
  gRNA
caatcacagtcgacacctta

SEQ ID NO: 15187 - DNA, 20 bp, Artificial Sequence
  MKO10015187_A_Dynll1
  gRNA
gggtcctcaccttcttgata

SEQ ID NO: 15188 - DNA, 20 bp, Artificial Sequence
  MKO10015188_A_Dynll1
  gRNA
cacaggtaaccatgtgcgac

SEQ ID NO: 15189 - DNA, 20 bp, Artificial Sequence
  MKO10015189_A_Dynll1
  gRNA
acaagaagtacaaccctacc

SEQ ID NO: 15190 - DNA, 20 bp, Artificial Sequence
  MKO10015190_A_Dynll2
  gRNA
tgtatcgtgggccggaattt

SEQ ID NO: 15191 - DNA, 20 bp, Artificial Sequence
  MKO10015191_A_Dynll2
  gRNA
ccacctagcccgacttgaag

SEQ ID NO: 15192 - DNA, 20 bp, Artificial Sequence
  MKO10015192_A_Dynll2
  gRNA
gcagtgtcacgatgtctgac

SEQ ID NO: 15193 - DNA, 20 bp, Artificial Sequence
  MKO10015193_A_Dynlrb1
  gRNA
agcgaattcgaaggaaggtt

SEQ ID NO: 15194 - DNA, 20 bp, Artificial Sequence
  MKO10015194_A_Dynlrb1
  gRNA
ttggcatactgtgtagtggt

SEQ ID NO: 15195 - DNA, 20 bp, Artificial Sequence
  MKO10015195_A_Dynlrb1
  gRNA
cagacagtggcttattcagt

SEQ ID NO: 15196 - DNA, 20 bp, Artificial Sequence
  MKO10015196_A_Dynlrb2
  gRNA
ctccacaacggttcagtatg

SEQ ID NO: 15197 - DNA, 20 bp, Artificial Sequence
  MKO10015197_A_Dynlrb2
  gRNA
cattccaatccgaacaaccc

SEQ ID NO: 15198 - DNA, 20 bp, Artificial Sequence
  MKO10015198_A_Dynlrb2
  gRNA
cgatgacccctttgtgactc

SEQ ID NO: 15199 - DNA, 20 bp, Artificial Sequence
  MKO10015199_A_Dynlt1a
  gRNA
tgaagtgagcagcattgtaa

SEQ ID NO: 15200 - DNA, 20 bp, Artificial Sequence
  MKO10015200_A_Dynlt1a
  gRNA
taggctatagaaagcgccat

SEQ ID NO: 15201 - DNA, 20 bp, Artificial Sequence
  MKO10015201_A_Dynlt1a
  gRNA
ccattaccaatgtatttaaa

SEQ ID NO: 15202 - DNA, 20 bp, Artificial Sequence
  MKO10015202_A_Dynlt1b
  gRNA
tgaagtgagcagcattgtaa

SEQ ID NO: 15203 - DNA, 20 bp, Artificial Sequence
  MKO10015203_A_Dynlt1b
  gRNA
ccattaccaatgtatttaaa

SEQ ID NO: 15204 - DNA, 20 bp, Artificial Sequence
  MKO10015204_A_Dynlt1b
  gRNA
taggctatagaaagcgccat

SEQ ID NO: 15205 - DNA, 20 bp, Artificial Sequence
  MKO10015205_A_Dynlt1c
  gRNA
tgaagtgagcagcattgtaa

SEQ ID NO: 15206 - DNA, 20 bp, Artificial Sequence
  MKO10015206_A_Dynlt1c
  gRNA
ccattaccaatgtatttaaa

SEQ ID NO: 15207 - DNA, 20 bp, Artificial Sequence
  MKO10015207_A_Dynlt1c
  gRNA
taggctatagaaagcgccat

SEQ ID NO: 15208 - DNA, 20 bp, Artificial Sequence
  MKO10015208_A_Dynlt1f
  gRNA
tgaagtgagcagcattgtaa

SEQ ID NO: 15209 - DNA, 20 bp, Artificial Sequence
  MKO10015209_A_Dynlt1f
  gRNA
taggctatagaaagcgccat

SEQ ID NO: 15210 - DNA, 20 bp, Artificial Sequence
  MKO10015210_A_Dynlt1f
  gRNA
ccattaccaatgtatttaaa

SEQ ID NO: 15211 - DNA, 20 bp, Artificial Sequence
  MKO10015211_A_Dynlt3
  gRNA
ccactatgcttgcagtccat

SEQ ID NO: 15212 - DNA, 20 bp, Artificial Sequence
  MKO10015212_A_Dynlt3
  gRNA
agcccataatatagtcaaag

SEQ ID NO: 15213 - DNA, 20 bp, Artificial Sequence
  MKO10015213_A_Dynlt3
  gRNA
gggaaagcttacaagtacat

SEQ ID NO: 15214 - DNA, 20 bp, Artificial Sequence
  MKO10015214_A_Dyrk1a
  gRNA
cttccgctccttcttatgac

SEQ ID NO: 15215 - DNA, 20 bp, Artificial Sequence
  MKO10015215_A_Dyrk1a
  gRNA
ggacgattccagtcataaga

SEQ ID NO: 15216 - DNA, 20 bp, Artificial Sequence
  MKO10015216_A_Dyrk1a
  gRNA
ctctgtaacatgacaatgtc

SEQ ID NO: 15217 - DNA, 20 bp, Artificial Sequence
  MKO10015217_A_Dyrk1b
  gRNA
cacgactacattgtgcgcag

SEQ ID NO: 15218 - DNA, 20 bp, Artificial Sequence
  MKO10015218_A_Dyrk1b
  gRNA
agccccgctgcgcaagctct

SEQ ID NO: 15219 - DNA, 20 bp, Artificial Sequence
  MKO10015219_A_Dyrk1b
  gRNA
tccaccgagagcttgcgcag

SEQ ID NO: 15220 - DNA, 20 bp, Artificial Sequence
  MKO10015220_A_Dyrk2
  gRNA
ggggcccttaccggtcgggt

SEQ ID NO: 15221 - DNA, 20 bp, Artificial Sequence
  MKO10015221_A_Dyrk2
  gRNA
aacccgtcaggagttccgcg

SEQ ID NO: 15222 - DNA, 20 bp, Artificial Sequence
  MKO10015222_A_Dyrk2
  gRNA
cttccccggggatcggcgcg

SEQ ID NO: 15223 - DNA, 20 bp, Artificial Sequence
  MKO10015223_A_Dyrk3
  gRNA
atcgtcgtagccaccgttat

SEQ ID NO: 15224 - DNA, 20 bp, Artificial Sequence
  MKO10015224_A_Dyrk3
  gRNA
ggttgcacttcaccgcgctc

SEQ ID NO: 15225 - DNA, 20 bp, Artificial Sequence
  MKO10015225_A_Dyrk3
  gRNA
cgccgttacctccgctgctg

SEQ ID NO: 15226 - DNA, 20 bp, Artificial Sequence
  MKO10015226_A_Dyrk4
  gRNA
agtgaaccgatgtccacaaa

SEQ ID NO: 15227 - DNA, 20 bp, Artificial Sequence
  MKO10015227_A_Dyrk4
  gRNA
atgggactttgttgccaatc

SEQ ID NO: 15228 - DNA, 20 bp, Artificial Sequence
  MKO10015228_A_Dyrk4
  gRNA
cttactcacctgatactgca

SEQ ID NO: 15229 - DNA, 20 bp, Artificial Sequence
  MKO10015229_A_Dysf
  gRNA
gtggcgtgtaggacacctgc

SEQ ID NO: 15230 - DNA, 20 bp, Artificial Sequence
  MKO10015230_A_Dysf
  gRNA
tagcagaggtgcgttgaagc

SEQ ID NO: 15231 - DNA, 20 bp, Artificial Sequence
  MKO10015231_A_Dysf
  gRNA
agaacagtgtgaaccccgtg

SEQ ID NO: 15232 - DNA, 20 bp, Artificial Sequence
  MKO10015232_A_Dytn
  gRNA
cgggagctgtttcagcgcac

SEQ ID NO: 15233 - DNA, 20 bp, Artificial Sequence
  MKO10015233_A_Dytn
  gRNA
ttgcacagatcgtaatttga

SEQ ID NO: 15234 - DNA, 20 bp, Artificial Sequence
  MKO10015234_A_Dytn
  gRNA
tattcttaaacgtcaacctg

SEQ ID NO: 15235 - DNA, 20 bp, Artificial Sequence
  MKO10015235_A_Dyx1c1
  gRNA
cgcacgcagacgccccgcaa

SEQ ID NO: 15236 - DNA, 20 bp, Artificial Sequence
  MKO10015236_A_Dyx1c1
  gRNA
cgcgatgctgacgtattctg

SEQ ID NO: 15237 - DNA, 20 bp, Artificial Sequence
  MKO10015237_A_Dyx1c1
  gRNA
gtccctgcgcctcgctccgc

SEQ ID NO: 15238 - DNA, 20 bp, Artificial Sequence
  MKO10015238_A_Dzank1
  gRNA
gtcgagcactcgctccctca

SEQ ID NO: 15239 - DNA, 20 bp, Artificial Sequence
  MKO10015239_A_Dzank1
  gRNA
tcgcttcgcagagagtccac

SEQ ID NO: 15240 - DNA, 20 bp, Artificial Sequence
  MKO10015240_A_Dzank1
  gRNA
ccatacctgcaagccgtcta

SEQ ID NO: 15241 - DNA, 20 bp, Artificial Sequence
  MKO10015241_A_Dzip1l
  gRNA
ccagaactccacgttagaag

SEQ ID NO: 15242 - DNA, 20 bp, Artificial Sequence
  MKO10015242_A_Dzip1l
  gRNA
gtggggtacctcttctaacg

SEQ ID NO: 15243 - DNA, 20 bp, Artificial Sequence
  MKO10015243_A_Dzip1l
  gRNA
agcttcgggccaagctcaag

SEQ ID NO: 15244 - DNA, 20 bp, Artificial Sequence
  MKO10015244_A_Dzip1
  gRNA
cgaatacctgatgcactcgc

SEQ ID NO: 15245 - DNA, 20 bp, Artificial Sequence
  MKO10015245_A_Dzip1
  gRNA
gcggctgagcgccatcgacg

SEQ ID NO: 15246 - DNA, 20 bp, Artificial Sequence
  MKO10015246_A_Dzip1
  gRNA
ggagaaggagaagttactcg

SEQ ID NO: 15247 - DNA, 20 bp, Artificial Sequence
  MKO10015247_A_Dzip3
  gRNA
atttctaatagtgcgttaac

SEQ ID NO: 15248 - DNA, 20 bp, Artificial Sequence
  MKO10015248_A_Dzip3
  gRNA
atgatgttacctgcatagtc

SEQ ID NO: 15249 - DNA, 20 bp, Artificial Sequence
  MKO10015249_A_Dzip3
  gRNA
gttacaactcatagccagac

SEQ ID NO: 15250 - DNA, 20 bp, Artificial Sequence
  MKO10015250_A_E030002O03Rik
  gRNA
atccttcaatctgctacgcc

SEQ ID NO: 15251 - DNA, 20 bp, Artificial Sequence
  MKO10015251_A_E030002O03Rik
  gRNA
gggtgctgagtcacgacccc

SEQ ID NO: 15252 - DNA, 20 bp, Artificial Sequence
  MKO10015252_A_E030002O03Rik
  gRNA
tccaattgagctttaccaca

SEQ ID NO: 15253 - DNA, 20 bp, Artificial Sequence
  MKO10015253_A_E030018B13Rik
  gRNA
agtgtgttcagcactcacgc

SEQ ID NO: 15254 - DNA, 20 bp, Artificial Sequence
  MKO10015254_A_E030018B13Rik
  gRNA
atgatgcttcagggaagttc

SEQ ID NO: 15255 - DNA, 20 bp, Artificial Sequence
  MKO10015255_A_E030018B13Rik
  gRNA
ggagtggtcctgcatcacat

SEQ ID NO: 15256 - DNA, 20 bp, Artificial Sequence
  MKO10015256_A_E030019B06Rik
  gRNA
accactggatactcgtcaac

SEQ ID NO: 15257 - DNA, 20 bp, Artificial Sequence
  MKO10015257_A_E030019B06Rik
  gRNA
acctgttgacgagtatccag

SEQ ID NO: 15258 - DNA, 20 bp, Artificial Sequence
  MKO10015258_A_E030019B06Rik
  gRNA
ggagagagaaatctcgtgac

SEQ ID NO: 15259 - DNA, 20 bp, Artificial Sequence
  MKO10015259_A_E030030I06Rik
  gRNA
ccgatcagagtacgagtgct

SEQ ID NO: 15260 - DNA, 20 bp, Artificial Sequence
  MKO10015260_A_E030030I06Rik
  gRNA
ctcgctggcgcttcggaatc

SEQ ID NO: 15261 - DNA, 20 bp, Artificial Sequence
  MKO10015261_A_E030030I06Rik
  gRNA
ctccggaacagctaggacgc

SEQ ID NO: 15262 - DNA, 20 bp, Artificial Sequence
  MKO10015262_A_E130012A19Rik
  gRNA
ttacgcgaaggggttcgccc

SEQ ID NO: 15263 - DNA, 20 bp, Artificial Sequence
  MKO10015263_A_E130012A19Rik
  gRNA
cgtaacaccaaagtttcgag

SEQ ID NO: 15264 - DNA, 20 bp, Artificial Sequence
  MKO10015264_A_E130012A19Rik
  gRNA
tcgggccctcggcgcaaact

SEQ ID NO: 15265 - DNA, 20 bp, Artificial Sequence
  MKO10015265_A_E130308A19Rik
  gRNA
gcggtccaggcctcggcgaa

SEQ ID NO: 15266 - DNA, 20 bp, Artificial Sequence
  MKO10015266_A_E130308A19Rik
  gRNA
tcgcttcatgccattcgccg

SEQ ID NO: 15267 - DNA, 20 bp, Artificial Sequence
  MKO10015267_A_E130308A19Rik
  gRNA
tcgtgttgttgagccagacg

SEQ ID NO: 15268 - DNA, 20 bp, Artificial Sequence
  MKO10015268_A_E130309D02Rik
  gRNA
caacacggggatccgacaca

SEQ ID NO: 15269 - DNA, 20 bp, Artificial Sequence
  MKO10015269_A_E130309D02Rik
  gRNA
gctgatccggtggtgcgtga

SEQ ID NO: 15270 - DNA, 20 bp, Artificial Sequence
  MKO10015270_A_E130309D02Rik
  gRNA
ttcttcccagcggacgcccg

SEQ ID NO: 15271 - DNA, 20 bp, Artificial Sequence
  MKO10015271_A_E130309D14Rik
  gRNA
gttgtgcacgccggcggacc

SEQ ID NO: 15272 - DNA, 20 bp, Artificial Sequence
  MKO10015272_A_E130309D14Rik
  gRNA
cgtggcgactgcgctctcgc

SEQ ID NO: 15273 - DNA, 20 bp, Artificial Sequence
  MKO10015273_A_E130309D14Rik
  gRNA
tcccgcgctagctgcgctca

SEQ ID NO: 15274 - DNA, 20 bp, Artificial Sequence
  MKO10015274_A_E130309F12Rik
  gRNA
acctgagccccttactccga

SEQ ID NO: 15275 - DNA, 20 bp, Artificial Sequence
  MKO10015275_A_E130309F12Rik
  gRNA
agaacgcagtagagcaccag

SEQ ID NO: 15276 - DNA, 20 bp, Artificial Sequence
  MKO10015276_A_E130309F12Rik
  gRNA
cgaatgcactgacacctttc

SEQ ID NO: 15277 - DNA, 20 bp, Artificial Sequence
  MKO10015277_A_E130311K13Rik
  gRNA
actttcgcagaagaaccacg

SEQ ID NO: 15278 - DNA, 20 bp, Artificial Sequence
  MKO10015278_A_E130311K13Rik
  gRNA
actcagttatccgctgtaat

SEQ ID NO: 15279 - DNA, 20 bp, Artificial Sequence
  MKO10015279_A_E130311K13Rik
  gRNA
aagacagttatcacgacagc

SEQ ID NO: 15280 - DNA, 20 bp, Artificial Sequence
  MKO10015280_A_E230008N13Rik
  gRNA
ggggtcatagtttccccctc

SEQ ID NO: 15281 - DNA, 20 bp, Artificial Sequence
  MKO10015281_A_E230008N13Rik
  gRNA
aaactatgacccctcgccag

SEQ ID NO: 15282 - DNA, 20 bp, Artificial Sequence
  MKO10015282_A_E230008N13Rik
  gRNA
agcagtcaagatgtcgccag

SEQ ID NO: 15283 - DNA, 20 bp, Artificial Sequence
  MKO10015283_A_E230019M04Rik
  gRNA
gacatatacctaggattgac

SEQ ID NO: 15284 - DNA, 20 bp, Artificial Sequence
  MKO10015284_A_E230019M04Rik
  gRNA
tacatctactattagagcta

SEQ ID NO: 15285 - DNA, 20 bp, Artificial Sequence
  MKO10015285_A_E230019M04Rik
  gRNA
tgaaacttaccaccagctcc

SEQ ID NO: 15286 - DNA, 20 bp, Artificial Sequence
  MKO10015286_A_E230025N22Rik
  gRNA
taatcctagattaaccgtat

SEQ ID NO: 15287 - DNA, 20 bp, Artificial Sequence
  MKO10015287_A_E230025N22Rik
  gRNA
caccagccaatactcgcagc

SEQ ID NO: 15288 - DNA, 20 bp, Artificial Sequence
  MKO10015288_A_E230025N22Rik
  gRNA
ctgccccctgctgcgagtat

SEQ ID NO: 15289 - DNA, 20 bp, Artificial Sequence
  MKO10015289_A_E2f1
  gRNA
gggattggtaagcggcttga

SEQ ID NO: 15290 - DNA, 20 bp, Artificial Sequence
  MKO10015290_A_E2f1
  gRNA
actgaccatcagtacctcgc

SEQ ID NO: 15291 - DNA, 20 bp, Artificial Sequence
  MKO10015291_A_E2f1
  gRNA
ttctgctacaggtgaaacgg

SEQ ID NO: 15292 - DNA, 20 bp, Artificial Sequence
  MKO10015292_A_E2f2
  gRNA
gacacgctatgacacgtcgc

SEQ ID NO: 15293 - DNA, 20 bp, Artificial Sequence
  MKO10015293_A_E2f2
  gRNA
ccgtgccgtaggcaacttca

SEQ ID NO: 15294 - DNA, 20 bp, Artificial Sequence
  MKO10015294_A_E2f2
  gRNA
ccctgaattccggaccccca

SEQ ID NO: 15295 - DNA, 20 bp, Artificial Sequence
  MKO10015295_A_E2f3
  gRNA
acttcaagtctcgtttctgg

SEQ ID NO: 15296 - DNA, 20 bp, Artificial Sequence
  MKO10015296_A_E2f3
  gRNA
ctccttacctctattgagtc

SEQ ID NO: 15297 - DNA, 20 bp, Artificial Sequence
  MKO10015297_A_E2f3
  gRNA
agtctaagaacaacgtccag

SEQ ID NO: 15298 - DNA, 20 bp, Artificial Sequence
  MKO10015298_A_E2f4
  gRNA
tgtcgtagatccgccgtttc

SEQ ID NO: 15299 - DNA, 20 bp, Artificial Sequence
  MKO10015299_A_E2f4
  gRNA
tggttcaggggcgtcgggcc

SEQ ID NO: 15300 - DNA, 20 bp, Artificial Sequence
  MKO10015300_A_E2f4
  gRNA
acctctagactggtgcccga

SEQ ID NO: 15301 - DNA, 20 bp, Artificial Sequence
  MKO10015301_A_E2f5
  gRNA
aattgaagatctcgaattga

SEQ ID NO: 15302 - DNA, 20 bp, Artificial Sequence
  MKO10015302_A_E2f5
  gRNA
aagaagttatcgatagatta

SEQ ID NO: 15303 - DNA, 20 bp, Artificial Sequence
  MKO10015303_A_E2f5
  gRNA
tttgccaggtgatacactgt

SEQ ID NO: 15304 - DNA, 20 bp, Artificial Sequence
  MKO10015304_A_E2f6
  gRNA
actagcgtatgtaacctatc

SEQ ID NO: 15305 - DNA, 20 bp, Artificial Sequence
  MKO10015305_A_E2f6
  gRNA
gtcttccatggccgacaggt

SEQ ID NO: 15306 - DNA, 20 bp, Artificial Sequence
  MKO10015306_A_E2f6
  gRNA
caactcacatccaccgaatg

SEQ ID NO: 15307 - DNA, 20 bp, Artificial Sequence
  MKO10015307_A_E2f7
  gRNA
tgcctgtcgaccggctttac

SEQ ID NO: 15308 - DNA, 20 bp, Artificial Sequence
  MKO10015308_A_E2f7
  gRNA
tccgttgacaaggggtagct

SEQ ID NO: 15309 - DNA, 20 bp, Artificial Sequence
  MKO10015309_A_E2f7
  gRNA
tcgatcggctcgttcttcat

SEQ ID NO: 15310 - DNA, 20 bp, Artificial Sequence
  MKO10015310_A_E2f8
  gRNA
cgacactcttcagcgtcccg

SEQ ID NO: 15311 - DNA, 20 bp, Artificial Sequence
  MKO10015311_A_E2f8
  gRNA
ggtacttggggtaccgcgct

SEQ ID NO: 15312 - DNA, 20 bp, Artificial Sequence
  MKO10015312_A_E2f8
  gRNA
tgagccgccttgccaaaaac

SEQ ID NO: 15313 - DNA, 20 bp, Artificial Sequence
  MKO10015313_A_E330009J07Rik
  gRNA
cagaatgcgctttcgaagta

SEQ ID NO: 15314 - DNA, 20 bp, Artificial Sequence
  MKO10015314_A_E330009J07Rik
  gRNA
gcgagctggagcgaggcgct

SEQ ID NO: 15315 - DNA, 20 bp, Artificial Sequence
  MKO10015315_A_E330009J07Rik
  gRNA
cctcaagatattgaccttga

SEQ ID NO: 15316 - DNA, 20 bp, Artificial Sequence
  MKO10015316_A_E330014E10Rik
  gRNA
tccatctagcagagcttgca

SEQ ID NO: 15317 - DNA, 20 bp, Artificial Sequence
  MKO10015317_A_E330014E10Rik
  gRNA
ccacactccagaagctagca

SEQ ID NO: 15318 - DNA, 20 bp, Artificial Sequence
  MKO10015318_A_E330014E10Rik
  gRNA
cttaccctagtatctgatgc

SEQ ID NO: 15319 - DNA, 20 bp, Artificial Sequence
  MKO10015319_A_E330017A01Rik
  gRNA
attgtcgttacctcatacgt

SEQ ID NO: 15320 - DNA, 20 bp, Artificial Sequence
  MKO10015320_A_E330017A01Rik
  gRNA
ctgccctcctccaacgtatg

SEQ ID NO: 15321 - DNA, 20 bp, Artificial Sequence
  MKO10015321_A_E330017A01Rik
  gRNA
gcaggtggtaagccacaact

SEQ ID NO: 15322 - DNA, 20 bp, Artificial Sequence
  MKO10015322_A_E330021D16Rik
  gRNA
ctgcaagatgaccgattcta

SEQ ID NO: 15323 - DNA, 20 bp, Artificial Sequence
  MKO10015323_A_E330021D16Rik
  gRNA
gagtccacgaaccacatcgc

SEQ ID NO: 15324 - DNA, 20 bp, Artificial Sequence
  MKO10015324_A_E330021D16Rik
  gRNA
cagcgcctactccatagaat

SEQ ID NO: 15325 - DNA, 20 bp, Artificial Sequence
  MKO10015325_A_E330034G19Rik
  gRNA
tgccctactacagcatcacg

SEQ ID NO: 15326 - DNA, 20 bp, Artificial Sequence
  MKO10015326_A_E330034G19Rik
  gRNA
tgggggccagctcctaccac

SEQ ID NO: 15327 - DNA, 20 bp, Artificial Sequence
  MKO10015327_A_E330034G19Rik
  gRNA
tcaactgattcagctctgtc

SEQ ID NO: 15328 - DNA, 20 bp, Artificial Sequence
  MKO10015328_A_E430018J23Rik
  gRNA
gccctttccggggccatccg

SEQ ID NO: 15329 - DNA, 20 bp, Artificial Sequence
  MKO10015329_A_E430018J23Rik
  gRNA
agggttgtgcaccgcaacag

SEQ ID NO: 15330 - DNA, 20 bp, Artificial Sequence
  MKO10015330_A_E430018J23Rik
  gRNA
ccccggaaagggcctccgct

SEQ ID NO: 15331 - DNA, 20 bp, Artificial Sequence
  MKO10015331_A_E430025E21Rik
  gRNA
ctgatgaacgtctcgttgat

SEQ ID NO: 15332 - DNA, 20 bp, Artificial Sequence
  MKO10015332_A_E430025E21Rik
  gRNA
tgtaagctgctacgaagcac

SEQ ID NO: 15333 - DNA, 20 bp, Artificial Sequence
  MKO10015333_A_E430025E21Rik
  gRNA
gtcatcgaccagaagattga

SEQ ID NO: 15334 - DNA, 20 bp, Artificial Sequence
  MKO10015334_A_E4f1
  gRNA
gacatagcatgcacacgtag

SEQ ID NO: 15335 - DNA, 20 bp, Artificial Sequence
  MKO10015335_A_E4f1
  gRNA
ggtaacgcacagcagccgca

SEQ ID NO: 15336 - DNA, 20 bp, Artificial Sequence
  MKO10015336_A_E4f1
  gRNA
ttcacataccagtgtgccgt

SEQ ID NO: 15337 - DNA, 20 bp, Artificial Sequence
  MKO10015337_A_EU599041
  gRNA
ccagcagtagcatacaaagc

SEQ ID NO: 15338 - DNA, 20 bp, Artificial Sequence
  MKO10015338_A_EU599041
  gRNA
cctgctttgtatgctactgc

SEQ ID NO: 15339 - DNA, 20 bp, Artificial Sequence
  MKO10015339_A_EU599041
  gRNA
ctacatgaaagaatatattc

SEQ ID NO: 15340 - DNA, 20 bp, Artificial Sequence
  MKO10015340_A_Eaf1
  gRNA
attgtcttcgcctgcgctgc

SEQ ID NO: 15341 - DNA, 20 bp, Artificial Sequence
  MKO10015341_A_Eaf1
  gRNA
ttccctttgaacaccgtcat

SEQ ID NO: 15342 - DNA, 20 bp, Artificial Sequence
  MKO10015342_A_Eaf1
  gRNA
gctgtcgtcgtcacttcccg

SEQ ID NO: 15343 - DNA, 20 bp, Artificial Sequence
  MKO10015343_A_Eaf2
  gRNA
tgctacttgtcaccgacttc

SEQ ID NO: 15344 - DNA, 20 bp, Artificial Sequence
  MKO10015344_A_Eaf2
  gRNA
atatcatccattagagacgt

SEQ ID NO: 15345 - DNA, 20 bp, Artificial Sequence
  MKO10015345_A_Eaf2
  gRNA
tacgtaaagtactcatcaga

SEQ ID NO: 15346 - DNA, 20 bp, Artificial Sequence
  MKO10015346_A_Eapp
  gRNA
cacaatgtcgtcatacaggc

SEQ ID NO: 15347 - DNA, 20 bp, Artificial Sequence
  MKO10015347_A_Eapp
  gRNA
tacagcagctcatcgtttgt

SEQ ID NO: 15348 - DNA, 20 bp, Artificial Sequence
  MKO10015348_A_Eapp
  gRNA
accaaaagcgaaaactcatc

SEQ ID NO: 15349 - DNA, 20 bp, Artificial Sequence
  MKO10015349_A_Ear10
  gRNA
ataaggtgttctcctccaac

SEQ ID NO: 15350 - DNA, 20 bp, Artificial Sequence
  MKO10015350_A_Ear10
  gRNA
actgtcataatagttcatat

SEQ ID NO: 15351 - DNA, 20 bp, Artificial Sequence
  MKO10015351_A_Ear10
  gRNA
actgggaagtggtttgtccc

SEQ ID NO: 15352 - DNA, 20 bp, Artificial Sequence
  MKO10015352_A_Ear11
  gRNA
ccacgtaagatctgcaaaaa

SEQ ID NO: 15353 - DNA, 20 bp, Artificial Sequence
  MKO10015353_A_Ear11
  gRNA
aaccaccgggagggggtcaa

SEQ ID NO: 15354 - DNA, 20 bp, Artificial Sequence
  MKO10015354_A_Ear11
  gRNA
tctgcagttggaataatgac

SEQ ID NO: 15355 - DNA, 20 bp, Artificial Sequence
  MKO10015355_A_Ear12
  gRNA
tagtactccaatgatcttct

SEQ ID NO: 15356 - DNA, 20 bp, Artificial Sequence
  MKO10015356_A_Ear12
  gRNA
agtcgagactcaagcagctt

SEQ ID NO: 15357 - DNA, 20 bp, Artificial Sequence
  MKO10015357_A_Ear12
  gRNA
ataccaaccaagaagatcat

SEQ ID NO: 15358 - DNA, 20 bp, Artificial Sequence
  MKO10015358_A_Ear14
  gRNA
cccgatgtgatgctgtaatg

SEQ ID NO: 15359 - DNA, 20 bp, Artificial Sequence
  MKO10015359_A_Ear14
  gRNA
caatgcagataccaaacgac

SEQ ID NO: 15360 - DNA, 20 bp, Artificial Sequence
  MKO10015360_A_Ear14
  gRNA
acttcactgaacctgtcgtt

SEQ ID NO: 15361 - DNA, 20 bp, Artificial Sequence
  MKO10015361_A_Ear1
  gRNA
ttgaaatgatgcgtattaac

SEQ ID NO: 15362 - DNA, 20 bp, Artificial Sequence
  MKO10015362_A_Ear1
  gRNA
gcatcatttcaacattacat

SEQ ID NO: 15363 - DNA, 20 bp, Artificial Sequence
  MKO10015363_A_Ear1
  gRNA
tggtattattattgatatgc

SEQ ID NO: 15364 - DNA, 20 bp, Artificial Sequence
  MKO10015364_A_Ear2
  gRNA
tagtactccaatgatcttct

SEQ ID NO: 15365 - DNA, 20 bp, Artificial Sequence
  MKO10015365_A_Ear2
  gRNA
agtcgagactcaagcagctt

SEQ ID NO: 15366 - DNA, 20 bp, Artificial Sequence
  MKO10015366_A_Ear2
  gRNA
ataccaaccaagaagatcat

SEQ ID NO: 15367 - DNA, 20 bp, Artificial Sequence
  MKO10015367_A_Ear3
  gRNA
tagtactccaatgatcttct

SEQ ID NO: 15368 - DNA, 20 bp, Artificial Sequence
  MKO10015368_A_Ear3
  gRNA
agtcgagactcaagcagctt

SEQ ID NO: 15369 - DNA, 20 bp, Artificial Sequence
  MKO10015369_A_Ear3
  gRNA
ataccaaccaagaagatcat

SEQ ID NO: 15370 - DNA, 20 bp, Artificial Sequence
  MKO10015370_A_Ear4
  gRNA
cccgatgtgatgctgtaatg

SEQ ID NO: 15371 - DNA, 20 bp, Artificial Sequence
  MKO10015371_A_Ear4
  gRNA
caatgcagataccaaacgac

SEQ ID NO: 15372 - DNA, 20 bp, Artificial Sequence
  MKO10015372_A_Ear4
  gRNA
acttcactgaacctgtcgtt

SEQ ID NO: 15373 - DNA, 20 bp, Artificial Sequence
  MKO10015373_A_Ear5
  gRNA
ggataggtgggacggtcctt

SEQ ID NO: 15374 - DNA, 20 bp, Artificial Sequence
  MKO10015374_A_Ear5
  gRNA
tgtcccgtctttgcaagtct

SEQ ID NO: 15375 - DNA, 20 bp, Artificial Sequence
  MKO10015375_A_Ear5
  gRNA
gatgaactatcatgacaatt

SEQ ID NO: 15376 - DNA, 20 bp, Artificial Sequence
  MKO10015376_A_Ear6
  gRNA
gcaaaccactgggatgcggt

SEQ ID NO: 15377 - DNA, 20 bp, Artificial Sequence
  MKO10015377_A_Ear6
  gRNA
actccactgatccctttgtt

SEQ ID NO: 15378 - DNA, 20 bp, Artificial Sequence
  MKO10015378_A_Ear6
  gRNA
agaaaccaaccgcatcccag

SEQ ID NO: 15379 - DNA, 20 bp, Artificial Sequence
  MKO10015379_A_Ear7
  gRNA
gcaaaccactgggatgcggt

SEQ ID NO: 15380 - DNA, 20 bp, Artificial Sequence
  MKO10015380_A_Ear7
  gRNA
actccactgatccctttgtt

SEQ ID NO: 15381 - DNA, 20 bp, Artificial Sequence
  MKO10015381_A_Ear7
  gRNA
agaaaccaaccgcatcccag

SEQ ID NO: 15382 - DNA, 20 bp, Artificial Sequence
  MKO10015382_A_Ears2
  gRNA
agtggcaggtgatccgcgtc

SEQ ID NO: 15383 - DNA, 20 bp, Artificial Sequence
  MKO10015383_A_Ears2
  gRNA
ttacacagtttgacctgacg

SEQ ID NO: 15384 - DNA, 20 bp, Artificial Sequence
  MKO10015384_A_Ears2
  gRNA
cacctgatgagagtccccgc

SEQ ID NO: 15385 - DNA, 20 bp, Artificial Sequence
  MKO10015385_A_Ebag9
  gRNA
cccacaagtgtaaagatcga

SEQ ID NO: 15386 - DNA, 20 bp, Artificial Sequence
  MKO10015386_A_Ebag9
  gRNA
ttattcgtctgtccctaagc

SEQ ID NO: 15387 - DNA, 20 bp, Artificial Sequence
  MKO10015387_A_Ebag9
  gRNA
gtcatgtccttgaagtagtc

SEQ ID NO: 15388 - DNA, 20 bp, Artificial Sequence
  MKO10015388_A_Ebf1
  gRNA
ccggtagtggatcccattat

SEQ ID NO: 15389 - DNA, 20 bp, Artificial Sequence
  MKO10015389_A_Ebf1
  gRNA
gagcctcaccattgctgtag

SEQ ID NO: 15390 - DNA, 20 bp, Artificial Sequence
  MKO10015390_A_Ebf1
  gRNA
gattgagaggacggcctttg

SEQ ID NO: 15391 - DNA, 20 bp, Artificial Sequence
  MKO10015391_A_Ebf2
  gRNA
agtcgatgagcctgacatac

SEQ ID NO: 15392 - DNA, 20 bp, Artificial Sequence
  MKO10015392_A_Ebf2
  gRNA
cttgtagtgagtaccattgt

SEQ ID NO: 15393 - DNA, 20 bp, Artificial Sequence
  MKO10015393_A_Ebf2
  gRNA
agcaacctccttcaaacttg

SEQ ID NO: 15394 - DNA, 20 bp, Artificial Sequence
  MKO10015394_A_Ebf3
  gRNA
cgctcgtggatgcacacggc

SEQ ID NO: 15395 - DNA, 20 bp, Artificial Sequence
  MKO10015395_A_Ebf3
  gRNA
gcgcggggggacgaccatga

SEQ ID NO: 15396 - DNA, 20 bp, Artificial Sequence
  MKO10015396_A_Ebf3
  gRNA
gaaattggatttccggaggt

SEQ ID NO: 15397 - DNA, 20 bp, Artificial Sequence
  MKO10015397_A_Ebf4
  gRNA
tattgactccatgtcgaagc

SEQ ID NO: 15398 - DNA, 20 bp, Artificial Sequence
  MKO10015398_A_Ebf4
  gRNA
acgggatccattaccgcctt

SEQ ID NO: 15399 - DNA, 20 bp, Artificial Sequence
  MKO10015399_A_Ebf4
  gRNA
cacagccttcatcgacttcg

SEQ ID NO: 15400 - DNA, 20 bp, Artificial Sequence
  MKO10015400_A_Ebi3
  gRNA
tcaagtaccgactccgctac

SEQ ID NO: 15401 - DNA, 20 bp, Artificial Sequence
  MKO10015401_A_Ebi3
  gRNA
ctcggcgccggtagcggagt

SEQ ID NO: 15402 - DNA, 20 bp, Artificial Sequence
  MKO10015402_A_Ebi3
  gRNA
cgacgtgcacctgttctcca

SEQ ID NO: 15403 - DNA, 20 bp, Artificial Sequence
  MKO10015403_A_Ebna1bp2
  gRNA
ccaagcaacttcgagcgctt

SEQ ID NO: 15404 - DNA, 20 bp, Artificial Sequence
  MKO10015404_A_Ebna1bp2
  gRNA
cctaagcgctcgaagttgct

SEQ ID NO: 15405 - DNA, 20 bp, Artificial Sequence
  MKO10015405_A_Ebna1bp2
  gRNA
ataccgcaagcactgctgcc

SEQ ID NO: 15406 - DNA, 20 bp, Artificial Sequence
  MKO10015406_A_Ebpl
  gRNA
ctggctctgctacgactcac

SEQ ID NO: 15407 - DNA, 20 bp, Artificial Sequence
  MKO10015407_A_Ebpl
  gRNA
ggggcttccgacgagccact

SEQ ID NO: 15408 - DNA, 20 bp, Artificial Sequence
  MKO10015408_A_Ebpl
  gRNA
gcccatctaggacaacagtc

SEQ ID NO: 15409 - DNA, 20 bp, Artificial Sequence
  MKO10015409_A_Ebp
  gRNA
cgggtgcaaggggaccgtat

SEQ ID NO: 15410 - DNA, 20 bp, Artificial Sequence
  MKO10015410_A_Ebp
  gRNA
cctcccgacttcgcatatcc

SEQ ID NO: 15411 - DNA, 20 bp, Artificial Sequence
  MKO10015411_A_Ebp
  gRNA
taggccaccccgtttatttc

SEQ ID NO: 15412 - DNA, 20 bp, Artificial Sequence
  MKO10015412_A_Ecd
  gRNA
ttaggtcaatggggtcccgt

SEQ ID NO: 15413 - DNA, 20 bp, Artificial Sequence
  MKO10015413_A_Ecd
  gRNA
gtcatgccgtacatatgagc

SEQ ID NO: 15414 - DNA, 20 bp, Artificial Sequence
  MKO10015414_A_Ecd
  gRNA
cttgagcaccgccacaatgc

SEQ ID NO: 15415 - DNA, 20 bp, Artificial Sequence
  MKO10015415_A_Ece1
  gRNA
aaggccaaccccgtgcccga

SEQ ID NO: 15416 - DNA, 20 bp, Artificial Sequence
  MKO10015416_A_Ece1
  gRNA
tagtttcgttcatgcacgca

SEQ ID NO: 15417 - DNA, 20 bp, Artificial Sequence
  MKO10015417_A_Ece1
  gRNA
ccccacagtagacccgtgcc

SEQ ID NO: 15418 - DNA, 20 bp, Artificial Sequence
  MKO10015418_A_Ece2
  gRNA
gaacgtcgcgctgcacgagt

SEQ ID NO: 15419 - DNA, 20 bp, Artificial Sequence
  MKO10015419_A_Ece2
  gRNA
ctcgtgcagcgcgacgttca

SEQ ID NO: 15420 - DNA, 20 bp, Artificial Sequence
  MKO10015420_A_Ece2
  gRNA
gaccatggatgttcgagcac

SEQ ID NO: 15421 - DNA, 20 bp, Artificial Sequence
  MKO10015421_A_Ecel1
  gRNA
cgcgtacaacaaagtgactc

SEQ ID NO: 15422 - DNA, 20 bp, Artificial Sequence
  MKO10015422_A_Ecel1
  gRNA
tcatccgctccacacctcga

SEQ ID NO: 15423 - DNA, 20 bp, Artificial Sequence
  MKO10015423_A_Ecel1
  gRNA
gcagcgtctactcagactac

SEQ ID NO: 15424 - DNA, 20 bp, Artificial Sequence
  MKO10015424_A_Ech1
  gRNA
agcccggcagtccgagtctt

SEQ ID NO: 15425 - DNA, 20 bp, Artificial Sequence
  MKO10015425_A_Ech1
  gRNA
atgatgcggcccgcatagcc

SEQ ID NO: 15426 - DNA, 20 bp, Artificial Sequence
  MKO10015426_A_Ech1
  gRNA
ctggccggtttagctgcacg

SEQ ID NO: 15427 - DNA, 20 bp, Artificial Sequence
  MKO10015427_A_Echdc1
  gRNA
tcgctttataatacgagtca

SEQ ID NO: 15428 - DNA, 20 bp, Artificial Sequence
  MKO10015428_A_Echdc1
  gRNA
accgttaataagtgttgctc

SEQ ID NO: 15429 - DNA, 20 bp, Artificial Sequence
  MKO10015429_A_Echdc1
  gRNA
caatgccgttctgcttcttt

SEQ ID NO: 15430 - DNA, 20 bp, Artificial Sequence
  MKO10015430_A_Echdc2
  gRNA
cccaagtacctgctattcgg

SEQ ID NO: 15431 - DNA, 20 bp, Artificial Sequence
  MKO10015431_A_Echdc2
  gRNA
aagttccaagcccccgccta

SEQ ID NO: 15432 - DNA, 20 bp, Artificial Sequence
  MKO10015432_A_Echdc2
  gRNA
acctaatgcccgcaatgcct

SEQ ID NO: 15433 - DNA, 20 bp, Artificial Sequence
  MKO10015433_A_Echdc3
  gRNA
cgaggaagtaggcggttcta

SEQ ID NO: 15434 - DNA, 20 bp, Artificial Sequence
  MKO10015434_A_Echdc3
  gRNA
ggtagacaacctggccttgc

SEQ ID NO: 15435 - DNA, 20 bp, Artificial Sequence
  MKO10015435_A_Echdc3
  gRNA
atacctcagcgtgataatca

SEQ ID NO: 15436 - DNA, 20 bp, Artificial Sequence
  MKO10015436_A_Echs1
  gRNA
cagagactcacccgagcagt

SEQ ID NO: 15437 - DNA, 20 bp, Artificial Sequence
  MKO10015437_A_Echs1
  gRNA
ggatttctggctgtccgaac

SEQ ID NO: 15438 - DNA, 20 bp, Artificial Sequence
  MKO10015438_A_Echs1
  gRNA
aatgcagaaccgaacatttc

SEQ ID NO: 15439 - DNA, 20 bp, Artificial Sequence
  MKO10015439_A_Eci1
  gRNA
ccgacgtgaggatgacacct

SEQ ID NO: 15440 - DNA, 20 bp, Artificial Sequence
  MKO10015440_A_Eci1
  gRNA
cttcgctaacaagcgggtgc

SEQ ID NO: 15441 - DNA, 20 bp, Artificial Sequence
  MKO10015441_A_Eci1
  gRNA
agggggcaacaatgcccagc

SEQ ID NO: 15442 - DNA, 20 bp, Artificial Sequence
  MKO10015442_A_Eci2
  gRNA
actctatgcactgtacaagc

SEQ ID NO: 15443 - DNA, 20 bp, Artificial Sequence
  MKO10015443_A_Eci2
  gRNA
ttgacaaagtcaagcatacc

SEQ ID NO: 15444 - DNA, 20 bp, Artificial Sequence
  MKO10015444_A_Eci2
  gRNA
catgacagtgttatcagtgc

SEQ ID NO: 15445 - DNA, 20 bp, Artificial Sequence
  MKO10015445_A_Eci3
  gRNA
cctcagtatcttagtagacg

SEQ ID NO: 15446 - DNA, 20 bp, Artificial Sequence
  MKO10015446_A_Eci3
  gRNA
ccacgtctactaagatactg

SEQ ID NO: 15447 - DNA, 20 bp, Artificial Sequence
  MKO10015447_A_Eci3
  gRNA
tatgactgagttatccgtgc

SEQ ID NO: 15448 - DNA, 20 bp, Artificial Sequence
  MKO10015448_A_Ecm1
  gRNA
ggccagtcttcctcgtacac

SEQ ID NO: 15449 - DNA, 20 bp, Artificial Sequence
  MKO10015449_A_Ecm1
  gRNA
actcggagtctccgggtttg

SEQ ID NO: 15450 - DNA, 20 bp, Artificial Sequence
  MKO10015450_A_Ecm1
  gRNA
gctctggcgtcatctctcgc

SEQ ID NO: 15451 - DNA, 20 bp, Artificial Sequence
  MKO10015451_A_Ecm2
  gRNA
tataggggcacgccttgggg

SEQ ID NO: 15452 - DNA, 20 bp, Artificial Sequence
  MKO10015452_A_Ecm2
  gRNA
aacgcagctgatagtcctgt

SEQ ID NO: 15453 - DNA, 20 bp, Artificial Sequence
  MKO10015453_A_Ecm2
  gRNA
gcactctccttccggtttaa

SEQ ID NO: 15454 - DNA, 20 bp, Artificial Sequence
  MKO10015454_A_Ecscr
  gRNA
tacgacaactcagacctcgc

SEQ ID NO: 15455 - DNA, 20 bp, Artificial Sequence
  MKO10015455_A_Ecscr
  gRNA
tgcgaggtctgagttgtcgt

SEQ ID NO: 15456 - DNA, 20 bp, Artificial Sequence
  MKO10015456_A_Ecscr
  gRNA
agttagcactgactctgatg

SEQ ID NO: 15457 - DNA, 20 bp, Artificial Sequence
  MKO10015457_A_Ecsit
  gRNA
gcgcacaatgtgcgcaagcg

SEQ ID NO: 15458 - DNA, 20 bp, Artificial Sequence
  MKO10015458_A_Ecsit
  gRNA
agatgcgctggataacgttg

SEQ ID NO: 15459 - DNA, 20 bp, Artificial Sequence
  MKO10015459_A_Ecsit
  gRNA
agtgccccgagatcttcccc

SEQ ID NO: 15460 - DNA, 20 bp, Artificial Sequence
  MKO10015460_A_Ect2l
  gRNA
tattcaaagctcgaccccct

SEQ ID NO: 15461 - DNA, 20 bp, Artificial Sequence
  MKO10015461_A_Ect2l
  gRNA
gaattcccgccgttgcttgt

SEQ ID NO: 15462 - DNA, 20 bp, Artificial Sequence
  MKO10015462_A_Ect2l
  gRNA
ctggaagtttctaacggaac

SEQ ID NO: 15463 - DNA, 20 bp, Artificial Sequence
  MKO10015463_A_Ect2
  gRNA
ttgtacgagtatgctgaacc

SEQ ID NO: 15464 - DNA, 20 bp, Artificial Sequence
  MKO10015464_A_Ect2
  gRNA
agcatactcgtacaatacag

SEQ ID NO: 15465 - DNA, 20 bp, Artificial Sequence
  MKO10015465_A_Ect2
  gRNA
cattgagtccatctttacac

SEQ ID NO: 15466 - DNA, 20 bp, Artificial Sequence
  MKO10015466_A_Eda2r
  gRNA
ttctaccgaaagacacgcat

SEQ ID NO: 15467 - DNA, 20 bp, Artificial Sequence
  MKO10015467_A_Eda2r
  gRNA
ggcccccaatgcgtgtcttt

SEQ ID NO: 15468 - DNA, 20 bp, Artificial Sequence
  MKO10015468_A_Eda2r
  gRNA
tggagctgcagtcatcatcc

SEQ ID NO: 15469 - DNA, 20 bp, Artificial Sequence
  MKO10015469_A_Edaradd
  gRNA
tttacctgaaaggggatctt

SEQ ID NO: 15470 - DNA, 20 bp, Artificial Sequence
  MKO10015470_A_Edaradd
  gRNA
agcaccaaagatcccctttc

SEQ ID NO: 15471 - DNA, 20 bp, Artificial Sequence
  MKO10015471_A_Edaradd
  gRNA
aagtatcccattcaagacac

SEQ ID NO: 15472 - DNA, 20 bp, Artificial Sequence
  MKO10015472_A_Edar
  gRNA
atggaaaacgacgctgagtg

SEQ ID NO: 15473 - DNA, 20 bp, Artificial Sequence
  MKO10015473_A_Edar
  gRNA
gtctttagtgccgtatccac

SEQ ID NO: 15474 - DNA, 20 bp, Artificial Sequence
  MKO10015474_A_Edar
  gRNA
gcacactcatccagcacttc

SEQ ID NO: 15475 - DNA, 20 bp, Artificial Sequence
  MKO10015475_A_Eda
  gRNA
ttcccttcgcccgcccgagc

SEQ ID NO: 15476 - DNA, 20 bp, Artificial Sequence
  MKO10015476_A_Eda
  gRNA
tccgaattgcggcgggaacg

SEQ ID NO: 15477 - DNA, 20 bp, Artificial Sequence
  MKO10015477_A_Eda
  gRNA
cctggggggccgttgggccc

SEQ ID NO: 15478 - DNA, 20 bp, Artificial Sequence
  MKO10015478_A_Edc3
  gRNA
cggagccgattgtgtaccgt

SEQ ID NO: 15479 - DNA, 20 bp, Artificial Sequence
  MKO10015479_A_Edc3
  gRNA
tacaggagttgtgccgacga

SEQ ID NO: 15480 - DNA, 20 bp, Artificial Sequence
  MKO10015480_A_Edc3
  gRNA
agtccaaaagcttccgtcgt

SEQ ID NO: 15481 - DNA, 20 bp, Artificial Sequence
  MKO10015481_A_Edc4
  gRNA
ggtggcatggtccgtatacc

SEQ ID NO: 15482 - DNA, 20 bp, Artificial Sequence
  MKO10015482_A_Edc4
  gRNA
ggtaactcaacgaacaaacc

SEQ ID NO: 15483 - DNA, 20 bp, Artificial Sequence
  MKO10015483_A_Edc4
  gRNA
gttgctcccccgagccttgc

SEQ ID NO: 15484 - DNA, 20 bp, Artificial Sequence
  MKO10015484_A_Eddm3b
  gRNA
gatgagactttctacaggat

SEQ ID NO: 15485 - DNA, 20 bp, Artificial Sequence
  MKO10015485_A_Eddm3b
  gRNA
tgaggaccttaatgggagtc

SEQ ID NO: 15486 - DNA, 20 bp, Artificial Sequence
  MKO10015486_A_Eddm3b
  gRNA
tcacggctttatctgtcatg

SEQ ID NO: 15487 - DNA, 20 bp, Artificial Sequence
  MKO10015487_A_Edem1
  gRNA
aacttgcggagcaacgatac

SEQ ID NO: 15488 - DNA, 20 bp, Artificial Sequence
  MKO10015488_A_Edem1
  gRNA
ttatcgtagcttcgaagacc

SEQ ID NO: 15489 - DNA, 20 bp, Artificial Sequence
  MKO10015489_A_Edem1
  gRNA
ctgtcacttacccgaggata

SEQ ID NO: 15490 - DNA, 20 bp, Artificial Sequence
  MKO10015490_A_Edem2
  gRNA
tcgaaccagggagcgagtca

SEQ ID NO: 15491 - DNA, 20 bp, Artificial Sequence
  MKO10015491_A_Edem2
  gRNA
gcaacccttacctcggatgt

SEQ ID NO: 15492 - DNA, 20 bp, Artificial Sequence
  MKO10015492_A_Edem2
  gRNA
ccacgcctacgacagttacc

SEQ ID NO: 15493 - DNA, 20 bp, Artificial Sequence
  MKO10015493_A_Edem3
  gRNA
aggcgtcatccacatcgccc

SEQ ID NO: 15494 - DNA, 20 bp, Artificial Sequence
  MKO10015494_A_Edem3
  gRNA
ggcgatgtggatgacgcctt

SEQ ID NO: 15495 - DNA, 20 bp, Artificial Sequence
  MKO10015495_A_Edem3
  gRNA
cctaacactgattgattctt

SEQ ID NO: 15496 - DNA, 20 bp, Artificial Sequence
  MKO10015496_A_Edf1
  gRNA
tcgtttcaggcctcaagctc

SEQ ID NO: 15497 - DNA, 20 bp, Artificial Sequence
  MKO10015497_A_Edf1
  gRNA
ctttgtgttcatttcgcctt

SEQ ID NO: 15498 - DNA, 20 bp, Artificial Sequence
  MKO10015498_A_Edf1
  gRNA
tcagcgacgaggagaagatg

SEQ ID NO: 15499 - DNA, 20 bp, Artificial Sequence
  MKO10015499_A_Edil3
  gRNA
gagataagcgaagcctatcg

SEQ ID NO: 15500 - DNA, 20 bp, Artificial Sequence
  MKO10015500_A_Edil3
  gRNA
tgaatcccattaaatccccg

SEQ ID NO: 15501 - DNA, 20 bp, Artificial Sequence
  MKO10015501_A_Edil3
  gRNA
tccacaacactagagcagtt

SEQ ID NO: 15502 - DNA, 20 bp, Artificial Sequence
  MKO10015502_A_Edn1
  gRNA
aataggcgcgtcgtaccgta

SEQ ID NO: 15503 - DNA, 20 bp, Artificial Sequence
  MKO10015503_A_Edn1
  gRNA
cgcactgacatctaactgcc

SEQ ID NO: 15504 - DNA, 20 bp, Artificial Sequence
  MKO10015504_A_Edn1
  gRNA
ttgggagccgaactcagcac

SEQ ID NO: 15505 - DNA, 20 bp, Artificial Sequence
  MKO10015505_A_Edn2
  gRNA
aggagcatcgacgaaaacgc

SEQ ID NO: 15506 - DNA, 20 bp, Artificial Sequence
  MKO10015506_A_Edn2
  gRNA
ccacctaccagtgtcttcga

SEQ ID NO: 15507 - DNA, 20 bp, Artificial Sequence
  MKO10015507_A_Edn2
  gRNA
ccaccaagctccgctttgcc

SEQ ID NO: 15508 - DNA, 20 bp, Artificial Sequence
  MKO10015508_A_Edn3
  gRNA
gtacaacgcaagcgtgtcca

SEQ ID NO: 15509 - DNA, 20 bp, Artificial Sequence
  MKO10015509_A_Edn3
  gRNA
ttagatccagctaaggccgg

SEQ ID NO: 15510 - DNA, 20 bp, Artificial Sequence
  MKO10015510_A_Edn3
  gRNA
acgcttgcgttgtacttgta

SEQ ID NO: 15511 - DNA, 20 bp, Artificial Sequence
  MKO10015511_A_Ednra
  gRNA
caagacggtgatgcccacgg

SEQ ID NO: 15512 - DNA, 20 bp, Artificial Sequence
  MKO10015512_A_Ednra
  gRNA
catggtacccttcgaataca

SEQ ID NO: 15513 - DNA, 20 bp, Artificial Sequence
  MKO10015513_A_Ednra
  gRNA
cagctcgcccttgtattcga

SEQ ID NO: 15514 - DNA, 20 bp, Artificial Sequence
  MKO10015514_A_Ednrb
  gRNA
atgattacgtcggactacaa

SEQ ID NO: 15515 - DNA, 20 bp, Artificial Sequence
  MKO10015515_A_Ednrb
  gRNA
gatatcgagctgttgcttct

SEQ ID NO: 15516 - DNA, 20 bp, Artificial Sequence
  MKO10015516_A_Ednrb
  gRNA
tgatgacctgcgaaatgctc

SEQ ID NO: 15517 - DNA, 20 bp, Artificial Sequence
  MKO10015517_A_Eea1
  gRNA
ttaccttaagtgaggcctgt

SEQ ID NO: 15518 - DNA, 20 bp, Artificial Sequence
  MKO10015518_A_Eea1
  gRNA
tttcagactcctgggcgagt

SEQ ID NO: 15519 - DNA, 20 bp, Artificial Sequence
  MKO10015519_A_Eea1
  gRNA
ccttgagagccaactcgccc

SEQ ID NO: 15520 - DNA, 20 bp, Artificial Sequence
  MKO10015520_A_Eed
  gRNA
cttatacgaatgccattcac

SEQ ID NO: 15521 - DNA, 20 bp, Artificial Sequence
  MKO10015521_A_Eed
  gRNA
ggcgtatttgtgggcgtgtc

SEQ ID NO: 15522 - DNA, 20 bp, Artificial Sequence
  MKO10015522_A_Eed
  gRNA
accgtatctccccctgtgaa

SEQ ID NO: 15523 - DNA, 20 bp, Artificial Sequence
  MKO10015523_A_Eef1a1
  gRNA
aagtcacttacattagcact

SEQ ID NO: 15524 - DNA, 20 bp, Artificial Sequence
  MKO10015524_A_Eef1a1
  gRNA
gagactggtgttctcaagcc

SEQ ID NO: 15525 - DNA, 20 bp, Artificial Sequence
  MKO10015525_A_Eef1a1
  gRNA
agtcgcaggggcttgtcagt

SEQ ID NO: 15526 - DNA, 20 bp, Artificial Sequence
  MKO10015526_A_Eef1a2
  gRNA
atcatagcgcttctcgctgt

SEQ ID NO: 15527 - DNA, 20 bp, Artificial Sequence
  MKO10015527_A_Eef1a2
  gRNA
ggactgcgcagtgctgatcg

SEQ ID NO: 15528 - DNA, 20 bp, Artificial Sequence
  MKO10015528_A_Eef1a2
  gRNA
ggaggataccggtctccact

SEQ ID NO: 15529 - DNA, 20 bp, Artificial Sequence
  MKO10015529_A_Eef1b2
  gRNA
tgatgtgattataccaacgt

SEQ ID NO: 15530 - DNA, 20 bp, Artificial Sequence
  MKO10015530_A_Eef1b2
  gRNA
acctgtgtcatgccctacgt

SEQ ID NO: 15531 - DNA, 20 bp, Artificial Sequence
  MKO10015531_A_Eef1b2
  gRNA
acttacaggagccccacacc

SEQ ID NO: 15532 - DNA, 20 bp, Artificial Sequence
  MKO10015532_A_Eef1d
  gRNA
agtccttacctggcgggagc

SEQ ID NO: 15533 - DNA, 20 bp, Artificial Sequence
  MKO10015533_A_Eef1d
  gRNA
ttcacctactccccgagcca

SEQ ID NO: 15534 - DNA, 20 bp, Artificial Sequence
  MKO10015534_A_Eef1d
  gRNA
tgtgacctccggctcccgcc

SEQ ID NO: 15535 - DNA, 20 bp, Artificial Sequence
  MKO10015535_A_Eef1e1
  gRNA
cgccacccatctagtcaagc

SEQ ID NO: 15536 - DNA, 20 bp, Artificial Sequence
  MKO10015536_A_Eef1e1
  gRNA
agtacagcaggatgtccgcc

SEQ ID NO: 15537 - DNA, 20 bp, Artificial Sequence
  MKO10015537_A_Eef1e1
  gRNA
aaatactcactataaagcgg

SEQ ID NO: 15538 - DNA, 20 bp, Artificial Sequence
  MKO10015538_A_Eef1g
  gRNA
caaattaccataataggcaa

SEQ ID NO: 15539 - DNA, 20 bp, Artificial Sequence
  MKO10015539_A_Eef1g
  gRNA
caaagcgtacctgtttgttg

SEQ ID NO: 15540 - DNA, 20 bp, Artificial Sequence
  MKO10015540_A_Eef1g
  gRNA
tccacaggttccagcatttg

SEQ ID NO: 15541 - DNA, 20 bp, Artificial Sequence
  MKO10015541_A_Eef2k
  gRNA
gtagcgcttggccacgtagt

SEQ ID NO: 15542 - DNA, 20 bp, Artificial Sequence
  MKO10015542_A_Eef2k
  gRNA
ggccaagcgctacatcgagc

SEQ ID NO: 15543 - DNA, 20 bp, Artificial Sequence
  MKO10015543_A_Eef2k
  gRNA
tttctcgatcgcatgcttcc

SEQ ID NO: 15544 - DNA, 20 bp, Artificial Sequence
  MKO10015544_A_Eef2
  gRNA
ccctcagattgaccccgtcc

SEQ ID NO: 15545 - DNA, 20 bp, Artificial Sequence
  MKO10015545_A_Eef2
  gRNA
tgaagcgcgtctccccagct

SEQ ID NO: 15546 - DNA, 20 bp, Artificial Sequence
  MKO10015546_A_Eef2
  gRNA
gcgcttcactgacactcgca

SEQ ID NO: 15547 - DNA, 20 bp, Artificial Sequence
  MKO10015547_A_Eefsec
  gRNA
gggtgcaccgattattcccg

SEQ ID NO: 15548 - DNA, 20 bp, Artificial Sequence
  MKO10015548_A_Eefsec
  gRNA
ggtccagaggggtctctcgt

SEQ ID NO: 15549 - DNA, 20 bp, Artificial Sequence
  MKO10015549_A_Eefsec
  gRNA
ccctggggcgtggccggctt

SEQ ID NO: 15550 - DNA, 20 bp, Artificial Sequence
  MKO10015550_A_Eepd1
  gRNA
tcctgcccaacatccgcaag

SEQ ID NO: 15551 - DNA, 20 bp, Artificial Sequence
  MKO10015551_A_Eepd1
  gRNA
ccccttccacttgcggatgt

SEQ ID NO: 15552 - DNA, 20 bp, Artificial Sequence
  MKO10015552_A_Eepd1
  gRNA
acccagcaacggtcatgcta

SEQ ID NO: 15553 - DNA, 20 bp, Artificial Sequence
  MKO10015553_A_Efcab10
  gRNA
ccttacttggtcgggcaaag

SEQ ID NO: 15554 - DNA, 20 bp, Artificial Sequence
  MKO10015554_A_Efcab10
  gRNA
taatcactctggatacattc

SEQ ID NO: 15555 - DNA, 20 bp, Artificial Sequence
  MKO10015555_A_Efcab10
  gRNA
gttagagttgtccataaagt

SEQ ID NO: 15556 - DNA, 20 bp, Artificial Sequence
  MKO10015556_A_Efcab11
  gRNA
tggctcccaagctaccagcg

SEQ ID NO: 15557 - DNA, 20 bp, Artificial Sequence
  MKO10015557_A_Efcab11
  gRNA
cctaagccgagaggacttta

SEQ ID NO: 15558 - DNA, 20 bp, Artificial Sequence
  MKO10015558_A_Efcab11
  gRNA
gactctatcggaatgagata

SEQ ID NO: 15559 - DNA, 20 bp, Artificial Sequence
  MKO10015559_A_Efcab12
  gRNA
tcttgatctttcgactacga

SEQ ID NO: 15560 - DNA, 20 bp, Artificial Sequence
  MKO10015560_A_Efcab12
  gRNA
gcgagaaccagcgcatctcc

SEQ ID NO: 15561 - DNA, 20 bp, Artificial Sequence
  MKO10015561_A_Efcab12
  gRNA
ttcagcaggtccatcttgcg

SEQ ID NO: 15562 - DNA, 20 bp, Artificial Sequence
  MKO10015562_A_Efcab14
  gRNA
gtctgcggctgacttgacgc

SEQ ID NO: 15563 - DNA, 20 bp, Artificial Sequence
  MKO10015563_A_Efcab14
  gRNA
catcctcgcagcctgcgttg

SEQ ID NO: 15564 - DNA, 20 bp, Artificial Sequence
  MKO10015564_A_Efcab14
  gRNA
caacttgagaagattgagtc

SEQ ID NO: 15565 - DNA, 20 bp, Artificial Sequence
  MKO10015565_A_Efcab1
  gRNA
agcgtatcagagtggattca

SEQ ID NO: 15566 - DNA, 20 bp, Artificial Sequence
  MKO10015566_A_Efcab1
  gRNA
gccttgcctgcctgatccaa

SEQ ID NO: 15567 - DNA, 20 bp, Artificial Sequence
  MKO10015567_A_Efcab1
  gRNA
aatattgttacctttggatc

SEQ ID NO: 15568 - DNA, 20 bp, Artificial Sequence
  MKO10015568_A_Efcab2
  gRNA
ccacctcgaaagctcgcaaa

SEQ ID NO: 15569 - DNA, 20 bp, Artificial Sequence
  MKO10015569_A_Efcab2
  gRNA
ttaggatgctgcccgactga

SEQ ID NO: 15570 - DNA, 20 bp, Artificial Sequence
  MKO10015570_A_Efcab2
  gRNA
ctactgtattattcgattca

SEQ ID NO: 15571 - DNA, 20 bp, Artificial Sequence
  MKO10015571_A_Efcab3
  gRNA
cttagagataaagatttgcg

SEQ ID NO: 15572 - DNA, 20 bp, Artificial Sequence
  MKO10015572_A_Efcab3
  gRNA
gataagcaccatagcaaaac

SEQ ID NO: 15573 - DNA, 20 bp, Artificial Sequence
  MKO10015573_A_Efcab3
  gRNA
aacctcgtccctgcacagaa

SEQ ID NO: 15574 - DNA, 20 bp, Artificial Sequence
  MKO10015574_A_Efcab4a
  gRNA
ggaagttctgatgcgcgcat

SEQ ID NO: 15575 - DNA, 20 bp, Artificial Sequence
  MKO10015575_A_Efcab4a
  gRNA
gtcttgagcaagcgctgcga

SEQ ID NO: 15576 - DNA, 20 bp, Artificial Sequence
  MKO10015576_A_Efcab4a
  gRNA
tcggggagcagcgacaccgc

SEQ ID NO: 15577 - DNA, 20 bp, Artificial Sequence
  MKO10015577_A_Efcab4b
  gRNA
ctcacagtgaaagtgacgtc

SEQ ID NO: 15578 - DNA, 20 bp, Artificial Sequence
  MKO10015578_A_Efcab4b
  gRNA
ggtcttcgaagttggacagc

SEQ ID NO: 15579 - DNA, 20 bp, Artificial Sequence
  MKO10015579_A_Efcab4b
  gRNA
ccagaacttactaaatccag

SEQ ID NO: 15580 - DNA, 20 bp, Artificial Sequence
  MKO10015580_A_Efcab5
  gRNA
tctgcgtgaccctgcactac

SEQ ID NO: 15581 - DNA, 20 bp, Artificial Sequence
  MKO10015581_A_Efcab5
  gRNA
ctccctcttaccacgactat

SEQ ID NO: 15582 - DNA, 20 bp, Artificial Sequence
  MKO10015582_A_Efcab5
  gRNA
gatcatagaacgcttccagc

SEQ ID NO: 15583 - DNA, 20 bp, Artificial Sequence
  MKO10015583_A_Efcab6
  gRNA
tgtggttccggtcgagtatc

SEQ ID NO: 15584 - DNA, 20 bp, Artificial Sequence
  MKO10015584_A_Efcab6
  gRNA
aagtcttccagatactcgac

SEQ ID NO: 15585 - DNA, 20 bp, Artificial Sequence
  MKO10015585_A_Efcab6
  gRNA
gtagatcccgatcagcagct

SEQ ID NO: 15586 - DNA, 20 bp, Artificial Sequence
  MKO10015586_A_Efcab7
  gRNA
gccgttatatctgagtcaag

SEQ ID NO: 15587 - DNA, 20 bp, Artificial Sequence
  MKO10015587_A_Efcab7
  gRNA
ttggttactgttagcgctca

SEQ ID NO: 15588 - DNA, 20 bp, Artificial Sequence
  MKO10015588_A_Efcab7
  gRNA
cagcaccaaaaccgtcacct

SEQ ID NO: 15589 - DNA, 20 bp, Artificial Sequence
  MKO10015589_A_Efcab9
  gRNA
tgccgccatgaaactgactc

SEQ ID NO: 15590 - DNA, 20 bp, Artificial Sequence
  MKO10015590_A_Efcab9
  gRNA
gggaatggcggtacataaag

SEQ ID NO: 15591 - DNA, 20 bp, Artificial Sequence
  MKO10015591_A_Efcab9
  gRNA
cggggagatgaatataggtg

SEQ ID NO: 15592 - DNA, 20 bp, Artificial Sequence
  MKO10015592_A_Efcc1
  gRNA
tgagcagctgttccgctccg

SEQ ID NO: 15593 - DNA, 20 bp, Artificial Sequence
  MKO10015593_A_Efcc1
  gRNA
gacgcagcttgcaccgagtg

SEQ ID NO: 15594 - DNA, 20 bp, Artificial Sequence
  MKO10015594_A_Efcc1
  gRNA
agctcgtgcgccgccgcttc

SEQ ID NO: 15595 - DNA, 20 bp, Artificial Sequence
  MKO10015595_A_Efemp1
  gRNA
ctcgtaaattgatgcatact

SEQ ID NO: 15596 - DNA, 20 bp, Artificial Sequence
  MKO10015596_A_Efemp1
  gRNA
caagtatgcatcaatttacg

SEQ ID NO: 15597 - DNA, 20 bp, Artificial Sequence
  MKO10015597_A_Efemp1
  gRNA
tttcggccagtttgaacttc

SEQ ID NO: 15598 - DNA, 20 bp, Artificial Sequence
  MKO10015598_A_Efemp2
  gRNA
gacacaaataacccccgtag

SEQ ID NO: 15599 - DNA, 20 bp, Artificial Sequence
  MKO10015599_A_Efemp2
  gRNA
gtccccaccgtgtagctgtc

SEQ ID NO: 15600 - DNA, 20 bp, Artificial Sequence
  MKO10015600_A_Efemp2
  gRNA
agcgtccccacaggatcccg

SEQ ID NO: 15601 - DNA, 20 bp, Artificial Sequence
  MKO10015601_A_Efhb
  gRNA
ccagctaatgactcccccag

SEQ ID NO: 15602 - DNA, 20 bp, Artificial Sequence
  MKO10015602_A_Efhb
  gRNA
tagccatcaacgagcaccat

SEQ ID NO: 15603 - DNA, 20 bp, Artificial Sequence
  MKO10015603_A_Efhb
  gRNA
ttctttaagcacatcttcga

SEQ ID NO: 15604 - DNA, 20 bp, Artificial Sequence
  MKO10015604_A_Efhc1
  gRNA
gcatacgctgtcggttcatg

SEQ ID NO: 15605 - DNA, 20 bp, Artificial Sequence
  MKO10015605_A_Efhc1
  gRNA
ctctcccgttgttccgttcg

SEQ ID NO: 15606 - DNA, 20 bp, Artificial Sequence
  MKO10015606_A_Efhc1
  gRNA
agttgtccgacgtcccacca

SEQ ID NO: 15607 - DNA, 20 bp, Artificial Sequence
  MKO10015607_A_Efhc2
  gRNA
tgggaagcttaccccgccga

SEQ ID NO: 15608 - DNA, 20 bp, Artificial Sequence
  MKO10015608_A_Efhc2
  gRNA
agcagatctccacctactcc

SEQ ID NO: 15609 - DNA, 20 bp, Artificial Sequence
  MKO10015609_A_Efhc2
  gRNA
aaacgattcatccagtatga

SEQ ID NO: 15610 - DNA, 20 bp, Artificial Sequence
  MKO10015610_A_Efhd1
  gRNA
ttcggagtccgcgctggctg

SEQ ID NO: 15611 - DNA, 20 bp, Artificial Sequence
  MKO10015611_A_Efhd1
  gRNA
taactcagcttcgaacttac

SEQ ID NO: 15612 - DNA, 20 bp, Artificial Sequence
  MKO10015612_A_Efhd1
  gRNA
ttccgagattgatgtcgccc

SEQ ID NO: 15613 - DNA, 20 bp, Artificial Sequence
  MKO10015613_A_Efhd2
  gRNA
cttgctggccaactcgtccg

SEQ ID NO: 15614 - DNA, 20 bp, Artificial Sequence
  MKO10015614_A_Efhd2
  gRNA
gcagccggggctcaacgggg

SEQ ID NO: 15615 - DNA, 20 bp, Artificial Sequence
  MKO10015615_A_Efhd2
  gRNA
caacgtgtccagccgctttg

SEQ ID NO: 15616 - DNA, 20 bp, Artificial Sequence
  MKO10015616_A_Efna1
  gRNA
gtacagtgtgtatcgctcca

SEQ ID NO: 15617 - DNA, 20 bp, Artificial Sequence
  MKO10015617_A_Efna1
  gRNA
tgggccggttgcaattccaa

SEQ ID NO: 15618 - DNA, 20 bp, Artificial Sequence
  MKO10015618_A_Efna1
  gRNA
tgcagatgacccggaagtac

SEQ ID NO: 15619 - DNA, 20 bp, Artificial Sequence
  MKO10015619_A_Efna2
  gRNA
tcctcgttgcgcgcacgcag

SEQ ID NO: 15620 - DNA, 20 bp, Artificial Sequence
  MKO10015620_A_Efna2
  gRNA
gactgcgtatcggtcagcgt

SEQ ID NO: 15621 - DNA, 20 bp, Artificial Sequence
  MKO10015621_A_Efna2
  gRNA
ggcagcggcgccccgtagtg

SEQ ID NO: 15622 - DNA, 20 bp, Artificial Sequence
  MKO10015622_A_Efna3
  gRNA
ggtgaacgtgaacgactatc

SEQ ID NO: 15623 - DNA, 20 bp, Artificial Sequence
  MKO10015623_A_Efna3
  gRNA
tgtccacagcctgcggcgag

SEQ ID NO: 15624 - DNA, 20 bp, Artificial Sequence
  MKO10015624_A_Efna3
  gRNA
caccccgcagcatcgcactc

SEQ ID NO: 15625 - DNA, 20 bp, Artificial Sequence
  MKO10015625_A_Efna4
  gRNA
tcctacagcggtgccgactc

SEQ ID NO: 15626 - DNA, 20 bp, Artificial Sequence
  MKO10015626_A_Efna4
  gRNA
cctggagaaagcggtacgtc

SEQ ID NO: 15627 - DNA, 20 bp, Artificial Sequence
  MKO10015627_A_Efna4
  gRNA
gcatcgagcaattccagcgc

SEQ ID NO: 15628 - DNA, 20 bp, Artificial Sequence
  MKO10015628_A_Efna5
  gRNA
gtagcggtcggcgacgactt

SEQ ID NO: 15629 - DNA, 20 bp, Artificial Sequence
  MKO10015629_A_Efna5
  gRNA
ccgaccgctacgccgtctac

SEQ ID NO: 15630 - DNA, 20 bp, Artificial Sequence
  MKO10015630_A_Efna5
  gRNA
tctgcgccgcgttctcaccg

SEQ ID NO: 15631 - DNA, 20 bp, Artificial Sequence
  MKO10015631_A_Efnb1
  gRNA
ttgttcgcagccgtcggcgc

SEQ ID NO: 15632 - DNA, 20 bp, Artificial Sequence
  MKO10015632_A_Efnb1
  gRNA
gtacagcttgtagtactcgt

SEQ ID NO: 15633 - DNA, 20 bp, Artificial Sequence
  MKO10015633_A_Efnb1
  gRNA
cccggcgaacatctactaca

SEQ ID NO: 15634 - DNA, 20 bp, Artificial Sequence
  MKO10015634_A_Efnb2
  gRNA
tcttgttggaccgtgattcc

SEQ ID NO: 15635 - DNA, 20 bp, Artificial Sequence
  MKO10015635_A_Efnb2
  gRNA
tccgaagtggccttattcgc

SEQ ID NO: 15636 - DNA, 20 bp, Artificial Sequence
  MKO10015636_A_Efnb2
  gRNA
tgatgcgatccctgcgaata

SEQ ID NO: 15637 - DNA, 20 bp, Artificial Sequence
  MKO10015637_A_Efnb3
  gRNA
tctagccggtccccgatctg

SEQ ID NO: 15638 - DNA, 20 bp, Artificial Sequence
  MKO10015638_A_Efnb3
  gRNA
ccgccgtctccgccaacaca

SEQ ID NO: 15639 - DNA, 20 bp, Artificial Sequence
  MKO10015639_A_Efnb3
  gRNA
taccaattatgtagtaatcg

SEQ ID NO: 15640 - DNA, 20 bp, Artificial Sequence
  MKO10015640_A_Efr3a
  gRNA
taggtacgttctaatcgcta

SEQ ID NO: 15641 - DNA, 20 bp, Artificial Sequence
  MKO10015641_A_Efr3a
  gRNA
tccaccagacgtttgtagcg

SEQ ID NO: 15642 - DNA, 20 bp, Artificial Sequence
  MKO10015642_A_Efr3a
  gRNA
gcgtcctcgctacaaacgtc

SEQ ID NO: 15643 - DNA, 20 bp, Artificial Sequence
  MKO10015643_A_Efr3b
  gRNA
gatgtgggtcgccatcgata

SEQ ID NO: 15644 - DNA, 20 bp, Artificial Sequence
  MKO10015644_A_Efr3b
  gRNA
gaagttcgccaacattgaag

SEQ ID NO: 15645 - DNA, 20 bp, Artificial Sequence
  MKO10015645_A_Efr3b
  gRNA
atgtgactcacccatatcga

SEQ ID NO: 15646 - DNA, 20 bp, Artificial Sequence
  MKO10015646_A_Efs
  gRNA
tccgccgaggggatgttcta

SEQ ID NO: 15647 - DNA, 20 bp, Artificial Sequence
  MKO10015647_A_Efs
  gRNA
gttcctcgggtgcttcgtac

SEQ ID NO: 15648 - DNA, 20 bp, Artificial Sequence
  MKO10015648_A_Efs
  gRNA
caacctgtacgaagcacccg

SEQ ID NO: 15649 - DNA, 20 bp, Artificial Sequence
  MKO10015649_A_Eftud1
  gRNA
aggcagttcttcgacaagcc

SEQ ID NO: 15650 - DNA, 20 bp, Artificial Sequence
  MKO10015650_A_Eftud1
  gRNA
aaccgctgttgatacttctg

SEQ ID NO: 15651 - DNA, 20 bp, Artificial Sequence
  MKO10015651_A_Eftud1
  gRNA
taagatagaccgcctgatag

SEQ ID NO: 15652 - DNA, 20 bp, Artificial Sequence
  MKO10015652_A_Eftud2
  gRNA
accgtacacctcctcggccg

SEQ ID NO: 15653 - DNA, 20 bp, Artificial Sequence
  MKO10015653_A_Eftud2
  gRNA
acccgtcacggtgtatgaga

SEQ ID NO: 15654 - DNA, 20 bp, Artificial Sequence
  MKO10015654_A_Eftud2
  gRNA
cgaggaggtgtacggtcccg

SEQ ID NO: 15655 - DNA, 20 bp, Artificial Sequence
  MKO10015655_A_Egfbp2
  gRNA
atgcttcaaacaacacctcc

SEQ ID NO: 15656 - DNA, 20 bp, Artificial Sequence
  MKO10015656_A_Egfbp2
  gRNA
tcaaatggccctgaaccatg

SEQ ID NO: 15657 - DNA, 20 bp, Artificial Sequence
  MKO10015657_A_Egfbp2
  gRNA
gtgttgtttgaagcatcagg

SEQ ID NO: 15658 - DNA, 20 bp, Artificial Sequence
  MKO10015658_A_Egfem1
  gRNA
gcgccacttacatgccgggc

SEQ ID NO: 15659 - DNA, 20 bp, Artificial Sequence
  MKO10015659_A_Egfem1
  gRNA
tggaagggagtgctcgtatc

SEQ ID NO: 15660 - DNA, 20 bp, Artificial Sequence
  MKO10015660_A_Egfem1
  gRNA
tcgtatcccacacaccaccg

SEQ ID NO: 15661 - DNA, 20 bp, Artificial Sequence
  MKO10015661_A_Egfl6
  gRNA
gtttagtctggcacacgtcc

SEQ ID NO: 15662 - DNA, 20 bp, Artificial Sequence
  MKO10015662_A_Egfl6
  gRNA
acactcaccgaacttgcacc

SEQ ID NO: 15663 - DNA, 20 bp, Artificial Sequence
  MKO10015663_A_Egfl6
  gRNA
ctgtgtcttcacagccgtac

SEQ ID NO: 15664 - DNA, 20 bp, Artificial Sequence
  MKO10015664_A_Egfl7
  gRNA
tgtgtccgtcgcaagtggtg

SEQ ID NO: 15665 - DNA, 20 bp, Artificial Sequence
  MKO10015665_A_Egfl7
  gRNA
ggagggagttgcatccgccc

SEQ ID NO: 15666 - DNA, 20 bp, Artificial Sequence
  MKO10015666_A_Egfl7
  gRNA
caccccagggctacggcgat

SEQ ID NO: 15667 - DNA, 20 bp, Artificial Sequence
  MKO10015667_A_Egfl8
  gRNA
caacgagtcctatagtcaac

SEQ ID NO: 15668 - DNA, 20 bp, Artificial Sequence
  MKO10015668_A_Egfl8
  gRNA
tatgcgcctccccgcacaca

SEQ ID NO: 15669 - DNA, 20 bp, Artificial Sequence
  MKO10015669_A_Egfl8
  gRNA
gacacacgtggtgtgctgtc

SEQ ID NO: 15670 - DNA, 20 bp, Artificial Sequence
  MKO10015670_A_Egflam
  gRNA
cggtcacacaacgtcccggt

SEQ ID NO: 15671 - DNA, 20 bp, Artificial Sequence
  MKO10015671_A_Egflam
  gRNA
cgttgtgtgaccgctcccgc

SEQ ID NO: 15672 - DNA, 20 bp, Artificial Sequence
  MKO10015672_A_Egflam
  gRNA
acctcctcttgacatcaagc

SEQ ID NO: 15673 - DNA, 20 bp, Artificial Sequence
  MKO10015673_A_Egfr
  gRNA
cggtcagagatgcgaccctc

SEQ ID NO: 15674 - DNA, 20 bp, Artificial Sequence
  MKO10015674_A_Egfr
  gRNA
actgcccatgcggaacttac

SEQ ID NO: 15675 - DNA, 20 bp, Artificial Sequence
  MKO10015675_A_Egfr
  gRNA
cgcgcttacaactgctcgga

SEQ ID NO: 15676 - DNA, 20 bp, Artificial Sequence
  MKO10015676_A_Egf
  gRNA
gtggctccgtccgtcttatc

SEQ ID NO: 15677 - DNA, 20 bp, Artificial Sequence
  MKO10015677_A_Egf
  gRNA
atctctcggattgacccaga

SEQ ID NO: 15678 - DNA, 20 bp, Artificial Sequence
  MKO10015678_A_Egf
  gRNA
cctctagtcctgtcccgtta

SEQ ID NO: 15679 - DNA, 20 bp, Artificial Sequence
  MKO10015679_A_Egln1
  gRNA
gtacttcatgagggttacgc

SEQ ID NO: 15680 - DNA, 20 bp, Artificial Sequence
  MKO10015680_A_Egln1
  gRNA
cactaccttgtggcgtatgc

SEQ ID NO: 15681 - DNA, 20 bp, Artificial Sequence
  MKO10015681_A_Egln1
  gRNA
acatagcctgttccgttgcc

SEQ ID NO: 15682 - DNA, 20 bp, Artificial Sequence
  MKO10015682_A_Egln2
  gRNA
tgatgcagcgcccatcgccg

SEQ ID NO: 15683 - DNA, 20 bp, Artificial Sequence
  MKO10015683_A_Egln2
  gRNA
acgtacccgagcccattgcc

SEQ ID NO: 15684 - DNA, 20 bp, Artificial Sequence
  MKO10015684_A_Egln2
  gRNA
tcaggtacgccatcactgtc

SEQ ID NO: 15685 - DNA, 20 bp, Artificial Sequence
  MKO10015685_A_Egln3
  gRNA
gtcctgcggatatttccgga

SEQ ID NO: 15686 - DNA, 20 bp, Artificial Sequence
  MKO10015686_A_Egln3
  gRNA
gaaatcgtttgtagcagacg

SEQ ID NO: 15687 - DNA, 20 bp, Artificial Sequence
  MKO10015687_A_Egln3
  gRNA
gacaggttatgttcgccatg

SEQ ID NO: 15688 - DNA, 20 bp, Artificial Sequence
  MKO10015688_A_Egr1
  gRNA
ggttggggtacttgcgcatg

SEQ ID NO: 15689 - DNA, 20 bp, Artificial Sequence
  MKO10015689_A_Egr1
  gRNA
catcaattgcatctcggcct

SEQ ID NO: 15690 - DNA, 20 bp, Artificial Sequence
  MKO10015690_A_Egr1
  gRNA
tgggaggcaaccgagtcgtt

SEQ ID NO: 15691 - DNA, 20 bp, Artificial Sequence
  MKO10015691_A_Egr2
  gRNA
gagcgaagctactcggatac

SEQ ID NO: 15692 - DNA, 20 bp, Artificial Sequence
  MKO10015692_A_Egr2
  gRNA
ggaagacctcgccgcctcgt

SEQ ID NO: 15693 - DNA, 20 bp, Artificial Sequence
  MKO10015693_A_Egr2
  gRNA
ctcccgccactccgttcatc

SEQ ID NO: 15694 - DNA, 20 bp, Artificial Sequence
  MKO10015694_A_Egr3
  gRNA
ccccacgcgtgtcccgcgga

SEQ ID NO: 15695 - DNA, 20 bp, Artificial Sequence
  MKO10015695_A_Egr3
  gRNA
cggggtcttgctaggccgat

SEQ ID NO: 15696 - DNA, 20 bp, Artificial Sequence
  MKO10015696_A_Egr3
  gRNA
gagcgcgctggggatctcct

SEQ ID NO: 15697 - DNA, 20 bp, Artificial Sequence
  MKO10015697_A_Egr4
  gRNA
tctcgtcactgcgcgcgaag

SEQ ID NO: 15698 - DNA, 20 bp, Artificial Sequence
  MKO10015698_A_Egr4
  gRNA
ctccggttacagcgcggcga

SEQ ID NO: 15699 - DNA, 20 bp, Artificial Sequence
  MKO10015699_A_Egr4
  gRNA
gccgagggagcgtccctagc

SEQ ID NO: 15700 - DNA, 20 bp, Artificial Sequence
  MKO10015700_A_Ehbp1l1
  gRNA
tatggactcggcggaaccga

SEQ ID NO: 15701 - DNA, 20 bp, Artificial Sequence
  MKO10015701_A_Ehbp1l1
  gRNA
cccgcttgccaacccgctgc

SEQ ID NO: 15702 - DNA, 20 bp, Artificial Sequence
  MKO10015702_A_Ehbp1l1
  gRNA
accgagatgtccacgttctc

SEQ ID NO: 15703 - DNA, 20 bp, Artificial Sequence
  MKO10015703_A_Ehbp1
  gRNA
ggaataaaaaatccatatcg

SEQ ID NO: 15704 - DNA, 20 bp, Artificial Sequence
  MKO10015704_A_Ehbp1
  gRNA
tttggacaagaagaagccga

SEQ ID NO: 15705 - DNA, 20 bp, Artificial Sequence
  MKO10015705_A_Ehbp1
  gRNA
tacattcaaccatcagctcc

SEQ ID NO: 15706 - DNA, 20 bp, Artificial Sequence
  MKO10015706_A_Ehd1
  gRNA
ctttgggcatggctacggcg

SEQ ID NO: 15707 - DNA, 20 bp, Artificial Sequence
  MKO10015707_A_Ehd1
  gRNA
ctcgccgtagccatgcccaa

SEQ ID NO: 15708 - DNA, 20 bp, Artificial Sequence
  MKO10015708_A_Ehd1
  gRNA
cggcgtttctcggcagagac

SEQ ID NO: 15709 - DNA, 20 bp, Artificial Sequence
  MKO10015709_A_Ehd2
  gRNA
cacccgcatgggccccttcg

SEQ ID NO: 15710 - DNA, 20 bp, Artificial Sequence
  MKO10015710_A_Ehd2
  gRNA
cctccagctcgaaaagacgc

SEQ ID NO: 15711 - DNA, 20 bp, Artificial Sequence
  MKO10015711_A_Ehd2
  gRNA
tgagcttgcgcagcgccgca

SEQ ID NO: 15712 - DNA, 20 bp, Artificial Sequence
  MKO10015712_A_Ehd3
  gRNA
gcttgtgggcgtcgaagagt

SEQ ID NO: 15713 - DNA, 20 bp, Artificial Sequence
  MKO10015713_A_Ehd3
  gRNA
cccgctcagcaaaccattcg

SEQ ID NO: 15714 - DNA, 20 bp, Artificial Sequence
  MKO10015714_A_Ehd3
  gRNA
tatcagtgtgatcgacacac

SEQ ID NO: 15715 - DNA, 20 bp, Artificial Sequence
  MKO10015715_A_Ehd4
  gRNA
tgcaaaacaccgacaaccgc

SEQ ID NO: 15716 - DNA, 20 bp, Artificial Sequence
  MKO10015716_A_Ehd4
  gRNA
agaagcgagaacttatctac

SEQ ID NO: 15717 - DNA, 20 bp, Artificial Sequence
  MKO10015717_A_Ehd4
  gRNA
ccaaccttgcacgcttgatg

SEQ ID NO: 15718 - DNA, 20 bp, Artificial Sequence
  MKO10015718_A_Ehf
  gRNA
ctccgctaatgtcgaactcc

SEQ ID NO: 15719 - DNA, 20 bp, Artificial Sequence
  MKO10015719_A_Ehf
  gRNA
ctggcttccaaaaaaaccgc

SEQ ID NO: 15720 - DNA, 20 bp, Artificial Sequence
  MKO10015720_A_Ehf
  gRNA
ggaaaaggtcactgctgcat

SEQ ID NO: 15721 - DNA, 20 bp, Artificial Sequence
  MKO10015721_A_Ehhadh
  gRNA
agctgcgttcctcttgcacc

SEQ ID NO: 15722 - DNA, 20 bp, Artificial Sequence
  MKO10015722_A_Ehhadh
  gRNA
ctatcggattgccaatgcaa

SEQ ID NO: 15723 - DNA, 20 bp, Artificial Sequence
  MKO10015723_A_Ehhadh
  gRNA
gccatccaaggcgtggctct

SEQ ID NO: 15724 - DNA, 20 bp, Artificial Sequence
  MKO10015724_A_Ehmt1
  gRNA
aaccctgacatcagtgcccg

SEQ ID NO: 15725 - DNA, 20 bp, Artificial Sequence
  MKO10015725_A_Ehmt1
  gRNA
attctaacctcctcgcttcc

SEQ ID NO: 15726 - DNA, 20 bp, Artificial Sequence
  MKO10015726_A_Ehmt1
  gRNA
gccatgtagcactgattctg

SEQ ID NO: 15727 - DNA, 20 bp, Artificial Sequence
  MKO10015727_A_Ehmt2
  gRNA
agatgggggtcgcatcgtgc

SEQ ID NO: 15728 - DNA, 20 bp, Artificial Sequence
  MKO10015728_A_Ehmt2
  gRNA
cgggccaaaatgtcaatgac

SEQ ID NO: 15729 - DNA, 20 bp, Artificial Sequence
  MKO10015729_A_Ehmt2
  gRNA
gcggcagttgttgccggaga

SEQ ID NO: 15730 - DNA, 20 bp, Artificial Sequence
  MKO10015730_A_Ei24
  gRNA
ccgagcatctagctttgaga

SEQ ID NO: 15731 - DNA, 20 bp, Artificial Sequence
  MKO10015731_A_Ei24
  gRNA
tgcacctacttggaaccaaa

SEQ ID NO: 15732 - DNA, 20 bp, Artificial Sequence
  MKO10015732_A_Ei24
  gRNA
gagaggaacagcgtcgaaga

SEQ ID NO: 15733 - DNA, 20 bp, Artificial Sequence
  MKO10015733_A_Eid1
  gRNA
ttcctgcgaaccgcgcgagc

SEQ ID NO: 15734 - DNA, 20 bp, Artificial Sequence
  MKO10015734_A_Eid1
  gRNA
ctccggctcgcgcggttcgc

SEQ ID NO: 15735 - DNA, 20 bp, Artificial Sequence
  MKO10015735_A_Eid1
  gRNA
cctcggggaacagaccgcgc

SEQ ID NO: 15736 - DNA, 20 bp, Artificial Sequence
  MKO10015736_A_Eid2b
  gRNA
gcacgcccgcgccttcatgc

SEQ ID NO: 15737 - DNA, 20 bp, Artificial Sequence
  MKO10015737_A_Eid2b
  gRNA
ggccacccctcagtcggcgt

SEQ ID NO: 15738 - DNA, 20 bp, Artificial Sequence
  MKO10015738_A_Eid2b
  gRNA
acgaaatcgaggagcgccgc

SEQ ID NO: 15739 - DNA, 20 bp, Artificial Sequence
  MKO10015739_A_Eid2
  gRNA
acgcaggtactctatgtcga

SEQ ID NO: 15740 - DNA, 20 bp, Artificial Sequence
  MKO10015740_A_Eid2
  gRNA
gggtggcggaagcgcatgta

SEQ ID NO: 15741 - DNA, 20 bp, Artificial Sequence
  MKO10015741_A_Eid2
  gRNA
actacccgatcgcccccggc

SEQ ID NO: 15742 - DNA, 20 bp, Artificial Sequence
  MKO10015742_A_Eid3
  gRNA
tttgccatctcgcgtcgcta

SEQ ID NO: 15743 - DNA, 20 bp, Artificial Sequence
  MKO10015743_A_Eid3
  gRNA
ccaaccgtagcgacgcgaga

SEQ ID NO: 15744 - DNA, 20 bp, Artificial Sequence
  MKO10015744_A_Eid3
  gRNA
aacgttctgcacgaaagccc

SEQ ID NO: 15745 - DNA, 20 bp, Artificial Sequence
  MKO10015745_A_Eif1ad
  gRNA
attgttgaccctattgaaga

SEQ ID NO: 15746 - DNA, 20 bp, Artificial Sequence
  MKO10015746_A_Eif1ad
  gRNA
ccaaataccgcaagaacatc

SEQ ID NO: 15747 - DNA, 20 bp, Artificial Sequence
  MKO10015747_A_Eif1ad
  gRNA
cagacagtatcatgagagtg

SEQ ID NO: 15748 - DNA, 20 bp, Artificial Sequence
  MKO10015748_A_Eif1ax
  gRNA
ccccaccaatatgatatctg

SEQ ID NO: 15749 - DNA, 20 bp, Artificial Sequence
  MKO10015749_A_Eif1ax
  gRNA
tatggcgagcttccagagca

SEQ ID NO: 15750 - DNA, 20 bp, Artificial Sequence
  MKO10015750_A_Eif1ax
  gRNA
aaatacctcagatatcatat

SEQ ID NO: 15751 - DNA, 20 bp, Artificial Sequence
  MKO10015751_A_Eif1a
  gRNA
catctccaatatcatcaaat

SEQ ID NO: 15752 - DNA, 20 bp, Artificial Sequence
  MKO10015752_A_Eif1a
  gRNA
gaaatccaatttgatgatat

SEQ ID NO: 15753 - DNA, 20 bp, Artificial Sequence
  MKO10015753_A_Eif1a
  gRNA
ttctcagcttccctcttata

SEQ ID NO: 15754 - DNA, 20 bp, Artificial Sequence
  MKO10015754_A_Eif1b
  gRNA
gcgacgacttactcccggca

SEQ ID NO: 15755 - DNA, 20 bp, Artificial Sequence
  MKO10015755_A_Eif1b
  gRNA
tcttcctgccgttgcgctgc

SEQ ID NO: 15756 - DNA, 20 bp, Artificial Sequence
  MKO10015756_A_Eif1b
  gRNA
ggcccttaccgaaagattgg

SEQ ID NO: 15757 - DNA, 20 bp, Artificial Sequence
  MKO10015757_A_Eif1
  gRNA
aactcacctctatcaggaac

SEQ ID NO: 15758 - DNA, 20 bp, Artificial Sequence
  MKO10015758_A_Eif1
  gRNA
caggctcaccgaaagagtgg

SEQ ID NO: 15759 - DNA, 20 bp, Artificial Sequence
  MKO10015759_A_Eif1
  gRNA
tttgcagattgggctggcta

SEQ ID NO: 15760 - DNA, 20 bp, Artificial Sequence
  MKO10015760_A_Eif2ak1
  gRNA
gcgtgacgtttgtgcttcga

SEQ ID NO: 15761 - DNA, 20 bp, Artificial Sequence
  MKO10015761_A_Eif2ak1
  gRNA
taggtccggaacaaattaga

SEQ ID NO: 15762 - DNA, 20 bp, Artificial Sequence
  MKO10015762_A_Eif2ak1
  gRNA
tgccaaagagagagtccgtc

SEQ ID NO: 15763 - DNA, 20 bp, Artificial Sequence
  MKO10015763_A_Eif2ak2
  gRNA
acttgtcatagacgagctgc

SEQ ID NO: 15764 - DNA, 20 bp, Artificial Sequence
  MKO10015764_A_Eif2ak2
  gRNA
ttgttcgttggtaactacat

SEQ ID NO: 15765 - DNA, 20 bp, Artificial Sequence
  MKO10015765_A_Eif2ak2
  gRNA
gaagctgttaaagagcccgc

SEQ ID NO: 15766 - DNA, 20 bp, Artificial Sequence
  MKO10015766_A_Eif2ak3
  gRNA
cacttctcactgccgcttcg

SEQ ID NO: 15767 - DNA, 20 bp, Artificial Sequence
  MKO10015767_A_Eif2ak3
  gRNA
ctcgaatcttcctacaagtt

SEQ ID NO: 15768 - DNA, 20 bp, Artificial Sequence
  MKO10015768_A_Eif2ak3
  gRNA
catggaggccgtccccttca

SEQ ID NO: 15769 - DNA, 20 bp, Artificial Sequence
  MKO10015769_A_Eif2ak4
  gRNA
aaagcccggacatactcctc

SEQ ID NO: 15770 - DNA, 20 bp, Artificial Sequence
  MKO10015770_A_Eif2ak4
  gRNA
cgctgagaaacgactgcaca

SEQ ID NO: 15771 - DNA, 20 bp, Artificial Sequence
  MKO10015771_A_Eif2ak4
  gRNA
ctctcttagaggcatagtcc

SEQ ID NO: 15772 - DNA, 20 bp, Artificial Sequence
  MKO10015772_A_Eif2a
  gRNA
tataatcaatgtcgctaaca

SEQ ID NO: 15773 - DNA, 20 bp, Artificial Sequence
  MKO10015773_A_Eif2a
  gRNA
tgtaaggctgccacgttgcc

SEQ ID NO: 15774 - DNA, 20 bp, Artificial Sequence
  MKO10015774_A_Eif2a
  gRNA
accgtgctttctgtgaagtg

SEQ ID NO: 15775 - DNA, 20 bp, Artificial Sequence
  MKO10015775_A_Eif2b1
  gRNA
gagctccccgccagatgaca

SEQ ID NO: 15776 - DNA, 20 bp, Artificial Sequence
  MKO10015776_A_Eif2b1
  gRNA
atacacactgaaccgtttct

SEQ ID NO: 15777 - DNA, 20 bp, Artificial Sequence
  MKO10015777_A_Eif2b1
  gRNA
gatacttgcccagataaatc

SEQ ID NO: 15778 - DNA, 20 bp, Artificial Sequence
  MKO10015778_A_Eif2b2
  gRNA
cgcactctgcaacaataacg

SEQ ID NO: 15779 - DNA, 20 bp, Artificial Sequence
  MKO10015779_A_Eif2b2
  gRNA
tcttccgggccgcctcttta

SEQ ID NO: 15780 - DNA, 20 bp, Artificial Sequence
  MKO10015780_A_Eif2b2
  gRNA
attaatcgcctcaatgatgt

SEQ ID NO: 15781 - DNA, 20 bp, Artificial Sequence
  MKO10015781_A_Eif2b3
  gRNA
cagagcttatgatgcgtcac

SEQ ID NO: 15782 - DNA, 20 bp, Artificial Sequence
  MKO10015782_A_Eif2b3
  gRNA
catttgacagaccgatgtgc

SEQ ID NO: 15783 - DNA, 20 bp, Artificial Sequence
  MKO10015783_A_Eif2b3
  gRNA
ttcagcgggtaccaaattaa

SEQ ID NO: 15784 - DNA, 20 bp, Artificial Sequence
  MKO10015784_A_Eif2b4
  gRNA
tagaaagccagatcgacaac

SEQ ID NO: 15785 - DNA, 20 bp, Artificial Sequence
  MKO10015785_A_Eif2b4
  gRNA
cttcctacctgttgtcgatc

SEQ ID NO: 15786 - DNA, 20 bp, Artificial Sequence
  MKO10015786_A_Eif2b4
  gRNA
cgcgaagttctgccttactc

SEQ ID NO: 15787 - DNA, 20 bp, Artificial Sequence
  MKO10015787_A_Eif2b5
  gRNA
atagtcaattagcgcaacgt

SEQ ID NO: 15788 - DNA, 20 bp, Artificial Sequence
  MKO10015788_A_Eif2b5
  gRNA
ccttggcatcgacgtcacgg

SEQ ID NO: 15789 - DNA, 20 bp, Artificial Sequence
  MKO10015789_A_Eif2b5
  gRNA
tgtgattatccgaacaacgt

SEQ ID NO: 15790 - DNA, 20 bp, Artificial Sequence
  MKO10015790_A_Eif2d
  gRNA
tcggtgactgtgtacacgag

SEQ ID NO: 15791 - DNA, 20 bp, Artificial Sequence
  MKO10015791_A_Eif2d
  gRNA
aggtcgccttgctgtacttg

SEQ ID NO: 15792 - DNA, 20 bp, Artificial Sequence
  MKO10015792_A_Eif2d
  gRNA
gtagggggcaccactacccc

SEQ ID NO: 15793 - DNA, 20 bp, Artificial Sequence
  MKO10015793_A_Eif2s1
  gRNA
gcaacttaccttgatgggca

SEQ ID NO: 15794 - DNA, 20 bp, Artificial Sequence
  MKO10015794_A_Eif2s1
  gRNA
caagcggtcaaaattcgagc

SEQ ID NO: 15795 - DNA, 20 bp, Artificial Sequence
  MKO10015795_A_Eif2s1
  gRNA
tacagaaaccatgcccatca

SEQ ID NO: 15796 - DNA, 20 bp, Artificial Sequence
  MKO10015796_A_Eif2s2
  gRNA
gaaatactagaaaaagacga

SEQ ID NO: 15797 - DNA, 20 bp, Artificial Sequence
  MKO10015797_A_Eif2s2
  gRNA
gccctcagagacaaaagaag

SEQ ID NO: 15798 - DNA, 20 bp, Artificial Sequence
  MKO10015798_A_Eif2s2
  gRNA
accaactgaagaaaaagacg

SEQ ID NO: 15799 - DNA, 20 bp, Artificial Sequence
  MKO10015799_A_Eif2s3x
  gRNA
gcttggatatgctaatgcta

SEQ ID NO: 15800 - DNA, 20 bp, Artificial Sequence
  MKO10015800_A_Eif2s3x
  gRNA
gatgcggcccttctgttgat

SEQ ID NO: 15801 - DNA, 20 bp, Artificial Sequence
  MKO10015801_A_Eif2s3x
  gRNA
atgacttacctatcaacaga

SEQ ID NO: 15802 - DNA, 20 bp, Artificial Sequence
  MKO10015802_A_Eif2s3y
  gRNA
acaattggtcatgttgctca

SEQ ID NO: 15803 - DNA, 20 bp, Artificial Sequence
  MKO10015803_A_Eif2s3y
  gRNA
gactagtctgaagtttcctt

SEQ ID NO: 15804 - DNA, 20 bp, Artificial Sequence
  MKO10015804_A_Eif2s3y
  gRNA
gatgcagctcttctgttgat

SEQ ID NO: 15805 - DNA, 20 bp, Artificial Sequence
  MKO10015805_A_Eif3a
  gRNA
taccttgttgggcgatatca

SEQ ID NO: 15806 - DNA, 20 bp, Artificial Sequence
  MKO10015806_A_Eif3a
  gRNA
taccatgatatcgcccaaca

SEQ ID NO: 15807 - DNA, 20 bp, Artificial Sequence
  MKO10015807_A_Eif3a
  gRNA
gttggacagtgctatcagca

SEQ ID NO: 15808 - DNA, 20 bp, Artificial Sequence
  MKO10015808_A_Eif3b
  gRNA
ggaagcggacgggattgact

SEQ ID NO: 15809 - DNA, 20 bp, Artificial Sequence
  MKO10015809_A_Eif3b
  gRNA
tcaatcccgtccgcttcctg

SEQ ID NO: 15810 - DNA, 20 bp, Artificial Sequence
  MKO10015810_A_Eif3b
  gRNA
tttagggcaatttgcgttac

SEQ ID NO: 15811 - DNA, 20 bp, Artificial Sequence
  MKO10015811_A_Eif3c
  gRNA
ccgattctacatccgaatac

SEQ ID NO: 15812 - DNA, 20 bp, Artificial Sequence
  MKO10015812_A_Eif3c
  gRNA
gagagttgtccgaagcgcca

SEQ ID NO: 15813 - DNA, 20 bp, Artificial Sequence
  MKO10015813_A_Eif3c
  gRNA
tttccggatcttctggcgca

SEQ ID NO: 15814 - DNA, 20 bp, Artificial Sequence
  MKO10015814_A_Eif3d
  gRNA
ctacctgtgcgaatctcatc

SEQ ID NO: 15815 - DNA, 20 bp, Artificial Sequence
  MKO10015815_A_Eif3d
  gRNA
acttcccccaccgaactgag

SEQ ID NO: 15816 - DNA, 20 bp, Artificial Sequence
  MKO10015816_A_Eif3d
  gRNA
gtccctcacaggttgcagac

SEQ ID NO: 15817 - DNA, 20 bp, Artificial Sequence
  MKO10015817_A_Eif3e
  gRNA
tcttcaaacatcttcacgat

SEQ ID NO: 15818 - DNA, 20 bp, Artificial Sequence
  MKO10015818_A_Eif3e
  gRNA
tattctgatgatatccctca

SEQ ID NO: 15819 - DNA, 20 bp, Artificial Sequence
  MKO10015819_A_Eif3e
  gRNA
ttaccccatgtttgtctgcc

SEQ ID NO: 15820 - DNA, 20 bp, Artificial Sequence
  MKO10015820_A_Eif3f
  gRNA
tattatgacactgaacgcat

SEQ ID NO: 15821 - DNA, 20 bp, Artificial Sequence
  MKO10015821_A_Eif3f
  gRNA
tacgcgtacttcactgtgag

SEQ ID NO: 15822 - DNA, 20 bp, Artificial Sequence
  MKO10015822_A_Eif3f
  gRNA
tgatccatgagtactacagc

SEQ ID NO: 15823 - DNA, 20 bp, Artificial Sequence
  MKO10015823_A_Eif3g
  gRNA
ctctggactggtgtccccgg

SEQ ID NO: 15824 - DNA, 20 bp, Artificial Sequence
  MKO10015824_A_Eif3g
  gRNA
ctcacctccgggcagtaact

SEQ ID NO: 15825 - DNA, 20 bp, Artificial Sequence
  MKO10015825_A_Eif3g
  gRNA
tgagacccggaaggcatcaa

SEQ ID NO: 15826 - DNA, 20 bp, Artificial Sequence
  MKO10015826_A_Eif3h
  gRNA
gagtctgtcgtcctcattta

SEQ ID NO: 15827 - DNA, 20 bp, Artificial Sequence
  MKO10015827_A_Eif3h
  gRNA
agcagttggtaatctctagc

SEQ ID NO: 15828 - DNA, 20 bp, Artificial Sequence
  MKO10015828_A_Eif3h
  gRNA
aattgctcagtcttgctagc

SEQ ID NO: 15829 - DNA, 20 bp, Artificial Sequence
  MKO10015829_A_Eif3i
  gRNA
tctgcgtgatggaccgctca

SEQ ID NO: 15830 - DNA, 20 bp, Artificial Sequence
  MKO10015830_A_Eif3i
  gRNA
cagatcaagtataaccgcga

SEQ ID NO: 15831 - DNA, 20 bp, Artificial Sequence
  MKO10015831_A_Eif3i
  gRNA
ctttccagatcgtcaacgtg

SEQ ID NO: 15832 - DNA, 20 bp, Artificial Sequence
  MKO10015832_A_Eif3j1
  gRNA
agacgcggacacgttctcta

SEQ ID NO: 15833 - DNA, 20 bp, Artificial Sequence
  MKO10015833_A_Eif3j1
  gRNA
cctcgtcctcgccttcccag

SEQ ID NO: 15834 - DNA, 20 bp, Artificial Sequence
  MKO10015834_A_Eif3j1
  gRNA
tgatgatgatgaaaataaag

SEQ ID NO: 15835 - DNA, 20 bp, Artificial Sequence
  MKO10015835_A_Eif3j2
  gRNA
acgaggacgtgaaggataac

SEQ ID NO: 15836 - DNA, 20 bp, Artificial Sequence
  MKO10015836_A_Eif3j2
  gRNA
ggactcagactcttgggacg

SEQ ID NO: 15837 - DNA, 20 bp, Artificial Sequence
  MKO10015837_A_Eif3j2
  gRNA
tcgggatgtctgtatttcat

SEQ ID NO: 15838 - DNA, 20 bp, Artificial Sequence
  MKO10015838_A_Eif3k
  gRNA
gtgtaaatgtatgatcgacc

SEQ ID NO: 15839 - DNA, 20 bp, Artificial Sequence
  MKO10015839_A_Eif3k
  gRNA
atccggcagatcttgtacct

SEQ ID NO: 15840 - DNA, 20 bp, Artificial Sequence
  MKO10015840_A_Eif3k
  gRNA
gtgtctccacatatcgctcc

SEQ ID NO: 15841 - DNA, 20 bp, Artificial Sequence
  MKO10015841_A_Eif3l
  gRNA
ttatgatccctacgcctacc

SEQ ID NO: 15842 - DNA, 20 bp, Artificial Sequence
  MKO10015842_A_Eif3l
  gRNA
gtgtgcatatcatagtcgcc

SEQ ID NO: 15843 - DNA, 20 bp, Artificial Sequence
  MKO10015843_A_Eif3l
  gRNA
tctcctaggagatccgaagc

SEQ ID NO: 15844 - DNA, 20 bp, Artificial Sequence
  MKO10015844_A_Eif3m
  gRNA
cgctcgtggattgtaagaaa

SEQ ID NO: 15845 - DNA, 20 bp, Artificial Sequence
  MKO10015845_A_Eif3m
  gRNA
gcgcctcgtagagcagtctg

SEQ ID NO: 15846 - DNA, 20 bp, Artificial Sequence
  MKO10015846_A_Eif3m
  gRNA
tacaactgtagtctcagaga

SEQ ID NO: 15847 - DNA, 20 bp, Artificial Sequence
  MKO10015847_A_Eif4a1
  gRNA
cttacctcgatgacgccttc

SEQ ID NO: 15848 - DNA, 20 bp, Artificial Sequence
  MKO10015848_A_Eif4a1
  gRNA
ggtactcacacaggtatctc

SEQ ID NO: 15849 - DNA, 20 bp, Artificial Sequence
  MKO10015849_A_Eif4a1
  gRNA
caagtcttacccttgataca

SEQ ID NO: 15850 - DNA, 20 bp, Artificial Sequence
  MKO10015850_A_Eif4a2
  gRNA
gagagatccaattcgaattc

SEQ ID NO: 15851 - DNA, 20 bp, Artificial Sequence
  MKO10015851_A_Eif4a2
  gRNA
gaagcccctcacattgttgt

SEQ ID NO: 15852 - DNA, 20 bp, Artificial Sequence
  MKO10015852_A_Eif4a2
  gRNA
ttcttcaccagaattcgaat

SEQ ID NO: 15853 - DNA, 20 bp, Artificial Sequence
  MKO10015853_A_Eif4a3
  gRNA
ggcacgccgggacgcgtctt

SEQ ID NO: 15854 - DNA, 20 bp, Artificial Sequence
  MKO10015854_A_Eif4a3
  gRNA
cactcaccaaagacgcgtcc

SEQ ID NO: 15855 - DNA, 20 bp, Artificial Sequence
  MKO10015855_A_Eif4a3
  gRNA
aatctgcaccgctaactccc

SEQ ID NO: 15856 - DNA, 20 bp, Artificial Sequence
  MKO10015856_A_Eif4b
  gRNA
gtaacgatgatgacgtgtac

SEQ ID NO: 15857 - DNA, 20 bp, Artificial Sequence
  MKO10015857_A_Eif4b
  gRNA
cctaacggactttctagctg

SEQ ID NO: 15858 - DNA, 20 bp, Artificial Sequence
  MKO10015858_A_Eif4b
  gRNA
ctgtcctagtgtcaacaact

SEQ ID NO: 15859 - DNA, 20 bp, Artificial Sequence
  MKO10015859_A_Eif4e1b
  gRNA
ctgtgactatgccctgttca

SEQ ID NO: 15860 - DNA, 20 bp, Artificial Sequence
  MKO10015860_A_Eif4e1b
  gRNA
gcctcctcacctgtactgca

SEQ ID NO: 15861 - DNA, 20 bp, Artificial Sequence
  MKO10015861_A_Eif4e1b
  gRNA
tgtagcttgctcaggacctc

SEQ ID NO: 15862 - DNA, 20 bp, Artificial Sequence
  MKO10015862_A_Eif4e2
  gRNA
ggttctcctcgagtaccaaa

SEQ ID NO: 15863 - DNA, 20 bp, Artificial Sequence
  MKO10015863_A_Eif4e2
  gRNA
gcaagtggatcattcgactc

SEQ ID NO: 15864 - DNA, 20 bp, Artificial Sequence
  MKO10015864_A_Eif4e2
  gRNA
tgcagtacaactacaccttt

SEQ ID NO: 15865 - DNA, 20 bp, Artificial Sequence
  MKO10015865_A_Eif4e3
  gRNA
gaattgttgttagcgaccat

SEQ ID NO: 15866 - DNA, 20 bp, Artificial Sequence
  MKO10015866_A_Eif4e3
  gRNA
cctacgtttagtccacagtt

SEQ ID NO: 15867 - DNA, 20 bp, Artificial Sequence
  MKO10015867_A_Eif4e3
  gRNA
gagacctaccgtgctgtcct

SEQ ID NO: 15868 - DNA, 20 bp, Artificial Sequence
  MKO10015868_A_Eif4ebp1
  gRNA
cccactcgccgcgtagccct

SEQ ID NO: 15869 - DNA, 20 bp, Artificial Sequence
  MKO10015869_A_Eif4ebp1
  gRNA
gactacagcaccactccggg

SEQ ID NO: 15870 - DNA, 20 bp, Artificial Sequence
  MKO10015870_A_Eif4ebp1
  gRNA
gacactccatcagaaatttc

SEQ ID NO: 15871 - DNA, 20 bp, Artificial Sequence
  MKO10015871_A_Eif4ebp2
  gRNA
cgtcggagccatgtccgcgt

SEQ ID NO: 15872 - DNA, 20 bp, Artificial Sequence
  MKO10015872_A_Eif4ebp2
  gRNA
actactgcaccacgcccggg

SEQ ID NO: 15873 - DNA, 20 bp, Artificial Sequence
  MKO10015873_A_Eif4ebp2
  gRNA
caaggtggggtctgcgccat

SEQ ID NO: 15874 - DNA, 20 bp, Artificial Sequence
  MKO10015874_A_Eif4ebp3
  gRNA
cacactatacgccactaccc

SEQ ID NO: 15875 - DNA, 20 bp, Artificial Sequence
  MKO10015875_A_Eif4ebp3
  gRNA
tccacgagttgcccaattcc

SEQ ID NO: 15876 - DNA, 20 bp, Artificial Sequence
  MKO10015876_A_Eif4ebp3
  gRNA
ctacgacagaaagttcctgc

SEQ ID NO: 15877 - DNA, 20 bp, Artificial Sequence
  MKO10015877_A_Eif4enif1
  gRNA
aacttactttcgtatagcga

SEQ ID NO: 15878 - DNA, 20 bp, Artificial Sequence
  MKO10015878_A_Eif4enif1
  gRNA
agaatccgatcgaccttctc

SEQ ID NO: 15879 - DNA, 20 bp, Artificial Sequence
  MKO10015879_A_Eif4enif1
  gRNA
actacaaggacaaacgtttc

SEQ ID NO: 15880 - DNA, 20 bp, Artificial Sequence
  MKO10015880_A_Eif4e
  gRNA
aaagcttacctgttctgtag

SEQ ID NO: 15881 - DNA, 20 bp, Artificial Sequence
  MKO10015881_A_Eif4e
  gRNA
aggacgggattgagcctatg

SEQ ID NO: 15882 - DNA, 20 bp, Artificial Sequence
  MKO10015882_A_Eif4e
  gRNA
tctctagccagaagcgatcg

SEQ ID NO: 15883 - DNA, 20 bp, Artificial Sequence
  MKO10015883_A_Eif4g1
  gRNA
ggtgcaagccctaccgagtt

SEQ ID NO: 15884 - DNA, 20 bp, Artificial Sequence
  MKO10015884_A_Eif4g1
  gRNA
aatagcacttctaccctagc

SEQ ID NO: 15885 - DNA, 20 bp, Artificial Sequence
  MKO10015885_A_Eif4g1
  gRNA
agcctactatatccctggac

SEQ ID NO: 15886 - DNA, 20 bp, Artificial Sequence
  MKO10015886_A_Eif4g2
  gRNA
tctcgtctagtgcttcgtgc

SEQ ID NO: 15887 - DNA, 20 bp, Artificial Sequence
  MKO10015887_A_Eif4g2
  gRNA
tattaaactagcgagttcct

SEQ ID NO: 15888 - DNA, 20 bp, Artificial Sequence
  MKO10015888_A_Eif4g2
  gRNA
gtggagagtgcgattgcaga

SEQ ID NO: 15889 - DNA, 20 bp, Artificial Sequence
  MKO10015889_A_Eif4g3
  gRNA
gacccccaccgccgtgtatc

SEQ ID NO: 15890 - DNA, 20 bp, Artificial Sequence
  MKO10015890_A_Eif4g3
  gRNA
taagcattagcgaagtcccc

SEQ ID NO: 15891 - DNA, 20 bp, Artificial Sequence
  MKO10015891_A_Eif4g3
  gRNA
cagtatccagttcagccgcc

SEQ ID NO: 15892 - DNA, 20 bp, Artificial Sequence
  MKO10015892_A_Eif4h
  gRNA
atttcctacgtaagctgtgt

SEQ ID NO: 15893 - DNA, 20 bp, Artificial Sequence
  MKO10015893_A_Eif4h
  gRNA
atctcagcatacggagtgtg

SEQ ID NO: 15894 - DNA, 20 bp, Artificial Sequence
  MKO10015894_A_Eif4h
  gRNA
caatgtccacacgaagtgac

SEQ ID NO: 15895 - DNA, 20 bp, Artificial Sequence
  MKO10015895_A_Eif5a2
  gRNA
agggcgaccatgcaaaatcg

SEQ ID NO: 15896 - DNA, 20 bp, Artificial Sequence
  MKO10015896_A_Eif5a2
  gRNA
gacgaaattgatttcactac

SEQ ID NO: 15897 - DNA, 20 bp, Artificial Sequence
  MKO10015897_A_Eif5a2
  gRNA
ctctgtcaggtacaccttgt

SEQ ID NO: 15898 - DNA, 20 bp, Artificial Sequence
  MKO10015898_A_Eif5a
  gRNA
gaagtcattccgtttgatgt

SEQ ID NO: 15899 - DNA, 20 bp, Artificial Sequence
  MKO10015899_A_Eif5a
  gRNA
catcaaacggaatgacttcc

SEQ ID NO: 15900 - DNA, 20 bp, Artificial Sequence
  MKO10015900_A_Eif5a
  gRNA
tgctcagcattacgtaagaa

SEQ ID NO: 15901 - DNA, 20 bp, Artificial Sequence
  MKO10015901_A_Eif5b
  gRNA
tccgttcctaccgtagacag

SEQ ID NO: 15902 - DNA, 20 bp, Artificial Sequence
  MKO10015902_A_Eif5b
  gRNA
agaaaggattaagcggcttg

SEQ ID NO: 15903 - DNA, 20 bp, Artificial Sequence
  MKO10015903_A_Eif5b
  gRNA
cgttcgagagtaaactcctc

SEQ ID NO: 15904 - DNA, 20 bp, Artificial Sequence
  MKO10015904_A_Eif5
  gRNA
gcactcaccagatctgtttc

SEQ ID NO: 15905 - DNA, 20 bp, Artificial Sequence
  MKO10015905_A_Eif5
  gRNA
acgttgcaaaggcgcttaat

SEQ ID NO: 15906 - DNA, 20 bp, Artificial Sequence
  MKO10015906_A_Eif5
  gRNA
aatgaccgttacattgtcaa

SEQ ID NO: 15907 - DNA, 20 bp, Artificial Sequence
  MKO10015907_A_Eif6
  gRNA
gctctccgatgccattcccg

SEQ ID NO: 15908 - DNA, 20 bp, Artificial Sequence
  MKO10015908_A_Eif6
  gRNA
ggcgatggatgcgtgcacca

SEQ ID NO: 15909 - DNA, 20 bp, Artificial Sequence
  MKO10015909_A_Eif6
  gRNA
ggccaagttacctgtcaatg

SEQ ID NO: 15910 - DNA, 20 bp, Artificial Sequence
  MKO10015910_A_Elac1
  gRNA
gcatatccatcaccgacccg

SEQ ID NO: 15911 - DNA, 20 bp, Artificial Sequence
  MKO10015911_A_Elac1
  gRNA
tgcggtggttcttcggtgcg

SEQ ID NO: 15912 - DNA, 20 bp, Artificial Sequence
  MKO10015912_A_Elac1
  gRNA
ccaaccgccttggcgagaga

SEQ ID NO: 15913 - DNA, 20 bp, Artificial Sequence
  MKO10015913_A_Elac2
  gRNA
aggcgtccaacgacttatgc

SEQ ID NO: 15914 - DNA, 20 bp, Artificial Sequence
  MKO10015914_A_Elac2
  gRNA
tagactgaaagtcgctcgct

SEQ ID NO: 15915 - DNA, 20 bp, Artificial Sequence
  MKO10015915_A_Elac2
  gRNA
tctttctgactcggatgcat

SEQ ID NO: 15916 - DNA, 20 bp, Artificial Sequence
  MKO10015916_A_Elane
  gRNA
tcgtgtgaacgtatgcactc

SEQ ID NO: 15917 - DNA, 20 bp, Artificial Sequence
  MKO10015917_A_Elane
  gRNA
gagtgcgctcctgtcgccgc

SEQ ID NO: 15918 - DNA, 20 bp, Artificial Sequence
  MKO10015918_A_Elane
  gRNA
taccattaacgccaacgtgc

SEQ ID NO: 15919 - DNA, 20 bp, Artificial Sequence
  MKO10015919_A_Elavl1
  gRNA
gggcctccaaaccgcctagc

SEQ ID NO: 15920 - DNA, 20 bp, Artificial Sequence
  MKO10015920_A_Elavl1
  gRNA
cctcatcggcgtcttgccca

SEQ ID NO: 15921 - DNA, 20 bp, Artificial Sequence
  MKO10015921_A_Elavl1
  gRNA
ttgggcgaatcatcaactcc

SEQ ID NO: 15922 - DNA, 20 bp, Artificial Sequence
  MKO10015922_A_Elavl2
  gRNA
ggtttattcgatttgacaag

SEQ ID NO: 15923 - DNA, 20 bp, Artificial Sequence
  MKO10015923_A_Elavl2
  gRNA
gatgcaaacttatacgtcag

SEQ ID NO: 15924 - DNA, 20 bp, Artificial Sequence
  MKO10015924_A_Elavl2
  gRNA
ttctcggattcttgtcgacc

SEQ ID NO: 15925 - DNA, 20 bp, Artificial Sequence
  MKO10015925_A_Elavl3
  gRNA
aagtgatgattcggccgtac

SEQ ID NO: 15926 - DNA, 20 bp, Artificial Sequence
  MKO10015926_A_Elavl3
  gRNA
gtttgcgaacttgaccgtga

SEQ ID NO: 15927 - DNA, 20 bp, Artificial Sequence
  MKO10015927_A_Elavl3
  gRNA
aagagtctcttcggcagcat

SEQ ID NO: 15928 - DNA, 20 bp, Artificial Sequence
  MKO10015928_A_Elavl4
  gRNA
gtcctacgcccgcccaagct

SEQ ID NO: 15929 - DNA, 20 bp, Artificial Sequence
  MKO10015929_A_Elavl4
  gRNA
agctgtaccagtcccccaac

SEQ ID NO: 15930 - DNA, 20 bp, Artificial Sequence
  MKO10015930_A_Elavl4
  gRNA
tccctgatcgaggccgagct

SEQ ID NO: 15931 - DNA, 20 bp, Artificial Sequence
  MKO10015931_A_Elf1
  gRNA
gatgacgacatcacccttac

SEQ ID NO: 15932 - DNA, 20 bp, Artificial Sequence
  MKO10015932_A_Elf1
  gRNA
gtcgtcggggaatctggccg

SEQ ID NO: 15933 - DNA, 20 bp, Artificial Sequence
  MKO10015933_A_Elf1
  gRNA
ttctttctcttgcgctgctc

SEQ ID NO: 15934 - DNA, 20 bp, Artificial Sequence
  MKO10015934_A_Elf2
  gRNA
cgacgagacttatatgatgc

SEQ ID NO: 15935 - DNA, 20 bp, Artificial Sequence
  MKO10015935_A_Elf2
  gRNA
cgtcgtcatagaccagcacc

SEQ ID NO: 15936 - DNA, 20 bp, Artificial Sequence
  MKO10015936_A_Elf2
  gRNA
ttgagggattcaagaagtcc

SEQ ID NO: 15937 - DNA, 20 bp, Artificial Sequence
  MKO10015937_A_Elf3
  gRNA
cgacttctcccgctgcgaca

SEQ ID NO: 15938 - DNA, 20 bp, Artificial Sequence
  MKO10015938_A_Elf3
  gRNA
ctagcgagcggccccagttc

SEQ ID NO: 15939 - DNA, 20 bp, Artificial Sequence
  MKO10015939_A_Elf3
  gRNA
caaaggggcccgagtcgcct

SEQ ID NO: 15940 - DNA, 20 bp, Artificial Sequence
  MKO10015940_A_Elf4
  gRNA
gatctggatgaggtccacaa

SEQ ID NO: 15941 - DNA, 20 bp, Artificial Sequence
  MKO10015941_A_Elf4
  gRNA
ggggacctgttccacgatca

SEQ ID NO: 15942 - DNA, 20 bp, Artificial Sequence
  MKO10015942_A_Elf4
  gRNA
agtggatgacacgttatttg

SEQ ID NO: 15943 - DNA, 20 bp, Artificial Sequence
  MKO10015943_A_Elf5
  gRNA
ctccagaacattcgctcgca

SEQ ID NO: 15944 - DNA, 20 bp, Artificial Sequence
  MKO10015944_A_Elf5
  gRNA
gaccttgcgagcgaatgttc

SEQ ID NO: 15945 - DNA, 20 bp, Artificial Sequence
  MKO10015945_A_Elf5
  gRNA
tccagttgcttgaaaacaag

SEQ ID NO: 15946 - DNA, 20 bp, Artificial Sequence
  MKO10015946_A_Elfn1
  gRNA
accatacttaagctcgatga

SEQ ID NO: 15947 - DNA, 20 bp, Artificial Sequence
  MKO10015947_A_Elfn1
  gRNA
agtgccgatgctcgccgtac

SEQ ID NO: 15948 - DNA, 20 bp, Artificial Sequence
  MKO10015948_A_Elfn1
  gRNA
gagatctatgttgacgatgt

SEQ ID NO: 15949 - DNA, 20 bp, Artificial Sequence
  MKO10015949_A_Elfn2
  gRNA
cattgagccgttgcggcact

SEQ ID NO: 15950 - DNA, 20 bp, Artificial Sequence
  MKO10015950_A_Elfn2
  gRNA
cttacggctcactgcggcgt

SEQ ID NO: 15951 - DNA, 20 bp, Artificial Sequence
  MKO10015951_A_Elfn2
  gRNA
cttgcatgcgccgcttccgc

SEQ ID NO: 15952 - DNA, 20 bp, Artificial Sequence
  MKO10015952_A_Elk1
  gRNA
ccgagcgcatgtattcattc

SEQ ID NO: 15953 - DNA, 20 bp, Artificial Sequence
  MKO10015953_A_Elk1
  gRNA
tgtaacctcggccatagcca

SEQ ID NO: 15954 - DNA, 20 bp, Artificial Sequence
  MKO10015954_A_Elk1
  gRNA
agcagggatggcgttagcgc

SEQ ID NO: 15955 - DNA, 20 bp, Artificial Sequence
  MKO10015955_A_Elk3
  gRNA
ccgagtggaggtactcgttg

SEQ ID NO: 15956 - DNA, 20 bp, Artificial Sequence
  MKO10015956_A_Elk3
  gRNA
cggctgatctctaccgcgtg

SEQ ID NO: 15957 - DNA, 20 bp, Artificial Sequence
  MKO10015957_A_Elk3
  gRNA
gccggtgccgctccccagtc

SEQ ID NO: 15958 - DNA, 20 bp, Artificial Sequence
  MKO10015958_A_Elk4
  gRNA
cctttacgtagtagtatcgc

SEQ ID NO: 15959 - DNA, 20 bp, Artificial Sequence
  MKO10015959_A_Elk4
  gRNA
cctgcgatactactacgtaa

SEQ ID NO: 15960 - DNA, 20 bp, Artificial Sequence
  MKO10015960_A_Elk4
  gRNA
tatgtagtcattgcgactag

SEQ ID NO: 15961 - DNA, 20 bp, Artificial Sequence
  MKO10015961_A_Ell2
  gRNA
tgcagtcgagcaagcagctc

SEQ ID NO: 15962 - DNA, 20 bp, Artificial Sequence
  MKO10015962_A_Ell2
  gRNA
tctttctcgcgtcatctgat

SEQ ID NO: 15963 - DNA, 20 bp, Artificial Sequence
  MKO10015963_A_Ell2
  gRNA
cttgctcgactgcagaaaga

SEQ ID NO: 15964 - DNA, 20 bp, Artificial Sequence
  MKO10015964_A_Ell3
  gRNA
ttgtgtaccaacgcttaggc

SEQ ID NO: 15965 - DNA, 20 bp, Artificial Sequence
  MKO10015965_A_Ell3
  gRNA
agccaccattagtgccctct

SEQ ID NO: 15966 - DNA, 20 bp, Artificial Sequence
  MKO10015966_A_Ell3
  gRNA
cacttacccctcggtggcct

SEQ ID NO: 15967 - DNA, 20 bp, Artificial Sequence
  MKO10015967_A_Ell
  gRNA
tgtcgcggccaatattggag

SEQ ID NO: 15968 - DNA, 20 bp, Artificial Sequence
  MKO10015968_A_Ell
  gRNA
ggaggtgtagcacccgatct

SEQ ID NO: 15969 - DNA, 20 bp, Artificial Sequence
  MKO10015969_A_Ell
  gRNA
ccgaagtgccatcgtcatta

SEQ ID NO: 15970 - DNA, 20 bp, Artificial Sequence
  MKO10015970_A_Elmo1
  gRNA
ctggagatgtggttaatcga

SEQ ID NO: 15971 - DNA, 20 bp, Artificial Sequence
  MKO10015971_A_Elmo1
  gRNA
ccgggatgttacctttgctc

SEQ ID NO: 15972 - DNA, 20 bp, Artificial Sequence
  MKO10015972_A_Elmo1
  gRNA
cctgagcaaaggtaacatcc

SEQ ID NO: 15973 - DNA, 20 bp, Artificial Sequence
  MKO10015973_A_Elmo2
  gRNA
tagcggagggtgtagtactc

SEQ ID NO: 15974 - DNA, 20 bp, Artificial Sequence
  MKO10015974_A_Elmo2
  gRNA
atcatcaaggaggtgtgcga

SEQ ID NO: 15975 - DNA, 20 bp, Artificial Sequence
  MKO10015975_A_Elmo2
  gRNA
tctctttcagaaacggccgc

SEQ ID NO: 15976 - DNA, 20 bp, Artificial Sequence
  MKO10015976_A_Elmo3
  gRNA
catagtgctccggatgagtc

SEQ ID NO: 15977 - DNA, 20 bp, Artificial Sequence
  MKO10015977_A_Elmo3
  gRNA
ctgcagaatacaagtcgtga

SEQ ID NO: 15978 - DNA, 20 bp, Artificial Sequence
  MKO10015978_A_Elmo3
  gRNA
aaccgcttggagatcaagaa

SEQ ID NO: 15979 - DNA, 20 bp, Artificial Sequence
  MKO10015979_A_Elmod1
  gRNA
atttgctacggcaccaaacc

SEQ ID NO: 15980 - DNA, 20 bp, Artificial Sequence
  MKO10015980_A_Elmod1
  gRNA
ccggaaggtgtgaactgcaa

SEQ ID NO: 15981 - DNA, 20 bp, Artificial Sequence
  MKO10015981_A_Elmod1
  gRNA
ttctgtaacccacgatttgc

SEQ ID NO: 15982 - DNA, 20 bp, Artificial Sequence
  MKO10015982_A_Elmod2
  gRNA
gtgtatagcgaacatcatga

SEQ ID NO: 15983 - DNA, 20 bp, Artificial Sequence
  MKO10015983_A_Elmod2
  gRNA
gatgccaacgaaaaagttga

SEQ ID NO: 15984 - DNA, 20 bp, Artificial Sequence
  MKO10015984_A_Elmod2
  gRNA
acgtgcttactgcagataac

SEQ ID NO: 15985 - DNA, 20 bp, Artificial Sequence
  MKO10015985_A_Elmod3
  gRNA
atctccgagctgacgaacca

SEQ ID NO: 15986 - DNA, 20 bp, Artificial Sequence
  MKO10015986_A_Elmod3
  gRNA
accacctggctgccacccat

SEQ ID NO: 15987 - DNA, 20 bp, Artificial Sequence
  MKO10015987_A_Elmod3
  gRNA
ccagctcatctccttcaacg

SEQ ID NO: 15988 - DNA, 20 bp, Artificial Sequence
  MKO10015988_A_Elmsan1
  gRNA
cgtcagtcatcgtgacccgc

SEQ ID NO: 15989 - DNA, 20 bp, Artificial Sequence
  MKO10015989_A_Elmsan1
  gRNA
ccctgcagacgaatcaacgt

SEQ ID NO: 15990 - DNA, 20 bp, Artificial Sequence
  MKO10015990_A_Elmsan1
  gRNA
gaactcgggtggaccgcctg

SEQ ID NO: 15991 - DNA, 20 bp, Artificial Sequence
  MKO10015991_A_Eln
  gRNA
actccaccaggaagtccgcc

SEQ ID NO: 15992 - DNA, 20 bp, Artificial Sequence
  MKO10015992_A_Eln
  gRNA
acctggataatagactccac

SEQ ID NO: 15993 - DNA, 20 bp, Artificial Sequence
  MKO10015993_A_Eln
  gRNA
tcctccaggtgccggacttc

SEQ ID NO: 15994 - DNA, 20 bp, Artificial Sequence
  MKO10015994_A_Elof1
  gRNA
agggaccgtgctcgaaacac

SEQ ID NO: 15995 - DNA, 20 bp, Artificial Sequence
  MKO10015995_A_Elof1
  gRNA
tgggacgaagaaagtccaaa

SEQ ID NO: 15996 - DNA, 20 bp, Artificial Sequence
  MKO10015996_A_Elof1
  gRNA
tgactccagtgtttcgagca

SEQ ID NO: 15997 - DNA, 20 bp, Artificial Sequence
  MKO10015997_A_Elovl1
  gRNA
gtctatggggtcacagcgcc

SEQ ID NO: 15998 - DNA, 20 bp, Artificial Sequence
  MKO10015998_A_Elovl1
  gRNA
cttctcacagatggttcgag

SEQ ID NO: 15999 - DNA, 20 bp, Artificial Sequence
  MKO10015999_A_Elovl1
  gRNA
ctacttacccgaagtgcttc

SEQ ID NO: 16000 - DNA, 20 bp, Artificial Sequence
  MKO10016000_A_Elovl2
  gRNA
tttacagattctcgagttcg

SEQ ID NO: 16001 - DNA, 20 bp, Artificial Sequence
  MKO10016001_A_Elovl2
  gRNA
tcacgtacctgctctcgata

SEQ ID NO: 16002 - DNA, 20 bp, Artificial Sequence
  MKO10016002_A_Elovl2
  gRNA
acgcgtccatgttcaacatc

SEQ ID NO: 16003 - DNA, 20 bp, Artificial Sequence
  MKO10016003_A_Elovl3
  gRNA
tacggcgtcatccgtgtaga

SEQ ID NO: 16004 - DNA, 20 bp, Artificial Sequence
  MKO10016004_A_Elovl3
  gRNA
ctatgacttcgagacgtttc

SEQ ID NO: 16005 - DNA, 20 bp, Artificial Sequence
  MKO10016005_A_Elovl3
  gRNA
agaagtgttccgttgttgtg

SEQ ID NO: 16006 - DNA, 20 bp, Artificial Sequence
  MKO10016006_A_Elovl4
  gRNA
agcgtgcttatgcttatcgt

SEQ ID NO: 16007 - DNA, 20 bp, Artificial Sequence
  MKO10016007_A_Elovl4
  gRNA
ttcatgggatcatacaacgc

SEQ ID NO: 16008 - DNA, 20 bp, Artificial Sequence
  MKO10016008_A_Elovl4
  gRNA
atcgaaaggcgttgagtatt

SEQ ID NO: 16009 - DNA, 20 bp, Artificial Sequence
  MKO10016009_A_Elovl5
  gRNA
cgcgggagaatccgatatga

SEQ ID NO: 16010 - DNA, 20 bp, Artificial Sequence
  MKO10016010_A_Elovl5
  gRNA
cgtccatgcgtccctacctc

SEQ ID NO: 16011 - DNA, 20 bp, Artificial Sequence
  MKO10016011_A_Elovl5
  gRNA
gaccatagtacgagtacatg

SEQ ID NO: 16012 - DNA, 20 bp, Artificial Sequence
  MKO10016012_A_Elovl6
  gRNA
tgtactcttactacgccttg

SEQ ID NO: 16013 - DNA, 20 bp, Artificial Sequence
  MKO10016013_A_Elovl6
  gRNA
cgctgactcttgccgtcttc

SEQ ID NO: 16014 - DNA, 20 bp, Artificial Sequence
  MKO10016014_A_Elovl6
  gRNA
ctgacactactcagccttcg

SEQ ID NO: 16015 - DNA, 20 bp, Artificial Sequence
  MKO10016015_A_Elovl7
  gRNA
tccacggcatgatcgtatga

SEQ ID NO: 16016 - DNA, 20 bp, Artificial Sequence
  MKO10016016_A_Elovl7
  gRNA
tccatcatacgatcatgccg

SEQ ID NO: 16017 - DNA, 20 bp, Artificial Sequence
  MKO10016017_A_Elovl7
  gRNA
gtctaacagctcgatgaatt

SEQ ID NO: 16018 - DNA, 20 bp, Artificial Sequence
  MKO10016018_A_Elp2
  gRNA
ggacacttaccattagtacc

SEQ ID NO: 16019 - DNA, 20 bp, Artificial Sequence
  MKO10016019_A_Elp2
  gRNA
agcggtgtggccattcagat

SEQ ID NO: 16020 - DNA, 20 bp, Artificial Sequence
  MKO10016020_A_Elp2
  gRNA
cagattctactgtgcgaatc

SEQ ID NO: 16021 - DNA, 20 bp, Artificial Sequence
  MKO10016021_A_Elp3
  gRNA
ctgcagcgatgatatccacc

SEQ ID NO: 16022 - DNA, 20 bp, Artificial Sequence
  MKO10016022_A_Elp3
  gRNA
atcaagatctttcgatagtg

SEQ ID NO: 16023 - DNA, 20 bp, Artificial Sequence
  MKO10016023_A_Elp3
  gRNA
gaatactcaaaatcggagtc

SEQ ID NO: 16024 - DNA, 20 bp, Artificial Sequence
  MKO10016024_A_Elp4
  gRNA
ccggtctcgtcgtcacgatt

SEQ ID NO: 16025 - DNA, 20 bp, Artificial Sequence
  MKO10016025_A_Elp4
  gRNA
ccaaatcgtgacgacgagac

SEQ ID NO: 16026 - DNA, 20 bp, Artificial Sequence
  MKO10016026_A_Elp4
  gRNA
gtaccagttacaacccaaga

SEQ ID NO: 16027 - DNA, 20 bp, Artificial Sequence
  MKO10016027_A_Elp5
  gRNA
agcgaagaagagtttcgcga

SEQ ID NO: 16028 - DNA, 20 bp, Artificial Sequence
  MKO10016028_A_Elp5
  gRNA
ccaacaacgtgcaacttacc

SEQ ID NO: 16029 - DNA, 20 bp, Artificial Sequence
  MKO10016029_A_Elp5
  gRNA
cctggtaagttgcacgttgt

SEQ ID NO: 16030 - DNA, 20 bp, Artificial Sequence
  MKO10016030_A_Elp6
  gRNA
gtcactgtatacgtttattc

SEQ ID NO: 16031 - DNA, 20 bp, Artificial Sequence
  MKO10016031_A_Elp6
  gRNA
taaacgtatacagtgactgc

SEQ ID NO: 16032 - DNA, 20 bp, Artificial Sequence
  MKO10016032_A_Elp6
  gRNA
catctgtcttagcgtcacag

SEQ ID NO: 16033 - DNA, 20 bp, Artificial Sequence
  MKO10016033_A_Eltd1
  gRNA
aatggcgtcacgatttgtga

SEQ ID NO: 16034 - DNA, 20 bp, Artificial Sequence
  MKO10016034_A_Eltd1
  gRNA
accattgtgcacttcgcact

SEQ ID NO: 16035 - DNA, 20 bp, Artificial Sequence
  MKO10016035_A_Eltd1
  gRNA
attaatgtttgcagcgatgc

SEQ ID NO: 16036 - DNA, 20 bp, Artificial Sequence
  MKO10016036_A_Emb
  gRNA
aaagtcgttgatcgcttacg

SEQ ID NO: 16037 - DNA, 20 bp, Artificial Sequence
  MKO10016037_A_Emb
  gRNA
atactgaccgtggatgttaa

SEQ ID NO: 16038 - DNA, 20 bp, Artificial Sequence
  MKO10016038_A_Emb
  gRNA
catgggtaatgaaaccgcac

SEQ ID NO: 16039 - DNA, 20 bp, Artificial Sequence
  MKO10016039_A_Emc10
  gRNA
gtgacttaccgctgggacga

SEQ ID NO: 16040 - DNA, 20 bp, Artificial Sequence
  MKO10016040_A_Emc10
  gRNA
ccgaaaggtgcgactccacc

SEQ ID NO: 16041 - DNA, 20 bp, Artificial Sequence
  MKO10016041_A_Emc10
  gRNA
tcgggacccggaccctgtag

SEQ ID NO: 16042 - DNA, 20 bp, Artificial Sequence
  MKO10016042_A_Emc1
  gRNA
tcttcgtagaccgcggccgc

SEQ ID NO: 16043 - DNA, 20 bp, Artificial Sequence
  MKO10016043_A_Emc1
  gRNA
ggcttcaatcatggcggtcg

SEQ ID NO: 16044 - DNA, 20 bp, Artificial Sequence
  MKO10016044_A_Emc1
  gRNA
agggcgcctcatgcgttcct

SEQ ID NO: 16045 - DNA, 20 bp, Artificial Sequence
  MKO10016045_A_Emc2
  gRNA
agtcatcccgaccatagtct

SEQ ID NO: 16046 - DNA, 20 bp, Artificial Sequence
  MKO10016046_A_Emc2
  gRNA
gacaaacttacagtgttagt

SEQ ID NO: 16047 - DNA, 20 bp, Artificial Sequence
  MKO10016047_A_Emc2
  gRNA
atgattgcagccctagacta

SEQ ID NO: 16048 - DNA, 20 bp, Artificial Sequence
  MKO10016048_A_Emc3
  gRNA
catccgccgataagaatcat

SEQ ID NO: 16049 - DNA, 20 bp, Artificial Sequence
  MKO10016049_A_Emc3
  gRNA
tgctcacactagacgcatcc

SEQ ID NO: 16050 - DNA, 20 bp, Artificial Sequence
  MKO10016050_A_Emc3
  gRNA
gtcctcccaatgattcttat

SEQ ID NO: 16051 - DNA, 20 bp, Artificial Sequence
  MKO10016051_A_Emc4
  gRNA
ccggtcggtctcttgcacgc

SEQ ID NO: 16052 - DNA, 20 bp, Artificial Sequence
  MKO10016052_A_Emc4
  gRNA
ccagcgtgcaagagaccgac

SEQ ID NO: 16053 - DNA, 20 bp, Artificial Sequence
  MKO10016053_A_Emc4
  gRNA
gcgacccattcaagcactta

SEQ ID NO: 16054 - DNA, 20 bp, Artificial Sequence
  MKO10016054_A_Emc6
  gRNA
agccgtgcgaggcaacgccg

SEQ ID NO: 16055 - DNA, 20 bp, Artificial Sequence
  MKO10016055_A_Emc6
  gRNA
ccggcagtaatccaggaccg

SEQ ID NO: 16056 - DNA, 20 bp, Artificial Sequence
  MKO10016056_A_Emc6
  gRNA
agggccgccgttcatcagcg

SEQ ID NO: 16057 - DNA, 20 bp, Artificial Sequence
  MKO10016057_A_Emc7
  gRNA
cgagtcgatatcacttcaaa

SEQ ID NO: 16058 - DNA, 20 bp, Artificial Sequence
  MKO10016058_A_Emc7
  gRNA
cagcttacccgtctcatgtc

SEQ ID NO: 16059 - DNA, 20 bp, Artificial Sequence
  MKO10016059_A_Emc7
  gRNA
gccactactagatttgccag

SEQ ID NO: 16060 - DNA, 20 bp, Artificial Sequence
  MKO10016060_A_Emc8
  gRNA
cggtgatgccgcactcatca

SEQ ID NO: 16061 - DNA, 20 bp, Artificial Sequence
  MKO10016061_A_Emc8
  gRNA
tctcgtgctgctcgtacacg

SEQ ID NO: 16062 - DNA, 20 bp, Artificial Sequence
  MKO10016062_A_Emc8
  gRNA
ccgctcctacgaaacactcg

SEQ ID NO: 16063 - DNA, 20 bp, Artificial Sequence
  MKO10016063_A_Emc9
  gRNA
tgatttgagtgttaagccgc

SEQ ID NO: 16064 - DNA, 20 bp, Artificial Sequence
  MKO10016064_A_Emc9
  gRNA
ctaccatgccaatgcggttt

SEQ ID NO: 16065 - DNA, 20 bp, Artificial Sequence
  MKO10016065_A_Emc9
  gRNA
acaatgactggaggtacacg

SEQ ID NO: 16066 - DNA, 20 bp, Artificial Sequence
  MKO10016066_A_Emcn
  gRNA
aatgctaattcaacgctacc

SEQ ID NO: 16067 - DNA, 20 bp, Artificial Sequence
  MKO10016067_A_Emcn
  gRNA
tcgggaggtgttccatctgc

SEQ ID NO: 16068 - DNA, 20 bp, Artificial Sequence
  MKO10016068_A_Emcn
  gRNA
agtcgcttgaagcagccgca

SEQ ID NO: 16069 - DNA, 20 bp, Artificial Sequence
  MKO10016069_A_Emd
  gRNA
agacttggattcagccgccg

SEQ ID NO: 16070 - DNA, 20 bp, Artificial Sequence
  MKO10016070_A_Emd
  gRNA
tcgagtacgagacccagaga

SEQ ID NO: 16071 - DNA, 20 bp, Artificial Sequence
  MKO10016071_A_Emd
  gRNA
acccttgctctggtaaagta

SEQ ID NO: 16072 - DNA, 20 bp, Artificial Sequence
  MKO10016072_A_Eme1
  gRNA
ctcctccaagtgatgcttcg

SEQ ID NO: 16073 - DNA, 20 bp, Artificial Sequence
  MKO10016073_A_Eme1
  gRNA
ccatacctcgaagcatcact

SEQ ID NO: 16074 - DNA, 20 bp, Artificial Sequence
  MKO10016074_A_Eme1
  gRNA
catcagttacaaagctccga

SEQ ID NO: 16075 - DNA, 20 bp, Artificial Sequence
  MKO10016075_A_Eme2
  gRNA
ccgcatcgaaccgcagcacc

SEQ ID NO: 16076 - DNA, 20 bp, Artificial Sequence
  MKO10016076_A_Eme2
  gRNA
gcctgacaacgttccactgc

SEQ ID NO: 16077 - DNA, 20 bp, Artificial Sequence
  MKO10016077_A_Eme2
  gRNA
ttggactggacgcatacctg

SEQ ID NO: 16078 - DNA, 20 bp, Artificial Sequence
  MKO10016078_A_Emg1
  gRNA
gaaccgagctggcttgctac

SEQ ID NO: 16079 - DNA, 20 bp, Artificial Sequence
  MKO10016079_A_Emg1
  gRNA
ctgagcgtccgagcagccga

SEQ ID NO: 16080 - DNA, 20 bp, Artificial Sequence
  MKO10016080_A_Emg1
  gRNA
catcagtgacattcgagagt

SEQ ID NO: 16081 - DNA, 20 bp, Artificial Sequence
  MKO10016081_A_Emid1
  gRNA
cgtggacggacagcggcatg

SEQ ID NO: 16082 - DNA, 20 bp, Artificial Sequence
  MKO10016082_A_Emid1
  gRNA
catgccgctgtccgtccacg

SEQ ID NO: 16083 - DNA, 20 bp, Artificial Sequence
  MKO10016083_A_Emid1
  gRNA
gagtgctacagaactgcccg

SEQ ID NO: 16084 - DNA, 20 bp, Artificial Sequence
  MKO10016084_A_Emilin1
  gRNA
gctcgtggagtgagtcgttc

SEQ ID NO: 16085 - DNA, 20 bp, Artificial Sequence
  MKO10016085_A_Emilin1
  gRNA
tagggagcggctgcgaaccc

SEQ ID NO: 16086 - DNA, 20 bp, Artificial Sequence
  MKO10016086_A_Emilin1
  gRNA
ttgtaagccacccgatagcg

SEQ ID NO: 16087 - DNA, 20 bp, Artificial Sequence
  MKO10016087_A_Emilin2
  gRNA
acgcagactttgatgcgaga

SEQ ID NO: 16088 - DNA, 20 bp, Artificial Sequence
  MKO10016088_A_Emilin2
  gRNA
gaatacgtgcgagtacaagc

SEQ ID NO: 16089 - DNA, 20 bp, Artificial Sequence
  MKO10016089_A_Emilin2
  gRNA
ccgacttacaccagggcgga

SEQ ID NO: 16090 - DNA, 20 bp, Artificial Sequence
  MKO10016090_A_Emilin3
  gRNA
agggcccctgtcgtacctat

SEQ ID NO: 16091 - DNA, 20 bp, Artificial Sequence
  MKO10016091_A_Emilin3
  gRNA
tgggccgccgtctgtccgtg

SEQ ID NO: 16092 - DNA, 20 bp, Artificial Sequence
  MKO10016092_A_Emilin3
  gRNA
gcgcaagctcatccgcggcc

SEQ ID NO: 16093 - DNA, 20 bp, Artificial Sequence
  MKO10016093_A_Eml1
  gRNA
gtcagaccgcatcgcctctc

SEQ ID NO: 16094 - DNA, 20 bp, Artificial Sequence
  MKO10016094_A_Eml1
  gRNA
gttcagcctccgaaccacgt

SEQ ID NO: 16095 - DNA, 20 bp, Artificial Sequence
  MKO10016095_A_Eml1
  gRNA
tcttccgaaagagtgtctcc

SEQ ID NO: 16096 - DNA, 20 bp, Artificial Sequence
  MKO10016096_A_Eml2
  gRNA
taggtgggcgccagttcgtc

SEQ ID NO: 16097 - DNA, 20 bp, Artificial Sequence
  MKO10016097_A_Eml2
  gRNA
ctatcgaggccgggactgca

SEQ ID NO: 16098 - DNA, 20 bp, Artificial Sequence
  MKO10016098_A_Eml2
  gRNA
ctcctccacgctgtacagta

SEQ ID NO: 16099 - DNA, 20 bp, Artificial Sequence
  MKO10016099_A_Eml3
  gRNA
ataattgctcctccgagatc

SEQ ID NO: 16100 - DNA, 20 bp, Artificial Sequence
  MKO10016100_A_Eml3
  gRNA
cttcctgcacccgaagtcgc

SEQ ID NO: 16101 - DNA, 20 bp, Artificial Sequence
  MKO10016101_A_Eml3
  gRNA
ctggcatatcagccccgaca

SEQ ID NO: 16102 - DNA, 20 bp, Artificial Sequence
  MKO10016102_A_Eml4
  gRNA
cgcaagatggacggtttcgc

SEQ ID NO: 16103 - DNA, 20 bp, Artificial Sequence
  MKO10016103_A_Eml4
  gRNA
aaagatgtcatcgtcaatca

SEQ ID NO: 16104 - DNA, 20 bp, Artificial Sequence
  MKO10016104_A_Eml4
  gRNA
tctatgtcctgtataaccaa

SEQ ID NO: 16105 - DNA, 20 bp, Artificial Sequence
  MKO10016105_A_Eml5
  gRNA
ttaccaaaaactccgcgttt

SEQ ID NO: 16106 - DNA, 20 bp, Artificial Sequence
  MKO10016106_A_Eml5
  gRNA
gttgctaccaacactcgctc

SEQ ID NO: 16107 - DNA, 20 bp, Artificial Sequence
  MKO10016107_A_Eml5
  gRNA
ccacagctgacgagtttatt

SEQ ID NO: 16108 - DNA, 20 bp, Artificial Sequence
  MKO10016108_A_Eml6
  gRNA
gcaccgggcgccaatttccg

SEQ ID NO: 16109 - DNA, 20 bp, Artificial Sequence
  MKO10016109_A_Eml6
  gRNA
cgcgcggtgtcggcttatca

SEQ ID NO: 16110 - DNA, 20 bp, Artificial Sequence
  MKO10016110_A_Eml6
  gRNA
gtccatccgagtcaaaagcc

SEQ ID NO: 16111 - DNA, 20 bp, Artificial Sequence
  MKO10016111_A_Emp1
  gRNA
catcattacgcccacagcga

SEQ ID NO: 16112 - DNA, 20 bp, Artificial Sequence
  MKO10016112_A_Emp1
  gRNA
gggactcacgttggcaatgg

SEQ ID NO: 16113 - DNA, 20 bp, Artificial Sequence
  MKO10016113_A_Emp1
  gRNA
tgcgacggctccctgtccta

SEQ ID NO: 16114 - DNA, 20 bp, Artificial Sequence
  MKO10016114_A_Emp2
  gRNA
ttggcgccggtctgtataga

SEQ ID NO: 16115 - DNA, 20 bp, Artificial Sequence
  MKO10016115_A_Emp2
  gRNA
gccggtcagctcattgatct

SEQ ID NO: 16116 - DNA, 20 bp, Artificial Sequence
  MKO10016116_A_Emp2
  gRNA
ctacggctactctttcatcc

SEQ ID NO: 16117 - DNA, 20 bp, Artificial Sequence
  MKO10016117_A_Emp3
  gRNA
gtgctcattcacgtttccgc

SEQ ID NO: 16118 - DNA, 20 bp, Artificial Sequence
  MKO10016118_A_Emp3
  gRNA
taaccgaagctgcccccact

SEQ ID NO: 16119 - DNA, 20 bp, Artificial Sequence
  MKO10016119_A_Emp3
  gRNA
gaagagccctccgcgccgca

SEQ ID NO: 16120 - DNA, 20 bp, Artificial Sequence
  MKO10016120_A_Emr1
  gRNA
aaagttggtttgtccattgc

SEQ ID NO: 16121 - DNA, 20 bp, Artificial Sequence
  MKO10016121_A_Emr1
  gRNA
tcagtgcaggtggcataagc

SEQ ID NO: 16122 - DNA, 20 bp, Artificial Sequence
  MKO10016122_A_Emr1
  gRNA
tacagctgtacctgtcaacc

SEQ ID NO: 16123 - DNA, 20 bp, Artificial Sequence
  MKO10016123_A_Emr4
  gRNA
attgatcaccctgattgtta

SEQ ID NO: 16124 - DNA, 20 bp, Artificial Sequence
  MKO10016124_A_Emr4
  gRNA
atagacttaccataacaatc

SEQ ID NO: 16125 - DNA, 20 bp, Artificial Sequence
  MKO10016125_A_Emr4
  gRNA
ttcctggaatgctgcttatc

SEQ ID NO: 16126 - DNA, 20 bp, Artificial Sequence
  MKO10016126_A_Emx1
  gRNA
ccctccatagagcgagcggc

SEQ ID NO: 16127 - DNA, 20 bp, Artificial Sequence
  MKO10016127_A_Emx1
  gRNA
ggtgaaaccccgcttagccg

SEQ ID NO: 16128 - DNA, 20 bp, Artificial Sequence
  MKO10016128_A_Emx1
  gRNA
gcttcgtggcgatgcgccac

SEQ ID NO: 16129 - DNA, 20 bp, Artificial Sequence
  MKO10016129_A_Emx2
  gRNA
tcggcgcagcatgtttcagc

SEQ ID NO: 16130 - DNA, 20 bp, Artificial Sequence
  MKO10016130_A_Emx2
  gRNA
catccaccgctaccgatatc

SEQ ID NO: 16131 - DNA, 20 bp, Artificial Sequence
  MKO10016131_A_Emx2
  gRNA
tttccgctcccaccacgtaa

SEQ ID NO: 16132 - DNA, 20 bp, Artificial Sequence
  MKO10016132_A_En1
  gRNA
cgcatccaaagccgggaacc

SEQ ID NO: 16133 - DNA, 20 bp, Artificial Sequence
  MKO10016133_A_En1
  gRNA
gcctaaaagtcagcgcgact

SEQ ID NO: 16134 - DNA, 20 bp, Artificial Sequence
  MKO10016134_A_En1
  gRNA
gcggccgcggacggcgttca

SEQ ID NO: 16135 - DNA, 20 bp, Artificial Sequence
  MKO10016135_A_En2
  gRNA
gtgcgcacgctgggttcggt

SEQ ID NO: 16136 - DNA, 20 bp, Artificial Sequence
  MKO10016136_A_En2
  gRNA
gaccctgcggtcgacggaga

SEQ ID NO: 16137 - DNA, 20 bp, Artificial Sequence
  MKO10016137_A_En2
  gRNA
ccgtggtggaatggttgtac

SEQ ID NO: 16138 - DNA, 20 bp, Artificial Sequence
  MKO10016138_A_Enah
  gRNA
catggcacttgcgaagacat

SEQ ID NO: 16139 - DNA, 20 bp, Artificial Sequence
  MKO10016139_A_Enah
  gRNA
cttagaagtgttaaattcac

SEQ ID NO: 16140 - DNA, 20 bp, Artificial Sequence
  MKO10016140_A_Enah
  gRNA
cagaaagattcaagaccatc

SEQ ID NO: 16141 - DNA, 20 bp, Artificial Sequence
  MKO10016141_A_Enam
  gRNA
atgccaatgccccgaatgcc

SEQ ID NO: 16142 - DNA, 20 bp, Artificial Sequence
  MKO10016142_A_Enam
  gRNA
gctctttcagatgatgccta

SEQ ID NO: 16143 - DNA, 20 bp, Artificial Sequence
  MKO10016143_A_Enam
  gRNA
ctagcctcacctgaggtggc

SEQ ID NO: 16144 - DNA, 20 bp, Artificial Sequence
  MKO10016144_A_Enc1
  gRNA
gcgcatgagctgccacgccg

SEQ ID NO: 16145 - DNA, 20 bp, Artificial Sequence
  MKO10016145_A_Enc1
  gRNA
atggtagccccactccgcga

SEQ ID NO: 16146 - DNA, 20 bp, Artificial Sequence
  MKO10016146_A_Enc1
  gRNA
tagactacgcatactcctcc

SEQ ID NO: 16147 - DNA, 20 bp, Artificial Sequence
  MKO10016147_A_Endod1
  gRNA
cgggcgcgcagcgcgaaacg

SEQ ID NO: 16148 - DNA, 20 bp, Artificial Sequence
  MKO10016148_A_Endod1
  gRNA
tggcgaccgaagcgcacgtg

SEQ ID NO: 16149 - DNA, 20 bp, Artificial Sequence
  MKO10016149_A_Endod1
  gRNA
agccactgtctcatacctcg

SEQ ID NO: 16150 - DNA, 20 bp, Artificial Sequence
  MKO10016150_A_Endog
  gRNA
cgctacggtccccgtcgcca

SEQ ID NO: 16151 - DNA, 20 bp, Artificial Sequence
  MKO10016151_A_Endog
  gRNA
acgtagctcgatctgcccac

SEQ ID NO: 16152 - DNA, 20 bp, Artificial Sequence
  MKO10016152_A_Endog
  gRNA
agctacgacccgcgcacgcg

SEQ ID NO: 16153 - DNA, 20 bp, Artificial Sequence
  MKO10016153_A_Endou
  gRNA
ggtgcttgtcgtaggcttcc

SEQ ID NO: 16154 - DNA, 20 bp, Artificial Sequence
  MKO10016154_A_Endou
  gRNA
cagcagcgatgccgtcacta

SEQ ID NO: 16155 - DNA, 20 bp, Artificial Sequence
  MKO10016155_A_Endou
  gRNA
gcatctccgagaccatctac

SEQ ID NO: 16156 - DNA, 20 bp, Artificial Sequence
  MKO10016156_A_Endov
  gRNA
aacggggtgcttcaccaacg

SEQ ID NO: 16157 - DNA, 20 bp, Artificial Sequence
  MKO10016157_A_Endov
  gRNA
cagccgcatggttggcctga

SEQ ID NO: 16158 - DNA, 20 bp, Artificial Sequence
  MKO10016158_A_Endov
  gRNA
ggctccgtaggtcgttcttg

SEQ ID NO: 16159 - DNA, 20 bp, Artificial Sequence
  MKO10016159_A_Engase
  gRNA
ggagctcctccagcgtcgac

SEQ ID NO: 16160 - DNA, 20 bp, Artificial Sequence
  MKO10016160_A_Engase
  gRNA
taggatcaacgaggatcaag

SEQ ID NO: 16161 - DNA, 20 bp, Artificial Sequence
  MKO10016161_A_Engase
  gRNA
agatgtcgatatactgccag

SEQ ID NO: 16162 - DNA, 20 bp, Artificial Sequence
  MKO10016162_A_Eng
  gRNA
gtcatccagtgctgctatcg

SEQ ID NO: 16163 - DNA, 20 bp, Artificial Sequence
  MKO10016163_A_Eng
  gRNA
aaacgtcacctcaccccttg

SEQ ID NO: 16164 - DNA, 20 bp, Artificial Sequence
  MKO10016164_A_Eng
  gRNA
ggtgacgtttaccaccagcc

SEQ ID NO: 16165 - DNA, 20 bp, Artificial Sequence
  MKO10016165_A_Enho
  gRNA
cgatggcgatgagagcccct

SEQ ID NO: 16166 - DNA, 20 bp, Artificial Sequence
  MKO10016166_A_Enho
  gRNA
cgacgtcagcagatcgagaa

SEQ ID NO: 16167 - DNA, 20 bp, Artificial Sequence
  MKO10016167_A_Enho
  gRNA
ctcatcgccatcgtctgcaa

SEQ ID NO: 16168 - DNA, 20 bp, Artificial Sequence
  MKO10016168_A_Enkd1
  gRNA
gcgtggcgttgtagcgctcc

SEQ ID NO: 16169 - DNA, 20 bp, Artificial Sequence
  MKO10016169_A_Enkd1
  gRNA
gcccgagagatcctagagcg

SEQ ID NO: 16170 - DNA, 20 bp, Artificial Sequence
  MKO10016170_A_Enkd1
  gRNA
taggagagacccccgaaccg

SEQ ID NO: 16171 - DNA, 20 bp, Artificial Sequence
  MKO10016171_A_Enkur
  gRNA
gagaaccgatcatccagtta

SEQ ID NO: 16172 - DNA, 20 bp, Artificial Sequence
  MKO10016172_A_Enkur
  gRNA
gtacatatgcaagcgaaatg

SEQ ID NO: 16173 - DNA, 20 bp, Artificial Sequence
  MKO10016173_A_Enkur
  gRNA
tcggttctcaagggcactgc

SEQ ID NO: 16174 - DNA, 20 bp, Artificial Sequence
  MKO10016174_A_Eno1
  gRNA
ggccactcaccgggacaggc

SEQ ID NO: 16175 - DNA, 20 bp, Artificial Sequence
  MKO10016175_A_Eno1
  gRNA
tccaggtctcttccgagctg

SEQ ID NO: 16176 - DNA, 20 bp, Artificial Sequence
  MKO10016176_A_Eno1
  gRNA
cctgcagaaagtgaatgttg

SEQ ID NO: 16177 - DNA, 20 bp, Artificial Sequence
  MKO10016177_A_Eno2
  gRNA
ggggacaaacagcgttactt

SEQ ID NO: 16178 - DNA, 20 bp, Artificial Sequence
  MKO10016178_A_Eno2
  gRNA
ctgccctcagggtatctccg

SEQ ID NO: 16179 - DNA, 20 bp, Artificial Sequence
  MKO10016179_A_Eno2
  gRNA
gatgccggtggaggctccac

SEQ ID NO: 16180 - DNA, 20 bp, Artificial Sequence
  MKO10016180_A_Eno3
  gRNA
cgacacatcgcagatcttgc

SEQ ID NO: 16181 - DNA, 20 bp, Artificial Sequence
  MKO10016181_A_Eno3
  gRNA
ctgcaagatctgcgatgtgt

SEQ ID NO: 16182 - DNA, 20 bp, Artificial Sequence
  MKO10016182_A_Eno3
  gRNA
tggagacaaagcacgatacc

SEQ ID NO: 16183 - DNA, 20 bp, Artificial Sequence
  MKO10016183_A_Eno4
  gRNA
tccacgacttcaaagtgcgt

SEQ ID NO: 16184 - DNA, 20 bp, Artificial Sequence
  MKO10016184_A_Eno4
  gRNA
ccctacgcactttgaagtcg

SEQ ID NO: 16185 - DNA, 20 bp, Artificial Sequence
  MKO10016185_A_Eno4
  gRNA
cgatcctctctacttaaccc

SEQ ID NO: 16186 - DNA, 20 bp, Artificial Sequence
  MKO10016186_A_Enoph1
  gRNA
cggggctgttccgatacccg

SEQ ID NO: 16187 - DNA, 20 bp, Artificial Sequence
  MKO10016187_A_Enoph1
  gRNA
cggtgacatccgtgagaaac

SEQ ID NO: 16188 - DNA, 20 bp, Artificial Sequence
  MKO10016188_A_Enoph1
  gRNA
ctgtggtggacaacgtgtac

SEQ ID NO: 16189 - DNA, 20 bp, Artificial Sequence
  MKO10016189_A_Enox1
  gRNA
cccattaacccgatgatacc

SEQ ID NO: 16190 - DNA, 20 bp, Artificial Sequence
  MKO10016190_A_Enox1
  gRNA
ggagcggcatcgacgcaaac

SEQ ID NO: 16191 - DNA, 20 bp, Artificial Sequence
  MKO10016191_A_Enox1
  gRNA
ttgacgacagccacttccgt

SEQ ID NO: 16192 - DNA, 20 bp, Artificial Sequence
  MKO10016192_A_Enox2
  gRNA
tactagagcccagacgaatt

SEQ ID NO: 16193 - DNA, 20 bp, Artificial Sequence
  MKO10016193_A_Enox2
  gRNA
caacagccatgtccgccgcc

SEQ ID NO: 16194 - DNA, 20 bp, Artificial Sequence
  MKO10016194_A_Enox2
  gRNA
accgattcctccagatatgc

SEQ ID NO: 16195 - DNA, 20 bp, Artificial Sequence
  MKO10016195_A_Enpep
  gRNA
ttagatgaggccgatagtag

SEQ ID NO: 16196 - DNA, 20 bp, Artificial Sequence
  MKO10016196_A_Enpep
  gRNA
cttcgaagactacttcgcta

SEQ ID NO: 16197 - DNA, 20 bp, Artificial Sequence
  MKO10016197_A_Enpep
  gRNA
gctttacgaccccctactat

SEQ ID NO: 16198 - DNA, 20 bp, Artificial Sequence
  MKO10016198_A_Enpp1
  gRNA
atgtgaaagcatcgataccc

SEQ ID NO: 16199 - DNA, 20 bp, Artificial Sequence
  MKO10016199_A_Enpp1
  gRNA
ttaccttctttggcgcagct

SEQ ID NO: 16200 - DNA, 20 bp, Artificial Sequence
  MKO10016200_A_Enpp1
  gRNA
aaaccaagctgcgccaaaga

SEQ ID NO: 16201 - DNA, 20 bp, Artificial Sequence
  MKO10016201_A_Enpp2
  gRNA
taagcagagattgacgccga

SEQ ID NO: 16202 - DNA, 20 bp, Artificial Sequence
  MKO10016202_A_Enpp2
  gRNA
tccctcggcatggcaagaca

SEQ ID NO: 16203 - DNA, 20 bp, Artificial Sequence
  MKO10016203_A_Enpp2
  gRNA
tcacagcaagtcgaattaag

SEQ ID NO: 16204 - DNA, 20 bp, Artificial Sequence
  MKO10016204_A_Enpp3
  gRNA
acgtgcaatttattccgttg

SEQ ID NO: 16205 - DNA, 20 bp, Artificial Sequence
  MKO10016205_A_Enpp3
  gRNA
ctgtagacagtcatccgcac

SEQ ID NO: 16206 - DNA, 20 bp, Artificial Sequence
  MKO10016206_A_Enpp3
  gRNA
tgctttgactcatcgcacag

SEQ ID NO: 16207 - DNA, 20 bp, Artificial Sequence
  MKO10016207_A_Enpp4
  gRNA
ggtcaagcgctgccgctatg

SEQ ID NO: 16208 - DNA, 20 bp, Artificial Sequence
  MKO10016208_A_Enpp4
  gRNA
gatgtaagcggccacaagta

SEQ ID NO: 16209 - DNA, 20 bp, Artificial Sequence
  MKO10016209_A_Enpp4
  gRNA
tgctccgcatgaatatcatg

SEQ ID NO: 16210 - DNA, 20 bp, Artificial Sequence
  MKO10016210_A_Enpp5
  gRNA
aataggtcgggaaactatcg

SEQ ID NO: 16211 - DNA, 20 bp, Artificial Sequence
  MKO10016211_A_Enpp5
  gRNA
ctcatcgtcacgagcgacca

SEQ ID NO: 16212 - DNA, 20 bp, Artificial Sequence
  MKO10016212_A_Enpp5
  gRNA
agttcaaccaatcgtagctg

SEQ ID NO: 16213 - DNA, 20 bp, Artificial Sequence
  MKO10016213_A_Enpp6
  gRNA
cttctacatcgatgcgctca

SEQ ID NO: 16214 - DNA, 20 bp, Artificial Sequence
  MKO10016214_A_Enpp6
  gRNA
acatgtagttgccgatcatc

SEQ ID NO: 16215 - DNA, 20 bp, Artificial Sequence
  MKO10016215_A_Enpp6
  gRNA
catgagcgcatcgatgtaga

SEQ ID NO: 16216 - DNA, 20 bp, Artificial Sequence
  MKO10016216_A_Enpp7
  gRNA
ataccgagcgtggcgtggta

SEQ ID NO: 16217 - DNA, 20 bp, Artificial Sequence
  MKO10016217_A_Enpp7
  gRNA
attgtgcccgagcccaacga

SEQ ID NO: 16218 - DNA, 20 bp, Artificial Sequence
  MKO10016218_A_Enpp7
  gRNA
cgtggtccgatgtgataatc

SEQ ID NO: 16219 - DNA, 20 bp, Artificial Sequence
  MKO10016219_A_Ensa
  gRNA
tgacgagcgaggactttctc

SEQ ID NO: 16220 - DNA, 20 bp, Artificial Sequence
  MKO10016220_A_Ensa
  gRNA
tagcaaaagtactttgactc

SEQ ID NO: 16221 - DNA, 20 bp, Artificial Sequence
  MKO10016221_A_Ensa
  gRNA
ccaggaagcatcactcaact

SEQ ID NO: 16222 - DNA, 20 bp, Artificial Sequence
  MKO10016222_A_Enthd1
  gRNA
ccccgtggcagataatctgc

SEQ ID NO: 16223 - DNA, 20 bp, Artificial Sequence
  MKO10016223_A_Enthd1
  gRNA
ggtccgctgcctcgtccacg

SEQ ID NO: 16224 - DNA, 20 bp, Artificial Sequence
  MKO10016224_A_Enthd1
  gRNA
taaagatgagttcgtcagcc

SEQ ID NO: 16225 - DNA, 20 bp, Artificial Sequence
  MKO10016225_A_Enthd2
  gRNA
ggagtacctcctgaaccgtc

SEQ ID NO: 16226 - DNA, 20 bp, Artificial Sequence
  MKO10016226_A_Enthd2
  gRNA
tactggcgatctcttcaaac

SEQ ID NO: 16227 - DNA, 20 bp, Artificial Sequence
  MKO10016227_A_Enthd2
  gRNA
agctgctgtccagacggttc

SEQ ID NO: 16228 - DNA, 20 bp, Artificial Sequence
  MKO10016228_A_Entpd1
  gRNA
tgcgtacctggccgaatgca

SEQ ID NO: 16229 - DNA, 20 bp, Artificial Sequence
  MKO10016229_A_Entpd1
  gRNA
gttaatagtaatccacccat

SEQ ID NO: 16230 - DNA, 20 bp, Artificial Sequence
  MKO10016230_A_Entpd1
  gRNA
ccggccacttgtagatgtac

SEQ ID NO: 16231 - DNA, 20 bp, Artificial Sequence
  MKO10016231_A_Entpd2
  gRNA
cccacagtatggcatcgttc

SEQ ID NO: 16232 - DNA, 20 bp, Artificial Sequence
  MKO10016232_A_Entpd2
  gRNA
agaagggtcatttgcgtagc

SEQ ID NO: 16233 - DNA, 20 bp, Artificial Sequence
  MKO10016233_A_Entpd2
  gRNA
gctggccatagagccgcaaa

SEQ ID NO: 16234 - DNA, 20 bp, Artificial Sequence
  MKO10016234_A_Entpd3
  gRNA
tatggcgtcgtgctcgatgc

SEQ ID NO: 16235 - DNA, 20 bp, Artificial Sequence
  MKO10016235_A_Entpd3
  gRNA
gaccggcttaccttcagccc

SEQ ID NO: 16236 - DNA, 20 bp, Artificial Sequence
  MKO10016236_A_Entpd3
  gRNA
accaccaaggtgacgatggc

SEQ ID NO: 16237 - DNA, 20 bp, Artificial Sequence
  MKO10016237_A_Entpd4
  gRNA
acagccacccatacttgctg

SEQ ID NO: 16238 - DNA, 20 bp, Artificial Sequence
  MKO10016238_A_Entpd4
  gRNA
cctgtctctttcctgcctct

SEQ ID NO: 16239 - DNA, 20 bp, Artificial Sequence
  MKO10016239_A_Entpd4
  gRNA
ggcttaatcttcatcaccac

SEQ ID NO: 16240 - DNA, 20 bp, Artificial Sequence
  MKO10016240_A_Entpd5
  gRNA
atgctgatcatagcctgcgt

SEQ ID NO: 16241 - DNA, 20 bp, Artificial Sequence
  MKO10016241_A_Entpd5
  gRNA
atgatgctaacgctgccatc

SEQ ID NO: 16242 - DNA, 20 bp, Artificial Sequence
  MKO10016242_A_Entpd5
  gRNA
tgccccattaatgtcagtgc

SEQ ID NO: 16243 - DNA, 20 bp, Artificial Sequence
  MKO10016243_A_Entpd6
  gRNA
ctcttacaggtgtttcggcc

SEQ ID NO: 16244 - DNA, 20 bp, Artificial Sequence
  MKO10016244_A_Entpd6
  gRNA
ttcgtctgtgccgttcatga

SEQ ID NO: 16245 - DNA, 20 bp, Artificial Sequence
  MKO10016245_A_Entpd6
  gRNA
aaacacagtcatccccgaca

SEQ ID NO: 16246 - DNA, 20 bp, Artificial Sequence
  MKO10016246_A_Entpd7
  gRNA
tacttaagggatctccgcaa

SEQ ID NO: 16247 - DNA, 20 bp, Artificial Sequence
  MKO10016247_A_Entpd7
  gRNA
gccacccgctgacggagaaa

SEQ ID NO: 16248 - DNA, 20 bp, Artificial Sequence
  MKO10016248_A_Entpd7
  gRNA
aaatctgaattatggactcg

SEQ ID NO: 16249 - DNA, 20 bp, Artificial Sequence
  MKO10016249_A_Entpd8
  gRNA
ggcgctggcgttgatcccac

SEQ ID NO: 16250 - DNA, 20 bp, Artificial Sequence
  MKO10016250_A_Entpd8
  gRNA
ctatacctctgacccgacac

SEQ ID NO: 16251 - DNA, 20 bp, Artificial Sequence
  MKO10016251_A_Entpd8
  gRNA
caagtcaccttccgcctgta

SEQ ID NO: 16252 - DNA, 20 bp, Artificial Sequence
  MKO10016252_A_Eny2
  gRNA
gaaatcactccaaaaggcag

SEQ ID NO: 16253 - DNA, 20 bp, Artificial Sequence
  MKO10016253_A_Eny2
  gRNA
cagctaaaggcacactgtaa

SEQ ID NO: 16254 - DNA, 20 bp, Artificial Sequence
  MKO10016254_A_Eny2
  gRNA
acacgttactgttgatgact

SEQ ID NO: 16255 - DNA, 20 bp, Artificial Sequence
  MKO10016255_A_Eogt
  gRNA
tggatatgcgcgagagcgac

SEQ ID NO: 16256 - DNA, 20 bp, Artificial Sequence
  MKO10016256_A_Eogt
  gRNA
cgtttgcagctatgtcgact

SEQ ID NO: 16257 - DNA, 20 bp, Artificial Sequence
  MKO10016257_A_Eogt
  gRNA
tgcaaataggaccgatactc

SEQ ID NO: 16258 - DNA, 20 bp, Artificial Sequence
  MKO10016258_A_Eomes
  gRNA
cacggcggcggggaatccac

SEQ ID NO: 16259 - DNA, 20 bp, Artificial Sequence
  MKO10016259_A_Eomes
  gRNA
cccgtgtaccccgcgtccaa

SEQ ID NO: 16260 - DNA, 20 bp, Artificial Sequence
  MKO10016260_A_Eomes
  gRNA
ttctggccgaccctaaccac

SEQ ID NO: 16261 - DNA, 20 bp, Artificial Sequence
  MKO10016261_A_Ep300
  gRNA
ctggtgactccagttgccgc

SEQ ID NO: 16262 - DNA, 20 bp, Artificial Sequence
  MKO10016262_A_Ep300
  gRNA
actgcatgtttggccgtccc

SEQ ID NO: 16263 - DNA, 20 bp, Artificial Sequence
  MKO10016263_A_Ep300
  gRNA
ctgactgatatcgccaccat

SEQ ID NO: 16264 - DNA, 20 bp, Artificial Sequence
  MKO10016264_A_Ep400
  gRNA
gtctggacctgctgcgacat

SEQ ID NO: 16265 - DNA, 20 bp, Artificial Sequence
  MKO10016265_A_Ep400
  gRNA
ccctacatgttccgatgccc

SEQ ID NO: 16266 - DNA, 20 bp, Artificial Sequence
  MKO10016266_A_Ep400
  gRNA
cccctttacaagcgtatctt

SEQ ID NO: 16267 - DNA, 20 bp, Artificial Sequence
  MKO10016267_A_Epas1
  gRNA
agaaatcccgtgatgccgcg

SEQ ID NO: 16268 - DNA, 20 bp, Artificial Sequence
  MKO10016268_A_Epas1
  gRNA
ccttccaggtggccgacttg

SEQ ID NO: 16269 - DNA, 20 bp, Artificial Sequence
  MKO10016269_A_Epas1
  gRNA
ccgagcgtgacttcttcatg

SEQ ID NO: 16270 - DNA, 20 bp, Artificial Sequence
  MKO10016270_A_Epb4.1l1
  gRNA
aatccttatcgtccatatcc

SEQ ID NO: 16271 - DNA, 20 bp, Artificial Sequence
  MKO10016271_A_Epb4.1l1
  gRNA
tgggcgtggtcctctccgac

SEQ ID NO: 16272 - DNA, 20 bp, Artificial Sequence
  MKO10016272_A_Epb4.1l1
  gRNA
gaattggctggacccctcca

SEQ ID NO: 16273 - DNA, 20 bp, Artificial Sequence
  MKO10016273_A_Epb4.1l2
  gRNA
tgtattccgtgccatctaga

SEQ ID NO: 16274 - DNA, 20 bp, Artificial Sequence
  MKO10016274_A_Epb4.1l2
  gRNA
agctgactgaagatatcacc

SEQ ID NO: 16275 - DNA, 20 bp, Artificial Sequence
  MKO10016275_A_Epb4.1l2
  gRNA
taatcgcttactttctgctc

SEQ ID NO: 16276 - DNA, 20 bp, Artificial Sequence
  MKO10016276_A_Epb4.1l3
  gRNA
tctctgcgtctcgatacgtg

SEQ ID NO: 16277 - DNA, 20 bp, Artificial Sequence
  MKO10016277_A_Epb4.1l3
  gRNA
cctgtacagaagcgctcccg

SEQ ID NO: 16278 - DNA, 20 bp, Artificial Sequence
  MKO10016278_A_Epb4.1l3
  gRNA
gaactggttggaccctgcta

SEQ ID NO: 16279 - DNA, 20 bp, Artificial Sequence
  MKO10016279_A_Epb4.1l4a
  gRNA
tttccgtcacataaacctcg

SEQ ID NO: 16280 - DNA, 20 bp, Artificial Sequence
  MKO10016280_A_Epb4.1l4a
  gRNA
atctgagcagcaatattgac

SEQ ID NO: 16281 - DNA, 20 bp, Artificial Sequence
  MKO10016281_A_Epb4.1l4a
  gRNA
tgtgacggaaaacgtggtca

SEQ ID NO: 16282 - DNA, 20 bp, Artificial Sequence
  MKO10016282_A_Epb4.1l4b
  gRNA
caatctggtcgaacaaatcc

SEQ ID NO: 16283 - DNA, 20 bp, Artificial Sequence
  MKO10016283_A_Epb4.1l4b
  gRNA
cgaccagattgtgtaccact

SEQ ID NO: 16284 - DNA, 20 bp, Artificial Sequence
  MKO10016284_A_Epb4.1l4b
  gRNA
accttgtaaattcctctcga

SEQ ID NO: 16285 - DNA, 20 bp, Artificial Sequence
  MKO10016285_A_Epb4.1l5
  gRNA
catgcttgcgcatagacctg

SEQ ID NO: 16286 - DNA, 20 bp, Artificial Sequence
  MKO10016286_A_Epb4.1l5
  gRNA
tgacatctgtaccgtccaga

SEQ ID NO: 16287 - DNA, 20 bp, Artificial Sequence
  MKO10016287_A_Epb4.1l5
  gRNA
atcttcgtgaggagctaacc

SEQ ID NO: 16288 - DNA, 20 bp, Artificial Sequence
  MKO10016288_A_Epb4.1
  gRNA
ggtctacgaatgtgttgtag

SEQ ID NO: 16289 - DNA, 20 bp, Artificial Sequence
  MKO10016289_A_Epb4.1
  gRNA
gtagaccgtgtcatccaaca

SEQ ID NO: 16290 - DNA, 20 bp, Artificial Sequence
  MKO10016290_A_Epb4.1
  gRNA
actactttggtttagccctg

SEQ ID NO: 16291 - DNA, 20 bp, Artificial Sequence
  MKO10016291_A_Epb4.2
  gRNA
tcaccaaggcgcccacaact

SEQ ID NO: 16292 - DNA, 20 bp, Artificial Sequence
  MKO10016292_A_Epb4.2
  gRNA
gctcccagcaccttactttg

SEQ ID NO: 16293 - DNA, 20 bp, Artificial Sequence
  MKO10016293_A_Epb4.2
  gRNA
tgtccatactcagtaacttc

SEQ ID NO: 16294 - DNA, 20 bp, Artificial Sequence
  MKO10016294_A_Epc1
  gRNA
tgaacagcctgattacgatc

SEQ ID NO: 16295 - DNA, 20 bp, Artificial Sequence
  MKO10016295_A_Epc1
  gRNA
gataagtgatgacccccggc

SEQ ID NO: 16296 - DNA, 20 bp, Artificial Sequence
  MKO10016296_A_Epc1
  gRNA
tagcacaaatgatccttacg

SEQ ID NO: 16297 - DNA, 20 bp, Artificial Sequence
  MKO10016297_A_Epc2
  gRNA
atgatccttacgttgccttt

SEQ ID NO: 16298 - DNA, 20 bp, Artificial Sequence
  MKO10016298_A_Epc2
  gRNA
cgagcaaccagattatgata

SEQ ID NO: 16299 - DNA, 20 bp, Artificial Sequence
  MKO10016299_A_Epc2
  gRNA
taagtgcaataattcccgtt

SEQ ID NO: 16300 - DNA, 20 bp, Artificial Sequence
  MKO10016300_A_Epcam
  gRNA
cgtacagcccatcgttgttc

SEQ ID NO: 16301 - DNA, 20 bp, Artificial Sequence
  MKO10016301_A_Epcam
  gRNA
gagcccctgctcgtcgcagt

SEQ ID NO: 16302 - DNA, 20 bp, Artificial Sequence
  MKO10016302_A_Epcam
  gRNA
tatttgcagtgcgcttcaag

SEQ ID NO: 16303 - DNA, 20 bp, Artificial Sequence
  MKO10016303_A_Epdr1
  gRNA
cgcgccctggtgtcctacga

SEQ ID NO: 16304 - DNA, 20 bp, Artificial Sequence
  MKO10016304_A_Epdr1
  gRNA
ctgcacatcaaagaaccgcg

SEQ ID NO: 16305 - DNA, 20 bp, Artificial Sequence
  MKO10016305_A_Epdr1
  gRNA
ctggaccggataacaatcct

SEQ ID NO: 16306 - DNA, 20 bp, Artificial Sequence
  MKO10016306_A_Epg5
  gRNA
gtgtccgtgttacaacgagt

SEQ ID NO: 16307 - DNA, 20 bp, Artificial Sequence
  MKO10016307_A_Epg5
  gRNA
cgggctctcctgctcgcgac

SEQ ID NO: 16308 - DNA, 20 bp, Artificial Sequence
  MKO10016308_A_Epg5
  gRNA
acagccgactcgttgtaaca

SEQ ID NO: 16309 - DNA, 20 bp, Artificial Sequence
  MKO10016309_A_Epgn
  gRNA
aatccacagcatacgaagtt

SEQ ID NO: 16310 - DNA, 20 bp, Artificial Sequence
  MKO10016310_A_Epgn
  gRNA
gaccctaacttcgtatgctg

SEQ ID NO: 16311 - DNA, 20 bp, Artificial Sequence
  MKO10016311_A_Epgn
  gRNA
tgagagaacttcagagctac

SEQ ID NO: 16312 - DNA, 20 bp, Artificial Sequence
  MKO10016312_A_Epha10
  gRNA
ccgcgggcagcgcatcttcg

SEQ ID NO: 16313 - DNA, 20 bp, Artificial Sequence
  MKO10016313_A_Epha10
  gRNA
cgagggcgtccccgcctagg

SEQ ID NO: 16314 - DNA, 20 bp, Artificial Sequence
  MKO10016314_A_Epha10
  gRNA
cgccccgggaccgccgaaga

SEQ ID NO: 16315 - DNA, 20 bp, Artificial Sequence
  MKO10016315_A_Epha1
  gRNA
cgctccaattggatctaccg

SEQ ID NO: 16316 - DNA, 20 bp, Artificial Sequence
  MKO10016316_A_Epha1
  gRNA
ggaagcttcacgcatctacg

SEQ ID NO: 16317 - DNA, 20 bp, Artificial Sequence
  MKO10016317_A_Epha1
  gRNA
cgctgtgccgagaccgtgca

SEQ ID NO: 16318 - DNA, 20 bp, Artificial Sequence
  MKO10016318_A_Epha2
  gRNA
caacgtggtatccggcgacc

SEQ ID NO: 16319 - DNA, 20 bp, Artificial Sequence
  MKO10016319_A_Epha2
  gRNA
ttcgctgtcgaagcacgcaa

SEQ ID NO: 16320 - DNA, 20 bp, Artificial Sequence
  MKO10016320_A_Epha2
  gRNA
ctgctgaccgtgatctcgtc

SEQ ID NO: 16321 - DNA, 20 bp, Artificial Sequence
  MKO10016321_A_Epha3
  gRNA
gaacgaggtttcatatgcca

SEQ ID NO: 16322 - DNA, 20 bp, Artificial Sequence
  MKO10016322_A_Epha3
  gRNA
ctcaaacataaacgagacct

SEQ ID NO: 16323 - DNA, 20 bp, Artificial Sequence
  MKO10016323_A_Epha3
  gRNA
atgaacattacacaccaatc

SEQ ID NO: 16324 - DNA, 20 bp, Artificial Sequence
  MKO10016324_A_Epha4
  gRNA
tacaccgatccgaacctacc

SEQ ID NO: 16325 - DNA, 20 bp, Artificial Sequence
  MKO10016325_A_Epha4
  gRNA
actgactggatcacccgcga

SEQ ID NO: 16326 - DNA, 20 bp, Artificial Sequence
  MKO10016326_A_Epha4
  gRNA
acgtcctgcacctgtgaccg

SEQ ID NO: 16327 - DNA, 20 bp, Artificial Sequence
  MKO10016327_A_Epha5
  gRNA
accttcgttagagatccaac

SEQ ID NO: 16328 - DNA, 20 bp, Artificial Sequence
  MKO10016328_A_Epha5
  gRNA
ataattccattggggcgatc

SEQ ID NO: 16329 - DNA, 20 bp, Artificial Sequence
  MKO10016329_A_Epha5
  gRNA
ctgctgtacgtgctcgaatt

SEQ ID NO: 16330 - DNA, 20 bp, Artificial Sequence
  MKO10016330_A_Epha6
  gRNA
gccccgcacttcaaccaaag

SEQ ID NO: 16331 - DNA, 20 bp, Artificial Sequence
  MKO10016331_A_Epha6
  gRNA
catcggattctatataatac

SEQ ID NO: 16332 - DNA, 20 bp, Artificial Sequence
  MKO10016332_A_Epha6
  gRNA
tccacacagctcaacctacg

SEQ ID NO: 16333 - DNA, 20 bp, Artificial Sequence
  MKO10016333_A_Epha7
  gRNA
ttactcgtgcatgcaacgta

SEQ ID NO: 16334 - DNA, 20 bp, Artificial Sequence
  MKO10016334_A_Epha7
  gRNA
gaaccgagtttgaacaacca

SEQ ID NO: 16335 - DNA, 20 bp, Artificial Sequence
  MKO10016335_A_Epha7
  gRNA
cggactaactggatttctaa

SEQ ID NO: 16336 - DNA, 20 bp, Artificial Sequence
  MKO10016336_A_Epha8
  gRNA
acgaactgggtgccccgcga

SEQ ID NO: 16337 - DNA, 20 bp, Artificial Sequence
  MKO10016337_A_Epha8
  gRNA
cccagtaaccgcctccgaga

SEQ ID NO: 16338 - DNA, 20 bp, Artificial Sequence
  MKO10016338_A_Epha8
  gRNA
gtgatgtcgctgcgaccacc

SEQ ID NO: 16339 - DNA, 20 bp, Artificial Sequence
  MKO10016339_A_Ephb1
  gRNA
ttactagtacacgccacctc

SEQ ID NO: 16340 - DNA, 20 bp, Artificial Sequence
  MKO10016340_A_Ephb1
  gRNA
gggtacgttaccttccatcg

SEQ ID NO: 16341 - DNA, 20 bp, Artificial Sequence
  MKO10016341_A_Ephb1
  gRNA
cttacaggtacagcgcccaa

SEQ ID NO: 16342 - DNA, 20 bp, Artificial Sequence
  MKO10016342_A_Ephb2
  gRNA
accaaattcatccggcgccg

SEQ ID NO: 16343 - DNA, 20 bp, Artificial Sequence
  MKO10016343_A_Ephb2
  gRNA
cctcgcgaccccccgagtct

SEQ ID NO: 16344 - DNA, 20 bp, Artificial Sequence
  MKO10016344_A_Ephb2
  gRNA
ttcggtcccgtgtcccgcaa

SEQ ID NO: 16345 - DNA, 20 bp, Artificial Sequence
  MKO10016345_A_Ephb3
  gRNA
agacctcgctaatcctcgaa

SEQ ID NO: 16346 - DNA, 20 bp, Artificial Sequence
  MKO10016346_A_Ephb3
  gRNA
tgtagcgtgtgtgggccaac

SEQ ID NO: 16347 - DNA, 20 bp, Artificial Sequence
  MKO10016347_A_Ephb3
  gRNA
gccccacttaccacggcact

SEQ ID NO: 16348 - DNA, 20 bp, Artificial Sequence
  MKO10016348_A_Ephb4
  gRNA
cacgatacgcttcaccatga

SEQ ID NO: 16349 - DNA, 20 bp, Artificial Sequence
  MKO10016349_A_Ephb4
  gRNA
tctccatccaggcgggcgta

SEQ ID NO: 16350 - DNA, 20 bp, Artificial Sequence
  MKO10016350_A_Ephb4
  gRNA
aggtagctgcgtggccaacg

SEQ ID NO: 16351 - DNA, 20 bp, Artificial Sequence
  MKO10016351_A_Ephb6
  gRNA
agacggccccgacagtattg

SEQ ID NO: 16352 - DNA, 20 bp, Artificial Sequence
  MKO10016352_A_Ephb6
  gRNA
tgccaggccgcaatactgtc

SEQ ID NO: 16353 - DNA, 20 bp, Artificial Sequence
  MKO10016353_A_Ephb6
  gRNA
tgcatttcgacccccgccag

SEQ ID NO: 16354 - DNA, 20 bp, Artificial Sequence
  MKO10016354_A_Ephx1
  gRNA
ggagctcttgtacccattca

SEQ ID NO: 16355 - DNA, 20 bp, Artificial Sequence
  MKO10016355_A_Ephx1
  gRNA
cttgtagaagatcctcgcag

SEQ ID NO: 16356 - DNA, 20 bp, Artificial Sequence
  MKO10016356_A_Ephx1
  gRNA
cgccttgaatgtagaacttc

SEQ ID NO: 16357 - DNA, 20 bp, Artificial Sequence
  MKO10016357_A_Ephx2
  gRNA
tccgtcgtccagccagttgt

SEQ ID NO: 16358 - DNA, 20 bp, Artificial Sequence
  MKO10016358_A_Ephx2
  gRNA
accatccccatgtcacgggc

SEQ ID NO: 16359 - DNA, 20 bp, Artificial Sequence
  MKO10016359_A_Ephx2
  gRNA
cttgatcatcccaacctgac

SEQ ID NO: 16360 - DNA, 20 bp, Artificial Sequence
  MKO10016360_A_Ephx3
  gRNA
ggctctgaaactctcgcagc

SEQ ID NO: 16361 - DNA, 20 bp, Artificial Sequence
  MKO10016361_A_Ephx3
  gRNA
gcatcctcgtgagccacgac

SEQ ID NO: 16362 - DNA, 20 bp, Artificial Sequence
  MKO10016362_A_Ephx3
  gRNA
cacaccttggatcactgaca

SEQ ID NO: 16363 - DNA, 20 bp, Artificial Sequence
  MKO10016363_A_Ephx4
  gRNA
gagaatttaaaagcgaatac

SEQ ID NO: 16364 - DNA, 20 bp, Artificial Sequence
  MKO10016364_A_Ephx4
  gRNA
ccacatccaagtgtatttac

SEQ ID NO: 16365 - DNA, 20 bp, Artificial Sequence
  MKO10016365_A_Ephx4
  gRNA
actggggaggcatgattgcc

SEQ ID NO: 16366 - DNA, 20 bp, Artificial Sequence
  MKO10016366_A_Epm2aip1
  gRNA
gatcggcgagaactccggac

SEQ ID NO: 16367 - DNA, 20 bp, Artificial Sequence
  MKO10016367_A_Epm2aip1
  gRNA
ctactcgggaacgcgacgtg

SEQ ID NO: 16368 - DNA, 20 bp, Artificial Sequence
  MKO10016368_A_Epm2aip1
  gRNA
ccgagcacgaattctacgag

SEQ ID NO: 16369 - DNA, 20 bp, Artificial Sequence
  MKO10016369_A_Epm2a
  gRNA
cgggccgcgttgacacgttc

SEQ ID NO: 16370 - DNA, 20 bp, Artificial Sequence
  MKO10016370_A_Epm2a
  gRNA
cattctccagaagcgcgtgc

SEQ ID NO: 16371 - DNA, 20 bp, Artificial Sequence
  MKO10016371_A_Epm2a
  gRNA
tgtaccagaacgtgtcaacg

SEQ ID NO: 16372 - DNA, 20 bp, Artificial Sequence
  MKO10016372_A_Epn1
  gRNA
cgcccacgcgctcaagacca

SEQ ID NO: 16373 - DNA, 20 bp, Artificial Sequence
  MKO10016373_A_Epn1
  gRNA
taggaagagcggatccgtcg

SEQ ID NO: 16374 - DNA, 20 bp, Artificial Sequence
  MKO10016374_A_Epn1
  gRNA
ttccagtatgtggaccgtga

SEQ ID NO: 16375 - DNA, 20 bp, Artificial Sequence
  MKO10016375_A_Epn2
  gRNA
tctctcgaacgttaataccc

SEQ ID NO: 16376 - DNA, 20 bp, Artificial Sequence
  MKO10016376_A_Epn2
  gRNA
cgagaacgctaccacattgt

SEQ ID NO: 16377 - DNA, 20 bp, Artificial Sequence
  MKO10016377_A_Epn2
  gRNA
cactccaggaagaacgcctc

SEQ ID NO: 16378 - DNA, 20 bp, Artificial Sequence
  MKO10016378_A_Epn3
  gRNA
cttggccatgagtcgcgaag

SEQ ID NO: 16379 - DNA, 20 bp, Artificial Sequence
  MKO10016379_A_Epn3
  gRNA
ccctgtcccgttgacgacgt

SEQ ID NO: 16380 - DNA, 20 bp, Artificial Sequence
  MKO10016380_A_Epn3
  gRNA
atagcgcggggacgaagatg

SEQ ID NO: 16381 - DNA, 20 bp, Artificial Sequence
  MKO10016381_A_Epor
  gRNA
catgcgcgctcgaacagcga

SEQ ID NO: 16382 - DNA, 20 bp, Artificial Sequence
  MKO10016382_A_Epor
  gRNA
cttcgctgttcgagcgcgca

SEQ ID NO: 16383 - DNA, 20 bp, Artificial Sequence
  MKO10016383_A_Epor
  gRNA
agtgctcctggacgcccccg

SEQ ID NO: 16384 - DNA, 20 bp, Artificial Sequence
  MKO10016384_A_Epo
  gRNA
gtctacgccaacttcctccg

SEQ ID NO: 16385 - DNA, 20 bp, Artificial Sequence
  MKO10016385_A_Epo
  gRNA
gaactcgactgtcgcagatg

SEQ ID NO: 16386 - DNA, 20 bp, Artificial Sequence
  MKO10016386_A_Epo
  gRNA
catctgcgacagtcgagttc

SEQ ID NO: 16387 - DNA, 20 bp, Artificial Sequence
  MKO10016387_A_Eppin
  gRNA
gtatggcttactttcgtcgt

SEQ ID NO: 16388 - DNA, 20 bp, Artificial Sequence
  MKO10016388_A_Eppin
  gRNA
tgcagcctgccgaaagactc

SEQ ID NO: 16389 - DNA, 20 bp, Artificial Sequence
  MKO10016389_A_Eppin
  gRNA
ttcacactcctctctgaatc

SEQ ID NO: 16390 - DNA, 20 bp, Artificial Sequence
  MKO10016390_A_Eppk1
  gRNA
gcaggcgacccgcctactag

SEQ ID NO: 16391 - DNA, 20 bp, Artificial Sequence
  MKO10016391_A_Eppk1
  gRNA
cgcgccagccttgtcacgac

SEQ ID NO: 16392 - DNA, 20 bp, Artificial Sequence
  MKO10016392_A_Eppk1
  gRNA
acagcgccgcggctacctcg

SEQ ID NO: 16393 - DNA, 20 bp, Artificial Sequence
  MKO10016393_A_Eprs
  gRNA
ctctagtccacgttaaacgc

SEQ ID NO: 16394 - DNA, 20 bp, Artificial Sequence
  MKO10016394_A_Eprs
  gRNA
caaagttgtcttcgtgtgat

SEQ ID NO: 16395 - DNA, 20 bp, Artificial Sequence
  MKO10016395_A_Eprs
  gRNA
agccaaaccagcgtttaacg

SEQ ID NO: 16396 - DNA, 20 bp, Artificial Sequence
  MKO10016396_A_Eps15l1
  gRNA
tttctatgttgcactgcgac

SEQ ID NO: 16397 - DNA, 20 bp, Artificial Sequence
  MKO10016397_A_Eps15l1
  gRNA
atacgagtcttattacaagc

SEQ ID NO: 16398 - DNA, 20 bp, Artificial Sequence
  MKO10016398_A_Eps15l1
  gRNA
ttgtaataagactcgtataa

SEQ ID NO: 16399 - DNA, 20 bp, Artificial Sequence
  MKO10016399_A_Eps15
  gRNA
ccacaaagcgttcttgttaa

SEQ ID NO: 16400 - DNA, 20 bp, Artificial Sequence
  MKO10016400_A_Eps15
  gRNA
ccattaacaagaacgctttg

SEQ ID NO: 16401 - DNA, 20 bp, Artificial Sequence
  MKO10016401_A_Eps15
  gRNA
gcacctacaagagtcacaac

SEQ ID NO: 16402 - DNA, 20 bp, Artificial Sequence
  MKO10016402_A_Eps8l1
  gRNA
tgccatcgtacgctgcgacg

SEQ ID NO: 16403 - DNA, 20 bp, Artificial Sequence
  MKO10016403_A_Eps8l1
  gRNA
caccgcgtcgcagcgtacga

SEQ ID NO: 16404 - DNA, 20 bp, Artificial Sequence
  MKO10016404_A_Eps8l1
  gRNA
cacgtcagccataaccacgg

SEQ ID NO: 16405 - DNA, 20 bp, Artificial Sequence
  MKO10016405_A_Eps8l2
  gRNA
cgacaagtcactgcgactgc

SEQ ID NO: 16406 - DNA, 20 bp, Artificial Sequence
  MKO10016406_A_Eps8l2
  gRNA
gacttcacagtatcacgtgc

SEQ ID NO: 16407 - DNA, 20 bp, Artificial Sequence
  MKO10016407_A_Eps8l2
  gRNA
caggtcctttgcgctcatcc

SEQ ID NO: 16408 - DNA, 20 bp, Artificial Sequence
  MKO10016408_A_Eps8l3
  gRNA
ggaactggattcttaccgcc

SEQ ID NO: 16409 - DNA, 20 bp, Artificial Sequence
  MKO10016409_A_Eps8l3
  gRNA
gcatctgatgacatgtaagc

SEQ ID NO: 16410 - DNA, 20 bp, Artificial Sequence
  MKO10016410_A_Eps8l3
  gRNA
tgtacccacagtgcaccgga

SEQ ID NO: 16411 - DNA, 20 bp, Artificial Sequence
  MKO10016411_A_Eps8
  gRNA
atctttccgatccagcacga

SEQ ID NO: 16412 - DNA, 20 bp, Artificial Sequence
  MKO10016412_A_Eps8
  gRNA
ttcttacttccacgcggtac

SEQ ID NO: 16413 - DNA, 20 bp, Artificial Sequence
  MKO10016413_A_Eps8
  gRNA
caatgcgagattgtgtttag

SEQ ID NO: 16414 - DNA, 20 bp, Artificial Sequence
  MKO10016414_A_Epsti1
  gRNA
gggatgaatctattcgaatc

SEQ ID NO: 16415 - DNA, 20 bp, Artificial Sequence
  MKO10016415_A_Epsti1
  gRNA
tgccactcacccagccgttg

SEQ ID NO: 16416 - DNA, 20 bp, Artificial Sequence
  MKO10016416_A_Epsti1
  gRNA
cagtctacttggtgccacaa

SEQ ID NO: 16417 - DNA, 20 bp, Artificial Sequence
  MKO10016417_A_Ept1
  gRNA
cggcctcttacctagagtgt

SEQ ID NO: 16418 - DNA, 20 bp, Artificial Sequence
  MKO10016418_A_Ept1
  gRNA
tccttaacagtacagcgctt

SEQ ID NO: 16419 - DNA, 20 bp, Artificial Sequence
  MKO10016419_A_Ept1
  gRNA
acaaaaacactgacgccagt

SEQ ID NO: 16420 - DNA, 20 bp, Artificial Sequence
  MKO10016420_A_Epx
  gRNA
atcatgcaacgtcttcgcag

SEQ ID NO: 16421 - DNA, 20 bp, Artificial Sequence
  MKO10016421_A_Epx
  gRNA
agcggcctgaaccactcttc

SEQ ID NO: 16422 - DNA, 20 bp, Artificial Sequence
  MKO10016422_A_Epx
  gRNA
aacaagtaccgaaccataac

SEQ ID NO: 16423 - DNA, 20 bp, Artificial Sequence
  MKO10016423_A_Epyc
  gRNA
gatcgatggctcttccccac

SEQ ID NO: 16424 - DNA, 20 bp, Artificial Sequence
  MKO10016424_A_Epyc
  gRNA
ctatatcaccgataacagct

SEQ ID NO: 16425 - DNA, 20 bp, Artificial Sequence
  MKO10016425_A_Epyc
  gRNA
tggtacttatacaagtacac

SEQ ID NO: 16426 - DNA, 20 bp, Artificial Sequence
  MKO10016426_A_Eqtn
  gRNA
gccagcaaaccaactgccag

SEQ ID NO: 16427 - DNA, 20 bp, Artificial Sequence
  MKO10016427_A_Eqtn
  gRNA
tgtgactgccacaactaacc

SEQ ID NO: 16428 - DNA, 20 bp, Artificial Sequence
  MKO10016428_A_Eqtn
  gRNA
gataatattgtccaaaatgc

SEQ ID NO: 16429 - DNA, 20 bp, Artificial Sequence
  MKO10016429_A_Eral1
  gRNA
gcagattccatgctcgtcca

SEQ ID NO: 16430 - DNA, 20 bp, Artificial Sequence
  MKO10016430_A_Eral1
  gRNA
ccatctggagcgctctttgc

SEQ ID NO: 16431 - DNA, 20 bp, Artificial Sequence
  MKO10016431_A_Eral1
  gRNA
ctcccaggaggaccacgcgg

SEQ ID NO: 16432 - DNA, 20 bp, Artificial Sequence
  MKO10016432_A_Erap1
  gRNA
tgcagcatccagagcataat

SEQ ID NO: 16433 - DNA, 20 bp, Artificial Sequence
  MKO10016433_A_Erap1
  gRNA
aaatcaagccgattatgctc

SEQ ID NO: 16434 - DNA, 20 bp, Artificial Sequence
  MKO10016434_A_Erap1
  gRNA
ttctttatcgtataacagag

SEQ ID NO: 16435 - DNA, 20 bp, Artificial Sequence
  MKO10016435_A_Eras
  gRNA
tcttgacgacccctcgtctc

SEQ ID NO: 16436 - DNA, 20 bp, Artificial Sequence
  MKO10016436_A_Eras
  gRNA
ctccacaccttgccgcgtct

SEQ ID NO: 16437 - DNA, 20 bp, Artificial Sequence
  MKO10016437_A_Eras
  gRNA
catggtctttcacgaagcat

SEQ ID NO: 16438 - DNA, 20 bp, Artificial Sequence
  MKO10016438_A_Erbb2ip
  gRNA
gaattcttaccagctaattt

SEQ ID NO: 16439 - DNA, 20 bp, Artificial Sequence
  MKO10016439_A_Erbb2ip
  gRNA
gaactggatgtcagcaaaaa

SEQ ID NO: 16440 - DNA, 20 bp, Artificial Sequence
  MKO10016440_A_Erbb2ip
  gRNA
ttgcaaatcttattaatctc

SEQ ID NO: 16441 - DNA, 20 bp, Artificial Sequence
  MKO10016441_A_Erbb2
  gRNA
cttacaggcccgggaacgat

SEQ ID NO: 16442 - DNA, 20 bp, Artificial Sequence
  MKO10016442_A_Erbb2
  gRNA
gctagacaaccgagaccctt

SEQ ID NO: 16443 - DNA, 20 bp, Artificial Sequence
  MKO10016443_A_Erbb2
  gRNA
acatggacaccaatcgttcc

SEQ ID NO: 16444 - DNA, 20 bp, Artificial Sequence
  MKO10016444_A_Erbb3
  gRNA
ccccttgcagacttcgtgac

SEQ ID NO: 16445 - DNA, 20 bp, Artificial Sequence
  MKO10016445_A_Erbb3
  gRNA
cggggaacccaggtctacga

SEQ ID NO: 16446 - DNA, 20 bp, Artificial Sequence
  MKO10016446_A_Erbb3
  gRNA
gcccttacctaacctccgag

SEQ ID NO: 16447 - DNA, 20 bp, Artificial Sequence
  MKO10016447_A_Erbb4
  gRNA
agaatttacgcattattcgt

SEQ ID NO: 16448 - DNA, 20 bp, Artificial Sequence
  MKO10016448_A_Erbb4
  gRNA
caagtaacgaaactggttga

SEQ ID NO: 16449 - DNA, 20 bp, Artificial Sequence
  MKO10016449_A_Erbb4
  gRNA
tcaccagcatcgagcacaac

SEQ ID NO: 16450 - DNA, 20 bp, Artificial Sequence
  MKO10016450_A_Erc1
  gRNA
cgagccgtcgcgttctctca

SEQ ID NO: 16451 - DNA, 20 bp, Artificial Sequence
  MKO10016451_A_Erc1
  gRNA
ggagcagtaccgagttgtac

SEQ ID NO: 16452 - DNA, 20 bp, Artificial Sequence
  MKO10016452_A_Erc1
  gRNA
aagaccatgagagaacgcga

SEQ ID NO: 16453 - DNA, 20 bp, Artificial Sequence
  MKO10016453_A_Erc2
  gRNA
ccgaagaagccaacttcagc

SEQ ID NO: 16454 - DNA, 20 bp, Artificial Sequence
  MKO10016454_A_Erc2
  gRNA
ccttcatttcgatgacagtc

SEQ ID NO: 16455 - DNA, 20 bp, Artificial Sequence
  MKO10016455_A_Erc2
  gRNA
ggctccaagctgagcacgac

SEQ ID NO: 16456 - DNA, 20 bp, Artificial Sequence
  MKO10016456_A_Ercc1
  gRNA
atagcatcatcgtgagcccg

SEQ ID NO: 16457 - DNA, 20 bp, Artificial Sequence
  MKO10016457_A_Ercc1
  gRNA
gcgtactcagcatacgtctg

SEQ ID NO: 16458 - DNA, 20 bp, Artificial Sequence
  MKO10016458_A_Ercc1
  gRNA
cttcgcccttcgtgtgctgc

SEQ ID NO: 16459 - DNA, 20 bp, Artificial Sequence
  MKO10016459_A_Ercc2
  gRNA
cccgtacgactacatctacc

SEQ ID NO: 16460 - DNA, 20 bp, Artificial Sequence
  MKO10016460_A_Ercc2
  gRNA
gccgccaggctcaacgtgga

SEQ ID NO: 16461 - DNA, 20 bp, Artificial Sequence
  MKO10016461_A_Ercc2
  gRNA
ggcgagaagctgccgttctt

SEQ ID NO: 16462 - DNA, 20 bp, Artificial Sequence
  MKO10016462_A_Ercc3
  gRNA
atgtcgcttgaggaacgccg

SEQ ID NO: 16463 - DNA, 20 bp, Artificial Sequence
  MKO10016463_A_Ercc3
  gRNA
caacactgaccgctgcatag

SEQ ID NO: 16464 - DNA, 20 bp, Artificial Sequence
  MKO10016464_A_Ercc3
  gRNA
gaagacgaagacgacattcc

SEQ ID NO: 16465 - DNA, 20 bp, Artificial Sequence
  MKO10016465_A_Ercc4
  gRNA
tcgctatgaagtctacacgc

SEQ ID NO: 16466 - DNA, 20 bp, Artificial Sequence
  MKO10016466_A_Ercc4
  gRNA
tcagacaatccgccattact

SEQ ID NO: 16467 - DNA, 20 bp, Artificial Sequence
  MKO10016467_A_Ercc4
  gRNA
caacaggcatcctcgtgtac

SEQ ID NO: 16468 - DNA, 20 bp, Artificial Sequence
  MKO10016468_A_Ercc5
  gRNA
agcgccacccagtctcactc

SEQ ID NO: 16469 - DNA, 20 bp, Artificial Sequence
  MKO10016469_A_Ercc5
  gRNA
ttcccccagatattagcatt

SEQ ID NO: 16470 - DNA, 20 bp, Artificial Sequence
  MKO10016470_A_Ercc5
  gRNA
ggatcaaaaacaagcattgc

SEQ ID NO: 16471 - DNA, 20 bp, Artificial Sequence
  MKO10016471_A_Ercc6l2
  gRNA
gtgaagtgtaaggtccgcat

SEQ ID NO: 16472 - DNA, 20 bp, Artificial Sequence
  MKO10016472_A_Ercc6l2
  gRNA
cttgcgagattaccaaaggg

SEQ ID NO: 16473 - DNA, 20 bp, Artificial Sequence
  MKO10016473_A_Ercc6l2
  gRNA
cctctacagacactacatag

SEQ ID NO: 16474 - DNA, 20 bp, Artificial Sequence
  MKO10016474_A_Ercc6l
  gRNA
tgaacctcctagcgcactgc

SEQ ID NO: 16475 - DNA, 20 bp, Artificial Sequence
  MKO10016475_A_Ercc6l
  gRNA
tgggccaaatttagatctac

SEQ ID NO: 16476 - DNA, 20 bp, Artificial Sequence
  MKO10016476_A_Ercc6l
  gRNA
tctccacttccgctaagcct

SEQ ID NO: 16477 - DNA, 20 bp, Artificial Sequence
  MKO10016477_A_Ercc6
  gRNA
agcgatgccgaatttgacga

SEQ ID NO: 16478 - DNA, 20 bp, Artificial Sequence
  MKO10016478_A_Ercc6
  gRNA
gtagccaggcgccaagacga

SEQ ID NO: 16479 - DNA, 20 bp, Artificial Sequence
  MKO10016479_A_Ercc6
  gRNA
gttatacttctgtcgcttca

SEQ ID NO: 16480 - DNA, 20 bp, Artificial Sequence
  MKO10016480_A_Ercc8
  gRNA
cgatgttcacaaatacagcg

SEQ ID NO: 16481 - DNA, 20 bp, Artificial Sequence
  MKO10016481_A_Ercc8
  gRNA
ctcgacattgagcccgttga

SEQ ID NO: 16482 - DNA, 20 bp, Artificial Sequence
  MKO10016482_A_Ercc8
  gRNA
atagagtacaaccacgccat

SEQ ID NO: 16483 - DNA, 20 bp, Artificial Sequence
  MKO10016483_A_Erdr1
  gRNA
gcgtccgtccgtccgtccag

SEQ ID NO: 16484 - DNA, 20 bp, Artificial Sequence
  MKO10016484_A_Erdr1
  gRNA
tggcagagacatcttgaccg

SEQ ID NO: 16485 - DNA, 20 bp, Artificial Sequence
  MKO10016485_A_Erdr1
  gRNA
gagtccgtccgtccgtcctg

SEQ ID NO: 16486 - DNA, 20 bp, Artificial Sequence
  MKO10016486_A_Ereg
  gRNA
gatggaagacgatccccgtg

SEQ ID NO: 16487 - DNA, 20 bp, Artificial Sequence
  MKO10016487_A_Ereg
  gRNA
cgcaacgtattctttgctca

SEQ ID NO: 16488 - DNA, 20 bp, Artificial Sequence
  MKO10016488_A_Ereg
  gRNA
taaggcggtacagttatcct

SEQ ID NO: 16489 - DNA, 20 bp, Artificial Sequence
  MKO10016489_A_Erf
  gRNA
gccgcttaaagcgcagttta

SEQ ID NO: 16490 - DNA, 20 bp, Artificial Sequence
  MKO10016490_A_Erf
  gRNA
gccagccccatatcgatgaa

SEQ ID NO: 16491 - DNA, 20 bp, Artificial Sequence
  MKO10016491_A_Erf
  gRNA
ggggaccccttaccccacga

SEQ ID NO: 16492 - DNA, 20 bp, Artificial Sequence
  MKO10016492_A_Ergic1
  gRNA
ctacgtcgatgacccagaca

SEQ ID NO: 16493 - DNA, 20 bp, Artificial Sequence
  MKO10016493_A_Ergic1
  gRNA
ttcgcaggtttgacatctac

SEQ ID NO: 16494 - DNA, 20 bp, Artificial Sequence
  MKO10016494_A_Ergic1
  gRNA
atgaagatcccgctgaataa

SEQ ID NO: 16495 - DNA, 20 bp, Artificial Sequence
  MKO10016495_A_Ergic2
  gRNA
tctaatagcatttaccacta

SEQ ID NO: 16496 - DNA, 20 bp, Artificial Sequence
  MKO10016496_A_Ergic2
  gRNA
tatgtggagacgtcagccag

SEQ ID NO: 16497 - DNA, 20 bp, Artificial Sequence
  MKO10016497_A_Ergic2
  gRNA
gacgtctccacatagctgtc

SEQ ID NO: 16498 - DNA, 20 bp, Artificial Sequence
  MKO10016498_A_Ergic3
  gRNA
gataatactgcaactccgat

SEQ ID NO: 16499 - DNA, 20 bp, Artificial Sequence
  MKO10016499_A_Ergic3
  gRNA
gtagcagctctcacagcgat

SEQ ID NO: 16500 - DNA, 20 bp, Artificial Sequence
  MKO10016500_A_Ergic3
  gRNA
catgagaaggccactgacga

SEQ ID NO: 16501 - DNA, 20 bp, Artificial Sequence
  MKO10016501_A_Erg
  gRNA
atagtaagacgtccacatcg

SEQ ID NO: 16502 - DNA, 20 bp, Artificial Sequence
  MKO10016502_A_Erg
  gRNA
gacttccgatgacgttgata

SEQ ID NO: 16503 - DNA, 20 bp, Artificial Sequence
  MKO10016503_A_Erg
  gRNA
ggccttgtcagttgtgagcg

SEQ ID NO: 16504 - DNA, 20 bp, Artificial Sequence
  MKO10016504_A_Erh
  gRNA
atacttacaccagacagctg

SEQ ID NO: 16505 - DNA, 20 bp, Artificial Sequence
  MKO10016505_A_Erh
  gRNA
tcagcataagtcctgccctc

SEQ ID NO: 16506 - DNA, 20 bp, Artificial Sequence
  MKO10016506_A_Erh
  gRNA
acagcctaccaagaggccag

SEQ ID NO: 16507 - DNA, 20 bp, Artificial Sequence
  MKO10016507_A_Eri1
  gRNA
ttgtatcaaccggatgagta

SEQ ID NO: 16508 - DNA, 20 bp, Artificial Sequence
  MKO10016508_A_Eri1
  gRNA
ctaaggtgtgtgtattcaac

SEQ ID NO: 16509 - DNA, 20 bp, Artificial Sequence
  MKO10016509_A_Eri1
  gRNA
aagcagcgatgcagacttga

SEQ ID NO: 16510 - DNA, 20 bp, Artificial Sequence
  MKO10016510_A_Eri2
  gRNA
ttaggcggcttggattaatt

SEQ ID NO: 16511 - DNA, 20 bp, Artificial Sequence
  MKO10016511_A_Eri2
  gRNA
ttgactttgagtctacctgc

SEQ ID NO: 16512 - DNA, 20 bp, Artificial Sequence
  MKO10016512_A_Eri2
  gRNA
ttactcaatctgctccctcc

SEQ ID NO: 16513 - DNA, 20 bp, Artificial Sequence
  MKO10016513_A_Eri3
  gRNA
cgagccgctcccgtctgtaa

SEQ ID NO: 16514 - DNA, 20 bp, Artificial Sequence
  MKO10016514_A_Eri3
  gRNA
ccattgccgcgccaaagccg

SEQ ID NO: 16515 - DNA, 20 bp, Artificial Sequence
  MKO10016515_A_Eri3
  gRNA
gtaagctgtgggtggactac

SEQ ID NO: 16516 - DNA, 20 bp, Artificial Sequence
  MKO10016516_A_Erich1
  gRNA
acagtgtagagccgacgttc

SEQ ID NO: 16517 - DNA, 20 bp, Artificial Sequence
  MKO10016517_A_Erich1
  gRNA
acctcagtgacgttattgta

SEQ ID NO: 16518 - DNA, 20 bp, Artificial Sequence
  MKO10016518_A_Erich1
  gRNA
tcccgcggacgtgctcatcc

SEQ ID NO: 16519 - DNA, 20 bp, Artificial Sequence
  MKO10016519_A_Erich2
  gRNA
tgtcgaaatactgcccgaga

SEQ ID NO: 16520 - DNA, 20 bp, Artificial Sequence
  MKO10016520_A_Erich2
  gRNA
gcagtatttcgacagccgtg

SEQ ID NO: 16521 - DNA, 20 bp, Artificial Sequence
  MKO10016521_A_Erich2
  gRNA
cctggacaagactgatgtgc

SEQ ID NO: 16522 - DNA, 20 bp, Artificial Sequence
  MKO10016522_A_Erlec1
  gRNA
tcttagccaacatattccca

SEQ ID NO: 16523 - DNA, 20 bp, Artificial Sequence
  MKO10016523_A_Erlec1
  gRNA
atacttccacttgtgacaag

SEQ ID NO: 16524 - DNA, 20 bp, Artificial Sequence
  MKO10016524_A_Erlec1
  gRNA
ttccaaaagctctcttggat

SEQ ID NO: 16525 - DNA, 20 bp, Artificial Sequence
  MKO10016525_A_Erlin1
  gRNA
aatatgttggctccttatgc

SEQ ID NO: 16526 - DNA, 20 bp, Artificial Sequence
  MKO10016526_A_Erlin1
  gRNA
ctatattgaccgaatagaag

SEQ ID NO: 16527 - DNA, 20 bp, Artificial Sequence
  MKO10016527_A_Erlin1
  gRNA
ggagcttaccttgttccaca

SEQ ID NO: 16528 - DNA, 20 bp, Artificial Sequence
  MKO10016528_A_Erlin2
  gRNA
ctgcagcgttcatactcttc

SEQ ID NO: 16529 - DNA, 20 bp, Artificial Sequence
  MKO10016529_A_Erlin2
  gRNA
cacatcctataagtctgtac

SEQ ID NO: 16530 - DNA, 20 bp, Artificial Sequence
  MKO10016530_A_Erlin2
  gRNA
gaagtgaagaacgtaccatg

SEQ ID NO: 16531 - DNA, 20 bp, Artificial Sequence
  MKO10016531_A_Ermap
  gRNA
cggacacctacctcgcaccc

SEQ ID NO: 16532 - DNA, 20 bp, Artificial Sequence
  MKO10016532_A_Ermap
  gRNA
acatggtactcagcgagatg

SEQ ID NO: 16533 - DNA, 20 bp, Artificial Sequence
  MKO10016533_A_Ermap
  gRNA
gtcttgcactatccataatg

SEQ ID NO: 16534 - DNA, 20 bp, Artificial Sequence
  MKO10016534_A_Ermard
  gRNA
tggagcgtaggttacgttca

SEQ ID NO: 16535 - DNA, 20 bp, Artificial Sequence
  MKO10016535_A_Ermard
  gRNA
tgacctggtcagatacgcgt

SEQ ID NO: 16536 - DNA, 20 bp, Artificial Sequence
  MKO10016536_A_Ermard
  gRNA
tgtccatgctgttcgtgata

SEQ ID NO: 16537 - DNA, 20 bp, Artificial Sequence
  MKO10016537_A_Ermn
  gRNA
cgagtacaactgaaatcgaa

SEQ ID NO: 16538 - DNA, 20 bp, Artificial Sequence
  MKO10016538_A_Ermn
  gRNA
gaacctcttcgttgttcacc

SEQ ID NO: 16539 - DNA, 20 bp, Artificial Sequence
  MKO10016539_A_Ermn
  gRNA
gttcaaccttgtagtatgcc

SEQ ID NO: 16540 - DNA, 20 bp, Artificial Sequence
  MKO10016540_A_Ermp1
  gRNA
tagctgccgaaacgtaagcc

SEQ ID NO: 16541 - DNA, 20 bp, Artificial Sequence
  MKO10016541_A_Ermp1
  gRNA
cagtgatgctcgaagttctc

SEQ ID NO: 16542 - DNA, 20 bp, Artificial Sequence
  MKO10016542_A_Ermp1
  gRNA
gattcgagcatttattaacc

SEQ ID NO: 16543 - DNA, 20 bp, Artificial Sequence
  MKO10016543_A_Ern1
  gRNA
actcactcttccacgtgtgt

SEQ ID NO: 16544 - DNA, 20 bp, Artificial Sequence
  MKO10016544_A_Ern1
  gRNA
cttgttgtttgtctcgaccc

SEQ ID NO: 16545 - DNA, 20 bp, Artificial Sequence
  MKO10016545_A_Ern1
  gRNA
cttggaggcaagaacaacga

SEQ ID NO: 16546 - DNA, 20 bp, Artificial Sequence
  MKO10016546_A_Ern2
  gRNA
gacaccatcagagctgcgac

SEQ ID NO: 16547 - DNA, 20 bp, Artificial Sequence
  MKO10016547_A_Ern2
  gRNA
acatacaggctgccgtcagc

SEQ ID NO: 16548 - DNA, 20 bp, Artificial Sequence
  MKO10016548_A_Ern2
  gRNA
cattctaggtccagtctgtc

SEQ ID NO: 16549 - DNA, 20 bp, Artificial Sequence
  MKO10016549_A_Ero1lb
  gRNA
gcgccatcaacagcacgcta

SEQ ID NO: 16550 - DNA, 20 bp, Artificial Sequence
  MKO10016550_A_Ero1lb
  gRNA
actcaccttatttgaacgcc

SEQ ID NO: 16551 - DNA, 20 bp, Artificial Sequence
  MKO10016551_A_Ero1lb
  gRNA
taaagccgggcgttcaaata

SEQ ID NO: 16552 - DNA, 20 bp, Artificial Sequence
  MKO10016552_A_Ero1l
  gRNA
gtagttattaaacttatcga

SEQ ID NO: 16553 - DNA, 20 bp, Artificial Sequence
  MKO10016553_A_Ero1l
  gRNA
tgtgagcaagctgagcgact

SEQ ID NO: 16554 - DNA, 20 bp, Artificial Sequence
  MKO10016554_A_Ero1l
  gRNA
ctcgcagacttaattccatc

SEQ ID NO: 16555 - DNA, 20 bp, Artificial Sequence
  MKO10016555_A_Erp27
  gRNA
cccgtcttaccagtcgaaag

SEQ ID NO: 16556 - DNA, 20 bp, Artificial Sequence
  MKO10016556_A_Erp27
  gRNA
ttcacgtgaacaacctccac

SEQ ID NO: 16557 - DNA, 20 bp, Artificial Sequence
  MKO10016557_A_Erp27
  gRNA
taccgatcgtgtctgtgttc

SEQ ID NO: 16558 - DNA, 20 bp, Artificial Sequence
  MKO10016558_A_Erp29
  gRNA
cggcagcggcctacacacga

SEQ ID NO: 16559 - DNA, 20 bp, Artificial Sequence
  MKO10016559_A_Erp29
  gRNA
gaagggcacccttcgtgtgt

SEQ ID NO: 16560 - DNA, 20 bp, Artificial Sequence
  MKO10016560_A_Erp29
  gRNA
tctctatcagcttaccgatc

SEQ ID NO: 16561 - DNA, 20 bp, Artificial Sequence
  MKO10016561_A_Erp44
  gRNA
caagcgctttcactgatcgc

SEQ ID NO: 16562 - DNA, 20 bp, Artificial Sequence
  MKO10016562_A_Erp44
  gRNA
aagcgcttgcagactacatc

SEQ ID NO: 16563 - DNA, 20 bp, Artificial Sequence
  MKO10016563_A_Erp44
  gRNA
gtgctgatcacaatcaactc

SEQ ID NO: 16564 - DNA, 20 bp, Artificial Sequence
  MKO10016564_A_Errfi1
  gRNA
gcgcaaacacttatcctacg

SEQ ID NO: 16565 - DNA, 20 bp, Artificial Sequence
  MKO10016565_A_Errfi1
  gRNA
ataagtgtttgcgcttcccg

SEQ ID NO: 16566 - DNA, 20 bp, Artificial Sequence
  MKO10016566_A_Errfi1
  gRNA
tctccataatggtcaggcct

SEQ ID NO: 16567 - DNA, 20 bp, Artificial Sequence
  MKO10016567_A_Erv3
  gRNA
ccaatcaaccgagttgagtc

SEQ ID NO: 16568 - DNA, 20 bp, Artificial Sequence
  MKO10016568_A_Erv3
  gRNA
agcattcaacccgaggaatt

SEQ ID NO: 16569 - DNA, 20 bp, Artificial Sequence
  MKO10016569_A_Erv3
  gRNA
gcaaactcgctcagactgta

SEQ ID NO: 16570 - DNA, 20 bp, Artificial Sequence
  MKO10016570_A_Esam
  gRNA
ctcccgtgccatcgtgtacc

SEQ ID NO: 16571 - DNA, 20 bp, Artificial Sequence
  MKO10016571_A_Esam
  gRNA
tgccaagtgcaacgtgacct

SEQ ID NO: 16572 - DNA, 20 bp, Artificial Sequence
  MKO10016572_A_Esam
  gRNA
ctgacctgtcatcacgtcca

SEQ ID NO: 16573 - DNA, 20 bp, Artificial Sequence
  MKO10016573_A_Esco1
  gRNA
cagtcaagctaagattgatg

SEQ ID NO: 16574 - DNA, 20 bp, Artificial Sequence
  MKO10016574_A_Esco1
  gRNA
cagcatatgttcagcatctg

SEQ ID NO: 16575 - DNA, 20 bp, Artificial Sequence
  MKO10016575_A_Esco1
  gRNA
agtacactgtgctgctgatt

SEQ ID NO: 16576 - DNA, 20 bp, Artificial Sequence
  MKO10016576_A_Esco2
  gRNA
attgactcacaatgacgagc

SEQ ID NO: 16577 - DNA, 20 bp, Artificial Sequence
  MKO10016577_A_Esco2
  gRNA
cgaaaaatgctgctccgcct

SEQ ID NO: 16578 - DNA, 20 bp, Artificial Sequence
  MKO10016578_A_Esco2
  gRNA
cttatcaacttcctctcgag

SEQ ID NO: 16579 - DNA, 20 bp, Artificial Sequence
  MKO10016579_A_Esd
  gRNA
tacttacgagggctggtatc

SEQ ID NO: 16580 - DNA, 20 bp, Artificial Sequence
  MKO10016580_A_Esd
  gRNA
ctaggtggctgcaatatcaa

SEQ ID NO: 16581 - DNA, 20 bp, Artificial Sequence
  MKO10016581_A_Esd
  gRNA
aatgtactcttacgtcaccg

SEQ ID NO: 16582 - DNA, 20 bp, Artificial Sequence
  MKO10016582_A_Esf1
  gRNA
agttagataaagacgctcct

SEQ ID NO: 16583 - DNA, 20 bp, Artificial Sequence
  MKO10016583_A_Esf1
  gRNA
tcgactagcagtttgtaaca

SEQ ID NO: 16584 - DNA, 20 bp, Artificial Sequence
  MKO10016584_A_Esf1
  gRNA
agtatttcaatcgtttgaac

SEQ ID NO: 16585 - DNA, 20 bp, Artificial Sequence
  MKO10016585_A_Esm1
  gRNA
caccgcatatttggcgctcc

SEQ ID NO: 16586 - DNA, 20 bp, Artificial Sequence
  MKO10016586_A_Esm1
  gRNA
caaatatgcggtggattgcc

SEQ ID NO: 16587 - DNA, 20 bp, Artificial Sequence
  MKO10016587_A_Esm1
  gRNA
ccctgtcacatatgcccgac

SEQ ID NO: 16588 - DNA, 20 bp, Artificial Sequence
  MKO10016588_A_Esp15
  gRNA
gatcttatgaggatgttaag

SEQ ID NO: 16589 - DNA, 20 bp, Artificial Sequence
  MKO10016589_A_Esp15
  gRNA
ttatccaaactataagagat

SEQ ID NO: 16590 - DNA, 20 bp, Artificial Sequence
  MKO10016590_A_Esp15
  gRNA
tttccaacaatacttcttga

SEQ ID NO: 16591 - DNA, 20 bp, Artificial Sequence
  MKO10016591_A_Esp16
  gRNA
gatcttatgaggatgtcacg

SEQ ID NO: 16592 - DNA, 20 bp, Artificial Sequence
  MKO10016592_A_Esp16
  gRNA
tttgccaaactataagagat

SEQ ID NO: 16593 - DNA, 20 bp, Artificial Sequence
  MKO10016593_A_Esp16
  gRNA
aagatgagaaaatacatcag

SEQ ID NO: 16594 - DNA, 20 bp, Artificial Sequence
  MKO10016594_A_Esp18
  gRNA
gcctagttaaactttattcg

SEQ ID NO: 16595 - DNA, 20 bp, Artificial Sequence
  MKO10016595_A_Esp18
  gRNA
ctatgttatttcttatagtt

SEQ ID NO: 16596 - DNA, 20 bp, Artificial Sequence
  MKO10016596_A_Esp18
  gRNA
tttaaacttacccttccttc

SEQ ID NO: 16597 - DNA, 20 bp, Artificial Sequence
  MKO10016597_A_Esp1
  gRNA
cggagcaaatgtcgttcact

SEQ ID NO: 16598 - DNA, 20 bp, Artificial Sequence
  MKO10016598_A_Esp1
  gRNA
ccttggtgaattagacaagt

SEQ ID NO: 16599 - DNA, 20 bp, Artificial Sequence
  MKO10016599_A_Esp1
  gRNA
ctgccatccatgatcactga

SEQ ID NO: 16600 - DNA, 20 bp, Artificial Sequence
  MKO10016600_A_Esp23
  gRNA
cctacatctagaactagaat

SEQ ID NO: 16601 - DNA, 20 bp, Artificial Sequence
  MKO10016601_A_Esp23
  gRNA
ccaattctagttctagatgt

SEQ ID NO: 16602 - DNA, 20 bp, Artificial Sequence
  MKO10016602_A_Esp23
  gRNA
ctactgtcagtgctcactga

SEQ ID NO: 16603 - DNA, 20 bp, Artificial Sequence
  MKO10016603_A_Esp24
  gRNA
ttcgactttagagtcgatag

SEQ ID NO: 16604 - DNA, 20 bp, Artificial Sequence
  MKO10016604_A_Esp24
  gRNA
taattagttgtcaacatacc

SEQ ID NO: 16605 - DNA, 20 bp, Artificial Sequence
  MKO10016605_A_Esp24
  gRNA
attccttcagtgagcattga

SEQ ID NO: 16606 - DNA, 20 bp, Artificial Sequence
  MKO10016606_A_Esp31
  gRNA
ttaggttctgaaaaacgatc

SEQ ID NO: 16607 - DNA, 20 bp, Artificial Sequence
  MKO10016607_A_Esp31
  gRNA
ttggagtaacagcctagttt

SEQ ID NO: 16608 - DNA, 20 bp, Artificial Sequence
  MKO10016608_A_Esp31
  gRNA
ttatcatcaatgttcaccga

SEQ ID NO: 16609 - DNA, 20 bp, Artificial Sequence
  MKO10016609_A_Esp34
  gRNA
caagaattcttaaagaatgc

SEQ ID NO: 16610 - DNA, 20 bp, Artificial Sequence
  MKO10016610_A_Esp34
  gRNA
actccttcagtgaacattga

SEQ ID NO: 16611 - DNA, 20 bp, Artificial Sequence
  MKO10016611_A_Esp34
  gRNA
tctactgtaggttctgaaaa

SEQ ID NO: 16612 - DNA, 20 bp, Artificial Sequence
  MKO10016612_A_Esp36
  gRNA
ttactagaatgtccaattca

SEQ ID NO: 16613 - DNA, 20 bp, Artificial Sequence
  MKO10016613_A_Esp36
  gRNA
cctaatactattccatgaat

SEQ ID NO: 16614 - DNA, 20 bp, Artificial Sequence
  MKO10016614_A_Esp36
  gRNA
ctgccttcagtgagcattga

SEQ ID NO: 16615 - DNA, 20 bp, Artificial Sequence
  MKO10016615_A_Esp38
  gRNA
atgtcacgtgtctcagacca

SEQ ID NO: 16616 - DNA, 20 bp, Artificial Sequence
  MKO10016616_A_Esp38
  gRNA
ccttgagatcagcagatata

SEQ ID NO: 16617 - DNA, 20 bp, Artificial Sequence
  MKO10016617_A_Esp38
  gRNA
gatgtatttcttcatcattc

SEQ ID NO: 16618 - DNA, 20 bp, Artificial Sequence
  MKO10016618_A_Esp3
  gRNA
ttaccatccatgctcaccga

SEQ ID NO: 16619 - DNA, 20 bp, Artificial Sequence
  MKO10016619_A_Esp3
  gRNA
cacccttccttcggtgagca

SEQ ID NO: 16620 - DNA, 20 bp, Artificial Sequence
  MKO10016620_A_Esp3
  gRNA
tcttgatccatagtcttagc

SEQ ID NO: 16621 - DNA, 20 bp, Artificial Sequence
  MKO10016621_A_Esp4
  gRNA
cttgcgtgtttcgttctcct

SEQ ID NO: 16622 - DNA, 20 bp, Artificial Sequence
  MKO10016622_A_Esp4
  gRNA
catgttgaccagaatttgct

SEQ ID NO: 16623 - DNA, 20 bp, Artificial Sequence
  MKO10016623_A_Esp4
  gRNA
ctgccatccatgctcactga

SEQ ID NO: 16624 - DNA, 20 bp, Artificial Sequence
  MKO10016624_A_Esp5
  gRNA
ttctaaacgcaaagtcatcg

SEQ ID NO: 16625 - DNA, 20 bp, Artificial Sequence
  MKO10016625_A_Esp5
  gRNA
cgccctctaaccaatgaaag

SEQ ID NO: 16626 - DNA, 20 bp, Artificial Sequence
  MKO10016626_A_Esp5
  gRNA
gatacctagtaaagtcatcg

SEQ ID NO: 16627 - DNA, 20 bp, Artificial Sequence
  MKO10016627_A_Esp6-esp5
  gRNA
ttctaaacgcaaagtcatcg

SEQ ID NO: 16628 - DNA, 20 bp, Artificial Sequence
  MKO10016628_A_Esp6-esp5
  gRNA
gatacctagtaaagtcatcg

SEQ ID NO: 16629 - DNA, 20 bp, Artificial Sequence
  MKO10016629_A_Esp6-esp5
  gRNA
cttccatcagtgtgcattga

SEQ ID NO: 16630 - DNA, 20 bp, Artificial Sequence
  MKO10016630_A_Esp6
  gRNA
agtggctgaatacgtaccag

SEQ ID NO: 16631 - DNA, 20 bp, Artificial Sequence
  MKO10016631_A_Esp6
  gRNA
ctgggttatcgagcaatctc

SEQ ID NO: 16632 - DNA, 20 bp, Artificial Sequence
  MKO10016632_A_Esp6
  gRNA
ctgccatccatgcccacaga

SEQ ID NO: 16633 - DNA, 20 bp, Artificial Sequence
  MKO10016633_A_Esp8
  gRNA
ctatgaagtttcgttcacat

SEQ ID NO: 16634 - DNA, 20 bp, Artificial Sequence
  MKO10016634_A_Esp8
  gRNA
ggcaggaagtgtactctcta

SEQ ID NO: 16635 - DNA, 20 bp, Artificial Sequence
  MKO10016635_A_Esp8
  gRNA
catcaatttgctctgaagaa

SEQ ID NO: 16636 - DNA, 20 bp, Artificial Sequence
  MKO10016636_A_Espl1
  gRNA
gcaactaaacgacaggcggt

SEQ ID NO: 16637 - DNA, 20 bp, Artificial Sequence
  MKO10016637_A_Espl1
  gRNA
ggcagctgtcgtacaatgcc

SEQ ID NO: 16638 - DNA, 20 bp, Artificial Sequence
  MKO10016638_A_Espl1
  gRNA
ctttagtcagaagctctatg

SEQ ID NO: 16639 - DNA, 20 bp, Artificial Sequence
  MKO10016639_A_Espnl
  gRNA
cgacgtgcgcctgagagccc

SEQ ID NO: 16640 - DNA, 20 bp, Artificial Sequence
  MKO10016640_A_Espnl
  gRNA
ccggccgagacatttcccgc

SEQ ID NO: 16641 - DNA, 20 bp, Artificial Sequence
  MKO10016641_A_Espnl
  gRNA
tatacccatcttcatcccgc

SEQ ID NO: 16642 - DNA, 20 bp, Artificial Sequence
  MKO10016642_A_Espn
  gRNA
tgagcgagtccacctccaca

SEQ ID NO: 16643 - DNA, 20 bp, Artificial Sequence
  MKO10016643_A_Espn
  gRNA
cgtcgttcctcgtcttctac

SEQ ID NO: 16644 - DNA, 20 bp, Artificial Sequence
  MKO10016644_A_Espn
  gRNA
ggcttccctagcttgccccg

SEQ ID NO: 16645 - DNA, 20 bp, Artificial Sequence
  MKO10016645_A_Esr1
  gRNA
gtaacacttgcgcagccgac

SEQ ID NO: 16646 - DNA, 20 bp, Artificial Sequence
  MKO10016646_A_Esr1
  gRNA
ggcatacggaaagaccgccg

SEQ ID NO: 16647 - DNA, 20 bp, Artificial Sequence
  MKO10016647_A_Esr1
  gRNA
tctgacaatcgacgccagaa

SEQ ID NO: 16648 - DNA, 20 bp, Artificial Sequence
  MKO10016648_A_Esr2
  gRNA
ttactagtccaagcgccaag

SEQ ID NO: 16649 - DNA, 20 bp, Artificial Sequence
  MKO10016649_A_Esr2
  gRNA
caggcaatgcacctgctcgc

SEQ ID NO: 16650 - DNA, 20 bp, Artificial Sequence
  MKO10016650_A_Esr2
  gRNA
ttgatctccatgtcttgcgt

SEQ ID NO: 16651 - DNA, 20 bp, Artificial Sequence
  MKO10016651_A_Esrp1
  gRNA
ctctttccgaagatcgaaaa

SEQ ID NO: 16652 - DNA, 20 bp, Artificial Sequence
  MKO10016652_A_Esrp1
  gRNA
ctctcccgatatcgacaagc

SEQ ID NO: 16653 - DNA, 20 bp, Artificial Sequence
  MKO10016653_A_Esrp1
  gRNA
agtgactctgtgtcccgata

SEQ ID NO: 16654 - DNA, 20 bp, Artificial Sequence
  MKO10016654_A_Esrp2
  gRNA
caagtcgctagttcgcgccg

SEQ ID NO: 16655 - DNA, 20 bp, Artificial Sequence
  MKO10016655_A_Esrp2
  gRNA
cctgagtccacaatgccgcg

SEQ ID NO: 16656 - DNA, 20 bp, Artificial Sequence
  MKO10016656_A_Esrp2
  gRNA
taccattggacccttcaagt

SEQ ID NO: 16657 - DNA, 20 bp, Artificial Sequence
  MKO10016657_A_Esrra
  gRNA
tgtacttctgccgtccgccg

SEQ ID NO: 16658 - DNA, 20 bp, Artificial Sequence
  MKO10016658_A_Esrra
  gRNA
gtacgtcctgctgaaagctc

SEQ ID NO: 16659 - DNA, 20 bp, Artificial Sequence
  MKO10016659_A_Esrra
  gRNA
tgcgacaccagagcgttcac

SEQ ID NO: 16660 - DNA, 20 bp, Artificial Sequence
  MKO10016660_A_Esrrb
  gRNA
ccagccgtcgcttgtacttc

SEQ ID NO: 16661 - DNA, 20 bp, Artificial Sequence
  MKO10016661_A_Esrrb
  gRNA
gcgagtccagaccgttggcg

SEQ ID NO: 16662 - DNA, 20 bp, Artificial Sequence
  MKO10016662_A_Esrrb
  gRNA
cccgtgccgcaagagctacg

SEQ ID NO: 16663 - DNA, 20 bp, Artificial Sequence
  MKO10016663_A_Esrrg
  gRNA
gttgacgctgtccgtcaggg

SEQ ID NO: 16664 - DNA, 20 bp, Artificial Sequence
  MKO10016664_A_Esrrg
  gRNA
gggatcctctacgatggtgc

SEQ ID NO: 16665 - DNA, 20 bp, Artificial Sequence
  MKO10016665_A_Esrrg
  gRNA
gtccgtcttgacagagtgcg

SEQ ID NO: 16666 - DNA, 20 bp, Artificial Sequence
  MKO10016666_A_Esx1
  gRNA
gttcgaatccctcgggttcc

SEQ ID NO: 16667 - DNA, 20 bp, Artificial Sequence
  MKO10016667_A_Esx1
  gRNA
ccaagtggagacgacttcgg

SEQ ID NO: 16668 - DNA, 20 bp, Artificial Sequence
  MKO10016668_A_Esx1
  gRNA
tgcggcgaagactgagcaac

SEQ ID NO: 16669 - DNA, 20 bp, Artificial Sequence
  MKO10016669_A_Esyt1
  gRNA
aggtgatgtacagattgacg

SEQ ID NO: 16670 - DNA, 20 bp, Artificial Sequence
  MKO10016670_A_Esyt1
  gRNA
ttgacgccaatgattcgtaa

SEQ ID NO: 16671 - DNA, 20 bp, Artificial Sequence
  MKO10016671_A_Esyt1
  gRNA
ctttagccattacgaatcat

SEQ ID NO: 16672 - DNA, 20 bp, Artificial Sequence
  MKO10016672_A_Esyt2
  gRNA
gcatttgctccacgcacagc

SEQ ID NO: 16673 - DNA, 20 bp, Artificial Sequence
  MKO10016673_A_Esyt2
  gRNA
accatagagccagctgtgcg

SEQ ID NO: 16674 - DNA, 20 bp, Artificial Sequence
  MKO10016674_A_Esyt2
  gRNA
ccttaacaccattgactctc

SEQ ID NO: 16675 - DNA, 20 bp, Artificial Sequence
  MKO10016675_A_Esyt3
  gRNA
taccttgacgccgttcacct

SEQ ID NO: 16676 - DNA, 20 bp, Artificial Sequence
  MKO10016676_A_Esyt3
  gRNA
ggacgccgctcacaccgccc

SEQ ID NO: 16677 - DNA, 20 bp, Artificial Sequence
  MKO10016677_A_Esyt3
  gRNA
gcgtgtggagtgggccaata

SEQ ID NO: 16678 - DNA, 20 bp, Artificial Sequence
  MKO10016678_A_Etaa1
  gRNA
gtaagttatacttccactcg

SEQ ID NO: 16679 - DNA, 20 bp, Artificial Sequence
  MKO10016679_A_Etaa1
  gRNA
tgaagcatgccatcggttag

SEQ ID NO: 16680 - DNA, 20 bp, Artificial Sequence
  MKO10016680_A_Etaa1
  gRNA
gccagtacaaatcgtgaaaa

SEQ ID NO: 16681 - DNA, 20 bp, Artificial Sequence
  MKO10016681_A_Etf1
  gRNA
cgacaataagtttcatacag

SEQ ID NO: 16682 - DNA, 20 bp, Artificial Sequence
  MKO10016682_A_Etf1
  gRNA
aaaatgttagcagacgagtt

SEQ ID NO: 16683 - DNA, 20 bp, Artificial Sequence
  MKO10016683_A_Etf1
  gRNA
caaagaccagatttcacgag

SEQ ID NO: 16684 - DNA, 20 bp, Artificial Sequence
  MKO10016684_A_Etfa
  gRNA
tttgtgagaactatctatgc

SEQ ID NO: 16685 - DNA, 20 bp, Artificial Sequence
  MKO10016685_A_Etfa
  gRNA
agctctcaccttgtcacact

SEQ ID NO: 16686 - DNA, 20 bp, Artificial Sequence
  MKO10016686_A_Etfa
  gRNA
attaagtttggcagctactc

SEQ ID NO: 16687 - DNA, 20 bp, Artificial Sequence
  MKO10016687_A_Etfb
  gRNA
ggagaccatccgaactgctc

SEQ ID NO: 16688 - DNA, 20 bp, Artificial Sequence
  MKO10016688_A_Etfb
  gRNA
cacacagattcgggtaaagc

SEQ ID NO: 16689 - DNA, 20 bp, Artificial Sequence
  MKO10016689_A_Etfb
  gRNA
acgggaaattgacgggggtc

SEQ ID NO: 16690 - DNA, 20 bp, Artificial Sequence
  MKO10016690_A_Etfdh
  gRNA
catcgtacgcctaggacatc

SEQ ID NO: 16691 - DNA, 20 bp, Artificial Sequence
  MKO10016691_A_Etfdh
  gRNA
ggtcttccgatgaacaatca

SEQ ID NO: 16692 - DNA, 20 bp, Artificial Sequence
  MKO10016692_A_Etfdh
  gRNA
atagttggtgccggcccagc

SEQ ID NO: 16693 - DNA, 20 bp, Artificial Sequence
  MKO10016693_A_Ethe1
  gRNA
tacccggctcacgattacca

SEQ ID NO: 16694 - DNA, 20 bp, Artificial Sequence
  MKO10016694_A_Ethe1
  gRNA
tcaccgtggtaatcgtgagc

SEQ ID NO: 16695 - DNA, 20 bp, Artificial Sequence
  MKO10016695_A_Ethe1
  gRNA
gggctcaagctgttgtacgc

SEQ ID NO: 16696 - DNA, 20 bp, Artificial Sequence
  MKO10016696_A_Etl4
  gRNA
tactcgcgcgagccttcccg

SEQ ID NO: 16697 - DNA, 20 bp, Artificial Sequence
  MKO10016697_A_Etl4
  gRNA
cgcgcgagtacgactgcctc

SEQ ID NO: 16698 - DNA, 20 bp, Artificial Sequence
  MKO10016698_A_Etl4
  gRNA
cacatgacgaaagccgtgaa

SEQ ID NO: 16699 - DNA, 20 bp, Artificial Sequence
  MKO10016699_A_Etnk1
  gRNA
actgttagtcgaccgagacg

SEQ ID NO: 16700 - DNA, 20 bp, Artificial Sequence
  MKO10016700_A_Etnk1
  gRNA
gaaaagtttccgcgtgctgc

SEQ ID NO: 16701 - DNA, 20 bp, Artificial Sequence
  MKO10016701_A_Etnk1
  gRNA
catgctattcatgcgcacaa

SEQ ID NO: 16702 - DNA, 20 bp, Artificial Sequence
  MKO10016702_A_Etnk2
  gRNA
ggacatgcgggactgcgtgt

SEQ ID NO: 16703 - DNA, 20 bp, Artificial Sequence
  MKO10016703_A_Etnk2
  gRNA
gatgcatcgttatttcacgc

SEQ ID NO: 16704 - DNA, 20 bp, Artificial Sequence
  MKO10016704_A_Etnk2
  gRNA
agccgtgtgctcgcagcagt

SEQ ID NO: 16705 - DNA, 20 bp, Artificial Sequence
  MKO10016705_A_Etnppl
  gRNA
gaactgccgtgccagacgta

SEQ ID NO: 16706 - DNA, 20 bp, Artificial Sequence
  MKO10016706_A_Etnppl
  gRNA
catcaaaataatgcgagccc

SEQ ID NO: 16707 - DNA, 20 bp, Artificial Sequence
  MKO10016707_A_Etnppl
  gRNA
tgatctcaattaatgacgac

SEQ ID NO: 16708 - DNA, 20 bp, Artificial Sequence
  MKO10016708_A_Etohi1
  gRNA
gagagtacagctttctacaa

SEQ ID NO: 16709 - DNA, 20 bp, Artificial Sequence
  MKO10016709_A_Etohi1
  gRNA
tatgtgttcgtttgagtctt

SEQ ID NO: 16710 - DNA, 20 bp, Artificial Sequence
  MKO10016710_A_Etohi1
  gRNA
actgggtttaggttacagtt

SEQ ID NO: 16711 - DNA, 20 bp, Artificial Sequence
  MKO10016711_A_Ets1
  gRNA
cagaaacccacgtccgggac

SEQ ID NO: 16712 - DNA, 20 bp, Artificial Sequence
  MKO10016712_A_Ets1
  gRNA
cttactgatgaagtaatccg

SEQ ID NO: 16713 - DNA, 20 bp, Artificial Sequence
  MKO10016713_A_Ets1
  gRNA
gagagtcggcttgagatcga

SEQ ID NO: 16714 - DNA, 20 bp, Artificial Sequence
  MKO10016714_A_Ets2
  gRNA
caaaaggagcaacgacgtct

SEQ ID NO: 16715 - DNA, 20 bp, Artificial Sequence
  MKO10016715_A_Ets2
  gRNA
acctcaacgcggttcctcat

SEQ ID NO: 16716 - DNA, 20 bp, Artificial Sequence
  MKO10016716_A_Ets2
  gRNA
caagacgtcgttgctccttt

SEQ ID NO: 16717 - DNA, 20 bp, Artificial Sequence
  MKO10016717_A_Etv1
  gRNA
aaaagtgcctgtacaatgtc

SEQ ID NO: 16718 - DNA, 20 bp, Artificial Sequence
  MKO10016718_A_Etv1
  gRNA
cttcttacctgacattgtac

SEQ ID NO: 16719 - DNA, 20 bp, Artificial Sequence
  MKO10016719_A_Etv1
  gRNA
tgcagcttacctgtggtcca

SEQ ID NO: 16720 - DNA, 20 bp, Artificial Sequence
  MKO10016720_A_Etv2
  gRNA
cgcggctattgcccgtccag

SEQ ID NO: 16721 - DNA, 20 bp, Artificial Sequence
  MKO10016721_A_Etv2
  gRNA
gttcggactacaccaccacg

SEQ ID NO: 16722 - DNA, 20 bp, Artificial Sequence
  MKO10016722_A_Etv2
  gRNA
tcacgaagacgtacctttcc

SEQ ID NO: 16723 - DNA, 20 bp, Artificial Sequence
  MKO10016723_A_Etv3
  gRNA
ctggacggaagaaccgcgag

SEQ ID NO: 16724 - DNA, 20 bp, Artificial Sequence
  MKO10016724_A_Etv3
  gRNA
cggctctaccttaatccgag

SEQ ID NO: 16725 - DNA, 20 bp, Artificial Sequence
  MKO10016725_A_Etv3
  gRNA
ttcatcaacattcgctcgag

SEQ ID NO: 16726 - DNA, 20 bp, Artificial Sequence
  MKO10016726_A_Etv4
  gRNA
gagcttgggcgaagcgctga

SEQ ID NO: 16727 - DNA, 20 bp, Artificial Sequence
  MKO10016727_A_Etv4
  gRNA
cttctgcgagccacgtctct

SEQ ID NO: 16728 - DNA, 20 bp, Artificial Sequence
  MKO10016728_A_Etv4
  gRNA
cggggtctgtgcggggactc

SEQ ID NO: 16729 - DNA, 20 bp, Artificial Sequence
  MKO10016729_A_Etv5
  gRNA
ctttcagaaatctcgatcag

SEQ ID NO: 16730 - DNA, 20 bp, Artificial Sequence
  MKO10016730_A_Etv5
  gRNA
tagcaccaagagcctgctcg

SEQ ID NO: 16731 - DNA, 20 bp, Artificial Sequence
  MKO10016731_A_Etv5
  gRNA
aaaagtgcctctacaactat

SEQ ID NO: 16732 - DNA, 20 bp, Artificial Sequence
  MKO10016732_A_Etv6
  gRNA
gcatggcgtgctcttccggt

SEQ ID NO: 16733 - DNA, 20 bp, Artificial Sequence
  MKO10016733_A_Etv6
  gRNA
gtgaacatgaagcggagtcg

SEQ ID NO: 16734 - DNA, 20 bp, Artificial Sequence
  MKO10016734_A_Etv6
  gRNA
ctgacagggggtacgtttcc

SEQ ID NO: 16735 - DNA, 20 bp, Artificial Sequence
  MKO10016735_A_Eva1a
  gRNA
gcagacaccgccgcttcgag

SEQ ID NO: 16736 - DNA, 20 bp, Artificial Sequence
  MKO10016736_A_Eva1a
  gRNA
aggagcgcgaacgaatcatc

SEQ ID NO: 16737 - DNA, 20 bp, Artificial Sequence
  MKO10016737_A_Eva1a
  gRNA
cgtggccactggttccgtgc

SEQ ID NO: 16738 - DNA, 20 bp, Artificial Sequence
  MKO10016738_A_Eva1b
  gRNA
caccctagagccggaagacg

SEQ ID NO: 16739 - DNA, 20 bp, Artificial Sequence
  MKO10016739_A_Eva1b
  gRNA
ggggtccggggtcgcgagcg

SEQ ID NO: 16740 - DNA, 20 bp, Artificial Sequence
  MKO10016740_A_Eva1b
  gRNA
ctcacctctgatgtgcgcat

SEQ ID NO: 16741 - DNA, 20 bp, Artificial Sequence
  MKO10016741_A_Eva1c
  gRNA
tccgcgctcaccgatttctc

SEQ ID NO: 16742 - DNA, 20 bp, Artificial Sequence
  MKO10016742_A_Eva1c
  gRNA
ggccctgattctgcgccgat

SEQ ID NO: 16743 - DNA, 20 bp, Artificial Sequence
  MKO10016743_A_Eva1c
  gRNA
aacatctactccgccgccta

SEQ ID NO: 16744 - DNA, 20 bp, Artificial Sequence
  MKO10016744_A_Evc2
  gRNA
ttcgaaaggttgactgatgt

SEQ ID NO: 16745 - DNA, 20 bp, Artificial Sequence
  MKO10016745_A_Evc2
  gRNA
cttgctgtgaaggagtcgcc

SEQ ID NO: 16746 - DNA, 20 bp, Artificial Sequence
  MKO10016746_A_Evc2
  gRNA
tgtcagctacacagcctcgc

SEQ ID NO: 16747 - DNA, 20 bp, Artificial Sequence
  MKO10016747_A_Evc
  gRNA
gctgtaggttgaccgcatgc

SEQ ID NO: 16748 - DNA, 20 bp, Artificial Sequence
  MKO10016748_A_Evc
  gRNA
tgttcatagcctctggccga

SEQ ID NO: 16749 - DNA, 20 bp, Artificial Sequence
  MKO10016749_A_Evc
  gRNA
gagtgctcacccggaacttc

SEQ ID NO: 16750 - DNA, 20 bp, Artificial Sequence
  MKO10016750_A_Evi2a-evi2b
  gRNA
cagaagccgtctcagtgcgc

SEQ ID NO: 16751 - DNA, 20 bp, Artificial Sequence
  MKO10016751_A_Evi2a-evi2b
  gRNA
ggtgtttcagtgcggattaa

SEQ ID NO: 16752 - DNA, 20 bp, Artificial Sequence
  MKO10016752_A_Evi2a-evi2b
  gRNA
ccgacacgttcctgtcttcg

SEQ ID NO: 16753 - DNA, 20 bp, Artificial Sequence
  MKO10016753_A_Evi2a
  gRNA
ggactgctgagtcggacact

SEQ ID NO: 16754 - DNA, 20 bp, Artificial Sequence
  MKO10016754_A_Evi2a
  gRNA
agaaagtcaccgttgctccg

SEQ ID NO: 16755 - DNA, 20 bp, Artificial Sequence
  MKO10016755_A_Evi2a
  gRNA
gcacaccaggagattgcaat

SEQ ID NO: 16756 - DNA, 20 bp, Artificial Sequence
  MKO10016756_A_Evi2b
  gRNA
gacaactgatgcacgctttg

SEQ ID NO: 16757 - DNA, 20 bp, Artificial Sequence
  MKO10016757_A_Evi2b
  gRNA
tataatagtaccgattaata

SEQ ID NO: 16758 - DNA, 20 bp, Artificial Sequence
  MKO10016758_A_Evi2b
  gRNA
tcagttgtaacatataacga

SEQ ID NO: 16759 - DNA, 20 bp, Artificial Sequence
  MKO10016759_A_Evi5l
  gRNA
tgtattcgtgcgactgatgc

SEQ ID NO: 16760 - DNA, 20 bp, Artificial Sequence
  MKO10016760_A_Evi5l
  gRNA
gccagacgatggcccgaaag

SEQ ID NO: 16761 - DNA, 20 bp, Artificial Sequence
  MKO10016761_A_Evi5l
  gRNA
attcatggagcgcatggact

SEQ ID NO: 16762 - DNA, 20 bp, Artificial Sequence
  MKO10016762_A_Evi5
  gRNA
cccttaggtggcgacagaca

SEQ ID NO: 16763 - DNA, 20 bp, Artificial Sequence
  MKO10016763_A_Evi5
  gRNA
cgttggattgttgctgatgc

SEQ ID NO: 16764 - DNA, 20 bp, Artificial Sequence
  MKO10016764_A_Evi5
  gRNA
tctttaggcatactccttag

SEQ ID NO: 16765 - DNA, 20 bp, Artificial Sequence
  MKO10016765_A_Evl
  gRNA
attctgcacctgacgctgtg

SEQ ID NO: 16766 - DNA, 20 bp, Artificial Sequence
  MKO10016766_A_Evl
  gRNA
cgagatgcccgtcaggtcta

SEQ ID NO: 16767 - DNA, 20 bp, Artificial Sequence
  MKO10016767_A_Evl
  gRNA
cttgaccccgaccactctga

SEQ ID NO: 16768 - DNA, 20 bp, Artificial Sequence
  MKO10016768_A_Evpl
  gRNA
gccgcgccttgtctacatcc

SEQ ID NO: 16769 - DNA, 20 bp, Artificial Sequence
  MKO10016769_A_Evpl
  gRNA
cacacgcgcccagtcgaccc

SEQ ID NO: 16770 - DNA, 20 bp, Artificial Sequence
  MKO10016770_A_Evpl
  gRNA
tctcaccaggatcggcagaa

SEQ ID NO: 16771 - DNA, 20 bp, Artificial Sequence
  MKO10016771_A_Evx1
  gRNA
ccagatgcgccgataccgca

SEQ ID NO: 16772 - DNA, 20 bp, Artificial Sequence
  MKO10016772_A_Evx1
  gRNA
tctctggtccaacgccgcca

SEQ ID NO: 16773 - DNA, 20 bp, Artificial Sequence
  MKO10016773_A_Evx1
  gRNA
ggcgcacggactcggcgcct

SEQ ID NO: 16774 - DNA, 20 bp, Artificial Sequence
  MKO10016774_A_Evx2
  gRNA
tcgccgcacctgatcggcgc

SEQ ID NO: 16775 - DNA, 20 bp, Artificial Sequence
  MKO10016775_A_Evx2
  gRNA
acggcgggtggctcggactt

SEQ ID NO: 16776 - DNA, 20 bp, Artificial Sequence
  MKO10016776_A_Evx2
  gRNA
gctgcactactacccgcacg

SEQ ID NO: 16777 - DNA, 20 bp, Artificial Sequence
  MKO10016777_A_Ewsr1
  gRNA
ctgtacgcctgcggggcagt

SEQ ID NO: 16778 - DNA, 20 bp, Artificial Sequence
  MKO10016778_A_Ewsr1
  gRNA
caacagccaccgcacctacc

SEQ ID NO: 16779 - DNA, 20 bp, Artificial Sequence
  MKO10016779_A_Ewsr1
  gRNA
tgcatatgcagtctgcccgt

SEQ ID NO: 16780 - DNA, 20 bp, Artificial Sequence
  MKO10016780_A_Exd1
  gRNA
gacctcaagtactgcccgtc

SEQ ID NO: 16781 - DNA, 20 bp, Artificial Sequence
  MKO10016781_A_Exd1
  gRNA
cacctgacgggcagtacttg

SEQ ID NO: 16782 - DNA, 20 bp, Artificial Sequence
  MKO10016782_A_Exd1
  gRNA
ccgaagaacactttcacccc

SEQ ID NO: 16783 - DNA, 20 bp, Artificial Sequence
  MKO10016783_A_Exd2
  gRNA
gacatcccattccgaagcaa

SEQ ID NO: 16784 - DNA, 20 bp, Artificial Sequence
  MKO10016784_A_Exd2
  gRNA
aaagtacggaccaaatcaac

SEQ ID NO: 16785 - DNA, 20 bp, Artificial Sequence
  MKO10016785_A_Exd2
  gRNA
caatatatccaaaagcgtcc

SEQ ID NO: 16786 - DNA, 20 bp, Artificial Sequence
  MKO10016786_A_Exo1
  gRNA
caataaccccgatatcgtga

SEQ ID NO: 16787 - DNA, 20 bp, Artificial Sequence
  MKO10016787_A_Exo1
  gRNA
ccacgaggcaatccactcct

SEQ ID NO: 16788 - DNA, 20 bp, Artificial Sequence
  MKO10016788_A_Exo1
  gRNA
tatcaacatcacgcacgcca

SEQ ID NO: 16789 - DNA, 20 bp, Artificial Sequence
  MKO10016789_A_Exo5
  gRNA
tgacgcgcccttccgactgt

SEQ ID NO: 16790 - DNA, 20 bp, Artificial Sequence
  MKO10016790_A_Exo5
  gRNA
tggctgaactcaagacacga

SEQ ID NO: 16791 - DNA, 20 bp, Artificial Sequence
  MKO10016791_A_Exo5
  gRNA
actatgtggacatctgcgag

SEQ ID NO: 16792 - DNA, 20 bp, Artificial Sequence
  MKO10016792_A_Exoc1
  gRNA
gaccactgaacgccccgtgc

SEQ ID NO: 16793 - DNA, 20 bp, Artificial Sequence
  MKO10016793_A_Exoc1
  gRNA
cgaccacagcaaggtctcgc

SEQ ID NO: 16794 - DNA, 20 bp, Artificial Sequence
  MKO10016794_A_Exoc1
  gRNA
acactctgattctctccgct

SEQ ID NO: 16795 - DNA, 20 bp, Artificial Sequence
  MKO10016795_A_Exoc2
  gRNA
ctccgtcctgcgaatcctct

SEQ ID NO: 16796 - DNA, 20 bp, Artificial Sequence
  MKO10016796_A_Exoc2
  gRNA
gtgattctctatgagatacc

SEQ ID NO: 16797 - DNA, 20 bp, Artificial Sequence
  MKO10016797_A_Exoc2
  gRNA
cagacatccattctgccgtg

SEQ ID NO: 16798 - DNA, 20 bp, Artificial Sequence
  MKO10016798_A_Exoc3l4
  gRNA
catagcgcgccgagcatagg

SEQ ID NO: 16799 - DNA, 20 bp, Artificial Sequence
  MKO10016799_A_Exoc3l4
  gRNA
cgcctatgctcggcgcgcta

SEQ ID NO: 16800 - DNA, 20 bp, Artificial Sequence
  MKO10016800_A_Exoc3l4
  gRNA
tggcgctatctccgcggagc

SEQ ID NO: 16801 - DNA, 20 bp, Artificial Sequence
  MKO10016801_A_Exoc3l
  gRNA
cgaggagttgctgcacgcta

SEQ ID NO: 16802 - DNA, 20 bp, Artificial Sequence
  MKO10016802_A_Exoc3l
  gRNA
ggtagccttgcccgccgagt

SEQ ID NO: 16803 - DNA, 20 bp, Artificial Sequence
  MKO10016803_A_Exoc3l
  gRNA
aatacagcgtaactattccc

SEQ ID NO: 16804 - DNA, 20 bp, Artificial Sequence
  MKO10016804_A_Exoc3
  gRNA
actgtgacaactagaatcga

SEQ ID NO: 16805 - DNA, 20 bp, Artificial Sequence
  MKO10016805_A_Exoc3
  gRNA
ccgccgggatcctaccttgc

SEQ ID NO: 16806 - DNA, 20 bp, Artificial Sequence
  MKO10016806_A_Exoc3
  gRNA
caatgcactgaatgacgtca

SEQ ID NO: 16807 - DNA, 20 bp, Artificial Sequence
  MKO10016807_A_Exoc4
  gRNA
taagcacgtcctgaacctac

SEQ ID NO: 16808 - DNA, 20 bp, Artificial Sequence
  MKO10016808_A_Exoc4
  gRNA
cttcgtaagctgtggattga

SEQ ID NO: 16809 - DNA, 20 bp, Artificial Sequence
  MKO10016809_A_Exoc4
  gRNA
cagaacgcatcactaactcg

SEQ ID NO: 16810 - DNA, 20 bp, Artificial Sequence
  MKO10016810_A_Exoc5
  gRNA
aatacattgaacgtctcgtg

SEQ ID NO: 16811 - DNA, 20 bp, Artificial Sequence
  MKO10016811_A_Exoc5
  gRNA
gcctatcgaaaggtaactcc

SEQ ID NO: 16812 - DNA, 20 bp, Artificial Sequence
  MKO10016812_A_Exoc5
  gRNA
gcctccactgcacgttgcct

SEQ ID NO: 16813 - DNA, 20 bp, Artificial Sequence
  MKO10016813_A_Exoc6b
  gRNA
cagcattagcttatcgacag

SEQ ID NO: 16814 - DNA, 20 bp, Artificial Sequence
  MKO10016814_A_Exoc6b
  gRNA
actgagctgctgaaagtacg

SEQ ID NO: 16815 - DNA, 20 bp, Artificial Sequence
  MKO10016815_A_Exoc6b
  gRNA
tcctattagtgtccgtcacc

SEQ ID NO: 16816 - DNA, 20 bp, Artificial Sequence
  MKO10016816_A_Exoc6
  gRNA
aggttaccgataccaaccga

SEQ ID NO: 16817 - DNA, 20 bp, Artificial Sequence
  MKO10016817_A_Exoc6
  gRNA
ataaacttcttgtgtgcgtt

SEQ ID NO: 16818 - DNA, 20 bp, Artificial Sequence
  MKO10016818_A_Exoc6
  gRNA
ttacggaactcctcaaagta

SEQ ID NO: 16819 - DNA, 20 bp, Artificial Sequence
  MKO10016819_A_Exoc7
  gRNA
ctaccacgtagccagcgaca

SEQ ID NO: 16820 - DNA, 20 bp, Artificial Sequence
  MKO10016820_A_Exoc7
  gRNA
gatgatcttctccgtgtcgc

SEQ ID NO: 16821 - DNA, 20 bp, Artificial Sequence
  MKO10016821_A_Exoc7
  gRNA
gtcgtttatccgagacagcc

SEQ ID NO: 16822 - DNA, 20 bp, Artificial Sequence
  MKO10016822_A_Exoc8
  gRNA
ccccgagagccgaatcttcc

SEQ ID NO: 16823 - DNA, 20 bp, Artificial Sequence
  MKO10016823_A_Exoc8
  gRNA
ccctctcgagggacgcccgc

SEQ ID NO: 16824 - DNA, 20 bp, Artificial Sequence
  MKO10016824_A_Exoc8
  gRNA
gctcgcaagccttcgtgcac

SEQ ID NO: 16825 - DNA, 20 bp, Artificial Sequence
  MKO10016825_A_Exog
  gRNA
ccacgccctgtcttacgatc

SEQ ID NO: 16826 - DNA, 20 bp, Artificial Sequence
  MKO10016826_A_Exog
  gRNA
atcgccgcgagtccctgaga

SEQ ID NO: 16827 - DNA, 20 bp, Artificial Sequence
  MKO10016827_A_Exog
  gRNA
gactcgcggcgatttctgaa

SEQ ID NO: 16828 - DNA, 20 bp, Artificial Sequence
  MKO10016828_A_Exosc10
  gRNA
gtccgcctagggcatgttac

SEQ ID NO: 16829 - DNA, 20 bp, Artificial Sequence
  MKO10016829_A_Exosc10
  gRNA
cgataccaatgacgtgatat

SEQ ID NO: 16830 - DNA, 20 bp, Artificial Sequence
  MKO10016830_A_Exosc10
  gRNA
tcatactcgtcaccgaactg

SEQ ID NO: 16831 - DNA, 20 bp, Artificial Sequence
  MKO10016831_A_Exosc1
  gRNA
ctttaccgcgccattctcgc

SEQ ID NO: 16832 - DNA, 20 bp, Artificial Sequence
  MKO10016832_A_Exosc1
  gRNA
ccggcagcggcacctacacc

SEQ ID NO: 16833 - DNA, 20 bp, Artificial Sequence
  MKO10016833_A_Exosc1
  gRNA
ccggggatgcagtacctcac

SEQ ID NO: 16834 - DNA, 20 bp, Artificial Sequence
  MKO10016834_A_Exosc2
  gRNA
ggccatgagaggcttcttgc

SEQ ID NO: 16835 - DNA, 20 bp, Artificial Sequence
  MKO10016835_A_Exosc2
  gRNA
ctctcatccatgaacctacc

SEQ ID NO: 16836 - DNA, 20 bp, Artificial Sequence
  MKO10016836_A_Exosc2
  gRNA
agagaagctcattgcgtctg

SEQ ID NO: 16837 - DNA, 20 bp, Artificial Sequence
  MKO10016837_A_Exosc3
  gRNA
gcacccgcattcaggcgtaa

SEQ ID NO: 16838 - DNA, 20 bp, Artificial Sequence
  MKO10016838_A_Exosc3
  gRNA
aggcggcggcggcgtttact

SEQ ID NO: 16839 - DNA, 20 bp, Artificial Sequence
  MKO10016839_A_Exosc3
  gRNA
ggcatagtgatcgctaaatc

SEQ ID NO: 16840 - DNA, 20 bp, Artificial Sequence
  MKO10016840_A_Exosc4
  gRNA
gcacgtgctgtcggacgaca

SEQ ID NO: 16841 - DNA, 20 bp, Artificial Sequence
  MKO10016841_A_Exosc4
  gRNA
tggctcggcttacatcgagc

SEQ ID NO: 16842 - DNA, 20 bp, Artificial Sequence
  MKO10016842_A_Exosc4
  gRNA
caaacacgcccatccgcgcc

SEQ ID NO: 16843 - DNA, 20 bp, Artificial Sequence
  MKO10016843_A_Exosc5
  gRNA
tattcctgaccagccgctcg

SEQ ID NO: 16844 - DNA, 20 bp, Artificial Sequence
  MKO10016844_A_Exosc5
  gRNA
ttaccaggcagcccgatctt

SEQ ID NO: 16845 - DNA, 20 bp, Artificial Sequence
  MKO10016845_A_Exosc5
  gRNA
tggagtctatgggccggccg

SEQ ID NO: 16846 - DNA, 20 bp, Artificial Sequence
  MKO10016846_A_Exosc6
  gRNA
gcgacgccggcgaccggaga

SEQ ID NO: 16847 - DNA, 20 bp, Artificial Sequence
  MKO10016847_A_Exosc6
  gRNA
cgcggcggaaatcgcagagc

SEQ ID NO: 16848 - DNA, 20 bp, Artificial Sequence
  MKO10016848_A_Exosc6
  gRNA
accggagcgacgaggattcg

SEQ ID NO: 16849 - DNA, 20 bp, Artificial Sequence
  MKO10016849_A_Exosc7
  gRNA
agccacggccatccacccga

SEQ ID NO: 16850 - DNA, 20 bp, Artificial Sequence
  MKO10016850_A_Exosc7
  gRNA
cctcctcgcccttcgaattc

SEQ ID NO: 16851 - DNA, 20 bp, Artificial Sequence
  MKO10016851_A_Exosc7
  gRNA
aagctggagaaaccgaatga

SEQ ID NO: 16852 - DNA, 20 bp, Artificial Sequence
  MKO10016852_A_Exosc8
  gRNA
ccagtagatgcccccgatag

SEQ ID NO: 16853 - DNA, 20 bp, Artificial Sequence
  MKO10016853_A_Exosc8
  gRNA
tttaacgccacaaatgaccg

SEQ ID NO: 16854 - DNA, 20 bp, Artificial Sequence
  MKO10016854_A_Exosc8
  gRNA
ctcaccgacatatcctctat

SEQ ID NO: 16855 - DNA, 20 bp, Artificial Sequence
  MKO10016855_A_Exosc9
  gRNA
catcaggatctcattcggaa

SEQ ID NO: 16856 - DNA, 20 bp, Artificial Sequence
  MKO10016856_A_Exosc9
  gRNA
gaatctctctgtgttgtcgc

SEQ ID NO: 16857 - DNA, 20 bp, Artificial Sequence
  MKO10016857_A_Exosc9
  gRNA
ttgtttctccgaaactcaat

SEQ ID NO: 16858 - DNA, 20 bp, Artificial Sequence
  MKO10016858_A_Exph5
  gRNA
agagcggtatgcctccgccc

SEQ ID NO: 16859 - DNA, 20 bp, Artificial Sequence
  MKO10016859_A_Exph5
  gRNA
ctcattcagacgacctgcga

SEQ ID NO: 16860 - DNA, 20 bp, Artificial Sequence
  MKO10016860_A_Exph5
  gRNA
taaaaccaccccttacatat

SEQ ID NO: 16861 - DNA, 20 bp, Artificial Sequence
  MKO10016861_A_Ext1
  gRNA
caatctctcatcgcctatga

SEQ ID NO: 16862 - DNA, 20 bp, Artificial Sequence
  MKO10016862_A_Ext1
  gRNA
cgatgagagattgctattac

SEQ ID NO: 16863 - DNA, 20 bp, Artificial Sequence
  MKO10016863_A_Ext1
  gRNA
gacccaagcctgcgaccacg

SEQ ID NO: 16864 - DNA, 20 bp, Artificial Sequence
  MKO10016864_A_Ext2
  gRNA
ggcagcgctttcgcacggac

SEQ ID NO: 16865 - DNA, 20 bp, Artificial Sequence
  MKO10016865_A_Ext2
  gRNA
cgattacccccaagtgctgc

SEQ ID NO: 16866 - DNA, 20 bp, Artificial Sequence
  MKO10016866_A_Ext2
  gRNA
ggacatcgctcagcaccgcc

SEQ ID NO: 16867 - DNA, 20 bp, Artificial Sequence
  MKO10016867_A_Extl1
  gRNA
agttatccataccaccctag

SEQ ID NO: 16868 - DNA, 20 bp, Artificial Sequence
  MKO10016868_A_Extl1
  gRNA
cgcagggcgaggaccctcga

SEQ ID NO: 16869 - DNA, 20 bp, Artificial Sequence
  MKO10016869_A_Extl1
  gRNA
tagccccccgggagcactct

SEQ ID NO: 16870 - DNA, 20 bp, Artificial Sequence
  MKO10016870_A_Extl2
  gRNA
ccacattccggaatacccgt

SEQ ID NO: 16871 - DNA, 20 bp, Artificial Sequence
  MKO10016871_A_Extl2
  gRNA
gcgtctcatcgatcagcgcg

SEQ ID NO: 16872 - DNA, 20 bp, Artificial Sequence
  MKO10016872_A_Extl2
  gRNA
tgacacactcattagtgccc

SEQ ID NO: 16873 - DNA, 20 bp, Artificial Sequence
  MKO10016873_A_Extl3
  gRNA
tccctggccggtaccatgcg

SEQ ID NO: 16874 - DNA, 20 bp, Artificial Sequence
  MKO10016874_A_Extl3
  gRNA
gaggtgagcatcatcgtcga

SEQ ID NO: 16875 - DNA, 20 bp, Artificial Sequence
  MKO10016875_A_Extl3
  gRNA
agaagcacgtgatcgcattg

SEQ ID NO: 16876 - DNA, 20 bp, Artificial Sequence
  MKO10016876_A_Eya1
  gRNA
ccgtacagctaccagatgca

SEQ ID NO: 16877 - DNA, 20 bp, Artificial Sequence
  MKO10016877_A_Eya1
  gRNA
tacgccacgtacccacagcc

SEQ ID NO: 16878 - DNA, 20 bp, Artificial Sequence
  MKO10016878_A_Eya1
  gRNA
ctgtccaggctgtgggtacg

SEQ ID NO: 16879 - DNA, 20 bp, Artificial Sequence
  MKO10016879_A_Eya2
  gRNA
cggagttgggtacgctgtat

SEQ ID NO: 16880 - DNA, 20 bp, Artificial Sequence
  MKO10016880_A_Eya2
  gRNA
ctatacagcgtacccaactc

SEQ ID NO: 16881 - DNA, 20 bp, Artificial Sequence
  MKO10016881_A_Eya2
  gRNA
aacggactgaccaacaccgc

SEQ ID NO: 16882 - DNA, 20 bp, Artificial Sequence
  MKO10016882_A_Eya3
  gRNA
ggtgcaggcaccatagcact

SEQ ID NO: 16883 - DNA, 20 bp, Artificial Sequence
  MKO10016883_A_Eya3
  gRNA
ttgcagatgaagtgggtatc

SEQ ID NO: 16884 - DNA, 20 bp, Artificial Sequence
  MKO10016884_A_Eya3
  gRNA
cagtacctggtttgagatgc

SEQ ID NO: 16885 - DNA, 20 bp, Artificial Sequence
  MKO10016885_A_Eya4
  gRNA
agagtactgctgcgccgacc

SEQ ID NO: 16886 - DNA, 20 bp, Artificial Sequence
  MKO10016886_A_Eya4
  gRNA
aagcgctccatctccagtcg

SEQ ID NO: 16887 - DNA, 20 bp, Artificial Sequence
  MKO10016887_A_Eya4
  gRNA
agtgagtccactaccacgac

SEQ ID NO: 16888 - DNA, 20 bp, Artificial Sequence
  MKO10016888_A_Ezh1
  gRNA
gagaccgcatcaacatatcc

SEQ ID NO: 16889 - DNA, 20 bp, Artificial Sequence
  MKO10016889_A_Ezh1
  gRNA
tcgacagctcaaacggctcc

SEQ ID NO: 16890 - DNA, 20 bp, Artificial Sequence
  MKO10016890_A_Ezh1
  gRNA
ttcacctcgtcacccatgta

SEQ ID NO: 16891 - DNA, 20 bp, Artificial Sequence
  MKO10016891_A_Ezh2
  gRNA
agaacttcatcccccatata

SEQ ID NO: 16892 - DNA, 20 bp, Artificial Sequence
  MKO10016892_A_Ezh2
  gRNA
acacgcttccgccaacaaac

SEQ ID NO: 16893 - DNA, 20 bp, Artificial Sequence
  MKO10016893_A_Ezh2
  gRNA
ttccaatcgtcagaaaattt

SEQ ID NO: 16894 - DNA, 20 bp, Artificial Sequence
  MKO10016894_A_Ezr
  gRNA
tgtggcacgcggaacaccga

SEQ ID NO: 16895 - DNA, 20 bp, Artificial Sequence
  MKO10016895_A_Ezr
  gRNA
ggcagtagatctcgtcgctg

SEQ ID NO: 16896 - DNA, 20 bp, Artificial Sequence
  MKO10016896_A_Ezr
  gRNA
cgtctggcaggtctccgcac

SEQ ID NO: 16897 - DNA, 20 bp, Artificial Sequence
  MKO10016897_A_F10
  gRNA
cgtcgtcctcgaagatttca

SEQ ID NO: 16898 - DNA, 20 bp, Artificial Sequence
  MKO10016898_A_F10
  gRNA
ttacacgtgcacctgctcgg

SEQ ID NO: 16899 - DNA, 20 bp, Artificial Sequence
  MKO10016899_A_F10
  gRNA
tgccatctcgacacgctcct

SEQ ID NO: 16900 - DNA, 20 bp, Artificial Sequence
  MKO10016900_A_F11r
  gRNA
gaaggtgactcggtccgcat

SEQ ID NO: 16901 - DNA, 20 bp, Artificial Sequence
  MKO10016901_A_F11r
  gRNA
cactgctcaatctgacgtcc

SEQ ID NO: 16902 - DNA, 20 bp, Artificial Sequence
  MKO10016902_A_F11r
  gRNA
cataccagatcccccgactt

SEQ ID NO: 16903 - DNA, 20 bp, Artificial Sequence
  MKO10016903_A_F11
  gRNA
aacatgacaggcgcgatctc

SEQ ID NO: 16904 - DNA, 20 bp, Artificial Sequence
  MKO10016904_A_F11
  gRNA
cttcggatgatcctaccaaa

SEQ ID NO: 16905 - DNA, 20 bp, Artificial Sequence
  MKO10016905_A_F11
  gRNA
gccattgagcttcgttattg

SEQ ID NO: 16906 - DNA, 20 bp, Artificial Sequence
  MKO10016906_A_F12
  gRNA
ctctcctataggctccacca

SEQ ID NO: 16907 - DNA, 20 bp, Artificial Sequence
  MKO10016907_A_F12
  gRNA
ttacccactgtgggcccatc

SEQ ID NO: 16908 - DNA, 20 bp, Artificial Sequence
  MKO10016908_A_F12
  gRNA
tcttaccaggggcgggagcc

SEQ ID NO: 16909 - DNA, 20 bp, Artificial Sequence
  MKO10016909_A_F13a1
  gRNA
gaacggaaagtcgcaccgac

SEQ ID NO: 16910 - DNA, 20 bp, Artificial Sequence
  MKO10016910_A_F13a1
  gRNA
cctcgtaggtcgctaccctc

SEQ ID NO: 16911 - DNA, 20 bp, Artificial Sequence
  MKO10016911_A_F13a1
  gRNA
cccatcaaagtcagccgagt

SEQ ID NO: 16912 - DNA, 20 bp, Artificial Sequence
  MKO10016912_A_F13b
  gRNA
ctggctatgcaaccgaaagt

SEQ ID NO: 16913 - DNA, 20 bp, Artificial Sequence
  MKO10016913_A_F13b
  gRNA
ggtcttctcaaccgtcctgc

SEQ ID NO: 16914 - DNA, 20 bp, Artificial Sequence
  MKO10016914_A_F13b
  gRNA
tttgaatgttctctgcgtcg

SEQ ID NO: 16915 - DNA, 20 bp, Artificial Sequence
  MKO10016915_A_F2rl1
  gRNA
ccgactcatcatcaccgtgc

SEQ ID NO: 16916 - DNA, 20 bp, Artificial Sequence
  MKO10016916_A_F2rl1
  gRNA
tcggcagaggagcgcgtttc

SEQ ID NO: 16917 - DNA, 20 bp, Artificial Sequence
  MKO10016917_A_F2rl1
  gRNA
aggagaccgaggccgccaga

SEQ ID NO: 16918 - DNA, 20 bp, Artificial Sequence
  MKO10016918_A_F2rl2
  gRNA
cgcacgcgtcaacgacatcg

SEQ ID NO: 16919 - DNA, 20 bp, Artificial Sequence
  MKO10016919_A_F2rl2
  gRNA
gttgccgtagaaaacaaccg

SEQ ID NO: 16920 - DNA, 20 bp, Artificial Sequence
  MKO10016920_A_F2rl2
  gRNA
gcccagctgcaaccaagata

SEQ ID NO: 16921 - DNA, 20 bp, Artificial Sequence
  MKO10016921_A_F2rl3
  gRNA
aatttgcccgggtagcctcg

SEQ ID NO: 16922 - DNA, 20 bp, Artificial Sequence
  MKO10016922_A_F2rl3
  gRNA
cgcagtgcacgggcccgcaa

SEQ ID NO: 16923 - DNA, 20 bp, Artificial Sequence
  MKO10016923_A_F2rl3
  gRNA
acgatgatgtagagagtacc

SEQ ID NO: 16924 - DNA, 20 bp, Artificial Sequence
  MKO10016924_A_F2r
  gRNA
ggatcggatacaccaccgcc

SEQ ID NO: 16925 - DNA, 20 bp, Artificial Sequence
  MKO10016925_A_F2r
  gRNA
gggcgacgatcagcaagcgc

SEQ ID NO: 16926 - DNA, 20 bp, Artificial Sequence
  MKO10016926_A_F2r
  gRNA
actgattggcagttcgggtc

SEQ ID NO: 16927 - DNA, 20 bp, Artificial Sequence
  MKO10016927_A_F2
  gRNA
ggtagcggctccgccacagc

SEQ ID NO: 16928 - DNA, 20 bp, Artificial Sequence
  MKO10016928_A_F2
  gRNA
caacctagagcgtgagtgcg

SEQ ID NO: 16929 - DNA, 20 bp, Artificial Sequence
  MKO10016929_A_F2
  gRNA
cagtccatgaaagtctctcg

SEQ ID NO: 16930 - DNA, 20 bp, Artificial Sequence
  MKO10016930_A_F3
  gRNA
cctcacagacgagatcgtga

SEQ ID NO: 16931 - DNA, 20 bp, Artificial Sequence
  MKO10016931_A_F3
  gRNA
ctcaccctgcggcaagtctt

SEQ ID NO: 16932 - DNA, 20 bp, Artificial Sequence
  MKO10016932_A_F3
  gRNA
ccttcacgatctcgtctgtg

SEQ ID NO: 16933 - DNA, 20 bp, Artificial Sequence
  MKO10016933_A_F5
  gRNA
accacacgttccctgccgag

SEQ ID NO: 16934 - DNA, 20 bp, Artificial Sequence
  MKO10016934_A_F5
  gRNA
atttcaactcgggtctgatt

SEQ ID NO: 16935 - DNA, 20 bp, Artificial Sequence
  MKO10016935_A_F5
  gRNA
ttacctgagttgctagatcg

SEQ ID NO: 16936 - DNA, 20 bp, Artificial Sequence
  MKO10016936_A_F7
  gRNA
cgtaagacttgagatgatcc

SEQ ID NO: 16937 - DNA, 20 bp, Artificial Sequence
  MKO10016937_A_F7
  gRNA
ctacacgctacagccagatg

SEQ ID NO: 16938 - DNA, 20 bp, Artificial Sequence
  MKO10016938_A_F7
  gRNA
aaggcgtgccaactcactcc

SEQ ID NO: 16939 - DNA, 20 bp, Artificial Sequence
  MKO10016939_A_F830016B08Rik
  gRNA
ccttaatcagggtatccacc

SEQ ID NO: 16940 - DNA, 20 bp, Artificial Sequence
  MKO10016940_A_F830016B08Rik
  gRNA
tgccactactccaatcttga

SEQ ID NO: 16941 - DNA, 20 bp, Artificial Sequence
  MKO10016941_A_F830016B08Rik
  gRNA
cttggtctgtaaagttaggc

SEQ ID NO: 16942 - DNA, 20 bp, Artificial Sequence
  MKO10016942_A_F830045P16Rik
  gRNA
ctctgcattacaaactcgtc

SEQ ID NO: 16943 - DNA, 20 bp, Artificial Sequence
  MKO10016943_A_F830045P16Rik
  gRNA
tagcactgcgatcgtctcac

SEQ ID NO: 16944 - DNA, 20 bp, Artificial Sequence
  MKO10016944_A_F830045P16Rik
  gRNA
gtaagtcccatcagagtttc

SEQ ID NO: 16945 - DNA, 20 bp, Artificial Sequence
  MKO10016945_A_F8a
  gRNA
gtgcgacgcgcgccaacgct

SEQ ID NO: 16946 - DNA, 20 bp, Artificial Sequence
  MKO10016946_A_F8a
  gRNA
tgtagtcgcgcgccaacagc

SEQ ID NO: 16947 - DNA, 20 bp, Artificial Sequence
  MKO10016947_A_F8a
  gRNA
gcatgcgtgtaaatagcgcc

SEQ ID NO: 16948 - DNA, 20 bp, Artificial Sequence
  MKO10016948_A_F8
  gRNA
agcgaagagtgctatttgca

SEQ ID NO: 16949 - DNA, 20 bp, Artificial Sequence
  MKO10016949_A_F8
  gRNA
gtttgctaggtcctaccatt

SEQ ID NO: 16950 - DNA, 20 bp, Artificial Sequence
  MKO10016950_A_F8
  gRNA
atactagcagagctccaatg

SEQ ID NO: 16951 - DNA, 20 bp, Artificial Sequence
  MKO10016951_A_F9
  gRNA
aaactagaagagtttgttcg

SEQ ID NO: 16952 - DNA, 20 bp, Artificial Sequence
  MKO10016952_A_F9
  gRNA
cagaagtcctgtgaaccaac

SEQ ID NO: 16953 - DNA, 20 bp, Artificial Sequence
  MKO10016953_A_F9
  gRNA
cgtccaaagagatataattc

SEQ ID NO: 16954 - DNA, 20 bp, Artificial Sequence
  MKO10016954_A_Fa2h
  gRNA
ctactaccgaaccctcaccc

SEQ ID NO: 16955 - DNA, 20 bp, Artificial Sequence
  MKO10016955_A_Fa2h
  gRNA
gttcataggcctctttgtgc

SEQ ID NO: 16956 - DNA, 20 bp, Artificial Sequence
  MKO10016956_A_Fa2h
  gRNA
gaggtttctgccagtccacc

SEQ ID NO: 16957 - DNA, 20 bp, Artificial Sequence
  MKO10016957_A_Faah
  gRNA
tttgaacgagggtgtgacat

SEQ ID NO: 16958 - DNA, 20 bp, Artificial Sequence
  MKO10016958_A_Faah
  gRNA
agcctactgggaaccgcctc

SEQ ID NO: 16959 - DNA, 20 bp, Artificial Sequence
  MKO10016959_A_Faah
  gRNA
gggacgttggtgtgcacaaa

SEQ ID NO: 16960 - DNA, 20 bp, Artificial Sequence
  MKO10016960_A_Fabp12
  gRNA
gcaatggtggaccagcttca

SEQ ID NO: 16961 - DNA, 20 bp, Artificial Sequence
  MKO10016961_A_Fabp12
  gRNA
gatcttagataatgactcct

SEQ ID NO: 16962 - DNA, 20 bp, Artificial Sequence
  MKO10016962_A_Fabp12
  gRNA
acttccatgttccttgaagc

SEQ ID NO: 16963 - DNA, 20 bp, Artificial Sequence
  MKO10016963_A_Fabp1
  gRNA
ggtccgcaatgagttcaccc

SEQ ID NO: 16964 - DNA, 20 bp, Artificial Sequence
  MKO10016964_A_Fabp1
  gRNA
aagtccgtgactgaactcaa

SEQ ID NO: 16965 - DNA, 20 bp, Artificial Sequence
  MKO10016965_A_Fabp1
  gRNA
cctgcaggcagtcgtcaagc

SEQ ID NO: 16966 - DNA, 20 bp, Artificial Sequence
  MKO10016966_A_Fabp2
  gRNA
cgttccgtctgctagactgt

SEQ ID NO: 16967 - DNA, 20 bp, Artificial Sequence
  MKO10016967_A_Fabp2
  gRNA
ggagctgattgctgtccgag

SEQ ID NO: 16968 - DNA, 20 bp, Artificial Sequence
  MKO10016968_A_Fabp2
  gRNA
ggccaagcgattctttaaga

SEQ ID NO: 16969 - DNA, 20 bp, Artificial Sequence
  MKO10016969_A_Fabp3
  gRNA
agttgacgggaaactcatcc

SEQ ID NO: 16970 - DNA, 20 bp, Artificial Sequence
  MKO10016970_A_Fabp3
  gRNA
tccacagtcactggtgacgc

SEQ ID NO: 16971 - DNA, 20 bp, Artificial Sequence
  MKO10016971_A_Fabp3
  gRNA
tctgactcaccttgaccttc

SEQ ID NO: 16972 - DNA, 20 bp, Artificial Sequence
  MKO10016972_A_Fabp4
  gRNA
atgaaatcaccgcagacgac

SEQ ID NO: 16973 - DNA, 20 bp, Artificial Sequence
  MKO10016973_A_Fabp4
  gRNA
gaattccacgcccagtttga

SEQ ID NO: 16974 - DNA, 20 bp, Artificial Sequence
  MKO10016974_A_Fabp4
  gRNA
tgccctttcataaactcttg

SEQ ID NO: 16975 - DNA, 20 bp, Artificial Sequence
  MKO10016975_A_Fabp5
  gRNA
ccatcccacaggagtaggac

SEQ ID NO: 16976 - DNA, 20 bp, Artificial Sequence
  MKO10016976_A_Fabp5
  gRNA
tcccaccatggccagtctta

SEQ ID NO: 16977 - DNA, 20 bp, Artificial Sequence
  MKO10016977_A_Fabp5
  gRNA
cccttcgagatccttaagac

SEQ ID NO: 16978 - DNA, 20 bp, Artificial Sequence
  MKO10016978_A_Fabp6
  gRNA
cctatgagcgcgtaagcaag

SEQ ID NO: 16979 - DNA, 20 bp, Artificial Sequence
  MKO10016979_A_Fabp6
  gRNA
cacccacgacctccgaagtc

SEQ ID NO: 16980 - DNA, 20 bp, Artificial Sequence
  MKO10016980_A_Fabp6
  gRNA
cttgaacttcttgcccccca

SEQ ID NO: 16981 - DNA, 20 bp, Artificial Sequence
  MKO10016981_A_Fabp7
  gRNA
cacgtttcccacttgcctag

SEQ ID NO: 16982 - DNA, 20 bp, Artificial Sequence
  MKO10016982_A_Fabp7
  gRNA
tagatgctttctgcgcaacc

SEQ ID NO: 16983 - DNA, 20 bp, Artificial Sequence
  MKO10016983_A_Fabp7
  gRNA
cttgccatccttaatttctc

SEQ ID NO: 16984 - DNA, 20 bp, Artificial Sequence
  MKO10016984_A_Fabp9
  gRNA
ttgaaactaatactaacgct

SEQ ID NO: 16985 - DNA, 20 bp, Artificial Sequence
  MKO10016985_A_Fabp9
  gRNA
gatcattgacccaccttcaa

SEQ ID NO: 16986 - DNA, 20 bp, Artificial Sequence
  MKO10016986_A_Fabp9
  gRNA
tagagccttataacctttga

SEQ ID NO: 16987 - DNA, 20 bp, Artificial Sequence
  MKO10016987_A_Fadd
  gRNA
ccgcagcgccttaaccagtc

SEQ ID NO: 16988 - DNA, 20 bp, Artificial Sequence
  MKO10016988_A_Fadd
  gRNA
tagatcgtgtcggcgcagcg

SEQ ID NO: 16989 - DNA, 20 bp, Artificial Sequence
  MKO10016989_A_Fadd
  gRNA
ccggactggttaaggcgctg

SEQ ID NO: 16990 - DNA, 20 bp, Artificial Sequence
  MKO10016990_A_Fads1
  gRNA
gcgggccacagtagagcgaa

SEQ ID NO: 16991 - DNA, 20 bp, Artificial Sequence
  MKO10016991_A_Fads1
  gRNA
tgtagggggcccccgccagc

SEQ ID NO: 16992 - DNA, 20 bp, Artificial Sequence
  MKO10016992_A_Fads1
  gRNA
tcgaggtgccaaagactgac

SEQ ID NO: 16993 - DNA, 20 bp, Artificial Sequence
  MKO10016993_A_Fads2
  gRNA
agccagtgccgaagtacgag

SEQ ID NO: 16994 - DNA, 20 bp, Artificial Sequence
  MKO10016994_A_Fads2
  gRNA
acatgcaggctctttatgtc

SEQ ID NO: 16995 - DNA, 20 bp, Artificial Sequence
  MKO10016995_A_Fads2
  gRNA
caaggggctgccactcgcca

SEQ ID NO: 16996 - DNA, 20 bp, Artificial Sequence
  MKO10016996_A_Fads3
  gRNA
tgtggcccagcagttcgtga

SEQ ID NO: 16997 - DNA, 20 bp, Artificial Sequence
  MKO10016997_A_Fads3
  gRNA
ctcggaagtcctcgatcagc

SEQ ID NO: 16998 - DNA, 20 bp, Artificial Sequence
  MKO10016998_A_Fads3
  gRNA
agtggcggaaattccaccag

SEQ ID NO: 16999 - DNA, 20 bp, Artificial Sequence
  MKO10016999_A_Fads6
  gRNA
ggtccccatcataacgccgc

SEQ ID NO: 17000 - DNA, 20 bp, Artificial Sequence
  MKO10017000_A_Fads6
  gRNA
ccattatacactcaccgtca

SEQ ID NO: 17001 - DNA, 20 bp, Artificial Sequence
  MKO10017001_A_Fads6
  gRNA
atcgcccagacccaccacgt

SEQ ID NO: 17002 - DNA, 20 bp, Artificial Sequence
  MKO10017002_A_Faf1
  gRNA
ttcgacctgtaatgccatcc

SEQ ID NO: 17003 - DNA, 20 bp, Artificial Sequence
  MKO10017003_A_Faf1
  gRNA
ctgcctttctacaatctgcc

SEQ ID NO: 17004 - DNA, 20 bp, Artificial Sequence
  MKO10017004_A_Faf1
  gRNA
tcattgcaggcagctattaa

SEQ ID NO: 17005 - DNA, 20 bp, Artificial Sequence
  MKO10017005_A_Faf2
  gRNA
tgacctggctgtacgttccc

SEQ ID NO: 17006 - DNA, 20 bp, Artificial Sequence
  MKO10017006_A_Faf2
  gRNA
gtgacccggctgcgagggtc

SEQ ID NO: 17007 - DNA, 20 bp, Artificial Sequence
  MKO10017007_A_Faf2
  gRNA
tatatcaagtatcgtgtaat

SEQ ID NO: 17008 - DNA, 20 bp, Artificial Sequence
  MKO10017008_A_Fahd1
  gRNA
cgtacgcggtggacggcttc

SEQ ID NO: 17009 - DNA, 20 bp, Artificial Sequence
  MKO10017009_A_Fahd1
  gRNA
gtccaccgcgtacgctcccg

SEQ ID NO: 17010 - DNA, 20 bp, Artificial Sequence
  MKO10017010_A_Fahd1
  gRNA
gggcaagaatatcgtctgcg

SEQ ID NO: 17011 - DNA, 20 bp, Artificial Sequence
  MKO10017011_A_Fahd2a
  gRNA
gtcgagatggccgtggtcat

SEQ ID NO: 17012 - DNA, 20 bp, Artificial Sequence
  MKO10017012_A_Fahd2a
  gRNA
acctgtgaccgagggatgac

SEQ ID NO: 17013 - DNA, 20 bp, Artificial Sequence
  MKO10017013_A_Fahd2a
  gRNA
aagatctgctgtcgagtgaa

SEQ ID NO: 17014 - DNA, 20 bp, Artificial Sequence
  MKO10017014_A_Fah
  gRNA
agaatgcgctgttgccaaat

SEQ ID NO: 17015 - DNA, 20 bp, Artificial Sequence
  MKO10017015_A_Fah
  gRNA
ccgatggctacaccaatccg

SEQ ID NO: 17016 - DNA, 20 bp, Artificial Sequence
  MKO10017016_A_Fah
  gRNA
taggactcacctatggtagc

SEQ ID NO: 17017 - DNA, 20 bp, Artificial Sequence
  MKO10017017_A_Faim2
  gRNA
tatgaaggtggtttccccgc

SEQ ID NO: 17018 - DNA, 20 bp, Artificial Sequence
  MKO10017018_A_Faim2
  gRNA
tcaggtctataccatcctat

SEQ ID NO: 17019 - DNA, 20 bp, Artificial Sequence
  MKO10017019_A_Faim2
  gRNA
ctcataggagggtggcgccg

SEQ ID NO: 17020 - DNA, 20 bp, Artificial Sequence
  MKO10017020_A_Faim3
  gRNA
cggccaaggacacgccacca

SEQ ID NO: 17021 - DNA, 20 bp, Artificial Sequence
  MKO10017021_A_Faim3
  gRNA
cactccctcaactacacgta

SEQ ID NO: 17022 - DNA, 20 bp, Artificial Sequence
  MKO10017022_A_Faim3
  gRNA
gagtgggcattcgatgataa

SEQ ID NO: 17023 - DNA, 20 bp, Artificial Sequence
  MKO10017023_A_Faim
  gRNA
ctcgtatgcgaagccactta

SEQ ID NO: 17024 - DNA, 20 bp, Artificial Sequence
  MKO10017024_A_Faim
  gRNA
tgacggatctcgtagctgtt

SEQ ID NO: 17025 - DNA, 20 bp, Artificial Sequence
  MKO10017025_A_Faim
  gRNA
cttcgcatacgagtacacgc

SEQ ID NO: 17026 - DNA, 20 bp, Artificial Sequence
  MKO10017026_A_Fam101a
  gRNA
cggtgcggggaccctacgcc

SEQ ID NO: 17027 - DNA, 20 bp, Artificial Sequence
  MKO10017027_A_Fam101a
  gRNA
gtagctccgccaggtgcagt

SEQ ID NO: 17028 - DNA, 20 bp, Artificial Sequence
  MKO10017028_A_Fam101a
  gRNA
tacttaccggatttcatgtg

SEQ ID NO: 17029 - DNA, 20 bp, Artificial Sequence
  MKO10017029_A_Fam101b
  gRNA
ggggagcgcgctccggtcgc

SEQ ID NO: 17030 - DNA, 20 bp, Artificial Sequence
  MKO10017030_A_Fam101b
  gRNA
gaaaaaaggcgacggcgtcc

SEQ ID NO: 17031 - DNA, 20 bp, Artificial Sequence
  MKO10017031_A_Fam101b
  gRNA
gctgaggaaacgcgcgggct

SEQ ID NO: 17032 - DNA, 20 bp, Artificial Sequence
  MKO10017032_A_Fam102a
  gRNA
actgtgtacgatggcggaag

SEQ ID NO: 17033 - DNA, 20 bp, Artificial Sequence
  MKO10017033_A_Fam102a
  gRNA
cgacaccaagaatacccgcc

SEQ ID NO: 17034 - DNA, 20 bp, Artificial Sequence
  MKO10017034_A_Fam102a
  gRNA
tgacactcacgtcttgaaac

SEQ ID NO: 17035 - DNA, 20 bp, Artificial Sequence
  MKO10017035_A_Fam102b
  gRNA
taccacccgccgctgtttac

SEQ ID NO: 17036 - DNA, 20 bp, Artificial Sequence
  MKO10017036_A_Fam102b
  gRNA
atgagcgccagcgcctccac

SEQ ID NO: 17037 - DNA, 20 bp, Artificial Sequence
  MKO10017037_A_Fam102b
  gRNA
tgcaagcaaattgtgttcac

SEQ ID NO: 17038 - DNA, 20 bp, Artificial Sequence
  MKO10017038_A_Fam103a1
  gRNA
accagttgcctctatttctt

SEQ ID NO: 17039 - DNA, 20 bp, Artificial Sequence
  MKO10017039_A_Fam103a1
  gRNA
gaaagatgacaaagaatacc

SEQ ID NO: 17040 - DNA, 20 bp, Artificial Sequence
  MKO10017040_A_Fam103a1
  gRNA
ttctgtcaatagtaaccata

SEQ ID NO: 17041 - DNA, 20 bp, Artificial Sequence
  MKO10017041_A_Fam104a
  gRNA
ccgcgccgacagcgaacagt

SEQ ID NO: 17042 - DNA, 20 bp, Artificial Sequence
  MKO10017042_A_Fam104a
  gRNA
cagctccgactgttcgctgt

SEQ ID NO: 17043 - DNA, 20 bp, Artificial Sequence
  MKO10017043_A_Fam104a
  gRNA
ccggaggagcatcatgtcgg

SEQ ID NO: 17044 - DNA, 20 bp, Artificial Sequence
  MKO10017044_A_Fam105a
  gRNA
ccccgcgtgccagactgatg

SEQ ID NO: 17045 - DNA, 20 bp, Artificial Sequence
  MKO10017045_A_Fam105a
  gRNA
ttggcttgtaactagtatcc

SEQ ID NO: 17046 - DNA, 20 bp, Artificial Sequence
  MKO10017046_A_Fam105a
  gRNA
gatgccctaagtataaatac

SEQ ID NO: 17047 - DNA, 20 bp, Artificial Sequence
  MKO10017047_A_Fam105b
  gRNA
agctgataaacaagtatacc

SEQ ID NO: 17048 - DNA, 20 bp, Artificial Sequence
  MKO10017048_A_Fam105b
  gRNA
gtgcacagtagttatcacca

SEQ ID NO: 17049 - DNA, 20 bp, Artificial Sequence
  MKO10017049_A_Fam105b
  gRNA
gtcaaaccttcttccttagc

SEQ ID NO: 17050 - DNA, 20 bp, Artificial Sequence
  MKO10017050_A_Fam107a
  gRNA
gagttctagagcaccgtcgc

SEQ ID NO: 17051 - DNA, 20 bp, Artificial Sequence
  MKO10017051_A_Fam107a
  gRNA
tcagtgtggtgattctgcgt

SEQ ID NO: 17052 - DNA, 20 bp, Artificial Sequence
  MKO10017052_A_Fam107a
  gRNA
cgatgtcagcccgctccctc

SEQ ID NO: 17053 - DNA, 20 bp, Artificial Sequence
  MKO10017053_A_Fam107b
  gRNA
ttctggggcctaattagctc

SEQ ID NO: 17054 - DNA, 20 bp, Artificial Sequence
  MKO10017054_A_Fam107b
  gRNA
atgacaatcctgagctaatt

SEQ ID NO: 17055 - DNA, 20 bp, Artificial Sequence
  MKO10017055_A_Fam107b
  gRNA
tcagaagaagaaatccgacc

SEQ ID NO: 17056 - DNA, 20 bp, Artificial Sequence
  MKO10017056_A_Fam109a
  gRNA
ccgatcccggccgtacgtgc

SEQ ID NO: 17057 - DNA, 20 bp, Artificial Sequence
  MKO10017057_A_Fam109a
  gRNA
gcccagctgcatgcgcgata

SEQ ID NO: 17058 - DNA, 20 bp, Artificial Sequence
  MKO10017058_A_Fam109a
  gRNA
cttacccgccaacccgagcc

SEQ ID NO: 17059 - DNA, 20 bp, Artificial Sequence
  MKO10017059_A_Fam109b
  gRNA
ggcatcaaagcgaatagcga

SEQ ID NO: 17060 - DNA, 20 bp, Artificial Sequence
  MKO10017060_A_Fam109b
  gRNA
tcaaatcccgacctattggc

SEQ ID NO: 17061 - DNA, 20 bp, Artificial Sequence
  MKO10017061_A_Fam109b
  gRNA
gctattcgctttgatgcccc

SEQ ID NO: 17062 - DNA, 20 bp, Artificial Sequence
  MKO10017062_A_Fam110a
  gRNA
tcggcgcaccgcgacagtac

SEQ ID NO: 17063 - DNA, 20 bp, Artificial Sequence
  MKO10017063_A_Fam110a
  gRNA
tccgccacccagtactgtcg

SEQ ID NO: 17064 - DNA, 20 bp, Artificial Sequence
  MKO10017064_A_Fam110a
  gRNA
gcgctcactcaagtccgact

SEQ ID NO: 17065 - DNA, 20 bp, Artificial Sequence
  MKO10017065_A_Fam110b
  gRNA
ctcacgttgcacaccgctct

SEQ ID NO: 17066 - DNA, 20 bp, Artificial Sequence
  MKO10017066_A_Fam110b
  gRNA
agtagtcgggtcctttgttc

SEQ ID NO: 17067 - DNA, 20 bp, Artificial Sequence
  MKO10017067_A_Fam110b
  gRNA
caggggcaccgccgacgtga

SEQ ID NO: 17068 - DNA, 20 bp, Artificial Sequence
  MKO10017068_A_Fam110c
  gRNA
tccacagcgctcttgttcgc

SEQ ID NO: 17069 - DNA, 20 bp, Artificial Sequence
  MKO10017069_A_Fam110c
  gRNA
ctgcgggtgtcgcgtagcaa

SEQ ID NO: 17070 - DNA, 20 bp, Artificial Sequence
  MKO10017070_A_Fam110c
  gRNA
ctcccgctactcgatagcca

SEQ ID NO: 17071 - DNA, 20 bp, Artificial Sequence
  MKO10017071_A_Fam111a
  gRNA
ctttcatagagagtgacgat

SEQ ID NO: 17072 - DNA, 20 bp, Artificial Sequence
  MKO10017072_A_Fam111a
  gRNA
cccgtctgctgtataccaga

SEQ ID NO: 17073 - DNA, 20 bp, Artificial Sequence
  MKO10017073_A_Fam111a
  gRNA
aattaaggactatttctctc

SEQ ID NO: 17074 - DNA, 20 bp, Artificial Sequence
  MKO10017074_A_Fam114a1
  gRNA
accctgggtcgctttctgcg

SEQ ID NO: 17075 - DNA, 20 bp, Artificial Sequence
  MKO10017075_A_Fam114a1
  gRNA
gtcctcgcagaaagcgaccc

SEQ ID NO: 17076 - DNA, 20 bp, Artificial Sequence
  MKO10017076_A_Fam114a1
  gRNA
gccaattctgcatctcccga

SEQ ID NO: 17077 - DNA, 20 bp, Artificial Sequence
  MKO10017077_A_Fam114a2
  gRNA
tactgtagctaccgtagctg

SEQ ID NO: 17078 - DNA, 20 bp, Artificial Sequence
  MKO10017078_A_Fam114a2
  gRNA
gaagctactccggttaccac

SEQ ID NO: 17079 - DNA, 20 bp, Artificial Sequence
  MKO10017079_A_Fam114a2
  gRNA
gtggggttattggggcagtt

SEQ ID NO: 17080 - DNA, 20 bp, Artificial Sequence
  MKO10017080_A_Fam115a
  gRNA
cactgcaaatcttcgaacgc

SEQ ID NO: 17081 - DNA, 20 bp, Artificial Sequence
  MKO10017081_A_Fam115a
  gRNA
cttaacccccacatcgcttg

SEQ ID NO: 17082 - DNA, 20 bp, Artificial Sequence
  MKO10017082_A_Fam115a
  gRNA
gagccgctatcggcttccag

SEQ ID NO: 17083 - DNA, 20 bp, Artificial Sequence
  MKO10017083_A_Fam115c
  gRNA
ctcagaacaccccattaccg

SEQ ID NO: 17084 - DNA, 20 bp, Artificial Sequence
  MKO10017084_A_Fam115c
  gRNA
cctgaggaagatactgcgac

SEQ ID NO: 17085 - DNA, 20 bp, Artificial Sequence
  MKO10017085_A_Fam115c
  gRNA
tacgcacctagcttgtagta

SEQ ID NO: 17086 - DNA, 20 bp, Artificial Sequence
  MKO10017086_A_Fam115e
  gRNA
cgcttaaggacgatgttatc

SEQ ID NO: 17087 - DNA, 20 bp, Artificial Sequence
  MKO10017087_A_Fam115e
  gRNA
ctgaacaatacccgatcgca

SEQ ID NO: 17088 - DNA, 20 bp, Artificial Sequence
  MKO10017088_A_Fam115e
  gRNA
atttccaggtaagacgaccc

SEQ ID NO: 17089 - DNA, 20 bp, Artificial Sequence
  MKO10017089_A_Fam117a
  gRNA
ggtccggcgtacgttctccc

SEQ ID NO: 17090 - DNA, 20 bp, Artificial Sequence
  MKO10017090_A_Fam117a
  gRNA
gagaacgtacgccggacctg

SEQ ID NO: 17091 - DNA, 20 bp, Artificial Sequence
  MKO10017091_A_Fam117a
  gRNA
agtcgcaggacggggggtcc

SEQ ID NO: 17092 - DNA, 20 bp, Artificial Sequence
  MKO10017092_A_Fam117b
  gRNA
cactggccccgagacattcg

SEQ ID NO: 17093 - DNA, 20 bp, Artificial Sequence
  MKO10017093_A_Fam117b
  gRNA
gcgggaacgagcgtgctctt

SEQ ID NO: 17094 - DNA, 20 bp, Artificial Sequence
  MKO10017094_A_Fam117b
  gRNA
aagagcacgctcgttcccgc

SEQ ID NO: 17095 - DNA, 20 bp, Artificial Sequence
  MKO10017095_A_Fam118a
  gRNA
cggagtacaagaagagcgcc

SEQ ID NO: 17096 - DNA, 20 bp, Artificial Sequence
  MKO10017096_A_Fam118a
  gRNA
tctcgccacagcccacgaac

SEQ ID NO: 17097 - DNA, 20 bp, Artificial Sequence
  MKO10017097_A_Fam118a
  gRNA
ctgcattgaggcggtcatcg

SEQ ID NO: 17098 - DNA, 20 bp, Artificial Sequence
  MKO10017098_A_Fam118b
  gRNA
gaggacaatgccgctaggat

SEQ ID NO: 17099 - DNA, 20 bp, Artificial Sequence
  MKO10017099_A_Fam118b
  gRNA
gtcagtcgtttgaaatattc

SEQ ID NO: 17100 - DNA, 20 bp, Artificial Sequence
  MKO10017100_A_Fam118b
  gRNA
gggcttaatccaggccttac

SEQ ID NO: 17101 - DNA, 20 bp, Artificial Sequence
  MKO10017101_A_Fam120a
  gRNA
cattcatgacacgtctgacc

SEQ ID NO: 17102 - DNA, 20 bp, Artificial Sequence
  MKO10017102_A_Fam120a
  gRNA
caacctcgtgcatcagatac

SEQ ID NO: 17103 - DNA, 20 bp, Artificial Sequence
  MKO10017103_A_Fam120a
  gRNA
tggtgagactcttcccgttg

SEQ ID NO: 17104 - DNA, 20 bp, Artificial Sequence
  MKO10017104_A_Fam120b
  gRNA
gcgtagacgcgctgccggac

SEQ ID NO: 17105 - DNA, 20 bp, Artificial Sequence
  MKO10017105_A_Fam120b
  gRNA
cgcgtctacgcactcctact

SEQ ID NO: 17106 - DNA, 20 bp, Artificial Sequence
  MKO10017106_A_Fam120b
  gRNA
tctgcatgcatttatcgctc

SEQ ID NO: 17107 - DNA, 20 bp, Artificial Sequence
  MKO10017107_A_Fam120c
  gRNA
cccttgtgacgtcgtgatca

SEQ ID NO: 17108 - DNA, 20 bp, Artificial Sequence
  MKO10017108_A_Fam120c
  gRNA
ctaggtccgagctcatcagc

SEQ ID NO: 17109 - DNA, 20 bp, Artificial Sequence
  MKO10017109_A_Fam120c
  gRNA
gagccttgaagaccaccatt

SEQ ID NO: 17110 - DNA, 20 bp, Artificial Sequence
  MKO10017110_A_Fam122a
  gRNA
cgactcgtcgccggtgttcc

SEQ ID NO: 17111 - DNA, 20 bp, Artificial Sequence
  MKO10017111_A_Fam122a
  gRNA
tcgcgcccgcgggcaactcc

SEQ ID NO: 17112 - DNA, 20 bp, Artificial Sequence
  MKO10017112_A_Fam122a
  gRNA
gaagcgcatcgatttcattc

SEQ ID NO: 17113 - DNA, 20 bp, Artificial Sequence
  MKO10017113_A_Fam122b
  gRNA
gagcactgttggaccgtctc

SEQ ID NO: 17114 - DNA, 20 bp, Artificial Sequence
  MKO10017114_A_Fam122b
  gRNA
tcaggctttcgtcccatgac

SEQ ID NO: 17115 - DNA, 20 bp, Artificial Sequence
  MKO10017115_A_Fam122b
  gRNA
gagccatatccacttagaac

SEQ ID NO: 17116 - DNA, 20 bp, Artificial Sequence
  MKO10017116_A_Fam122c
  gRNA
gcagtcgtacatctgccaac

SEQ ID NO: 17117 - DNA, 20 bp, Artificial Sequence
  MKO10017117_A_Fam122c
  gRNA
tccccctttctgaatcagca

SEQ ID NO: 17118 - DNA, 20 bp, Artificial Sequence
  MKO10017118_A_Fam122c
  gRNA
tacggaacaatgtctaaatc

SEQ ID NO: 17119 - DNA, 20 bp, Artificial Sequence
  MKO10017119_A_Fam124a
  gRNA
cacgcgcgccatgaacccga

SEQ ID NO: 17120 - DNA, 20 bp, Artificial Sequence
  MKO10017120_A_Fam124a
  gRNA
acctcactggcagcgggcat

SEQ ID NO: 17121 - DNA, 20 bp, Artificial Sequence
  MKO10017121_A_Fam124a
  gRNA
tctatgagctgatcttgcgc

SEQ ID NO: 17122 - DNA, 20 bp, Artificial Sequence
  MKO10017122_A_Fam124b
  gRNA
cctgccagggtgaacgccgt

SEQ ID NO: 17123 - DNA, 20 bp, Artificial Sequence
  MKO10017123_A_Fam124b
  gRNA
gaggttcaaagtacattcgc

SEQ ID NO: 17124 - DNA, 20 bp, Artificial Sequence
  MKO10017124_A_Fam124b
  gRNA
ccatcatcaattccgaaccc

SEQ ID NO: 17125 - DNA, 20 bp, Artificial Sequence
  MKO10017125_A_Fam126a
  gRNA
gtggtgctacctcgccgtgt

SEQ ID NO: 17126 - DNA, 20 bp, Artificial Sequence
  MKO10017126_A_Fam126a
  gRNA
cagcgccatagacccaatgc

SEQ ID NO: 17127 - DNA, 20 bp, Artificial Sequence
  MKO10017127_A_Fam126a
  gRNA
ccaggttgtaaacccccagc

SEQ ID NO: 17128 - DNA, 20 bp, Artificial Sequence
  MKO10017128_A_Fam126b
  gRNA
agttcctgcccgaattgatt

SEQ ID NO: 17129 - DNA, 20 bp, Artificial Sequence
  MKO10017129_A_Fam126b
  gRNA
gctctgaagttcgacttaag

SEQ ID NO: 17130 - DNA, 20 bp, Artificial Sequence
  MKO10017130_A_Fam126b
  gRNA
cttacttcatggtatattga

SEQ ID NO: 17131 - DNA, 20 bp, Artificial Sequence
  MKO10017131_A_Fam129a
  gRNA
ctgcaatcatgtgcgcagcg

SEQ ID NO: 17132 - DNA, 20 bp, Artificial Sequence
  MKO10017132_A_Fam129a
  gRNA
agcgctgaacttctgctgtt

SEQ ID NO: 17133 - DNA, 20 bp, Artificial Sequence
  MKO10017133_A_Fam129a
  gRNA
agggactcaccagtggggtc

SEQ ID NO: 17134 - DNA, 20 bp, Artificial Sequence
  MKO10017134_A_Fam129b
  gRNA
gggtggtatctgccgctcat

SEQ ID NO: 17135 - DNA, 20 bp, Artificial Sequence
  MKO10017135_A_Fam129b
  gRNA
gtagcccgcgctgttgatga

SEQ ID NO: 17136 - DNA, 20 bp, Artificial Sequence
  MKO10017136_A_Fam129b
  gRNA
ggtggagcctgatttcgatg

SEQ ID NO: 17137 - DNA, 20 bp, Artificial Sequence
  MKO10017137_A_Fam129c
  gRNA
accggtggctctcagacgaa

SEQ ID NO: 17138 - DNA, 20 bp, Artificial Sequence
  MKO10017138_A_Fam129c
  gRNA
gcgcaccgcgcctggaggct

SEQ ID NO: 17139 - DNA, 20 bp, Artificial Sequence
  MKO10017139_A_Fam129c
  gRNA
tctagaatggttcagtcaca

SEQ ID NO: 17140 - DNA, 20 bp, Artificial Sequence
  MKO10017140_A_Fam131a
  gRNA
caccgatgattcttacgacg

SEQ ID NO: 17141 - DNA, 20 bp, Artificial Sequence
  MKO10017141_A_Fam131a
  gRNA
gagtggatcgaactccctcg

SEQ ID NO: 17142 - DNA, 20 bp, Artificial Sequence
  MKO10017142_A_Fam131a
  gRNA
gtcctcgtcgtaagaatcat

SEQ ID NO: 17143 - DNA, 20 bp, Artificial Sequence
  MKO10017143_A_Fam131b
  gRNA
agggaacgaagtgattgccg

SEQ ID NO: 17144 - DNA, 20 bp, Artificial Sequence
  MKO10017144_A_Fam131b
  gRNA
aaggaggcacgtttcctagc

SEQ ID NO: 17145 - DNA, 20 bp, Artificial Sequence
  MKO10017145_A_Fam131b
  gRNA
ctggccaagtcatcattctc

SEQ ID NO: 17146 - DNA, 20 bp, Artificial Sequence
  MKO10017146_A_Fam131c
  gRNA
cgcgcctcgcgcagctcgtc

SEQ ID NO: 17147 - DNA, 20 bp, Artificial Sequence
  MKO10017147_A_Fam131c
  gRNA
tccagcctttccactcgatg

SEQ ID NO: 17148 - DNA, 20 bp, Artificial Sequence
  MKO10017148_A_Fam131c
  gRNA
ccacaagggatgacgtagcc

SEQ ID NO: 17149 - DNA, 20 bp, Artificial Sequence
  MKO10017149_A_Fam132a
  gRNA
tcctctagaaaacggtgtcg

SEQ ID NO: 17150 - DNA, 20 bp, Artificial Sequence
  MKO10017150_A_Fam132a
  gRNA
gcctttcaaacggcagtaga

SEQ ID NO: 17151 - DNA, 20 bp, Artificial Sequence
  MKO10017151_A_Fam132a
  gRNA
ctcaaccaccagccgttggc

SEQ ID NO: 17152 - DNA, 20 bp, Artificial Sequence
  MKO10017152_A_Fam132b
  gRNA
gacacgggaagggctacccg

SEQ ID NO: 17153 - DNA, 20 bp, Artificial Sequence
  MKO10017153_A_Fam132b
  gRNA
cggcgtgcgttgcacgagct

SEQ ID NO: 17154 - DNA, 20 bp, Artificial Sequence
  MKO10017154_A_Fam132b
  gRNA
tgctccgtagcccgaagttg

SEQ ID NO: 17155 - DNA, 20 bp, Artificial Sequence
  MKO10017155_A_Fam133b
  gRNA
aggattatctgaatcgacca

SEQ ID NO: 17156 - DNA, 20 bp, Artificial Sequence
  MKO10017156_A_Fam133b
  gRNA
cttgatcgagccattgctat

SEQ ID NO: 17157 - DNA, 20 bp, Artificial Sequence
  MKO10017157_A_Fam133b
  gRNA
gagctcatccaaaaaaagac

SEQ ID NO: 17158 - DNA, 20 bp, Artificial Sequence
  MKO10017158_A_Fam134a
  gRNA
cgctttctccctgacgtttc

SEQ ID NO: 17159 - DNA, 20 bp, Artificial Sequence
  MKO10017159_A_Fam134a
  gRNA
tgttgtcttcgtcgtccctc

SEQ ID NO: 17160 - DNA, 20 bp, Artificial Sequence
  MKO10017160_A_Fam134a
  gRNA
acaactcgggcacactcagc

SEQ ID NO: 17161 - DNA, 20 bp, Artificial Sequence
  MKO10017161_A_Fam134b
  gRNA
cagatctctcacgtttcttc

SEQ ID NO: 17162 - DNA, 20 bp, Artificial Sequence
  MKO10017162_A_Fam134b
  gRNA
tccatgattctgcaatgcac

SEQ ID NO: 17163 - DNA, 20 bp, Artificial Sequence
  MKO10017163_A_Fam134b
  gRNA
gccagtgcattgcagaatca

SEQ ID NO: 17164 - DNA, 20 bp, Artificial Sequence
  MKO10017164_A_Fam134c
  gRNA
ttcacacttacgcatcaagt

SEQ ID NO: 17165 - DNA, 20 bp, Artificial Sequence
  MKO10017165_A_Fam134c
  gRNA
ttgctgtctatcaccgtctg

SEQ ID NO: 17166 - DNA, 20 bp, Artificial Sequence
  MKO10017166_A_Fam134c
  gRNA
tctgcactcagaacgtgcca

SEQ ID NO: 17167 - DNA, 20 bp, Artificial Sequence
  MKO10017167_A_Fam135a
  gRNA
cgttacagttcacgcgtcat

SEQ ID NO: 17168 - DNA, 20 bp, Artificial Sequence
  MKO10017168_A_Fam135a
  gRNA
gccagtttgttacacgcaac

SEQ ID NO: 17169 - DNA, 20 bp, Artificial Sequence
  MKO10017169_A_Fam135a
  gRNA
ccgactgcttattagttgca

SEQ ID NO: 17170 - DNA, 20 bp, Artificial Sequence
  MKO10017170_A_Fam135b
  gRNA
aggctgagtgcttctatcgt

SEQ ID NO: 17171 - DNA, 20 bp, Artificial Sequence
  MKO10017171_A_Fam135b
  gRNA
agccaccagcgcagcatgta

SEQ ID NO: 17172 - DNA, 20 bp, Artificial Sequence
  MKO10017172_A_Fam135b
  gRNA
tctgcacttccacccgagga

SEQ ID NO: 17173 - DNA, 20 bp, Artificial Sequence
  MKO10017173_A_Fam136a
  gRNA
gcgccgctacctgcatcttc

SEQ ID NO: 17174 - DNA, 20 bp, Artificial Sequence
  MKO10017174_A_Fam136a
  gRNA
cgagcgctgccatgcgcctc

SEQ ID NO: 17175 - DNA, 20 bp, Artificial Sequence
  MKO10017175_A_Fam136a
  gRNA
catggcagcgctcgatgcat

SEQ ID NO: 17176 - DNA, 20 bp, Artificial Sequence
  MKO10017176_A_Fam13a
  gRNA
gacgatatttgtgactacgt

SEQ ID NO: 17177 - DNA, 20 bp, Artificial Sequence
  MKO10017177_A_Fam13a
  gRNA
aagctcagtgacaaccacga

SEQ ID NO: 17178 - DNA, 20 bp, Artificial Sequence
  MKO10017178_A_Fam13a
  gRNA
aaattgatgccctcgctgcc

SEQ ID NO: 17179 - DNA, 20 bp, Artificial Sequence
  MKO10017179_A_Fam13b
  gRNA
cttcggcagagatacgacag

SEQ ID NO: 17180 - DNA, 20 bp, Artificial Sequence
  MKO10017180_A_Fam13b
  gRNA
tcttagcatttacacggatg

SEQ ID NO: 17181 - DNA, 20 bp, Artificial Sequence
  MKO10017181_A_Fam13b
  gRNA
ttcatgatgtgatgctacat

SEQ ID NO: 17182 - DNA, 20 bp, Artificial Sequence
  MKO10017182_A_Fam13c
  gRNA
gttgaagtcgcaccgtttcc

SEQ ID NO: 17183 - DNA, 20 bp, Artificial Sequence
  MKO10017183_A_Fam13c
  gRNA
ggcgcactctgcgtggaagc

SEQ ID NO: 17184 - DNA, 20 bp, Artificial Sequence
  MKO10017184_A_Fam13c
  gRNA
aaacggtgcgacttcaacca

SEQ ID NO: 17185 - DNA, 20 bp, Artificial Sequence
  MKO10017185_A_Fam149a
  gRNA
attgtctacggagcggagct

SEQ ID NO: 17186 - DNA, 20 bp, Artificial Sequence
  MKO10017186_A_Fam149a
  gRNA
acgtttctcgtaaaattcgt

SEQ ID NO: 17187 - DNA, 20 bp, Artificial Sequence
  MKO10017187_A_Fam149a
  gRNA
aagccattgataaattcgcc

SEQ ID NO: 17188 - DNA, 20 bp, Artificial Sequence
  MKO10017188_A_Fam149b
  gRNA
ctcgtcgatggctgtaaaca

SEQ ID NO: 17189 - DNA, 20 bp, Artificial Sequence
  MKO10017189_A_Fam149b
  gRNA
aggcgtgctacctgaggtga

SEQ ID NO: 17190 - DNA, 20 bp, Artificial Sequence
  MKO10017190_A_Fam149b
  gRNA
cacggccttccgagtgtatc

SEQ ID NO: 17191 - DNA, 20 bp, Artificial Sequence
  MKO10017191_A_Fam150a
  gRNA
aagctggcgtcgagcaatcc

SEQ ID NO: 17192 - DNA, 20 bp, Artificial Sequence
  MKO10017192_A_Fam150a
  gRNA
cagcgcgtgtcgctgagctc

SEQ ID NO: 17193 - DNA, 20 bp, Artificial Sequence
  MKO10017193_A_Fam150a
  gRNA
atcgactttatcacaatacc

SEQ ID NO: 17194 - DNA, 20 bp, Artificial Sequence
  MKO10017194_A_Fam150b
  gRNA
accggggacgagcgcagtcc

SEQ ID NO: 17195 - DNA, 20 bp, Artificial Sequence
  MKO10017195_A_Fam150b
  gRNA
cgccagccgagtaagtaacc

SEQ ID NO: 17196 - DNA, 20 bp, Artificial Sequence
  MKO10017196_A_Fam150b
  gRNA
gggcaaagtcggactcgcca

SEQ ID NO: 17197 - DNA, 20 bp, Artificial Sequence
  MKO10017197_A_Fam151a
  gRNA
gaagccgatgtcaccgtaga

SEQ ID NO: 17198 - DNA, 20 bp, Artificial Sequence
  MKO10017198_A_Fam151a
  gRNA
tgtgagaacgatgcaatttg

SEQ ID NO: 17199 - DNA, 20 bp, Artificial Sequence
  MKO10017199_A_Fam151a
  gRNA
gtgggccataatgggcacct

SEQ ID NO: 17200 - DNA, 20 bp, Artificial Sequence
  MKO10017200_A_Fam151b
  gRNA
cgccgtcttctgccgtgatc

SEQ ID NO: 17201 - DNA, 20 bp, Artificial Sequence
  MKO10017201_A_Fam151b
  gRNA
ttcaggctacagttggtcga

SEQ ID NO: 17202 - DNA, 20 bp, Artificial Sequence
  MKO10017202_A_Fam151b
  gRNA
ccatgctctgatccgtcact

SEQ ID NO: 17203 - DNA, 20 bp, Artificial Sequence
  MKO10017203_A_Fam154a
  gRNA
gcctccgggctatatcttcg

SEQ ID NO: 17204 - DNA, 20 bp, Artificial Sequence
  MKO10017204_A_Fam154a
  gRNA
acttcctcgaagatatagcc

SEQ ID NO: 17205 - DNA, 20 bp, Artificial Sequence
  MKO10017205_A_Fam154a
  gRNA
gaaattccttcaagcccgag

SEQ ID NO: 17206 - DNA, 20 bp, Artificial Sequence
  MKO10017206_A_Fam154b
  gRNA
tctaatggcaactacgcggc

SEQ ID NO: 17207 - DNA, 20 bp, Artificial Sequence
  MKO10017207_A_Fam154b
  gRNA
cttacccgcaggtgcaaatc

SEQ ID NO: 17208 - DNA, 20 bp, Artificial Sequence
  MKO10017208_A_Fam154b
  gRNA
cctcgactatgttccctatc

SEQ ID NO: 17209 - DNA, 20 bp, Artificial Sequence
  MKO10017209_A_Fam155a
  gRNA
gtggagttgtcctcgagcgt

SEQ ID NO: 17210 - DNA, 20 bp, Artificial Sequence
  MKO10017210_A_Fam155a
  gRNA
gcccgctctgaatcgatgaa

SEQ ID NO: 17211 - DNA, 20 bp, Artificial Sequence
  MKO10017211_A_Fam155a
  gRNA
aaccgttcatcgattcagag

SEQ ID NO: 17212 - DNA, 20 bp, Artificial Sequence
  MKO10017212_A_Fam159a
  gRNA
ctccagcatcggagcgctcg

SEQ ID NO: 17213 - DNA, 20 bp, Artificial Sequence
  MKO10017213_A_Fam159a
  gRNA
ggtcgtcgcagcagtacttg

SEQ ID NO: 17214 - DNA, 20 bp, Artificial Sequence
  MKO10017214_A_Fam159a
  gRNA
acagcagccgcttcgccccc

SEQ ID NO: 17215 - DNA, 20 bp, Artificial Sequence
  MKO10017215_A_Fam159b
  gRNA
gccgcgctgctctattgctg

SEQ ID NO: 17216 - DNA, 20 bp, Artificial Sequence
  MKO10017216_A_Fam159b
  gRNA
gccgcagcaatagagcagcg

SEQ ID NO: 17217 - DNA, 20 bp, Artificial Sequence
  MKO10017217_A_Fam159b
  gRNA
aggccattgtctaatctttg

SEQ ID NO: 17218 - DNA, 20 bp, Artificial Sequence
  MKO10017218_A_Fam160a1
  gRNA
gatacccttcattcatcgag

SEQ ID NO: 17219 - DNA, 20 bp, Artificial Sequence
  MKO10017219_A_Fam160a1
  gRNA
tgctgcgatggggccaatcc

SEQ ID NO: 17220 - DNA, 20 bp, Artificial Sequence
  MKO10017220_A_Fam160a1
  gRNA
cccgaaaaggggtgttgatc

SEQ ID NO: 17221 - DNA, 20 bp, Artificial Sequence
  MKO10017221_A_Fam160a2
  gRNA
gcctcaggtggtacgaatcc

SEQ ID NO: 17222 - DNA, 20 bp, Artificial Sequence
  MKO10017222_A_Fam160a2
  gRNA
aagagtgatctgcgatgtag

SEQ ID NO: 17223 - DNA, 20 bp, Artificial Sequence
  MKO10017223_A_Fam160a2
  gRNA
atgattggcactgcttgcgc

SEQ ID NO: 17224 - DNA, 20 bp, Artificial Sequence
  MKO10017224_A_Fam160b1
  gRNA
cattctccgttggcgttgca

SEQ ID NO: 17225 - DNA, 20 bp, Artificial Sequence
  MKO10017225_A_Fam160b1
  gRNA
acttacgtcggctttcccta

SEQ ID NO: 17226 - DNA, 20 bp, Artificial Sequence
  MKO10017226_A_Fam160b1
  gRNA
ccggattcgtcccagaagct

SEQ ID NO: 17227 - DNA, 20 bp, Artificial Sequence
  MKO10017227_A_Fam160b2
  gRNA
ccccccaggcatgcgacaac

SEQ ID NO: 17228 - DNA, 20 bp, Artificial Sequence
  MKO10017228_A_Fam160b2
  gRNA
aacacctgttgtcgcatgcc

SEQ ID NO: 17229 - DNA, 20 bp, Artificial Sequence
  MKO10017229_A_Fam160b2
  gRNA
cactactatatcgagagcac

SEQ ID NO: 17230 - DNA, 20 bp, Artificial Sequence
  MKO10017230_A_Fam161a
  gRNA
atgcccaccgcgtcttcccg

SEQ ID NO: 17231 - DNA, 20 bp, Artificial Sequence
  MKO10017231_A_Fam161a
  gRNA
ggatcagcgattcgtcttcg

SEQ ID NO: 17232 - DNA, 20 bp, Artificial Sequence
  MKO10017232_A_Fam161a
  gRNA
acgtctgcaagctgaccgac

SEQ ID NO: 17233 - DNA, 20 bp, Artificial Sequence
  MKO10017233_A_Fam161b
  gRNA
ccgaacggctgcccgcaccc

SEQ ID NO: 17234 - DNA, 20 bp, Artificial Sequence
  MKO10017234_A_Fam161b
  gRNA
aggtagacgtgtgccggcac

SEQ ID NO: 17235 - DNA, 20 bp, Artificial Sequence
  MKO10017235_A_Fam161b
  gRNA
ctgtcagcaccgcccgaaac

SEQ ID NO: 17236 - DNA, 20 bp, Artificial Sequence
  MKO10017236_A_Fam162a
  gRNA
tctaatgattgccctgaccg

SEQ ID NO: 17237 - DNA, 20 bp, Artificial Sequence
  MKO10017237_A_Fam162a
  gRNA
gaaatgcttcctcgtctcta

SEQ ID NO: 17238 - DNA, 20 bp, Artificial Sequence
  MKO10017238_A_Fam162a
  gRNA
agcactcacgagattgtctc

SEQ ID NO: 17239 - DNA, 20 bp, Artificial Sequence
  MKO10017239_A_Fam162b
  gRNA
agccgcagcgttctgcgact

SEQ ID NO: 17240 - DNA, 20 bp, Artificial Sequence
  MKO10017240_A_Fam162b
  gRNA
cacacttacggtacaagggg

SEQ ID NO: 17241 - DNA, 20 bp, Artificial Sequence
  MKO10017241_A_Fam162b
  gRNA
cgggcgtttcaaatctatag

SEQ ID NO: 17242 - DNA, 20 bp, Artificial Sequence
  MKO10017242_A_Fam163a
  gRNA
acatcggtactaatagccct

SEQ ID NO: 17243 - DNA, 20 bp, Artificial Sequence
  MKO10017243_A_Fam163a
  gRNA
gtcagctgtccgtatgtaaa

SEQ ID NO: 17244 - DNA, 20 bp, Artificial Sequence
  MKO10017244_A_Fam163a
  gRNA
cctggagcctacagtagcac

SEQ ID NO: 17245 - DNA, 20 bp, Artificial Sequence
  MKO10017245_A_Fam163b
  gRNA
cgcaacctcgtgttgaccaa

SEQ ID NO: 17246 - DNA, 20 bp, Artificial Sequence
  MKO10017246_A_Fam163b
  gRNA
caggcccgttggtcaacacg

SEQ ID NO: 17247 - DNA, 20 bp, Artificial Sequence
  MKO10017247_A_Fam163b
  gRNA
gaagtgggcggatgacagcc

SEQ ID NO: 17248 - DNA, 20 bp, Artificial Sequence
  MKO10017248_A_Fam166a
  gRNA
ctatcctcaactgcgctacc

SEQ ID NO: 17249 - DNA, 20 bp, Artificial Sequence
  MKO10017249_A_Fam166a
  gRNA
ccccaacctaatccaacgca

SEQ ID NO: 17250 - DNA, 20 bp, Artificial Sequence
  MKO10017250_A_Fam166a
  gRNA
atggggatgaattaccgtga

SEQ ID NO: 17251 - DNA, 20 bp, Artificial Sequence
  MKO10017251_A_Fam166b
  gRNA
gagcctttcatgcccgcgcc

SEQ ID NO: 17252 - DNA, 20 bp, Artificial Sequence
  MKO10017252_A_Fam166b
  gRNA
cccatgctgaaccgaagtag

SEQ ID NO: 17253 - DNA, 20 bp, Artificial Sequence
  MKO10017253_A_Fam166b
  gRNA
ggcacgtagcctccgtagtg

SEQ ID NO: 17254 - DNA, 20 bp, Artificial Sequence
  MKO10017254_A_Fam167a
  gRNA
gtcacccctgccggcactcg

SEQ ID NO: 17255 - DNA, 20 bp, Artificial Sequence
  MKO10017255_A_Fam167a
  gRNA
caacgatgccgcctttgagc

SEQ ID NO: 17256 - DNA, 20 bp, Artificial Sequence
  MKO10017256_A_Fam167a
  gRNA
ctatagcttcatcgatactc

SEQ ID NO: 17257 - DNA, 20 bp, Artificial Sequence
  MKO10017257_A_Fam167b
  gRNA
ggcagtccactcgaggtatg

SEQ ID NO: 17258 - DNA, 20 bp, Artificial Sequence
  MKO10017258_A_Fam167b
  gRNA
ctctgtaccaagcccggctc

SEQ ID NO: 17259 - DNA, 20 bp, Artificial Sequence
  MKO10017259_A_Fam167b
  gRNA
tcagcagagggtgaagcgtc

SEQ ID NO: 17260 - DNA, 20 bp, Artificial Sequence
  MKO10017260_A_Fam168a
  gRNA
cttggtacaggatataccgc

SEQ ID NO: 17261 - DNA, 20 bp, Artificial Sequence
  MKO10017261_A_Fam168a
  gRNA
gaccgagaaccgaacttacc

SEQ ID NO: 17262 - DNA, 20 bp, Artificial Sequence
  MKO10017262_A_Fam168a
  gRNA
aggttaccccacagcatacc

SEQ ID NO: 17263 - DNA, 20 bp, Artificial Sequence
  MKO10017263_A_Fam168b
  gRNA
cccaagcatacctgggcgta

SEQ ID NO: 17264 - DNA, 20 bp, Artificial Sequence
  MKO10017264_A_Fam168b
  gRNA
ccagcagagtccatacgccc

SEQ ID NO: 17265 - DNA, 20 bp, Artificial Sequence
  MKO10017265_A_Fam168b
  gRNA
gcgaatcctaccttccaaac

SEQ ID NO: 17266 - DNA, 20 bp, Artificial Sequence
  MKO10017266_A_Fam169a
  gRNA
gcgcctgaagattctcttac

SEQ ID NO: 17267 - DNA, 20 bp, Artificial Sequence
  MKO10017267_A_Fam169a
  gRNA
gtctgattgccgccatagag

SEQ ID NO: 17268 - DNA, 20 bp, Artificial Sequence
  MKO10017268_A_Fam169a
  gRNA
ctctcgtaggtgagcactct

SEQ ID NO: 17269 - DNA, 20 bp, Artificial Sequence
  MKO10017269_A_Fam169b
  gRNA
agttcttaggatgtcttcga

SEQ ID NO: 17270 - DNA, 20 bp, Artificial Sequence
  MKO10017270_A_Fam169b
  gRNA
cttcatgagcccttcccgcg

SEQ ID NO: 17271 - DNA, 20 bp, Artificial Sequence
  MKO10017271_A_Fam169b
  gRNA
gactgagtaaaatgcaaccg

SEQ ID NO: 17272 - DNA, 20 bp, Artificial Sequence
  MKO10017272_A_Fam170a
  gRNA
gcctcgcacccttactacga

SEQ ID NO: 17273 - DNA, 20 bp, Artificial Sequence
  MKO10017273_A_Fam170a
  gRNA
agctgccgctgttgtcgcaa

SEQ ID NO: 17274 - DNA, 20 bp, Artificial Sequence
  MKO10017274_A_Fam170a
  gRNA
ccgcggttgaagagagacca

SEQ ID NO: 17275 - DNA, 20 bp, Artificial Sequence
  MKO10017275_A_Fam170b
  gRNA
acagacacctgggaccgccg

SEQ ID NO: 17276 - DNA, 20 bp, Artificial Sequence
  MKO10017276_A_Fam170b
  gRNA
tacagggcgcacacgctctc

SEQ ID NO: 17277 - DNA, 20 bp, Artificial Sequence
  MKO10017277_A_Fam170b
  gRNA
tacattcactactgtccgaa

SEQ ID NO: 17278 - DNA, 20 bp, Artificial Sequence
  MKO10017278_A_Fam171a1
  gRNA
ccacttacccggtaatcgga

SEQ ID NO: 17279 - DNA, 20 bp, Artificial Sequence
  MKO10017279_A_Fam171a1
  gRNA
tgaacgctccgctacgctga

SEQ ID NO: 17280 - DNA, 20 bp, Artificial Sequence
  MKO10017280_A_Fam171a1
  gRNA
ccatccaatcctcgcaagta

SEQ ID NO: 17281 - DNA, 20 bp, Artificial Sequence
  MKO10017281_A_Fam171a2
  gRNA
gtgagcgtccacctgctaac

SEQ ID NO: 17282 - DNA, 20 bp, Artificial Sequence
  MKO10017282_A_Fam171a2
  gRNA
agggcctcagtagacgtctt

SEQ ID NO: 17283 - DNA, 20 bp, Artificial Sequence
  MKO10017283_A_Fam171a2
  gRNA
tactacggactcagagggcg

SEQ ID NO: 17284 - DNA, 20 bp, Artificial Sequence
  MKO10017284_A_Fam171b
  gRNA
catcacatcagcaacgtgac

SEQ ID NO: 17285 - DNA, 20 bp, Artificial Sequence
  MKO10017285_A_Fam171b
  gRNA
taagctgagtcctaactgat

SEQ ID NO: 17286 - DNA, 20 bp, Artificial Sequence
  MKO10017286_A_Fam171b
  gRNA
gactgacgatgtcattgacc

SEQ ID NO: 17287 - DNA, 20 bp, Artificial Sequence
  MKO10017287_A_Fam172a
  gRNA
actaccgagaagacttacac

SEQ ID NO: 17288 - DNA, 20 bp, Artificial Sequence
  MKO10017288_A_Fam172a
  gRNA
gaagtaccgcaaccctcaaa

SEQ ID NO: 17289 - DNA, 20 bp, Artificial Sequence
  MKO10017289_A_Fam172a
  gRNA
acgacgcttctttgtttcct

SEQ ID NO: 17290 - DNA, 20 bp, Artificial Sequence
  MKO10017290_A_Fam173a
  gRNA
cttattcaggtgccctacgt

SEQ ID NO: 17291 - DNA, 20 bp, Artificial Sequence
  MKO10017291_A_Fam173a
  gRNA
gtgctggcggcccaccaatg

SEQ ID NO: 17292 - DNA, 20 bp, Artificial Sequence
  MKO10017292_A_Fam173a
  gRNA
tgggatatgagctgaacccg

SEQ ID NO: 17293 - DNA, 20 bp, Artificial Sequence
  MKO10017293_A_Fam173b
  gRNA
acggggaggacggccgaatc

SEQ ID NO: 17294 - DNA, 20 bp, Artificial Sequence
  MKO10017294_A_Fam173b
  gRNA
ggtactccagatatcgtgcc

SEQ ID NO: 17295 - DNA, 20 bp, Artificial Sequence
  MKO10017295_A_Fam173b
  gRNA
ctgtcggattccagactcgt

SEQ ID NO: 17296 - DNA, 20 bp, Artificial Sequence
  MKO10017296_A_Fam174a
  gRNA
gtccggggcggtaccgtcga

SEQ ID NO: 17297 - DNA, 20 bp, Artificial Sequence
  MKO10017297_A_Fam174a
  gRNA
gagaccatgccgaccccgcg

SEQ ID NO: 17298 - DNA, 20 bp, Artificial Sequence
  MKO10017298_A_Fam174a
  gRNA
caccgtacctcctagtcttg

SEQ ID NO: 17299 - DNA, 20 bp, Artificial Sequence
  MKO10017299_A_Fam174b
  gRNA
ccacgatcaccgtcgccttc

SEQ ID NO: 17300 - DNA, 20 bp, Artificial Sequence
  MKO10017300_A_Fam174b
  gRNA
tcgcagagccgagtccgctt

SEQ ID NO: 17301 - DNA, 20 bp, Artificial Sequence
  MKO10017301_A_Fam174b
  gRNA
gccatttccacacgttccgc

SEQ ID NO: 17302 - DNA, 20 bp, Artificial Sequence
  MKO10017302_A_Fam175a
  gRNA
tgatctgatccgagtgacga

SEQ ID NO: 17303 - DNA, 20 bp, Artificial Sequence
  MKO10017303_A_Fam175a
  gRNA
acgccttatataaacctcaa

SEQ ID NO: 17304 - DNA, 20 bp, Artificial Sequence
  MKO10017304_A_Fam175a
  gRNA
cttcacctttcatttcaccg

SEQ ID NO: 17305 - DNA, 20 bp, Artificial Sequence
  MKO10017305_A_Fam175b
  gRNA
agaccaggtctggcacgccg

SEQ ID NO: 17306 - DNA, 20 bp, Artificial Sequence
  MKO10017306_A_Fam175b
  gRNA
ttctctttagaccaaaccgc

SEQ ID NO: 17307 - DNA, 20 bp, Artificial Sequence
  MKO10017307_A_Fam175b
  gRNA
acagaattctgaaagatcgg

SEQ ID NO: 17308 - DNA, 20 bp, Artificial Sequence
  MKO10017308_A_Fam177a
  gRNA
caagcataccgggtcgacag

SEQ ID NO: 17309 - DNA, 20 bp, Artificial Sequence
  MKO10017309_A_Fam177a
  gRNA
ctatagataagtaatgaaag

SEQ ID NO: 17310 - DNA, 20 bp, Artificial Sequence
  MKO10017310_A_Fam177a
  gRNA
agtacctgagagggttgatg

SEQ ID NO: 17311 - DNA, 20 bp, Artificial Sequence
  MKO10017311_A_Fam178a
  gRNA
ccctacaccagacgacttta

SEQ ID NO: 17312 - DNA, 20 bp, Artificial Sequence
  MKO10017312_A_Fam178a
  gRNA
aacctttccttaaagtcgtc

SEQ ID NO: 17313 - DNA, 20 bp, Artificial Sequence
  MKO10017313_A_Fam178a
  gRNA
gtctgggcgcttctctagaa

SEQ ID NO: 17314 - DNA, 20 bp, Artificial Sequence
  MKO10017314_A_Fam178b
  gRNA
gctgtgcggctttagacgag

SEQ ID NO: 17315 - DNA, 20 bp, Artificial Sequence
  MKO10017315_A_Fam178b
  gRNA
gaagttctccgtgtccctgc

SEQ ID NO: 17316 - DNA, 20 bp, Artificial Sequence
  MKO10017316_A_Fam178b
  gRNA
ccctccagatcccaaccaga

SEQ ID NO: 17317 - DNA, 20 bp, Artificial Sequence
  MKO10017317_A_Fam179a
  gRNA
aggccgcttaccgcgtatgt

SEQ ID NO: 17318 - DNA, 20 bp, Artificial Sequence
  MKO10017318_A_Fam179a
  gRNA
agcgcagtgtaagtattgcc

SEQ ID NO: 17319 - DNA, 20 bp, Artificial Sequence
  MKO10017319_A_Fam179a
  gRNA
agtgtccctcggactagtgt

SEQ ID NO: 17320 - DNA, 20 bp, Artificial Sequence
  MKO10017320_A_Fam179b
  gRNA
gtgtgctttggactagttcg

SEQ ID NO: 17321 - DNA, 20 bp, Artificial Sequence
  MKO10017321_A_Fam179b
  gRNA
cgatcaccttcttcccgaag

SEQ ID NO: 17322 - DNA, 20 bp, Artificial Sequence
  MKO10017322_A_Fam179b
  gRNA
ggaagaaggtgatcgcacca

SEQ ID NO: 17323 - DNA, 20 bp, Artificial Sequence
  MKO10017323_A_Fam180a
  gRNA
tccgataggctgtgtacgcc

SEQ ID NO: 17324 - DNA, 20 bp, Artificial Sequence
  MKO10017324_A_Fam180a
  gRNA
agcgtatcccagatatccga

SEQ ID NO: 17325 - DNA, 20 bp, Artificial Sequence
  MKO10017325_A_Fam180a
  gRNA
cagaatcgtcagcgccttcc

SEQ ID NO: 17326 - DNA, 20 bp, Artificial Sequence
  MKO10017326_A_Fam181a
  gRNA
acttgcgatggtccacagag

SEQ ID NO: 17327 - DNA, 20 bp, Artificial Sequence
  MKO10017327_A_Fam181a
  gRNA
tccgtgtcagctagtaccct

SEQ ID NO: 17328 - DNA, 20 bp, Artificial Sequence
  MKO10017328_A_Fam181a
  gRNA
cgcaccctgccgccgctctg

SEQ ID NO: 17329 - DNA, 20 bp, Artificial Sequence
  MKO10017329_A_Fam181b
  gRNA
tgcgttgccgccgccccatc

SEQ ID NO: 17330 - DNA, 20 bp, Artificial Sequence
  MKO10017330_A_Fam181b
  gRNA
gtagcccgcgctgtaatcat

SEQ ID NO: 17331 - DNA, 20 bp, Artificial Sequence
  MKO10017331_A_Fam181b
  gRNA
cttcggcagtggcaacgatt

SEQ ID NO: 17332 - DNA, 20 bp, Artificial Sequence
  MKO10017332_A_Fam183b
  gRNA
tcacgtgaatcccctgcgca

SEQ ID NO: 17333 - DNA, 20 bp, Artificial Sequence
  MKO10017333_A_Fam183b
  gRNA
ttagatcaacccagaccgtc

SEQ ID NO: 17334 - DNA, 20 bp, Artificial Sequence
  MKO10017334_A_Fam183b
  gRNA
ccttgtacagagtgatgtcg

SEQ ID NO: 17335 - DNA, 20 bp, Artificial Sequence
  MKO10017335_A_Fam184a
  gRNA
cagctgacacaatcgctcgt

SEQ ID NO: 17336 - DNA, 20 bp, Artificial Sequence
  MKO10017336_A_Fam184a
  gRNA
ctccttgaccgtgttgttca

SEQ ID NO: 17337 - DNA, 20 bp, Artificial Sequence
  MKO10017337_A_Fam184a
  gRNA
tgaacacgatgctgcgattc

SEQ ID NO: 17338 - DNA, 20 bp, Artificial Sequence
  MKO10017338_A_Fam184b
  gRNA
aggtcagcgtggagtcaata

SEQ ID NO: 17339 - DNA, 20 bp, Artificial Sequence
  MKO10017339_A_Fam184b
  gRNA
ttatgccctcaatacccgcc

SEQ ID NO: 17340 - DNA, 20 bp, Artificial Sequence
  MKO10017340_A_Fam184b
  gRNA
tctgatgtctgactttacga

SEQ ID NO: 17341 - DNA, 20 bp, Artificial Sequence
  MKO10017341_A_Fam185a
  gRNA
acagatcacatcgcctcctt

SEQ ID NO: 17342 - DNA, 20 bp, Artificial Sequence
  MKO10017342_A_Fam185a
  gRNA
ctgtaaaatcgacactgagc

SEQ ID NO: 17343 - DNA, 20 bp, Artificial Sequence
  MKO10017343_A_Fam185a
  gRNA
aagttaccttcacagactgc

SEQ ID NO: 17344 - DNA, 20 bp, Artificial Sequence
  MKO10017344_A_Fam186b
  gRNA
tccgtgtccgtgccgaagat

SEQ ID NO: 17345 - DNA, 20 bp, Artificial Sequence
  MKO10017345_A_Fam186b
  gRNA
cggacacggattcgagggtg

SEQ ID NO: 17346 - DNA, 20 bp, Artificial Sequence
  MKO10017346_A_Fam186b
  gRNA
aagacgaagccctagacgaa

SEQ ID NO: 17347 - DNA, 20 bp, Artificial Sequence
  MKO10017347_A_Fam187a
  gRNA
cgcctcgctacattaagact

SEQ ID NO: 17348 - DNA, 20 bp, Artificial Sequence
  MKO10017348_A_Fam187a
  gRNA
gaagccgctcacgttcgcgt

SEQ ID NO: 17349 - DNA, 20 bp, Artificial Sequence
  MKO10017349_A_Fam187a
  gRNA
agcatgctctggtcgggccc

SEQ ID NO: 17350 - DNA, 20 bp, Artificial Sequence
  MKO10017350_A_Fam187b
  gRNA
acgtctaggctactgctatg

SEQ ID NO: 17351 - DNA, 20 bp, Artificial Sequence
  MKO10017351_A_Fam187b
  gRNA
cctagacgtttgcgctcacc

SEQ ID NO: 17352 - DNA, 20 bp, Artificial Sequence
  MKO10017352_A_Fam187b
  gRNA
agtatctctgtactggccgt

SEQ ID NO: 17353 - DNA, 20 bp, Artificial Sequence
  MKO10017353_A_Fam188a
  gRNA
catacctgagcaatcccgcc

SEQ ID NO: 17354 - DNA, 20 bp, Artificial Sequence
  MKO10017354_A_Fam188a
  gRNA
tgctgttattgcacctgtcc

SEQ ID NO: 17355 - DNA, 20 bp, Artificial Sequence
  MKO10017355_A_Fam188a
  gRNA
agaaatcctagccgcttcct

SEQ ID NO: 17356 - DNA, 20 bp, Artificial Sequence
  MKO10017356_A_Fam188b
  gRNA
ggaaagagcgttcaagcgtc

SEQ ID NO: 17357 - DNA, 20 bp, Artificial Sequence
  MKO10017357_A_Fam188b
  gRNA
aatcaggccagacttaggcc

SEQ ID NO: 17358 - DNA, 20 bp, Artificial Sequence
  MKO10017358_A_Fam188b
  gRNA
aagtctggcctgattgtccg

SEQ ID NO: 17359 - DNA, 20 bp, Artificial Sequence
  MKO10017359_A_Fam189a1
  gRNA
tcacttaccacaagcgagag

SEQ ID NO: 17360 - DNA, 20 bp, Artificial Sequence
  MKO10017360_A_Fam189a1
  gRNA
gagctgcaacaccactcatc

SEQ ID NO: 17361 - DNA, 20 bp, Artificial Sequence
  MKO10017361_A_Fam189a1
  gRNA
ttagatcaagttcgacagtg

SEQ ID NO: 17362 - DNA, 20 bp, Artificial Sequence
  MKO10017362_A_Fam189a2
  gRNA
agtttgtgtccagcgtgccc

SEQ ID NO: 17363 - DNA, 20 bp, Artificial Sequence
  MKO10017363_A_Fam189a2
  gRNA
tacaatacatggccttctgc

SEQ ID NO: 17364 - DNA, 20 bp, Artificial Sequence
  MKO10017364_A_Fam189a2
  gRNA
tgcatcctcctaaatctcgc

SEQ ID NO: 17365 - DNA, 20 bp, Artificial Sequence
  MKO10017365_A_Fam189b
  gRNA
tgtccctagctggcgttctc

SEQ ID NO: 17366 - DNA, 20 bp, Artificial Sequence
  MKO10017366_A_Fam189b
  gRNA
gcacctaccactagagtgaa

SEQ ID NO: 17367 - DNA, 20 bp, Artificial Sequence
  MKO10017367_A_Fam189b
  gRNA
acagattattgcagcacaaa

SEQ ID NO: 17368 - DNA, 20 bp, Artificial Sequence
  MKO10017368_A_Fam192a
  gRNA
accctcggtctctgtacgaa

SEQ ID NO: 17369 - DNA, 20 bp, Artificial Sequence
  MKO10017369_A_Fam192a
  gRNA
agccgttcgtacagagaccg

SEQ ID NO: 17370 - DNA, 20 bp, Artificial Sequence
  MKO10017370_A_Fam192a
  gRNA
ccaccttgagccttgtcatc

SEQ ID NO: 17371 - DNA, 20 bp, Artificial Sequence
  MKO10017371_A_Fam193a
  gRNA
ggtccgatgcatataccgcc

SEQ ID NO: 17372 - DNA, 20 bp, Artificial Sequence
  MKO10017372_A_Fam193a
  gRNA
tactgatggatcgtgctgcc

SEQ ID NO: 17373 - DNA, 20 bp, Artificial Sequence
  MKO10017373_A_Fam193a
  gRNA
ctgcctggcggtatatgcat

SEQ ID NO: 17374 - DNA, 20 bp, Artificial Sequence
  MKO10017374_A_Fam193b
  gRNA
cactcgctgccccgacgagc

SEQ ID NO: 17375 - DNA, 20 bp, Artificial Sequence
  MKO10017375_A_Fam193b
  gRNA
tgcggtggaccaccgagatg

SEQ ID NO: 17376 - DNA, 20 bp, Artificial Sequence
  MKO10017376_A_Fam193b
  gRNA
ggactcccaagcgagctgcc

SEQ ID NO: 17377 - DNA, 20 bp, Artificial Sequence
  MKO10017377_A_Fam194a
  gRNA
gtttccgttatctcaataga

SEQ ID NO: 17378 - DNA, 20 bp, Artificial Sequence
  MKO10017378_A_Fam194a
  gRNA
actcaagcttctatgttaag

SEQ ID NO: 17379 - DNA, 20 bp, Artificial Sequence
  MKO10017379_A_Fam194a
  gRNA
tgtctgaagtgactgtagat

SEQ ID NO: 17380 - DNA, 20 bp, Artificial Sequence
  MKO10017380_A_Fam195a
  gRNA
tacctattgacctcgatgag

SEQ ID NO: 17381 - DNA, 20 bp, Artificial Sequence
  MKO10017381_A_Fam195a
  gRNA
aacgtccgatttgtgtccga

SEQ ID NO: 17382 - DNA, 20 bp, Artificial Sequence
  MKO10017382_A_Fam195a
  gRNA
gctgtgcccaccactcatcg

SEQ ID NO: 17383 - DNA, 20 bp, Artificial Sequence
  MKO10017383_A_Fam195b
  gRNA
cctgcgtgttccggcgcttc

SEQ ID NO: 17384 - DNA, 20 bp, Artificial Sequence
  MKO10017384_A_Fam195b
  gRNA
cgcacattctcttcgtgtgc

SEQ ID NO: 17385 - DNA, 20 bp, Artificial Sequence
  MKO10017385_A_Fam195b
  gRNA
acctgagtgacctgaagcgc

SEQ ID NO: 17386 - DNA, 20 bp, Artificial Sequence
  MKO10017386_A_Fam196a
  gRNA
ttgggaatggatcggcgtgc

SEQ ID NO: 17387 - DNA, 20 bp, Artificial Sequence
  MKO10017387_A_Fam196a
  gRNA
gattcacaagaccaccgcat

SEQ ID NO: 17388 - DNA, 20 bp, Artificial Sequence
  MKO10017388_A_Fam196a
  gRNA
cagctaattgtgacacgtgc

SEQ ID NO: 17389 - DNA, 20 bp, Artificial Sequence
  MKO10017389_A_Fam196b
  gRNA
atcgcagcaagtgcgattca

SEQ ID NO: 17390 - DNA, 20 bp, Artificial Sequence
  MKO10017390_A_Fam196b
  gRNA
tgaaacaaccgcaccaccgc

SEQ ID NO: 17391 - DNA, 20 bp, Artificial Sequence
  MKO10017391_A_Fam196b
  gRNA
cttataggcggaacttctat

SEQ ID NO: 17392 - DNA, 20 bp, Artificial Sequence
  MKO10017392_A_Fam198a
  gRNA
ctaatagaagctcacgatcc

SEQ ID NO: 17393 - DNA, 20 bp, Artificial Sequence
  MKO10017393_A_Fam198a
  gRNA
gacgcaccaacttccccccg

SEQ ID NO: 17394 - DNA, 20 bp, Artificial Sequence
  MKO10017394_A_Fam198a
  gRNA
tccgtaggtccacgaccgcc

SEQ ID NO: 17395 - DNA, 20 bp, Artificial Sequence
  MKO10017395_A_Fam198b
  gRNA
ctgcggattccgacctcgaa

SEQ ID NO: 17396 - DNA, 20 bp, Artificial Sequence
  MKO10017396_A_Fam198b
  gRNA
accgtgccacggatattcgc

SEQ ID NO: 17397 - DNA, 20 bp, Artificial Sequence
  MKO10017397_A_Fam198b
  gRNA
taccactcttagagataggt

SEQ ID NO: 17398 - DNA, 20 bp, Artificial Sequence
  MKO10017398_A_Fam199x
  gRNA
cccttgtaggccgctgacga

SEQ ID NO: 17399 - DNA, 20 bp, Artificial Sequence
  MKO10017399_A_Fam199x
  gRNA
aggtggaacctcacttcgtg

SEQ ID NO: 17400 - DNA, 20 bp, Artificial Sequence
  MKO10017400_A_Fam199x
  gRNA
cctcatctatcagcacgtac

SEQ ID NO: 17401 - DNA, 20 bp, Artificial Sequence
  MKO10017401_A_Fam19a1
  gRNA
tttgtgaccgctcctcgatg

SEQ ID NO: 17402 - DNA, 20 bp, Artificial Sequence
  MKO10017402_A_Fam19a1
  gRNA
ttgtaacaagaaccgcatcg

SEQ ID NO: 17403 - DNA, 20 bp, Artificial Sequence
  MKO10017403_A_Fam19a1
  gRNA
cccacttacctggccggtgc

SEQ ID NO: 17404 - DNA, 20 bp, Artificial Sequence
  MKO10017404_A_Fam19a2
  gRNA
ccgagctgctccgtcttgtg

SEQ ID NO: 17405 - DNA, 20 bp, Artificial Sequence
  MKO10017405_A_Fam19a2
  gRNA
ggaaacggctttcccccaca

SEQ ID NO: 17406 - DNA, 20 bp, Artificial Sequence
  MKO10017406_A_Fam19a2
  gRNA
cagctccatcctttgcgatc

SEQ ID NO: 17407 - DNA, 20 bp, Artificial Sequence
  MKO10017407_A_Fam19a3
  gRNA
atgtgcagcaatcacctcgc

SEQ ID NO: 17408 - DNA, 20 bp, Artificial Sequence
  MKO10017408_A_Fam19a3
  gRNA
agcgctcctcaatgcggttc

SEQ ID NO: 17409 - DNA, 20 bp, Artificial Sequence
  MKO10017409_A_Fam19a3
  gRNA
ttccccagacctgcggatgt

SEQ ID NO: 17410 - DNA, 20 bp, Artificial Sequence
  MKO10017410_A_Fam19a4
  gRNA
ctgcaataagaaccgcatag

SEQ ID NO: 17411 - DNA, 20 bp, Artificial Sequence
  MKO10017411_A_Fam19a4
  gRNA
cgcaggtacctggcttgatc

SEQ ID NO: 17412 - DNA, 20 bp, Artificial Sequence
  MKO10017412_A_Fam19a4
  gRNA
acagcagaccattaacacat

SEQ ID NO: 17413 - DNA, 20 bp, Artificial Sequence
  MKO10017413_A_Fam19a5
  gRNA
ggaactgcgcgtgaatcacc

SEQ ID NO: 17414 - DNA, 20 bp, Artificial Sequence
  MKO10017414_A_Fam19a5
  gRNA
agccacggaggacgatcgcc

SEQ ID NO: 17415 - DNA, 20 bp, Artificial Sequence
  MKO10017415_A_Fam19a5
  gRNA
ggtggtctttatccgccctc

SEQ ID NO: 17416 - DNA, 20 bp, Artificial Sequence
  MKO10017416_A_Fam203a
  gRNA
gctcatcgaagccgtcatgc

SEQ ID NO: 17417 - DNA, 20 bp, Artificial Sequence
  MKO10017417_A_Fam203a
  gRNA
tcccgtacctgcttccgacc

SEQ ID NO: 17418 - DNA, 20 bp, Artificial Sequence
  MKO10017418_A_Fam203a
  gRNA
tcaacaggtgcgtggtccaa

SEQ ID NO: 17419 - DNA, 20 bp, Artificial Sequence
  MKO10017419_A_Fam207a
  gRNA
tgaagcttcgccgtgagcga

SEQ ID NO: 17420 - DNA, 20 bp, Artificial Sequence
  MKO10017420_A_Fam207a
  gRNA
accgtctggcttgctgccgc

SEQ ID NO: 17421 - DNA, 20 bp, Artificial Sequence
  MKO10017421_A_Fam207a
  gRNA
acagatagaccctagtgcgt

SEQ ID NO: 17422 - DNA, 20 bp, Artificial Sequence
  MKO10017422_A_Fam209
  gRNA
ccatctcagcagcgtccgca

SEQ ID NO: 17423 - DNA, 20 bp, Artificial Sequence
  MKO10017423_A_Fam209
  gRNA
tactttaacccagctcgaga

SEQ ID NO: 17424 - DNA, 20 bp, Artificial Sequence
  MKO10017424_A_Fam209
  gRNA
tatgtgatgctgaagtttcg

SEQ ID NO: 17425 - DNA, 20 bp, Artificial Sequence
  MKO10017425_A_Fam20a
  gRNA
cccgctccagtttcgaccag

SEQ ID NO: 17426 - DNA, 20 bp, Artificial Sequence
  MKO10017426_A_Fam20a
  gRNA
acagccacgggctgtactcc

SEQ ID NO: 17427 - DNA, 20 bp, Artificial Sequence
  MKO10017427_A_Fam20a
  gRNA
ctcctttgcagattacagcc

SEQ ID NO: 17428 - DNA, 20 bp, Artificial Sequence
  MKO10017428_A_Fam20b
  gRNA
cttgaaagctctcgtagtga

SEQ ID NO: 17429 - DNA, 20 bp, Artificial Sequence
  MKO10017429_A_Fam20b
  gRNA
agacgcgggcctgagtcata

SEQ ID NO: 17430 - DNA, 20 bp, Artificial Sequence
  MKO10017430_A_Fam20b
  gRNA
tgcagaaacatcgacatccc

SEQ ID NO: 17431 - DNA, 20 bp, Artificial Sequence
  MKO10017431_A_Fam20c
  gRNA
cgcagtaaggcatcgatggc

SEQ ID NO: 17432 - DNA, 20 bp, Artificial Sequence
  MKO10017432_A_Fam20c
  gRNA
tcttatcccgcgtcacatcc

SEQ ID NO: 17433 - DNA, 20 bp, Artificial Sequence
  MKO10017433_A_Fam20c
  gRNA
tgacgcgggataagaagcta

SEQ ID NO: 17434 - DNA, 20 bp, Artificial Sequence
  MKO10017434_A_Fam210a
  gRNA
gccagccgagacatagtccg

SEQ ID NO: 17435 - DNA, 20 bp, Artificial Sequence
  MKO10017435_A_Fam210a
  gRNA
gatcaccattggcgcataaa

SEQ ID NO: 17436 - DNA, 20 bp, Artificial Sequence
  MKO10017436_A_Fam210a
  gRNA
gtcaaccccaccgcctgtca

SEQ ID NO: 17437 - DNA, 20 bp, Artificial Sequence
  MKO10017437_A_Fam210b
  gRNA
gtcagatacttccgcagcgt

SEQ ID NO: 17438 - DNA, 20 bp, Artificial Sequence
  MKO10017438_A_Fam210b
  gRNA
cgactgctgcgcacggcccg

SEQ ID NO: 17439 - DNA, 20 bp, Artificial Sequence
  MKO10017439_A_Fam210b
  gRNA
tttccaagagtacggggccg

SEQ ID NO: 17440 - DNA, 20 bp, Artificial Sequence
  MKO10017440_A_Fam211a
  gRNA
gccgcgaacgacccgacttc

SEQ ID NO: 17441 - DNA, 20 bp, Artificial Sequence
  MKO10017441_A_Fam211a
  gRNA
cccccctatcaccggcgcgt

SEQ ID NO: 17442 - DNA, 20 bp, Artificial Sequence
  MKO10017442_A_Fam211a
  gRNA
cgtgtgtgatcgggtccacc

SEQ ID NO: 17443 - DNA, 20 bp, Artificial Sequence
  MKO10017443_A_Fam211b
  gRNA
ggcccgcgccctacgagcgc

SEQ ID NO: 17444 - DNA, 20 bp, Artificial Sequence
  MKO10017444_A_Fam211b
  gRNA
gccgctcccgaagcgtggac

SEQ ID NO: 17445 - DNA, 20 bp, Artificial Sequence
  MKO10017445_A_Fam211b
  gRNA
gcagcacatatcacgctacc

SEQ ID NO: 17446 - DNA, 20 bp, Artificial Sequence
  MKO10017446_A_Fam212a
  gRNA
ggcgacttcgacagttcatg

SEQ ID NO: 17447 - DNA, 20 bp, Artificial Sequence
  MKO10017447_A_Fam212a
  gRNA
gtgacattcctatgcgcagt

SEQ ID NO: 17448 - DNA, 20 bp, Artificial Sequence
  MKO10017448_A_Fam212a
  gRNA
gcttcctgagccagctccgc

SEQ ID NO: 17449 - DNA, 20 bp, Artificial Sequence
  MKO10017449_A_Fam212b
  gRNA
acctccacgttgatgtcacg

SEQ ID NO: 17450 - DNA, 20 bp, Artificial Sequence
  MKO10017450_A_Fam212b
  gRNA
gcgtgcggcccgacagagac

SEQ ID NO: 17451 - DNA, 20 bp, Artificial Sequence
  MKO10017451_A_Fam212b
  gRNA
ctatctgcgtcgcctcaaac

SEQ ID NO: 17452 - DNA, 20 bp, Artificial Sequence
  MKO10017452_A_Fam213a
  gRNA
tccttcaccaccgcatagag

SEQ ID NO: 17453 - DNA, 20 bp, Artificial Sequence
  MKO10017453_A_Fam213a
  gRNA
aacatcatcttccgcctctc

SEQ ID NO: 17454 - DNA, 20 bp, Artificial Sequence
  MKO10017454_A_Fam213a
  gRNA
ctatcacaaaaactcctcca

SEQ ID NO: 17455 - DNA, 20 bp, Artificial Sequence
  MKO10017455_A_Fam213b
  gRNA
ggaccaacacgatgtgcgcc

SEQ ID NO: 17456 - DNA, 20 bp, Artificial Sequence
  MKO10017456_A_Fam213b
  gRNA
ttggaggctacatcacgaac

SEQ ID NO: 17457 - DNA, 20 bp, Artificial Sequence
  MKO10017457_A_Fam213b
  gRNA
gcagccgaagcgtcgcagac

SEQ ID NO: 17458 - DNA, 20 bp, Artificial Sequence
  MKO10017458_A_Fam214a
  gRNA
atcaacgacgagcatagtcc

SEQ ID NO: 17459 - DNA, 20 bp, Artificial Sequence
  MKO10017459_A_Fam214a
  gRNA
cttgtcgctgcattcatgtc

SEQ ID NO: 17460 - DNA, 20 bp, Artificial Sequence
  MKO10017460_A_Fam214a
  gRNA
gcatgccacttctgacgtgc

SEQ ID NO: 17461 - DNA, 20 bp, Artificial Sequence
  MKO10017461_A_Fam214b
  gRNA
tgtttctgagcaaaatgcgc

SEQ ID NO: 17462 - DNA, 20 bp, Artificial Sequence
  MKO10017462_A_Fam214b
  gRNA
tgacgggcagcgtgacatgt

SEQ ID NO: 17463 - DNA, 20 bp, Artificial Sequence
  MKO10017463_A_Fam214b
  gRNA
caacttacagcttcaggcga

SEQ ID NO: 17464 - DNA, 20 bp, Artificial Sequence
  MKO10017464_A_Fam216a
  gRNA
agatcttagcaacgctgcac

SEQ ID NO: 17465 - DNA, 20 bp, Artificial Sequence
  MKO10017465_A_Fam216a
  gRNA
atgctgctcgccagtgccct

SEQ ID NO: 17466 - DNA, 20 bp, Artificial Sequence
  MKO10017466_A_Fam216a
  gRNA
actggcgagcagcataaagc

SEQ ID NO: 17467 - DNA, 20 bp, Artificial Sequence
  MKO10017467_A_Fam216b
  gRNA
acttgaattcgaggtattcg

SEQ ID NO: 17468 - DNA, 20 bp, Artificial Sequence
  MKO10017468_A_Fam216b
  gRNA
aaccgtggctgaggctcgca

SEQ ID NO: 17469 - DNA, 20 bp, Artificial Sequence
  MKO10017469_A_Fam216b
  gRNA
cagagactatgccttgtcta

SEQ ID NO: 17470 - DNA, 20 bp, Artificial Sequence
  MKO10017470_A_Fam217a
  gRNA
tattagcagaacagtagtca

SEQ ID NO: 17471 - DNA, 20 bp, Artificial Sequence
  MKO10017471_A_Fam217a
  gRNA
tgcaatatcagctgttctgc

SEQ ID NO: 17472 - DNA, 20 bp, Artificial Sequence
  MKO10017472_A_Fam217a
  gRNA
tggagttctcctgttaataa

SEQ ID NO: 17473 - DNA, 20 bp, Artificial Sequence
  MKO10017473_A_Fam217b
  gRNA
cgttcccacggaaggaatac

SEQ ID NO: 17474 - DNA, 20 bp, Artificial Sequence
  MKO10017474_A_Fam217b
  gRNA
gtaaggagcttaccccgtcc

SEQ ID NO: 17475 - DNA, 20 bp, Artificial Sequence
  MKO10017475_A_Fam217b
  gRNA
gggactgtcatcagaaaagc

SEQ ID NO: 17476 - DNA, 20 bp, Artificial Sequence
  MKO10017476_A_Fam219a
  gRNA
ccggtcgatctcctccatca

SEQ ID NO: 17477 - DNA, 20 bp, Artificial Sequence
  MKO10017477_A_Fam219a
  gRNA
aggctggtcgtccctaataa

SEQ ID NO: 17478 - DNA, 20 bp, Artificial Sequence
  MKO10017478_A_Fam219a
  gRNA
tgcccatgctgccgttcttc

SEQ ID NO: 17479 - DNA, 20 bp, Artificial Sequence
  MKO10017479_A_Fam219b
  gRNA
gggaccggtcatggcgaccg

SEQ ID NO: 17480 - DNA, 20 bp, Artificial Sequence
  MKO10017480_A_Fam219b
  gRNA
acgaaccgacccgattcttc

SEQ ID NO: 17481 - DNA, 20 bp, Artificial Sequence
  MKO10017481_A_Fam219b
  gRNA
agttccgcgggcatgcggtg

SEQ ID NO: 17482 - DNA, 20 bp, Artificial Sequence
  MKO10017482_A_Fam21
  gRNA
gttgctcaaacgcgctatcc

SEQ ID NO: 17483 - DNA, 20 bp, Artificial Sequence
  MKO10017483_A_Fam21
  gRNA
ggctgtgaactacgggttac

SEQ ID NO: 17484 - DNA, 20 bp, Artificial Sequence
  MKO10017484_A_Fam21
  gRNA
attatgcagacgacaatgtg

SEQ ID NO: 17485 - DNA, 20 bp, Artificial Sequence
  MKO10017485_A_Fam220a
  gRNA
gtctcaccgatactttgagc

SEQ ID NO: 17486 - DNA, 20 bp, Artificial Sequence
  MKO10017486_A_Fam220a
  gRNA
tcccttgaccgtttcaatcc

SEQ ID NO: 17487 - DNA, 20 bp, Artificial Sequence
  MKO10017487_A_Fam220a
  gRNA
gctggcccagctcaaagtat

SEQ ID NO: 17488 - DNA, 20 bp, Artificial Sequence
  MKO10017488_A_Fam221a
  gRNA
gatcagcacagtgccgctct

SEQ ID NO: 17489 - DNA, 20 bp, Artificial Sequence
  MKO10017489_A_Fam221a
  gRNA
gatgttccttatgcggcaat

SEQ ID NO: 17490 - DNA, 20 bp, Artificial Sequence
  MKO10017490_A_Fam221a
  gRNA
gccctgccgtgccgagtgag

SEQ ID NO: 17491 - DNA, 20 bp, Artificial Sequence
  MKO10017491_A_Fam221b
  gRNA
ggcgctgcccgcattattta

SEQ ID NO: 17492 - DNA, 20 bp, Artificial Sequence
  MKO10017492_A_Fam221b
  gRNA
accagttctgcccgcttagc

SEQ ID NO: 17493 - DNA, 20 bp, Artificial Sequence
  MKO10017493_A_Fam221b
  gRNA
gggttgaatccttctcccac

SEQ ID NO: 17494 - DNA, 20 bp, Artificial Sequence
  MKO10017494_A_Fam222a
  gRNA
cgacccgttggccctttcga

SEQ ID NO: 17495 - DNA, 20 bp, Artificial Sequence
  MKO10017495_A_Fam222a
  gRNA
ggggctgtaacgctggccgc

SEQ ID NO: 17496 - DNA, 20 bp, Artificial Sequence
  MKO10017496_A_Fam222a
  gRNA
actcacacttgcgcagatcc

SEQ ID NO: 17497 - DNA, 20 bp, Artificial Sequence
  MKO10017497_A_Fam222b
  gRNA
cacgttcgtcgtactgtgaa

SEQ ID NO: 17498 - DNA, 20 bp, Artificial Sequence
  MKO10017498_A_Fam222b
  gRNA
acgggtgcacccctcgactg

SEQ ID NO: 17499 - DNA, 20 bp, Artificial Sequence
  MKO10017499_A_Fam222b
  gRNA
tctcacacgcagatgaacac

SEQ ID NO: 17500 - DNA, 20 bp, Artificial Sequence
  MKO10017500_A_Fam227a
  gRNA
gagccaccgatatcttgcca

SEQ ID NO: 17501 - DNA, 20 bp, Artificial Sequence
  MKO10017501_A_Fam227a
  gRNA
accaccaggcgctcgtccaa

SEQ ID NO: 17502 - DNA, 20 bp, Artificial Sequence
  MKO10017502_A_Fam227a
  gRNA
ctccagcactgtccgaacgt

SEQ ID NO: 17503 - DNA, 20 bp, Artificial Sequence
  MKO10017503_A_Fam227b
  gRNA
tcgacgatatcatacagccg

SEQ ID NO: 17504 - DNA, 20 bp, Artificial Sequence
  MKO10017504_A_Fam227b
  gRNA
gtatgatatcgtcgacagct

SEQ ID NO: 17505 - DNA, 20 bp, Artificial Sequence
  MKO10017505_A_Fam227b
  gRNA
agaaattaccggatccccca

SEQ ID NO: 17506 - DNA, 20 bp, Artificial Sequence
  MKO10017506_A_Fam228a
  gRNA
ccttcaccccgttctcgctc

SEQ ID NO: 17507 - DNA, 20 bp, Artificial Sequence
  MKO10017507_A_Fam228a
  gRNA
actctgcataagccgagcag

SEQ ID NO: 17508 - DNA, 20 bp, Artificial Sequence
  MKO10017508_A_Fam228a
  gRNA
ggatacatatttacagcatc

SEQ ID NO: 17509 - DNA, 20 bp, Artificial Sequence
  MKO10017509_A_Fam228b
  gRNA
tttcatcatcctggtcatat

SEQ ID NO: 17510 - DNA, 20 bp, Artificial Sequence
  MKO10017510_A_Fam228b
  gRNA
acccttctgcagtgtgagac

SEQ ID NO: 17511 - DNA, 20 bp, Artificial Sequence
  MKO10017511_A_Fam228b
  gRNA
tcctctttgctcatataaaa

SEQ ID NO: 17512 - DNA, 20 bp, Artificial Sequence
  MKO10017512_A_Fam229a
  gRNA
tggaccggagcgtcctcccg

SEQ ID NO: 17513 - DNA, 20 bp, Artificial Sequence
  MKO10017513_A_Fam229a
  gRNA
cagcccgggcagcgtcggag

SEQ ID NO: 17514 - DNA, 20 bp, Artificial Sequence
  MKO10017514_A_Fam229a
  gRNA
acgggaggacgctccggtcc

SEQ ID NO: 17515 - DNA, 20 bp, Artificial Sequence
  MKO10017515_A_Fam229b
  gRNA
ggctgggtcccaaaccgaaa

SEQ ID NO: 17516 - DNA, 20 bp, Artificial Sequence
  MKO10017516_A_Fam229b
  gRNA
tcttcaattgagctagaatc

SEQ ID NO: 17517 - DNA, 20 bp, Artificial Sequence
  MKO10017517_A_Fam229b
  gRNA
atttccttgctgctttgcgc

SEQ ID NO: 17518 - DNA, 20 bp, Artificial Sequence
  MKO10017518_A_Fam24a
  gRNA
atgctacagtcgtcacaaca

SEQ ID NO: 17519 - DNA, 20 bp, Artificial Sequence
  MKO10017519_A_Fam24a
  gRNA
tgtgaaagatgttcgacttg

SEQ ID NO: 17520 - DNA, 20 bp, Artificial Sequence
  MKO10017520_A_Fam24a
  gRNA
ggcccggatgatcttctcat

SEQ ID NO: 17521 - DNA, 20 bp, Artificial Sequence
  MKO10017521_A_Fam25c
  gRNA
tttctttagggcgtcattaa

SEQ ID NO: 17522 - DNA, 20 bp, Artificial Sequence
  MKO10017522_A_Fam25c
  gRNA
gaagctggcggccgagggcc

SEQ ID NO: 17523 - DNA, 20 bp, Artificial Sequence
  MKO10017523_A_Fam25c
  gRNA
ccatacgatgctgggaggcc

SEQ ID NO: 17524 - DNA, 20 bp, Artificial Sequence
  MKO10017524_A_Fam26d
  gRNA
cattagcaaacatcgggtat

SEQ ID NO: 17525 - DNA, 20 bp, Artificial Sequence
  MKO10017525_A_Fam26d
  gRNA
tattcgtatcccttcgtgtc

SEQ ID NO: 17526 - DNA, 20 bp, Artificial Sequence
  MKO10017526_A_Fam26d
  gRNA
gtcaccgtcaaccatgtcag

SEQ ID NO: 17527 - DNA, 20 bp, Artificial Sequence
  MKO10017527_A_Fam26e
  gRNA
gaagagacgttcgctaccca

SEQ ID NO: 17528 - DNA, 20 bp, Artificial Sequence
  MKO10017528_A_Fam26e
  gRNA
tatggaacaaaccccgcaag

SEQ ID NO: 17529 - DNA, 20 bp, Artificial Sequence
  MKO10017529_A_Fam26e
  gRNA
ggaaggacgccgaacaaatc

SEQ ID NO: 17530 - DNA, 20 bp, Artificial Sequence
  MKO10017530_A_Fam26f
  gRNA
ccgaactgaatcgcgcgctc

SEQ ID NO: 17531 - DNA, 20 bp, Artificial Sequence
  MKO10017531_A_Fam26f
  gRNA
tcgcggcccttgcacaggta

SEQ ID NO: 17532 - DNA, 20 bp, Artificial Sequence
  MKO10017532_A_Fam26f
  gRNA
ctttgagtgctcgaagccga

SEQ ID NO: 17533 - DNA, 20 bp, Artificial Sequence
  MKO10017533_A_Fam32a
  gRNA
gcccttctggacttgctcgt

SEQ ID NO: 17534 - DNA, 20 bp, Artificial Sequence
  MKO10017534_A_Fam32a
  gRNA
ggcctacgagcaagtccaga

SEQ ID NO: 17535 - DNA, 20 bp, Artificial Sequence
  MKO10017535_A_Fam32a
  gRNA
ctgcctggacaagcgcacgc

SEQ ID NO: 17536 - DNA, 20 bp, Artificial Sequence
  MKO10017536_A_Fam35a
  gRNA
agacttagcgactcacctag

SEQ ID NO: 17537 - DNA, 20 bp, Artificial Sequence
  MKO10017537_A_Fam35a
  gRNA
cctttgaagctgagtatacc

SEQ ID NO: 17538 - DNA, 20 bp, Artificial Sequence
  MKO10017538_A_Fam35a
  gRNA
acaagtcagttactaaatct

SEQ ID NO: 17539 - DNA, 20 bp, Artificial Sequence
  MKO10017539_A_Fam3a
  gRNA
tgcaggccccctgcgcatcg

SEQ ID NO: 17540 - DNA, 20 bp, Artificial Sequence
  MKO10017540_A_Fam3a
  gRNA
cgctgactattcgaaagctc

SEQ ID NO: 17541 - DNA, 20 bp, Artificial Sequence
  MKO10017541_A_Fam3a
  gRNA
ccgtggcctgaacatcgccc

SEQ ID NO: 17542 - DNA, 20 bp, Artificial Sequence
  MKO10017542_A_Fam3b
  gRNA
ctctacaacatccgaagcat

SEQ ID NO: 17543 - DNA, 20 bp, Artificial Sequence
  MKO10017543_A_Fam3b
  gRNA
tcggatgttgtagagagtgc

SEQ ID NO: 17544 - DNA, 20 bp, Artificial Sequence
  MKO10017544_A_Fam3b
  gRNA
ctcctgacacctatgcctac

SEQ ID NO: 17545 - DNA, 20 bp, Artificial Sequence
  MKO10017545_A_Fam3c
  gRNA
ctccttagctcgatccgcgc

SEQ ID NO: 17546 - DNA, 20 bp, Artificial Sequence
  MKO10017546_A_Fam3c
  gRNA
acgaatggctgagtccagcg

SEQ ID NO: 17547 - DNA, 20 bp, Artificial Sequence
  MKO10017547_A_Fam3c
  gRNA
gatcttgggtcccacgacat

SEQ ID NO: 17548 - DNA, 20 bp, Artificial Sequence
  MKO10017548_A_Fam43a
  gRNA
tgcaaccgtccccgcgcgcc

SEQ ID NO: 17549 - DNA, 20 bp, Artificial Sequence
  MKO10017549_A_Fam43a
  gRNA
ggacggttgcactgacctag

SEQ ID NO: 17550 - DNA, 20 bp, Artificial Sequence
  MKO10017550_A_Fam43a
  gRNA
tcacccttaaatcggtctcc

SEQ ID NO: 17551 - DNA, 20 bp, Artificial Sequence
  MKO10017551_A_Fam43b
  gRNA
gcgcccatccgccgcgcagt

SEQ ID NO: 17552 - DNA, 20 bp, Artificial Sequence
  MKO10017552_A_Fam43b
  gRNA
cccgcgccagcaacacagcg

SEQ ID NO: 17553 - DNA, 20 bp, Artificial Sequence
  MKO10017553_A_Fam43b
  gRNA
tcaacgccaagtgcgcttac

SEQ ID NO: 17554 - DNA, 20 bp, Artificial Sequence
  MKO10017554_A_Fam45a
  gRNA
cctacacaatatcctagtga

SEQ ID NO: 17555 - DNA, 20 bp, Artificial Sequence
  MKO10017555_A_Fam45a
  gRNA
ctgtactgaccaaagacgaa

SEQ ID NO: 17556 - DNA, 20 bp, Artificial Sequence
  MKO10017556_A_Fam45a
  gRNA
agaaatatgccgccttcact

SEQ ID NO: 17557 - DNA, 20 bp, Artificial Sequence
  MKO10017557_A_Fam46a
  gRNA
gtccgcgacgtgcgcctcaa

SEQ ID NO: 17558 - DNA, 20 bp, Artificial Sequence
  MKO10017558_A_Fam46a
  gRNA
cagcacattgcagtgcgccg

SEQ ID NO: 17559 - DNA, 20 bp, Artificial Sequence
  MKO10017559_A_Fam46a
  gRNA
tctctgaacactcgtaaaag

SEQ ID NO: 17560 - DNA, 20 bp, Artificial Sequence
  MKO10017560_A_Fam46b
  gRNA
ttggccggaagccccgtacc

SEQ ID NO: 17561 - DNA, 20 bp, Artificial Sequence
  MKO10017561_A_Fam46b
  gRNA
gccgactctggtgccgtccc

SEQ ID NO: 17562 - DNA, 20 bp, Artificial Sequence
  MKO10017562_A_Fam46b
  gRNA
ggtcaaagtgtgcaccgacc

SEQ ID NO: 17563 - DNA, 20 bp, Artificial Sequence
  MKO10017563_A_Fam46c
  gRNA
tcaggttagccggctgcacg

SEQ ID NO: 17564 - DNA, 20 bp, Artificial Sequence
  MKO10017564_A_Fam46c
  gRNA
ttgagcttattcacgccctc

SEQ ID NO: 17565 - DNA, 20 bp, Artificial Sequence
  MKO10017565_A_Fam46c
  gRNA
ttggaaagttgcctcgcccg

SEQ ID NO: 17566 - DNA, 20 bp, Artificial Sequence
  MKO10017566_A_Fam46d
  gRNA
tttgcaataaccatgatcgc

SEQ ID NO: 17567 - DNA, 20 bp, Artificial Sequence
  MKO10017567_A_Fam46d
  gRNA
tacatactcgcaagccataa

SEQ ID NO: 17568 - DNA, 20 bp, Artificial Sequence
  MKO10017568_A_Fam46d
  gRNA
agatgagactccagcgatca

SEQ ID NO: 17569 - DNA, 20 bp, Artificial Sequence
  MKO10017569_A_Fam47c
  gRNA
gccatggaatcgcccccggc

SEQ ID NO: 17570 - DNA, 20 bp, Artificial Sequence
  MKO10017570_A_Fam47c
  gRNA
ctacagtatgccggccatcc

SEQ ID NO: 17571 - DNA, 20 bp, Artificial Sequence
  MKO10017571_A_Fam47c
  gRNA
tctaagagctcaatatcgct

SEQ ID NO: 17572 - DNA, 20 bp, Artificial Sequence
  MKO10017572_A_Fam47e
  gRNA
tgaacctctggtcgacccca

SEQ ID NO: 17573 - DNA, 20 bp, Artificial Sequence
  MKO10017573_A_Fam47e
  gRNA
ttacaaggtcctcggcccag

SEQ ID NO: 17574 - DNA, 20 bp, Artificial Sequence
  MKO10017574_A_Fam47e
  gRNA
ctcctctgtgtacgtcatca

SEQ ID NO: 17575 - DNA, 20 bp, Artificial Sequence
  MKO10017575_A_Fam49a
  gRNA
ccttcagctcatcgaatcga

SEQ ID NO: 17576 - DNA, 20 bp, Artificial Sequence
  MKO10017576_A_Fam49a
  gRNA
ccttcgattcgatgagctga

SEQ ID NO: 17577 - DNA, 20 bp, Artificial Sequence
  MKO10017577_A_Fam49a
  gRNA
ggacttacatctcggatctc

SEQ ID NO: 17578 - DNA, 20 bp, Artificial Sequence
  MKO10017578_A_Fam49b
  gRNA
agctggccacgaaatacgag

SEQ ID NO: 17579 - DNA, 20 bp, Artificial Sequence
  MKO10017579_A_Fam49b
  gRNA
actttacctctcgtatttcg

SEQ ID NO: 17580 - DNA, 20 bp, Artificial Sequence
  MKO10017580_A_Fam49b
  gRNA
ggtgcagtcgtgccactagt

SEQ ID NO: 17581 - DNA, 20 bp, Artificial Sequence
  MKO10017581_A_Fam50a
  gRNA
caggctggagatcttccgct

SEQ ID NO: 17582 - DNA, 20 bp, Artificial Sequence
  MKO10017582_A_Fam50a
  gRNA
ggaagagatggctatgtacg

SEQ ID NO: 17583 - DNA, 20 bp, Artificial Sequence
  MKO10017583_A_Fam50a
  gRNA
agagctcaagtccagtactg

SEQ ID NO: 17584 - DNA, 20 bp, Artificial Sequence
  MKO10017584_A_Fam50b
  gRNA
tcgacgtgcacgacgatgtg

SEQ ID NO: 17585 - DNA, 20 bp, Artificial Sequence
  MKO10017585_A_Fam50b
  gRNA
ctcggcacactacgacgccg

SEQ ID NO: 17586 - DNA, 20 bp, Artificial Sequence
  MKO10017586_A_Fam50b
  gRNA
ggagcaacgccggatacagc

SEQ ID NO: 17587 - DNA, 20 bp, Artificial Sequence
  MKO10017587_A_Fam53a
  gRNA
cctcccgtcttcgcttgcgc

SEQ ID NO: 17588 - DNA, 20 bp, Artificial Sequence
  MKO10017588_A_Fam53a
  gRNA
cggcatcgagctagctcctc

SEQ ID NO: 17589 - DNA, 20 bp, Artificial Sequence
  MKO10017589_A_Fam53a
  gRNA
gtcctccccgtgtaactcac

SEQ ID NO: 17590 - DNA, 20 bp, Artificial Sequence
  MKO10017590_A_Fam53b
  gRNA
tcgagcctgcaccaccgctt

SEQ ID NO: 17591 - DNA, 20 bp, Artificial Sequence
  MKO10017591_A_Fam53b
  gRNA
ccgccatgacgtccggcaac

SEQ ID NO: 17592 - DNA, 20 bp, Artificial Sequence
  MKO10017592_A_Fam53b
  gRNA
tcgtcagcagtacccgatcc

SEQ ID NO: 17593 - DNA, 20 bp, Artificial Sequence
  MKO10017593_A_Fam53c
  gRNA
cacgcgcttcagcgtcagtc

SEQ ID NO: 17594 - DNA, 20 bp, Artificial Sequence
  MKO10017594_A_Fam53c
  gRNA
cttgggggagtttccccgac

SEQ ID NO: 17595 - DNA, 20 bp, Artificial Sequence
  MKO10017595_A_Fam53c
  gRNA
cccgcaaaactggtgtcaag

SEQ ID NO: 17596 - DNA, 20 bp, Artificial Sequence
  MKO10017596_A_Fam57a
  gRNA
gagtactccgtttgtgtcgc

SEQ ID NO: 17597 - DNA, 20 bp, Artificial Sequence
  MKO10017597_A_Fam57a
  gRNA
cctgattgaaaaccgcctta

SEQ ID NO: 17598 - DNA, 20 bp, Artificial Sequence
  MKO10017598_A_Fam57a
  gRNA
ccgtgtgatgtgtgaccata

SEQ ID NO: 17599 - DNA, 20 bp, Artificial Sequence
  MKO10017599_A_Fam57b
  gRNA
acaccagtaccatggccgcg

SEQ ID NO: 17600 - DNA, 20 bp, Artificial Sequence
  MKO10017600_A_Fam57b
  gRNA
tgcaaactgtgtataggccg

SEQ ID NO: 17601 - DNA, 20 bp, Artificial Sequence
  MKO10017601_A_Fam57b
  gRNA
gacgtgggccgggatggcca

SEQ ID NO: 17602 - DNA, 20 bp, Artificial Sequence
  MKO10017602_A_Fam58b
  gRNA
agcggaggcatagccccccg

SEQ ID NO: 17603 - DNA, 20 bp, Artificial Sequence
  MKO10017603_A_Fam58b
  gRNA
ggcccgctttcgcagctgtc

SEQ ID NO: 17604 - DNA, 20 bp, Artificial Sequence
  MKO10017604_A_Fam58b
  gRNA
acatcatcaacgtgtcgcac

SEQ ID NO: 17605 - DNA, 20 bp, Artificial Sequence
  MKO10017605_A_Fam60a
  gRNA
tttagacagaaaatatgttg

SEQ ID NO: 17606 - DNA, 20 bp, Artificial Sequence
  MKO10017606_A_Fam60a
  gRNA
caggtggtagatgcaagagc

SEQ ID NO: 17607 - DNA, 20 bp, Artificial Sequence
  MKO10017607_A_Fam60a
  gRNA
aggttgcatgagactcgctc

SEQ ID NO: 17608 - DNA, 20 bp, Artificial Sequence
  MKO10017608_A_Fam63a
  gRNA
ctccgactttgagtatacgc

SEQ ID NO: 17609 - DNA, 20 bp, Artificial Sequence
  MKO10017609_A_Fam63a
  gRNA
cccgaaactggccacaggtc

SEQ ID NO: 17610 - DNA, 20 bp, Artificial Sequence
  MKO10017610_A_Fam63a
  gRNA
agcttgtgggacgtcaccta

SEQ ID NO: 17611 - DNA, 20 bp, Artificial Sequence
  MKO10017611_A_Fam63b
  gRNA
tgaacctgacattcacgtcc

SEQ ID NO: 17612 - DNA, 20 bp, Artificial Sequence
  MKO10017612_A_Fam63b
  gRNA
tcaacgtgtaaattatgaac

SEQ ID NO: 17613 - DNA, 20 bp, Artificial Sequence
  MKO10017613_A_Fam63b
  gRNA
accgaccttcactaaccaac

SEQ ID NO: 17614 - DNA, 20 bp, Artificial Sequence
  MKO10017614_A_Fam64a
  gRNA
gcgcagacgatcactcctaa

SEQ ID NO: 17615 - DNA, 20 bp, Artificial Sequence
  MKO10017615_A_Fam64a
  gRNA
aggggccgttaccgaggttc

SEQ ID NO: 17616 - DNA, 20 bp, Artificial Sequence
  MKO10017616_A_Fam64a
  gRNA
gccaaccgggatgctagagt

SEQ ID NO: 17617 - DNA, 20 bp, Artificial Sequence
  MKO10017617_A_Fam65a
  gRNA
tgaacgctttcttcgacgac

SEQ ID NO: 17618 - DNA, 20 bp, Artificial Sequence
  MKO10017618_A_Fam65a
  gRNA
tcgtcgaagaaagcgttcaa

SEQ ID NO: 17619 - DNA, 20 bp, Artificial Sequence
  MKO10017619_A_Fam65a
  gRNA
tagtgctctcccgagtgtca

SEQ ID NO: 17620 - DNA, 20 bp, Artificial Sequence
  MKO10017620_A_Fam65b
  gRNA
atccggagccagtccttcgc

SEQ ID NO: 17621 - DNA, 20 bp, Artificial Sequence
  MKO10017621_A_Fam65b
  gRNA
ctggctccggatgatgccat

SEQ ID NO: 17622 - DNA, 20 bp, Artificial Sequence
  MKO10017622_A_Fam65b
  gRNA
tcaatttgtccagctccgtc

SEQ ID NO: 17623 - DNA, 20 bp, Artificial Sequence
  MKO10017623_A_Fam65c
  gRNA
gcgcaagggttcgctatgcc

SEQ ID NO: 17624 - DNA, 20 bp, Artificial Sequence
  MKO10017624_A_Fam65c
  gRNA
tgtccgtgtggcgtccacac

SEQ ID NO: 17625 - DNA, 20 bp, Artificial Sequence
  MKO10017625_A_Fam65c
  gRNA
ctacctgtgtggacgccaca

SEQ ID NO: 17626 - DNA, 20 bp, Artificial Sequence
  MKO10017626_A_Fam69a
  gRNA
aagatacttcacccgcatgt

SEQ ID NO: 17627 - DNA, 20 bp, Artificial Sequence
  MKO10017627_A_Fam69a
  gRNA
ataacctaaaaacgttattg

SEQ ID NO: 17628 - DNA, 20 bp, Artificial Sequence
  MKO10017628_A_Fam69a
  gRNA
ctgtaccgtagacacagtcc

SEQ ID NO: 17629 - DNA, 20 bp, Artificial Sequence
  MKO10017629_A_Fam69b
  gRNA
cgcacctgcaccacgctgag

SEQ ID NO: 17630 - DNA, 20 bp, Artificial Sequence
  MKO10017630_A_Fam69b
  gRNA
agctacctacgacttcaaga

SEQ ID NO: 17631 - DNA, 20 bp, Artificial Sequence
  MKO10017631_A_Fam69b
  gRNA
ctcctcagtgcgaccagtac

SEQ ID NO: 17632 - DNA, 20 bp, Artificial Sequence
  MKO10017632_A_Fam69c
  gRNA
gcaggttgctgttgacacgc

SEQ ID NO: 17633 - DNA, 20 bp, Artificial Sequence
  MKO10017633_A_Fam69c
  gRNA
ggtagctattgacgtagaca

SEQ ID NO: 17634 - DNA, 20 bp, Artificial Sequence
  MKO10017634_A_Fam69c
  gRNA
cactgcataaaagtgaccgc

SEQ ID NO: 17635 - DNA, 20 bp, Artificial Sequence
  MKO10017635_A_Fam71a
  gRNA
cgtgcacaatcgtgtccgaa

SEQ ID NO: 17636 - DNA, 20 bp, Artificial Sequence
  MKO10017636_A_Fam71a
  gRNA
attagagacaaccgacgtaa

SEQ ID NO: 17637 - DNA, 20 bp, Artificial Sequence
  MKO10017637_A_Fam71a
  gRNA
atgaagtcgctctcgaatat

SEQ ID NO: 17638 - DNA, 20 bp, Artificial Sequence
  MKO10017638_A_Fam71b
  gRNA
tgttcacaaccgcgtccgaa

SEQ ID NO: 17639 - DNA, 20 bp, Artificial Sequence
  MKO10017639_A_Fam71b
  gRNA
cagacgagcccgattcatca

SEQ ID NO: 17640 - DNA, 20 bp, Artificial Sequence
  MKO10017640_A_Fam71b
  gRNA
gtgtcaaccttgcagagcga

SEQ ID NO: 17641 - DNA, 20 bp, Artificial Sequence
  MKO10017641_A_Fam71d
  gRNA
acctgcataaccgagcaaac

SEQ ID NO: 17642 - DNA, 20 bp, Artificial Sequence
  MKO10017642_A_Fam71d
  gRNA
cccagtttgctcggttatgc

SEQ ID NO: 17643 - DNA, 20 bp, Artificial Sequence
  MKO10017643_A_Fam71d
  gRNA
cactgatgtcaccgatatgc

SEQ ID NO: 17644 - DNA, 20 bp, Artificial Sequence
  MKO10017644_A_Fam71e1
  gRNA
aactcgcagtcgcgggtctc

SEQ ID NO: 17645 - DNA, 20 bp, Artificial Sequence
  MKO10017645_A_Fam71e1
  gRNA
gctggtcgaactcgccgctc

SEQ ID NO: 17646 - DNA, 20 bp, Artificial Sequence
  MKO10017646_A_Fam71e1
  gRNA
gagacccgcgactgcgagtt

SEQ ID NO: 17647 - DNA, 20 bp, Artificial Sequence
  MKO10017647_A_Fam71e2
  gRNA
cagacgcagtttcagtcgcc

SEQ ID NO: 17648 - DNA, 20 bp, Artificial Sequence
  MKO10017648_A_Fam71e2
  gRNA
tggcctttctgtttgaccgc

SEQ ID NO: 17649 - DNA, 20 bp, Artificial Sequence
  MKO10017649_A_Fam71e2
  gRNA
taacgcaggagtcccattgt

SEQ ID NO: 17650 - DNA, 20 bp, Artificial Sequence
  MKO10017650_A_Fam71f1
  gRNA
gtacggaggaggtcacccca

SEQ ID NO: 17651 - DNA, 20 bp, Artificial Sequence
  MKO10017651_A_Fam71f1
  gRNA
tcaaccgcaggacgcgttcc

SEQ ID NO: 17652 - DNA, 20 bp, Artificial Sequence
  MKO10017652_A_Fam71f1
  gRNA
ccataaggaggatgttcgga

SEQ ID NO: 17653 - DNA, 20 bp, Artificial Sequence
  MKO10017653_A_Fam71f2
  gRNA
cgcagcgcatcctccgcgtt

SEQ ID NO: 17654 - DNA, 20 bp, Artificial Sequence
  MKO10017654_A_Fam71f2
  gRNA
cggagaagatctactacctg

SEQ ID NO: 17655 - DNA, 20 bp, Artificial Sequence
  MKO10017655_A_Fam71f2
  gRNA
caactgcaagtcaaccccac

SEQ ID NO: 17656 - DNA, 20 bp, Artificial Sequence
  MKO10017656_A_Fam72a
  gRNA
aactacatggaacaattacg

SEQ ID NO: 17657 - DNA, 20 bp, Artificial Sequence
  MKO10017657_A_Fam72a
  gRNA
gtttacagaatttgcaacac

SEQ ID NO: 17658 - DNA, 20 bp, Artificial Sequence
  MKO10017658_A_Fam72a
  gRNA
gtcagacttacttggtagga

SEQ ID NO: 17659 - DNA, 20 bp, Artificial Sequence
  MKO10017659_A_Fam73a
  gRNA
tctaactgcgtacgtcttca

SEQ ID NO: 17660 - DNA, 20 bp, Artificial Sequence
  MKO10017660_A_Fam73a
  gRNA
ggtcagattctgccgactgc

SEQ ID NO: 17661 - DNA, 20 bp, Artificial Sequence
  MKO10017661_A_Fam73a
  gRNA
cagtgttgcaactacccgaa

SEQ ID NO: 17662 - DNA, 20 bp, Artificial Sequence
  MKO10017662_A_Fam73b
  gRNA
agtccgcgttctcccagctg

SEQ ID NO: 17663 - DNA, 20 bp, Artificial Sequence
  MKO10017663_A_Fam73b
  gRNA
caaccgcagctgggagaacg

SEQ ID NO: 17664 - DNA, 20 bp, Artificial Sequence
  MKO10017664_A_Fam73b
  gRNA
gccgagagcctctatgtgca

SEQ ID NO: 17665 - DNA, 20 bp, Artificial Sequence
  MKO10017665_A_Fam76a
  gRNA
cccctgagacagcgcctcga

SEQ ID NO: 17666 - DNA, 20 bp, Artificial Sequence
  MKO10017666_A_Fam76a
  gRNA
gagaactgtacctctcctgc

SEQ ID NO: 17667 - DNA, 20 bp, Artificial Sequence
  MKO10017667_A_Fam76a
  gRNA
ttgtgaagtgtacctactgt

SEQ ID NO: 17668 - DNA, 20 bp, Artificial Sequence
  MKO10017668_A_Fam76b
  gRNA
atttgtacaacgctgacact

SEQ ID NO: 17669 - DNA, 20 bp, Artificial Sequence
  MKO10017669_A_Fam76b
  gRNA
ggtggtgtttagaatggtgc

SEQ ID NO: 17670 - DNA, 20 bp, Artificial Sequence
  MKO10017670_A_Fam76b
  gRNA
gctcaaaatgtcaagcaatt

SEQ ID NO: 17671 - DNA, 20 bp, Artificial Sequence
  MKO10017671_A_Fam78a
  gRNA
ccgatagcgcaataccacgc

SEQ ID NO: 17672 - DNA, 20 bp, Artificial Sequence
  MKO10017672_A_Fam78a
  gRNA
ctccgtggtattgccgtacc

SEQ ID NO: 17673 - DNA, 20 bp, Artificial Sequence
  MKO10017673_A_Fam78a
  gRNA
catcgacgagtcctccagcg

SEQ ID NO: 17674 - DNA, 20 bp, Artificial Sequence
  MKO10017674_A_Fam78b
  gRNA
gatccggcgcgagaacatcg

SEQ ID NO: 17675 - DNA, 20 bp, Artificial Sequence
  MKO10017675_A_Fam78b
  gRNA
cgaggtctcctcgatgcgcg

SEQ ID NO: 17676 - DNA, 20 bp, Artificial Sequence
  MKO10017676_A_Fam78b
  gRNA
ttgggcttcactagtgcgtt

SEQ ID NO: 17677 - DNA, 20 bp, Artificial Sequence
  MKO10017677_A_Fam81a
  gRNA
ctcgtaggtcgacttatgct

SEQ ID NO: 17678 - DNA, 20 bp, Artificial Sequence
  MKO10017678_A_Fam81a
  gRNA
cgagcataagtcgacctacg

SEQ ID NO: 17679 - DNA, 20 bp, Artificial Sequence
  MKO10017679_A_Fam81a
  gRNA
tccaggagcagatccgtgcc

SEQ ID NO: 17680 - DNA, 20 bp, Artificial Sequence
  MKO10017680_A_Fam83a
  gRNA
gacgaataccccgcgcttgt

SEQ ID NO: 17681 - DNA, 20 bp, Artificial Sequence
  MKO10017681_A_Fam83a
  gRNA
ttactggcgcgccctcagtc

SEQ ID NO: 17682 - DNA, 20 bp, Artificial Sequence
  MKO10017682_A_Fam83a
  gRNA
gggcaagatccggaaacgtc

SEQ ID NO: 17683 - DNA, 20 bp, Artificial Sequence
  MKO10017683_A_Fam83b
  gRNA
atagcggttagcgcctctcc

SEQ ID NO: 17684 - DNA, 20 bp, Artificial Sequence
  MKO10017684_A_Fam83b
  gRNA
ctatgtcgagccgcactaca

SEQ ID NO: 17685 - DNA, 20 bp, Artificial Sequence
  MKO10017685_A_Fam83b
  gRNA
tggttgtcgaatccgatttc

SEQ ID NO: 17686 - DNA, 20 bp, Artificial Sequence
  MKO10017686_A_Fam83c
  gRNA
tttagccgaatagcacccgc

SEQ ID NO: 17687 - DNA, 20 bp, Artificial Sequence
  MKO10017687_A_Fam83c
  gRNA
aggtcgccgattcaccggcc

SEQ ID NO: 17688 - DNA, 20 bp, Artificial Sequence
  MKO10017688_A_Fam83c
  gRNA
tgatcatgtagtccacgtcc

SEQ ID NO: 17689 - DNA, 20 bp, Artificial Sequence
  MKO10017689_A_Fam83d
  gRNA
cagccgctcacgccgtaaga

SEQ ID NO: 17690 - DNA, 20 bp, Artificial Sequence
  MKO10017690_A_Fam83d
  gRNA
gaaccgccggcgttggagct

SEQ ID NO: 17691 - DNA, 20 bp, Artificial Sequence
  MKO10017691_A_Fam83d
  gRNA
ccggtgacccttctttggac

SEQ ID NO: 17692 - DNA, 20 bp, Artificial Sequence
  MKO10017692_A_Fam83e
  gRNA
gcacgaacttctcccgcaca

SEQ ID NO: 17693 - DNA, 20 bp, Artificial Sequence
  MKO10017693_A_Fam83e
  gRNA
tctcctgtttgtcccgctcg

SEQ ID NO: 17694 - DNA, 20 bp, Artificial Sequence
  MKO10017694_A_Fam83e
  gRNA
cgctcacctgccgtcgcctg

SEQ ID NO: 17695 - DNA, 20 bp, Artificial Sequence
  MKO10017695_A_Fam83f
  gRNA
gataagctttcgagctaccg

SEQ ID NO: 17696 - DNA, 20 bp, Artificial Sequence
  MKO10017696_A_Fam83f
  gRNA
tatcaaccccaagtacgcat

SEQ ID NO: 17697 - DNA, 20 bp, Artificial Sequence
  MKO10017697_A_Fam83f
  gRNA
agcttgcagacttccgcatt

SEQ ID NO: 17698 - DNA, 20 bp, Artificial Sequence
  MKO10017698_A_Fam83g
  gRNA
gtctcaatcgaagcacctaa

SEQ ID NO: 17699 - DNA, 20 bp, Artificial Sequence
  MKO10017699_A_Fam83g
  gRNA
gtgcttcgattgagacaatt

SEQ ID NO: 17700 - DNA, 20 bp, Artificial Sequence
  MKO10017700_A_Fam83g
  gRNA
aagcacagccagcgaaagcg

SEQ ID NO: 17701 - DNA, 20 bp, Artificial Sequence
  MKO10017701_A_Fam83h
  gRNA
ggtacgccacggctcggatc

SEQ ID NO: 17702 - DNA, 20 bp, Artificial Sequence
  MKO10017702_A_Fam83h
  gRNA
gcggaactcttcgtcgaagc

SEQ ID NO: 17703 - DNA, 20 bp, Artificial Sequence
  MKO10017703_A_Fam83h
  gRNA
tcgcgtcaacctgcatcatg

SEQ ID NO: 17704 - DNA, 20 bp, Artificial Sequence
  MKO10017704_A_Fam84a
  gRNA
tcgcctggctcgcagatcgc

SEQ ID NO: 17705 - DNA, 20 bp, Artificial Sequence
  MKO10017705_A_Fam84a
  gRNA
ctggtaccgctaccgcccgc

SEQ ID NO: 17706 - DNA, 20 bp, Artificial Sequence
  MKO10017706_A_Fam84a
  gRNA
cgtctatgcgacgcttctcg

SEQ ID NO: 17707 - DNA, 20 bp, Artificial Sequence
  MKO10017707_A_Fam84b
  gRNA
gcgttgcgcactacagcgct

SEQ ID NO: 17708 - DNA, 20 bp, Artificial Sequence
  MKO10017708_A_Fam84b
  gRNA
caacgaccagatcggacgcg

SEQ ID NO: 17709 - DNA, 20 bp, Artificial Sequence
  MKO10017709_A_Fam84b
  gRNA
agggcgacagcgacgcgact

SEQ ID NO: 17710 - DNA, 20 bp, Artificial Sequence
  MKO10017710_A_Fam86
  gRNA
ctcgggttctgagctgttgc

SEQ ID NO: 17711 - DNA, 20 bp, Artificial Sequence
  MKO10017711_A_Fam86
  gRNA
ttcataccagcaaatagctc

SEQ ID NO: 17712 - DNA, 20 bp, Artificial Sequence
  MKO10017712_A_Fam86
  gRNA
gcctcatacagtgcatccaa

SEQ ID NO: 17713 - DNA, 20 bp, Artificial Sequence
  MKO10017713_A_Fam89a
  gRNA
cccaacgagatgagcggaac

SEQ ID NO: 17714 - DNA, 20 bp, Artificial Sequence
  MKO10017714_A_Fam89a
  gRNA
caaggtcggcctccgacagc

SEQ ID NO: 17715 - DNA, 20 bp, Artificial Sequence
  MKO10017715_A_Fam89a
  gRNA
cgagctgaaccgagggggcg

SEQ ID NO: 17716 - DNA, 20 bp, Artificial Sequence
  MKO10017716_A_Fam89b
  gRNA
cggcacgactcagttcgtcg

SEQ ID NO: 17717 - DNA, 20 bp, Artificial Sequence
  MKO10017717_A_Fam89b
  gRNA
agcggccttcttaacgctag

SEQ ID NO: 17718 - DNA, 20 bp, Artificial Sequence
  MKO10017718_A_Fam89b
  gRNA
gggcctgtacgagtcgatcc

SEQ ID NO: 17719 - DNA, 20 bp, Artificial Sequence
  MKO10017719_A_Fam92a
  gRNA
gtcggctttgtctcgaagcc

SEQ ID NO: 17720 - DNA, 20 bp, Artificial Sequence
  MKO10017720_A_Fam92a
  gRNA
acaattacatgtcgatcaga

SEQ ID NO: 17721 - DNA, 20 bp, Artificial Sequence
  MKO10017721_A_Fam92a
  gRNA
caaacttcaagattatcgcc

SEQ ID NO: 17722 - DNA, 20 bp, Artificial Sequence
  MKO10017722_A_Fam92b
  gRNA
gtcctcggcgaagtctcgaa

SEQ ID NO: 17723 - DNA, 20 bp, Artificial Sequence
  MKO10017723_A_Fam92b
  gRNA
caccattcgagacttcgccg

SEQ ID NO: 17724 - DNA, 20 bp, Artificial Sequence
  MKO10017724_A_Fam92b
  gRNA
tacgatcatttgtcgatctg

SEQ ID NO: 17725 - DNA, 20 bp, Artificial Sequence
  MKO10017725_A_Fam96a
  gRNA
accgctgaagctttactctt

SEQ ID NO: 17726 - DNA, 20 bp, Artificial Sequence
  MKO10017726_A_Fam96a
  gRNA
ggaacagtgcgtcctcgagc

SEQ ID NO: 17727 - DNA, 20 bp, Artificial Sequence
  MKO10017727_A_Fam96a
  gRNA
ggaggggtcagtccggctcg

SEQ ID NO: 17728 - DNA, 20 bp, Artificial Sequence
  MKO10017728_A_Fam96b
  gRNA
tccaactgaccttgaaccgc

SEQ ID NO: 17729 - DNA, 20 bp, Artificial Sequence
  MKO10017729_A_Fam96b
  gRNA
aagccaggctcacgagcggg

SEQ ID NO: 17730 - DNA, 20 bp, Artificial Sequence
  MKO10017730_A_Fam96b
  gRNA
acccacgcctccgagcatgc

SEQ ID NO: 17731 - DNA, 20 bp, Artificial Sequence
  MKO10017731_A_Fam98a
  gRNA
gccgttactgaagaagccga

SEQ ID NO: 17732 - DNA, 20 bp, Artificial Sequence
  MKO10017732_A_Fam98a
  gRNA
agtgcaccatcgtccaacaa

SEQ ID NO: 17733 - DNA, 20 bp, Artificial Sequence
  MKO10017733_A_Fam98a
  gRNA
ctgttgcaggcagtctccgc

SEQ ID NO: 17734 - DNA, 20 bp, Artificial Sequence
  MKO10017734_A_Fam98b
  gRNA
gtataaggggccactgttag

SEQ ID NO: 17735 - DNA, 20 bp, Artificial Sequence
  MKO10017735_A_Fam98b
  gRNA
cctgagacgagtaccgagta

SEQ ID NO: 17736 - DNA, 20 bp, Artificial Sequence
  MKO10017736_A_Fam98b
  gRNA
atgatacctttgactccact

SEQ ID NO: 17737 - DNA, 20 bp, Artificial Sequence
  MKO10017737_A_Fam98c
  gRNA
gcccctccttaactcgcagc

SEQ ID NO: 17738 - DNA, 20 bp, Artificial Sequence
  MKO10017738_A_Fam98c
  gRNA
gtcccgcgtgtgcagacttc

SEQ ID NO: 17739 - DNA, 20 bp, Artificial Sequence
  MKO10017739_A_Fam98c
  gRNA
ccgcaggtacgatgccctcc

SEQ ID NO: 17740 - DNA, 20 bp, Artificial Sequence
  MKO10017740_A_Fan1
  gRNA
cggtcgcttcgagtctgtaa

SEQ ID NO: 17741 - DNA, 20 bp, Artificial Sequence
  MKO10017741_A_Fan1
  gRNA
ctttacagactcgaagcgac

SEQ ID NO: 17742 - DNA, 20 bp, Artificial Sequence
  MKO10017742_A_Fan1
  gRNA
tgcctccgacttaacccctg

SEQ ID NO: 17743 - DNA, 20 bp, Artificial Sequence
  MKO10017743_A_Fanca
  gRNA
gtgctgacgcttcctccgac

SEQ ID NO: 17744 - DNA, 20 bp, Artificial Sequence
  MKO10017744_A_Fanca
  gRNA
gtttgctcgcagtgtgcagc

SEQ ID NO: 17745 - DNA, 20 bp, Artificial Sequence
  MKO10017745_A_Fanca
  gRNA
aggaagcgtcagcactgtcg

SEQ ID NO: 17746 - DNA, 20 bp, Artificial Sequence
  MKO10017746_A_Fancb
  gRNA
ctgtcattagaccaaaccac

SEQ ID NO: 17747 - DNA, 20 bp, Artificial Sequence
  MKO10017747_A_Fancb
  gRNA
gtactggtgaatgactttgc

SEQ ID NO: 17748 - DNA, 20 bp, Artificial Sequence
  MKO10017748_A_Fancb
  gRNA
cgcaaaagtcacatctttga

SEQ ID NO: 17749 - DNA, 20 bp, Artificial Sequence
  MKO10017749_A_Fancc
  gRNA
cagagtcaggacttaactcg

SEQ ID NO: 17750 - DNA, 20 bp, Artificial Sequence
  MKO10017750_A_Fancc
  gRNA
tgccaacagttgaccaattg

SEQ ID NO: 17751 - DNA, 20 bp, Artificial Sequence
  MKO10017751_A_Fancc
  gRNA
ccccacaattggtcaactgt

SEQ ID NO: 17752 - DNA, 20 bp, Artificial Sequence
  MKO10017752_A_Fancd2os
  gRNA
gtgtagtgtgccgcagccat

SEQ ID NO: 17753 - DNA, 20 bp, Artificial Sequence
  MKO10017753_A_Fancd2os
  gRNA
ccgcagccagtccgcctcag

SEQ ID NO: 17754 - DNA, 20 bp, Artificial Sequence
  MKO10017754_A_Fancd2os
  gRNA
cgagccgtgagtaacaagaa

SEQ ID NO: 17755 - DNA, 20 bp, Artificial Sequence
  MKO10017755_A_Fancd2
  gRNA
gagtctgatcaagctacttc

SEQ ID NO: 17756 - DNA, 20 bp, Artificial Sequence
  MKO10017756_A_Fancd2
  gRNA
gagctttacctagctgattt

SEQ ID NO: 17757 - DNA, 20 bp, Artificial Sequence
  MKO10017757_A_Fancd2
  gRNA
ggacttactttgggataagc

SEQ ID NO: 17758 - DNA, 20 bp, Artificial Sequence
  MKO10017758_A_Fance
  gRNA
ctaggggttctgcgcgccct

SEQ ID NO: 17759 - DNA, 20 bp, Artificial Sequence
  MKO10017759_A_Fance
  gRNA
gccgcgcggagcacttccct

SEQ ID NO: 17760 - DNA, 20 bp, Artificial Sequence
  MKO10017760_A_Fance
  gRNA
ggcaacacgcctcctgcatc

SEQ ID NO: 17761 - DNA, 20 bp, Artificial Sequence
  MKO10017761_A_Fancf
  gRNA
cgacgtgccgcagtcgcgcc

SEQ ID NO: 17762 - DNA, 20 bp, Artificial Sequence
  MKO10017762_A_Fancf
  gRNA
cgcgcgtccacaacgtgtcc

SEQ ID NO: 17763 - DNA, 20 bp, Artificial Sequence
  MKO10017763_A_Fancf
  gRNA
gcgactgcggcacgtcgtct

SEQ ID NO: 17764 - DNA, 20 bp, Artificial Sequence
  MKO10017764_A_Fancg
  gRNA
ttgctgttacaaaccctaaa

SEQ ID NO: 17765 - DNA, 20 bp, Artificial Sequence
  MKO10017765_A_Fancg
  gRNA
actgcatttgcctgccgcca

SEQ ID NO: 17766 - DNA, 20 bp, Artificial Sequence
  MKO10017766_A_Fancg
  gRNA
cgaggcccctttgaagatcc

SEQ ID NO: 17767 - DNA, 20 bp, Artificial Sequence
  MKO10017767_A_Fanci
  gRNA
cgagaggaccgcctagtgaa

SEQ ID NO: 17768 - DNA, 20 bp, Artificial Sequence
  MKO10017768_A_Fanci
  gRNA
gatgtcgcatcagagatcat

SEQ ID NO: 17769 - DNA, 20 bp, Artificial Sequence
  MKO10017769_A_Fanci
  gRNA
aatctcccgattcaaccaac

SEQ ID NO: 17770 - DNA, 20 bp, Artificial Sequence
  MKO10017770_A_Fancl
  gRNA
gtaccatcaagtagtccaac

SEQ ID NO: 17771 - DNA, 20 bp, Artificial Sequence
  MKO10017771_A_Fancl
  gRNA
ccttaggcagcactattctg

SEQ ID NO: 17772 - DNA, 20 bp, Artificial Sequence
  MKO10017772_A_Fancl
  gRNA
ttacctgttggactacttga

SEQ ID NO: 17773 - DNA, 20 bp, Artificial Sequence
  MKO10017773_A_Fancm
  gRNA
cacccacgtaaagtgtcttg

SEQ ID NO: 17774 - DNA, 20 bp, Artificial Sequence
  MKO10017774_A_Fancm
  gRNA
ttaccatgacctgcggtgtc

SEQ ID NO: 17775 - DNA, 20 bp, Artificial Sequence
  MKO10017775_A_Fancm
  gRNA
cattcaaaagacgtatatcc

SEQ ID NO: 17776 - DNA, 20 bp, Artificial Sequence
  MKO10017776_A_Fank1
  gRNA
gtcgtagccaccgagacgac

SEQ ID NO: 17777 - DNA, 20 bp, Artificial Sequence
  MKO10017777_A_Fank1
  gRNA
atgaaagtgttcgctactta

SEQ ID NO: 17778 - DNA, 20 bp, Artificial Sequence
  MKO10017778_A_Fank1
  gRNA
actatacaaatttcgactga

SEQ ID NO: 17779 - DNA, 20 bp, Artificial Sequence
  MKO10017779_A_Fap
  gRNA
attgtcttacgtccctcaag

SEQ ID NO: 17780 - DNA, 20 bp, Artificial Sequence
  MKO10017780_A_Fap
  gRNA
agatacacaaattgccgatc

SEQ ID NO: 17781 - DNA, 20 bp, Artificial Sequence
  MKO10017781_A_Fap
  gRNA
ccactaaagcaagcgcagcc

SEQ ID NO: 17782 - DNA, 20 bp, Artificial Sequence
  MKO10017782_A_Far1
  gRNA
cgtcgatcgtcggcgccagt

SEQ ID NO: 17783 - DNA, 20 bp, Artificial Sequence
  MKO10017783_A_Far1
  gRNA
gacgatcgacggccttacaa

SEQ ID NO: 17784 - DNA, 20 bp, Artificial Sequence
  MKO10017784_A_Far1
  gRNA
atcttacagtagccgcacag

SEQ ID NO: 17785 - DNA, 20 bp, Artificial Sequence
  MKO10017785_A_Far2
  gRNA
taccgcaataatgagtccgc

SEQ ID NO: 17786 - DNA, 20 bp, Artificial Sequence
  MKO10017786_A_Far2
  gRNA
atgtgcatcaaagcgcactg

SEQ ID NO: 17787 - DNA, 20 bp, Artificial Sequence
  MKO10017787_A_Far2
  gRNA
acccagcggactcattattg

SEQ ID NO: 17788 - DNA, 20 bp, Artificial Sequence
  MKO10017788_A_Farp1
  gRNA
tgtccgcagcaacgagcgcc

SEQ ID NO: 17789 - DNA, 20 bp, Artificial Sequence
  MKO10017789_A_Farp1
  gRNA
cgaagtagtcgccctccaca

SEQ ID NO: 17790 - DNA, 20 bp, Artificial Sequence
  MKO10017790_A_Farp1
  gRNA
aatttaacaacgacgtgctt

SEQ ID NO: 17791 - DNA, 20 bp, Artificial Sequence
  MKO10017791_A_Farp2
  gRNA
tgcaggtcaggcgttcctcc

SEQ ID NO: 17792 - DNA, 20 bp, Artificial Sequence
  MKO10017792_A_Farp2
  gRNA
aagacctgcccgtcacactt

SEQ ID NO: 17793 - DNA, 20 bp, Artificial Sequence
  MKO10017793_A_Farp2
  gRNA
tccctgcagccgaagtgtga

SEQ ID NO: 17794 - DNA, 20 bp, Artificial Sequence
  MKO10017794_A_Fars2
  gRNA
ggatgtcaggaatgtcgtag

SEQ ID NO: 17795 - DNA, 20 bp, Artificial Sequence
  MKO10017795_A_Fars2
  gRNA
tatgacatcgtccgaacagt

SEQ ID NO: 17796 - DNA, 20 bp, Artificial Sequence
  MKO10017796_A_Fars2
  gRNA
aatcggctgggcgtttggcc

SEQ ID NO: 17797 - DNA, 20 bp, Artificial Sequence
  MKO10017797_A_Farsa
  gRNA
gtggacaagagtgccgccga

SEQ ID NO: 17798 - DNA, 20 bp, Artificial Sequence
  MKO10017798_A_Farsa
  gRNA
cagcacaagcgtgtctaagc

SEQ ID NO: 17799 - DNA, 20 bp, Artificial Sequence
  MKO10017799_A_Farsa
  gRNA
gactcaccactcggaacacc

SEQ ID NO: 17800 - DNA, 20 bp, Artificial Sequence
  MKO10017800_A_Farsb
  gRNA
ggcatcactcgcttatatac

SEQ ID NO: 17801 - DNA, 20 bp, Artificial Sequence
  MKO10017801_A_Farsb
  gRNA
tgacgaacctgcagatattc

SEQ ID NO: 17802 - DNA, 20 bp, Artificial Sequence
  MKO10017802_A_Farsb
  gRNA
aactacaccagaatatctgc

SEQ ID NO: 17803 - DNA, 20 bp, Artificial Sequence
  MKO10017803_A_Fasl
  gRNA
ggccttgtgatcaacgaaac

SEQ ID NO: 17804 - DNA, 20 bp, Artificial Sequence
  MKO10017804_A_Fasl
  gRNA
acccagtttcgttgatcaca

SEQ ID NO: 17805 - DNA, 20 bp, Artificial Sequence
  MKO10017805_A_Fasl
  gRNA
caacacaaatctgtggctac

SEQ ID NO: 17806 - DNA, 20 bp, Artificial Sequence
  MKO10017806_A_Fasn
  gRNA
tggcatagacccgccgagcc

SEQ ID NO: 17807 - DNA, 20 bp, Artificial Sequence
  MKO10017807_A_Fasn
  gRNA
ggaatgccccgcggcccttg

SEQ ID NO: 17808 - DNA, 20 bp, Artificial Sequence
  MKO10017808_A_Fasn
  gRNA
aacgaacactggcgtctggg

SEQ ID NO: 17809 - DNA, 20 bp, Artificial Sequence
  MKO10017809_A_Fastkd1
  gRNA
ccagcaagcgctgatcgtgt

SEQ ID NO: 17810 - DNA, 20 bp, Artificial Sequence
  MKO10017810_A_Fastkd1
  gRNA
ccaacacgatcagcgcttgc

SEQ ID NO: 17811 - DNA, 20 bp, Artificial Sequence
  MKO10017811_A_Fastkd1
  gRNA
ttctgatcaccagtcgttcc

SEQ ID NO: 17812 - DNA, 20 bp, Artificial Sequence
  MKO10017812_A_Fastkd2
  gRNA
aatgtgaatgcgcttcgagc

SEQ ID NO: 17813 - DNA, 20 bp, Artificial Sequence
  MKO10017813_A_Fastkd2
  gRNA
gtcaaccgctttagtgtcaa

SEQ ID NO: 17814 - DNA, 20 bp, Artificial Sequence
  MKO10017814_A_Fastkd2
  gRNA
tccaaacttgctgatcaact

SEQ ID NO: 17815 - DNA, 20 bp, Artificial Sequence
  MKO10017815_A_Fastkd3
  gRNA
acgccctattactacactat

SEQ ID NO: 17816 - DNA, 20 bp, Artificial Sequence
  MKO10017816_A_Fastkd3
  gRNA
ggtactatacctgaacaacc

SEQ ID NO: 17817 - DNA, 20 bp, Artificial Sequence
  MKO10017817_A_Fastkd3
  gRNA
agggtggcgctgtgtattga

SEQ ID NO: 17818 - DNA, 20 bp, Artificial Sequence
  MKO10017818_A_Fastkd5
  gRNA
agttcaaattgggtaccgtg

SEQ ID NO: 17819 - DNA, 20 bp, Artificial Sequence
  MKO10017819_A_Fastkd5
  gRNA
ttaccgtgcagcccaaagcg

SEQ ID NO: 17820 - DNA, 20 bp, Artificial Sequence
  MKO10017820_A_Fastkd5
  gRNA
ctgctcagccttacgcatcc

SEQ ID NO: 17821 - DNA, 20 bp, Artificial Sequence
  MKO10017821_A_Fastk
  gRNA
cctgttccagaagccgttga

SEQ ID NO: 17822 - DNA, 20 bp, Artificial Sequence
  MKO10017822_A_Fastk
  gRNA
atggatggtgtgaacgtcaa

SEQ ID NO: 17823 - DNA, 20 bp, Artificial Sequence
  MKO10017823_A_Fastk
  gRNA
gccagaagcaccattacgtg

SEQ ID NO: 17824 - DNA, 20 bp, Artificial Sequence
  MKO10017824_A_Fas
  gRNA
acctgcgccccatgcacaga

SEQ ID NO: 17825 - DNA, 20 bp, Artificial Sequence
  MKO10017825_A_Fas
  gRNA
tctccgagagtttaaagctg

SEQ ID NO: 17826 - DNA, 20 bp, Artificial Sequence
  MKO10017826_A_Fas
  gRNA
acactctgcgatgaagagca

SEQ ID NO: 17827 - DNA, 20 bp, Artificial Sequence
  MKO10017827_A_Fat1
  gRNA
gggcccctcgtccttatccg

SEQ ID NO: 17828 - DNA, 20 bp, Artificial Sequence
  MKO10017828_A_Fat1
  gRNA
cctctaccgcgtcatagccg

SEQ ID NO: 17829 - DNA, 20 bp, Artificial Sequence
  MKO10017829_A_Fat1
  gRNA
gccgatttcgtttgaggaat

SEQ ID NO: 17830 - DNA, 20 bp, Artificial Sequence
  MKO10017830_A_Fat2
  gRNA
atcagtgtagagggacgacc

SEQ ID NO: 17831 - DNA, 20 bp, Artificial Sequence
  MKO10017831_A_Fat2
  gRNA
taacaccgtcaaccagtagt

SEQ ID NO: 17832 - DNA, 20 bp, Artificial Sequence
  MKO10017832_A_Fat2
  gRNA
gaagatacaactcccgtgac

SEQ ID NO: 17833 - DNA, 20 bp, Artificial Sequence
  MKO10017833_A_Fat3
  gRNA
ctgcccgcctccacatcgaa

SEQ ID NO: 17834 - DNA, 20 bp, Artificial Sequence
  MKO10017834_A_Fat3
  gRNA
gtctgattaccacgacttca

SEQ ID NO: 17835 - DNA, 20 bp, Artificial Sequence
  MKO10017835_A_Fat3
  gRNA
aatagagagggaccacgccc

SEQ ID NO: 17836 - DNA, 20 bp, Artificial Sequence
  MKO10017836_A_Fat4
  gRNA
gccgtagcgaacctgtccgt

SEQ ID NO: 17837 - DNA, 20 bp, Artificial Sequence
  MKO10017837_A_Fat4
  gRNA
gtggtcattcacgtcgctga

SEQ ID NO: 17838 - DNA, 20 bp, Artificial Sequence
  MKO10017838_A_Fat4
  gRNA
agcatacgtgaccagagcgt

SEQ ID NO: 17839 - DNA, 20 bp, Artificial Sequence
  MKO10017839_A_Fau
  gRNA
ctttcctcaggtggccaaac

SEQ ID NO: 17840 - DNA, 20 bp, Artificial Sequence
  MKO10017840_A_Fau
  gRNA
cctaacacaggtaaagttca

SEQ ID NO: 17841 - DNA, 20 bp, Artificial Sequence
  MKO10017841_A_Fau
  gRNA
taaggatcatgtggcctccc

SEQ ID NO: 17842 - DNA, 20 bp, Artificial Sequence
  MKO10017842_A_Faxc
  gRNA
agaccggagcggctaatcaa

SEQ ID NO: 17843 - DNA, 20 bp, Artificial Sequence
  MKO10017843_A_Faxc
  gRNA
aatggctgacctaccctatc

SEQ ID NO: 17844 - DNA, 20 bp, Artificial Sequence
  MKO10017844_A_Faxc
  gRNA
caggcgatgtggaccttacc

SEQ ID NO: 17845 - DNA, 20 bp, Artificial Sequence
  MKO10017845_A_Fbf1
  gRNA
ctcccaaaagacagcgttga

SEQ ID NO: 17846 - DNA, 20 bp, Artificial Sequence
  MKO10017846_A_Fbf1
  gRNA
agctcgctgtgtctttggca

SEQ ID NO: 17847 - DNA, 20 bp, Artificial Sequence
  MKO10017847_A_Fbf1
  gRNA
agtccttcaacgctgtcttt

SEQ ID NO: 17848 - DNA, 20 bp, Artificial Sequence
  MKO10017848_A_Fblim1
  gRNA
tcgtacctgccgccgccagt

SEQ ID NO: 17849 - DNA, 20 bp, Artificial Sequence
  MKO10017849_A_Fblim1
  gRNA
cagcgacgagagctttgcgc

SEQ ID NO: 17850 - DNA, 20 bp, Artificial Sequence
  MKO10017850_A_Fblim1
  gRNA
acagggggcgcccatccttc

SEQ ID NO: 17851 - DNA, 20 bp, Artificial Sequence
  MKO10017851_A_Fbll1
  gRNA
ccgatagaccccgacgacga

SEQ ID NO: 17852 - DNA, 20 bp, Artificial Sequence
  MKO10017852_A_Fbll1
  gRNA
tcgccgtacaccgagactcc

SEQ ID NO: 17853 - DNA, 20 bp, Artificial Sequence
  MKO10017853_A_Fbll1
  gRNA
gccagatcagtcgcgcatcg

SEQ ID NO: 17854 - DNA, 20 bp, Artificial Sequence
  MKO10017854_A_Fbln1
  gRNA
tacctgaatgaccgctgtcg

SEQ ID NO: 17855 - DNA, 20 bp, Artificial Sequence
  MKO10017855_A_Fbln1
  gRNA
cacctcgacagcggtcattc

SEQ ID NO: 17856 - DNA, 20 bp, Artificial Sequence
  MKO10017856_A_Fbln1
  gRNA
ctgtgccacgggcatcaacc

SEQ ID NO: 17857 - DNA, 20 bp, Artificial Sequence
  MKO10017857_A_Fbln2
  gRNA
cagtactacgactgcgtaca

SEQ ID NO: 17858 - DNA, 20 bp, Artificial Sequence
  MKO10017858_A_Fbln2
  gRNA
cttgtacgcagtcgtagtac

SEQ ID NO: 17859 - DNA, 20 bp, Artificial Sequence
  MKO10017859_A_Fbln2
  gRNA
cttgtagagtgagacgccgc

SEQ ID NO: 17860 - DNA, 20 bp, Artificial Sequence
  MKO10017860_A_Fbln5
  gRNA
tttgacctggaccgccagtc

SEQ ID NO: 17861 - DNA, 20 bp, Artificial Sequence
  MKO10017861_A_Fbln5
  gRNA
cgatacactgggttggttcg

SEQ ID NO: 17862 - DNA, 20 bp, Artificial Sequence
  MKO10017862_A_Fbln5
  gRNA
accatccctgaggcttgtcg

SEQ ID NO: 17863 - DNA, 20 bp, Artificial Sequence
  MKO10017863_A_Fbln7
  gRNA
cctccggatggcaagaagtt

SEQ ID NO: 17864 - DNA, 20 bp, Artificial Sequence
  MKO10017864_A_Fbln7
  gRNA
cccgctccacctgcgcgcag

SEQ ID NO: 17865 - DNA, 20 bp, Artificial Sequence
  MKO10017865_A_Fbln7
  gRNA
cttcatgtttcggatgcctt

SEQ ID NO: 17866 - DNA, 20 bp, Artificial Sequence
  MKO10017866_A_Fbl
  gRNA
gctacaggtttcagcccccg

SEQ ID NO: 17867 - DNA, 20 bp, Artificial Sequence
  MKO10017867_A_Fbl
  gRNA
cactcaccttcatgacgatg

SEQ ID NO: 17868 - DNA, 20 bp, Artificial Sequence
  MKO10017868_A_Fbl
  gRNA
acaggtgggggcttccagtc

SEQ ID NO: 17869 - DNA, 20 bp, Artificial Sequence
  MKO10017869_A_Fbn1
  gRNA
tacgtgcaagcacaccgatt

SEQ ID NO: 17870 - DNA, 20 bp, Artificial Sequence
  MKO10017870_A_Fbn1
  gRNA
aatcggtgtgcttgcacgta

SEQ ID NO: 17871 - DNA, 20 bp, Artificial Sequence
  MKO10017871_A_Fbn1
  gRNA
gagtgccgatgtaccctttc

SEQ ID NO: 17872 - DNA, 20 bp, Artificial Sequence
  MKO10017872_A_Fbn2
  gRNA
cgatacaacgccccccgttc

SEQ ID NO: 17873 - DNA, 20 bp, Artificial Sequence
  MKO10017873_A_Fbn2
  gRNA
cagaacggggggcgttgtat

SEQ ID NO: 17874 - DNA, 20 bp, Artificial Sequence
  MKO10017874_A_Fbn2
  gRNA
gaatctagaaccgcacacgt

SEQ ID NO: 17875 - DNA, 20 bp, Artificial Sequence
  MKO10017875_A_Fbp1
  gRNA
gcagccgggtatgcgctcta

SEQ ID NO: 17876 - DNA, 20 bp, Artificial Sequence
  MKO10017876_A_Fbp1
  gRNA
ccctctagctatggtatcgc

SEQ ID NO: 17877 - DNA, 20 bp, Artificial Sequence
  MKO10017877_A_Fbp1
  gRNA
tcataatcgaacctgagaag

SEQ ID NO: 17878 - DNA, 20 bp, Artificial Sequence
  MKO10017878_A_Fbp2
  gRNA
aacccgcagccacgatgttg

SEQ ID NO: 17879 - DNA, 20 bp, Artificial Sequence
  MKO10017879_A_Fbp2
  gRNA
gcagcctggccgcaacatcg

SEQ ID NO: 17880 - DNA, 20 bp, Artificial Sequence
  MKO10017880_A_Fbp2
  gRNA
aatagcaaatatagttccga

SEQ ID NO: 17881 - DNA, 20 bp, Artificial Sequence
  MKO10017881_A_Fbrsl1
  gRNA
agagctgaacacgcggtttc

SEQ ID NO: 17882 - DNA, 20 bp, Artificial Sequence
  MKO10017882_A_Fbrsl1
  gRNA
tacctaccggcggggtgtcc

SEQ ID NO: 17883 - DNA, 20 bp, Artificial Sequence
  MKO10017883_A_Fbrsl1
  gRNA
ttgtagatcacgaactgctc

SEQ ID NO: 17884 - DNA, 20 bp, Artificial Sequence
  MKO10017884_A_Fbrs
  gRNA
cactcacattatgtcggaaa

SEQ ID NO: 17885 - DNA, 20 bp, Artificial Sequence
  MKO10017885_A_Fbrs
  gRNA
ccctagtttgagaaataccc

SEQ ID NO: 17886 - DNA, 20 bp, Artificial Sequence
  MKO10017886_A_Fbrs
  gRNA
ctcagcactggccccagtcg

SEQ ID NO: 17887 - DNA, 20 bp, Artificial Sequence
  MKO10017887_A_Fbxl12
  gRNA
acgccatgtaccggcgcagg

SEQ ID NO: 17888 - DNA, 20 bp, Artificial Sequence
  MKO10017888_A_Fbxl12
  gRNA
tgcgccggtacatggcgtcc

SEQ ID NO: 17889 - DNA, 20 bp, Artificial Sequence
  MKO10017889_A_Fbxl12
  gRNA
cgtcgacctgacgctctaca

SEQ ID NO: 17890 - DNA, 20 bp, Artificial Sequence
  MKO10017890_A_Fbxl13
  gRNA
ctttaccaggcgctgttatg

SEQ ID NO: 17891 - DNA, 20 bp, Artificial Sequence
  MKO10017891_A_Fbxl13
  gRNA
aatacctcgtgcaaatcaag

SEQ ID NO: 17892 - DNA, 20 bp, Artificial Sequence
  MKO10017892_A_Fbxl13
  gRNA
ttctctactcataaccgtgt

SEQ ID NO: 17893 - DNA, 20 bp, Artificial Sequence
  MKO10017893_A_Fbxl14
  gRNA
cgatctcctgcacgaacgcg

SEQ ID NO: 17894 - DNA, 20 bp, Artificial Sequence
  MKO10017894_A_Fbxl14
  gRNA
tcgcgcggcgcaggtgtgca

SEQ ID NO: 17895 - DNA, 20 bp, Artificial Sequence
  MKO10017895_A_Fbxl14
  gRNA
tccctgaagcacatctcgcg

SEQ ID NO: 17896 - DNA, 20 bp, Artificial Sequence
  MKO10017896_A_Fbxl15
  gRNA
cgcgactgacgcgctgcagc

SEQ ID NO: 17897 - DNA, 20 bp, Artificial Sequence
  MKO10017897_A_Fbxl15
  gRNA
gcgccgcttcgacgccgctc

SEQ ID NO: 17898 - DNA, 20 bp, Artificial Sequence
  MKO10017898_A_Fbxl15
  gRNA
cggcactagcccggctactg

SEQ ID NO: 17899 - DNA, 20 bp, Artificial Sequence
  MKO10017899_A_Fbxl16
  gRNA
caaggctgcgcaatttgcgc

SEQ ID NO: 17900 - DNA, 20 bp, Artificial Sequence
  MKO10017900_A_Fbxl16
  gRNA
tcggatcaccgatatggcac

SEQ ID NO: 17901 - DNA, 20 bp, Artificial Sequence
  MKO10017901_A_Fbxl16
  gRNA
gcctgcgctattcaatgacg

SEQ ID NO: 17902 - DNA, 20 bp, Artificial Sequence
  MKO10017902_A_Fbxl17
  gRNA
gcgttcgttcagggacaaat

SEQ ID NO: 17903 - DNA, 20 bp, Artificial Sequence
  MKO10017903_A_Fbxl17
  gRNA
ggaccttagtagtcgtcagc

SEQ ID NO: 17904 - DNA, 20 bp, Artificial Sequence
  MKO10017904_A_Fbxl17
  gRNA
agacgcgaccgcaatgattg

SEQ ID NO: 17905 - DNA, 20 bp, Artificial Sequence
  MKO10017905_A_Fbxl18
  gRNA
aattggacccgatcagttcc

SEQ ID NO: 17906 - DNA, 20 bp, Artificial Sequence
  MKO10017906_A_Fbxl18
  gRNA
acactcttcacgccgtccta

SEQ ID NO: 17907 - DNA, 20 bp, Artificial Sequence
  MKO10017907_A_Fbxl18
  gRNA
gaagatgacgacgttcaacg

SEQ ID NO: 17908 - DNA, 20 bp, Artificial Sequence
  MKO10017908_A_Fbxl19
  gRNA
attccgagatacccaactgc

SEQ ID NO: 17909 - DNA, 20 bp, Artificial Sequence
  MKO10017909_A_Fbxl19
  gRNA
gggcgccgcagggctgacaa

SEQ ID NO: 17910 - DNA, 20 bp, Artificial Sequence
  MKO10017910_A_Fbxl19
  gRNA
cctacccctgacgatgtgcc

SEQ ID NO: 17911 - DNA, 20 bp, Artificial Sequence
  MKO10017911_A_Fbxl20
  gRNA
ttacgaaagttaagtcttcg

SEQ ID NO: 17912 - DNA, 20 bp, Artificial Sequence
  MKO10017912_A_Fbxl20
  gRNA
ctcttcatagggccgggtag

SEQ ID NO: 17913 - DNA, 20 bp, Artificial Sequence
  MKO10017913_A_Fbxl20
  gRNA
gacatacctcaatgtccctc

SEQ ID NO: 17914 - DNA, 20 bp, Artificial Sequence
  MKO10017914_A_Fbxl21
  gRNA
gcccgggctcgatctattaa

SEQ ID NO: 17915 - DNA, 20 bp, Artificial Sequence
  MKO10017915_A_Fbxl21
  gRNA
agttaagacctatccggccc

SEQ ID NO: 17916 - DNA, 20 bp, Artificial Sequence
  MKO10017916_A_Fbxl21
  gRNA
ttactgaacgtccgaaataa

SEQ ID NO: 17917 - DNA, 20 bp, Artificial Sequence
  MKO10017917_A_Fbxl22
  gRNA
tgccgcaacgtgagcgccgc

SEQ ID NO: 17918 - DNA, 20 bp, Artificial Sequence
  MKO10017918_A_Fbxl22
  gRNA
taacgcgcgcgcagttctcg

SEQ ID NO: 17919 - DNA, 20 bp, Artificial Sequence
  MKO10017919_A_Fbxl22
  gRNA
cattaaccaggctctcgtgc

SEQ ID NO: 17920 - DNA, 20 bp, Artificial Sequence
  MKO10017920_A_Fbxl2
  gRNA
aacatctccaagaggtgcgg

SEQ ID NO: 17921 - DNA, 20 bp, Artificial Sequence
  MKO10017921_A_Fbxl2
  gRNA
cgactccgatgcagccacgc

SEQ ID NO: 17922 - DNA, 20 bp, Artificial Sequence
  MKO10017922_A_Fbxl2
  gRNA
tggcagcaactggcaacggg

SEQ ID NO: 17923 - DNA, 20 bp, Artificial Sequence
  MKO10017923_A_Fbxl3
  gRNA
gtgtcatggcttacgagaac

SEQ ID NO: 17924 - DNA, 20 bp, Artificial Sequence
  MKO10017924_A_Fbxl3
  gRNA
gactgcccggccaagcttta

SEQ ID NO: 17925 - DNA, 20 bp, Artificial Sequence
  MKO10017925_A_Fbxl3
  gRNA
ccaaagtaaagatgcgtagc

SEQ ID NO: 17926 - DNA, 20 bp, Artificial Sequence
  MKO10017926_A_Fbxl4
  gRNA
ccggctggacgacacgtcac

SEQ ID NO: 17927 - DNA, 20 bp, Artificial Sequence
  MKO10017927_A_Fbxl4
  gRNA
ccctacaaacctcatacgac

SEQ ID NO: 17928 - DNA, 20 bp, Artificial Sequence
  MKO10017928_A_Fbxl4
  gRNA
tattgacttccagtcgtatg

SEQ ID NO: 17929 - DNA, 20 bp, Artificial Sequence
  MKO10017929_A_Fbxl5
  gRNA
ggtgaagacgtccacttcat

SEQ ID NO: 17930 - DNA, 20 bp, Artificial Sequence
  MKO10017930_A_Fbxl5
  gRNA
ggtggggcgctactgcgaca

SEQ ID NO: 17931 - DNA, 20 bp, Artificial Sequence
  MKO10017931_A_Fbxl5
  gRNA
gatatctttaagctcctcgt

SEQ ID NO: 17932 - DNA, 20 bp, Artificial Sequence
  MKO10017932_A_Fbxl6
  gRNA
ctgcacgcgtttgccgtcac

SEQ ID NO: 17933 - DNA, 20 bp, Artificial Sequence
  MKO10017933_A_Fbxl6
  gRNA
gattgggtacgagccactcc

SEQ ID NO: 17934 - DNA, 20 bp, Artificial Sequence
  MKO10017934_A_Fbxl6
  gRNA
tcagccacagtttacgcatt

SEQ ID NO: 17935 - DNA, 20 bp, Artificial Sequence
  MKO10017935_A_Fbxl7
  gRNA
aattacgctacctcaatgcg

SEQ ID NO: 17936 - DNA, 20 bp, Artificial Sequence
  MKO10017936_A_Fbxl7
  gRNA
ccagtttagcaatctcccgc

SEQ ID NO: 17937 - DNA, 20 bp, Artificial Sequence
  MKO10017937_A_Fbxl7
  gRNA
ccctgaaagtactgacccgc

SEQ ID NO: 17938 - DNA, 20 bp, Artificial Sequence
  MKO10017938_A_Fbxl8
  gRNA
tgtcctcacttgcgcgccct

SEQ ID NO: 17939 - DNA, 20 bp, Artificial Sequence
  MKO10017939_A_Fbxl8
  gRNA
tagtatgtcgcgcgccgcgc

SEQ ID NO: 17940 - DNA, 20 bp, Artificial Sequence
  MKO10017940_A_Fbxl8
  gRNA
ctgccgccaacagcaccgtg

SEQ ID NO: 17941 - DNA, 20 bp, Artificial Sequence
  MKO10017941_A_Fbxo10
  gRNA
tacaccgcaccgcgtaagtc

SEQ ID NO: 17942 - DNA, 20 bp, Artificial Sequence
  MKO10017942_A_Fbxo10
  gRNA
acccgtcggcggataagaac

SEQ ID NO: 17943 - DNA, 20 bp, Artificial Sequence
  MKO10017943_A_Fbxo10
  gRNA
caatgccagatcgaagaccg

SEQ ID NO: 17944 - DNA, 20 bp, Artificial Sequence
  MKO10017944_A_Fbxo11
  gRNA
ttcaggatgcatcatcggcc

SEQ ID NO: 17945 - DNA, 20 bp, Artificial Sequence
  MKO10017945_A_Fbxo11
  gRNA
acttcgactacagaaaactt

SEQ ID NO: 17946 - DNA, 20 bp, Artificial Sequence
  MKO10017946_A_Fbxo11
  gRNA
ccgatgatgcatcctgaacc

SEQ ID NO: 17947 - DNA, 20 bp, Artificial Sequence
  MKO10017947_A_Fbxo15
  gRNA
tgtagacacgttgtccaccc

SEQ ID NO: 17948 - DNA, 20 bp, Artificial Sequence
  MKO10017948_A_Fbxo15
  gRNA
cagaatgccatcggaaatct

SEQ ID NO: 17949 - DNA, 20 bp, Artificial Sequence
  MKO10017949_A_Fbxo15
  gRNA
ttagatcaaaaagatcacgt

SEQ ID NO: 17950 - DNA, 20 bp, Artificial Sequence
  MKO10017950_A_Fbxo16
  gRNA
tgcttatctgacgatcgcca

SEQ ID NO: 17951 - DNA, 20 bp, Artificial Sequence
  MKO10017951_A_Fbxo16
  gRNA
tcaagtgcctgcgcttcaac

SEQ ID NO: 17952 - DNA, 20 bp, Artificial Sequence
  MKO10017952_A_Fbxo16
  gRNA
gagtctttgccgttgtgcac

SEQ ID NO: 17953 - DNA, 20 bp, Artificial Sequence
  MKO10017953_A_Fbxo17
  gRNA
ccggcttcgagttcgcctac

SEQ ID NO: 17954 - DNA, 20 bp, Artificial Sequence
  MKO10017954_A_Fbxo17
  gRNA
cgtggaaaagaatttgacgc

SEQ ID NO: 17955 - DNA, 20 bp, Artificial Sequence
  MKO10017955_A_Fbxo17
  gRNA
cagctatgcagatctcaatc

SEQ ID NO: 17956 - DNA, 20 bp, Artificial Sequence
  MKO10017956_A_Fbxo18
  gRNA
gatggcattctctcgagcca

SEQ ID NO: 17957 - DNA, 20 bp, Artificial Sequence
  MKO10017957_A_Fbxo18
  gRNA
ggaaataatcaatgacccgc

SEQ ID NO: 17958 - DNA, 20 bp, Artificial Sequence
  MKO10017958_A_Fbxo18
  gRNA
tccctaagccttgaacacga

SEQ ID NO: 17959 - DNA, 20 bp, Artificial Sequence
  MKO10017959_A_Fbxo21
  gRNA
ctctaaccaattgacgtagt

SEQ ID NO: 17960 - DNA, 20 bp, Artificial Sequence
  MKO10017960_A_Fbxo21
  gRNA
gattacgagtcctatctcga

SEQ ID NO: 17961 - DNA, 20 bp, Artificial Sequence
  MKO10017961_A_Fbxo21
  gRNA
cgtaatcgtcgggctgctgc

SEQ ID NO: 17962 - DNA, 20 bp, Artificial Sequence
  MKO10017962_A_Fbxo22
  gRNA
agatccaggtcacgctgcga

SEQ ID NO: 17963 - DNA, 20 bp, Artificial Sequence
  MKO10017963_A_Fbxo22
  gRNA
gggacattgcttggtgcgcg

SEQ ID NO: 17964 - DNA, 20 bp, Artificial Sequence
  MKO10017964_A_Fbxo22
  gRNA
gagtgtcgtggccataaaag

SEQ ID NO: 17965 - DNA, 20 bp, Artificial Sequence
  MKO10017965_A_Fbxo24
  gRNA
ctcgacacaacaccacgtag

SEQ ID NO: 17966 - DNA, 20 bp, Artificial Sequence
  MKO10017966_A_Fbxo24
  gRNA
cgctacgtggtgttgtgtcg

SEQ ID NO: 17967 - DNA, 20 bp, Artificial Sequence
  MKO10017967_A_Fbxo24
  gRNA
cgaccaagtctttgactggg

SEQ ID NO: 17968 - DNA, 20 bp, Artificial Sequence
  MKO10017968_A_Fbxo25
  gRNA
tgagaagtctagccggttga

SEQ ID NO: 17969 - DNA, 20 bp, Artificial Sequence
  MKO10017969_A_Fbxo25
  gRNA
catcaggaggttcacttacg

SEQ ID NO: 17970 - DNA, 20 bp, Artificial Sequence
  MKO10017970_A_Fbxo25
  gRNA
gtgaatacgcagccaaaaag

SEQ ID NO: 17971 - DNA, 20 bp, Artificial Sequence
  MKO10017971_A_Fbxo27
  gRNA
cagggcgtgtcttcgtgggc

SEQ ID NO: 17972 - DNA, 20 bp, Artificial Sequence
  MKO10017972_A_Fbxo27
  gRNA
gccgcaccatccatttgcgc

SEQ ID NO: 17973 - DNA, 20 bp, Artificial Sequence
  MKO10017973_A_Fbxo27
  gRNA
ctgatgaggttgcgtcctag

SEQ ID NO: 17974 - DNA, 20 bp, Artificial Sequence
  MKO10017974_A_Fbxo28
  gRNA
cgttctgttcgcctatgatc

SEQ ID NO: 17975 - DNA, 20 bp, Artificial Sequence
  MKO10017975_A_Fbxo28
  gRNA
gttgccttccgtcgtttccg

SEQ ID NO: 17976 - DNA, 20 bp, Artificial Sequence
  MKO10017976_A_Fbxo28
  gRNA
gttacgggatatctcctcca

SEQ ID NO: 17977 - DNA, 20 bp, Artificial Sequence
  MKO10017977_A_Fbxo2
  gRNA
caggtggtgtcgcaaagcgc

SEQ ID NO: 17978 - DNA, 20 bp, Artificial Sequence
  MKO10017978_A_Fbxo2
  gRNA
cgagctgccagctacggagc

SEQ ID NO: 17979 - DNA, 20 bp, Artificial Sequence
  MKO10017979_A_Fbxo2
  gRNA
gtactcgggtcgcactgatg

SEQ ID NO: 17980 - DNA, 20 bp, Artificial Sequence
  MKO10017980_A_Fbxo30
  gRNA
gtactatggaatggaatcga

SEQ ID NO: 17981 - DNA, 20 bp, Artificial Sequence
  MKO10017981_A_Fbxo30
  gRNA
aataccacgtactaacgggt

SEQ ID NO: 17982 - DNA, 20 bp, Artificial Sequence
  MKO10017982_A_Fbxo30
  gRNA
aagttacagccttaaagcac

SEQ ID NO: 17983 - DNA, 20 bp, Artificial Sequence
  MKO10017983_A_Fbxo31
  gRNA
acgttcagcaatcctccgta

SEQ ID NO: 17984 - DNA, 20 bp, Artificial Sequence
  MKO10017984_A_Fbxo31
  gRNA
cggaggattgctgaacgtcg

SEQ ID NO: 17985 - DNA, 20 bp, Artificial Sequence
  MKO10017985_A_Fbxo31
  gRNA
gccacctcatgacccccacg

SEQ ID NO: 17986 - DNA, 20 bp, Artificial Sequence
  MKO10017986_A_Fbxo32
  gRNA
tactacgtagttgaatcttc

SEQ ID NO: 17987 - DNA, 20 bp, Artificial Sequence
  MKO10017987_A_Fbxo32
  gRNA
gaagattcaactacgtagta

SEQ ID NO: 17988 - DNA, 20 bp, Artificial Sequence
  MKO10017988_A_Fbxo32
  gRNA
tgttcacaaaggaagtacga

SEQ ID NO: 17989 - DNA, 20 bp, Artificial Sequence
  MKO10017989_A_Fbxo33
  gRNA
gccgcggagaattatctgag

SEQ ID NO: 17990 - DNA, 20 bp, Artificial Sequence
  MKO10017990_A_Fbxo33
  gRNA
gaacccgagccggggccgcc

SEQ ID NO: 17991 - DNA, 20 bp, Artificial Sequence
  MKO10017991_A_Fbxo33
  gRNA
gtctttaaggttacaccgtg

SEQ ID NO: 17992 - DNA, 20 bp, Artificial Sequence
  MKO10017992_A_Fbxo34
  gRNA
gggttcgagacccacgctat

SEQ ID NO: 17993 - DNA, 20 bp, Artificial Sequence
  MKO10017993_A_Fbxo34
  gRNA
gccagtccgtgtccttgaca

SEQ ID NO: 17994 - DNA, 20 bp, Artificial Sequence
  MKO10017994_A_Fbxo34
  gRNA
tcagtgtcggggagcgagtc

SEQ ID NO: 17995 - DNA, 20 bp, Artificial Sequence
  MKO10017995_A_Fbxo36
  gRNA
gttcaagtcgccgtagtatt

SEQ ID NO: 17996 - DNA, 20 bp, Artificial Sequence
  MKO10017996_A_Fbxo36
  gRNA
taatagtctttgctcggcgc

SEQ ID NO: 17997 - DNA, 20 bp, Artificial Sequence
  MKO10017997_A_Fbxo36
  gRNA
agtcaaatttaccttcgcac

SEQ ID NO: 17998 - DNA, 20 bp, Artificial Sequence
  MKO10017998_A_Fbxo38
  gRNA
tatgccgcatgttcatattt

SEQ ID NO: 17999 - DNA, 20 bp, Artificial Sequence
  MKO10017999_A_Fbxo38
  gRNA
ccctcactcttcgcctctcg

SEQ ID NO: 18000 - DNA, 20 bp, Artificial Sequence
  MKO10018000_A_Fbxo38
  gRNA
ttcaccctagatacctcgag

SEQ ID NO: 18001 - DNA, 20 bp, Artificial Sequence
  MKO10018001_A_Fbxo39
  gRNA
cccggcgttgttctcgctca

SEQ ID NO: 18002 - DNA, 20 bp, Artificial Sequence
  MKO10018002_A_Fbxo39
  gRNA
accttgagcgagaacaacgc

SEQ ID NO: 18003 - DNA, 20 bp, Artificial Sequence
  MKO10018003_A_Fbxo39
  gRNA
gaagtaaaacagcttccgac

SEQ ID NO: 18004 - DNA, 20 bp, Artificial Sequence
  MKO10018004_A_Fbxo3
  gRNA
atttgcagagggcgcacgtg

SEQ ID NO: 18005 - DNA, 20 bp, Artificial Sequence
  MKO10018005_A_Fbxo3
  gRNA
gcgtgacctcaagaagtact

SEQ ID NO: 18006 - DNA, 20 bp, Artificial Sequence
  MKO10018006_A_Fbxo3
  gRNA
taggtccctgtagtccacga

SEQ ID NO: 18007 - DNA, 20 bp, Artificial Sequence
  MKO10018007_A_Fbxo40
  gRNA
tcgcttcccgcagtagctca

SEQ ID NO: 18008 - DNA, 20 bp, Artificial Sequence
  MKO10018008_A_Fbxo40
  gRNA
gacatccagtcgagtctcga

SEQ ID NO: 18009 - DNA, 20 bp, Artificial Sequence
  MKO10018009_A_Fbxo40
  gRNA
aggtggacactaagctctcc

SEQ ID NO: 18010 - DNA, 20 bp, Artificial Sequence
  MKO10018010_A_Fbxo41
  gRNA
gaggtcggcgttgccagttc

SEQ ID NO: 18011 - DNA, 20 bp, Artificial Sequence
  MKO10018011_A_Fbxo41
  gRNA
caagcacatacgccgtatca

SEQ ID NO: 18012 - DNA, 20 bp, Artificial Sequence
  MKO10018012_A_Fbxo41
  gRNA
ctgtcgggactggcgctttg

SEQ ID NO: 18013 - DNA, 20 bp, Artificial Sequence
  MKO10018013_A_Fbxo42
  gRNA
cgtactcgccgtctaaaaac

SEQ ID NO: 18014 - DNA, 20 bp, Artificial Sequence
  MKO10018014_A_Fbxo42
  gRNA
gagccggacttacccttatc

SEQ ID NO: 18015 - DNA, 20 bp, Artificial Sequence
  MKO10018015_A_Fbxo42
  gRNA
ttacatctgccgggatccta

SEQ ID NO: 18016 - DNA, 20 bp, Artificial Sequence
  MKO10018016_A_Fbxo43
  gRNA
ggccgctgtgttacgtgttc

SEQ ID NO: 18017 - DNA, 20 bp, Artificial Sequence
  MKO10018017_A_Fbxo43
  gRNA
tgcgagaacacgctgcagtc

SEQ ID NO: 18018 - DNA, 20 bp, Artificial Sequence
  MKO10018018_A_Fbxo43
  gRNA
agactgcagcgtgttctcgc

SEQ ID NO: 18019 - DNA, 20 bp, Artificial Sequence
  MKO10018019_A_Fbxo44
  gRNA
gtcgtcagcccacgcaccac

SEQ ID NO: 18020 - DNA, 20 bp, Artificial Sequence
  MKO10018020_A_Fbxo44
  gRNA
catcgcctccgttcacgtcc

SEQ ID NO: 18021 - DNA, 20 bp, Artificial Sequence
  MKO10018021_A_Fbxo44
  gRNA
acgtgaacggaggcgatgaa

SEQ ID NO: 18022 - DNA, 20 bp, Artificial Sequence
  MKO10018022_A_Fbxo45
  gRNA
cctcgctgttctcgtcgccg

SEQ ID NO: 18023 - DNA, 20 bp, Artificial Sequence
  MKO10018023_A_Fbxo45
  gRNA
tgattgggattgctacgaaa

SEQ ID NO: 18024 - DNA, 20 bp, Artificial Sequence
  MKO10018024_A_Fbxo45
  gRNA
ccacggcgacgagaacagcg

SEQ ID NO: 18025 - DNA, 20 bp, Artificial Sequence
  MKO10018025_A_Fbxo46
  gRNA
atcttgacgagcacgtgctc

SEQ ID NO: 18026 - DNA, 20 bp, Artificial Sequence
  MKO10018026_A_Fbxo46
  gRNA
gaaagctatacgcacctcgc

SEQ ID NO: 18027 - DNA, 20 bp, Artificial Sequence
  MKO10018027_A_Fbxo46
  gRNA
gtgccgcaagagatacgaga

SEQ ID NO: 18028 - DNA, 20 bp, Artificial Sequence
  MKO10018028_A_Fbxo47
  gRNA
ataagaagttatacacacga

SEQ ID NO: 18029 - DNA, 20 bp, Artificial Sequence
  MKO10018029_A_Fbxo47
  gRNA
tttcttcagaccttaacagc

SEQ ID NO: 18030 - DNA, 20 bp, Artificial Sequence
  MKO10018030_A_Fbxo47
  gRNA
gataatcctaaacactgcaa

SEQ ID NO: 18031 - DNA, 20 bp, Artificial Sequence
  MKO10018031_A_Fbxo48
  gRNA
gccccatggatgcagatacg

SEQ ID NO: 18032 - DNA, 20 bp, Artificial Sequence
  MKO10018032_A_Fbxo48
  gRNA
ctttgttgaactactgccct

SEQ ID NO: 18033 - DNA, 20 bp, Artificial Sequence
  MKO10018033_A_Fbxo48
  gRNA
tgaattccgcggatgctgaa

SEQ ID NO: 18034 - DNA, 20 bp, Artificial Sequence
  MKO10018034_A_Fbxo4
  gRNA
ttcaaggctcttcgcgtata

SEQ ID NO: 18035 - DNA, 20 bp, Artificial Sequence
  MKO10018035_A_Fbxo4
  gRNA
tgatattatactcgactacc

SEQ ID NO: 18036 - DNA, 20 bp, Artificial Sequence
  MKO10018036_A_Fbxo4
  gRNA
tggtagtcgagtataatatc

SEQ ID NO: 18037 - DNA, 20 bp, Artificial Sequence
  MKO10018037_A_Fbxo5
  gRNA
gtgttcaaaagtcatcgacc

SEQ ID NO: 18038 - DNA, 20 bp, Artificial Sequence
  MKO10018038_A_Fbxo5
  gRNA
cctccacgaactcattgtgc

SEQ ID NO: 18039 - DNA, 20 bp, Artificial Sequence
  MKO10018039_A_Fbxo5
  gRNA
acttacaatgactcgctgca

SEQ ID NO: 18040 - DNA, 20 bp, Artificial Sequence
  MKO10018040_A_Fbxo6
  gRNA
cttccagcgatcccctccgt

SEQ ID NO: 18041 - DNA, 20 bp, Artificial Sequence
  MKO10018041_A_Fbxo6
  gRNA
actccaacggaggggatcgc

SEQ ID NO: 18042 - DNA, 20 bp, Artificial Sequence
  MKO10018042_A_Fbxo6
  gRNA
cagctgtacccggagttgat

SEQ ID NO: 18043 - DNA, 20 bp, Artificial Sequence
  MKO10018043_A_Fbxo7
  gRNA
gcaaagccgccctcgcagag

SEQ ID NO: 18044 - DNA, 20 bp, Artificial Sequence
  MKO10018044_A_Fbxo7
  gRNA
cagtgatgccttgatagtgc

SEQ ID NO: 18045 - DNA, 20 bp, Artificial Sequence
  MKO10018045_A_Fbxo7
  gRNA
gaatcagtcccttgttcatc

SEQ ID NO: 18046 - DNA, 20 bp, Artificial Sequence
  MKO10018046_A_Fbxo8
  gRNA
aggtactccccacgctcttc

SEQ ID NO: 18047 - DNA, 20 bp, Artificial Sequence
  MKO10018047_A_Fbxo8
  gRNA
cctgacctcatgcgagaact

SEQ ID NO: 18048 - DNA, 20 bp, Artificial Sequence
  MKO10018048_A_Fbxo8
  gRNA
tatcctagatgattcgccaa

SEQ ID NO: 18049 - DNA, 20 bp, Artificial Sequence
  MKO10018049_A_Fbxo9
  gRNA
tctccagacggcgacggcgt

SEQ ID NO: 18050 - DNA, 20 bp, Artificial Sequence
  MKO10018050_A_Fbxo9
  gRNA
tagccatcaagttctaccgt

SEQ ID NO: 18051 - DNA, 20 bp, Artificial Sequence
  MKO10018051_A_Fbxo9
  gRNA
ggctcgagaactcttcctgc

SEQ ID NO: 18052 - DNA, 20 bp, Artificial Sequence
  MKO10018052_A_Fbxw10
  gRNA
ccacataggggtcctacaca

SEQ ID NO: 18053 - DNA, 20 bp, Artificial Sequence
  MKO10018053_A_Fbxw10
  gRNA
tggataagcacagtctgaac

SEQ ID NO: 18054 - DNA, 20 bp, Artificial Sequence
  MKO10018054_A_Fbxw10
  gRNA
agctgcccaagagacatatg

SEQ ID NO: 18055 - DNA, 20 bp, Artificial Sequence
  MKO10018055_A_Fbxw11
  gRNA
gataaagtcccgctgcaaca

SEQ ID NO: 18056 - DNA, 20 bp, Artificial Sequence
  MKO10018056_A_Fbxw11
  gRNA
gtggctaggctgcgccaacc

SEQ ID NO: 18057 - DNA, 20 bp, Artificial Sequence
  MKO10018057_A_Fbxw11
  gRNA
cggatgtgtcattatcagca

SEQ ID NO: 18058 - DNA, 20 bp, Artificial Sequence
  MKO10018058_A_Fbxw13
  gRNA
ttgataccgacttgctgtac

SEQ ID NO: 18059 - DNA, 20 bp, Artificial Sequence
  MKO10018059_A_Fbxw13
  gRNA
gaagtcaccatacagacgac

SEQ ID NO: 18060 - DNA, 20 bp, Artificial Sequence
  MKO10018060_A_Fbxw13
  gRNA
gtaagcccagtacagcaagt

SEQ ID NO: 18061 - DNA, 20 bp, Artificial Sequence
  MKO10018061_A_Fbxw14
  gRNA
ttcagattgcagtaatttac

SEQ ID NO: 18062 - DNA, 20 bp, Artificial Sequence
  MKO10018062_A_Fbxw14
  gRNA
aagctcataccaaactccat

SEQ ID NO: 18063 - DNA, 20 bp, Artificial Sequence
  MKO10018063_A_Fbxw14
  gRNA
agttcttctttaacaaaaca

SEQ ID NO: 18064 - DNA, 20 bp, Artificial Sequence
  MKO10018064_A_Fbxw15
  gRNA
acgtgccaagttccgtgcaa

SEQ ID NO: 18065 - DNA, 20 bp, Artificial Sequence
  MKO10018065_A_Fbxw15
  gRNA
agttcttcattgatcgaata

SEQ ID NO: 18066 - DNA, 20 bp, Artificial Sequence
  MKO10018066_A_Fbxw15
  gRNA
ccaagaatacaatttccacc

SEQ ID NO: 18067 - DNA, 20 bp, Artificial Sequence
  MKO10018067_A_Fbxw16
  gRNA
ggtagtcatcagttcaatat

SEQ ID NO: 18068 - DNA, 20 bp, Artificial Sequence
  MKO10018068_A_Fbxw16
  gRNA
cacagctttcagtatttgac

SEQ ID NO: 18069 - DNA, 20 bp, Artificial Sequence
  MKO10018069_A_Fbxw16
  gRNA
gtatggtgacttccacgaac

SEQ ID NO: 18070 - DNA, 20 bp, Artificial Sequence
  MKO10018070_A_Fbxw17
  gRNA
gtttgcgtgcccacgaccac

SEQ ID NO: 18071 - DNA, 20 bp, Artificial Sequence
  MKO10018071_A_Fbxw17
  gRNA
ctagagttccgtatggaatc

SEQ ID NO: 18072 - DNA, 20 bp, Artificial Sequence
  MKO10018072_A_Fbxw17
  gRNA
gccggcatcctgttcttcaa

SEQ ID NO: 18073 - DNA, 20 bp, Artificial Sequence
  MKO10018073_A_Fbxw18
  gRNA
ctctgcgcaaatttctttgt

SEQ ID NO: 18074 - DNA, 20 bp, Artificial Sequence
  MKO10018074_A_Fbxw18
  gRNA
aaagaaatttgcgcagagac

SEQ ID NO: 18075 - DNA, 20 bp, Artificial Sequence
  MKO10018075_A_Fbxw18
  gRNA
ttcaacagcttgatagtagt

SEQ ID NO: 18076 - DNA, 20 bp, Artificial Sequence
  MKO10018076_A_Fbxw19
  gRNA
ggtagtcatccgtgtgatat

SEQ ID NO: 18077 - DNA, 20 bp, Artificial Sequence
  MKO10018077_A_Fbxw19
  gRNA
tcgccaaaactttcctgttg

SEQ ID NO: 18078 - DNA, 20 bp, Artificial Sequence
  MKO10018078_A_Fbxw19
  gRNA
aagactataccaaatgccac

SEQ ID NO: 18079 - DNA, 20 bp, Artificial Sequence
  MKO10018079_A_Fbxw20
  gRNA
taacaagaaacgtacaagac

SEQ ID NO: 18080 - DNA, 20 bp, Artificial Sequence
  MKO10018080_A_Fbxw20
  gRNA
ccatgaccaagttgtccacc

SEQ ID NO: 18081 - DNA, 20 bp, Artificial Sequence
  MKO10018081_A_Fbxw20
  gRNA
ttctccagggcattatgacc

SEQ ID NO: 18082 - DNA, 20 bp, Artificial Sequence
  MKO10018082_A_Fbxw21
  gRNA
cattgcagtcactgtagata

SEQ ID NO: 18083 - DNA, 20 bp, Artificial Sequence
  MKO10018083_A_Fbxw21
  gRNA
aagcccataccatactctgc

SEQ ID NO: 18084 - DNA, 20 bp, Artificial Sequence
  MKO10018084_A_Fbxw21
  gRNA
gacagctttcagtgactgac

SEQ ID NO: 18085 - DNA, 20 bp, Artificial Sequence
  MKO10018085_A_Fbxw22
  gRNA
ggtagtcatctgcatgatat

SEQ ID NO: 18086 - DNA, 20 bp, Artificial Sequence
  MKO10018086_A_Fbxw22
  gRNA
atttcttgttaagccatgcc

SEQ ID NO: 18087 - DNA, 20 bp, Artificial Sequence
  MKO10018087_A_Fbxw22
  gRNA
ttcagcttgcagtaattgac

SEQ ID NO: 18088 - DNA, 20 bp, Artificial Sequence
  MKO10018088_A_Fbxw24
  gRNA
gccttgtccgtttcttgtta

SEQ ID NO: 18089 - DNA, 20 bp, Artificial Sequence
  MKO10018089_A_Fbxw24
  gRNA
gtattgcaggaagttgtgtc

SEQ ID NO: 18090 - DNA, 20 bp, Artificial Sequence
  MKO10018090_A_Fbxw24
  gRNA
gcaggtgttcggggatatgc

SEQ ID NO: 18091 - DNA, 20 bp, Artificial Sequence
  MKO10018091_A_Fbxw26
  gRNA
agctctagcaactaagcgca

SEQ ID NO: 18092 - DNA, 20 bp, Artificial Sequence
  MKO10018092_A_Fbxw26
  gRNA
ggtcttggcatgttcttgcc

SEQ ID NO: 18093 - DNA, 20 bp, Artificial Sequence
  MKO10018093_A_Fbxw26
  gRNA
gacagctttcagtaattgac

SEQ ID NO: 18094 - DNA, 20 bp, Artificial Sequence
  MKO10018094_A_Fbxw28
  gRNA
agttcttctttgacaaaaca

SEQ ID NO: 18095 - DNA, 20 bp, Artificial Sequence
  MKO10018095_A_Fbxw28
  gRNA
ttctacctgggatattcatg

SEQ ID NO: 18096 - DNA, 20 bp, Artificial Sequence
  MKO10018096_A_Fbxw28
  gRNA
tttacctagtgtgccgatga

SEQ ID NO: 18097 - DNA, 20 bp, Artificial Sequence
  MKO10018097_A_Fbxw2
  gRNA
tttgagacctcttcgttaat

SEQ ID NO: 18098 - DNA, 20 bp, Artificial Sequence
  MKO10018098_A_Fbxw2
  gRNA
actatgtccaattaacgaag

SEQ ID NO: 18099 - DNA, 20 bp, Artificial Sequence
  MKO10018099_A_Fbxw2
  gRNA
cggacttcgctgtgaaagta

SEQ ID NO: 18100 - DNA, 20 bp, Artificial Sequence
  MKO10018100_A_Fbxw4
  gRNA
agtttcacgcgctcctttac

SEQ ID NO: 18101 - DNA, 20 bp, Artificial Sequence
  MKO10018101_A_Fbxw4
  gRNA
tccagaccgaagaccgagtc

SEQ ID NO: 18102 - DNA, 20 bp, Artificial Sequence
  MKO10018102_A_Fbxw4
  gRNA
cggttcaagcttgcaccatc

SEQ ID NO: 18103 - DNA, 20 bp, Artificial Sequence
  MKO10018103_A_Fbxw5
  gRNA
gccgtaaacctttcttgacg

SEQ ID NO: 18104 - DNA, 20 bp, Artificial Sequence
  MKO10018104_A_Fbxw5
  gRNA
tgtttcgcacacgggacagc

SEQ ID NO: 18105 - DNA, 20 bp, Artificial Sequence
  MKO10018105_A_Fbxw5
  gRNA
gcgtgtgtttgatagcgtct

SEQ ID NO: 18106 - DNA, 20 bp, Artificial Sequence
  MKO10018106_A_Fbxw7
  gRNA
aagtctgagccgcttgcagc

SEQ ID NO: 18107 - DNA, 20 bp, Artificial Sequence
  MKO10018107_A_Fbxw7
  gRNA
ctcaggtccccaaaagttgt

SEQ ID NO: 18108 - DNA, 20 bp, Artificial Sequence
  MKO10018108_A_Fbxw7
  gRNA
ccgctgctgcccttgcccat

SEQ ID NO: 18109 - DNA, 20 bp, Artificial Sequence
  MKO10018109_A_Fbxw8
  gRNA
atattgatggccagttcgta

SEQ ID NO: 18110 - DNA, 20 bp, Artificial Sequence
  MKO10018110_A_Fbxw8
  gRNA
gattctccgattacacctgc

SEQ ID NO: 18111 - DNA, 20 bp, Artificial Sequence
  MKO10018111_A_Fbxw8
  gRNA
tgtgacgtgcgttctcacga

SEQ ID NO: 18112 - DNA, 20 bp, Artificial Sequence
  MKO10018112_A_Fbxw9
  gRNA
gcgaaccgagtacttctgcc

SEQ ID NO: 18113 - DNA, 20 bp, Artificial Sequence
  MKO10018113_A_Fbxw9
  gRNA
acaggttgacattccgatcc

SEQ ID NO: 18114 - DNA, 20 bp, Artificial Sequence
  MKO10018114_A_Fbxw9
  gRNA
gaaggatcccagccgagttc

SEQ ID NO: 18115 - DNA, 20 bp, Artificial Sequence
  MKO10018115_A_Fcamr
  gRNA
gtatttcccatctcgttctc

SEQ ID NO: 18116 - DNA, 20 bp, Artificial Sequence
  MKO10018116_A_Fcamr
  gRNA
cagtgagagccgcgcgccca

SEQ ID NO: 18117 - DNA, 20 bp, Artificial Sequence
  MKO10018117_A_Fcamr
  gRNA
gtgttcccagtcaccagtcg

SEQ ID NO: 18118 - DNA, 20 bp, Artificial Sequence
  MKO10018118_A_Fcer1a
  gRNA
gtgtacttgaatgtaacgca

SEQ ID NO: 18119 - DNA, 20 bp, Artificial Sequence
  MKO10018119_A_Fcer1a
  gRNA
gcctaagatagcccttgcag

SEQ ID NO: 18120 - DNA, 20 bp, Artificial Sequence
  MKO10018120_A_Fcer1a
  gRNA
gaagaactggaatgtccgca

SEQ ID NO: 18121 - DNA, 20 bp, Artificial Sequence
  MKO10018121_A_Fcer1g
  gRNA
ccttgagtcgacagtagagt

SEQ ID NO: 18122 - DNA, 20 bp, Artificial Sequence
  MKO10018122_A_Fcer1g
  gRNA
cctactctactgtcgactca

SEQ ID NO: 18123 - DNA, 20 bp, Artificial Sequence
  MKO10018123_A_Fcer1g
  gRNA
actccagatccaggtccgaa

SEQ ID NO: 18124 - DNA, 20 bp, Artificial Sequence
  MKO10018124_A_Fcer2a
  gRNA
gcacagcagcaacgctttct

SEQ ID NO: 18125 - DNA, 20 bp, Artificial Sequence
  MKO10018125_A_Fcer2a
  gRNA
cgttgctgctgtgcaagacg

SEQ ID NO: 18126 - DNA, 20 bp, Artificial Sequence
  MKO10018126_A_Fcer2a
  gRNA
cccagtctctcatgttacca

SEQ ID NO: 18127 - DNA, 20 bp, Artificial Sequence
  MKO10018127_A_Fcf1
  gRNA
attgggacagaagtttcgtg

SEQ ID NO: 18128 - DNA, 20 bp, Artificial Sequence
  MKO10018128_A_Fcf1
  gRNA
ttgtataactgattgtgtaa

SEQ ID NO: 18129 - DNA, 20 bp, Artificial Sequence
  MKO10018129_A_Fcf1
  gRNA
tcgacaaggatgtggtaagg

SEQ ID NO: 18130 - DNA, 20 bp, Artificial Sequence
  MKO10018130_A_Fcgbp
  gRNA
ccgcactatgtgagcttcga

SEQ ID NO: 18131 - DNA, 20 bp, Artificial Sequence
  MKO10018131_A_Fcgbp
  gRNA
tggaatccttgctgatcccg

SEQ ID NO: 18132 - DNA, 20 bp, Artificial Sequence
  MKO10018132_A_Fcgbp
  gRNA
gggcataggcgctaaggctc

SEQ ID NO: 18133 - DNA, 20 bp, Artificial Sequence
  MKO10018133_A_Fcgr1
  gRNA
ctctttccgcccttgctata

SEQ ID NO: 18134 - DNA, 20 bp, Artificial Sequence
  MKO10018134_A_Fcgr1
  gRNA
ttcaggacagtggcgaatac

SEQ ID NO: 18135 - DNA, 20 bp, Artificial Sequence
  MKO10018135_A_Fcgr1
  gRNA
tctcttgcagttccagtcgg

SEQ ID NO: 18136 - DNA, 20 bp, Artificial Sequence
  MKO10018136_A_Fcgr2b
  gRNA
tccggatggacctcccattg

SEQ ID NO: 18137 - DNA, 20 bp, Artificial Sequence
  MKO10018137_A_Fcgr2b
  gRNA
gccgttcctactgatcccca

SEQ ID NO: 18138 - DNA, 20 bp, Artificial Sequence
  MKO10018138_A_Fcgr2b
  gRNA
tggtcaaactcgagcccccg

SEQ ID NO: 18139 - DNA, 20 bp, Artificial Sequence
  MKO10018139_A_Fcgr3
  gRNA
ttcaaaccccgagggattac

SEQ ID NO: 18140 - DNA, 20 bp, Artificial Sequence
  MKO10018140_A_Fcgr3
  gRNA
gacttcctccagtaatccct

SEQ ID NO: 18141 - DNA, 20 bp, Artificial Sequence
  MKO10018141_A_Fcgr3
  gRNA
ccttaaacgtgtagctggat

SEQ ID NO: 18142 - DNA, 20 bp, Artificial Sequence
  MKO10018142_A_Fcgr4
  gRNA
accgcctaggcttatacgaa

SEQ ID NO: 18143 - DNA, 20 bp, Artificial Sequence
  MKO10018143_A_Fcgr4
  gRNA
gtgggatgaggctttcgtta

SEQ ID NO: 18144 - DNA, 20 bp, Artificial Sequence
  MKO10018144_A_Fcgr4
  gRNA
ccgaggacaattctatcaag

SEQ ID NO: 18145 - DNA, 20 bp, Artificial Sequence
  MKO10018145_A_Fcgrt
  gRNA
gccgccgtctatgcgcctga

SEQ ID NO: 18146 - DNA, 20 bp, Artificial Sequence
  MKO10018146_A_Fcgrt
  gRNA
ccagtccaattgccgattct

SEQ ID NO: 18147 - DNA, 20 bp, Artificial Sequence
  MKO10018147_A_Fcgrt
  gRNA
ttagcaacgatttccgtctc

SEQ ID NO: 18148 - DNA, 20 bp, Artificial Sequence
  MKO10018148_A_Fcho1
  gRNA
ccccatgggggtcccgttgc

SEQ ID NO: 18149 - DNA, 20 bp, Artificial Sequence
  MKO10018149_A_Fcho1
  gRNA
gaattacttgagccgctgta

SEQ ID NO: 18150 - DNA, 20 bp, Artificial Sequence
  MKO10018150_A_Fcho1
  gRNA
ccaggacctttgccccgctc

SEQ ID NO: 18151 - DNA, 20 bp, Artificial Sequence
  MKO10018151_A_Fcho2
  gRNA
cagactaaagaagaagtcgc

SEQ ID NO: 18152 - DNA, 20 bp, Artificial Sequence
  MKO10018152_A_Fcho2
  gRNA
cactgccaaatgtgtagaac

SEQ ID NO: 18153 - DNA, 20 bp, Artificial Sequence
  MKO10018153_A_Fcho2
  gRNA
ttagaacatttgcaccaatg

SEQ ID NO: 18154 - DNA, 20 bp, Artificial Sequence
  MKO10018154_A_Fchsd1
  gRNA
cgcgatatcggtcagacgcc

SEQ ID NO: 18155 - DNA, 20 bp, Artificial Sequence
  MKO10018155_A_Fchsd1
  gRNA
gaccgatatcgcgacctagc

SEQ ID NO: 18156 - DNA, 20 bp, Artificial Sequence
  MKO10018156_A_Fchsd1
  gRNA
ctggccatactcccgttcaa

SEQ ID NO: 18157 - DNA, 20 bp, Artificial Sequence
  MKO10018157_A_Fchsd2
  gRNA
gcatcatgcagccgccgccg

SEQ ID NO: 18158 - DNA, 20 bp, Artificial Sequence
  MKO10018158_A_Fchsd2
  gRNA
ggtattgactagccaacttc

SEQ ID NO: 18159 - DNA, 20 bp, Artificial Sequence
  MKO10018159_A_Fchsd2
  gRNA
tgcgcccttaccttcctcgg

SEQ ID NO: 18160 - DNA, 20 bp, Artificial Sequence
  MKO10018160_A_Fcna
  gRNA
tatgcagatgttaaggtcgt

SEQ ID NO: 18161 - DNA, 20 bp, Artificial Sequence
  MKO10018161_A_Fcna
  gRNA
agattgctacctcttccagc

SEQ ID NO: 18162 - DNA, 20 bp, Artificial Sequence
  MKO10018162_A_Fcna
  gRNA
ccaggggagaaaggcgatac

SEQ ID NO: 18163 - DNA, 20 bp, Artificial Sequence
  MKO10018163_A_Fcnb
  gRNA
acctgtagcacatgactgag

SEQ ID NO: 18164 - DNA, 20 bp, Artificial Sequence
  MKO10018164_A_Fcnb
  gRNA
aagcagctcaccatccttca

SEQ ID NO: 18165 - DNA, 20 bp, Artificial Sequence
  MKO10018165_A_Fcnb
  gRNA
ttgttacctttgggtccagt

SEQ ID NO: 18166 - DNA, 20 bp, Artificial Sequence
  MKO10018166_A_Fcrl1
  gRNA
gagccaccacctcacttcgt

SEQ ID NO: 18167 - DNA, 20 bp, Artificial Sequence
  MKO10018167_A_Fcrl1
  gRNA
tctcgccctgtccttacgtt

SEQ ID NO: 18168 - DNA, 20 bp, Artificial Sequence
  MKO10018168_A_Fcrl1
  gRNA
ctctatcaaccgagcagatg

SEQ ID NO: 18169 - DNA, 20 bp, Artificial Sequence
  MKO10018169_A_Fcrl5
  gRNA
gacttgaactacgaccgtat

SEQ ID NO: 18170 - DNA, 20 bp, Artificial Sequence
  MKO10018170_A_Fcrl5
  gRNA
gaatgtgaaactccgaggag

SEQ ID NO: 18171 - DNA, 20 bp, Artificial Sequence
  MKO10018171_A_Fcrl5
  gRNA
gtctgacacgtcagggtcac

SEQ ID NO: 18172 - DNA, 20 bp, Artificial Sequence
  MKO10018172_A_Fcrl6
  gRNA
attcaccaattcagagacga

SEQ ID NO: 18173 - DNA, 20 bp, Artificial Sequence
  MKO10018173_A_Fcrl6
  gRNA
attcttggggtccaccttta

SEQ ID NO: 18174 - DNA, 20 bp, Artificial Sequence
  MKO10018174_A_Fcrl6
  gRNA
ctccctcctcgcctcagtaa

SEQ ID NO: 18175 - DNA, 20 bp, Artificial Sequence
  MKO10018175_A_Fcrla
  gRNA
tcaggttatcttctaccgag

SEQ ID NO: 18176 - DNA, 20 bp, Artificial Sequence
  MKO10018176_A_Fcrla
  gRNA
tggttctgcactgccgcgcc

SEQ ID NO: 18177 - DNA, 20 bp, Artificial Sequence
  MKO10018177_A_Fcrla
  gRNA
atgacccaatccagtgaagc

SEQ ID NO: 18178 - DNA, 20 bp, Artificial Sequence
  MKO10018178_A_Fcrlb
  gRNA
cgattcgagctcctcgacct

SEQ ID NO: 18179 - DNA, 20 bp, Artificial Sequence
  MKO10018179_A_Fcrlb
  gRNA
tcgaggagctcgaatcgtac

SEQ ID NO: 18180 - DNA, 20 bp, Artificial Sequence
  MKO10018180_A_Fcrlb
  gRNA
cgactttgtcgtaccagcca

SEQ ID NO: 18181 - DNA, 20 bp, Artificial Sequence
  MKO10018181_A_Fcrls
  gRNA
tcaccggactggactccgac

SEQ ID NO: 18182 - DNA, 20 bp, Artificial Sequence
  MKO10018182_A_Fcrls
  gRNA
accgcgtcttgcattcctaa

SEQ ID NO: 18183 - DNA, 20 bp, Artificial Sequence
  MKO10018183_A_Fcrls
  gRNA
agctggagatccctactatc

SEQ ID NO: 18184 - DNA, 20 bp, Artificial Sequence
  MKO10018184_A_Fdft1
  gRNA
cagtactgccactacgttgc

SEQ ID NO: 18185 - DNA, 20 bp, Artificial Sequence
  MKO10018185_A_Fdft1
  gRNA
ccaccagcccagcaacgtag

SEQ ID NO: 18186 - DNA, 20 bp, Artificial Sequence
  MKO10018186_A_Fdft1
  gRNA
agtgctggaggacttcccca

SEQ ID NO: 18187 - DNA, 20 bp, Artificial Sequence
  MKO10018187_A_Fdps
  gRNA
agtgggctggtgtgtagaac

SEQ ID NO: 18188 - DNA, 20 bp, Artificial Sequence
  MKO10018188_A_Fdps
  gRNA
ctaacagccaggcataggct

SEQ ID NO: 18189 - DNA, 20 bp, Artificial Sequence
  MKO10018189_A_Fdps
  gRNA
ctgcccgatctctgtctgat

SEQ ID NO: 18190 - DNA, 20 bp, Artificial Sequence
  MKO10018190_A_Fdx1l
  gRNA
tttccaggcgagcggcgtgc

SEQ ID NO: 18191 - DNA, 20 bp, Artificial Sequence
  MKO10018191_A_Fdx1l
  gRNA
ccgctctggcaagcggatcc

SEQ ID NO: 18192 - DNA, 20 bp, Artificial Sequence
  MKO10018192_A_Fdx1l
  gRNA
tcccagggaggacgacatgt

SEQ ID NO: 18193 - DNA, 20 bp, Artificial Sequence
  MKO10018193_A_Fdx1
  gRNA
tcgttagcgtctcgccatct

SEQ ID NO: 18194 - DNA, 20 bp, Artificial Sequence
  MKO10018194_A_Fdx1
  gRNA
aaggccgcggaaagggacgg

SEQ ID NO: 18195 - DNA, 20 bp, Artificial Sequence
  MKO10018195_A_Fdx1
  gRNA
cagggttatggcggccgctc

SEQ ID NO: 18196 - DNA, 20 bp, Artificial Sequence
  MKO10018196_A_Fdxacb1
  gRNA
atgccttgccagccgacgat

SEQ ID NO: 18197 - DNA, 20 bp, Artificial Sequence
  MKO10018197_A_Fdxacb1
  gRNA
tcgatcaaaatccctatcgt

SEQ ID NO: 18198 - DNA, 20 bp, Artificial Sequence
  MKO10018198_A_Fdxacb1
  gRNA
gctacatgtttcacctcgat

SEQ ID NO: 18199 - DNA, 20 bp, Artificial Sequence
  MKO10018199_A_Fdxr
  gRNA
gtgccacaccaaagcgcacc

SEQ ID NO: 18200 - DNA, 20 bp, Artificial Sequence
  MKO10018200_A_Fdxr
  gRNA
actccaggcagctcctcgcc

SEQ ID NO: 18201 - DNA, 20 bp, Artificial Sequence
  MKO10018201_A_Fdxr
  gRNA
cacagcccaacacttgttaa

SEQ ID NO: 18202 - DNA, 20 bp, Artificial Sequence
  MKO10018202_A_Fech
  gRNA
gttcggcgtttggcgatgaa

SEQ ID NO: 18203 - DNA, 20 bp, Artificial Sequence
  MKO10018203_A_Fech
  gRNA
ctgccaccgcagcacccgac

SEQ ID NO: 18204 - DNA, 20 bp, Artificial Sequence
  MKO10018204_A_Fech
  gRNA
ggcatgatgtaccttctccg

SEQ ID NO: 18205 - DNA, 20 bp, Artificial Sequence
  MKO10018205_A_Fem1a
  gRNA
cctggacgtggtacgctacc

SEQ ID NO: 18206 - DNA, 20 bp, Artificial Sequence
  MKO10018206_A_Fem1a
  gRNA
tgggctaggctcaatgcaac

SEQ ID NO: 18207 - DNA, 20 bp, Artificial Sequence
  MKO10018207_A_Fem1a
  gRNA
gggcgtcttcccatcgctgc

SEQ ID NO: 18208 - DNA, 20 bp, Artificial Sequence
  MKO10018208_A_Fem1b
  gRNA
agcggatatcgctctctgac

SEQ ID NO: 18209 - DNA, 20 bp, Artificial Sequence
  MKO10018209_A_Fem1b
  gRNA
gagcgatatccgctacctgc

SEQ ID NO: 18210 - DNA, 20 bp, Artificial Sequence
  MKO10018210_A_Fem1b
  gRNA
ccgctagacaaaagtacaac

SEQ ID NO: 18211 - DNA, 20 bp, Artificial Sequence
  MKO10018211_A_Fem1c
  gRNA
tattcagagccgcgatatgt

SEQ ID NO: 18212 - DNA, 20 bp, Artificial Sequence
  MKO10018212_A_Fem1c
  gRNA
cttcgagccgcgtgcttcga

SEQ ID NO: 18213 - DNA, 20 bp, Artificial Sequence
  MKO10018213_A_Fem1c
  gRNA
tgtagaacacaaagccgatt

SEQ ID NO: 18214 - DNA, 20 bp, Artificial Sequence
  MKO10018214_A_Fen1
  gRNA
acgcctcgatgatttcttca

SEQ ID NO: 18215 - DNA, 20 bp, Artificial Sequence
  MKO10018215_A_Fen1
  gRNA
agtaccccgttccagagaac

SEQ ID NO: 18216 - DNA, 20 bp, Artificial Sequence
  MKO10018216_A_Fen1
  gRNA
gggagcggggaagttccgaa

SEQ ID NO: 18217 - DNA, 20 bp, Artificial Sequence
  MKO10018217_A_Fer1l4
  gRNA
agacgattacctgtctcgaa

SEQ ID NO: 18218 - DNA, 20 bp, Artificial Sequence
  MKO10018218_A_Fer1l4
  gRNA
gtagccgcgtgttcagcccc

SEQ ID NO: 18219 - DNA, 20 bp, Artificial Sequence
  MKO10018219_A_Fer1l4
  gRNA
ttgggacacccattcgagac

SEQ ID NO: 18220 - DNA, 20 bp, Artificial Sequence
  MKO10018220_A_Fer1l5
  gRNA
cactgtaccgctcaagcggc

SEQ ID NO: 18221 - DNA, 20 bp, Artificial Sequence
  MKO10018221_A_Fer1l5
  gRNA
cgtatatttgggccacatgt

SEQ ID NO: 18222 - DNA, 20 bp, Artificial Sequence
  MKO10018222_A_Fer1l5
  gRNA
gcccctcacagaccctaatc

SEQ ID NO: 18223 - DNA, 20 bp, Artificial Sequence
  MKO10018223_A_Ferd3l
  gRNA
tattacttatgcccagcgcc

SEQ ID NO: 18224 - DNA, 20 bp, Artificial Sequence
  MKO10018224_A_Ferd3l
  gRNA
tgggtacctttctgcgcagc

SEQ ID NO: 18225 - DNA, 20 bp, Artificial Sequence
  MKO10018225_A_Ferd3l
  gRNA
cctcttcctctcgcgaatgt

SEQ ID NO: 18226 - DNA, 20 bp, Artificial Sequence
  MKO10018226_A_Fermt1
  gRNA
cagccgaaaagctgacgcgc

SEQ ID NO: 18227 - DNA, 20 bp, Artificial Sequence
  MKO10018227_A_Fermt1
  gRNA
ggattcctcacgatccctta

SEQ ID NO: 18228 - DNA, 20 bp, Artificial Sequence
  MKO10018228_A_Fermt1
  gRNA
gcacggtcttggcattgggc

SEQ ID NO: 18229 - DNA, 20 bp, Artificial Sequence
  MKO10018229_A_Fermt2
  gRNA
ccatcatgagcgtcgtaagt

SEQ ID NO: 18230 - DNA, 20 bp, Artificial Sequence
  MKO10018230_A_Fermt2
  gRNA
cctacttacgacgctcatga

SEQ ID NO: 18231 - DNA, 20 bp, Artificial Sequence
  MKO10018231_A_Fermt2
  gRNA
caagcgcttcgtcttcagac

SEQ ID NO: 18232 - DNA, 20 bp, Artificial Sequence
  MKO10018232_A_Fermt3
  gRNA
gcgctgtccgagaagtgtgc

SEQ ID NO: 18233 - DNA, 20 bp, Artificial Sequence
  MKO10018233_A_Fermt3
  gRNA
ggtcctcacagatcgcaagc

SEQ ID NO: 18234 - DNA, 20 bp, Artificial Sequence
  MKO10018234_A_Fermt3
  gRNA
gctggacaagtacgggattc

SEQ ID NO: 18235 - DNA, 20 bp, Artificial Sequence
  MKO10018235_A_Fert2
  gRNA
ccagaatctgtatcgattcg

SEQ ID NO: 18236 - DNA, 20 bp, Artificial Sequence
  MKO10018236_A_Fert2
  gRNA
ggtaccagtcatgctccgcc

SEQ ID NO: 18237 - DNA, 20 bp, Artificial Sequence
  MKO10018237_A_Fert2
  gRNA
gaagatccgagtaccgactt

SEQ ID NO: 18238 - DNA, 20 bp, Artificial Sequence
  MKO10018238_A_Fes
  gRNA
ccaccacaaccgctacgtcc

SEQ ID NO: 18239 - DNA, 20 bp, Artificial Sequence
  MKO10018239_A_Fes
  gRNA
gaaagacgtacaacgagcag

SEQ ID NO: 18240 - DNA, 20 bp, Artificial Sequence
  MKO10018240_A_Fes
  gRNA
cagctcacccatattgtcgc

SEQ ID NO: 18241 - DNA, 20 bp, Artificial Sequence
  MKO10018241_A_Fetub
  gRNA
gaactttgcaagcgactccg

SEQ ID NO: 18242 - DNA, 20 bp, Artificial Sequence
  MKO10018242_A_Fetub
  gRNA
tataactgtacacttcgccc

SEQ ID NO: 18243 - DNA, 20 bp, Artificial Sequence
  MKO10018243_A_Fetub
  gRNA
cgaagtgtacagttataagc

SEQ ID NO: 18244 - DNA, 20 bp, Artificial Sequence
  MKO10018244_A_Fev
  gRNA
gccctcccacgcgatgcaac

SEQ ID NO: 18245 - DNA, 20 bp, Artificial Sequence
  MKO10018245_A_Fev
  gRNA
tcggcgggcgttgcgcccgc

SEQ ID NO: 18246 - DNA, 20 bp, Artificial Sequence
  MKO10018246_A_Fev
  gRNA
ctgagccccgcggtacagaa

SEQ ID NO: 18247 - DNA, 20 bp, Artificial Sequence
  MKO10018247_A_Fez1
  gRNA
ccattcagagcttcaatgtt

SEQ ID NO: 18248 - DNA, 20 bp, Artificial Sequence
  MKO10018248_A_Fez1
  gRNA
ctcaatgagcaccgtgatga

SEQ ID NO: 18249 - DNA, 20 bp, Artificial Sequence
  MKO10018249_A_Fez1
  gRNA
ctagggctgagacacatgtc

SEQ ID NO: 18250 - DNA, 20 bp, Artificial Sequence
  MKO10018250_A_Fez2
  gRNA
cgaactcgagttcatctcgc

SEQ ID NO: 18251 - DNA, 20 bp, Artificial Sequence
  MKO10018251_A_Fez2
  gRNA
cggcttgctctttgacgcct

SEQ ID NO: 18252 - DNA, 20 bp, Artificial Sequence
  MKO10018252_A_Fez2
  gRNA
gtctcgtcgtcttctgggtc

SEQ ID NO: 18253 - DNA, 20 bp, Artificial Sequence
  MKO10018253_A_Fezf1
  gRNA
tgcgagcgtgaacatccacc

SEQ ID NO: 18254 - DNA, 20 bp, Artificial Sequence
  MKO10018254_A_Fezf1
  gRNA
gcgcgccatgattcgttcga

SEQ ID NO: 18255 - DNA, 20 bp, Artificial Sequence
  MKO10018255_A_Fezf1
  gRNA
tttgtagcccgcgtgaattc

SEQ ID NO: 18256 - DNA, 20 bp, Artificial Sequence
  MKO10018256_A_Fezf2
  gRNA
cccgagcgcctttcgagccc

SEQ ID NO: 18257 - DNA, 20 bp, Artificial Sequence
  MKO10018257_A_Fezf2
  gRNA
tttctctatcgagcgcatca

SEQ ID NO: 18258 - DNA, 20 bp, Artificial Sequence
  MKO10018258_A_Fezf2
  gRNA
gcgcaaacttcatgacagcg

SEQ ID NO: 18259 - DNA, 20 bp, Artificial Sequence
  MKO10018259_A_Ffar1
  gRNA
tccggaggccccgctattcc

SEQ ID NO: 18260 - DNA, 20 bp, Artificial Sequence
  MKO10018260_A_Ffar1
  gRNA
gcagaccggggagccattca

SEQ ID NO: 18261 - DNA, 20 bp, Artificial Sequence
  MKO10018261_A_Ffar1
  gRNA
gccctataatgcctccaatg

SEQ ID NO: 18262 - DNA, 20 bp, Artificial Sequence
  MKO10018262_A_Ffar2
  gRNA
tgcagtacaagttatcccgc

SEQ ID NO: 18263 - DNA, 20 bp, Artificial Sequence
  MKO10018263_A_Ffar2
  gRNA
tgtggtactgcccgtacgac

SEQ ID NO: 18264 - DNA, 20 bp, Artificial Sequence
  MKO10018264_A_Ffar2
  gRNA
aagatcgtgtgcgcgctgac

SEQ ID NO: 18265 - DNA, 20 bp, Artificial Sequence
  MKO10018265_A_Ffar3
  gRNA
cgccggcgcaagaggataat

SEQ ID NO: 18266 - DNA, 20 bp, Artificial Sequence
  MKO10018266_A_Ffar3
  gRNA
caactcttgtatcgaccccc

SEQ ID NO: 18267 - DNA, 20 bp, Artificial Sequence
  MKO10018267_A_Ffar3
  gRNA
agccgactttcatcaactcc

SEQ ID NO: 18268 - DNA, 20 bp, Artificial Sequence
  MKO10018268_A_Ffar4
  gRNA
ctctagtgctcgtcgtgcgc

SEQ ID NO: 18269 - DNA, 20 bp, Artificial Sequence
  MKO10018269_A_Ffar4
  gRNA
cgtcgtggagaccaccgttc

SEQ ID NO: 18270 - DNA, 20 bp, Artificial Sequence
  MKO10018270_A_Ffar4
  gRNA
tgtacaacatgtcgctgttc

SEQ ID NO: 18271 - DNA, 20 bp, Artificial Sequence
  MKO10018271_A_Fga
  gRNA
gttgattgacgaagccaacc

SEQ ID NO: 18272 - DNA, 20 bp, Artificial Sequence
  MKO10018272_A_Fga
  gRNA
gttgatagacatgaagcgcc

SEQ ID NO: 18273 - DNA, 20 bp, Artificial Sequence
  MKO10018273_A_Fga
  gRNA
agtacgtggcccaagagttg

SEQ ID NO: 18274 - DNA, 20 bp, Artificial Sequence
  MKO10018274_A_Fgb
  gRNA
ctatcgagcccgtccagcca

SEQ ID NO: 18275 - DNA, 20 bp, Artificial Sequence
  MKO10018275_A_Fgb
  gRNA
tgttgcaatgtacatcccgt

SEQ ID NO: 18276 - DNA, 20 bp, Artificial Sequence
  MKO10018276_A_Fgb
  gRNA
ccgattccagacggatagct

SEQ ID NO: 18277 - DNA, 20 bp, Artificial Sequence
  MKO10018277_A_Fgd1
  gRNA
caacggcttcgctcagatcc

SEQ ID NO: 18278 - DNA, 20 bp, Artificial Sequence
  MKO10018278_A_Fgd1
  gRNA
tgggggtcggccaaagctac

SEQ ID NO: 18279 - DNA, 20 bp, Artificial Sequence
  MKO10018279_A_Fgd1
  gRNA
ctggatctgagcgaagccgt

SEQ ID NO: 18280 - DNA, 20 bp, Artificial Sequence
  MKO10018280_A_Fgd2
  gRNA
ctgggcgtggaaacgataga

SEQ ID NO: 18281 - DNA, 20 bp, Artificial Sequence
  MKO10018281_A_Fgd2
  gRNA
atgagcttcaccacgtcctc

SEQ ID NO: 18282 - DNA, 20 bp, Artificial Sequence
  MKO10018282_A_Fgd2
  gRNA
ccgcggaactgctggccacg

SEQ ID NO: 18283 - DNA, 20 bp, Artificial Sequence
  MKO10018283_A_Fgd3
  gRNA
ccttaaactgcggagaacgc

SEQ ID NO: 18284 - DNA, 20 bp, Artificial Sequence
  MKO10018284_A_Fgd3
  gRNA
ccagcgttctccgcagttta

SEQ ID NO: 18285 - DNA, 20 bp, Artificial Sequence
  MKO10018285_A_Fgd3
  gRNA
cgtaggcttcctccgtgtgc

SEQ ID NO: 18286 - DNA, 20 bp, Artificial Sequence
  MKO10018286_A_Fgd4
  gRNA
gtccaacgtatccaatccca

SEQ ID NO: 18287 - DNA, 20 bp, Artificial Sequence
  MKO10018287_A_Fgd4
  gRNA
aaaacgttacctgatctagg

SEQ ID NO: 18288 - DNA, 20 bp, Artificial Sequence
  MKO10018288_A_Fgd4
  gRNA
ttgtgcagccactacaccat

SEQ ID NO: 18289 - DNA, 20 bp, Artificial Sequence
  MKO10018289_A_Fgd5
  gRNA
tagagcccttgtcatcgctc

SEQ ID NO: 18290 - DNA, 20 bp, Artificial Sequence
  MKO10018290_A_Fgd5
  gRNA
agatagctgggagctcccgc

SEQ ID NO: 18291 - DNA, 20 bp, Artificial Sequence
  MKO10018291_A_Fgd5
  gRNA
cgcctacactgagccctaca

SEQ ID NO: 18292 - DNA, 20 bp, Artificial Sequence
  MKO10018292_A_Fgd6
  gRNA
ttggtcttcttcgttaaccg

SEQ ID NO: 18293 - DNA, 20 bp, Artificial Sequence
  MKO10018293_A_Fgd6
  gRNA
acgcagcagcgatcaccttg

SEQ ID NO: 18294 - DNA, 20 bp, Artificial Sequence
  MKO10018294_A_Fgd6
  gRNA
tggctcgcctttactggact

SEQ ID NO: 18295 - DNA, 20 bp, Artificial Sequence
  MKO10018295_A_Fgf10
  gRNA
ctcaatcgtgagaaagtact

SEQ ID NO: 18296 - DNA, 20 bp, Artificial Sequence
  MKO10018296_A_Fgf10
  gRNA
cttctatgtttggatcgtca

SEQ ID NO: 18297 - DNA, 20 bp, Artificial Sequence
  MKO10018297_A_Fgf10
  gRNA
ccgcacatgccttcccgcac

SEQ ID NO: 18298 - DNA, 20 bp, Artificial Sequence
  MKO10018298_A_Fgf11
  gRNA
ctctaccgtcagcgtcgttc

SEQ ID NO: 18299 - DNA, 20 bp, Artificial Sequence
  MKO10018299_A_Fgf11
  gRNA
cccggccagaacgacgctga

SEQ ID NO: 18300 - DNA, 20 bp, Artificial Sequence
  MKO10018300_A_Fgf11
  gRNA
tacctccaggcgaatcccga

SEQ ID NO: 18301 - DNA, 20 bp, Artificial Sequence
  MKO10018301_A_Fgf12
  gRNA
ctgattcctgctggcgatac

SEQ ID NO: 18302 - DNA, 20 bp, Artificial Sequence
  MKO10018302_A_Fgf12
  gRNA
ctcaaccctgtatcgccagc

SEQ ID NO: 18303 - DNA, 20 bp, Artificial Sequence
  MKO10018303_A_Fgf12
  gRNA
gaaccatcactacacgaaat

SEQ ID NO: 18304 - DNA, 20 bp, Artificial Sequence
  MKO10018304_A_Fgf13
  gRNA
ctggctacgttgattcgttg

SEQ ID NO: 18305 - DNA, 20 bp, Artificial Sequence
  MKO10018305_A_Fgf13
  gRNA
cgagggatacttgtacacct

SEQ ID NO: 18306 - DNA, 20 bp, Artificial Sequence
  MKO10018306_A_Fgf13
  gRNA
gccatctctgcacgatctca

SEQ ID NO: 18307 - DNA, 20 bp, Artificial Sequence
  MKO10018307_A_Fgf14
  gRNA
tacttgcagatgcaccccga

SEQ ID NO: 18308 - DNA, 20 bp, Artificial Sequence
  MKO10018308_A_Fgf14
  gRNA
ttccatcgagagctccatcg

SEQ ID NO: 18309 - DNA, 20 bp, Artificial Sequence
  MKO10018309_A_Fgf14
  gRNA
actgcgcgttgttgccatcc

SEQ ID NO: 18310 - DNA, 20 bp, Artificial Sequence
  MKO10018310_A_Fgf15
  gRNA
tcgtcttcagagcgaccgcg

SEQ ID NO: 18311 - DNA, 20 bp, Artificial Sequence
  MKO10018311_A_Fgf15
  gRNA
agatttgttggaattccgcg

SEQ ID NO: 18312 - DNA, 20 bp, Artificial Sequence
  MKO10018312_A_Fgf15
  gRNA
gatactcacttcgttcgttt

SEQ ID NO: 18313 - DNA, 20 bp, Artificial Sequence
  MKO10018313_A_Fgf16
  gRNA
cgagcgcctgggccagatcg

SEQ ID NO: 18314 - DNA, 20 bp, Artificial Sequence
  MKO10018314_A_Fgf16
  gRNA
ccagagatctcttccgctat

SEQ ID NO: 18315 - DNA, 20 bp, Artificial Sequence
  MKO10018315_A_Fgf16
  gRNA
cacaggtccattacctatag

SEQ ID NO: 18316 - DNA, 20 bp, Artificial Sequence
  MKO10018316_A_Fgf17
  gRNA
agtgcgcttggtcctgcgag

SEQ ID NO: 18317 - DNA, 20 bp, Artificial Sequence
  MKO10018317_A_Fgf17
  gRNA
cgtgttcaccgagatcgtac

SEQ ID NO: 18318 - DNA, 20 bp, Artificial Sequence
  MKO10018318_A_Fgf17
  gRNA
ctatgaccgaccagctgagc

SEQ ID NO: 18319 - DNA, 20 bp, Artificial Sequence
  MKO10018319_A_Fgf18
  gRNA
gcggatccgccgggatcgct

SEQ ID NO: 18320 - DNA, 20 bp, Artificial Sequence
  MKO10018320_A_Fgf18
  gRNA
taggatcagtgcccgtggcg

SEQ ID NO: 18321 - DNA, 20 bp, Artificial Sequence
  MKO10018321_A_Fgf18
  gRNA
catcatctcgagcccgcgtc

SEQ ID NO: 18322 - DNA, 20 bp, Artificial Sequence
  MKO10018322_A_Fgf1
  gRNA
ccttcgcagccctgaccgag

SEQ ID NO: 18323 - DNA, 20 bp, Artificial Sequence
  MKO10018323_A_Fgf1
  gRNA
cgcggtcctcggactcacta

SEQ ID NO: 18324 - DNA, 20 bp, Artificial Sequence
  MKO10018324_A_Fgf1
  gRNA
tgcgggcgaagtgtatataa

SEQ ID NO: 18325 - DNA, 20 bp, Artificial Sequence
  MKO10018325_A_Fgf20
  gRNA
tgcacggcatcctgcgccgc

SEQ ID NO: 18326 - DNA, 20 bp, Artificial Sequence
  MKO10018326_A_Fgf20
  gRNA
gcccaagaaagccccgactt

SEQ ID NO: 18327 - DNA, 20 bp, Artificial Sequence
  MKO10018327_A_Fgf20
  gRNA
tcgtccaacatatataaaca

SEQ ID NO: 18328 - DNA, 20 bp, Artificial Sequence
  MKO10018328_A_Fgf21
  gRNA
gccggacttgacccccaaac

SEQ ID NO: 18329 - DNA, 20 bp, Artificial Sequence
  MKO10018329_A_Fgf21
  gRNA
gtaaaggctctaccatgctc

SEQ ID NO: 18330 - DNA, 20 bp, Artificial Sequence
  MKO10018330_A_Fgf21
  gRNA
gaagagtcaggacgcatagc

SEQ ID NO: 18331 - DNA, 20 bp, Artificial Sequence
  MKO10018331_A_Fgf22
  gRNA
atctggagggcgacgtgcgc

SEQ ID NO: 18332 - DNA, 20 bp, Artificial Sequence
  MKO10018332_A_Fgf22
  gRNA
taggttccgggagcgcatcg

SEQ ID NO: 18333 - DNA, 20 bp, Artificial Sequence
  MKO10018333_A_Fgf22
  gRNA
cgcacgtcgccctccagatg

SEQ ID NO: 18334 - DNA, 20 bp, Artificial Sequence
  MKO10018334_A_Fgf23
  gRNA
acgttcagtgggtcgcgctc

SEQ ID NO: 18335 - DNA, 20 bp, Artificial Sequence
  MKO10018335_A_Fgf23
  gRNA
cactgaacgtgctcaagccg

SEQ ID NO: 18336 - DNA, 20 bp, Artificial Sequence
  MKO10018336_A_Fgf23
  gRNA
cgtcctctgatgtaatcatc

SEQ ID NO: 18337 - DNA, 20 bp, Artificial Sequence
  MKO10018337_A_Fgf2
  gRNA
acgccatccacgcggccgtc

SEQ ID NO: 18338 - DNA, 20 bp, Artificial Sequence
  MKO10018338_A_Fgf2
  gRNA
cgtgtgggtcgctcttctcg

SEQ ID NO: 18339 - DNA, 20 bp, Artificial Sequence
  MKO10018339_A_Fgf2
  gRNA
gtgtttcttctttgaacgac

SEQ ID NO: 18340 - DNA, 20 bp, Artificial Sequence
  MKO10018340_A_Fgf3
  gRNA
gacgcgactacgacgcgatg

SEQ ID NO: 18341 - DNA, 20 bp, Artificial Sequence
  MKO10018341_A_Fgf3
  gRNA
ggtggcgtttacgagcacct

SEQ ID NO: 18342 - DNA, 20 bp, Artificial Sequence
  MKO10018342_A_Fgf3
  gRNA
ccattcaccgacacgtacca

SEQ ID NO: 18343 - DNA, 20 bp, Artificial Sequence
  MKO10018343_A_Fgf4
  gRNA
tacgaatcctacgcgtaccc

SEQ ID NO: 18344 - DNA, 20 bp, Artificial Sequence
  MKO10018344_A_Fgf4
  gRNA
cggcggtccctcggtccgcc

SEQ ID NO: 18345 - DNA, 20 bp, Artificial Sequence
  MKO10018345_A_Fgf4
  gRNA
ttctgcgtgccgcgtgccgt

SEQ ID NO: 18346 - DNA, 20 bp, Artificial Sequence
  MKO10018346_A_Fgf5
  gRNA
agcccttcggggcgccggac

SEQ ID NO: 18347 - DNA, 20 bp, Artificial Sequence
  MKO10018347_A_Fgf5
  gRNA
gacttctgcgaggctgcgac

SEQ ID NO: 18348 - DNA, 20 bp, Artificial Sequence
  MKO10018348_A_Fgf5
  gRNA
acccgcgcctcctaggaacc

SEQ ID NO: 18349 - DNA, 20 bp, Artificial Sequence
  MKO10018349_A_Fgf6
  gRNA
ccgcgccaacggcacgctac

SEQ ID NO: 18350 - DNA, 20 bp, Artificial Sequence
  MKO10018350_A_Fgf6
  gRNA
ctcggaacttgcattcgtcg

SEQ ID NO: 18351 - DNA, 20 bp, Artificial Sequence
  MKO10018351_A_Fgf6
  gRNA
ccagtagcgtgccgttggcg

SEQ ID NO: 18352 - DNA, 20 bp, Artificial Sequence
  MKO10018352_A_Fgf7
  gRNA
acactcgtagccgtttgctc

SEQ ID NO: 18353 - DNA, 20 bp, Artificial Sequence
  MKO10018353_A_Fgf7
  gRNA
actacactataatgcgcaaa

SEQ ID NO: 18354 - DNA, 20 bp, Artificial Sequence
  MKO10018354_A_Fgf7
  gRNA
gttcgttgccttaaatcaaa

SEQ ID NO: 18355 - DNA, 20 bp, Artificial Sequence
  MKO10018355_A_Fgf8
  gRNA
ctgtctctgcgccgcgaact

SEQ ID NO: 18356 - DNA, 20 bp, Artificial Sequence
  MKO10018356_A_Fgf8
  gRNA
caacaagcgcatcaacgcca

SEQ ID NO: 18357 - DNA, 20 bp, Artificial Sequence
  MKO10018357_A_Fgf8
  gRNA
cgttgatgcgcttgttggcc

SEQ ID NO: 18358 - DNA, 20 bp, Artificial Sequence
  MKO10018358_A_Fgf9
  gRNA
ggtaccgttcgggaacgtac

SEQ ID NO: 18359 - DNA, 20 bp, Artificial Sequence
  MKO10018359_A_Fgf9
  gRNA
aacaccggtacgttcccgaa

SEQ ID NO: 18360 - DNA, 20 bp, Artificial Sequence
  MKO10018360_A_Fgf9
  gRNA
cctggtcagcattcgcggtg

SEQ ID NO: 18361 - DNA, 20 bp, Artificial Sequence
  MKO10018361_A_Fgfbp1
  gRNA
cttcgtgtttccacgtgcgt

SEQ ID NO: 18362 - DNA, 20 bp, Artificial Sequence
  MKO10018362_A_Fgfbp1
  gRNA
acgacaaagaccagatctac

SEQ ID NO: 18363 - DNA, 20 bp, Artificial Sequence
  MKO10018363_A_Fgfbp1
  gRNA
atgtcgcctgtaacatgttg

SEQ ID NO: 18364 - DNA, 20 bp, Artificial Sequence
  MKO10018364_A_Fgfbp3
  gRNA
accgactgtcgcgaccgagc

SEQ ID NO: 18365 - DNA, 20 bp, Artificial Sequence
  MKO10018365_A_Fgfbp3
  gRNA
agtctgcattgcgcctaccg

SEQ ID NO: 18366 - DNA, 20 bp, Artificial Sequence
  MKO10018366_A_Fgfbp3
  gRNA
gtctccagtagtgcgcgcgc

SEQ ID NO: 18367 - DNA, 20 bp, Artificial Sequence
  MKO10018367_A_Fgfr1op2
  gRNA
gtacatcgtaacagctgcga

SEQ ID NO: 18368 - DNA, 20 bp, Artificial Sequence
  MKO10018368_A_Fgfr1op2
  gRNA
ggatgtgccgagatgcatcc

SEQ ID NO: 18369 - DNA, 20 bp, Artificial Sequence
  MKO10018369_A_Fgfr1op2
  gRNA
gatagaactgcggacatccc

SEQ ID NO: 18370 - DNA, 20 bp, Artificial Sequence
  MKO10018370_A_Fgfr1op
  gRNA
ttccttactgtgctagtttc

SEQ ID NO: 18371 - DNA, 20 bp, Artificial Sequence
  MKO10018371_A_Fgfr1op
  gRNA
ttcaagttctcattgaccaa

SEQ ID NO: 18372 - DNA, 20 bp, Artificial Sequence
  MKO10018372_A_Fgfr1op
  gRNA
ttaacagaacaaaactccat

SEQ ID NO: 18373 - DNA, 20 bp, Artificial Sequence
  MKO10018373_A_Fgfr1
  gRNA
aagttcaagtgcccgtcgag

SEQ ID NO: 18374 - DNA, 20 bp, Artificial Sequence
  MKO10018374_A_Fgfr1
  gRNA
cgacgacgatgactcctcct

SEQ ID NO: 18375 - DNA, 20 bp, Artificial Sequence
  MKO10018375_A_Fgfr1
  gRNA
ctcacgcctacggtttggtt

SEQ ID NO: 18376 - DNA, 20 bp, Artificial Sequence
  MKO10018376_A_Fgfr2
  gRNA
acctaccacctcgatgtcgt

SEQ ID NO: 18377 - DNA, 20 bp, Artificial Sequence
  MKO10018377_A_Fgfr2
  gRNA
agatgggattaccgtccacg

SEQ ID NO: 18378 - DNA, 20 bp, Artificial Sequence
  MKO10018378_A_Fgfr2
  gRNA
gattccccccagccggacag

SEQ ID NO: 18379 - DNA, 20 bp, Artificial Sequence
  MKO10018379_A_Fgfr3
  gRNA
agtgtggtaccctccgatcg

SEQ ID NO: 18380 - DNA, 20 bp, Artificial Sequence
  MKO10018380_A_Fgfr3
  gRNA
cacttcagtgtgcgtgtaac

SEQ ID NO: 18381 - DNA, 20 bp, Artificial Sequence
  MKO10018381_A_Fgfr3
  gRNA
ctccgcacaactcgctgctc

SEQ ID NO: 18382 - DNA, 20 bp, Artificial Sequence
  MKO10018382_A_Fgfr4
  gRNA
gtaccagtgacgaccacgct

SEQ ID NO: 18383 - DNA, 20 bp, Artificial Sequence
  MKO10018383_A_Fgfr4
  gRNA
caacgtaagattgtgtacga

SEQ ID NO: 18384 - DNA, 20 bp, Artificial Sequence
  MKO10018384_A_Fgfr4
  gRNA
cattcgctacagctatctcc

SEQ ID NO: 18385 - DNA, 20 bp, Artificial Sequence
  MKO10018385_A_Fgfrl1
  gRNA
cacgtgccgtgtatctaaca

SEQ ID NO: 18386 - DNA, 20 bp, Artificial Sequence
  MKO10018386_A_Fgfrl1
  gRNA
gcgggtggagtacggctccg

SEQ ID NO: 18387 - DNA, 20 bp, Artificial Sequence
  MKO10018387_A_Fgfrl1
  gRNA
cctcgcgccgcctcagccga

SEQ ID NO: 18388 - DNA, 20 bp, Artificial Sequence
  MKO10018388_A_Fggy
  gRNA
atgcccacatagtagcgact

SEQ ID NO: 18389 - DNA, 20 bp, Artificial Sequence
  MKO10018389_A_Fggy
  gRNA
ccacatgataacgtttcgag

SEQ ID NO: 18390 - DNA, 20 bp, Artificial Sequence
  MKO10018390_A_Fggy
  gRNA
tagtgtccgtgcggctctag

SEQ ID NO: 18391 - DNA, 20 bp, Artificial Sequence
  MKO10018391_A_Fgg
  gRNA
gatcattgtccacgtcggtt

SEQ ID NO: 18392 - DNA, 20 bp, Artificial Sequence
  MKO10018392_A_Fgg
  gRNA
gtcttcttaccaaaccgacg

SEQ ID NO: 18393 - DNA, 20 bp, Artificial Sequence
  MKO10018393_A_Fgg
  gRNA
cataccgaatgcttgtctcg

SEQ ID NO: 18394 - DNA, 20 bp, Artificial Sequence
  MKO10018394_A_Fgl1
  gRNA
gtttgacccgggtctcaagc

SEQ ID NO: 18395 - DNA, 20 bp, Artificial Sequence
  MKO10018395_A_Fgl1
  gRNA
gccagtattcgccattgttt

SEQ ID NO: 18396 - DNA, 20 bp, Artificial Sequence
  MKO10018396_A_Fgl1
  gRNA
gcaagcagttctcactctcg

SEQ ID NO: 18397 - DNA, 20 bp, Artificial Sequence
  MKO10018397_A_Fgl2
  gRNA
tgttccgaccactacgtgct

SEQ ID NO: 18398 - DNA, 20 bp, Artificial Sequence
  MKO10018398_A_Fgl2
  gRNA
gctgacgaccatcgagatcc

SEQ ID NO: 18399 - DNA, 20 bp, Artificial Sequence
  MKO10018399_A_Fgl2
  gRNA
agtggcaaatctaaccgttg

SEQ ID NO: 18400 - DNA, 20 bp, Artificial Sequence
  MKO10018400_A_Fgr
  gRNA
tcctggcctcatagtcgtac

SEQ ID NO: 18401 - DNA, 20 bp, Artificial Sequence
  MKO10018401_A_Fgr
  gRNA
gcattataagatccgaaagc

SEQ ID NO: 18402 - DNA, 20 bp, Artificial Sequence
  MKO10018402_A_Fgr
  gRNA
ctcgctttcccgaatgagaa

SEQ ID NO: 18403 - DNA, 20 bp, Artificial Sequence
  MKO10018403_A_Fh1
  gRNA
aattgggcgaactcacacgc

SEQ ID NO: 18404 - DNA, 20 bp, Artificial Sequence
  MKO10018404_A_Fh1
  gRNA
cgtgtagagttcgacacctt

SEQ ID NO: 18405 - DNA, 20 bp, Artificial Sequence
  MKO10018405_A_Fh1
  gRNA
aaaatccaaagagtttgcgc

SEQ ID NO: 18406 - DNA, 20 bp, Artificial Sequence
  MKO10018406_A_Fhad1
  gRNA
tgcagggatgacctacgagc

SEQ ID NO: 18407 - DNA, 20 bp, Artificial Sequence
  MKO10018407_A_Fhad1
  gRNA
gatcagagcgtctttatatt

SEQ ID NO: 18408 - DNA, 20 bp, Artificial Sequence
  MKO10018408_A_Fhad1
  gRNA
cgctctgatcatgaacctgc

SEQ ID NO: 18409 - DNA, 20 bp, Artificial Sequence
  MKO10018409_A_Fhdc1
  gRNA
cgatgtatccaagctctcgc

SEQ ID NO: 18410 - DNA, 20 bp, Artificial Sequence
  MKO10018410_A_Fhdc1
  gRNA
gtctcctcagtccatcgtag

SEQ ID NO: 18411 - DNA, 20 bp, Artificial Sequence
  MKO10018411_A_Fhdc1
  gRNA
ttgatagatatcctctacga

SEQ ID NO: 18412 - DNA, 20 bp, Artificial Sequence
  MKO10018412_A_Fhit
  gRNA
aggtcacggaagcgctctac

SEQ ID NO: 18413 - DNA, 20 bp, Artificial Sequence
  MKO10018413_A_Fhit
  gRNA
aacaaatcggccacttcatc

SEQ ID NO: 18414 - DNA, 20 bp, Artificial Sequence
  MKO10018414_A_Fhit
  gRNA
catcatagatgttgtcattc

SEQ ID NO: 18415 - DNA, 20 bp, Artificial Sequence
  MKO10018415_A_Fhl1
  gRNA
gttctgcgccaacacctgcg

SEQ ID NO: 18416 - DNA, 20 bp, Artificial Sequence
  MKO10018416_A_Fhl1
  gRNA
gttgcacttcacgcaatgtt

SEQ ID NO: 18417 - DNA, 20 bp, Artificial Sequence
  MKO10018417_A_Fhl1
  gRNA
acagtcgaacttctccgaca

SEQ ID NO: 18418 - DNA, 20 bp, Artificial Sequence
  MKO10018418_A_Fhl2
  gRNA
gaccacaggtacccgcaaga

SEQ ID NO: 18419 - DNA, 20 bp, Artificial Sequence
  MKO10018419_A_Fhl2
  gRNA
gcagtgcgtgcagtgcaaaa

SEQ ID NO: 18420 - DNA, 20 bp, Artificial Sequence
  MKO10018420_A_Fhl2
  gRNA
tgaatactcgtccaagtgcc

SEQ ID NO: 18421 - DNA, 20 bp, Artificial Sequence
  MKO10018421_A_Fhl3
  gRNA
cccgaaggaactgttctatg

SEQ ID NO: 18422 - DNA, 20 bp, Artificial Sequence
  MKO10018422_A_Fhl3
  gRNA
gctcatcggcaagggagcgc

SEQ ID NO: 18423 - DNA, 20 bp, Artificial Sequence
  MKO10018423_A_Fhl3
  gRNA
catagaacttgatctccgtc

SEQ ID NO: 18424 - DNA, 20 bp, Artificial Sequence
  MKO10018424_A_Fhl4
  gRNA
aatctgcacctatgggcttg

SEQ ID NO: 18425 - DNA, 20 bp, Artificial Sequence
  MKO10018425_A_Fhl4
  gRNA
tgtgttataaggagcaattc

SEQ ID NO: 18426 - DNA, 20 bp, Artificial Sequence
  MKO10018426_A_Fhl4
  gRNA
gcccataggtgcagattcca

SEQ ID NO: 18427 - DNA, 20 bp, Artificial Sequence
  MKO10018427_A_Fhl5
  gRNA
gggttcaggttctcggaaaa

SEQ ID NO: 18428 - DNA, 20 bp, Artificial Sequence
  MKO10018428_A_Fhl5
  gRNA
tttgctacaaaaaccgtcac

SEQ ID NO: 18429 - DNA, 20 bp, Artificial Sequence
  MKO10018429_A_Fhl5
  gRNA
ttatgccgcaagtgtggctc

SEQ ID NO: 18430 - DNA, 20 bp, Artificial Sequence
  MKO10018430_A_Fhod1
  gRNA
accctccgagtgcacgaatt

SEQ ID NO: 18431 - DNA, 20 bp, Artificial Sequence
  MKO10018431_A_Fhod1
  gRNA
tctgagttgcctgatccgcg

SEQ ID NO: 18432 - DNA, 20 bp, Artificial Sequence
  MKO10018432_A_Fhod1
  gRNA
ggaagcccacgttaatcctg

SEQ ID NO: 18433 - DNA, 20 bp, Artificial Sequence
  MKO10018433_A_Fhod3
  gRNA
gatccaggtaggcgccattg

SEQ ID NO: 18434 - DNA, 20 bp, Artificial Sequence
  MKO10018434_A_Fhod3
  gRNA
atcccgctgttccgccagcg

SEQ ID NO: 18435 - DNA, 20 bp, Artificial Sequence
  MKO10018435_A_Fhod3
  gRNA
ctgatagttctgatccgcct

SEQ ID NO: 18436 - DNA, 20 bp, Artificial Sequence
  MKO10018436_A_Fibcd1
  gRNA
ctcactcagtgcccgaagga

SEQ ID NO: 18437 - DNA, 20 bp, Artificial Sequence
  MKO10018437_A_Fibcd1
  gRNA
ttgtcacaggctctcggccg

SEQ ID NO: 18438 - DNA, 20 bp, Artificial Sequence
  MKO10018438_A_Fibcd1
  gRNA
ggcagtccccgtgctgacga

SEQ ID NO: 18439 - DNA, 20 bp, Artificial Sequence
  MKO10018439_A_Fibin
  gRNA
tcgactgaaaagcgactatc

SEQ ID NO: 18440 - DNA, 20 bp, Artificial Sequence
  MKO10018440_A_Fibin
  gRNA
tggagtaggcatccccgatc

SEQ ID NO: 18441 - DNA, 20 bp, Artificial Sequence
  MKO10018441_A_Fibin
  gRNA
ggaggatgctggacgcgtcc

SEQ ID NO: 18442 - DNA, 20 bp, Artificial Sequence
  MKO10018442_A_Fibp
  gRNA
gcgagtacgctccggaatct

SEQ ID NO: 18443 - DNA, 20 bp, Artificial Sequence
  MKO10018443_A_Fibp
  gRNA
ttactctcaagagctgccgg

SEQ ID NO: 18444 - DNA, 20 bp, Artificial Sequence
  MKO10018444_A_Fibp
  gRNA
gccaacaaccgctttgaaac

SEQ ID NO: 18445 - DNA, 20 bp, Artificial Sequence
  MKO10018445_A_Ficd
  gRNA
ctcccgttgccgtcgatgaa

SEQ ID NO: 18446 - DNA, 20 bp, Artificial Sequence
  MKO10018446_A_Ficd
  gRNA
atcccgcctgcatcaaaatc

SEQ ID NO: 18447 - DNA, 20 bp, Artificial Sequence
  MKO10018447_A_Ficd
  gRNA
gccccagacggagacccatt

SEQ ID NO: 18448 - DNA, 20 bp, Artificial Sequence
  MKO10018448_A_Fig4
  gRNA
cggtacatacctagcttcgt

SEQ ID NO: 18449 - DNA, 20 bp, Artificial Sequence
  MKO10018449_A_Fig4
  gRNA
acttggtggtaatcgacgac

SEQ ID NO: 18450 - DNA, 20 bp, Artificial Sequence
  MKO10018450_A_Fig4
  gRNA
tttctcaccccgacgaagct

SEQ ID NO: 18451 - DNA, 20 bp, Artificial Sequence
  MKO10018451_A_Figf
  gRNA
gatccgagcagcttctagtt

SEQ ID NO: 18452 - DNA, 20 bp, Artificial Sequence
  MKO10018452_A_Figf
  gRNA
gcaagcacttacaacccgta

SEQ ID NO: 18453 - DNA, 20 bp, Artificial Sequence
  MKO10018453_A_Figf
  gRNA
gctgcaaatcgcgcactctg

SEQ ID NO: 18454 - DNA, 20 bp, Artificial Sequence
  MKO10018454_A_Figla
  gRNA
cgtggtggagtagccgcctg

SEQ ID NO: 18455 - DNA, 20 bp, Artificial Sequence
  MKO10018455_A_Figla
  gRNA
ccaacgccaaagagcgtgaa

SEQ ID NO: 18456 - DNA, 20 bp, Artificial Sequence
  MKO10018456_A_Figla
  gRNA
ctatggccagcatacgccca

SEQ ID NO: 18457 - DNA, 20 bp, Artificial Sequence
  MKO10018457_A_Fignl1
  gRNA
gcaatatcgtcccaatgtac

SEQ ID NO: 18458 - DNA, 20 bp, Artificial Sequence
  MKO10018458_A_Fignl1
  gRNA
gcagcgtgcaaactgcgaat

SEQ ID NO: 18459 - DNA, 20 bp, Artificial Sequence
  MKO10018459_A_Fignl1
  gRNA
tagctcccaccacaagaatc

SEQ ID NO: 18460 - DNA, 20 bp, Artificial Sequence
  MKO10018460_A_Fignl2
  gRNA
gacgcgccgtcgtccctcgc

SEQ ID NO: 18461 - DNA, 20 bp, Artificial Sequence
  MKO10018461_A_Fignl2
  gRNA
ctcgagctgcggcgcgtagg

SEQ ID NO: 18462 - DNA, 20 bp, Artificial Sequence
  MKO10018462_A_Fignl2
  gRNA
gtagttgtagagcggcgccg

SEQ ID NO: 18463 - DNA, 20 bp, Artificial Sequence
  MKO10018463_A_Fign
  gRNA
atacttgccgagacgtctac

SEQ ID NO: 18464 - DNA, 20 bp, Artificial Sequence
  MKO10018464_A_Fign
  gRNA
ccgtccccgttgcatagttc

SEQ ID NO: 18465 - DNA, 20 bp, Artificial Sequence
  MKO10018465_A_Fign
  gRNA
aactgacataccataaacac

SEQ ID NO: 18466 - DNA, 20 bp, Artificial Sequence
  MKO10018466_A_Filip1l
  gRNA
ccaggatgacgaccctaatg

SEQ ID NO: 18467 - DNA, 20 bp, Artificial Sequence
  MKO10018467_A_Filip1l
  gRNA
acggacaatgtcacctattc

SEQ ID NO: 18468 - DNA, 20 bp, Artificial Sequence
  MKO10018468_A_Filip1l
  gRNA
gcggtgcttacctcattcat

SEQ ID NO: 18469 - DNA, 20 bp, Artificial Sequence
  MKO10018469_A_Filip1
  gRNA
cgaggacgaatacgaccagt

SEQ ID NO: 18470 - DNA, 20 bp, Artificial Sequence
  MKO10018470_A_Filip1
  gRNA
ggagacataccgccgcatgc

SEQ ID NO: 18471 - DNA, 20 bp, Artificial Sequence
  MKO10018471_A_Filip1
  gRNA
atcgcaaaggatcgaggaac

SEQ ID NO: 18472 - DNA, 20 bp, Artificial Sequence
  MKO10018472_A_Fip1l1
  gRNA
ctccacctcgccggccgaca

SEQ ID NO: 18473 - DNA, 20 bp, Artificial Sequence
  MKO10018473_A_Fip1l1
  gRNA
ggcggccatgtcggccggcg

SEQ ID NO: 18474 - DNA, 20 bp, Artificial Sequence
  MKO10018474_A_Fip1l1
  gRNA
tgcagtgctaatcctccatc

SEQ ID NO: 18475 - DNA, 20 bp, Artificial Sequence
  MKO10018475_A_Fis1
  gRNA
cgtgggcaactaccggctca

SEQ ID NO: 18476 - DNA, 20 bp, Artificial Sequence
  MKO10018476_A_Fis1
  gRNA
cttgagccggtagttgccca

SEQ ID NO: 18477 - DNA, 20 bp, Artificial Sequence
  MKO10018477_A_Fis1
  gRNA
gctggaacgcctgattgata

SEQ ID NO: 18478 - DNA, 20 bp, Artificial Sequence
  MKO10018478_A_Fitm1
  gRNA
tacggcgcctctaccatgct

SEQ ID NO: 18479 - DNA, 20 bp, Artificial Sequence
  MKO10018479_A_Fitm1
  gRNA
ctgctacacgtcgtgtagcc

SEQ ID NO: 18480 - DNA, 20 bp, Artificial Sequence
  MKO10018480_A_Fitm1
  gRNA
cggcagtaggcacgtttgcc

SEQ ID NO: 18481 - DNA, 20 bp, Artificial Sequence
  MKO10018481_A_Fitm2
  gRNA
cgctgcgcgtggtttctccg

SEQ ID NO: 18482 - DNA, 20 bp, Artificial Sequence
  MKO10018482_A_Fitm2
  gRNA
ggagggtgctcaaccgccgc

SEQ ID NO: 18483 - DNA, 20 bp, Artificial Sequence
  MKO10018483_A_Fitm2
  gRNA
cggttgagcaccctcctcgt

SEQ ID NO: 18484 - DNA, 20 bp, Artificial Sequence
  MKO10018484_A_Fiz1
  gRNA
agtgctacctcaagcgtcac

SEQ ID NO: 18485 - DNA, 20 bp, Artificial Sequence
  MKO10018485_A_Fiz1
  gRNA
cccgaggcccaaacctgcgt

SEQ ID NO: 18486 - DNA, 20 bp, Artificial Sequence
  MKO10018486_A_Fiz1
  gRNA
tccgttaccgatcagacctg

SEQ ID NO: 18487 - DNA, 20 bp, Artificial Sequence
  MKO10018487_A_Fjx1
  gRNA
ggtgcaggttgctcgtagcg

SEQ ID NO: 18488 - DNA, 20 bp, Artificial Sequence
  MKO10018488_A_Fjx1
  gRNA
cgccgcgggcgtcccatact

SEQ ID NO: 18489 - DNA, 20 bp, Artificial Sequence
  MKO10018489_A_Fjx1
  gRNA
cgcgcctagcagtccgctct

SEQ ID NO: 18490 - DNA, 20 bp, Artificial Sequence
  MKO10018490_A_Fkbp10
  gRNA
gcggcctacgcccacaacga

SEQ ID NO: 18491 - DNA, 20 bp, Artificial Sequence
  MKO10018491_A_Fkbp10
  gRNA
caccgatgctgccgtagccc

SEQ ID NO: 18492 - DNA, 20 bp, Artificial Sequence
  MKO10018492_A_Fkbp10
  gRNA
agggactgtgatacccccgc

SEQ ID NO: 18493 - DNA, 20 bp, Artificial Sequence
  MKO10018493_A_Fkbp11
  gRNA
gcagccccctgaatcgtgca

SEQ ID NO: 18494 - DNA, 20 bp, Artificial Sequence
  MKO10018494_A_Fkbp11
  gRNA
gcagattccgtgcacgattc

SEQ ID NO: 18495 - DNA, 20 bp, Artificial Sequence
  MKO10018495_A_Fkbp11
  gRNA
gggtacccgccatctatccc

SEQ ID NO: 18496 - DNA, 20 bp, Artificial Sequence
  MKO10018496_A_Fkbp14
  gRNA
ccatttcttgaaacgactcg

SEQ ID NO: 18497 - DNA, 20 bp, Artificial Sequence
  MKO10018497_A_Fkbp14
  gRNA
atatgtgcacgacgaactgt

SEQ ID NO: 18498 - DNA, 20 bp, Artificial Sequence
  MKO10018498_A_Fkbp14
  gRNA
ccacgagtcgtttcaagaaa

SEQ ID NO: 18499 - DNA, 20 bp, Artificial Sequence
  MKO10018499_A_Fkbp15
  gRNA
gatcaagcaactatgggcca

SEQ ID NO: 18500 - DNA, 20 bp, Artificial Sequence
  MKO10018500_A_Fkbp15
  gRNA
caaatttggagcggctgtcc

SEQ ID NO: 18501 - DNA, 20 bp, Artificial Sequence
  MKO10018501_A_Fkbp15
  gRNA
tgaattgtagcaacagtcac

SEQ ID NO: 18502 - DNA, 20 bp, Artificial Sequence
  MKO10018502_A_Fkbp1a
  gRNA
acccgtgtagtgcaccacgc

SEQ ID NO: 18503 - DNA, 20 bp, Artificial Sequence
  MKO10018503_A_Fkbp1a
  gRNA
gggcgcaccttcccaaagcg

SEQ ID NO: 18504 - DNA, 20 bp, Artificial Sequence
  MKO10018504_A_Fkbp1a
  gRNA
cttacagggatgcttgaaga

SEQ ID NO: 18505 - DNA, 20 bp, Artificial Sequence
  MKO10018505_A_Fkbp1b
  gRNA
ccgcccggtaccgtctcctg

SEQ ID NO: 18506 - DNA, 20 bp, Artificial Sequence
  MKO10018506_A_Fkbp1b
  gRNA
gctgacctgcacccctgatg

SEQ ID NO: 18507 - DNA, 20 bp, Artificial Sequence
  MKO10018507_A_Fkbp1b
  gRNA
atccctgctagatgagcttg

SEQ ID NO: 18508 - DNA, 20 bp, Artificial Sequence
  MKO10018508_A_Fkbp2
  gRNA
gttggtgatcccatccgagc

SEQ ID NO: 18509 - DNA, 20 bp, Artificial Sequence
  MKO10018509_A_Fkbp2
  gRNA
ggcctcttacccagctcgga

SEQ ID NO: 18510 - DNA, 20 bp, Artificial Sequence
  MKO10018510_A_Fkbp2
  gRNA
ctggccaggttatcaagggc

SEQ ID NO: 18511 - DNA, 20 bp, Artificial Sequence
  MKO10018511_A_Fkbp3
  gRNA
actccgaccttaaaacttaa

SEQ ID NO: 18512 - DNA, 20 bp, Artificial Sequence
  MKO10018512_A_Fkbp3
  gRNA
ggagtaggcaaggttatcag

SEQ ID NO: 18513 - DNA, 20 bp, Artificial Sequence
  MKO10018513_A_Fkbp3
  gRNA
tgttgccaagactgctaata

SEQ ID NO: 18514 - DNA, 20 bp, Artificial Sequence
  MKO10018514_A_Fkbp4
  gRNA
caccccgagtccgtattctg

SEQ ID NO: 18515 - DNA, 20 bp, Artificial Sequence
  MKO10018515_A_Fkbp4
  gRNA
cgttgggggggatcttcgga

SEQ ID NO: 18516 - DNA, 20 bp, Artificial Sequence
  MKO10018516_A_Fkbp4
  gRNA
tcatccgcagaatacggact

SEQ ID NO: 18517 - DNA, 20 bp, Artificial Sequence
  MKO10018517_A_Fkbp5
  gRNA
cgatcccaatcggaatgtcg

SEQ ID NO: 18518 - DNA, 20 bp, Artificial Sequence
  MKO10018518_A_Fkbp5
  gRNA
agtgacgaggccccaatgtt

SEQ ID NO: 18519 - DNA, 20 bp, Artificial Sequence
  MKO10018519_A_Fkbp5
  gRNA
gaagaccacgacattccgat

SEQ ID NO: 18520 - DNA, 20 bp, Artificial Sequence
  MKO10018520_A_Fkbp6
  gRNA
gcgttgacttagtcgctcat

SEQ ID NO: 18521 - DNA, 20 bp, Artificial Sequence
  MKO10018521_A_Fkbp6
  gRNA
ccccagggtgccgtaagcat

SEQ ID NO: 18522 - DNA, 20 bp, Artificial Sequence
  MKO10018522_A_Fkbp6
  gRNA
gcgactaagtcaacgcatgt

SEQ ID NO: 18523 - DNA, 20 bp, Artificial Sequence
  MKO10018523_A_Fkbp7
  gRNA
aaatgaagccgtctccattg

SEQ ID NO: 18524 - DNA, 20 bp, Artificial Sequence
  MKO10018524_A_Fkbp7
  gRNA
catagccggacacaagatga

SEQ ID NO: 18525 - DNA, 20 bp, Artificial Sequence
  MKO10018525_A_Fkbp7
  gRNA
tagccaagtagccatcgtaa

SEQ ID NO: 18526 - DNA, 20 bp, Artificial Sequence
  MKO10018526_A_Fkbp8
  gRNA
atcgcagtctcccagcgtga

SEQ ID NO: 18527 - DNA, 20 bp, Artificial Sequence
  MKO10018527_A_Fkbp8
  gRNA
attggcggccagcacaaagt

SEQ ID NO: 18528 - DNA, 20 bp, Artificial Sequence
  MKO10018528_A_Fkbp8
  gRNA
ccagcgtgccgactttgtgc

SEQ ID NO: 18529 - DNA, 20 bp, Artificial Sequence
  MKO10018529_A_Fkbp9
  gRNA
gaaaacctatgacacgtacg

SEQ ID NO: 18530 - DNA, 20 bp, Artificial Sequence
  MKO10018530_A_Fkbp9
  gRNA
aatccccacgtacgtgtcat

SEQ ID NO: 18531 - DNA, 20 bp, Artificial Sequence
  MKO10018531_A_Fkbp9
  gRNA
ccaagaacgttccgttgtag

SEQ ID NO: 18532 - DNA, 20 bp, Artificial Sequence
  MKO10018532_A_Fkbpl
  gRNA
ggtacagaactgtttcgagc

SEQ ID NO: 18533 - DNA, 20 bp, Artificial Sequence
  MKO10018533_A_Fkbpl
  gRNA
caccttgacgcatagactcc

SEQ ID NO: 18534 - DNA, 20 bp, Artificial Sequence
  MKO10018534_A_Fkbpl
  gRNA
caaggggctgcccgatgcta

SEQ ID NO: 18535 - DNA, 20 bp, Artificial Sequence
  MKO10018535_A_Fkrp
  gRNA
cgccatccaaagcgtcgcag

SEQ ID NO: 18536 - DNA, 20 bp, Artificial Sequence
  MKO10018536_A_Fkrp
  gRNA
tcgcatccccaacgttcgcc

SEQ ID NO: 18537 - DNA, 20 bp, Artificial Sequence
  MKO10018537_A_Fkrp
  gRNA
gagcgcgcgctgcttcggta

SEQ ID NO: 18538 - DNA, 20 bp, Artificial Sequence
  MKO10018538_A_Fktn
  gRNA
agcttacagacgtagtgcag

SEQ ID NO: 18539 - DNA, 20 bp, Artificial Sequence
  MKO10018539_A_Fktn
  gRNA
actccagatttatcgagtgc

SEQ ID NO: 18540 - DNA, 20 bp, Artificial Sequence
  MKO10018540_A_Fktn
  gRNA
ggaagctcgggcgttcctcc

SEQ ID NO: 18541 - DNA, 20 bp, Artificial Sequence
  MKO10018541_A_Flad1
  gRNA
gttgtatgtggccgcgtcag

SEQ ID NO: 18542 - DNA, 20 bp, Artificial Sequence
  MKO10018542_A_Flad1
  gRNA
gaggatctgtaccgtaatgc

SEQ ID NO: 18543 - DNA, 20 bp, Artificial Sequence
  MKO10018543_A_Flad1
  gRNA
cagtccgtcgagtgcccatc

SEQ ID NO: 18544 - DNA, 20 bp, Artificial Sequence
  MKO10018544_A_Flcn
  gRNA
ggctgccggtcacttgccgt

SEQ ID NO: 18545 - DNA, 20 bp, Artificial Sequence
  MKO10018545_A_Flcn
  gRNA
gtgactgacgtacttaatag

SEQ ID NO: 18546 - DNA, 20 bp, Artificial Sequence
  MKO10018546_A_Flcn
  gRNA
aaggtatgccctggtcgtga

SEQ ID NO: 18547 - DNA, 20 bp, Artificial Sequence
  MKO10018547_A_Flg2
  gRNA
tgatcagcgtgcatctggtt

SEQ ID NO: 18548 - DNA, 20 bp, Artificial Sequence
  MKO10018548_A_Flg2
  gRNA
ccatatccagaatatctccg

SEQ ID NO: 18549 - DNA, 20 bp, Artificial Sequence
  MKO10018549_A_Flg2
  gRNA
actgagcaaggatgagctaa

SEQ ID NO: 18550 - DNA, 20 bp, Artificial Sequence
  MKO10018550_A_Fli1
  gRNA
gcttcggggagtcctgacta

SEQ ID NO: 18551 - DNA, 20 bp, Artificial Sequence
  MKO10018551_A_Fli1
  gRNA
cacaatgactctccgttcgt

SEQ ID NO: 18552 - DNA, 20 bp, Artificial Sequence
  MKO10018552_A_Fli1
  gRNA
cgcttgacattgactctcac

SEQ ID NO: 18553 - DNA, 20 bp, Artificial Sequence
  MKO10018553_A_Flii
  gRNA
cgaacactcacccgaagcga

SEQ ID NO: 18554 - DNA, 20 bp, Artificial Sequence
  MKO10018554_A_Flii
  gRNA
tggctaaagctgaatcgcac

SEQ ID NO: 18555 - DNA, 20 bp, Artificial Sequence
  MKO10018555_A_Flii
  gRNA
cccagtacccgttgtggctg

SEQ ID NO: 18556 - DNA, 20 bp, Artificial Sequence
  MKO10018556_A_Flna
  gRNA
ctgccagtctcgactgaagt

SEQ ID NO: 18557 - DNA, 20 bp, Artificial Sequence
  MKO10018557_A_Flna
  gRNA
ttaccaacttcagtcgagac

SEQ ID NO: 18558 - DNA, 20 bp, Artificial Sequence
  MKO10018558_A_Flna
  gRNA
ctgacaggcatcgagcctac

SEQ ID NO: 18559 - DNA, 20 bp, Artificial Sequence
  MKO10018559_A_Flnb
  gRNA
tgactggctgggcgtcccac

SEQ ID NO: 18560 - DNA, 20 bp, Artificial Sequence
  MKO10018560_A_Flnb
  gRNA
atgacaggaatcgaacctac

SEQ ID NO: 18561 - DNA, 20 bp, Artificial Sequence
  MKO10018561_A_Flnb
  gRNA
acagagtgctcgtccacgtc

SEQ ID NO: 18562 - DNA, 20 bp, Artificial Sequence
  MKO10018562_A_Flnc
  gRNA
tcaccaactttaaccgagac

SEQ ID NO: 18563 - DNA, 20 bp, Artificial Sequence
  MKO10018563_A_Flnc
  gRNA
ggaggtgctggtctacattg

SEQ ID NO: 18564 - DNA, 20 bp, Artificial Sequence
  MKO10018564_A_Flnc
  gRNA
acacccaagcagcgactgct

SEQ ID NO: 18565 - DNA, 20 bp, Artificial Sequence
  MKO10018565_A_Flot1
  gRNA
acggccgcaggtgaaaatcc

SEQ ID NO: 18566 - DNA, 20 bp, Artificial Sequence
  MKO10018566_A_Flot1
  gRNA
taggacaaacactcggcctc

SEQ ID NO: 18567 - DNA, 20 bp, Artificial Sequence
  MKO10018567_A_Flot1
  gRNA
cgctgatacccatgttgacc

SEQ ID NO: 18568 - DNA, 20 bp, Artificial Sequence
  MKO10018568_A_Flot2
  gRNA
gaagtggcggcccccgatgt

SEQ ID NO: 18569 - DNA, 20 bp, Artificial Sequence
  MKO10018569_A_Flot2
  gRNA
tgtcctgtacgttcttgccc

SEQ ID NO: 18570 - DNA, 20 bp, Artificial Sequence
  MKO10018570_A_Flot2
  gRNA
gatgcccatgcggccaacat

SEQ ID NO: 18571 - DNA, 20 bp, Artificial Sequence
  MKO10018571_A_Flrt1
  gRNA
tcacggagctgtcgctagta

SEQ ID NO: 18572 - DNA, 20 bp, Artificial Sequence
  MKO10018572_A_Flrt1
  gRNA
cgcttcccggtagcctcgtg

SEQ ID NO: 18573 - DNA, 20 bp, Artificial Sequence
  MKO10018573_A_Flrt1
  gRNA
catccagaaccaggcgccgc

SEQ ID NO: 18574 - DNA, 20 bp, Artificial Sequence
  MKO10018574_A_Flrt2
  gRNA
tagagtacggttacgccctc

SEQ ID NO: 18575 - DNA, 20 bp, Artificial Sequence
  MKO10018575_A_Flrt2
  gRNA
tgtctgatatgacggcaatt

SEQ ID NO: 18576 - DNA, 20 bp, Artificial Sequence
  MKO10018576_A_Flrt2
  gRNA
gaagattcccatccacgatc

SEQ ID NO: 18577 - DNA, 20 bp, Artificial Sequence
  MKO10018577_A_Flrt3
  gRNA
actttcgaaaattccgtatc

SEQ ID NO: 18578 - DNA, 20 bp, Artificial Sequence
  MKO10018578_A_Flrt3
  gRNA
cattgcttatcggtagcatc

SEQ ID NO: 18579 - DNA, 20 bp, Artificial Sequence
  MKO10018579_A_Flrt3
  gRNA
cgtaattcctcaatagtcct

SEQ ID NO: 18580 - DNA, 20 bp, Artificial Sequence
  MKO10018580_A_Flt1
  gRNA
tctgcccacgaccgtgagcc

SEQ ID NO: 18581 - DNA, 20 bp, Artificial Sequence
  MKO10018581_A_Flt1
  gRNA
cacggcgcaggccaaccaca

SEQ ID NO: 18582 - DNA, 20 bp, Artificial Sequence
  MKO10018582_A_Flt1
  gRNA
ccaacacttactctgccgat

SEQ ID NO: 18583 - DNA, 20 bp, Artificial Sequence
  MKO10018583_A_Flt3l
  gRNA
ctggcaggccttcccgatac

SEQ ID NO: 18584 - DNA, 20 bp, Artificial Sequence
  MKO10018584_A_Flt3l
  gRNA
actcacgtcctgaagattga

SEQ ID NO: 18585 - DNA, 20 bp, Artificial Sequence
  MKO10018585_A_Flt3l
  gRNA
tcagttgctctatccagcgc

SEQ ID NO: 18586 - DNA, 20 bp, Artificial Sequence
  MKO10018586_A_Flt3
  gRNA
tttaccattcggtacgatga

SEQ ID NO: 18587 - DNA, 20 bp, Artificial Sequence
  MKO10018587_A_Flt3
  gRNA
catataccgtcccttcactc

SEQ ID NO: 18588 - DNA, 20 bp, Artificial Sequence
  MKO10018588_A_Flt3
  gRNA
aaagccatcatcgtaccgaa

SEQ ID NO: 18589 - DNA, 20 bp, Artificial Sequence
  MKO10018589_A_Flt4
  gRNA
gcatcgcgcaacagttgagt

SEQ ID NO: 18590 - DNA, 20 bp, Artificial Sequence
  MKO10018590_A_Flt4
  gRNA
ccgtgttgttggcgtgagtc

SEQ ID NO: 18591 - DNA, 20 bp, Artificial Sequence
  MKO10018591_A_Flt4
  gRNA
ctcttcgtcgtgcacatcac

SEQ ID NO: 18592 - DNA, 20 bp, Artificial Sequence
  MKO10018592_A_Flywch1
  gRNA
tgcgcatcactgtcacacgc

SEQ ID NO: 18593 - DNA, 20 bp, Artificial Sequence
  MKO10018593_A_Flywch1
  gRNA
agcgggtgatggtcatgcgc

SEQ ID NO: 18594 - DNA, 20 bp, Artificial Sequence
  MKO10018594_A_Flywch1
  gRNA
tgcgcatgaccatcacccgc

SEQ ID NO: 18595 - DNA, 20 bp, Artificial Sequence
  MKO10018595_A_Flywch2
  gRNA
ggccattgaagcgactcccc

SEQ ID NO: 18596 - DNA, 20 bp, Artificial Sequence
  MKO10018596_A_Flywch2
  gRNA
ctccaggggagtcgcttcaa

SEQ ID NO: 18597 - DNA, 20 bp, Artificial Sequence
  MKO10018597_A_Flywch2
  gRNA
ccaaggttatggggaagtgc

SEQ ID NO: 18598 - DNA, 20 bp, Artificial Sequence
  MKO10018598_A_Fmn1
  gRNA
ttactaatgcgtgctcaccc

SEQ ID NO: 18599 - DNA, 20 bp, Artificial Sequence
  MKO10018599_A_Fmn1
  gRNA
tggctggtttacgaggatac

SEQ ID NO: 18600 - DNA, 20 bp, Artificial Sequence
  MKO10018600_A_Fmn1
  gRNA
aaagaccttcccaataagga

SEQ ID NO: 18601 - DNA, 20 bp, Artificial Sequence
  MKO10018601_A_Fmn2
  gRNA
tagtcaacccacacattcga

SEQ ID NO: 18602 - DNA, 20 bp, Artificial Sequence
  MKO10018602_A_Fmn2
  gRNA
gaaccgtgtaatcagaacgc

SEQ ID NO: 18603 - DNA, 20 bp, Artificial Sequence
  MKO10018603_A_Fmn2
  gRNA
gctgtaatccatcgaatgtg

SEQ ID NO: 18604 - DNA, 20 bp, Artificial Sequence
  MKO10018604_A_Fmnl1
  gRNA
tggctgcttcgggggcgacg

SEQ ID NO: 18605 - DNA, 20 bp, Artificial Sequence
  MKO10018605_A_Fmnl1
  gRNA
ttagtttaagaggcgagttc

SEQ ID NO: 18606 - DNA, 20 bp, Artificial Sequence
  MKO10018606_A_Fmnl1
  gRNA
gctgccagccgcgttgccca

SEQ ID NO: 18607 - DNA, 20 bp, Artificial Sequence
  MKO10018607_A_Fmnl2
  gRNA
gcatacttacccaatgtggt

SEQ ID NO: 18608 - DNA, 20 bp, Artificial Sequence
  MKO10018608_A_Fmnl2
  gRNA
tttcctgcaggagcgattcc

SEQ ID NO: 18609 - DNA, 20 bp, Artificial Sequence
  MKO10018609_A_Fmnl2
  gRNA
gtcatactgccgcagtagcc

SEQ ID NO: 18610 - DNA, 20 bp, Artificial Sequence
  MKO10018610_A_Fmnl3
  gRNA
ggtaatccaccagcacgtcc

SEQ ID NO: 18611 - DNA, 20 bp, Artificial Sequence
  MKO10018611_A_Fmnl3
  gRNA
aggagtccactaaagtccta

SEQ ID NO: 18612 - DNA, 20 bp, Artificial Sequence
  MKO10018612_A_Fmnl3
  gRNA
cctgacttacccaatgtgat

SEQ ID NO: 18613 - DNA, 20 bp, Artificial Sequence
  MKO10018613_A_Fmo1
  gRNA
ttctggcacagatattgccg

SEQ ID NO: 18614 - DNA, 20 bp, Artificial Sequence
  MKO10018614_A_Fmo1
  gRNA
gtgcagtataacaaaacgcc

SEQ ID NO: 18615 - DNA, 20 bp, Artificial Sequence
  MKO10018615_A_Fmo1
  gRNA
atcagccgagtctttgattc

SEQ ID NO: 18616 - DNA, 20 bp, Artificial Sequence
  MKO10018616_A_Fmo2
  gRNA
tcatccacttgacgaccgtg

SEQ ID NO: 18617 - DNA, 20 bp, Artificial Sequence
  MKO10018617_A_Fmo2
  gRNA
ccgcgaatacaagcacccag

SEQ ID NO: 18618 - DNA, 20 bp, Artificial Sequence
  MKO10018618_A_Fmo2
  gRNA
attcgcggctatggaaatac

SEQ ID NO: 18619 - DNA, 20 bp, Artificial Sequence
  MKO10018619_A_Fmo3
  gRNA
cttgggtgatgagtcgagtc

SEQ ID NO: 18620 - DNA, 20 bp, Artificial Sequence
  MKO10018620_A_Fmo3
  gRNA
agattcaagcacgaaaacta

SEQ ID NO: 18621 - DNA, 20 bp, Artificial Sequence
  MKO10018621_A_Fmo3
  gRNA
catttatttatactggttac

SEQ ID NO: 18622 - DNA, 20 bp, Artificial Sequence
  MKO10018622_A_Fmo4
  gRNA
gctgagatatattcggttta

SEQ ID NO: 18623 - DNA, 20 bp, Artificial Sequence
  MKO10018623_A_Fmo4
  gRNA
taaaccgaatatatctcagc

SEQ ID NO: 18624 - DNA, 20 bp, Artificial Sequence
  MKO10018624_A_Fmo4
  gRNA
ggcagtatttgacgctgtta

SEQ ID NO: 18625 - DNA, 20 bp, Artificial Sequence
  MKO10018625_A_Fmo5
  gRNA
cagcaggtagacgtcttcga

SEQ ID NO: 18626 - DNA, 20 bp, Artificial Sequence
  MKO10018626_A_Fmo5
  gRNA
aggtgttgatgaccacggac

SEQ ID NO: 18627 - DNA, 20 bp, Artificial Sequence
  MKO10018627_A_Fmo5
  gRNA
ggccagtatttaccagtccg

SEQ ID NO: 18628 - DNA, 20 bp, Artificial Sequence
  MKO10018628_A_Fmo6
  gRNA
ccaaactcgactcatgatcc

SEQ ID NO: 18629 - DNA, 20 bp, Artificial Sequence
  MKO10018629_A_Fmo6
  gRNA
cgaacgacgtgatgtattcc

SEQ ID NO: 18630 - DNA, 20 bp, Artificial Sequence
  MKO10018630_A_Fmo6
  gRNA
cctggatcatgagtcgagtt

SEQ ID NO: 18631 - DNA, 20 bp, Artificial Sequence
  MKO10018631_A_Fmo9
  gRNA
taaaatccacgatcctcgtc

SEQ ID NO: 18632 - DNA, 20 bp, Artificial Sequence
  MKO10018632_A_Fmo9
  gRNA
gcttggtcgtgtagcaaaac

SEQ ID NO: 18633 - DNA, 20 bp, Artificial Sequence
  MKO10018633_A_Fmo9
  gRNA
gatagccgttattccaaaca

SEQ ID NO: 18634 - DNA, 20 bp, Artificial Sequence
  MKO10018634_A_Fmod
  gRNA
gaccgtcgggtaccctccga

SEQ ID NO: 18635 - DNA, 20 bp, Artificial Sequence
  MKO10018635_A_Fmod
  gRNA
agggtcataggggtcgtagt

SEQ ID NO: 18636 - DNA, 20 bp, Artificial Sequence
  MKO10018636_A_Fmod
  gRNA
gatcaagcgcagcgcaatgc

SEQ ID NO: 18637 - DNA, 20 bp, Artificial Sequence
  MKO10018637_A_Fmr1nb
  gRNA
ccaacatgccttcggatcga

SEQ ID NO: 18638 - DNA, 20 bp, Artificial Sequence
  MKO10018638_A_Fmr1nb
  gRNA
aacacccgtagcacctgtgt

SEQ ID NO: 18639 - DNA, 20 bp, Artificial Sequence
  MKO10018639_A_Fmr1nb
  gRNA
ctagaatgctgatcgcagca

SEQ ID NO: 18640 - DNA, 20 bp, Artificial Sequence
  MKO10018640_A_Fmr1
  gRNA
ttagctaaccaccaacagca

SEQ ID NO: 18641 - DNA, 20 bp, Artificial Sequence
  MKO10018641_A_Fmr1
  gRNA
gggaatctcacatcatggaa

SEQ ID NO: 18642 - DNA, 20 bp, Artificial Sequence
  MKO10018642_A_Fmr1
  gRNA
tacatttgtcgtaaatcttc

SEQ ID NO: 18643 - DNA, 20 bp, Artificial Sequence
  MKO10018643_A_Fn1
  gRNA
ccaggtctcccccacgacgt

SEQ ID NO: 18644 - DNA, 20 bp, Artificial Sequence
  MKO10018644_A_Fn1
  gRNA
gacctacctaggcaacgccc

SEQ ID NO: 18645 - DNA, 20 bp, Artificial Sequence
  MKO10018645_A_Fn1
  gRNA
cctacaagattggcgacaag

SEQ ID NO: 18646 - DNA, 20 bp, Artificial Sequence
  MKO10018646_A_Fn3krp
  gRNA
cggcagtatgtggaccagtt

SEQ ID NO: 18647 - DNA, 20 bp, Artificial Sequence
  MKO10018647_A_Fn3krp
  gRNA
attgggtcgaattctatgcc

SEQ ID NO: 18648 - DNA, 20 bp, Artificial Sequence
  MKO10018648_A_Fn3krp
  gRNA
tcgacaaccttgatgggctt

SEQ ID NO: 18649 - DNA, 20 bp, Artificial Sequence
  MKO10018649_A_Fn3k
  gRNA
cccaaaggcccgcagtgttg

SEQ ID NO: 18650 - DNA, 20 bp, Artificial Sequence
  MKO10018650_A_Fn3k
  gRNA
gcgggttcctaagcccatga

SEQ ID NO: 18651 - DNA, 20 bp, Artificial Sequence
  MKO10018651_A_Fn3k
  gRNA
tgtttgtcaaggtcaatcgc

SEQ ID NO: 18652 - DNA, 20 bp, Artificial Sequence
  MKO10018652_A_Fnbp1l
  gRNA
aatgagttaaacgactatgc

SEQ ID NO: 18653 - DNA, 20 bp, Artificial Sequence
  MKO10018653_A_Fnbp1l
  gRNA
agaactatgcgaaacaattg

SEQ ID NO: 18654 - DNA, 20 bp, Artificial Sequence
  MKO10018654_A_Fnbp1l
  gRNA
gcttagataagcatacccaa

SEQ ID NO: 18655 - DNA, 20 bp, Artificial Sequence
  MKO10018655_A_Fnbp1
  gRNA
ggacctgatgcgctacgttc

SEQ ID NO: 18656 - DNA, 20 bp, Artificial Sequence
  MKO10018656_A_Fnbp1
  gRNA
gctcctgaacgtagcgcatc

SEQ ID NO: 18657 - DNA, 20 bp, Artificial Sequence
  MKO10018657_A_Fnbp1
  gRNA
cgctgacatcaacgtgacca

SEQ ID NO: 18658 - DNA, 20 bp, Artificial Sequence
  MKO10018658_A_Fnbp4
  gRNA
caccagaccgacagccgtca

SEQ ID NO: 18659 - DNA, 20 bp, Artificial Sequence
  MKO10018659_A_Fnbp4
  gRNA
atcactaaccgctaggaagt

SEQ ID NO: 18660 - DNA, 20 bp, Artificial Sequence
  MKO10018660_A_Fnbp4
  gRNA
ctttctcccaccgcatcaaa

SEQ ID NO: 18661 - DNA, 20 bp, Artificial Sequence
  MKO10018661_A_Fnd3c2
  gRNA
ttcagagtaacaaccatgag

SEQ ID NO: 18662 - DNA, 20 bp, Artificial Sequence
  MKO10018662_A_Fnd3c2
  gRNA
tctgtgttctgcacctctca

SEQ ID NO: 18663 - DNA, 20 bp, Artificial Sequence
  MKO10018663_A_Fnd3c2
  gRNA
acaagatctacaacctagca

SEQ ID NO: 18664 - DNA, 20 bp, Artificial Sequence
  MKO10018664_A_Fndc1
  gRNA
cactgtgcgttaccgcgaga

SEQ ID NO: 18665 - DNA, 20 bp, Artificial Sequence
  MKO10018665_A_Fndc1
  gRNA
ccgtgtatgaattcgcagtc

SEQ ID NO: 18666 - DNA, 20 bp, Artificial Sequence
  MKO10018666_A_Fndc1
  gRNA
tggaaggcgccacgcctgtc

SEQ ID NO: 18667 - DNA, 20 bp, Artificial Sequence
  MKO10018667_A_Fndc3a
  gRNA
atcttctcttcttatcgtaa

SEQ ID NO: 18668 - DNA, 20 bp, Artificial Sequence
  MKO10018668_A_Fndc3a
  gRNA
ttataggttatcgaagacaa

SEQ ID NO: 18669 - DNA, 20 bp, Artificial Sequence
  MKO10018669_A_Fndc3a
  gRNA
gagtacatatggcgtggtgg

SEQ ID NO: 18670 - DNA, 20 bp, Artificial Sequence
  MKO10018670_A_Fndc3b
  gRNA
cgtagctcgacattccatac

SEQ ID NO: 18671 - DNA, 20 bp, Artificial Sequence
  MKO10018671_A_Fndc3b
  gRNA
agtaggcggtgtgcgagttc

SEQ ID NO: 18672 - DNA, 20 bp, Artificial Sequence
  MKO10018672_A_Fndc3b
  gRNA
agctgcgccacagtgtacaa

SEQ ID NO: 18673 - DNA, 20 bp, Artificial Sequence
  MKO10018673_A_Fndc3c1
  gRNA
gtacctctgatagcaccaac

SEQ ID NO: 18674 - DNA, 20 bp, Artificial Sequence
  MKO10018674_A_Fndc3c1
  gRNA
gagcaatggtgctgctacaa

SEQ ID NO: 18675 - DNA, 20 bp, Artificial Sequence
  MKO10018675_A_Fndc3c1
  gRNA
attggtggcaaattgccagt

SEQ ID NO: 18676 - DNA, 20 bp, Artificial Sequence
  MKO10018676_A_Fndc4
  gRNA
tgtgcacttccgcacgctca

SEQ ID NO: 18677 - DNA, 20 bp, Artificial Sequence
  MKO10018677_A_Fndc4
  gRNA
ccagaaggcaacatcgtcat

SEQ ID NO: 18678 - DNA, 20 bp, Artificial Sequence
  MKO10018678_A_Fndc4
  gRNA
ccaatgacgatgttgccttc

SEQ ID NO: 18679 - DNA, 20 bp, Artificial Sequence
  MKO10018679_A_Fndc5
  gRNA
gctcttcaagaccccacgcg

SEQ ID NO: 18680 - DNA, 20 bp, Artificial Sequence
  MKO10018680_A_Fndc5
  gRNA
tgccggacggtcacgttcac

SEQ ID NO: 18681 - DNA, 20 bp, Artificial Sequence
  MKO10018681_A_Fndc5
  gRNA
tgggggtctcctccgcagca

SEQ ID NO: 18682 - DNA, 20 bp, Artificial Sequence
  MKO10018682_A_Fndc7
  gRNA
gacgccgtatacatggcgat

SEQ ID NO: 18683 - DNA, 20 bp, Artificial Sequence
  MKO10018683_A_Fndc7
  gRNA
gaatccgatcgccatgtata

SEQ ID NO: 18684 - DNA, 20 bp, Artificial Sequence
  MKO10018684_A_Fndc7
  gRNA
aattccccagggacggtgac

SEQ ID NO: 18685 - DNA, 20 bp, Artificial Sequence
  MKO10018685_A_Fndc8
  gRNA
atttcctggacttacgctgc

SEQ ID NO: 18686 - DNA, 20 bp, Artificial Sequence
  MKO10018686_A_Fndc8
  gRNA
gctcccgtcaagacgcagct

SEQ ID NO: 18687 - DNA, 20 bp, Artificial Sequence
  MKO10018687_A_Fndc8
  gRNA
agctgcgtcttgacgggagc

SEQ ID NO: 18688 - DNA, 20 bp, Artificial Sequence
  MKO10018688_A_Fndc9
  gRNA
gcgctataacttccatcacg

SEQ ID NO: 18689 - DNA, 20 bp, Artificial Sequence
  MKO10018689_A_Fndc9
  gRNA
cggccatactgcctcactat

SEQ ID NO: 18690 - DNA, 20 bp, Artificial Sequence
  MKO10018690_A_Fndc9
  gRNA
gcctccgctgtcacgaacct

SEQ ID NO: 18691 - DNA, 20 bp, Artificial Sequence
  MKO10018691_A_Fnip1
  gRNA
gatactactgccagtccgtg

SEQ ID NO: 18692 - DNA, 20 bp, Artificial Sequence
  MKO10018692_A_Fnip1
  gRNA
acgatcagtcgaatctgact

SEQ ID NO: 18693 - DNA, 20 bp, Artificial Sequence
  MKO10018693_A_Fnip1
  gRNA
actttgctaagcataagctg

SEQ ID NO: 18694 - DNA, 20 bp, Artificial Sequence
  MKO10018694_A_Fnip2
  gRNA
catccgcctgctagtttacc

SEQ ID NO: 18695 - DNA, 20 bp, Artificial Sequence
  MKO10018695_A_Fnip2
  gRNA
accgtatgtagtgtatcttc

SEQ ID NO: 18696 - DNA, 20 bp, Artificial Sequence
  MKO10018696_A_Fnip2
  gRNA
aatccacagttggtcgtgtt

SEQ ID NO: 18697 - DNA, 20 bp, Artificial Sequence
  MKO10018697_A_Fnta
  gRNA
gcaccacaggcgagtattag

SEQ ID NO: 18698 - DNA, 20 bp, Artificial Sequence
  MKO10018698_A_Fnta
  gRNA
ctgttctgcagcgcgatgag

SEQ ID NO: 18699 - DNA, 20 bp, Artificial Sequence
  MKO10018699_A_Fnta
  gRNA
attccactaatactcgcctg

SEQ ID NO: 18700 - DNA, 20 bp, Artificial Sequence
  MKO10018700_A_Fntb
  gRNA
aggcatctgtcagttgtcga

SEQ ID NO: 18701 - DNA, 20 bp, Artificial Sequence
  MKO10018701_A_Fntb
  gRNA
gatgatgcacagcgcattga

SEQ ID NO: 18702 - DNA, 20 bp, Artificial Sequence
  MKO10018702_A_Fntb
  gRNA
aagcctacaacgtcattaac

SEQ ID NO: 18703 - DNA, 20 bp, Artificial Sequence
  MKO10018703_A_Focad
  gRNA
tgatcaccgtgcttgagcac

SEQ ID NO: 18704 - DNA, 20 bp, Artificial Sequence
  MKO10018704_A_Focad
  gRNA
actggtggcacttgtcgccc

SEQ ID NO: 18705 - DNA, 20 bp, Artificial Sequence
  MKO10018705_A_Focad
  gRNA
tgtgcggacagcctgcagcg

SEQ ID NO: 18706 - DNA, 20 bp, Artificial Sequence
  MKO10018706_A_Folh1
  gRNA
agagatgtggaacgcactgc

SEQ ID NO: 18707 - DNA, 20 bp, Artificial Sequence
  MKO10018707_A_Folh1
  gRNA
cgccagcgctggctccgtgt

SEQ ID NO: 18708 - DNA, 20 bp, Artificial Sequence
  MKO10018708_A_Folh1
  gRNA
ttatctgaacagccaccccc

SEQ ID NO: 18709 - DNA, 20 bp, Artificial Sequence
  MKO10018709_A_Folr1
  gRNA
ccagttgaaccggtacaggt

SEQ ID NO: 18710 - DNA, 20 bp, Artificial Sequence
  MKO10018710_A_Folr1
  gRNA
tgaggacaatttacacgacc

SEQ ID NO: 18711 - DNA, 20 bp, Artificial Sequence
  MKO10018711_A_Folr1
  gRNA
acagcaggaattcgtcttcc

SEQ ID NO: 18712 - DNA, 20 bp, Artificial Sequence
  MKO10018712_A_Folr2
  gRNA
aacgctctttacgccaactc

SEQ ID NO: 18713 - DNA, 20 bp, Artificial Sequence
  MKO10018713_A_Folr2
  gRNA
agacctactcaacgtttgca

SEQ ID NO: 18714 - DNA, 20 bp, Artificial Sequence
  MKO10018714_A_Folr2
  gRNA
actcccgtctgtacttcaac

SEQ ID NO: 18715 - DNA, 20 bp, Artificial Sequence
  MKO10018715_A_Folr4
  gRNA
tcaaggccagtcccgagcgc

SEQ ID NO: 18716 - DNA, 20 bp, Artificial Sequence
  MKO10018716_A_Folr4
  gRNA
cacccttagcaaccccaacg

SEQ ID NO: 18717 - DNA, 20 bp, Artificial Sequence
  MKO10018717_A_Folr4
  gRNA
aggttcttgcttgtggcgct

SEQ ID NO: 18718 - DNA, 20 bp, Artificial Sequence
  MKO10018718_A_Fopnl
  gRNA
tctcatgagacaaagacggt

SEQ ID NO: 18719 - DNA, 20 bp, Artificial Sequence
  MKO10018719_A_Fopnl
  gRNA
cctaccgtcaggtcttctgc

SEQ ID NO: 18720 - DNA, 20 bp, Artificial Sequence
  MKO10018720_A_Fopnl
  gRNA
tttctctagatgaccacgtg

SEQ ID NO: 18721 - DNA, 20 bp, Artificial Sequence
  MKO10018721_A_Fosb
  gRNA
ccggcgaacgcggagacctc

SEQ ID NO: 18722 - DNA, 20 bp, Artificial Sequence
  MKO10018722_A_Fosb
  gRNA
ctgcaagatcccctacgaag

SEQ ID NO: 18723 - DNA, 20 bp, Artificial Sequence
  MKO10018723_A_Fosb
  gRNA
gttgtgattgcggtgaccgt

SEQ ID NO: 18724 - DNA, 20 bp, Artificial Sequence
  MKO10018724_A_Fosl1
  gRNA
gtcccggttccccgtagtct

SEQ ID NO: 18725 - DNA, 20 bp, Artificial Sequence
  MKO10018725_A_Fosl1
  gRNA
tccgctcgcgtctcaccctg

SEQ ID NO: 18726 - DNA, 20 bp, Artificial Sequence
  MKO10018726_A_Fosl1
  gRNA
gccgcagggtgagacgcgag

SEQ ID NO: 18727 - DNA, 20 bp, Artificial Sequence
  MKO10018727_A_Fosl2
  gRNA
aggaggagaagcgtcgaatc

SEQ ID NO: 18728 - DNA, 20 bp, Artificial Sequence
  MKO10018728_A_Fosl2
  gRNA
ggcactgcccgtaccgcgca

SEQ ID NO: 18729 - DNA, 20 bp, Artificial Sequence
  MKO10018729_A_Fosl2
  gRNA
cgtggaggtcaccacgatgg

SEQ ID NO: 18730 - DNA, 20 bp, Artificial Sequence
  MKO10018730_A_Fos
  gRNA
ggaatggtgaagaccgtgtc

SEQ ID NO: 18731 - DNA, 20 bp, Artificial Sequence
  MKO10018731_A_Fos
  gRNA
tgcaagatccccgatgacct

SEQ ID NO: 18732 - DNA, 20 bp, Artificial Sequence
  MKO10018732_A_Fos
  gRNA
ccatcttattccgttccctt

SEQ ID NO: 18733 - DNA, 20 bp, Artificial Sequence
  MKO10018733_A_Foxa1
  gRNA
gttggacggcgcgtacgcca

SEQ ID NO: 18734 - DNA, 20 bp, Artificial Sequence
  MKO10018734_A_Foxa1
  gRNA
cgaagcgccccctgtcgccg

SEQ ID NO: 18735 - DNA, 20 bp, Artificial Sequence
  MKO10018735_A_Foxa1
  gRNA
cagctactacgcggacacgc

SEQ ID NO: 18736 - DNA, 20 bp, Artificial Sequence
  MKO10018736_A_Foxa2
  gRNA
cggttccggcaacatgagcg

SEQ ID NO: 18737 - DNA, 20 bp, Artificial Sequence
  MKO10018737_A_Foxa2
  gRNA
ggaatgagcccgtcgctagc

SEQ ID NO: 18738 - DNA, 20 bp, Artificial Sequence
  MKO10018738_A_Foxa2
  gRNA
aagggcacgagccatccgac

SEQ ID NO: 18739 - DNA, 20 bp, Artificial Sequence
  MKO10018739_A_Foxa3
  gRNA
tggacctcttcccgtactac

SEQ ID NO: 18740 - DNA, 20 bp, Artificial Sequence
  MKO10018740_A_Foxa3
  gRNA
gctcccgggggaactaaagt

SEQ ID NO: 18741 - DNA, 20 bp, Artificial Sequence
  MKO10018741_A_Foxa3
  gRNA
aggctcatgacctggccgag

SEQ ID NO: 18742 - DNA, 20 bp, Artificial Sequence
  MKO10018742_A_Foxb1
  gRNA
aggtactgcgcggcgtccgc

SEQ ID NO: 18743 - DNA, 20 bp, Artificial Sequence
  MKO10018743_A_Foxb1
  gRNA
gcaacgtctggcccgcggcg

SEQ ID NO: 18744 - DNA, 20 bp, Artificial Sequence
  MKO10018744_A_Foxb1
  gRNA
ggctgagtcgatcatacccg

SEQ ID NO: 18745 - DNA, 20 bp, Artificial Sequence
  MKO10018745_A_Foxb2
  gRNA
gcaatgttgtcggctccgtg

SEQ ID NO: 18746 - DNA, 20 bp, Artificial Sequence
  MKO10018746_A_Foxb2
  gRNA
aggccggaccaacccggtaa

SEQ ID NO: 18747 - DNA, 20 bp, Artificial Sequence
  MKO10018747_A_Foxb2
  gRNA
gtagcaccttgaagcgcttg

SEQ ID NO: 18748 - DNA, 20 bp, Artificial Sequence
  MKO10018748_A_Foxc1
  gRNA
gagctactatcgcgctgccg

SEQ ID NO: 18749 - DNA, 20 bp, Artificial Sequence
  MKO10018749_A_Foxc1
  gRNA
ctgcggcgtataaggcccgt

SEQ ID NO: 18750 - DNA, 20 bp, Artificial Sequence
  MKO10018750_A_Foxc1
  gRNA
cacgctcgcccgccgcgtac

SEQ ID NO: 18751 - DNA, 20 bp, Artificial Sequence
  MKO10018751_A_Foxc2
  gRNA
gacgctgcgcacgtcgcctc

SEQ ID NO: 18752 - DNA, 20 bp, Artificial Sequence
  MKO10018752_A_Foxc2
  gRNA
ttacacgcagccgtgcgcgc

SEQ ID NO: 18753 - DNA, 20 bp, Artificial Sequence
  MKO10018753_A_Foxc2
  gRNA
actggacaactcgtccctcg

SEQ ID NO: 18754 - DNA, 20 bp, Artificial Sequence
  MKO10018754_A_Foxd1
  gRNA
gccgtaggctccgtagccgc

SEQ ID NO: 18755 - DNA, 20 bp, Artificial Sequence
  MKO10018755_A_Foxd1
  gRNA
cgtaagagcgcctccgccgc

SEQ ID NO: 18756 - DNA, 20 bp, Artificial Sequence
  MKO10018756_A_Foxd1
  gRNA
cgccggggaggacgatctcg

SEQ ID NO: 18757 - DNA, 20 bp, Artificial Sequence
  MKO10018757_A_Foxd2
  gRNA
gtagccgtaagcgccgtaag

SEQ ID NO: 18758 - DNA, 20 bp, Artificial Sequence
  MKO10018758_A_Foxd2
  gRNA
ctctcgagcttcgccgctta

SEQ ID NO: 18759 - DNA, 20 bp, Artificial Sequence
  MKO10018759_A_Foxd2
  gRNA
ctcaagacggacgccggcgg

SEQ ID NO: 18760 - DNA, 20 bp, Artificial Sequence
  MKO10018760_A_Foxd3
  gRNA
gccacgggtggtagcgcgta

SEQ ID NO: 18761 - DNA, 20 bp, Artificial Sequence
  MKO10018761_A_Foxd3
  gRNA
cgtctggccggacatatcgc

SEQ ID NO: 18762 - DNA, 20 bp, Artificial Sequence
  MKO10018762_A_Foxd3
  gRNA
ggagctcccgtgtcgttccc

SEQ ID NO: 18763 - DNA, 20 bp, Artificial Sequence
  MKO10018763_A_Foxd4
  gRNA
accgccgtaagttccccgcc

SEQ ID NO: 18764 - DNA, 20 bp, Artificial Sequence
  MKO10018764_A_Foxd4
  gRNA
gaacgaagcgcacccgcgtc

SEQ ID NO: 18765 - DNA, 20 bp, Artificial Sequence
  MKO10018765_A_Foxd4
  gRNA
gcctaaccgcacgcctttac

SEQ ID NO: 18766 - DNA, 20 bp, Artificial Sequence
  MKO10018766_A_Foxe1
  gRNA
ctactaccccgccgcgtcgc

SEQ ID NO: 18767 - DNA, 20 bp, Artificial Sequence
  MKO10018767_A_Foxe1
  gRNA
cggcgcgtagcccgcataga

SEQ ID NO: 18768 - DNA, 20 bp, Artificial Sequence
  MKO10018768_A_Foxe1
  gRNA
gcgcccgtagaagtccaccg

SEQ ID NO: 18769 - DNA, 20 bp, Artificial Sequence
  MKO10018769_A_Foxe3
  gRNA
ctactggacgctcgatcccg

SEQ ID NO: 18770 - DNA, 20 bp, Artificial Sequence
  MKO10018770_A_Foxe3
  gRNA
tcccggccgccgtctaacgc

SEQ ID NO: 18771 - DNA, 20 bp, Artificial Sequence
  MKO10018771_A_Foxe3
  gRNA
gcagcggcgcgggtaacccc

SEQ ID NO: 18772 - DNA, 20 bp, Artificial Sequence
  MKO10018772_A_Foxf1
  gRNA
gtacccgcaccacgacagct

SEQ ID NO: 18773 - DNA, 20 bp, Artificial Sequence
  MKO10018773_A_Foxf1
  gRNA
gcgactgtgagtgataccga

SEQ ID NO: 18774 - DNA, 20 bp, Artificial Sequence
  MKO10018774_A_Foxf1
  gRNA
gtgcggctccatgactccgc

SEQ ID NO: 18775 - DNA, 20 bp, Artificial Sequence
  MKO10018775_A_Foxf2
  gRNA
cgacttccaagcgcccccgt

SEQ ID NO: 18776 - DNA, 20 bp, Artificial Sequence
  MKO10018776_A_Foxf2
  gRNA
gacgccaagcagtaatcccg

SEQ ID NO: 18777 - DNA, 20 bp, Artificial Sequence
  MKO10018777_A_Foxf2
  gRNA
aaatctttcctgtcgcacac

SEQ ID NO: 18778 - DNA, 20 bp, Artificial Sequence
  MKO10018778_A_Foxg1
  gRNA
accgcgccactacgacgacc

SEQ ID NO: 18779 - DNA, 20 bp, Artificial Sequence
  MKO10018779_A_Foxg1
  gRNA
tcgagcgacgacgtgttcat

SEQ ID NO: 18780 - DNA, 20 bp, Artificial Sequence
  MKO10018780_A_Foxg1
  gRNA
atgaacacgtcgtcgctcga

SEQ ID NO: 18781 - DNA, 20 bp, Artificial Sequence
  MKO10018781_A_Foxh1
  gRNA
ctcagctgagagttgtcgcg

SEQ ID NO: 18782 - DNA, 20 bp, Artificial Sequence
  MKO10018782_A_Foxh1
  gRNA
acactgccctgtgccgtcga

SEQ ID NO: 18783 - DNA, 20 bp, Artificial Sequence
  MKO10018783_A_Foxh1
  gRNA
cttatggaagcaccgattag

SEQ ID NO: 18784 - DNA, 20 bp, Artificial Sequence
  MKO10018784_A_Foxi1
  gRNA
gtattcgccaccaccttcga

SEQ ID NO: 18785 - DNA, 20 bp, Artificial Sequence
  MKO10018785_A_Foxi1
  gRNA
gaaagttgtcggccacgtac

SEQ ID NO: 18786 - DNA, 20 bp, Artificial Sequence
  MKO10018786_A_Foxi1
  gRNA
aaaccctattagccgctccg

SEQ ID NO: 18787 - DNA, 20 bp, Artificial Sequence
  MKO10018787_A_Foxi2
  gRNA
tccaaagcgcgccgctacgc

SEQ ID NO: 18788 - DNA, 20 bp, Artificial Sequence
  MKO10018788_A_Foxi2
  gRNA
atcgcgcatcccccgagcta

SEQ ID NO: 18789 - DNA, 20 bp, Artificial Sequence
  MKO10018789_A_Foxi2
  gRNA
cagattcctaacaccgcgcc

SEQ ID NO: 18790 - DNA, 20 bp, Artificial Sequence
  MKO10018790_A_Foxi3
  gRNA
cgaagttgtcgccgcaatac

SEQ ID NO: 18791 - DNA, 20 bp, Artificial Sequence
  MKO10018791_A_Foxi3
  gRNA
gcgaccaccctactcgtact

SEQ ID NO: 18792 - DNA, 20 bp, Artificial Sequence
  MKO10018792_A_Foxi3
  gRNA
tcggaagcgaaggcgccgcg

SEQ ID NO: 18793 - DNA, 20 bp, Artificial Sequence
  MKO10018793_A_Foxj1
  gRNA
cacatctcgaagcgcgcccc

SEQ ID NO: 18794 - DNA, 20 bp, Artificial Sequence
  MKO10018794_A_Foxj1
  gRNA
tcgagatgtgcacgacgatg

SEQ ID NO: 18795 - DNA, 20 bp, Artificial Sequence
  MKO10018795_A_Foxj1
  gRNA
gtgggcctctgaccgtgaac

SEQ ID NO: 18796 - DNA, 20 bp, Artificial Sequence
  MKO10018796_A_Foxj2
  gRNA
gcaggtgtcaattgtccaat

SEQ ID NO: 18797 - DNA, 20 bp, Artificial Sequence
  MKO10018797_A_Foxj2
  gRNA
agtcccctcgtgagagagtg

SEQ ID NO: 18798 - DNA, 20 bp, Artificial Sequence
  MKO10018798_A_Foxj2
  gRNA
ccttccggaaacacttgtta

SEQ ID NO: 18799 - DNA, 20 bp, Artificial Sequence
  MKO10018799_A_Foxj3
  gRNA
agagggcaagatccgtagaa

SEQ ID NO: 18800 - DNA, 20 bp, Artificial Sequence
  MKO10018800_A_Foxj3
  gRNA
gtaggcagcgtgtcttcctt

SEQ ID NO: 18801 - DNA, 20 bp, Artificial Sequence
  MKO10018801_A_Foxj3
  gRNA
gcagcctaacatctatggac

SEQ ID NO: 18802 - DNA, 20 bp, Artificial Sequence
  MKO10018802_A_Foxk1
  gRNA
ctgcacgatcagctgcgcat

SEQ ID NO: 18803 - DNA, 20 bp, Artificial Sequence
  MKO10018803_A_Foxk1
  gRNA
tgatggccgtgctcgggaac

SEQ ID NO: 18804 - DNA, 20 bp, Artificial Sequence
  MKO10018804_A_Foxk1
  gRNA
ctatgcgcagctgatcgtgc

SEQ ID NO: 18805 - DNA, 20 bp, Artificial Sequence
  MKO10018805_A_Foxk2
  gRNA
gccatcggacctcagtttaa

SEQ ID NO: 18806 - DNA, 20 bp, Artificial Sequence
  MKO10018806_A_Foxk2
  gRNA
gctatacctgatagttcccg

SEQ ID NO: 18807 - DNA, 20 bp, Artificial Sequence
  MKO10018807_A_Foxk2
  gRNA
cctgaagaccctgctccgcg

SEQ ID NO: 18808 - DNA, 20 bp, Artificial Sequence
  MKO10018808_A_Foxl1
  gRNA
cggctcgacccgggtgcgct

SEQ ID NO: 18809 - DNA, 20 bp, Artificial Sequence
  MKO10018809_A_Foxl1
  gRNA
cgatgtagggtccccggacc

SEQ ID NO: 18810 - DNA, 20 bp, Artificial Sequence
  MKO10018810_A_Foxl1
  gRNA
ttcgacgcgcacgtccaggg

SEQ ID NO: 18811 - DNA, 20 bp, Artificial Sequence
  MKO10018811_A_Foxl2
  gRNA
gaagcccccgtactcgtacg

SEQ ID NO: 18812 - DNA, 20 bp, Artificial Sequence
  MKO10018812_A_Foxl2
  gRNA
agggccccccaggccgttgt

SEQ ID NO: 18813 - DNA, 20 bp, Artificial Sequence
  MKO10018813_A_Foxl2
  gRNA
gcgcgcccgtcttgctgtcg

SEQ ID NO: 18814 - DNA, 20 bp, Artificial Sequence
  MKO10018814_A_Foxm1
  gRNA
gggcccctgcagcgttaagc

SEQ ID NO: 18815 - DNA, 20 bp, Artificial Sequence
  MKO10018815_A_Foxm1
  gRNA
tccacaatcgcccgagcact

SEQ ID NO: 18816 - DNA, 20 bp, Artificial Sequence
  MKO10018816_A_Foxm1
  gRNA
gtcaagtagcgattggcact

SEQ ID NO: 18817 - DNA, 20 bp, Artificial Sequence
  MKO10018817_A_Foxn1
  gRNA
gcaccccaggccaacgccga

SEQ ID NO: 18818 - DNA, 20 bp, Artificial Sequence
  MKO10018818_A_Foxn1
  gRNA
catcaagtgccatggccgtc

SEQ ID NO: 18819 - DNA, 20 bp, Artificial Sequence
  MKO10018819_A_Foxn1
  gRNA
ctgcacagccggacccggcc

SEQ ID NO: 18820 - DNA, 20 bp, Artificial Sequence
  MKO10018820_A_Foxn2
  gRNA
ggctacgcaccgcaagctcg

SEQ ID NO: 18821 - DNA, 20 bp, Artificial Sequence
  MKO10018821_A_Foxn2
  gRNA
catccgtctcctcgtcgctg

SEQ ID NO: 18822 - DNA, 20 bp, Artificial Sequence
  MKO10018822_A_Foxn2
  gRNA
ttctggatcaacgcaccaca

SEQ ID NO: 18823 - DNA, 20 bp, Artificial Sequence
  MKO10018823_A_Foxn3
  gRNA
gccgcccgagagcgatgacg

SEQ ID NO: 18824 - DNA, 20 bp, Artificial Sequence
  MKO10018824_A_Foxn3
  gRNA
atgcgtatccgctgtccccc

SEQ ID NO: 18825 - DNA, 20 bp, Artificial Sequence
  MKO10018825_A_Foxn3
  gRNA
attggtaacggccggacacc

SEQ ID NO: 18826 - DNA, 20 bp, Artificial Sequence
  MKO10018826_A_Foxn4
  gRNA
cggatagacctgggcagttc

SEQ ID NO: 18827 - DNA, 20 bp, Artificial Sequence
  MKO10018827_A_Foxn4
  gRNA
cacgtccacggccgtgagcc

SEQ ID NO: 18828 - DNA, 20 bp, Artificial Sequence
  MKO10018828_A_Foxn4
  gRNA
gagacgcatgcattgccccg

SEQ ID NO: 18829 - DNA, 20 bp, Artificial Sequence
  MKO10018829_A_Foxo1
  gRNA
gctcgtcgcgccgcaacgcg

SEQ ID NO: 18830 - DNA, 20 bp, Artificial Sequence
  MKO10018830_A_Foxo1
  gRNA
ttggcggccgcgccgcccga

SEQ ID NO: 18831 - DNA, 20 bp, Artificial Sequence
  MKO10018831_A_Foxo1
  gRNA
cacgggggtcaagcggttca

SEQ ID NO: 18832 - DNA, 20 bp, Artificial Sequence
  MKO10018832_A_Foxo3
  gRNA
cgttgcgaagcatcacgttc

SEQ ID NO: 18833 - DNA, 20 bp, Artificial Sequence
  MKO10018833_A_Foxo3
  gRNA
tctcgatggcgcgggtgatc

SEQ ID NO: 18834 - DNA, 20 bp, Artificial Sequence
  MKO10018834_A_Foxo3
  gRNA
ggactgtcgtctgccgactc

SEQ ID NO: 18835 - DNA, 20 bp, Artificial Sequence
  MKO10018835_A_Foxo4
  gRNA
cactcgcccagatctacgaa

SEQ ID NO: 18836 - DNA, 20 bp, Artificial Sequence
  MKO10018836_A_Foxo4
  gRNA
gccgtccgcgatcctgcacc

SEQ ID NO: 18837 - DNA, 20 bp, Artificial Sequence
  MKO10018837_A_Foxo4
  gRNA
tgttatccatgtcgcactcc

SEQ ID NO: 18838 - DNA, 20 bp, Artificial Sequence
  MKO10018838_A_Foxo6
  gRNA
tgcgaagctgcgagcgcatc

SEQ ID NO: 18839 - DNA, 20 bp, Artificial Sequence
  MKO10018839_A_Foxo6
  gRNA
acttggccggcgacgaggac

SEQ ID NO: 18840 - DNA, 20 bp, Artificial Sequence
  MKO10018840_A_Foxo6
  gRNA
ccacgcctcgtagtcgtcac

SEQ ID NO: 18841 - DNA, 20 bp, Artificial Sequence
  MKO10018841_A_Foxp1
  gRNA
cgtgtgcttaccttgagcga

SEQ ID NO: 18842 - DNA, 20 bp, Artificial Sequence
  MKO10018842_A_Foxp1
  gRNA
aacccgcatgcctctaccaa

SEQ ID NO: 18843 - DNA, 20 bp, Artificial Sequence
  MKO10018843_A_Foxp1
  gRNA
cagagctgctgcagttccgt

SEQ ID NO: 18844 - DNA, 20 bp, Artificial Sequence
  MKO10018844_A_Foxp2
  gRNA
ctgtaccttgaggcagcgac

SEQ ID NO: 18845 - DNA, 20 bp, Artificial Sequence
  MKO10018845_A_Foxp2
  gRNA
agatgaggccctggcgctga

SEQ ID NO: 18846 - DNA, 20 bp, Artificial Sequence
  MKO10018846_A_Foxp2
  gRNA
acaaaagttgtcttgctgcc

SEQ ID NO: 18847 - DNA, 20 bp, Artificial Sequence
  MKO10018847_A_Foxp3
  gRNA
gcaccgtctggggcccgact

SEQ ID NO: 18848 - DNA, 20 bp, Artificial Sequence
  MKO10018848_A_Foxp3
  gRNA
tgtgctccaagtgcgtccac

SEQ ID NO: 18849 - DNA, 20 bp, Artificial Sequence
  MKO10018849_A_Foxp3
  gRNA
ggttgtccagtggacgcact

SEQ ID NO: 18850 - DNA, 20 bp, Artificial Sequence
  MKO10018850_A_Foxp4
  gRNA
acaatcaggtcggctccgtc

SEQ ID NO: 18851 - DNA, 20 bp, Artificial Sequence
  MKO10018851_A_Foxp4
  gRNA
caatggcgagatgagccccg

SEQ ID NO: 18852 - DNA, 20 bp, Artificial Sequence
  MKO10018852_A_Foxp4
  gRNA
gctggggggtaagcatctgc

SEQ ID NO: 18853 - DNA, 20 bp, Artificial Sequence
  MKO10018853_A_Foxq1
  gRNA
cgcgcagcaagccgtacacg

SEQ ID NO: 18854 - DNA, 20 bp, Artificial Sequence
  MKO10018854_A_Foxq1
  gRNA
agcgaatacaccttcgccga

SEQ ID NO: 18855 - DNA, 20 bp, Artificial Sequence
  MKO10018855_A_Foxq1
  gRNA
gccgagcgcccaagacggtc

SEQ ID NO: 18856 - DNA, 20 bp, Artificial Sequence
  MKO10018856_A_Foxr1
  gRNA
gggctccactcgagaatccg

SEQ ID NO: 18857 - DNA, 20 bp, Artificial Sequence
  MKO10018857_A_Foxr1
  gRNA
tatgttcttgagcgctgagt

SEQ ID NO: 18858 - DNA, 20 bp, Artificial Sequence
  MKO10018858_A_Foxr1
  gRNA
aggagaaactgtaacgaccc

SEQ ID NO: 18859 - DNA, 20 bp, Artificial Sequence
  MKO10018859_A_Foxr2
  gRNA
tctggtgctgtccgaaaata

SEQ ID NO: 18860 - DNA, 20 bp, Artificial Sequence
  MKO10018860_A_Foxr2
  gRNA
tcaggaggacacccgtgtct

SEQ ID NO: 18861 - DNA, 20 bp, Artificial Sequence
  MKO10018861_A_Foxr2
  gRNA
gatgctctcccttcgagcat

SEQ ID NO: 18862 - DNA, 20 bp, Artificial Sequence
  MKO10018862_A_Foxred1
  gRNA
tactccttctacgtttatcc

SEQ ID NO: 18863 - DNA, 20 bp, Artificial Sequence
  MKO10018863_A_Foxred1
  gRNA
aaacgtagaaggagtagctc

SEQ ID NO: 18864 - DNA, 20 bp, Artificial Sequence
  MKO10018864_A_Foxred1
  gRNA
gggttgaactgaagttccac

SEQ ID NO: 18865 - DNA, 20 bp, Artificial Sequence
  MKO10018865_A_Foxred2
  gRNA
acggtcgtaggccacccgca

SEQ ID NO: 18866 - DNA, 20 bp, Artificial Sequence
  MKO10018866_A_Foxred2
  gRNA
tgaagccgccagcggatttc

SEQ ID NO: 18867 - DNA, 20 bp, Artificial Sequence
  MKO10018867_A_Foxred2
  gRNA
tccacatgctgagccgttcc

SEQ ID NO: 18868 - DNA, 20 bp, Artificial Sequence
  MKO10018868_A_Foxs1
  gRNA
tggcatctaccgctacatca

SEQ ID NO: 18869 - DNA, 20 bp, Artificial Sequence
  MKO10018869_A_Foxs1
  gRNA
tgtcgtggcagtccggatcc

SEQ ID NO: 18870 - DNA, 20 bp, Artificial Sequence
  MKO10018870_A_Foxs1
  gRNA
cctcgtgatgaccgcaagcc

SEQ ID NO: 18871 - DNA, 20 bp, Artificial Sequence
  MKO10018871_A_Fpgs
  gRNA
cggaattacggcctgaagac

SEQ ID NO: 18872 - DNA, 20 bp, Artificial Sequence
  MKO10018872_A_Fpgs
  gRNA
ccgttcggtgaaggcacagg

SEQ ID NO: 18873 - DNA, 20 bp, Artificial Sequence
  MKO10018873_A_Fpgs
  gRNA
cgggagcggattcgaatcaa

SEQ ID NO: 18874 - DNA, 20 bp, Artificial Sequence
  MKO10018874_A_Fpgt
  gRNA
ctctccgcgaagccaccctg

SEQ ID NO: 18875 - DNA, 20 bp, Artificial Sequence
  MKO10018875_A_Fpgt
  gRNA
aaaatctgcgcagtttccgc

SEQ ID NO: 18876 - DNA, 20 bp, Artificial Sequence
  MKO10018876_A_Fpgt
  gRNA
ttacagcgcttaacatccca

SEQ ID NO: 18877 - DNA, 20 bp, Artificial Sequence
  MKO10018877_A_Fpr-rs3
  gRNA
tcctgccgactctgaactat

SEQ ID NO: 18878 - DNA, 20 bp, Artificial Sequence
  MKO10018878_A_Fpr-rs3
  gRNA
gacacctttaattgctcctc

SEQ ID NO: 18879 - DNA, 20 bp, Artificial Sequence
  MKO10018879_A_Fpr-rs3
  gRNA
cttgtgtcctgcacccagta

SEQ ID NO: 18880 - DNA, 20 bp, Artificial Sequence
  MKO10018880_A_Fpr-rs4
  gRNA
gcccattacctagaacaccg

SEQ ID NO: 18881 - DNA, 20 bp, Artificial Sequence
  MKO10018881_A_Fpr-rs4
  gRNA
tcaaggactagtcttccctc

SEQ ID NO: 18882 - DNA, 20 bp, Artificial Sequence
  MKO10018882_A_Fpr-rs4
  gRNA
tttgtgtcctgtgcccagta

SEQ ID NO: 18883 - DNA, 20 bp, Artificial Sequence
  MKO10018883_A_Fpr-rs6
  gRNA
cacagaataatattgacacg

SEQ ID NO: 18884 - DNA, 20 bp, Artificial Sequence
  MKO10018884_A_Fpr-rs6
  gRNA
gtagtcacgaagatacaatg

SEQ ID NO: 18885 - DNA, 20 bp, Artificial Sequence
  MKO10018885_A_Fpr-rs6
  gRNA
cgaaagtgatctttggagct

SEQ ID NO: 18886 - DNA, 20 bp, Artificial Sequence
  MKO10018886_A_Fpr1
  gRNA
acagtccctaatagtagact

SEQ ID NO: 18887 - DNA, 20 bp, Artificial Sequence
  MKO10018887_A_Fpr1
  gRNA
gtggtcaaacgaatgataac

SEQ ID NO: 18888 - DNA, 20 bp, Artificial Sequence
  MKO10018888_A_Fpr1
  gRNA
ccacaatccaagtccgtgaa

SEQ ID NO: 18889 - DNA, 20 bp, Artificial Sequence
  MKO10018889_A_Fpr2
  gRNA
taaatctctcacgaaagtcc

SEQ ID NO: 18890 - DNA, 20 bp, Artificial Sequence
  MKO10018890_A_Fpr2
  gRNA
ctctctcaagactataaggc

SEQ ID NO: 18891 - DNA, 20 bp, Artificial Sequence
  MKO10018891_A_Fpr2
  gRNA
gcctttaactcaatgtctgc

SEQ ID NO: 18892 - DNA, 20 bp, Artificial Sequence
  MKO10018892_A_Fpr3
  gRNA
aggacggctggaattaacaa

SEQ ID NO: 18893 - DNA, 20 bp, Artificial Sequence
  MKO10018893_A_Fpr3
  gRNA
gcagtagatgtaaacctatt

SEQ ID NO: 18894 - DNA, 20 bp, Artificial Sequence
  MKO10018894_A_Fpr3
  gRNA
ttcctcaacagagttgcccc

SEQ ID NO: 18895 - DNA, 20 bp, Artificial Sequence
  MKO10018895_A_Fra10ac1
  gRNA
tcgccgcagacttgctcgac

SEQ ID NO: 18896 - DNA, 20 bp, Artificial Sequence
  MKO10018896_A_Fra10ac1
  gRNA
acacctgtcgagcaagtctg

SEQ ID NO: 18897 - DNA, 20 bp, Artificial Sequence
  MKO10018897_A_Fra10ac1
  gRNA
aatatagtcgtttacaaact

SEQ ID NO: 18898 - DNA, 20 bp, Artificial Sequence
  MKO10018898_A_Fras1
  gRNA
acgctgctgccctatctgtg

SEQ ID NO: 18899 - DNA, 20 bp, Artificial Sequence
  MKO10018899_A_Fras1
  gRNA
cgacagttctggcatgaatc

SEQ ID NO: 18900 - DNA, 20 bp, Artificial Sequence
  MKO10018900_A_Fras1
  gRNA
tgccagaactgtcgttgcca

SEQ ID NO: 18901 - DNA, 20 bp, Artificial Sequence
  MKO10018901_A_Frat1
  gRNA
atccgcgtcgctgttgcaag

SEQ ID NO: 18902 - DNA, 20 bp, Artificial Sequence
  MKO10018902_A_Frat1
  gRNA
cttgacggacccccggggac

SEQ ID NO: 18903 - DNA, 20 bp, Artificial Sequence
  MKO10018903_A_Frat1
  gRNA
gtgcttagtttgccggtccc

SEQ ID NO: 18904 - DNA, 20 bp, Artificial Sequence
  MKO10018904_A_Frat2
  gRNA
caaccgcggcgaccgctcgc

SEQ ID NO: 18905 - DNA, 20 bp, Artificial Sequence
  MKO10018905_A_Frat2
  gRNA
tgactgagtccggtccgctt

SEQ ID NO: 18906 - DNA, 20 bp, Artificial Sequence
  MKO10018906_A_Frat2
  gRNA
cccggaccccggagcgctcg

SEQ ID NO: 18907 - DNA, 20 bp, Artificial Sequence
  MKO10018907_A_Frem1
  gRNA
cgtggtgaatcgtaagtcag

SEQ ID NO: 18908 - DNA, 20 bp, Artificial Sequence
  MKO10018908_A_Frem1
  gRNA
acgaccagcttgccgtgagc

SEQ ID NO: 18909 - DNA, 20 bp, Artificial Sequence
  MKO10018909_A_Frem1
  gRNA
gtgaacatacttcacttcgt

SEQ ID NO: 18910 - DNA, 20 bp, Artificial Sequence
  MKO10018910_A_Frem2
  gRNA
gctcgtgttccccgtcgctc

SEQ ID NO: 18911 - DNA, 20 bp, Artificial Sequence
  MKO10018911_A_Frem2
  gRNA
tttccgcaggtatcggcacc

SEQ ID NO: 18912 - DNA, 20 bp, Artificial Sequence
  MKO10018912_A_Frem2
  gRNA
gatattgttcttacacgcag

SEQ ID NO: 18913 - DNA, 20 bp, Artificial Sequence
  MKO10018913_A_Frem3
  gRNA
tcgaagtgactctcacccgc

SEQ ID NO: 18914 - DNA, 20 bp, Artificial Sequence
  MKO10018914_A_Frem3
  gRNA
taacgacagatgtgcctcca

SEQ ID NO: 18915 - DNA, 20 bp, Artificial Sequence
  MKO10018915_A_Frem3
  gRNA
ctggttcctgtgagacgatc

SEQ ID NO: 18916 - DNA, 20 bp, Artificial Sequence
  MKO10018916_A_Frg1
  gRNA
gttgggcgttcggatgcaat

SEQ ID NO: 18917 - DNA, 20 bp, Artificial Sequence
  MKO10018917_A_Frg1
  gRNA
gcttacccacaatatcaagt

SEQ ID NO: 18918 - DNA, 20 bp, Artificial Sequence
  MKO10018918_A_Frg1
  gRNA
aggagcctatatccatgcac

SEQ ID NO: 18919 - DNA, 20 bp, Artificial Sequence
  MKO10018919_A_Frk
  gRNA
agttgcggtctatctcccac

SEQ ID NO: 18920 - DNA, 20 bp, Artificial Sequence
  MKO10018920_A_Frk
  gRNA
cagtcgcttcaaaagctgta

SEQ ID NO: 18921 - DNA, 20 bp, Artificial Sequence
  MKO10018921_A_Frk
  gRNA
acacagcccgtcacttgttg

SEQ ID NO: 18922 - DNA, 20 bp, Artificial Sequence
  MKO10018922_A_Frmd3
  gRNA
cgagtcgtccagcagtcgaa

SEQ ID NO: 18923 - DNA, 20 bp, Artificial Sequence
  MKO10018923_A_Frmd3
  gRNA
tcttgtcactgtgcgccgag

SEQ ID NO: 18924 - DNA, 20 bp, Artificial Sequence
  MKO10018924_A_Frmd3
  gRNA
ctgcaactactatagcctgc

SEQ ID NO: 18925 - DNA, 20 bp, Artificial Sequence
  MKO10018925_A_Frmd4a
  gRNA
cgagatcgccattgacctga

SEQ ID NO: 18926 - DNA, 20 bp, Artificial Sequence
  MKO10018926_A_Frmd4a
  gRNA
ggaatcagatagctcgcagt

SEQ ID NO: 18927 - DNA, 20 bp, Artificial Sequence
  MKO10018927_A_Frmd4a
  gRNA
tggcgatctcgctcagactt

SEQ ID NO: 18928 - DNA, 20 bp, Artificial Sequence
  MKO10018928_A_Frmd4b
  gRNA
ctcttctgcacttcgctgtc

SEQ ID NO: 18929 - DNA, 20 bp, Artificial Sequence
  MKO10018929_A_Frmd4b
  gRNA
gaacccttacctgcaaaacc

SEQ ID NO: 18930 - DNA, 20 bp, Artificial Sequence
  MKO10018930_A_Frmd4b
  gRNA
gtgtcttaccttgtgtacac

SEQ ID NO: 18931 - DNA, 20 bp, Artificial Sequence
  MKO10018931_A_Frmd5
  gRNA
tgacttacccgctgcttatc

SEQ ID NO: 18932 - DNA, 20 bp, Artificial Sequence
  MKO10018932_A_Frmd5
  gRNA
cggcagggtaaaacttcacg

SEQ ID NO: 18933 - DNA, 20 bp, Artificial Sequence
  MKO10018933_A_Frmd5
  gRNA
cgaccccgctgccctgaaag

SEQ ID NO: 18934 - DNA, 20 bp, Artificial Sequence
  MKO10018934_A_Frmd6
  gRNA
ttcgtattgccgtaccttgc

SEQ ID NO: 18935 - DNA, 20 bp, Artificial Sequence
  MKO10018935_A_Frmd6
  gRNA
tctcagggcatcgaccagtt

SEQ ID NO: 18936 - DNA, 20 bp, Artificial Sequence
  MKO10018936_A_Frmd6
  gRNA
ttgcaagatactattattac

SEQ ID NO: 18937 - DNA, 20 bp, Artificial Sequence
  MKO10018937_A_Frmd7
  gRNA
atcttcgggaagaactcaca

SEQ ID NO: 18938 - DNA, 20 bp, Artificial Sequence
  MKO10018938_A_Frmd7
  gRNA
gagttcttcccgaagatgtc

SEQ ID NO: 18939 - DNA, 20 bp, Artificial Sequence
  MKO10018939_A_Frmd7
  gRNA
ccatctcaatcttgctgaaa

SEQ ID NO: 18940 - DNA, 20 bp, Artificial Sequence
  MKO10018940_A_Frmd8
  gRNA
gcactactgtatcatccgcc

SEQ ID NO: 18941 - DNA, 20 bp, Artificial Sequence
  MKO10018941_A_Frmd8
  gRNA
gcaggacttcacggactgcg

SEQ ID NO: 18942 - DNA, 20 bp, Artificial Sequence
  MKO10018942_A_Frmd8
  gRNA
ccactggcggcccagtttat

SEQ ID NO: 18943 - DNA, 20 bp, Artificial Sequence
  MKO10018943_A_Frmpd1
  gRNA
aatatcagccgctcgttcac

SEQ ID NO: 18944 - DNA, 20 bp, Artificial Sequence
  MKO10018944_A_Frmpd1
  gRNA
agaggtttaccgatgtgcag

SEQ ID NO: 18945 - DNA, 20 bp, Artificial Sequence
  MKO10018945_A_Frmpd1
  gRNA
gctgaagagcaaccccgtga

SEQ ID NO: 18946 - DNA, 20 bp, Artificial Sequence
  MKO10018946_A_Frmpd3
  gRNA
ggatgtgatggcgactctac

SEQ ID NO: 18947 - DNA, 20 bp, Artificial Sequence
  MKO10018947_A_Frmpd3
  gRNA
tttcgagtacttatacatcc

SEQ ID NO: 18948 - DNA, 20 bp, Artificial Sequence
  MKO10018948_A_Frmpd3
  gRNA
tataagtactcgaaagcagc

SEQ ID NO: 18949 - DNA, 20 bp, Artificial Sequence
  MKO10018949_A_Frmpd4
  gRNA
gttactgaccgaacgaccac

SEQ ID NO: 18950 - DNA, 20 bp, Artificial Sequence
  MKO10018950_A_Frmpd4
  gRNA
aggtggccagcccgaagact

SEQ ID NO: 18951 - DNA, 20 bp, Artificial Sequence
  MKO10018951_A_Frmpd4
  gRNA
tgaagtagtcacgtccatct

SEQ ID NO: 18952 - DNA, 20 bp, Artificial Sequence
  MKO10018952_A_Frrs1l
  gRNA
cacgggacgcttaaacctgc

SEQ ID NO: 18953 - DNA, 20 bp, Artificial Sequence
  MKO10018953_A_Frrs1l
  gRNA
agaacaaccgcgtcacctgc

SEQ ID NO: 18954 - DNA, 20 bp, Artificial Sequence
  MKO10018954_A_Frrs1l
  gRNA
ccacgtcagcgcctatcatc

SEQ ID NO: 18955 - DNA, 20 bp, Artificial Sequence
  MKO10018955_A_Frrs1
  gRNA
acaaacctgtacatcggtac

SEQ ID NO: 18956 - DNA, 20 bp, Artificial Sequence
  MKO10018956_A_Frrs1
  gRNA
tctgacctgtaccgatgtac

SEQ ID NO: 18957 - DNA, 20 bp, Artificial Sequence
  MKO10018957_A_Frrs1
  gRNA
aaacgacacatagccgtcac

SEQ ID NO: 18958 - DNA, 20 bp, Artificial Sequence
  MKO10018958_A_Frs2
  gRNA
cgagatgtaccgtcgtctcg

SEQ ID NO: 18959 - DNA, 20 bp, Artificial Sequence
  MKO10018959_A_Frs2
  gRNA
agtcatagccgtatcgtcgt

SEQ ID NO: 18960 - DNA, 20 bp, Artificial Sequence
  MKO10018960_A_Frs2
  gRNA
tacctctgcctacgacgata

SEQ ID NO: 18961 - DNA, 20 bp, Artificial Sequence
  MKO10018961_A_Frs3
  gRNA
gtcccactgacccgccgacg

SEQ ID NO: 18962 - DNA, 20 bp, Artificial Sequence
  MKO10018962_A_Frs3
  gRNA
agtctgcgacacccctcgcc

SEQ ID NO: 18963 - DNA, 20 bp, Artificial Sequence
  MKO10018963_A_Frs3
  gRNA
agtcgtagccatagcgccgc

SEQ ID NO: 18964 - DNA, 20 bp, Artificial Sequence
  MKO10018964_A_Fryl
  gRNA
ggcgtcggtaccagtcaaac

SEQ ID NO: 18965 - DNA, 20 bp, Artificial Sequence
  MKO10018965_A_Fryl
  gRNA
ccgcgagagagattacctcc

SEQ ID NO: 18966 - DNA, 20 bp, Artificial Sequence
  MKO10018966_A_Fryl
  gRNA
gcccgaccccttagtccatg

SEQ ID NO: 18967 - DNA, 20 bp, Artificial Sequence
  MKO10018967_A_Fry
  gRNA
accagtcgaagagtgttcgc

SEQ ID NO: 18968 - DNA, 20 bp, Artificial Sequence
  MKO10018968_A_Fry
  gRNA
ttgacgaagtctctgcagcg

SEQ ID NO: 18969 - DNA, 20 bp, Artificial Sequence
  MKO10018969_A_Fry
  gRNA
ttggacttattgcttgttcg

SEQ ID NO: 18970 - DNA, 20 bp, Artificial Sequence
  MKO10018970_A_Frzb
  gRNA
tcatgatgtgaccgccgttg

SEQ ID NO: 18971 - DNA, 20 bp, Artificial Sequence
  MKO10018971_A_Frzb
  gRNA
catccgggctaaagttaaag

SEQ ID NO: 18972 - DNA, 20 bp, Artificial Sequence
  MKO10018972_A_Frzb
  gRNA
tgtccagtacttgaatccat

SEQ ID NO: 18973 - DNA, 20 bp, Artificial Sequence
  MKO10018973_A_Fsbp
  gRNA
agctgaaagcgactcgctta

SEQ ID NO: 18974 - DNA, 20 bp, Artificial Sequence
  MKO10018974_A_Fsbp
  gRNA
gcagttaactataatgcgat

SEQ ID NO: 18975 - DNA, 20 bp, Artificial Sequence
  MKO10018975_A_Fsbp
  gRNA
taccagttcgctgcaggtaa

SEQ ID NO: 18976 - DNA, 20 bp, Artificial Sequence
  MKO10018976_A_Fscb
  gRNA
tagctccatgactaagtcga

SEQ ID NO: 18977 - DNA, 20 bp, Artificial Sequence
  MKO10018977_A_Fscb
  gRNA
tactatgcaagagtttcgtg

SEQ ID NO: 18978 - DNA, 20 bp, Artificial Sequence
  MKO10018978_A_Fscb
  gRNA
tttagtagaacctgatctgc

SEQ ID NO: 18979 - DNA, 20 bp, Artificial Sequence
  MKO10018979_A_Fscn1
  gRNA
cgggttcattggctgccgca

SEQ ID NO: 18980 - DNA, 20 bp, Artificial Sequence
  MKO10018980_A_Fscn1
  gRNA
accgccccatcatcgtgttc

SEQ ID NO: 18981 - DNA, 20 bp, Artificial Sequence
  MKO10018981_A_Fscn1
  gRNA
gctgctactttgacatcgag

SEQ ID NO: 18982 - DNA, 20 bp, Artificial Sequence
  MKO10018982_A_Fscn2
  gRNA
cgtcgctgcacacgcttcca

SEQ ID NO: 18983 - DNA, 20 bp, Artificial Sequence
  MKO10018983_A_Fscn2
  gRNA
gatggcgcctatcagattag

SEQ ID NO: 18984 - DNA, 20 bp, Artificial Sequence
  MKO10018984_A_Fscn2
  gRNA
attcctgatgcaaatcgacc

SEQ ID NO: 18985 - DNA, 20 bp, Artificial Sequence
  MKO10018985_A_Fscn3
  gRNA
gggtccatttgccgtttcgg

SEQ ID NO: 18986 - DNA, 20 bp, Artificial Sequence
  MKO10018986_A_Fscn3
  gRNA
aggcggcacattgtatccgc

SEQ ID NO: 18987 - DNA, 20 bp, Artificial Sequence
  MKO10018987_A_Fscn3
  gRNA
tcgaccgcgtaagacgagaa

SEQ ID NO: 18988 - DNA, 20 bp, Artificial Sequence
  MKO10018988_A_Fsd1l
  gRNA
tgatagcttgtactctatat

SEQ ID NO: 18989 - DNA, 20 bp, Artificial Sequence
  MKO10018989_A_Fsd1l
  gRNA
aactactagaatttgcaaca

SEQ ID NO: 18990 - DNA, 20 bp, Artificial Sequence
  MKO10018990_A_Fsd1l
  gRNA
atacctatccttgatctgtc

SEQ ID NO: 18991 - DNA, 20 bp, Artificial Sequence
  MKO10018991_A_Fsd1
  gRNA
tggttgcacctgcagctcgt

SEQ ID NO: 18992 - DNA, 20 bp, Artificial Sequence
  MKO10018992_A_Fsd1
  gRNA
gctctccagggctcgtgtgc

SEQ ID NO: 18993 - DNA, 20 bp, Artificial Sequence
  MKO10018993_A_Fsd1
  gRNA
gctcctccagaaccgacgtg

SEQ ID NO: 18994 - DNA, 20 bp, Artificial Sequence
  MKO10018994_A_Fsd2
  gRNA
gctgaccagttgtccgtata

SEQ ID NO: 18995 - DNA, 20 bp, Artificial Sequence
  MKO10018995_A_Fsd2
  gRNA
ggaaaatttcgctagccacc

SEQ ID NO: 18996 - DNA, 20 bp, Artificial Sequence
  MKO10018996_A_Fsd2
  gRNA
atagcattcatactcctcgc

SEQ ID NO: 18997 - DNA, 20 bp, Artificial Sequence
  MKO10018997_A_Fshb
  gRNA
tacgagaccgtaagattgcc

SEQ ID NO: 18998 - DNA, 20 bp, Artificial Sequence
  MKO10018998_A_Fshb
  gRNA
gcagtagcccgcacaccaag

SEQ ID NO: 18999 - DNA, 20 bp, Artificial Sequence
  MKO10018999_A_Fshb
  gRNA
gcataagcatcaataccact

SEQ ID NO: 19000 - DNA, 20 bp, Artificial Sequence
  MKO10019000_A_Fshr
  gRNA
ctcttacagatatcggagac

SEQ ID NO: 19001 - DNA, 20 bp, Artificial Sequence
  MKO10019001_A_Fshr
  gRNA
aagcttcgagtcattccaaa

SEQ ID NO: 19002 - DNA, 20 bp, Artificial Sequence
  MKO10019002_A_Fshr
  gRNA
tctaggttaatatccaacac

SEQ ID NO: 19003 - DNA, 20 bp, Artificial Sequence
  MKO10019003_A_Fsip1
  gRNA
gtcgtcccacctgaatgctc

SEQ ID NO: 19004 - DNA, 20 bp, Artificial Sequence
  MKO10019004_A_Fsip1
  gRNA
ggaatagtaatgatgctaag

SEQ ID NO: 19005 - DNA, 20 bp, Artificial Sequence
  MKO10019005_A_Fsip1
  gRNA
agcattcgtctcttctaatt

SEQ ID NO: 19006 - DNA, 20 bp, Artificial Sequence
  MKO10019006_A_Fstl1
  gRNA
ctaaccgcgatgagctccga

SEQ ID NO: 19007 - DNA, 20 bp, Artificial Sequence
  MKO10019007_A_Fstl1
  gRNA
ggcgccgtcggagctcatcg

SEQ ID NO: 19008 - DNA, 20 bp, Artificial Sequence
  MKO10019008_A_Fstl1
  gRNA
agtgcccatcataatcaacc

SEQ ID NO: 19009 - DNA, 20 bp, Artificial Sequence
  MKO10019009_A_Fstl3
  gRNA
gacttgcgcgtcatgtaccg

SEQ ID NO: 19010 - DNA, 20 bp, Artificial Sequence
  MKO10019010_A_Fstl3
  gRNA
cgagtgcgtgcccaactgcg

SEQ ID NO: 19011 - DNA, 20 bp, Artificial Sequence
  MKO10019011_A_Fstl3
  gRNA
caggtgacacgacgagatgt

SEQ ID NO: 19012 - DNA, 20 bp, Artificial Sequence
  MKO10019012_A_Fstl4
  gRNA
tgcttgctcaataggacgac

SEQ ID NO: 19013 - DNA, 20 bp, Artificial Sequence
  MKO10019013_A_Fstl4
  gRNA
gccgacggcaatgggcacct

SEQ ID NO: 19014 - DNA, 20 bp, Artificial Sequence
  MKO10019014_A_Fstl4
  gRNA
tattatagtcatcaaatcgc

SEQ ID NO: 19015 - DNA, 20 bp, Artificial Sequence
  MKO10019015_A_Fstl5
  gRNA
cttcaacgctgacaagcacc

SEQ ID NO: 19016 - DNA, 20 bp, Artificial Sequence
  MKO10019016_A_Fstl5
  gRNA
gcagtcttcattgtgaacga

SEQ ID NO: 19017 - DNA, 20 bp, Artificial Sequence
  MKO10019017_A_Fstl5
  gRNA
tgattgtcaggtgattaaac

SEQ ID NO: 19018 - DNA, 20 bp, Artificial Sequence
  MKO10019018_A_Fst
  gRNA
cggcgggaaaaaatgcctat

SEQ ID NO: 19019 - DNA, 20 bp, Artificial Sequence
  MKO10019019_A_Fst
  gRNA
aagagtgttgcagcaccggc

SEQ ID NO: 19020 - DNA, 20 bp, Artificial Sequence
  MKO10019020_A_Fst
  gRNA
attgtcgttcacatcctcct

SEQ ID NO: 19021 - DNA, 20 bp, Artificial Sequence
  MKO10019021_A_Ftcd
  gRNA
gtgctgttggacgtcgatgc

SEQ ID NO: 19022 - DNA, 20 bp, Artificial Sequence
  MKO10019022_A_Ftcd
  gRNA
acatccagagcgcccattcg

SEQ ID NO: 19023 - DNA, 20 bp, Artificial Sequence
  MKO10019023_A_Ftcd
  gRNA
ccgcactgtctacactttcg

SEQ ID NO: 19024 - DNA, 20 bp, Artificial Sequence
  MKO10019024_A_Fth1
  gRNA
gtagttctggcgcacttgcg

SEQ ID NO: 19025 - DNA, 20 bp, Artificial Sequence
  MKO10019025_A_Fth1
  gRNA
cgtgaccaacttacgcaaga

SEQ ID NO: 19026 - DNA, 20 bp, Artificial Sequence
  MKO10019026_A_Fth1
  gRNA
ggcacccatcttgcgtaagt

SEQ ID NO: 19027 - DNA, 20 bp, Artificial Sequence
  MKO10019027_A_Fthl17
  gRNA
acaggctgagcttgtcaaag

SEQ ID NO: 19028 - DNA, 20 bp, Artificial Sequence
  MKO10019028_A_Fthl17
  gRNA
gaatgcagcagaactatgac

SEQ ID NO: 19029 - DNA, 20 bp, Artificial Sequence
  MKO10019029_A_Fthl17
  gRNA
tgaacatctctgcactggtc

SEQ ID NO: 19030 - DNA, 20 bp, Artificial Sequence
  MKO10019030_A_Ftl1
  gRNA
tacttacatgagggtccgcg

SEQ ID NO: 19031 - DNA, 20 bp, Artificial Sequence
  MKO10019031_A_Ftl1
  gRNA
cgcttcttacctgcacatcc

SEQ ID NO: 19032 - DNA, 20 bp, Artificial Sequence
  MKO10019032_A_Ftl1
  gRNA
tgcactcttccaggatgtgc

SEQ ID NO: 19033 - DNA, 20 bp, Artificial Sequence
  MKO10019033_A_Ftmt
  gRNA
aagatattccgctaagcccg

SEQ ID NO: 19034 - DNA, 20 bp, Artificial Sequence
  MKO10019034_A_Ftmt
  gRNA
ccagaactttcacccggact

SEQ ID NO: 19035 - DNA, 20 bp, Artificial Sequence
  MKO10019035_A_Ftmt
  gRNA
cgtaggatgcgtaaagctcc

SEQ ID NO: 19036 - DNA, 20 bp, Artificial Sequence
  MKO10019036_A_Fto
  gRNA
gcttgtttcgggacgtggtg

SEQ ID NO: 19037 - DNA, 20 bp, Artificial Sequence
  MKO10019037_A_Fto
  gRNA
gtgtacagctatagctgcga

SEQ ID NO: 19038 - DNA, 20 bp, Artificial Sequence
  MKO10019038_A_Fto
  gRNA
gtttagttccactcaccgtg

SEQ ID NO: 19039 - DNA, 20 bp, Artificial Sequence
  MKO10019039_A_Ftsj1
  gRNA
gagccccgtcacacactact

SEQ ID NO: 19040 - DNA, 20 bp, Artificial Sequence
  MKO10019040_A_Ftsj1
  gRNA
gccaggtgtgatacagatac

SEQ ID NO: 19041 - DNA, 20 bp, Artificial Sequence
  MKO10019041_A_Ftsj1
  gRNA
gctgacctagtagtgtgtga

SEQ ID NO: 19042 - DNA, 20 bp, Artificial Sequence
  MKO10019042_A_Ftsj2
  gRNA
tgatgagcttatcgtgatcg

SEQ ID NO: 19043 - DNA, 20 bp, Artificial Sequence
  MKO10019043_A_Ftsj2
  gRNA
agaaaagttgctcccgccaa

SEQ ID NO: 19044 - DNA, 20 bp, Artificial Sequence
  MKO10019044_A_Ftsj2
  gRNA
taggcgttccccttaaggtt

SEQ ID NO: 19045 - DNA, 20 bp, Artificial Sequence
  MKO10019045_A_Ftsj3
  gRNA
atccgccaggcgcagcacac

SEQ ID NO: 19046 - DNA, 20 bp, Artificial Sequence
  MKO10019046_A_Ftsj3
  gRNA
actgaaagcggcgattgagc

SEQ ID NO: 19047 - DNA, 20 bp, Artificial Sequence
  MKO10019047_A_Ftsj3
  gRNA
taccttgggagtaagcgtca

SEQ ID NO: 19048 - DNA, 20 bp, Artificial Sequence
  MKO10019048_A_Fubp1
  gRNA
ctaaatccgaccatcccatc

SEQ ID NO: 19049 - DNA, 20 bp, Artificial Sequence
  MKO10019049_A_Fubp1
  gRNA
tacctttgctgctgatgcat

SEQ ID NO: 19050 - DNA, 20 bp, Artificial Sequence
  MKO10019050_A_Fubp1
  gRNA
taacttacctccatcttcta

SEQ ID NO: 19051 - DNA, 20 bp, Artificial Sequence
  MKO10019051_A_Fubp3
  gRNA
tactccgtatccgtacactg

SEQ ID NO: 19052 - DNA, 20 bp, Artificial Sequence
  MKO10019052_A_Fubp3
  gRNA
gacccctcagtgtacggata

SEQ ID NO: 19053 - DNA, 20 bp, Artificial Sequence
  MKO10019053_A_Fubp3
  gRNA
gccacagtaggtaaccagtt

SEQ ID NO: 19054 - DNA, 20 bp, Artificial Sequence
  MKO10019054_A_Fuca1
  gRNA
ctacaacgatagccctgtca

SEQ ID NO: 19055 - DNA, 20 bp, Artificial Sequence
  MKO10019055_A_Fuca1
  gRNA
gaccatgtcgaccatcgcca

SEQ ID NO: 19056 - DNA, 20 bp, Artificial Sequence
  MKO10019056_A_Fuca1
  gRNA
actccccgtcggaccagatc

SEQ ID NO: 19057 - DNA, 20 bp, Artificial Sequence
  MKO10019057_A_Fuca2
  gRNA
ggggcgcgccagatcactac

SEQ ID NO: 19058 - DNA, 20 bp, Artificial Sequence
  MKO10019058_A_Fuca2
  gRNA
cagtagtcaccaatgatcgc

SEQ ID NO: 19059 - DNA, 20 bp, Artificial Sequence
  MKO10019059_A_Fuca2
  gRNA
cccgactccccagcgatcat

SEQ ID NO: 19060 - DNA, 20 bp, Artificial Sequence
  MKO10019060_A_Fuk
  gRNA
ccccagactcgagtcggcag

SEQ ID NO: 19061 - DNA, 20 bp, Artificial Sequence
  MKO10019061_A_Fuk
  gRNA
gccagtaacatcgtccccgc

SEQ ID NO: 19062 - DNA, 20 bp, Artificial Sequence
  MKO10019062_A_Fuk
  gRNA
ggccctgccacagtcatcga

SEQ ID NO: 19063 - DNA, 20 bp, Artificial Sequence
  MKO10019063_A_Fundc1
  gRNA
tgacgaatcatacgaagtgt

SEQ ID NO: 19064 - DNA, 20 bp, Artificial Sequence
  MKO10019064_A_Fundc1
  gRNA
aaagcctcccacgaagccgc

SEQ ID NO: 19065 - DNA, 20 bp, Artificial Sequence
  MKO10019065_A_Fundc1
  gRNA
caaatactcgattccaccag

SEQ ID NO: 19066 - DNA, 20 bp, Artificial Sequence
  MKO10019066_A_Fundc2
  gRNA
aaattggctgcaacagctgt

SEQ ID NO: 19067 - DNA, 20 bp, Artificial Sequence
  MKO10019067_A_Fundc2
  gRNA
cactggtttcgtattccaga

SEQ ID NO: 19068 - DNA, 20 bp, Artificial Sequence
  MKO10019068_A_Fundc2
  gRNA
ttgtagctggcaaaccatac

SEQ ID NO: 19069 - DNA, 20 bp, Artificial Sequence
  MKO10019069_A_Fuom
  gRNA
tagggaagttcgcatcagca

SEQ ID NO: 19070 - DNA, 20 bp, Artificial Sequence
  MKO10019070_A_Fuom
  gRNA
gattcataacgcttccatat

SEQ ID NO: 19071 - DNA, 20 bp, Artificial Sequence
  MKO10019071_A_Fuom
  gRNA
cctcaccgggctttccacgt

SEQ ID NO: 19072 - DNA, 20 bp, Artificial Sequence
  MKO10019072_A_Furin
  gRNA
aagaatcatcccgacctagc

SEQ ID NO: 19073 - DNA, 20 bp, Artificial Sequence
  MKO10019073_A_Furin
  gRNA
tcagcgagacctgaatgtga

SEQ ID NO: 19074 - DNA, 20 bp, Artificial Sequence
  MKO10019074_A_Furin
  gRNA
ccctgtcgcctcaccgcccg

SEQ ID NO: 19075 - DNA, 20 bp, Artificial Sequence
  MKO10019075_A_Fus
  gRNA
agcagctatggttcttctta

SEQ ID NO: 19076 - DNA, 20 bp, Artificial Sequence
  MKO10019076_A_Fus
  gRNA
cataaccactgtaactctgt

SEQ ID NO: 19077 - DNA, 20 bp, Artificial Sequence
  MKO10019077_A_Fus
  gRNA
ctcacctttgagttgcttgt

SEQ ID NO: 19078 - DNA, 20 bp, Artificial Sequence
  MKO10019078_A_Fut10
  gRNA
ggggtcgtgcccgtgtatta

SEQ ID NO: 19079 - DNA, 20 bp, Artificial Sequence
  MKO10019079_A_Fut10
  gRNA
ctcgcaacgatctcccacgt

SEQ ID NO: 19080 - DNA, 20 bp, Artificial Sequence
  MKO10019080_A_Fut10
  gRNA
ccctggtcatcggatgatgc

SEQ ID NO: 19081 - DNA, 20 bp, Artificial Sequence
  MKO10019081_A_Fut11
  gRNA
gcatgagctcgcgtacgtat

SEQ ID NO: 19082 - DNA, 20 bp, Artificial Sequence
  MKO10019082_A_Fut11
  gRNA
agagcaacggcgcgtatccg

SEQ ID NO: 19083 - DNA, 20 bp, Artificial Sequence
  MKO10019083_A_Fut11
  gRNA
gacagttcatgtgcgacgac

SEQ ID NO: 19084 - DNA, 20 bp, Artificial Sequence
  MKO10019084_A_Fut1
  gRNA
ctatacggagcccgctcaac

SEQ ID NO: 19085 - DNA, 20 bp, Artificial Sequence
  MKO10019085_A_Fut1
  gRNA
gatagtctccacgacgcaca

SEQ ID NO: 19086 - DNA, 20 bp, Artificial Sequence
  MKO10019086_A_Fut1
  gRNA
tgtgcgtcgtggagactatc

SEQ ID NO: 19087 - DNA, 20 bp, Artificial Sequence
  MKO10019087_A_Fut2
  gRNA
gacgtggtgtttgcgggcaa

SEQ ID NO: 19088 - DNA, 20 bp, Artificial Sequence
  MKO10019088_A_Fut2
  gRNA
gttgatgttctcccggcacc

SEQ ID NO: 19089 - DNA, 20 bp, Artificial Sequence
  MKO10019089_A_Fut2
  gRNA
ttacaagcaacggtatggcc

SEQ ID NO: 19090 - DNA, 20 bp, Artificial Sequence
  MKO10019090_A_Fut4
  gRNA
cgaagacatccgagtcggtc

SEQ ID NO: 19091 - DNA, 20 bp, Artificial Sequence
  MKO10019091_A_Fut4
  gRNA
gcgccttatccgtgcgttct

SEQ ID NO: 19092 - DNA, 20 bp, Artificial Sequence
  MKO10019092_A_Fut4
  gRNA
cctcacggacggtggacgcg

SEQ ID NO: 19093 - DNA, 20 bp, Artificial Sequence
  MKO10019093_A_Fut7
  gRNA
gaagcggtaccgggccaaag

SEQ ID NO: 19094 - DNA, 20 bp, Artificial Sequence
  MKO10019094_A_Fut7
  gRNA
ggcgagaccggctccgtgtg

SEQ ID NO: 19095 - DNA, 20 bp, Artificial Sequence
  MKO10019095_A_Fut7
  gRNA
ccagcctgcctgtccacgcc

SEQ ID NO: 19096 - DNA, 20 bp, Artificial Sequence
  MKO10019096_A_Fut8
  gRNA
cagaattggcgctatgctac

SEQ ID NO: 19097 - DNA, 20 bp, Artificial Sequence
  MKO10019097_A_Fut8
  gRNA
attccaagatgagtgttcgc

SEQ ID NO: 19098 - DNA, 20 bp, Artificial Sequence
  MKO10019098_A_Fut8
  gRNA
aggggattggcgtgaaaaag

SEQ ID NO: 19099 - DNA, 20 bp, Artificial Sequence
  MKO10019099_A_Fut9
  gRNA
tcacgtattctccgaatgct

SEQ ID NO: 19100 - DNA, 20 bp, Artificial Sequence
  MKO10019100_A_Fut9
  gRNA
cacggcgataagttagagtc

SEQ ID NO: 19101 - DNA, 20 bp, Artificial Sequence
  MKO10019101_A_Fut9
  gRNA
gcatgtgattcccaaaaccg

SEQ ID NO: 19102 - DNA, 20 bp, Artificial Sequence
  MKO10019102_A_Fuz
  gRNA
acctgcatggcagacccctc

SEQ ID NO: 19103 - DNA, 20 bp, Artificial Sequence
  MKO10019103_A_Fuz
  gRNA
ttgaggagctgaccaatatc

SEQ ID NO: 19104 - DNA, 20 bp, Artificial Sequence
  MKO10019104_A_Fuz
  gRNA
ctcaatggagtccacatgtt

SEQ ID NO: 19105 - DNA, 20 bp, Artificial Sequence
  MKO10019105_A_Fv1
  gRNA
aagttccttaccgctcgaaa

SEQ ID NO: 19106 - DNA, 20 bp, Artificial Sequence
  MKO10019106_A_Fv1
  gRNA
tacccatcacgagagctatg

SEQ ID NO: 19107 - DNA, 20 bp, Artificial Sequence
  MKO10019107_A_Fv1
  gRNA
ttatccggagagtcattatc

SEQ ID NO: 19108 - DNA, 20 bp, Artificial Sequence
  MKO10019108_A_Fxn
  gRNA
tagatccccgcccagcttaa

SEQ ID NO: 19109 - DNA, 20 bp, Artificial Sequence
  MKO10019109_A_Fxn
  gRNA
caaaaagcagagcgtctgcg

SEQ ID NO: 19110 - DNA, 20 bp, Artificial Sequence
  MKO10019110_A_Fxn
  gRNA
cgcagacaagccctataccc

SEQ ID NO: 19111 - DNA, 20 bp, Artificial Sequence
  MKO10019111_A_Fxr1
  gRNA
tggaggttcgcggctccaac

SEQ ID NO: 19112 - DNA, 20 bp, Artificial Sequence
  MKO10019112_A_Fxr1
  gRNA
ggtaatcgcacttcattaaa

SEQ ID NO: 19113 - DNA, 20 bp, Artificial Sequence
  MKO10019113_A_Fxr1
  gRNA
gctaaagttcggatgatgaa

SEQ ID NO: 19114 - DNA, 20 bp, Artificial Sequence
  MKO10019114_A_Fxr2
  gRNA
ctcccttcatcatccgcacc

SEQ ID NO: 19115 - DNA, 20 bp, Artificial Sequence
  MKO10019115_A_Fxr2
  gRNA
cggtagtcggacatccccaa

SEQ ID NO: 19116 - DNA, 20 bp, Artificial Sequence
  MKO10019116_A_Fxr2
  gRNA
gcaaggggactgggattgac

SEQ ID NO: 19117 - DNA, 20 bp, Artificial Sequence
  MKO10019117_A_Fxyd1
  gRNA
atcggcggcctcactatcgc

SEQ ID NO: 19118 - DNA, 20 bp, Artificial Sequence
  MKO10019118_A_Fxyd1
  gRNA
aactggggaacccgacgaag

SEQ ID NO: 19119 - DNA, 20 bp, Artificial Sequence
  MKO10019119_A_Fxyd1
  gRNA
ttcccctcaccgtaggtgaa

SEQ ID NO: 19120 - DNA, 20 bp, Artificial Sequence
  MKO10019120_A_Fxyd2
  gRNA
gaccggcttaccgtactcga

SEQ ID NO: 19121 - DNA, 20 bp, Artificial Sequence
  MKO10019121_A_Fxyd2
  gRNA
aggcctgatcttcgcgggcc

SEQ ID NO: 19122 - DNA, 20 bp, Artificial Sequence
  MKO10019122_A_Fxyd2
  gRNA
aggccaggcccgcgaagatc

SEQ ID NO: 19123 - DNA, 20 bp, Artificial Sequence
  MKO10019123_A_Fxyd3
  gRNA
cacaaatgagcccgccgact

SEQ ID NO: 19124 - DNA, 20 bp, Artificial Sequence
  MKO10019124_A_Fxyd3
  gRNA
tcataaggactataatgccc

SEQ ID NO: 19125 - DNA, 20 bp, Artificial Sequence
  MKO10019125_A_Fxyd3
  gRNA
cgactcactttcagggtcat

SEQ ID NO: 19126 - DNA, 20 bp, Artificial Sequence
  MKO10019126_A_Fxyd4
  gRNA
ggagggctcctgtgcatcgc

SEQ ID NO: 19127 - DNA, 20 bp, Artificial Sequence
  MKO10019127_A_Fxyd4
  gRNA
taggtggcaagtgcaaatgt

SEQ ID NO: 19128 - DNA, 20 bp, Artificial Sequence
  MKO10019128_A_Fxyd4
  gRNA
gtactcaccaactgggtcac

SEQ ID NO: 19129 - DNA, 20 bp, Artificial Sequence
  MKO10019129_A_Fxyd5
  gRNA
atcctacattgaacatccac

SEQ ID NO: 19130 - DNA, 20 bp, Artificial Sequence
  MKO10019130_A_Fxyd5
  gRNA
actactcgtgacaatgtccc

SEQ ID NO: 19131 - DNA, 20 bp, Artificial Sequence
  MKO10019131_A_Fxyd5
  gRNA
tcgaatccagtgtcagatcc

SEQ ID NO: 19132 - DNA, 20 bp, Artificial Sequence
  MKO10019132_A_Fxyd6
  gRNA
acctgggcctcttcgtcacc

SEQ ID NO: 19133 - DNA, 20 bp, Artificial Sequence
  MKO10019133_A_Fxyd6
  gRNA
gctcactcaccgtaatagaa

SEQ ID NO: 19134 - DNA, 20 bp, Artificial Sequence
  MKO10019134_A_Fxyd6
  gRNA
ggttaccgtttgtagtgatg

SEQ ID NO: 19135 - DNA, 20 bp, Artificial Sequence
  MKO10019135_A_Fxyd7
  gRNA
ggagggcagttccgacttac

SEQ ID NO: 19136 - DNA, 20 bp, Artificial Sequence
  MKO10019136_A_Fxyd7
  gRNA
ggccactatcatgttcgtgc

SEQ ID NO: 19137 - DNA, 20 bp, Artificial Sequence
  MKO10019137_A_Fxyd7
  gRNA
aacatgcaaatcctgtaagt

SEQ ID NO: 19138 - DNA, 20 bp, Artificial Sequence
  MKO10019138_A_Fyb
  gRNA
ctggggactggcggatgcgc

SEQ ID NO: 19139 - DNA, 20 bp, Artificial Sequence
  MKO10019139_A_Fyb
  gRNA
ggcagggaagttgtcgagta

SEQ ID NO: 19140 - DNA, 20 bp, Artificial Sequence
  MKO10019140_A_Fyb
  gRNA
aggtactggaaatctagaag

SEQ ID NO: 19141 - DNA, 20 bp, Artificial Sequence
  MKO10019141_A_Fyco1
  gRNA
atgatggcattcgatttgtc

SEQ ID NO: 19142 - DNA, 20 bp, Artificial Sequence
  MKO10019142_A_Fyco1
  gRNA
caccaaagagtagcgaatga

SEQ ID NO: 19143 - DNA, 20 bp, Artificial Sequence
  MKO10019143_A_Fyco1
  gRNA
agccttcattcgctactctt

SEQ ID NO: 19144 - DNA, 20 bp, Artificial Sequence
  MKO10019144_A_Fyn
  gRNA
cgcgagagcgaaaccaccaa

SEQ ID NO: 19145 - DNA, 20 bp, Artificial Sequence
  MKO10019145_A_Fyn
  gRNA
aactggagccacgtaattgc

SEQ ID NO: 19146 - DNA, 20 bp, Artificial Sequence
  MKO10019146_A_Fyn
  gRNA
tacaacaacttccacgcagc

SEQ ID NO: 19147 - DNA, 20 bp, Artificial Sequence
  MKO10019147_A_Fyttd1
  gRNA
accccagtcatgaaccggtt

SEQ ID NO: 19148 - DNA, 20 bp, Artificial Sequence
  MKO10019148_A_Fyttd1
  gRNA
aaaactagtttgagccgtag

SEQ ID NO: 19149 - DNA, 20 bp, Artificial Sequence
  MKO10019149_A_Fyttd1
  gRNA
aggccggtgataactccata

SEQ ID NO: 19150 - DNA, 20 bp, Artificial Sequence
  MKO10019150_A_Fzd10
  gRNA
cgacgacaagcgcttcgctg

SEQ ID NO: 19151 - DNA, 20 bp, Artificial Sequence
  MKO10019151_A_Fzd10
  gRNA
tgaagcgcgatgggtcgatg

SEQ ID NO: 19152 - DNA, 20 bp, Artificial Sequence
  MKO10019152_A_Fzd10
  gRNA
tcacgagaaccagcgcgagg

SEQ ID NO: 19153 - DNA, 20 bp, Artificial Sequence
  MKO10019153_A_Fzd1
  gRNA
tggttaccgcggcggctacc

SEQ ID NO: 19154 - DNA, 20 bp, Artificial Sequence
  MKO10019154_A_Fzd1
  gRNA
gtacatgagcccgtaaacct

SEQ ID NO: 19155 - DNA, 20 bp, Artificial Sequence
  MKO10019155_A_Fzd1
  gRNA
caccccccgggtagccgccg

SEQ ID NO: 19156 - DNA, 20 bp, Artificial Sequence
  MKO10019156_A_Fzd2
  gRNA
atcgacggcgacctgctgag

SEQ ID NO: 19157 - DNA, 20 bp, Artificial Sequence
  MKO10019157_A_Fzd2
  gRNA
ggcgcggtggtgagtagcgc

SEQ ID NO: 19158 - DNA, 20 bp, Artificial Sequence
  MKO10019158_A_Fzd2
  gRNA
tgcgagcatttcccgcgtca

SEQ ID NO: 19159 - DNA, 20 bp, Artificial Sequence
  MKO10019159_A_Fzd3
  gRNA
acgctgacacagcctacggc

SEQ ID NO: 19160 - DNA, 20 bp, Artificial Sequence
  MKO10019160_A_Fzd3
  gRNA
ttaatgcatcaacgtcgtag

SEQ ID NO: 19161 - DNA, 20 bp, Artificial Sequence
  MKO10019161_A_Fzd3
  gRNA
acaatctcgcacgtgcagaa

SEQ ID NO: 19162 - DNA, 20 bp, Artificial Sequence
  MKO10019162_A_Fzd4
  gRNA
ttcacgccgctcatccagta

SEQ ID NO: 19163 - DNA, 20 bp, Artificial Sequence
  MKO10019163_A_Fzd4
  gRNA
catgccaccgcacgggccga

SEQ ID NO: 19164 - DNA, 20 bp, Artificial Sequence
  MKO10019164_A_Fzd4
  gRNA
cagctcgtgtcccactaagt

SEQ ID NO: 19165 - DNA, 20 bp, Artificial Sequence
  MKO10019165_A_Fzd5
  gRNA
ctcacggctgcaagcgacgc

SEQ ID NO: 19166 - DNA, 20 bp, Artificial Sequence
  MKO10019166_A_Fzd5
  gRNA
gtggcgaatgtgcgctcgtc

SEQ ID NO: 19167 - DNA, 20 bp, Artificial Sequence
  MKO10019167_A_Fzd5
  gRNA
ggccttcctatacgtgcgac

SEQ ID NO: 19168 - DNA, 20 bp, Artificial Sequence
  MKO10019168_A_Fzd6
  gRNA
tttctcacacaatttccgac

SEQ ID NO: 19169 - DNA, 20 bp, Artificial Sequence
  MKO10019169_A_Fzd6
  gRNA
attagcggcgtttgcttcgt

SEQ ID NO: 19170 - DNA, 20 bp, Artificial Sequence
  MKO10019170_A_Fzd6
  gRNA
gggtgattctcaccattacg

SEQ ID NO: 19171 - DNA, 20 bp, Artificial Sequence
  MKO10019171_A_Fzd7
  gRNA
ttctcgcagcgcaaccgctc

SEQ ID NO: 19172 - DNA, 20 bp, Artificial Sequence
  MKO10019172_A_Fzd7
  gRNA
tggctaccgcacggtggcgc

SEQ ID NO: 19173 - DNA, 20 bp, Artificial Sequence
  MKO10019173_A_Fzd7
  gRNA
cgagtgcgacgccgccgtgc

SEQ ID NO: 19174 - DNA, 20 bp, Artificial Sequence
  MKO10019174_A_Fzd8
  gRNA
ctgaccgcatgcgctgcgat

SEQ ID NO: 19175 - DNA, 20 bp, Artificial Sequence
  MKO10019175_A_Fzd8
  gRNA
tcgtactcgccgcgcgcgcc

SEQ ID NO: 19176 - DNA, 20 bp, Artificial Sequence
  MKO10019176_A_Fzd8
  gRNA
gcaaccgatcgcagcgcatg

SEQ ID NO: 19177 - DNA, 20 bp, Artificial Sequence
  MKO10019177_A_Fzd9
  gRNA
ttcgatccggagcgtggccg

SEQ ID NO: 19178 - DNA, 20 bp, Artificial Sequence
  MKO10019178_A_Fzd9
  gRNA
ggccacgctccggatcgaag

SEQ ID NO: 19179 - DNA, 20 bp, Artificial Sequence
  MKO10019179_A_Fzd9
  gRNA
ccgcctcgccctgcgacgtg

SEQ ID NO: 19180 - DNA, 20 bp, Artificial Sequence
  MKO10019180_A_Fzr1
  gRNA
aagcgctcgagtccagatga

SEQ ID NO: 19181 - DNA, 20 bp, Artificial Sequence
  MKO10019181_A_Fzr1
  gRNA
agccgccggtcctccgtctg

SEQ ID NO: 19182 - DNA, 20 bp, Artificial Sequence
  MKO10019182_A_Fzr1
  gRNA
tgtcccccgttagcaacaaa

SEQ ID NO: 19183 - DNA, 20 bp, Artificial Sequence
  MKO10019183_A_G0s2
  gRNA
cagccgtctgcgcgaccaag

SEQ ID NO: 19184 - DNA, 20 bp, Artificial Sequence
  MKO10019184_A_G0s2
  gRNA
tgtgctggcgctcttcggtg

SEQ ID NO: 19185 - DNA, 20 bp, Artificial Sequence
  MKO10019185_A_G0s2
  gRNA
ggccttaagaggcgtgctgc

SEQ ID NO: 19186 - DNA, 20 bp, Artificial Sequence
  MKO10019186_A_G2e3
  gRNA
gtgataacttcgtttacacg

SEQ ID NO: 19187 - DNA, 20 bp, Artificial Sequence
  MKO10019187_A_G2e3
  gRNA
cgaagttatcacttgccttg

SEQ ID NO: 19188 - DNA, 20 bp, Artificial Sequence
  MKO10019188_A_G2e3
  gRNA
gacttaccaagcagtagtag

SEQ ID NO: 19189 - DNA, 20 bp, Artificial Sequence
  MKO10019189_A_G3bp1
  gRNA
atgttcacaacgacatcttc

SEQ ID NO: 19190 - DNA, 20 bp, Artificial Sequence
  MKO10019190_A_G3bp1
  gRNA
ccacaccaagatccgccacg

SEQ ID NO: 19191 - DNA, 20 bp, Artificial Sequence
  MKO10019191_A_G3bp1
  gRNA
ctttctatgatcagactgtc

SEQ ID NO: 19192 - DNA, 20 bp, Artificial Sequence
  MKO10019192_A_G3bp2
  gRNA
aagctcccgagtatttgcac

SEQ ID NO: 19193 - DNA, 20 bp, Artificial Sequence
  MKO10019193_A_G3bp2
  gRNA
agcatccacatgacgaattt

SEQ ID NO: 19194 - DNA, 20 bp, Artificial Sequence
  MKO10019194_A_G3bp2
  gRNA
tcataccaaaattcgtcatg

SEQ ID NO: 19195 - DNA, 20 bp, Artificial Sequence
  MKO10019195_A_G630090E17Rik
  gRNA
aatgttgccgtcttgcagaa

SEQ ID NO: 19196 - DNA, 20 bp, Artificial Sequence
  MKO10019196_A_G630090E17Rik
  gRNA
aaaatccgcggcatctgctg

SEQ ID NO: 19197 - DNA, 20 bp, Artificial Sequence
  MKO10019197_A_G630090E17Rik
  gRNA
cgcctcagactccgtgttcg

SEQ ID NO: 19198 - DNA, 20 bp, Artificial Sequence
  MKO10019198_A_G6b
  gRNA
ggtccagatcagcgtagtgc

SEQ ID NO: 19199 - DNA, 20 bp, Artificial Sequence
  MKO10019199_A_G6b
  gRNA
gagcctgcactacgctgatc

SEQ ID NO: 19200 - DNA, 20 bp, Artificial Sequence
  MKO10019200_A_G6b
  gRNA
aagggcgccgtccgatcttg

SEQ ID NO: 19201 - DNA, 20 bp, Artificial Sequence
  MKO10019201_A_G6pc2
  gRNA
caatgggctcatcgtgcgtc

SEQ ID NO: 19202 - DNA, 20 bp, Artificial Sequence
  MKO10019202_A_G6pc2
  gRNA
ccgtgcccatcgccaaaaag

SEQ ID NO: 19203 - DNA, 20 bp, Artificial Sequence
  MKO10019203_A_G6pc2
  gRNA
catcaagatcccgactcacg

SEQ ID NO: 19204 - DNA, 20 bp, Artificial Sequence
  MKO10019204_A_G6pc3
  gRNA
gtattggactctctttacac

SEQ ID NO: 19205 - DNA, 20 bp, Artificial Sequence
  MKO10019205_A_G6pc3
  gRNA
aaagctaagctcccgctcca

SEQ ID NO: 19206 - DNA, 20 bp, Artificial Sequence
  MKO10019206_A_G6pc3
  gRNA
tgatcacaggcgcagctctt

SEQ ID NO: 19207 - DNA, 20 bp, Artificial Sequence
  MKO10019207_A_G6pc
  gRNA
tcttaccggaatccatacgt

SEQ ID NO: 19208 - DNA, 20 bp, Artificial Sequence
  MKO10019208_A_G6pc
  gRNA
acgcccgtattggtgggtcc

SEQ ID NO: 19209 - DNA, 20 bp, Artificial Sequence
  MKO10019209_A_G6pc
  gRNA
tgatgagacaatacttccgg

SEQ ID NO: 19210 - DNA, 20 bp, Artificial Sequence
  MKO10019210_A_G6pd2
  gRNA
acgcgtaactcctatgtagt

SEQ ID NO: 19211 - DNA, 20 bp, Artificial Sequence
  MKO10019211_A_G6pd2
  gRNA
gccacggctgccatatacat

SEQ ID NO: 19212 - DNA, 20 bp, Artificial Sequence
  MKO10019212_A_G6pd2
  gRNA
ctgcaattccgagatatacc

SEQ ID NO: 19213 - DNA, 20 bp, Artificial Sequence
  MKO10019213_A_G6pdx
  gRNA
gtcttacgtctgactcatgc

SEQ ID NO: 19214 - DNA, 20 bp, Artificial Sequence
  MKO10019214_A_G6pdx
  gRNA
gcccgtaattcctatgtagc

SEQ ID NO: 19215 - DNA, 20 bp, Artificial Sequence
  MKO10019215_A_G6pdx
  gRNA
aggctggaaccgcatcatcg

SEQ ID NO: 19216 - DNA, 20 bp, Artificial Sequence
  MKO10019216_A_Gaa
  gRNA
cctttggagtgatcgttcgt

SEQ ID NO: 19217 - DNA, 20 bp, Artificial Sequence
  MKO10019217_A_Gaa
  gRNA
cctacgaacgatcactccaa

SEQ ID NO: 19218 - DNA, 20 bp, Artificial Sequence
  MKO10019218_A_Gaa
  gRNA
gagggtgatacgagcccagt

SEQ ID NO: 19219 - DNA, 20 bp, Artificial Sequence
  MKO10019219_A_Gab1
  gRNA
tgaatcgacgggtgcttgtg

SEQ ID NO: 19220 - DNA, 20 bp, Artificial Sequence
  MKO10019220_A_Gab1
  gRNA
tggcggaatgtcgtaactga

SEQ ID NO: 19221 - DNA, 20 bp, Artificial Sequence
  MKO10019221_A_Gab1
  gRNA
aaaggtgtacagctccccgt

SEQ ID NO: 19222 - DNA, 20 bp, Artificial Sequence
  MKO10019222_A_Gab2
  gRNA
cactgtatcaacggcgtcgg

SEQ ID NO: 19223 - DNA, 20 bp, Artificial Sequence
  MKO10019223_A_Gab2
  gRNA
cttcggagtggccgaatgag

SEQ ID NO: 19224 - DNA, 20 bp, Artificial Sequence
  MKO10019224_A_Gab2
  gRNA
cctgattgaagccgcagatc

SEQ ID NO: 19225 - DNA, 20 bp, Artificial Sequence
  MKO10019225_A_Gab3
  gRNA
cgcaggcttggcgcaaacgc

SEQ ID NO: 19226 - DNA, 20 bp, Artificial Sequence
  MKO10019226_A_Gab3
  gRNA
ctcaggcggggccgcatgag

SEQ ID NO: 19227 - DNA, 20 bp, Artificial Sequence
  MKO10019227_A_Gab3
  gRNA
atcctgtccaactgtgagac

SEQ ID NO: 19228 - DNA, 20 bp, Artificial Sequence
  MKO10019228_A_Gabarapl1
  gRNA
aggaccaccccttcgagtat

SEQ ID NO: 19229 - DNA, 20 bp, Artificial Sequence
  MKO10019229_A_Gabarapl1
  gRNA
ccactcaccggcacccggtc

SEQ ID NO: 19230 - DNA, 20 bp, Artificial Sequence
  MKO10019230_A_Gabarapl1
  gRNA
ctcttcttaggacaaccacg

SEQ ID NO: 19231 - DNA, 20 bp, Artificial Sequence
  MKO10019231_A_Gabarapl2
  gRNA
tctctttcaagcctaactat

SEQ ID NO: 19232 - DNA, 20 bp, Artificial Sequence
  MKO10019232_A_Gabarapl2
  gRNA
cacactcaccggaactcggt

SEQ ID NO: 19233 - DNA, 20 bp, Artificial Sequence
  MKO10019233_A_Gabarapl2
  gRNA
acaagacagtcccacagtcc

SEQ ID NO: 19234 - DNA, 20 bp, Artificial Sequence
  MKO10019234_A_Gabarap
  gRNA
cacggagatgaattcgcttc

SEQ ID NO: 19235 - DNA, 20 bp, Artificial Sequence
  MKO10019235_A_Gabarap
  gRNA
gtccttaccgggacccggtc

SEQ ID NO: 19236 - DNA, 20 bp, Artificial Sequence
  MKO10019236_A_Gabarap
  gRNA
gttcgagaagcgccgctctg

SEQ ID NO: 19237 - DNA, 20 bp, Artificial Sequence
  MKO10019237_A_Gabbr1
  gRNA
ccccgactaccttgctgtcg

SEQ ID NO: 19238 - DNA, 20 bp, Artificial Sequence
  MKO10019238_A_Gabbr1
  gRNA
gccagattatacatccgccc

SEQ ID NO: 19239 - DNA, 20 bp, Artificial Sequence
  MKO10019239_A_Gabbr1
  gRNA
catatccgtccaggagccgt

SEQ ID NO: 19240 - DNA, 20 bp, Artificial Sequence
  MKO10019240_A_Gabbr2
  gRNA
ctcagacaacgcggtgaacc

SEQ ID NO: 19241 - DNA, 20 bp, Artificial Sequence
  MKO10019241_A_Gabbr2
  gRNA
cgttgtctgagggcaccgtc

SEQ ID NO: 19242 - DNA, 20 bp, Artificial Sequence
  MKO10019242_A_Gabbr2
  gRNA
gcccacaggggaacgacgtg

SEQ ID NO: 19243 - DNA, 20 bp, Artificial Sequence
  MKO10019243_A_Gabpa
  gRNA
gatgcgcttctgcttccgcg

SEQ ID NO: 19244 - DNA, 20 bp, Artificial Sequence
  MKO10019244_A_Gabpa
  gRNA
cgatccagatgcccaccacg

SEQ ID NO: 19245 - DNA, 20 bp, Artificial Sequence
  MKO10019245_A_Gabpa
  gRNA
ctccaaagaatttctccccg

SEQ ID NO: 19246 - DNA, 20 bp, Artificial Sequence
  MKO10019246_A_Gabpb1
  gRNA
catctctacttacaccggct

SEQ ID NO: 19247 - DNA, 20 bp, Artificial Sequence
  MKO10019247_A_Gabpb1
  gRNA
gcgaacttcatcatcttgac

SEQ ID NO: 19248 - DNA, 20 bp, Artificial Sequence
  MKO10019248_A_Gabpb1
  gRNA
tctccgggttggtgttgatt

SEQ ID NO: 19249 - DNA, 20 bp, Artificial Sequence
  MKO10019249_A_Gabpb2
  gRNA
taagtaactcgacgacatcc

SEQ ID NO: 19250 - DNA, 20 bp, Artificial Sequence
  MKO10019250_A_Gabpb2
  gRNA
agggactccatcagtcacga

SEQ ID NO: 19251 - DNA, 20 bp, Artificial Sequence
  MKO10019251_A_Gabpb2
  gRNA
acatcgtggaactgcttgtt

SEQ ID NO: 19252 - DNA, 20 bp, Artificial Sequence
  MKO10019252_A_Gabra1
  gRNA
accatatcgtggtctgaaac

SEQ ID NO: 19253 - DNA, 20 bp, Artificial Sequence
  MKO10019253_A_Gabra1
  gRNA
gtttagccggagcactgtca

SEQ ID NO: 19254 - DNA, 20 bp, Artificial Sequence
  MKO10019254_A_Gabra1
  gRNA
accagtttcagaccacgata

SEQ ID NO: 19255 - DNA, 20 bp, Artificial Sequence
  MKO10019255_A_Gabra2
  gRNA
ccattaaattgttaagtcga

SEQ ID NO: 19256 - DNA, 20 bp, Artificial Sequence
  MKO10019256_A_Gabra2
  gRNA
aaacaagctgcttcgaatcc

SEQ ID NO: 19257 - DNA, 20 bp, Artificial Sequence
  MKO10019257_A_Gabra2
  gRNA
agccgaatgtcccatgcacc

SEQ ID NO: 19258 - DNA, 20 bp, Artificial Sequence
  MKO10019258_A_Gabra3
  gRNA
atattatctgtactatcgtc

SEQ ID NO: 19259 - DNA, 20 bp, Artificial Sequence
  MKO10019259_A_Gabra3
  gRNA
cgctgaatgccccatgcatt

SEQ ID NO: 19260 - DNA, 20 bp, Artificial Sequence
  MKO10019260_A_Gabra3
  gRNA
ggaccctcctctatacaatg

SEQ ID NO: 19261 - DNA, 20 bp, Artificial Sequence
  MKO10019261_A_Gabra4
  gRNA
tgcagtttaaacgaatcccc

SEQ ID NO: 19262 - DNA, 20 bp, Artificial Sequence
  MKO10019262_A_Gabra4
  gRNA
taatagactcaccataagtg

SEQ ID NO: 19263 - DNA, 20 bp, Artificial Sequence
  MKO10019263_A_Gabra4
  gRNA
tatgacaacaggctgcgtcc

SEQ ID NO: 19264 - DNA, 20 bp, Artificial Sequence
  MKO10019264_A_Gabra5
  gRNA
tgtttcagagcgaatcacgc

SEQ ID NO: 19265 - DNA, 20 bp, Artificial Sequence
  MKO10019265_A_Gabra5
  gRNA
ccgttgtggaagaacgtgtc

SEQ ID NO: 19266 - DNA, 20 bp, Artificial Sequence
  MKO10019266_A_Gabra5
  gRNA
tcgtcttgtacagaactagt

SEQ ID NO: 19267 - DNA, 20 bp, Artificial Sequence
  MKO10019267_A_Gabra6
  gRNA
tatgacaaccgtctacggcc

SEQ ID NO: 19268 - DNA, 20 bp, Artificial Sequence
  MKO10019268_A_Gabra6
  gRNA
ctcttccgattaatgcagaa

SEQ ID NO: 19269 - DNA, 20 bp, Artificial Sequence
  MKO10019269_A_Gabra6
  gRNA
caactcacctcatggtatag

SEQ ID NO: 19270 - DNA, 20 bp, Artificial Sequence
  MKO10019270_A_Gabrb1
  gRNA
atccgcatcccgacgtccac

SEQ ID NO: 19271 - DNA, 20 bp, Artificial Sequence
  MKO10019271_A_Gabrb1
  gRNA
cgatgtcgccagcatagaca

SEQ ID NO: 19272 - DNA, 20 bp, Artificial Sequence
  MKO10019272_A_Gabrb1
  gRNA
tttcacgtatgacatgttgc

SEQ ID NO: 19273 - DNA, 20 bp, Artificial Sequence
  MKO10019273_A_Gabrb2
  gRNA
tgaccctagtaatatgtcgc

SEQ ID NO: 19274 - DNA, 20 bp, Artificial Sequence
  MKO10019274_A_Gabrb2
  gRNA
atgattcgattgcatcccga

SEQ ID NO: 19275 - DNA, 20 bp, Artificial Sequence
  MKO10019275_A_Gabrb2
  gRNA
cgggatgcaatcgaatcata

SEQ ID NO: 19276 - DNA, 20 bp, Artificial Sequence
  MKO10019276_A_Gabrb3
  gRNA
cctcacgcttgacaatcgag

SEQ ID NO: 19277 - DNA, 20 bp, Artificial Sequence
  MKO10019277_A_Gabrb3
  gRNA
gataaaaggctcgcctattc

SEQ ID NO: 19278 - DNA, 20 bp, Artificial Sequence
  MKO10019278_A_Gabrb3
  gRNA
atgttcatccccacgcagac

SEQ ID NO: 19279 - DNA, 20 bp, Artificial Sequence
  MKO10019279_A_Gabrd
  gRNA
ggacctcgccaagtacccac

SEQ ID NO: 19280 - DNA, 20 bp, Artificial Sequence
  MKO10019280_A_Gabrd
  gRNA
tatgcccgaaacttccgacc

SEQ ID NO: 19281 - DNA, 20 bp, Artificial Sequence
  MKO10019281_A_Gabrd
  gRNA
gtccaggcctaaggtctcgt

SEQ ID NO: 19282 - DNA, 20 bp, Artificial Sequence
  MKO10019282_A_Gabre
  gRNA
tatgaccataaactgcgccc

SEQ ID NO: 19283 - DNA, 20 bp, Artificial Sequence
  MKO10019283_A_Gabre
  gRNA
acgaagacgctcatcatacc

SEQ ID NO: 19284 - DNA, 20 bp, Artificial Sequence
  MKO10019284_A_Gabre
  gRNA
attaactcacctccaatgcc

SEQ ID NO: 19285 - DNA, 20 bp, Artificial Sequence
  MKO10019285_A_Gabrg1
  gRNA
tcagacttaccgcctatatc

SEQ ID NO: 19286 - DNA, 20 bp, Artificial Sequence
  MKO10019286_A_Gabrg1
  gRNA
caacgcctaatcgcctgctg

SEQ ID NO: 19287 - DNA, 20 bp, Artificial Sequence
  MKO10019287_A_Gabrg1
  gRNA
catcactccaaatccgcagc

SEQ ID NO: 19288 - DNA, 20 bp, Artificial Sequence
  MKO10019288_A_Gabrg2
  gRNA
ccaccatattgctattcaac

SEQ ID NO: 19289 - DNA, 20 bp, Artificial Sequence
  MKO10019289_A_Gabrg2
  gRNA
aacaaacttcgacctgacat

SEQ ID NO: 19290 - DNA, 20 bp, Artificial Sequence
  MKO10019290_A_Gabrg2
  gRNA
ctcctcatacctccgatgtc

SEQ ID NO: 19291 - DNA, 20 bp, Artificial Sequence
  MKO10019291_A_Gabrg3
  gRNA
tcattgtgctgttgaatcga

SEQ ID NO: 19292 - DNA, 20 bp, Artificial Sequence
  MKO10019292_A_Gabrg3
  gRNA
atgtccacatcgatcacagt

SEQ ID NO: 19293 - DNA, 20 bp, Artificial Sequence
  MKO10019293_A_Gabrg3
  gRNA
gttgagaatcagcgttacat

SEQ ID NO: 19294 - DNA, 20 bp, Artificial Sequence
  MKO10019294_A_Gabrp
  gRNA
ggataacctaccaccgaaat

SEQ ID NO: 19295 - DNA, 20 bp, Artificial Sequence
  MKO10019295_A_Gabrp
  gRNA
acgctgccggaggtatatag

SEQ ID NO: 19296 - DNA, 20 bp, Artificial Sequence
  MKO10019296_A_Gabrp
  gRNA
ctgctcacctaagtgcgtac

SEQ ID NO: 19297 - DNA, 20 bp, Artificial Sequence
  MKO10019297_A_Gabrq
  gRNA
tctcatgcatccgataatcc

SEQ ID NO: 19298 - DNA, 20 bp, Artificial Sequence
  MKO10019298_A_Gabrq
  gRNA
ccatatcgcactgtcccatc

SEQ ID NO: 19299 - DNA, 20 bp, Artificial Sequence
  MKO10019299_A_Gabrq
  gRNA
tatggcttacctccaaaatt

SEQ ID NO: 19300 - DNA, 20 bp, Artificial Sequence
  MKO10019300_A_Gabrr1
  gRNA
gtgcctcaaatatagcgtca

SEQ ID NO: 19301 - DNA, 20 bp, Artificial Sequence
  MKO10019301_A_Gabrr1
  gRNA
tcaccatgacgctatatttg

SEQ ID NO: 19302 - DNA, 20 bp, Artificial Sequence
  MKO10019302_A_Gabrr1
  gRNA
cacgacgatgcccacaagca

SEQ ID NO: 19303 - DNA, 20 bp, Artificial Sequence
  MKO10019303_A_Gabrr2
  gRNA
aggctttcctggccgcatct

SEQ ID NO: 19304 - DNA, 20 bp, Artificial Sequence
  MKO10019304_A_Gabrr2
  gRNA
cgtccctccagtaatgcctc

SEQ ID NO: 19305 - DNA, 20 bp, Artificial Sequence
  MKO10019305_A_Gabrr2
  gRNA
atgctgcgagtgttccccga

SEQ ID NO: 19306 - DNA, 20 bp, Artificial Sequence
  MKO10019306_A_Gabrr3
  gRNA
aagacgaccttactaaagtc

SEQ ID NO: 19307 - DNA, 20 bp, Artificial Sequence
  MKO10019307_A_Gabrr3
  gRNA
gatgtagcatccgggaaact

SEQ ID NO: 19308 - DNA, 20 bp, Artificial Sequence
  MKO10019308_A_Gabrr3
  gRNA
tgctgtcgatgctttcaacc

SEQ ID NO: 19309 - DNA, 20 bp, Artificial Sequence
  MKO10019309_A_Gad1
  gRNA
agaagtcggtctctgtgcgc

SEQ ID NO: 19310 - DNA, 20 bp, Artificial Sequence
  MKO10019310_A_Gad1
  gRNA
tgctcctagcgtatgatact

SEQ ID NO: 19311 - DNA, 20 bp, Artificial Sequence
  MKO10019311_A_Gad1
  gRNA
ctgtgcgaaccccgtacttc

SEQ ID NO: 19312 - DNA, 20 bp, Artificial Sequence
  MKO10019312_A_Gad2
  gRNA
tacgcgtttctgcacgcaac

SEQ ID NO: 19313 - DNA, 20 bp, Artificial Sequence
  MKO10019313_A_Gad2
  gRNA
gcggcgggagcgtgacctcg

SEQ ID NO: 19314 - DNA, 20 bp, Artificial Sequence
  MKO10019314_A_Gad2
  gRNA
caaaagttcacgggcggcat

SEQ ID NO: 19315 - DNA, 20 bp, Artificial Sequence
  MKO10019315_A_Gadd45a
  gRNA
ctcgtacacgccgaccgtaa

SEQ ID NO: 19316 - DNA, 20 bp, Artificial Sequence
  MKO10019316_A_Gadd45a
  gRNA
cgcccgcaggatggacacgg

SEQ ID NO: 19317 - DNA, 20 bp, Artificial Sequence
  MKO10019317_A_Gadd45a
  gRNA
cgttctcgcagcagaacgca

SEQ ID NO: 19318 - DNA, 20 bp, Artificial Sequence
  MKO10019318_A_Gadd45b
  gRNA
cattgtcgcagcagaacgac

SEQ ID NO: 19319 - DNA, 20 bp, Artificial Sequence
  MKO10019319_A_Gadd45b
  gRNA
cctcaccgtgggggtgtacg

SEQ ID NO: 19320 - DNA, 20 bp, Artificial Sequence
  MKO10019320_A_Gadd45b
  gRNA
ctgcagggaccccgacagcg

SEQ ID NO: 19321 - DNA, 20 bp, Artificial Sequence
  MKO10019321_A_Gadd45gip1
  gRNA
agatggcggcgctcgcaatg

SEQ ID NO: 19322 - DNA, 20 bp, Artificial Sequence
  MKO10019322_A_Gadd45gip1
  gRNA
gccatgtcgtccgaactgct

SEQ ID NO: 19323 - DNA, 20 bp, Artificial Sequence
  MKO10019323_A_Gadd45gip1
  gRNA
gcagcaacgaaagcgcctaa

SEQ ID NO: 19324 - DNA, 20 bp, Artificial Sequence
  MKO10019324_A_Gadd45g
  gRNA
cgacattgatatcgtgcgcg

SEQ ID NO: 19325 - DNA, 20 bp, Artificial Sequence
  MKO10019325_A_Gadd45g
  gRNA
cgccagcggtcagacagccc

SEQ ID NO: 19326 - DNA, 20 bp, Artificial Sequence
  MKO10019326_A_Gadd45g
  gRNA
cggcgcgcccccctcttcgt

SEQ ID NO: 19327 - DNA, 20 bp, Artificial Sequence
  MKO10019327_A_Gadl1
  gRNA
tctgtctagttatacgtatg

SEQ ID NO: 19328 - DNA, 20 bp, Artificial Sequence
  MKO10019328_A_Gadl1
  gRNA
ccgccaaggagtagtaatca

SEQ ID NO: 19329 - DNA, 20 bp, Artificial Sequence
  MKO10019329_A_Gadl1
  gRNA
tcagcgcctctgttataatc

SEQ ID NO: 19330 - DNA, 20 bp, Artificial Sequence
  MKO10019330_A_Gak
  gRNA
gcgattactatccaatgaag

SEQ ID NO: 19331 - DNA, 20 bp, Artificial Sequence
  MKO10019331_A_Gak
  gRNA
ctgcttacggagctttgtaa

SEQ ID NO: 19332 - DNA, 20 bp, Artificial Sequence
  MKO10019332_A_Gak
  gRNA
ctttacaaagctccgtaagc

SEQ ID NO: 19333 - DNA, 20 bp, Artificial Sequence
  MKO10019333_A_Gal3st1
  gRNA
agctttcgggcgtgagcgca

SEQ ID NO: 19334 - DNA, 20 bp, Artificial Sequence
  MKO10019334_A_Gal3st1
  gRNA
ggagtacttcgacgaatccc

SEQ ID NO: 19335 - DNA, 20 bp, Artificial Sequence
  MKO10019335_A_Gal3st1
  gRNA
atacagtggaggtaccacat

SEQ ID NO: 19336 - DNA, 20 bp, Artificial Sequence
  MKO10019336_A_Gal3st2
  gRNA
tgtccggcactggtgtgcgc

SEQ ID NO: 19337 - DNA, 20 bp, Artificial Sequence
  MKO10019337_A_Gal3st2
  gRNA
acacctgacgcctgagagcc

SEQ ID NO: 19338 - DNA, 20 bp, Artificial Sequence
  MKO10019338_A_Gal3st2
  gRNA
cttacctctgtgtgcctctc

SEQ ID NO: 19339 - DNA, 20 bp, Artificial Sequence
  MKO10019339_A_Gal3st3
  gRNA
cacctggaacgcgctcgatg

SEQ ID NO: 19340 - DNA, 20 bp, Artificial Sequence
  MKO10019340_A_Gal3st3
  gRNA
gaaagtctcgagcgacgcat

SEQ ID NO: 19341 - DNA, 20 bp, Artificial Sequence
  MKO10019341_A_Gal3st3
  gRNA
tggtggattgctgcaagcgc

SEQ ID NO: 19342 - DNA, 20 bp, Artificial Sequence
  MKO10019342_A_Gal3st4
  gRNA
cgcggatagaacagtatggc

SEQ ID NO: 19343 - DNA, 20 bp, Artificial Sequence
  MKO10019343_A_Gal3st4
  gRNA
cggccaaagacggtgccttt

SEQ ID NO: 19344 - DNA, 20 bp, Artificial Sequence
  MKO10019344_A_Gal3st4
  gRNA
gggcaaaacgtagcccctgc

SEQ ID NO: 19345 - DNA, 20 bp, Artificial Sequence
  MKO10019345_A_Galc
  gRNA
gccctatcgttctgaaatac

SEQ ID NO: 19346 - DNA, 20 bp, Artificial Sequence
  MKO10019346_A_Galc
  gRNA
ccccaatataatcaatgtcc

SEQ ID NO: 19347 - DNA, 20 bp, Artificial Sequence
  MKO10019347_A_Galc
  gRNA
gggttgccatggtcattccc

SEQ ID NO: 19348 - DNA, 20 bp, Artificial Sequence
  MKO10019348_A_Gale
  gRNA
gcgcatcggtgaagatcctc

SEQ ID NO: 19349 - DNA, 20 bp, Artificial Sequence
  MKO10019349_A_Gale
  gRNA
ggagttgacaggccgctctg

SEQ ID NO: 19350 - DNA, 20 bp, Artificial Sequence
  MKO10019350_A_Gale
  gRNA
ctgggggttcccgtacacgg

SEQ ID NO: 19351 - DNA, 20 bp, Artificial Sequence
  MKO10019351_A_Galk1
  gRNA
ccagcgagtacccggttcgt

SEQ ID NO: 19352 - DNA, 20 bp, Artificial Sequence
  MKO10019352_A_Galk1
  gRNA
ggaccaactcatcgcgctgc

SEQ ID NO: 19353 - DNA, 20 bp, Artificial Sequence
  MKO10019353_A_Galk1
  gRNA
gccccagcagcgcgatgagt

SEQ ID NO: 19354 - DNA, 20 bp, Artificial Sequence
  MKO10019354_A_Galk2
  gRNA
tggaaatatacccccgagtt

SEQ ID NO: 19355 - DNA, 20 bp, Artificial Sequence
  MKO10019355_A_Galk2
  gRNA
tcgacaagaccaaacctcta

SEQ ID NO: 19356 - DNA, 20 bp, Artificial Sequence
  MKO10019356_A_Galk2
  gRNA
agctggagaggcccgaactc

SEQ ID NO: 19357 - DNA, 20 bp, Artificial Sequence
  MKO10019357_A_Galm
  gRNA
cggattcacggggtttgata

SEQ ID NO: 19358 - DNA, 20 bp, Artificial Sequence
  MKO10019358_A_Galm
  gRNA
agcagatgcatatttgcccg

SEQ ID NO: 19359 - DNA, 20 bp, Artificial Sequence
  MKO10019359_A_Galm
  gRNA
caaaccccgtgaatccgcca

SEQ ID NO: 19360 - DNA, 20 bp, Artificial Sequence
  MKO10019360_A_Galns
  gRNA
aggctataccaacaagatcg

SEQ ID NO: 19361 - DNA, 20 bp, Artificial Sequence
  MKO10019361_A_Galns
  gRNA
accattccttgcatgagcgt

SEQ ID NO: 19362 - DNA, 20 bp, Artificial Sequence
  MKO10019362_A_Galns
  gRNA
gagagaccccaaatttagac

SEQ ID NO: 19363 - DNA, 20 bp, Artificial Sequence
  MKO10019363_A_Galnt10
  gRNA
tatcggggagagagcgattc

SEQ ID NO: 19364 - DNA, 20 bp, Artificial Sequence
  MKO10019364_A_Galnt10
  gRNA
ctccggaccaagaaacggga

SEQ ID NO: 19365 - DNA, 20 bp, Artificial Sequence
  MKO10019365_A_Galnt10
  gRNA
cctgataaggacccgaatgc

SEQ ID NO: 19366 - DNA, 20 bp, Artificial Sequence
  MKO10019366_A_Galnt11
  gRNA
acggcgccacggccccaata

SEQ ID NO: 19367 - DNA, 20 bp, Artificial Sequence
  MKO10019367_A_Galnt11
  gRNA
ttgatccgaggacgaatgat

SEQ ID NO: 19368 - DNA, 20 bp, Artificial Sequence
  MKO10019368_A_Galnt11
  gRNA
ttgaaacctccccgaactac

SEQ ID NO: 19369 - DNA, 20 bp, Artificial Sequence
  MKO10019369_A_Galnt12
  gRNA
tgcgcctgatccgtgctagc

SEQ ID NO: 19370 - DNA, 20 bp, Artificial Sequence
  MKO10019370_A_Galnt12
  gRNA
ccagtagccgggctcgcact

SEQ ID NO: 19371 - DNA, 20 bp, Artificial Sequence
  MKO10019371_A_Galnt12
  gRNA
cgcagattggcggctttgac

SEQ ID NO: 19372 - DNA, 20 bp, Artificial Sequence
  MKO10019372_A_Galnt13
  gRNA
ttaatacgcgcccgtctccg

SEQ ID NO: 19373 - DNA, 20 bp, Artificial Sequence
  MKO10019373_A_Galnt13
  gRNA
cgcacttaaccgaagtctgc

SEQ ID NO: 19374 - DNA, 20 bp, Artificial Sequence
  MKO10019374_A_Galnt13
  gRNA
aagtgccagtgaagattatc

SEQ ID NO: 19375 - DNA, 20 bp, Artificial Sequence
  MKO10019375_A_Galnt14
  gRNA
gtgagcggatatcgagcaat

SEQ ID NO: 19376 - DNA, 20 bp, Artificial Sequence
  MKO10019376_A_Galnt14
  gRNA
atatccgctcactctcccgt

SEQ ID NO: 19377 - DNA, 20 bp, Artificial Sequence
  MKO10019377_A_Galnt14
  gRNA
ctctactcagaaccatccgc

SEQ ID NO: 19378 - DNA, 20 bp, Artificial Sequence
  MKO10019378_A_Galnt15
  gRNA
cagtcatagacgtgattgac

SEQ ID NO: 19379 - DNA, 20 bp, Artificial Sequence
  MKO10019379_A_Galnt15
  gRNA
tccgcatccaagctgcatcg

SEQ ID NO: 19380 - DNA, 20 bp, Artificial Sequence
  MKO10019380_A_Galnt15
  gRNA
gatcgtatgctccggtgttt

SEQ ID NO: 19381 - DNA, 20 bp, Artificial Sequence
  MKO10019381_A_Galnt16
  gRNA
cttcccgtttgtcattgcga

SEQ ID NO: 19382 - DNA, 20 bp, Artificial Sequence
  MKO10019382_A_Galnt16
  gRNA
tgagctcagaccgacccatc

SEQ ID NO: 19383 - DNA, 20 bp, Artificial Sequence
  MKO10019383_A_Galnt16
  gRNA
caggtccgaagaataggaca

SEQ ID NO: 19384 - DNA, 20 bp, Artificial Sequence
  MKO10019384_A_Galnt18
  gRNA
ggcactgttcgatgcccacg

SEQ ID NO: 19385 - DNA, 20 bp, Artificial Sequence
  MKO10019385_A_Galnt18
  gRNA
aggcgttgtagccgtagtac

SEQ ID NO: 19386 - DNA, 20 bp, Artificial Sequence
  MKO10019386_A_Galnt18
  gRNA
tctggcaggggccggtcgag

SEQ ID NO: 19387 - DNA, 20 bp, Artificial Sequence
  MKO10019387_A_Galnt1
  gRNA
attcgaatggagcagcgctc

SEQ ID NO: 19388 - DNA, 20 bp, Artificial Sequence
  MKO10019388_A_Galnt1
  gRNA
tcactgatcacgtcgatgat

SEQ ID NO: 19389 - DNA, 20 bp, Artificial Sequence
  MKO10019389_A_Galnt1
  gRNA
accagtcgtcattccgaaag

SEQ ID NO: 19390 - DNA, 20 bp, Artificial Sequence
  MKO10019390_A_Galnt2
  gRNA
ttgaacttgttgcgtgcgta

SEQ ID NO: 19391 - DNA, 20 bp, Artificial Sequence
  MKO10019391_A_Galnt2
  gRNA
taccgccaacgtatgcctcc

SEQ ID NO: 19392 - DNA, 20 bp, Artificial Sequence
  MKO10019392_A_Galnt2
  gRNA
ccctgctgcggacggtggtc

SEQ ID NO: 19393 - DNA, 20 bp, Artificial Sequence
  MKO10019393_A_Galnt3
  gRNA
ggaaaggcctgatcaccgcg

SEQ ID NO: 19394 - DNA, 20 bp, Artificial Sequence
  MKO10019394_A_Galnt3
  gRNA
agctgcccctagcaaccgcg

SEQ ID NO: 19395 - DNA, 20 bp, Artificial Sequence
  MKO10019395_A_Galnt3
  gRNA
tgcgatgtctggactcacca

SEQ ID NO: 19396 - DNA, 20 bp, Artificial Sequence
  MKO10019396_A_Galnt4
  gRNA
aacgaaagattagcccccgt

SEQ ID NO: 19397 - DNA, 20 bp, Artificial Sequence
  MKO10019397_A_Galnt4
  gRNA
ctggtccgggcccgtctaat

SEQ ID NO: 19398 - DNA, 20 bp, Artificial Sequence
  MKO10019398_A_Galnt4
  gRNA
ccgcccgcgcggtattctgt

SEQ ID NO: 19399 - DNA, 20 bp, Artificial Sequence
  MKO10019399_A_Galnt5
  gRNA
tccaaagaggtgtcttcacc

SEQ ID NO: 19400 - DNA, 20 bp, Artificial Sequence
  MKO10019400_A_Galnt5
  gRNA
gccaggtgaagacacctctt

SEQ ID NO: 19401 - DNA, 20 bp, Artificial Sequence
  MKO10019401_A_Galnt5
  gRNA
agaatacctcaaagctgatt

SEQ ID NO: 19402 - DNA, 20 bp, Artificial Sequence
  MKO10019402_A_Galnt6
  gRNA
acagccggggcaacttcgac

SEQ ID NO: 19403 - DNA, 20 bp, Artificial Sequence
  MKO10019403_A_Galnt6
  gRNA
agtcgaagttgccccggctg

SEQ ID NO: 19404 - DNA, 20 bp, Artificial Sequence
  MKO10019404_A_Galnt6
  gRNA
ggtaccgatgtgctcaaagt

SEQ ID NO: 19405 - DNA, 20 bp, Artificial Sequence
  MKO10019405_A_Galnt7
  gRNA
ggcgtaagtcattgacgctg

SEQ ID NO: 19406 - DNA, 20 bp, Artificial Sequence
  MKO10019406_A_Galnt7
  gRNA
catttcgaaataccttcacg

SEQ ID NO: 19407 - DNA, 20 bp, Artificial Sequence
  MKO10019407_A_Galnt7
  gRNA
cgtgatcctgtgctacgccc

SEQ ID NO: 19408 - DNA, 20 bp, Artificial Sequence
  MKO10019408_A_Galnt9
  gRNA
gcggtacctctccgtacgtg

SEQ ID NO: 19409 - DNA, 20 bp, Artificial Sequence
  MKO10019409_A_Galnt9
  gRNA
acgccaaacgtaatgcacta

SEQ ID NO: 19410 - DNA, 20 bp, Artificial Sequence
  MKO10019410_A_Galnt9
  gRNA
cgcccttagtgcattacgtt

SEQ ID NO: 19411 - DNA, 20 bp, Artificial Sequence
  MKO10019411_A_Galntl5
  gRNA
tcttaccggataggtgtact

SEQ ID NO: 19412 - DNA, 20 bp, Artificial Sequence
  MKO10019412_A_Galntl5
  gRNA
atccatatcgcctcaatcct

SEQ ID NO: 19413 - DNA, 20 bp, Artificial Sequence
  MKO10019413_A_Galntl5
  gRNA
tcaaaagctccccttacaat

SEQ ID NO: 19414 - DNA, 20 bp, Artificial Sequence
  MKO10019414_A_Galntl6
  gRNA
gtccaaccttcgttgtgaaa

SEQ ID NO: 19415 - DNA, 20 bp, Artificial Sequence
  MKO10019415_A_Galntl6
  gRNA
tctcatccggacccgactcc

SEQ ID NO: 19416 - DNA, 20 bp, Artificial Sequence
  MKO10019416_A_Galntl6
  gRNA
gcaacaatattgctctagag

SEQ ID NO: 19417 - DNA, 20 bp, Artificial Sequence
  MKO10019417_A_Galp
  gRNA
acgtttgtcaaagcgaatac

SEQ ID NO: 19418 - DNA, 20 bp, Artificial Sequence
  MKO10019418_A_Galp
  gRNA
caatagtgctggttacctcc

SEQ ID NO: 19419 - DNA, 20 bp, Artificial Sequence
  MKO10019419_A_Galp
  gRNA
actcaccaatgatcttccac

SEQ ID NO: 19420 - DNA, 20 bp, Artificial Sequence
  MKO10019420_A_Galr1
  gRNA
tccacgccaatgccgaagag

SEQ ID NO: 19421 - DNA, 20 bp, Artificial Sequence
  MKO10019421_A_Galr1
  gRNA
gcacgcccatcgcgaaaatc

SEQ ID NO: 19422 - DNA, 20 bp, Artificial Sequence
  MKO10019422_A_Galr1
  gRNA
acacttgcttgtacgccttc

SEQ ID NO: 19423 - DNA, 20 bp, Artificial Sequence
  MKO10019423_A_Galr2
  gRNA
cgcaccacgacgtcgcgcca

SEQ ID NO: 19424 - DNA, 20 bp, Artificial Sequence
  MKO10019424_A_Galr2
  gRNA
gacacggatgatcgtcatcg

SEQ ID NO: 19425 - DNA, 20 bp, Artificial Sequence
  MKO10019425_A_Galr2
  gRNA
agccaaacacccaatcgtcc

SEQ ID NO: 19426 - DNA, 20 bp, Artificial Sequence
  MKO10019426_A_Galr3
  gRNA
gcaccgtgccgtagtagctt

SEQ ID NO: 19427 - DNA, 20 bp, Artificial Sequence
  MKO10019427_A_Galr3
  gRNA
ggctccatactccaaccgcg

SEQ ID NO: 19428 - DNA, 20 bp, Artificial Sequence
  MKO10019428_A_Galr3
  gRNA
ccagtgtgtagatggccgcc

SEQ ID NO: 19429 - DNA, 20 bp, Artificial Sequence
  MKO10019429_A_Galt
  gRNA
gcgggttgtagcgaatatgc

SEQ ID NO: 19430 - DNA, 20 bp, Artificial Sequence
  MKO10019430_A_Galt
  gRNA
tattcgctacaacccgctcc

SEQ ID NO: 19431 - DNA, 20 bp, Artificial Sequence
  MKO10019431_A_Galt
  gRNA
gcgtcacatccgaccagggg

SEQ ID NO: 19432 - DNA, 20 bp, Artificial Sequence
  MKO10019432_A_Gal
  gRNA
caacattgtccgcactataa

SEQ ID NO: 19433 - DNA, 20 bp, Artificial Sequence
  MKO10019433_A_Gal
  gRNA
atcactcacgtgggcccaga

SEQ ID NO: 19434 - DNA, 20 bp, Artificial Sequence
  MKO10019434_A_Gal
  gRNA
agatcatttagcgacaagca

SEQ ID NO: 19435 - DNA, 20 bp, Artificial Sequence
  MKO10019435_A_Gamt
  gRNA
cctcctagggggccgggtct

SEQ ID NO: 19436 - DNA, 20 bp, Artificial Sequence
  MKO10019436_A_Gamt
  gRNA
cacgtacccgctgtctgaag

SEQ ID NO: 19437 - DNA, 20 bp, Artificial Sequence
  MKO10019437_A_Gamt
  gRNA
cctactgcaacctcacgtcc

SEQ ID NO: 19438 - DNA, 20 bp, Artificial Sequence
  MKO10019438_A_Ganab
  gRNA
cactcggtatcgaggccgcc

SEQ ID NO: 19439 - DNA, 20 bp, Artificial Sequence
  MKO10019439_A_Ganab
  gRNA
acagacggcagcgaagcatt

SEQ ID NO: 19440 - DNA, 20 bp, Artificial Sequence
  MKO10019440_A_Ganab
  gRNA
ggaggcttcgatcttctagc

SEQ ID NO: 19441 - DNA, 20 bp, Artificial Sequence
  MKO10019441_A_Ganc
  gRNA
cgatttgctgtcgaagaacg

SEQ ID NO: 19442 - DNA, 20 bp, Artificial Sequence
  MKO10019442_A_Ganc
  gRNA
gacagcaaatcgatcttgaa

SEQ ID NO: 19443 - DNA, 20 bp, Artificial Sequence
  MKO10019443_A_Ganc
  gRNA
agcttgctgttgatgacgtc

SEQ ID NO: 19444 - DNA, 20 bp, Artificial Sequence
  MKO10019444_A_Gan
  gRNA
tttgacgatttctcgcacca

SEQ ID NO: 19445 - DNA, 20 bp, Artificial Sequence
  MKO10019445_A_Gan
  gRNA
cattcagcatctgctcgcgc

SEQ ID NO: 19446 - DNA, 20 bp, Artificial Sequence
  MKO10019446_A_Gan
  gRNA
cctgcaccacgtgcattacc

SEQ ID NO: 19447 - DNA, 20 bp, Artificial Sequence
  MKO10019447_A_Gap43
  gRNA
gcttccgtggacacataaca

SEQ ID NO: 19448 - DNA, 20 bp, Artificial Sequence
  MKO10019448_A_Gap43
  gRNA
gccttatgagccttatcttc

SEQ ID NO: 19449 - DNA, 20 bp, Artificial Sequence
  MKO10019449_A_Gap43
  gRNA
tgtagacgaagccaaaccta

SEQ ID NO: 19450 - DNA, 20 bp, Artificial Sequence
  MKO10019450_A_Gapdhs
  gRNA
gcctgtacactccaccacgt

SEQ ID NO: 19451 - DNA, 20 bp, Artificial Sequence
  MKO10019451_A_Gapdhs
  gRNA
aggcgtctatctgtccatcg

SEQ ID NO: 19452 - DNA, 20 bp, Artificial Sequence
  MKO10019452_A_Gapdhs
  gRNA
ggtggatcctcaaccttggg

SEQ ID NO: 19453 - DNA, 20 bp, Artificial Sequence
  MKO10019453_A_Gapdh
  gRNA
tctttcagatttggccgtat

SEQ ID NO: 19454 - DNA, 20 bp, Artificial Sequence
  MKO10019454_A_Gapdh
  gRNA
acttaccccggccttctcca

SEQ ID NO: 19455 - DNA, 20 bp, Artificial Sequence
  MKO10019455_A_Gapdh
  gRNA
ccttaaacaggcccacttga

SEQ ID NO: 19456 - DNA, 20 bp, Artificial Sequence
  MKO10019456_A_Gapt
  gRNA
cacgcagccgtctaatctcg

SEQ ID NO: 19457 - DNA, 20 bp, Artificial Sequence
  MKO10019457_A_Gapt
  gRNA
acgtgttcctcgagattaga

SEQ ID NO: 19458 - DNA, 20 bp, Artificial Sequence
  MKO10019458_A_Gapt
  gRNA
ttgaaaagctagtcgcaatc

SEQ ID NO: 19459 - DNA, 20 bp, Artificial Sequence
  MKO10019459_A_Gapvd1
  gRNA
aatcatgcagctcctcgtag

SEQ ID NO: 19460 - DNA, 20 bp, Artificial Sequence
  MKO10019460_A_Gapvd1
  gRNA
gctcatgcaaagtagccgta

SEQ ID NO: 19461 - DNA, 20 bp, Artificial Sequence
  MKO10019461_A_Gapvd1
  gRNA
ttacagtcagcttattactc

SEQ ID NO: 19462 - DNA, 20 bp, Artificial Sequence
  MKO10019462_A_Gar1
  gRNA
acacacgatgtcatcttcac

SEQ ID NO: 19463 - DNA, 20 bp, Artificial Sequence
  MKO10019463_A_Gar1
  gRNA
tgcagcggcagcagcttgta

SEQ ID NO: 19464 - DNA, 20 bp, Artificial Sequence
  MKO10019464_A_Gar1
  gRNA
agaggaggtggcggattccg

SEQ ID NO: 19465 - DNA, 20 bp, Artificial Sequence
  MKO10019465_A_Gareml
  gRNA
cgcaccaggcgctcgacgcg

SEQ ID NO: 19466 - DNA, 20 bp, Artificial Sequence
  MKO10019466_A_Gareml
  gRNA
ctgccgcgagcgcttcgatc

SEQ ID NO: 19467 - DNA, 20 bp, Artificial Sequence
  MKO10019467_A_Gareml
  gRNA
ccctgaccgaatcttcgtga

SEQ ID NO: 19468 - DNA, 20 bp, Artificial Sequence
  MKO10019468_A_Garem
  gRNA
atttagcacccgaagtcccc

SEQ ID NO: 19469 - DNA, 20 bp, Artificial Sequence
  MKO10019469_A_Garem
  gRNA
tcctgaacgtgtgtacgtca

SEQ ID NO: 19470 - DNA, 20 bp, Artificial Sequence
  MKO10019470_A_Garem
  gRNA
cggactggcttgactgttcg

SEQ ID NO: 19471 - DNA, 20 bp, Artificial Sequence
  MKO10019471_A_Garnl3
  gRNA
ctcatctctagtgatgccga

SEQ ID NO: 19472 - DNA, 20 bp, Artificial Sequence
  MKO10019472_A_Garnl3
  gRNA
gtagacgtggggatttcagt

SEQ ID NO: 19473 - DNA, 20 bp, Artificial Sequence
  MKO10019473_A_Garnl3
  gRNA
caaagaattgcacgatactg

SEQ ID NO: 19474 - DNA, 20 bp, Artificial Sequence
  MKO10019474_A_Gars
  gRNA
cgagcagaccacctgttgaa

SEQ ID NO: 19475 - DNA, 20 bp, Artificial Sequence
  MKO10019475_A_Gars
  gRNA
agtcagcaaatttgtctacg

SEQ ID NO: 19476 - DNA, 20 bp, Artificial Sequence
  MKO10019476_A_Gars
  gRNA
gcatggtgcagtcaatctcc

SEQ ID NO: 19477 - DNA, 20 bp, Artificial Sequence
  MKO10019477_A_Gart
  gRNA
tctgcaggagtacgatgctt

SEQ ID NO: 19478 - DNA, 20 bp, Artificial Sequence
  MKO10019478_A_Gart
  gRNA
aagattgaactcgtagttgt

SEQ ID NO: 19479 - DNA, 20 bp, Artificial Sequence
  MKO10019479_A_Gart
  gRNA
aaagcatcgtactcctgcag

SEQ ID NO: 19480 - DNA, 20 bp, Artificial Sequence
  MKO10019480_A_Gas1
  gRNA
gtccgagttccgcgcacttc

SEQ ID NO: 19481 - DNA, 20 bp, Artificial Sequence
  MKO10019481_A_Gas1
  gRNA
actgggcgaatcgaagcgcc

SEQ ID NO: 19482 - DNA, 20 bp, Artificial Sequence
  MKO10019482_A_Gas1
  gRNA
ccgccgcgctgcgctagcac

SEQ ID NO: 19483 - DNA, 20 bp, Artificial Sequence
  MKO10019483_A_Gas2l1
  gRNA
gcgacccttccgatccagtg

SEQ ID NO: 19484 - DNA, 20 bp, Artificial Sequence
  MKO10019484_A_Gas2l1
  gRNA
ggccaaggcgcgccccacgc

SEQ ID NO: 19485 - DNA, 20 bp, Artificial Sequence
  MKO10019485_A_Gas2l1
  gRNA
ccgggactttctccccgcag

SEQ ID NO: 19486 - DNA, 20 bp, Artificial Sequence
  MKO10019486_A_Gas2l2
  gRNA
ccacgctcttcacgttcttg

SEQ ID NO: 19487 - DNA, 20 bp, Artificial Sequence
  MKO10019487_A_Gas2l2
  gRNA
tggagctgggtcgccgcgct

SEQ ID NO: 19488 - DNA, 20 bp, Artificial Sequence
  MKO10019488_A_Gas2l2
  gRNA
ccctcactgggggttcacta

SEQ ID NO: 19489 - DNA, 20 bp, Artificial Sequence
  MKO10019489_A_Gas2l3
  gRNA
acgtttgccagtatgacgag

SEQ ID NO: 19490 - DNA, 20 bp, Artificial Sequence
  MKO10019490_A_Gas2l3
  gRNA
tctcgtcaacaccgatgtgt

SEQ ID NO: 19491 - DNA, 20 bp, Artificial Sequence
  MKO10019491_A_Gas2l3
  gRNA
ctaaaccttccgactcaaag

SEQ ID NO: 19492 - DNA, 20 bp, Artificial Sequence
  MKO10019492_A_Gas2
  gRNA
ttgcaaagccagtgcaccct

SEQ ID NO: 19493 - DNA, 20 bp, Artificial Sequence
  MKO10019493_A_Gas2
  gRNA
aaaggagcccgagggtgcac

SEQ ID NO: 19494 - DNA, 20 bp, Artificial Sequence
  MKO10019494_A_Gas2
  gRNA
tcagcttgcagcaactgtgc

SEQ ID NO: 19495 - DNA, 20 bp, Artificial Sequence
  MKO10019495_A_Gas6
  gRNA
gtcgttctcgaacacctctc

SEQ ID NO: 19496 - DNA, 20 bp, Artificial Sequence
  MKO10019496_A_Gas6
  gRNA
ccgcgcctaccaagtcttcg

SEQ ID NO: 19497 - DNA, 20 bp, Artificial Sequence
  MKO10019497_A_Gas6
  gRNA
tatttctatccacgatatca

SEQ ID NO: 19498 - DNA, 20 bp, Artificial Sequence
  MKO10019498_A_Gas7
  gRNA
tatgtcaacacgactaccaa

SEQ ID NO: 19499 - DNA, 20 bp, Artificial Sequence
  MKO10019499_A_Gas7
  gRNA
gtgaatggataccacgcatc

SEQ ID NO: 19500 - DNA, 20 bp, Artificial Sequence
  MKO10019500_A_Gas7
  gRNA
aacctgggatcctcatcgcc

SEQ ID NO: 19501 - DNA, 20 bp, Artificial Sequence
  MKO10019501_A_Gas8
  gRNA
aggaacatgtcgcccgcatc

SEQ ID NO: 19502 - DNA, 20 bp, Artificial Sequence
  MKO10019502_A_Gas8
  gRNA
ttcaaagtcatttcgcatct

SEQ ID NO: 19503 - DNA, 20 bp, Artificial Sequence
  MKO10019503_A_Gas8
  gRNA
ccttgcgcagagcgccctcc

SEQ ID NO: 19504 - DNA, 20 bp, Artificial Sequence
  MKO10019504_A_Gast
  gRNA
gccaaagtccatccatccgt

SEQ ID NO: 19505 - DNA, 20 bp, Artificial Sequence
  MKO10019505_A_Gast
  gRNA
acagcgccagttcaacaagc

SEQ ID NO: 19506 - DNA, 20 bp, Artificial Sequence
  MKO10019506_A_Gast
  gRNA
ggggccccagctgccttcga

SEQ ID NO: 19507 - DNA, 20 bp, Artificial Sequence
  MKO10019507_A_Gata1
  gRNA
gtagagtgccgtcttgccat

SEQ ID NO: 19508 - DNA, 20 bp, Artificial Sequence
  MKO10019508_A_Gata1
  gRNA
ggggctcaccttatgctagc

SEQ ID NO: 19509 - DNA, 20 bp, Artificial Sequence
  MKO10019509_A_Gata1
  gRNA
gttgtaggcgatcccagcag

SEQ ID NO: 19510 - DNA, 20 bp, Artificial Sequence
  MKO10019510_A_Gata2
  gRNA
cgctcatcaagcccaagcgg

SEQ ID NO: 19511 - DNA, 20 bp, Artificial Sequence
  MKO10019511_A_Gata2
  gRNA
tgctggacatcttccgattc

SEQ ID NO: 19512 - DNA, 20 bp, Artificial Sequence
  MKO10019512_A_Gata2
  gRNA
cattgtgcagcttgtagtag

SEQ ID NO: 19513 - DNA, 20 bp, Artificial Sequence
  MKO10019513_A_Gata3
  gRNA
ccgggttcggatgtaagtcg

SEQ ID NO: 19514 - DNA, 20 bp, Artificial Sequence
  MKO10019514_A_Gata3
  gRNA
ggtggtctgacagttcgcgc

SEQ ID NO: 19515 - DNA, 20 bp, Artificial Sequence
  MKO10019515_A_Gata3
  gRNA
acgcccatgcatccgccctc

SEQ ID NO: 19516 - DNA, 20 bp, Artificial Sequence
  MKO10019516_A_Gata4
  gRNA
tgttgtagtccgcttcccgc

SEQ ID NO: 19517 - DNA, 20 bp, Artificial Sequence
  MKO10019517_A_Gata4
  gRNA
cattaagcctcagcgccgcc

SEQ ID NO: 19518 - DNA, 20 bp, Artificial Sequence
  MKO10019518_A_Gata4
  gRNA
tcacttaccaggcggcgctg

SEQ ID NO: 19519 - DNA, 20 bp, Artificial Sequence
  MKO10019519_A_Gata5
  gRNA
agcagcataggccggatctt

SEQ ID NO: 19520 - DNA, 20 bp, Artificial Sequence
  MKO10019520_A_Gata5
  gRNA
ccacactcaccagacgcttc

SEQ ID NO: 19521 - DNA, 20 bp, Artificial Sequence
  MKO10019521_A_Gata5
  gRNA
tgcgccacagtggtgtagac

SEQ ID NO: 19522 - DNA, 20 bp, Artificial Sequence
  MKO10019522_A_Gata6
  gRNA
agccgcgagtgcgtgaactg

SEQ ID NO: 19523 - DNA, 20 bp, Artificial Sequence
  MKO10019523_A_Gata6
  gRNA
agccgcagttcacgcactcg

SEQ ID NO: 19524 - DNA, 20 bp, Artificial Sequence
  MKO10019524_A_Gata6
  gRNA
ctcagcatttctacgccata

SEQ ID NO: 19525 - DNA, 20 bp, Artificial Sequence
  MKO10019525_A_Gatad1
  gRNA
acagattcaggcgctttgat

SEQ ID NO: 19526 - DNA, 20 bp, Artificial Sequence
  MKO10019526_A_Gatad1
  gRNA
agaagagtgccgcgctgaca

SEQ ID NO: 19527 - DNA, 20 bp, Artificial Sequence
  MKO10019527_A_Gatad1
  gRNA
gtttccttaatagttatcgc

SEQ ID NO: 19528 - DNA, 20 bp, Artificial Sequence
  MKO10019528_A_Gatad2a
  gRNA
ttctgggtaccccgcacgag

SEQ ID NO: 19529 - DNA, 20 bp, Artificial Sequence
  MKO10019529_A_Gatad2a
  gRNA
tctccacatcatcctccgtt

SEQ ID NO: 19530 - DNA, 20 bp, Artificial Sequence
  MKO10019530_A_Gatad2a
  gRNA
atcatccgctctcgttcttc

SEQ ID NO: 19531 - DNA, 20 bp, Artificial Sequence
  MKO10019531_A_Gatad2b
  gRNA
acgattggaagaagctcgcc

SEQ ID NO: 19532 - DNA, 20 bp, Artificial Sequence
  MKO10019532_A_Gatad2b
  gRNA
caattccttgagccccgggt

SEQ ID NO: 19533 - DNA, 20 bp, Artificial Sequence
  MKO10019533_A_Gatad2b
  gRNA
cgttgagacatcaacatgtg

SEQ ID NO: 19534 - DNA, 20 bp, Artificial Sequence
  MKO10019534_A_Gatc
  gRNA
ctccagatgctcgattaccg

SEQ ID NO: 19535 - DNA, 20 bp, Artificial Sequence
  MKO10019535_A_Gatc
  gRNA
aagcttcggcccgcgtccag

SEQ ID NO: 19536 - DNA, 20 bp, Artificial Sequence
  MKO10019536_A_Gatc
  gRNA
gtattcctccacaacgtgat

SEQ ID NO: 19537 - DNA, 20 bp, Artificial Sequence
  MKO10019537_A_Gatm
  gRNA
tctttgagtaccgagcgtac

SEQ ID NO: 19538 - DNA, 20 bp, Artificial Sequence
  MKO10019538_A_Gatm
  gRNA
tgataattgacctgtacgct

SEQ ID NO: 19539 - DNA, 20 bp, Artificial Sequence
  MKO10019539_A_Gatm
  gRNA
atacttgagtgaccagtcga

SEQ ID NO: 19540 - DNA, 20 bp, Artificial Sequence
  MKO10019540_A_Gatsl2
  gRNA
tttctccattgacaacgcgt

SEQ ID NO: 19541 - DNA, 20 bp, Artificial Sequence
  MKO10019541_A_Gatsl2
  gRNA
tctttgtcacaccgatgggc

SEQ ID NO: 19542 - DNA, 20 bp, Artificial Sequence
  MKO10019542_A_Gatsl2
  gRNA
accatcctacgcgttgtcaa

SEQ ID NO: 19543 - DNA, 20 bp, Artificial Sequence
  MKO10019543_A_Gatsl3
  gRNA
cttgacccaggtacgggagc

SEQ ID NO: 19544 - DNA, 20 bp, Artificial Sequence
  MKO10019544_A_Gatsl3
  gRNA
cccatccgagttcctgcaag

SEQ ID NO: 19545 - DNA, 20 bp, Artificial Sequence
  MKO10019545_A_Gatsl3
  gRNA
accatgagagtgtaatcttc

SEQ ID NO: 19546 - DNA, 20 bp, Artificial Sequence
  MKO10019546_A_Gba2
  gRNA
atagtatgcttgcgtcgaga

SEQ ID NO: 19547 - DNA, 20 bp, Artificial Sequence
  MKO10019547_A_Gba2
  gRNA
cagtcgtcccgccctgttcc

SEQ ID NO: 19548 - DNA, 20 bp, Artificial Sequence
  MKO10019548_A_Gba2
  gRNA
acagggcgggacgactgttc

SEQ ID NO: 19549 - DNA, 20 bp, Artificial Sequence
  MKO10019549_A_Gbas
  gRNA
ttcagttcacaacgttaagc

SEQ ID NO: 19550 - DNA, 20 bp, Artificial Sequence
  MKO10019550_A_Gbas
  gRNA
acgtgttccacgtccccacc

SEQ ID NO: 19551 - DNA, 20 bp, Artificial Sequence
  MKO10019551_A_Gbas
  gRNA
gggacgtggaacacgtggta

SEQ ID NO: 19552 - DNA, 20 bp, Artificial Sequence
  MKO10019552_A_Gba
  gRNA
cacgtcgagtgctctcgtaa

SEQ ID NO: 19553 - DNA, 20 bp, Artificial Sequence
  MKO10019553_A_Gba
  gRNA
gccatccaggccaatcgcac

SEQ ID NO: 19554 - DNA, 20 bp, Artificial Sequence
  MKO10019554_A_Gba
  gRNA
cccacttggctcaagaccaa

SEQ ID NO: 19555 - DNA, 20 bp, Artificial Sequence
  MKO10019555_A_Gbe1
  gRNA
gggatcgataagttctccag

SEQ ID NO: 19556 - DNA, 20 bp, Artificial Sequence
  MKO10019556_A_Gbe1
  gRNA
gacggaacctaccttcagct

SEQ ID NO: 19557 - DNA, 20 bp, Artificial Sequence
  MKO10019557_A_Gbe1
  gRNA
gtagttattactagtaagag

SEQ ID NO: 19558 - DNA, 20 bp, Artificial Sequence
  MKO10019558_A_Gbf1
  gRNA
gtgcttacctatgagtgcgt

SEQ ID NO: 19559 - DNA, 20 bp, Artificial Sequence
  MKO10019559_A_Gbf1
  gRNA
ttcctgtcctacgcactcat

SEQ ID NO: 19560 - DNA, 20 bp, Artificial Sequence
  MKO10019560_A_Gbf1
  gRNA
cggagcagatccaactcatg

SEQ ID NO: 19561 - DNA, 20 bp, Artificial Sequence
  MKO10019561_A_Gbgt1
  gRNA
ttggcacccatcgtctccga

SEQ ID NO: 19562 - DNA, 20 bp, Artificial Sequence
  MKO10019562_A_Gbgt1
  gRNA
cagccgttgaacctgaccat

SEQ ID NO: 19563 - DNA, 20 bp, Artificial Sequence
  MKO10019563_A_Gbgt1
  gRNA
gtaccctcagcctaagctgc

SEQ ID NO: 19564 - DNA, 20 bp, Artificial Sequence
  MKO10019564_A_Gbp10
  gRNA
cttccattcaggcttccctc

SEQ ID NO: 19565 - DNA, 20 bp, Artificial Sequence
  MKO10019565_A_Gbp10
  gRNA
cgaacaatccagacaaagtc

SEQ ID NO: 19566 - DNA, 20 bp, Artificial Sequence
  MKO10019566_A_Gbp10
  gRNA
cactgtgcagtctcaaacca

SEQ ID NO: 19567 - DNA, 20 bp, Artificial Sequence
  MKO10019567_A_Gbp11
  gRNA
aggagttctatgtcataagt

SEQ ID NO: 19568 - DNA, 20 bp, Artificial Sequence
  MKO10019568_A_Gbp11
  gRNA
tcagacgtttctttccaaat

SEQ ID NO: 19569 - DNA, 20 bp, Artificial Sequence
  MKO10019569_A_Gbp11
  gRNA
catcacaagtgatgggtacc

SEQ ID NO: 19570 - DNA, 20 bp, Artificial Sequence
  MKO10019570_A_Gbp2b
  gRNA
atatgcctcgcctgtgtatc

SEQ ID NO: 19571 - DNA, 20 bp, Artificial Sequence
  MKO10019571_A_Gbp2b
  gRNA
ctcctgtatccactctagtt

SEQ ID NO: 19572 - DNA, 20 bp, Artificial Sequence
  MKO10019572_A_Gbp2b
  gRNA
ttgtctacatcactctgatc

SEQ ID NO: 19573 - DNA, 20 bp, Artificial Sequence
  MKO10019573_A_Gbp2
  gRNA
ttccgttaacctccagctcg

SEQ ID NO: 19574 - DNA, 20 bp, Artificial Sequence
  MKO10019574_A_Gbp2
  gRNA
tcgtctaccccactctggtc

SEQ ID NO: 19575 - DNA, 20 bp, Artificial Sequence
  MKO10019575_A_Gbp2
  gRNA
aatttcctgatgcacagtcg

SEQ ID NO: 19576 - DNA, 20 bp, Artificial Sequence
  MKO10019576_A_Gbp3
  gRNA
caataaacgtttgtcgcttg

SEQ ID NO: 19577 - DNA, 20 bp, Artificial Sequence
  MKO10019577_A_Gbp3
  gRNA
aagacaaagcacttccgtac

SEQ ID NO: 19578 - DNA, 20 bp, Artificial Sequence
  MKO10019578_A_Gbp3
  gRNA
ctgaattaacacagctaatc

SEQ ID NO: 19579 - DNA, 20 bp, Artificial Sequence
  MKO10019579_A_Gbp4
  gRNA
tacgtttaaggaaagtgcaa

SEQ ID NO: 19580 - DNA, 20 bp, Artificial Sequence
  MKO10019580_A_Gbp4
  gRNA
attgcactttccttaaacgt

SEQ ID NO: 19581 - DNA, 20 bp, Artificial Sequence
  MKO10019581_A_Gbp4
  gRNA
accccaccaagccagagcac

SEQ ID NO: 19582 - DNA, 20 bp, Artificial Sequence
  MKO10019582_A_Gbp5
  gRNA
actcacgaggtccgttgacc

SEQ ID NO: 19583 - DNA, 20 bp, Artificial Sequence
  MKO10019583_A_Gbp5
  gRNA
gcaataggtcgatagccccc

SEQ ID NO: 19584 - DNA, 20 bp, Artificial Sequence
  MKO10019584_A_Gbp5
  gRNA
gaaagcttacttccaagcgc

SEQ ID NO: 19585 - DNA, 20 bp, Artificial Sequence
  MKO10019585_A_Gbp6
  gRNA
cttcccttcaggctttcctc

SEQ ID NO: 19586 - DNA, 20 bp, Artificial Sequence
  MKO10019586_A_Gbp6
  gRNA
caccgtgcagtctcagacca

SEQ ID NO: 19587 - DNA, 20 bp, Artificial Sequence
  MKO10019587_A_Gbp6
  gRNA
gtgatcctaagaacgacttg

SEQ ID NO: 19588 - DNA, 20 bp, Artificial Sequence
  MKO10019588_A_Gbp7
  gRNA
cacttcttcagaccgtgaag

SEQ ID NO: 19589 - DNA, 20 bp, Artificial Sequence
  MKO10019589_A_Gbp7
  gRNA
ctacatcttctccaattcga

SEQ ID NO: 19590 - DNA, 20 bp, Artificial Sequence
  MKO10019590_A_Gbp7
  gRNA
caagttcacactcgtgcttc

SEQ ID NO: 19591 - DNA, 20 bp, Artificial Sequence
  MKO10019591_A_Gbp8
  gRNA
aaggatactgtagtttctcc

SEQ ID NO: 19592 - DNA, 20 bp, Artificial Sequence
  MKO10019592_A_Gbp8
  gRNA
tgctctggtttagtggggtg

SEQ ID NO: 19593 - DNA, 20 bp, Artificial Sequence
  MKO10019593_A_Gbp8
  gRNA
aagtcttcaccaaatcctga

SEQ ID NO: 19594 - DNA, 20 bp, Artificial Sequence
  MKO10019594_A_Gbp9
  gRNA
tcttccctcaggtttccctc

SEQ ID NO: 19595 - DNA, 20 bp, Artificial Sequence
  MKO10019595_A_Gbp9
  gRNA
aagtcttcccgaaatcccca

SEQ ID NO: 19596 - DNA, 20 bp, Artificial Sequence
  MKO10019596_A_Gbp9
  gRNA
taagttccgggaaggaacaa

SEQ ID NO: 19597 - DNA, 20 bp, Artificial Sequence
  MKO10019597_A_Gbx1
  gRNA
gggctccgggttgcttcgcg

SEQ ID NO: 19598 - DNA, 20 bp, Artificial Sequence
  MKO10019598_A_Gbx1
  gRNA
ccaccatcgagggcaccgcc

SEQ ID NO: 19599 - DNA, 20 bp, Artificial Sequence
  MKO10019599_A_Gbx1
  gRNA
ccatacctgtgcacgtcaac

SEQ ID NO: 19600 - DNA, 20 bp, Artificial Sequence
  MKO10019600_A_Gbx2
  gRNA
gaagcggtgcaggcgtcgct

SEQ ID NO: 19601 - DNA, 20 bp, Artificial Sequence
  MKO10019601_A_Gbx2
  gRNA
gagcgacgcctgcaccgctt

SEQ ID NO: 19602 - DNA, 20 bp, Artificial Sequence
  MKO10019602_A_Gbx2
  gRNA
tgaaggcagtccgccgccgc

SEQ ID NO: 19603 - DNA, 20 bp, Artificial Sequence
  MKO10019603_A_Gcat
  gRNA
catccgcgtggacggcatct

SEQ ID NO: 19604 - DNA, 20 bp, Artificial Sequence
  MKO10019604_A_Gcat
  gRNA
caagtaccgttaccgccacc

SEQ ID NO: 19605 - DNA, 20 bp, Artificial Sequence
  MKO10019605_A_Gcat
  gRNA
ccgccgcgcacattcagcgc

SEQ ID NO: 19606 - DNA, 20 bp, Artificial Sequence
  MKO10019606_A_Gca
  gRNA
aaccgttagagagactacac

SEQ ID NO: 19607 - DNA, 20 bp, Artificial Sequence
  MKO10019607_A_Gca
  gRNA
tttgggccgctcttaatgcc

SEQ ID NO: 19608 - DNA, 20 bp, Artificial Sequence
  MKO10019608_A_Gca
  gRNA
cccctgccgacgactccatg

SEQ ID NO: 19609 - DNA, 20 bp, Artificial Sequence
  MKO10019609_A_Gcc1
  gRNA
taccgcgctctactaccaac

SEQ ID NO: 19610 - DNA, 20 bp, Artificial Sequence
  MKO10019610_A_Gcc1
  gRNA
gcgggcatatgccgctgatc

SEQ ID NO: 19611 - DNA, 20 bp, Artificial Sequence
  MKO10019611_A_Gcc1
  gRNA
actgtcggtatcccacgagg

SEQ ID NO: 19612 - DNA, 20 bp, Artificial Sequence
  MKO10019612_A_Gcc2
  gRNA
acaggtactaactgaacgct

SEQ ID NO: 19613 - DNA, 20 bp, Artificial Sequence
  MKO10019613_A_Gcc2
  gRNA
agtacctgtacaccttgctt

SEQ ID NO: 19614 - DNA, 20 bp, Artificial Sequence
  MKO10019614_A_Gcc2
  gRNA
gccgtagctgcagcaccctc

SEQ ID NO: 19615 - DNA, 20 bp, Artificial Sequence
  MKO10019615_A_Gcdh
  gRNA
ccagtcaaacacggggcgag

SEQ ID NO: 19616 - DNA, 20 bp, Artificial Sequence
  MKO10019616_A_Gcdh
  gRNA
ttcgagacataagccgctcc

SEQ ID NO: 19617 - DNA, 20 bp, Artificial Sequence
  MKO10019617_A_Gcdh
  gRNA
tgatcttacatttggccggt

SEQ ID NO: 19618 - DNA, 20 bp, Artificial Sequence
  MKO10019618_A_Gcfc2
  gRNA
agcccgcagaaaacgggagt

SEQ ID NO: 19619 - DNA, 20 bp, Artificial Sequence
  MKO10019619_A_Gcfc2
  gRNA
tccaatgaaatgtagtcccc

SEQ ID NO: 19620 - DNA, 20 bp, Artificial Sequence
  MKO10019620_A_Gcfc2
  gRNA
gaaggaacacataccttgac

SEQ ID NO: 19621 - DNA, 20 bp, Artificial Sequence
  MKO10019621_A_Gcgr
  gRNA
ccagcaggagtacttgtcga

SEQ ID NO: 19622 - DNA, 20 bp, Artificial Sequence
  MKO10019622_A_Gcgr
  gRNA
ccttcgacaagtactcctgc

SEQ ID NO: 19623 - DNA, 20 bp, Artificial Sequence
  MKO10019623_A_Gcgr
  gRNA
ccctcgaacccactgcccat

SEQ ID NO: 19624 - DNA, 20 bp, Artificial Sequence
  MKO10019624_A_Gcg
  gRNA
ctcggccgcaggcacgctga

SEQ ID NO: 19625 - DNA, 20 bp, Artificial Sequence
  MKO10019625_A_Gcg
  gRNA
agactcttaccggttcctct

SEQ ID NO: 19626 - DNA, 20 bp, Artificial Sequence
  MKO10019626_A_Gcg
  gRNA
ttcccagacagaagcgcatg

SEQ ID NO: 19627 - DNA, 20 bp, Artificial Sequence
  MKO10019627_A_Gch1
  gRNA
gatggccaccgcaatctgtt

SEQ ID NO: 19628 - DNA, 20 bp, Artificial Sequence
  MKO10019628_A_Gch1
  gRNA
gcgcctcaccaaacagattg

SEQ ID NO: 19629 - DNA, 20 bp, Artificial Sequence
  MKO10019629_A_Gch1
  gRNA
gaacttacccttcctacaaa

SEQ ID NO: 19630 - DNA, 20 bp, Artificial Sequence
  MKO10019630_A_Gchfr
  gRNA
cgaccctcctcgcatagtcc

SEQ ID NO: 19631 - DNA, 20 bp, Artificial Sequence
  MKO10019631_A_Gchfr
  gRNA
catcagcactcagatccgta

SEQ ID NO: 19632 - DNA, 20 bp, Artificial Sequence
  MKO10019632_A_Gchfr
  gRNA
gggtgatgaacactcggatc

SEQ ID NO: 19633 - DNA, 20 bp, Artificial Sequence
  MKO10019633_A_Gckr
  gRNA
gtcccagacctttcatcagc

SEQ ID NO: 19634 - DNA, 20 bp, Artificial Sequence
  MKO10019634_A_Gckr
  gRNA
gggttggacttctctgtgat

SEQ ID NO: 19635 - DNA, 20 bp, Artificial Sequence
  MKO10019635_A_Gckr
  gRNA
agaagtccaacccactgacc

SEQ ID NO: 19636 - DNA, 20 bp, Artificial Sequence
  MKO10019636_A_Gck
  gRNA
tacgtgcgttccaccccaga

SEQ ID NO: 19637 - DNA, 20 bp, Artificial Sequence
  MKO10019637_A_Gck
  gRNA
ccagatgtattccatccccg

SEQ ID NO: 19638 - DNA, 20 bp, Artificial Sequence
  MKO10019638_A_Gck
  gRNA
cctcggggatggaatacatc

SEQ ID NO: 19639 - DNA, 20 bp, Artificial Sequence
  MKO10019639_A_Gclc
  gRNA
gcctcactcacccgaagcgg

SEQ ID NO: 19640 - DNA, 20 bp, Artificial Sequence
  MKO10019640_A_Gclc
  gRNA
ctcagacatcgttcctccgt

SEQ ID NO: 19641 - DNA, 20 bp, Artificial Sequence
  MKO10019641_A_Gclc
  gRNA
tctacagccatccgaccctc

SEQ ID NO: 19642 - DNA, 20 bp, Artificial Sequence
  MKO10019642_A_Gclm
  gRNA
aaatcagccccgatttagtc

SEQ ID NO: 19643 - DNA, 20 bp, Artificial Sequence
  MKO10019643_A_Gclm
  gRNA
tctacttaccctgactaaat

SEQ ID NO: 19644 - DNA, 20 bp, Artificial Sequence
  MKO10019644_A_Gclm
  gRNA
atggtgcattccaaaacatc

SEQ ID NO: 19645 - DNA, 20 bp, Artificial Sequence
  MKO10019645_A_Gcm1
  gRNA
acctcccggattggaccaca

SEQ ID NO: 19646 - DNA, 20 bp, Artificial Sequence
  MKO10019646_A_Gcm1
  gRNA
tcgtagtctccatacgtccc

SEQ ID NO: 19647 - DNA, 20 bp, Artificial Sequence
  MKO10019647_A_Gcm1
  gRNA
gggatgatcatgctcgcctt

SEQ ID NO: 19648 - DNA, 20 bp, Artificial Sequence
  MKO10019648_A_Gcm2
  gRNA
atgaagcgcacgtagccatc

SEQ ID NO: 19649 - DNA, 20 bp, Artificial Sequence
  MKO10019649_A_Gcm2
  gRNA
ccagggcagccgtgctattg

SEQ ID NO: 19650 - DNA, 20 bp, Artificial Sequence
  MKO10019650_A_Gcm2
  gRNA
cctgtataaagattcctccg

SEQ ID NO: 19651 - DNA, 20 bp, Artificial Sequence
  MKO10019651_A_Gcn1l1
  gRNA
gcttgacactgcatcgatat

SEQ ID NO: 19652 - DNA, 20 bp, Artificial Sequence
  MKO10019652_A_Gcn1l1
  gRNA
agcgaagcgcttcagtgtct

SEQ ID NO: 19653 - DNA, 20 bp, Artificial Sequence
  MKO10019653_A_Gcn1l1
  gRNA
actgaagcgcttcgctgtga

SEQ ID NO: 19654 - DNA, 20 bp, Artificial Sequence
  MKO10019654_A_Gcnt1
  gRNA
gtcaagtggcagtacttcga

SEQ ID NO: 19655 - DNA, 20 bp, Artificial Sequence
  MKO10019655_A_Gcnt1
  gRNA
tgcaattcaagaagcgcccg

SEQ ID NO: 19656 - DNA, 20 bp, Artificial Sequence
  MKO10019656_A_Gcnt1
  gRNA
gtctgccttaacccgactcc

SEQ ID NO: 19657 - DNA, 20 bp, Artificial Sequence
  MKO10019657_A_Gcnt2
  gRNA
aatcaaccgcccgtgggtca

SEQ ID NO: 19658 - DNA, 20 bp, Artificial Sequence
  MKO10019658_A_Gcnt2
  gRNA
gtccgtacaactatgtacgc

SEQ ID NO: 19659 - DNA, 20 bp, Artificial Sequence
  MKO10019659_A_Gcnt2
  gRNA
aaatcatacgttcttcacga

SEQ ID NO: 19660 - DNA, 20 bp, Artificial Sequence
  MKO10019660_A_Gcnt3
  gRNA
atagtcccgatgagcacctt

SEQ ID NO: 19661 - DNA, 20 bp, Artificial Sequence
  MKO10019661_A_Gcnt3
  gRNA
ctccacataaaaaatcccgc

SEQ ID NO: 19662 - DNA, 20 bp, Artificial Sequence
  MKO10019662_A_Gcnt3
  gRNA
tctgctggcactatcgcctg

SEQ ID NO: 19663 - DNA, 20 bp, Artificial Sequence
  MKO10019663_A_Gcnt4
  gRNA
gccaccttaatccggatacc

SEQ ID NO: 19664 - DNA, 20 bp, Artificial Sequence
  MKO10019664_A_Gcnt4
  gRNA
ggtctacgagcacgagcctt

SEQ ID NO: 19665 - DNA, 20 bp, Artificial Sequence
  MKO10019665_A_Gcnt4
  gRNA
acgaccagcgaataggctat

SEQ ID NO: 19666 - DNA, 20 bp, Artificial Sequence
  MKO10019666_A_Gcnt7
  gRNA
ccaggtgtgcgcaagcgagc

SEQ ID NO: 19667 - DNA, 20 bp, Artificial Sequence
  MKO10019667_A_Gcnt7
  gRNA
cctatgttatacatgctccg

SEQ ID NO: 19668 - DNA, 20 bp, Artificial Sequence
  MKO10019668_A_Gcnt7
  gRNA
gacacattcgggccacaaag

SEQ ID NO: 19669 - DNA, 20 bp, Artificial Sequence
  MKO10019669_A_Gcsam
  gRNA
gatgacttcagctcccgttc

SEQ ID NO: 19670 - DNA, 20 bp, Artificial Sequence
  MKO10019670_A_Gcsam
  gRNA
agttgttgtcacagcgttga

SEQ ID NO: 19671 - DNA, 20 bp, Artificial Sequence
  MKO10019671_A_Gcsam
  gRNA
tcatggggaactgtttgcag

SEQ ID NO: 19672 - DNA, 20 bp, Artificial Sequence
  MKO10019672_A_Gcsh
  gRNA
caactcaccatcttcgtaac

SEQ ID NO: 19673 - DNA, 20 bp, Artificial Sequence
  MKO10019673_A_Gcsh
  gRNA
aacaaatcctgttacgaaga

SEQ ID NO: 19674 - DNA, 20 bp, Artificial Sequence
  MKO10019674_A_Gcsh
  gRNA
actgagtgacccttcagaga

SEQ ID NO: 19675 - DNA, 20 bp, Artificial Sequence
  MKO10019675_A_Gc
  gRNA
gcttaccctggtgtcgtagc

SEQ ID NO: 19676 - DNA, 20 bp, Artificial Sequence
  MKO10019676_A_Gc
  gRNA
ttgcaatgaactcgccatgc

SEQ ID NO: 19677 - DNA, 20 bp, Artificial Sequence
  MKO10019677_A_Gc
  gRNA
tctaggccgagactatgaga

SEQ ID NO: 19678 - DNA, 20 bp, Artificial Sequence
  MKO10019678_A_Gdap1l1
  gRNA
acgcccgagtgctgcagtac

SEQ ID NO: 19679 - DNA, 20 bp, Artificial Sequence
  MKO10019679_A_Gdap1l1
  gRNA
gttccacgtagtcaatgatc

SEQ ID NO: 19680 - DNA, 20 bp, Artificial Sequence
  MKO10019680_A_Gdap1l1
  gRNA
gcatagcatacctcccgtga

SEQ ID NO: 19681 - DNA, 20 bp, Artificial Sequence
  MKO10019681_A_Gdap1
  gRNA
tttatgcgcttgaactcagc

SEQ ID NO: 19682 - DNA, 20 bp, Artificial Sequence
  MKO10019682_A_Gdap1
  gRNA
ttacatactgcgaatccttg

SEQ ID NO: 19683 - DNA, 20 bp, Artificial Sequence
  MKO10019683_A_Gdap1
  gRNA
cacagattatgttctccccg

SEQ ID NO: 19684 - DNA, 20 bp, Artificial Sequence
  MKO10019684_A_Gdap2
  gRNA
ttgtttctaggttgccgaac

SEQ ID NO: 19685 - DNA, 20 bp, Artificial Sequence
  MKO10019685_A_Gdap2
  gRNA
gtcatcaattctgccaagcg

SEQ ID NO: 19686 - DNA, 20 bp, Artificial Sequence
  MKO10019686_A_Gdap2
  gRNA
tctccgctgcagtgcggtag

SEQ ID NO: 19687 - DNA, 20 bp, Artificial Sequence
  MKO10019687_A_Gda
  gRNA
caacgttgacctgccgcttt

SEQ ID NO: 19688 - DNA, 20 bp, Artificial Sequence
  MKO10019688_A_Gda
  gRNA
gtcaacgttgcttccagcaa

SEQ ID NO: 19689 - DNA, 20 bp, Artificial Sequence
  MKO10019689_A_Gda
  gRNA
atttgggcagcgagcatttg

SEQ ID NO: 19690 - DNA, 20 bp, Artificial Sequence
  MKO10019690_A_Gde1
  gRNA
ttccaaaagacgctgtagcg

SEQ ID NO: 19691 - DNA, 20 bp, Artificial Sequence
  MKO10019691_A_Gde1
  gRNA
agcctcgctacagcgtcttt

SEQ ID NO: 19692 - DNA, 20 bp, Artificial Sequence
  MKO10019692_A_Gde1
  gRNA
gacatcgagtttacttctga

SEQ ID NO: 19693 - DNA, 20 bp, Artificial Sequence
  MKO10019693_A_Gdf10
  gRNA
tgcggtctttgcgccccgtg

SEQ ID NO: 19694 - DNA, 20 bp, Artificial Sequence
  MKO10019694_A_Gdf10
  gRNA
ccgtccgaagcttccgtgcc

SEQ ID NO: 19695 - DNA, 20 bp, Artificial Sequence
  MKO10019695_A_Gdf10
  gRNA
ccgggcactgaaaccccgca

SEQ ID NO: 19696 - DNA, 20 bp, Artificial Sequence
  MKO10019696_A_Gdf11
  gRNA
tcgagtgttcatcgcagtcc

SEQ ID NO: 19697 - DNA, 20 bp, Artificial Sequence
  MKO10019697_A_Gdf11
  gRNA
tcgggggggagcgctcgagc

SEQ ID NO: 19698 - DNA, 20 bp, Artificial Sequence
  MKO10019698_A_Gdf11
  gRNA
ggccatgcttatgaccgtct

SEQ ID NO: 19699 - DNA, 20 bp, Artificial Sequence
  MKO10019699_A_Gdf15
  gRNA
aactcaacgccgacgagcta

SEQ ID NO: 19700 - DNA, 20 bp, Artificial Sequence
  MKO10019700_A_Gdf15
  gRNA
gaagcgaccccgtagctcgt

SEQ ID NO: 19701 - DNA, 20 bp, Artificial Sequence
  MKO10019701_A_Gdf15
  gRNA
agctgctactccgcgtcaac

SEQ ID NO: 19702 - DNA, 20 bp, Artificial Sequence
  MKO10019702_A_Gdf1
  gRNA
cgttgggtgatcgcgccgcg

SEQ ID NO: 19703 - DNA, 20 bp, Artificial Sequence
  MKO10019703_A_Gdf1
  gRNA
cgggtacgacaagtgcccac

SEQ ID NO: 19704 - DNA, 20 bp, Artificial Sequence
  MKO10019704_A_Gdf1
  gRNA
ttgggcttcccgaagcgccc

SEQ ID NO: 19705 - DNA, 20 bp, Artificial Sequence
  MKO10019705_A_Gdf2
  gRNA
cgcctgcctccaacatcgtg

SEQ ID NO: 19706 - DNA, 20 bp, Artificial Sequence
  MKO10019706_A_Gdf2
  gRNA
atccttcgtcccgaatgtcc

SEQ ID NO: 19707 - DNA, 20 bp, Artificial Sequence
  MKO10019707_A_Gdf2
  gRNA
gctgaagctccgcacgatgt

SEQ ID NO: 19708 - DNA, 20 bp, Artificial Sequence
  MKO10019708_A_Gdf3
  gRNA
aacctgtgcctcgcgtctta

SEQ ID NO: 19709 - DNA, 20 bp, Artificial Sequence
  MKO10019709_A_Gdf3
  gRNA
cacgtagcataagtcctgcg

SEQ ID NO: 19710 - DNA, 20 bp, Artificial Sequence
  MKO10019710_A_Gdf3
  gRNA
gggatcgcccccacacgccc

SEQ ID NO: 19711 - DNA, 20 bp, Artificial Sequence
  MKO10019711_A_Gdf5
  gRNA
gcccggactgtaaccccaaa

SEQ ID NO: 19712 - DNA, 20 bp, Artificial Sequence
  MKO10019712_A_Gdf5
  gRNA
gggcccggcgtttccgccgc

SEQ ID NO: 19713 - DNA, 20 bp, Artificial Sequence
  MKO10019713_A_Gdf5
  gRNA
ttgggcaacccgcccgctac

SEQ ID NO: 19714 - DNA, 20 bp, Artificial Sequence
  MKO10019714_A_Gdf6
  gRNA
tagcatcctgtacatcgacg

SEQ ID NO: 19715 - DNA, 20 bp, Artificial Sequence
  MKO10019715_A_Gdf6
  gRNA
cgaaggcggtgcgtcgccgc

SEQ ID NO: 19716 - DNA, 20 bp, Artificial Sequence
  MKO10019716_A_Gdf6
  gRNA
tgcggcagaaggacctccgg

SEQ ID NO: 19717 - DNA, 20 bp, Artificial Sequence
  MKO10019717_A_Gdf7
  gRNA
agcgcttgccgtccccgcga

SEQ ID NO: 19718 - DNA, 20 bp, Artificial Sequence
  MKO10019718_A_Gdf7
  gRNA
agcgttcgacgtgacggacg

SEQ ID NO: 19719 - DNA, 20 bp, Artificial Sequence
  MKO10019719_A_Gdf7
  gRNA
agaggctggatacgtcgaac

SEQ ID NO: 19720 - DNA, 20 bp, Artificial Sequence
  MKO10019720_A_Gdf9
  gRNA
taccgatgcctgaccgccct

SEQ ID NO: 19721 - DNA, 20 bp, Artificial Sequence
  MKO10019721_A_Gdf9
  gRNA
gtcacctctacaataccgtc

SEQ ID NO: 19722 - DNA, 20 bp, Artificial Sequence
  MKO10019722_A_Gdf9
  gRNA
ctttctgccctcgacggcgc

SEQ ID NO: 19723 - DNA, 20 bp, Artificial Sequence
  MKO10019723_A_Gdi1
  gRNA
atggaccgaaacccctacta

SEQ ID NO: 19724 - DNA, 20 bp, Artificial Sequence
  MKO10019724_A_Gdi1
  gRNA
tacagaagtgactcgatatc

SEQ ID NO: 19725 - DNA, 20 bp, Artificial Sequence
  MKO10019725_A_Gdi1
  gRNA
ccggtagacatcacgcatgc

SEQ ID NO: 19726 - DNA, 20 bp, Artificial Sequence
  MKO10019726_A_Gdi2
  gRNA
tgtttgagaaacgccgtttc

SEQ ID NO: 19727 - DNA, 20 bp, Artificial Sequence
  MKO10019727_A_Gdi2
  gRNA
atggatcagaacccatacta

SEQ ID NO: 19728 - DNA, 20 bp, Artificial Sequence
  MKO10019728_A_Gdi2
  gRNA
tcactgacattatccccgac

SEQ ID NO: 19729 - DNA, 20 bp, Artificial Sequence
  MKO10019729_A_Gdnf
  gRNA
aaacgacaggtcgtcgtcga

SEQ ID NO: 19730 - DNA, 20 bp, Artificial Sequence
  MKO10019730_A_Gdnf
  gRNA
acagtcactggtcagcgcga

SEQ ID NO: 19731 - DNA, 20 bp, Artificial Sequence
  MKO10019731_A_Gdnf
  gRNA
gtctacggagaccggatccg

SEQ ID NO: 19732 - DNA, 20 bp, Artificial Sequence
  MKO10019732_A_Gdpd1
  gRNA
cactttgatgtcgatgttaa

SEQ ID NO: 19733 - DNA, 20 bp, Artificial Sequence
  MKO10019733_A_Gdpd1
  gRNA
cccaccttacctttgcaagc

SEQ ID NO: 19734 - DNA, 20 bp, Artificial Sequence
  MKO10019734_A_Gdpd1
  gRNA
gtcttcagcgcagttaccat

SEQ ID NO: 19735 - DNA, 20 bp, Artificial Sequence
  MKO10019735_A_Gdpd2
  gRNA
acagattcctgttccgccat

SEQ ID NO: 19736 - DNA, 20 bp, Artificial Sequence
  MKO10019736_A_Gdpd2
  gRNA
tatgccactcctgccgccat

SEQ ID NO: 19737 - DNA, 20 bp, Artificial Sequence
  MKO10019737_A_Gdpd2
  gRNA
agacgaccagcaggactatc

SEQ ID NO: 19738 - DNA, 20 bp, Artificial Sequence
  MKO10019738_A_Gdpd3
  gRNA
agaccggcacatgattagtt

SEQ ID NO: 19739 - DNA, 20 bp, Artificial Sequence
  MKO10019739_A_Gdpd3
  gRNA
aagaacctgtcccgccagtc

SEQ ID NO: 19740 - DNA, 20 bp, Artificial Sequence
  MKO10019740_A_Gdpd3
  gRNA
catccttatttaggcctgac

SEQ ID NO: 19741 - DNA, 20 bp, Artificial Sequence
  MKO10019741_A_Gdpd4
  gRNA
gtcaaagccgttgtattcat

SEQ ID NO: 19742 - DNA, 20 bp, Artificial Sequence
  MKO10019742_A_Gdpd4
  gRNA
tgcctacactaccttgcttt

SEQ ID NO: 19743 - DNA, 20 bp, Artificial Sequence
  MKO10019743_A_Gdpd4
  gRNA
agctgcactcagcaccaaaa

SEQ ID NO: 19744 - DNA, 20 bp, Artificial Sequence
  MKO10019744_A_Gdpd5
  gRNA
tgaactcatcgtagtcgttg

SEQ ID NO: 19745 - DNA, 20 bp, Artificial Sequence
  MKO10019745_A_Gdpd5
  gRNA
acgactacgatgagttcaac

SEQ ID NO: 19746 - DNA, 20 bp, Artificial Sequence
  MKO10019746_A_Gdpd5
  gRNA
cgactggtccgtgcccatcc

SEQ ID NO: 19747 - DNA, 20 bp, Artificial Sequence
  MKO10019747_A_Gdpgp1
  gRNA
gctcagctgaatatagagcg

SEQ ID NO: 19748 - DNA, 20 bp, Artificial Sequence
  MKO10019748_A_Gdpgp1
  gRNA
gcagagtcgaaacgggatag

SEQ ID NO: 19749 - DNA, 20 bp, Artificial Sequence
  MKO10019749_A_Gdpgp1
  gRNA
cacggcactaggtgaatccc

SEQ ID NO: 19750 - DNA, 20 bp, Artificial Sequence
  MKO10019750_A_Gemin2
  gRNA
ttcctctgtagacggtccag

SEQ ID NO: 19751 - DNA, 20 bp, Artificial Sequence
  MKO10019751_A_Gemin2
  gRNA
agtaaccttcaggcgcaggc

SEQ ID NO: 19752 - DNA, 20 bp, Artificial Sequence
  MKO10019752_A_Gemin2
  gRNA
acttgtacataatcgatccc

SEQ ID NO: 19753 - DNA, 20 bp, Artificial Sequence
  MKO10019753_A_Gemin4
  gRNA
gctggttaaacgtcgtgttg

SEQ ID NO: 19754 - DNA, 20 bp, Artificial Sequence
  MKO10019754_A_Gemin4
  gRNA
ccagaacccataccatcgac

SEQ ID NO: 19755 - DNA, 20 bp, Artificial Sequence
  MKO10019755_A_Gemin4
  gRNA
tgggaacccacctaggtcca

SEQ ID NO: 19756 - DNA, 20 bp, Artificial Sequence
  MKO10019756_A_Gemin5
  gRNA
tggagtggatctcgtcatcg

SEQ ID NO: 19757 - DNA, 20 bp, Artificial Sequence
  MKO10019757_A_Gemin5
  gRNA
gcatctttggcttcgctgcg

SEQ ID NO: 19758 - DNA, 20 bp, Artificial Sequence
  MKO10019758_A_Gemin5
  gRNA
ctccgtcttcctcgtccgcg

SEQ ID NO: 19759 - DNA, 20 bp, Artificial Sequence
  MKO10019759_A_Gemin6
  gRNA
aactggtaaccatgagcgaa

SEQ ID NO: 19760 - DNA, 20 bp, Artificial Sequence
  MKO10019760_A_Gemin6
  gRNA
tcagcttctcgcgtactctg

SEQ ID NO: 19761 - DNA, 20 bp, Artificial Sequence
  MKO10019761_A_Gemin6
  gRNA
ctgtaaaggatacagccccg

SEQ ID NO: 19762 - DNA, 20 bp, Artificial Sequence
  MKO10019762_A_Gemin7
  gRNA
tatgtcactacatcgaagca

SEQ ID NO: 19763 - DNA, 20 bp, Artificial Sequence
  MKO10019763_A_Gemin7
  gRNA
gtgagtttcacgctgcacga

SEQ ID NO: 19764 - DNA, 20 bp, Artificial Sequence
  MKO10019764_A_Gemin7
  gRNA
gtgcatgtgaccgcccagtt

SEQ ID NO: 19765 - DNA, 20 bp, Artificial Sequence
  MKO10019765_A_Gemin8
  gRNA
ccactctgtaggcctccaac

SEQ ID NO: 19766 - DNA, 20 bp, Artificial Sequence
  MKO10019766_A_Gemin8
  gRNA
gttctactgctattacgcag

SEQ ID NO: 19767 - DNA, 20 bp, Artificial Sequence
  MKO10019767_A_Gemin8
  gRNA
cccagggcgacagcagcagc

SEQ ID NO: 19768 - DNA, 20 bp, Artificial Sequence
  MKO10019768_A_Gem
  gRNA
agtcggacgaccagctccgc

SEQ ID NO: 19769 - DNA, 20 bp, Artificial Sequence
  MKO10019769_A_Gem
  gRNA
tgcgacaggtgcgcctgcgc

SEQ ID NO: 19770 - DNA, 20 bp, Artificial Sequence
  MKO10019770_A_Gem
  gRNA
agatacatatgagcgtaccc

SEQ ID NO: 19771 - DNA, 20 bp, Artificial Sequence
  MKO10019771_A_Gen1
  gRNA
aaggaaagcatcgccgtcgt

SEQ ID NO: 19772 - DNA, 20 bp, Artificial Sequence
  MKO10019772_A_Gen1
  gRNA
ttggatcgagacgctctggt

SEQ ID NO: 19773 - DNA, 20 bp, Artificial Sequence
  MKO10019773_A_Gen1
  gRNA
cagactcgttacgggccttc

SEQ ID NO: 19774 - DNA, 20 bp, Artificial Sequence
  MKO10019774_A_Get4
  gRNA
cgagggctgcgccaacatgc

SEQ ID NO: 19775 - DNA, 20 bp, Artificial Sequence
  MKO10019775_A_Get4
  gRNA
cgaatccctggaaaaggccg

SEQ ID NO: 19776 - DNA, 20 bp, Artificial Sequence
  MKO10019776_A_Get4
  gRNA
tgcccgaggcttccgaagtg

SEQ ID NO: 19777 - DNA, 20 bp, Artificial Sequence
  MKO10019777_A_Gfap
  gRNA
cctcggtcctagtcgacaac

SEQ ID NO: 19778 - DNA, 20 bp, Artificial Sequence
  MKO10019778_A_Gfap
  gRNA
agagattcgcactcaatacg

SEQ ID NO: 19779 - DNA, 20 bp, Artificial Sequence
  MKO10019779_A_Gfap
  gRNA
ctggccggggcgctcaatgc

SEQ ID NO: 19780 - DNA, 20 bp, Artificial Sequence
  MKO10019780_A_Gfer
  gRNA
cgtgggcctgtccgggtaat

SEQ ID NO: 19781 - DNA, 20 bp, Artificial Sequence
  MKO10019781_A_Gfer
  gRNA
cgcgtcagtcaccaggtcgt

SEQ ID NO: 19782 - DNA, 20 bp, Artificial Sequence
  MKO10019782_A_Gfer
  gRNA
gctcgagagtagatgagcgt

SEQ ID NO: 19783 - DNA, 20 bp, Artificial Sequence
  MKO10019783_A_Gfi1b
  gRNA
ttccgcctccgctactctcc

SEQ ID NO: 19784 - DNA, 20 bp, Artificial Sequence
  MKO10019784_A_Gfi1b
  gRNA
caccatgcagtccgccttcc

SEQ ID NO: 19785 - DNA, 20 bp, Artificial Sequence
  MKO10019785_A_Gfi1b
  gRNA
gcatactcacgtccactcac

SEQ ID NO: 19786 - DNA, 20 bp, Artificial Sequence
  MKO10019786_A_Gfi1
  gRNA
ctatcggcagtgcagcgcgc

SEQ ID NO: 19787 - DNA, 20 bp, Artificial Sequence
  MKO10019787_A_Gfi1
  gRNA
cttcgggcacgcggtgagcc

SEQ ID NO: 19788 - DNA, 20 bp, Artificial Sequence
  MKO10019788_A_Gfi1
  gRNA
ctacggcgacttcgcgcctg

SEQ ID NO: 19789 - DNA, 20 bp, Artificial Sequence
  MKO10019789_A_Gfm1
  gRNA
ctgattggaagacccgccga

SEQ ID NO: 19790 - DNA, 20 bp, Artificial Sequence
  MKO10019790_A_Gfm1
  gRNA
cgtggactttaccatagaag

SEQ ID NO: 19791 - DNA, 20 bp, Artificial Sequence
  MKO10019791_A_Gfm1
  gRNA
caggattgccacgatgcacg

SEQ ID NO: 19792 - DNA, 20 bp, Artificial Sequence
  MKO10019792_A_Gfm2
  gRNA
ttgaacagaattcgtaatat

SEQ ID NO: 19793 - DNA, 20 bp, Artificial Sequence
  MKO10019793_A_Gfm2
  gRNA
ggaccacgatgttcaccaaa

SEQ ID NO: 19794 - DNA, 20 bp, Artificial Sequence
  MKO10019794_A_Gfm2
  gRNA
ttccgtcattaaccctcctg

SEQ ID NO: 19795 - DNA, 20 bp, Artificial Sequence
  MKO10019795_A_Gfod1
  gRNA
tgaccgtaccgccacgccgc

SEQ ID NO: 19796 - DNA, 20 bp, Artificial Sequence
  MKO10019796_A_Gfod1
  gRNA
ctacaccagccgcatcgacg

SEQ ID NO: 19797 - DNA, 20 bp, Artificial Sequence
  MKO10019797_A_Gfod1
  gRNA
cgctattgcgctgtccatag

SEQ ID NO: 19798 - DNA, 20 bp, Artificial Sequence
  MKO10019798_A_Gfod2
  gRNA
ggcagggggatcgccgtacc

SEQ ID NO: 19799 - DNA, 20 bp, Artificial Sequence
  MKO10019799_A_Gfod2
  gRNA
gagctgtttcatgcgcacga

SEQ ID NO: 19800 - DNA, 20 bp, Artificial Sequence
  MKO10019800_A_Gfod2
  gRNA
gctgcatcaagacgtagacc

SEQ ID NO: 19801 - DNA, 20 bp, Artificial Sequence
  MKO10019801_A_Gfpt1
  gRNA
catacccgttgggcgacaca

SEQ ID NO: 19802 - DNA, 20 bp, Artificial Sequence
  MKO10019802_A_Gfpt1
  gRNA
ttctccatgtgtcgcccaac

SEQ ID NO: 19803 - DNA, 20 bp, Artificial Sequence
  MKO10019803_A_Gfpt1
  gRNA
tcgaacaagacgagaaatct

SEQ ID NO: 19804 - DNA, 20 bp, Artificial Sequence
  MKO10019804_A_Gfpt2
  gRNA
caacagtcacccgcagcgtt

SEQ ID NO: 19805 - DNA, 20 bp, Artificial Sequence
  MKO10019805_A_Gfpt2
  gRNA
ttgtctttgtccgaacgctg

SEQ ID NO: 19806 - DNA, 20 bp, Artificial Sequence
  MKO10019806_A_Gfpt2
  gRNA
tcactaattacaaggatcta

SEQ ID NO: 19807 - DNA, 20 bp, Artificial Sequence
  MKO10019807_A_Gfra1
  gRNA
catatgagccggttaacagc

SEQ ID NO: 19808 - DNA, 20 bp, Artificial Sequence
  MKO10019808_A_Gfra1
  gRNA
gcggcggttgcagacttcat

SEQ ID NO: 19809 - DNA, 20 bp, Artificial Sequence
  MKO10019809_A_Gfra1
  gRNA
gatagtctgtcgccgcctct

SEQ ID NO: 19810 - DNA, 20 bp, Artificial Sequence
  MKO10019810_A_Gfra2
  gRNA
ctgccgaagggtgcggtacc

SEQ ID NO: 19811 - DNA, 20 bp, Artificial Sequence
  MKO10019811_A_Gfra2
  gRNA
ccgggatcgcaataccatgc

SEQ ID NO: 19812 - DNA, 20 bp, Artificial Sequence
  MKO10019812_A_Gfra2
  gRNA
aggcatgcgccgagcgtcgc

SEQ ID NO: 19813 - DNA, 20 bp, Artificial Sequence
  MKO10019813_A_Gfra3
  gRNA
cttggtgcttcatgcgccga

SEQ ID NO: 19814 - DNA, 20 bp, Artificial Sequence
  MKO10019814_A_Gfra3
  gRNA
caagtgtgaccgcctgcgca

SEQ ID NO: 19815 - DNA, 20 bp, Artificial Sequence
  MKO10019815_A_Gfra3
  gRNA
ctctctaggtgactacgagt

SEQ ID NO: 19816 - DNA, 20 bp, Artificial Sequence
  MKO10019816_A_Gfra4
  gRNA
gtccacgcagcgattcccgt

SEQ ID NO: 19817 - DNA, 20 bp, Artificial Sequence
  MKO10019817_A_Gfra4
  gRNA
gcgtagacgcgcagacaacg

SEQ ID NO: 19818 - DNA, 20 bp, Artificial Sequence
  MKO10019818_A_Gfra4
  gRNA
cgttgtctgcgcgtctacgc

SEQ ID NO: 19819 - DNA, 20 bp, Artificial Sequence
  MKO10019819_A_Gfral
  gRNA
gccgaaatgatgaattatgc

SEQ ID NO: 19820 - DNA, 20 bp, Artificial Sequence
  MKO10019820_A_Gfral
  gRNA
caaacagatgcagtcttgtt

SEQ ID NO: 19821 - DNA, 20 bp, Artificial Sequence
  MKO10019821_A_Gfral
  gRNA
acattgtaacctgagtatcc

SEQ ID NO: 19822 - DNA, 20 bp, Artificial Sequence
  MKO10019822_A_Gfy
  gRNA
gcgcggtcctcagaagaagt

SEQ ID NO: 19823 - DNA, 20 bp, Artificial Sequence
  MKO10019823_A_Gfy
  gRNA
acttctacgcccccgatgcg

SEQ ID NO: 19824 - DNA, 20 bp, Artificial Sequence
  MKO10019824_A_Gfy
  gRNA
agccgcccacgaggctccgt

SEQ ID NO: 19825 - DNA, 20 bp, Artificial Sequence
  MKO10019825_A_Gga1
  gRNA
caaccttgatgagctcgttg

SEQ ID NO: 19826 - DNA, 20 bp, Artificial Sequence
  MKO10019826_A_Gga1
  gRNA
tccacttgccactcgcttgc

SEQ ID NO: 19827 - DNA, 20 bp, Artificial Sequence
  MKO10019827_A_Gga1
  gRNA
ctcgcagaaactgttgatgc

SEQ ID NO: 19828 - DNA, 20 bp, Artificial Sequence
  MKO10019828_A_Gga2
  gRNA
aactcaccgtcagggcataa

SEQ ID NO: 19829 - DNA, 20 bp, Artificial Sequence
  MKO10019829_A_Gga2
  gRNA
tactttagtacctaggggcc

SEQ ID NO: 19830 - DNA, 20 bp, Artificial Sequence
  MKO10019830_A_Gga2
  gRNA
tcagcccgacacatgcaccc

SEQ ID NO: 19831 - DNA, 20 bp, Artificial Sequence
  MKO10019831_A_Gga3
  gRNA
cggctgcaatatggcggagg

SEQ ID NO: 19832 - DNA, 20 bp, Artificial Sequence
  MKO10019832_A_Gga3
  gRNA
aatcaaagtcgtctctccaa

SEQ ID NO: 19833 - DNA, 20 bp, Artificial Sequence
  MKO10019833_A_Gga3
  gRNA
taccaatccttccaaccgcc

SEQ ID NO: 19834 - DNA, 20 bp, Artificial Sequence
  MKO10019834_A_Ggact
  gRNA
cagccacctatgcacccgag

SEQ ID NO: 19835 - DNA, 20 bp, Artificial Sequence
  MKO10019835_A_Ggact
  gRNA
atgggctacgctacaacccc

SEQ ID NO: 19836 - DNA, 20 bp, Artificial Sequence
  MKO10019836_A_Ggact
  gRNA
gggttgtagcgtagcccatg

SEQ ID NO: 19837 - DNA, 20 bp, Artificial Sequence
  MKO10019837_A_Ggct
  gRNA
catggcgagctccgactgtg

SEQ ID NO: 19838 - DNA, 20 bp, Artificial Sequence
  MKO10019838_A_Ggct
  gRNA
cgctctcgtagttcgtcatc

SEQ ID NO: 19839 - DNA, 20 bp, Artificial Sequence
  MKO10019839_A_Ggct
  gRNA
tgctgccgtaggcgaagtac

SEQ ID NO: 19840 - DNA, 20 bp, Artificial Sequence
  MKO10019840_A_Ggcx
  gRNA
acacgtaccagtacggtagc

SEQ ID NO: 19841 - DNA, 20 bp, Artificial Sequence
  MKO10019841_A_Ggcx
  gRNA
gggagctaaggccgcgttcc

SEQ ID NO: 19842 - DNA, 20 bp, Artificial Sequence
  MKO10019842_A_Ggcx
  gRNA
tgttattcctgctaccgtac

SEQ ID NO: 19843 - DNA, 20 bp, Artificial Sequence
  MKO10019843_A_Ggh
  gRNA
gtaagttctctccactaacc

SEQ ID NO: 19844 - DNA, 20 bp, Artificial Sequence
  MKO10019844_A_Ggh
  gRNA
gggaataacctgaatctgtt

SEQ ID NO: 19845 - DNA, 20 bp, Artificial Sequence
  MKO10019845_A_Ggh
  gRNA
atactctgcatcactaagat

SEQ ID NO: 19846 - DNA, 20 bp, Artificial Sequence
  MKO10019846_A_Ggnbp1
  gRNA
gggacagctctcgtcgctag

SEQ ID NO: 19847 - DNA, 20 bp, Artificial Sequence
  MKO10019847_A_Ggnbp1
  gRNA
ggtggaccccaccttgcaag

SEQ ID NO: 19848 - DNA, 20 bp, Artificial Sequence
  MKO10019848_A_Ggnbp1
  gRNA
ctggaaggtgggcaaccccg

SEQ ID NO: 19849 - DNA, 20 bp, Artificial Sequence
  MKO10019849_A_Ggnbp2
  gRNA
ttcgcgtgatgttaccacca

SEQ ID NO: 19850 - DNA, 20 bp, Artificial Sequence
  MKO10019850_A_Ggnbp2
  gRNA
cttcgacgacaaccaacaca

SEQ ID NO: 19851 - DNA, 20 bp, Artificial Sequence
  MKO10019851_A_Ggnbp2
  gRNA
aaacatatcttcgaaagcac

SEQ ID NO: 19852 - DNA, 20 bp, Artificial Sequence
  MKO10019852_A_Ggn
  gRNA
gccgacggtgacgacgttga

SEQ ID NO: 19853 - DNA, 20 bp, Artificial Sequence
  MKO10019853_A_Ggn
  gRNA
aacccaagactcgtacacgc

SEQ ID NO: 19854 - DNA, 20 bp, Artificial Sequence
  MKO10019854_A_Ggn
  gRNA
cctgcaagtcgtagtgctcc

SEQ ID NO: 19855 - DNA, 20 bp, Artificial Sequence
  MKO10019855_A_Ggps1
  gRNA
aaagtattgtgtgcagtacc

SEQ ID NO: 19856 - DNA, 20 bp, Artificial Sequence
  MKO10019856_A_Ggps1
  gRNA
gtgaaaagcttcaccgcatc

SEQ ID NO: 19857 - DNA, 20 bp, Artificial Sequence
  MKO10019857_A_Ggps1
  gRNA
ggtgagaagcaaactttcac

SEQ ID NO: 19858 - DNA, 20 bp, Artificial Sequence
  MKO10019858_A_Ggt1
  gRNA
aacgacacggccggctcccc

SEQ ID NO: 19859 - DNA, 20 bp, Artificial Sequence
  MKO10019859_A_Ggt1
  gRNA
cgcccccgatgcccatactg

SEQ ID NO: 19860 - DNA, 20 bp, Artificial Sequence
  MKO10019860_A_Ggt1
  gRNA
tgcttgtagggatatcctac

SEQ ID NO: 19861 - DNA, 20 bp, Artificial Sequence
  MKO10019861_A_Ggt5
  gRNA
ggagctccgcggctatgctg

SEQ ID NO: 19862 - DNA, 20 bp, Artificial Sequence
  MKO10019862_A_Ggt5
  gRNA
gtgtaaaaacgtcctgccat

SEQ ID NO: 19863 - DNA, 20 bp, Artificial Sequence
  MKO10019863_A_Ggt5
  gRNA
caccattgcactgctccgag

SEQ ID NO: 19864 - DNA, 20 bp, Artificial Sequence
  MKO10019864_A_Ggt6
  gRNA
ggggtcctgttcacgactcc

SEQ ID NO: 19865 - DNA, 20 bp, Artificial Sequence
  MKO10019865_A_Ggt6
  gRNA
gccaagagttgcttgtcgct

SEQ ID NO: 19866 - DNA, 20 bp, Artificial Sequence
  MKO10019866_A_Ggt6
  gRNA
actcatccttcgtgacaacc

SEQ ID NO: 19867 - DNA, 20 bp, Artificial Sequence
  MKO10019867_A_Ggt7
  gRNA
gcggctgccttcgtcgtcat

SEQ ID NO: 19868 - DNA, 20 bp, Artificial Sequence
  MKO10019868_A_Ggt7
  gRNA
tccttgcgagtctcccgtaa

SEQ ID NO: 19869 - DNA, 20 bp, Artificial Sequence
  MKO10019869_A_Ggt7
  gRNA
catgcccagcgccgtgcaac

SEQ ID NO: 19870 - DNA, 20 bp, Artificial Sequence
  MKO10019870_A_Ggta1
  gRNA
gatgctgattgtctcaaccg

SEQ ID NO: 19871 - DNA, 20 bp, Artificial Sequence
  MKO10019871_A_Ggta1
  gRNA
ttcccaaaacacgacaacca

SEQ ID NO: 19872 - DNA, 20 bp, Artificial Sequence
  MKO10019872_A_Ggta1
  gRNA
ttgaaccagtcccatagctg

SEQ ID NO: 19873 - DNA, 20 bp, Artificial Sequence
  MKO10019873_A_Ghdc
  gRNA
ctgggccgggtaagccccga

SEQ ID NO: 19874 - DNA, 20 bp, Artificial Sequence
  MKO10019874_A_Ghdc
  gRNA
ccgctccttaggtgccgcct

SEQ ID NO: 19875 - DNA, 20 bp, Artificial Sequence
  MKO10019875_A_Ghdc
  gRNA
gtgtgacccctacatcgcca

SEQ ID NO: 19876 - DNA, 20 bp, Artificial Sequence
  MKO10019876_A_Ghitm
  gRNA
tgtgcttgcagtcgatcaaa

SEQ ID NO: 19877 - DNA, 20 bp, Artificial Sequence
  MKO10019877_A_Ghitm
  gRNA
cttggagcgctctgctacta

SEQ ID NO: 19878 - DNA, 20 bp, Artificial Sequence
  MKO10019878_A_Ghitm
  gRNA
ctcatgaacttcatgatgac

SEQ ID NO: 19879 - DNA, 20 bp, Artificial Sequence
  MKO10019879_A_Ghrhr
  gRNA
agccacgcagagggctacaa

SEQ ID NO: 19880 - DNA, 20 bp, Artificial Sequence
  MKO10019880_A_Ghrhr
  gRNA
ctccattgtagccctctgcg

SEQ ID NO: 19881 - DNA, 20 bp, Artificial Sequence
  MKO10019881_A_Ghrhr
  gRNA
ccgaagtgagagaagaattc

SEQ ID NO: 19882 - DNA, 20 bp, Artificial Sequence
  MKO10019882_A_Ghrh
  gRNA
ggggctcaagcgtccgctga

SEQ ID NO: 19883 - DNA, 20 bp, Artificial Sequence
  MKO10019883_A_Ghrh
  gRNA
tcactttccgggcatacagc

SEQ ID NO: 19884 - DNA, 20 bp, Artificial Sequence
  MKO10019884_A_Ghrh
  gRNA
aagggccaggctcagccgcc

SEQ ID NO: 19885 - DNA, 20 bp, Artificial Sequence
  MKO10019885_A_Ghrl
  gRNA
taaactgcagccacgagctc

SEQ ID NO: 19886 - DNA, 20 bp, Artificial Sequence
  MKO10019886_A_Ghrl
  gRNA
ttcaatgctcccttcgatgt

SEQ ID NO: 19887 - DNA, 20 bp, Artificial Sequence
  MKO10019887_A_Ghrl
  gRNA
cagcttgatgccaacatcga

SEQ ID NO: 19888 - DNA, 20 bp, Artificial Sequence
  MKO10019888_A_Ghr
  gRNA
gaacgacacttggtgaatcg

SEQ ID NO: 19889 - DNA, 20 bp, Artificial Sequence
  MKO10019889_A_Ghr
  gRNA
tagtacagctgaatagatcc

SEQ ID NO: 19890 - DNA, 20 bp, Artificial Sequence
  MKO10019890_A_Ghr
  gRNA
ctaaccttgcagcttgtcgt

SEQ ID NO: 19891 - DNA, 20 bp, Artificial Sequence
  MKO10019891_A_Ghsr
  gRNA
gccggagcctaacgtcacgc

SEQ ID NO: 19892 - DNA, 20 bp, Artificial Sequence
  MKO10019892_A_Ghsr
  gRNA
tcgtccgcctctggcagtat

SEQ ID NO: 19893 - DNA, 20 bp, Artificial Sequence
  MKO10019893_A_Ghsr
  gRNA
gatcagtcagtactgcaacc

SEQ ID NO: 19894 - DNA, 20 bp, Artificial Sequence
  MKO10019894_A_Gh
  gRNA
cgcgtcgtcgctgcgcatgt

SEQ ID NO: 19895 - DNA, 20 bp, Artificial Sequence
  MKO10019895_A_Gh
  gRNA
catgaagtgtcgccgctttg

SEQ ID NO: 19896 - DNA, 20 bp, Artificial Sequence
  MKO10019896_A_Gh
  gRNA
ggagcgtgcctacattcccg

SEQ ID NO: 19897 - DNA, 20 bp, Artificial Sequence
  MKO10019897_A_Gid4
  gRNA
tcccacttccgagttaagaa

SEQ ID NO: 19898 - DNA, 20 bp, Artificial Sequence
  MKO10019898_A_Gid4
  gRNA
cttaccattctgagctccga

SEQ ID NO: 19899 - DNA, 20 bp, Artificial Sequence
  MKO10019899_A_Gid4
  gRNA
actaccatcggagctcagaa

SEQ ID NO: 19900 - DNA, 20 bp, Artificial Sequence
  MKO10019900_A_Gid8
  gRNA
ggtatggagtgaagttaacc

SEQ ID NO: 19901 - DNA, 20 bp, Artificial Sequence
  MKO10019901_A_Gid8
  gRNA
tcgagagtccacacccaagc

SEQ ID NO: 19902 - DNA, 20 bp, Artificial Sequence
  MKO10019902_A_Gid8
  gRNA
ctaggtagttcatgatgagt

SEQ ID NO: 19903 - DNA, 20 bp, Artificial Sequence
  MKO10019903_A_Gif
  gRNA
cttagcgaagcgcactgcga

SEQ ID NO: 19904 - DNA, 20 bp, Artificial Sequence
  MKO10019904_A_Gif
  gRNA
agtgcgaggatcgccaaacc

SEQ ID NO: 19905 - DNA, 20 bp, Artificial Sequence
  MKO10019905_A_Gif
  gRNA
agttctccatgagcgcttgt

SEQ ID NO: 19906 - DNA, 20 bp, Artificial Sequence
  MKO10019906_A_Gigyf1
  gRNA
agattaccgctatgggcgag

SEQ ID NO: 19907 - DNA, 20 bp, Artificial Sequence
  MKO10019907_A_Gigyf1
  gRNA
ctcccgaggattccttccga

SEQ ID NO: 19908 - DNA, 20 bp, Artificial Sequence
  MKO10019908_A_Gigyf1
  gRNA
ccacgctgccaccactcgaa

SEQ ID NO: 19909 - DNA, 20 bp, Artificial Sequence
  MKO10019909_A_Gigyf2
  gRNA
gccgctgtcctgcgattgac

SEQ ID NO: 19910 - DNA, 20 bp, Artificial Sequence
  MKO10019910_A_Gigyf2
  gRNA
ctcctcgtcctgtcaatcgc

SEQ ID NO: 19911 - DNA, 20 bp, Artificial Sequence
  MKO10019911_A_Gigyf2
  gRNA
aaattagcagattatcgata

SEQ ID NO: 19912 - DNA, 20 bp, Artificial Sequence
  MKO10019912_A_Gimap1
  gRNA
cccgaataaccgcttcaccg

SEQ ID NO: 19913 - DNA, 20 bp, Artificial Sequence
  MKO10019913_A_Gimap1
  gRNA
ggtgatggcgcgcactgtcg

SEQ ID NO: 19914 - DNA, 20 bp, Artificial Sequence
  MKO10019914_A_Gimap1
  gRNA
agagatgaggaagacgccta

SEQ ID NO: 19915 - DNA, 20 bp, Artificial Sequence
  MKO10019915_A_Gimap3
  gRNA
cctccccataggcaaaaagt

SEQ ID NO: 19916 - DNA, 20 bp, Artificial Sequence
  MKO10019916_A_Gimap3
  gRNA
caaccgcagcctgcgcagcc

SEQ ID NO: 19917 - DNA, 20 bp, Artificial Sequence
  MKO10019917_A_Gimap3
  gRNA
acacttcagaatgttgtaac

SEQ ID NO: 19918 - DNA, 20 bp, Artificial Sequence
  MKO10019918_A_Gimap4
  gRNA
tgaacaaacagtagcgattc

SEQ ID NO: 19919 - DNA, 20 bp, Artificial Sequence
  MKO10019919_A_Gimap4
  gRNA
tgaaccccgcaccaccgcac

SEQ ID NO: 19920 - DNA, 20 bp, Artificial Sequence
  MKO10019920_A_Gimap4
  gRNA
gctacaatggaagtccagtg

SEQ ID NO: 19921 - DNA, 20 bp, Artificial Sequence
  MKO10019921_A_Gimap5
  gRNA
tttgcacagtcaagtcctgc

SEQ ID NO: 19922 - DNA, 20 bp, Artificial Sequence
  MKO10019922_A_Gimap5
  gRNA
tcattaacttgtgtattagc

SEQ ID NO: 19923 - DNA, 20 bp, Artificial Sequence
  MKO10019923_A_Gimap5
  gRNA
ttccatatgtgctcttctga

SEQ ID NO: 19924 - DNA, 20 bp, Artificial Sequence
  MKO10019924_A_Gimap6
  gRNA
ggtaggccggtacactgccg

SEQ ID NO: 19925 - DNA, 20 bp, Artificial Sequence
  MKO10019925_A_Gimap6
  gRNA
cactggtcgagcgctgattt

SEQ ID NO: 19926 - DNA, 20 bp, Artificial Sequence
  MKO10019926_A_Gimap6
  gRNA
ttctatagaacatgagccga

SEQ ID NO: 19927 - DNA, 20 bp, Artificial Sequence
  MKO10019927_A_Gimap7
  gRNA
tcgctccgcgtccttgtata

SEQ ID NO: 19928 - DNA, 20 bp, Artificial Sequence
  MKO10019928_A_Gimap7
  gRNA
cttcgacaccaaggtaaaac

SEQ ID NO: 19929 - DNA, 20 bp, Artificial Sequence
  MKO10019929_A_Gimap7
  gRNA
tctgcaactgaaccgcttca

SEQ ID NO: 19930 - DNA, 20 bp, Artificial Sequence
  MKO10019930_A_Gimap8
  gRNA
ccatcattcatccagacgcc

SEQ ID NO: 19931 - DNA, 20 bp, Artificial Sequence
  MKO10019931_A_Gimap8
  gRNA
caacaccacgcttccccatc

SEQ ID NO: 19932 - DNA, 20 bp, Artificial Sequence
  MKO10019932_A_Gimap8
  gRNA
gatacgcaatcttcaactac

SEQ ID NO: 19933 - DNA, 20 bp, Artificial Sequence
  MKO10019933_A_Gimap9
  gRNA
cttgttgtagtcgacactcc

SEQ ID NO: 19934 - DNA, 20 bp, Artificial Sequence
  MKO10019934_A_Gimap9
  gRNA
aatcaaattgacgtctcccg

SEQ ID NO: 19935 - DNA, 20 bp, Artificial Sequence
  MKO10019935_A_Gimap9
  gRNA
ccaagtaacgcttcccacac

SEQ ID NO: 19936 - DNA, 20 bp, Artificial Sequence
  MKO10019936_A_Gin1
  gRNA
tctaatcgcagctacgattc

SEQ ID NO: 19937 - DNA, 20 bp, Artificial Sequence
  MKO10019937_A_Gin1
  gRNA
aatcgtagctgcgattagag

SEQ ID NO: 19938 - DNA, 20 bp, Artificial Sequence
  MKO10019938_A_Gin1
  gRNA
tacccactgcttgacgtcat

SEQ ID NO: 19939 - DNA, 20 bp, Artificial Sequence
  MKO10019939_A_Ginm1
  gRNA
tgaggatcttagttctcgag

SEQ ID NO: 19940 - DNA, 20 bp, Artificial Sequence
  MKO10019940_A_Ginm1
  gRNA
cttaacataacctatgagcg

SEQ ID NO: 19941 - DNA, 20 bp, Artificial Sequence
  MKO10019941_A_Ginm1
  gRNA
atatacctgtccacgctcat

SEQ ID NO: 19942 - DNA, 20 bp, Artificial Sequence
  MKO10019942_A_Gins1
  gRNA
ctaggtatgaccggttgctt

SEQ ID NO: 19943 - DNA, 20 bp, Artificial Sequence
  MKO10019943_A_Gins1
  gRNA
gtgctctaatccgaagcaac

SEQ ID NO: 19944 - DNA, 20 bp, Artificial Sequence
  MKO10019944_A_Gins1
  gRNA
tgataccaaccgtcaaattt

SEQ ID NO: 19945 - DNA, 20 bp, Artificial Sequence
  MKO10019945_A_Gins2
  gRNA
ctccgagagcacccagtcgc

SEQ ID NO: 19946 - DNA, 20 bp, Artificial Sequence
  MKO10019946_A_Gins2
  gRNA
cttcaaccccggcttacccg

SEQ ID NO: 19947 - DNA, 20 bp, Artificial Sequence
  MKO10019947_A_Gins2
  gRNA
agtgcccagcccgcactaca

SEQ ID NO: 19948 - DNA, 20 bp, Artificial Sequence
  MKO10019948_A_Gins3
  gRNA
cgagacgcccatgccgcgcc

SEQ ID NO: 19949 - DNA, 20 bp, Artificial Sequence
  MKO10019949_A_Gins3
  gRNA
gtccgaggcgtatttcccag

SEQ ID NO: 19950 - DNA, 20 bp, Artificial Sequence
  MKO10019950_A_Gins3
  gRNA
tctccggactgtcaaaatgc

SEQ ID NO: 19951 - DNA, 20 bp, Artificial Sequence
  MKO10019951_A_Gins4
  gRNA
tgagattgtcgaatgcgtca

SEQ ID NO: 19952 - DNA, 20 bp, Artificial Sequence
  MKO10019952_A_Gins4
  gRNA
tcctctccatctccatgcga

SEQ ID NO: 19953 - DNA, 20 bp, Artificial Sequence
  MKO10019953_A_Gins4
  gRNA
gaaggtcagcatccatcgca

SEQ ID NO: 19954 - DNA, 20 bp, Artificial Sequence
  MKO10019954_A_Gipc1
  gRNA
ggaccctccgtctccgatcc

SEQ ID NO: 19955 - DNA, 20 bp, Artificial Sequence
  MKO10019955_A_Gipc1
  gRNA
gctgggctgtcggcattacg

SEQ ID NO: 19956 - DNA, 20 bp, Artificial Sequence
  MKO10019956_A_Gipc1
  gRNA
ggccggctacgccttcatta

SEQ ID NO: 19957 - DNA, 20 bp, Artificial Sequence
  MKO10019957_A_Gipc2
  gRNA
accctccgtctgagatcgaa

SEQ ID NO: 19958 - DNA, 20 bp, Artificial Sequence
  MKO10019958_A_Gipc2
  gRNA
gcccacgccgttatccgtga

SEQ ID NO: 19959 - DNA, 20 bp, Artificial Sequence
  MKO10019959_A_Gipc2
  gRNA
ggcctttcgatctcagacgg

SEQ ID NO: 19960 - DNA, 20 bp, Artificial Sequence
  MKO10019960_A_Gipc3
  gRNA
cgctgccgcttccacatcgc

SEQ ID NO: 19961 - DNA, 20 bp, Artificial Sequence
  MKO10019961_A_Gipc3
  gRNA
cagcattatcaaccggattg

SEQ ID NO: 19962 - DNA, 20 bp, Artificial Sequence
  MKO10019962_A_Gipc3
  gRNA
agccggatacgccttcatca

SEQ ID NO: 19963 - DNA, 20 bp, Artificial Sequence
  MKO10019963_A_Gipr
  gRNA
catatcgaaggaaccgttac

SEQ ID NO: 19964 - DNA, 20 bp, Artificial Sequence
  MKO10019964_A_Gipr
  gRNA
gcgctggtacagctcccccg

SEQ ID NO: 19965 - DNA, 20 bp, Artificial Sequence
  MKO10019965_A_Gipr
  gRNA
ccacggtatacatgatctgc

SEQ ID NO: 19966 - DNA, 20 bp, Artificial Sequence
  MKO10019966_A_Gip
  gRNA
gacaacaagacttcgtgaac

SEQ ID NO: 19967 - DNA, 20 bp, Artificial Sequence
  MKO10019967_A_Gip
  gRNA
aaagtcccctctgcgtacct

SEQ ID NO: 19968 - DNA, 20 bp, Artificial Sequence
  MKO10019968_A_Gip
  gRNA
aaacagagctctgccgactc

SEQ ID NO: 19969 - DNA, 20 bp, Artificial Sequence
  MKO10019969_A_Git1
  gRNA
ttctcacctggcatagtcga

SEQ ID NO: 19970 - DNA, 20 bp, Artificial Sequence
  MKO10019970_A_Git1
  gRNA
ctgcactcaagtgtgcgaac

SEQ ID NO: 19971 - DNA, 20 bp, Artificial Sequence
  MKO10019971_A_Git1
  gRNA
cggccactttgcacttgcgc

SEQ ID NO: 19972 - DNA, 20 bp, Artificial Sequence
  MKO10019972_A_Git2
  gRNA
gacgtgtgcgccgactgcaa

SEQ ID NO: 19973 - DNA, 20 bp, Artificial Sequence
  MKO10019973_A_Git2
  gRNA
ccaccgattgccctgccgcg

SEQ ID NO: 19974 - DNA, 20 bp, Artificial Sequence
  MKO10019974_A_Git2
  gRNA
aagcgggcaccatgtcgaag

SEQ ID NO: 19975 - DNA, 20 bp, Artificial Sequence
  MKO10019975_A_Gja10
  gRNA
tcatccgagtcaatatacca

SEQ ID NO: 19976 - DNA, 20 bp, Artificial Sequence
  MKO10019976_A_Gja10
  gRNA
gtgtcgctgctgaggacgtc

SEQ ID NO: 19977 - DNA, 20 bp, Artificial Sequence
  MKO10019977_A_Gja10
  gRNA
aaaatcatgagggcactcga

SEQ ID NO: 19978 - DNA, 20 bp, Artificial Sequence
  MKO10019978_A_Gja1
  gRNA
tcgctgatccacgatagcta

SEQ ID NO: 19979 - DNA, 20 bp, Artificial Sequence
  MKO10019979_A_Gja1
  gRNA
tgcaggtgtagaccgcactc

SEQ ID NO: 19980 - DNA, 20 bp, Artificial Sequence
  MKO10019980_A_Gja1
  gRNA
ctcaaagtggcgcagaccga

SEQ ID NO: 19981 - DNA, 20 bp, Artificial Sequence
  MKO10019981_A_Gja3
  gRNA
ggtcgcgagccaatgcgtac

SEQ ID NO: 19982 - DNA, 20 bp, Artificial Sequence
  MKO10019982_A_Gja3
  gRNA
tacgcattggctcgcgacca

SEQ ID NO: 19983 - DNA, 20 bp, Artificial Sequence
  MKO10019983_A_Gja3
  gRNA
cctccactacgcgatgaccg

SEQ ID NO: 19984 - DNA, 20 bp, Artificial Sequence
  MKO10019984_A_Gja4
  gRNA
accgctcttcccgccgagac

SEQ ID NO: 19985 - DNA, 20 bp, Artificial Sequence
  MKO10019985_A_Gja4
  gRNA
ccaggaacactcgaccgtgg

SEQ ID NO: 19986 - DNA, 20 bp, Artificial Sequence
  MKO10019986_A_Gja4
  gRNA
cctacatgtagagcgggcac

SEQ ID NO: 19987 - DNA, 20 bp, Artificial Sequence
  MKO10019987_A_Gja5
  gRNA
tgacaaacggcgccttagta

SEQ ID NO: 19988 - DNA, 20 bp, Artificial Sequence
  MKO10019988_A_Gja5
  gRNA
aagaagatccgacagcgctt

SEQ ID NO: 19989 - DNA, 20 bp, Artificial Sequence
  MKO10019989_A_Gja5
  gRNA
taaggcgccgtttgtcacta

SEQ ID NO: 19990 - DNA, 20 bp, Artificial Sequence
  MKO10019990_A_Gja6
  gRNA
gcactgctatcgagtcggct

SEQ ID NO: 19991 - DNA, 20 bp, Artificial Sequence
  MKO10019991_A_Gja6
  gRNA
ccgactcgatagcagtgccc

SEQ ID NO: 19992 - DNA, 20 bp, Artificial Sequence
  MKO10019992_A_Gja6
  gRNA
aggaagcagtccacccgacg

SEQ ID NO: 19993 - DNA, 20 bp, Artificial Sequence
  MKO10019993_A_Gja8
  gRNA
cgcggtacaccacgttcgca

SEQ ID NO: 19994 - DNA, 20 bp, Artificial Sequence
  MKO10019994_A_Gja8
  gRNA
cactccatcgctgatgtacg

SEQ ID NO: 19995 - DNA, 20 bp, Artificial Sequence
  MKO10019995_A_Gja8
  gRNA
gcttctcctccatgcgaacg

SEQ ID NO: 19996 - DNA, 20 bp, Artificial Sequence
  MKO10019996_A_Gjb1
  gRNA
ggccgaagcccgagcccttg

SEQ ID NO: 19997 - DNA, 20 bp, Artificial Sequence
  MKO10019997_A_Gjb1
  gRNA
catctgcattatcctcaacg

SEQ ID NO: 19998 - DNA, 20 bp, Artificial Sequence
  MKO10019998_A_Gjb1
  gRNA
acacttgaccagccgcacca

SEQ ID NO: 19999 - DNA, 20 bp, Artificial Sequence
  MKO10019999_A_Gjb2
  gRNA
tccgtatcgaagggtccctg

SEQ ID NO: 20000 - DNA, 20 bp, Artificial Sequence
  MKO10020000_A_Gjb2
  gRNA
cttccgcatcatgatcctcg

SEQ ID NO: 20001 - DNA, 20 bp, Artificial Sequence
  MKO10020001_A_Gjb2
  gRNA
accacagggacccttcgata

SEQ ID NO: 20002 - DNA, 20 bp, Artificial Sequence
  MKO10020002_A_Gjb3
  gRNA
cgtcacgtgtccgtctatgc

SEQ ID NO: 20003 - DNA, 20 bp, Artificial Sequence
  MKO10020003_A_Gjb3
  gRNA
ttgctacatcgctcggccca

SEQ ID NO: 20004 - DNA, 20 bp, Artificial Sequence
  MKO10020004_A_Gjb3
  gRNA
ccgagcgatgtagcaatcca

SEQ ID NO: 20005 - DNA, 20 bp, Artificial Sequence
  MKO10020005_A_Gjb4
  gRNA
aggtcttccgtccccggcgc

SEQ ID NO: 20006 - DNA, 20 bp, Artificial Sequence
  MKO10020006_A_Gjb4
  gRNA
aagctttccggcgccgggga

SEQ ID NO: 20007 - DNA, 20 bp, Artificial Sequence
  MKO10020007_A_Gjb4
  gRNA
cctatcgtgaagagcgagaa

SEQ ID NO: 20008 - DNA, 20 bp, Artificial Sequence
  MKO10020008_A_Gjb5
  gRNA
ggttacctttacccgaatcc

SEQ ID NO: 20009 - DNA, 20 bp, Artificial Sequence
  MKO10020009_A_Gjb5
  gRNA
catgcatgtggcctatcgaa

SEQ ID NO: 20010 - DNA, 20 bp, Artificial Sequence
  MKO10020010_A_Gjb5
  gRNA
gagtccaccccgcttcttgc

SEQ ID NO: 20011 - DNA, 20 bp, Artificial Sequence
  MKO10020011_A_Gjb6
  gRNA
actgcccgaaagtttatacg

SEQ ID NO: 20012 - DNA, 20 bp, Artificial Sequence
  MKO10020012_A_Gjb6
  gRNA
cttgttcacgccaccgatga

SEQ ID NO: 20013 - DNA, 20 bp, Artificial Sequence
  MKO10020013_A_Gjb6
  gRNA
acggcagaaggtgcgcattg

SEQ ID NO: 20014 - DNA, 20 bp, Artificial Sequence
  MKO10020014_A_Gjc1
  gRNA
cgacgacgaattcgagagga

SEQ ID NO: 20015 - DNA, 20 bp, Artificial Sequence
  MKO10020015_A_Gjc1
  gRNA
gcaaaccctatgccatgcgt

SEQ ID NO: 20016 - DNA, 20 bp, Artificial Sequence
  MKO10020016_A_Gjc1
  gRNA
catcctctcgaattcgtcgt

SEQ ID NO: 20017 - DNA, 20 bp, Artificial Sequence
  MKO10020017_A_Gjc2
  gRNA
cgcgacagtccgccgtgcgc

SEQ ID NO: 20018 - DNA, 20 bp, Artificial Sequence
  MKO10020018_A_Gjc2
  gRNA
aaccggcagcgccacgtcgg

SEQ ID NO: 20019 - DNA, 20 bp, Artificial Sequence
  MKO10020019_A_Gjc2
  gRNA
gcgctgcaggcgttgcgcga

SEQ ID NO: 20020 - DNA, 20 bp, Artificial Sequence
  MKO10020020_A_Gjc3
  gRNA
tcatcattgccgaaaacccc

SEQ ID NO: 20021 - DNA, 20 bp, Artificial Sequence
  MKO10020021_A_Gjc3
  gRNA
cacaaccgatgaattgtcag

SEQ ID NO: 20022 - DNA, 20 bp, Artificial Sequence
  MKO10020022_A_Gjc3
  gRNA
tgaatttacctgcacttgat

SEQ ID NO: 20023 - DNA, 20 bp, Artificial Sequence
  MKO10020023_A_Gjd2
  gRNA
ccgccaagcagcgagaacgc

SEQ ID NO: 20024 - DNA, 20 bp, Artificial Sequence
  MKO10020024_A_Gjd2
  gRNA
gttctcgctgcttggcggat

SEQ ID NO: 20025 - DNA, 20 bp, Artificial Sequence
  MKO10020025_A_Gjd2
  gRNA
cagcagcactccactatgat

SEQ ID NO: 20026 - DNA, 20 bp, Artificial Sequence
  MKO10020026_A_Gjd3
  gRNA
ctgctacgatcgcgccttcc

SEQ ID NO: 20027 - DNA, 20 bp, Artificial Sequence
  MKO10020027_A_Gjd3
  gRNA
cttcgccgtcgggctgctgt

SEQ ID NO: 20028 - DNA, 20 bp, Artificial Sequence
  MKO10020028_A_Gjd3
  gRNA
gcagctacagtcgccgctcg

SEQ ID NO: 20029 - DNA, 20 bp, Artificial Sequence
  MKO10020029_A_Gjd4
  gRNA
aaagaggtcgtagcaaacgt

SEQ ID NO: 20030 - DNA, 20 bp, Artificial Sequence
  MKO10020030_A_Gjd4
  gRNA
ctgcagccagcttcgcaccg

SEQ ID NO: 20031 - DNA, 20 bp, Artificial Sequence
  MKO10020031_A_Gjd4
  gRNA
gatggtcacgttacagttta

SEQ ID NO: 20032 - DNA, 20 bp, Artificial Sequence
  MKO10020032_A_Gje1
  gRNA
cacatttactgtgatcacga

SEQ ID NO: 20033 - DNA, 20 bp, Artificial Sequence
  MKO10020033_A_Gje1
  gRNA
gccagaatgcgaacacctcc

SEQ ID NO: 20034 - DNA, 20 bp, Artificial Sequence
  MKO10020034_A_Gje1
  gRNA
aactggccgatcacagttgg

SEQ ID NO: 20035 - DNA, 20 bp, Artificial Sequence
  MKO10020035_A_Gk2
  gRNA
agatttgtctacgatcttga

SEQ ID NO: 20036 - DNA, 20 bp, Artificial Sequence
  MKO10020036_A_Gk2
  gRNA
gctcccagggccgtcgtttc

SEQ ID NO: 20037 - DNA, 20 bp, Artificial Sequence
  MKO10020037_A_Gk2
  gRNA
cacgccgatagctttaatgt

SEQ ID NO: 20038 - DNA, 20 bp, Artificial Sequence
  MKO10020038_A_Gk5
  gRNA
tcaatcttaaggtggcatgc

SEQ ID NO: 20039 - DNA, 20 bp, Artificial Sequence
  MKO10020039_A_Gk5
  gRNA
gaaaatgtttaccctcaacc

SEQ ID NO: 20040 - DNA, 20 bp, Artificial Sequence
  MKO10020040_A_Gk5
  gRNA
atgccaccttaagattgacc

SEQ ID NO: 20041 - DNA, 20 bp, Artificial Sequence
  MKO10020041_A_Gkap1
  gRNA
tcaacagcaacgccttctca

SEQ ID NO: 20042 - DNA, 20 bp, Artificial Sequence
  MKO10020042_A_Gkap1
  gRNA
tcccgtgactccttctgtgc

SEQ ID NO: 20043 - DNA, 20 bp, Artificial Sequence
  MKO10020043_A_Gkap1
  gRNA
gtttgaagctgaccttgaga

SEQ ID NO: 20044 - DNA, 20 bp, Artificial Sequence
  MKO10020044_A_Gkn1
  gRNA
ccttcaggacctcgatacaa

SEQ ID NO: 20045 - DNA, 20 bp, Artificial Sequence
  MKO10020045_A_Gkn1
  gRNA
gtgctttcagatgttcgtcg

SEQ ID NO: 20046 - DNA, 20 bp, Artificial Sequence
  MKO10020046_A_Gkn1
  gRNA
agacttacgtaagcaaaacc

SEQ ID NO: 20047 - DNA, 20 bp, Artificial Sequence
  MKO10020047_A_Gkn2
  gRNA
tgcttgcatagctgtcgaat

SEQ ID NO: 20048 - DNA, 20 bp, Artificial Sequence
  MKO10020048_A_Gkn2
  gRNA
acggttcctctacgagaagc

SEQ ID NO: 20049 - DNA, 20 bp, Artificial Sequence
  MKO10020049_A_Gkn2
  gRNA
tcgactccccagagtatacc

SEQ ID NO: 20050 - DNA, 20 bp, Artificial Sequence
  MKO10020050_A_Gkn3
  gRNA
cactagcgacagttatcctc

SEQ ID NO: 20051 - DNA, 20 bp, Artificial Sequence
  MKO10020051_A_Gkn3
  gRNA
cacctctgagggcatcgaca

SEQ ID NO: 20052 - DNA, 20 bp, Artificial Sequence
  MKO10020052_A_Gkn3
  gRNA
ctcaccgtcagcgccagagc

SEQ ID NO: 20053 - DNA, 20 bp, Artificial Sequence
  MKO10020053_A_Gla
  gRNA
ctaaactcacgtaatttgcg

SEQ ID NO: 20054 - DNA, 20 bp, Artificial Sequence
  MKO10020054_A_Gla
  gRNA
tgtctgcgcatcaatgtcat

SEQ ID NO: 20055 - DNA, 20 bp, Artificial Sequence
  MKO10020055_A_Gla
  gRNA
gatccccaacgctttcctag

SEQ ID NO: 20056 - DNA, 20 bp, Artificial Sequence
  MKO10020056_A_Glb1l2
  gRNA
attcgacttctccgggaacc

SEQ ID NO: 20057 - DNA, 20 bp, Artificial Sequence
  MKO10020057_A_Glb1l2
  gRNA
agacgacatactctaggtcc

SEQ ID NO: 20058 - DNA, 20 bp, Artificial Sequence
  MKO10020058_A_Glb1l2
  gRNA
atggctccaacatcagcgcc

SEQ ID NO: 20059 - DNA, 20 bp, Artificial Sequence
  MKO10020059_A_Glb1l3
  gRNA
tacactacttccgggtgccc

SEQ ID NO: 20060 - DNA, 20 bp, Artificial Sequence
  MKO10020060_A_Glb1l3
  gRNA
gcaaaacccgataggacagt

SEQ ID NO: 20061 - DNA, 20 bp, Artificial Sequence
  MKO10020061_A_Glb1l3
  gRNA
cttacagcaagcatcgttcc

SEQ ID NO: 20062 - DNA, 20 bp, Artificial Sequence
  MKO10020062_A_Glb1l
  gRNA
gcggtactcgaaagtagtgc

SEQ ID NO: 20063 - DNA, 20 bp, Artificial Sequence
  MKO10020063_A_Glb1l
  gRNA
gcactactttcgagtaccgc

SEQ ID NO: 20064 - DNA, 20 bp, Artificial Sequence
  MKO10020064_A_Glb1l
  gRNA
agggtttcgaagcaaccaag

SEQ ID NO: 20065 - DNA, 20 bp, Artificial Sequence
  MKO10020065_A_Glb1
  gRNA
aggaccgatcataaccgtgc

SEQ ID NO: 20066 - DNA, 20 bp, Artificial Sequence
  MKO10020066_A_Glb1
  gRNA
ggtacctgcacggttatgat

SEQ ID NO: 20067 - DNA, 20 bp, Artificial Sequence
  MKO10020067_A_Glb1
  gRNA
gtcttcacaggtacgtgccc

SEQ ID NO: 20068 - DNA, 20 bp, Artificial Sequence
  MKO10020068_A_Glcci1
  gRNA
caaagcagattgccaaactt

SEQ ID NO: 20069 - DNA, 20 bp, Artificial Sequence
  MKO10020069_A_Glcci1
  gRNA
cacatcagcgctctgcatca

SEQ ID NO: 20070 - DNA, 20 bp, Artificial Sequence
  MKO10020070_A_Glcci1
  gRNA
aagtgctgatcaactgaaag

SEQ ID NO: 20071 - DNA, 20 bp, Artificial Sequence
  MKO10020071_A_Glce
  gRNA
atcgatcatagccgtcatac

SEQ ID NO: 20072 - DNA, 20 bp, Artificial Sequence
  MKO10020072_A_Glce
  gRNA
ttccatgccgcgctcgtaca

SEQ ID NO: 20073 - DNA, 20 bp, Artificial Sequence
  MKO10020073_A_Glce
  gRNA
ctattgaagcccccaacaac

SEQ ID NO: 20074 - DNA, 20 bp, Artificial Sequence
  MKO10020074_A_Gldc
  gRNA
ctccagtaagttccgcaaaa

SEQ ID NO: 20075 - DNA, 20 bp, Artificial Sequence
  MKO10020075_A_Gldc
  gRNA
gtacactccgtatcagccag

SEQ ID NO: 20076 - DNA, 20 bp, Artificial Sequence
  MKO10020076_A_Gldc
  gRNA
atcgtctgtgggtgacaacg

SEQ ID NO: 20077 - DNA, 20 bp, Artificial Sequence
  MKO10020077_A_Gldn
  gRNA
cctggtaacccgccggctcc

SEQ ID NO: 20078 - DNA, 20 bp, Artificial Sequence
  MKO10020078_A_Gldn
  gRNA
acctgtcaaaagcacgtcat

SEQ ID NO: 20079 - DNA, 20 bp, Artificial Sequence
  MKO10020079_A_Gldn
  gRNA
gctggtgaactgggtctacc

SEQ ID NO: 20080 - DNA, 20 bp, Artificial Sequence
  MKO10020080_A_Gle1
  gRNA
tgtgcgccaattcgtacatt

SEQ ID NO: 20081 - DNA, 20 bp, Artificial Sequence
  MKO10020081_A_Gle1
  gRNA
aaccttccactttgatcgcc

SEQ ID NO: 20082 - DNA, 20 bp, Artificial Sequence
  MKO10020082_A_Gle1
  gRNA
agccttacctgggttccatt

SEQ ID NO: 20083 - DNA, 20 bp, Artificial Sequence
  MKO10020083_A_Glg1
  gRNA
agtgattatcgcttgatctg

SEQ ID NO: 20084 - DNA, 20 bp, Artificial Sequence
  MKO10020084_A_Glg1
  gRNA
gcctcgatgatccaccaagc

SEQ ID NO: 20085 - DNA, 20 bp, Artificial Sequence
  MKO10020085_A_Glg1
  gRNA
aaaagcgctcccgatcatct

SEQ ID NO: 20086 - DNA, 20 bp, Artificial Sequence
  MKO10020086_A_Gli1
  gRNA
tcgacctgcaaaccgtaatc

SEQ ID NO: 20087 - DNA, 20 bp, Artificial Sequence
  MKO10020087_A_Gli1
  gRNA
gctgggtgaggtccggatta

SEQ ID NO: 20088 - DNA, 20 bp, Artificial Sequence
  MKO10020088_A_Gli1
  gRNA
cccacctggcaggttgcacg

SEQ ID NO: 20089 - DNA, 20 bp, Artificial Sequence
  MKO10020089_A_Gli2
  gRNA
tcgacctacaacgcatgatt

SEQ ID NO: 20090 - DNA, 20 bp, Artificial Sequence
  MKO10020090_A_Gli2
  gRNA
aggtccgaatcatgcgttgt

SEQ ID NO: 20091 - DNA, 20 bp, Artificial Sequence
  MKO10020091_A_Gli2
  gRNA
cccctacgtgaacccccata

SEQ ID NO: 20092 - DNA, 20 bp, Artificial Sequence
  MKO10020092_A_Gli3
  gRNA
atacgtcgggctactagata

SEQ ID NO: 20093 - DNA, 20 bp, Artificial Sequence
  MKO10020093_A_Gli3
  gRNA
cctcgacgtctagtgatgag

SEQ ID NO: 20094 - DNA, 20 bp, Artificial Sequence
  MKO10020094_A_Gli3
  gRNA
gagcggatgtagtccatata

SEQ ID NO: 20095 - DNA, 20 bp, Artificial Sequence
  MKO10020095_A_Glipr1l1
  gRNA
ttcgtatcgttgtttgatac

SEQ ID NO: 20096 - DNA, 20 bp, Artificial Sequence
  MKO10020096_A_Glipr1l1
  gRNA
caagagtctcctctcgtgta

SEQ ID NO: 20097 - DNA, 20 bp, Artificial Sequence
  MKO10020097_A_Glipr1l1
  gRNA
ataggtagtttgggccaaaa

SEQ ID NO: 20098 - DNA, 20 bp, Artificial Sequence
  MKO10020098_A_Glipr1l2
  gRNA
caaaattgccctgcttgata

SEQ ID NO: 20099 - DNA, 20 bp, Artificial Sequence
  MKO10020099_A_Glipr1l2
  gRNA
tcgccaatttcagtaaatac

SEQ ID NO: 20100 - DNA, 20 bp, Artificial Sequence
  MKO10020100_A_Glipr1l2
  gRNA
gtgctgttacttcgtgtgca

SEQ ID NO: 20101 - DNA, 20 bp, Artificial Sequence
  MKO10020101_A_Glipr1
  gRNA
agttaacccacgacgagacc

SEQ ID NO: 20102 - DNA, 20 bp, Artificial Sequence
  MKO10020102_A_Glipr1
  gRNA
cgtgagacctggtctcgtcg

SEQ ID NO: 20103 - DNA, 20 bp, Artificial Sequence
  MKO10020103_A_Glipr1
  gRNA
ccagaggaaattacccaacg

SEQ ID NO: 20104 - DNA, 20 bp, Artificial Sequence
  MKO10020104_A_Glipr2
  gRNA
tgaaggcccacaacgagtac

SEQ ID NO: 20105 - DNA, 20 bp, Artificial Sequence
  MKO10020105_A_Glipr2
  gRNA
agctttgtaagaagctcaac

SEQ ID NO: 20106 - DNA, 20 bp, Artificial Sequence
  MKO10020106_A_Glipr2
  gRNA
gtgcttgagaattctcgtgc

SEQ ID NO: 20107 - DNA, 20 bp, Artificial Sequence
  MKO10020107_A_Glis1
  gRNA
accgcttgggagggcccccc

SEQ ID NO: 20108 - DNA, 20 bp, Artificial Sequence
  MKO10020108_A_Glis1
  gRNA
ctgccgagccccatcgtcca

SEQ ID NO: 20109 - DNA, 20 bp, Artificial Sequence
  MKO10020109_A_Glis1
  gRNA
gcctacctaccgtgtcgagg

SEQ ID NO: 20110 - DNA, 20 bp, Artificial Sequence
  MKO10020110_A_Glis2
  gRNA
aagcgtccgtccaccttctc

SEQ ID NO: 20111 - DNA, 20 bp, Artificial Sequence
  MKO10020111_A_Glis2
  gRNA
acaccatccaaatagcgaag

SEQ ID NO: 20112 - DNA, 20 bp, Artificial Sequence
  MKO10020112_A_Glis2
  gRNA
taacaagagcttctcccgcc

SEQ ID NO: 20113 - DNA, 20 bp, Artificial Sequence
  MKO10020113_A_Glis3
  gRNA
tccgttgatgtaggcgacca

SEQ ID NO: 20114 - DNA, 20 bp, Artificial Sequence
  MKO10020114_A_Glis3
  gRNA
agtttataccgtgcgttgaa

SEQ ID NO: 20115 - DNA, 20 bp, Artificial Sequence
  MKO10020115_A_Glis3
  gRNA
cagtgcaagtccattggaaa

SEQ ID NO: 20116 - DNA, 20 bp, Artificial Sequence
  MKO10020116_A_Glmn
  gRNA
gaactcattgaagagccctc

SEQ ID NO: 20117 - DNA, 20 bp, Artificial Sequence
  MKO10020117_A_Glmn
  gRNA
ccaccccatagacttaatga

SEQ ID NO: 20118 - DNA, 20 bp, Artificial Sequence
  MKO10020118_A_Glmn
  gRNA
gcagaccatcattaagtcta

SEQ ID NO: 20119 - DNA, 20 bp, Artificial Sequence
  MKO10020119_A_Glo1
  gRNA
gtacgcactgcgtgagctca

SEQ ID NO: 20120 - DNA, 20 bp, Artificial Sequence
  MKO10020120_A_Glo1
  gRNA
gcagacgtaccaaatccacg

SEQ ID NO: 20121 - DNA, 20 bp, Artificial Sequence
  MKO10020121_A_Glo1
  gRNA
gctctacttcttagcttatg

SEQ ID NO: 20122 - DNA, 20 bp, Artificial Sequence
  MKO10020122_A_Glod4
  gRNA
ttactaggttctccgccatg

SEQ ID NO: 20123 - DNA, 20 bp, Artificial Sequence
  MKO10020123_A_Glod4
  gRNA
gctgggctacgctgataacc

SEQ ID NO: 20124 - DNA, 20 bp, Artificial Sequence
  MKO10020124_A_Glod4
  gRNA
ttgtagttacctgactgaga

SEQ ID NO: 20125 - DNA, 20 bp, Artificial Sequence
  MKO10020125_A_Glod5
  gRNA
ggaggtgatcgagcgcctaa

SEQ ID NO: 20126 - DNA, 20 bp, Artificial Sequence
  MKO10020126_A_Glod5
  gRNA
atccatctacttccgagatc

SEQ ID NO: 20127 - DNA, 20 bp, Artificial Sequence
  MKO10020127_A_Glod5
  gRNA
ccaaaaatttaacttacacg

SEQ ID NO: 20128 - DNA, 20 bp, Artificial Sequence
  MKO10020128_A_Glp1r
  gRNA
tagactcttcacactccgac

SEQ ID NO: 20129 - DNA, 20 bp, Artificial Sequence
  MKO10020129_A_Glp1r
  gRNA
tgggggcccatccggccagc

SEQ ID NO: 20130 - DNA, 20 bp, Artificial Sequence
  MKO10020130_A_Glp1r
  gRNA
ggaaacgctggcactgccgc

SEQ ID NO: 20131 - DNA, 20 bp, Artificial Sequence
  MKO10020131_A_Glp2r
  gRNA
catttgataagtacgtgtgc

SEQ ID NO: 20132 - DNA, 20 bp, Artificial Sequence
  MKO10020132_A_Glp2r
  gRNA
gacttgctcgagaaaccttc

SEQ ID NO: 20133 - DNA, 20 bp, Artificial Sequence
  MKO10020133_A_Glp2r
  gRNA
cttgcagctgatgtacactg

SEQ ID NO: 20134 - DNA, 20 bp, Artificial Sequence
  MKO10020134_A_Glra1
  gRNA
gcagtggaacgacccccgtc

SEQ ID NO: 20135 - DNA, 20 bp, Artificial Sequence
  MKO10020135_A_Glra1
  gRNA
ggacttctgggtatgacgcc

SEQ ID NO: 20136 - DNA, 20 bp, Artificial Sequence
  MKO10020136_A_Glra1
  gRNA
acttcctggataagctcatg

SEQ ID NO: 20137 - DNA, 20 bp, Artificial Sequence
  MKO10020137_A_Glra2
  gRNA
ccgcaacaacttgttgtcag

SEQ ID NO: 20138 - DNA, 20 bp, Artificial Sequence
  MKO10020138_A_Glra2
  gRNA
cctcaatgttggattcgatt

SEQ ID NO: 20139 - DNA, 20 bp, Artificial Sequence
  MKO10020139_A_Glra2
  gRNA
atattgcaagtaacgtttac

SEQ ID NO: 20140 - DNA, 20 bp, Artificial Sequence
  MKO10020140_A_Glra3
  gRNA
tattcactgtatgcaagacg

SEQ ID NO: 20141 - DNA, 20 bp, Artificial Sequence
  MKO10020141_A_Glra3
  gRNA
ctccattgcagagacgacta

SEQ ID NO: 20142 - DNA, 20 bp, Artificial Sequence
  MKO10020142_A_Glra3
  gRNA
tcaaggtctaatgaatcgtc

SEQ ID NO: 20143 - DNA, 20 bp, Artificial Sequence
  MKO10020143_A_Glra4
  gRNA
catccatgctcgactctatc

SEQ ID NO: 20144 - DNA, 20 bp, Artificial Sequence
  MKO10020144_A_Glra4
  gRNA
aagcttatgggacgaacatc

SEQ ID NO: 20145 - DNA, 20 bp, Artificial Sequence
  MKO10020145_A_Glra4
  gRNA
gcgcagtaacttgttgtctg

SEQ ID NO: 20146 - DNA, 20 bp, Artificial Sequence
  MKO10020146_A_Glrb
  gRNA
tgctggtcagttatgatccc

SEQ ID NO: 20147 - DNA, 20 bp, Artificial Sequence
  MKO10020147_A_Glrb
  gRNA
catcccgaaagataaacaac

SEQ ID NO: 20148 - DNA, 20 bp, Artificial Sequence
  MKO10020148_A_Glrb
  gRNA
atgttgactactacatcaac

SEQ ID NO: 20149 - DNA, 20 bp, Artificial Sequence
  MKO10020149_A_Glrp1
  gRNA
ggccccgtccagcctagagt

SEQ ID NO: 20150 - DNA, 20 bp, Artificial Sequence
  MKO10020150_A_Glrp1
  gRNA
gatgttgctatcatcaaaag

SEQ ID NO: 20151 - DNA, 20 bp, Artificial Sequence
  MKO10020151_A_Glrp1
  gRNA
atttcaaatatcatcatgcc

SEQ ID NO: 20152 - DNA, 20 bp, Artificial Sequence
  MKO10020152_A_Glrx2
  gRNA
gaaacagcacatcgtcgttt

SEQ ID NO: 20153 - DNA, 20 bp, Artificial Sequence
  MKO10020153_A_Glrx2
  gRNA
ggctatgtcctggcgccgcg

SEQ ID NO: 20154 - DNA, 20 bp, Artificial Sequence
  MKO10020154_A_Glrx2
  gRNA
acgatttattggaggcgcag

SEQ ID NO: 20155 - DNA, 20 bp, Artificial Sequence
  MKO10020155_A_Glrx3
  gRNA
gatttacaggtcactccttg

SEQ ID NO: 20156 - DNA, 20 bp, Artificial Sequence
  MKO10020156_A_Glrx3
  gRNA
ttaccacagcgtggttcttg

SEQ ID NO: 20157 - DNA, 20 bp, Artificial Sequence
  MKO10020157_A_Glrx3
  gRNA
tcatccttaccttgaagaac

SEQ ID NO: 20158 - DNA, 20 bp, Artificial Sequence
  MKO10020158_A_Glrx5
  gRNA
gcacggtgttcgcgactatg

SEQ ID NO: 20159 - DNA, 20 bp, Artificial Sequence
  MKO10020159_A_Glrx5
  gRNA
ctacaacgtgctggacgacc

SEQ ID NO: 20160 - DNA, 20 bp, Artificial Sequence
  MKO10020160_A_Glrx5
  gRNA
cccccacaaactcgccgttg

SEQ ID NO: 20161 - DNA, 20 bp, Artificial Sequence
  MKO10020161_A_Glrx
  gRNA
taaataatcttgaatcgcac

SEQ ID NO: 20162 - DNA, 20 bp, Artificial Sequence
  MKO10020162_A_Glrx
  gRNA
tctttacctatgaagacccg

SEQ ID NO: 20163 - DNA, 20 bp, Artificial Sequence
  MKO10020163_A_Glrx
  gRNA
caggttcctcgggtcttcat

SEQ ID NO: 20164 - DNA, 20 bp, Artificial Sequence
  MKO10020164_A_Gls2
  gRNA
gtctgacgtctgcagtccag

SEQ ID NO: 20165 - DNA, 20 bp, Artificial Sequence
  MKO10020165_A_Gls2
  gRNA
gacgtcagacccacggctcc

SEQ ID NO: 20166 - DNA, 20 bp, Artificial Sequence
  MKO10020166_A_Gls2
  gRNA
cctcaaatatgcgatccaca

SEQ ID NO: 20167 - DNA, 20 bp, Artificial Sequence
  MKO10020167_A_Gls
  gRNA
ctcgctgttgccgaacgcgt

SEQ ID NO: 20168 - DNA, 20 bp, Artificial Sequence
  MKO10020168_A_Gls
  gRNA
ggcggtatgatgcggctgcg

SEQ ID NO: 20169 - DNA, 20 bp, Artificial Sequence
  MKO10020169_A_Gls
  gRNA
atataactcatcgatgtgtg

SEQ ID NO: 20170 - DNA, 20 bp, Artificial Sequence
  MKO10020170_A_Glt1d1
  gRNA
ccaccaaagatgaccccgaa

SEQ ID NO: 20171 - DNA, 20 bp, Artificial Sequence
  MKO10020171_A_Glt1d1
  gRNA
ctagctcttcacctctaccg

SEQ ID NO: 20172 - DNA, 20 bp, Artificial Sequence
  MKO10020172_A_Glt1d1
  gRNA
gtttgctgtggctttcaccg

SEQ ID NO: 20173 - DNA, 20 bp, Artificial Sequence
  MKO10020173_A_Glt25d1
  gRNA
tcctggatgcagccttacgc

SEQ ID NO: 20174 - DNA, 20 bp, Artificial Sequence
  MKO10020174_A_Glt25d1
  gRNA
ccatccgaaaacgagaccgc

SEQ ID NO: 20175 - DNA, 20 bp, Artificial Sequence
  MKO10020175_A_Glt25d1
  gRNA
caccagccactctcgaagta

SEQ ID NO: 20176 - DNA, 20 bp, Artificial Sequence
  MKO10020176_A_Glt28d2
  gRNA
cgacgacctcatcgctcgag

SEQ ID NO: 20177 - DNA, 20 bp, Artificial Sequence
  MKO10020177_A_Glt28d2
  gRNA
gggcaaccactcgagcgatg

SEQ ID NO: 20178 - DNA, 20 bp, Artificial Sequence
  MKO10020178_A_Glt28d2
  gRNA
ggttgtaacccagattcttg

SEQ ID NO: 20179 - DNA, 20 bp, Artificial Sequence
  MKO10020179_A_Glt6d1
  gRNA
tagaagatcactcgatagcc

SEQ ID NO: 20180 - DNA, 20 bp, Artificial Sequence
  MKO10020180_A_Glt6d1
  gRNA
ggtgcgtcataaggtgtcta

SEQ ID NO: 20181 - DNA, 20 bp, Artificial Sequence
  MKO10020181_A_Glt6d1
  gRNA
tctcagactggtttaacccc

SEQ ID NO: 20182 - DNA, 20 bp, Artificial Sequence
  MKO10020182_A_Glt8d1
  gRNA
agcactggcgacaaagtcta

SEQ ID NO: 20183 - DNA, 20 bp, Artificial Sequence
  MKO10020183_A_Glt8d1
  gRNA
ctggtttcatggactccccc

SEQ ID NO: 20184 - DNA, 20 bp, Artificial Sequence
  MKO10020184_A_Glt8d1
  gRNA
ttaacaaactgctcaagctg

SEQ ID NO: 20185 - DNA, 20 bp, Artificial Sequence
  MKO10020185_A_Glt8d2
  gRNA
cgttgattccgagtcccccg

SEQ ID NO: 20186 - DNA, 20 bp, Artificial Sequence
  MKO10020186_A_Glt8d2
  gRNA
taaccttgtgttctacgtag

SEQ ID NO: 20187 - DNA, 20 bp, Artificial Sequence
  MKO10020187_A_Glt8d2
  gRNA
agattagaccagactcatcg

SEQ ID NO: 20188 - DNA, 20 bp, Artificial Sequence
  MKO10020188_A_Gltpd1
  gRNA
ctacgaggtgagcaacaagc

SEQ ID NO: 20189 - DNA, 20 bp, Artificial Sequence
  MKO10020189_A_Gltpd1
  gRNA
tgaatgagaagacggccccc

SEQ ID NO: 20190 - DNA, 20 bp, Artificial Sequence
  MKO10020190_A_Gltpd1
  gRNA
tttcaaccttaaagtcgtcc

SEQ ID NO: 20191 - DNA, 20 bp, Artificial Sequence
  MKO10020191_A_Gltpd2
  gRNA
tgttgcatcgcgcgctgcgc

SEQ ID NO: 20192 - DNA, 20 bp, Artificial Sequence
  MKO10020192_A_Gltpd2
  gRNA
ccgcactgcgtgcccgcatc

SEQ ID NO: 20193 - DNA, 20 bp, Artificial Sequence
  MKO10020193_A_Gltpd2
  gRNA
taacagcgttaagatagcga

SEQ ID NO: 20194 - DNA, 20 bp, Artificial Sequence
  MKO10020194_A_Gltp
  gRNA
catccgagtcaacgccaaca

SEQ ID NO: 20195 - DNA, 20 bp, Artificial Sequence
  MKO10020195_A_Gltp
  gRNA
ttgaggaagtcggacttgta

SEQ ID NO: 20196 - DNA, 20 bp, Artificial Sequence
  MKO10020196_A_Gltp
  gRNA
catgtcgtagatggcgtcaa

SEQ ID NO: 20197 - DNA, 20 bp, Artificial Sequence
  MKO10020197_A_Gltscr1l
  gRNA
tgggacacactgacgggcgc

SEQ ID NO: 20198 - DNA, 20 bp, Artificial Sequence
  MKO10020198_A_Gltscr1l
  gRNA
agcgatgatgtgacgaacgc

SEQ ID NO: 20199 - DNA, 20 bp, Artificial Sequence
  MKO10020199_A_Gltscr1l
  gRNA
ccagaataccgccgtccagc

SEQ ID NO: 20200 - DNA, 20 bp, Artificial Sequence
  MKO10020200_A_Gltscr1
  gRNA
cttgggctggataggcgtag

SEQ ID NO: 20201 - DNA, 20 bp, Artificial Sequence
  MKO10020201_A_Gltscr1
  gRNA
caccgagttcccgttgagtg

SEQ ID NO: 20202 - DNA, 20 bp, Artificial Sequence
  MKO10020202_A_Gltscr1
  gRNA
aggcggggcgctgactatga

SEQ ID NO: 20203 - DNA, 20 bp, Artificial Sequence
  MKO10020203_A_Gltscr2
  gRNA
actcagcatcctcgcacatc

SEQ ID NO: 20204 - DNA, 20 bp, Artificial Sequence
  MKO10020204_A_Gltscr2
  gRNA
caaagcagggcgaactgccc

SEQ ID NO: 20205 - DNA, 20 bp, Artificial Sequence
  MKO10020205_A_Gltscr2
  gRNA
aggactcactctttgggagc

SEQ ID NO: 20206 - DNA, 20 bp, Artificial Sequence
  MKO10020206_A_Glud1
  gRNA
gatactcacatagtgcccta

SEQ ID NO: 20207 - DNA, 20 bp, Artificial Sequence
  MKO10020207_A_Glud1
  gRNA
ggcataggtgtcagcgatcc

SEQ ID NO: 20208 - DNA, 20 bp, Artificial Sequence
  MKO10020208_A_Glud1
  gRNA
agcgcacttgtatgtcatta

SEQ ID NO: 20209 - DNA, 20 bp, Artificial Sequence
  MKO10020209_A_Glul
  gRNA
ccttcaggcccgtattactg

SEQ ID NO: 20210 - DNA, 20 bp, Artificial Sequence
  MKO10020210_A_Glul
  gRNA
tgcggaggttatgcctgccc

SEQ ID NO: 20211 - DNA, 20 bp, Artificial Sequence
  MKO10020211_A_Glul
  gRNA
tgggacgtaccttggggtcc

SEQ ID NO: 20212 - DNA, 20 bp, Artificial Sequence
  MKO10020212_A_Glyatl3
  gRNA
tgagattggccaagtaccgc

SEQ ID NO: 20213 - DNA, 20 bp, Artificial Sequence
  MKO10020213_A_Glyatl3
  gRNA
ccgactggtggccctcacgc

SEQ ID NO: 20214 - DNA, 20 bp, Artificial Sequence
  MKO10020214_A_Glyatl3
  gRNA
gcagtgatgaacataaatcg

SEQ ID NO: 20215 - DNA, 20 bp, Artificial Sequence
  MKO10020215_A_Glyat
  gRNA
aaccacgctttgtcataatc

SEQ ID NO: 20216 - DNA, 20 bp, Artificial Sequence
  MKO10020216_A_Glyat
  gRNA
ggttgtccgccctcaagaac

SEQ ID NO: 20217 - DNA, 20 bp, Artificial Sequence
  MKO10020217_A_Glyat
  gRNA
gaccagattatgacaaagcg

SEQ ID NO: 20218 - DNA, 20 bp, Artificial Sequence
  MKO10020218_A_Glycam1
  gRNA
tcatgacttcgtgatacgac

SEQ ID NO: 20219 - DNA, 20 bp, Artificial Sequence
  MKO10020219_A_Glycam1
  gRNA
acccgctcctgagcccatcc

SEQ ID NO: 20220 - DNA, 20 bp, Artificial Sequence
  MKO10020220_A_Glycam1
  gRNA
tcccaccagctacaccagtg

SEQ ID NO: 20221 - DNA, 20 bp, Artificial Sequence
  MKO10020221_A_Glyctk
  gRNA
cgagccgctatggaacatgc

SEQ ID NO: 20222 - DNA, 20 bp, Artificial Sequence
  MKO10020222_A_Glyctk
  gRNA
gcgggaaaacctctacctag

SEQ ID NO: 20223 - DNA, 20 bp, Artificial Sequence
  MKO10020223_A_Glyctk
  gRNA
ctacgggctgctagcccggg

SEQ ID NO: 20224 - DNA, 20 bp, Artificial Sequence
  MKO10020224_A_Glyr1
  gRNA
tagctgttccactttgatcc

SEQ ID NO: 20225 - DNA, 20 bp, Artificial Sequence
  MKO10020225_A_Glyr1
  gRNA
tactagtgcctggatcaaag

SEQ ID NO: 20226 - DNA, 20 bp, Artificial Sequence
  MKO10020226_A_Glyr1
  gRNA
gtatcctccctggccaggaa

SEQ ID NO: 20227 - DNA, 20 bp, Artificial Sequence
  MKO10020227_A_Gm10024
  gRNA
acaggtctgcagactacagt

SEQ ID NO: 20228 - DNA, 20 bp, Artificial Sequence
  MKO10020228_A_Gm10024
  gRNA
gctgtgtgcctgtaagctgc

SEQ ID NO: 20229 - DNA, 20 bp, Artificial Sequence
  MKO10020229_A_Gm10024
  gRNA
gcagcctccagatgactgac

SEQ ID NO: 20230 - DNA, 20 bp, Artificial Sequence
  MKO10020230_A_Gm10057
  gRNA
atcaactcatcgttgatact

SEQ ID NO: 20231 - DNA, 20 bp, Artificial Sequence
  MKO10020231_A_Gm10057
  gRNA
ctacagatttatcaatgaga

SEQ ID NO: 20232 - DNA, 20 bp, Artificial Sequence
  MKO10020232_A_Gm10057
  gRNA
tatcacttcacgcatctaga

SEQ ID NO: 20233 - DNA, 20 bp, Artificial Sequence
  MKO10020233_A_Gm10058
  gRNA
atagtaaagaggccagcatt

SEQ ID NO: 20234 - DNA, 20 bp, Artificial Sequence
  MKO10020234_A_Gm10058
  gRNA
tcttcatctgcttctacgtg

SEQ ID NO: 20235 - DNA, 20 bp, Artificial Sequence
  MKO10020235_A_Gm10058
  gRNA
agatgaacaagacagtatgt

SEQ ID NO: 20236 - DNA, 20 bp, Artificial Sequence
  MKO10020236_A_Gm10081
  gRNA
cctgcttgagaagttcttcg

SEQ ID NO: 20237 - DNA, 20 bp, Artificial Sequence
  MKO10020237_A_Gm10081
  gRNA
attactctagcaccatgaca

SEQ ID NO: 20238 - DNA, 20 bp, Artificial Sequence
  MKO10020238_A_Gm10081
  gRNA
taatccctgatccataaaag

SEQ ID NO: 20239 - DNA, 20 bp, Artificial Sequence
  MKO10020239_A_Gm10094
  gRNA
caggtcttctcgcggtcgat

SEQ ID NO: 20240 - DNA, 20 bp, Artificial Sequence
  MKO10020240_A_Gm10094
  gRNA
aagacctggatatcgagtta

SEQ ID NO: 20241 - DNA, 20 bp, Artificial Sequence
  MKO10020241_A_Gm10094
  gRNA
atctccttaactcgatatcc

SEQ ID NO: 20242 - DNA, 20 bp, Artificial Sequence
  MKO10020242_A_Gm10096
  gRNA
atagtaaagaggccagcatt

SEQ ID NO: 20243 - DNA, 20 bp, Artificial Sequence
  MKO10020243_A_Gm10096
  gRNA
tcttcatctgcttctacgtg

SEQ ID NO: 20244 - DNA, 20 bp, Artificial Sequence
  MKO10020244_A_Gm10096
  gRNA
agatgaacaagacagtatgt

SEQ ID NO: 20245 - DNA, 20 bp, Artificial Sequence
  MKO10020245_A_Gm10100
  gRNA
aggtaacaggcctgcagacc

SEQ ID NO: 20246 - DNA, 20 bp, Artificial Sequence
  MKO10020246_A_Gm10100
  gRNA
tgtcacaccagctgctcctc

SEQ ID NO: 20247 - DNA, 20 bp, Artificial Sequence
  MKO10020247_A_Gm10100
  gRNA
ccagccctcctgccctaccc

SEQ ID NO: 20248 - DNA, 20 bp, Artificial Sequence
  MKO10020248_A_Gm10104
  gRNA
catgaagagcagacccttct

SEQ ID NO: 20249 - DNA, 20 bp, Artificial Sequence
  MKO10020249_A_Gm10104
  gRNA
cctctctgcccttgtcctgc

SEQ ID NO: 20250 - DNA, 20 bp, Artificial Sequence
  MKO10020250_A_Gm10104
  gRNA
agttaaaaaaagatttctgc

SEQ ID NO: 20251 - DNA, 20 bp, Artificial Sequence
  MKO10020251_A_Gm10142
  gRNA
cattcctgttagataccaag

SEQ ID NO: 20252 - DNA, 20 bp, Artificial Sequence
  MKO10020252_A_Gm10142
  gRNA
ccagccctcctgccctacct

SEQ ID NO: 20253 - DNA, 20 bp, Artificial Sequence
  MKO10020253_A_Gm10142
  gRNA
ggagggggccacacacacag

SEQ ID NO: 20254 - DNA, 20 bp, Artificial Sequence
  MKO10020254_A_Gm10147
  gRNA
atagtaaagaggccagcatt

SEQ ID NO: 20255 - DNA, 20 bp, Artificial Sequence
  MKO10020255_A_Gm10147
  gRNA
tcttcatctgcttctacgtg

SEQ ID NO: 20256 - DNA, 20 bp, Artificial Sequence
  MKO10020256_A_Gm10147
  gRNA
agatgaacaagacagtatgt

SEQ ID NO: 20257 - DNA, 20 bp, Artificial Sequence
  MKO10020257_A_Gm101
  gRNA
taatagtagcgccactcatc

SEQ ID NO: 20258 - DNA, 20 bp, Artificial Sequence
  MKO10020258_A_Gm101
  gRNA
tgggaactcacctttctccg

SEQ ID NO: 20259 - DNA, 20 bp, Artificial Sequence
  MKO10020259_A_Gm101
  gRNA
ctgcatccgcattcactgta

SEQ ID NO: 20260 - DNA, 20 bp, Artificial Sequence
  MKO10020260_A_Gm10220
  gRNA
ggtagggcctattcccagga

SEQ ID NO: 20261 - DNA, 20 bp, Artificial Sequence
  MKO10020261_A_Gm10220
  gRNA
ctcagaagctgcaagaaagc

SEQ ID NO: 20262 - DNA, 20 bp, Artificial Sequence
  MKO10020262_A_Gm10220
  gRNA
tcacagacagacaacatccc

SEQ ID NO: 20263 - DNA, 20 bp, Artificial Sequence
  MKO10020263_A_Gm10228
  gRNA
tgtggctatggatgtggctc

SEQ ID NO: 20264 - DNA, 20 bp, Artificial Sequence
  MKO10020264_A_Gm10228
  gRNA
agcaccatgtgtggctacta

SEQ ID NO: 20265 - DNA, 20 bp, Artificial Sequence
  MKO10020265_A_Gm10228
  gRNA
catagccacagcccagtcca

SEQ ID NO: 20266 - DNA, 20 bp, Artificial Sequence
  MKO10020266_A_Gm10229
  gRNA
tgcggttctggctatggatc

SEQ ID NO: 20267 - DNA, 20 bp, Artificial Sequence
  MKO10020267_A_Gm10229
  gRNA
catagccacagcccagtcca

SEQ ID NO: 20268 - DNA, 20 bp, Artificial Sequence
  MKO10020268_A_Gm10229
  gRNA
agcaccatgtgtggctacta

SEQ ID NO: 20269 - DNA, 20 bp, Artificial Sequence
  MKO10020269_A_Gm10230
  gRNA
atagtaaagaggccagcatt

SEQ ID NO: 20270 - DNA, 20 bp, Artificial Sequence
  MKO10020270_A_Gm10230
  gRNA
tcttcatctgcttctacgtg

SEQ ID NO: 20271 - DNA, 20 bp, Artificial Sequence
  MKO10020271_A_Gm10230
  gRNA
agatgaacaagacagtatgt

SEQ ID NO: 20272 - DNA, 20 bp, Artificial Sequence
  MKO10020272_A_Gm10256
  gRNA
aaagaattaccacgtgctac

SEQ ID NO: 20273 - DNA, 20 bp, Artificial Sequence
  MKO10020273_A_Gm10256
  gRNA
atggcagaaactgatcagcc

SEQ ID NO: 20274 - DNA, 20 bp, Artificial Sequence
  MKO10020274_A_Gm10256
  gRNA
cagcattcttagcatctgca

SEQ ID NO: 20275 - DNA, 20 bp, Artificial Sequence
  MKO10020275_A_Gm10267
  gRNA
tttccagtctgtgcaaccaa

SEQ ID NO: 20276 - DNA, 20 bp, Artificial Sequence
  MKO10020276_A_Gm10267
  gRNA
acagactggaaaatactctc

SEQ ID NO: 20277 - DNA, 20 bp, Artificial Sequence
  MKO10020277_A_Gm10267
  gRNA
tcatttattatgtcacatct

SEQ ID NO: 20278 - DNA, 20 bp, Artificial Sequence
  MKO10020278_A_Gm10318
  gRNA
gatagttcaagccagtgtat

SEQ ID NO: 20279 - DNA, 20 bp, Artificial Sequence
  MKO10020279_A_Gm10318
  gRNA
ccccaatatgtcctatacac

SEQ ID NO: 20280 - DNA, 20 bp, Artificial Sequence
  MKO10020280_A_Gm10318
  gRNA
tgatgttgtgaactgccgaa

SEQ ID NO: 20281 - DNA, 20 bp, Artificial Sequence
  MKO10020281_A_Gm10324
  gRNA
ctaaatctcagaacttcctg

SEQ ID NO: 20282 - DNA, 20 bp, Artificial Sequence
  MKO10020282_A_Gm10324
  gRNA
gcctttctacaagatcgctg

SEQ ID NO: 20283 - DNA, 20 bp, Artificial Sequence
  MKO10020283_A_Gm10324
  gRNA
cagtcttacctatagaagta

SEQ ID NO: 20284 - DNA, 20 bp, Artificial Sequence
  MKO10020284_A_Gm10334
  gRNA
gggaacagaattctcttggc

SEQ ID NO: 20285 - DNA, 20 bp, Artificial Sequence
  MKO10020285_A_Gm10334
  gRNA
cactctagttgccttccccg

SEQ ID NO: 20286 - DNA, 20 bp, Artificial Sequence
  MKO10020286_A_Gm10334
  gRNA
cagccgcatccaagtgagat

SEQ ID NO: 20287 - DNA, 20 bp, Artificial Sequence
  MKO10020287_A_Gm10352
  gRNA
aaagaattaccacgtgctac

SEQ ID NO: 20288 - DNA, 20 bp, Artificial Sequence
  MKO10020288_A_Gm10352
  gRNA
atggcagaaactgatcagcc

SEQ ID NO: 20289 - DNA, 20 bp, Artificial Sequence
  MKO10020289_A_Gm10352
  gRNA
cagcattcttagcatctgca

SEQ ID NO: 20290 - DNA, 20 bp, Artificial Sequence
  MKO10020290_A_Gm10354
  gRNA
caaagagatccagctcacta

SEQ ID NO: 20291 - DNA, 20 bp, Artificial Sequence
  MKO10020291_A_Gm10354
  gRNA
tccttgctctcctgctgcaa

SEQ ID NO: 20292 - DNA, 20 bp, Artificial Sequence
  MKO10020292_A_Gm10354
  gRNA
ttgtctcctccatagtgagc

SEQ ID NO: 20293 - DNA, 20 bp, Artificial Sequence
  MKO10020293_A_Gm10375
  gRNA
acctacagggtcatttagga

SEQ ID NO: 20294 - DNA, 20 bp, Artificial Sequence
  MKO10020294_A_Gm10375
  gRNA
gtcattcaaatccttgtact

SEQ ID NO: 20295 - DNA, 20 bp, Artificial Sequence
  MKO10020295_A_Gm10375
  gRNA
tgacctgaagagaatgtccc

SEQ ID NO: 20296 - DNA, 20 bp, Artificial Sequence
  MKO10020296_A_Gm10377
  gRNA
acctacagggtcatttagga

SEQ ID NO: 20297 - DNA, 20 bp, Artificial Sequence
  MKO10020297_A_Gm10377
  gRNA
gtcattcaaatccttgtact

SEQ ID NO: 20298 - DNA, 20 bp, Artificial Sequence
  MKO10020298_A_Gm10377
  gRNA
tgacctgaagagaatgtccc

SEQ ID NO: 20299 - DNA, 20 bp, Artificial Sequence
  MKO10020299_A_Gm10406
  gRNA
ggctggctataagtgtcctg

SEQ ID NO: 20300 - DNA, 20 bp, Artificial Sequence
  MKO10020300_A_Gm10406
  gRNA
tgaactagaagaactgaaat

SEQ ID NO: 20301 - DNA, 20 bp, Artificial Sequence
  MKO10020301_A_Gm10406
  gRNA
tcaaatcctcatacatgtaa

SEQ ID NO: 20302 - DNA, 20 bp, Artificial Sequence
  MKO10020302_A_Gm10408
  gRNA
cctcatatatgtaaagttcc

SEQ ID NO: 20303 - DNA, 20 bp, Artificial Sequence
  MKO10020303_A_Gm10408
  gRNA
tgaactagaagaactgaaat

SEQ ID NO: 20304 - DNA, 20 bp, Artificial Sequence
  MKO10020304_A_Gm10408
  gRNA
gttatcttctatcagttcct

SEQ ID NO: 20305 - DNA, 20 bp, Artificial Sequence
  MKO10020305_A_Gm10413
  gRNA
tcaaatcctcatacatgtaa

SEQ ID NO: 20306 - DNA, 20 bp, Artificial Sequence
  MKO10020306_A_Gm10413
  gRNA
aagaactgaaattagatatg

SEQ ID NO: 20307 - DNA, 20 bp, Artificial Sequence
  MKO10020307_A_Gm10413
  gRNA
acaacatgagaagacaatgt

SEQ ID NO: 20308 - DNA, 20 bp, Artificial Sequence
  MKO10020308_A_Gm10436
  gRNA
cttatcatagttccacaaaa

SEQ ID NO: 20309 - DNA, 20 bp, Artificial Sequence
  MKO10020309_A_Gm10436
  gRNA
ttcagaatcacccaaagtga

SEQ ID NO: 20310 - DNA, 20 bp, Artificial Sequence
  MKO10020310_A_Gm10436
  gRNA
catcatttatgtagagtttc

SEQ ID NO: 20311 - DNA, 20 bp, Artificial Sequence
  MKO10020311_A_Gm10439
  gRNA
gaagatcacgtagtcgattc

SEQ ID NO: 20312 - DNA, 20 bp, Artificial Sequence
  MKO10020312_A_Gm10439
  gRNA
tgttatcagatctccatgat

SEQ ID NO: 20313 - DNA, 20 bp, Artificial Sequence
  MKO10020313_A_Gm10439
  gRNA
gattgtctgcaataagagaa

SEQ ID NO: 20314 - DNA, 20 bp, Artificial Sequence
  MKO10020314_A_Gm1045
  gRNA
caagggatcagtctacctcg

SEQ ID NO: 20315 - DNA, 20 bp, Artificial Sequence
  MKO10020315_A_Gm1045
  gRNA
acaaccgccgcttccagttc

SEQ ID NO: 20316 - DNA, 20 bp, Artificial Sequence
  MKO10020316_A_Gm1045
  gRNA
caaccagctgaccagtaacc

SEQ ID NO: 20317 - DNA, 20 bp, Artificial Sequence
  MKO10020317_A_Gm10471
  gRNA
ctaccgctctagtggcaagt

SEQ ID NO: 20318 - DNA, 20 bp, Artificial Sequence
  MKO10020318_A_Gm10471
  gRNA
tgctagactacagggcccta

SEQ ID NO: 20319 - DNA, 20 bp, Artificial Sequence
  MKO10020319_A_Gm10471
  gRNA
aagcaaaaagcagtttgaga

SEQ ID NO: 20320 - DNA, 20 bp, Artificial Sequence
  MKO10020320_A_Gm10486
  gRNA
tcttcatctgcttctacgtg

SEQ ID NO: 20321 - DNA, 20 bp, Artificial Sequence
  MKO10020321_A_Gm10486
  gRNA
atagtaaagaggccagcatt

SEQ ID NO: 20322 - DNA, 20 bp, Artificial Sequence
  MKO10020322_A_Gm10486
  gRNA
agatgaacaagacagtatgt

SEQ ID NO: 20323 - DNA, 20 bp, Artificial Sequence
  MKO10020323_A_Gm10487
  gRNA
atagtaaagaggccagcatt

SEQ ID NO: 20324 - DNA, 20 bp, Artificial Sequence
  MKO10020324_A_Gm10487
  gRNA
tcttcatctgcttctacgtg

SEQ ID NO: 20325 - DNA, 20 bp, Artificial Sequence
  MKO10020325_A_Gm10487
  gRNA
agatgaacaagacagtatgt

SEQ ID NO: 20326 - DNA, 20 bp, Artificial Sequence
  MKO10020326_A_Gm10488
  gRNA
tcttcatctgcttctacgtg

SEQ ID NO: 20327 - DNA, 20 bp, Artificial Sequence
  MKO10020327_A_Gm10488
  gRNA
atagtaaagaggccagcatt

SEQ ID NO: 20328 - DNA, 20 bp, Artificial Sequence
  MKO10020328_A_Gm10488
  gRNA
agatgaacaagacagtatgt

SEQ ID NO: 20329 - DNA, 20 bp, Artificial Sequence
  MKO10020329_A_Gm10591
  gRNA
ctccttggtaccttgggtcc

SEQ ID NO: 20330 - DNA, 20 bp, Artificial Sequence
  MKO10020330_A_Gm10591
  gRNA
gactctgagcctccttagcc

SEQ ID NO: 20331 - DNA, 20 bp, Artificial Sequence
  MKO10020331_A_Gm10591
  gRNA
agcgcactcacaggattgcc

SEQ ID NO: 20332 - DNA, 20 bp, Artificial Sequence
  MKO10020332_A_Gm10639
  gRNA
ttgcaggtgttgaagggcca

SEQ ID NO: 20333 - DNA, 20 bp, Artificial Sequence
  MKO10020333_A_Gm10639
  gRNA
aaaagaagccaagactgcct

SEQ ID NO: 20334 - DNA, 20 bp, Artificial Sequence
  MKO10020334_A_Gm10639
  gRNA
gactcctttccctctgctga

SEQ ID NO: 20335 - DNA, 20 bp, Artificial Sequence
  MKO10020335_A_Gm10662
  gRNA
agagggtctgatgatggagc

SEQ ID NO: 20336 - DNA, 20 bp, Artificial Sequence
  MKO10020336_A_Gm10662
  gRNA
cttctatgtgatgactgtca

SEQ ID NO: 20337 - DNA, 20 bp, Artificial Sequence
  MKO10020337_A_Gm10662
  gRNA
actagatcgcatcatcaacg

SEQ ID NO: 20338 - DNA, 20 bp, Artificial Sequence
  MKO10020338_A_Gm10665
  gRNA
gccctctccatgtctgttcg

SEQ ID NO: 20339 - DNA, 20 bp, Artificial Sequence
  MKO10020339_A_Gm10665
  gRNA
cagagcaagtgtcccaaatt

SEQ ID NO: 20340 - DNA, 20 bp, Artificial Sequence
  MKO10020340_A_Gm10665
  gRNA
gaccatgatgctcatgaatg

SEQ ID NO: 20341 - DNA, 20 bp, Artificial Sequence
  MKO10020341_A_Gm10666
  gRNA
gccctctccatgtctgttcg

SEQ ID NO: 20342 - DNA, 20 bp, Artificial Sequence
  MKO10020342_A_Gm10666
  gRNA
cagagcaagtgtcccaaatt

SEQ ID NO: 20343 - DNA, 20 bp, Artificial Sequence
  MKO10020343_A_Gm10666
  gRNA
gaccatgatgctcatgaatg

SEQ ID NO: 20344 - DNA, 20 bp, Artificial Sequence
  MKO10020344_A_Gm10670
  gRNA
gccctctccatgtctgttcg

SEQ ID NO: 20345 - DNA, 20 bp, Artificial Sequence
  MKO10020345_A_Gm10670
  gRNA
cagagcaagtgtcccaaatt

SEQ ID NO: 20346 - DNA, 20 bp, Artificial Sequence
  MKO10020346_A_Gm10670
  gRNA
gaccatgatgctcatgaatg

SEQ ID NO: 20347 - DNA, 20 bp, Artificial Sequence
  MKO10020347_A_Gm10681
  gRNA
ctgtgttgaccatgcctggg

SEQ ID NO: 20348 - DNA, 20 bp, Artificial Sequence
  MKO10020348_A_Gm10681
  gRNA
agctgcctggtgacaggagc

SEQ ID NO: 20349 - DNA, 20 bp, Artificial Sequence
  MKO10020349_A_Gm10681
  gRNA
agagctgcagacaaagacca

SEQ ID NO: 20350 - DNA, 20 bp, Artificial Sequence
  MKO10020350_A_Gm10696
  gRNA
agaaatatcaaagtatggag

SEQ ID NO: 20351 - DNA, 20 bp, Artificial Sequence
  MKO10020351_A_Gm10696
  gRNA
tcttcagctgctgtgtgctg

SEQ ID NO: 20352 - DNA, 20 bp, Artificial Sequence
  MKO10020352_A_Gm10696
  gRNA
cacacagcagctgaagactc

SEQ ID NO: 20353 - DNA, 20 bp, Artificial Sequence
  MKO10020353_A_Gm10697
  gRNA
agcagaaatgtcagaggaca

SEQ ID NO: 20354 - DNA, 20 bp, Artificial Sequence
  MKO10020354_A_Gm10697
  gRNA
gaatgcttcagccaaccaag

SEQ ID NO: 20355 - DNA, 20 bp, Artificial Sequence
  MKO10020355_A_Gm10697
  gRNA
atccaggtcatggatctcag

SEQ ID NO: 20356 - DNA, 20 bp, Artificial Sequence
  MKO10020356_A_Gm10767
  gRNA
gcaagcagattcacgaaaga

SEQ ID NO: 20357 - DNA, 20 bp, Artificial Sequence
  MKO10020357_A_Gm10767
  gRNA
atccatgccactgatttgac

SEQ ID NO: 20358 - DNA, 20 bp, Artificial Sequence
  MKO10020358_A_Gm10767
  gRNA
aaggatggccaactgacaac

SEQ ID NO: 20359 - DNA, 20 bp, Artificial Sequence
  MKO10020359_A_Gm10778
  gRNA
ctaaaaagctcatcttacac

SEQ ID NO: 20360 - DNA, 20 bp, Artificial Sequence
  MKO10020360_A_Gm10778
  gRNA
agcaggtgtttgctacttgc

SEQ ID NO: 20361 - DNA, 20 bp, Artificial Sequence
  MKO10020361_A_Gm10778
  gRNA
tattcttacctatagcagtg

SEQ ID NO: 20362 - DNA, 20 bp, Artificial Sequence
  MKO10020362_A_Gm10921
  gRNA
aaatctgatcattaagaatg

SEQ ID NO: 20363 - DNA, 20 bp, Artificial Sequence
  MKO10020363_A_Gm10921
  gRNA
caaccactgttgtttgtaaa

SEQ ID NO: 20364 - DNA, 20 bp, Artificial Sequence
  MKO10020364_A_Gm10921
  gRNA
atcttgttcaagaatagttg

SEQ ID NO: 20365 - DNA, 20 bp, Artificial Sequence
  MKO10020365_A_Gm10922
  gRNA
caaccactgttgtttgtaaa

SEQ ID NO: 20366 - DNA, 20 bp, Artificial Sequence
  MKO10020366_A_Gm10922
  gRNA
acttggagagaatcacacca

SEQ ID NO: 20367 - DNA, 20 bp, Artificial Sequence
  MKO10020367_A_Gm10922
  gRNA
atcttgttcaagaatagttg

SEQ ID NO: 20368 - DNA, 20 bp, Artificial Sequence
  MKO10020368_A_Gm1110
  gRNA
ttgctgataaaccgaaaagt

SEQ ID NO: 20369 - DNA, 20 bp, Artificial Sequence
  MKO10020369_A_Gm1110
  gRNA
aacctccacgagccggcagt

SEQ ID NO: 20370 - DNA, 20 bp, Artificial Sequence
  MKO10020370_A_Gm1110
  gRNA
gtcttcagccttatgtgcga

SEQ ID NO: 20371 - DNA, 20 bp, Artificial Sequence
  MKO10020371_A_Gm11127
  gRNA
gccaggtccccacacaatcc

SEQ ID NO: 20372 - DNA, 20 bp, Artificial Sequence
  MKO10020372_A_Gm11127
  gRNA
ggagcctcggttcaccgccg

SEQ ID NO: 20373 - DNA, 20 bp, Artificial Sequence
  MKO10020373_A_Gm11127
  gRNA
aatgattaccatgttagagt

SEQ ID NO: 20374 - DNA, 20 bp, Artificial Sequence
  MKO10020374_A_Gm11128
  gRNA
ggtccccttcccgagaagtg

SEQ ID NO: 20375 - DNA, 20 bp, Artificial Sequence
  MKO10020375_A_Gm11128
  gRNA
taaagtatagcctcacttct

SEQ ID NO: 20376 - DNA, 20 bp, Artificial Sequence
  MKO10020376_A_Gm11128
  gRNA
ttatcatatccgaaaatacc

SEQ ID NO: 20377 - DNA, 20 bp, Artificial Sequence
  MKO10020377_A_Gm11236
  gRNA
tctgaatacctgaggaactt

SEQ ID NO: 20378 - DNA, 20 bp, Artificial Sequence
  MKO10020378_A_Gm11236
  gRNA
gaaatgacaaagaagccaat

SEQ ID NO: 20379 - DNA, 20 bp, Artificial Sequence
  MKO10020379_A_Gm11236
  gRNA
cacctggcacatagcctccc

SEQ ID NO: 20380 - DNA, 20 bp, Artificial Sequence
  MKO10020380_A_Gm11237
  gRNA
tctgaatacctgaggaactt

SEQ ID NO: 20381 - DNA, 20 bp, Artificial Sequence
  MKO10020381_A_Gm11237
  gRNA
gaaatgacaaagaagccaat

SEQ ID NO: 20382 - DNA, 20 bp, Artificial Sequence
  MKO10020382_A_Gm11237
  gRNA
cacctggcacatagcctccc

SEQ ID NO: 20383 - DNA, 20 bp, Artificial Sequence
  MKO10020383_A_Gm1123
  gRNA
aaggaccgttgaacatcgag

SEQ ID NO: 20384 - DNA, 20 bp, Artificial Sequence
  MKO10020384_A_Gm1123
  gRNA
cgaagccactcgatgttcaa

SEQ ID NO: 20385 - DNA, 20 bp, Artificial Sequence
  MKO10020385_A_Gm1123
  gRNA
gacgtctatccagatctaaa

SEQ ID NO: 20386 - DNA, 20 bp, Artificial Sequence
  MKO10020386_A_Gm1140
  gRNA
caatatagcagagcagcccg

SEQ ID NO: 20387 - DNA, 20 bp, Artificial Sequence
  MKO10020387_A_Gm1140
  gRNA
atcactgatctcgatcacca

SEQ ID NO: 20388 - DNA, 20 bp, Artificial Sequence
  MKO10020388_A_Gm1140
  gRNA
tagggaatctgttcagaaga

SEQ ID NO: 20389 - DNA, 20 bp, Artificial Sequence
  MKO10020389_A_Gm11435
  gRNA
gggagtcaaaatcgttgttt

SEQ ID NO: 20390 - DNA, 20 bp, Artificial Sequence
  MKO10020390_A_Gm11435
  gRNA
caccctcaatgagcaacgca

SEQ ID NO: 20391 - DNA, 20 bp, Artificial Sequence
  MKO10020391_A_Gm11435
  gRNA
ccaccaaagaccccctgaag

SEQ ID NO: 20392 - DNA, 20 bp, Artificial Sequence
  MKO10020392_A_Gm11437
  gRNA
atcagccgatagctaccctg

SEQ ID NO: 20393 - DNA, 20 bp, Artificial Sequence
  MKO10020393_A_Gm11437
  gRNA
catctttgaagtcccgtgcc

SEQ ID NO: 20394 - DNA, 20 bp, Artificial Sequence
  MKO10020394_A_Gm11437
  gRNA
accgtgcattgtgagatccc

SEQ ID NO: 20395 - DNA, 20 bp, Artificial Sequence
  MKO10020395_A_Gm11487
  gRNA
atcttcactccactcttagt

SEQ ID NO: 20396 - DNA, 20 bp, Artificial Sequence
  MKO10020396_A_Gm11487
  gRNA
tgatctctccctactaagag

SEQ ID NO: 20397 - DNA, 20 bp, Artificial Sequence
  MKO10020397_A_Gm11487
  gRNA
aatgcagagggaatgtgcat

SEQ ID NO: 20398 - DNA, 20 bp, Artificial Sequence
  MKO10020398_A_Gm11541
  gRNA
gtaagaccacgaattgcatc

SEQ ID NO: 20399 - DNA, 20 bp, Artificial Sequence
  MKO10020399_A_Gm11541
  gRNA
ttcacggcctaggcaagaac

SEQ ID NO: 20400 - DNA, 20 bp, Artificial Sequence
  MKO10020400_A_Gm11541
  gRNA
ggatggatggcacgcagtgg

SEQ ID NO: 20401 - DNA, 20 bp, Artificial Sequence
  MKO10020401_A_Gm11544
  gRNA
accgccctccattgctccgc

SEQ ID NO: 20402 - DNA, 20 bp, Artificial Sequence
  MKO10020402_A_Gm11544
  gRNA
ggattgtggacctcatcctg

SEQ ID NO: 20403 - DNA, 20 bp, Artificial Sequence
  MKO10020403_A_Gm11544
  gRNA
tgatctccatcccacactta

SEQ ID NO: 20404 - DNA, 20 bp, Artificial Sequence
  MKO10020404_A_Gm11545
  gRNA
gatctctctacatccacgac

SEQ ID NO: 20405 - DNA, 20 bp, Artificial Sequence
  MKO10020405_A_Gm11545
  gRNA
ggagcaacggagggcaacga

SEQ ID NO: 20406 - DNA, 20 bp, Artificial Sequence
  MKO10020406_A_Gm11545
  gRNA
acagggattccaactagatt

SEQ ID NO: 20407 - DNA, 20 bp, Artificial Sequence
  MKO10020407_A_Gm11554
  gRNA
acaacagcctgggcggctgc

SEQ ID NO: 20408 - DNA, 20 bp, Artificial Sequence
  MKO10020408_A_Gm11554
  gRNA
accatggtcagctcctgctg

SEQ ID NO: 20409 - DNA, 20 bp, Artificial Sequence
  MKO10020409_A_Gm11554
  gRNA
gcagcaagaaccactagaac

SEQ ID NO: 20410 - DNA, 20 bp, Artificial Sequence
  MKO10020410_A_Gm11559
  gRNA
gtaagttgatcaacagccac

SEQ ID NO: 20411 - DNA, 20 bp, Artificial Sequence
  MKO10020411_A_Gm11559
  gRNA
agcccagctgctgtcagccc

SEQ ID NO: 20412 - DNA, 20 bp, Artificial Sequence
  MKO10020412_A_Gm11559
  gRNA
gctgccagcccacctgctgc

SEQ ID NO: 20413 - DNA, 20 bp, Artificial Sequence
  MKO10020413_A_Gm11562
  gRNA
accatgacaggctcctgctg

SEQ ID NO: 20414 - DNA, 20 bp, Artificial Sequence
  MKO10020414_A_Gm11562
  gRNA
gctcagcagcaggtgttgca

SEQ ID NO: 20415 - DNA, 20 bp, Artificial Sequence
  MKO10020415_A_Gm11562
  gRNA
cctggtgcagtggggcacac

SEQ ID NO: 20416 - DNA, 20 bp, Artificial Sequence
  MKO10020416_A_Gm11563
  gRNA
caagaaagttctcagcagca

SEQ ID NO: 20417 - DNA, 20 bp, Artificial Sequence
  MKO10020417_A_Gm11563
  gRNA
acaacagctggagctaccac

SEQ ID NO: 20418 - DNA, 20 bp, Artificial Sequence
  MKO10020418_A_Gm11563
  gRNA
gcagctggggcggcaacagc

SEQ ID NO: 20419 - DNA, 20 bp, Artificial Sequence
  MKO10020419_A_Gm11564
  gRNA
tctatatatggaatgttgct

SEQ ID NO: 20420 - DNA, 20 bp, Artificial Sequence
  MKO10020420_A_Gm11564
  gRNA
acaactagagatacagcagc

SEQ ID NO: 20421 - DNA, 20 bp, Artificial Sequence
  MKO10020421_A_Gm11564
  gRNA
caagaacaactagagcaagt

SEQ ID NO: 20422 - DNA, 20 bp, Artificial Sequence
  MKO10020422_A_Gm11565
  gRNA
tgatgaccagctcccaaaaa

SEQ ID NO: 20423 - DNA, 20 bp, Artificial Sequence
  MKO10020423_A_Gm11565
  gRNA
ggggctgctgttgacagtct

SEQ ID NO: 20424 - DNA, 20 bp, Artificial Sequence
  MKO10020424_A_Gm11565
  gRNA
tcatctgctgcgcccctagt

SEQ ID NO: 20425 - DNA, 20 bp, Artificial Sequence
  MKO10020425_A_Gm11567
  gRNA
agagttatcaacagcaagat

SEQ ID NO: 20426 - DNA, 20 bp, Artificial Sequence
  MKO10020426_A_Gm11567
  gRNA
agcagttagacccacagcct

SEQ ID NO: 20427 - DNA, 20 bp, Artificial Sequence
  MKO10020427_A_Gm11567
  gRNA
ccaacatgtgtctgtgtgcc

SEQ ID NO: 20428 - DNA, 20 bp, Artificial Sequence
  MKO10020428_A_Gm11568
  gRNA
gtaagttaatcaacagccac

SEQ ID NO: 20429 - DNA, 20 bp, Artificial Sequence
  MKO10020429_A_Gm11568
  gRNA
tctccagctgctgtcagccc

SEQ ID NO: 20430 - DNA, 20 bp, Artificial Sequence
  MKO10020430_A_Gm11568
  gRNA
cagcacagattgaggcagaa

SEQ ID NO: 20431 - DNA, 20 bp, Artificial Sequence
  MKO10020431_A_Gm11569
  gRNA
acaacagcctgggcggcagc

SEQ ID NO: 20432 - DNA, 20 bp, Artificial Sequence
  MKO10020432_A_Gm11569
  gRNA
accatggtcagctcctgctg

SEQ ID NO: 20433 - DNA, 20 bp, Artificial Sequence
  MKO10020433_A_Gm11569
  gRNA
gcagcaagaaccactagaac

SEQ ID NO: 20434 - DNA, 20 bp, Artificial Sequence
  MKO10020434_A_Gm11570
  gRNA
ggactggtttcacagccgac

SEQ ID NO: 20435 - DNA, 20 bp, Artificial Sequence
  MKO10020435_A_Gm11570
  gRNA
ccaacctgcttgctgccgtc

SEQ ID NO: 20436 - DNA, 20 bp, Artificial Sequence
  MKO10020436_A_Gm11570
  gRNA
caactgctcacggaacacga

SEQ ID NO: 20437 - DNA, 20 bp, Artificial Sequence
  MKO10020437_A_Gm11595
  gRNA
acaggtcgggcggcagcaac

SEQ ID NO: 20438 - DNA, 20 bp, Artificial Sequence
  MKO10020438_A_Gm11595
  gRNA
cagctagaaatgcagcaaga

SEQ ID NO: 20439 - DNA, 20 bp, Artificial Sequence
  MKO10020439_A_Gm11595
  gRNA
acaggtggttctgcagcaag

SEQ ID NO: 20440 - DNA, 20 bp, Artificial Sequence
  MKO10020440_A_Gm11596
  gRNA
gcagcagttagaaacgcagc

SEQ ID NO: 20441 - DNA, 20 bp, Artificial Sequence
  MKO10020441_A_Gm11596
  gRNA
gctgcgtttctaactgctgc

SEQ ID NO: 20442 - DNA, 20 bp, Artificial Sequence
  MKO10020442_A_Gm11596
  gRNA
atcacagcaggggcggcagc

SEQ ID NO: 20443 - DNA, 20 bp, Artificial Sequence
  MKO10020443_A_Gm11710
  gRNA
aaccgtggatgtcagaactg

SEQ ID NO: 20444 - DNA, 20 bp, Artificial Sequence
  MKO10020444_A_Gm11710
  gRNA
ctgctcatcctcttcctccc

SEQ ID NO: 20445 - DNA, 20 bp, Artificial Sequence
  MKO10020445_A_Gm11710
  gRNA
gctacttacctgggaggaag

SEQ ID NO: 20446 - DNA, 20 bp, Artificial Sequence
  MKO10020446_A_Gm11711
  gRNA
ctgctcatcctcttcctccc

SEQ ID NO: 20447 - DNA, 20 bp, Artificial Sequence
  MKO10020447_A_Gm11711
  gRNA
gctacttacctgggaggaag

SEQ ID NO: 20448 - DNA, 20 bp, Artificial Sequence
  MKO10020448_A_Gm11711
  gRNA
gttcacgttaactttaaaca

SEQ ID NO: 20449 - DNA, 20 bp, Artificial Sequence
  MKO10020449_A_Gm11744
  gRNA
ccgtagatttaccaaccgag

SEQ ID NO: 20450 - DNA, 20 bp, Artificial Sequence
  MKO10020450_A_Gm11744
  gRNA
aaatctacggcgccacagca

SEQ ID NO: 20451 - DNA, 20 bp, Artificial Sequence
  MKO10020451_A_Gm11744
  gRNA
ttcacctgccggtagattga

SEQ ID NO: 20452 - DNA, 20 bp, Artificial Sequence
  MKO10020452_A_Gm11757
  gRNA
ataaccgcgtccaaagtgtg

SEQ ID NO: 20453 - DNA, 20 bp, Artificial Sequence
  MKO10020453_A_Gm11757
  gRNA
tctgaatacctgaggaactt

SEQ ID NO: 20454 - DNA, 20 bp, Artificial Sequence
  MKO10020454_A_Gm11757
  gRNA
caggtccgtgtgatagcccg

SEQ ID NO: 20455 - DNA, 20 bp, Artificial Sequence
  MKO10020455_A_Gm11758
  gRNA
ataaccgcgtccaaagtgtg

SEQ ID NO: 20456 - DNA, 20 bp, Artificial Sequence
  MKO10020456_A_Gm11758
  gRNA
tctgaatacctgaggaactt

SEQ ID NO: 20457 - DNA, 20 bp, Artificial Sequence
  MKO10020457_A_Gm11758
  gRNA
caggtccgtgtgatagcccg

SEQ ID NO: 20458 - DNA, 20 bp, Artificial Sequence
  MKO10020458_A_Gm11780
  gRNA
ggcggggctccgtcgttgta

SEQ ID NO: 20459 - DNA, 20 bp, Artificial Sequence
  MKO10020459_A_Gm11780
  gRNA
agcactaccggcctaaattg

SEQ ID NO: 20460 - DNA, 20 bp, Artificial Sequence
  MKO10020460_A_Gm11780
  gRNA
ctagatctgccatacaacga

SEQ ID NO: 20461 - DNA, 20 bp, Artificial Sequence
  MKO10020461_A_Gm11837
  gRNA
actcaacagtgtaagacgaa

SEQ ID NO: 20462 - DNA, 20 bp, Artificial Sequence
  MKO10020462_A_Gm11837
  gRNA
caccagtctccagttaaaaa

SEQ ID NO: 20463 - DNA, 20 bp, Artificial Sequence
  MKO10020463_A_Gm11837
  gRNA
tattaaagtatggaacctca

SEQ ID NO: 20464 - DNA, 20 bp, Artificial Sequence
  MKO10020464_A_Gm11937
  gRNA
accatgacaggctcctgctg

SEQ ID NO: 20465 - DNA, 20 bp, Artificial Sequence
  MKO10020465_A_Gm11937
  gRNA
gctcagcagcaggtgttgca

SEQ ID NO: 20466 - DNA, 20 bp, Artificial Sequence
  MKO10020466_A_Gm11937
  gRNA
cctggtgcagtggggcacac

SEQ ID NO: 20467 - DNA, 20 bp, Artificial Sequence
  MKO10020467_A_Gm11938
  gRNA
cctgtgtgccccattgcacc

SEQ ID NO: 20468 - DNA, 20 bp, Artificial Sequence
  MKO10020468_A_Gm11938
  gRNA
gcggcgacagggctcacaga

SEQ ID NO: 20469 - DNA, 20 bp, Artificial Sequence
  MKO10020469_A_Gm11938
  gRNA
agtcctgcaggtggtgcgac

SEQ ID NO: 20470 - DNA, 20 bp, Artificial Sequence
  MKO10020470_A_Gm11992
  gRNA
tgaagaattcaaccccgatc

SEQ ID NO: 20471 - DNA, 20 bp, Artificial Sequence
  MKO10020471_A_Gm11992
  gRNA
tgatccagtacctccgagca

SEQ ID NO: 20472 - DNA, 20 bp, Artificial Sequence
  MKO10020472_A_Gm11992
  gRNA
atgtgaatttgccccgtgct

SEQ ID NO: 20473 - DNA, 20 bp, Artificial Sequence
  MKO10020473_A_Gm12169
  gRNA
aaatgcgtccttgacaatcg

SEQ ID NO: 20474 - DNA, 20 bp, Artificial Sequence
  MKO10020474_A_Gm12169
  gRNA
agtcactcacgtatgatggt

SEQ ID NO: 20475 - DNA, 20 bp, Artificial Sequence
  MKO10020475_A_Gm12169
  gRNA
gctcgcaaggatcagcagtg

SEQ ID NO: 20476 - DNA, 20 bp, Artificial Sequence
  MKO10020476_A_Gm12171
  gRNA
atggcccctcaatgcgcaac

SEQ ID NO: 20477 - DNA, 20 bp, Artificial Sequence
  MKO10020477_A_Gm12171
  gRNA
caacttccagttgcgcattg

SEQ ID NO: 20478 - DNA, 20 bp, Artificial Sequence
  MKO10020478_A_Gm12171
  gRNA
gcaaggtgaagacgtcactg

SEQ ID NO: 20479 - DNA, 20 bp, Artificial Sequence
  MKO10020479_A_Gm12185
  gRNA
tcagataacggctcaacttt

SEQ ID NO: 20480 - DNA, 20 bp, Artificial Sequence
  MKO10020480_A_Gm12185
  gRNA
atcctctagggatgattcaa

SEQ ID NO: 20481 - DNA, 20 bp, Artificial Sequence
  MKO10020481_A_Gm12185
  gRNA
gctacatgccagacttccac

SEQ ID NO: 20482 - DNA, 20 bp, Artificial Sequence
  MKO10020482_A_Gm12250
  gRNA
tagcaaacgccggtctgtac

SEQ ID NO: 20483 - DNA, 20 bp, Artificial Sequence
  MKO10020483_A_Gm12250
  gRNA
ttcttctaaacccgatgcaa

SEQ ID NO: 20484 - DNA, 20 bp, Artificial Sequence
  MKO10020484_A_Gm12250
  gRNA
cccctgtcacagcgatgttc

SEQ ID NO: 20485 - DNA, 20 bp, Artificial Sequence
  MKO10020485_A_Gm12253
  gRNA
agcacgtgtgaatcctctaa

SEQ ID NO: 20486 - DNA, 20 bp, Artificial Sequence
  MKO10020486_A_Gm12253
  gRNA
gattcacacgtgcttgaatt

SEQ ID NO: 20487 - DNA, 20 bp, Artificial Sequence
  MKO10020487_A_Gm12253
  gRNA
actagaattctcggtaacag

SEQ ID NO: 20488 - DNA, 20 bp, Artificial Sequence
  MKO10020488_A_Gm12429
  gRNA
caaacccaccagtgtatctc

SEQ ID NO: 20489 - DNA, 20 bp, Artificial Sequence
  MKO10020489_A_Gm12429
  gRNA
ctccaaaagccttaatactt

SEQ ID NO: 20490 - DNA, 20 bp, Artificial Sequence
  MKO10020490_A_Gm12429
  gRNA
ctctgcacctcatcagcatg

SEQ ID NO: 20491 - DNA, 20 bp, Artificial Sequence
  MKO10020491_A_Gm12597
  gRNA
cctacaagagctgacccagc

SEQ ID NO: 20492 - DNA, 20 bp, Artificial Sequence
  MKO10020492_A_Gm12597
  gRNA
cctgctgggtcagctcttgt

SEQ ID NO: 20493 - DNA, 20 bp, Artificial Sequence
  MKO10020493_A_Gm12597
  gRNA
cagggatggcttgagcattc

SEQ ID NO: 20494 - DNA, 20 bp, Artificial Sequence
  MKO10020494_A_Gm12657
  gRNA
atgctataaacaccatttag

SEQ ID NO: 20495 - DNA, 20 bp, Artificial Sequence
  MKO10020495_A_Gm12657
  gRNA
cagcagaacactttctgccc

SEQ ID NO: 20496 - DNA, 20 bp, Artificial Sequence
  MKO10020496_A_Gm12657
  gRNA
agttaccacccgtggatttg

SEQ ID NO: 20497 - DNA, 20 bp, Artificial Sequence
  MKO10020497_A_Gm12695
  gRNA
aggagcttgactgttagtag

SEQ ID NO: 20498 - DNA, 20 bp, Artificial Sequence
  MKO10020498_A_Gm12695
  gRNA
ctttcaggtaaattatggag

SEQ ID NO: 20499 - DNA, 20 bp, Artificial Sequence
  MKO10020499_A_Gm12695
  gRNA
cccattgagctccaatttgt

SEQ ID NO: 20500 - DNA, 20 bp, Artificial Sequence
  MKO10020500_A_Gm12789
  gRNA
atttctagaaaaccaccgag

SEQ ID NO: 20501 - DNA, 20 bp, Artificial Sequence
  MKO10020501_A_Gm12789
  gRNA
gtgactaccttcacacctct

SEQ ID NO: 20502 - DNA, 20 bp, Artificial Sequence
  MKO10020502_A_Gm12789
  gRNA
ccccgtccagtgccagctgc

SEQ ID NO: 20503 - DNA, 20 bp, Artificial Sequence
  MKO10020503_A_Gm12794
  gRNA
gtatggactgggaaaaacga

SEQ ID NO: 20504 - DNA, 20 bp, Artificial Sequence
  MKO10020504_A_Gm12794
  gRNA
acgtacctaaatatgcactg

SEQ ID NO: 20505 - DNA, 20 bp, Artificial Sequence
  MKO10020505_A_Gm12794
  gRNA
actggacgaggtggtgaaga

SEQ ID NO: 20506 - DNA, 20 bp, Artificial Sequence
  MKO10020506_A_Gm12886
  gRNA
gttagagatcgctgcaatcg

SEQ ID NO: 20507 - DNA, 20 bp, Artificial Sequence
  MKO10020507_A_Gm12886
  gRNA
atgccctaagaatgtagcca

SEQ ID NO: 20508 - DNA, 20 bp, Artificial Sequence
  MKO10020508_A_Gm12886
  gRNA
cctgttgcagtcttgagcac

SEQ ID NO: 20509 - DNA, 20 bp, Artificial Sequence
  MKO10020509_A_Gm12887
  gRNA
cctacttgaatcttgatcac

SEQ ID NO: 20510 - DNA, 20 bp, Artificial Sequence
  MKO10020510_A_Gm12887
  gRNA
ccagtgatcaagattcaagt

SEQ ID NO: 20511 - DNA, 20 bp, Artificial Sequence
  MKO10020511_A_Gm12887
  gRNA
gttagatgtcattgtaatcg

SEQ ID NO: 20512 - DNA, 20 bp, Artificial Sequence
  MKO10020512_A_Gm12888
  gRNA
gttagacatccttatgatcg

SEQ ID NO: 20513 - DNA, 20 bp, Artificial Sequence
  MKO10020513_A_Gm12888
  gRNA
ccattgcacaagactacagt

SEQ ID NO: 20514 - DNA, 20 bp, Artificial Sequence
  MKO10020514_A_Gm12888
  gRNA
cctactgtagtcttgtgcaa

SEQ ID NO: 20515 - DNA, 20 bp, Artificial Sequence
  MKO10020515_A_Gm128
  gRNA
accccgaccgctaccacgat

SEQ ID NO: 20516 - DNA, 20 bp, Artificial Sequence
  MKO10020516_A_Gm128
  gRNA
gaagttccggcactaccggg

SEQ ID NO: 20517 - DNA, 20 bp, Artificial Sequence
  MKO10020517_A_Gm128
  gRNA
cccaggtagaaagaatccag

SEQ ID NO: 20518 - DNA, 20 bp, Artificial Sequence
  MKO10020518_A_Gm12942
  gRNA
cgtcttcttcgcgctcaccg

SEQ ID NO: 20519 - DNA, 20 bp, Artificial Sequence
  MKO10020519_A_Gm12942
  gRNA
cgggcgctgctatgtcgttc

SEQ ID NO: 20520 - DNA, 20 bp, Artificial Sequence
  MKO10020520_A_Gm12942
  gRNA
ccacttcttagctcgtacta

SEQ ID NO: 20521 - DNA, 20 bp, Artificial Sequence
  MKO10020521_A_Gm129
  gRNA
aggggcataccttgcttatc

SEQ ID NO: 20522 - DNA, 20 bp, Artificial Sequence
  MKO10020522_A_Gm129
  gRNA
tttcacagagaacgttatct

SEQ ID NO: 20523 - DNA, 20 bp, Artificial Sequence
  MKO10020523_A_Gm129
  gRNA
ccatcttgagtccgttcagt

SEQ ID NO: 20524 - DNA, 20 bp, Artificial Sequence
  MKO10020524_A_Gm12
  gRNA
ccgggcgccgcgtctcatct

SEQ ID NO: 20525 - DNA, 20 bp, Artificial Sequence
  MKO10020525_A_Gm12
  gRNA
gtgtcgttggggataccgtt

SEQ ID NO: 20526 - DNA, 20 bp, Artificial Sequence
  MKO10020526_A_Gm12
  gRNA
ttgtgacacgagtgccagcc

SEQ ID NO: 20527 - DNA, 20 bp, Artificial Sequence
  MKO10020527_A_Gm13011
  gRNA
ccccagcaataacatcgctc

SEQ ID NO: 20528 - DNA, 20 bp, Artificial Sequence
  MKO10020528_A_Gm13011
  gRNA
gcaggccttatctcaactac

SEQ ID NO: 20529 - DNA, 20 bp, Artificial Sequence
  MKO10020529_A_Gm13011
  gRNA
atggaacttacatgatgcag

SEQ ID NO: 20530 - DNA, 20 bp, Artificial Sequence
  MKO10020530_A_Gm13023
  gRNA
gcagtatatctagtccctca

SEQ ID NO: 20531 - DNA, 20 bp, Artificial Sequence
  MKO10020531_A_Gm13023
  gRNA
tgggtgctacatttatgacc

SEQ ID NO: 20532 - DNA, 20 bp, Artificial Sequence
  MKO10020532_A_Gm13023
  gRNA
tgcctgaatatggtgatctg

SEQ ID NO: 20533 - DNA, 20 bp, Artificial Sequence
  MKO10020533_A_Gm13040
  gRNA
atagatgcggatttctgatc

SEQ ID NO: 20534 - DNA, 20 bp, Artificial Sequence
  MKO10020534_A_Gm13040
  gRNA
gcttgcaatattgtcatgtc

SEQ ID NO: 20535 - DNA, 20 bp, Artificial Sequence
  MKO10020535_A_Gm13040
  gRNA
attcattgtacagattcatc

SEQ ID NO: 20536 - DNA, 20 bp, Artificial Sequence
  MKO10020536_A_Gm13043
  gRNA
gcttgcaatattgtcatgtc

SEQ ID NO: 20537 - DNA, 20 bp, Artificial Sequence
  MKO10020537_A_Gm13043
  gRNA
attcatcaggatgagcttcc

SEQ ID NO: 20538 - DNA, 20 bp, Artificial Sequence
  MKO10020538_A_Gm13043
  gRNA
acacgagcaattcattcatg

SEQ ID NO: 20539 - DNA, 20 bp, Artificial Sequence
  MKO10020539_A_Gm13051
  gRNA
aacaagaatgagtgtgtgtc

SEQ ID NO: 20540 - DNA, 20 bp, Artificial Sequence
  MKO10020540_A_Gm13051
  gRNA
ttcctccagtgagaagtcca

SEQ ID NO: 20541 - DNA, 20 bp, Artificial Sequence
  MKO10020541_A_Gm13051
  gRNA
acagggtctgttaactttca

SEQ ID NO: 20542 - DNA, 20 bp, Artificial Sequence
  MKO10020542_A_Gm13057
  gRNA
atagatgcggatttctgatc

SEQ ID NO: 20543 - DNA, 20 bp, Artificial Sequence
  MKO10020543_A_Gm13057
  gRNA
gcttgcaatattgtcatgtc

SEQ ID NO: 20544 - DNA, 20 bp, Artificial Sequence
  MKO10020544_A_Gm13057
  gRNA
attcattgtacagattcatc

SEQ ID NO: 20545 - DNA, 20 bp, Artificial Sequence
  MKO10020545_A_Gm13078
  gRNA
caccaagggctagtgatgca

SEQ ID NO: 20546 - DNA, 20 bp, Artificial Sequence
  MKO10020546_A_Gm13078
  gRNA
atcttcatcagggatcccac

SEQ ID NO: 20547 - DNA, 20 bp, Artificial Sequence
  MKO10020547_A_Gm13078
  gRNA
caaagcttcagaacatccag

SEQ ID NO: 20548 - DNA, 20 bp, Artificial Sequence
  MKO10020548_A_Gm13083
  gRNA
tttctctctaggtgctttaa

SEQ ID NO: 20549 - DNA, 20 bp, Artificial Sequence
  MKO10020549_A_Gm13083
  gRNA
cctgatgaagatacctcacc

SEQ ID NO: 20550 - DNA, 20 bp, Artificial Sequence
  MKO10020550_A_Gm13083
  gRNA
gaatgcagtgagtaatagca

SEQ ID NO: 20551 - DNA, 20 bp, Artificial Sequence
  MKO10020551_A_Gm13084
  gRNA
tagcaatacagcgtctactg

SEQ ID NO: 20552 - DNA, 20 bp, Artificial Sequence
  MKO10020552_A_Gm13084
  gRNA
gctggatcccatgaagtcga

SEQ ID NO: 20553 - DNA, 20 bp, Artificial Sequence
  MKO10020553_A_Gm13084
  gRNA
ctactcgccacccactctga

SEQ ID NO: 20554 - DNA, 20 bp, Artificial Sequence
  MKO10020554_A_Gm13088
  gRNA
atagctcagctgtgtcaact

SEQ ID NO: 20555 - DNA, 20 bp, Artificial Sequence
  MKO10020555_A_Gm13088
  gRNA
taagaaacgccagatcttct

SEQ ID NO: 20556 - DNA, 20 bp, Artificial Sequence
  MKO10020556_A_Gm13088
  gRNA
acagaagcatcctaattgtg

SEQ ID NO: 20557 - DNA, 20 bp, Artificial Sequence
  MKO10020557_A_Gm13102
  gRNA
ctctcaaagtagacctgctt

SEQ ID NO: 20558 - DNA, 20 bp, Artificial Sequence
  MKO10020558_A_Gm13102
  gRNA
tttgtgacatcagcaaatca

SEQ ID NO: 20559 - DNA, 20 bp, Artificial Sequence
  MKO10020559_A_Gm13102
  gRNA
gaaagctacaatgagcttca

SEQ ID NO: 20560 - DNA, 20 bp, Artificial Sequence
  MKO10020560_A_Gm13103
  gRNA
ctgagctatgagatgtatcc

SEQ ID NO: 20561 - DNA, 20 bp, Artificial Sequence
  MKO10020561_A_Gm13103
  gRNA
gatacatctcatagctcagc

SEQ ID NO: 20562 - DNA, 20 bp, Artificial Sequence
  MKO10020562_A_Gm13103
  gRNA
taagaaacgccagatcttgt

SEQ ID NO: 20563 - DNA, 20 bp, Artificial Sequence
  MKO10020563_A_Gm13119
  gRNA
gctgtgtgaaattgcagatt

SEQ ID NO: 20564 - DNA, 20 bp, Artificial Sequence
  MKO10020564_A_Gm13119
  gRNA
cagtctccagcatctcgccc

SEQ ID NO: 20565 - DNA, 20 bp, Artificial Sequence
  MKO10020565_A_Gm13119
  gRNA
acttgcagagagccattgac

SEQ ID NO: 20566 - DNA, 20 bp, Artificial Sequence
  MKO10020566_A_Gm13124
  gRNA
aaattgaccccctggacgac

SEQ ID NO: 20567 - DNA, 20 bp, Artificial Sequence
  MKO10020567_A_Gm13124
  gRNA
ggctgcggccattattgctc

SEQ ID NO: 20568 - DNA, 20 bp, Artificial Sequence
  MKO10020568_A_Gm13124
  gRNA
gtctccccaggggaatgtac

SEQ ID NO: 20569 - DNA, 20 bp, Artificial Sequence
  MKO10020569_A_Gm13125
  gRNA
ctccttacttgcgccaaatg

SEQ ID NO: 20570 - DNA, 20 bp, Artificial Sequence
  MKO10020570_A_Gm13125
  gRNA
gtttacgcaagttcctcatt

SEQ ID NO: 20571 - DNA, 20 bp, Artificial Sequence
  MKO10020571_A_Gm13125
  gRNA
ctgttgaagcaagcctacga

SEQ ID NO: 20572 - DNA, 20 bp, Artificial Sequence
  MKO10020572_A_Gm13128
  gRNA
tgtgatacacgttgtatcta

SEQ ID NO: 20573 - DNA, 20 bp, Artificial Sequence
  MKO10020573_A_Gm13128
  gRNA
gctgatagataaacccaact

SEQ ID NO: 20574 - DNA, 20 bp, Artificial Sequence
  MKO10020574_A_Gm13128
  gRNA
tggagcattagaagtgtcca

SEQ ID NO: 20575 - DNA, 20 bp, Artificial Sequence
  MKO10020575_A_Gm13139
  gRNA
aacaagaatgagtgtgtgtc

SEQ ID NO: 20576 - DNA, 20 bp, Artificial Sequence
  MKO10020576_A_Gm13139
  gRNA
ttcctccagtgagaagtcca

SEQ ID NO: 20577 - DNA, 20 bp, Artificial Sequence
  MKO10020577_A_Gm13139
  gRNA
acagggtctgttaaccttca

SEQ ID NO: 20578 - DNA, 20 bp, Artificial Sequence
  MKO10020578_A_Gm13152
  gRNA
gtactggctgtcttcatcca

SEQ ID NO: 20579 - DNA, 20 bp, Artificial Sequence
  MKO10020579_A_Gm13152
  gRNA
tacctcacaaatgtagtgaa

SEQ ID NO: 20580 - DNA, 20 bp, Artificial Sequence
  MKO10020580_A_Gm13152
  gRNA
tgtggccgtggaattctcac

SEQ ID NO: 20581 - DNA, 20 bp, Artificial Sequence
  MKO10020581_A_Gm13154
  gRNA
atcacagctctcttcaatac

SEQ ID NO: 20582 - DNA, 20 bp, Artificial Sequence
  MKO10020582_A_Gm13154
  gRNA
gatccatcttagaagtcatc

SEQ ID NO: 20583 - DNA, 20 bp, Artificial Sequence
  MKO10020583_A_Gm13154
  gRNA
aacaagaatgagtgagtctc

SEQ ID NO: 20584 - DNA, 20 bp, Artificial Sequence
  MKO10020584_A_Gm13157
  gRNA
cttgaatattcacgtgttca

SEQ ID NO: 20585 - DNA, 20 bp, Artificial Sequence
  MKO10020585_A_Gm13157
  gRNA
cgtggccttgtacttctcac

SEQ ID NO: 20586 - DNA, 20 bp, Artificial Sequence
  MKO10020586_A_Gm13157
  gRNA
aacaagaatgagtgtgtctc

SEQ ID NO: 20587 - DNA, 20 bp, Artificial Sequence
  MKO10020587_A_Gm13177
  gRNA
tcagtaccatggctatcccg

SEQ ID NO: 20588 - DNA, 20 bp, Artificial Sequence
  MKO10020588_A_Gm13177
  gRNA
gtgtcctcagaaggccgtcg

SEQ ID NO: 20589 - DNA, 20 bp, Artificial Sequence
  MKO10020589_A_Gm13177
  gRNA
gcaccactgaatccgtctgc

SEQ ID NO: 20590 - DNA, 20 bp, Artificial Sequence
  MKO10020590_A_Gm13178
  gRNA
ccctctcgggtggtgatctc

SEQ ID NO: 20591 - DNA, 20 bp, Artificial Sequence
  MKO10020591_A_Gm13178
  gRNA
tccagagatcaccacccgag

SEQ ID NO: 20592 - DNA, 20 bp, Artificial Sequence
  MKO10020592_A_Gm13178
  gRNA
tgaagcatccagtcaagcta

SEQ ID NO: 20593 - DNA, 20 bp, Artificial Sequence
  MKO10020593_A_Gm13212
  gRNA
actgtacaaggatgtaatgt

SEQ ID NO: 20594 - DNA, 20 bp, Artificial Sequence
  MKO10020594_A_Gm13212
  gRNA
aacaagaatgagtgtgtctc

SEQ ID NO: 20595 - DNA, 20 bp, Artificial Sequence
  MKO10020595_A_Gm13212
  gRNA
ttcctccagtgagaagtaca

SEQ ID NO: 20596 - DNA, 20 bp, Artificial Sequence
  MKO10020596_A_Gm1322
  gRNA
aaaagcgttcaatcctgcgc

SEQ ID NO: 20597 - DNA, 20 bp, Artificial Sequence
  MKO10020597_A_Gm1322
  gRNA
attccctgactggccggcgc

SEQ ID NO: 20598 - DNA, 20 bp, Artificial Sequence
  MKO10020598_A_Gm1322
  gRNA
caggcatgatggacatacgt

SEQ ID NO: 20599 - DNA, 20 bp, Artificial Sequence
  MKO10020599_A_Gm13242
  gRNA
gtattcatcagaattcatac

SEQ ID NO: 20600 - DNA, 20 bp, Artificial Sequence
  MKO10020600_A_Gm13242
  gRNA
tctctgtgattagtgttata

SEQ ID NO: 20601 - DNA, 20 bp, Artificial Sequence
  MKO10020601_A_Gm13242
  gRNA
ttgttcttctcccagattct

SEQ ID NO: 20602 - DNA, 20 bp, Artificial Sequence
  MKO10020602_A_Gm13247
  gRNA
gttcaaagccacatcgttga

SEQ ID NO: 20603 - DNA, 20 bp, Artificial Sequence
  MKO10020603_A_Gm13247
  gRNA
ctttactgacaaattcattc

SEQ ID NO: 20604 - DNA, 20 bp, Artificial Sequence
  MKO10020604_A_Gm13247
  gRNA
ctaaagaatgagtgcctctc

SEQ ID NO: 20605 - DNA, 20 bp, Artificial Sequence
  MKO10020605_A_Gm13251
  gRNA
aacaagaatgagtgtgtgtc

SEQ ID NO: 20606 - DNA, 20 bp, Artificial Sequence
  MKO10020606_A_Gm13251
  gRNA
ttcctccagtgagaagtcca

SEQ ID NO: 20607 - DNA, 20 bp, Artificial Sequence
  MKO10020607_A_Gm13251
  gRNA
acagggtctgttaaccttca

SEQ ID NO: 20608 - DNA, 20 bp, Artificial Sequence
  MKO10020608_A_Gm13271
  gRNA
gcggggtttcgctatgctcc

SEQ ID NO: 20609 - DNA, 20 bp, Artificial Sequence
  MKO10020609_A_Gm13271
  gRNA
taaatctgggagcctacacc

SEQ ID NO: 20610 - DNA, 20 bp, Artificial Sequence
  MKO10020610_A_Gm13271
  gRNA
agaacactcggaagtaggtg

SEQ ID NO: 20611 - DNA, 20 bp, Artificial Sequence
  MKO10020611_A_Gm13272
  gRNA
ctgggaggtccacttgcaat

SEQ ID NO: 20612 - DNA, 20 bp, Artificial Sequence
  MKO10020612_A_Gm13272
  gRNA
gggcctcttctcgcagacag

SEQ ID NO: 20613 - DNA, 20 bp, Artificial Sequence
  MKO10020613_A_Gm13272
  gRNA
gctgcctgtgcatctattcc

SEQ ID NO: 20614 - DNA, 20 bp, Artificial Sequence
  MKO10020614_A_Gm13275
  gRNA
gctgcctgtgcatatattcc

SEQ ID NO: 20615 - DNA, 20 bp, Artificial Sequence
  MKO10020615_A_Gm13275
  gRNA
gggcctcttctcgcagacag

SEQ ID NO: 20616 - DNA, 20 bp, Artificial Sequence
  MKO10020616_A_Gm13275
  gRNA
ggaggacctgcctgagggtc

SEQ ID NO: 20617 - DNA, 20 bp, Artificial Sequence
  MKO10020617_A_Gm13276
  gRNA
gggcctcttctcgcagacag

SEQ ID NO: 20618 - DNA, 20 bp, Artificial Sequence
  MKO10020618_A_Gm13276
  gRNA
gctgcctgtgcatctattcc

SEQ ID NO: 20619 - DNA, 20 bp, Artificial Sequence
  MKO10020619_A_Gm13276
  gRNA
ggaggacctgcctgaggctc

SEQ ID NO: 20620 - DNA, 20 bp, Artificial Sequence
  MKO10020620_A_Gm13277
  gRNA
gggcctcttctcgcagacag

SEQ ID NO: 20621 - DNA, 20 bp, Artificial Sequence
  MKO10020621_A_Gm13277
  gRNA
gctgcctgtgcatctattcc

SEQ ID NO: 20622 - DNA, 20 bp, Artificial Sequence
  MKO10020622_A_Gm13277
  gRNA
ggaggacctgcttgagggtc

SEQ ID NO: 20623 - DNA, 20 bp, Artificial Sequence
  MKO10020623_A_Gm13278
  gRNA
gggcctcttctcgcagacag

SEQ ID NO: 20624 - DNA, 20 bp, Artificial Sequence
  MKO10020624_A_Gm13278
  gRNA
gctgcctgtgcatctattcc

SEQ ID NO: 20625 - DNA, 20 bp, Artificial Sequence
  MKO10020625_A_Gm13278
  gRNA
ggaggacctgcttgagggtc

SEQ ID NO: 20626 - DNA, 20 bp, Artificial Sequence
  MKO10020626_A_Gm13279
  gRNA
gggcctcttctcgcagacag

SEQ ID NO: 20627 - DNA, 20 bp, Artificial Sequence
  MKO10020627_A_Gm13279
  gRNA
gctgcctgtgcatctattcc

SEQ ID NO: 20628 - DNA, 20 bp, Artificial Sequence
  MKO10020628_A_Gm13279
  gRNA
ggaggacctgcttgagggtc

SEQ ID NO: 20629 - DNA, 20 bp, Artificial Sequence
  MKO10020629_A_Gm13280
  gRNA
cctcacctgctgcactagac

SEQ ID NO: 20630 - DNA, 20 bp, Artificial Sequence
  MKO10020630_A_Gm13280
  gRNA
gcaagcctgtctagtgcagc

SEQ ID NO: 20631 - DNA, 20 bp, Artificial Sequence
  MKO10020631_A_Gm13280
  gRNA
agccatccctgtcctaagtg

SEQ ID NO: 20632 - DNA, 20 bp, Artificial Sequence
  MKO10020632_A_Gm13283
  gRNA
cctccaccgctttgacacag

SEQ ID NO: 20633 - DNA, 20 bp, Artificial Sequence
  MKO10020633_A_Gm13283
  gRNA
agcagatctccgaagcgtgc

SEQ ID NO: 20634 - DNA, 20 bp, Artificial Sequence
  MKO10020634_A_Gm13283
  gRNA
gggcctcttctcgcagacag

SEQ ID NO: 20635 - DNA, 20 bp, Artificial Sequence
  MKO10020635_A_Gm13285
  gRNA
gggcctcttctcgcagacag

SEQ ID NO: 20636 - DNA, 20 bp, Artificial Sequence
  MKO10020636_A_Gm13285
  gRNA
gctgcctgtgcatctattcc

SEQ ID NO: 20637 - DNA, 20 bp, Artificial Sequence
  MKO10020637_A_Gm13285
  gRNA
ggaggacctgcctgagggtc

SEQ ID NO: 20638 - DNA, 20 bp, Artificial Sequence
  MKO10020638_A_Gm13286
  gRNA
gcagatctgcctggcacaag

SEQ ID NO: 20639 - DNA, 20 bp, Artificial Sequence
  MKO10020639_A_Gm13286
  gRNA
gtccagcgccctcttgtgcc

SEQ ID NO: 20640 - DNA, 20 bp, Artificial Sequence
  MKO10020640_A_Gm13286
  gRNA
taaatctgggagtctgcacc

SEQ ID NO: 20641 - DNA, 20 bp, Artificial Sequence
  MKO10020641_A_Gm13287
  gRNA
gggcctcttctcgcagacag

SEQ ID NO: 20642 - DNA, 20 bp, Artificial Sequence
  MKO10020642_A_Gm13287
  gRNA
gctgcctgtgcatctattcc

SEQ ID NO: 20643 - DNA, 20 bp, Artificial Sequence
  MKO10020643_A_Gm13287
  gRNA
ggaggacctgcctgagggtc

SEQ ID NO: 20644 - DNA, 20 bp, Artificial Sequence
  MKO10020644_A_Gm13288
  gRNA
gggcctcttctcgcagacag

SEQ ID NO: 20645 - DNA, 20 bp, Artificial Sequence
  MKO10020645_A_Gm13288
  gRNA
gctgcctgtgcatctattcc

SEQ ID NO: 20646 - DNA, 20 bp, Artificial Sequence
  MKO10020646_A_Gm13288
  gRNA
ggaggacctgcttgagggtc

SEQ ID NO: 20647 - DNA, 20 bp, Artificial Sequence
  MKO10020647_A_Gm13289
  gRNA
gggcctcttctcgcagacag

SEQ ID NO: 20648 - DNA, 20 bp, Artificial Sequence
  MKO10020648_A_Gm13289
  gRNA
gctgcctgtgcatctattcc

SEQ ID NO: 20649 - DNA, 20 bp, Artificial Sequence
  MKO10020649_A_Gm13289
  gRNA
ggaggacctgcttgagggtc

SEQ ID NO: 20650 - DNA, 20 bp, Artificial Sequence
  MKO10020650_A_Gm13290
  gRNA
gggcctcttctcgcagacag

SEQ ID NO: 20651 - DNA, 20 bp, Artificial Sequence
  MKO10020651_A_Gm13290
  gRNA
gctgcctgtgcatctattcc

SEQ ID NO: 20652 - DNA, 20 bp, Artificial Sequence
  MKO10020652_A_Gm13290
  gRNA
ggaggacctgcttgagggtc

SEQ ID NO: 20653 - DNA, 20 bp, Artificial Sequence
  MKO10020653_A_Gm13304
  gRNA
ctccttggtaccttgggtcc

SEQ ID NO: 20654 - DNA, 20 bp, Artificial Sequence
  MKO10020654_A_Gm13304
  gRNA
gactctgagcctccttagcc

SEQ ID NO: 20655 - DNA, 20 bp, Artificial Sequence
  MKO10020655_A_Gm13304
  gRNA
agcgcactcacaggattgcc

SEQ ID NO: 20656 - DNA, 20 bp, Artificial Sequence
  MKO10020656_A_Gm13305
  gRNA
cacttacccagcactcactc

SEQ ID NO: 20657 - DNA, 20 bp, Artificial Sequence
  MKO10020657_A_Gm13305
  gRNA
cccgtgatgctgtgctgccc

SEQ ID NO: 20658 - DNA, 20 bp, Artificial Sequence
  MKO10020658_A_Gm13305
  gRNA
cctccaggactccagtgtcc

SEQ ID NO: 20659 - DNA, 20 bp, Artificial Sequence
  MKO10020659_A_Gm13306
  gRNA
ttctgcttagtcttgttcca

SEQ ID NO: 20660 - DNA, 20 bp, Artificial Sequence
  MKO10020660_A_Gm13306
  gRNA
aacaagccagagactaagtc

SEQ ID NO: 20661 - DNA, 20 bp, Artificial Sequence
  MKO10020661_A_Gm13306
  gRNA
aacttacctgcttcaggagc

SEQ ID NO: 20662 - DNA, 20 bp, Artificial Sequence
  MKO10020662_A_Gm13308
  gRNA
gcctggacatgtcgcgattg

SEQ ID NO: 20663 - DNA, 20 bp, Artificial Sequence
  MKO10020663_A_Gm13308
  gRNA
atacgaggtggcgctggaag

SEQ ID NO: 20664 - DNA, 20 bp, Artificial Sequence
  MKO10020664_A_Gm13308
  gRNA
ctgcgccacattcgcaaccg

SEQ ID NO: 20665 - DNA, 20 bp, Artificial Sequence
  MKO10020665_A_Gm13547
  gRNA
gacaatcagttagagccgaa

SEQ ID NO: 20666 - DNA, 20 bp, Artificial Sequence
  MKO10020666_A_Gm13547
  gRNA
gagagacatctgccagacga

SEQ ID NO: 20667 - DNA, 20 bp, Artificial Sequence
  MKO10020667_A_Gm13547
  gRNA
tgcaggagcagtgccatccg

SEQ ID NO: 20668 - DNA, 20 bp, Artificial Sequence
  MKO10020668_A_Gm136
  gRNA
gcccatcatattgtcaagag

SEQ ID NO: 20669 - DNA, 20 bp, Artificial Sequence
  MKO10020669_A_Gm136
  gRNA
actgctccaaaaacaagccg

SEQ ID NO: 20670 - DNA, 20 bp, Artificial Sequence
  MKO10020670_A_Gm136
  gRNA
ctgagccatgccgtagtaga

SEQ ID NO: 20671 - DNA, 20 bp, Artificial Sequence
  MKO10020671_A_Gm13718
  gRNA
ttcccaacatcggatgggtc

SEQ ID NO: 20672 - DNA, 20 bp, Artificial Sequence
  MKO10020672_A_Gm13718
  gRNA
gggtctagtccaatgctgac

SEQ ID NO: 20673 - DNA, 20 bp, Artificial Sequence
  MKO10020673_A_Gm13718
  gRNA
cctgacagaaaactacgtaa

SEQ ID NO: 20674 - DNA, 20 bp, Artificial Sequence
  MKO10020674_A_Gm13769
  gRNA
gagcagacaagtttaagcac

SEQ ID NO: 20675 - DNA, 20 bp, Artificial Sequence
  MKO10020675_A_Gm13769
  gRNA
tactagcatcatgaaccgac

SEQ ID NO: 20676 - DNA, 20 bp, Artificial Sequence
  MKO10020676_A_Gm13769
  gRNA
gaaataatggtcaatgatat

SEQ ID NO: 20677 - DNA, 20 bp, Artificial Sequence
  MKO10020677_A_Gm13826
  gRNA
ctttaaaaacagatgtgcgc

SEQ ID NO: 20678 - DNA, 20 bp, Artificial Sequence
  MKO10020678_A_Gm13826
  gRNA
aactgttgaatgttaactgc

SEQ ID NO: 20679 - DNA, 20 bp, Artificial Sequence
  MKO10020679_A_Gm13826
  gRNA
cgcataccagaagtgtgaga

SEQ ID NO: 20680 - DNA, 20 bp, Artificial Sequence
  MKO10020680_A_Gm13871
  gRNA
ataaccgcgtccaaagtgtg

SEQ ID NO: 20681 - DNA, 20 bp, Artificial Sequence
  MKO10020681_A_Gm13871
  gRNA
tctgaatacctgaggaactt

SEQ ID NO: 20682 - DNA, 20 bp, Artificial Sequence
  MKO10020682_A_Gm13871
  gRNA
caggtccgtgtgatagcccg

SEQ ID NO: 20683 - DNA, 20 bp, Artificial Sequence
  MKO10020683_A_Gm13889
  gRNA
ccggcgacgagccgactcag

SEQ ID NO: 20684 - DNA, 20 bp, Artificial Sequence
  MKO10020684_A_Gm13889
  gRNA
ccgctgagtcggctcgtcgc

SEQ ID NO: 20685 - DNA, 20 bp, Artificial Sequence
  MKO10020685_A_Gm13889
  gRNA
gcgcccgggctctccggggg

SEQ ID NO: 20686 - DNA, 20 bp, Artificial Sequence
  MKO10020686_A_Gm14085
  gRNA
accacttcagacaacgtctc

SEQ ID NO: 20687 - DNA, 20 bp, Artificial Sequence
  MKO10020687_A_Gm14085
  gRNA
tgcgcaaagaaacacactag

SEQ ID NO: 20688 - DNA, 20 bp, Artificial Sequence
  MKO10020688_A_Gm14085
  gRNA
gcctgagacgttgtctgaag

SEQ ID NO: 20689 - DNA, 20 bp, Artificial Sequence
  MKO10020689_A_Gm14092
  gRNA
tgactcttgcattaacaccg

SEQ ID NO: 20690 - DNA, 20 bp, Artificial Sequence
  MKO10020690_A_Gm14092
  gRNA
tgatcaattatagctcccac

SEQ ID NO: 20691 - DNA, 20 bp, Artificial Sequence
  MKO10020691_A_Gm14092
  gRNA
agttaagaatccagcgactt

SEQ ID NO: 20692 - DNA, 20 bp, Artificial Sequence
  MKO10020692_A_Gm14124
  gRNA
gagacgacgagaacatgcaa

SEQ ID NO: 20693 - DNA, 20 bp, Artificial Sequence
  MKO10020693_A_Gm14124
  gRNA
taccataagagagttcgtac

SEQ ID NO: 20694 - DNA, 20 bp, Artificial Sequence
  MKO10020694_A_Gm14124
  gRNA
gaagatgttcttccgtatta

SEQ ID NO: 20695 - DNA, 20 bp, Artificial Sequence
  MKO10020695_A_Gm14137
  gRNA
ccctgtcgatgcagtctccg

SEQ ID NO: 20696 - DNA, 20 bp, Artificial Sequence
  MKO10020696_A_Gm14137
  gRNA
agctctctcggtagaggcgt

SEQ ID NO: 20697 - DNA, 20 bp, Artificial Sequence
  MKO10020697_A_Gm14137
  gRNA
gccacggagactgcatcgac

SEQ ID NO: 20698 - DNA, 20 bp, Artificial Sequence
  MKO10020698_A_Gm14139
  gRNA
gttcctgtctgaatctgagc

SEQ ID NO: 20699 - DNA, 20 bp, Artificial Sequence
  MKO10020699_A_Gm14139
  gRNA
gaagatgctcttccgtatta

SEQ ID NO: 20700 - DNA, 20 bp, Artificial Sequence
  MKO10020700_A_Gm14139
  gRNA
atgctaaatctttaccacac

SEQ ID NO: 20701 - DNA, 20 bp, Artificial Sequence
  MKO10020701_A_Gm14151
  gRNA
tatcagcgaagatgaagaga

SEQ ID NO: 20702 - DNA, 20 bp, Artificial Sequence
  MKO10020702_A_Gm14151
  gRNA
tctccacttacctgatacca

SEQ ID NO: 20703 - DNA, 20 bp, Artificial Sequence
  MKO10020703_A_Gm14151
  gRNA
tctgtttgaagagcatttag

SEQ ID NO: 20704 - DNA, 20 bp, Artificial Sequence
  MKO10020704_A_Gm14288
  gRNA
cgtgcatgtgaacttcactc

SEQ ID NO: 20705 - DNA, 20 bp, Artificial Sequence
  MKO10020705_A_Gm14288
  gRNA
tatagctgtgagattcctat

SEQ ID NO: 20706 - DNA, 20 bp, Artificial Sequence
  MKO10020706_A_Gm14288
  gRNA
actgtgtttaggttacagtt

SEQ ID NO: 20707 - DNA, 20 bp, Artificial Sequence
  MKO10020707_A_Gm14295
  gRNA
tatagctgtgagattcctgt

SEQ ID NO: 20708 - DNA, 20 bp, Artificial Sequence
  MKO10020708_A_Gm14295
  gRNA
gtgtgatgctagagacctac

SEQ ID NO: 20709 - DNA, 20 bp, Artificial Sequence
  MKO10020709_A_Gm14295
  gRNA
gacttcgagaagtttgaaaa

SEQ ID NO: 20710 - DNA, 20 bp, Artificial Sequence
  MKO10020710_A_Gm14305
  gRNA
gagagtcctccaaatacata

SEQ ID NO: 20711 - DNA, 20 bp, Artificial Sequence
  MKO10020711_A_Gm14305
  gRNA
tatagctgtgagattcttat

SEQ ID NO: 20712 - DNA, 20 bp, Artificial Sequence
  MKO10020712_A_Gm14305
  gRNA
cgtgcatgtgaacttcactc

SEQ ID NO: 20713 - DNA, 20 bp, Artificial Sequence
  MKO10020713_A_Gm14306
  gRNA
tgtgttatgcgtgactctac

SEQ ID NO: 20714 - DNA, 20 bp, Artificial Sequence
  MKO10020714_A_Gm14306
  gRNA
caagctcagaactccaaaca

SEQ ID NO: 20715 - DNA, 20 bp, Artificial Sequence
  MKO10020715_A_Gm14306
  gRNA
tatagctgtgagattcctat

SEQ ID NO: 20716 - DNA, 20 bp, Artificial Sequence
  MKO10020716_A_Gm14308
  gRNA
cgtgcatgtgaacttcactc

SEQ ID NO: 20717 - DNA, 20 bp, Artificial Sequence
  MKO10020717_A_Gm14308
  gRNA
tatagctgtgagattcttat

SEQ ID NO: 20718 - DNA, 20 bp, Artificial Sequence
  MKO10020718_A_Gm14308
  gRNA
actgggtttaggttacattt

SEQ ID NO: 20719 - DNA, 20 bp, Artificial Sequence
  MKO10020719_A_Gm14322
  gRNA
gagagtatagcttactgcaa

SEQ ID NO: 20720 - DNA, 20 bp, Artificial Sequence
  MKO10020720_A_Gm14322
  gRNA
tatagctgtgagattcctat

SEQ ID NO: 20721 - DNA, 20 bp, Artificial Sequence
  MKO10020721_A_Gm14322
  gRNA
cgtgcatgtgaacttcactc

SEQ ID NO: 20722 - DNA, 20 bp, Artificial Sequence
  MKO10020722_A_Gm14325
  gRNA
tcaatgtggaaattgtgagc

SEQ ID NO: 20723 - DNA, 20 bp, Artificial Sequence
  MKO10020723_A_Gm14325
  gRNA
agaaaacaaaatgtagcaaa

SEQ ID NO: 20724 - DNA, 20 bp, Artificial Sequence
  MKO10020724_A_Gm14325
  gRNA
gacttctagaagtttgaaga

SEQ ID NO: 20725 - DNA, 20 bp, Artificial Sequence
  MKO10020725_A_Gm14326
  gRNA
acattcatatgatttctctc

SEQ ID NO: 20726 - DNA, 20 bp, Artificial Sequence
  MKO10020726_A_Gm14326
  gRNA
ccctatgaatggaaccaatg

SEQ ID NO: 20727 - DNA, 20 bp, Artificial Sequence
  MKO10020727_A_Gm14326
  gRNA
agtcacctatgatgatgtgc

SEQ ID NO: 20728 - DNA, 20 bp, Artificial Sequence
  MKO10020728_A_Gm14345
  gRNA
caaccactgttgtttgtaaa

SEQ ID NO: 20729 - DNA, 20 bp, Artificial Sequence
  MKO10020729_A_Gm14345
  gRNA
acttggagagaatcacacca

SEQ ID NO: 20730 - DNA, 20 bp, Artificial Sequence
  MKO10020730_A_Gm14345
  gRNA
atcttgttcaagaatagttg

SEQ ID NO: 20731 - DNA, 20 bp, Artificial Sequence
  MKO10020731_A_Gm14346
  gRNA
acttggagagaatcacacca

SEQ ID NO: 20732 - DNA, 20 bp, Artificial Sequence
  MKO10020732_A_Gm14346
  gRNA
caaccactgttgtttgtaaa

SEQ ID NO: 20733 - DNA, 20 bp, Artificial Sequence
  MKO10020733_A_Gm14346
  gRNA
aaatctgatcattaagaatg

SEQ ID NO: 20734 - DNA, 20 bp, Artificial Sequence
  MKO10020734_A_Gm14347
  gRNA
caaccactgttgtttgtaaa

SEQ ID NO: 20735 - DNA, 20 bp, Artificial Sequence
  MKO10020735_A_Gm14347
  gRNA
acttggagagaatcacacca

SEQ ID NO: 20736 - DNA, 20 bp, Artificial Sequence
  MKO10020736_A_Gm14347
  gRNA
atcttgttcaagaatagttg

SEQ ID NO: 20737 - DNA, 20 bp, Artificial Sequence
  MKO10020737_A_Gm14351
  gRNA
acttggagagaatcacacca

SEQ ID NO: 20738 - DNA, 20 bp, Artificial Sequence
  MKO10020738_A_Gm14351
  gRNA
caaccactgttgtttgtaaa

SEQ ID NO: 20739 - DNA, 20 bp, Artificial Sequence
  MKO10020739_A_Gm14351
  gRNA
aaatctgatcattaagaatg

SEQ ID NO: 20740 - DNA, 20 bp, Artificial Sequence
  MKO10020740_A_Gm14374
  gRNA
caaccactgttgtttgtaaa

SEQ ID NO: 20741 - DNA, 20 bp, Artificial Sequence
  MKO10020741_A_Gm14374
  gRNA
acttggagagaatcacacca

SEQ ID NO: 20742 - DNA, 20 bp, Artificial Sequence
  MKO10020742_A_Gm14374
  gRNA
atcttgttcaagaatagttg

SEQ ID NO: 20743 - DNA, 20 bp, Artificial Sequence
  MKO10020743_A_Gm14378
  gRNA
cttcagctttcgcctgcgtc

SEQ ID NO: 20744 - DNA, 20 bp, Artificial Sequence
  MKO10020744_A_Gm14378
  gRNA
tccgggtgtaccgacctgcc

SEQ ID NO: 20745 - DNA, 20 bp, Artificial Sequence
  MKO10020745_A_Gm14378
  gRNA
tggcccgtccttcaccgaga

SEQ ID NO: 20746 - DNA, 20 bp, Artificial Sequence
  MKO10020746_A_Gm14391
  gRNA
agtcacctatgatgacgtgc

SEQ ID NO: 20747 - DNA, 20 bp, Artificial Sequence
  MKO10020747_A_Gm14391
  gRNA
tatagctgtgagattcctat

SEQ ID NO: 20748 - DNA, 20 bp, Artificial Sequence
  MKO10020748_A_Gm14391
  gRNA
actgggtttaggttacattt

SEQ ID NO: 20749 - DNA, 20 bp, Artificial Sequence
  MKO10020749_A_Gm14393
  gRNA
tctgggtttaggttacattt

SEQ ID NO: 20750 - DNA, 20 bp, Artificial Sequence
  MKO10020750_A_Gm14393
  gRNA
cgtgcatgtcaacttcactc

SEQ ID NO: 20751 - DNA, 20 bp, Artificial Sequence
  MKO10020751_A_Gm14393
  gRNA
tatagctgtgagattcctat

SEQ ID NO: 20752 - DNA, 20 bp, Artificial Sequence
  MKO10020752_A_Gm14420
  gRNA
gcacaaagtggtactctcca

SEQ ID NO: 20753 - DNA, 20 bp, Artificial Sequence
  MKO10020753_A_Gm14420
  gRNA
tatgtgttcgctcatgtcct

SEQ ID NO: 20754 - DNA, 20 bp, Artificial Sequence
  MKO10020754_A_Gm14420
  gRNA
tatagctgtgagattcctat

SEQ ID NO: 20755 - DNA, 20 bp, Artificial Sequence
  MKO10020755_A_Gm14430
  gRNA
tctgttcttagtgtcttcgc

SEQ ID NO: 20756 - DNA, 20 bp, Artificial Sequence
  MKO10020756_A_Gm14430
  gRNA
caagctcagaacttcacaca

SEQ ID NO: 20757 - DNA, 20 bp, Artificial Sequence
  MKO10020757_A_Gm14430
  gRNA
cgtgcatgtgaacttcactc

SEQ ID NO: 20758 - DNA, 20 bp, Artificial Sequence
  MKO10020758_A_Gm14431
  gRNA
tgtgttatgcgtgactctac

SEQ ID NO: 20759 - DNA, 20 bp, Artificial Sequence
  MKO10020759_A_Gm14431
  gRNA
caagctcagaactccaaaca

SEQ ID NO: 20760 - DNA, 20 bp, Artificial Sequence
  MKO10020760_A_Gm14431
  gRNA
tatagctgtgagattcctat

SEQ ID NO: 20761 - DNA, 20 bp, Artificial Sequence
  MKO10020761_A_Gm14434
  gRNA
cgtgcatgtgaacttcactc

SEQ ID NO: 20762 - DNA, 20 bp, Artificial Sequence
  MKO10020762_A_Gm14434
  gRNA
tatagctgtgagattcttat

SEQ ID NO: 20763 - DNA, 20 bp, Artificial Sequence
  MKO10020763_A_Gm14434
  gRNA
actgggtttaggttacattt

SEQ ID NO: 20764 - DNA, 20 bp, Artificial Sequence
  MKO10020764_A_Gm14436
  gRNA
tgtgttatgcgtgactctac

SEQ ID NO: 20765 - DNA, 20 bp, Artificial Sequence
  MKO10020765_A_Gm14436
  gRNA
caagctcagaactccaaaca

SEQ ID NO: 20766 - DNA, 20 bp, Artificial Sequence
  MKO10020766_A_Gm14436
  gRNA
tatagctgtgagattcctat

SEQ ID NO: 20767 - DNA, 20 bp, Artificial Sequence
  MKO10020767_A_Gm14440
  gRNA
cgtgcatgtgaacttcactc

SEQ ID NO: 20768 - DNA, 20 bp, Artificial Sequence
  MKO10020768_A_Gm14440
  gRNA
tatagctgtgagattcctat

SEQ ID NO: 20769 - DNA, 20 bp, Artificial Sequence
  MKO10020769_A_Gm14440
  gRNA
tactgtgtttaggttacagt

SEQ ID NO: 20770 - DNA, 20 bp, Artificial Sequence
  MKO10020770_A_Gm14446
  gRNA
gtttgtagacaaacccaagt

SEQ ID NO: 20771 - DNA, 20 bp, Artificial Sequence
  MKO10020771_A_Gm14446
  gRNA
agcagaccaatccatccatt

SEQ ID NO: 20772 - DNA, 20 bp, Artificial Sequence
  MKO10020772_A_Gm14446
  gRNA
aagcctttacctcacgttgc

SEQ ID NO: 20773 - DNA, 20 bp, Artificial Sequence
  MKO10020773_A_Gm14458
  gRNA
gaatgcagcagaactatgac

SEQ ID NO: 20774 - DNA, 20 bp, Artificial Sequence
  MKO10020774_A_Gm14458
  gRNA
acaggctgagcttgtcaaag

SEQ ID NO: 20775 - DNA, 20 bp, Artificial Sequence
  MKO10020775_A_Gm14458
  gRNA
tgaacatctctgcactggtc

SEQ ID NO: 20776 - DNA, 20 bp, Artificial Sequence
  MKO10020776_A_Gm14459
  gRNA
ggatcaggacaagcaatgcc

SEQ ID NO: 20777 - DNA, 20 bp, Artificial Sequence
  MKO10020777_A_Gm14459
  gRNA
attgaagttcatgacagtaa

SEQ ID NO: 20778 - DNA, 20 bp, Artificial Sequence
  MKO10020778_A_Gm14459
  gRNA
gagtatgattccaacttggc

SEQ ID NO: 20779 - DNA, 20 bp, Artificial Sequence
  MKO10020779_A_Gm14461
  gRNA
cagacagtgcatcgccagtt

SEQ ID NO: 20780 - DNA, 20 bp, Artificial Sequence
  MKO10020780_A_Gm14461
  gRNA
ttgtacaagcttcgtcattc

SEQ ID NO: 20781 - DNA, 20 bp, Artificial Sequence
  MKO10020781_A_Gm14461
  gRNA
aatgcagggttgaaccgaac

SEQ ID NO: 20782 - DNA, 20 bp, Artificial Sequence
  MKO10020782_A_Gm14474
  gRNA
tcattcactgatgtgccacc

SEQ ID NO: 20783 - DNA, 20 bp, Artificial Sequence
  MKO10020783_A_Gm14474
  gRNA
tcatggccaagaaaatgcaa

SEQ ID NO: 20784 - DNA, 20 bp, Artificial Sequence
  MKO10020784_A_Gm14474
  gRNA
accaccagatgtacatcctc

SEQ ID NO: 20785 - DNA, 20 bp, Artificial Sequence
  MKO10020785_A_Gm14475
  gRNA
tcattcactgatgtgccacc

SEQ ID NO: 20786 - DNA, 20 bp, Artificial Sequence
  MKO10020786_A_Gm14475
  gRNA
tcatggccaagaaaatgcaa

SEQ ID NO: 20787 - DNA, 20 bp, Artificial Sequence
  MKO10020787_A_Gm14475
  gRNA
accaccagacgtacatcctc

SEQ ID NO: 20788 - DNA, 20 bp, Artificial Sequence
  MKO10020788_A_Gm14476
  gRNA
tcattcactgatgtgccacc

SEQ ID NO: 20789 - DNA, 20 bp, Artificial Sequence
  MKO10020789_A_Gm14476
  gRNA
tcatggccaagaaaatgcaa

SEQ ID NO: 20790 - DNA, 20 bp, Artificial Sequence
  MKO10020790_A_Gm14476
  gRNA
accaccagacgtacatcctc

SEQ ID NO: 20791 - DNA, 20 bp, Artificial Sequence
  MKO10020791_A_Gm14477
  gRNA
tcattcactgatgtgccacc

SEQ ID NO: 20792 - DNA, 20 bp, Artificial Sequence
  MKO10020792_A_Gm14477
  gRNA
tcatggccaagaaaatgcaa

SEQ ID NO: 20793 - DNA, 20 bp, Artificial Sequence
  MKO10020793_A_Gm14477
  gRNA
accaccagacgtacatcctc

SEQ ID NO: 20794 - DNA, 20 bp, Artificial Sequence
  MKO10020794_A_Gm14478
  gRNA
tcattcactgatgtgccacc

SEQ ID NO: 20795 - DNA, 20 bp, Artificial Sequence
  MKO10020795_A_Gm14478
  gRNA
tcatggccaagaaaatgcaa

SEQ ID NO: 20796 - DNA, 20 bp, Artificial Sequence
  MKO10020796_A_Gm14478
  gRNA
accaccagacgtacatcctc

SEQ ID NO: 20797 - DNA, 20 bp, Artificial Sequence
  MKO10020797_A_Gm14479
  gRNA
tcattcactgatgtgccacc

SEQ ID NO: 20798 - DNA, 20 bp, Artificial Sequence
  MKO10020798_A_Gm14479
  gRNA
tcatggccaagaaaatgcaa

SEQ ID NO: 20799 - DNA, 20 bp, Artificial Sequence
  MKO10020799_A_Gm14479
  gRNA
accaccagacgtacatcctc

SEQ ID NO: 20800 - DNA, 20 bp, Artificial Sequence
  MKO10020800_A_Gm14482
  gRNA
tcattcactgatgtgccacc

SEQ ID NO: 20801 - DNA, 20 bp, Artificial Sequence
  MKO10020801_A_Gm14482
  gRNA
tcatggccaagaaaatgcaa

SEQ ID NO: 20802 - DNA, 20 bp, Artificial Sequence
  MKO10020802_A_Gm14482
  gRNA
accaccagacgtacatcctc

SEQ ID NO: 20803 - DNA, 20 bp, Artificial Sequence
  MKO10020803_A_Gm14483
  gRNA
tcattcactgatgtgccacc

SEQ ID NO: 20804 - DNA, 20 bp, Artificial Sequence
  MKO10020804_A_Gm14483
  gRNA
tcatggccaagaaaatgcaa

SEQ ID NO: 20805 - DNA, 20 bp, Artificial Sequence
  MKO10020805_A_Gm14483
  gRNA
accaccagacgtacatcctc

SEQ ID NO: 20806 - DNA, 20 bp, Artificial Sequence
  MKO10020806_A_Gm14484
  gRNA
tcattcactgatgtgccacc

SEQ ID NO: 20807 - DNA, 20 bp, Artificial Sequence
  MKO10020807_A_Gm14484
  gRNA
tcatggccaagaaaatgcaa

SEQ ID NO: 20808 - DNA, 20 bp, Artificial Sequence
  MKO10020808_A_Gm14484
  gRNA
accaccagacgtacatcctc

SEQ ID NO: 20809 - DNA, 20 bp, Artificial Sequence
  MKO10020809_A_Gm14496
  gRNA
ggacatggggcaacctatca

SEQ ID NO: 20810 - DNA, 20 bp, Artificial Sequence
  MKO10020810_A_Gm14496
  gRNA
acattcagtgaaatctcgtt

SEQ ID NO: 20811 - DNA, 20 bp, Artificial Sequence
  MKO10020811_A_Gm14496
  gRNA
tcagatgattcatgtctcat

SEQ ID NO: 20812 - DNA, 20 bp, Artificial Sequence
  MKO10020812_A_Gm14499
  gRNA
tcatctccttcaaaatgtct

SEQ ID NO: 20813 - DNA, 20 bp, Artificial Sequence
  MKO10020813_A_Gm14499
  gRNA
catcagaaaccgaaaatgag

SEQ ID NO: 20814 - DNA, 20 bp, Artificial Sequence
  MKO10020814_A_Gm14499
  gRNA
ggtgggcaggaacagccatt

SEQ ID NO: 20815 - DNA, 20 bp, Artificial Sequence
  MKO10020815_A_Gm14501
  gRNA
tcattcactgatgtgccacc

SEQ ID NO: 20816 - DNA, 20 bp, Artificial Sequence
  MKO10020816_A_Gm14501
  gRNA
tcatggccaagaaaatgcaa

SEQ ID NO: 20817 - DNA, 20 bp, Artificial Sequence
  MKO10020817_A_Gm14501
  gRNA
accaccagacgtacatcctc

SEQ ID NO: 20818 - DNA, 20 bp, Artificial Sequence
  MKO10020818_A_Gm14511
  gRNA
ccgaagcgccctctcgagtg

SEQ ID NO: 20819 - DNA, 20 bp, Artificial Sequence
  MKO10020819_A_Gm14511
  gRNA
acaagctgagcttgtcaaag

SEQ ID NO: 20820 - DNA, 20 bp, Artificial Sequence
  MKO10020820_A_Gm14511
  gRNA
gcaaaactgcctagatcagc

SEQ ID NO: 20821 - DNA, 20 bp, Artificial Sequence
  MKO10020821_A_Gm14525
  gRNA
atagtaaagaggccagcatt

SEQ ID NO: 20822 - DNA, 20 bp, Artificial Sequence
  MKO10020822_A_Gm14525
  gRNA
tcttcatctgcttctacgtg

SEQ ID NO: 20823 - DNA, 20 bp, Artificial Sequence
  MKO10020823_A_Gm14525
  gRNA
agatgaacaagacagtatgt

SEQ ID NO: 20824 - DNA, 20 bp, Artificial Sequence
  MKO10020824_A_Gm14548
  gRNA
gaacctgtgattgttgtgcc

SEQ ID NO: 20825 - DNA, 20 bp, Artificial Sequence
  MKO10020825_A_Gm14548
  gRNA
tgcatccatgagagcttctg

SEQ ID NO: 20826 - DNA, 20 bp, Artificial Sequence
  MKO10020826_A_Gm14548
  gRNA
cagagtacagccacactctg

SEQ ID NO: 20827 - DNA, 20 bp, Artificial Sequence
  MKO10020827_A_Gm14625
  gRNA
agtaataagtaaccgtcctt

SEQ ID NO: 20828 - DNA, 20 bp, Artificial Sequence
  MKO10020828_A_Gm14625
  gRNA
ctgagtgcttaagagaaaaa

SEQ ID NO: 20829 - DNA, 20 bp, Artificial Sequence
  MKO10020829_A_Gm14625
  gRNA
agaaaacgtaagtttctcag

SEQ ID NO: 20830 - DNA, 20 bp, Artificial Sequence
  MKO10020830_A_Gm14632
  gRNA
tcttcatctgcttctacgtg

SEQ ID NO: 20831 - DNA, 20 bp, Artificial Sequence
  MKO10020831_A_Gm14632
  gRNA
atagtaaagaggccagcatt

SEQ ID NO: 20832 - DNA, 20 bp, Artificial Sequence
  MKO10020832_A_Gm14632
  gRNA
agatgaacaagacagtatgt

SEQ ID NO: 20833 - DNA, 20 bp, Artificial Sequence
  MKO10020833_A_Gm14685
  gRNA
agccaggtacatccaagctc

SEQ ID NO: 20834 - DNA, 20 bp, Artificial Sequence
  MKO10020834_A_Gm14685
  gRNA
gtacctggctttctcttccc

SEQ ID NO: 20835 - DNA, 20 bp, Artificial Sequence
  MKO10020835_A_Gm14685
  gRNA
gacgatcccttctaaggagt

SEQ ID NO: 20836 - DNA, 20 bp, Artificial Sequence
  MKO10020836_A_Gm14692
  gRNA
atcactgatctcgatcacca

SEQ ID NO: 20837 - DNA, 20 bp, Artificial Sequence
  MKO10020837_A_Gm14692
  gRNA
caatatagcagagcagcccg

SEQ ID NO: 20838 - DNA, 20 bp, Artificial Sequence
  MKO10020838_A_Gm14692
  gRNA
tagggaatctgttcagaaga

SEQ ID NO: 20839 - DNA, 20 bp, Artificial Sequence
  MKO10020839_A_Gm14725
  gRNA
cactcatgttaccttagata

SEQ ID NO: 20840 - DNA, 20 bp, Artificial Sequence
  MKO10020840_A_Gm14725
  gRNA
gcgttcaggatgtatctgca

SEQ ID NO: 20841 - DNA, 20 bp, Artificial Sequence
  MKO10020841_A_Gm14725
  gRNA
agatgaggatgaggaagatg

SEQ ID NO: 20842 - DNA, 20 bp, Artificial Sequence
  MKO10020842_A_Gm14743
  gRNA
cttcatgtgcgagttcttta

SEQ ID NO: 20843 - DNA, 20 bp, Artificial Sequence
  MKO10020843_A_Gm14743
  gRNA
cttaaagaactcgcacatga

SEQ ID NO: 20844 - DNA, 20 bp, Artificial Sequence
  MKO10020844_A_Gm14743
  gRNA
tttcacgaacaaagagctcc

SEQ ID NO: 20845 - DNA, 20 bp, Artificial Sequence
  MKO10020845_A_Gm14744
  gRNA
cctttacatagctgcggaca

SEQ ID NO: 20846 - DNA, 20 bp, Artificial Sequence
  MKO10020846_A_Gm14744
  gRNA
atccagcacttggcgcccac

SEQ ID NO: 20847 - DNA, 20 bp, Artificial Sequence
  MKO10020847_A_Gm14744
  gRNA
tacctgtgggcgccaagtgc

SEQ ID NO: 20848 - DNA, 20 bp, Artificial Sequence
  MKO10020848_A_Gm14781
  gRNA
aggacaaacccttcctttgt

SEQ ID NO: 20849 - DNA, 20 bp, Artificial Sequence
  MKO10020849_A_Gm14781
  gRNA
aatgtcttcctcagaagcag

SEQ ID NO: 20850 - DNA, 20 bp, Artificial Sequence
  MKO10020850_A_Gm14781
  gRNA
attgaggtttcataaccttc

SEQ ID NO: 20851 - DNA, 20 bp, Artificial Sequence
  MKO10020851_A_Gm14819
  gRNA
tcttcatctgcttctacgtg

SEQ ID NO: 20852 - DNA, 20 bp, Artificial Sequence
  MKO10020852_A_Gm14819
  gRNA
atagtaaagaggccagcatt

SEQ ID NO: 20853 - DNA, 20 bp, Artificial Sequence
  MKO10020853_A_Gm14819
  gRNA
agatgaacaagacagtatgt

SEQ ID NO: 20854 - DNA, 20 bp, Artificial Sequence
  MKO10020854_A_Gm14850
  gRNA
catgaagagcagacccttct

SEQ ID NO: 20855 - DNA, 20 bp, Artificial Sequence
  MKO10020855_A_Gm14850
  gRNA
cctctctgcccttgtcctgc

SEQ ID NO: 20856 - DNA, 20 bp, Artificial Sequence
  MKO10020856_A_Gm14850
  gRNA
agttaaaaaaagatttctgc

SEQ ID NO: 20857 - DNA, 20 bp, Artificial Sequence
  MKO10020857_A_Gm14851
  gRNA
cagcccaacgaaggtttctg

SEQ ID NO: 20858 - DNA, 20 bp, Artificial Sequence
  MKO10020858_A_Gm14851
  gRNA
ctttgggcactgagggcatg

SEQ ID NO: 20859 - DNA, 20 bp, Artificial Sequence
  MKO10020859_A_Gm14851
  gRNA
cctctctgcccttgccctgc

SEQ ID NO: 20860 - DNA, 20 bp, Artificial Sequence
  MKO10020860_A_Gm14920
  gRNA
tgatatggtgcccatcttcc

SEQ ID NO: 20861 - DNA, 20 bp, Artificial Sequence
  MKO10020861_A_Gm14920
  gRNA
tgagggagattagccgtgcc

SEQ ID NO: 20862 - DNA, 20 bp, Artificial Sequence
  MKO10020862_A_Gm14920
  gRNA
ccgcaagctccagcaacctg

SEQ ID NO: 20863 - DNA, 20 bp, Artificial Sequence
  MKO10020863_A_Gm15023
  gRNA
aaaatataggttcattatga

SEQ ID NO: 20864 - DNA, 20 bp, Artificial Sequence
  MKO10020864_A_Gm15023
  gRNA
cttacctagtagctgagttc

SEQ ID NO: 20865 - DNA, 20 bp, Artificial Sequence
  MKO10020865_A_Gm15023
  gRNA
cctacaggagccctaaactg

SEQ ID NO: 20866 - DNA, 20 bp, Artificial Sequence
  MKO10020866_A_Gm15056
  gRNA
acaaagtgtattcgcatgcc

SEQ ID NO: 20867 - DNA, 20 bp, Artificial Sequence
  MKO10020867_A_Gm15056
  gRNA
aactcctgaaggctgtaaac

SEQ ID NO: 20868 - DNA, 20 bp, Artificial Sequence
  MKO10020868_A_Gm15056
  gRNA
catggactcactgttgatga

SEQ ID NO: 20869 - DNA, 20 bp, Artificial Sequence
  MKO10020869_A_Gm15070
  gRNA
aaggattggacggcctaagt

SEQ ID NO: 20870 - DNA, 20 bp, Artificial Sequence
  MKO10020870_A_Gm15070
  gRNA
agattccttaccggatctcg

SEQ ID NO: 20871 - DNA, 20 bp, Artificial Sequence
  MKO10020871_A_Gm15070
  gRNA
gtccatcttgcctcgattac

SEQ ID NO: 20872 - DNA, 20 bp, Artificial Sequence
  MKO10020872_A_Gm15080
  gRNA
cctctccctcgcagatgtcc

SEQ ID NO: 20873 - DNA, 20 bp, Artificial Sequence
  MKO10020873_A_Gm15080
  gRNA
cacatcaaaatcatgcagtt

SEQ ID NO: 20874 - DNA, 20 bp, Artificial Sequence
  MKO10020874_A_Gm15080
  gRNA
ttctgaagaagaatacaatg

SEQ ID NO: 20875 - DNA, 20 bp, Artificial Sequence
  MKO10020875_A_Gm15085
  gRNA
tgtactttacctctccctcg

SEQ ID NO: 20876 - DNA, 20 bp, Artificial Sequence
  MKO10020876_A_Gm15085
  gRNA
ttctgaagaagaatacaatg

SEQ ID NO: 20877 - DNA, 20 bp, Artificial Sequence
  MKO10020877_A_Gm15085
  gRNA
tcacttaccagatgaagtag

SEQ ID NO: 20878 - DNA, 20 bp, Artificial Sequence
  MKO10020878_A_Gm15091
  gRNA
cggaacaaccagtcaaaaag

SEQ ID NO: 20879 - DNA, 20 bp, Artificial Sequence
  MKO10020879_A_Gm15091
  gRNA
acggaaaaatgcctgccctc

SEQ ID NO: 20880 - DNA, 20 bp, Artificial Sequence
  MKO10020880_A_Gm15091
  gRNA
ttctgaaaaagaatacaatg

SEQ ID NO: 20881 - DNA, 20 bp, Artificial Sequence
  MKO10020881_A_Gm15093
  gRNA
tgtactttacctctccctcg

SEQ ID NO: 20882 - DNA, 20 bp, Artificial Sequence
  MKO10020882_A_Gm15093
  gRNA
ttctgaagaagaatacaatg

SEQ ID NO: 20883 - DNA, 20 bp, Artificial Sequence
  MKO10020883_A_Gm15093
  gRNA
tcacttaccagatgaagtag

SEQ ID NO: 20884 - DNA, 20 bp, Artificial Sequence
  MKO10020884_A_Gm15097
  gRNA
gaagatcacgtaatcgattt

SEQ ID NO: 20885 - DNA, 20 bp, Artificial Sequence
  MKO10020885_A_Gm15097
  gRNA
aaatcgattacgtgatcttc

SEQ ID NO: 20886 - DNA, 20 bp, Artificial Sequence
  MKO10020886_A_Gm15097
  gRNA
tgtactttacctctccctcg

SEQ ID NO: 20887 - DNA, 20 bp, Artificial Sequence
  MKO10020887_A_Gm15104
  gRNA
ttgactcatctgtatctcgt

SEQ ID NO: 20888 - DNA, 20 bp, Artificial Sequence
  MKO10020888_A_Gm15104
  gRNA
agaacaaaatgcagtggcca

SEQ ID NO: 20889 - DNA, 20 bp, Artificial Sequence
  MKO10020889_A_Gm15104
  gRNA
tcaagaaaaagaaatgcgtt

SEQ ID NO: 20890 - DNA, 20 bp, Artificial Sequence
  MKO10020890_A_Gm15107
  gRNA
tgtactttacctctccctcg

SEQ ID NO: 20891 - DNA, 20 bp, Artificial Sequence
  MKO10020891_A_Gm15107
  gRNA
ttctgaagaagaatacaatg

SEQ ID NO: 20892 - DNA, 20 bp, Artificial Sequence
  MKO10020892_A_Gm15107
  gRNA
tcacttaccagatgaagtag

SEQ ID NO: 20893 - DNA, 20 bp, Artificial Sequence
  MKO10020893_A_Gm15114
  gRNA
gatcttaaacagtcatggag

SEQ ID NO: 20894 - DNA, 20 bp, Artificial Sequence
  MKO10020894_A_Gm15114
  gRNA
gtttaagatctctccatgac

SEQ ID NO: 20895 - DNA, 20 bp, Artificial Sequence
  MKO10020895_A_Gm15114
  gRNA
tgtactttacctctccctcg

SEQ ID NO: 20896 - DNA, 20 bp, Artificial Sequence
  MKO10020896_A_Gm15127
  gRNA
cggaacaaccagtcacaaag

SEQ ID NO: 20897 - DNA, 20 bp, Artificial Sequence
  MKO10020897_A_Gm15127
  gRNA
tgtcatgacctctttgtgac

SEQ ID NO: 20898 - DNA, 20 bp, Artificial Sequence
  MKO10020898_A_Gm15127
  gRNA
tgtactttacctctccctcg

SEQ ID NO: 20899 - DNA, 20 bp, Artificial Sequence
  MKO10020899_A_Gm15140
  gRNA
tgacagcaatgttgtgcagt

SEQ ID NO: 20900 - DNA, 20 bp, Artificial Sequence
  MKO10020900_A_Gm15140
  gRNA
atcaactcatcgttgatact

SEQ ID NO: 20901 - DNA, 20 bp, Artificial Sequence
  MKO10020901_A_Gm15140
  gRNA
ctacagatttatcaatgaga

SEQ ID NO: 20902 - DNA, 20 bp, Artificial Sequence
  MKO10020902_A_Gm1527
  gRNA
atcaattcatgaagccaaga

SEQ ID NO: 20903 - DNA, 20 bp, Artificial Sequence
  MKO10020903_A_Gm1527
  gRNA
ggtggcccaaaagtgtccat

SEQ ID NO: 20904 - DNA, 20 bp, Artificial Sequence
  MKO10020904_A_Gm1527
  gRNA
tcatcccactgcatctcctg

SEQ ID NO: 20905 - DNA, 20 bp, Artificial Sequence
  MKO10020905_A_Gm15284
  gRNA
cattaaatgacccttactgc

SEQ ID NO: 20906 - DNA, 20 bp, Artificial Sequence
  MKO10020906_A_Gm15284
  gRNA
tcttgaagagaagagccttc

SEQ ID NO: 20907 - DNA, 20 bp, Artificial Sequence
  MKO10020907_A_Gm15284
  gRNA
cctctctgccctcgtcctgc

SEQ ID NO: 20908 - DNA, 20 bp, Artificial Sequence
  MKO10020908_A_Gm15292
  gRNA
atagcctgctcctcttcctc

SEQ ID NO: 20909 - DNA, 20 bp, Artificial Sequence
  MKO10020909_A_Gm15292
  gRNA
gcagccagaggaagaggagc

SEQ ID NO: 20910 - DNA, 20 bp, Artificial Sequence
  MKO10020910_A_Gm15292
  gRNA
cattaaatgaccctttctgc

SEQ ID NO: 20911 - DNA, 20 bp, Artificial Sequence
  MKO10020911_A_Gm15293
  gRNA
atctcctctggaggccaaga

SEQ ID NO: 20912 - DNA, 20 bp, Artificial Sequence
  MKO10020912_A_Gm15293
  gRNA
cagaggagatagacacagcc

SEQ ID NO: 20913 - DNA, 20 bp, Artificial Sequence
  MKO10020913_A_Gm15293
  gRNA
agttaaaaaaagatttctgc

SEQ ID NO: 20914 - DNA, 20 bp, Artificial Sequence
  MKO10020914_A_Gm15299
  gRNA
aggatcagcctggacttggg

SEQ ID NO: 20915 - DNA, 20 bp, Artificial Sequence
  MKO10020915_A_Gm15299
  gRNA
tcttgaagagaagagccttc

SEQ ID NO: 20916 - DNA, 20 bp, Artificial Sequence
  MKO10020916_A_Gm15299
  gRNA
cattaaatgaccctttctgc

SEQ ID NO: 20917 - DNA, 20 bp, Artificial Sequence
  MKO10020917_A_Gm15308
  gRNA
tcatgaagagcagatccttc

SEQ ID NO: 20918 - DNA, 20 bp, Artificial Sequence
  MKO10020918_A_Gm15308
  gRNA
cctctctgccctcgtcctgc

SEQ ID NO: 20919 - DNA, 20 bp, Artificial Sequence
  MKO10020919_A_Gm15308
  gRNA
atctgcatgttcagtggcgg

SEQ ID NO: 20920 - DNA, 20 bp, Artificial Sequence
  MKO10020920_A_Gm15315
  gRNA
catgaagagcagacccttct

SEQ ID NO: 20921 - DNA, 20 bp, Artificial Sequence
  MKO10020921_A_Gm15315
  gRNA
cctctctgcccttgtcctgc

SEQ ID NO: 20922 - DNA, 20 bp, Artificial Sequence
  MKO10020922_A_Gm15315
  gRNA
agttaaaaaaagatttctgc

SEQ ID NO: 20923 - DNA, 20 bp, Artificial Sequence
  MKO10020923_A_Gm15319
  gRNA
tcagagagagaagaagtgcc

SEQ ID NO: 20924 - DNA, 20 bp, Artificial Sequence
  MKO10020924_A_Gm15319
  gRNA
tgcccacaaccatccagacg

SEQ ID NO: 20925 - DNA, 20 bp, Artificial Sequence
  MKO10020925_A_Gm15319
  gRNA
ccaatagctaccttaatcaa

SEQ ID NO: 20926 - DNA, 20 bp, Artificial Sequence
  MKO10020926_A_Gm15386
  gRNA
aaatccaagctaccatactc

SEQ ID NO: 20927 - DNA, 20 bp, Artificial Sequence
  MKO10020927_A_Gm15386
  gRNA
aaagaatgcaaaatgcgtag

SEQ ID NO: 20928 - DNA, 20 bp, Artificial Sequence
  MKO10020928_A_Gm15386
  gRNA
catattacctgttaatattg

SEQ ID NO: 20929 - DNA, 20 bp, Artificial Sequence
  MKO10020929_A_Gm15455
  gRNA
cctcccgtgctttgactcca

SEQ ID NO: 20930 - DNA, 20 bp, Artificial Sequence
  MKO10020930_A_Gm15455
  gRNA
gggactggaagccggtggta

SEQ ID NO: 20931 - DNA, 20 bp, Artificial Sequence
  MKO10020931_A_Gm15455
  gRNA
cttagctcccgcctacccag

SEQ ID NO: 20932 - DNA, 20 bp, Artificial Sequence
  MKO10020932_A_Gm1553
  gRNA
cattatcagtagacgtgtat

SEQ ID NO: 20933 - DNA, 20 bp, Artificial Sequence
  MKO10020933_A_Gm1553
  gRNA
acaggtgaacgtctaccaat

SEQ ID NO: 20934 - DNA, 20 bp, Artificial Sequence
  MKO10020934_A_Gm1553
  gRNA
ttactaaacataatgggcct

SEQ ID NO: 20935 - DNA, 20 bp, Artificial Sequence
  MKO10020935_A_Gm1564
  gRNA
cgttccgtggaagcgcgaat

SEQ ID NO: 20936 - DNA, 20 bp, Artificial Sequence
  MKO10020936_A_Gm1564
  gRNA
tagccgtgtgaatcgcacac

SEQ ID NO: 20937 - DNA, 20 bp, Artificial Sequence
  MKO10020937_A_Gm1564
  gRNA
agcaccgattcgcgcttcca

SEQ ID NO: 20938 - DNA, 20 bp, Artificial Sequence
  MKO10020938_A_Gm156
  gRNA
atcacaacacttatgcgcca

SEQ ID NO: 20939 - DNA, 20 bp, Artificial Sequence
  MKO10020939_A_Gm156
  gRNA
aaaggctgctatacatgtca

SEQ ID NO: 20940 - DNA, 20 bp, Artificial Sequence
  MKO10020940_A_Gm156
  gRNA
cacaagtgaattacagctat

SEQ ID NO: 20941 - DNA, 20 bp, Artificial Sequence
  MKO10020941_A_Gm15800
  gRNA
gatgtgtcggcctgtgtccg

SEQ ID NO: 20942 - DNA, 20 bp, Artificial Sequence
  MKO10020942_A_Gm15800
  gRNA
cattcaggcggtattccagc

SEQ ID NO: 20943 - DNA, 20 bp, Artificial Sequence
  MKO10020943_A_Gm15800
  gRNA
gtacaggtaatgcccatctg

SEQ ID NO: 20944 - DNA, 20 bp, Artificial Sequence
  MKO10020944_A_Gm15816
  gRNA
aatgtcggtggggcttggac

SEQ ID NO: 20945 - DNA, 20 bp, Artificial Sequence
  MKO10020945_A_Gm15816
  gRNA
agatcattcgcaaagtcgtc

SEQ ID NO: 20946 - DNA, 20 bp, Artificial Sequence
  MKO10020946_A_Gm15816
  gRNA
tgttggctgagactttatcc

SEQ ID NO: 20947 - DNA, 20 bp, Artificial Sequence
  MKO10020947_A_Gm1587
  gRNA
ctacagccgagaagaacatg

SEQ ID NO: 20948 - DNA, 20 bp, Artificial Sequence
  MKO10020948_A_Gm1587
  gRNA
gtgaccaagtgctgaagctt

SEQ ID NO: 20949 - DNA, 20 bp, Artificial Sequence
  MKO10020949_A_Gm1587
  gRNA
tcaacatgcagaccccacct

SEQ ID NO: 20950 - DNA, 20 bp, Artificial Sequence
  MKO10020950_A_Gm15881
  gRNA
agcttgaatccattactcga

SEQ ID NO: 20951 - DNA, 20 bp, Artificial Sequence
  MKO10020951_A_Gm15881
  gRNA
cgccatgacactgatcgtcc

SEQ ID NO: 20952 - DNA, 20 bp, Artificial Sequence
  MKO10020952_A_Gm15881
  gRNA
gcacccatatagagcactag

SEQ ID NO: 20953 - DNA, 20 bp, Artificial Sequence
  MKO10020953_A_Gm1604b
  gRNA
cgtgctcacctctgtctcca

SEQ ID NO: 20954 - DNA, 20 bp, Artificial Sequence
  MKO10020954_A_Gm1604b
  gRNA
aatgcccatcgcacagttgc

SEQ ID NO: 20955 - DNA, 20 bp, Artificial Sequence
  MKO10020955_A_Gm1604b
  gRNA
acttcttctgtggtatcttc

SEQ ID NO: 20956 - DNA, 20 bp, Artificial Sequence
  MKO10020956_A_Gm16130
  gRNA
cctcgccgtccgtacaaccc

SEQ ID NO: 20957 - DNA, 20 bp, Artificial Sequence
  MKO10020957_A_Gm16130
  gRNA
tcactagggatgcgacgtga

SEQ ID NO: 20958 - DNA, 20 bp, Artificial Sequence
  MKO10020958_A_Gm16130
  gRNA
gaagctactgctgaacgaac

SEQ ID NO: 20959 - DNA, 20 bp, Artificial Sequence
  MKO10020959_A_Gm16367
  gRNA
ggacttggaaattgcttacc

SEQ ID NO: 20960 - DNA, 20 bp, Artificial Sequence
  MKO10020960_A_Gm16367
  gRNA
cccacccacactccagaagc

SEQ ID NO: 20961 - DNA, 20 bp, Artificial Sequence
  MKO10020961_A_Gm16367
  gRNA
cttgtataactgagtattca

SEQ ID NO: 20962 - DNA, 20 bp, Artificial Sequence
  MKO10020962_A_Gm16381
  gRNA
tccagccacaatgattgagg

SEQ ID NO: 20963 - DNA, 20 bp, Artificial Sequence
  MKO10020963_A_Gm16381
  gRNA
tctactggtaataaagctcc

SEQ ID NO: 20964 - DNA, 20 bp, Artificial Sequence
  MKO10020964_A_Gm16381
  gRNA
tgcaacaccgatgataccat

SEQ ID NO: 20965 - DNA, 20 bp, Artificial Sequence
  MKO10020965_A_Gm16390
  gRNA
ggatatgcagcaaagtagcc

SEQ ID NO: 20966 - DNA, 20 bp, Artificial Sequence
  MKO10020966_A_Gm16390
  gRNA
tccccgaatatacaaaggaa

SEQ ID NO: 20967 - DNA, 20 bp, Artificial Sequence
  MKO10020967_A_Gm16390
  gRNA
ctactttgctgcatatccac

SEQ ID NO: 20968 - DNA, 20 bp, Artificial Sequence
  MKO10020968_A_Gm16404
  gRNA
agtaataagtaaccgtcctt

SEQ ID NO: 20969 - DNA, 20 bp, Artificial Sequence
  MKO10020969_A_Gm16404
  gRNA
ctgagtgcttaagagaaaaa

SEQ ID NO: 20970 - DNA, 20 bp, Artificial Sequence
  MKO10020970_A_Gm16404
  gRNA
agaaaacgtaagtttctcag

SEQ ID NO: 20971 - DNA, 20 bp, Artificial Sequence
  MKO10020971_A_Gm16405
  gRNA
agaaaacgtaagtttctcag

SEQ ID NO: 20972 - DNA, 20 bp, Artificial Sequence
  MKO10020972_A_Gm16405
  gRNA
tagagacaccaatagaaaac

SEQ ID NO: 20973 - DNA, 20 bp, Artificial Sequence
  MKO10020973_A_Gm16405
  gRNA
gtatctccaacgatttcttc

SEQ ID NO: 20974 - DNA, 20 bp, Artificial Sequence
  MKO10020974_A_Gm16430
  gRNA
agaaaacgtaagtttctcag

SEQ ID NO: 20975 - DNA, 20 bp, Artificial Sequence
  MKO10020975_A_Gm16430
  gRNA
tagagacaccaatagaaaac

SEQ ID NO: 20976 - DNA, 20 bp, Artificial Sequence
  MKO10020976_A_Gm16430
  gRNA
gtatctccaacgatttcttc

SEQ ID NO: 20977 - DNA, 20 bp, Artificial Sequence
  MKO10020977_A_Gm16432
  gRNA
cttacttggtttctggcaat

SEQ ID NO: 20978 - DNA, 20 bp, Artificial Sequence
  MKO10020978_A_Gm16432
  gRNA
agaactcctggtactaaaaa

SEQ ID NO: 20979 - DNA, 20 bp, Artificial Sequence
  MKO10020979_A_Gm16432
  gRNA
tagattaaattagagtatga

SEQ ID NO: 20980 - DNA, 20 bp, Artificial Sequence
  MKO10020980_A_Gm16442
  gRNA
gccctctccatgtctgctca

SEQ ID NO: 20981 - DNA, 20 bp, Artificial Sequence
  MKO10020981_A_Gm16442
  gRNA
cagttgaagagcacagaaca

SEQ ID NO: 20982 - DNA, 20 bp, Artificial Sequence
  MKO10020982_A_Gm16442
  gRNA
tgtccatcagtttgtcactc

SEQ ID NO: 20983 - DNA, 20 bp, Artificial Sequence
  MKO10020983_A_Gm16445
  gRNA
aactcgtcgttgatactctg

SEQ ID NO: 20984 - DNA, 20 bp, Artificial Sequence
  MKO10020984_A_Gm16445
  gRNA
taaaggtgattcaactcctt

SEQ ID NO: 20985 - DNA, 20 bp, Artificial Sequence
  MKO10020985_A_Gm16445
  gRNA
tgaaagctaataagctgcta

SEQ ID NO: 20986 - DNA, 20 bp, Artificial Sequence
  MKO10020986_A_Gm16451
  gRNA
gccctctccatgtctgctca

SEQ ID NO: 20987 - DNA, 20 bp, Artificial Sequence
  MKO10020987_A_Gm16451
  gRNA
cagttgaagagcacagaaca

SEQ ID NO: 20988 - DNA, 20 bp, Artificial Sequence
  MKO10020988_A_Gm16451
  gRNA
tgtccatcagtttgtcactc

SEQ ID NO: 20989 - DNA, 20 bp, Artificial Sequence
  MKO10020989_A_Gm1647
  gRNA
gtcacgactgcagatgctac

SEQ ID NO: 20990 - DNA, 20 bp, Artificial Sequence
  MKO10020990_A_Gm1647
  gRNA
ctgggttagaactgtcgctg

SEQ ID NO: 20991 - DNA, 20 bp, Artificial Sequence
  MKO10020991_A_Gm1647
  gRNA
gaagtctgaacagcccatga

SEQ ID NO: 20992 - DNA, 20 bp, Artificial Sequence
  MKO10020992_A_Gm16501
  gRNA
aggcatcatcagttgtcttc

SEQ ID NO: 20993 - DNA, 20 bp, Artificial Sequence
  MKO10020993_A_Gm16501
  gRNA
tcatggccaggaaaagccaa

SEQ ID NO: 20994 - DNA, 20 bp, Artificial Sequence
  MKO10020994_A_Gm16501
  gRNA
aaattgaagctcagctctct

SEQ ID NO: 20995 - DNA, 20 bp, Artificial Sequence
  MKO10020995_A_Gm16515
  gRNA
gttggcggtcgtgctccacg

SEQ ID NO: 20996 - DNA, 20 bp, Artificial Sequence
  MKO10020996_A_Gm16515
  gRNA
cgctaccccgccgagcgcac

SEQ ID NO: 20997 - DNA, 20 bp, Artificial Sequence
  MKO10020997_A_Gm16515
  gRNA
ccagatgcttaccgtgggcg

SEQ ID NO: 20998 - DNA, 20 bp, Artificial Sequence
  MKO10020998_A_Gm16532
  gRNA
acagcaaacaaccatcgtgt

SEQ ID NO: 20999 - DNA, 20 bp, Artificial Sequence
  MKO10020999_A_Gm16532
  gRNA
cacacacactaccaacacga

SEQ ID NO: 21000 - DNA, 20 bp, Artificial Sequence
  MKO10021000_A_Gm16532
  gRNA
gatctgtcctcccaagagac

SEQ ID NO: 21001 - DNA, 20 bp, Artificial Sequence
  MKO10021001_A_Gm1661
  gRNA
cactgccgcagctatatgac

SEQ ID NO: 21002 - DNA, 20 bp, Artificial Sequence
  MKO10021002_A_Gm1661
  gRNA
tcctcatacgagtgaccacc

SEQ ID NO: 21003 - DNA, 20 bp, Artificial Sequence
  MKO10021003_A_Gm1661
  gRNA
caagtatttccaagagcgtt

SEQ ID NO: 21004 - DNA, 20 bp, Artificial Sequence
  MKO10021004_A_Gm166
  gRNA
cattcctccacgttgcccag

SEQ ID NO: 21005 - DNA, 20 bp, Artificial Sequence
  MKO10021005_A_Gm166
  gRNA
ccaagataatggcatcccgc

SEQ ID NO: 21006 - DNA, 20 bp, Artificial Sequence
  MKO10021006_A_Gm166
  gRNA
ggcggcagaagataagtgcg

SEQ ID NO: 21007 - DNA, 20 bp, Artificial Sequence
  MKO10021007_A_Gm1673
  gRNA
aacaagcagcgcgggcgact

SEQ ID NO: 21008 - DNA, 20 bp, Artificial Sequence
  MKO10021008_A_Gm1673
  gRNA
attcatgcagcgcgcccttc

SEQ ID NO: 21009 - DNA, 20 bp, Artificial Sequence
  MKO10021009_A_Gm1673
  gRNA
tcgcccgcgctgcttgttcg

SEQ ID NO: 21010 - DNA, 20 bp, Artificial Sequence
  MKO10021010_A_Gm17019
  gRNA
cctgagtgtaaaagacgaac

SEQ ID NO: 21011 - DNA, 20 bp, Artificial Sequence
  MKO10021011_A_Gm17019
  gRNA
aagcaagaagcagtttgaga

SEQ ID NO: 21012 - DNA, 20 bp, Artificial Sequence
  MKO10021012_A_Gm17019
  gRNA
caatgtatacctcttgttca

SEQ ID NO: 21013 - DNA, 20 bp, Artificial Sequence
  MKO10021013_A_Gm17252
  gRNA
ttacgtttgttagcatcacc

SEQ ID NO: 21014 - DNA, 20 bp, Artificial Sequence
  MKO10021014_A_Gm17252
  gRNA
gcatctgaagtccaccagat

SEQ ID NO: 21015 - DNA, 20 bp, Artificial Sequence
  MKO10021015_A_Gm17252
  gRNA
cttcaggggatggtaccata

SEQ ID NO: 21016 - DNA, 20 bp, Artificial Sequence
  MKO10021016_A_Gm17296
  gRNA
tcttaggtccgagcctattc

SEQ ID NO: 21017 - DNA, 20 bp, Artificial Sequence
  MKO10021017_A_Gm17296
  gRNA
cgtcatacagctccaagaag

SEQ ID NO: 21018 - DNA, 20 bp, Artificial Sequence
  MKO10021018_A_Gm17296
  gRNA
gtttattactggcccgctga

SEQ ID NO: 21019 - DNA, 20 bp, Artificial Sequence
  MKO10021019_A_Gm17359
  gRNA
cgaactaagtctccgcgcga

SEQ ID NO: 21020 - DNA, 20 bp, Artificial Sequence
  MKO10021020_A_Gm17359
  gRNA
caccagcataccgcctatat

SEQ ID NO: 21021 - DNA, 20 bp, Artificial Sequence
  MKO10021021_A_Gm17359
  gRNA
cccaccgctatcaaaaccca

SEQ ID NO: 21022 - DNA, 20 bp, Artificial Sequence
  MKO10021022_A_Gm17365
  gRNA
ctctctccagttatcataca

SEQ ID NO: 21023 - DNA, 20 bp, Artificial Sequence
  MKO10021023_A_Gm17365
  gRNA
gacacaccatgtatgataac

SEQ ID NO: 21024 - DNA, 20 bp, Artificial Sequence
  MKO10021024_A_Gm17365
  gRNA
atgaaatatgcatgagcttg

SEQ ID NO: 21025 - DNA, 20 bp, Artificial Sequence
  MKO10021025_A_Gm17384
  gRNA
agtccatctctccgaaaacc

SEQ ID NO: 21026 - DNA, 20 bp, Artificial Sequence
  MKO10021026_A_Gm17384
  gRNA
aaccactgtaggacgtgcaa

SEQ ID NO: 21027 - DNA, 20 bp, Artificial Sequence
  MKO10021027_A_Gm17384
  gRNA
acctttaattgtacaagcac

SEQ ID NO: 21028 - DNA, 20 bp, Artificial Sequence
  MKO10021028_A_Gm17455
  gRNA
agggcgatgaggatcggtac

SEQ ID NO: 21029 - DNA, 20 bp, Artificial Sequence
  MKO10021029_A_Gm17455
  gRNA
tgtaccgatcctcatcgccc

SEQ ID NO: 21030 - DNA, 20 bp, Artificial Sequence
  MKO10021030_A_Gm17455
  gRNA
tgcattcccgggcccctcgg

SEQ ID NO: 21031 - DNA, 20 bp, Artificial Sequence
  MKO10021031_A_Gm17660
  gRNA
tctgacacctaatcagcttc

SEQ ID NO: 21032 - DNA, 20 bp, Artificial Sequence
  MKO10021032_A_Gm17660
  gRNA
ccctccgtttccccttccgc

SEQ ID NO: 21033 - DNA, 20 bp, Artificial Sequence
  MKO10021033_A_Gm17660
  gRNA
catacctgatttggatcaaa

SEQ ID NO: 21034 - DNA, 20 bp, Artificial Sequence
  MKO10021034_A_Gm17677
  gRNA
tggagtatgtacgcttcatc

SEQ ID NO: 21035 - DNA, 20 bp, Artificial Sequence
  MKO10021035_A_Gm17677
  gRNA
gacccccaagtttcttgtac

SEQ ID NO: 21036 - DNA, 20 bp, Artificial Sequence
  MKO10021036_A_Gm17677
  gRNA
ttgtacaaaatcagtactcc

SEQ ID NO: 21037 - DNA, 20 bp, Artificial Sequence
  MKO10021037_A_Gm17689
  gRNA
gagaccagaagtgtctctta

SEQ ID NO: 21038 - DNA, 20 bp, Artificial Sequence
  MKO10021038_A_Gm17689
  gRNA
ctgtccataagagacacttc

SEQ ID NO: 21039 - DNA, 20 bp, Artificial Sequence
  MKO10021039_A_Gm17689
  gRNA
tacctcttgatactcctgct

SEQ ID NO: 21040 - DNA, 20 bp, Artificial Sequence
  MKO10021040_A_Gm17727
  gRNA
atcctcaatgggaaaagtac

SEQ ID NO: 21041 - DNA, 20 bp, Artificial Sequence
  MKO10021041_A_Gm17727
  gRNA
ctgctactctgtatgcaaac

SEQ ID NO: 21042 - DNA, 20 bp, Artificial Sequence
  MKO10021042_A_Gm17727
  gRNA
ttgctgtgccaagtgatgaa

SEQ ID NO: 21043 - DNA, 20 bp, Artificial Sequence
  MKO10021043_A_Gm19345
  gRNA
cagtataccgtcaagttcag

SEQ ID NO: 21044 - DNA, 20 bp, Artificial Sequence
  MKO10021044_A_Gm19345
  gRNA
atggccggcatccgtgctgc

SEQ ID NO: 21045 - DNA, 20 bp, Artificial Sequence
  MKO10021045_A_Gm19345
  gRNA
ggcaggtgcctaccagtgcg

SEQ ID NO: 21046 - DNA, 20 bp, Artificial Sequence
  MKO10021046_A_Gm19402
  gRNA
agacccgcctgtcatagctt

SEQ ID NO: 21047 - DNA, 20 bp, Artificial Sequence
  MKO10021047_A_Gm19402
  gRNA
ccagtgacctaagctatgac

SEQ ID NO: 21048 - DNA, 20 bp, Artificial Sequence
  MKO10021048_A_Gm19402
  gRNA
agtacaagaatcacaggaac

SEQ ID NO: 21049 - DNA, 20 bp, Artificial Sequence
  MKO10021049_A_Gm1965
  gRNA
gtgttgctgtgcccaatata

SEQ ID NO: 21050 - DNA, 20 bp, Artificial Sequence
  MKO10021050_A_Gm1965
  gRNA
gcgttgggtgccacggcatc

SEQ ID NO: 21051 - DNA, 20 bp, Artificial Sequence
  MKO10021051_A_Gm1965
  gRNA
gacctgcctggaccatatat

SEQ ID NO: 21052 - DNA, 20 bp, Artificial Sequence
  MKO10021052_A_Gm19668
  gRNA
atggcaggcagacaattgtc

SEQ ID NO: 21053 - DNA, 20 bp, Artificial Sequence
  MKO10021053_A_Gm19668
  gRNA
tgctccagtaatttgagttg

SEQ ID NO: 21054 - DNA, 20 bp, Artificial Sequence
  MKO10021054_A_Gm19668
  gRNA
cacgcaagtccttgtgcagc

SEQ ID NO: 21055 - DNA, 20 bp, Artificial Sequence
  MKO10021055_A_Gm1966
  gRNA
attcagcctgccataatttc

SEQ ID NO: 21056 - DNA, 20 bp, Artificial Sequence
  MKO10021056_A_Gm1966
  gRNA
tacttacggcttggagttga

SEQ ID NO: 21057 - DNA, 20 bp, Artificial Sequence
  MKO10021057_A_Gm1966
  gRNA
acgagcctcagtccagacgc

SEQ ID NO: 21058 - DNA, 20 bp, Artificial Sequence
  MKO10021058_A_Gm1979
  gRNA
tgaattagagatgaagaaca

SEQ ID NO: 21059 - DNA, 20 bp, Artificial Sequence
  MKO10021059_A_Gm1979
  gRNA
aagcaaaaagcagtttgaga

SEQ ID NO: 21060 - DNA, 20 bp, Artificial Sequence
  MKO10021060_A_Gm1979
  gRNA
caatgtatacctcttgttca

SEQ ID NO: 21061 - DNA, 20 bp, Artificial Sequence
  MKO10021061_A_Gm1987
  gRNA
taccttgcaggcagtgatgg

SEQ ID NO: 21062 - DNA, 20 bp, Artificial Sequence
  MKO10021062_A_Gm1987
  gRNA
agcgcactcacaggattgcc

SEQ ID NO: 21063 - DNA, 20 bp, Artificial Sequence
  MKO10021063_A_Gm1987
  gRNA
caaccctcaggttctcaccc

SEQ ID NO: 21064 - DNA, 20 bp, Artificial Sequence
  MKO10021064_A_Gm1993
  gRNA
taagtggtgatcagcaagtt

SEQ ID NO: 21065 - DNA, 20 bp, Artificial Sequence
  MKO10021065_A_Gm1993
  gRNA
atagtaaagaggccagcatt

SEQ ID NO: 21066 - DNA, 20 bp, Artificial Sequence
  MKO10021066_A_Gm1993
  gRNA
tcttcatctgcttctacgtg

SEQ ID NO: 21067 - DNA, 20 bp, Artificial Sequence
  MKO10021067_A_Gm2002
  gRNA
gtggagacatctgtcctcaa

SEQ ID NO: 21068 - DNA, 20 bp, Artificial Sequence
  MKO10021068_A_Gm2002
  gRNA
ttctgaccctaagtgatcac

SEQ ID NO: 21069 - DNA, 20 bp, Artificial Sequence
  MKO10021069_A_Gm2002
  gRNA
cagatgagcagcagctgctc

SEQ ID NO: 21070 - DNA, 20 bp, Artificial Sequence
  MKO10021070_A_Gm2012
  gRNA
acgtaagtttctcagaaaaa

SEQ ID NO: 21071 - DNA, 20 bp, Artificial Sequence
  MKO10021071_A_Gm2012
  gRNA
atagtaaagaggccagcatt

SEQ ID NO: 21072 - DNA, 20 bp, Artificial Sequence
  MKO10021072_A_Gm2012
  gRNA
tcttcatctgcttctacgtg

SEQ ID NO: 21073 - DNA, 20 bp, Artificial Sequence
  MKO10021073_A_Gm2016
  gRNA
tgtgtccatttcattgattt

SEQ ID NO: 21074 - DNA, 20 bp, Artificial Sequence
  MKO10021074_A_Gm2016
  gRNA
tccatcatgccaaagaataa

SEQ ID NO: 21075 - DNA, 20 bp, Artificial Sequence
  MKO10021075_A_Gm2016
  gRNA
acatgccaaaatcaatgaaa

SEQ ID NO: 21076 - DNA, 20 bp, Artificial Sequence
  MKO10021076_A_Gm20172
  gRNA
gctctctaaaaccccccttg

SEQ ID NO: 21077 - DNA, 20 bp, Artificial Sequence
  MKO10021077_A_Gm20172
  gRNA
aaaatatgaacgagtcctca

SEQ ID NO: 21078 - DNA, 20 bp, Artificial Sequence
  MKO10021078_A_Gm20172
  gRNA
gtatcttaaagctacccata

SEQ ID NO: 21079 - DNA, 20 bp, Artificial Sequence
  MKO10021079_A_Gm2022
  gRNA
tgccaggaagtattgaacag

SEQ ID NO: 21080 - DNA, 20 bp, Artificial Sequence
  MKO10021080_A_Gm2022
  gRNA
taccactgttcaatacttcc

SEQ ID NO: 21081 - DNA, 20 bp, Artificial Sequence
  MKO10021081_A_Gm2022
  gRNA
gccttcatcttgggagacaa

SEQ ID NO: 21082 - DNA, 20 bp, Artificial Sequence
  MKO10021082_A_Gm2030
  gRNA
atagtaaagaggccagcatt

SEQ ID NO: 21083 - DNA, 20 bp, Artificial Sequence
  MKO10021083_A_Gm2030
  gRNA
tcttcacctgcttctacgtg

SEQ ID NO: 21084 - DNA, 20 bp, Artificial Sequence
  MKO10021084_A_Gm2030
  gRNA
agatgaacaagacagcatgt

SEQ ID NO: 21085 - DNA, 20 bp, Artificial Sequence
  MKO10021085_A_Gm2042
  gRNA
tacttacctgatctggacaa

SEQ ID NO: 21086 - DNA, 20 bp, Artificial Sequence
  MKO10021086_A_Gm2042
  gRNA
ctgtctccattgtccagatc

SEQ ID NO: 21087 - DNA, 20 bp, Artificial Sequence
  MKO10021087_A_Gm2042
  gRNA
gcatagccttcaaagtctcc

SEQ ID NO: 21088 - DNA, 20 bp, Artificial Sequence
  MKO10021088_A_Gm20594
  gRNA
tgcctatgtacagaaaacca

SEQ ID NO: 21089 - DNA, 20 bp, Artificial Sequence
  MKO10021089_A_Gm20594
  gRNA
ctagcatgaatggctaaagg

SEQ ID NO: 21090 - DNA, 20 bp, Artificial Sequence
  MKO10021090_A_Gm20594
  gRNA
taataagacgagaagaccct

SEQ ID NO: 21091 - DNA, 20 bp, Artificial Sequence
  MKO10021091_A_Gm20604
  gRNA
gcgagtacgtcggttgtgac

SEQ ID NO: 21092 - DNA, 20 bp, Artificial Sequence
  MKO10021092_A_Gm20604
  gRNA
gcggctacgagtgtcctgtg

SEQ ID NO: 21093 - DNA, 20 bp, Artificial Sequence
  MKO10021093_A_Gm20604
  gRNA
ctcgtctctttaacacgcag

SEQ ID NO: 21094 - DNA, 20 bp, Artificial Sequence
  MKO10021094_A_Gm20736
  gRNA
tcttcatctgcttctgcttg

SEQ ID NO: 21095 - DNA, 20 bp, Artificial Sequence
  MKO10021095_A_Gm20736
  gRNA
agcagaagcagatgaagata

SEQ ID NO: 21096 - DNA, 20 bp, Artificial Sequence
  MKO10021096_A_Gm20736
  gRNA
agatgaagtagacagtatgt

SEQ ID NO: 21097 - DNA, 20 bp, Artificial Sequence
  MKO10021097_A_Gm20738
  gRNA
gttctcgtagagaagagtct

SEQ ID NO: 21098 - DNA, 20 bp, Artificial Sequence
  MKO10021098_A_Gm20738
  gRNA
gtaatgagcctgtcacccat

SEQ ID NO: 21099 - DNA, 20 bp, Artificial Sequence
  MKO10021099_A_Gm20738
  gRNA
tgagttcactatcttcacag

SEQ ID NO: 21100 - DNA, 20 bp, Artificial Sequence
  MKO10021100_A_Gm20747
  gRNA
gttctcgtagagaagagtct

SEQ ID NO: 21101 - DNA, 20 bp, Artificial Sequence
  MKO10021101_A_Gm20747
  gRNA
taaaaatagtcctgtaagaa

SEQ ID NO: 21102 - DNA, 20 bp, Artificial Sequence
  MKO10021102_A_Gm20747
  gRNA
gtaatgagcctgtcacccat

SEQ ID NO: 21103 - DNA, 20 bp, Artificial Sequence
  MKO10021103_A_Gm20765
  gRNA
aatcaggtaccttggataca

SEQ ID NO: 21104 - DNA, 20 bp, Artificial Sequence
  MKO10021104_A_Gm20765
  gRNA
cagctactctttgctgaatt

SEQ ID NO: 21105 - DNA, 20 bp, Artificial Sequence
  MKO10021105_A_Gm20765
  gRNA
tgttcagtcgaagctgtgaa

SEQ ID NO: 21106 - DNA, 20 bp, Artificial Sequence
  MKO10021106_A_Gm20767
  gRNA
acatgcactgcccaatgcac

SEQ ID NO: 21107 - DNA, 20 bp, Artificial Sequence
  MKO10021107_A_Gm20767
  gRNA
ggctggcaagacctgtgcat

SEQ ID NO: 21108 - DNA, 20 bp, Artificial Sequence
  MKO10021108_A_Gm20767
  gRNA
tcttgccagccctgagtaca

SEQ ID NO: 21109 - DNA, 20 bp, Artificial Sequence
  MKO10021109_A_Gm20806
  gRNA
ggaattcatatatatgatag

SEQ ID NO: 21110 - DNA, 20 bp, Artificial Sequence
  MKO10021110_A_Gm20806
  gRNA
gacggaattgacagtgtcta

SEQ ID NO: 21111 - DNA, 20 bp, Artificial Sequence
  MKO10021111_A_Gm20806
  gRNA
taaaaatagtcctgtaagaa

SEQ ID NO: 21112 - DNA, 20 bp, Artificial Sequence
  MKO10021112_A_Gm20809
  gRNA
ggaattcatatatatgacag

SEQ ID NO: 21113 - DNA, 20 bp, Artificial Sequence
  MKO10021113_A_Gm20809
  gRNA
taaaaatagtcctgtaagaa

SEQ ID NO: 21114 - DNA, 20 bp, Artificial Sequence
  MKO10021114_A_Gm20809
  gRNA
aacaaacccttctctttatt

SEQ ID NO: 21115 - DNA, 20 bp, Artificial Sequence
  MKO10021115_A_Gm20815
  gRNA
tctgcattgtgagcaaaaat

SEQ ID NO: 21116 - DNA, 20 bp, Artificial Sequence
  MKO10021116_A_Gm20815
  gRNA
gtcatactcagactcttcag

SEQ ID NO: 21117 - DNA, 20 bp, Artificial Sequence
  MKO10021117_A_Gm20815
  gRNA
tgagttcactatcttcacag

SEQ ID NO: 21118 - DNA, 20 bp, Artificial Sequence
  MKO10021118_A_Gm20816
  gRNA
tgagttcactatcttcacag

SEQ ID NO: 21119 - DNA, 20 bp, Artificial Sequence
  MKO10021119_A_Gm20816
  gRNA
tctgtctcctgatacagacc

SEQ ID NO: 21120 - DNA, 20 bp, Artificial Sequence
  MKO10021120_A_Gm20816
  gRNA
gttctcgtagagaagagtct

SEQ ID NO: 21121 - DNA, 20 bp, Artificial Sequence
  MKO10021121_A_Gm20822
  gRNA
catcactcaagaagaagagt

SEQ ID NO: 21122 - DNA, 20 bp, Artificial Sequence
  MKO10021122_A_Gm20822
  gRNA
ccagagtatagacatagata

SEQ ID NO: 21123 - DNA, 20 bp, Artificial Sequence
  MKO10021123_A_Gm20822
  gRNA
gaggtacaacacaaatttga

SEQ ID NO: 21124 - DNA, 20 bp, Artificial Sequence
  MKO10021124_A_Gm20823
  gRNA
cacctgaagaaaaactacat

SEQ ID NO: 21125 - DNA, 20 bp, Artificial Sequence
  MKO10021125_A_Gm20823
  gRNA
gttctcgtagagaagagtct

SEQ ID NO: 21126 - DNA, 20 bp, Artificial Sequence
  MKO10021126_A_Gm20823
  gRNA
gtaatgagcctgtcacccat

SEQ ID NO: 21127 - DNA, 20 bp, Artificial Sequence
  MKO10021127_A_Gm20826
  gRNA
catcactcaagaagaagaat

SEQ ID NO: 21128 - DNA, 20 bp, Artificial Sequence
  MKO10021128_A_Gm20826
  gRNA
gagtatagacatagatatgt

SEQ ID NO: 21129 - DNA, 20 bp, Artificial Sequence
  MKO10021129_A_Gm20826
  gRNA
agaggtacaacacaaatttg

SEQ ID NO: 21130 - DNA, 20 bp, Artificial Sequence
  MKO10021130_A_Gm20831
  gRNA
gtacctgcaagctgtgaaat

SEQ ID NO: 21131 - DNA, 20 bp, Artificial Sequence
  MKO10021131_A_Gm20831
  gRNA
tagaagatgtaacttctaaa

SEQ ID NO: 21132 - DNA, 20 bp, Artificial Sequence
  MKO10021132_A_Gm20831
  gRNA
caggcaatatcttcaatcca

SEQ ID NO: 21133 - DNA, 20 bp, Artificial Sequence
  MKO10021133_A_Gm2083
  gRNA
tattacagattaatggggaa

SEQ ID NO: 21134 - DNA, 20 bp, Artificial Sequence
  MKO10021134_A_Gm2083
  gRNA
agtatggaatttaagaacta

SEQ ID NO: 21135 - DNA, 20 bp, Artificial Sequence
  MKO10021135_A_Gm2083
  gRNA
agagtgctccgaattatcta

SEQ ID NO: 21136 - DNA, 20 bp, Artificial Sequence
  MKO10021136_A_Gm20854
  gRNA
cctctacgtctatcagctac

SEQ ID NO: 21137 - DNA, 20 bp, Artificial Sequence
  MKO10021137_A_Gm20854
  gRNA
ccagtagctgatagacgtag

SEQ ID NO: 21138 - DNA, 20 bp, Artificial Sequence
  MKO10021138_A_Gm20854
  gRNA
ggaattcatatatatgacag

SEQ ID NO: 21139 - DNA, 20 bp, Artificial Sequence
  MKO10021139_A_Gm20865
  gRNA
gctgcagaatttctcacgag

SEQ ID NO: 21140 - DNA, 20 bp, Artificial Sequence
  MKO10021140_A_Gm20865
  gRNA
gagtatagacatagatatgt

SEQ ID NO: 21141 - DNA, 20 bp, Artificial Sequence
  MKO10021141_A_Gm20865
  gRNA
cgggcaagatcttcagtccc

SEQ ID NO: 21142 - DNA, 20 bp, Artificial Sequence
  MKO10021142_A_Gm20867
  gRNA
tgagttcactatcttcacag

SEQ ID NO: 21143 - DNA, 20 bp, Artificial Sequence
  MKO10021143_A_Gm20867
  gRNA
tctgtctcctgatacagacc

SEQ ID NO: 21144 - DNA, 20 bp, Artificial Sequence
  MKO10021144_A_Gm20867
  gRNA
gttctcgtagagaagagtct

SEQ ID NO: 21145 - DNA, 20 bp, Artificial Sequence
  MKO10021145_A_Gm20877
  gRNA
gaacaagcacgaaaagcctt

SEQ ID NO: 21146 - DNA, 20 bp, Artificial Sequence
  MKO10021146_A_Gm20877
  gRNA
tgagttcattatcttcacag

SEQ ID NO: 21147 - DNA, 20 bp, Artificial Sequence
  MKO10021147_A_Gm20877
  gRNA
gttctcttagcaaagagtct

SEQ ID NO: 21148 - DNA, 20 bp, Artificial Sequence
  MKO10021148_A_Gm20878
  gRNA
gcctggacatgtcgcgattg

SEQ ID NO: 21149 - DNA, 20 bp, Artificial Sequence
  MKO10021149_A_Gm20878
  gRNA
atacgaggtggcgctggaag

SEQ ID NO: 21150 - DNA, 20 bp, Artificial Sequence
  MKO10021150_A_Gm20878
  gRNA
ctgcgccacattcgcaaccg

SEQ ID NO: 21151 - DNA, 20 bp, Artificial Sequence
  MKO10021151_A_Gm20917
  gRNA
ggaattcatatatatgacag

SEQ ID NO: 21152 - DNA, 20 bp, Artificial Sequence
  MKO10021152_A_Gm20917
  gRNA
taaaaatagtcctgtaagaa

SEQ ID NO: 21153 - DNA, 20 bp, Artificial Sequence
  MKO10021153_A_Gm20917
  gRNA
aacaaacccttctctttatt

SEQ ID NO: 21154 - DNA, 20 bp, Artificial Sequence
  MKO10021154_A_Gm20939
  gRNA
tatgcatttgaagctcataa

SEQ ID NO: 21155 - DNA, 20 bp, Artificial Sequence
  MKO10021155_A_Gm20939
  gRNA
ccctctgaaaatactaaatg

SEQ ID NO: 21156 - DNA, 20 bp, Artificial Sequence
  MKO10021156_A_Gm20939
  gRNA
tacagcaatcttgaaagatg

SEQ ID NO: 21157 - DNA, 20 bp, Artificial Sequence
  MKO10021157_A_Gm21002
  gRNA
tcatgaagagcagatccttc

SEQ ID NO: 21158 - DNA, 20 bp, Artificial Sequence
  MKO10021158_A_Gm21002
  gRNA
cctctctgccctcgtcctgc

SEQ ID NO: 21159 - DNA, 20 bp, Artificial Sequence
  MKO10021159_A_Gm21002
  gRNA
atctgcatgttcagtggcgg

SEQ ID NO: 21160 - DNA, 20 bp, Artificial Sequence
  MKO10021160_A_Gm21119
  gRNA
ccaatagctaccttaatcaa

SEQ ID NO: 21161 - DNA, 20 bp, Artificial Sequence
  MKO10021161_A_Gm21119
  gRNA
tgcccacaaccatccagacg

SEQ ID NO: 21162 - DNA, 20 bp, Artificial Sequence
  MKO10021162_A_Gm21119
  gRNA
caatgtctacgttgtgctca

SEQ ID NO: 21163 - DNA, 20 bp, Artificial Sequence
  MKO10021163_A_Gm21293
  gRNA
aatcaggtaccttggataca

SEQ ID NO: 21164 - DNA, 20 bp, Artificial Sequence
  MKO10021164_A_Gm21293
  gRNA
cagctactctttgctgaatt

SEQ ID NO: 21165 - DNA, 20 bp, Artificial Sequence
  MKO10021165_A_Gm21293
  gRNA
tgttcagtcgaagctgtgaa

SEQ ID NO: 21166 - DNA, 20 bp, Artificial Sequence
  MKO10021166_A_Gm21304
  gRNA
aatcaggtaccttggataca

SEQ ID NO: 21167 - DNA, 20 bp, Artificial Sequence
  MKO10021167_A_Gm21304
  gRNA
cagctactctttgctgaatt

SEQ ID NO: 21168 - DNA, 20 bp, Artificial Sequence
  MKO10021168_A_Gm21304
  gRNA
tgttcagtcgaagctgtgaa

SEQ ID NO: 21169 - DNA, 20 bp, Artificial Sequence
  MKO10021169_A_Gm21312
  gRNA
aatcaggtaccttggataca

SEQ ID NO: 21170 - DNA, 20 bp, Artificial Sequence
  MKO10021170_A_Gm21312
  gRNA
cagctactctttgctgaatt

SEQ ID NO: 21171 - DNA, 20 bp, Artificial Sequence
  MKO10021171_A_Gm21312
  gRNA
tgttcagtcgaagctgtgaa

SEQ ID NO: 21172 - DNA, 20 bp, Artificial Sequence
  MKO10021172_A_Gm21319
  gRNA
ggaggcaaaaacaggtgcag

SEQ ID NO: 21173 - DNA, 20 bp, Artificial Sequence
  MKO10021173_A_Gm21319
  gRNA
gaaatcgtgtttgatgatac

SEQ ID NO: 21174 - DNA, 20 bp, Artificial Sequence
  MKO10021174_A_Gm21319
  gRNA
atgttcttgaagttctccat

SEQ ID NO: 21175 - DNA, 20 bp, Artificial Sequence
  MKO10021175_A_Gm21498
  gRNA
catgaagagcagacccttct

SEQ ID NO: 21176 - DNA, 20 bp, Artificial Sequence
  MKO10021176_A_Gm21498
  gRNA
cctctctgcccttgtcctgc

SEQ ID NO: 21177 - DNA, 20 bp, Artificial Sequence
  MKO10021177_A_Gm21498
  gRNA
agttaaaaaaagatttctgc

SEQ ID NO: 21178 - DNA, 20 bp, Artificial Sequence
  MKO10021178_A_Gm21541
  gRNA
ctccttggtaccttgggtcc

SEQ ID NO: 21179 - DNA, 20 bp, Artificial Sequence
  MKO10021179_A_Gm21541
  gRNA
gactctgagcctccttagcc

SEQ ID NO: 21180 - DNA, 20 bp, Artificial Sequence
  MKO10021180_A_Gm21541
  gRNA
agcgcactcacaggattgcc

SEQ ID NO: 21181 - DNA, 20 bp, Artificial Sequence
  MKO10021181_A_Gm21586
  gRNA
gcctggacatgtcgcgattg

SEQ ID NO: 21182 - DNA, 20 bp, Artificial Sequence
  MKO10021182_A_Gm21586
  gRNA
atacgaggtggcgctggaag

SEQ ID NO: 21183 - DNA, 20 bp, Artificial Sequence
  MKO10021183_A_Gm21586
  gRNA
ctgcgccacattcgcaaccg

SEQ ID NO: 21184 - DNA, 20 bp, Artificial Sequence
  MKO10021184_A_Gm21637
  gRNA
ccaagtgagtgacatgtatg

SEQ ID NO: 21185 - DNA, 20 bp, Artificial Sequence
  MKO10021185_A_Gm21637
  gRNA
aagctgaccaagaaaagagc

SEQ ID NO: 21186 - DNA, 20 bp, Artificial Sequence
  MKO10021186_A_Gm21637
  gRNA
attaacttctttgcccacta

SEQ ID NO: 21187 - DNA, 20 bp, Artificial Sequence
  MKO10021187_A_Gm21671
  gRNA
atatctacacatcttagaga

SEQ ID NO: 21188 - DNA, 20 bp, Artificial Sequence
  MKO10021188_A_Gm21671
  gRNA
aagcaaaaagcagtttgaga

SEQ ID NO: 21189 - DNA, 20 bp, Artificial Sequence
  MKO10021189_A_Gm21671
  gRNA
caatgtatacctcttgttca

SEQ ID NO: 21190 - DNA, 20 bp, Artificial Sequence
  MKO10021190_A_Gm21677
  gRNA
atggcagaaactaatcagcc

SEQ ID NO: 21191 - DNA, 20 bp, Artificial Sequence
  MKO10021191_A_Gm21677
  gRNA
aaagaattaccacgtgctac

SEQ ID NO: 21192 - DNA, 20 bp, Artificial Sequence
  MKO10021192_A_Gm21677
  gRNA
cgtgaaactaagaagtctag

SEQ ID NO: 21193 - DNA, 20 bp, Artificial Sequence
  MKO10021193_A_Gm21693
  gRNA
atggcagaaactaatcagcc

SEQ ID NO: 21194 - DNA, 20 bp, Artificial Sequence
  MKO10021194_A_Gm21693
  gRNA
aaagaattaccacgtgctac

SEQ ID NO: 21195 - DNA, 20 bp, Artificial Sequence
  MKO10021195_A_Gm21693
  gRNA
cgtgaaactaagaagtctag

SEQ ID NO: 21196 - DNA, 20 bp, Artificial Sequence
  MKO10021196_A_Gm216
  gRNA
tcgcttcctagccttagact

SEQ ID NO: 21197 - DNA, 20 bp, Artificial Sequence
  MKO10021197_A_Gm216
  gRNA
gagcttgccctccgagtcta

SEQ ID NO: 21198 - DNA, 20 bp, Artificial Sequence
  MKO10021198_A_Gm216
  gRNA
tcccacacagcgatttgtct

SEQ ID NO: 21199 - DNA, 20 bp, Artificial Sequence
  MKO10021199_A_Gm21704
  gRNA
aaagaattaccacgtgctac

SEQ ID NO: 21200 - DNA, 20 bp, Artificial Sequence
  MKO10021200_A_Gm21704
  gRNA
atggcagaaactgatcagcc

SEQ ID NO: 21201 - DNA, 20 bp, Artificial Sequence
  MKO10021201_A_Gm21704
  gRNA
cagcattcttagcatctgca

SEQ ID NO: 21202 - DNA, 20 bp, Artificial Sequence
  MKO10021202_A_Gm21708
  gRNA
ttaaaacttagtgatcatgc

SEQ ID NO: 21203 - DNA, 20 bp, Artificial Sequence
  MKO10021203_A_Gm21708
  gRNA
gatttctctgaatatttaag

SEQ ID NO: 21204 - DNA, 20 bp, Artificial Sequence
  MKO10021204_A_Gm21708
  gRNA
atgcactttcttcccgagag

SEQ ID NO: 21205 - DNA, 20 bp, Artificial Sequence
  MKO10021205_A_Gm21943
  gRNA
gttctcttagagaagagtct

SEQ ID NO: 21206 - DNA, 20 bp, Artificial Sequence
  MKO10021206_A_Gm21943
  gRNA
gtaatgagcctgtcacccat

SEQ ID NO: 21207 - DNA, 20 bp, Artificial Sequence
  MKO10021207_A_Gm21943
  gRNA
tgagttcactatcttcacag

SEQ ID NO: 21208 - DNA, 20 bp, Artificial Sequence
  MKO10021208_A_Gm21949
  gRNA
atgccgtccccgatgcctaa

SEQ ID NO: 21209 - DNA, 20 bp, Artificial Sequence
  MKO10021209_A_Gm21949
  gRNA
gtgcaaatcctcatcgtcgc

SEQ ID NO: 21210 - DNA, 20 bp, Artificial Sequence
  MKO10021210_A_Gm21949
  gRNA
agtactctcgccatgctcgc

SEQ ID NO: 21211 - DNA, 20 bp, Artificial Sequence
  MKO10021211_A_Gm21950
  gRNA
atttcattacaatttgctcc

SEQ ID NO: 21212 - DNA, 20 bp, Artificial Sequence
  MKO10021212_A_Gm21950
  gRNA
cctcacctttgaatataacc

SEQ ID NO: 21213 - DNA, 20 bp, Artificial Sequence
  MKO10021213_A_Gm21950
  gRNA
cgagtaattcagaagtgtga

SEQ ID NO: 21214 - DNA, 20 bp, Artificial Sequence
  MKO10021214_A_Gm21951
  gRNA
caaccactgttgtttgtaaa

SEQ ID NO: 21215 - DNA, 20 bp, Artificial Sequence
  MKO10021215_A_Gm21951
  gRNA
acttggagagaatcacacca

SEQ ID NO: 21216 - DNA, 20 bp, Artificial Sequence
  MKO10021216_A_Gm21951
  gRNA
atcttgttcaagaatagttg

SEQ ID NO: 21217 - DNA, 20 bp, Artificial Sequence
  MKO10021217_A_Gm2382
  gRNA
cttctcgtaccttctgcgtg

SEQ ID NO: 21218 - DNA, 20 bp, Artificial Sequence
  MKO10021218_A_Gm2382
  gRNA
cgttgtgtaacttaggatgc

SEQ ID NO: 21219 - DNA, 20 bp, Artificial Sequence
  MKO10021219_A_Gm2382
  gRNA
atcttgcatgctcagaaaga

SEQ ID NO: 21220 - DNA, 20 bp, Artificial Sequence
  MKO10021220_A_Gm2663
  gRNA
gtacccactgatcattgata

SEQ ID NO: 21221 - DNA, 20 bp, Artificial Sequence
  MKO10021221_A_Gm2663
  gRNA
atctctccattgcagacaac

SEQ ID NO: 21222 - DNA, 20 bp, Artificial Sequence
  MKO10021222_A_Gm2663
  gRNA
gctcccttatcaatgatcag

SEQ ID NO: 21223 - DNA, 20 bp, Artificial Sequence
  MKO10021223_A_Gm266
  gRNA
gcggccgcacgcgaactgcg

SEQ ID NO: 21224 - DNA, 20 bp, Artificial Sequence
  MKO10021224_A_Gm266
  gRNA
cgagtggcgttgcccgttcc

SEQ ID NO: 21225 - DNA, 20 bp, Artificial Sequence
  MKO10021225_A_Gm266
  gRNA
tgcgccccgccaaagactac

SEQ ID NO: 21226 - DNA, 20 bp, Artificial Sequence
  MKO10021226_A_Gm2696
  gRNA
ccggggatagaatcagcagc

SEQ ID NO: 21227 - DNA, 20 bp, Artificial Sequence
  MKO10021227_A_Gm2696
  gRNA
acactcgaaccaactcctcc

SEQ ID NO: 21228 - DNA, 20 bp, Artificial Sequence
  MKO10021228_A_Gm2696
  gRNA
gtcagaacagacagacatag

SEQ ID NO: 21229 - DNA, 20 bp, Artificial Sequence
  MKO10021229_A_Gm2799
  gRNA
ctggctccggctatgtcttc

SEQ ID NO: 21230 - DNA, 20 bp, Artificial Sequence
  MKO10021230_A_Gm2799
  gRNA
ccacagccagaagacatagc

SEQ ID NO: 21231 - DNA, 20 bp, Artificial Sequence
  MKO10021231_A_Gm2799
  gRNA
caaccactgttgtttgtaaa

SEQ ID NO: 21232 - DNA, 20 bp, Artificial Sequence
  MKO10021232_A_Gm2825
  gRNA
caaccactgttgtttgtaaa

SEQ ID NO: 21233 - DNA, 20 bp, Artificial Sequence
  MKO10021233_A_Gm2825
  gRNA
acttggagagaatcacacca

SEQ ID NO: 21234 - DNA, 20 bp, Artificial Sequence
  MKO10021234_A_Gm2825
  gRNA
atcttgttcaagaatagttg

SEQ ID NO: 21235 - DNA, 20 bp, Artificial Sequence
  MKO10021235_A_Gm2863
  gRNA
catgctgctgccaaaccttg

SEQ ID NO: 21236 - DNA, 20 bp, Artificial Sequence
  MKO10021236_A_Gm2863
  gRNA
caaccactgttgtttgtaaa

SEQ ID NO: 21237 - DNA, 20 bp, Artificial Sequence
  MKO10021237_A_Gm2863
  gRNA
acttggagagaatcacacca

SEQ ID NO: 21238 - DNA, 20 bp, Artificial Sequence
  MKO10021238_A_Gm2897
  gRNA
tcaaatcctcatacatgtaa

SEQ ID NO: 21239 - DNA, 20 bp, Artificial Sequence
  MKO10021239_A_Gm2897
  gRNA
tgaactagaagaactgaaat

SEQ ID NO: 21240 - DNA, 20 bp, Artificial Sequence
  MKO10021240_A_Gm2897
  gRNA
gttatcttctatcagttcct

SEQ ID NO: 21241 - DNA, 20 bp, Artificial Sequence
  MKO10021241_A_Gm2913
  gRNA
agagaaacacagagaagtct

SEQ ID NO: 21242 - DNA, 20 bp, Artificial Sequence
  MKO10021242_A_Gm2913
  gRNA
gttcacaacagtttcaacaa

SEQ ID NO: 21243 - DNA, 20 bp, Artificial Sequence
  MKO10021243_A_Gm2913
  gRNA
aaattgcagaatatacacat

SEQ ID NO: 21244 - DNA, 20 bp, Artificial Sequence
  MKO10021244_A_Gm2927
  gRNA
tgatcagatttatagcacca

SEQ ID NO: 21245 - DNA, 20 bp, Artificial Sequence
  MKO10021245_A_Gm2927
  gRNA
agagaaacacagagaagtct

SEQ ID NO: 21246 - DNA, 20 bp, Artificial Sequence
  MKO10021246_A_Gm2927
  gRNA
ttgctcctccttatattcaa

SEQ ID NO: 21247 - DNA, 20 bp, Artificial Sequence
  MKO10021247_A_Gm2933
  gRNA
tgacttactagtcatacaaa

SEQ ID NO: 21248 - DNA, 20 bp, Artificial Sequence
  MKO10021248_A_Gm2933
  gRNA
acttggagagaatcacacca

SEQ ID NO: 21249 - DNA, 20 bp, Artificial Sequence
  MKO10021249_A_Gm2933
  gRNA
caaccactgttgtttgtaaa

SEQ ID NO: 21250 - DNA, 20 bp, Artificial Sequence
  MKO10021250_A_Gm2a
  gRNA
cagcagcggtagacggtgca

SEQ ID NO: 21251 - DNA, 20 bp, Artificial Sequence
  MKO10021251_A_Gm2a
  gRNA
ctgacctagagctaccgagc

SEQ ID NO: 21252 - DNA, 20 bp, Artificial Sequence
  MKO10021252_A_Gm2a
  gRNA
atagacgaatacattcctcc

SEQ ID NO: 21253 - DNA, 20 bp, Artificial Sequence
  MKO10021253_A_Gm3139
  gRNA
accatctagcagagcttgca

SEQ ID NO: 21254 - DNA, 20 bp, Artificial Sequence
  MKO10021254_A_Gm3139
  gRNA
ccacactccagaagcgagca

SEQ ID NO: 21255 - DNA, 20 bp, Artificial Sequence
  MKO10021255_A_Gm3139
  gRNA
cttaccctaggatctgatgc

SEQ ID NO: 21256 - DNA, 20 bp, Artificial Sequence
  MKO10021256_A_Gm3238
  gRNA
cagcagggataggctagagc

SEQ ID NO: 21257 - DNA, 20 bp, Artificial Sequence
  MKO10021257_A_Gm3238
  gRNA
ggacagaagtccaactgctg

SEQ ID NO: 21258 - DNA, 20 bp, Artificial Sequence
  MKO10021258_A_Gm3238
  gRNA
gcctcctcctgccagcccag

SEQ ID NO: 21259 - DNA, 20 bp, Artificial Sequence
  MKO10021259_A_Gm3258
  gRNA
tcagctcccgcacgattcct

SEQ ID NO: 21260 - DNA, 20 bp, Artificial Sequence
  MKO10021260_A_Gm3258
  gRNA
cgagtcagtaactttaagcc

SEQ ID NO: 21261 - DNA, 20 bp, Artificial Sequence
  MKO10021261_A_Gm3258
  gRNA
gcctgccccaaggaatcgtg

SEQ ID NO: 21262 - DNA, 20 bp, Artificial Sequence
  MKO10021262_A_Gm3259
  gRNA
gcctttcccctgtctccatg

SEQ ID NO: 21263 - DNA, 20 bp, Artificial Sequence
  MKO10021263_A_Gm3259
  gRNA
tccatctagcagagcttgca

SEQ ID NO: 21264 - DNA, 20 bp, Artificial Sequence
  MKO10021264_A_Gm3259
  gRNA
tcatgtagtctcttagaaaa

SEQ ID NO: 21265 - DNA, 20 bp, Artificial Sequence
  MKO10021265_A_Gm3264
  gRNA
cctcatacatgtaaacgttc

SEQ ID NO: 21266 - DNA, 20 bp, Artificial Sequence
  MKO10021266_A_Gm3264
  gRNA
tgaactagaagaactgaaat

SEQ ID NO: 21267 - DNA, 20 bp, Artificial Sequence
  MKO10021267_A_Gm3264
  gRNA
gttatcttctatcagttcct

SEQ ID NO: 21268 - DNA, 20 bp, Artificial Sequence
  MKO10021268_A_Gm3285
  gRNA
ccgcccagccaacaccgcca

SEQ ID NO: 21269 - DNA, 20 bp, Artificial Sequence
  MKO10021269_A_Gm3285
  gRNA
aagagcgtgttgaatgtgtg

SEQ ID NO: 21270 - DNA, 20 bp, Artificial Sequence
  MKO10021270_A_Gm3285
  gRNA
ctggagcacagcagcagggc

SEQ ID NO: 21271 - DNA, 20 bp, Artificial Sequence
  MKO10021271_A_Gm3286
  gRNA
tccatctagcagagcttgca

SEQ ID NO: 21272 - DNA, 20 bp, Artificial Sequence
  MKO10021272_A_Gm3286
  gRNA
ccacactccagaagctagca

SEQ ID NO: 21273 - DNA, 20 bp, Artificial Sequence
  MKO10021273_A_Gm3286
  gRNA
tatccatgtttactgcaaac

SEQ ID NO: 21274 - DNA, 20 bp, Artificial Sequence
  MKO10021274_A_Gm3317
  gRNA
tcaaatcctcatacatgtaa

SEQ ID NO: 21275 - DNA, 20 bp, Artificial Sequence
  MKO10021275_A_Gm3317
  gRNA
tgaactagaagaactgaaat

SEQ ID NO: 21276 - DNA, 20 bp, Artificial Sequence
  MKO10021276_A_Gm3317
  gRNA
gttatcttctatcagttcct

SEQ ID NO: 21277 - DNA, 20 bp, Artificial Sequence
  MKO10021277_A_Gm3336
  gRNA
ctgcaggaatggcgagctcg

SEQ ID NO: 21278 - DNA, 20 bp, Artificial Sequence
  MKO10021278_A_Gm3336
  gRNA
acagtggacaacccttgtgg

SEQ ID NO: 21279 - DNA, 20 bp, Artificial Sequence
  MKO10021279_A_Gm3336
  gRNA
tctagggcagcgtgagccag

SEQ ID NO: 21280 - DNA, 20 bp, Artificial Sequence
  MKO10021280_A_Gm3376
  gRNA
aagacacttcaagaaatatt

SEQ ID NO: 21281 - DNA, 20 bp, Artificial Sequence
  MKO10021281_A_Gm3376
  gRNA
aaagaattaccacgtgctac

SEQ ID NO: 21282 - DNA, 20 bp, Artificial Sequence
  MKO10021282_A_Gm3376
  gRNA
acagcattcttagcatctgc

SEQ ID NO: 21283 - DNA, 20 bp, Artificial Sequence
  MKO10021283_A_Gm3383
  gRNA
aggctatttcagaaagagaa

SEQ ID NO: 21284 - DNA, 20 bp, Artificial Sequence
  MKO10021284_A_Gm3383
  gRNA
attccctcttccttctctgt

SEQ ID NO: 21285 - DNA, 20 bp, Artificial Sequence
  MKO10021285_A_Gm3383
  gRNA
tgaactagaagaactgaaat

SEQ ID NO: 21286 - DNA, 20 bp, Artificial Sequence
  MKO10021286_A_Gm3402
  gRNA
ccactcacgttctcatcagc

SEQ ID NO: 21287 - DNA, 20 bp, Artificial Sequence
  MKO10021287_A_Gm3402
  gRNA
ggtctgttctcaaaatgaac

SEQ ID NO: 21288 - DNA, 20 bp, Artificial Sequence
  MKO10021288_A_Gm3402
  gRNA
ccactcacctcttagtttgc

SEQ ID NO: 21289 - DNA, 20 bp, Artificial Sequence
  MKO10021289_A_Gm3404
  gRNA
ctactcacctcttagtttgc

SEQ ID NO: 21290 - DNA, 20 bp, Artificial Sequence
  MKO10021290_A_Gm3404
  gRNA
ccactcacgttctcatcagc

SEQ ID NO: 21291 - DNA, 20 bp, Artificial Sequence
  MKO10021291_A_Gm3404
  gRNA
ggtctgttctcaaaatgaac

SEQ ID NO: 21292 - DNA, 20 bp, Artificial Sequence
  MKO10021292_A_Gm3409
  gRNA
ttgcctcctgatcttccagc

SEQ ID NO: 21293 - DNA, 20 bp, Artificial Sequence
  MKO10021293_A_Gm3409
  gRNA
gctctccctgctggaagatc

SEQ ID NO: 21294 - DNA, 20 bp, Artificial Sequence
  MKO10021294_A_Gm3409
  gRNA
ccactcacgttctcatcagc

SEQ ID NO: 21295 - DNA, 20 bp, Artificial Sequence
  MKO10021295_A_Gm3415
  gRNA
ccactcacgttctcatcagc

SEQ ID NO: 21296 - DNA, 20 bp, Artificial Sequence
  MKO10021296_A_Gm3415
  gRNA
ggtctgttctcaaaatgaac

SEQ ID NO: 21297 - DNA, 20 bp, Artificial Sequence
  MKO10021297_A_Gm3415
  gRNA
ccactcacctcttagtttgc

SEQ ID NO: 21298 - DNA, 20 bp, Artificial Sequence
  MKO10021298_A_Gm3417
  gRNA
ccgatcaagatggagcggcg

SEQ ID NO: 21299 - DNA, 20 bp, Artificial Sequence
  MKO10021299_A_Gm3417
  gRNA
gactccttctcgaacatgct

SEQ ID NO: 21300 - DNA, 20 bp, Artificial Sequence
  MKO10021300_A_Gm3417
  gRNA
taattacctttaatatctgc

SEQ ID NO: 21301 - DNA, 20 bp, Artificial Sequence
  MKO10021301_A_Gm3435
  gRNA
ctaattcttcatatctcaca

SEQ ID NO: 21302 - DNA, 20 bp, Artificial Sequence
  MKO10021302_A_Gm3435
  gRNA
tttctttgagttcaaaccca

SEQ ID NO: 21303 - DNA, 20 bp, Artificial Sequence
  MKO10021303_A_Gm3435
  gRNA
cctctggataagttgtccac

SEQ ID NO: 21304 - DNA, 20 bp, Artificial Sequence
  MKO10021304_A_Gm3448
  gRNA
ccgatcaagatggagcggcg

SEQ ID NO: 21305 - DNA, 20 bp, Artificial Sequence
  MKO10021305_A_Gm3448
  gRNA
gactccttctcgaacatgct

SEQ ID NO: 21306 - DNA, 20 bp, Artificial Sequence
  MKO10021306_A_Gm3448
  gRNA
taattacctttaatatctgc

SEQ ID NO: 21307 - DNA, 20 bp, Artificial Sequence
  MKO10021307_A_Gm3488
  gRNA
tcaaatcctcatacatgtaa

SEQ ID NO: 21308 - DNA, 20 bp, Artificial Sequence
  MKO10021308_A_Gm3488
  gRNA
tgaactagaagaactgaaat

SEQ ID NO: 21309 - DNA, 20 bp, Artificial Sequence
  MKO10021309_A_Gm3488
  gRNA
gttatcttctatcagttcct

SEQ ID NO: 21310 - DNA, 20 bp, Artificial Sequence
  MKO10021310_A_Gm3500
  gRNA
tgaactagaagaactgaaat

SEQ ID NO: 21311 - DNA, 20 bp, Artificial Sequence
  MKO10021311_A_Gm3500
  gRNA
tcaaatcctcatacatgtaa

SEQ ID NO: 21312 - DNA, 20 bp, Artificial Sequence
  MKO10021312_A_Gm3500
  gRNA
acaacatgagaagacaatgt

SEQ ID NO: 21313 - DNA, 20 bp, Artificial Sequence
  MKO10021313_A_Gm3558
  gRNA
tgaactagaagaactgaaat

SEQ ID NO: 21314 - DNA, 20 bp, Artificial Sequence
  MKO10021314_A_Gm3558
  gRNA
tcaaatcctcatacatgtaa

SEQ ID NO: 21315 - DNA, 20 bp, Artificial Sequence
  MKO10021315_A_Gm3558
  gRNA
acaacatgagaagacaatgt

SEQ ID NO: 21316 - DNA, 20 bp, Artificial Sequence
  MKO10021316_A_Gm3604
  gRNA
actttcgtatacagatactg

SEQ ID NO: 21317 - DNA, 20 bp, Artificial Sequence
  MKO10021317_A_Gm3604
  gRNA
ccatatacatatacgcaatg

SEQ ID NO: 21318 - DNA, 20 bp, Artificial Sequence
  MKO10021318_A_Gm3604
  gRNA
agatcgctagcaatgcccta

SEQ ID NO: 21319 - DNA, 20 bp, Artificial Sequence
  MKO10021319_A_Gm362
  gRNA
tctatacgacctttcgctct

SEQ ID NO: 21320 - DNA, 20 bp, Artificial Sequence
  MKO10021320_A_Gm362
  gRNA
gtaaaactgtgaatcgctca

SEQ ID NO: 21321 - DNA, 20 bp, Artificial Sequence
  MKO10021321_A_Gm362
  gRNA
cttagagatgtcgtacaaac

SEQ ID NO: 21322 - DNA, 20 bp, Artificial Sequence
  MKO10021322_A_Gm3646
  gRNA
accggcgacctttcatatct

SEQ ID NO: 21323 - DNA, 20 bp, Artificial Sequence
  MKO10021323_A_Gm3646
  gRNA
ccctagatatgaaaggtcgc

SEQ ID NO: 21324 - DNA, 20 bp, Artificial Sequence
  MKO10021324_A_Gm3646
  gRNA
cccaggtactttcagtccac

SEQ ID NO: 21325 - DNA, 20 bp, Artificial Sequence
  MKO10021325_A_Gm364
  gRNA
agtaacatcatgtccctaca

SEQ ID NO: 21326 - DNA, 20 bp, Artificial Sequence
  MKO10021326_A_Gm364
  gRNA
tttaggattgttgataacac

SEQ ID NO: 21327 - DNA, 20 bp, Artificial Sequence
  MKO10021327_A_Gm364
  gRNA
atcagcatacacctgaattg

SEQ ID NO: 21328 - DNA, 20 bp, Artificial Sequence
  MKO10021328_A_Gm3696
  gRNA
ttgggacacagatgttcttg

SEQ ID NO: 21329 - DNA, 20 bp, Artificial Sequence
  MKO10021329_A_Gm3696
  gRNA
tgaactagaagaactgaaat

SEQ ID NO: 21330 - DNA, 20 bp, Artificial Sequence
  MKO10021330_A_Gm3696
  gRNA
tcaaatcctcatacatgtaa

SEQ ID NO: 21331 - DNA, 20 bp, Artificial Sequence
  MKO10021331_A_Gm3701
  gRNA
caaacacaaaaagcagagat

SEQ ID NO: 21332 - DNA, 20 bp, Artificial Sequence
  MKO10021332_A_Gm3701
  gRNA
gttcacaacagtttcaacaa

SEQ ID NO: 21333 - DNA, 20 bp, Artificial Sequence
  MKO10021333_A_Gm3701
  gRNA
agagaaacacagagaagtct

SEQ ID NO: 21334 - DNA, 20 bp, Artificial Sequence
  MKO10021334_A_Gm3706
  gRNA
aatcatgccattgttgaaac

SEQ ID NO: 21335 - DNA, 20 bp, Artificial Sequence
  MKO10021335_A_Gm3706
  gRNA
gttcacaccagtttcaacaa

SEQ ID NO: 21336 - DNA, 20 bp, Artificial Sequence
  MKO10021336_A_Gm3706
  gRNA
agagaaacacagagaagtct

SEQ ID NO: 21337 - DNA, 20 bp, Artificial Sequence
  MKO10021337_A_Gm3750
  gRNA
caaccactgttgtttgtaaa

SEQ ID NO: 21338 - DNA, 20 bp, Artificial Sequence
  MKO10021338_A_Gm3750
  gRNA
acttggagagaatcacacca

SEQ ID NO: 21339 - DNA, 20 bp, Artificial Sequence
  MKO10021339_A_Gm3750
  gRNA
atcttgttcaagaatagttg

SEQ ID NO: 21340 - DNA, 20 bp, Artificial Sequence
  MKO10021340_A_Gm3763
  gRNA
caagctaaaaagaaacagtt

SEQ ID NO: 21341 - DNA, 20 bp, Artificial Sequence
  MKO10021341_A_Gm3763
  gRNA
ccacattaaaatccgtgctc

SEQ ID NO: 21342 - DNA, 20 bp, Artificial Sequence
  MKO10021342_A_Gm3763
  gRNA
caaccactgttgtttgtaaa

SEQ ID NO: 21343 - DNA, 20 bp, Artificial Sequence
  MKO10021343_A_Gm3776
  gRNA
cctccacccctgctgcagcc

SEQ ID NO: 21344 - DNA, 20 bp, Artificial Sequence
  MKO10021344_A_Gm3776
  gRNA
gtgaaccacagttgctgcaa

SEQ ID NO: 21345 - DNA, 20 bp, Artificial Sequence
  MKO10021345_A_Gm3776
  gRNA
agagaagtttatacagagtc

SEQ ID NO: 21346 - DNA, 20 bp, Artificial Sequence
  MKO10021346_A_Gm382
  gRNA
gcataatttacgtcatctat

SEQ ID NO: 21347 - DNA, 20 bp, Artificial Sequence
  MKO10021347_A_Gm382
  gRNA
attgtgaaattgcacgtaac

SEQ ID NO: 21348 - DNA, 20 bp, Artificial Sequence
  MKO10021348_A_Gm382
  gRNA
accctaaaccagcaggttcg

SEQ ID NO: 21349 - DNA, 20 bp, Artificial Sequence
  MKO10021349_A_Gm3985
  gRNA
gccatcccgtcatcgataga

SEQ ID NO: 21350 - DNA, 20 bp, Artificial Sequence
  MKO10021350_A_Gm3985
  gRNA
taagcatgtacgagttcctt

SEQ ID NO: 21351 - DNA, 20 bp, Artificial Sequence
  MKO10021351_A_Gm3985
  gRNA
gagtttccttctatcgatga

SEQ ID NO: 21352 - DNA, 20 bp, Artificial Sequence
  MKO10021352_A_Gm4027
  gRNA
tgtgtccatttcattgattt

SEQ ID NO: 21353 - DNA, 20 bp, Artificial Sequence
  MKO10021353_A_Gm4027
  gRNA
tccatcatgccaaagaataa

SEQ ID NO: 21354 - DNA, 20 bp, Artificial Sequence
  MKO10021354_A_Gm4027
  gRNA
agatgaagcaagaagtctga

SEQ ID NO: 21355 - DNA, 20 bp, Artificial Sequence
  MKO10021355_A_Gm4064
  gRNA
aaagaattaccacgtgctac

SEQ ID NO: 21356 - DNA, 20 bp, Artificial Sequence
  MKO10021356_A_Gm4064
  gRNA
atggcagaaactgatcagcc

SEQ ID NO: 21357 - DNA, 20 bp, Artificial Sequence
  MKO10021357_A_Gm4064
  gRNA
cagcattcttagcatctgca

SEQ ID NO: 21358 - DNA, 20 bp, Artificial Sequence
  MKO10021358_A_Gm4070
  gRNA
gcttctcgatatttcttgaa

SEQ ID NO: 21359 - DNA, 20 bp, Artificial Sequence
  MKO10021359_A_Gm4070
  gRNA
ttcaagaaatatcgagaagc

SEQ ID NO: 21360 - DNA, 20 bp, Artificial Sequence
  MKO10021360_A_Gm4070
  gRNA
tcttccgtccttccatagtt

SEQ ID NO: 21361 - DNA, 20 bp, Artificial Sequence
  MKO10021361_A_Gm410
  gRNA
tgtgttcaatgccgtgaccc

SEQ ID NO: 21362 - DNA, 20 bp, Artificial Sequence
  MKO10021362_A_Gm410
  gRNA
cacaggcacaacacttcgtc

SEQ ID NO: 21363 - DNA, 20 bp, Artificial Sequence
  MKO10021363_A_Gm410
  gRNA
cgatgttgaagcacatacat

SEQ ID NO: 21364 - DNA, 20 bp, Artificial Sequence
  MKO10021364_A_Gm4133
  gRNA
gccctctccatgtctgctca

SEQ ID NO: 21365 - DNA, 20 bp, Artificial Sequence
  MKO10021365_A_Gm4133
  gRNA
cagttgaagagcacagaaca

SEQ ID NO: 21366 - DNA, 20 bp, Artificial Sequence
  MKO10021366_A_Gm4133
  gRNA
tgtccatcagtttgtcactc

SEQ ID NO: 21367 - DNA, 20 bp, Artificial Sequence
  MKO10021367_A_Gm4141
  gRNA
gccctctccatgtctgctca

SEQ ID NO: 21368 - DNA, 20 bp, Artificial Sequence
  MKO10021368_A_Gm4141
  gRNA
catttgaagagcacagaaca

SEQ ID NO: 21369 - DNA, 20 bp, Artificial Sequence
  MKO10021369_A_Gm4141
  gRNA
cagagcaagtgtccaaaatt

SEQ ID NO: 21370 - DNA, 20 bp, Artificial Sequence
  MKO10021370_A_Gm4175
  gRNA
gccctctccatgtctgttcg

SEQ ID NO: 21371 - DNA, 20 bp, Artificial Sequence
  MKO10021371_A_Gm4175
  gRNA
cagagcaagtgtcccaaatt

SEQ ID NO: 21372 - DNA, 20 bp, Artificial Sequence
  MKO10021372_A_Gm4175
  gRNA
gaccatgatgctcatgaatg

SEQ ID NO: 21373 - DNA, 20 bp, Artificial Sequence
  MKO10021373_A_Gm4177
  gRNA
accctctcaatgtctgatca

SEQ ID NO: 21374 - DNA, 20 bp, Artificial Sequence
  MKO10021374_A_Gm4177
  gRNA
cagttgaaaagcacagaaca

SEQ ID NO: 21375 - DNA, 20 bp, Artificial Sequence
  MKO10021375_A_Gm4177
  gRNA
taacatccacattccaatta

SEQ ID NO: 21376 - DNA, 20 bp, Artificial Sequence
  MKO10021376_A_Gm4187
  gRNA
gccctctccatgtctgctca

SEQ ID NO: 21377 - DNA, 20 bp, Artificial Sequence
  MKO10021377_A_Gm4187
  gRNA
cagttgaagagcacagaaca

SEQ ID NO: 21378 - DNA, 20 bp, Artificial Sequence
  MKO10021378_A_Gm4187
  gRNA
tgtccatcagtttgtcactc

SEQ ID NO: 21379 - DNA, 20 bp, Artificial Sequence
  MKO10021379_A_Gm4201
  gRNA
gccctctccatgtctgctca

SEQ ID NO: 21380 - DNA, 20 bp, Artificial Sequence
  MKO10021380_A_Gm4201
  gRNA
catttgaagagcacagaaca

SEQ ID NO: 21381 - DNA, 20 bp, Artificial Sequence
  MKO10021381_A_Gm4201
  gRNA
cagagcaagtgtccaaaatt

SEQ ID NO: 21382 - DNA, 20 bp, Artificial Sequence
  MKO10021382_A_Gm4214
  gRNA
gccctctccatgtctgttcg

SEQ ID NO: 21383 - DNA, 20 bp, Artificial Sequence
  MKO10021383_A_Gm4214
  gRNA
cagagcaagtgtcccaaatt

SEQ ID NO: 21384 - DNA, 20 bp, Artificial Sequence
  MKO10021384_A_Gm4214
  gRNA
gaccatgatgctcatgaatg

SEQ ID NO: 21385 - DNA, 20 bp, Artificial Sequence
  MKO10021385_A_Gm4216
  gRNA
accctctcaatgtctgatca

SEQ ID NO: 21386 - DNA, 20 bp, Artificial Sequence
  MKO10021386_A_Gm4216
  gRNA
cagttgaaaagcacagaaca

SEQ ID NO: 21387 - DNA, 20 bp, Artificial Sequence
  MKO10021387_A_Gm4216
  gRNA
taacatccacattccaatta

SEQ ID NO: 21388 - DNA, 20 bp, Artificial Sequence
  MKO10021388_A_Gm428
  gRNA
tctgaatacctgaggaactt

SEQ ID NO: 21389 - DNA, 20 bp, Artificial Sequence
  MKO10021389_A_Gm428
  gRNA
gaaatgacaaagaagccaat

SEQ ID NO: 21390 - DNA, 20 bp, Artificial Sequence
  MKO10021390_A_Gm428
  gRNA
cacctggcacatagcctccc

SEQ ID NO: 21391 - DNA, 20 bp, Artificial Sequence
  MKO10021391_A_Gm4297
  gRNA
agatgaacaattcagtatgt

SEQ ID NO: 21392 - DNA, 20 bp, Artificial Sequence
  MKO10021392_A_Gm4297
  gRNA
acgtaagtttctcagttgaa

SEQ ID NO: 21393 - DNA, 20 bp, Artificial Sequence
  MKO10021393_A_Gm4297
  gRNA
tgcttcagaattggacctaa

SEQ ID NO: 21394 - DNA, 20 bp, Artificial Sequence
  MKO10021394_A_Gm4301
  gRNA
aatcaggtaccttggataca

SEQ ID NO: 21395 - DNA, 20 bp, Artificial Sequence
  MKO10021395_A_Gm4301
  gRNA
gctttgctcagttgtttagc

SEQ ID NO: 21396 - DNA, 20 bp, Artificial Sequence
  MKO10021396_A_Gm4301
  gRNA
tgtactctctcatagccttc

SEQ ID NO: 21397 - DNA, 20 bp, Artificial Sequence
  MKO10021397_A_Gm4302
  gRNA
tatcctgataataatccagc

SEQ ID NO: 21398 - DNA, 20 bp, Artificial Sequence
  MKO10021398_A_Gm4302
  gRNA
ggcaaattccatgactacca

SEQ ID NO: 21399 - DNA, 20 bp, Artificial Sequence
  MKO10021399_A_Gm4302
  gRNA
tgtactctctcatagccttc

SEQ ID NO: 21400 - DNA, 20 bp, Artificial Sequence
  MKO10021400_A_Gm4303
  gRNA
tatcctgataataatccagc

SEQ ID NO: 21401 - DNA, 20 bp, Artificial Sequence
  MKO10021401_A_Gm4303
  gRNA
ggcaaattccatgactacca

SEQ ID NO: 21402 - DNA, 20 bp, Artificial Sequence
  MKO10021402_A_Gm4303
  gRNA
tgtactctctcatagccttc

SEQ ID NO: 21403 - DNA, 20 bp, Artificial Sequence
  MKO10021403_A_Gm4305
  gRNA
tatcctgataataatccagc

SEQ ID NO: 21404 - DNA, 20 bp, Artificial Sequence
  MKO10021404_A_Gm4305
  gRNA
ggcaaattccatgactacca

SEQ ID NO: 21405 - DNA, 20 bp, Artificial Sequence
  MKO10021405_A_Gm4305
  gRNA
tgtactctctcatagccttc

SEQ ID NO: 21406 - DNA, 20 bp, Artificial Sequence
  MKO10021406_A_Gm4307
  gRNA
tatcctgataataatccagc

SEQ ID NO: 21407 - DNA, 20 bp, Artificial Sequence
  MKO10021407_A_Gm4307
  gRNA
ggcaaattccatgactacca

SEQ ID NO: 21408 - DNA, 20 bp, Artificial Sequence
  MKO10021408_A_Gm4307
  gRNA
tgtactctctcatagccttc

SEQ ID NO: 21409 - DNA, 20 bp, Artificial Sequence
  MKO10021409_A_Gm4312
  gRNA
gctttgctcagttgtttagc

SEQ ID NO: 21410 - DNA, 20 bp, Artificial Sequence
  MKO10021410_A_Gm4312
  gRNA
aatcaggtaccttggataca

SEQ ID NO: 21411 - DNA, 20 bp, Artificial Sequence
  MKO10021411_A_Gm4312
  gRNA
tgtactctctcatagccttc

SEQ ID NO: 21412 - DNA, 20 bp, Artificial Sequence
  MKO10021412_A_Gm4340
  gRNA
aatcaggtaccttggataca

SEQ ID NO: 21413 - DNA, 20 bp, Artificial Sequence
  MKO10021413_A_Gm4340
  gRNA
cacttgtctggaagttgttt

SEQ ID NO: 21414 - DNA, 20 bp, Artificial Sequence
  MKO10021414_A_Gm4340
  gRNA
tgttcagtcgaagctgtgaa

SEQ ID NO: 21415 - DNA, 20 bp, Artificial Sequence
  MKO10021415_A_Gm436
  gRNA
gagactaggggtactgacca

SEQ ID NO: 21416 - DNA, 20 bp, Artificial Sequence
  MKO10021416_A_Gm436
  gRNA
gatgatgcccctccggagtt

SEQ ID NO: 21417 - DNA, 20 bp, Artificial Sequence
  MKO10021417_A_Gm436
  gRNA
cttatggagtggacccatct

SEQ ID NO: 21418 - DNA, 20 bp, Artificial Sequence
  MKO10021418_A_Gm438
  gRNA
tataatacctcgcctgtatt

SEQ ID NO: 21419 - DNA, 20 bp, Artificial Sequence
  MKO10021419_A_Gm438
  gRNA
tccaagatctaatcctgata

SEQ ID NO: 21420 - DNA, 20 bp, Artificial Sequence
  MKO10021420_A_Gm438
  gRNA
ttggcatgcttgttaagacc

SEQ ID NO: 21421 - DNA, 20 bp, Artificial Sequence
  MKO10021421_A_Gm4461
  gRNA
ttcctttctactcaccgtca

SEQ ID NO: 21422 - DNA, 20 bp, Artificial Sequence
  MKO10021422_A_Gm4461
  gRNA
gtagcggtcatagcccatga

SEQ ID NO: 21423 - DNA, 20 bp, Artificial Sequence
  MKO10021423_A_Gm4461
  gRNA
caagatggtaactacaatga

SEQ ID NO: 21424 - DNA, 20 bp, Artificial Sequence
  MKO10021424_A_Gm4477
  gRNA
gcagttgcttcttctgcaag

SEQ ID NO: 21425 - DNA, 20 bp, Artificial Sequence
  MKO10021425_A_Gm4477
  gRNA
gtgagaactcatgtaggttc

SEQ ID NO: 21426 - DNA, 20 bp, Artificial Sequence
  MKO10021426_A_Gm4477
  gRNA
ttatcatatccgaaaatacc

SEQ ID NO: 21427 - DNA, 20 bp, Artificial Sequence
  MKO10021427_A_Gm4498
  gRNA
taaatccgtgaaaaccactg

SEQ ID NO: 21428 - DNA, 20 bp, Artificial Sequence
  MKO10021428_A_Gm4498
  gRNA
catttgaagagcagagaaca

SEQ ID NO: 21429 - DNA, 20 bp, Artificial Sequence
  MKO10021429_A_Gm4498
  gRNA
gttattcttgttacagttgt

SEQ ID NO: 21430 - DNA, 20 bp, Artificial Sequence
  MKO10021430_A_Gm44
  gRNA
tgataagatcatacactcgc

SEQ ID NO: 21431 - DNA, 20 bp, Artificial Sequence
  MKO10021431_A_Gm44
  gRNA
ccgtgccagaaattatgctc

SEQ ID NO: 21432 - DNA, 20 bp, Artificial Sequence
  MKO10021432_A_Gm44
  gRNA
ccaagatattctgacccaaa

SEQ ID NO: 21433 - DNA, 20 bp, Artificial Sequence
  MKO10021433_A_Gm4559
  gRNA
gcagcagctagattgacagc

SEQ ID NO: 21434 - DNA, 20 bp, Artificial Sequence
  MKO10021434_A_Gm4559
  gRNA
ccctgctgttcatcagcctg

SEQ ID NO: 21435 - DNA, 20 bp, Artificial Sequence
  MKO10021435_A_Gm4559
  gRNA
cccgcaggctgatgaacagc

SEQ ID NO: 21436 - DNA, 20 bp, Artificial Sequence
  MKO10021436_A_Gm4567
  gRNA
agagggcctgatgacggagc

SEQ ID NO: 21437 - DNA, 20 bp, Artificial Sequence
  MKO10021437_A_Gm4567
  gRNA
tcatggtcctgacaatgctg

SEQ ID NO: 21438 - DNA, 20 bp, Artificial Sequence
  MKO10021438_A_Gm4567
  gRNA
tagaggagagcgagactcga

SEQ ID NO: 21439 - DNA, 20 bp, Artificial Sequence
  MKO10021439_A_Gm4724
  gRNA
cgtgcatgtgaacttcactc

SEQ ID NO: 21440 - DNA, 20 bp, Artificial Sequence
  MKO10021440_A_Gm4724
  gRNA
tatagctgtgagattcttat

SEQ ID NO: 21441 - DNA, 20 bp, Artificial Sequence
  MKO10021441_A_Gm4724
  gRNA
actgggtttaggttacattt

SEQ ID NO: 21442 - DNA, 20 bp, Artificial Sequence
  MKO10021442_A_Gm4736
  gRNA
gagacgcacagggtccccct

SEQ ID NO: 21443 - DNA, 20 bp, Artificial Sequence
  MKO10021443_A_Gm4736
  gRNA
ggaccctgtgcgtctccctg

SEQ ID NO: 21444 - DNA, 20 bp, Artificial Sequence
  MKO10021444_A_Gm4736
  gRNA
ccagcaaggcccacccccgc

SEQ ID NO: 21445 - DNA, 20 bp, Artificial Sequence
  MKO10021445_A_Gm4745
  gRNA
tgatgagtgccagtacccaa

SEQ ID NO: 21446 - DNA, 20 bp, Artificial Sequence
  MKO10021446_A_Gm4745
  gRNA
gtggagctggctgtattgat

SEQ ID NO: 21447 - DNA, 20 bp, Artificial Sequence
  MKO10021447_A_Gm4745
  gRNA
aagttctttgccagttcttg

SEQ ID NO: 21448 - DNA, 20 bp, Artificial Sequence
  MKO10021448_A_Gm4763
  gRNA
aatgcttgcgactacacgtg

SEQ ID NO: 21449 - DNA, 20 bp, Artificial Sequence
  MKO10021449_A_Gm4763
  gRNA
ccccgaaagtgcaaacagac

SEQ ID NO: 21450 - DNA, 20 bp, Artificial Sequence
  MKO10021450_A_Gm4763
  gRNA
agaggacaaatttggtatgc

SEQ ID NO: 21451 - DNA, 20 bp, Artificial Sequence
  MKO10021451_A_Gm4787
  gRNA
tcgcgcgtgctgcgtgtatt

SEQ ID NO: 21452 - DNA, 20 bp, Artificial Sequence
  MKO10021452_A_Gm4787
  gRNA
atacaaaacgttcctcgttg

SEQ ID NO: 21453 - DNA, 20 bp, Artificial Sequence
  MKO10021453_A_Gm4787
  gRNA
ctcttcagagggttagttat

SEQ ID NO: 21454 - DNA, 20 bp, Artificial Sequence
  MKO10021454_A_Gm4788
  gRNA
agaatggacaatctgcatac

SEQ ID NO: 21455 - DNA, 20 bp, Artificial Sequence
  MKO10021455_A_Gm4788
  gRNA
ctttccactgctaaagggga

SEQ ID NO: 21456 - DNA, 20 bp, Artificial Sequence
  MKO10021456_A_Gm4788
  gRNA
aacatcctatagatgtaaac

SEQ ID NO: 21457 - DNA, 20 bp, Artificial Sequence
  MKO10021457_A_Gm4791
  gRNA
gcctaatgagggacgaagcc

SEQ ID NO: 21458 - DNA, 20 bp, Artificial Sequence
  MKO10021458_A_Gm4791
  gRNA
tcagcagtctacatatcccc

SEQ ID NO: 21459 - DNA, 20 bp, Artificial Sequence
  MKO10021459_A_Gm4791
  gRNA
atggacttcagaagagccac

SEQ ID NO: 21460 - DNA, 20 bp, Artificial Sequence
  MKO10021460_A_Gm4794
  gRNA
acgggagctttccttcgcaa

SEQ ID NO: 21461 - DNA, 20 bp, Artificial Sequence
  MKO10021461_A_Gm4794
  gRNA
gattcgaggggatggcattt

SEQ ID NO: 21462 - DNA, 20 bp, Artificial Sequence
  MKO10021462_A_Gm4794
  gRNA
tttgtgaatattgtactcaa

SEQ ID NO: 21463 - DNA, 20 bp, Artificial Sequence
  MKO10021463_A_Gm4832
  gRNA
tcatgaacttcctggtccga

SEQ ID NO: 21464 - DNA, 20 bp, Artificial Sequence
  MKO10021464_A_Gm4832
  gRNA
ggcacaacgaaggccaatga

SEQ ID NO: 21465 - DNA, 20 bp, Artificial Sequence
  MKO10021465_A_Gm4832
  gRNA
atgtgccttaccactgagtt

SEQ ID NO: 21466 - DNA, 20 bp, Artificial Sequence
  MKO10021466_A_Gm4836
  gRNA
atagtaaagaggccagcatt

SEQ ID NO: 21467 - DNA, 20 bp, Artificial Sequence
  MKO10021467_A_Gm4836
  gRNA
tcttcatctgcttctacgtg

SEQ ID NO: 21468 - DNA, 20 bp, Artificial Sequence
  MKO10021468_A_Gm4836
  gRNA
agatgaacaagacagtatgt

SEQ ID NO: 21469 - DNA, 20 bp, Artificial Sequence
  MKO10021469_A_Gm4841
  gRNA
aatgagtttgagccgcttta

SEQ ID NO: 21470 - DNA, 20 bp, Artificial Sequence
  MKO10021470_A_Gm4841
  gRNA
ccaaaccacgtaactttaac

SEQ ID NO: 21471 - DNA, 20 bp, Artificial Sequence
  MKO10021471_A_Gm4841
  gRNA
catcttcagccactgtatcc

SEQ ID NO: 21472 - DNA, 20 bp, Artificial Sequence
  MKO10021472_A_Gm4846
  gRNA
ggtgaagagtgcgatgtcca

SEQ ID NO: 21473 - DNA, 20 bp, Artificial Sequence
  MKO10021473_A_Gm4846
  gRNA
acgtccctcgtcttgtgctg

SEQ ID NO: 21474 - DNA, 20 bp, Artificial Sequence
  MKO10021474_A_Gm4846
  gRNA
agagttgtcgtgattggcat

SEQ ID NO: 21475 - DNA, 20 bp, Artificial Sequence
  MKO10021475_A_Gm4847
  gRNA
tgtaggcagcagcccgtaat

SEQ ID NO: 21476 - DNA, 20 bp, Artificial Sequence
  MKO10021476_A_Gm4847
  gRNA
gatcagcagggtcgctgacc

SEQ ID NO: 21477 - DNA, 20 bp, Artificial Sequence
  MKO10021477_A_Gm4847
  gRNA
ggatgtggtagtagagaccg

SEQ ID NO: 21478 - DNA, 20 bp, Artificial Sequence
  MKO10021478_A_Gm4858
  gRNA
tgcgcattggaagatgacgt

SEQ ID NO: 21479 - DNA, 20 bp, Artificial Sequence
  MKO10021479_A_Gm4858
  gRNA
cttcagggtggatgtcaatg

SEQ ID NO: 21480 - DNA, 20 bp, Artificial Sequence
  MKO10021480_A_Gm4858
  gRNA
tgtagcacaatttctgttca

SEQ ID NO: 21481 - DNA, 20 bp, Artificial Sequence
  MKO10021481_A_Gm4861
  gRNA
ttctgtggttctcgaccagc

SEQ ID NO: 21482 - DNA, 20 bp, Artificial Sequence
  MKO10021482_A_Gm4861
  gRNA
gactagagtaaagaccagcg

SEQ ID NO: 21483 - DNA, 20 bp, Artificial Sequence
  MKO10021483_A_Gm4861
  gRNA
agaactggatctatcatata

SEQ ID NO: 21484 - DNA, 20 bp, Artificial Sequence
  MKO10021484_A_Gm4871
  gRNA
cagtgccatattcaactttc

SEQ ID NO: 21485 - DNA, 20 bp, Artificial Sequence
  MKO10021485_A_Gm4871
  gRNA
ttgctcgcagtcaggctgga

SEQ ID NO: 21486 - DNA, 20 bp, Artificial Sequence
  MKO10021486_A_Gm4871
  gRNA
ctatcttacactgtgcaatt

SEQ ID NO: 21487 - DNA, 20 bp, Artificial Sequence
  MKO10021487_A_Gm4884
  gRNA
caccagtggcctctttgacc

SEQ ID NO: 21488 - DNA, 20 bp, Artificial Sequence
  MKO10021488_A_Gm4884
  gRNA
acaaggtaccatcacctccc

SEQ ID NO: 21489 - DNA, 20 bp, Artificial Sequence
  MKO10021489_A_Gm4884
  gRNA
agcaactccaaacagcctgc

SEQ ID NO: 21490 - DNA, 20 bp, Artificial Sequence
  MKO10021490_A_Gm4894
  gRNA
accaactacctaaactgacg

SEQ ID NO: 21491 - DNA, 20 bp, Artificial Sequence
  MKO10021491_A_Gm4894
  gRNA
gaagagcccctcgtcagttt

SEQ ID NO: 21492 - DNA, 20 bp, Artificial Sequence
  MKO10021492_A_Gm4894
  gRNA
cagtcatttatcatgcatct

SEQ ID NO: 21493 - DNA, 20 bp, Artificial Sequence
  MKO10021493_A_Gm4906
  gRNA
agtactcgagcacactatcg

SEQ ID NO: 21494 - DNA, 20 bp, Artificial Sequence
  MKO10021494_A_Gm4906
  gRNA
cgaccggaatgatttccctc

SEQ ID NO: 21495 - DNA, 20 bp, Artificial Sequence
  MKO10021495_A_Gm4906
  gRNA
tcaaacactgatgtagcacc

SEQ ID NO: 21496 - DNA, 20 bp, Artificial Sequence
  MKO10021496_A_Gm4907
  gRNA
catcatattcttacactgcg

SEQ ID NO: 21497 - DNA, 20 bp, Artificial Sequence
  MKO10021497_A_Gm4907
  gRNA
gatcgccaagctgaaatcag

SEQ ID NO: 21498 - DNA, 20 bp, Artificial Sequence
  MKO10021498_A_Gm4907
  gRNA
gacaaggtgcacaacccagc

SEQ ID NO: 21499 - DNA, 20 bp, Artificial Sequence
  MKO10021499_A_Gm4922
  gRNA
ttgcgtttgttgccaataac

SEQ ID NO: 21500 - DNA, 20 bp, Artificial Sequence
  MKO10021500_A_Gm4922
  gRNA
acagctacataatcgagtcc

SEQ ID NO: 21501 - DNA, 20 bp, Artificial Sequence
  MKO10021501_A_Gm4922
  gRNA
acgtgcagcaacacaatgtc

SEQ ID NO: 21502 - DNA, 20 bp, Artificial Sequence
  MKO10021502_A_Gm4925
  gRNA
ccacctacgagggcgttgga

SEQ ID NO: 21503 - DNA, 20 bp, Artificial Sequence
  MKO10021503_A_Gm4925
  gRNA
tcgttattattacgtaaccc

SEQ ID NO: 21504 - DNA, 20 bp, Artificial Sequence
  MKO10021504_A_Gm4925
  gRNA
cgtcaatacggctttgcaag

SEQ ID NO: 21505 - DNA, 20 bp, Artificial Sequence
  MKO10021505_A_Gm4937
  gRNA
gaaaaagtgccatcgccaaa

SEQ ID NO: 21506 - DNA, 20 bp, Artificial Sequence
  MKO10021506_A_Gm4937
  gRNA
tgttaccaatacaaatacga

SEQ ID NO: 21507 - DNA, 20 bp, Artificial Sequence
  MKO10021507_A_Gm4937
  gRNA
cttcccatcttccgaatgtc

SEQ ID NO: 21508 - DNA, 20 bp, Artificial Sequence
  MKO10021508_A_Gm4944
  gRNA
tgtcatcggattattcatac

SEQ ID NO: 21509 - DNA, 20 bp, Artificial Sequence
  MKO10021509_A_Gm4944
  gRNA
aatccgatgacacctgagcc

SEQ ID NO: 21510 - DNA, 20 bp, Artificial Sequence
  MKO10021510_A_Gm4944
  gRNA
acagggtcagttaacgttca

SEQ ID NO: 21511 - DNA, 20 bp, Artificial Sequence
  MKO10021511_A_Gm4951
  gRNA
gtcaactgttctcttcacgt

SEQ ID NO: 21512 - DNA, 20 bp, Artificial Sequence
  MKO10021512_A_Gm4951
  gRNA
ccgctcaatgttgctctcac

SEQ ID NO: 21513 - DNA, 20 bp, Artificial Sequence
  MKO10021513_A_Gm4951
  gRNA
atcgaagtgatgatctcatg

SEQ ID NO: 21514 - DNA, 20 bp, Artificial Sequence
  MKO10021514_A_Gm4952
  gRNA
tgaccatcttacccgccgca

SEQ ID NO: 21515 - DNA, 20 bp, Artificial Sequence
  MKO10021515_A_Gm4952
  gRNA
cccggggcctgccagattga

SEQ ID NO: 21516 - DNA, 20 bp, Artificial Sequence
  MKO10021516_A_Gm4952
  gRNA
aggccttgtgcccggtagtc

SEQ ID NO: 21517 - DNA, 20 bp, Artificial Sequence
  MKO10021517_A_Gm4975
  gRNA
tcgcttaaagctaaataact

SEQ ID NO: 21518 - DNA, 20 bp, Artificial Sequence
  MKO10021518_A_Gm4975
  gRNA
tgaaacgagcagtctttctg

SEQ ID NO: 21519 - DNA, 20 bp, Artificial Sequence
  MKO10021519_A_Gm4975
  gRNA
ttccaaattacattgatgta

SEQ ID NO: 21520 - DNA, 20 bp, Artificial Sequence
  MKO10021520_A_Gm4980
  gRNA
gatggtgaggttgcgcgcgt

SEQ ID NO: 21521 - DNA, 20 bp, Artificial Sequence
  MKO10021521_A_Gm4980
  gRNA
ctgagcgcgcttgagcgcga

SEQ ID NO: 21522 - DNA, 20 bp, Artificial Sequence
  MKO10021522_A_Gm4980
  gRNA
ggccggtccaacagtacgcg

SEQ ID NO: 21523 - DNA, 20 bp, Artificial Sequence
  MKO10021523_A_Gm4981
  gRNA
acaaaagagctcggcgccac

SEQ ID NO: 21524 - DNA, 20 bp, Artificial Sequence
  MKO10021524_A_Gm4981
  gRNA
gactcactttgtcacagcgc

SEQ ID NO: 21525 - DNA, 20 bp, Artificial Sequence
  MKO10021525_A_Gm4981
  gRNA
ggccccaccggacacttgtg

SEQ ID NO: 21526 - DNA, 20 bp, Artificial Sequence
  MKO10021526_A_Gm4984
  gRNA
cacgtcagcagcgcgtgaac

SEQ ID NO: 21527 - DNA, 20 bp, Artificial Sequence
  MKO10021527_A_Gm4984
  gRNA
gcttcaggaaacggcccgcc

SEQ ID NO: 21528 - DNA, 20 bp, Artificial Sequence
  MKO10021528_A_Gm4984
  gRNA
gcaaggaaagtggcggctta

SEQ ID NO: 21529 - DNA, 20 bp, Artificial Sequence
  MKO10021529_A_Gm5071
  gRNA
tcctgtaagtagatttctca

SEQ ID NO: 21530 - DNA, 20 bp, Artificial Sequence
  MKO10021530_A_Gm5071
  gRNA
cccatgagaaatctacttac

SEQ ID NO: 21531 - DNA, 20 bp, Artificial Sequence
  MKO10021531_A_Gm5071
  gRNA
actgctagcttgggcatgtg

SEQ ID NO: 21532 - DNA, 20 bp, Artificial Sequence
  MKO10021532_A_Gm5072
  gRNA
aatggctagctaaatgtggg

SEQ ID NO: 21533 - DNA, 20 bp, Artificial Sequence
  MKO10021533_A_Gm5072
  gRNA
acaagagcaagagccgatcc

SEQ ID NO: 21534 - DNA, 20 bp, Artificial Sequence
  MKO10021534_A_Gm5072
  gRNA
ctgccagacctcttcctcag

SEQ ID NO: 21535 - DNA, 20 bp, Artificial Sequence
  MKO10021535_A_Gm5077
  gRNA
tccatcgaagaacagtttac

SEQ ID NO: 21536 - DNA, 20 bp, Artificial Sequence
  MKO10021536_A_Gm5077
  gRNA
agccctcctgcagttgaatc

SEQ ID NO: 21537 - DNA, 20 bp, Artificial Sequence
  MKO10021537_A_Gm5077
  gRNA
ggtacgcctggggatagtta

SEQ ID NO: 21538 - DNA, 20 bp, Artificial Sequence
  MKO10021538_A_Gm5082
  gRNA
cgtccaccccataatgttat

SEQ ID NO: 21539 - DNA, 20 bp, Artificial Sequence
  MKO10021539_A_Gm5082
  gRNA
ttgacaatatgatgaacccg

SEQ ID NO: 21540 - DNA, 20 bp, Artificial Sequence
  MKO10021540_A_Gm5082
  gRNA
cacccaagtccaacagagcc

SEQ ID NO: 21541 - DNA, 20 bp, Artificial Sequence
  MKO10021541_A_Gm5087
  gRNA
atatcagataatgaaagtcc

SEQ ID NO: 21542 - DNA, 20 bp, Artificial Sequence
  MKO10021542_A_Gm5087
  gRNA
ttcccttcagtgccacctcc

SEQ ID NO: 21543 - DNA, 20 bp, Artificial Sequence
  MKO10021543_A_Gm5087
  gRNA
ttcctggaggtggcactgaa

SEQ ID NO: 21544 - DNA, 20 bp, Artificial Sequence
  MKO10021544_A_Gm5108
  gRNA
acttactgcaagacttgttg

SEQ ID NO: 21545 - DNA, 20 bp, Artificial Sequence
  MKO10021545_A_Gm5108
  gRNA
agccagagaatatcagaacg

SEQ ID NO: 21546 - DNA, 20 bp, Artificial Sequence
  MKO10021546_A_Gm5108
  gRNA
cattaccatacaacttcact

SEQ ID NO: 21547 - DNA, 20 bp, Artificial Sequence
  MKO10021547_A_Gm5111
  gRNA
atcgataatcttcgcattca

SEQ ID NO: 21548 - DNA, 20 bp, Artificial Sequence
  MKO10021548_A_Gm5111
  gRNA
ccatctaagatgctaaccat

SEQ ID NO: 21549 - DNA, 20 bp, Artificial Sequence
  MKO10021549_A_Gm5111
  gRNA
tggaactcaagaggcatgcg

SEQ ID NO: 21550 - DNA, 20 bp, Artificial Sequence
  MKO10021550_A_Gm5113
  gRNA
agtcggaatgaactcggtag

SEQ ID NO: 21551 - DNA, 20 bp, Artificial Sequence
  MKO10021551_A_Gm5113
  gRNA
actaccgagttcattccgac

SEQ ID NO: 21552 - DNA, 20 bp, Artificial Sequence
  MKO10021552_A_Gm5113
  gRNA
gagctgcgcatgctgtctga

SEQ ID NO: 21553 - DNA, 20 bp, Artificial Sequence
  MKO10021553_A_Gm5114
  gRNA
ccaaattctccagttatcag

SEQ ID NO: 21554 - DNA, 20 bp, Artificial Sequence
  MKO10021554_A_Gm5114
  gRNA
cttgtgtccagctccaagcc

SEQ ID NO: 21555 - DNA, 20 bp, Artificial Sequence
  MKO10021555_A_Gm5114
  gRNA
actgttgtagtaactgagct

SEQ ID NO: 21556 - DNA, 20 bp, Artificial Sequence
  MKO10021556_A_Gm5127
  gRNA
ctatctcagcatgcgtgata

SEQ ID NO: 21557 - DNA, 20 bp, Artificial Sequence
  MKO10021557_A_Gm5127
  gRNA
gctaccaataaacaccgcag

SEQ ID NO: 21558 - DNA, 20 bp, Artificial Sequence
  MKO10021558_A_Gm5127
  gRNA
ttgcctatgaatgccaagat

SEQ ID NO: 21559 - DNA, 20 bp, Artificial Sequence
  MKO10021559_A_Gm5128
  gRNA
cttacctagtagctgagttc

SEQ ID NO: 21560 - DNA, 20 bp, Artificial Sequence
  MKO10021560_A_Gm5128
  gRNA
gttcattatgatggacacca

SEQ ID NO: 21561 - DNA, 20 bp, Artificial Sequence
  MKO10021561_A_Gm5128
  gRNA
cagtttcaagatgatctgtg

SEQ ID NO: 21562 - DNA, 20 bp, Artificial Sequence
  MKO10021562_A_Gm5132
  gRNA
aggcatcatccgttgttatc

SEQ ID NO: 21563 - DNA, 20 bp, Artificial Sequence
  MKO10021563_A_Gm5132
  gRNA
ccaccagaacctgataacaa

SEQ ID NO: 21564 - DNA, 20 bp, Artificial Sequence
  MKO10021564_A_Gm5132
  gRNA
aacatcgaacatccttgaac

SEQ ID NO: 21565 - DNA, 20 bp, Artificial Sequence
  MKO10021565_A_Gm5134
  gRNA
ttgaccgtgctgacgatcat

SEQ ID NO: 21566 - DNA, 20 bp, Artificial Sequence
  MKO10021566_A_Gm5134
  gRNA
cagcggccactatatggccc

SEQ ID NO: 21567 - DNA, 20 bp, Artificial Sequence
  MKO10021567_A_Gm5134
  gRNA
catgccgatgatcgtcagca

SEQ ID NO: 21568 - DNA, 20 bp, Artificial Sequence
  MKO10021568_A_Gm5136
  gRNA
gtacgcacgtcgacatgaga

SEQ ID NO: 21569 - DNA, 20 bp, Artificial Sequence
  MKO10021569_A_Gm5136
  gRNA
tcatgtcgacgtgcgtacac

SEQ ID NO: 21570 - DNA, 20 bp, Artificial Sequence
  MKO10021570_A_Gm5136
  gRNA
taaccgttctgcctctatcg

SEQ ID NO: 21571 - DNA, 20 bp, Artificial Sequence
  MKO10021571_A_Gm5141
  gRNA
cacacgctcaccatttcgcc

SEQ ID NO: 21572 - DNA, 20 bp, Artificial Sequence
  MKO10021572_A_Gm5141
  gRNA
taaaccagttaccttatcaa

SEQ ID NO: 21573 - DNA, 20 bp, Artificial Sequence
  MKO10021573_A_Gm5141
  gRNA
catgtcccagtcttcttaaa

SEQ ID NO: 21574 - DNA, 20 bp, Artificial Sequence
  MKO10021574_A_Gm5142
  gRNA
tcgcaacccgtttcctcccc

SEQ ID NO: 21575 - DNA, 20 bp, Artificial Sequence
  MKO10021575_A_Gm5142
  gRNA
tcctttctgtttcgcgtctg

SEQ ID NO: 21576 - DNA, 20 bp, Artificial Sequence
  MKO10021576_A_Gm5142
  gRNA
tcttgtagtcttagcatttc

SEQ ID NO: 21577 - DNA, 20 bp, Artificial Sequence
  MKO10021577_A_Gm5148
  gRNA
gcattccaccatgtcttatg

SEQ ID NO: 21578 - DNA, 20 bp, Artificial Sequence
  MKO10021578_A_Gm5148
  gRNA
gtgagactccacataagaca

SEQ ID NO: 21579 - DNA, 20 bp, Artificial Sequence
  MKO10021579_A_Gm5148
  gRNA
aatgctttctcttgggcccg

SEQ ID NO: 21580 - DNA, 20 bp, Artificial Sequence
  MKO10021580_A_Gm514
  gRNA
gccctcctgcaccgcttccg

SEQ ID NO: 21581 - DNA, 20 bp, Artificial Sequence
  MKO10021581_A_Gm514
  gRNA
cttccagcaagaccggatca

SEQ ID NO: 21582 - DNA, 20 bp, Artificial Sequence
  MKO10021582_A_Gm514
  gRNA
gagcagcgacgatggcttgt

SEQ ID NO: 21583 - DNA, 20 bp, Artificial Sequence
  MKO10021583_A_Gm5150
  gRNA
agcaattgccagcagtagtt

SEQ ID NO: 21584 - DNA, 20 bp, Artificial Sequence
  MKO10021584_A_Gm5150
  gRNA
gcaggacactgtgatgaatc

SEQ ID NO: 21585 - DNA, 20 bp, Artificial Sequence
  MKO10021585_A_Gm5150
  gRNA
ggcactgagttgtttgtcct

SEQ ID NO: 21586 - DNA, 20 bp, Artificial Sequence
  MKO10021586_A_Gm5168
  gRNA
tagaagaagatgaagatata

SEQ ID NO: 21587 - DNA, 20 bp, Artificial Sequence
  MKO10021587_A_Gm5168
  gRNA
tcttcatcttcttctacgtg

SEQ ID NO: 21588 - DNA, 20 bp, Artificial Sequence
  MKO10021588_A_Gm5168
  gRNA
agatgaacaagacagtatgt

SEQ ID NO: 21589 - DNA, 20 bp, Artificial Sequence
  MKO10021589_A_Gm5169
  gRNA
ttctcatgtttgccatatgc

SEQ ID NO: 21590 - DNA, 20 bp, Artificial Sequence
  MKO10021590_A_Gm5169
  gRNA
atagtaaagaggccagcata

SEQ ID NO: 21591 - DNA, 20 bp, Artificial Sequence
  MKO10021591_A_Gm5169
  gRNA
agatgaacaagacagtatgt

SEQ ID NO: 21592 - DNA, 20 bp, Artificial Sequence
  MKO10021592_A_Gm525
  gRNA
ctcacccgcatgggctcgtc

SEQ ID NO: 21593 - DNA, 20 bp, Artificial Sequence
  MKO10021593_A_Gm525
  gRNA
attcccggacgagcccatgc

SEQ ID NO: 21594 - DNA, 20 bp, Artificial Sequence
  MKO10021594_A_Gm525
  gRNA
actgcaagccgcactgtgac

SEQ ID NO: 21595 - DNA, 20 bp, Artificial Sequence
  MKO10021595_A_Gm527
  gRNA
aaacttgatacgactggctg

SEQ ID NO: 21596 - DNA, 20 bp, Artificial Sequence
  MKO10021596_A_Gm527
  gRNA
gcactgccctacccgagtgc

SEQ ID NO: 21597 - DNA, 20 bp, Artificial Sequence
  MKO10021597_A_Gm527
  gRNA
ggcatatgtaccctattact

SEQ ID NO: 21598 - DNA, 20 bp, Artificial Sequence
  MKO10021598_A_Gm5294
  gRNA
gcgggccgcgtaaccctatc

SEQ ID NO: 21599 - DNA, 20 bp, Artificial Sequence
  MKO10021599_A_Gm5294
  gRNA
cgctggttggcgcggtaata

SEQ ID NO: 21600 - DNA, 20 bp, Artificial Sequence
  MKO10021600_A_Gm5294
  gRNA
acccgcgcgctgttggttcg

SEQ ID NO: 21601 - DNA, 20 bp, Artificial Sequence
  MKO10021601_A_Gm5346
  gRNA
tactgattcgttatcatatc

SEQ ID NO: 21602 - DNA, 20 bp, Artificial Sequence
  MKO10021602_A_Gm5346
  gRNA
ccctagatgcattctgtagt

SEQ ID NO: 21603 - DNA, 20 bp, Artificial Sequence
  MKO10021603_A_Gm5346
  gRNA
tcggtgccagaatcagattc

SEQ ID NO: 21604 - DNA, 20 bp, Artificial Sequence
  MKO10021604_A_Gm5347
  gRNA
aacctgatgccgaccaagtg

SEQ ID NO: 21605 - DNA, 20 bp, Artificial Sequence
  MKO10021605_A_Gm5347
  gRNA
tccaattacagaatgcacct

SEQ ID NO: 21606 - DNA, 20 bp, Artificial Sequence
  MKO10021606_A_Gm5347
  gRNA
ttgcctagcaagaggaaatc

SEQ ID NO: 21607 - DNA, 20 bp, Artificial Sequence
  MKO10021607_A_Gm5382
  gRNA
agctacgcacttcctgccag

SEQ ID NO: 21608 - DNA, 20 bp, Artificial Sequence
  MKO10021608_A_Gm5382
  gRNA
caggaagtgcgtagctccag

SEQ ID NO: 21609 - DNA, 20 bp, Artificial Sequence
  MKO10021609_A_Gm5382
  gRNA
atggaagtgcggaagaactc

SEQ ID NO: 21610 - DNA, 20 bp, Artificial Sequence
  MKO10021610_A_Gm5409
  gRNA
agagcacaacattaatgtcc

SEQ ID NO: 21611 - DNA, 20 bp, Artificial Sequence
  MKO10021611_A_Gm5409
  gRNA
ctgagtgccagcaagtgcac

SEQ ID NO: 21612 - DNA, 20 bp, Artificial Sequence
  MKO10021612_A_Gm5409
  gRNA
gatgatgacaggattgttgg

SEQ ID NO: 21613 - DNA, 20 bp, Artificial Sequence
  MKO10021613_A_Gm5414
  gRNA
tgaagcccagccgtcttgaa

SEQ ID NO: 21614 - DNA, 20 bp, Artificial Sequence
  MKO10021614_A_Gm5414
  gRNA
tagatgagatcaacttcttg

SEQ ID NO: 21615 - DNA, 20 bp, Artificial Sequence
  MKO10021615_A_Gm5414
  gRNA
caacaaccacagcttggaca

SEQ ID NO: 21616 - DNA, 20 bp, Artificial Sequence
  MKO10021616_A_Gm5415
  gRNA
gcctggtggtaatcgattta

SEQ ID NO: 21617 - DNA, 20 bp, Artificial Sequence
  MKO10021617_A_Gm5415
  gRNA
tgctatagaacagtttagta

SEQ ID NO: 21618 - DNA, 20 bp, Artificial Sequence
  MKO10021618_A_Gm5415
  gRNA
gtgggtgttgttacagtaac

SEQ ID NO: 21619 - DNA, 20 bp, Artificial Sequence
  MKO10021619_A_Gm5416
  gRNA
aaagtctaccgtgcacattc

SEQ ID NO: 21620 - DNA, 20 bp, Artificial Sequence
  MKO10021620_A_Gm5416
  gRNA
ctcatcaagatgattctcgg

SEQ ID NO: 21621 - DNA, 20 bp, Artificial Sequence
  MKO10021621_A_Gm5416
  gRNA
gtaggtcaactcatcagtct

SEQ ID NO: 21622 - DNA, 20 bp, Artificial Sequence
  MKO10021622_A_Gm5431
  gRNA
ttactgagactgccattgac

SEQ ID NO: 21623 - DNA, 20 bp, Artificial Sequence
  MKO10021623_A_Gm5431
  gRNA
gtatggaccaccattccact

SEQ ID NO: 21624 - DNA, 20 bp, Artificial Sequence
  MKO10021624_A_Gm5431
  gRNA
atatgctgaaacaaaagatc

SEQ ID NO: 21625 - DNA, 20 bp, Artificial Sequence
  MKO10021625_A_Gm5458
  gRNA
catgtgtgtctcaagtgcca

SEQ ID NO: 21626 - DNA, 20 bp, Artificial Sequence
  MKO10021626_A_Gm5458
  gRNA
tgagacacacatgttcttgc

SEQ ID NO: 21627 - DNA, 20 bp, Artificial Sequence
  MKO10021627_A_Gm5458
  gRNA
taaagttagagaattgaaat

SEQ ID NO: 21628 - DNA, 20 bp, Artificial Sequence
  MKO10021628_A_Gm5460
  gRNA
gaatgactcaccgttggttg

SEQ ID NO: 21629 - DNA, 20 bp, Artificial Sequence
  MKO10021629_A_Gm5460
  gRNA
ggcgcccagtgaccggtgct

SEQ ID NO: 21630 - DNA, 20 bp, Artificial Sequence
  MKO10021630_A_Gm5460
  gRNA
tgtctgagaggtccgctgca

SEQ ID NO: 21631 - DNA, 20 bp, Artificial Sequence
  MKO10021631_A_Gm5464
  gRNA
gtaccgaagcccctccgtcg

SEQ ID NO: 21632 - DNA, 20 bp, Artificial Sequence
  MKO10021632_A_Gm5464
  gRNA
tcgcgcgctcgccgtcagcg

SEQ ID NO: 21633 - DNA, 20 bp, Artificial Sequence
  MKO10021633_A_Gm5464
  gRNA
ggaggccgcgcttgatgagc

SEQ ID NO: 21634 - DNA, 20 bp, Artificial Sequence
  MKO10021634_A_Gm5483
  gRNA
gtaggacagctcgtctttcc

SEQ ID NO: 21635 - DNA, 20 bp, Artificial Sequence
  MKO10021635_A_Gm5483
  gRNA
tccctttgaagacctttatg

SEQ ID NO: 21636 - DNA, 20 bp, Artificial Sequence
  MKO10021636_A_Gm5483
  gRNA
tcaccttatcagcaatctcc

SEQ ID NO: 21637 - DNA, 20 bp, Artificial Sequence
  MKO10021637_A_Gm5506
  gRNA
gccagacctgtagaattcag

SEQ ID NO: 21638 - DNA, 20 bp, Artificial Sequence
  MKO10021638_A_Gm5506
  gRNA
ggtccatgctttatttggcc

SEQ ID NO: 21639 - DNA, 20 bp, Artificial Sequence
  MKO10021639_A_Gm5506
  gRNA
aattcgccatgtctattctc

SEQ ID NO: 21640 - DNA, 20 bp, Artificial Sequence
  MKO10021640_A_Gm5531
  gRNA
ttcatcctcctcgccctcga

SEQ ID NO: 21641 - DNA, 20 bp, Artificial Sequence
  MKO10021641_A_Gm5531
  gRNA
tgacgtctgcacaaccatcg

SEQ ID NO: 21642 - DNA, 20 bp, Artificial Sequence
  MKO10021642_A_Gm5531
  gRNA
tcataagcaagaacgtgcta

SEQ ID NO: 21643 - DNA, 20 bp, Artificial Sequence
  MKO10021643_A_Gm5535
  gRNA
aagactccgtcgccctttcc

SEQ ID NO: 21644 - DNA, 20 bp, Artificial Sequence
  MKO10021644_A_Gm5535
  gRNA
tgatctgtatctcgggagcc

SEQ ID NO: 21645 - DNA, 20 bp, Artificial Sequence
  MKO10021645_A_Gm5535
  gRNA
tagcttacaatcagccatgc

SEQ ID NO: 21646 - DNA, 20 bp, Artificial Sequence
  MKO10021646_A_Gm5538
  gRNA
agacagttgcggaggtacac

SEQ ID NO: 21647 - DNA, 20 bp, Artificial Sequence
  MKO10021647_A_Gm5538
  gRNA
agcctgctatccaaaagtgc

SEQ ID NO: 21648 - DNA, 20 bp, Artificial Sequence
  MKO10021648_A_Gm5538
  gRNA
catgtatcccgtcttctatg

SEQ ID NO: 21649 - DNA, 20 bp, Artificial Sequence
  MKO10021649_A_Gm5544
  gRNA
aaggggtctccgaaaaccta

SEQ ID NO: 21650 - DNA, 20 bp, Artificial Sequence
  MKO10021650_A_Gm5544
  gRNA
aaactcgatagttaagcttc

SEQ ID NO: 21651 - DNA, 20 bp, Artificial Sequence
  MKO10021651_A_Gm5544
  gRNA
gagaagcgtcatatgtcaag

SEQ ID NO: 21652 - DNA, 20 bp, Artificial Sequence
  MKO10021652_A_Gm5549
  gRNA
cccctcgacgcatgaagcca

SEQ ID NO: 21653 - DNA, 20 bp, Artificial Sequence
  MKO10021653_A_Gm5549
  gRNA
gagcacgagatgtgtaaaac

SEQ ID NO: 21654 - DNA, 20 bp, Artificial Sequence
  MKO10021654_A_Gm5549
  gRNA
tgaagaggaatatttgcgtg

SEQ ID NO: 21655 - DNA, 20 bp, Artificial Sequence
  MKO10021655_A_Gm5591
  gRNA
tcagacggtccaggcaattg

SEQ ID NO: 21656 - DNA, 20 bp, Artificial Sequence
  MKO10021656_A_Gm5591
  gRNA
ctactacaaccacaattgcc

SEQ ID NO: 21657 - DNA, 20 bp, Artificial Sequence
  MKO10021657_A_Gm5591
  gRNA
ctgttgagcacaactcttca

SEQ ID NO: 21658 - DNA, 20 bp, Artificial Sequence
  MKO10021658_A_Gm5592
  gRNA
caggcctcgaggtgaccaaa

SEQ ID NO: 21659 - DNA, 20 bp, Artificial Sequence
  MKO10021659_A_Gm5592
  gRNA
taaagacatcactagacttg

SEQ ID NO: 21660 - DNA, 20 bp, Artificial Sequence
  MKO10021660_A_Gm5592
  gRNA
caatatgaaactcattgacc

SEQ ID NO: 21661 - DNA, 20 bp, Artificial Sequence
  MKO10021661_A_Gm5595
  gRNA
ttcatgcattcgaagattgt

SEQ ID NO: 21662 - DNA, 20 bp, Artificial Sequence
  MKO10021662_A_Gm5595
  gRNA
aggcacgaaagaagtcctgc

SEQ ID NO: 21663 - DNA, 20 bp, Artificial Sequence
  MKO10021663_A_Gm5595
  gRNA
atgtgcatgtacacttcact

SEQ ID NO: 21664 - DNA, 20 bp, Artificial Sequence
  MKO10021664_A_Gm5615
  gRNA
gtgcactttgttcaactcta

SEQ ID NO: 21665 - DNA, 20 bp, Artificial Sequence
  MKO10021665_A_Gm5615
  gRNA
accctccgcaaagcagataa

SEQ ID NO: 21666 - DNA, 20 bp, Artificial Sequence
  MKO10021666_A_Gm5615
  gRNA
ctaggtggcaggttcatgta

SEQ ID NO: 21667 - DNA, 20 bp, Artificial Sequence
  MKO10021667_A_Gm5617
  gRNA
acgtctgtcggcccgaacgc

SEQ ID NO: 21668 - DNA, 20 bp, Artificial Sequence
  MKO10021668_A_Gm5617
  gRNA
cggacagcgacaccgagttc

SEQ ID NO: 21669 - DNA, 20 bp, Artificial Sequence
  MKO10021669_A_Gm5617
  gRNA
ccgccggcgatcaagccaac

SEQ ID NO: 21670 - DNA, 20 bp, Artificial Sequence
  MKO10021670_A_Gm561
  gRNA
cgtagacaagggacattcgc

SEQ ID NO: 21671 - DNA, 20 bp, Artificial Sequence
  MKO10021671_A_Gm561
  gRNA
atgtcccttgtctacgcact

SEQ ID NO: 21672 - DNA, 20 bp, Artificial Sequence
  MKO10021672_A_Gm561
  gRNA
aaacggtcgagcttggtgga

SEQ ID NO: 21673 - DNA, 20 bp, Artificial Sequence
  MKO10021673_A_Gm5622
  gRNA
atgccaaattccttctgcct

SEQ ID NO: 21674 - DNA, 20 bp, Artificial Sequence
  MKO10021674_A_Gm5622
  gRNA
aggttatttcacagggagaa

SEQ ID NO: 21675 - DNA, 20 bp, Artificial Sequence
  MKO10021675_A_Gm5622
  gRNA
gattagtgatgttgcaactt

SEQ ID NO: 21676 - DNA, 20 bp, Artificial Sequence
  MKO10021676_A_Gm5634
  gRNA
ccgaagcgccctctcgagtg

SEQ ID NO: 21677 - DNA, 20 bp, Artificial Sequence
  MKO10021677_A_Gm5634
  gRNA
acaggctgagcttgtcaaag

SEQ ID NO: 21678 - DNA, 20 bp, Artificial Sequence
  MKO10021678_A_Gm5634
  gRNA
gcaaaactgcctagatcagc

SEQ ID NO: 21679 - DNA, 20 bp, Artificial Sequence
  MKO10021679_A_Gm5635
  gRNA
cgagaccagaacgcaacaac

SEQ ID NO: 21680 - DNA, 20 bp, Artificial Sequence
  MKO10021680_A_Gm5635
  gRNA
ccgtgccagttgttgcgttc

SEQ ID NO: 21681 - DNA, 20 bp, Artificial Sequence
  MKO10021681_A_Gm5635
  gRNA
tgccatcgacatgtactcat

SEQ ID NO: 21682 - DNA, 20 bp, Artificial Sequence
  MKO10021682_A_Gm5640
  gRNA
tttagatcgggtacccttcc

SEQ ID NO: 21683 - DNA, 20 bp, Artificial Sequence
  MKO10021683_A_Gm5640
  gRNA
ctcccgcgctctgaagtgga

SEQ ID NO: 21684 - DNA, 20 bp, Artificial Sequence
  MKO10021684_A_Gm5640
  gRNA
ctgattgaagagaagcccca

SEQ ID NO: 21685 - DNA, 20 bp, Artificial Sequence
  MKO10021685_A_Gm5662
  gRNA
tccatcatgccaaagaataa

SEQ ID NO: 21686 - DNA, 20 bp, Artificial Sequence
  MKO10021686_A_Gm5662
  gRNA
tgtgtccatttcattgattt

SEQ ID NO: 21687 - DNA, 20 bp, Artificial Sequence
  MKO10021687_A_Gm5662
  gRNA
acatgccaaaatcaatgaaa

SEQ ID NO: 21688 - DNA, 20 bp, Artificial Sequence
  MKO10021688_A_Gm5725
  gRNA
gccctctccatgtctgctca

SEQ ID NO: 21689 - DNA, 20 bp, Artificial Sequence
  MKO10021689_A_Gm5725
  gRNA
cagttgaagagcacagaaca

SEQ ID NO: 21690 - DNA, 20 bp, Artificial Sequence
  MKO10021690_A_Gm5725
  gRNA
cagagcaagtgtcacaaaca

SEQ ID NO: 21691 - DNA, 20 bp, Artificial Sequence
  MKO10021691_A_Gm5726
  gRNA
gccctctccatgtctgctca

SEQ ID NO: 21692 - DNA, 20 bp, Artificial Sequence
  MKO10021692_A_Gm5726
  gRNA
tagtttaagagcacagaaca

SEQ ID NO: 21693 - DNA, 20 bp, Artificial Sequence
  MKO10021693_A_Gm5726
  gRNA
cagagcaagtgtcacaaaca

SEQ ID NO: 21694 - DNA, 20 bp, Artificial Sequence
  MKO10021694_A_Gm5728
  gRNA
taaatccctgaaaagcactg

SEQ ID NO: 21695 - DNA, 20 bp, Artificial Sequence
  MKO10021695_A_Gm5728
  gRNA
cagttgaaaagcacagaaca

SEQ ID NO: 21696 - DNA, 20 bp, Artificial Sequence
  MKO10021696_A_Gm5728
  gRNA
aacttgttctgttccacttc

SEQ ID NO: 21697 - DNA, 20 bp, Artificial Sequence
  MKO10021697_A_Gm572
  gRNA
gatcccgagtagtcacgtgc

SEQ ID NO: 21698 - DNA, 20 bp, Artificial Sequence
  MKO10021698_A_Gm572
  gRNA
aaaccctgcacgtgactact

SEQ ID NO: 21699 - DNA, 20 bp, Artificial Sequence
  MKO10021699_A_Gm572
  gRNA
ttctgtcgtaggctctaaga

SEQ ID NO: 21700 - DNA, 20 bp, Artificial Sequence
  MKO10021700_A_Gm5741
  gRNA
agcaggcatcaaccgcataa

SEQ ID NO: 21701 - DNA, 20 bp, Artificial Sequence
  MKO10021701_A_Gm5741
  gRNA
cactggcagtgacatcggac

SEQ ID NO: 21702 - DNA, 20 bp, Artificial Sequence
  MKO10021702_A_Gm5741
  gRNA
gctgcagttctgcactgaac

SEQ ID NO: 21703 - DNA, 20 bp, Artificial Sequence
  MKO10021703_A_Gm5771
  gRNA
tcaacatgatgtcgttattg

SEQ ID NO: 21704 - DNA, 20 bp, Artificial Sequence
  MKO10021704_A_Gm5771
  gRNA
acgatcttatcatcatccac

SEQ ID NO: 21705 - DNA, 20 bp, Artificial Sequence
  MKO10021705_A_Gm5771
  gRNA
cccagctcctgtgcgccagc

SEQ ID NO: 21706 - DNA, 20 bp, Artificial Sequence
  MKO10021706_A_Gm5795
  gRNA
tcaaatcctcatacatgtaa

SEQ ID NO: 21707 - DNA, 20 bp, Artificial Sequence
  MKO10021707_A_Gm5795
  gRNA
aagaactgaaattagatatg

SEQ ID NO: 21708 - DNA, 20 bp, Artificial Sequence
  MKO10021708_A_Gm5795
  gRNA
acaacatgagaagacaatgt

SEQ ID NO: 21709 - DNA, 20 bp, Artificial Sequence
  MKO10021709_A_Gm5796
  gRNA
gtctggccataagtgtcctg

SEQ ID NO: 21710 - DNA, 20 bp, Artificial Sequence
  MKO10021710_A_Gm5796
  gRNA
tcaaatcctcatacatgtaa

SEQ ID NO: 21711 - DNA, 20 bp, Artificial Sequence
  MKO10021711_A_Gm5796
  gRNA
tgaactagaagaactgaaat

SEQ ID NO: 21712 - DNA, 20 bp, Artificial Sequence
  MKO10021712_A_Gm5797
  gRNA
gagaactgaaattgcatatg

SEQ ID NO: 21713 - DNA, 20 bp, Artificial Sequence
  MKO10021713_A_Gm5797
  gRNA
cctcatacatgtaaacgttc

SEQ ID NO: 21714 - DNA, 20 bp, Artificial Sequence
  MKO10021714_A_Gm5797
  gRNA
acaacatgagaagataatgt

SEQ ID NO: 21715 - DNA, 20 bp, Artificial Sequence
  MKO10021715_A_Gm5800
  gRNA
gtaacaagaatttgaatgac

SEQ ID NO: 21716 - DNA, 20 bp, Artificial Sequence
  MKO10021716_A_Gm5800
  gRNA
acattcagtcaggaggtgac

SEQ ID NO: 21717 - DNA, 20 bp, Artificial Sequence
  MKO10021717_A_Gm5800
  gRNA
caaattcttgttacaataat

SEQ ID NO: 21718 - DNA, 20 bp, Artificial Sequence
  MKO10021718_A_Gm5803
  gRNA
aagagcttccgcagttgttc

SEQ ID NO: 21719 - DNA, 20 bp, Artificial Sequence
  MKO10021719_A_Gm5803
  gRNA
ctgagaatcttgtcttgaga

SEQ ID NO: 21720 - DNA, 20 bp, Artificial Sequence
  MKO10021720_A_Gm5803
  gRNA
cagaaataccataatgtgaa

SEQ ID NO: 21721 - DNA, 20 bp, Artificial Sequence
  MKO10021721_A_Gm5820
  gRNA
tctgtacagtagtgccacgt

SEQ ID NO: 21722 - DNA, 20 bp, Artificial Sequence
  MKO10021722_A_Gm5820
  gRNA
tgggttacttatggatccct

SEQ ID NO: 21723 - DNA, 20 bp, Artificial Sequence
  MKO10021723_A_Gm5820
  gRNA
gttcaactttacagcgaacc

SEQ ID NO: 21724 - DNA, 20 bp, Artificial Sequence
  MKO10021724_A_Gm5862
  gRNA
aagcaaaaagcagtttgaga

SEQ ID NO: 21725 - DNA, 20 bp, Artificial Sequence
  MKO10021725_A_Gm5862
  gRNA
caatgtatacctcttgttca

SEQ ID NO: 21726 - DNA, 20 bp, Artificial Sequence
  MKO10021726_A_Gm5862
  gRNA
ctggggccaggccctaccac

SEQ ID NO: 21727 - DNA, 20 bp, Artificial Sequence
  MKO10021727_A_Gm5868
  gRNA
aacttcccgcctcgctttat

SEQ ID NO: 21728 - DNA, 20 bp, Artificial Sequence
  MKO10021728_A_Gm5868
  gRNA
tgcagcactctcatccctat

SEQ ID NO: 21729 - DNA, 20 bp, Artificial Sequence
  MKO10021729_A_Gm5868
  gRNA
ttgagatgcccctctgcctc

SEQ ID NO: 21730 - DNA, 20 bp, Artificial Sequence
  MKO10021730_A_Gm5878
  gRNA
aatggagagggtcgcaatgc

SEQ ID NO: 21731 - DNA, 20 bp, Artificial Sequence
  MKO10021731_A_Gm5878
  gRNA
gaagcgattccgaagcagcc

SEQ ID NO: 21732 - DNA, 20 bp, Artificial Sequence
  MKO10021732_A_Gm5878
  gRNA
cgagatcctcctcttcctcc

SEQ ID NO: 21733 - DNA, 20 bp, Artificial Sequence
  MKO10021733_A_Gm5885
  gRNA
actcgtggtcggaaaaattt

SEQ ID NO: 21734 - DNA, 20 bp, Artificial Sequence
  MKO10021734_A_Gm5885
  gRNA
caagagcattgtgactcctc

SEQ ID NO: 21735 - DNA, 20 bp, Artificial Sequence
  MKO10021735_A_Gm5885
  gRNA
ttgaacaatgataatacatc

SEQ ID NO: 21736 - DNA, 20 bp, Artificial Sequence
  MKO10021736_A_Gm5886
  gRNA
aagccatacttcttcgtctc

SEQ ID NO: 21737 - DNA, 20 bp, Artificial Sequence
  MKO10021737_A_Gm5886
  gRNA
actttcatatgtactactcc

SEQ ID NO: 21738 - DNA, 20 bp, Artificial Sequence
  MKO10021738_A_Gm5886
  gRNA
tcgttgatctaatcatttga

SEQ ID NO: 21739 - DNA, 20 bp, Artificial Sequence
  MKO10021739_A_Gm5891
  gRNA
agagggtctgatgatggagc

SEQ ID NO: 21740 - DNA, 20 bp, Artificial Sequence
  MKO10021740_A_Gm5891
  gRNA
cttctatgtgatgactgtca

SEQ ID NO: 21741 - DNA, 20 bp, Artificial Sequence
  MKO10021741_A_Gm5891
  gRNA
actagatcgcatcatcaacg

SEQ ID NO: 21742 - DNA, 20 bp, Artificial Sequence
  MKO10021742_A_Gm5901
  gRNA
ctgcaggattcgcctacata

SEQ ID NO: 21743 - DNA, 20 bp, Artificial Sequence
  MKO10021743_A_Gm5901
  gRNA
taggtagtgaccgctgtaac

SEQ ID NO: 21744 - DNA, 20 bp, Artificial Sequence
  MKO10021744_A_Gm5901
  gRNA
cagggacatggagtgccggt

SEQ ID NO: 21745 - DNA, 20 bp, Artificial Sequence
  MKO10021745_A_Gm590
  gRNA
cccgcatccgcaaccgaccg

SEQ ID NO: 21746 - DNA, 20 bp, Artificial Sequence
  MKO10021746_A_Gm590
  gRNA
agtgacctctgcgcctcggt

SEQ ID NO: 21747 - DNA, 20 bp, Artificial Sequence
  MKO10021747_A_Gm590
  gRNA
gagtccgaggagcaccgcct

SEQ ID NO: 21748 - DNA, 20 bp, Artificial Sequence
  MKO10021748_A_Gm5916
  gRNA
tacttcctattctcacaaac

SEQ ID NO: 21749 - DNA, 20 bp, Artificial Sequence
  MKO10021749_A_Gm5916
  gRNA
aggcatgtatggctgaatct

SEQ ID NO: 21750 - DNA, 20 bp, Artificial Sequence
  MKO10021750_A_Gm5916
  gRNA
cttcaaggctccaagataca

SEQ ID NO: 21751 - DNA, 20 bp, Artificial Sequence
  MKO10021751_A_Gm5934
  gRNA
gacactatgttgaataaatc

SEQ ID NO: 21752 - DNA, 20 bp, Artificial Sequence
  MKO10021752_A_Gm5934
  gRNA
atatctccaactacttcttc

SEQ ID NO: 21753 - DNA, 20 bp, Artificial Sequence
  MKO10021753_A_Gm5934
  gRNA
atagtaaagaggccagcatt

SEQ ID NO: 21754 - DNA, 20 bp, Artificial Sequence
  MKO10021754_A_Gm5935
  gRNA
agatgaacatgacagtatgt

SEQ ID NO: 21755 - DNA, 20 bp, Artificial Sequence
  MKO10021755_A_Gm5935
  gRNA
atagtaaagaggccagcatt

SEQ ID NO: 21756 - DNA, 20 bp, Artificial Sequence
  MKO10021756_A_Gm5935
  gRNA
tcttcatctgcttctacgtg

SEQ ID NO: 21757 - DNA, 20 bp, Artificial Sequence
  MKO10021757_A_Gm5936
  gRNA
tttaaatcgggtaccctttc

SEQ ID NO: 21758 - DNA, 20 bp, Artificial Sequence
  MKO10021758_A_Gm5936
  gRNA
tgtcagcaaaatcgataaga

SEQ ID NO: 21759 - DNA, 20 bp, Artificial Sequence
  MKO10021759_A_Gm5936
  gRNA
ccgatttaaaaccgagcagc

SEQ ID NO: 21760 - DNA, 20 bp, Artificial Sequence
  MKO10021760_A_Gm5938
  gRNA
taatcattatgaacttgtga

SEQ ID NO: 21761 - DNA, 20 bp, Artificial Sequence
  MKO10021761_A_Gm5938
  gRNA
caataaacctttaacttctg

SEQ ID NO: 21762 - DNA, 20 bp, Artificial Sequence
  MKO10021762_A_Gm5938
  gRNA
tgaaaacattagacatgtcc

SEQ ID NO: 21763 - DNA, 20 bp, Artificial Sequence
  MKO10021763_A_Gm5941
  gRNA
cacgaagagcaagaaaacgc

SEQ ID NO: 21764 - DNA, 20 bp, Artificial Sequence
  MKO10021764_A_Gm5941
  gRNA
tggtgaaagcgactaagaag

SEQ ID NO: 21765 - DNA, 20 bp, Artificial Sequence
  MKO10021765_A_Gm5941
  gRNA
agaaaaatacagcacctaaa

SEQ ID NO: 21766 - DNA, 20 bp, Artificial Sequence
  MKO10021766_A_Gm595
  gRNA
ttaatcaagcgttcgtgttg

SEQ ID NO: 21767 - DNA, 20 bp, Artificial Sequence
  MKO10021767_A_Gm595
  gRNA
acgaacgcttgattaaactc

SEQ ID NO: 21768 - DNA, 20 bp, Artificial Sequence
  MKO10021768_A_Gm595
  gRNA
agattagctggtccaatctt

SEQ ID NO: 21769 - DNA, 20 bp, Artificial Sequence
  MKO10021769_A_Gm597
  gRNA
gtaggtctacctccggtcat

SEQ ID NO: 21770 - DNA, 20 bp, Artificial Sequence
  MKO10021770_A_Gm597
  gRNA
atggtggggtccgaactcac

SEQ ID NO: 21771 - DNA, 20 bp, Artificial Sequence
  MKO10021771_A_Gm597
  gRNA
gagcaaaacaaacatccgaa

SEQ ID NO: 21772 - DNA, 20 bp, Artificial Sequence
  MKO10021772_A_Gm6026
  gRNA
aggcatcatcagttgtcttc

SEQ ID NO: 21773 - DNA, 20 bp, Artificial Sequence
  MKO10021773_A_Gm6026
  gRNA
tcatggccaggaaaagccaa

SEQ ID NO: 21774 - DNA, 20 bp, Artificial Sequence
  MKO10021774_A_Gm6026
  gRNA
aaattgaagctcagctctct

SEQ ID NO: 21775 - DNA, 20 bp, Artificial Sequence
  MKO10021775_A_Gm6034
  gRNA
aatgattaccatgttagagt

SEQ ID NO: 21776 - DNA, 20 bp, Artificial Sequence
  MKO10021776_A_Gm6034
  gRNA
agtgaattctaccaaaaagc

SEQ ID NO: 21777 - DNA, 20 bp, Artificial Sequence
  MKO10021777_A_Gm6034
  gRNA
tccatccaccgactctaaca

SEQ ID NO: 21778 - DNA, 20 bp, Artificial Sequence
  MKO10021778_A_Gm6040
  gRNA
ggtatttaccgtgcagtacc

SEQ ID NO: 21779 - DNA, 20 bp, Artificial Sequence
  MKO10021779_A_Gm6040
  gRNA
gaaagaccttgctacctccg

SEQ ID NO: 21780 - DNA, 20 bp, Artificial Sequence
  MKO10021780_A_Gm6040
  gRNA
ggctctctttgccgtcttcc

SEQ ID NO: 21781 - DNA, 20 bp, Artificial Sequence
  MKO10021781_A_Gm6086
  gRNA
ctatgttcgcaaatgccttg

SEQ ID NO: 21782 - DNA, 20 bp, Artificial Sequence
  MKO10021782_A_Gm6086
  gRNA
aatctgcgcccttaccagag

SEQ ID NO: 21783 - DNA, 20 bp, Artificial Sequence
  MKO10021783_A_Gm6086
  gRNA
ggtcctggccgtgttcctgc

SEQ ID NO: 21784 - DNA, 20 bp, Artificial Sequence
  MKO10021784_A_Gm608
  gRNA
gcaacagacgataggccaac

SEQ ID NO: 21785 - DNA, 20 bp, Artificial Sequence
  MKO10021785_A_Gm608
  gRNA
tcgaccttgaatatcccccg

SEQ ID NO: 21786 - DNA, 20 bp, Artificial Sequence
  MKO10021786_A_Gm608
  gRNA
cgctgctccctccgttgagc

SEQ ID NO: 21787 - DNA, 20 bp, Artificial Sequence
  MKO10021787_A_Gm609
  gRNA
gtccgattgccagtcaatca

SEQ ID NO: 21788 - DNA, 20 bp, Artificial Sequence
  MKO10021788_A_Gm609
  gRNA
gcctaacccactatcaacac

SEQ ID NO: 21789 - DNA, 20 bp, Artificial Sequence
  MKO10021789_A_Gm609
  gRNA
tcattgacacaaccaagtcc

SEQ ID NO: 21790 - DNA, 20 bp, Artificial Sequence
  MKO10021790_A_Gm6121
  gRNA
atagtaaagaggccagcatt

SEQ ID NO: 21791 - DNA, 20 bp, Artificial Sequence
  MKO10021791_A_Gm6121
  gRNA
tcttcatctgcttctacttg

SEQ ID NO: 21792 - DNA, 20 bp, Artificial Sequence
  MKO10021792_A_Gm6121
  gRNA
agatgaacaagacagtatgt

SEQ ID NO: 21793 - DNA, 20 bp, Artificial Sequence
  MKO10021793_A_Gm614
  gRNA
tcgagctgtaaggaatttgc

SEQ ID NO: 21794 - DNA, 20 bp, Artificial Sequence
  MKO10021794_A_Gm614
  gRNA
tgcttgtgctagtagtctgc

SEQ ID NO: 21795 - DNA, 20 bp, Artificial Sequence
  MKO10021795_A_Gm614
  gRNA
cgattcatcacacaaatcaa

SEQ ID NO: 21796 - DNA, 20 bp, Artificial Sequence
  MKO10021796_A_Gm6164
  gRNA
gccctctcgatgtctgctca

SEQ ID NO: 21797 - DNA, 20 bp, Artificial Sequence
  MKO10021797_A_Gm6164
  gRNA
cagttgaagagcacagaaca

SEQ ID NO: 21798 - DNA, 20 bp, Artificial Sequence
  MKO10021798_A_Gm6164
  gRNA
cagagcaagtgtcacaaaca

SEQ ID NO: 21799 - DNA, 20 bp, Artificial Sequence
  MKO10021799_A_Gm6251
  gRNA
ttgtcatattacttgctctt

SEQ ID NO: 21800 - DNA, 20 bp, Artificial Sequence
  MKO10021800_A_Gm6251
  gRNA
aaaatgaccagcttcttcct

SEQ ID NO: 21801 - DNA, 20 bp, Artificial Sequence
  MKO10021801_A_Gm6251
  gRNA
ctgtgctgagattgctcaca

SEQ ID NO: 21802 - DNA, 20 bp, Artificial Sequence
  MKO10021802_A_Gm6289
  gRNA
aacaataattgaacgcatga

SEQ ID NO: 21803 - DNA, 20 bp, Artificial Sequence
  MKO10021803_A_Gm6289
  gRNA
gggctcatctctgcccatga

SEQ ID NO: 21804 - DNA, 20 bp, Artificial Sequence
  MKO10021804_A_Gm6289
  gRNA
tgcttgtaactctcccgttt

SEQ ID NO: 21805 - DNA, 20 bp, Artificial Sequence
  MKO10021805_A_Gm6370
  gRNA
gtaagacacaaataattgcc

SEQ ID NO: 21806 - DNA, 20 bp, Artificial Sequence
  MKO10021806_A_Gm6370
  gRNA
ccactcacgttctcatcagc

SEQ ID NO: 21807 - DNA, 20 bp, Artificial Sequence
  MKO10021807_A_Gm6370
  gRNA
ggtctgttctcaaaatgaac

SEQ ID NO: 21808 - DNA, 20 bp, Artificial Sequence
  MKO10021808_A_Gm6377
  gRNA
actttcagtggatataccat

SEQ ID NO: 21809 - DNA, 20 bp, Artificial Sequence
  MKO10021809_A_Gm6377
  gRNA
tcagtatgctagaagtcatg

SEQ ID NO: 21810 - DNA, 20 bp, Artificial Sequence
  MKO10021810_A_Gm6377
  gRNA
aactggatttatatcgatct

SEQ ID NO: 21811 - DNA, 20 bp, Artificial Sequence
  MKO10021811_A_Gm6406
  gRNA
gcagggcgcggggtcgacgc

SEQ ID NO: 21812 - DNA, 20 bp, Artificial Sequence
  MKO10021812_A_Gm6406
  gRNA
gtagctgtccagttcccaga

SEQ ID NO: 21813 - DNA, 20 bp, Artificial Sequence
  MKO10021813_A_Gm6406
  gRNA
gcccgcgtgcccagaacccc

SEQ ID NO: 21814 - DNA, 20 bp, Artificial Sequence
  MKO10021814_A_Gm6408
  gRNA
cttcctgcctgaccgtataa

SEQ ID NO: 21815 - DNA, 20 bp, Artificial Sequence
  MKO10021815_A_Gm6408
  gRNA
ggccattgggctaaaccctg

SEQ ID NO: 21816 - DNA, 20 bp, Artificial Sequence
  MKO10021816_A_Gm6408
  gRNA
taaaaatatgagataagatt

SEQ ID NO: 21817 - DNA, 20 bp, Artificial Sequence
  MKO10021817_A_Gm6432
  gRNA
gctatcatacgtatactttc

SEQ ID NO: 21818 - DNA, 20 bp, Artificial Sequence
  MKO10021818_A_Gm6432
  gRNA
gtcatccaagtgcaataccc

SEQ ID NO: 21819 - DNA, 20 bp, Artificial Sequence
  MKO10021819_A_Gm6432
  gRNA
attacaccatacatccatag

SEQ ID NO: 21820 - DNA, 20 bp, Artificial Sequence
  MKO10021820_A_Gm6460
  gRNA
cagtgcatacctattgtaat

SEQ ID NO: 21821 - DNA, 20 bp, Artificial Sequence
  MKO10021821_A_Gm6460
  gRNA
tgcacctgacctaagtaaga

SEQ ID NO: 21822 - DNA, 20 bp, Artificial Sequence
  MKO10021822_A_Gm6460
  gRNA
ctatccacttattgagctcc

SEQ ID NO: 21823 - DNA, 20 bp, Artificial Sequence
  MKO10021823_A_Gm6484
  gRNA
tgaagccacagcccgatcac

SEQ ID NO: 21824 - DNA, 20 bp, Artificial Sequence
  MKO10021824_A_Gm6484
  gRNA
agcagtgcgacccgctccag

SEQ ID NO: 21825 - DNA, 20 bp, Artificial Sequence
  MKO10021825_A_Gm6484
  gRNA
tgctcacctgaatctccgac

SEQ ID NO: 21826 - DNA, 20 bp, Artificial Sequence
  MKO10021826_A_Gm648
  gRNA
acttacgtcgtccaaagcgt

SEQ ID NO: 21827 - DNA, 20 bp, Artificial Sequence
  MKO10021827_A_Gm648
  gRNA
atgacagaaatccgacgctt

SEQ ID NO: 21828 - DNA, 20 bp, Artificial Sequence
  MKO10021828_A_Gm648
  gRNA
acgccatttaatccagtatc

SEQ ID NO: 21829 - DNA, 20 bp, Artificial Sequence
  MKO10021829_A_Gm6531
  gRNA
acatgattgccccgcgcctc

SEQ ID NO: 21830 - DNA, 20 bp, Artificial Sequence
  MKO10021830_A_Gm6531
  gRNA
atcaaatgccggcgtgctgc

SEQ ID NO: 21831 - DNA, 20 bp, Artificial Sequence
  MKO10021831_A_Gm6531
  gRNA
gacaactcccagcagcacgc

SEQ ID NO: 21832 - DNA, 20 bp, Artificial Sequence
  MKO10021832_A_Gm6537
  gRNA
acagatttcggcctccgccc

SEQ ID NO: 21833 - DNA, 20 bp, Artificial Sequence
  MKO10021833_A_Gm6537
  gRNA
tctcccccaggaacacgatg

SEQ ID NO: 21834 - DNA, 20 bp, Artificial Sequence
  MKO10021834_A_Gm6537
  gRNA
ccttctcagccacccgcttc

SEQ ID NO: 21835 - DNA, 20 bp, Artificial Sequence
  MKO10021835_A_Gm6583
  gRNA
cctcgcggtccagtaaggag

SEQ ID NO: 21836 - DNA, 20 bp, Artificial Sequence
  MKO10021836_A_Gm6583
  gRNA
aaggaggaactccccgtact

SEQ ID NO: 21837 - DNA, 20 bp, Artificial Sequence
  MKO10021837_A_Gm6583
  gRNA
gggtacctcgcctacttcct

SEQ ID NO: 21838 - DNA, 20 bp, Artificial Sequence
  MKO10021838_A_Gm6588
  gRNA
aaagggccttgtatgacgtc

SEQ ID NO: 21839 - DNA, 20 bp, Artificial Sequence
  MKO10021839_A_Gm6588
  gRNA
ctgggataccgcggccaaac

SEQ ID NO: 21840 - DNA, 20 bp, Artificial Sequence
  MKO10021840_A_Gm6588
  gRNA
tcagaacgaaaagtcttacg

SEQ ID NO: 21841 - DNA, 20 bp, Artificial Sequence
  MKO10021841_A_Gm6592
  gRNA
cttatcttggccggtcattc

SEQ ID NO: 21842 - DNA, 20 bp, Artificial Sequence
  MKO10021842_A_Gm6592
  gRNA
aacttcaatgcctttcacca

SEQ ID NO: 21843 - DNA, 20 bp, Artificial Sequence
  MKO10021843_A_Gm6592
  gRNA
tccttgccactcatgaagac

SEQ ID NO: 21844 - DNA, 20 bp, Artificial Sequence
  MKO10021844_A_Gm6614
  gRNA
cccaacaaaagtccaattac

SEQ ID NO: 21845 - DNA, 20 bp, Artificial Sequence
  MKO10021845_A_Gm6614
  gRNA
tggatgtgcaactatgggcc

SEQ ID NO: 21846 - DNA, 20 bp, Artificial Sequence
  MKO10021846_A_Gm6614
  gRNA
catccaacaccaatgatgat

SEQ ID NO: 21847 - DNA, 20 bp, Artificial Sequence
  MKO10021847_A_Gm6696
  gRNA
aaaaaaagagaacgcctgaa

SEQ ID NO: 21848 - DNA, 20 bp, Artificial Sequence
  MKO10021848_A_Gm6696
  gRNA
tcttgaagagaagagccttc

SEQ ID NO: 21849 - DNA, 20 bp, Artificial Sequence
  MKO10021849_A_Gm6696
  gRNA
cctctctgcccttgccctgc

SEQ ID NO: 21850 - DNA, 20 bp, Artificial Sequence
  MKO10021850_A_Gm6710
  gRNA
tatagctgtgagattcctat

SEQ ID NO: 21851 - DNA, 20 bp, Artificial Sequence
  MKO10021851_A_Gm6710
  gRNA
agtcacctatgatgacgtgc

SEQ ID NO: 21852 - DNA, 20 bp, Artificial Sequence
  MKO10021852_A_Gm6710
  gRNA
gacttctagaagtttgaaaa

SEQ ID NO: 21853 - DNA, 20 bp, Artificial Sequence
  MKO10021853_A_Gm6760
  gRNA
tggtgatcgttatttgctat

SEQ ID NO: 21854 - DNA, 20 bp, Artificial Sequence
  MKO10021854_A_Gm6760
  gRNA
cctcgctcagagcccgaaca

SEQ ID NO: 21855 - DNA, 20 bp, Artificial Sequence
  MKO10021855_A_Gm6760
  gRNA
cgcttgttctgacgctgaac

SEQ ID NO: 21856 - DNA, 20 bp, Artificial Sequence
  MKO10021856_A_Gm6763
  gRNA
aatcaggtaccttggataca

SEQ ID NO: 21857 - DNA, 20 bp, Artificial Sequence
  MKO10021857_A_Gm6763
  gRNA
cagctactctttgctgaatt

SEQ ID NO: 21858 - DNA, 20 bp, Artificial Sequence
  MKO10021858_A_Gm6763
  gRNA
tgttcagtcgaagctgtgaa

SEQ ID NO: 21859 - DNA, 20 bp, Artificial Sequence
  MKO10021859_A_Gm6772
  gRNA
gcacgagaactactacctgc

SEQ ID NO: 21860 - DNA, 20 bp, Artificial Sequence
  MKO10021860_A_Gm6772
  gRNA
gaacgtgtctgacaataacc

SEQ ID NO: 21861 - DNA, 20 bp, Artificial Sequence
  MKO10021861_A_Gm6772
  gRNA
tgcgtgaatctcaaccacca

SEQ ID NO: 21862 - DNA, 20 bp, Artificial Sequence
  MKO10021862_A_Gm6812
  gRNA
gaagttcaaatataaagtca

SEQ ID NO: 21863 - DNA, 20 bp, Artificial Sequence
  MKO10021863_A_Gm6812
  gRNA
aaagttacaagaatttcaca

SEQ ID NO: 21864 - DNA, 20 bp, Artificial Sequence
  MKO10021864_A_Gm6812
  gRNA
cccaagagctcagactccct

SEQ ID NO: 21865 - DNA, 20 bp, Artificial Sequence
  MKO10021865_A_Gm684
  gRNA
aggactcgaagatctggtcg

SEQ ID NO: 21866 - DNA, 20 bp, Artificial Sequence
  MKO10021866_A_Gm684
  gRNA
ctagattccagggtcgcctt

SEQ ID NO: 21867 - DNA, 20 bp, Artificial Sequence
  MKO10021867_A_Gm684
  gRNA
ccactggcgatttctataag

SEQ ID NO: 21868 - DNA, 20 bp, Artificial Sequence
  MKO10021868_A_Gm6878
  gRNA
tacacgaacttgccacaccc

SEQ ID NO: 21869 - DNA, 20 bp, Artificial Sequence
  MKO10021869_A_Gm6878
  gRNA
actccagcatgttgactgac

SEQ ID NO: 21870 - DNA, 20 bp, Artificial Sequence
  MKO10021870_A_Gm6878
  gRNA
gaaaagttcttgatcagaga

SEQ ID NO: 21871 - DNA, 20 bp, Artificial Sequence
  MKO10021871_A_Gm6880
  gRNA
agttgatgcagcatcaccgc

SEQ ID NO: 21872 - DNA, 20 bp, Artificial Sequence
  MKO10021872_A_Gm6880
  gRNA
agtcatgcagaaccctgttg

SEQ ID NO: 21873 - DNA, 20 bp, Artificial Sequence
  MKO10021873_A_Gm6880
  gRNA
tgcccatccccagcaagtga

SEQ ID NO: 21874 - DNA, 20 bp, Artificial Sequence
  MKO10021874_A_Gm6890
  gRNA
gcagtatcaccgttgcgccc

SEQ ID NO: 21875 - DNA, 20 bp, Artificial Sequence
  MKO10021875_A_Gm6890
  gRNA
atcaactagaaatcgacacc

SEQ ID NO: 21876 - DNA, 20 bp, Artificial Sequence
  MKO10021876_A_Gm6890
  gRNA
gcctccattgcagtcctgaa

SEQ ID NO: 21877 - DNA, 20 bp, Artificial Sequence
  MKO10021877_A_Gm6902
  gRNA
agagggcctgatgacggagc

SEQ ID NO: 21878 - DNA, 20 bp, Artificial Sequence
  MKO10021878_A_Gm6902
  gRNA
tcatggtcctgacaatgctg

SEQ ID NO: 21879 - DNA, 20 bp, Artificial Sequence
  MKO10021879_A_Gm6902
  gRNA
tagaggagagcgagactcga

SEQ ID NO: 21880 - DNA, 20 bp, Artificial Sequence
  MKO10021880_A_Gm6904
  gRNA
tgcgcagctatattcagtga

SEQ ID NO: 21881 - DNA, 20 bp, Artificial Sequence
  MKO10021881_A_Gm6904
  gRNA
agtatatatgattccactca

SEQ ID NO: 21882 - DNA, 20 bp, Artificial Sequence
  MKO10021882_A_Gm6904
  gRNA
tagaattgcgttgtcttcca

SEQ ID NO: 21883 - DNA, 20 bp, Artificial Sequence
  MKO10021883_A_Gm6927
  gRNA
tgtcatcgtaggtgtatcca

SEQ ID NO: 21884 - DNA, 20 bp, Artificial Sequence
  MKO10021884_A_Gm6927
  gRNA
tccaatcaatccgagcatgc

SEQ ID NO: 21885 - DNA, 20 bp, Artificial Sequence
  MKO10021885_A_Gm6927
  gRNA
aagtaccagactcgccactg

SEQ ID NO: 21886 - DNA, 20 bp, Artificial Sequence
  MKO10021886_A_Gm694
  gRNA
gcagccgtcctgcgcaccca

SEQ ID NO: 21887 - DNA, 20 bp, Artificial Sequence
  MKO10021887_A_Gm694
  gRNA
tggggcgacacatccctgat

SEQ ID NO: 21888 - DNA, 20 bp, Artificial Sequence
  MKO10021888_A_Gm694
  gRNA
tctagtgtggagatgagctc

SEQ ID NO: 21889 - DNA, 20 bp, Artificial Sequence
  MKO10021889_A_Gm7030
  gRNA
cgccctggccccgacccgag

SEQ ID NO: 21890 - DNA, 20 bp, Artificial Sequence
  MKO10021890_A_Gm7030
  gRNA
gccaggtccccacactatcc

SEQ ID NO: 21891 - DNA, 20 bp, Artificial Sequence
  MKO10021891_A_Gm7030
  gRNA
aaccggggctcccctaagcc

SEQ ID NO: 21892 - DNA, 20 bp, Artificial Sequence
  MKO10021892_A_Gm7073
  gRNA
cgtggcttgcttatctgaac

SEQ ID NO: 21893 - DNA, 20 bp, Artificial Sequence
  MKO10021893_A_Gm7073
  gRNA
tcaacctgatatgatagttg

SEQ ID NO: 21894 - DNA, 20 bp, Artificial Sequence
  MKO10021894_A_Gm7073
  gRNA
cctcaaccatacaattgtaa

SEQ ID NO: 21895 - DNA, 20 bp, Artificial Sequence
  MKO10021895_A_Gm7092
  gRNA
tcagtccatggttcggacta

SEQ ID NO: 21896 - DNA, 20 bp, Artificial Sequence
  MKO10021896_A_Gm7092
  gRNA
agcaggacgaagaacgttcc

SEQ ID NO: 21897 - DNA, 20 bp, Artificial Sequence
  MKO10021897_A_Gm7092
  gRNA
acaggggaacctgcgacgag

SEQ ID NO: 21898 - DNA, 20 bp, Artificial Sequence
  MKO10021898_A_Gm7102
  gRNA
ggctcccgtatggcctagca

SEQ ID NO: 21899 - DNA, 20 bp, Artificial Sequence
  MKO10021899_A_Gm7102
  gRNA
cctccctgtgggactgttac

SEQ ID NO: 21900 - DNA, 20 bp, Artificial Sequence
  MKO10021900_A_Gm7102
  gRNA
actcctgtaacagtcccaca

SEQ ID NO: 21901 - DNA, 20 bp, Artificial Sequence
  MKO10021901_A_Gm711
  gRNA
actcgatggcatccaatacc

SEQ ID NO: 21902 - DNA, 20 bp, Artificial Sequence
  MKO10021902_A_Gm711
  gRNA
gaacgatgttcaacttatgt

SEQ ID NO: 21903 - DNA, 20 bp, Artificial Sequence
  MKO10021903_A_Gm711
  gRNA
gggagtaataatccatcacc

SEQ ID NO: 21904 - DNA, 20 bp, Artificial Sequence
  MKO10021904_A_Gm7120
  gRNA
gatgtcttacctgtaaagat

SEQ ID NO: 21905 - DNA, 20 bp, Artificial Sequence
  MKO10021905_A_Gm7120
  gRNA
ggatgcaggggatgagaaca

SEQ ID NO: 21906 - DNA, 20 bp, Artificial Sequence
  MKO10021906_A_Gm7120
  gRNA
atcaatgcgcattccgtatt

SEQ ID NO: 21907 - DNA, 20 bp, Artificial Sequence
  MKO10021907_A_Gm7157
  gRNA
gcataccacactcgccactg

SEQ ID NO: 21908 - DNA, 20 bp, Artificial Sequence
  MKO10021908_A_Gm7157
  gRNA
tattgctgacgttgtcatag

SEQ ID NO: 21909 - DNA, 20 bp, Artificial Sequence
  MKO10021909_A_Gm7157
  gRNA
tctgatctcttatcctagta

SEQ ID NO: 21910 - DNA, 20 bp, Artificial Sequence
  MKO10021910_A_Gm715
  gRNA
gcgtcgtgtgagagacgtgc

SEQ ID NO: 21911 - DNA, 20 bp, Artificial Sequence
  MKO10021911_A_Gm715
  gRNA
ggctgtaggtcgacgcccac

SEQ ID NO: 21912 - DNA, 20 bp, Artificial Sequence
  MKO10021912_A_Gm715
  gRNA
gatcttgagccccgccgcat

SEQ ID NO: 21913 - DNA, 20 bp, Artificial Sequence
  MKO10021913_A_Gm7168
  gRNA
tatgcactataccaagtccg

SEQ ID NO: 21914 - DNA, 20 bp, Artificial Sequence
  MKO10021914_A_Gm7168
  gRNA
ataggctggctcttgatcaa

SEQ ID NO: 21915 - DNA, 20 bp, Artificial Sequence
  MKO10021915_A_Gm7168
  gRNA
gatttgttggacgagcactg

SEQ ID NO: 21916 - DNA, 20 bp, Artificial Sequence
  MKO10021916_A_Gm7173
  gRNA
gagattactattattaaccg

SEQ ID NO: 21917 - DNA, 20 bp, Artificial Sequence
  MKO10021917_A_Gm7173
  gRNA
cttgaacatcaaagtgcgtg

SEQ ID NO: 21918 - DNA, 20 bp, Artificial Sequence
  MKO10021918_A_Gm7173
  gRNA
caaattgttgttgaccagtc

SEQ ID NO: 21919 - DNA, 20 bp, Artificial Sequence
  MKO10021919_A_Gm7244
  gRNA
ttgtgtgatgcccgaagcta

SEQ ID NO: 21920 - DNA, 20 bp, Artificial Sequence
  MKO10021920_A_Gm7244
  gRNA
ctgcaaagaatcatcgataa

SEQ ID NO: 21921 - DNA, 20 bp, Artificial Sequence
  MKO10021921_A_Gm7244
  gRNA
agagagcatgcctaccgagc

SEQ ID NO: 21922 - DNA, 20 bp, Artificial Sequence
  MKO10021922_A_Gm7257
  gRNA
ttgctggtgatgtcctcgca

SEQ ID NO: 21923 - DNA, 20 bp, Artificial Sequence
  MKO10021923_A_Gm7257
  gRNA
acctttaagggttatgagcg

SEQ ID NO: 21924 - DNA, 20 bp, Artificial Sequence
  MKO10021924_A_Gm7257
  gRNA
tgacatgtatcacgtgtgat

SEQ ID NO: 21925 - DNA, 20 bp, Artificial Sequence
  MKO10021925_A_Gm7325
  gRNA
agcagcgatcgaagcaccat

SEQ ID NO: 21926 - DNA, 20 bp, Artificial Sequence
  MKO10021926_A_Gm7325
  gRNA
agctcagtcggcgggccagc

SEQ ID NO: 21927 - DNA, 20 bp, Artificial Sequence
  MKO10021927_A_Gm7325
  gRNA
aaactaatccagttgaaaac

SEQ ID NO: 21928 - DNA, 20 bp, Artificial Sequence
  MKO10021928_A_Gm732
  gRNA
ccatcgctttacgacgaacc

SEQ ID NO: 21929 - DNA, 20 bp, Artificial Sequence
  MKO10021929_A_Gm732
  gRNA
cccccttaccaatcccataa

SEQ ID NO: 21930 - DNA, 20 bp, Artificial Sequence
  MKO10021930_A_Gm732
  gRNA
atgataagagtgaagaacaa

SEQ ID NO: 21931 - DNA, 20 bp, Artificial Sequence
  MKO10021931_A_Gm7361
  gRNA
ggccatcattcaccaacttt

SEQ ID NO: 21932 - DNA, 20 bp, Artificial Sequence
  MKO10021932_A_Gm7361
  gRNA
atttctaaacgacttagaga

SEQ ID NO: 21933 - DNA, 20 bp, Artificial Sequence
  MKO10021933_A_Gm7361
  gRNA
agaagacagcatcttgcaga

SEQ ID NO: 21934 - DNA, 20 bp, Artificial Sequence
  MKO10021934_A_Gm7534
  gRNA
acgaccgtctctccgctact

SEQ ID NO: 21935 - DNA, 20 bp, Artificial Sequence
  MKO10021935_A_Gm7534
  gRNA
taccaacgactccaacgcag

SEQ ID NO: 21936 - DNA, 20 bp, Artificial Sequence
  MKO10021936_A_Gm7534
  gRNA
acccgacttaccggttggca

SEQ ID NO: 21937 - DNA, 20 bp, Artificial Sequence
  MKO10021937_A_Gm757
  gRNA
tggccacagtagagacgtcg

SEQ ID NO: 21938 - DNA, 20 bp, Artificial Sequence
  MKO10021938_A_Gm757
  gRNA
tttgcattgtgtacgatcca

SEQ ID NO: 21939 - DNA, 20 bp, Artificial Sequence
  MKO10021939_A_Gm757
  gRNA
gttcgcattactatctacac

SEQ ID NO: 21940 - DNA, 20 bp, Artificial Sequence
  MKO10021940_A_Gm7609
  gRNA
tgcacagtgtttcaaccatt

SEQ ID NO: 21941 - DNA, 20 bp, Artificial Sequence
  MKO10021941_A_Gm7609
  gRNA
tggggcagactggaaaacag

SEQ ID NO: 21942 - DNA, 20 bp, Artificial Sequence
  MKO10021942_A_Gm7609
  gRNA
ttccatcttccacagctgcc

SEQ ID NO: 21943 - DNA, 20 bp, Artificial Sequence
  MKO10021943_A_Gm7616
  gRNA
tccccatggggcgttacctc

SEQ ID NO: 21944 - DNA, 20 bp, Artificial Sequence
  MKO10021944_A_Gm7616
  gRNA
caagccttccatcctctccg

SEQ ID NO: 21945 - DNA, 20 bp, Artificial Sequence
  MKO10021945_A_Gm7616
  gRNA
cgacacagaagctgccacta

SEQ ID NO: 21946 - DNA, 20 bp, Artificial Sequence
  MKO10021946_A_Gm765
  gRNA
ctgcaacttgacctgcgatg

SEQ ID NO: 21947 - DNA, 20 bp, Artificial Sequence
  MKO10021947_A_Gm765
  gRNA
gagactacagtccacatcgc

SEQ ID NO: 21948 - DNA, 20 bp, Artificial Sequence
  MKO10021948_A_Gm765
  gRNA
gtgaagtgctcgatcctgac

SEQ ID NO: 21949 - DNA, 20 bp, Artificial Sequence
  MKO10021949_A_Gm766
  gRNA
tgtcattcacgtcgatgccg

SEQ ID NO: 21950 - DNA, 20 bp, Artificial Sequence
  MKO10021950_A_Gm766
  gRNA
attgagcgcattcccgacgc

SEQ ID NO: 21951 - DNA, 20 bp, Artificial Sequence
  MKO10021951_A_Gm766
  gRNA
cgacgtgaatgacagcgaga

SEQ ID NO: 21952 - DNA, 20 bp, Artificial Sequence
  MKO10021952_A_Gm7694
  gRNA
gggcccgaggggttcgcttc

SEQ ID NO: 21953 - DNA, 20 bp, Artificial Sequence
  MKO10021953_A_Gm7694
  gRNA
gcgatgaaatcagcatgtcc

SEQ ID NO: 21954 - DNA, 20 bp, Artificial Sequence
  MKO10021954_A_Gm7694
  gRNA
caatgacctcctgcggagaa

SEQ ID NO: 21955 - DNA, 20 bp, Artificial Sequence
  MKO10021955_A_Gm7714
  gRNA
ggctgagtgtgacgactatg

SEQ ID NO: 21956 - DNA, 20 bp, Artificial Sequence
  MKO10021956_A_Gm7714
  gRNA
agctattcagctattgtctc

SEQ ID NO: 21957 - DNA, 20 bp, Artificial Sequence
  MKO10021957_A_Gm7714
  gRNA
aagccactgtatgtagtctt

SEQ ID NO: 21958 - DNA, 20 bp, Artificial Sequence
  MKO10021958_A_Gm773
  gRNA
ttggttcctacaagaatggg

SEQ ID NO: 21959 - DNA, 20 bp, Artificial Sequence
  MKO10021959_A_Gm773
  gRNA
tttcaacaacagcactgcta

SEQ ID NO: 21960 - DNA, 20 bp, Artificial Sequence
  MKO10021960_A_Gm773
  gRNA
tctgtaccacccattcttgt

SEQ ID NO: 21961 - DNA, 20 bp, Artificial Sequence
  MKO10021961_A_Gm7849
  gRNA
cctctctgcccttgccctgc

SEQ ID NO: 21962 - DNA, 20 bp, Artificial Sequence
  MKO10021962_A_Gm7849
  gRNA
agagccttctgtgcctccaa

SEQ ID NO: 21963 - DNA, 20 bp, Artificial Sequence
  MKO10021963_A_Gm7849
  gRNA
cagcccaaagaagatttccg

SEQ ID NO: 21964 - DNA, 20 bp, Artificial Sequence
  MKO10021964_A_Gm7861
  gRNA
cctctctgcccttgccctgc

SEQ ID NO: 21965 - DNA, 20 bp, Artificial Sequence
  MKO10021965_A_Gm7861
  gRNA
agagccttctgtgcctccaa

SEQ ID NO: 21966 - DNA, 20 bp, Artificial Sequence
  MKO10021966_A_Gm7861
  gRNA
cagcccaaagaagatttccg

SEQ ID NO: 21967 - DNA, 20 bp, Artificial Sequence
  MKO10021967_A_Gm7903
  gRNA
cttacctagtagctgagttc

SEQ ID NO: 21968 - DNA, 20 bp, Artificial Sequence
  MKO10021968_A_Gm7903
  gRNA
gttcattatgatggacacca

SEQ ID NO: 21969 - DNA, 20 bp, Artificial Sequence
  MKO10021969_A_Gm7903
  gRNA
cagtttcaagatgatctgtg

SEQ ID NO: 21970 - DNA, 20 bp, Artificial Sequence
  MKO10021970_A_Gm7978
  gRNA
tctccagaatctgacattga

SEQ ID NO: 21971 - DNA, 20 bp, Artificial Sequence
  MKO10021971_A_Gm7978
  gRNA
tccatctagcacagcctgca

SEQ ID NO: 21972 - DNA, 20 bp, Artificial Sequence
  MKO10021972_A_Gm7978
  gRNA
tcccgacaggggaaaacttc

SEQ ID NO: 21973 - DNA, 20 bp, Artificial Sequence
  MKO10021973_A_Gm806
  gRNA
gctggacagtcgaagcaatt

SEQ ID NO: 21974 - DNA, 20 bp, Artificial Sequence
  MKO10021974_A_Gm806
  gRNA
ccagcacccctcgtgactgc

SEQ ID NO: 21975 - DNA, 20 bp, Artificial Sequence
  MKO10021975_A_Gm806
  gRNA
aagttgttgcaaccatacca

SEQ ID NO: 21976 - DNA, 20 bp, Artificial Sequence
  MKO10021976_A_Gm813
  gRNA
cgacatcttgcaggtcgtgc

SEQ ID NO: 21977 - DNA, 20 bp, Artificial Sequence
  MKO10021977_A_Gm813
  gRNA
ctggcatacatcaccgaaag

SEQ ID NO: 21978 - DNA, 20 bp, Artificial Sequence
  MKO10021978_A_Gm813
  gRNA
atataagctaaagcctcttc

SEQ ID NO: 21979 - DNA, 20 bp, Artificial Sequence
  MKO10021979_A_Gm815
  gRNA
ggcctccggggtcaatatgc

SEQ ID NO: 21980 - DNA, 20 bp, Artificial Sequence
  MKO10021980_A_Gm815
  gRNA
tgtggctatgtcgtctctag

SEQ ID NO: 21981 - DNA, 20 bp, Artificial Sequence
  MKO10021981_A_Gm815
  gRNA
gcacagaagcatcgttccta

SEQ ID NO: 21982 - DNA, 20 bp, Artificial Sequence
  MKO10021982_A_Gm8267
  gRNA
agtatttgcttcgcacatgc

SEQ ID NO: 21983 - DNA, 20 bp, Artificial Sequence
  MKO10021983_A_Gm8267
  gRNA
gattagagatgttgcaactt

SEQ ID NO: 21984 - DNA, 20 bp, Artificial Sequence
  MKO10021984_A_Gm8267
  gRNA
tgtgaaatagtctgagcagc

SEQ ID NO: 21985 - DNA, 20 bp, Artificial Sequence
  MKO10021985_A_Gm826
  gRNA
cgttatctgcttatgccaca

SEQ ID NO: 21986 - DNA, 20 bp, Artificial Sequence
  MKO10021986_A_Gm826
  gRNA
cagcatgatttgcctccatg

SEQ ID NO: 21987 - DNA, 20 bp, Artificial Sequence
  MKO10021987_A_Gm826
  gRNA
tgacagctacagagaagcat

SEQ ID NO: 21988 - DNA, 20 bp, Artificial Sequence
  MKO10021988_A_Gm8298
  gRNA
cttatgattctgtaaaccga

SEQ ID NO: 21989 - DNA, 20 bp, Artificial Sequence
  MKO10021989_A_Gm8298
  gRNA
gccctactatccacaagtcc

SEQ ID NO: 21990 - DNA, 20 bp, Artificial Sequence
  MKO10021990_A_Gm8298
  gRNA
cttgctatatcctgcactac

SEQ ID NO: 21991 - DNA, 20 bp, Artificial Sequence
  MKO10021991_A_Gm829
  gRNA
tttctgttcatacacgaccg

SEQ ID NO: 21992 - DNA, 20 bp, Artificial Sequence
  MKO10021992_A_Gm829
  gRNA
cggtccacagtagctaccgg

SEQ ID NO: 21993 - DNA, 20 bp, Artificial Sequence
  MKO10021993_A_Gm829
  gRNA
ttacctgcaaatgatccgat

SEQ ID NO: 21994 - DNA, 20 bp, Artificial Sequence
  MKO10021994_A_Gm8300
  gRNA
atatgggcaagagtatgccc

SEQ ID NO: 21995 - DNA, 20 bp, Artificial Sequence
  MKO10021995_A_Gm8300
  gRNA
acgatttcatcatcatcccc

SEQ ID NO: 21996 - DNA, 20 bp, Artificial Sequence
  MKO10021996_A_Gm8300
  gRNA
tccatcatgccaaagaataa

SEQ ID NO: 21997 - DNA, 20 bp, Artificial Sequence
  MKO10021997_A_Gm8369
  gRNA
tagcaatggttgaagtgtcg

SEQ ID NO: 21998 - DNA, 20 bp, Artificial Sequence
  MKO10021998_A_Gm8369
  gRNA
agtaagatcactgaaaagac

SEQ ID NO: 21999 - DNA, 20 bp, Artificial Sequence
  MKO10021999_A_Gm8369
  gRNA
aaatgtatacaagaaccacc

SEQ ID NO: 22000 - DNA, 20 bp, Artificial Sequence
  MKO10022000_A_Gm8439
  gRNA
aaggcgattgctactcaaga

SEQ ID NO: 22001 - DNA, 20 bp, Artificial Sequence
  MKO10022001_A_Gm8439
  gRNA
atcttgagtagcaatcgcct

SEQ ID NO: 22002 - DNA, 20 bp, Artificial Sequence
  MKO10022002_A_Gm8439
  gRNA
ctgccatccaacaagaagct

SEQ ID NO: 22003 - DNA, 20 bp, Artificial Sequence
  MKO10022003_A_Gm8453
  gRNA
taaatccgtgaaaaccactg

SEQ ID NO: 22004 - DNA, 20 bp, Artificial Sequence
  MKO10022004_A_Gm8453
  gRNA
catttgaagagcagagaaca

SEQ ID NO: 22005 - DNA, 20 bp, Artificial Sequence
  MKO10022005_A_Gm8453
  gRNA
gttattcttgttacagttgt

SEQ ID NO: 22006 - DNA, 20 bp, Artificial Sequence
  MKO10022006_A_Gm853
  gRNA
atccagttcgcagcccgctg

SEQ ID NO: 22007 - DNA, 20 bp, Artificial Sequence
  MKO10022007_A_Gm853
  gRNA
cagttcctcctcattgtcga

SEQ ID NO: 22008 - DNA, 20 bp, Artificial Sequence
  MKO10022008_A_Gm853
  gRNA
tgtggcagtcggaacccacg

SEQ ID NO: 22009 - DNA, 20 bp, Artificial Sequence
  MKO10022009_A_Gm8653
  gRNA
gccctctcgatgtctgctca

SEQ ID NO: 22010 - DNA, 20 bp, Artificial Sequence
  MKO10022010_A_Gm8653
  gRNA
cagttgaagagcacagaaca

SEQ ID NO: 22011 - DNA, 20 bp, Artificial Sequence
  MKO10022011_A_Gm8653
  gRNA
cagagcaagtgtcacaaaca

SEQ ID NO: 22012 - DNA, 20 bp, Artificial Sequence
  MKO10022012_A_Gm8660
  gRNA
taaatccctgaaaagcactg

SEQ ID NO: 22013 - DNA, 20 bp, Artificial Sequence
  MKO10022013_A_Gm8660
  gRNA
cagttgaaaagcacagaaca

SEQ ID NO: 22014 - DNA, 20 bp, Artificial Sequence
  MKO10022014_A_Gm8660
  gRNA
aacttgttctgttccacttc

SEQ ID NO: 22015 - DNA, 20 bp, Artificial Sequence
  MKO10022015_A_Gm8677
  gRNA
gccctctccatgtctgctca

SEQ ID NO: 22016 - DNA, 20 bp, Artificial Sequence
  MKO10022016_A_Gm8677
  gRNA
tagtttaagagcacagaaca

SEQ ID NO: 22017 - DNA, 20 bp, Artificial Sequence
  MKO10022017_A_Gm8677
  gRNA
cagagcaagtgtcacaaaca

SEQ ID NO: 22018 - DNA, 20 bp, Artificial Sequence
  MKO10022018_A_Gm867
  gRNA
cccctcccttagcgggttgc

SEQ ID NO: 22019 - DNA, 20 bp, Artificial Sequence
  MKO10022019_A_Gm867
  gRNA
tactcactatgagtcactcc

SEQ ID NO: 22020 - DNA, 20 bp, Artificial Sequence
  MKO10022020_A_Gm867
  gRNA
taatactcacctgctaactc

SEQ ID NO: 22021 - DNA, 20 bp, Artificial Sequence
  MKO10022021_A_Gm8693
  gRNA
acctacaatgaatccagaag

SEQ ID NO: 22022 - DNA, 20 bp, Artificial Sequence
  MKO10022022_A_Gm8693
  gRNA
taaatccgtgaaaaccactg

SEQ ID NO: 22023 - DNA, 20 bp, Artificial Sequence
  MKO10022023_A_Gm8693
  gRNA
catttgaagagcacagaaca

SEQ ID NO: 22024 - DNA, 20 bp, Artificial Sequence
  MKO10022024_A_Gm8720
  gRNA
gccctctccatgtctgctca

SEQ ID NO: 22025 - DNA, 20 bp, Artificial Sequence
  MKO10022025_A_Gm8720
  gRNA
cagttgaagagcacagaaca

SEQ ID NO: 22026 - DNA, 20 bp, Artificial Sequence
  MKO10022026_A_Gm8720
  gRNA
cagagcaagtgtcacaaaca

SEQ ID NO: 22027 - DNA, 20 bp, Artificial Sequence
  MKO10022027_A_Gm8764
  gRNA
aatcaggtaccttggataca

SEQ ID NO: 22028 - DNA, 20 bp, Artificial Sequence
  MKO10022028_A_Gm8764
  gRNA
cagctactctttgctgaatt

SEQ ID NO: 22029 - DNA, 20 bp, Artificial Sequence
  MKO10022029_A_Gm8764
  gRNA
tgttcagtcgaagctgtgaa

SEQ ID NO: 22030 - DNA, 20 bp, Artificial Sequence
  MKO10022030_A_Gm8765
  gRNA
gtccctgcgcaagttgtcag

SEQ ID NO: 22031 - DNA, 20 bp, Artificial Sequence
  MKO10022031_A_Gm8765
  gRNA
tgaccagctccatatgccca

SEQ ID NO: 22032 - DNA, 20 bp, Artificial Sequence
  MKO10022032_A_Gm8765
  gRNA
ctccattcattctcagatgc

SEQ ID NO: 22033 - DNA, 20 bp, Artificial Sequence
  MKO10022033_A_Gm8787
  gRNA
ccaaggggagcaaatcgtag

SEQ ID NO: 22034 - DNA, 20 bp, Artificial Sequence
  MKO10022034_A_Gm8787
  gRNA
cctctacgatttgctcccct

SEQ ID NO: 22035 - DNA, 20 bp, Artificial Sequence
  MKO10022035_A_Gm8787
  gRNA
tttgacattcaaaccgattt

SEQ ID NO: 22036 - DNA, 20 bp, Artificial Sequence
  MKO10022036_A_Gm8817
  gRNA
atccttgtccgtatacctga

SEQ ID NO: 22037 - DNA, 20 bp, Artificial Sequence
  MKO10022037_A_Gm8817
  gRNA
tgatgttcctgtccgccttc

SEQ ID NO: 22038 - DNA, 20 bp, Artificial Sequence
  MKO10022038_A_Gm8817
  gRNA
ctagattcacctcaagactt

SEQ ID NO: 22039 - DNA, 20 bp, Artificial Sequence
  MKO10022039_A_Gm884
  gRNA
cgaaggcctgctatccctcc

SEQ ID NO: 22040 - DNA, 20 bp, Artificial Sequence
  MKO10022040_A_Gm884
  gRNA
aaaatacgctatattgaaag

SEQ ID NO: 22041 - DNA, 20 bp, Artificial Sequence
  MKO10022041_A_Gm884
  gRNA
ccttgggtgcaatttactca

SEQ ID NO: 22042 - DNA, 20 bp, Artificial Sequence
  MKO10022042_A_Gm8882
  gRNA
gctggtaatcctgctcacag

SEQ ID NO: 22043 - DNA, 20 bp, Artificial Sequence
  MKO10022043_A_Gm8882
  gRNA
gagacgcacagggtccccct

SEQ ID NO: 22044 - DNA, 20 bp, Artificial Sequence
  MKO10022044_A_Gm8882
  gRNA
ggaccctgtgcgtctccctg

SEQ ID NO: 22045 - DNA, 20 bp, Artificial Sequence
  MKO10022045_A_Gm8898
  gRNA
tgtgttatgcgtgactctac

SEQ ID NO: 22046 - DNA, 20 bp, Artificial Sequence
  MKO10022046_A_Gm8898
  gRNA
caagctcagaactccaaaca

SEQ ID NO: 22047 - DNA, 20 bp, Artificial Sequence
  MKO10022047_A_Gm8898
  gRNA
cgtgcatgtgaacttcactc

SEQ ID NO: 22048 - DNA, 20 bp, Artificial Sequence
  MKO10022048_A_Gm8909
  gRNA
cggcgcagatcactcgacgc

SEQ ID NO: 22049 - DNA, 20 bp, Artificial Sequence
  MKO10022049_A_Gm8909
  gRNA
gtggtgttgcagagacgctc

SEQ ID NO: 22050 - DNA, 20 bp, Artificial Sequence
  MKO10022050_A_Gm8909
  gRNA
gatcgccaagggccatgagc

SEQ ID NO: 22051 - DNA, 20 bp, Artificial Sequence
  MKO10022051_A_Gm8994
  gRNA
ggatcatggcgaccacgacc

SEQ ID NO: 22052 - DNA, 20 bp, Artificial Sequence
  MKO10022052_A_Gm8994
  gRNA
ggtcgcgtccacctcctcgc

SEQ ID NO: 22053 - DNA, 20 bp, Artificial Sequence
  MKO10022053_A_Gm8994
  gRNA
cgagccagacgtcgccatcc

SEQ ID NO: 22054 - DNA, 20 bp, Artificial Sequence
  MKO10022054_A_Gm9047
  gRNA
actcctggaccctcgagatc

SEQ ID NO: 22055 - DNA, 20 bp, Artificial Sequence
  MKO10022055_A_Gm9047
  gRNA
agatgatgttgcgctacgaa

SEQ ID NO: 22056 - DNA, 20 bp, Artificial Sequence
  MKO10022056_A_Gm9047
  gRNA
gctttggtgttaggcgcaac

SEQ ID NO: 22057 - DNA, 20 bp, Artificial Sequence
  MKO10022057_A_Gm904
  gRNA
tcccattcattctcagatgc

SEQ ID NO: 22058 - DNA, 20 bp, Artificial Sequence
  MKO10022058_A_Gm904
  gRNA
tgaatagcattattgatcca

SEQ ID NO: 22059 - DNA, 20 bp, Artificial Sequence
  MKO10022059_A_Gm904
  gRNA
ctaactggcaggatgtgaag

SEQ ID NO: 22060 - DNA, 20 bp, Artificial Sequence
  MKO10022060_A_Gm906
  gRNA
tgaatagcattatcgattca

SEQ ID NO: 22061 - DNA, 20 bp, Artificial Sequence
  MKO10022061_A_Gm906
  gRNA
cagagcttccagtgaaacaa

SEQ ID NO: 22062 - DNA, 20 bp, Artificial Sequence
  MKO10022062_A_Gm906
  gRNA
taaaaagtgcatcagttgcg

SEQ ID NO: 22063 - DNA, 20 bp, Artificial Sequence
  MKO10022063_A_Gm9112
  gRNA
aggggacgctgtacgaccag

SEQ ID NO: 22064 - DNA, 20 bp, Artificial Sequence
  MKO10022064_A_Gm9112
  gRNA
gtcccctactttccgccttc

SEQ ID NO: 22065 - DNA, 20 bp, Artificial Sequence
  MKO10022065_A_Gm9112
  gRNA
aagagacttacctgcccaga

SEQ ID NO: 22066 - DNA, 20 bp, Artificial Sequence
  MKO10022066_A_Gm9125
  gRNA
agcagaaatgtcagaggata

SEQ ID NO: 22067 - DNA, 20 bp, Artificial Sequence
  MKO10022067_A_Gm9125
  gRNA
ttagatcctgagatcacttt

SEQ ID NO: 22068 - DNA, 20 bp, Artificial Sequence
  MKO10022068_A_Gm9125
  gRNA
tcagctcaccatctgctgca

SEQ ID NO: 22069 - DNA, 20 bp, Artificial Sequence
  MKO10022069_A_Gm9268
  gRNA
ctcaaatccaagagttgtgt

SEQ ID NO: 22070 - DNA, 20 bp, Artificial Sequence
  MKO10022070_A_Gm9268
  gRNA
tatgaactaccagttacttc

SEQ ID NO: 22071 - DNA, 20 bp, Artificial Sequence
  MKO10022071_A_Gm9268
  gRNA
cacatcctactgctcacctg

SEQ ID NO: 22072 - DNA, 20 bp, Artificial Sequence
  MKO10022072_A_Gm933
  gRNA
ccactctcggtgactatgaa

SEQ ID NO: 22073 - DNA, 20 bp, Artificial Sequence
  MKO10022073_A_Gm933
  gRNA
cccttcatagtcaccgagag

SEQ ID NO: 22074 - DNA, 20 bp, Artificial Sequence
  MKO10022074_A_Gm933
  gRNA
cttgcagccataatcctctc

SEQ ID NO: 22075 - DNA, 20 bp, Artificial Sequence
  MKO10022075_A_Gm9376
  gRNA
ctatgtgtacataatttacc

SEQ ID NO: 22076 - DNA, 20 bp, Artificial Sequence
  MKO10022076_A_Gm9376
  gRNA
gtcacgatgaagcctgagac

SEQ ID NO: 22077 - DNA, 20 bp, Artificial Sequence
  MKO10022077_A_Gm9376
  gRNA
ctacaacaagaagattcgac

SEQ ID NO: 22078 - DNA, 20 bp, Artificial Sequence
  MKO10022078_A_Gm94
  gRNA
gcttacctgcccggcatgtc

SEQ ID NO: 22079 - DNA, 20 bp, Artificial Sequence
  MKO10022079_A_Gm94
  gRNA
tgtctcagttcttcgcctga

SEQ ID NO: 22080 - DNA, 20 bp, Artificial Sequence
  MKO10022080_A_Gm94
  gRNA
ccccaaattcttaagcatcc

SEQ ID NO: 22081 - DNA, 20 bp, Artificial Sequence
  MKO10022081_A_Gm9513
  gRNA
acctttaagggttatgaacg

SEQ ID NO: 22082 - DNA, 20 bp, Artificial Sequence
  MKO10022082_A_Gm9513
  gRNA
gaattctcggagaatttgtg

SEQ ID NO: 22083 - DNA, 20 bp, Artificial Sequence
  MKO10022083_A_Gm9513
  gRNA
tgtgctgacctttgcttcac

SEQ ID NO: 22084 - DNA, 20 bp, Artificial Sequence
  MKO10022084_A_Gm9573
  gRNA
tcccatgaccacgataacag

SEQ ID NO: 22085 - DNA, 20 bp, Artificial Sequence
  MKO10022085_A_Gm9573
  gRNA
tgtcatctctacgacattga

SEQ ID NO: 22086 - DNA, 20 bp, Artificial Sequence
  MKO10022086_A_Gm9573
  gRNA
acatctaccccgaccacctc

SEQ ID NO: 22087 - DNA, 20 bp, Artificial Sequence
  MKO10022087_A_Gm960
  gRNA
ggccgttctcaagacgcatc

SEQ ID NO: 22088 - DNA, 20 bp, Artificial Sequence
  MKO10022088_A_Gm960
  gRNA
cttagaacgtaacgcttcta

SEQ ID NO: 22089 - DNA, 20 bp, Artificial Sequence
  MKO10022089_A_Gm960
  gRNA
aaatacagcctgcgctaccc

SEQ ID NO: 22090 - DNA, 20 bp, Artificial Sequence
  MKO10022090_A_Gm9733
  gRNA
aaccctgaccatgcatcacc

SEQ ID NO: 22091 - DNA, 20 bp, Artificial Sequence
  MKO10022091_A_Gm9733
  gRNA
ggcactcagttgtatgtctg

SEQ ID NO: 22092 - DNA, 20 bp, Artificial Sequence
  MKO10022092_A_Gm9733
  gRNA
catgctcacctgtaagtccc

SEQ ID NO: 22093 - DNA, 20 bp, Artificial Sequence
  MKO10022093_A_Gm973
  gRNA
tcggccaaaagatacctccg

SEQ ID NO: 22094 - DNA, 20 bp, Artificial Sequence
  MKO10022094_A_Gm973
  gRNA
ctctgttgaatccgaaatga

SEQ ID NO: 22095 - DNA, 20 bp, Artificial Sequence
  MKO10022095_A_Gm973
  gRNA
acacgcacctgatgtcagtc

SEQ ID NO: 22096 - DNA, 20 bp, Artificial Sequence
  MKO10022096_A_Gm9758
  gRNA
gaagtcgatgacattacagc

SEQ ID NO: 22097 - DNA, 20 bp, Artificial Sequence
  MKO10022097_A_Gm9758
  gRNA
atccctcagtcacgtaggtc

SEQ ID NO: 22098 - DNA, 20 bp, Artificial Sequence
  MKO10022098_A_Gm9758
  gRNA
tcgcctgacctacgtgactg

SEQ ID NO: 22099 - DNA, 20 bp, Artificial Sequence
  MKO10022099_A_Gm9839
  gRNA
cccttactagactgttctat

SEQ ID NO: 22100 - DNA, 20 bp, Artificial Sequence
  MKO10022100_A_Gm9839
  gRNA
tcctatagaacagtctagta

SEQ ID NO: 22101 - DNA, 20 bp, Artificial Sequence
  MKO10022101_A_Gm9839
  gRNA
gcagtacagtgtgacaatag

SEQ ID NO: 22102 - DNA, 20 bp, Artificial Sequence
  MKO10022102_A_Gm996
  gRNA
gtaccgagaacgcgatgtac

SEQ ID NO: 22103 - DNA, 20 bp, Artificial Sequence
  MKO10022103_A_Gm996
  gRNA
gacgcgaggttcgggatacg

SEQ ID NO: 22104 - DNA, 20 bp, Artificial Sequence
  MKO10022104_A_Gm996
  gRNA
tcgggcgatccactgagcgc

SEQ ID NO: 22105 - DNA, 20 bp, Artificial Sequence
  MKO10022105_A_Gm9992
  gRNA
gcctgggtgcagcccctctg

SEQ ID NO: 22106 - DNA, 20 bp, Artificial Sequence
  MKO10022106_A_Gm9992
  gRNA
tgcacccaggcccagcaaga

SEQ ID NO: 22107 - DNA, 20 bp, Artificial Sequence
  MKO10022107_A_Gm9992
  gRNA
gagcagcctctacagtgagc

SEQ ID NO: 22108 - DNA, 20 bp, Artificial Sequence
  MKO10022108_A_Gm9994
  gRNA
gaatgtggggatcccaacac

SEQ ID NO: 22109 - DNA, 20 bp, Artificial Sequence
  MKO10022109_A_Gm9994
  gRNA
gtagtctgaagtccacatgc

SEQ ID NO: 22110 - DNA, 20 bp, Artificial Sequence
  MKO10022110_A_Gm9994
  gRNA
tgcccacaggtccttccagg

SEQ ID NO: 22111 - DNA, 20 bp, Artificial Sequence
  MKO10022111_A_Gm9
  gRNA
gccacctatgatcaatgttg

SEQ ID NO: 22112 - DNA, 20 bp, Artificial Sequence
  MKO10022112_A_Gm9
  gRNA
gaacccgaagctgaatccgt

SEQ ID NO: 22113 - DNA, 20 bp, Artificial Sequence
  MKO10022113_A_Gm9
  gRNA
tccccgcaagtttgaacacc

SEQ ID NO: 22114 - DNA, 20 bp, Artificial Sequence
  MKO10022114_A_Gmcl1l
  gRNA
gtgttgtaaaagctgtttcg

SEQ ID NO: 22115 - DNA, 20 bp, Artificial Sequence
  MKO10022115_A_Gmcl1l
  gRNA
caaccactgttgtttgtaaa

SEQ ID NO: 22116 - DNA, 20 bp, Artificial Sequence
  MKO10022116_A_Gmcl1l
  gRNA
acttggagagaatcacacca

SEQ ID NO: 22117 - DNA, 20 bp, Artificial Sequence
  MKO10022117_A_Gmcl1
  gRNA
tcagcactgcaggtcgcatt

SEQ ID NO: 22118 - DNA, 20 bp, Artificial Sequence
  MKO10022118_A_Gmcl1
  gRNA
gaccagaacattgatataga

SEQ ID NO: 22119 - DNA, 20 bp, Artificial Sequence
  MKO10022119_A_Gmcl1
  gRNA
agcagcttgcatgctgcaat

SEQ ID NO: 22120 - DNA, 20 bp, Artificial Sequence
  MKO10022120_A_Gmds
  gRNA
tagatcgccgtactattcca

SEQ ID NO: 22121 - DNA, 20 bp, Artificial Sequence
  MKO10022121_A_Gmds
  gRNA
cttccaggatggttcgtact

SEQ ID NO: 22122 - DNA, 20 bp, Artificial Sequence
  MKO10022122_A_Gmds
  gRNA
ctcaggtccatggaatagta

SEQ ID NO: 22123 - DNA, 20 bp, Artificial Sequence
  MKO10022123_A_Gmeb1
  gRNA
ctaccccctaccatcggccg

SEQ ID NO: 22124 - DNA, 20 bp, Artificial Sequence
  MKO10022124_A_Gmeb1
  gRNA
aagagagccatccgtctagg

SEQ ID NO: 22125 - DNA, 20 bp, Artificial Sequence
  MKO10022125_A_Gmeb1
  gRNA
atcgcttaccctataacctg

SEQ ID NO: 22126 - DNA, 20 bp, Artificial Sequence
  MKO10022126_A_Gmeb2
  gRNA
agcacgaagattgacctttc

SEQ ID NO: 22127 - DNA, 20 bp, Artificial Sequence
  MKO10022127_A_Gmeb2
  gRNA
acagcagagctaacctcatt

SEQ ID NO: 22128 - DNA, 20 bp, Artificial Sequence
  MKO10022128_A_Gmeb2
  gRNA
attgtgtaccccatcacttg

SEQ ID NO: 22129 - DNA, 20 bp, Artificial Sequence
  MKO10022129_A_Gmfb
  gRNA
ttaaagacgaactacccgag

SEQ ID NO: 22130 - DNA, 20 bp, Artificial Sequence
  MKO10022130_A_Gmfb
  gRNA
gattaacttaccgacaggac

SEQ ID NO: 22131 - DNA, 20 bp, Artificial Sequence
  MKO10022131_A_Gmfb
  gRNA
aggatatcgaggctgccgct

SEQ ID NO: 22132 - DNA, 20 bp, Artificial Sequence
  MKO10022132_A_Gmfg
  gRNA
actgtcctcacccacggggc

SEQ ID NO: 22133 - DNA, 20 bp, Artificial Sequence
  MKO10022133_A_Gmfg
  gRNA
aggtcactgacttatgatgg

SEQ ID NO: 22134 - DNA, 20 bp, Artificial Sequence
  MKO10022134_A_Gmfg
  gRNA
cagtgaaagtggacaaagac

SEQ ID NO: 22135 - DNA, 20 bp, Artificial Sequence
  MKO10022135_A_Gmip
  gRNA
cgttccccaatgatatctcg

SEQ ID NO: 22136 - DNA, 20 bp, Artificial Sequence
  MKO10022136_A_Gmip
  gRNA
tttgcgactcattcggacca

SEQ ID NO: 22137 - DNA, 20 bp, Artificial Sequence
  MKO10022137_A_Gmip
  gRNA
ggagagatcccgccaactac

SEQ ID NO: 22138 - DNA, 20 bp, Artificial Sequence
  MKO10022138_A_Gml
  gRNA
aatagaaggtgttatgctcc

SEQ ID NO: 22139 - DNA, 20 bp, Artificial Sequence
  MKO10022139_A_Gml
  gRNA
tgtagacatagagcagccga

SEQ ID NO: 22140 - DNA, 20 bp, Artificial Sequence
  MKO10022140_A_Gml
  gRNA
agtgtcgtttgcaatgaggg

SEQ ID NO: 22141 - DNA, 20 bp, Artificial Sequence
  MKO10022141_A_Gmnc
  gRNA
agcctttgtgcgtcgagatg

SEQ ID NO: 22142 - DNA, 20 bp, Artificial Sequence
  MKO10022142_A_Gmnc
  gRNA
accagattctgacgttgtag

SEQ ID NO: 22143 - DNA, 20 bp, Artificial Sequence
  MKO10022143_A_Gmnc
  gRNA
ttcctcatctcgacgcacaa

SEQ ID NO: 22144 - DNA, 20 bp, Artificial Sequence
  MKO10022144_A_Gmnn
  gRNA
tgagattgcccgcctgagaa

SEQ ID NO: 22145 - DNA, 20 bp, Artificial Sequence
  MKO10022145_A_Gmnn
  gRNA
gcctttgatcttataagtaa

SEQ ID NO: 22146 - DNA, 20 bp, Artificial Sequence
  MKO10022146_A_Gmnn
  gRNA
tgccaaaaggcttgttcaaa

SEQ ID NO: 22147 - DNA, 20 bp, Artificial Sequence
  MKO10022147_A_Gmppa
  gRNA
caacgatgcagccgtagttg

SEQ ID NO: 22148 - DNA, 20 bp, Artificial Sequence
  MKO10022148_A_Gmppa
  gRNA
aactgggtgagggcctcatc

SEQ ID NO: 22149 - DNA, 20 bp, Artificial Sequence
  MKO10022149_A_Gmppa
  gRNA
cttccccttgagcgccatgt

SEQ ID NO: 22150 - DNA, 20 bp, Artificial Sequence
  MKO10022150_A_Gmppb
  gRNA
gtgtccaataagatcaacgc

SEQ ID NO: 22151 - DNA, 20 bp, Artificial Sequence
  MKO10022151_A_Gmppb
  gRNA
ttatactgacctgtccccaa

SEQ ID NO: 22152 - DNA, 20 bp, Artificial Sequence
  MKO10022152_A_Gmppb
  gRNA
catgcctgcgttgatcttat

SEQ ID NO: 22153 - DNA, 20 bp, Artificial Sequence
  MKO10022153_A_Gmpr2
  gRNA
agtagccgttagccacatcc

SEQ ID NO: 22154 - DNA, 20 bp, Artificial Sequence
  MKO10022154_A_Gmpr2
  gRNA
agggttacctcaagacagtc

SEQ ID NO: 22155 - DNA, 20 bp, Artificial Sequence
  MKO10022155_A_Gmpr2
  gRNA
aacttaccatgatggtgtgt

SEQ ID NO: 22156 - DNA, 20 bp, Artificial Sequence
  MKO10022156_A_Gmpr
  gRNA
aactcgaagcaaacctactc

SEQ ID NO: 22157 - DNA, 20 bp, Artificial Sequence
  MKO10022157_A_Gmpr
  gRNA
aacccaccccgaatgcctgc

SEQ ID NO: 22158 - DNA, 20 bp, Artificial Sequence
  MKO10022158_A_Gmpr
  gRNA
cgttcacaagcactactccc

SEQ ID NO: 22159 - DNA, 20 bp, Artificial Sequence
  MKO10022159_A_Gmps
  gRNA
cgaaggctggtgtttccaat

SEQ ID NO: 22160 - DNA, 20 bp, Artificial Sequence
  MKO10022160_A_Gmps
  gRNA
aagtcattgaccgaagagtg

SEQ ID NO: 22161 - DNA, 20 bp, Artificial Sequence
  MKO10022161_A_Gmps
  gRNA
ttcaaggttgtagcacgttc

SEQ ID NO: 22162 - DNA, 20 bp, Artificial Sequence
  MKO10022162_A_Gna11
  gRNA
cgtctccatggcgcgcacca

SEQ ID NO: 22163 - DNA, 20 bp, Artificial Sequence
  MKO10022163_A_Gna11
  gRNA
tccaggagtgttacgatcgc

SEQ ID NO: 22164 - DNA, 20 bp, Artificial Sequence
  MKO10022164_A_Gna11
  gRNA
cgggtacgcgtgcccaccac

SEQ ID NO: 22165 - DNA, 20 bp, Artificial Sequence
  MKO10022165_A_Gna12
  gRNA
ccgcgacatcgacgcgctgc

SEQ ID NO: 22166 - DNA, 20 bp, Artificial Sequence
  MKO10022166_A_Gna12
  gRNA
tgcgggtcgcccttgaaatc

SEQ ID NO: 22167 - DNA, 20 bp, Artificial Sequence
  MKO10022167_A_Gna12
  gRNA
ccagcagcgcgtcgatgtcg

SEQ ID NO: 22168 - DNA, 20 bp, Artificial Sequence
  MKO10022168_A_Gna13
  gRNA
cttcgaccagcgcgcgcgcg

SEQ ID NO: 22169 - DNA, 20 bp, Artificial Sequence
  MKO10022169_A_Gna13
  gRNA
acggacagcacggagcgcga

SEQ ID NO: 22170 - DNA, 20 bp, Artificial Sequence
  MKO10022170_A_Gna13
  gRNA
agaacatccgcctcgtgttc

SEQ ID NO: 22171 - DNA, 20 bp, Artificial Sequence
  MKO10022171_A_Gna14
  gRNA
cgatacgctcaatgtccgtc

SEQ ID NO: 22172 - DNA, 20 bp, Artificial Sequence
  MKO10022172_A_Gna14
  gRNA
agcgatctgaacgacggaaa

SEQ ID NO: 22173 - DNA, 20 bp, Artificial Sequence
  MKO10022173_A_Gna14
  gRNA
atttccgtcgttcagatcgc

SEQ ID NO: 22174 - DNA, 20 bp, Artificial Sequence
  MKO10022174_A_Gna15
  gRNA
gcgcagcacgtcttgcgcag

SEQ ID NO: 22175 - DNA, 20 bp, Artificial Sequence
  MKO10022175_A_Gna15
  gRNA
gccttcgctcgtagcatgca

SEQ ID NO: 22176 - DNA, 20 bp, Artificial Sequence
  MKO10022176_A_Gna15
  gRNA
tccgtgcatgctacgagcga

SEQ ID NO: 22177 - DNA, 20 bp, Artificial Sequence
  MKO10022177_A_Gnai1
  gRNA
acgctgccgaatcgttcagc

SEQ ID NO: 22178 - DNA, 20 bp, Artificial Sequence
  MKO10022178_A_Gnai1
  gRNA
ggtaggattatccacgaagc

SEQ ID NO: 22179 - DNA, 20 bp, Artificial Sequence
  MKO10022179_A_Gnai1
  gRNA
ctcccgggatctgttgaagc

SEQ ID NO: 22180 - DNA, 20 bp, Artificial Sequence
  MKO10022180_A_Gnai2
  gRNA
gtgccggcagtaccgtgccg

SEQ ID NO: 22181 - DNA, 20 bp, Artificial Sequence
  MKO10022181_A_Gnai2
  gRNA
agggcacgcaccgcacgctg

SEQ ID NO: 22182 - DNA, 20 bp, Artificial Sequence
  MKO10022182_A_Gnai2
  gRNA
ttctcgtgagcggccaaagc

SEQ ID NO: 22183 - DNA, 20 bp, Artificial Sequence
  MKO10022183_A_Gnai3
  gRNA
cattgcaatcatacgagcca

SEQ ID NO: 22184 - DNA, 20 bp, Artificial Sequence
  MKO10022184_A_Gnai3
  gRNA
atcaatcttcaaccgtccca

SEQ ID NO: 22185 - DNA, 20 bp, Artificial Sequence
  MKO10022185_A_Gnai3
  gRNA
attaaacgtttatggcgaga

SEQ ID NO: 22186 - DNA, 20 bp, Artificial Sequence
  MKO10022186_A_Gnal
  gRNA
aaatgtcaaagatgcgatcg

SEQ ID NO: 22187 - DNA, 20 bp, Artificial Sequence
  MKO10022187_A_Gnal
  gRNA
attgtgcacagtcgatcagc

SEQ ID NO: 22188 - DNA, 20 bp, Artificial Sequence
  MKO10022188_A_Gnal
  gRNA
ggttgaagccattgacgtgc

SEQ ID NO: 22189 - DNA, 20 bp, Artificial Sequence
  MKO10022189_A_Gnao1
  gRNA
aggagtgcttcaaccgatct

SEQ ID NO: 22190 - DNA, 20 bp, Artificial Sequence
  MKO10022190_A_Gnao1
  gRNA
gtgtgacgtggtgagtcgta

SEQ ID NO: 22191 - DNA, 20 bp, Artificial Sequence
  MKO10022191_A_Gnao1
  gRNA
caccggctccaatccgatcc

SEQ ID NO: 22192 - DNA, 20 bp, Artificial Sequence
  MKO10022192_A_Gnaq
  gRNA
aggagtgctacgacagacga

SEQ ID NO: 22193 - DNA, 20 bp, Artificial Sequence
  MKO10022193_A_Gnaq
  gRNA
gtcgtctgtcgtagcactcc

SEQ ID NO: 22194 - DNA, 20 bp, Artificial Sequence
  MKO10022194_A_Gnaq
  gRNA
cgtcagagtagcccgacccg

SEQ ID NO: 22195 - DNA, 20 bp, Artificial Sequence
  MKO10022195_A_Gnas
  gRNA
cggcgagttcccgacagtcg

SEQ ID NO: 22196 - DNA, 20 bp, Artificial Sequence
  MKO10022196_A_Gnas
  gRNA
cgcatgcgacagccccccga

SEQ ID NO: 22197 - DNA, 20 bp, Artificial Sequence
  MKO10022197_A_Gnas
  gRNA
tcgattgttcgtgaccgcgg

SEQ ID NO: 22198 - DNA, 20 bp, Artificial Sequence
  MKO10022198_A_Gnat1
  gRNA
tccatactgaatgttgagcg

SEQ ID NO: 22199 - DNA, 20 bp, Artificial Sequence
  MKO10022199_A_Gnat1
  gRNA
cctccagcgaatacccgtcc

SEQ ID NO: 22200 - DNA, 20 bp, Artificial Sequence
  MKO10022200_A_Gnat1
  gRNA
taccagctcaatgactccgc

SEQ ID NO: 22201 - DNA, 20 bp, Artificial Sequence
  MKO10022201_A_Gnat2
  gRNA
cgaagcacgtcctgctcgtt

SEQ ID NO: 22202 - DNA, 20 bp, Artificial Sequence
  MKO10022202_A_Gnat2
  gRNA
ctttcaggtgcgggcgagtc

SEQ ID NO: 22203 - DNA, 20 bp, Artificial Sequence
  MKO10022203_A_Gnat2
  gRNA
taactacctccctaacgagc

SEQ ID NO: 22204 - DNA, 20 bp, Artificial Sequence
  MKO10022204_A_Gnat3
  gRNA
ggcatacttactcggctcct

SEQ ID NO: 22205 - DNA, 20 bp, Artificial Sequence
  MKO10022205_A_Gnat3
  gRNA
ggattgattatgtcaatcct

SEQ ID NO: 22206 - DNA, 20 bp, Artificial Sequence
  MKO10022206_A_Gnat3
  gRNA
tggtgatatgactccacagc

SEQ ID NO: 22207 - DNA, 20 bp, Artificial Sequence
  MKO10022207_A_Gnaz
  gRNA
cgggcgctgcgatgcgctcc

SEQ ID NO: 22208 - DNA, 20 bp, Artificial Sequence
  MKO10022208_A_Gnaz
  gRNA
agacgctgagcgggatacgc

SEQ ID NO: 22209 - DNA, 20 bp, Artificial Sequence
  MKO10022209_A_Gnaz
  gRNA
ccgctctagcgagtaccacc

SEQ ID NO: 22210 - DNA, 20 bp, Artificial Sequence
  MKO10022210_A_Gnb1l
  gRNA
ccttctgagagtcgaagtcg

SEQ ID NO: 22211 - DNA, 20 bp, Artificial Sequence
  MKO10022211_A_Gnb1l
  gRNA
acagccgcaggtctcgaccc

SEQ ID NO: 22212 - DNA, 20 bp, Artificial Sequence
  MKO10022212_A_Gnb1l
  gRNA
atgggggccagggtgtaatc

SEQ ID NO: 22213 - DNA, 20 bp, Artificial Sequence
  MKO10022213_A_Gnb1
  gRNA
acctgcgcatacgctccttc

SEQ ID NO: 22214 - DNA, 20 bp, Artificial Sequence
  MKO10022214_A_Gnb1
  gRNA
gaagaatccaaatgcggacc

SEQ ID NO: 22215 - DNA, 20 bp, Artificial Sequence
  MKO10022215_A_Gnb1
  gRNA
tgccgatgcgactctttctc

SEQ ID NO: 22216 - DNA, 20 bp, Artificial Sequence
  MKO10022216_A_Gnb2l1
  gRNA
gtggccgacaaatcgccttg

SEQ ID NO: 22217 - DNA, 20 bp, Artificial Sequence
  MKO10022217_A_Gnb2l1
  gRNA
ggccacgctcaacacatcct

SEQ ID NO: 22218 - DNA, 20 bp, Artificial Sequence
  MKO10022218_A_Gnb2l1
  gRNA
agtttgccctctcgggctcc

SEQ ID NO: 22219 - DNA, 20 bp, Artificial Sequence
  MKO10022219_A_Gnb2
  gRNA
aaagttccctgagggggcgt

SEQ ID NO: 22220 - DNA, 20 bp, Artificial Sequence
  MKO10022220_A_Gnb2
  gRNA
ctcatctgaattcgccccac

SEQ ID NO: 22221 - DNA, 20 bp, Artificial Sequence
  MKO10022221_A_Gnb2
  gRNA
aaatgatgagctttccgtcc

SEQ ID NO: 22222 - DNA, 20 bp, Artificial Sequence
  MKO10022222_A_Gnb3
  gRNA
ctacaacctcaaatcccgcg

SEQ ID NO: 22223 - DNA, 20 bp, Artificial Sequence
  MKO10022223_A_Gnb3
  gRNA
gatcagcttcccatcctgcg

SEQ ID NO: 22224 - DNA, 20 bp, Artificial Sequence
  MKO10022224_A_Gnb3
  gRNA
gctgctcgtaagtgcctcgc

SEQ ID NO: 22225 - DNA, 20 bp, Artificial Sequence
  MKO10022225_A_Gnb4
  gRNA
gtagttcccggacggggcgt

SEQ ID NO: 22226 - DNA, 20 bp, Artificial Sequence
  MKO10022226_A_Gnb4
  gRNA
cgggtgagccgagaattgcc

SEQ ID NO: 22227 - DNA, 20 bp, Artificial Sequence
  MKO10022227_A_Gnb4
  gRNA
actctttacctgaaccagcg

SEQ ID NO: 22228 - DNA, 20 bp, Artificial Sequence
  MKO10022228_A_Gnb5
  gRNA
ggcgtgtgcttacgcgccat

SEQ ID NO: 22229 - DNA, 20 bp, Artificial Sequence
  MKO10022229_A_Gnb5
  gRNA
gctgcacgagaacgagacgc

SEQ ID NO: 22230 - DNA, 20 bp, Artificial Sequence
  MKO10022230_A_Gnb5
  gRNA
cggacgaagatggcaaccga

SEQ ID NO: 22231 - DNA, 20 bp, Artificial Sequence
  MKO10022231_A_Gne
  gRNA
tcccacctgattgacgacta

SEQ ID NO: 22232 - DNA, 20 bp, Artificial Sequence
  MKO10022232_A_Gne
  gRNA
ctgccaacaggatgcggtcg

SEQ ID NO: 22233 - DNA, 20 bp, Artificial Sequence
  MKO10022233_A_Gne
  gRNA
cctagcgctcgtgaagctac

SEQ ID NO: 22234 - DNA, 20 bp, Artificial Sequence
  MKO10022234_A_Gng10
  gRNA
cgccctgctgctcggtgttc

SEQ ID NO: 22235 - DNA, 20 bp, Artificial Sequence
  MKO10022235_A_Gng10
  gRNA
cgtgagcgccctgcagcgcc

SEQ ID NO: 22236 - DNA, 20 bp, Artificial Sequence
  MKO10022236_A_Gng10
  gRNA
cagggcgctcacgctggccc

SEQ ID NO: 22237 - DNA, 20 bp, Artificial Sequence
  MKO10022237_A_Gng11
  gRNA
gatgcctgcccttcacatcg

SEQ ID NO: 22238 - DNA, 20 bp, Artificial Sequence
  MKO10022238_A_Gng11
  gRNA
agatcctcgatgtgaagggc

SEQ ID NO: 22239 - DNA, 20 bp, Artificial Sequence
  MKO10022239_A_Gng11
  gRNA
aactacattgaagaacgttc

SEQ ID NO: 22240 - DNA, 20 bp, Artificial Sequence
  MKO10022240_A_Gng12
  gRNA
gttggtgcttgccgtcttgc

SEQ ID NO: 22241 - DNA, 20 bp, Artificial Sequence
  MKO10022241_A_Gng12
  gRNA
gacctcagaaaacccgttca

SEQ ID NO: 22242 - DNA, 20 bp, Artificial Sequence
  MKO10022242_A_Gng12
  gRNA
gctcctcacagtatgacatc

SEQ ID NO: 22243 - DNA, 20 bp, Artificial Sequence
  MKO10022243_A_Gng13
  gRNA
ggctcataggatggtgcact

SEQ ID NO: 22244 - DNA, 20 bp, Artificial Sequence
  MKO10022244_A_Gng13
  gRNA
cccccgacgccatggaggag

SEQ ID NO: 22245 - DNA, 20 bp, Artificial Sequence
  MKO10022245_A_Gng13
  gRNA
ccactcacaggcttctcaag

SEQ ID NO: 22246 - DNA, 20 bp, Artificial Sequence
  MKO10022246_A_Gng2
  gRNA
cttggcatgtgcctcacagt

SEQ ID NO: 22247 - DNA, 20 bp, Artificial Sequence
  MKO10022247_A_Gng2
  gRNA
tatgctggcggtgttgttgc

SEQ ID NO: 22248 - DNA, 20 bp, Artificial Sequence
  MKO10022248_A_Gng2
  gRNA
gaagaacttcttctcccgaa

SEQ ID NO: 22249 - DNA, 20 bp, Artificial Sequence
  MKO10022249_A_Gng3
  gRNA
cacctttatccggcacaagc

SEQ ID NO: 22250 - DNA, 20 bp, Artificial Sequence
  MKO10022250_A_Gng3
  gRNA
tgagggggtcctcacaagcg

SEQ ID NO: 22251 - DNA, 20 bp, Artificial Sequence
  MKO10022251_A_Gng3
  gRNA
ccacttccgagaaccccttc

SEQ ID NO: 22252 - DNA, 20 bp, Artificial Sequence
  MKO10022252_A_Gng4
  gRNA
tgagggggtcctcccgcacg

SEQ ID NO: 22253 - DNA, 20 bp, Artificial Sequence
  MKO10022253_A_Gng4
  gRNA
taccttcaccctgtccatgc

SEQ ID NO: 22254 - DNA, 20 bp, Artificial Sequence
  MKO10022254_A_Gng4
  gRNA
agcctgcatggacagggtga

SEQ ID NO: 22255 - DNA, 20 bp, Artificial Sequence
  MKO10022255_A_Gng5
  gRNA
caccttcacgcggttgagcc

SEQ ID NO: 22256 - DNA, 20 bp, Artificial Sequence
  MKO10022256_A_Gng5
  gRNA
tagcgtcgccgccatgaaga

SEQ ID NO: 22257 - DNA, 20 bp, Artificial Sequence
  MKO10022257_A_Gng5
  gRNA
acaaaaaggagcagactttc

SEQ ID NO: 22258 - DNA, 20 bp, Artificial Sequence
  MKO10022258_A_Gng7
  gRNA
aggtactaacaacgtcgccc

SEQ ID NO: 22259 - DNA, 20 bp, Artificial Sequence
  MKO10022259_A_Gng7
  gRNA
tgcccgcaacgatcccttgc

SEQ ID NO: 22260 - DNA, 20 bp, Artificial Sequence
  MKO10022260_A_Gng7
  gRNA
caaccagcaagggatcgttg

SEQ ID NO: 22261 - DNA, 20 bp, Artificial Sequence
  MKO10022261_A_Gng8
  gRNA
tttctgcgaaacgcacgcta

SEQ ID NO: 22262 - DNA, 20 bp, Artificial Sequence
  MKO10022262_A_Gng8
  gRNA
tgcaaaagagtcgcttgtcg

SEQ ID NO: 22263 - DNA, 20 bp, Artificial Sequence
  MKO10022263_A_Gng8
  gRNA
agtgaacatcgatcgcatga

SEQ ID NO: 22264 - DNA, 20 bp, Artificial Sequence
  MKO10022264_A_Gngt1
  gRNA
gtgtcacttccttcttaagc

SEQ ID NO: 22265 - DNA, 20 bp, Artificial Sequence
  MKO10022265_A_Gngt1
  gRNA
ggaggtagaccagcttaaga

SEQ ID NO: 22266 - DNA, 20 bp, Artificial Sequence
  MKO10022266_A_Gngt1
  gRNA
tggagaagaccctctagtga

SEQ ID NO: 22267 - DNA, 20 bp, Artificial Sequence
  MKO10022267_A_Gngt2
  gRNA
agtgaagaacccacgtgatc

SEQ ID NO: 22268 - DNA, 20 bp, Artificial Sequence
  MKO10022268_A_Gngt2
  gRNA
tgcaggctcaccagatcacg

SEQ ID NO: 22269 - DNA, 20 bp, Artificial Sequence
  MKO10022269_A_Gngt2
  gRNA
gggacagaccctcttctcaa

SEQ ID NO: 22270 - DNA, 20 bp, Artificial Sequence
  MKO10022270_A_Gnl1
  gRNA
ccggttggggtcgtagcctc

SEQ ID NO: 22271 - DNA, 20 bp, Artificial Sequence
  MKO10022271_A_Gnl1
  gRNA
atccgggaagtgtatcagcc

SEQ ID NO: 22272 - DNA, 20 bp, Artificial Sequence
  MKO10022272_A_Gnl1
  gRNA
ccgtgacccatcatatccgc

SEQ ID NO: 22273 - DNA, 20 bp, Artificial Sequence
  MKO10022273_A_Gnl2
  gRNA
ttcatttctagatcgagtac

SEQ ID NO: 22274 - DNA, 20 bp, Artificial Sequence
  MKO10022274_A_Gnl2
  gRNA
ttcggcgcctgaatatgtac

SEQ ID NO: 22275 - DNA, 20 bp, Artificial Sequence
  MKO10022275_A_Gnl2
  gRNA
ttctggcacagtggcccgag

SEQ ID NO: 22276 - DNA, 20 bp, Artificial Sequence
  MKO10022276_A_Gnl3l
  gRNA
ggatgtcctgaaacgtcagc

SEQ ID NO: 22277 - DNA, 20 bp, Artificial Sequence
  MKO10022277_A_Gnl3l
  gRNA
caatgaccatgccagtcgcg

SEQ ID NO: 22278 - DNA, 20 bp, Artificial Sequence
  MKO10022278_A_Gnl3l
  gRNA
caaattcctgctgacgtttc

SEQ ID NO: 22279 - DNA, 20 bp, Artificial Sequence
  MKO10022279_A_Gnl3
  gRNA
gagcactatttggaacacct

SEQ ID NO: 22280 - DNA, 20 bp, Artificial Sequence
  MKO10022280_A_Gnl3
  gRNA
gagaacatcatcgaaaatta

SEQ ID NO: 22281 - DNA, 20 bp, Artificial Sequence
  MKO10022281_A_Gnl3
  gRNA
acattagactgctcatcacc

SEQ ID NO: 22282 - DNA, 20 bp, Artificial Sequence
  MKO10022282_A_Gnmt
  gRNA
gggcttcagcgtgatgagcg

SEQ ID NO: 22283 - DNA, 20 bp, Artificial Sequence
  MKO10022283_A_Gnmt
  gRNA
tgaggatatagtcgtagttg

SEQ ID NO: 22284 - DNA, 20 bp, Artificial Sequence
  MKO10022284_A_Gnmt
  gRNA
gatgctgaaatatgcgctta

SEQ ID NO: 22285 - DNA, 20 bp, Artificial Sequence
  MKO10022285_A_Gnpat
  gRNA
gctacaccccgcccttgtat

SEQ ID NO: 22286 - DNA, 20 bp, Artificial Sequence
  MKO10022286_A_Gnpat
  gRNA
gggagtgatccccctataca

SEQ ID NO: 22287 - DNA, 20 bp, Artificial Sequence
  MKO10022287_A_Gnpat
  gRNA
caagctacaacgcgctgtcc

SEQ ID NO: 22288 - DNA, 20 bp, Artificial Sequence
  MKO10022288_A_Gnpda1
  gRNA
ctcacagggagcaccccgct

SEQ ID NO: 22289 - DNA, 20 bp, Artificial Sequence
  MKO10022289_A_Gnpda1
  gRNA
tgcgcaggcattggccccga

SEQ ID NO: 22290 - DNA, 20 bp, Artificial Sequence
  MKO10022290_A_Gnpda1
  gRNA
cagtgccgacccccactgtc

SEQ ID NO: 22291 - DNA, 20 bp, Artificial Sequence
  MKO10022291_A_Gnpda2
  gRNA
ctaatcgaataccacaagag

SEQ ID NO: 22292 - DNA, 20 bp, Artificial Sequence
  MKO10022292_A_Gnpda2
  gRNA
gatctgcagcgttcccatcg

SEQ ID NO: 22293 - DNA, 20 bp, Artificial Sequence
  MKO10022293_A_Gnpda2
  gRNA
tctcgttcttgatactaaac

SEQ ID NO: 22294 - DNA, 20 bp, Artificial Sequence
  MKO10022294_A_Gnpnat1
  gRNA
gtcgttagtgacgagtgcag

SEQ ID NO: 22295 - DNA, 20 bp, Artificial Sequence
  MKO10022295_A_Gnpnat1
  gRNA
tacttactcatgaactgttc

SEQ ID NO: 22296 - DNA, 20 bp, Artificial Sequence
  MKO10022296_A_Gnpnat1
  gRNA
tacataccttagcacatgaa

SEQ ID NO: 22297 - DNA, 20 bp, Artificial Sequence
  MKO10022297_A_Gnptab
  gRNA
caggtgtaaaccacgtcgat

SEQ ID NO: 22298 - DNA, 20 bp, Artificial Sequence
  MKO10022298_A_Gnptab
  gRNA
cgcaacattgaacatgtcgc

SEQ ID NO: 22299 - DNA, 20 bp, Artificial Sequence
  MKO10022299_A_Gnptab
  gRNA
tctgcccatgccaatcgacg

SEQ ID NO: 22300 - DNA, 20 bp, Artificial Sequence
  MKO10022300_A_Gnptg
  gRNA
tccgctcacccgaatgtgtt

SEQ ID NO: 22301 - DNA, 20 bp, Artificial Sequence
  MKO10022301_A_Gnptg
  gRNA
aacgcctacagcgggatcct

SEQ ID NO: 22302 - DNA, 20 bp, Artificial Sequence
  MKO10022302_A_Gnptg
  gRNA
agcggaaggtctgctcgtgc

SEQ ID NO: 22303 - DNA, 20 bp, Artificial Sequence
  MKO10022303_A_Gnrh1
  gRNA
ggacagtacattcgaagtgc

SEQ ID NO: 22304 - DNA, 20 bp, Artificial Sequence
  MKO10022304_A_Gnrh1
  gRNA
tcctatgggttgcgccctgg

SEQ ID NO: 22305 - DNA, 20 bp, Artificial Sequence
  MKO10022305_A_Gnrh1
  gRNA
acttcgaatgtactgtccac

SEQ ID NO: 22306 - DNA, 20 bp, Artificial Sequence
  MKO10022306_A_Gnrhr
  gRNA
ctcccgactctaaccgtatc

SEQ ID NO: 22307 - DNA, 20 bp, Artificial Sequence
  MKO10022307_A_Gnrhr
  gRNA
tgcttcgacccactcatata

SEQ ID NO: 22308 - DNA, 20 bp, Artificial Sequence
  MKO10022308_A_Gnrhr
  gRNA
tcccgcagttatatatcttc

SEQ ID NO: 22309 - DNA, 20 bp, Artificial Sequence
  MKO10022309_A_Gns
  gRNA
gatagccgcacaccgacttg

SEQ ID NO: 22310 - DNA, 20 bp, Artificial Sequence
  MKO10022310_A_Gns
  gRNA
gcacggcgagaactacagcg

SEQ ID NO: 22311 - DNA, 20 bp, Artificial Sequence
  MKO10022311_A_Gns
  gRNA
tgctccagtccgcctgcgtc

SEQ ID NO: 22312 - DNA, 20 bp, Artificial Sequence
  MKO10022312_A_Golga1
  gRNA
ctgttcttgaaatttccgca

SEQ ID NO: 22313 - DNA, 20 bp, Artificial Sequence
  MKO10022313_A_Golga1
  gRNA
cacccaagactatgctgaac

SEQ ID NO: 22314 - DNA, 20 bp, Artificial Sequence
  MKO10022314_A_Golga1
  gRNA
gactggctttggctttagcc

SEQ ID NO: 22315 - DNA, 20 bp, Artificial Sequence
  MKO10022315_A_Golga2
  gRNA
tttcttccgacatcccgggg

SEQ ID NO: 22316 - DNA, 20 bp, Artificial Sequence
  MKO10022316_A_Golga2
  gRNA
ttggcggtgcaggagcaata

SEQ ID NO: 22317 - DNA, 20 bp, Artificial Sequence
  MKO10022317_A_Golga2
  gRNA
cgcagccaatttgctctgcc

SEQ ID NO: 22318 - DNA, 20 bp, Artificial Sequence
  MKO10022318_A_Golga3
  gRNA
agtaccgagttaagcgccat

SEQ ID NO: 22319 - DNA, 20 bp, Artificial Sequence
  MKO10022319_A_Golga3
  gRNA
ctcgaggaacactggtacgc

SEQ ID NO: 22320 - DNA, 20 bp, Artificial Sequence
  MKO10022320_A_Golga3
  gRNA
ttcaattaaagacgtactac

SEQ ID NO: 22321 - DNA, 20 bp, Artificial Sequence
  MKO10022321_A_Golga4
  gRNA
gcgaggctgaagacgcacca

SEQ ID NO: 22322 - DNA, 20 bp, Artificial Sequence
  MKO10022322_A_Golga4
  gRNA
tctgtttcgaagtcccataa

SEQ ID NO: 22323 - DNA, 20 bp, Artificial Sequence
  MKO10022323_A_Golga4
  gRNA
gctgcactaacctctctgtt

SEQ ID NO: 22324 - DNA, 20 bp, Artificial Sequence
  MKO10022324_A_Golga5
  gRNA
ggagctgtccaatctccgac

SEQ ID NO: 22325 - DNA, 20 bp, Artificial Sequence
  MKO10022325_A_Golga5
  gRNA
tgtcctcaaagtgcgactgc

SEQ ID NO: 22326 - DNA, 20 bp, Artificial Sequence
  MKO10022326_A_Golga5
  gRNA
gacctgctgctaccgtcact

SEQ ID NO: 22327 - DNA, 20 bp, Artificial Sequence
  MKO10022327_A_Golga7b
  gRNA
gctcaggcgaagcgcttcgc

SEQ ID NO: 22328 - DNA, 20 bp, Artificial Sequence
  MKO10022328_A_Golga7b
  gRNA
gatcgggggcagctcctatc

SEQ ID NO: 22329 - DNA, 20 bp, Artificial Sequence
  MKO10022329_A_Golga7b
  gRNA
gctcctgctcacggatccgg

SEQ ID NO: 22330 - DNA, 20 bp, Artificial Sequence
  MKO10022330_A_Golga7
  gRNA
tcgctgaatgaacaccttcc

SEQ ID NO: 22331 - DNA, 20 bp, Artificial Sequence
  MKO10022331_A_Golga7
  gRNA
taccctgttctccagctccg

SEQ ID NO: 22332 - DNA, 20 bp, Artificial Sequence
  MKO10022332_A_Golga7
  gRNA
tatgcagaagcagagaaact

SEQ ID NO: 22333 - DNA, 20 bp, Artificial Sequence
  MKO10022333_A_Golgb1
  gRNA
gtgcagagcatcctcttgcg

SEQ ID NO: 22334 - DNA, 20 bp, Artificial Sequence
  MKO10022334_A_Golgb1
  gRNA
ccaatcagaacaagcctcgc

SEQ ID NO: 22335 - DNA, 20 bp, Artificial Sequence
  MKO10022335_A_Golgb1
  gRNA
taaatattaggactcatccc

SEQ ID NO: 22336 - DNA, 20 bp, Artificial Sequence
  MKO10022336_A_Golim4
  gRNA
caatgcactatatctgctat

SEQ ID NO: 22337 - DNA, 20 bp, Artificial Sequence
  MKO10022337_A_Golim4
  gRNA
catcttgcagagtcagcatg

SEQ ID NO: 22338 - DNA, 20 bp, Artificial Sequence
  MKO10022338_A_Golim4
  gRNA
gtgcttctaacttataaaca

SEQ ID NO: 22339 - DNA, 20 bp, Artificial Sequence
  MKO10022339_A_Golm1
  gRNA
tcgaatgagcttctcgcctg

SEQ ID NO: 22340 - DNA, 20 bp, Artificial Sequence
  MKO10022340_A_Golm1
  gRNA
gtgtatcagccagatgaccg

SEQ ID NO: 22341 - DNA, 20 bp, Artificial Sequence
  MKO10022341_A_Golm1
  gRNA
aagctcattcgagacctgca

SEQ ID NO: 22342 - DNA, 20 bp, Artificial Sequence
  MKO10022342_A_Golph3l
  gRNA
cagatagattcgaccccgca

SEQ ID NO: 22343 - DNA, 20 bp, Artificial Sequence
  MKO10022343_A_Golph3l
  gRNA
tgcagttcgcgctctcgttt

SEQ ID NO: 22344 - DNA, 20 bp, Artificial Sequence
  MKO10022344_A_Golph3l
  gRNA
agtcgcttcttacgcatggt

SEQ ID NO: 22345 - DNA, 20 bp, Artificial Sequence
  MKO10022345_A_Golph3
  gRNA
gatgtgtcgtcatgtcaaac

SEQ ID NO: 22346 - DNA, 20 bp, Artificial Sequence
  MKO10022346_A_Golph3
  gRNA
cgagctccgctgggtcagcg

SEQ ID NO: 22347 - DNA, 20 bp, Artificial Sequence
  MKO10022347_A_Golph3
  gRNA
gcagagccgccgcgacgagc

SEQ ID NO: 22348 - DNA, 20 bp, Artificial Sequence
  MKO10022348_A_Golt1a
  gRNA
ttcccttgagcttgtgccgt

SEQ ID NO: 22349 - DNA, 20 bp, Artificial Sequence
  MKO10022349_A_Golt1a
  gRNA
gcacaatggcgacacccccc

SEQ ID NO: 22350 - DNA, 20 bp, Artificial Sequence
  MKO10022350_A_Golt1a
  gRNA
ggcacttcagaccattgagc

SEQ ID NO: 22351 - DNA, 20 bp, Artificial Sequence
  MKO10022351_A_Golt1b
  gRNA
ggaccacgaacacaccgccc

SEQ ID NO: 22352 - DNA, 20 bp, Artificial Sequence
  MKO10022352_A_Golt1b
  gRNA
tttaggagggatccgaggac

SEQ ID NO: 22353 - DNA, 20 bp, Artificial Sequence
  MKO10022353_A_Golt1b
  gRNA
ctgataaagccaacgaccac

SEQ ID NO: 22354 - DNA, 20 bp, Artificial Sequence
  MKO10022354_A_Gon4l
  gRNA
tgacatgctggaccgcacct

SEQ ID NO: 22355 - DNA, 20 bp, Artificial Sequence
  MKO10022355_A_Gon4l
  gRNA
gatggtgtatgacccgaaac

SEQ ID NO: 22356 - DNA, 20 bp, Artificial Sequence
  MKO10022356_A_Gon4l
  gRNA
gatgacccgctctaaactga

SEQ ID NO: 22357 - DNA, 20 bp, Artificial Sequence
  MKO10022357_A_Gopc
  gRNA
gacctgctcacgataagctc

SEQ ID NO: 22358 - DNA, 20 bp, Artificial Sequence
  MKO10022358_A_Gopc
  gRNA
ttctaattggaccgactccc

SEQ ID NO: 22359 - DNA, 20 bp, Artificial Sequence
  MKO10022359_A_Gopc
  gRNA
ggtgcaacagatacaattac

SEQ ID NO: 22360 - DNA, 20 bp, Artificial Sequence
  MKO10022360_A_Gorab
  gRNA
accgtgcgtaggaatactcc

SEQ ID NO: 22361 - DNA, 20 bp, Artificial Sequence
  MKO10022361_A_Gorab
  gRNA
cctttcggagctcgttctgc

SEQ ID NO: 22362 - DNA, 20 bp, Artificial Sequence
  MKO10022362_A_Gorab
  gRNA
taaacgtaagaaagcccttt

SEQ ID NO: 22363 - DNA, 20 bp, Artificial Sequence
  MKO10022363_A_Gorasp1
  gRNA
caccagcctcgagtgcccga

SEQ ID NO: 22364 - DNA, 20 bp, Artificial Sequence
  MKO10022364_A_Gorasp1
  gRNA
cacatgccacacgtgttcgc

SEQ ID NO: 22365 - DNA, 20 bp, Artificial Sequence
  MKO10022365_A_Gorasp1
  gRNA
ctggccgccccacatgttgc

SEQ ID NO: 22366 - DNA, 20 bp, Artificial Sequence
  MKO10022366_A_Gorasp2
  gRNA
cggtcacaccgagcaacttg

SEQ ID NO: 22367 - DNA, 20 bp, Artificial Sequence
  MKO10022367_A_Gorasp2
  gRNA
caagttgctcggtgtgaccg

SEQ ID NO: 22368 - DNA, 20 bp, Artificial Sequence
  MKO10022368_A_Gorasp2
  gRNA
agctgataccgtcatgaatg

SEQ ID NO: 22369 - DNA, 20 bp, Artificial Sequence
  MKO10022369_A_Gosr1
  gRNA
cacgggatggaggacgcgat

SEQ ID NO: 22370 - DNA, 20 bp, Artificial Sequence
  MKO10022370_A_Gosr1
  gRNA
gctcgtacagagtttactga

SEQ ID NO: 22371 - DNA, 20 bp, Artificial Sequence
  MKO10022371_A_Gosr1
  gRNA
tattgccgtaaagtttgctt

SEQ ID NO: 22372 - DNA, 20 bp, Artificial Sequence
  MKO10022372_A_Gosr2
  gRNA
ttcagcaccggcgccaagtc

SEQ ID NO: 22373 - DNA, 20 bp, Artificial Sequence
  MKO10022373_A_Gosr2
  gRNA
ccatgccgtggtgaatgttg

SEQ ID NO: 22374 - DNA, 20 bp, Artificial Sequence
  MKO10022374_A_Gosr2
  gRNA
tactgtgcccgcctccaatg

SEQ ID NO: 22375 - DNA, 20 bp, Artificial Sequence
  MKO10022375_A_Got1l1
  gRNA
ttcctgcagcatatcccggt

SEQ ID NO: 22376 - DNA, 20 bp, Artificial Sequence
  MKO10022376_A_Got1l1
  gRNA
cattctttcgccacgtcttg

SEQ ID NO: 22377 - DNA, 20 bp, Artificial Sequence
  MKO10022377_A_Got1l1
  gRNA
ggactatgagtacttgcccc

SEQ ID NO: 22378 - DNA, 20 bp, Artificial Sequence
  MKO10022378_A_Got1
  gRNA
acattcggccctattgctac

SEQ ID NO: 22379 - DNA, 20 bp, Artificial Sequence
  MKO10022379_A_Got1
  gRNA
ccgaatgtccttaaaaccgg

SEQ ID NO: 22380 - DNA, 20 bp, Artificial Sequence
  MKO10022380_A_Got1
  gRNA
ccctgttgggttgtgcgcac

SEQ ID NO: 22381 - DNA, 20 bp, Artificial Sequence
  MKO10022381_A_Got2
  gRNA
caagctcaccttccggacac

SEQ ID NO: 22382 - DNA, 20 bp, Artificial Sequence
  MKO10022382_A_Got2
  gRNA
gtgatttccccaggatggtt

SEQ ID NO: 22383 - DNA, 20 bp, Artificial Sequence
  MKO10022383_A_Got2
  gRNA
ctggtggacccatgttgaaa

SEQ ID NO: 22384 - DNA, 20 bp, Artificial Sequence
  MKO10022384_A_Gp1ba
  gRNA
caagttggcacatcgtacac

SEQ ID NO: 22385 - DNA, 20 bp, Artificial Sequence
  MKO10022385_A_Gp1ba
  gRNA
tacccagttggttctcgccc

SEQ ID NO: 22386 - DNA, 20 bp, Artificial Sequence
  MKO10022386_A_Gp1ba
  gRNA
tcgttggcaacaagagcccg

SEQ ID NO: 22387 - DNA, 20 bp, Artificial Sequence
  MKO10022387_A_Gp1bb
  gRNA
aacgcgtccagaagcccggg

SEQ ID NO: 22388 - DNA, 20 bp, Artificial Sequence
  MKO10022388_A_Gp1bb
  gRNA
gcgcgacacagcgcaggtcg

SEQ ID NO: 22389 - DNA, 20 bp, Artificial Sequence
  MKO10022389_A_Gp1bb
  gRNA
ccagaactcacgggagccca

SEQ ID NO: 22390 - DNA, 20 bp, Artificial Sequence
  MKO10022390_A_Gp2
  gRNA
gtccatgaccagccctgttg

SEQ ID NO: 22391 - DNA, 20 bp, Artificial Sequence
  MKO10022391_A_Gp2
  gRNA
acaacgattcatcagttgca

SEQ ID NO: 22392 - DNA, 20 bp, Artificial Sequence
  MKO10022392_A_Gp2
  gRNA
gtgatgataacctgcacggc

SEQ ID NO: 22393 - DNA, 20 bp, Artificial Sequence
  MKO10022393_A_Gp49a
  gRNA
ggaggcccagtattattatc

SEQ ID NO: 22394 - DNA, 20 bp, Artificial Sequence
  MKO10022394_A_Gp49a
  gRNA
tttatgacagcctcatatgc

SEQ ID NO: 22395 - DNA, 20 bp, Artificial Sequence
  MKO10022395_A_Gp49a
  gRNA
tgcagctcatccacactatt

SEQ ID NO: 22396 - DNA, 20 bp, Artificial Sequence
  MKO10022396_A_Gp5
  gRNA
acacctggcgcaggtgcccg

SEQ ID NO: 22397 - DNA, 20 bp, Artificial Sequence
  MKO10022397_A_Gp5
  gRNA
aggtgtcgctgcgccacaac

SEQ ID NO: 22398 - DNA, 20 bp, Artificial Sequence
  MKO10022398_A_Gp5
  gRNA
tcgtcttccacgtgcgatcc

SEQ ID NO: 22399 - DNA, 20 bp, Artificial Sequence
  MKO10022399_A_Gp6
  gRNA
gagtgaccctctagtgcttg

SEQ ID NO: 22400 - DNA, 20 bp, Artificial Sequence
  MKO10022400_A_Gp6
  gRNA
aggcgatataaatccacatc

SEQ ID NO: 22401 - DNA, 20 bp, Artificial Sequence
  MKO10022401_A_Gp6
  gRNA
cagcttgagctaattgctac

SEQ ID NO: 22402 - DNA, 20 bp, Artificial Sequence
  MKO10022402_A_Gp9
  gRNA
cactgaacgcaggctattgt

SEQ ID NO: 22403 - DNA, 20 bp, Artificial Sequence
  MKO10022403_A_Gp9
  gRNA
gggcgcctggtggccaagtc

SEQ ID NO: 22404 - DNA, 20 bp, Artificial Sequence
  MKO10022404_A_Gp9
  gRNA
gcctcacctacctgcgcctc

SEQ ID NO: 22405 - DNA, 20 bp, Artificial Sequence
  MKO10022405_A_Gpa33
  gRNA
gtagtaacccgctgtctccg

SEQ ID NO: 22406 - DNA, 20 bp, Artificial Sequence
  MKO10022406_A_Gpa33
  gRNA
cagtgacacggagcactcgt

SEQ ID NO: 22407 - DNA, 20 bp, Artificial Sequence
  MKO10022407_A_Gpa33
  gRNA
caagtctcgagtccgcctct

SEQ ID NO: 22408 - DNA, 20 bp, Artificial Sequence
  MKO10022408_A_Gpaa1
  gRNA
ccctcaatacatagcgctcg

SEQ ID NO: 22409 - DNA, 20 bp, Artificial Sequence
  MKO10022409_A_Gpaa1
  gRNA
gatcgcctggtttctggcgc

SEQ ID NO: 22410 - DNA, 20 bp, Artificial Sequence
  MKO10022410_A_Gpaa1
  gRNA
tctcagacatgtaagtgcgc

SEQ ID NO: 22411 - DNA, 20 bp, Artificial Sequence
  MKO10022411_A_Gpalpp1
  gRNA
gtcgtgacgctatagttaac

SEQ ID NO: 22412 - DNA, 20 bp, Artificial Sequence
  MKO10022412_A_Gpalpp1
  gRNA
gaactgcagcttctgtaatt

SEQ ID NO: 22413 - DNA, 20 bp, Artificial Sequence
  MKO10022413_A_Gpalpp1
  gRNA
gttggaccaatgcctgcaaa

SEQ ID NO: 22414 - DNA, 20 bp, Artificial Sequence
  MKO10022414_A_Gpam
  gRNA
cgtctcgctcttgaacaaaa

SEQ ID NO: 22415 - DNA, 20 bp, Artificial Sequence
  MKO10022415_A_Gpam
  gRNA
tcaagagcgagacgtccata

SEQ ID NO: 22416 - DNA, 20 bp, Artificial Sequence
  MKO10022416_A_Gpam
  gRNA
atagcagcaccttcccacga

SEQ ID NO: 22417 - DNA, 20 bp, Artificial Sequence
  MKO10022417_A_Gpank1
  gRNA
cgctggggtaaattcgatga

SEQ ID NO: 22418 - DNA, 20 bp, Artificial Sequence
  MKO10022418_A_Gpank1
  gRNA
tccatatcagtcagaactcg

SEQ ID NO: 22419 - DNA, 20 bp, Artificial Sequence
  MKO10022419_A_Gpank1
  gRNA
ctgggttggagtctgtgacc

SEQ ID NO: 22420 - DNA, 20 bp, Artificial Sequence
  MKO10022420_A_Gpat2
  gRNA
ctggcagcagcggcccataa

SEQ ID NO: 22421 - DNA, 20 bp, Artificial Sequence
  MKO10022421_A_Gpat2
  gRNA
gggaaagtatcgccccttta

SEQ ID NO: 22422 - DNA, 20 bp, Artificial Sequence
  MKO10022422_A_Gpat2
  gRNA
ctgcaacgtgatccttgtga

SEQ ID NO: 22423 - DNA, 20 bp, Artificial Sequence
  MKO10022423_A_Gpatch11
  gRNA
ggcagatccgagaagcccgt

SEQ ID NO: 22424 - DNA, 20 bp, Artificial Sequence
  MKO10022424_A_Gpatch11
  gRNA
accgctttaccgaaactcct

SEQ ID NO: 22425 - DNA, 20 bp, Artificial Sequence
  MKO10022425_A_Gpatch11
  gRNA
gatgcgactgaagagtaagc

SEQ ID NO: 22426 - DNA, 20 bp, Artificial Sequence
  MKO10022426_A_Gpatch1
  gRNA
aaggcgcgccgacagaaacc

SEQ ID NO: 22427 - DNA, 20 bp, Artificial Sequence
  MKO10022427_A_Gpatch1
  gRNA
tcatcaagcagcgtggcgcc

SEQ ID NO: 22428 - DNA, 20 bp, Artificial Sequence
  MKO10022428_A_Gpatch1
  gRNA
cgcgcctttctcttcacccg

SEQ ID NO: 22429 - DNA, 20 bp, Artificial Sequence
  MKO10022429_A_Gpatch2l
  gRNA
gccataccatcagtgacccc

SEQ ID NO: 22430 - DNA, 20 bp, Artificial Sequence
  MKO10022430_A_Gpatch2l
  gRNA
accaatgatgaaggacgaca

SEQ ID NO: 22431 - DNA, 20 bp, Artificial Sequence
  MKO10022431_A_Gpatch2l
  gRNA
ggccgatcctctccgtcccc

SEQ ID NO: 22432 - DNA, 20 bp, Artificial Sequence
  MKO10022432_A_Gpatch2
  gRNA
aacctaagcagcagcgttcg

SEQ ID NO: 22433 - DNA, 20 bp, Artificial Sequence
  MKO10022433_A_Gpatch2
  gRNA
taggcatttcagtcgaacaa

SEQ ID NO: 22434 - DNA, 20 bp, Artificial Sequence
  MKO10022434_A_Gpatch2
  gRNA
gctagactcagtcgccttca

SEQ ID NO: 22435 - DNA, 20 bp, Artificial Sequence
  MKO10022435_A_Gpatch3
  gRNA
gcgacacgaagctctgcacg

SEQ ID NO: 22436 - DNA, 20 bp, Artificial Sequence
  MKO10022436_A_Gpatch3
  gRNA
cacgttgccatagcgccggg

SEQ ID NO: 22437 - DNA, 20 bp, Artificial Sequence
  MKO10022437_A_Gpatch3
  gRNA
gtctccgttccaggcgcatt

SEQ ID NO: 22438 - DNA, 20 bp, Artificial Sequence
  MKO10022438_A_Gpatch4
  gRNA
ctcctcacccgaggttagtg

SEQ ID NO: 22439 - DNA, 20 bp, Artificial Sequence
  MKO10022439_A_Gpatch4
  gRNA
tttggggtgactgcgctggg

SEQ ID NO: 22440 - DNA, 20 bp, Artificial Sequence
  MKO10022440_A_Gpatch4
  gRNA
caacaagactgccgccagct

SEQ ID NO: 22441 - DNA, 20 bp, Artificial Sequence
  MKO10022441_A_Gpatch8
  gRNA
acatcatacttgacaacgat

SEQ ID NO: 22442 - DNA, 20 bp, Artificial Sequence
  MKO10022442_A_Gpatch8
  gRNA
tgtcaagctggattatgccg

SEQ ID NO: 22443 - DNA, 20 bp, Artificial Sequence
  MKO10022443_A_Gpatch8
  gRNA
ggtcatcttaccgattctat

SEQ ID NO: 22444 - DNA, 20 bp, Artificial Sequence
  MKO10022444_A_Gpbar1
  gRNA
tagtggtgggcgacgctcat

SEQ ID NO: 22445 - DNA, 20 bp, Artificial Sequence
  MKO10022445_A_Gpbar1
  gRNA
gctgtgtgagatccgccgac

SEQ ID NO: 22446 - DNA, 20 bp, Artificial Sequence
  MKO10022446_A_Gpbar1
  gRNA
ggctgcgcaagtggcggtcc

SEQ ID NO: 22447 - DNA, 20 bp, Artificial Sequence
  MKO10022447_A_Gpbp1l1
  gRNA
tcacctcccgtagtccgtag

SEQ ID NO: 22448 - DNA, 20 bp, Artificial Sequence
  MKO10022448_A_Gpbp1l1
  gRNA
gcaactcataccttagaggg

SEQ ID NO: 22449 - DNA, 20 bp, Artificial Sequence
  MKO10022449_A_Gpbp1l1
  gRNA
gcctgcaccacctccctcta

SEQ ID NO: 22450 - DNA, 20 bp, Artificial Sequence
  MKO10022450_A_Gpbp1
  gRNA
tctggtattggacgtcctaa

SEQ ID NO: 22451 - DNA, 20 bp, Artificial Sequence
  MKO10022451_A_Gpbp1
  gRNA
cgacgacacaattcttcaga

SEQ ID NO: 22452 - DNA, 20 bp, Artificial Sequence
  MKO10022452_A_Gpbp1
  gRNA
aaaaatggatggcgtacgca

SEQ ID NO: 22453 - DNA, 20 bp, Artificial Sequence
  MKO10022453_A_Gpc1
  gRNA
atgacactctccgcacccga

SEQ ID NO: 22454 - DNA, 20 bp, Artificial Sequence
  MKO10022454_A_Gpc1
  gRNA
cacgagtgttctgcgtatac

SEQ ID NO: 22455 - DNA, 20 bp, Artificial Sequence
  MKO10022455_A_Gpc1
  gRNA
gcccgcaggcgcagttctcg

SEQ ID NO: 22456 - DNA, 20 bp, Artificial Sequence
  MKO10022456_A_Gpc2
  gRNA
cggcggggtgagtctccgaa

SEQ ID NO: 22457 - DNA, 20 bp, Artificial Sequence
  MKO10022457_A_Gpc2
  gRNA
gcctgaatggggcggatatc

SEQ ID NO: 22458 - DNA, 20 bp, Artificial Sequence
  MKO10022458_A_Gpc2
  gRNA
acttctcatagtagtcccgc

SEQ ID NO: 22459 - DNA, 20 bp, Artificial Sequence
  MKO10022459_A_Gpc3
  gRNA
gccgtatgctcacccgaatg

SEQ ID NO: 22460 - DNA, 20 bp, Artificial Sequence
  MKO10022460_A_Gpc3
  gRNA
cagatctatattggcgttgc

SEQ ID NO: 22461 - DNA, 20 bp, Artificial Sequence
  MKO10022461_A_Gpc3
  gRNA
gacatcaacgagtgcctccg

SEQ ID NO: 22462 - DNA, 20 bp, Artificial Sequence
  MKO10022462_A_Gpc4
  gRNA
ggcgaaacatgcgctccaga

SEQ ID NO: 22463 - DNA, 20 bp, Artificial Sequence
  MKO10022463_A_Gpc4
  gRNA
tctggagcgcatgtttcgcc

SEQ ID NO: 22464 - DNA, 20 bp, Artificial Sequence
  MKO10022464_A_Gpc4
  gRNA
tattgctcaaacatcatgcg

SEQ ID NO: 22465 - DNA, 20 bp, Artificial Sequence
  MKO10022465_A_Gpc5
  gRNA
aatcttgccgagctgcaatc

SEQ ID NO: 22466 - DNA, 20 bp, Artificial Sequence
  MKO10022466_A_Gpc5
  gRNA
gagcacgtgttcaacgtcgt

SEQ ID NO: 22467 - DNA, 20 bp, Artificial Sequence
  MKO10022467_A_Gpc5
  gRNA
attcttgcaggcgcttaatc

SEQ ID NO: 22468 - DNA, 20 bp, Artificial Sequence
  MKO10022468_A_Gpc6
  gRNA
ccgtcaggcttacggtgcca

SEQ ID NO: 22469 - DNA, 20 bp, Artificial Sequence
  MKO10022469_A_Gpc6
  gRNA
ccgagccttcacgtccgccg

SEQ ID NO: 22470 - DNA, 20 bp, Artificial Sequence
  MKO10022470_A_Gpc6
  gRNA
aaaggtgcgagccgcgatga

SEQ ID NO: 22471 - DNA, 20 bp, Artificial Sequence
  MKO10022471_A_Gpcpd1
  gRNA
gtgaagtaccgctacttcag

SEQ ID NO: 22472 - DNA, 20 bp, Artificial Sequence
  MKO10022472_A_Gpcpd1
  gRNA
cctaaaggggttattgatcg

SEQ ID NO: 22473 - DNA, 20 bp, Artificial Sequence
  MKO10022473_A_Gpcpd1
  gRNA
ccacgatcaataaccccttt

SEQ ID NO: 22474 - DNA, 20 bp, Artificial Sequence
  MKO10022474_A_Gpd1l
  gRNA
cgtcctgcacggcttcgctg

SEQ ID NO: 22475 - DNA, 20 bp, Artificial Sequence
  MKO10022475_A_Gpd1l
  gRNA
tgatctcatcgcagatcttg

SEQ ID NO: 22476 - DNA, 20 bp, Artificial Sequence
  MKO10022476_A_Gpd1l
  gRNA
ggagattagcttcagcccgt

SEQ ID NO: 22477 - DNA, 20 bp, Artificial Sequence
  MKO10022477_A_Gpd1
  gRNA
ggcccccatcagcacgctca

SEQ ID NO: 22478 - DNA, 20 bp, Artificial Sequence
  MKO10022478_A_Gpd1
  gRNA
tgcattgctacccacgatct

SEQ ID NO: 22479 - DNA, 20 bp, Artificial Sequence
  MKO10022479_A_Gpd1
  gRNA
gtggtaccccatcagttcat

SEQ ID NO: 22480 - DNA, 20 bp, Artificial Sequence
  MKO10022480_A_Gpd2
  gRNA
cgtaccgtcatagtagacaa

SEQ ID NO: 22481 - DNA, 20 bp, Artificial Sequence
  MKO10022481_A_Gpd2
  gRNA
aggagcgatttctagtaagt

SEQ ID NO: 22482 - DNA, 20 bp, Artificial Sequence
  MKO10022482_A_Gpd2
  gRNA
tggtgtgcgatacctccaga

SEQ ID NO: 22483 - DNA, 20 bp, Artificial Sequence
  MKO10022483_A_Gper1
  gRNA
cgtcacgcctaccccttgac

SEQ ID NO: 22484 - DNA, 20 bp, Artificial Sequence
  MKO10022484_A_Gper1
  gRNA
tgacggccttgagcgtggca

SEQ ID NO: 22485 - DNA, 20 bp, Artificial Sequence
  MKO10022485_A_Gper1
  gRNA
tgtcgtagtactgctcgtcc

SEQ ID NO: 22486 - DNA, 20 bp, Artificial Sequence
  MKO10022486_A_Gpha2
  gRNA
tgatcgcctcggcacttgcc

SEQ ID NO: 22487 - DNA, 20 bp, Artificial Sequence
  MKO10022487_A_Gpha2
  gRNA
agatctcaagctccccacgc

SEQ ID NO: 22488 - DNA, 20 bp, Artificial Sequence
  MKO10022488_A_Gpha2
  gRNA
actgcgcaccgtcacattga

SEQ ID NO: 22489 - DNA, 20 bp, Artificial Sequence
  MKO10022489_A_Gphb5
  gRNA
gtatgtacacactcgatgat

SEQ ID NO: 22490 - DNA, 20 bp, Artificial Sequence
  MKO10022490_A_Gphb5
  gRNA
aacacgccccacagtcacat

SEQ ID NO: 22491 - DNA, 20 bp, Artificial Sequence
  MKO10022491_A_Gphb5
  gRNA
aagttggtataccttgtcct

SEQ ID NO: 22492 - DNA, 20 bp, Artificial Sequence
  MKO10022492_A_Gphn
  gRNA
cacgaccatcaaatccgtgt

SEQ ID NO: 22493 - DNA, 20 bp, Artificial Sequence
  MKO10022493_A_Gphn
  gRNA
caggttgggtgggactatat

SEQ ID NO: 22494 - DNA, 20 bp, Artificial Sequence
  MKO10022494_A_Gphn
  gRNA
gctgggaaacatggcgaccg

SEQ ID NO: 22495 - DNA, 20 bp, Artificial Sequence
  MKO10022495_A_Gpi1
  gRNA
ctgtgacagcgggtccggag

SEQ ID NO: 22496 - DNA, 20 bp, Artificial Sequence
  MKO10022496_A_Gpi1
  gRNA
accctttccagtcaccactc

SEQ ID NO: 22497 - DNA, 20 bp, Artificial Sequence
  MKO10022497_A_Gpi1
  gRNA
tacctcggtgtagttgatct

SEQ ID NO: 22498 - DNA, 20 bp, Artificial Sequence
  MKO10022498_A_Gpihbp1
  gRNA
gatgctcaccggttccgctg

SEQ ID NO: 22499 - DNA, 20 bp, Artificial Sequence
  MKO10022499_A_Gpihbp1
  gRNA
tggcaagtttagccaccccc

SEQ ID NO: 22500 - DNA, 20 bp, Artificial Sequence
  MKO10022500_A_Gpihbp1
  gRNA
aagttagccccatcgctctg

SEQ ID NO: 22501 - DNA, 20 bp, Artificial Sequence
  MKO10022501_A_Gpkow
  gRNA
ctaccggggcctctatggca

SEQ ID NO: 22502 - DNA, 20 bp, Artificial Sequence
  MKO10022502_A_Gpkow
  gRNA
agccccgagtcaactctata

SEQ ID NO: 22503 - DNA, 20 bp, Artificial Sequence
  MKO10022503_A_Gpkow
  gRNA
gccggaggaagccgactatg

SEQ ID NO: 22504 - DNA, 20 bp, Artificial Sequence
  MKO10022504_A_Gpld1
  gRNA
agctcacgtcagcgaccatg

SEQ ID NO: 22505 - DNA, 20 bp, Artificial Sequence
  MKO10022505_A_Gpld1
  gRNA
tgacgtgagctggcatagcc

SEQ ID NO: 22506 - DNA, 20 bp, Artificial Sequence
  MKO10022506_A_Gpld1
  gRNA
tcccagcctgatatgcgtcc

SEQ ID NO: 22507 - DNA, 20 bp, Artificial Sequence
  MKO10022507_A_Gpm6a
  gRNA
ctgccggaacaccactctag

SEQ ID NO: 22508 - DNA, 20 bp, Artificial Sequence
  MKO10022508_A_Gpm6a
  gRNA
tgcttggatctgcgtcagtt

SEQ ID NO: 22509 - DNA, 20 bp, Artificial Sequence
  MKO10022509_A_Gpm6a
  gRNA
aagcatagggaatacctccc

SEQ ID NO: 22510 - DNA, 20 bp, Artificial Sequence
  MKO10022510_A_Gpm6b
  gRNA
gaacatctgcaacacgaatg

SEQ ID NO: 22511 - DNA, 20 bp, Artificial Sequence
  MKO10022511_A_Gpm6b
  gRNA
acagatctgctccacacccg

SEQ ID NO: 22512 - DNA, 20 bp, Artificial Sequence
  MKO10022512_A_Gpm6b
  gRNA
ctgatgcagtatgttatcta

SEQ ID NO: 22513 - DNA, 20 bp, Artificial Sequence
  MKO10022513_A_Gpn1
  gRNA
tccaggttgattacatacgg

SEQ ID NO: 22514 - DNA, 20 bp, Artificial Sequence
  MKO10022514_A_Gpn1
  gRNA
gaggtcactatacctccgtt

SEQ ID NO: 22515 - DNA, 20 bp, Artificial Sequence
  MKO10022515_A_Gpn1
  gRNA
caggcactcaccaatattgg

SEQ ID NO: 22516 - DNA, 20 bp, Artificial Sequence
  MKO10022516_A_Gpn2
  gRNA
agccatgatgtccgctgcaa

SEQ ID NO: 22517 - DNA, 20 bp, Artificial Sequence
  MKO10022517_A_Gpn2
  gRNA
ccacagcctgtaagactcgc

SEQ ID NO: 22518 - DNA, 20 bp, Artificial Sequence
  MKO10022518_A_Gpn2
  gRNA
cgtgtagtagtccaggttga

SEQ ID NO: 22519 - DNA, 20 bp, Artificial Sequence
  MKO10022519_A_Gpn3
  gRNA
aatcgtcctcgacgtggccc

SEQ ID NO: 22520 - DNA, 20 bp, Artificial Sequence
  MKO10022520_A_Gpn3
  gRNA
tagttgaagtgttctgccgc

SEQ ID NO: 22521 - DNA, 20 bp, Artificial Sequence
  MKO10022521_A_Gpn3
  gRNA
agccctcaaccgatctgtcc

SEQ ID NO: 22522 - DNA, 20 bp, Artificial Sequence
  MKO10022522_A_Gpnmb
  gRNA
ccgaagaccagccacgtaat

SEQ ID NO: 22523 - DNA, 20 bp, Artificial Sequence
  MKO10022523_A_Gpnmb
  gRNA
ggcatacattcccatctcga

SEQ ID NO: 22524 - DNA, 20 bp, Artificial Sequence
  MKO10022524_A_Gpnmb
  gRNA
agagagcacaaccaattacg

SEQ ID NO: 22525 - DNA, 20 bp, Artificial Sequence
  MKO10022525_A_Gpr101
  gRNA
gctggtgctgtttcgacgac

SEQ ID NO: 22526 - DNA, 20 bp, Artificial Sequence
  MKO10022526_A_Gpr101
  gRNA
taccacactgacaaccgtat

SEQ ID NO: 22527 - DNA, 20 bp, Artificial Sequence
  MKO10022527_A_Gpr101
  gRNA
tgtgggtggatatcgatacc

SEQ ID NO: 22528 - DNA, 20 bp, Artificial Sequence
  MKO10022528_A_Gpr107
  gRNA
ccctcagatcggattcagtc

SEQ ID NO: 22529 - DNA, 20 bp, Artificial Sequence
  MKO10022529_A_Gpr107
  gRNA
cctctctgtgaacgagcctg

SEQ ID NO: 22530 - DNA, 20 bp, Artificial Sequence
  MKO10022530_A_Gpr107
  gRNA
gttcttcaaggatgggtaca

SEQ ID NO: 22531 - DNA, 20 bp, Artificial Sequence
  MKO10022531_A_Gpr108
  gRNA
tggcagtgtccgctcctact

SEQ ID NO: 22532 - DNA, 20 bp, Artificial Sequence
  MKO10022532_A_Gpr108
  gRNA
agggtccaagtccgaaaata

SEQ ID NO: 22533 - DNA, 20 bp, Artificial Sequence
  MKO10022533_A_Gpr108
  gRNA
cccccgaaaccagacccagc

SEQ ID NO: 22534 - DNA, 20 bp, Artificial Sequence
  MKO10022534_A_Gpr110
  gRNA
tctccgtcgccgagtttacg

SEQ ID NO: 22535 - DNA, 20 bp, Artificial Sequence
  MKO10022535_A_Gpr110
  gRNA
acctccagtccacgagtatg

SEQ ID NO: 22536 - DNA, 20 bp, Artificial Sequence
  MKO10022536_A_Gpr110
  gRNA
ccacgtatagctgtcttcgc

SEQ ID NO: 22537 - DNA, 20 bp, Artificial Sequence
  MKO10022537_A_Gpr111
  gRNA
ccgcaatgttagcgatgcac

SEQ ID NO: 22538 - DNA, 20 bp, Artificial Sequence
  MKO10022538_A_Gpr111
  gRNA
aaaaggctacctccggcccg

SEQ ID NO: 22539 - DNA, 20 bp, Artificial Sequence
  MKO10022539_A_Gpr111
  gRNA
cgccaacgtaccatgtggtc

SEQ ID NO: 22540 - DNA, 20 bp, Artificial Sequence
  MKO10022540_A_Gpr113
  gRNA
tcgcccgcatgtcccgtcat

SEQ ID NO: 22541 - DNA, 20 bp, Artificial Sequence
  MKO10022541_A_Gpr113
  gRNA
gagtgtcgtgctaaccacag

SEQ ID NO: 22542 - DNA, 20 bp, Artificial Sequence
  MKO10022542_A_Gpr113
  gRNA
cttcccccgaaaacgcttac

SEQ ID NO: 22543 - DNA, 20 bp, Artificial Sequence
  MKO10022543_A_Gpr114
  gRNA
caagttgtgcccgccgaagc

SEQ ID NO: 22544 - DNA, 20 bp, Artificial Sequence
  MKO10022544_A_Gpr114
  gRNA
tagaagaaaagggcgccgtg

SEQ ID NO: 22545 - DNA, 20 bp, Artificial Sequence
  MKO10022545_A_Gpr114
  gRNA
aagcgccttgagcagcccgt

SEQ ID NO: 22546 - DNA, 20 bp, Artificial Sequence
  MKO10022546_A_Gpr115
  gRNA
caatgttcacgatgcacacg

SEQ ID NO: 22547 - DNA, 20 bp, Artificial Sequence
  MKO10022547_A_Gpr115
  gRNA
tgggtgtccccttgtgatcg

SEQ ID NO: 22548 - DNA, 20 bp, Artificial Sequence
  MKO10022548_A_Gpr115
  gRNA
aatccaaaagtactgccccg

SEQ ID NO: 22549 - DNA, 20 bp, Artificial Sequence
  MKO10022549_A_Gpr116
  gRNA
agctgcagcgggtgatcgcg

SEQ ID NO: 22550 - DNA, 20 bp, Artificial Sequence
  MKO10022550_A_Gpr116
  gRNA
agacaactgcagtagccgcc

SEQ ID NO: 22551 - DNA, 20 bp, Artificial Sequence
  MKO10022551_A_Gpr116
  gRNA
ccccggctagctcatgttct

SEQ ID NO: 22552 - DNA, 20 bp, Artificial Sequence
  MKO10022552_A_Gpr119
  gRNA
gggccgataagctccggcca

SEQ ID NO: 22553 - DNA, 20 bp, Artificial Sequence
  MKO10022553_A_Gpr119
  gRNA
ccggagcttatcggccccca

SEQ ID NO: 22554 - DNA, 20 bp, Artificial Sequence
  MKO10022554_A_Gpr119
  gRNA
ggctgataccttgattggcg

SEQ ID NO: 22555 - DNA, 20 bp, Artificial Sequence
  MKO10022555_A_Gpr123
  gRNA
gccggcctttccggcttatc

SEQ ID NO: 22556 - DNA, 20 bp, Artificial Sequence
  MKO10022556_A_Gpr123
  gRNA
acagtgccatccggataagc

SEQ ID NO: 22557 - DNA, 20 bp, Artificial Sequence
  MKO10022557_A_Gpr123
  gRNA
gcggtgcaggcatacaccac

SEQ ID NO: 22558 - DNA, 20 bp, Artificial Sequence
  MKO10022558_A_Gpr124
  gRNA
gagacagccaatccgattgt

SEQ ID NO: 22559 - DNA, 20 bp, Artificial Sequence
  MKO10022559_A_Gpr124
  gRNA
gtcccaagaaggatccattg

SEQ ID NO: 22560 - DNA, 20 bp, Artificial Sequence
  MKO10022560_A_Gpr124
  gRNA
atctactctagtctgcaacc

SEQ ID NO: 22561 - DNA, 20 bp, Artificial Sequence
  MKO10022561_A_Gpr125
  gRNA
gacctgacgaacaaccgaat

SEQ ID NO: 22562 - DNA, 20 bp, Artificial Sequence
  MKO10022562_A_Gpr125
  gRNA
tccggaacaaccttattagt

SEQ ID NO: 22563 - DNA, 20 bp, Artificial Sequence
  MKO10022563_A_Gpr125
  gRNA
ctggggctatcctactaata

SEQ ID NO: 22564 - DNA, 20 bp, Artificial Sequence
  MKO10022564_A_Gpr126
  gRNA
accatcagtgctgtcgtacc

SEQ ID NO: 22565 - DNA, 20 bp, Artificial Sequence
  MKO10022565_A_Gpr126
  gRNA
cgtaaaggtaccggaaggat

SEQ ID NO: 22566 - DNA, 20 bp, Artificial Sequence
  MKO10022566_A_Gpr126
  gRNA
gaacaatgcgttacctgtga

SEQ ID NO: 22567 - DNA, 20 bp, Artificial Sequence
  MKO10022567_A_Gpr128
  gRNA
gccaaaggtgaattcaccgt

SEQ ID NO: 22568 - DNA, 20 bp, Artificial Sequence
  MKO10022568_A_Gpr128
  gRNA
aaagggctgcgttgtacaat

SEQ ID NO: 22569 - DNA, 20 bp, Artificial Sequence
  MKO10022569_A_Gpr128
  gRNA
ttctgtgaaaatagtaccga

SEQ ID NO: 22570 - DNA, 20 bp, Artificial Sequence
  MKO10022570_A_Gpr12
  gRNA
tcagggcgtaatatagcgag

SEQ ID NO: 22571 - DNA, 20 bp, Artificial Sequence
  MKO10022571_A_Gpr12
  gRNA
gtaggtgtaatcggcgatca

SEQ ID NO: 22572 - DNA, 20 bp, Artificial Sequence
  MKO10022572_A_Gpr12
  gRNA
ccctgacgtaccactccgag

SEQ ID NO: 22573 - DNA, 20 bp, Artificial Sequence
  MKO10022573_A_Gpr132
  gRNA
gacctgccacgtctcctacg

SEQ ID NO: 22574 - DNA, 20 bp, Artificial Sequence
  MKO10022574_A_Gpr132
  gRNA
catttcctgcgaccgctaca

SEQ ID NO: 22575 - DNA, 20 bp, Artificial Sequence
  MKO10022575_A_Gpr132
  gRNA
gattctctcacctgctgcat

SEQ ID NO: 22576 - DNA, 20 bp, Artificial Sequence
  MKO10022576_A_Gpr133
  gRNA
ggcgtgacgtttctctacta

SEQ ID NO: 22577 - DNA, 20 bp, Artificial Sequence
  MKO10022577_A_Gpr133
  gRNA
ctccgcaggctttgcggtct

SEQ ID NO: 22578 - DNA, 20 bp, Artificial Sequence
  MKO10022578_A_Gpr133
  gRNA
tccaacttgtctgcgactgt

SEQ ID NO: 22579 - DNA, 20 bp, Artificial Sequence
  MKO10022579_A_Gpr135
  gRNA
ctcgatctattcgcgcctcc

SEQ ID NO: 22580 - DNA, 20 bp, Artificial Sequence
  MKO10022580_A_Gpr135
  gRNA
accgctactgcgccatcgtg

SEQ ID NO: 22581 - DNA, 20 bp, Artificial Sequence
  MKO10022581_A_Gpr135
  gRNA
gcgcagcacgcgcgcgtaag

SEQ ID NO: 22582 - DNA, 20 bp, Artificial Sequence
  MKO10022582_A_Gpr137b
  gRNA
ctttgactccaagtagatgt

SEQ ID NO: 22583 - DNA, 20 bp, Artificial Sequence
  MKO10022583_A_Gpr137b
  gRNA
gacgccggctacgtagtgtt

SEQ ID NO: 22584 - DNA, 20 bp, Artificial Sequence
  MKO10022584_A_Gpr137b
  gRNA
ccgagtcagaaatcccacga

SEQ ID NO: 22585 - DNA, 20 bp, Artificial Sequence
  MKO10022585_A_Gpr137c
  gRNA
tccgtggactagcattgcac

SEQ ID NO: 22586 - DNA, 20 bp, Artificial Sequence
  MKO10022586_A_Gpr137c
  gRNA
aaatgtctacctcgaatcaa

SEQ ID NO: 22587 - DNA, 20 bp, Artificial Sequence
  MKO10022587_A_Gpr137c
  gRNA
tctgtgccagactgtcatcg

SEQ ID NO: 22588 - DNA, 20 bp, Artificial Sequence
  MKO10022588_A_Gpr137
  gRNA
cagccgggcctgttacaacc

SEQ ID NO: 22589 - DNA, 20 bp, Artificial Sequence
  MKO10022589_A_Gpr137
  gRNA
gttgtaccagtcgtaatcga

SEQ ID NO: 22590 - DNA, 20 bp, Artificial Sequence
  MKO10022590_A_Gpr137
  gRNA
gcagcagttcccaaacgaag

SEQ ID NO: 22591 - DNA, 20 bp, Artificial Sequence
  MKO10022591_A_Gpr139
  gRNA
cggtccccttaacggttgac

SEQ ID NO: 22592 - DNA, 20 bp, Artificial Sequence
  MKO10022592_A_Gpr139
  gRNA
ttgcggcttaggcttcgtgc

SEQ ID NO: 22593 - DNA, 20 bp, Artificial Sequence
  MKO10022593_A_Gpr139
  gRNA
aagccgagctattcgcagcg

SEQ ID NO: 22594 - DNA, 20 bp, Artificial Sequence
  MKO10022594_A_Gpr141
  gRNA
gtggcgaaacttccgcacca

SEQ ID NO: 22595 - DNA, 20 bp, Artificial Sequence
  MKO10022595_A_Gpr141
  gRNA
ctagtatcaccacgtagaag

SEQ ID NO: 22596 - DNA, 20 bp, Artificial Sequence
  MKO10022596_A_Gpr141
  gRNA
actgacggtgcctttccgct

SEQ ID NO: 22597 - DNA, 20 bp, Artificial Sequence
  MKO10022597_A_Gpr142
  gRNA
ctacgaagacgatgatcact

SEQ ID NO: 22598 - DNA, 20 bp, Artificial Sequence
  MKO10022598_A_Gpr142
  gRNA
tacagcatgacaataatacg

SEQ ID NO: 22599 - DNA, 20 bp, Artificial Sequence
  MKO10022599_A_Gpr142
  gRNA
ccatccacaccatcgtatct

SEQ ID NO: 22600 - DNA, 20 bp, Artificial Sequence
  MKO10022600_A_Gpr143
  gRNA
tgatcaggagatcggcggga

SEQ ID NO: 22601 - DNA, 20 bp, Artificial Sequence
  MKO10022601_A_Gpr143
  gRNA
catcctgctgtaccacatca

SEQ ID NO: 22602 - DNA, 20 bp, Artificial Sequence
  MKO10022602_A_Gpr143
  gRNA
ctcatacaggaatcgttatc

SEQ ID NO: 22603 - DNA, 20 bp, Artificial Sequence
  MKO10022603_A_Gpr146
  gRNA
cacgctcgatgtagtagtca

SEQ ID NO: 22604 - DNA, 20 bp, Artificial Sequence
  MKO10022604_A_Gpr146
  gRNA
catgttcacgaagtacacgt

SEQ ID NO: 22605 - DNA, 20 bp, Artificial Sequence
  MKO10022605_A_Gpr146
  gRNA
tacaacacccggcacgtgtg

SEQ ID NO: 22606 - DNA, 20 bp, Artificial Sequence
  MKO10022606_A_Gpr149
  gRNA
gtctgaacgaacgcctcgcc

SEQ ID NO: 22607 - DNA, 20 bp, Artificial Sequence
  MKO10022607_A_Gpr149
  gRNA
cgcttccgctttcgggctcc

SEQ ID NO: 22608 - DNA, 20 bp, Artificial Sequence
  MKO10022608_A_Gpr149
  gRNA
agattcgtctcctgcgactt

SEQ ID NO: 22609 - DNA, 20 bp, Artificial Sequence
  MKO10022609_A_Gpr150
  gRNA
ggcggcgatgcgcgtcctag

SEQ ID NO: 22610 - DNA, 20 bp, Artificial Sequence
  MKO10022610_A_Gpr150
  gRNA
gcggcgccggtcgctctctt

SEQ ID NO: 22611 - DNA, 20 bp, Artificial Sequence
  MKO10022611_A_Gpr150
  gRNA
ctccgaccttcgtggtgcgc

SEQ ID NO: 22612 - DNA, 20 bp, Artificial Sequence
  MKO10022612_A_Gpr151
  gRNA
ttccacacctgcgtgacgtc

SEQ ID NO: 22613 - DNA, 20 bp, Artificial Sequence
  MKO10022613_A_Gpr151
  gRNA
gccgagatcccaaacgccct

SEQ ID NO: 22614 - DNA, 20 bp, Artificial Sequence
  MKO10022614_A_Gpr151
  gRNA
tcgtacatcgtgtcttacat

SEQ ID NO: 22615 - DNA, 20 bp, Artificial Sequence
  MKO10022615_A_Gpr152
  gRNA
ctgactcgtccccgaaggca

SEQ ID NO: 22616 - DNA, 20 bp, Artificial Sequence
  MKO10022616_A_Gpr152
  gRNA
tggatcagggagcccaccgt

SEQ ID NO: 22617 - DNA, 20 bp, Artificial Sequence
  MKO10022617_A_Gpr152
  gRNA
gctgtctgcgaggaacgacc

SEQ ID NO: 22618 - DNA, 20 bp, Artificial Sequence
  MKO10022618_A_Gpr153
  gRNA
gtcgggcagtagcgagaccg

SEQ ID NO: 22619 - DNA, 20 bp, Artificial Sequence
  MKO10022619_A_Gpr153
  gRNA
cacgctgcactcggactcgc

SEQ ID NO: 22620 - DNA, 20 bp, Artificial Sequence
  MKO10022620_A_Gpr153
  gRNA
attgtcagaatcttcgtcgt

SEQ ID NO: 22621 - DNA, 20 bp, Artificial Sequence
  MKO10022621_A_Gpr155
  gRNA
accatatagaaacgcatagt

SEQ ID NO: 22622 - DNA, 20 bp, Artificial Sequence
  MKO10022622_A_Gpr155
  gRNA
agcgaacttactcatcgctc

SEQ ID NO: 22623 - DNA, 20 bp, Artificial Sequence
  MKO10022623_A_Gpr155
  gRNA
cttatgatgctaaaccccat

SEQ ID NO: 22624 - DNA, 20 bp, Artificial Sequence
  MKO10022624_A_Gpr156
  gRNA
aggcggctgtactactgtgc

SEQ ID NO: 22625 - DNA, 20 bp, Artificial Sequence
  MKO10022625_A_Gpr156
  gRNA
cgactgtccttgctgtgcat

SEQ ID NO: 22626 - DNA, 20 bp, Artificial Sequence
  MKO10022626_A_Gpr156
  gRNA
atgtaatcctgcttgtgaca

SEQ ID NO: 22627 - DNA, 20 bp, Artificial Sequence
  MKO10022627_A_Gpr157
  gRNA
tggagggcccgcgcgtagtt

SEQ ID NO: 22628 - DNA, 20 bp, Artificial Sequence
  MKO10022628_A_Gpr157
  gRNA
agcatcgtccgaactacgcg

SEQ ID NO: 22629 - DNA, 20 bp, Artificial Sequence
  MKO10022629_A_Gpr157
  gRNA
cttcagctggggtgtcccgt

SEQ ID NO: 22630 - DNA, 20 bp, Artificial Sequence
  MKO10022630_A_Gpr158
  gRNA
attgaccaatgttcgagtga

SEQ ID NO: 22631 - DNA, 20 bp, Artificial Sequence
  MKO10022631_A_Gpr158
  gRNA
aagagataatagcgagccgc

SEQ ID NO: 22632 - DNA, 20 bp, Artificial Sequence
  MKO10022632_A_Gpr158
  gRNA
accagccatcactcgaacat

SEQ ID NO: 22633 - DNA, 20 bp, Artificial Sequence
  MKO10022633_A_Gpr15
  gRNA
ccttagccaagagattacga

SEQ ID NO: 22634 - DNA, 20 bp, Artificial Sequence
  MKO10022634_A_Gpr15
  gRNA
tgttatgctttcccgactgc

SEQ ID NO: 22635 - DNA, 20 bp, Artificial Sequence
  MKO10022635_A_Gpr15
  gRNA
atcggacagtcacctcacta

SEQ ID NO: 22636 - DNA, 20 bp, Artificial Sequence
  MKO10022636_A_Gpr160
  gRNA
acgttcatttctatgtacgc

SEQ ID NO: 22637 - DNA, 20 bp, Artificial Sequence
  MKO10022637_A_Gpr160
  gRNA
ggtcaaccaaaacgtaagca

SEQ ID NO: 22638 - DNA, 20 bp, Artificial Sequence
  MKO10022638_A_Gpr160
  gRNA
acatagaaatgaacgtcccc

SEQ ID NO: 22639 - DNA, 20 bp, Artificial Sequence
  MKO10022639_A_Gpr161
  gRNA
cgccgaaaatccattccctc

SEQ ID NO: 22640 - DNA, 20 bp, Artificial Sequence
  MKO10022640_A_Gpr161
  gRNA
tgatggctctcgtctacatc

SEQ ID NO: 22641 - DNA, 20 bp, Artificial Sequence
  MKO10022641_A_Gpr161
  gRNA
atcttcatggggtacaccat

SEQ ID NO: 22642 - DNA, 20 bp, Artificial Sequence
  MKO10022642_A_Gpr162
  gRNA
agtccaacggctcggctatc

SEQ ID NO: 22643 - DNA, 20 bp, Artificial Sequence
  MKO10022643_A_Gpr162
  gRNA
tctccggatagccgagccgt

SEQ ID NO: 22644 - DNA, 20 bp, Artificial Sequence
  MKO10022644_A_Gpr162
  gRNA
gtgtgtggcgatcatgtccg

SEQ ID NO: 22645 - DNA, 20 bp, Artificial Sequence
  MKO10022645_A_Gpr165
  gRNA
ggtcccccgagtttgacatg

SEQ ID NO: 22646 - DNA, 20 bp, Artificial Sequence
  MKO10022646_A_Gpr165
  gRNA
tagataaaatcagccgcctc

SEQ ID NO: 22647 - DNA, 20 bp, Artificial Sequence
  MKO10022647_A_Gpr165
  gRNA
agcttctggtaaacggcatg

SEQ ID NO: 22648 - DNA, 20 bp, Artificial Sequence
  MKO10022648_A_Gpr171
  gRNA
tttaggtgaggcgaaagtct

SEQ ID NO: 22649 - DNA, 20 bp, Artificial Sequence
  MKO10022649_A_Gpr171
  gRNA
gctgatcatggtgccgaaca

SEQ ID NO: 22650 - DNA, 20 bp, Artificial Sequence
  MKO10022650_A_Gpr171
  gRNA
tgtatgggatcctgacagcg

SEQ ID NO: 22651 - DNA, 20 bp, Artificial Sequence
  MKO10022651_A_Gpr173
  gRNA
cgtccatgcccagtagccgc

SEQ ID NO: 22652 - DNA, 20 bp, Artificial Sequence
  MKO10022652_A_Gpr173
  gRNA
cacctacaagtttatccgag

SEQ ID NO: 22653 - DNA, 20 bp, Artificial Sequence
  MKO10022653_A_Gpr173
  gRNA
catcagcgtcacccgctaca

SEQ ID NO: 22654 - DNA, 20 bp, Artificial Sequence
  MKO10022654_A_Gpr174
  gRNA
cacctctccgatagttatca

SEQ ID NO: 22655 - DNA, 20 bp, Artificial Sequence
  MKO10022655_A_Gpr174
  gRNA
gccagattaacattcctgat

SEQ ID NO: 22656 - DNA, 20 bp, Artificial Sequence
  MKO10022656_A_Gpr174
  gRNA
gcatcagtgtgcgaagattt

SEQ ID NO: 22657 - DNA, 20 bp, Artificial Sequence
  MKO10022657_A_Gpr176
  gRNA
ggcgccaacctcagcgcgtt

SEQ ID NO: 22658 - DNA, 20 bp, Artificial Sequence
  MKO10022658_A_Gpr176
  gRNA
ccggtacagtcgccgcaatg

SEQ ID NO: 22659 - DNA, 20 bp, Artificial Sequence
  MKO10022659_A_Gpr176
  gRNA
cagccacccgcgcaacacgt

SEQ ID NO: 22660 - DNA, 20 bp, Artificial Sequence
  MKO10022660_A_Gpr179
  gRNA
ctaccgttgccgagggagca

SEQ ID NO: 22661 - DNA, 20 bp, Artificial Sequence
  MKO10022661_A_Gpr179
  gRNA
taacagaggatccgggcatc

SEQ ID NO: 22662 - DNA, 20 bp, Artificial Sequence
  MKO10022662_A_Gpr179
  gRNA
ggtaggccaccagcatactc

SEQ ID NO: 22663 - DNA, 20 bp, Artificial Sequence
  MKO10022663_A_Gpr17
  gRNA
gatcattcgcagcctgcgcc

SEQ ID NO: 22664 - DNA, 20 bp, Artificial Sequence
  MKO10022664_A_Gpr17
  gRNA
gtctatgtgcttcactaccg

SEQ ID NO: 22665 - DNA, 20 bp, Artificial Sequence
  MKO10022665_A_Gpr17
  gRNA
agccgtccgcatgattgcta

SEQ ID NO: 22666 - DNA, 20 bp, Artificial Sequence
  MKO10022666_A_Gpr180
  gRNA
atgccgacaagttcacctgc

SEQ ID NO: 22667 - DNA, 20 bp, Artificial Sequence
  MKO10022667_A_Gpr180
  gRNA
gctcctcaacccggacgccg

SEQ ID NO: 22668 - DNA, 20 bp, Artificial Sequence
  MKO10022668_A_Gpr180
  gRNA
cagaatcaacaacgtagcag

SEQ ID NO: 22669 - DNA, 20 bp, Artificial Sequence
  MKO10022669_A_Gpr182
  gRNA
acgcctgaacgtttcggatg

SEQ ID NO: 22670 - DNA, 20 bp, Artificial Sequence
  MKO10022670_A_Gpr182
  gRNA
ccaccccatccgaaacgttc

SEQ ID NO: 22671 - DNA, 20 bp, Artificial Sequence
  MKO10022671_A_Gpr182
  gRNA
tgacgtagcggtcaatgctg

SEQ ID NO: 22672 - DNA, 20 bp, Artificial Sequence
  MKO10022672_A_Gpr183
  gRNA
tgtcgatctccagcgcagtg

SEQ ID NO: 22673 - DNA, 20 bp, Artificial Sequence
  MKO10022673_A_Gpr183
  gRNA
atttcccgcgaattctcttc

SEQ ID NO: 22674 - DNA, 20 bp, Artificial Sequence
  MKO10022674_A_Gpr183
  gRNA
aagggacagcgtccctgccg

SEQ ID NO: 22675 - DNA, 20 bp, Artificial Sequence
  MKO10022675_A_Gpr18
  gRNA
tcgcagaaaaagtgtccgat

SEQ ID NO: 22676 - DNA, 20 bp, Artificial Sequence
  MKO10022676_A_Gpr18
  gRNA
gtgaccgtaaactgcccgat

SEQ ID NO: 22677 - DNA, 20 bp, Artificial Sequence
  MKO10022677_A_Gpr18
  gRNA
tgacgctgatgactcgagcc

SEQ ID NO: 22678 - DNA, 20 bp, Artificial Sequence
  MKO10022678_A_Gpr19
  gRNA
ggataacgaccagccgcctg

SEQ ID NO: 22679 - DNA, 20 bp, Artificial Sequence
  MKO10022679_A_Gpr19
  gRNA
gtgaactgcagcacgacaaa

SEQ ID NO: 22680 - DNA, 20 bp, Artificial Sequence
  MKO10022680_A_Gpr19
  gRNA
gaaggccgcgtccaagatcc

SEQ ID NO: 22681 - DNA, 20 bp, Artificial Sequence
  MKO10022681_A_Gpr1
  gRNA
aggtactaaagcgttcgctg

SEQ ID NO: 22682 - DNA, 20 bp, Artificial Sequence
  MKO10022682_A_Gpr1
  gRNA
gcaagtggatgtagcggtcc

SEQ ID NO: 22683 - DNA, 20 bp, Artificial Sequence
  MKO10022683_A_Gpr1
  gRNA
agacgttccaagcccgcttc

SEQ ID NO: 22684 - DNA, 20 bp, Artificial Sequence
  MKO10022684_A_Gpr20
  gRNA
gcttgaattcttctccacgc

SEQ ID NO: 22685 - DNA, 20 bp, Artificial Sequence
  MKO10022685_A_Gpr20
  gRNA
cgaggcctcttctaccagcg

SEQ ID NO: 22686 - DNA, 20 bp, Artificial Sequence
  MKO10022686_A_Gpr20
  gRNA
agtactgccgcctacggctc

SEQ ID NO: 22687 - DNA, 20 bp, Artificial Sequence
  MKO10022687_A_Gpr21
  gRNA
ctactaccctcttccgattg

SEQ ID NO: 22688 - DNA, 20 bp, Artificial Sequence
  MKO10022688_A_Gpr21
  gRNA
ccttacacagttaggtgcaa

SEQ ID NO: 22689 - DNA, 20 bp, Artificial Sequence
  MKO10022689_A_Gpr21
  gRNA
tccagataagcgctatgcca

SEQ ID NO: 22690 - DNA, 20 bp, Artificial Sequence
  MKO10022690_A_Gpr22
  gRNA
ggcgtttcacggctcgccgg

SEQ ID NO: 22691 - DNA, 20 bp, Artificial Sequence
  MKO10022691_A_Gpr22
  gRNA
gccaccgggaacgacgagaa

SEQ ID NO: 22692 - DNA, 20 bp, Artificial Sequence
  MKO10022692_A_Gpr22
  gRNA
aactaccatggtgagcccaa

SEQ ID NO: 22693 - DNA, 20 bp, Artificial Sequence
  MKO10022693_A_Gpr25
  gRNA
ccctaccgacgcgcggcagg

SEQ ID NO: 22694 - DNA, 20 bp, Artificial Sequence
  MKO10022694_A_Gpr25
  gRNA
cgcggaatgagcggtccaac

SEQ ID NO: 22695 - DNA, 20 bp, Artificial Sequence
  MKO10022695_A_Gpr25
  gRNA
cgtcaatagcagtgcgaacc

SEQ ID NO: 22696 - DNA, 20 bp, Artificial Sequence
  MKO10022696_A_Gpr26
  gRNA
tgctgcgacaccaataccgc

SEQ ID NO: 22697 - DNA, 20 bp, Artificial Sequence
  MKO10022697_A_Gpr26
  gRNA
tcgcagcaaggaatacacga

SEQ ID NO: 22698 - DNA, 20 bp, Artificial Sequence
  MKO10022698_A_Gpr26
  gRNA
ctgccgttgtgccacgacgc

SEQ ID NO: 22699 - DNA, 20 bp, Artificial Sequence
  MKO10022699_A_Gpr27
  gRNA
ctggccgtgcgccgcgatgc

SEQ ID NO: 22700 - DNA, 20 bp, Artificial Sequence
  MKO10022700_A_Gpr27
  gRNA
cacaccagcatcgcggcgca

SEQ ID NO: 22701 - DNA, 20 bp, Artificial Sequence
  MKO10022701_A_Gpr27
  gRNA
ggccagttacctgcgcgtcc

SEQ ID NO: 22702 - DNA, 20 bp, Artificial Sequence
  MKO10022702_A_Gpr31b
  gRNA
tcttctggagggtcctgatg

SEQ ID NO: 22703 - DNA, 20 bp, Artificial Sequence
  MKO10022703_A_Gpr31b
  gRNA
ctgctcagctgccagcactg

SEQ ID NO: 22704 - DNA, 20 bp, Artificial Sequence
  MKO10022704_A_Gpr31b
  gRNA
atcaggaataggagtccctg

SEQ ID NO: 22705 - DNA, 20 bp, Artificial Sequence
  MKO10022705_A_Gpr33
  gRNA
cccggattgccttgcaaatc

SEQ ID NO: 22706 - DNA, 20 bp, Artificial Sequence
  MKO10022706_A_Gpr33
  gRNA
caccgacaaagtgctgttga

SEQ ID NO: 22707 - DNA, 20 bp, Artificial Sequence
  MKO10022707_A_Gpr33
  gRNA
caatccgggaagcccagtgt

SEQ ID NO: 22708 - DNA, 20 bp, Artificial Sequence
  MKO10022708_A_Gpr34
  gRNA
atgtgatacattatgcggaa

SEQ ID NO: 22709 - DNA, 20 bp, Artificial Sequence
  MKO10022709_A_Gpr34
  gRNA
tgtcacggacagatcatgca

SEQ ID NO: 22710 - DNA, 20 bp, Artificial Sequence
  MKO10022710_A_Gpr34
  gRNA
aattacccttagtgctgtac

SEQ ID NO: 22711 - DNA, 20 bp, Artificial Sequence
  MKO10022711_A_Gpr35
  gRNA
ccgcatctatatgaccaacc

SEQ ID NO: 22712 - DNA, 20 bp, Artificial Sequence
  MKO10022712_A_Gpr35
  gRNA
cagtggtgctgaaattgcgc

SEQ ID NO: 22713 - DNA, 20 bp, Artificial Sequence
  MKO10022713_A_Gpr35
  gRNA
accgcagctcacgcgcacgc

SEQ ID NO: 22714 - DNA, 20 bp, Artificial Sequence
  MKO10022714_A_Gpr37l1
  gRNA
agctctcggtcaccggatac

SEQ ID NO: 22715 - DNA, 20 bp, Artificial Sequence
  MKO10022715_A_Gpr37l1
  gRNA
gcccgaatctgtctattcgc

SEQ ID NO: 22716 - DNA, 20 bp, Artificial Sequence
  MKO10022716_A_Gpr37l1
  gRNA
cagcagagtcgaccccgaag

SEQ ID NO: 22717 - DNA, 20 bp, Artificial Sequence
  MKO10022717_A_Gpr37
  gRNA
agccgcgatgtgcgcgagag

SEQ ID NO: 22718 - DNA, 20 bp, Artificial Sequence
  MKO10022718_A_Gpr37
  gRNA
caagatcgtgccctatatcg

SEQ ID NO: 22719 - DNA, 20 bp, Artificial Sequence
  MKO10022719_A_Gpr37
  gRNA
gcggagaaggccagtacccg

SEQ ID NO: 22720 - DNA, 20 bp, Artificial Sequence
  MKO10022720_A_Gpr39
  gRNA
ggatgcccaatcagatccga

SEQ ID NO: 22721 - DNA, 20 bp, Artificial Sequence
  MKO10022721_A_Gpr39
  gRNA
gcacgaacctctccaaccgt

SEQ ID NO: 22722 - DNA, 20 bp, Artificial Sequence
  MKO10022722_A_Gpr39
  gRNA
gttcgtgcagatggacatat

SEQ ID NO: 22723 - DNA, 20 bp, Artificial Sequence
  MKO10022723_A_Gpr3
  gRNA
caccaccagcgcgttctcgc

SEQ ID NO: 22724 - DNA, 20 bp, Artificial Sequence
  MKO10022724_A_Gpr3
  gRNA
aacatgggggcgcggaaggc

SEQ ID NO: 22725 - DNA, 20 bp, Artificial Sequence
  MKO10022725_A_Gpr3
  gRNA
aaggtagcggtcaacggtaa

SEQ ID NO: 22726 - DNA, 20 bp, Artificial Sequence
  MKO10022726_A_Gpr44
  gRNA
tgacgcgagctgccgtagcg

SEQ ID NO: 22727 - DNA, 20 bp, Artificial Sequence
  MKO10022727_A_Gpr44
  gRNA
ctgcgtccaacccgcttgat

SEQ ID NO: 22728 - DNA, 20 bp, Artificial Sequence
  MKO10022728_A_Gpr44
  gRNA
ggtagtcgcacgtggtgtcg

SEQ ID NO: 22729 - DNA, 20 bp, Artificial Sequence
  MKO10022729_A_Gpr45
  gRNA
acgcgcctatgtagtgacac

SEQ ID NO: 22730 - DNA, 20 bp, Artificial Sequence
  MKO10022730_A_Gpr45
  gRNA
cgaaaaccaatccgctgtct

SEQ ID NO: 22731 - DNA, 20 bp, Artificial Sequence
  MKO10022731_A_Gpr45
  gRNA
gatcctccagcagtagacga

SEQ ID NO: 22732 - DNA, 20 bp, Artificial Sequence
  MKO10022732_A_Gpr4
  gRNA
gaatctgtaccgcgtctttg

SEQ ID NO: 22733 - DNA, 20 bp, Artificial Sequence
  MKO10022733_A_Gpr4
  gRNA
tgcgctttgcacgcctgcgc

SEQ ID NO: 22734 - DNA, 20 bp, Artificial Sequence
  MKO10022734_A_Gpr4
  gRNA
agacggcgctgcgagacagc

SEQ ID NO: 22735 - DNA, 20 bp, Artificial Sequence
  MKO10022735_A_Gpr50
  gRNA
aggttcgagatagtcaacag

SEQ ID NO: 22736 - DNA, 20 bp, Artificial Sequence
  MKO10022736_A_Gpr50
  gRNA
aaggcggttcccaccccatt

SEQ ID NO: 22737 - DNA, 20 bp, Artificial Sequence
  MKO10022737_A_Gpr50
  gRNA
acagtcgtcgtagacctgat

SEQ ID NO: 22738 - DNA, 20 bp, Artificial Sequence
  MKO10022738_A_Gpr52
  gRNA
ccctgaccgtcgctacgcca

SEQ ID NO: 22739 - DNA, 20 bp, Artificial Sequence
  MKO10022739_A_Gpr52
  gRNA
ggccagattccctagtcacg

SEQ ID NO: 22740 - DNA, 20 bp, Artificial Sequence
  MKO10022740_A_Gpr52
  gRNA
ccaagcaggtaactccaacg

SEQ ID NO: 22741 - DNA, 20 bp, Artificial Sequence
  MKO10022741_A_Gpr55
  gRNA
agaatttcgcatgcgcatca

SEQ ID NO: 22742 - DNA, 20 bp, Artificial Sequence
  MKO10022742_A_Gpr55
  gRNA
caactgctcattcgattccg

SEQ ID NO: 22743 - DNA, 20 bp, Artificial Sequence
  MKO10022743_A_Gpr55
  gRNA
ggccatccagtacccgatcc

SEQ ID NO: 22744 - DNA, 20 bp, Artificial Sequence
  MKO10022744_A_Gpr56
  gRNA
gtcgccgggatgacgccaag

SEQ ID NO: 22745 - DNA, 20 bp, Artificial Sequence
  MKO10022745_A_Gpr56
  gRNA
gtcatcccggcgacggcctc

SEQ ID NO: 22746 - DNA, 20 bp, Artificial Sequence
  MKO10022746_A_Gpr56
  gRNA
cagtgtggcgactccagtag

SEQ ID NO: 22747 - DNA, 20 bp, Artificial Sequence
  MKO10022747_A_Gpr61
  gRNA
ggtccacccaatgcgctacg

SEQ ID NO: 22748 - DNA, 20 bp, Artificial Sequence
  MKO10022748_A_Gpr61
  gRNA
atgcgcacctcgtagcgcat

SEQ ID NO: 22749 - DNA, 20 bp, Artificial Sequence
  MKO10022749_A_Gpr61
  gRNA
atgtctcaaccgtcagatcc

SEQ ID NO: 22750 - DNA, 20 bp, Artificial Sequence
  MKO10022750_A_Gpr62
  gRNA
ggacccctcgtcgtgccgag

SEQ ID NO: 22751 - DNA, 20 bp, Artificial Sequence
  MKO10022751_A_Gpr62
  gRNA
taccgtaggcggccaacagc

SEQ ID NO: 22752 - DNA, 20 bp, Artificial Sequence
  MKO10022752_A_Gpr62
  gRNA
tgagcaccagcgcgggcgcc

SEQ ID NO: 22753 - DNA, 20 bp, Artificial Sequence
  MKO10022753_A_Gpr63
  gRNA
cctagtgccgtctacgtgtg

SEQ ID NO: 22754 - DNA, 20 bp, Artificial Sequence
  MKO10022754_A_Gpr63
  gRNA
aaagactacaaacgtcgtgt

SEQ ID NO: 22755 - DNA, 20 bp, Artificial Sequence
  MKO10022755_A_Gpr63
  gRNA
tgctcattattagtatcgat

SEQ ID NO: 22756 - DNA, 20 bp, Artificial Sequence
  MKO10022756_A_Gpr64
  gRNA
agcctacctgggtaacattg

SEQ ID NO: 22757 - DNA, 20 bp, Artificial Sequence
  MKO10022757_A_Gpr64
  gRNA
attctcgttacatccctgaa

SEQ ID NO: 22758 - DNA, 20 bp, Artificial Sequence
  MKO10022758_A_Gpr64
  gRNA
ccctgttggcagacctgaag

SEQ ID NO: 22759 - DNA, 20 bp, Artificial Sequence
  MKO10022759_A_Gpr65
  gRNA
tgtcgcgctctaaaacgcag

SEQ ID NO: 22760 - DNA, 20 bp, Artificial Sequence
  MKO10022760_A_Gpr65
  gRNA
ataaagtctaccgagctgtg

SEQ ID NO: 22761 - DNA, 20 bp, Artificial Sequence
  MKO10022761_A_Gpr65
  gRNA
acgcgaatcttctcgttctt

SEQ ID NO: 22762 - DNA, 20 bp, Artificial Sequence
  MKO10022762_A_Gpr68
  gRNA
tctgcaagtacccgaagtag

SEQ ID NO: 22763 - DNA, 20 bp, Artificial Sequence
  MKO10022763_A_Gpr68
  gRNA
gtagttgatgctacgctgcc

SEQ ID NO: 22764 - DNA, 20 bp, Artificial Sequence
  MKO10022764_A_Gpr68
  gRNA
catcaactactaccgcttcc

SEQ ID NO: 22765 - DNA, 20 bp, Artificial Sequence
  MKO10022765_A_Gpr6
  gRNA
gcaccggacaccggcgaatg

SEQ ID NO: 22766 - DNA, 20 bp, Artificial Sequence
  MKO10022766_A_Gpr6
  gRNA
tgccgaaagcagtagtcccg

SEQ ID NO: 22767 - DNA, 20 bp, Artificial Sequence
  MKO10022767_A_Gpr6
  gRNA
gaggcggcggcggacctaac

SEQ ID NO: 22768 - DNA, 20 bp, Artificial Sequence
  MKO10022768_A_Gpr75
  gRNA
gtaatagtgcatggcgatgt

SEQ ID NO: 22769 - DNA, 20 bp, Artificial Sequence
  MKO10022769_A_Gpr75
  gRNA
aagtgctatttcccccgtgc

SEQ ID NO: 22770 - DNA, 20 bp, Artificial Sequence
  MKO10022770_A_Gpr75
  gRNA
caccaccaatgatttgatgc

SEQ ID NO: 22771 - DNA, 20 bp, Artificial Sequence
  MKO10022771_A_Gpr81
  gRNA
ggaacgatttgccccatcga

SEQ ID NO: 22772 - DNA, 20 bp, Artificial Sequence
  MKO10022772_A_Gpr81
  gRNA
cactagtgggcaccgtccag

SEQ ID NO: 22773 - DNA, 20 bp, Artificial Sequence
  MKO10022773_A_Gpr81
  gRNA
ctccgcgtcttcgtgcgtcc

SEQ ID NO: 22774 - DNA, 20 bp, Artificial Sequence
  MKO10022774_A_Gpr82
  gRNA
ccatctgccgattgtagcac

SEQ ID NO: 22775 - DNA, 20 bp, Artificial Sequence
  MKO10022775_A_Gpr82
  gRNA
cctatactactcagtagtcg

SEQ ID NO: 22776 - DNA, 20 bp, Artificial Sequence
  MKO10022776_A_Gpr82
  gRNA
caaatctttctcggtaatgg

SEQ ID NO: 22777 - DNA, 20 bp, Artificial Sequence
  MKO10022777_A_Gpr83
  gRNA
gactctgacagctatcgcag

SEQ ID NO: 22778 - DNA, 20 bp, Artificial Sequence
  MKO10022778_A_Gpr83
  gRNA
ctctgtggtcacgtcgccaa

SEQ ID NO: 22779 - DNA, 20 bp, Artificial Sequence
  MKO10022779_A_Gpr83
  gRNA
ccaacgcctcctcgcacttc

SEQ ID NO: 22780 - DNA, 20 bp, Artificial Sequence
  MKO10022780_A_Gpr84
  gRNA
agccatacgcgtggcgaaac

SEQ ID NO: 22781 - DNA, 20 bp, Artificial Sequence
  MKO10022781_A_Gpr84
  gRNA
cgccagtttcgccacgcgta

SEQ ID NO: 22782 - DNA, 20 bp, Artificial Sequence
  MKO10022782_A_Gpr84
  gRNA
gagccgcacgcttcacttgc

SEQ ID NO: 22783 - DNA, 20 bp, Artificial Sequence
  MKO10022783_A_Gpr85
  gRNA
atgggcgatggctaagtatc

SEQ ID NO: 22784 - DNA, 20 bp, Artificial Sequence
  MKO10022784_A_Gpr85
  gRNA
tgcaaaaactctccaatagc

SEQ ID NO: 22785 - DNA, 20 bp, Artificial Sequence
  MKO10022785_A_Gpr85
  gRNA
aggcaaaatgcgaataccac

SEQ ID NO: 22786 - DNA, 20 bp, Artificial Sequence
  MKO10022786_A_Gpr87
  gRNA
gcacaaccagagcatccgcg

SEQ ID NO: 22787 - DNA, 20 bp, Artificial Sequence
  MKO10022787_A_Gpr87
  gRNA
aattcataagccaatcgagc

SEQ ID NO: 22788 - DNA, 20 bp, Artificial Sequence
  MKO10022788_A_Gpr87
  gRNA
ttccgaatagtccgtgatgc

SEQ ID NO: 22789 - DNA, 20 bp, Artificial Sequence
  MKO10022789_A_Gpr88
  gRNA
gcttgacgctgacgcgcacg

SEQ ID NO: 22790 - DNA, 20 bp, Artificial Sequence
  MKO10022790_A_Gpr88
  gRNA
attcacgatgaaggcgttgc

SEQ ID NO: 22791 - DNA, 20 bp, Artificial Sequence
  MKO10022791_A_Gpr88
  gRNA
ggttcagcgccacgaggcaa

SEQ ID NO: 22792 - DNA, 20 bp, Artificial Sequence
  MKO10022792_A_Gpr89
  gRNA
cttcatgcgccagttgttta

SEQ ID NO: 22793 - DNA, 20 bp, Artificial Sequence
  MKO10022793_A_Gpr89
  gRNA
ttaacaggtgcgtcagtatg

SEQ ID NO: 22794 - DNA, 20 bp, Artificial Sequence
  MKO10022794_A_Gpr89
  gRNA
tcagctcccgttacttccat

SEQ ID NO: 22795 - DNA, 20 bp, Artificial Sequence
  MKO10022795_A_Gpr97
  gRNA
gtgggccagatgcacgccac

SEQ ID NO: 22796 - DNA, 20 bp, Artificial Sequence
  MKO10022796_A_Gpr97
  gRNA
cgtggccctcctgaagccga

SEQ ID NO: 22797 - DNA, 20 bp, Artificial Sequence
  MKO10022797_A_Gpr97
  gRNA
agcagtgtcattcaagtcga

SEQ ID NO: 22798 - DNA, 20 bp, Artificial Sequence
  MKO10022798_A_Gpr98
  gRNA
agtatgtgacgacgatcttc

SEQ ID NO: 22799 - DNA, 20 bp, Artificial Sequence
  MKO10022799_A_Gpr98
  gRNA
gcagcgtttatccctgccag

SEQ ID NO: 22800 - DNA, 20 bp, Artificial Sequence
  MKO10022800_A_Gpr98
  gRNA
ctcaatcaccgagattgatg

SEQ ID NO: 22801 - DNA, 20 bp, Artificial Sequence
  MKO10022801_A_Gprasp1
  gRNA
actcgccacgaaacttattt

SEQ ID NO: 22802 - DNA, 20 bp, Artificial Sequence
  MKO10022802_A_Gprasp1
  gRNA
acgcctacttgttactgatt

SEQ ID NO: 22803 - DNA, 20 bp, Artificial Sequence
  MKO10022803_A_Gprasp1
  gRNA
ctgacccagtttcgacagtc

SEQ ID NO: 22804 - DNA, 20 bp, Artificial Sequence
  MKO10022804_A_Gprasp2
  gRNA
ttcgatggtaacctcgtccc

SEQ ID NO: 22805 - DNA, 20 bp, Artificial Sequence
  MKO10022805_A_Gprasp2
  gRNA
tgcatcgcctgtggttaata

SEQ ID NO: 22806 - DNA, 20 bp, Artificial Sequence
  MKO10022806_A_Gprasp2
  gRNA
tttggatctgggcttcgacc

SEQ ID NO: 22807 - DNA, 20 bp, Artificial Sequence
  MKO10022807_A_Gprc5a
  gRNA
agtccgtacaatgactacga

SEQ ID NO: 22808 - DNA, 20 bp, Artificial Sequence
  MKO10022808_A_Gprc5a
  gRNA
acgaaatcctcattgcgccg

SEQ ID NO: 22809 - DNA, 20 bp, Artificial Sequence
  MKO10022809_A_Gprc5a
  gRNA
tcaagacgagcacgtaaatg

SEQ ID NO: 22810 - DNA, 20 bp, Artificial Sequence
  MKO10022810_A_Gprc5b
  gRNA
tcaatggatgaacataacgc

SEQ ID NO: 22811 - DNA, 20 bp, Artificial Sequence
  MKO10022811_A_Gprc5b
  gRNA
taattaatgagttgccgaag

SEQ ID NO: 22812 - DNA, 20 bp, Artificial Sequence
  MKO10022812_A_Gprc5b
  gRNA
tgtgtatcagccgaccgaga

SEQ ID NO: 22813 - DNA, 20 bp, Artificial Sequence
  MKO10022813_A_Gprc5c
  gRNA
tgtacatgtcttcggcccgc

SEQ ID NO: 22814 - DNA, 20 bp, Artificial Sequence
  MKO10022814_A_Gprc5c
  gRNA
gtttccgccagcgcttgaag

SEQ ID NO: 22815 - DNA, 20 bp, Artificial Sequence
  MKO10022815_A_Gprc5c
  gRNA
gggacatgtacccgacccga

SEQ ID NO: 22816 - DNA, 20 bp, Artificial Sequence
  MKO10022816_A_Gprc5d
  gRNA
gacaccgtatcagctcaatg

SEQ ID NO: 22817 - DNA, 20 bp, Artificial Sequence
  MKO10022817_A_Gprc5d
  gRNA
cacatactctatcgcaatga

SEQ ID NO: 22818 - DNA, 20 bp, Artificial Sequence
  MKO10022818_A_Gprc5d
  gRNA
gatgtagcactaactgcata

SEQ ID NO: 22819 - DNA, 20 bp, Artificial Sequence
  MKO10022819_A_Gprc6a
  gRNA
acctgatccgacaatcggga

SEQ ID NO: 22820 - DNA, 20 bp, Artificial Sequence
  MKO10022820_A_Gprc6a
  gRNA
cagcttgcagtgttcgccct

SEQ ID NO: 22821 - DNA, 20 bp, Artificial Sequence
  MKO10022821_A_Gprc6a
  gRNA
gtcaaggctgtcataggtgc

SEQ ID NO: 22822 - DNA, 20 bp, Artificial Sequence
  MKO10022822_A_Gprin1
  gRNA
gtgaagttgtcgcgagtccg

SEQ ID NO: 22823 - DNA, 20 bp, Artificial Sequence
  MKO10022823_A_Gprin1
  gRNA
agtcgacccccccacgactg

SEQ ID NO: 22824 - DNA, 20 bp, Artificial Sequence
  MKO10022824_A_Gprin1
  gRNA
tcccagctcacgtcgcgcac

SEQ ID NO: 22825 - DNA, 20 bp, Artificial Sequence
  MKO10022825_A_Gprin2
  gRNA
gctagagtccggcctacgac

SEQ ID NO: 22826 - DNA, 20 bp, Artificial Sequence
  MKO10022826_A_Gprin2
  gRNA
gactgcatgaccgcccgcag

SEQ ID NO: 22827 - DNA, 20 bp, Artificial Sequence
  MKO10022827_A_Gprin2
  gRNA
ttctaaatcagcctgcacgt

SEQ ID NO: 22828 - DNA, 20 bp, Artificial Sequence
  MKO10022828_A_Gprin3
  gRNA
gcatggtctttcacgataag

SEQ ID NO: 22829 - DNA, 20 bp, Artificial Sequence
  MKO10022829_A_Gprin3
  gRNA
agctgcaaaccgtccaactc

SEQ ID NO: 22830 - DNA, 20 bp, Artificial Sequence
  MKO10022830_A_Gprin3
  gRNA
aagtcaggattagtaccttc

SEQ ID NO: 22831 - DNA, 20 bp, Artificial Sequence
  MKO10022831_A_Gps1
  gRNA
aggccaccttgatgacgttg

SEQ ID NO: 22832 - DNA, 20 bp, Artificial Sequence
  MKO10022832_A_Gps1
  gRNA
aaggcttaacctggtagcct

SEQ ID NO: 22833 - DNA, 20 bp, Artificial Sequence
  MKO10022833_A_Gps1
  gRNA
gcgttctgcggatcttcctg

SEQ ID NO: 22834 - DNA, 20 bp, Artificial Sequence
  MKO10022834_A_Gps2
  gRNA
tccctcaccgtaagcacttg

SEQ ID NO: 22835 - DNA, 20 bp, Artificial Sequence
  MKO10022835_A_Gps2
  gRNA
gggttcctgtatgaaccgtc

SEQ ID NO: 22836 - DNA, 20 bp, Artificial Sequence
  MKO10022836_A_Gps2
  gRNA
aatgtcactagaggagacca

SEQ ID NO: 22837 - DNA, 20 bp, Artificial Sequence
  MKO10022837_A_Gpsm1
  gRNA
ggtcctaggccgattcgatg

SEQ ID NO: 22838 - DNA, 20 bp, Artificial Sequence
  MKO10022838_A_Gpsm1
  gRNA
tgcagtgtctcgcggacatc

SEQ ID NO: 22839 - DNA, 20 bp, Artificial Sequence
  MKO10022839_A_Gpsm1
  gRNA
gggcccgggcatactccttc

SEQ ID NO: 22840 - DNA, 20 bp, Artificial Sequence
  MKO10022840_A_Gpsm2
  gRNA
tgcccgggtccgcaggatac

SEQ ID NO: 22841 - DNA, 20 bp, Artificial Sequence
  MKO10022841_A_Gpsm2
  gRNA
gcaagagcgctctacaatct

SEQ ID NO: 22842 - DNA, 20 bp, Artificial Sequence
  MKO10022842_A_Gpsm2
  gRNA
tgcagttatagctcacgagc

SEQ ID NO: 22843 - DNA, 20 bp, Artificial Sequence
  MKO10022843_A_Gpsm3
  gRNA
agcccagtcccgccgcctag

SEQ ID NO: 22844 - DNA, 20 bp, Artificial Sequence
  MKO10022844_A_Gpsm3
  gRNA
atagccctagggccccgttc

SEQ ID NO: 22845 - DNA, 20 bp, Artificial Sequence
  MKO10022845_A_Gpsm3
  gRNA
gaaggggcgggtcagaccgt

SEQ ID NO: 22846 - DNA, 20 bp, Artificial Sequence
  MKO10022846_A_Gpt2
  gRNA
cacggatacagttaacgcct

SEQ ID NO: 22847 - DNA, 20 bp, Artificial Sequence
  MKO10022847_A_Gpt2
  gRNA
aagacgctaagaaacgagcg

SEQ ID NO: 22848 - DNA, 20 bp, Artificial Sequence
  MKO10022848_A_Gpt2
  gRNA
ctctgagctcgacgcggtgc

SEQ ID NO: 22849 - DNA, 20 bp, Artificial Sequence
  MKO10022849_A_Gpt
  gRNA
gtactatgcgtcatcaaccc

SEQ ID NO: 22850 - DNA, 20 bp, Artificial Sequence
  MKO10022850_A_Gpt
  gRNA
ttgatgacgcatagtactcg

SEQ ID NO: 22851 - DNA, 20 bp, Artificial Sequence
  MKO10022851_A_Gpt
  gRNA
ccctaccacgatggcatcgc

SEQ ID NO: 22852 - DNA, 20 bp, Artificial Sequence
  MKO10022852_A_Gpx1
  gRNA
cgatgtcgatggtacgaaag

SEQ ID NO: 22853 - DNA, 20 bp, Artificial Sequence
  MKO10022853_A_Gpx1
  gRNA
acaggctccccgcccgtcag

SEQ ID NO: 22854 - DNA, 20 bp, Artificial Sequence
  MKO10022854_A_Gpx1
  gRNA
gctcgaacccgccaccaggt

SEQ ID NO: 22855 - DNA, 20 bp, Artificial Sequence
  MKO10022855_A_Gpx2
  gRNA
agcctcaagtatgtccgacc

SEQ ID NO: 22856 - DNA, 20 bp, Artificial Sequence
  MKO10022856_A_Gpx2
  gRNA
tcctcacctgatgtccgaac

SEQ ID NO: 22857 - DNA, 20 bp, Artificial Sequence
  MKO10022857_A_Gpx2
  gRNA
ttctacgatctcagtgccgt

SEQ ID NO: 22858 - DNA, 20 bp, Artificial Sequence
  MKO10022858_A_Gpx3
  gRNA
atggcataccggttatgcgc

SEQ ID NO: 22859 - DNA, 20 bp, Artificial Sequence
  MKO10022859_A_Gpx3
  gRNA
cctcccaggtatgttcgacc

SEQ ID NO: 22860 - DNA, 20 bp, Artificial Sequence
  MKO10022860_A_Gpx3
  gRNA
gctcacctggccgcctcttt

SEQ ID NO: 22861 - DNA, 20 bp, Artificial Sequence
  MKO10022861_A_Gpx4
  gRNA
cgtgtgcatcgtcaccaacg

SEQ ID NO: 22862 - DNA, 20 bp, Artificial Sequence
  MKO10022862_A_Gpx4
  gRNA
aaacccacctgtacttatcc

SEQ ID NO: 22863 - DNA, 20 bp, Artificial Sequence
  MKO10022863_A_Gpx4
  gRNA
cacacacctgcctcccaaac

SEQ ID NO: 22864 - DNA, 20 bp, Artificial Sequence
  MKO10022864_A_Gpx5
  gRNA
ctggattgtcagaccgcaat

SEQ ID NO: 22865 - DNA, 20 bp, Artificial Sequence
  MKO10022865_A_Gpx5
  gRNA
taaaagtccatgacatccgc

SEQ ID NO: 22866 - DNA, 20 bp, Artificial Sequence
  MKO10022866_A_Gpx5
  gRNA
cagagcctcatagtcgtaga

SEQ ID NO: 22867 - DNA, 20 bp, Artificial Sequence
  MKO10022867_A_Gpx6
  gRNA
ggcctgacagctacgtaccc

SEQ ID NO: 22868 - DNA, 20 bp, Artificial Sequence
  MKO10022868_A_Gpx6
  gRNA
taccagggtacgtagctgtc

SEQ ID NO: 22869 - DNA, 20 bp, Artificial Sequence
  MKO10022869_A_Gpx6
  gRNA
cgcatgacagggactccatc

SEQ ID NO: 22870 - DNA, 20 bp, Artificial Sequence
  MKO10022870_A_Gpx7
  gRNA
ggcctgcgcgcaatccgagc

SEQ ID NO: 22871 - DNA, 20 bp, Artificial Sequence
  MKO10022871_A_Gpx7
  gRNA
cgctagctacgttcaccacc

SEQ ID NO: 22872 - DNA, 20 bp, Artificial Sequence
  MKO10022872_A_Gpx7
  gRNA
ctcacgggttaggtacttga

SEQ ID NO: 22873 - DNA, 20 bp, Artificial Sequence
  MKO10022873_A_Gpx8
  gRNA
gccctatcacttcaacgtcc

SEQ ID NO: 22874 - DNA, 20 bp, Artificial Sequence
  MKO10022874_A_Gpx8
  gRNA
cactagccacgtttacaacc

SEQ ID NO: 22875 - DNA, 20 bp, Artificial Sequence
  MKO10022875_A_Gpx8
  gRNA
gcctacccattaaaatgttc

SEQ ID NO: 22876 - DNA, 20 bp, Artificial Sequence
  MKO10022876_A_Gramd1a
  gRNA
gctccccgtctcttcgtaag

SEQ ID NO: 22877 - DNA, 20 bp, Artificial Sequence
  MKO10022877_A_Gramd1a
  gRNA
tgaagcagagcgcctcatcg

SEQ ID NO: 22878 - DNA, 20 bp, Artificial Sequence
  MKO10022878_A_Gramd1a
  gRNA
tgaagccgcttacgaagaga

SEQ ID NO: 22879 - DNA, 20 bp, Artificial Sequence
  MKO10022879_A_Gramd1b
  gRNA
cacctttcgtcgcgcactcg

SEQ ID NO: 22880 - DNA, 20 bp, Artificial Sequence
  MKO10022880_A_Gramd1b
  gRNA
gtcctcgagtgcgcgacgaa

SEQ ID NO: 22881 - DNA, 20 bp, Artificial Sequence
  MKO10022881_A_Gramd1b
  gRNA
gcgggaccgcttccggagga

SEQ ID NO: 22882 - DNA, 20 bp, Artificial Sequence
  MKO10022882_A_Gramd1c
  gRNA
gtcctcagcaacccgctaac

SEQ ID NO: 22883 - DNA, 20 bp, Artificial Sequence
  MKO10022883_A_Gramd1c
  gRNA
gttgctgaggactatggtat

SEQ ID NO: 22884 - DNA, 20 bp, Artificial Sequence
  MKO10022884_A_Gramd1c
  gRNA
attcccgagaaagatcttca

SEQ ID NO: 22885 - DNA, 20 bp, Artificial Sequence
  MKO10022885_A_Gramd2
  gRNA
gagagatatagagccgacca

SEQ ID NO: 22886 - DNA, 20 bp, Artificial Sequence
  MKO10022886_A_Gramd2
  gRNA
gctgtttaaagatatcccgt

SEQ ID NO: 22887 - DNA, 20 bp, Artificial Sequence
  MKO10022887_A_Gramd2
  gRNA
taaacagcttgtggtattgt

SEQ ID NO: 22888 - DNA, 20 bp, Artificial Sequence
  MKO10022888_A_Gramd3
  gRNA
agctctttgtgtcggaaaac

SEQ ID NO: 22889 - DNA, 20 bp, Artificial Sequence
  MKO10022889_A_Gramd3
  gRNA
ccgagtccccggaccagaag

SEQ ID NO: 22890 - DNA, 20 bp, Artificial Sequence
  MKO10022890_A_Gramd3
  gRNA
cctcttctggtccggggact

SEQ ID NO: 22891 - DNA, 20 bp, Artificial Sequence
  MKO10022891_A_Gramd4
  gRNA
cgatcgactgaacgagatca

SEQ ID NO: 22892 - DNA, 20 bp, Artificial Sequence
  MKO10022892_A_Gramd4
  gRNA
gcacgcctgccgccatgatg

SEQ ID NO: 22893 - DNA, 20 bp, Artificial Sequence
  MKO10022893_A_Gramd4
  gRNA
gtctccgcactcggtgtccg

SEQ ID NO: 22894 - DNA, 20 bp, Artificial Sequence
  MKO10022894_A_Grap2
  gRNA
tcttctcctacggttccact

SEQ ID NO: 22895 - DNA, 20 bp, Artificial Sequence
  MKO10022895_A_Grap2
  gRNA
atgggaacttctcggtccac

SEQ ID NO: 22896 - DNA, 20 bp, Artificial Sequence
  MKO10022896_A_Grap2
  gRNA
caaagtcatgcgtgacacca

SEQ ID NO: 22897 - DNA, 20 bp, Artificial Sequence
  MKO10022897_A_Grap
  gRNA
gcacttcaaagtgcttcgag

SEQ ID NO: 22898 - DNA, 20 bp, Artificial Sequence
  MKO10022898_A_Grap
  gRNA
gttcaactccctcaacgagc

SEQ ID NO: 22899 - DNA, 20 bp, Artificial Sequence
  MKO10022899_A_Grap
  gRNA
tggtacaaagctgagctccg

SEQ ID NO: 22900 - DNA, 20 bp, Artificial Sequence
  MKO10022900_A_Grasp
  gRNA
cacgttgagaccgttgacgc

SEQ ID NO: 22901 - DNA, 20 bp, Artificial Sequence
  MKO10022901_A_Grasp
  gRNA
gtcgatatcatcaaggcgtc

SEQ ID NO: 22902 - DNA, 20 bp, Artificial Sequence
  MKO10022902_A_Grasp
  gRNA
atatggccttcaccaccgag

SEQ ID NO: 22903 - DNA, 20 bp, Artificial Sequence
  MKO10022903_A_Grb10
  gRNA
caacgatattaactcgtccg

SEQ ID NO: 22904 - DNA, 20 bp, Artificial Sequence
  MKO10022904_A_Grb10
  gRNA
ccacttggaccacgatctca

SEQ ID NO: 22905 - DNA, 20 bp, Artificial Sequence
  MKO10022905_A_Grb10
  gRNA
ccatgagatcgtggtccaag

SEQ ID NO: 22906 - DNA, 20 bp, Artificial Sequence
  MKO10022906_A_Grb14
  gRNA
cctcacagaaagaaccgtag

SEQ ID NO: 22907 - DNA, 20 bp, Artificial Sequence
  MKO10022907_A_Grb14
  gRNA
ggtgattaaagtttacagcg

SEQ ID NO: 22908 - DNA, 20 bp, Artificial Sequence
  MKO10022908_A_Grb14
  gRNA
tttgagcacctatctcacat

SEQ ID NO: 22909 - DNA, 20 bp, Artificial Sequence
  MKO10022909_A_Grb2
  gRNA
aatacttcccggctccgtcg

SEQ ID NO: 22910 - DNA, 20 bp, Artificial Sequence
  MKO10022910_A_Grb2
  gRNA
gaaacacttacttgacggac

SEQ ID NO: 22911 - DNA, 20 bp, Artificial Sequence
  MKO10022911_A_Grb2
  gRNA
ggacatagaacagatgccac

SEQ ID NO: 22912 - DNA, 20 bp, Artificial Sequence
  MKO10022912_A_Grb7
  gRNA
acgccctgagcgacgagagc

SEQ ID NO: 22913 - DNA, 20 bp, Artificial Sequence
  MKO10022913_A_Grb7
  gRNA
ctcgaatccagagcggggtc

SEQ ID NO: 22914 - DNA, 20 bp, Artificial Sequence
  MKO10022914_A_Grb7
  gRNA
gtccccagctctcgtcgctc

SEQ ID NO: 22915 - DNA, 20 bp, Artificial Sequence
  MKO10022915_A_Grcc10
  gRNA
acgcttgaatcacctccgcc

SEQ ID NO: 22916 - DNA, 20 bp, Artificial Sequence
  MKO10022916_A_Grcc10
  gRNA
gcgttctatggcgtccgcct

SEQ ID NO: 22917 - DNA, 20 bp, Artificial Sequence
  MKO10022917_A_Grcc10
  gRNA
tctagcctcgtccatgcgca

SEQ ID NO: 22918 - DNA, 20 bp, Artificial Sequence
  MKO10022918_A_Greb1l
  gRNA
tccctttgataacacgccct

SEQ ID NO: 22919 - DNA, 20 bp, Artificial Sequence
  MKO10022919_A_Greb1l
  gRNA
cgatttctaccagatgacca

SEQ ID NO: 22920 - DNA, 20 bp, Artificial Sequence
  MKO10022920_A_Greb1l
  gRNA
tctgtcgtgcaagatccttc

SEQ ID NO: 22921 - DNA, 20 bp, Artificial Sequence
  MKO10022921_A_Greb1
  gRNA
cagcagctgtcatcgttaga

SEQ ID NO: 22922 - DNA, 20 bp, Artificial Sequence
  MKO10022922_A_Greb1
  gRNA
ttccttacgctccaacaccc

SEQ ID NO: 22923 - DNA, 20 bp, Artificial Sequence
  MKO10022923_A_Greb1
  gRNA
tccgaaccagatagtacttg

SEQ ID NO: 22924 - DNA, 20 bp, Artificial Sequence
  MKO10022924_A_Grem1
  gRNA
ccgttgcatatccatcgact

SEQ ID NO: 22925 - DNA, 20 bp, Artificial Sequence
  MKO10022925_A_Grem1
  gRNA
acttgcgctctgtcacgtgc

SEQ ID NO: 22926 - DNA, 20 bp, Artificial Sequence
  MKO10022926_A_Grem1
  gRNA
tttgacttaatccaagtcga

SEQ ID NO: 22927 - DNA, 20 bp, Artificial Sequence
  MKO10022927_A_Grem2
  gRNA
catcccgcgacacgtgaaga

SEQ ID NO: 22928 - DNA, 20 bp, Artificial Sequence
  MKO10022928_A_Grem2
  gRNA
ttcgagctctacgatgacag

SEQ ID NO: 22929 - DNA, 20 bp, Artificial Sequence
  MKO10022929_A_Grem2
  gRNA
catcgtagagctcgaatgcc

SEQ ID NO: 22930 - DNA, 20 bp, Artificial Sequence
  MKO10022930_A_Grhl1
  gRNA
ctctgagcccaccgaacgtg

SEQ ID NO: 22931 - DNA, 20 bp, Artificial Sequence
  MKO10022931_A_Grhl1
  gRNA
catccgaaggctgagttccg

SEQ ID NO: 22932 - DNA, 20 bp, Artificial Sequence
  MKO10022932_A_Grhl1
  gRNA
ctcctgaacgccctccttga

SEQ ID NO: 22933 - DNA, 20 bp, Artificial Sequence
  MKO10022933_A_Grhl2
  gRNA
cgcctccgctcaaattgatc

SEQ ID NO: 22934 - DNA, 20 bp, Artificial Sequence
  MKO10022934_A_Grhl2
  gRNA
ccgaagagcctacacaagtg

SEQ ID NO: 22935 - DNA, 20 bp, Artificial Sequence
  MKO10022935_A_Grhl2
  gRNA
ctatccccgcgcggacagtg

SEQ ID NO: 22936 - DNA, 20 bp, Artificial Sequence
  MKO10022936_A_Grhl3
  gRNA
ggggacggtattggtcttgc

SEQ ID NO: 22937 - DNA, 20 bp, Artificial Sequence
  MKO10022937_A_Grhl3
  gRNA
gcttccagtttactcggacc

SEQ ID NO: 22938 - DNA, 20 bp, Artificial Sequence
  MKO10022938_A_Grhl3
  gRNA
cttcctctacgactactata

SEQ ID NO: 22939 - DNA, 20 bp, Artificial Sequence
  MKO10022939_A_Grhpr
  gRNA
ccgtagccgcacatccataa

SEQ ID NO: 22940 - DNA, 20 bp, Artificial Sequence
  MKO10022940_A_Grhpr
  gRNA
ccattatggatgtgcggcta

SEQ ID NO: 22941 - DNA, 20 bp, Artificial Sequence
  MKO10022941_A_Grhpr
  gRNA
gcttcctagcgggatccggg

SEQ ID NO: 22942 - DNA, 20 bp, Artificial Sequence
  MKO10022942_A_Gria1
  gRNA
atacagccgccgagaagaac

SEQ ID NO: 22943 - DNA, 20 bp, Artificial Sequence
  MKO10022943_A_Gria1
  gRNA
agaacgcctcaacgccatcc

SEQ ID NO: 22944 - DNA, 20 bp, Artificial Sequence
  MKO10022944_A_Gria1
  gRNA
gcattatcgaccattacaag

SEQ ID NO: 22945 - DNA, 20 bp, Artificial Sequence
  MKO10022945_A_Gria2
  gRNA
gacaccccatatcgacaatt

SEQ ID NO: 22946 - DNA, 20 bp, Artificial Sequence
  MKO10022946_A_Gria2
  gRNA
ctacctccaaattgtcgata

SEQ ID NO: 22947 - DNA, 20 bp, Artificial Sequence
  MKO10022947_A_Gria2
  gRNA
ggtagtactcaatcaagcta

SEQ ID NO: 22948 - DNA, 20 bp, Artificial Sequence
  MKO10022948_A_Gria3
  gRNA
gaactaccacgtagaccact

SEQ ID NO: 22949 - DNA, 20 bp, Artificial Sequence
  MKO10022949_A_Gria3
  gRNA
aggaatccaagtggtctacg

SEQ ID NO: 22950 - DNA, 20 bp, Artificial Sequence
  MKO10022950_A_Gria3
  gRNA
cctttaaggctgggcgcatc

SEQ ID NO: 22951 - DNA, 20 bp, Artificial Sequence
  MKO10022951_A_Gria4
  gRNA
ttacctatttgaacgctgct

SEQ ID NO: 22952 - DNA, 20 bp, Artificial Sequence
  MKO10022952_A_Gria4
  gRNA
cagctaagaccttcattgag

SEQ ID NO: 22953 - DNA, 20 bp, Artificial Sequence
  MKO10022953_A_Gria4
  gRNA
tacccctgtctgtatcatac

SEQ ID NO: 22954 - DNA, 20 bp, Artificial Sequence
  MKO10022954_A_Grid1
  gRNA
ccggtagcgattcagctcct

SEQ ID NO: 22955 - DNA, 20 bp, Artificial Sequence
  MKO10022955_A_Grid1
  gRNA
attggcggatgcacagcccg

SEQ ID NO: 22956 - DNA, 20 bp, Artificial Sequence
  MKO10022956_A_Grid1
  gRNA
ggcgcactccttcatcaatg

SEQ ID NO: 22957 - DNA, 20 bp, Artificial Sequence
  MKO10022957_A_Grid2ip
  gRNA
cttcgacgaggtggtgtcgc

SEQ ID NO: 22958 - DNA, 20 bp, Artificial Sequence
  MKO10022958_A_Grid2ip
  gRNA
gcgtacctacgaggaccccc

SEQ ID NO: 22959 - DNA, 20 bp, Artificial Sequence
  MKO10022959_A_Grid2ip
  gRNA
ggaccggtccctttcgccag

SEQ ID NO: 22960 - DNA, 20 bp, Artificial Sequence
  MKO10022960_A_Grid2
  gRNA
cctagatatccgtggaatcc

SEQ ID NO: 22961 - DNA, 20 bp, Artificial Sequence
  MKO10022961_A_Grid2
  gRNA
cccagctgatgtgcaaccaa

SEQ ID NO: 22962 - DNA, 20 bp, Artificial Sequence
  MKO10022962_A_Grid2
  gRNA
ttcattcagcgctcaacagc

SEQ ID NO: 22963 - DNA, 20 bp, Artificial Sequence
  MKO10022963_A_Grifin
  gRNA
gaatcgaggtttgacgtgga

SEQ ID NO: 22964 - DNA, 20 bp, Artificial Sequence
  MKO10022964_A_Grifin
  gRNA
attgcccaccaccgtggcgc

SEQ ID NO: 22965 - DNA, 20 bp, Artificial Sequence
  MKO10022965_A_Grifin
  gRNA
gccagcggtcggtgccgatg

SEQ ID NO: 22966 - DNA, 20 bp, Artificial Sequence
  MKO10022966_A_Grik1
  gRNA
atttgattgttcgcacgaga

SEQ ID NO: 22967 - DNA, 20 bp, Artificial Sequence
  MKO10022967_A_Grik1
  gRNA
ggttcggtttcggttaatac

SEQ ID NO: 22968 - DNA, 20 bp, Artificial Sequence
  MKO10022968_A_Grik1
  gRNA
ttcatgccgaaacacagtcg

SEQ ID NO: 22969 - DNA, 20 bp, Artificial Sequence
  MKO10022969_A_Grik2
  gRNA
agtcgaagattgtaccttga

SEQ ID NO: 22970 - DNA, 20 bp, Artificial Sequence
  MKO10022970_A_Grik2
  gRNA
accgaatcttaacacatgtg

SEQ ID NO: 22971 - DNA, 20 bp, Artificial Sequence
  MKO10022971_A_Grik2
  gRNA
ctgtgtatcatatgttaacg

SEQ ID NO: 22972 - DNA, 20 bp, Artificial Sequence
  MKO10022972_A_Grik3
  gRNA
cgggagtcatccgagtcaat

SEQ ID NO: 22973 - DNA, 20 bp, Artificial Sequence
  MKO10022973_A_Grik3
  gRNA
aacctccaaggcgttgcaaa

SEQ ID NO: 22974 - DNA, 20 bp, Artificial Sequence
  MKO10022974_A_Grik3
  gRNA
ctgatcgccacttgagggac

SEQ ID NO: 22975 - DNA, 20 bp, Artificial Sequence
  MKO10022975_A_Grik4
  gRNA
cacactctcggtccggatgt

SEQ ID NO: 22976 - DNA, 20 bp, Artificial Sequence
  MKO10022976_A_Grik4
  gRNA
cccgtgtgtcgtccaacatc

SEQ ID NO: 22977 - DNA, 20 bp, Artificial Sequence
  MKO10022977_A_Grik4
  gRNA
gtatcaaccgcgcaccagag

SEQ ID NO: 22978 - DNA, 20 bp, Artificial Sequence
  MKO10022978_A_Grik5
  gRNA
gccccgctcactggtgtccg

SEQ ID NO: 22979 - DNA, 20 bp, Artificial Sequence
  MKO10022979_A_Grik5
  gRNA
ctcccaccttgtcctccgta

SEQ ID NO: 22980 - DNA, 20 bp, Artificial Sequence
  MKO10022980_A_Grik5
  gRNA
gaccagaccgtgtgtggccg

SEQ ID NO: 22981 - DNA, 20 bp, Artificial Sequence
  MKO10022981_A_Grin1os
  gRNA
ctgcgcacgctcattgttaa

SEQ ID NO: 22982 - DNA, 20 bp, Artificial Sequence
  MKO10022982_A_Grin1os
  gRNA
gcgcatgccgatgccaaagc

SEQ ID NO: 22983 - DNA, 20 bp, Artificial Sequence
  MKO10022983_A_Grin1os
  gRNA
gcgtgccttccccgagccac

SEQ ID NO: 22984 - DNA, 20 bp, Artificial Sequence
  MKO10022984_A_Grin1
  gRNA
ccaagagccgtgtcgcttat

SEQ ID NO: 22985 - DNA, 20 bp, Artificial Sequence
  MKO10022985_A_Grin1
  gRNA
cgcgccgatgttgacaatct

SEQ ID NO: 22986 - DNA, 20 bp, Artificial Sequence
  MKO10022986_A_Grin1
  gRNA
cttctacagaatccccgtcc

SEQ ID NO: 22987 - DNA, 20 bp, Artificial Sequence
  MKO10022987_A_Grin2a
  gRNA
tatgtcttctacgatgacga

SEQ ID NO: 22988 - DNA, 20 bp, Artificial Sequence
  MKO10022988_A_Grin2a
  gRNA
gatcttgacaaacttccgac

SEQ ID NO: 22989 - DNA, 20 bp, Artificial Sequence
  MKO10022989_A_Grin2a
  gRNA
tttcagtctcttacgacgac

SEQ ID NO: 22990 - DNA, 20 bp, Artificial Sequence
  MKO10022990_A_Grin2b
  gRNA
cgggactgtattccgcatgc

SEQ ID NO: 22991 - DNA, 20 bp, Artificial Sequence
  MKO10022991_A_Grin2b
  gRNA
ctcaccaatcatgccgttcc

SEQ ID NO: 22992 - DNA, 20 bp, Artificial Sequence
  MKO10022992_A_Grin2b
  gRNA
atcgtgccgagtctggtggc

SEQ ID NO: 22993 - DNA, 20 bp, Artificial Sequence
  MKO10022993_A_Grin2c
  gRNA
cgacggcgcgcacgccctcg

SEQ ID NO: 22994 - DNA, 20 bp, Artificial Sequence
  MKO10022994_A_Grin2c
  gRNA
ccagaatggctacaccgtcg

SEQ ID NO: 22995 - DNA, 20 bp, Artificial Sequence
  MKO10022995_A_Grin2c
  gRNA
gttctcctacgacttgtacc

SEQ ID NO: 22996 - DNA, 20 bp, Artificial Sequence
  MKO10022996_A_Grin2d
  gRNA
tgacgacttggcacgtcgag

SEQ ID NO: 22997 - DNA, 20 bp, Artificial Sequence
  MKO10022997_A_Grin2d
  gRNA
gcagtgactacgcgtgcccc

SEQ ID NO: 22998 - DNA, 20 bp, Artificial Sequence
  MKO10022998_A_Grin2d
  gRNA
ctttctggtaaacccgtcac

SEQ ID NO: 22999 - DNA, 20 bp, Artificial Sequence
  MKO10022999_A_Grin3a
  gRNA
aacttgcagtatgaccctat

SEQ ID NO: 23000 - DNA, 20 bp, Artificial Sequence
  MKO10023000_A_Grin3a
  gRNA
aaagccaatgtggactcgcc

SEQ ID NO: 23001 - DNA, 20 bp, Artificial Sequence
  MKO10023001_A_Grin3a
  gRNA
tgatgttgatgatagactcg

SEQ ID NO: 23002 - DNA, 20 bp, Artificial Sequence
  MKO10023002_A_Grin3b
  gRNA
ccctacgggctcacgccacg

SEQ ID NO: 23003 - DNA, 20 bp, Artificial Sequence
  MKO10023003_A_Grin3b
  gRNA
gcactcaccctcgatcgcaa

SEQ ID NO: 23004 - DNA, 20 bp, Artificial Sequence
  MKO10023004_A_Grin3b
  gRNA
cagcttgcagtccgcatcta

SEQ ID NO: 23005 - DNA, 20 bp, Artificial Sequence
  MKO10023005_A_Grina
  gRNA
ggagattgtatacgcctcgc

SEQ ID NO: 23006 - DNA, 20 bp, Artificial Sequence
  MKO10023006_A_Grina
  gRNA
ctgggacaagaacattcgcc

SEQ ID NO: 23007 - DNA, 20 bp, Artificial Sequence
  MKO10023007_A_Grina
  gRNA
gaccgtcagcttgtcctaca

SEQ ID NO: 23008 - DNA, 20 bp, Artificial Sequence
  MKO10023008_A_Grip1
  gRNA
caatgcctcccgataccgtc

SEQ ID NO: 23009 - DNA, 20 bp, Artificial Sequence
  MKO10023009_A_Grip1
  gRNA
gatctcatcgtggcggaact

SEQ ID NO: 23010 - DNA, 20 bp, Artificial Sequence
  MKO10023010_A_Grip1
  gRNA
gaagctcgtactcgacctcc

SEQ ID NO: 23011 - DNA, 20 bp, Artificial Sequence
  MKO10023011_A_Grip2
  gRNA
gatggatcccgttcactgag

SEQ ID NO: 23012 - DNA, 20 bp, Artificial Sequence
  MKO10023012_A_Grip2
  gRNA
gtgtgatgatctcgtcatgt

SEQ ID NO: 23013 - DNA, 20 bp, Artificial Sequence
  MKO10023013_A_Grip2
  gRNA
accgtcttggaaatgatcct

SEQ ID NO: 23014 - DNA, 20 bp, Artificial Sequence
  MKO10023014_A_Gripap1
  gRNA
ggcgaccttctgtcgaagac

SEQ ID NO: 23015 - DNA, 20 bp, Artificial Sequence
  MKO10023015_A_Gripap1
  gRNA
tccgaagttcatccgaaagc

SEQ ID NO: 23016 - DNA, 20 bp, Artificial Sequence
  MKO10023016_A_Gripap1
  gRNA
actttccagtcttcgacaga

SEQ ID NO: 23017 - DNA, 20 bp, Artificial Sequence
  MKO10023017_A_Grk1
  gRNA
tacgagatgatcgcagccag

SEQ ID NO: 23018 - DNA, 20 bp, Artificial Sequence
  MKO10023018_A_Grk1
  gRNA
aataagaccaagggctacgc

SEQ ID NO: 23019 - DNA, 20 bp, Artificial Sequence
  MKO10023019_A_Grk1
  gRNA
tctcgtacaatgtgaccccc

SEQ ID NO: 23020 - DNA, 20 bp, Artificial Sequence
  MKO10023020_A_Grk4
  gRNA
gtacgaagttaccattgaag

SEQ ID NO: 23021 - DNA, 20 bp, Artificial Sequence
  MKO10023021_A_Grk4
  gRNA
ctgttgctgaaggcccgtct

SEQ ID NO: 23022 - DNA, 20 bp, Artificial Sequence
  MKO10023022_A_Grk4
  gRNA
ctttgcgacaaacagccaat

SEQ ID NO: 23023 - DNA, 20 bp, Artificial Sequence
  MKO10023023_A_Grk5
  gRNA
ttcgacagttctgtgaaacc

SEQ ID NO: 23024 - DNA, 20 bp, Artificial Sequence
  MKO10023024_A_Grk5
  gRNA
agaccaggtcctgtccaact

SEQ ID NO: 23025 - DNA, 20 bp, Artificial Sequence
  MKO10023025_A_Grk5
  gRNA
gctccttacctatggtcctt

SEQ ID NO: 23026 - DNA, 20 bp, Artificial Sequence
  MKO10023026_A_Grk6
  gRNA
tacgatgttctcgagctcca

SEQ ID NO: 23027 - DNA, 20 bp, Artificial Sequence
  MKO10023027_A_Grk6
  gRNA
cgagaacatcgtagcgaaca

SEQ ID NO: 23028 - DNA, 20 bp, Artificial Sequence
  MKO10023028_A_Grk6
  gRNA
caatgggctggcgctcacat

SEQ ID NO: 23029 - DNA, 20 bp, Artificial Sequence
  MKO10023029_A_Grlf1
  gRNA
agtgctgaagaagttcccga

SEQ ID NO: 23030 - DNA, 20 bp, Artificial Sequence
  MKO10023030_A_Grlf1
  gRNA
attgagtacatcgaagccac

SEQ ID NO: 23031 - DNA, 20 bp, Artificial Sequence
  MKO10023031_A_Grlf1
  gRNA
ctctttcagaaatcaacgac

SEQ ID NO: 23032 - DNA, 20 bp, Artificial Sequence
  MKO10023032_A_Grm1
  gRNA
cgatgcttgatatcgtcaag

SEQ ID NO: 23033 - DNA, 20 bp, Artificial Sequence
  MKO10023033_A_Grm1
  gRNA
ctgagtgccatgcgccgcct

SEQ ID NO: 23034 - DNA, 20 bp, Artificial Sequence
  MKO10023034_A_Grm1
  gRNA
agaactctcccacgacgcca

SEQ ID NO: 23035 - DNA, 20 bp, Artificial Sequence
  MKO10023035_A_Grm2
  gRNA
gcggcataacgccacacccg

SEQ ID NO: 23036 - DNA, 20 bp, Artificial Sequence
  MKO10023036_A_Grm2
  gRNA
aatcgcatcgctcgcatctt

SEQ ID NO: 23037 - DNA, 20 bp, Artificial Sequence
  MKO10023037_A_Grm2
  gRNA
tcgggcacgcaacatctgcg

SEQ ID NO: 23038 - DNA, 20 bp, Artificial Sequence
  MKO10023038_A_Grm3
  gRNA
ctcacggatcacgctgtcgt

SEQ ID NO: 23039 - DNA, 20 bp, Artificial Sequence
  MKO10023039_A_Grm3
  gRNA
gaaacctaacgcgcgagttg

SEQ ID NO: 23040 - DNA, 20 bp, Artificial Sequence
  MKO10023040_A_Grm3
  gRNA
atctgtgcattgcgccgact

SEQ ID NO: 23041 - DNA, 20 bp, Artificial Sequence
  MKO10023041_A_Grm4
  gRNA
gccgcacgcttgacaacaac

SEQ ID NO: 23042 - DNA, 20 bp, Artificial Sequence
  MKO10023042_A_Grm4
  gRNA
gagggtagctacggcgagag

SEQ ID NO: 23043 - DNA, 20 bp, Artificial Sequence
  MKO10023043_A_Grm4
  gRNA
atgtgtccgagggcacgacc

SEQ ID NO: 23044 - DNA, 20 bp, Artificial Sequence
  MKO10023044_A_Grm5
  gRNA
atgagacgcttgggtctagc

SEQ ID NO: 23045 - DNA, 20 bp, Artificial Sequence
  MKO10023045_A_Grm5
  gRNA
ccgctccaagaaacccatag

SEQ ID NO: 23046 - DNA, 20 bp, Artificial Sequence
  MKO10023046_A_Grm5
  gRNA
ggcttggtacgctgtgtaga

SEQ ID NO: 23047 - DNA, 20 bp, Artificial Sequence
  MKO10023047_A_Grm6
  gRNA
gatgatgatgccccgggcgt

SEQ ID NO: 23048 - DNA, 20 bp, Artificial Sequence
  MKO10023048_A_Grm6
  gRNA
accgtcgattgaagcccttt

SEQ ID NO: 23049 - DNA, 20 bp, Artificial Sequence
  MKO10023049_A_Grm6
  gRNA
atactttatgactcgttccc

SEQ ID NO: 23050 - DNA, 20 bp, Artificial Sequence
  MKO10023050_A_Grm7
  gRNA
gacacggatcgcaaatgcac

SEQ ID NO: 23051 - DNA, 20 bp, Artificial Sequence
  MKO10023051_A_Grm7
  gRNA
ccaacctaagagagcgactg

SEQ ID NO: 23052 - DNA, 20 bp, Artificial Sequence
  MKO10023052_A_Grm7
  gRNA
ctatgacttcttctctcgcg

SEQ ID NO: 23053 - DNA, 20 bp, Artificial Sequence
  MKO10023053_A_Grm8
  gRNA
cataatcactgcgcgagcgt

SEQ ID NO: 23054 - DNA, 20 bp, Artificial Sequence
  MKO10023054_A_Grm8
  gRNA
aaaaattatcaaacgcctgc

SEQ ID NO: 23055 - DNA, 20 bp, Artificial Sequence
  MKO10023055_A_Grm8
  gRNA
tatggattggctcagatagt

SEQ ID NO: 23056 - DNA, 20 bp, Artificial Sequence
  MKO10023056_A_Grn
  gRNA
ataacgagccatcatctaga

SEQ ID NO: 23057 - DNA, 20 bp, Artificial Sequence
  MKO10023057_A_Grn
  gRNA
ggctaccagccctgccgcga

SEQ ID NO: 23058 - DNA, 20 bp, Artificial Sequence
  MKO10023058_A_Grn
  gRNA
gccggaacacagtgtccaga

SEQ ID NO: 23059 - DNA, 20 bp, Artificial Sequence
  MKO10023059_A_Grpel1
  gRNA
gttcgacccttacgaacatg

SEQ ID NO: 23060 - DNA, 20 bp, Artificial Sequence
  MKO10023060_A_Grpel1
  gRNA
gtagctgtgcacaacaagcg

SEQ ID NO: 23061 - DNA, 20 bp, Artificial Sequence
  MKO10023061_A_Grpel1
  gRNA
aacaaggcctcatgttcgta

SEQ ID NO: 23062 - DNA, 20 bp, Artificial Sequence
  MKO10023062_A_Grpel2
  gRNA
acatggcggcgcgttcgctg

SEQ ID NO: 23063 - DNA, 20 bp, Artificial Sequence
  MKO10023063_A_Grpel2
  gRNA
tactactcacggttaaatcc

SEQ ID NO: 23064 - DNA, 20 bp, Artificial Sequence
  MKO10023064_A_Grpel2
  gRNA
cacaatcagcgacagctctc

SEQ ID NO: 23065 - DNA, 20 bp, Artificial Sequence
  MKO10023065_A_Grpr
  gRNA
atcatcgtgataggtcttat

SEQ ID NO: 23066 - DNA, 20 bp, Artificial Sequence
  MKO10023066_A_Grpr
  gRNA
gcggcttgccaagacagtac

SEQ ID NO: 23067 - DNA, 20 bp, Artificial Sequence
  MKO10023067_A_Grpr
  gRNA
gagtgcctacaatcttcccg

SEQ ID NO: 23068 - DNA, 20 bp, Artificial Sequence
  MKO10023068_A_Grp
  gRNA
tgtatccgcgcggcagtcac

SEQ ID NO: 23069 - DNA, 20 bp, Artificial Sequence
  MKO10023069_A_Grp
  gRNA
taacgacgttcaaaccgcta

SEQ ID NO: 23070 - DNA, 20 bp, Artificial Sequence
  MKO10023070_A_Grp
  gRNA
cgtctctgtcagccgcatac

SEQ ID NO: 23071 - DNA, 20 bp, Artificial Sequence
  MKO10023071_A_Grrp1
  gRNA
gcgattggacatccagcgac

SEQ ID NO: 23072 - DNA, 20 bp, Artificial Sequence
  MKO10023072_A_Grrp1
  gRNA
gcgttccaccaccgacaccg

SEQ ID NO: 23073 - DNA, 20 bp, Artificial Sequence
  MKO10023073_A_Grrp1
  gRNA
aatcgctctttctccgacag

SEQ ID NO: 23074 - DNA, 20 bp, Artificial Sequence
  MKO10023074_A_Grsf1
  gRNA
tgtttatctcattcgagctc

SEQ ID NO: 23075 - DNA, 20 bp, Artificial Sequence
  MKO10023075_A_Grsf1
  gRNA
atccacctcgtctcctagct

SEQ ID NO: 23076 - DNA, 20 bp, Artificial Sequence
  MKO10023076_A_Grsf1
  gRNA
accgctgccccatgtacatc

SEQ ID NO: 23077 - DNA, 20 bp, Artificial Sequence
  MKO10023077_A_Grtp1
  gRNA
atactaccatcgactgctcg

SEQ ID NO: 23078 - DNA, 20 bp, Artificial Sequence
  MKO10023078_A_Grtp1
  gRNA
tctcgccctcgagcagtcga

SEQ ID NO: 23079 - DNA, 20 bp, Artificial Sequence
  MKO10023079_A_Grtp1
  gRNA
tcaccaagagggcgatcaaa

SEQ ID NO: 23080 - DNA, 20 bp, Artificial Sequence
  MKO10023080_A_Grwd1
  gRNA
cggttgatgccaccgtagtg

SEQ ID NO: 23081 - DNA, 20 bp, Artificial Sequence
  MKO10023081_A_Grwd1
  gRNA
ccgcctgggttcccgcacac

SEQ ID NO: 23082 - DNA, 20 bp, Artificial Sequence
  MKO10023082_A_Grwd1
  gRNA
ccaaactcaccgggcacccg

SEQ ID NO: 23083 - DNA, 20 bp, Artificial Sequence
  MKO10023083_A_Grxcr1
  gRNA
aaggacactcgtgcggatgc

SEQ ID NO: 23084 - DNA, 20 bp, Artificial Sequence
  MKO10023084_A_Grxcr1
  gRNA
aaccagttcgcatctctcga

SEQ ID NO: 23085 - DNA, 20 bp, Artificial Sequence
  MKO10023085_A_Grxcr1
  gRNA
gaccttcgagagatgcgaac

SEQ ID NO: 23086 - DNA, 20 bp, Artificial Sequence
  MKO10023086_A_Grxcr2
  gRNA
tgccccctgccggagcggaa

SEQ ID NO: 23087 - DNA, 20 bp, Artificial Sequence
  MKO10023087_A_Grxcr2
  gRNA
gaaaatcatccgaaccccga

SEQ ID NO: 23088 - DNA, 20 bp, Artificial Sequence
  MKO10023088_A_Grxcr2
  gRNA
tgccctgcctgcaacgagaa

SEQ ID NO: 23089 - DNA, 20 bp, Artificial Sequence
  MKO10023089_A_Gsap
  gRNA
gtcattctttactccctctg

SEQ ID NO: 23090 - DNA, 20 bp, Artificial Sequence
  MKO10023090_A_Gsap
  gRNA
ttgccaaaccagacagaatg

SEQ ID NO: 23091 - DNA, 20 bp, Artificial Sequence
  MKO10023091_A_Gsap
  gRNA
gtaaagaatgaccttcagcc

SEQ ID NO: 23092 - DNA, 20 bp, Artificial Sequence
  MKO10023092_A_Gsc2
  gRNA
cgccgagctagacgaacccg

SEQ ID NO: 23093 - DNA, 20 bp, Artificial Sequence
  MKO10023093_A_Gsc2
  gRNA
ggcggggttccgaccaccga

SEQ ID NO: 23094 - DNA, 20 bp, Artificial Sequence
  MKO10023094_A_Gsc2
  gRNA
gcgttcgcgtgtgcctacgt

SEQ ID NO: 23095 - DNA, 20 bp, Artificial Sequence
  MKO10023095_A_Gsc
  gRNA
gactcgctctacggcgccgg

SEQ ID NO: 23096 - DNA, 20 bp, Artificial Sequence
  MKO10023096_A_Gsc
  gRNA
gtagaaggcgccgtagtccg

SEQ ID NO: 23097 - DNA, 20 bp, Artificial Sequence
  MKO10023097_A_Gsc
  gRNA
cgatgagcagctcgaagccc

SEQ ID NO: 23098 - DNA, 20 bp, Artificial Sequence
  MKO10023098_A_Gsdma2
  gRNA
gtgagacaactgatcatcta

SEQ ID NO: 23099 - DNA, 20 bp, Artificial Sequence
  MKO10023099_A_Gsdma2
  gRNA
agtactgtccagatgatatc

SEQ ID NO: 23100 - DNA, 20 bp, Artificial Sequence
  MKO10023100_A_Gsdma2
  gRNA
ccagcgtgctgctttgtgac

SEQ ID NO: 23101 - DNA, 20 bp, Artificial Sequence
  MKO10023101_A_Gsdma3
  gRNA
catgatacctcatctcgttc

SEQ ID NO: 23102 - DNA, 20 bp, Artificial Sequence
  MKO10023102_A_Gsdma3
  gRNA
tacacgcctgatcttaggga

SEQ ID NO: 23103 - DNA, 20 bp, Artificial Sequence
  MKO10023103_A_Gsdma3
  gRNA
tctcagtagtctcactcgat

SEQ ID NO: 23104 - DNA, 20 bp, Artificial Sequence
  MKO10023104_A_Gsdma
  gRNA
acgcggggagaacctctatg

SEQ ID NO: 23105 - DNA, 20 bp, Artificial Sequence
  MKO10023105_A_Gsdma
  gRNA
ctatcgagtgagacaactga

SEQ ID NO: 23106 - DNA, 20 bp, Artificial Sequence
  MKO10023106_A_Gsdma
  gRNA
cactctggagcgagccggca

SEQ ID NO: 23107 - DNA, 20 bp, Artificial Sequence
  MKO10023107_A_Gsdmc2
  gRNA
agtgtcaatctttcagttaa

SEQ ID NO: 23108 - DNA, 20 bp, Artificial Sequence
  MKO10023108_A_Gsdmc2
  gRNA
atttatagaacagaattgca

SEQ ID NO: 23109 - DNA, 20 bp, Artificial Sequence
  MKO10023109_A_Gsdmc2
  gRNA
cttcatacatgtccaatcaa

SEQ ID NO: 23110 - DNA, 20 bp, Artificial Sequence
  MKO10023110_A_Gsdmc3
  gRNA
aagaagaagatgacctttcc

SEQ ID NO: 23111 - DNA, 20 bp, Artificial Sequence
  MKO10023111_A_Gsdmc3
  gRNA
agaggcttatgaagtgtcca

SEQ ID NO: 23112 - DNA, 20 bp, Artificial Sequence
  MKO10023112_A_Gsdmc3
  gRNA
atttatagaacagaattaca

SEQ ID NO: 23113 - DNA, 20 bp, Artificial Sequence
  MKO10023113_A_Gsdmc4
  gRNA
tcctgatatcttagcgttac

SEQ ID NO: 23114 - DNA, 20 bp, Artificial Sequence
  MKO10023114_A_Gsdmc4
  gRNA
acctgtaacgctaagatatc

SEQ ID NO: 23115 - DNA, 20 bp, Artificial Sequence
  MKO10023115_A_Gsdmc4
  gRNA
acatgtccaatcaacagacc

SEQ ID NO: 23116 - DNA, 20 bp, Artificial Sequence
  MKO10023116_A_Gsdmc
  gRNA
ctggatgtcgaaaccattgc

SEQ ID NO: 23117 - DNA, 20 bp, Artificial Sequence
  MKO10023117_A_Gsdmc
  gRNA
aacctcgatgtcatatccac

SEQ ID NO: 23118 - DNA, 20 bp, Artificial Sequence
  MKO10023118_A_Gsdmc
  gRNA
gtctggacatctaagatatc

SEQ ID NO: 23119 - DNA, 20 bp, Artificial Sequence
  MKO10023119_A_Gsdmd
  gRNA
aaagtctctgatgtcgtcga

SEQ ID NO: 23120 - DNA, 20 bp, Artificial Sequence
  MKO10023120_A_Gsdmd
  gRNA
cacgactccgaagctgttgc

SEQ ID NO: 23121 - DNA, 20 bp, Artificial Sequence
  MKO10023121_A_Gsdmd
  gRNA
tcgtggggatgacctgtttg

SEQ ID NO: 23122 - DNA, 20 bp, Artificial Sequence
  MKO10023122_A_Gse1
  gRNA
ctgggccgacagcgtactgc

SEQ ID NO: 23123 - DNA, 20 bp, Artificial Sequence
  MKO10023123_A_Gse1
  gRNA
cagtggtcgggagcgcctat

SEQ ID NO: 23124 - DNA, 20 bp, Artificial Sequence
  MKO10023124_A_Gse1
  gRNA
ccgggctaccggtgggcacc

SEQ ID NO: 23125 - DNA, 20 bp, Artificial Sequence
  MKO10023125_A_Gsg1l
  gRNA
ctatgaacgtcggctcctcc

SEQ ID NO: 23126 - DNA, 20 bp, Artificial Sequence
  MKO10023126_A_Gsg1l
  gRNA
ccatcaaatacttccgggag

SEQ ID NO: 23127 - DNA, 20 bp, Artificial Sequence
  MKO10023127_A_Gsg1l
  gRNA
cactccagcagcgtcataga

SEQ ID NO: 23128 - DNA, 20 bp, Artificial Sequence
  MKO10023128_A_Gsg1
  gRNA
gatgagttgaagtccgatat

SEQ ID NO: 23129 - DNA, 20 bp, Artificial Sequence
  MKO10023129_A_Gsg1
  gRNA
gtgacatgagccttgcaacg

SEQ ID NO: 23130 - DNA, 20 bp, Artificial Sequence
  MKO10023130_A_Gsg1
  gRNA
cgcgtttgcagccgtctcct

SEQ ID NO: 23131 - DNA, 20 bp, Artificial Sequence
  MKO10023131_A_Gsg2
  gRNA
ccggctctttcgaacgtacg

SEQ ID NO: 23132 - DNA, 20 bp, Artificial Sequence
  MKO10023132_A_Gsg2
  gRNA
cagcgacagtaacgagtcgc

SEQ ID NO: 23133 - DNA, 20 bp, Artificial Sequence
  MKO10023133_A_Gsg2
  gRNA
ccgcgtacgttcgaaagagc

SEQ ID NO: 23134 - DNA, 20 bp, Artificial Sequence
  MKO10023134_A_Gsk3a
  gRNA
actgcagattatgcgtaagc

SEQ ID NO: 23135 - DNA, 20 bp, Artificial Sequence
  MKO10023135_A_Gsk3a
  gRNA
ctcattcggagtagtatacc

SEQ ID NO: 23136 - DNA, 20 bp, Artificial Sequence
  MKO10023136_A_Gsk3a
  gRNA
ttccttaggtgacagcggga

SEQ ID NO: 23137 - DNA, 20 bp, Artificial Sequence
  MKO10023137_A_Gsk3b
  gRNA
actgtaacatagtccgactg

SEQ ID NO: 23138 - DNA, 20 bp, Artificial Sequence
  MKO10023138_A_Gsk3b
  gRNA
cgtaccttgacatagatcac

SEQ ID NO: 23139 - DNA, 20 bp, Artificial Sequence
  MKO10023139_A_Gsk3b
  gRNA
agtagaagaaataccgcagt

SEQ ID NO: 23140 - DNA, 20 bp, Artificial Sequence
  MKO10023140_A_Gskip
  gRNA
gcgcgtttccgaatgcttcc

SEQ ID NO: 23141 - DNA, 20 bp, Artificial Sequence
  MKO10023141_A_Gskip
  gRNA
ataagaacatgggcgctcgc

SEQ ID NO: 23142 - DNA, 20 bp, Artificial Sequence
  MKO10023142_A_Gskip
  gRNA
ggaaacagactataatcccg

SEQ ID NO: 23143 - DNA, 20 bp, Artificial Sequence
  MKO10023143_A_Gsn
  gRNA
tgcagtatgacctccactat

SEQ ID NO: 23144 - DNA, 20 bp, Artificial Sequence
  MKO10023144_A_Gsn
  gRNA
ctacacggcgtcctttgacc

SEQ ID NO: 23145 - DNA, 20 bp, Artificial Sequence
  MKO10023145_A_Gsn
  gRNA
ccgtgtagtccgtgctactg

SEQ ID NO: 23146 - DNA, 20 bp, Artificial Sequence
  MKO10023146_A_Gspt1
  gRNA
acggcacgaattcagcggcg

SEQ ID NO: 23147 - DNA, 20 bp, Artificial Sequence
  MKO10023147_A_Gspt1
  gRNA
tcgcctccggctgcgccagc

SEQ ID NO: 23148 - DNA, 20 bp, Artificial Sequence
  MKO10023148_A_Gspt1
  gRNA
aaaacttaccttcacacgac

SEQ ID NO: 23149 - DNA, 20 bp, Artificial Sequence
  MKO10023149_A_Gspt2
  gRNA
cgtgcctagcgtaagcgcag

SEQ ID NO: 23150 - DNA, 20 bp, Artificial Sequence
  MKO10023150_A_Gspt2
  gRNA
ggggcgattccatccccgct

SEQ ID NO: 23151 - DNA, 20 bp, Artificial Sequence
  MKO10023151_A_Gspt2
  gRNA
aactccgctgcgcttacgct

SEQ ID NO: 23152 - DNA, 20 bp, Artificial Sequence
  MKO10023152_A_Gsr
  gRNA
ctgcgaatgttgcatagccg

SEQ ID NO: 23153 - DNA, 20 bp, Artificial Sequence
  MKO10023153_A_Gsr
  gRNA
atgcacgatcacgtggatta

SEQ ID NO: 23154 - DNA, 20 bp, Artificial Sequence
  MKO10023154_A_Gsr
  gRNA
aactgtgggcacgcctcctg

SEQ ID NO: 23155 - DNA, 20 bp, Artificial Sequence
  MKO10023155_A_Gss
  gRNA
tggagccgtctgcgccgcac

SEQ ID NO: 23156 - DNA, 20 bp, Artificial Sequence
  MKO10023156_A_Gss
  gRNA
acatgtaatctgagcgattc

SEQ ID NO: 23157 - DNA, 20 bp, Artificial Sequence
  MKO10023157_A_Gss
  gRNA
acctagacagtgtttgctcc

SEQ ID NO: 23158 - DNA, 20 bp, Artificial Sequence
  MKO10023158_A_Gsta1
  gRNA
agagaagtttatacagagtc

SEQ ID NO: 23159 - DNA, 20 bp, Artificial Sequence
  MKO10023159_A_Gsta1
  gRNA
gatttggaaaagctaaaaaa

SEQ ID NO: 23160 - DNA, 20 bp, Artificial Sequence
  MKO10023160_A_Gsta1
  gRNA
ccttcatgtccttcccatag

SEQ ID NO: 23161 - DNA, 20 bp, Artificial Sequence
  MKO10023161_A_Gsta2
  gRNA
catagagaagaagttccagc

SEQ ID NO: 23162 - DNA, 20 bp, Artificial Sequence
  MKO10023162_A_Gsta2
  gRNA
agagaagtttatacagagtc

SEQ ID NO: 23163 - DNA, 20 bp, Artificial Sequence
  MKO10023163_A_Gsta2
  gRNA
gatttggaaaagctaaaaaa

SEQ ID NO: 23164 - DNA, 20 bp, Artificial Sequence
  MKO10023164_A_Gsta3
  gRNA
aagattatctcgttggcaac

SEQ ID NO: 23165 - DNA, 20 bp, Artificial Sequence
  MKO10023165_A_Gsta3
  gRNA
gagcagggctgatattgccc

SEQ ID NO: 23166 - DNA, 20 bp, Artificial Sequence
  MKO10023166_A_Gsta3
  gRNA
gacctggcaaggttacgaag

SEQ ID NO: 23167 - DNA, 20 bp, Artificial Sequence
  MKO10023167_A_Gsta4
  gRNA
gtacccttggttgaaatcga

SEQ ID NO: 23168 - DNA, 20 bp, Artificial Sequence
  MKO10023168_A_Gsta4
  gRNA
caacgagaaaagcctctccg

SEQ ID NO: 23169 - DNA, 20 bp, Artificial Sequence
  MKO10023169_A_Gsta4
  gRNA
gtccgacttccctctgctgc

SEQ ID NO: 23170 - DNA, 20 bp, Artificial Sequence
  MKO10023170_A_Gstcd
  gRNA
tcctgctgccgtcagcccga

SEQ ID NO: 23171 - DNA, 20 bp, Artificial Sequence
  MKO10023171_A_Gstcd
  gRNA
accgactatgaccaagttga

SEQ ID NO: 23172 - DNA, 20 bp, Artificial Sequence
  MKO10023172_A_Gstcd
  gRNA
agccgccgacctcccgcctc

SEQ ID NO: 23173 - DNA, 20 bp, Artificial Sequence
  MKO10023173_A_Gstk1
  gRNA
ttgcggcccactttaatcgc

SEQ ID NO: 23174 - DNA, 20 bp, Artificial Sequence
  MKO10023174_A_Gstk1
  gRNA
catgatcccagcgattaaag

SEQ ID NO: 23175 - DNA, 20 bp, Artificial Sequence
  MKO10023175_A_Gstk1
  gRNA
gagagatatggatgcgtgta

SEQ ID NO: 23176 - DNA, 20 bp, Artificial Sequence
  MKO10023176_A_Gstm1
  gRNA
ggtggcattaccgtcaccca

SEQ ID NO: 23177 - DNA, 20 bp, Artificial Sequence
  MKO10023177_A_Gstm1
  gRNA
ccttgcccgaaagcaccacc

SEQ ID NO: 23178 - DNA, 20 bp, Artificial Sequence
  MKO10023178_A_Gstm1
  gRNA
actcacccaggtggtgcttt

SEQ ID NO: 23179 - DNA, 20 bp, Artificial Sequence
  MKO10023179_A_Gstm2
  gRNA
ggtgtaatcaccgtccccca

SEQ ID NO: 23180 - DNA, 20 bp, Artificial Sequence
  MKO10023180_A_Gstm2
  gRNA
cagctgccctacttgattga

SEQ ID NO: 23181 - DNA, 20 bp, Artificial Sequence
  MKO10023181_A_Gstm2
  gRNA
actcacacaggttgtgcttt

SEQ ID NO: 23182 - DNA, 20 bp, Artificial Sequence
  MKO10023182_A_Gstm3
  gRNA
tcactccatccgcttgctcc

SEQ ID NO: 23183 - DNA, 20 bp, Artificial Sequence
  MKO10023183_A_Gstm3
  gRNA
agactatcatgagctgtatg

SEQ ID NO: 23184 - DNA, 20 bp, Artificial Sequence
  MKO10023184_A_Gstm3
  gRNA
cacttacattgggaaaatcc

SEQ ID NO: 23185 - DNA, 20 bp, Artificial Sequence
  MKO10023185_A_Gstm4
  gRNA
aatagcattaccgtctccca

SEQ ID NO: 23186 - DNA, 20 bp, Artificial Sequence
  MKO10023186_A_Gstm4
  gRNA
tatggatgtctccaatcagc

SEQ ID NO: 23187 - DNA, 20 bp, Artificial Sequence
  MKO10023187_A_Gstm4
  gRNA
acagactcgagccagctgat

SEQ ID NO: 23188 - DNA, 20 bp, Artificial Sequence
  MKO10023188_A_Gstm5
  gRNA
gcttgcgtgcgatgtatctc

SEQ ID NO: 23189 - DNA, 20 bp, Artificial Sequence
  MKO10023189_A_Gstm5
  gRNA
catggacttccgcatgcagc

SEQ ID NO: 23190 - DNA, 20 bp, Artificial Sequence
  MKO10023190_A_Gstm5
  gRNA
tcatgctatccgcatgcttc

SEQ ID NO: 23191 - DNA, 20 bp, Artificial Sequence
  MKO10023191_A_Gstm6
  gRNA
catggacactcgaattcaga

SEQ ID NO: 23192 - DNA, 20 bp, Artificial Sequence
  MKO10023192_A_Gstm6
  gRNA
gtttctccaaaatgtccaca

SEQ ID NO: 23193 - DNA, 20 bp, Artificial Sequence
  MKO10023193_A_Gstm6
  gRNA
tgacaagttcaagctggacc

SEQ ID NO: 23194 - DNA, 20 bp, Artificial Sequence
  MKO10023194_A_Gstm7
  gRNA
tcagcttatggacaaccgca

SEQ ID NO: 23195 - DNA, 20 bp, Artificial Sequence
  MKO10023195_A_Gstm7
  gRNA
tacttacgttaggaaagtcc

SEQ ID NO: 23196 - DNA, 20 bp, Artificial Sequence
  MKO10023196_A_Gstm7
  gRNA
ccatgccattcgcctgttcc

SEQ ID NO: 23197 - DNA, 20 bp, Artificial Sequence
  MKO10023197_A_Gsto1
  gRNA
tccagatgacccgtacaaga

SEQ ID NO: 23198 - DNA, 20 bp, Artificial Sequence
  MKO10023198_A_Gsto1
  gRNA
tcgtcctcaccggattccct

SEQ ID NO: 23199 - DNA, 20 bp, Artificial Sequence
  MKO10023199_A_Gsto1
  gRNA
cttcgctcagaggacgctga

SEQ ID NO: 23200 - DNA, 20 bp, Artificial Sequence
  MKO10023200_A_Gsto2
  gRNA
ccatgattgattacctcgtc

SEQ ID NO: 23201 - DNA, 20 bp, Artificial Sequence
  MKO10023201_A_Gsto2
  gRNA
tatacagtctccgccgaaga

SEQ ID NO: 23202 - DNA, 20 bp, Artificial Sequence
  MKO10023202_A_Gsto2
  gRNA
gctcgttcatacgggtcata

SEQ ID NO: 23203 - DNA, 20 bp, Artificial Sequence
  MKO10023203_A_Gstp1
  gRNA
gtcagccagcagcattcgca

SEQ ID NO: 23204 - DNA, 20 bp, Artificial Sequence
  MKO10023204_A_Gstp1
  gRNA
attgtctacttcccagttcg

SEQ ID NO: 23205 - DNA, 20 bp, Artificial Sequence
  MKO10023205_A_Gstp1
  gRNA
tcacatagttggtgtagatg

SEQ ID NO: 23206 - DNA, 20 bp, Artificial Sequence
  MKO10023206_A_Gstp2
  gRNA
gtcagccagcagcatgcgca

SEQ ID NO: 23207 - DNA, 20 bp, Artificial Sequence
  MKO10023207_A_Gstp2
  gRNA
gcgcatgctgctggctgacc

SEQ ID NO: 23208 - DNA, 20 bp, Artificial Sequence
  MKO10023208_A_Gstp2
  gRNA
cacatagtttctgtagatca

SEQ ID NO: 23209 - DNA, 20 bp, Artificial Sequence
  MKO10023209_A_Gstt1
  gRNA
acctcagcgatgcgtttgcc

SEQ ID NO: 23210 - DNA, 20 bp, Artificial Sequence
  MKO10023210_A_Gstt1
  gRNA
ctacacgagcacgagcctgc

SEQ ID NO: 23211 - DNA, 20 bp, Artificial Sequence
  MKO10023211_A_Gstt1
  gRNA
agaactggatgttaacctac

SEQ ID NO: 23212 - DNA, 20 bp, Artificial Sequence
  MKO10023212_A_Gstt2
  gRNA
ctggtacccggccgacctac

SEQ ID NO: 23213 - DNA, 20 bp, Artificial Sequence
  MKO10023213_A_Gstt2
  gRNA
gatccgctagcgtcacctgc

SEQ ID NO: 23214 - DNA, 20 bp, Artificial Sequence
  MKO10023214_A_Gstt2
  gRNA
tgcccaagtccacgaatacc

SEQ ID NO: 23215 - DNA, 20 bp, Artificial Sequence
  MKO10023215_A_Gstt3
  gRNA
ccccgaccactggtaccctc

SEQ ID NO: 23216 - DNA, 20 bp, Artificial Sequence
  MKO10023216_A_Gstt3
  gRNA
gtacacagattccttcgccc

SEQ ID NO: 23217 - DNA, 20 bp, Artificial Sequence
  MKO10023217_A_Gstt3
  gRNA
gggacttcgtcttggcagag

SEQ ID NO: 23218 - DNA, 20 bp, Artificial Sequence
  MKO10023218_A_Gstt4
  gRNA
caaatcctcatcttgatcgt

SEQ ID NO: 23219 - DNA, 20 bp, Artificial Sequence
  MKO10023219_A_Gstt4
  gRNA
tagaccctacgatcaagatg

SEQ ID NO: 23220 - DNA, 20 bp, Artificial Sequence
  MKO10023220_A_Gstt4
  gRNA
gcgcactgtacttgcgacat

SEQ ID NO: 23221 - DNA, 20 bp, Artificial Sequence
  MKO10023221_A_Gstz1
  gRNA
gtcagaaatcatgcgcacga

SEQ ID NO: 23222 - DNA, 20 bp, Artificial Sequence
  MKO10023222_A_Gstz1
  gRNA
atttctgacctcatcgctag

SEQ ID NO: 23223 - DNA, 20 bp, Artificial Sequence
  MKO10023223_A_Gstz1
  gRNA
aattcgaactctccatgaac

SEQ ID NO: 23224 - DNA, 20 bp, Artificial Sequence
  MKO10023224_A_Gsx1
  gRNA
gggcgcctgccacgcgcgca

SEQ ID NO: 23225 - DNA, 20 bp, Artificial Sequence
  MKO10023225_A_Gsx1
  gRNA
agtaaccaccgcggcggagc

SEQ ID NO: 23226 - DNA, 20 bp, Artificial Sequence
  MKO10023226_A_Gsx1
  gRNA
acatgtacctctcccgcctg

SEQ ID NO: 23227 - DNA, 20 bp, Artificial Sequence
  MKO10023227_A_Gsx2
  gRNA
catgtcgcgctccttctacg

SEQ ID NO: 23228 - DNA, 20 bp, Artificial Sequence
  MKO10023228_A_Gsx2
  gRNA
ggctgtccgtcccgcaaaag

SEQ ID NO: 23229 - DNA, 20 bp, Artificial Sequence
  MKO10023229_A_Gsx2
  gRNA
ggcgcattatgcgcgctccg

SEQ ID NO: 23230 - DNA, 20 bp, Artificial Sequence
  MKO10023230_A_Gtdc1
  gRNA
gatacaaccaaattctctcg

SEQ ID NO: 23231 - DNA, 20 bp, Artificial Sequence
  MKO10023231_A_Gtdc1
  gRNA
atacctaccacgagagaatt

SEQ ID NO: 23232 - DNA, 20 bp, Artificial Sequence
  MKO10023232_A_Gtdc1
  gRNA
tggaggctcccatcgacagc

SEQ ID NO: 23233 - DNA, 20 bp, Artificial Sequence
  MKO10023233_A_Gtf2a1l
  gRNA
tatccgatccacgtcccagc

SEQ ID NO: 23234 - DNA, 20 bp, Artificial Sequence
  MKO10023234_A_Gtf2a1l
  gRNA
gtctagaacaccgccaactg

SEQ ID NO: 23235 - DNA, 20 bp, Artificial Sequence
  MKO10023235_A_Gtf2a1l
  gRNA
aagctacgtaccaggtcttc

SEQ ID NO: 23236 - DNA, 20 bp, Artificial Sequence
  MKO10023236_A_Gtf2a1
  gRNA
tttgctgaggttgcgcttgc

SEQ ID NO: 23237 - DNA, 20 bp, Artificial Sequence
  MKO10023237_A_Gtf2a1
  gRNA
gcaagcgcaacctcagcaaa

SEQ ID NO: 23238 - DNA, 20 bp, Artificial Sequence
  MKO10023238_A_Gtf2a1
  gRNA
actgcctgcaggagtgactc

SEQ ID NO: 23239 - DNA, 20 bp, Artificial Sequence
  MKO10023239_A_Gtf2a2
  gRNA
agatactggctcgaatacta

SEQ ID NO: 23240 - DNA, 20 bp, Artificial Sequence
  MKO10023240_A_Gtf2a2
  gRNA
gagccttgatgagctcatac

SEQ ID NO: 23241 - DNA, 20 bp, Artificial Sequence
  MKO10023241_A_Gtf2a2
  gRNA
acagattctgcgataatgtt

SEQ ID NO: 23242 - DNA, 20 bp, Artificial Sequence
  MKO10023242_A_Gtf2b
  gRNA
gaacttacaactatattgcg

SEQ ID NO: 23243 - DNA, 20 bp, Artificial Sequence
  MKO10023243_A_Gtf2b
  gRNA
tgattcggacatgtgactct

SEQ ID NO: 23244 - DNA, 20 bp, Artificial Sequence
  MKO10023244_A_Gtf2b
  gRNA
tgagagtctccaactctaga

SEQ ID NO: 23245 - DNA, 20 bp, Artificial Sequence
  MKO10023245_A_Gtf2e1
  gRNA
tgatgtgcatcgcccctcgc

SEQ ID NO: 23246 - DNA, 20 bp, Artificial Sequence
  MKO10023246_A_Gtf2e1
  gRNA
ctttgttggtccacgcctct

SEQ ID NO: 23247 - DNA, 20 bp, Artificial Sequence
  MKO10023247_A_Gtf2e1
  gRNA
agagtcatcatctgactcgc

SEQ ID NO: 23248 - DNA, 20 bp, Artificial Sequence
  MKO10023248_A_Gtf2e2
  gRNA
gctactagacacgacatcag

SEQ ID NO: 23249 - DNA, 20 bp, Artificial Sequence
  MKO10023249_A_Gtf2e2
  gRNA
agatacacatcctctaacgt

SEQ ID NO: 23250 - DNA, 20 bp, Artificial Sequence
  MKO10023250_A_Gtf2e2
  gRNA
acattaccttgacagctttc

SEQ ID NO: 23251 - DNA, 20 bp, Artificial Sequence
  MKO10023251_A_Gtf2f1
  gRNA
cgacgtactcggtgacattc

SEQ ID NO: 23252 - DNA, 20 bp, Artificial Sequence
  MKO10023252_A_Gtf2f1
  gRNA
cctaaaggagtttcggcctg

SEQ ID NO: 23253 - DNA, 20 bp, Artificial Sequence
  MKO10023253_A_Gtf2f1
  gRNA
gtgaattcaaccgcaagctt

SEQ ID NO: 23254 - DNA, 20 bp, Artificial Sequence
  MKO10023254_A_Gtf2f2
  gRNA
ggtatcatttactttgaacg

SEQ ID NO: 23255 - DNA, 20 bp, Artificial Sequence
  MKO10023255_A_Gtf2f2
  gRNA
cttgcaaatattcatgacat

SEQ ID NO: 23256 - DNA, 20 bp, Artificial Sequence
  MKO10023256_A_Gtf2f2
  gRNA
cccaacttcacctcttccag

SEQ ID NO: 23257 - DNA, 20 bp, Artificial Sequence
  MKO10023257_A_Gtf2h1
  gRNA
ccgactaaatacaggatcga

SEQ ID NO: 23258 - DNA, 20 bp, Artificial Sequence
  MKO10023258_A_Gtf2h1
  gRNA
ccttcgatcctgtatttagt

SEQ ID NO: 23259 - DNA, 20 bp, Artificial Sequence
  MKO10023259_A_Gtf2h1
  gRNA
attagctttccgcttgaact

SEQ ID NO: 23260 - DNA, 20 bp, Artificial Sequence
  MKO10023260_A_Gtf2h2
  gRNA
tgatcaaaaccctatcagtc

SEQ ID NO: 23261 - DNA, 20 bp, Artificial Sequence
  MKO10023261_A_Gtf2h2
  gRNA
gtagatgcgccacctgtatg

SEQ ID NO: 23262 - DNA, 20 bp, Artificial Sequence
  MKO10023262_A_Gtf2h2
  gRNA
tgtctacatacctgactgat

SEQ ID NO: 23263 - DNA, 20 bp, Artificial Sequence
  MKO10023263_A_Gtf2h3
  gRNA
gctgttgacagttgcaaacg

SEQ ID NO: 23264 - DNA, 20 bp, Artificial Sequence
  MKO10023264_A_Gtf2h3
  gRNA
cctcagccggctcttatacc

SEQ ID NO: 23265 - DNA, 20 bp, Artificial Sequence
  MKO10023265_A_Gtf2h3
  gRNA
tagttgacaccaacccgatt

SEQ ID NO: 23266 - DNA, 20 bp, Artificial Sequence
  MKO10023266_A_Gtf2h4
  gRNA
acgtcccgggcatgcttgtc

SEQ ID NO: 23267 - DNA, 20 bp, Artificial Sequence
  MKO10023267_A_Gtf2h4
  gRNA
tgctgagtggcctccgtatc

SEQ ID NO: 23268 - DNA, 20 bp, Artificial Sequence
  MKO10023268_A_Gtf2h4
  gRNA
aaatgacgtacccacccaga

SEQ ID NO: 23269 - DNA, 20 bp, Artificial Sequence
  MKO10023269_A_Gtf2h5
  gRNA
cgtcttcgtcattgccgagc

SEQ ID NO: 23270 - DNA, 20 bp, Artificial Sequence
  MKO10023270_A_Gtf2h5
  gRNA
tcagttcccctactcgctcc

SEQ ID NO: 23271 - DNA, 20 bp, Artificial Sequence
  MKO10023271_A_Gtf2h5
  gRNA
aagatggtcaacgtgctgaa

SEQ ID NO: 23272 - DNA, 20 bp, Artificial Sequence
  MKO10023272_A_Gtf2ird1
  gRNA
gaactccaccttcgcccgca

SEQ ID NO: 23273 - DNA, 20 bp, Artificial Sequence
  MKO10023273_A_Gtf2ird1
  gRNA
ggtgtccgccttagactcca

SEQ ID NO: 23274 - DNA, 20 bp, Artificial Sequence
  MKO10023274_A_Gtf2ird1
  gRNA
caatgagagcgtcttcgtga

SEQ ID NO: 23275 - DNA, 20 bp, Artificial Sequence
  MKO10023275_A_Gtf2ird2
  gRNA
atcctgtctggcgttgacaa

SEQ ID NO: 23276 - DNA, 20 bp, Artificial Sequence
  MKO10023276_A_Gtf2ird2
  gRNA
agattacctctttacagcga

SEQ ID NO: 23277 - DNA, 20 bp, Artificial Sequence
  MKO10023277_A_Gtf2ird2
  gRNA
gtatgagacagacgtgtacg

SEQ ID NO: 23278 - DNA, 20 bp, Artificial Sequence
  MKO10023278_A_Gtf2i
  gRNA
gaagatgctgcgcgaccagt

SEQ ID NO: 23279 - DNA, 20 bp, Artificial Sequence
  MKO10023279_A_Gtf2i
  gRNA
ttgcgaggtcgtaatgttcg

SEQ ID NO: 23280 - DNA, 20 bp, Artificial Sequence
  MKO10023280_A_Gtf2i
  gRNA
agcatccacactcatccgat

SEQ ID NO: 23281 - DNA, 20 bp, Artificial Sequence
  MKO10023281_A_Gtf3a
  gRNA
ttgtcctaggtgtacccacg

SEQ ID NO: 23282 - DNA, 20 bp, Artificial Sequence
  MKO10023282_A_Gtf3a
  gRNA
gccatttgtttgcgactatg

SEQ ID NO: 23283 - DNA, 20 bp, Artificial Sequence
  MKO10023283_A_Gtf3a
  gRNA
acaccagcgagccgctcttc

SEQ ID NO: 23284 - DNA, 20 bp, Artificial Sequence
  MKO10023284_A_Gtf3c1
  gRNA
gcttctaccattgtacatcg

SEQ ID NO: 23285 - DNA, 20 bp, Artificial Sequence
  MKO10023285_A_Gtf3c1
  gRNA
agcgcttaggtcgatccagg

SEQ ID NO: 23286 - DNA, 20 bp, Artificial Sequence
  MKO10023286_A_Gtf3c1
  gRNA
tagctcttacttgaaagcgg

SEQ ID NO: 23287 - DNA, 20 bp, Artificial Sequence
  MKO10023287_A_Gtf3c2
  gRNA
aagtgagaactcgtctgatc

SEQ ID NO: 23288 - DNA, 20 bp, Artificial Sequence
  MKO10023288_A_Gtf3c2
  gRNA
ccgggtcttcttcggcttcg

SEQ ID NO: 23289 - DNA, 20 bp, Artificial Sequence
  MKO10023289_A_Gtf3c2
  gRNA
ctgagtggattccggtagcc

SEQ ID NO: 23290 - DNA, 20 bp, Artificial Sequence
  MKO10023290_A_Gtf3c3
  gRNA
tcctctagcaaagcgaatat

SEQ ID NO: 23291 - DNA, 20 bp, Artificial Sequence
  MKO10023291_A_Gtf3c3
  gRNA
gccaatattcgctttgctag

SEQ ID NO: 23292 - DNA, 20 bp, Artificial Sequence
  MKO10023292_A_Gtf3c3
  gRNA
tccgaagttccatcctcatc

SEQ ID NO: 23293 - DNA, 20 bp, Artificial Sequence
  MKO10023293_A_Gtf3c4
  gRNA
acttgatcgacctggtccgc

SEQ ID NO: 23294 - DNA, 20 bp, Artificial Sequence
  MKO10023294_A_Gtf3c4
  gRNA
ggacaatcgcctgactgtgc

SEQ ID NO: 23295 - DNA, 20 bp, Artificial Sequence
  MKO10023295_A_Gtf3c4
  gRNA
gcttgcttgcgatctgtgaa

SEQ ID NO: 23296 - DNA, 20 bp, Artificial Sequence
  MKO10023296_A_Gtf3c5
  gRNA
cgaactctacttccggccca

SEQ ID NO: 23297 - DNA, 20 bp, Artificial Sequence
  MKO10023297_A_Gtf3c5
  gRNA
acagcatttcgtgaccaaac

SEQ ID NO: 23298 - DNA, 20 bp, Artificial Sequence
  MKO10023298_A_Gtf3c5
  gRNA
gaagtagagttcgagcctct

SEQ ID NO: 23299 - DNA, 20 bp, Artificial Sequence
  MKO10023299_A_Gtf3c6
  gRNA
atagctgtccacttgcatga

SEQ ID NO: 23300 - DNA, 20 bp, Artificial Sequence
  MKO10023300_A_Gtf3c6
  gRNA
accgtcttatcagtcccctc

SEQ ID NO: 23301 - DNA, 20 bp, Artificial Sequence
  MKO10023301_A_Gtf3c6
  gRNA
tcatgtcctagtggatccag

SEQ ID NO: 23302 - DNA, 20 bp, Artificial Sequence
  MKO10023302_A_Gtl3
  gRNA
atgacaaaaacgttcgtcga

SEQ ID NO: 23303 - DNA, 20 bp, Artificial Sequence
  MKO10023303_A_Gtl3
  gRNA
agttcgtgccatatgcccgc

SEQ ID NO: 23304 - DNA, 20 bp, Artificial Sequence
  MKO10023304_A_Gtl3
  gRNA
atgcaaactgccgtatccga

SEQ ID NO: 23305 - DNA, 20 bp, Artificial Sequence
  MKO10023305_A_Gtpbp10
  gRNA
ttgtagagttagcgcactgc

SEQ ID NO: 23306 - DNA, 20 bp, Artificial Sequence
  MKO10023306_A_Gtpbp10
  gRNA
atgggaaacccgactcagta

SEQ ID NO: 23307 - DNA, 20 bp, Artificial Sequence
  MKO10023307_A_Gtpbp10
  gRNA
aaaatcctccttactgagtc

SEQ ID NO: 23308 - DNA, 20 bp, Artificial Sequence
  MKO10023308_A_Gtpbp1
  gRNA
cttcttgacgttctcgtaag

SEQ ID NO: 23309 - DNA, 20 bp, Artificial Sequence
  MKO10023309_A_Gtpbp1
  gRNA
gtgtgcgtgattacctagtc

SEQ ID NO: 23310 - DNA, 20 bp, Artificial Sequence
  MKO10023310_A_Gtpbp1
  gRNA
agtgatcaccttcatcgact

SEQ ID NO: 23311 - DNA, 20 bp, Artificial Sequence
  MKO10023311_A_Gtpbp2
  gRNA
cactgaggtgctagtacgaa

SEQ ID NO: 23312 - DNA, 20 bp, Artificial Sequence
  MKO10023312_A_Gtpbp2
  gRNA
attatgacagtgacgtgccc

SEQ ID NO: 23313 - DNA, 20 bp, Artificial Sequence
  MKO10023313_A_Gtpbp2
  gRNA
ccagttcctagatctccgtg

SEQ ID NO: 23314 - DNA, 20 bp, Artificial Sequence
  MKO10023314_A_Gtpbp3
  gRNA
atcgcagtgatccgcaccag

SEQ ID NO: 23315 - DNA, 20 bp, Artificial Sequence
  MKO10023315_A_Gtpbp3
  gRNA
ccgaggccggagagttcacc

SEQ ID NO: 23316 - DNA, 20 bp, Artificial Sequence
  MKO10023316_A_Gtpbp3
  gRNA
tggaccgctcactcgtcctc

SEQ ID NO: 23317 - DNA, 20 bp, Artificial Sequence
  MKO10023317_A_Gtpbp4
  gRNA
cgcgcttcagctgcttgcat

SEQ ID NO: 23318 - DNA, 20 bp, Artificial Sequence
  MKO10023318_A_Gtpbp4
  gRNA
taatagtacacattcgtcca

SEQ ID NO: 23319 - DNA, 20 bp, Artificial Sequence
  MKO10023319_A_Gtpbp4
  gRNA
gactcaacgaaagactccaa

SEQ ID NO: 23320 - DNA, 20 bp, Artificial Sequence
  MKO10023320_A_Gtpbp6
  gRNA
atggtcggtcgcgagtaccc

SEQ ID NO: 23321 - DNA, 20 bp, Artificial Sequence
  MKO10023321_A_Gtpbp6
  gRNA
tccgttgtaacgcacgcacg

SEQ ID NO: 23322 - DNA, 20 bp, Artificial Sequence
  MKO10023322_A_Gtpbp6
  gRNA
atcctggaagtgcgcgcacc

SEQ ID NO: 23323 - DNA, 20 bp, Artificial Sequence
  MKO10023323_A_Gtpbp8
  gRNA
taccatgtcaacgaagtctt

SEQ ID NO: 23324 - DNA, 20 bp, Artificial Sequence
  MKO10023324_A_Gtpbp8
  gRNA
acccgaagacttcgttgaca

SEQ ID NO: 23325 - DNA, 20 bp, Artificial Sequence
  MKO10023325_A_Gtpbp8
  gRNA
caggggacgtgctgtaaacc

SEQ ID NO: 23326 - DNA, 20 bp, Artificial Sequence
  MKO10023326_A_Gtse1
  gRNA
acttaaaccgccgggttcct

SEQ ID NO: 23327 - DNA, 20 bp, Artificial Sequence
  MKO10023327_A_Gtse1
  gRNA
ccagatgctgccagtcgaga

SEQ ID NO: 23328 - DNA, 20 bp, Artificial Sequence
  MKO10023328_A_Gtse1
  gRNA
atcccagagtgacgtgctcc

SEQ ID NO: 23329 - DNA, 20 bp, Artificial Sequence
  MKO10023329_A_Gtsf1l
  gRNA
accaccgaatcccgctcagc

SEQ ID NO: 23330 - DNA, 20 bp, Artificial Sequence
  MKO10023330_A_Gtsf1l
  gRNA
aaactcttaaggacgaacat

SEQ ID NO: 23331 - DNA, 20 bp, Artificial Sequence
  MKO10023331_A_Gtsf1l
  gRNA
taaatacaacgcctgccacg

SEQ ID NO: 23332 - DNA, 20 bp, Artificial Sequence
  MKO10023332_A_Gtsf1
  gRNA
gccaatttgtttgcgacatc

SEQ ID NO: 23333 - DNA, 20 bp, Artificial Sequence
  MKO10023333_A_Gtsf1
  gRNA
ctctctttcagtcgactccc

SEQ ID NO: 23334 - DNA, 20 bp, Artificial Sequence
  MKO10023334_A_Gtsf1
  gRNA
aacctgatgccgagcattga

SEQ ID NO: 23335 - DNA, 20 bp, Artificial Sequence
  MKO10023335_A_Guca1a
  gRNA
cctcctcgtgttcgccgttc

SEQ ID NO: 23336 - DNA, 20 bp, Artificial Sequence
  MKO10023336_A_Guca1a
  gRNA
actcatggatgagtcgctcc

SEQ ID NO: 23337 - DNA, 20 bp, Artificial Sequence
  MKO10023337_A_Guca1a
  gRNA
atccccgttgatgtcgatct

SEQ ID NO: 23338 - DNA, 20 bp, Artificial Sequence
  MKO10023338_A_Guca1b
  gRNA
tcattacccacttatcgcga

SEQ ID NO: 23339 - DNA, 20 bp, Artificial Sequence
  MKO10023339_A_Guca1b
  gRNA
gtctctgaccgagttcatcg

SEQ ID NO: 23340 - DNA, 20 bp, Artificial Sequence
  MKO10023340_A_Guca1b
  gRNA
ggcggtcgatgcagccattt

SEQ ID NO: 23341 - DNA, 20 bp, Artificial Sequence
  MKO10023341_A_Guca2a
  gRNA
gtcactctagcatcccgtac

SEQ ID NO: 23342 - DNA, 20 bp, Artificial Sequence
  MKO10023342_A_Guca2a
  gRNA
aaaacttaagggtctccgcg

SEQ ID NO: 23343 - DNA, 20 bp, Artificial Sequence
  MKO10023343_A_Guca2a
  gRNA
gcgttgggtttctcgcagac

SEQ ID NO: 23344 - DNA, 20 bp, Artificial Sequence
  MKO10023344_A_Guca2b
  gRNA
tatacacagttcacattcgt

SEQ ID NO: 23345 - DNA, 20 bp, Artificial Sequence
  MKO10023345_A_Guca2b
  gRNA
ggacgacggcagcccacagt

SEQ ID NO: 23346 - DNA, 20 bp, Artificial Sequence
  MKO10023346_A_Guca2b
  gRNA
atttcatcagcagcctgtac

SEQ ID NO: 23347 - DNA, 20 bp, Artificial Sequence
  MKO10023347_A_Gucd1
  gRNA
caaactccccgtcgtcgagc

SEQ ID NO: 23348 - DNA, 20 bp, Artificial Sequence
  MKO10023348_A_Gucd1
  gRNA
tgccgcacccccgactacca

SEQ ID NO: 23349 - DNA, 20 bp, Artificial Sequence
  MKO10023349_A_Gucd1
  gRNA
tcgtcctgcgtggctataac

SEQ ID NO: 23350 - DNA, 20 bp, Artificial Sequence
  MKO10023350_A_Gucy1a2
  gRNA
gcattgcaaagcccaccgta

SEQ ID NO: 23351 - DNA, 20 bp, Artificial Sequence
  MKO10023351_A_Gucy1a2
  gRNA
catatcgaagttgtttccgt

SEQ ID NO: 23352 - DNA, 20 bp, Artificial Sequence
  MKO10023352_A_Gucy1a2
  gRNA
agagtcatgtgtatcgtctg

SEQ ID NO: 23353 - DNA, 20 bp, Artificial Sequence
  MKO10023353_A_Gucy1a3
  gRNA
gcagccgctttaatgatacc

SEQ ID NO: 23354 - DNA, 20 bp, Artificial Sequence
  MKO10023354_A_Gucy1a3
  gRNA
tcccaattcataacgccctg

SEQ ID NO: 23355 - DNA, 20 bp, Artificial Sequence
  MKO10023355_A_Gucy1a3
  gRNA
tgatgccgttacccagctgc

SEQ ID NO: 23356 - DNA, 20 bp, Artificial Sequence
  MKO10023356_A_Gucy1b2
  gRNA
ccggcgtcttaccgaatctc

SEQ ID NO: 23357 - DNA, 20 bp, Artificial Sequence
  MKO10023357_A_Gucy1b2
  gRNA
gagcaagcgaacccatctac

SEQ ID NO: 23358 - DNA, 20 bp, Artificial Sequence
  MKO10023358_A_Gucy1b2
  gRNA
ctcctaaactccgctcgcag

SEQ ID NO: 23359 - DNA, 20 bp, Artificial Sequence
  MKO10023359_A_Gucy1b3
  gRNA
cggtttcgtgaaccatgccc

SEQ ID NO: 23360 - DNA, 20 bp, Artificial Sequence
  MKO10023360_A_Gucy1b3
  gRNA
ctctttccgagtagtagtgc

SEQ ID NO: 23361 - DNA, 20 bp, Artificial Sequence
  MKO10023361_A_Gucy1b3
  gRNA
ctgctggtgatccgcaatta

SEQ ID NO: 23362 - DNA, 20 bp, Artificial Sequence
  MKO10023362_A_Gucy2c
  gRNA
tagtcttaccggcttcacgc

SEQ ID NO: 23363 - DNA, 20 bp, Artificial Sequence
  MKO10023363_A_Gucy2c
  gRNA
gcgactttcatctactccga

SEQ ID NO: 23364 - DNA, 20 bp, Artificial Sequence
  MKO10023364_A_Gucy2c
  gRNA
cgaaagcgcctgcgtgaagc

SEQ ID NO: 23365 - DNA, 20 bp, Artificial Sequence
  MKO10023365_A_Gucy2d
  gRNA
cgaaccagcagctggcgtca

SEQ ID NO: 23366 - DNA, 20 bp, Artificial Sequence
  MKO10023366_A_Gucy2d
  gRNA
ccacgtaagagctcttgatg

SEQ ID NO: 23367 - DNA, 20 bp, Artificial Sequence
  MKO10023367_A_Gucy2d
  gRNA
tttgtaggccctgttaatcc

SEQ ID NO: 23368 - DNA, 20 bp, Artificial Sequence
  MKO10023368_A_Gucy2e
  gRNA
agcgtagtgaagcgtgtcga

SEQ ID NO: 23369 - DNA, 20 bp, Artificial Sequence
  MKO10023369_A_Gucy2e
  gRNA
catctgtagcccgccaagta

SEQ ID NO: 23370 - DNA, 20 bp, Artificial Sequence
  MKO10023370_A_Gucy2e
  gRNA
ccgctccgcagtagtgatca

SEQ ID NO: 23371 - DNA, 20 bp, Artificial Sequence
  MKO10023371_A_Gucy2f
  gRNA
aactaggtttcaccgttgtt

SEQ ID NO: 23372 - DNA, 20 bp, Artificial Sequence
  MKO10023372_A_Gucy2f
  gRNA
ttctgcataggcttcgtaga

SEQ ID NO: 23373 - DNA, 20 bp, Artificial Sequence
  MKO10023373_A_Gucy2f
  gRNA
actgtagagcagtacatcat

SEQ ID NO: 23374 - DNA, 20 bp, Artificial Sequence
  MKO10023374_A_Gucy2g
  gRNA
ggaacatgtcgtatgtcgcc

SEQ ID NO: 23375 - DNA, 20 bp, Artificial Sequence
  MKO10023375_A_Gucy2g
  gRNA
ctcatcgcacccagcgccta

SEQ ID NO: 23376 - DNA, 20 bp, Artificial Sequence
  MKO10023376_A_Gucy2g
  gRNA
cgacatacgacatgttcctg

SEQ ID NO: 23377 - DNA, 20 bp, Artificial Sequence
  MKO10023377_A_Guf1
  gRNA
ttgattaccttattgataac

SEQ ID NO: 23378 - DNA, 20 bp, Artificial Sequence
  MKO10023378_A_Guf1
  gRNA
aacttactggtgtgtcgatg

SEQ ID NO: 23379 - DNA, 20 bp, Artificial Sequence
  MKO10023379_A_Guf1
  gRNA
ccactaccagtaaaacacct

SEQ ID NO: 23380 - DNA, 20 bp, Artificial Sequence
  MKO10023380_A_Guk1
  gRNA
gtagtgctgagcgggccgtc

SEQ ID NO: 23381 - DNA, 20 bp, Artificial Sequence
  MKO10023381_A_Guk1
  gRNA
gtgctagatgtcgacctaca

SEQ ID NO: 23382 - DNA, 20 bp, Artificial Sequence
  MKO10023382_A_Guk1
  gRNA
cgacatctagcacgcagatg

SEQ ID NO: 23383 - DNA, 20 bp, Artificial Sequence
  MKO10023383_A_Gulo
  gRNA
tcagacatcgcctgcaccga

SEQ ID NO: 23384 - DNA, 20 bp, Artificial Sequence
  MKO10023384_A_Gulo
  gRNA
aggcgatgtctgaaggcgag

SEQ ID NO: 23385 - DNA, 20 bp, Artificial Sequence
  MKO10023385_A_Gulo
  gRNA
gtactaccagcccacatcag

SEQ ID NO: 23386 - DNA, 20 bp, Artificial Sequence
  MKO10023386_A_Gulp1
  gRNA
gtttcttggcagtaccgaag

SEQ ID NO: 23387 - DNA, 20 bp, Artificial Sequence
  MKO10023387_A_Gulp1
  gRNA
ttacattccctataatgcaa

SEQ ID NO: 23388 - DNA, 20 bp, Artificial Sequence
  MKO10023388_A_Gulp1
  gRNA
aagttgtgagagatgctgtc

SEQ ID NO: 23389 - DNA, 20 bp, Artificial Sequence
  MKO10023389_A_Gusb
  gRNA
cttgggtccatcgccgtggc

SEQ ID NO: 23390 - DNA, 20 bp, Artificial Sequence
  MKO10023390_A_Gusb
  gRNA
tccctagtcgggcccagtct

SEQ ID NO: 23391 - DNA, 20 bp, Artificial Sequence
  MKO10023391_A_Gusb
  gRNA
ggtgtcagtcttgtagacga

SEQ ID NO: 23392 - DNA, 20 bp, Artificial Sequence
  MKO10023392_A_Gvin1
  gRNA
gcttctcgatatttcttgag

SEQ ID NO: 23393 - DNA, 20 bp, Artificial Sequence
  MKO10023393_A_Gvin1
  gRNA
ctcaagaaatatcgagaagc

SEQ ID NO: 23394 - DNA, 20 bp, Artificial Sequence
  MKO10023394_A_Gvin1
  gRNA
agcctcagctacaaagcaga

SEQ ID NO: 23395 - DNA, 20 bp, Artificial Sequence
  MKO10023395_A_Gxylt1
  gRNA
ctttaaagctatcgtgcagt

SEQ ID NO: 23396 - DNA, 20 bp, Artificial Sequence
  MKO10023396_A_Gxylt1
  gRNA
tctgactttagcttgccagc

SEQ ID NO: 23397 - DNA, 20 bp, Artificial Sequence
  MKO10023397_A_Gxylt1
  gRNA
ggctgtagtcaaatctccgc

SEQ ID NO: 23398 - DNA, 20 bp, Artificial Sequence
  MKO10023398_A_Gxylt2
  gRNA
cgactgtaccagccgatctt

SEQ ID NO: 23399 - DNA, 20 bp, Artificial Sequence
  MKO10023399_A_Gxylt2
  gRNA
gtacgcaaaggcgatcttaa

SEQ ID NO: 23400 - DNA, 20 bp, Artificial Sequence
  MKO10023400_A_Gxylt2
  gRNA
actctgtgccacccgaactc

SEQ ID NO: 23401 - DNA, 20 bp, Artificial Sequence
  MKO10023401_A_Gyg
  gRNA
cattgactaaactccactgc

SEQ ID NO: 23402 - DNA, 20 bp, Artificial Sequence
  MKO10023402_A_Gyg
  gRNA
tttggcataggcatcgtttg

SEQ ID NO: 23403 - DNA, 20 bp, Artificial Sequence
  MKO10023403_A_Gyg
  gRNA
tgtacttacgctttaaatgc

SEQ ID NO: 23404 - DNA, 20 bp, Artificial Sequence
  MKO10023404_A_Gykl1
  gRNA
atactagggtcgcgaccatc

SEQ ID NO: 23405 - DNA, 20 bp, Artificial Sequence
  MKO10023405_A_Gykl1
  gRNA
gtgaaggtcgttacgccaca

SEQ ID NO: 23406 - DNA, 20 bp, Artificial Sequence
  MKO10023406_A_Gykl1
  gRNA
tggagcgtataagcctgaaa

SEQ ID NO: 23407 - DNA, 20 bp, Artificial Sequence
  MKO10023407_A_Gyk
  gRNA
ttacccacggcattatagag

SEQ ID NO: 23408 - DNA, 20 bp, Artificial Sequence
  MKO10023408_A_Gyk
  gRNA
agagcctctctataatgccg

SEQ ID NO: 23409 - DNA, 20 bp, Artificial Sequence
  MKO10023409_A_Gyk
  gRNA
caccaaaaaacgtgtcgagc

SEQ ID NO: 23410 - DNA, 20 bp, Artificial Sequence
  MKO10023410_A_Gyltl1b
  gRNA
ccctcgatgaagacccgtac

SEQ ID NO: 23411 - DNA, 20 bp, Artificial Sequence
  MKO10023411_A_Gyltl1b
  gRNA
ggcgcttacaatccgggtcc

SEQ ID NO: 23412 - DNA, 20 bp, Artificial Sequence
  MKO10023412_A_Gyltl1b
  gRNA
ggcacaactacctcgcactt

SEQ ID NO: 23413 - DNA, 20 bp, Artificial Sequence
  MKO10023413_A_Gypa
  gRNA
gcaggaaaatcgtgttgaat

SEQ ID NO: 23414 - DNA, 20 bp, Artificial Sequence
  MKO10023414_A_Gypa
  gRNA
attgttgctgaatgctgatt

SEQ ID NO: 23415 - DNA, 20 bp, Artificial Sequence
  MKO10023415_A_Gypa
  gRNA
tataacaaacctccaatgtg

SEQ ID NO: 23416 - DNA, 20 bp, Artificial Sequence
  MKO10023416_A_Gypc
  gRNA
ataatgccgtaggacttccc

SEQ ID NO: 23417 - DNA, 20 bp, Artificial Sequence
  MKO10023417_A_Gypc
  gRNA
tcatgcttcgctacctgtac

SEQ ID NO: 23418 - DNA, 20 bp, Artificial Sequence
  MKO10023418_A_Gypc
  gRNA
aagccgcctcccgagctcct

SEQ ID NO: 23419 - DNA, 20 bp, Artificial Sequence
  MKO10023419_A_Gys1
  gRNA
gagcctcgattgcggtgatc

SEQ ID NO: 23420 - DNA, 20 bp, Artificial Sequence
  MKO10023420_A_Gys1
  gRNA
catacggcttctcttcgttc

SEQ ID NO: 23421 - DNA, 20 bp, Artificial Sequence
  MKO10023421_A_Gys1
  gRNA
caacgccagccaaccattcg

SEQ ID NO: 23422 - DNA, 20 bp, Artificial Sequence
  MKO10023422_A_Gys2
  gRNA
tgacgtgtttaccgtctgcg

SEQ ID NO: 23423 - DNA, 20 bp, Artificial Sequence
  MKO10023423_A_Gys2
  gRNA
ggagtttcctggcacgagaa

SEQ ID NO: 23424 - DNA, 20 bp, Artificial Sequence
  MKO10023424_A_Gys2
  gRNA
catagaagggagtccctacg

SEQ ID NO: 23425 - DNA, 20 bp, Artificial Sequence
  MKO10023425_A_Gzf1
  gRNA
tacatgataagaatacgccg

SEQ ID NO: 23426 - DNA, 20 bp, Artificial Sequence
  MKO10023426_A_Gzf1
  gRNA
ccagcatattaaagtccaca

SEQ ID NO: 23427 - DNA, 20 bp, Artificial Sequence
  MKO10023427_A_Gzf1
  gRNA
ttactgacaagtctactctc

SEQ ID NO: 23428 - DNA, 20 bp, Artificial Sequence
  MKO10023428_A_Gzma
  gRNA
tcctcactcaagaccgtata

SEQ ID NO: 23429 - DNA, 20 bp, Artificial Sequence
  MKO10023429_A_Gzma
  gRNA
caagaacttacacgttacag

SEQ ID NO: 23430 - DNA, 20 bp, Artificial Sequence
  MKO10023430_A_Gzma
  gRNA
agaagtgtggagatcgccga

SEQ ID NO: 23431 - DNA, 20 bp, Artificial Sequence
  MKO10023431_A_Gzmb
  gRNA
aagcccccacatatcgcctc

SEQ ID NO: 23432 - DNA, 20 bp, Artificial Sequence
  MKO10023432_A_Gzmb
  gRNA
gtcccccgcacatatctgat

SEQ ID NO: 23433 - DNA, 20 bp, Artificial Sequence
  MKO10023433_A_Gzmb
  gRNA
tgggggcttccttattcgag

SEQ ID NO: 23434 - DNA, 20 bp, Artificial Sequence
  MKO10023434_A_Gzmc
  gRNA
gcacgaatttgtctcgaacc

SEQ ID NO: 23435 - DNA, 20 bp, Artificial Sequence
  MKO10023435_A_Gzmc
  gRNA
cttcacatgagcattgcgcc

SEQ ID NO: 23436 - DNA, 20 bp, Artificial Sequence
  MKO10023436_A_Gzmc
  gRNA
tgatccatcagtttgcccgt

SEQ ID NO: 23437 - DNA, 20 bp, Artificial Sequence
  MKO10023437_A_Gzmd
  gRNA
cgttatgtctgtggatatta

SEQ ID NO: 23438 - DNA, 20 bp, Artificial Sequence
  MKO10023438_A_Gzmd
  gRNA
gcacaaagtcatcttgaatc

SEQ ID NO: 23439 - DNA, 20 bp, Artificial Sequence
  MKO10023439_A_Gzmd
  gRNA
cttcacccgggcattggatc

SEQ ID NO: 23440 - DNA, 20 bp, Artificial Sequence
  MKO10023440_A_Gzme
  gRNA
agacttaacaaacgccatgt

SEQ ID NO: 23441 - DNA, 20 bp, Artificial Sequence
  MKO10023441_A_Gzme
  gRNA
cagtggcattataatctgga

SEQ ID NO: 23442 - DNA, 20 bp, Artificial Sequence
  MKO10023442_A_Gzme
  gRNA
actggtcatccaggaggatg

SEQ ID NO: 23443 - DNA, 20 bp, Artificial Sequence
  MKO10023443_A_Gzmf
  gRNA
aacctcacacgtgccatgta

SEQ ID NO: 23444 - DNA, 20 bp, Artificial Sequence
  MKO10023444_A_Gzmf
  gRNA
ccacccagcttatgatgata

SEQ ID NO: 23445 - DNA, 20 bp, Artificial Sequence
  MKO10023445_A_Gzmf
  gRNA
cagctcaatgagagtcatac

SEQ ID NO: 23446 - DNA, 20 bp, Artificial Sequence
  MKO10023446_A_Gzmg
  gRNA
gtgtgtgacaacctagctta

SEQ ID NO: 23447 - DNA, 20 bp, Artificial Sequence
  MKO10023447_A_Gzmg
  gRNA
aagaccacgcagatctgtgc

SEQ ID NO: 23448 - DNA, 20 bp, Artificial Sequence
  MKO10023448_A_Gzmg
  gRNA
aagctaggttgtcacacacg

SEQ ID NO: 23449 - DNA, 20 bp, Artificial Sequence
  MKO10023449_A_Gzmk
  gRNA
ccggactgaagtcgtgagaa

SEQ ID NO: 23450 - DNA, 20 bp, Artificial Sequence
  MKO10023450_A_Gzmk
  gRNA
gttaatagcgtatagattcc

SEQ ID NO: 23451 - DNA, 20 bp, Artificial Sequence
  MKO10023451_A_Gzmk
  gRNA
ccattctcacgacttcagtc

SEQ ID NO: 23452 - DNA, 20 bp, Artificial Sequence
  MKO10023452_A_Gzmm
  gRNA
tcaggaaggtcattggtcgc

SEQ ID NO: 23453 - DNA, 20 bp, Artificial Sequence
  MKO10023453_A_Gzmm
  gRNA
gagtccttgtgcatcggaag

SEQ ID NO: 23454 - DNA, 20 bp, Artificial Sequence
  MKO10023454_A_Gzmm
  gRNA
tgtgtaacaacagccgcttc

SEQ ID NO: 23455 - DNA, 20 bp, Artificial Sequence
  MKO10023455_A_Gzmn
  gRNA
caaaatagaggctccgtcca

SEQ ID NO: 23456 - DNA, 20 bp, Artificial Sequence
  MKO10023456_A_Gzmn
  gRNA
tggggaagagctttattcac

SEQ ID NO: 23457 - DNA, 20 bp, Artificial Sequence
  MKO10023457_A_Gzmn
  gRNA
ccacccagactataatcctc

SEQ ID NO: 23458 - DNA, 20 bp, Artificial Sequence
  MKO10023458_A_H13
  gRNA
gaagcgggcggcatctcgac

SEQ ID NO: 23459 - DNA, 20 bp, Artificial Sequence
  MKO10023459_A_H13
  gRNA
gggcggccgcgtcgtgccgt

SEQ ID NO: 23460 - DNA, 20 bp, Artificial Sequence
  MKO10023460_A_H13
  gRNA
gcctcggcgctgccgttgtg

SEQ ID NO: 23461 - DNA, 20 bp, Artificial Sequence
  MKO10023461_A_H1f0
  gRNA
cccgtttgggcttcgccgcc

SEQ ID NO: 23462 - DNA, 20 bp, Artificial Sequence
  MKO10023462_A_H1f0
  gRNA
ggcgaagcccaaacgggcca

SEQ ID NO: 23463 - DNA, 20 bp, Artificial Sequence
  MKO10023463_A_H1f0
  gRNA
atcaagcgcctagtgaccac

SEQ ID NO: 23464 - DNA, 20 bp, Artificial Sequence
  MKO10023464_A_H1fnt
  gRNA
cactgactgcgtaccccgct

SEQ ID NO: 23465 - DNA, 20 bp, Artificial Sequence
  MKO10023465_A_H1fnt
  gRNA
ggatcgtaagttctgcgcct

SEQ ID NO: 23466 - DNA, 20 bp, Artificial Sequence
  MKO10023466_A_H1fnt
  gRNA
tggctgccttgcgacgcgag

SEQ ID NO: 23467 - DNA, 20 bp, Artificial Sequence
  MKO10023467_A_H1foo
  gRNA
cgagggaagcaacgctattc

SEQ ID NO: 23468 - DNA, 20 bp, Artificial Sequence
  MKO10023468_A_H1foo
  gRNA
gcgttgcttccctcgccaaa

SEQ ID NO: 23469 - DNA, 20 bp, Artificial Sequence
  MKO10023469_A_H1foo
  gRNA
ccaacacaagtacccgacag

SEQ ID NO: 23470 - DNA, 20 bp, Artificial Sequence
  MKO10023470_A_H1fx
  gRNA
cgtcttgcgggccgtcccgt

SEQ ID NO: 23471 - DNA, 20 bp, Artificial Sequence
  MKO10023471_A_H1fx
  gRNA
ctgccgccaacgagcgccga

SEQ ID NO: 23472 - DNA, 20 bp, Artificial Sequence
  MKO10023472_A_H1fx
  gRNA
gacggcccgcaagacggcca

SEQ ID NO: 23473 - DNA, 20 bp, Artificial Sequence
  MKO10023473_A_H2-Aa
  gRNA
tggaggtgccacctgatcgc

SEQ ID NO: 23474 - DNA, 20 bp, Artificial Sequence
  MKO10023474_A_H2-Aa
  gRNA
gtcacggttgacgaagaagc

SEQ ID NO: 23475 - DNA, 20 bp, Artificial Sequence
  MKO10023475_A_H2-Aa
  gRNA
aatccatcagccgaccacgt

SEQ ID NO: 23476 - DNA, 20 bp, Artificial Sequence
  MKO10023476_A_H2-Ab1
  gRNA
tcgtatgcgctgcgtcccgt

SEQ ID NO: 23477 - DNA, 20 bp, Artificial Sequence
  MKO10023477_A_H2-Ab1
  gRNA
gcgagtgctacttcaccaac

SEQ ID NO: 23478 - DNA, 20 bp, Artificial Sequence
  MKO10023478_A_H2-Ab1
  gRNA
tgtagacctctccccgccga

SEQ ID NO: 23479 - DNA, 20 bp, Artificial Sequence
  MKO10023479_A_H2-Bl
  gRNA
atttcgagaccgcagtgttc

SEQ ID NO: 23480 - DNA, 20 bp, Artificial Sequence
  MKO10023480_A_H2-Bl
  gRNA
tgtcacagccagacaaccgc

SEQ ID NO: 23481 - DNA, 20 bp, Artificial Sequence
  MKO10023481_A_H2-Bl
  gRNA
gaggccgggccggaacactg

SEQ ID NO: 23482 - DNA, 20 bp, Artificial Sequence
  MKO10023482_A_H2-D1
  gRNA
ggtgacttcacctttagatc

SEQ ID NO: 23483 - DNA, 20 bp, Artificial Sequence
  MKO10023483_A_H2-D1
  gRNA
catagccgacagagatgtac

SEQ ID NO: 23484 - DNA, 20 bp, Artificial Sequence
  MKO10023484_A_H2-D1
  gRNA
tcactcggaaccactgctct

SEQ ID NO: 23485 - DNA, 20 bp, Artificial Sequence
  MKO10023485_A_H2-DMa
  gRNA
caccgaccctgaccgtgaac

SEQ ID NO: 23486 - DNA, 20 bp, Artificial Sequence
  MKO10023486_A_H2-DMa
  gRNA
cactcctgggcggtgctcga

SEQ ID NO: 23487 - DNA, 20 bp, Artificial Sequence
  MKO10023487_A_H2-DMa
  gRNA
gaaaagactcgattccgttc

SEQ ID NO: 23488 - DNA, 20 bp, Artificial Sequence
  MKO10023488_A_H2-DMb1
  gRNA
tgtggaaagcacgtgcgtgc

SEQ ID NO: 23489 - DNA, 20 bp, Artificial Sequence
  MKO10023489_A_H2-DMb1
  gRNA
acaaatgttaccttccgggt

SEQ ID NO: 23490 - DNA, 20 bp, Artificial Sequence
  MKO10023490_A_H2-DMb1
  gRNA
cttctccagcgtttgcaaaa

SEQ ID NO: 23491 - DNA, 20 bp, Artificial Sequence
  MKO10023491_A_H2-DMb2
  gRNA
ttcaaatatcctcaacgaac

SEQ ID NO: 23492 - DNA, 20 bp, Artificial Sequence
  MKO10023492_A_H2-DMb2
  gRNA
tcagcacatcccagaaaggt

SEQ ID NO: 23493 - DNA, 20 bp, Artificial Sequence
  MKO10023493_A_H2-DMb2
  gRNA
gacctctgagcccatccgcg

SEQ ID NO: 23494 - DNA, 20 bp, Artificial Sequence
  MKO10023494_A_H2-Ea-ps
  gRNA
aatgttgtagaacgccgaca

SEQ ID NO: 23495 - DNA, 20 bp, Artificial Sequence
  MKO10023495_A_H2-Ea-ps
  gRNA
aatggacggcctgtcaccga

SEQ ID NO: 23496 - DNA, 20 bp, Artificial Sequence
  MKO10023496_A_H2-Ea-ps
  gRNA
cggaagaggtgatcgtccct

SEQ ID NO: 23497 - DNA, 20 bp, Artificial Sequence
  MKO10023497_A_H2-Eb1
  gRNA
gacgcagcgcgtgcggcttc

SEQ ID NO: 23498 - DNA, 20 bp, Artificial Sequence
  MKO10023498_A_H2-Eb1
  gRNA
tccagtctccatttcggacc

SEQ ID NO: 23499 - DNA, 20 bp, Artificial Sequence
  MKO10023499_A_H2-Eb1
  gRNA
tcactccactcgaccgtgac

SEQ ID NO: 23500 - DNA, 20 bp, Artificial Sequence
  MKO10023500_A_H2-Eb2
  gRNA
gcccgctttaacagtgactt

SEQ ID NO: 23501 - DNA, 20 bp, Artificial Sequence
  MKO10023501_A_H2-Eb2
  gRNA
gtgtaaacctctccaccccg

SEQ ID NO: 23502 - DNA, 20 bp, Artificial Sequence
  MKO10023502_A_H2-Eb2
  gRNA
attatcgtgcctcagtagac

SEQ ID NO: 23503 - DNA, 20 bp, Artificial Sequence
  MKO10023503_A_H2-K1
  gRNA
cctcggggagccccggtaca

SEQ ID NO: 23504 - DNA, 20 bp, Artificial Sequence
  MKO10023504_A_H2-K1
  gRNA
caatgagcagagtttccgag

SEQ ID NO: 23505 - DNA, 20 bp, Artificial Sequence
  MKO10023505_A_H2-K1
  gRNA
cgctgatcaccaaacacaag

SEQ ID NO: 23506 - DNA, 20 bp, Artificial Sequence
  MKO10023506_A_H2-Ke2
  gRNA
gttgctctgactgccgctcg

SEQ ID NO: 23507 - DNA, 20 bp, Artificial Sequence
  MKO10023507_A_H2-Ke2
  gRNA
tcagcgggcccaagctgcaa

SEQ ID NO: 23508 - DNA, 20 bp, Artificial Sequence
  MKO10023508_A_H2-Ke2
  gRNA
cagaagcttaaagaccacgt

SEQ ID NO: 23509 - DNA, 20 bp, Artificial Sequence
  MKO10023509_A_H2-Ke6
  gRNA
tgcgatcagcgtgcgcctag

SEQ ID NO: 23510 - DNA, 20 bp, Artificial Sequence
  MKO10023510_A_H2-Ke6
  gRNA
ctaggcgcacgctgatcgca

SEQ ID NO: 23511 - DNA, 20 bp, Artificial Sequence
  MKO10023511_A_H2-Ke6
  gRNA
aattatgcgtcgtccaaagc

SEQ ID NO: 23512 - DNA, 20 bp, Artificial Sequence
  MKO10023512_A_H2-L
  gRNA
catagccgacagagatgtac

SEQ ID NO: 23513 - DNA, 20 bp, Artificial Sequence
  MKO10023513_A_H2-L
  gRNA
ggccccgactcagacccgcg

SEQ ID NO: 23514 - DNA, 20 bp, Artificial Sequence
  MKO10023514_A_H2-L
  gRNA
gagccccggtacatctctgt

SEQ ID NO: 23515 - DNA, 20 bp, Artificial Sequence
  MKO10023515_A_H2-M10.1
  gRNA
gagctcaacacgcgaagagc

SEQ ID NO: 23516 - DNA, 20 bp, Artificial Sequence
  MKO10023516_A_H2-M10.1
  gRNA
gagacaagttcttcggttaa

SEQ ID NO: 23517 - DNA, 20 bp, Artificial Sequence
  MKO10023517_A_H2-M10.1
  gRNA
agctctatccatgcagctcg

SEQ ID NO: 23518 - DNA, 20 bp, Artificial Sequence
  MKO10023518_A_H2-M10.2
  gRNA
cgtttgtcagtgacaagcgc

SEQ ID NO: 23519 - DNA, 20 bp, Artificial Sequence
  MKO10023519_A_H2-M10.2
  gRNA
gatgaactcatagccgtagt

SEQ ID NO: 23520 - DNA, 20 bp, Artificial Sequence
  MKO10023520_A_H2-M10.2
  gRNA
gcttcctcggcggtctctac

SEQ ID NO: 23521 - DNA, 20 bp, Artificial Sequence
  MKO10023521_A_H2-M10.3
  gRNA
tttgtacacactcccctcga

SEQ ID NO: 23522 - DNA, 20 bp, Artificial Sequence
  MKO10023522_A_H2-M10.3
  gRNA
aaccgggaattaatcatgcc

SEQ ID NO: 23523 - DNA, 20 bp, Artificial Sequence
  MKO10023523_A_H2-M10.3
  gRNA
gtctccacgttccaatactt

SEQ ID NO: 23524 - DNA, 20 bp, Artificial Sequence
  MKO10023524_A_H2-M10.4
  gRNA
ctgtcacgcttccttgcgtc

SEQ ID NO: 23525 - DNA, 20 bp, Artificial Sequence
  MKO10023525_A_H2-M10.4
  gRNA
tgctaacagtgacgcgccca

SEQ ID NO: 23526 - DNA, 20 bp, Artificial Sequence
  MKO10023526_A_H2-M10.4
  gRNA
tgagcccgtagtgaccacca

SEQ ID NO: 23527 - DNA, 20 bp, Artificial Sequence
  MKO10023527_A_H2-M10.5
  gRNA
cgcaacgcttgctgtctcac

SEQ ID NO: 23528 - DNA, 20 bp, Artificial Sequence
  MKO10023528_A_H2-M10.5
  gRNA
aaccgggaattaaccatgcc

SEQ ID NO: 23529 - DNA, 20 bp, Artificial Sequence
  MKO10023529_A_H2-M10.5
  gRNA
tgagccggaagtgaccgccg

SEQ ID NO: 23530 - DNA, 20 bp, Artificial Sequence
  MKO10023530_A_H2-M10.6
  gRNA
tttccacgcattcccctagc

SEQ ID NO: 23531 - DNA, 20 bp, Artificial Sequence
  MKO10023531_A_H2-M10.6
  gRNA
cgtatccgacctggatgaac

SEQ ID NO: 23532 - DNA, 20 bp, Artificial Sequence
  MKO10023532_A_H2-M10.6
  gRNA
ttacctgctaggggaatgcg

SEQ ID NO: 23533 - DNA, 20 bp, Artificial Sequence
  MKO10023533_A_H2-M11
  gRNA
ccgtttctgaaataccctcg

SEQ ID NO: 23534 - DNA, 20 bp, Artificial Sequence
  MKO10023534_A_H2-M11
  gRNA
caaaatacatgtgatccgta

SEQ ID NO: 23535 - DNA, 20 bp, Artificial Sequence
  MKO10023535_A_H2-M11
  gRNA
ggctgctatatcctgcctcg

SEQ ID NO: 23536 - DNA, 20 bp, Artificial Sequence
  MKO10023536_A_H2-M1
  gRNA
accgtgctttgtccatctga

SEQ ID NO: 23537 - DNA, 20 bp, Artificial Sequence
  MKO10023537_A_H2-M1
  gRNA
gaacttactccatcgattcc

SEQ ID NO: 23538 - DNA, 20 bp, Artificial Sequence
  MKO10023538_A_H2-M1
  gRNA
tagccgagaaagattaactg

SEQ ID NO: 23539 - DNA, 20 bp, Artificial Sequence
  MKO10023539_A_H2-M2
  gRNA
tgcgatgtcgaagtaccgca

SEQ ID NO: 23540 - DNA, 20 bp, Artificial Sequence
  MKO10023540_A_H2-M2
  gRNA
cagctttcgcaatgcgtgtc

SEQ ID NO: 23541 - DNA, 20 bp, Artificial Sequence
  MKO10023541_A_H2-M2
  gRNA
gcgtgaagtaggtgcccgtc

SEQ ID NO: 23542 - DNA, 20 bp, Artificial Sequence
  MKO10023542_A_H2-M3
  gRNA
gctccaagaaggcgcatgtc

SEQ ID NO: 23543 - DNA, 20 bp, Artificial Sequence
  MKO10023543_A_H2-M3
  gRNA
gaatctccttgccattccgc

SEQ ID NO: 23544 - DNA, 20 bp, Artificial Sequence
  MKO10023544_A_H2-M3
  gRNA
cgttgctagtctggttctcc

SEQ ID NO: 23545 - DNA, 20 bp, Artificial Sequence
  MKO10023545_A_H2-M5
  gRNA
agctgtgtcgcctgcgaccc

SEQ ID NO: 23546 - DNA, 20 bp, Artificial Sequence
  MKO10023546_A_H2-M5
  gRNA
catgagaagcacgcatacga

SEQ ID NO: 23547 - DNA, 20 bp, Artificial Sequence
  MKO10023547_A_H2-M5
  gRNA
gattgccctagtgaatttgc

SEQ ID NO: 23548 - DNA, 20 bp, Artificial Sequence
  MKO10023548_A_H2-M9
  gRNA
atctataatgatagcatgac

SEQ ID NO: 23549 - DNA, 20 bp, Artificial Sequence
  MKO10023549_A_H2-M9
  gRNA
gtcgtcaaagtctttcctgc

SEQ ID NO: 23550 - DNA, 20 bp, Artificial Sequence
  MKO10023550_A_H2-M9
  gRNA
agtacgttctctgcttgact

SEQ ID NO: 23551 - DNA, 20 bp, Artificial Sequence
  MKO10023551_A_H2-Oa
  gRNA
taccaatcttacgacgcttc

SEQ ID NO: 23552 - DNA, 20 bp, Artificial Sequence
  MKO10023552_A_H2-Oa
  gRNA
gtcgtacacatcctccgcag

SEQ ID NO: 23553 - DNA, 20 bp, Artificial Sequence
  MKO10023553_A_H2-Oa
  gRNA
gcttctgcacctgcggatac

SEQ ID NO: 23554 - DNA, 20 bp, Artificial Sequence
  MKO10023554_A_H2-Ob
  gRNA
ccggggacataagtgtcaag

SEQ ID NO: 23555 - DNA, 20 bp, Artificial Sequence
  MKO10023555_A_H2-Ob
  gRNA
gcggactgttacttcaccaa

SEQ ID NO: 23556 - DNA, 20 bp, Artificial Sequence
  MKO10023556_A_H2-Ob
  gRNA
tttacacttcgacagtgacc

SEQ ID NO: 23557 - DNA, 20 bp, Artificial Sequence
  MKO10023557_A_H2-Q10
  gRNA
tacctgcaatacgcatacga

SEQ ID NO: 23558 - DNA, 20 bp, Artificial Sequence
  MKO10023558_A_H2-Q10
  gRNA
atttcgaaacctccgtttcc

SEQ ID NO: 23559 - DNA, 20 bp, Artificial Sequence
  MKO10023559_A_H2-Q10
  gRNA
taccaccagagctttaatga

SEQ ID NO: 23560 - DNA, 20 bp, Artificial Sequence
  MKO10023560_A_H2-Q1
  gRNA
actgcaggtacccgctttga

SEQ ID NO: 23561 - DNA, 20 bp, Artificial Sequence
  MKO10023561_A_H2-Q1
  gRNA
tcagatgggcgccttcaaag

SEQ ID NO: 23562 - DNA, 20 bp, Artificial Sequence
  MKO10023562_A_H2-Q1
  gRNA
atttcgagacctcggtgtcc

SEQ ID NO: 23563 - DNA, 20 bp, Artificial Sequence
  MKO10023563_A_H2-Q2
  gRNA
tatgagcagtctgcctacga

SEQ ID NO: 23564 - DNA, 20 bp, Artificial Sequence
  MKO10023564_A_H2-Q2
  gRNA
acgtcaagcaatcgacctcc

SEQ ID NO: 23565 - DNA, 20 bp, Artificial Sequence
  MKO10023565_A_H2-Q2
  gRNA
gtattgggagcggaacacac

SEQ ID NO: 23566 - DNA, 20 bp, Artificial Sequence
  MKO10023566_A_H2-Q4
  gRNA
cgctcacccgccgggggtcc

SEQ ID NO: 23567 - DNA, 20 bp, Artificial Sequence
  MKO10023567_A_H2-Q4
  gRNA
gtgagaccccgaactccttc

SEQ ID NO: 23568 - DNA, 20 bp, Artificial Sequence
  MKO10023568_A_H2-Q4
  gRNA
gcagtccctccgcagatacc

SEQ ID NO: 23569 - DNA, 20 bp, Artificial Sequence
  MKO10023569_A_H2-Q6
  gRNA
agccatgtccgccgccgtcc

SEQ ID NO: 23570 - DNA, 20 bp, Artificial Sequence
  MKO10023570_A_H2-Q6
  gRNA
cacagatcaccctacacaag

SEQ ID NO: 23571 - DNA, 20 bp, Artificial Sequence
  MKO10023571_A_H2-Q6
  gRNA
tcactcggaaactctcctca

SEQ ID NO: 23572 - DNA, 20 bp, Artificial Sequence
  MKO10023572_A_H2-Q7
  gRNA
actgcatgcacgtgccctcc

SEQ ID NO: 23573 - DNA, 20 bp, Artificial Sequence
  MKO10023573_A_H2-Q7
  gRNA
ggaaatattgcagcgagtgt

SEQ ID NO: 23574 - DNA, 20 bp, Artificial Sequence
  MKO10023574_A_H2-Q7
  gRNA
tccctcggaaactctgctca

SEQ ID NO: 23575 - DNA, 20 bp, Artificial Sequence
  MKO10023575_A_H2-Q8
  gRNA
agccatgtccgccgccgtcc

SEQ ID NO: 23576 - DNA, 20 bp, Artificial Sequence
  MKO10023576_A_H2-Q8
  gRNA
cacagatcaccctacacaag

SEQ ID NO: 23577 - DNA, 20 bp, Artificial Sequence
  MKO10023577_A_H2-Q8
  gRNA
tcactcggaaactctcctca

SEQ ID NO: 23578 - DNA, 20 bp, Artificial Sequence
  MKO10023578_A_H2-Q9
  gRNA
actgcatgcacgtgccctcc

SEQ ID NO: 23579 - DNA, 20 bp, Artificial Sequence
  MKO10023579_A_H2-Q9
  gRNA
ggaaatattgcagcgagtgt

SEQ ID NO: 23580 - DNA, 20 bp, Artificial Sequence
  MKO10023580_A_H2-Q9
  gRNA
tccctcggaaactctgctca

SEQ ID NO: 23581 - DNA, 20 bp, Artificial Sequence
  MKO10023581_A_H2-T10
  gRNA
gagccctggttcataattgt

SEQ ID NO: 23582 - DNA, 20 bp, Artificial Sequence
  MKO10023582_A_H2-T10
  gRNA
atagccgacaattatgaacc

SEQ ID NO: 23583 - DNA, 20 bp, Artificial Sequence
  MKO10023583_A_H2-T10
  gRNA
cgcagaccacagcagccctg

SEQ ID NO: 23584 - DNA, 20 bp, Artificial Sequence
  MKO10023584_A_H2-T22
  gRNA
gagccctggttcataatcgt

SEQ ID NO: 23585 - DNA, 20 bp, Artificial Sequence
  MKO10023585_A_H2-T22
  gRNA
cactgtacctcacatctctc

SEQ ID NO: 23586 - DNA, 20 bp, Artificial Sequence
  MKO10023586_A_H2-T22
  gRNA
agtgctgtttcccactgtac

SEQ ID NO: 23587 - DNA, 20 bp, Artificial Sequence
  MKO10023587_A_H2-T23
  gRNA
cattcgcggtccaggaacgc

SEQ ID NO: 23588 - DNA, 20 bp, Artificial Sequence
  MKO10023588_A_H2-T23
  gRNA
gtgtctcatttcccagccgt

SEQ ID NO: 23589 - DNA, 20 bp, Artificial Sequence
  MKO10023589_A_H2-T23
  gRNA
tactacaatcagagtaacga

SEQ ID NO: 23590 - DNA, 20 bp, Artificial Sequence
  MKO10023590_A_H2-T24
  gRNA
tctcacagccgtatgtgaac

SEQ ID NO: 23591 - DNA, 20 bp, Artificial Sequence
  MKO10023591_A_H2-T24
  gRNA
ccttcatccactacgacagc

SEQ ID NO: 23592 - DNA, 20 bp, Artificial Sequence
  MKO10023592_A_H2-T24
  gRNA
ggaaagaactttacccgaac

SEQ ID NO: 23593 - DNA, 20 bp, Artificial Sequence
  MKO10023593_A_H2-T3
  gRNA
gcacgaactgagtgtcatcc

SEQ ID NO: 23594 - DNA, 20 bp, Artificial Sequence
  MKO10023594_A_H2-T3
  gRNA
catataagctaagtgcgcca

SEQ ID NO: 23595 - DNA, 20 bp, Artificial Sequence
  MKO10023595_A_H2-T3
  gRNA
ctggttatacagagctccgt

SEQ ID NO: 23596 - DNA, 20 bp, Artificial Sequence
  MKO10023596_A_H2-T9
  gRNA
gagccctggttcataatcgt

SEQ ID NO: 23597 - DNA, 20 bp, Artificial Sequence
  MKO10023597_A_H2-T9
  gRNA
cgcagaccacagcggccctg

SEQ ID NO: 23598 - DNA, 20 bp, Artificial Sequence
  MKO10023598_A_H2-T9
  gRNA
cactgtacctcacatctctc

SEQ ID NO: 23599 - DNA, 20 bp, Artificial Sequence
  MKO10023599_A_H2afb1
  gRNA
agtactcgagcacacccgcg

SEQ ID NO: 23600 - DNA, 20 bp, Artificial Sequence
  MKO10023600_A_H2afb1
  gRNA
tagaatagtttccctctcgt

SEQ ID NO: 23601 - DNA, 20 bp, Artificial Sequence
  MKO10023601_A_H2afb1
  gRNA
gttcgttgttctgtaccaca

SEQ ID NO: 23602 - DNA, 20 bp, Artificial Sequence
  MKO10023602_A_H2afb2-ps
  gRNA
tgatatggtgcccgtctccc

SEQ ID NO: 23603 - DNA, 20 bp, Artificial Sequence
  MKO10023603_A_H2afb2-ps
  gRNA
aggtgcgggagtgatgttgg

SEQ ID NO: 23604 - DNA, 20 bp, Artificial Sequence
  MKO10023604_A_H2afb2-ps
  gRNA
cccaacgcagaggtacccag

SEQ ID NO: 23605 - DNA, 20 bp, Artificial Sequence
  MKO10023605_A_H2afb3-ps
  gRNA
tgatacggtgcccatcttcc

SEQ ID NO: 23606 - DNA, 20 bp, Artificial Sequence
  MKO10023606_A_H2afb3-ps
  gRNA
gctggagcttgccggcaatg

SEQ ID NO: 23607 - DNA, 20 bp, Artificial Sequence
  MKO10023607_A_H2afb3-ps
  gRNA
gcaccgtatcactgagcctc

SEQ ID NO: 23608 - DNA, 20 bp, Artificial Sequence
  MKO10023608_A_H2afj
  gRNA
gggtcgagcatgtccgggcg

SEQ ID NO: 23609 - DNA, 20 bp, Artificial Sequence
  MKO10023609_A_H2afj
  gRNA
cgcgcgcgacgagcgcgact

SEQ ID NO: 23610 - DNA, 20 bp, Artificial Sequence
  MKO10023610_A_H2afj
  gRNA
gggcggtaaggtgcgcgcca

SEQ ID NO: 23611 - DNA, 20 bp, Artificial Sequence
  MKO10023611_A_H2afv
  gRNA
atacgtaccgcccccggcta

SEQ ID NO: 23612 - DNA, 20 bp, Artificial Sequence
  MKO10023612_A_H2afv
  gRNA
tgtgtacagtgccgcaattc

SEQ ID NO: 23613 - DNA, 20 bp, Artificial Sequence
  MKO10023613_A_H2afv
  gRNA
acgagacaccgccttagcct

SEQ ID NO: 23614 - DNA, 20 bp, Artificial Sequence
  MKO10023614_A_H2afx
  gRNA
gaggccttcttgccgaccgc

SEQ ID NO: 23615 - DNA, 20 bp, Artificial Sequence
  MKO10023615_A_H2afx
  gRNA
aagtcgcgctcttcacgcgc

SEQ ID NO: 23616 - DNA, 20 bp, Artificial Sequence
  MKO10023616_A_H2afx
  gRNA
cgcgcctgcgcccacgcgct

SEQ ID NO: 23617 - DNA, 20 bp, Artificial Sequence
  MKO10023617_A_H2afy2
  gRNA
ctcaccttcttggacgtccg

SEQ ID NO: 23618 - DNA, 20 bp, Artificial Sequence
  MKO10023618_A_H2afy2
  gRNA
gagaatccaccccgaactgc

SEQ ID NO: 23619 - DNA, 20 bp, Artificial Sequence
  MKO10023619_A_H2afy2
  gRNA
ttatattccagcggaaatcc

SEQ ID NO: 23620 - DNA, 20 bp, Artificial Sequence
  MKO10023620_A_H2afy
  gRNA
attcggcaacacgcccccgc

SEQ ID NO: 23621 - DNA, 20 bp, Artificial Sequence
  MKO10023621_A_H2afy
  gRNA
agccatcatcacgcctccgc

SEQ ID NO: 23622 - DNA, 20 bp, Artificial Sequence
  MKO10023622_A_H2afy
  gRNA
ggccagcgcagacagtacga

SEQ ID NO: 23623 - DNA, 20 bp, Artificial Sequence
  MKO10023623_A_H2afz
  gRNA
ggcgccgcaggctggcggta

SEQ ID NO: 23624 - DNA, 20 bp, Artificial Sequence
  MKO10023624_A_H2afz
  gRNA
tcccgcttacctctgcggtg

SEQ ID NO: 23625 - DNA, 20 bp, Artificial Sequence
  MKO10023625_A_H2afz
  gRNA
tgacataccaccaccagcaa

SEQ ID NO: 23626 - DNA, 20 bp, Artificial Sequence
  MKO10023626_A_H2bfm
  gRNA
gagcgacgccgctgcacctc

SEQ ID NO: 23627 - DNA, 20 bp, Artificial Sequence
  MKO10023627_A_H2bfm
  gRNA
cgagctctgccggcgtgcag

SEQ ID NO: 23628 - DNA, 20 bp, Artificial Sequence
  MKO10023628_A_H2bfm
  gRNA
ctcagccatggcgtctacca

SEQ ID NO: 23629 - DNA, 20 bp, Artificial Sequence
  MKO10023629_A_H3f3a
  gRNA
tagaaatacctgtaacgatg

SEQ ID NO: 23630 - DNA, 20 bp, Artificial Sequence
  MKO10023630_A_H3f3a
  gRNA
attgttgcaggaggcaagtg

SEQ ID NO: 23631 - DNA, 20 bp, Artificial Sequence
  MKO10023631_A_H3f3a
  gRNA
cagactgcccgcaaatccac

SEQ ID NO: 23632 - DNA, 20 bp, Artificial Sequence
  MKO10023632_A_H3f3b
  gRNA
tctgcctacctgtagcggtg

SEQ ID NO: 23633 - DNA, 20 bp, Artificial Sequence
  MKO10023633_A_H3f3b
  gRNA
ctttacctgaagggcaccga

SEQ ID NO: 23634 - DNA, 20 bp, Artificial Sequence
  MKO10023634_A_H3f3b
  gRNA
gaaagccccccgcaaacagc

SEQ ID NO: 23635 - DNA, 20 bp, Artificial Sequence
  MKO10023635_A_H60b
  gRNA
actgtccatgtagagtacga

SEQ ID NO: 23636 - DNA, 20 bp, Artificial Sequence
  MKO10023636_A_H60b
  gRNA
ttcaaccatcgtactctaca

SEQ ID NO: 23637 - DNA, 20 bp, Artificial Sequence
  MKO10023637_A_H60b
  gRNA
atgctgttcatcagtgttga

SEQ ID NO: 23638 - DNA, 20 bp, Artificial Sequence
  MKO10023638_A_H60c
  gRNA
gtcaagtatcgtactctaca

SEQ ID NO: 23639 - DNA, 20 bp, Artificial Sequence
  MKO10023639_A_H60c
  gRNA
tgcaagtccagcccctttga

SEQ ID NO: 23640 - DNA, 20 bp, Artificial Sequence
  MKO10023640_A_H60c
  gRNA
cagggactcacctgcactac

SEQ ID NO: 23641 - DNA, 20 bp, Artificial Sequence
  MKO10023641_A_H6pd
  gRNA
ggtttggtacatggattacg

SEQ ID NO: 23642 - DNA, 20 bp, Artificial Sequence
  MKO10023642_A_H6pd
  gRNA
tcggcgcacctgtccgctgt

SEQ ID NO: 23643 - DNA, 20 bp, Artificial Sequence
  MKO10023643_A_H6pd
  gRNA
cccagcgcaggttgtcgatg

SEQ ID NO: 23644 - DNA, 20 bp, Artificial Sequence
  MKO10023644_A_Haao
  gRNA
agacatgatactacgagtcc

SEQ ID NO: 23645 - DNA, 20 bp, Artificial Sequence
  MKO10023645_A_Haao
  gRNA
aacaccgggacgtgcctata

SEQ ID NO: 23646 - DNA, 20 bp, Artificial Sequence
  MKO10023646_A_Haao
  gRNA
gcgtgccaaggtccttacag

SEQ ID NO: 23647 - DNA, 20 bp, Artificial Sequence
  MKO10023647_A_Habp2
  gRNA
gggaacagactccgccattc

SEQ ID NO: 23648 - DNA, 20 bp, Artificial Sequence
  MKO10023648_A_Habp2
  gRNA
cggggactgtatcatcagag

SEQ ID NO: 23649 - DNA, 20 bp, Artificial Sequence
  MKO10023649_A_Habp2
  gRNA
agcggtagtaggggtgcttc

SEQ ID NO: 23650 - DNA, 20 bp, Artificial Sequence
  MKO10023650_A_Habp4
  gRNA
cagaagcggactcctcgaag

SEQ ID NO: 23651 - DNA, 20 bp, Artificial Sequence
  MKO10023651_A_Habp4
  gRNA
tcatcggtaaacttctccac

SEQ ID NO: 23652 - DNA, 20 bp, Artificial Sequence
  MKO10023652_A_Habp4
  gRNA
gtggctgtggcattcgcccc

SEQ ID NO: 23653 - DNA, 20 bp, Artificial Sequence
  MKO10023653_A_Hace1
  gRNA
catttctagcagcgagatga

SEQ ID NO: 23654 - DNA, 20 bp, Artificial Sequence
  MKO10023654_A_Hace1
  gRNA
cttcatctcgctgctagaaa

SEQ ID NO: 23655 - DNA, 20 bp, Artificial Sequence
  MKO10023655_A_Hace1
  gRNA
tttgatgtcaattatgcatt

SEQ ID NO: 23656 - DNA, 20 bp, Artificial Sequence
  MKO10023656_A_Hacl1
  gRNA
agcaagggcgatttcggtca

SEQ ID NO: 23657 - DNA, 20 bp, Artificial Sequence
  MKO10023657_A_Hacl1
  gRNA
tcccggtctcatccacgcct

SEQ ID NO: 23658 - DNA, 20 bp, Artificial Sequence
  MKO10023658_A_Hacl1
  gRNA
tgcatttgccatgccgccca

SEQ ID NO: 23659 - DNA, 20 bp, Artificial Sequence
  MKO10023659_A_Hadha
  gRNA
cgccatcagtggatcctgct

SEQ ID NO: 23660 - DNA, 20 bp, Artificial Sequence
  MKO10023660_A_Hadha
  gRNA
ctttgacgccataattaata

SEQ ID NO: 23661 - DNA, 20 bp, Artificial Sequence
  MKO10023661_A_Hadha
  gRNA
tccactgatggcggccacaa

SEQ ID NO: 23662 - DNA, 20 bp, Artificial Sequence
  MKO10023662_A_Hadhb
  gRNA
cgcattccatttctgctgtc

SEQ ID NO: 23663 - DNA, 20 bp, Artificial Sequence
  MKO10023663_A_Hadhb
  gRNA
tcccaactgcactctgcccc

SEQ ID NO: 23664 - DNA, 20 bp, Artificial Sequence
  MKO10023664_A_Hadhb
  gRNA
tacctggggcagagtgcagt

SEQ ID NO: 23665 - DNA, 20 bp, Artificial Sequence
  MKO10023665_A_Hadh
  gRNA
accagacaagaccgatttgc

SEQ ID NO: 23666 - DNA, 20 bp, Artificial Sequence
  MKO10023666_A_Hadh
  gRNA
gtgcaccacggatgccgcat

SEQ ID NO: 23667 - DNA, 20 bp, Artificial Sequence
  MKO10023667_A_Hadh
  gRNA
cgtgcctatgatgaagcttg

SEQ ID NO: 23668 - DNA, 20 bp, Artificial Sequence
  MKO10023668_A_Haghl
  gRNA
gcgtcaagaggcatcgcacg

SEQ ID NO: 23669 - DNA, 20 bp, Artificial Sequence
  MKO10023669_A_Haghl
  gRNA
gtgcgatgcctcttgacgcc

SEQ ID NO: 23670 - DNA, 20 bp, Artificial Sequence
  MKO10023670_A_Haghl
  gRNA
gcatttgcgctctaacccga

SEQ ID NO: 23671 - DNA, 20 bp, Artificial Sequence
  MKO10023671_A_Hagh
  gRNA
gtccacgatggcggcctcct

SEQ ID NO: 23672 - DNA, 20 bp, Artificial Sequence
  MKO10023672_A_Hagh
  gRNA
cacccaggaggccgccatcg

SEQ ID NO: 23673 - DNA, 20 bp, Artificial Sequence
  MKO10023673_A_Hagh
  gRNA
gcttctcgttcccaccagcg

SEQ ID NO: 23674 - DNA, 20 bp, Artificial Sequence
  MKO10023674_A_Hal
  gRNA
ttcattccgtcgcagccaga

SEQ ID NO: 23675 - DNA, 20 bp, Artificial Sequence
  MKO10023675_A_Hal
  gRNA
gttcagtacattgccctaga

SEQ ID NO: 23676 - DNA, 20 bp, Artificial Sequence
  MKO10023676_A_Hal
  gRNA
tcttgtaacgtcccttgccc

SEQ ID NO: 23677 - DNA, 20 bp, Artificial Sequence
  MKO10023677_A_Hamp2
  gRNA
caccacctatctccagcaac

SEQ ID NO: 23678 - DNA, 20 bp, Artificial Sequence
  MKO10023678_A_Hamp2
  gRNA
ttcttcacaacagataccac

SEQ ID NO: 23679 - DNA, 20 bp, Artificial Sequence
  MKO10023679_A_Hamp2
  gRNA
tgctgtaacaaaccctcctg

SEQ ID NO: 23680 - DNA, 20 bp, Artificial Sequence
  MKO10023680_A_Hamp
  gRNA
tgctgtaacaattcccagtg

SEQ ID NO: 23681 - DNA, 20 bp, Artificial Sequence
  MKO10023681_A_Hamp
  gRNA
gctcacctgttgatggagat

SEQ ID NO: 23682 - DNA, 20 bp, Artificial Sequence
  MKO10023682_A_Hamp
  gRNA
caccacctatctccatcaac

SEQ ID NO: 23683 - DNA, 20 bp, Artificial Sequence
  MKO10023683_A_Hand1
  gRNA
gagcattaacagcgcgttcg

SEQ ID NO: 23684 - DNA, 20 bp, Artificial Sequence
  MKO10023684_A_Hand1
  gRNA
ccgctcctggtggcaacgcg

SEQ ID NO: 23685 - DNA, 20 bp, Artificial Sequence
  MKO10023685_A_Hand1
  gRNA
cccggcgagaagaggattaa

SEQ ID NO: 23686 - DNA, 20 bp, Artificial Sequence
  MKO10023686_A_Hand2
  gRNA
cgggcggcactcccccataa

SEQ ID NO: 23687 - DNA, 20 bp, Artificial Sequence
  MKO10023687_A_Hand2
  gRNA
gtcgccccccgactacagta

SEQ ID NO: 23688 - DNA, 20 bp, Artificial Sequence
  MKO10023688_A_Hand2
  gRNA
caggctggccacagcacgtc

SEQ ID NO: 23689 - DNA, 20 bp, Artificial Sequence
  MKO10023689_A_Hao1
  gRNA
gcaacgttgcgaagcatccg

SEQ ID NO: 23690 - DNA, 20 bp, Artificial Sequence
  MKO10023690_A_Hao1
  gRNA
gcaaccgcattgatgacgtg

SEQ ID NO: 23691 - DNA, 20 bp, Artificial Sequence
  MKO10023691_A_Hao1
  gRNA
gatcttggtgtcgaatcatg

SEQ ID NO: 23692 - DNA, 20 bp, Artificial Sequence
  MKO10023692_A_Hao2
  gRNA
gcagtgaagcacaacatccg

SEQ ID NO: 23693 - DNA, 20 bp, Artificial Sequence
  MKO10023693_A_Hao2
  gRNA
aatgtcttccacagtatagc

SEQ ID NO: 23694 - DNA, 20 bp, Artificial Sequence
  MKO10023694_A_Hao2
  gRNA
aaccggcaatgatgtgttga

SEQ ID NO: 23695 - DNA, 20 bp, Artificial Sequence
  MKO10023695_A_Hap1
  gRNA
cgaataaacgccgcacgctc

SEQ ID NO: 23696 - DNA, 20 bp, Artificial Sequence
  MKO10023696_A_Hap1
  gRNA
aagacaccagccgcgtacat

SEQ ID NO: 23697 - DNA, 20 bp, Artificial Sequence
  MKO10023697_A_Hap1
  gRNA
gtacggcttgggggcaccat

SEQ ID NO: 23698 - DNA, 20 bp, Artificial Sequence
  MKO10023698_A_Hapln1
  gRNA
agcttgcaccgcctcatcgt

SEQ ID NO: 23699 - DNA, 20 bp, Artificial Sequence
  MKO10023699_A_Hapln1
  gRNA
gttcccttactttccacgac

SEQ ID NO: 23700 - DNA, 20 bp, Artificial Sequence
  MKO10023700_A_Hapln1
  gRNA
cgccttcttggtcgagaaat

SEQ ID NO: 23701 - DNA, 20 bp, Artificial Sequence
  MKO10023701_A_Hapln2
  gRNA
gcgcggagccgtagtagcca

SEQ ID NO: 23702 - DNA, 20 bp, Artificial Sequence
  MKO10023702_A_Hapln2
  gRNA
tcgggcacctctacgccgcc

SEQ ID NO: 23703 - DNA, 20 bp, Artificial Sequence
  MKO10023703_A_Hapln2
  gRNA
tcactctcgtcgtggggcca

SEQ ID NO: 23704 - DNA, 20 bp, Artificial Sequence
  MKO10023704_A_Hapln3
  gRNA
gctgccggggcagcactatt

SEQ ID NO: 23705 - DNA, 20 bp, Artificial Sequence
  MKO10023705_A_Hapln3
  gRNA
agccagcatcacaacgatcc

SEQ ID NO: 23706 - DNA, 20 bp, Artificial Sequence
  MKO10023706_A_Hapln3
  gRNA
gcgcccttcgcgggactggt

SEQ ID NO: 23707 - DNA, 20 bp, Artificial Sequence
  MKO10023707_A_Hapln4
  gRNA
ctacgggcgctacgagtgcg

SEQ ID NO: 23708 - DNA, 20 bp, Artificial Sequence
  MKO10023708_A_Hapln4
  gRNA
aacgcgggatggttacgcga

SEQ ID NO: 23709 - DNA, 20 bp, Artificial Sequence
  MKO10023709_A_Hapln4
  gRNA
atcttgtagcgacctccgcg

SEQ ID NO: 23710 - DNA, 20 bp, Artificial Sequence
  MKO10023710_A_Harbi1
  gRNA
cgatactccgctgcagtttc

SEQ ID NO: 23711 - DNA, 20 bp, Artificial Sequence
  MKO10023711_A_Harbi1
  gRNA
ttgcatctcccatccgagtc

SEQ ID NO: 23712 - DNA, 20 bp, Artificial Sequence
  MKO10023712_A_Harbi1
  gRNA
acgaattctatggattggca

SEQ ID NO: 23713 - DNA, 20 bp, Artificial Sequence
  MKO10023713_A_Hars2
  gRNA
aacagctgataatcttatcg

SEQ ID NO: 23714 - DNA, 20 bp, Artificial Sequence
  MKO10023714_A_Hars2
  gRNA
tagcggccctgggctatagc

SEQ ID NO: 23715 - DNA, 20 bp, Artificial Sequence
  MKO10023715_A_Hars2
  gRNA
atcagctgtttcaaacgtca

SEQ ID NO: 23716 - DNA, 20 bp, Artificial Sequence
  MKO10023716_A_Hars
  gRNA
ggcgatacacctttgctata

SEQ ID NO: 23717 - DNA, 20 bp, Artificial Sequence
  MKO10023717_A_Hars
  gRNA
taaacgctaccatatagcaa

SEQ ID NO: 23718 - DNA, 20 bp, Artificial Sequence
  MKO10023718_A_Hars
  gRNA
atccgctgtttcaaacgcca

SEQ ID NO: 23719 - DNA, 20 bp, Artificial Sequence
  MKO10023719_A_Has1
  gRNA
agcacgcgtaacctcgtgtg

SEQ ID NO: 23720 - DNA, 20 bp, Artificial Sequence
  MKO10023720_A_Has1
  gRNA
ccgagaagtcttcgccgatg

SEQ ID NO: 23721 - DNA, 20 bp, Artificial Sequence
  MKO10023721_A_Has1
  gRNA
atttggaccagcgggtctgt

SEQ ID NO: 23722 - DNA, 20 bp, Artificial Sequence
  MKO10023722_A_Has2
  gRNA
acaaatcggccacgtacatc

SEQ ID NO: 23723 - DNA, 20 bp, Artificial Sequence
  MKO10023723_A_Has2
  gRNA
gcgaagcgtggattatgtac

SEQ ID NO: 23724 - DNA, 20 bp, Artificial Sequence
  MKO10023724_A_Has2
  gRNA
acttgatgagacccactagc

SEQ ID NO: 23725 - DNA, 20 bp, Artificial Sequence
  MKO10023725_A_Has3
  gRNA
ggtagtggatggcaatcgcc

SEQ ID NO: 23726 - DNA, 20 bp, Artificial Sequence
  MKO10023726_A_Has3
  gRNA
agcgtgctgtatacttagtc

SEQ ID NO: 23727 - DNA, 20 bp, Artificial Sequence
  MKO10023727_A_Has3
  gRNA
caccgtcgaatgcgcagggc

SEQ ID NO: 23728 - DNA, 20 bp, Artificial Sequence
  MKO10023728_A_Hat1
  gRNA
tttcagctcgattgctgtgt

SEQ ID NO: 23729 - DNA, 20 bp, Artificial Sequence
  MKO10023729_A_Hat1
  gRNA
atcttgctgtactatattgc

SEQ ID NO: 23730 - DNA, 20 bp, Artificial Sequence
  MKO10023730_A_Hat1
  gRNA
atcagacaaatcattccacc

SEQ ID NO: 23731 - DNA, 20 bp, Artificial Sequence
  MKO10023731_A_Haus1
  gRNA
ctaacaccagcgttgccgtc

SEQ ID NO: 23732 - DNA, 20 bp, Artificial Sequence
  MKO10023732_A_Haus1
  gRNA
gcaagtgaatatgaatccga

SEQ ID NO: 23733 - DNA, 20 bp, Artificial Sequence
  MKO10023733_A_Haus1
  gRNA
ttaatggttaggtcgctgag

SEQ ID NO: 23734 - DNA, 20 bp, Artificial Sequence
  MKO10023734_A_Haus2
  gRNA
gcaaacttactcaaatggga

SEQ ID NO: 23735 - DNA, 20 bp, Artificial Sequence
  MKO10023735_A_Haus2
  gRNA
actgctgagacccatgtgcc

SEQ ID NO: 23736 - DNA, 20 bp, Artificial Sequence
  MKO10023736_A_Haus2
  gRNA
cattggaagctgtttatcac

SEQ ID NO: 23737 - DNA, 20 bp, Artificial Sequence
  MKO10023737_A_Haus3
  gRNA
tctccagtcgtcgctcccta

SEQ ID NO: 23738 - DNA, 20 bp, Artificial Sequence
  MKO10023738_A_Haus3
  gRNA
ttcagcgatctccagcgatc

SEQ ID NO: 23739 - DNA, 20 bp, Artificial Sequence
  MKO10023739_A_Haus3
  gRNA
atatcggcaactagagagtt

SEQ ID NO: 23740 - DNA, 20 bp, Artificial Sequence
  MKO10023740_A_Haus4
  gRNA
gtatgagatcctcttccgtc

SEQ ID NO: 23741 - DNA, 20 bp, Artificial Sequence
  MKO10023741_A_Haus4
  gRNA
acagagttgcccccgctgct

SEQ ID NO: 23742 - DNA, 20 bp, Artificial Sequence
  MKO10023742_A_Haus4
  gRNA
aagtggcttgagcctcacgc

SEQ ID NO: 23743 - DNA, 20 bp, Artificial Sequence
  MKO10023743_A_Haus5
  gRNA
ctatcagatccatcggaagt

SEQ ID NO: 23744 - DNA, 20 bp, Artificial Sequence
  MKO10023744_A_Haus5
  gRNA
aagccactgtggcccgcctt

SEQ ID NO: 23745 - DNA, 20 bp, Artificial Sequence
  MKO10023745_A_Haus5
  gRNA
gttaccagaggaggtttccc

SEQ ID NO: 23746 - DNA, 20 bp, Artificial Sequence
  MKO10023746_A_Haus6
  gRNA
aaaatctgttacgtgctaca

SEQ ID NO: 23747 - DNA, 20 bp, Artificial Sequence
  MKO10023747_A_Haus6
  gRNA
accattcacagcaatgtttc

SEQ ID NO: 23748 - DNA, 20 bp, Artificial Sequence
  MKO10023748_A_Haus6
  gRNA
tccggaaacattgctgtgaa

SEQ ID NO: 23749 - DNA, 20 bp, Artificial Sequence
  MKO10023749_A_Haus7
  gRNA
agcgcgaaacatggcggagg

SEQ ID NO: 23750 - DNA, 20 bp, Artificial Sequence
  MKO10023750_A_Haus7
  gRNA
tgtgtaggccctcaaagtac

SEQ ID NO: 23751 - DNA, 20 bp, Artificial Sequence
  MKO10023751_A_Haus7
  gRNA
ctgtaatatacaggccgtcg

SEQ ID NO: 23752 - DNA, 20 bp, Artificial Sequence
  MKO10023752_A_Haus8
  gRNA
tcaccctgcgtcccgttctg

SEQ ID NO: 23753 - DNA, 20 bp, Artificial Sequence
  MKO10023753_A_Haus8
  gRNA
tcttgtcatattgcagatac

SEQ ID NO: 23754 - DNA, 20 bp, Artificial Sequence
  MKO10023754_A_Haus8
  gRNA
cccataacaggtttctggag

SEQ ID NO: 23755 - DNA, 20 bp, Artificial Sequence
  MKO10023755_A_Havcr1
  gRNA
acaacgacatgttggggccg

SEQ ID NO: 23756 - DNA, 20 bp, Artificial Sequence
  MKO10023756_A_Havcr1
  gRNA
tgtacttactcaacatatcg

SEQ ID NO: 23757 - DNA, 20 bp, Artificial Sequence
  MKO10023757_A_Havcr1
  gRNA
acttacagtgtgattactcc

SEQ ID NO: 23758 - DNA, 20 bp, Artificial Sequence
  MKO10023758_A_Havcr2
  gRNA
tgttgagatcgccctttagc

SEQ ID NO: 23759 - DNA, 20 bp, Artificial Sequence
  MKO10023759_A_Havcr2
  gRNA
atcagttctgagcaactcgt

SEQ ID NO: 23760 - DNA, 20 bp, Artificial Sequence
  MKO10023760_A_Havcr2
  gRNA
agtctctgctgggttgaccc

SEQ ID NO: 23761 - DNA, 20 bp, Artificial Sequence
  MKO10023761_A_Hax1
  gRNA
agagtactcaccctatgaaa

SEQ ID NO: 23762 - DNA, 20 bp, Artificial Sequence
  MKO10023762_A_Hax1
  gRNA
ccttccagatcttgactccc

SEQ ID NO: 23763 - DNA, 20 bp, Artificial Sequence
  MKO10023763_A_Hax1
  gRNA
aattcacacaccaggagagt

SEQ ID NO: 23764 - DNA, 20 bp, Artificial Sequence
  MKO10023764_A_Hba-a1
  gRNA
gtccagagaggcatgcaccg

SEQ ID NO: 23765 - DNA, 20 bp, Artificial Sequence
  MKO10023765_A_Hba-a1
  gRNA
cagctccatattcagcacca

SEQ ID NO: 23766 - DNA, 20 bp, Artificial Sequence
  MKO10023766_A_Hba-a1
  gRNA
gaagaaaccatggtgctctc

SEQ ID NO: 23767 - DNA, 20 bp, Artificial Sequence
  MKO10023767_A_Hba-a2
  gRNA
atccagagaggcatgcaccg

SEQ ID NO: 23768 - DNA, 20 bp, Artificial Sequence
  MKO10023768_A_Hba-a2
  gRNA
cagctccatattcagcacca

SEQ ID NO: 23769 - DNA, 20 bp, Artificial Sequence
  MKO10023769_A_Hba-a2
  gRNA
gaagaaaccatggtgctctc

SEQ ID NO: 23770 - DNA, 20 bp, Artificial Sequence
  MKO10023770_A_Hba-x
  gRNA
ttcaagatcatgaccgccgt

SEQ ID NO: 23771 - DNA, 20 bp, Artificial Sequence
  MKO10023771_A_Hba-x
  gRNA
cttagcggtacttctcagtc

SEQ ID NO: 23772 - DNA, 20 bp, Artificial Sequence
  MKO10023772_A_Hba-x
  gRNA
gctgctcaggccgagcccat

SEQ ID NO: 23773 - DNA, 20 bp, Artificial Sequence
  MKO10023773_A_Hbb-b1
  gRNA
aacaattaaccattgttcac

SEQ ID NO: 23774 - DNA, 20 bp, Artificial Sequence
  MKO10023774_A_Hbb-b1
  gRNA
tgcaccatgatgtctgtttc

SEQ ID NO: 23775 - DNA, 20 bp, Artificial Sequence
  MKO10023775_A_Hbb-b1
  gRNA
agagagcatctgtcagttgt

SEQ ID NO: 23776 - DNA, 20 bp, Artificial Sequence
  MKO10023776_A_Hbb-b2
  gRNA
ctgctattgtctatgcacaa

SEQ ID NO: 23777 - DNA, 20 bp, Artificial Sequence
  MKO10023777_A_Hbb-b2
  gRNA
gataaaagctagatgcccaa

SEQ ID NO: 23778 - DNA, 20 bp, Artificial Sequence
  MKO10023778_A_Hbb-b2
  gRNA
aacctcagaaacagacatca

SEQ ID NO: 23779 - DNA, 20 bp, Artificial Sequence
  MKO10023779_A_Hbb-bh1
  gRNA
aatccgggggtttcccatga

SEQ ID NO: 23780 - DNA, 20 bp, Artificial Sequence
  MKO10023780_A_Hbb-bh1
  gRNA
atggagtttaatggtacttg

SEQ ID NO: 23781 - DNA, 20 bp, Artificial Sequence
  MKO10023781_A_Hbb-bh1
  gRNA
ggctcctgattgtttaccca

SEQ ID NO: 23782 - DNA, 20 bp, Artificial Sequence
  MKO10023782_A_Hbb-bh2
  gRNA
tgccttcaccttagtccacg

SEQ ID NO: 23783 - DNA, 20 bp, Artificial Sequence
  MKO10023783_A_Hbb-bh2
  gRNA
tgtcatggtgcagctcactc

SEQ ID NO: 23784 - DNA, 20 bp, Artificial Sequence
  MKO10023784_A_Hbb-bh2
  gRNA
aaagtggtcaaagtatctct

SEQ ID NO: 23785 - DNA, 20 bp, Artificial Sequence
  MKO10023785_A_Hbb-bs
  gRNA
tttagtggtacttgtgagcc

SEQ ID NO: 23786 - DNA, 20 bp, Artificial Sequence
  MKO10023786_A_Hbb-bs
  gRNA
gcacctgactgatgctgaga

SEQ ID NO: 23787 - DNA, 20 bp, Artificial Sequence
  MKO10023787_A_Hbb-bs
  gRNA
ggcctcaccaccaacttcat

SEQ ID NO: 23788 - DNA, 20 bp, Artificial Sequence
  MKO10023788_A_Hbb-bt
  gRNA
cttagtggtacttgtgagcc

SEQ ID NO: 23789 - DNA, 20 bp, Artificial Sequence
  MKO10023789_A_Hbb-bt
  gRNA
gcacctgactgatgctgaga

SEQ ID NO: 23790 - DNA, 20 bp, Artificial Sequence
  MKO10023790_A_Hbb-bt
  gRNA
ggcctcaccaccaacttcat

SEQ ID NO: 23791 - DNA, 20 bp, Artificial Sequence
  MKO10023791_A_Hbb-y
  gRNA
gacccttgggttgcccatta

SEQ ID NO: 23792 - DNA, 20 bp, Artificial Sequence
  MKO10023792_A_Hbb-y
  gRNA
agaccctcatcaatggcctg

SEQ ID NO: 23793 - DNA, 20 bp, Artificial Sequence
  MKO10023793_A_Hbb-y
  gRNA
caacattgaccttactccac

SEQ ID NO: 23794 - DNA, 20 bp, Artificial Sequence
  MKO10023794_A_Hbegf
  gRNA
ttgtccagtgttgtccgcgt

SEQ ID NO: 23795 - DNA, 20 bp, Artificial Sequence
  MKO10023795_A_Hbegf
  gRNA
gcaggtatctgcactccccg

SEQ ID NO: 23796 - DNA, 20 bp, Artificial Sequence
  MKO10023796_A_Hbegf
  gRNA
gtgtataggggattctccac

SEQ ID NO: 23797 - DNA, 20 bp, Artificial Sequence
  MKO10023797_A_Hbp1
  gRNA
cttggtaatggcgacgggtt

SEQ ID NO: 23798 - DNA, 20 bp, Artificial Sequence
  MKO10023798_A_Hbp1
  gRNA
ctagtcggagcaccataaca

SEQ ID NO: 23799 - DNA, 20 bp, Artificial Sequence
  MKO10023799_A_Hbp1
  gRNA
tcacttcccacaccatgtta

SEQ ID NO: 23800 - DNA, 20 bp, Artificial Sequence
  MKO10023800_A_Hbq1a
  gRNA
aatctacacgaccgaggcct

SEQ ID NO: 23801 - DNA, 20 bp, Artificial Sequence
  MKO10023801_A_Hbq1a
  gRNA
atgacccagacacgtgtcca

SEQ ID NO: 23802 - DNA, 20 bp, Artificial Sequence
  MKO10023802_A_Hbq1a
  gRNA
cttcaagtaatgctgaattg

SEQ ID NO: 23803 - DNA, 20 bp, Artificial Sequence
  MKO10023803_A_Hbq1b
  gRNA
atccccaattcagcgatatt

SEQ ID NO: 23804 - DNA, 20 bp, Artificial Sequence
  MKO10023804_A_Hbq1b
  gRNA
aatctacgcgaccgaggctt

SEQ ID NO: 23805 - DNA, 20 bp, Artificial Sequence
  MKO10023805_A_Hbq1b
  gRNA
ggcgtacctctccaaagcct

SEQ ID NO: 23806 - DNA, 20 bp, Artificial Sequence
  MKO10023806_A_Hbs1l
  gRNA
cggggatataactacgatga

SEQ ID NO: 23807 - DNA, 20 bp, Artificial Sequence
  MKO10023807_A_Hbs1l
  gRNA
tactgtatctcaccatcaac

SEQ ID NO: 23808 - DNA, 20 bp, Artificial Sequence
  MKO10023808_A_Hbs1l
  gRNA
caattaagtgaaattgacca

SEQ ID NO: 23809 - DNA, 20 bp, Artificial Sequence
  MKO10023809_A_Hccs
  gRNA
ccatcgttggtccgatttgg

SEQ ID NO: 23810 - DNA, 20 bp, Artificial Sequence
  MKO10023810_A_Hccs
  gRNA
cactcaccctttccgtaaca

SEQ ID NO: 23811 - DNA, 20 bp, Artificial Sequence
  MKO10023811_A_Hccs
  gRNA
atcagaataatgagcaagcg

SEQ ID NO: 23812 - DNA, 20 bp, Artificial Sequence
  MKO10023812_A_Hcfc1r1
  gRNA
agctccacgatatccccagc

SEQ ID NO: 23813 - DNA, 20 bp, Artificial Sequence
  MKO10023813_A_Hcfc1r1
  gRNA
caattacacacctggcgttt

SEQ ID NO: 23814 - DNA, 20 bp, Artificial Sequence
  MKO10023814_A_Hcfc1r1
  gRNA
gacttgggggacctcgctcc

SEQ ID NO: 23815 - DNA, 20 bp, Artificial Sequence
  MKO10023815_A_Hcfc1
  gRNA
accccaagaacaacattccg

SEQ ID NO: 23816 - DNA, 20 bp, Artificial Sequence
  MKO10023816_A_Hcfc1
  gRNA
tcacctcggaatgttgttct

SEQ ID NO: 23817 - DNA, 20 bp, Artificial Sequence
  MKO10023817_A_Hcfc1
  gRNA
aggcaggacaccgtaagtga

SEQ ID NO: 23818 - DNA, 20 bp, Artificial Sequence
  MKO10023818_A_Hcfc2
  gRNA
tggaatgtgcggtgctcgtc

SEQ ID NO: 23819 - DNA, 20 bp, Artificial Sequence
  MKO10023819_A_Hcfc2
  gRNA
tggagaaggcacaacgcctt

SEQ ID NO: 23820 - DNA, 20 bp, Artificial Sequence
  MKO10023820_A_Hcfc2
  gRNA
gggatgtctcctctaacagc

SEQ ID NO: 23821 - DNA, 20 bp, Artificial Sequence
  MKO10023821_A_Hck
  gRNA
gtcgtacagtgcgaccacaa

SEQ ID NO: 23822 - DNA, 20 bp, Artificial Sequence
  MKO10023822_A_Hck
  gRNA
acggtccctggctaccaaga

SEQ ID NO: 23823 - DNA, 20 bp, Artificial Sequence
  MKO10023823_A_Hck
  gRNA
gtgggatccggcacatacac

SEQ ID NO: 23824 - DNA, 20 bp, Artificial Sequence
  MKO10023824_A_Hcls1
  gRNA
caaaccgaccgccatagcca

SEQ ID NO: 23825 - DNA, 20 bp, Artificial Sequence
  MKO10023825_A_Hcls1
  gRNA
tctcagactgatgccgccag

SEQ ID NO: 23826 - DNA, 20 bp, Artificial Sequence
  MKO10023826_A_Hcls1
  gRNA
ccacgagtatgttgctgatg

SEQ ID NO: 23827 - DNA, 20 bp, Artificial Sequence
  MKO10023827_A_Hcn1
  gRNA
cctcacgatacgaagtgctc

SEQ ID NO: 23828 - DNA, 20 bp, Artificial Sequence
  MKO10023828_A_Hcn1
  gRNA
ccagagcacttcgtatcgtg

SEQ ID NO: 23829 - DNA, 20 bp, Artificial Sequence
  MKO10023829_A_Hcn1
  gRNA
acctgctacgcaatgtttgt

SEQ ID NO: 23830 - DNA, 20 bp, Artificial Sequence
  MKO10023830_A_Hcn2
  gRNA
ttcgtcacggcgccaatacc

SEQ ID NO: 23831 - DNA, 20 bp, Artificial Sequence
  MKO10023831_A_Hcn2
  gRNA
ctactcgttcgcgctcttca

SEQ ID NO: 23832 - DNA, 20 bp, Artificial Sequence
  MKO10023832_A_Hcn2
  gRNA
agaagaagtacttgcgtacg

SEQ ID NO: 23833 - DNA, 20 bp, Artificial Sequence
  MKO10023833_A_Hcn3
  gRNA
gaacgcgttacctgcgcacc

SEQ ID NO: 23834 - DNA, 20 bp, Artificial Sequence
  MKO10023834_A_Hcn3
  gRNA
aggtgcgcaggtaacgcgtt

SEQ ID NO: 23835 - DNA, 20 bp, Artificial Sequence
  MKO10023835_A_Hcn3
  gRNA
agcgatgctcgtagtactcg

SEQ ID NO: 23836 - DNA, 20 bp, Artificial Sequence
  MKO10023836_A_Hcn4
  gRNA
cacgatgcgtaccacggcgc

SEQ ID NO: 23837 - DNA, 20 bp, Artificial Sequence
  MKO10023837_A_Hcn4
  gRNA
caacttccgcacggggatcg

SEQ ID NO: 23838 - DNA, 20 bp, Artificial Sequence
  MKO10023838_A_Hcn4
  gRNA
gccgggaggagtctagcgac

SEQ ID NO: 23839 - DNA, 20 bp, Artificial Sequence
  MKO10023839_A_Hcrtr1
  gRNA
atcaccgagtcgtggctctt

SEQ ID NO: 23840 - DNA, 20 bp, Artificial Sequence
  MKO10023840_A_Hcrtr1
  gRNA
ctgagctagccaatcgcacc

SEQ ID NO: 23841 - DNA, 20 bp, Artificial Sequence
  MKO10023841_A_Hcrtr1
  gRNA
agcacagctcgccgtgcccg

SEQ ID NO: 23842 - DNA, 20 bp, Artificial Sequence
  MKO10023842_A_Hcrtr2
  gRNA
taaagcagatccgagcacga

SEQ ID NO: 23843 - DNA, 20 bp, Artificial Sequence
  MKO10023843_A_Hcrtr2
  gRNA
gatgctgtttcgagcccgtt

SEQ ID NO: 23844 - DNA, 20 bp, Artificial Sequence
  MKO10023844_A_Hcrtr2
  gRNA
aatggcgtaccatcggtcca

SEQ ID NO: 23845 - DNA, 20 bp, Artificial Sequence
  MKO10023845_A_Hcrt
  gRNA
cgtgcaacagttcgtagaga

SEQ ID NO: 23846 - DNA, 20 bp, Artificial Sequence
  MKO10023846_A_Hcrt
  gRNA
cggacagccgcgaccagagc

SEQ ID NO: 23847 - DNA, 20 bp, Artificial Sequence
  MKO10023847_A_Hcrt
  gRNA
tggctctttacctttgtaga

SEQ ID NO: 23848 - DNA, 20 bp, Artificial Sequence
  MKO10023848_A_Hcst
  gRNA
tcatgtcactcctaattgta

SEQ ID NO: 23849 - DNA, 20 bp, Artificial Sequence
  MKO10023849_A_Hcst
  gRNA
cagcccagcatggacccccc

SEQ ID NO: 23850 - DNA, 20 bp, Artificial Sequence
  MKO10023850_A_Hcst
  gRNA
tgaccgcatctgcagccact

SEQ ID NO: 23851 - DNA, 20 bp, Artificial Sequence
  MKO10023851_A_Hc
  gRNA
gatactctacctgactggtc

SEQ ID NO: 23852 - DNA, 20 bp, Artificial Sequence
  MKO10023852_A_Hc
  gRNA
ctgtcaacagtgccgcgttt

SEQ ID NO: 23853 - DNA, 20 bp, Artificial Sequence
  MKO10023853_A_Hc
  gRNA
agttaagacagtctcccgtt

SEQ ID NO: 23854 - DNA, 20 bp, Artificial Sequence
  MKO10023854_A_Hdac10
  gRNA
agggcagctgtcaggcgctc

SEQ ID NO: 23855 - DNA, 20 bp, Artificial Sequence
  MKO10023855_A_Hdac10
  gRNA
tggcctgcggcagcgtggcc

SEQ ID NO: 23856 - DNA, 20 bp, Artificial Sequence
  MKO10023856_A_Hdac10
  gRNA
tgcaccagggctatatattc

SEQ ID NO: 23857 - DNA, 20 bp, Artificial Sequence
  MKO10023857_A_Hdac11
  gRNA
gtaacgtggtgagtacacga

SEQ ID NO: 23858 - DNA, 20 bp, Artificial Sequence
  MKO10023858_A_Hdac11
  gRNA
gcctcgtgtgcaccaccagc

SEQ ID NO: 23859 - DNA, 20 bp, Artificial Sequence
  MKO10023859_A_Hdac11
  gRNA
gcgctatctcaacgagctga

SEQ ID NO: 23860 - DNA, 20 bp, Artificial Sequence
  MKO10023860_A_Hdac1
  gRNA
cttaccgacagagcctcccg

SEQ ID NO: 23861 - DNA, 20 bp, Artificial Sequence
  MKO10023861_A_Hdac1
  gRNA
ttacgtcaatgacatcgtcc

SEQ ID NO: 23862 - DNA, 20 bp, Artificial Sequence
  MKO10023862_A_Hdac1
  gRNA
ctttcaagtcaatgttggtg

SEQ ID NO: 23863 - DNA, 20 bp, Artificial Sequence
  MKO10023863_A_Hdac2
  gRNA
ctcaccaactgaaccacccg

SEQ ID NO: 23864 - DNA, 20 bp, Artificial Sequence
  MKO10023864_A_Hdac2
  gRNA
taacgtcggagaagattgtc

SEQ ID NO: 23865 - DNA, 20 bp, Artificial Sequence
  MKO10023865_A_Hdac2
  gRNA
ctggggctgtgaaattaaac

SEQ ID NO: 23866 - DNA, 20 bp, Artificial Sequence
  MKO10023866_A_Hdac3
  gRNA
gagccttaatgccttcaacg

SEQ ID NO: 23867 - DNA, 20 bp, Artificial Sequence
  MKO10023867_A_Hdac3
  gRNA
tagaccaccggcccagttga

SEQ ID NO: 23868 - DNA, 20 bp, Artificial Sequence
  MKO10023868_A_Hdac3
  gRNA
gagttctgctcccgttacac

SEQ ID NO: 23869 - DNA, 20 bp, Artificial Sequence
  MKO10023869_A_Hdac4
  gRNA
tcacttacccataccagtag

SEQ ID NO: 23870 - DNA, 20 bp, Artificial Sequence
  MKO10023870_A_Hdac4
  gRNA
tttccagcgatccccgctac

SEQ ID NO: 23871 - DNA, 20 bp, Artificial Sequence
  MKO10023871_A_Hdac4
  gRNA
agtacccatggacctgcgct

SEQ ID NO: 23872 - DNA, 20 bp, Artificial Sequence
  MKO10023872_A_Hdac5
  gRNA
cctcgtgctgccgcgtcaag

SEQ ID NO: 23873 - DNA, 20 bp, Artificial Sequence
  MKO10023873_A_Hdac5
  gRNA
agcagcacgaccacttgacg

SEQ ID NO: 23874 - DNA, 20 bp, Artificial Sequence
  MKO10023874_A_Hdac5
  gRNA
tgctcttctccttgttgcgc

SEQ ID NO: 23875 - DNA, 20 bp, Artificial Sequence
  MKO10023875_A_Hdac6
  gRNA
cttctttacctccgctagat

SEQ ID NO: 23876 - DNA, 20 bp, Artificial Sequence
  MKO10023876_A_Hdac6
  gRNA
ccaggcccggttcgctgaga

SEQ ID NO: 23877 - DNA, 20 bp, Artificial Sequence
  MKO10023877_A_Hdac6
  gRNA
aacaccaatccagtaccaac

SEQ ID NO: 23878 - DNA, 20 bp, Artificial Sequence
  MKO10023878_A_Hdac7
  gRNA
ctctggtgggggctccaccg

SEQ ID NO: 23879 - DNA, 20 bp, Artificial Sequence
  MKO10023879_A_Hdac7
  gRNA
gagctacctgtagggaatac

SEQ ID NO: 23880 - DNA, 20 bp, Artificial Sequence
  MKO10023880_A_Hdac7
  gRNA
tgttgcagggtcagcagcgc

SEQ ID NO: 23881 - DNA, 20 bp, Artificial Sequence
  MKO10023881_A_Hdac8
  gRNA
gtcgcaatcgtaatattccc

SEQ ID NO: 23882 - DNA, 20 bp, Artificial Sequence
  MKO10023882_A_Hdac8
  gRNA
ctttacacttcccgtcaatc

SEQ ID NO: 23883 - DNA, 20 bp, Artificial Sequence
  MKO10023883_A_Hdac8
  gRNA
atttgaccgtattctctacg

SEQ ID NO: 23884 - DNA, 20 bp, Artificial Sequence
  MKO10023884_A_Hdac9
  gRNA
ttgttgctgatttactcaac

SEQ ID NO: 23885 - DNA, 20 bp, Artificial Sequence
  MKO10023885_A_Hdac9
  gRNA
tccagtggacgtgaaatcag

SEQ ID NO: 23886 - DNA, 20 bp, Artificial Sequence
  MKO10023886_A_Hdac9
  gRNA
tcctacaagtacacattacc

SEQ ID NO: 23887 - DNA, 20 bp, Artificial Sequence
  MKO10023887_A_Hdc
  gRNA
atccactttaattgccctgc

SEQ ID NO: 23888 - DNA, 20 bp, Artificial Sequence
  MKO10023888_A_Hdc
  gRNA
aacgagccgagcgttcaggg

SEQ ID NO: 23889 - DNA, 20 bp, Artificial Sequence
  MKO10023889_A_Hdc
  gRNA
cgggagcactcgcaggtagc

SEQ ID NO: 23890 - DNA, 20 bp, Artificial Sequence
  MKO10023890_A_Hddc2
  gRNA
attctgccatatcgtgaacc

SEQ ID NO: 23891 - DNA, 20 bp, Artificial Sequence
  MKO10023891_A_Hddc2
  gRNA
cagatgtatacgcctagccc

SEQ ID NO: 23892 - DNA, 20 bp, Artificial Sequence
  MKO10023892_A_Hddc2
  gRNA
cagagatgaccgtcttaaca

SEQ ID NO: 23893 - DNA, 20 bp, Artificial Sequence
  MKO10023893_A_Hddc3
  gRNA
agcccggatcctaacccatg

SEQ ID NO: 23894 - DNA, 20 bp, Artificial Sequence
  MKO10023894_A_Hddc3
  gRNA
accgatggggtgattaatgt

SEQ ID NO: 23895 - DNA, 20 bp, Artificial Sequence
  MKO10023895_A_Hddc3
  gRNA
ctgtaggggtgcagcgattc

SEQ ID NO: 23896 - DNA, 20 bp, Artificial Sequence
  MKO10023896_A_Hdgfl1
  gRNA
gcgacatgttcgatcctcgc

SEQ ID NO: 23897 - DNA, 20 bp, Artificial Sequence
  MKO10023897_A_Hdgfl1
  gRNA
gctgaagccgcgcctcttgt

SEQ ID NO: 23898 - DNA, 20 bp, Artificial Sequence
  MKO10023898_A_Hdgfl1
  gRNA
ccccggtcttgtacttagag

SEQ ID NO: 23899 - DNA, 20 bp, Artificial Sequence
  MKO10023899_A_Hdgfrp2
  gRNA
caccggaggcgcactgtagc

SEQ ID NO: 23900 - DNA, 20 bp, Artificial Sequence
  MKO10023900_A_Hdgfrp2
  gRNA
tgccagctacagtgcgcctc

SEQ ID NO: 23901 - DNA, 20 bp, Artificial Sequence
  MKO10023901_A_Hdgfrp2
  gRNA
ctggtcttctccgactcaga

SEQ ID NO: 23902 - DNA, 20 bp, Artificial Sequence
  MKO10023902_A_Hdgfrp3
  gRNA
gaaaaagtcctacacgtcaa

SEQ ID NO: 23903 - DNA, 20 bp, Artificial Sequence
  MKO10023903_A_Hdgfrp3
  gRNA
tctttatcatcttcgtctcc

SEQ ID NO: 23904 - DNA, 20 bp, Artificial Sequence
  MKO10023904_A_Hdgfrp3
  gRNA
ttcagtgacctttgacgtgt

SEQ ID NO: 23905 - DNA, 20 bp, Artificial Sequence
  MKO10023905_A_Hdgf
  gRNA
tcttatcaccgtcaccctca

SEQ ID NO: 23906 - DNA, 20 bp, Artificial Sequence
  MKO10023906_A_Hdgf
  gRNA
cgagaacaaccctacagtca

SEQ ID NO: 23907 - DNA, 20 bp, Artificial Sequence
  MKO10023907_A_Hdgf
  gRNA
ctcctatccagggcattcct

SEQ ID NO: 23908 - DNA, 20 bp, Artificial Sequence
  MKO10023908_A_Hdhd1a
  gRNA
ctacctgcctttacggaata

SEQ ID NO: 23909 - DNA, 20 bp, Artificial Sequence
  MKO10023909_A_Hdhd1a
  gRNA
tgtttggaaggtaacggtct

SEQ ID NO: 23910 - DNA, 20 bp, Artificial Sequence
  MKO10023910_A_Hdhd1a
  gRNA
tattcagaataagtccgtcc

SEQ ID NO: 23911 - DNA, 20 bp, Artificial Sequence
  MKO10023911_A_Hdhd2
  gRNA
ccgtgcgttaaaagctgttt

SEQ ID NO: 23912 - DNA, 20 bp, Artificial Sequence
  MKO10023912_A_Hdhd2
  gRNA
cagctgcttaccggaatgct

SEQ ID NO: 23913 - DNA, 20 bp, Artificial Sequence
  MKO10023913_A_Hdhd2
  gRNA
gcttctgctcgattaagttt

SEQ ID NO: 23914 - DNA, 20 bp, Artificial Sequence
  MKO10023914_A_Hdhd3
  gRNA
caactttgaccgacgactag

SEQ ID NO: 23915 - DNA, 20 bp, Artificial Sequence
  MKO10023915_A_Hdhd3
  gRNA
atcaagctccgccgacccgt

SEQ ID NO: 23916 - DNA, 20 bp, Artificial Sequence
  MKO10023916_A_Hdhd3
  gRNA
ttaggatatcctctagtcgt

SEQ ID NO: 23917 - DNA, 20 bp, Artificial Sequence
  MKO10023917_A_Hdlbp
  gRNA
taacaagatccggcccatca

SEQ ID NO: 23918 - DNA, 20 bp, Artificial Sequence
  MKO10023918_A_Hdlbp
  gRNA
gagcaccatcgctttgttat

SEQ ID NO: 23919 - DNA, 20 bp, Artificial Sequence
  MKO10023919_A_Hdlbp
  gRNA
ggtcatctgggcgtgggatc

SEQ ID NO: 23920 - DNA, 20 bp, Artificial Sequence
  MKO10023920_A_Hdx
  gRNA
tgcttacttgatgagcttac

SEQ ID NO: 23921 - DNA, 20 bp, Artificial Sequence
  MKO10023921_A_Hdx
  gRNA
tcaattcagtgaccgagact

SEQ ID NO: 23922 - DNA, 20 bp, Artificial Sequence
  MKO10023922_A_Hdx
  gRNA
attgaagttccacctccaag

SEQ ID NO: 23923 - DNA, 20 bp, Artificial Sequence
  MKO10023923_A_Heatr1
  gRNA
ttctgccgtaccatgagaca

SEQ ID NO: 23924 - DNA, 20 bp, Artificial Sequence
  MKO10023924_A_Heatr1
  gRNA
ccttcacagatctcgtcact

SEQ ID NO: 23925 - DNA, 20 bp, Artificial Sequence
  MKO10023925_A_Heatr1
  gRNA
tggcgactacattgtctgat

SEQ ID NO: 23926 - DNA, 20 bp, Artificial Sequence
  MKO10023926_A_Heatr2
  gRNA
agtgcccgtggcttcgataa

SEQ ID NO: 23927 - DNA, 20 bp, Artificial Sequence
  MKO10023927_A_Heatr2
  gRNA
ggtagccgttatcgaagcca

SEQ ID NO: 23928 - DNA, 20 bp, Artificial Sequence
  MKO10023928_A_Heatr2
  gRNA
tctgtcatgatatcaccgac

SEQ ID NO: 23929 - DNA, 20 bp, Artificial Sequence
  MKO10023929_A_Heatr3
  gRNA
cactaccagacttagcccgt

SEQ ID NO: 23930 - DNA, 20 bp, Artificial Sequence
  MKO10023930_A_Heatr3
  gRNA
gccggcgcacagcatcccga

SEQ ID NO: 23931 - DNA, 20 bp, Artificial Sequence
  MKO10023931_A_Heatr3
  gRNA
attgacctggctgtctccgt

SEQ ID NO: 23932 - DNA, 20 bp, Artificial Sequence
  MKO10023932_A_Heatr5a
  gRNA
tgatatccgcacgtcataat

SEQ ID NO: 23933 - DNA, 20 bp, Artificial Sequence
  MKO10023933_A_Heatr5a
  gRNA
ctgagcaaggagcttgcgcg

SEQ ID NO: 23934 - DNA, 20 bp, Artificial Sequence
  MKO10023934_A_Heatr5a
  gRNA
cagccttgtaaacgtccctg

SEQ ID NO: 23935 - DNA, 20 bp, Artificial Sequence
  MKO10023935_A_Heatr5b
  gRNA
gtcgcagtatctaagctact

SEQ ID NO: 23936 - DNA, 20 bp, Artificial Sequence
  MKO10023936_A_Heatr5b
  gRNA
tacagcattgatgccgaaac

SEQ ID NO: 23937 - DNA, 20 bp, Artificial Sequence
  MKO10023937_A_Heatr5b
  gRNA
cagccatcgacctgtcggtc

SEQ ID NO: 23938 - DNA, 20 bp, Artificial Sequence
  MKO10023938_A_Heatr6
  gRNA
gtctccaaaatcgtctgata

SEQ ID NO: 23939 - DNA, 20 bp, Artificial Sequence
  MKO10023939_A_Heatr6
  gRNA
gtaatctgttaagcaaacga

SEQ ID NO: 23940 - DNA, 20 bp, Artificial Sequence
  MKO10023940_A_Heatr6
  gRNA
tcatccatatcagacgattt

SEQ ID NO: 23941 - DNA, 20 bp, Artificial Sequence
  MKO10023941_A_Hebp1
  gRNA
tgttcgggagcgtggaaacg

SEQ ID NO: 23942 - DNA, 20 bp, Artificial Sequence
  MKO10023942_A_Hebp1
  gRNA
cggattccgaaccaatttca

SEQ ID NO: 23943 - DNA, 20 bp, Artificial Sequence
  MKO10023943_A_Hebp1
  gRNA
gggacgctcacctttgtcat

SEQ ID NO: 23944 - DNA, 20 bp, Artificial Sequence
  MKO10023944_A_Hebp2
  gRNA
gctccacgtagcttgtcacg

SEQ ID NO: 23945 - DNA, 20 bp, Artificial Sequence
  MKO10023945_A_Hebp2
  gRNA
ccctccgtcgagaacaaata

SEQ ID NO: 23946 - DNA, 20 bp, Artificial Sequence
  MKO10023946_A_Hebp2
  gRNA
agcccccgtgacaagctacg

SEQ ID NO: 23947 - DNA, 20 bp, Artificial Sequence
  MKO10023947_A_Heca
  gRNA
ccgatccgtacgtcgatcac

SEQ ID NO: 23948 - DNA, 20 bp, Artificial Sequence
  MKO10023948_A_Heca
  gRNA
cctgtgatcgacgtacggat

SEQ ID NO: 23949 - DNA, 20 bp, Artificial Sequence
  MKO10023949_A_Heca
  gRNA
accattcttagcgtctcccg

SEQ ID NO: 23950 - DNA, 20 bp, Artificial Sequence
  MKO10023950_A_Hectd1
  gRNA
ctaccccacgacgagtaaac

SEQ ID NO: 23951 - DNA, 20 bp, Artificial Sequence
  MKO10023951_A_Hectd1
  gRNA
ctgatctgcacgcgtgagtc

SEQ ID NO: 23952 - DNA, 20 bp, Artificial Sequence
  MKO10023952_A_Hectd1
  gRNA
gacttacaattgtcgacacc

SEQ ID NO: 23953 - DNA, 20 bp, Artificial Sequence
  MKO10023953_A_Hectd2
  gRNA
tctctcgcccggagcgccgc

SEQ ID NO: 23954 - DNA, 20 bp, Artificial Sequence
  MKO10023954_A_Hectd2
  gRNA
gaagctgccgcccatcgtga

SEQ ID NO: 23955 - DNA, 20 bp, Artificial Sequence
  MKO10023955_A_Hectd2
  gRNA
agcgttaccatctgaagtga

SEQ ID NO: 23956 - DNA, 20 bp, Artificial Sequence
  MKO10023956_A_Hectd3
  gRNA
agctatttggcgtggactac

SEQ ID NO: 23957 - DNA, 20 bp, Artificial Sequence
  MKO10023957_A_Hectd3
  gRNA
tctagtgtgtcgaccagcag

SEQ ID NO: 23958 - DNA, 20 bp, Artificial Sequence
  MKO10023958_A_Hectd3
  gRNA
cctgacctattcacatcgcc

SEQ ID NO: 23959 - DNA, 20 bp, Artificial Sequence
  MKO10023959_A_Hecw1
  gRNA
ggagtgccctatcgaatagt

SEQ ID NO: 23960 - DNA, 20 bp, Artificial Sequence
  MKO10023960_A_Hecw1
  gRNA
ggggttctttgcaccggcgt

SEQ ID NO: 23961 - DNA, 20 bp, Artificial Sequence
  MKO10023961_A_Hecw1
  gRNA
gcagggccccacttactccg

SEQ ID NO: 23962 - DNA, 20 bp, Artificial Sequence
  MKO10023962_A_Hecw2
  gRNA
aagaggttgaccccagcgat

SEQ ID NO: 23963 - DNA, 20 bp, Artificial Sequence
  MKO10023963_A_Hecw2
  gRNA
atagagtcctatccaatcgc

SEQ ID NO: 23964 - DNA, 20 bp, Artificial Sequence
  MKO10023964_A_Hecw2
  gRNA
tctcctcagatgggggccga

SEQ ID NO: 23965 - DNA, 20 bp, Artificial Sequence
  MKO10023965_A_Heg1
  gRNA
aggagtactcacacgatggg

SEQ ID NO: 23966 - DNA, 20 bp, Artificial Sequence
  MKO10023966_A_Heg1
  gRNA
ctgatattgccgtcgacatt

SEQ ID NO: 23967 - DNA, 20 bp, Artificial Sequence
  MKO10023967_A_Heg1
  gRNA
accacttcaaccacgtcagc

SEQ ID NO: 23968 - DNA, 20 bp, Artificial Sequence
  MKO10023968_A_Helb
  gRNA
ttgcgcctctaattgacgcc

SEQ ID NO: 23969 - DNA, 20 bp, Artificial Sequence
  MKO10023969_A_Helb
  gRNA
ggcgcaaagcccaacgatcc

SEQ ID NO: 23970 - DNA, 20 bp, Artificial Sequence
  MKO10023970_A_Helb
  gRNA
cacaaccagaactcgaaccg

SEQ ID NO: 23971 - DNA, 20 bp, Artificial Sequence
  MKO10023971_A_Hells
  gRNA
acggtcattaaaacttacag

SEQ ID NO: 23972 - DNA, 20 bp, Artificial Sequence
  MKO10023972_A_Hells
  gRNA
tagggtaaaagtttagttga

SEQ ID NO: 23973 - DNA, 20 bp, Artificial Sequence
  MKO10023973_A_Hells
  gRNA
ttggataggctcaaaagtct

SEQ ID NO: 23974 - DNA, 20 bp, Artificial Sequence
  MKO10023974_A_Helq
  gRNA
tggccgtgctcactagtttc

SEQ ID NO: 23975 - DNA, 20 bp, Artificial Sequence
  MKO10023975_A_Helq
  gRNA
gggtctggttgtcgtcgatg

SEQ ID NO: 23976 - DNA, 20 bp, Artificial Sequence
  MKO10023976_A_Helq
  gRNA
cttaatgatccttccgtatg

SEQ ID NO: 23977 - DNA, 20 bp, Artificial Sequence
  MKO10023977_A_Helt
  gRNA
accgtcgcgctggacaagta

SEQ ID NO: 23978 - DNA, 20 bp, Artificial Sequence
  MKO10023978_A_Helt
  gRNA
tgaagccacaatgttcccgc

SEQ ID NO: 23979 - DNA, 20 bp, Artificial Sequence
  MKO10023979_A_Helt
  gRNA
taaccgctgcttgaacgagc

SEQ ID NO: 23980 - DNA, 20 bp, Artificial Sequence
  MKO10023980_A_Helz2
  gRNA
ctcgttcgaactaccgacag

SEQ ID NO: 23981 - DNA, 20 bp, Artificial Sequence
  MKO10023981_A_Helz2
  gRNA
ggccaatgtgtacgtcttgc

SEQ ID NO: 23982 - DNA, 20 bp, Artificial Sequence
  MKO10023982_A_Helz2
  gRNA
tatactgtactgttaggcgc

SEQ ID NO: 23983 - DNA, 20 bp, Artificial Sequence
  MKO10023983_A_Helz
  gRNA
gcaacgagtaatgtcctgtc

SEQ ID NO: 23984 - DNA, 20 bp, Artificial Sequence
  MKO10023984_A_Helz
  gRNA
cttctacgtgacatccagac

SEQ ID NO: 23985 - DNA, 20 bp, Artificial Sequence
  MKO10023985_A_Helz
  gRNA
gctgatgaagattgtaggca

SEQ ID NO: 23986 - DNA, 20 bp, Artificial Sequence
  MKO10023986_A_Hemgn
  gRNA
cttcaggccccgacatttca

SEQ ID NO: 23987 - DNA, 20 bp, Artificial Sequence
  MKO10023987_A_Hemgn
  gRNA
ccccaatcagatgtcgctga

SEQ ID NO: 23988 - DNA, 20 bp, Artificial Sequence
  MKO10023988_A_Hemgn
  gRNA
ccgcagacatcattggatct

SEQ ID NO: 23989 - DNA, 20 bp, Artificial Sequence
  MKO10023989_A_Hemk1
  gRNA
atgccggtgcagtatatcct

SEQ ID NO: 23990 - DNA, 20 bp, Artificial Sequence
  MKO10023990_A_Hemk1
  gRNA
gccactgacccctcaacaat

SEQ ID NO: 23991 - DNA, 20 bp, Artificial Sequence
  MKO10023991_A_Hemk1
  gRNA
ccttccaggaactggttgaa

SEQ ID NO: 23992 - DNA, 20 bp, Artificial Sequence
  MKO10023992_A_Hemt1
  gRNA
catacagcgtctgagattcg

SEQ ID NO: 23993 - DNA, 20 bp, Artificial Sequence
  MKO10023993_A_Hemt1
  gRNA
caagtccctctctaaattag

SEQ ID NO: 23994 - DNA, 20 bp, Artificial Sequence
  MKO10023994_A_Hemt1
  gRNA
ttcaagtataacttgcaatg

SEQ ID NO: 23995 - DNA, 20 bp, Artificial Sequence
  MKO10023995_A_Henmt1
  gRNA
tcatctataggttgccgacc

SEQ ID NO: 23996 - DNA, 20 bp, Artificial Sequence
  MKO10023996_A_Henmt1
  gRNA
gcatcgcttgtctccctatt

SEQ ID NO: 23997 - DNA, 20 bp, Artificial Sequence
  MKO10023997_A_Henmt1
  gRNA
acgccgaccataaatttgag

SEQ ID NO: 23998 - DNA, 20 bp, Artificial Sequence
  MKO10023998_A_Hepacam2
  gRNA
tcgagtttcatcgcgtcttc

SEQ ID NO: 23999 - DNA, 20 bp, Artificial Sequence
  MKO10023999_A_Hepacam2
  gRNA
cccgctgcagttcaccgatg

SEQ ID NO: 24000 - DNA, 20 bp, Artificial Sequence
  MKO10024000_A_Hepacam2
  gRNA
cacgatgtaattgccctcat

SEQ ID NO: 24001 - DNA, 20 bp, Artificial Sequence
  MKO10024001_A_Hepacam
  gRNA
ctgactatcgagaccgtatc

SEQ ID NO: 24002 - DNA, 20 bp, Artificial Sequence
  MKO10024002_A_Hepacam
  gRNA
gcctagctacacgtggctga

SEQ ID NO: 24003 - DNA, 20 bp, Artificial Sequence
  MKO10024003_A_Hepacam
  gRNA
agcccagtacgtctgatcca

SEQ ID NO: 24004 - DNA, 20 bp, Artificial Sequence
  MKO10024004_A_Hephl1
  gRNA
cgagggcccaacaggatagg

SEQ ID NO: 24005 - DNA, 20 bp, Artificial Sequence
  MKO10024005_A_Hephl1
  gRNA
ctcacacattgatgccccta

SEQ ID NO: 24006 - DNA, 20 bp, Artificial Sequence
  MKO10024006_A_Hephl1
  gRNA
gattcgccaacgcacatctc

SEQ ID NO: 24007 - DNA, 20 bp, Artificial Sequence
  MKO10024007_A_Heph
  gRNA
ggccattcgaaactactact

SEQ ID NO: 24008 - DNA, 20 bp, Artificial Sequence
  MKO10024008_A_Heph
  gRNA
gcccaagtagtagtttcgaa

SEQ ID NO: 24009 - DNA, 20 bp, Artificial Sequence
  MKO10024009_A_Heph
  gRNA
gtcggctcgcaaaattcttc

SEQ ID NO: 24010 - DNA, 20 bp, Artificial Sequence
  MKO10024010_A_Herc1
  gRNA
gtacgtacctttccctgtag

SEQ ID NO: 24011 - DNA, 20 bp, Artificial Sequence
  MKO10024011_A_Herc1
  gRNA
actgattattggaatctccg

SEQ ID NO: 24012 - DNA, 20 bp, Artificial Sequence
  MKO10024012_A_Herc1
  gRNA
tacagggttcatctgctgat

SEQ ID NO: 24013 - DNA, 20 bp, Artificial Sequence
  MKO10024013_A_Herc2
  gRNA
aggcaatgaagtagcgctcg

SEQ ID NO: 24014 - DNA, 20 bp, Artificial Sequence
  MKO10024014_A_Herc2
  gRNA
gtgctgctcgggatccgact

SEQ ID NO: 24015 - DNA, 20 bp, Artificial Sequence
  MKO10024015_A_Herc2
  gRNA
gtagaaggtcttgcccgagt

SEQ ID NO: 24016 - DNA, 20 bp, Artificial Sequence
  MKO10024016_A_Herc3
  gRNA
aaagtcgtctatattagttg

SEQ ID NO: 24017 - DNA, 20 bp, Artificial Sequence
  MKO10024017_A_Herc3
  gRNA
catgactactgaggattccg

SEQ ID NO: 24018 - DNA, 20 bp, Artificial Sequence
  MKO10024018_A_Herc3
  gRNA
gtgtgcgtaaaagcttcacg

SEQ ID NO: 24019 - DNA, 20 bp, Artificial Sequence
  MKO10024019_A_Herc4
  gRNA
acgcaacagctacgatattc

SEQ ID NO: 24020 - DNA, 20 bp, Artificial Sequence
  MKO10024020_A_Herc4
  gRNA
aatatcgtagctgttgcgtg

SEQ ID NO: 24021 - DNA, 20 bp, Artificial Sequence
  MKO10024021_A_Herc4
  gRNA
cagatagtacaggttgcgtg

SEQ ID NO: 24022 - DNA, 20 bp, Artificial Sequence
  MKO10024022_A_Herc6
  gRNA
atctacaagccgcattcaat

SEQ ID NO: 24023 - DNA, 20 bp, Artificial Sequence
  MKO10024023_A_Herc6
  gRNA
ctcagcgggaacaaagttaa

SEQ ID NO: 24024 - DNA, 20 bp, Artificial Sequence
  MKO10024024_A_Herc6
  gRNA
tccttccccatgaaaacacg

SEQ ID NO: 24025 - DNA, 20 bp, Artificial Sequence
  MKO10024025_A_Herpud1
  gRNA
ggttccagcagatctatgca

SEQ ID NO: 24026 - DNA, 20 bp, Artificial Sequence
  MKO10024026_A_Herpud1
  gRNA
ttgccgtaaaccatcacttg

SEQ ID NO: 24027 - DNA, 20 bp, Artificial Sequence
  MKO10024027_A_Herpud1
  gRNA
cctagagatgttctcccatc

SEQ ID NO: 24028 - DNA, 20 bp, Artificial Sequence
  MKO10024028_A_Herpud2
  gRNA
ccaaaatccagcaccgatag

SEQ ID NO: 24029 - DNA, 20 bp, Artificial Sequence
  MKO10024029_A_Herpud2
  gRNA
acttacccttggattacata

SEQ ID NO: 24030 - DNA, 20 bp, Artificial Sequence
  MKO10024030_A_Herpud2
  gRNA
atggagttgttgaatccgaa

SEQ ID NO: 24031 - DNA, 20 bp, Artificial Sequence
  MKO10024031_A_Hes1
  gRNA
cggcgcgaatggcgcgtgct

SEQ ID NO: 24032 - DNA, 20 bp, Artificial Sequence
  MKO10024032_A_Hes1
  gRNA
gaccgggccgctgtgagcga

SEQ ID NO: 24033 - DNA, 20 bp, Artificial Sequence
  MKO10024033_A_Hes1
  gRNA
cggtcatctgcgcccgctgc

SEQ ID NO: 24034 - DNA, 20 bp, Artificial Sequence
  MKO10024034_A_Hes2
  gRNA
tctcgttgatccgcgcgcgc

SEQ ID NO: 24035 - DNA, 20 bp, Artificial Sequence
  MKO10024035_A_Hes2
  gRNA
tagtaggcgcgcgctcactg

SEQ ID NO: 24036 - DNA, 20 bp, Artificial Sequence
  MKO10024036_A_Hes2
  gRNA
gacttcccgctcttcgaagt

SEQ ID NO: 24037 - DNA, 20 bp, Artificial Sequence
  MKO10024037_A_Hes3
  gRNA
cggtcgccacacgcgaaacc

SEQ ID NO: 24038 - DNA, 20 bp, Artificial Sequence
  MKO10024038_A_Hes3
  gRNA
tcacgccacgcaagccgcct

SEQ ID NO: 24039 - DNA, 20 bp, Artificial Sequence
  MKO10024039_A_Hes3
  gRNA
tgcacgcatcaacgtgtcac

SEQ ID NO: 24040 - DNA, 20 bp, Artificial Sequence
  MKO10024040_A_Hes5
  gRNA
acctcgcgccaacccgcctg

SEQ ID NO: 24041 - DNA, 20 bp, Artificial Sequence
  MKO10024041_A_Hes5
  gRNA
gcccggagctgcgccccaac

SEQ ID NO: 24042 - DNA, 20 bp, Artificial Sequence
  MKO10024042_A_Hes5
  gRNA
cctcccgcagctgcggaagc

SEQ ID NO: 24043 - DNA, 20 bp, Artificial Sequence
  MKO10024043_A_Hes6
  gRNA
cgcgccctgcacgcgcctca

SEQ ID NO: 24044 - DNA, 20 bp, Artificial Sequence
  MKO10024044_A_Hes6
  gRNA
tggagaagaagcgacgcgca

SEQ ID NO: 24045 - DNA, 20 bp, Artificial Sequence
  MKO10024045_A_Hes6
  gRNA
aagctgctaccctcacgcag

SEQ ID NO: 24046 - DNA, 20 bp, Artificial Sequence
  MKO10024046_A_Hes7
  gRNA
cgccggcgcgcccgaatccc

SEQ ID NO: 24047 - DNA, 20 bp, Artificial Sequence
  MKO10024047_A_Hes7
  gRNA
ccgcgagtgcctgcttcgct

SEQ ID NO: 24048 - DNA, 20 bp, Artificial Sequence
  MKO10024048_A_Hes7
  gRNA
ggagatactggagttcgccg

SEQ ID NO: 24049 - DNA, 20 bp, Artificial Sequence
  MKO10024049_A_Hesx1
  gRNA
tcatctttgctcggcgattt

SEQ ID NO: 24050 - DNA, 20 bp, Artificial Sequence
  MKO10024050_A_Hesx1
  gRNA
tctggccttggatgatccac

SEQ ID NO: 24051 - DNA, 20 bp, Artificial Sequence
  MKO10024051_A_Hesx1
  gRNA
attattctaggtcgaagtat

SEQ ID NO: 24052 - DNA, 20 bp, Artificial Sequence
  MKO10024052_A_Hexa
  gRNA
atgtatccagcagtacgccc

SEQ ID NO: 24053 - DNA, 20 bp, Artificial Sequence
  MKO10024053_A_Hexa
  gRNA
attacattcagctgtgacga

SEQ ID NO: 24054 - DNA, 20 bp, Artificial Sequence
  MKO10024054_A_Hexa
  gRNA
actttcctcgattccctcac

SEQ ID NO: 24055 - DNA, 20 bp, Artificial Sequence
  MKO10024055_A_Hexb
  gRNA
agcgtttggggagcgttacg

SEQ ID NO: 24056 - DNA, 20 bp, Artificial Sequence
  MKO10024056_A_Hexb
  gRNA
taacgctccccaaacgctgt

SEQ ID NO: 24057 - DNA, 20 bp, Artificial Sequence
  MKO10024057_A_Hexb
  gRNA
tctccaagattccctcatag

SEQ ID NO: 24058 - DNA, 20 bp, Artificial Sequence
  MKO10024058_A_Hexdc
  gRNA
acatgtcttcgtactcaatg

SEQ ID NO: 24059 - DNA, 20 bp, Artificial Sequence
  MKO10024059_A_Hexdc
  gRNA
gtgtccgaatgtctgcacca

SEQ ID NO: 24060 - DNA, 20 bp, Artificial Sequence
  MKO10024060_A_Hexdc
  gRNA
ggttacagagatcctgcgcc

SEQ ID NO: 24061 - DNA, 20 bp, Artificial Sequence
  MKO10024061_A_Hexim1
  gRNA
atccgacgacaccagcgatg

SEQ ID NO: 24062 - DNA, 20 bp, Artificial Sequence
  MKO10024062_A_Hexim1
  gRNA
cgaaaataaccggctgcggc

SEQ ID NO: 24063 - DNA, 20 bp, Artificial Sequence
  MKO10024063_A_Hexim1
  gRNA
ctcgaacccgcgaagctcgc

SEQ ID NO: 24064 - DNA, 20 bp, Artificial Sequence
  MKO10024064_A_Hexim2
  gRNA
gggtggtgttgtagggcgcc

SEQ ID NO: 24065 - DNA, 20 bp, Artificial Sequence
  MKO10024065_A_Hexim2
  gRNA
gagggcctctcgggtccgtg

SEQ ID NO: 24066 - DNA, 20 bp, Artificial Sequence
  MKO10024066_A_Hexim2
  gRNA
acgctgtgttgcagttggta

SEQ ID NO: 24067 - DNA, 20 bp, Artificial Sequence
  MKO10024067_A_Hey1
  gRNA
cgacccgcttcgcgttcgcc

SEQ ID NO: 24068 - DNA, 20 bp, Artificial Sequence
  MKO10024068_A_Hey1
  gRNA
accggtcccaagccgccact

SEQ ID NO: 24069 - DNA, 20 bp, Artificial Sequence
  MKO10024069_A_Hey1
  gRNA
gtccccaacgacatcgtccc

SEQ ID NO: 24070 - DNA, 20 bp, Artificial Sequence
  MKO10024070_A_Hey2
  gRNA
cgcacgcgtagtgggtccga

SEQ ID NO: 24071 - DNA, 20 bp, Artificial Sequence
  MKO10024071_A_Hey2
  gRNA
gaagatgtggataggcgaca

SEQ ID NO: 24072 - DNA, 20 bp, Artificial Sequence
  MKO10024072_A_Hey2
  gRNA
acgctacaagctcagtgatg

SEQ ID NO: 24073 - DNA, 20 bp, Artificial Sequence
  MKO10024073_A_Heyl
  gRNA
ggcaacaaattccgccgggt

SEQ ID NO: 24074 - DNA, 20 bp, Artificial Sequence
  MKO10024074_A_Heyl
  gRNA
ccaatcgtcgcaattcagaa

SEQ ID NO: 24075 - DNA, 20 bp, Artificial Sequence
  MKO10024075_A_Heyl
  gRNA
cctttctgaattgcgacgat

SEQ ID NO: 24076 - DNA, 20 bp, Artificial Sequence
  MKO10024076_A_Hfe2
  gRNA
gcgttggctcccgacgaaac

SEQ ID NO: 24077 - DNA, 20 bp, Artificial Sequence
  MKO10024077_A_Hfe2
  gRNA
ggctcaccggacacgccgcg

SEQ ID NO: 24078 - DNA, 20 bp, Artificial Sequence
  MKO10024078_A_Hfe2
  gRNA
atcaatgggggcgaccgacc

SEQ ID NO: 24079 - DNA, 20 bp, Artificial Sequence
  MKO10024079_A_Hfe
  gRNA
cccgttaggtagcaccttct

SEQ ID NO: 24080 - DNA, 20 bp, Artificial Sequence
  MKO10024080_A_Hfe
  gRNA
gcctgggtgctccacttgac

SEQ ID NO: 24081 - DNA, 20 bp, Artificial Sequence
  MKO10024081_A_Hfe
  gRNA
agatccgtgccaaacagaac

SEQ ID NO: 24082 - DNA, 20 bp, Artificial Sequence
  MKO10024082_A_Hfm1
  gRNA
aatgacatgtcccatgtagc

SEQ ID NO: 24083 - DNA, 20 bp, Artificial Sequence
  MKO10024083_A_Hfm1
  gRNA
atcctgttcatgtacattat

SEQ ID NO: 24084 - DNA, 20 bp, Artificial Sequence
  MKO10024084_A_Hfm1
  gRNA
ttcaaagaacctaagccatt

SEQ ID NO: 24085 - DNA, 20 bp, Artificial Sequence
  MKO10024085_A_Hgd
  gRNA
ccctttgagtccatcgacca

SEQ ID NO: 24086 - DNA, 20 bp, Artificial Sequence
  MKO10024086_A_Hgd
  gRNA
cgccgtctaccttctcttat

SEQ ID NO: 24087 - DNA, 20 bp, Artificial Sequence
  MKO10024087_A_Hgd
  gRNA
ccttggtcgatggactcaaa

SEQ ID NO: 24088 - DNA, 20 bp, Artificial Sequence
  MKO10024088_A_Hgfac
  gRNA
cacacaactatgaccgagac

SEQ ID NO: 24089 - DNA, 20 bp, Artificial Sequence
  MKO10024089_A_Hgfac
  gRNA
tgcaggttccctttccgcta

SEQ ID NO: 24090 - DNA, 20 bp, Artificial Sequence
  MKO10024090_A_Hgfac
  gRNA
ctaccactgctcttgcccgc

SEQ ID NO: 24091 - DNA, 20 bp, Artificial Sequence
  MKO10024091_A_Hgf
  gRNA
tctttaccgcgatagctcga

SEQ ID NO: 24092 - DNA, 20 bp, Artificial Sequence
  MKO10024092_A_Hgf
  gRNA
aactactgtcgaaatcctcg

SEQ ID NO: 24093 - DNA, 20 bp, Artificial Sequence
  MKO10024093_A_Hgf
  gRNA
agtcaagaaaacgatgctac

SEQ ID NO: 24094 - DNA, 20 bp, Artificial Sequence
  MKO10024094_A_Hgsnat
  gRNA
ccgtgagagacgttcgccag

SEQ ID NO: 24095 - DNA, 20 bp, Artificial Sequence
  MKO10024095_A_Hgsnat
  gRNA
cgatgagggctaaaccaaca

SEQ ID NO: 24096 - DNA, 20 bp, Artificial Sequence
  MKO10024096_A_Hgsnat
  gRNA
ggacgagcctgactgtgtac

SEQ ID NO: 24097 - DNA, 20 bp, Artificial Sequence
  MKO10024097_A_Hgs
  gRNA
gatctgcgacctgatccgtc

SEQ ID NO: 24098 - DNA, 20 bp, Artificial Sequence
  MKO10024098_A_Hgs
  gRNA
ccggaacgaacccaagtaca

SEQ ID NO: 24099 - DNA, 20 bp, Artificial Sequence
  MKO10024099_A_Hgs
  gRNA
gtttgttggccacttcatca

SEQ ID NO: 24100 - DNA, 20 bp, Artificial Sequence
  MKO10024100_A_Hhatl
  gRNA
cttcgaccgcttccatgctc

SEQ ID NO: 24101 - DNA, 20 bp, Artificial Sequence
  MKO10024101_A_Hhatl
  gRNA
agcaagggagtagcggcggt

SEQ ID NO: 24102 - DNA, 20 bp, Artificial Sequence
  MKO10024102_A_Hhatl
  gRNA
tggtgggcacaatgggccca

SEQ ID NO: 24103 - DNA, 20 bp, Artificial Sequence
  MKO10024103_A_Hhat
  gRNA
agttaaggatgggcccgttg

SEQ ID NO: 24104 - DNA, 20 bp, Artificial Sequence
  MKO10024104_A_Hhat
  gRNA
tccgatccgtgctcctgtcc

SEQ ID NO: 24105 - DNA, 20 bp, Artificial Sequence
  MKO10024105_A_Hhat
  gRNA
cagcaccatcgcgttctgcg

SEQ ID NO: 24106 - DNA, 20 bp, Artificial Sequence
  MKO10024106_A_Hhex
  gRNA
gtgtagtcgttcaccgtccg

SEQ ID NO: 24107 - DNA, 20 bp, Artificial Sequence
  MKO10024107_A_Hhex
  gRNA
accggcgtgggctcgtacac

SEQ ID NO: 24108 - DNA, 20 bp, Artificial Sequence
  MKO10024108_A_Hhex
  gRNA
ccagacgctttctctcgggt

SEQ ID NO: 24109 - DNA, 20 bp, Artificial Sequence
  MKO10024109_A_Hhipl1
  gRNA
agtcggtgtcatctagcgac

SEQ ID NO: 24110 - DNA, 20 bp, Artificial Sequence
  MKO10024110_A_Hhipl1
  gRNA
gagcgcgccagccgtagttg

SEQ ID NO: 24111 - DNA, 20 bp, Artificial Sequence
  MKO10024111_A_Hhipl1
  gRNA
tcatccacgaacgggttgtc

SEQ ID NO: 24112 - DNA, 20 bp, Artificial Sequence
  MKO10024112_A_Hhipl2
  gRNA
ggccgaggtcggatattctg

SEQ ID NO: 24113 - DNA, 20 bp, Artificial Sequence
  MKO10024113_A_Hhipl2
  gRNA
atcgtagaggtgagccgcgt

SEQ ID NO: 24114 - DNA, 20 bp, Artificial Sequence
  MKO10024114_A_Hhipl2
  gRNA
actttgccgtaatgcgtcct

SEQ ID NO: 24115 - DNA, 20 bp, Artificial Sequence
  MKO10024115_A_Hhip
  gRNA
gcccaatagcccaccgttcc

SEQ ID NO: 24116 - DNA, 20 bp, Artificial Sequence
  MKO10024116_A_Hhip
  gRNA
tgtgtcttataccaccaacc

SEQ ID NO: 24117 - DNA, 20 bp, Artificial Sequence
  MKO10024117_A_Hhip
  gRNA
tcggctcttcattctagaga

SEQ ID NO: 24118 - DNA, 20 bp, Artificial Sequence
  MKO10024118_A_Hhla1
  gRNA
ttagaggttcttgcaactac

SEQ ID NO: 24119 - DNA, 20 bp, Artificial Sequence
  MKO10024119_A_Hhla1
  gRNA
aacctgaccgagcttgtgaa

SEQ ID NO: 24120 - DNA, 20 bp, Artificial Sequence
  MKO10024120_A_Hhla1
  gRNA
aactccctacctgttgcagg

SEQ ID NO: 24121 - DNA, 20 bp, Artificial Sequence
  MKO10024121_A_Hiat1
  gRNA
ctcccctagtgtgtatcatg

SEQ ID NO: 24122 - DNA, 20 bp, Artificial Sequence
  MKO10024122_A_Hiat1
  gRNA
ataaccgcatgatacacact

SEQ ID NO: 24123 - DNA, 20 bp, Artificial Sequence
  MKO10024123_A_Hiat1
  gRNA
ctctgatgaagatcagcccg

SEQ ID NO: 24124 - DNA, 20 bp, Artificial Sequence
  MKO10024124_A_Hiatl1
  gRNA
gcttccctatcccactaatg

SEQ ID NO: 24125 - DNA, 20 bp, Artificial Sequence
  MKO10024125_A_Hiatl1
  gRNA
aggtaaagaagaccgtgcca

SEQ ID NO: 24126 - DNA, 20 bp, Artificial Sequence
  MKO10024126_A_Hiatl1
  gRNA
gtagtacttacagtcaacat

SEQ ID NO: 24127 - DNA, 20 bp, Artificial Sequence
  MKO10024127_A_Hibadh
  gRNA
agctccacagtataccacgt

SEQ ID NO: 24128 - DNA, 20 bp, Artificial Sequence
  MKO10024128_A_Hibadh
  gRNA
aacttctaccgcattcatac

SEQ ID NO: 24129 - DNA, 20 bp, Artificial Sequence
  MKO10024129_A_Hibadh
  gRNA
ggctccaacgtggtatactg

SEQ ID NO: 24130 - DNA, 20 bp, Artificial Sequence
  MKO10024130_A_Hibch
  gRNA
tattcagactcagtgcgttg

SEQ ID NO: 24131 - DNA, 20 bp, Artificial Sequence
  MKO10024131_A_Hibch
  gRNA
ctattgcagacctttagctg

SEQ ID NO: 24132 - DNA, 20 bp, Artificial Sequence
  MKO10024132_A_Hibch
  gRNA
cagatgttgcagaataacgc

SEQ ID NO: 24133 - DNA, 20 bp, Artificial Sequence
  MKO10024133_A_Hic1
  gRNA
cggccgggctcaccatgtca

SEQ ID NO: 24134 - DNA, 20 bp, Artificial Sequence
  MKO10024134_A_Hic1
  gRNA
cacccggggagcctcgatcc

SEQ ID NO: 24135 - DNA, 20 bp, Artificial Sequence
  MKO10024135_A_Hic1
  gRNA
agccgcacacagtccccgcg

SEQ ID NO: 24136 - DNA, 20 bp, Artificial Sequence
  MKO10024136_A_Hic2
  gRNA
cttctcgtgttgccgcagtg

SEQ ID NO: 24137 - DNA, 20 bp, Artificial Sequence
  MKO10024137_A_Hic2
  gRNA
cgcccactatgtataccggc

SEQ ID NO: 24138 - DNA, 20 bp, Artificial Sequence
  MKO10024138_A_Hic2
  gRNA
cccaggcctaccggagtgcc

SEQ ID NO: 24139 - DNA, 20 bp, Artificial Sequence
  MKO10024139_A_Hid1
  gRNA
gtctcaccacgtcgttcctc

SEQ ID NO: 24140 - DNA, 20 bp, Artificial Sequence
  MKO10024140_A_Hid1
  gRNA
cgcaaagacatcctgcaccg

SEQ ID NO: 24141 - DNA, 20 bp, Artificial Sequence
  MKO10024141_A_Hid1
  gRNA
tcataccttgtagcacagcg

SEQ ID NO: 24142 - DNA, 20 bp, Artificial Sequence
  MKO10024142_A_Hif1an
  gRNA
ttggggaacctctcgtagtc

SEQ ID NO: 24143 - DNA, 20 bp, Artificial Sequence
  MKO10024143_A_Hif1an
  gRNA
cccaatttccgaaatgtggt

SEQ ID NO: 24144 - DNA, 20 bp, Artificial Sequence
  MKO10024144_A_Hif1an
  gRNA
cgttgccaatattctcttgc

SEQ ID NO: 24145 - DNA, 20 bp, Artificial Sequence
  MKO10024145_A_Hif1a
  gRNA
tcgttaggcccagtgagaaa

SEQ ID NO: 24146 - DNA, 20 bp, Artificial Sequence
  MKO10024146_A_Hif1a
  gRNA
tgatgttcatcgtcctcccc

SEQ ID NO: 24147 - DNA, 20 bp, Artificial Sequence
  MKO10024147_A_Hif1a
  gRNA
tctcacacgtaaataactga

SEQ ID NO: 24148 - DNA, 20 bp, Artificial Sequence
  MKO10024148_A_Hif3a
  gRNA
cgcgctgacgccgcgcgcaa

SEQ ID NO: 24149 - DNA, 20 bp, Artificial Sequence
  MKO10024149_A_Hif3a
  gRNA
cgtcagcgcgcacctggaca

SEQ ID NO: 24150 - DNA, 20 bp, Artificial Sequence
  MKO10024150_A_Hif3a
  gRNA
tgagcgtgctcttcattcgc

SEQ ID NO: 24151 - DNA, 20 bp, Artificial Sequence
  MKO10024151_A_Higd1a
  gRNA
gatgaacctaccaagagtca

SEQ ID NO: 24152 - DNA, 20 bp, Artificial Sequence
  MKO10024152_A_Higd1a
  gRNA
aacttaccaatggggacaaa

SEQ ID NO: 24153 - DNA, 20 bp, Artificial Sequence
  MKO10024153_A_Higd1a
  gRNA
tctctctcttcatacgatga

SEQ ID NO: 24154 - DNA, 20 bp, Artificial Sequence
  MKO10024154_A_Higd1b
  gRNA
gtcagaggatgccgagaagt

SEQ ID NO: 24155 - DNA, 20 bp, Artificial Sequence
  MKO10024155_A_Higd1b
  gRNA
tgtacagagattacatcaag

SEQ ID NO: 24156 - DNA, 20 bp, Artificial Sequence
  MKO10024156_A_Higd1b
  gRNA
tcctgtatgctgctatcacc

SEQ ID NO: 24157 - DNA, 20 bp, Artificial Sequence
  MKO10024157_A_Higd1c
  gRNA
gggagtctctcgatttccgg

SEQ ID NO: 24158 - DNA, 20 bp, Artificial Sequence
  MKO10024158_A_Higd1c
  gRNA
atttagcttgtaaagaccgt

SEQ ID NO: 24159 - DNA, 20 bp, Artificial Sequence
  MKO10024159_A_Higd1c
  gRNA
cccgcacgtggatgagatga

SEQ ID NO: 24160 - DNA, 20 bp, Artificial Sequence
  MKO10024160_A_Higd2a
  gRNA
gggctgaagccctcgataac

SEQ ID NO: 24161 - DNA, 20 bp, Artificial Sequence
  MKO10024161_A_Higd2a
  gRNA
cccaactcatgatgcgcacc

SEQ ID NO: 24162 - DNA, 20 bp, Artificial Sequence
  MKO10024162_A_Higd2a
  gRNA
gtccaagcccccagttatcg

SEQ ID NO: 24163 - DNA, 20 bp, Artificial Sequence
  MKO10024163_A_Hilpda
  gRNA
tagctgacccctcgtgatcc

SEQ ID NO: 24164 - DNA, 20 bp, Artificial Sequence
  MKO10024164_A_Hilpda
  gRNA
ctgccagaccatccatcccg

SEQ ID NO: 24165 - DNA, 20 bp, Artificial Sequence
  MKO10024165_A_Hilpda
  gRNA
ttactggagagcccactgcc

SEQ ID NO: 24166 - DNA, 20 bp, Artificial Sequence
  MKO10024166_A_Hils1
  gRNA
accaagatgccggcacactg

SEQ ID NO: 24167 - DNA, 20 bp, Artificial Sequence
  MKO10024167_A_Hils1
  gRNA
aaccgccattgccattatta

SEQ ID NO: 24168 - DNA, 20 bp, Artificial Sequence
  MKO10024168_A_Hils1
  gRNA
ggttcagactcacgctgccc

SEQ ID NO: 24169 - DNA, 20 bp, Artificial Sequence
  MKO10024169_A_Hinfp
  gRNA
cgtgaccacatgcggaacca

SEQ ID NO: 24170 - DNA, 20 bp, Artificial Sequence
  MKO10024170_A_Hinfp
  gRNA
caacttcttacgatccaatg

SEQ ID NO: 24171 - DNA, 20 bp, Artificial Sequence
  MKO10024171_A_Hinfp
  gRNA
catccgtcgccagacctcat

SEQ ID NO: 24172 - DNA, 20 bp, Artificial Sequence
  MKO10024172_A_Hint1
  gRNA
gccgaagatcgtgtcgccgc

SEQ ID NO: 24173 - DNA, 20 bp, Artificial Sequence
  MKO10024173_A_Hint1
  gRNA
cccggcggcgacacgatctt

SEQ ID NO: 24174 - DNA, 20 bp, Artificial Sequence
  MKO10024174_A_Hint1
  gRNA
cctgaagcgcgggtaccgga

SEQ ID NO: 24175 - DNA, 20 bp, Artificial Sequence
  MKO10024175_A_Hint2
  gRNA
cctcaggtccgaggaaacgc

SEQ ID NO: 24176 - DNA, 20 bp, Artificial Sequence
  MKO10024176_A_Hint2
  gRNA
ggtgtccgacgggagtgaag

SEQ ID NO: 24177 - DNA, 20 bp, Artificial Sequence
  MKO10024177_A_Hint2
  gRNA
ctgaaagatgggtatcgact

SEQ ID NO: 24178 - DNA, 20 bp, Artificial Sequence
  MKO10024178_A_Hint3
  gRNA
agataatgataaagtgccgc

SEQ ID NO: 24179 - DNA, 20 bp, Artificial Sequence
  MKO10024179_A_Hint3
  gRNA
ctggtttacagtcgagagca

SEQ ID NO: 24180 - DNA, 20 bp, Artificial Sequence
  MKO10024180_A_Hint3
  gRNA
acttactgtgacaaaccagt

SEQ ID NO: 24181 - DNA, 20 bp, Artificial Sequence
  MKO10024181_A_Hip1r
  gRNA
tcacgttggggtgtccgtcc

SEQ ID NO: 24182 - DNA, 20 bp, Artificial Sequence
  MKO10024182_A_Hip1r
  gRNA
ccttctcatgatgcgtgccc

SEQ ID NO: 24183 - DNA, 20 bp, Artificial Sequence
  MKO10024183_A_Hip1r
  gRNA
cggagcaacatacgtgagat

SEQ ID NO: 24184 - DNA, 20 bp, Artificial Sequence
  MKO10024184_A_Hip1
  gRNA
gcagacggtcagcgtcaata

SEQ ID NO: 24185 - DNA, 20 bp, Artificial Sequence
  MKO10024185_A_Hip1
  gRNA
gtccatctcgaagaagtttg

SEQ ID NO: 24186 - DNA, 20 bp, Artificial Sequence
  MKO10024186_A_Hip1
  gRNA
ttccacaaacttcttcgaga

SEQ ID NO: 24187 - DNA, 20 bp, Artificial Sequence
  MKO10024187_A_Hipk1
  gRNA
tggtgcttcagaatacgatc

SEQ ID NO: 24188 - DNA, 20 bp, Artificial Sequence
  MKO10024188_A_Hipk1
  gRNA
ggtgactcatcgtcacaaat

SEQ ID NO: 24189 - DNA, 20 bp, Artificial Sequence
  MKO10024189_A_Hipk1
  gRNA
tgatcgtattctgaagcacc

SEQ ID NO: 24190 - DNA, 20 bp, Artificial Sequence
  MKO10024190_A_Hipk2
  gRNA
aatgtcttaccggtagtatc

SEQ ID NO: 24191 - DNA, 20 bp, Artificial Sequence
  MKO10024191_A_Hipk2
  gRNA
tcacagtgcttcgacgcatt

SEQ ID NO: 24192 - DNA, 20 bp, Artificial Sequence
  MKO10024192_A_Hipk2
  gRNA
aggtgcttctgagtatgatc

SEQ ID NO: 24193 - DNA, 20 bp, Artificial Sequence
  MKO10024193_A_Hipk3
  gRNA
gtgatcgcagagttattcct

SEQ ID NO: 24194 - DNA, 20 bp, Artificial Sequence
  MKO10024194_A_Hipk3
  gRNA
ggcaaccccaatataatctc

SEQ ID NO: 24195 - DNA, 20 bp, Artificial Sequence
  MKO10024195_A_Hipk3
  gRNA
agatgcttcatattaacgaa

SEQ ID NO: 24196 - DNA, 20 bp, Artificial Sequence
  MKO10024196_A_Hipk4
  gRNA
cggataacgtgggcctcgtc

SEQ ID NO: 24197 - DNA, 20 bp, Artificial Sequence
  MKO10024197_A_Hipk4
  gRNA
tctcacagatgtagcgcacc

SEQ ID NO: 24198 - DNA, 20 bp, Artificial Sequence
  MKO10024198_A_Hipk4
  gRNA
ttcggtacgcatcgttcttc

SEQ ID NO: 24199 - DNA, 20 bp, Artificial Sequence
  MKO10024199_A_Hira
  gRNA
acaccgccattgctccacat

SEQ ID NO: 24200 - DNA, 20 bp, Artificial Sequence
  MKO10024200_A_Hira
  gRNA
acttaccgcctgagtgactc

SEQ ID NO: 24201 - DNA, 20 bp, Artificial Sequence
  MKO10024201_A_Hira
  gRNA
tcagttgatattcaccctga

SEQ ID NO: 24202 - DNA, 20 bp, Artificial Sequence
  MKO10024202_A_Hirip3
  gRNA
caaaaatttctgtcgcacga

SEQ ID NO: 24203 - DNA, 20 bp, Artificial Sequence
  MKO10024203_A_Hirip3
  gRNA
aggcgcgcctgagtgtcctc

SEQ ID NO: 24204 - DNA, 20 bp, Artificial Sequence
  MKO10024204_A_Hirip3
  gRNA
aagcgttacattcgagcctg

SEQ ID NO: 24205 - DNA, 20 bp, Artificial Sequence
  MKO10024205_A_Hist1h1a
  gRNA
ggtgtcggagctcatcgtgc

SEQ ID NO: 24206 - DNA, 20 bp, Artificial Sequence
  MKO10024206_A_Hist1h1a
  gRNA
acgatgagctccgacaccga

SEQ ID NO: 24207 - DNA, 20 bp, Artificial Sequence
  MKO10024207_A_Hist1h1a
  gRNA
tcagtgaaggcgaaagcatc

SEQ ID NO: 24208 - DNA, 20 bp, Artificial Sequence
  MKO10024208_A_Hist1h1b
  gRNA
ttcttcactccagccgccgc

SEQ ID NO: 24209 - DNA, 20 bp, Artificial Sequence
  MKO10024209_A_Hist1h1b
  gRNA
gcctaagaccgctaagccta

SEQ ID NO: 24210 - DNA, 20 bp, Artificial Sequence
  MKO10024210_A_Hist1h1b
  gRNA
gactgctcccgctgagaccg

SEQ ID NO: 24211 - DNA, 20 bp, Artificial Sequence
  MKO10024211_A_Hist1h1c
  gRNA
gcccgccggggtgcgccgta

SEQ ID NO: 24212 - DNA, 20 bp, Artificial Sequence
  MKO10024212_A_Hist1h1c
  gRNA
ccgggggtccggacgcctta

SEQ ID NO: 24213 - DNA, 20 bp, Artificial Sequence
  MKO10024213_A_Hist1h1c
  gRNA
agacgcgctcttgaccttct

SEQ ID NO: 24214 - DNA, 20 bp, Artificial Sequence
  MKO10024214_A_Hist1h1d
  gRNA
catgtccgagaccgctcccg

SEQ ID NO: 24215 - DNA, 20 bp, Artificial Sequence
  MKO10024215_A_Hist1h1d
  gRNA
aagaagaccggcgccgctgc

SEQ ID NO: 24216 - DNA, 20 bp, Artificial Sequence
  MKO10024216_A_Hist1h1d
  gRNA
gcaccactctacttcttgcg

SEQ ID NO: 24217 - DNA, 20 bp, Artificial Sequence
  MKO10024217_A_Hist1h1e
  gRNA
tttgcgcttcgcgccacctg

SEQ ID NO: 24218 - DNA, 20 bp, Artificial Sequence
  MKO10024218_A_Hist1h1e
  gRNA
gggcgcagcaggcgcggtct

SEQ ID NO: 24219 - DNA, 20 bp, Artificial Sequence
  MKO10024219_A_Hist1h1e
  gRNA
cttgcgggccttcttcttga

SEQ ID NO: 24220 - DNA, 20 bp, Artificial Sequence
  MKO10024220_A_Hist1h1t
  gRNA
cgcaggagccgtttccgaca

SEQ ID NO: 24221 - DNA, 20 bp, Artificial Sequence
  MKO10024221_A_Hist1h1t
  gRNA
gctactcttgggagatctcg

SEQ ID NO: 24222 - DNA, 20 bp, Artificial Sequence
  MKO10024222_A_Hist1h1t
  gRNA
tttacgttgctgcacgccct

SEQ ID NO: 24223 - DNA, 20 bp, Artificial Sequence
  MKO10024223_A_Hist1h2aa
  gRNA
gaactacgcacaacgaattg

SEQ ID NO: 24224 - DNA, 20 bp, Artificial Sequence
  MKO10024224_A_Hist1h2aa
  gRNA
ttcgttgtgcgtagttccct

SEQ ID NO: 24225 - DNA, 20 bp, Artificial Sequence
  MKO10024225_A_Hist1h2aa
  gRNA
gccttgccaccccgctttgt

SEQ ID NO: 24226 - DNA, 20 bp, Artificial Sequence
  MKO10024226_A_Hist1h2ab
  gRNA
aacgcatacatgtctggacg

SEQ ID NO: 24227 - DNA, 20 bp, Artificial Sequence
  MKO10024227_A_Hist1h2ab
  gRNA
atcgccagattacttcccct

SEQ ID NO: 24228 - DNA, 20 bp, Artificial Sequence
  MKO10024228_A_Hist1h2ab
  gRNA
agcgggtcttggccttagcg

SEQ ID NO: 24229 - DNA, 20 bp, Artificial Sequence
  MKO10024229_A_Hist1h2ac
  gRNA
actattactatgtctggacg

SEQ ID NO: 24230 - DNA, 20 bp, Artificial Sequence
  MKO10024230_A_Hist1h2ac
  gRNA
ttctgttgcttatttcccct

SEQ ID NO: 24231 - DNA, 20 bp, Artificial Sequence
  MKO10024231_A_Hist1h2ac
  gRNA
gctccgagtagttacccttg

SEQ ID NO: 24232 - DNA, 20 bp, Artificial Sequence
  MKO10024232_A_Hist1h2ad
  gRNA
agaccaatcttatttcccct

SEQ ID NO: 24233 - DNA, 20 bp, Artificial Sequence
  MKO10024233_A_Hist1h2ad
  gRNA
atctgtacaatgtctggacg

SEQ ID NO: 24234 - DNA, 20 bp, Artificial Sequence
  MKO10024234_A_Hist1h2ad
  gRNA
cgccaggtacaccggggcgc

SEQ ID NO: 24235 - DNA, 20 bp, Artificial Sequence
  MKO10024235_A_Hist1h2ae
  gRNA
cttgcgtcaatgtctggacg

SEQ ID NO: 24236 - DNA, 20 bp, Artificial Sequence
  MKO10024236_A_Hist1h2ae
  gRNA
agaaagatcttatttcccct

SEQ ID NO: 24237 - DNA, 20 bp, Artificial Sequence
  MKO10024237_A_Hist1h2ae
  gRNA
ttcccgtgggccgcgtgcac

SEQ ID NO: 24238 - DNA, 20 bp, Artificial Sequence
  MKO10024238_A_Hist1h2af
  gRNA
gtacctacaatgtctggacg

SEQ ID NO: 24239 - DNA, 20 bp, Artificial Sequence
  MKO10024239_A_Hist1h2af
  gRNA
cgagagccaccataagccca

SEQ ID NO: 24240 - DNA, 20 bp, Artificial Sequence
  MKO10024240_A_Hist1h2af
  gRNA
ctcactggcttactttccct

SEQ ID NO: 24241 - DNA, 20 bp, Artificial Sequence
  MKO10024241_A_Hist1h2ag
  gRNA
atctttacaatgtctggacg

SEQ ID NO: 24242 - DNA, 20 bp, Artificial Sequence
  MKO10024242_A_Hist1h2ag
  gRNA
cgaggagctcaacaagctgc

SEQ ID NO: 24243 - DNA, 20 bp, Artificial Sequence
  MKO10024243_A_Hist1h2ag
  gRNA
cgccaggtagaccggggcgc

SEQ ID NO: 24244 - DNA, 20 bp, Artificial Sequence
  MKO10024244_A_Hist1h2ah
  gRNA
ttgtacaatatgtctggacg

SEQ ID NO: 24245 - DNA, 20 bp, Artificial Sequence
  MKO10024245_A_Hist1h2ah
  gRNA
acctgcttcacttggccttg

SEQ ID NO: 24246 - DNA, 20 bp, Artificial Sequence
  MKO10024246_A_Hist1h2ah
  gRNA
cgaggagctcaacaagctgc

SEQ ID NO: 24247 - DNA, 20 bp, Artificial Sequence
  MKO10024247_A_Hist1h2ai
  gRNA
agctgagttatgtctggacg

SEQ ID NO: 24248 - DNA, 20 bp, Artificial Sequence
  MKO10024248_A_Hist1h2ai
  gRNA
tgtttggtttcacttcccct

SEQ ID NO: 24249 - DNA, 20 bp, Artificial Sequence
  MKO10024249_A_Hist1h2ai
  gRNA
cgccaggtacaccggggcgc

SEQ ID NO: 24250 - DNA, 20 bp, Artificial Sequence
  MKO10024250_A_Hist1h2ak
  gRNA
ggttctaccatgtcaggaag

SEQ ID NO: 24251 - DNA, 20 bp, Artificial Sequence
  MKO10024251_A_Hist1h2ak
  gRNA
tcaagggcctcacttcccct

SEQ ID NO: 24252 - DNA, 20 bp, Artificial Sequence
  MKO10024252_A_Hist1h2ak
  gRNA
ctgcttgcctcttcctgaca

SEQ ID NO: 24253 - DNA, 20 bp, Artificial Sequence
  MKO10024253_A_Hist1h2an
  gRNA
ttgtttagaatgtctggacg

SEQ ID NO: 24254 - DNA, 20 bp, Artificial Sequence
  MKO10024254_A_Hist1h2an
  gRNA
cagcagtacggcctggatgt

SEQ ID NO: 24255 - DNA, 20 bp, Artificial Sequence
  MKO10024255_A_Hist1h2an
  gRNA
cgaggagctcaacaagctgc

SEQ ID NO: 24256 - DNA, 20 bp, Artificial Sequence
  MKO10024256_A_Hist1h2ao
  gRNA
ctttctaccatgtctggacg

SEQ ID NO: 24257 - DNA, 20 bp, Artificial Sequence
  MKO10024257_A_Hist1h2ao
  gRNA
cgccaggtagaccggggcgc

SEQ ID NO: 24258 - DNA, 20 bp, Artificial Sequence
  MKO10024258_A_Hist1h2ao
  gRNA
cgaggagctcaacaagctgc

SEQ ID NO: 24259 - DNA, 20 bp, Artificial Sequence
  MKO10024259_A_Hist1h2ap
  gRNA
ctttctaccatgtctggacg

SEQ ID NO: 24260 - DNA, 20 bp, Artificial Sequence
  MKO10024260_A_Hist1h2ap
  gRNA
cgaggagctcaacaagctgc

SEQ ID NO: 24261 - DNA, 20 bp, Artificial Sequence
  MKO10024261_A_Hist1h2ap
  gRNA
cgccaggtagaccggggcgc

SEQ ID NO: 24262 - DNA, 20 bp, Artificial Sequence
  MKO10024262_A_Hist1h2ba
  gRNA
tgcggcatctcttacgtttc

SEQ ID NO: 24263 - DNA, 20 bp, Artificial Sequence
  MKO10024263_A_Hist1h2ba
  gRNA
gaaacgtaagagatgccgca

SEQ ID NO: 24264 - DNA, 20 bp, Artificial Sequence
  MKO10024264_A_Hist1h2ba
  gRNA
gcaccctttaccgccacctc

SEQ ID NO: 24265 - DNA, 20 bp, Artificial Sequence
  MKO10024265_A_Hist1h2bb
  gRNA
gtctgcaccagcccctaaga

SEQ ID NO: 24266 - DNA, 20 bp, Artificial Sequence
  MKO10024266_A_Hist1h2bb
  gRNA
ggtgcagacttagaaggctc

SEQ ID NO: 24267 - DNA, 20 bp, Artificial Sequence
  MKO10024267_A_Hist1h2bb
  gRNA
ctttcttagatcccttctta

SEQ ID NO: 24268 - DNA, 20 bp, Artificial Sequence
  MKO10024268_A_Hist1h2bc
  gRNA
ttggcaggatcacttggagc

SEQ ID NO: 24269 - DNA, 20 bp, Artificial Sequence
  MKO10024269_A_Hist1h2bc
  gRNA
gtccgctcccgccccgaaga

SEQ ID NO: 24270 - DNA, 20 bp, Artificial Sequence
  MKO10024270_A_Hist1h2bc
  gRNA
gccttcttggagcccttctt

SEQ ID NO: 24271 - DNA, 20 bp, Artificial Sequence
  MKO10024271_A_Hist1h2be
  gRNA
ggagcggacttggctggctc

SEQ ID NO: 24272 - DNA, 20 bp, Artificial Sequence
  MKO10024272_A_Hist1h2be
  gRNA
ctccaagaaggctgtcacca

SEQ ID NO: 24273 - DNA, 20 bp, Artificial Sequence
  MKO10024273_A_Hist1h2be
  gRNA
gtccgctcccgccccgaaga

SEQ ID NO: 24274 - DNA, 20 bp, Artificial Sequence
  MKO10024274_A_Hist1h2bf
  gRNA
ggagcggacttagcaggctc

SEQ ID NO: 24275 - DNA, 20 bp, Artificial Sequence
  MKO10024275_A_Hist1h2bf
  gRNA
gtccgctcccgccccgaaga

SEQ ID NO: 24276 - DNA, 20 bp, Artificial Sequence
  MKO10024276_A_Hist1h2bf
  gRNA
taaaggaactcacttggagc

SEQ ID NO: 24277 - DNA, 20 bp, Artificial Sequence
  MKO10024277_A_Hist1h2bg
  gRNA
aggagcggacttcgcaggct

SEQ ID NO: 24278 - DNA, 20 bp, Artificial Sequence
  MKO10024278_A_Hist1h2bg
  gRNA
taaatgaactcacttggagc

SEQ ID NO: 24279 - DNA, 20 bp, Artificial Sequence
  MKO10024279_A_Hist1h2bg
  gRNA
gtccgctcctgccccgaaga

SEQ ID NO: 24280 - DNA, 20 bp, Artificial Sequence
  MKO10024280_A_Hist1h2bh
  gRNA
cttgagcactcacttggagc

SEQ ID NO: 24281 - DNA, 20 bp, Artificial Sequence
  MKO10024281_A_Hist1h2bh
  gRNA
ctccaagaaggccctgacca

SEQ ID NO: 24282 - DNA, 20 bp, Artificial Sequence
  MKO10024282_A_Hist1h2bh
  gRNA
tttggaggagatgccggtgt

SEQ ID NO: 24283 - DNA, 20 bp, Artificial Sequence
  MKO10024283_A_Hist1h2bj
  gRNA
ctactcggtgtacgtctaca

SEQ ID NO: 24284 - DNA, 20 bp, Artificial Sequence
  MKO10024284_A_Hist1h2bj
  gRNA
cttggaggagataccggtgt

SEQ ID NO: 24285 - DNA, 20 bp, Artificial Sequence
  MKO10024285_A_Hist1h2bj
  gRNA
ctggagcgctcacttggagc

SEQ ID NO: 24286 - DNA, 20 bp, Artificial Sequence
  MKO10024286_A_Hist1h2bk
  gRNA
ttacttggcgctagtatact

SEQ ID NO: 24287 - DNA, 20 bp, Artificial Sequence
  MKO10024287_A_Hist1h2bk
  gRNA
gtccgctcccgccccgaaga

SEQ ID NO: 24288 - DNA, 20 bp, Artificial Sequence
  MKO10024288_A_Hist1h2bk
  gRNA
gccttcttggagcccttctt

SEQ ID NO: 24289 - DNA, 20 bp, Artificial Sequence
  MKO10024289_A_Hist1h2bl
  gRNA
taaacgagctcacttggagc

SEQ ID NO: 24290 - DNA, 20 bp, Artificial Sequence
  MKO10024290_A_Hist1h2bl
  gRNA
gtccgctcccgccccgaaga

SEQ ID NO: 24291 - DNA, 20 bp, Artificial Sequence
  MKO10024291_A_Hist1h2bl
  gRNA
gccttcttggagcccttctt

SEQ ID NO: 24292 - DNA, 20 bp, Artificial Sequence
  MKO10024292_A_Hist1h2bm
  gRNA
ggagcggacttcgttggctc

SEQ ID NO: 24293 - DNA, 20 bp, Artificial Sequence
  MKO10024293_A_Hist1h2bm
  gRNA
cagacgaactcacttggagc

SEQ ID NO: 24294 - DNA, 20 bp, Artificial Sequence
  MKO10024294_A_Hist1h2bm
  gRNA
gtccgctcccgccccgaaga

SEQ ID NO: 24295 - DNA, 20 bp, Artificial Sequence
  MKO10024295_A_Hist1h2bn
  gRNA
ggagcggacttagcgggttc

SEQ ID NO: 24296 - DNA, 20 bp, Artificial Sequence
  MKO10024296_A_Hist1h2bn
  gRNA
gccttcttggaccccttctt

SEQ ID NO: 24297 - DNA, 20 bp, Artificial Sequence
  MKO10024297_A_Hist1h2bn
  gRNA
gtccaagaaggccgtcacca

SEQ ID NO: 24298 - DNA, 20 bp, Artificial Sequence
  MKO10024298_A_Hist1h2bp
  gRNA
ggaacggacttaacaggctc

SEQ ID NO: 24299 - DNA, 20 bp, Artificial Sequence
  MKO10024299_A_Hist1h2bp
  gRNA
gataatagaatttgttccac

SEQ ID NO: 24300 - DNA, 20 bp, Artificial Sequence
  MKO10024300_A_Hist1h2bp
  gRNA
tttcctcaactttaaaagga

SEQ ID NO: 24301 - DNA, 20 bp, Artificial Sequence
  MKO10024301_A_Hist1h2bq
  gRNA
gtccgctcccgccccgaaga

SEQ ID NO: 24302 - DNA, 20 bp, Artificial Sequence
  MKO10024302_A_Hist1h2bq
  gRNA
tcacttggagctggtgtact

SEQ ID NO: 24303 - DNA, 20 bp, Artificial Sequence
  MKO10024303_A_Hist1h2bq
  gRNA
gccttcttggagcccttctt

SEQ ID NO: 24304 - DNA, 20 bp, Artificial Sequence
  MKO10024304_A_Hist1h2br
  gRNA
tcacttggagctggtgtact

SEQ ID NO: 24305 - DNA, 20 bp, Artificial Sequence
  MKO10024305_A_Hist1h2br
  gRNA
gtccgctcccgccccgaaga

SEQ ID NO: 24306 - DNA, 20 bp, Artificial Sequence
  MKO10024306_A_Hist1h2br
  gRNA
gccttcttggagcccttctt

SEQ ID NO: 24307 - DNA, 20 bp, Artificial Sequence
  MKO10024307_A_Hist1h3a
  gRNA
acaattacgccctctccccg

SEQ ID NO: 24308 - DNA, 20 bp, Artificial Sequence
  MKO10024308_A_Hist1h3a
  gRNA
caactggcccgccgcatccg

SEQ ID NO: 24309 - DNA, 20 bp, Artificial Sequence
  MKO10024309_A_Hist1h3a
  gRNA
gcgggccagttggatgtcct

SEQ ID NO: 24310 - DNA, 20 bp, Artificial Sequence
  MKO10024310_A_Hist1h3b
  gRNA
aagccctctccccacgaatg

SEQ ID NO: 24311 - DNA, 20 bp, Artificial Sequence
  MKO10024311_A_Hist1h3b
  gRNA
cagctcgcccgccgcattcg

SEQ ID NO: 24312 - DNA, 20 bp, Artificial Sequence
  MKO10024312_A_Hist1h3b
  gRNA
cagaccgctcgcaagtccac

SEQ ID NO: 24313 - DNA, 20 bp, Artificial Sequence
  MKO10024313_A_Hist1h3c
  gRNA
accattatgccctctctccg

SEQ ID NO: 24314 - DNA, 20 bp, Artificial Sequence
  MKO10024314_A_Hist1h3c
  gRNA
cagctcgcccgccgcatccg

SEQ ID NO: 24315 - DNA, 20 bp, Artificial Sequence
  MKO10024315_A_Hist1h3c
  gRNA
cagaccgctcgcaagtccac

SEQ ID NO: 24316 - DNA, 20 bp, Artificial Sequence
  MKO10024316_A_Hist1h3d
  gRNA
ccctctccccacgaatgcga

SEQ ID NO: 24317 - DNA, 20 bp, Artificial Sequence
  MKO10024317_A_Hist1h3d
  gRNA
gcttggcgtggatggcacac

SEQ ID NO: 24318 - DNA, 20 bp, Artificial Sequence
  MKO10024318_A_Hist1h3d
  gRNA
cagaccgctcgcaagtccac

SEQ ID NO: 24319 - DNA, 20 bp, Artificial Sequence
  MKO10024319_A_Hist1h3e
  gRNA
ccgtggcgctgcgcgaaatc

SEQ ID NO: 24320 - DNA, 20 bp, Artificial Sequence
  MKO10024320_A_Hist1h3e
  gRNA
ccggatttcgcgcagcgcca

SEQ ID NO: 24321 - DNA, 20 bp, Artificial Sequence
  MKO10024321_A_Hist1h3e
  gRNA
cagaccgctcgcaagtccac

SEQ ID NO: 24322 - DNA, 20 bp, Artificial Sequence
  MKO10024322_A_Hist1h3f
  gRNA
gccgccagtggacttgcgag

SEQ ID NO: 24323 - DNA, 20 bp, Artificial Sequence
  MKO10024323_A_Hist1h3f
  gRNA
gtgaggtttcttcacgccgc

SEQ ID NO: 24324 - DNA, 20 bp, Artificial Sequence
  MKO10024324_A_Hist1h3f
  gRNA
aaacctcaccgctaccgtcc

SEQ ID NO: 24325 - DNA, 20 bp, Artificial Sequence
  MKO10024325_A_Hist1h3g
  gRNA
acccttaagccctctccccg

SEQ ID NO: 24326 - DNA, 20 bp, Artificial Sequence
  MKO10024326_A_Hist1h3g
  gRNA
cagaccgctcgcaagtctac

SEQ ID NO: 24327 - DNA, 20 bp, Artificial Sequence
  MKO10024327_A_Hist1h3g
  gRNA
ctcgcgcagcgccacagtgc

SEQ ID NO: 24328 - DNA, 20 bp, Artificial Sequence
  MKO10024328_A_Hist1h3h
  gRNA
aactttaagccctctccccg

SEQ ID NO: 24329 - DNA, 20 bp, Artificial Sequence
  MKO10024329_A_Hist1h3h
  gRNA
cagctggcccgccgcatccg

SEQ ID NO: 24330 - DNA, 20 bp, Artificial Sequence
  MKO10024330_A_Hist1h3h
  gRNA
cagaccgctcgcaagtccac

SEQ ID NO: 24331 - DNA, 20 bp, Artificial Sequence
  MKO10024331_A_Hist1h3i
  gRNA
ccctctccccgcgaatgcga

SEQ ID NO: 24332 - DNA, 20 bp, Artificial Sequence
  MKO10024332_A_Hist1h3i
  gRNA
cagaccgctcgcaagtccac

SEQ ID NO: 24333 - DNA, 20 bp, Artificial Sequence
  MKO10024333_A_Hist1h3i
  gRNA
gcgtgtcaccatcatgccca

SEQ ID NO: 24334 - DNA, 20 bp, Artificial Sequence
  MKO10024334_A_Hist1h4a
  gRNA
tcctaagacatgtcgggtcg

SEQ ID NO: 24335 - DNA, 20 bp, Artificial Sequence
  MKO10024335_A_Hist1h4a
  gRNA
tgatgccctggatgttatcg

SEQ ID NO: 24336 - DNA, 20 bp, Artificial Sequence
  MKO10024336_A_Hist1h4a
  gRNA
cttagccgccgaatccgtag

SEQ ID NO: 24337 - DNA, 20 bp, Artificial Sequence
  MKO10024337_A_Hist1h4b
  gRNA
gccgcaccctctacggattc

SEQ ID NO: 24338 - DNA, 20 bp, Artificial Sequence
  MKO10024338_A_Hist1h4b
  gRNA
aatttaactatgtctggtcg

SEQ ID NO: 24339 - DNA, 20 bp, Artificial Sequence
  MKO10024339_A_Hist1h4b
  gRNA
tgtcgcgcagcactttgcga

SEQ ID NO: 24340 - DNA, 20 bp, Artificial Sequence
  MKO10024340_A_Hist1h4c
  gRNA
gtcataaccatgtctggacg

SEQ ID NO: 24341 - DNA, 20 bp, Artificial Sequence
  MKO10024341_A_Hist1h4c
  gRNA
gcttagcgccgcctttccca

SEQ ID NO: 24342 - DNA, 20 bp, Artificial Sequence
  MKO10024342_A_Hist1h4c
  gRNA
acccttaccacgtccagaca

SEQ ID NO: 24343 - DNA, 20 bp, Artificial Sequence
  MKO10024343_A_Hist1h4d
  gRNA
aggcggcaagggtcttggta

SEQ ID NO: 24344 - DNA, 20 bp, Artificial Sequence
  MKO10024344_A_Hist1h4d
  gRNA
tttgctaacatgtctggacg

SEQ ID NO: 24345 - DNA, 20 bp, Artificial Sequence
  MKO10024345_A_Hist1h4d
  gRNA
tgttgtcgcgcagaactttg

SEQ ID NO: 24346 - DNA, 20 bp, Artificial Sequence
  MKO10024346_A_Hist1h4f
  gRNA
tccatagccatgtctggtcg

SEQ ID NO: 24347 - DNA, 20 bp, Artificial Sequence
  MKO10024347_A_Hist1h4f
  gRNA
tgttatcgcgaagaacctta

SEQ ID NO: 24348 - DNA, 20 bp, Artificial Sequence
  MKO10024348_A_Hist1h4f
  gRNA
tcccttaccacgaccagaca

SEQ ID NO: 24349 - DNA, 20 bp, Artificial Sequence
  MKO10024349_A_Hist1h4h
  gRNA
aagtacaccatgtctggtcg

SEQ ID NO: 24350 - DNA, 20 bp, Artificial Sequence
  MKO10024350_A_Hist1h4h
  gRNA
ggcggtaaaggtcttggcaa

SEQ ID NO: 24351 - DNA, 20 bp, Artificial Sequence
  MKO10024351_A_Hist1h4h
  gRNA
gcccttgccacgaccagaca

SEQ ID NO: 24352 - DNA, 20 bp, Artificial Sequence
  MKO10024352_A_Hist1h4i
  gRNA
agcgccaccgcaaagtgctt

SEQ ID NO: 24353 - DNA, 20 bp, Artificial Sequence
  MKO10024353_A_Hist1h4i
  gRNA
cgtactctgtacgggttcgg

SEQ ID NO: 24354 - DNA, 20 bp, Artificial Sequence
  MKO10024354_A_Hist1h4i
  gRNA
cgccgaacccgtacagagta

SEQ ID NO: 24355 - DNA, 20 bp, Artificial Sequence
  MKO10024355_A_Hist1h4j
  gRNA
cttagccgccgaacccgtag

SEQ ID NO: 24356 - DNA, 20 bp, Artificial Sequence
  MKO10024356_A_Hist1h4j
  gRNA
cgcaccctctacgggttcgg

SEQ ID NO: 24357 - DNA, 20 bp, Artificial Sequence
  MKO10024357_A_Hist1h4j
  gRNA
tgttgtcgcgcagcactttg

SEQ ID NO: 24358 - DNA, 20 bp, Artificial Sequence
  MKO10024358_A_Hist1h4k
  gRNA
cttagcctccgaatccgtag

SEQ ID NO: 24359 - DNA, 20 bp, Artificial Sequence
  MKO10024359_A_Hist1h4k
  gRNA
agtgcagtcatgtctggcag

SEQ ID NO: 24360 - DNA, 20 bp, Artificial Sequence
  MKO10024360_A_Hist1h4k
  gRNA
cgcaccctctacggattcgg

SEQ ID NO: 24361 - DNA, 20 bp, Artificial Sequence
  MKO10024361_A_Hist1h4m
  gRNA
gtcttcgtcatgtctggtcg

SEQ ID NO: 24362 - DNA, 20 bp, Artificial Sequence
  MKO10024362_A_Hist1h4m
  gRNA
attagccgccgaatccgtag

SEQ ID NO: 24363 - DNA, 20 bp, Artificial Sequence
  MKO10024363_A_Hist1h4m
  gRNA
cgcaccctctacggattcgg

SEQ ID NO: 24364 - DNA, 20 bp, Artificial Sequence
  MKO10024364_A_Hist1h4n
  gRNA
gtcttcatcatgtctggtcg

SEQ ID NO: 24365 - DNA, 20 bp, Artificial Sequence
  MKO10024365_A_Hist1h4n
  gRNA
attagccgccgaatccgtag

SEQ ID NO: 24366 - DNA, 20 bp, Artificial Sequence
  MKO10024366_A_Hist1h4n
  gRNA
cgcaccctctacggattcgg

SEQ ID NO: 24367 - DNA, 20 bp, Artificial Sequence
  MKO10024367_A_Hist2h2aa1
  gRNA
ctcacttgcccttcgcctta

SEQ ID NO: 24368 - DNA, 20 bp, Artificial Sequence
  MKO10024368_A_Hist2h2aa1
  gRNA
gctttcgtgatgtccggtcg

SEQ ID NO: 24369 - DNA, 20 bp, Artificial Sequence
  MKO10024369_A_Hist2h2aa1
  gRNA
ggaagaccgcgacttggcct

SEQ ID NO: 24370 - DNA, 20 bp, Artificial Sequence
  MKO10024370_A_Hist2h2aa2
  gRNA
gctttcgtgatgtccggtcg

SEQ ID NO: 24371 - DNA, 20 bp, Artificial Sequence
  MKO10024371_A_Hist2h2aa2
  gRNA
ctcacttgcccttcgcctta

SEQ ID NO: 24372 - DNA, 20 bp, Artificial Sequence
  MKO10024372_A_Hist2h2aa2
  gRNA
cgaggagctcaacaagctgc

SEQ ID NO: 24373 - DNA, 20 bp, Artificial Sequence
  MKO10024373_A_Hist2h2ab
  gRNA
aagtcgcggtcgtcccgcgc

SEQ ID NO: 24374 - DNA, 20 bp, Artificial Sequence
  MKO10024374_A_Hist2h2ab
  gRNA
tattccgccatgtctggccg

SEQ ID NO: 24375 - DNA, 20 bp, Artificial Sequence
  MKO10024375_A_Hist2h2ab
  gRNA
tcctcacagctagttgcaga

SEQ ID NO: 24376 - DNA, 20 bp, Artificial Sequence
  MKO10024376_A_Hist2h2ac
  gRNA
ctctaagttatgtctggccg

SEQ ID NO: 24377 - DNA, 20 bp, Artificial Sequence
  MKO10024377_A_Hist2h2ac
  gRNA
ttcacttgctcttagccttg

SEQ ID NO: 24378 - DNA, 20 bp, Artificial Sequence
  MKO10024378_A_Hist2h2ac
  gRNA
aaagtgacgatcgcacaggg

SEQ ID NO: 24379 - DNA, 20 bp, Artificial Sequence
  MKO10024379_A_Hist2h2bb
  gRNA
ctcgaagatatcgttcacga

SEQ ID NO: 24380 - DNA, 20 bp, Artificial Sequence
  MKO10024380_A_Hist2h2bb
  gRNA
gaagcaagtgcaccccgaca

SEQ ID NO: 24381 - DNA, 20 bp, Artificial Sequence
  MKO10024381_A_Hist2h2bb
  gRNA
ggagcagacttcgctggatc

SEQ ID NO: 24382 - DNA, 20 bp, Artificial Sequence
  MKO10024382_A_Hist2h2be
  gRNA
atcgcgggagatccagacgt

SEQ ID NO: 24383 - DNA, 20 bp, Artificial Sequence
  MKO10024383_A_Hist2h2be
  gRNA
gcctggcgcattacaacaag

SEQ ID NO: 24384 - DNA, 20 bp, Artificial Sequence
  MKO10024384_A_Hist2h2be
  gRNA
gggaggcctctacttggcgc

SEQ ID NO: 24385 - DNA, 20 bp, Artificial Sequence
  MKO10024385_A_Hist2h3b
  gRNA
tgcgggcggtctgcttcgta

SEQ ID NO: 24386 - DNA, 20 bp, Artificial Sequence
  MKO10024386_A_Hist2h3b
  gRNA
cagaccgcccgcaagtccac

SEQ ID NO: 24387 - DNA, 20 bp, Artificial Sequence
  MKO10024387_A_Hist2h3b
  gRNA
gcgcttaagcgcgctcccca

SEQ ID NO: 24388 - DNA, 20 bp, Artificial Sequence
  MKO10024388_A_Hist2h3c1
  gRNA
gcgcttaagcgcgctcccca

SEQ ID NO: 24389 - DNA, 20 bp, Artificial Sequence
  MKO10024389_A_Hist2h3c1
  gRNA
cagactgcccgcaagtccac

SEQ ID NO: 24390 - DNA, 20 bp, Artificial Sequence
  MKO10024390_A_Hist2h3c1
  gRNA
ggcgctcttgcgggcggcct

SEQ ID NO: 24391 - DNA, 20 bp, Artificial Sequence
  MKO10024391_A_Hist2h3c2
  gRNA
cagactgcccgcaagtccac

SEQ ID NO: 24392 - DNA, 20 bp, Artificial Sequence
  MKO10024392_A_Hist2h3c2
  gRNA
gcgcttaagcgcgctcccca

SEQ ID NO: 24393 - DNA, 20 bp, Artificial Sequence
  MKO10024393_A_Hist2h3c2
  gRNA
acgcgtcaccatcatgccca

SEQ ID NO: 24394 - DNA, 20 bp, Artificial Sequence
  MKO10024394_A_Hist2h4
  gRNA
tctagcctccgaagccgtag

SEQ ID NO: 24395 - DNA, 20 bp, Artificial Sequence
  MKO10024395_A_Hist2h4
  gRNA
tgtcacgcaagactttgcga

SEQ ID NO: 24396 - DNA, 20 bp, Artificial Sequence
  MKO10024396_A_Hist2h4
  gRNA
tgaccccaccgcgccgagcc

SEQ ID NO: 24397 - DNA, 20 bp, Artificial Sequence
  MKO10024397_A_Hist3h2a
  gRNA
gatattctagcacagccgcc

SEQ ID NO: 24398 - DNA, 20 bp, Artificial Sequence
  MKO10024398_A_Hist3h2a
  gRNA
tgtgcaccgccttctccgta

SEQ ID NO: 24399 - DNA, 20 bp, Artificial Sequence
  MKO10024399_A_Hist3h2a
  gRNA
gctccgaataattaccctta

SEQ ID NO: 24400 - DNA, 20 bp, Artificial Sequence
  MKO10024400_A_Hist3h2ba
  gRNA
gcacggccgtctgcacctcg

SEQ ID NO: 24401 - DNA, 20 bp, Artificial Sequence
  MKO10024401_A_Hist3h2ba
  gRNA
ctccaagaaagccatcacca

SEQ ID NO: 24402 - DNA, 20 bp, Artificial Sequence
  MKO10024402_A_Hist3h2ba
  gRNA
ggccaagcatgccgtgtccg

SEQ ID NO: 24403 - DNA, 20 bp, Artificial Sequence
  MKO10024403_A_Hist3h2bb-ps
  gRNA
ggagctgatttggatggatc

SEQ ID NO: 24404 - DNA, 20 bp, Artificial Sequence
  MKO10024404_A_Hist3h2bb-ps
  gRNA
catacaaatattcttgctac

SEQ ID NO: 24405 - DNA, 20 bp, Artificial Sequence
  MKO10024405_A_Hist3h2bb-ps
  gRNA
cataatgtctagttgtacta

SEQ ID NO: 24406 - DNA, 20 bp, Artificial Sequence
  MKO10024406_A_Hist4h4
  gRNA
gcattaccaagcccgctatc

SEQ ID NO: 24407 - DNA, 20 bp, Artificial Sequence
  MKO10024407_A_Hist4h4
  gRNA
tggcggcgtgaagcgcatct

SEQ ID NO: 24408 - DNA, 20 bp, Artificial Sequence
  MKO10024408_A_Hist4h4
  gRNA
cgagcacgccaagcgcaaga

SEQ ID NO: 24409 - DNA, 20 bp, Artificial Sequence
  MKO10024409_A_Hivep1
  gRNA
tgtaccacggagccccttga

SEQ ID NO: 24410 - DNA, 20 bp, Artificial Sequence
  MKO10024410_A_Hivep1
  gRNA
cttccgatacctatttcgac

SEQ ID NO: 24411 - DNA, 20 bp, Artificial Sequence
  MKO10024411_A_Hivep1
  gRNA
attacgtgtatgtccgaggc

SEQ ID NO: 24412 - DNA, 20 bp, Artificial Sequence
  MKO10024412_A_Hivep2
  gRNA
gacgagacctgtcgccgatg

SEQ ID NO: 24413 - DNA, 20 bp, Artificial Sequence
  MKO10024413_A_Hivep2
  gRNA
acagatgcctcatcggcgac

SEQ ID NO: 24414 - DNA, 20 bp, Artificial Sequence
  MKO10024414_A_Hivep2
  gRNA
tacgcactcatactgatgtt

SEQ ID NO: 24415 - DNA, 20 bp, Artificial Sequence
  MKO10024415_A_Hivep3
  gRNA
ctcgggccggtgaacattgc

SEQ ID NO: 24416 - DNA, 20 bp, Artificial Sequence
  MKO10024416_A_Hivep3
  gRNA
ctcacccgttgagggccctc

SEQ ID NO: 24417 - DNA, 20 bp, Artificial Sequence
  MKO10024417_A_Hivep3
  gRNA
tcaggtgcacctcccgtcgc

SEQ ID NO: 24418 - DNA, 20 bp, Artificial Sequence
  MKO10024418_A_Hjurp
  gRNA
cgtaccctggggcgtctcgt

SEQ ID NO: 24419 - DNA, 20 bp, Artificial Sequence
  MKO10024419_A_Hjurp
  gRNA
gttaacctacgagacgcccc

SEQ ID NO: 24420 - DNA, 20 bp, Artificial Sequence
  MKO10024420_A_Hjurp
  gRNA
ggctgtacctgacgctgcct

SEQ ID NO: 24421 - DNA, 20 bp, Artificial Sequence
  MKO10024421_A_Hk1
  gRNA
tgacgttctgactcttctcg

SEQ ID NO: 24422 - DNA, 20 bp, Artificial Sequence
  MKO10024422_A_Hk1
  gRNA
gatcacgtcgctgaatgcct

SEQ ID NO: 24423 - DNA, 20 bp, Artificial Sequence
  MKO10024423_A_Hk1
  gRNA
aggccgttgggttataatcc

SEQ ID NO: 24424 - DNA, 20 bp, Artificial Sequence
  MKO10024424_A_Hk2
  gRNA
acttccgtgtgctccgagta

SEQ ID NO: 24425 - DNA, 20 bp, Artificial Sequence
  MKO10024425_A_Hk2
  gRNA
actaaggggttcaagtccag

SEQ ID NO: 24426 - DNA, 20 bp, Artificial Sequence
  MKO10024426_A_Hk2
  gRNA
atacctcatccagtttcgtc

SEQ ID NO: 24427 - DNA, 20 bp, Artificial Sequence
  MKO10024427_A_Hk3
  gRNA
tgttacccaccggtgccgtg

SEQ ID NO: 24428 - DNA, 20 bp, Artificial Sequence
  MKO10024428_A_Hk3
  gRNA
gggctccacccggcattctt

SEQ ID NO: 24429 - DNA, 20 bp, Artificial Sequence
  MKO10024429_A_Hk3
  gRNA
tacgtgaggtccacaccaca

SEQ ID NO: 24430 - DNA, 20 bp, Artificial Sequence
  MKO10024430_A_Hkdc1
  gRNA
cacagacgtggtgaaccgcc

SEQ ID NO: 24431 - DNA, 20 bp, Artificial Sequence
  MKO10024431_A_Hkdc1
  gRNA
tgactacgtagccgactgcc

SEQ ID NO: 24432 - DNA, 20 bp, Artificial Sequence
  MKO10024432_A_Hkdc1
  gRNA
atgcccaatgaaatcacccg

SEQ ID NO: 24433 - DNA, 20 bp, Artificial Sequence
  MKO10024433_A_Hlcs
  gRNA
cgggcgaactctgccccgaa

SEQ ID NO: 24434 - DNA, 20 bp, Artificial Sequence
  MKO10024434_A_Hlcs
  gRNA
aatctgcagaccacgcgcct

SEQ ID NO: 24435 - DNA, 20 bp, Artificial Sequence
  MKO10024435_A_Hlcs
  gRNA
ccgaaagccacccaacgtga

SEQ ID NO: 24436 - DNA, 20 bp, Artificial Sequence
  MKO10024436_A_Hlf
  gRNA
gacctgagcacgccgtaggg

SEQ ID NO: 24437 - DNA, 20 bp, Artificial Sequence
  MKO10024437_A_Hlf
  gRNA
atgaggcccggattgcgatc

SEQ ID NO: 24438 - DNA, 20 bp, Artificial Sequence
  MKO10024438_A_Hlf
  gRNA
gggctgtggtcgtgctgcga

SEQ ID NO: 24439 - DNA, 20 bp, Artificial Sequence
  MKO10024439_A_Hltf
  gRNA
gatagctttagggtcgagtt

SEQ ID NO: 24440 - DNA, 20 bp, Artificial Sequence
  MKO10024440_A_Hltf
  gRNA
ctatagtaggccggctcatg

SEQ ID NO: 24441 - DNA, 20 bp, Artificial Sequence
  MKO10024441_A_Hltf
  gRNA
tattcgcagtctgtccagta

SEQ ID NO: 24442 - DNA, 20 bp, Artificial Sequence
  MKO10024442_A_Hlx
  gRNA
gagtccccgccgagggtgaa

SEQ ID NO: 24443 - DNA, 20 bp, Artificial Sequence
  MKO10024443_A_Hlx
  gRNA
ctcagtccgttccgtgtcgc

SEQ ID NO: 24444 - DNA, 20 bp, Artificial Sequence
  MKO10024444_A_Hlx
  gRNA
acatcctgcacgccggcgtc

SEQ ID NO: 24445 - DNA, 20 bp, Artificial Sequence
  MKO10024445_A_Hmbox1
  gRNA
tcccggtacgccgaagacgc

SEQ ID NO: 24446 - DNA, 20 bp, Artificial Sequence
  MKO10024446_A_Hmbox1
  gRNA
gtcagagtcgaatctctcac

SEQ ID NO: 24447 - DNA, 20 bp, Artificial Sequence
  MKO10024447_A_Hmbox1
  gRNA
atatgagcttcccccgtagc

SEQ ID NO: 24448 - DNA, 20 bp, Artificial Sequence
  MKO10024448_A_Hmbs
  gRNA
tcgcatacagaccgacactg

SEQ ID NO: 24449 - DNA, 20 bp, Artificial Sequence
  MKO10024449_A_Hmbs
  gRNA
aaagatgagggtgattcgag

SEQ ID NO: 24450 - DNA, 20 bp, Artificial Sequence
  MKO10024450_A_Hmbs
  gRNA
tttctagctccttggtaaac

SEQ ID NO: 24451 - DNA, 20 bp, Artificial Sequence
  MKO10024451_A_Hmces
  gRNA
ctacgagtggcagcggtgtc

SEQ ID NO: 24452 - DNA, 20 bp, Artificial Sequence
  MKO10024452_A_Hmces
  gRNA
ctgtcgtagtgataccataa

SEQ ID NO: 24453 - DNA, 20 bp, Artificial Sequence
  MKO10024453_A_Hmces
  gRNA
gtctccaaatggctcgactt

SEQ ID NO: 24454 - DNA, 20 bp, Artificial Sequence
  MKO10024454_A_Hmcn1
  gRNA
cacagcgtgctccaaatgat

SEQ ID NO: 24455 - DNA, 20 bp, Artificial Sequence
  MKO10024455_A_Hmcn1
  gRNA
atgggtgagccgataatcct

SEQ ID NO: 24456 - DNA, 20 bp, Artificial Sequence
  MKO10024456_A_Hmcn1
  gRNA
attgagattcgcaatccttt

SEQ ID NO: 24457 - DNA, 20 bp, Artificial Sequence
  MKO10024457_A_Hmg20a
  gRNA
gctcaggttaacacaccccg

SEQ ID NO: 24458 - DNA, 20 bp, Artificial Sequence
  MKO10024458_A_Hmg20a
  gRNA
ggtgcattgctgtctcgaag

SEQ ID NO: 24459 - DNA, 20 bp, Artificial Sequence
  MKO10024459_A_Hmg20a
  gRNA
gcacctaaatccccccttac

SEQ ID NO: 24460 - DNA, 20 bp, Artificial Sequence
  MKO10024460_A_Hmg20b
  gRNA
acagattcgcacccgccacc

SEQ ID NO: 24461 - DNA, 20 bp, Artificial Sequence
  MKO10024461_A_Hmg20b
  gRNA
cgcagcgagggttcccgagc

SEQ ID NO: 24462 - DNA, 20 bp, Artificial Sequence
  MKO10024462_A_Hmg20b
  gRNA
ttgtccccaagacctgcggg

SEQ ID NO: 24463 - DNA, 20 bp, Artificial Sequence
  MKO10024463_A_Hmga1-rs1
  gRNA
tgtggtgactttccgggtct

SEQ ID NO: 24464 - DNA, 20 bp, Artificial Sequence
  MKO10024464_A_Hmga1-rs1
  gRNA
cggaaagtcaccacagctcc

SEQ ID NO: 24465 - DNA, 20 bp, Artificial Sequence
  MKO10024465_A_Hmga1-rs1
  gRNA
ttcctccttctccagtttct

SEQ ID NO: 24466 - DNA, 20 bp, Artificial Sequence
  MKO10024466_A_Hmga1
  gRNA
gaggctcacccgggtcttgg

SEQ ID NO: 24467 - DNA, 20 bp, Artificial Sequence
  MKO10024467_A_Hmga1
  gRNA
caagcacctaccagtttctt

SEQ ID NO: 24468 - DNA, 20 bp, Artificial Sequence
  MKO10024468_A_Hmga1
  gRNA
cagaaagtcaccacagctcc

SEQ ID NO: 24469 - DNA, 20 bp, Artificial Sequence
  MKO10024469_A_Hmga2
  gRNA
caccttctgggctgctttag

SEQ ID NO: 24470 - DNA, 20 bp, Artificial Sequence
  MKO10024470_A_Hmga2
  gRNA
cccctctaaagcagcccaga

SEQ ID NO: 24471 - DNA, 20 bp, Artificial Sequence
  MKO10024471_A_Hmga2
  gRNA
atcctcgcaagagtccgcag

SEQ ID NO: 24472 - DNA, 20 bp, Artificial Sequence
  MKO10024472_A_Hmgb1
  gRNA
tcatactcacggaggcctct

SEQ ID NO: 24473 - DNA, 20 bp, Artificial Sequence
  MKO10024473_A_Hmgb1
  gRNA
ggagatcctaaaaagccgag

SEQ ID NO: 24474 - DNA, 20 bp, Artificial Sequence
  MKO10024474_A_Hmgb1
  gRNA
ccacctctctgagcacttct

SEQ ID NO: 24475 - DNA, 20 bp, Artificial Sequence
  MKO10024475_A_Hmgb2
  gRNA
cccatagaccatgtctgcaa

SEQ ID NO: 24476 - DNA, 20 bp, Artificial Sequence
  MKO10024476_A_Hmgb2
  gRNA
tcaacttacggtggtctctt

SEQ ID NO: 24477 - DNA, 20 bp, Artificial Sequence
  MKO10024477_A_Hmgb2
  gRNA
ctccctcaccttccatctct

SEQ ID NO: 24478 - DNA, 20 bp, Artificial Sequence
  MKO10024478_A_Hmgb3
  gRNA
aggcacttacggaggtcttt

SEQ ID NO: 24479 - DNA, 20 bp, Artificial Sequence
  MKO10024479_A_Hmgb3
  gRNA
ccacctctccgagcacttct

SEQ ID NO: 24480 - DNA, 20 bp, Artificial Sequence
  MKO10024480_A_Hmgb3
  gRNA
aggtgaccccaagaaaccaa

SEQ ID NO: 24481 - DNA, 20 bp, Artificial Sequence
  MKO10024481_A_Hmgb4
  gRNA
tatgcgggcaaagtatttcg

SEQ ID NO: 24482 - DNA, 20 bp, Artificial Sequence
  MKO10024482_A_Hmgb4
  gRNA
cacctgcaccacggtccagt

SEQ ID NO: 24483 - DNA, 20 bp, Artificial Sequence
  MKO10024483_A_Hmgb4
  gRNA
gcctaccgcaaccaatgtca

SEQ ID NO: 24484 - DNA, 20 bp, Artificial Sequence
  MKO10024484_A_Hmgcll1
  gRNA
tgagtaagtaccctcgcact

SEQ ID NO: 24485 - DNA, 20 bp, Artificial Sequence
  MKO10024485_A_Hmgcll1
  gRNA
accaaaaactgctatctccg

SEQ ID NO: 24486 - DNA, 20 bp, Artificial Sequence
  MKO10024486_A_Hmgcll1
  gRNA
aggacaggatagcgaactcc

SEQ ID NO: 24487 - DNA, 20 bp, Artificial Sequence
  MKO10024487_A_Hmgcl
  gRNA
atcgacatgctttccgaagc

SEQ ID NO: 24488 - DNA, 20 bp, Artificial Sequence
  MKO10024488_A_Hmgcl
  gRNA
tagagcagttcgcgttcttc

SEQ ID NO: 24489 - DNA, 20 bp, Artificial Sequence
  MKO10024489_A_Hmgcl
  gRNA
gaacgcgaactgctctatag

SEQ ID NO: 24490 - DNA, 20 bp, Artificial Sequence
  MKO10024490_A_Hmgcr
  gRNA
tcatcatcctgacgataacg

SEQ ID NO: 24491 - DNA, 20 bp, Artificial Sequence
  MKO10024491_A_Hmgcr
  gRNA
cgatgcaccgcgttatcgtc

SEQ ID NO: 24492 - DNA, 20 bp, Artificial Sequence
  MKO10024492_A_Hmgcr
  gRNA
ctaatgcactcgctctagaa

SEQ ID NO: 24493 - DNA, 20 bp, Artificial Sequence
  MKO10024493_A_Hmgcs1
  gRNA
gcaaaaagatccgtgcccag

SEQ ID NO: 24494 - DNA, 20 bp, Artificial Sequence
  MKO10024494_A_Hmgcs1
  gRNA
tcacctcggtcaaaaattag

SEQ ID NO: 24495 - DNA, 20 bp, Artificial Sequence
  MKO10024495_A_Hmgcs1
  gRNA
catgctctccgagtaccctg

SEQ ID NO: 24496 - DNA, 20 bp, Artificial Sequence
  MKO10024496_A_Hmgcs2
  gRNA
ggcaatgctgatcgggccca

SEQ ID NO: 24497 - DNA, 20 bp, Artificial Sequence
  MKO10024497_A_Hmgcs2
  gRNA
gataccaccaacgcctgtta

SEQ ID NO: 24498 - DNA, 20 bp, Artificial Sequence
  MKO10024498_A_Hmgcs2
  gRNA
tgtgccgccataacaggcgt

SEQ ID NO: 24499 - DNA, 20 bp, Artificial Sequence
  MKO10024499_A_Hmgn1
  gRNA
acttacggccgacagcctcg

SEQ ID NO: 24500 - DNA, 20 bp, Artificial Sequence
  MKO10024500_A_Hmgn1
  gRNA
ctcctgcaggttagcgcgga

SEQ ID NO: 24501 - DNA, 20 bp, Artificial Sequence
  MKO10024501_A_Hmgn1
  gRNA
cgcactcacctccgccttgg

SEQ ID NO: 24502 - DNA, 20 bp, Artificial Sequence
  MKO10024502_A_Hmgn2
  gRNA
caaaaccaaggtgaaggacg

SEQ ID NO: 24503 - DNA, 20 bp, Artificial Sequence
  MKO10024503_A_Hmgn2
  gRNA
ccactctacctggtctgttt

SEQ ID NO: 24504 - DNA, 20 bp, Artificial Sequence
  MKO10024504_A_Hmgn2
  gRNA
actcacctcgtccttcacct

SEQ ID NO: 24505 - DNA, 20 bp, Artificial Sequence
  MKO10024505_A_Hmgn3
  gRNA
aggacttaccgcggacaacc

SEQ ID NO: 24506 - DNA, 20 bp, Artificial Sequence
  MKO10024506_A_Hmgn3
  gRNA
tacctcctgcttagttagct

SEQ ID NO: 24507 - DNA, 20 bp, Artificial Sequence
  MKO10024507_A_Hmgn3
  gRNA
agtcattatgccgaagagaa

SEQ ID NO: 24508 - DNA, 20 bp, Artificial Sequence
  MKO10024508_A_Hmgn5
  gRNA
tccaggtacctccataatct

SEQ ID NO: 24509 - DNA, 20 bp, Artificial Sequence
  MKO10024509_A_Hmgn5
  gRNA
catcacttacagcagacagt

SEQ ID NO: 24510 - DNA, 20 bp, Artificial Sequence
  MKO10024510_A_Hmgn5
  gRNA
gatgcctgtgccctttacac

SEQ ID NO: 24511 - DNA, 20 bp, Artificial Sequence
  MKO10024511_A_Hmgxb3
  gRNA
ccgaaagatccttccccgat

SEQ ID NO: 24512 - DNA, 20 bp, Artificial Sequence
  MKO10024512_A_Hmgxb3
  gRNA
ggccgagagaagttactact

SEQ ID NO: 24513 - DNA, 20 bp, Artificial Sequence
  MKO10024513_A_Hmgxb3
  gRNA
cctcctccaagagcatatcg

SEQ ID NO: 24514 - DNA, 20 bp, Artificial Sequence
  MKO10024514_A_Hmgxb4
  gRNA
cctccatagtagtaatcgtc

SEQ ID NO: 24515 - DNA, 20 bp, Artificial Sequence
  MKO10024515_A_Hmgxb4
  gRNA
acttggcacccgctgccagt

SEQ ID NO: 24516 - DNA, 20 bp, Artificial Sequence
  MKO10024516_A_Hmgxb4
  gRNA
gtcccgagctagtttcttcg

SEQ ID NO: 24517 - DNA, 20 bp, Artificial Sequence
  MKO10024517_A_Hmha1
  gRNA
ctgcccggcagaccttctcg

SEQ ID NO: 24518 - DNA, 20 bp, Artificial Sequence
  MKO10024518_A_Hmha1
  gRNA
ggaggggcccccacataacg

SEQ ID NO: 24519 - DNA, 20 bp, Artificial Sequence
  MKO10024519_A_Hmha1
  gRNA
tcacattcctccacgttatg

SEQ ID NO: 24520 - DNA, 20 bp, Artificial Sequence
  MKO10024520_A_Hmmr
  gRNA
cagagccaacgagctactaa

SEQ ID NO: 24521 - DNA, 20 bp, Artificial Sequence
  MKO10024521_A_Hmmr
  gRNA
cttagcctttagtagctcgt

SEQ ID NO: 24522 - DNA, 20 bp, Artificial Sequence
  MKO10024522_A_Hmmr
  gRNA
tgtaggttgtgctccatctc

SEQ ID NO: 24523 - DNA, 20 bp, Artificial Sequence
  MKO10024523_A_Hmox1
  gRNA
ctatgtaaagcgtctccacg

SEQ ID NO: 24524 - DNA, 20 bp, Artificial Sequence
  MKO10024524_A_Hmox1
  gRNA
ggggctgtcgatgttcggga

SEQ ID NO: 24525 - DNA, 20 bp, Artificial Sequence
  MKO10024525_A_Hmox1
  gRNA
acgaagtgacgccatctgtg

SEQ ID NO: 24526 - DNA, 20 bp, Artificial Sequence
  MKO10024526_A_Hmox2
  gRNA
gaatccgatccacatacttc

SEQ ID NO: 24527 - DNA, 20 bp, Artificial Sequence
  MKO10024527_A_Hmox2
  gRNA
ccaaggcattcattctagcg

SEQ ID NO: 24528 - DNA, 20 bp, Artificial Sequence
  MKO10024528_A_Hmox2
  gRNA
gatgggctcccggtacatga

SEQ ID NO: 24529 - DNA, 20 bp, Artificial Sequence
  MKO10024529_A_Hmx1
  gRNA
aggcgcgacgacgactacag

SEQ ID NO: 24530 - DNA, 20 bp, Artificial Sequence
  MKO10024530_A_Hmx1
  gRNA
cttccttcgcgcgcagatgc

SEQ ID NO: 24531 - DNA, 20 bp, Artificial Sequence
  MKO10024531_A_Hmx1
  gRNA
agtcgtcgtcgcgcctgctc

SEQ ID NO: 24532 - DNA, 20 bp, Artificial Sequence
  MKO10024532_A_Hmx2
  gRNA
cgccgacgcgtgtgccatgt

SEQ ID NO: 24533 - DNA, 20 bp, Artificial Sequence
  MKO10024533_A_Hmx2
  gRNA
tccttggggccgtgcggatc

SEQ ID NO: 24534 - DNA, 20 bp, Artificial Sequence
  MKO10024534_A_Hmx2
  gRNA
aaggaatggcgtgcgctccg

SEQ ID NO: 24535 - DNA, 20 bp, Artificial Sequence
  MKO10024535_A_Hmx3
  gRNA
tgtcgccgtagtcgccccta

SEQ ID NO: 24536 - DNA, 20 bp, Artificial Sequence
  MKO10024536_A_Hmx3
  gRNA
cggggagtctcgatcggtgc

SEQ ID NO: 24537 - DNA, 20 bp, Artificial Sequence
  MKO10024537_A_Hmx3
  gRNA
tgccctgcccgcgcactacc

SEQ ID NO: 24538 - DNA, 20 bp, Artificial Sequence
  MKO10024538_A_Hn1l
  gRNA
ttgtaggtccatgaagcccc

SEQ ID NO: 24539 - DNA, 20 bp, Artificial Sequence
  MKO10024539_A_Hn1l
  gRNA
gtccataccttgggcttgtt

SEQ ID NO: 24540 - DNA, 20 bp, Artificial Sequence
  MKO10024540_A_Hn1l
  gRNA
gactctaagtctgacctgaa

SEQ ID NO: 24541 - DNA, 20 bp, Artificial Sequence
  MKO10024541_A_Hn1
  gRNA
ccctggcggcaagtccagcc

SEQ ID NO: 24542 - DNA, 20 bp, Artificial Sequence
  MKO10024542_A_Hn1
  gRNA
tttctaggttccaagtctag

SEQ ID NO: 24543 - DNA, 20 bp, Artificial Sequence
  MKO10024543_A_Hn1
  gRNA
cagggagaaggtgatatgca

SEQ ID NO: 24544 - DNA, 20 bp, Artificial Sequence
  MKO10024544_A_Hnf1a
  gRNA
ggaagccttccggcacaagt

SEQ ID NO: 24545 - DNA, 20 bp, Artificial Sequence
  MKO10024545_A_Hnf1a
  gRNA
ggcttcctccttgcgccggt

SEQ ID NO: 24546 - DNA, 20 bp, Artificial Sequence
  MKO10024546_A_Hnf1a
  gRNA
ggcgtaggaaccggttcaag

SEQ ID NO: 24547 - DNA, 20 bp, Artificial Sequence
  MKO10024547_A_Hnf1b
  gRNA
acaagaagatgcgccgcaac

SEQ ID NO: 24548 - DNA, 20 bp, Artificial Sequence
  MKO10024548_A_Hnf1b
  gRNA
ctctgtctagcgaggacccg

SEQ ID NO: 24549 - DNA, 20 bp, Artificial Sequence
  MKO10024549_A_Hnf1b
  gRNA
acaactggttcgcaaaccgc

SEQ ID NO: 24550 - DNA, 20 bp, Artificial Sequence
  MKO10024550_A_Hnf4a
  gRNA
cacgcggaggtcaagctacg

SEQ ID NO: 24551 - DNA, 20 bp, Artificial Sequence
  MKO10024551_A_Hnf4a
  gRNA
cgggccaccggcaaacacta

SEQ ID NO: 24552 - DNA, 20 bp, Artificial Sequence
  MKO10024552_A_Hnf4a
  gRNA
cgtagtgtttgccggtggcc

SEQ ID NO: 24553 - DNA, 20 bp, Artificial Sequence
  MKO10024553_A_Hnf4g
  gRNA
tacaagaagaagtacctacg

SEQ ID NO: 24554 - DNA, 20 bp, Artificial Sequence
  MKO10024554_A_Hnf4g
  gRNA
cgcttgtgccagagtgttta

SEQ ID NO: 24555 - DNA, 20 bp, Artificial Sequence
  MKO10024555_A_Hnf4g
  gRNA
tcggcagtgtgttgttgaca

SEQ ID NO: 24556 - DNA, 20 bp, Artificial Sequence
  MKO10024556_A_Hnmt
  gRNA
tgaatatcaaaaacgtatgc

SEQ ID NO: 24557 - DNA, 20 bp, Artificial Sequence
  MKO10024557_A_Hnmt
  gRNA
aagaagaagagccaccgaag

SEQ ID NO: 24558 - DNA, 20 bp, Artificial Sequence
  MKO10024558_A_Hnmt
  gRNA
tcattgttaatacagattcc

SEQ ID NO: 24559 - DNA, 20 bp, Artificial Sequence
  MKO10024559_A_Hnrnpa0
  gRNA
tgtcggccgcgtcgtggctc

SEQ ID NO: 24560 - DNA, 20 bp, Artificial Sequence
  MKO10024560_A_Hnrnpa0
  gRNA
cgccgaatcctcccgcgaca

SEQ ID NO: 24561 - DNA, 20 bp, Artificial Sequence
  MKO10024561_A_Hnrnpa0
  gRNA
gtgttgccgtccaccgcgtg

SEQ ID NO: 24562 - DNA, 20 bp, Artificial Sequence
  MKO10024562_A_Hnrnpa1
  gRNA
taccgtcatgtctaagtccg

SEQ ID NO: 24563 - DNA, 20 bp, Artificial Sequence
  MKO10024563_A_Hnrnpa1
  gRNA
gtgttccccattgctcaaaa

SEQ ID NO: 24564 - DNA, 20 bp, Artificial Sequence
  MKO10024564_A_Hnrnpa1
  gRNA
ccaaggagccagaacagctg

SEQ ID NO: 24565 - DNA, 20 bp, Artificial Sequence
  MKO10024565_A_Hnrnpa2b1
  gRNA
cagttccgaaagctctttat

SEQ ID NO: 24566 - DNA, 20 bp, Artificial Sequence
  MKO10024566_A_Hnrnpa2b1
  gRNA
tctcttgctacagcacgttt

SEQ ID NO: 24567 - DNA, 20 bp, Artificial Sequence
  MKO10024567_A_Hnrnpa2b1
  gRNA
agccaccaataaagagcttt

SEQ ID NO: 24568 - DNA, 20 bp, Artificial Sequence
  MKO10024568_A_Hnrnpa3
  gRNA
tcctcagggccatgatccaa

SEQ ID NO: 24569 - DNA, 20 bp, Artificial Sequence
  MKO10024569_A_Hnrnpa3
  gRNA
gacacagttgataaaattgt

SEQ ID NO: 24570 - DNA, 20 bp, Artificial Sequence
  MKO10024570_A_Hnrnpa3
  gRNA
ttgtaggattctgtaaagcc

SEQ ID NO: 24571 - DNA, 20 bp, Artificial Sequence
  MKO10024571_A_Hnrnpab
  gRNA
cgccaccgagaacggacacg

SEQ ID NO: 24572 - DNA, 20 bp, Artificial Sequence
  MKO10024572_A_Hnrnpab
  gRNA
ctggccgaccatgtcggacg

SEQ ID NO: 24573 - DNA, 20 bp, Artificial Sequence
  MKO10024573_A_Hnrnpab
  gRNA
cccaacactggacgatcaag

SEQ ID NO: 24574 - DNA, 20 bp, Artificial Sequence
  MKO10024574_A_Hnrnpc
  gRNA
aagttccggacctgagtaga

SEQ ID NO: 24575 - DNA, 20 bp, Artificial Sequence
  MKO10024575_A_Hnrnpc
  gRNA
ggaggaggaggaacccgcgc

SEQ ID NO: 24576 - DNA, 20 bp, Artificial Sequence
  MKO10024576_A_Hnrnpc
  gRNA
agtgaaaggtgatgaccttc

SEQ ID NO: 24577 - DNA, 20 bp, Artificial Sequence
  MKO10024577_A_Hnrnpdl
  gRNA
cctcttgatcttcccgtgac

SEQ ID NO: 24578 - DNA, 20 bp, Artificial Sequence
  MKO10024578_A_Hnrnpdl
  gRNA
caaagttgcgcaacccaaag

SEQ ID NO: 24579 - DNA, 20 bp, Artificial Sequence
  MKO10024579_A_Hnrnpdl
  gRNA
ggggaaagaaccccctaaaa

SEQ ID NO: 24580 - DNA, 20 bp, Artificial Sequence
  MKO10024580_A_Hnrnpd
  gRNA
aacggcggcggtaggcggct

SEQ ID NO: 24581 - DNA, 20 bp, Artificial Sequence
  MKO10024581_A_Hnrnpd
  gRNA
acagaacccacgcctcttat

SEQ ID NO: 24582 - DNA, 20 bp, Artificial Sequence
  MKO10024582_A_Hnrnpd
  gRNA
gatcgacgccagtaagaacg

SEQ ID NO: 24583 - DNA, 20 bp, Artificial Sequence
  MKO10024583_A_Hnrnpf
  gRNA
cgcccatgccctgcatcacc

SEQ ID NO: 24584 - DNA, 20 bp, Artificial Sequence
  MKO10024584_A_Hnrnpf
  gRNA
catgggcgtgtcagctgccc

SEQ ID NO: 24585 - DNA, 20 bp, Artificial Sequence
  MKO10024585_A_Hnrnpf
  gRNA
gctgttctgaccgctgtagc

SEQ ID NO: 24586 - DNA, 20 bp, Artificial Sequence
  MKO10024586_A_Hnrnph1
  gRNA
atagggacctggccgctgca

SEQ ID NO: 24587 - DNA, 20 bp, Artificial Sequence
  MKO10024587_A_Hnrnph1
  gRNA
tcaacaaaagcctcgccact

SEQ ID NO: 24588 - DNA, 20 bp, Artificial Sequence
  MKO10024588_A_Hnrnph1
  gRNA
aacattgccggtggacttcc

SEQ ID NO: 24589 - DNA, 20 bp, Artificial Sequence
  MKO10024589_A_Hnrnph2
  gRNA
gctcatgactatgcagcgcc

SEQ ID NO: 24590 - DNA, 20 bp, Artificial Sequence
  MKO10024590_A_Hnrnph2
  gRNA
ccgcctcattctttcaaacc

SEQ ID NO: 24591 - DNA, 20 bp, Artificial Sequence
  MKO10024591_A_Hnrnph2
  gRNA
ccggacctccataactagac

SEQ ID NO: 24592 - DNA, 20 bp, Artificial Sequence
  MKO10024592_A_Hnrnph3
  gRNA
atgtatgacagaatgcgacg

SEQ ID NO: 24593 - DNA, 20 bp, Artificial Sequence
  MKO10024593_A_Hnrnph3
  gRNA
ggaccatatgatagaccaat

SEQ ID NO: 24594 - DNA, 20 bp, Artificial Sequence
  MKO10024594_A_Hnrnph3
  gRNA
tttgatgacaggatgcgaga

SEQ ID NO: 24595 - DNA, 20 bp, Artificial Sequence
  MKO10024595_A_Hnrnpk
  gRNA
aaacctacctcttccaaggt

SEQ ID NO: 24596 - DNA, 20 bp, Artificial Sequence
  MKO10024596_A_Hnrnpk
  gRNA
cagaatgctggagcagtgat

SEQ ID NO: 24597 - DNA, 20 bp, Artificial Sequence
  MKO10024597_A_Hnrnpk
  gRNA
taaacgccctgcagaagata

SEQ ID NO: 24598 - DNA, 20 bp, Artificial Sequence
  MKO10024598_A_Hnrnpll
  gRNA
ggaaataccgacgatccatc

SEQ ID NO: 24599 - DNA, 20 bp, Artificial Sequence
  MKO10024599_A_Hnrnpll
  gRNA
attcacagagccctcgaaca

SEQ ID NO: 24600 - DNA, 20 bp, Artificial Sequence
  MKO10024600_A_Hnrnpll
  gRNA
gagatacataccaccgtaat

SEQ ID NO: 24601 - DNA, 20 bp, Artificial Sequence
  MKO10024601_A_Hnrnpl
  gRNA
gttgtctgcagcgtagttta

SEQ ID NO: 24602 - DNA, 20 bp, Artificial Sequence
  MKO10024602_A_Hnrnpl
  gRNA
gaagcacgctgtttacgctc

SEQ ID NO: 24603 - DNA, 20 bp, Artificial Sequence
  MKO10024603_A_Hnrnpl
  gRNA
cttccactactccgtcaatc

SEQ ID NO: 24604 - DNA, 20 bp, Artificial Sequence
  MKO10024604_A_Hnrnpm
  gRNA
tccgttgccgctcggcacgc

SEQ ID NO: 24605 - DNA, 20 bp, Artificial Sequence
  MKO10024605_A_Hnrnpm
  gRNA
cgaagcggcagccgaagtgg

SEQ ID NO: 24606 - DNA, 20 bp, Artificial Sequence
  MKO10024606_A_Hnrnpm
  gRNA
gactgccatttcacatcaaa

SEQ ID NO: 24607 - DNA, 20 bp, Artificial Sequence
  MKO10024607_A_Hnrnpr
  gRNA
accttacctggacatgagac

SEQ ID NO: 24608 - DNA, 20 bp, Artificial Sequence
  MKO10024608_A_Hnrnpr
  gRNA
tgcgcaggaagcagttaagc

SEQ ID NO: 24609 - DNA, 20 bp, Artificial Sequence
  MKO10024609_A_Hnrnpr
  gRNA
gcccgatgaagcaaaaatca

SEQ ID NO: 24610 - DNA, 20 bp, Artificial Sequence
  MKO10024610_A_Hnrnpul1
  gRNA
cgcgaagttcgttcaccttc

SEQ ID NO: 24611 - DNA, 20 bp, Artificial Sequence
  MKO10024611_A_Hnrnpul1
  gRNA
gcactctcacaatgtccgtc

SEQ ID NO: 24612 - DNA, 20 bp, Artificial Sequence
  MKO10024612_A_Hnrnpul1
  gRNA
gtacccaccttcgatcctct

SEQ ID NO: 24613 - DNA, 20 bp, Artificial Sequence
  MKO10024613_A_Hnrnpul2
  gRNA
ggaccagacgcttgtgaacc

SEQ ID NO: 24614 - DNA, 20 bp, Artificial Sequence
  MKO10024614_A_Hnrnpul2
  gRNA
tgtccaggttcacaagcgtc

SEQ ID NO: 24615 - DNA, 20 bp, Artificial Sequence
  MKO10024615_A_Hnrnpul2
  gRNA
agcttactatgaattccgag

SEQ ID NO: 24616 - DNA, 20 bp, Artificial Sequence
  MKO10024616_A_Hnrnpu
  gRNA
cgaacacttcgatgacacag

SEQ ID NO: 24617 - DNA, 20 bp, Artificial Sequence
  MKO10024617_A_Hnrnpu
  gRNA
accaagcaacattccacttg

SEQ ID NO: 24618 - DNA, 20 bp, Artificial Sequence
  MKO10024618_A_Hnrnpu
  gRNA
gcttcctacggtgtgtcaaa

SEQ ID NO: 24619 - DNA, 20 bp, Artificial Sequence
  MKO10024619_A_Hoga1
  gRNA
gtgaccccttgttactatcg

SEQ ID NO: 24620 - DNA, 20 bp, Artificial Sequence
  MKO10024620_A_Hoga1
  gRNA
gtgaactatcagtccaatcc

SEQ ID NO: 24621 - DNA, 20 bp, Artificial Sequence
  MKO10024621_A_Hoga1
  gRNA
aggtagctctagccccgtat

SEQ ID NO: 24622 - DNA, 20 bp, Artificial Sequence
  MKO10024622_A_Homer1
  gRNA
ggaagctgctcggcttgcaa

SEQ ID NO: 24623 - DNA, 20 bp, Artificial Sequence
  MKO10024623_A_Homer1
  gRNA
agccgggcaaacactgttta

SEQ ID NO: 24624 - DNA, 20 bp, Artificial Sequence
  MKO10024624_A_Homer1
  gRNA
tgagctcgagtgctgaagat

SEQ ID NO: 24625 - DNA, 20 bp, Artificial Sequence
  MKO10024625_A_Homer2
  gRNA
gagcaacgcccggctgacca

SEQ ID NO: 24626 - DNA, 20 bp, Artificial Sequence
  MKO10024626_A_Homer2
  gRNA
gccgggcgttgctctcccgc

SEQ ID NO: 24627 - DNA, 20 bp, Artificial Sequence
  MKO10024627_A_Homer2
  gRNA
gtcgtctgtgccattgacgc

SEQ ID NO: 24628 - DNA, 20 bp, Artificial Sequence
  MKO10024628_A_Homer3
  gRNA
cacggtaagtgcgtgcttgc

SEQ ID NO: 24629 - DNA, 20 bp, Artificial Sequence
  MKO10024629_A_Homer3
  gRNA
cgatctggaatacgtgcgcc

SEQ ID NO: 24630 - DNA, 20 bp, Artificial Sequence
  MKO10024630_A_Homer3
  gRNA
gcctaggccgtagacagtgt

SEQ ID NO: 24631 - DNA, 20 bp, Artificial Sequence
  MKO10024631_A_Homez
  gRNA
atggcccaacgtctccgctg

SEQ ID NO: 24632 - DNA, 20 bp, Artificial Sequence
  MKO10024632_A_Homez
  gRNA
cccaccagatatacgacctt

SEQ ID NO: 24633 - DNA, 20 bp, Artificial Sequence
  MKO10024633_A_Homez
  gRNA
atgaccagctaatgccgcag

SEQ ID NO: 24634 - DNA, 20 bp, Artificial Sequence
  MKO10024634_A_Hook1
  gRNA
aggttgcttcagctaattct

SEQ ID NO: 24635 - DNA, 20 bp, Artificial Sequence
  MKO10024635_A_Hook1
  gRNA
aattacaagttactatcatg

SEQ ID NO: 24636 - DNA, 20 bp, Artificial Sequence
  MKO10024636_A_Hook1
  gRNA
agccgaattaaagatgatgt

SEQ ID NO: 24637 - DNA, 20 bp, Artificial Sequence
  MKO10024637_A_Hook2
  gRNA
ctatggcgagtccgctgctc

SEQ ID NO: 24638 - DNA, 20 bp, Artificial Sequence
  MKO10024638_A_Hook2
  gRNA
gcgtcaccaggtcaggaaac

SEQ ID NO: 24639 - DNA, 20 bp, Artificial Sequence
  MKO10024639_A_Hook2
  gRNA
caaactgcttcagttggtac

SEQ ID NO: 24640 - DNA, 20 bp, Artificial Sequence
  MKO10024640_A_Hook3
  gRNA
gccgttcgttaagtcctccg

SEQ ID NO: 24641 - DNA, 20 bp, Artificial Sequence
  MKO10024641_A_Hook3
  gRNA
ctgtatatttcgacgataat

SEQ ID NO: 24642 - DNA, 20 bp, Artificial Sequence
  MKO10024642_A_Hook3
  gRNA
caattatcgtcgaaatatac

SEQ ID NO: 24643 - DNA, 20 bp, Artificial Sequence
  MKO10024643_A_Hopx
  gRNA
atgtcggcgcagaccgcgag

SEQ ID NO: 24644 - DNA, 20 bp, Artificial Sequence
  MKO10024644_A_Hopx
  gRNA
atgcagatctgttacggact

SEQ ID NO: 24645 - DNA, 20 bp, Artificial Sequence
  MKO10024645_A_Hopx
  gRNA
gctcgcggtctgcgccgaca

SEQ ID NO: 24646 - DNA, 20 bp, Artificial Sequence
  MKO10024646_A_Hormad1
  gRNA
tcttgcatcacctatttgag

SEQ ID NO: 24647 - DNA, 20 bp, Artificial Sequence
  MKO10024647_A_Hormad1
  gRNA
atgctcagttgatatcttat

SEQ ID NO: 24648 - DNA, 20 bp, Artificial Sequence
  MKO10024648_A_Hormad1
  gRNA
ttcactagctgtgaagaacc

SEQ ID NO: 24649 - DNA, 20 bp, Artificial Sequence
  MKO10024649_A_Hormad2
  gRNA
ctcctacagagaccgccgtt

SEQ ID NO: 24650 - DNA, 20 bp, Artificial Sequence
  MKO10024650_A_Hormad2
  gRNA
tctcatgtataacgtacctg

SEQ ID NO: 24651 - DNA, 20 bp, Artificial Sequence
  MKO10024651_A_Hormad2
  gRNA
ttaataatatgtaatgaccc

SEQ ID NO: 24652 - DNA, 20 bp, Artificial Sequence
  MKO10024652_A_Hoxa10
  gRNA
gatgagcgagtcgaccaaaa

SEQ ID NO: 24653 - DNA, 20 bp, Artificial Sequence
  MKO10024653_A_Hoxa10
  gRNA
cgtaatgaagcgccgtcgcc

SEQ ID NO: 24654 - DNA, 20 bp, Artificial Sequence
  MKO10024654_A_Hoxa10
  gRNA
cagccgtagcgtccacctca

SEQ ID NO: 24655 - DNA, 20 bp, Artificial Sequence
  MKO10024655_A_Hoxa11
  gRNA
acttcaagttcggacggcgg

SEQ ID NO: 24656 - DNA, 20 bp, Artificial Sequence
  MKO10024656_A_Hoxa11
  gRNA
tttatacgcaccggagccac

SEQ ID NO: 24657 - DNA, 20 bp, Artificial Sequence
  MKO10024657_A_Hoxa11
  gRNA
caaataccagatccgagagc

SEQ ID NO: 24658 - DNA, 20 bp, Artificial Sequence
  MKO10024658_A_Hoxa13
  gRNA
cgcgcacgacttgatggcgt

SEQ ID NO: 24659 - DNA, 20 bp, Artificial Sequence
  MKO10024659_A_Hoxa13
  gRNA
ctactacccgtgcgcccgca

SEQ ID NO: 24660 - DNA, 20 bp, Artificial Sequence
  MKO10024660_A_Hoxa13
  gRNA
gaagcgcgtgccttacacta

SEQ ID NO: 24661 - DNA, 20 bp, Artificial Sequence
  MKO10024661_A_Hoxa1
  gRNA
ggggtaagctcgcgccgagc

SEQ ID NO: 24662 - DNA, 20 bp, Artificial Sequence
  MKO10024662_A_Hoxa1
  gRNA
ccaccctgcgcgctcgtgta

SEQ ID NO: 24663 - DNA, 20 bp, Artificial Sequence
  MKO10024663_A_Hoxa1
  gRNA
agtaccttacacgagcgcgc

SEQ ID NO: 24664 - DNA, 20 bp, Artificial Sequence
  MKO10024664_A_Hoxa2
  gRNA
tgtcgagtgtgaaagcgtcg

SEQ ID NO: 24665 - DNA, 20 bp, Artificial Sequence
  MKO10024665_A_Hoxa2
  gRNA
gtacgcggttctcagacgcc

SEQ ID NO: 24666 - DNA, 20 bp, Artificial Sequence
  MKO10024666_A_Hoxa2
  gRNA
agtcaccctcgccacggcgc

SEQ ID NO: 24667 - DNA, 20 bp, Artificial Sequence
  MKO10024667_A_Hoxa3
  gRNA
atacgcgccgtccgccgctc

SEQ ID NO: 24668 - DNA, 20 bp, Artificial Sequence
  MKO10024668_A_Hoxa3
  gRNA
tcgatggtactcaacgccat

SEQ ID NO: 24669 - DNA, 20 bp, Artificial Sequence
  MKO10024669_A_Hoxa3
  gRNA
gccatggactacgggggcac

SEQ ID NO: 24670 - DNA, 20 bp, Artificial Sequence
  MKO10024670_A_Hoxa4
  gRNA
cccccgcttactacgcgccg

SEQ ID NO: 24671 - DNA, 20 bp, Artificial Sequence
  MKO10024671_A_Hoxa4
  gRNA
gctctcgaaccgcctatacc

SEQ ID NO: 24672 - DNA, 20 bp, Artificial Sequence
  MKO10024672_A_Hoxa4
  gRNA
gccacataccggcgctcacg

SEQ ID NO: 24673 - DNA, 20 bp, Artificial Sequence
  MKO10024673_A_Hoxa5
  gRNA
cgagcgcgcccgcagctacg

SEQ ID NO: 24674 - DNA, 20 bp, Artificial Sequence
  MKO10024674_A_Hoxa5
  gRNA
gctacctgacccgccgaaga

SEQ ID NO: 24675 - DNA, 20 bp, Artificial Sequence
  MKO10024675_A_Hoxa5
  gRNA
tggcacggcgtccgcagccg

SEQ ID NO: 24676 - DNA, 20 bp, Artificial Sequence
  MKO10024676_A_Hoxa6
  gRNA
ttacggggcgtcgagtcttc

SEQ ID NO: 24677 - DNA, 20 bp, Artificial Sequence
  MKO10024677_A_Hoxa6
  gRNA
aagactcgacgccccgtaag

SEQ ID NO: 24678 - DNA, 20 bp, Artificial Sequence
  MKO10024678_A_Hoxa6
  gRNA
tggagtctactcgcccgctt

SEQ ID NO: 24679 - DNA, 20 bp, Artificial Sequence
  MKO10024679_A_Hoxa7
  gRNA
cgcctgcgacaaggcggacg

SEQ ID NO: 24680 - DNA, 20 bp, Artificial Sequence
  MKO10024680_A_Hoxa7
  gRNA
tatcagagccccttcgcgtc

SEQ ID NO: 24681 - DNA, 20 bp, Artificial Sequence
  MKO10024681_A_Hoxa7
  gRNA
acggagggcaccgcgtcttc

SEQ ID NO: 24682 - DNA, 20 bp, Artificial Sequence
  MKO10024682_A_Hoxa9
  gRNA
acggcaggtatatgcgctcc

SEQ ID NO: 24683 - DNA, 20 bp, Artificial Sequence
  MKO10024683_A_Hoxa9
  gRNA
cggcggtgtttggtgcctcg

SEQ ID NO: 24684 - DNA, 20 bp, Artificial Sequence
  MKO10024684_A_Hoxa9
  gRNA
ggggcatcgcttcttccgag

SEQ ID NO: 24685 - DNA, 20 bp, Artificial Sequence
  MKO10024685_A_Hoxb13
  gRNA
tcccgggtagcccggataga

SEQ ID NO: 24686 - DNA, 20 bp, Artificial Sequence
  MKO10024686_A_Hoxb13
  gRNA
gccgcgggatggctagccag

SEQ ID NO: 24687 - DNA, 20 bp, Artificial Sequence
  MKO10024687_A_Hoxb13
  gRNA
cggaaggcacagccgtcggg

SEQ ID NO: 24688 - DNA, 20 bp, Artificial Sequence
  MKO10024688_A_Hoxb1
  gRNA
gaagtttgtgcggagaccgc

SEQ ID NO: 24689 - DNA, 20 bp, Artificial Sequence
  MKO10024689_A_Hoxb1
  gRNA
tacgcaggggagagccgcta

SEQ ID NO: 24690 - DNA, 20 bp, Artificial Sequence
  MKO10024690_A_Hoxb1
  gRNA
ggtggagatcgccgccaccc

SEQ ID NO: 24691 - DNA, 20 bp, Artificial Sequence
  MKO10024691_A_Hoxb2
  gRNA
tccgaggtcggatcaccatc

SEQ ID NO: 24692 - DNA, 20 bp, Artificial Sequence
  MKO10024692_A_Hoxb2
  gRNA
cgggcgacgtcgcgactcac

SEQ ID NO: 24693 - DNA, 20 bp, Artificial Sequence
  MKO10024693_A_Hoxb2
  gRNA
gcagcgatctcgacgcgacg

SEQ ID NO: 24694 - DNA, 20 bp, Artificial Sequence
  MKO10024694_A_Hoxb3
  gRNA
tcatactccgacgccggggt

SEQ ID NO: 24695 - DNA, 20 bp, Artificial Sequence
  MKO10024695_A_Hoxb3
  gRNA
catgtggggcggcgttgccc

SEQ ID NO: 24696 - DNA, 20 bp, Artificial Sequence
  MKO10024696_A_Hoxb3
  gRNA
ggggcgccgcaacccttaag

SEQ ID NO: 24697 - DNA, 20 bp, Artificial Sequence
  MKO10024697_A_Hoxb4
  gRNA
cggcgtagtacccgggcgag

SEQ ID NO: 24698 - DNA, 20 bp, Artificial Sequence
  MKO10024698_A_Hoxb4
  gRNA
ccagtaaaccccaattacgc

SEQ ID NO: 24699 - DNA, 20 bp, Artificial Sequence
  MKO10024699_A_Hoxb4
  gRNA
cttggggggcactagagcgc

SEQ ID NO: 24700 - DNA, 20 bp, Artificial Sequence
  MKO10024700_A_Hoxb5
  gRNA
cgatctcgatacgtcgccgc

SEQ ID NO: 24701 - DNA, 20 bp, Artificial Sequence
  MKO10024701_A_Hoxb5
  gRNA
atttggataacgccccgaga

SEQ ID NO: 24702 - DNA, 20 bp, Artificial Sequence
  MKO10024702_A_Hoxb5
  gRNA
tagctggctcgccgcttcct

SEQ ID NO: 24703 - DNA, 20 bp, Artificial Sequence
  MKO10024703_A_Hoxb6
  gRNA
gcgcaagtccgactgcgcac

SEQ ID NO: 24704 - DNA, 20 bp, Artificial Sequence
  MKO10024704_A_Hoxb6
  gRNA
cggcactaccccgcgcctta

SEQ ID NO: 24705 - DNA, 20 bp, Artificial Sequence
  MKO10024705_A_Hoxb6
  gRNA
ccgaccgctgggcccaaaag

SEQ ID NO: 24706 - DNA, 20 bp, Artificial Sequence
  MKO10024706_A_Hoxb7
  gRNA
ggcgtctatgcggccggcta

SEQ ID NO: 24707 - DNA, 20 bp, Artificial Sequence
  MKO10024707_A_Hoxb7
  gRNA
catagacgccagccgcgctc

SEQ ID NO: 24708 - DNA, 20 bp, Artificial Sequence
  MKO10024708_A_Hoxb7
  gRNA
gtagggcctgaccgaaagcg

SEQ ID NO: 24709 - DNA, 20 bp, Artificial Sequence
  MKO10024709_A_Hoxb8
  gRNA
gatcgaggtatcgcacgcgc

SEQ ID NO: 24710 - DNA, 20 bp, Artificial Sequence
  MKO10024710_A_Hoxb8
  gRNA
cgccccaattattatgactg

SEQ ID NO: 24711 - DNA, 20 bp, Artificial Sequence
  MKO10024711_A_Hoxb8
  gRNA
tcccagcagtaaatgcgagc

SEQ ID NO: 24712 - DNA, 20 bp, Artificial Sequence
  MKO10024712_A_Hoxb9
  gRNA
ggcgccgaacaccggcgctt

SEQ ID NO: 24713 - DNA, 20 bp, Artificial Sequence
  MKO10024713_A_Hoxb9
  gRNA
aggtacctgctttcggccgc

SEQ ID NO: 24714 - DNA, 20 bp, Artificial Sequence
  MKO10024714_A_Hoxb9
  gRNA
agagcgggcgtgcagccagt

SEQ ID NO: 24715 - DNA, 20 bp, Artificial Sequence
  MKO10024715_A_Hoxc10
  gRNA
aagggctccgcgtacgagtt

SEQ ID NO: 24716 - DNA, 20 bp, Artificial Sequence
  MKO10024716_A_Hoxc10
  gRNA
gagcgctataaccgtaacgc

SEQ ID NO: 24717 - DNA, 20 bp, Artificial Sequence
  MKO10024717_A_Hoxc10
  gRNA
tttgacgcgagagcgccgcc

SEQ ID NO: 24718 - DNA, 20 bp, Artificial Sequence
  MKO10024718_A_Hoxc11
  gRNA
cggccgacgagcttatgcac

SEQ ID NO: 24719 - DNA, 20 bp, Artificial Sequence
  MKO10024719_A_Hoxc11
  gRNA
cgaagaagcggtcgaaagct

SEQ ID NO: 24720 - DNA, 20 bp, Artificial Sequence
  MKO10024720_A_Hoxc11
  gRNA
cttattcgaaattccagatc

SEQ ID NO: 24721 - DNA, 20 bp, Artificial Sequence
  MKO10024721_A_Hoxc12
  gRNA
ttccccaacttccgcgcgtc

SEQ ID NO: 24722 - DNA, 20 bp, Artificial Sequence
  MKO10024722_A_Hoxc12
  gRNA
ccgtcggccgagccgtgcaa

SEQ ID NO: 24723 - DNA, 20 bp, Artificial Sequence
  MKO10024723_A_Hoxc12
  gRNA
gccgtattcgaagttgcagc

SEQ ID NO: 24724 - DNA, 20 bp, Artificial Sequence
  MKO10024724_A_Hoxc13
  gRNA
gacgcgctcatccctgttga

SEQ ID NO: 24725 - DNA, 20 bp, Artificial Sequence
  MKO10024725_A_Hoxc13
  gRNA
gcgccaatgcgccccaccgc

SEQ ID NO: 24726 - DNA, 20 bp, Artificial Sequence
  MKO10024726_A_Hoxc13
  gRNA
gaagcgcgtgccctatacca

SEQ ID NO: 24727 - DNA, 20 bp, Artificial Sequence
  MKO10024727_A_Hoxc4
  gRNA
atcgcagccgctctgcgagc

SEQ ID NO: 24728 - DNA, 20 bp, Artificial Sequence
  MKO10024728_A_Hoxc4
  gRNA
gtgcagctatactgacgctc

SEQ ID NO: 24729 - DNA, 20 bp, Artificial Sequence
  MKO10024729_A_Hoxc4
  gRNA
tccaaaaccgtcgtatgaaa

SEQ ID NO: 24730 - DNA, 20 bp, Artificial Sequence
  MKO10024730_A_Hoxc5
  gRNA
ctatgcgcctgcggcgagtg

SEQ ID NO: 24731 - DNA, 20 bp, Artificial Sequence
  MKO10024731_A_Hoxc5
  gRNA
ccccgccacagatttacccg

SEQ ID NO: 24732 - DNA, 20 bp, Artificial Sequence
  MKO10024732_A_Hoxc5
  gRNA
ctcgttgagacacaagttgt

SEQ ID NO: 24733 - DNA, 20 bp, Artificial Sequence
  MKO10024733_A_Hoxc6
  gRNA
cattggcgatctcgatgcgc

SEQ ID NO: 24734 - DNA, 20 bp, Artificial Sequence
  MKO10024734_A_Hoxc6
  gRNA
ggatctctaggggtcggtta

SEQ ID NO: 24735 - DNA, 20 bp, Artificial Sequence
  MKO10024735_A_Hoxc6
  gRNA
ggtggaattgagggcgacgt

SEQ ID NO: 24736 - DNA, 20 bp, Artificial Sequence
  MKO10024736_A_Hoxc8
  gRNA
gacttcaatccggcgctttc

SEQ ID NO: 24737 - DNA, 20 bp, Artificial Sequence
  MKO10024737_A_Hoxc8
  gRNA
aaccggcagtcgtaataggc

SEQ ID NO: 24738 - DNA, 20 bp, Artificial Sequence
  MKO10024738_A_Hoxc8
  gRNA
aaccggcctattacgactgc

SEQ ID NO: 24739 - DNA, 20 bp, Artificial Sequence
  MKO10024739_A_Hoxc9
  gRNA
agtccgcatgtagcgcgtgt

SEQ ID NO: 24740 - DNA, 20 bp, Artificial Sequence
  MKO10024740_A_Hoxc9
  gRNA
gcgccgacacgcgctacatg

SEQ ID NO: 24741 - DNA, 20 bp, Artificial Sequence
  MKO10024741_A_Hoxc9
  gRNA
ggatccacgcccgttccaca

SEQ ID NO: 24742 - DNA, 20 bp, Artificial Sequence
  MKO10024742_A_Hoxd10
  gRNA
gagtacaataacagccccga

SEQ ID NO: 24743 - DNA, 20 bp, Artificial Sequence
  MKO10024743_A_Hoxd10
  gRNA
tgcggcttggccgcgccacg

SEQ ID NO: 24744 - DNA, 20 bp, Artificial Sequence
  MKO10024744_A_Hoxd10
  gRNA
agagcgttaacctcaccgac

SEQ ID NO: 24745 - DNA, 20 bp, Artificial Sequence
  MKO10024745_A_Hoxd11
  gRNA
acggccacttggcgcgctcc

SEQ ID NO: 24746 - DNA, 20 bp, Artificial Sequence
  MKO10024746_A_Hoxd11
  gRNA
gcactcgtcaaagtcgttca

SEQ ID NO: 24747 - DNA, 20 bp, Artificial Sequence
  MKO10024747_A_Hoxd11
  gRNA
caagtaccagatccgcgaac

SEQ ID NO: 24748 - DNA, 20 bp, Artificial Sequence
  MKO10024748_A_Hoxd12
  gRNA
tcgggtccgtccttggcgcc

SEQ ID NO: 24749 - DNA, 20 bp, Artificial Sequence
  MKO10024749_A_Hoxd12
  gRNA
cgcggccaactggctgccat

SEQ ID NO: 24750 - DNA, 20 bp, Artificial Sequence
  MKO10024750_A_Hoxd12
  gRNA
cccgcttcttcttcatacgc

SEQ ID NO: 24751 - DNA, 20 bp, Artificial Sequence
  MKO10024751_A_Hoxd13
  gRNA
tgtgatcgccactcgccccg

SEQ ID NO: 24752 - DNA, 20 bp, Artificial Sequence
  MKO10024752_A_Hoxd13
  gRNA
caaagagtgtcccgcgccag

SEQ ID NO: 24753 - DNA, 20 bp, Artificial Sequence
  MKO10024753_A_Hoxd13
  gRNA
ttgtctctccgaaaggttcg

SEQ ID NO: 24754 - DNA, 20 bp, Artificial Sequence
  MKO10024754_A_Hoxd1
  gRNA
tacgtgtcgtgcgccgcggg

SEQ ID NO: 24755 - DNA, 20 bp, Artificial Sequence
  MKO10024755_A_Hoxd1
  gRNA
ggggtaggcggcgacgtgct

SEQ ID NO: 24756 - DNA, 20 bp, Artificial Sequence
  MKO10024756_A_Hoxd1
  gRNA
cgatgcgtcgggctctagtt

SEQ ID NO: 24757 - DNA, 20 bp, Artificial Sequence
  MKO10024757_A_Hoxd3
  gRNA
agttgcgccgcgcaaatccc

SEQ ID NO: 24758 - DNA, 20 bp, Artificial Sequence
  MKO10024758_A_Hoxd3
  gRNA
gccgccgccgttgctcgcca

SEQ ID NO: 24759 - DNA, 20 bp, Artificial Sequence
  MKO10024759_A_Hoxd3
  gRNA
aatggtagctgtatgagacc

SEQ ID NO: 24760 - DNA, 20 bp, Artificial Sequence
  MKO10024760_A_Hoxd4
  gRNA
tgcaccgctgccgtagtagt

SEQ ID NO: 24761 - DNA, 20 bp, Artificial Sequence
  MKO10024761_A_Hoxd4
  gRNA
tgtgagcgatttcaatccga

SEQ ID NO: 24762 - DNA, 20 bp, Artificial Sequence
  MKO10024762_A_Hoxd4
  gRNA
ctctacccacggcccgactt

SEQ ID NO: 24763 - DNA, 20 bp, Artificial Sequence
  MKO10024763_A_Hoxd8
  gRNA
atcgtatccgtaaaacttcg

SEQ ID NO: 24764 - DNA, 20 bp, Artificial Sequence
  MKO10024764_A_Hoxd8
  gRNA
gtgacaggcaatcccgccgc

SEQ ID NO: 24765 - DNA, 20 bp, Artificial Sequence
  MKO10024765_A_Hoxd8
  gRNA
tcgcttccaaaccctagagt

SEQ ID NO: 24766 - DNA, 20 bp, Artificial Sequence
  MKO10024766_A_Hoxd9
  gRNA
gcgtacgtagcgtcccggct

SEQ ID NO: 24767 - DNA, 20 bp, Artificial Sequence
  MKO10024767_A_Hoxd9
  gRNA
cgaacacctcgtcgccctca

SEQ ID NO: 24768 - DNA, 20 bp, Artificial Sequence
  MKO10024768_A_Hoxd9
  gRNA
tcctggccacctcgtagcgc

SEQ ID NO: 24769 - DNA, 20 bp, Artificial Sequence
  MKO10024769_A_Hp1bp3
  gRNA
ctttcgaatcgcaaccaccg

SEQ ID NO: 24770 - DNA, 20 bp, Artificial Sequence
  MKO10024770_A_Hp1bp3
  gRNA
agttaagattgcgtccatct

SEQ ID NO: 24771 - DNA, 20 bp, Artificial Sequence
  MKO10024771_A_Hp1bp3
  gRNA
gtcgagccgtgaattctacc

SEQ ID NO: 24772 - DNA, 20 bp, Artificial Sequence
  MKO10024772_A_Hpcal1
  gRNA
tgaattccgtgtgttcccgc

SEQ ID NO: 24773 - DNA, 20 bp, Artificial Sequence
  MKO10024773_A_Hpcal1
  gRNA
tttagcatgtacgacctgga

SEQ ID NO: 24774 - DNA, 20 bp, Artificial Sequence
  MKO10024774_A_Hpcal1
  gRNA
tccctcaggcaaactgtccc

SEQ ID NO: 24775 - DNA, 20 bp, Artificial Sequence
  MKO10024775_A_Hpcal4
  gRNA
tgacggccgcatcacacggc

SEQ ID NO: 24776 - DNA, 20 bp, Artificial Sequence
  MKO10024776_A_Hpcal4
  gRNA
tgaactcctccagcgtaatc

SEQ ID NO: 24777 - DNA, 20 bp, Artificial Sequence
  MKO10024777_A_Hpcal4
  gRNA
tttgagatgtacgatctgga

SEQ ID NO: 24778 - DNA, 20 bp, Artificial Sequence
  MKO10024778_A_Hpca
  gRNA
aaacttggaggcgtcgccat

SEQ ID NO: 24779 - DNA, 20 bp, Artificial Sequence
  MKO10024779_A_Hpca
  gRNA
atgagtcgaccccggaaaag

SEQ ID NO: 24780 - DNA, 20 bp, Artificial Sequence
  MKO10024780_A_Hpca
  gRNA
caatggctacatcagccggg

SEQ ID NO: 24781 - DNA, 20 bp, Artificial Sequence
  MKO10024781_A_Hpdl
  gRNA
gctcccctatgcttatgcgc

SEQ ID NO: 24782 - DNA, 20 bp, Artificial Sequence
  MKO10024782_A_Hpdl
  gRNA
attattcggcggagtctgca

SEQ ID NO: 24783 - DNA, 20 bp, Artificial Sequence
  MKO10024783_A_Hpdl
  gRNA
cagcacgctgcagcaacgta

SEQ ID NO: 24784 - DNA, 20 bp, Artificial Sequence
  MKO10024784_A_Hpd
  gRNA
ctttcccttgcttgatgacg

SEQ ID NO: 24785 - DNA, 20 bp, Artificial Sequence
  MKO10024785_A_Hpd
  gRNA
cctagagactggctcccggg

SEQ ID NO: 24786 - DNA, 20 bp, Artificial Sequence
  MKO10024786_A_Hpd
  gRNA
atttccactcggtgaccttc

SEQ ID NO: 24787 - DNA, 20 bp, Artificial Sequence
  MKO10024787_A_Hpgds
  gRNA
tcaaatatcttgctattgcg

SEQ ID NO: 24788 - DNA, 20 bp, Artificial Sequence
  MKO10024788_A_Hpgds
  gRNA
gttggatatctaccccaaac

SEQ ID NO: 24789 - DNA, 20 bp, Artificial Sequence
  MKO10024789_A_Hpgds
  gRNA
gttccgtaatgacaccagtt

SEQ ID NO: 24790 - DNA, 20 bp, Artificial Sequence
  MKO10024790_A_Hpgd
  gRNA
aaatatccaatcttccgaaa

SEQ ID NO: 24791 - DNA, 20 bp, Artificial Sequence
  MKO10024791_A_Hpgd
  gRNA
gtttattgtgcttcgaagca

SEQ ID NO: 24792 - DNA, 20 bp, Artificial Sequence
  MKO10024792_A_Hpgd
  gRNA
tgcttcgaagcacaataaac

SEQ ID NO: 24793 - DNA, 20 bp, Artificial Sequence
  MKO10024793_A_Hpn
  gRNA
agtccctgacatggcgaagg

SEQ ID NO: 24794 - DNA, 20 bp, Artificial Sequence
  MKO10024794_A_Hpn
  gRNA
accgcaagccgtgagtcccc

SEQ ID NO: 24795 - DNA, 20 bp, Artificial Sequence
  MKO10024795_A_Hpn
  gRNA
acgcggccccaatgcctgtc

SEQ ID NO: 24796 - DNA, 20 bp, Artificial Sequence
  MKO10024796_A_Hprt
  gRNA
cagattagcgatgatgaacc

SEQ ID NO: 24797 - DNA, 20 bp, Artificial Sequence
  MKO10024797_A_Hprt
  gRNA
tatacctaatcattatgccg

SEQ ID NO: 24798 - DNA, 20 bp, Artificial Sequence
  MKO10024798_A_Hprt
  gRNA
gtgctttaatgtaatccagc

SEQ ID NO: 24799 - DNA, 20 bp, Artificial Sequence
  MKO10024799_A_Hps1
  gRNA
cgatgctctgttcgcagagc

SEQ ID NO: 24800 - DNA, 20 bp, Artificial Sequence
  MKO10024800_A_Hps1
  gRNA
tacctgttcgtcgccatcaa

SEQ ID NO: 24801 - DNA, 20 bp, Artificial Sequence
  MKO10024801_A_Hps1
  gRNA
tgtgctcaagtatctattcg

SEQ ID NO: 24802 - DNA, 20 bp, Artificial Sequence
  MKO10024802_A_Hps3
  gRNA
cgggagcgacgcgctgttcg

SEQ ID NO: 24803 - DNA, 20 bp, Artificial Sequence
  MKO10024803_A_Hps3
  gRNA
ctgtacaacctgcacccgtt

SEQ ID NO: 24804 - DNA, 20 bp, Artificial Sequence
  MKO10024804_A_Hps3
  gRNA
ctgctacccattcaccaaag

SEQ ID NO: 24805 - DNA, 20 bp, Artificial Sequence
  MKO10024805_A_Hps4
  gRNA
gaagatcctgtgcgattcgc

SEQ ID NO: 24806 - DNA, 20 bp, Artificial Sequence
  MKO10024806_A_Hps4
  gRNA
cgcccatgctcatccgtatg

SEQ ID NO: 24807 - DNA, 20 bp, Artificial Sequence
  MKO10024807_A_Hps4
  gRNA
ctgctacttctatccgcccc

SEQ ID NO: 24808 - DNA, 20 bp, Artificial Sequence
  MKO10024808_A_Hps5
  gRNA
tggttggcgttaggcagcac

SEQ ID NO: 24809 - DNA, 20 bp, Artificial Sequence
  MKO10024809_A_Hps5
  gRNA
gaagctcaccctcagacgac

SEQ ID NO: 24810 - DNA, 20 bp, Artificial Sequence
  MKO10024810_A_Hps5
  gRNA
gaattaaatcaagagcgtcg

SEQ ID NO: 24811 - DNA, 20 bp, Artificial Sequence
  MKO10024811_A_Hps6
  gRNA
ttgcggccacggccatcacg

SEQ ID NO: 24812 - DNA, 20 bp, Artificial Sequence
  MKO10024812_A_Hps6
  gRNA
ggtcccccgccaacaactcg

SEQ ID NO: 24813 - DNA, 20 bp, Artificial Sequence
  MKO10024813_A_Hps6
  gRNA
tacctcgaaggctccgacgc

SEQ ID NO: 24814 - DNA, 20 bp, Artificial Sequence
  MKO10024814_A_Hpse2
  gRNA
gtccgatgttggggccgtac

SEQ ID NO: 24815 - DNA, 20 bp, Artificial Sequence
  MKO10024815_A_Hpse2
  gRNA
tcgcccgcctttctgcgctt

SEQ ID NO: 24816 - DNA, 20 bp, Artificial Sequence
  MKO10024816_A_Hpse2
  gRNA
gtcgtaatcccaataactcc

SEQ ID NO: 24817 - DNA, 20 bp, Artificial Sequence
  MKO10024817_A_Hpse
  gRNA
acgcatttagaccaaagatc

SEQ ID NO: 24818 - DNA, 20 bp, Artificial Sequence
  MKO10024818_A_Hpse
  gRNA
gagctgttccaccgtaagtc

SEQ ID NO: 24819 - DNA, 20 bp, Artificial Sequence
  MKO10024819_A_Hpse
  gRNA
ccttgtccggatcaaaaata

SEQ ID NO: 24820 - DNA, 20 bp, Artificial Sequence
  MKO10024820_A_Hpx
  gRNA
cccgggagttgatctcagcg

SEQ ID NO: 24821 - DNA, 20 bp, Artificial Sequence
  MKO10024821_A_Hpx
  gRNA
gagctttgatgctgcgacca

SEQ ID NO: 24822 - DNA, 20 bp, Artificial Sequence
  MKO10024822_A_Hpx
  gRNA
ggtcgcagcatcaaagctcc

SEQ ID NO: 24823 - DNA, 20 bp, Artificial Sequence
  MKO10024823_A_Hp
  gRNA
actgccggcgtcaccgtagc

SEQ ID NO: 24824 - DNA, 20 bp, Artificial Sequence
  MKO10024824_A_Hp
  gRNA
tggctgacgccgtctcgctg

SEQ ID NO: 24825 - DNA, 20 bp, Artificial Sequence
  MKO10024825_A_Hp
  gRNA
ccattgcttctcgtcgttta

SEQ ID NO: 24826 - DNA, 20 bp, Artificial Sequence
  MKO10024826_A_Hrasls5
  gRNA
gcaagaccgccgattagaac

SEQ ID NO: 24827 - DNA, 20 bp, Artificial Sequence
  MKO10024827_A_Hrasls5
  gRNA
tggcacatacctgccgctgc

SEQ ID NO: 24828 - DNA, 20 bp, Artificial Sequence
  MKO10024828_A_Hrasls5
  gRNA
agcgagttctcaagcgctgt

SEQ ID NO: 24829 - DNA, 20 bp, Artificial Sequence
  MKO10024829_A_Hrasls
  gRNA
ttctaggccaaccgagcaat

SEQ ID NO: 24830 - DNA, 20 bp, Artificial Sequence
  MKO10024830_A_Hrasls
  gRNA
gtgatcaacattgcacctat

SEQ ID NO: 24831 - DNA, 20 bp, Artificial Sequence
  MKO10024831_A_Hrasls
  gRNA
caacggtcagagttcgctat

SEQ ID NO: 24832 - DNA, 20 bp, Artificial Sequence
  MKO10024832_A_Hras
  gRNA
cgagtatgatcccactatag

SEQ ID NO: 24833 - DNA, 20 bp, Artificial Sequence
  MKO10024833_A_Hras
  gRNA
caggaccttgctcgcagcta

SEQ ID NO: 24834 - DNA, 20 bp, Artificial Sequence
  MKO10024834_A_Hras
  gRNA
ggatgccatagctgcgagca

SEQ ID NO: 24835 - DNA, 20 bp, Artificial Sequence
  MKO10024835_A_Hrct1
  gRNA
gaaaccgagtccgacaagcc

SEQ ID NO: 24836 - DNA, 20 bp, Artificial Sequence
  MKO10024836_A_Hrct1
  gRNA
gtggtggtgaacgcccacac

SEQ ID NO: 24837 - DNA, 20 bp, Artificial Sequence
  MKO10024837_A_Hrct1
  gRNA
cgccggccatggaagagtcg

SEQ ID NO: 24838 - DNA, 20 bp, Artificial Sequence
  MKO10024838_A_Hrc
  gRNA
agtacgaaaattaccagcca

SEQ ID NO: 24839 - DNA, 20 bp, Artificial Sequence
  MKO10024839_A_Hrc
  gRNA
attctgctacctctgtccgc

SEQ ID NO: 24840 - DNA, 20 bp, Artificial Sequence
  MKO10024840_A_Hrc
  gRNA
tgtgacacgctctgcactcc

SEQ ID NO: 24841 - DNA, 20 bp, Artificial Sequence
  MKO10024841_A_Hrg
  gRNA
ttcagcacttcgcaatacca

SEQ ID NO: 24842 - DNA, 20 bp, Artificial Sequence
  MKO10024842_A_Hrg
  gRNA
tctcaagatcttagcgtgaa

SEQ ID NO: 24843 - DNA, 20 bp, Artificial Sequence
  MKO10024843_A_Hrg
  gRNA
atttcagattgccacctcga

SEQ ID NO: 24844 - DNA, 20 bp, Artificial Sequence
  MKO10024844_A_Hrh1
  gRNA
ccgtcaagagaccctactgg

SEQ ID NO: 24845 - DNA, 20 bp, Artificial Sequence
  MKO10024845_A_Hrh1
  gRNA
tgagcgcaagctacacaccg

SEQ ID NO: 24846 - DNA, 20 bp, Artificial Sequence
  MKO10024846_A_Hrh1
  gRNA
tgacgactgcccctacaatc

SEQ ID NO: 24847 - DNA, 20 bp, Artificial Sequence
  MKO10024847_A_Hrh2
  gRNA
tggtcgagggtatcgtccta

SEQ ID NO: 24848 - DNA, 20 bp, Artificial Sequence
  MKO10024848_A_Hrh2
  gRNA
ggtccgtgacagcgcagtag

SEQ ID NO: 24849 - DNA, 20 bp, Artificial Sequence
  MKO10024849_A_Hrh2
  gRNA
tgggaacttggattcatcac

SEQ ID NO: 24850 - DNA, 20 bp, Artificial Sequence
  MKO10024850_A_Hrh3
  gRNA
gccgaagacgagtgcgcctc

SEQ ID NO: 24851 - DNA, 20 bp, Artificial Sequence
  MKO10024851_A_Hrh3
  gRNA
cgcactcgtcttcggctgga

SEQ ID NO: 24852 - DNA, 20 bp, Artificial Sequence
  MKO10024852_A_Hrh3
  gRNA
cgacgcgttcatcagcccgt

SEQ ID NO: 24853 - DNA, 20 bp, Artificial Sequence
  MKO10024853_A_Hrh4
  gRNA
aaagtgcagcgcttcgccaa

SEQ ID NO: 24854 - DNA, 20 bp, Artificial Sequence
  MKO10024854_A_Hrh4
  gRNA
tgcactttccgatcgccaga

SEQ ID NO: 24855 - DNA, 20 bp, Artificial Sequence
  MKO10024855_A_Hrh4
  gRNA
atgtcggagtctaacagtac

SEQ ID NO: 24856 - DNA, 20 bp, Artificial Sequence
  MKO10024856_A_Hrk
  gRNA
agcgtcgccgcaaccgcaca

SEQ ID NO: 24857 - DNA, 20 bp, Artificial Sequence
  MKO10024857_A_Hrk
  gRNA
cgcgggcccccggccgtgtg

SEQ ID NO: 24858 - DNA, 20 bp, Artificial Sequence
  MKO10024858_A_Hrk
  gRNA
agctgcaccgacgcgccatg

SEQ ID NO: 24859 - DNA, 20 bp, Artificial Sequence
  MKO10024859_A_Hrnr
  gRNA
tgcggacaaggcaagtcttc

SEQ ID NO: 24860 - DNA, 20 bp, Artificial Sequence
  MKO10024860_A_Hrnr
  gRNA
tctagtcatgaattagaatc

SEQ ID NO: 24861 - DNA, 20 bp, Artificial Sequence
  MKO10024861_A_Hrnr
  gRNA
tgctcataagtagactgact

SEQ ID NO: 24862 - DNA, 20 bp, Artificial Sequence
  MKO10024862_A_Hrsp12
  gRNA
ctctgggtaaagcagcgact

SEQ ID NO: 24863 - DNA, 20 bp, Artificial Sequence
  MKO10024863_A_Hrsp12
  gRNA
gcaggctgtgacttcaataa

SEQ ID NO: 24864 - DNA, 20 bp, Artificial Sequence
  MKO10024864_A_Hrsp12
  gRNA
gaccatttacatttctggac

SEQ ID NO: 24865 - DNA, 20 bp, Artificial Sequence
  MKO10024865_A_Hr
  gRNA
tcggaacagtttgagtgccc

SEQ ID NO: 24866 - DNA, 20 bp, Artificial Sequence
  MKO10024866_A_Hr
  gRNA
gtagcctgtggtcgcatagc

SEQ ID NO: 24867 - DNA, 20 bp, Artificial Sequence
  MKO10024867_A_Hr
  gRNA
ttccgagtggcgtgtgagcc

SEQ ID NO: 24868 - DNA, 20 bp, Artificial Sequence
  MKO10024868_A_Hs1bp3
  gRNA
agacctaccgcatgataccc

SEQ ID NO: 24869 - DNA, 20 bp, Artificial Sequence
  MKO10024869_A_Hs1bp3
  gRNA
taaaaaatacagcgagatcg

SEQ ID NO: 24870 - DNA, 20 bp, Artificial Sequence
  MKO10024870_A_Hs1bp3
  gRNA
tgtcagactccccgacaaac

SEQ ID NO: 24871 - DNA, 20 bp, Artificial Sequence
  MKO10024871_A_Hs2st1
  gRNA
tatggcgctgttcaatttct

SEQ ID NO: 24872 - DNA, 20 bp, Artificial Sequence
  MKO10024872_A_Hs2st1
  gRNA
ctcagccacacattcatcga

SEQ ID NO: 24873 - DNA, 20 bp, Artificial Sequence
  MKO10024873_A_Hs2st1
  gRNA
attctttgcacacaggtcgt

SEQ ID NO: 24874 - DNA, 20 bp, Artificial Sequence
  MKO10024874_A_Hs3st1
  gRNA
tcagccgaccgtcccgcatt

SEQ ID NO: 24875 - DNA, 20 bp, Artificial Sequence
  MKO10024875_A_Hs3st1
  gRNA
gatccacctgggggtgcgcc

SEQ ID NO: 24876 - DNA, 20 bp, Artificial Sequence
  MKO10024876_A_Hs3st1
  gRNA
cgctgcttacacgagtccaa

SEQ ID NO: 24877 - DNA, 20 bp, Artificial Sequence
  MKO10024877_A_Hs3st2
  gRNA
gtcccgcccgtgtgatcccc

SEQ ID NO: 24878 - DNA, 20 bp, Artificial Sequence
  MKO10024878_A_Hs3st2
  gRNA
ggagtttatccgcgtgcacc

SEQ ID NO: 24879 - DNA, 20 bp, Artificial Sequence
  MKO10024879_A_Hs3st2
  gRNA
tcttggaacgctatccgcat

SEQ ID NO: 24880 - DNA, 20 bp, Artificial Sequence
  MKO10024880_A_Hs3st3a1
  gRNA
gcgcttccttggcgctcccg

SEQ ID NO: 24881 - DNA, 20 bp, Artificial Sequence
  MKO10024881_A_Hs3st3a1
  gRNA
cactgtcgcgcagcatcttc

SEQ ID NO: 24882 - DNA, 20 bp, Artificial Sequence
  MKO10024882_A_Hs3st3a1
  gRNA
ccgcagcacctcccgcgcaa

SEQ ID NO: 24883 - DNA, 20 bp, Artificial Sequence
  MKO10024883_A_Hs3st3b1
  gRNA
ccggcccgggacatcgagac

SEQ ID NO: 24884 - DNA, 20 bp, Artificial Sequence
  MKO10024884_A_Hs3st3b1
  gRNA
gcaccccaccatcgcgcgcg

SEQ ID NO: 24885 - DNA, 20 bp, Artificial Sequence
  MKO10024885_A_Hs3st3b1
  gRNA
ctcagtcccagccgaagtcg

SEQ ID NO: 24886 - DNA, 20 bp, Artificial Sequence
  MKO10024886_A_Hs3st4
  gRNA
cgagcgcttcacgactcctg

SEQ ID NO: 24887 - DNA, 20 bp, Artificial Sequence
  MKO10024887_A_Hs3st4
  gRNA
ccgccggacaacgcgagccg

SEQ ID NO: 24888 - DNA, 20 bp, Artificial Sequence
  MKO10024888_A_Hs3st4
  gRNA
atgacatctgggtcaattcg

SEQ ID NO: 24889 - DNA, 20 bp, Artificial Sequence
  MKO10024889_A_Hs3st5
  gRNA
atgacggaggggtctacctc

SEQ ID NO: 24890 - DNA, 20 bp, Artificial Sequence
  MKO10024890_A_Hs3st5
  gRNA
caaggggcgcatccatccag

SEQ ID NO: 24891 - DNA, 20 bp, Artificial Sequence
  MKO10024891_A_Hs3st5
  gRNA
ctgtatctagttgccagagt

SEQ ID NO: 24892 - DNA, 20 bp, Artificial Sequence
  MKO10024892_A_Hs3st6
  gRNA
aacagaactacgagcgccag

SEQ ID NO: 24893 - DNA, 20 bp, Artificial Sequence
  MKO10024893_A_Hs3st6
  gRNA
gcgtgctctccgtgctccgc

SEQ ID NO: 24894 - DNA, 20 bp, Artificial Sequence
  MKO10024894_A_Hs3st6
  gRNA
tagtgggagaccccgctgct

SEQ ID NO: 24895 - DNA, 20 bp, Artificial Sequence
  MKO10024895_A_Hs6st1
  gRNA
gtcgcggcggtctagcacac

SEQ ID NO: 24896 - DNA, 20 bp, Artificial Sequence
  MKO10024896_A_Hs6st1
  gRNA
ggcgctcttcgcgattgcgc

SEQ ID NO: 24897 - DNA, 20 bp, Artificial Sequence
  MKO10024897_A_Hs6st1
  gRNA
ctcgctgcgcttcgacatga

SEQ ID NO: 24898 - DNA, 20 bp, Artificial Sequence
  MKO10024898_A_Hs6st2
  gRNA
cgccgcggctgaaattgtag

SEQ ID NO: 24899 - DNA, 20 bp, Artificial Sequence
  MKO10024899_A_Hs6st2
  gRNA
ggtgccggatccgtaccgct

SEQ ID NO: 24900 - DNA, 20 bp, Artificial Sequence
  MKO10024900_A_Hs6st2
  gRNA
tcagtccctcaatacgcttt

SEQ ID NO: 24901 - DNA, 20 bp, Artificial Sequence
  MKO10024901_A_Hs6st3
  gRNA
tccgctcctcgcgcctcttt

SEQ ID NO: 24902 - DNA, 20 bp, Artificial Sequence
  MKO10024902_A_Hs6st3
  gRNA
ggaccgcccgaggggtctcg

SEQ ID NO: 24903 - DNA, 20 bp, Artificial Sequence
  MKO10024903_A_Hs6st3
  gRNA
tctactacatcacgatgttg

SEQ ID NO: 24904 - DNA, 20 bp, Artificial Sequence
  MKO10024904_A_Hsbp1l1
  gRNA
tttgatagaattctcgatcc

SEQ ID NO: 24905 - DNA, 20 bp, Artificial Sequence
  MKO10024905_A_Hsbp1l1
  gRNA
tggggacttgctgcagaacg

SEQ ID NO: 24906 - DNA, 20 bp, Artificial Sequence
  MKO10024906_A_Hsbp1l1
  gRNA
ggctgagaatctacttctag

SEQ ID NO: 24907 - DNA, 20 bp, Artificial Sequence
  MKO10024907_A_Hsbp1
  gRNA
ggatattccttccgatgatc

SEQ ID NO: 24908 - DNA, 20 bp, Artificial Sequence
  MKO10024908_A_Hsbp1
  gRNA
atcatgtcagaccagatcat

SEQ ID NO: 24909 - DNA, 20 bp, Artificial Sequence
  MKO10024909_A_Hsbp1
  gRNA
caccaaggtgatgtcctgca

SEQ ID NO: 24910 - DNA, 20 bp, Artificial Sequence
  MKO10024910_A_Hscb
  gRNA
acgttacgaaacttcagcac

SEQ ID NO: 24911 - DNA, 20 bp, Artificial Sequence
  MKO10024911_A_Hscb
  gRNA
actcgcagacgcccaaagtg

SEQ ID NO: 24912 - DNA, 20 bp, Artificial Sequence
  MKO10024912_A_Hscb
  gRNA
tttcgtaacgtccaccctga

SEQ ID NO: 24913 - DNA, 20 bp, Artificial Sequence
  MKO10024913_A_Hsd11b1
  gRNA
tgctcatgaccacgtagctg

SEQ ID NO: 24914 - DNA, 20 bp, Artificial Sequence
  MKO10024914_A_Hsd11b1
  gRNA
ctggagaccttcctccgacc

SEQ ID NO: 24915 - DNA, 20 bp, Artificial Sequence
  MKO10024915_A_Hsd11b1
  gRNA
ggtcaacttcctcagctacg

SEQ ID NO: 24916 - DNA, 20 bp, Artificial Sequence
  MKO10024916_A_Hsd11b2
  gRNA
cccctcgagtgacgcaagag

SEQ ID NO: 24917 - DNA, 20 bp, Artificial Sequence
  MKO10024917_A_Hsd11b2
  gRNA
cgtcagccactacgatattg

SEQ ID NO: 24918 - DNA, 20 bp, Artificial Sequence
  MKO10024918_A_Hsd11b2
  gRNA
ccacgaagccgctactaccc

SEQ ID NO: 24919 - DNA, 20 bp, Artificial Sequence
  MKO10024919_A_Hsd17b10
  gRNA
gccttacattgataacccgc

SEQ ID NO: 24920 - DNA, 20 bp, Artificial Sequence
  MKO10024920_A_Hsd17b10
  gRNA
cactttcaatgtgatccgcc

SEQ ID NO: 24921 - DNA, 20 bp, Artificial Sequence
  MKO10024921_A_Hsd17b10
  gRNA
cgtgtggtaacaattgctcc

SEQ ID NO: 24922 - DNA, 20 bp, Artificial Sequence
  MKO10024922_A_Hsd17b11
  gRNA
gatttacagcgctgcgaaaa

SEQ ID NO: 24923 - DNA, 20 bp, Artificial Sequence
  MKO10024923_A_Hsd17b11
  gRNA
tgcagacttatttgctacgc

SEQ ID NO: 24924 - DNA, 20 bp, Artificial Sequence
  MKO10024924_A_Hsd17b11
  gRNA
cgctgtaaatctcttcccgc

SEQ ID NO: 24925 - DNA, 20 bp, Artificial Sequence
  MKO10024925_A_Hsd17b12
  gRNA
cgagtatccggaatactttc

SEQ ID NO: 24926 - DNA, 20 bp, Artificial Sequence
  MKO10024926_A_Hsd17b12
  gRNA
tgtttgcagttagcaaaacg

SEQ ID NO: 24927 - DNA, 20 bp, Artificial Sequence
  MKO10024927_A_Hsd17b12
  gRNA
aagactcacgttgtccaagt

SEQ ID NO: 24928 - DNA, 20 bp, Artificial Sequence
  MKO10024928_A_Hsd17b13
  gRNA
gacttacccaaaaatgtccg

SEQ ID NO: 24929 - DNA, 20 bp, Artificial Sequence
  MKO10024929_A_Hsd17b13
  gRNA
gagatcgtggtaaacaacgc

SEQ ID NO: 24930 - DNA, 20 bp, Artificial Sequence
  MKO10024930_A_Hsd17b13
  gRNA
ggccgtcgtgcacgtgtttg

SEQ ID NO: 24931 - DNA, 20 bp, Artificial Sequence
  MKO10024931_A_Hsd17b14
  gRNA
tatccccggtgacgtgacac

SEQ ID NO: 24932 - DNA, 20 bp, Artificial Sequence
  MKO10024932_A_Hsd17b14
  gRNA
gattgtgtggtgaataacgc

SEQ ID NO: 24933 - DNA, 20 bp, Artificial Sequence
  MKO10024933_A_Hsd17b14
  gRNA
tctgagaccctctctcgatt

SEQ ID NO: 24934 - DNA, 20 bp, Artificial Sequence
  MKO10024934_A_Hsd17b1
  gRNA
accttcgagcgcaaacttgc

SEQ ID NO: 24935 - DNA, 20 bp, Artificial Sequence
  MKO10024935_A_Hsd17b1
  gRNA
agtgtgagcctcatcgagtg

SEQ ID NO: 24936 - DNA, 20 bp, Artificial Sequence
  MKO10024936_A_Hsd17b1
  gRNA
gccagcaagtttgcgctcga

SEQ ID NO: 24937 - DNA, 20 bp, Artificial Sequence
  MKO10024937_A_Hsd17b2
  gRNA
gttccccgtcgataggtaag

SEQ ID NO: 24938 - DNA, 20 bp, Artificial Sequence
  MKO10024938_A_Hsd17b2
  gRNA
ggccaaaccgtgaccgaaac

SEQ ID NO: 24939 - DNA, 20 bp, Artificial Sequence
  MKO10024939_A_Hsd17b2
  gRNA
gaacttcttcggaactgtcg

SEQ ID NO: 24940 - DNA, 20 bp, Artificial Sequence
  MKO10024940_A_Hsd17b3
  gRNA
tgcccgcagttggccagaca

SEQ ID NO: 24941 - DNA, 20 bp, Artificial Sequence
  MKO10024941_A_Hsd17b3
  gRNA
ctttcagtgattaccggagc

SEQ ID NO: 24942 - DNA, 20 bp, Artificial Sequence
  MKO10024942_A_Hsd17b3
  gRNA
tttctgccagtcaacaacgt

SEQ ID NO: 24943 - DNA, 20 bp, Artificial Sequence
  MKO10024943_A_Hsd17b4
  gRNA
attgggccgagcttacgccc

SEQ ID NO: 24944 - DNA, 20 bp, Artificial Sequence
  MKO10024944_A_Hsd17b4
  gRNA
tgccttgcagtgaacgactt

SEQ ID NO: 24945 - DNA, 20 bp, Artificial Sequence
  MKO10024945_A_Hsd17b4
  gRNA
gacttcaagggaattggtaa

SEQ ID NO: 24946 - DNA, 20 bp, Artificial Sequence
  MKO10024946_A_Hsd17b6
  gRNA
aagtagtctaccagtgacgc

SEQ ID NO: 24947 - DNA, 20 bp, Artificial Sequence
  MKO10024947_A_Hsd17b6
  gRNA
gtcaaaaaactgctgtccgt

SEQ ID NO: 24948 - DNA, 20 bp, Artificial Sequence
  MKO10024948_A_Hsd17b6
  gRNA
tctcacgataccaacgcaga

SEQ ID NO: 24949 - DNA, 20 bp, Artificial Sequence
  MKO10024949_A_Hsd17b7
  gRNA
agctgttcgagataccctgc

SEQ ID NO: 24950 - DNA, 20 bp, Artificial Sequence
  MKO10024950_A_Hsd17b7
  gRNA
ctgccagcagtcgaccgcaa

SEQ ID NO: 24951 - DNA, 20 bp, Artificial Sequence
  MKO10024951_A_Hsd17b7
  gRNA
ggtcaaaattccttccgctg

SEQ ID NO: 24952 - DNA, 20 bp, Artificial Sequence
  MKO10024952_A_Hsd3b1
  gRNA
gacgatcttcttgtacgagt

SEQ ID NO: 24953 - DNA, 20 bp, Artificial Sequence
  MKO10024953_A_Hsd3b1
  gRNA
ggctccgccctaatgccagc

SEQ ID NO: 24954 - DNA, 20 bp, Artificial Sequence
  MKO10024954_A_Hsd3b1
  gRNA
agtattccgaccagaaacca

SEQ ID NO: 24955 - DNA, 20 bp, Artificial Sequence
  MKO10024955_A_Hsd3b2
  gRNA
tcagaatacccttatgttta

SEQ ID NO: 24956 - DNA, 20 bp, Artificial Sequence
  MKO10024956_A_Hsd3b2
  gRNA
tataagttacaccttgagca

SEQ ID NO: 24957 - DNA, 20 bp, Artificial Sequence
  MKO10024957_A_Hsd3b2
  gRNA
cttcctcttgcaccaacaac

SEQ ID NO: 24958 - DNA, 20 bp, Artificial Sequence
  MKO10024958_A_Hsd3b3
  gRNA
tttcacgatgctcgtcctcg

SEQ ID NO: 24959 - DNA, 20 bp, Artificial Sequence
  MKO10024959_A_Hsd3b3
  gRNA
tacaaggacattgtcctgaa

SEQ ID NO: 24960 - DNA, 20 bp, Artificial Sequence
  MKO10024960_A_Hsd3b3
  gRNA
caggtttgaagaccttgtcc

SEQ ID NO: 24961 - DNA, 20 bp, Artificial Sequence
  MKO10024961_A_Hsd3b4
  gRNA
ctgtgttgaccatgcctggg

SEQ ID NO: 24962 - DNA, 20 bp, Artificial Sequence
  MKO10024962_A_Hsd3b4
  gRNA
agctgcctggtgacaggagc

SEQ ID NO: 24963 - DNA, 20 bp, Artificial Sequence
  MKO10024963_A_Hsd3b4
  gRNA
agagctgcagacaaagacca

SEQ ID NO: 24964 - DNA, 20 bp, Artificial Sequence
  MKO10024964_A_Hsd3b5
  gRNA
tcccttcagtactctcacct

SEQ ID NO: 24965 - DNA, 20 bp, Artificial Sequence
  MKO10024965_A_Hsd3b5
  gRNA
ggtggcctatagttgtaaac

SEQ ID NO: 24966 - DNA, 20 bp, Artificial Sequence
  MKO10024966_A_Hsd3b5
  gRNA
tccagccagaatcaaggcag

SEQ ID NO: 24967 - DNA, 20 bp, Artificial Sequence
  MKO10024967_A_Hsd3b6
  gRNA
gattgtccagttgttgatgc

SEQ ID NO: 24968 - DNA, 20 bp, Artificial Sequence
  MKO10024968_A_Hsd3b6
  gRNA
tacaaggagataatcctgaa

SEQ ID NO: 24969 - DNA, 20 bp, Artificial Sequence
  MKO10024969_A_Hsd3b6
  gRNA
ctggtctgaagaacttgtcc

SEQ ID NO: 24970 - DNA, 20 bp, Artificial Sequence
  MKO10024970_A_Hsd3b7
  gRNA
cgaccgtgctccacagaagc

SEQ ID NO: 24971 - DNA, 20 bp, Artificial Sequence
  MKO10024971_A_Hsd3b7
  gRNA
accttcaccataaatgcccg

SEQ ID NO: 24972 - DNA, 20 bp, Artificial Sequence
  MKO10024972_A_Hsd3b7
  gRNA
catccacaaagtcaacgtgc

SEQ ID NO: 24973 - DNA, 20 bp, Artificial Sequence
  MKO10024973_A_Hsdl1
  gRNA
gcagtacgagtatgcctcta

SEQ ID NO: 24974 - DNA, 20 bp, Artificial Sequence
  MKO10024974_A_Hsdl1
  gRNA
aggcctctttccgtaaggag

SEQ ID NO: 24975 - DNA, 20 bp, Artificial Sequence
  MKO10024975_A_Hsdl1
  gRNA
tcgcacagtatatgcccgag

SEQ ID NO: 24976 - DNA, 20 bp, Artificial Sequence
  MKO10024976_A_Hsdl2
  gRNA
cagccgtgtagattgtgccg

SEQ ID NO: 24977 - DNA, 20 bp, Artificial Sequence
  MKO10024977_A_Hsdl2
  gRNA
tcacgtaaggtaggtgcccc

SEQ ID NO: 24978 - DNA, 20 bp, Artificial Sequence
  MKO10024978_A_Hsdl2
  gRNA
tattagcttgaccaacacgt

SEQ ID NO: 24979 - DNA, 20 bp, Artificial Sequence
  MKO10024979_A_Hsf1
  gRNA
cagcttccacgtgtttgacc

SEQ ID NO: 24980 - DNA, 20 bp, Artificial Sequence
  MKO10024980_A_Hsf1
  gRNA
gcagcacctccttggcaaac

SEQ ID NO: 24981 - DNA, 20 bp, Artificial Sequence
  MKO10024981_A_Hsf1
  gRNA
ggacctactgcttcatggcc

SEQ ID NO: 24982 - DNA, 20 bp, Artificial Sequence
  MKO10024982_A_Hsf2bp
  gRNA
cttccgtcgtcagccgttcc

SEQ ID NO: 24983 - DNA, 20 bp, Artificial Sequence
  MKO10024983_A_Hsf2bp
  gRNA
gaggtcgtcaaaaccattct

SEQ ID NO: 24984 - DNA, 20 bp, Artificial Sequence
  MKO10024984_A_Hsf2bp
  gRNA
tttgacgacctcctcgctgc

SEQ ID NO: 24985 - DNA, 20 bp, Artificial Sequence
  MKO10024985_A_Hsf2
  gRNA
aaagtagtgcatatcgaatc

SEQ ID NO: 24986 - DNA, 20 bp, Artificial Sequence
  MKO10024986_A_Hsf2
  gRNA
tccgaataacttgttgctgc

SEQ ID NO: 24987 - DNA, 20 bp, Artificial Sequence
  MKO10024987_A_Hsf2
  gRNA
gttctgacacctccttccaa

SEQ ID NO: 24988 - DNA, 20 bp, Artificial Sequence
  MKO10024988_A_Hsf3
  gRNA
tatactagatggtttccgaa

SEQ ID NO: 24989 - DNA, 20 bp, Artificial Sequence
  MKO10024989_A_Hsf3
  gRNA
tctgaaactcatcagagtag

SEQ ID NO: 24990 - DNA, 20 bp, Artificial Sequence
  MKO10024990_A_Hsf3
  gRNA
tcttgcaaacattaaacgaa

SEQ ID NO: 24991 - DNA, 20 bp, Artificial Sequence
  MKO10024991_A_Hsf4
  gRNA
ctgtcatcgcctcgcagcgc

SEQ ID NO: 24992 - DNA, 20 bp, Artificial Sequence
  MKO10024992_A_Hsf4
  gRNA
cgatgacagtcgatggcgtc

SEQ ID NO: 24993 - DNA, 20 bp, Artificial Sequence
  MKO10024993_A_Hsf4
  gRNA
cagcatccgagcttcgtgcg

SEQ ID NO: 24994 - DNA, 20 bp, Artificial Sequence
  MKO10024994_A_Hsf5
  gRNA
gtgggatgaagttgatacgt

SEQ ID NO: 24995 - DNA, 20 bp, Artificial Sequence
  MKO10024995_A_Hsf5
  gRNA
tcccaagcctactatccaac

SEQ ID NO: 24996 - DNA, 20 bp, Artificial Sequence
  MKO10024996_A_Hsf5
  gRNA
caagatattctccgagggat

SEQ ID NO: 24997 - DNA, 20 bp, Artificial Sequence
  MKO10024997_A_Hsfy2
  gRNA
acctgagttaccgatacaca

SEQ ID NO: 24998 - DNA, 20 bp, Artificial Sequence
  MKO10024998_A_Hsfy2
  gRNA
acaagtgagacatgtccccg

SEQ ID NO: 24999 - DNA, 20 bp, Artificial Sequence
  MKO10024999_A_Hsfy2
  gRNA
acctctattactcaaaaccg

SEQ ID NO: 25000 - DNA, 20 bp, Artificial Sequence
  MKO10025000_A_Hsh2d
  gRNA
agctccccgaatggccgaat

SEQ ID NO: 25001 - DNA, 20 bp, Artificial Sequence
  MKO10025001_A_Hsh2d
  gRNA
tcctcatagtccacgtttgc

SEQ ID NO: 25002 - DNA, 20 bp, Artificial Sequence
  MKO10025002_A_Hsh2d
  gRNA
gatgggacttgtgccttcgc

SEQ ID NO: 25003 - DNA, 20 bp, Artificial Sequence
  MKO10025003_A_Hsp90aa1
  gRNA
ccctacttactcagatactc

SEQ ID NO: 25004 - DNA, 20 bp, Artificial Sequence
  MKO10025004_A_Hsp90aa1
  gRNA
gtaacttacaaagagagtaa

SEQ ID NO: 25005 - DNA, 20 bp, Artificial Sequence
  MKO10025005_A_Hsp90aa1
  gRNA
tttcctccaaatactctgtt

SEQ ID NO: 25006 - DNA, 20 bp, Artificial Sequence
  MKO10025006_A_Hsp90ab1
  gRNA
cgggtggctccttcaccgtc

SEQ ID NO: 25007 - DNA, 20 bp, Artificial Sequence
  MKO10025007_A_Hsp90ab1
  gRNA
aaacccggatgacatcacgc

SEQ ID NO: 25008 - DNA, 20 bp, Artificial Sequence
  MKO10025008_A_Hsp90ab1
  gRNA
gacaccaaactgcccgatca

SEQ ID NO: 25009 - DNA, 20 bp, Artificial Sequence
  MKO10025009_A_Hsp90b1
  gRNA
agctgatgatgaagtcgacg

SEQ ID NO: 25010 - DNA, 20 bp, Artificial Sequence
  MKO10025010_A_Hsp90b1
  gRNA
aaactcgcttgttccagatt

SEQ ID NO: 25011 - DNA, 20 bp, Artificial Sequence
  MKO10025011_A_Hsp90b1
  gRNA
ctcggcaccatagccaaatc

SEQ ID NO: 25012 - DNA, 20 bp, Artificial Sequence
  MKO10025012_A_Hspa12a
  gRNA
gccacactcaccgcatcacg

SEQ ID NO: 25013 - DNA, 20 bp, Artificial Sequence
  MKO10025013_A_Hspa12a
  gRNA
acagctttgggtacgctgcc

SEQ ID NO: 25014 - DNA, 20 bp, Artificial Sequence
  MKO10025014_A_Hspa12a
  gRNA
ttacgccctgcagtacttca

SEQ ID NO: 25015 - DNA, 20 bp, Artificial Sequence
  MKO10025015_A_Hspa12b
  gRNA
tcccatttaccgcctcgagc

SEQ ID NO: 25016 - DNA, 20 bp, Artificial Sequence
  MKO10025016_A_Hspa12b
  gRNA
tcttctggtgggccacgcct

SEQ ID NO: 25017 - DNA, 20 bp, Artificial Sequence
  MKO10025017_A_Hspa12b
  gRNA
ctaccacgacctagaccctg

SEQ ID NO: 25018 - DNA, 20 bp, Artificial Sequence
  MKO10025018_A_Hspa13
  gRNA
cgtagaacacgtcaaccttg

SEQ ID NO: 25019 - DNA, 20 bp, Artificial Sequence
  MKO10025019_A_Hspa13
  gRNA
taccagacatcgctcgtgtt

SEQ ID NO: 25020 - DNA, 20 bp, Artificial Sequence
  MKO10025020_A_Hspa13
  gRNA
ggggttctactcgtattcct

SEQ ID NO: 25021 - DNA, 20 bp, Artificial Sequence
  MKO10025021_A_Hspa14
  gRNA
acgttccgagtaagcaacaa

SEQ ID NO: 25022 - DNA, 20 bp, Artificial Sequence
  MKO10025022_A_Hspa14
  gRNA
ttaggatggccgggccgatg

SEQ ID NO: 25023 - DNA, 20 bp, Artificial Sequence
  MKO10025023_A_Hspa14
  gRNA
ttgcggtatgaaatagatac

SEQ ID NO: 25024 - DNA, 20 bp, Artificial Sequence
  MKO10025024_A_Hspa1a
  gRNA
ctgtgctcagacctgttccg

SEQ ID NO: 25025 - DNA, 20 bp, Artificial Sequence
  MKO10025025_A_Hspa1a
  gRNA
cgaactgagcggcatcccgc

SEQ ID NO: 25026 - DNA, 20 bp, Artificial Sequence
  MKO10025026_A_Hspa1a
  gRNA
tcttggcggcgtctccgatg

SEQ ID NO: 25027 - DNA, 20 bp, Artificial Sequence
  MKO10025027_A_Hspa1b
  gRNA
tcttggcggcgtccccgatg

SEQ ID NO: 25028 - DNA, 20 bp, Artificial Sequence
  MKO10025028_A_Hspa1b
  gRNA
caggggcgtgccgcagatcg

SEQ ID NO: 25029 - DNA, 20 bp, Artificial Sequence
  MKO10025029_A_Hspa1b
  gRNA
cgagctgagcggcatcccgc

SEQ ID NO: 25030 - DNA, 20 bp, Artificial Sequence
  MKO10025030_A_Hspa1l
  gRNA
accgggcccacctgtacgcc

SEQ ID NO: 25031 - DNA, 20 bp, Artificial Sequence
  MKO10025031_A_Hspa1l
  gRNA
agtataccctggcgtacagg

SEQ ID NO: 25032 - DNA, 20 bp, Artificial Sequence
  MKO10025032_A_Hspa1l
  gRNA
cgcccattaaaatagctgcc

SEQ ID NO: 25033 - DNA, 20 bp, Artificial Sequence
  MKO10025033_A_Hspa2
  gRNA
tgaagcaaatcgcgatcgcg

SEQ ID NO: 25034 - DNA, 20 bp, Artificial Sequence
  MKO10025034_A_Hspa2
  gRNA
tttccgacttgtcgccgatg

SEQ ID NO: 25035 - DNA, 20 bp, Artificial Sequence
  MKO10025035_A_Hspa2
  gRNA
cgaagacttcgacaaccgta

SEQ ID NO: 25036 - DNA, 20 bp, Artificial Sequence
  MKO10025036_A_Hspa4l
  gRNA
ttggttgtaggtgcggtacc

SEQ ID NO: 25037 - DNA, 20 bp, Artificial Sequence
  MKO10025037_A_Hspa4l
  gRNA
tctgcgtcggtgaaaaagct

SEQ ID NO: 25038 - DNA, 20 bp, Artificial Sequence
  MKO10025038_A_Hspa4l
  gRNA
cgcagagagaagatccgtga

SEQ ID NO: 25039 - DNA, 20 bp, Artificial Sequence
  MKO10025039_A_Hspa4
  gRNA
gctccaattgaacgattctt

SEQ ID NO: 25040 - DNA, 20 bp, Artificial Sequence
  MKO10025040_A_Hspa4
  gRNA
gatattgtgcagttgcccac

SEQ ID NO: 25041 - DNA, 20 bp, Artificial Sequence
  MKO10025041_A_Hspa4
  gRNA
ctttatgcccgttaatccag

SEQ ID NO: 25042 - DNA, 20 bp, Artificial Sequence
  MKO10025042_A_Hspa5
  gRNA
ccgcatcacgccgtcgtatg

SEQ ID NO: 25043 - DNA, 20 bp, Artificial Sequence
  MKO10025043_A_Hspa5
  gRNA
ccacatacgacggcgtgatg

SEQ ID NO: 25044 - DNA, 20 bp, Artificial Sequence
  MKO10025044_A_Hspa5
  gRNA
catcgaaggtgccgccaccc

SEQ ID NO: 25045 - DNA, 20 bp, Artificial Sequence
  MKO10025045_A_Hspa8
  gRNA
tgcagaagcgtacctcggaa

SEQ ID NO: 25046 - DNA, 20 bp, Artificial Sequence
  MKO10025046_A_Hspa8
  gRNA
ttagaccgttaccaacgctg

SEQ ID NO: 25047 - DNA, 20 bp, Artificial Sequence
  MKO10025047_A_Hspa8
  gRNA
tttgacaggtcggagctgaa

SEQ ID NO: 25048 - DNA, 20 bp, Artificial Sequence
  MKO10025048_A_Hspa9
  gRNA
gcagatggagaacgacttgt

SEQ ID NO: 25049 - DNA, 20 bp, Artificial Sequence
  MKO10025049_A_Hspa9
  gRNA
tatgctactaagcgtcttat

SEQ ID NO: 25050 - DNA, 20 bp, Artificial Sequence
  MKO10025050_A_Hspa9
  gRNA
gatgcttgggttgaggctca

SEQ ID NO: 25051 - DNA, 20 bp, Artificial Sequence
  MKO10025051_A_Hspb11
  gRNA
caatgctagtgcggactttg

SEQ ID NO: 25052 - DNA, 20 bp, Artificial Sequence
  MKO10025052_A_Hspb11
  gRNA
ctaggaatccggaaaccttt

SEQ ID NO: 25053 - DNA, 20 bp, Artificial Sequence
  MKO10025053_A_Hspb11
  gRNA
catgcctgtggtggtccaaa

SEQ ID NO: 25054 - DNA, 20 bp, Artificial Sequence
  MKO10025054_A_Hspb1
  gRNA
caccattccggttactttcg

SEQ ID NO: 25055 - DNA, 20 bp, Artificial Sequence
  MKO10025055_A_Hspb1
  gRNA
gcgcgggcctcgaaagtaac

SEQ ID NO: 25056 - DNA, 20 bp, Artificial Sequence
  MKO10025056_A_Hspb1
  gRNA
tcagaactcacgtgtatttc

SEQ ID NO: 25057 - DNA, 20 bp, Artificial Sequence
  MKO10025057_A_Hspb2
  gRNA
tagagcagctcgaacccgcc

SEQ ID NO: 25058 - DNA, 20 bp, Artificial Sequence
  MKO10025058_A_Hspb2
  gRNA
tccttaacttggaggcgccg

SEQ ID NO: 25059 - DNA, 20 bp, Artificial Sequence
  MKO10025059_A_Hspb2
  gRNA
ggggttggcaaattcgtact

SEQ ID NO: 25060 - DNA, 20 bp, Artificial Sequence
  MKO10025060_A_Hspb3
  gRNA
acgaacacgggtttatatcg

SEQ ID NO: 25061 - DNA, 20 bp, Artificial Sequence
  MKO10025061_A_Hspb3
  gRNA
aaacccgtgttcgtccattc

SEQ ID NO: 25062 - DNA, 20 bp, Artificial Sequence
  MKO10025062_A_Hspb3
  gRNA
tctttggtttcgactccatc

SEQ ID NO: 25063 - DNA, 20 bp, Artificial Sequence
  MKO10025063_A_Hspb6
  gRNA
gcagcccttcgccgaaacgc

SEQ ID NO: 25064 - DNA, 20 bp, Artificial Sequence
  MKO10025064_A_Hspb6
  gRNA
cgcctctttgaccagcgttt

SEQ ID NO: 25065 - DNA, 20 bp, Artificial Sequence
  MKO10025065_A_Hspb6
  gRNA
tgctcggcacgaggagcgcc

SEQ ID NO: 25066 - DNA, 20 bp, Artificial Sequence
  MKO10025066_A_Hspb7
  gRNA
tctcagcccgcacctcgatg

SEQ ID NO: 25067 - DNA, 20 bp, Artificial Sequence
  MKO10025067_A_Hspb7
  gRNA
cttgcccacagcccgtcccg

SEQ ID NO: 25068 - DNA, 20 bp, Artificial Sequence
  MKO10025068_A_Hspb7
  gRNA
ggcgccgcgcccggatggtg

SEQ ID NO: 25069 - DNA, 20 bp, Artificial Sequence
  MKO10025069_A_Hspb8
  gRNA
ggtctcggcgcaggcggctt

SEQ ID NO: 25070 - DNA, 20 bp, Artificial Sequence
  MKO10025070_A_Hspb8
  gRNA
ggggagcctcgatgatgagc

SEQ ID NO: 25071 - DNA, 20 bp, Artificial Sequence
  MKO10025071_A_Hspb8
  gRNA
cgagcttcctcaagacaacc

SEQ ID NO: 25072 - DNA, 20 bp, Artificial Sequence
  MKO10025072_A_Hspb9
  gRNA
cattcgactcgtgttgccgc

SEQ ID NO: 25073 - DNA, 20 bp, Artificial Sequence
  MKO10025073_A_Hspb9
  gRNA
agcgcgaacccggggaaaac

SEQ ID NO: 25074 - DNA, 20 bp, Artificial Sequence
  MKO10025074_A_Hspb9
  gRNA
acgagtcgaatgacccgagc

SEQ ID NO: 25075 - DNA, 20 bp, Artificial Sequence
  MKO10025075_A_Hspbap1
  gRNA
tcgattggccatcacgacac

SEQ ID NO: 25076 - DNA, 20 bp, Artificial Sequence
  MKO10025076_A_Hspbap1
  gRNA
ttcgcagtccagtgtcgtga

SEQ ID NO: 25077 - DNA, 20 bp, Artificial Sequence
  MKO10025077_A_Hspbap1
  gRNA
cgcatccacataactacatt

SEQ ID NO: 25078 - DNA, 20 bp, Artificial Sequence
  MKO10025078_A_Hspbp1
  gRNA
cttgactcgtaccgtgtcgc

SEQ ID NO: 25079 - DNA, 20 bp, Artificial Sequence
  MKO10025079_A_Hspbp1
  gRNA
aagccatgtcggccgccttc

SEQ ID NO: 25080 - DNA, 20 bp, Artificial Sequence
  MKO10025080_A_Hspbp1
  gRNA
tctgctggtgggtcgatacc

SEQ ID NO: 25081 - DNA, 20 bp, Artificial Sequence
  MKO10025081_A_Hspd1
  gRNA
tcttgaactaggtgtgatgt

SEQ ID NO: 25082 - DNA, 20 bp, Artificial Sequence
  MKO10025082_A_Hspd1
  gRNA
ttacctctccggatttccac

SEQ ID NO: 25083 - DNA, 20 bp, Artificial Sequence
  MKO10025083_A_Hspd1
  gRNA
cttacctgagcaatttcttc

SEQ ID NO: 25084 - DNA, 20 bp, Artificial Sequence
  MKO10025084_A_Hspe1
  gRNA
gctgccgaaactgtaaccaa

SEQ ID NO: 25085 - DNA, 20 bp, Artificial Sequence
  MKO10025085_A_Hspe1
  gRNA
ggggtcaggagggaaaggaa

SEQ ID NO: 25086 - DNA, 20 bp, Artificial Sequence
  MKO10025086_A_Hspe1
  gRNA
cttgtcatctagaactactt

SEQ ID NO: 25087 - DNA, 20 bp, Artificial Sequence
  MKO10025087_A_Hspg2
  gRNA
atctcccataggtgacgcat

SEQ ID NO: 25088 - DNA, 20 bp, Artificial Sequence
  MKO10025088_A_Hspg2
  gRNA
tgcccacgtctccgctgccg

SEQ ID NO: 25089 - DNA, 20 bp, Artificial Sequence
  MKO10025089_A_Hspg2
  gRNA
ccacagcctccgacacctct

SEQ ID NO: 25090 - DNA, 20 bp, Artificial Sequence
  MKO10025090_A_Hsph1
  gRNA
gctggatgctgcgcagattg

SEQ ID NO: 25091 - DNA, 20 bp, Artificial Sequence
  MKO10025091_A_Hsph1
  gRNA
catgctgctgactaagttaa

SEQ ID NO: 25092 - DNA, 20 bp, Artificial Sequence
  MKO10025092_A_Hsph1
  gRNA
gcggctcatgaatgacatga

SEQ ID NO: 25093 - DNA, 20 bp, Artificial Sequence
  MKO10025093_A_Htatip2
  gRNA
aagagtctcgtccaggcgaa

SEQ ID NO: 25094 - DNA, 20 bp, Artificial Sequence
  MKO10025094_A_Htatip2
  gRNA
ttcctagccagccattcgcc

SEQ ID NO: 25095 - DNA, 20 bp, Artificial Sequence
  MKO10025095_A_Htatip2
  gRNA
taagaaactgctggacttat

SEQ ID NO: 25096 - DNA, 20 bp, Artificial Sequence
  MKO10025096_A_Htatsf1
  gRNA
agatttcattgctacgtatc

SEQ ID NO: 25097 - DNA, 20 bp, Artificial Sequence
  MKO10025097_A_Htatsf1
  gRNA
cagctctactgcgaacgtcc

SEQ ID NO: 25098 - DNA, 20 bp, Artificial Sequence
  MKO10025098_A_Htatsf1
  gRNA
catcgtattcacccttgagc

SEQ ID NO: 25099 - DNA, 20 bp, Artificial Sequence
  MKO10025099_A_Htr1a
  gRNA
ggccgacgatgttccgaagc

SEQ ID NO: 25100 - DNA, 20 bp, Artificial Sequence
  MKO10025100_A_Htr1a
  gRNA
ccagtacctgtctagcgcga

SEQ ID NO: 25101 - DNA, 20 bp, Artificial Sequence
  MKO10025101_A_Htr1a
  gRNA
tgcactcgttggggttcgag

SEQ ID NO: 25102 - DNA, 20 bp, Artificial Sequence
  MKO10025102_A_Htr1b
  gRNA
atacaccgtagcgattacaa

SEQ ID NO: 25103 - DNA, 20 bp, Artificial Sequence
  MKO10025103_A_Htr1b
  gRNA
ctgatacgctttaagtgcgc

SEQ ID NO: 25104 - DNA, 20 bp, Artificial Sequence
  MKO10025104_A_Htr1b
  gRNA
agtagaccgtgtagaggacg

SEQ ID NO: 25105 - DNA, 20 bp, Artificial Sequence
  MKO10025105_A_Htr1d
  gRNA
tacaccatctactcgacctg

SEQ ID NO: 25106 - DNA, 20 bp, Artificial Sequence
  MKO10025106_A_Htr1d
  gRNA
tacagcaagcgtcgaaccgc

SEQ ID NO: 25107 - DNA, 20 bp, Artificial Sequence
  MKO10025107_A_Htr1d
  gRNA
tctcagaatctcgctcgtgg

SEQ ID NO: 25108 - DNA, 20 bp, Artificial Sequence
  MKO10025108_A_Htr1f
  gRNA
acttgtacgatgccgatatt

SEQ ID NO: 25109 - DNA, 20 bp, Artificial Sequence
  MKO10025109_A_Htr1f
  gRNA
caatgatcgcagcgatcacg

SEQ ID NO: 25110 - DNA, 20 bp, Artificial Sequence
  MKO10025110_A_Htr1f
  gRNA
catcatgatcacgatcgtgt

SEQ ID NO: 25111 - DNA, 20 bp, Artificial Sequence
  MKO10025111_A_Htr2a
  gRNA
catcgtccttcggcctgcgt

SEQ ID NO: 25112 - DNA, 20 bp, Artificial Sequence
  MKO10025112_A_Htr2a
  gRNA
gtccagcttacctacggata

SEQ ID NO: 25113 - DNA, 20 bp, Artificial Sequence
  MKO10025113_A_Htr2a
  gRNA
acacttccgaagcctcgaac

SEQ ID NO: 25114 - DNA, 20 bp, Artificial Sequence
  MKO10025114_A_Htr2b
  gRNA
gtattatcaccgcgagtatc

SEQ ID NO: 25115 - DNA, 20 bp, Artificial Sequence
  MKO10025115_A_Htr2b
  gRNA
agccacctcaacgcctaaca

SEQ ID NO: 25116 - DNA, 20 bp, Artificial Sequence
  MKO10025116_A_Htr2b
  gRNA
ctgatcctgactaaccgttc

SEQ ID NO: 25117 - DNA, 20 bp, Artificial Sequence
  MKO10025117_A_Htr2c
  gRNA
ccttagtccgcgaattgaac

SEQ ID NO: 25118 - DNA, 20 bp, Artificial Sequence
  MKO10025118_A_Htr2c
  gRNA
accctaggaatctgtcgaac

SEQ ID NO: 25119 - DNA, 20 bp, Artificial Sequence
  MKO10025119_A_Htr2c
  gRNA
gacccgaacttcgttctcat

SEQ ID NO: 25120 - DNA, 20 bp, Artificial Sequence
  MKO10025120_A_Htr3a
  gRNA
cacctgccggtaccatatgt

SEQ ID NO: 25121 - DNA, 20 bp, Artificial Sequence
  MKO10025121_A_Htr3a
  gRNA
tatgtgtacgtgcatcatcg

SEQ ID NO: 25122 - DNA, 20 bp, Artificial Sequence
  MKO10025122_A_Htr3a
  gRNA
gcagctcaccacgttgagga

SEQ ID NO: 25123 - DNA, 20 bp, Artificial Sequence
  MKO10025123_A_Htr3b
  gRNA
ggtacagcgacacctcagcc

SEQ ID NO: 25124 - DNA, 20 bp, Artificial Sequence
  MKO10025124_A_Htr3b
  gRNA
cggtgcagagaagaattccc

SEQ ID NO: 25125 - DNA, 20 bp, Artificial Sequence
  MKO10025125_A_Htr3b
  gRNA
agaagagttcacgtatacat

SEQ ID NO: 25126 - DNA, 20 bp, Artificial Sequence
  MKO10025126_A_Htr4
  gRNA
aacattaatgcgatgcgtag

SEQ ID NO: 25127 - DNA, 20 bp, Artificial Sequence
  MKO10025127_A_Htr4
  gRNA
tctacgcatcgcattaatgt

SEQ ID NO: 25128 - DNA, 20 bp, Artificial Sequence
  MKO10025128_A_Htr4
  gRNA
agatcgatgctgtggtaagt

SEQ ID NO: 25129 - DNA, 20 bp, Artificial Sequence
  MKO10025129_A_Htr5a
  gRNA
cgaaattccgcatgggctcc

SEQ ID NO: 25130 - DNA, 20 bp, Artificial Sequence
  MKO10025130_A_Htr5a
  gRNA
atgagctgtctgggcgccgc

SEQ ID NO: 25131 - DNA, 20 bp, Artificial Sequence
  MKO10025131_A_Htr5a
  gRNA
ggcggaccgtgaacaccatc

SEQ ID NO: 25132 - DNA, 20 bp, Artificial Sequence
  MKO10025132_A_Htr5b
  gRNA
cgctcatgatcgcgatcacc

SEQ ID NO: 25133 - DNA, 20 bp, Artificial Sequence
  MKO10025133_A_Htr5b
  gRNA
ggtggaaggcgcggacacgc

SEQ ID NO: 25134 - DNA, 20 bp, Artificial Sequence
  MKO10025134_A_Htr5b
  gRNA
aggttactgttgctcggcga

SEQ ID NO: 25135 - DNA, 20 bp, Artificial Sequence
  MKO10025135_A_Htr6
  gRNA
gttagacgtgttgcgcagcg

SEQ ID NO: 25136 - DNA, 20 bp, Artificial Sequence
  MKO10025136_A_Htr6
  gRNA
ccgacgtgaagagcgacacc

SEQ ID NO: 25137 - DNA, 20 bp, Artificial Sequence
  MKO10025137_A_Htr6
  gRNA
tcttgaagtcccgcatgaag

SEQ ID NO: 25138 - DNA, 20 bp, Artificial Sequence
  MKO10025138_A_Htr7
  gRNA
gatataaaacgccactgcgg

SEQ ID NO: 25139 - DNA, 20 bp, Artificial Sequence
  MKO10025139_A_Htr7
  gRNA
catcacgctgctgacgatcg

SEQ ID NO: 25140 - DNA, 20 bp, Artificial Sequence
  MKO10025140_A_Htr7
  gRNA
ttcagggagatgacgctctc

SEQ ID NO: 25141 - DNA, 20 bp, Artificial Sequence
  MKO10025141_A_Htra1
  gRNA
gggacttcggaactccgata

SEQ ID NO: 25142 - DNA, 20 bp, Artificial Sequence
  MKO10025142_A_Htra1
  gRNA
ccagctctttgccgcctcgc

SEQ ID NO: 25143 - DNA, 20 bp, Artificial Sequence
  MKO10025143_A_Htra1
  gRNA
gtacttatgacgcaaactgt

SEQ ID NO: 25144 - DNA, 20 bp, Artificial Sequence
  MKO10025144_A_Htra2
  gRNA
gcctagcggggatacttatg

SEQ ID NO: 25145 - DNA, 20 bp, Artificial Sequence
  MKO10025145_A_Htra2
  gRNA
taggcagcctcactcgtact

SEQ ID NO: 25146 - DNA, 20 bp, Artificial Sequence
  MKO10025146_A_Htra2
  gRNA
acatcagcagagcggccgag

SEQ ID NO: 25147 - DNA, 20 bp, Artificial Sequence
  MKO10025147_A_Htra3
  gRNA
cgcgacacgtcgcagcgcgc

SEQ ID NO: 25148 - DNA, 20 bp, Artificial Sequence
  MKO10025148_A_Htra3
  gRNA
cgccagccgtcgtgcgttgc

SEQ ID NO: 25149 - DNA, 20 bp, Artificial Sequence
  MKO10025149_A_Htra3
  gRNA
ccacgaactcgccaggccgc

SEQ ID NO: 25150 - DNA, 20 bp, Artificial Sequence
  MKO10025150_A_Htra4
  gRNA
cttcataccgggccccgctc

SEQ ID NO: 25151 - DNA, 20 bp, Artificial Sequence
  MKO10025151_A_Htra4
  gRNA
gtacaacttcatcgccgcag

SEQ ID NO: 25152 - DNA, 20 bp, Artificial Sequence
  MKO10025152_A_Htra4
  gRNA
cgttaatgatggcatccgtc

SEQ ID NO: 25153 - DNA, 20 bp, Artificial Sequence
  MKO10025153_A_Htt
  gRNA
tctgctgtgcagtgacgatg

SEQ ID NO: 25154 - DNA, 20 bp, Artificial Sequence
  MKO10025154_A_Htt
  gRNA
ttgttagacaatgattcaca

SEQ ID NO: 25155 - DNA, 20 bp, Artificial Sequence
  MKO10025155_A_Htt
  gRNA
tagagttctaactgtagcct

SEQ ID NO: 25156 - DNA, 20 bp, Artificial Sequence
  MKO10025156_A_Hunk
  gRNA
caccaaaaacctgcgtcgag

SEQ ID NO: 25157 - DNA, 20 bp, Artificial Sequence
  MKO10025157_A_Hunk
  gRNA
tcaaccttaggtagctatca

SEQ ID NO: 25158 - DNA, 20 bp, Artificial Sequence
  MKO10025158_A_Hunk
  gRNA
tttggcttgagcaactgtgc

SEQ ID NO: 25159 - DNA, 20 bp, Artificial Sequence
  MKO10025159_A_Hus1b
  gRNA
gagctctataaaacgcttgc

SEQ ID NO: 25160 - DNA, 20 bp, Artificial Sequence
  MKO10025160_A_Hus1b
  gRNA
gcagcgcccctgccttactt

SEQ ID NO: 25161 - DNA, 20 bp, Artificial Sequence
  MKO10025161_A_Hus1b
  gRNA
tcacatcagagccccgaaca

SEQ ID NO: 25162 - DNA, 20 bp, Artificial Sequence
  MKO10025162_A_Hus1
  gRNA
cttcatcctgtgcgacaagc

SEQ ID NO: 25163 - DNA, 20 bp, Artificial Sequence
  MKO10025163_A_Hus1
  gRNA
gatttatttagaattaacgt

SEQ ID NO: 25164 - DNA, 20 bp, Artificial Sequence
  MKO10025164_A_Hus1
  gRNA
atcgagcagcagcagaatcg

SEQ ID NO: 25165 - DNA, 20 bp, Artificial Sequence
  MKO10025165_A_Huwe1
  gRNA
gatctgttggaccgctttga

SEQ ID NO: 25166 - DNA, 20 bp, Artificial Sequence
  MKO10025166_A_Huwe1
  gRNA
agaggactccgctactgaca

SEQ ID NO: 25167 - DNA, 20 bp, Artificial Sequence
  MKO10025167_A_Huwe1
  gRNA
tctagtgtgagttatatcac

SEQ ID NO: 25168 - DNA, 20 bp, Artificial Sequence
  MKO10025168_A_Hvcn1
  gRNA
cggacgtaccattgatgatc

SEQ ID NO: 25169 - DNA, 20 bp, Artificial Sequence
  MKO10025169_A_Hvcn1
  gRNA
accgcatagtcttgctcgtc

SEQ ID NO: 25170 - DNA, 20 bp, Artificial Sequence
  MKO10025170_A_Hvcn1
  gRNA
gccggacgagcaagactatg

SEQ ID NO: 25171 - DNA, 20 bp, Artificial Sequence
  MKO10025171_A_Hyal1
  gRNA
cgttcgacaccgtgtgcaag

SEQ ID NO: 25172 - DNA, 20 bp, Artificial Sequence
  MKO10025172_A_Hyal1
  gRNA
ttctgatcacggacgaatac

SEQ ID NO: 25173 - DNA, 20 bp, Artificial Sequence
  MKO10025173_A_Hyal1
  gRNA
atttcatagccatctgcgcc

SEQ ID NO: 25174 - DNA, 20 bp, Artificial Sequence
  MKO10025174_A_Hyal2
  gRNA
acgagtttgagttcgccgct

SEQ ID NO: 25175 - DNA, 20 bp, Artificial Sequence
  MKO10025175_A_Hyal2
  gRNA
ctcgaagggcctcccgaaca

SEQ ID NO: 25176 - DNA, 20 bp, Artificial Sequence
  MKO10025176_A_Hyal2
  gRNA
cctacatagtcaacgtgtcc

SEQ ID NO: 25177 - DNA, 20 bp, Artificial Sequence
  MKO10025177_A_Hyal3
  gRNA
ctttgtccgacaccgcctgg

SEQ ID NO: 25178 - DNA, 20 bp, Artificial Sequence
  MKO10025178_A_Hyal3
  gRNA
ctttccgggcacatcgacca

SEQ ID NO: 25179 - DNA, 20 bp, Artificial Sequence
  MKO10025179_A_Hyal3
  gRNA
cccgaaacacccaactgcgt

SEQ ID NO: 25180 - DNA, 20 bp, Artificial Sequence
  MKO10025180_A_Hyal4
  gRNA
ccctgcaagttaccacatag

SEQ ID NO: 25181 - DNA, 20 bp, Artificial Sequence
  MKO10025181_A_Hyal4
  gRNA
ctttgcacttctcacgattt

SEQ ID NO: 25182 - DNA, 20 bp, Artificial Sequence
  MKO10025182_A_Hyal4
  gRNA
gcatgacccagtatagtttg

SEQ ID NO: 25183 - DNA, 20 bp, Artificial Sequence
  MKO10025183_A_Hyal5
  gRNA
tcgaacacacgccttgattc

SEQ ID NO: 25184 - DNA, 20 bp, Artificial Sequence
  MKO10025184_A_Hyal5
  gRNA
tttaatcagccactagatct

SEQ ID NO: 25185 - DNA, 20 bp, Artificial Sequence
  MKO10025185_A_Hyal5
  gRNA
agggtgacgttgatgatata

SEQ ID NO: 25186 - DNA, 20 bp, Artificial Sequence
  MKO10025186_A_Hyal6
  gRNA
gtcgagtgaaggctagcgag

SEQ ID NO: 25187 - DNA, 20 bp, Artificial Sequence
  MKO10025187_A_Hyal6
  gRNA
gagctgccggagcgaccaga

SEQ ID NO: 25188 - DNA, 20 bp, Artificial Sequence
  MKO10025188_A_Hyal6
  gRNA
gctgaattcaatccacttgc

SEQ ID NO: 25189 - DNA, 20 bp, Artificial Sequence
  MKO10025189_A_Hydin
  gRNA
cttaccacccatgagcccga

SEQ ID NO: 25190 - DNA, 20 bp, Artificial Sequence
  MKO10025190_A_Hydin
  gRNA
gatcaccgaactcttagata

SEQ ID NO: 25191 - DNA, 20 bp, Artificial Sequence
  MKO10025191_A_Hydin
  gRNA
aagaggattcggaatacaga

SEQ ID NO: 25192 - DNA, 20 bp, Artificial Sequence
  MKO10025192_A_Hyi
  gRNA
taccttgccggggcgtgtcc

SEQ ID NO: 25193 - DNA, 20 bp, Artificial Sequence
  MKO10025193_A_Hyi
  gRNA
ggggtactcggccagccatc

SEQ ID NO: 25194 - DNA, 20 bp, Artificial Sequence
  MKO10025194_A_Hyi
  gRNA
tgggctccagcagtcccacg

SEQ ID NO: 25195 - DNA, 20 bp, Artificial Sequence
  MKO10025195_A_Hykk
  gRNA
taccgattctaccagtgcag

SEQ ID NO: 25196 - DNA, 20 bp, Artificial Sequence
  MKO10025196_A_Hykk
  gRNA
gcctccgtatgccgaactaa

SEQ ID NO: 25197 - DNA, 20 bp, Artificial Sequence
  MKO10025197_A_Hykk
  gRNA
gacttcggtgacatgagcta

SEQ ID NO: 25198 - DNA, 20 bp, Artificial Sequence
  MKO10025198_A_Hyls1
  gRNA
agttacgctggagtgtccga

SEQ ID NO: 25199 - DNA, 20 bp, Artificial Sequence
  MKO10025199_A_Hyls1
  gRNA
ctactcggtctatcttgccc

SEQ ID NO: 25200 - DNA, 20 bp, Artificial Sequence
  MKO10025200_A_Hyls1
  gRNA
tcggcttaactgatccagtc

SEQ ID NO: 25201 - DNA, 20 bp, Artificial Sequence
  MKO10025201_A_Hyou1
  gRNA
aaataacggagcgtagcctt

SEQ ID NO: 25202 - DNA, 20 bp, Artificial Sequence
  MKO10025202_A_Hyou1
  gRNA
acaggcggataaccctcatg

SEQ ID NO: 25203 - DNA, 20 bp, Artificial Sequence
  MKO10025203_A_Hyou1
  gRNA
tctgaactactcccgttcct

SEQ ID NO: 25204 - DNA, 20 bp, Artificial Sequence
  MKO10025204_A_Hypk
  gRNA
tgagatcgaaatggcgaccg

SEQ ID NO: 25205 - DNA, 20 bp, Artificial Sequence
  MKO10025205_A_Hypk
  gRNA
ctacaggctatgtccgtcat

SEQ ID NO: 25206 - DNA, 20 bp, Artificial Sequence
  MKO10025206_A_Hypk
  gRNA
catagtcagtaacccgctct

SEQ ID NO: 25207 - DNA, 20 bp, Artificial Sequence
  MKO10025207_A_I830012O16Rik
  gRNA
tcaagcagaaattcgccgac

SEQ ID NO: 25208 - DNA, 20 bp, Artificial Sequence
  MKO10025208_A_I830012O16Rik
  gRNA
ccaggagaactttcacgtac

SEQ ID NO: 25209 - DNA, 20 bp, Artificial Sequence
  MKO10025209_A_I830012O16Rik
  gRNA
agtttccccacgtgaccagt

SEQ ID NO: 25210 - DNA, 20 bp, Artificial Sequence
  MKO10025210_A_I830077J02Rik
  gRNA
ttgactagaaaccactcctc

SEQ ID NO: 25211 - DNA, 20 bp, Artificial Sequence
  MKO10025211_A_I830077J02Rik
  gRNA
ttctgcagctcttgacaatg

SEQ ID NO: 25212 - DNA, 20 bp, Artificial Sequence
  MKO10025212_A_I830077J02Rik
  gRNA
gatagtgggctccaagcctg

SEQ ID NO: 25213 - DNA, 20 bp, Artificial Sequence
  MKO10025213_A_Iah1
  gRNA
atgagtacagcgcaaacctg

SEQ ID NO: 25214 - DNA, 20 bp, Artificial Sequence
  MKO10025214_A_Iah1
  gRNA
ccccgctctgcgaagccgcc

SEQ ID NO: 25215 - DNA, 20 bp, Artificial Sequence
  MKO10025215_A_Iah1
  gRNA
gaggataatcttggcccatc

SEQ ID NO: 25216 - DNA, 20 bp, Artificial Sequence
  MKO10025216_A_Iapp
  gRNA
atgcggcaggggatccaaat

SEQ ID NO: 25217 - DNA, 20 bp, Artificial Sequence
  MKO10025217_A_Iapp
  gRNA
atatgtattcgatcccacgt

SEQ ID NO: 25218 - DNA, 20 bp, Artificial Sequence
  MKO10025218_A_Iapp
  gRNA
tgagagctacacctgtcaga

SEQ ID NO: 25219 - DNA, 20 bp, Artificial Sequence
  MKO10025219_A_Iars2
  gRNA
gacgggcctccttatgccaa

SEQ ID NO: 25220 - DNA, 20 bp, Artificial Sequence
  MKO10025220_A_Iars2
  gRNA
aatcgattccatatgatgag

SEQ ID NO: 25221 - DNA, 20 bp, Artificial Sequence
  MKO10025221_A_Iars2
  gRNA
cataaggaggcccgtcatga

SEQ ID NO: 25222 - DNA, 20 bp, Artificial Sequence
  MKO10025222_A_Iars
  gRNA
acgagatacgctcaccagag

SEQ ID NO: 25223 - DNA, 20 bp, Artificial Sequence
  MKO10025223_A_Iars
  gRNA
tgtcaacgtgaaacccgctc

SEQ ID NO: 25224 - DNA, 20 bp, Artificial Sequence
  MKO10025224_A_Iars
  gRNA
agtgccacacgcggtggaga

SEQ ID NO: 25225 - DNA, 20 bp, Artificial Sequence
  MKO10025225_A_Iba57
  gRNA
ggcatacgccgcacgcgcag

SEQ ID NO: 25226 - DNA, 20 bp, Artificial Sequence
  MKO10025226_A_Iba57
  gRNA
gcttgcggatgacacctgta

SEQ ID NO: 25227 - DNA, 20 bp, Artificial Sequence
  MKO10025227_A_Iba57
  gRNA
gccaccccatacgtgcagtc

SEQ ID NO: 25228 - DNA, 20 bp, Artificial Sequence
  MKO10025228_A_Ibsp
  gRNA
agacggcgatagttccgaag

SEQ ID NO: 25229 - DNA, 20 bp, Artificial Sequence
  MKO10025229_A_Ibsp
  gRNA
tggactggaaaccgtttcag

SEQ ID NO: 25230 - DNA, 20 bp, Artificial Sequence
  MKO10025230_A_Ibsp
  gRNA
cctctgctttgattcttcga

SEQ ID NO: 25231 - DNA, 20 bp, Artificial Sequence
  MKO10025231_A_Ibtk
  gRNA
ctaaccgtcctccgcgacca

SEQ ID NO: 25232 - DNA, 20 bp, Artificial Sequence
  MKO10025232_A_Ibtk
  gRNA
tggtcacaattgttcgcaag

SEQ ID NO: 25233 - DNA, 20 bp, Artificial Sequence
  MKO10025233_A_Ibtk
  gRNA
ctgggtacattacaactagc

SEQ ID NO: 25234 - DNA, 20 bp, Artificial Sequence
  MKO10025234_A_Ica1l
  gRNA
ctgtgcgggcccgctccatg

SEQ ID NO: 25235 - DNA, 20 bp, Artificial Sequence
  MKO10025235_A_Ica1l
  gRNA
tgaccattaaccgcatggag

SEQ ID NO: 25236 - DNA, 20 bp, Artificial Sequence
  MKO10025236_A_Ica1l
  gRNA
ccataccgttgagtcttagc

SEQ ID NO: 25237 - DNA, 20 bp, Artificial Sequence
  MKO10025237_A_Ica1
  gRNA
ttccaagacaaaacccgagc

SEQ ID NO: 25238 - DNA, 20 bp, Artificial Sequence
  MKO10025238_A_Ica1
  gRNA
tcgacacaaagggtttctca

SEQ ID NO: 25239 - DNA, 20 bp, Artificial Sequence
  MKO10025239_A_Ica1
  gRNA
cgattgctttagacaagtcc

SEQ ID NO: 25240 - DNA, 20 bp, Artificial Sequence
  MKO10025240_A_Icam1
  gRNA
ggacctcaccgaaagtccgg

SEQ ID NO: 25241 - DNA, 20 bp, Artificial Sequence
  MKO10025241_A_Icam1
  gRNA
tcgtttgtgatcctccgagc

SEQ ID NO: 25242 - DNA, 20 bp, Artificial Sequence
  MKO10025242_A_Icam1
  gRNA
cctgccgctgcgctgcgttt

SEQ ID NO: 25243 - DNA, 20 bp, Artificial Sequence
  MKO10025243_A_Icam2
  gRNA
tcacacgggacgtgcccgaa

SEQ ID NO: 25244 - DNA, 20 bp, Artificial Sequence
  MKO10025244_A_Icam2
  gRNA
gagctggatctacggcccca

SEQ ID NO: 25245 - DNA, 20 bp, Artificial Sequence
  MKO10025245_A_Icam2
  gRNA
ccaggcagctagcaccccgt

SEQ ID NO: 25246 - DNA, 20 bp, Artificial Sequence
  MKO10025246_A_Icam4
  gRNA
tgtctacgtgcgcaagtacc

SEQ ID NO: 25247 - DNA, 20 bp, Artificial Sequence
  MKO10025247_A_Icam4
  gRNA
ccactagcccgtcgagattg

SEQ ID NO: 25248 - DNA, 20 bp, Artificial Sequence
  MKO10025248_A_Icam4
  gRNA
gcgcttcaccggttcagatt

SEQ ID NO: 25249 - DNA, 20 bp, Artificial Sequence
  MKO10025249_A_Icam5
  gRNA
cggtcgcgctagaacctttc

SEQ ID NO: 25250 - DNA, 20 bp, Artificial Sequence
  MKO10025250_A_Icam5
  gRNA
cgcgctccacgagcgccacg

SEQ ID NO: 25251 - DNA, 20 bp, Artificial Sequence
  MKO10025251_A_Icam5
  gRNA
gagtttccccgtccacatcg

SEQ ID NO: 25252 - DNA, 20 bp, Artificial Sequence
  MKO10025252_A_Ick
  gRNA
taaataccttaacctcccga

SEQ ID NO: 25253 - DNA, 20 bp, Artificial Sequence
  MKO10025253_A_Ick
  gRNA
atattccttatagcagactc

SEQ ID NO: 25254 - DNA, 20 bp, Artificial Sequence
  MKO10025254_A_Ick
  gRNA
ttctcgagccaatccaaagt

SEQ ID NO: 25255 - DNA, 20 bp, Artificial Sequence
  MKO10025255_A_Icmt
  gRNA
gttggagccagccgtaaaca

SEQ ID NO: 25256 - DNA, 20 bp, Artificial Sequence
  MKO10025256_A_Icmt
  gRNA
ttactggagtatcggaaccc

SEQ ID NO: 25257 - DNA, 20 bp, Artificial Sequence
  MKO10025257_A_Icmt
  gRNA
cttccgagatcgcacagaag

SEQ ID NO: 25258 - DNA, 20 bp, Artificial Sequence
  MKO10025258_A_Icosl
  gRNA
ccgttgtgttgatccaatac

SEQ ID NO: 25259 - DNA, 20 bp, Artificial Sequence
  MKO10025259_A_Icosl
  gRNA
cgtccccaccgaagctatac

SEQ ID NO: 25260 - DNA, 20 bp, Artificial Sequence
  MKO10025260_A_Icosl
  gRNA
ccgctgccgccagtacagca

SEQ ID NO: 25261 - DNA, 20 bp, Artificial Sequence
  MKO10025261_A_Icos
  gRNA
aacgaaagctgcacacccta

SEQ ID NO: 25262 - DNA, 20 bp, Artificial Sequence
  MKO10025262_A_Icos
  gRNA
agggtgtgcagctttcgttg

SEQ ID NO: 25263 - DNA, 20 bp, Artificial Sequence
  MKO10025263_A_Icos
  gRNA
caccgcatttccgcttccct

SEQ ID NO: 25264 - DNA, 20 bp, Artificial Sequence
  MKO10025264_A_Ict1
  gRNA
gtaccgtgagggcaatcttc

SEQ ID NO: 25265 - DNA, 20 bp, Artificial Sequence
  MKO10025265_A_Ict1
  gRNA
ccagattgcggaactgatac

SEQ ID NO: 25266 - DNA, 20 bp, Artificial Sequence
  MKO10025266_A_Ict1
  gRNA
aattcgagacatgattgccg

SEQ ID NO: 25267 - DNA, 20 bp, Artificial Sequence
  MKO10025267_A_Id1
  gRNA
cgtcccagcgcagcgcgaga

SEQ ID NO: 25268 - DNA, 20 bp, Artificial Sequence
  MKO10025268_A_Id1
  gRNA
gcgacacaagatgcgatcgt

SEQ ID NO: 25269 - DNA, 20 bp, Artificial Sequence
  MKO10025269_A_Id1
  gRNA
cccgccttcagcgaacagct

SEQ ID NO: 25270 - DNA, 20 bp, Artificial Sequence
  MKO10025270_A_Id2
  gRNA
tgcccaagctgtggtccgac

SEQ ID NO: 25271 - DNA, 20 bp, Artificial Sequence
  MKO10025271_A_Id2
  gRNA
gcacgtcatcgattacatct

SEQ ID NO: 25272 - DNA, 20 bp, Artificial Sequence
  MKO10025272_A_Id2
  gRNA
aatgatagcaaagtactctg

SEQ ID NO: 25273 - DNA, 20 bp, Artificial Sequence
  MKO10025273_A_Id3
  gRNA
cggtaagagcccgtcgaccg

SEQ ID NO: 25274 - DNA, 20 bp, Artificial Sequence
  MKO10025274_A_Id3
  gRNA
cttaccgcggcctcgcgcaa

SEQ ID NO: 25275 - DNA, 20 bp, Artificial Sequence
  MKO10025275_A_Id3
  gRNA
gcaaaagctcctcttgtcct

SEQ ID NO: 25276 - DNA, 20 bp, Artificial Sequence
  MKO10025276_A_Id4
  gRNA
cttgtccggtcgcgccgccg

SEQ ID NO: 25277 - DNA, 20 bp, Artificial Sequence
  MKO10025277_A_Id4
  gRNA
ctcgggccgcaaggcgccgt

SEQ ID NO: 25278 - DNA, 20 bp, Artificial Sequence
  MKO10025278_A_Id4
  gRNA
ggccggcgccgtgaacaagc

SEQ ID NO: 25279 - DNA, 20 bp, Artificial Sequence
  MKO10025279_A_Ide
  gRNA
gtattattcgtccaatctga

SEQ ID NO: 25280 - DNA, 20 bp, Artificial Sequence
  MKO10025280_A_Ide
  gRNA
cccttacgtcgatgccttct

SEQ ID NO: 25281 - DNA, 20 bp, Artificial Sequence
  MKO10025281_A_Ide
  gRNA
cttagacgacctcactaacc

SEQ ID NO: 25282 - DNA, 20 bp, Artificial Sequence
  MKO10025282_A_Idh1
  gRNA
tgggcctgtaagaattacga

SEQ ID NO: 25283 - DNA, 20 bp, Artificial Sequence
  MKO10025283_A_Idh1
  gRNA
ggcccaagctatgaagtccg

SEQ ID NO: 25284 - DNA, 20 bp, Artificial Sequence
  MKO10025284_A_Idh1
  gRNA
agtcttcaattgacttatcc

SEQ ID NO: 25285 - DNA, 20 bp, Artificial Sequence
  MKO10025285_A_Idh2
  gRNA
atgttccggatcgttccgtt

SEQ ID NO: 25286 - DNA, 20 bp, Artificial Sequence
  MKO10025286_A_Idh2
  gRNA
agagccctaacggaacgatc

SEQ ID NO: 25287 - DNA, 20 bp, Artificial Sequence
  MKO10025287_A_Idh2
  gRNA
tcgagctggcacgttcaagt

SEQ ID NO: 25288 - DNA, 20 bp, Artificial Sequence
  MKO10025288_A_Idh3a
  gRNA
aatgtaggtctctcggctgc

SEQ ID NO: 25289 - DNA, 20 bp, Artificial Sequence
  MKO10025289_A_Idh3a
  gRNA
ctaaagaccccaatagccgc

SEQ ID NO: 25290 - DNA, 20 bp, Artificial Sequence
  MKO10025290_A_Idh3a
  gRNA
gcggctattggggtctttag

SEQ ID NO: 25291 - DNA, 20 bp, Artificial Sequence
  MKO10025291_A_Idh3b
  gRNA
cgcaggcggtgctcgccgct

SEQ ID NO: 25292 - DNA, 20 bp, Artificial Sequence
  MKO10025292_A_Idh3b
  gRNA
agttcacccttatactccat

SEQ ID NO: 25293 - DNA, 20 bp, Artificial Sequence
  MKO10025293_A_Idh3b
  gRNA
cctcctatgatatgcagctg

SEQ ID NO: 25294 - DNA, 20 bp, Artificial Sequence
  MKO10025294_A_Idh3g
  gRNA
tgtaagctccaacgctgatg

SEQ ID NO: 25295 - DNA, 20 bp, Artificial Sequence
  MKO10025295_A_Idh3g
  gRNA
ggacatccgcaatgccatca

SEQ ID NO: 25296 - DNA, 20 bp, Artificial Sequence
  MKO10025296_A_Idh3g
  gRNA
ttactgaggaaatgctcctt

SEQ ID NO: 25297 - DNA, 20 bp, Artificial Sequence
  MKO10025297_A_Idi1
  gRNA
agagcgggtacctcttccaa

SEQ ID NO: 25298 - DNA, 20 bp, Artificial Sequence
  MKO10025298_A_Idi1
  gRNA
gtaggttgatctaaatgaaa

SEQ ID NO: 25299 - DNA, 20 bp, Artificial Sequence
  MKO10025299_A_Idi1
  gRNA
cagccatcttgatgaaaaac

SEQ ID NO: 25300 - DNA, 20 bp, Artificial Sequence
  MKO10025300_A_Idi2
  gRNA
gctcagcctgcagacgtctt

SEQ ID NO: 25301 - DNA, 20 bp, Artificial Sequence
  MKO10025301_A_Idi2
  gRNA
ggcagccctaagacgtctgc

SEQ ID NO: 25302 - DNA, 20 bp, Artificial Sequence
  MKO10025302_A_Idi2
  gRNA
gctacacagagccttcagtg

SEQ ID NO: 25303 - DNA, 20 bp, Artificial Sequence
  MKO10025303_A_Idnk
  gRNA
tgccgatgattaccactccg

SEQ ID NO: 25304 - DNA, 20 bp, Artificial Sequence
  MKO10025304_A_Idnk
  gRNA
aatcggataaagatggcgaa

SEQ ID NO: 25305 - DNA, 20 bp, Artificial Sequence
  MKO10025305_A_Idnk
  gRNA
tacagagacatcttgatccg

SEQ ID NO: 25306 - DNA, 20 bp, Artificial Sequence
  MKO10025306_A_Ido1
  gRNA
tgcccgacgcatacagcccc

SEQ ID NO: 25307 - DNA, 20 bp, Artificial Sequence
  MKO10025307_A_Ido1
  gRNA
tgcccgttctcaatcagcac

SEQ ID NO: 25308 - DNA, 20 bp, Artificial Sequence
  MKO10025308_A_Ido1
  gRNA
acgccatggtgatgtacccc

SEQ ID NO: 25309 - DNA, 20 bp, Artificial Sequence
  MKO10025309_A_Ido2
  gRNA
ggcgctggccgctatcacca

SEQ ID NO: 25310 - DNA, 20 bp, Artificial Sequence
  MKO10025310_A_Ido2
  gRNA
gtaccctgtacacgtgagct

SEQ ID NO: 25311 - DNA, 20 bp, Artificial Sequence
  MKO10025311_A_Ido2
  gRNA
gagttaccgtgagcagcgcc

SEQ ID NO: 25312 - DNA, 20 bp, Artificial Sequence
  MKO10025312_A_Ids
  gRNA
gtccccgaacattgaccagc

SEQ ID NO: 25313 - DNA, 20 bp, Artificial Sequence
  MKO10025313_A_Ids
  gRNA
gtgatgattatccatatagc

SEQ ID NO: 25314 - DNA, 20 bp, Artificial Sequence
  MKO10025314_A_Ids
  gRNA
attgaagtcatacaggcggg

SEQ ID NO: 25315 - DNA, 20 bp, Artificial Sequence
  MKO10025315_A_Idua
  gRNA
ctgaccagtacgaccttagt

SEQ ID NO: 25316 - DNA, 20 bp, Artificial Sequence
  MKO10025316_A_Idua
  gRNA
ccccccactgcctcacgacc

SEQ ID NO: 25317 - DNA, 20 bp, Artificial Sequence
  MKO10025317_A_Idua
  gRNA
aagtccgtgaagtacccaga

SEQ ID NO: 25318 - DNA, 20 bp, Artificial Sequence
  MKO10025318_A_Ier2
  gRNA
ctcgagcgctgcgcataacg

SEQ ID NO: 25319 - DNA, 20 bp, Artificial Sequence
  MKO10025319_A_Ier2
  gRNA
cgcttgcggctgactctagc

SEQ ID NO: 25320 - DNA, 20 bp, Artificial Sequence
  MKO10025320_A_Ier2
  gRNA
ccgagttcccgccatcccgc

SEQ ID NO: 25321 - DNA, 20 bp, Artificial Sequence
  MKO10025321_A_Ier3ip1
  gRNA
ctccaaatccaccgattccc

SEQ ID NO: 25322 - DNA, 20 bp, Artificial Sequence
  MKO10025322_A_Ier3ip1
  gRNA
tctgtaagaaccgtgatgag

SEQ ID NO: 25323 - DNA, 20 bp, Artificial Sequence
  MKO10025323_A_Ier3ip1
  gRNA
gaagcgctcctcgtgcagca

SEQ ID NO: 25324 - DNA, 20 bp, Artificial Sequence
  MKO10025324_A_Ier3
  gRNA
gcgcgtttgaacacttctcg

SEQ ID NO: 25325 - DNA, 20 bp, Artificial Sequence
  MKO10025325_A_Ier3
  gRNA
gcaccgaaaacgcagccgaa

SEQ ID NO: 25326 - DNA, 20 bp, Artificial Sequence
  MKO10025326_A_Ier3
  gRNA
catcgcgtttagaaggccgc

SEQ ID NO: 25327 - DNA, 20 bp, Artificial Sequence
  MKO10025327_A_Ier5l
  gRNA
ttccgggcgccgcgtaagcg

SEQ ID NO: 25328 - DNA, 20 bp, Artificial Sequence
  MKO10025328_A_Ier5l
  gRNA
gctcggcgtaacgctcgctc

SEQ ID NO: 25329 - DNA, 20 bp, Artificial Sequence
  MKO10025329_A_Ier5l
  gRNA
gcgcgcgttgcggagcacgt

SEQ ID NO: 25330 - DNA, 20 bp, Artificial Sequence
  MKO10025330_A_Ier5
  gRNA
cctcctgaagacgccgcgcg

SEQ ID NO: 25331 - DNA, 20 bp, Artificial Sequence
  MKO10025331_A_Ier5
  gRNA
cccctctcaagaagccgcgc

SEQ ID NO: 25332 - DNA, 20 bp, Artificial Sequence
  MKO10025332_A_Ier5
  gRNA
ccgcgtggagcgtccgcgcg

SEQ ID NO: 25333 - DNA, 20 bp, Artificial Sequence
  MKO10025333_A_Iffo1
  gRNA
ggtccttctctcacgcccgc

SEQ ID NO: 25334 - DNA, 20 bp, Artificial Sequence
  MKO10025334_A_Iffo1
  gRNA
ccggcttcatcagcccgatc

SEQ ID NO: 25335 - DNA, 20 bp, Artificial Sequence
  MKO10025335_A_Iffo1
  gRNA
gcttggccgtgatgtcaatg

SEQ ID NO: 25336 - DNA, 20 bp, Artificial Sequence
  MKO10025336_A_Iffo2
  gRNA
gcttagccgtgatatcgatt

SEQ ID NO: 25337 - DNA, 20 bp, Artificial Sequence
  MKO10025337_A_Iffo2
  gRNA
ctgccgccgaatcgatatca

SEQ ID NO: 25338 - DNA, 20 bp, Artificial Sequence
  MKO10025338_A_Iffo2
  gRNA
acaggcggcgcaagaagccg

SEQ ID NO: 25339 - DNA, 20 bp, Artificial Sequence
  MKO10025339_A_Ifi202b
  gRNA
gggaaaccaatattacactc

SEQ ID NO: 25340 - DNA, 20 bp, Artificial Sequence
  MKO10025340_A_Ifi202b
  gRNA
tgaatattccagcgtgtctg

SEQ ID NO: 25341 - DNA, 20 bp, Artificial Sequence
  MKO10025341_A_Ifi202b
  gRNA
accaatctcacagttgacac

SEQ ID NO: 25342 - DNA, 20 bp, Artificial Sequence
  MKO10025342_A_Ifi203
  gRNA
tcagctggcggactggattg

SEQ ID NO: 25343 - DNA, 20 bp, Artificial Sequence
  MKO10025343_A_Ifi203
  gRNA
aaggaaaatgcaaaacggct

SEQ ID NO: 25344 - DNA, 20 bp, Artificial Sequence
  MKO10025344_A_Ifi203
  gRNA
aatgttcacatcggacacac

SEQ ID NO: 25345 - DNA, 20 bp, Artificial Sequence
  MKO10025345_A_Ifi204
  gRNA
ttcacctgaaaacaattgac

SEQ ID NO: 25346 - DNA, 20 bp, Artificial Sequence
  MKO10025346_A_Ifi204
  gRNA
atggcacaacatcaactgca

SEQ ID NO: 25347 - DNA, 20 bp, Artificial Sequence
  MKO10025347_A_Ifi204
  gRNA
tgcatttctgataatactgt

SEQ ID NO: 25348 - DNA, 20 bp, Artificial Sequence
  MKO10025348_A_Ifi205
  gRNA
gactgacgtgaagaagatca

SEQ ID NO: 25349 - DNA, 20 bp, Artificial Sequence
  MKO10025349_A_Ifi205
  gRNA
atgaagccgaagatgagacc

SEQ ID NO: 25350 - DNA, 20 bp, Artificial Sequence
  MKO10025350_A_Ifi205
  gRNA
ggaagagacttccacagccc

SEQ ID NO: 25351 - DNA, 20 bp, Artificial Sequence
  MKO10025351_A_Ifi27l2a
  gRNA
cttacctgctgattggagtg

SEQ ID NO: 25352 - DNA, 20 bp, Artificial Sequence
  MKO10025352_A_Ifi27l2a
  gRNA
ctctctataggaacactgtt

SEQ ID NO: 25353 - DNA, 20 bp, Artificial Sequence
  MKO10025353_A_Ifi27l2a
  gRNA
acatcaacaaatgccatcct

SEQ ID NO: 25354 - DNA, 20 bp, Artificial Sequence
  MKO10025354_A_Ifi27l2b
  gRNA
agggcctcaggatcctccgc

SEQ ID NO: 25355 - DNA, 20 bp, Artificial Sequence
  MKO10025355_A_Ifi27l2b
  gRNA
cacaataaccaacatcatcc

SEQ ID NO: 25356 - DNA, 20 bp, Artificial Sequence
  MKO10025356_A_Ifi27l2b
  gRNA
acctgtcgccctgagtgccg

SEQ ID NO: 25357 - DNA, 20 bp, Artificial Sequence
  MKO10025357_A_Ifi27
  gRNA
caccattctagctggttcga

SEQ ID NO: 25358 - DNA, 20 bp, Artificial Sequence
  MKO10025358_A_Ifi27
  gRNA
cgtgccatctactgtcatcg

SEQ ID NO: 25359 - DNA, 20 bp, Artificial Sequence
  MKO10025359_A_Ifi27
  gRNA
ctctgcagggtctgccgttg

SEQ ID NO: 25360 - DNA, 20 bp, Artificial Sequence
  MKO10025360_A_Ifi30
  gRNA
ttgggaacaaatcccggacg

SEQ ID NO: 25361 - DNA, 20 bp, Artificial Sequence
  MKO10025361_A_Ifi30
  gRNA
agtagcgacaagctccacac

SEQ ID NO: 25362 - DNA, 20 bp, Artificial Sequence
  MKO10025362_A_Ifi30
  gRNA
gttcctaaccatcgtctgta

SEQ ID NO: 25363 - DNA, 20 bp, Artificial Sequence
  MKO10025363_A_Ifi35
  gRNA
tgatcggttgctacaacaaa

SEQ ID NO: 25364 - DNA, 20 bp, Artificial Sequence
  MKO10025364_A_Ifi35
  gRNA
tcactcagcctaagtccagc

SEQ ID NO: 25365 - DNA, 20 bp, Artificial Sequence
  MKO10025365_A_Ifi35
  gRNA
acctgaatgttggtcaccac

SEQ ID NO: 25366 - DNA, 20 bp, Artificial Sequence
  MKO10025366_A_Ifi44l
  gRNA
cttagaggacttgcctctcg

SEQ ID NO: 25367 - DNA, 20 bp, Artificial Sequence
  MKO10025367_A_Ifi44l
  gRNA
aggttaccagtatcctcgag

SEQ ID NO: 25368 - DNA, 20 bp, Artificial Sequence
  MKO10025368_A_Ifi44l
  gRNA
tagtcccaaagctcatcaca

SEQ ID NO: 25369 - DNA, 20 bp, Artificial Sequence
  MKO10025369_A_Ifi44
  gRNA
gaactcgtgtttgctgaacc

SEQ ID NO: 25370 - DNA, 20 bp, Artificial Sequence
  MKO10025370_A_Ifi44
  gRNA
ttcggatggtttgatgtgat

SEQ ID NO: 25371 - DNA, 20 bp, Artificial Sequence
  MKO10025371_A_Ifi44
  gRNA
ctgagagactacaagcccta

SEQ ID NO: 25372 - DNA, 20 bp, Artificial Sequence
  MKO10025372_A_Ifi47
  gRNA
ggtctagataagcgtctgcg

SEQ ID NO: 25373 - DNA, 20 bp, Artificial Sequence
  MKO10025373_A_Ifi47
  gRNA
catcgtcaaccactatgtta

SEQ ID NO: 25374 - DNA, 20 bp, Artificial Sequence
  MKO10025374_A_Ifi47
  gRNA
aacatatgacgcttgtgccc

SEQ ID NO: 25375 - DNA, 20 bp, Artificial Sequence
  MKO10025375_A_Ifih1
  gRNA
gtttgacatagcgcgcggct

SEQ ID NO: 25376 - DNA, 20 bp, Artificial Sequence
  MKO10025376_A_Ifih1
  gRNA
ggttatcgttcttgtcaata

SEQ ID NO: 25377 - DNA, 20 bp, Artificial Sequence
  MKO10025377_A_Ifih1
  gRNA
tgggccacttccatttggta

SEQ ID NO: 25378 - DNA, 20 bp, Artificial Sequence
  MKO10025378_A_Ifit1
  gRNA
caggatattcacctccgcta

SEQ ID NO: 25379 - DNA, 20 bp, Artificial Sequence
  MKO10025379_A_Ifit1
  gRNA
tgtctacgcgatgtttccta

SEQ ID NO: 25380 - DNA, 20 bp, Artificial Sequence
  MKO10025380_A_Ifit1
  gRNA
catagcgaatgacatagctt

SEQ ID NO: 25381 - DNA, 20 bp, Artificial Sequence
  MKO10025381_A_Ifit2
  gRNA
ggccattgcgaactaccgtc

SEQ ID NO: 25382 - DNA, 20 bp, Artificial Sequence
  MKO10025382_A_Ifit2
  gRNA
cgcctatgtgcattactata

SEQ ID NO: 25383 - DNA, 20 bp, Artificial Sequence
  MKO10025383_A_Ifit2
  gRNA
cgtcaagcttcagtgccaag

SEQ ID NO: 25384 - DNA, 20 bp, Artificial Sequence
  MKO10025384_A_Ifit3
  gRNA
tcaatcagaaattcgtcgac

SEQ ID NO: 25385 - DNA, 20 bp, Artificial Sequence
  MKO10025385_A_Ifit3
  gRNA
gatccaggcgtagtttcccc

SEQ ID NO: 25386 - DNA, 20 bp, Artificial Sequence
  MKO10025386_A_Ifit3
  gRNA
cagagtttaaatgttcgacc

SEQ ID NO: 25387 - DNA, 20 bp, Artificial Sequence
  MKO10025387_A_Ifitm10
  gRNA
tcgttcacctccgtagtgtc

SEQ ID NO: 25388 - DNA, 20 bp, Artificial Sequence
  MKO10025388_A_Ifitm10
  gRNA
gaaaggctgtctggcgacac

SEQ ID NO: 25389 - DNA, 20 bp, Artificial Sequence
  MKO10025389_A_Ifitm10
  gRNA
gtagacctcgatgactgtgg

SEQ ID NO: 25390 - DNA, 20 bp, Artificial Sequence
  MKO10025390_A_Ifitm1
  gRNA
gatctccacgcctgaccatg

SEQ ID NO: 25391 - DNA, 20 bp, Artificial Sequence
  MKO10025391_A_Ifitm1
  gRNA
atacaataccttcacggagt

SEQ ID NO: 25392 - DNA, 20 bp, Artificial Sequence
  MKO10025392_A_Ifitm1
  gRNA
gtctcttccagtctagggac

SEQ ID NO: 25393 - DNA, 20 bp, Artificial Sequence
  MKO10025393_A_Ifitm2
  gRNA
cccggcattggtggacaaga

SEQ ID NO: 25394 - DNA, 20 bp, Artificial Sequence
  MKO10025394_A_Ifitm2
  gRNA
atttccttcagtctagggac

SEQ ID NO: 25395 - DNA, 20 bp, Artificial Sequence
  MKO10025395_A_Ifitm2
  gRNA
tgcctatgcctactctgtga

SEQ ID NO: 25396 - DNA, 20 bp, Artificial Sequence
  MKO10025396_A_Ifitm3
  gRNA
gaatcctctattaagtgtga

SEQ ID NO: 25397 - DNA, 20 bp, Artificial Sequence
  MKO10025397_A_Ifitm3
  gRNA
ttctgctccagtctagggat

SEQ ID NO: 25398 - DNA, 20 bp, Artificial Sequence
  MKO10025398_A_Ifitm3
  gRNA
cacactcaccttcacggagt

SEQ ID NO: 25399 - DNA, 20 bp, Artificial Sequence
  MKO10025399_A_Ifitm5
  gRNA
caccacgagatcacatgctc

SEQ ID NO: 25400 - DNA, 20 bp, Artificial Sequence
  MKO10025400_A_Ifitm5
  gRNA
ggacacttcatatccccgtg

SEQ ID NO: 25401 - DNA, 20 bp, Artificial Sequence
  MKO10025401_A_Ifitm5
  gRNA
gaagaaagccgcagagtctt

SEQ ID NO: 25402 - DNA, 20 bp, Artificial Sequence
  MKO10025402_A_Ifitm6
  gRNA
caacagtgatgttatccagc

SEQ ID NO: 25403 - DNA, 20 bp, Artificial Sequence
  MKO10025403_A_Ifitm6
  gRNA
caccttcaccgagtagatgt

SEQ ID NO: 25404 - DNA, 20 bp, Artificial Sequence
  MKO10025404_A_Ifitm6
  gRNA
tcatgtcgcccaccatcttc

SEQ ID NO: 25405 - DNA, 20 bp, Artificial Sequence
  MKO10025405_A_Ifitm7
  gRNA
accgccccataacgcctgag

SEQ ID NO: 25406 - DNA, 20 bp, Artificial Sequence
  MKO10025406_A_Ifitm7
  gRNA
taatgggcccggcgttgctg

SEQ ID NO: 25407 - DNA, 20 bp, Artificial Sequence
  MKO10025407_A_Ifitm7
  gRNA
cctgatcctctccgtcgtca

SEQ ID NO: 25408 - DNA, 20 bp, Artificial Sequence
  MKO10025408_A_Ifltd1
  gRNA
acgataaggtggagctgttc

SEQ ID NO: 25409 - DNA, 20 bp, Artificial Sequence
  MKO10025409_A_Ifltd1
  gRNA
tcctcccaaacaaagtccgt

SEQ ID NO: 25410 - DNA, 20 bp, Artificial Sequence
  MKO10025410_A_Ifltd1
  gRNA
aagtcggccaatttacatcc

SEQ ID NO: 25411 - DNA, 20 bp, Artificial Sequence
  MKO10025411_A_Ifna11
  gRNA
tcatcactatcaagatcatg

SEQ ID NO: 25412 - DNA, 20 bp, Artificial Sequence
  MKO10025412_A_Ifna11
  gRNA
cttgaacctcttcgcatcaa

SEQ ID NO: 25413 - DNA, 20 bp, Artificial Sequence
  MKO10025413_A_Ifna11
  gRNA
tcttgatagtgatgagctac

SEQ ID NO: 25414 - DNA, 20 bp, Artificial Sequence
  MKO10025414_A_Ifna12
  gRNA
tcttgccagcaacttagctg

SEQ ID NO: 25415 - DNA, 20 bp, Artificial Sequence
  MKO10025415_A_Ifna12
  gRNA
gtcttcctcagctaagttgc

SEQ ID NO: 25416 - DNA, 20 bp, Artificial Sequence
  MKO10025416_A_Ifna12
  gRNA
taaagttctttctgtccttc

SEQ ID NO: 25417 - DNA, 20 bp, Artificial Sequence
  MKO10025417_A_Ifna13
  gRNA
tgggtcagctcatgaacaaa

SEQ ID NO: 25418 - DNA, 20 bp, Artificial Sequence
  MKO10025418_A_Ifna13
  gRNA
gctgcatcagacaagctttg

SEQ ID NO: 25419 - DNA, 20 bp, Artificial Sequence
  MKO10025419_A_Ifna13
  gRNA
caaagcttgtctgatgcagc

SEQ ID NO: 25420 - DNA, 20 bp, Artificial Sequence
  MKO10025420_A_Ifna14
  gRNA
gcgggaatccaaagtccttc

SEQ ID NO: 25421 - DNA, 20 bp, Artificial Sequence
  MKO10025421_A_Ifna14
  gRNA
gatgcagcaggtagagatac

SEQ ID NO: 25422 - DNA, 20 bp, Artificial Sequence
  MKO10025422_A_Ifna14
  gRNA
actcagctcaatgacctgca

SEQ ID NO: 25423 - DNA, 20 bp, Artificial Sequence
  MKO10025423_A_Ifna1
  gRNA
tctcagtcttcccagcacat

SEQ ID NO: 25424 - DNA, 20 bp, Artificial Sequence
  MKO10025424_A_Ifna1
  gRNA
taggctctgtgctttcctga

SEQ ID NO: 25425 - DNA, 20 bp, Artificial Sequence
  MKO10025425_A_Ifna1
  gRNA
caaagtccttcctgtccttc

SEQ ID NO: 25426 - DNA, 20 bp, Artificial Sequence
  MKO10025426_A_Ifna2
  gRNA
tcatcactatcagcatcacg

SEQ ID NO: 25427 - DNA, 20 bp, Artificial Sequence
  MKO10025427_A_Ifna2
  gRNA
tgctgatagtgatgagctac

SEQ ID NO: 25428 - DNA, 20 bp, Artificial Sequence
  MKO10025428_A_Ifna2
  gRNA
tgagtaagatctcgcagcac

SEQ ID NO: 25429 - DNA, 20 bp, Artificial Sequence
  MKO10025429_A_Ifna4
  gRNA
agtagtagctcatcattacc

SEQ ID NO: 25430 - DNA, 20 bp, Artificial Sequence
  MKO10025430_A_Ifna4
  gRNA
caaaagacttgtctgctact

SEQ ID NO: 25431 - DNA, 20 bp, Artificial Sequence
  MKO10025431_A_Ifna4
  gRNA
gggtaagatctcttagcaca

SEQ ID NO: 25432 - DNA, 20 bp, Artificial Sequence
  MKO10025432_A_Ifna5
  gRNA
cccgacctgttgcatcacac

SEQ ID NO: 25433 - DNA, 20 bp, Artificial Sequence
  MKO10025433_A_Ifna5
  gRNA
caaagcctgtgtgatgcaac

SEQ ID NO: 25434 - DNA, 20 bp, Artificial Sequence
  MKO10025434_A_Ifna5
  gRNA
cctgagtgagctgacccagc

SEQ ID NO: 25435 - DNA, 20 bp, Artificial Sequence
  MKO10025435_A_Ifna6
  gRNA
tcaaggctttcttgttcctg

SEQ ID NO: 25436 - DNA, 20 bp, Artificial Sequence
  MKO10025436_A_Ifna6
  gRNA
actcagtcttgccagcaact

SEQ ID NO: 25437 - DNA, 20 bp, Artificial Sequence
  MKO10025437_A_Ifna6
  gRNA
taggctctgtgctttcctga

SEQ ID NO: 25438 - DNA, 20 bp, Artificial Sequence
  MKO10025438_A_Ifna7
  gRNA
gccagtagctcaacaccacc

SEQ ID NO: 25439 - DNA, 20 bp, Artificial Sequence
  MKO10025439_A_Ifna7
  gRNA
tcagctcatgcagaacacag

SEQ ID NO: 25440 - DNA, 20 bp, Artificial Sequence
  MKO10025440_A_Ifna7
  gRNA
tcctggtggtgttgagctac

SEQ ID NO: 25441 - DNA, 20 bp, Artificial Sequence
  MKO10025441_A_Ifna9
  gRNA
gatgcagctggtcgggatga

SEQ ID NO: 25442 - DNA, 20 bp, Artificial Sequence
  MKO10025442_A_Ifna9
  gRNA
tcttggtggtgataagctac

SEQ ID NO: 25443 - DNA, 20 bp, Artificial Sequence
  MKO10025443_A_Ifna9
  gRNA
ctcctagactcattctgcac

SEQ ID NO: 25444 - DNA, 20 bp, Artificial Sequence
  MKO10025444_A_Ifnab
  gRNA
tgaggcaggtcacatcctag

SEQ ID NO: 25445 - DNA, 20 bp, Artificial Sequence
  MKO10025445_A_Ifnab
  gRNA
taggctcagcactttcctaa

SEQ ID NO: 25446 - DNA, 20 bp, Artificial Sequence
  MKO10025446_A_Ifnab
  gRNA
cctgaaaacctgtctgatgc

SEQ ID NO: 25447 - DNA, 20 bp, Artificial Sequence
  MKO10025447_A_Ifnar1
  gRNA
cgttcgatattctgctgaaa

SEQ ID NO: 25448 - DNA, 20 bp, Artificial Sequence
  MKO10025448_A_Ifnar1
  gRNA
tcagttacaccatacgaatc

SEQ ID NO: 25449 - DNA, 20 bp, Artificial Sequence
  MKO10025449_A_Ifnar1
  gRNA
ccacatgttcccgtcttgtc

SEQ ID NO: 25450 - DNA, 20 bp, Artificial Sequence
  MKO10025450_A_Ifnar2
  gRNA
ccctctgtgcactatgacga

SEQ ID NO: 25451 - DNA, 20 bp, Artificial Sequence
  MKO10025451_A_Ifnar2
  gRNA
cacgtcacatgatgacttcg

SEQ ID NO: 25452 - DNA, 20 bp, Artificial Sequence
  MKO10025452_A_Ifnar2
  gRNA
cacccgctaactacaccctc

SEQ ID NO: 25453 - DNA, 20 bp, Artificial Sequence
  MKO10025453_A_Ifnb1
  gRNA
tgaagtacaacagctacgcc

SEQ ID NO: 25454 - DNA, 20 bp, Artificial Sequence
  MKO10025454_A_Ifnb1
  gRNA
gactattgttgtacgtctcc

SEQ ID NO: 25455 - DNA, 20 bp, Artificial Sequence
  MKO10025455_A_Ifnb1
  gRNA
tccgaatgttcgtcctttct

SEQ ID NO: 25456 - DNA, 20 bp, Artificial Sequence
  MKO10025456_A_Ifne
  gRNA
aagagcagcaacaccgtttc

SEQ ID NO: 25457 - DNA, 20 bp, Artificial Sequence
  MKO10025457_A_Ifne
  gRNA
aagtcttagctgcgcttcac

SEQ ID NO: 25458 - DNA, 20 bp, Artificial Sequence
  MKO10025458_A_Ifne
  gRNA
gctcgagtgcgcagaacctt

SEQ ID NO: 25459 - DNA, 20 bp, Artificial Sequence
  MKO10025459_A_Ifngr1
  gRNA
cgaccgtatgtttcgtatgt

SEQ ID NO: 25460 - DNA, 20 bp, Artificial Sequence
  MKO10025460_A_Ifngr1
  gRNA
acttgaaccctgtcgtatgc

SEQ ID NO: 25461 - DNA, 20 bp, Artificial Sequence
  MKO10025461_A_Ifngr1
  gRNA
agtatagtcgaatgtgtaac

SEQ ID NO: 25462 - DNA, 20 bp, Artificial Sequence
  MKO10025462_A_Ifngr2
  gRNA
ctcgcttggctcgcacccgc

SEQ ID NO: 25463 - DNA, 20 bp, Artificial Sequence
  MKO10025463_A_Ifngr2
  gRNA
cttacaagctatattccacc

SEQ ID NO: 25464 - DNA, 20 bp, Artificial Sequence
  MKO10025464_A_Ifngr2
  gRNA
gatactgaaaagttgccccg

SEQ ID NO: 25465 - DNA, 20 bp, Artificial Sequence
  MKO10025465_A_Ifng
  gRNA
attcaatgagctcatccgag

SEQ ID NO: 25466 - DNA, 20 bp, Artificial Sequence
  MKO10025466_A_Ifng
  gRNA
tggattccggcaacagctgg

SEQ ID NO: 25467 - DNA, 20 bp, Artificial Sequence
  MKO10025467_A_Ifng
  gRNA
gacgcttatgttgttgctga

SEQ ID NO: 25468 - DNA, 20 bp, Artificial Sequence
  MKO10025468_A_Ifnk
  gRNA
gcggaatgtatagagccaca

SEQ ID NO: 25469 - DNA, 20 bp, Artificial Sequence
  MKO10025469_A_Ifnk
  gRNA
gccaccagccataaaaactt

SEQ ID NO: 25470 - DNA, 20 bp, Artificial Sequence
  MKO10025470_A_Ifnk
  gRNA
ctatttaagttcttgcttga

SEQ ID NO: 25471 - DNA, 20 bp, Artificial Sequence
  MKO10025471_A_Ifnl2
  gRNA
cccgggtgagcaggcgaaac

SEQ ID NO: 25472 - DNA, 20 bp, Artificial Sequence
  MKO10025472_A_Ifnl2
  gRNA
gacctcaagtgtgtggccaa

SEQ ID NO: 25473 - DNA, 20 bp, Artificial Sequence
  MKO10025473_A_Ifnl2
  gRNA
gaacatgactgactcagccc

SEQ ID NO: 25474 - DNA, 20 bp, Artificial Sequence
  MKO10025474_A_Ifnl3
  gRNA
cccggaggagcagttgaaac

SEQ ID NO: 25475 - DNA, 20 bp, Artificial Sequence
  MKO10025475_A_Ifnl3
  gRNA
acctgtttcaactgctcctc

SEQ ID NO: 25476 - DNA, 20 bp, Artificial Sequence
  MKO10025476_A_Ifnl3
  gRNA
ctggcccaggatggtggtca

SEQ ID NO: 25477 - DNA, 20 bp, Artificial Sequence
  MKO10025477_A_Ifnlr1
  gRNA
gccaccttgcatgccgtcgc

SEQ ID NO: 25478 - DNA, 20 bp, Artificial Sequence
  MKO10025478_A_Ifnlr1
  gRNA
cctttggtaggtcacgaaat

SEQ ID NO: 25479 - DNA, 20 bp, Artificial Sequence
  MKO10025479_A_Ifnlr1
  gRNA
agttccagcgacggcatgca

SEQ ID NO: 25480 - DNA, 20 bp, Artificial Sequence
  MKO10025480_A_Ifnz
  gRNA
aggcatacagcgcttgctcc

SEQ ID NO: 25481 - DNA, 20 bp, Artificial Sequence
  MKO10025481_A_Ifnz
  gRNA
aggtttcttccgctatctga

SEQ ID NO: 25482 - DNA, 20 bp, Artificial Sequence
  MKO10025482_A_Ifnz
  gRNA
agaaacctcggaagtaggtg

SEQ ID NO: 25483 - DNA, 20 bp, Artificial Sequence
  MKO10025483_A_Ifrd1
  gRNA
gatcgctatagccgctgcag

SEQ ID NO: 25484 - DNA, 20 bp, Artificial Sequence
  MKO10025484_A_Ifrd1
  gRNA
cctaccatcctccgcaaaac

SEQ ID NO: 25485 - DNA, 20 bp, Artificial Sequence
  MKO10025485_A_Ifrd1
  gRNA
aaagagtgacgagcagcgtg

SEQ ID NO: 25486 - DNA, 20 bp, Artificial Sequence
  MKO10025486_A_Ifrd2
  gRNA
acggaacagctcctcgccct

SEQ ID NO: 25487 - DNA, 20 bp, Artificial Sequence
  MKO10025487_A_Ifrd2
  gRNA
cccagtgccaagacccgtca

SEQ ID NO: 25488 - DNA, 20 bp, Artificial Sequence
  MKO10025488_A_Ifrd2
  gRNA
tggctttgcaggtggcgaag

SEQ ID NO: 25489 - DNA, 20 bp, Artificial Sequence
  MKO10025489_A_Ift122
  gRNA
cgatgagggccgtgttgacg

SEQ ID NO: 25490 - DNA, 20 bp, Artificial Sequence
  MKO10025490_A_Ift122
  gRNA
gacctcgcatttaagcctga

SEQ ID NO: 25491 - DNA, 20 bp, Artificial Sequence
  MKO10025491_A_Ift122
  gRNA
tgcatacgccacacagtaca

SEQ ID NO: 25492 - DNA, 20 bp, Artificial Sequence
  MKO10025492_A_Ift140
  gRNA
ggaccagcgaggccgagtac

SEQ ID NO: 25493 - DNA, 20 bp, Artificial Sequence
  MKO10025493_A_Ift140
  gRNA
ccactcctgaaacacgaata

SEQ ID NO: 25494 - DNA, 20 bp, Artificial Sequence
  MKO10025494_A_Ift140
  gRNA
cctaggcacagtgcactatg

SEQ ID NO: 25495 - DNA, 20 bp, Artificial Sequence
  MKO10025495_A_Ift172
  gRNA
aagacaatgacgtattccgc

SEQ ID NO: 25496 - DNA, 20 bp, Artificial Sequence
  MKO10025496_A_Ift172
  gRNA
gcggaatacgtcattgtctt

SEQ ID NO: 25497 - DNA, 20 bp, Artificial Sequence
  MKO10025497_A_Ift172
  gRNA
gattccacaaaaattgccat

SEQ ID NO: 25498 - DNA, 20 bp, Artificial Sequence
  MKO10025498_A_Ift20
  gRNA
actgaacaagctccgagtgt

SEQ ID NO: 25499 - DNA, 20 bp, Artificial Sequence
  MKO10025499_A_Ift20
  gRNA
tgcctcgcccaagatgtcct

SEQ ID NO: 25500 - DNA, 20 bp, Artificial Sequence
  MKO10025500_A_Ift20
  gRNA
tctcttaggccattggtgct

SEQ ID NO: 25501 - DNA, 20 bp, Artificial Sequence
  MKO10025501_A_Ift27
  gRNA
gtgcagatgttccgcagcga

SEQ ID NO: 25502 - DNA, 20 bp, Artificial Sequence
  MKO10025502_A_Ift27
  gRNA
tttccagaagaactacaccc

SEQ ID NO: 25503 - DNA, 20 bp, Artificial Sequence
  MKO10025503_A_Ift27
  gRNA
aaggtccggtctcagacttc

SEQ ID NO: 25504 - DNA, 20 bp, Artificial Sequence
  MKO10025504_A_Ift43
  gRNA
gagtcgactcctgatgagcc

SEQ ID NO: 25505 - DNA, 20 bp, Artificial Sequence
  MKO10025505_A_Ift43
  gRNA
ggctcatcaggagtcgactc

SEQ ID NO: 25506 - DNA, 20 bp, Artificial Sequence
  MKO10025506_A_Ift43
  gRNA
ccccaccgaaaccacctcga

SEQ ID NO: 25507 - DNA, 20 bp, Artificial Sequence
  MKO10025507_A_Ift46
  gRNA
aaccaggtgccacgtcccga

SEQ ID NO: 25508 - DNA, 20 bp, Artificial Sequence
  MKO10025508_A_Ift46
  gRNA
tcaggctttccatcgggacg

SEQ ID NO: 25509 - DNA, 20 bp, Artificial Sequence
  MKO10025509_A_Ift46
  gRNA
cacacctcagttgatcgatc

SEQ ID NO: 25510 - DNA, 20 bp, Artificial Sequence
  MKO10025510_A_Ift52
  gRNA
tttcagacggagtgttgaac

SEQ ID NO: 25511 - DNA, 20 bp, Artificial Sequence
  MKO10025511_A_Ift52
  gRNA
agagaaattagccgagctgc

SEQ ID NO: 25512 - DNA, 20 bp, Artificial Sequence
  MKO10025512_A_Ift52
  gRNA
ttacaagtacttccatccta

SEQ ID NO: 25513 - DNA, 20 bp, Artificial Sequence
  MKO10025513_A_Ift57
  gRNA
cacttaccaagcgataggtc

SEQ ID NO: 25514 - DNA, 20 bp, Artificial Sequence
  MKO10025514_A_Ift57
  gRNA
aacatgtagaactgctcgcc

SEQ ID NO: 25515 - DNA, 20 bp, Artificial Sequence
  MKO10025515_A_Ift57
  gRNA
tttcaggccatcatacccag

SEQ ID NO: 25516 - DNA, 20 bp, Artificial Sequence
  MKO10025516_A_Ift74
  gRNA
cgtggtggtcccttagggac

SEQ ID NO: 25517 - DNA, 20 bp, Artificial Sequence
  MKO10025517_A_Ift74
  gRNA
gatcgtcctgtgacccaaca

SEQ ID NO: 25518 - DNA, 20 bp, Artificial Sequence
  MKO10025518_A_Ift74
  gRNA
acaactagcagactacaaca

SEQ ID NO: 25519 - DNA, 20 bp, Artificial Sequence
  MKO10025519_A_Ift80
  gRNA
tctacccgatagaccttcac

SEQ ID NO: 25520 - DNA, 20 bp, Artificial Sequence
  MKO10025520_A_Ift80
  gRNA
acgaccaccagatcgtcaag

SEQ ID NO: 25521 - DNA, 20 bp, Artificial Sequence
  MKO10025521_A_Ift80
  gRNA
cgcaggacgatggaattatg

SEQ ID NO: 25522 - DNA, 20 bp, Artificial Sequence
  MKO10025522_A_Ift81
  gRNA
gttcaactctcttcatgagc

SEQ ID NO: 25523 - DNA, 20 bp, Artificial Sequence
  MKO10025523_A_Ift81
  gRNA
tactccgctgaagaagccag

SEQ ID NO: 25524 - DNA, 20 bp, Artificial Sequence
  MKO10025524_A_Ift81
  gRNA
aagaagattcaacattcgtt

SEQ ID NO: 25525 - DNA, 20 bp, Artificial Sequence
  MKO10025525_A_Ift88
  gRNA
gtcagcagacccatagctac

SEQ ID NO: 25526 - DNA, 20 bp, Artificial Sequence
  MKO10025526_A_Ift88
  gRNA
taccccatatccagtagcta

SEQ ID NO: 25527 - DNA, 20 bp, Artificial Sequence
  MKO10025527_A_Ift88
  gRNA
gggaggtcttctgccatgac

SEQ ID NO: 25528 - DNA, 20 bp, Artificial Sequence
  MKO10025528_A_Igbp1b
  gRNA
cgcagctcgatttgttcagc

SEQ ID NO: 25529 - DNA, 20 bp, Artificial Sequence
  MKO10025529_A_Igbp1b
  gRNA
tggcaagatggcgtcgttta

SEQ ID NO: 25530 - DNA, 20 bp, Artificial Sequence
  MKO10025530_A_Igbp1b
  gRNA
tgacacgctcatcgtcagcc

SEQ ID NO: 25531 - DNA, 20 bp, Artificial Sequence
  MKO10025531_A_Igbp1
  gRNA
cgaccggggaatagccaagc

SEQ ID NO: 25532 - DNA, 20 bp, Artificial Sequence
  MKO10025532_A_Igbp1
  gRNA
ctatccaaatctcgttgcta

SEQ ID NO: 25533 - DNA, 20 bp, Artificial Sequence
  MKO10025533_A_Igbp1
  gRNA
aagcagatgatgagcgcgtt

SEQ ID NO: 25534 - DNA, 20 bp, Artificial Sequence
  MKO10025534_A_Igdcc3
  gRNA
aatggggcgcgggttgcccg

SEQ ID NO: 25535 - DNA, 20 bp, Artificial Sequence
  MKO10025535_A_Igdcc3
  gRNA
cccgaagtcctgttatctgc

SEQ ID NO: 25536 - DNA, 20 bp, Artificial Sequence
  MKO10025536_A_Igdcc3
  gRNA
cctctcatcgtccgtgtcaa

SEQ ID NO: 25537 - DNA, 20 bp, Artificial Sequence
  MKO10025537_A_Igdcc4
  gRNA
tgcaggctcctaccgctgcg

SEQ ID NO: 25538 - DNA, 20 bp, Artificial Sequence
  MKO10025538_A_Igdcc4
  gRNA
cctcctggctgaatcgttgg

SEQ ID NO: 25539 - DNA, 20 bp, Artificial Sequence
  MKO10025539_A_Igdcc4
  gRNA
gcactcaccctgtcggaccc

SEQ ID NO: 25540 - DNA, 20 bp, Artificial Sequence
  MKO10025540_A_Igf1r
  gRNA
atggcggatcttcacgtagc

SEQ ID NO: 25541 - DNA, 20 bp, Artificial Sequence
  MKO10025541_A_Igf1r
  gRNA
agcagaagtcaccgaatcga

SEQ ID NO: 25542 - DNA, 20 bp, Artificial Sequence
  MKO10025542_A_Igf1r
  gRNA
acattactcggggggccatc

SEQ ID NO: 25543 - DNA, 20 bp, Artificial Sequence
  MKO10025543_A_Igf1
  gRNA
cgatcgtaccttctgagtct

SEQ ID NO: 25544 - DNA, 20 bp, Artificial Sequence
  MKO10025544_A_Igf1
  gRNA
gatgctcttcagttcgtgtg

SEQ ID NO: 25545 - DNA, 20 bp, Artificial Sequence
  MKO10025545_A_Igf1
  gRNA
ccaccagctcagccccgcaa

SEQ ID NO: 25546 - DNA, 20 bp, Artificial Sequence
  MKO10025546_A_Igf2bp1
  gRNA
atattccacctcagctccga

SEQ ID NO: 25547 - DNA, 20 bp, Artificial Sequence
  MKO10025547_A_Igf2bp1
  gRNA
tcaacgtcacctactctaac

SEQ ID NO: 25548 - DNA, 20 bp, Artificial Sequence
  MKO10025548_A_Igf2bp1
  gRNA
ccaggtgctagatagcctgc

SEQ ID NO: 25549 - DNA, 20 bp, Artificial Sequence
  MKO10025549_A_Igf2bp2
  gRNA
gaggcgggatgttccgaatc

SEQ ID NO: 25550 - DNA, 20 bp, Artificial Sequence
  MKO10025550_A_Igf2bp2
  gRNA
tatctttacaggtgttggat

SEQ ID NO: 25551 - DNA, 20 bp, Artificial Sequence
  MKO10025551_A_Igf2bp2
  gRNA
gcaggcttacctcccactgc

SEQ ID NO: 25552 - DNA, 20 bp, Artificial Sequence
  MKO10025552_A_Igf2bp3
  gRNA
accgagtgctcaacttccat

SEQ ID NO: 25553 - DNA, 20 bp, Artificial Sequence
  MKO10025553_A_Igf2bp3
  gRNA
atatcccgccccacttacaa

SEQ ID NO: 25554 - DNA, 20 bp, Artificial Sequence
  MKO10025554_A_Igf2bp3
  gRNA
gatagtttactagtccagta

SEQ ID NO: 25555 - DNA, 20 bp, Artificial Sequence
  MKO10025555_A_Igf2r
  gRNA
gtttataagatcaacgtctg

SEQ ID NO: 25556 - DNA, 20 bp, Artificial Sequence
  MKO10025556_A_Igf2r
  gRNA
atcaacgtgtgtagagacat

SEQ ID NO: 25557 - DNA, 20 bp, Artificial Sequence
  MKO10025557_A_Igf2r
  gRNA
aagttcagccagatcactcc

SEQ ID NO: 25558 - DNA, 20 bp, Artificial Sequence
  MKO10025558_A_Igf2
  gRNA
cgacggttggcacggcttga

SEQ ID NO: 25559 - DNA, 20 bp, Artificial Sequence
  MKO10025559_A_Igf2
  gRNA
cgtgccaaccgtcgcagccg

SEQ ID NO: 25560 - DNA, 20 bp, Artificial Sequence
  MKO10025560_A_Igf2
  gRNA
gaacttgcccacggggtatc

SEQ ID NO: 25561 - DNA, 20 bp, Artificial Sequence
  MKO10025561_A_Igfals
  gRNA
acaacgccatcactagcttg

SEQ ID NO: 25562 - DNA, 20 bp, Artificial Sequence
  MKO10025562_A_Igfals
  gRNA
tcgaggcctgagacgttggc

SEQ ID NO: 25563 - DNA, 20 bp, Artificial Sequence
  MKO10025563_A_Igfals
  gRNA
ggaacaatggctctgagaac

SEQ ID NO: 25564 - DNA, 20 bp, Artificial Sequence
  MKO10025564_A_Igfbp1
  gRNA
gcactttatagagttctcgt

SEQ ID NO: 25565 - DNA, 20 bp, Artificial Sequence
  MKO10025565_A_Igfbp1
  gRNA
ctcagctgccgtgcgttgcc

SEQ ID NO: 25566 - DNA, 20 bp, Artificial Sequence
  MKO10025566_A_Igfbp1
  gRNA
cccgacatgtgccttgccga

SEQ ID NO: 25567 - DNA, 20 bp, Artificial Sequence
  MKO10025567_A_Igfbp2
  gRNA
tccagggggccccgatcatc

SEQ ID NO: 25568 - DNA, 20 bp, Artificial Sequence
  MKO10025568_A_Igfbp2
  gRNA
gctacgctgctatcccaacc

SEQ ID NO: 25569 - DNA, 20 bp, Artificial Sequence
  MKO10025569_A_Igfbp2
  gRNA
accctgcacgcccgagcgtc

SEQ ID NO: 25570 - DNA, 20 bp, Artificial Sequence
  MKO10025570_A_Igfbp3
  gRNA
ctgacttgcgcgctgcgcga

SEQ ID NO: 25571 - DNA, 20 bp, Artificial Sequence
  MKO10025571_A_Igfbp3
  gRNA
gacagcgcacgcgcgtcgca

SEQ ID NO: 25572 - DNA, 20 bp, Artificial Sequence
  MKO10025572_A_Igfbp3
  gRNA
acttctcctccgagtctaag

SEQ ID NO: 25573 - DNA, 20 bp, Artificial Sequence
  MKO10025573_A_Igfbp4
  gRNA
ttgttgcgccacttgcgccc

SEQ ID NO: 25574 - DNA, 20 bp, Artificial Sequence
  MKO10025574_A_Igfbp4
  gRNA
ttgccgttgcggtcacagtt

SEQ ID NO: 25575 - DNA, 20 bp, Artificial Sequence
  MKO10025575_A_Igfbp4
  gRNA
gcccgtgcatcaatgtacgc

SEQ ID NO: 25576 - DNA, 20 bp, Artificial Sequence
  MKO10025576_A_Igfbp5
  gRNA
ttgagccggtacggcatagg

SEQ ID NO: 25577 - DNA, 20 bp, Artificial Sequence
  MKO10025577_A_Igfbp5
  gRNA
gctggccgcctatgccgtac

SEQ ID NO: 25578 - DNA, 20 bp, Artificial Sequence
  MKO10025578_A_Igfbp5
  gRNA
ctcaacgttactgctgtcga

SEQ ID NO: 25579 - DNA, 20 bp, Artificial Sequence
  MKO10025579_A_Igfbp6
  gRNA
gacgcgggatcgcctgcaga

SEQ ID NO: 25580 - DNA, 20 bp, Artificial Sequence
  MKO10025580_A_Igfbp6
  gRNA
ccgattagcagcgcccgcaa

SEQ ID NO: 25581 - DNA, 20 bp, Artificial Sequence
  MKO10025581_A_Igfbp6
  gRNA
tccccagtgtcgttcctcgc

SEQ ID NO: 25582 - DNA, 20 bp, Artificial Sequence
  MKO10025582_A_Igfbp7
  gRNA
ggtgagacccgcgacgcgtg

SEQ ID NO: 25583 - DNA, 20 bp, Artificial Sequence
  MKO10025583_A_Igfbp7
  gRNA
cgggccgcaggcatccgaag

SEQ ID NO: 25584 - DNA, 20 bp, Artificial Sequence
  MKO10025584_A_Igfbp7
  gRNA
ttccatagtgacgcccccca

SEQ ID NO: 25585 - DNA, 20 bp, Artificial Sequence
  MKO10025585_A_Igfbpl1
  gRNA
ggtgtcgtctacccgcgtcg

SEQ ID NO: 25586 - DNA, 20 bp, Artificial Sequence
  MKO10025586_A_Igfbpl1
  gRNA
atctccgcgcgcgacgagtg

SEQ ID NO: 25587 - DNA, 20 bp, Artificial Sequence
  MKO10025587_A_Igfbpl1
  gRNA
tgccacgcagccaacgccat

SEQ ID NO: 25588 - DNA, 20 bp, Artificial Sequence
  MKO10025588_A_Igfl3
  gRNA
cagaacttacaacccctcag

SEQ ID NO: 25589 - DNA, 20 bp, Artificial Sequence
  MKO10025589_A_Igfl3
  gRNA
gcagttcatcccctatctcc

SEQ ID NO: 25590 - DNA, 20 bp, Artificial Sequence
  MKO10025590_A_Igfl3
  gRNA
aagacaaccaactttctctt

SEQ ID NO: 25591 - DNA, 20 bp, Artificial Sequence
  MKO10025591_A_Igflr1
  gRNA
ccataagccgtgctcccgct

SEQ ID NO: 25592 - DNA, 20 bp, Artificial Sequence
  MKO10025592_A_Igflr1
  gRNA
cggcggctccgctgctacac

SEQ ID NO: 25593 - DNA, 20 bp, Artificial Sequence
  MKO10025593_A_Igflr1
  gRNA
ttatggtaccacacgacacc

SEQ ID NO: 25594 - DNA, 20 bp, Artificial Sequence
  MKO10025594_A_Igfn1
  gRNA
acacacctaccctgcggatc

SEQ ID NO: 25595 - DNA, 20 bp, Artificial Sequence
  MKO10025595_A_Igfn1
  gRNA
ctgctacaggccggatccgc

SEQ ID NO: 25596 - DNA, 20 bp, Artificial Sequence
  MKO10025596_A_Igfn1
  gRNA
acaattcatctgtcgccctc

SEQ ID NO: 25597 - DNA, 20 bp, Artificial Sequence
  MKO10025597_A_Ighmbp2
  gRNA
gcccatacagccctgtgcgc

SEQ ID NO: 25598 - DNA, 20 bp, Artificial Sequence
  MKO10025598_A_Ighmbp2
  gRNA
ttggggtggagctgcccaac

SEQ ID NO: 25599 - DNA, 20 bp, Artificial Sequence
  MKO10025599_A_Ighmbp2
  gRNA
gattcgggtcaggaccccag

SEQ ID NO: 25600 - DNA, 20 bp, Artificial Sequence
  MKO10025600_A_Igip
  gRNA
caaccgtgttgtgcatcagc

SEQ ID NO: 25601 - DNA, 20 bp, Artificial Sequence
  MKO10025601_A_Igip
  gRNA
gactttaactaatatacacc

SEQ ID NO: 25602 - DNA, 20 bp, Artificial Sequence
  MKO10025602_A_Igip
  gRNA
tatcaaagctgaagctagcg

SEQ ID NO: 25603 - DNA, 20 bp, Artificial Sequence
  MKO10025603_A_Igj
  gRNA
ctgtaagaaatgcgatcctg

SEQ ID NO: 25604 - DNA, 20 bp, Artificial Sequence
  MKO10025604_A_Igj
  gRNA
ttccaccgaggatcctaatg

SEQ ID NO: 25605 - DNA, 20 bp, Artificial Sequence
  MKO10025605_A_Igj
  gRNA
tcagtgtccctttgaacaac

SEQ ID NO: 25606 - DNA, 20 bp, Artificial Sequence
  MKO10025606_A_Igll1
  gRNA
gtcccaggtgctcgccccat

SEQ ID NO: 25607 - DNA, 20 bp, Artificial Sequence
  MKO10025607_A_Igll1
  gRNA
aagtctcttacctgccggga

SEQ ID NO: 25608 - DNA, 20 bp, Artificial Sequence
  MKO10025608_A_Igll1
  gRNA
gctcaccaaacacactagtg

SEQ ID NO: 25609 - DNA, 20 bp, Artificial Sequence
  MKO10025609_A_Iglon5
  gRNA
aacggtcattgcccgcatac

SEQ ID NO: 25610 - DNA, 20 bp, Artificial Sequence
  MKO10025610_A_Iglon5
  gRNA
agtaacgcattcgtattccc

SEQ ID NO: 25611 - DNA, 20 bp, Artificial Sequence
  MKO10025611_A_Iglon5
  gRNA
cacactgtatagttgtccgc

SEQ ID NO: 25612 - DNA, 20 bp, Artificial Sequence
  MKO10025612_A_Igsf10
  gRNA
cggactcaccttgctccgct

SEQ ID NO: 25613 - DNA, 20 bp, Artificial Sequence
  MKO10025613_A_Igsf10
  gRNA
ggtgagtccgtaaaacgcct

SEQ ID NO: 25614 - DNA, 20 bp, Artificial Sequence
  MKO10025614_A_Igsf10
  gRNA
attccacttgtggaactcgc

SEQ ID NO: 25615 - DNA, 20 bp, Artificial Sequence
  MKO10025615_A_Igsf11
  gRNA
aaatgtttgacggcgccctc

SEQ ID NO: 25616 - DNA, 20 bp, Artificial Sequence
  MKO10025616_A_Igsf11
  gRNA
tgtacttacgtgagataacc

SEQ ID NO: 25617 - DNA, 20 bp, Artificial Sequence
  MKO10025617_A_Igsf11
  gRNA
tccctcggcccacgtacctt

SEQ ID NO: 25618 - DNA, 20 bp, Artificial Sequence
  MKO10025618_A_Igsf1
  gRNA
gcccttactgagtccaatac

SEQ ID NO: 25619 - DNA, 20 bp, Artificial Sequence
  MKO10025619_A_Igsf1
  gRNA
aacttgctggatacccgaga

SEQ ID NO: 25620 - DNA, 20 bp, Artificial Sequence
  MKO10025620_A_Igsf1
  gRNA
gtagattaccaagtcccaac

SEQ ID NO: 25621 - DNA, 20 bp, Artificial Sequence
  MKO10025621_A_Igsf21
  gRNA
ctcggtcgtagatacccacg

SEQ ID NO: 25622 - DNA, 20 bp, Artificial Sequence
  MKO10025622_A_Igsf21
  gRNA
gtatctacgaccgagccacg

SEQ ID NO: 25623 - DNA, 20 bp, Artificial Sequence
  MKO10025623_A_Igsf21
  gRNA
tcccacctccatcgaagtcg

SEQ ID NO: 25624 - DNA, 20 bp, Artificial Sequence
  MKO10025624_A_Igsf23
  gRNA
gagaccgacatgtagtcgtt

SEQ ID NO: 25625 - DNA, 20 bp, Artificial Sequence
  MKO10025625_A_Igsf23
  gRNA
cgccatagccctcatcgtag

SEQ ID NO: 25626 - DNA, 20 bp, Artificial Sequence
  MKO10025626_A_Igsf23
  gRNA
acgtcctcgcactagccaag

SEQ ID NO: 25627 - DNA, 20 bp, Artificial Sequence
  MKO10025627_A_Igsf3
  gRNA
aacaccgatgagcgctactt

SEQ ID NO: 25628 - DNA, 20 bp, Artificial Sequence
  MKO10025628_A_Igsf3
  gRNA
gaagatataccacctccgcc

SEQ ID NO: 25629 - DNA, 20 bp, Artificial Sequence
  MKO10025629_A_Igsf3
  gRNA
caaagagttcaccgtgcgtc

SEQ ID NO: 25630 - DNA, 20 bp, Artificial Sequence
  MKO10025630_A_Igsf5
  gRNA
ttgcacggatcccgagtcac

SEQ ID NO: 25631 - DNA, 20 bp, Artificial Sequence
  MKO10025631_A_Igsf5
  gRNA
atggcccaggtcggcagtgc

SEQ ID NO: 25632 - DNA, 20 bp, Artificial Sequence
  MKO10025632_A_Igsf5
  gRNA
catgtggactcttaaccaaa

SEQ ID NO: 25633 - DNA, 20 bp, Artificial Sequence
  MKO10025633_A_Igsf6
  gRNA
cggttctgacgccgtcacca

SEQ ID NO: 25634 - DNA, 20 bp, Artificial Sequence
  MKO10025634_A_Igsf6
  gRNA
tcaccaagcgctaaacacgt

SEQ ID NO: 25635 - DNA, 20 bp, Artificial Sequence
  MKO10025635_A_Igsf6
  gRNA
gcagagctaagagcactatc

SEQ ID NO: 25636 - DNA, 20 bp, Artificial Sequence
  MKO10025636_A_Igsf8
  gRNA
gggccaatccgacgttcacc

SEQ ID NO: 25637 - DNA, 20 bp, Artificial Sequence
  MKO10025637_A_Igsf8
  gRNA
ggtcccagaccctcgaacat

SEQ ID NO: 25638 - DNA, 20 bp, Artificial Sequence
  MKO10025638_A_Igsf8
  gRNA
acagtctacccctacacgca

SEQ ID NO: 25639 - DNA, 20 bp, Artificial Sequence
  MKO10025639_A_Igsf9b
  gRNA
aggtgcccacggcctgcgag

SEQ ID NO: 25640 - DNA, 20 bp, Artificial Sequence
  MKO10025640_A_Igsf9b
  gRNA
gatactttgcactagcaccg

SEQ ID NO: 25641 - DNA, 20 bp, Artificial Sequence
  MKO10025641_A_Igsf9b
  gRNA
caaactcgggttcctctcgc

SEQ ID NO: 25642 - DNA, 20 bp, Artificial Sequence
  MKO10025642_A_Igsf9
  gRNA
ccgaattgaccccgattacg

SEQ ID NO: 25643 - DNA, 20 bp, Artificial Sequence
  MKO10025643_A_Igsf9
  gRNA
acaactcttacccacgtaat

SEQ ID NO: 25644 - DNA, 20 bp, Artificial Sequence
  MKO10025644_A_Igsf9
  gRNA
ggacgagtccggctgcagac

SEQ ID NO: 25645 - DNA, 20 bp, Artificial Sequence
  MKO10025645_A_Igtp
  gRNA
caagctcgtcattgaaatag

SEQ ID NO: 25646 - DNA, 20 bp, Artificial Sequence
  MKO10025646_A_Igtp
  gRNA
ttgccgtgaacaagttcctc

SEQ ID NO: 25647 - DNA, 20 bp, Artificial Sequence
  MKO10025647_A_Igtp
  gRNA
caaagttgccacaaaatatc

SEQ ID NO: 25648 - DNA, 20 bp, Artificial Sequence
  MKO10025648_A_Ihh
  gRNA
actgctggcgcgcttagcag

SEQ ID NO: 25649 - DNA, 20 bp, Artificial Sequence
  MKO10025649_A_Ihh
  gRNA
ggcgtgagcgccagccgacg

SEQ ID NO: 25650 - DNA, 20 bp, Artificial Sequence
  MKO10025650_A_Ihh
  gRNA
tttacactatgagggccgcg

SEQ ID NO: 25651 - DNA, 20 bp, Artificial Sequence
  MKO10025651_A_Iigp1
  gRNA
gatttgccctccagctttac

SEQ ID NO: 25652 - DNA, 20 bp, Artificial Sequence
  MKO10025652_A_Iigp1
  gRNA
gagaagggatgatattcact

SEQ ID NO: 25653 - DNA, 20 bp, Artificial Sequence
  MKO10025653_A_Iigp1
  gRNA
tccttaattcaatcaaattg

SEQ ID NO: 25654 - DNA, 20 bp, Artificial Sequence
  MKO10025654_A_Ikbip
  gRNA
gagcagcatcgaccgaacat

SEQ ID NO: 25655 - DNA, 20 bp, Artificial Sequence
  MKO10025655_A_Ikbip
  gRNA
tgtgctcatcgaaatcgccc

SEQ ID NO: 25656 - DNA, 20 bp, Artificial Sequence
  MKO10025656_A_Ikbip
  gRNA
gctagtctcaatatcacgta

SEQ ID NO: 25657 - DNA, 20 bp, Artificial Sequence
  MKO10025657_A_Ikbkap
  gRNA
gcagactatgacgtccccag

SEQ ID NO: 25658 - DNA, 20 bp, Artificial Sequence
  MKO10025658_A_Ikbkap
  gRNA
tcccgccttaccaactgcac

SEQ ID NO: 25659 - DNA, 20 bp, Artificial Sequence
  MKO10025659_A_Ikbkap
  gRNA
agactttgaagtgatcgcag

SEQ ID NO: 25660 - DNA, 20 bp, Artificial Sequence
  MKO10025660_A_Ikbkb
  gRNA
gccctacctgattgtgccac

SEQ ID NO: 25661 - DNA, 20 bp, Artificial Sequence
  MKO10025661_A_Ikbkb
  gRNA
cgccatcaagcaatgccgac

SEQ ID NO: 25662 - DNA, 20 bp, Artificial Sequence
  MKO10025662_A_Ikbkb
  gRNA
ttccaaatcccccggtcccc

SEQ ID NO: 25663 - DNA, 20 bp, Artificial Sequence
  MKO10025663_A_Ikbke
  gRNA
cgaatagcttcacgatgttc

SEQ ID NO: 25664 - DNA, 20 bp, Artificial Sequence
  MKO10025664_A_Ikbke
  gRNA
catcgtgaagctattcgcag

SEQ ID NO: 25665 - DNA, 20 bp, Artificial Sequence
  MKO10025665_A_Ikbke
  gRNA
gaaagcccgaacgtgttctc

SEQ ID NO: 25666 - DNA, 20 bp, Artificial Sequence
  MKO10025666_A_Ikbkg
  gRNA
gcgtatgcagaaccagagcg

SEQ ID NO: 25667 - DNA, 20 bp, Artificial Sequence
  MKO10025667_A_Ikbkg
  gRNA
ctctaaagcttgccgatcct

SEQ ID NO: 25668 - DNA, 20 bp, Artificial Sequence
  MKO10025668_A_Ikbkg
  gRNA
caaggatcggcaagctttag

SEQ ID NO: 25669 - DNA, 20 bp, Artificial Sequence
  MKO10025669_A_Ikzf1
  gRNA
acataccggagtgcgtcctc

SEQ ID NO: 25670 - DNA, 20 bp, Artificial Sequence
  MKO10025670_A_Ikzf1
  gRNA
cagaactccaagagtgatcg

SEQ ID NO: 25671 - DNA, 20 bp, Artificial Sequence
  MKO10025671_A_Ikzf1
  gRNA
acccatgcctcgatcactct

SEQ ID NO: 25672 - DNA, 20 bp, Artificial Sequence
  MKO10025672_A_Ikzf2
  gRNA
gacaatgagctttcacccga

SEQ ID NO: 25673 - DNA, 20 bp, Artificial Sequence
  MKO10025673_A_Ikzf2
  gRNA
gggtaaaagaagctccgcac

SEQ ID NO: 25674 - DNA, 20 bp, Artificial Sequence
  MKO10025674_A_Ikzf2
  gRNA
ccacctcgctgctctcaatt

SEQ ID NO: 25675 - DNA, 20 bp, Artificial Sequence
  MKO10025675_A_Ikzf3
  gRNA
tctgcaactacgcatgccaa

SEQ ID NO: 25676 - DNA, 20 bp, Artificial Sequence
  MKO10025676_A_Ikzf3
  gRNA
caagacgttgaagctaatgc

SEQ ID NO: 25677 - DNA, 20 bp, Artificial Sequence
  MKO10025677_A_Ikzf3
  gRNA
atgcgctcacgggacacctt

SEQ ID NO: 25678 - DNA, 20 bp, Artificial Sequence
  MKO10025678_A_Ikzf4
  gRNA
gtcgcacttgagcttgccgt

SEQ ID NO: 25679 - DNA, 20 bp, Artificial Sequence
  MKO10025679_A_Ikzf4
  gRNA
ggccagtgagtgcgtcacgc

SEQ ID NO: 25680 - DNA, 20 bp, Artificial Sequence
  MKO10025680_A_Ikzf4
  gRNA
cgcacttaccactgagcgag

SEQ ID NO: 25681 - DNA, 20 bp, Artificial Sequence
  MKO10025681_A_Ikzf5
  gRNA
cgcggccatcgcatagtcag

SEQ ID NO: 25682 - DNA, 20 bp, Artificial Sequence
  MKO10025682_A_Ikzf5
  gRNA
tagttcctctgactatgcga

SEQ ID NO: 25683 - DNA, 20 bp, Artificial Sequence
  MKO10025683_A_Ikzf5
  gRNA
ttgtttatagctggaacaga

SEQ ID NO: 25684 - DNA, 20 bp, Artificial Sequence
  MKO10025684_A_Ik
  gRNA
ctttactcacgcctcagcag

SEQ ID NO: 25685 - DNA, 20 bp, Artificial Sequence
  MKO10025685_A_Ik
  gRNA
tcatggtgacgtgacttaga

SEQ ID NO: 25686 - DNA, 20 bp, Artificial Sequence
  MKO10025686_A_Ik
  gRNA
gatgccaagggagtacaatg

SEQ ID NO: 25687 - DNA, 20 bp, Artificial Sequence
  MKO10025687_A_Il10ra
  gRNA
gcagtgtttacttatcacga

SEQ ID NO: 25688 - DNA, 20 bp, Artificial Sequence
  MKO10025688_A_Il10ra
  gRNA
atgggacaatccatcccccc

SEQ ID NO: 25689 - DNA, 20 bp, Artificial Sequence
  MKO10025689_A_Il10ra
  gRNA
tcaggtacggaaactcaacc

SEQ ID NO: 25690 - DNA, 20 bp, Artificial Sequence
  MKO10025690_A_Il10rb
  gRNA
tcctccggaacctggagccg

SEQ ID NO: 25691 - DNA, 20 bp, Artificial Sequence
  MKO10025691_A_Il10rb
  gRNA
tgtgtctccgtacgactctg

SEQ ID NO: 25692 - DNA, 20 bp, Artificial Sequence
  MKO10025692_A_Il10rb
  gRNA
agagaagtcgcactgagtcg

SEQ ID NO: 25693 - DNA, 20 bp, Artificial Sequence
  MKO10025693_A_Il10
  gRNA
gctaaccgactccttaatgc

SEQ ID NO: 25694 - DNA, 20 bp, Artificial Sequence
  MKO10025694_A_Il10
  gRNA
aaactggatcatttccgata

SEQ ID NO: 25695 - DNA, 20 bp, Artificial Sequence
  MKO10025695_A_Il10
  gRNA
ttagcagtatgttgtccagc

SEQ ID NO: 25696 - DNA, 20 bp, Artificial Sequence
  MKO10025696_A_Il11ra1
  gRNA
tcctgaagtctcctgccaag

SEQ ID NO: 25697 - DNA, 20 bp, Artificial Sequence
  MKO10025697_A_Il11ra1
  gRNA
caggagacttcaggacgtgc

SEQ ID NO: 25698 - DNA, 20 bp, Artificial Sequence
  MKO10025698_A_Il11ra1
  gRNA
cacttacccagcactcactc

SEQ ID NO: 25699 - DNA, 20 bp, Artificial Sequence
  MKO10025699_A_Il11ra2
  gRNA
cacttacccagcactcactc

SEQ ID NO: 25700 - DNA, 20 bp, Artificial Sequence
  MKO10025700_A_Il11ra2
  gRNA
cccgtgatgctgtgctgccc

SEQ ID NO: 25701 - DNA, 20 bp, Artificial Sequence
  MKO10025701_A_Il11ra2
  gRNA
cctccaggactccagtgtcc

SEQ ID NO: 25702 - DNA, 20 bp, Artificial Sequence
  MKO10025702_A_Il11
  gRNA
actccgccgtttacagctct

SEQ ID NO: 25703 - DNA, 20 bp, Artificial Sequence
  MKO10025703_A_Il11
  gRNA
gtacaatggctgcgccgtgc

SEQ ID NO: 25704 - DNA, 20 bp, Artificial Sequence
  MKO10025704_A_Il11
  gRNA
ccagatagagtcgttgcccc

SEQ ID NO: 25705 - DNA, 20 bp, Artificial Sequence
  MKO10025705_A_Il12a
  gRNA
cttctagaacgagagttgcc

SEQ ID NO: 25706 - DNA, 20 bp, Artificial Sequence
  MKO10025706_A_Il12a
  gRNA
atcgatgtcttcagcagtgc

SEQ ID NO: 25707 - DNA, 20 bp, Artificial Sequence
  MKO10025707_A_Il12a
  gRNA
attgaagacctgtttaccac

SEQ ID NO: 25708 - DNA, 20 bp, Artificial Sequence
  MKO10025708_A_Il12b
  gRNA
cctgcccattgaactggcgt

SEQ ID NO: 25709 - DNA, 20 bp, Artificial Sequence
  MKO10025709_A_Il12b
  gRNA
ccatgagcacgtgaaccgtc

SEQ ID NO: 25710 - DNA, 20 bp, Artificial Sequence
  MKO10025710_A_Il12b
  gRNA
catgtcactgcccgagagtc

SEQ ID NO: 25711 - DNA, 20 bp, Artificial Sequence
  MKO10025711_A_Il12rb1
  gRNA
gccgtatgcccacaacgaat

SEQ ID NO: 25712 - DNA, 20 bp, Artificial Sequence
  MKO10025712_A_Il12rb1
  gRNA
acaatgtttctcacgtcctg

SEQ ID NO: 25713 - DNA, 20 bp, Artificial Sequence
  MKO10025713_A_Il12rb1
  gRNA
caccaaggtccaattcgttg

SEQ ID NO: 25714 - DNA, 20 bp, Artificial Sequence
  MKO10025714_A_Il12rb2
  gRNA
tccgcatacgttcacgttct

SEQ ID NO: 25715 - DNA, 20 bp, Artificial Sequence
  MKO10025715_A_Il12rb2
  gRNA
tcgtcagaattgcaatcgcc

SEQ ID NO: 25716 - DNA, 20 bp, Artificial Sequence
  MKO10025716_A_Il12rb2
  gRNA
agcctcttaacagcacgtcc

SEQ ID NO: 25717 - DNA, 20 bp, Artificial Sequence
  MKO10025717_A_Il13ra1
  gRNA
gagacgctcaaattcgtcac

SEQ ID NO: 25718 - DNA, 20 bp, Artificial Sequence
  MKO10025718_A_Il13ra1
  gRNA
aagtgcatctcaccccctga

SEQ ID NO: 25719 - DNA, 20 bp, Artificial Sequence
  MKO10025719_A_Il13ra1
  gRNA
tccagaaactcatcgtaaag

SEQ ID NO: 25720 - DNA, 20 bp, Artificial Sequence
  MKO10025720_A_Il13ra2
  gRNA
agctgtcgctatcaacattt

SEQ ID NO: 25721 - DNA, 20 bp, Artificial Sequence
  MKO10025721_A_Il13ra2
  gRNA
gaaatgttgatagcgacagc

SEQ ID NO: 25722 - DNA, 20 bp, Artificial Sequence
  MKO10025722_A_Il13ra2
  gRNA
atagtctgatgagtccaagt

SEQ ID NO: 25723 - DNA, 20 bp, Artificial Sequence
  MKO10025723_A_Il13
  gRNA
tccttaccccgccagcggcc

SEQ ID NO: 25724 - DNA, 20 bp, Artificial Sequence
  MKO10025724_A_Il13
  gRNA
ataccatgctgccgttgcac

SEQ ID NO: 25725 - DNA, 20 bp, Artificial Sequence
  MKO10025725_A_Il13
  gRNA
ttaccgtagtgggggccttg

SEQ ID NO: 25726 - DNA, 20 bp, Artificial Sequence
  MKO10025726_A_Il15ra
  gRNA
ttctcagccgtgccgtgttg

SEQ ID NO: 25727 - DNA, 20 bp, Artificial Sequence
  MKO10025727_A_Il15ra
  gRNA
tcaacacggcacggctgaga

SEQ ID NO: 25728 - DNA, 20 bp, Artificial Sequence
  MKO10025728_A_Il15ra
  gRNA
atactcacctttcgtcattt

SEQ ID NO: 25729 - DNA, 20 bp, Artificial Sequence
  MKO10025729_A_Il15
  gRNA
cattgcagtaactttgcaac

SEQ ID NO: 25730 - DNA, 20 bp, Artificial Sequence
  MKO10025730_A_Il15
  gRNA
atggatgtattcctcatata

SEQ ID NO: 25731 - DNA, 20 bp, Artificial Sequence
  MKO10025731_A_Il15
  gRNA
tccctaaaacagaggccaac

SEQ ID NO: 25732 - DNA, 20 bp, Artificial Sequence
  MKO10025732_A_Il16
  gRNA
gacagcatttacggccctat

SEQ ID NO: 25733 - DNA, 20 bp, Artificial Sequence
  MKO10025733_A_Il16
  gRNA
aatctgcagctcccaccgac

SEQ ID NO: 25734 - DNA, 20 bp, Artificial Sequence
  MKO10025734_A_Il16
  gRNA
ggtgttaacccctacagtgc

SEQ ID NO: 25735 - DNA, 20 bp, Artificial Sequence
  MKO10025735_A_Il17a
  gRNA
tcttacgtactggagagtcc

SEQ ID NO: 25736 - DNA, 20 bp, Artificial Sequence
  MKO10025736_A_Il17a
  gRNA
cgtggcctcgattgtccgcc

SEQ ID NO: 25737 - DNA, 20 bp, Artificial Sequence
  MKO10025737_A_Il17a
  gRNA
gacgcgcaaacatgagtcca

SEQ ID NO: 25738 - DNA, 20 bp, Artificial Sequence
  MKO10025738_A_Il17b
  gRNA
cgaggcgcggtgcctatgtt

SEQ ID NO: 25739 - DNA, 20 bp, Artificial Sequence
  MKO10025739_A_Il17b
  gRNA
agtaaagccctacgctcgaa

SEQ ID NO: 25740 - DNA, 20 bp, Artificial Sequence
  MKO10025740_A_Il17b
  gRNA
tgggcctcatcaggtgccgc

SEQ ID NO: 25741 - DNA, 20 bp, Artificial Sequence
  MKO10025741_A_Il17c
  gRNA
tagggtccgccgtgccgtct

SEQ ID NO: 25742 - DNA, 20 bp, Artificial Sequence
  MKO10025742_A_Il17c
  gRNA
acctggcacttcgagttagc

SEQ ID NO: 25743 - DNA, 20 bp, Artificial Sequence
  MKO10025743_A_Il17c
  gRNA
acgagcgctccatctcacca

SEQ ID NO: 25744 - DNA, 20 bp, Artificial Sequence
  MKO10025744_A_Il17d
  gRNA
aggtacctcggaaagcgagc

SEQ ID NO: 25745 - DNA, 20 bp, Artificial Sequence
  MKO10025745_A_Il17d
  gRNA
acctgcgcagcgtgtcgccc

SEQ ID NO: 25746 - DNA, 20 bp, Artificial Sequence
  MKO10025746_A_Il17d
  gRNA
ggccggtccgcgcagtcccg

SEQ ID NO: 25747 - DNA, 20 bp, Artificial Sequence
  MKO10025747_A_Il17f
  gRNA
gtgcacccgtgaaacagcca

SEQ ID NO: 25748 - DNA, 20 bp, Artificial Sequence
  MKO10025748_A_Il17f
  gRNA
tgcagcgttgtcaggccgct

SEQ ID NO: 25749 - DNA, 20 bp, Artificial Sequence
  MKO10025749_A_Il17f
  gRNA
agaaccgctccagttcccca

SEQ ID NO: 25750 - DNA, 20 bp, Artificial Sequence
  MKO10025750_A_Il17ra
  gRNA
ctcctcaacaggtacttgtc

SEQ ID NO: 25751 - DNA, 20 bp, Artificial Sequence
  MKO10025751_A_Il17ra
  gRNA
tgctgcagcatcaccgtaag

SEQ ID NO: 25752 - DNA, 20 bp, Artificial Sequence
  MKO10025752_A_Il17ra
  gRNA
ttgtggtttgggtccccatc

SEQ ID NO: 25753 - DNA, 20 bp, Artificial Sequence
  MKO10025753_A_Il17rb
  gRNA
gtacttgctttgccgccgga

SEQ ID NO: 25754 - DNA, 20 bp, Artificial Sequence
  MKO10025754_A_Il17rb
  gRNA
tttgccactcacgcagatct

SEQ ID NO: 25755 - DNA, 20 bp, Artificial Sequence
  MKO10025755_A_Il17rb
  gRNA
tctgtgaacttcacctcgcc

SEQ ID NO: 25756 - DNA, 20 bp, Artificial Sequence
  MKO10025756_A_Il17rc
  gRNA
acttaccatgcacggccaag

SEQ ID NO: 25757 - DNA, 20 bp, Artificial Sequence
  MKO10025757_A_Il17rc
  gRNA
gcaccaggtcagcgggcacc

SEQ ID NO: 25758 - DNA, 20 bp, Artificial Sequence
  MKO10025758_A_Il17rc
  gRNA
atacttaccccagaggtggc

SEQ ID NO: 25759 - DNA, 20 bp, Artificial Sequence
  MKO10025759_A_Il17rd
  gRNA
ccagtacgcttgccacgacc

SEQ ID NO: 25760 - DNA, 20 bp, Artificial Sequence
  MKO10025760_A_Il17rd
  gRNA
ttacttactgtcgtatctga

SEQ ID NO: 25761 - DNA, 20 bp, Artificial Sequence
  MKO10025761_A_Il17rd
  gRNA
gtggcaagcgtactggctga

SEQ ID NO: 25762 - DNA, 20 bp, Artificial Sequence
  MKO10025762_A_Il17re
  gRNA
ccatgaccatctgattgtgc

SEQ ID NO: 25763 - DNA, 20 bp, Artificial Sequence
  MKO10025763_A_Il17re
  gRNA
gcctcacagtgtcctcttgc

SEQ ID NO: 25764 - DNA, 20 bp, Artificial Sequence
  MKO10025764_A_Il17re
  gRNA
ggtgcaagtccacattctcc

SEQ ID NO: 25765 - DNA, 20 bp, Artificial Sequence
  MKO10025765_A_Il18bp
  gRNA
gaagttggtacttcgtaggg

SEQ ID NO: 25766 - DNA, 20 bp, Artificial Sequence
  MKO10025766_A_Il18bp
  gRNA
ggttggctttatgcaacccc

SEQ ID NO: 25767 - DNA, 20 bp, Artificial Sequence
  MKO10025767_A_Il18bp
  gRNA
tgctttccagtcgcgagcac

SEQ ID NO: 25768 - DNA, 20 bp, Artificial Sequence
  MKO10025768_A_Il18r1
  gRNA
atcctgaaggatgccgagtt

SEQ ID NO: 25769 - DNA, 20 bp, Artificial Sequence
  MKO10025769_A_Il18r1
  gRNA
ttagaaatgatcgtcgcaat

SEQ ID NO: 25770 - DNA, 20 bp, Artificial Sequence
  MKO10025770_A_Il18r1
  gRNA
tcaccgatcacaaattcatg

SEQ ID NO: 25771 - DNA, 20 bp, Artificial Sequence
  MKO10025771_A_Il18rap
  gRNA
tccgaggttgcatgtaccac

SEQ ID NO: 25772 - DNA, 20 bp, Artificial Sequence
  MKO10025772_A_Il18rap
  gRNA
tacgtccagtgtatctgtaa

SEQ ID NO: 25773 - DNA, 20 bp, Artificial Sequence
  MKO10025773_A_Il18rap
  gRNA
tcggagtggaagtccactag

SEQ ID NO: 25774 - DNA, 20 bp, Artificial Sequence
  MKO10025774_A_Il18
  gRNA
actgtacaaccgcagtaata

SEQ ID NO: 25775 - DNA, 20 bp, Artificial Sequence
  MKO10025775_A_Il18
  gRNA
tcagtcatatcctcgaacac

SEQ ID NO: 25776 - DNA, 20 bp, Artificial Sequence
  MKO10025776_A_Il18
  gRNA
gtacatgtatattatcagtc

SEQ ID NO: 25777 - DNA, 20 bp, Artificial Sequence
  MKO10025777_A_Il19
  gRNA
ggcgtttcgtgtcaggctgc

SEQ ID NO: 25778 - DNA, 20 bp, Artificial Sequence
  MKO10025778_A_Il19
  gRNA
tcacctgattgtagttgtca

SEQ ID NO: 25779 - DNA, 20 bp, Artificial Sequence
  MKO10025779_A_Il19
  gRNA
tcagttctcctagagactta

SEQ ID NO: 25780 - DNA, 20 bp, Artificial Sequence
  MKO10025780_A_Il1a
  gRNA
gtcgtctcctcccgacgagt

SEQ ID NO: 25781 - DNA, 20 bp, Artificial Sequence
  MKO10025781_A_Il1a
  gRNA
caactgttcgtgagcgctca

SEQ ID NO: 25782 - DNA, 20 bp, Artificial Sequence
  MKO10025782_A_Il1a
  gRNA
acaaactgatgaagctcgtc

SEQ ID NO: 25783 - DNA, 20 bp, Artificial Sequence
  MKO10025783_A_Il1b
  gRNA
tgtgccgtctttcattacac

SEQ ID NO: 25784 - DNA, 20 bp, Artificial Sequence
  MKO10025784_A_Il1b
  gRNA
ccattagacaactgcactac

SEQ ID NO: 25785 - DNA, 20 bp, Artificial Sequence
  MKO10025785_A_Il1b
  gRNA
ctgcttccaaacctttgacc

SEQ ID NO: 25786 - DNA, 20 bp, Artificial Sequence
  MKO10025786_A_Il1f10
  gRNA
gattcagacaattatagtcc

SEQ ID NO: 25787 - DNA, 20 bp, Artificial Sequence
  MKO10025787_A_Il1f10
  gRNA
ctcttgtctttacacacgcc

SEQ ID NO: 25788 - DNA, 20 bp, Artificial Sequence
  MKO10025788_A_Il1f10
  gRNA
cccacaggatgtgaacatcg

SEQ ID NO: 25789 - DNA, 20 bp, Artificial Sequence
  MKO10025789_A_Il1f5
  gRNA
ggcttcctccttgaacgccc

SEQ ID NO: 25790 - DNA, 20 bp, Artificial Sequence
  MKO10025790_A_Il1f5
  gRNA
ttcgaatccgctgcctaccc

SEQ ID NO: 25791 - DNA, 20 bp, Artificial Sequence
  MKO10025791_A_Il1f5
  gRNA
gtaggcagcggattcgaagc

SEQ ID NO: 25792 - DNA, 20 bp, Artificial Sequence
  MKO10025792_A_Il1f6
  gRNA
cactgacttcgagatgattg

SEQ ID NO: 25793 - DNA, 20 bp, Artificial Sequence
  MKO10025793_A_Il1f6
  gRNA
tcctgaacatgtctaagcga

SEQ ID NO: 25794 - DNA, 20 bp, Artificial Sequence
  MKO10025794_A_Il1f6
  gRNA
accttcgcttagacatgttc

SEQ ID NO: 25795 - DNA, 20 bp, Artificial Sequence
  MKO10025795_A_Il1f8
  gRNA
ccgaatcataacactatgca

SEQ ID NO: 25796 - DNA, 20 bp, Artificial Sequence
  MKO10025796_A_Il1f8
  gRNA
ctataaaccagccaggatag

SEQ ID NO: 25797 - DNA, 20 bp, Artificial Sequence
  MKO10025797_A_Il1f8
  gRNA
tcccacatttgaatactctt

SEQ ID NO: 25798 - DNA, 20 bp, Artificial Sequence
  MKO10025798_A_Il1f9
  gRNA
tacgaaagatccacacctgc

SEQ ID NO: 25799 - DNA, 20 bp, Artificial Sequence
  MKO10025799_A_Il1f9
  gRNA
cgaagccacagagtaacccc

SEQ ID NO: 25800 - DNA, 20 bp, Artificial Sequence
  MKO10025800_A_Il1f9
  gRNA
acaccctactttgctgctaa

SEQ ID NO: 25801 - DNA, 20 bp, Artificial Sequence
  MKO10025801_A_Il1r1
  gRNA
agtcccggtccgctgatatg

SEQ ID NO: 25802 - DNA, 20 bp, Artificial Sequence
  MKO10025802_A_Il1r1
  gRNA
gccgtatgtcctatacgttc

SEQ ID NO: 25803 - DNA, 20 bp, Artificial Sequence
  MKO10025803_A_Il1r1
  gRNA
ttgcttcccccggaacgtat

SEQ ID NO: 25804 - DNA, 20 bp, Artificial Sequence
  MKO10025804_A_Il1r2
  gRNA
cctctagggcgccatactct

SEQ ID NO: 25805 - DNA, 20 bp, Artificial Sequence
  MKO10025805_A_Il1r2
  gRNA
tatctttccatcagcgttgc

SEQ ID NO: 25806 - DNA, 20 bp, Artificial Sequence
  MKO10025806_A_Il1r2
  gRNA
attgatatccaacacgtcca

SEQ ID NO: 25807 - DNA, 20 bp, Artificial Sequence
  MKO10025807_A_Il1rapl1
  gRNA
gaagagcctatcgcctttga

SEQ ID NO: 25808 - DNA, 20 bp, Artificial Sequence
  MKO10025808_A_Il1rapl1
  gRNA
tactcgctcgcccaaagtgc

SEQ ID NO: 25809 - DNA, 20 bp, Artificial Sequence
  MKO10025809_A_Il1rapl1
  gRNA
aatttcatgccgagacatag

SEQ ID NO: 25810 - DNA, 20 bp, Artificial Sequence
  MKO10025810_A_Il1rapl2
  gRNA
accttgtaccatacgacatc

SEQ ID NO: 25811 - DNA, 20 bp, Artificial Sequence
  MKO10025811_A_Il1rapl2
  gRNA
acctgatgtcgtatggtaca

SEQ ID NO: 25812 - DNA, 20 bp, Artificial Sequence
  MKO10025812_A_Il1rapl2
  gRNA
aagtgttatagatgtccagc

SEQ ID NO: 25813 - DNA, 20 bp, Artificial Sequence
  MKO10025813_A_Il1rap
  gRNA
agggggcacttgattcgagc

SEQ ID NO: 25814 - DNA, 20 bp, Artificial Sequence
  MKO10025814_A_Il1rap
  gRNA
accttataccaagtgaccga

SEQ ID NO: 25815 - DNA, 20 bp, Artificial Sequence
  MKO10025815_A_Il1rap
  gRNA
tgcagcttacctcaacatgc

SEQ ID NO: 25816 - DNA, 20 bp, Artificial Sequence
  MKO10025816_A_Il1rl1
  gRNA
gacttgtaggtaaatcgtcc

SEQ ID NO: 25817 - DNA, 20 bp, Artificial Sequence
  MKO10025817_A_Il1rl1
  gRNA
ataagtcgagcgtcctcttt

(The sequence listing continues in the following parts.)

1. A vector comprising a 5′ long terminal repeat (LTR) sequence, a U6 promoter sequence, a BsmB1 restriction site, an EFS sequence, an sgRNA expression cassette, a Thy1.1 cassette, a 3′ LTR sequence and an ampicillin resistance gene sequence (AmpR).

2. The vector of claim 1, wherein the vector comprises a nucleic acid sequence selected from the group consisting of SEQ ID NO: 129,213, SEQ ID NO: 129,214, and SEQ ID NO: 129,215.

3. The vector of claim 1, wherein the sgRNA expression cassette expresses an sgRNA comprising a nucleotide sequence selected from the group consisting of SEQ ID NOs: 1-129,209.

4. The vector of claim 1, wherein the sgRNA expression cassette expresses an sgRNA comprising a nucleotide sequence selected from the group consisting of SEQ ID NOs: 129,222-140,680.

5. The vector of claim 1, wherein the sgRNA expression cassette expresses an sgRNA consisting of a nucleotide sequence selected from the group consisting of SEQ ID NOs: 1-129,209.

6. The vector of claim 1, wherein the sgRNA expression cassette expresses an sgRNA consisting of a nucleotide sequence selected from the group consisting of SEQ ID NOs: 129,222-140,680.

7. An sgRNA library comprising a plurality of vectors, wherein each vector comprises an expression cassette for an sgRNA comprising a nucleotide sequence selected from the group consisting of SEQ ID NOs: 1-129,209.

8. The sgRNA library of claim 7, wherein each vector comprises an expression cassette for an sgRNA consisting of a nucleotide sequence selected from the group consisting of SEQ ID NOs: 1-129,209.

9. An sgRNA library comprising a plurality of vectors, wherein each vector comprises an expression cassette for an sgRNA comprising a nucleotide sequence selected from the group consisting of SEQ ID NOs: 129,222-140,680.

10. The sgRNA library of claim 9, wherein each vector comprises an expression cassette for an sgRNA consisting of a nucleotide sequence selected from the group consisting of SEQ ID NOs: 129,222-140,680.

11. The sgRNA library of claim 7, wherein the plurality of vectors comprise a 5′ long terminal repeat (LTR) sequence, a U6 promoter sequence, a BsmB1 restriction site, an EFS sequence, an sgRNA expression cassette, a Thy1.1 cassette, a 3′ LTR sequence and an ampicillin resistance gene sequence (AmpR).

12. A method of performing genome editing and screening of a T cell in vitro, the method comprising:
contacting the T cell with Cas9 and an sgRNA library, wherein the sgRNA library comprises a plurality of vectors, wherein each vector comprises an expression cassette for an sgRNA comprising a nucleotide sequence selected from the group consisting of SEQ ID NOs: 1-129,209, whereby the T cell undergoes genome editing; and
screening the T cell in vitro.

13. A method of performing genome editing and screening of a T cell in vitro, the method comprising:
contacting the T cell with Cas9 and an sgRNA library, wherein the sgRNA library comprises a plurality of vectors, wherein each vector comprises an expression cassette for an sgRNA comprising a nucleotide sequence selected from the group consisting of SEQ ID NOs: 129,222-140,680, whereby the T cell undergoes genome editing; and
screening the T cell in vitro.

14. A method of performing genome editing and screening of a T cell in vivo, the method comprising:
contacting an isolated T cell with Cas9 and an sgRNA library, wherein the sgRNA library comprises a plurality of vectors, wherein each vector comprises an expression cassette for an sgRNA comprising a nucleotide sequence selected from the group consisting of SEQ ID NOs: 1-129,209, whereby the T cell undergoes genome editing to generate a modified T cell,
administering to an animal the modified T cell, and
screening the T cell in vivo.

15. A method of performing genome editing and screening of a T cell in vivo, the method comprising:
contacting an isolated T cell with Cas9 and an sgRNA library, wherein the sgRNA library comprises a plurality of vectors, wherein each vector comprises an expression cassette for an sgRNA comprising a nucleotide sequence selected from the group consisting of SEQ ID NOs: 129,222-140,680, whereby the T cell undergoes genome editing to generate a modified T cell,
administering to an animal the modified T cell, and
screening the T cell in vivo.

16. The method of claim 12, wherein each vector comprises an expression cassette for an sgRNA consisting of a nucleotide sequence selected from the group consisting of SEQ ID NOs: 1-129,209.

17. The method of claim 13, wherein each vector comprises an expression cassette for an sgRNA consisting of a nucleotide sequence selected from the group consisting of SEQ ID NOs: 129,222-140,680.

18. The method of claim 12, wherein the T cell is selected from the group consisting of: a CD8+ cell, a CD4+ cell, or a T regulatory (Treg) cell, a Th1 cell, a Th2 cell, a Th17 cell, a follicular helper T cell (Tfh), a T memory cell, a T effector cell, a T effector memory cell, an engineered T cell, and a CAR T cell.

19. The method of claim 14, further comprising isolating and/or enriching a modified T cell.

20. The method of claim 14, wherein the animal is a human.

21. The method of claim 14, wherein the screening provides information about a gene involved in a condition afflicting the animal.

22. The method of claim 21, wherein the condition is cancer.

23. The method of claim 14, wherein screening comprises at least one method selected from the group consisting of nucleotide sequencing, sgRNA PCR, and flow cytometry.

24. A kit comprising an sgRNA library comprising a plurality of vectors, wherein each vector comprises an expression cassette for an sgRNA comprising a nucleotide sequence selected from the group consisting of SEQ ID NOs: 1-129,209, and instructional material for use thereof

25. The kit of claim 24, wherein each of the plurality of vectors comprises a 5′ long terminal repeat (LTR) sequence, a U6 promoter sequence, a BsmB1 restriction site, an EFS sequence, an sgRNA expression cassette, a Thy1.1 cassette, a 3′ LTR sequence and an ampicillin resistance gene sequence (AmpR).

26. The kit of claim 24, further comprising a Cas9.

27. A kit comprising an sgRNA library comprising a plurality of vectors, wherein each vector comprises an expression cassette for an sgRNA comprising a nucleotide sequence selected from the group consisting of SEQ ID NOs: 129,222-140,680, and instructional material for use thereof.

28. The kit of claim 27, wherein each of the plurality of vectors comprises a 5′ long terminal repeat (LTR) sequence, a U6 promoter sequence, a BsmB1 restriction site, an EFS sequence, an sgRNA expression cassette, a Thy1.1 cassette, a 3′ LTR sequence and an ampicillin resistance gene sequence (AmpR).

29. The kit of claim 27, further comprising a Cas9.

30. A vector comprising a 5′ long terminal repeat (LTR) sequence, a U6 promoter sequence, a BsmB1 restriction site, an EFS sequence, an sgRNA expression cassette, an mCherry sequence, a 2A peptide, a cOVA sequence, a 3′ LTR sequence and an ampicillin resistance gene sequence (AmpR).

31. The vector of claim 30, wherein the vector comprises the nucleic acid sequence of SEQ ID NO: 129,216.

32. A vector comprising a 5′ inverted terminal repeat (ITR) sequence, a U6 promoter sequence, a BbsI restriction site, an sgRNA expression cassette, an EFS sequence, a SB100x cassette, a 3′ ITR sequence and an ampicillin resistance gene sequence (AmpR).

33. The vector of claim 32, wherein vector comprises the nucleic acid sequence of SEQ ID NO: 129,217.

34. A vector comprising a 5′ inverted terminal repeat (ITR) sequence, a U6 promoter sequence, a BbsI restriction site, an sgRNA expression cassette, an EFS sequence, a SB100x cassette, a Thy1.1 cassette, a 3′ ITR sequence and an ampicillin resistance gene sequence (AmpR).

35. The vector of claim 34, wherein vector comprises the nucleic acid sequence of SEQ ID NO: 129,218.

36. A vector comprising a 5′ inverted terminal repeat (ITR) sequence, a U6 promoter sequence, a BbsI restriction site, an sgRNA expression cassette, a 3′ ITR sequence and an ampicillin resistance gene sequence (AmpR).

37. The vector of claim 36, wherein vector comprises the nucleic acid sequence of SEQ ID NO: 129,219.

38. A vector comprising a 5′ inverted terminal repeat (ITR) sequence, a U6 promoter sequence, a BbsI restriction site, an sgRNA expression cassette, an EFS sequence, a Thy1.1 cassette, a 3′ ITR sequence and an ampicillin resistance gene sequence (AmpR).

39. The vector of claim 38, wherein the vector comprises the nucleic acid sequence of SEQ ID NO: 129,220.

40. A vector comprising a 5′ inverted terminal repeat (ITR) sequence, a U6 promoter sequence, a BbsI restriction site, an sgRNA expression cassette, an EFS sequence, a SB100x cassette, a GFP-NLS fusion cassette, a 3′ ITR sequence and an ampicillin resistance gene sequence (AmpR).

41. The vector of claim 40, wherein the vector comprises the nucleic acid sequence of SEQ ID NO: 129,221.

42. The vector of claim 30, wherein the sgRNA expression cassette expresses an sgRNA comprising a nucleotide sequence selected from the group consisting of SEQ ID NOs: 1-129,209.

43. The vector of claim 30, wherein the sgRNA expression cassette expresses an sgRNA comprising a nucleotide sequence selected from the group consisting of SEQ ID NOs: 129,222-140,680.

44. The vector of claim 30, wherein the sgRNA expression cassette expresses an sgRNA consisting of a nucleotide sequence selected from the group consisting of SEQ ID NOs: 1-129,209.

45. The vector of claim 30, wherein the sgRNA expression cassette expresses an sgRNA consisting of a nucleotide sequence selected from the group consisting of SEQ ID NOs: 129,222-140,680.
